United States Patent Application Publication US 2011/0277190 A1 - sequence listing, part 7

SEQ ID NO: 27172 - protein, 332 aa, Zea mays
MALEAVVLSQQGSRFGCGAMAAGGPWSGLFFSGMEGVVEIGSGAGGGRDVAGCSPPQLLQEPAARALPVASSVGSASGGAGQDAPAALAVTATAAAGTGRRKRRRMRPLKNEEEVESQRMVHIAVERNRRKQMNEYLAALRSLMPPAYTQRGDQASIVGGAINFVKELEQLLQSLEAQQRRSSRRQGPACAVDPDDAGPFADFFTFPQYSMCAAAAAPSENPGADADAEQEASGSKPSGVADVEATMVESHANLRVLSRRRPRQLLRLVLGLQGYRLTVLHLNMSSAGHMVLYSFSLKVEDDCPLTSVDEIAGAAHQIVEKINEEQGGGSLE

SEQ ID NO: 27173 - protein, 315 aa, Arabidopsis thaliana
MADEIGFFQLNTGAKIPSVGLGTWQAAPGVVGDAVAAAVKIGYQHIDCASRYGNEIEIGKVLKKLFDDGVVKREKLFITSKIWLTDLDPPDVQDALNRTLQDLQLDYVDLYLMHWPVRLKKGTVDFKPENIMPIDIPSTWKAMEALVDSGKARAIGVSNFSTKKLSDLVEAARVPPAVNQVECHPSWQQHKLHEFCKSKGIHLSGYSPLGSPGTTWVKADVLKSPVIEMIAKEIGKSPAQTALRWGLQMGHSILPKSTNEGRIRENFDVLGWSIPKEMFDKFSKIEQARLVQGTSFVHETLSPYKTLEELWDGEI

SEQ ID NO: 27174 - protein, 225 aa, Vitis vinifera
MGRGKIEIKRIENTTNRQVTFCKRRNGLLKKAYELSVLCDAEVALIVFSSRGRLYEYANNSVRTTIERYKKVCSDSSNTGSVSEANAQFYQQEASKLRRQIRDIQNLNRHILGEALSSLNFKELKNLETRLEKGISRIRSKKNELLFAEIEYMQKREIELQNSNLFLRAQIAENERAQQQMNLMPGSQYESVPQQPYDSQNLLPVNLLDPNHHYSRHDQTALQLV

SEQ ID NO: 27175 - protein, 402 aa, Xanthomonas campestris pv. campestris str. ATCC 33913
MTNAPAALTAHYAAELESIQSQGLFKSERIITGPQSAQITLADGRSVLNFCANNYLGLADHPDIIQAAKDALDTHGFGMASVRFICGTQDLHKQLERTIADFFGTEDTILYAACFDANGGLFEPLLGEHDAIISDALNHASIIDGVRLCKAKRFRYANCDMADLETQLQAADAAGCKTKLITSDGVFSMDGFIAPLDEITALARKYNALVHIDECHATGFLGATGRGSAEVKGVMDQIDIFTGTLGKAMGGALGGFTTAKREVIELLRQRSRPYLFSNSLPPHVVAAGIKAFEMLDAAGELRTQLVENTRYFRERMTAAGFDVKPGVHPISPVMLYDAPLAQRFAERLLEEGIYAIGFFFPVVPKGQARIRTQISAAHTREQLDQAIDAFTRIGHELKVIGG

SEQ ID NO: 27176 - protein, 682 aa, Helianthus annuus
MSSSNDNNNNFINNPLTSTKDLFPSTSLSLTLGLFRDGEDAVDDRKEEAANTTVTEISSETSGPVRSRSDDDDFDADPDVDDGDDASNKNNKSKKRKKYHRHTADQIREMEALFKESPHPDEKQRQQLSKRLGLHPRQVKFWFQNRRTQIKTIQERHENSLLKSELDKLGEENKLLRETIKKGTCTNCGFGSSSKDVHTYVDEQQLRVENAKLRAEIEKLRNISWGNIHREHHQRNSCSVGNDHENKSSLDLCSGLFGLEKSRVNGGCRSGLWKSFVQMASAGAPLWVKSLETGREILNYDEYLTKFSTVDSSNVQRLRFIEASRDSGVVFVDLPQLVRSFMDVKEFKEMFPCMISKAATLDVICNGEGPNRKGAVQLMFAELQMLTPLVATREVYFVRYSKQLTAEKWAIVDVSIDNVEKNIDASLARCRKRPSGCIIEDKSNGHCKVTWIEHWECQKSVSHSMFRAIINSGLAFGARNWMATLQQQCERLVFFLATNVPTKDSCGIGTLAGRKSILKLAQRMNVRVLVRALGASSYHTWKKIPSKTGYDIRASRKNLNDAGEPLGVILCAVSSIWLPVSHTLLFDFLRDETRRNEWDIMSNGGPVQSIANLAKGQDQGNTVSIHTMKWKENMWMIQDSCTNAYESMVVCAPVAVTAMQSIMAGCDSSNIAILTLGFFNST

SEQ ID NO: 27177 - protein, 548 aa, Listeria monocytogenes EGD-e
MTKFAQKTIYQVYPKSFYDTTGDGTGDIPGITAKLDYLQKLGIEMIWLNPFYPSPQNDNGYDIADYTAVDPLFGTMDDVTTLIKEAKKRNIGIMIDLVLNHTSTEHPWFKKALAGDPFYRDFYYFRPAKADGSPPTNWVSKFGGNAWEKLPDSSEYYLHLYDVTQADLDWANPNVREALFAVVNFWIDKGVEGFRLDVLNVIAKPKFLEDDFEGDGRRFYTDGPGIHAYLKELHERTFGDKPIITVGEMSSTDIDNCIRYSNPDEKELSMVFHFHHLKVDYPDGEKWRLADVNFENLKSIFHTWQVAMSDENGWDALFWNNHDQPRALGRFASDKPEHYYHSATLLGATIHFMRGTPFVYMGEEIGMMNPKFPTIDDYVDVETLNHFDILQKNGLSEQEVMEIIKERSRDNSRTPMQWDDSQNAGFTTGTPWLKVADNANEINVQTALSNKTSIFYFYQKLIALRKEHPVIQTGDYTPYLTEEDSIIAYKRSNETTSLLSIHHFGSEKKKIQLPTEFLNAEVLLSNYERQRISSELELAPYETLTLIQ

SEQ ID NO: 27178 - protein, 299 aa, Arabidopsis thaliana
  misc_feature (70)..(70): Xaa can be any naturally occurring amino acid
  misc_feature (179)..(179): Xaa can be any naturally occurring amino acid
  misc_feature (220)..(220): Xaa can be any naturally occurring amino acid
  misc_feature (228)..(228): Xaa can be any naturally occurring amino acid
  misc_feature (256)..(256): Xaa can be any naturally occurring amino acid
  misc_feature (268)..(268): Xaa can be any naturally occurring amino acid
  unsure (1)..(299): unsure at all Xaa locations
GGVQSNFVVLVLENCALPFPNKGHVVLGDPSPTSFYPISSSEVRRLVDVPGSKLPSVASGEMAHHLKKMXARQLPPQIRDALISAVEKGNIRKMPKKSMPADPTNTPGASLLVDAFNMRHPLTGGGMTVAFSHIVILRDLLNPLVNLTNKESLSKYIESFYTSRKPVASTINKLEGALXKSLLRPPPPPPKRIARARFDYLSLEGVCSSGPVGSVSGLHXRPMRLVLXFFGVATLGVGRPLVPLPSVKRLWLGARXLSSASGDHLCQXQTAEGVRQMFFPRTIPAIYRAPPPPSSSSPE

SEQ ID NO: 27179 - protein, 596 aa, Caulobacter crescentus CB15
MMSAYKFIDHKFDVVVVGAGGSGLRAALGAAQAGLKTACITKVFPTRSHTVAAQGGISASLGNMGQDDWRWHMFDTVKGSDWLGDQDAIEYLTRNAPAAVYELEHWGVPFSRTPDGKIYQRAFGGMTKNFGEGPIQRTCAAADRTGHAMLHTMYGQSLAHDTEFFIEYFALDLIMDDGVCRGVTAWKLDDGTLHRFQAQMVILATGGYGRAYFSATSAHTCTGDGNAMALRAGLPLQDMEFVQFHPTGIYGAGCLITEGARGEGGYLTNSEGERFMERYAPTVKDLAPRDMVSRAMTIEIREGRGVGPNKDHIFLHLDHLDPKILAERLPGISETAKVFAGVDVTKAPIPVLPTVHYNMGGIPTNYHGEVVTKSGDNPDQVIPGLMAVGEAACVSVHGANRLGSNSLIDLVVFGRAAALRCAEILKPGAKQPELKDVQTDAHLARFDRFRNASGSTGTAELRLEMQKAMQEDAAVFRTGESLDSGVARLQAVWDKKADLKVSDRGLVWNTDLMETLEFDNLIGQAVVTVNGAANRTESRGAHAREDFSDRNDAEWMKHTLAWLDLDTGKVKIDYRPVHSYTMSDDIAYIPPKQRVY

SEQ ID NO: 27180 - protein, 586 aa, Brassica oleracea
MCGILAVLGCSDDSQAKRVRVLELSRRLRHRGPDWSGIYQNGFNYLAHQRLAIIDPDSGDQPLFNEDKSIVVTVNGEIYNHEELRKGLKNHKFHTGSDCDVIAHLYEEHGENFVDMLDGIFSFVLLDTRDNSFMVARDAVGVTSLYIGWGLDGSLWVSSEMKGLHEDCEHFEAFPPGHLYSSKSGGGFKQWYNPPWFNESVPSTPYEPLAIRSAFEDAVIKRLMTDVPFGVLLSGGLDSSLVASITARHLAGTKAAKRWGPQLHSFCVGLEGSPDLKAGKEVAEYLGTVHHEFHFTVQDGIDAIEDVIYHVETYDVTTIRASTPMFLMSRKIKSLGVKMVLSGEGSDEIFGGYLYFHKAPNKQEFHQETCRKIKALHKYDCLRANKATSAFGLEARVPFLDKEFINTAMSLDPESKMIKPEEGRIEKWVLRRAFDDEERPYLPKHILYRQKEQFSDGVGYSWIDGLKAHAAENVNDKMMSKAAFIFPHNTPLTKEAYYYRMIFERFFPQNSARLTVPGGATVACSTAKAVEWDASWSNNMDPSGRAAIGVHLSAYDGSKVALPLPAPHKAIDDIPMMMGQEVVIQT

SEQ ID NO: 27181 - protein, 464 aa, Nocardia farcinica IFM 10152
MTPFGPDTRRLAALATPIALTQLAQIAVSTTNIALMGTLGVGAVAAGGLALVLFNQIRTMCVGLVTGTGNQVAAAVSAADKRGDSPAGEVREIVRASFLVATLAGLLGGAVLIGLGWSLQWLGQDASVLAEARPLLVALAPGLLPCLWFQVLRQYTVGMQRPQALLLVTLASIALNLVLALAFIHGWAGVPALGLTGVGVATSLVFLITFGVFWAMVRHDERLGAMLSVRPWPVRGRTVLAELRLGTPIALTYGSEAGMFSVLALVMGSLGPAALAAHNVVYQIIYIVFQVAIGLSHGASILVSHAVARDEHAHARHVAWLALRYAGVVAAVTGALYVLAPQLVLRPFLDPADTATLDIARALLLIGIVLQFFDAAQNIGTGLLRGLKETGAGFRLSLIGYWLVGLPTALVLALPVGLGAPGVWWGLTAGLAATAILMVRRYFVLLDGLALPRPRPLPQAVGTA

SEQ ID NO: 27182 - protein, 411 aa, Pseudomonas fluorescens Pf-5
MTPAYAPLRLHVPEPSGRPGCKTDFTYLRLNDAGLARKPPIDIEPADCADLARGLIRVLDDQGNALGDWAADVPEEILRQGMRAMLKTRIFDNRMVVAQRQKKMSFYMQSLGEEAIGSAQALALNIDDMCFPTYRQQSILMAREVPLVEMICQLLSNERDPLKGRQLPIMYSVKESGFFTISGNLATQFVQGVGWGMASAIKGDTKIASAWIGDGATAESDFHTALTFAHVYRAPVILNVVNNQWAISTFQAIAGGEATTFAGRGVGCGIASLRVDGNDFIAVYTASRWAAERARRNLGPTLIEWVTYRAGPHSTSDDPSKYRPADDWSHFPLGDPIARLKQHLIKIGQWSEEEHAAVSAELEAQVIAAQKEAEQYGTLAGGQIPSAATMFEDVYKDMPEHLKRQRQELGI

SEQ ID NO: 27183 - protein, 427 aa, Bradyrhizobium sp. BTAi1
MRSKAHSLIPGGAHTYAKGDDQYPVLAPSFLTRGEGCHVWDIDGNEFIEYGMGLRAVTLGHAYKPVVEAAHRQMLLGENYTRPATIELTCAEEFLGLIEGADMVKFAKNGSDATTAAVRLARAYTGRDLIARCGDQPFFSTDDWFIGNTPMSAGIPKVVQDLTLQFRYNDIESLRSLFAQHPGEIACVIMEAATAVEPQPGFLHAVQALCRKEGAVFILDEMITGFRWNVGGAQREYGITPDLSTFGKGIGNGFSVSALAGKRELMELGGLRDDRERVFLLSTTHGAENHALAAAIATMQVYRNDHVIEHLHRQGERLRAGVNPVIKELGIGDHFELLGRASNMVFATRDTAKQPSQPFRTLFLQEMIKRGIITPSLVVSFSHTDADIDRTIEAIAESLKVYRSALEDGVDHYLVGRPVKPVFRKFS

SEQ ID NO: 27184 - protein, 359 aa, Brassica napus
  misc_feature (183)..(183): Xaa can be any naturally occurring amino acid
  misc_feature (262)..(262): Xaa can be any naturally occurring amino acid
  misc_feature (276)..(276): Xaa can be any naturally occurring amino acid
  unsure (1)..(359): unsure at all Xaa locations
MSTHQQDMSLVTSTPPINNGNQIFPEIEMSGHSSSIVRATVVQACTIFYDTPATLDKAERLLAEAADNGSQLVVFPEAFIGGYPRGSSFELAIGARTAKGRDDFRKYLASAIDVPGPEVERMAEMARKYKVFLVMGVIEREGYTLYCSVLFFDSHADLLGKHRKLMPTALERCIWGFGDGSTXIPVFDTPIGKIGAAICWENRMPSLRTAMYAKGIEIYCAPTADARETWLASMTHIALEGGCFVLSANQFCRRKDYPPPPXEYTFSGSEESLTPXSVVCAGGSSIISPLGIVLAGPNYEGEGLISADLDLGDIARAKFDFDVVGHYSRPEVFSLNIKEHPRKAVSFTSKVTKDETVKN

SEQ ID NO: 27185 - protein, 150 aa, Mycoplasma genitalium G37
MSKYQKKSEAELKRTLTKLQFDVTQNAHTEPPYINEYNRNFEKGIYVDITSGEPLFISTDKFKSGCGWPAFSKPIDKNLIANYRDESHGMIRTEVRAKNSDSHLGHVFNDGPSELGGLRYCINSAALKFIPFEEMEKLGYKDYIHLFKNK

SEQ ID NO: 27186 - protein, 503 aa, Gossypium hirsutum
MAVQVPSRQLFIDGEWREPILKERLPTINPATEEIIGNIPAATAEDVELAVAAARRALSRNKGKDWATAPGAVRAKYLRAIAAKVTERKTELAKLEAIDCGKPLDEAVWDIEDVAGCFEYYADLAEGLDARQKAPVSLPMETFKSYVLKEPIGVVGLITPWNYPLLMATWKVAPSLAAGCAAILKPSELASITCLELAKVVKGSRLPPGVLNILAGLGPEAGAPLASHPDVDKIAFTGSSATGSKIMAAAAQMVKPVSLELGGKSPIIVFEDVDLDKAAEWTAFGCFWTNGQICSATSRLIVHENIAREFLDRLVKWTKNIKISDPFEEGCRLGPVVSGGQYEKVLKFISTAKSEGATILSGGVRPEHLKKGFFVEPTIITDVTTSMQIWREEVFGPVLCVKTFRTEEEALELANDTHYGLGAAVISNDLERCDRVSKNLQAGIVWVNCSQPCFCQAPWGGNKRSGFGRELGEWGLDNYLSVKQVTQYVSDEPWGWYRSPSKL

SEQ ID NO: 27187 - protein, 415 aa, Listeria monocytogenes EGD-e
MTELIKKGSAAKEAAQFLAQASTKQKNAALLNLSNDLLTHTASLLEENNKDIIRAREKGTPETMIDRLRLTEERIKEISEAVKQVVALKDPIGEVTNMWKNEAELTIGKTRVPLGVIGIIYESRPNVTVDASVLCFKTGNAVILRGGSDAIDSNKALMSVIQDSLEASGFPRSSVQLIEDTSRETARDMMRLNRFLDVLIPRGGAKLIQTVLENATVPVIETGTGNCHIYVDKAAEKQMAIDILVNAKCSRPSVCNAAETLLIHRDVADAFLPEIETALKEYNVELRADERAREILKDSKAATESDWEDEFLDFILAIKVVDSVDEAINHINKYGTKHSEAIISNDYATGQAFHQKVDAAAVYINASTRFTDGFAMGFGAEIGISTQKLHARGPMGLTELTSTKYIIFGDGQIRN

SEQ ID NO: 27188 - protein, 597 aa, Geobacillus kaustophilus HTA426
MWLFRSVVGKLWFTILLLVSCVLFILSILLIKFLEDYYVQEAENDLTRLATKVAEVMHDYRDEQLARSIAWTLVDNRTKAVIVADESHYWYSPGDAGLDNMPLSSIRQDRDLRRVLTDGKTMKKRLYMPERHPKEKLPRDMIIVGVPMSMPDGSRGAVFIYQSLEAIADATERTKELIFLAAFIAIVMTTFFAFFLSTRITAPLRKMRQAAFEMARGHFDMKVPILTNDEIGGLAMAFNQMGRRLQFNINALNQEKEQLASILSSMADGVITFNRDGEILITNPPAERFLQAWYFEQGNDAEAMAPLPPQVKELFARVVREEKEQSTEVTLQGRTWVILMTPLYGKTMVRGAVAVLRDMTEERRLDKLRKDFIANVSHELRTPIAMLQGYSEAIIDDIAASEKEKKEMAKVIYDESLRMGRLVNDLLDLARMEAGHIELEYEQVKLVPYIERVIRKFYGLAKEKQIELTAEFRDRDIEIALDPDRIEQVLTNLIDNAIRHTESGGTVRLIIEPSGDGVTIHVQDSGSGIPEEDLPFVFERFYKADKARTRGRSGTGLGLAIAKNIVEAHKGLITVHSKLNEGTTFSFYLPARGPKGA

SEQ ID NO: 27189 - protein, 365 aa, Synechocystis sp.
MGTSVSNPTAILQTMQGFLRKWWSEFNLQTRLMAAATLVVSLLMSGLTFWAVNTIQEDAQLVDTRFGRDVGLLLAANVAPMIADKNLTEVARFSSRFYENTSNIRYMIYADPSGKIFFGIPYSEETVQNSLTLERRIELPQIDPHNFDQPFVRQHHTPNGDVTDVFIPLQYQGKFLGVLAIGINPNPAAVNSSNLTRDVTIAVFISIWVMVILGAVFNALTITQPIKELLLGVKNIAAGNFKQRITLPFGGELGELIVNFNEMADGLERYEAQNIEELTAEKANVDTLVSTIADGAMLVDTNLQLLLVNPTARRLFAWENKPIIGENLWKICHGNHGPTYQPMNWPLTKEVCCFPPAMGSGRGAG

SEQ ID NO: 27190 - protein, 244 aa, Pseudomonas syringae pv. tomato str. DC3000
MGVADKAVRTLQIGLVGDFIAQVPAHQAIPLALQMAADALQAQVAITWLPTPQIGDGVRLGQFDGVWCVPASPYRDMQGALTAIRFARERLVPFLGTCGGFQHALVEYARNCLGWADAEHGETAPEAANVIIAPLSCSLVDALAPIHLQPDTLIAQAYGTLDIEERYHCRYGLRSELESALFGTALKVSGRGPERDVRCMELQGHPFFVATLFQPERAALLGRIPPVVDAFLRACIASAAGDES

SEQ ID NO: 27191 - protein, 236 aa, Oryza sativa (japonica cultivar-group)
MAPRTSDKTMSPAAAATGLALGVGGVAGAAAVGTGQHFRGVRKRPWGRYAAEIRDPAKKSRVWLGTFDTAEEAARAYDAAAREYRGAKAKTNFPYPNGAPAAGVNSGSSNSSTVESFGSDVQAPMKAMPIPPSLELDLFHRAAAAAAAGAGGMRFPFEGYPVSHPYYFFGQAAAAAAASGCRMLKIAPAPVTVAALAQSDSDSSSIVDLAPSPPAALAKKAIAFDLDLNCPPPMEV

SEQ ID NO: 27192 - protein, 435 aa, Exiguobacterium sp. 255-15
MKTLSNVKAASLGLQHVLAMYTGAAIVPLIVGSAIGLSGEELAYLVAIDLFMCGVATLLQVFVTKYTGVGLPVVLGCTFTAVGPMIAIGSLQGITAIYGALIASGLIIFVISGWFSRIAILFPPVVLGSVVTIIGISLIPAAINDIGGGQGAKDFGDMRYLALAGLTIVLILVFNRYGTVFSKAAAVLIAVLIGTLVAFGMGMIDFSPVAEASWFQMVTPFYFGVPTFNATAILTMTLVGLVSMVESTGVFLTLGEITDKKLTDKDLARGYRAEGAATIIGGIFNSFPYTTYSQNVGLVQLTGVKTRKVIVFAGFFLIVLGFLPKVATFTTLIPKPVLGGAMLVMFGTVAASGIRILSRVDFAKNDNVITVALALGVGLGISMNPAIVASLPDQVRVLTDSPIVAGSVTALLLNGLFRLTEKKTAMRKTPLAKVE

SEQ ID NO: 27193 - protein, 328 aa, Salmonella enterica subsp. enterica serovar Typhi Ty2
MGQLIDGVWHDTWYDTKSSGGKFQRSASAFRNWLTADGAPGPSGEGGFAAEKDRYHLYVSLACPWAHRTLIFRKLKGLEPFIPVSVVNPLMLENGWTFDDTFPAATGDTLYQHEFLYQLYLHADPHYSGRVTVPVLWDKKNHTIVSNESAEIIRMFNSAFDGLGAKAGDYYPPALQSKIDELNGWIYDNVNNGVYKAGFATSQQAYDEAVEKVFTALARLEQILGQHRYLTGNQLTEADIRLWTTLVRFDPVYVTHFKCDKYRISDYLNLYGFLRDIYQIPGIAETVNMDHIRHHYFRSHKTINPTGIISVGPWQDLLEPHGHDVRFG

SEQ ID NO: 27194 - protein, 421 aa, Thermoplasma acidophilum
MGSKDLFQRGSSLFPMGVNSPVRYFKDYPFYVDNASGSRIYDVDGNEYIDYCLAYGPSILGHADPDVVRAVRDQAEKGLIYGAPSEAEIRLGDIIRRSSKNIEMMRFTNSGTEATMHAIRLARAYTGRSIIVKMEGGFHGAHDYSLIRSGSGTLTFGSPSSPGVPEEVARTVVVGRYNDEANIRNIFSQYGSRIAAVITEPIMGNAGVITPEPGFLEFLRDITQKNGSLLIFDEVITGYRFAFSPYQDIIGIRPDLTTMGKIIGGGMPIGLFGGSADIMKKVSPSGDVYQSGTFSGNPVTMAAGFAALKKLQGMDYASLVRRTEKLMNGIDDILAKRKIRHVVNGYRSMFQFFFAESAKNYDEVMKADRDLYFRIFKRLMNHGVYVPPSQFETNFVSFAHSDDDISKTIEAFDLSVGEAAK

SEQ ID NO: 27195 - protein, 473 aa, Rhodopseudomonas palustris CGA009
MSETSFDVIIIGSGPGGYVAAIRAAQLGFKTAIVEKSYLGGICLNWGCIPTKALLRSAEIYHYMQHAKDYGLSADNISFDPKAIVQRSRGVSKRLNDGVGFLMKKNKISIIWGQATIDAPGKLTVAASKTDAPKGALPPGSYQAKHIIVATGARPRVLPGLEPDKKLVWTYFEAMVPEVMPKSLLVVGSGAIGIEFASFFHTMGAKVTVVEVLPQILPVEDAEIAALARKRFEKQGIKILTGAKVTKLDKKADSVVATIDPGNGKPETAEFDRVISAVGVVGNVENLGLDKLGVKLDRGTIVTDGLGRTNVPGLYAIGDVAGPPMLAHKAEHEGVICVEAIKGLHPHPLDKSLIPGCTYCQPQVASVGLTEAKAKEQGREIRVGRFPFTANGKAIALGEDQGLVKVIFDKKTGQLLGAHMIGAEVTELIQGYVVAMNLETTEEELMHTVFPHPTLSEMMKEAVLDAYGKVLNA

SEQ ID NO: 27196 - protein, 1863 aa, Cryptococcus neoformans var. neoformans
MLPSSQQMTAAGPLPATPDQLSLRHRHSSSKQRTPRNLDDPSRSKPSPSESARRGKPIFFSSMHFPQALPQSIPSMASDERRAEIQRSQRRSKVEALTKIDRAGTPIQLAAGPAATSFVPHTVQKPTPPPAPHYLRNPLHRPKVVNPPFSIDSVRTKAPRHPRPRTEPRLFGLEDCPTFYPTPKEFTDPMAYIQSIAQQGKRYGICKIVPPEGWHMPFRLETEIFRFKARLQRLNQLEAASRAKLNFLEQLSMYHMQQGNYKIHIPLIDRQPLDLWKLRREVNRSGGNFELDRTKGWSKITEVLGHKPSWTPHIRAAYMNIVLPFDNWAVRAKSASVSPLARFNPGNSGSPSKAPPAFVNDNCSATPIKQDYGVSRLGTTSYRPTLKVRLNGMPFVPSFGNGRSPSKCASVKGGRAVADAIEINHSVSLSTVPSVAAGTPTTRRINVPGFSDQEGSDSELSDEDSPLSPSSIKKAPFEPEYQKGEVCEICKGEYDADKILLCDSCDRGFHIYCLDPPLASVPNNEWFCTSCLLSQGEDFGFEEGDEHSVASFQARDAAFSYAWWNRHMPHNSPRASVNGAQPTDNGDDERVKPRQFGKATVSEDDVEREFWRLTESPLDTVDVEYGADIHSTSHGSAGPTPETHPFDPYSKDPWNLNNMPILPDSLLRYIKSDISGMTVPWIYIGMMFSAFCWHNEDHYTYSINYMYWGETKTWYGVPGSDAEKFEAAIKSEAPDLFEQQPGLLFQLITMMNPGRLSDAGVKVVACDQRPNEFVITFPKAYHCGFNHGINMNEAVNFALPDWLPDGKDSVRRYREHNKAPVFSHNELLITITLFSESIRTALWLKDAIIEMVEEESARRDALRAKYPKLVQDVIEEDCREDQYQCAICKGFCYLAQITCSCTSQVSCLSHADQLCTCGKLRKVLRMRYSEAQLEDIRDVVIRRAALPEQWRVRFFSLMESPKPQLKSMRTLVLEGERIAHPIPELGTLKRFVDVASSLMEQIATITARKNTGRRKTKGKRDVNRKGKRAGAERDDDGNDGTDRNPGLLTDLLKQVDRLAFDAPELTQLRQLMLAVEGFRIEASSLLTTPEDQLDRRKCKNALILGQSFGLDFPELAPLEQLVQRQEWFRQLEEEVDDVNLEYDDVVALLQESLDCQIPQDHVMVKELRLREGKGRHWIDLAEKLLSSSQIAVDDISTLIEARQHVPVSIDILRKLENLRKSAISWQSSARNVFATNGSSVAASRLCKNVAAASKPLSNVVIPEIRQLQAELDHHALWREEASKILGVPVARLASTIDYIRGEFENNLAPDDDARNDRRVCFCRSSSIDNTVVCKICQHSYHLRCVDVSTRRVPQEFKCAICQRLPNDDGPSLDAFIGLISPQRWNFLINPPEFEQAQYIASAAIRYAPQAFRLADPLSLSHPCRDLELLRHTIRKIYTLPLVFDTHNSQTNERCVFVNWLFRRMQDAVKMETKEASLLAVGVQSEMDRRLSVALAAGQFALVNGETRTPCGRAKPRRRARIILAESHPREFYCLCGLPSAGKPPTTQVECPKCGQGYHGVCVKVTEELARKSVWRCPCCTVQDGRHYQKGVEVRVQLSSHRGTDQFLDYRTIINNFAEQLVIVTKPTSTSAITLECIDFVPAHIPVDVKRMEEGADSLYRTKKRKSTGVDGFFRNEQGAKSPVAHVLNTMAAKGSMGPSSTISNDISTHATSSGTCGSSIALGVRSDIETKSSAVPRTIYTSAAESNADTSGPALTPTIQNRSTFNMRSNVGPAPCFSSTPIAVGVSTTSTVRQNGGTSMAIMCGEGRETAVTGKNVHEDSIDSRRDSEEGDSYSNMRESIAVEEAVPFGHHGVDQDVIMGFF

SEQ ID NO: 27197 - protein, 447 aa, Perilla frutescens
MGFELHIGVLAFPFGTHAPPLLALVRRLAASSPGTLFSFLNSAESNAALFNERTYDNIRAFDVWDGTPEGRIFTGTHFEAVGLFLKASPGNFDKVIEEAEPKTGLKICCLITDAFLWFACDMAQKRGLPWVPFWTAASCSLSSHLYTDQIVKAGTANQEQNLSFIPGLEMATLTDLPPEVFLDNSPSPLAITINKMVEKLPKSTAVVLNSFEEIDPIITDDLKTKFKNFLNVGPSILASPPQATPDDETGCLSWLADQTSPKSVVYISFGTVITPPENELAALADALEICRFPFLWSLKDYAVKSLPDGFLDRTKGFGKIVAWAPQQQVLAHRNVGVFVTHCGWNSILESISSCVPLICRPFFGDQKLNSRMVQDSWKIGVRVEGGVFTKNEAVESLKKLMATEAGMKIRENVSLLREKATAAVKPEGSSSQNFKKLLEIIGAAESS

SEQ ID NO: 27198 - protein, 412 aa, Oryza sativa
MSHPHPLKTSTSSSVNPSWGNAKSIKEESGSPLFVESTPIPISLSPYKPNSLDLNDDHDNSVHDDGGGEKTCRRRGETMVAHEKRVVVVRAAAVVAGELLSPPLPMLVVTKPGQLPVEFLEPSAAQKLVIGFDCEGVDLCRHGALCIMQIAFPDAVYLVDAIEGGKELIEACKPALESEYVTKVIHDCKRDSEALYFQFGIKLHNVMDTQIAYSLLEEQEGKKRGYDEYISFVSLLADPRYCGMAYPEKEEVRTLLRQDPNFWTHRPLSEMMIRAATDDVRFLLSIHEKMMEKLSKVSLWRLSVRSELYCRCFCINDNKYADWPPLPTVPDEIEPDVYVPEVDILSVLDVPPGKMGRVIGRKGSSIMEVKASCNVEIHIGGAKGPPDRVFIIGPVQEVRKAEAILRGRMLEF

SEQ ID NO: 27199 - protein, 510 aa, Solanum tuberosum
MANIDIAGIMKDLPNDGRIPKTKIVCTLGPSSRTVPMLEKLLRAGMNVARFNFSHGTHEYHQETLDNLKIAMQNTQILCAVMLDTKGPEIRTGFLTDGKPIQLKEGQEITVSTDYTIKGNEEMISMSYKKLVMDLKPGNTILCADGTITLTVLSCDPPSGTVRCRCENTATLGERKNVNLPGVVVDLPTLTEKDKEDILEWGVPNNIDMIALSFVRKGSDLVNVRKVLGPHAKRIQLMSKVENQEGVINFDEILRETDSFMVARGDLGMEIPVEKIFLAQKMMIYKCNLAGKAVVTATQMLESMIKSPAPTRAEATDVANAVLDGTDCVMLSGESAAGAYPELAVKIMSRICIEAESSLDNEAIFKEMIRCTPLPMSPLESLASSAVRTANKARAKLIVVLTRGGSTAKLVAKYRPAVPILSVVVPVLTTDSFDWSISDETPARHSLVYRGLIPLLGEGSAKATDSESTEVILEAALKSAVTRGLCKPGDAVVALHRIGSASVIKICVVK

SEQ ID NO: 27200 - protein, 344 aa, Thermoplasma volcanium GSS1
MAALITQEIGSFRKPEYLSMEFHKIEGTEKFKELAERATIDTLKIFENTGLDNVGIGGEMYRWEMYEHPAERIKGLIFYGMVRSFDNRYYRKGSVIDKIERRGSFHMDEVEFVAKSTKKPIKIPITGPYTMMDWSFNDHYNDRHELAMEFARIINEELKEIQSKWPYISNGRKLEIQIDEPATTTHPDEMDIVVDSVNKSIEGIDAELSLHVCYSRDYRLLYDRIPELNIDGYNLEYSNRDTTDLGVEDAKRPGFQDIKYFNEVNESLQRKKFIGVGVTDVHIDFIEPVKLIEDRIKYVLNIIKDPELVKLNPDCGLRTRSRSIGEQKLRNMVIAKNNVLKDIS

SEQ ID NO: 27201 - protein, 318 aa, GIBBERELLA ZEAE PH-1
MVQFGSRANTNMTGLPTEQAVEDRRVGNPKRDRMRNALVIVLGEFCGTFMFLLLSFIGAQTALVTNSPSDAGSPLLPFSLMYIAASFGTALAVNVWIFYRVSGGMFNPAVTLGLVLVGAVTPIHALLIIPTQLVAAITAAGITDALLPGKLLVTNALGNGTSVAQGVFIEMFLTSQLVLTVYFLAVEKHRSTHLAPIGIGISVFIAHICATNWTGTSINPARSFGPSVVAGFHGYDWIYYIGPFMGSLLAFGCYKIFKVLEYQTANPGQDDDNLDRSGHHHFFGHRKEPMPHTHTDNIEPKDHGVPQRNDSVIDDQMV

SEQ ID NO: 27202 - protein, 160 aa, Triticum aestivum
MDPEKRGYKFQEFVAHDAEVRSLAIGKKSSRVFITGGSDRNVNLWAIGKQTPLLSLSGHTSSVEAVEFDTAEVLVLAGSSNGSIKLWDLEEAKVVRSLTGHRSSCTAVEFHPFGEFFASGSSDTDLKIWDIKKKGCLHTYKGHRGAIKSIRFTPDGRWIV

SEQ ID NO: 27203 - protein, 206 aa, GIBBERELLA ZEAE PH-1
MAFNLPPFLARLARPFTQSSRLSIAPDQSAASVIPEGAQRCTVAAGCFWGTEHLYRRHFADKGLIDAKVGYIGGDLENPSYRAVCGGKTGHAEAAQIIFDPTKVTYAQLLEFFYKTHDPTTLNQQGPDTGPQYRSAIYFHNPEQEKIAREVTEKANKQWWKGGIVTEIAPAGKWWTAEEYHQLYLHNNPSGYECPSHFMRPFPPLE

SEQ ID NO: 27204 - protein, 545 aa, Thermoplasma volcanium GSS1
MMTGQVPILVLKEGTQREQGKNAQRNNIEAAKAIADAVRTTLGPKGMDKMLVDSIGDIIISNDGATILKEMDVEHPTAKMIVEVSKAQDTAVGDGTTTAVVLSGELLKQAETLLDQGVHPTVISNGYRLAVNEARKIIDEISVKSTDDETLRKIALTALSGKNTGLSNTFLADLVVKAVNAVAEERDGKIIVDTANIKVDKKSGGSINDTQFISGIVVDKEKVHSKMPDVVKDAKIALIDSALEIKKTEIEAKVQISDPSKIQDFLNQETSTFKEMVEKIKKSGANVVLCQKGIDDVAQHYLAKEGIYAVRRVKKSDMEKLAKATGAKIVTDLDDLTPSVLGEAEKVEERKIGDDRMTFVTGCKNPKAVSILIRGGTEHVVSEVERALNDAIRVVAITKEDGKFLWGGGAVEAELAMRLAKYANSVGGREQLAIEAFAKALEIIPRTLAENAGIDPINTLIKLKSEHEKGKISMGVDLDSNGAGDMSKKGVIDPVRVKTHALESAVEVATMILRIDDVIASKKSTPPSNQPGQGAGAPGGGMPEY

SEQ ID NO: 27205 - protein, 340 aa, Xanthomonas campestris pv. campestris str. ATCC 33913
MKALVKREASKGIWLEQVPVPTPGPNEVLIKLEKTAICGTDLHIYLWDEWSQRTITPGLTIGHEFVGRVAELGSAVTGYQVGQRVSAEGHIVCGHCRNCRGGRPHLCPNTVGIGVNVNGAFAEYMVMPASNLWPIPDQIPSELAAFFDPYGNAAHCALEFDVIGEDVLITGAGPIGIIAAGICKHIGARNVVVTDVNDFRLKLAADLGATRVVNVSKTSLKDVMADLHMEGFDVGLEMSGNPRAFNDMLDCMYHGGKIAMLGIMPRGAGCDWDKIIFKGLTVQGIYGRKMYETWYKMTQLVLSGFPLQKVLTHQLSIDEFQKGFDLMEEGKAGKVVLSWN

SEQ ID NO: 27206 - protein, 400 aa, Oceanobacillus iheyensis HTE831
MLTRIFDTIDNHFDEMVEIRRYLHQYPELSFEETKTAAYIANYYEELGIPYETNIGGNGVLATLKGKKPGKTIALRADFDGLPIQDEKNVPYKSKVPGVMHACGHDGHTATLLVLAKVMQQHQEEIEGTIVFLHQHAEEYAPGGAKPIIESGAIDHVDAVFGTHLWATIPLGVLHTSTSAMMAGADRYEITIQGKGGHGAYPHETKDAIVLGADIITKFQQIVSRRLDPLSTAVVTTGIFEAGSAFNIIADQAKLVGTVRHFDSGVQEKIIQEMERILKGECDTNEASYEFNYVKGYPPLINHKEQAETILKASKNIKEIHTAEEAPPVMGGEDFAYYLHHKPGAYFFTGANLEGNPYPHHHPKFDIDEKALPTAAKTLISVYMQYQEETRDNQQETNTH

SEQ ID NO: 27207 - protein, 132 aa, Glycine max
MGRLFVTHLEGQIYSCKHCRTHLALYEDIVSKSFHSRHGRAYLFSKVVNVTVGVNEDRQMLTGMHTVADIFCVGCGSIVGWRYETAHEKSQKYKEGKSVLERYKVSGPDGNNNNNYWVSHEAHVGGSDADDA

SEQ ID NO: 27208 - protein, 437 aa, Corynebacterium efficiens YS-314
MTTKKRNTSETTDTAPKAVGADQAARPVRRTTRRIFDQSEKMKDVLYEIRGPVAAEAERMELDGHNILKLNTGNPAVFGFDAPDVIMRDMIAALPTSQGYSTSKGIIPARRAVVTRYEVIPDFPNFDVDDVFLGNGVSELITMTMQALLNDGDEVLIPAPDYPLWTAATSLSGGKPVHYLCDEDNEWNPSIEDIRSKITEKTKAIVVINPNNPTGAVYSRKVLQEIADIAREYDLLVLADEIYDRILYDDAQHINMATLCPDLMCITYNGLSKAYRVAGYRAGWMIITGPKRYAKGFIDGLELLAGTRLCPNVPAQHGIQVALGGRQSIYGLTGEGGRLLNQRNVAWQKLNEIPGVSCYKPMGALYAFPRLDPNVYEIHDDTQLMLDILRSEKILLVQGTGFNWPHHDHFRVVTLPWASQLENAIERLGNFLVSYKQ

SEQ ID NO: 27209 - protein, 542 aa, Exiguobacterium sp. 255-15
MKRWALYRIFIIVTMFARYIWTIYRFTRKNRPGTNNEEFERIMITIARDYKKKALRLEGLLIKLGQFLSIRADLFPPSVLMELTELVDKVPSSKLGESRKIIEEDWGTAIEDIVDDISPRPIASASIGEVYSATLKSNGRKVAIKVQRPNIEQIIKTDFRAMRLVIAMLRRTSLNKSTDLQSLYRQMVFVIGDELNYRTELKNGLYFKKMYETNPVIYIPDYFEEHCTNRVLVMEWIEGTRITDLDYLAEHNIDRDELARNLFLNAGEQLLFGGKFHADPHPGNVLVQSDGRIVLLDFGMIGATTADDMRAIQRILQSFVTLDYDAIVDGLEDLRFLLPNANKQNIRQAIEKAVTFYLESDMENIDTKLIEKVLSDIELLVRNEPIQLPAEFAFFGRAASTILGILQILSPKINLLELAKPMVRRWLDEEGKNQNRYLQIAGSYGARLLAFPRLVNDALSEPTRWRLFEQQKFSRVANMESLKIRQWTSSLVGIVSLPVSYTGYFLAHYDLMGISLAIAIVALWNGRRIGRQIVRIADEPFK

SEQ ID NO: 27210 - protein, 344 aa, Rhodopseudomonas palustris CGA009
MAAPKKSAAKETTQDKAGGASPSNVPPFTKEQELGAFLEMLLIRRFEEKAGQLYGMGAIGGFCHLYIGQEAVVVGMQMALREGDQVITGYRDHGHMLACGMEANGVMAELTGRRGGYSKGKGGSMHMFSREKSFFGGHGIVGAQVSLGTGIAFANRYRGDGRVCLAYFGDGAANQGQVYESFNMAELWKLPVVYVIENNRYAMGTSVTRSSAQTDFSKRGVSFNIPGEQVDGMDVRAVKAAGDKAVAHCRAGNGPFILEMQTYRYRGHSMSDPAKYRSREEVDKIRNDQDPIEQVRKRLLGLDMTEDDLKAIDAEVRKVVNESADFAQHDLEPDPSELYTDVYR

SEQ ID NO: 27211 - protein, 213 aa, Schizosaccharomyces pombe
GFSDLTSDAGLKQLNDFLLDKSFIEGYEPSQADAVVFKAVGVAPDTAKYPNGARWYKQIATYDLTTLPGTAKEVSAYGPEGAAAAEEDEIDLFGSDEEEDPEAERIKAERVAEYNKKKAAKPKAVHKSLVTLDVKPWDDETPMDELEKAVRSIQMDGLVWGLSKLVPVGFGVNKFQINLVVEDDKVSLEALQEELEGFEDYVQSTDIAAMSKL

SEQ ID NO: 27212 - protein, 277 aa, Solibacter usitatus Ellin6076
MSDITTKVREHYSATDLIDRIKSALAKSVAGRHGASDAAACVAQLAPLDQFHTRGILATAELAGAAGVERSTRVLDVGCGIGGPARYLAATFECKVTGLDLSAGFIDAASYLTARCGLSDRVTFQVGDGHHLPFEDAGFDAVFLQHVAMNVEDRAGLYAEVRRMLPVGGRFATYDLVLRDGDVVYPVPWARDASTSFLLSEGDTRTALEQAGFKAVVWQDDTQTALDWFEAAVGGSRPGGLNLGVVMGPDFPALTANLARNLRENRLGVLSAVLTRD

SEQ ID NO: 27213 - protein, 269 aa, Silicibacter pomeroyi DSS-3
MKHLKRHLPPLTSLLAFEAAARLGSFTAAAEELNVSREAVSRQIRVLESHLGISLFERDANRALMGAAGARFFATVSPNLNAIAVAAKEMAGEVSNGPLPESATQPGDDEELPSLLVVDDTPQNIHHLHGLLKDAYRIIPQTSGKGALSFLSGELADLILLDIRMPDMDGYEVCRQIKSTASLADIPVIFLTSLDDPMDETKGLEMGACDFITRPIVPAILRARIRSHIELRQAQTALEKLLARRADRLEKAEQLLTGICADIGQFQSS

SEQ ID NO: 27214 - protein, 898 aa, Silicibacter pomeroyi DSS-3
MRLKLKPAGITRKIALAAALLGVFSGLLLGVYTLLAEHSLRIGAARLNADRIVRATLPQIAGAYWEVDVPAVRAILNGLLEDPVILSASVEDPLLTEAQRDSSGLIDLSVSRQPLSEPPWLGFLFQSGSQAEKLSYALSNPRDGSEIGRLALELSFRPVQEDMVARSYVVLGSSILQALLVTAAIFLIVQLIVIRPLARLQAAALRVRDGYSFRLKGRDQRMFDVNRQDEISRLARAFRRTVTELEASRDNLQELVDERTRELLEARNEAVEASQAKSIFLANMSHELRTPLNAIIGLSGILLRDGQSNDNTRNLTDLRAAAKQLSENIDSILDLSKIEAGELVLEQVWFRLDDLLDDVLMQTRALMVGQPVLLTWDYAPDLPDELCADPLRLRQIMVNFASNAVKFTKEGEIRLLASYHDGALRLGVRDTGIGISPEQIEGIFKAFGQADGSTTRQYGGTGLGLSISQKLADKMQGKIQVDSEPGRGAEFTMVLCLPTRPAPQQGETKDLIKVEGTGGPVRQLQIMADRAAAALTSQIRPVTVTVTAKHAEFALRSSGSMAGKRFALPITHGEFAAALSELETGTGPTLPKNVFLAGRDVLVVEDNPVNLYVFVSLVEALGAKVRTATNGIEAVEQVAEAMPDVILMDLHMPLMDGYRALENLQGRYQASLAPVVAATANATQDEAERCIAAGFAGFVPKPIDPSKLHSILADLCGSGKYPGVDQKKGLFYAGGNRQHYEASLRRFHASLREWFAALEALADGPESQGRADLLHAIKGAASTVGADGLAELAAGAETGAVSIGKVAQALSRMLEQFDAFSPHVAKKLPLNSDRLERIGALVRNRDILALEETQNTALRGLLEPAAAAFESLTAALTALDFETADQIVEQLREALHDD

SEQ ID NO: 27215 - protein, 419 aa, Mycobacterium leprae
MPPWQRWAAADRFGAMREVPQVLGIVLAGGEGKRLYPLTADRAKPAVPFGGAYRLVDFVLSNLVNARYLRICVLTQYKSHSLDRHISQNWRLSGLAGEYITPVPAQQRFGPHWYTGSADAIYQSLNLIYDEDPDYLVVFGADHVYRMDPEQMLRFHIGSGAGATVAGIRVPRSDATAFGCIDADDSGRIRRFTEKPLKPPGTPDDPDKTFVSMGNYIFTTKVLVDAIRADADDDHSYHDMGGDILPRLVDGGMAAVYDFSQNEVPGATDWDRAYWRDVGTLDAFYDAHMDLVSLRPVFNLYNKRWPIRGESENLAPAKFVNGGSVQESVVGAGSIISAASVRNSVLSSNVVVDNGAIVEGSVIMPGARVGRGAVIRHAILDKNVVVGPGEMVGVDPERDREHFAISAGGVVVVGKGVWI

SEQ ID NO: 27216 - protein, 511 aa, Cryptococcus neoformans var. neoformans
MFARQPLSQNLLRPLSRPSSSFSRTSTIPKLAFLQSARGFASASEPYDVVIIGGGPGGYVAAIKAAQLGFKTACIEKRGALGGTCLNVGCIPSKAMLNNSHIFHQTQHDLKNRGIDVSGIQLNLPKMLAAKEASVKALTGGIETYLFKKNGIDYIKGEASFETANKLSVKLLEGGETQVEAKNVIIATGSEVTPFPGLEIDEERIVSSTGALELKEVPKKMVVIGGGVIGLELGSVWSRLGAEVTVVEYLGAIGAGMDGEIGKQFQKILTKQGFKFKLNTKVISGHREGDIVKLKVDSAKGGKEETIEADVVLVAIGRRPVTTGLNLEAIGVETDKRGRIIIDDEFNTSAKGVKCIGDVTFGPMLAHKAEEEGIAAVEILKTGHGHVNYDAIPSVVYTHPEVAWVGKNEEELKGAGVQYKIGKFPFAANSRAKTNQDSEGFVKFIVEKETDQVLGCHIIGPAAGELIASAVLAMEYKASAEDIARTCHAHPTLSEAFKEAALSSYDKPINF

SEQ ID NO: 27217 - protein, 127 aa, Zea mays
HWGLGKLIAFYDDNHISIDGDTEIAFTEDVSTRFEALGWHTIWVKNGNTGYDDIRAAIKEAKAVTDKPTLIKVTTTIGFGSPNKANSYSVHGSALGAKEVEATRQNLGWPYDTFFVLEDSPMPRSLE

SEQ ID NO: 27218 - protein, 250 aa, Zea mays
  misc_feature (222)..(222): Xaa can be any naturally occurring amino acid
  unsure (1)..(250): unsure at all Xaa locations
MAATVAVDNLNPKVLKCEYAVRGEIVIHAQRLQEQLKTQPGSLPFDEILYCNIGNPQSLGQQPVTFFREVLALCDHPDLLQKEEIKTLFSSDSISRAKQILAMIPGRATGAYSHSQGIKGLRDAIASGIASRDGFPANADDIFLTDGASPGVHLMMQLLIRNEKDGILVPIPQYPLYSASIALHGGSLVPYYLNESTGWGLEISDVKKQLEDARSGGIDVRXALVVINPGNPTGQVLAEENNMDIVKFCK

SEQ ID NO: 27219 - protein, 367 aa, Ralstonia metallidurans CH34
MGTVARFEIGFTRYLSPDGSPEPDLPDFARDPATLLPLYRAMVLTRQFDLKAIAMQRTGQIGTFASALGQEAIGVGVATAMRRDDVLVPSYRDHAAQFVRGVTMTESLLYWGGDERGSAFAAVPYDFGNCVPIGTQVGHAAGVAYTFKLRQAPNVAVCILGDGGTSKGDFYEGMNMAGAWHVPLVIVINNNQWAISMPRAKQTAAATLAQKAIAAGIPGEQIDGNDVIAVRQRVGAAIEHARHGGGPTLIEAVSYRLGDHTTADDASRYRDEASVKEAWRCEPIIRLRDYLARLGAWDAAQEEALIKECQQAVGAAVQAYLALPHPDASAMFDCLYETLPDAMAEQLDTARQYDASGKTDTSGAHHG

SEQ ID NO: 27220 - protein, 205 aa, Brassica napus
  misc_feature (153)..(153): Xaa can be any naturally occurring amino acid
  unsure (1)..(205): unsure at all Xaa locations
MTHDSIGLGEDGPTHQPVEHLASFRAMPNTLMFRPADGNETAGAYKIAVTKRKTPSILALSRQKLPQLPGTSIEGVEKGGYTISDNSSGNKPDVILVGTGSELEIAAQAAEVLRKEGKTVRVVSFVCWELFDEQTDEYKESVLPSGVSARVSXEAASTFGWGKIVGGEGKSIGINSFGASAPAPLLYKEFGITVEAVVDAAKSFF

SEQ ID NO: 27221 - protein, 364 aa, Candida albicans SC5314
MSVIAGHHVPRSNDQRQYDTPSVPINIAPDSEGHIHEMSRLKDYEVIEKLGQGTFGVVQKAKSKKDGSLVAIKQLINHSAKEGFPITAMREITILKQLNHQNILTIQDMIFEEPKMSNRTDIITMRGSFYTVTPYMSSDLVGLLENPKIKLELGQIKCIMQQLLKGIQYVHNQKFLHRDIKAANILIGHDGVLKIADFGLARIYHGNVPRLGMGPGGGEKAYTGLVVTRWYRPPEILLGERKYTTAVDLWGIGCVFAELFTGKPILVGKSDSHQAQIVFELVGSPLTWTDAAKLPNKNEYSCGLACKRSLEAKFASIMPTEAIDLLSGLLTLDPFKRLNALDALNHKFFSTDPLPLLPTQMPKI

SEQ ID NO: 27222 - protein, 964 aa, Nicotiana tabacum
MATRSLEKLASIDAQLRALVPGKVSEDDKLVEYDALLLDRFLDILQDLHGEDLKETVQECYELSAEYEGKHDPKKLEELGNVLTSLDPGDSIVIAKAFSHMLNLANLAEEVQIAYRRRQKLKRGDFADENNATTESDIEETFKKLVGDLKKSPQEVFDALKNQTVDLVLTAHPTQSVRRSLLQKHGRIRDCLAQLYAKDITPDDKQELDEALQREIQAAFRTDEIRRTAPTPQDEMRAGMSYFHETIWKGVPKFLRRVDTALKNIGINERLPYNAPLIQFSSWMGGDRDGNPRVTLEVTRDVCLLARMMAANLYYSQIEELMFELSMWRCNDDLRIRAAELYRSSRRDTKHYIEFWKTIPPSEPYRVILGDVRDKLYQTRERTRQMLAHGISDIPEDATYNNVEQFLEPLELCYRSLCECGDRPIADGSLLDFLRQVSTFGLSFVRLDIRQESDRHTDVLDAITQHLEIGSYREWSEERRQEWLLSELSGKRPLFGPDLPRTEEIADVLDTLHVIAELPSDCFGAYIISMATAPSDVLAVELLQRECHVKQPLRVVPLFEKLDDLESASAAVARLFSIEWYRNRINGKQEVMVGYSDSGKDAGRFSAAWQLYKAQEELIKVAKEHGVKLTMFHGRGGTVGRGGGPTHLAILSQPPDTIQGSLRVTVQGEVIEQSFGEEHLCFRTLQRFTAATLEHGMHPPVSPKPEWRALMDEIAVIATEKYRSIVFKEPRFVEYSALATPELEYGRMNIGSRPSKRKPSGGIESLRAIPWIFAWTQTRFHLPVWLGFGAAFKYAIDKDIKNLRMFHEMYNEWPFFRVTIDLVEMVFAKGNPGIAALYDKLLVSEDLLPFGELLRSNYEETRSLLLQIAGHKDLLEGDPYLKQRLRLRDSYITTLNLLQAYTLKRIRDPNYHVTLRPHISKDYMESKSAAELVQLNPTSEYAPGLEDTLILTMKGIAAGLQNTG

SEQ ID NO: 27223 - protein, 370 aa, Desulfovibrio desulfuricans G20
MNAYTEIPMVPGPTTLHPDALAAMGRDYGSGQIETAYLQLYADTQKLLGTLAGTGNDMVIMTGEGMLALWGALKSCLAPGDRVLSVATGVFGDGIGDMAAGLGCEVRKITLPFNATLDDLTAVEEAVDRFRPRMITAVHCETPSGTLNPLAELGRLKAAMNVPLFYVDAVASLGGAPVMADDWHVDLLLGGSQKCLSAPPSMAFVGVSPAAWEAVEQRAYQGYDALGPFRTVHSDGRCPYTPYWHGTAALHAAAAAIVAEGTEQVFARHRNVARQCRDGLQEMDIRLFTAENAVNSPTVTAALVPRGWECAAWLQALAARGLRAAGSFGPMAGKVFRLGHMGTQAHPRLMEKALQVMAQVLEQGPAASRR

SEQ ID NO: 27224 - protein, 609 aa, Brucella suis 1330
MSLFKKKNRKIDPGEATRVIRRMMSENIREYKQNYLIAIIASLIVGGSNGALAYMMKPMIDKIFYDQNLALVWVICGALLTIFVLRGISGYVQAVELAKIGNNLVARYQKRIFDHLMKLGLDFYNDTRSGHLAAQINQNVAGIRDLLNMTISSIARDFISLVGLVGMMFYMDPVLSVAIFLIGPPLILAVAYISRRIRSVTREVVHLNSHLLGAMQESIQGIAIVKAFTMEDQLRAKIDDLIDQSEGRSNKIAKVSERTTPISEILAGVAVSGVLVYSGYRAILEHQPPGATFAFITAMLLAYDPARRLARLQVGLEKALVNARMIYEVLDIEPRQRDLQGATELKAGPGEIRFDNIYFSYNQTAPVLHGVTFMAKAGETTAVVGASGAGKSTLISLVQRFYDLDRGRILFDGQDIAGVTKQSLRHAIAYVSQQPYLFEGTIADNIRYGRPDASDEEIIEAAKLAHAHEFILQQPQGYDTPVGENGVTLSGGQRQRISIARAIVRNTPVLLLDEATSALDNESEKRVQQALETIMQNRTTIVIAHRLSTVVNADRIVVMEAGRVVEEGRHEDLIDIENGVYARFYQLQRGKDDIITEQSEEALHTGEAR

SEQ ID NO: 27225 - protein, 136 aa, Oryza sativa (japonica cultivar-group)
MGFLPPLIKNSLARRGALSQLPKAIPSATNHHRRSSERRRYEDSGVSVSFRRKAAYTAASLLVFLVAGQLPLYGVKKYNGDKDVPDPLYWMNCMFASSNNTLMTLGIIPLLLSEMAVRIFSALIITRWPPFHHVRL

SEQ ID NO: 27226 - protein, 554 aa, Candida albicans SC5314
MGSSTNNTQSKATPSVLENEVNSSKSSVVSSTSSAKGLLRETTNHGTMETSSVQISESESRPSKMVLVLTLASSISGFMFGYDTGYISSALVQIGTDLSNKILTSGEKEFITSATSLGALLGAVVGGVLANLIGRRRVLLGSNIIFVVGTIIQLAARTVWTMIAGRFVLGWGVGIASLIAPLMISELAPAKYRGRLIVTNVIFITGGQLIAYFINWGLTRVSHGWRVSVGLCMVPPVLQFVLFWFLPDTPRFYVMNGNFEKARQVLRKVHVDPSDEFVNATIDEMIASDSTVPGNGPLQKAWKSIKIIHTTPGNFRALILACGLQGIQQFTGFNSLMYFSATIFETIGFHNATAVSIIIAATNFVFTGIAICIIDKVGRRRILLVGMPCMCISLIVCAVAFHYLNVDFSTGTVVSRGINGWGIVVIIGMILYVASYAIGIGNAAWVGVELFSDVNVRSIGAMYAACTNWAGSLVIASTFLTMLENITPTGTFSFFAGLCFIAFFFVYFLLPDTAGLELEETTDFLSNGFNVKQAAQLSKERKKHSKFAKSKPTV

SEQ ID NO: 27227 - protein, 101 aa, Zea mays
  misc_feature (54)..(54): Xaa can be any naturally occurring amino acid
  unsure (1)..(101): unsure at all Xaa locations
ARARTLEIGLEVSGSSGFYVANQLKDQQGVMPGHRGSNLKRDLHRFIPTAAAFXGGLCIGALTVLAVFMGTMGSGTGILLAVTIIFHCFVTFDKEMTSTLA

SEQ ID NO: 27228 - protein, 495 aa, Arabidopsis thaliana
METKPNPRRPSNTVLPYQTPRLRDHYLLGKKLGQGQFGTTYLCTEKSTSANYACKSIPKRKLVCREDYEDVWREIQIMHHLSEHPNVVRIKGTYEDSVFVHIVMEVCEGGELFDRIVSKGHFSEREAVKLIKTILGVVEACHSLGVMHRDLKPENFLFDSPKDDAKLKATDFGLSVFYKPGQYLYDVVGSPYYVAPEVLKKCYGPEIDVWSAGVILYILLSGVPPFWAETESGIFRQILQGKLDFKSDPWPTISEAAKDLIYKMLERSPKKRISAHEALCHPWIVDEQAAPDKPLDPAVLSRLKQFSQMNKIKKMALRVIAERLSEEEIGGLKELFKMIDTDNSGTITFEELKAGLKRVGSELMESEIKSLMDAADIDNSGTIDYGEFLAATLHMNKMEREENLVAAFSYFDKDGSGYITIDELQSACTEFGLCDTPLDDMIKEIDLDNDGKIDFSEFTAMMRKGDGVGRSRTMMKNLNFNIADAFGVDGEKSDD

SEQ ID NO: 27229 - protein, 479 aa, Silicibacter sp. TM1040
MSDTTIGTPEQLRDPDYMPPLGKAIPLGIQHVLAMFVSNVTPAIIVAGAAGFGFGSNSPDFPELLYLIQMSMLFAGIATLMQTLTLGPVGAKLPIVQGTSFAFLPIMIPLVAGKGVDALAALFGGVLIGGLFHAALGLVIGRIRFALPPLVTGLVVTMIGLALVKVGIQYAAGGVPAIGTPEYGSLLNWSAALVVIVVTLGLKFFTRGMLSVAAVLLGLIVGYIYALMVGMLSFDSIGASWSNAAAFALPQPFKYGFEFSFAAILGFCLMAFVSAVETVGDVSGITKGGAGREATDKEIEGATFADGFGSALAGAFGAMPNTSFSQNVGLIAMTGVMSRHVVTCGAIFLIICGLIPKVGAVIRTVPIEVLGGGVIVMFGMVVAAGISILSDVDWNRRNMVIFAISLSVGLGLQLEPGALQHMPDTARILLTSGLLPAAVISIALNLILPEELADESTEEVSGGMSGHSKGSLGTSRDAQ

SEQ ID NO: 27230 - protein, 371 aa, Rubrobacter xylanophilus DSM 9941
MPKKSVGLSGAIAGDTAICTVGSSGDSLEYRGYPIEELAERATFEEVMHLLIRGELPDRRQLEEYTGRLSGMRKIPQELRDVLERIPASTHPMEVLRTGCSMLGTLEHEGEGRDAREIGERLISCLPSVLLYWHHFAGSGKRIETDTGEHSLAGHFLRLLHGREPGEEERRAVDVSLILYAEHEFNASTFTARIIASTGSDFYSAITGAIGALRGPLHGGANEAAMAFIERFRSAEEAERGLREALSRGERLMGFGHPVYTRVDPRSDIIKGWSRRLSEGHEEGYLYEVSERIERILHEEKNLFPNLDFYSASAYRFCGIPTEMFTPLFVFSRTSGWTAHVIEQRESGKIIRPSANYTGPERRPFVPLEER

SEQ ID NO: 27231 - protein, 415 aa, Streptomyces griseus subsp. griseus
MLTGIGCVLPGTPDVHSFWSHVSTGTSQVSRLESPAFAAAGLPVHAAAQLGAFDTGARLPDLLPAHAAKYNRDILATMAAVGDALEDAGIARGQIAPERMSIVQSSSRGPLSWWAETIAADPEQNPYGGRATAMFRGLAGCPATLAAIGVGAKGLVTTVSSACVGGHHAIGLALRELRSGSADVVLAGGHEFPIAPEVARCYLALGDGVLSPESDAPATAVRPYDRDRRGFALGEGAMTLCLERESSARARGARIYARILGHRALNEANHATSMDLVGDVTASVVAGVLDDAGRKPEEIGYVCGHGTATRYNDIAESRALRRLLPRHDDADLPPHGSNKPIYGHTFGMAGIINVAATSLMLHHQRLAPTANHVTPDPECDYDHVAGGPRDTEIDLAVSLSFAFGSQTSVMALEHA

SEQ ID NO: 27232 - protein, 331 aa, Rubrobacter xylanophilus DSM 9941
MTEVAGARELGREQLLDAYRTMRTIREFEERLHVEFATGEIPGFVHLYAGEEAIAAGVCAHLDEDDYIASTHRGHGHAIAKGCDVKAMMKEIYGKAEGICHGKGGSMHIADLDKGMLGANGIVGGGPPLVCGAGLSAKVRGTRQVAVSFTGDGGSNQGTFLESLNLAAVWGLPCVFVVENNGYAEATSTNFSVRGLDIAKRADGFGIPGVVVDGHDFFAVHEAAGEAVERARNGGGPTLIECKVNRYYGHFEGDAQTYRAPNEVEEIRREKDCLMLFRRRVVSAGLVEEEELDRIDDEVRNLIDEAVEEAKAAPDPSPEELLTDVYVSYQG

SEQ ID NO: 27233 - protein, 343 aa, Zea mays
  misc_feature (64)..(64): Xaa can be any naturally occurring amino acid
  misc_feature (104)..(104): Xaa can be any naturally occurring amino acid
  misc_feature (127)..(127): Xaa can be any naturally occurring amino acid
  unsure (1)..(343): unsure at all Xaa locations
PGWTHASRRAHPARVRVPLSASRLPPPPQRGARGGGALAVLVSIPAAGVPVPLLPLAVARASRXRAPEPEPRVKSRVASAPPPPPETPSGWNQNEGDRRRKLRXGRPLVECTGDRSVEEQPEHAGGXLVEGKALKMSSTVPKSSNIFWHDCPVGKTDRQKLLKQKGCVVWITGLSGSGKSTLACTLGRELHTRGKLAYVLDGDNLRHGLNKDLGFKAEDRAENIRRVGEVAKLFADAGLVCIASLISPYRRDRESCRALLSDSSFIEVFLNMSLELCEARDPKGFYKLARAGKIKGFTGIDDPYEAPLNCEIEIKEVDGVCPPPAEMAGQVVTYLEEKGFLHE

SEQ ID NO: 27234 - protein, 162 aa, Zea mays
EFELHVQEPYFTQLRAGVKKVEGRLATGNYNRITQGSLLLFNKCLLLNVEAVRKYNSFSEMLKGEKISNVLPGISSIVEGVKVYRKFYAEEKENSYGVLAISVSKPTSQPYITMNNILAGLGYDGLGRLLGMAKTTGTVPDGLPPPRSALLSSCMGLVQPNE

SEQ ID NO: 27235 - protein, 275 aa, Caulobacter crescentus CB15
MTKDRIDRRFAALKAENRAGFVTYVMAGDPDAATTLSVLKGLPAAGADLIELGFPFSDPMAEGPTIQRAAQRGLKSGMTLQGTLDLVAAFREGDQDTPIILMGYLNPVLNKGFETFAALAAKAGVDGLIIVDCPPEEADPLSDALEAEGIALIRLAAPTTDDARLPMVVRRTSGFVYYVSVAGVTGVKSADAADVAPAVERLRKASGLPVAVGFGIRTPDQAAAVAKVADAAVVGSALVDEIESAAQLNENVTEKVLLKASELAKAVRSARVGTK

SEQ ID NO: 27236 - protein, 149 aa, Pseudomonas fluorescens Pf-5
MSGLEQATFGAGCFWGAEAAFRALPGVVDSRVGYAVEAADEALQIEVVQVDFDPQVLAYTRLIEHFWDLHDPTSVDRQGEHGGVKYRSAIFHTNAAQAEQARAAKTALQDSGRLNKPVATVIVPLGRFDLADEAHQRYLEKNGLSSCHI

SEQ ID NO: 27237 - protein, 315 aa, Exiguobacterium sp. 255-15
MAKAIFAGGCFWCMVKPFHKYDGVEQVISGYTGGHTENPTYKEVCSETTGHLEAVEVTYDPSVITYDELLEIFWRQIDPTDGGGQFNDRGQSYEPAIFYVDEDQKQAAERSKAALDASGRFSKPVAVDIRPAKPFWPAEEYHQDYYKKNPFRYQMYSVGSGRAKFVKEAWKDQGKEQELKQRLTPIQYKVTQENGTEPAFRNEYWDEERPGLYVDIVDGTPLFTSKDKFNSNCGWPSFAKPISEDKMEVELDTSHGMTRTEVRSANADSHLGHIFDDGPTELGGLRYCINSAALRFIPVEELDSAGYGEYKKHFE

SEQ ID NO: 27238 - protein, 286 aa, Cucurbita cv. Kurokawa Amakuri
MALPVVDTEYLKEIEKARRDLRALIANRNCAPIMLRLAWHDAGTYDVSTKTGGPNGSIRNQEEYSHGSNNGLKKAIDFCEEVKSKHPKITYADLYQLAGVVAVEVTGGPTIDFVSGRKDSRISPREGRLPDAKKGAPHLRDIFYRMGLSDKDIVALSGGHTLGRAHPERSGFDGPWTEDPLKFDNSYFVELLKGESEGLLKLPTDKALLEDPEFRPYVELYAKDEDAFFKDYAESHKKLSELGFTPGSARAIANDSTVLAQGAVGVAVAAAVVILSYFYEIRKNLK

SEQ ID NO: 27239 - protein, 543 aa, Exiguobacterium sp. 255-15
MTCGELSFTTVEWGASFYYVAFSSSFWKVRALFVFSKSVLSKNLNKREANEMNTLQPQRKLDSTEEGLKRGLQARHMSMIAIGGAIGTGLFIASGASVAAAGPGGALLSYAIVGLMVYFLMTSLGEMAAYMPVAGSFSTYGAKFVDPSFGFALGWNYWYNWAVTIAVELVAAQIVMSYWFPDVPGFYFSALFLLLMIGLNYFSVKGFGEAEYWFAMIKVVTVIIFLIVGVAMIFGVFTSEAPVGFKNFALGDAPFVGGIPAVIGIILVAGFSFQGTELVGIAAGESEDPKKNVPKAVKQVFWRILLFYVFAIFVIGMLIPYTSPNLVSNDITDVAVSPFTLVFEKAGLAFSAALMNAVILTSVLSAGNSGMYASTRMLYTLARQGDAPKLFAQVSKNGVPRNALLATGAIGALCFLTSMFGGQVYLWLLNASGMTGFIAWLGIAISHYRFRKGFLAQGHSLSDLPYVAPAFPFGPLFAFGLCFLVIVGQNYAAFLADQIDWVGIAATYVGIPLFLAFWLGHKFKNRTSVVPYEEMEFPEHPRP

SEQ ID NO: 27240 - protein, 271 aa, Glycine max
IYLCCLCLGAKQKEEMAGESYEEAIASLTKLLSEKADLGGVAAAKIKDLTAELDAAGSKPFNPEERIRTGFIQFKNEKFEKNPDLYGELAKGQSPKFMVFACSDSRVCPSHILDFQPGEAFMVRNIANMVPPYDKTKYSGAGAAIEYAVLHLKVENIVVIGHSCCGGIKGLMSIPDDGTTASEFIEQWVQICTPAKSKVKAGKSDLSFSEQCTNCEKEAVNVSLGNLLTYPFVRDGVVNKTLALKGAHYDFVNGNFELWDLNFKLLPTISV

SEQ ID NO: 27241 - protein, 295 aa, Oryza sativa
MGRSPCCEKAHTNKGAWTKEEDQRLIAYIKAHGEGCWRSLPKAAGLLRCGKSCRLRWMNYLRPDLKRGNFTDDDDELIIKLHALLGNKWSLIAGQLPGRTDNEIKNYWNTHIKRKLLARGVDPQTHRPLNAAADHHQQQQLQAPRRFAAAPAGHHHHHPDHFAVLSNSPEACSHSSDDEPSSATPPPPPRHLGIDLNLSISLAPYQPQDQTSEPMKQEEDDEASATANGAGNAAMTTTATTAAVCLCLNRLGLHGGEVCSCGRGGAPSMQASTHMFRFITPPGGSPPNSSSTTMT

SEQ ID NO: 27242 - protein, 529 aa, Guillardia theta
MSKIILYQEDARRALERGMDILAEAVSVTLGPKGRNVVLERKYGAPQIVNDGVTIAKEIELEDHIENTGVALIRQAASKTNDVAGDGTTTATVLAHAMVKQGMKNVAAGANAIALKRGIEKATQFIVTQIAEYARPVEDTRAISQVASISAGNDIETGKMIADAIDKVGREGVISLEEGKSTITELEMTEGMCFEKGFISPYFVTDTERMEVIQDNPYILLTDKKITLVQQELLPTLELISKTSRPLVIIAEDVEKEALATLVVNKLRGIVNVVAVRAPGFGDRRKAMLEDIAILTGGQVISEDAGFSLETLTLDMLGQARRITITKENTTIIAEGNEKDVKSRCEQIRRQIEASDSSYEREKLQERLAKLAGGVAVIKVGAATETEMKDKKLRLEDAINATKAAVEEGIVPGGGSTLTHLANDLKDWAEDNLIEDELIGALIVERSLTSPLRRIIENTGQNSAIIIEQIKESEFNIGYDAAKGEIVDMYDVGIIDPAKVTRSGLQNAASIASMILTTECIVVDKQDEK

SEQ ID NO: 27243 - protein, 454 aa, Listeria monocytogenes str. 4b H7858
METYFEDAVGGIHLLPFFPSTGDRGFAPSDYTTVDSDLGSWEIIEKLGEKYYLMFDFMINHISRESLFFQDFKKEHLNSKYKDMFIRINDFFPPGRPNEKDLDLIYKRKDKAPFQEVEFADGGTELVWNTFGEEQIDLDVTAEVTKEFIRQTIKNMAAHGCSILRLDAFAYAIKKLDTNDFFVEPEIWGLLDEVKAEAAKYDMELLPEIHEHYSIQMKIANHDYYIYDFALPMVMLYSLYSGRVERLAKWLEMSPMKQFTTLDTHDGIGVVDARDLLTDEELDYTSAELYKIGANVKKIYSSEKYNNLDIYQINSTYYSALGDDDKSYLLARVIQCFAPGIPQIYYVGLLAGKNDIDLLEETKEGRNINRHYYTIDEIKNEVKRPVVKALCNLLRFRNTSEAFDLEGSIEIETPSSNEIVIIRKNKTNKITAILKANLSTKTFQISENERNILI

SEQ ID NO: 27244 - protein, 960 aa, Sorghum bicolor
MERLSSIDAQLRMLVPGKVSEDDKLIEYDALLLDRFLDILQDLHGDDLKEMVQECYEVAAEYETKHDLQKLDELGKMITSLDPGDSIVIAKSFSHMLNLANLAEEVQIAYRRRIKLKKGDFADENSAITESDIEETLKRLVVDLKKSPAEVFDALKSQTVDLVLTAHPTQSVRRSLLQKHSRIRNCLVQLYSKDITPDDKQELDEALQREIQAAFRTDEIRRTQPTPQDEMRAGMSYFHETIWKGVPKFLRRVDTALKNIGINERVPYNAPLIQFSSWMGGDRDGNPRVTPEVTRDVCLLARMMASNLYCSQIEDLMFELSMWRCSDELRMRADELHRSTKKDAKHYIEFWKKVPPNEPYRVILSDVRDKLYNTRERSRELLSSGHSDIPEEATLTTVEQLLEPLELCYRSLCACGDRVIADGSLLDFLRQVSTFGLSLVRLDIRQESDRHTDVLDAITTYLGIGSYREWPEERRQEWLLSELNGKRPLFGPDLPKTEEIADVLDTFHVIAELPADNFGAYIISMATAPSDVLAVELLQRECHVKTPLRVVPLFEKLADLEAAPAALARLFSIDWYRQRINGKQEVMIGYSDSGKDAGRLSAAWQLYKAQEELIKVAKDFGVKLTMFHGRGGTVGRGGGPTHLAILSQPPDTIHGSLRVTVQGEVIEQSFGEEHLSFRTLQRFTAATLEHGMHPPNAPKPEWRTLLDEMAVVATEEYRSIVFQEPRFVEYFRLATPETEYGRMNIGSRPSKRKPSGGIESLRAIPWIFAWTQTRFHLPVWLGFGGAFKHVLQKDIRNLHMLQEMYNEWPFFRVTIDLVEMVFAKGNPGIAALYDKLLVSEELRPLGEKLRANYEETQKLLLQVAGHRDLLEGDPYLKQRLRLRDAYITTLNVCQAYTLKRIRDPDYHVALRPHLSKEIMDPTKAASELVKLNPGSEYAPGLEDTLILTMKGIAAGLQNTG

SEQ ID NO: 27245 - protein, 124 aa, Oryza sativa (japonica cultivar-group)
MAVAAAVASARLLARLLPEVEDSSTNAGGVMAVSFRRKVLYTAVSLLVFLVAGELLLYGVQNYYGGGEHDPRYWMNAMSASLRPTVMALGLVPLLYSEMVVHLCMALKIIGVHDDRLPDHRRRL

SEQ ID NO: 27246 - protein, 488 aa, Leifsonia xyli subsp. xyli str. CTCB07
MRRAKIVATLGPATSSYDNIRAIVDAGVDVARMNLSHGSYEVHEGVYANVRKAAEDAGKPVAVLVDLQGPKIRLGKFEAGPYELAEGDIFTITTEEIIGTKEISSTTFKGLPQDVKPGDFLLIDDGKVRVRVLETDGTAVTTEVVVAGPVSNNKGINLPGVAVNVPALSEKDEADLRWGLNLGADLIALSFVRNAGDIERVHEIMAEEGRKVPVIAKIEKPQAVDALEGIIEAFDGIMVARGDLGVELPLEAVPIVQKRAVELARRAAKPVIVATQMLESMISSPVPTRAETSDVANAVLDGSDAVMLSGETSVGEYPKITVQTMAKIVKSTEEHGLDRIAPLGTKPRTQSGAITLAATEVADFVEAKYLCVFTESGESARRMARLRSKIRILAFTPEESTRRKMALYWGVESFVVDRVTHTDQMVAQVDEALKSTGRAENGDKVVIISGSPPGIPGTTNDIRVHRVGDVLCSETQRRASRFGDRSRL

SEQ ID NO: 27247 - protein, 232 aa, Glycine max
  misc_feature (183)..(183): Xaa can be any naturally occurring amino acid
  misc_feature (202)..(202): Xaa can be any naturally occurring amino acid
  unsure (1)..(232): unsure at all Xaa locations
MVSLKLQKRLAASVLKCGRGKVWLDPNEVNEISMANSRQNIRKLVKDGFIIRKPTKIHSRSRARRMKEAKRKGRHSGYGKRKGTREARLPTKILWMRRMRVLRRLLRKYREAKKIDKHMYHDMYMKVKGNVFKNKRVLMESIHKSKAEKAREKTLSDQFEAKRAKNKASRERKNARREERLAXQGPGEKPSAAPSAPSAIAXPASPSIKEIKEVTFWEIGRKGIESSIWLAS

SEQ ID NO: 27248 - protein, 477 aa, Magnaporthe grisea 70-15
MVDAPKDLVKEIKDLEEMFTVDTAKLKQITNHFVGELERGLSVEGGDIPMNPTWVMSFPDGYETGTFLALDMGGTNLRVCEITLTDQKSEFDIIQSKYRMPEELKTGQSDELWDYIADCLLQFIETHHGDPKKIEKLPLGFTFSYPATQNYVDEGILQRWTKGFDIAGVEGKNVAPMLMKALSERGVPVKLVALINDTTGTLIASAYTDTQMRIGCIFGTGCNAAYMEECGSIPKLAHMNLPPETPMAINCEWGAFDNQHKVLPRTPYDVKIDEDSPRPGQQAFEKMIAGLYLGEIFRLILVDLHDNHEVRIFKNQDISKLRRAYTLDSSFLSAIEDDPWENLSETLDLFQDKLNLVPNRNELELIRRTAELIGTRAARLSACGVAAICKKKNYRSCHVGADGSVFNKYPNFKQRGAQALREILDWPAKEDPKEEDPIEILAAEDGSGVGAALIAALTLKRAKEGNFHGISNPENFK

SEQ ID NO: 27249 - protein, 381 aa, GIBBERELLA ZEAE PH-1
MVASSNTGLEREDHQRDADFNKAMHGSSAQARGGVAAMFRKGGAAKQAAVDEYFKHWDNKPAENETPEERAARQAEYATLTRHYYNLATDLYEYGWGQSFHFCRFSQGEPFYQAIARHEHYLAHQIGIKDGMKVLDVGCGVGGPAREIAKFTGAHITGLNNNNYQIERATHYAFKEGLSNQLEFVKGDFMQMSFPDNSFDAVYAIEATVHAPTLKGIYSEIFRVLKPGGVFGVYEWLMTDEYDNDNLRHREIRLGIEQGDGISNMCKVSEGIAAIHDSGFEMLHHEDLADRPDALPWYWPLAGELRYVQTVGDFFTIVRMTTWGRTIAHGLAGLLETFKLAPAGTKKTADSLALAADCLVAGGRDKLFTPMYLMVARKPAA

SEQ ID NO: 27250 - protein, 331 aa, Arabidopsis thaliana
  misc_feature (192)..(192): Xaa can be any naturally occurring amino acid
  misc_feature (232)..(232): Xaa can be any naturally occurring amino acid
  unsure (1)..(331): unsure at all Xaa locations
MAALCCCPNKKNDSGKVSSRIKTAGPLPRINPFKNQKRLITERRNLIVKSIIEDREAIDVKNDNFKAEEELSEDKVEDTDRLMSRGINAAIVLAAGTVAVTKLLTIDHDYWQGWTLYEILRYALFFYWFAYEQILKTNPVLAKMAISGIVYSLGDWIAQCYEGKPLFEFDRTRVLRSGLVGFTLHGSLSHYXYQFCEALFPFQEWWVVPAKVAFDQTVWSAIWNSIYFTVLXLLRFQSPADIFSEIKTTFLPMLTAGWKLWPLAHLVTYGVIPVDQRLLWVDCIELIWVTILSTYSNEKAEAQASEETNSSSHSSEVCQVFLFFQESLFKN

SEQ ID NO: 27251 - protein, 774 aa, Streptomyces griseus subsp. griseus
MTAKPAAAAARATVYGYPRQGPNRELKKAIEGYWKGRVDAAALRETAAELRRGTWQQLAEAGVHDVPTGDFSYYDHVLDTSVMVGAVPGRHRAAVDADALDGYFAMARGTQDVAPLEMTKWFDTNYHYLVPELGPDTVFTADSAKQVAECAEALALGHTPRPVLVGPVTYLLLAKPAPGVAADFEPLTLLDRLLPVYAEVLADLRAAGAAWVQLDEPALVQDRTPAELNAAARAYRELGGLADRPQLLVASYFGRLGEALTVLAKAPVDGLALDFTESGAGNLDDLAAAGGLPGKRLVAGVVNGRNIWINDYEKSLATLGTLLGLADRVDVSASCSLLHVPLDADAERDIDPQIARWLAFARQKTEEIVVLARGLTGGTDTIAAELAANRADLASRAGAALTRDPAVRARTAAVTDADGRRSQPYTERSAAQRAHLGLPLLPTTTIGSFPQTTELRTARADLRAGRIDEAGYEERIKDEIREVLSFQEKAGLDVLVHGEPERNDMVQYFAEQLTGYLATQHGWVQSYGTRYVRPPVLAGDISRPEPMTVRWTTYAQSLTARPVKGMLTGPVTMLAWSFVRDDQPLGDTARQVALALRDEVNDLEASGTSVIQVDEPALRETLPLRAAEHAAYLEWATESFRLATGGVRPDTQIHTHMCYAEFGDIVQAIDDLDADVISLEAARSHMQVARELAAHGYPREAGPGVYDIHSPRIPSTEEAAALLRKGLEAIPASRLWVNPDCGLKTRGWPETRASLENLVAAAREIRAELPTEAA

SEQ ID NO: 27252 - protein, 333 aa, Nitrosomonas europaea ATCC 19718
MTIRIGINGFGRIGRMVFRCSIEEFDDIEVVAINDLLEPDYLAYMLTHDSVHGRFRGDVSVSGNNLIVNGKQIRLTAIKDPTELKWDEVGADIVVESTGLFLTKELAQKHIQAGAKKVVLSAPSKDDTPMYVYGVNDKAYGGEAIISNASCTTNCLAPIAKVLNDTWGIKRGLMTTVHAATATQKTVDGPSNKDWRGGRGILENIIPSSTGAAKAVGVVIPELNKKLTGMAFRVPTSDVSVVDLTVELEKDASYEDICNAMKEASAGSMKGILGYTDQKVVSTDFRGETCTSVFDAEAGIQLDKNFVKVVSWYDNEWGYSCKLLEMVRVIASK

SEQ ID NO: 27253 - protein, 204 aa, Viburnum melanocarpum
  misc_feature (146)..(146): Xaa can be any naturally occurring amino acid
  misc_feature (164)..(164): Xaa can be any naturally occurring amino acid
  unsure (1)..(204): unsure at all Xaa locations
YKHPVKGRKINWMKAGILESDRVFTVSPYYAEELVSGVDKGVELDNFIRKTGITGIVNGMDTQEWNPATDKYVGVKYDITTVMDAKPLLKEALQAEVGLPVDRNIPLIGFIGRLEEQKGSDILAAAIPKFIEQBVQIVVLGTGKKXMEKQLEQLEILYPDKVRXVAKFNVALAHMIIAGADFMMIPSRFEPCGLIQLHAMRYGT

SEQ ID NO: 27254 - protein, 150 aa, Pisum sativum
MAHILSEEQIVDFKEAFGLFDKDGDGCVTVEELATVIRSLDQNPTEEELQDMISEVDADGNGTIEFDEFLNLMARKMKDTDAEEELREAFKVFDKDQNGYISPSELRHVMMNLGEKLSDEEVKQMIKEADMDGDGQVDYDDFVKMMMAIR

SEQ ID NO: 27255 - protein, 672 aa, Nitrosomonas europaea ATCC 19718
MKEAFKDFSAPVFKNLTSAIRALAMDAVQKANSGHPGMPMGMAEIAEVLWNHHMRHNPTNPDWVDRDRFVLSNGHGSMLIYALLHLTGYDLSIEDIKNFRQLHSKTPGHPEYGYTPGVETTTGPLGQGITNAVGMALAEKILAEEFNRPYFPIVDHYTYVFLGDGCMMEGISHEACSLAGTLKLGKLVCFYDDNGISIDGHVEGWFTDNTPKRFESYGWHVVPDVNGHDPVAIQAAIEAAKKVQDKPTLICCKTVIGMGSPNKANTSHVHGAALGNDEIAAARPHIGWNYLPFEIPQEVYDAWDARAKGQALESAWNSMFAEYGKKYPAEAAEFTRRMADELPVGWADHVEGTISQINAREETIATRKASQNSIEALAPVLPELIGGSADLAGSNLTMWSGSKGISTESTGNYVFYGVREFGMSAIMNGLSLHGGIIPYGGTFLMFSEYARNALRMAALMKIRNIFVFTHDSIGLGEDGPTHQPVEQTATLRMIPNMDVWRPCDTVESIVSWVSAIERREGPSSLIFSRQNLPFQKRDAVTISLIRKGGYILSEAANRKPQAIIIATGSEIGLAMAAQKTLAESGIAVRVVSMPCTNIFDRQDQAYRDSVLPKGIARVAVEAGVTDYWRKYVGLEGDVIGIDRFGESAPAEKLFEYFGFTVENVVNAVKRVI

SEQ ID NO: 27256 - protein, 216 aa, Silicibacter sp. TM1040
MDYAKPLPHYLVTRYHGWKATSYEENQGWYRRLAKEGQRPRAMVISCCDSRVHVTSIFGADQGEFFIHRNIANLVPPYAPDGDHHGTSATVEYAVTVLKVAHLIVLGHSQCGGVQGCIDMCKGHAPALEEKTSFVGRWMDILKPRFASVEDIADPDEQARQFERQAVVASLENLMTFPFIDNAVKAGELSLHGLWTDIGEGGLECYDPKSNSFLQV

SEQ ID NO: 27257 - protein, 486 aa, Oryza sativa
MEVVSSSHSCLAFNRTPSSAWRFPGNGLGPGHAKLTRPRSAILCVRSGTASNPADSGKVHASHGFYVSDVDAALQGIPKKVGEIEKMIIPSLPEGPESSLISTGFWEWKPKLSVYYEKSGIDNSKAPSVLFLPGFGVGTFHFEKQLKDLGRDYKVWTMDFLGQGMSLPCEDPAPKSTSGELDEDTYWGFGQELQPWAEELVYSIDLWRDQVQHFIEEVIGEPVYIVGNSLGGFVSLYLAASCPHLVKGVTLLNATPFWGFLPNPATSPRLSKIFPWAGTFPLPSFVRKLTETVWQKISDPRSIQGILKQVYADHSTNVDMVFSRIIETTQHPAAAASFASIMCAPKGQISFEEALSRCQRQGIPISLMYGREDPWVRPIWGIKVKQQVPESPYYEISPAGHCPHDEVPEVINYLLRGWLKNVESEGSVAVPFLEEPSYAENGVSRELEFVRGGSKKSVHVRLFGSKISLWSQLRSLLKSNTWVISR

SEQ ID NO: 27258 - protein, 447 aa, Capsicum annuum
MGKEKIHISIVVIGHLTLEKSTTTGHLIYKLGGIDKRVIERFEKEAAEMNKRSFKYAWVLDKLKAERERGITIDIALLEFETTKYYCTVNDCPRGTGTLSRTMLLVLQADCAVLLLPTTGGFEVVSSKDGQTREHGLLAFTLESSKMICCCNKMDATTPSTPKARYDEIVKEVSSYLKKVGYNPDKIPFVPISGFEGDNMIERSTNLDWYKGPTLLEALDQINEPKRPSDKPFRLPLKDVYKIGGIGTVPVGRVETGVIKPGMVVTFGPSGLTTEVKSVEMHHEALQEALPGDNVGFNVKNVAVKDLKRGYVASNSKDDPAKGAASFTAQVIIMNHPGQIGNGYAPVLDCHTSHIAVKFGEILTKIDRWSGKELEKEPKFLKNGDAGMVKMIPTKPMVVETFAENPPLGRFAVRDMRQTVAVGVVKNVDKKDPTGAKVTKAAQKKGK

SEQ ID NO: 27259 - protein, 204 aa, Viburnum molle
YSKPVKGRKINWMKAGILESDGVFTVSPYYAEELISGIEKGVELDNIIRKTGITGIANGMDTQEWNPATDKYVGVKYDITTVMDAKPLLKEALQAEVGLPVDRNIPLIGFIGRLEEQKGSDILAAAIPKFIEQNVQIVVLGTGKKNMEKQLEQLEILYPDKARGVAKFNVALAHMIIAGADFMLIPSRFEPCGLIQLHAMRYGT

SEQ ID NO: 27260 - protein, 204 aa, Viburnum nudum
YNKPVKGRKINWMKAGILESDRVFTVSPYYAEELVSGVDKGVELDNFIRKTGITGIVNGMDTQEWNPSTDKYVGVKYDITTVMDAKPLLKEALQAEVGLPVDRNIPLIGFIGRLEEQKGSDVLAAAIPKFIEQNVQIIVLGTGKKYMEKQLEQLEILYPDKARGVAKFNVALAHMIIAGADFMMIPSRFEPCGLIQLHAMRYGT

SEQ ID NO: 27261 - protein, 204 aa, Viburnum plicatum
YDKPVKGRKINWMKAGILESDRVFTVSPYYAEELVSGVDKGVELDNFIRKTGITGIVNGMDTQEWNPAMDKYVGVNYDITTVMDAKPLSKEALQAELGLPVDRNIPLIGFIGRLEEQKGSDILAAAIPKFIEQNVQIVVLGTGKKYMEKQLEQLEILYPDKARGVAKFNVALAHMIIAGADFMMIPSRFEPCGLIQLHAMRYGT

SEQ ID NO: 27262 - protein, 269 aa, Klebsiella pneumoniae
MERYETLFAQLKNRQEAAFVPFVTLGDPGPEQSLKIIDALIEGGADALELGIPFSDPLADGPTIQGAALRAFAAGVTPAQCFEMLAAIRQKHPTIPIGLLMYANLVFSPGIDAFYAQCARVGVDSVLVADVPVEESAPFRQAAMRHNIAPIFICPPNADDDLLRQIASYGRGYTYLLSRAGVTGAENRAALPLHHLVEKLAEYHAAPPLQGFGISAPEQVSAAIDAGAAGAISGSAIVKIIERHLDEPQTMLDELKAFVQSLKAATKTA

SEQ ID NO: 27263 - protein, 267 aa, Pseudomonas aeruginosa
MSRLQTRFAQLKQENRAALVTFVTAGDPDYASSLEILKGLPGAGADVIELGMPFTDPMADGPAIQLANIRALEGGQTLARTLQMVREFRSGDSETPLVLMGYFNPIHHYGVERFIAEAKEVGVDGLIVVDLPPEHNEDLCHPAQAAGLDFIRLTTPTTGDQRLPTVLEGSSGFVYYVSVAGVTGANAATLEHVEEAVARLRRHTDLPIGIGFGIRSAEHAAVARLADGVVVGSALIDRIAKARDNAQAVKDVLALCGELAEGVRNAR

SEQ ID NO: 27264 - protein, 543 aa, Rhodopseudomonas palustris CGA009
MARYIFITGGVVSSLGKGLASAALGALLQARGYKVRLRKLDPYLNLDPGTMSPYQHGEVFVTDDGAETDLDLGHYERFTGRPATKQDNITTGRIYQDILTKERRGDYLGATIQVVPHVTNAIKEFIVSDNDGYDFVLVEIGGTVGDIEGLPFFEAIRQIKNDLPRGDVIYIHLTLLPYIPSAGELKTKPTQHSVKELRSIGIQPDILLCRTDRPIPKEERRKLGLFCNVRESAVIEARDADSIYAVPEAYHAAGLDDEVLAAFAIAAKEPPQLGRWHEINERIRNPEGAVTIAIVGKYTGMKDAYKSLIEALSHGGIANKVQVKLDWIESEVFENEDPAPFLEHVNGILVPGGFGQRGAEGKIEAARFARERNVPYFGICFGMQMAVIEAARNLAGIEQANSTEFGPTPEPLVGLMTEWVRGNELEKRSQAGDLGGTMRLGAYPATLKRGSRVSQVYGGVTEISERHRHRYEVNTAYKDRLEQHGLKFSGMSPDGVLPEIVEYEDHPWFIGVQFHPELKSRPFDPHPLFASFVQAALVQSRLV

SEQ ID NO: 27265 - protein, 304 aa, Kineococcus radiotolerans SRS30216
MSHTPSTSTPTPALTLNNGVTMPALGLGVFQSEPEETTDAVEAALATGYRHIDTAAGYGNEREVGEGVRRSGLERSEVFLETKVWVSDYGYEQTLHAFTKSAAKLGVEQIDLLILHQPMPQHFERTRAAYRALERLLTDGAVRAIGVSNFLPHHLTGLLEQAEVVPAVNQVELHPYFTQPDVQAANAAHGILTQAWSPIGGITFYPGWGENRTSALADPTIAAIAAAHGKTPAQVMLRWHLQQGRSAIPKSTKPTRIAENFAVHGFTLDDDELARLDSLDTGRRGGPDPDAVDPSTWDLTIPDA

SEQ ID NO: 27266 - protein, 250 aa, Geobacillus kaustophilus HTA426
MDVDVKQDQSPIKDQEMKELIRRSQEGDQEARDEIIEKNMRLVWSVVQRFLNRGYEADDLFQIGCIGLLKSVDKFDLSYDVKFSTYAVPMIIGEIQRFLRDDGTVKVSRSLKEMGNKIRKAKDELSKTRGRAPTVTEIADHLGISPEDVVLAQEAVRSPTSIHETVYENDGDPITLLDQIADADEASWFDKIALKKAIEELDERERLIVYLRYYKDQTQSEVASRLGISQVQVSRLEKKILQHIKDKMDG

SEQ ID NO: 27267 - protein, 546 aa, Helicobacter pylori
MAKEIKFSDSARNLLFEGVRQLHDAVKVTMGPRGRNVLIQKSYGAPSITKDGVSVAKEIELSCPVANMGAQLVKEVASKTADAAGDGTTTATVLAYSIFKEGLRNITAGANPIEVKRGMDKAAEAIINELKKASKKVGGKEEITQVATISANSDHNIGKLIADAMEKVGKDGVITVEEAKGIEDELDVVEGMQFDRGYLSPYFVTNAEKMTAQLDNAYILLTDKKISSMKDILPLLEKTMKEGKPLLIIAEDIEGEALTTLVVNKLRGVLNIAAVKAPGFGDRRKEMLKDIAILTGGQVISEELGLSLENAEVEFLGKAGRIVIDKDNTTIVDGKGHSDDVKDRVAQIKTQIASTTSDYDKEKLQERLAKLSGGVAVIKVGAASEVEMKEKKDRVDDALSATKAAVEEGIVIGGGAALIRAAQKVHLNLHDDEKVGYEIIMRAIKAPLAQIAINAGYDGGVVVNEVEKHEGHFGFNASNGKYVDMFKEGIIDPLKVERIALQNAVSVSSLLLTTEATVHEIKEEKAAPAMPDMGGMGGMGGMGGMM

SEQ ID NO: 27268 - protein, 254 aa, Guillardia theta
MIKNRCLDIDLETKEKVLIVDDEASIRKILETRLSMIGYFVVTASDGEEALNLFHQEMPDVVILDIMMPKLDGYGVCQEIRKDSDVPIIMLTALGDVADRITGLELGADDYVVKPFSPKELEARIRAVLRRTNKAAFSSHLTTSGIINFNFLTIDLNKRQIYKDNERIRLTGMEFSLLELLISRSGQPFSRADILQEVWGYTPERHVDTRVVDVHISRLRAKLETDPSNPDLILTARGTGYLFQRITDQHVLKT

SEQ ID NO: 27269 - protein, 333 aa, Kineococcus radiotolerans SRS30216
MNLSAVLQAPHQLVIEDRDTPRPGRHDVLVRVEAVGICGSDVHYYEHGRIGSYVVRAPMVIGHEAAGTIVAVGDGVDASRVGQRVALEPGVPDRTCEQCLAGRYNLCPNVVFFATPPVDGAIAQLVTIDAAFAHPAPEQLSPEQAAMAEPVSVGVWAARRARIAPGDRVLVTGAGPIGLLAAQVALAFGADSVTVTDVSDFRLKVARELGLRAQAATQELTGSFDVLLECSGAPAAWRSGLGALAPAARAVLVGMGADELPIDVPLVQGREITITGIFRYAGTYPTALSLIASGRVSTEAIITHRFPLAQAEDALTVGRREDRSLKAVVLPQQ

SEQ ID NO: 27270 - protein, 1725 aa, Oryza sativa (japonica cultivar-group)
MAGVHTHRAFLLCNYLLLGAASGCIFLTLSLRLLPSPCGLLLVFLHALTAVLAAAACSGSFTAPGGGGGTHTAHTASAVLTAIFQGAAALLAFTRTGDFLAELRSYVREEDGEVILELVGGLGAAIFVLEWAALALAFALRLGDDGADGDEHDGGNIIAPKKFAKLDPAALRKGGKPTWHTARWTARDGRPPAPSCPLAALAKGGRTPLPPLQKAAGLAAYKAQPAPLRSPFPPNLSTSKKKKKRRRGGEEKKRRSPASFKLRFQDPSVQMNMDDGEGPSAEVNEIEVDQVNAPEEDGVAPVVAPVGMQPGGVADEGETVGAIVDEMEKEDSDNERVEEDDSSDDDENNINPAEWASDDFSGLVISEGENVRWEYKENEIIEGARYGNGEDMKEAVKHYAVSLHREFWVAKSNRTQYEVRCVNEKDGCPWRVHAYKGKWKDYWTVSVVTKHTCYLPGVQKYHRNITCAFVASEMYAHVVDNLAYEPKSIIRHIEQTFKYTISYAKAWRAKQKIIEMRFGTYEASYDNLPRLLSVIQQRNPGTSCALKTFPSIEHPGKTVLQRAFLALHACKMAFVHCRPVLCIDGTFLTGKYRGQILTAIGVDGNNQVLPLAFAFVESENTDSWYWFLHLVKTEVVGMRPNVCLIHDRHAGMLRAIEELKFGTMERGYPGQWEDVQSRWCMRHMGANFFKQFKNKELMNMFKRLCNQNQEKKFNELWKRLDELTGKCSDQRATRPAAAVPDPPQALGALPTDSVTLVRRTGEQIRKFSQWIENEPKEKWAKTYDTGGARYGIMTTNLAEVYNWVMRGVRGLPLVGIVEFILHGTCKYFRERFQAVFPSMPNNNILFGTFMEKKLAEWRAKAMKHRALVQGTQQHRFEVLCQDKAGRGIYRKRVKQECVLKDDGTCHCSCRKPTLLHRPCTHVISAASECGIQDAVYVSQYFSKQAIYHTWSGEIFGFGVAGEFTKINDLIIYIPDPTKLRDKAGRRKTRRIRNDMDESEAGRVKRCSKCDERGHTYKYCPKDKEKPSAAEAGLSGSAADGARPTEMAHPELLDPAIDQRHRSYLTAVEGAQLGTFRPRSSRERLLVHDSFVERLREAGLLPLARLVEAATGDDDVTRRWDPDRSLLAALVDRWRPETHTFHLPCGEVAPTLQDVSYLLGLPLAGDAVGPVDMGVDWKDELTARFAPVQRLPGLPLEPLQQHRNTGPTKRWLLQFTVDQLPEEADEYSFSRCLEAYLLWLFGWVMFCGSHGHSVDRGLVHYARSIADAAVGEVPQWSWGSALLAAQYRGLCEACTRTDPGAIFGGCPLFISLWAAERIAIGRPLVEHHPYDASLYENRPAVDYPTMGTLWCRRQRRWAHVQVRRSYAEFVMEFDRLLPTDVVWEPYSALLTHSRAPLGLSTLCTRDQAYWMTTVPMVFDICVEPHAPYRVMRQFGFRQSFPVPFPAGVTAAVHRYSRKGQHSAGHWPAKLGPFLDDWLLATEEVVDHAGEPHTEEGYEAYLRWYQPHTRTRVTYAPTEQQAHAASARDLYARHRDQDFARAAVECNRVVVDATTAIQRLGAGIEVGADEHLSTYTRIRDSMRSVLRALTCRAADVAQADAAPQVRPRPTAPRPAAHVPTPTPPPFGGCGVIVTGRCVGLAVCAVLAGRRDFVTAARHVLAGSYRDFVRARLGGAPPVHTQEQSPSTPLPDPRATRAVPPDRFTYSQDHVRAQARRTKRGRGASHGQ

SEQ ID NO: 27271 - protein, 182 aa, Desulfotalea psychrophila LSv54
MNTLKNQTLPLRIIMKRDFYQFSATNLQGQKIAMKEYRGKVMLVVNTASKCALSSQLRGLEILYKKYAPLGFVVLGFPCNQFTPQESRDAQNIAEEYLLNYGASFPLFTKTEVVGKGAHPLFSYLENRLEGIMGPDIKWNFTKFLIDHRGDPVKRFAPITAPAIIAPDIEILLSAQSTAGEQ

SEQ ID NO: 27272 - protein, 335 aa, Chondrus crispus
MTAPKVGINGFGRIGRLVLRAAIEKGTCQVVAINDPFIDLDYMAYMLKYDSTHGRYAGDVSIKDGKLQVDGNSITVFAHRDPAEIPWATAAADYIVEATGVFTLKDKAAAHFKGGAKKVVISAPSKDAPMFVCGVNEAKYTPDLDIISNASCTTNCLAPLVKVIHEKYGIEEGLMTTVHATTATQKTVDGPSNKDWRGGRGRGRNIIPSSTGAAKAVGKVMPELNGKLTGMAFRVPTPDVSVVDLTVRLTSETTYEDIKATMKAAADDSMKGIMKYTEDAVVSTDFIHDDASCIFDASAGIMLNSKFCKLVAWYDNEWGYSNRVVDLIAHISKVQ

SEQ ID NO: 27273 - protein, 372 aa, Bacillus methanolicus
MTVTRGLEGVVATTSSISSIIDDTLTYVGYNIDDLADNASFEEVIFLLWHRKLPTKSELEELKILLAENAELPKEILDHFKMYPIDKVHPMAALRSAVSLLGLYDEEADLMDEEANYRKAIRLQAKIPSIVAAFARVRKGLEPVAPRKDLSFAANFLYMLKGKEPEDIAVEAFNKVLVLHADHELNASTFTARVCVATLSDIYSGVTAAIGALKGPLHGGANEAVMKMLTEIGSLENVEPYIREKLAKKEKIMGFGHRVYRKGDPRAKHLREMSKKLTELTGEPHWYEMSTKIEAIVTGEKGLPPNVDFYSASIYHSLGIDHDLFTPIFAVSRISGWLAHILEQYENNRLIRPRADYIGPGMQKFIPIEQRG

SEQ ID NO: 27274 - protein, 218 aa, Brucella suis 1330
MSFFDSYRKKMQMPSKEEVLPGRVQPIPTAAAHFVSGHPLKGPWPDGMKQVLFGMGCFWGAERLFWQVPGVYVTAVGYAGGITPNPTYEETCTGLTGHAEVVLVVYDPKVVTLNELLALFWEEHDPTQGMRQGNDIGTTYRSVIYTFNAVDRAVAEKSRDAYSQALASRGLGPVTTQIADAPDFYYAEDYHQQYLAKNPDGYCGLRGTDVSCPIPLAH

SEQ ID NO: 27275 - protein, 754 aa, Arabidopsis thaliana
MASTSSLALSQALLARAISHHGSDQRGSLPAFSGLKSTGSRASASSRRRIAQSMTKNRSLRPLVRAAAVETVEPTTDSSIVDKSVNSIRFLAIDAVEKAKSGHPGLPMGCAPMAHILYDEVMRYNPKNPYWFNRDRFVLSAGHGCMLLYALLHLAGYDSVQEEDLKQFRQWGSKTPGHPENFETPGIEVTTGPLGQGIANAVGLALAEKHLAARFNKPDAEVVDHYTYAILGDGCQMEGISNEACSLAGHWGLGKLIAFYDDNHISIDGDTEIAFTENVDQRFEALGWHVIWVKNGNTGYDEIRAAIKEAKTVTDKPTLIKVTTTIGYGSPNKANSYSVHGAALGEKEVEATRNNLGWPYEPFQVPDDVKSCLDDLLFDLHFSSHWSRHTPEGATLESDWSAKFAAYEKKYPEEASELKSIITGELPAGWEKALPTYTPESPGDATRNLSQQCLNALAKVVPGFLGGSADLASSNMTLLKAFGDFQKATPEERNLRFGVREHGMGAICNGIALHSPGLIPYCATFFVFTDYMRGAMRISALSEAGVIYVMTHDSIGLGEDGPTHQPIEHIASFRAMPNTLMFRPADGNETAGAYKIAVTKRKTPSILALSRQKLPHLPGTSIEGVEKGGYTISDDSSGNKPDVILIGTGSELEIAAQAAEVLRKDGKTVRVVSFVCWELFDEQSDEYKESVLPSDVSARVSIEAASTFGWGKIVGGKGKSIGINSFGASAPAPLLYKEFGITVEAVVDAAKSFF

SEQ ID NO: 27276 - protein, 290 aa, Agrobacterium tumefaciens str. C58
MEDVMSFKAAAIQMRSGVDPVRNAADMERLVRAAAAEGAVYVQTPEMTGAIQKDRQALRAQLRDDDGDIIVATAARLARELGIHVHIGSTAIARPDGKIANRGFLFAPDGSRICSYDKIHMFDVDLDNGESWRESAAYQPGEVARIAELPLAKFGFAICYDVRFPQLFRAEALAGAEVLTVPAAFTRQTGEAHWEILLRARAIENGAFVIAAAQAGVHEDGRETFGHSIIIDPWGKVLALAGGAGEEIIFAEIDTSLVAAARGKIPNLRNAREFGLDTVIPLKPAGGEAA

SEQ ID NO: 27277 - protein, 870 aa, Mesembryanthemum crystallinum
MGGMKGWLCSGNKGQLDGVEPSSIDGTSQYSLSNGLLPSLGARSNRRVILRRFIISPFDSRYRWWETFLILLVFYTAWVSPFEFGFLKKPIKVLAITDNIVNGFFAVDIILTFFVAFLDPQTYLLVDNQKKISWRYIRTWFLFDVISTVPSELVEKMFPSMQVYGLFNMLRLWRLRRVSKMFTRLEKDRNISYFLVRCSKLIFVTLFAVHLAACFYYYIAAHYPDPRKTWIGIGMEDFHLEAVSLRYVTSIYWSITTLTTTGYGDLHPVNIREMIFDIFYMLFNLGLTAYLIGNMTNLVVHGTSRTRRFRDTIQAASSFGLRNRLPVRLQDQMLAHLCLKYRTDSEGLQQQEVLDSLPKAIKSSISHYLFYSLLDKVYLFHGVSNDLLFQLVSEMKAEYFPPKEDVILQNEAPTDLYVLVSGAVEFIVLRNGTEQVVREATSGEVCGEIGVLCYRPQLFTVRTRRLCQLLRLNRTAFLNLVQANVGDGAIIMNNLLEHLKEQSDPLMQSVLRDVENMLARGRMDLPLSLCFAAARGDEPLLQHLLRQGSDPNEADMNGRTALHISAANGNDNCAVVLLAYGADPNAKDSEGNVPLWEAIMGRHESLIKLLIDQGATLASGDVPQYACYAVEQDNLELLKDIVRYGGDVKLAKTNGTTPLHAAVTSGNAAIVKFLLKQGADMEKGDVHGWTSKGLAEFHGNDDVKALFRSKEETNLQSVVSVPENEVAPASLKKLRTDSMDVTPRVREVTWADKNRRRRVNTFRNSLFGIMSAATRGETAEGSSFTNSPIFGNQSARVILKCPAKGEAVKLVMVPETIQELLDIGAQKFGCVCTKVVTADGAEVDEVEVIRDGDHLSLICEDEDDMQMPES

SEQ ID NO: 27278 - protein, 205 aa, Escherichia coli
RELKARHLTMIAIGGSIGTGLFVASGATISQAGPGGALLSYMLIGLMVYFLMTSLGELAAYMPVSGSFATYGQNYVEEGFGFALGWNYWYNWAVTIAVDLVAAQLVMSWWFPDTPGWIWSALFLGVIFLLNYISVRGFGEAEYWFSLIKVTTVIVFIIVGVLMIIGIFKGAQPAGWSNWTIGEAPFAGGFAAMIGVAMIVGFSIQ

SEQ ID NO: 27279 - protein, 204 aa, Viburnum rufidulum
YNKPVKGRKINWMKAGILESDRVFTVSPYYAEELISGVDKGVELDNFIRKTGITGIVNGMDTQEWNPSTDKYVGVKYDITTVMDAKPLLKEALQAEVGLPVDRNIPLIGFIGRLEEQKGSDILAAAIPKFIEQNVQIVVLGTGKKYMEKQLEQLEILYPDKARGVAKFNVDLAHMIIAGADFMMIPSRFEPCGLIQLHAMRYGT

SEQ ID NO: 27280 - protein, 579 aa, Saccharomyces cerevisiae
MKYVVVSGGVISGIGKGVLASSTGMLMKTLGLKVTSIKIDPYMNIDAGTMSPLEHGECFVLDDGGETDLDLGNYERYLGVTLTKDHNITTGKIYSHVIAKERKGDYLGKTVQIVPHLTNAIQDWIERVAKIPVDDTGMEPDVCIIELGGTVGDIESAPFVEALRQFQFKVGKENFALIHVSLVPVIHGEQKTKPTQAAIKGLRSLGLVPDMIACRCSETLDKPTIDKIAMFCHVGPEQVVNVHDVNSTYHVPLLLLEQKMIDYLHARLKLDEISLTEEEKQRGLELLSKWKATTGNFDESMETVKIALVGKYTNLKDSYLSVIKALEHSSMKCRRKLDIKWVEATDLEPEAQESNKTKFHEAWNMVSTADGILIPGGFGVRGTEGMVLAARWARENHIPFLGVCLGLQIATIEFTRSVLGRKDSHSAEFYPDIDEKNHVVVFMPEIDKETMGGSMRLGLRPTFFQNETEWSQIKKLYGDVSEVHERHRHRYEINPKMVDELENNGLIFVGKDDTGKRCEILELKNHPYYIATQYHPEYTSKVLDPSKPFLGLVAASAGILQDVIEGKYDLEAGENKFNF

SEQ ID NO: 27281 - protein, 284 aa, Silicibacter sp. TM1040
MKFRHIRQATEIEKGLHMTRPTTRIDAKFAELAAAGKKAFVTYVMAGDPDYDTSLEVVKGLPAAGVDVIELGLPFTDPMADGETIQLAGQRALEAGMTLERTLQLARDFRKEDDTTPIVLMGYYNPIYSRGVETFLSDAKEAGIDGLIVVDLPPEEDSELCLPAQAAGLNFIRLATPTTDDARLPRVLQNTSGFVYYVSITGITGAAEAEAADVGPEVARIKAATDLPIIVGFGIKTPERAQTIASISDGAVVGSAIVAEIGAGKSPAEVLAFVKTLADGAHAG

SEQ ID NO: 27282 - protein, 305 aa, Oryza sativa (japonica cultivar-group)
MERAVPVRKPHTSTADLLTWSATGPDAAAAAASPVASSRPSLKPAGGITPAMFGAPVSEKEAEDLSKSERKFCSGSKLKEMTGSGIFAENSENDDSEASNPANKTSVRMYQQTVTGISQISFSADGSVSPKKPSSLPEVAKQRELSGTLETDAEAKMNKQHSEAKSKELSGSDIFGPPPEIPARPLAARNMELQGNLDFALPQPRSVHTSVKVSNPAGGPSNITFSEEPVVKTSKKIHNQKFQELTGNNIFKEDATPASAEKSLSSAKLKEMSGSDIFADGAAAPRDYLGGVRKPPGGESSIALI

SEQ ID NO: 27283 - protein, 204 aa, Viburnum sargentii
YSKPVSGRKINWMKAGILESDKVFTVSPYYAEELVSGVEKGVELDNFIRKTGITGIVNGMDTQEWNPATDKFVAVKYDITTVMDAKPLLKEALQAEVGLPVDRNIPLIGFIGRLEEQKGSDILAAAIPKFIEQNVQIVVLGTGKRYMEKQLEQLEILYPDKARGVAKFNVALAHMIIAGADFMMIPSRFEPCGLIQLHAMRYGT

SEQ ID NO: 27284 - protein, 404 aa, Vibrio fischeri ES114
MQNIGMSSKLSSVCYDIRGPVLKHAKRMEEEGHKILKLNIGNPAPFGFDAPDEILVDVIKNLPTSQGYCDSKGIYSARKAVVQHYQRRGLLDLDVEDVYIGNGASELIVMAMQALLNNGDEMLVPAPDYPLWTAAVSLSGGKPVHYMCDEGADWYPDLDDIKKKITPNTKGIVLINPNNPTGAVYSRDFLLQVVEIARQNNLIIFADEIYDKVLYDGAVHTTLATLAPDILTVTFNGLSKAYRVCGFRGGWMFLNGPKDHAQGYIAGLDMLASMRLCANVPMQHAIQTALGGYQSINELLLPGGRLLEQRDKAYDLITQIPGVSCVKPKGAMYLFPKLDPKMYKIKDDQKFVLDFLIKEKVLLVQGTGFNWPTPDHFRIVTLPRVDDLETAIGRLERFLHTYKQ

SEQ ID NO: 27285 - protein, 204 aa, Viburnum suspensum
YNKPVKGRKINWMKAGILESDRVFTVSPYYAEELISGVDKGVELDNFIRKTGITGIVNGMDTQEWNPAMDKYVGVNYDITTVMDAKPLLKEALQAEVGLPVDRNIPLIGFIGRLEEQKGSDILAAAIPKFIEQNVQIVVLGTGKKYMEKQLEQLEILYPDKARGVAKFNVALAHMIIAGADFMMIPSRFEPCGLIQLHAMRYGT

SEQ ID NO: 27286 - protein, 449 aa, Bacillus anthracis str. Sterne
MKTKQTDELLAKDEQYVWHGMRPFSPNSTMVGAKAEGCWVEDIQGKRYLDGMSGLWCVNSGYGRKELAEAAYKQLQTLSYFPMSQSHEPAIKLAEKLNEWLGGEYVIFFSNSGSEANETAFKIARQYYAQKGEPHRYKFMSRYRGYHGNTMATMAATGQAQRRYQYEPFASGFLHVTPPDCYRMPGIERENIYDVECVKEVDRVMTWELSETIAAFIMEPIITGGGILMPPQDYMKAVHETCQKHGALLISDEVICGFGRTGKAFGFMNYDVKPDIITMAKGITSAYLPLSATAVKREIYEAFKGKGEYEFFRHINTFGGNPAACALALKNLEIIENENLIERSAQMGSLLLEQLKEEIGEHPLVGDIRGKGLLVGIELVNDKETKEPIDNDKIASVVNACKEKGLIIGRNGMTTAGYNNILTLAPPLVISSEEIAFVIGTLKTAMERI

SEQ ID NO: 27287 - protein, 618 aa, Chlamydomonas reinhardtii
MAPPAPAPPPATGRLTDYELQYIDKGSFGAVFKAVRKSDGRVYALKQVDLRSADFKNPTLDRAAAIDEARMLAQLNHPHVIRHFESFVDGEGKLNILMEYASKGSVRQLVKSYRGRPLPEEGVWRIFIQTLIGLSYLHSKKIIHRDIKSANLFIDAYDNIKIGDFGIARSLGASSNLAQTILGTPYYMAPELCQDKPYDAKSDVWALGVVMYECCMGHYPFDVENNNQVALIRKIARGVFKPVSGPYTQQLIQLITSCLTLDPRQRPDTTALLRNPSLVAKAGALKIDLNPQPASAKEDKPVYEQRGGVATAPPPQQQVGTPPRGVPGPPEHPFASPHGGGGGAPPPYPAQPSPHSPYPYQQGQIPYLPHQRPGSGRSPGPGPGDHPFSLPGGQQAPPYGAYPSPQHQQPPQQQQGGYGGGYSPPQPYGHQQQQPSPRGSPYAQQQRGYNGYGGDPYDQLAGDINRMHLRESEVARNNVERAQQVQANAHAGRMDHAKGVIYGGPQDSGPRPQRVAPEALPAAGARPTSAHAGAPFATHYPGGGSQLQTHAQASMNEAWRATYQAPQYGRRRNPELQITGPSLRSTSARGAGGGGGYARAADDATSYVSSTSYYTSAK

SEQ ID NO: 27288 - protein, 166 aa, Rhodopseudomonas palustris CGA009
MNMRDIIPWGRTNQPATRSFEGDPFLSLHREMNRLFDDVFRGFDLPARAGTLAPFSTGWPKLEITDGDKELKIAAAVPGLEEKDIEVLLDDGTLTIRGEKTSSTEAKDKQFSEHFYGKFERRIPLDVAVAADQVSASFKNGVLTVTLPKAEPSPSTAKRIEIQKTN

SEQ ID NO: 27289 - protein, 204 aa, Viburnum tinus
YNKPVKGRKINWMKAGIIESDRVFTVSPYYAEELVSGVDKGVELDNIIRKTGITGIVNGMDTQEWNPAMDKYVGVKYDITTVMDAKPLLKEALQAEVGLPVDRNIPLIGFIGRLEEQKGSDILAAAIPKFIEQNVQIVVLGTGKKYMEKQLEQLEILYPDKARGVAKFNVALAHMIIAGADFMMIPSRFEPCGLIQLHAMRYGT

SEQ ID NO: 27290 - protein, 645 aa, Pseudomonas syringae pv. tomato str. DC3000
MGQTRFATGRQLDLICLGRLGVDLYAQQVGARLEDVSSFAKYLGGSSANIAFGTARLGLRSAMLSRVGDDHMGRFLLESLAREGCDVSAVKRDPERLTAMVLLGLKDRETFPLVFYRENCADMALRAEDIDEQHIASSKALLITGTHFSTDQVFKASSQALDYAEKHNVKRVLDIDYRPVLWGLAGKADGETRFVADQKVSQHVQRILPRFDLIVGTEEEFLIAGGSTDLLGALRTVRELTAATLVVKLGPQGCTVIHGAIPARLEDGAIYPGVRVEVLNVLGAGDAFMSGFLSGWLTEASDERCCQLANACGGLVVSRHACAPAMPTPAELDYLFNSPEPITRPDQDVILQRLHQVSVPRKQWKQLFIFAFDHRGQLVELAQQAGRDLNSISQLKQLFVQAVERVEADLHQRGIEADVGLLADQRFGQDSLNTATGRGWWLARPVEVQGSRPLAFEHGRSIGSNLINWPQEQIVKCLVQYHPDDEPMLRLEQEAQIKALYDASKVSGHELLLEIIPPKDHPSAHPDVMLRALKRLYNLGIYPAWWKIEAQSTEVWQQLDELIQQRDPYCRGVVLLGLNAPVEELAAGFAQARDSHVCKGFAVGRTIFREPSRAWMAGEIDDATLVSQVQSTFSGLIESWRESRA

SEQ ID NO: 27291 - protein, 476 aa, Arabidopsis thaliana
MQISSSSFITKFTNLHMVRSTSDHHQWRHNYNLKQLFIPNLSVSNSQHLPLNQSVAAIVFGGGSDSELYPLTKTRSKGAIPIAANYRLIDAVISNCINSGITKIYAITQFNSTSLNSHLSKAYSGFGLGKDRFVEVIAAYQSLEDQGWFQGTADAIRRCLWVFEEFPVTEFLVLPGHHLYKMDYKMLIEDHRRSRADITIVGLSSVTDHDFGFGFMEVDSTKAVTRFTIKGQQDLISVANRTATRSDGTSSCSVPSAGIYVIGREQMVKLLRECLIKSKDLASEIIPGAISEGMKVKAHMFDGYWEDVRSIGAYYRANMESIKSYRFYDRQCPLYTMPRCLPPSSMSVAVITNSIIGDGCILDKCVIRGSVVGMRTRIADEVIVEDSIIVGSDIYEMEEDVRRKGKEKKIEIRIGIGEKSRIRRAIVDKNARIGKNVMIINRDNVEEGNREAQGYVIREGIIIILRNAVIPNDSIL

SEQ ID NO: 27292 - protein, 465 aa, Desulfotalea psychrophila LSv54
MNRRSIMTQEAMKKVIAQNKKNCWHHLTQHSAYDKDGAAPMVVVEGKGMRIKDANGNEFLDAVSGGVWTVNVGYGRESIANAVRDQLVKLCYFAGSAGSVPGAQFAEALLDKMPGMDRVYYSNSGSEANEKCFKIIRQLAHLEGDGKKNKIIYRDRDYHGTTIGALSSTGQFERKAQYGPFAPGFVELTNCCCYRCPFGKKYGECNIECAHALEDLIQAEGPETVGGIILEPITAGGGVIVPVPEYFPIIREICDRHGVLLHIDEVVCGLGRTGKWFGYQHFDVVPDMVTMAKGVASGYAGISCTTTTEAVFDRFKADPSDKMHYFRDISTFGGCTAGPAAALENMAIIIRENLLDNVVKMGDYFSDRLFELKDKYEIIGDVRGKGLFQGLELVKDRTTKEPVDESVAAGVAGHCAAKSRVIIGRTNRSFEKHNNTLAFSPALISSKTEIDEVINALDLAFADQK

SEQ ID NO: 27293 - protein, 331 aa, Vibrio cholerae
WSQGFFGIDDQGEVYVSPRKDKAHQTQLSSIVKQLEARDLNLPVLVRFPQILHQRVHNICDAFNQAIEEYDYPNKYLLVYPIKVNQQKEVVDEILASQAELEHKQLGLEAGSKPELLAVLAMAQQASSVIVCNGYKDREYIRLALIGEKLGHKVFIVLEKLSELDLVLKEAKSLGVKPRLGLRIRLASQGAGKWQSSGGEKSKFGLAASQVLTVINRLKAEDQLEALQLVHFHLGSQMANIRDVRNGVNEAVRFYCELRELGAHIDFFDVGGGLAVDYDGTRSQSSNSMNYGLHEYARNIVSTVSDVCNLYGQPRPVIISESGRSITAHHA

SEQ ID NO: 27294 - protein, 465 aa, Desulfotalea psychrophila LSv54
MNRRSIMTQEAMKKVIAQNKKNCWHHLTQHSAYDKDGAAPMVVVEGKGMRIKDANGNEFLDAVSGGVWTVNVGYGRESIANAVRDQLVKLCYFAGSAGSIPGAQFAEALLDKMPGMGRVYYSNSGSEANEKCFKIIRQLAHLEGDGTKNKIIYRDRDYHGTTIGALSATGQFERKAQYGPFAPGFVELTNCCCYRCPFGKKYGECNIECAHALEDLIQAEGPETVGGIILEPITAGGGVIVPVPEYFPIIREICDRHGVLLQIDEVVCGLGRTGKWFGYQHFDVVPDMVTMAKGVASGYAGISCTTTTEAVFDRFKADPSDKMHYFRDISTFGGCTAGPAAALENMAIIVRENLLDNVVKMGDYFQDRLFELKDKYEVIGDVRGKGLFQGLELVKDRTTKEPVDESVAAGVAGHCAAKSRVIIGRTNRSFEKHNNTLAFSPALISSKTEIDEVINALDLAFADQK

SEQ ID NO: 27295 - protein, 480 aa, Brucella suis 1330
MQTRYPDVKLFIDGTWRDGSRGETIEIFNPATDEVIGHIARATTADLDDALAAVDRGFEAWSKVSAFDRYKIMRRAADIFRSRGEEVARLLTMEQGKPLAEARIEAAAACDLIDWFAEEARRSYGRIVPPRQAYVMQAEVKEPVGPVAAFTPWNFPINQAVRKISAALAAGCSILLKAAEDTPAAPAELVRAFAEAGLPDGAINLVYGDPAEISAYLIPHPVIRKVSFTGSTQVGKQLAALAGLHMKRVTMELGGHAPVIIAADADVEQAIKVVSGSKFRNAGQVCISPTRFLIENSVYDQVVEGMAAYATSLKVGDGLEAGTTMGPLVNAKRVNAMERLVQDAREHKARVVTGGERIGNRGNFFEPTILADVPRDATIMNEEPFGPVALLNRFDALDEALSEANRLNYGLAAYAFTGSSAKAARISSTVRSGMITINHYGLALPEVPFGGINDSGYGTEGGADALEAYQNTKFVSFLQA

SEQ ID NO: 27296 - protein, 381 aa, Leifsonia xyli subsp. xyli str. CTCB07
MTDASSTAVSPTAALSAAGVRIWLDDLSRERIASGGLQRLIAEKNVVGVTTNPTIFAAALAQGAAYDEQVRGLAATGVSVEDAIFEITTDDVADASDIFHDVYTATGGVDGRVSIEVEPGLAHDAAATIAEAKRLAAKVDRPNVLIKIPATVEGLEAITETIAAGISVNVTLIFSLERYRGVIDAYLTGLEKAKAAGIDLSGIQSVASFFVSRVDTEIDKRLTAIGTGEALALKSKAGIANARLAYKVYEEAFAGDRAKALVAAGANEQRPLWASTGVKDPSLPDTLYVTELVAPNTVNTMPEKTLDATFDHAQLAGDTVTGEYAGAQGVLDALAALGVDYDDVTATLEREGVDKFIVSWGELVETVRKALTDAQDSEAAQ

SEQ ID NO: 27297 - protein, 308 aa, Zea mays
  misc_feature (235)..(235): Xaa can be any naturally occurring amino acid
  unsure (1)..(308): unsure at all Xaa locations
MAAAAGGGAVRALSQKEQDIQMMLAADVHLGTKNCDFQTERYVFKRRTDGIYIINLGKTWDKLQLAARVIVAIENPQDIIVQSARPYGQRAVLKFAQYTGAHAIAGRHTPGTFTNQLQTSFSEPRLLILTDPRTDHQPIKESALGNIPTIAFCDTDSPMRYVDIGIPANNKGRNSIGCLFWLLSRMVLQMRGTILPGHKWEVMVDLFFYRDPEEAKEQEEEVAAAPEFAAITDYXGADQWGGDQWTSDVAAPPVAPTGADWGAAPAPVPTGEGWDQAGAPVPADGTVPPVVAPTGWDQAAPPTAQGWE

SEQ ID NO: 27298 - protein, 191 aa, Mesembryanthemum crystallinum
TTVGYGDLHAVNTIEMIFIIFYMLFNLSLTAYLIGNMTNLVVEGTRRTMEFRSSIESASSFVSRNRLPPRLKEQILGYMCLRFKAENLNQFQLIEQLPNSIHKSICQHLFLPTVEKVYLFDGVTKETLLVLVASMKAEYLPPREDIIVQNEAADDIYIVVSGEVETIDYGSDGKEFVVGTLRTGEMFGEVG

SEQ ID NO: 27299 - protein, 726 aa, Leifsonia xyli subsp. xyli str. CTCB07
MTSTARTTLNRCGHRSTTPPPPLRRVSSPVAALQWDPIDNKAVDTARVLAADAVEKVGNGHPGTAMSLAPAAYLLFQKVMRRDPRDQHWLGRDRFILSAGHSSLTQYIQLYLGGYGLELADLEALRTWGSLTPGHPEYGHTDGVEITTGPLGQGISSSVGFAYAQRYERGLFDPEAGPGASPFDHFTYVIASDGDLEEGISSEASSLAGHQQLGNLIAIYDDNQISIEDDTTIAFTEDVKARYEAYNWHVQVVDWKKTGVYAEDVHELYQAIQNAQAVTDKPSLIVLKTIIGWPAPKKQNTGKIHGSALGADELRAVKEVLGFDPEKTFEVAAEVIEHTRRAVGSGAEQRAAWQKGFDAWAAAHPERKELLDRLLSGAAPAGIADALPVFAAGAEMSTRAASGKVINAIAPVMPELWGGSADLAESNNTTIEGAASFVPSEHSTHEWTGNPYGRMLHFGIREHAMAAIINGIVLHGPTRPFGGTFLIFSDYMRPAVRLAALMRVPSIFVWTHDSVALGEDGPTHQPIEQLATLRAIPHLDVVRPGDANEVTHAWKTILTRRNGPAGIALTRQNIPVFERGDGEAAGDTLASAENVAKGAYILAEAPGGTPDVLFIATGSEVQIALEARDVLRGEGIKARVVSAPCLEWFAEQDAAYREKVLPAALKARVSIEAGLALSWSTIVGDHGRSVSIEHFGASADYKTLFREFGMTTEHAVAAAKESLASL

SEQ ID NO: 27300 - protein, 448 aa, Rubrobacter xylanophilus DSM 9941
MAERFDAVVLGMGPGGEVAASRLISGGKRVAVVEKELIGGECAYWACIPSKTLLRPPEVRGEARRAFGTGVPELEMEAIFDYRDYMIRNLDDAAQVEGYERQGATVVKGAGKIVGPGKVEADGETIEAGHIVVATGSAPNVPPVEGLDEITVWTNREVTTSREVPRRALIVGGGPNGIEAAQWLSRFGSEVTIVQSADRLIDREDPRVGELIRGALEGEGIRVLTGRKAARARRDGEGAVVELDDGAEVGTDVVVIAAGRRPRTEGLGLETVGIEPDGGAIPVDDRCRAAEGVWAIGDATGVALFTHVAKYQGRVAADNILGRERRADYRGIPRVVFSDPEIAACGLTEEQARREGMATATATLDLSRAIARPYTYEEDPRGTLSLVADRKRGVLVGAWAVAPLAGEWIHEAALAIRAEVPIEKLLDSVAQFPTYSEAYLYCLERLDL

SEQ ID NO: 27301 - protein, 611 aa, Campylobacter jejuni RM1221
MMDYGIDIWGNENFIIKNGKVCINYEKKPAIIDIVKELRDDGYKGPLLLRFPHLIQKQIENIYGNFNKARKEFGYKGGFNAVYPLKVNQYPGFVKNLVKLGKDYNYGLEAGSKAELLLAMAYNNEGAPITVNGFKDRELINIGFIAAEMGHNITLTIEGLNELEAIIDIAKERFKPKPNIGLRVRLHSAGVGIWAKSGGINSKFGLTSTELIEAVNLLKENKLLEQFTMIHFHLGSQITEIHPLKKALNEAGNIYTELRKMGAKNLKAINLGGGLAVEYSQFKNEKSRNYTLREYANDVVFILKNIAEQKKDLEPDIFIESGRFVAANHAVLIAPVLELFSQEYTENKLILKKQNPKLIDELYDLYKSIKPSNALEYLHDSIDHLESILTLFDLGYVDLQDRSNAEILTHLITKKAILLLGDKQNPADLLAIQDEVQERYLVNFSLFQSMPDFWGLEQNFPIMPLDRLDEEPTRSASIWDITCDSDGEISYSKDKPLFLHDVDVEKENYFLGFFLVGAYQEVLGMKHNLFTHPTEAIISINEKGYEVEGIIEAQSILDTLEDLDYDIHAIMDILNERISNSKLVNDKQKKHILGELYLFLNDNGYLKSIGV

SEQ ID NO: 27302 - protein, 548 aa, Rubrobacter xylanophilus DSM 9941
MSGHRSRMKVGGMTCGHCEVAVGRALEGAGARDVEADFRRGEAVFALPEGAGVEALRRAVREAGYEPGAVERVGGERVRGGGRHDYDLAIIGSGGGAFAAAIRAVERGARVAMIERGTVGGTCVNVGCVPSKTLLRGAEIYHRAGHHPFEGVRTKALAADYGAMVAQKDRLVGRMRQEKYLDLVEEYGWELIRGEAAFEDEGTLRVEGRRISAAAYLIATGARPAVPPIPGLEEAGYLTSTTNMELEEAPESVLVIGAGYVAIEQGQLLSRLGSRVTLMQRGPRLLREQEPEVSEAMMEALRREGIEVLTGVRIERAGKTEKGKKRLHLAVGGEERVLEGEEILVAAGRRPNVEELGLERAGVELDERGAVRVDGRLGTTNPRVWAAGDVTLGPQYVYVAAYEGALAADNALGGAGREVDLSALPGVIFSDPQVASVGLTERRARERGLEVQSSVLPLEAVPRALVNHDTLGVIKLVAEAGTGRLLGAHMVAENAGDVIYAATLAVRFGLTVSDLAENFAPYLTMSEGLKLAAQAFGRDVSRLSCCAA

SEQ ID NO: 27303 - protein, 97 aa, Buchnera aphidicola (Geoica urticularia)
MKIRPLHDRVIVKRKEAESKSAGGIVLTGSAAGKSTRGTVTAVGNGRILDNGSIKPLDVKVGETVIFNEGYGAKIEKIDNEELLILTESDILAIVEE

SEQ ID NO: 27304 - protein, 223 aa, Nitrosomonas europaea ATCC 19718
MRILVVEDDSLVASGIKQGLTNAGYTVDVARNAASAERHLREENFDLAVVDIGLPDIDGLTLVQRLRHRKMCLPVLVLTARGSMEDTIAGLDIGADDYMTKPFRLPELIARIRALIRRAHSITSTELQHDRLVLNTGSYTATLNDQPLLLTRREWTILETLLMASPRVVSKDKLLQNLTGWDKNITPNAIEVHVSRLRAKIAPGGIEIRTVRGIGYRIDQSHS

SEQ ID NO: 27305 - protein, 393 aa, Medicago truncatula
MALRATPFPTQTSSFSLPQMASLRSPKFVMASTLRSGSKEVENIKKAFTPPREVHVQVTHSMPPQKIEIFKSLEGWAEETLLTHLKPVEKCWQPQDFLPDPSSDGFEEQVKELRERAKELPDDYFVVLVGDMVTEEALPTYQTMLNTLDGVRDETGASPTPWAIWTRAWTAEENRHGDLLNKYLYLSGRVDMRQIEKTIQYLIGSGMDPRTENSPYLGFIYTSFQERATFISHGNTARLAKERGDLKLAQICGLIASDEKRHETAYTKIVEKLLEIDPDGTVIAFADMMRKKIAMPAHLMYDGRDDNLFDNYSAVAQRIGVYTAKDYADILEFLVGRWKVADITGLSGEGRKAQEYVCGLPPRIRRLEERASARAKESSKLAFSWIHDREVLL

SEQ ID NO: 27306 - protein, 97 aa, Buchnera aphidicola (Pterocomma populeum)
MNIRPLHDRVLVKRQEVELKSAGGIVLTGSAAGKSTRGTVVAVGKGRILDNGETKSLDVKIGDVVIFNEGYGAKTEKIDNEELLILTESDILAIVEE

SEQ ID NO: 27307 - protein, 483 aa, Agrobacterium tumefaciens str. C58
MKVVPMHTYPDIKLLIDGEWRDAVSGKTIAVSDPATDEIIGAIAHAEKEDLDLALAAAERGFKLWRDTSPYERSKIMRKAADILRERKDKIAYIMTREQGKPLAQSATEIMGAADTIDWFAEEARRTYGQVIPARATGVSQLAIKVPVGPVAAFTPWNFPLNQIVRKLSAALATGCSIIVKAPEETPASPAELIRAFVDAGVPAGVIGLVYGVPSEISEYLIPHPVIRKISFTGSTPIGKHLAALAGKHMKRATMELGGHAPVMIFDDADIEKAIEVTSLAKFRNAGQVCVAPTRFLVQDGVADRFLEGFVEATKAIKVGNGLEEGVIMGPLANERRIPALEGLINDAVSHGAELKTGGRRIGNKGNFFEPTVLANVPVTAKIMNDEPFGPVAIINRFSSFDDAITEANRLPFGLASYAFTGSVKTAHALGQQVEAGMLTINHNGLALPEVPFGGIKDSGYGTEGGSEAVQAYLETKFVSQMS

SEQ ID NO: 27308 - protein, 204 aa, Viburnum opulus var. americanum
YSKPVNGRKINWMKAGILESDKVFTVSPYYAEELVSGVEKGVELDNFIRKTGITGIVNGMDTQEWNPATDKYVDVKYDITTVMDAKPLLKEALQAEVGLPVDRNIPLIGFIGRLEEQKGSDILAAAIPKFIEQNVQIVVLGTGKKYMEKQLEQLEILYPDKARGVAKFNVALAHMIIAGADFMMIPSRFEPCGLIQLHAMRYGT

SEQ ID NO: 27309 - protein, 204 aa, Viburnum urceolatum
YNKPVKGRKINWMKAGILESDRVFTVSPYYAEELVSGVDKGVELDNFIRKTGITGIVNGMDTQEWNPATDKYVGVKYDITTVMDAKPLLKEALQAEVGLPVDKNIPLIGFIGRLEEQKGSDILAAAIPKFIEQNVQIVVLGTGKKYMEKQLEQLEILYPDKARGVAKFNVALAHMIIAGADFMMIPSRFEPCGLIQLHAMRYGT

SEQ ID NO: 27310 - protein, 97 aa, Buchnera aphidicola (Pemphigus spyrothecae)
MNIRPLHDRVIIKRQEVESKSAGGIVLTGSAAGKSTRGIVTAVGNGRVLDNGELKALDVKIGDTVIFSEGYGAKIEKIDNEEFLILTESDILAVVED

SEQ ID NO: 27311 - protein, 324 aa, Bradyrhizobium japonicum USDA 110
MTHAIRFHKTGGPEVLVWEEVSVGKPGPGEARIRHTAVGLNFVDIYNRSGLYPAQLPSGLGSEAAGIVEEIGPGVTDLKPGDRVAYGASPLGAYSEARLIPADRLLKLPDGVDDKTAAAMMLKGLTTQYLIRQTYRVKAGDTILLHAAAGGVGLILSQWAKHLGATVIGTVSNDEKAKLAKAHGCDHVIIYTREDFVKRVDEITGGKKVPVVYDSVGKDTFLKSLDCLAPLGVAALFGQSSGAVEPLNLGLLAQKGSLYVTRPTLFTYAAKRESLVAMAGELFDVVKSGAVKIEVHQTYPLKDAAKAHADLAARKTTGSTVLLV

SEQ ID NO: 27312 - protein, 204 aa, Viburnum utile
YNKPVKGRKINWMKAGILESDRVFTVSPYYAKELVSGVDKGVELDNFIRKTGITGIVNGMDTQEWNPSTDKYVGVKYDITTVMDAKPLLKEALQAEIGLPVDKNIPLIGFIGRLEEQKGSDILAAAIPKFIEQNVQIVVLGTGKKYMEKQLEQLEILYPDKARGVAKFNVALAHMIIAGADFMMIPSRFEPCGLIQLHAMRYGT

SEQ ID NO: 27313 - protein, 233 aa, Silicibacter sp. TM1040
MSQPDIILYTANTMNGWKPLIFLHEAEIDYELVNVDFSKKEQHAPDYVKMNPNGKIPTIWDRSEGRAIFESGAILWHLAEKYGRFLSSDPVERSETLQWLFFQVGHIGPIMGQAMFFQRIAKPNGDEVPYAIKRYVDESRRLLEVLDTRLAGRDWLVGTEMSIADIATYPWARSHFWATVEVEGLPHLQAWFDRLDAMPKVQEALQLPEPRPSAFGKGDIAAAASANAARFKE

SEQ ID NO: 27314 - protein, 92 aa, Glycine max
LENPIHAAAASALAFSVGALVPLLAASFIRDYKVRLGVILGAVSLALVVFGWLGAVLGKAPTFRSCVRVLLGGWLAMAITFGLTKLIGSSGL

SEQ ID NO: 27315 - protein, 204 aa, Viburnum dentatum
YSKPVKGRKINWMKAGILESDGVFTVSPYYAEELISGVEKGVELDNTIRKTGITGIANGMDTQEWNPATDKYVGVKYDITTVMDAKPLLKEALQAEVGLPVDRNIPLIGFIGRLEEQKGSDILAAAIPKFIEQNVQIVVLGTGKKNMEKQLEQLEILYPDKARGVAKFNVALAHMIIAGADFMLIPSRFEPCGLIQLHAMRYGT

SEQ ID NO: 27316 - protein, 269 aa, Triticum aestivum
  misc_feature (255)..(256): Xaa can be any naturally occurring amino acid
  unsure (1)..(269): unsure at all Xaa locations
MAPATADAAGAAVGGRVKTALGVAACERDAEKLELIEQLTKGFDDEQQRVLAAILARNNGAEYLRRHGMEGCTDRDAFKARVPVVTYEDLRPEIERIANGDRSNIISSHPISEFLTSSGTSAGERKLMPTIEDELDRRQMLYSLLMPVMNLFVPGLDKGKGLYFLFIKSETKTPGGLPARPVLTSYYKSDHFKYRPFDAYQVYTSPTPAILCTDSFQSMYSQMLCGLLVRTEVLRVGAVFASGLLRAIRFLQLHXXELARDIETGTLSA

SEQ ID NO: 27317 - protein, 163 aa, Salmonella enterica
GASLGLWEICIIWGLGISLAVYLTAGISGGHLNPAVTIALWLFACFPKQKVLPYIIAQFAGAFGGALLAYVLYSSLFTEFETAHHMVRGSVESLQLASIFSTYPAAALNVWQAALVEVVITSILMGMIMALTDDGNGIPKGPLAPLLIGILVAVIGASTGPLT

SEQ ID NO: 27318 - protein, 646 aa, Pseudomonas fluorescens Pf-5
MGQTRFASGRQLDLICLGRLGVDLYAQQVGARLEDVASFAKYLGGSSANIAFGTARLGLKSAMLSRVGDDHMGRFLLESLVREGCDVSAVKVDPQRLTALVLLGLKDRETFPLVFYRENCADMALCAADIDEAFIASSKALLITGTHFSTDGVYRASLQALDYAQKHGVKRVLDIDYRPVLWGLAGKADGETRFVADPQVSQHVQGILGRFDLIVGTEEEFLIAGGSDDLLTALRTVRSLSAATLVVKLGPQGCTVIHGEIPERLEDGAIYPGVRVEVLNVLGAGDAFMSGFLSGWLEEASDERCCQLANACGGLVVSRHACAPAMPTRAELDYLFSSPVPITRPDQDPVLQRLHQVSVPRKAWKPLFVFAFDHRGQLVELAQQGGRELKAIGQLKQLFIEAVQRVEADLRRQGIEADVGLLADQRFGQEALNAATGRGWWVARPVEVQGSRPLAFEHGRSVGSNLIAWPQEQIIKCLVQFHPDDEPLLRLEQEAQIRGLYQASQVSGHELLLEIIPPRDLPGAHPEVLYRSLKRLYNLGIYPAWWKIEAQSAEEWKKLDELIQERDPYCRGVVLLGLNASAEALAEGFRQAADSRTCRGFAVGRTIFQEPSRAWLAGEIDDDTLIRQVQGTFEQLINAWRSARPV

SEQ ID NO: 27319 - protein, 434 aa, Rhodopseudomonas palustris CGA009
MDATTNNKTATLTVGNKNFDLPVLTGTVGPDVIDIGKLYAQTGMFTYDPGFTSTASCQSKITYIDGDAGVLEYRGYPIEQLAEKGDFLETCYLLLYGELPTKAQKEDFDYRVTRHNMVHEQMARFFQGFRRDAHPMAVMVASVGALAAFYHDSTDINDPTQRMVASIRMIAKVPTLAAMAYKYSVGQPFIYPKNTLSYAANFLRMCFATPCEEYVVNPVLANALDKIFTLHADHEQNASTSTVRIAGSSGANPFACIAAGIACLWGPAHGGANEAALAMLKEIGTVENIPDFIAKVKDKSSSVRLMGFGHRVYKNYDPRAKIMQQVCHEVLAETGHHGDPLLKVAMELEKIALSDQYFIDRKLYPNVDFYSGITLKAMGFPTDMFTVLFAVARTVGWISQWSEMIEDPQQKIGRPRQLFTGATTRNYVEIGKRG

SEQ ID NO: 27320 - protein, 470 aa, Salmonella enterica subsp. enterica serovar Paratyphi A str.
MKKTKIVCTIGPKTESEEMLSKMLDAGMNVMRLNFSHGDYAEHGQRIQNLRNVMSKTGKKAAILLDTKGPEIRTIKLEGGNDVSLKAGQTFTFTTDKSVVGNNEIVAVTYEGFTSDLSVGNTVLVDDGLIGMEVTAIEGNKVICKVLNNGDLGENKGVNLPGVSIALPALAEKDKQDLIFGCEQGVDFVAASFIRKRSDVVEIREHLKAHGGENIQIISKIENQEGLNNFDEILEASDGIMVARGDLGVEIPVEEVIFAQKMMIEKCIRARKVVITATQMLDSMIKNPRPTRAEAGDVANAILDGTDAVMLSGESAKGKYPLEAVSIMATICERTDRVMNSRLDYNNDSRKLRITEAVCRGSVETAEKLEAPLIVVATQGGKSARAVRKYFPDATILALTTNEVTARQLVLSKGVVSQLVKEINSTDDFYRLGKDVALQSGLAQKGDVVVMVSGALVPSGTTNTASVHVL

SEQ ID NO: 27321 - protein, 453 aa, Burkholderia sp. 383
MSAAPADARVLEVESVIDDTHRPGFHWMLLVLCGLCLVIDGFDAQAMGYVAPSVIAEWGVPKQALGPVFSASLFGMLLGALGLSVLADRIGRRPVLIGSTLFFAVTMLATPFAGSIPVLMALRFVTGLGLGCIMPNAMALVGEFSPATHRVKRMMIVSCGFTLGAALGGFISAALIPALGWRSVFFVGGAVPLVLTIAMVARLPESLQFLVLKGRVAQARDWLAHFAPQAGIDANTRLVVRERAATGAPVAELFSHGRLPVTLLLWAISFMNLIDLYFLSNWLPTVMRDAGYSQGTAVIVGTVLQTGGVIGTLSLGWFIERYGFVRVLFACFACAAVSVGLIGSVAHALPWLLVVVFAGGFCVVGGQPAVNALAGQYYPTSLRSTGIGWSLGIGRIGSVLGPLVGGQLIALNWSNGALFHAAAVPVLCSALFVLGLAGVTRRNGAQAPNAAMN

SEQ ID NO: 27322 - protein, 406 aa, Zea mays
SLDAAVGDFAIVRNRTKIAEFTQPYIESGLVIVAPVKQATSSAWAFLKPFTLEMWCVTGALFIFVGIVVWILEHRSNEEFRGSPRRQLITIFWFSFSTMFFSHRQNTVSALGRFVLIIWLFVVLIINSSYTASLTSILTVQQLATGITGIDSLISSGLPIGYQAGKFTRNYLIEELNIPESRLVPLNTIQEYADALKRGPKDGGVVAIVDEMPYVEIFLSYHCNFRIVGQEFTKEGWGFAFKRDFPLAADLSTAILQLSESGQLQRIHDEWFTRPSCSSDDSEVGATRLGLGSFWGLFLVCALICLLALLVFFIRICWQYNKYSNSEAAGEPSAAAAAAAAVDAAAAAADAVERQRRPSRLGSFKDIIQFVDKKEEEIKKTMKRRVSEKDNNQAAGSSEAHSVASA

SEQ ID NO: 27323 - protein, 338 aa, Arabidopsis thaliana
  misc_feature (256)..(256): Xaa can be any naturally occurring amino acid
  unsure (1)..(338): unsure at all Xaa locations
MVFKAAIELGVIDTLYLAARDDVTGSSSFLTPSDIAIRLPTKPSNPEAPALLDRILRLLASYSMVKCQIIDGNRVYKAEPICRYFLKDNVDEELGTLASQLIVTLDTVFLNTWGELKNVVLEGGVAFGRANGGLKLFDYISKDERLSKLFNRTGFSVAVLKKILQVYSGFEGVNVLVDVGGGVGDTLGFVTSKYPNIKGINFDLTCALTQAPSYPNVEHVAGDMFVDVPKGDAILLKRILHDWTDEDCEKILKNCXKALPENGKVIVMEVVTPDEADNRDVISNIAFDMDLLMLTQLSGGKERSRAEYVAMAANSGFPRCNFVCSAYHLWVIELTKQA

SEQ ID NO: 27324 - protein, 168 aa, Zea mays
MAAASSATSVHDFTVKDSSGKDVDLSVYRGKVLLIVNVASQCGLTNSNYTQQAQLYDKYKNQGFEILAFPCNQFGGQEPGTNEEIAQFACTRFKAEYPIFDKVDVNGNNAAPIYKFLKSSKGGLFGDSIKWNFSKFLVDKEGRVVDRYAPTTSPLSIEKDIKKLLGSS

SEQ ID NO: 27325 - protein, 335 aa, Gossypium arboreum
MKVLSPILACLALAVVVSHAALSPEQYWSYKLPNTPMPKAVKEILHPELMEEKSTSVNVGGGGVNVNTGKGKPGGDTHVNVGGKGVGVNTGKPGGGTHVNDPDPFNYLYAASETQIHEDPNVALFFLEKDMHPGATMSLHFIENTEKSAFLPYQTAPKNTFSSDKLPEIFNKFSVKPGSVKAEMMKNTIKECEQPAIEGEEKYCATSLESMIDYSISKLGKVDQAVSTEVEKQTPMQKYTIAAGVQKMTDDKAVVCHKQNYAYAVFYCHKSETTRAYMVPLEGAGGTKAKALAVCHTDTSAWNPKHLAFQFLKVEPGTIPVCHFLPRDHIVWVPK

SEQ ID NO: 27326 - protein, 394 aa, Corynebacterium glutamicum ATCC 13032
MEIGVQVASWMDRHHDEVIKWRRHLHSHPELSHMEYRTTEYLASVLKDHGMEPHLFPGTGLMVDIGPEGDSRLAFRADIDALPLLESTGLEFSSTATGVAHACGHDVHTVIALALACALNTIELPIGIRVIFQPAEEVMTGGATDVIAHGGLDGVDAIYAIHVEPKLKVGRVGVRAGAITSASDVIEIRVKGEGGHSARPHLSADVVYALSKLVVDLPGLLSRRVDPRTGTVLVFGTINAGYAPNAIPDSGIVSGTLRTADISTWRDMRPLISELVEQVLAPTGVTHELIYNPGVPPVLNDDVATALLASAARDMDTQSVVQAPQSSGGEDFSWYLEHVPGSMARLGCWPGHGPKQDLHQSDLVVDERAIGVGVRLFGSLVQQYSSRSEAFLNS

SEQ ID NO: 27327 - protein, 376 aa, Gossypium arboreum
MKVLSPILACLALAVVASHAALSPEQYWSYKLPNTPMPKAVKEILHPELMEEKSTSVNVGGGGVNVNTGKGKPAGGTHVNVGRKGVGVNTGKPGGGTHVNVGGKGVGVNTGKPGGGTHVNVGGKGGGVSVHTGHKGKPVNVNVSPFLYQYAASETQIHDDPNVALFFLEKDLHPGATMSLHFTENTEKSAFLPYQTAQKIPFSSNELPEIFNKFSVKPGSVKAEMMKNTIKECEQPAIEGEEKYCATSLESMIDYSISKLGKVDQAVSTEVEKQTPTHKYTITAGVQKMTNDKAVVCHKQNYAYAVFYCHKSETTRAYMVPLEGADGTKAKAVAVCHTDTSAWNPKHLAFQVLKVEPGTIPVCHFLPRDHIVWVPK

SEQ ID NO: 27328 - protein, 535 aa, Methanopyrus kandleri AV19
MKFVVITGGVVSGIGKGITTASIGRILRARELEVTAVKIDPYINVDAGTMNPFQHGEVFVTEDGVETDLDLGHYERFMDVTLSGAHNITTGKIYQRVIEKERRGDYLGETVQVIPHITDEIKSWIREVGKASGADVVLVEIGGTVGDIEGMPFYEAVRQLQLEEGRENVMFVHLTYVPYLEHVHELKTKPTQHSVKELRSLGIQPDAIVCRCERPLDDGVKRKIALHTNVPREAVIDAHDVDLVYKVPLLLERQGFGDYICERLGLDADEPDYSDWLDFVTRIEEADDEIRIAVVGKYVDLPDAYISIREALVHAGAHVGVGVDVAWVDSEALEAGDSEAWEEVKDADGVLVPGGFGKRGVEGKIEAVRYARENDVPFLGICLGFQLVVVEYARSVLGLEDAHSTEFNPDTDHPVVDLLPEQRGVKRKGGTMRLGAEPVVLEEGSLLRRLYDDREIVLERHRHRYEVNPSYVRELEDHGLRFSGHSPDGRMEALELPDHPYFVGTQFHPEFKSRPGDPSPPFVGLIKAAAGQGPD

SEQ ID NO: 27329 - protein, 263 aa, Triticum aestivum
MPPLLTSPASLSSSPLRLASRLVGAALRPTPSSSSRSRRFLAPTQTAAPGTTTSGGFAAMSWLGKLGLGGGGSPRASEASAALAQGPDEDKPAPGSEFAQFGAGCFWGVELVFQRVPGVTRTEVGYSQGAFHDPTYEDVCTGATGHNEVVRVQYDPAACKYDDLLETFWARHDPTTPNRQGGDVGTQYRSGIYYYTSEQEKAALESMEKQQKVQNRKIVTEILPAKRFYKAEEYHQQYLAKGGRFGFKQSTEKGCNDPIRCYG

SEQ ID NO: 27330 - protein, 232 aa, Capsicum annuum
MVSLKLQKRLAASVLKCGRGKVWLDPNEGNEISMANSRQNIRKLVKDGFIIRKPTKIHSRSRARRMKEAKRKGRHSGYGKRKGTREARLPTKVLWMRRMRVLRRLLRKYRESKKIDKHMYHDMYMKVKGNVFKNKRVLMENIHKTKAEKAREKTLSDQFEARRAKNKASRERKFARREERLAQGPGGEKPVQPAAPAAAAAPAQPAQGIEEVKEVSMTNCRGVDATPTFCPC

SEQ ID NO: 27331 - protein, 626 aa, Leptospira interrogans serovar Copenhageni str. Fiocruz L1-130
MNIYKRLLKYSFKYKYRLTLGIVLSFLVSILNGASLTSLIPIFDSLGTGEKTNFEISLTKKDKILLQRLEEKESFTSVESIELKLAQWKIQLNSSLKKMSHDELVLLFCFIVFPVYLLKLIFLAAAVYCINSAGYLAIRDLRSELYAKAQTLPINHFVQEKTGILMSRIINDVEVLGKLISSDLKDAITDFFYIVTHLLLLLYLSWKMFLAVFIVVPIVMGPVSAFADKIRRATRNQQERLSLLNGHLQEVISGIRVIRAFSMEKTEAKRFWEFNQDLSDKTFKGHFYHQVGPSLTELFSSIVAVIFLSFGAYLMEDGTFSRGMFMAFFLTLIFLMRPFKQMSMLSNSIQSAISAGDRVFELLDQETDIRNPANPKFLKKMEKGLSFNNVTYMYPGAKNPAIQEINLEIAKGETIALVGASGAGKSTLVDLVPRLIDPQEGKVLIDGIDLRDLDLSNLRKRIGIVSQQVFLFNGSIRENICYGNQNVTEEQLRTACEQAFAMEFILSFEEGLDTIVGERGVMLSGGQRQRIAIARALLLNPEILILDEATSALDTESERLVQEALESLYKNRTVIIIAHRFSTVQIANRIFTMEDGKIVESGTHTELLQLDGKYKKLYDIQFSENV

SEQ ID NO: 27332 - protein, 343 aa, Thiobacillus denitrificans ATCC 25259
MTASSPFRSLPALEQDFADGLLAMLEKHRGLGVFVLVLANAAYDPRLWERLSPPLAVRHDELATALRNALREGRQIDEPDDDVLVFLKLDAIGFGRVGLMESRRAGPWQVAFNPVRALRPPRISGTAFGALLRPFDGGGFHFNKPFLMKEVLWEGDLAGMHVRMLYNKFPFARLHGLLVPEPLREAPQFLTSESHAWAWEVCATAAVPGLCLGYNSNGAGASVNHLHFQSFVQATPLPIQDARFVHNGGAAPYPLACLRFADRAEAWHALERLHRRDTPYNLVYSQGCMHLVARAPQDAPALNARVRGYGWSEMAGAVTRFSREDYEGFSAAGFADELALFAV

SEQ ID NO: 27333 - protein, 331 aa, Vibrio cholerae
WSQGFFGIDDQGEVYVSPRKDKAHQTQLSSIVKQLEARDLNLPVLVRFPQILHQRVHNICDAFNQAIEEYDYPNKYLLVYPIKVNQQKEVVDEILASQAELEHKQLGLEAGSKPELLAVLAMAQQASSVIVCNGYKDREYIRLALIGEKLGHKVFIVLEKLSELDLVLKEAKSLGVKPRLGLRIRLASQGAGKWQSSGGEKSKFGLAASQVLTVINRLKAENQLEALQLVHFHLGSQMANIRDVRNGVNEAVRFYCELRELGAHIDFFDVGGGLAVDYDGTRSQSSNSMNYGLHEYARNIVSTVSDVCNLYGQPRPVIISESGRSITAHHA

SEQ ID NO: 27334 - protein, 222 aa, Bacteroides thetaiotaomicron VPI-5482
MIGTMVLVLMGCGSAVFAGSMAGTVGAGVGTVGVALAFGLSVVAMAYAIGGISGCHINPAITLGVFLSGRMNGKDAGMYMLFQVIGAIIGSAILYALVTTGGHDGPTATGSNGFGDGEMLQAFIAEVVFTFIFVLVVLGSTDPKKGAGAFAGLAIGLSLVLVHIVCIPITGTSVNPARSIGPALFQGGEALSQLWLFIVAPFVGAAVSALVWNYFGDKNEKK

SEQ ID NO: 27335 - protein, 1126 aa, Candida albicans SC5314
MVLNDFDLKTEALNERTTLHTSQNASSKNGSNKESVLAKYEETNQNDEIEGFENLNDLSFSKYSKFSKASIIVGSDPKSRTTTLDSPFAKKLKEDLNVEFTSDNTKPYYPTVYPIYEFDNNDENSDSPFLDYQNEKGNIPQKLSGQKLRKQQQQQQQQSEAEENFKQSNQYARLQSTPKHQRTSSVKVSLTPAQKFEKRTSTRSHNALDNFELTTLVGNGAFASVYRAVNLKTNQVIAIKQIRIEKDQDVGVLMGEIDLLKILKHRNIVKYHGFVKTATSLNVLLEYCEGGSLRQLYKKLKKGLPEYQIINYVRQILEGLNYLHEQGVVHRDVKAANVLLTDKGDVKLADFGVATKVTSQHLTVVGTPNWMAPETVLGGEGICTASDIWSLGATIIELFTTNPPYHDLNAMATLHAIGTDEHPPLPKNMSTLAKDFLLECFQKQANLRISAKLLLKHKWLNQTATAKTSMATLLRQPSRELRSIKIYSESNDENWDEDFEEIKVSKFQNSTSSIIELKPDNTEKQFKLTEYSKKDLLTLFADEKEDTSGNFEFETIGPNKLAVVAESMDESDPFLNIDIENFDTNELEVQSKMEYLVVRLSRKLEQVHLGYEDAVPALVKVTGRMLHLVKKYPVSHDTLIRDHGVLSLLELLESFQDIPSQQQLWYHCLSILNHVFESDLGTLENFCFLGGIPTVAHFRSATYEVQVRLQVAKFIGILNLSEKALSMFVSCGGLRLVSKFVEEDFDTTPTFPLIAIESIHNILAKDLSRSKSDLCRILSKHGVIFWLVVLLNRLVKYDQKPSIKNVSKEQVEITIERIIDIIKYFSQSETKVRISIGSIDLFKLIFKLFDNLKLSHQLTLLKFVKSMSCISEVLKNLYHAEILEFLVKLLKSYIPSKGNYKEIINVLAPILYNSLALNHRRESEFVNLGGLPYLKTLSIINLPFRQFILPIICEFVHCDASVVNELKKNDIVKIYYNLLLDPYWQSNALDSLHCWYKLEPSYIDLNSPMAVDCLVGGFLLPKVSNLESTLEIYFKLLTNNLPLTRDMSNMNVINSILIKLSLHDKKNPVIQLSYLKVLKCLINYLVDSKSSLPFAKPVVNTLQSLKSRQSSLLIEEVTTELLSVLK

SEQ ID NO: 27336 - protein, 566 aa, Candida albicans SC5314
MSISKSIYELAVIANSLGKVLEGSSKIVQNEAYQWYKSSFVSKIIQDSCDNSQPMYEEMQNISTTIRNQVSPNINQKENPFQSQSQKRSYSTKSYSPGDEVELETESTSSNTVPDIKPKLTKTFEMSQSEVPSSRLARIFHYGSLAAGIGLNAATQGLRHYASGNSDAITMKSLVLSPQNIERMARKFSKMRGAALKLGQMLSFQDASILPKEIQQILLRVQNSAHYMPPGQLERVMSKELGLNWRERLFTSFDDVPIAAASIGQVHTAVAEDLTPVVVKVQYPGVVDSIDSDLNNILMLLTASSLLPPGLFLDKTIANARVELKWECDYIREARNLVRMREFLKDDDAFEVPRVFHQLCGEHVLTMERMRGIEIVKGDWGQSTKDWIATNIMRLCLLEIKEFKFMQTDPNWANFLYNEKTHKIELLDFGAARDFGDHFIDNYVKLLRAAVKKDRKRVEEISKDLGYLTGLESPQMVKAHVDSVMCLGEAFSPVDNNGEPFNFKKQTISDRVRGNVGLMLNERLTPPPEETYSLHRKLSGVFLLCSRLNATVPCEDLFREIIGYED

SEQ ID NO: 27337 - protein, 97 aa, Buchnera aphidicola (Tetraneura caerulescens)
MNIRPLHDRVIIKRQESESKSAGGIVLTGSAAGKSTRGTVLAVGNGRILDNGSVKSLDVKVGDVVIFNEGYGAKTEKMDHEEVLILTESDILAIVEE

SEQ ID NO: 27338 - protein, 318 aa, Escherichia coli
FDSTDETPASYNLAVRRAAPAVVNVYNRGLNTNSHNQLEIRTLGSGVIMDQRGYIITNKHVINDADQIIVALQDGRVFEALLVGSDSLTDLAVLIIKATGGLPTIPINARRVPHIGDVVLAIGNPYNLGQTITQGIISATGRIGLNPTGRQNFLQTDASINHGNSGGALVNSLGELMGINTLSFDKSNDGETPEGIGFAIPFQLATKIMDKLIRDGRVIRGYIGIGGREIAPLHAQGGGIDQLQGIVVNEVSPDGPAANAGIQVNDLIISVDNKPAISALETMDQVAEIRPGSVIPVVVMRDDKQLTLQVTIQEYPAT

SEQ ID NO: 27339 - protein, 412 aa, Oceanobacillus iheyensis HTE831
MNKRVVITGLGALSPVGNNVDEMWESVTTGKSGIDFVTKVDKDLFPAKVAAEVKNFDPTLYMDKKDARKMDPFTQYAVAAAKMAVEDANLTINEANAERVGVWIGSGIGGMKTWEDQHTKFMEKGAKRVSPFFVPMMIPDMAAGQVSIQLGAKGINSCSVTACASGANSIGDAFKAIQRGDADIMISGGTEAPISDMAFAGFSSSKALSTNEDPQKASRPFDKNRNGFVMGEGAGILILESLESALQRDATIYGEIVGYGATGDAYHITAPAENGEGATRAMQIALKDANLEPSDVQYVNAHGTSTDLNDKYETQAIKAVFGDHASDLAISSTKSMTGHLLGAAGGIEAVISIKAIQDSIIPPTINYETPDPDCDLDYVPNEARKQTVDAVVSNSLGFGGHNVALVFKKFVK

SEQ ID NO: 27340 - protein, 340 aa, Alnus glutinosa
MGFVSQCFCLVVMVTLGALASQLAAARSLQDASMRERHEEWMASYGRVYKDINEKQKRYKIFEENVALIESSNKDANKPYKLSVNQFADLTNEEFKASRNRFKGHICSTKSTSFKYGNVSAVPSAMDWRMKGAVTPVKDQGQCGCCWAFSAVAATEGITKLTTGELISLSEQELVDCDTSGVDQGCEGGLMDNAFTFIQHNHGLASEANYPYKGVDGTCNTNKQAIHAAEINGFEDVPANSEEALLNAVAHQPVSVAIDAGGSGFQFYSKGVFIGACGTQLDHGVTAVGYGTSDDGTKYWLVKNSWGTQWGEEGYIRMQRDVDAKEGLCGIAMKASYPTA

SEQ ID NO: 27341 - protein, 344 aa, Triticum aestivum
MSKSGALDLASGLGGKIDKEQVKSAVDEYEKYHGYYGGKEESRKSNYTDMVNKYYDLATSFYEYGWGESFHFAHRWNGESLRESIKRHEHFLALQLELKPGMKVLDVGCGIGGPLREIARFSSTSVTGLNNNDYQITRGKALNRSVGLGATCDFVKADFMKMPFSDNTFDAVYAIEATCHAPDPVGCYKEIYRVLKPGQCFAVYEWCITDHYDPNNATHKRIKDEIELGNGLPDIRSTRQCLQAVKDAGFEVIWDKDLAEDSPLPWYLPLDPSRFSLSSFRLTTVGRIITRNMVKVLEYVGLAPEGSQRVSSFLEKAAEGLVEGGKKEIFTPMYFFVVRKPLSE

SEQ ID NO: 27342 - protein, 97 aa, Buchnera aphidicola (Tuberolachnus salignus)
MNIRPLHDRVIVKRKEVESKSAGGIVLTGSAAGKSTRGEIIAVGKGRVLENGNTQPLDVKIGDTVIFNDGYGVKVEKIDNQDMLIMSESDILAIVEA

SEQ ID NO: 27343 - protein, 138 aa, Rubrivivax gelatinosus PM1
MAYSEKVVEHYENPRNVGSFEKGDDTVGTGMVGAPACGDVMKLQIKVNPATGLIEDAKFKTYGCGSAIASSSLVTEWVKGKSLDEALTIKNTQIAEELALPPVKIHCSILAEDAIKAAVSDYKAKHGNAQPAAATATH

SEQ ID NO: 27344 - protein, 204 aa, Viburnum jucundum
YNKPVKGRKINWMKAGILESDGVFTVSPYYAEELISGVEKGVELDNIIRKTGITGIANGMDTQEWNPATDKYVGVKYDITTVMDAKPLLKEALQAEVGLPVDRNIPLIGFIGRLEEQKGSDILAAAIPKFIEQNVQIVVLGTGKKNMEKQLEQLEILYPDKARGVAKFNVALAHMIIAGADFMLIPSRFEPCGLIQLHAMRYGT

SEQ ID NO: 27345 - protein, 161 aa, Zea mays
  misc_feature (13)..(13): Xaa can be any naturally occurring amino acid
  misc_feature (16)..(16): Xaa can be any naturally occurring amino acid
  misc_feature (30)..(30): Xaa can be any naturally occurring amino acid
  misc_feature (34)..(34): Xaa can be any naturally occurring amino acid
  misc_feature (36)..(36): Xaa can be any naturally occurring amino acid
  misc_feature (40)..(40): Xaa can be any naturally occurring amino acid
  misc_feature (65)..(65): Xaa can be any naturally occurring amino acid
  misc_feature (80)..(80): Xaa can be any naturally occurring amino acid
  misc_feature (92)..(92): Xaa can be any naturally occurring amino acid
  misc_feature (95)..(95): Xaa can be any naturally occurring amino acid
  misc_feature (104)..(104): Xaa can be any naturally occurring amino acid
  misc_feature (109)..(109): Xaa can be any naturally occurring amino acid
  misc_feature (116)..(116): Xaa can be any naturally occurring amino acid
  misc_feature (128)..(128): Xaa can be any naturally occurring amino acid
  unsure (1)..(161): unsure at all Xaa locations
QKIYYLTGAKGTXDRXAAGEKAENATTAQXEGHXTXQEGXDAGEEANNQNETKDATTNRARTPTXEKTRKTKARGGKRRXPGEGPQEKTGGXPQXHKAPNKKEXQEETXRKKKAQXPQDGTRANKATXAWGGEAGDPIHDKRCNSGTTDMDPERNMRKRGR

SEQ ID NO: 27346 - protein, 97 aa, Buchnera aphidicola (Thelaxes suberi)
MNIRLLHDRVIVKRKEMESKSAGGIVLTGSAAGKSTRGEVIAVGKGRVLENGNIQPLDVKIGDTIIFNDGYSVKVEKIDNQDVLIMSESDILAIVEE

SEQ ID NO: 27347 - protein, 204 aa, Viburnum stenocalyx
YSKPVKGRKINWMKAGILESDGVFTVSPYYAEELISGVEKGVELDNIIRKTGITGIANGMDTQEWNPATDKYVGVKYDITTVMDAKPLLKEALQAEVGLPVDRNIPLIGFIGRLEEQKGSDILAAAIPKFIEQNVQIVVLGTGKKNMEKQLEQLEILYPDKARGVAKFNVALAHMIIAGADFMLIPSRFEPCGLIQLHAMRYGT

SEQ ID NO: 27348 - protein, 456 aa, Oceanobacillus iheyensis HTE831
MLKKSFLIFTALLLLATPVYAATPTPESLELSVNLIWVMLGAFLVFFMHAGFAMVESGFTRSKNTLNILMKNFLTISVASILFFLVGYGIMFGSSAGSIIGSDGFLLSEISEIDFFVFQAMFVATCATIISGAVAERIKLGSYILIVAAMTTIIYPVVGHWVWQGDGWLTSLGFSDFAGSTVVHLTGAVGAFVVVLILGPRIGKYKGKKVNVIQGHNLPLGALGVFILWLGWFGFNGGSTLAADPSLVPYVIGTTLLSTSAALVSSSLYTKLRFKKVDASLSMNGVLGGLVGITAGAAEISLGGSIIVGLISGVVLVEGIRFLDTKLRIDDPVGAIAVHGICGIWGTLAIGLFSVNTGLFYGNGISQLGIQAIGVLAVVAWVAITAGGFTYVINKISQIRVSEEEEISGLDFAEHGSSAYNFKESLLEGTDNNSSSGLAERLNNNIPIGKTSNQSS

SEQ ID NO: 27349 - protein, 586 aa, Mycobacterium tuberculosis CDC1551
MRKHPQTATKHLFVSGGVASSLGKGLTASSLGQLLTVRGLHVTMQKLDPYLNVDPGTMNPFQHGEVFVTEDGAETDLDVGHYERFLDRNLPGSANVTTGQVYSTVIAKERRGEYLGDTVQVIPHITDEIKRRILAMAQPDADGNRPDVVITEIGGTVGDIESQPFLEAARQVRHYLGREDVFFLHVSLVPYLAPSGELKTKPTQHSVAALRSIGITPDALILRCDRDVPEALKNKIALMCDVDIDGVISTPDAPSIYDIPKVLHREELDAFVVRRLNLPFRDVDWTEWDDLVRRVHEPHETVRIALVGKYVELSDAYLSVAEALRAGGFKHRAKVEICWVASDGCETTSGAAAALGDVHGVLIPGGFGIRGIEGKIGAIAYARARGLPVLGLCLGLQCIVIEAARSVGLTNANSAEFDPDTPDPVIATMPDQEEIVAGEADLGGTMRLGSYPAVLEPDSVVAQAYQTTQVSERHRHRYEVNNAYRDKIAESGLRFSGTSPDGHLVEFVEYPPDRHPFVVGTQAHPELKSRPTRPHPLFVAFVGAAIDYKAGELLPVEIPEIPEHTPNGSSHRDGVGQPLPEPASRG

SEQ ID NO: 27350 - protein, 204 aa, Viburnum triphyllum
YSKPVKGRKINWMKAGILESDGVFTVSPYYAEELISGVEKSVELDNIIRKTGITGIANGMDTQEWNPATDKYVGVKYDITTVMDAKPLLKEALQAEVGLPVDRNIPLIGFIGRLEEQKGSDILAAAIPKFIEQNVQIVVLGTGKKNMEKQLEQLEILYPDKARGVAKFNVALAHMIIAGADFMLIPSRFEPCGLIQLHAMRYGT

SEQ ID NO: 27351 - protein, 210 aa, Debaryomyces hansenii CBS767
MSEELSKQTEELSLENKDTVLSNKEEFTAKHPLNNKWTLWYTKPQVNKSENWHDLLKPVITFSSVEEFWGIYNSIPQANQLPMKSDYHLFKEGIKPEWEDEQNSKGGKWQFAFNNRRDVGSIINDLWLRGLLSVIGETIEDDEDEVNGIVLNIRKQVIRIGLWTKDCDETKLRTVGERLKKILKLSEEQKLDFMSHEDSGKKGAEPLISL

SEQ ID NO: 27352 - protein, 204 aa, Viburnum dentatum
YSKPVKGRKINWMKAGIIESDGVFTVSPYYAEELVSGVEKGVELDNIIRKTGITGIANGMDTQEWNPATDKYVGVKYDITTVMDAKPLLKEALQAEVGLPVDRNIPLIGFIGRLEEQKGSDILAAAIPKFIEQNVQIVILGTGKKYMEKQLEQLEILYPDKARGVAKFNVALAHMIIAGADFMMIPSRFEPCGLIQLHAMRYGT

SEQ ID NO: 27353 - protein, 442 aa, Corynebacterium efficiens YS-314
MDIRTLIDTRAMTRYQWFIIAIATFLNAMDGYDILAMAFTANSVATEFGLSGAQLGLLISLGFIGMGIGSLSFGPLGDRLGRRPILLAALTLDGIGLLWSGVAGSATELGLARLLTGIGVGGVLTVVTVITSEYSNKRNRGMAISIYAAGYGVGATLGGLLAAQLIPTTGWRGVFLAGAALSAVGIAAVWAFIPESFDYLRTRGDLPRARQIAVRLGIREEVTFPSAPASAAFPRRGLPAVLSPALLRNTLRLWGAFALITIGFQVASSWTPKLLEDAGMSAQQSIVGGLLLTLGGSFGSLIYGWLTTRFSAQGTLIAFSLGSAVLLVGFISSIPLPALAFTLGVLTGMLLNGCIAGLYSIAPQIYPAGMRTTGVGVALGVGRVGAILAPLGVGVLIDAGISSLHIYLAVGCIMLLGATTLRGITLHRETTVVIAEPALVEK

SEQ ID NO: 27354 - protein, 342 aa, Chlamydophila pneumoniae AR39
MDSSAPYNIASQGTEKSTVERILDLYGPASCIKFLKQMVLIREFEARGEEAYLEGLVGGFYHSYAGQEAVATAAIANTGLDPWVFSSYRCHALAILLNIPLQEIAAELLGKETGCALGRGGSMHMCGPNFPGGFGIVGGQIPLAAGAAFTIKYQEQKNRVSLCFIGDGAVAQGVFHETLNFVSLHQLPLMLIIENNGWSMGTSLNRAVAKQPIAESQGSSYDIRAVTVNGFDLFNSLLGFREAYRYMVDTESPVLVECLCSRFRGHSISDPNLYRSKEEMQCLFKKDPIVLAKDWLIRLEVLTEEEFQNIRQECKTAVLEAFSNAKLSSDPSVTTLEEGVYA

SEQ ID NO: 27355 - protein, 332 aa, Burkholderia sp. 383
MRVILFSSRQYDDDSFAAANRQFGYRLHFQPSHLDAETAILAHGYDVVCPFVNDTVDAAVLERLADGGTRLIALRSAGFNHVDLAAAERLGITVVRVPAYSPHAVAEHAVALILALNRRLPRAVARTREGDFSLNGLLGFDLHGKTVGVIGTGIIGSVFAKIMMGFGMHVLAHSVPPYNDELIAFGARYVALDELLHHADIVSLHCPLLPSTHHLINERTLARMKHGAMLINTGRGGLVDAQALVDALKSGQLGHLGLDVYEEESGLFFEDHSDLPLQDDVLARLLTFPNVIVTSHQAFFTREALAEIAHTTLLNIEAWHAGTPQNVVTANR

SEQ ID NO: 27356 - protein, 468 aa, Burkholderia mallei ATCC 23344
MQKGHSETDLHRGLGQRQMRLIALGAAIGVGLFLGSANAIKMAGPGIILSYIIGGAVIFVIMRALGEMAVHEPVAGSFSRYARNYLGPLAGYLTGWNYWFLWLVTCIAEITAVGIYMGIWFPDVPRWIWALAALATMGSVNLLTVKAYGEFEFWFALIKVVTIVVMIAVGIAMIAFGIGNHGVPMGISNLWAHGGFFPNGAQGVLMSMQMVMFAYLGVEMIGLTAGEAANPQKTIPGTINSVFWRILLFYGGALFVILSIYPWNEIGTQGSPFVMTFERLGIKTAAGIINFVVLTAALSSCNGGIFSTGRMLYNLAQQGHAPRTFGETTASGVPRRAILVSMAALLVGVLLNYLVPEKVFVWVTSISTFGAIWTWGVILVTQMKFRASLAPAEERALRFRMPFWPYASWVALAFLVLVIGLMAYFPDTRIALYVGPAWLVLLVVLYFVLKLEPEGGKATGLERRYGRG

SEQ ID NO: 27357 - protein, 403 aa, Burkholderia sp. 383
MSIDYSPIPCPVVVPLDAILPEEPLLMMGAGPVPIPAAVAKANTVVINHLGATMAKIIEQVKEMARYVFQTRTKWVLGVAGPGSAAMEMAISNLAWRGTRVLSIRNGFFSARMAEMATRVGADVAMLEVADRAVASLDEIADAIARERPEIVTIVQGETSNTVWNRDLRDIAALAKAAGALVVVDAVCTLSTMPLEMDAWGIDAVITGGQKGLSSIPGVSLIAFSDAAWNRMKQRPEPNAHWCLDMALAENFWHNAGYHYTAPVSGVLALHEALRLVCAETLESRFARHLRCSLALQAGVESMGLKLYAPKDCRLNSVVGIETPEGLTPGMVCGHISKQYQVEISGSFGLPIVRIGQMGEQCREHNLFRTLHAFGRTMVDLKVPVDLPAGVAALEQELSRRGA

SEQ ID NO: 27358 - protein, 362 aa, Corynebacterium glutamicum ATCC 13032
MATTTPVTVLSGFLGSGKTTLLNQILHHRGSRKIAVIVNDFSEINIDAALIASEGHLTRGEDRFVELTNGCICCTLREDLVDSVGELASSDRFDHIVIESTGISEPMPVAATFEWQWDDGTRLADKAPIDTMVTLVDATQFIDLIRKNTSLTEADMGATEDDERTIADLLTDQIEFADRIYITKSDLVDRTVLEQTRALIASMSPRARIDLLIDGLNDGSPITDDILGAFLYDEATARAYEGYTEELENPHTPETEEYGISSVVFRSDRPFNKDRLLQVLRSTTGLVRSKGYCWIADHLNIVQVWHQAGPNLSIRPAAYWANSEITPGTELVLIGIHIDGPTLLALLQGATLTDAEVAALVL

SEQ ID NO: 27359 - protein, 61 aa, Glycine max
EHREATDQWPTLKKGVPHLTVYTAFLAFSISCFVIAMILNITFLYHPVLNLPKSSFKAYLA

SEQ ID NO: 27360 - protein, 180 aa, Capsicum annuum
MASSVMSTATVATGANAAQASMIASFNGLKSAASFPVTRKQDLDITSIASNGGRVQCMLVWPPINKKKYETLSYLPDLSDEQLLKEIEYLLQKGWVPCLEFETEHGFVYREHHRSPGYYDGRYWTMWKLPMFGCTDATQVLNEVQEAKKAYPQAWIRIIGFDNVRQVQCISFIAYKPEGY

SEQ ID NO: 27361 - protein, 142 aa, Yersinia pseudotuberculosis IP 32953
MALERTFSIIKPNAVANNNIGAIYARFESAGFKIIAAKMLHLTKEQAEGFYAEHKGRPFFDGLVEFMTSGPIIVQVLEGENAVQRHRDIMGATNPDNALAGTLRADFADSFTANAVHGSDAVESAQREIAYFFAADEIFPRS

SEQ ID NO: 27362 - protein, 135 aa, Burkholderia vietnamiensis G4
MSYSNKVLDHYENPRNVGSFAKDDDAVGTGMVGAPACGDVMKLQIRVGADGVIEDAKFKTYGCGSAIASSSLVTEWVKGKTLDEALSIKNTQIAEELALPPVKIHCSILAEDAIKAAVADYKKRHDTKEGDQAAA

SEQ ID NO: 27363 - protein, 559 aa, Legionella pneumophila str. Lens
MCSIGEYLAKRLEELNISEYFAIPGDYNLILLDEVLKNEKLKMINCCNELNAGYAADGYARVKGVSALFVTYSVGGLSVVNAVAGAYAENLPILVISGGPNTNSIQDAEILHHTLATEDNLYVRDIFSRITAHVVCIRKPEQAAMQIDEAIAIAIAKKKPVYIEIACNIANYPISKPTQRAFNTYKISDSSSLAAAVEHAAEKLNSALKPSLIVGSKVRHCNAINSVSELAKCTGYAMAAMPDAKGFISEQHPNFIGIYWGPVSSSGCAEIIDSSDAYLLIGPNENDYTTVGYVWGINPHKSIKTTKGGVIIGETVYTNIFMNDFLRELSKKLKFNDASYKAYKRIAEETVVYPELDQPDAPLSSRYLFGQIQKMLSDKKALLAETGDSWFNCMRLSLPEGCPFEIQMQYGSIGWSVGALLGMQAALHNQKRVIACIGDGSFQMTAQEISTMIRYGYKPIIFLMNNACYTIEVQIHDGPYNVINNWRYAELVNVFRGEQSNAKSFIVKTNKELLTAIKQAEKTEALCFIEVFLDKDDCNKNLLEWGSRVANYNSRPPRR

SEQ ID NO: 27364 - protein, 974 aa, Arabidopsis thaliana
MEGGRGGGDGNFLPNSNFGVFSDSAMDMDFMDELLFDGCWLETTDGKSLKQTMGQQVSDSTTMNDNNNNSYLYGYQYAENLSQDHISNEETGRKFPPIPPGFLKIEDLSNQVPFDQSAVMSSAQAEKFLLEESEGGRRYWIAPRTSQGPSSSVKERLVQAIEGLNEEVQDKDFLIQIWLPIQQEGKNFLTTSEQPHFFNPKYSSLKRYRDVSVAYNFLADEDSKESVGLPGRVFLKKLPEWTPDVRFFRSEEYPRIKEAEQCDVRGSLALPVFERGSGTCLGVVEIVTTTQKMNYRPELDNICKALESVNLRSSRSLNPPSREVCKNGLLNQTLTSSIHRNNEFWLLNVICPFCFSFCRVYDLPLALTWAPCARQGKVGSRHSDENFSECVSTVDDACIVPDHQSRHFLEACSEHHLLQGEGIVGKAFNATKLFFVPEVTTFSKTNYPLAHHAKISGLHAALAVPLKNKFNSSVEFVLEFFFPKACLDTEAQQDMLKSLSATLQQDFRSLNLFIDKELELEVVFPVREEVVFAENPLINAGTGEDMKPLPLEEISQEDSSWISHMIKANEKGKGVSLSWPRVREEPKEEFMLTSGWDNNQIGSGHNNFLSEAEQFQKVTNSGLRIDMDPSFESASFGVGQTLLGSRRPGEKRRTKTEKTIGLEVLRQYFAGSLKDAAKSIGVCPTTLKRICRQHGITRWPSRKIKKVGHSLKKLQLVIDSVQGVQGSIQLDSFYTSFPELSSPHMSGTGTSFKNPNAQTENGVSAQGTAAAPKSPPSSSCSHSSGSSTCCSTGANQSTNTGTTSNTVTTLMAENASAILKRARSEVRLHTMNQDETKSLSRTLSHKTFSEHPLFENPPRLPENSSRKLKAGGASKVKATFGEAKVRFTLLPTWGFRELQHEIARRFNIDNIAPFDLKYLDDDKEWVLLTCEADLEECIDIYRSSQSRTIKISVHEASQVKLGGSFGSIGLGPSL

SEQ ID NO: 27365 - protein, 414 aa, Leifsonia xyli subsp. xyli str. CTCB07
MGAGKKIFGIVLAGGEGKRLMPLTTDRAKPAVPFGGQYRLIDFALSNLINSQLRQIVVLTQYKSHSLDRHISQTWRPDGMLNSYIASVPAQQRLGKRWFSGSADAILQSINLLRDEKPDIVVVVGADHVYRMDFGQMIRSHLDSGSSVTVAAIRQPVSLADQFGVIEVDPASPERIAAFREKPSDPVALPESPGEVLASMGNYVFTADALIAAVRRDADRPDSNHDMGGDIIPDFVARGEAGVYDFTNNEVPGSTDRDRYYWRDVGTIDSFFEAHQDLISALPVFNLYNRQWPIFSQVLNSPPAKIVRDGRGALGTTIDSIVSLGSVISGAHLERSVLGPWATVDSGAKVIDSVVFERALIEPNAFVGRAILDKDVVVAAGASIGVDPDRDRARGFTVTESGITVVGKGVHVVP

SEQ ID NO: 27366 - protein, 239 aa, Capsicum annuum
HEPKWNYDGSSTGQAPGEDSEVILYPQAIFRDPFRRGNNILVMCDAYTPAGEPIPTNKRHAAAKIFSHPDVVAEETWYGIEQEYTLLQREVNWPLGWPIGGFPGPQGPYYCGTGADKAFGRDIVDAHYKACLYAGINISGINGEVMPGQWEFQVGPAVGISSGDEVWVARYILERIAEIAGVVVSFDPKPIPGDWNGAGAHTNYSTKSMREDGGYEVIKKAIEKLSLKHKEHIAAYGEG

SEQ ID NO: 27367 - protein, 559 aa, Thiobacillus denitrificans ATCC 25259
MLWETLSVVRDLPRLHEIASVMIRYGWGDLVRVLGINGALERAGRVLHWHSTSEISQLDAPVRVRRALEELGPTFVKLGQVLATRVDMFPPNWIAEFEKLHSQVPAQSYEVMYPELVAAIGGEPGEVFAAFDPVPLAAASIAQVYRATLKDGTPVVVKMRRPGIETVIRADLRILDHAARLLESEVADARRYDPVQIVSQFRRSLSRELDLAKEARNIDQFARHFATDPLVKIPKVYWEFTNDQVNVQEEIVGLAGVSPDKLRAAGLDPKLLAARGANAVLSMVLLHGYFHADPHPGNVLFLPGNRIGMIDFGMVGMLTEPRRNQIVDLLHALTRRDEQALLQVLLDWSGDSVPDDERLAYDVAELMQSYDDLQLKDVKIGALLNDITALMRDNNLVLPADLTLLFKTLITLEGLGQQLDPEFHMIDNVTPFVESVIKERYTPQALFVRGRKSVREALEVAADLPRDLRHLLRDMRRGRVKVDFDLKRLDHFGHQLDSAASRLTMGILTASLVVGSSIIMTVKGGPELFGLPFFGLVGFLIAFFNSVWIVLSIWRSGKH

SEQ ID NO: 27368 - protein, 569 aa, Leifsonia xyli subsp. xyli str. CTCB07
MSFTAPITLPGLTLDPQWYRRSVFYEVMVRSFVDSNGDGSGDLAGLTSKLDYLQWLGIDALWLPPFFQSPLRDGGYDVSDFRAILPEFGTIDEFRDLVTKAHERNMRIIIDLPMNHTSDQHEWFQQSRSNPEGPFGDFYVWNETDDKYPDIRIIFVDTEDSNWAFDEARRQYYFHRFFSHQPDLNFENPAVHDAMFDIVRFWLDLGVDGFRLDAIPYLYESDEGNGEGEPPTHEFIKRLREVVDREYPGRMMVAEANQWPREVAAFFGSEEEPECHMAFDFPVMPRIFYALRSQQASELIHVLSETTDVPDGYAWGVFLRNHDELTLEMVSEEYRQAMYGWYAYDPRMRANIGIRRRLAPLLDNSRAELELAHALLFSLAGSPFLYYGDEIGMGDNIWLPDRDSSRTPMQWTPDRNAGFSSADPGKLFLPVVQSLVYHYNQVNVEAQLAQSRSLLHWVRNVIHVRKAHPVFGLGDMRVLPTNHESVLAFVRTYEGSGSHFGDQPEDVLCVFSFAHNPVSVTLEAPEFAGRTLYDLFGGAEFPTVAEDGRFTLTLGTQSFYWLHIEPRRD

SEQ ID NO: 27369 - protein, 306 aa, GIBBERELLA ZEAE PH-1
MAPSTFKLNTGQEIPAVGLGTWQSPAGEVEKAVTYALKDGYKLIDCAYCYGNEEEVGAGLKAAFKAGVKREDIFVVTKAWATYNTRVELALDKSLKALGLDYVDLFLVHWPLLLNPDGNDDKFPKKPDGSRDVIRDYNHVDGWKLMEKLPATGKTRAVGVCNYSKKYLEELLPHATIVPAVNQIENHPELPQQEIVDFCKEKGIHIEAYSPLGSTGGPVMSAEPVVKIADKKGVSASTVLLSYHGNTVLAKSVNPERITANKTIVDLDDEDMKALNDYSAELQKNNQVKRYVYPPFGIDFGFPDKS

SEQ ID NO: 27370 - protein, 187 aa, Leptospira interrogans serovar Copenhageni str. Fiocruz L1-130
MQPLDSKLESSPMEQATLGGGCFWCLEAVYQMVEGVESVTSGYAAGRTKNPDYRSVCSGTTGHAEVIQISFDPKIISYSEILEVFWISHDPTTLNRQGNDIGTQYRSIILCHSKEQKIQAEESIRKTEGHFLDPIITQVEELKEFYPAENYHQNYFRTNPEQSYCHYVIKPKIEKYLKTGFKVKSTN

SEQ ID NO: 27371 - protein, 561 aa, Kluyveromyces lactis NRRL Y-1140
MSNRVIIGGVAVAAAGYLLYERQVQLKQQQNGAVPVSPVVHDQSTFERKGAKTGAKLDDLTTDVKDKMSQYKNEADYKFQDIASQVEGKKAGIADWTVEKLDQAKNTIEDSRDKYRDNKHTLRENVQEYENKDKPNAVVQVYKDTKGAISTDLGNIKEGFIDDLKSVKSAIVGTGNQVQDTVHQNVNEIADRSSQKIDDTKESVSKAAASSKQTVNEAAQNAKDTSVSILNWGYNKAEKARAQAINNYDNASKKYQELEERFNESKKGLFGKGDPELQRQVDQAKAYVEDAKRRVDEATREFSEKTTNDFNKLANQVHDNEEELRRKGFLSWLRGKADAEVVDPDSIASHSVSGWGETAELLAKEEMEEKVRNRQIGPSEAQRRLDRFKKIKEDGWFTYKGKDEEFLAQKAAKALEGWGETASTMAQEEYEDLVRWREAGKKRYQASASTARDDAQRAADAAKKSLEDARAELNKHTKHWWQFGAEKNEELQKAAKAKYEDAEKNYQSAVNTVNDWADKATGKFWSSTDDALHTAKQAAAGVHESTQKGLDKAQNYVQEKK

SEQ ID NO: 27372 - protein, 711 aa, Metarhizium anisopliae var. anisopliae
RSRGSEDYNVFDDAKTYYASEERHQNRFGSRTRTYSQNSLMKQFERNGLREPYRRGSHDESSLPQGRRFLIQVDPTLESLQAQEDTDGNMQITIEDEGPKVLSLRTAASAGHNRFEVRGTYMLSNLLQELTLAKEYGRKQIVLDEGRLNENPVDRLSRLIRDHFWDGLTRRIDASSIEIAARDPKDWTDDPRPRIYVPAGVPEQYEYYKQVAEERPEIRLDVQQLPEKITPELIRDMNEKPGLLAVETEQVVDPETGRKTLQGLPFVVPGGRFNELYGWDSYMESLGLLVNDRVDLAKSMVLNFCFCIEHYGKILNATRSYYLGRSQPPFLTDMALRVYEKIKHEPDAKEFLRRSILAAIKEYHSVWTCEPRLDPVTGLSRYRPEGLGVPPETEAGHFVHILEPYVKKHNMEFKEFVRAYNYGEIKEPELDDYFMHDRAVRESGHDTTYRFEGICADLATIDLNSLLFKYETDIARTIRNVFNDKLVIPGEFCDRTPYQPGEVLASAAWDRRAKRRKLTVDKLMWDEEQGVFFDYDTAKRERCNYESSTTFWALWAGIATPKQAADMVKKGLPRFEAYGGLLAGTEKSRGDIGLERPNRQWDYPYGWAPQQMLAWTGLLRYSFTEEAERLAYKWLFMITKAFVDFNGVVVEKYDVTRPADPHRVDAEYGNQGLDFKGVAKEGFGWVNASYVYGLQIVNAHMRRALGTLTPY

SEQ ID NO: 27373 - protein, 186 aa, Oryza sativa (indica cultivar-group)
MLSIMRACRDAGAVKRIVFTSSAGTVNIEERQRPSYDHDDWSDIDFCRRVKMAGWMYFVSKSLAEKAAMEYAREHRLGLISVIPTLVVGPFISNGMPPSHVTALALLTGNGAHYSILKQVQFVHLDDLCDAEIFLFESPEARGRYVCSSHDATIHGLATMLADMFPEYDVPRSFPGIDADHLQPVH

SEQ ID NO: 27374 - protein, 411 aa, Xanthomonas campestris pv. campestris str. ATCC 33913
MSRRVVVTGMGMVSPLGNDLATSWDGIIHGRSGIGPIRQIDASQFTTRIAGEIKNFDPTQFVSAKDVKKMDSFIHYGVGASFMALDDSGLEINESNAERVGAILGSGIGGLLGIEEQTIKLHEGGARKISPFYVPSTIINMLPGQVSLIKGLKGPTFSAVSACATSNHSIGTAMRMIQHGDADVMLAGGAERGSSPSSVGGFCAMKAMSTRNDDPTAASRPWDKQRDGFVLGDGAGVLVLEEYEHAKARGARIYAELVGFGASSDAFHMTAPSEDGEGAARSMAAAMRDAKLNPEQIGYLNAHGTSTPLGDLAETMAMKRALGDHAYKTMVSSTKSMTGHLLGAAGGVEAIFSVMALHTGIIPPTINLEEPSEGCDLDYVPNVAREVQVDAVMSNGFGFGGTNGTLVFKRI

SEQ ID NO: 27375 - protein, 204 aa, Viburnum jucundum
YSKPVKGRKINWMKAGIIESDGVFTVSPYYAEELVSGVEKGVELDNIIRKTGITGIANGMDTQEWNPATDKYVGVKYDITTVMDAKPLLKEALQAEVGLPVDRNIPLIGFIGRLEEQKGSDILAAAIPKFIEQNVQIVVLGTGKKFMEKQLEQLEILYPDKARGVAKFNVALAHMIIAGADFMMSQVDLSLAVSFSCMPCVMER

SEQ ID NO: 27376 - protein, 711 aa, Metarhizium anisopliae var. anisopliae
YDASSEDYNVFDDAKTYYASEERHQNRFGSRTRTYSQNSLMKQFERNGLREPYRRGSHDESSLPQGRRFLIQVDPTLESLQAQEDTDGNMQITIEDEGPKVLSLRTAASAGHNRFEVRGTYMLSNLLQELTLAKEYGRKQIVLDEGRLNENPVDRLSRLIRDHFWDGLTRRIDASSIEIAARDPKDWTDDPRPRIYVPAGVPEQYEYYKQVAEERPEIRLDVQQLPEKITPELIRDMNEKPGLLAVETEQVVDPETGRKTLQGLPFVVPGGRFNELYGWDSYMESLGLLVNDRVDLAKSMVLNFCFCIEHYGKILNATRSYYLGRSQPPFLTDMALRVYEKIKHEPDAKEFLRRSILAAIKEYHSVWTCEPRLDPVTGLSRYRPEGLGVPPETEAGHFVHILEPYVKKHNMEFKEFVRAYNYGEIKEPELDDYFMHDRAVRESGHDTTYRFEGICADLATIDLNSLLFKYETDIARTIRNVFDDKLVIPGEFCDRTPYQPGEVLASAAWDRRAKRRKLTVDKLMWDEEQGVFFDYDTAKRERCNYESSTTFWALWAGIATPKQAADMVRKGLPRFEAYGGLLAGTEKSRGDIGLERPNRQWDYPYGWAPQQMLAWTGLLRYSFTEEAERLAYKWLFMITKAFVDFNGVVVEKYDVTRPADPHRVDAEYGNQGLDFKGVAKEGFGWVNASYVYGLQIVNAHMRRALGTLTPS

SEQ ID NO: 27377 - protein, 156 aa, Arabidopsis thaliana
MDLEFGRFPIFSILEDMLEAPEEQTEKTRNNPSRAYMRDAKAMAATPADVIEHPDAYVFAVDMPGIKGDEIQVQIENENVLVVSGKRQRDNKENEGVKFVRMERRMGKFMRKFQLPDNADLEKISPACNGGVLEVTNPKLPPPEPRNPRQNKVQFA

SEQ ID NO: 27378 - protein, 88 aa, Arabidopsis thaliana
MASRWLRPEVYPLFAATGVAVGICAFSLIRNITGNPEVRCTKENRAAGILDNHAEGEKYKENFLRKFVRNKKPEIMPGLNKFFTDPTY

SEQ ID NO: 27379 - protein, 204 aa, Viburnum stenocalyx
YSKPVKGRKINWMKAGIIESDGVFTVSPYYAEELVSGVEKGVELDNIIRKTGITGIANGMDTQEWNPATDKYVGVKYDITTVMDAKPLLKESLQAEVGLPVDRNIPLIGFIGRLEEQKGSDILAAAVPKFIEQNVQIVVLGTGKKYMEKQLEQLEILYPDKARGVAKFNVALAHMIIAGADFMMIPSRFEPCGLIQLHAMRYGT

SEQ ID NO: 27380 - protein, 504 aa, Cordyceps brittlebankisoides
YYKQVAEERPEIRLDVQQLPEKITPELIRDMNEKPGLLAVETEQVVDPETGRKTLQGLPFVVPGGRFNELYGWDSYMESLGLLVNDRVDLAKSMVLNFCFCIEHYGKILNATRSYYLGRSQPPFLTDMALRVYEKIKHEPDAKEFLRRSILAAIKEYHSVWTCEPRLDPVTGLSRYRPEGLGVPPETEAGHFVHILEPYVKKHNMEFKEFVRAYNYGEIKEPELDDYFMHDRAVRESGHDTTYRFEGICADLATIDLNSLLFKYETDIARTIRNVFNDKLVIPGEFCDRTPYQPGEVLASAAWDRRAKRRKLTVDKLMWDEEQGVFFDYDTAKRERCNYESSTTFWALWAGIATPKQAADMVKKGLPRFEAYGGLLAGTEKSRGDIGLERPNRQWDYPYGWAPQQMLAWTGLLRYSFTEEAERLAYKWLFMITKAFVDFNGVVVEKYDVTRPADPHRVDAEYGNQGLDFKGVAKEGFGWVNASYVYGLQIVNAHMRRVLWRQPH

SEQ ID NO: 27381 - protein, 313 aa, Streptococcus suis 89/1591
MKEIYLAGGCFWGMEGYFSQIDGILDTSVGYANGQVETTNYQLLKQTDHAETLYLAYDETRINLREILLYYFRVIDPFSVNQQGPDKGRQYRTGIYYTDKADLPTIEQVMMEQSQLFGGRPLAVEVEPLAHYIPAEDYHQDYLKKNPQGYCHIDLGQAKIPLIDVADYQKPDQQVLKDSLTDLQYQVTQEAATERPFENEFWNSDQAGIYVDITTGEPLFLSTDKFDSGCGWPSFTKPISKEVATYFQDKSHGMNRIEVRSRAGHAHLGHVFDDGPRDKGGLRYCINSAALRFIPREEMEAAGYGLFLDLLSE

SEQ ID NO: 27382 - protein, 170 aa, Oryza sativa
MQHDAISNIAYHPSMDFTSFFLPQTDAYSHDLSALLDMAVVDPYISCNGSSITMIPVTEDEANAQPMNHGNDERKKRRLVSNRESARRSRVRKQRRLDELSSQVSELRDTNQRLLVELNHMISKHARIVRENSQLREEASDLQRKLSEMEMEDAEVAAAAAAAPRTLEVA

SEQ ID NO: 27383 - protein, 204 aa, Viburnum triphyllum
YSKPVKGRKINWMKAGIIESDGVFTVSPYYAEELVSGVEKGVELDNIIRKTGITGIANGMDTQEWNPATDKYVGVKYDITTVMDAKPLLKEALQAEVGLPVDRNIPLIGFIGRLEEQKGSDILAAAIPKFIEQNVQIVVLGTGKKFMEKQLEQLEILYPDKARGVAKFNVALAHMIIAGADFMMIPSRFEPCGLIQLHAMRYGT

SEQ ID NO: 27384 - protein, 250 aa, Salix discolor
MGRGRVQLKRIENKINRQVTFSKRRTGLLKKAHEISVLCDAEVALIVFSHKGKLFEYSTDDCMEKILERYERYSYEERQLAATDFDSPGNWTLEYNRLKAKVELLQRNHRNYLGEDLDSMSLKELQNLEQQIDTALKHIRARKNHLMSQSISELQRKEKAIQVQNNMLVKQIKEKEKKDKAVAQPALWDDQQNQGPHASSFLLSQPAGLPLPCLNIGGCYQEETDPEVRRNELDHALEPTYSFHLGGYGA

SEQ ID NO: 27385 - protein, 762 aa, Zea mays
MAILSALATEVFIPVAAVIGIAFAVVQWVLVSRVKLSPAAAASGGSKNGYGDYLIEEEEGLNDHNVVVKCAEIQTAISEGATSFLFTEYQYVGIFMSIFAVVIFLFLGSVEGFSTKSQPCTYSKDKYCKPALFTALFSTVSFLLGAITSLVSGFLGMKIATYANARTTLEARKGVGKAFITAFRSGAVMGFLLASSGLVVLYITINVFKLYYGDDWEGLFESITGYGLGGSSMALFGRVGGGIYTKAADVGADLVGKVERNIPEDDPRNPAVIADNVGDNVGDIAGMGSDLFGSYAESSCAALVVASISSFGINHDFTGMCYPLLVSSVGIIVCLITTLFATDFFEVKAVKEIEPALKKQLIISTVLMTVGIAVISWLALPAKFTIFNFGTQKDVSNWGLFFCVAIGLWAGLIIGFVTEYYTSNAYSPVQDVADSCRTGAATNVIFGLALGYKSVIIPIFAIAVSIYVSFSIAAMYGIAVAALGMLSTIATGLAIDAYGPISDNAGGIAEMAGMSHRIRERTDALDAAGNTTAAIGKGFAIGSAALVSLALFGAFVSRAGVKVVDVLSPKVFIGLIVGAMLPYWFSAMTMKSVGSAALKMVEEVRRQFNTIPGLMEGTAKPDYATCVKISTDASIKEMIPPGALVMLTPLIVGTLFGVETLSGVLAGALVSGVQIAISASNTGGAWDNAKKYIEAGASEHARTLGPKGSDCHKAAVIGDTIGDPLKDTSGPSLNILIKLMAVESLVFAPFFATHGGLLFKYL

SEQ ID NO: 27386 - protein, 204 aa, Viburnum odoratissimum
YDKPVKGRKINWMKAGILESDRVFTVSPYYAEELVSGVDKGVELDNFIRKTGITGIVNGMDTQEWNPAMDKYVGVNYDITTVMDAKPLLKEALQAELGLPVDRNIPLIGFIGRLEEQKGSDILAAAIPKFIEQNVQIVVLGTGKKYMEKQLEQLEILYPDKARGVAKFNVALAHMIIAGADFMMIPSRFEPCGLIQLHAMRYGT

SEQ ID NO: 27387 - protein, 440 aa, Methanocaldococcus jannaschii
MENIMKKLIPILEKIPEVELPVKEITFKEKLKWTGIVLVLYFIMGCIDVYTAGAQIPAIFEFWQTITASRIGTLITLGIGPIVTAGIIMQLLVGSGIIQMDLSIPENRALFQGCQKLLSIIMCFVEAVLFVGAGAFGILTPLLAFLVIIQIAFGSIILIYLDEIVSKYGIGSGIGLFIAAGVSQTIFVGALGPEGYLWKFLNSLIQGVPNIEYIAPIIGTIIVFLMVVYAECMRVEIPLAHGRIKGAVGKYPIKFVYVSNIPVILAAALFANIQLWGLALYRMGIPILGHYEGGRAVDGIAYYLSTPYGLSSVISDPIHAIVYMIAMIITCVMFGIFWVETTGLDPKSMAKRIGSLGMAIKGFRKSEKAIEHRLKRYIPPLTVMSSAFVGFLATIANFIGALGGGTGVLLTVSIVYRMYEQLLREKVSELHPAIAKLLNK

SEQ ID NO: 27388 - protein, 632 aa, Debaryomyces hansenii CBS767
MLAEKNSHNTGDIITPTVTKYSQTATASGVDKTTSAVEKLHHESVSESKELHLIDSNISTEFEKSRGVRRIENVKAMMQSDEGKKVTIAFWTCLVVIAWVYSLDSSTTYNYAIPAASNFSRHSMISTVNIASGIIGSVVLPFQAKFSDITSRPICFALSLLFYTVGTVIAASSSSIGGYVVGTVFTAVGSNGISFLRDIIVADLTDLKWRGLVNGIMTSPYLITVWFAGLIVDAVLKTNWRWGYGMFAIIMPVIVSPLIFVLSYYEHKAQKLVPKVVKPKKSVWKIVKDAAIEIDAFGLILLGFGWSLFLLPFSIYSYADKGWKNPSIIAMLVVGPVLLIIFVVYEVFYAPFPSMPKRVIKNKTFVTAIIINIIYLLADGIRAQYLSTIMWIGKDWSNQNWVYFNNTLTMSLCFFGVVAGATCRITHRYKYMQSFGILVRVISYCLPLRSQGTLANTASFVMSQVLMGFGSAYSTIGTQISSQASVPHQDLSLVMSLVLLWSTVGSSIGYAISSVIWTSKLPQYFREFIPNSYTDEEVYNFYTDMDLLRAMPFDSDARQGATKAFTYVAIFMFAPPIAMEFINFLLSFFQTNFYLGDTHNAIEDQNGKDPTNPDEEIRVPQTTKEKFLYLFR

SEQ ID NO: 27389 - protein, 336 aa, Eucalyptus cordata
  misc_feature (4)..(4): Xaa can be any naturally occurring amino acid
  misc_feature (7)..(7): Xaa can be any naturally occurring amino acid
  misc_feature (10)..(10): Xaa can be any naturally occurring amino acid
  misc_feature (32)..(32): Xaa can be any naturally occurring amino acid
  unsure (1)..(336): unsure at all Xaa locations
MPVXALXGSXQTVCVTGAGGFIASWIVKLLLXRGYTVRGTVRNPDDPKNGHLRDLEGASERLTLYKGDLMDYGSLEEAIKGCDGVVHTASPVTDDPEQMVEPAVIGTKNVIVAAAEAKVRRVVFTSSIGAVTMDPNRGPDVVVDESCWSDLEFCKSTKNWYCYGKAVAEKAACAEAKERGVDLVVINPVLVLGPLLQSTINASIIHILKYLTGSAKTYANSVQAYVHVKDVALAHVLVLETPSASGRYLCAESVLHRGDVVEILAKFFPEYNVPTKCSDEVNPRVKPYKFSNQKLRDLGLEFTPVKQCLYETVKSLQEKGHLPVPPPPEDSVRIQG

SEQ ID NO: 27390 - protein, 129 aa, Arabidopsis thaliana
MGRLFLVNLEGKSYSCKHCKTNLALCDDVFSKSFQSRHGKAYLFSKVVNVYAGKKEDRMMMTGMHTVVDIYCVKCGSYVGWKYEFAFEKNQKYKEGKSVLERYKVWGPDGNNYWVAQEVEAGDSDTDDA

SEQ ID NO: 27391 - protein, 1518 aa, Saccharomyces cerevisiae
MTGHVSKTSHVPKGRPSSLAKKAAKRAMAKVNSNPKRASGHLERVVQSVNDATKRLSQPDSTVSVATKSSKRKSRDTVGPWKLGKTLGKGSSGRVRLAKNMETGQLAAIKIVPKKKAFVHCSNNGTVPNSYSSSMVTSNVSSPSIASREHSNHSQTNPYGIEREIVIMKLISHTNVMALFEVWENKSELYLVLEYVDGGELFDYLVSKGKLPEREAIHYFKQIVEGVSYCHSFNICHRDLKPENLLLDKKNRRIKIADFGMAALELPNKLLKTSCGSPHYASPEIVMGRPYHGGPSDVWSCGIVLFALLTGHLPFNDDNIKKLLLKVQSGKYQMPSNLSSEARDLISKILVIDPEKRITTQEILKHPLIKKYDDLPVNKVLRKMRKDNMARGKSNSDLHLLNNVSPSIVTLHSKGEIDESILRSLQILWHGVSRELITAKLLQKPMSEEKLFYSLLLQYKQRHSISLSSSSENKKSATESSVNEPRIEYASKTANNTGLRSENNDVKTLHSLEIHSEDTSTVNQNNAITGVNTEINAPVLAQKSQFSINTLSQPESDKAEAEAVTLPPAIPIFNASSSRIFRNSYTSISSRSRRSLRLSNSRLSLSASTSRETVHDNEMPLPQLPKSPSRYSLSRRAIHASPSTKSIHKSLSRKNIAATVAARRTLQNSASKRSLYSLQSISKRSLNLNDLLVFDDPLPSKKPASENVNKSEPHSLESDSDFEILCDQILFGNALDRILEEEEDNEKERDTQRQRQNDTKSSADTFTISGVSTNKENEGPEYPTKIEKNQFNMSYKPSENMSGLSSFPIFEKENTLSSSYLEEQKPKRAALSDITNSFNKMNKQEGMRIEKKIQREQLQKKNDRPSPLKPIQHQELRVNSLPNDQGKPSLSLDPRRNISQPVNSKVESLLQGLKFKKEPASHWTHERGSLFMSEHVEDEKPVKASDVSIESSYVPLTTVATSSRDPSVLAESSTIQKPMLSLPSSFLNTSMTFKNLSQILADDGDDKHLSVPQNQSRSVAMSHPLRKQSAKISLTPRSNLNANLSVKRNQGSPGSYLSNDLDGISDMTFAMEIPTNTFTAQAIQLMNNDTDNNKINTSPKASSFTKEKVIKSAAYISKEKEPDNSDTNYIPDYTIPNTYDEKAINIFEDAPSDEGSLNTSSSESDSRASVHRKAVSIDTMATTNVLTPATNVRVSLYWNNNSSGIPRETTEEILSKLRLSPENPSNTHMQKRFSSTRGSRDSNALGISQSLQSMFKDLEEDQDGHTSQADILESSMSYSKRRPSEESVNPKQRVTMLFDEEEEESKKVGGGKIKEEHTKLDNKISEESSQLVLPVVEKKENANNTENNYSKIPKPSTIKVTKDTAMESNTQTHTKKPILKSVQNVEVEEAPSSDKKNWFVKLFQNFSSHNNATKASKNHVTNISFDDAHMLTLNEFNKNSIDYQLKNLDHKFGRKVVEYDCKFVKGNFKFKIKITSTPNASSVITVKKRSKHSNTSSNKAFEKFNDDVERVIRNAGRS

SEQ ID NO: 27392 - protein, 156 aa, Glycine max
  misc_feature (54)..(54): Xaa can be any naturally occurring amino acid
  unsure (1)..(156): unsure at all Xaa locations
QTLFRILLLGGSRFVRGSPAAAAAAMARKRKTDAAPRLDEADRTLYSSFCGAAXSLSQLYSQAMAQQKLSFQAGERHALEKLHQWILRKHDEESRLTVADIMSHIQHEIDYGGTDAHVSPRVHQHPMSVNPFTSIQPSAGSYAQATSGHALRPSLS

SEQ ID NO: 27393 - protein, 478 aa, Pseudomonas fluorescens Pf-5
MSLQEQQTDLRGGFKQEMQTRHIVMLALGGVIGTGLFLTSGYTVNQAGPLGAVIAYIIGALMVYLVMMCLGELAVQMPETGSFSTYATRFLGPGTGYTVAWLYWLTWTVAIGSEFTAAGILMARWFPETPVWIWSALFAMVVFLSNVVSVRLFAETEFWLSLVKVITVLAFLVVGGGAILGLLHIDQAHSIGLSNFTREGLFPTGFMPIAMTLLAVAFAFSGTELIGIAAGETRDPQRNVPRAIRTTVLRLAIFFVGTIFVLATLLPREQAGLVESPFVTVFTYIGIPYSADIMNFVIISALLSAANSGLYAASRMLWTLSDQGHLPKQFSALTRMGTPLNAIIVSMAGGAASLLSSVFAPDTIYLALVSISGLAVVVVWMSIAASQIAFRRHFVANGGDVRDLKFRVRGYPWVPLGALLCCALACVGIGFDPEQRVALYFGLPFIAWCYLVYYITRSSRQRRLSLAALARPSDALQG

SEQ ID NO: 27394 - protein, 529 aa, ASPERGILLUS NIDULANS FGSC A4
MSPPAALDMDTNGIGAPKPLTVDGIAAVRAKSAPMPAGVAPATSSDMFKSPACYTKPKAKRWDNFFTLEAKSRKTSTLKGAAKFLKNPGLISLGGGLPSPEYFPFEELSFKVPTPPGFSPEATRQSGTTLVAGKHDIREGKSLYDLEVSLNYGQSTGSPQLLRFVTEHTELIHNPPYSDWQCALTAGSTYAWDTALRLFCERGDYLLMEEYTFSSAQETALPQGVNVAPVKMDEQGLLPGDLDDVLSNWDEKVRGARKPFVLYTIPTGQNPTGATQSAERRKEIYKVAQKHNIYIIEDEPYYFLQMQPYTGADSAPVPPPANHEEFVKSLIPSYLSIDVDGRVLRVESFSKVLAPGSRTGWVVGSEQVIERFLRNTEVSAQHPSGISQLMLFKLLDEHWGHLGYFDWLINLRMQYTNRRNIMVQACEKHLPQEIASWIAPAAGMFHWIQVDWKKHPELTSGKTRDSIEEALFHAAINNGVLVSRGSWFKAAGASEDKLFFRATFAAASEENITEAIRRFGDALRVEFKL

SEQ ID NO: 27395 - protein, 1049 aa, Zea mays
  misc_feature (616)..(616): Xaa can be any naturally occurring amino acid
  unsure (1)..(1049): unsure at all Xaa locations
MLRRPPPLRLGTRNRATTCHMRHTAAHQSRSPLSLSALAPAGTKATCRRALHRRRHHLVPAQVTCCRCHAIKREEGPVAAAISADRVALLAHLAGPLDASLHPCSLPTPKQVPPLLPTSTTTSMRTALVRGRGAGSTLTPALESACIDNLHAAAALQVVANAAWHPPLRCGCGWEGRAEELLAAAFLVPAAAGTGTQQQFSVGNYYGNFSRQMVLVRERSASRRRHFGPTKAALVCFCLLSFYLDTTAMPSTSFIVITTTISGAAELTMLCPRSGCSSRSRRHSSPPPPPPPAVRMRWLLLLAFAAAPAAGEMGYAHCGCDGSGGAGGGSGFWSLDNIFKWQKVSDLLIAAAYFSIPLEILYFVAGLRHLLPFRWVLVQFGAFIVLCGLTHLLAAFTYEPHPFMVVLLLTAAKFLTALVSFLTAITLLTLIPQLLRVKVRESLLWIKARELDREVVLMKRQEEASWHVRMLTQEIRRSLDRHTVLYTTLIELSRVLALDNCAVWMPSEDKSGMCLTHELRRGSDDGEAVVGADDADVLEVKGADGVKLLPPGSVLGSASGGGKEGTGTVAAIRMPMLRVADFKGGTPQVIKASYAVLVLVPPSGRKWAPHELEIVXVVADQVAVALSHASLLEESQAMRDRLAEQNRELLQARRDALIANEARDAFQRVMSQGMRRPIHSVQGLVSVVQEEEGLASEQRLVVDAVARTATVVSTLINDVMEMSAAASQERFPLETRPFRLRSMVRDAACVARCLCDLSGRFGFAVHVENVLPDLVIGDERRIFHVLLHMVGNLIGRVDEGDVTFRVRADDEATEDQRWDPWRPSYSGGHSSVRFVVGVKRQQNAGDSLPRFLRRPRTHDGLDLRLSFSMCRKLVQTMQGNIWAVLDGQGLPESMTLVLRFQLQPSLASSNLLGGSFDQEHYSSLPSNQIAGLKVLLIDDDEINLVVARKLLERLGCTVSSGSGLMDSSSACASFQLVMVNLEMSAIDPLDAASRIRQQYRSSHWPLVMAMTSEQNVWEKCAQSGINGVLKKPLVLLEVKEELERILQNT

SEQ ID NO: 27396 - protein, 590 aa, Burkholderia vietnamiensis G4
MSLIEVKVPDIGDFSGVDVIEVNIKPGDVIEKEQTLLTLESDKASMEVPSDIAGTVKEIKVKAGDKVSQGTVIALVEASTGAAAPAPAKAPEAPKPAAAAPAPAAAAPAPAPQVGSYGGSADIECDMLVLGAGPGGYSAAFRAADLGMKTVLVERYSTLGGVCLNVGCIPSKALLHTALVVEEAAALASHGITFGKPEVDLDKLRDFKGGVVKKLTTGLAGMAKARKVEVVTGIGAFVDPFHMEVQGDNGKKVVKFKQAIIAAGSQAVKLPFMPEDPRVVDSTGALELRQLPKRMLVIGGGIIGLEMATVYSTLGAEIDVVEMMDGLMMGADRDLVKVWEKFNAKRFGNVMLKTKTVGAQAKEDGIYVKFEGEKAPAEAQRYDLVLVAVGRSPNGKKIGADKAGVAVTERGFIDVDKQMRTNVPHIFAIGDIVGQPMLAHKAVHEGHVAAEAAHGEKAYFDALQIPSVAYTDPEVAWAGKTEDQCKAEGIKYGKAVFPWAASGRAIANGRDEGFTKLIFDEATHRVIGGGIVGLNAGDLISEVCLAVEMGADAEDIGKTIHPHPTLGESVGMAAELYEGVCTDLPPQRKK

SEQ ID NO: 27397 - protein, 340 aa, Triticum aestivum
  misc_feature (100)..(100): Xaa can be any naturally occurring amino acid
  unsure (1)..(340): unsure at all Xaa locations
AYLGDSIEQVCTKKQAGTGPEFPGYRRPTRPKTDYNQTHFIRNPEFKEAADKMQGPLRQIFVEFLERSCTAEFSGFLLYKELGRRLKKTNPVVAEIFSLXMSTGRGPGPSGFLNKGLSDFNLALDLGFLTKARKYTFFKPKFIFYATYLSEKIGYWRYITIFRHLKANPEYQVYPIFKYFENWCQDENRHGDFFSALLKAQPQFLNDWKAKLWSRFFCLSVYITMYLNDCQRSAFYEGIGLNTKEFDMHVIYETNRTTARIFPAVPDVENPEFKRKLDRMVDINLKIISIGESNDMPLVKNLKRVPLIAQLVSEIIAAYLMPSIESGSVDFAEFEPKLVY

SEQ ID NO: 27398 - protein, 463 aa, Triticum aestivum
MVAAVDAVAEKVVAQLREECATPATRLDGVATAMEEEMRAGLHQEGGSKIKMIISYVDNLPNGSEEGLFYALDLGGTNFRVLRVQLAGKDKRVVKRESREVSIPPHLMSGSAAELFGFIASALAKFVADEGDNKVLDGKQRELGFTFSFPVRQSSIASGTLIKWTKAFAIDDAIGEDVVAELQTAMEKQGVDMRVSALINDTVGTLATGSYNDEDVVIGVILGTGSNAAYVEKADAIPKLEGELPKSGNMVINTEWGNFSSSCLPITEYDQALDKESLNPREQIFEKLISGMYLGDIVRRVLLKIASRSLIFGHIKRTNLKTRFILRTPDISAMHHDETPDLRIVAEKLAETLKIKDTSLETRKMVVDICDIVTSRSARLAAAGIVGIIRKIGRGTPGDKRRTVIAIDGGLFEHYTKFRQCLESTLVELLGEEASELVAVKLTKDGSGVGAALIAAAHSQYLN

SEQ ID NO: 27399 - protein, 128 aa, Yersinia pseudotuberculosis IP 32953
MAYSEKVIDHYENPRNVGSFDSQDPTIGSGMVGAPACGDVMKLQIKVNEAGIIEDARFKTYGCGSAIASSSLVTEWMKGKSLEQAEAIKNTQIAEELELPPVKIHCSILAEDAIKAAIADYKSKHTAK

SEQ ID NO: 27400 - protein, 713 aa, Oryza sativa (japonica cultivar-group)
MDSSLVCWKLEILFRRALVLPIGKKFERNAVEHLSQMSVGILIRLATERASLRHNDEVGLQVEIHVSHGSELAESLVSHSLEAGFSISRVFYEAVTRGLTLRKKDSGFSLKFSNKLKPVMHYPVFTTKVKTTKVSLQRKMIIQSMVVVHAPNGKQEEHAECHEERRPSSSSGCRSHGGGEEVRLALLGIHVIQAPLSPLFEHSEILQVDPSCGPHQAGCEDSGSGELSLRCVCSKFVTFQILPSKEFLSIVRIIFNCCNTHDIWQHIHSRMPMRDAARAACVSHRFLRFWRGYPTVTIDQETLGLSSQRFWITSEDERGEYILTKAQKVLESRLSGSTIVQSLKLDLSTFRKAIVSATVAGGLLDCWLRAFVKPGIVDITVLLPKCEDDDDCYYYYGHDCLPEYTFPCSLLSDDEDKITSLQSLSLSSCGFHPTEGMTTLLGCWKSMSTVCLHRVAITDEELGFFLAGCLVLERLDLSFCNSIGALKIPSALRRLRSLRVRSCRMLRTIESGAPMLATVWYDGWPLLRFWLGGALETTHLEVHATRMGDVIQYAGSKLPSAALNLETLVLSTVYEIAYGIRWYNDQNRGNPDDGASCRGREASKLRNGGIVGNLRKVTITGFCSANSLVELTCHILVIAALSLEHLTLDTSPGYDRKCSSYDRCRKMSTEALREAETALAAARKYVEPKVPDSVNLMVLGPCGRCHLGMEYGS

SEQ ID NO: 27401 - protein, 401 aa, Brucella suis 1330
MDAQLRERAERVIPNGMWGHQRASSLPQGYPQYFASGKDACVTDVDGNSYIDFMCAWGPIILGHRNPLVDAAALSQIELGDSLNGPTAHAVELAELLVATIPHADWALFQKNGTDATTSCVTIARGTTKRRKVLVAKGAYHGAAPWCTPSLVGVTAEDRVHLIHYVYNDVESLTAAAREAGDDLAAILVSAFKHDLAIPQESPTKEFAQAARALCDAAGAALILDDVRGGFRIDLGGSWRGTGIEPDMAAYSKAIANGYALAAVAGSDRFREAARQAYMTGSFWYGGASMAAAVATIKELRRIDGPALMKHAGERLRSGLDAQAARYGFDLLQTGPAVMPLVQFAGDSDAALGARFCQEALKRGVYLHHKHNMFISCAHTDDVINDALSRTEDAFKAISTK

SEQ ID NO: 27402 - protein, 450 aa, Leifsonia xyli subsp. xyli str. CTCB07
MTPVLSTLLDDVLRRNAGEPEFHQATREVFGSLGPVIAAQPRYTQAAVLERLTEPERQLIFRVPWTDDEGNVRVNRGFRVEFNSALGPFKGGLRFHPSVTLGTVKFLGFEQIFKNALTGLPIGGGKGGSDFDPKGRSDAEVMRFCQSFMTELYRHLGEYTDVPAGDIGVGGREIGYLFGQYKRITNRYESGVLTSKGIGWGGSLVRTEATGYGSVFFAERMLATRGRDFTGVRVLVSGSGNVALYAIEKVHQLGGTVVACSDSSGVVYDRGGLDLDLLRQIKENERGRLSDYAARRAAGSEYRANGDIWAIAAQTPIDVALLAATQNELDATAAATLAQNGVIAVVEGANMPCTPEAVHLLRTAGVLFAPGKAANAGGVATSALEMQQNASRDAWSFEYAEGRLADIMANIHDSCAETAEKYGAPGDYVLGANIAGFVRVADAMLALGVI

SEQ ID NO: 27403 - protein, 168 aa, Cucumis sativus
GSVRAKNTMNIMLTNVLDAAAGGLFYYLFGFAFAFGTPSNPFIGRHFFGLKSIPSTAADYSFFLYQWAFAIAAAGITSGSIAERTQFVAYLIYSSVLTGFVYPVVSHWFWSPDGWASPSRTDGDLLFGTGVIDFAGSGVVHMVGGIAGLWGALIEGPRIGRFDKTGRS

SEQ ID NO: 27404 - protein, 119 aa, Armoracia rusticana
PGSFNKILVTYETGTYNGQWSAVGRTAVTTTLAGCTAALTTLFGKRLLSGHWNVTDVCNGLLGGFAAITGGCSVVEPWAAIICGFVAALVLLGCNKLAEKLRYDDPLEAAQLHGGCGAW

SEQ ID NO: 27405 - protein, 470 aa, Anchusa officinalis
MVLIPKTKNLIIFVSLILAFNAATLCNGGITSRFVRKLAAATDMPLNSDVFRVPPGYNAPQQVHITQGDLEGEAMIISWVRMDEPGSSKVLYWIDGSNQKHSANGKITKYKYYNYTSGFIHHCTIRRLKHNTKYHYEVGIGHTVRSFWFMTPPEVGPDVPYTFGLIGDLGQSYDSNSTLTHYEFNPTKGQAVLFVGDLSYADTYPNHDNVRWDTWGRFVERSVAYQPWIWTVGNHELDFEPDIGETKPFKPFSNRYRTPYKASNSTSPFFYSIKRGPAHIIVLASYSAYGKYTPQFKWLEDELPKVNRTESPWLIVLMHAPWYNSYNYHYMEGETMRVMYEAHGFVKYKVDLVFAGHVHAYERTERISNIVYNVVNGICTPVNDSSAPIYITIGDGGNLEGLAKNMTEPQPKYSAFREASFGHATLDIKNRTHAYYAWHRNQDGYAVEADTLWIFNRYWNPVDESTSATA

SEQ ID NO: 27406 - protein, 455 aa, Bacillus megaterium
TIKEMPQPKTFGELKNLPLLNTDKPVQALMKIADELGEIFKFEAPGRVTRYLSSQRLIKEACDESRFDKNLSQALKFVRDFAGDGLFTSWTHEKNWKKAHNILLPSFSQQAMKGYHAMMVDIAVQLVQKWERLNADEHIEVPEDMTRLTLDTIGLCGFNYRFNSFYRDQPHPFITSMVRALDEAMNKLQRANPDDPAYDENKRQFQEDIKVMNDLVDKIIADRKASGEQSDDLLTHMLNGKDPETGEPLDDENIRYQIITFLIAGHETTSGLLSFALYFLVKNPHVLQKAAEEAARVLVDPVPSYKQVKQLKYVGMVLNEALRLWPTAPAFSLYAKEDTVLGGEYPLEKGDELMVLIPQLHRDKTIWGDDVEEFRPERFENPSAIPQHAFKPWGNGQRACIGQQFALHEATLVLGMMLKHFDFEDHTNYELDIKETLTLKPEGFVVKAKSKKIPL

SEQ ID NO: 27407 - protein, 250 aa, Salix discolor
MGRGRVQLKRIENKINRQVTFSKRRTGLLKKAHEISVLCDAEVALIVFSHKGKLFEYSTDDCMEKILERYERYSYEERQLATTDFDSQGNWTLEYNRLKAKVELLQRNHRNYLGEDLDSMSLKELQNLEQQIDTALKHIRARKNHLMSQSISELQRKEKAIQVQNNMLVKQIKEKEKKDKAVAQPAPIWDDQQNQGPHASSFLLSQPAGLPLPCLNIGGCYQEEAPEVRRNELDHALEPTYSFHLGGYGA

SEQ ID NO: 27408 - protein, 282 aa, Arabidopsis thaliana
MAYEEHFQQTSEAKYDCLLFDIDDTLYPLSSGLAMEVKKNIQEYMVQKLGIEEDKVQELCLSLYKIYGTTMAGLKAVGYDFDYDDFHRFVHGRLPYSTLKPDPILRNIILSLPIRKVVFTNADKAHAAKIIARLGLEGCFEKIISFETLNPITKTESPVDTKTREIFDIISYMANPDSSIELPKTSVVCKPSEGAFEQVFKMANINPKKTLFFDDSIRNIQTGKRVGLHTVWVGTSHREEGVDIALEHIHNIREALPQLWDAVDDKAKEIRTRQKVAIETIA

SEQ ID NO: 27409 - protein, 455 aa, Bacillus megaterium
TIKEMPQPKTFGELKNLPLLNTDKPVQALMKIADELGEIFKFEAPGRVTRYLSSQRLIKEACDESRFDKNLSQALKFVRDFAGDGLFTSWTHEKNWKKAHNILLPSFSQQAMKGYHAMMVDIAVQLVQKWERLNADEHIEVPEDMTRLTLDTIGLCGFNYRFNSFYRDQPHPFITSMVRALDEAMNKLQRANPDDPAYDENKRQFQEDIKVMNDLVDKIIADRKASGEQSDDLLTHMLNGKDPETGEPLDDENIRYQIITFLIAGHETTSGLLSFALYFLVKNPHVLQKAAEEAARVLVDPVPSYKQVKQLKYVGMVLNEALRLWPTAPAFSLYAKEDTVLGGEYPLEKGDELMVLIPQLHRDKTIWGDDVEEFRPERFENPSAIPQHAFKPYGNGQRACIGQQFALHEATLVLGMMLKHFDFEDHTNYELDIKETLTLKPEGFVVKAKSKKIPL

SEQ ID NO: 27410 - protein, 465 aa, Bradyrhizobium japonicum USDA 110
MSSEVHPVDEVLPVPRLLALGLQHVLVMYAGAVAVPLIIGRALKLPPEDVAFLISADLFACGLATLVQCLGFPGVGIRLPVMMGVTFASVGPMLSMAAAPDIGLLGIYGSVIAAGLFGIVAAPFVSRLLPLFPPVVTGSIILVIGISLMRVGINWAGGGLPTLTKVVDGVAGSFPNPAYGQLQGLGISLFVLLFILGLIKWGTGFLANVSVLLGIVAGAVLATILSVMHFDKVSAASWGALVIPFRFGMPQFHLVPVVTMCVVMIVVMIESLGMFLALGDITGKTVDREALSRGLRADGVGTLLGGIFNTFPYTSFSQNVGLVSVTGVRSRWVTVTGGCIMLGLGLLPKLAALVEAVPLVVLGGAGLVMFGMVAATGARILTSVDFRTNRYNLFIVAISIGFGLIPLAAPGFFRNLPHDLQPLLESGILLCAVVSVLLNAFFNGLGGGAAAEADAAAVASSAQHV

SEQ ID NO: 27411 - protein, 77 aa, Arabidopsis thaliana
MANGCEICCEIMIAILIPPLGVCLRHGCCTTEFMICLILTLLGYVPGIIYALYAIVYVDRDQFFDEYRRPLFYAQSP

SEQ ID NO: 27412 - protein, 281 aa, Arabidopsis thaliana
MAYEEHFQQTSEAKYDCLLFDIDDTLYPLSSGLAMEVKKNIQEYMVQKLGIEEDKVQELCLSLYKIYGTTMAGLKAVGYDFDYDDFHRFVHGRLPYSTLKPDPILRNIILSLPIRKVFTNADKAHAAKIIARLGLEGCFEKIISFETLNPITKTESPVDTKTREIFDIISYMANPDSSIELPKTSVVCKPSEGAFEQVFKMANINPKKTLFFDDSIRNIQTGKRVGLHTVWVGTSHREEGVDIALEHIHNIREALPQLWDAVDDKAKEIRTRQKVAIETIA

SEQ ID NO: 27413 - protein, 204 aa, Viburnum erubescens
YNKPVKGRKINWMKAGILESDRVFTVSPYYAEELISGVDKGVELDNFIRKTGITGIVNGMDTQEWNPATDKYVGVNYDITTVMDAKPLLKEALQAEVGLPVDRNIPLIGFIGRLEEQKGSDILAAAIPKFIEQNVQIVVLGTGKKYMEKQLEQLEILYPDKARGVAKFNVALAHMIIAGADFMMIPSRFEPCGLIQLHAMRYGT

SEQ ID NO: 27414 - protein, 204 aa, Viburnum sieboldii
YDKPVKGRKINWMKAGILESDRVFTVSPYYAEELISGIDKGVELDNFIRKTGITGIVNGMDTQEWNPATDKYVGVNYDITTVMDAKPLLKEALQAELGLPVDRNIPLIGFIGRLEEQKGSDILAAAIPKFIEQNVQIVVLGTGKKYMEKQLEQLEILYPDKARGVAKFNVALAHMIIAGADFMMIPSRFEPCGLIQLHAMRYGT

SEQ ID NO: 27415 - protein, 409 aa, Silicibacter sp. TM1040
MRRVVVTGLGIVSSIGNNAEEVIASLRAGKSGIVASEEMAEHGFRSQIAGTLKIDPAEHVDKRTLRFMGPGAAYAHIAMGQAIADAGLSEDQVVNERTGLVAGSGGPSTSSMLTAHQTVLKTGATKRIGPFAVPKCMSSTISANLATAYKIKGINYSITSACSTSLHCIGNAAEQIMMGKQDVMFAGGGEELDWTLSCLFDAMGAMSSKYNETPEKASRAFDQDRDGFVISGGGGIVVLEDLEHALARGAKIYAEVTGFAATSDGHDMVAPSGEGGERAMRLALQTLPEGRKVSYINAHGTSTPVGDVGEVEAARRVFGAGNVPPISSTKSMTGHAQGAAGALEAIFCLLMLDNDFITPSINVETLAEGIEEGEVATQYVENAGLDSVMTNSFGFGGTNGSMVLSKYKE

SEQ ID NO: 27416 - protein, 541 aa, Streptococcus suis 89/1591
MTIDKRKVVYQIYPKSYKDTTGNGVGDLRGIIEKLPYLKELGIDMIWLNPFYPSPQRDNGYDISDYTAVNPDFGTMADFEDMVAVGKELGIEFMLDMVLNHCSTDHEWFQKALAGDKYYQDFFILRDQPTDWVSKFGGNAWAPFGDTGKYYLHLFDVTQADLNWRNPHVREELFKVVNFWKDKGVKGFRFDVINLIGKDEVLEDCPINDGKPAYTDRPITHDYLKMMNNATFGSEKGFMTVGEMSATTIENCILYTAPEREELSMAFNFHHLKVDYKDGQKWTIMDFDFEELKRLFHTWGEEMSAGNGWNALFYNNHDQPRALNRFVDVENFRNEGATMLAASIHLSRGTPYIYMGEEIGMIDPDYDSMDDYVDVESINAYQMLLDQGHTPEQAFKIIQAKSRDNSRTPMQWDSSDNAGFSTGAPWLKAGKSYPTINVEQEKTGPIFTFYQELIRLRKELPLISEGDYKAAYNDSQKVYAFERLLNGEKLLVLNNFFAEEVELDLADDYAHGQVLISNYPDNKLGKKIILKPYQALAIQVK

SEQ ID NO: 27417 - protein, 327 aa, Streptococcus suis 89/1591
MEVQMKYKWATLGTGVIANELVQALQDMGGNLYSVANRTYDKGVEFAQKYGIEKVYREIDEVFEDPEVDIIYISTPHNTHINYLRKALKAGKHVLCEKSITLNSEELAEAIQLAEENQVVLAEAMTIFHMPIYRQLSEVIASGKLGDLKMIQMNFGSYKEYDMTNRFFNKNLAGGALLDIGVYALSFVRWFMTEKPNQVLSQVKLAPTGVDEQVGILLSNDAGEMATTALTLHAKQPKRGTIAYDKGYIELYEYPRGQKAVITYTEDGSQEVIEAGETARALSYEVADMEKAVAGIENTMHLAFTQDVMEIMTQLRKEWGLVYPEEM

SEQ ID NO: 27418 - protein, 585 aa, Oryza sativa
MESNGGGGGSPKEAAVVVPSSGDATLGGHLARRLVQVGVSDVFAVPGDFNLTLLDYLIAEPGLSVVGCCNELNAGYAADGYARARGVGACAVTFTVGGLSVLNAIGGAYSENLPLICIVGGPNSNDYGTNRILHHTIGLPDFSQELRCFQPITCYQAVVNNLDDAHDQIDTAISTAIRESKPVYISVSCNLAAVPHPTFSRDPVPYFLSPRLSNQASLHAALDATLDFLDKAVKPVLVAGPKLAVAKAGEGFVDLADASRYGFAVMPSAKGLVPETLPAFIGTYWGAVSTAFCAEIVESADAYLFAGPIFNDYSSVGYSCLLKKEKAVVVQPDRVTVGNGPAFGCVMMRDFLSELAKRVRKNTTAFDNYKRIFVPDRQLRSARPGEPLRVNVLFKHIQGMIGGDEAVVAETGDSWFNCQKLRLPEGCGYEFQMQYGSIGWSVGALLGYAQAVQKRVVACIGDGSFQVTAQDVSTMLRCGQKSIIFLINNGGYTIEVEIHDGPYNVIKNWDYVGLVNAIHNGEGRCWATRVRCEEELEAAIATATGDKADSLCFIEVVAHKDDTSKELLDWGSRVSAANSRPPNPQ

SEQ ID NO: 27419 - protein, 219 aa, Nicotiana tabacum
MVRGKTQMRRIENATSRQVTFSKRRNGLLKKAFELSVLCDAEVGLVIFSPRGKLYEFASSSMQEIIERYKRHTKDKVQPENQVGEQNLQHMQHAAASLMKKIELLEESKRKLLGEGLQSCSLVELQQIEKQLERSVSTIRARKIQVFKEQIERLKEKEKILASENAILREKFGGLQQRQGSSGEKEGEALCTESSEKSDVETELFIGPPECRIRRPLQN

SEQ ID NO: 27420 - protein, 563 aa, Xylella fastidiosa Temecula1
MCSIFGIFNLQPSDNLQILRHQALECSQRQRHRGPDWSGVYVDVGAILVHERLAIVDPAGGAQPLFSEDGTLALAVNGEIYNHAVLKGTLQQPYAFQTHSDCEVINALYREETPTSFLNRLNGIFAFALWDKTTGRGLIARDPMGVVPLYWGHDQDGRLRVASEMKALVEHCPDVAQFPPGHWYDTTTGTLVKYYERPWKNYSAVEGVQVSLQELREAFERAVHRQLMTDVPYGVLLSGGLDSSLVAAVAARYARHRIETNDQSEAWWPRLHSFAIGLKDSPDLSAANVAAEALNTVHHGFEYTFQEGLDVLPEVIRHIETYDVTTIRASTPMFLLARRIKAMGVKMVLSGEGSDEIFGGYLYFHKAPNAREFHEELVRKLNALYYYDCLRANKAMMAWGVEPRVPFLDREFLDVAMRMDAQHKMVDKTSNGPQRMEKGILRAAFDGYLPPSILWRQKEQFSDGVGYGWIDGLKAHAETQVSDHALATAETRFQVNPPQTKEAYYYRSIFERFFPSPAAAETVPGGKSIACSSPAAIAWDASFATMADPSGRAVSGVHQQALL

SEQ ID NO: 27421 - protein, 410 aa, Zea mays
  misc_feature (149)..(149): Xaa can be any naturally occurring amino acid
  misc_feature (318)..(318): Xaa can be any naturally occurring amino acid
  unsure (1)..(410): unsure at all Xaa locations
VGPLVYAATAALRSPAVAGSALGRAAARATAYRHFCAGETADEAAAVVRRLWRGGMGGILDYGIEDAEDGHACDRNAAGFVSAVDVAASLPPGSASVCIKITALCPIALLEKASDLLRWQKKHPSFSLPWKTHSFPVLSDSSPLHLTAXEPAALTAEEERELHLAHSRLLAVCARCAEHGIPLLVDAEYATVQPAIDYFTLVGALAFNDAGAADGGRPIVHGTIQAYLRDARDRLEAMVRGAERERVRLGLKVVRGAYLTREARLPAALGVPSPVHGSIQETHDCYHGCAAFLLDRVRRGSASVMLATHNVESGQLAXPARAQELGIPKGDRNLQFAQLMGMADGLSLSLRNAGFQVSKYLPYGPVEQIIPYLIRRAEENRGLLSASSFDRQLLRKELVRRVKAMVAGRE

SEQ ID NO: 27422 - protein, 236 aa, Burkholderia mallei ATCC 23344
MSASSPSRARPGARPHDGAPAPVRDACPAPRRDASAPENLFWHAGRVAADARSTQFGRPPLTLWLTGLSGAGKSTLAGELERLLLRDRWPCAVLDGDNLRHRLNRDLGFGAEDRHENIRRTAEVARLMNGVGLVVIASLISPFRDDRAMAREIVGSDWFSEVYVSTPLDECERRDPKGLYRKARGGLLPNFTGVSAPYEPPVSADLAIDTTRLSVAAAAAMLRAHLIARCAGRHVD

SEQ ID NO: 27423 - protein, 550 aa, Salmonella typhimurium LT2
MTIPLWWQNGVIYQIYPKSFQDTTGSGTGDLRGVTQRLDYLQRLGVDAIWLTPFYISPQVDNGYDVANYTAIDPTYGTLDDFDELVAQAKARGIRIILDMVFNHTSTQHAWFREALNKESPYRQFYIWRDGTPDVCPNNWQSKFGGSAWRWHSQSEQYYLHLFAPEQADLNWENPAVRAELKKVCEFWADRGVDGLRLDVVNLIAKDQNFPDDPTGDGRRFYTDGPRAHTFLREMNRDVFTPRNLMTVGEMSSTTLENCQQYAALSGDELSMTFNFHHLKVDYPNGEKWTLAKPDYVALKALFRHWQQGMHNVAWNALFWCNHDQPRIVSRFGDEGEYRVPAAKMLAMALHGMQGTPYIYQGEEIGMTNPHFTRITDYRDVESHNMFAALRAAGRDPDELLAILASKSRDNSRTPMQWDNGKNAGFTQGEPWISLCDNYTEVNVEAALRDENSVFYTYQKLIALRKTQPVLIWGDYQDLLPDSPSVWCYRRQWQGQILLVVANLSNQCQEWHPPHIKGQWQALLHNYGEVASQPAAMTLRPFEAIWWLQR

SEQ ID NO: 27424 - protein, 119 aa, Brassica napus
PGFFNKILVTYESGSMNGQWSAVGRTAVTTTLAGCTAALTTLFGKRLLSGHWNVTDVCNGLLGGFAAITGGCSVVEPWAAIICGFLAALVLLGCNKLAERLRYDDPLEASQLHGGCGAW

SEQ ID NO: 27425 - protein, 626 aa, GIBBERELLA ZEAE PH-1
MSHDIKKTTDIKVEVALARDVEAIEMNDMSASSSQYKDDGNNNNTTKAWAVSVPSSEEQSREQSDWLDGFRRADRRKMKKGWDKQYQSEEPPQIPGDNRYFDIRAANAKTATSALARELKGRHLQMIAFGGAIGTGLFVTSGTALHEGGPGSVLISYIAIGALQYCTMQSLAELAVIFPIAGSFSAFSTRFLDPSWGFAMGWNYCLQWLFTLPLEIIAGAFTITYWNEGITKSVFVVIFLAAIFIINLFGVKAYGEAEFVFSTIKVTAIVAFILLGIVINIGGEPTGSYIGGRYWVDPGFFNNGFKGFCSVLVTSCFSFTGTELIGLAAAETANPRKSLPSAIKQVFWRITLFYIVSLMLVSLLVPHNDPRILDASSSNSAASPFVVAIESMGTTVLPSVMNAVILIAVISVGNSSVFGSSRTLAALADQSMAPAIFSYVDKQGRPLVAIIFASCVGLLAFIVDLKAQNVIFNWLLSVSSLATLFTWGSICLTHIRFRKSWAHASHTLEQLPFRARSGTAGSWFALCGYTLILLSQVWTAVSPVEMKADATTGDIVQNVFLRLMAVPIVLVMYVGHKLWYRTSFVKLEDIDIQTGRRYYRVHLMNEEDREARGAWPLWKKIYRQVC

SEQ ID NO: 27426 - protein, 119 aa, Lepidium sativum
PGSFNKILITYETGTYNGQWSAVGRTAVTTTLAGCTAALTTLFGKRLLSGHWNVTDVCNGLLGGFAAITGGCSVVEPWAAIICGFVGALVLLGCNKLAEKLKYDDPLEAAQLHGGCGAW

SEQ ID NO: 27427 - protein, 384 aa, Xanthomonas campestris pv. campestris str. ATCC 33913
MNDTVIPGFKPKKSVALSGTAAGNTALCTVGRSGNDLHYRGYDILDLATSSEFEEIAYLLVHGKLPNSGELRGYKAKLRSLRGVPAAVKTALEQLPPSAHPMDVMRTGVSVLGCLQPEKDDHNHPGARDIADKLMASLGSMLLYWYHYSHNGKRIEVETDDDSIGGHFLHLLHGFAPKESWVRAMHTSLILYAEHEFNASTFASRVIAGTGSDMYSAIAGGIGALRGPKHGGANEVAFEVQKRYDTPDEAEADIKARVERKEVVIGFGHPVYTVSDPRNKVIKDVARELSDEQGSRKMYDIAERLETVMWDIKKMFPNLDWFSAVSYHMMGVPTAMFTPLFVLARTAGWSAHIIEQRVDGKIIRPSANYTGPEDQAFVPLDQRA

SEQ ID NO: 27428 - protein, 119 aa, Capsella bursa-pastoris
PGSFNKILVPYETGTYNGQWSAVGRTAVTTTLAGCTAALTTLFGKRLLSGHWNVTDVCNGLLGGFAAITGGCSVVEPWAAIICGFVAALVLLGCNKLAEKLRYDDPLEAAQLHGGCGAW

SEQ ID NO: 27429 - protein, 417 aa, Thermococcus profundus
MKKLEKKLSAEPINFDSFFSEKAMLMKASEVRELLKLVETSDVISLAGGLPAPETFPVETIKKIAVEVLEEHADKALQYGTTKGFTPLRLALARWMEKRYDIPMSKVEIMTVAGSQQALDLIGRVFLNPGDPIVVEAPTYLAAIQAFKYYDPEFISIPLDDKGMRVDLLEEKLEELRKQGKRVKIVYTVSTFQNPAGVTMSVDRRKKLLELANEYDFLIVEDGPYSELRYSGEPTPPIKHFDDYGRVIYLGTFSKILAPGFRIGWVAAHPHLIRKMEIAKQSIDLCTNTFGQAIAWKYVENGYLDEHIPKIIEFYKPRRDAMLEALEEYMPEGVEWTKPEGGMFVRVTLPEGIDTKLMMERAVAKGVAYVPGEAFFVHRDKKNTMRLNFTYVPEETIREGVRRLAETIKEEMKRVKG

SEQ ID NO: 27430 - protein, 338 aa, Thermococcus kodakarensis KOD1
MGGIKIEPKTAIFAGGCFWCMEEAFERLPGVIEAISGYTGGWVENPTYELVSTGETGHREAVKVIYDPSKISYERLLDVFWRNIDPTDPGGQFADRGEQYKTAIFYLDEEQRELAEESKRRLELSGIFDEPIATEILPAKEFYPAEDYHQGYYFRFEANYKGYKLYSGRLGFIKSVWEKNRHFRLFPEREGYWLGYVKPSDAELKRQLTPLQYRVTQLGDTEEPFHNEYWNNHEEGIYVDVVSGEPLFSLLDKYDSGTGWPSFTKPLEEWAVVEAGECEGFLCGREVRSRFAGSHLGHVFDEPTPTGKRYCINSAALRFIPRDELRRYGYTAYEGIFK

SEQ ID NO: 27431 - protein, 113 aa, Quercus robur
MASGQERSELDPRARQGETVIPGGTGGKSLEAQEHLAQGRSRGGQTRKEQLGHEGYQEIGSKGGQTRKEQIGHEGYQEMGRKGGLGAMDKSGGERAAEEGIEIDESKFKTKNR

SEQ ID NO: 27432 - protein, 401 aa, Corynebacterium efficiens YS-314
MIPTALPDTHTRDLLEMYRHLHAHPELSMQEHETATFIEAELTALGIEHFRCGGTGVVGIERNGDGPVVAFRADTDGLPIKEDTGAEYASTATGFLPDGQEVPVMHGCGHDTHVATALAAARRFHEERDHWSGTIVWIFQPGEETAAGARAMVDDGLWDRAPRPEVVLGQHVFPFPTGTVAITRNAAMAAADSLRVILFGAQSHGSQPQDSVDPIILGAHILTRLQTIVSREVAPLDPAVVTVGTFHAGLKENIIPDRAEFTLNIRTLTGRVREQVLAAVERIVYGEAQVSGAPKPLIEELYTFPQLINDAEHTERVIDALRGELGEDNVSLVPPKMGSEDFGWLGESIGVPSVFWMFGGADPADENPAKNHSPFFLPVPEPTLVTGVRAIMSTVGSYLGR

SEQ ID NO: 27433 - protein, 158 aa, Staphylococcus epidermidis ATCC 12228
MSIYDIAVENYDGSTYLLKRYKGKVLIIVNTATNCTLNDQFNKLEMLYKKYHKYGLEILSFPCNDFNNQEPELIKDIYRVYKYKFGITFPIHAKINVNGEHEHPLYTLLKCKQPGLFGSQIKWNFTKFVVDQQGNIVKRFLPCDNPNQMEKLIRQLLK

SEQ ID NO: 27434 - protein, 368 aa, Pseudomonas fluorescens Pf-5
MDELGIGLIGTGFMGRAHALAFRSAGAVFELPVRLHLAALADADAQRGEHCAGAWGFAQAHADWQALVANPRVNLVAITTPNHLHFPMAMAALAAGKAVYCEKPLAVSVEQARQMHHAAQAAGVVTRVGYNYQHNPVIAQARDMIGNGELGQLVSFQGEFSEDFMADPDAPWSWRCEPQHAGGALADLGSHLLAMARFLMGPVQAVCADTQTVHLQRPTEAGSQERRAIAVDDQAHALLRFANGARGTLSSSWIKHGYKNHLSFEISGTLGTLAFDQERLNELRLYRVGQKGFQRLLAGPALPGYAAFSPAPGHQLGYNELKTLEVHELIMALCGQGRDGTDFAEAWEVERLAAAIRTAAAEQRWVAL

SEQ ID NO: 27435 - protein, 396 aa, Zea mays
MALRLNDVALCLSPPLAARRRRSRSRSSGRFVAVASMTSAVSTKVENKKPFAPPREVHVQVTHSMPPHKIEIFKSLDDWARDNILTHLKPVEKCWQPQDFLPDPASEGFHDEVKELRERAKEIPDDYFVCLVGDMITEEALPTYQTMLNTLDGVRDETGASPTAWAVWTRAWTAEENRHGDLLNKYMYLTGRVDMRQIEKTIQYLIGSGMDPRTENNPYLGFIYTSFQERATFISHGNTARHAKDFGDLKLAQICGIIASDEKRHETAYTKIVEKLFEIDPDGTVVALADMMRKKISMPAHLMFDGQDDKLFEHFSMVAQRLGVYTARDYADILEFLVDRWKVVNLTGLSGEGNKAQDYLCTLASRIRRLEERAQSRAKKAGTLPFSWVYGRDVQL

SEQ ID NO: 27436 - protein, 1027 aa, Saccharum hybrid cultivar
  misc_feature (168)..(168): Xaa can be any naturally occurring amino acid
  misc_feature (432)..(432): Xaa can be any naturally occurring amino acid
  unsure (1)..(1027): unsure at all Xaa locations
TRPASRCSTGGSHGRLLCWLLLACSWVAATTGQQTARTDPAEVAALNTILGRWGLKASAAWNISGEPCSGVAVDTTNVDDNPNINPAIKCDCTYNNATVCHITKLKVYALNVVGQIPAELQNLTYLNNLNLMQNYLTGPVPSFIGKFPMQYLSLAINPLSGTLPKELXNLTNLISWGISLNNFTGELLLELGNLTKLEQIYFAGSGFSGHFPTFSRLKNLKILWASDNDFTGKMPDFIGSLTQLEDLRFQGNSFEGPIPKSLSNLTKLTSLRIGDIVNGSSSLSFISNLTSLNVLILRNCRISDTLATVNFSNLAGLTLLDLSFNNLTGQIPQSILNLEKLGFLFLGNNSLSGSLPDVKSPSLNDLDFSYNQLSGSFPSWATQNNLELNLVANNFILGSSNNSILPSGLNCLQQDIPCFRGSPEYSSFAVDXGSTRSMEGLRYTFYEIDPTNIGAASYYVTGQTRWGVSNVGKFNEAPNGSYIIYSSQQFQNALDSELFQTARMSPSSLRYYGIGLENGNYTVELQFAEFAYPESPTWQSTGRRVFDIYIQGGLKEKNFNIRKTAGGKSYVAVYKKYNATVSKNFLEIHLFWAGKGTCCIPTQGYYGPMISALSVTPSFTPTVRNGVPKKKSKAGAIAGIVIGAAVLGLAALAGTFMLVQKRRRVAQQQEELYNMVGRPNIFSNAELKLATDNFSSKNILGEGGYGPVYKGKLPDGRIIAVKQLSQTSHQGKSQFVTEVATISAVQHRNLVKLYGCCIDSNTPLLVYEYHENGSLDRALFGNSGLSLDWPTRFEIILGIARGLTYLHEESSVRIVHRDIKASNVLLDTDLTPKISDFGLAKLFDEKKTHVSTKIAGTFGYLAPEYAMRGHLTEKADVFAFGVVALETVAGRSNTDSSLEENRVYLFEWAWELYERDKALDILDARIEEFDSEEALRVISVALLCTQGSPHQRPPMSRVVKMLTGDVEVTEVVTKPSYITEWQRRGGNTSYVTSDYSGDTTGEFSMQRETIAPLTPSPAMTGVIDDGR

SEQ ID NO: 27437 - protein, 259 aa, Pinus taeda
MASTSVAAAEVKAQTTQAEEPVKVVRHQEVGHKSLLQSDALYQYILETSVYPREPEPMKELPRVTAKHPWNLMTTSADEGQFLGLLLKLINAKNTMEIGVYTGYSLLSTALALPDDGKILAMDINRENYDIGLPIIEKAGVAHKIDFREGPALPVLDELLKNEDMHGSFDFVFVDRDKDNYLNYHKRLIDLVKVGGLIAYDNTLWNGSVVAPPDAPLRKYVRYYRDFVMELNKALAVDPRIEISQIPVLDGVTLCRRVY

SEQ ID NO: 27438 - protein, 473 aa, Bacillus megaterium
GAMTIKEMPQPKTFGELKNLPLLNTDKPVQALMKIADELGEIFKFEAPGRVTRYLSSQRLIKEACDESRFDKNLSQALKFVRDFAGDGLFTSWTHEKNWKKAHNILLPSFSQQAMKGYHAMMVDIAVQLVQKWERLNADEHIEVPEDMTRLTLDTIGLCGFNYRFNSFYRDQPHPFITSMVRALDEAMNKLQRANPDDPAYDENKRQFQEDIKVMNDLVDKIIADRKASGEQSDDLLTHMLNGKDPETGEPLDDENIRYQIITFLIAGHETTSGLLSFALYFLVKNPHVLQKAAEEAARVLVDPVPSYKQVKQLKYVGMVLNEALRLWPTAPAFSLYAKEDTVLGGEYPLEKGDELMVLIPQLHRDKTIWGDDVEEFRPERFENPSAIPQHAFKPFGNGQRACIGQQFALHEATLVLGMMLKHFDFEDHTNYELDIKETLTLKPEGFVVKAKSKKIPLGGIPSPSTEQSAKKV

SEQ ID NO: 27439 - protein, 332 aa, Arabidopsis thaliana
MANTPLIVSFGEMLIDFVPDTSGVSLAESTGFLKAPGGAPANVACAITKLGGKSAFIGKFGDDEFGHMLVNILKKNGVNSEGVCFDTNARTALAFVTLKKDGEREFMFYRNPSADMLLKESELNKDLIKKAKIFHYGSISLISEPCRTAHMAAMKTAKDAGVLLSYDPNVRLPLWPSTEAAIEGIKSIWNEADIIKVSDDEVTFLTRGDAEKDDVVLSLMHDKLKLLIVTDGEKGCRYYTKFFDCRKAQKFKGRVPGYAVKAVDTTGAGDSFVGAFLVSLGKDGSILDDEGKLKEALAFANACGAVCTTQKGAIPALPTPADAQKLMKSKSK

SEQ ID NO: 27440 - protein, 338 aa, Glycine max
  misc_feature (238)..(238): Xaa can be any naturally occurring amino acid
  unsure (1)..(338): unsure at all Xaa locations
MGKIKIGINGFGRIGRLVARVALQSDDVELVAVNDPFITTEYMTYMFKYDTVHGHWKHSDIKLKDDKTLLFGEKPVTVFGVRNPEEIPWGEAGADYVVESTGVFTDKDKAAAHLKGGAKKVVISAPSKDAPMFVVGVNEKEYNSDIDIVSNASCTTNCLAPLAKVINDRFGIVEGLMTTVHAMTATQKTVDGPSSKDWRGGRAASFNIIPSSTGAAKAVGKVLPELNGKLTGMSFRVXPTVDVSVVDLTVRTEKAASYDDIKKAIKAASEGKLKGIMGYVEEDLVSTDFVGDSRSSIFDAKAGIALNDHFVKLVSWYDNEWGYSNRVVDLIRHMAKTQ

SEQ ID NO: 27441 - protein, 401 aa, Yersinia pestis KIM
MEASDMFEKITAAPADPILGLTDIFRADDRAHKINLGIGVYKDETGKTPVLTSVKKAEQYLLENEATKNYLGIDGLPVFASCTQELLFGANSAIIADKRARTAQTPGGTGGLRIAADFIAHQTSAKRVWVSNPSWPNHKNVFEAAGLEVVEYAYYDAANHALDFDGLLNSLSEAQAGDVVLFHGCCHNPTGIDPTETQWSQLAELSVAKGWLPLFDFAYQGFANGLEEDAQGLRIFAATHQELIVCSSYSKNFGLYNERVGACTLVAADSNVADTAFSQVKAVIRANYSNPPAHGASVVATILSNAALRAIWEQELTDMRQRIQRMRQLFVNTLQEKGAQQDFSFIINQNGMFSFSGLTKEQVLRLRDEFAVYAVNSGRVNVAGMTPDNMAPLCEAIVAVL

SEQ ID NO: 27442 - protein, 610 aa, Xylella fastidiosa Temecula1
MGVSMNTVTFPSQGGIDRRRFLKGLALGGVVAGTGLWRLPVHAANPELPPLQRRTTPLELRIGQSSVNFTGRMRPAITVNNSLPGPVLRWRQGDTVQIHVTNTLPDVMTSIHWHGIVLPSNMDGVPGMSFDGIAPGEHYLYRFQLHQSGTYWYHSHAMFQEQAGLYGALIIDPLEPPPYRADREHILLFSDWTDLDPAALFRRLKKMSSYDNTYQRTVRDFFHDIHRDGLRTTLADRRMWGRMRMTPTDLSDVNAHTYTYLLNGTTPAGHWTGLFRPGEKVLLRLINGSAMTYFDVRIPGLKLTVVAVDGQYVHPVTVDELRIALAETYDVLIQPHGQDAFAIFAQDMGRTGYACGTLAVRPGLHAPLPALDPRPRLTMQDMGHGMTHDQHGSRVSEMADIPGMTHPGRLGDHASHANQPPAQPPHGLHSLPADRTAPQHPASEQNNPLVDMHVDAPQPRLNDPGIGLRDNGRHVLTYADLHSLFDDPDGREPGREIELHLTGNMEKFAWSFDGIPFASAQPLRLNYGERVRIVLVNDTMMAHPIHLHGLWSDLEDANAAFQVRKHTIDMPPGTRRSYRVRADALGRWAYHCHMLYHMESGMMREVQVRP

SEQ ID NO: 27443 - protein, 1077 aa, Schizosaccharomyces pombe
MTLFPVLNNTPVGKQVDSIYESRLDQFLSEGQYRDFNLPSVYDHARIDNPSGDVNNDLSKGFVDLKVYRVPDLSRPSFNEVVGHKKFDETASKGDTFGPSWATFWFEVHIRLPKSWAKYEQVIFQWNCDNEGLVYSQDGVPLQAFSGSERTDFILPDSWKTTEDTFYIEMACNGMFGTGAGSQIAPPDPNRYFTLTKADLVAPNLPAMALAYDFLLMQQCVKQLPSNCWQKYKARQICNDIMNTFHPNDLSTINECRNLAKAFLGNDIDSEAVFEKNNDKANVFAIGHCHIDTAWLWPFAETRRKIVRSWATQMNIMDRYPEYQFVCSQALQYLWLKEDHPDVFEKLKEYVNQNKFIPIGGSWVEHDTNIPNGESLIRQFLLGQHFFEKEFGVRCRTFWLPDTFGYSSQIPQICRLCGMDRFLTQKLSWNNINSFPTSTFNWVALDGSQVICHMPPANTYTADTNVNDVLHSIDQHKNLVNDQAGLLVFGIGDGGGGPTPEMLEKLRRCKGIANTVGYLPNVKLGNTVDEFFDGILKRTNAGQTLPSWNGELYFEFHRGTYTTQAELKKLMRKVEIALHDAEYVSTLASIFSKDYSYPKESLQDLWRDTLLCQFHDVLPGSCIEMVYKDAIPIMSKVLKNTEALLWQAIEQLGFKKASSSDNKEQLCLLNTLPWNVRGVITETEENKLVYFESCDGKGILTAAHTSLKHPAAAYQKDDNFILVNDHLRVTIAPNGLILSLFDLHKEREILDLKSGKNHAGANQYVLFEDTPLSWQAWDTEVFSLEKYEVLDKGKVSIKESGPLRASVVVDIPISELSHMKATISLEGYNDCSEFTGVNFTCEVDWHESCKFLKVEFPVDIHSEFASYETQFGITKRPTHYNTSWDVAKFEVCHQKFADYSDFTYGVSVLNDCKYGFSTHGNLMRLSLLRSPKQPDAHADMGKHTIRYAVYPHSKPLDSSTVRAAHKFNSNFRLLTRASDTANLDIFDAFQLVGEPNVILSHIKMAEKGKSIILRVYESLGGKSRARLVIKSLTVASVTKCNGLEEDLEELCTLKSNDYYEVPIELRAFEIATFKVNL

SEQ ID NO: 27444 - protein, 423 aa, Arabidopsis thaliana
  misc_feature (253)..(253): Xaa can be any naturally occurring amino acid
  misc_feature (285)..(285): Xaa can be any naturally occurring amino acid
  unsure (1)..(423): unsure at all Xaa locations
MFEGRPRDSCLVSTLFTMPSHKETKWSFLVSGKRSFLNNDESDLHFKKMYKLTTDSSEGEDNGSSSDSGTLIPGMNRDDSLSCLIRCSRADYCSIASVNRSLRSLIRSGAYYSVKTTEGTLEHWVYFSCHLNEWEAFDPRSKRWMHLPSMPQNECFRYADKESLAVGTDLLVFGWEVSSYVIYRYSLLTNSWSTAKSMNMPRCLFGSASYGEIAVLAGGCDSSGRILDTAELYNYEDQTWLVLPGMNKRRKMXCSGVFMDGKFYVIGGIGVGEENEPKVLTCGEXEFDLKTRKWTEIPEMSPPRSNQGNGMSAAAMAPPLVAVVNDQLYAADHAGMAVRRYDKEKRVWNKVGNLPEQAGSMNGWGLAFRACGDRIIVIGGPKAPGEGFIELNSWVPSVTTPEWHLLGKKQSVNFVYNCAVMSC

SEQ ID NO: 27445 - protein, 294 aa, Saccharomyces cerevisiae
TTPLVHVASVEKGRSYEDFQKVYNAIALKLREDDEYDNYIGYGPVLVRLAWHTSGTWDKHDNTGGSYGGTYRFKKEFNDPSNAGLQNGFKFLEPIHKEFPWISSGDLFSLGGVTAVQEMQGPKIPWRAGRVDTPEDTTPDNGRLPDADKDADYVRTFFQRLNMNDREVVALMGAHALGKTHLKNSGYEGPWGAANNCFTNEFYLNLLNEDWKLEKNDANNEQWDSKSGYMMLPTDYSLIQDPKYLSIVKEYANDQDKFFKDFSKAFEKLLENGITFPKDAPSPFIFKTLEEQGL

SEQ ID NO: 27446 - protein, 317 aa, Methanopyrus kandleri AV19
MTVRAGVIGVGMMGSHHARVYHELEETELVAVCDVNERRVKEVAKKYDVNWYTDHRKMLQEEDLDGVSICVPTKYHADIAVDALEAGVHVLVEKPIADTIENARRIIDAAEDHGLKLAVGHIERFNPSVMKAKEVVSRGDLGDIVVMSAKRVGPYPPRIRDVGVIVDLAVHDIDVMRYLAETEVEEVYAAAGSAITRTQEDYAEVMLRFEGDPTGLIEVNWLTPHKERRLEVTGREAILEIQYIEQELRLMDREGVKRFNIRKEEPLKLELRDFAESILENRDPLVDGEAGLQALRTAVAALKSVKEDRPVSLEEVE

SEQ ID NO: 27447 - protein, 447 aa, Oryza sativa
  misc_feature (124)..(124): Xaa can be any naturally occurring amino acid
  misc_feature (197)..(197): Xaa can be any naturally occurring amino acid
  misc_feature (224)..(224): Xaa can be any naturally occurring amino acid
  unsure (1)..(447): unsure at all Xaa locations
MGKEKTHINIVVIGHVDSGKSTTTGHLIYKLGGIDKRVIERFEKEAAEMNKRSFKYAWVLDKLKAERERGITIDIALWKFETTKYYCTVIDAPGHRDFIKNMITGTSQADCAVLIIDSTTGGFXEAGISKDGQTREHALLAFTLGVKQMICCCNKMDATTPKYSKARYDEIVKEVSSYLKKVGYNPDKIPFVPISGXEGDNMIERSTNLDWYKGPTLLEALDRXEPQRTSDKPLRLPLQDVYKIGGIGTVPVGRVETGVLKPGMVVTFGPSGLTTEVKSVEMHHEALQEALPGDNVGFNVKNVAVKDLKRGYVASNSKDDPAKEAASFTSQVIIMNHPGQIGNGYAPVLDCHTSHIAVKFAELVTKIDRRSGKELEKEPKFLKNGDAGMVKMIPTKPMVVETFSEYPPLGRFAVRDMRQTVAVGVIKNVEKKDPTGAKVTKAAAKKK

SEQ ID NO: 27448 - protein, 496 aa, Oryza sativa (japonica cultivar-group)
MHNIRQYQLPLQKYMAMMDLQEGNERLFYKLLIDNVEELLPVVYTPTVGEACQKYGSIFSRPQGLYISLKEKGKILEVLKNWPERSIQVIVVTDGERILGLGDLGCQGMGIPVGKLALYTALGGVRPSACLPITLDVGTNNEALLNDEFYIGLRQKRATAQEYADFLHEFMTAVKQNYGEKVLIQFEDFANHNAFELLAKYGTTHLVFNDDIQGTASVVLSGLVAALKLVGGSLSEHSYLFLGAGEAGTGIAELIALEISRQTKAPIEECRKKIWLVDSKGLIVSSRKETLQHFKKPWAHEHEPVGNLLDAVKTIKPTVLIGTSGKGQTFTQEVVEAISSFNERPVIFALSNPTSQSECTAEQAYTWSKGRAVFASGSPFDPVEYDGKIYVPGQANNAYIFPGFGLGVVMSGAIRVHDDMLLAASEALAQQVTQENFDKGLTYPPFSNIRKISAHIAANVAAKAYELGLASRRPRPKDLVKYAESCMYSPLYRNYR

SEQ ID NO: 27449 - protein, 536 aa, Prochlorococcus marinus subsp. pastoris str. CCMP1986
MSKFVFVTGGVVSSIGKGIVAASLGRLLKSRGYSVSILKLDPYLNVDPGTMSPFQHGEVFVTEDGAETDLDLGHYERFTDTAMTRLNSVTTGSIYQAVINKERRGSYNGGTVQVIPHITREIRERIHRVAANSNADIVITEIGGTVGDIESLPFLEAIREFKNDVNKNDVAYIHVTLLPYIKTSGEIKTKPTQHSVKELRSIGIQPDLLVCRSDKEINEGLKRKLSGFCGVNLNCVIEALDADSIYSVPLSLKNEGLCKQTLNCLELEDKECDLENWEKIIHNLRNPGNPIKVALVGKYIELGDAYLSVVEALRHACIEQKALLDLYWISAEMIEEKSAEEYLNDVDAIVVPGGFGNRGVNGKIEAIKFAREKNIPFLGLCLGMQCAVIEWARNIAQLPDASSSELNPDSENPVIHLLPEQEDIVDLGGTMRLGVYPCRLQKNTTGKELYNEDVIYERHRHRYEFNNYYKQSFLDSGYKISGTSPDGRLVELIELVDHPYFLACQYHPEFLSRPGKPHPLFKGLIKASQEKLEQSN

SEQ ID NO: 27450 - protein, 322 aa, Streptococcus pyogenes MGAS315
MVTVSKEQHLDMFLKMERIREFDSRINKLVRRGFVQGMTHFSVGEEAANVGAVAHLSYDDIIFSNHRGHGQSIAKDMDLNKMMAELAGKATGVSKGRGGSMHLADFEKGNYGTNGIVGGGYALAVGAALTQQYKGTNNIAVAFSGDGATNEGSFHESVNMAATWKLPVIFFIINNRYGISMSINNATNTPHLYTRAEAYGIPGFYCEDGNDVMAVYETMGKAVEHVRGGNGPAIVEVESYRWFGHSTADAGKYRTKEEVDEWKEKDPMIKYRTYLTSEGIATDDELDAIQAQVKKEVDDAYEFAQNSPDPELSVAFEDVWVD

SEQ ID NO: 27451 - protein, 631 aa, Leptospira interrogans serovar Copenhageni str. Fiocruz L1-130
MKFFFRLLSYSVHYKYRFTLGIVFALLTAILNAVSLTALIPLFDSLGNDKQTRFQLQMTLPEQRIILKQKVFGKDSLDGLEKTKLLLIEVKEWVNGRTKGLEPKEVVWSICIIVMPLYLLKLITYLLSVFCIATAGYKAVRDIRQELFEKNQLLPLTYFFKEKTGLMMSRIINDVEVIAAVISSNFRDATINFFYVITHLMVLLYLNTELLLIACLTVPVIILPVTLFTRKITKSTARSQEKMADLNANIQEMISGIKVIRVFNSEKYEQEKFGKINQNVYRRNFKGQFYLQIAPSLVELTSSVVVLGFFAAGASLIYNGRFTQGEFMAFLLTLLFLLRPLTQLSQMVGKVTQSIASGKRIFEIIDLETEDHSEESKITASPLSQNIEFKNLFFSYPGTGSAVLKDINLKVKKGETIALIGASGCGKSTLMDLIPRFFDPTSGSIEFDGIDIRDLSLGDLRKKIGIVTQDIFLFHGSVADNIAYGKPGATRKDVIRAARLAHAHDFIKKMDNGYDSILGVRGLNLSGGQRQRLVIARALLRDPEIMILDEATSALDVESERLVSDALRRLYANRTTFVIAHRLSTIKDIPRIIVMDNGKIVEEGDHNSLYDKNGIYRKLSDNQFANNGVLP

SEQ ID NO: 27452 - protein, 150 aa, Pennisetum glaucum
MSLVRRGNVFDPFSMDLWDPFDNMFRSIVPSSSSSDTAAFANARIDWKETPEVHVFKADLPGVKKEEVKVEVEDGNVLVISGQRSKEKEDKNDRWHRVERSSGQFVRRFRLPEDAKTDQVNAGLENGVLTVTVPKAEGKKPEVKAIEISG

SEQ ID NO: 27453 - protein, 442 aa, Silicibacter sp. TM1040
MSHVFPRHTKSDLPTAVGGDGCYLIDANGKRYFDGSGGAAVSCLGHSDAAVIKAVQEQVEKLAFAHTGFMTSEPAEALADLLISKAPGTLDRVYFVSGGSEATEAAIKLARQYHLERGEPQRRHLIARRQSYHGNTLGALAAGGNAWRRQQFDPLLIGVSHIAPCYEYVDRSDGESSFDYGQRVANELEAEILRLGPDTVMAFMAEPVVGATLGAVPAVEGYFKRIREICDTYGVLLILDEVMCGMGRTGHLFACDADGVAPDILCIAKGLGAGYQPIGAMLCSSAIYDAIAQGTGFFQHGHTYLGHPVATAAGLAVVNQMLERDLVSRVAEKGTQLQAALMERFAQHPNVGDIRGRGLFRGLELVQDRDSKAPFDPAHGLAARIKRAALEAGLICYPMSGTRDGRMGDHILLAPPFILSETQIEEICDKLAIAIEEGLASI

SEQ ID NO: 27454 - protein, 259 aa, Triticum aestivum
MPAAVMRCPFLLGRHPAAALRHSSSSRMRRVRRAAGSGGQGRSPAYGGLLLDAGGTLLQLAQPVAETYATLGRPYGVMKSQKYIMEGFKRAFSAPWPKTLRYHGDGRPFWKIVVAEATDCTNNNYFEEVYQYYAHGDAWRLPDGAYRTLRDLKDAGVKLAVVSNFDTRLRKLLKDLNVSDMFDAIVVSSEVGYEKPAPEIFKIALEQIGVEARNAVHVGDDETADKAGANAIGLECWLWGEDVKEFSEIQHRIVAKRSR

SEQ ID NO: 27455 - protein, 245 aa, Triticum aestivum
  misc_feature (73)..(74): Xaa can be any naturally occurring amino acid
  misc_feature (76)..(76): Xaa can be any naturally occurring amino acid
  misc_feature (78)..(78): Xaa can be any naturally occurring amino acid
  unsure (1)..(245): unsure at all Xaa locations
IEQVCTKKQAGTGPEFPGYRRPTRPGGAKGGIGCSPGDLSISELERLTRVFTQKIHDLIGIHTDVPAPDMGTXXAXQXGIWILDEYSKFHGYSPAVVTGKPVDLGGSLGRDAATGKGVLFATEALLAEHGKGIAGQRFVIQGFGNVGSWAAQLITEAGGKVIAISDVTGAVKNSNGIDIAKLMKHSAENRGIKGFDGGDAVDPTSLLTEECDVLIPAALGGVINKDNADAHQAKYIIEAANHPTD

SEQ ID NO: 27456 - protein, 560 aa, Neurospora crassa
MGEALINGSGAVSNVSALETLGPAAKLTDADPSEIPPASGPGRENAVTISDILERRAKAGRLIAPTASYADSDMFKGPQVGKPKSKSMNHHLSAESLSRHPCALKQAARHLKNPNIISLGGGLPCAEYFPIESITLKVPTPPDFSEAATSQSGAEVRIGKYDATDPSIQGTYDLAVALNYAQASGSAQLLRFVTEHTELVHNPPYSDWRSCLTIGSTGALEQTLRMLCDGPGRRDSLLTEEYSFSTALETAGPLDLKVVGVKMDGQGLLPEAMDELLSNWNPEEREGRRKPHVLYTVPSGQNPTGTTQGLERRKQVYEVARKHDLFVIEDEPYYYLQMPLEESKETESEEETVESFMSSLIPSLLSLDVDGRVLRMDSFSKVVVPGSRVGWVTASENIIEQYLRHAEVCNQGANGISQVILYKLLDEQWGHEGYFKWLMNLRQEYTKRRDTMVTAAEKFLPKEVVSWTVPVAGMFYWLKIDHSQHPGIQAGKGILEVEEEIFNSCIARGVLVARGSWFRAEQDTEPNELFFRATFAAATAENMTEAIRRFGEAIRESFKL

SEQ ID NO: 27457 - protein, 630 aa, Corynebacterium efficiens YS-314
MGTFDHDHLQKLRHEVDDLLTELAQVTEANKAEIDKVAPTHYNGAINLLHYLHLRTRDLRDLQSALASIGSTRLTTTEPSVKARLKSARNVIGAYLGEGPIYPGRDVADAFSDADEILDEHAEILLGAPLEGTPSCIMVTLPTEAATDLEMVRGFAKSGMDLARINCAHDDETVWKQMIDNVHIVAEEAGREIRVAMDLGGPKVRTGEIAPGPEVGRARVTRLDTGKVLTPAKIWITPIPEEGTEPAPVPENLPGRPALAVQVDPDWFDKLSTGSVIGLTDTRGSRRSFTVVRTFDGAVLAEGYQNAYIANGTLLQHDYERTPVRGIPPVSQRINLKVGNRLFLTSEEVVYDPSAGHGRIPKISCTLPEAVGAIKVGHRVLFDDGSIAAVCIDRREHDGHHVVELEVTRARPQGVNLAAYKGINLPDSELPLPSLTEEDLRHLRFVAKHADIVNVSFIRDTGDVEYVLDALAQIAEETGEHDKIRELGLVLKIETIPGYENLAQIMLTGMRHENFGVMIARGDLAVELGFDRMAEVPQLIMALAEAAHIPTIFATQVLENMAKNGLPSRAEITDATLALRCECVMLNKGPHINDAIKVLSRMSKKLGASQRKSRMLLRRIRSWEEPDQQG

SEQ ID NO: 27458 - protein, 124 aa, Arabidopsis thaliana
  misc_feature (53)..(53): Xaa can be any naturally occurring amino acid
  unsure (1)..(124): unsure at all Xaa locations
MQMLRNLSTRTRSRRGGYERVSDDSTFSLLGAKLRRSTSVPYYAPSIRLGGDXPVILEKLPRQKPTKTVVTSKLSHPIFSLFDGYRRHNKKKATAKPEFSRYHEYLKESGMWDLRSNSPVIYFK

SEQ ID NO: 27459 - protein, 152 aa, Pennisetum glaucum
MSLVSRSSVFDPFSMDLWDPFDSMFRSIVQSAGSPDSDTAAFAAARIDWKETPEAHVFKADLPGVKKEEVKVEVEDGNVLVISGQRSKEKEDKNDRWHRVERSSGQFMRRFRLPGNAKVDQVKAGLENGVLTVTVPKAEEKKPEVKAIEISG

SEQ ID NO: 27460 - protein, 466 aa, Silicibacter sp. TM1040
MHGTFTDNDLSHVIEADKAHVWHHLVQHKPFETSDPRIIVEGKGMRVWDQNGKEWLDAVSGAVWTVNVGYGRESICKAVYDQMMKMCYFAQAAGSVPGALYAEKLIEKMPGMSRVYYCNSGSEANEKAFKMVRQIAHKKYGGKKTKILYRDRDYHGSTLAAMSAGGQDERNAQYGPFAPDFVRVPHCMEYRKHELGLEHLSGEEFGIAAANLIEEVILREGPETVGALCLEPVTAGGGVIEAPEGYWPRVQEICKTYDVLLHIDEVVCGIGRTGTHWFGYQHYGIKPDFVTMAKGVASGYAAIACMVTTEEVFELFKDDTSDKLNYFRDISTFGGCTAGPAAALENMRIIEDEGLLENCTKMGERMISNLRVLQEKHAVIGDVRGKGLFLGAELVTDRDTKEPVEEALAQKVVAECGNHGVIIGVTNRSVPGRNNTLCFSPALIATADDIDKITDAVDKALTTVFG

SEQ ID NO: 27461 - protein, 159 aa, Pennisetum glaucum
MSLIRRSNVFDPFSLDLWDPFEGFPFGSGSNSGSLFPSFPRTSSETAAFAGARIDWKETPEAHVFKADVPALKKEEVKVEVEDGNVLQISGERNKEQEEKTDTWHRVERSSGKFMRRFRLPENAKTDQIRASMENGVLTVTVPKEEVKKPEVKSIQISG

SEQ ID NO: 27462 - protein, 336 aa, Schizosaccharomyces pombe
MSGKLVLVTGVTGFIGAHVAEQLLQAGYRVRGTVRSMEKADELIRLNPGLKDKIEFVIVKDVSASNAFDGVLKDVELICHIASPFFVENVTDNKSQLLDPAVKGTLGILEAAQGVKSIKRIVITSSFAAVGNFQIDPHNNKVYTEKDWNPITYEEALTTDNGIVAYCASKKLAEEAAREYVKEKKPSYDICTINPPYVYGPPIHPMKNMDSLNTSNQIFWKLIDGSKEATPFYYYYVDVRDVAAAHVFALENAKLSNGRMLVSKGVFTTGDICKVLRKEFPNKSDVIAEPVDITVDPSFFKLDNSFSKSLGFKYHSDEECYVDTAKKLWERAEEFK

SEQ ID NO: 27463 - protein, 750 aa, Salmonella enterica subsp. enterica serovar Paratyphi A str.
MSHNEKSPHQSPVHDTRESQPGLDSLAPSDGSHRPTPEPTPPGAQPTAPGSLKAPETANDKLTALDAFRKGSENYALTTNQGVRIADDQNSLRAGSRGPTLLEDFILREKITHFDHKRIPERIVHARGSAAHGYFQPYKDLSDITKAAFLCDPQKITPVFVRFSTVQGGAGSADTVRDIRGFATKFYTEEGIFDLVGNNTPIFFIQDAHKFPDFVHAVKPEPHWAIPQGQSAHDTFWDYVSLQPETLHNVMWAMSDRGIPRSYRTMEGFGIHTFRLINAQGKATFVRFHWKPLAGKASLVWDESQKLTGRDPDFHRRDLWEAIEAGDFPEYELGLQLIAEEDEFKFDFDLLDPTKLIPEELVPVQRVGKMVLNRNPDNFFAENEQAAFHPGHIVPGIDFTNDPLLQGRLFSYTDTQISRLGGPNFHEIPINRPTCPYHNFQRDGMHRMDIDTNPANYEPNSINDNWPRETPPAPKRGGFESYQERVDGNKIRERSPSFGEYYSHPRLFWLSQTPIEQQHIIDAFSFELGKVARAYIRERVVDQLAHIDVTLAQGVAHNLGFALTHEQTQIAPPPDVNGLKKDPALSLYAVPDGDVKGRVVAILLNDKVNAAELLTILQALKAKGVHAKLLYSRMGEVTADDGSTLTIAATFAGAPSLTVDAVIVPCGNIADIESCGDARYYLLEAYKHLKPIALAGDTRRFKALLNIDSQGEEGLVEADNVDHHFMDTLLTLMAAHRVWSRAGKINAIPA

SEQ ID NO: 27464 - protein, 521 aa, Zea mays
MQFSSVLPLEGKACMSPVRRGSGGYGSERMRINCCSIRRNKALRRMCFSARGAVSSTQCVLTSDAGPDTLVRPNHPFRRNYADPNEVAAVILGGGTGTQLFPLTSTRATPAVPIGGCYRLIDIPMSNCFNSGINKIFVMTQFNSASLNRHIHRTYLGGGINFTDGSVEVLAATQMPGEAAGWFQGTADAVRKFIWVLEDYYKHKAIEHILILSGDQLYRMDYMELVQKHVDDNADITLSCAPVGESRASDYGLVKFDSSGRVIQFSEKPKGAALEEMKVDTSFLNFATCTLPAEYPYIASMGVYVFKRDVLLDLLKSRYAELHDFGSEILPKALHEHNVQAYVFTDYWEDIGTIRSFFDANMALCEQPPKFEFYDPKTPFFTSPRYLPPTKSDKCRIKDAIISHGCFLRECAIEHSIVGVPSRLNSGCELKNTMMMGADLYETEDEISRLLAEGKVPIGVGENTKISNCIIDMNCQGWKERLHNKQRGRSKSPDRPGRRILIRSGIVVVLKNATIKDGTVI

SEQ ID NO: 27465 - protein, 333 aa, Debaryomyces hansenii CBS767
MAETITKTQPQSLKLRSGFELPQVGFGLWKIPKDKTAQVVHDAIKCGYRNFDGAYDYQNEEEAGEGIRKAISDGLVTRDEIFVTTKLWNNYHSKENVFKSAKWQNEAWGLGYIDLYLMHFPIALKYVDPKENQYPAWWADKEMTIVQPDRVPIRETWEAMESLVDLGIARSIGVSNFQAQAIYDILTYNSLPISALQVEHHPYLVQPELFQLCQEQNIAFIAYSSYGPQSFLELPGSFSELANDITPLFQNKTILSIASTHKKSPAQVLLRWATQRGVVVIPKASSQTHLEQNLQLDFDLSEDQINSISKLDIGLRFNDPGFYLKSHPLHIFA

SEQ ID NO: 27466 - protein, 225 aa, Methanocaldococcus jannaschii
MENMSEKELLVPLDTYLASGIHIGTQQKTKDMEKFIYRVRSDGLYVLDVRKTDERLRIAAKFLARYEPEDILAVSRRIYTMGPLEEFGKYTGIRTVAGRFVPGTLTNPAYKGFMEPEVVFISDPRVDRQALKEATEIGVPIVGLCDTEHLTSFIDLVIPTNNKGKKAVALIYYLLTREYLKNRGVITDDTKLPFTYEEFLEKAANPKYRIIIQPKDKRRRRRRRK

SEQ ID NO: 27467 - protein, 699 aa, Debaryomyces hansenii CBS767
MTVSSKQHLADQGQIHDKVLKVFRLLIADLVQNFNGGHPGGAMDMAAIGIALWRYVLNYAPNNPTFFNRDRFVLSNGHTCLFQYAFHHLVGYQHMTMKQLKTYHSPNLESYCPGHPEIEHPGIEVTTGPLGQGITNAVGLAIASKNLQATYNKPEFPVVSNHTFCIVGDACLQEGVALESISFAGHLGLNNLTAIYDNNQISCDGSVDLTNTENIGEKFKACNWNVIEVENGCYDVIAIVNALESSKKSENKPTLINVYTNIGIGSNVEGKAAAHGAAFGETEVDRLHRVNGFRPEDKFFIPKDVYTFFEDLPAKGDQIVNDWLRLVKSYKESYPDLGTDFERRISGKLPCDWESLIPASFPTNPTASRKSSGLVINPLAKEINNFIVGSADLSPSVNLVWEGKKDFQNPRIKVSCNINGDYSGRYIHYGIREHAMAGIANGIAAFNEGTFIPITSSFFMFYLYASPAVRYGALSKLQVIHVATHDSIGTGEDGPTHQPIALAALYRAMPNINYIRPCDSEETAGAWEIAIKSQGMPTIISLSRQNLPQYPGMSNRSLVKKGAYIFQERIDAVLNIVGVGAELKFALETANILNEKGIKTRVISFPSHNLFEMQPDEYKRSILKRGKIPTVVIEAFAPNGWERYATAGINMKTYGKSLPGAAAYEYFGFNSTVIASKVEKYFSRWNQEHEIRYEFLDLN

SEQ ID NO: 27468 - protein, 217 aa, Silicibacter pomeroyi DSS-3
MKFFVDTAEIDAIAELNDLGMVDGVTTNPSLIKKSGRDIIEVTREICAMVDGPVSAEVTATDAETMIAEGRKLVEIAGNIAVKVPLTWDGLKACKVLSDDGHMVNVTLCFSANQALLAAKAGATFISPFIGRLDDINLDGMELIEDIRTIYDNYGFETQILAASIRSVNHILDSARIGADVITAPPAVIKAMVNHPLTDKGLDAFLADIKAADIKIL

SEQ ID NO: 27469 - protein, 188 aa, Planktothrix agardhii
MNRGLSFQDLIQEGSLGLIRAAEKFEHEKGYKFSTYATWWIRQAITRAIADQSRTIRLPVHLYETISRIKKTTKLLSQEMGRKPTEEEIATRMEMTIEKLRFIAKSAQLPISLETPIGKEEDSRLGDFIESDGETPEDQVSKNLLREDLENVLDTLSPRERDVLRLRYGLDDGRMKTLEEIGQIFNVT

SEQ ID NO: 27470 - protein, 162 aa, Zea mays
MPPLPTGRVFQCKTCSRQFPTFQALGGHRASHKRPRVLQHQQQPVVADHAGLCLGRQQPPQPPPTPKPRVHACPVCGLEFAIGQALGGHMRRHRADADADAEASNKLRPPLDKAACDVAGGICLDLNLTPLENCAKCRGVLVLGAAGQGGVHKTLAMLDCSL

SEQ ID NO: 27471 - protein, 406 aa, Oryza sativa (japonica cultivar-group)
MSFRSVIQEVKGEIGAISRRGFRSRPGRVRRVAAAAEEPPDESSAAALVMRESCWTQLPPELLREVLARVEESEGWWPRRRDVVACAGVCRSWRGIVREIVRTPEASGNLTFPISLKQPGPRDAPMKCFIVRNRTTQTYYLYIGLTDALTDDGKFLLAARKCRRTTCTEYLISLDMNDISKRTDSYVGKLRSNFLGTKFTIYDAHPPYAGDVISKGQSARVIGSNHLSPRIPAGNYPVSHISYELNVLGSRGPRRMHCAMDSIPVSAIEQGGTAPTQTEFPLSYHESFTSIPFFKSKSVRANNSTASLLTQNGSKLVLKNKSPRWHEHLQCWCLNFHGRVTVASVKNFQLVASDESNPTNQEHDDVILQFGKVGKDMFTMDYRYPISAFQAFAICLSSFDTKIACE

SEQ ID NO: 27472 - protein, 628 aa, Xylella fastidiosa Temecula1
MTWSQDLAHKTYSIRHWADGYFEVNDAGHMVVMPLGGDGVRISLPEVVDAARAAGAKLPLLLRFPDILGHRLGKLQAAFAQAQSEWEYAGGYTAVYPIKVNQHRGVAGVLASHQGDGFGLEAGSKPELMAVLALSRPGGLIVCNGYKDREYIRLALIGRKLGLKTFIVIEKPSELRMVLEEAKTLDVLPGLGVRVRLASLGAGKWQNSGGDKAKFGLSPRQVLDVWKVLRGTEYADCLNVMHFHMGSQISNVRDIAKGMREATRYFVELSRLGAKITHVDVGGGLGIDYEGTRSRSDCSINYGLQAYASHIVQPLASACEDYDLVPPRIVTECGRAMTAHHAVLIANVTEVEAVPEGRVPGVCDDEPAVVRHMREIYGELDARPAIELFYEAQHFHAEGLAAYTLGQIDLVHRARIDDLFYAISHGVRERLSHEEKSHRPVLDELNERLVDKYFVNFSVFESIPDVWAINQIFPIVPIERLNEVPTRRGVVCDLTCDSDGTVKQYVENESLDSALPLHVLRHGEAYRIGFFLVGAYQEILGDIHNLFGDTDAVEVAVDGRGYRIAQQRCGDTTDVMLDYVGYALDEVRRVYAQRIAAAGMSAAESKALSDMLEAGLTGYPYLSDVPLE

SEQ ID NO: 27473 - protein, 151 aa, Brassica napus
SPHSPRRRRRRRLPKMNVDKLKKMAGAVRTGGKGSVRRKKKAVHKTTTTDDKRLQSTLKRVGVNTIPGIEEVNIFKDDVVIQFQNPKVQASIAANTWVVSGTPQTKKLQDLLPTIINQLGPDNLDNLRRLAEQFQKQMPGGEAGGASIGAA

SEQ ID NO: 27474 - protein, 188 aa, Calothrix brevissima
MNRGLSFQDLIQEGSLGLIRAAEKFDHEKGYKFSTYATWWIRQAITRAIADQSRTIRLSVHLYETISRIKKTTKLLSQEMGRKPTEEEIATRMEMTIEKLRFIAKSAQLPISLETPIGKEEDSRLGDFIESDGETPEDQVSKNLLREDLEKVLDSLSPRERDVLRLRYGLGDGRMKTLEEIGQIFNVT

SEQ ID NO: 27475 - protein, 173 aa, Methanopyrus kandleri AV19
MVNRPARIYREWKGPAYTRREYIKGVPDPKIQQFDMGNPAGDFDVEVSLVARERAQVTHNALEAARVAANRYLTKTVGRQNYHLKIRVYPHHVLRENPLATGAGADRVQEGMRLAFGKPIGTAARVREGQRVVTVRIDPENFEHAKEALRRAGMKFPFPFTIVVDKGEELVQD

SEQ ID NO: 27476 - protein, 405 aa, Bordetella parapertussis 12822
MTGTFSTGDSKMLDAVIVSTARTPIGKARRGALNLTHGADLGAHAIRHAVLRAGLEAGEVEDVILGCGYPEGGTGRNVARLSALRAGMPVTVSGMTVQRACSSGLQAIAIAAGRIRTEGVPAIVAGGVESVSLVLDHINRSSHRNEWLSAHLPGIDMTMIETADLVAQRYGITREAQDEYALRSQRLTAAAQEAGRFEHEIAPIRTTMRTIDPATGEAVLRQVECARDEGARPDTSLDNLARLAPVRGDGQFVTAGNASQLSDGAAACVLMSGREAARRGLEPLGVFRGFATAGCEPQEMGIGPVLAVPRLLERHGLTVDDIDLWELNEAFACQVLYCRDRLGIPDARLNVDGGAISIGHPFGMSGARMVGHALIEGRRRGARYVVVTMCVGGGMGAAGLLEVQQ

SEQ ID NO: 27477 - protein, 95 aa, Glycine max
  misc_feature (54)..(54): Xaa can be any naturally occurring amino acid
  unsure (1)..(95): unsure at all Xaa locations
SPLLNAYSINVKSQLLEISWPEKHALIIIALLQKYANSAIANITCTIYVKIHVXIGVPWLIDTLHDFPAHKEPLRIQNARLLNFSMIVFFSTSDL

SEQ ID NO: 27478 - protein, 374 aa, Gluconobacter oxydans 621H
MPEPTNSSPAPLKTDLRRVDINPDFWYPLAWSKDLKRGKTIGRRFGRFPIALVRPEEGSVFALEDRCAHRQVPLSLGKVSGEAVQCCYHGWAYGRSGRCIDVPYLGKRKLPNGVKTYPCREAGGMIFIFPGDAEKAESVPLPSLAQVDNPAFKTRRFSPVVKCHYTFMHENLMDMNHQFLHRRQMGQIRARFLGQDAGENFIEARYSFARTGNQQPLAERLIFGKHHDDPNREQPVEEIVSIRTTYPYQSLKIHDKDGDLIMELFSVYVPNTADGMSTQCFGLLSVLRPKTPFLIDMIWPALGIFTHRIFEEDREIMELEQNAWRELGGDHNVEVFPIVRKLRDLLAQNGVAPGTDTVAQPEVSREQPADPVVV

SEQ ID NO: 27479 - protein, 321 aa, Arabidopsis thaliana
MALLLLSHCSILSFQPPLSSSSSFHSSHVQSLSKPVFASPSPIRNSISSSVSSSSSSVSSSNSIPQVVVTRERGKNNQIIKALEKNGISSLELPLIQHARGPDFDRLASVLNDKSFDWIIITSPEAGSVFLEAWKTASSPEVQIGVVGAGTARVFEEAMKSADGLLHVAFTPSKATGKVLASELPEKVGKRSSVLYPASLKAGNDIVEGLSKRGFEVVRLNTYTTVPVQSVDTVLLQQALSAPVLSVASPSAVRAWLHLIQNEEQWSNYVACIGETTASAARRLGLKNVYYPEKPGLEGWVESIMEALGAHADSSNPSSRN

SEQ ID NO: 27480 - protein, 425 aa, Xylella fastidiosa 9a5c
MMSNSPQTPLATRQRLSEVRYEIRGELARRARELEAEGRKLIKLNIGNPGAFGFRAPEHLQRAIADDMGRTDPYTHQQGLPIAREAIAAAYVRRHYPDADADRVFVGNGVSELIDLSLRALLNPGDEVLVPSPDYPLWSAATILNDGRPVYYRCAPENGFQPDAVEIETLVSSRTRAIVLINPNNPSGANYSQELLERIVAIAVKHHLLLLVDEIYDQILYDGAVFVPVAPLAGTHPCITFSGLSKVHRACGWRVGWALLSGSSIQIDNLRNAMDLLGALRLCANVPGQYAIDAAVNGPDTITPLCSPGGPLYETRRAVIEACVVSEHLSLVVPAGALYAFPSVVGPAARHFDDYAFALELMNDEGVLVVPGSSFNVPYRDHFRVTLLPDAALIREVFSRIDRALSRRAEVAEKVVPLKSRSAAA

SEQ ID NO: 27481 - protein, 375 aa, Neurospora crassa
MVSLSWRTAVTTATAAFASVASAQTWTACNPTQRTDCSPNTALGMAIDVDFTQGAVNSFNPYGGTPSYSRNDGVSFTVAKSGDSPQLTSIFYIMFGRVEITMKAAPGAGIVSSVVLQSDDLDEIDFEWLGADNTYVQTNFFFQGKTASYDRGQFNPAPNSQGQFIKYTIDWTSEKISWYVGGTLVRVLTVNDAGGEYPQSPMQVKFGAWSGGDSANSPGTIQWAHGPTDYSQGPFSMTVKSVMVSDYSTGKSYRYGDTSGTWQSIIAEGGKVNGNLGKAGTVTVTASAVAATNTGSAGGSVPVGGIGSASGGSSGSNGGSGSSTHGSIPEGWVMKPDGKIVPVGAASAMARPPQGLLVATSLVTVALAAFVGCLA

SEQ ID NO: 27482 - protein, 499 aa, Arabidopsis thaliana
MATRLLRTNFIRRSYRLPAFSPVGPPTVTASTAVVPEILSFGQQAPEPPLHHPKPTEQSHDGLDLSDQARLFSSIPTSDLLRSTAVLHAAAIGPMVDLGTWVMSSKLMDASVTRGMVLGLVKSTFYDHFCAGEDADAAAERVRSVYEATGLKGMLVYGVEHADDAVSCDDNMQQFIRTIEAAKSLPTSHFSSVVVKITAICPISLLKRVSDLLRWEYKSPNFKLSWKLKSFPVFSESSPLYHTNSEPEPLTAEEERELEAAHGRIQEICRKCQESNVPLLIDAEDTILQPAIDYMAYSSAIMFNADKDRPIVYNTIQAYLRDAGERLHLAVQNAEKENVPMGFKLVRGAYMSSEASLADSLGCKSPVHDTIQDTHSCYNDCMTFLMEKASNGSGFGVALATHNADSGRLASRKASDLGIDKQNGKIEFAQLYGMSDALSFGLKRAGFNVSKYMPFGPVATAIPYLLRRAYENRGMMATGAHDRQLMRMELKRRLIAGIA

SEQ ID NO: 27483 - protein, 818 aa, Leptospira interrogans serovar Copenhageni str. Fiocruz L1-130
MERIYFGIYPTTRNSKKRSPRKTSPIKLRKNESFGNFMKNRVANRIVLILFLGINLPLFSESPALELSKTVDPIWLILCAALVFFMQAGFLMLETGLSRLKNTINVAVKNLMDYIVGTIAFFSVGFALMFGLSYEGWIGTNHFFLTGLKTGKDFSFFLFQVAFMGTAATIVSGAVAERIKFSAYLIVSVVVSLFIYPVFGHWTWGGGWIAKIGFVDFAGSTVVHSLGGWIALAGVIVLGPRKDKFKEDGTPRKIHGHNLTFSVLGVFILWFGWFGFNGGSALSFTDQVPLIILNTSLAGSVGGIFAITFSWIFYRVASVEDCMNGVLGGLVAITAGCHAFQPYASLIVGALAGISVVITSWVLEKILKLDDVVGAFPVHGVCGIIGTLLLPILSENQDIRIYPQFIGVLTCSFWAFGLGMILFLLLKISIGIRVNEEFEEKGLNVTEHGAGSSWIDLIHSLKDLAKGGGDLTRKIHVDSGTEAGAIAFLMNRYLANLGQMIYTIKEKSIELEYSSSEISVAWGKMSQGIQQQAANLGEVTSIFDSFRESFQTISSSAAQQKEMETSASELLNELVFGFQKFDSDLKNSSEKSEESVKAIDLSRKELNQLETDINDIGSSAKKVEGLVKLLNDISTKLGMLSINASIEAARSGAAGKGFGVVAEEISKLASSTQESTKKASEILGEIQSTVSRGKTTVQTSVEFFKNLTEEFRFLAETYITIRKSSLHYSNLIGNLNRLNTSITNQSEIIMTDIDKRFSEIGNLYESVDLINGAFHEISAQSEELNATGEFLKQLAEILNSLVRNFRVEQNSSQELIPG

SEQ ID NO: 27484 - protein, 497 aa, Triticum aestivum
  misc_feature (284)..(284): Xaa can be any naturally occurring amino acid
  unsure (1)..(497): unsure at all Xaa locations
MFSHGADPAQDASAAGGGVGVSAGGPAVPTRFVWPHGGKRVFLSGSFTRWSEHFPMSPVEGCPTVFPAICNLPPGIYQYKFNVDGQWRHDEGQPTITGEYGVVNTLYLTREFDHINTVLSPTTPGSRMDVDSDSFQRMGSLSDGALQEGSPRISEAAIQISRCRVAEYLNAHTGYDLLPDSGKVIALDINLPVKQSFHILHEQGIPVAPLWDSFRGQFVGLLSPLDFILILRELETHGSNLTEEQLETHTISAWKEAKRQTYGRNDGQLRSNQHLVHATPYESXRGIAMKILETGISTVPIIYSSSSDGSFPQLLHLASLSGILKCICRYFKNSTGSLPILNQPVCSIPLGTWVPKIGEPNGHPLAMLRPNTSLSSALNLLVQAGVSSIPIVDDNDSLIDTYSRSDITALAKDKVYTHIRLDEMTIHQALQLGQDANSPFGLFNGQRCQMCLRSDPLLKVMERLANPGVRRVFIVEAGSKRVEGVISLSDIFKLLLS

SEQ ID NO: 27485 - protein, 472 aa, Idiomarina loihiensis L2TR
MTAIKPETETEFDVVVIGTGPGGEGAAMQLAKSGYNVAIVEKHKALGGGCTHWGTIPSKALRHSVSRLIEYNNNPLFSGPGWQSGMTFSHILHYAESVIRKQVKLRSSFYDRNDVTVVHGTASFLDKNRIRVTKLDGSVDDLITKHVVIATGSRPYNPKDVDFSHPRIYDSDKVLSLSHEPKTILIYGAGVVGSEYASIFRGMGVKVDLINQRERLLSFLDAEISDALSYHLRNSGVVIRHNEEYESITGHDDKVVLKTKSGKTMAADCLLFANGRSGNIEQLDCQAVGLEPNYRGQLEVNENYQTSVDNIYAVGDIIGYPSLASAAYDQGRICASAIINGNCDKALISDIPTGIYTIPEISSVGKTEEELTEMKVPYEVGRAQFKHLARAQISGADVGCLKLLFHRETRELLGLHCFGERASEIIHIGQAIMEQKNGGNTIDYFVNTTFNYPTMAEAYRVAALNGINRLLL

SEQ ID NO: 27486 - protein, 382 aa, Triticum aestivum
  misc_feature (78)..(78): Xaa can be any naturally occurring amino acid
  misc_feature (166)..(166): Xaa can be any naturally occurring amino acid
  unsure (1)..(382): unsure at all Xaa locations
MQIFVKTLTGKTITLEVESSDTIDNVKAKIQDKEGIPPDQQRLIFAGKQLEDGRTLADYNIQKESTLHLVLRLRGGMXIFVKTLTGKTITLEVESSDTIDNVKAKIQDKEGIPPDQQRLIFAGKQLEDGRTLADYNIQKESTLHLVLRLRGGMQIFVKTLTGKTIXLEVESSDTIDNVKAKIQDKEGIPPDQQRLIFAGKQLEDGRTPCGLQHPEEESTLHLVLRLRGGMQIFVKTLTGKTITLEVESSDTIDNVKAKIQDKEGIPPDQQRLIFAGKQLEDGRTLADYNIQKESTLHLVLRLRGGMQIFVKTLTGKTITLEVESSDTIDNVKAKIQDKEGIPPDQQRLIFAGKQLEDGRTLADYNIQKESTLHLVLRLRGGQ

SEQ ID NO: 27487 - protein, 444 aa, Picea abies
EKTHINIVVIGHVDSGKSTTTGHLIYKLGGIDKRVIERFEKEAAEMNKRSFKYAWVLDKHKAERERGITIDIALWKFETNKYYCTVIDAPGHRDFIKNMITGTSQADCAVLIIDSTTGGFEAGISKDGQTREHALLAFTLGVKQMICCCNKMDATTPKYSKARYDEIVKEVSSYLKRVGYNPDKIPFVPISGFEGDNMIERSTNLDWYKGPTLLEALDQVSEPKRPTDKPLRLPLQDVYKIGGIGTVPVGRVETGIIKPGTIVTFGPTGLTTEVKSVEMHHEALQEAYPGDNVGFNVKNVAVKDLKRGYVASDSKNDPAKEAANFTAQVIIMNHPGQIGNGYAPVLDCHTCHIAVKFSEIMTKVDRRSGKELEKEPKFLKNGDAGFVKMIPTKPMVVETFAEYPPLGRFAVRDMRQTVAVGVIKAVEKKDPTGAKVTKAAAKKK

SEQ ID NO: 27488 - protein, 663 aa, Glycine max
  misc_feature (190)..(190): Xaa can be any naturally occurring amino acid
  unsure (1)..(663): unsure at all Xaa locations
MSTAPAPSSPPANNGTAPPPSTPATPSAPPPATPSAPPPSTPSSPPPATPSSPPPATPSSPPPATPSSPPPATPSSPPPSTPSASPPPSTPTTPSTSPPSPPSTSPPSPPSGGSTPSPPSRSSPSPPSGSSPTTPSPPSSSSSSISTGVVVGIAVGAVAVLLVLSILCICCRKKKRRRDEEYYAPPPQQXPPRGPKDDAYGGPPRQWQHNVPPPQDHVVSMMPPKPSPPPAPPAYAGQPPPPPPPFISSSGGSGSNNSGGEFLPPPSPGISLGFSKSTFTYEELARATDGFSDANLLGQGGFGYVHRGILPNGKEVAVKQLKAGSGQGEREFQAEVEIISRVHHKHLVSLVGYCITGSQRLLVYEFVPNNTLEFHLHGKGRPTMDWPTRLRIALGSAKGLAYLHEDCHPKIIHRDIKAANILLDFKFEAKVADFGLAKFSSDVNTHVSTRVMGTFGYLAPEYASSGKLTDKSDVFSYGVMLLELITGRRPVDKNQTFMEDSLVDWARPLLTRALEEDDFDSIIDPRLQNDYDPNEMARMVASAAACIRHSAKRRPRMSQVVRALEGDVSLADLNEGIRPGHSTMYSSHESSDYDTAQYKEDMKKFRKMALGTQEYGASSEYSAATSEYGLNPSGSSSEAQSRQTTREMEMRKMKNNQGFSGSS

SEQ ID NO: 27489 - protein, 136 aa, Zea mays
  misc_feature (34)..(34): Xaa can be any naturally occurring amino acid
  misc_feature (52)..(52): Xaa can be any naturally occurring amino acid
  misc_feature (80)..(80): Xaa can be any naturally occurring amino acid
  unsure (1)..(136): unsure at all Xaa locations
AFRTDKICRTPPTPHDEMCAGMSYFPETIWKGVXNFLWHIDTSLKNIGINEXYNAPLIQFSSSMGGGRDGNPRVIPKVTXYVCLLVRIMAANLYFSHIKDLMFQLSMWHCSDELWIRVDESHCYSRKAAKHYIGLK

SEQ ID NO: 27490 - protein, 640 aa, Chrysanthemum x morifolium
MMDSCDCFETQWPADELLVKYQYISDFFIAFAYFSIPLELIYFVQKSAFFPYRWVLMQFGAFIVLCGATHFINLWTFSSHSKTVAIVMTVAKLSTAFVSCVTALMLVHIIPDLLSVKTRELFLKQRAEDLDREMGLIIKQEGTGRHVRMLTHEIRSTLDRHTILKTTLIELGRTLDLEECVLWMPSTKGMILEVSHSLHNLIPFRSTVPINLPIITEVFNRAEAIRIPHNCPLARIRTPVGSYIPPEVVAVRVPLLHLSNFEIDNWPDNSAKSYAVMVLILPMNGVRKWRDHEMELVTVVADQVAVALSHAAILEESMRARDQLMEQNFALNLARQEAEMAIHARNDFLAVMNHEMRTPMHAIIALSSLLLETELTPDQRAMIETILKSSNLLAALVNDVLDLSRLEDGSLELESDVFNLHGLFKEVVALINPIASVKNTSMALNCDLDLPAFGIGDEKRLMQIILNVVGNAVKFTKGGHVSIQASILSPEYLQEWRTPEFCPTLTEGLFYLLVQVKDSGSGIKQQDIPHIFTKFSEPRSASNRSGGAGLGLAICKRFVNLMGGHIWIESGGLGKGTTVAFLVKLGLCNYPNDPTMQQLVPRTVPKARPHQGSGELIQHRQLDREGYQGAASFPLYNRSM

SEQ ID NO: 27491 - protein, 636 aa, Sorghum bicolor
MISARAATVAAASPASPWKRGGGRSEGAGSCDGCSTYRKTVRRRAAAAKVRALPPKRVEAVAIGSAAETETEEVVVEVAAANEELPVMPWATSVASGYTLLRDPRHNKGLAFTEKERDAHYLRGLLPPAVVSQELQIKKFMNNLRQYQLPIQCYMAMMNLQETDERLFYKLLIENVVELLPYVYTPTVGEACQKYGSIFGRPQGLYVSLKDKGRVLEVLRNWPHRNVQVICVTDGERILGLGDLGCQGMGIPVGKLALYTALGGVDPSACLPITIDVGTNNEKLLNDEFYIGLRQKRARGEEYDELMEEFMAAVKTFYGEKVLIQFEDFANHNAFDLLEKYSKTHLVFNDDIQGTASVVLAGLLAALKMVGGTLAEQTYLFLGAGEAGTGIAELIALEMSKQTKAPIEECRKKVWLVDSKGLIVDSRKSSLAPFKKPWAHEHEPLTTLYDAVQSIKPTVLIGTSGVGRTFTKEIVEAMASINERPIIFSLSNPTSHSECTAEQAYTWTQGRAVFASGSPFAPVEYDGKTFVPGQSNNAYIFPGLGLGLVISGAVRVHEDMLLAASAALADQATEENFVTGSIFPPFTNIRKISAYIAAAVAAKAYELGLATRLPPPKDLVAYAESCMYSPVYRNYQ

SEQ ID NO: 27492 - protein, 481 aa, Agrobacterium tumefaciens str. C58
MAQSYDVIIIGSGPGGYIAAIRAAQLGMKVAVVEREHLAGICSNWGCIPTKALLRTADVMHTATHAKDYGLTLEGSIKPDVKAIVARSRGIAARMNNGVGFLFKKNKVDIIWGEAKITKPGEIVVGKSTKPVVQPQGPVPKNTLGEGTYTAKHIIVATGARPRALPGIEPDGKLIWTYFEAMKPEELPKSLLVMGSGAIGIEFASFYRTMGVDVTVVEIMSQVMPVEDAEISAFAKKQLEKQGIKIHLETKVSKVEKAANSVTATLEKKDGSSEKIIADRMISAVGVVANVEGIGLEAAGVKTDRGFIIIDGYGKTNVPGIYAIGDVAGPPLLAHKAEHEAVICVEKIAGLPNVHPMDKLKIPGCTYCNPQVASVGLTEAKAKEQGRDIRVGRFSFAANGKAVALGEDQGMVKTIFDKKTGELLGAHMVGAEVTELIQGFVVAMNLETTEEDLMHTIFPHPTISESMKESVLDAYGRVLNA

SEQ ID NO: 27493 - protein, 544 aa, Candidatus Blochmannia sansabeanus
  misc_feature (245)..(245): Xaa can be any naturally occurring amino acid
  unsure (1)..(544): unsure at all Xaa locations
MAAKDVKFGNDARVKMLRGVNVLADAVKVTLGPKGRNVVLDKSFGAPVITKDGVSVAREIELEDKFENMGAQMVKEVASKANDSAGDGTTTATVLAQSIVNEGLKAVAAGMNPMDLKRGIDKAVVAAVEELKKLSVPCSDPKAIAQVGTISANSDETVGKLIAQAMDKVGKEGVITVEEGSGLQDELDVVEGMQFDRGYLSPYFVNKPESGTVELEHPFILLADKKISNIREMLPILESVVKAGXPLLIIAEDVEGEALATLVVNNMRGIVKVTAVKAPGFGDRRKAMLQDIAILTAGTVISEEIGLDLEKSTLEDMGQAKRVVITKDVTTIIDGVGNKSSINSRVAQINQQRDEATSDYDREKLQERVAKLAGGVAVIKVGAATEVEMKEKKARVEDALHATRAAVEEGVVAGGGVALIRVANAIRNLCGDNEDQNVGIKVARRAMEAPLRQIMANAREEPSVIANNVRSGEGNTGYNAATEKYGNMIELGILDPTKVTRSALQYAASIAGLMITTECMVTELPKEDKPDLGNAGAGGMGGMM

SEQ ID NO: 27494 - protein, 504 aa, Triticum aestivum
  misc_feature (444)..(444): Xaa can be any naturally occurring amino acid
  unsure (1)..(504): unsure at all Xaa locations
LTSRSACVRVHGVQFRPSSSFDTKTTTTNAGQPVWNDNEALTVGPRGPILLEDYHLLEKIAHFARERIPERVVHARGASAKGFFECTHDVTGLTCADFLRAPGARTPVIVRFSTVIHERGSPETIRDPRGFAVKFYTREGNWDLLGNNFPVFFIRDGIKFPDVIHAFKPNPKSHVQEYWRVFDFLSHHPESLHTFFFLFDDVGIPTDYRHMDGFGVNTYTFVSRAGKSHYVKFHWRPTCGVSCLMDDEATLVGGKNHSHATQDLYDSIDAGNFPEWKLFVQVIDPDDEDRFDFDPLDDTKTWPEDLVPLQPVGRLVLDRNVDNFFNENEQLAFGPGLVVPGIYYSDDKMLQCRVFAYADTQRYRLGPNYLMLPVNAPKCGFKNNHYDGAMNFMHRDEEVDYYPSRHAPLRHAEPASFPVPTRPVVGKREKTRIKKENDFVQPGXERYRSWAPDRQDRFVRRFADALAHPKVSHELRVIWIDFLSKCDKSCGMKVANRLNVKPSM

SEQ ID NO: 27495 - protein, 179 aa, Eucalyptus cordata
EQMVEPAVIGTKNVIVAAAEAKVRRVVFTSSIGAVTMDPNRGPDVVVDESCWSDLEFCKSTKNWYCYGKAVAEKAACAEAKERGVDLVVINPVLVLGPLLQSTINASIIHILKYLTGSAKTYANSVQAYVHVKDVALAHVLVLETPSASGRYLCAESVLHRGDVVEILAKFFPEYNVPT

SEQ ID NO: 27496 - protein, 518 aa, Candidatus Blochmannia vafer
MAAKDVKFGNDARVKMLRGVNVLADAVKVTLGPKGRNVVLDKSFGAPVITKDGVSVAREIELEDKFENMGAQMVKEVASKANDSAGDGTTTATVLAQSIVNEGLKAVAAGMNPMDLKRGIDKAVVAAVEELKKLSVPCSDPKAIAQVGTISANSDETVGKLIAQAMDKVGKEGVITVEEGSGLQDELDVVEGMQFDRGYLSPYFVNKPESGTVELEHPFILLADKKISNIREMLPMLESVAKAGKPLLIIAEDVEGEALATLVVNNMRGIVKVTAVKAPGFGDRRKAMLQDIAILTAGTVISEEIGLELEKATLGDMGQAKRVVITKDATTIIDGIGNKSAIDSRVAQINQQRDEATSDYDREKLQERVAKLAGGVAVIKVGAATEVEMKEKKARVEDALHATRAAVEEGVVAGGGVALIRVANAIRNLCGDNEDQNVGIKVARRAMEAPLRQIMANAGEEPSVIANNVRSGEGNTGYNAATEKYGNMIELGILDPTKVTRSALQYAASIGGLMITTE

SEQ ID NO: 27497 - protein, 582 aa, Yersinia pestis KIM
MMNDKDLSTWQTFRRLWPTISPYKAGLIVAAIALILNAASDTFMLSLLKPLLDDGFGNSNSSILKWMPLAVIGLMVVRGVTGFVSSYCISWVSGKVVMHIRRRLFSHMMGMPVSFFDQQSTGTLLSRITYDSEQVAASSSSALVTVVREGASIIGLFIMMFYYSWQLSLILIVIAPIVSISIRLVSKRFRNISKNMQNTMGEVTTSAEQMLKGHKEVLIFGGQKVETERFDAVSNRMRQQGMKLVSASSISDPIIQLIASFALALVLYAASFPSVMETLTAGTITVVFSAMIALMRPLKSLTNVNTQFQRGMAACQTLFSILDMEQEKDEGKLEVERAKGDIEFRHVTFYYPGKDTPALNDINIHLEAGKTVALVGRSGSGKSTIANLLTRFYDVSEGSILLDGHDLRDYRLGALRNQVALVSQNVHLFNDTVANNIAYARNEQYSRAEIEEAARMAYAMDFINKMEHGLDTVIGENGIMLSGGQRQRIAIARALLRNCPILILDEATSALDTESERAIQAALDELQKNRTSLVIAHRLSTIEKADEIVVIEDGRIVERGVHAELLVQQGVYAQLNRMQFGQ

SEQ ID NO: 27498 - protein, 341 aa, Chlamydophila caviae GPIC
MPNSSHYNIASKESDEATIKNIVDIYGVSRCLEFIKNMLLIREFETRGEEAYLEGLVGGFYHSYSGQEAVATATLANTGLDQWFFSSYRCHALAILLNIPLRSLAAELLGRETGCALGRGGSMHMCGPNFPGGFGIVGGQIPLAAGAAFAMKYRGEDKIALGFIGDGAVAQGVFHETLNFASLHSLPLMLVIENNGWGMGTALNRAIAKQPIGESQGSSYNIRSFTLNGFDLFNCLLGFKEAYEYMQKTRLPVIVECLCSRFRGHSISDPNLYRSKEEMQCLIKKDPIIFAKNWLIQLGVLSEEKFQELRQECRSEVLKAFTEAKSDPEPAIATLEEGVYA

SEQ ID NO: 27499 - protein, 179 aa, Eucalyptus amygdalina
EQMVEPAVIGTRNVIVAAAEAKVRRVVFTSSVGAITMDPNRGPDVVVDESCWSDLDFCKSTKNWYCYGKAVAEKSACAEAKERGVDLVVINPVLVLGPLLQSTVNASIIHILKYLTGSAKTYANSVQAYVHVKDVALAHILVFETPSASGRYLCAESVLHRGDVVEILAKFFPEYNLPT

SEQ ID NO: 27500 - protein, 518 aa, Candidatus Blochmannia laevigatus
  misc_feature (510)..(510): Xaa can be any naturally occurring amino acid
  misc_feature (516)..(518): Xaa can be any naturally occurring amino acid
  unsure (1)..(518): unsure at all Xaa locations
MAAKDVKFGNDARVKMLRGVNVLADAVKVTLGPKGRNVVLDKSFGAPVITKDGVSVAREIELEDKFENMGAQMVKEVASKANDSAGDGTTTATVLAQSIVNEGLKAVAAGMNPMDLKRGIDKAVVAAVEELKKLSVPCSDPKAIAQVGTISANSDETVGKLIAQAMDKVGKEGVITVEEGSGLQDELDVVEGMQFDRGYLSPYFVNKPESGTVELEHPFILLADKKISNIREMLPILESVAKAGKPLLIIAEDVEGEALATLVVNNMRGIVKVTAVKAPGFGDRRKAMLQDIAVLTAGTVISEEIGLELEKATLEDMGQAKRVVITKDATTIIDGVGNKSAINSRVAQINQQRDEATSDYDREKLQERVAKLAGGVAVIKVGAATEVEMKEKKARVEDALHATRAAVEEGVVAGGGVALIRVANAIRNLCGDNEDQNVGIKVARRAMEAPLRQIMANAGEEPSVIANNVRSGEGNTGYNAATEKYGNMIELGILDPTKVTRSALQYAASXAGLMIXXX

SEQ ID NO: 27501 - protein, 549 aa, Staphylococcus epidermidis ATCC 12228
MKQRVGQYLMDAVYSAGADKVFGVPGDFNLAFLDDIIAHNDIKWIGNTNELNASYAADGYARINGIGAMVTTFGVGELSAVNGIAGSYAERVPVIAITGAPTRAVEQEGKYVHHSLGEGTFDDYRKMFEPITTAQAYITPDNATTEIPRVINTALQQRRPVHIHLPIDVALTEIEISNPFKPEVEPQKNVQSYINMVQDKLESASQPVIITGHEINSFHLHKELEQFVNQTQIPVVQLSLGKGAFNEENPYYMGIFDGSIAEQDIQDYVNQSDAILNIGAKLTDSATAGFSYQFDINEVIMLNHNEFKINDTCIEAFSLPNILNGLNKYIHYKNTNDFPQYERPQSHNYELSDQPLTQETYFNMMQDFLQQDDILIAEQGTSFFGAYDLALYKDNTFIGQPLWGSIGYTLPATLGTQIANPYRRNILLIGDGSLQLTVQSLSTMIRQNLNPVIFVINNDGYTVERMIHGMKEPYNDIRMWDYKSLPSVFGGDNVLVHDVNTSEELMLTFENIKSNSDRMHFVEVKMAVEDAPVKLSNIAKAFASQNKSS

SEQ ID NO: 27502 - protein, 362 aa, Corynebacterium glutamicum ATCC 13032
MTLTDNSKNVDAVILVGGKGTRLRPLTVNTPKPMLPTAGHPFLTHLLARIKAAGITHVVLGTSFKAEVFEEYFGDGSEMGLEIEYVVEDQPLGTGGGIRNVYDKLRHDTAIVFNGDVLSGADLNSILDTHREKDADLTMHLVRVANPRAFGCVPTDEDGRVSEFLEKTEDPPTDQINAGCYVFKKELIEQIPAGRAVSVERETFPQLLEEGKRVFGHVDASYWRDMGTPSDFVRGSADLVRGIAYSPLLEGKTGESLVDASAGVRDGVLLLGGTVVGRGTEIGAGCRVDNTVIFDGVTIEPGAVIENSIISSGARIGANAHISGCIIGEGAQVGARCELNAGMRVFPGVVIPDSGIRFSSDQ

SEQ ID NO: 27503 - protein, 390 aa, Acinetobacter sp. ADP1
MTNLNPRDVVIVDGVRSAMGKSKNGMFRNVRADSLSAELVRALVARNQFDVNEVEDLIWGCVNQTLEQGMNIGRNIVLLADLPKTVAGQTVNRLCGSSMQAIHTAAAQIATNQGDIFIIGGVEHMGHVGMMHGIDLNPEASKHYAKASNMMGLTAEMLGRMNGIGREEQDAFGVESHRRAWAATQEGRFKNEIVGVEGHDANGFKILCDIDEVIRPDANLEAFKALRPVFDPKGGTVTAATSSALSDGASAMLLMSAERAQALGLKPRAVIRSMAVAGCDAAIMGYGPVPATQKALKRAGLSVADIQTVELNEAFAAQGLSVLKGLGLYEKQDIVNLNGGAIALGHPLGCSGARITTTLLNVMEQQDTQIGLATMCIGLGQGIATVIERV

SEQ ID NO: 27504 - protein, 207 aa, Oryza sativa
  misc_feature (190)..(190): Xaa can be any naturally occurring amino acid
  unsure (1)..(207): unsure at all Xaa locations
TKRNNMQIFVKTLTGKTITLEVEPSDTIENVKAKIQDKEGIPPDQQRLIFAGKQLEDGRTLSDYNIQKESTLHLVLRLRGGMQIFVKTLTGKTITLEVEPSDTIENVKAKIQDKEGIPPDQQRLIFAGKQLEDGRTLSDYNIQKESTLHLVLRLRGGMQIFVKTLTGKTITLEGEPSDTIENVKAKIQDXEGIPPDPQRLIFRLATI

SEQ ID NO: 27505 - protein, 188 aa, Anabaena cylindrica
MNRGLSFQDLIQEGSLGLIRAAEKLDHEKGYKFSTYATWWIRQAITRAIADQSRTIRLPVHLYETISRIKKTTKLLSQEMGRKPTEEEIATRMEMTIEKLRFIAKSAQLPISLETPIGKEEDSRLGDFIESDGETPEDQVSKNLLREDLEKVLDSLSPRERDVLRLRYGLDDGRMKTLEEIGQIFNVT

SEQ ID NO: 27506 - protein, 343 aa, Salmonella typhimurium LT2
MEVKTQSCVVAGKRAVAVTEQNIEWNNKGTLVQITRGGICGSDLHYYQEGKVGNFTVKAPMILGHEVIGKIVHSDSDLLREGQPVAINPSEPCGHCKYCLQHEENHCTEMRFFGSAMYFPHVDGGFTRFKAVDTAQCIPWPEQADEKAMAFAEPLAVAIHAAHEAGDLQGKRIFISGVGPIGCLIVSAVKTLGAAEVVCADISTRSLSLARQMGADTLVNPQHDSLDDWKAEKGYFDISFEVSGHPSSISTCLEVTRAKGVMVQVGMGGAVPNFPMMMVISKEISLKGSFRFTTEFNTAVSWLANRVINPLPLLSAEYPFTDLEAALIFAGDKTQAAKVQLVF

SEQ ID NO: 27507 - protein, 188 aa, Microcystis wesenbergii
MNRGLSFQDLIQEGSLGLIRAAEKFDHEKGYKFSTYATWWIRQAITRAIADQSRTIRLPVHLYETISRIKKTTKILSQEMRRKPTEEEIATKMEMTIEKLRFIAKSAQLPISLETPIGKEEDSRLGDFIEADGETPEDEVSKNLLREDLENVLDTLSPRERDVLRLRYGLDDGRMKTLEEIGQIFNVT

SEQ ID NO: 27508 - protein, 1059 aa, Thiobacillus denitrificans ATCC 25259
MLDRDDPCRVRDAGDASGRYEAHQQLALLETSVARLNDIVLITEADHGGAAGPAIVFVNDAFEHITGYRRDEVLGKSVRLLHGPLTDRAEVRRIGEALENQRPVRSELVNYSKHGEPFWLELDVVPVTDANGYYTHCVAVERDVTRRKEADLELARLNRALRVRSACNKALTRATDEGELLHEICRVAVELGGYQTAWVGFAQDAAERSIRPVACAGDGADAFNDSAATWSDEQLIGNGPFGRALRGRQVVIVEDLRNAPDREPWAAAASARGYRSLVVLPLHDAERTYGIFALFGSDVARVASDEMRLLQELTDDLAFGIATLRSRCEQRRTQEAVYRIAAGVSASTGTAFFDELVRNMTAALGAEAGFIARIRADDPGSATTVVAYVEGERIENFEYTLVGTPCEQLAKTATHVIPRRVSELFPCTAHLSKRRAHAYVGHRLVDSRGQAIGQLFVLFSRPLHETAFITSTLQIFASRVAAELERQSADAHIRRQASLLDKAQDAIMVRGLDDAIRYWNKGAERLYGWKADEVTGRSTEMLLYGDPTAFRENTRKVIAHSEWNGEITQLRKDGTALVVEAHWTLLRDENDQPDAILAINTNVTERKAAEHKVHQLAFYDPLTGLPNRELLGDRLQHAMQVRHGQVGALLLIDLDNFKTLNDTLGHAMGDLLLQQIAQRLQTCLRKGDTLARVGGDEFVIVLEGLSASPGDAGSLATRVGEKILASFARPFQLADYVHHCTASIGITLFNDRPTTLDELRKRADLAMYQAKAHGRNALRFFDPAMQAVVAARAELEVDLREALRLGAFELHYQAQVDARGCVSGAEALLRWQHPQRGWIAPASFIPLAEETGLILPLGLWVLDVACAQLVAWSKMPHMARLSLAVNVSARQFRQADFAAQVLAAIERSGADPRRLKLELTESLMLDNLDDTILKMSALKAHGIGFSLDDFGTGYSSLAYLKRLPLDEIKIDQSFVRDVLIDANDASIARSILALGQSLNLEVVAEGVETDAQHAFLAEHGCQAYQGYLFNRPQPARQFEAWGAGHPCPDGGEETGRARL

SEQ ID NO: 27509 - protein, 144 aa, uncultured archaeon GZfos33E1
MVNLAKQKRIAAKVMKVGLGRVWIDPEATGDVAEAITREDIRGLVEEGLIKKKQKKGVSKGRAREVAIKKVLGRRKGHGSRKGAKGARRGKKKVWITRIRALRRQLKELRDEGNIDKTTYRRLYLKAKGGEFKSIAHLNEFIKA

SEQ ID NO: 27510 - protein, 163 aa, Xanthomonas oryzae pv. oryzae KACC10331
MMNKITHYFKSLLLLELLGGLWLTLKYTFKPKYTVLYPMEKFPQSPRFRGLHALRRYPNGEERCIACKLCEAVCPALAITIDSAKREDGTRRTTRYDIDLFKCIFCGFCEESCPVDSIVETHILEYHFEKRGENIINKPQLLAIGDRLETEIAERRAADAAFR

SEQ ID NO: 27511 - protein, 145 aa, Brassica napus
  misc_feature (128)..(128): Xaa can be any naturally occurring amino acid
  unsure (1)..(145): unsure at all Xaa locations
MSRAEQIQRPRIQAKTAHGTGERKGIGHGVGDGIAGCGVIIHTCAREETQLNDYIGRWQKKGFHVTCSVCDVTSGTDREKLMQNVSSMFGGKLDILINNVGAIRSKPTVEHTADDFSFHISNNLESGXAFHLSQLSHPPLQAPPP

SEQ ID NO: 27512 - protein, 515 aa, Arabidopsis thaliana
MDGADGTVRVKPGRGFETETDVAVSSPVTRQKAAAAKQFIENHYKNYLQGLHERMERRREFQRKVQEAQLPVEEQDEMMRNLARRETEYMRLQRRKIGIDDFELLTVIGKGAFGEVRLCRLRSTSEVYAMKKLKKTEMLSRGQVEHVRSERNLLAEVDSRYIVKLFYSFQDSECLYLIMEYLPGGDIMTLLMREDILSEDVARFYIAESILAIHSIHQHNYVHRDIKPDNLILDKSGHLKLSDFGLCKPLDDKYSSLLLEDDEMLSQDSENQSGKSDADKAPWQMPKEQLLQWKRNRRALAYSTVGTLDYMAPEVLLKKGYGMECDWWSLGAILYEMLVGYPPFCSDDPRITCRKIINWRVCLKFPEEPKISDEARDLICRLLCDVDSRLGTRGVEEIKSHPWFKGTPWDKLYDMEAAYRPIVDGELDTQNFEKFPEVEGSPSEAPQVGPWRKMLTSKDTNFIGFTFKKSDITRSMESSGADMKSNGSGEAPSLISLLGRINMEEGEGGELNHKT

SEQ ID NO: 27513 - protein, 410 aa, Triticum aestivum
  misc_feature (281)..(281): Xaa can be any naturally occurring amino acid
  unsure (1)..(410): unsure at all Xaa locations
MAAQNYGELYNILGWGEPYFTVNRDGHLCVKTHGHETKPGQEIDVVSVAEAAKEKGVQFPMILRFPDVLKHRLDSLHVAFEKAIKHTGYTAPYQGVYPVKVNQNRAIINDFVSFGHRHSYGLEAGSKPELLIAMSYLTKAKPGAFLVCNGYKDADYVALALSARAMGLNVIIVLEMEEELDIIIEHSSKLGVEPVLGVRAKLLTKIPGHFGSTAGKHGKFGLPADKIYEVANRLRHLDKLHWLKLLHFHIGSMIPSTDIVSRAATEAAGIYCTLVKQYGAXWTTLDCGGGLGVDYDGTRSGSDMSVAYGLEEYASSIVQAVRVKCEDNGVDHPVLCTESGRAMVSHHSMIILEALSAIPEPKDDEETTPEELQAMIDDLSSKKWLKGDDDAAVAKPMSSHAAEIKEHGIE

SEQ ID NO: 27514 - protein, 225 aa, Lactobacillus plantarum WCFS1
MKKRMSLAQRVNILRASVMGANDGILSVAGIVVGVAGATTNSFSILISGLAGMLAGTISMAMGEYVSVNTQKDSQKMAITKQKAALADDYEAEASLVVQKYVNQGISKPLAQQATREMMAEDALTTTVRERYGFNPNQFISPYAAGIASMIAFPTGSILPLVSITFFPPRVKVLATVLAVGIALMITGYVAAMLGNANRRRGMVRNVVAGLLTMIVTYFIGHLFA

SEQ ID NO: 27515 - protein, 409 aa, Bradyrhizobium sp. BTAi1
MTRLQIPATIADAPEASRSQLEAVAKQLGRTPNIFRAIALSPQALACYLALSGALGKGSLPAATRERIALAVAEVNGCSDCLSAQTYFGRNLARLDDAEITANRKGASNDPKADAAVRFAAVVATHRGHVTDQDFAAVKLAGYTDAEIIEIVQHVALNSWTNFFNEVFHRDRLPGCRSQQGRLTRRGVTTSPALPTHQPSLHHFIGAFALTLYKFATVHDRKVFYREAGDPTRPTLVLLHGFPTSSFMFRDLIPLLADRFHVIAPDYIGFGHSDAPSVAEFDYSFENLTAHVAGLIEQLELSSYILYMQDYGGPVGFRLFTRNPKAVAGFVIQNTNAYMAGVGEMPAQISCRCGRSAMPPAKPPPAGFFPQTRPSTSIRSAPAMSKPSVPTIGRTIRRCSTVAATVKRI

SEQ ID NO: 27516 - protein, 574 aa, Neurospora crassa
MVPQCPSLRTLRSGLLLEVVWDMAEDAKSWAQNTLEAPVKVTRPVCCRGADGFALAQGLHPVTVSVAGQPNLLLPSILSSCSATPSQPIPESQLLSPSSWSIASQPTSFVQVHSSTGSVISVDSLLPLAHSRAEGREPSSSSPSHNPSTAPSCFVSPDIDTMSFANMLNRLHGQPESYDKKSKYSFGRTLGAGTYGIVREASGPTGRVAVKIILKKNVKGNEQMVLDELEMLQRLKHPHIVKFVDWFESRDKYYIVTQLATGGELFDRICEQGKFTEKDASQTIKQVLGAVNYLHENNVVHRDLKPENLLYLTRDADSDLVLADFGIAKMLDNKDEVLTTMAGSFGYAAPEVMLKQGHGKPVDMWSMGVITYTLLCGYSPFRSENLQDLIDECSSGSVVFHERYWKDVSNDAKDFILRLLQPKPENRWTSQQALAHPWLRGDSATNHNLLPEIKAYLTKARLRRGIEMVKLANRIEALKMQEDDPENTDMPGDATLAADQAQSRHRALSLASTKGGSSDAENATAPAEKRTLSKTIKTAIFREVVLAKVREMKEAEEANKLKEEAETKAKSFQA

SEQ ID NO: 27517 - protein, 300 aa, Bartonella sp. af156up
PIDQLAEKGDFLESCYLLLYGELPTQQEKNEFDRCIMQHTMVHEQFARFFHGFRRDSHPMAVMVACLGAMSAFYHDSIDITDPHQRMIASVRLISKVPTLAAMAYKYSIGQAFVYPRNDLSYAANFLRMCFAVPCEEYKTNPVLARAMDQIFILHADHEQNASTSTVRLAGSSGANPFACIAAGVACLWGPAHGGANEACLKMLQEIGSIERIPEFIARAKDKNDPFRLMGFGHRVYKNYDPRAKIMQKTCHEVLKELNIQDDPLLDIAIELEKIALSDEYFIEKKLYPNVDFYSGITLK

SEQ ID NO: 27518 - protein, 308 aa, Streptococcus suis 89/1591
MRQTKEMRLVYSDFLAQVGQEDTTIAAIEADLSSSMATNKLSSVLGGRYVNVGIMEQEMVGVAAGLSLLGYKPYIHTFGPFASRRVYDQVFISLAYAQLNATIVGSDAGVSAEMNGGTHMPFEELGLMRLIPKARVYEVSDDVLFQAVLKETIKVDGLKYIRTIRKAPTPIYQGGEDFSKGYCVLRQGEDMTLLASGIMVEQALKAADQLEAQGVSVQVIDLFRIKPIHEDIPALLSGRPVLTVENHNRIGGLGSSICELMATDLTTPVHRIGIEESFGQVGQQAYLMDVYGLTAEYIVKQAQLMLQQ

SEQ ID NO: 27519 - protein, 282 aa, Streptococcus suis 89/1591
MTSGTADLKRFAKEIRYHTLATLNQLGFGHYGGSLSIVEVLAALYGEILDIRVQNFSSKERDHFILSKGHAGPALYSTLYLKGFFDRDFLLSLNQNGTHLPSHPDRNLTPGVDMTTGSLGQGMSVATGVAYGKKIEQSPYYTYTLVGDGELNEGQCWEAAQFAAHHELSKMILFVDDNKKQLDGRTHDICQTFDFVEKFQAFGWESVRVNGADIDAIINAILTMKSSKSPQPKCIVLDTTKGQGVTFLEELESNHHLRLSGQLREDLEQVTLVLARELEVTE

SEQ ID NO: 27520 - protein, 300 aa, Bartonella sp. sa192up
PIDQLAEKGDFLEICYLLLYGELPTKQEKNDFDNCIMQHTMVHEQLARFFHGFRRDSHPMAVMVACLGAMSAFYHDSIDITDSQQRMIASVRLISKVPTLAAMAYKYSIGQAFVYPRNDLSYAANFLRMCFCVPCEEYKINPVLTRAMDRIFILHADHEQNASTSTVRLAGSSGANPFACIAAGVACLWGPAHGGANEACLKMLQEIGSVERIPEFIARAKDKNDPFRLMGFGHRVYKNYDPRAKIMQKTCHEVLKELNIQDDPLLDIAIELEKIALSDEYFVEKKLYPNVDFYSGITLK

SEQ ID NO: 27521 - protein, 300 aa, Bartonella sp. af82up
SIDQLAEKGDFLESCYLLLYGELPTKQEKIDFDQRIMQHTMVHEQFARFFHGFRRDSHPMAVMVACLGAMSAFYHDSIDITDSQQRMIASIRLISKVPTLAAMAYKYSIGQPFVYPRNDLSYAANFLHMCFSVPCEEYKINPVLARAMDRIFTLHADHEQNASTSTVRLAGSSGANPFACIAAGVACLWGPAHGGANETCLKMLQEIGAVQKIPEFIARAKNKNDRFRLMGFGHRVYKNYDPRAKIMQQTCHEVLKELNIQDDPLLDIAMELEKIALNDEYFIEKKLYPNVDFYSGITLK

SEQ ID NO: 27522 - protein, 558 aa, Arabidopsis thaliana
MVETGHHHQHPPAPAAAGHPPVPSMAMARNMGTTWPPAEQLHHLQYCIHSNPSWHETVVLAFQHYIVMLGTTVLIANTLVSPMGGDPGDKARVIQTILFMSGINTLLQTLIGTRLPTVMGVSFAYVLPVLSIIRDYNNGQFDSEKQRFRHTMRTVQGSLIISSFVNIIIGYGQAWGNLIRIFSPIIVVPVVSVVSLGLFLRGFPLLANCVEIGLPMLILLIITQQYLKHAFSRISMILERYALLVCLAIIWAFAAILTVSGAYNNVSTATKQSCRTDRAFLMSSAPCHSNSSFRIRIPYPFQWGTPIFKASHVFGMFGAAIVASAESTGVFFAASRLAGATAPPAHVVSRSIGLQGIGVLLEGIFGSITGNTASVENVGLLGLTRIGSRRVVQVSTFFMIFFSIFGKFGAFFASIPLPIFAGVYCILLGIVVAVGISFIQFTDTNSMRNMYVIGVSLFLSLSIAQYFLANTSRAGYGPVRTAGGWFNDILNTIFASAPLVATILATILDNTLEARHASDDARGIPWWKPFQHRNGDGRNDEFYSMPLRINELMPTRFL

SEQ ID NO: 27523 - protein, 300 aa, Bartonella sp. ma106up
PIEQLAEKGDFLESCYLLLYGELPTQQEKNDFDRRIMQHTMVHEQFSRFFQGFRRDSHPMAVMVACLGAMSAFYHDSIDITDPQQRMIASIRLISKVPTLAAMAYKYSIGQAFVYPHNSLSYAANFLRMCFAVPCEEYQVNPVLTRAMDRIFILHADHEQNASTSTVRLAGSSGANPFACIAAGVACLWGPAHGGANEACLKMLKEIGSVKKIPEFIARAKDKNDPFRLMGFGHRVYKNYDPRAKIMQKTCHEVLKELNRQDDPLLDIAIELEHIALNDEYFIEKKLYPNVDFYSGITLK

SEQ ID NO: 27524 - protein, 300 aa, Bartonella sp. af170up
PIDQLAEKGDFLESCYLLLYGELPTKQEKHDFDRCIMQHTMVHEQFARFFHGFRRDSHPMAVMVACLGAMSAFYHDSIDITDPQQRMIASVRLISKVPTLAAMAYKYSIGQAFVYPRNDLSYAANFLRMCFCVPCEEYKVNPVLTRAMDRIFILHADHEQNASTSTVRLAGSSGANPFACIAAGVACLWGPAHGGANEACLKMLQEIGSVERIPEFIARAKDKNDPFRLMGFGHRVYKNYDPRAKIMQKTCHEVLKELNIQDDPLLDIAIELETIALNDEYFVEKKLYPNVDFYSGITLK

SEQ ID NO: 27525 - protein, 492 aa, Candida albicans SC5314
MPQVTKTNNENEFRLTRSKVQHQESISTIKNTTISNSQHKQQTQQQISSPPQVSVTSSEGVSHVNTRQYLGDVSNQYITNAKPTNKRKPLGGDNAPLQKQQHRPSRPIPIASDNNNNGSTSSSSNSSNNNNNDANRLASLAVPSRLPQKRQATESSTNLVEKLRVPQPEVGERSQSYHKKSRLIDYEWQDLDEEDSDDQLMVSEYVNEIFSYYYELETRMLPDPQYLFKQTLLKPRMRSILVDWLVEMHLKFKLLPESLFLAVNVMDRFMSVEVVQIDKLQLLATAALFTAAKYEEVFSPSVKNYAYFTDGSYTPEEVVQAEKYMLTILNFDLNYPNPMNFLRRISKADDYDVQSRTLGKYLLEITIVDYKFIGMRPSLCCASAMYLARLILGKLPVWNGNLIHYSGGYRISDMRECIELMFQYLIAPIEHDEFFKKYAMRKFMRASTLCRNWAKKFQASGRDLFDERLSTHRLTLEDDDEEEEIVVAEAEE

SEQ ID NO: 27526 - protein, 530 aa, Clostridium pasteurianum
NSVYRLKEIVKVLAYYGFGFIVDSKLNGNKKSPENLRKAFEELGPTFIKIGQILSTRPDLLPLPYIKELSKLQNNVPPENFIDIENLFFEELSSTIDNTFLYFDKTPIGSASIAQVHDAILKDGRFVIVKIQRPGIAEMMKTDLSIIKKLLNITKTKFTDALIDPKEAIDELFISTTQELDFINEINNIKKFKKLNEDVKFVRTPYTIDKLCTEKIIVMEKIVGIKIDNLKKLLNEGYDLEELGKKLTLSYFKQVFQDGFFHGDPHPGNLLIRENHICYIDFGIMGTISKSLKISLNDAILAVAYHDVNKMISVIMSIGVKKGYVNRNSLYESIEYLFDNYISVSLKNIKISVMLQEIFQISKNNNIKLPKELTMLLKSTLMIEGVIARISPELSIVDVLIPYVKSQNQNLFFRNFDFDNLLLNGFKFVKSSSEFPSKFVELSESIIRGRAKIQLQHNNLQKPIKDLNRMVNRMVFAIIISSMIIGSSLILRTNIGPKLHDISIIGISGFMIAALMGFYLLISILRSGTL

SEQ ID NO: 27527 - protein, 286 aa, Fraxinus excelsior
MESKEEDVRVGANKFNERQPIGTAAQSQDKDYKEPPPAPLFDPGELSSWSFYRAGIAEFIATFLFLYIAILTVMGVSKSDSKCSTVGIQGIAWAFGGMIFALVYCTAGISGGHINPAVTFGLFLARKLSLTRAIFYMVMQCLGAICGAGVVKGFGKTLYMTKGGGANVVAPGYTKGDGLGAEIVGTFVLVYTVFSATDAKRSARDSHVPILAPLPIGFAVFLVHLATIPITGTGINPARSLGAAIIYNKDHAWDDHWIFWVGPFIGAALAALYHVVVIRAIPFKNK

SEQ ID NO: 27528 - protein, 266 aa, Chlamydophila pneumoniae AR39
MTNIGIETMATLINFNDTNKLLLTKQPSLFIDLASKDWIASANQAIKQRGAFYVALSGGKTPLEIYKDIVINKDKLIDPSKIFLFWGDERLAPITSSESNYGQAMSILRDLNIPDEQIFRMETENPDGAKKYQELIENKIPDASFDMIMLGLGEDGHTLSLFSNTSALEEENDLVVFNSVPHLETERMTLTFPCVHKGKHVVVYVQGENKKPILKSVFFSEGREEKLYPIERVGRDRSPLFWIISPESYDIADFDNISSIYKMDIL

SEQ ID NO: 27529 - protein, 377 aa, Lilium hybrid cv. 'Star Gazer'
MENVKGPVVVTGASGYVGSWLVMKLLQYGYAIRATVRDPRDLRKTKPLLDIPGADERLTIWKADLSEDASFDEAINGCTGVYHVATPMDFDSKDPENEVIQPTINGVLGIMKSCKKAGTVKRVIFTSSAGTVNVQENQMPEYDESSWSDVDFCRRVKMTGWMYFVSKTLAEKAAWEFAKENDIQLISIIPTLVVGPFITSTMPPSMLTALSLITGNEAHYSILKQIQLVHLDDVCKAHIFLFENPEASGRYICSSYDATIYDLARKIKDRYPQYAIPQKFEGIDDQIKPVHFSSKKLMDLGFKYQYTFEEMFDEGIRSCIEKKLIPHQTQERYYVHDELDLGCSKMTNDKLDLGGSKLNSMDEMVRGHNEQVSVALQ

SEQ ID NO: 27530 - protein, 226 aa, Corynebacterium glutamicum ATCC 13032
MSQKILVVDDDPAISEMLTIVLSAEGFDTVAVTDGALAVETASREQPDLILLDLMLPGMNGIDICRLIRQESSVPIIMLTAKTDTVDVVLGLESGADDYVNKPFKAKELVARIRARLRATVDEPSEIIEVGDLSIDVPAHTVKRNGAEISLTPLEFDLLLELARKPQQVFTREELLGKVWGYRHASDTRLVNVHVQRLRAKIEKDPENPQIVLTVRGVGYKTGHND

SEQ ID NO: 27531 - protein, 122 aa, Pseudomonas syringae pv. phaseolicola 1448A
MPTTTPAPYLKPDECVVLFDGVCKLCNGVVKFLIRHDPHQRLRLAAVQSEQGQALLKWAGLPLDDFHTIAVIVNNRVFVRSDAFLHIMGLLPAPWPLLKVLGIFPRFLRGCRQNKLNFHSLV

SEQ ID NO: 27532 - protein, 78 aa, Arabidopsis thaliana
  misc_feature (45)..(45): Xaa can be any naturally occurring amino acid
  misc_feature (61)..(61): Xaa can be any naturally occurring amino acid
  unsure (1)..(78): unsure at all Xaa locations
MATNEPEHEHRDEEEAGANEDEDTGAQVAPIVRLEEVAVTTGEEXDEDAVLDLKSKLYRFXDKDANHGKRKKRNLGTC

SEQ ID NO: 27533 - protein, 463 aa, Pseudomonas syringae pv. phaseolicola 1448A
MSSTANSSELEQGLKPRHITMLSIAGVIGAGLFVGSGHAIAEAGPAVLLAYAAAGTLVVLVMRMLAEMAVASPDTGSFSTYADRAIGHWAGFTIGWLYWWFWVLVIPLEANAAATILHAWFPNIAIWMFTLVITLLLTATNLFSVKNYGEFEFWFALIKVVAIIAFVVLGVAAIFGLLPTSNVSGVSHLFDTGGFLPNGMGAVLAAMLTTMFSFMGTEIVTIAAAESKNPGKQITKATNSVIWRIFLFYLVSIFIVVSLVPWNDPRLAEVGSYQTVLDAMGIPNAKLIVDLVVLVAVTSCLNSALYTASRMLFSLGKRGDAPALSKRTSKGGTPYWAVIMSTAAAFLTVFANYIAPAAVFDFLLASSGAIALLVYLVIAVSQLRMRQKRIAAGEAIDFKMWLFPWLTWAVIAFIVAVLTIMLIQEEHRVEIIATGLLSLLVISAGLLVSRRRKAGRVGAAALG

SEQ ID NO: 27534 - protein, 547 aa, Escherichia coli
AAKDVKFGNDARVKMLRGVNVLADAVKVTLGPKGRNVVLDKSFGAPTITKDGVSVAREIELEDKFENMGAQMVKEVASKANDAAGDGTTTATVLAQAIITEGLKAVAAGMNPMDLKRGIDKAVTAAVEELKALSVPCSDSKAIAQVGTISANSDETVGKLIAEAMDKVGKEGVITVEDGTGLQDELDVVEGMQFDRGYLSPYFINKPETGAVELESPFILLADKKISNIREMLPVLEAVAKAGKPLLIIAEDVEGEALATLVVNTMRGIVKVAAVKAPGFGDRRKAMLQDIATLTGGTVISEEIGMELEKATLEDLGQAKRVVINKDTTTIIDGVGEEAAIQGRVAQIRQQIEEATSDYDREKLQERVAKLAGGVAVIKVGAATEVEMKEKKARVEDALHATRAAVEEGVVAGGGVALIRVASKLADLRGQNEDQNVGIKVALRAMEAPLRQIVLNCGEEPSVVANTVKGGDGNYGYNAATEEYGNMIDMGILDPTKVTRSALQYAASVAGLMITTECMVTDLPKNDAADLGAAGGMGGMGGMGGMM

SEQ ID NO: 27535 - protein, 470 aa, Corynebacterium diphtheriae NCTC 13129
MTEHTAPTLTKGLKVRHLTMMGLGSTIGAGLFLGTGVGIKAAGPAVLIAYIIAGFIAVMIMRMLGEMGSVVPASGSFSEYADAGIGHWAGFIQGWVYWLATVAVLGAEITGASGFVASWLGVSPWIPALVFVAFFGLVNLMRVRAFGEFEFWFAFIKVAVLVVFLIIGSLLVLGLLPNHDFVGLSNVRAEGFAPTGLGGIAAALLAVAFGFGGIEVVAIASAESEDPQKSLVNAVRTTITRISIFYLGSVAIIVLLLPYSSLGKAKSAAESPFSQVLAMANIPGVVGVIEVVIVLALLSAFNAQIYASSRMMMSLAERRQAPNIFARVDNRGVPLPAIVLSVVLSVIMVILNYVDTGWLLTFLLNAAGASLLTVWTFIAVSQLKLRRRLEALQGNLAVRMWAFPGLTIATLAILFGLAILMLSDAGARIELLSAIAMVAILFAISLIAVKQPFDKALLPREASYPQNSPS

SEQ ID NO: 27536 - protein, 618 aa, Prochlorococcus marinus subsp. pastoris str. CCMP1986
MNEDYKDFIEASGLLKYDPAIISKIYQKNPSRLLKRLWQTLIPIFLYIISVGWDKLTGQLKKESKARFRAKQLTNLLVELGPAFVKAGQALSTRPDIIPVILLEELSELQDQLPGFDGNKAMELIEEDLNKKIDEIFLTIDKDPISAASLGQVHKAVLKNKEIVAVKVQRPGLREQITLDLYIVRNIANWLKNNIGLIRSDLVALIDELGKRVFEEMDYLNEAENAEKFRNLHLHNSKIAVPKIYKETTSRRVLTMEWIDGTKLTNLEGVKNLGIDPDEMIEIGVQCSLEQLLEHGFFHADPHPGNLLALKDGRLCYLDFGMMSEVSRSSRSGLIQAVVHLVNKNFDKLSQDFVKLGFLSKEVNLEPIVPAFQDVFVNAVELGVSKMDFKSVTDDMSGVMYKFPFQLPPYYALIIRSLLTLEGIALSVDPDFKILGAAYPYFARRLMEDPDPQLRESLKEMLFDKKQFKWDRLEDLLSNAAKQTNLDLEKLLDEVINLLFSPKGGFLRDEIINGLTSQIDLIGLKLLKSVNNFLPKSIKLNVDKENNNLNDLILSIEPFKNFLEIIQKIPGYSIDIFLKRMPRLISEPYTKEMSFKIAKKVTEKGVVRLVKIAAGSTI

SEQ ID NO: 27537 - protein, 185 aa, Triticum aestivum
VSLSVARRGEADRYIQMEGLQRSSSTFRRSGSSGLVWDERFLTEGAEAKAAGEGGTDEAQPEMRRSRSTGGVGMMLRRGGDDKKQQQQKKKEQQGQKKDEERDPQVFRTKEVAPDVDPPSPRVSGCILCAIFGGSGSGPGPRGAPRPRQAEEEATVGGVKVDRALADGCHASCVYTGVTMMMIYY

SEQ ID NO: 27538 - protein, 652 aa, Gluconobacter oxydans 621H
MATKTASGTDRNAQEQEGDTTLLDTQSAAVKRLIAKGRERGHITFDELNAVLPQDQMSSEQIEDVMAALSEMGIQVIENEDQDEAEAPAEKEAEGDGEEAEGPQGGNVDAEAASRTDDPVRMYLREMGSVELLSREGEIAIAKRIEAGRDEMIGGLCESPLTIRAIISWHERLKDGEMLLRDIVDLEASQGGGPDPEAVEGEEGDEASEEDDTAEDENEEGEGDQQEGSGLSLSALEEKLKPEILARFEAIEPLYHKLRKLQIKRIEALTGGEDHSDKSEQTYEKLRHELVSLVEQVHLHNNRIEELVAQIKMQVQKLNNVEGRMMRLAESCKISRDDFLIKYRSRELDPTWLDSISALPGKGWKNLTTKHMDQLRNLRGEIAALSHETGLPVGEFRRVYATISRGERDSTRAKKEMIEANLRLVISIAKKYTNRGLQFLDLIQEGNIGLMKAVDKFEYRRGYKFSTYATWWIRQAITRSIADQAKTIRIPVHMIETINKLVRTSRQMLHEIGREPAPEELAEKLGMPLEKVRKVLKIAKEPISLETPIGDEEDSHLGDFIEDKTAVIPLDAAIQTNLREATTRVLASLTPREERVLRMRFGIGMNTDHTLEEVGQQFNVTRERIRQIEAKALRKLKHPSRSRKLRSFLDDN

SEQ ID NO: 27539 - protein, 201 aa, Pseudomonas syringae pv. phaseolicola 1448A
MSKNDNVVWQLGTVSPVERHRNLNQAPMTLWFTGLSGSGKSTLAFNLERLLMRRGIFCAVLDGDNIRHGLCKDLGFDAESRAENIRRVSEVARLMNDAGLTVLAAFISPHSSDRALAKEIIGDDRFSEVYVSSPLHICESRDPKGLYKKARQGELANFTGIDAPYEPPPYPSVCLDTSSLSIEACLEILLSEVERNRGSSK

SEQ ID NO: 27540 - protein, 454 aa, Corynebacterium diphtheriae NCTC 13129
MTQATTETELGTGLKTRHLTMMGLGSAIGAGLFLGTGVGIAAAGPAVLIAYVLAGIFVVFVMQMLGELAAARPASGSFSVYAEQAFGHWAGFSLGWLYWFMLTMVLGAEMTGAAAIMGQWFGIAPWIPALICVIFFAVVNLARVSGFGEFEFWFAFIKVAVIILFLVIGVLLIFGLLPNYDFVGTQHFLGDGFMPNGISGVATGLLAVAFAFGGIEIVTIAAAESEDPKTAIATAVRSVIWRISLFYLGSVLVICFLIPFSSIGGAKSAADSPFTIILGMANIPGVVGFMEAVIVLALLSAFNAQIYATSRIVHSFAERGDAPKIFAATNPSGVPMPAVLLSMFFAFVSVGLQYWNPAGLLNFLLNAVGGCLIVIWVIIAFAYLKLHPELVRNGEITTVRMWGFPWLGWVTIAGFLGLTVLMLTDDASRSQITSVTVVFLLLIVVSFFTKKKSK

SEQ ID NO: 27541 - protein, 124 aa, Zea mays
  misc_feature (106)..(106): Xaa can be any naturally occurring amino acid
  misc_feature (112)..(112): Xaa can be any naturally occurring amino acid
  unsure (1)..(124): unsure at all Xaa locations
MAVEDTSKPVVVAEEANPNPTDHPIDRYHEEGDDAEEGEIAGGEGDGDESSKSAVPQSHPLEHSWTFWVDNPSVKLKQATWGSSLRSVVTFATVEGVWSLFNNMKXPSKLAXGADFYCFKPIST

SEQ ID NO: 27542 - protein, 460 aa, Kluyveromyces lactis NRRL Y-1140
MSATGTVASSTINLIKTIVGAGLLAIPYAFRCDGVFFAVSLILMAAFTSGYGLFILAKCSKTLLNPRHSSFFTLCSITYPNLSLLFDFAMFIQCFGVALSYLILIGDLFPALFGGTRTNWILLSAIIIVPLSLLRHFDSLKYTSVIGLLALGYIGLLIIGSYSFGNYPKPKVDWFSISDRSGVLTTFSIIVFAFTGSMNLFSIINELKENSMTNIKKIINNSIVVSSACFIILGLFGYLTFGKETLGNVILNYDADKLSVRFARFNLGLMVVLSFPLLFHPCRISANNMVHWLQLNYGTKSEIDETIGPITLEIEDDTDREYLEQELGSSHDTSFVHTYQSLPRATDDDNDDQVDERTEAVPFPDSRFLTVTFFLLAVLYVLALNVESFALVLALVGATGSTAISFTLPGLFGWKLIGTESLMNGERIGGWDKAHRYGSLALVWYGLIIMVSCVYITLFV

SEQ ID NO: 27543 - protein, 613 aa, Shewanella sp. MR-7
MNSSNHKFSQTVLPHTPVESLASPPSKVQDRAVLPWIWQFLKPYRLRVVAAIVFLLIGSLAWLSLGQGVRLMVDEGFIKDNAQRLNEIILLVLLITAVSGTAVFCRFYLMTWLGERVSADIRLTVYNQLLKLSPAFYAKVRTGEVISRFTADSTLLQTVVGSSLSMALRSGVTVIGGLAMMGITSVKMTLLVLLAVPLVLGPVGFFGRKVRTLARESQDRVADLGAYVDETLHEIHTVQAYGHEDKDRSLFNGRVEDVMTAASGRIRYRAMLISSVMFLSIAAIVSVTWVGAHDVMSGKMTGGELSAFMFYAVMVAGAVATISEVVGEIQRASGAAERLIELAETEVDIPAPLVPKKLPAKVRGELQLQQLNFHYPEQTQLVLSDLELTITAGERVALVGPSGAGKSTLFQLLQRFYVPSSGSIHLDGIDIAELSPKDLRAQFALVPQDSVIFATSVLENVRYGRVDASEQEVIDACIAARAHEFICEFSEGYQTYLGERGVRLSGGQKQRIAIARAILADRPILLLDEATSALDALSEQKVKQALDELMTGKTTLIIAHRLATVINADRIIVFDKGRIVASGKHQTLLQTNALYREFASLQLLTDDVSALSE

SEQ ID NO: 27544 - protein, 121 aa, Arabidopsis thaliana
MSNVSFRQDHDFEKRKAEALRIREKYSDRVPVIVEKSEKSDIPNIDKKKYLVPADLTVGQFVYVIRKRIQLSAEKAIFIFVDNVLPPTGAMMSTIYDENKEEDGFLYVTYSGENTFGSSMT

SEQ ID NO: 27545 - protein, 537 aa, Triticum aestivum
MTPGAGPHCGMAAAAGVWQLVGVAVATLLAAVLVAVALGRQRQRRRRAPLEGIPAPEDGCEVADGAWSAAVDGPTDVIIVGAGVAGSALAYTLGKDGRRVHVIERDLTEPDRIVGELLQPGGYLKLMELGLQDCVDEIDAQRVLGYALFKDGKNTKLSYPLEKFHSDVAGRSFHNGRFIQRMREKAASLPNVQLEQGTVTSLLEENGTVKGVQYKIKSGEELKAYAPLTIVCDGCFSNLRRALCSPKVEVPSCFVGLVLENCELPHANHGHVILANPSPILFYPISSTEVRCLVDVPGQKVPSIASGEMANYLKTVVAPQIPPQIYDSFIAAIDKGSIRTMPNRSMPAAPHPTPGALLMGDAFNMRHPLTGGGMTVALSDIVVLRNLIKPLRNLHDASALCKYLESFYTLRKPVASTINTLAGALYKVFSSSPDKARDEMRQACFDYLSLGGVCSNGPIALLSGLNPRPLSLVAHFFAVAIFGVGRLMLPLPSPKRMWTGARLISGACGIIFPIIKAEGVRQMFFPATVPAYYRAPA

SEQ ID NO: 27546 - protein, 388 aa, Bacillus anthracis str. A2012
MSSAFIYSDDFRGYSFSPDHPFNQLRVTLTYDLLQKGGFISPSQIISPRMATDEEIAYIHTEEYINAVKRAGEGKLEKSIAMTYGLGTEDTPMFPNMHEASALLVGGTLTAVDAVLSGKVKHALNLGGGLHHGFRGKASGFCIYNDSSIAMKYIQKKYGLRVLYIDTDAHHGDGVQWSFYDDPNVCTISLHETGRYLFPGTGAVNERGQGNGYSYSFNVPLDAFTEDESFLDSYRTVVKEVAAYFKPDIILTQNGADAHYYDPLTHLCATMNIYREIPKLAREIANEYCEGRWIAVGGGGYDHWRVVPRAWALIWLEMNNIQNISGYLPPEWIDAWKGQAETELPLTWEDPNNMYKPIPRKPEIEEKNALTVAKSLEIIRNNMKKSLY

SEQ ID NO: 27547 - protein, 333 aa, Xanthomonas campestris pv. vesicatoria str. 85-10
MSTTHAAPHCAQSHTFASANPLAERSTRKAVILTVLMMAVEIVGGWTLNSMALLADGWHMSSHALALGLALFAYRFARQHAGDVRFTFGTWKVEVLGGYTSAVLLLGVAALMAFQSVERLFTPKPIQYQEATVIALIGLLVNLICAWWLRDSHGHARGHHHGHVHAHDSHGHAHTHEGHGHGQEAHSDLNLRAAYLHVVADAATSVLAIVALVAGMHWGVTWLDPLMGIVGAVLVTAWAWGLLRSTGSVLLDAEMDAPVVAEVKQVIAELGHAIDIADLHVWRVGSERYACVVSLVTAADIDAELVRRALQIHEELVHVTVELQRPALLDAAG

SEQ ID NO: 27548 - protein, 170 aa, Oryza sativa
MAMRAITLSHSQSASFGHHHHQTMPSSFRPSTASTRSVKVYAKEDEEKGSKQSLFGSITEALDFSQVRSEKDAELLYEAREATKDGGRMTKEQYGALRRKIGGTYKDFFKSYVDVDGEYVEEGWVDKTCKVCKKDTRGEPRQVDKLGRYAHVACLENPKPTNIFAKLFAR

SEQ ID NO: 27549 - protein, 360 aa, Populus tomentosa
MGSTGETQMTPTQVSDEEAHLFAMQLASASVLPMILKTAIELDLLEIMAKAGPGAFLSTSEIASHLPTKNPDAPVMLDRILRLLASYSILTCSLKDLPDGKVERLYGLAPVCKFLTKNEDGVSVSPLCLMNQDKVLMESWYYLKDAILEGGIPFNKAYGMTAFEYHGTDPRFNKVFNKGMSDHSTITMKKILETYKGFEGLTSLVDVGGGTGAVVNTIVSKYPSIKGINFDLPHVIEDAPSYPGVEHVGGDMFVSVPKADAVFMKWICHDWSDAHCLKFLKNCYDALPENGKVILVECILPVAPDTSLATKGVVHVDVIMLAHNPGGKERTEKEFEGLANGAGFQGFEVMCCAFNTHVIE

SEQ ID NO: 27550 - protein, 103 aa, Zea mays
STLQNLNEHPDAWPFKEPVDSRDVPDYYDIIKDPIDLRTMLRRVDSEQYYVTLEMFVADMKRMFSNARTYNSPDTIYYKCATRLENFFSGRITVLLAQLSTKS

SEQ ID NO: 27551 - protein, 121 aa, Arabidopsis thaliana
MDMAFTHVCLWTLLAFVLTWTVFYVTNRKKKAPELADAAAEERRDSAADVIIVGAGVGGSALAYSLAKDGRRVLAIERDMREPERMMGEFMQPGGRLMLSKLGLEANAAAYRKSYMAASGL

SEQ ID NO: 27552 - protein, 557 aa, Nicotiana tabacum
ATSLSTPKLSTTLSSPTLHSLLYKHKFSLLSLSNPIKPLHFNFLTHSRSTPSSLSCTRRRFTAPRAESSNGADAPRHYDFDLFTIGAGSGGVRASRFASNFGASVAVCELPFSTISSDSTGGVGGTCVLRGCVPKKLLVYASKYSHEFEESCGFGWNYDVEPRFDWSTLIANKNAELQRLTGIYKNILKNAGVTLIEGRGKVVDPHTVDVDGKLYSAKNILISVGGRPFIPDIPGSEYAIDSDAALDLPTKPNKIAIVGGGYIALEFAGIFNGLKSEVHVFIRQKKVLRGFDEEIRDFVGEQMSLRGIEFHTEESPQAIVKSADGSLSLKTSRGTVEGFSHIMFATGRRPNTKNLGLETVGVKMTKNGAIEVDEYSRTSVPSIWAVGDVTDRINLTPVALMEGGALAKTIFAHEPTKPDYRNVPAAVFSQPPIGQVGLMEEQAIKEFGDVDVYTANFRPLKATISGLPDRVFMKLIVCAKTSKVLGLHMCGDDAPEIVQGFAIAVKAGLTKADFDATVGIHPTSAEEFVTMRTPTRKVRSSPSEGKAEHDIKAAAGV

SEQ ID NO: 27553 - protein, 291 aa, Triticum aestivum
  misc_feature (211)..(211): Xaa can be any naturally occurring amino acid
  unsure (1)..(291): unsure at all Xaa locations
HEDNADITLSCAPVGESRASEYGLVKFDSSGRVVQFSEKPKGDDLEAMKVDTSFLNFAIDDPAKYPYIASMGVYVFKRDVLLNLLKSRYAELHDFGSEILPRALHDHNVQAYVFTDYWEDIGTIRSFFDANMALCEQPPKFEFYDPKTPFFTSPRYLPPTKSDKCRIKEAIISHGCFLRECKIEHSIIGVRSRLNSGSELKNAMMMGADSXYETEDEISRLMSEGKVPIGVGENTKISNCIIDMNARIGRDVVISNKEGVQEADRPEEGYYIRSGIVVIQKNATIKDGTVV

SEQ ID NO: 27554 - protein, 672 aa, Zea mays
MPQSVLVERATSESLIGPDWSLNLEICDILNHDPSQAKDVVKTIKKRIAHKNSKVQLLALTLLETLIKNCGDFVHMQVAEKDMLHEMVKIAKKKPDYHVKEKILILIDTWQEAFGGARARYPQYYAAYQEMLRAGAVFPQRPESTVPIYTPPQTQPLRNYPPPALRNTDYRHDVPESSSAPEVPALSLTEIQNARGVMDVLSEMLNAIDPGNREGLRQEVIVDLVDQCRSYKQRVVQLVNSTSDEDLLSQGLTLNDDLQRVLAKHDAIAAGIAIRLQKPKSAPARVDSSPTKPEPTKETEQRSAKVASSVTPFEQLALPAPPSSSASKSHGESAVSPNIDLLSGDEFFKPEPVHSQALVPLVTQASASSSPSTLDLLDMFSDSNAINNTSQNPTILSISNSNPNTSVQAYPVPQQPVPPHHPSPYANGLNSDTMTPFDQGSKLTSASSWNEQIAHGMIPPQQFAHGQGEQSNDLPLPPWEALPAETEQLEADHPGGLSALPQFGVSQPQPVQITHSGQQVLPSQLMPTGQPGGQFQPRFGAQQPYATENTQYGGMYPPVQGNQPTGIYPQQMAGDVYQQQMFGGQMIGYGYGPQPGGYYVPNAAYAYAGANDLSQRMNGLSMQGNSLYGTPASSSLQQRNRPSRPEDSLFSDLVSIAKTKPCKTASNKAGNL

SEQ ID NO: 27555 - protein, 227 aa, Brassica napus
  misc_feature (182)..(182): Xaa can be any naturally occurring amino acid
  unsure (1)..(227): unsure at all Xaa locations
MMSDHGGRKVWGKTKRNREDLEENPNIPIAARVGRMMKKVSITSEEEEAVGPQQQFLTMNGKVYSLRYQDDFVDASVKEVDLLNELEVSKLYHCDGLVLCVGKDNSELLLWNPYLCQTRWIGPRESFHLSDRHAVGYDERRNHKILRFVDNFIKNMNKIEVVYEIYEIRSDSWRVLEEVNPXGSIDTHQRGVSVKGNTYFVAYRNGLVHEIFLLCFDFTKERFGPRL

SEQ ID NO: 27556 - protein, 141 aa, Yersinia pseudotuberculosis IP 32953
MVSAPLPYIKPGERVIIYDGVCALCTGWVNFLIRHDRRHTVRLSAVQSKKGRALLEWAELPTDKINTLVLIENQQVYLRSEAIFRVIANLPWPWRILGVLRIFPRPLRDRCYDGIALNRYRLFGRYDAVRKLKADHERRFL

SEQ ID NO: 27557 - protein, 635 aa, Burkholderia vietnamiensis G4
MPRARDALPARPAPRRAPVPVRAAGHDGDAPPHAAHLHALISTGLTRGFVTHGDIIDALPDDDAHQGGVDATAAMLRELGIAVSDGAHAAGWTLDRYFQPTPSARAWAEGAGALAAAELSAPRTTDPVRLYLREMGMTPLLTRDEEIMHAQRIERGRAASVAVLCGDPQALDALVAMRIEIAEGRTAASAYVLSIADISDMAPAGGAAAASPHAGDTPADAGASTRDDDAPADDGLCRHTVLARLAPIDALTAAMRAALETDGAHGLAYRACVREAAALLGTLRMSMRALERMSEPLRTHARRQRTLHGRLARTLAEAGVPHGAAAACVQRDGDHARWLASCIAAHPECEPALTRRAAELVDARDAIARAARTSPLPPDTIALLDARLDTIERAMQPARMGLFDANLRLVVSIAKRYPDRGLPFADLIQEGNIGLLKAIDRYDHRRGFRFSTYATWWIRQAITHALADLGRTIRVPTHTVDAINKLTRIAREHRQRSGAAATPHELAVQMGEPLDKVRDLMSIVKEPMSADAPVSPEGEMTFVDVAPDVSTPSPEDAAGAAQLRDTIAAMIGRLPAREATVLRLRYGLHADEGCSLRDIGRQLNLSAERVRQIEASALARLRASDGLDVLRAFIA

SEQ ID NO: 27558 - protein, 447 aa, Gossypium hirsutum
MGKEKVHINIVVIGHVDSGKSTTTGHLIYKLGGIDKRVIERFEKEAAEMNKRSFKYAWVLDKLKAERERGITIDIALWKFETTKYYCTVIDAPGHRDFIKNMITGTSQADCAVLIIDSTTGGFEAGISKDGQTREHALLAFTLGVKQMICCCNKMDATTPKYSKARYDEIVKEVSSYLKKVGYNPDKIPFVPISGFEGDNMIERSTNLDWHKGPTLLEALDQINEPKRPSDKPLRLPLQDVYKIGGIGTVPVGRVETGVLKPGMVVTFGPSGLTTEVKSVEMHHEALSEALPGDNVGFNVKNVAVKDLKRGFVASNSKDDPAKEAASFTSQVIIMNHPGQIGNGYAPVLDCHTSHIAVKFSELLTKIDRRSGKELEKEPKFLKNGDAGMIKMVPTKPMVVETFSEYPPLGRFAVRDMRQTVAVGVIKSVEKKDPTGAKVTKSAAKKK

SEQ ID NO: 27559 - protein, 489 aa, Shigella flexneri 2a str. 301
MGSETKTTEAPGLRRELKARHLTMIAIGGSIGTGLFVASGATISQAGPGGALLSYMLIGLMVYFLMTSLGELAAYMPVSGSFATYGQNYVEEGFGFALGWNYWYNWAVTIAVDLVAAQLVMSWWFPDTPGWIWSALFLGVIFLLNYISVRGFGEAEYWFSLIKVTTVIVFIIVGVLMIIGIFKGAQPAGWSNWTIGEAPFAGGFAAMIGVAMIVGFSFQGTELIGIAAGESEDPAKNIPRAVRQVFWRILLFYVFAILIISLIIPYTDPSLLRNDVKDISVSPFTLVFQHAGLLSAAAVMNAVILTAVLSAGNSGMYASTRMLYTLACDGKAPRIFAKLSRGGVPRNALYATTVIAGLCFLTSMFGNQTVYLWLLNTSGMTGFIAWLGIAISHYRFRRGYVLQGHDINDLPYRSGFFPLGPIFAFILCLIITLGQNYEAFLKDTIDWGGVAATYIGIPLFLIIWFGYKLIKGTHFVRYSEMKFPQNDKK

SEQ ID NO: 27560 - protein, 188 aa, Synechococcus elongatus PCC 6301
MNRGLSFQDLIQEGSLGLIRAAEKFDHEKGYKFSTYATWWIRQAITRAIADQSRTIRLPVHLYETISRIKKTTKLLSQEMGRKPTEEEIATRMEMTIEKLRFIAKSAQLPISLETPIGKEEDSRLGDFIEADGETPEDEVAKNLLREDLEGVLSTLSPRERDVLRLRYGLDDGRMKTLEEIGQLFNVT

SEQ ID NO: 27561 - protein, 568 aa, Pirellula sp. 1
MRQRFAMIYALPQQANGTAGAWSHSPNRVDVVSGVEETLMGKKLSRRSLQDDAFDAEDSVNRRSRTMGQEFSDSISEEIESGAAGDEDVVSRRDEFPTDPTEDPVRMYLMQMGQIPLLTRDQEVAAAQQIEATRERYRHCMMATDFMLQAALKLLQQVRDKQLRLDRTIEVSVTNAAEKKAIMKRIVPNTRTLDYLLRQNRGDYMVAINSSLPMRRRRAAWRNLVIRRNKAVRLVEEMNLRTNKLQPIFEKLRRSCERMQEIKAILADAHRSTMPGMPSGDELRSELRSLMRLTYETPRTLSRRVDRCDTYRDDYDAAKRVLSAGNLRLVVSIAKKYRNRGLSFLDLIQEGNTGLMRAVDKFEHARGYKFSTYATWWIRQAITRAIADQSRTIRVPVHMIDTMNKIRQITRDLVQEHGREPTAEEVSKRSGLSLDDTRVILKMSRQPLSLDQPVGDHDDSVFGEFLQDHRDDDPLVETNREALKHQIDLAMETLNYREREILRLRYGLADGYTYTLEEVGRIFQVTRERVRQIESKAVRKLQQPYRAKSLVSFLDGAEVSLFEGSEAI

SEQ ID NO: 27562 - protein, 121 aa, Malus x domestica
VPLLCTSIGLWAGLVIEYTTEHYTSNAYSPVQDVADSCRTGAATNVIFGLALGYKSVIIPVFAIAFAIYVSFSLAAMSGIAVAALGMLSTISTGLAIDAYGPISDNAGGIAEMAGMNHERV

SEQ ID NO: 27563 - protein, 716 aa, Pseudomonas syringae pv. phaseolicola 1448A
MASKNAPPVTATPKSELAGTDTLDRGNTNDKLESLEQFRSDATQQALRTNHGVKISDNQNTLKVGSRGPSLLEDFIMREKITHFDHERIPERIVHARGTAAHGYFQTYEDHGALSKAGFLRDPGKKTPVFVRFSTVQGPRGSGDTVRDVRGFAVKLYTEEGNFDLVGNNMPIFFIQDAIKFPDFVHAVKPEPHNEIPTGGSAHDTFWDFVSLVPESAHMVLWTMSDRAIPKSLRTMQGFGIHTFRFINTEGKSSFVKFHWKPKFGVCSLVWDEAQKLAGKDTDFHRRDLWESIEMGDYPEWELGVQIVAEEDEHKFDFDLLDPTKIIPEELVPVTPLGKMVLNRNPDNYFAETEQVAFCPGHIVPGIDFSNDPLLQGRLFSYTDTQISRLGGPNFHEIPINRPIAPNHNGQRDAQHRTTIDKGRASYEPNSIDGGWPKETPAGPVDGGFETYPERVEAHKVRERSESFGDHFSQATLFFQSMSHHEKEHIIAAYSFELGKVEREYIRARQVNEILANIDLELASRVAANLGLPAPTAGTVPVRQTSVKESPALSQVNLLSGDIVSRKVAILVADGVDGKAVEAMKAALTAEGAHAKVLGPTSAPVKTADGQSLPVDASAEGLPSVAFDAVFVPGGKASIEALKGDGVALHFILEAYKHLKAISFAGEAKELLSLLRLEEDAGLLEVSDSKSFKAFFNAIAQHRVWDREVKAKAVPA

SEQ ID NO: 27564 - protein, 203 aa, Phormidium sp. IAM M-99
VQSNFRLVVSIAKKYMNRGLSFQDLIQEGSLGLIRAAEKFDHEKGYKFSTYATWWIRQAITRAIADQSRTIRLPVHLYETISRIKKTTKLLSQEMGRKPTEEEIATRMEMTIEKLRFIAKSAQLPISLETPIGKEEDSRLGDFIESDGETPEDQVSKNLLREDLEGVLATLSPREKDVLRLHYGLDDGRMKTLEEIGQIFNVT

SEQ ID NO: 27565 - protein, 334 aa, Anabaena variabilis ATCC 29413
MSGKIAFVTGATGLLGSNLCRALVSQGWQVKGLVRSLDKAKRFLGDSNIELIQGDIEDVPAFTQALKGVDVVFHTAAFFREYYQPGSDWQKMKRINVDTTIELLQAAEAQGVAKVVFTSSSGVIQTDPHQAATETAPYNKFAEQNLYFKTKILAEQEIYRFLNTSQIDVVMILPGWMMGPGDAAPTSAGQLVLDLLAGKLPGVINGGAALTDVRDVATVMVKAAEKGESGGRYIVAGPLTTMKEIALELEAISGVKAPRMEIPDGMAIAIAWFLEKFTGLTGGVNPMPLAGIQTLLEKAKLSSAKAERDLGATFRPLRETLKDTVLWYQSQGYV

SEQ ID NO: 27566 - protein, 203 aa, Pseudanabaena sp. PCC 7367
VQSNLRLVVSIAKKYMNRGLSFQDLIQEGSLGLIRAAEKFDHEKGYKFSTYATWWIRQAITRAIADQSRTIRLPVHLYETISRIKKTTKLLSQEMGRKPTEEEIATRMEMTIEKLRFIAKSAQLPISLETPIGKEEDSRLGDFIESDGETPDDQVAKNLLREDLENVLGTLSPRERDVLKLRYGLDDGRMKTLEEIGQIFNVT

SEQ ID NO: 27567 - protein, 337 aa, Cryptococcus curvatus
MATKVGINGFGRIGRIVLRNALEHGDIDVVAINDPFIDLDYMVYMFKYDSTHGRFKGKVETKDGKLVIEGKPISVFGERDPAAIPWGKAGADYVVESTGVFTTIEKASLHLKGGAKKVIISAPSADAPMFVCGVNLEAYKPEYEVISNASCTTNCLAPLAKVIHDNFGIVEGLMTTVHATTATQKTVDGPSHKDWRGGRGAAANIIPSSTGAAKAVGKVIPSLNGKLTGMSFRIPTSDVSVVDLVVRLEKGASYDQIKEVIKKASEGELKGILGYTEDEVVSTDFLGSTESSVFDAKAGIPLNDKFVKLISWYDNEYGYSRRVCDLIAYVAKKDKSA

SEQ ID NO: 27568 - protein, 424 aa, Campylobacter jejuni RM1221
MTNKKAFKEACKFIAGGVNSPVRAFANVQSEPKFISHGKGAYIFDIDGNSYIDYVQSWGPLLFGHCDKDIQKACQKALHKGSSFGAPTLLETELAKLVLSDFPHLEKIRFVSSGTEATMSAIRLARGFTKKDKILKFEGCYHGHSDSLLVSAGSGAATFNSPSSLGVLEDVAKHTLVAKYNDINSVKELFEKNKDIACVIIEPIAGNMGLVPAKQDFLEELAKICKNNQTLLIFDEVMSGYRASYLGSYGINHIQADIITFGKVIGGGLPAAAFASRAEIMDILSPLGGVYQAGTLSGNPLAMAAGIASLTKAKKKTKLYDKLGKLAKKLTQGMKKLADEKGLPLQVCHVGSMFGYFFTKDPVSNYQDALKSDLALFSKFHKNMLENGIYLAPSQFETGFICSKMDDKIIDTTLEAVRESFKRI

SEQ ID NO: 27569 - protein, 252 aa, Zea mays
  misc_feature (212)..(212): Xaa can be any naturally occurring amino acid
  misc_feature (224)..(224): Xaa can be any naturally occurring amino acid
  unsure (1)..(252): unsure at all Xaa locations
MQIFVKTLTGKTITLEVESSDTIDNVKAKIQDKEGIPPDQQRLIFAGKQLEDGRTLADYNIQKESTLHLVLRLRGGMQIFVKTLTGKTITLEVESSDTIDNVKAKIQDKEGIPPDQQRLIFAGKQLEDGRTLADYNIQKESTLHLVLRLRGGMQIFVKTLTGKTITLEVESSDTIDNVKAKIQDKEGIPPDQQRLIFAGKQLEDGRTLADYXIQKESTLHLVLXLRGGMQIFVKTPHRKTITLEGESSDTID

SEQ ID NO: 27570 - protein, 396 aa, Sesamum indicum
MALKLNAINFQSPKCPSFALPPVASVRSPKFFMASTLRSGSKEVETVKRPFNPPREVHVQVTHSMPPQKIEIFKALEDWADNNILVHLKPVEKCWQPQDFLPDPSSDGFDDQVKELRERAKEIPDDYFVVLVGDMITEEALPTYQTMLKTLDGVWDETGASPTSWAIWTRAWTAEENRHGDLLNKYLYLSGRVDMRQIEKTIQYLIGSGMDPRTENSPYLGFIYTSFQERATFISHGNTARLAREHGDLKLAQICGTIAADEKRHETAYTKIVEKLFEIDPNDTVLAFADMMRKKISMPAHLMYDGRDDNLFDHFSSVAQRLGVYTAKDYADILEHLVARWKVANLTGLSADGRKAQDYVCGLPPRIRRLEERAQGRAKQAPKIPFSWIHDREVQL

SEQ ID NO: 27571 - protein, 176 aa, Kluyveromyces lactis NRRL Y-1140
MKFVKNKSYIQSAIFVVNYLIHYIVSYYSCCTHNQHKPNTMARTKQTARKSTGGKAPRKQLASKAARKSAPSTGGVKKPHRYKPGTVALREIRRFQKSTELLIRKLPFQRLVREIAQDFKTDLRFQSSAIGALQESVEAYLVSLFEDTNLAAIHAKRVTIQKKDIKLARRLRGERS

SEQ ID NO: 27572 - protein, 106 aa, Candida glabrata CBS138
MSTLLKSAKSIVPLMDRVLVQRIKAEAKTASGLFLPEKNVEKLNQAKVVAVGPGFTDANGNKVTPQVSVGDQVLIPQFGGSTLKLANDEEVILFRDSEILAKIKDN

SEQ ID NO: 27573 - protein, 727 aa, uncultured archaeon GZfos33E1
MRRLLIISNRLPVSVERRKNEFRFSSSVGGLATGLNALHQRYESVWVGWPGIAINREENDYVESKLSEFNCYPVFLSQGEVEKYYYGFSNKTLWPLFHYFPQYAKYEYAEWSAYEHVNRKFCERVAEIAKPEDVIWIHDYHLMLLPGLIRGRFPDATIGFFLHIPFPSADLFRLIPWRRRILEGVLGADFIGFHTYDYAHNFLSSVLCLLGYEHELGKFAIGDRIVQVDVHPMGIEVQKFVSATSGRGIKREVARLRSRFKNCKIIFSMDRLDYTKGIPERLYAFEHFLETHPEWHEKVVFILKIAPSRTKVGQYRVLKQEIDELVGRINGKYGTPEWVPISYFYRSLPFQTIVAFYLAADVALLTSMRDGMNLIAKEFVASRVDGKGVLILSEMAGAARELGEALVVNPNNKEEVAEALNEALRMPEEEQKSRNEEMQKRLSHYDVFHWGSGFIRSVLETKRLQEELNMKKLNEKIREELKNSYKAADKRLLLLDYDGTLVPFADKPERAKPDKELLYIFRALSEPPENTVVIISGRDKETLERWFGDTGVCLVAEHGVRLREEEGEWEEIELLKEDWKEKIISILDLFVDRAPGSFIEEKSFSLVWHYRNVDPELGELRAKELTDQLIGLTACTELQVMKGNKVVEVKDGRVNKGIAASHWLTKGFGFILAVGDDLTDEDMFKVLPEGAYSVKIGFTPSKARFYLGSPKEVRALLDEMEMVEVYK

SEQ ID NO: 27574 - protein, 488 aa, Capsicum chinense
MSSITSSCYSNLILKKKESRINGGFHLQYNGLRAIESVQMPASSVAYKPKVVKWGRIRVMASPAVSAPKRETDPKKRIVITGMGLVSVFGSDIDNFYNKLLEGQSGISLIDRFDASSYTVRFAGQIRDFSSEGYIDGKNDRRLDDCWRYCLVAGKRALEDANLGQQVLDTMDKTRIGVLVGSSMGGSKVFADAVEALVQRGYKKINPFFIPYSITNMGSALLAIDTGLMGPTYSISTACATANYCFYASANHIRRGEADIMVAGGTDAFISAIGVGGLIACRALSQRNDEYEKASRPWDRNRDGFVIGEGSGVLVMENLEHALKRGAPIIAEYLGGAITCDAHHITDPRADGLGVSSCIVMSLVDAGVSPEEVNYINAHATSTLAGDLAEVNAIKKVFKDTSEIKMNGTKSMIGHGLGASGGLEAIATIKAITTGWLHPTINQYDLEPQVTIDTVPNVKKQHEVNVGISNSFGFGGHNSVVVFAPYKP

SEQ ID NO: 27575 - protein, 389 aa, Digitalis obscura
MSWWWAGAIGAAKKKLEEDDAPPKHSSVALIVGVTGIIGNSLAEILPLADTPGGPWKVYGVARRTRPAWHEDNPINYVQCDISDPDDSQAKLSPLTDVTHVFYVTWANRSTEQENCEANSKMFRNVLDAVIPNCPNLKHISLQTGRKHYMGPFESYGKIESHDPPYTEDLPRLKYMNFYYDLEDIMLKEVEKKEGLTWSVHRPGNIFGFSPYSMMNLVGTLCVYAAICKHEGKVLRFTGCKAAWDGYSDCSDADLIAEHHIWAAVDPYAKNEAFNVSNGDVFKWKHFWKVLAEQFGVECGEYEEGEDLKLQDLMKGKEPVWEEIVRGNGLTPTKLKDVGIWWFGDVILGNECFLDSMNKSKEHGFLGFRNSKNAFISWIDKAKAYKIVP

SEQ ID NO: 27576 - protein, 528 aa, Stevia rebaudiana
MEFHLSLLTTVTAILVVTAFFLQISKRKKVDTTKNKLLPPKAKGAWPLIGHLPLLGKNRIAHRVLGDLADKYGPIFTIKLGVYQVLVVSSADAVKDCFTTSDKAFASRPKSTAVEIMGYNYAMFGLAPYGEYWRQVRKIAVLEILSQKRVDMLEWARVSEVRTSTNEVYDAWRVNKENEGSDMVLVDMKQWFTNLILNVLVRIISGKRFPFKSVEGIRFQKMEKKLFELLGAFVVSDLIPSMKRFDIGGYQKQMKMAAEEINDIMEGWLNNRKTQKESGEQKEGDQYFMDVLISVLKDASDADFPGYDHDTVIKATCMALLAAGSDTTSVTIIWALALLLNHPEKMKIAQDEIDKHVGRDRLVEESDLKNLVYINAIIKETMRLYPAAPLSVPHEAMEDCVVGGYHIPKGTRLLPNFWKIQHDPNIWPEPYEFKPERFLSTHKDVDVKGKHFELLPFGTGRRMCPAITFVLQILPLTLANLIQQFEIRKPSNDPIDMTESAGLTTKRATPLDVLIAPRLSLKMYPVDV

SEQ ID NO: 27577 - protein, 427 aa, Corynebacterium diphtheriae NCTC 13129
MFLCLIVGKPARGAEILDRLGFVRSKQNVLAIVLAGGEGKRLFPLTEDRAKPAVPFGGTYRLIDFVLSNLVNAGYLKICVLTQYKSHSLDRHISQAWQFSGPTSQYIASVPAQQRLGKRWYMGSADAILQSLNLVYDERPDYVLVFGADHVYRMDPEQMVADHIASGKAVTVAGIRVPRSEASAFGCIQADENNNITEFLEKPADPPGTPDDPSMTFASMGNYVFSTDALIQALKEDENNPDSEHDMGGDIIPYFVSMGQANVYDFNKNVVPGSTDRDRAYWRDVGTVDAFYEAHMDLISVHPVFNLYNQQWPIRSTERGDLPPAKFVQGGIAQASMVAQGSIVSGSTVRNSVVSTDVVVEEGATVEGSVIMPGARIGKGAVVRHCILDKNVVVSDGQVIGVDRERDEQRFQISPGGVVVVGKNFVV

SEQ ID NO: 27578 - protein, 288 aa, Xanthomonas oryzae pv. oryzae KACC10331
MPPDVTWRLAFLPPLDSSDFMRRIDFRFAELRANGRKALIPFITAGDPSLEATVPVMHALVRAGADVIELGVPFSDPMADGPTIQRSSERALGRGAGLAYVLEAVHEFRREDAATPVVLMGYLNPIEIHGTRRFAEAAVAAGVDGLLLVDLPPEEADETRAIFTEVGLALIALASPTTSEQRLDMLCSTAQGYLYYVSFAGVTGASNLLDTHAASDRLRQLRQRAGAPVVAGFGIKDAASAAAMAVDADGVVVGSALVAALAEADDVRSARERAEAFLAPLRQALDQA

SEQ ID NO: 27579 - protein, 283 aa, Cucumis sativus
MASTTLFLTLLFSASLIAISSANFNQDFQITWGDGRAKILNNGELLTLSLDKASGSGFQSQNEYLFGKIDMQLKLVAGNSAGTVTAYYLSSKGSTWDEIDFEFLGNLSGDPYTLHTNVFSQGKGNREQQFHLWFDPTADFHTYSILWNPNRIIFSVDGTPIREFKNWESNGVPFPKDQPMRIYSSLWNADDWATRGGLVKTDWTKAPFTASYKNFKAEACVWSGGKSSCSPSPAGSSNSWLSQEMDSASQERLKWVQKNYMIYNYCTDTKRFPQGLPTECNLP

SEQ ID NO: 27580 - protein, 574 aa, Escherichia coli K12
MDIQKRVSDMEPKTKKQRSLYIPYAGPVLLEFPLLNKGSAFSMEERRNFNLLGLLPEVVETIEEQAERAWIQYQGFKTEIDKHIYLRNIQDTNETLFYRLVNNHLDEMMPVIYTPTVGAACERFSEIYRRSRGVFISYQNRHNMDDILQNVPNHNIKVIVVTDGERILGLGDQGIGGMGIPIGKLSLYTACGGISPAYTLPVVLDVGTNNQQLLNDPLYMGWRNPRITDDEYYEFVDEFIQAVKQRWPDVLLQFEDFAQKNAMPLLNRYRNEICSFNDDIQGTAAVTVGTLIAASRAAGGQLSEKKIVFLGAGSAGCGIAEMIISQTQREGLSEEAARQKVFMVDRFGLLTDKMPNLLPFQTKLVQKRENLSDWDTDSDVLSLLDVVRNVKPDILIGVSGQTGLFTEEIIREMHKHCPRPIVMPLSNPTSRVEATPQDIIAWTEGNALVATGSPFNPVVWKDKIYPIAQCNNAFIFPGIGLGVIASGASRITDEMLMSASETLAQYSPLVLNGEGMVLPELKDIQKVSRAIAFAVGKMAQQQGVAVKTSAEALQQAIDDNFWQAEYRDYRRTSI

SEQ ID NO: 27581 - protein, 244 aa, Brassica napus
MEVITHPTPRTVDEVFTDFRGRRAGLIKALTTDMVKFYQTCDPEKENLCLYGLPNETWEVNLPVEEVPPELPEPALGINFARDGMQEKDWVSLVAVHSDSWLLSVAFYFGARFGFGKNERKKLFQMINELPTIFEIVTGNAKQSKDLSGNNNTSSKSKSNGLKVPKMSSPPPKEEDESEAEDEDDEQGAVCGACGDSDGTDEFWICCDACEKWFHGKCVKITPAKAEHIKPYKCPSCSNKRARP

SEQ ID NO: 27582 - protein, 402 aa, Silicibacter sp. TM1040
MKRVVITGAGTINALGHSVAETLESMREGRCGIGELDFRDVDRLAIKIGGQVQNFEAEGRFNRQQMVLYDRFTQFTLVAASEAIRQSGLEFTGDLAARSGVVLGTAGGGVSTWDDNYRSVYEDGKNRVHPFVVPKLMNNAAASHVSMEYNLKGPSFTVSTACASSNHAMAQAFQMVRSGMSPAMVTGGSESMLCFGGVKAWEGLRVMSKDACRPFSANRNGMVQGEGAGIFVFEEYEHAKARGAEILCEVIGYAMSSDAADIVMPSKQGAARAISGALRDAQINASDVGYINAHGTGTAANDKTECAAVADVFGPHADNLMISSTKSMHGHLIGGTGAVELLACIMALRDGVIAPTIGYEEADPECALDVVPNEAREAKVDVALSNAFAFGGLNAVLALRRV

SEQ ID NO: 27583 - protein, 560 aa, Acinetobacter sp. ED23-35
MTTLKITGMTCDSCAAHVKEALEKVPGVQSALVSYPKGTAQLAIEAGTSSDALTTAVAGLGYKAMLADAPPTDNRTGLFDKVRGWMGAADKGSGGERPLQVAVIGSGGPAMAAALKAVEQGAQVTLIERGTIGGTCVNVGCVPSKIMIRAAHIAHLRRESPFDGGMPPTPPTILRERLLAQQQARVEELRHAKYEGILDGNSAITVLHGEARFKDDQSLIVSLNEGGERVVMFDRCLVATGASPAMPPIPGLKESPYWTSTEALVSDTIPERLAVIGSSVVALELAQAFARLGSQVTIQARSTLFFREDPAIGEAVTAAFRAEGIKVLEHTQASQVAHVDGEFVLTTGQGEVRADKLLVATGRTPNTRSLALEAAGVAVNAQGAIVIDKGMRTSSPNIYAAGDCTDQPQFVYVAAAAGTRAAINMTGGDAINLTAMPAVVFTDPQVATVGYSEAEAHHDGIETDSRTVTLDNVPRALANFDTRGFIKLVIEEGSGRLIGVQAVAPEAGELIQTAVLAIRNRMTVQELADQLFPYLTMVEGLKLAAQTFSKDVKQLSCCAG

SEQ ID NO: 27584 - protein, 447 aa, Gossypium hirsutum
MGKEKTHINIVVIGHVDSGKSTTTGHLIYKLGGIDKRVIERFEKEAAEMNKRSFKYAWVLDKLKAERERGITIDIALWKFETTKYYCTVIDAPGHRDFIKNMITGTSQADCAVLIIDSTTGGFEAGISKDGQTREHALLAFTLGVKQMICCCNKMDATTPKYSKARYDEIVKEVSSYLKKVGYNPDKIPFVPISGFEGDNMIERSTNLDWYKGPTLLEALDQINEPKRPSDKPLRLPLQDVYKIGGIGTVPVGRVETGVLKPGMVVTFGPSGLTTEVKSVEMHHEALTEALPGDNVGFNVKNVAVKDLKRGFVASNSKDDPAKEAANFTSQVIIMNHPGQIGNGYAPVLDCHTSHIAVKFAELLTKIDRRSGKELEKEPKFLKNGDAGMIKMIPTKPMVVETFSEYPPLGRFAVRDMRQTVAVGVIKSVEKKDPTGAKVTKSAAKKK

SEQ ID NO: 27585 - protein, 549 aa, Streptomyces avermitilis MA-4680
MPPKSTTTKHIFVTGGVASSLGKGLTASSLGMLLKARGLRVVMQKLDPYLNVDPGTMNPFQHGEVFVTNDGAETDLDIGHYERFLDRDLDGSANVTTGQVYSTVIAKERRGEYLGDTVQVIPHITNEIKHRIRRMATDEVDVVITEVGGTVGDIESLPFLETVRQVRHEVGRDNVFVVHISLLPYIGPSGELKTKPTQHSVAALRNIGIQPDAIVLRCDREVPTAIKRKISLMCDVDEAAVVACPDARSIYDIPKTVHGEGLDAYVVRKLDLPFRDVDWTTWDDLLDRVHKPDHEINLALVGKYIDLPDAYLSVTEALRAGGFANRARVKIKWVTSDDCKTPAGAAGQLGDVDAICIPGGFGDRGVSGKVGAIQYAREHRIPLLGLCLGLQCIVIEAARNLADIPDANSTEFDSATGHPVISTMAEQLDIVAGEGDMGGTMRLGMYPAKLAEGSIVREVYDGKEYVEERHRHRYEVNNAYRAELEKKAGLQFSGTSPDGKLVEYVEYPREVHPYLVATQAHPELRSRPTRPHPLFAGLVKAAVERKTGK

SEQ ID NO: 27586 - protein, 448 aa, Gossypium hirsutum
MGKEKVHINIVVIGHVDSGKSTTTGHLIYKLGGIDKRVIERFEKEAAEMNKRSFKYAWVLDKLKAERERGITIDIALWKFETTKYYCTVIDAPGHRDFIKNMITGTSQADCAVLIIDSTTGGFEAGISKDGQTREHALLAFTLGVKQMICCCNKMDATTPKYSKARYDEIVKEVSSYLKKVGYNPEKIPFVPISGFEGDNMIERSTNLDWYKGPTLLEALDQINEPKRPSDKPLRLPLQDVYKIGGIGTVPVGRVETGTLKPGMVVTFGPSGLTTEVKSVEMHHEALQEALPGDNVGFNVKNVAVKDLKRGFVASNSKDDPAKEAANFTSQVIIMNHPGQIGNGYAPVLDCHTSHIAVKFAELLTKIDRRSGKELEKEPKFLKNGDAGMIKMVPTKPMVVETFSAYPPLGRFAVRDMRQTVAVGVIKSVEKKDPTGAKVTKSAAKKGK

SEQ ID NO: 27587 - protein, 388 aa, Cryptococcus neoformans var. neoformans B-3501A
MKIAWSAVITAALLPFSAYAGMYGQPVLHLDSKTFKSVMANEHAAMVAFVAPWCGHCKNLGPEYTAAAQSLSPLIPFYAVDCDDASNRGLCAEYGVQGYPTIKGFPKAGKGAAKEYNGERKRGALVEYAKGLVPERVKKLRVQGDIQSDVQGFLGEKSELPHVLLVHPSSPSIPFLWKVLAHRFSNKLHLGYVRDTTSHEVLSSLGIYDSTDTTRDGTRVVAWSPGSQSGEFVEYDGILKFNALLEWLQTTFPSAAPSNAKQRPVKAPQPTVKSTNKRQEQIPTQSQNDAAARRAKLEEMERRDKARREKAAEAARAQTMATEAEPEIEKEATPVEDAANAAPAQMVEDTSLPAEEMESRPVPEEAPEDEGSAGDVEVEKTEVVHEEL

SEQ ID NO: 27588 - protein, 464 aa, Paracoccus denitrificans
MSTYDLIVIGAGPGGYVCAIRAAQLGLKVACVEGRETLGGTCLNVGCIPSKALLHASHMLHETHENFEKMGLMGAKPKVDWGKMQGYKAETVGGNTKGIEFLFKKNKIDWLKGWASIEAPGKVKVGDTTHETKNIVIATGSEPASLKGVEVDNDAGIVVDSTGALSLPKIPKSMVVIGAGVIGLELGSAYARLGAEVTVVEFLDAITPGMDGEVQKQFQRILAKQGLKFVLGAAVSGVEVEKGKAEVKYKLRKDDSEHEIKAECVLVATGRRPYVAGLGLDKVGVALTDRGFVQIDDHWQTSVKGIYAIGDAVPGPMLAHKAENEGMAVAEVIAGKHGHVNYDVIPGVIYTTPEVASVGLTEEAAKESGRKIKVGKFPFMGNARAKALFQAEGFVKMIADAETDRVLGCHIIGPNAGEMIHEVCVAMEFGASAQDIALTCHAHPTCSEAVREAALACGDGAIHA

SEQ ID NO: 27589 - protein, 447 aa, Gossypium hirsutum
MGKEKVHINIVVIGHVDSGKSTTTGHLIYKLGGIDKRVIERFEKEAAEMNKRSFKYAWVLDKLKAERERGITIDIALWKFETTKYYCTVIDAPGHRDFIKNMITGTSQADCAVLIIDSTTGGFEAGISKDGQTREHALLAFTLGVKQMICCCNKMDATTPKYSKARYDEIVKEVSSYLKKVGYNPDKIPFVPISGFEGDNMIERSTNLDWYKGPTLLEALDQINEPKRPSDKPLRLPLQDVYKIGGIGTVPVGRVETGVLKPGMVVTFGPSGLTTEVKSVEMHHEALSEALPGDNVGFNVKNVAVKDLKRGFVASNSKDDPAKEAASFTSQVIIMNHPGQIGNGYAPVLDCHTSHIAVKFSELLTKIDRRSGKELEKEPKFLKNGDAGMIKMVPTKPMVVETFSEYPPLGRFAVRDMRQTVAVGVIKSVEKKDPTGAKVTKSAAKKK

SEQ ID NO: 27590 - protein, 439 aa, Pirellula sp. 1
MNSPANSSAARPAAGPKSVAAFQRASALMPGGVNSPARAFGAVGGTPLFIERAEGPYLYDIDGNRYIDYIGSWGPMILGHAHPEVINAITQAAAKGTSYGAPTEAESRLAEQIIEAVPSIEKVRLVNSGTEATMSALRVARGATGRKKVIKFAGNYHGHVDSLLVAAGSAAATLGAPDSPGVTPGAAEDTLVLSYNDVSGLQNAFAQHGDDIAALILEPVVGNMGCVLPTMEFLNAARDLTTKHGSILIFDEVMTGFRVAYGGAQERFGVTPDMTTLGKIVGGGMPLGAYGGRADIMNQVLPAGKVFQAGTLSGNPVAVAAGSATLRLLKENPPYEQLERLADRLADGLDRAATSAGMAHTVAKAGAMLTLFFNPEPVDCWAVADRCDREAFGRYFWGLIDEGIYMPCSQFEALFFSQQHTEAMIDETIAAAEKVLKSL

SEQ ID NO: 27591 - protein, 448 aa, Gossypium hirsutum
MGKEKVHINIVVIGHVDSGKSTTTGHLIYKLGGIDKRVIERFEKEAAEMNKRSFKYAWVLDKLKAERERGITIDIALWKFETTKYYCTVIDAPGHRDFIKNMITGTSQADCAVLIIDSTTGGFEAGISKDGQTREHALLAFTLGVKQMICCCNKMDATTPKYSKARYDEIVKEVSSYLKKVGYNPEKIPFVPISGFEGDNMIERSTNLDWYKGPTLLEALDQINEPKRPSDKPLRLPLQDVYKIGGIGTVPVGRVETGILKPGMVVTFGPSGLTTEVKSVEMHHEALQEALPGDNVGFNVKNVAVKDLKRGFVASNSKDDPAKEAANFTSQVIIMNHPGQIGNGYAPVLDCHTSHIAVKFAELLTKIDRRSGKELEKEPKFLKNGDAGMIKMVPTKPMVVETFSEYPPLGRFAVRDMRQTVAVGVIKSVEKKDPTGAKVTKSAAKKGK

SEQ ID NO: 27592 - protein, 432 aa, Synechococcus sp.
VTSSPFKTIKSDEIFAAAQKLMPGGVSSPVRAFKSVGGQPIVFDRVKDAYAWDVDGNRYIDYVGTWGPAICGHAHPEVIEALKVAMEKGTSFGAPCALENVLAEMVNDAVPSIEMVRFVNSGTEACMAVLRLMRAYTGRDKIIKFEGCYHGHADMFLVKAGSGVATLGLPSSPGVPKKTTANTLTTPYNDLEAVKALFAENPGEIAGVILEPIVGNSGFIVPDAGFLEGLREITLEHDALLVFDEVMTGFRIAYGGVQEKFGVTPDLTTLGKIIGGGLPVGAYGGKREIMQLVAPAGPMYQAGTLSGNPLAMTAGIKTLELLRQPGTYEYLDQITKRLSDGLLAIAQETGHAACGGQVSGMFGFFFTEGPVHNYEDAKKSDLQKFSRFHRGMLEQGIYLAPSQFEAGFTSLAHTEEDIDATLAAARTVMSAL

SEQ ID NO: 27593 - protein, 447 aa, Gossypium hirsutum
MGKEKVHINLVVIGHVDSGKSTTTGHLIYKLGGIDKRVIERFEKEAAEMNKRSFKYAWVLDKLKAERERGITIDIALWKFETTKYYCTVIDAPGHRDFIKNMITGTSQADCAVLIIDSTTGGFEAGISKDGQTREHALLAFTLGVRQMICCCNKMDATTPKYSKARFDEIVKEVSSYLKKVGYNPEKIPFVPISGFEGDNMIERSTNLDWYKGPTLLEALDQITEPKRPSDKPLRLPLQDVYKIGGIGTVPVGRVETGVLKPGMVVTFGPTGLTTEVKSVEMHHESLPEAFPGDNVGFNVKNVAVKDLKRGFVASNSKDDPAKEAANFTSQVIIMNHPGQIGNGYAPVLDCHTSHIAVKFSELLTKIDRRSGKELEKEPKFLKNGDAGMVKMIPTKPMVVETFSEYPPLGRFAVRDMRQTVAVGVIKSVEKKDPTGAKVTKSAAKKK

SEQ ID NO: 27594 - protein, 203 aa, Stanieria cyanosphaera str. PCC 7437
VQSNLRLVVSIAKKYMNRGLSFQDLIQEGSLGLIRAAEKFDHEKGYKFSTYATWWIRQAITRAIADQSRTIRLPVHLYETISRIKKTTKLLSQEMGRKPTEEEIATRMEMTIEKLRFIAKSAQLPISLETPIGKEEDSRLGDFIEADGETPEDQVSKSLLREDLENVLDTLSPSERDVLRLRYGLDDGRMKTLEEIGQIFNVT

SEQ ID NO: 27595 - protein, 159 aa, Staphylococcus epidermidis ATCC 12228
METVYFAGGCLWGTQAFFNTIPGVIQTEAGRANGTSKCLDAPYDGYAECVKIHFDPAKTSILMLMDYLFEMINPYSLNQQGQDKGQKYRTGVYSESSKHLNEVKDYIKRREDAKQVMVEVQPLSNYVKSAEEHQNHLEKFPEDYYLCHVPPALLNKYKK

SEQ ID NO: 27596 - protein, 486 aa, Xylella fastidiosa Temecula1
MMHHNVHQSEILADPCDLQRAERWRQRDLRVLWHPCTQMREHPDTLPLVPIVRGEGVWLVGHDGRRYLDAVSSWWTNLFGHADPRISAAIAAQARTLEHVMLAGFSHEPAVRLAEALLRLAPRQDGREPLSKVFYADNGSAGVEVALKMAFHYFRNRGEEQRTRFIALHNGYHGETIGALAVGDIPLYRRVYAPLLTEVLFAPSPDAYLAEPGQSAAEYALQAAEALEALFKRYSGQICALILEPLLQCAGGMRMHHPVYLHRVRELCDAHGALLICDEIATGFGRTGTLFACEQACSAISTDTDDKDLGIMPDLLCLSKGLTGGFLPLAAVLTTQQLYEEFLDDSRERAFLHSHSYTGNPLACIAALTTLDIFENDCIIERNQVTAARMTQLAASLSGHPHVADVRQTGMVVAFELTRDGNKRTPFPPQARLGLHVYRAALARGVILRPLGDVVYWMPPYCVDEQQLHLLAETTRVAIDEAIACV

SEQ ID NO: 27597 - protein, 1348 aa, Emericella nidulans
MSPLETNPLSPETAMREPAETSTTEEQASTPHAADEKKILSDLSAPSSTTATPADKEHRPKSSSSNNAVSVNEVDALIAHLPEDERQVLKTQLEEIKVNISFFGLWRYATKMDILIMVISTICAIAAGAALPLFTILFGSLASTFQRIMLYQISYDEFYDELTKNVLYFVYLGIGEFVTVYVSTVGFIYTGEHATQKIREYYLESILRQNIGYFDKLGAGEVTTRITADTNLIQDGISEKVGLTLTALATFVTAFIIAYVKYWKLALICSSTIVALVLTMGGGSQFIIKYSKKSLDSYGAGGTVAEEVISSIRNATAFGTQDKLAKQYEVHLDEAEKWGTKNQIVMGFMIGAMFGLMYSNYGLGFWMGSRFLVDGAVDVGDILTVLMAILIGSFSLGNVSPNAQAFTNAVAAAAKIFGTIDRQSPLDPYSNEGKTLDHFEGHIELRNVKHIYPSRPEVTVMEDVSLSMPAGKTTALVGPSGSGKSTVVGLVERFYMPVRGTVLLDGHDIKDLNLRWLRQQISLVSQEPVLFGTTIYKNIRHGLIGTKYENESEDKVRELIENAAKMANAHDFITALPEGYETNVGQRGFLLSGGQKQRIAIARAVVSDPKILLLDEATSALDTKSEGVVQAALERAAEGRTTIVIAHRLSTIKTAHNIVVLVNGKIAEQGTHDELVDRGGAYRKLVEAQRINEQKEADALEDADAEDLTNADIAKIKTASSASSDLDGKPTTIDRTGTHKSVSSAILSKRPPETTPKYSLWTLLKFVASFNRPEIPYMLIGLVFSVLAGGGQPTQAVLYAKAISTLSLPESQYSKLRHDADFWSLMFFVVGIIQFITQSTNGAAFAVCSERLIRRARSTAFRTILRQDIAFFDKEENSTGALTSFLSTETKHLSGVSGVTLGTILMTSTTLGAAIIIALAIGWKLALVCISVVPVLLACGFYRFYMLAQFQSRSKLAYEGSANFACEATSSIRTVASLTRERDVWEIYHAQLDAQGRTSLISVLRSSLLYASSQALVFFCVALGFWYGGTLLGHHEYDIFRFFVCFSEILFGAQSAGTVFSFAPDMGKAKNAAAEFRRLFDRKPQIDNWSEEGEKLETVEGEIEFRNVHFRYPTRPEQPVLRGLDLTVKPGQYVALVGPSGCGKSTTIALLERFYDAIAGSILVDGKDISKLNINSYRSFLSLVSQEPTLYQGTIKENILLGIVEDDVPEEFLIKACKDANIYDFIMSLPEGFNTVVGSKGGMLSGGQKQRVAIARALLRDPKILLLDEATSALDSESEKVVQAALDAAARGRTTIAVAHRLSTIQKADVIYVFDQGKIVESGTHSELVQKKGRYYELVNLQSLGKGH

SEQ ID NO: 27598 - protein, 396 aa, Jatropha curcas
MALKLNPFISQFHKLPTFALPPMANLRSPKFYMASTLKSGSKEVENLKKPFMPPREVHVQVTHSMPPQKIEIFKSLDEWAEQNILVHLKPVEKCWQPQDFLPDPSSDGFDEQVRELRERVKEIPDDYFVVLVGDMITEEALPTYQTMLNTLDGVRDETGASLTSWAIWTRAWTAEENRHGDLLNKYLYLSGRVDMRQIEKTIQYLIGSGMDPRTENSPYLGFIYTSFQERATFISHGNTARLAKEHGDIKLAQICGTIAADEKRHETAYTKIVEKLFEIDPDGTVLAFADMMRKKISMPAHLMYDGRDDNLFDHFSAVAQRLGVYTAKDYADILEFLVGRWKVDKLTGLSAEGQKAQDYVCRLPPRIRRLEERAQGRAKEGPTIPFSWIFDREVKL

SEQ ID NO: 27599 - protein, 459 aa, Capsicum chinense
MANITNEFMGHDMLAPFTAGWQSDMEPLVIEKSEGSYVYDINGKKYLDTLSGLWCATLGGSETRLVEAANKQLNTLPFYHSFWNRTTKPSLDLAKELLNMFTANKMAKVFFTNSGSEANDTQVKMVWYYNNALGRPQKKKIIARAKAYHGSTYISAGLSGLPPMHQKFDLPPPFVLHTECPHYWAYHLPGETEEEFSTRLANNLESLILKEGPETVAAFIAEPVLGAAGVILPPATYFDKVQAILRKHDILFIADEVVCGFGRLGTMFGSDKYNIKPDLVSVGKALSSGYMPIAAVLVSQKISSVILSESNKIGAFCHGFTYSGHPVACAVALEALKIYKERNITEVVNKISQKFQEGLKAFADSPIIGEIRGTGLALSTEFVDNKSPNDPFPYEWAVGTYFGAQCAKYGMLVSSTGDHVNMAPPFILSLEELDELIRIYGKALKDTEKRVEELKSQKQ

SEQ ID NO: 27600 - protein, 188 aa, Oscillatoria sp. PCC 7112
MNRGLSFQDLIQEGSLGLIRAAEKFDHEKGYKFSTYATWWIRQAITRAIADQSRTIRLPVHLYETISRIKKTTKLLSQEMGRKPTEEEIATRMEMTIEKLRFIAKSAQLPISLETPIGKEEDSRLGDFIESDGETPEDQVSKNLLREDLESVLDTLSPRERDVLRLRYGLDDGRMKTLEEIGQIFNVT

SEQ ID NO: 27601 - protein, 359 aa, Arabidopsis thaliana
  misc_feature (123)..(123): Xaa can be any naturally occurring amino acid
  unsure (1)..(359): unsure at all Xaa locations
MSAFTSKFADELIANAAYIGTPGKGILAADESTGTIGKRLASINVENVETNRRNLRELLFTAPGALPCLSGVILFEETLYQKSSDGKLFVDILKEGGVLPGIKVDKGTVELAGTDGETTTQGXLDGLGDRCKKYYEAGARFAKWRAVLKIGENEPSEHSIHENAYGLARYAVICQENGLVPIVEPEILVDGSHDIQKCAAVTERVLAACYKALSDHHVLLEGTLLKPNMVTPGSDSPKVSPEVIAEHTVRALQRTVPAAVPAIVFLSGGQSEEEATRNLNAMNQLKTKKPWSLSFSFGRALQQSTLKTWAGKEENVKAAQEALYVRCKANSEATLGTYKGDAKLGDGAAESLHVKDYKY

SEQ ID NO: 27602 - protein, 319 aa, Yersinia pestis biovar Medievalis str. 91001
MSKIVSLGIHVLDVLGRHVNRFPPGGELDIINEIRLTVAGTAAGMSVDLAKLGGDVYAMGAVGLDESGNFIIDTLRRYGVNTDHIVRKSEVQTSCSMLPIRPNGERPVLHVLGANATYRLEDIHWDVIASADILHFGGTYLLPGLDGPPTATILKFAKEHGVTTTLDLLVNAQPDLLAKLEPALPYIDYFMPGLDEARAICGLEKRADVIAFFLNRGVGHTVFKMGAEGSSIASLEMAEILIPAYKAQVVDSTGCGDSYCAAFIMGLTKGWDLATSGRFASAAASLVVSGLGSDAGIIDFEHTLKVMNTAETLPIAQET

SEQ ID NO: 27603 - protein, 784 aa, Bacillus cereus ATCC 10987
MKGVILAGGKGRRLRPLTCNTPKPMLPLLEKPVLEYNIELLRQHGIREIAITVQYMSTAIKQYFGDGSKWGVNLYYFEDSPPLGTAGSIKQAEKFLDEPFVVISGDALTDFQLSEGITFHEQKKRMVTMFVKEVENPLSFGLVVMNKEQEVTRYIEKPSWNEVVSNIVNTGIYIMEPEIFSYIPPREFFDFSQDVFPLLANKNALFAYLSEGYWLDIGTFDQYRQAQFDLLTKKLQVPIPYTEVLPMVWMGEGVTIGKGTKIHGPSFIGEGARIGAGSVIEPYSIIGKNSVVSSYSHLQKSIIFANAHIGKYCELLETTIGEHTMVEDDVTLFQKSIVADHCHIGKSTVIKQKGKLWPYKAIDSHSVVGSAGVQESEKSAGWLQKSRIVGRGNVEITPQFIVKVAMAYGSLFTKGESILIGSQEHIETTSYKNLFLHAIHGIGIHTMECKEMNESLFQYSIQDLQCAGGVFIQAEKEKEIVIKLYGKDGAQLTYKQQKAIEQVYMSESFYYVCEKEMGRNKLVHVSLHNYIEAVLERIDIEKIKKQKFHLLINKRNDMLQHLLMLFLQRLGCTVTWIYAGEQKDHVKALMKSSKANMALMFSEQGNYFELYDNHSNIYQGTDFEEIDIPDLLLESAGNIYPMSLKLGECYLLFYTQDEKKSFQARWKRDILYRIGKLFELIALQGKTFLSIVEQSPPLYLLCDEVVCSWNEKGKVMRKLLADIERKEEGIFEGVQFKYTEKEWSYIVSDTKQPKFLVYSHARNPVIARENMKNLIEKIRQYQKV

SEQ ID NO: 27604 - protein, 400 aa, Acinetobacter sp. NCIMB9871
MLNAYIYDGLRTPFGRHAGALSSIRPDNLAAHVIKALVEKNHLPANIFDDVILGNTNQAGEDSRNIARHATLLAGLDVKTPAQTVNRLCASGLAALIDAARAISCGEGEVILAGGVESMSRAPFVFAKSETSFSRDLKVFDSTIGARFPNPAIEKQFGDDTMPKTGDNVAVEYGVTREDADRFAAASQARYEAAKQASFFAGEIVGVEVSQGRKLSPKLVEIDEHPRPSSDFVALQKLKPLFEGGVVTAGNASGVNDGAAALIIGSTAAEQKLGIKPMAKILSSGAAGIEPRIMGAGPVDAIKLALKRANLTLDDMDIIEINEAFASQVLACLKGLDIDFDDPRVNPNGGAIAVGHPLGASGARLALTTARELQRSGKKYAVISLCIGVGQGLAMVIERT

SEQ ID NO: 27605 - protein, 105 aa, Oryza sativa
EPFDYYMFGQNYIRPLVDYRNSYVGNISIFQDMEQKLQQGHNVVLMSNHQTEADPAIIALLLERSNPWISENIVYVAGDRVVTDPLCKPFSMGRNLICVYSKKHM

SEQ ID NO: 27606 - protein, 576 aa, Pinus taeda
MEAFNQHLSAQPFAARFVEMVICLTLFTAMVSAKLHTHIFVLRSTPVKRLCGTHNIITVNGQFPGPTLHVRNGDKLKVKVHNQAQYNATIHWHGVRQFRTGWSDGPEFITQCPIRPGRSYTYKFTITGQEGTLWWHAHSSWLRATVYGALIILPRLDTTYPFTFTRPHRQIPILLGEWWNRNPMDVVNQATQTGAAPNVSDAFTINGQPGDLYKCSTSDTFSVSMKGGETNLLRVINAALNSDLFFSIGSHTMTVVAVDALYTKPFQTNVLMLGPGQTTDILLTANQATGRYYMAARAYSSGQGVPFDNTTTTAILEYEGSSKTSTPVMPNLPFYNDTNSATSFANGLRSLGSHDHPVFVPQSVEENLFYTIGLGLIKCPGQSCGGPNGSRFAASMNNISFVPPTTSSILQAQHFGMKGVFSADFPDNPSVGFDYTAQNISRDLWSPVKATRVKVLKYNSTVQLILQGTNIFAGESHPIHLHGYDFYIVGAGFGNYNAQTDPHKFNLVDPPMRNTVNVPVNGWAAIRFVADNPGAWVMHCHLDVHITWGLAMVFVVNNGPDALLSLQSPPRDLPLC

SEQ ID NO: 27607 - protein, 375 aa, Xanthomonas oryzae pv. oryzae KACC10331
MRSAAMWVRSRRAFPVRSMSDTARAKVWVSQPLFDDVVAQLGEHFELTTTEHVTVWSPVELAARLASLDGALITLNERVGAAEIAAAPQLRAIANVGVGYNNLDIDALSAAGILASNTPDVLTETTADLGFALLMATARRITESERWLRDGQWGQWSFKAMLGADIHGSTLGILGMGRIGQGIARRGAHGFGMRVLYHNRSPLPAATEQALGAQYVEFDTLLAQSDHLVLVVPYTRDSHHIIDAAALGKMRATATLVNIARGGIVDELALADALANGRLAGAGLDVYQGEPRVRPELLALRNVVLTPHIGSASLATRRAMVQLAVDNLIAALGEGPHAGHPPSALNTDAVAAARHGGTAADAKKTGVTGTIATKR

SEQ ID NO: 27608 - protein, 286 aa, Lactobacillus plantarum WCFS1
MTALTKLTDTYTLNNGTKIPIVGFGTWQTPDGQVAYDSVLAALKAGYRHIDTAAAYGNEESVGKAIADSGVAREDLFVTTKLWNADHGYDAAKKALDTSLAKLGLDYVDLYLIHWPNPAAMRDNWEQLNADTWRAMEEAYTARKARAIGVSNFRPKHLDALLKTAKVVPAVNQIFLNPSDMEDEVVAYNRKHDILSEAYSPLGTGKIFSIPELKTLADKYDKSVAQVVLRWSLQHGFLPLPKSVHADRIEQNTELFDFELSDDDMKVIDGFHGVAGLANDPDQVNF

SEQ ID NO: 27609 - protein, 429 aa, Rubrivivax gelatinosus PM1
MNAPDATPVIALMDRLGSAARSASTAMAAASTAAKNAALLALAREIRAGAARLAAENARDLDVATRAGLAAPMVDRLRLTDKVIALMAEGCEQVAALPDPIGEMTNLRRRPSGITVGQMRVPLGVFGMVYESRPNVTIDAASLAIKSGNAAILRGGSEALHSNTALMALVVRALAEAGLPGDAVQLVPTTDRAAVGRLIAMPQYVDVIIPRGGKGLIERIAAEATVPVIKHLDGNCHVYVDAGADLDLAVRVTDNAKTQKYSPCNAAESLLVHRDVAAAFLPRIGAVFAAKGVEMRCGPRAKALLAAVPGAKLVDATEADWAEEYLAPVISIKLVDSLDEAIARINRYGSHHTDAILTTNHPNAMRFLREVDSASVMVNASTRFADGFEFGLGAEIGISTDKFHARGPVGLEGLTSMKWVVFGQGEVRT

SEQ ID NO: 27610 - protein, 384 aa, Leuconostoc mesenteroides subsp. mesenteroides ATCC 8293
MPVNEEDLKTYRRDLHKIPELALAEFKTHRYLLEKIQSWQTNFMTIRQVEELPTAMLVKFSGTDPSRTVGYRADIDALPVTEDTGLPFESTHKGVMHACGHDVHMSLALGLVQYFSEHQPKDNLIVFFQPAEESKSGGKLAVDLGIFEGEWHPDEFYGIHDQPNLPAGTLSTLAGTLFAGTAELEIDIHGQGGHAAYPHLGKDPIVISAELIMLLQTVVSRDVDPIEGGVVSLGMISGGFTNNVIPDTVHLAGTVRSMTKDGLDKMTTRIRQIVEGVALANDVKINVRLETGSYLPVENNPDLANNLLSFMEQRQDIAFEEAKPAMTGEDFGYILQHIPGVMLWLGVNDNHSLHSAKLNIDEAALLPGFNALKDFIEWRMSQGE

SEQ ID NO: 27611 - protein, 677 aa, Nostoc sp. PCC 7120
FGPFYDYTPTIRDPKNIGKGVQYLNRYLSSKLFQDSQQWLESLFNFLRLHNYNGIQLLINHQIQSQQQLSQQVKNALNFVSDRPNDEPYEQFRLQLQTMGFEPGWGNTASRVRDTLNILDELIDSPDPQTLEAFISRIPMIFRIVLVSAHGWFGQEGVLGRPDTGGQVVYVLDQAKNLEKQLQEDAILAGLEVLNVQPKVIILTRLIPNSDGTLCNQRLEKVYGTENAWILRVPLREFNPKMTQNWISRFEFWPYLETFAIDSERELLAEFQGRPDLIVGNYTDGNLVAFLLTRRMKVTQCNIAHALEKSKYLFSNLYWQDLEEKYHFSLQFTADLIAMNAANFVISSTYQEIVGTPDSIGQYESYKCFTMPELYHVVNGIELFSPKFNVVPPGVNENSYFPYTQTQNRIESDRDRLEEMLFTLEDSSQIFGKLDDPNKRPIFSMARLDRIKNLTGLAECFGQSQELQERCNLILVAGKLRIEESEDNEEKDEIVKLYRIIDEYNLHGKIRWLGVRLSKNDSGEIYRVICDRQGIFVQPALFEAFGLTILESMISGLPTFATQFGGPLEIIQDKINGFYINPTHLEETATKILDFVTKCEQNPNYWNIISEKAIDRVYSTYTWKIHTTKLLTLARIYGFWNFTSKEKREDLLRYLESLFYLIYKPRAQQLLEQHKYR

SEQ ID NO: 27612 - protein, 600 aa, Photorhabdus luminescens subsp. laumondii TTO1
MITKNLHPYHLINRLQQQIKQHPEKIAFRQWSPAEQLELNWHDIGKKTDAISRALLEIGVDVQEKIGLFAHNSMAWSLADIAVLQLRAVTVPLYATSSQEQAGFILNDAGVRILFVGGQAQYDVAITLTECCPQLSHIIVLDESVDLRDCSLAQHLSDFMVDNELPCQSELETRIANHNLDDLFTLIYTSGTTGEPKGVMLDYRNLAYQLYSHDHILALTDQDISLSFLPLSHVFERAWSFYVMHVGAQNVYLTDTNFVRQAMADVCPTVMCAVPRFYEKIYSAVFEKVSKAPWHRRKLFNWAIKCGERQFLRKLQSKKSCPWSTAMHRLADKLVLSKLRNVLGGRVRFLPAAGARLDETIILFFLAVGINIKYGYGMTETCATVSCWEEQGYVLGSIGKPSPGIDVRIGEEDEIQVRGPIVMKGYFNNQQETTKAFTQDGWLRTGDAGKLDENGNLFITERLKDLMKTSNGKYIAPQMIEGILGQDRFIEHVAIIADARKFVSALIVPCHEALEEYARSINLKYHDRVELLRHSQIINMFEQRLKEMQKNFAHFDQVKRFILLPKPFSMETGELTPTLKLRRKIIMQRYYEEIESMYQD

SEQ ID NO: 27613 - protein, 141 aa, Mannheimia succiniciproducens MBEL55E
MSLERTFSIIKPDAVERNLIGKILARFEQSGFEIVAAKMVRLTKAQAEGFYAEHQGKPFFEDLVEYMVSAPILVSVLQKENAVKDYRTLIGATDPAKAKEGTVRKEFAESLRRNSVHGSDSLESAAREIAYFFIDSEICSR

SEQ ID NO: 27614 - protein, 399 aa, Xanthomonas campestris pv. vesicatoria str. 85-10
MAPVAVTAFTSTTALGAGLAAQAAALTARRSGLRRNDFGPQPLLPCWVGRVDGVEEVVLPDSLHAWDCRNNRLAWLALQQDGMAQAVQAAAQRYGAERVAVIIGTSTSSIGASEEAYTRLVDDADGARFPEDLNRPIVHTPHSLGDFVQHATGLRGPCVTVATACSSSAKVFAQAARLMEADVIDAALVGGVDTLCGSVLFGFNSLQVVAPEMCQPFDARRVGLSLGEAGGFALLERPAAAPDAALWLYGYGESSDAHHMSAPHPQGLGAQLAMRGALDRAGLEPAAVGYLNLHGTATPANDSVEAAAVAAIFPGTLHASSTKAWTGHTLGAAGIVESVIALLALRDEVLPGTLNSDIPDPACGPQIRFDNAHARIDYAMNNSFGFGGNNCSLLFGRAR

SEQ ID NO: 27615 - protein, 448 aa, Gossypium hirsutum
MGKEKVHINIVVIGHVDSGKSTTTGHLIYKLGGIDKRVIERFEKEAAEMNKRSFKYAWVLDKLKAERERGITIDIALWKFETTKYYCTVIDAPGHRDFIKNMITGTSQADCAVLIIDSTTGGFEAGISKDGQTREHALLAFTLGVKQMICCCNKMDATTPKYSKARYDEIVKEVSSYLKKVGYNPEKIPFVPISGFEGDNMIERSTNLDWYKGPTLLEALDQINEPKRPSDKPLRLPLQDVYKIGGIGTVPVGRVETGTLKPGMVVTFGPSGLTTEVKSVEMHHEALQEALPGDNVGFNVKNVAVKDLKRGFVASNSKDDPAKEAANFTSQGIIMNHPGQIGNGYAPVLDCHTSHIAVKFAELLTKIDRRSGKELEKEPKFLKNGDAGMIKMVPTKPMVVETFSEYPPLGRFAVRDMRQTVAVGVIKSVEKKDPTGAKVTKSAAKKGK

SEQ ID NO: 27616 - protein, 118 aa, Solibacter usitatus Ellin6076
MYPERLLDHFQNPRNVGELPSPAITVEVSNPACGDILRLSALFTEGRIAEASYKVRGCTASIAAGSALTEWLAGKTRDELSRFTATLIDEAVGGLPTASKHAAVLCADGVKALRRALD

SEQ ID NO: 27617 - protein, 607 aa, Glycine max
MDTNIGSLSLDACKPANNDVGCPPNGAVSAIKPSVPATTMTSSDATLGRHLARRLVQVGVTDVFSVPGDFNLTLLDHLIAEPQLKNIGCCNELNAGYAADGYARCRGVGACVVTFTVGGLSVINAIAGAYSENLPLICIVGGPNTNDFGTNRILHHTIGLSDFSQELRCFQTVTCYQAVVNNIEDAHELIDTAISTCLKESKPVYISISCNLPGIPHPTFSREPVPFSLSPRLSNKMGLEAAVEAAAEFLNKAVKPVMVGGPKLRVANACDAFVELADACGYPFAVMPSAKGLVPEHKPHFIGTFWGAVSTAFCAEIVESADAYLFAGPIFNDYSSVGYSLLLKKEKAIIVQPERVVISNGPAFGCVLMKDFLRELAKRLKHNNTAYENYSRIFVPEGKPVKAEPREPLRVNVLFKHIQDMLSGETAVIAETGDSWFNCQKLKLPKGCGYEFQMQYGSIGWSVGATLGYAQAVPEKRVISCIGDGSFQVTAQDVSTMLRNEQKTIIFLINNGGYTIEVEIHDGPYNVIKNWNYTGLVDAIHNGEGKCWTTKVTCEEELVEAIQTATGDKKDCLCFIEVIVHKDDTSKELLEWGSRVCAANGRPPNPQ

SEQ ID NO: 27618 - protein, 154 aa, Glycine max
  misc_feature (92)..(92): Xaa can be any naturally occurring amino acid
  unsure (1)..(154): unsure at all Xaa locations
ANNVEFYAPWCGHCKALAPIYEKVAAAFNLDKDVVIANVDADKYKDLAEKYGVSGYPTLKFFPKSNKAGENYDGGRDLDDFVAFINEKCGPXRDGKGQLTSKAGIIASLDDLVKEFVSADSNEKKAVYSRLEEEVKKLKGSSARHGDLYLKLAK

SEQ ID NO: 27619 - protein, 449 aa, Gossypium hirsutum
MGKEKVHINIVVIGHVDSGKSTTTGHLIYKLGGIDKRVIERFEKEAAEMNKRSFKYAWVLDKLKAERERGITIDIALWKFETTKYYCTVIDAPGHRDFIKNMITGTSQADCAVLIIDSTTGGFEAGISKDGQTREHALLAFTLGVKQMICCCNKMDATTPKYSKARYDEIVKEVYSYLKKVGYNPEKIPFVPISGFEGDNMIERSTNLDWYKGPTLLEALDQINEPKRPSDKPLRLPLQDVYKIGGIGTVPVGRVETGTLKPGMVVTFGPSGLTTEVKSVEMHHEALQEALPGDNVGFNVKNVAVKDLKRGFVASNSKDDPAKEAANFTSQVIIMNHPGQIGNGYAPVLDCHTSHIAVKFAELLTKIDRRSGKELEKEPKFLKNGDAGMIKMVPTKPMVVETFSAYPPLGRFAVRDMRQTVAVGVIKSVEKKDPSGAKVTKSAAKKGGK

SEQ ID NO: 27620 - protein, 1002 aa, Cryptococcus neoformans var. neoformans B-3501A
MASLAAAPSPTSSTPPPSSPYARLSAPTMARNSSSSSSRSTASCSSTSSVQAVPMRPPPIETSTAATSRSQLPSSRHSENEAERDTSYTSPGLSVGGRGGLARNGPRSNRLGTSPQARHVPPSIVALSPSPSPILNMVPKRQSNTETVSGTSPSTPLGKSFLAQQDLSPNSNTIPLRVTISVDPNERLSHDRESHSVERPRSTGNSPVRGRHGHLSTPSSPTSSYRALGGKPRTLSVDAGQNWGRSQRNRLRDGDDRERRQSQVSSASSGALKKHSLDDWVLGEELGVGSYSTVYCVTPSANTHSPTSPQPARKYALKVINQAHLIQEKKVKYAMVERDALIRLSDPRPSKGHKRGVSSSSSSGYTQTGSAGKRKSTASIGGQSSVASVAGGAASSSKKDTRDRLSIVTTSSAASSPVLTASSGSTQLSPTATSGGGGNTKGRRPSRSAEPPTRVQEQTEMLIHDRGDRQETPSREWDRDRDWDNMTRSRPPSPVREESTEGGEKDKDEEEPGASSEDLGAAIHLTLPPPQIPSTPEPRSSPLLSVDGQRTSRETARDRPHSTPKRRRQSLAPSERSMKSGSTTGKSPAAAAHPGVVRLFSTFNDSSSLYFVLSLASNGELASMIRKYGSLDITSARYYAAQLIDTLEFVHSRGVIHRDLKPENILLDEDMRIKITDFGSAKIIAREEPVADDSSRSRSFVGSADFVSPEVLRNEVATTASDIWAFGCILYQFICGKPPFRGATDYLTFQKILKREMEFPECIDKDAKSLIDTILNLEPNLRPSITFIKTHPFFQSVDFSTLWTIPAPPISSGLREPSKSTTLAQLEASDIWGVFEGSDVGEEDEDGFEYDDDLSSRAGDGAEGTGPMSGRQVAANAVHHVDNPKLSTRSRNHIDLGQDLDHPRPAYAGSGAGRRGKKQKQKEKEKGNNARGWSHGSENPGGNRSALGGWLGEMWGEVATFARDTFATGKTFLPGGGGRALENRSGKSPQQKPADTAARMRK

SEQ ID NO: 27621 - protein, 448 aa, Gossypium hirsutum
MGKEKVHINIVVIGHVDSGKSTTTGHLIYKLGGIDKRVIERFEKEAAEMNKRSFKYAWVLDKLKAERERGITIDIALWKFETTKYYCTVIDAPGHRDFIKNMITGTSQADCAVLIIDSTTGGFEAGISKDGQTREHALLAFTLGVKQMICCCNKMDATTPKYSKARYDEIVKEVSSYLKKVGYNPEKIPFVPISGFEGDNMIERSTNLDWYKGPTLLEALDQINEPKRPSDKPLRLPLQDVYKIGGIGTVPVGRVETGILKPGMVVTFGPSGLTTEVKSVEMHHEALQEALPGDNVGFNVKNVAVKDLKRGYVASNSKDDPAKEAANFTSQVIIMNHPGQIGNGYAPVLDCHTSHIAVKFAELLTKIDRRSGKELEKEPKFLKNGDAGMIKMVPTKPMLVETFSEYPPLGRFAVRDMRQTVAVGVIKSVEKKDPTGAKVTKSAAKKGK

SEQ ID NO: 27622 - protein, 311 aa, Streptomyces coelicolor A3(2)
MSLAPGGALLVVGDVVTDIVARHRGPLAPGTDTAAAVRRLPGGAGANVACWAAHEGCGDVRLLGRVGTDASAWHERELTACGVRPLLVVDSAAPTGTVICLVDTADSAERTFLTDSGAALRIGPGDWSDTLLDGVGRLHLSGYLLFSEPGRALVSVALAAARARGVPVSLDPASAGFLTELGVDRFLGLVEGVDVLLPSRDEACLLTGLPDVADAAAKLSRHVPLVIVKQGAKGALVARSGTVGARVAAVTAAPRDSTGAGDAFTGAFLAALLAGAEAEEATAAGCRAGARAVERVGGRPPRAAGRGPGDG

SEQ ID NO: 27623 - protein, 214 aa, Schizosaccharomyces pombe
MCQEDEYDYLFKTVLIGDSGVGKSNLLMRFTRNEFNIESKSTIGVEFATRNIVLDNKKIKAQIWDTAGQERYRAITSAYYRGAVGALIVYDITKQSSFDNVGRWLKELREHADSNIVIMLVGNKTDLLHLRAVSTEEAQAFAAENNLSFIETSAMDASNVEEAFQTVLTEIFRIVSNRSLEAGDDGVHPTAGQTLNIAPTMNDLNKKKSSSQCC

SEQ ID NO: 27624 - protein, 272 aa, Triticum aestivum
MLLLNPASEAAALDSIRQQLLEEPARPAYCRSASFGSLVADQWSESLPFRPNDADDMVVYGALRDAFSCGWLPDGSFAAVKPEPLPSPDGSYDGSCLGSFLAPPAPGPDAPWAEEEAEVAAAASRGKHFRGVRQRPWGKFAAEIRDPAKNGARVWLGTFDSAEDAAVAYDRAAYRMRGSRALLNFPLRIGSEIAAAAAAAGQKRPSPQPASPDSSSPSCSAPGSSKRRKRGEAAAASMAMALVPPPPAQAPVQLTLPAQPWLAAGAVQQLVS

SEQ ID NO: 27625 - protein, 203 aa, Xenococcus sp. PCC 7307
VQSNLRLVVSIAKKYMNRGLSFQDLIQEGSLGLIRAAEKFDHEKGYKFSTYATWWIRQAITRAIADQSRTIRLPVHLYETISRIKKTTKLLSQERGRKPTEEEIATRMEMTIEKLRFIAKSAQLPISLETPIGKEEDSRLGDFIEADGETPEDQVSKSLLREDLESVLDTLSPRERDVLRLRYGLDDGRMKTLEEIGQIFNVT

SEQ ID NO: 27626 - protein, 539 aa, Acinetobacter sp. ADP1
MVPHVSRLLELWRIAAHYRLDTLFPAEELPAKARHAINLIKLHPAAWSSRERKNPLKLKEALEDMGPLAIKLGQLLSTRRDLIPPEILSQLVLLQDQVKPFDPQIAKQRIQDSLKAEVNTLFARFDEQPLAAASIAQVHTAALFDGREVIVKVTRPNIRTQILQDFEIISWLGQSLESRLEAARALHLSEIIQDYRQIILNELDLTLEADNTRRMRHYFTGSSMMYVPEVYMDSKDVMVAERITGVPISDTATFDRLGMNRADLAEKGLTIFFTQVFRDNFFHADMHPGNVFVETINPANPRFIALDCAIMGELSKHDQMTVARMLLAVMNNNFMQLIQIVHQAGWIPPGTDQDALAREMRRTVGPMVSKPMDQLDFAGILLQVMDIARRFHLEIPPQLMLLLKTLVHVEGLGTDLYPQLDIWKLAKPILTEWVKSNMNPVKNIKEIGQQIPDLLLGAQDLPTLLIDSLNGLKNQSAWQDRQVRELQQLRLQMEHQQKRSWIFGSIIAILLSIAIIAPWYISIVLITLTILLSIWRIVK

SEQ ID NO: 27627 - protein, 274 aa, Burkholderia vietnamiensis G4
MPSRSSSPASLRATPELVGAHILVVDDRPNDLRLLTEILRSARCRISVAFDGLQAYHRAQAIVPDLILMDVRMPRMDGFAACRLLASTPDTQNIPVIILTAAGDLDDRIAGLETGALDYIVKPFEPAEVIARIRNHLKRARRSQPFAHLPELPDHPDTALVRAASDILLRELRNPPTLDELARQVGTHEKRLSRVFRDHLGQTVFEYLRDTRLRAAQHFLAATSMGIGDIAEEIGFSTPGNFATAFRERFGVTPSDWRRQRPTVDAQPPSHDHA

SEQ ID NO: 27628 - protein, 188 aa, Nodularia spumigena PCC 73104
MNRGLSFQDLIQEGSLGLIRAAEKFDHEKGYRFSTYATWWIRQAITRAIADQSRTIRLPVHLYETISRIKKTTKLLSQEMGRKPTEEEIATRMEMTIEKLRFIAKSAQLPISLETPIGKEEDSRLGDFIESDGETPEDQVSKNLLREDLEKVLDSLSPRERDVLRLRYGLDDGRMKTLEEIGQIFNVT

SEQ ID NO: 27629 - protein, 712 aa, Pseudomonas syringae pv. phaseolicola 1448A
MERVPTQPHDGSSVLLVVDDYPENLVTMCAVLQRTDWHIVTASSGIEALTVLLEQEVDLVLLDVQMPGMDGFEVARLMRGSQRTRLTPIIFLTANEQTQDAVQKGYANGATDYLFKPFDPNVLKPKVQTLLEQQRNRRALQQLSLELESARAFNASVLANVAEGILVVDEAGTISFANPAICQLLSASVDQLRGTQVLDYIIEPQVGEWLESGFYKHYRKADTYRVHDAVLRTAQGTQLPVALSCAALPAEQKAMVMTVLDMSVVRDLYQQLEKQAVTDALTGLLNRRGLYQAVEGMLLRKEQTDKYLVVLFMDLDGFKQINDALGHDAGDQVLLWVAEQFKDSMRPYDVLARIGGDEFTVVIDGLDYPEQAAKIAEKLIERVSGRRQVDGIDITLGASVGIATFPDCGSNLDGLLRAADIAMYEAKRAGRQQYRFYDQNMNGRARSRLMLEESVRTAIDGKDFSVVYQPQVHVADGRLRGFEALLRWQHPAVGEVPPALFIPLLEETRLINRLGSWIFDQGAEQRQAWSRVFAADVVLSVCVSPTQFYMPNLASELKRAMDRFELKPGQIEVEITESSLVHNLTHSHKQLKLLHDVGVRIALDDFGTGECSLSHLRNLQLDTLKLDRRFVANIVESRREAAMASSIIDLSRNLDMLVIAEGVETPEQYQWLADNGCQVMQGFLIAHPMVPEDALRFPGHFEVAGLRSSGLL

SEQ ID NO: 27630 - protein, 434 aa, Silicibacter sp. TM1040
MARTPPGEEKGKDMKDLENIPALMEDIGKRAKAAAQQLATASAAQKEQALNAAADAVWAQRGEIIAANAKDLEFGRDKGLSSAMMDRLMLDEARIQGIVDGLRAVAAQADPVGAVLDEWTQPSGLRIQRVRTPLGVIGVIYESRPNVTADAGALCLKSGNAVILRGGSESLHSAQAIHGCLAAGLRAADLPEDAVQLVPTRDRAAVQELLTMTAYVDVIVPRGGKGLVGLVQREARVPVFAHLEGIVHIYLDKDADRKKAIDVVLNAKTRRTGICGAAECLLIHEDIADSIGKDVLDLLAMGGVEIHAEEGLPGPDSMQVATSEDWGKEYLDAIIAAKKVASIDEAIAHIRRYHSAHTDCIITENDAAVAQFFSELDSAILMHNASTQFADGGEFGMGAEIGIATGKMHARGPVGATQLTSFKYLVRGDGTVRA

SEQ ID NO: 27631 - protein, 368 aa, Silicibacter sp. TM1040
MAALSTARRVVIKIGSALLVDRTSSALRQEWLLSLAEDVARLKKQGKDVILVSSGSIALGRGALGLPRKDLPLEQSQAAAAVGQIRLARAYEEALAPHGITTAQVLVTLEDSENRRRYLNSRATLETLIGLGAVPIVNENDTIATDEIRYGDNDRLAAQVAVTVGADVLILLSDVDGFYSANPALDPDAKRFDRIEQITPEIEAMAGDGVSGLSKGGMITKLLAAKMATAAGCAMAISEGSVMSPVSALEAGAASTWFTAQGDPQVARKRWIAAMKTRGVITVDEGAAKALHNGNSLLPAGVRHVEGDFGRGDPLAILGPDGRKLGQGLSRYTAEEARALQGHRSDEIEAILGYAGRAALIHRDDMAL

SEQ ID NO: 27632 - protein, 680 aa, Rubrivivax gelatinosus PM1
MAALESRTPATPDTSLMANAIRALAMDAVQQANSGHPGAPMGMADIAVALWGRHLRHNPANPAWADRDRFVLSNGHGSMLIYALLHLTGYALPLEELRNFRQLHSKTPGHPEVGITPGVETTTGPLGQGLSNAVGMALAEKLLAAEFNRDGYAIVDHHTYVFLGDGCLMEGISHEASALAGAWKLDKLIALYDDNGISIDGQVAPWFVDDTAKRFAAYGWNVIGPIDGHDVDAVDAAITQAKRHVGQPSLIVCKTAIGKGSPNRANTAKAHGEPLGAEEIALTRATIGWPHAPFEIPAEAYNDWDAKDAGANLQADWEGRFEAYRADHPAAAAEFERRMAGALPENFAQIAVDAAIAAHAKAETVASRKASQLALEAFTAALPELLGGSADLTGSNLTNTKSTPALRFDAAGASNGGRHINYGVREFGMAALMNGIALHGGFIPYGGTFLTFSDYSRNAIRMAALMKQRVVHVFTHDSIGLGEDGPTHQSVEHAASLRLIPNLDVWRPADTAETTIAWTKALLNVDRPTALLLSRQNLPYLPKAGLDEVARGAYVLAEPAEVGLKRKAQAVLIATGSEVQLALHAQQQLAAAGIAVRVVSMPSTTTFDRQDVAYKRRVLPDGLPRVAVEAGVTDGWWKYGCAAVIGLDTYGESAPAGALFKHFGFTAENVAATVRRVLKK

SEQ ID NO: 27633 - protein, 310 aa, Chaetosphaeria innumera
GAGNNWAKGHYTEGAELVDQVLDVVRREAEGCDCLQGFQITHSLGGGTGAGMGTLLISKIREEFPDRMMATFSVVPSPKVSDTVVEPYNATLSVHQLVENSDETFCIDNEALYDICMRTLKLNNPSYGDLNHLVSAVMSGVTTCLRFPGQLNSDLRKLAVNMVPFPRLHFFMVGFAPLTSRGAYSFRAVTVPELTQQMFDPKNMMAASDFRNGRYLTCSAIFRGKVSMKEVEDQVRNVQSKNSSYFVEWIPNNVQTALCSIPPRGLKMSSTFVGNSTAIQELFKRVGEQFTAMFRRKAFLHWYTGEGMDE

SEQ ID NO: 27634 - protein, 311 aa, Cercophora newfieldiana
SGAGNNWAKGHYTEGAELVDQVLDVVRREAEGCDCLQGFQITHSLGGGTGAGMGTLLISKIREEFPDRMMATFSVVPSPKVSDTVVEPYNATLSVHQLVENSDETFCIDNEALYDICMRTLKLSNPSYGDLNHLVSAVMSGVTVSLRFPGQLNSDLRKLAVNMVPFPRLHFFMVGFAPLTSRGAHSFRAVSVPELTQQMFDPKNMMAASDFRNGRYLTCSAIFRGKVSMKEVEDQMRNVQNKNSSYFVEWIPNNVQTALCSIPPRGLKMSSTFVGNSTAIQELFKRIGEQFTAMFRRKAFLHWYTGEGMDE

SEQ ID NO: 27635 - protein, 634 aa, Photorhabdus luminescens subsp. laumondii TTO1
MNDNIARKMQQTYNIAYWGGSYYYVNDLGNVSVCPNPDLPGAKIDLAELVKRVQQEQKHLRLPALFCFPQILQHRLRSINAAFKRARESYGYKGDYFLVYPIKVNQQRRVIESLASSGEPLGLEAGSKAELMAVLAHAGMTRTVIVCNGYKDREYIRLALIGEKLGHKVYLVIEKMSEIAQVLEEAERLNVIPRLGVRARLASQGSGKWQASGGEKSKFGLAATQVLQLVETLRAVDRLDSLQLLHFHLGSQLANIRDIATGVRESARFYVELHKLGVNIQCFDVGGGLGVDYEGTRSQSDCSVNYGLNEYANNVIWGIGDACDEHGLPHPTVITESGRALTAHHTVLVSNVIGVERNEFTQTTPPAEDASRPLTSLWETWQEMHSEGNRRSLRESLHDGQLDLHDVHTQYAHGMLDLTERAWAEELYLNICRRIQQDLDPSNRAHRPIIDELQERMADKFYVNFSLFQSLPDAWGIDQLFPVLPIEGLDKPLDRRAVLLDITCDSDGIVDHYVDGDGVAATMPMPAYDPDCPPMIGFFMVGAYQEILGNMHNLFGDTAAIDVYVFDNGEVTYNQSEEGDSVADMLQYVKLDPNVLMARFRDQVKGADLDTGLQEQFLLEFESGLYGYTYLEDE

SEQ ID NO: 27636 - protein, 1657 aa, Frankia sp. CcI3
MATASALSSALSLTAQMMRPRPERPDMGGLLIAQRQRTGTVRLSRAPRITFGFRGIPPGRRRIDLWLMRQLDDLVGGIWPLMSGTGGRARAVARSSTSRTSRLVLGSAGARVLVVGTGGLGGPGVDRAGEVGAVVARAVAAVGGVFVERCGLAEESLRTVVDPATPLDLGEALAAAVEQATEALLVYYAGIVLVDADGMIHLATAVSDSRPHRLAYTALPLSSVLATMATSRAATRLIAVDGLWVRTTVANSTVPPVPPRVPGLREDVPGPREDAGGGVNAAGDGVELLVLTSPLAAHTGPAADDGPPLSAGLVRLLVNGDPDGPVELSVGQVTRRLAQRLTAAGNAVLHSAAAWSDGVILAGNAAHTPPIADLEPAPTTVLTDGPGPVVTPTPRQPAGLPSAPDGGGTTGEAACPYPGLASFDAGTQRWFFGRERATAEALSRLEERLDGAGPLVLVGASGSGKSSLLGAGLLPALARGAVAGARGWPQVLMTPTDHPARELARTVAQAAGLSVLAAARLDVVSQPARFVGALSDLLALGPAAAGGGTTPPTRRVVIVVDQFEETFTLCADEEERGAFIRALVAACRGDGATRPPAVVVIGVRADFYGWCAAYPELVDALQTGQVVVGPMTAAEVRDAIVKPAEAVGLTVEPGLVDLMLHDIGADEHGVVADPGSLPLLAHALRATWRERENGTLTVAGYLRAGGLRGAIARTAEETFGTLDAAGQDAAWQILLQMIQFGDGTDDTRRRVSRTELLSTSASAQNSASAQNSASAQNSASAQNSASAQNVSAVLDALVAARLVTVDADTVEISHEALLRSWPRLREWIEVDRAAAVTRQRLTDAAATWDDGGRDPSYLFAGSRLATVREWAQAGQRQTALSPVARDFLAASLAAEQAARRAEVRRTRRLHQLVAALTVLTLIAGGAMAFAFRQRAQIAGERDRALSVAIGRQADQLRRSDPLAAAQLGAVAYRLAPTAEARSAVLSTFASDYGFATRHLGTQTRPIGAVAYSRDGRLVATASDDWTVALWSASDPTRRTPLSTIRGHRLAVKSVAFSPDGRFVATGSDDRTVRLWTITDPTHPVLAATLPGASDSIHGLAFRSDSRVLATGGYGSQVRLWDVSDVSAIRPAGAITAHTANVRAVAFSPDGTELLTGGDDGRALLWDVRDLAAPAELSELKGEAGPNVVLSANTAVRAVAISPDGKTAVTGSDDTTARVFDLTDPRRPTTLQVIDEVRSVEAVAVNVDGLVAVGVNSAVEIYDPSRHFDAIAVLPHASKPWALAFSPDGRTLASGADDRTLRLWDVPGPVLVGHHRFLWSTAVHPNGRVLATGDYGQTVRLWDAHDPDRPLPAATLTGFNAAVGSVRFTPNGRVLIAGSLDYATDFDGMVTLWDVADIHRPRLLSTIHPGIGGIKDLEVSPDGRTLALAGTSARLALVDISAPATPRGRSVLAGHRYDVATVSFSPDGRTLASGSSDRTIRLWDITTPDRPAGISTITGFTSALITIAFSRDGRTLAVGSFDTKVALWDVTDRRAPRALPSIIGLGAGVNSIEFSSDGRLMAAGVGGANGVVRLWDMSDPADPVPYATFSGRYNGFAAVAFAPDTAFIVGAPYQVIGFVWDLDPASVVTRLCARAGDPLTREEWKQYLPGLDYDPPCG

SEQ ID NO: 27637 - protein, 474 aa, Triticum aestivum
  misc_feature (207)..(207): Xaa can be any naturally occurring amino acid
  misc_feature (255)..(255): Xaa can be any naturally occurring amino acid
  unsure (1)..(474): unsure at all Xaa locations
MAGAAAAAAAVASGISIRTVAAPKISRAPRSRSVVRAAVSLGEKAYTVQKSEEIFNAAKELMPGGVNSPVRAFKSVGGQPIVFDSVKGSHMWDVDGNEYIDYVGSWGPAIIGHADDEVNAALIETLKKGTSFGAPCALENVLAQMVISAVPSIEMVRFVNSGTEACMGALRLVRAFTGREKILKFEGCYHGHADSFLVKAGSGVATXLGLPDSPGVPKGATVGTLTAPYNDAEAVKKLFEDYKGARAAVFLEPVXVGNAGFIPPQPASLNALREVTKQDGALLVFDEVMTGFRLAYGGAQEYFGITPDVTTLGKIIGGGLPVGAYGGRKDIMEMVAPAGPMYQAGTLSGNPLAMTAGIHTLKRLMEPGTYEYLDKVTGELVQGILDAGAKTGHEMCGGHIRGMFGFFFAGGPVHNFDDAKKSDTAKFGRFHRGMLEEGVYLAPSQFEAGFTSLAHTTLDIEKTVEAAEKVLRRI

SEQ ID NO: 27638 - protein, 161 aa, Thinopyrum intermedium
FGSVYKGVLREPEKEVAVKRMSHDSRQGVKEFIAEVLSIGRLRHRNLTQLLGYCRRKDELLLVYEYMENGSLDKYLHSRNGQLLCWSQRYSIIKGVASSLLYLHEDWEQVVIHRDIKASNVLLDSKMNGRLGDFGLARIYDHETTAETTHVSGTMGYIAPE

SEQ ID NO: 27639 - protein, 308 aa, Schizosaccharomyces pombe
MSESRQELLAWINQVTSLGLTRIEDCGKGYAMIQIFDSIYQDIPLKKVNFECNNEYQYINNWKVLQQVFLKKGIDKVVDPERLSRCKMQDNLEFVQWAKRFWDQYYPGGDYDALARRGNRGPANTRVMNSSAGATGPSRRRQVSSGSSTPSMTKSSANNNNVSSTANTAAVLRAKQAQQQITSLETQLYEVNETMFGLERERDFYFNKLREIEILVQTHLTTSPMSMENMLERIQAILYSTEDGFELPPDQPADLTTALTDHDTNNVAEEAQMTDLKDSETQRVPSAPDFVHARLQSLEVDDDENITF

SEQ ID NO: 27640 - protein, 548 aa, Buchnera aphidicola (Rhopalosiphum maidis)
MAAKDEKFGNEARIKMLRGVNVLADAVKVTLGPKGRNVVLDKSFGAPSITKDGVSVAREIELEDKFENMGAQMVKEVASKANDAAGDGTTTATLLAQSIVNEGLKAVAAGMNPMDLKRGIDKAVISAVEELKNLSVPCSDSKAITQVGTISANADEKVGALIAEAMEKVGNDGVITVEEGTGLQNELEVVKGMQFDRGYLSPYFINKPETGVVELENPYILMADKKISNVREMLPILESVAKSGKPLLIISEDLEGEALATLVVNSMRGIVKVAAVKAPGFGDRRKAMLQDISVLTGGSVISEELAMDLEKSTLEDLGQAKRVVINKDTTTIIGGVGEKQAIQSRISQIRQEIQEATSDYDKEKLNERLAKLSGGVAVLKVGAATEVEMKEKKARVEDALHATRAAVEEGVVAGGGVALVRVAGKISNLRGHNEDQNVGIRVALRAMEAPLRQIVSNSGEEPSVVTNNVKDGKGNYGYNAATDEYGDMIDFGILDPTKVTRSALQYAASVAGLMITTECMVTDLPKEDKTSDASSSPAGGMGGMGGMM

SEQ ID NO: 27641 - protein, 59 aa, Taraxacum officinale
KVRKLQYIAELEKNVQALQAEGSEVSAEVEFLNQQSIILGMENKALKQRLESLAQEQLI

SEQ ID NO: 27642 - protein, 458 aa, Oryza sativa (japonica cultivar-group)
MGISSESPNGSQQIVQKETRDETTPLLPVKVEEEGFHEFNGASFSGAVFNLSTTIVGAGIMALPASIKMLGIIPGILMIIVVALLTEASIDMLVRCSHQGKITSYGWLMGEAYGQWGRIALQASVVINNIGVMIVYMIIIGDVLSGTSSTGVHHRGILEGWFGAHLWNSRAIVLLATTLFVFAPLVSFKRLDSLRYTSALSVALAVVFVVITAGIAIIKLFNGTVAMPKLFPELDGLSSIWKLFTAVPVLVTAYICHYNVHSIDNELEDRTQIKPIVRTSLFLCSSVYIATSFFAYLLFGEGTLDDVLANFDANLGIPFSSVFDDIVRVSYAAHVMLVFPIVFFALRLNLDGLLFPTSRHISRDNKRFAIITISLLTVIYLAAIFIPSIWDAFQFTGATAAVLIGFIFPAMVILRDPYGIASKRDKILAVTMIVLAVLSNSVALYSDAMNIFRKEEEA

SEQ ID NO: 27643 - protein, 284 aa, Nicotiana glauca
MAKNVGSEGSFTTKDYQDPPPAPLIDPVELTQWSFYRALIAEFIATLLFLYITVLTVIGYKSQSATTTDPCAGVGILGIAWAFGGMIFVLVYCTAGISGGHINPAVTFGLFLARKVSLIRAVMYMVAQCLGAICGVGLVKALQSAYYHRYDGGVNMLSDGYSHGVGLSAEIIGTFVLVYTVFSATDPKRNARDSHIPVLAPLPIGFAVFMVHLATIPITGTGINPARSLGAAVIFNQHKAWKDHWIFWVGPFIGAAIAAFYHQFILRAGAAKALGSFRSSTSQV

SEQ ID NO: 27644 - protein, 203 aa, Pleurocapsa sp. PCC 7314
VHSNLRLVVSIAKKYMNRGLSFQDLIQEGSLGLIRAAEKFDHEKGYKFSTYATWWIRQAITRAIADQSRTIRLPVHLYETISRIKKTTKLLSQERGRKPTEEEIATRMEMTIEKLRFIAKSAQLPISLETPIGKEEDSRLGDFIEADGETPEDQVSKSLLREDLESVLDTLSPRERDVLRLRYGLDDGRMKTLEEIGQIFNVT

SEQ ID NO: 27645 - protein, 671 aa, Hypocrea jecorina
MARADQPQDKTKTEQRIGAYTVVRTLGEGSFGKVRLAIHNGTGQKVALKIITRKKLISRDMAGRVEREIEYLQLLRHPHIIKLYTVIKTPSEIIMVLEYAGGELFDYIVQNGRMKEAEARRFFQQMICAVEYCHRHKIVHRDLKPENLLLDENLNVKIADFGLSNIMTDGNFLKTSCGSPNYAAPEVIGGKLYAGSEVDVWSCGVILYVLLVGRLPFDDEHIPSLFAKIARGTYSMPQWMPPGAAALIKGMLVVNPVQRMTIDEIRADPWFNTDLPAYLQPPVEEFFNTGVDPNKAIKKSDIAPNAPEKVQEKLHNEVTEKISKTMGYGKDDVEEALQSDEPSAIKDAYMIVRENKLMLANNPDAGLTGDEGSPMMSISSTRSAISPGGASPRPYVTKIGILPSSLPAYHKDYMEREKNGTGHDPVTPAITINDELPVTRTEVEKEEAARRLNPHSRSALRLDESSKRPQGMTPITAPVKKPKPVRWQFGIRSRNAPWEALLCIHKALNKLGASHLRDEGYDEAQRRGVEDATSRDSSFANGAPLERDPNGHDKDPTKRYKLPADPWHIQVRWPSTSMQAGADRRDELGSKAGSPDSFVYTRGDAASRKDFVALHMDIQIYEMEQGVYLVDFKCSGYETQDGRLLEEKEVTSPFPFLDRAAKLIMQLAEAD

SEQ ID NO: 27646 - protein, 55 aa, Arabidopsis thaliana
MGLVTVEARTCETSSNLFNGPCLSSSNCANVCHNEGFSDGDCRGFRRRCLCTRPC

SEQ ID NO: 27647 - protein, 356 aa, Arabidopsis thaliana
MVQTETDQRMGLNLNLSIYSLPKPLSQFLDEVSRIKDNHSKLSEIDGYVGKLEEERNKIDVFKRELPLCMLLLNEAIGALKDEARKGLSLMASNGKFDDVERAKPETDKKSWMSSAQLWISNPNSQFRSTNEEEEDRCVSQNPFQTCNYPNQGGVFMPFNRPPPPPPPAPLSLMTPTSEMMMDYSRIEQSHHHHQFNKPSSQSHHIQKKEQRRRWSQELHRKFVDALHRLGGPQVATPKQIRDLMKVDGLTNDEVKSHLQKYRMHIRKHPLHPTKTLSSSDQPGVLERESQSLISLSRSDSPQSPLVARGLFSSNVGHSSEEDEEEEDEEEEKSDGRSSCRNDETKKKRQVLDLEL

SEQ ID NO: 27648 - protein, 58 aa, Taraxacum officinale
EAANHPTDPEADEILSKKGVIILPDIFANSGGVTVSYFEWVQNIQGFMWDEEKVNTEL

SEQ ID NO: 27649 - protein, 156 aa, Nicotiana glauca
FILVYCTAGISGGHINPAVTFGLFLARKVSLIRAVLYMVAQCLGAICGVGFVKAFQSAYYVRYGGGANVMAPGHTKGVGLAAEIIGTFVLVYTVFSATDPKRNARDSHVPVLAPLPIGFAVFMVHLATIPITGTGINPARSFGAAVIYNHDKAWDE

SEQ ID NO: 27650 - protein, 188 aa, Pleurocapsa sp. PCC 7327
MNRGLSFQDLIQEGSLGLIRAAEKFDHEKGYKFSTYATWWIRQAITRAIADQSRTIRLPVHLYETISRIKKTTKILSQEMRRKPTEEEIATRMEMTIEKLRFIAKSAQLPISLETPIGKEEDSRLGDFIEADGETPEDEVSKNLLREDLENVLDTLSPRERDVLRLRYGLDDGRMKTLEEIGQIFNVT

SEQ ID NO: 27651 - protein, 291 aa, Candida albicans SC5314
MQYKSSGATSKLSQVEIIPAKTDVGALANRINLETRSLHDRADKTVTLKFALALRNYKVYRQGLQAFYHVFASIEKALYRQLEKKDEWSEMLEQVWKPEIARAGKAEQDLLFFYDDNKEKFIKPIMPAQIEFCKHILEVTEEKPYLLFAYLHVMYLALFAGGRIMRSSVLKATGMYPQRDGLSHDDVVRMGTNFFTFDVPDEDLLRLTYKRDYELVTRNGLTEEQKLEIIEESKYIFEHDVKCVAELEKHNMDKLSGTWTYFLVTRGYYAALVLFSLLALIYLRRVVNKLT

SEQ ID NO: 27652 - protein, 203 aa, Leptolyngbya sp. PCC 7375
VQSNLRLVVSIAKKYMNRGLSFQDLIQEGSLGLIRAAEKFDHEKGYKFSTYATWWIRQAITRAIADQSRTIRLPVHLYETISRIKKTTKLLSQELGRKPTEEEIATRMEMTIEKLRFIAKSAQLPISLETPIGKEEDSRLGDFIESDGETPEDEVSKSLLREDLEGVLSTLSPSERDVLRLRYGLDDGRMKTLEEIGQIFNVT

SEQ ID NO: 27653 - protein, 318 aa, Salmonella typhimurium LT2
MTPIAVTLLTGFLGAGKTTLLRHILNEQHGFKIAVIENEFGEVSVDDQLIGDRATQIKTLTNGCICCTRSNELEDALLDLLDSRDRGDIAFDRLVIECTGMADPGPIIQTFFSHDVLCERYLLDGVIALVDAVHANEQMNQFTIAQSQIGYADRILLTKTDVAGDSEKLRERLARINARAPVYTVVHGDIDLSQLFNTSGFMLEENVLASQPRFHFIADKQNDVSSIVVELDYPVDISEVSRVMENLLLESADKLLRYKGMLWIDGEPNRLLFQGVQRLYSADWDRPWGDETPHSTLVFIGIQLPEDEIRAAFVGLRK

SEQ ID NO: 27654 - protein, 600 aa, Yarrowia lipolytica CLIB122
MENHKNDPECNAAKAAAANIFPASPMANSMMFGSSYSQSYNKSFMKRHSGEYNRHSGEYRHSGESNRFSGDFQRVNEDLESASETTHLNPRPARPSMAVSSSSEPSTNHASNNTIREPSDTPVYGTTAASISTTSLDPEDNVWEDVPSQKRSQDVRELKILWQYSLPLAVTFLLQYSLTVASIFSVGHLGKEELGAVSLACMTSNITGFALFQGLSTCLDTLCCQAYGAGNMRKVGIYFQQCVCMSILVFLPIAAIWMCSEPLLALIIPEGQLAALAALYLQIVALGVPGYIVFECGKKYLQAQGIFMAGTYVLAICAPLNAFLNWLLVWDKHVGIGYAGAPVAVVITEWAMAILIIAYIAFVDGRQCWFGISPRAAFSNWGPMLRLAIPGVIMVEAEFLAFEILTLASSYFGSAALAAQSVLSTVMALAYQIPFSVAIAASTRVAHFIGAAQPQSAKRAARIALYSTVLISTFNCTTLFLFRRPIAGLFSSDVDVVNLVAFVLPLCAIGQFFDCISSVVAGVLRGQGRQKIGGYVNLFYYYAVATPLSLFFGFICKWELMGLWAGIIVGIVGIAATEAYFVLTSDWNAIIEKNAAMHRD

SEQ ID NO: 27655 - protein, 344 aa, Oryza sativa (japonica cultivar-group)
VVFIGGRTQPGTIKPEEEGERHPYSVLDCAAQREAILPSVLYIQKTLRRRPFLIKNLENVMRKFLQSLEFFEENERKKLAIFTALAFSQKLSGLPPETVFQPLLKDNLVSKGIVLSFITEFFKEYLKENTLDDLIALLKKGKMEDNLLEFFPSAKRTSEALSEHFTKEGLTSLVEYNEKKMFEVKLKEIKLTLTTMINEEAEISEVTEAVKQQVKDAKFPDIEVVRMLWDVLMEAVQWSGKNQQQNSNSALRQVKAWAGLLNAFCTSGRLELELIYKVQTQCYEDAKLMKLFPEIIRTLYDQDVLAEDTILLWFRKGSNPKGRQSFVKALEPFVKWLEEAEEEE

SEQ ID NO: 27656 - protein, 203 aa, Pseudanabaena sp. PCC 7403
VQSNLRLVVSIAKKYMNRGLSFQDLIQEGSLGLIRAAEKFDHEKGYKFSTYATWWIRQAITRAIADQSRTIRLPVHLYETISRIKKTTKLLSQEMGRKPTEEEIATRMEMTIEKLRFIAKSAQLPISLETPIGKEEDSRLGDFIESDGETPDDQVAKSLLREDLESVLGTLSPRERDVLRLRYGLDDGRMKTLEEIGQIFNVT

SEQ ID NO: 27657 - protein, 371 aa, Bordetella parapertussis 12822
MTVSLAILFVVTTLRPDWLRLSGPAPATRAPAAAASGQAGASYADAVARAAPAVVNVYTTKHVNVPLVPLPDDPVLRQLFGQVPGLSRREASTSLGSGVIVSAEGYVLTNYHVVEAADAIEVALADGRQAAAKVVGADPETDLAVLKLAGKLGELPVATFADKRAPRVGDVVLAIGNPFGVGQTTTQGIVSALGRNGLGINTYENFIQTDAAINPGNSGGALIDAHGDLVGINTAIYSETGGSLGIGFAIPVDSARRVMEDIVRTGAVRRGWFGIEPQDMTPELARAFQLPREARGVIIAGVMRDGPAGKAGMRVGDIVQALNGAPVIDTRGLLGQIASLQPGQQAVASVLRAGKPVELKVTVGVRPSRPR

SEQ ID NO: 27658 - protein, 247 aa, Ipomoea nil
MGRGRVQLKRIENKINRQVTFSKRRTGLLKKAHEISVLCDAEVALIVFSTKGKLFEYATESCMEKILERYERYSYAERQLNSTDQNSQGSWTLEHAKLKARMEVLQRNQRHYEGEDLDSLSLKELQNLERNLIQHSNIRSKRNQLMYESILCSEKDKHCRTKYQLSKKIKEREKEMATQQQQQQEVQWEQPNDDINSSYVVPPPLVHLSSEGEYQGEGEYGETEGTQRQQQNNTSAMPQWMLSHLQG

SEQ ID NO: 27659 - protein, 469 aa, Lactobacillus plantarum WCFS1
MAMLYGKHNHEAEEYLEPVFGAPSEQHDLPKYRLPKHSLSPREADRLVRDELLDEGNSRLNLATFCQTYMEPEAVELMKDTLAKNAIDKSEYPRTAEIENRCVNIIANLWHAPDDEHFTGTSTIGSSEACMLGGLAMKFAWRKRAQAAGLDLNAHRPNLVISAGYQVCWEKFCVYWDVDMHVVPMDEQHMALDVNHVLDYVDEYTIGIVGIMGITYTGQYDDLAALDKVVTHYNHQHPKLPVYIHVDAASGGFYTPFIEPQLIWDFRLANVVSINASGHKYGLVYPGVGWVVWRDRQFLPPELVFKVSYLGGELPTMAINFSHSAAQLIGQYYNFIRFGMDGYREIQTKTHDVARYLAAALDKVGEFKMINNGHQLPLICYQLASREDREWTLYDLSDRLLMNGWQVPTYPLPANLEQQVIQRIVVRADFGMNMAHDFMDDLTKAVHDLNHAHIVYHHDAAPKKYGFTH

SEQ ID NO: 27660 - protein, 57 aa, Perilla frutescens
MGRGRVQLKRIENKINRQVTFSKRRAGLLKKAHEISVLCDAEVALIVFSHKGKLFEY

SEQ ID NO: 27661 - protein, 375 aa, Bacillus cereus ATCC 10987
MADKPARSKQIETEMTLEQVKEQLTELGKKRGVLTYEEIAERMNGFEIESDQMDEYYEYLGEQGIDLVGDNDNDEGPNNRQIAKSEEEFDLNDLSVPPGVKINDPVRMYLKEIGRVDLLSAEEEIRLATRIEEGDEEAKRRLAEANLRLVVSIAKRYVGRGMLFLDLIQEGNMGLIKAVEKFDYRKGFKFSTYATWWIRQAITRAIADQARTIRIPVHMVETINKLIRVQRQLLQDLGREPSPEEIGEEMDLAPEKVREILKIAQEPVSLETPIGEEDDSHLGDFIEDQEATSPADHAAYELLKEQLEDVLDTLTDREENVLRLRFGLDDGRTRTLEEVGKVFGVTRERIRQIEAKALRKLRHPSRSKRLKDFLE

SEQ ID NO: 27662 - protein, 328 aa, Escherichia coli O157:H7 EDL933
  misc_feature (121)..(121): Xaa can be any naturally occurring amino acid
  unsure (1)..(328): unsure at all Xaa locations
MGQLIDGVWHDTWYDTKSTGGKFQRSASAFRNWLTADGAPGPTGTGGFIAEKDRYHLYVSLACPWAHRTLIMRKLKGLEPFISVSVVNPLMLENGWTFDDSFPGATGDTLYQHEFLYQLYXHADPHYSGRVTVPVLWDKKNHTIVSNESAEIIRMFNTAFDALGAKAGDYYPPALQTKIDELNGWIYDTVNNGVYKAGFATSQQAYDEAVEKVFESLARLEQILGQHRYLTGNQLTEADIRLWTTLVRFDPVYVTHFKCDKHRISDYLNLYGFLRDIYQMPGIAETVNFDHIRNHYFRSHKTINPTRIISIGPWQDLDEPHGRDVRLG

SEQ ID NO: 27663 - protein, 309 aa, Chaetosphaeria callimorpha
AGNNWAKGHYTEGAELVDQVLDVVRREAEGCDCLQGFQITHSLGGGTGAGMGTLLISKIREEFPDRMMATFSVMPSPKVSDTVVEPYNATLSVHQLVENSDETFCIDNEALYDICMRTLKLSNPSYGDLNYLVSAVMSGVTTCLRFPGQLNSDLRKLAVNMVPFPRLHFFMIGFAPLTSRGAHSFRAVTVPELTQQMFDPKNMMAASDFRNGRYLTCSAIFRGKVSMKEVEDQVRNVQNKNSSYFVEWIPNNVQTALCSIPPRGLKMSSTFVGNSTAIQELFKRVGEQFTAMFRRKAFLHWYTGEGMDE

SEQ ID NO: 27664 - protein, 212 aa, Arabidopsis thaliana
MGRSPCCEKAHMNKGAWTKEEDQRLIDYIRNHGEGSWRSLPKSVGLLRCGKSCRLRWINYLRPDLKRGNFTDGEEQIIVKLHSLFGNKWSLIAGKLPGRTDNEIKNYWNTHIKRKLLNRGIDPKTHGSIIEPKTTSFHPRNEDLKSTFPGSVKLKMETSCENCASTSGTTTDEDLRLSVDCDYRYDHLDKELNLDLTLGYSPTRFVGVGSCY

SEQ ID NO: 27665 - protein, 86 aa, Glycine max
AKKRKCIANSLDDVDRTLYTSGCTGANCLLQVYTHFMDHQKLFFNGGERHGLEKNYKGIFRPQGRGSRGGTSDGLNYIQNGVDYWG

SEQ ID NO: 27666 - protein, 636 aa, Physcomitrella patens
MASEVAKPVENGIHPKLEQSFDAPAATKPSNSELLKLHRDGVPFVMPSKRGIDTTAPDFDPQDFLDLLAEDVMFIQHEKLREILEVQADVEYLRRVGLNGRTDVESFRKCVPIVSYGDLEADIMRVVNGEKTPIFTVDPIVTLNLSSGTTAGKPKFIPSTTRAYEYFMFLQTFVTSIYRREFPGYKDGTSFTLAFAGKQIDTPSGIKAGAQSTNHFRGPMFRNRVRNANREYCVPDEVILSDDTTQSMYCHLLCALAQAPEIVKVYGTFAASIVSAVRALQKHWSEIVEDIRTGTLNAKITEPEMRTAVQQMLHPNPDLASRIEEECSKDNWEGILPRLFPNAHFVSCVISGSMLQYAPALKHFSGHLPTISLAYAACECSFIGFNPSMKCAPEDITYMLWPETAYYEFIPLDEDSNPEQDGDVVRTVEACDLEVGRQYELVVTNVIGLYRYRLGDVLTMKRFHKTAPVFEFVRRKNVILSVHTDKTDEKELQSVVNLATEALAGTGMELSDYTSTADVSTLPGRYVIFWEMVDSSDLDYDVLQHCANTLDANFNSDYRRWRSGHQIGPLELRIVKEGTFNRVMDSAVARGASPSQYKPPRCVNNPHTRQILDDGLVASFHSTITPNPAPIALTGS

SEQ ID NO: 27667 - protein, 311 aa, Chaetosphaeria chalaroides
SGAGNNWAKGHYTEGAELVDQVLDVVRREAEGCDCLQGFQITHSLGGGTGAGMGTLLISKIREEFPDRMMATFSVVPSPKVSDTVVEPYNATLSVHQLVENSDETFCIDNEALYDICMRTLKLSSPSYGDLNHLVSAVMSGVTTCLRFPGQLNSDLRKLAVNMVPFPRLHFFMIGFAPLTSRGAYSFRAVTVPELTQQMFDPKNMMAASDFRNGRYLTCSAIFRGKVSMKEVEDQVRNVQSKNSSYFVEWIPNNVQTALCSIPPRGLKMSSTFVGNSTAIQELFKRVGEQFTAMFRRKAFLHWYTGEGMDE

SEQ ID NO: 27668 - protein, 599 aa, Physcomitrella patens
MALRIENPYYKLLDTDEEIVEDFELMSRNARETQLELLRKILERNANVEYLQRQGLNGRTDEASFKACVPVSTYANIEADVDRIADGDTSPICCVDPPTSFALSSGTTGGKCKLIPRTDALLAQAMKAGQIGSVYRRRAFPRKHEGPPVVMSFQYAGRQFDTKSGLKAGTGTTNFYRSAAFKNAKSAPFSATSPVDIVLGYDVPQQMYCHLLCGLYRCQEVEQMSAIFAYMIVEPFRLLERVWRDICKDIREGTVNERVSDPELRSSVLKVLSPNPELADLIERECAKGWSGIIERLFPNINYIMSIFSGSMLPYVAPMRQYAGSVPLMNADYGASEAWIGINLDPRCPAEDASFTIIPNFAYFEFIPVNRDSAGYDSVEGDEIVGLTDVKVGQEYEIVLTTVGGLYRYRLGDIVKVTGFFNSTPKVAFVCRKGVVLSVNTDKTDEEELRLVVGKASLLLKESNMELADYSSYTDQDSQPGHYVIFWELRSHEHLDMDLLSECCKVLDQSFNNPYMRGRAARTIGPLELAIVKEGAFARLMEQFVRKNGVGASQYKVSRCFKNPATLKHFRDETIATLRSPDFPPELLAAWRPSTKIVG

SEQ ID NO: 27669 - protein, 389 aa, Sinorhizobium meliloti
MFDALARQADDPLLALIGLFRKDERPGKVDLGVGVYRDETGRTPIFRAVKAAEKRLLETQDSKAYIGPEGDLVFLDRLWELVGGDTIERSHVAGVQTPGGSGALRLAADLIARMGGRGIWLGLPSWPNHAPIFKAAGLDIATYDFFDIPSQSVIFDNLVSALEGAASGDAVLLHASCHNPTGGVLSEAQWMEIAALVAERGLLPLVDLAYQGFGRGLDQDVAGLRHLLGVVPEALVAVSCSKSFGLYRERAGAIFARTSSTASADRVRSNLAGLARTSYSMPPDHGAAVVRTILDDPELRRDWTEELETMRLRMTGLRRSLAEGLRTRWQSLGAVADQEGMFSMLPLSEAEVMRLRTEHGIYMPASGRINIAGLKTAEAAEIAGKFTSL

SEQ ID NO: 27670 - protein, 548 aa, Buchnera aphidicola (Rhopalosiphum padi)
MAAKDVKFGNEARIKMLRGVNVLADAVKVTLGPKGRNVVLDKSFGAPSITKDGVSVAREIELEDKFENMGAQMVKEVASKANDAAGDGTTTATLLAQSIVNEGLKAVAAGMNPMDLKRGIDKAVISAVEELKNLSVPCSDSKAITQVGTISANADEKVGALIAEAMEKVGNDGVITVEEGTGLQNELEVVKGMQFDRGYLSPYFINKPETGVVELENPYILMADKKISNVREMLPILESVAKSGKPLLIISEDLEGEALATLVVNSTRGIVKVAAVKAPGFGDRRKAMLQDISVLTGGSVISEELAMDLEKSTLEDLGQAKRVVINKDTTTIIGGVGEKQAIQSRISQIPQEIQEATSDYDKEKLNERLAKLSGGVAGLKVSAATEVEMKEKKARVEDALHATRAAVEEGVVAGGGVALVRVAGKISNLRGHNEDQNVGIRVALRAMEAPLRQIVSNSGEEPSVVTNNVKDGKGNYGYNAATDEYGDMIDFGILDPTKVTRSALQYAASVAGLMITTECMVTDLPKEDKTSDASSSPAGGMGGMGGMM

SEQ ID NO: 27671 - protein, 265 aa, Idiomarina loihiensis L2TR
MSSRPDPQDNLAIVAKLLEQLPAARPQLVVLPEAFSCFGAGDRAQLAMAEPYKDGEVQKQLAALAKKHEVYLVGGTLPVDAGERFSAASILFGPDGAILNRYDKIHLFDVDVADNTKEYRESKWTQPGSKVVTTETDFGVVGMAVCYDLRFPELFRALRQAGSQIIVLPSAFTQVTGKAHWHALVRARAIEQQVFIVAPGQVGEHANGRETFGHSIIVSPWGEILAEQELDEGVVSVSVDVADIEPIRKQMPVAQQNQFEVVQKT

SEQ ID NO: 27672 - protein, 406 aa, Nocardioides sp. JS614
MTLTTSQHIELAQRFAAHNYNPLPVVVTHAQGAWVTDIEGRRYLDCLAGYSALNFGHRHPELIAAACEQMKRLTMTSRAFHNDRMGPFCAALADLTGMDAVLPMNTGAEAVETAIKTARRWGNRVKGVRDGRQRIVVAESNFHGRTTTIVGFSSDDEARDGFGPFTPGFDVVPYGDTGALRAAVGPDTVAVLLEPIQGEAGVIVPPAGYLRDVRAICDGQGVLFIADEIQSGLGRTGTTFACEGEQVVPDVYVLGKALGGGILPVSAIAANRAVLDVITPGSHGSTFGGNPLACAVGHAVVQLLVTGEYQARAQMLGARLLDGLQSLTGDGVLAVRGRGLWVGIDVDPALASGRQLAERLLHLGLLVKDTHGSTVRLSPPLVIKRDEVDWLVDRFALALASLSAKS

SEQ ID NO: 27673 - protein, 264 aa, Leuconostoc mesenteroides subsp. mesenteroides ATCC 8293
MTLKIAIAQIDIALGKPAINEQTVIEYAQKAAAVEADILVYPEMWNTGYDLLNLETVSDPQGQRSVNLLRDLAKKYHLNIVGGSVATAQAENKFYNTMFVFNDKGEQVSEYNKLHLFGLMNEEKFMSAGNKTNLFNLADVPSAGAICYDIRFPEWLRTMMSQGPQEILYIVAEWPIQRIKQWQLLLQARAIENQTFVVAANRVGRDNDNTFGGRSLIIDPLGNIVQQASDDKVELLVAEININDEKAIRGEIPVFSDRRPELYR

SEQ ID NO: 27674 - protein, 387 aa, Shewanella sp. MR-4
MKQAVIVDCIRTPMGRSKAGVFRNVRAETLSAELMKGLLLRNPQLDPNTIEDVIWGCVQQTLEQGFNIARNASLLAGIPKTAGAVTVNRLCGSSMEAIHQAARAIMTGMGDTFIIGGVEHMGHVPMNHGVDFHPGLANNVAKASGMMGLTAEMLGKLHGITREQQDAFAVRSHQRAHAATVEGRFAKEIYGIEGHDANGALIKVLHDEVIRPETSMESLAALRPVFDPANGTVTAGTSSALSDGASAMLVMEESKARALGLPIRARIRSMAVAGCDAAIMGYGPVPATQKALARAGITVNDLDVIELNEAFAAQSLPCVKDLGLLDVVDEKINLNGGAIALGHPLGCSGARISTTLINLMEHKDATLGLATMCIGLGQGIATVFERV

SEQ ID NO: 27675 - protein, 996 aa, Arabidopsis thaliana
  misc_feature (919)..(919): Xaa can be any naturally occurring amino acid
  unsure (1)..(996): unsure at all Xaa locations
MEPTEKPSTKPSSRTLPRDTRGSLEVFNPSTQLTRPDNPVFRPEPPAWQNLSDPRGTSPQPRPQQEPAPSNPVRSDQEIAVTTSWMALKDPSPETISKKTITAEKPQKSAVAAEQRAAEWGLVLKTDTKTGKPQGVGVRNSGGTENDPNGKKTTSQRNSQNSCRSSGEMSDGDVPGGRSGIPRVSEDLKDALSTFQQTFVVSDATKPDYPIMYASAGFFNMTGYTSKEVVGRNCRFLQGSGTDADELAKIRETLAAGNNYCGRILNYKKDGTSFWNLLTIAPIKDESGKVLKFIGMQVEVSKHTEGAKEKALRPNGLPESLIRYDARQKDMATNSVTELVEAVKRPRALSESTNLHPFMTKSESDELPKKPARRMSENVVPSGRKNSGGGRRNSMQRINEIPEKKSRKSSLSFMGIKKKSESLDESIDDGFIEYGEEDDEISDRDERPESVDDKVRQKEMRKGIDLATTLERIEKNFVITDPRLPDNPIIFASDSFLELTEYSREEILGRNCRFLQGPETDLTTVKKIRNAIDNQTEVTVQLINYTKSGKKFWNIFHLQPMRDQKGEVQYFIGVQLDGSKHVEPVRNVIEETAVKEGEDLVKKTAVNIDEAVRELPDANMTPEDLWANHSKVVHCKPHRKDSPPWIAIQKVLESGEPIGLKHFKPVKPLGSGDTGSVHLVELVGTDQLFAMKAMDKAVMLNRNKVHRARAEREILDLLDHPFLPALYASFQTKTHICLITDYYPGGELFMLLDRQPRKVLKEDAVRFYAAQVVVALEYLHCQGIIYRDLKPENVLIQGNGDISLSDFDLSCLTSCKPQLLIPSIDEKKKKKQQKSQQTPIFMAEPMRASNSFVGTEEYIAPEIISGAGHTSAVDWWALGILMYEMLYGYTPFRGKTRQKTFTNVLQKDLKFPASIPASXQVKQLIFRLLQRDPKKRLGCFEGANEVKQHSFFKGINWALIRCTNPPELETPIFSGEAENGEKVVDPELEDLQTNVF

SEQ ID NO: 27676 - protein, 862 aa, Taxus baccata
MAQLSFNAALKMNALGNKAIHDPTNCRAKSERQMMWVCSRSGRTRVKMSRGSGGPGPVVMMSSSTGTSKVVSETSSTIVDDIPRLSANYHGDLWHHNVIQTLETPFRESSTYQERADELVVKIKDMFNALGDGDISPSAYDTAWVARVATVSSDGSEKPRFPQALNWVLNNQLQDGSWGIESHFSLCDRLLNTVNSVIALSVWKTGHSQVEQGAEFIAENLRLLNEEDELSPDFEIIFPALLQKAKALGINLPYDLPFIKSLSTTREARLTDVSAAADNIPANMLNALEGLEEVIDWNKIMRFQSKDGSFLSSPASTACVLMNTGDEKCFTLLNNLLDKFGGCVPCMYSIDLLERLSLVDNIEHLGIGRHFKQEIKVALDYVYRHWSERGIGWGRDSLVPDLNTTALGLRTLRTHGYDVSSDVLNNFKDENGRFFSSAGQTHVELRSVVNLFRASDLAFPDEGAMDDARKFAEPYLRDALATKISTNTKLYKEIEYVVEYPWHMSIPRLEARSYIDSYDDDYVWQRKTLYRMPSLSNSKCLELAKLDFNIVQSLHQEELKLLTRWWKESGMADINFTRHRVAEVYFSSATFEPEYSATRIAFTKIGCLQVLFDDMADIFATLDELKSFTEGVKRWDTSLLHEIPECMQTCFKVWFKLMEEVNNDVVKVQGRDMLAHIRKPWELYFNCYVQEREWLEAGYIPTFEEYLKTYAISVGLGPCTLQPILLMGELVKDDVVEKVHYPSNMFELVSLSWRLTNDTKTYQAEKARGQQASGIACYMKDNPGATEEDAIKHICRVVDRALKEASFEYFKPSNDIPMGCKSFIFNLRLCVQIFYKFIDGYGIANEEIKDYIRKVYIDPIQV

SEQ ID NO: 27677 - protein, 258 aa, Chlamydophila caviae GPIC
MATLVNFNDTNKLLLTKKPELFIDLASKDWIASANKSIKQRGAFYVALSGGRTPLEIFKEIVKNKDKISDPTKIFLFWGDERNVPHTSYESNYGQAMSILRDLYIPEEQIFRMETENPDGARKYQNLIESVVPEVSFDMVMLGIGEDGHTLSLFPNTQALKEQERLVVFNEVPQLETERMTLTLPTVHKAKHIVVYVQGENKKAIVSSVFFPKDKQPQPYPIELVGQAKTPLFWILAADAYDSKDFDSISPLYKLDII

SEQ ID NO: 27678 - protein, 446 aa, Nocardioides sp. JS614
MRQPPSLAGHRLAPEVHAHRRRARRLPRRAGETEPCRLRGLARIRSHRRRQPPSLPEPAAPRPRGHQLGRTHWRTRRIMSRLHRLFDEQGQSPWLDNLTRPHLRDGTLADLVARGVRGVTANPTIVAKAIEASDAYDDQFKDLLSAGHDIEDAYWELALTDVAHALQILRPTFHHSGGHDGFVSIEVAPQWARDIEATIADARYLHERIHQPNLLVKVPATAEGVHAVEALIGEGRSINVTLVFSLTRYREILDAYLSGMEAFALHGGDLTSIRSVASFFVSRVDTEVDRRLEELGTEEALALRGRAAIAQAKLAYQLFRSTHSGPRWARLARRGAQVQRALWASTSTKNPHYPDTLYVDNLIGPDTVNTLPEPTIDAFEDHGTVVRTVDAGLADANFVMHALSRVGIDMDDVGLTLERQGLATFAASVNHVLDALDAKAHVRSAI

SEQ ID NO: 27679 - protein, 397 aa, Synechococcus elongatus PCC 6301
MAANLLEQLRGMTVVVADTGGIQSIATFTPRDATTNPSLITAAAQMPQYQSIIDDTLRQVRTELGAEAPVEAIVAEAIDELFVAFGLRILEIVPGRVSTEVDARLSYDTEATIAKARKLIGLYERAGIRRDRVLIKIASTWEGIRAAEVLEKEGIHCNLTLLFGFHQAVACAEAGVTLISPFVGRILDWYKKESGRDAFPGAEDPGVQSVTQIYNYYKKFGYATEVMGASFRNISEIIELAGCDLLTISPGLLEELRQTEALLERKLDPAIAESLELEQIHLDRDRFAELHQADRMANEKLDEGIRGFCKAIDTLEGLLKQRLAVLEGKAVFHHAAHEVFSVCDLDGDGFITREEWLGSDAVFDALDLNKDGKLNEEDLLAGLGATLQMAGRAVATV

SEQ ID NO: 27680 - protein, 325 aa, Nostoc punctiforme PCC 73102
MSNSRVLCLGEILFDCLADQLGLKLEEVKSWTPYPGGAPANVACALVKLGTTAGFIGAVGEDEPGNALVKLLQDVGVDTTGVQRHPTAPTRQVYVTRDLAGDRTFAGFGQYDTAEFADTRLQAKQLPDALFQEADFLVLGTLELAYPESEQAIYRALELAEHYDLKIVLDINWRPVFWDEPKIAHQKIPELFKRVDFLKLSKEEAEWLFETADPGAITYRLASIEGVLVTDGENGCTYCLGENEGKLPSFSIPVVDTTGAGDSFLAGFIHQLSHYGIHSLRDAETAKRIVTYASAVGALTTIKPGAIASQPTDAEVEAFLASHQL

SEQ ID NO: 27681 - protein, 203 aa, Synechococcus sp. PCC 7001
VQSKFRLVVSIAKKYMNRGLSFQDLIQEGSLGLIRAAEKFDHEKGYKFSTYATWWIRQAITRAIADQSRTIRLPVHLYETISRIKKTTKTLSQEFGRKPTEEEIAESMEMTIEKLRFIAKSAQLPISLETPIGKEEDSRLGDFIEADIENPEQDVAKNLLREDLEGVLATLSPRERDVLRLRYGLDDGRMKTLEEIGQIFDVT

SEQ ID NO: 27682 - protein, 457 aa, Yersinia pseudotuberculosis IP 32953
MEQQLQNSSLKRGLKNRHIQLIALGGAIGTGLFLGIAQTINMAGPSVILGYAIGGFIAFLIMRQLGEMVVEEPVAGSFSHFAYKYWGDFAGFLSGWNYWAMFILVGMAELTAVGIYIQYWWPEIPTWVSAAVFFIIINAINLVNVRLYGETEFWFAIIKVAAIIGMIVFGAYLLASGSGGPAASVTNLWAQGGFMPHGFRGLIMAMAVIMFSFGGLEMVGITAAEAEDPRNSIPKATNQVVYRILIFYIGSLTVLLSLFPWNNVVEGGSPFVMIFDALDSPWVATALNVVVLTAALSVYNSGVYCNSRMLFGLASQGNAPKLLTKLNKRGVPIRSIALSALATSAGVVINYIMPGKAFELLMALVVSTLVINWVMICLAHLKFRKAKVKEGVVPRFKALWYPYGNYLCLVFLALILVIMYLTEGIRISVLMMPVWIALLWCGFVLTRRKCPKTVTSL

SEQ ID NO: 27683 - protein, 57 aa, Perilla frutescens
MGRGRVQLKRIENKINRQVTFSKRRSGLLKKAHEISILCDADVGLIVFSTKGKLFEY

SEQ ID NO: 27684 - protein, 253 aa, Glycine max
MDVSFVCLFFKGNIISFGVFLAPLPTFYQIYKKKSTEGFQSLPYVVALFSAMLWIYYAFVKREAALLLITINTFGIVVESIYLAIFLLYAPRKPRLTTIKLLLLLNVFGFGAMLLSTLYLSKGAKRLAIIGWICLVFNISVFAAPLFIIRRVIKTRSVEYMPFTLSMFLTINAVMWFFYGLLLRDYYVALPNTLGFVFGIIQMGMYLMYRNATPVALEEPVKAQELNGHIIDVGKMGTMEPNHAATAGAVGKV

SEQ ID NO: 27685 - protein, 222 aa, Nostoc punctiforme PCC 73102
MALFGFGKKQVMPTPEEALSGRAQSMSVPAAHYVNKNPLKAPYPDGLEKAIFGLGCFWGAERKFWQLKGVYTTAVGYAAGFTPNPTYEEVCSGRTGHNEVVLVVFDPKVISYSELLKVFWESHNPTQGMRQGNDAGTQYRSGIYVYSESQKQLAEASREAYQQALNDAGYGKITTEILDAPEFYYAEAYHQQYLAKNPNGYCGLGGTNVSCPVGVVESQVSS

SEQ ID NO: 27686 - protein, 624 aa, Pseudomonas syringae pv. phaseolicola 1448A
MLPQQAAAKTAVIQFGLFLIRRILMTTSESSSTSSVKIYFRLLSYVRPHVGIFLLSIIGFVIFASTQPMLAGILKYFVDGLTNPEAVLFPNVPYLRELQLLQAVPLLIVLIAAWQGLGSFLGNYFLAKVSLGLVHDLRVELFNKLLVLPNRYFDTTNSGHLISRITFNVTMVTGAATDAIKVVIREGLTVVFLFIYLLMMNWKLTLVMLAILPLIAVMVGSASKKFRKQSKKIQVAMGDVTHVASETIQGYRVVRSFGGESYEQNRFAQASDSNTRKQLRMTKTGAIYTPMLQLVIYSAMAVLMFLVLFLRGDATAGDLVAYITAAGLLPKPIRQLSEVSSTIQKGVAGAESIFEQLDVEEEVDTGTIERDRVTGHLEVKNLSFFYPQTERQVLNDISFSAAPGQMIALVGRSGSGKSTLANLIPRFYGHEMGNILLDGVEINDYRLRNLRKHIAQVNQNVTLFNDTIANNIAYGDLAGAPRADIEAAAADAYAKEFIDQLPQGFDTQVGENGVLLSGGQRQRLAIARALLKNAPLLILDEATSALDTESERHIQAALDHVMKGRTTLVIAHRLSTIEKADMILVMDAGQIVERGTHTELLAQNGYYARLHAMGLDEPSPVGAV

SEQ ID NO: 27687 - protein, 272 aa, Rubrivivax gelatinosus PM1
MKIAAVQMVSTPRVAENLARARALIGRAADAGAELVALPEYFCLMGQRDTDKLDVAEADGSGPIQDLLAAAARECGVWLVGGTLPLRIDGRRDRAHNTTLVFGPDGRRVARYDKVHLFRFDDGERRYDEAATLLPGATPVAIALTDRAGHTWRVGLSICYDLRFPELYRALCVPPCDLLLVPAAFTYPTGQAHWELLLRARAVENQCMVLAPAQGGRHENGRRTWGHTMIVGPWGDVLAVQAEDEGVVIASLDAARMAQVRAQLPALQHRVL

SEQ ID NO: 27688 - protein, 447 aa, Zea mays
  misc_feature (127)..(127): Xaa can be any naturally occurring amino acid
  misc_feature (153)..(153): Xaa can be any naturally occurring amino acid
  unsure (1)..(447): unsure at all Xaa locations
MVSSQPSSLTAILAQGPNHCPVKILLPMGPPDVVSSDNVEYDFSDVFGSTPVQTPTNLCGFGPESPAPTVESNEEFYSDPVVIINRSHSLVGPTSLVSRSLRLSKLSLGKNEGSSELVKCLSEEKEXGDQGQLSDEDLGNAMTGDGGIGLDDXEILKLVGQGAFGKVFQVRKKNTSEIYAMKVMRKDRILEKNHSEYMKAEREILTKVDHPFIVQLRYSFQTKYRLYLVLDFINGGHLFFQLYKQGLFREELARIYTAEIVSAVAHLHANGIMHRDLKPENILLDADGHAMLTDFGLAKEFCENTRSNSMCGTLEYMAPEIVLGRGHDKAADWWSVGILLFEMLTGKPPFVGNREKVQQKIIKDKLKLPSFLSSEAHSLLRGPSFRPNVAGLTCIANFDECWTKTPVLDSPVSTPAGGGHSNFAGFTYVRPAPILEEVNASGSRLKD

SEQ ID NO: 27689 - protein, 479 aa, Helicobacter hepaticus ATCC 51449
MSRVSIDKQAVAEFFRFCDENEVEFIDFRFSDIKGVWHHLSFSRNAINEESFEGIPFDGSSIPAWQPVDKSDMMLIPEPVRYFIDPFTADTTAVVFCDIWDIYNNKPYEKCPRSIVKRAMKYLKESGIGDIAYYGPENEFFVFDSIKIKDSVNCQYYEIDSEEGEWNRAREFEGGVNMGHRPGTKGGYFPVPPVDSMVDLRAEIVKVLNQVGLETFVLHHEVAQGQNEIGVKFGDMLEAADNVQKLKYVVKMVAHLNGKTATFMPKPLYGDNGSGMHVHISIWKDGHNLFAGEAYQGLSEMALHFLGGVLKHARALAAFTNPSTNSYKRLIPGFEAPSILTYSAQNRSASIRIPYNSGEKAKRMEFRFPDSSANPYLAFASLLLAGIDGIKNKIDPGAPMEINLFELTLDEIREKGIKQLPHTLRHAIEEMLVDKAYLKEGGVFSEEFIQTYKAYKFETEIWPWEARPHPFEFLTTYSC

SEQ ID NO: 27690 - protein, 250 aa, Lactobacillus plantarum WCFS1
MTGSWEARYAAEFFGTLILVLLGNGAVANAFLKNTTGNDDPGLANGGWLLVASGYGLGVMLPAMMFGSISGNHLNPAITIGQAVIGIFPWAHVAPYLIWQFLGAIAGQCLILALYWPHYRQTTDNEAVLGTFATSDHANSQLNGFVTEMVGTAVLIFGAMGLYRGMFFHQNIDIANIGVGLLIAAMVISLGGPTGPALNPARDLGPRLVHALFPVPNKGSSHWEYSWVPVVAPIVGAVIGIWIYKIFFGL

SEQ ID NO: 27691 - protein, 498 aa, Rhodospirillum rubrum
MFLGIDCGTQGTKALILDDSGAIRGVGHAAHRLIERESGAREQDPAWWVQAAIGAVKGALAEAGIDGSAVRALAFSGQQHGLVVLGKDGQPLRPAKLWNDTETAAQNAVLVERLGGAEAWGERLGIVPLTGYTVSKLLWLKDNEPEAFARIDAILLPHDYLNFWATGRRVAEAGDASGTAFFDIRARRWSEEVLALIDGGSGHLARALPELIGPDAIVGPLRPEAATALGLSPTCLVAAGGGDNMMGAIGTGNVREGVVTLSIGTSAAVYSYSDTPVVDPRGRVAAFCSSSGGWLPLVCTMNATNVTGRAATLVGDDVGAIDRALADSPPGAEGITVLPFLNGERTPDLPAARGSVLGLSVTNMTAPNLLRAMTEGVSFGMLAGLKLVLAGRQPERVFVIGGGARSGEWRKMIADASGAEIVVPMTEEAGSLGAAIQAQWAWSGESGAPIALGDLTDRAVRVDETKGALPRPERRAAYDEAFGRYRESLMRLHGVDAL

SEQ ID NO: 27692 - protein, 402 aa, Candida parapsilosis
MVAIVTLTRQVLLTIALALFAQGAAIPEEAAKRDDNPGFVALDFDVLRKPLNLTEALLREKRDSISLSLINEGPSYASKVSVGSNKQQQTVIIDTGSSDFWVVDSNAQCGKGVDCKSSGTFTPSSSSSYKNLGAAFTIRYGDGSTSQGTWGKDTVTINGVSITGQQIADVTQTSVDQGILGIGYTSNEAVYDTSGRQTTPNYDNVPVTLKKQGKIRTNAYSLYLNSPSAETGTIIFGGVDNAKYSGKLVAEQVTLSQPLTISLASVNLKGSSFSFGDGALLDSGTTLTYFPSDFAAQLADKAGARLVQVARDQYLYFIDCNTDTSGTTVFNFGNGAKITVPNTEYVYQNGDGTCLWGIQPSDDTILGDNFLRHAYYLLYNLDANTISIAQVKYTTDSSISAV

SEQ ID NO: 27693 - protein, 480 aa, Arabidopsis thaliana
MVRRQEEEKKAEKGMRLGKYELGRTLGEGNFGKVKFAKDTVSGHSFAVKIIDKSRIADLNFSLQIKREIRTLKMLKHPHIVRLHEVLASKTKINMVMELVTGGELFDRIVSNGKLTETDGRKMFQQLIDGISYCHSKGVFHRDLKLENVLLDAKGHIKITDFGLSALPQHFRDDGLLHTTCGSPNYVAPEVLANRGYDGAASDIWSCGVILYVILTGCLPFDDRNLAVLYQKICKGDPPIPRWLSPGARTMIKRMLDPNPVTRITVVGIKASEWFKLEYIPSIPDDDDEEEVDTDDDAFSIQELGSEEGKGSDSPTIINAFQLIGMSSFLDLSGFFEQENVSERRIRFTSNSSAKDLLEKIETAVTEMGFSVQKKHAKLRVKQEERNQKGQVGLSVTAEVFEIKPSLNVVELRKSYGDSCLYRQVCHYCHFLIRLKKHISKIKMFMFDIGVGAVVRETIKRRGHILAGARDSNLGVGVFG

SEQ ID NO: 27694 - protein, 686 aa, Bacillus circulans
APDTSVSNKQNFSTDVIYQIFTDRFSDGNPANNPTGAAFDGTCTNLRLYCGGDWQGIINKINDGYLTGMGVTAIWISQPVENIYSIINYSGVNNTAYHGYWARDFKKTNPAYGTIADFQNLIAAAHAKNIKVIIDFAPNHTSPASSDQPSFAENGRLYDNGTLLGGYTNDTQNLFHHNGGTDFSTTENGIYKNLYDLADLNHNNSTVDVYLKDAIKMWLDLGIDGIRMDAVKHMPFGWQKSFMAAVNNYKPVFTFGEWFLGVNEVSPENHKFANESGMSLLDFRFAQKVRQVFRDNTDNMYGLKAMLEGSAADYAQVDDQVTFIDNHDMERFHASNANRRKLEQALAFTLTSRGVPAIYYGTEQYMSGGTDPDNRARIPSFSTSTTAYQVIQKLAPLRKCNPAIAYGSTQERWINNDVLIYERKFGSNVAVVAVNRNLNAPASISGLVTSLPQGSYNDVLGGLLNGNTLSVGSGGAASNFTLAAGGTAVWQYTAATATPTIGHVGPMMAKPGVTITIDGRGFGSSKGTVYFGTTAVSGADITSWEDTQIKVKIPAVAGGNYNIKVANAAGTASNVYDNFEVLSGDQVSVRFVVNNATTALGQNVYLTGSVSELGNWDPAKAIGPMYNQVVYQYPNWYYDVSVPAGKTIEFKFLKKQGSTVTWEGGSNHTFTAPSSGTATINVNWQP

SEQ ID NO: 27695 - protein, 356 aa, Zea mays
MDTFSHVPPGFRFHPTDEELVDYYLRNKVASNKIDLDVIKDVDLYKIEPWDLQEKCKIGTEEQNEWYFFSHKDKKYPTGTRTNRATTAGFWKATGRDKPIYTKSCLVGMRKTLVFYRGRAPNGHKSDWIMHEYRLETTENVTAAPEEGWVVCRVFIKKRVEAVRRMADGAPPWFDGHVPGGFMAPAGLGSPRQLMHHHPNPAAAAPLLYSGQQLYHCKPELEYHHLLQPSQEALLQQLPQLVESPKPPPPAFIDQGSCSLQSPDEASGYNTTPQQPPPMTTEAAYMDDDSVTDWRVLDKFVASQLFSHGDGMAKEDGYPNPGQALFQAENKQPEEALDYASTSASGGGGGEANMWK

SEQ ID NO: 27696 - protein, 348 aa, Triticum aestivum
MAVHLQVQQQKHLNLPAGFRFHPTDLEIITFYLVRKVLKKPFDVIVIEEVDLNKCEPWDLPNNVNMGEKDQYFFSKKDLKYPTGVRTNRATNAGYWKATGKDKEIVHPPTMSLIGMKKTLVFYKGRAPRGEKTNWIMHEYRLEMGKQHTPDLPTDIVRAASINGSSKEEYVVCRIFHKSTGLKKVVMPSYSMPIPMSMGAEQQQGFLESNTLAPLMDYDVPSSLAPLSPLPAASLYQMHNFGAGSSMMGSAVLPMMNNQYFENHHHQMMVAPPQSSMSVYNNQQQQMMHMSAEQDFMVGVDPGSGTSSIVSHEDVLTGTSNNIQGNAGATISSEISSVNMGMDGMWNY

SEQ ID NO: 27697 - protein, 436 aa, Arabidopsis thaliana
MSEEQPHANLAVPAFKTEKEPITQTRNGQSSVWRFGGSDKAAKASTVTLRGVIYMLFDNCGKDVNKTILPLGHGDPSVYPCFRTCIEAEDAVVDVLRSGKGNSYGPGAGILPARRAVADYMNRDLPHKLTPEDIFLTAGCNQGIEIVFESLARPNANILLPRPGFPHYDARAAYSGLEVRKFDLLPEKEWEIDLEGIEAIADENTVAMVVINPNNPCGNVYSHDHLKKVAETARKLGIMVISDEVYDRTIFGDNPFVSMGKFASIVPVLTLAGISKGWVVPGWKIGWIALNDPEGVFETTKVLQSIKQNLDVTPDPATIIQAALPAILEKADKNFFAKKNKILKHNVDLVCDRLKDIPCVVCPKKPESCTYLLTKLELSLMDNIKDDIDFCVKLAREENLVFLPGKIMKLSSMSLDLSFDTKMGFVGNVLQGMLWV

SEQ ID NO: 27698 - protein, 449 aa, Sinorhizobium meliloti 1021
MFNRRQLLGASAALVSTAAWAKTSNMGLPDAAVMETAETQGPLKPTSGPDYNPVVTLNGWTLPHRMNNGVKEFHLVAEPVEREMAEDMTAYLWGYNGQSPGPTIEAVEGDRVRIFVTNKLPEHTTIHWHGMILPSGMDGVGGLSQPHIPVGKTFVYEFDLVKSGTFMYHPHSDEMVQMAMGMMGFFVIHPKDPKFMPVDRDFVFLLNAYDIDPGSYVPRIMEMTDFNMWCWNSRIFPDISPLVVSKNDRVRVRVGNLTMTNHPIHMHGYDFEVTCTDGGWVRPEARWPEVSIDIPVGAMRAYEFDAKYAGDWAIHCHKSHHTMNAMGHDIPTFIGVDKSKVAEKIKKLRPEYMPMGTKGMADMGEMEMEIPENTIPMMTGWGPHGPIEMGGMFSVVKVREGISAGDYADPGWYENPPGTQAWEWTGELPDWTKAKDAKTQITPKHKNHG

SEQ ID NO: 27699 - protein, 197 aa, Brassica rapa subsp. pekinensis
SFTLPGLYRVVHGIDVFDPKFNIVSPGADMSIYFAYTEEKRRLTAFHLEIEELLYSDVENEEHLCVLKDKKKPIIFTMARLDRVKNLSGLVEWYGKNTRLRELVNLVVVGGDRRKESQDNEEKAEMKKMYELIEEYKLNGQFRWISSQMNRVRNGELYRYICDTKGAFVQPALYEAFGLTVVEAMTCGLPTFATCNG

SEQ ID NO: 27700 - protein, 102 aa, Taraxacum officinale
RRVKFTPTYLQSAGLNLKHVYIRSLLASICFHAYQQVAYMILQRVSPVTHSVGNCVKRVVVIVSSIFFFRTPISLINSIGTGIALAGVFLYSQVKRIKPKTT

SEQ ID NO: 27701 - protein, 336 aa, Bacillus cereus E33L
MAKVYYEKDVTVNVLKEKKVAIIGYGSQGHAHAQNLRDNGFDVVVGLRKGKSWDKAKEDGFSVYTVAEAAKQADVVMILLPDELQPEVYEAEIAPNLQAGNSLVFAHGFNVHFDQVKPPANVDVFLVAPKGPGHLVRRTFSEGGAVPALFAVYQDATGVATEKALSYADGIGATRAGVLETTFKEETETDLFGEQAVLCGGVTALVKAGFETLVDAGYQPELAYFECLHELKLIVDLMYEGGLENMRYSVSDTAQWGDFVSGPRVVTEDTKKAMGAVLAEIQDGTFARGWIAEHKAGRPNFHATNEKENEHEIEVVGRKLREMMPFVQPRVKAGVK

SEQ ID NO: 27702 - protein, 808 aa, Gloeobacter violaceus PCC 7421
MSDLIQTVIDSEEKADLRQFIGLLYQQEKRYLLRSDILRVFSEYCSQAQKEDSFFSGSLLGQLIYFTQEFILENESLCLVLRPVIARQEYCRINREDLRVEPLSIQEYLDLCDQTAGRFRPQDGDVLELDFQPFYDFSPSIRDSKNIGKGVQFLNRFLSSKLFQDPGRWQQRLFQFLRLHRHNGSQLLINERIQTLSQLSAQLKRVIAFVSARRPEEPYANFRFDLQSLGFEPGWGNTAARVRETLEILDALLDSPDHETLEAFISRIPMVFRVVLVSPHGWFGQEGVLGRPDTGGQVVYVLDQARSLEKQLIEDHTLAGLEPNPKVVILTRLIPNNDGTRSNQRLEKVYGTDNVWILRVPLREFNPAVTQNWISRFEIWPYLESFAIDSEKELMAELRGRPDLIVGNYSDGNLVAFLLARRLGVTQCIIAHALEKAKYAYSNLQWEELDEQYHFSLQFTADLIAMNAANFVVTSTYQEIAGTADSVGQYESHRTFTMPDLYHVVSGIDLFNPKFNVVPPGVNENIYFPYTRAEDRTPGDRERLEQLLFSLDDPDQAYGHLVDPGKRPLFSMARLDRIKNLTGLAECFGRSPALQERCNLILVAGKLRAEDSTDREEIAEINRLYEIIDRYGLDGKIRWLGVRLAKVDSGEIYRVIADRQGIFVQPALFEAFGLTILESMISGLPTFATRFGGPLEIIQDGVNGFLINPNALEETAEKLLEFVSKCEANPAYWQQISERAVQRVYSTYTWKIHTTRLLTLARIYGFWNYGSQENREDLLRYVEMLFYLLFRPRAQKLLERHFQRDSIE

SEQ ID NO: 27703 - protein, 165 aa, Prunus persica
  misc_feature (101)..(101): Xaa can be any naturally occurring amino acid
  misc_feature (134)..(134): Xaa can be any naturally occurring amino acid
  unsure (1)..(165): unsure at all Xaa locations
WAFGGMIFVLVYCTAGISGGHINPAVTFGLFLAREVSLIRAVAYIVAQSLGAIVGVGLVKAFQKHNYNSQGGGANTVAPGYSKGTALGAEIIGTFVLVYTXFSATDPKRSARDSHVPVLAPLPIGFAVFIVHLXTIPITGTGINPARSFGPAVIFNNEKAWDDHW

SEQ ID NO: 27704 - protein, 497 aa, Zea mays
RSHSHHTTPPLLPAPHSPPRARIAIRVPQMGGNNEDKAVVIQTLLFVAGINTLLQSFFGTMLPAVIGGSYTFVLPTISIILAGRYANEPNPHIKFLRIMRGTQGALIVASALQIIVGFSGLWRNVARYLSPLSAAPLVALVGFGLYELGFPSVAKCVEIGLPQLILLVIFTMYLPHAVHMLKSIFDRFAVLFTIPIVWLYAYLLTVGGAYRNAPPKTQFHCRTDRSGLIGGAPWIRVPYPFQWGAPTFDAGEAFAMMAASFVALVESTGAFIAVSRYASATPIPPSVLSRGIGWQGIGILLDGLFGTGNGSSVSVENAGLLALTRVGSRRVVQISAGFMIFFSILGKFGAVFASIPAPIFAAMYCIFFAYAGSAGIGFLQFCNLNTFRTKFILGFSVFMGLSVPQYFNEYTSIAGYGPVHTHSRWFNDIVNVIFSSKAFVAGFVAYLLDNTIDRHEASVRRDRGYHWWDKFRSYRTDTRSEEFYSLPFNLNKFFPSV

SEQ ID NO: 27705 - protein, 326 aa, Helicobacter hepaticus ATCC 51449
MAKNDLIGGALWDAYSNKVSERMDNPTHLGVLTQKDADERGAKLIVADYGAEACGDAVRLYWLVDSEDRIIDAKFKSFGCGTAIASSDMMVELCLGKKVQEAVKITNLDVEHALRDDPDTPAVPGQKMHCSVMAYDVIKKAAGIYLGKDAEDFEDEIIVCECARVSLSTIKEVIRLNDLKSVEEITNYTKAGAFCKSCIKAGGHEKRDYYLVDILRDVRAEMDKENLKNVAQKSVEGNLAFAEMTMVQKVKSIDKIIDENIRPMLMMDGGDMEILDIKDTSDGFIDVYIRYLGACSGCASGATGTLYAIESVLQEKLDSHIRVLPI

SEQ ID NO: 27706 - protein, 165 aa, Prunus persica
WAFGGMIFVLVYCTAGISGGHINPAVTFGLFLARKVSLPRAVLYIVAQSLGAICGVGLVKAFQKTYYEEYGGGANELAAGYNKGTGLGAEIIGTFVLVYTVFSATDPKRNARDSHVPVLAPLPIGFAVFIVHLATIPITGTGINPARSFGAAVIYNKDKAWDDRW

SEQ ID NO: 27707 - protein, 500 aa, Euphorbia lagascae
MEQKNLSFPSILISFLLVLILVVVMRLWKKQNPPPGPWKFPIIGNLPHLLLTSDLGHERFRALAQIYGPVMSLQIGQVSAVVISSAEAAKEVMKTQADAFAQRPIVLDAQIVFYNRKDVLFASYGDHWRQMKKIWILEFLSAKKVQSSRLIREEEMEDAITFLRSKAGSPVNITKIIYGIIISIMIRTSVGNCKQKERLLSVADAVNEAATSFGTADAFPTWKLLHYIIGAESKPRRLHQEIDDILEEILNEHKANKPFEADNLMDVLLNLQKNGNVPVPVTNESIKASVLQMFTAGSETTSKATEWVMAELMKNPTELRKAQEEVRQVFGEMGKVDESRFHDLKFFKLVVKETLRLHPPVVLIPRECRETTRIDGYEIHPNTRIVVNAWAIGRDPNTWSEPGKFNPERFKDCAIDYKGTTFELVPFGAGKRICPGITSAITNLEYVIINLLYHFNWELADGITPQTLDMTEAIGGALRKKIDLKLIPIPYQVSLGSNIS

SEQ ID NO: 27708 - protein, 180 aa, Rubrivivax gelatinosus PM1
MRRLAIAALLCIVGSGAQAACPPLLDRSFPRLQDEKPQNLCQYAGKVVVVVNTASYCGFTSQYKGLEALHARYQSRGLVVLGFPSNDFGSQEPGSNQDIAAFCENTFGVRFPMFAKSSVKGSARNPLYADLAQRTGKTPAWNFHKYLIGRDGQVVLSFSSQTDPQDPVFVQEIEKLVDSQ

SEQ ID NO: 27709 - protein, 165 aa, Prunus persica
WAFGGMIFVLVYCTAGISGGHINPAVTFGLFLARKVSLARAILYMVAQSLGAICGVGLVKAFQNAYFTKYGGGANGLADGYSQGTGLAAEIIGTFVLVYTVFSATDPKRNARDSHVPVLAPLPIGFAVFIVHLATIPITGTGINPARSLGAAVIYNNDKAWDDHW

SEQ ID NO: 27710 - protein, 664 aa, Bacillus thuringiensis serovar konkukian str. 97-27
MTQNINQLAVNTIRTLSIDAINAANSGHPGLPMGAAPMAYALWANHLNHNPNHPKWFNRDRFVLSAGHGSSLLYSLLHLAGYDVSIDDLKNFRKLNSKTPGHPEFGHTSGVEATTGPLGQGIANAVGMAMAEAHLAAKFNKDGHSIIDHNTYALVGDGDLMEGVAYEAMSMAGHMKLGKLIVLYDSNEISLDGELNIAFSEDMQKRVESAHWQYVRVEDGNDVDAITKAIQLAKDNTDQPTLIEIRTVIGYGSPKVAGTNKAHGNPLGVEEATATKQVYGWHYEEDFFVPEEVTAHFNELKQKGIEKERGWNEQFNLYRESNPALADELEKAITGEVLIEAKDILSFDTEKTISTRVASGEAINHYVKSIPSIFGGSADLSHSTMTDIKGEAVYAVESYAGRNIYFGVREHAMGAAANGLALHGGVKPFVSTFFVFNDYLRPSIRLAALQKLPVTYVFTHDSIAVGEDGPTHEPIEHLAALRAIPGLTVIRPSDANETASAWAYALQQTDGPVVLVLSRQNLPVFHETKANIENLSKGAYVLTQTNENPDVILIATGSEVSLAASAKAKLEEDNVSVRIVAMPSWELFDRQSKEYKESVLPSSVTKRVSLEMGVSLGWERYVGQEGNILSIETFGASGTGAEVMNLFGFTTENVVQITKNVLNS

SEQ ID NO: 27711 - protein, 254 aa, Francisella tularensis subsp. tularensis SCHU S4
MLTAFIAELIGTMLLILLGNGVVAGVVLNKTKAHDGGWIVITFAWGLAVFISVLVAGPISGAHLNPVVTLSLALAGKFSWAWVLPFIISQIIGAMLGQLLVWIMYYPHYSATDNPELKLATCCTSPAIKHLPANFASEVIGTFVLVLAILTMHGVVLHVGDSSITTTYPVDMGALGGIPVAFVVVVIGMSLGGTTGYAINPARDFGPRLFHAIMPIQGKGSSQWSYAWVPILGPVCGSIIATAFYLLLKVKGVF

SEQ ID NO: 27712 - protein, 121 aa, Prunus dulcis
KICGDHDQKVEDTAVPVEKIYEEPTLEEEKEEEKKGFLEKIKGKLPGQQKKTEEIPASYDDQQCHDQHAEPAEPAVVGCEPKEKKGILEKIKEKIPGYHPKTEEEKEAIKEKEKEKETSSY

SEQ ID NO: 27713 - protein, 159 aa, Brassica napus
MGKDKTLPLLDPREPPELTETKPASKVWAKEFRQESKRLWELAGPAIFTAISQYSLGALTQTFSGRIGELELAAVSVENSVISGLAFGVMLGMGSALETLCGQAYGAGQLRMLGIYMQRSWVILFTTALCLLPVYIWAPPILSFFGEAPHISKAAREFA

SEQ ID NO: 27714 - protein, 178 aa, Brassica napus
MSASRFIKCVTVGDGAVGKTCMLISYTSNTFPTDYVPTVFDNFSANVVVDGNTVNLGLWDTAGQEDYNRLRPLSYRGADVFILAFSLISKASYENIAKKWIPELRHYAPGVPIILVGTKLDLRDDKQFFIDHPGAVPITTNQGEELKKLIILHRSSWCCTHHYKPRTCCNLVTQLVLP

SEQ ID NO: 27715 - protein, 227 aa, Arabidopsis thaliana
MSFMFASPIITPTIGSFTFSSRRSNYIVMSAVRTNSASTCPILTKFQKDCEIFFWNHGDPNGAALRFVNVLMLKTVFIRNQIINTEWGGFSKVLPQTIFDQEMDAESPNRGEHLYEKMVSGMYLGEIVRRVLLQMCETSDLFGQFVPGGNLSKPFALKTEHLNKMQEDTTDDLQTVGLVLYNILEVEANLQERRRVVEVCDTVVKRGGRLAGAGVNARIKQVRKWDL

SEQ ID NO: 27716 - protein, 149 aa, Methanosarcina mazei
MEQTYVMVKPDGVQRGLVGEVISRIEKRGLKIVALRMNVIAEATAKEHYGEHAARPFFPSLIEFITSGPSVSMVVAGKDAIKVMRAINGATNPVDAAPGTIRGDFALDVGRNVVHASDSPEAAAREIAIHFKDSEIANYSRVDEVCLYE

SEQ ID NO: 27717 - protein, 209 aa, Triticum aestivum
  misc_feature (92)..(92): Xaa can be any naturally occurring amino acid
  misc_feature (108)..(108): Xaa can be any naturally occurring amino acid
  misc_feature (116)..(116): Xaa can be any naturally occurring amino acid
  misc_feature (156)..(156): Xaa can be any naturally occurring amino acid
  unsure (1)..(209): unsure at all Xaa locations
MAPTVMASSATSVAPFQGLKSTAGLPVSRRSNGASLGSVSNGGRIRCMQVWPIEGIKKFETLSYLPPLSTEALLKQVDYLIRSKWVPCLEFXSKVGFIFREHNASPGXYYDGRYWXTMWKLPMFGCTDATQVINEVEEVKKEYLTRIPHIGFDNMXQVQCVSSSPNGLQGSGRLNSNHTGILSAMRLEPMLWFPPLPLVSRKVHVSHMK

SEQ ID NO: 27718 - protein, 562 aa, Arabidopsis thaliana
MVGASSSYASPLCTWFVAACMSVSHGGGDSRQAVALQSGGRSRRRRQLSKCSVASGSASIQALVTSCLDFGPCTHYNNNNALSSLFGSNSVSLNRNQRRLNRAASSGGAMAVMEMEKEAAVNKKPPTEQRRVVVTGMGVETSLGHDPHTFYENLLQGNSGISQIENFDCSEFPTNIFLCFTFVKRIAGEIKSFSTEGWVAPKLSKRMDKFMLYLLTAGKKALADGGVTDEVMAEFDKTKCGVLIGSAMGGMKVFYDAIEALRISYKKMNPFCVPFATTNMGSAMLAMDLGWMGPNYSISTACATSNFCILNSANHIIKGEAVSILHTLGNSTDVMLCGGSDAVIIPIGLGGFVACRALSQRNNDPTKASRPWDTNRDGFVMGEGAGVLLLEELEHAKKRGATIYAEFLGGSFTCDAYHMTEPHPDGAGVILCIERALASAGISKEQINYINAHATSTHAGDIKEYQALAHCFGQNPELKVNSTKSMIGHLLGAAGAVEAVATVQAIRTGWVHPNINLENPDSGVDTKLLVGPKKERLDIKAALSNSFGFGGHNSSIIFAPYK

SEQ ID NO: 27719 - protein, 413 aa, Pirellula sp. 1
MKAFEATRIFFDQAADRLEIDPDLREALLMPQREVQVQVTIRLDDGRLANYIGFRVQHDHSRGPMKGGLRFHPEVDLDETRALASLMTWKTAVVDLPYGGAKGGIGIDPSKMSSAEIERLTRAFVDQIHDIVGPDTDIPAPDMGTDHQVMAWFRNQWEKYHGFHPAVITGKPVEEYGAKGREEATGRGVGTLTVKLTKRLGMDASKTRVAIQGFGNVGSHAAKFLHDAQFPIVAVSDITGTYYNADGLNIPELLRHKFAHPKGLLEGFERAEHLPLDALLKLDHVEVLIPAALGGVITQKNAQDINAKVIVEAANGPVDPDADAALHDRGVTILPDILANAGGVTVSYFEWVQNRQHYRWPLDRVRQELDHTMNEAFEKVWQMAAQHEVSLRTAAYMIGISRVRRATELAGLA

SEQ ID NO: 27720 - protein, 315 aa, Salmonella typhimurium LT2
MNITIATLGELLVEFLAKKENQGFSSPGEFWGPYPSGAPAIFADQVAKLGFRSLLFSCVGNDAFGVMNITRLSRDGVNVQGISVLPNATTGSAFVSYRSQAQRDFIFNMPDSACGLLSADHLDETLLRQYRHFHIMGSSLFSFRLIDAVRKAISIVKENGGTISFDPNIRKEMLKIREMSQAFEYILDYTDFFLPSDGELDYFGLSKSRDEEKIVARLHKRGIAHVIIKRGARGASYYSKDEQHHVAGYPVKVVDPTGAGDCFGATFVSLFLAGYSVPDALAHANAAGSLAISARGPMEGTSTLAQIKELMRQQN

SEQ ID NO: 27721 - protein, 240 aa, Zea mays
  misc_feature (200)..(200): Xaa can be any naturally occurring amino acid
  misc_feature (211)..(211): Xaa can be any naturally occurring amino acid
  unsure (1)..(240): unsure at all Xaa locations
MQIFVKTLTGKTITLEVESSDTIDNVKAKIQDKEGIPPDQQRLIFAGKQLEDGRTLADYNIQKESTLHLVLRLRGGMQIFVKTLTGKTITLEVESSDTIDNVKAKIQDKEGIPPDQQRLIFAGKQLEDGRTLADYNIQKESTLHLVLRLRGGMQIFVKTLTGKTITLEVESSDTIDNVKAKIQDKEGIPPDQQRLIFAGXQLEDGRTLADXNIQMESTLHLVLRLRGGMQIFVKTLTGKT

SEQ ID NO: 27722 - protein, 582 aa, Dechloromonas aromatica RCB
MSSACGRYIVVFNGEVYNWASIRTELEQSGRAPVWRGHSDTEVLLAGLVAWGLEATLKRARGMFAIAVWDRQQRVLSLARDRIGEKPLYYGRVGDTFVFASELKSLRAIPGADFQTDPGSLALMLRYGYVPAPLCIYRNIFKLPPGTLLRVNARGEFGEPEAWWSFAETAQQRVAGRSPMSDAAALDALDEVLGAAIGEQMVADVPLGALLSGGLDSSMVVALMQARSTKPVRTFTIGFAEGAYDEAAHAKVVAAHLGTEHTELYVSPDQARAIIPSLPDMYDEPFADSSQIPTALVCALTRQHVTVCLSGDAGDELFGGYNRYFWATSLWRRFGKMPLGLRKGAAGIFSSVSAGTWNSAFGALSWAMPGRLRVSNPGDKLHKLAEVMAAESEEALYRELVSQWRGPLPMRSPNEPRTLVPDPARWPRMPSYAERMMAVDTLTYLPDDILVKVDRAAMAASLETRVPFLDERVISFAWGLPFEQKVRNGQGKWLLRQLLYRYVPQAMVDRPKQGFGVPIEHWLRGPLRDWAEDLLSPDQLASDGLLDPTPIRAMWEKHLSGRNVQYALWNVLMYQAWRRRWA

SEQ ID NO: 27723 - protein, 531 aa, Ralstonia solanacearum
MSAHPTWRDVLTDGILAERHGADLLFGSAAVRALETAAYRALAPFTLMARAGEAAADWLQARAPRGHLLLVAGPGNNGGDALVAATALHEAGRTVTVWLAADPARLPDDARRAWTEARAAHVPIEILHAPASVPATVTAIVDGLFGIGLARPLAGLHAALVETLNGSGLPAYALDIPSGLSGDTGQPPAPDSPVVRARATLTFLVAKPGLLTGAGRDATGDLALADLLAAQPAYDGVVEADALVNAPARWLAHLPRRRHDGHKGTYGSVAVVGGAHGMVGAPLLSARGALHLGAGKVHVVSLADDAPRVDFAQPELMLHTWGTLDLGGMQALAVGPGMGTGKDAYEALDHLLDRMLPARIAAVFDADALNLFARAPALLTRLTRLASGGAPVVLTPHPLEAARLLDTDAPTVQRDRLAAAQALVNRCGAVVVLKGSGTVVAAPGVPPTVNPTGNGSLATGGTGDVLTGMIGALLAQGVPAREAALAAVWLHGRAADDLVAAGEGPIGLHAGELCAPARRALNGLLKSDAYP

SEQ ID NO: 27724 - protein, 178 aa, Glycine max
GIRHEAEISISLNVLQHYFTGSLKDAAKSLGVCPTTMKRICRQHGISRWPSLKIKKVNHSLSKLKCVIESVHGAEGAFGLNSLSTGSLPIAAGSFSDPFTSNKFHRQTTLTIRPSEPKINENDFDASGASETKRQVAMEDQFLGLEARTRSPEKVINDKGVSIQEIGTKGTNKFRTGS

SEQ ID NO: 27725 - protein, 443 aa, Acinetobacter sp. ADP1
MKNRYAKVSNMAKNASSPSRRFMKLAGMTASIATKTVSNSIRNLTADDEQKLASKTKLFQDIGIQIADTLGEMKGAVMKVGQIASQYKDIFPPEVAKAIAKLQRQAPAVPFSAIQQQVEKELGKPLLQAFQSFDQQPFAAASIGQVHRAVLPDGQEVVVKVQYPGVDEACESDLKQVRLALRLMGVIKIDKKLQDQLFTEIQDSLSDELNYEIEAQNLEVFKTFHQQLDNKIIIPTVYKNYSSRRILTLSLERGDSIETASTWPLETRNQIGRRLIRALGQEIFYLKRFHCDPHPGNFAFREDGTVIIYDFGGVKTLSSDIVSHFKHLVQAARQQDITAIENHLDALHSLSDKGLFPEELYLQWLEVLLRPLTTHYDFAENSAHHDGVTLVKKSLKYWDVFKPSPDTLMVNRTISGHYWNLIHLKVHDDLSDLFEELVPTTIN

SEQ ID NO: 27726 - protein, 239 aa, Glycine max
MSFLEEFHANLDSLPVILRKKYTLLRDLDKSLQDIKRQNEQRCEQEIEDIKRGVRSGNITPDTSAIRFSDEALDEQKHSIRVADEKVALAVQAYDLVDTNIQQLDQYLKKFDEEIRRERENAAITGVPASGPEGNTKSGRGNESGTGRGGRKKTRQTTMVTEAQATSNPTGMDLELPVDPNEPTYCFCNQVSYGAMVACDNPNCKIEWFHFGCVGLKEQPKGKWYCSNCAATKNRRRSK

SEQ ID NO: 27727 - protein, 449 aa, Acinetobacter sp. ADP1
MAKVAGFRFELKQLFHLMWPILITQFAQAGLGLIDTIMAGHLSANDLAAIAVGVGLWMPVMLLFSAIMIATTPLVAEAKGARTPEHIPVIVRQSLWVAVSLGVIAMLILQLMPFLLPILGVPESLQPKAGLFLHAIGFGMPAVTMYAALRGYSEALGYPRPVTVISLLALVVLVPLNYIFMYGIGPVPHLGSAGCGFATAILQWLMLITLASYIYRAKAYQSTQVFSHWERINLTLVKRILKLGLPIGLAVFFEVSIFSTGAIVLSPLGDTLVAAHQIAMSVTSQLFMIPMSLAIALTIRVGMYYGEKNWVSMRLVQKLGLATATFFAMCTMSLIWFARPQIVAIYTQDPAVFDIALYLLLFAMAYQLMDAWQVGAAGCLRGMQDTKGPMWITLIAYWVVAFPVGTYLARVAKMGPAGVWLGLITGLSIACVLLLMRLYRNNHKLAQQS

SEQ ID NO: 27728 - protein, 397 aa, Treponema denticola ATCC 35405
MSNDFILKNVSNLEEYLISTRRYLHENPEVSHKEYQTSTFLKQEIKKLEFEIIETPGTGFIAILDTGKEGKTVALRTDIDALPIQENVMNLRKKKVSVSKNDGAMHACAHDGHMAIILAAAKILNEMKDLLAGKIIFMFEESEEAGGGAEQLIEILKNYKIDAIYGNHLVSFIEAGKISVDAGPVMAGAILVDFKVIGKGGHGSRPDLSISPIFGSANVLTALASAWSNQIDVTKTVTLGLGSINGGTVFNVIPDEVKITGSLRFYDSEEGEKAINIMKTTSKHAAMSQNCSVEFTEGANQIAVHPVINDIKLSKIARDGINEILPGVLTQGVKWFASESFSKYNCLAPIVFAFVGIKNLEEGMGAEHHNEFFDMDEKALYYGTAAQVKFVYDYLRG

SEQ ID NO: 27729 - protein, 216 aa, Lactobacillus plantarum WCFS1
MRKYLAEFLGTFMLVFLGTATVVIAKGDVLAIGLAFGLAITVSAYAFGGISGGHFNPAVTTAMLINRRIDAADAIGYIIAQIIGAIVASAAVKSFVSALGLSATLLGQTDFPKIGSGMAFFVEALVTFLFLMVILNVTSNDHGNADFAGLTIGVTLAFLIIVALNLTGGSLNPARSIGPAIFAGGSALSHLWVYILAPEVGAILAAFCARVMGSED

SEQ ID NO: 27730 - protein, 578 aa, Lactobacillus plantarum WCFS1
MTNNNEERPQWQVNQNRHTRFRTIVSVLRRYNVLSNLARQKNPDQVRAAFEELGPTFIKIGQILSSRTDIVKPEFANEFKKLQNNVRADDFSVVKQTIEQQTGKPINEMFAQFDERPFASASMGQTHHATLLNGQKVVVKVQHPGIDAEVALDISLFERALPLLRYIPESSVVDLREMVGEIKRSLFNELDTSIEVKNGLRFYRLNNADDIIRVPRVYAKYSTQKVLVNQYMPGTTIQHFMAQMLAADEDGNHQYDDERRYLAHVLVQNFLKQVFEDGFFHADPHPGNILLRELQPDDIGYHDTVPKHGGKIGKRQLPPYRLVYLDFGMMGEISPALMAGIANVVVAVTTEDTHQVGKAILAISNRTGVVDEEAFFSELAPFLSQYYNSGLGDIDFQGLLFEMVKVCRSNNIQMNPAVTMLGKAFGTIEGIVETLDPTLSMMDVARPFARKYIRENFNWRNELEDGMLASLQSLRDAPKIPSRLLSALDTFENGQTRVNLVFAHRKMFIDRIDSMVNKIVLSVILAALIVGSSLLVQSHPDNSWITNIGIFGYVSAVVVIIGLLIGTLHSWYTHWRRK

SEQ ID NO: 27731 - protein, 314 aa, Candida albicans SC5314
MGPFGLGWLRRNTIIVLFTTCISYPLSLNRDISKLAKASGFALVGMFIIVVLTIFRAPFVSPTIKGELTVKEWTVNANIFQGISVISFALVCHHNTMFIYQSMKNPSLAKFSKLTHISCLVSMIFCMIMAINGLINFGDITKGNILNNFKSNDNWINIARFCFGLNMLTTFPLEIFVVRDVLKEIILAKKASVDGSTADLELSSKQHFFITSFLVFSSMSVALFTCNLGMILELVGATSASLMAYIIPPLCYLKLSWNQVDYKSAMPKEKKKFIIFKAIPSIACVLFGFAVMFISSFMTIKNTSSDGGDHCVID

SEQ ID NO: 27732 - protein, 250 aa, Crocus sativus
MGRGRVQLKRIENTINRQVTFSKRRAGLLKKANEISVLCDAEVALIIFSTKGKLSEYSTDARMESILERYDRYSSAERAIVAPDPDSQESWRDEYGRLKAKLEALQTSQRHLMGAQLDMLSVKELQQLEQQLENALKNIRTRKNQLMFDSISELQKKEKTLVSQNKDLEKKLIEKEKGKAMAQQGHWDQQGQQYTESSSPPSLLIQDPFPSLTIGINPASGSSEEDYEARPLPPANSNRLPPWMIRSANE

SEQ ID NO: 27733 - protein, 757 aa, Saccharomyces cerevisiae
MMRGFKQRLIKKTTGSSSSSSSKKKDKEKEKEKSSTTSSTSKKPASASSSSHGTTHSSASSTGSKSTTEKGKQSGSVPSQGKHHSSSTSKTKTASTPSSSSSSSRSSSVSRSGSSSTKKTSSRKGQEQSKQSQQPSQSQKQGSSSSSAAIMNPTPVLTVTKDDKSTSGEDHAHPTLLGAVSAVPSSPISNASGTAVSSDVENGNSNNNNMNINTSNTQDANHASSQSIDIPRSSHSFERLPTPTKLNPDTDLELIKTPQRHSSSRFEPSRYTPLTKLPNFNEVSPEERIPLFIAKVDQCNTMFDFNDPSFDIQGKEIKRSTLDELIEFLVTNRFTYTNEMYAHVVNMFKINLFRPIPPPVNPVGDIYDPDEDEPVNELAWPHMQAVYEFFLRFVESPDFNHQIAKQYIDQDFILKLLELFDSEDIRERDCLKTTLHRIYGKFLSLRSFIRRSMNNIFLQFIYETEKFNGVAELLEILGSIINGFALPLKEEHKVFLVRILIPLHKVRCLSLYHPQLAYCIVQFLEKDPLLTEEVVMGLLRYWPKINSTKEIMFLNEIEDIFEVIEPLEFIKVEVPLFVQLAKCISSPHFQVAEKVLSYWNNEYFLNLCIENAEVILPIIFPALYELTSQLELDTANGEDSISDPYMLVEQAINSGSWNRAIHAMAFKALKIFLETNPVLYENCNALYLSSVKETQQRKVQREENWSKLEEYVKNLRINNDKDQYTIKNPELRNSFNTASENNTLNEENENDCDSEIQ

SEQ ID NO: 27734 - protein, 658 aa, Rhodospirillum rubrum
MCGLTGYWTRGGDGRGRGEMTALVLRMAGALAHRGPDGDGAWVDEDAGLALGHRRLSIVDLSPAGQQPMVSADGRLALAYNGEIYNAAELRPELEAAGIVFRGHSDTEVLLEGFARWGVVPTLRRAIGMFAFALWDRKERRLTLGRDRLGIKPLYVADHGGTLLFASQPKGMMPHPSWRGEVDREGLAAMLRLSCLPAPRSIFKGVSQLAPGTVVRFEADGRRSEEVFWSLEEVAARGVAQARSQPARPESASLAVEHLESLLLDAVRRRLIADVPVGAFLSGGVDSSTVVALMRKVASGPVKTFSIGFAEEGWDESVHAAAVARHLGTDHRELVVSPDEVPAIVGDLPRWYDEPFADASQIPTLLVSKLARSEVTVSLSGDGGDELFAGYNRHVQGQRLWDLAQRIPTVGRDLGAALIEAPSPGFWQRAVGLLPAGRRPPQAADKPAKIARLLRARSPEALYRTLVGAMPSAEVPLAGVSLAAEERWYAASAEGVDSFVDRMRLLDAKGYLPDDILTKVDRASMAYGLEARVPLLDHRVVEFAWSLPPEMLIREGQGKWLLRRVLHRHVPRALIERPKMGFGVPLAAWLRGPLRGWAEDLLDPQTMAVQGLIDPAPVRRWWLDHLAGRRDTHDRLWPVLSALSWHHHWKSAGAFTAA

SEQ ID NO: 27735 - protein, 246 aa, Crocus sativus
MGRGRVQLKRIENTINRQVTFSKRRGGLLKKANEISVLCDVDVALIIFSTKGKLSEYSTDARMETILERYERYSFAESAIAVPEAESQGSWLNEYGRLKARIESLQTSQRHLTGVQLDMLNVKEMQELEQKLESAMKNIRSRKSQLLFNSISDLQTKEKALVDRNNDLKKKIAEKERKRTSAQQGHQDQQGQQYVDPTSPLSFPVQDPPSLTMGINPARSTSDEDRPLPQVNSSKLLPWMIRSVNG

SEQ ID NO: 27736 - protein, 411 aa, Arabidopsis thaliana
MEEKVVAVIMVGGPTKGTRFRPLSLNIPKPLFPIAGQPMVHHPISACKRIPNLAQIYLVGFYEEREFALYVSAISNELKVPVRYLREDKPHGSAGGLYHFRNLIMEDSPSHIFLLNCDVCCSFPLPKMLEAHRGYGGIGTLLVIKVSPESASQFGELVADPVTNELLHYTEKPETFVSDRINCGVYVFTPEIFNAIGDVSTQRKDRATLKRVSSFEALQPATRIPTDFVRLDQDILSPLAGKKRLYTYETMDFWEQIKSPGMSLRCSGLYLSQFRLTSPQLLASGDGTRSAIVIGDVYIHPSAKVHPTAKIGPNVSISANARVGPGVRLMSCIILDDVEIMENAVVTNAIVGWKSSIGRWSRVQAEGVYNSKLGVTILGDSVAVEDEVVVTSSIVLPNKTLNVSVQDEIIL

SEQ ID NO: 27737 - protein, 80 aa, Antirrhinum majus subsp. cirrhigerum
GSISEANTQYYQQEASKLRAQISNLQNQNRNMLGESLGALSLRELKNLESRVERGISRIRSKKNELLFAEIEYMQKRQEI

SEQ ID NO: 27738 - protein, 274 aa, Nocardioides sp. JS614
MNQVSTFYTGPGGLVSVISSALDASGVDRATLRPADLAPVDEFHIRGRAATLEIMEALGVAADSRVLDLGSGLGGPARTVAEESGCSVTGVDLTPEFCEVATALSQWTGMSDRTSFQVGDATATGLPHEGFDAALTVHVAMNIADKPALYAEAFRVLRPGGRFVIYDVLQGEGGPVHFPVPWAADPSTSFLATPERVRELLSAAGFEVISEIDSSEESLAWFQQMRARIERDGPPPVTFATFLGDAFGQMVANQVANLVERRIRTVMFSSVRRR

SEQ ID NO: 27739 - protein, 440 aa, Photorhabdus luminescens subsp. laumondii TTO1
MGTLLSESIQQIAEQLRNWRRDFHHFAESGWFEFRTATIVVDELHRLGYSLKMGKDVIKADARMGLPSKQALQAQEQRAIKQGALTEWLPHFSGGFTGIVATLDTGKPGPTLAFRVDMDALDLNEEQTHVHRPYAEGFSSCNTHMMHACGHDGHTAIGLGLACILKKYESQLTGKIKLIFQPAEEGTRGAKSMVEAGVVDDVDFFIAIHIGTGVPQGELVCGSNNFLATTKIDVTYRGVASHSGAKPEAGKNALLAAAQATLGLYAISHHSEGSSRINVGVLQAGIGRNVIPDYALMKVETRGETNEINAFVYRQALNIIEGAAKMQGVEYGIQLMGAAQSSQPSPVWVDFIYQQAQQYIPELSSVVKSRQQAAGSEDATYFMEHVKSNGGQATYLIFGTALSAGHHNERFDFDENVMTTAVKTLATIALNLPDFGVHHE

SEQ ID NO: 27740 - protein, 453 aa, Bacillus cereus E33L
MKETNSFSQKLKQFALLFFPIFVTQMSLFAMSFFDTTMSGHASPIDLAGVAIGTSIWIPVSTGLTGILMATTPIVAQLVGSKKKEDVPHVVIQAVYLAICASFVVILIGLFTVTPILNGMRLEEPVERIAAQFLSIIAIGIIPLFTYTVLRGFIDALGKTRTTMIITLLSLPINVILNYLLIFGNFGFPKLGGVGAAIASTATYWCILIITVIIIHTKEPFASFNIFKHLYRPSLSSWKAFLKLGVPIGFAIFFETSIFAAVTLMMSNFSTTTIAAHQAAMNFASLLYMTPLSLAMAMTIAVGFEVGAKRYNNAKQYGFIGIGLALAFALLYSILLYFFDNEIASIYTTDIQVHHLAKEFLIFAILFQISDAIATPVQGALRGYKDVNVALIMTLIAYWVIGLPLGYILATYTDWAAKGYWIGLIIGLAFGATFLLIRLFQVQRKYTTQNNRS

SEQ ID NO: 27741 - protein, 1188 aa, ASPERGILLUS NIDULANS FGSC A4
MALHQYDWILALGTIFAFLDAWNIGANDVANSWATSVSSRSVKYWQAMVLATIMEFAGGIGVGATVSDTIRTKVVDVDLFENNPALLMLGMLCALVGSSTYLTFATRIGLPVSTTHSIMGGVIGMGVALVGADGVKWWGGNINSGVVQVFLAWVIAPFISAAFAAIIFLLTKYLILLRSNPARKALYTIPFYFFVTCTLLAMLIVWKGGSSRIKLEGNEIAGTVVGTGAVMAALAAFFLVPWLYRRVILDDWAIRPWHLLLGPLVLRRGEVPPRPEGVKTVQNYYRGHKTFEQIQAERAAGNDVETANKSTPATSTEGSPEIEPKADPRVLASEPDSEPDAINISGPRPEGGNFHPAVLFWQAKRLFFRGIEKDVVSMQNKRNILTGDIEMTHAHADHFENRAEYMFSFLQVLTASTASFAHGANDLSKYGDPYCYSFVSTNATNIWRTASLSGSGGSGKTDVPYWILAFGGASLVIGLWTYGYNIMRNLGNFITLHSPSRGFTMELGSAITIIMATKLKLPVSTTQCITGATVGVGLCNGTYKTINWRMVAWIYMGWIITLPVTGIISGCITGIIINAPRWGYQGLGGMGTVWWGVNRVIISNISQAVYAPIWMPMFSGVAVKCGRVVPKVTELGKAVMIAKDGETRQLPVTLLSGFLGSGKTTLLEHILKSPSHGLRIAVIVNDMSSLNIDAALITHHKVSQTKEKLIQLQNGCICCTLRGDLLAELARLTKQKEVDYVVIESTGISEPMQVAETFTAEFSAAMLEVEGAQDVEGEGNSGASGLDEDDRKVLEEIARIGGLHTLARLDTTVTVIDTFNLLSNFDTAEFLSDRYGSNAIIPEDERTISDLMVDQIEFADVLIMNKIETVDEQTKNKIRRLIGMLNPDAKLIETSYSRVDVKEIIGTGRFDFLKAASGAGWLRSLHEMSVLTTGVGKRVAPRPETLEYVAHIFSLGEYGINNFVYMARRPFHPRRLFSLIHDKFILLQSLNSHDHGDNEEDGEDEEDEKDEEDEYSNANTSESGEEDSDTEITDFSQPDQSLILANKRKSPFGPILRSKGFFWLATRPSHFGEWSQAGSMLTVGCGGPWFAEVPDKAWPEDKDVRGSIERDFQGEWGDRRQELVFIGEGLDVDAVTKLLNGCLLDDKDMARWEKVMRSKKLSMSEKAEKLAEMWEDGWEDWPEVEMEM

SEQ ID NO: 27742 - protein, 258 aa, Arabidopsis thaliana
MEGGASNEVAESSKKIGRGKIEIKRIENTTNRQVTFCKRRNGLLKKAYELSVLCDAEVALVIFSTRGRLYEYANNSVRGTIERYKKACSDAVNPPTITEANTQYYQQEASKLRRQIRDIQNLNRHILGESLGSLNFKELKNLESRLEKGISRVRSKKHEMLVAEIEYMQKREIELQNDNMYLRSKITERTGLQQQESSVIHQGTVYESGVTSSHQSGQYNRNYIAVNLLEPNQNSSNQDQPPLQLRDLIIYIYLDYVS

SEQ ID NO: 27743 - protein, 346 aa, Gloeobacter violaceus PCC 7421
MVDALREANTASQSERRETLLTPRFYTTDFEALAKLDISAMEADFEALLAEFQADYNREHFQRDAGFVEQAHQIDPQWRALMLEFLERSCTSEFSGFLLYKEISRRLKAANPLLAECFKAMSRDEARHAGFLNKAMGDYDLGLDLSNLAKQKKYTFFKPKFIFYATYLSEKIGYWRYIAIFRHLERHPENRIHPLFNYFKNWCQDENRHGDFFGLILKSQPQLLKGPINRLWVRFFLLSFCLTMYLNDRKPHNLYSALGLDASHYAMEVLRQTNLDSGKVFPLILDLDNPRFQRHLDRCADLNLQLEALSGKSPLARLPVIAALAGTIAQLFLLKPVAPPAPEMVR

SEQ ID NO: 27744 - protein, 347 aa, Salmonella typhimurium LT2
MKSVVIHAEGDVRVEERPLPQLQAEDDVLVKVVSSGLCGSDIPRIFAQGAHYYPITLGHEFSGYVESYGTGVTDMQPGDAVACVPLLPCFHCPQCERGYFSLCKQYQFVGSRSEGGNAEYVVVKRANLFRLPSDMPIEDGAFIEPITVGLHAFHLAQGCEGKNVIIVGAGTIGLLALQCARELGARSVTAIDINPQKLELAKALGATHTCNSREMTADDIQTALSDIQFDQLVLETAGTPQTVSLAIDIAGPRAQLALVGTLHHDLTLTTRTFGLILRKELTLLGSWMNYSAPWPGEEWETAARLLAEKRLQLTPLIAHRGDAESFAEAVKALNGAPMQGKILLQLS

SEQ ID NO: 27745 - protein, 389 aa, Bacillus cereus E33L
MNRVWKSLIAEENIVKWRRHFHKYPELSFHEKETSQFIYDTLCAFSSFEVTRPTKYSVLAIKRGTEQGKVVAIRADIDALPIQEETSKSYTSVNKGMMHACGHDAHAAILLSTAEVLSNIKEDFAGEIRLFFQHAEEVYPGGGQEMVEAGVMDGVDYVIGLHVMSGLESGKIGIAYGPMMAAPDVFTVEIQGKGGHAARPEETIDPIAIGAQIITNLQHIVSRNTSAFMQRVVSVTQFHGGMADNIIPSAATLMGTVRSFNQALRVEAEEKIEKIVKGITKAHGGAYTYTYRYGYDPVINDEYITKVVEESAIHLFGNERVVKLEPSMGGEDFSAYLRKAPGCFIKLGTGNEKINTCYPHHHPKFDVDESALISGVELFLETAIRLLKS

SEQ ID NO: 27746 - protein, 431 aa, Synechococcus elongatus PCC 6301
MATLSVDLEVQAQATRAAARQLAQWSGADRQRLLSAIATTLEQEAPRILAANQADCEAATTEGIAPALYARLKLDADKLAAAIAGVRDLAQLPDPLGQIQIDRELDEGLILQRLTCPVGVLGVIFEARPDAVIQIASLAIKSGNGAILKGGREAICSCQAIVAAIAQALAEQQAPVEAIRLLTSREETLALLKLDRYVDLIIPRGSNSFVRFVQDNTHIPVLGHADGICHLYVDQAAAIEKTVTITVDAKTQYPAACNAIETLLIHEAIAPQFLPVVAAALHEKGVSLRGDAAAQTIVPMEAATEEDWRTEYSDLVLAVRLVPSLDAAIAHINEYGSGHTDAIATEDAAAAAQFFSQVDSAGVYHNCSTRFADGFRYGFGAEVGISTQKLPPRGPVGLEGLVTYKYVLSGDGQIAATYSGAQAKPFLHRDR

SEQ ID NO: 27747 - protein, 485 aa, Pseudomonas aeruginosa UCBPP-PA14
MAYGLQHVLTMYGGIVAVPLILGQAAGLAPGDIGLLIAASLFAGGLATLLQTLGVPFFGCQLPLVQGVSFAGVATMVAIIGSGGSGGIPAVLGAVMAASLIGLLITPIFSRITKFFPPLVTGIVITTIGLTLMPVAARWAMGGNSHAPDFGSMANIGLAAITLVIVLLLSKLGSASISRLSILLAMVIGTVIAVFLGMADFSKVTEGPLVAFPTPFHFGMPTFQVAAIISMCIVIMVTLVETSADILAVGEIIDTKVDSRRLGNGLRADMFSSMLAPIFGSFTQSAFAQNVGLVAVTGIKSRYVVATGGLFLVILGLLPVMGRVIAAVPTAVLGGAGIVLFGTVAASGIRTLSKVDYRNNMNLIIVATSIGFGMIPIAAPTFYDHFPSWFATIFHSGISSSAIMAILLNLAFNHFTAGNSDQQSVFVAASERTLRYQDIAALHEGDYFLDGKLYDAQGNEVPLAGDDSHGAPPRRRSETAEAGSA

SEQ ID NO: 27748 - protein, 757 aa, Saccharomyces cerevisiae
MMRGFKQRLIKKTTGSSSSSSSKKKDKEKEKEKSSTTSSTSKKPASASSSSHGTTHSSASSTGSKSTTEKGKQSGSVPSQGKHHSSSTSKTKTATTPSSSSSSSRSSSVSRSGSSSTKKTSSRKGQEQSKQSQQPSQSQKQGSSSSSAAIMNPTPVLTVTKDDKSTSGEDHAHPTLLGAVSAVPSSPISNASGTAVSSDVENGNSNNNNMNINTSNTQDANHASSQSIDIPRSSHSFERLPTPTKLNPDTDLELIKTPQRHSSSRFEPSRYTPLTKLPNFNEVSPEERIPLFIAKVDQCNTMFDFNDPSFDIQGKEIKRSTLDELIEFLVTNRFTYTNEMYAHVVNMFKINLFRPIPPPVNPVGDIYDPDEDEPVNELAWPHMQAVYEFFLRFVESPDFNHQIAKQYIDQDFILKLLELFDSEDIRERDCLKTTLHRIYGKFLSLRSFIRRSMNNIFLQFIYETEKFNGVAELLEILGSIINGFALPLKEEHKVFLVRILIPLHKVRCLSLYHPQLAYCIVQFLEKDPLLTEEVVMGLLRYWPKINSTKEIMFLNEIEDIFEVIEPLEFIKVEVPLFVQLAKCISSPHFQVAEKVLSYWNNEYFLNLCIENAEVILPIIFPALYELTSQLELDTANGEDSISDPYMLVEQAINSGSWNRAIHAMAFKALKIFLETNPVLYENCNALYLSSVKETQQRKVQREENWSKLEEYVKNLRINNDKDQYTIKNPELRNSFNTASENNTLNEENENDCDSEIQ

SEQ ID NO: 27749 - protein, 480 aa, Bifidobacterium longum DJO10A
MRKAKIVDTIGPSTEDYDNLLKLVEAGMDVARLNRSHGTPEDHLKVYNNVRKASEATGRNVAALVDLQGPKIRCGWFKKNADGEDKVQLQLGQEFVITTDDVEGDEHITSTTFKGLPGDCHPGDPILIDDGKVRLEVTKVEGNNVYTKVVVAGPVSSHKGINLPGVAVSLPALTEKDEADLRWAIRTGADVIAMSFVRFATDIDRAHEIMDEEGRRIPIIAKIEKPQALENLEEIVKTFDGVMAARGDMAVECPLEEVPLATKRIIELARQYAKPVIVATEVLGSMVNSPVPTRAEASDCANAILDGSDATMTSNETAVGKYPDVTVATMARISGYATDHGFDRIPELKNLDMSSTGAVSSAAVDLADKLNAKAIVAYTQTGATVHRVSRERPAAPIYGLTSNEHTYHWLALSWGTEAFLLKEDYHDKSRKDLMIYTDKVLKDAGKVADGDKIVILSSAQGEHQPGRTDSIYVHTVGACD

SEQ ID NO: 27750 - protein, 440 aa, Bacillus cereus ATCC 14579
MKQHPFKIASLGMQHMLAMYAGAIIVPLIVGGGLGLNQKELTYLVSIDLLMCGVATILQALSNRFFGIGLPVVLGCTFTAVGPMIAIGKQYGVSSIYGAIIAAGLFVVIFAKLFGKLVKLFPPVVTGSVVTVIGVTLVPAAINDMAGGVGSKDFGSLENLALAFGVLLFIIIMYRFFDGFIRSISILLGLLFGTIVAAFMGKVSLQAVGEADWFHGIQPFYFGTPTFELTPIITMILVACVGIVEATGVYFALSDICNKKIGEKELTKGYRAEGLAMVLGGIFNAFPYTTYSQNVGLVQLTGVRNRVIIYTCGGMLIALGFIPKIAAITTIIPKSVLGGAMLAMFGMVMAYGIKMLSSVDFGRQENLLIVACSVGIGLGVTVVPTLFSQLPESIRILTDNGIVLGSASAVLLNIVFNMVPQRKVKVEEEPVSMQSAVREA

SEQ ID NO: 27751 - protein, 601 aa, Bacteroides thetaiotaomicron VPI-5482
MTYHHLSVLVHRQAEKYGDRVALRYRDYETAQWIPITWNQFSGTVRQAANAFVALGVEEQENIGIFSQNKPEWFYVDFGAFANRGVTIPFYATSSPAQAQYIINDAQIRYLFVGEQYQYDSAFSIFGFCSSLQQLIIFDRSVVKDPRDVSSIYFDEFMAMGEGLPHNEVVEERTARASYDDLANILYTSGTTGEPKGVMLHHSCYLEQFHTHDERLTTMTDKDVSMNFLPLTHVFEKAWCYLCIHKGVQICINLRPADIQTTIKEIRPTLMCSVPRFWEKVYAGVQEKINETTGLKKALMLDAIKVGRIHNLDYLRLGKTPPVMNQLKYKFYEKTIYSLLKKTIGIENGNFFPTAGAAVPDEINEFVHSVGINMVVGYGLTESTATVSCTLPVGYDIGSVGVVLPGLEVKIGEDNEILLRGKSITKGYYKKAEATAAAIDADGWFHTGDAGYFKNGQLFLTERIKDLFKTSNGKYIAPQALETKLVIDRYIDQIAIIADQRKFVSALIVPVYGFVKDYAKEKGIEYKDMAELLQHPKIVGLFRARIETLQQQFAHYEQIKRFTLLPEPFSMERGELTNTLKLKRSVVSENYKELIEKMYEE

SEQ ID NO: 27752 - protein, 144 aa, Glycine max
MASCLMLLTKVSDTETPSRKRVLSGGDFKCKTCNRKFQSFQALGGHRASHKKLKLMASNLSCSTVTQKMHQCPICGIEFAIGQALGGHMRKHRASLNDGLITHDHVVPTSSGTKRLRLCLDLNLAPYENDLNLNLRTPTLNLFV

SEQ ID NO: 27753 - protein, 359 aa, Zea mays
MSMAQVCCDSAVAVTAAPVVGAEAEARARARAERRSRAGESGAWKHAAAAGTADATRKRSLGSGELLLARKHGAASVAGRRREMEDAVSVRDAFCAEGTADGGRRDFYGVFDGHGCSHVAEACRDRMHELVAEELAATAADSSVSAAAAWTAAMERSFARMDAEVTSAGGRAAAARSSTCRCDAHRCDHVGSTAVVAVVEEHPPSVVANCGDSRAVLCRGDGAPPLPLSSDHKPDRPDELERIESAGGRVIFWEGARVLGVLAMSRAVGDGYLKPYVSSVPEVTVTDRSDGDECLILGSDGLWDVVSNEAACEVARACLRRGRAKWCAEAAALLTKLALARRSSDNVSVVVVDLRRRNH

SEQ ID NO: 27754 - protein, 144 aa, Glycine max
MRDGMNSRILLDAAKSCILASSPVFRRQQFLIRCVGGSTDQRDMQALRSLEVDSQSIIRAITPALDPTRHKGQAGNIAVIGGCREYTGAPYFSAISALKIGADLSHVFCTTDAAPVIKSYSPELIVHPVLEESYNVGYNFKSSS

SEQ ID NO: 27755 - protein, 450 aa, Arabidopsis thaliana
MREIISIHIGQAGIQVGNSCWELYCLEHGIQPDGMMPSDTTVGVAHDAFNTFFSETGAGKHVPRAVFVDLEPTVIDEVRTGTYRQLFHPEQLISGKEDAANNFARGHYTVGKEIVDLCLDRVRKLADNCTGLQGFLVFNAVGGGTGSGLGSLLLERLSVDYGKKSKLGFTIYPSPQVSTAVVEPYNSVLSTHSLLEHTDVAVLLDNEAIYDICRRSLDIERPTYTNLNRLISQIISSLTTSLRFDGAINVDITEFQTNLVPYPRIHFMLSSYAPVISAAKAYHEQLSVPEITNAVFEPASMMAKCDPRHGKYMACCLMYRGDVVPKDVNAAVGTIKTKRTVQFVDWCPTGFKCGINYQPPTVVPGGDLAKVQRAVCMISNNTAVAEVFSRIDHKFDLMYAKRAFVHWYVGEGMEEGEFSEAREDLAALEKDYEEVGAEGGDDEEDEGEDY

SEQ ID NO: 27756 - protein, 616 aa, Yarrowia lipolytica CLIB122
MADYTARFRVDDDYYVQATPRTGSGSSQSNAKLFKLISAACAPHLVEPNLALDFEVADYINSKKGNSARDAAQAIVKLINHQSRNVSIMALSLLDICVKNCGYPFHLQISRKEFLNELVKKFPEKPPMNYTHTQCLILEVLQDWRETLCKHSRYKDDLGYIRDMHRLLTYKGYHFPEVNRDDAAVLREAESLKSAAELEAEEQDAHSAKLQELIRSGSPRDLQEANHLMKIMAGFKESKTNYAAKAAEDLEKIKTKAQLLDEMMQGHPSGTPFKPDDVYAEMYSAVKAAHPRIQKMTEEEGQDEETVAKLLQLNDYLHSLVEKFELLRKGDFGGAGAVNTKAPSGSATSKAVVSDLIDFGDDEPAAGGAGGATPAGNSGSGSGAAVDDLLGDLNGLSFNNSSGFGQGGSISLLGATNASSAASPAVSGASGKHSGTPAGSGNLFDLDFSPSASPAPAATPAPAFNFSSLSQLTANKAGETHAVKTAPSEDPAEAWNFVGASSGAAAGKEISILQTGDIKVSGLVSRSGSNVEITLQFSNKSFTDNITALDFKIAAPKSVTLKLDPASSDTLGAASINGVTQEAHVGNAGDKLKLRFKLNFNIGGKAVEEVGTVEDL

SEQ ID NO: 27757 - protein, 602 aa, Candida albicans SC5314
MIRLVRLGPGSSILRRQIGYIPNRGFPIFRNVKPPLESRIPTVSYKSNKLYSTSTVSSTINSSAKKTKSSSSSSSRYGKFFKFGLAIGLGTTILYYTNDSFKHIVLTIDRVNTVTVAMIRCFALYKETLGETYDSDIDRHKALSKTHKKAAEITLKALEKNGGIYIKLGQHITALTYLLPPEWTNTMLPLQDKCPQSSLEEIEKLFENDLGKKMSDLFIEFDPNPVGVASLAQVHIATLKNGEKVAVKIQHPSLKEFVPLDVALTKMVFDLMYKVFPEYPLTWLGDEMQNSIYIELDFTKEAENAQQTAEYFKNYQRETALRIPKIVEAQSRILVMEYVSGERLDNLKYMEQNNIDPSEVSSCLSHIFNNMIFTPGVALHCDPHGGNLAIRSVPKSKHNKSGHNFEIILYDHGLYRTIPLQMKRDYSHFWLAVLDNDVPNMKKYAMKIANIGDDDQKFRIFMSAITGRAPEEALNYDISSRRSNEEIQKIQGQINNDNRVLEDLMDILSNMPRMVLLILKTNDLTRNLDENLESSLGPERTFLIMANYCAKCVYDESKEEINQKYRGWSWLTHSISNWWYYQKRLSTLYLYDFVLMIRRLTF

SEQ ID NO: 27758 - protein, 411 aa, Arabidopsis thaliana
MSSKEKPTLGGTRIKTRKRNIAAPLDPAAFSDALVQIYLDNAGDLELVARSLESSDLNFSRYGDIFFEVVFIGGRTQTGSVKSDEGERHPYSIIDCEPKREAILPSVVYIQKILRRKAFLIKNLENVTRRFLQSLELFEENERKKLAIFTALAFSQKLSGLPAETVFQPLLKDTLVAKGIVLNFVTDFFNEYLVENSLDDLISILRRGKMDDKLLEFLPPTKRTTESFAEHFTKAGLTALVEYNERKIFEVKLKEIKAVLTSQVTEEINVDEVTEMVKQQVKDAKLPETEVVHVIWDRIMNAVQWSGKNQQQNSNAVLRQVKTWAPLLNTLCSTGNMEMELMYKVQMQCYEDAKLMKVFPEVVRSLYELDVLAEDTILHWYRKGTNPKGRQTFVKGLEPFVNWLEEAEEEE

SEQ ID NO: 27759 - protein, 1115 aa, Bacillus thuringiensis serovar konkukian str. 97-27
MEKNIQQEKDKVKPVFYDPKGRRNIAFISFLCISIVSVSIVFYFFFQSIFSTPEIPNMNTAVQQDNKLVPINQKLSDQQLKKEEFKPNTEAKDNKNLVNSPKDSKQRKEVYGFYVNWDENSTASLKENIDSLTTLVPEWYHLKADLTIRSEIKPEIVKLAEKNEVKIMPLLTNYTEEASGPDSGLIHKLLNSSNDVKTKFINDLVKQVEKNQFAGINIDFEAVPESDRENLTNFMKELTTVFHKHDLLVTQDVPANDKAFDYSALAKIIDRMIVMMYDEHYGAGEPGPIASNKWFQHTLKELNITSNKLIVAFGNYGYDWKVNSKEPAKSLTFSEVMAMAHNSDINIQWDKMSGNPYFRYKTEDNEHTAWFLDGVTLYNQVKIAMDNNAKGFALWRLGAEDPTIWKVLKNPIEAQKNPDVLHKITSLDEVNYSGQGEILQIENEKQNGLRDFKVGKDGYLTDEVYQSLPSAYEVQRYGKPKGKQVVLTFDDGPDPKYTPEILDILKENKIKAAFFVLGENAQLNPSIVKRIYDEGHEIGNHTFKHPNVADTSLLRTKVELNTTQRLIQEITGHSTVLFRPPYEADANPDSSNEILPILRAQNMNYTMVAEKVDPEDWATPSTNELVKRALNPVYKGEGNIILLHDAGGNRTHTVEALPIIIKELKKHGYSFVTISDLMNKERDEIMPPVSSEGKQYLLYNKAVFSGAGYFKHILTTIFYIAIGLGIFRFLFLIYFAWKQKRKTLSRTIHSSYQPFVSVVIAAYNEEKVIAKTIRSILDSKYGEFEVIVVDDGSTDGTSKVMQETFYKHPKVRFIQKENGGKSSAMNLGFQQSRGEIIVTLDADTIIAQDAISLMVRHFEDQNVAAVSGNVKVGNRRNLLTTWQHVEYITGFNLERRAFDELNCITVVPGAIGAWRKKNVVESGYLSEDTLAEDTDLTITFLRQGHRIVYEEKAYAFTESPEDVKSLIKQRYRWSYGTLQCLWKHRKALCNSKHKTLGFIALPNMWLFQYVLQFIAPFADILMIIGLFSSNPLKVLGFYFVFFLMDLLASLFAFKLEEENPKPLVWLILQRFIYRQFMTYVVVKSIFSSIRGVAVGWNKLKRVGSVEHSTEHKEAS

SEQ ID NO: 27760 - protein, 643 aa, Cryptococcus neoformans var. neoformans JEC21
MSRIPIEATLKTLATNDPPFPDLNIQSEEPEEQEKNDVESLSKEAADQAQAEALALEQDKGVTRIEALYIVFGKGWGLYSLWASIGLIAYVYSLSRSTTAYYAQFATSSFGEHTVVGTIGVINGILNGVAPPFIAKIADLWSRPHALLLAIACYAIGYAMCAGAHNIQTVVAGQVFYTLGNAGISFLNSLLIADITSMQWRAFVDGAVNLPYVLNAFVAGYIVSDINGYSANGWRWGYGMFCILLPVCMSPALIVLLIGDHRAKKLGALSLAASSKARREQLALTGQHEVVEEDETAGMNAWGKLRFYWTRLNVFGFLLMGFAFALLLTPMTLYTTAEGGYKNPSLIAMLVIGGVLFICWCIWDGFFAPYPFMPKRVLNRTFIACLTADFFYYFSSYLVDGYFSSWVYVIVDWNDRNYAFFNNTVTVAMCGFAVFFGLLIRYTHRYKVLQVIGLCIRVVGMGLTYRATLQATDAILVISQVLIGFGGAISVIASYIGVQGSVPHQDMAIATAVLNLWSSIGSSISIAISASVWNKQVPAHLEKYLGSTYNATELATIFGSINVARVTEPRDLVKQAYMESVSPLFLAGLITSFCSVIAALFASNYYCGQNHNAIEDKVIKFRNTDEIKEIQKDVKVVAKEELH

SEQ ID NO: 27761 - protein, 230 aa, Arabidopsis thaliana
DQQDHGQSGAMNYGTNPYQTNPMSTTAATVAGGAAQPGQLAFHQIHQQQQQQQLAQQLQAFWENQFKEIEKTTDFKNHSLPLARIKKIMKADEDVRMISAEAPVVFARACEMFILELTLRSWNHTEENKRRTLQKNDIAAAVTRTDIFDFLVDIVPREDLRDEVLGSIPRGTVPEAAAAGYPYGYLPAGTAPIGNPGMVMGNPGGAYPPNPYMGQPMWQQQAPDQPDQEN

SEQ ID NO: 27762 - protein, 111 aa, Glycine max
  misc_feature (17)..(17): Xaa can be any naturally occurring amino acid
  misc_feature (28)..(28): Xaa can be any naturally occurring amino acid
  unsure (1)..(111): unsure at all Xaa locations
KIANGPGFVVFPPPNFXSGKLAATKTYXLGGGKVTPKLNFAPLYGMSGALSLGFNKAGFQVNKYIPFGPVKMVIPPLLKRGEKKKGLLAASGFKNPLIKKGLGRGLKAPVF

SEQ ID NO: 27763 - protein, 154 aa, Theobroma grandiflorum
VLDTDGDELRTGVQYYVLSALWGAGGGGLDLGRATDQKCPEIVIQRRSDLDNGTPVIFSNADSEDDVVRVSTDINIEFVPIRDRLCSTSTVWKLDDYDNSAGKWWVTTGGVKGEPGPNTLSNWFKIEEAGGNVYKFRFCPSVCDSCATLCSDIG

SEQ ID NO: 27764 - protein, 143 aa, Parachlamydia sp. UWE25
MIIVLKHAFQTPVTLRYPEEKRILPARSRGRHYLTKWNDGLERCVGCELCAIVCPAQAIYVKPAANEPGHIHSHGERYASDFQINMLRCIFCGYCEEACPTGAIVLSNQYELSAYTREDMIYTKDRLTEKTPGESGRDPSREI

SEQ ID NO: 27765 - protein, 516 aa, Candida albicans SC5314
MFTNSIISKSTTRLTQLSRQLSTTTMAPTSTKNSIKHFDYLVIGGGSGGVASARRAAKYGAKVLLIESNFKKFGGTCVNVGCVPKKVMWYTADLAHKKHDLYAYGLDKEPDSIKYGDFDWAKLKHKRDAYVTRLNGIYENNLKREKVDYAYGFAKFINSEGEVEVTLSGDQELPFLDEGKTYKKGEKLVFSADKTLIATGGTAIVPPSVPGAELGTTSDGFFALEKQPKKVAIVGAGYIGVELSGVFSSLGSETHFFIRGDTVLRSFDEVIQNTVTDYYIDNLGINIHKQSTITKIEGSKDGKKVVHLKDGTSVEVDELIWTVGRKSLIDIGLDKVDVKINDKQQIVADEYQVTNNPKIFSLGDVVGKVELTPVAIAAGRRLSNRLFGGPEFAKDKLDYNNIPSVIFSHPEAGSIGLSTKEAIEKYGEENLKIYQSKFTAMYYAMMDDQKDKSPTVYKIICAGPEEKVVGLHIVGDSSAEILQGFGVAIKMGATKKDFDNCVAIHPTSAEELVTMT

SEQ ID NO: 27766 - protein, 158 aa, Staphylococcus epidermidis ATCC 12228
MESIYDFVVQKNNGESYKLEQYKGDVMLIVNTASECGFTPQFEGLQKLYDEYKDQRFIILGFPCNQFGGQEPGSGEEAAQNCKINYGVTFPIHEKVDVKGDNQHPLFHFLTNAAKGMINEKIKWNFTKFLIDREGNVIKRFSPQKKPEQIKTEIEKLL

SEQ ID NO: 27767 - protein, 334 aa, Lactobacillus plantarum WCFS1
MAVLVLGGAGYIGSHAVDRLVAKGYDVAVVDNLVTGHRAAVNEHARFYEGDVRDTAFMNTVFDQENVEGVIHFAAFSVVPESMKDPLKYFDNNTAGMVKLLKVMAKHDVKKIVFSSTAATYGEPKQVPIKESDPQVPTNPYGESKLAMEKIMHWSDVAYGIKFVALRYFNVAGAKPDGSIGEDHAPETHLVPIILQVAAGERDQLQIFGDDYPTPDGTNVRDYVHVVDLADAHILALEYLKQGHDSDAFNLGSSTGFSNKQMLDAAREVTGKPIPAVMAPRRAGDPSTLVAASDKARTVLGWTPQYDDVKEIIKTAWTWKESHPAGYDDRGGQA

SEQ ID NO: 27768 - protein, 614 aa, GIBBERELLA ZEAE PH-1
MANTPHGGVLKDLFARDLPRQSELEAEAQKLPALTLSERHLCDLELILNGGFSPLEGFLTEKDYNGVVENNRLADGALFSMPINLDVNQAEIDQLGLKAGARVTLRDFRDDRNLAILTVEDIYRPDKVNEAKKVFGSDDDTHPGVKYLFDTAKEFYVGGKLEAINRLEHYDFLDLRFTPSELRAHFNKLGWQKVVAFQTRNPMHRAHRELTVRAARSQQANVLIQPVVGLTKPGDIDHFTRVRVYKALLPRYPNGMAALALLPLAMRMGGPREALWHAIIRKNHGATHFIVGRDHAGPGKNKQGKDHYGPYDAQVLVQEHQEELGIKMVEFQAMIYLPDSDEYLPINEIPEGTRTLNISGTELRHRLRTGKDIPEWFSYPEVVKVLREENPLPAEKGFTVFMTGYQNSGKDQIARALQATLNQGGGRPVSMLLGENVRHELSPELGFTRKDRDLNIQRIAFVASELTKAGAAVIAAPIAPFEDARKAARDLVEKSGPFFLVHVATPLEYCEKTDRKGVYAAARNGEIKNFTGVDDPYEAPAKPDLVVDLEKQNVRSIVHQIVLLLESNGLLDRLARINGIGVTLNEMDKEKMGKCDELHCIALLVYLDDEAVSG

SEQ ID NO: 27769 - protein, 154 aa, Theobroma obovatum
VLDTDGDELRTGVQYYVVSVIWGAGGGGLALGRATDQKCPEIVVQRRSDLDNGTPVIFSNADSEDDVVRVSTDINIEFVPIRDRLCSTSTVWKLDDYDNSAGKWWVTTGGVKGEPGPNTLSNWFKIEEAGGNVYKFRFCPSVCDSCATLCSDIG

SEQ ID NO: 27770 - protein, 334 aa, Oryza sativa
MEERYEALKELGAGNFGVARLVRDKRSKELVAVKYIERGKKIDENVQREIINHRSLRHPNIIRFKEVCLTPTHLAIVMEYAAGGELFEQICTAGRFSEDEARYFFQQLISGVSYCHSLEICHRDLKLENTLLDGSPTPRVKICDFGYSKSALLHSKPKSTVGTPAYIAPEVLSRKEYDGKVADVWSCGVTLYVMLVGSYPFEDPGDPRNFRKTISRILGVQYSIPDYVRVSSDCRRLLSQIFVADPSKRITIPEIKKHTWFLKNLPKEISEREKADYKDTDAAPPTQAVEEIMRIIQEAKVPGDMAAADPALLAELAELKSDDEEEAADEYDTY

SEQ ID NO: 27771 - protein, 242 aa, Zea mays
  misc_feature (17)..(17): Xaa can be any naturally occurring amino acid
  misc_feature (182)..(182): Xaa can be any naturally occurring amino acid
  unsure (1)..(242): unsure at all Xaa locations
ETPPLVLRWRGGMQIFXKTLTGKTITLEGESSDTIDNVKAKIQGQGRGFHRDQQRLIFAGGRLEDGPTLADYNIQKESTLHLGLRLRGGMQIFVKTLTGKTITLEVESSDTIDNVKAKIQDKEGIPPDQQRLIFAGKQLEDGRTLADYNIQKESTLHLVLRLRGGMQIFVKTLTGKTITLGXESSDTIDNVKAKIQDKEGIPPDHQSLILAGKQMEDGSTLSDYNIQKESTLRLVLRLRGGQ

SEQ ID NO: 27772 - protein, 212 aa, Triticum aestivum
  misc_feature (65)..(65): Xaa can be any naturally occurring amino acid
  misc_feature (83)..(83): Xaa can be any naturally occurring amino acid
  unsure (1)..(212): unsure at all Xaa locations
MEAARHAGKKRGPDDEAEAEVHHTFRGAANALSQLYAQAVANQKASFIAGERHAMERAHRWDIQXHEEASGVSVADVLAYLQXEIESRGGMAGSSQHPTPQPAYGLPSANVQINSFSFGNVAAALDSQLYQTDQTRTAGISNAFSSPSQQNSHSNHLVQCSGHGPVNSPPSGSKARNDHSPQNQDSVHPNSYEPSMDMNHDAPLSCEPPYER

SEQ ID NO: 27773 - protein, 496 aa, Nicotiana tabacum
MVLSKTASESDVSVHSTFASRYVRTSLPRFKMPENSIPKEAAYQIINDELMLDGNPRLNLASFVTTWMEPECNTLMMDSINKNYVDMDEYPVTTELQNRCVNMIAHLFNAPLGDGETAVGVGTVGSSEAIMLAGLAFKRKWQNKMKAQGKPFDKPNIVTGANVQVCWEKFARYFEVELKEVKLSDGYYVMDPEKAVEMVDENTICVAAILGSTLNGEFEDVKRLNDLLIEKNKETGWDTPIHVDAASGGFIAPFLYPELEWDFRLPLEKSINVSGHKYGLVYAGIGWAIWRNKEDLPDELIFHINYLGADQPTFTLNFSKGSSQVIAQYYQLIRLGFEGYKNVMENCQENARVLREGIEKSGRFNIISKEIGVPLVAFSLKDNSQHNEFEISETLRRFGWIVLAYTMPPNAQHVTVLRVVIREDFSRTLAERLVIDIEKVFHGVDTLPARVNAKLAVAEANGSGVHKKTDREVQLEITTAWLKFVADKKKKTNGVC

SEQ ID NO: 27774 - protein, 461 aa, Arabidopsis thaliana
RFLFFYESAIATRSMVKFENGYSVETVFDGSKLGIEPYSIEVLPNGELLILDSENSNIYKISSSLSLYSRPRLVTGSPEGYPGHVDGRLRDAKLNHPKGLTVDDRGNIYVADTVNNAIRKISEGGVTTIAGGKTVRNGGHVDGPSEDAKFSNDFDVVYVGSSCSLLVIDRGNKAIREIQLHFDDCAYQYGSGFPLGIAVLVAAGFFGYMLALLQRRVGSIVSSHNDQEMFEADPDQKPMKHSRPSLIPAGDEQLEKQEETFVVSLGKLVSNAWESVMEILRKKQTGTSFQQYHGTTKQSAAFSTSTPWPIQESFVIRDEDGPPPVEPRNPTPRKTYAFMSKDAEKMQQLRQSRAFYSSWDAEFPNQQQQQQKQHQKHQHQQQQQQQHRRHYSSIPHTYYEQDSEKSNEIVFGAVQEQSSKRVAKPKPKPIESGDQMNNNTQQNLHYRSHSVSYPYGYYPNT

SEQ ID NO: 27775 - protein, 496 aa, Nicotiana tabacum
MVLSKTASESDVSIHSTFASRYVRTSLPRFKMPENSIPKEAAYQIINDELMLDGNPRLNLASFVTTWMEPECNKLMMDSINKNYVDMDEYPVTTELQNRCVNMIAHLFNAPLGDGETAVGVGTVGSSEAIMLAGLAFKRKWQNKMKAQGKPCDKPNIVTGANVQVCWEKFARYFEVELKEVKLSDGYYVMDPEKAVEMVDENTICVAAILGSTLNGEFEDVKRLNDLLIEKNKETGWDTPIHVDAASGGFIAPFLYPELEWDFRLPLVKSINVSGHKYGLVYAGIGWAIWRNKEDLPDELIFHINYLGADQPTFTLNFSKGSSQVIAQYYQLIRLGFEGYKNVMENCQENARVLREGLEKSGRFNIISKEIGVPLVAFSLKDNSQHNEFEISETLRRFGWIIPAYTMPPNAQHVTVLRVVIREDFSRTLAERLVIDIEKVLHELDTLPARVNAKLAVAEANGSGVHKKTDREVQLEITTAWKKFVADKKKKTNGVC

SEQ ID NO: 27776 - protein, 74 aa, Taraxacum officinale
NMSSGKCSCGSSCSCGSGCNCNSFGVETSATATIIVAGVAPQMTFAEGTETSFVAEGGNGCKCGSSCSCDPCNR

SEQ ID NO: 27777 - protein, 508 aa, Glycine max
  misc_feature (177)..(177): Xaa can be any naturally occurring amino acid
  misc_feature (312)..(312): Xaa can be any naturally occurring amino acid
  misc_feature (314)..(315): Xaa can be any naturally occurring amino acid
  misc_feature (373)..(373): Xaa can be any naturally occurring amino acid
  unsure (1)..(508): unsure at all Xaa locations
MLSRFTRLFSAPSNVARLVNGVQPRFSTTTVQDAPKIEEEPRFLEMVHQYFDIAGTFTDIPKDKLEVYKQCSAVFKVRLPLVRDNGKMEFIPAYRAQHKHHRLPVKGGTRYSEHIDLQEVEALSCLMTLKCAVVELPYGGGKGGIKIDPSKYSARELEDLTRRYTLELARKNFIGAXIDVPGPDMGTGAREMSWMKDTYTVFYGHNDINATACVTGKPLSQGGIKGRVESTGLGVFFGVREFLKDVELMKKYGIDSTNGYEGKTIIVQGFGNVGYFASKFMCEQGAKLIGVVDVEGSIYNPDGIDPDKLLEXRXXKGTLLDFPGSESYKDDSAFYKPCDFAIPAAVEKSINKLNAGRLQCKVLAEAANGPTTXAAEDILTKRGILVLPDILLNAGGVTVSYFEWLKNLDHMRPGRLVKRWEEKSKQNLLKIIADKTGTDLKLTAEDAKLLRGASELDIVYSGLEEVMCAAVEETVATSKKLNVPFRLASYVNAILKVHKVYEESGFAL

SEQ ID NO: 27778 - protein, 1053 aa, Synechococcus elongatus PCC 6301
MLAVSLRDHGFPSATVQIRPAFCVQSDVVGSGNPPRMNYCQNARTAMSAALQSSDDAFRTVSSPLATDLDLSSPLEFFLRHRLTVVEELWEVVLRQECGQELVDILTQLRDLTSPEGQAPEVGGEALVQVIETLELSDAIRAARAFALYFQLINIVEQHYEQTQYQLAYERSRLEPLPGPDESPEGLHTIEIPQHQLDPFAAVIPLNQDPATFQTLFPRLRQLNVPPQMIQELTDRLDIRLVFTAHPTEIVRHTIRDKQRRIAYLLRQLDELETGKNRGFRELEAQNIRQQLTEEIRLWWRTDELHQFKPTVLDEVDYALHYFQEVLFEAIPLLYQRFRLALQGTFPDLQPPRYNFCQFGSWVGSDRDGNPSVTSAVTWQTACYQRSLVLDRYITAVEHLRNVLSLSMHWSEVLPELLSSLEQESMLFPETYEQLAVRYRQEPYRLKLSYILERLHNTRDRNTRLQQQQEKDPTTPLPEYRDGTLYQAGTAFLEDLKLIQHNLKQTGLSCYELEKLICQVEIFGFNLVHLDIRQESSRHSDAINEICEYLQILPQPYNELSEAERTAWLVQELKTRRPLVPARMPFSESTREIIETLRMVKQLQEEFGEAACQTYIISMSRELSDLLEVLLLAKEVGLYDPVTGKSSLQVIPLFETVEDLQNAPRVMTALFELPFYTQLNPTQSEPLQEVMLGYSDSNKDSGFLSSNWEIHKAQKALGTVARDHRVKLRIFHGRGGSVGRGGGPAYEAILAQPGRTTDGRIKITEQGEVLASKYALPELALYNLETITTAVIQSSLLGSGFDDIEPWNQIMEELAARSRRHYRALVYEQPDLVDFFNQVTPIEEISKLQISSRPARRKTGKRDLGSLRAIPWVFSWTQSRFLLPSWYGVGTALQEFLQERPEQNLNLLRYFYEKWPFFRMVISKVEMTLAKVDLQIAHHYVHELANPEDQERFERVFSQIAAEFQLTCHLVLTITNHGRLLDGDPELQRSVQLRNGTIVPLGFLQVALLKRLRQYRQQTETTGLMRSRYSKGELLRGALLTINGIAAGMRNTG

SEQ ID NO: 27779 - protein, 466 aa, Glycine max
  misc_feature (91)..(91): Xaa can be any naturally occurring amino acid
  misc_feature (141)..(141): Xaa can be any naturally occurring amino acid
  misc_feature (150)..(150): Xaa can be any naturally occurring amino acid
  misc_feature (373)..(373): Xaa can be any naturally occurring amino acid
  unsure (1)..(466): unsure at all Xaa locations
MEMQDQIESTRSTIFGSASNIHSNAEKQAENVAPKVRKPYTITKQREKWTEEEHQKFLEALKLYGRGWRQIEEHIGTKTAVQIRSHAQKFXSKVVRESEVSDEGSIQPINIPPPRPKRKPLHPYPRKSVNSFRGPTIPNEXEISPSTNLXGCREDTPSPTSVLSTVGSEAFGSQFSEQTNRCLSPNSCTTDIHSVSLSPVEKENDCMTSKESEEEEKASPASRPLSTVSNPKMCMKPEFSSKEIEDATDMPQTTSIKLFGRTVSMVGNQKSLKIDDDGKPITVKSDEVDDVENEKLGQSGESKQVDTQLSLGVVSGNWPITPDADGANVTSIEPPKENQCFSESAPDAFFPQWSLSQGLPPFYLRPCNQVLIXLPLRPSSLKVRTREEESCCTGSNTESVCDMENQGKNSDAVDSKFQKYHEEGAAPQKKPARGFVPYKRCLAERDGHSFIVAMEEREGQRARVCS

SEQ ID NO: 27780 - protein, 382 aa, Mycobacterium avium subsp. paratuberculosis K-10
MAEAVIVEAVRSPIGKRNGGLSGVHPAELSAQVLNGLVDKAGVDPGIVDDVIWGCVMQAGEQALDIGRTALLTAGWPETVPGVTVDRQCGSSQQSIHFAAAGVIAGHYDVVVAGGVESMSRTPMGASLANGGRPYPQAFLDRYQGQIPNQGIGAEMIAEKWGFDRTALDEFSLASHEKAAAAQDSGAFDDQIVGIKDQDGNVVLKDEGIRRGTPMEKMASLKPAFKEDGVIHAGNSSQISDGSAAILFMSAEKAKELGLKPIAKVHTATLAGADPVIMLTAPIPATQKVLKKSGLSIDDIGVYEVNEAFAPVPMAWLKDIGADEKKLNPNGGAIALGHPLGGSGARIMTTLLYHMRDKGIRYGLQTMCEGGGQANATIVELL

SEQ ID NO: 27781 - protein, 283 aa, Glycine max
IKQFPVCTTTLKRICRQHGIKRWPSRKIKKVGHSLQKLQLVINSVQGASGAFQIGSFYSNFPDLASPNLSGTGFFSTLNQSDYPNSTSTQPDHGSLSPEGASKSPSSSCSQSSISSHSCSSMSELQQHRTANGAGNKVSTTVSEDSAGVVLKRISSEAELKSLSQDRAKLLPRSQSQETLGEHPKTQYQQPLLKTSSSKVDSHRVKVAYGDEKTRFRMPKSWGYEDLLQEIARRFNVSDMSKFDVKYLDDDCEWVLLTCDADLEECIDVCQSSESGTIKPDAW

SEQ ID NO: 27782 - protein, 360 aa, Chromobacterium violaceum ATCC 12472
MTQEKIAFVTGATGLLGNNLVRLLLAEGYRVRALARSERKAMEQFGELTGSRLEVVLGDLTDVKGFAPALRGCQVIFHAAAYFRESYKGGRHLDALRKTNVEGTQNLLREAYTAGIRRMVHISSIAVLGRNDSGLTDESMVLAIEEAPDDYYRSKIETDAVIFAFLDNHPDMHISLVLPGWMHGPGDLGPTSAGQFVEDYLQQKIPGVIDAAFSVVDARDVAQVALASSQTGERGERYLAAGHPVSMAGLLQAMEAVSGVPAPRRGLPRALLYAIASLQEIYARLTGKPVLLSLATVKNMANDYGRKFSSEKIRTRFGLGFRPMEETLAEEVAWIRQRMARAGMRQSGKENIGFANGGRR

SEQ ID NO: 27783 - protein, 115 aa, Taraxacum officinale
MEGTFFAKTVFGNEPSKPDYSNVPCAVFCIPPLSVVGLSEEQAIEQAEGDILVFTSTFNPMKNSISGRQEKSLMKLIVSAETDKVIGASMCGPDAAEIMQGIAVAVKCGATKARF

SEQ ID NO: 27784 - protein, 381 aa, Haloarcula marismortui ATCC 43049
MPPRFESVPTTGGSVTEKREYKDDYQDKTLYLPGPTEVREDVIEAMAEPMFGHRMDRMTDLYTTIVEDTKEFLGTENDVIVLTASGTEFWESTTLNLVEDSMLVPTSGAFSERQANVAERLGKDVDRIEYDWGTAVKPDDIRDALESGDYDAVGAVMNETSTGVRNPIEEIGDVVAEYPDTYFIVDAISCLGGDQIDIEGHGIDAIFTSTQKAFAMPPGLAVCAVSDAAYERELEKESASWYGGFQRCLDYYDRKGQTHSTPATPLMLAYRKQMKHMLDETHDARDQRHQEMAEYTREWAREHFDLYPEEGYESQTVTCIENTQDINVAETVEAVSEEYDMVFSSGYGDISEESFRIGHMGEHTVESIKELTDAIEDVADL

SEQ ID NO: 27785 - protein, 640 aa, Cryptococcus neoformans var. neoformans JEC21
MYSTTALLASALALAATAAHAATHEHWWNITYSAANPDGLQERRVIGVNGTWPPPVLTATQGDVIIVHATNSLDDDTVGTSLHSHGMFFNHSNWYDGAVGVNQCPIPNGQTLDYVIDTTTQVGTYWIHGHLDGQNTDGLRAPVVIFPQNGTGRTDNVTWDAEFIVAAADWYHEEYPVLEQRDFLTWKNPTGAEPVPKSAVIYAAYQNGTYMSTNEEICAGEGVSDGLSLYFEPGKSYRIRMINMGTLAMFWAALEGHEMYIIEMDGIEVEPYLVDAVTISVAQRYSVWVRALNQTDRNYAFMFIQDTDMYDAVPDDLVLNNTIQIVYNSSAPPATPYIVYDIETFDDTKVVPLEQEDFLRNPDVEIDLHAYFDTYDDGTNRASFNNITYQMPTSTPSMLTALTMGNDSFNDAVYGAMTNAFAYRHNSIVQLTVYNWDAGFHPFHLHGHVFQLASKSFDVTSNDTDINPPLNESQSNPARRDTVVVPPTGKVVLRWRADNPGTWMFHCHIDWHLSSGLAAIMVEAPEAFQALASDVPEQITDQCRWWNKGTEGNVVGKFSTTDFAGQPWGPWPLKMGWTPKAIGALAGCIITALLGIATIIWYASGELDEEELEEEIKREVERKKSKVPIWKKVLKTEVKV

SEQ ID NO: 27786 - protein, 317 aa, Rhodopseudomonas palustris CGA009
MAKLKVAAVQATTVPFDAAAATVRTVALIGEAAAKGAKIAVFPEAFIGGYPKGLDFGCAIGRRTPEGREDFARYVRGAIAVPGPEVDQLVAACAEHDLHATVGVIERDGGTLYCTALYLAPTGLLGIHRKIMPTGSERLVWGFGDGSTLTVVDTPYGKLGGAICWEHYMPLMRAAYYAKGVQIWAAPTADDRESWIATMRHIALEGRCFVIGACQVMRRSDFPADYASRIEAGPDEWMMHGRSVIVGPLGEILAGPLLDEEGILTADIDTDDILGSKLDFDAVGHYSRPDLFTLQVDERPQTPVAFSAKTGAGDAGA

SEQ ID NO: 27787 - protein, 154 aa, Theobroma mammosum
VLDTDGDELRTGVQYYVVSAIWGAGGGGLDLGRATNQKCPEIVVQRRSDLDNGTPVIFSNADSEDDVVRVSTDINIEFVPIRDRLCSTSTVWKLDDYDNSAGKWWVTTDGVKGVPGPNTLSNWFKIEEAGGNIYKFRFCPSVCDSCTTLCSDIG

SEQ ID NO: 27788 - protein, 368 aa, Streptococcus pyogenes M1 GAS
MEHKWKLWLFIVGVVLLIGGASVLIQKGQAKAFSQGKPQLPAKKVKSTKVDPNAPVDQKVIYLAGGCFWGVEEYFSQVDGVLDAVSGYANGRGDTTNYQLIHQTGHAETVEVAYDANRISLKELLLHFFRIIDPTSLNKQGNDRGSQYRTGIYYTDKADLAIIDEVFKEKAKDYKKKIVVEKAPLKHFIKAEDYHQDYLKKNPNGYCHIDINQATYPVIDESKYPKPSATEIKEKLSADEYRVTQKNETEKAFSNRYWDSFDAGIYVDVVTGEPLFSSKDKFESGCGWPSFSRPISPDVVRYKEDKSFNMTRTEVRSRSGNSHLGHVFTDGPKDQGGLRYCINSLSITFIPKADMEAKGYGYLLSSVE

SEQ ID NO: 27789 - protein, 154 aa, Theobroma mammosum
VLDTDGDELRTGVQYYIVSAIWGAGGGGLDLGRATNQKCPEIVVQRRSDLDNGTPVIFSNADSEDDVVRVSTDINIEFVPIRDRLCSTSTVWKLDDYDNSAGKWWVTTDGVKGVPGPNTLSNWFKIEEAGGNIYKFRFCPSVCDSCTTLCSDIG

SEQ ID NO: 27790 - protein, 765 aa, Neurospora crassa
MQRLALHYPPLDPAAEPPTEHILQQSNPTMSNIISQAGQKAKEALTSAPSSKKVDDLKNEFKETDKSARLTTDYGVKQTTADDWLRIVSDDKIGPSLLEDPFARERIMRFDHERIPERVVHARGSGAFGKFKVYESASDLTMAPVLTDTSRETPVFVRFSTVLGSRGSADTVRDVRGFAVKFYTEEGNWDLVGNNIPVFFIQDAIKFPDVIHAGKPEPHNEVPQAQSAHNNFWDFQFNHTEATHMFTWAMSDRAIPRSLRMMQGFGVNTYTLINAQGKRHFVKFHWTPELGVHSLVWDEALKLAGQDPDFHRKDLWEAIENGAYPKWKFGIQAIAEEDEHKFDFDILDATKIWPEDLVPVRYIGEMELNRNPDEFFPQTEQIAFCTSHVVNGIGFSDDPLLQGRNFSYFDTQISRLGVNFQELPINRPVCPVMNFNRDGAMRHTISRGTVNYYPNRFDACPPASLKEGGYLEYAQKVAGIKARARSAKFKEHFSQAQLFYNSMSPIEKQHMINAFGFELDHCEDPVVYGRMVQRLADIDLGLAQTIAEMVGGEAPTTTNHPNHGRKTINLSQTEFPPATPTIKSRRVAIIIADGYDNVAYDAAYAAISANQAIPLVIGPRRSKVTAANGSTVQPHHHLEGFRSTMVDAIFIPGGAKAAETLSKNGRALHWIREAFGHLKAIGATGEAVDLVAKAIALPQVTVSSEAEVHESYGVVTLKKVKPESFTDAVKIAKGAAGFLGEFFYAIAQHRNWDRELDGLHSMIAY

SEQ ID NO: 27791 - protein, 154 aa, Theobroma mammosum
VLDTDGDELRTGVQYYIVSAIWGAGGGGLDLGRATNQKCPEIVVQRRSDLDNGTPVIFSNADSEDDVVRVSTDINIEFVPIRDRLCSTSTVWKLDDYDNSAGKWWVTTDGVKGVPGPNTLSNWFKIEEAGGNIYKFRFCPSVCDSCATLCSDIG

SEQ ID NO: 27792 - protein, 404 aa, Frankia sp. EAN1pec
MEFAQSDKLADVCYDVRGPILDEATRLEAAGQRILKLNIGNPAPFGFSAPPSVLAAVVENLAAAQGYSDSKGLLPAREAVVRYAAGKGMTSVTPDDVYLGNGVSELIMMSLQALLNNGDEVLLPAPDYPLWTAVVSLTGGRPVHYLCDESAGWNPDLDDIIRKITPRTRAIVIINPNNPTGAVYDRPVLEELIEVARRHHLMLFSDEIYDRILYDGAEHHSPAALAPDLFCVTFNGLSKAYRLAGFRSGWMTLSGPRQHASSYIEGLNILANMRLCANVPGQFALQAALAEGSGAGDLVLPGGRLLEQRDTVVKLLNDIPGVSCVPPRGALYAFPRIDPEVYPIDDDESFVLDLLQAERILLVQGTGFNWPRPDHVRLVTLPCVDDLTDAVGRIDRFLTTYART

SEQ ID NO: 27793 - protein, 490 aa, Escherichia coli
MDIQKRVSDMEPKTKKQRSLYIPYAGPVLLEFPLLNKGSAFSMEERRNFNLLGLLPEVVETIEEQAERAWIQYQGFKTEIDKHIYLRNIQDTNETLFYRLVNNHLDEMMPVIYTPTVGAACERFSEIYRRSRGVFISYQNRHNMDDILQNVPNHNIKVIVVTDGERILGLGDQGIGGMGIPIGKLSLYTACGGISPAYTLPVVLDVGTNNQQLLNDPLYMGWRNPRITDDEYYEFVDEFIQAVKQRWPDVLLQFEDFAQKNAMPLLNRYRNEICSFNDDIQGTAAVTVGTLIAASRAAGGQLSEKKIVFLGAGSAGCGIAEMIISQTQREGLSEEAARQKVFMVDRFGLLTDKMPNLLPFQTKLVQKRENLSDWDTDSDVLSLLDVVRNVKPDILIGVSGQTGLFTEEIIREMHKHCPRPIVMPLSNPTSRVEATPQDIIAENKPPFSVFRDKFITMPGGLDYSRAIVVASVKEAPIGIEVIPAHVTEYL

SEQ ID NO: 27794 - protein, 154 aa, Theobroma simiarum
VLDTDGDELRTGVQYYVVSSIWGAGGGGLALGRATDQKCPEIVVQRRSDLDNGTPVIFSNADSEDDVVRVSTDINIEFVPIRDRLCSTSTVWKLDDYDNSAGKWWVTTDGVKGEPGPNALTSWFKIEEAGGTVYKFRFCPSVCDSCATLCSDIG

SEQ ID NO: 27795 - protein, 650 aa, Sinorhizobium meliloti
MSQIPSAQVPSGAGAKPLDLITIGRASVDLYGQQIGTRLEDVASFAKSVGGCPCNISVGTARLGLKSALLTRVGDEQMGRFIREQLQREGVETRGIVTDPERLTALAILSVENDKSFPLLFYRDNCADNALCEDDISEDFIRSARAVLVTGTHFAKPNADAAQRKAIRIAKESGARIVFDIDYRPNLWGLAGHDAGESRYIASDRVSAHLKTVLGDCDLIVGTEEEVLIASGESDLLAALKTIRSLSKATIVLKRGPMGCIVYDGPISDDLEDGIVGKGFPIEVYNVLGAGDAFMSGFLRGWLTGEPHATSATWANACGAFAVSRLLCAPEIPTWTELQYFLEHGSKEKALRKDEAINHVHWATTRRRDIPLLMALAVDHRSQLEDIAEGNPELLSRIPAFKVLAVKAAAEVAQGRSGFGMLIDDKYGRDALYAAGAHRDFWIGKPIELPGSRPLTFEFSQDLGSRLVDWPVDHCIKVLSFYHPDDPAELKAAQVAKLRSAFEAARKVGREILIEIIAGKHGKLDDRTIPRALEELYDAGLKPDWWKLEPQASRAAWAAIDAVIETRDPLCRGVVLLGLEAPYEVLKDGFAAARTSKTVKGFAVGRTIFADAAKAWLAGRMTDEQAVSDMAAKFKALVDLWLQLGETKAA

SEQ ID NO: 27796 - protein, 376 aa, Sinorhizobium meliloti
MSGKRRLGIGLIGTGFMGKAHALGFTIAARVFDLPFELDLVSVADVTQEGAEAARGRLGFRKATADWRELLTDPEIDIIDITTPNLLHKEMALAAFAHGKHVYCEKPLAPTVADCAEMVAAAEKAGVVTQVGFNYLKNPLIFLASDIIESGEIGEIRSFRGIHAEDFMADESVPWGWRLDPRSGGGALADIGSHMIACMRHLVGPIRSVLAETVIHIPQRPVARGATATRTVEVDDVTRAFVRFESGASGSFEASWIATGRKMQHDFEIYGSKGSIVFTQERLNEIRVYYAGDDIRSRGFRTIWAGPEHPPYGAFCVAPGHQIGFNELKAIEANEFLEAIAKGSKTSTDFREGYEVQKVLSATYHSARTNEWVEIG

SEQ ID NO: 27797 - protein, 467 aa, Thermus thermophilus HB27
MRTRRGSFWRCSVYDLLVIGAGPGGYVAAIRAAQLGMKVGVVEKEKALGGTCLRVGCIPSKALLETTERIYEAKKGLLGAKVKGVELDLPALMAHKDKVVQANTQGVEFLFKKNGIARHQGTARFLSERKVLVEETGEELEARYILIATGSAPLIPPWAQVDYERVVTSTEALSFPEVPKRLIVVGGGVIGLELGVVWHRLGAEVIVLEYMDRILPTMDAEVSRAAERVFKKQGLTIRTGVRVTAVVPEAKGARVELEGGEVLEADRVLVAVGRRPYTEGLSLENAGLSTDERGRIPVDEHLRTRVPHIYAIGDVVRGPMLAHKASEEGIAAVEHMARGFGHVDYQAIPSVVYTHPEIAAVGYTEEELKAQGIPYKVGKFPYSASGRARAMGETEGFIKVLAHAKTDRILGVHGIGARVGDVLAEAALALFFKASAEDLGRAPHAHPSLSEILKEAALAAWERPIHL

SEQ ID NO: 27798 - protein, 544 aa, Tannerella forsythensis
MAKEIKFDMNARDLLKKGVDELANAVKVTLGPKGRNVILEKKFGAPQITKDGVTVAKEIELACPYENMGAQLVKEVASKTNDKAGDGTTTATVLAQAIIGVGLKNVTAGANPMDLKRGIDKAVSKVVESIASQSEAVGTNMDRIEHVAKISANGDEGIGKLIAEAMQKVKKEGVITVEEAKGTETTVEVVEGMQFDRGYISAYFVTDTEKMETQFENPYILIYDKKISVLKDLLPILEQMVQSGRALLIIAEDIDSEALATLVVNRLRGGLKVCAVKAPGFGDRRKAMLEDIAILTGGTVITEEKGMKLEDAKMDMLGSADKVTVNKDNTTIVKGNGDKAAIESRIGQIKAQIETTTSDYDKEKLQERLAKLAGGVAVLYVGAPSEVEMKEKKDRVDDALHATRAAIEEGTVPGGGVAYLRAIPALEGLKGENEDETTGIEIVKRAIEEPLRQIVNNAGKEGAVVVQKVKEGTGAFGYNARTDVYEDLSEAGVVDPAKVTRIALENAASIAGMFLTTECVVADKKEEAPAPPMNPGMGGMGGMM

SEQ ID NO: 27799 - protein, 598 aa, Magnetococcus sp. MC-1
MCGICGVMYFQPQTPQPAMLEKMVEKLHQRGPDGGGIEIDGQLGLGHRRLKVIDLSENGHQPMQDDALGLTIVFNGCIYNYQALRQSLLELGYSFFSTSDTEVILKAYHAWGWQCVQRFNGMFAFAIYERQSGRVVLARDRLGIKPLYIHQDKSHLRFASSIPSLLAGGGITTTLDPIALHHFLSFHSVVPAPRTLLQQVQKLPPATVRIVEKNGSETNHTYWNLQMGPQAGDAERTEAEWQQLLDQALRAAVSRRLVADVPVGLLLSGGLDSSLMAGLLVESGQLSRGGLSTFSIGFEQAGGEEGDEFQYSDIVAAHFGTDHHKIFIETNNLPELLRETVRAMSEPMVSHDAVGFYLLSREVAKHVKVVQSGQGADEVFAGYHWYPKVDAGQDAFQDYRKAFFDRSHEECCEMVHRDIAAAWQQDYSSAFVESWFAHPHSGTAAVDKALHLDQNIMLVDDPVKRVDNMTMAWGLEARVPFLDHELVELAARIPGHLKLQQGGKGILKEVARPIIPHAVIDRAKGYFPVPALKHMDGPVLKLAKEVLTSPRATQRGLIQPSYINRLLDHPTQHITPLHGSKLWQLTLLELWLQTHDIH

SEQ ID NO: 27800 - protein, 175 aa, Sinorhizobium meliloti 1021
MAEPATKLPIKSEEKGVERRAESWLPFESLRSEIDRLFDDFAPSLWHRPLASALMRRVPRLSELDVAPAVDLAETEKTYEITCELPGMEEKDIEVAISNGTLTIRGEKQEEKKENKKEYVLSERRYGSFQRTFRMPDGVDTEKIAAKFSKSVLSITLPKTPEAQQNERKIQIKVT

SEQ ID NO: 27801 - protein, 463 aa, ASPERGILLUS NIDULANS FGSC A4
MSRQHTASSRDLNNTSTSQARPRLDVRAGNGNSSGLNRSAMNANPAISNHSSDRTISQNTFMTQADGSGGNPTLYSLAGPQYSRNQGAAYIDPNYRAHNPNYGKAQDAPVWSLTSPLPHVVRNGRWGKRKKPRQDRPEEGDTQAGGEGTGGSYSRPNANAPRQPASEEAPAFEPPDQADEEGKAEAQQATEDNREFFNYWGKIRHYVRQELAEWLGMTVAMLLGICAGLSTFTSSNLAGSFPSLAAAWGFGFMVAIYLTGGISGGHLNPAITISMWIWRGFPARRCLTYTIAQVIGAITAAGIAYALYHDAIVQLAASSQVPQPRTDAKQAMVVTPKPFVQPVAAFFTEFVGSAILIGTILALGDDSNAPPGAGMQAFIIGIMITVLVLALGYTTGGCFNPARDFGARVVTVMAGWGGGESPINYPPRRRKRAFILKNRNARARMGVGQDKIPDLERAAQEFE

SEQ ID NO: 27802 - protein, 404 aa, Pseudomonas aeruginosa UCBPP-PA14
MGMLSPLGLDVPSSWEGILAGRSGIAPIEHMDLSAYSTRFGGSVKGFNVEEYLSAKEARKLDLFIQYGLAASFQAVRDSGLEVTDANRERIGVSMGSGIGGLTNIENNCRSLFEQGPRRISPFFVPGSIINMVSGFLSIHLGLQGPNYALTTACTTGTHSIGMAARNIAYGEADVMVAGGSEMAACGLGLGGFGAARALSTRNDEPTRASRPWDRDRDGFVLSDGSGALVLEELEHARARGARIYAELVGFGMSGDAFHMTAPPEDGAGAARCMKNALRDAGLDPRQVDYINAHGTSTPAGDIAEIAAVKSVFGEHAHALSMSSTKSMTGHLLGAAGAVEAIFSVLALRDQVAPPTINLDNPDEGCDLDLVAHEAKPRKIDVALSNSFGFGGTNGTLVFRRFAD

SEQ ID NO: 27803 - protein, 197 aa, Capsicum annuum
MSASRFIKCVTVGDGAVGKTCLLISYTSNTFPTDYVPTVFDNFSANVVVNGATVNLGLWDTAGQEDYNRLRPLSYRGADVFILAFSLISKASYENVSKKWIPELKHYAPGVPIVLVGTKLDLRDDKQFFVDHPGAVPIATAQGEELRKTIGAPSYVECSSKTQQNVKAVFDAAIKGRPPASQDEEKKGKSQKACSIL

SEQ ID NO: 27804 - protein, 128 aa, Ralstonia solanacearum
MTIEKTDAEWRDQLSDIEYRVTREAATERPFTGRYWDHWARGIYHCVCCGTPLFESSTKFDAGCGWPSYFAPINGEVIAEKTDHSHGMVRIEVQCKQCGAHLGHVFEDGPAPTGLRYCINSAALKFGD

SEQ ID NO: 27805 - protein, 454 aa, Pseudomonas fluorescens PfO-1
MTSNNPQTREWQALSSDHHLAPFSDFKQLKEKGPRIITNAKGVYLWDSEGNKILDGMAGLWCVAIGYGRDELADAAAKQMRELPYYNLFFQTAHPPALELAKAIADVAPEGMNHVFFTGSGSEGNDTMLRMVRHYWAIKGQPNKKVIISRKNGYHGSTVAGASLGGMTYMHEQGDLPIPGIVHIAQPYWFAEGGDMTPEEFGIWAANQLEEKILEVGVDNVGAFIAEPIQGAGGVIIPPDTYWPRIKEILAKYDILFVADEVICGFGRTGQWFGSDFYDLKPHMMTIAKGLTSGYIPMGGLIVRDEVVAVLNEGGDFNHGFTYSGHPVAAAVGLENIRILREEKIIERAHEETAPYLQKRLRELNDHPLVGEVRGVGLLGAIELVQDKATRKRYEGKGVGMICRQFCFDNGLIMRAVGDTMIIAPPLVISKAEIDELVTKARKCLDLTLSALQG

SEQ ID NO: 27806 - protein, 222 aa, Lactobacillus gasseri
MVLVRHGESIANRDNVYTGWNDVPLSKKGIEQAKDAGLKVAKIPDFVPTHIHTSVLSRAIMTANIIADVCSFLYLPITKTWRLNERHYGALRGINKDVSKKIFGKEQVLKWRRGFDSVPPLLTQPVQDRRYQKYDMRLMPQGESLHQTQDRLMPYFWDHIAPELMSGHDQLIVAHGSSLRALIKKIEGISNKDIVKVEVPNAEPIVYTFDSDLHIIKKEILH

SEQ ID NO: 27807 - protein, 414 aa, Synechococcus elongatus PCC 6301
MAAPARAFVYQAYQAANQLARTKPLVRSQALQAIAQAIDSARDGILEANTLDLEACQDSEMPDLLRRWLKLTPERLDRTVEILERLSVRSDPIQQVMRASFQHEHSQAYSQLMPLGVIAFVYEALPELAAIATGLCLRVGNSILLKGGTEAVHTNQAIVSVMQEALESTELPTTSLISLPEDDPATSLAALVTQDQWIDLVIPYGRPELVQQVARLATSPVLRTSMGNCYLYWASGGELETVRWMILDSHASEPDAVNAIEKVLIDRDCNLSKLTVLMDSLRSKGFRLKGDEELVQEMPELELARHEDWSRPYLSRTVAFKLVPGIEAATDWINTHSSGHADSIVTDSYEDSRAFSRELNSAMVHVNASPRFSRSPRHSNEIALGMSNQKGYRRGRITLETLTTIKQVVLGLGQ

SEQ ID NO: 27808 - protein, 540 aa, Arabidopsis thaliana
VRGLPGRSGCPRTRPRRVTTMTFTFLLQSPPLPISPSPPQFSLSSSPLSKTQRFITPSQGSRLRTLCTKVIIPNMQDSGSPPLSYLTQREAAEIDETLMGPLGFSIDQLMELAGLSVAASIAEVYKPEEYSRVLAICGPGNNGGDGLVAARHLHHFGYKPFICYPKRTAKPLYTGLVTQLDSLSVPFVSVEDLPDDLSKDFDVIVDAMFGFSFHGAPRPPFDDLIRRLVSLQNYEQTLQKHPVIVSVDIPSGWHVEEGDHEDGGIKPDMLVSLTAPKLCAKRFRGPHHFLGGRFVPPSVAEKYKLELPSYPGTSMCVRIGKPPKVDISAMRVNYVSPELLEEQVETDPTVQFRKWFDEAVAAGLRETNAMALSTANKDKKPSSRMVLLKGFDENGFVWFTNYESKKGSDLSENPSAALLFYWEILNRQVRIEGPVERIPESESENYFHSRPRGSQIGAIVSKQSSVVPGRHVLYDEYEELTKQYSDGSVIPKPKNWGGFRLKPNLFEFWQGQPSRLHDRLQYSLQDVNGNPAWKIHRLAP

SEQ ID NO: 27809 - protein, 700 aa, Oryza sativa
MSVSSSSMGGGGGGDAGGRTVVWFRRDLRVEDNPALAAAARAGGEVVPAYVWAPEEDGPYYPGRVSRWWLSQSLKHLDASLRRLGAGKLVTRRSADAVVALLQLVRDTGATRLFFNHLYDPISLVRDHRLKEMMAAEGIIVQSFNADLLYEPWEVVDDEGQSFTMFAPFWNRCLSMPYDPAAPLLPPKRINSGDLSMCPSDDLIFEDDSERGSNALLARAWSPGWQNADKALTAFLNGPLIHYSVNRKKADSASTSLLSPYLHFGELSVRKVFHLVRMKQLVWSNEGNRAAEESCTLFLRSIGLREYSRYLSFNHPCSHEKPLLAHLRFFPWVINECYFKIWRQGRTGYPLVDAGMRELWATGWLHDRIRVVVSSFFVKVLQLPWRWGMKYFWDTLLDADLESDALGWQYISGSLPDGRELDRIDNPQLEGYKFDPHGEYVRRWLPELARLPTEWIHHPWDAPASVLQAAGVELGSNYPLPIVGLDAANARLQEALSEMWQLEAASRAAMDNGMEEGLGDSSEVPPIEFPRELQMEVDREPARVTANVLTTARRREDQMVPTMTSSLNRAETEISADFMNSVDSRAEVPTRVNFEPRTEREENFRTTAGNVARTNGIHEHNNFQQPQHRMRNVLAPSVSEASSGWTGREGGVVPVWSPPAASDHSETFASDEADISSRSYLDRHPQSHRLMNWSQLSQSL

SEQ ID NO: 27810 - protein, 756 aa, Mycobacterium avium subsp. paratuberculosis K-10
MTPQAFTATVVGSPRIGPKRELKRATEGYWAGRTGRAELEKVAATLRRDTWAGLAAAGLDSVPVNTFSYYDQMLDTAVMLDALPERARQVSDDLDRYFAAARGNSDVAPLEMTKWFDTNYHYIVPEIAPTTKFALNPDKVLSELKEALAQGIPARPVVIGPITFLLLSKGVDGAGAPIERLEELVPIYAELLSLLADNGAQWVQLDEPALVTDMCADAPALAEAVYNKLGSASNRPAIYVATYFGDPGASLAGLARTPVEAIGVDLVYGPDTAVAAVPELAGKTVVAGVVDGRNVWRTDLAAALDKLTTLLGSAARVAVSTSCSTLHVPYSLEPETDLDDALRSWLAFGREKVAEVVTLARALRDGREAVADEIAASNAAVASRKSDPRLHNDRVRARIDSIVASGSHRGDPAQRRASQDARLHLPPLPTTTIGSYPQTSAIRKARAALRSGEIDQAEYERRMKKEIADVITLQEQLGLDVLVHGEPERNDMVQYFAEQLEGFFATQNGWVQSYGSRCVRPPILYGDVVRTHPMTVEWISYAQSLTDKPVKGMLTGPVTILAWSFVRDDQPLADTANQVALAIRDETVDLQAAGIAVIQVDEPALRELLPLRRADQDEYLRWAVGAFRLATSGVADSTQIHTHLCYSEFGEVIGAIADLDADVTSLEAARSHMEVLDDLNAVGFSNSVGPGVYDIHSPRVPSTAEIAESLRAALRAVPAERLWVNPDCGLKTRNPDEVSASLKNMVAAAHEVRAGV

SEQ ID NO: 27811 - protein, 190 aa, Glycine max
VKYSSKQRIPFTAPSQFPSLTKYRLYLVLDFVNGGHLFFQLYHQGLFREDLARIYTAEIVSAVSHLHANGIMHRDLKPENILLDADGHVMLTDFGLAKQFEESTRSNSMCGTLEYMAPEIILGKGHDKAADWWSVGVLLFEMLTGKPPFCGGNRDKIQQKIVKDKIKLPAFLSSEAHSLLKGLLQKEQAR

SEQ ID NO: 27812 - protein, 793 aa, Yarrowia lipolytica CLIB122
MMRGFKQRMLSRSKSHSESSTKNKKKEDGPKRTFSLGDRKKTPEPTPAAATPSNVQAAATPVSSSSSASSITSVSGSSGNNNSSSNNNSNNNITSGATNTTNSSNANTTNPATSSNSNPSTGNVSSMLTPQQPAQSQAALQGLQQNQQQQGQQMDTNTPPAILVEGPTQLGSAQASSHVTMGHVTGHMSTHSGTPHHHPSSPGQLETMPTDLEPPKRHSFELLNADGPEVKTPRRHNSSRLEISKERELERLPGFNEVPFRKRAELFLQKVKQCNTIFDFGDPSSDIQGKDIKRMALHELLDFVANTRITITDEMYAQVVGMFGKNIFRPTPPLVNPVGEVFDPDEDEPVCEVAWPHMQLVYEFFLKFIESPDFNHTSAKKFIDHRFVQNLLELFDSEDIRERDCLKTTLHRIYGKFLNLRAYIRRSINNVFFQFIYETERFNGVAELLEILGSIINGFALPLKDEHKIFLSRVLIPLHKAKTLSLYHPQLAYCVVQFLEKDPSLTEEVILGLLRYWPKVNSSKEVMFLNEIEDIFEVMEPTEFQRIQIPLFSQLAKCISSQHFQVAERALYYWNNEYFCTLMSENITEILPVIFPALYENSRGHWNRTIHSMVYNTMKMIMEANPQLFDQCTMVYQERQDLKEEHEALVAKWWDMVVERAANSQENVDSPQFAKLLNQAQEEFSMLKTEDRDLQMSGIPEEGEEDSNKLANNQGPEEGMEHDHHEQHQQHQGLGQHEQQQQQQQGVEQQQQPHNIQPLGVVTNHETPVVAHNDEEHTGFHTPRGSSDFPFGY

SEQ ID NO: 27813 - protein, 458 aa, Porphyra yezoensis
MREIVHIQAGQCGNQIGAKFWEVISEEHGIDSSGAYIGTSDLQLDRAEVYYNEGSGGRYVPRAVLVDLEPGVLDTIKAGPHGGLYRPDNFVAGQSGAGNNWAKGHYTEGAELVDSVLDVVRREAEGCDCLQGFQVTHSLGGGTGSGMGTLLVSKIREEFPDRMMCTYSVMPSPKVSDTVVEPYNCTLSVHQLVENADAVFCIDNEALYNICYNTLKKPEPAYPDLNKLVSGVMSGITSSLRFPGQLNSDLRKLAVNLVPFPRLHFFMIGYAPLSADGVTAYRAKTVADLTKQMFDPKNMMADCDPRNGRYLTASAYFRGKVSTKEVEEQMDAIQTKNSGQFIDWIPNAIKASVCDVAPTGETMSAAFIGNSTAIQDIFKRVGSHFSAMFKRKAFLHWYTGEGMDEMEFTEAESNMNDLVSELQQYEAATVEGEEEEDEYAEGGVVNGDQSYDEPYQAA

SEQ ID NO: 27814 - protein, 257 aa, Desulfitobacterium hafniense DCB-2
MALNKVEICGVNTSKLPVLSSAKMKELFVAYQSGEKEAREKLIYGNLRLVLSVIQRFTNRGEYVDDLFQVGCIGLMKAIDNFDLSQNVKFSTYAVPMIIGEIRRYLRDNNPIRVSRSLRDIAYKALQVRDQLVNECSREPTVSEIADKLTLPREEVIFALDAIQEPISLFEPIYHDGGDPIFVMDQIGDEKHSDNSWLEGIAVREALRRLSEREKLILSLRFFHGKTQMEVADEIGISQAQVSRLEKAALGHMRKYV

SEQ ID NO: 27815 - protein, 472 aa, Bacillus thuringiensis serovar konkukian str. 97-27
MNHLRGGSEVANKELKRGLEARHIQMIALGGTIGVGLFMGSASTIKWTGPSVMLAYAIAGIFIFFIMRAMGEMLYMEPSTGSFATFGHKYIHPLAGYMTAWSNWFQWVIVGMSEIIAVGAYMQYWFPDLPAWIPGVIAMVILGAANLISVKSFGEFEFWFAMIKIVTILLMIIAGFGLIFFGIGNGGEAIGISNLWSNGGFFTGGFSGFFFALSLVVGAYQGVELIGITAGEAKDPKKTLTRAIQSTIWRILIFYIGAIFVIVTVYPWDQLSTIGSPFVATFAKVGITAAAGLINFVVITAAMSGCNSGIYSAGRMLYTLGVNGQAPKYFTKLSGNGVPLFGTVGVIIGLAVGVVLSYIAPKNLFVYVYSASVLPGMVPWFVILISQINFRKEKGTEMKDHPFKMPFAPVTNYLTIAFLIMVLIGMWFNDDTRISLVVGIVFLAIVTISFYAFGIGKRPPLDVPNDQEISSK

SEQ ID NO: 27816 - protein, 748 aa, Oryza sativa (japonica cultivar-group)
MGCVSSKQFHGEEQRGGEGKPRRRPSSNSLRRLVSYNSSKRHEHFEEEDEEGVVVSATSSSAGHRVGNDVSTARLIRKPPAPVVEAVAVPVAALPDEAASVAVSVVDVERPVAAPANWRRAPNGAAEQEPRSGGTRSEAKPRITDVVPNGVQGGHAAAGWPRWLTEVAAEAVRGWQPRKAESFEKLDKIGQGTYSSVYKARDLESGKIVALKKVRFANMDPESVRFMAREIHILRRLDHPNVIKLEGLVTSRMSSSLYLVFEYMEHDLAGLAATPGIKFTEPQVKCYMQQLLSGLEHCHNRGVLHRDIKGANLLIDNNGVLKIADFGLATFFNPNQKQHLTSRVVTLWYRPPELLLGATNYGAAVDLWSAGCILAELLSGKPIMPGRTEVEQLHKIFKLCGSPSEDFWANLKLSRATIFKPQHPYRRCVNDVYKDFPPPALALLDCLLAVEPQNRGTAASALGSEFFTTKPYACDPSSLPKYPPSKEYDAKLRDEEARRQRAAAVKGHESEAGRRKQLPAPNGNNELQQRRVQLNPKSSSNKFIPKEDAVTGFPIDPPGRAGDNVYPQRAPLMHAGRSSSTLGRSSGTDQNAQRFYTSQIAAAEMSTATGGQRGNATKLSSNLGESARRQYLREHRSSSRYSQLAAAEPSDRPEWTHQFQERPSSSHRKDDGAANKEPTVVNGAKKSRIHYSGPLMPPGVNMEEILREHERQIQQAVRRARLDMGKGKNHVERDQSESLLYTTQNGRP

SEQ ID NO: 27817 - protein, 516 aa, Blumeria graminis
MHRTFHPYFLLKMSGSSQRHSHVTGYLILLVAVATLGPLQYGYHLAELNAPQDVITCHSLLGRQNVASKSLSNPSQCIPMTEAEFAALSSIYILGGLAGAITAGPISSSHGRLLTMRITGIFFILGSLIETIAESVPVMSTGRFLAGLGAGAATVVAPMYISEISPAEKRGLFGTMTQAMISVGIFVTQSLGYFFSRGMLWRIILGVGAGFGLLLGAGLCFIPESPSWLASHHNPTLAVKTLQRIRGAGTPIHKETAGWNVQEINGEEERLIRPSDLSSTSQYNQHNLATPNLKLPSVGFFGVLQDPLYRPAIMAVCGIMIAQQLSGINSIMMYSVSLLRGVLPIPSILLTIIMSAMNVITTIVCAPLADRIGRKSCLLLSIAGMGTMSLLLAISLRMEWKLFSAIAVISFVAFFATGLGPVPYIMASELVGQEAVGAAQSWALAANYLASFLVAQFFPLLNSWMNNRWGGAGWVYFIFTAFAGVSWIFVTYYVPETNGKTGPDEVWGRTTGEVAD

SEQ ID NO: 27818 - protein, 508 aa, Streptomyces avermitilis MA-4680
MAEQHEYLRARFSRRNMIRGGAVTLGAVAGGAFVPGATARAAVPAQRAAASAEKVDGALVAPFGRHLAYGTDPRTEMTVSWQVPVAVKKPYIRIGAHPWDLSRKIEAEVRALHTPAGVGASGDHTQYYLHARLTHLRPGRTYYYGVGHDGFDPAAPHLVGTLGTFTTAPAHSEPFTFTAFGDEGVGYHGLANDALLLGQNPAFHLHAGDIAYADPAGAGKTGDTGFDSRIWDQFLAQTESVAKSVPWMVSYGNHDMEAWYSPNGYGGEEARWQLPENGPDKANLPGVYSFVHGNTAVISLDANDVSFEIPANLGISGGTQTKWLEARLKKYRAAKDIDFIVVFFHHCAYCTSTAHSSEGGVRQEWVPLFEKYTVDLVINGHNHQYERTDVIKGDEVTKKLPIGGTAYPETEGVVYVTAGAAGRSLYAFTAPDSYEGHENDVESVSAFVNLKGGKQNETVAWSRVRYLDYSFLRVDVTPAAKGRTATMRVRGIAESGVEIDHFTVARRV

SEQ ID NO: 27819 - protein, 164 aa, Triticum aestivum
  misc_feature (39)..(39): Xaa can be any naturally occurring amino acid
  misc_feature (44)..(44): Xaa can be any naturally occurring amino acid
  misc_feature (86)..(86): Xaa can be any naturally occurring amino acid
  unsure (1)..(164): unsure at all Xaa locations
SSHERYSSRVSSCGLVHIPCTSGADPLYAQLRSLCGQPXQDDMXYVRRPAASDLGTLMPLVDHEPLKPDIMWISDDFSLEAPDSSXLLAVDECAAPVILLDLQDGVFHIVTFIVNVCQYKSSSVPYMAASHSYELCEAVRAGDTRAYPGAYISLLFIDTTLNYQ

SEQ ID NO: 27820 - protein, 361 aa, Oryza sativa (japonica cultivar-group)
MAYSTNQIMILQHAWMLVGEANSQLIISTVAHSWYQSNSIEVVLWWFWSRIAQTPTEYGFFGQAMACRTDEENDDDPRALEHLDPLSMQQLAESLANELFNQPQEQQEEQHGYHNPSLRVLPFVGDINKPEGHTPAAAAIRDSFFSLTNGSSSSLNFSALEQQQDSGPMTKFCSPLSEMKRGGRRATSSMQEHVIAERKRREKMHQQFTTLASIVPEITKTDKVSVLGSTIEYVHHLRERVKILQDIQSMGSTQPPISDARSRAGSGDDEDDDGNNNEVEIKVEANLQGTTVLLRVVCPEKKGVLIKLLTELEKLGLSTMNTNVVPFADSSLNITITAQIDNASCTTVELVKNLKSTLRNF

SEQ ID NO: 27821 - protein, 431 aa, Silicibacter sp. TM1040
MTDTQKTAQLSLNGETYELPIFSPTAGPDVLDIRKLYAQSGVFTYDPGFTSTASCDSTITYIDGNEGVLLHRGYPIDQLAGKSHYLEVCYLLLYGELPTATQLEDFETRVTRHTMVHEQMHNFFRGFRRDAHPMATLVGVVGAMSAFYHDSTDISDPWQREVAAIRLIAKLPTIAAMAYKYSIGQPFVYPRNDLDYAANFLHMCFSVPAENYTVDPILSRAMDRIFTLHADHEQNASTSTVRLASSSGANPFACIAAGIACLWGPAHGGANQACLEMLKEIGSVDRIPEFIARAKDKNDPFRLMGFGHRVYKNTDPRAKVLKQSADEVLELLGVEDNPLLQVAKELEQTALNDPYFIEKKLFPNVDFYSGIILEAMGFPTSMFTPIFALSRTVGWISQWKEMIGDPQNKIGRPRQLYLGETQRDYVDIENR

SEQ ID NO: 27822 - protein, 493 aa, Oryza sativa (indica cultivar-group)
MDASAGGGGNSLPTAGADGAKRRVCHFYDAEVGNYYCGQGHPMKPHRIRMTHALLAHYGLLDQMQVLKPHPARDRDLCRFHADDYVAFLRSVTPETQQDQIRALKRFNVGEDCPVFDGLYSFCQTYAGGSVGGAVKLNHGHDIAINWAGGLHHAKKCEASGFCYVNDIVLAILELLKYHQRVLYVDIDIHHGDGVEEAFYTTDRVMTVSFHKFGDYFPGTGDIRDIGYSEGKYYCLNVPLDDGIDDDSYQSIFKPIISKVMEMYRPGAVVLQCGADSLSGDRLGCFNLSGKGHAECVKFMRSFNVPLLLLGGGGYAIRNVARCWCYETGVALGHELTDKMPPNEYFEYFGPEYSLFVAASNMENRNTNKQLEEIKCNILDNLSKLQHAPSVQFEERIPETKLPEPDEDQEDPDERHDPDSDMVLDDHKPMGHSARSLIRNIEVKREITESEAKDQHGKRLTTEHKGPEPMADDPGSSKQAPVSRRLLYPSANP

SEQ ID NO: 27823 - protein, 425 aa, Rickettsia rickettsii
MDSRLRGNDIEKMSYYDIIFSKHIDKIKSEGRYREFKALKRQADNFPFAEHANKQIVMWCINDYLGMSKHAKVMHASIDALIKYGVGSGGTRNIGGNNIAILGLEKELANLHKKQAALVFTSGFVANDTTLASLAKIMPDIVFFSDELNHASIIAGITSSRAEKYIYKHLDVKHLEELLQSVDINRPKIVVFESAYSMDGFFSPIKDIINLAKKYNALTFIDEVHTVGLYGKRGGGIAELLNCSDQIDIIQGTLAKAYGTIGGYITSNHNLVDAIRLTAPGFIFTTSLPPVISTAATHSIRHLKESNEERIKHQEVVTKLKNSFERFNIPYLKNESHIVPIIIGDPIKTAEASNMLLNEYGIYVQHINFPTVPRGTERLRIIPTPAHTDKMINDLSVALVQIFAELDIELSSAKELNEEVRLNSN

SEQ ID NO: 27824 - protein, 359 aa, Frankia sp. EAN1pec
MTELVQLLTPDGRRIASDSGQETDYQAFVADVTDDDLLGLLRDMIIVRRLDDEGTALQRQGELCLWASLRGQEAAQVGSGRALGPSDMAFPSYREHGVAWCREVDPLHVFGLFRGTSLGGWDPAEHGFALYAIVVGSQTLHAAGYAMGITRDGGDGAAISYFGDGASSEGDVSEAFGWASVFSAPLVFFCQNNQWAISEPYRRQSRVPVYQRARGFGFPSVRVDGNDVLATLAVTRWALRQARSGGGPVLVEALTYRINPHTTADDPSRYRPADEVSSWRMRDPIERLTIHLRARGALTDEREAGLAAEANAVAADLRARCLALPDPPEAALFDHVQVTENNLVAAERAAFTELRGALL

SEQ ID NO: 27825 - protein, 434 aa, Rickettsia rickettsii
MTNENNNDSEFAELKIRGKIFKLPILKASIGEDVIDISRVSAEADCFTYDPGFMSTASCQSTITYIDGDKGILRHRGYDIKDLAEKSDFLEVAYLLIYGELPSGEQYNNFTKQVAHHSLVNERLHYLFQTFCSSSHPMAIMLAAVGSLAAFYPDLLNFKEADYELTAIRMIAKIPTIAAMSYKYSIGQPFIYPDNSLDFTENFLHMMFATPCTKYTVNPIIKNALNKIFILHADHEQNASTSTVRIAGSSGANPFACISTGIASLWGPAHGGANEAVINMLKEIGSSEYIPKYIAKAKDKNDPFRLMGFGHRVYKNYDPRAVVLKETCKEVLKELGQLDNNLLQIAIELEAIALKDEYFIERKLYPNVDFYSGIIYKAMGIPSQMFTVLFAIARTVGWMAQWKEMHEDPEQKISRPRQLYTGYVHREYKGIRER

SEQ ID NO: 27826 - protein, 823 aa, Aquifex aeolicus VF5
MEFLRDFGKTALIHQGNEISYAELLENIASFANLMDITPNERVGIVMENRPEWVYAFYGTWKKGGIVVPIDFMSTPQEIRYILEDAEPSIIFCSDETYPRVREASEDLKVEIVNVDNLVLPTPWEGIVRRDEDDVAVLPYTSGTTGNPKGVMLTFKNLMSNIRGVSEVGIAGKEDKTLAILPFHHMYPLMTTMLLPLYLGATVVFLDKLTPEDIIEKLQKYQITVLIGVPRLYQLFHRRIMEEINKNVLAKNLFKLMKKVKNQKIRKTVFKKVHDAFGGRIKYMVSGGAKLPLDIAQDLTTLGFTVIEGYGLTETSPIVSFNPPNRIKLGSVGVPIKGVEVMTTSEGEIIVRGDNVMKGYWKKPEETQKVIINGWFYTGDLGEIDEEGYIYITGRKKEIIVLGSGKNVFPEEIESKILAKAPYIKEVGVFEKDGKLLALIYPDFEKVKELGITNLEETIKWEVIDKVNRELPEWKRVVGFKIVKTELPKTRLGKLRRFLLPQIYEKAEEIKEEKTEDYSVFETEEGRIIKEFLEKISQKEVKPGDHLEIDLGLDSLAKVELLGFIETNFGVSLSEEELSKNLVVKDLIELVRSKKKSVDTKEVSWKDILTKAKPYELYHYPLIFELGRKLLKLYFKLYHRIDVRGLENLPKPPFIIAPNHQSYLDAFAIAAVLPKEIAHETYFLGDETYFRNPITSTFGKLAHVITVNVNKGLKESLQKTAYALMSGKVVVIFPEGARTRTEELMEFKKGVAILARELGVPIVPVAIEGAYEAWSVYDKFPKPKKIKIMFGKPVDPDEKSYEEITKELYEWIKSMLEFLKKES

SEQ ID NO: 27827 - protein, 524 aa, Sinorhizobium meliloti
MSTPGAYFRLIRIGWVLARENAFAAVPSEHLPPLARFVQKLAGLLASREARLGARSGRLARAVERLGPSYVKIGQFLATRPDVVGAELAADLSLLQDRMATFPESASRAAIEASLGRPVGELFLEFSEPIAAASIAQVHPAVVMRDGTRERVAVKVIRPGVRQRFVADIEAMYLVSRMQERFLPYTRRLRPVEVTKTLEQTTKVEMDLRLEAAALSELGENTREDSGFRVPRVDWERTGRDVVTMEWIDGIKMSDIEGLKRAGHDLNRLAETLIQSFLRHTLRDGFFHADMHQGNLFVDEAGHIVAVDMGIVGRLGRKERRFLAEILYGFIMRDYQRVADVHFEAGYVPSHHDAASFAQAIRAIGEPIHGQPAETISMAKLLTLLFEVTELFDMQTRPELVMLQKTMVVVEGVARTLNPRFNMWKASEPVVGKWIRDNLGPKRIVADLRDGIHAALRVAEALPEIAARTERFSGEIMAMSENGLRFDPETAEAIGRSEARHTRSGRIALWVIAAALVYIAWQLA

SEQ ID NO: 27828 - protein, 271 aa, Brassica napus
MAEEYKNASEEFKNVPEHESTPKVATTEEPSATTGEVKDRGLFDFLGKKEEVKPQETTTLESEFEHKAQVSEPPAFVAKHEEEEEREHKPTLLEKLHHKHEEEEEENKPSLLQKLHRSNSSSSSSDEEGEDGEKRKKEKKKIAEEDEKTKEDRKGVMEQIREKFPHGTKTEDDTPVIATLPVKEETVEHPEEKKRLMEKIKEKLPGHSEKPEDSQVVDTAAAVPVTEKTAEHPEEKKGLMGKIKEKLPGYHAKSTEEEEKKKEKESDDLEG

SEQ ID NO: 27829 - protein, 392 aa, Saccharomyces cerevisiae
MQLISILSLLSSLMCSLTVLGSSASSYVKFPVQKLADIINICTQDVSTVFKRNEVLNTTVINGIGVYVVKMEIGTPPQTLYLQLDTGSSDMIVNNADIAYCKSMSDGSDYASTDNYELTATFNGLPSTTISSEAYNTLCSYWGTFDASNSSTFENNATFFNNTYGDGTYYAGTYGTDVVSFENITLNDFTFGVSNDTIGNPSGILGISLPIAEFTDGIEYALALNRTPFIYDNFPMELKNQGKINKIAYSLFLNGPDAHFGSILFGAVDKSKYTGQLYTLPMLQAFNTLGSNPGMIITAQSVAILDSESGNKTVSDIQFPVMLDSGTTFSYLPTEIAEAIGKSFDGEYSSDDQGYIFDCSKVNDTLLSVDFGGFNISANISNFVTSAKDRCV

SEQ ID NO: 27830 - protein, 146 aa, Brassica napus
MSSGGTVRRVSRQDIQLAQNLIERCLQLYMNQKEVVETLLEQAKIEPGFTELVWQKLEEENREFFKAYYLRLMVKHQIMEFNKLLEQQVHHMQQMHPSGVAPVQNTNGSHIQSMNQKHLGYASEHTDQSLKSIPSSLSNAYLNGSS

SEQ ID NO: 27831 - protein, 199 aa, Fusobacterium nucleatum subsp. nucleatum ATCC 25586
MGNLKNHLMKYERRPIMKIYDFKVKNRKGEDISLENYKGKVLLIVNTATRCGFTPQYDELEALYSKYNKDGFEVLDFPCNQFGNQAPESNEEIHTFCQLNYKVKFDQFAKVEVNGENAIPLFKYLKEEKGFAGFDSKHKLTSVLTEMLSKNDPDFAKKSDIKWNFTKFLVDKSGNVVARFEPTTSAEVIEQEIKKLLEV

SEQ ID NO: 27832 - protein, 468 aa, Sinorhizobium meliloti 1021
MSGFDARQCVGGQIRLKSSINPGSATMLKISKLLVLAALFDPFGGAAEATGIDAGVSAMLERVQPAVVSIRTISSGIFRNEMLEDPNVRKVLGLPDEVFIVQTGATATGSGVIIDREGGYIITSRHLVADADDVSVTLADGRVFHADRVGEDAPTDLAVIKIDASELAALQWGNSSELKVGEFVAAIGSPFGLAQTATFGIVSGLGRAGLGADEYQDYIQTDAAINPGNSGGALVNVSGKLIGIARGIAAPDQTSTGIGFAIPSNIVAKIVRELISHGEYKRGWLGLSVTAAVDAQDGSATQPTGLIVNELACNSPAERQGVRLGDVITGLDDRAFSTEQAFRNAISLLPANARITLDVRRGETSQKLGMTLSDSVDRPDVSDQGSVIVKFPSESGSPACVPAGAVLVDVAPGSAAYSIGLRTGDYLTAINGKPPVSADQIGSVLESVEGSASLDILRAGTAYRIDVQ

SEQ ID NO: 27833 - protein, 1270 aa, ASPERGILLUS NIDULANS FGSC A4
MALRNRIVMPGWHIQNTEVLQGPISGWSLPNADVSNWSRIGSKGTVMGGLIESGRYNEQTLFRSDTLSTIEKSHFQSPWLFREEFSIPELDAGHHVFLNLHGVSSKADVFINGHLVVSCEDQKGAYAGRTQEVTAFIRPEVNCLLIQAWPTDYLKDMAISFADWNPAPPDNGMGVWRHVVIKVTGPVSVSPLRVTYAQDEANPHSRVTVTVKTEIENHENAPQDVAIHCQIAVPGNSQNVALSRRMYLLPHSRSTVALETTLEDDQVQIWWPAAWGQQPLYRVDLNVSLPPSFISDSAWAGFGIRKVEYTLNNHGDGQFFINGRHFQVRGAGYAPDIFLRFDPERVEAILRYAVHIGLNTIRLEGKLENSILYGLADRLGLLVMAGWECCDKWEGWTYNEDVDGVEVWKDEDYRIGEASMLHEAEMMQTHSCMLAFLVGSDYWPDERATAAYLGALNRMDWSNPVIASASKRGHPPQLSSSGMKMEGPYDWVPPGYWWGERLGAAFGFASELSAGSGTPELSSLRRFLSDVDLASLWGKPQAGHYHQAPSGSVFHSREIYNKALKRRYGSPTSLEDYVFKCQVMDYEATRAQFEAFAARQNAARPAAGVVYWMLNSAWPSLHWQLFDYYLYPMGAYYGAKIGARPEHVAFDYHSSSVYLINHSLSAGVRRITAECIDLRGRRLYHREETVEATEITSKQVFSIPEVTTLATVALMRLVLSASDVEISRNVYWLNGRMDRLNWDKSTWYYTPTTRYADFTSLSQLEQAKMNTSIDMLAHPDPSMKQLRVRLQNMSSIPAFFVRLTVHDPMTGEQLTLYYTNDSSAYSPVCPTLQIGHHQQKTINNATMAQTATLVSEILQSSPLDLVPYENLYKHFHANPELSLQEQRTSQRIVDHLASLNAYDIHTGIGGFGLAGVLRNGPGKTVLLRADMDALPVKEETGLPYSSTATATDPDGVSRPVMHACGHDMHITALLAAAEQLVRVRDKWNGTLVVLFQPNEERGAGAQAMVDDGLYDKIPVPDIVLGQHVMRLRAGTINCRTGTIMAAADSMKITVFGRGGHGSLPHTTVDPVLLAAHIVVRLQGVISRELDPDDVGVLTVGSLQAGQTENVISDKAEIGIDFRSVSLETREKIVGAVKRIVKAECMASGSPKDPIFTPTRRFPPTVNEIALASKLAGSFSAHFGADFDPDTPRTMVAEDFSILATACGRPSCFWFLGGIDRDIWDALVKDGKEGEIPGNHSARFAPVIQPTLKVGAEALAVGALTFLCRED

SEQ ID NO: 27834 - protein, 371 aa, Bacillus subtilis subsp. subtilis str. 168
MTPDTSMKRVVVKIGSSSLTSLHGEISIRKLEALVDQVVKLKDAGYEVILVSSGAVAAGYRKLGFIQRPEKLPEKQASASIGQGLLMEAYSKLFLAHGYVASQILITRSDFSDEYRYNNVRNTMNVLLERGIIPIINENDTVTVNRLKFGDNDTLAAKVAGLIDADMLVILSDIDGLYDGNPRTNPEAKKIQRVSEITPDIEACAGDTGSIVGTGGMRSKLDAFKIVMASGIKGFLGQADAGDILYHAVHEQAEGTYFEAEGTLPLNQKEQWIAFNSGPEGEMILSDDCSRKITNGQSSLYLDGVQKIKGKFKSGSVVRLMDSKGTEIGLGIVNYSSVQLQEPEKKKELTNRALIDQEAFVCHVDFSLPVN

SEQ ID NO: 27835 - protein, 450 aa, Glycine max
MREIISIHIGQAGIQVGNSCWELYCLEHGIQPDGMMPSDSSFGVAHDAFNTFFSETGSGKHVPRAVFVDLEPTVIDEVRCGTYRQLFHPEQLISGKEDAANNFARGHYTVGKEIVDLCLDRVRKLADNCTGLQGFLVFNAVGGGTGSGLGSLLLERLSVDYGKKSKLGFTIYPSPQVSTAVVEPYNSVLSTHSLLEHTDVAVLLDNEAIYDICRRSLDIERPTYTNLNRLISQIISSLTTSLRFDGAINVDITEFQTNLVPYPRIHFMLSSYAPVISAAKAYHEQLSVPEITNAVFEPASMMAKCDPRHGKYMACCLMYRGDVVPKDVNAAVATIKTKRTVQFVDWCPTGFKCGINYQPPSVVPGGDLAKVQRAVCMISNNTAVAEVFSRIDHKFDLMYAKRAFVHWYVGEGMEEGEFSEAREDLAALEKDYEEVGAEGAEDDEEGEDYS

SEQ ID NO: 27836 - protein, 239 aa, Populus tomentosa
QSQAGRHQEVGHKSLLQSDALYQYILETSVYPREPECMKELREVTAKHPWNIMTTSADEGQFLNMLLKLVNAKNTMEIGVYTGYSLLATALAIPEDGKILAMDINRENYELGLPVIQKAGVAHKIDFKEGPALPVLDQMIEDGKYHGSFDFIFVDADKDNYINYHKRLIELVKVGGLIGYDSTLWNGSVVAPPDAPMRKYVRYYRDFVLELNKALAADPRIEICMLPVGDGITLCRRIQ

SEQ ID NO: 27837 - protein, 502 aa, Pisum sativum
MSPLFYYSFLSLTFIITIKILLQTQSRRLKNLPPGPPTIPIIGNLHHLKHPLHRTFATLSQKYGDIVSLWFGSRLVVVISSASLVEECFIKNDVVLANRPRFLTGKYIFYDYTTLGSVSYGDHWRNLRRITTIDVLSNNRLTSFLGVRTDEANRLIQNIIKHGASRDFIKVELRSILTEMTFNGMMRMISGKRYYGDDGDVTEVEEAKQFREIISEILSLLGANNKGDFLPLLRWFDLDDLEKRCKKIANRADAFLEGLIQEHRSANHGNGDTMIDHLLKLSEVQLNIIPSHIIKGLIQAMLLAGTDTSALAIEWVMSELLNHPEVLNKAKEEIETQVGKNKIIDEQDLPKLPYLQNIISEALKLHPPAPLLLPHYSSEDCTIGGFNVPKDTIILTNVWAIHRDPTRWSDALSFKPERFEKEGEVNKLMAFGIGRRACPGLSLAQRTVGLNCGACWFQCFEWKRESEEKLDMMEGKVLPCLKRSPFKALCKGTTLLPNDLMK

SEQ ID NO: 27838 - protein, 101 aa, Thermus thermophilus HB27
MAAEVKTVIKPLGDRVVVKRIEEEPKTKGGIVLPDTAKEKPQKGKVIAVGTGRVLENGQRVPLEVKEGDIVVFAKYGGTEIEIDGEEYVILSERDLLAVLQ

SEQ ID NO: 27839 - protein, 543 aa, Thermus thermophilus HB27
MAKILVFDEAARRALERGVNAVANAVKVTLGPRGRNVVLEKKFGSPTITKDGVTVAKEVELEDHLENIGAQLLKEVASKTNDVAGDGTTTATVLAQAIVREGLKNVAAGANPLALKRGIEKAVEAAVEKIKALAIPVEDRKAIEEVATISANDPEVGKLIADAMEKVGKEGIITVEESKSLETELKFVEGYQFDKGYISPYFVTNPETMEAVLEDAFILIVEKKVSNVRELLPILEQVAQTGKPLLIIAEDVEGEALATLVVNKLRGTLSVAAVKAPGFGDRRKEMLKDIAAVTGGTVISEELGFKLENATLSMLGRAERVRITKDETTIVGGKGKKEDIEARINGIKKELETTDSEYAREKLQERLAKLAGGVAVIRVGAATETELKEKKHRFEDALNATRAAVEEGIVPGGGVTLLRAISAVEELIKKLEGDEATGAKIVRRALEEPARQIAENAGYEGSVIVQQILAETKNPRYGFNAATGEFVDMVEAGIVDPAKVTRSALQNAASIGALILTTEAVVAEKPEKKESTPASAGAGDMDF

SEQ ID NO: 27840 - protein, 486 aa, Botryotinia fuckeliana
  misc_feature (346)..(346): Xaa can be any naturally occurring amino acid
  unsure (1)..(486): unsure at all Xaa locations
GTTMHWHGIRQLNNAQYDGVPGKKGSYSIPYHKLTLSTGITQCPIAPGGTLTYKFHADNYGSSWYHSHFILQYGDGLFGPLVINGPATANYDVDLGMLFLNDWNHVPVQSLWDKAKTGAPPTLLTGLMNGTNTYNGAGKKFQTTFTPGLKYRIRVVNTAVDGHFQFSIDGHSFQVIAMDFVPIVPYNATSILVSIAQRYDIIVTANAAVGNYWIRAGWQTACSGNTNAANITGILRYTGSSSTADPTTTSTVTASTSCLDEPLASLVPFVPINPIASSIMKTTLTTGGGQWLFNGSSLLLNWTDPTLLTVLNSGNIWPTEYNVIPIESTTAKKGWAVLAISGPNGXAFYHYPPILLISNHTDNLFSSPNHPIHLHGHDFWTLSQGTGAYTATTALNLVNPPRRDVLTLSTGGHLVIAFQIDNPGSWLMHCHIAWHVSEGLALQFVESESSILPTIGTADVSTFQNTCAAWKGWTPTEPFPQDDSGI

SEQ ID NO: 27841 - protein, 209 aa, Glycine max
MAEVEAALPVAATETPEVAAEGDAGAAEAKGPHKLQRQWTFWYDIQTKPKPGAAWGTSLKKGYTFDTVEEFWCLYDQIFRPSKLVGSADFHLFKAGVEPKWEDPECANGGKWTVISSRKTNLDTMWLETCMALIGEQFDESQEICGVVASVRQRQDKLSLWTKTASNEAVQVDIGKKWKEVIDYNDKMVYSFHDDSRSQKPSRGGRYTV

SEQ ID NO: 27842 - protein, 127 aa, Ralstonia eutropha JMP134
MLVIDDSSTIRRTAEIFLSQAGYQVVLAEDGFEALAKVGDMHPDLIFCDILMPRLDGYQTCSLIKKSPRFHAIPVIMLSSRDGVFDRSRGRLVGAQDHLAKPFTRDALLQAVQACLPGHASGNALPA

SEQ ID NO: 27843 - protein, 314 aa, Capsicum annuum
MASLTVPAHVPSAAEDCEQLRSAFKGWGTNHKLIISILAHRTAAQRKLIRQTYAETFGEDLLKELDRELTHDFEKLVLVWTLDPSERDAHLAKEATKRWTKSNFVLVELACTRSPKELVLAREAYHARYKKSLEEDVAYHTTGDHRKLLVPLVSSYRYGGEEVDLRLAKAESKILHEKISDKAYSDDEVIRILATRSKAQLNATLNHYKDEHGEDILKQLEDGDEFVALLRATIKGLVYPEHYFVEVLRDAINRRGTEEDHLTRVIATRAEVDLKIIADEYQKRDSIPLGRAIAKDTRGDYESMLLALLGQEED

SEQ ID NO: 27844 - protein, 509 aa, Ralstonia solanacearum
MHTPITPTGLEGQSELRRRLRARHLTMIALGGAIGTGLFVASGASIAQAGPGGALFTYTLIGVMVYCLMTSLGELAVHLPVSGSFVTYSRLYVEEGFGFALGWNYWFALAVSVAVELAAAQLVMKYWFPGVSGMVWSAAFLLLMFVLNAFSVRGFGEAEYWFSMIKVVTIVVFLLIGLAMIFGIMKGGPQSGWHNFTVGDAPFVGGLPAMIGVAMIAGFSFQGVETIGVAAGEAENPARTIPRGIRQTFWRILLFYVLAILIIAVLLPYTDPNLLRNEATDIGVSPFALVFQHAGLAFAAGMMNAVVLTALLSSGTSSLYVSTRILYDLALEGQAPRWFARVSGNGVPHRALLATSAVGALCFFSSLFGDQVVYLWLLNTSAVTCFIAWFGIALAHYRFRKGFLHQGHTVDQLEYRSPFFPFGPILVAALCVIIILGQNTKALFAPIDNFGAFVATYCGVFLFVAIWLGYRWRYKTRFVRYEQMQFSPRHIRAAQAGDGGAALPGVAAD

SEQ ID NO: 27845 - protein, 463 aa, Bacillus subtilis subsp. subtilis str. 168
MQKQKQELHRGLEERHISLMSLGAAIGVGLFLGSASAIQLAGPGILVAYAASGLVMFFIMRALGEMAIQKPVAGSFSRYARDYLGPLAGYLTGWNYWFLWVVTCMAEITAVGIYMGFWFPDVPNWIWALSALVIMTGVNFLAVKAYGELEFWFALIKIVAILSMIAVGLLMIIAGVGNGGIATGISNLWNNGGFFPHGLKGVLLSLQMVMFAYLGIEMIGVTAGEVKNPQKSLAKAIDTVFWRILIFYVGALFVIMSIYPWQEIGSQGSPFVLTFQKVGIPSAAGIINFVVLTAALSSCNSGIFSTGRMLFNLAEQKEAPQAYGQLTKGGIPGKAVLASAGALLVGVLLNYVVPAKVFTWVTSIATFGAIWTWAIILLSQIKYRKSLKPEEKKQLKYKMPLFPFTSYVSLAFLAFVVILMAYSPDTRVAVIIGPIWFLILLAVYYGKGFHKKNAAAASERNIS

SEQ ID NO: 27846 - protein, 530 aa, Moorella thermoacetica ATCC 39073
MYLVTAAEMGQLDRLASSEYMIPSIVLMENAGLRVVESIERHFQGQVANRRILIFCGKGNNGGDGLVVARHLLNRGAEVKVFLLARPEDIRGDARTNLEIYQKMGGKLLLLLGESHLQRADIALLYADLVVDAIFGTGFKGAAMGLPAAVINMINKAHRETVAVDLPSGLEADTGRCFGPCIQATWTVTFALPKLGLVVEPGASLTGRLEVADIGIPQKLVATQHFNRRLLTAAWCRSQLPRREASGHKGLYGRVLAVGGSPGLTGAITLAATAALKAGAGLVTAAVPRGVQGILAMKTTEIMTMSLPETPAGALSRDALDPLLERLAEVDVLAIGPGLSRDPATVDLVKELLPRVQVPAVVDADALNALATDTRVLTGDHGPLVLTPHPGEMARLLGTTAAKIQEDRLEIAAKYAREWQAVLLLKGARTVIAWPDGQVYINPTGNPGMATAGSGDVLTGIIAGLAGQGLKPGVAAALGAYLHGAAGDEAARQRGQRAMMAGDLLDFLPYVLRNLEEEVETIVAAGLGRD

SEQ ID NO: 27847 - protein, 512 aa, Ralstonia solanacearum
MSEHTTASAGTPGLRRTLRARHLTMIAIGGSIGTGLFVASGASVSQAGPGGALAAYVLIGTMVYFLMTSLGELAAYMPVPGSFATYGARYVDEGFGFALGWNYWYNWAVTIAVELAAAQLVMHYWFPEVPGVLWSAGFLAVMFLLNAISVRGFGEAEYWFALIKVVTVLCFIAIGLAMIFGIIKGAPASGLHNLTLGEAPFVGGLPAMIGVAMIAGFSFQGTELIGVAAGESADPARTIPRAVRQVFWRILLFYVLAIFIIGALVPYTDPNLLSTEVANIGVSPFTLVFRHAGLAFAAGLMNAVILTAVLSAGNSGMYASTRMLYNLATEGRAPRLFARLSKNGVPRNALLATTAVGALCFLSSLYGDKTVYLWLLNTSGMTGFVAWLGIAISHYRFRKGLVLQGHDPALLPYRSPFFPYGPLFAFGLCLVITLGQNYQAFASGRVDWAEVTATYIGIPIFFAVWLGYRLVRGGGIIRYQDMRFPRPPVTRDPPGEAPAAPGLPAAATSPQR

SEQ ID NO: 27848 - protein, 632 aa, Bacillus subtilis subsp. subtilis str. 168
MCGFVGVFNKHPLAQTADQEELIKQMNQMIVHRGPDSDGYFHDEHVGFGFRRLSIIDVENGGQPLSYEDETYWIIFNGEIYNYIELREELEAKGYTFNTDSDTEVLLATYRHYKEEAASKLRGMFAFLIWNKNDHVLYGARDPFGIKPLYYTTINDQVYFASERKSLMVAQNDIEIDKEALQQYMSFQFVPEPSTLDAHVKKVEPGSQFTIRPDGDITFKTYFKANFKPVQTEEDKLVKEVRDAIYDSVNVHMRSDVPVGSFLSGGIDSSFIVSVAKEFHPSLKTFSVGFEQQGFSEVDVAKETAAALGIENISKVISPEEYMNELPKIVWHFDDPLADPAAIPLYFVAKEAKKHVTVALSGEGADELFGGYNIYREPLSLKPFERIPSGLKKMLLHVAAVMPEGMRGKSLLERGCTPLQDRYIGNAKIFEESVKKQLLKHYNPNLSYRDVTKTYFTESSSYSDINKMQYVDIHTWMRGDILLKADKMTMANSLELRVPFLDKVVFDVASKIPDELKTKNGTTKYLLRKAAEGIVPEHVLNRKKLGFPVPIRHWLKNEMNEWVRNIIQESQTDAYIHKDYVLQLLEDHCADKADNSRKIWTVLIFMIWHSINIEKRYMPEELSHQPKEVIFV

SEQ ID NO: 27849 - protein, 299 aa, Neurospora crassa
MAPLSKTHKLNTGDEIPAVGLGTWQSKPGQVEKAVEAALRAGYTHIDTAYAYGNEKEVGQGIKASGVPREKIWLTTKLDNDWHKHVAEAIDTSLKNLDTPYVDLYLMHWPASLVKGNTKEVYNDWDFVDTWREMQKLVDTGKVKNIGVSNFGVKNLEKLLSAESTKIVPAVNQIELHPGNPSPHLVEYLRSKGIHASAYSPLGSSDSPLYKLNSLTKLAESKGKTVQQVLLRWGVQKGWSVLPKSVTEERIKANIDLEGWSLTDEEIAQIDEVHKENSFKVCGDDWLPVKIFFGAGDSD

SEQ ID NO: 27850 - protein, 417 aa, Oryza sativa
MPALGTLSGGAAGVAGLLRLRRATPSPAVATPFPAAAAARCAAAAAAVVPDGGQLVWGRQLRPALLLPAAGGLLQPPTSPSSSQAGRRQALRPPAAATSGEAKPAGFLEKYPALITGFFFFMWYFLNVIFNILNKKIYNYFPYPYFVSVIHLLVGVVYCLVSWTVGLPKRAPINSTLLKLLFPVALCHALGHVTSNVSFATVAVSFAHTIKALEPFFNAAATQFVLGQQVPLPLWLSLAPVVLGVSMASLTELSFNWTGFINAMISNISFTYRSIYSKKAMTDMDSTNVYAYISIIALIVCIPPAVIIEGPQLLQHGFNDAIAKVGLTKFVSDLFFVGLFYHLYNQVATNTLERVAPLTHAVGNVLKRVFVIGFSIIVFGNRITTQTGIGTCIAIAGVAIYSYIKAKIEEEKRAKSA

SEQ ID NO: 27851 - protein, 468 aa, Desulfitobacterium hafniense DCB-2
MKIKWLILGLYLLVSSFSILLFWLGAQVHTGIRWDIDPLATALAILLPGGIIYFFAFQFEKRIRRINDAIAGILEEEFQPDSLPEDADELGTLSKAIANLGQQINLSMLNNRQEAQKIQAILAGMQEGVISLDHVGRIVLLNRAAERLFGREQEAVRDKHFSELCGFEELGDLVTQALEKGSSGQIELATNSKLMIRAQVSPISGERARSQGAVIVCYDITEIRRLELLRTEFVGNVSHELRTPLTSIKGFVETLLDGASEVPHLRERFLNIIHKETLRLQRLVDELLTLSRIENQRQDAGQGMSKVQEAYEKIRPVIEPYAEAKKVELEIKIPKDLPEVAMGIDLLSQVLLNLMENAVKYTVKGKVWLHAFHDDGKILLEFGDTGCGIPKEDLPRIFERFYRVDKARSREQGGTGLGLSIVKHIVEGVKGKITVASEPGSGSVFICELPTGNGVERNEEEEPKEGNL

SEQ ID NO: 27852 - protein, 392 aa, Ralstonia solanacearum
MTEAVIVSTARTGLAKSWKGAFNMTHGATMGGHVVKHAIERAKLEPGEVEDVLMGCANPEGATGANIARQIALRAGCPVTVPGATVNRFCSSGLQTIAMAAQRVIADEGDIFVAGGVESISCVQQEMNRHMMTEGWLNRHKPEIYWSMLQTAETVAKRYNISKARQDEYGVQSQLRAAAAAAAGKFNDEIVPITVTMGVADAKTGQLGTREVTLSADEGIRPDTTLEGVSKIRTAMPGGVVTAGNASQFSDGASAAVVMNGKVAAARGLQPLGVFRGFAVAGCEPDEMGIGPVFAVPKLLRKAGLKVEDIGLWELNEAFAVQVLYCADTLGIPMDRLNVNGGAIAVGHPYGVSGARLVGHALIEGKRRGVKYVVVTMCIGGGQGAAGLFEVL

SEQ ID NO: 27853 - protein, 195 aa, Burkholderia vietnamiensis G4
MNHPANPSPPDPLSGGRSAFSGANPRPFVVWLTGVSGAGKSTLASLLKLQLDALGHRTYLLDGDTLREGLNRDLGFSDADRRENIRRTAEVARLMTDAGFIVIAALISPFADARAQARARFAPGTFVEVFVDVALEVAEARDPKGLYVLARRGTIQQFTGIGSPYEQPESPEVHVRTAEASPDACVAEIMRQLPL

SEQ ID NO: 27854 - protein, 500 aa, Oryza sativa
MASTVTTPSRPVSAGCHRRSPRRSAPVVLSLGGGPRRRTPSSTSCSALASPAKQGTAKLPPPQPTASRTAAADAERERERTDYNEVAAALESIYKLSPAVVEEKDADEEDEKSKQTKRKRKGRVGRSRNATVTVRSSRRRRRGQRMDLGKRVEMRRREEEEGGGGAGKVEDEERGFEEMLLREHAVSTDMGSLDWKRMKIPPVLTSAQSIRLFRIMQPMKAIMEMKENLENEVQSEPNDAQLAEAMNMSVLQMRRHLEVGRAARNKLIKHNLRLVLYTINKYYPDMSNDERFDDICQAGANGLITAIDRFEPKRGFRISTYALFWIRHSIVRAITLSNFTRFPFAMESERQEIHRAREELAFELGRAPTEEEVMKKVGLSPARYRDVVRMTRPTYSLHARNRVTQEELINEVTDDDAIGVDTSSHNTLLRLAIDDLLDSLKPKESVVIRQRFGLDGRGKRTLSEIAGNLNISREMVRKYELKALMKLKHPTRVEYLRRYM

SEQ ID NO: 27855 - protein, 195 aa, Glycine max; identical to SEQ ID NO: 894

SEQ ID NO: 27856 - protein, 497 aa, Vibrio vulnificus CMCP6
MAQHASSVIVCNGYKDREYIRLALIGEKLGHKVFIVLEKMSELDLVLREAKSLGVTPRLGIRIRLASQGAGKWQASGGEKSKFGLSASQVLNVISRLKKENQLDTLQLVHFHLGSQMANIRDVRNGVNESARFYCELRTLGANITYFDVGGGLAIDYDGTRSQSSNSMNYGLVEYARNIVNTVGDVCKDYKQPMPVIISESGRSLTAHHAVLISNVIGTETYKPETVTEPEEDFPLLLNNMWRSWLNLHNGTDARALIEIYNDTQSDLAEVHSQFATGVLTLEHRAWAEQTSLRIYYELNRLMSTKNRFHRPILDELSERLADKFFVNFSLFQSLPDSWGIDQVFPVLPLSGLQNAADRRAVMLDITCDSDGAIDAYVDGQGIESTLPVPAWNEDEPYLMGFFLVGAYQEILGDMHNLFGDTHSVVVNVGDQGEINIDFINEGDTVEDMMRYVHIDVDQIRKNYHSLVSQRVDQEEQQQILAELEQGLSGYTYLEDF

SEQ ID NO: 27857 - protein, 208 aa, Magnaporthe grisea 70-15
MVFSAPAFITRLTRPFTSSTMLSVSEATSGGAAATIPEGAQRATFAAGCFWGVEHIFRKHFENKGLYDARVGYIGGEAQNPSYRAVCSGATGHAEATQVVFDPSRISYRQLVEFFYKTHDPTTPNQQGNDRGTQYRSAVFYHNAEQEKIAREVTQKANEQWWKGKIVTELLPAGQWWDAEDYHQLYLHKNPSGYQCASHHLRDFPELK

SEQ ID NO: 27858 - protein, 397 aa, Thermus thermophilus HB8
MREAVIVSAVRSPVARGKKNGALATLHPVDLSAQVMRAAVERVGLDPKELEDVLWGCAMPEAAQGLNIARLALLRAGFPVEVAGATINRFCSSGLQTIAMAAQAVMTGMADAVLAGGVEMMSQVPMSGFHTRLHPDLTPTEWSPETYSTYIGMGFTAERVAERFGISREDQDRWALRSHQKAAQAWAEGRFPEVVPIRVPKVTYRGTKKEVEEVVFDRDETVRPDTSLEALAKLRPAFKKNGTVTAGNSSPYSDGAAAVVVMSREKAEALGLKPLARFVSFAVAGVEPDVMGIGPVKAVPKALQRAGLTLDQIALIEFNEAFAAQVLAVMRVLEMPEEKTNVNGGAIALGHPLGATGAKLTAQLLSELSRRGGGYGLVTMCIGGGMGAAGVFEVYPA

SEQ ID NO: 27859 - protein, 339 aa, Stenotrophomonas maltophilia
MTFVRNAWYVAALPEELSEKPLGRTILDTPLALYRQPDGVVAALLDICPHRFAPLSDGILVNGHLQCPYHGLEFDGGGQCVHNPHGNGARPASLNVRSFPVVERDALIWIWPGDPALADPGAIPDFGCRVDPAYRTVGGYGHVDCNYKLLVDNLMDLGHAQYVHRANAQTDAFDRLEREVIVGDGEIQALMKIPGGTPSVLMAKFLRGANTPVDAWNDIRWNKVSAMLNFIAVAPEGTPKEQSIHSRGTHILTPETEASCHYFFGSSRNFGIDDPEMDGVLRSWQAQALVKEDKVVVEAIERRRAYVEANGIRPAMLSCDEAAVRVSREIEKLEQLEAA

SEQ ID NO: 27860 - protein, 530 aa, Magnaporthe grisea 70-15
MATVVVKNSSCLSVLPLKTVLRSLAVTTVSSSPLLLNPSLAIMSGLAHSKSPLLNPDRNPILRWALKKTFYAQFCAGENPLEVRQTIAGLKKIGFTGVLLGYAKEVVLSDKETKELHSCTEGKASEECTQKEVIPWAEGTMETVRLVSPGDFVSVKFTGAGRQALFSLSEKLPPPPALAKAIDDICKLAAARGVRLLFDAEQQALQPGIDDWTMHYMRKHNAPGRCVVYNTYQAYLKATPSVLASHLRAAAQSAAEGKPFAVGAKLVRGAYLGSDPRHLIHDTKADTDACYDGVAAALLRQRWEGPLAGKDEGSEFPEVHMVLASHNSESVCKGREIIKRGEARTTEVAFAQLQGMADEVSCDLIASACEKDAAAVKSYKYLVWGTTGECMKYLLRRAHENRDAVQRTRSGRDAMAAEVWRRIAGTSWKSVHDSIQIVLFSHMGGVLVAGTGQADMVESNMTHLIEYRTDGSNAKVASSTLVTPFESVEKCCGVGGGFLWSLLGCRCCVNRGVVWVAGVLELLFRVVSAI

SEQ ID NO: 27861 - protein, 604 aa, Cryptococcus neoformans var. neoformans JEC21
MSDPNSDLYPIHLLMDELKSEDVVLRLSSIRRLSTIALALGPSRTREELIPFIQYQLDDEDEVLLVLAEELGNFVEYVGGKEYAHVILGPLENLTAVEETLVREKAAESISKISVLLSAQDLEQYFLPIVKRLSTGEWFTSRTSACALFAAPYPNASSSSQEEMRKLFGALCHDDTPMVRRAAAKALGPLAKVVSETSGQHDTIVSELIPMYRKLAGDDQDSVRLLTIPDLIALAAALSDEETKTNLLEPMRASITDKSWRVRYMVANEFVGLAESAGESIIREELVGAFVGLLKDNEAEVRTAASGQVPGFAKLVDKEVILARLLPCVRDLSTDSSQHVRAALAMEISGLAPLLGKDATIEHLLPLFLQLLKDEFSDVRLNLIGKLDMVNEVIGIDRLSQALLPAIMTLAEDKQWRVRQAIIEYIPLLAQQLGVEFFDDKLGSLCMSWLGDTVFSIREAATINLKKLTDVFGVEWAKTTIIPKVLEMGNHQNYLYRMTTIFAITTMAPSLNTAIIRDTVLDAALNLANDAIPNIRFNVAKCLETLASVLAQTPEGQELVHRRVVTALRKLQEDQDADVRFFATKAYERTTGDDVRGAEPMILS

SEQ ID NO: 27862 - protein, 431 aa, Triticum aestivum
  misc_feature (74)..(74): Xaa can be any naturally occurring amino acid
  misc_feature (78)..(78): Xaa can be any naturally occurring amino acid
  misc_feature (86)..(86): Xaa can be any naturally occurring amino acid
  misc_feature (207)..(207): Xaa can be any naturally occurring amino acid
  unsure (1)..(431): unsure at all Xaa locations
MAGTGPKLAAPRPAAAGPLPSQALRSAALAFAPSARRFRVSLAARARSPFIVMASAKEGNGAVTNRTTLHDLYXNRVXSPWYDNLXRPVTDLLPYIANGVRGVTSNPTIFQKAISSSNAYDGQFKELISAGKDAESAYWELVIKDIQDACKLFEPIYDETDGADGYVSVEVSPRLANDTQGTVEAAKWLHKVVNRPNVYIKIPATAXCVPSIKEVIANGISVNVTLIFSVARYEAVIDAYLDGLEASGLSDLSRVTSVASFFVSRVDSLIDKMLEKIGTPEALALRGKAAVAQAKIANQLYLKKFSGPRWEALVKKGAKKQRLLWASTSVKNPAYLDTLYVDPLIGPDTVSTMPDQALDAFIDHGTVARTIDANVSEAEGIYSALEKLGIDWEEVGKQLEHEGVSSFKGSFDSLLTSLEEKGNALKTAANL

SEQ ID NO: 27863 - protein, 407 aa, Rhodospirillum rubrum
MRTVAITGLGIVAATGVGVPSFWADVCAGEPRFSPLPPFAQGTLGFGLGAQALAFDPERFFGRRQQGHLDRFAQLALVAAREAVADSGLDWSEDLRARSAVVTGSAIGGELTQDEAFLRIYGHGGQQVNPVTIPRVMPSAGAVAISMEFGLTGPVLTHSTACSSASHAIGQAFMMVRSGMVDIAIAGGSEAPFAFGYLKAWEAMQVVSPEACRPFSLGRKGMSLGEAGAMLVLEPLERAQARGARIYAELAGFGMSSDASHLTRPHEAGPARAIRAALDDAGLSPGEIGHINAHGTGTVMNDTVEARAIREVFGETIPMLTSTKAVHGHTLGAAGAVEAIATVLAVSDAMVPPTAGFTAFDPECGLAPVSGAASPPRHRAALSHSFAFGGLNAVLAFRPTDSAENRR

SEQ ID NO: 27864 - protein, 446 aa, Zea mays
MAGSSMDTEAAGKELKQGSGGGGGYTMPATAHAVDTDSWQQVGLLLVIGFNCAYVLSFSNLMMVPLGWAWGVACLLLVGAAAWYANWLLAGLHFVDGQRFIRYRDLMGFIFGRNMYYITWFLQFATLLLCNMGFILLGARALKAINTEFTHTPARLQWFITATGIVYFAFAYFVPTISAMRNWLATSAALTLAYDVALLAILIRDGKSNKQKDYDVHAGSQAEKVFNALGAVAAILVCNTSGLLPEIQSTVREPAVRGMRRALLLQYTAGAAGYYGISVAGYWAYGSAVSEYLPNELGGPRWAAVLINATAFLQSIVSQHLFTVPIHEAMDTRLQRLDEGMFSRYNLTRRVCARGLVFGFNVFVTALFPFMGDFVNLVGSLALVPLTFTFPSMAVLKIKGKSGGRCNRLWHWGIIVLSSALCVATTAAAVRLIFNNARIYHFFADM

SEQ ID NO: 27865 - protein, 316 aa, Triticum aestivum
MASLSVPPVLTPPRDDAVALHKAFKGFGCDSTTVTNILAHRDSAQRALILHEYKAMYHQDLYHRLATELSGNHKNAMLLWVLDPAGRDATILNQALNGDITDLRAATEVICSRTPSQLQIMKQAYRARFGCYLEHDITERTYGDHQKLLLAYLGVRRNEGPEVDPSAVTDDARELYQAGEKRVGTDERAFIRIFSERSWAHMVSVANAYQHMYARSLEKAVKSETTGNFQFGLLTILRCADTPAKYFAKVLHKAMKGLGTSNAALTRVAVTRTEVDMKYIKAEYHNKYKGSLAEAIHSETSGNYRTFLLSLVGRDR

SEQ ID NO: 27866 - protein, 475 aa, Rhodospirillum rubrum
MTQTPTAGPDAGRPASVLPPLLLLSAPIIISQCAQMASGVVDVIMAGNLDVLTLGTVATGAALWVPMMIFLLGLLYGVTPTIGKMLGENASEAVSGVAARGLLVGLLGGALLGALLFWMSTPLFRLFGVAPELIPEASAYLNWMALAMPGMGLFLAFRFVIEAHHVGWIVTVVAVLGVAAKIWLNDALVHGHAGLPALGTGGFGAASVALYWGMAVMLAGATFLHGAVKPLWTHRLSGADLSLAAIGRFLRFGLPIALNFLSDYLIMAVVAVFIATLGAVAIGAHQITFNILMVLLMMPTGLSMAATILISRSPGGGHTATLGPVMSWTLGIGVAFSIVLAVLLAAFDAPVIRLYTDDAEVIALALDLLGVVVFILTIDVVAIALGFFLRGLGDPGSPFLILLAAHWLISLPVGYVLCFTDWVVAPQGPLGWWYGLSTGLLVACCLLGLRLRQRLSRAAQPVCSPAEATVAGVAE

SEQ ID NO: 27867 - protein, 634 aa, Rickettsia rickettsii
MSNSNIDNDLDKIDSLLKKAKSKKIPVTYDDINNALPLNKNPSIRQLEEAILKFSDAGVDILESNEDDEIKLDIGMDEEFKLSTNVDNEPEDEVEEENIGTTDDPVRLYLKDMGGVDLLTREHEVEIAKRIEEGHKTMTASLCRSPIAMRCFIVWYEDLVNEKMLLRDLIDLEANMLHDETPENDEEHSSETEGEEHEDNHLSMSRVETQILPNIIERMKKIAFICEELLIEAKKCYEKSFEPKVLQNSKKYNNLELLINEVSEIHFNSKRTEEILGKMYGINRDLINKETAFLKLAEKYGVTRQNFLDEYIGSVINAAWKEKMLKNKKVAWKELMTKESDYIDQMIAELSVIESKTGLLVNDFKKLVNTIQKSERQTLQAKKDMIEANLRLVISIAKKYANRGLQFLDLIQEGNIGLMKAVDKFEYRRGYKFSTYATWWIRQAITRAIADQARTIRIPVHMIETINKILRTSRQMLNELGYEPTATEIANRLSMPLDKVRKVMKIAKEPISLENPVGDDSDGGQLGDFIEDKNAVAPIDAAIQSNLREVTTRVLATLTPREERVLRMRFGIGMNTDHTLEEVGQQFKVTRERIRQIESKALRKLQHPIRSKKLNSFRSGGKRGDGNPSDLLEA

SEQ ID NO: 27868 - protein, 221 aa, Gloeobacter violaceus PCC 7421
MLAALFFDLDGTLADTDPLHFQAWQELLDELGLAIDRTFYRTRISGRLNPDIVKELLPALSPEESNQFIERKEGRFRELATGLAPLAGALDVLNWANGRGLKYALVSNAPSENARFMLGALKLEKAFATMVLGEEVAAGKPDPLPYRVALERLGVSASRSLAFEDSPSGVRSAVGAGIPTVGIATTHPPENLLELGAKLVIPDFDDPRLWVLLRSAGSLEC

SEQ ID NO: 27869 - protein, 482 aa, Staphylococcus epidermidis ATCC 12228
MEDNNMKRGLNSRHISMIAIGGAIGTGLFVATGSVISQAGPGGAILAYILIGIMLYFLMSSIGELATFYPVSGSFSSYSTRFVDSSLGFTMGWLYWGMWSLVTSVDIIVASNVLQYWDVFKVLNPLTWSLIFLTLLFLINIFSVKAFGETEFWLSLIKVITIIVFIIFGIMMIFGILGGHTYGFENYTKGQAPFVGGISGILSVLLVAGFSVGGTEVVAVTAGESNNPEKSMPKAIKQVFWRILLFYVLSIAVIAAIIPYTDPLLLNENESVSQSPFTIVFDKIGIAFAASVINAVILTSLLSAANSGIYTTSRMLFSLSADKQAPKFFGKLNDKTKLPMRALITTYIIIVLVIVYANFNANAVFNLLNIIGSMVIVVWGSSIWSQIRLRQAIKKQGKNPDKLLPYKAPFYPVGPIIVLFTLLFLLLGSSFGSIASGDILGVIRNFTPLFILAIIYIAHKLIKRTHFVKLEEIDLTPHNYKN

SEQ ID NO: 27870 - protein, 276 aa, Listeria monocytogenes EGD-e
MRESLKNSKRLVIKVGTSTLMYGNGHINLRTIEKLAMVLSDLRNEGKEVILVSSGAIGVGCHKLQLPVRPTSIPEQQAVASVGQSELMHIYSKFFGEYGQVVGQVLLTRDVTDFPISRENVMNTLESLLERGIIPIVNENDTVAVEELEHVTKYGDNDLLSAIVAKLVQADLLIMLSDIDGFYGSNPSTDPDAVMFSEINQITPEIEALAGGKGSKFGTGGMLTKLSAASYCMNANQKMILTNGKNPTIIFDIMQGEQIGTLFASKKEEFSHDGTH

SEQ ID NO: 27871 - protein, 504 aa, Staphylococcus epidermidis ATCC 12228
MSKQDGKLTGLFGAPVSDRENSMTAGQRGPLLMQDVYYLEQISHFDREVIPERRMHAKGSGAFGTFTVTNDITQYTNAKIFSEVGKQTEMFARFSTVSGERGAADLERDIRGFALKFYTEDGNWDLVGNNTPVFFFRDPKLFISLNRAVKRDPRTNMRSAQNNWDFWTGLPEALHQVTILMSDRGMPKGFRNMHGFGSHTYSMYNDKGERVWVKYHFRTQQGIENYTDEEAAKIVGMDRDSSQRDLYNAIENGDYPKWKMYIQVMTEEQAKNHPDNPFDLTKVWYKKDYPLIEVGEFELNRNPENYFLDVEQAAFTPTNIVPGLDYSPDKMLQGRLFSYGDAQRYRLGVNHWQIPVNQPKGVGVENLCPFSRDGQMRFLDNNQGGGPHYYPNNQGIYESQPEHKKPPFPTDGDGYEYNYRQDDDNYFEQPGKLFRLQSEDAKERIFTNTANAMDGVSKDVKVRHIRHCYKADPEYGKGVAKALGIDINQIDLETNQDETYENFK

SEQ ID NO: 27872 - protein, 429 aa, Escherichia coli O157:H7
MTTDDLAFDQRHIWHPYTSMTSPLPVYPVASAEGCELILSDGRRLVDGMSSWWAAIHGYNHPQLNAAMKSQIDAMSHVMFGGITHAPAIELCRKLVAMTPQPLECVFLADSGSVAVEVAMKMALQYWQAKGEARQHFLTFRNGYHGDTFGAMSVCDPDNSMHSLWKGYLPENLFAPAPQSRMDGEWDERDMVGFARLMAAHRHEIAAVIIEPIVQGAGGMRMYHPEWLKRIRKMCDREGILLIADEIATGFGRTGKLFACEHAEIAPDILCLGKALTGGTMTLSATLTTREVAETISNGEAGCFMHGPTFMGNPLACAAANASLAILESGDWQQQVAAIEVQLREQLAPARDAEMVADVRVLGAIGVVETTRPVNMAALQKFFVEQGVWIRPFGKLIYLMPPYIILPQQLQRLTAAVNRAVQDETFFCQ

SEQ ID NO: 27873 - protein, 579 aa, ASPERGILLUS NIDULANS FGSC A4
MPFGINPFSKNDKHEYPGVVVPLSSAPANSKTSPDPEKKVGPQDTDAGSLDRSSSAENGVGSMHSHQQSQNGHLTLEILRAEVENDLVASGQDSAYDRKSKIINRAIQDIGMGRYQWELFCLCGFGWLADNLWLQGVALTLPQLSLEFGVDENNVRFTTCSLFLGLCLGASFWGIASDIIGRRPAFNFTLLISGAFGLASGGGPNWVGTCALYACLGLGVGGNLPVDGALFLEFLPFASGNLLTMLSVWWPVGNLIASLLAWAFIPNYTCSGDGPCRKEDNMGWRYLVLTLGALTFVMFVCRFFLFHLYESPKFLLSRGRQDEAVAAVQGIAYKNRTTTWLTVDVLNEIGGHPEQQTREKLSTKEIIQRYMSKFSLERIRGLFATKRLGVTTVILWFCWTTIGMGYPLFNAFLPQYLQRAGGGQSQSTDIVYRNYAITSIVGLPGSVLACFTVDIKYIGRKGTMIAGTLITGVLLFCFTASTDPDIQLVCSSLEAFFQNIMYGVLYAYTPEVFPAPNRGTGSGISSCLNRIAGLCAPIVAIYGASANPDAPIYASGALILAAFVAMIFLPIETRGRQTL

SEQ ID NO: 27874 - protein, 519 aa, Trametes versicolor
MGLQRFSFFVTLALVARSLAAIGPVASLVVANAPVSPDGFLRDAIVVNGVVPSPLITGKKGDRFQLNVDDTLTNHSMLKSTSIHWHGFFQAGTNWADGPAFVNQCPIASGHSFLYDFHVPDQAGTFWYHSHLSTQYCDGLRGPFVVYDPKDPHASRYDVDNESTVITLTDWYHTAARLGPRFPLGADATLINGLGRSASTPTAALAVINVQHGKRYRFRLVSISCDPNYTFSIDGHNLTVIEVDGINSQPLLVDSIQIFAAQRYSFVLNANQTVGNYWVRANPNFGTVGFAGGINSAILRYQGAPVAEPTTTQTTSVIPLIETNLHPLARMPVPGSPTPGGVDKALNLAFNFNGTNFFINNATFTPPTVPVLLQILSGAQTAQDLLPAGSVYPLPAHSTIEITLPATALAPGAPHPFHLHGHAFAVVRSAGSTTYNYNDPIFRDVVSTGTPAAGDNVTIRFQTDNPGPWFLHCHIDFHLDAGFAIVFAEDVADVKAANPVPKAWSDLCPIYDGLSEANQ

SEQ ID NO: 27875 - protein, 375 aa, Aquifex aeolicus VF5
MKKVKLIGTLDYGKYRYPKNHPLKIPRVSLLLRFLDAMNLIDEKELIKSRPATKEELLLFHTEDYINTLMEAERCQCVPKGAREKYNIGGYENPVSYAMFTGSSLATGSTVQAIEEFLKGNVAFNPAGGMHHAFKSRANGFCYINDPAVGIEYLRKKGFKRILYIDLDAHHCDGVQEAFYDTDQVFVLSLHQSPEYAFPFEKGFLEEIGEGKGKGYNLNIPLPKGLNDNEFLFALEKSLEIVKEVFEPEVYLLQLGTDPLLEDYLSKFNLSNVAFLKAFNIVREVFGEGVYLGGGGYHPYALARAWTLIWCELSGREVPEKLNNKAKELLKSIDFEEFDDEVDRSYMLETLKDPWRGGEVRKEVKDTLEKAKASS

SEQ ID NO: 27876 - protein, 157 aa, Zea mays
  misc_feature (7)..(7): Xaa can be any naturally occurring amino acid
  misc_feature (36)..(38): Xaa can be any naturally occurring amino acid
  misc_feature (42)..(42): Xaa can be any naturally occurring amino acid
  misc_feature (69)..(81): Xaa can be any naturally occurring amino acid
  misc_feature (93)..(93): Xaa can be any naturally occurring amino acid
  misc_feature (98)..(98): Xaa can be any naturally occurring amino acid
  unsure (1)..(157): unsure at all Xaa locations
MSLVRRXSSVFDPFSVDLFDPFDSMFRPFVPSVAGXXXGLFXETAAFASARIDWKETPEAHVFKADLPXXXXXXXXXXXXXGNVLLISGQRSXRRRTXGDKWHRVERSSGQFVRRFRLPENAKTEEVRAALENGVLTVTVPKAEVKKPEVKSIQISG

SEQ ID NO: 27877 - protein, 600 aa, Prochlorococcus marinus str. MIT 9313
MDSRVRRTASPLRRLLSSLKPHRRLILAATTCSILNKLFDLAPPVLIGLAIDVVVHEQTSWLANLGFSTVPSQLGFLALLSFLIWSAESFFEYLYGVLWRNLAQTTQHNLRLKAYNHLQNLEMAFFEADSSGRLMAVLNDDINQLERFLDYGANQILQLITTVLLVGGAMVFVAPGVALFAFLPIPVILWGSIQFQRRLAPRYREVRDKAGELAAHLSNNLGGMFTIKSFATEAWELEQIRYRSEAYRSSNKQAIKLSAAFIPLIRFAILFAFLAILVIGGLQAWKGQMAVGLYSVLVFITQRLLWPLTTLGRTLDEYQRSMASTNRVLDLIDTPITIVEGSQPLITARVRGALCFEDVGFHYQGRAPLLTHFNLDIPAGCTIGIVGATGSGKSTLVKLLLRLYPLSSGRILLDGQPIDMLKLRDLRRSIALVSQEVYLFHGTVSENIAYGSPETTQKKIDDAADLAEASEFIKALPRGFNTLVGERGQRLSGGQRQRIALARAILKQAPILILDEATAAVDNETEAAIQRSLMHITKNRTTVVIAHRLSTVRHADQIIVMDQGNIVEQGTHDSLLKQSGIYRDLWRVQAGLRADELLLA

SEQ ID NO: 27878 - protein, 354 aa, Zea mays
MEGSDEGGEVNTGDLIGGIGRELAISCLLRLPRSYYYDVACVNRSFYSLVRFGELYRLRREAGIVEQMIYCSCNVLEWEGFDPRRQRWFSIPSMPPIECFTLADKESLAVGTNILVFGKRVEAHVVLRYSLLTNSWTTGEMMNTPRCLFGSASFGEKAIVAGGIGQNGTLDSAELYDSEMQTWTTLPSMNRARQMCSGFFMDGKFYVIGGKSERHNEILSCAEEFDLESSTWRLIPDMAQGLNGGSGAPPLVAVVNNELYAADYATKEVRKYDKENNAWITLGLLPGRYTSVHGWGIAFRSCGDMLIVIGAMSAGGSGVIEICSWVPNNGLPDWKIIGTRRSGSFVYNCAVMSC

SEQ ID NO: 27879 - protein, 268 aa, Magnetococcus sp. MC-1
MELSAKAIWVREQTLLLHQYAPGTRVASSLSPVEFLVSLYYGGYLRHRPQEPRWAGRDRLIMSKGHGLVSLYPILADCGYFPMEELPKIATQQSYLGVIPDAGIPGVETTNGALGHGLGVGAGMAIALKAQGSQARVCVVCGDGEMNEGSVWEAIMFAPKHGLNNLMLVIDDNKISMLGFQREILNLSPFVDKLSAFGWDCHRLDGHDMAQVQTRMQQLWLNPGQRPCAVVLDTVKGKGVAALENRALSHVLSLSHDQVETAIQELRP

SEQ ID NO: 27880 - protein, 587 aa, Arabidopsis thaliana
MSMIDEPLYPIAVLIDELKNDDIQLRLNSIRRLSTIARALGEERTRKELIPFLSENNDDDDEVLLAMAEELGVFIPYVGGVEYAHVLLPPLETLSTVEETCVREKAVESLCRVGSQMRESDLVDHFISLVKRLAAGEWFTARVSACGVFHIAYPSAPDMLKTELRSLYTQLCQDDMPMVRRAAATNLGKFAATVESAHLKTDVMSMFEDLTQDDQDSVRLLAVEGCAALGKLLEPQDCVQHILPVIVNFSQDKSWRVRYMVANQLYELCEAVGPEPTRTELVPAYVRLLRDNEAEVRIAAAGKVTKFCRILNPEIAIQDILPCVKELSSDSSQHVRSALASVIMGMAPVLGKDATIEHLLPIFLSLLKDEFPDVRLNIISKLDQVNQVIGIDLLSQSLLPAIVELAEDRHWRVRLAIIEYIPLLASQLGVGFFDDKLGALCMQWLQDKVHSIRDAAANNLKRLAEEFGPEWAMQHIVPQVLEMVNNPHYLYRMTILRAVSLLAPVMGSEITCSKLLPVVMTASKDRVPNIKFNVAKVLQSLIPIVDQSVVEKTIRPGLVELSEDPDVDVRFFANQALQSIDNVMMSS

SEQ ID NO: 27881 - protein, 484 aa, Burkholderia fungorum LB400
MSEHKLTNAAGAPVADNQNSMTAGARGPVVLQDVWLLEKLAHFDREVIPERRVHAKGSGAFGTLKVTHDISRYTKAKVFAQAGKETPLFMRFSTVAGERGAADAERDVRGFSIKFYTEEGNWDVVGNNTPVFFIRDPLKFPDFIHTQKRDPYTNMRSNVAAWDFWSRHPESLHQVTILMSDRGIPQNFRQMHGFGSHTYSFINANNERFWVKFHFKSMQGVENFTDAEAAQVVAQDRESAQRDLLTNIDQGNFPKWRFAIQVMPEAEAATYRFNPFDITKVWSQKDYPLIDVGTIELNRNAANYFADVEQAAFTPANVVPGIGFSPDRLLQGRLFSYGDTQRYRLGVNHHQIPVNASRVASPHSFHRDGAMRTDGNLGGNVNYEPNRFGDFAQDANASEPPLAAGAVDRYDHRLDDDYYTQPGMLFALFDAAQRERLFGNIARHINGVPQEIVARQIEHFRRADPAYAEGVIAAIARLAEGETK

SEQ ID NO: 27882 - protein, 508 aa, Arabidopsis thaliana
GVEYAYVLLPPLETLSTVEETCVREKAVDSLCRIGAQMRESDLVEHFTPLAKRLSAGEWFTARVSACGIFHIAYPSAPDVLKTELRSIYGQLCQDDMPMVRRAAATNLGKFAATIESAHLKTDIMSMFEDLTQDDQDSVRLLAVEGCAALGKLLEPQDCVAHILPVIVNFSQDKSWRVRYMVANQLYELCEAVGPEPTRTDLVPAYARLLRDNEAEVRIAAAGKVTKFCRILNPELAIQHILPCVKELSSDSSQHVRSALASVIMGMAPVLGKDATIEHLLPIFLSLLKDEFPDVRLNIISKLDQVNQVIGIDLLSQSLLPAIVELAEDRHWRVRLAIIEYIPLLASQLGVGFFDEKLGALCMQWLQDKVHSIREAAANNLKRLAEEFGPEWAMQHIVPQVLEMINNPHYLYRMTILRAVSLLAPVMGSEITCSKLLPAVITASKDRVPNIKFNVAKMMQSLIPIVDQAVVENMIRPCLVELSEDPDVDVRYFANQALQSIDNVMMSS

SEQ ID NO: 27883 - protein, 590 aa, Arabidopsis thaliana
MAMVDEPLYPIAVLIDELKNDDIQLRLNSIRRLSTIARALGEERTRKELIPFLSENSDDDDEVLLAMAEELGVFIPFVGGIEFAHVLLPPLESLCTVEETCVRGKAVESLCKIGSQMKENDLVESFVPLVKRLAGGEWFAARVSACGIFHVAYQGCTDVLKTELRATYSQLCKDDMPMVRRAAASNLGKFATTVESTFLIAEIMTMFDDLTKDDQDSVRLLAVEGCAALGKLLEPQDCVARILPVIVNFSQDKSWRVRYMVANQLYELCKAVGPDCTRTDLVPAYVRLLRDNEAEVRIAAAGKVTKFCRLLNPELAIQHILPCVKELSSDSSQHVRSALASVIMGMAPILGKDSTIEHLLPIFLSLLKDEFPDVRLNIISKLDQVNQVIGIDLLSQSLLPAIVELAEDRHWRVRLAIIEYVPLLASQLGIGFFDYKLGALCMQWLQDKVYSIREAAAAANNLKRLAEEFGPEWAMQHLVPQVLDMVNNPHYLHRMMVLRAISLMAPVMGSEITCSKFLPVVVEASKDRVPNIKFNVAKLLQSLIPIVDQSVVDKTIRQCLVDLSEDPDVDVRYFANQALNSIDGSTAAQS

SEQ ID NO: 27884 - protein, 548 aa, Rickettsia akari str. Hartford
MATKLIKHGSKAREQMLEGIDVLADAVKVTLGPKGRNVLIEQSFGSPKITKDGVTVAKSIELKDKIRNAGAQLLKSAATKAAEVAGDGTTTATVLARALAREGNKLVAAGYNPMDLKRGMDLAVNAVVEEIKKSSKKINSQEEIAQVGTISSNGDKEIGEKIAKAMEEVGKEGVITVEEAKNFSFDVEVVKGMMFDRGYLSPYFVTNSEKMVAELENPFILLFEKKLSNLQPMLPILEAVVQSQRPLLIIAEDVEGEALATLVVNRLRGGLKVAAVKAPGFGDRRKAMMEDIAILTKGELITEDLGMKLENVSIKSLGTAKRVTVSKENTVIVDGSGDKKNIEDRVLQIKSQIAETTSDYDKEKLQERLAKLSGGVAVLKVGGATEVEVKERKDRVEDALAATRAAVEEGVVAGGGVTLLHASQTLTKLKVENKDQQAGIEIVIEALKDPLKQIIENAGENGGVVVGKLLEHNDKNYGFNAQDMQYVDMIKAGIIDPAKVVRTALQDAASVASLIITTETLIVDEPSDKEDAMPPMRGGMGGMGGMDF

SEQ ID NO: 27885 - protein, 359 aa, Helicobacter pylori
MKVLSYLKIFYLFLLIGAIMQANENMGSQHQKTDERVIYLAGGCFWGLEAYMERIYGVIDASSGYANGKTSSTNYEKLHESDHAESVKVIYDPKKISLDKLLRYYFKVVDPVSVNKQGNDVGRQYRTGIYYVNSTDKEVIDNALKALQKEVKGKIAIEVEPLKNYVRAEKYHQDYLKKHPGGYCHIDLKKADEVIVDSDKYTKPSDEVLKKKLTKLQYEVTQNKHTEKPFENEYYNKEEEGIYVDITTGEPLFSSADKYDSGCGWPSFSKPINKDVVKYEDDESLNRKRIEVLSRIGKAHLGHVFNDGPKELGGLRYCINSAALRFIPLKDMEKEGYGEFIPYIKRGELKKYIQDKKTH

SEQ ID NO: 27886 - protein, 95 aa, Rickettsia akari str. Hartford
MSFKPLHDRIAIKPIEHEEKTKGGIIIPDTAKEKPMQGEIVAVGNGVRNKKGEIHPLELKVGDKVLYGKWAGTEIEIKGEKLIVMKESDVFGIIN

SEQ ID NO: 27887 - protein, 532 aa, Ralstonia eutropha JMP134
MVEGVNILANAVKVTLGPKGRNVVLERSFGGPTVTKDGVSVAKEIELKDKLQNMGAQMVKEVASKTSDNAGDGTTTATVLAQSIVREGMKFVAAGMNPMDLKRGIDKAVAAAVEELKKVSKPTTTSKEIAQVGAISANSDTSIGERIAEAMDKVGKEGVITVEDGKSLADELEVVEGMQFDRGYLSPYFINNPEKQVVQLDSPFVLLFDKKVSNIRDLLPVLEQVAKAGRPLLIIAEDVEGEALATLVVNNIRGILKTAAVKAPGFGDRRKAMLEDIAILTGGTVIAEEIGLTLEKATLNDLGQAKRIEIGKENTIIIDGAGDAAAIEGRVKQIRAQIEEATSDYDREKLQERVAKLAGGVAVIKVGAATEVEMKEKKARVEDALHATRAAVEEGIVPGGGVALLRARAAISALTGENPDQNAGIKIVLRAMEEPLRQIVLNAGEEASVVVAKVIEGKGNYGYNAASGEYGDLVEMGVLDPTKVTRTALQNAASVASLMLTTDCAVAETPKEESAPAMPGGMGGMGGMEGMM

SEQ ID NO: 27888 - protein, 450 aa, Bacillus cereus ATCC 14579
MMKTKQTDELLAKDEQYVWHGMRPFSPNSTMVGAKAEGCWVEDIQGKRYLDGMSGLWCVNSGYGRKELAEAAYKQLQTLSYFPMSQSHEPAIKLAEKLNEWLGGEYVIFFSNSGSEANETAFKIARQYYAQKGEPHRYKFMSRYRGYHGNTMATMAATGQAQRRYQYEPFASGFLHVTPPDCYRMPEIEGQHIYDVECVKEVDRVMTWELSETIAAFIMEPIITGGGILMPPQDYMKAVHEMCQKHGALLISDEVICGFGRTGKAFGFMNYDVKPDIITMAKGITSAYLPLSATAVKKEIYEAFKGKGEYEFFRHINTFGGNPAACALALKNLEIMENENLIERSAQMGSLLLEQLKDEIGEHPLVGNIRGKGLLVGIELVNDKETKEPIDNDKIASVVNACKEKGLIIGRNGMTTAGYNNVLTLAPPLVISSEEIAFVVGTLKTAMERI

SEQ ID NO: 27889 - protein, 469 aa, Pseudomonas aeruginosa UCBPP-PA14
MDGQHLHQGELKRGLKNRHIQLIALGGAIGTGLFLGSAGVIKTAGPSMILGYAIGGFIAFLIMRQLGEMIVEEPVAGSFSHFAHKYWGGFAGFLSGWNYWVLYILVGMSELTAVGKYIQYWWPDVPTWATAAAFFVLINAINLANVKAFGETEFWFAIIKVAAIIGMILLGIYLLVGGGGGPQASVSNLWDRGGFFPNGLSGLVMTLAIIMFSFGGLELVGITAAEASEPRKVIPKAINQVIYRILIFYIGALAVLLSLYPWDQLVETINASGDDYSGSPFVQIFSLIGSGTAANILNFVVLTAALSVYNSGVYCNSRMLYGLAAQGDAPKVLMSVDRRGVPVLSILVSALITFLCVIVNYVLPHKALELLMSLVVAALVINWAMISLSHLKFRAAMKRQGVDTFFKALWSPFSNYLCLAFVVFILGIMLMIPGINISVYAIPFWLLLMWLCYRVKLSLAERRGLGQQA

SEQ ID NO: 27890 - protein, 256 aa, Botrytis hyacinthi
AYMLKYDSTHGQFKGDIKVLSDGLEVNGKKVKFYTERDPANIPWAESEAYYVVESTGVFTTTEKAKAHLKGGAKKVVISAPSADAPMYVMGVNNETYKGDVDVISNASCTTNCLAPLAKVINDEFTIIEGLMTTIHSYTATQKTVDGPSAKDWRGGRTAAQNIIPSSTGAAKAVGKVIPELNGKLTGMSMRVPTANVSVVDLTVRIEKGASYDEIKAVIKKAADGPLKGILAYTEDDVVSTDMNGDNHSSIFESKA

SEQ ID NO: 27891 - protein, 477 aa, Rhodopseudomonas palustris CGA009
MRRLRRIKILATLGPASSDSAMIRKLFEAGADVFRINMSHTPHDKMRELVKTIRNVESSYGRPIGILVDLQGPKLRLGSFANGPIQLNNGSNFVLDSIKEPGDETRVYLPHPEILAALKVGDALLLDDGKVRLICEETQGDRAVTRVVIGGKMSDRKGVSLPDTDLPMSAMTNKDRADLEAACETGIDWVALSFVQRAEDVVEAKRMIRGRAAVMAKIEKPQAIDRLEDILDVSDALMVARGDLGVEMPLERVPSLQKQMTRMARRAGKPVVVATQMLESMISSPVPTRAEVSDVATAVYEGADAIMLSAESAAGKYPVEAVSTMNRIGEEVERDVTYRTVVTAQRPDPEATAGDAIAGAARQIAETLDLSAIICWTSSGSTALRVARERPKVPVVAITPSLHTGRKLSAVWGVHCVVAEDAKDQDDMVERAGRIAFRDGFAKSGQRVIIVAGVPLGTPGATNMVRIAYVGPSDADV

SEQ ID NO: 27892 - protein, 155 aa, Glycine max
  misc_feature (33)..(33): Xaa can be any naturally occurring amino acid
  misc_feature (124)..(124): Xaa can be any naturally occurring amino acid
  unsure (1)..(155): unsure at all Xaa locations
VVKRTKLHEDLLDICPPTKRPIAALSEPSTNEXLMASVEYNEKTLTEVTLVAMTCCLTAHMTEEADTSEVTETVALPMTDALLPQMEVVHILWHVMMEAAHGTGQNMHPTAKAGLCQAKTWAEXAHTFCTSGKLELELVYKAHMQCYDDAKLMNL

SEQ ID NO: 27893 - protein, 315 aa, Salmonella enterica subsp. enterica serovar Typhi Ty2
MNITIATLSELLVEFLAKKENQGFSSPGEFWGPYPSGAPAIFADQVAKLGFRSLLFSCVGNDAFGVMNITRLSRDGVNVQGISVLPNATTGSAFVSYRSQAQRDFIFNMPDSACGLLSADHLDETLLRQYRHFHIMGSSLFSFRLIDAVRKAISIVKENGGTISFDPNIRKEMLKIREMSQAFEYILDYTDFFLPSDGELDYFGLSKSRDEEKIVARLHKRGIAHVIIKRGARGASYYSKDEQHHVAGYPVKVVDPTGAGDCFGATFVSLFLAGYSVPDALAHANAAGSLAISARGPMEGTSTLAQIKELMRQQN

SEQ ID NO: 27894 - protein, 198 aa, Yarrowia lipolytica CLIB122
MATNITWHEGLTHDERAKLVGQKGVTLWFTGLSASGKSTIATALEQFLLQNKINSYRLDGDNVRFGLNKDLGFSEADRNENIRRISEVAKLFTDSTCVTLTSFISPYKKDRQSARELHEASNLPFVEVYVDVPIEVAEQRDPKGLYKKARAGTIPEFTGISAPYEAPEKPEIHIKSHETSIEDAVKQIYQYLQDKKYV

SEQ ID NO: 27895 - protein, 345 aa, Francisella tularensis subsp. tularensis SCHU S4
MKVITAEYIWVDGSDPVPHLRSKARVLPFKEFETPDEFPEWSFDGSSTNQATGDNSDCILKPVNFVIDPLRDYGYLVLCEVYNPDGQTPHATNNRAKLRALLASADCQDMWAGFEQEYTMFKDGRPLGWPTTGFPGPQGPYYCSAGNSKAFGRDLVEAHMQACLEAGILFYGINAEVMPGQWEFQIGYRGVDGEDAGILNVADHTHLARWLLERLGEEYGIDISFDNKPIKGDWNGAGLHTNFSTSKTRNPQTGREAIKKICAALEKNHKKDILNYGHNLHERLTGKLETSDMNTFSVGDADRGCSIRIPRPVALKGYGYLEDRRPGANADPYVIAMALANAAIN

SEQ ID NO: 27896 - protein, 413 aa, Arabidopsis thaliana
MGLEEQGRAREDTPLLGKGRPLSSKFKTFANVFIAIVGAGVLGLPYAFKRTGWLMGLLTLFSVAALINHCMMLLVHIRRKLGVSNIGSFGDLGFAACGNLGRFVVDILIILSQAGFCVGYLIFIGNTLANLSKPTKSTTLMSLRHLMGVSPKSLYIWGCFPFQLGLNSIKTLTHLAPLSIFADVVDLGAMAVVIVEDIKITVVQRPQVVAFGGMSVFFYGMGVAVYAFEGVGMVLPLESETKDKDKFGKVLALSMLFIAVMYGSFGVLGYMAFGDDTMDIITANLGAGVVSSLVQLGLCINLFFTFPLMMNPVFEIVERRFWSGMYCVWLRWLLVLAVTLVALLVPNFADFLSLVGSSVCCALGFVLPSLFHLMVFKDEMEWKQRALDVGILLLGVILGVSGTWSSLTEIFQE

SEQ ID NO: 27897 - protein, 3487 aa, Microcystis aeruginosa PCC 7806
MVESIDYKKLMATTLSKMEVMQARINELETRQSESIAVVGMACRFPGGINSPEKYWSFCQAGLDAIVEVPKSRWDISKLYSQKPTLGKMNTAYGGFLQENITEFDARFFSISAKEAASMDPQQRLLLEVAWEALENANLPLKNLADNKVGVFVGITSIDHALKVYGTNYDQIDSFFGSGNALSAAAGRLSYFLNLHGPCLSIDTACASSLVAVHQGIRSLRNRECELALVGGVNLILEPAITISLSQSGMMSPDGRCKTFDASANGYVRGEGCGVLILKTLSEAQKNGDHILALLRGSAVNHNGAAAGLTVPSGPAQQELLRQALADARIVPEDVSYIEAHGTGTSLGDPIELNAIASVYGKRSDPLYVASVKTNIGHLEAAAGMAGIIKTILILQQGEIPPHLHFQSPNPLINWQDHPIEIPTQNIPWPNNNKVPIAGVSSFGFSGTNAHVIVQQAPVSKISEIQQQIPSHLLTLSAHNKTALKELAKRFHTLLESHPEIGDICYSAAVGRIDLPERLAIVGDTCPELQQRLAAFAEENPLDDLTFYQRFTSEKSPKIVFLFTGQGACYPGMGHQLYQTQPTFRQYIDQCAEILSKYLDHPLTEILFGEQTDLLNQTAYAQPAIFALEYSLTMLWKSWGITPTLLIGHSVGEYVAACIAGVFSLEAGLALVVKRGQLMQTTTSGKMASIFADEETVIYLIKNYTQTVSIAAINHPQQIVIAGESASIEEVISTCKKQKIPAQYLPVTQAFHSPLMEPILKEFEKEARQISYQRPQILLLSGLDGEVLENAPDATYWSKQCREPVRFLSSLITAFNKGYNLFLEVGPRPILAEQGRRYKDEVIWLSSLNRGLDNWQTILSALAQLYLNGAPFNPEQFNQNYGYKKVRLPNYPFQRKPFQFQPNPRTENQSIDKIFLDSQTSNLTDTETTVFNMQKHQQEIRNQLKSILALLLKEDENDLPEDETLLNLGADSIILTDFSRKVEEKFQVKVKIDQLFTDLQTLVDIAEYLCQFVKEKPLENTSEITTKVIDDETELSNYLQVIEQLQPIATAYIIKALESLGKKLNQGEQWTIENLRQTLPVARKYHILLNRYLQDLEEANILHNQGNIWTVKNLPESFSLPQALQKLEKTCPSAKPELEMLQRCGENLAEVLKGNIDPLTLIFPEGSVAHAESIYGNSPVSRLMNQRVAQAINQILTNFSNSDHPYQILEIGGGTGATSEAILNHLNLDHITYSFSEASPFLLHQARQKFQKKYNLNFHQLDIEKSPISQGIPARNYHIVVAANVLHATRNITETLTHIRELLRPGGYLVLLETVENNSWLNLTFGLTPGWWRFQDQQLRSDTPLLRGENWCSVLKSCGFATANSFSKQNNIPINNGQELILACVPDEPLSIPSIPKFTVFGESSGKEALMMAQLQSLKDLKDLHEKTIIKQLEVLQTATVSPSIAPEILTNQTQIIPTQSSKTETYLPVSQEKPKSPEKPSSPNLNPLALKLTENKSLTEQQQAFIQNLQSIYNQKTAKSKAYSQNSRKTMVDVKPTIDFRMALKEFQYPIVSESAQGAYFKDIDGNNYIDLAMGFGVNFFGHSPDFVIEAVQEQMNRGIGLGMQSNLAAETAALISEMGRVERVAFSNTGTEAIMAAVRIARSRTKRQKIVMFAGSYHGTFDGILARVGEDKTTTQPLSLGTPLGMVEDIIVLSYGVEESLDIIATHADDLAAVLVEPVQSRKPDLQPQEFLQKLRQITHKKGITLIFDEIITGFRIAPGGAQEWFNVEADIVIYGKAIGGGLPISMICGKADFLDTVDGGFWQYGDDSHPQTELTAFGGTFCRHPLALAACRAVLLHLRENSPTIQEKVNQLTHRLATEVNQFFQEIGIPIRVVNFGSLFRFEPFGAYSIFLQPIELPLFYYLLNLKGIYTWEKRVCFLSTCHTNEDIDRVIVAVKEAITELQQAGFFANAKRPQVKKEEKKPLSEDEDGRGHLPSLNQSFPTSEAQRQLWLLAELDRNASASYNVTTSLELLGSLDVYILEKTINQVINRHEALRTKIIEQGELQEVVNEVNIKLNLIDFKDEDNPEATALALRSQFSQKPFDLSIAPLFAVILMRLKSDHYLLSLKTHHIVADGWSLGLILQEIGQLYSSQNNTTKEVLTPPMQFRQYLTLRAQETQSPQMLEHRDFWLKTYQEELPTFELATDFPRPAVKTYTGGQESQVIPSEVGQNLQKVGRKNKATLFMTMFAAYTAFLRRISGHKDLVIGIPISGRQIEGSDNLVGFCSQFLPLRIQVDATTSFIEHLQHTKQTLIDAFRHQSYTLEDLLAALQLPRDFSRSPLISVSFNMDPSLTLPEFKDLKVSLPPSPIGYTPFDLGFNLIELNDNLIIYCNYNTELFKKETIKQFIESFEILLRGIIDDANHLLYQLPLLTPVQQEKLLRQLTGKTRKLPEKATIIDDFIAQVKLTPNTPALIAGKISLSYQELNEKVNRLTHYLQQEYQLGVGKVIGVMLQRNHYLIIGILATFKTGATYVPIDSQYPHSRIEFILKDSGCHVCLTESNFISKLPEKMEKICLDKIDPIVEKYDKDEPKIFRNSSQTAYIFYTSGSTGNPKGVMGRHISILNVIQSLRLTFDLDKHPEWRYIFTAAVTHDPSIRNIFLPLTIGASLYMYEIKYIGHLVSFLQENQINALHTTPSIYREILGLLEPGETISSLKYISVGGEKLDRETALALRKRFPAEIISNVYGSTETCVGVSQYEIKENLDSEIPLGQVFHNNRLGVLDEFNNPVPLHVIGEICVEGAALASGYHNQPEMTQEKFKPSFLDETKTLFRTGDLGKQTAPGIIEFMGRKDNQVKVNGYRIDPGEIEYQLTRYAPIERAIVLPVQVNNQTQLSAYCQTDKTLEIAEIRELLAKFLPVYMIPSYFIFLKQFPLTRHGKLDLHSLRELRETGKSLVNSNYVAPRNYLESNLVSIWEKILSKHPIGIFDNFFEIGGHSLLLSRVVTRVHKELNVSVKLADFFKVPTIAGLATLISQTQYNYQEPISAIPPQKSYPMSHGQRRLWALEFLDQNHNAYGMPSAYQFKGNLNIDAFENAFQQLIQRHEILRTTFTLINNQPRQVVHNQMNFVIKQIDLTAYVSTEQENLIEESISHNAKTTFDLEVGPLLKVNLLKLSQENYIVLFNMHHIIFDGWSAGVLIKDFLTHYHAYGQENSQLMPPLRIHYKDYTSWQESQLETLKLQSQRDYWLAKLTPVPVRLNLPVDYPRPPVKSFQGNTITWQPEPELIDTFEKLVKAQEASLFMGLVSLVKSFLFRYTEQNEITIGSAIAGRNHPDLEDQIGFYVNTLVLRDQITDHDSFTDVLSKVKTTTLEAYDHQDYPFDQIVSDLNLQRDPSRNALFDVAIVLQNNQNVDLALDGITVNSIDPKMITAKFDLEFIFVEEEELYLKLIYNTDIFIHERILLLIDLFKNWLEQVLKFAHEPLINLSLASSENLIQEGQDMFTEDFNF

SEQ ID NO: 27898 - protein, 551 aa, Neurospora crassa
MLPVPLTTLSLYVVALLSPPAAAGVLASATTKLPIKLPISPAQGHRSSTAASPSLTSRSSSSGNGFIRASVHAAHGAPPKLRRRQEDEGLKNQNLGTTYTIDIDIGTPPQTVTLILDTGSPDLWVNPQCETSGQEKYCNSFRQFDYTKSKTIQDTGAADILKYGKGNVTIEYVTDDVIIGSAKIKSQILGIGFESIDIPLGILGLSPSVSPDGTSPYPYLLDSMASQGIISSRAFSLDLRSIDNPSGAIIFGGVDLGKFSGSLAKLPMLDPSQTPAGVDRYWIVLSGVGMTYPDGEEVESEEIGVPVFLDSGGTLSRLPETIFQAIGDSFPGSQYDPESGFYIVDCAVAEQAGSVDFIFGSSGSRSSKKIRVPYGDFVWEVQTGVCVVGVLPTDDEPVFGDSFLRAAYVVFDQDNRNLHLAQAANCGEQIVEIGSGQDAVPSSTGKCKDGSAGSTKTAGGGGLDVTATRAPTRTAGGSGPAVTNSDFGPGPAGTRVSTGGIGLPTGTGGGGGSGDGNGNNDDDDSAASGLDVGVTAAAVLAGLNMLIVWLL

SEQ ID NO: 27899 - protein, 464 aa, Bordetella bronchiseptica RB50
MHRNTTRCTIALPGGSILKLQSLDDFLRRVAARDPQQAEFMQAVQEVMLSLWPFIEKHPHYAEHALLERLVEPERVIQFRVCWTDDQGQAQVNRAFRIQHSSAIGPFKGGMRFHPTVNLSVLKFLAFEQTLKNALTTLPMGGGKGGSDFDPKGKSDAEVMRFCQALMLELHRHLGPDTDVPAGDIGVGAREVGFMAGMMKKLSNSAASVFTGKGLCFGGSLIRPEATGYGTVYFAQEMLQRAGLSFDGMRVSVSGSGNVAQYAIEKAMALGAKVVTISDSCGTVIDEAGFTHEKLLALMHIKNDLRGRLDTYASQFGLRYEAGVRPWHVPVDVALPCATQNELDENDARTLIRNGVKCVAEGANMPATLDAAKAFIAAEVLYAPGKASNAGGVAVSGLEMSQNSARLPWTREQVDARLHAIMRDIHENCVRHGHGAGNYVNYVDGANIAGFVKVADAMRQQGLY

SEQ ID NO: 27900 - protein, 312 aa, Lupinus albus
MGKSKVLVVGGTGYVGRRIVKASLEHGHETFILQRPEIGLDIEKLQILLSFKKQGAILVEASFSDHKSLVDAVKLVDVVICTMSGVHFRSHNLLTQLKLVEAIKDAGNIKRFLPSEFGMDPALMGHALEPGRVTFDEKMTVRKAIEEANIPFTYISANCFAGYFAGNLSQMKTLLPPRDKVLLYGDGNVKPVYMDEDDVATYTIKTIDDPRTLNKTVYLRPPENILTHKELIEKWEELIGKQLEKNSISEKDFLSTLKGLDFASQVGVGHFYHIFYEGCLTNFEIGENGEEASELYPEVNYTRMDQYLKVYV

SEQ ID NO: 27901 - protein, 348 aa, Arabidopsis thaliana
MVGNILVTGGAGYIGSHTVLQLLLGGYNTVVIDNLDNSSLVSIQRVKDLAGDHGQNLTVHQVDLRDKPALEKVFSETKFDAVMHFAGLKAVGESVAKPLLYYNNNLIATITLLEVMAAHGCKKLVFSSSATVYGWPKEVPCTEESPLSGMSPYGRTKLFIEDICRDVQRGDPEWRIIMLRYFNPVGAHPSGRIGEDPCGTPNNLMPYVQQVVVGRLPNLKIYGTDYTTKDGTGVRDYIHVVDLADGHICALQKLDDTEIGCEVYNLGTGKGTTVLEMVDAFEKASGMKIPLVKVGRRPGDAETVYASTEKAERELNWKANFGIEEMCRDQWNWASNNPFGYGSSPNST

SEQ ID NO: 27902 - protein, 414 aa, Thermus thermophilus HB8
MDLDAFTLFERHINPGLAGLLRFTGLDRVESHAEGPYVWDTQGKRYLDFLGLYGTLNLGHRHPKVVEAVKRQLDRMPMSVRVLVSEPTARLAAKLAEITPEGLEMVFFGNSGAEAVEAAIKLARAYTGKPGIVTTQGGFHGKTMGALSLTPKPEYQDPARPLLPGVKVVPYGDLKALEEAIDETTAAVIVEPIQGEGGIRVPPEGYLRGVRELTREKGVLMIADEVQTGLGRTGKLFGVDWEGVSPDLMTLAKALGGGVMPIGACVGRREVFEVFKNNPLFHSSTFGGNPLAAAAALAAIEVTLEEDLPGRALELGRHLMEGLKVLKEEHPHLIEDVRGRGLMVGVEFADADIGALVVAEMAERGVLTAFGLNNPKVVRLEPPLIIGKEHVDEALAVFAEALKATEKALEGLLG

SEQ ID NO: 27903 - protein, 119 aa, Zea mays
  misc_feature (53)..(53): Xaa can be any naturally occurring amino acid
  misc_feature (60)..(60): Xaa can be any naturally occurring amino acid
  unsure (1)..(119): unsure at all Xaa locations
HAFVHASGGVLPLPVLDHSVQACIVTGYWEDVASFKPLFAALLPLAVHPSQLXFYDPREXWVSGPRCSPATHWDTCTILCAFISYGCLLLRRLVHLSVLGVWSRVLSGCDLGDFAVMGA

SEQ ID NO: 27904 - protein, 662 aa, Staphylococcus epidermidis ATCC 12228
MFNEKDQLAIDTIRALSIDAIEKANSGHPGLPMGAAPMAYTLWTRHLNFNPQSKDFFNRDRFILSAGHGSALLYSLLHVSGSLELEELKQFRQWGSKTPGHPEYRHTDGVEVTTGPLGQGFAMSVGMALAESHLAGKFNKDQFDIVNHYTYVLASDGDLMEGISHEAASFAGHNQLDKLIVLYDSNDISLDGDLDKSFSEDTKQRFEAYGWNYILVENGNDLDEIDNAITQAKSQQGPTIIEVKTIIGFGSPNKAGSNGVHGAPLGEEERALTFKEYGLDPEKRFNVPEDVYEIFKSTMLKRANENEEAWNNMLKNYSEAYPELAEEFKLAMSGKLPNNYADALPEYDLNHSGASRADSGEIIQKLSEFVPSFFGGSADLAGSNKSNVKEAKDYNKDTPEGKNVWFGVREFAMGAAINGMAAHGGLHPYAATFFVFSDYLKPALRLSSIMGLNSTFIFTHDSIAVGEDGPTHEPIEQLAGLRAIPNMNVIRPADGNETRVAWEVALESEHTPTSLVLTRQNLPTLDVDKQTVENGVRKGAYIVFETEQQLEYLLLASGSEVNLAVEAAKELEQQGKGVRVISMPNWYAFEQQSSEYKESILPSDVTKRIAIEMASPLGWHKYVGIEGKVIGINSFGASAPGDLVVEKYGFTKENILKQVRSL

SEQ ID NO: 27905 - protein, 371 aa, Bacillus anthracis str. 'Ames Ancestor'
MGTKTKKTLFNVDEQMKAIAAQFETLQILNEKGEVVNEAAMPELSDDQLKELMRRMVYTRVLDQRSISLNRQGRLGFYAPTAGQEASQLASHFALEAEDFILPGYRDVPQLVWHGLPLYQAFLFSRGHFMGNQMPENVNALAPQIIIGAQIIQTAGVALGMKLRGKKSVAITYTGDGGASQGDFYEGMNFAGAFKAPAIFVVQNNRYAISTPVEKQSAAKTVAQKAVAAGIYGIQVDGMDPLAVYAATAFARERAVNGEGPTLIETLTFRYGPHTMAGDDPTRYRTKDIENEWEQKDPIVRFRAFLENKGLWSQEVEEKVIEEAKEDIKQAIAKADQAPKQKVTDLMEIMYEKMPYNLAEQYEIYKEKESK

SEQ ID NO: 27906 - protein, 368 aa, Alkalilimnicola ehrlichei MLHE-1
MELAVSMRVGLVGRRPAMTPRAVDGGSDVKAFFHPSQDKHIPRSYLSRGQMRAPLELPERTGHILEGLRTLDISVETPSDHGMQAIARVHDMGYLRFLESAHRRWKAIPDDWGDEVMSNVFVRSPNPMKGILAEAARYLADGSCPIGEHTFEAAYWSAQTALSASDELLRGAKRAYAVCRPPGHHARRDAAGGFCYLNNAAIAAEALKAQYPRIAILDPDMHHGQGIQEIFYDRDDVLYISIHGDPTNFYPVVSGHEEERGAGAGEGYNINLPMPHGSPEATYFQRLEEAAHAIELYAPDALIVTLGFDIYKDDPQNKAAVSSPGFNRMGRTLAELALPTLIIQEGGYHMATLAQNTREFFTGLGDPR

SEQ ID NO: 27907 - protein, 671 aa, Fusobacterium nucleatum subsp. nucleatum ATCC 25586
MDLLTQVMYIGIAVGIISLLAAFYYAKKVEHYQINIPKVEEITAAIREGAMAFLAAEYKILIVFVIVVAVALGIFISVPTAGAFILGAITSAIAGNAGMRIATKANGRTAIAAKEGGLAKALNVAFSGGAVMGLTVVGLGMFMLSLILLVSRTVGISVNDVTGFGMGASSIALFARVGGGIYTKAADVGADLVGKVEAGIPEDDPRNPATIADNVGDNVGDVAGMGADLFESYVGSIIATITLAFLLPVDDATPYVAAPLLISAFGIISSIIATLTVKTDDGSKVHAKLEMGTRIAGILTIIASFGIIKYLGLDMGIFYAIVAGLVAGLVIAYFTGVYTDTGRRAVNRVSDAAGTGAATAIIEGLAIGMESTVAPLIVIAIAIIISFKTGGLYGISIAAVGMLATTGMVVAVDAYGPVADNAGGIAEMSELPPEVRETTDKLDAVGNSTAAVGKGFAIGSAALTALSLFAAYKEAVDKLTSEALVIDVTDPEVIAGLFIGGMLTFLFSALTMTAVGKAAIEMVEEVRRQFREFPGIMDRTQKPDYKRCVEISTHSSLKQMILPGVLAIIVPVIIGLWSVKALGGLLAGALVTGVLMAIMMANAGGAWDNGKKQIEGGYKGDKKGSDRHKAAVVGDTVGDPFKDTSGPSLNILIKLMSIVSLVLVPLFVKFM

SEQ ID NO: 27908 - protein, 160 aa, Oryza sativa (japonica cultivar-group)
MEDERNTESHQGGEAASVVTAAPTPAPAPVVTHGDHHHDTAVPVEKIEGDHAKTEATLPRAPEEEKKGFLDKIKEKLPGGHKKPEDATAVPPPAASPAAPATTPAPAHPPPATEEVSSPDGKEKKGILGKIMEKLPGYHKGSGEEDKTAAAATGEHKSSA

SEQ ID NO: 27909 - protein, 571 aa, Glycine max
MLEKVEEFNMDKVIQEFELLTRDAERVQRETLKRILEDNASAEYLQSLGLNGRTDPESFKACVPMVTHKELEPYIYRIIDGDASPILTGKPITTMSLSSGTTQGKPKYVPWNDELYETTMQIYQTSFAFRNREFPIKNGKALSFIYGSKQLKTKGGLAARTATSNVFCSAGYKCAMRALQSQCCSPDEVIFGPDFFQSLYCHLLCGLIFREEVEFVSSTFAHSIVHAFRTFEQVWEELCNDIREGVLTRNVTVPSIRMAMSKLLKPNPELANAIHKKCTGLSNWYGLIPELFPNAKYIYGIMTGSMEPYLKKMRHYAGELPLLTADYGSSEGWIAANVNPQLPPEYATYAVLPHIGYFEFIPLLELENTKPLGLTQVKVGQEYEIVMTNPAGLYRYRLGDVVKVMGFHNSTPELKFIRRSSLLLNINIDKNTEKDLQLAVEAAGKLLAEEKLEVVDFSSQVDLSKEPGHYVIFWEISGDASQELLHECCNCLDKSFVDAGYTSSRKVNCIGALELRLVRRGTFQKILDHYLGLGTAVSQYKTPRCVGPTNTRVLQILSENVVNNYLSTAFN

SEQ ID NO: 27910 - protein, 126 aa, Triticum aestivum
MGRSPCCEKAHTNKGAWTKEEDQRLIAHIKAHGEGCWRSLPKAAGLLRCGKSCRLRWINYLRPDLKRGNFTDEEDELIIKLHEFLGNKWSLIAGRLPGRTDNEIKNYWNTHVKRKLLARGVDPQTH

SEQ ID NO: 27911 - protein, 514 aa, Petroselinum crispum
MSSSLGDLLAQPNNDDFGSNWGFENQKTKSFANQSLPFSPPPVSPSSYFSFLDSPIQNNNYTIVSSSGNGTMNAQSFKEENQNFSDFSFPAQTRPASSTSSSFIPANTNLVEDSLKRKQGGWNFEEPAKKNDFLMDNASVTSDIATLQRISPEMTMNHANMQSNAALQSNLNNYAQSSQSSQTNRDQSKLDDGYNWRKYGQKQVKGSENPRSYYKCTYLNCPTKKKVETTFDGHITEIVYKGNHNHPKPQSTKRSSSQSYQNSIGTMPESSLLENGRSEPVTTPENSSLSFGEDDLFEQGSMNKPGDDDENEPDSKRWKGEYESNEPMSSLGSRTVREPRIVVQTTSDIDILDDGYRWRKYGQKVVKGNPNPRSYYKCTQVGCPVRKHVERASHDLRAVITTYEGKHNHDVPAPRGSGSYPAVNRPSDNTTSAPTAIRPTTNYLNPLQNPRAQPANGQAPFTLEMLQRPRSYEFSGFTNTSNTYAINQNQQASGQFSTAKDEPDVDSFFDSFLA

SEQ ID NO: 27912 - protein, 256 aa, Botrytis paeoniae
AYMLKYDSTHGQFKGDIKVLSDGLEVNGKKVKFYTERDPANIPWAESEAYYVVESTGVFTTTEKAKAHLKGGAKKVVISAPSADAPMYVMGVNNETYKGDVDVISNASCTTNCLAPLAKVINDEFTIIEGLMTTIHSYTATQKTVDGPSSKDWRGGRTAAQNIIPSSTGAAKAVGKVIPELNGKLTGMSMRVPTANVSVVDLTVRIEKGASYDEIKAVIKKAADGPLKGILGYTEDDVVSTDMNGDNNSSIFDAKA

SEQ ID NO: 27913 - protein, 347 aa, Salmonella enterica subsp. enterica serovar Typhi Ty2
MKSVVIHAEGDVRVEERPLPQLQAEDDVLVKVVSSGLCGSDIPRIFAQGAHYYPITLGHEFSGYVESYGTGVTDMQPGDAVACVPLLPCFHCPQCERGYFSLCKQYQFVGSRSEGGNAEYVVVKRANLFRLPSDMPIEDGAFIEPITVGLHAFHLAQGCEGKNVIIVGAGTIGLLALQCARELGARSVTAIDINPQKLELAKALGATHTCNSREMTADDIQTALSDIQFDQLVLETAGTPQTVSLAIDITGPRAQLALVGTLHHDLTLTTRTFGLILRKELTLLGSWMNYSAPWPGEEWETAARLLAEKRLQLTPLIAHRGDAESFAEAVKALNGAPMQGKILLQLS

SEQ ID NO: 27914 - protein, 200 aa, Zea mays
LIPRVLTRAQVTLGNILKESGQEGIPVNKTWRLNERHYGSLTGLNKSETAAKYGEAQVQIWRRSFDTPPPPMEPDHPYYNTIVKDPRYAEGPSEAEFPMFESLKLTIARTLPYWNDVIIPQLKEGKSIIIAAHGNSLRGIVKHLDNLSDDAIMALNLPTGIPFVYELDENFKPVVSMKFLGDEETVRKAIESVAAQGKAK

SEQ ID NO: 27915 - protein, 256 aa, Botryotinia pelargonii
AYMLKYDSTHGQFKGDIKVLADGLEVNGKKVKFYTERDPANIPWAESEAYYVVESTGVFTTTEKAKAHLKGGAKKVVISAPSADAPMYVMGVNNETYTGDVDVISNASCTTNCLAPLAKVINDEFTIIEGLMTTIHSYTATQKTVDGPSAKDWRGGRTAAQNIIPSSTGAAKAVGKVIPVLNGKLTGMSMRVPTANVSVVDLTVRIEKGASYDEIKAVIKKAADGPLKGILAYTEDDVVSTDMNGDNHSSIFDAKA

SEQ ID NO: 27916 - protein, 546 aa, Oryza sativa
MATAAGRYEDSGVSVSFRRKAAYTAASLLVFLVAGQLPLYGVKKYNGDKDVPDPLYWMNCMFASSNNTLMTLGIIPLLLSEMAVRIFSALIITRWPPFHHVRLNRARKLLAIAMAMVMAVSGVLSAGVAAELGTMASLVVMFQLFLGGMIAIYLDELLQKGYGLLSGVSLFAAANCCACIFWKAFTAEDPLLHWAAIIVFFKLVLQLQSCHITLPAVTSPDDPTLQTTYTISPSYMAYVPILFQPAFFSFPLVSISQTLSIKYGETNRVVNLLGKWQQMCKYPGYYVPVARIASYVTTPPSFGEIVTGDPGSLLYAVFLLTGCAFLSLFCFKVCAKSSKRYLVRLVGKPKQTRLSPDDEQLPDEDESISPKQCRRYMTIAAIFVGFCVGFLSLLAGFLGLDGPAIMLAVTVIHSVVQDHSESDGIRAKVYKHTRLVSSLFLSIIMFDHRSPMAGGEGFFVDVQVDAVRAVVMTPAAGGNALRLLVQEQEQRAGGRRRTDGGDSEEDDGGDCLRPYEPIIICCAALVYLALWLCGLLLFCRSVQFLI

SEQ ID NO: 27917 - protein, 555 aa, Ashbya gossypii ATCC 10895
MSSVNKENYRGVPSGRGMKNPVLAGAKRAVLNNVTNTTLSQEAANSNAHSGSGYTNSFGKVLRQAKSKLQSARVAGSLIPQMKREGLASSQEDKENVVPTGVAPAAVAAAAAAAQMAPAIAKPILQSISEESHQECQSLLKDGGSDEGASTVSTKSSDTELAPSSSSSLQSAPANSEEPVVLESGTQLVERRRPQTLNTTLTGSVASSSDCTTSTGQLTESTAGELTTTQNQLRPSVAVAESKKKRPISTIVEPEELKKFKISDQGNQCEWEDLDAEDINDPFMVSEYVNDIFEYLHKLEVMTLPNRHDLFKHANIQQNRDILVNWMVKIHNKFGLLPETLYLALNIMDRFLGKELVQLEKLQLVGTACLFIASKYEEVYSPSVKHFAYETDGACDEEEIKEGEKFILKTLQFNLNYPNPMNFLRRISKADDYDIQSRTLAKYLLEISVVDFKFIGILPSLCAAASMFLSRKMLGKGKWDGNLIHYSGGYSTTELAPICNMLMDYLVQPVVHDELFKKYASRRFMKASVISRQWAKKVMTRSYDIMTLHETQTEY

SEQ ID NO: 27918 - protein, 404 aa, Ashbya gossypii ATCC 10895
MSPVGETRRVSDENEAAGARRRGELAKKRGNTVLGVPRKALGAVGVNTRKQERDGAATGSGAGGARGAGTKRMVYHDSEGEETQEPEEKRVSKKAKAERQCPSPAAQTESPEAARGALVREPHPHRDLDALEADDLTMCVDYTNEIFAHLLQREQETTCVVNYVQERQCAFYIRPSMRAILVDWLIEVHLKFQLLPEALYLAINIMDRYLSTNKVSLSKLQLVAITSLLIAAKFEEVNLPKLSNYVYITDNAYTVEEVKQSECNILNALEFNIGWPNPMNFLRRISKADNYNHNTRNYAKVFLEYAMCCPKFVAITPSVLAAMSMRCAMMLNYGAEGFEWDDTMEWYSSMATTSAKFDFQKLCDDLIKDIQEPSTQLNALIYKYKKLGLWVAVKTWCDEQKIVR

SEQ ID NO: 27919 - protein, 378 aa, Bordetella pertussis Tohama I
MTVSLAILFVVITLRPDWLRLSGPAPATRAPAAAASGQAGASYADAVARAAPAVVNVYTTKHVNVPLVPLPDDPVLRQLFGQVPGLSRREASTSLGSGVIVSAEGYVLTNYHVVEAADAIEVALADGRQAAAKVVGADPETDLAVLKLAGKLGELPVATFADKRAPRVGDVVLAIGNPFGVGQTTTQGIVSALGRNGLGINTYENFIQTDAAINPGNSGGALIDAHGDLVGINTAIYSETGGSLGIGFAIPVDSARRVMEDIVRTGAVRRGWFGIEPQDMTPELARAFQLPREARGVIIAGVMRDGPAGKAGMRVGDIVQALNGAPVIDTRGLLGQIASLQPGQQAVASVLRAGKPADRLLPACMPLRCPPWPAIRPG

SEQ ID NO: 27920 - protein, 345 aa, Rhodopseudomonas palustris CGA009
MTKYKLEYIWLDGYKPTPNLRGKTTIKEFEIYPTLEQLPLWGFDGSSTMQAEGHSSDCVLKPVAMYPDAARKNGILVLCEVMMPDGVTPHPTNTRATILDDEGAWFGFEQEYFFYKNGRPLGFPEAGYPAPQGPYYTGVGYKHVGDIARQIVEEHLDLCLAAGINHEGINAEVAKGQWEFQVFGKGSRTAADQMWMARYLMLRLTEKYGIDIEFHCKPLGDTDWNGSGMHCNFSTAYMREVGGKEYFEAMMKAFEANLDDHIAVYGPDNHMRLTGKHETAPWNKFSYGIADRGASIRVPHSFVNNGYKGYLEDRRPNSQGDPYQIASQVLKTISSVPTSKSAAAA

SEQ ID NO: 27921 - protein, 1408 aa, Cryptococcus neoformans var. neoformans JEC21
MSASPGPTAAAAGSDHLQARRDEEVIDSEKDVLAHDAHAVNSGIPYPTATAPNIGVPTVSTSVGRVSSAPEEKISRSSIAASSDTLRNPPLEKSTSNAVSKSHTHKKSKFNFLKSRKKKEEEERKNKEKEKEASVLPPVSFFALFRFAAPLEIVAMVLGLVLAVAAGCCQPLMTLIFGRLTTSFTNYAVIVNQISQVGLTPETSAALQAAKDDLKTQSGHNALYLMAIGIAMFLATWLYMFIWNVTGELNSKRIRERYLAAVLRQEIAYFDDLGAGEVATRIQTDCHLVQEGTSEKVALVFQYAGTFVCGFVLAFVRSPRLAGALISILPVIMLCGGIMMTAMAKFGTAALDHIAKAGSLAEEVIASIRTVQAFGKEKILGDKFADHIEQSKIVGRKGSIFEGFGLSIMFFAIYAAYALAFFYGGVLVSQGRADSGIVINVFMSILIGSFSMAMLAPELAAVTKARGAAAKLFATIDRVPTIDSASDEGLKPDSLHGEISFENVKFHYPSRPSVPILKGFTTTFEAGKTFALVGASGSGKSTVVSLIERFYDPISGVVKLDGKDIRSLNLNWLRQQIGLVSQEPTLFGTTVRGNVEHGLIGSRYENASFEEKFELVKKACVDANAHDFIMKLPQGYDTMVGERGMLLSGGQKQRVAIARAIVSDPRILLLDEATSALDTQSEGIVQDALDKASRGRTTITIAHRLSTIRDADRIYVMGGGEVLEQGSHNDLLANENGPYAQLVNNQKLAQEAAAEALQVDDDIDDPDDVVFGGPSSPMQEKDRQLHRAVTGRSLASIAMDDIQAKRAEEVAGEDKIPSSFGLYARLLRMNSADKFIYIIAFIAAICAGMVYPALAILFGKALSDFEIQDPTELRDALSRRALWYFITALAAGFVIFFQSAGFSHAGWDLNGVLRKKLFTSTLRHDIEWFDEEHNSTGAVTSNLADQPQKVQGLFGPTLGTIIQSCATLLGGCIIGLCYGPLLALIGIACIPILVSGGYIRLKVVVLKDQRMKKLHAASAHLASEAAGAVKTVASLTREKDVREIYSEALKAPMKLNFRTSIKSQCLFAASQGLTFCIIALVFYIGALWIINGKYTTASFYTVLNSIVFASIQAGNVFTFVPDASKANSSAASIFRSIDNEPAINAESSEGKVLDHEHVVGHVRIEGVHFRYPTRPGVRVLRNLTIDVPAGTYVALVGPSGCGKSTTIQMLERFYDPLAGRVTLDGIDIKELNLASYRSQISLVSQEPTLYAGTIRFNILLGANKPLEEVTQDEIDSACKDANIYDFIVSLPDGFDTEVGGKGSQLSGGQKQRIAIARALIRNPKVLLLDEATSALDSQSEKVVQEALDKAAKGRTTIAIAHRLSSIQHSDQIYYFSEGRVAEQGTHQELLSKKGGYYELVQMQNLSRQ

SEQ ID NO: 27922 - protein, 571 aa, Chlamydophila abortus S26/3
MLMNTQNGQAMEAAHEEEAQKKLEELVSLAKDQGFITYEEINEILPMSFDTPEQIDQVLIFLTGMDIQVLNQADVERQKERKKEAKELEGLAKRTEGTPDDPVRMYLKEMGTVPLLTREEEVEISKRIEKAQVQIERIILRFRYSSKEAISIAQYLINGKERFDKIISEKEVEDKAHFLKLLPKLISLLKEEDAYLESLLLALKQNNLSKEETAKLNEDLEKCRIRTQAYLRCFHCRHNVTEDFGEVVFKAYDSFLQLEQQINDLKVRAERNKFAAAKLDAAKRRLYKREVAAGRTLEEFKKDVRMLQRWMDKSQEAKKEMVESNLRLVISIAKKYTNRGLSFLDLIQEGNMGLMKAVEKFEYRRGYKFSTYATWWIRQAVTRAIADQARTIRIPVHMIETINKVLRGAKKLMMETGKEPTPEELAEELGLTPDRVREIYKIAQHPISLQAEVGEGGESSFGDFLEDTGVESPAEATGYSMLKDKMKEVLKTLTDRERFVLIHRFGLLDGKPKTLEEVGSAFNVTRERIRQIEAKALRKMRHPIRSKQLRAFLDLLEEEKVSGKAKNIKGK

SEQ ID NO: 27923 - protein, 465 aa, Corynebacterium glutamicum ATCC 13032
MSEQPASIKHYDLIIIGTGSGNSIPGPEFDDKSIAIVEKGAFGGTCLNVGCIPTKMYVYAADIAQEIQESARLGIDATVNSVDWPSIVSRVFDKRIDLIAQGGEAYRRGPETPNIDVYDMHASFVDSKTISTGIAGQEQLISGTDIVIATGSRPYIPEAIAESGARYYTNEDIMRLAQQPESLVIVGGGFIALEFAHVFEALGTKVTILNRSDVLLREADADISAKILELSKKRFDVRLSTAVTAVHNKADGGVKISTDTGDDIEADILLVATGRTPNGNQMNLDAAGIEMNGRSIKVDEFGRTSVEGVWALGDVSSPYKLKHVANAEMRAIKHNLANPNDLQKMPHDFVPSAVFTNPQISQVGMTEQEAREAGLDITVKIQNYSDVAYGWAMEDKDGFVKLIADKDTGKLVGAHIIGAQASTLIQQLITVMAFGIDAREAATKQYWIHPALPEVIENALLGLEF

SEQ ID NO: 27924 - protein, 130 aa, Zea mays
  misc_feature (25)..(25): Xaa can be any naturally occurring amino acid
  misc_feature (46)..(46): Xaa can be any naturally occurring amino acid
  misc_feature (54)..(54): Xaa can be any naturally occurring amino acid
  misc_feature (105)..(105): Xaa can be any naturally occurring amino acid
  unsure (1)..(130): unsure at all Xaa locations
HPFNRHLSRAYDISSGLAIGDGFCXVLAATQRPGTEGKRQFSGACXMQVRQVNXLFNDAESNDSEEVLILCGDHMFRMDYMDFVQSHIQRGACISICCLPNDDSXRASDFGLVKIDYTGRCISFNEKPKG

SEQ ID NO: 27925 - protein, 462 aa, Streptomyces coelicolor A3(2)
MASSFGAAQVLVASNRGPVSYEVREDGSLHAKRGGGGLVSGLSAIGPDAGALWVCSALSDGDREAVRRGVGEDGVRMLDVPADVHADAYNGIANSVLWFVHHMLYQTPLEPVFDAEFRRQWASYEAYNRAFAEALAEEAAEGAVAIVQDYHLTLVPGMLRELRPDLRIGHFSHTPWAPLDYFRLLPDDIAEQVLRGMLGADRLGFLTRRWADAFTACCDAVVGGLGGTEIGVHGLGADGDFLRKRSHEADVEERMAELREQIGEGRRTIVRVDRTELSKNIVRGLLAYRELLAGRPEWRERVVHVAFAYPSRQDLAVYREYTAEVERVANAVNEEFGTPGWTPVVLNLKDDFARSLAAYRLADVALVNPVRDGMNLVAKEVPVVSDTGCALVLSREAGAYEELGEDAVVVNPYDVVGTADALHAALGLPAGDRAERSKRLAAAGTALPPARWFLEQLEALRG

SEQ ID NO: 27926 - protein, 258 aa, Burkholderia fungorum LB400
MVSTPDRERNLAEAGRLIAEAAAEGAQLVLLPEYFCFMGFKDTDKLAVREPYQDGPIQRFLADAARRHQIWVIGGTLPLMSPEASRVLNTTLVFDPQGNEAARYDKIHLFNFEKGAESFDEARTICPGGEVRSFEAPFGRVGLSVCYDLRFPELYRRMGDCALIVVPSAFTYTTGRAHWEMLLRARAVENQCYVLAAAQGGKHENGRRTWGHSMLIDPWGEIVALRDEGAGVVAGNLERARIDEVRQSLPAWRHRVLS

SEQ ID NO: 27927 - protein, 464 aa, Novosphingobium aromaticivorans DSM 12444
MSRLIVISNRVSAGGGAQGGLAVALSAALREHGGIWFGWSGNETSEFTGHINMERVDGVTTATVDLEEQDIEEYYDGYANRTLWPLFHYRIDLAEYERSFADGYKRANERFAETALPLIEPDDLVWVQDYHMFPLGKELRARGVENRIGFFLHIPWPPRRLLATLPEARALTESLLAYDLIGFHTEEWLQSFCDYVSHELGGTIGDDGWLSVGERRVRLIACPVGIDAKEFAALAASEKAKETYERVRVSAVGRTMIVGVDRLDYSKGLEERFLGYERFLVEHPEERKEVTLLQIAPPSRGTVDSYQRIRSTLEGLAGRINGAHAGLDWVPIRYVNQGYTRDMLAGVYRASKVGLVTPLRDGMNLVAKEYVAAQDPGDPGVLILSRFAGAAEQMPEALLVNPHSAEEISDALSRAITMPGEERIRRWRTLMNGVEQHDVTWWSKHFTDALKDCHEHACGSVHRN

SEQ ID NO: 27928 - protein, 236 aa, Novosphingobium aromaticivorans DSM 12444
MVLHEATLFLDLDGTLFELVDNPEDVRADHRTQALIGQLLQHMDGRVAVVSGRSLAQIDDMLGDAAGTLWISGSHGCEYRWDGVIQSPSRPAALDDVAASFRNFAQNQPGVLVEEKSLGVALHYRTAPEAGASALALAQEMAGLHDLYLQHGKSMVELRAGSENKGSAILTMMAHPGLAGTTPVFAGDDVTDEPGFEAVLELGGHAILVGEPRPTLATFRLRSPEELREWLWRATV

SEQ ID NO: 27929 - protein, 438 aa, ASPERGILLUS NIDULANS FGSC A4
MVPPMTSAVLHRDTRFVPKKAVGGKGSYLLLEDGTKFLDSTGGAAVSCLGHGHEKIIQAITEQFTKVEYCHTAFFGTEASENLASLLVDSTGGKLSKLFVVSSGSEAVEAALKLARQYFLELPTPQPQRTRFIARKPSYHGTTLGALGVGGHALRRQPFEPILSQNVSHVSPCYAYRGKNDGESDADYVARLAGELDAEFRRVGPDTVCAFIAEPIVGAALGCVPAVPGYFAAMKTICEKHGALFILDEIMCGMGRCGTLHAWEQEDVTPDLQTIGKALGGGYAPVSGLLISDKVVQTVDKGTGAFRHGQTYQGHPISCAAALAVQTVIVEEQLLDNVKSMGEYLEKRLRGTLEGMQYVGDIRGKGLFWGVEFVKNKATKEPFSSETALAFKIQETGTVNGTRGDHIILAPAYNVTKEEIDIIVDTTAKVLAEVFAQL

SEQ ID NO: 27930 - protein, 352 aa, Triticum aestivum
  misc_feature (47)..(47): Xaa can be any naturally occurring amino acid
  misc_feature (270)..(270): Xaa can be any naturally occurring amino acid
  unsure (1)..(352): unsure at all Xaa locations
NKFVQKSRLVPVRNSRDIVDPRVRCTMSTAAANWCYATVAPRARSSXTIVASLGTPAPSNSSSFRPKLIRNTPVQAAPVAPALMDAAVERLKTGFEKFKTEVYDKKPDFFEPLKAGQAPKYMVFACADSRVCPSVTLGLEPGEAFTIRNIANMVPSYCKNKYAGVGSAIEYAVCALKVEVIVVIGHSRCGGIKALLSLKDGADDSFHFVEDWVRIGFPAKKKVQTECASMPFDDQCTVLEKEAVNVSLQNLLTYPFVKEGVSNGTLKSVXGGHYDFRLRQVRTWEQVIFPKRVNSYIYMPNANGVHISKISSRPTDVDPNANGVRLVISQYWMPGWPDVIPHKNNLFPFTFS

SEQ ID NO: 27931 - protein, 276 aa, Zea mays
MRKRERENPCGICGHYHKYEEGEVCGVCGHRPPAASPVGARQQDSAFPSEILKEFLFLGSYDNASRSELLKTIGVSHILNTVPLCQNLYRNSFTYHCLQEDKTLQFDDANQFLEQCEREKARVLVHCMSGKSRSAAFVIAFLMKSRGWRLAQSFQWVKERRPQVQLSDAAQQQLIEYEKKLFGSNDGSIPAQPFAPVDSLPSLGFGFPKPPGDIQAPTFNQQAPASIFERVTPNSFPSNFIFGAERTSDSDAKLPDSNNFGVVNSSTGSDSMMDSS

SEQ ID NO: 27932 - protein, 871 aa, Arabidopsis thaliana
MSDWGPVLVTVILFVMLTPGLLFQLPGRQKYVEFGNNDVYSKILFLNLHSFPIDLNLVSVLRLAFWVLLKNLDGRRCKGFVSAMNTKRAYKLRILFSLISSFREFVAHSAAVNCLKIGRKSSRVLVTGGEDHKVNLWAIGKPNAILSLYGHSSGIDSVTFDASEGLVAAGAASGTIKLWDLEEAKVVRTLTGHRSNCVSVNFHPFGEFFASGSLDTNLKIWDIRKKGCIHTYKGHTRGVNVLRFTPDGRWIVSGGEDNVVKVWDLTAGKLLHEFKSHEGKIQSLDFHPHEFLLATGSADKTVKFWDLETFELIGSGGTETTGVRCLTFNPDGKSVLCGLQESLKIFSWEPIRCHDGVDVGWSNLSDMNVHEGKLLGCSYNQNCVGVWVVDLSRTEPMSGGATQSNSHPEKTSGSGRDQAGLNDNSSKVILGKLPGSQKVDPLLKETKSLGKLSVSQNSDPLPKDTKSTGRSSVSQSSDPLVKEPKPLGRFSATHSSDTVKESRTLSSTGSVSDSPHRVTLTSAPKSASGISTVVPNAAASKRNFGKANPKANPPVVNKEDYFPVIVPRTEPIIEQASESRAELDIIGRTMPYSLQSKAADSRRLSSSRNEPDLPTSSLLERSQSQPIEPITLQDGNTYPSDEGGSWDTAERTNKESKCRVFGRFNSRSLGPVSSSSGGNMTAPNSRPSNMLKQRGNHVPVDQGITSASEEDIVADIMGQHDQFVSSMHSRLAKLQVVRRYWERNDIKNSISSIEKMADNAVIADVLLIVNERPEILTLDTCTSLLPLLTALLGSNMDSHLSVCLDLLLKLVRMYGSQIYSSLSAPSSVGVDIEAEQRMERYSCCFVEFEKIKACLPSLARWVNFIYWTMKS

SEQ ID NO: 27933 - protein, 190 aa, Zea mays
  misc_feature (91)..(91): Xaa can be any naturally occurring amino acid
  misc_feature (126)..(127): Xaa can be any naturally occurring amino acid
  unsure (1)..(190): unsure at all Xaa locations
PRVRPRVRPRVRKEWYFFYQKDRKYPTGLRANRATEAGYWKATGKDKEVYNAAEGVAVLVGMKKTLVFYRGRAPRGDKTNWVMHEYRLEGXSGRLPAGLASATGSTAANAAAALKASAYKDEWVVXXRVFHKTTGIKKTTTAAPAYQVAMAGAEMDQNQNNIPFPMPMQFSMLPDFSLDPVPPYYPYPSP

SEQ ID NO: 27934 - protein, 577 aa, Desulfitobacterium hafniense DCB-2
MRRTKIVCTIGPSSESNEKIRQLLKAGMNVARLNFSHGTHGEHGKRIRTLREEAQKLGVHLGVLLDTKGPEIRTGTVPEEGVQLNSGDTFILDTDLSTLGSAERVGITYLQLWQEVHQGTHILLDDGLIDLEVIASEEGKIITKIQNGGVLKSKKGVNVPGVPIQLPAITEKDRDDIIFGLREGIDFIAASFARKAADILAVRRLVEEEGANVKIIAKIENREGIEHLDEILEVADGLMVARGDLGVEVPVEEVPIHQKDMIEKCHHLGKPVIVATQMLDSMIRNPRPTRAEASDVANAILDGTDAIMLSGETAAGQYPVEAVEMMNKIALQIEKHYEPRKIYDPHINIAEAISHASYTVARDLEAAAILTPTHSGLTARMISKYRPTSLIIAATPFVHVARQLSLTWGIYPLLIPESLGTDQLLSVSVNEAISHHLIKTGDVVVITAGVPVGKVGTTNIIKVQVIGDVIAKGTGIGRKAYSGTARIATSAALELFQKGDILVAPYTDKELIPLIAKAGAILVEEGGLTSHGAIAALNYGIPAIVGAADVLMKVKDGQVLTVDALAGVVYEGTVSII

SEQ ID NO: 27935 - protein, 285 aa, Triticum aestivum
  misc_feature (190)..(190): Xaa can be any naturally occurring amino acid
  misc_feature (213)..(213): Xaa can be any naturally occurring amino acid
  misc_feature (225)..(225): Xaa can be any naturally occurring amino acid
  misc_feature (234)..(234): Xaa can be any naturally occurring amino acid
  misc_feature (242)..(242): Xaa can be any naturally occurring amino acid
  misc_feature (252)..(255): Xaa can be any naturally occurring amino acid
  misc_feature (257)..(258): Xaa can be any naturally occurring amino acid
  misc_feature (269)..(269): Xaa can be any naturally occurring amino acid
  misc_feature (271)..(271): Xaa can be any naturally occurring amino acid
  misc_feature (273)..(273): Xaa can be any naturally occurring amino acid
  misc_feature (275)..(275): Xaa can be any naturally occurring amino acid
  misc_feature (277)..(279): Xaa can be any naturally occurring amino acid
  misc_feature (282)..(283): Xaa can be any naturally occurring amino acid
  unsure (1)..(285): unsure at all Xaa locations
MQIFVKTLTGKTITLEVESSDTIDNVKAKIQDKEGIPPDQQRLIFAGKQLEDGRTLADYNIQKESTLHLVLRLRGGMQIFVKTLTGKTITLEVESSDTIDNVKAKIQDKEGIPPDQQRLIFAGKQLEDGRTLADYNIQKESTLHLVLRLRGGMQIFVKTLTGKTITLEVESSDTIDTWKAKIQDKEGIPXDQQRLIFAGKQLEDGRTLADYNXQKESTLHLGAQXLRGGMQIFXKTLTGKTXTLEVESSDTXXXXKXXIQDRGGISPDXQXLXFXGXXXEDXXPW

SEQ ID NO: 27936 - protein, 142 aa, Haloarcula marismortui ATCC 43049
MGIGGSDMYRQQILDHYKNPRNYGEIEDPTFTHIGENPMCGDEIRMDVVLDEDEETIEQVAFQGDGCAISQASASMLSQELAGMAVEDLKAMDRDDITEMLGVDISPMRVKCAVLAEKVAQDGADIFFGEKDIDRTVTEDDD

SEQ ID NO: 27937 - protein, 80 aa, Oryza sativa (indica cultivar-group)
MSCCGGNCGCGSSCQCGNGCGGCNYSEVEPTTTTTFLADATNKGSGAASGGSEMGAENGSCGCGSCKCGTSCGCSCCNCN

SEQ ID NO: 27938 - protein, 619 aa, Neurospora crassa
MKFLGIAALVAGLLAPSLVLGAPAPGTEGVNLLTPVDKRQDSQAERYGGGGGGGCNSPTNRQCWSPGFNINTDYELGTPNTGKTRRYKLTLTETDNWIGPDGVIKDKVMMVNDKIIGPTIQADWGDYIEITVINKLKSNGTSIHWHGMHQRNSNIQDGVNGVTECPIPPRGGSKVYRWRATQYGTSWYHSHFSAQYGNGIVGPIVINGPASANYDVDLGPFPLTDYYYDTADRLVLLTQHAGPPPSNNVLFNGFAKHPTTGAGQYATVSLTKGKKHRLRLINTSVENHFQLSLVNHSMTIISADLVPVQPYKVDSLFLGVGQRYDVIIDANQAVGNYWFNVTFGGSKLCGDSDNHYPAAIFRYQGAPKALPTNQGVAPVDHQCLDLNDLKPVLQRSLNTNSIALNTGNTIPITLDGFVWRVNGTAININWNKPVLEYVLTGNTNYSQSDNIVQVEGVNQWKYWLIENDPDGAFSLPHPIHLHGHDFLILGRSPDVTAISQTRYVFDPAVDMARLNGNNPTRRDTAMLPAKGWLLIAFRTDNPGSWLMHCHIAWHVSGGLSNQFLERAQDLRNSISPADKKAFNDNCDAWRAYFPDNAPFPKDDSGLRSGVKAREVKMKW

SEQ ID NO: 27939 - protein, 74 aa, Oryza sativa (indica cultivar-group)
MSCSCGSSCSCGSNCSCGKKYPDLEEKSSSTKATAVLGVAPEKKAQHFEAAAESGETAHGCSCGSSCRCNPCNC

SEQ ID NO: 27940 - protein, 470 aa, Petunia x hybrida
MKLLSEKATCNSHGQDSSYFLGWQEYEKNPYDEIQNPKGIIQMGLAENQLSFDLLESWLSQNPDAAGFKRNGESIFRELALFQDYHGLPAFKNALVKFMAEIRGNKVTFDSNKLVLTAGATSANETLMFCLADRGDAFLLPTPYYPGFDRDLKWRTGAEIVPIQCTSSNGFRITESALEEAYQEAKSRNLRVKGVLVTNPSNPLGTTLTRNELELLLSFVDTKGIHLISDEIYSGTVFNSPNFVSVMEVLIENDYMYTEVWDRVHIVYSLSKDLGLPGFRVGAIYSNDELVVSAATKMSSFGLISSQTQYLLSAMLSDKKFRKKYVSENQKRLKKRHAMLVTGLQNAGISCLESNAGLFCWVDMRHLLKSNTFEAEIELWKEIVYQVGLNISPGSSCHCTEPGWFRVCFANMSEDTLTLAMARIKSFVDSSATSTDTHNNQTNQNTNTNSTKKKLFSKWGFRLSFNDRER

SEQ ID NO: 27941 - protein, 77 aa, Rubus hispidus
THRRCPNPEVFIGLIVGAMLPYWFSAMTMKSVGSAALKMVEEVRRQFNTIPGLMEGLLSLLCYLCQDSTDLHLIDQR

SEQ ID NO: 27942 - protein, 255 aa, Cryptococcus neoformans var. neoformans JEC21
MSVIDRWGKEIWPHQRIRNRFAWFSLTSLVPRRSYQRWALICKYNPTEPFKTVDAQYPLYGKHSTPPLTPEEWWTRIIYETLREAGASKRELDGKIDAIGPALMSRFESDLGYRNFPETIACLKELKELEIKTSVVSNADPRILKTLDSLQILPLLTCSPTLSWDVEAAKPSATIYEKACEISDEKVGEGIIMVGDELKADFHGATSAGIEARLIRRPGEWSDGAVRDAKEELGGVNVVSSLEDIVKEVKQRNHK

SEQ ID NO: 27943 - protein, 980 aa, Arabidopsis thaliana
MTDTTDDIAEEISFQSFEDDCKLLGSLFHDVLQREVGNPFMEKVERIRILAQSALNLRMAGIEDTANLLEKQLTSEISKMPLEEALTLARTFTHSLNLMGIADTHHSQLLQSGISPDELYKTVCKQEVEIVLTAHPTQINRRTLQYKHIRIAHLLEYNTRSDLSVEDRETLIEDLVREITSLWQTDELRRQKPTPVDEARAGLNIVEQSLWKAVPQYLRRVSNSLKKFTGKPLPLTCTPMKFGSWMGGDRDGNPNVTAKVSLLIFYDLNSKPTGHERISLLSRWMAIDLYIREVDSLRFELSTDRCSDRFSRLADKILEKDYMPPNLQKQNEQDFSESDWEKIDNGSRSGLTSRGSFSSTSQLLLQRKLFEESQVGKTSFQKLLEPPPLKRAGSAPYRIVLGEVKEKLVKTRRLLELLIEGLPCEYDPKNSYETSDQLLEPLLLCYESLQSSGARVLADGRLADLIRRVSTFGMVLVKLDLRQEAARHSEALDAITTYLDMGTYSEWDEEKKLEFLTRELKGKRPLVPQCIKVGPDVKEVLDTFRVAAELGSESLGAYVISMASNASDVLAVELLQKDARLALTSEHGKPCPGGTLRVVPLFETVNDLRAAGPSIRKLLSIDWYREHIQKNHNGHQEVMVGYSDSGKDAGRFTAAWELYKAQENVVAACNEFGIKITLFHGRGGSIGRGGGPTYLAIQSQPPGSVMGSLRSTEQGEMVQAKFGIPQTAVRQLEVYTTAVLLATLKPPQPPREEKWRNLMEEISGISCQHYRSTVYENPEFLSYFHEATPQAELGFLNIGSRPTRRKSSSGIGHLRAIPWVFAWTQTRFVLPAWLGVGAGLKGVSEKGHADDLKEMYKEWPFFQSTLELIEMVLAKADIPMTKHYDEQLVSEKRRGLGTELRKELMTTEKYVLVISGHEKLLQDNKSLKKLIDSRLPYLNAMNMLQVEILKRLRRDEDNNKLRDALLITINGIAAGMRNTG

SEQ ID NO: 27944 - protein, 151 aa, Cryptococcus neoformans var. neoformans JEC21
MFLLACSFLPCNTTRDEYREAFALFDKRGTGHVPRESLGELLRSLGQNPTQAEVAELEKTVGATFSYDEFLAVLNRPDGWKPAGTADEFIKGFQVFDKAGNGFIGAGELRYVLTQLGEKMTDEEVDELLKGFPVQDGQINYHSFVRSILSQ

SEQ ID NO: 27945 - protein, 343 aa, Bacillus thuringiensis serovar konkukian str. 97-27
MKKIGVGIVGFGFSSTTFHIPLLQTIEEYDIRAVLSSKEEVVKETLPNANVVSTIDELVKRADIDLVVITSPNTTHFPYVKEAILNGKHVVVEKPFVVSIEEGEELISLAEQHNVVLSVYHNRRFDNDFLTIKKLLEENRIGNLYAYEAHFDRFRPHVRDRWREKNLPGSGILYDLGSHLIDQALSLFGKPDAIRADIIKQRPGAEVDDYFHIVLHYGVKRVILRSSSYVKKAGPHFTMHGDKGSIVKYGMDSQEEQLKNGMKPGDNGYGVDTEANFATVETEEELVRIPTEVGCYDMYYKRVRDSIVNGEKPPVTAQEGLEVIKLIQLAVESSETGRIIFIK

SEQ ID NO: 27946 - protein, 541 aa, Streptomyces coelicolor A3(2)
MAKIIAFDEEARRGLERGMNQLADAVKVTLGPKGRNVVLEKKWGAPTITNDGVSIAKEIELEDPYEKIGAELVKEVAKKTDDVAGDGTTTATVLAQALVKEGLRNVAAGANPMALKRGIEKAVEAVSAALLEQAKDVETKEQIASTASISAADTQIGELIAEAMDKVGKEGVITVEESQTFGLELELTEGMRFDKGYISAYFATDMERMEASLDDPYILIANSKIGNVKDLLPLLEKVMQSGKPLLIIAEDVEGEALSTLVVNKIRGTFKSVAVKAPGFGDRRKAMLGDIAILTGGEVISEEVGLKLENATLDLLGSARKVVITKDETTIVDGAGSADQVQGRVNQIRAEIENSDSDYDREKLQERLAKLAGGVAVIKAGAATEVELKERKHRIEDAVRNAKAAVEEGIVAGGGVALLQASQVFEKLELTGDEATGANAVKLALEAPLKQIAVNGGLEGGVVVEKVRNLTVGHGLNAATGEYVDMIAEGIIDPAKVTRSALQNAASIAALFLTTEAVIADKPEKAAPAGAPGGMPGGDMDF

SEQ ID NO: 27947 - protein, 171 aa, Staphylococcus epidermidis ATCC 12228
MNINTAYFAGGCFWCMTKPFDTFDGIEKVTSGYMGGHLVNPSYEEVKTGSTGHYEVVKIEYDVALFSYHKLLEIFFSVIDPLDDGGQFQDRGSQYKTAIFYSNEHQRQLAEQYICELQDSFNADKAIATKILPASTFYEAEAYHQDFYKKNPERYEQEQQDRASYVKNNHM

SEQ ID NO: 27948 - protein, 342 aa, Triticum aestivum
MDRYEVVRDIGSGNFGVAKLVRDVRTKEHFAVKFIERGHKIDEHVQREIMNHRSLKHPNIIRFKEVVLTPTHLAIVMEYASGGELFQRICNAGRFSEDEGRFFFQQLISGVSYCHSMQVCHRDLKLENTLLDGSVAPRLKICDFGYSKSSVLHSQPKSTVGTPAYIAPEVLSRREYDGKVADVWSCGVTLYVMLVGAYPFEDPDEPRNFRKTITRILSVQYSVPDYVRVSMDCIHLLSRIFVGNPQQRITIPEIKNHPWFLKRLPVEMTDEYQRSMQLADMNTPSQSLEEAMAIIQEAQKPGDNALGVAGQVACLGSMDLDDIDFDIDDIDVESSGDFVCPL

SEQ ID NO: 27949 - protein, 686 aa, Bacillus circulans
APDTSVSNKQNFSTDVIYQIFTDRFSDGNPANNPTGAAFDGTCTNLRLYCGGDWQGIINKINDGYLTGMGVTAIWISQPVENIYSIINYSGVNNTAYHGYWARDFKKTNPAYGTIADFQNLIAAAHAKNIKVIIDFAPNHTSPASSDQPSFAENGRLYDNGTLLGGYTNDTQNLFHHNGGTDFSTTENGIYKGLYDLADLNHNNSTVDVYLKDAIKMWLDLGIDGIRMDAVKHMPFGWQKSFMAAVNNYKPVFTFGEWFLGVNEVSPENHKFANESGMSLLDFRFAQKVRQVFRDNTDNMYGLKAMLEGSAADYAQVDDQVTFIDNHDMERFHASNANRRKLEQALAFTLTSRGVPAIYYGTEQYMSGGTDPDNRARIPSFSTSTTAYQVIQKLAPLRKCNPAIAYGSTQERWINNDVLIYERKFGSNVAVVAVNRNLNAPASISGLVTSLPQGSYNDVLGGLLNGNTLSVGSGGAASNFTLAAGGTAVWQYTAATATPTIGHVGPMMAKPGVTITIDGRGFGSSKGTVYFGTTAVSGADITSWEDTQIKVKIPAVAGGNYNIKVANAAGTASNVYDNFEVLSGDQVSVRFVVNNATTALGQNVYLTGSVSELGNWDPAKAIGPMYNQVVYQYPNWYYDVSVPAGKTIEFKFLKKQGSTVTWEGGSNHTFTAPSSGTATINVNWQP

SEQ ID NO: 27950 - protein, 686 aa, Bacillus circulans
APDTSVSNKQNFSTDVIYQIFTDRFSDGNPANNPTGAAFDGTCTNLRLYCGGDWQGIINKINDGYLTGMGVTAIWISQPVENIYSIINYSGVNNTAYHGYWARDFKKTNPAYGTIADFQNLIAAAHAKNIKVIIDFAPNHTSPASSDQPSFAENGRLYDNGTLLGGYTNDTQNLFHHNLGTDFSTTENGIYKNLYDLADLNHNNSTVDVYLKDAIKMWLDLGIDGIRMDAVKHMPFGWQKSFMAAVNNYKPVFTFGEWFLGVNEVSPENHKFANESGMSLLDFRFAQKVRQVFRDNTDNMYGLKAMLEGSAADYAQVDDQVTFIDNHDMERFHASNANRRKLEQALAFTLTSRGVPAIYYGTEQYMSGGTDPDNRARIPSFSTSTTAYQVIQKLAPLRKCNPAIAYGSTQERWINNDVLIYERKFGSNVAVVAVNRNLNAPASISGLVTSLPQGSYNDVLGGLLNGNTLSVGSGGAASNFTLAAGGTAVWQYTAATATPTIGHVGPMMAKPGVTITIDGRGFGSSKGTVYFGTTAVSGADITSWEDTQIKVKIPAVAGGNYNIKVANAAGTASNVYDNFEVLSGDQVSVRFVVNNATTALGQNVYLTGSVSELGNWDPAKAIGPMYNQVVYQYPNWYYDVSVPAGKTIEFKFLKKQGSTVTWEGGSNHTFTAPSSGTATINVNWQP

SEQ ID NO: 27951 - protein, 327 aa, Aquifex aeolicus VF5
MKKVLVTGGAGYIGSHVVKALGEKGYEVLIYDNLSTGNEWAVLYGKLVKADLADKETLRRVFEEFKPDAVMHFAAYIVVPESVKEPLKYYRNNVVNTINLLEVMQEFGVNKFVFSSSAAVYGIPESIPVKEDAPLNPINPYGETKATVERILRDLKNSGKDFNYVSLRYFNVAGADPEGKIGFAYPNPTHLIIRAVKTAAGEFDRLEIYGTDYPTPDGTCIRDYIHVTDLAEAHILALEYLFSGGKSEVLNCGYGHGYSVLEVVNAVKKVTGVDFKVVEAPRREGDPPALVADNKKIKRVLNWEPKYDDLEFIIKTAWEWEKKFKLK

SEQ ID NO: 27952 - protein, 510 aa, Lilium longiflorum
MANIDIEGILKELPADGRVPKTKLVCTLGPSSRSVPMLEKLLRAGMNTARFNFSHGTHEYHQETLDNLRIAMQNTQILCAVVLDTKGPEIRTGFLKDGKAVQPKEGQEIIVSTDYDLKGGGNTITMSYKKLPVDMKPGGTILCADGSISLTVLSCDPDAGTVRCRCENTALLGERKNVNLPGVVVDLPTLTEKDKEDILEWGVPNNIDMIALSFVRKGSDLVNVRQVLGSHAKNIKLMSKVENQEGVVNFDEILKETDAFMVARGDLGMEIPVEKIFLAQKLMIYICNLAGKPVVTATQMLESMIKSPRPTRAEATDVANAVLDGTDCVMLSGESAAGAYLEIAVKVMAKICIEAESSLDYDAIFKEMIRSAPLPMSPLESLASSAVRTANKAKAALIVVLTRGGTTAKLVAKYRPAVPILSVVVPVLTSDSFDWNVSDESPARHSLIYRGLIPLLAEGSAKATDAESTEVILEAALKSATARRLCKPGDSIVALHRIGVASVIKICIVK

SEQ ID NO: 27953 - protein, 522 aa, Saccharomyces kudriavzevii IFO 1802
MDPFHNGNKRSSISFGPSQRQPYSKSNYLAGANAPPSVAQDLGRGPSPFGMSGNTTSGSNSKRNSGSDLSAAYYTNRSPMYSPLDFSPPVFSPNHSQLQQARNYAANIPVVSNLMNQSMASVCEYQSHYPLFGLDWSVDDYVCLGSYKEDSRNKLQVLHSNDLLSWENVVDANVVYPVSKIQWVPSQLHPRKLATCSDSLRIWNVNPEERHLQEQVNLSLCKYNRQHPTSPATADDMKVIGTFPPITSFDWNTVDTNLIISSSIDTTCIVWDLQSSHYVKTQLIAHDSEVFDVRFLTKSTQLFASCGGDGSVRVFDLRSLAHSTIIYEPPSSPASGPNAGATTPSLKGSDALLRLEPSPYDPNVLATFAADSNKIIILDMRNPESPILNLEGHTCSVNEIKWHPTKRNVLLSCSDDCQALYWDLNNSFMEINGSDSKSPTASGASLEDSDGDTVMADGGAKANQQEDPLNSNNDKQVCRTLDTPNMMYVNKTQEINNIAWRPQRGDWFGCVSGKKFQNVRVF

SEQ ID NO: 27954 - protein, 162 aa, Crocosphaera watsonii WH 8501
MSHNNSIGNYLIQRLLELGVNHVFGVPGDFVLGFNKLLENSDLEFINTCDEQGAGFAADAYARLRGLGVVCVTYCVGGLKIANTTAQCFAEKSPVVVISGSPGINERIKNPLLHHKVKEFDTQYKGFQEITVAATVLDNPDTAQVNRTIIHDYTSSFPQFGD

SEQ ID NO: 27955 - protein, 194 aa, ASPERGILLUS NIDULANS FGSC A4
MASATTFYDFEPVDKKGEAYPLNQLKGKVILVVNTASKCGFTPQFKGLETLYQSIKAKRPDDFVILGFPCNQFGGQDPGSNDQIQEFCQLNYGVTFPVLGKTEVNGDNANPLWTWLKESQPGLLGLKRIKWNFEKFLISADGKVVGRWASTTKPEGLESRILEEIEKAEKQGLLASKAMQPEAAGTDGETAKLA

SEQ ID NO: 27956 - protein, 1064 aa, Magnetococcus sp. MC-1
MGIQRRVLGLIAFFLLVAFSAVEVRSYYQLKAYAEESLRTQAEIVQGLLMSIRRVYHHAFLDSHIPLSSDTVPLLPAHAINRISKEFPTWFKGGVSFNNVSDKPRNEQQRAKGIEQQAMAHFRQNPEEKRWFTQYQEENGEAYYHYATPIWIEPYCMQCHGAKEKAPAAIQKMYSTGFDYKIGDLRGVVSIKLPAAHINRLVKQQFLENSLIHLLIFGSAFFAISFFLRRDVGQPLEAISHAVRKFGQTRELPKFEEQPGEFQILLHTLTDMASTVVLRESEVQERQLQIELLLDSAGEGIYAIDTQGICIQCNPAAVALLGYASSTELVGRDIHTLCHRADEQGTHMPHSDCPGCKVIASGEPVHLAQEYLQRQDGSVFPVEMRIHPMHQGGRVVGAVVLFDDISRRLDAEQKLRLSERHFRTLVQALPGTFYKCAPDPLCTMYSLGDNIAELTGYAADSFIENHERSFSSVVHAEDWPRVREALDQALAQGVVYHLEYRVNHTDGKPRWVMDRGQAVYDEAGRAEVLYGVLLDMTERKQYEQRLESARQQADAGNRAKSEFLAVMSHEIRTPLNAIMGMGDLLGETALSPVQRHYLSISQHAGETLVELIEDILDLSRIEVGELELEPAPFEVEALVEEVCEVVTSSAHDKGLILLMRIDPLLPPVLIGDKKRLRQILFNLLFNAVKFTKHGEVMLDIRHDAARSAAGAVLLQVRDTGVGMAEEMIERVFEPFTQGDSTITRQYGGSGLGLTICKRLVSKMGGDIQLESALGRGTTATVQLVLPVGRHGMVAAVRQQVPLHGANLLLVDDNANNREIYTELLQQEGARVVGCATGETAMQQVSEANFDLAVLDFHMPSEDGLTLAGRIQEMVPNMPLLMLSSDQQPAAAARANSMGVTFLLKPVKRQLLRQTIAQLMQSGKGVKDAPVLGQGVESGPQKGLKILLAEDVPENALLIEAYLEETGHQISVVGDGQQAFERFQEEPFDLVLMDLQMPVMNGLQATRHIRAWEQAQGVKRTPILALTAHAMKEDESKSLEAGCDGHLTKPIRKQVFLQKLQGFLG

SEQ ID NO: 27957 - protein, 461 aa, Thermus thermophilus HB27
MKTYDLIVIGTGPGGYHAAIRAAQLGLKVLAVEASEVGGVCLNVGCIPTKALLHAAETLHHLKVAEGFGLKAKPELDLRKLGGWRDQVVKKLTGGVGTLLKGNGVELLRGFARLVGPKEVEVGGERYGAKSLILATGSEPLELKGFPFGEDVWDSTRALKVEEGLPKRLLVIGGGAVGLELGQVYRRLGAEVTLIEYMPEILPQGDPETAALLRRALEKEGIRVRTKTKAVGYEKKKDGLHVRLEPAEGGEGEEVVVDKVLVAVGRKPRTEGLGLEKAGVKVDERGFIRVNARMETSVPGVYAIGDAARPPLLAHKAMREGLIAAENAAGKDSAFDYQVPSVVYTSPEWAGVGLTEEEAKRAGYRVKVGKFPLAASGRALTLGGAEGMVKVVGDEETDLLLGVFIVGPQAGELIAEAALALEMGATLTDLALTIHPHPTLSESLMEAAEAFHKQAIHILNR

SEQ ID NO: 27958 - protein, 515 aa, Triticum aestivum
  misc_feature (420)..(420): Xaa can be any naturally occurring amino acid
  unsure (1)..(515): unsure at all Xaa locations
METYTTDDALTAMGFGKLQGLVLVYAGMGWVAEAMEVMLLSFVGPLIREEWKISAQDESLRSSVVFLGMLIGACGWGYVSDKYGRRTGLLLSTLFTTGMGFLSALSPNYLCLMALRFLVGVGLGGSHVYSSWFLEFVPAQNRGFWMIIFSFFWTIGTVLEASLAWIVVSTLTWRWLLALTAIPCFLLLPFFGITPESPRYLCAQNRISDATLVLERIAETNQATLPPGVLVYPRDGEVDHSTLTSEADHLLPLREKDCTDDDVPRPRSGSAAALRSLLSRKLRRSTLLLWFVFYANSFAYYGLVLLTAQLSNANRSCASGLKYVKSETDASLYKDTFVTSLAEIPGLIASALLVEWFGRKATMWCLLFTCCGFLGPLVFYQSELWTTGLLFGARACAMGSYTVVCLYAPEDLCQAFLYLXSPHQALAKRWTSLRQKRSKQPTDISPVYPTSVRSTGVGIATAMGRVGGIICPLVAVGMLRSCHQMEAIIVFEVVLFLAAIACMLFPFETKGRAMN

SEQ ID NO: 27959 - protein, 131 aa, Vicia sativa
IPVFETPIGKIGAAICWENKMPLLRTAMYAKGVEIYCAPTADSRELWQATVAHIAHEGGCFVLSANQFCRRKDYPPAPEHVFEGLEDGLTPDSVVCAGGSVIISPSGAVLAGPNYEGEALISADLDLREIA

SEQ ID NO: 27960 - protein, 140 aa, Chlamydomonas reinhardtii
MMVWTPVNNKMFETFSYLPPLTDEQIAAQVDYIVANGWIPCLEFAEADKAYVSNESAIRFGSVSCLYYDNRYWTMWKLPMFGCRDPMQVLREIVACTKAFPDAYVRLVAFDNQKQVQIMGFLVQRPKTARDFQPANKRSV

SEQ ID NO: 27961 - protein, 367 aa, Thermus thermophilus HB27
MVKETHRFEPFTEEPIRLIGEEGEWLGDFPLDLEGEKLRRLYRDMLAARMLDERYTILIRTGKTSFIAPAAGHEAAQVAIAHAIRPGFDWVFPYYRDHGLALALGIPLKELFGQMLATKADPNKGRQMPEHPGSKALNFFTVASPIASHVPPAAGAAISMKLLRTGQVAVCTFGDGATSEGDWYAGINFAAVQGAPAVFVCENNFYAISVDYRHQTHSPTIADKAHAFGIPGYLVDGMDVLASYYVVKEAVERARRGEGPSLVELRVYRYGPHSSADDDSRYRPKEEVAFWRKKDPIPRFRRFLEARGLWNEEWEEDVREEIRAELERGLKEAEEAGPVPPEWMFADVFAEKPWHLLRQEALLKEEL

SEQ ID NO: 27962 - protein, 305 aa, Glycine max
MEFHCLPIFLYLNLMLMTANAALTPRHYWETMLPRTPLPKAITELLSLESRSIFEYAGNDDQSESRSILGYAGYNQDEDDVSKHNIQIFNRLFFLEEDLRAGKIFNMKFVNNTKATVPLLPRQISKQIPFSEDKKKQVLAMLGVEANSSNAKIIAETIGLCQEPATEGERKHCATSLESMVDFVVSALGKNVGAFSTEKERETESGKFVVVKNGVRKLGDDKVIACHPMSYPYVVFGCHLVPRSSGYLVRLKGEDGVRVKAVVACHRDTSKWDHNHGAFKVLNLKPGNGTVCHVFTEGNLLWLPN

SEQ ID NO: 27963 - protein, 484 aa, Bacillus subtilis subsp. subtilis str. 168
MKILFAVSECTPFVKSGGLADVAGALPKALARLGNEVAVMLPKYSQIPEPWKKRMKKQAECTVAVGWRQQYCGIEHMAENDVNYYFIDNEYYFNRDSLYGHYDDGERFAFFSRAVLEAAKVVNVQADIVHTHDWHTAMVNYLLKEEYRKHPFYERMKSVLTIHNLQFQGIFPPDVTHDLLGLEMDHFHYERLECNGFVNFMKAGIIAADHVTTVSPTYRNEIMTPYYGEQLEQVLQYREDDVTGILNGIDDTFYQPKSDPYIEAQYDSGDLACKLENKTKLQQRMGLPEKNDIPLISMVTRLTKQKGLDLVRRIMHELLEEQDIQLVVLGTGEREFEDYFRYAEFAFHEKCRAYIGFDEPLAHQIYAGSDMFLMPSKFEPCGLGQLIALQYGAIPIVRETGGLYDTVRAYQEEEGTGNGFTFSAFNAHDLKFTIERALSFYCQQDVWKSIVKTAMNADYSWGKSAKEYQRIFEQVTRSGRDVLE

SEQ ID NO: 27964 - protein, 402 aa, Pseudomonas aeruginosa UCBPP-PA14
MDNLNSAVQVLIHGSNTLFILLGAVMVLAMHAGFAFLEVGTVRLKNQVNALSKILSDFAISALAYFFVGYWIAYGVTFFHPAAALTVDSGYALVKFFFLLTFAAAIPAIISGGIAERARFGPQLCATALIVAFVYPFFEGLVWNGNFGLQEWLKLEFGAPFHDFAGSVVVHALGGWLALAAVLLLGSRNGRYRDGKLVAMAPSSIPFLALGSWILIIGWFGFNVMSAQTLAGVSGLVAVNSLLAMVGGTMASLLIGRNDPGFLHNGPLAGLVAVCAGSDLMHPIGALATGLVAGALFVWAFTATQVRWKIDDVLGVWPLHGLCGVWGGIACGIFGQQALGGLGGVSLASQALGSLLGVTVAFAGGLLVYGLMKALLGIRLSQEEEYYGADLSIHKIGAISHE

SEQ ID NO: 27965 - protein, 156 aa, Arabidopsis thaliana
MQIFVKTLTGKTITLEVESSDTIDNVKAKIQDKEGIPPDQQRLIFAGKQLEDGRTLADYNIQKESTLHLVLRLRGGAKKRKKKTYTKPKKIKHTHKKVKLAVLQFYKVDGSGKVQRLKKECPSVSCGPGTFMASHFDRHYCGKCGTTYVFKKADEE

SEQ ID NO: 27966 - protein, 960 aa, Sorghum bicolor
MASERHHSIDAQLRALAPGKVSEELIQYDALLVDRFLDILQDLHGPSLREFVQECYEVSADYEGKKDTSKLGELGAKLTGLAPADAILVASSILHMLNLANLAEEVELAHRRRNSKLKHGDFSDEGSATTESDIEETLKRLVSLGKTPAEVFEALKNQSVDLVFTAHPTQSARRSLLQKNARIRNCLTQLSAKDVTVEDKKELDEALHREIQAAFRTDEIRRAQPTPQDEMRYGMSYIHETVWNGVPKFLRRVDTALKNIGINERLPYDVPLIKFCSWMGGDRDGNPRVTPEVTRDVCLLSRMMAANLYINQVEDLMFELSMWRCNDELRARAEEVQSTPASKKVTKYYIEFWKQIPPNEPYRVILGAVRDKLYNTRERARHLLATGFSEISEDAVFTKIEEFLEPLELCYKSLCECGDKAIADGSLLDLLRQVFTFGLSLVKLDIRQESERQTDVIDAITTHLGIGSYRSWPEDKRMEWLVSELKGKRPLLPPDLPMTEEIADVIGAMRVLAELPIDSFGPYIISMCTAPSDVLAVELLQRECGIRQTLPVVPLFERLADLQAAPASVEKLFSTDWYINHINGKQQVMVGYSDSGKDAGRLSAAWQLYVAQEEMAKVAKKYGVKLTLFHGRGGTVGRGGGPTHLAILSQPPDTINGSIRVTVQGEVIEFMFGEENLCFQSLQRFTAATLEHGMHPPVSPKPEWRKLMEEMAVVATEEYRSVVVKEPRFVEYFRSATPETEYGKMNIGSRPAKRRPGGGITTLRAIPWIFSWTQTRFHLPVWLGVGAAFKWAIDKDIKNFQKLKEMYNEWPFFRVTLDLLEMVFAKGDPGIAGLYDELLVAEELKPFGKQLRDKYVETQQLLLQIAGHKDILEGDPYLKQGLRLRNPYITTLNVFQAYTLKRIRDPSFKVTPQPPLSKEFADENKPAGLVKLNGERVPPGLEDTLILTMKGIAAGMQNTG

SEQ ID NO: 27967 - protein, 380 aa, Bacillus subtilis subsp. subtilis str. 168
MKKQCVAMLLAGGKGSRLSGLTKNMAKPAVSFGGKYRIIDFTLSNCSNSGIDTVGILTQYQPLELNSYIGIGSAWDLDRYNGGVTVLPPYAESSEVKWYKGTASSIYENLNYLNQYDPEYVLILSGDHIYKMDYGKMLDYHIEKKADVTISVIEVGWEEASRFGIMKANPDGTITHFDEKPKFPKSNLASMGIYIFNWPLLKQYLEMDDQNPYSSHDFGKDIIPLLLEEKKKLSAYPFKGYWKDVGTVQSLWEANMDLLKEDSELKLFERKWKIYSVNPNQPPQFISSDAQVQDSLVNEGCVVYGNVSHSVLFQGVTVGKHTTVTSSVIMPDVTIGEHVVIENAIVPNGMVLPDGAVIRSEKDIEEVLLVSEEFVEKELI

SEQ ID NO: 27968 - protein, 91 aa, Glycine max
MAKRGYKIQEFVAHSASVNCLNIGKKACRLFITGGDDHKVNLWTIGKPTFLTSLSGHTSPVESVAFDSGEVLVLGGASTGVIKLWDLEEAK

SEQ ID NO: 27969 - protein, 546 aa, Ustilago maydis 521
MADGPSKDELVEIFKSLKTTQKGNKAADRSPRHSTTRQVCFDCGAKNPTWASATYAIYICLDCSSVHRNMGVHITFVRSTNLDSWHWSQLRLMKVGGNAAAAEFFNKKGGAHLLAPSTEGKVKYTSSVAQAYKDELQKRALLDAAGQSLNSPVYFPGLAVASTETATPSSSTKAGGDDDDFFDSWDKPASAAKPAASTTAKPAPAPVSTRAPAAAAAAPKTVTSASLRASSSAARKTLGAVSRTSSASSTPGTTTPTGTGPTTTASALGAPSARPARAGKLGLGVKKAAAPIDFAAAERKAKEEEAARAAEAKAEQKAEETAREAQKASAEQAEAERIAREAVKAAVGKTSAATPASASSNANVRGAAGSVPDAFAAAKANGDMDRLGMGFGRLGMKANAHQAKLAAERAAAAANNAAAGSDLDAGGDEPSYARNQFSGQKSISSDQYFQRGSYDPQATSEAQQRLQSFQGQTSISSNQYFGRDEDEEAEQQAVQGSGDFADIEATAREYYQRFMANPDVQSSIDSFRAGALKLSQYLEDMSRNGA

SEQ ID NO: 27970 - protein, 187 aa, Griffithsia japonica
MWRAIVRPFVPLLPEIEQPNKRVAFKEKVLWTAVTLFIYLVCCQIPLYGVKNTKASDPLYFVRAVLAASNRGTLMELGISPIITSSMIMQFLAGTRIIQVDQSLKEDRALFSGAEKLMGLVICFVEAFMYVFSGMYGDLAVLGTGNAILIITQLFVAGMIVLLLDELLQKGYGLGLRYFTLHRYKHL

SEQ ID NO: 27971 - protein, 145 aa, Triticum aestivum
  misc_feature (57)..(57): Xaa can be any naturally occurring amino acid
  misc_feature (69)..(69): Xaa can be any naturally occurring amino acid
  misc_feature (71)..(71): Xaa can be any naturally occurring amino acid
  misc_feature (74)..(74): Xaa can be any naturally occurring amino acid
  misc_feature (84)..(85): Xaa can be any naturally occurring amino acid
  misc_feature (87)..(87): Xaa can be any naturally occurring amino acid
  misc_feature (95)..(96): Xaa can be any naturally occurring amino acid
  misc_feature (101)..(102): Xaa can be any naturally occurring amino acid
  misc_feature (107)..(108): Xaa can be any naturally occurring amino acid
  misc_feature (119)..(119): Xaa can be any naturally occurring amino acid
  misc_feature (122)..(122): Xaa can be any naturally occurring amino acid
  misc_feature (126)..(126): Xaa can be any naturally occurring amino acid
  unsure (1)..(145): unsure at all Xaa locations
MASAMELSLLNPAMHHHGIAAKTASHLPVLPARRGAVRFRVRAAAAAPPAPAANPAXPKKRGKTEVKRXLXTPXSYTNGFRRMXXFXNARDLTSXXNQERXXPLLQXXKDGYNQPLYPXPRXKGAXEKCKAVRFSSLVDGFPLWA

SEQ ID NO: 27972 - protein, 413 aa, Bacillus thuringiensis serovar konkukian str. 97-27
MGYYDGPNLNEEHSETREVRKSGSKKGYFFTGLVGAVVGAVSISFAAPYMPWAQNNGAAVSSFSSDSKVEGTVVPVVNKAKNETDLPGMIEGAKDVVVGVINMQQSIDPFAMQPTGQEQQAGSGSGVIYKKAGNKAYIVTNNHVVDGANKLAVKLSDGKKVDAKLVGKDPWLDLAVVEIDGANVNKVATLGDSSKLRAGEKAIAIGNPLGFDGSVTEGIISSKEREIPVDIDGDKRADWNAQVIQTDAAINPGNSGGALFNQNGEIIGINSSKIAQQEVEGIGFAIPINIAKPVIESLEKDGVVKRPALGVGVVSLEDVQAYAVNQLKVPKEVTNGVVLGKIYPISPAEKAGLEQYDIVVALDNQKVENSLQFRKYLYEKKKVGEKVEVTFYRNGQKMTKTATLADNSATKNQ

SEQ ID NO: 27973 - protein, 960 aa, Sorghum bicolor
MPERHQSIDAQLRLLAPGKVSEDDKLVEYDALLVDRFLDILQDLHGPHLREFVQECYELSAEYENDRDEARLGELGSKLTSLPPGDSIVVASSFSHMLNLANLAEEVQVAQRRRIKLKRGDFADEASAPTESDIEETLKRLVSQLGKSREEVFDALKNQTVDLVFTAHPTQSVRRSLLQKHGRIRNCLRQLYAKDITADDKQELDEALQREIQAAFRTDEIRRTPPTPQDEMRAGMSYFHETIWKGVPKFLRRIDTALKNIGINERLPYNAPLIQFSSWMGGDRDGNPRVTPEVTRDVCLLARMMAANLYFSQIEDLMFELSMWRCSDELRIRADELHRSSKRAAKHYIEFWKQVPPNEPYRVILGDVRDKLYYTRERSRHLLSSGISEIPEEATFTNVEQFLEPLELCYRSLCACGDKPIADGSLLDFLRQVFNFGLALVKLDIRQESDRHTDVLDSITTHLGIGSYAEWSEEKRQDWLLSELRGKRPLFGSDLPQTEETADVLGTFHVLAELPADCFGAYIISMATAPSDVLAVELLQRECHVKQPLRVVPLFEKLADLEAAPAAVARLFSIDWYMNRINGKQEVMIGYSDSGKDAGRLSAAWQMYKAQEELIKVAKHYGVKLTMFHGRGGTVGRGGGPTHLAILSQPPDTIHGSLRVTVQGEVIEHSFGEELLCFRTLQRYTAATLEHGMHPPISPKPEWRALMDEMAVVATKEYRSIVFQEPRFVEYFRSATPETEYGRMNIGSRPSKRKPSGGIESLRAIPWIFAWTQTRFHLPVWLGFGAAIKHIMQKDIRNIHVLKEMYNEWPFFRVTLDLLEMVFAKGDPGIAAVYDKLLVAEDLQSFGEQLRKNYEETKELLLQVAGHKDVLEGDPYLKQRLRLRESYITTLNVCQAYTLKRIRDPSFQVSPQPPLSKEFTDESQPVELVQLNQQSEYAPGLEDTLILTMKGIAAGMQNTG

SEQ ID NO: 27974 - protein, 443 aa, Neurospora crassa
MDSERRPLLANGTGNGGRWTTESDSDFSWRDFFLDTTKTPGTNHPNPLVKYPTRVWNVTKVTLLSSWINILLIFVPLGIIAGERGWSAPAVFTLNFFAIIPLAAVLSFATEEIAHRLGETLGGLVNATFGNAVELIVSIVALRAGEIEVVQASMLGSILSNLLLVLGMCFLLGGIFNMRDSNGVGIEQTFASGTAQTTCSMMTLASASLIIPAALYTMLNHSDSQEKQDSILMLSRGTAVILLLLYCAYLVFVLRTHKELFEPEAQAVGDVVTEPKEDPVLSPWSAALVLIVTTVIISYAADYMVDSIDDIAATGAMSKTFIGLILIPIVGNAAEHVTACVVAVKNKMDLAMGVAIGSSIQIALLVTPSLVLLGWAIGQPMSLHFETFETIAFALSVMVVTYTVQDGKSNYLEGAMLMGLYIIIALAFWASPADALQKLSTIF

SEQ ID NO: 27975 - protein, 604 aa, Cryptococcus neoformans var. neoformans JEC21
MPDQLYPEYELQRAISNTKNADDSTAFGEKSPGVRRIEIIAASFTTWHRWVLFISVFFMSYSYGLDGSVRYTYQAEALSELGTSAQVSTVTVVRSIVAAAAQPAFAKVSDYFGRVSILIISVILYVVGTIVTATSTNLAAFCGGSVLYQFGYTGVQLLVEVLIADVTSLRSRLLFSYIPATPFLINAWISGNVASAVLTHSTWGWGIGMWAIIFPVTVIPLLFSLIQAEWRAHRKGLLREIPSPLRTFGDRHMWADIFWQIDLVGLLLLAAVLALILLPFTLAGGVASIWRTARVIAPLVVGFVVALPLFVFWELKVARHPMLPFRILKDRQVLASLFIAMLLNTAWYTQGDYLYYTLLVAFDRDIISATRVQNIYSFTSVVIGVCLGLIIRKVRRLKWFIVAGTLLFVLAFGLLIRYRGGYSISDFAGLVAAEVVLGIAGGLFPYPTQVMIQSAVQHERTAVVTSLYLASYSVGSALGNTIAAAIWTNTMPSHLYNDFIRAGLSTTDASTLQALAYASPLQFIIDYPPGTPEREAVGSAYREVQRYLTITGICISTVIVFMALSLRNPRLGDEQSLPDAEKLEKVPSEMSGATEETTETKQKN

SEQ ID NO: 27976 - protein, 126 aa, Cryptococcus neoformans var. neoformans JEC21
MVRSKFKDEHPFDKRKAEAERIRQKYQDRIPVICEKAEKSDIPTIDKKKYLVPADLTVGQFVYVIRKRIKLAPEKAIFIFVDDILPPTAALMSSIYDEHKDEDGFLYVLYASENTFGDLEQYAISE

SEQ ID NO: 27977 - protein, 66 aa, Oryza sativa
MSCCGGNCGCGSGCQCGGGCGGCKMFPDVEATATTKTLVLVAPSNKASFGGMEMAVESGCSCCSCN

SEQ ID NO: 27978 - protein, 325 aa, Arabidopsis thaliana
MASSSCFLRSILFSSPTNLRSNHHLPTFFLKNHLICSHSTSSRFESLSVSSIGTGSTKKSSDTRRKVKSMATTNIGKEEKKRVEIYDLEENLAVDLAKFTADLSDKFCKERGAFTVVVSGGSLIKSLRKLVESPYVDSIDWARWHFFWVDERVVPKNHDDSNYKLAYDSFLSKVPIPPGNVYAINEALSAEAAADDYETCLKHLVNTNILRVSESTGFPKFDLMLLGMGPDGHVASLFPGHGLCNESKKWVVSISDSPKPPSERITFTFPVINSSAHVALVVCGSGKAEAVEAALKKTGNVPPAGSVSAEDELVWFLDKPASSKL

SEQ ID NO: 27979 - protein, 138 aa, Oryza sativa
MGIECLTRHNIASHLQAARKWGPQAVTPGTPCMPPPLPPAAMLQRFPVPPVPGMVPHPMYRPIPPPSPPQGNKLAALQLQLDAHPSKESIDAAIGDVLVKPWLPLPLGLKPPSLDSVMSELHKQGIPKVPPAASGAAG

SEQ ID NO: 27980 - protein, 259 aa, Listeria monocytogenes str. 4b H7858
MWKLALCQTDVVFKYPDANYARIEKAIVEAAKNGADIAVLPEMWNTGYALNELAGVADLNGERTKEFLATLSEKHQIAIIGGSVSISEGTKFSNTMYAFDKYGGLLSSYKKVHLFQLMNEHLYLEAGNDKNLFRLDGVSCAGFICYDIRFPEWIRKHTSEGSEVIFVSAQWPAERVTQWEQLLIARAIENQAFVVAVNRVGDDPNNHFNGHSLVIDPLGNIVAHGGEDEGNIYAEIDLKLVAETRGIIPVFTDRRPELY

SEQ ID NO: 27981 - protein, 443 aa, Aquifex aeolicus VF5
MTAVSQEIMNYIEEKVNRARSVLRELTSLKTSVKNETLLKVAELIDKNRDYIKEENRKDVEKAKEMGLRPAVVDRLVLNDKRIDGMVKVLKDVASLPDPVGEIIKMWNLPNGLKVGRMRVPLGVIFIVYESRPNVTIEASSLCMKSSNAVILRGGKEAINSNKALVNLIKEACRETGFPEDAVQFIDRSEREIVWEILKMEGKIDVAIPRGGESLIRAVVEHAKVPVIKHYKGVCNIYVDDEADLEKAYHIVYNAKVQRPSVCNAVENLVINRKILKEFFPKMAYYLGKAGVELRCDEESLQVIKENPKLSFVNAKPATEEDYYEEFLDLILAVKVVDDVDEAIAFIEKYGSKHSDAIITENYTKAMKFLREVDSAAVYVNASTRFTDGNEFGLGAEMGISTDKIHARGPMALEELTIPKFVILGEGQVRDNFGVPEEWMKEF

SEQ ID NO: 27982 - protein, 323 aa, Ralstonia eutropha JMP134
MAKAIRFYETGSADVLKLETVEVGDPGPGQARVRHTYIAVNFIDIYFRTGHYPLQLPNGLGSDAVGVVEAVGPGVTDIRVGDRVGYLLGPQGAYSDVRVMPAEVLIPLPDGVSDRTASTLIMKGMTAQYLFRQVYPLKGGETILYHAAAGGVGLIACQWARALGVTMIGTVSSDEKAEVARANGCTHTIVTSRENIVERVMEITDGKKVPVVFDSIGKSTLDASLSCLQVRGTLVSNGTTSGPVEIDSRTLAAKGSLWVTRPAMVHYATPRSHMLDMAKEVFDMVLAGKITSEPRQSFALADAAEAHRALESRKTSGATVLVP

SEQ ID NO: 27983 - protein, 243 aa, Staphylococcus epidermidis ATCC 12228
MSKLFIPYIMGDLNFIHHLKTLTENGADIVEIGVPFSDPVADGPIIMKAGRNAIDEGSNIKFIFDELIKNKNTISSKYVLMTYYNILSAYGEELFLDKCDEAGVYGLIIPDLPYELTKKFKKDFYHHSVKIISLIAMTASDARIMQIAKNSEGFIYTVTMNATTGNSGEFHPDLKRKIEYIKKVSKIPVVAGFGIKNPEHVKDIASVADGIVIGSEIVKRIEIDSRKEFITYIKSIRTTLNSL

SEQ ID NO: 27984 - protein, 265 aa, Glycine max
MMLTLSLSVPLQKQYPFSISQLPSSAYITLCKWGLFILSLLLTALIFRFRQNATPFPLIIAHCDYSHTDDDDEIYSTSEFEDDDDEEEEEEEEEEEEERRDEYFRVRGSTNDERCRSIGDFLSLSEIANTKSVVKLWDTIGFGLGFGFEHFDRSSEGSSVVSVYDGELPDPAVVVSAGQNASGNLAVRIWDTRLRRRIPAMMAEWGPSLGKTVGVESSEVHKVFVKDDGRYEFTVGNMRNAMSPLQYVTDSHLDLWWPNSLIVKI

SEQ ID NO: 27985 - protein, 311 aa, Saccharomyces kudriavzevii IFO 1802
MLRTTVRTLRQRAFFHRSFVHVNLPELHSAIQDAQTTCYCQSINARLPSTTDPLDPQIKLPHRTPNYNKHVLLVSPGDKLAQPWKIAWNHNLDTNLNRPYNAIGKLRSYLRNSPGILINAVHLQNEFVPRPKEGDKWLFFFVIPDMKLYKIRETDLEEFASFLDEGVVQAPRLSFQDYLIGKAKVPQETQQVHHKNLTKFQGDIFLRDWSLVCGHYKRDAKCGEMGPDIIAAFQDEKLLTDNNLGLISHVGGHVFAGNVIFYKLFKAENALNKLDSLWFGKVYPHNLKLLCENLENGKIIDEMYRGGISMN

SEQ ID NO: 27986 - protein, 131 aa, Lupinus angustifolius
IPVFETPIGKIGAAICWENKMPLLRTAMYAKGVEIYCAPTADSREVWQASMTHIALEGGCFVLSANQFCRRRDYPPPPEYVFEGTEENLTPDSVVCAGGSVIISPSGAVLAGPSYEGEALISADLDLGEIA

SEQ ID NO: 27987 - protein, 546 aa, Aquifex aeolicus VF5
MEKIKYLKSIQISQRSVLDLKLLAVGAFTPLDRFMGEEDYRNVVESMRLKSGTLFPIPITLPMEKEIAKDLKEGEWIVLRDPKNVPLAIMRVEEVYKWNLEYEAKNVLGTTDPRHPLVAEMHTWGEYYISGELKVIQLPKYYDFPEYRKTPKQVREEIKSLGLDKIVAFQTRNPMHRVHEELTKRAMEKVGGGLLLHPVVGLTKPGDVDVYTRMRIYKVLYEKYYDKKKTILAFLPLAMRMAGPREALWHGIIRRNYGATHFIVGRDHASPGKDSKGKPFYDPYEAQELFKKYEDEIGIKMVPFEELVYVPELDQYVEINEAKKRNLKYINISGTEIRENFLKQGRKLPEWFTRPEVAEILAETYVPKHKQGFCVWLTGLPCAGKSTIAEILATMLQARGRKVTLLDGDVVRTHLSRGLGFSKEDRITNILRVGFVASEIVKHNGVVICALVSPYRSARNQVRNMMEEGKFIEVFVDAPVEVCEERDVKGLYKKAKEGLIKGFTGVDDPYEPPVAPEVRVDTTKLTPEESALKILEFLKKEGFIKD

SEQ ID NO: 27988 - protein, 799 aa, ASPERGILLUS NIDULANS FGSC A4
MVNPYETDPARIPEDDPFYQRSPQYGRYLPRDDDFQPRYDDWCQFDPQATEYWESTVKALCTPENSLHLHGERQAYAAGRVIIRVDQEDAVGAAAERFLCLNANELSASRKADNAFKHLGVDVPKIYYCGIIDGKNVTVEARIPGVSLDVAWRYLNPEQVEVMKQQCRIVSQELSGADPGLDHPSYVCNKVHRQIRVPRLMAESESGPLQNVQTWANLYESLPGTVLAEPVYPIKIEPSSTSLDRVPLDAEEVKNGIDALEEHPTPKKVVSLKNRGNSRASSSDRSSPANSTKAPGRRAGPGTKKGIGRKTSTKKSKLDNQDNESVSSRRSQTPSSSRTSKVPVKKQSSASLANSPAPEPKKKGGRKAKVEVEDEEMEEGEEGDEDEEESDPDAVFCICRKPDNHTWMIACDGGCEDWFHGKCVNIDPRDVDLIEKYICPNCKENGKGCTLWKPMCRLRECRKPARVSGPTPSKYCSDEHGLEFMRQKTRHLNFIPPQGIQKPKTIFRAALSGTQTPRDDDSEYDSQMEDEQDNSMEDLGSRGGVLTLGDLTAVIMGVSSVEEFRKLGAHIVAPPAEPAPDQVPPSDTTDAGTPPSKKLGLDVGVDGLHYSPDEAEKLEKLRKQRAELFHRRDMLTARNTFLTLVRHRSKSILDILKKKDPKGGWKDICGFDTRLAWSDEEFDEWRLSEPGKKALEEGTPEALAASYPTSNVDTDGDTAMGVEDEDSSASLTRGVCLKKRCERHKQWVKVQQQDVAFEERTLESDLAECEKEAREVVERAVLRMWAEDGNAQSQLENGW

SEQ ID NO: 27989 - protein, 664 aa, Listeria monocytogenes EGD-e
MFDNTDSLAVNTIRTLSMDAIQKANSGHPGLPMGAAPMAYALWSRVLNTNPKNSHWFNRDRFVLSAGHGSMLLYSLLHLSGFKLELEDLKNFRQWESKTPGHPEYRYTDGVDATTGPLGQGIAMAVGMAMAERHLEAKYNKDGFPVVDHYTYALCGDGDLMEGVASEAASYAGHQQLGRLVVLYDSNDISLDGDLDKSFSENVKQRFEAYGWEHLLVKDGNDTAEILAAIEKAKQNTSQPTMIEVKTVIGFGAPNAGTSKVHGAPLGDEGILEAKKAYGWNYEEKFFVPEEVTARFKETIGERGEKAEKAWNELFASYKAEYPELAKQLEDSLNNKLPADWDADLPVYDDSKALASRASSGEVINALAGKIPTIFGGSADLAGSNNTTIKTDGEFTKATPAERNIWFGVREFAMGAALNGMALHGGLQVYGGTFFVFSDYVRAAIRLSAIQHLPVTYVMTHDSIAVGEDGPTHEPVEQLASLRAMPGLSVIRPADGNEVVEAWKLAITSTSTPHVLVLTRQGLPTLPNSAKLTAEGVKKGAYVISPAKGEVPEAIILASGSEVNLAIEAQKELQAQGTDVSVVSVPSFDLFEQQSAEYKESVLPNAVRKRIAVEMGASFGWERYVGLDGKVIGIDKFGASAPGETVIKNYGFTVENVVNTVKSL

SEQ ID NO: 27990 - protein, 222 aa, Caulobacter crescentus CB15
MLEDLKAKNAAWSKSKTAEDPDFFTRLAKQQSPEYLWIGCSDSRVPANEIVGLDPGELFVHRNVANLAPPQDANYLSVLQFAVDVLKVKHIMVVGHYGCGGVAAAIDGKRRGLVDHWLHPIREVYAEHRPELEAIPEKREMIDRLTELNVARQVRNVAADVFVQDAWARGQSLAVHGWVYSLANGLVNDLNVGIASLEDYERTVAETVVPDRPFWKRGQAEG

SEQ ID NO: 27991 - protein, 348 aa, Thermus thermophilus HB27
MKGLILAAGRGTRLRPLTHTRPKPAIRVAGRPIIHYAVENLLEAGVREIGVVVSPETERDLKVALEGYPVRYVLQEEPQGLAHAVDVARDFLGESPFVLYLGDNLFQKGIRRFLEAFKPGVSAVIALVRVEDPRQFGVAVLEGNRVVRLLEKPKDPPSDLAVAGVYVFSPEVLEVVRGLKPSARGEYEITDAIQGLIDRGKTVVGVEVEGWWKDTGRHQDLLDANRLLLEELTPKVEGDVVESQLTGRVVVEKGAKVVRSTVIGPAHIGAGAVVEEAFVGPFTSVGPRARVVRSEVEYSLLEEEAVVEEVRLRLQECILGVRAEVKSRDGLPRAHRLILGDLSQVELA

SEQ ID NO: 27992 - protein, 317 aa, Arabidopsis thaliana; identical to SEQ ID NO: 742

SEQ ID NO: 27993 - protein, 327 aa, Solibacter usitatus Ellin6076
MDHGSQRRVARALRAGGPEVIELADEELPPLKSGEALVRVEAVGLNHIETLIRSGNYVVRLPFPYPLGGEGAGVVVAAGPDVSLPVGARVCWAAVLGSCATLIAAPASMLVPIPPGLTFDDAACLAVASLTAGGLARVWPLQGRSAVVWGAAGAVGRMLVAILADRGADVIGIASGNRVDAVRAAGANHVVDRANSDVPSGVHDYTGGRGVAAVFDPIGAPTFETSLQLLAPRGCLINYGELSGPVPEVNLHRLFPGSLFVTKYNGTRWVEGLAEFGLLIAEGLALAVKRPAVISDIAGRFPLDCAIDAYRLLESGATGKVLVQPTL

SEQ ID NO: 27994 - protein, 277 aa, Lactobacillus johnsonii NCC 533
MDSLSLKKKAVQLRKRTWQLIYRHHNGHTGSDLSCTDILVALYYGVLNQTPDTFEDKNSDTYIQSKGHAVEIWYEILADKGYIDQEDLDRRYSTFNSPYIGHPTTDVKGMEFHTGSLGHGLGLGVGVALAAKMDHLKKRTFVLMGDGEQAEGSVWEAAMAASNYSLDNLTAIIDHNDLQITGTTDSVMRSNPLSNKYEAFGWDAIEVNGNNIDALVDVLNKPNNTGKPRVIIANTVKGKGITVAENRADWHHKIPTKEEYQEGLQELDTQLEGLNND

SEQ ID NO: 27995 - protein, 357 aa, Spinacia oleracea
MTAYRGKYADELIANASYIATPGKVILAADESTGTIGKRFPSINVENVESNRRALRELLFTTPGALPYLSGVILFEETLYQKTADGKPFVDAMKDGGVLPGIKVDKGTVELAGTNGETTTQGLDGLAQRCAQYYTAGARFAKWRAVLKIGPTEPSPLAILENANGLARYGIICQENGLVPIVEPEILVDGTHDIDRCAEVSERVLAACYKALNDHHVLLEGTSLKPNIVTPGSESKKVTPEVIAEYTVRTLQRTVPQAVPGVMFLSGGQSEEEATLNLNAMNKLETKKPWTLSFSYGRALQQSTLKAWQGKEENVAKAQEVFLARAKGNSEATLGKYQGGAGGADASESLHVKDYKY

SEQ ID NO: 27996 - protein, 256 aa, Botrytis tulipae
AYMLKYDSTHGQFKGDIKVLSDGLEVNGKKVKFYTERDPANIPWAESEAYYVVESTGVFTTTEKAKAHLKGGAKKVVISAPSADAPMYVMGVNNETYKGDVDVISNASCTTNCLAPLAKVINDEFTIIEGLMTTIHSYTATQKTVDGPSAKDWRGGRTAAQNIIPSSTGAAKAVGKVIPELNGKLTGMSMRVPTANVSVVDLTVRIEKGASYDEIKAVIKKAADGPLKGILAYTEDDVVSTDMNGDNHSSIFDAKA

SEQ ID NO: 27997 - protein, 525 aa, Lactobacillus johnsonii NCC 533
MSIKKLENSSDHAMVAEEVKILTNLLNESIRQLSGDVIFNKIQDLIKISAQKDYDALEEQIASLTNQEMIVVARYFATLPLLVNISEDVELASEVNLLNNTDQDYLGKLEDTIDLVSQKENASEILKHVNVVPVLTAHPTQVQRKTVLELTDQIHGLLRSYREVKNGTINQAEWTEKLRAYIEILMQTDIIRSHKLQVSNEITNVLAYYPKALIPAITKFTARYQELAKKHNLNLSGATPITMGMWIGGDRDGNPYVTAETLKLSATLQSQVIFEYYIKQLNKLYRTISMSTSYMKPSSAVEKLSDLSNDDSPFRTNEPYRRAFYYIESRLLHTEYTLLGTADKNSFVKKRDLENLDKIPVYKNPQDFKADLITIKESLEEDHDQAVVRSFFTELLEAIDIFGFHLATIDMRQDSSVNEACVAELLKSAGICDDYSDLPEKDKVKVLLNELNNDPRNLHANNKPKSELLQKELNIYKTARQLKDCIGEDVIKQHIISHTESVSDLLEQAIMLKEYDLLNNQGARI

SEQ ID NO: 27998 - protein, 385 aa, Lactobacillus johnsonii NCC 533
MPLFETVEDLENSREIMKEFLNLDIVKKWLASQNNYQEIMLGYSDSNKDGGYLASCWNLYKAQKDLTAMGKKLGVNITFMHGRGGTVGRGGGPSYEAITAQPFGSINDRIRMTEQGEIIQNKYGNQDTAYYNLEMLASATIDRIVSKQIVSEDDIGGFRSSMDEIVLDSNKVYRKLVFETPAFLDYFLQATPIKQISNLNIGSRPAARKKITDFSGLRAIPWVFSWSQSRIMFPGWYGVGSAFKHFIDANPNNLHTLQKMYQGWPFFHSLLSNVDMVLSKSNMDIAKQYADLCEDEDTKKVFDTIYQEWKLTKEVILQIEGNKELLADNPSLKMSLNYRMPYFNILNYIQIEMIKRDRVDEIAGVYESILPITINGVTSGLRNSG

SEQ ID NO: 27999 - protein, 209 aa, Allium cepa
MGLKLYGPTLSPNVVRVIAVLNEKGLDFELIPVDMKSGEHKKPEFLQINPFGQVPALEDGDIKLFESRAICRYLATKYKESGTDLLPAKTAAEMAATEIWLEVESQQFSQPISKVCFELLIKPILGMVTDEEAAEKHATDAIKILDVYEARLSQSKHLAGDEFTLADCNHMAWLNVLMMTKKACLVNDRPHLKAWWEIVSARPAWQKTA

SEQ ID NO: 28000 - protein, 157 aa, Griffithsia japonica
MSATKLSDLQGLKDIEGGAIDPSRFAGKVVFAMNVASACGYTKPGYELLKRLTDKFAPADFVAVAIPCNSFLWQESGSAEDVKTFALARADKLLVTEKAAVNGNHPHPIVALAKQAFPGRVMWNFDGRFVFDRNGVPVARFGNSAKPEEIEAAIANA

SEQ ID NO: 28001 - protein, 256 aa, Monilinia fructigena
AYMLKYDSTHGQFKGDVKVLPDGLEVNGKKVKFYTERDPANIPWAESEAYYVVESTGVFTTTEKAKAHLKGGAKKVVISAPSADAPMYVMGVNNETYTGDADVISNASCTTNCLAPLAKVINDEFTIIEGLMTTIHSYTATQKTVDGPSAKDWRGGRTAAQNIIPSSTGAAKAVGKVIPELNGKLTGMAMRVPTANVSVVDLTCRIEKGATYEEIKAVVKKAAEGPLKGILGYTEDDVVSTDLNGDNHSSIFDAKA

SEQ ID NO: 28002 - protein, 256 aa, Sclerotinia sclerotiorum
AYMLKYDSTHGQFKGDIKVLSDGLEVNGKKVKFYTERDPANIPWAESEAYYVLESTGVFTTTEKAKAHLKGGAKKVVISAPSADAPMYVMGVNNETYNGEADVISNASCTTNCLAPLAKVINDEFTIIEGLMTTIHSYTATQKTVDGPSAKDWRGGRTAAQNIIPSSTGAAKAVGKVIPELNGKLTGMSMRVPTANVSVVDLTVRIEKAASYDEIKEVIKKAANGPLKGILAYTEDDVVSTDMNGDNHSSIFDAKA

SEQ ID NO: 28003 - protein, 314 aa, Zea mays
MAASNIGMMDGAYFVGRNEILAWINTTLQLGLSKVEEAASGAVACQLMDAAHPGAVPMHKVNFDAKTEYDMIQNYKVLQDVFNKLKITKHIEVNKLIKGRPLDNLEFMQWMKRYCDSVNGGFMSSYNASERRESSKGGKETNRRASVPSHTPAKSASTGHKAQASHGAKRASGQTAGAPQRSAKPSPAASSGGPAYDEQITELKLLVDSLEKERDFYFSKLRDIEILCQNPEVEHVPVHAIQNILYTSEEDPQQQAPALSPIMEASEERPKQEAAHKRKSISDLDEFGMSSSSRQRLSDISDVQLCGSPLTSFS

SEQ ID NO: 28004 - protein, 158 aa, Chlamydomonas sp. HS-5
MMLKSSMASATRKATPVAAPRASAFKVWQPVNNKQYETFSYLPALTSEQIARQVDYVIRNGYTPCLEFADAAYSFVSNENTVRFSGVSANYYDNRYWTMWKLPMFGCTDAAQVLKEVALCTRAFPNAYVRLVAFDNTKQVQCMGFLVQRPANGKEYCQ

SEQ ID NO: 28005 - protein, 343 aa, Bacillus anthracis str. A2012
MKKIGVGIVGFGFSSTTFHIPLLQTIEEYDIRAVLSSKEEVVKETLPNVTVVSTIDELVKRADIDLVVITSPNTTHFPYVKEAILNGKHVVVEKPFVVSIEEGEELISLAKKHNVVLSVYHNRRFDNDFLTIKKLLEEDRIGNLYAYEAHFDRFRPHVRDRWREKNLPGSGILYDLGSHLIDQALSLFGKPDAIRADIIKQRPGAEVDDYFHIVLHYGVKRVILRSSSYVKKAGPHFTMHGDKGSIVKYGMDSQEEQLKNGMKPGDNGYGVDTEANFATVETEEELVRIPTEVGCYDMYYKRVRDSIVNGEKPPVTAQEGLEVIKLIQLAVESSETGRIIFIK

SEQ ID NO: 28006 - protein, 427 aa, Bordetella pertussis Tohama I
MSTNAELFDRACRSIPGGVNSPVRAFRSVGGTPRFIQRAQGPYVWDAEGKQYIDYVGSWGPAILGHAHPEVVRAVQEAAVHGLSFGAPTEAEVELAEMLIARLPSLEQVRLVSSGTEATMTAIRLARGATGRHKIIKFEGCYHGHSDSLLVKAGSGLLTFGNPSSAGVPPEFVAHTLTLEFNNLAVVDAAFSQHGAEIACVIVEPVAGNMNLIKPAEGFLAGLRELCTRHGAVLIFDEVMTGFRIGPQGVQGLTGVRPDLTTLAKVIGGGMPVGAFGGRADLMTHIAPLGGVYQAGTLSGNPVAVAAGLATMRLIGEPGFYERLSAQTARLAQGLQERARAAGVPFSADAIGGMFGLYFGDRVPASFAEVSACDTEAFKRFFHAMLERGIHFAPSAFEAGFVSATHDDAVIDATLEAAEQVFATLRA

SEQ ID NO: 28007 - protein, 588 aa, Oryza sativa
MATAVACAERATSDMLIGPDWAVNIELCDIINMDPGQAKDTLKLLKKRLGNKNSKVQILTLYVLETLSKNCGDVVYQQIIERDILSEMVKIVKKKPDLNVREKILSLIDTWQVAFGGASGRYPQYHAAYQELRNAGVDFPPREENTVPLFTPPQTQPLRQPHLYPPPGQSYEDAAIQASLQSSAPSAPALSLSEIQSARGIVDVLDEMLNALDHRHPEGVREEVIVDLVGQCRSYQGRVMDLVSNTGDESLLFQALGLNDELQRVLQRHDDIAKGVPPGSGPAPAAANVNRGTAPPRPTGVSFSPLLNVHHEDDEPEDEFSVLSRRSARDGTATQGNLPSAPKSERPYPSPLLPPPPSSKRPVFTEASSVDYLSGDSYKTEKVSDDFINPTAPANIPAPSHSKTETNPPPSYDSRSESVSDDFINPTAAPSFSMPSRPMSESNRPAVNRQESLPDDDFINPTAMPGFSSSSNANKYGDSGEDLPKAPWEAQAPGSLPPPPARYGQRQQYFEQQHGLPSGNNGAGYNGLVSQTEGLSLNQRNTENERGSSVPTASRQTKPEDSLFKDLVDFAKNKPSSPSKPANSRRTR

SEQ ID NO: 28008 - protein, 429 aa, Streptomyces avermitilis MA-4680
MSDNSVVLRYGDGEYTYPVIDSTVGDKGFDIGKLRAQTGLVTLDSGYGNTAAYKSAITYLDGEQGILRYRGYPIEQLAERSTFLEVAYLLINGELPTVDELSTFKGEITQHTLLHEDVKNFYRGFPRDAHPMAMLSSVVSALSTFYQDSHNPFDEKQRNLSTIRLLAKLPTIAAYAYKKSIGHPFVYPRNDLGYVENFLRMTFSVPAQDYDLDPVVVSALDKLLILHADHEQNCSTSTVRLVGSSQANMFASISAGISALWGPLHGGANQSVLEMLEGIQTSGGDVDTFIRKVKNKEDGVKLMGFGHRVYKNFDPRAKIIKAAAHDVLSALGKSDELLDIALKLEEHALADDYFVERKLYPNVDFYTGLIYRAMGFPTEMFTVLFALGRLPGWIAQWHEMIKEPGSRIGRPRQIYTGEVLRDFVPVEGR

SEQ ID NO: 28009 - protein, 199 aa, Arabidopsis thaliana
MVQTKKFRGVRQRHWGSWVAEIRHPLLKRRIWLGTFETAEEAARAYDEAAVLMSGRNAKTNFPLNNNNTGETSEGKTDISASSTMSSSTSSSSLSSILSAKLRKCCKSPSPSLTCLRLDTASSHIGVWQKRAGSKSDSSWVMTVELGPASSSQETTSKASQDAILAPTTEVEIGGSREEVLDEEEKVALQMIEELLNTN

SEQ ID NO: 28010 - protein, 413 aa, Bacillus anthracis str. A2012
  misc_feature (140)..(140): Xaa can be any naturally occurring amino acid
  unsure (1)..(413): unsure at all Xaa locations
MGYYDGPNLNEEHSETREVRKSGSKKGYFFTGLVGAVVGAVSISFAAPYMPWAQNNGATVSSFSSDSKVEGTVVPVVNKAKNETDLPGMIEGAKDVVVGVINMQQSIDPFAMQPTGQEQQAGSGSGVIYKKAGNKAYIVXNNHVVDGANKLAVKLSDGKKVDAKLVGKDPWLDLAVVEIDGANVNKVATLGDSSKIRAGEKAIAIGNPLGFDGSVTEGIISSKEREIPVDIDGDKRADWNAQVIQTDAAINPGNSGGALFNQNGEIIGINSSKIAQQEVEGIGFAIPINIAKPVIESLEKDGVVKRPALGVGVVSLEDVQAYAVNQLKVPKEVTNGVVLGKIYPISPAEKAGLEQYDIVVALDNQKVENSLQFRKYLYEKKKVGEKVEVTFYRNGQKMTKTATLADNSATKNQ

SEQ ID NO: 28011 - protein, 206 aa, Escherichia coli
RELKARHLTMIAIGGSIGTGLFVASGATISQAGPGGALLSYMLIGLMVYFLMTSLGELAAYMPVSGSFATYGQNYVEEGFGFALGWNYWYNWAVTIAVDLVAAQLVMSWWFPDTPGWIWSALFLGVIFLLNYISVRGFGEAEYWFSLIKVTTVIVFIIVGVLMIIGIFKGAQPAGWSNWTIGEAPFAGGFAAMIGVAMIVGFSIQG

SEQ ID NO: 28012 - protein, 228 aa, Gloeobacter violaceus PCC 7421
MSTPTHYQTLGIEPSATTEEIRAAYRRLAKQHHPDTGALAGHQRMVILNEAYEVLSEPQRRQSYDRLLAHGDERPSRVATQTVPRAPFGRGASEDSERQRWLRDIYRPVNAAIYRVIRPFRRQLDELAYDPYDDELIAEFVAYLERSQVIYQQAKALFASRPNPAGAALVAELLYHSLNQLGDALDELRYFTLNYDYQHLHVGQELVGIVTDLRRQATEAAERLLQMG

SEQ ID NO: 28013 - protein, 206 aa, Escherichia coli
RELKARHLTMIAIGGSIGTGLFVASGATISQAGPGGALLSYMLIGLMVYFLMTSLGELAAYMPVSGSFATYGQNYVEEGFGFALGWNYWYNWAVTIAVDLVAAQLVMSWWFPDTPGWIWSALFLGVIFLLNYISVRGFGEAEYWFSLIKVTTVIVFIIVGVLMIIGIFKGAQPAGWSNWTIGEAPFAGGFAAMIGVAMIVGFSFQG

SEQ ID NO: 28014 - protein, 482 aa, Zea mays
  misc_feature (255)..(255): Xaa can be any naturally occurring amino acid
  unsure (1)..(482): unsure at all Xaa locations
MAASVTVENLNPKVLKCEYAVRGEIVIHAQRLQQQLQTQPGSLPFDEILYCNIGNPQSLGQQPVTFFREVLALCDHPCLLEKEETKSLFSADAISRAKQILATIPGRATGAYSHSQGIKGLRDAIAAGITSRDGFPANADDIFITDGASPGVHMMMQLLIRNEKDGILCPIPQYPLYSASIALHGGALVPYYLDEKTGWGLEISDLKKQLEDARSKGIDVRALVVINPGNPTGQVLAEDNQYDIVKFCKNEGLVXLADEVYQENIYVDNKKFNSFKKIARSMGYGEDDLPLVSFQSVSKGYYGECGKRGGYMEITGFSAPVREQIYKVASVNLCSNITGQILASLVMNPPKVGDESYASYKAEKDGILQSLARRAKALEDAFNTLEGFSCNKAGGAMYLFPQIHLPHKAIEAAKAAKKAPDAFYALRLLESTGIVVVPGSGFGQVPGTWHVRCTILPQEDKIPAVITRFKAFHEAFMAEYRD

SEQ ID NO: 28015 - protein, 108 aa, Fucus serratus
SAPATGGVKKPHRYRPGTVALREIRRYQKSTELLIRKLPFQRLVREIAQDFKSDLRFQGSAVLALQEAAEAYLVGLFEDTNLCAIHAKRVTIMPKDIQLARRIRGERS

SEQ ID NO: 28016 - protein, 205 aa, Escherichia coli
LKARHLTMIAIGGSIGTGLFVASGATISQAGPGGALLSYMLIGLMVYFLMTSLGELAAYMPVSGSFATYGQNYVEEGFGFALGWNYWYNWAVTIAVDLVAAQLVMSWWFPDTPGWIWSALFLGVIFLLNYISVRGFGEAEYWFSLIKVTTVIVFIIVGVLMIIGIFKGAQPAGWSNWTIGEAPFAGGFAAMIGVAMIVGFSIQGT

SEQ ID NO: 28017 - protein, 484 aa, Escherichia coli
MSDMEPKTKKQRSLYIPYAGPVLLEFPLLNKGSAFSMEERRNFNLLGLLPEVVETIEEQAERAWIQYQGFKTEIDKHIYLRNIQDTNETLFYRLVNNHLDEMMPVIYTPTVGAACERFSEIYRRSRGVFISYQNRHNMDDILQNVPNHNIKVIVVTDGERILGLGDQGIGGMGIPIGKLSLYTACGGISPAYTLPVVLDVGTNNQQLLNDPLYMGWRNPRITDDEYYEFVDEFIQAVKQRWPDVLLQFEDFAQKNAMPLLNRYRNEICSFNDDIQGTAAVTVGTLIAASRAAGGQLSEKKIVFLGAGSAGCGIAEMIISQTQREGLSEEAARQKVFMVDRFGLLTDKMPNLLPFQTKLVQKRENLSDWDTDSDVLSLLDVVRNVKPDILIGVSGQTGLFTEEIIREMHKHCPRPIVMPLSNPTSRVEATPQDIIAENKPPFSVFRDKFITMPGGLDYSRAIVVASVKEAPIGIEVIPAHVTEYL

SEQ ID NO: 28018 - protein, 481 aa, Escherichia coli
MEPKTKKQRSLYIPYAGPVLLEFPLLNKGSAFSMEERRNFNLLGLLPEVVETIEEQAERAWIQYQGFKTEIDKHIYLRNIQDTNETLFYRLVNNHLDEMMPVIYTPTVGAACERFSEIYRRSRGVFISYQNRHNMDDILQNVPNHNIKVIVVTDGERILGLGDQGIGGMGIPIGKLSLYTACGGISPAYTLPVVLDVGTNNQQLLNDPLYMGWRNPRITDDEYYEFVDEFIQAVKQRWPDVLLQFEDFAQKNAMPLLNRYRNEICSFNDDIQGTAAVTVGTLIAASRAAGGQLSEKKIVFLGAGSAGCGIAEMIISQTQREGLSEEAARQKVFMVDRFGLLTDKMPNLLPFQTKLVQKRENLSDWDTDSDVLSLLDVVRNVKPDILIGVSGQTGLFTEEIIREMHKHCPRPIVMPLSNPTSRVEATPQDIIAENKPPFSVFRDKFITMPGGLDYSRAIVVASVKEAPIGIEVIPAHVTEYL

SEQ ID NO: 28019 - protein, 448 aa, Escherichia coli
MEERRNFNLLGLLPEVVETIEEQAERAWIQYQGFKTEIDKHIYLRNIQDTNETLFYRLVNNHLDEMMPVIYTPTVGAACERFSEIYRRSRGVFISYQNRHNMDDILQNVPNHNIKVIVVTDGERILGLGDQGIGGMGIPIGKLSLYTACGGISPAYTLPVVLDVGTNNQQLLNDPLYMGWRNPRITDDEYYEFVDEFIQAVKQRWPDVLLQFEDFAQKNAMPLLNRYRNEICSFNDDIQGTAAVTVGTLIAASRAAGGQLSEKKIVFLGAGSAGCGIAEMIISQTQREGLSEEAARQKVFMVDRFGLLTDKMPNLLPFQTKLVQKRENLSDWDTDSDVLSLLDVVRNVKPDILIGVSGQTGLFTEEIIREMHKHCPRPIVMPLSNPTSRVEATPQDIIAENKPPFSVFRDKFITMPGGLDYSRAIVVASVKEAPIGIEVIPAHVTEYL

SEQ ID NO: 28020 - protein, 129 aa, Salmonella enterica
ICIIWGLGISLAVYLTAGISGGHLNPAVTIALWLFACFPKQKVLPYIIAQFAGAFGGALLAYVLYSSLFTEFETAHHMVRGSVESLQLASIFSTYPAAALNVWQAALVKVVITSILMGMIMALTDDGNG

SEQ ID NO: 28021 - protein, 307 aa, Burkholderia vietnamiensis G4
MSTSVIAALQIGASPAGTRATLDAILAYETAIRDSGASLVVLPEAVLGGYPKGETFGTRLGYRLPEGREAYARYAAQAIDVPGPETDELAALSQRTGASLVIGVIERGGSTLYCTALFFDPRDGLVAKHRKLMPTGTERLIWGQGDGSTLPVVDTAAGRAGAAICWENHMPLLRCAMYAKGVQIWCAPTVDERDLWQSSMRHIAHEGRCFVVSACQVQPSPRALGIDVPGWDPERPLIRGGSVIVGPLGDLLTEPLIGEPGLVTARIDTDELVRARYDFDVVGHYARADVFSLHVDERPKRPVVFNG

SEQ ID NO: 28022 - protein, 403 aa, Vibrio fischeri ES114
MKRAVITGMGIVSSIGNNAEEVLESLKAGKSGINFSEQFAEKGLRSNVWGDLKMNPADHIDRKKMRFMGDAAAFAYISMEQAVADSGLTEDQVSNERTGIVAGSGGASSLNQVNAVDILREKGVKRVGPYMVPRTMASTVSACLATPFKIKGVNYSMSSACATSAHCIGHAVELIQLGKQDVMFAGGGEELDWSLTMMFDAMGALSSKYNDTPEKASRTYDADRDGFVISGGGGMLVIEELEHALARGAKIYGEIVGYGATSDGYDMVAPSGEGAVRCMKMAMQNVDSVDYVNTHGTSTPVGDAKELGAIQEVFGANSPAISATKAMTGHALGAAGVHEAIYSTLMLEHGFIAPSINVETLDPAAEGLDIVTEKRDQALNTVMSNSFGFGGTNATLVIKKYEA

SEQ ID NO: 28023 - protein, 275 aa, Burkholderia vietnamiensis G4
MTDPTRSATPFRVAALQMVSTPDVARNLADAGHLIEQAAADGAQLVLLPEYFCFMGHRDTDKLALAEPYRDGPIQQFLAQAAQRHRVWVIGGTLPLQAPEPDRVLNTTLVFDPSGREAARYDKIHLFNFEKGDESFDEARTIRAGDTVVAFDAPFGRVGLSVCYDLRFPELYRRMGDCALLVVPSAFTYTTGRAHWETLLRARAVENQCYVLAAAQGGKHENGRRTWGHSMLIDPWGEIVAVRDEGAGVVAGALDPQRIADVRQSLPAWRHRVLA

SEQ ID NO: 28024 - protein, 127 aa, Salmonella enterica
ICIIWGLGISLAVYLTAGISGGHLNPAVTIALWLFACFPKQKVLPYIIAQFAGAFGGALLAYVLYSSLFTEFETAHHMVRGSVESLQLASIFSTYPAAALNVWQAALVEVVITSILMGMIMALTDDG

SEQ ID NO: 28025 - protein, 133 aa, Glycine max
MSLVEDLMDGVFAWFSDSSPMLRNGETGDWIGTFEGHKGAVWSCCLDTSALRAATASADFSTKVWDALTGDELHSFEHKHIVRACAFSEDTHLLLTGGVEKILRIYDMNRPDAPPREVDKSPGSVRTVAWLHS

SEQ ID NO: 28026 - protein, 421 aa, Physcomitrella patens
MGRKPCCEKVGLRRGPWTSEEDQKLVSHITNNGLSCWRAIPKLAGLLRCGKSCRLRWTNYLRPDLKRGIFSEAEENLILDLHATLGNRWSRIAAQLPGRTDNEIKNYWNTRLKKRLRSQGLDPNTHLPLEDSKLDDTEDDTDDEGGDSSDVTMSDASKSEKRSKKKSKPKETVKVRQPKGPKPAPQLKMCQSDEGPVLLKVPKAPKSPISVNPGPGCNYDDDSEHSSSSTVTTKSHEDHRDSSDFIKALTSVSSFPEAELWSCIKPITNSFSSTALLSEWDSYRAFDSSLFPSSYPQLNSGLPKLEDVNSKSSAVASPVQGMLPAYNPMGMEMQTRMQFSSQLTHEIGQNYGGIFQETCYPQPDMGMSWSMHAELSHCGTESLFATPNPANAPSNFEEVPQPSPCTTSQELQRLAALLDLI

SEQ ID NO: 28027 - protein, 273 aa, Oryza sativa (japonica cultivar-group)
MARREVDDSYTNGSVVEVVSIEEGSKMDKEDDHQNPQAPDGGDVVVCGMPMSFTFLQMLLAEFLATFFLMFAGLGAITVEEKKGAVTFPGVAVAWGAAVMAMVYAVGHVSGAHLNPAVTLGFAVAGRFPWRRAPAYALAQTAAATAASVVLRLMFGGRHAPVPATLPGGAHAQSLVIEFVITFYLMFVIMAVATDDQAVGHMAGVAVGGTIMLNVLFAGPVSGASMNPARSIGPALVGSKYTALWVYILGPFAGAAAGAWAYSLIRLTGDRTD

SEQ ID NO: 28028 - protein, 464 aa, Cryptococcus neoformans var. neoformans JEC21
MEGIQRDSPPIQQPMATEKAPIVGSSASTSLPTLSVQDGTLPLTPGAQGMQTGTIDGHRQLQSPVSRSSSAGEDKMREKARDAQEQAAQSQANLHHATQQARVAAINAAATQAALETAAQLPATARVPVSGGGVEQGQARRKTAGRYALSDFLIERTLGTGSFGRVHLVRSRHNGRFYAVKVLNKEKVIKMKQVEHTNSEREMLVRVRHPFLVNLWGTFQDVNNLYMVMDFVAGGELFSLLRKSQRFPNSVAKFYAAEVALALDYLHSLDIIYRDLKPENLLLGADGHVKVTNFGFAKYVPDITWTLCGTPDYLAPEVVQSKGYNKSVDWYALGVLIFEMLAGYPPFFTEDGNPMKLYEKIIAGKVRYPTYFDALAKELLKNLLIGDLTKRYGNLRAGSSDIFAHGWFAEVDWDKLYRREIPAPYVPKIDGEGDASQFDRYQEADVSAYGKVGNGPYDHFFTEF

SEQ ID NO: 28029 - protein, 477 aa, Triticum aestivum
MRGLGFAALSLHVLLCRAKGVSSRRTSSYVRSEFPSTDMPLDSEWFATPKGYNAPQQVHITQGDCDGKAVIVSWVTPSEPAPSQVFYSKEENRYDQKAEGTMTNYTFYDYKSGYIHHCLVDGLEYNTKYYYKIGTGDSAREFWFQTPPAIDTDASYTFGIIGDLGQTFNSLSTLQHYLKSGGESVLFVGDLSYADRYQHNDGIRWDSWGRFVERSTAYQPWIWNSGNHEIEYRPDLGETSTFKPYLHRYSTPYLASKSSSPMWYAVRRASAHIIVLSSYSPFVKYTPQWMWLKGELKRVDREKTPWLIVLMHAPMYNSNDAHYMEGESMRAAFEKWFVKYKVDLVFAGHVHAYERSYRISNINYNVTSGNRYPVPDKSAPVYITVGDGGNQEGLAWRFNDPQPDYSAFREASYGHSTLQLVNRTHAVYQWNRNDDGKHVPTDNVVFHNQYWASNTRRRRLKKKHLRYESLEGLMSML

SEQ ID NO: 28030 - protein, 316 aa, Streptomyces avermitilis MA-4680
MAYDLITMGRIGVDLYPLQTGVPLPQVTSFGKFLGGSATNVAVAAARLGRSTAVVTRTGDDPFGTYIHEALRGFGVDDRWVTQVAGLPTPVTFCEIFPPDDFPLYFYRQPKAPDLEIDAHELDLDEIRAARIFWMTGTGLSEEPSRTATLAALAHRAKSGTTVFDLDWRPMFWADPAQARPFYTEALRHTTVAVGNVDEVEIATGERDPHSAARALLAAGVELAVVKQGPKGVLAVHRDGTTAEVPPLPVKVLNGLGAGDAFGGSLCHGLLDGWDLERLMRYANAAGAIVASRLECSSAMPTPAEVEDALTAGAVL

SEQ ID NO: 28031 - protein, 961 aa, Arabidopsis thaliana
MAKRGYKLQEFVAHSGNVNCLSIGKKTSRLLLTGGDDYKVNLWSIGKTTSPMSLCGHTSPVDSVAFNSEEVLVLAGASSGVIKLWDLEESKMVRAFTGHRSNCSAVEFHPFGEFLASGSSDTNLRVWDTRKKGCIQTYKGHTRGISTIEFSPDGRWVVSGGLDNVVKVWDLTAGKLLHEFKCHEGPIRSLDFHPLEFLLATGSADRTVKFWDLETFELIGTTRPEATGVRAIAFHPDGQTLFCGLDDGLKVYSWEPVICRDGVDMGWSTLGDFCINEGKFIGCSYYRNSVGIWVSDISELEPYGAVSEDKNECMVKRFSVLNDQSERMGSGPRGSVSPDYETREIKNIYVDSTGGNLNVAQNPGSLKATLPLESGKVATMVSEKQNAAYFGPAGDKYSSTSRDSDSGEESSYSERESIPFSRTKSGMLLRPAHVRKTLAKFEESKQSAVVQSATRKKSGLAVEEEPQTQNAFLSEQNASKPFDAEDSIIKGITNKFEKALSSEPPTDEANRMFLKPPRIHRSSNSKYNDTRRAMSADPATFGKGGMENSGDVEDIPSKTERVLSREKPGDEQKNTEYPSGSRELNPVKIVEGVNVVSGRTRSLVEKFERGEKTTHTEGASTTIEQNNNAVQEDPRKTSRQTGETPVISTRRARSTPARVMPIVLNRDSNVTSDEPPLTQPARTSSFPVMPVILNQASNVTYDEPSVALTQESRTSHARILPVTFNQATNITSEEASVTLRRQRRNSAARVRPVLLSQATSHECPVTSVRPLRTSPARVMPTKLNQSVNMTSDTSHIASMHRVSPTQMLATPTVIDQVADMTLDETHATQIQPACDNMPQKEEPNISDREDDSDITENLMLTHNEFLSTLQSRLTKLQMLGQVQADVISILTEKIEILTLDMFSQLVPVLTSLLGSRTERPVNVSLDMLLKLVAVFGTVIRSTVSAPRIVGVDLHANERYLS

SEQ ID NO: 28032 - protein, 192 aa, Escherichia coli
LTMIAIGGSIGTGLFVASGATISQAGPGGALLSYMLIGLMVYFLMTSLGELAAYMPVSGSFATYGQNYVEEGFGFALGWNYWYNWAVTIAVDLVAAQLVMSWWFPDTPGWIWSALFLGVIFLLNYISVRGFGEAEYWFSLIKVTTVIVFIIVGVLMIIGIFKGAQPAGWSNWTIGEAPFAGGFAAMIGVAMI

SEQ ID NO: 28033 - protein, 81 aa, Zea mays
  misc_feature (25)..(25): Xaa can be any naturally occurring amino acid
  misc_feature (55)..(55): Xaa can be any naturally occurring amino acid
  unsure (1)..(81): unsure at all Xaa locations
YRRLKHTGPDWTDLYHHEDNFLAHXRLADGSPLYVDQPVFNKDSTDVVVANGEIXNHRNGLRQLTGPHIIKTGSHCEVIIP

SEQ ID NO: 28034 - protein, 1177 aa, Methylococcus capsulatus str. Bath
MSEDLTSPPAMRQRFLRSLGSICLIVILAEVIVMTLLGALHRGGLELVRWQESALDGLLLGLFSAPLLWIMALRPLAQQIARESQRNKELLDALDAHALVSITDLQGRILYANDNFCAVSRYGREELVGQDHRIVNSGYHGKAYIRDMWRTISRGNIWQGEFCNRRKDGTRYWVDSTIVPLMDNAGKPRQYISIRRDITAQKEAEAQLARLKQAMDANSEMILLTDRAGRIIYANPALCRFSGMAEGELLGQSPSILDSPLADQETLAAMQEALQAGQPWSGRLLNRRRTGPAPHDAEDYWAEISTTPIHTDGNGLVGYVQIQHDVSARVERERALAMEQEDTAARLRITETLQQSAPLDERCRQVLRILFELGTFGLQRKGGIFLKAEHGNCLKLFVLEGKFCDEFVRREQTIPMGACLCGRSAVSGEILVSDDCFQDHRHEHRFEDMESHGHYIVPIASGGDLLGVLFLYTDPNPTRSEARMVMLRQVGEMLALAILEDRAKASLKAAHDAAVDAAQAKSAFLANMSHEIRTPMNGVLGMLELLKDTDMSREQWDLVETASNSAESLLEIINSILDFSKLEAGKVEIERTEFNLPDLVEEVCALLAGRAHDKGLELNCFLPADLPRMWIGDPTRIRQILTNLLGNSVKFTERGEVSVKVMQGEAGAKRTDLSFEIRDTGIGIAPDVQARLFQPFTQADGSTSRRFGGTGLGLSICRNLVELMGGTIGLESAPGRGSRFWFTLPLEPLPGASAPALPDFSHRRVLVVDDNATNRVILSHYLTHWGLEVDEAERGDTALNRLRTALHESRPYDIVLLDLHMPYMDGHELARAMNAEPGLKDTPRLLLSSGGLTGEAELRALGIARSLLKPVRQSLLFNAIAEVLAAKATVQRRPAAKTETVLPAYEGRRVLVVEDNRVNQKVIVAMLGKFGIVPDVADNGQAALELLARSSYDLVLMDCQMPVLGGYEATGELRAREMSAGGRRTPVVALTAHAATGEREKCLAAGMDDYLSKPISRDRLAEALERWLGHPAAPASAETGQGAVNDDGGDRPAGLSWNREETLARLDHDEALLAEMIALCIEELPRHLAALQEAGAANDIAALADAAHAIKGMAGHFCAGSVRDLAARLEDQARKAGSMPDAASIGALETAAARLLEDLHGGSPAGDPAKGTNDAAQ

SEQ ID NO: 28035 - protein, 232 aa, Arabidopsis thaliana
MAAFRNRISDAGLNKLYEHLPTRSYITGYHSSRDDITVFAALAKPPTSQYVNASRWYNHIDALLRISGVSAEGSGVIVEGISSPITEEAVATPPAADSKDTAAEEEDDDDVDLFGEETEEEKKAAEERAASVKASTKKKESGKSSVLMDIKPWDDETDMKKLEEAVRSIQMEGLFWGASKLVPVGYGIKKLHIMCTIVDDLVSIDTMIEEQLTVEPINEYVQSCDIVAFNKI

SEQ ID NO: 28036 - protein, 433 aa, Escherichia coli
MVETIEEQAERAWIQYQGFKTEIDKHIYLRNIQDTNETLFYRLVNNHLDEMMPVIYTPTVGAACERFSEIYRRSRGVFISYQNRHNMDDILQNVPNHNIKVIVVTDGERILGLGDQGIGGMGIPIGKLSLYTACGGISPAYTLPVVLDVGTNNQQLLNDPLYMGWRNPRITDDEYYEFVDEFIQAVKQRWPDVLLQFEDFAQKNAMPLLNRYRNEICSFNDDIQGTAAVTVGTLIAASRAAGGQLSEKKIVFLGAGSAGCGIAEMIISQTQREGLSEEAARQKVFMVDRFGLLTDKMPNLLPFQTKLVQKRENLSDWDTDSDVLSLLDVVRNVKPDILIGVSGQTGLFTEEIIREMHKHCPRPIVMPLSNPTSRVEATPQDIIAENKPPFSVFRDKFITMPGGLDYSRAIVVASVKEAPIGIEVIPAHVTEYL

SEQ ID NO: 28037 - protein, 420 aa, Medicago truncatula
MAMATMREMPRSPEAKLGMRVEDLWDVQEAQLSPNDKLNACFESIPVSAFPLPAKNQEIEIKSDATLAEAVKILARHNILSAPVVDVDAPEDATWIDRYIGIVEFAGIVVWILHQSEPPSPRSPSTPTSASAIAAAANGNTFARELEALGLGSAATTSGNFFEDLTSSELYKNTKVQDISGTFRWAPFLALERSNSFLTMLLLLSKYKMKSVPVVDLGSGTIDNIITQPAVIHMLAECAGLQWFESWGTKELSDVGLPLVTPKQIIKVYEDEPVLQAFKEMRKKRVGGVPVIKRGGTTAVGNISLRDVQFLLTAPEIYHDYRTITVKDFLTSVRSYLEKNKNAFPMSSEFITCKRDCTVKELIQLLDKEQIHRVYVVDDDGNLEGLITLRDIISRLVHEPHGYFGDFFDGVLPLPANSRV

SEQ ID NO: 28038 - protein, 144 aa, Caulobacter crescentus CB15
MRRRMTTPDPDKPDAVMLFDGVCHLCDGVVRTVLRLDRHGAIRFAAIQSPAGRRLAIAHGLDPDAPESFLFLDHGQPLRKTQAVAALLRRLPAPWRQLAWIDRLPRGLTDRVYDWVAANRYRIFGKHDQCRIPTPAQRARFLID

SEQ ID NO: 28039 - protein, 383 aa, Staphylococcus epidermidis ATCC 12228
MNELEFVTLHRRHLHQYPELSLHEFETTSYITSFLEDLGVPYDRPLKTGVIAYLEGNSHHTIAFRADIDALPIYEENDIDFKSKNDNVMHACGHDGHTTALMLFVKRCKALYDKSELPHNVVFIFQPAEETGGGANRLIKAGAFDKYPIEAVFGFHVNPFEKEGKIVIRDEEITASATEYRFFLKGLSSHVADKEQGHSCGEGLQHVLSQIGQIQQFHLNGLKRNIIHMGHFEAGEAINTVPSHGYLEGTIRTYDTEDLAIVKHQMHKIAKSVQLLFNVECEVKFEEGYPPTMNHPQLRQAVENAIKGANLEIVEKKLPFLFGEDFSFYGQQLAPSYFVFVGTQNNEKGFVTGLHTAHLNFDEKILIDVVNYYEHLLRNYKEV

SEQ ID NO: 28040 - protein, 276 aa, Medicago truncatula
MGNANGREDGAIPDAGDPSGREPHAPPPIRAFSSDSMANSPPQSPRRSRSPILFGPQVPLAPLQRGNGPPFLNQMWQNEPHGIVNQAPEQGIPVMITWNYGGNSVAVEGSWDNWASRKVLQRGGKDHSILIVLPSGIFHYRFIVDGEQRYIPDLPYVADEMGNVCNLLDVNDYVPENPESVSEFEAPPSPESSYGQAYPAEEDFAKEPMAVPSQLHLTVLGMENADSGPSSKPQHVVLNHVFIEKNMASKSVVAMGVTHRFQSKYVTVVLYKPLKR

SEQ ID NO: 28041 - protein, 166 aa, Triticum aestivum
  misc_feature (28)..(28): Xaa can be any naturally occurring amino acid
  misc_feature (98)..(98): Xaa can be any naturally occurring amino acid
  unsure (1)..(166): unsure at all Xaa locations
ATSVAPFQGLKSTAALPVSRRSNGASLXSVSNGGRIRCMQVWPIEGIKKFETLSYLPPLSTEPLLKQVDYLIRSKWVPCLEFSKVGFIFREHNASPGXYDGRYWTMWKLPMFGCTDATQVINEVEEVKKEYPDAYVRIIGFDNMRQVQCVSFIAFKPPGCEESGKA

SEQ ID NO: 28042 - protein, 287 aa, Medicago truncatula
MGNVNGREEDFNGTLSSASSTSSEVSDSMSAPDGVVENPSPVELMGHSPPASPRTTQSPLMFTPQAPVVPLQRPDEMQVPSPSLMQTNSGYEDMFSEIGIPTMITWSYDGKEVAVEGSWDNWKTRMPLQRSGKDFTIMKVLPSGVYQFRFIVDGQWRYAPDLPWARDDAANTYNILDLQDSVPEDLGSISSFEPPKSPDSSYNNLHLSSEDYAKEPPLVPPFMQATLLNVPSANMEFQPLVSRPQHVVLNHLYMQKGKSSPSVVALGSTHRFVAKYVTVVMYKSLQR

SEQ ID NO: 28043 - protein, 218 aa, Glycine max
  misc_feature (191)..(191): Xaa can be any naturally occurring amino acid
  misc_feature (200)..(200): Xaa can be any naturally occurring amino acid
  unsure (1)..(218): unsure at all Xaa locations
MAGAVAGGGYGDANRMRDYVFKVVLIGDSAVGKSQILARFARNEFSLDSKSTIGVEFQTRTLVIDHKTVKAQIWDTAGQEQCFGYRAVTSAYYRGAVGAMLVYDITKRQTFDHIPRWLEELRNHADKNIVIILTGNKCDLENQRDVPTEDAKEFAEKEGLFFLETSALEATNVETAFITVLTEIYNIVNKXKNLTADENXEMGTSALLAGQKNIGSGP

SEQ ID NO: 28044 - protein, 390 aa, Oryza sativa
MGSSGADAPTKTSKASAPQEQQPPASSSTATPAVYPDWANFQGYPPIPPHGFFPSPVASSPQGHPYMWGAQPMIPPYGTPPPPYVMYPPGVYAHPSMPPGAHPFTPYAMASPNGNADPTGTTTTAAAAAAGETDGKSSEGKEKSPIKRSKGSLGSLNMITGKNSTEHGKTSGASANGAISQSGESGSESSSEGSEANSQNDSHHKESGQEQDGEVRSSQNGVSRSPSQAKLNQTMAIMPMTSSGPVPAPTTNLNIGMDYWANTASSTPAIHGKATPTAAPGSMVPGEQWVQDERELKRQRRKQSNRESARRSRLRKQAECEELAQRAEVLKQENTSLRDEVNRIRKEYDELLSKNSSLKEKLEDKQHKTDEAGVDNKLQHSGDDSQKKGN

SEQ ID NO: 28045 - protein, 172 aa, Triticum aestivum
  misc_feature (75)..(75): Xaa can be any naturally occurring amino acid
  misc_feature (83)..(83): Xaa can be any naturally occurring amino acid
  misc_feature (92)..(92): Xaa can be any naturally occurring amino acid
  misc_feature (104)..(104): Xaa can be any naturally occurring amino acid
  misc_feature (106)..(106): Xaa can be any naturally occurring amino acid
  misc_feature (111)..(111): Xaa can be any naturally occurring amino acid
  misc_feature (113)..(113): Xaa can be any naturally occurring amino acid
  misc_feature (120)..(120): Xaa can be any naturally occurring amino acid
  unsure (1)..(172): unsure at all Xaa locations
MASSAMELSLLNPAAMRGLSAAKPRVVSSRRIVRFRVASSAAAPPAAKPGTPKKRGKTEIQETLLTPRFYTTDFXDEMERLFXNAEINKQLXNQGGFDALLQDXKXDYNQXHXVRQPGFXAAARQMEGSQAIFDSSTSTRISPKRLGAGQETTMGVSKRIGNWKGSMRGLTR

SEQ ID NO: 28046 - protein, 144 aa, Exiguobacterium sp. 255-15
MDFNNLDHLYRQVIMDHYKTPRNRGAIDGGVTIDMNNPTCGDTIRLQLAIEDDIVKDAKFDGEGCSISMASASMMTQAVKGKTVEEALQLANVFSEMVQGKDYDDEKFDLGDAEALSGVTKFPARIKCATLAWKALERGVEEGK

SEQ ID NO: 28047 - protein, 287 aa, Juglans regia
MAKDIEAAGQGGFSAKDYHDPPPAPLIDAEEFTQWSFYRAIIAEFIATLLFLYITVLTVIGYKSQTDKAKGGDDCGGVGILGIAWAFGGMIFVLVYCTAGISGGHINPAVTFGLFLARKVSLVRAVFYMAAQCLGAVCGCGLVKAFQKAYYSKYGGGANELADGYSKGTGLAAEIIGTFVLVYTVFSATDPKRNARDSHVPVLAPLPIGFAVFMVHLATIPITGTGINPARSFGAAVIYGKDKAWNDQWIFWVGPFIGAAIAAFYHQYILRAGAAKALGSFRSSSTI

SEQ ID NO: 28048 - protein, 329 aa, Burkholderia vietnamiensis G4
MQKILVARPIFTDVIERLEQYFEVDWNNGDALAPDALAARLADKDGALTAGDPIGAAALAAAPRLRVVSNMAVGYNNFDMAAFNAANVLGTNTPDVLNESTADFGWALMMAAARRIAESEHWLRAGLWRKWAYDGFLGSDIYGSTLGVIGMGRIGQALARRARGFGMQVIYHNRSRVAPEIEAELAAQYVSKDELLARADHVVLVLPYTKENHHTIGAAELAKMKRTATLTNIARGGIVDDAALAVALRDGTIAAAGLDVFEGEPSVHPALLEVPNVVLTPHIASATEKTRRAMANLAADNLIAALGEGPRAGQPPNPINPDVIGKPRA

SEQ ID NO: 28049 - protein, 211 aa, Triticum aestivum
QIQKPLKPSLRPPLIPNEDESEKQEVEEGFFTSLGKLIGGAKSSVAEIVGAAFSRKKRPSVHHYQQGRASPWPVQESYAIPRDETPPVVDTRTPTPRKNYAFMSKEPEKIHHIRQGRAPYNGWNNGESPQQQQQQQQQQVHHQYLQHNRQYSLGPQTFYEPSCEAANEIVFGAVQEVDSARRAVEIKPVNHCDAAAYEQGGLRYRSSGYMG

SEQ ID NO: 28050 - protein, 189 aa, Desulfovibrio desulfuricans G20
MMVSKLNPWNWFKKESEQEKTLPVKQTERGAREYASPLDHFHAEFDRMVDSMFSGFGMPSPRRLFDAASPMLGKSVIKPKVDIYGTDKEYVVEVDLPGIEEKDLSVELKDDVLILSAEKKHEEKTEEKGYYRVERSYGSFRRVLNVPDDADKEGINAKLNKGVLRITMPRNKAIETESRKIAIESSKED

SEQ ID NO: 28051 - protein, 487 aa, Physaria fendleri
MANVKLLYHYLITHFFKLCLLPLIALVASKASSLDQEDLQNLWFHLQHNILTLTILFAVLTFVSAIYFLTRPRPVYLVDYSCHLPPPHQKITVKKIVENVNKNRELDASHNSKIPESSLDFVLRLLERSGLGEETYIPDSLLNVPPIQTMAAAREETEQVIFNAIDNLLANTKVNTRDIGIIIVNSSMFNPTPSLSAMVVNKYKLRSTIKSFNIGGMGCSAGIIAIDLAKDLLQVHKNTYALVISTENLTRNMYVGNNRSMLVANCLFRLGGAAILLSNKSGERRRSKYKLLHTVRTHTGADDKSFRCVQQEDDDMGKTGVSLTKDITSVASRTITKNIATLGPLVLPISEKILFFITYIHKKFVNDKVKHYIPDFKRAIDHFCIHAGGRALIDELEKNLGLLPIDVEPSRSTLHRFGNTSSSSIWYELAYTEAKGRMKKGNKAWQIALGSGFKCNSAVWVALCDVKPSVNSPWEHCLDKYPVKLDL

SEQ ID NO: 28052 - protein, 143 aa, Populus tomentosa
MISPSFISPLLTLAVVLAVTITPLISASGGFCQEKMATLGGVHDSQSSQNSAEIDSLARFAVDEHNKKENAILEFARVVKAKEQVVAGTMHHLTIEAIEAGKKKLYEAKVWVKPWLNFKELHEFKDAGDVPVFTSSDLGVKRG

SEQ ID NO: 28053 - protein, 437 aa, Candida albicans SC5314
MYKTQLIKSSTQARFLAVRQLSSTSQLLKWNDIPLAPPDKILGISEAYNNDSNPQKVNLGVGAYRDNSGKPIIFPSVKKAEEILLGKETEKEYTAIVGSKNFQSIVKNFIFNNSNKDANGKQLIDDGRIVTAQTISGTGSLRVIADFLNRFYSNKKILVPKPTWANHVAVFKDAGLEPEFYSYYETSKNDLDYANLKKSLTAAPEGSIVLLHACCHNPTGMDLTSEQWDEVLQIVQDKKFFPLVDMAYQGFASGKPFEDIGLIRKLTKLANENKIPSFALCQSFAKNMGLYGERTGSISIINSSGEASKAVESQLKKLIRPIYSSPPIHGSKIVEVIFDESSGLLPQWLDELDKVVGRLNTVRSKLYEKLDKSNYNWDHLLKQRGMFVYTGLSPEQVIRLRNEYSVYATEDGRFSISGINDNNVDYLANAINEVIKN

SEQ ID NO: 28054 - protein, 545 aa, Oryza sativa
MDSARSWFQKFQPRDKSKSPAVAASHGKDPGKPPIDDAPSSATKQRVAAAKQYIENHYKTQMKSLQDRKERRWMLERKLQDAEVPVEEQNNILKHLEKKETEYMRLQRHKMGVEDFELLTIIGRGAFGEVRLCREKASKNVYAMKKLKKSEMLRRGQVEHVKAERNLLAEVDSAFIVKLYYSFQDEEYLYLIMEYLPGGDMMTLLMRKDTLTEDEARFYIAETVLAIESIHKHSYIHRYQISVPKFWDIKPDNLLLDRSGHLKLSDFGLCKPLDSSNFPNLNEPDYTSTKGTKPLPDSSSRLSSSALKRTQQEQLSHWQKNRRMLAYSTVGTPDYIAPEVLLKKGYGMECDWLVSYLIVNWRSHLKFPEEAKLSPEAKDLISKLLCNVEQRLGTKGAHEIKAHPWFRGLPWERLYQMKAAFIPEVNSELDTQNFEKFEETGAQIQSSSKSGPWRKMLPSKDANFVGYTYKNFEIVNDDEVAGIAELKKKSSKSKRPTIKTLFGIEHYYYLLVPYTPCTVFHDMFNLLLSLKQRAWMKMSLFKEVS

SEQ ID NO: 28055 - protein, 422 aa, Alkalilimnicola ehrlichei MLHE-1
MSSSPSPRFVSRLTRNTLVLILAGGRGSRLMDLTTWRAKPAVPFGGKFRIIDFTLSNCINSGIRRIGVLTQYKAHSLIRHLRLGWGSLRGDFGEFVEILPAQQRTEGSWYRGTADAVYQSLDIVRMHDPDYVLILAGDHVYKMDYGPMLARHVETGADVTVGCLEVPVEEASAFGVMAVDGDNRVVRFQEKPADPPSIPGQSDRALASMGIYIFNRAFLFNQLIADARKESDHDFGKDIIPSLIDQARVIAFPFRDAATGGQAYWRDVGTIDAFWRTNLELVGVNPQLNLYDKEWPIWTHQEQLPPAKFVFDDDDRRGMAVDSMVSGGCIISGAYLRRSLLFSSVVVEDGSRVEDAVILPEAHIEPGCRIRKAVIDKHCRLAAGTVIGEDPEEDARRFHLSPGGVVLVTPDMLGQEIHNVYT

SEQ ID NO: 28056 - protein, 335 aa, Methanosarcina acetivorans C2A
MATIIYDNETTFDALKDKTIAIMGYGSQGHAHARNLHESGLNVVVGLRKGSSSWAKAESDGLKVMTVEEAAKAADVIMILLPDEKQASVYYSQIEPSLEAGNALVFAHGFNIHYNQIVPPKDVDVFMVAPKGPGHIVRRTYTEGIGVPGLIAVYQDATGKARDLALAYAKGIGATRAGVYETTFREETETDLFGEQVDLCGGLSALIKTAFEVLVEAGYQPEMAYFETCHEVKLIVDLIYEGGLERMWHSVSNTAEYGGMTVGPRIINEESREAMYEALARIQNGEFAKEFVLEGMVNHPVLKAMERQEKEHPLEVVGKEIRANIPWLNKKIDDD

SEQ ID NO: 28057 - protein, 268 aa, Medicago truncatula
GKDGEGTSGINTVDDDDDSFEYLQELNFVPYETLLQNNMNTNGFVASFVMQQVPVIVMQRPQPQPPQALMQNRYVETVIHEKLKSVRITWIHGGTNVSIAGSWNNWETVEALLRVGQHFVIVKTLPISIYYYRFIVDGQWTHAPEFPSDLDDSGYVYNILDLQDYIPQRLQKSEDPESPPSSYDNIFLNEDEFNKPPPELPPQIPVTITQEEASTSNIDQVPSSTHVDLNHLYINKSDGDQFVTLRSTHRFQHKFVTTILYKSLQRER

SEQ ID NO: 28058 - protein, 457 aa, Vibrio cholerae non-O1
MHRYKKEASNLIKLATPVLIASVAQTGMGFVDTIMAGGVSAIDMAAVSIAASIWLPSILFGVGLLMALVPVVAQLNGAGRQHKIPFEVHQGLILALLVSIPIIAVLFQTQFIIRFMDVEEAMATKTVGYMHAVIFAVPAYLLFQALRSFTDGMSLTKPAMVIGFIGLLLNIPLNWIFVYGKFGAPELGGVGCGVATAIVYWIMLLLLLFYIVTSKRLAHVKVFETFHKPQPKELIRLFRLGFPVAAALFFEVTLFAVVALLVAPLGSTVVAAHQVALNFSSLVFMFPMSIGAAVSIRVGHKLGEQDTKGAAIAANVGLMTGLATACITALLTVLFREQIALLYTENQVVVALAMQLLLFAAIYQCMDAVQVVAAGSLRGYKDMTAIFHRTFISYWVLGLPTGYILGMTNWLTEQPLGAKGFWLGFIIGLSAAALMLGQRLYWLQKQSDDVQLHLAAK

SEQ ID NO: 28059 - protein, 312 aa, Triticum aestivum
LFDDAKSKDIEDVLILSGDHLYRMDYMDFVQSHRQRDAGISICCLPIDGSRASDFGLMKIDDTGRVISFSEKPRGADLKEMEEAEKKPYIASMGVYIFKKEILLNLLRWRFPTANDFGSEIIPAAAREINVKAYLFNDYWEDIGTIKSFFEANLALAEQPSKFSFYDASKPMYTSRRNLPPSMISGSKITDSIISHGCFLDKCRVEHSVVGIRSRIGSNVHLKDTVMLGADFYETDMERGDQLAEGKVPIGIGENTSIQNCIIDKNARIGKNVTIANAEGVQEADRASEGFHIRSGITVVLKNSVIADGLVI

SEQ ID NO: 28060 - protein, 287 aa, Juglans regia
MAKDIEAAGQGGFSAKDYHDPPPAPLIDAEEFTQWSFYRAIIAEFIATLLFLYITVLTVIGYKSQTDKAKGGDDCGGVGILGIAWAFGGMIFVLVYCTAGISGGHINPAVTFGLFLARKVSLVRAVFYMAAQCLGAVCGCGLVKAFQKAYYSKYGGGANELADGYSKGTGLAAEIIGTFVLVYTVFSATDPKRNARDSHVPVLAPLPIGFAVFMVHLATIPITGTGINPARSFGAAVIYGKDKAWDDQWIFWVGPFIGAAIAAFYHQYILRAAAAKALGSFRSSSHM

SEQ ID NO: 28061 - protein, 723 aa, Emericella nidulans
MEHIKNTFEKVKREKRAALVAYITAGYPTIEESVDILLGLENGGADIIELGVPFTDPIADGPTIQKANTKALANGVTVSTVLEMVQHQRNRGLKAPIMLMGYYNPMLSYGEERMLRDCKEVGVNGFIMVDLPPEEAVRFRDLCTSTGLSYVPLIAPATSESRMKLLCKIADSFIYVVSRMGVTGATGTLSSNIPELLARVHKWSGNVPTALGFGVSTREHFLSVQEISEGVVIGSQIITVLGEAPAGQAAQKAEEYLSSVTGRKLERDTSGALTREVNVLEPVLKIETPPMSQPTDVITEKDTPSGPGLGDQLEALNGGGSSSATPARFGEFGGQYVPESLMDCLAELERGFDSALKDPSFWEEYRSYYPYMGRPSSLHLATRLTEHVGGANIWLKREDLNHTGSHKINNALGQILLARRLGKTRIIAETGAGQHGVATATVCAKFGMKCVVYMGAEDVRRQALNVFRMKLLGASVVAVDAGSRTLRDAVNEALRAWVVDLDTTHYIIGSAIGPHPFPTIVRTYQSVIGEETKQQLQEQIGKLPDAVVACVGGGSNAVGSFYPFSKDTSVKLLGVEAGGDGIDTNRHSATLSGGSKGVLHGVRTYILQDEHGQVSETHSISAGLDYPGVGPELSNWKDSDRAHFIAATDAQALSGFRTMAQTEGIIPALESSHAIWGAQELAKTMKGKGDIVLTVSGRGDKDVESVAESLPKLGPQIGWDLRF

SEQ ID NO: 28062 - protein, 554 aa, Bacillus subtilis subsp. subtilis str. 168
MKKAWWKEAVVYQIYPRSFKDSNGDGIGDIQGIRTKLSYIKELGADVIWICPLYDSPNADNGYDIRDYQNILSEFGTMEDFDELLGDIHDLDMKLIMDLVVNHTSDEHPWFIESRSSIHSEKRDWYIWKDGKNGKTPNNWESIFGGPAWEYDQKTSQYYLHLFDKKQPDLNWENEKVRNAVYDMINWWLDKGIDGFRVDAITHIKKKEGFPDMPNPKGLDYVPSFPYHMNADGIMDLLTELKENTFSRYPIMTVGEANGVAPKEAADWAGEKNGIFSMIFQFEHLGLWDVEINESIDIVAFKRILTDWQDSLEGIGWNALFMENHDQPRSVSVWGDDGVYLKESAKALSAVYFLMKGTPFIYQGQELGMTNVAFPSIEDYDDVALKRLYETKTAKGTSHEDVMKIVWKKGRDNSRTPMQWNAGPYAGFSEAKPWIGINENYKWLNAEAQKNDKTSVYHFYKSLIKLRQTYDVFINGTYELILPEDQQIFAYLRKNESHTALIAANLTGTPALFRHSGLPLSSDALVLSNIETEPHKHMTSVLLKPYEARIYLWC

SEQ ID NO: 28063 - protein, 774 aa, Vibrio fischeri ES114
MTTESKTKTVTHILGYPRVGAQRELKFAQEKYWRGEIEQKELLAVGSELRQRHWKDQSASGLDFVTAGDFAWYDHVLTTSLLLGHVPARHNNGFPDLDTLFKVGRGQSQNSCGCGEAASDMTKWFNTNYHYIVPEFSKNDKFNVSWSQLFDEIAEAQKQGHNVKPVLLGPLSYLWLGKEVNDEEVEQGFDRLSLLPRLLTAYQAIFSKLSALGVEWVQIDEPILALELPKAWADSFKLAYQVIQSDVKLLLTTYFDGVEHHLDKITKLAVNGLHIDVSAAPDQLDAIVSALPKEWVLSVGAVNGRNVWRADLERLHERLQPVKEALGDKLWIASSCSLLHSPVDLDQETELSKETLQWFAFAKQKLREVTLLADALDGNQNAILACHQYSQPLRERESAEHINKPAVQQRLAAITPALAERAEAYSVRAQHQAEKLGLPLLPTTTIGSFPQTSDIRQQRSAYRTGKLNEQDYVTAMKGHIADAVERQERLDLDVLVHGEAERNDMVEYFAENLNGFQATRFGWVQSYGSRCVKPAIVVADIEREAPITVSWTQYAQSLTTKQMKGMLTGPVTILGWTFPREDITRKEIAQQLALVLRDEVSDLQQAGINIIQIDEPAIREGLPIKKSDQKAYLDWAVEAFKISAASAKSETQIHTHMCYSEFNEIIESVAALDADVITIETSRSNMELLKAFEDFNYPNEIGPGVYDIHSPNIPSQEWIVDLIETAAARVPVERLWVNPDCGLKTRNWKETEAALENMVKAAKALRKKWQSNAA

SEQ ID NO: 28064 - protein, 190 aa, Zea mays
  misc_feature (82)..(83): Xaa can be any naturally occurring amino acid
  unsure (1)..(190): unsure at all Xaa locations
MGGGFRVLHLVRPFLAFLPEVQSADRKVPFREKVIYTVISLFIFLVCSQLPLYGIHSTTGADPFYWMRVILASNRGTVMELXXITPIVTSGLVMQLLAGSKIIEGDNNVREDRALLNGAQKLLGIQIAIWWRLLYMFLSGMYGPRWNRLGWLENAILDHPFSFFLCWETMGILPLGELPSQKGILGLGIK

SEQ ID NO: 28065 - protein, 378 aa, Arabidopsis thaliana
MKGISSVSQSINYNPYIEFNRPQLQISTVNPNPAQSRFSRPRSLRVLSLSADPSANRNPKSAVDAHAPPLVVVGSANADIYVEIERLPKEGETISAKTGQTLAGGKGANQAACGAKLMYPTYFVGRLGEDAHGKLIAEALGDDGCGVHLDYVRSVNNEPTGHAVVMLQSDGQNSIIIVGGANMKAWPEIMSDDDLEIVRNAGIVLLQREIPDSINIQVAKAVKKAGVPVILDVGGMDTPIPNELLDSIDILSPNETELSRLTGMPTETFEQISQAVAKCHKLGVKQVLVKLGSKGSALFIQGEKPIQQSIIPAAQVVDTTGAGDTFTAAFAVAMVEGKSHEECLRFAAAAASLCVQVKGAIPSMPDRKSVLKLLKFSI

SEQ ID NO: 28066 - protein, 382 aa, Arabidopsis thaliana
  misc_feature (213)..(213): Xaa can be any naturally occurring amino acid
  unsure (1)..(382): unsure at all Xaa locations
MSNHLQDPLTTYPKPGLTKEEQEIDEKMVSLQAESIVNAVAFPMVLKAALELGVIDTIAAASNGTWLSPSEIAVSLPNKPTNPEAPVLLDRMLRLLVSHSILKCCMVESRENGQTGKIERVYAAEPICKYFLKDSDGSGSLSSLLLLLHSQVILKTWTNLKDVILEGKDAFSSAHDMRLFEYISSDDQFSKLFHRAMSESSTMVMKKVLEEYXRGFEDVNTLVDVGGGIGTILGLITSKYPHIKGVNFDLAQVLTQAPFYPGVKHVSGDMFIEVPKGDAIFMKWILHDWGDEDCIKILKNCWKSLPEKGKVIIVEMITPMEPKPNDFSCNTVLGMDLLMLTQCSGGKERSLSQFENLAFASGFLLCEIICLSYSYSVIEFHK

SEQ ID NO: 28067 - protein, 267 aa, Silene latifolia
MDSITDEELYGSTSFTTKGRRTKRRRVVTTSTHGAENCLGNISYGSSSNSATPSTIDDHEIMSEVTTEEEDLANCLILLAQGLQNRPPSNINIGSSGSYERPSLRKLIVIDNNDVYECKTCNKTFSSFQALGGHRTSHKKIVKPTPPPTPPPKPEDGQQNEGATNKSRSLRNIDTAKMHECSICGSEFRSGQALGGHMRRHRSSAVAPTVVASSSTSTAEIDSGGTRNILSLDLNLPAPHDHEDDDHMVETLFHVILPTPALVDCHY

SEQ ID NO: 28068 - protein, 601 aa, Methylococcus capsulatus str. Bath
MKHSASESKPLSSGLAIYRRLLRYGFPYWRSFCVAVVAMIAYAAITPFFAKLIQPLIDGSFIDNDPTVLRQVSLMLIGLSVLRGIAGFLSEYCSGSVGRRVIADLRRDIFDQLLNLPCSFYDNASGGQLLSKLLYNTEQVSASLQQGIITCIREGFTVIGLMALMVYQNPVLSLVFLVLGPVLGLSVRFVSKRFRRLSMRIQESMGKVSHVTQEVIDAQRIVKVFNGKDYEAAKFATENDRNQKRQMKLIATDALGGGVIHLISVAGVAGILYVVSLDSVRQTITPGSLMAFIAAMAMMLSPIRRLSQVVSVMQRGIAAGDSIFAMLDLPRERDRGRISLKRARGSIEYRHVSLVYDDRHGAAVDDVSLVIPAGKTVALVGQSGSGKTSLVRLLPRLYEATAGEILIDGHDIRELTLESLRRQIAYVGQEVTLFNDTVASNIAYGCLDRVGLDAVREAARAANALDFIETLPQGFDTLVGQQGIVLSGGQRQRIAIARALLKNAPILILDEATSALDAESERYVQQALEVLMQNRTTLVIAHRLSTIQNADQICVMRGGRIIECGTHAQLMAARGGYADLYAMQFGYSSVPEAVAVHAVRR

SEQ ID NO: 28069 - protein, 309 aa, Silene latifolia
MEKQRCKLCYRRFSNGRALGGHMRSHMMNMPVTRKPELPVSSWTSESEPEEGEIIKGNSSSVTLQDRGSDTESTKNVTRMRRSKRARKPVSSILLRNSHDYKLSWDSFDNYYNDVEQQTGSSSISEVTSEEDVAFCLMMMSRDKWHGNEHGHRHGYEKEFRNNVEIEPISYKKKYKCDTCNKVFRSYQALGGHRASHKKTRVTAPDDDHREKNRNVVATKEGEKKIHKCPICFRVFASGQALGGHKRSHVIDNPIKSGKIIHQIPKMKMKTKIITENFIDLNLPAPIDDDEEEEIVSQIATSSVSHVHL

SEQ ID NO: 28070 - protein, 356 aa, Aquifex aeolicus VF5
MRIVFKIGSNLLETDEGDIDLSFLSKLAEGIKKLHSFGDKVLIVSSGAVLSGAKKLGIKEKPKDLTLKQALASVGQSYLMHLYDTIFSNYGLKVGQVLLTKDVFSKEKEERFKNAKSTLEKLLELGVVPVINENDAVAVEELVFGDNDFLAVYVSFMVNADLLVIFSSAGGLKDDKDRIIPVVEDIEKVFKYVRGTGTSFGTGGMRSKLEATRLATTLNIPVIITSKEENILDLRNLKTKGTLFKPSKRKLRNALKVIATLEEPKGIIVVDRGAQEALKAGKSLLPAGVVSVQGNFKRGDVVSIQNEEGLIIGKGKVNFSSEEIEKIKGLKTSEVRKLLNTTKDEVIHRDNMVIFL

SEQ ID NO: 28071 - protein, 597 aa, Oryza sativa
MSSPSSPPPANQTATPPPANQTAAPPPASNNSSSPPAPGSLSPPSLTPPAAPSPPSTTPSSPAAAAAASSSGLTTPVVVGIVVGGLVVLLLVTILLVCLFKKKKRHHHHHPPPPPPPHLLHYYGHPPPPPPPPPPFKGDHYGGVYQNWQQNGPPPPPDHVLKKVPSHPSPPPPPAPLNVHSGGSGSNYSGGDNSQPLVSPGAALGFSRCTFTYEDLSAATDGFSDANLLGQGGFGYVHKGVLPNGTEVAVKQLRDGSGQGEREFQAEVEIISRVHHKHLVTLVGYCISGGKRLLVYEYVPNNTLELHLHGRGRPTMEWPTRLRIALGAAKGLAYLHEDCHPKIIHRDIKSANILLDARFEAKVADFGLAKLTSDNNTHVSTRVMGTFGYLAPEYASSGQLTEKSDVFSFGVMLLELITGRRPVRSNQSQMDDSLVDWARPLMMRASDDGNYDALVDPRLGQEYNGNEMARMIACAAACVRHSARRRPRMSQVVRALEGDVSLDDLNEGVRPGHSRFLGSYNSNEYDTGHYNEDLKKFRKMAFGSGNLESSQQTQPTEFVPNRSVSMGDARQIPETEMEMGSLKKDGDSNGTRDSQAS

SEQ ID NO: 28072 - protein, 287 aa, Oryza sativa
HRISNPPKNPPQKKKKGSRLSSRLESSNSSRRREEQEEEEEMFPGLIHHHRLLDADVGGGGGGSSAGLVLTADPKPRLRWTADLHDRFVDAVAQLGGPDKATPKTIMRTMGVKGLTLFHLKSHLQKYRLGKQSGKEMAEQSKDASYILGAQSGTNLSPTVPTPDLKESQELKEALRAQMEVQRKLHEQVEVQRHVQIRMEAYQNYIDTLLEKACNIVSEQLNGFSISDHDLTSAGVMLSSSDTLSPSIFHQLSVSSISLHSPGGKSSPFAADADLFFQKAPEKRKSY

SEQ ID NO: 28073 - protein, 344 aa, Sulfolobus solfataricus P2
MEAVILHGGQGTRLRPLTHTGPKQLIKVAGKPVSQWVLEQIRDAGIRDVIIVLGDNAPTRVVEYYGDGSKFGVRITYVYQGKARGLADAVYKVKDVVSDKFLVYLGDNLVPYDLSKFSSFKGSASILLAKVNNPNRFGVAVIKDGRVVKLIEKPKEQISDLALVGVYGFTREIFDVIESLKPSWRGELEITDAIQGLIDRGREVNYEIIQGWWKDTGTPKDILEANAFLLDRYAESRIEGVVDNSTVDGKVIIEKGAVIKNSVVRGPTYIGRDTKIINSYIGPFTSIGDQSEITDSEIEYSVILDGVKIRGVTLMDSLIGNNSTVEKGGRWQKLIIGENSSVIL

SEQ ID NO: 28074 - protein, 606 aa, Zea mays
MDTHIGSVNGAASNQTVGCPASAPGCPMASTPAQPAATLSAGEASLGRHLARRLVQVGVNDVFAVPGDFNLTLLDHLIAEPGLRLVGCCNELNAGYAADGYARARGVGACAVTFTVGGLSVLNAIAGAYSENLPVICIAGGPNSNDYGTNRILHHTIGLPDFSQELRCFQTVTCHQAVVNNLDDAHEQIDTAIATALRESKPVYLSISCNLPGLPHPTFSRDPVPFFLTPRTSNKMGLEAAVEATVEFLNKAVKPVLVAGPKLRVAKAGKAFVDMVDASGYAYAVMPSAKGLVPETHPHFIGTYWGAVSTAFCAEIVESADAYLFAGPIFNDYSSVGYSFLLKKEKAIIVQPERVIVGNGPAFGCVMMKEFLSELAKRVNKNTTAYENYKRIFVPEGQPLESEPNEPLRVNVLFKHVQKMLTGDSAVIAETGDSWFNCQKLKLPEGCGYEFQMQYGSIGWSVGALLGYAQGANHKRVIAFIGDGSFQVTAQDVSTMLRCEQNSIIFLINNGGYTIEVEIHDGPYNVIKNWNYTGFVDAIHNGLGKCWTSKVKSEEELTAAIETALGEKKDCLCFIEVIAHKDDTSKELLEWGSRVSAANSRPPNPQ

SEQ ID NO: 28075 - protein, 111 aa, Salmonella enterica
ISGGHLNPAVTIALWLFACFPKQKVLPYIIAQFAGAFGGALLAYVLYSSLFTEFETAHHMVRGSVKSLQLASIFSTYPAAALNVWQAALVEVVITSILMGMIMALTDDGNG

SEQ ID NO: 28076 - protein, 410 aa, Burkholderia vietnamiensis G4
MSRRRVVVTGLGLISPVGNNVADGWANLVAGKSGIATVTKFDASNLACHFAGEVKGFNVEEYIPAKEARGMDTFIHYGIAAGVQAIRDSGLEVNEANAERIGVLVGSGIGGLPMIEDTHQTYVDRGPRRISPFFVPGSIINMISGHLSIMFGLKGPNLAAVTACTTGLHSIGLAARLIQAGDADVMVAGGAESTVSPLGIGGFAAARALSTRNDDPATASRPWDKDRDGFVLGEGSGVMVLEEYEAAKARGAKIYAEVSGFGMTGDAYHMTAPNMDGPRRCMVAALRDAGVNPDEVQYLNAHGTSTQLGDKNESDAVKAAFGEHAYKLAVNSTKSMTGHLLGGAGGLESVFTVLALHNNVSPPTINIFNQDPECDLDYCANTARDLKIDVAVKNNFGFGGTNGTLVFKRV

SEQ ID NO: 28077 - protein, 545 aa, Legionella pneumophila str. Lens
MTKYIFITGGVVSSLGKGIAAASLAAILEARGLRVTLIKLDPYINVDPGTMSPFQHGEVFVTNDGAETDLDLGHYERFVKTTMTKRNNFTSGKIYENVIKKERRGDYLGGTVQVIPHITNEIKRCIKLGADAFDVAMVEIGGTVGDIESLPFLEAIRQMRIELGSQRAIFIHLTLVPYIATSGETKTKPTQHSVKELRSIGIQPDVLICRSEKPLSMADRAKIALFTNVEKEAVISLEDANSIYQIPMILHAQHLDEIVVKKLSLEAKQADLSEWQRVVDMQAVQTMTVKIAMVGKYTELNDAYKSINEALLHAGIHTETKVEIIYFDAEMIEKHGALLLESIDAILVPGGFGERGVEGKIKAIQYAREHKVPFLGICLGMQTAVIEFARNVVGLTGANSTEFNKETLYPVLGLISEWMDADGSKQTRDESTDLGGTMRLGGQYCHLAEGTLARKVYGKSQIIERHRHRYEVNNKYVDSLVKHGLIISGRSADNSLVEMIELADHPWFLACQFHPEFTSNPRDSHPLFKEFVFAARIHHQEKDKK

SEQ ID NO: 28078 - protein, 546 aa, Burkholderia sp. 383
MAAKDVVFGDSARSKMVEGVNILANAVKVTLGPKGRNVVLERSFGGPTVTKDGVSVAKEIELKDKLQNMGAQMVKEVASKTSDNAGDGTTTATVLAQSIVREGMKYVASGMNPMDLKRGIDKAVAAAVEELKKISKPCTTNKEIAQVGSISANSDTSIGDRIAEAMDKVGKEGVITVEDGKSLADELDVVEGMQFDRGYLSPYFINNPEKQVAVLDNPFVLLHDKKVSNIRDLLPVLEQVAKAGRPLLIIAEDIEGEALATLVVNNIRGILKTVAVKAPGFGDRRKAMLEDIAILTGGQVIAEETGLTLEKATLAELGQAKRIEVGKENTTIIDGAGEAVNIEARVKQVRAQIEEATSDYDREKLQERVAKLAGGVAVIKVGAATEVEMKEKKARVEDALHATRAAVEEGIVAGGGVALIRARTAIAALTGANADQNAGIKIVLRAMEEPLRQIVTNGGEEASVVVAAVAAGTGNYGYNAATGEYVDMVEAGVVDPTKVTRTALQNAASVAGLLLTTDAAVAELPKEDAPMPGGMPGGMGGMGMDM

SEQ ID NO: 28079 - protein, 497 aa, Burkholderia vietnamiensis G4
MTKITLRKVLAAAALCACLPFVPQTASAVTPPPGSLPDFADLVEKVGPAVVNIRTTANVPVPGPRGSLPPGFDNGDMSEFFRRFFGIPLPQAPGNGGGSPKGAPTPDNPPDTEQNRGVGSGFIVSADGYVMTNAHVVDDADTIYVTLTDKREFKAKLIGVDDRTDVAVVKIQAANLPVVAIGDSTKVRVGEWVVAIGSPFGLDNTVTAGIVSSKSRNTGDYLPFIQTDVAVNPGNSGGPLINMQGEVIGINSQIYSRTGGFMGISFAIPIDEAMRVADQLKATGKVTRGRIAVAIGEVTKDVADSIGLPKAEGALVSSVEPGGPADKAGIQPGDIILKFNGRSVDAASDLPRMVGDTKPGAKATVTVWRKGQARELPITIAETPAETTAKAEQRKTAPQKPRQANSLGLTVSDIPAEQMKSLKLKNGVQIDGVDGPAARAGLQRGDIVLRVGDTDITSAKQFADVTAQLDPQKAVAVLVRRGDNTQFVPVRPRPSQK

SEQ ID NO: 28080 - protein, 383 aa, Oryza sativa (japonica cultivar-group)
MVSILQLQTRTEASPASSASAAATRIFAVRRQQQEQEGEEEEEEFEFQERMDLSGAQGELPIPMHASAAASPFAGMGAHGGAGGGHVVELHRHEHVGNNGQAMAMASPPPTNVAVAAEQEGSPVAGKKRGGMAVVGGGGGVAVKYRECLKNHAAAIGGNATDGCGEFMPSGEEGSLEALKCSACGCHRNFHRKEADDLDADSCAAALRAAAGRHHHLLGPALPHHHHKNGGGLLVAGGDPYGAAYAAARALPPPPPPPPHGHHHHHQIIMPLNMIHTSESDEMDVSGGGGGVGRGGGSSSSSKKRFRTKFTAEQKARMLEFAERVGWRLQKLDDAMVHHFCQEIGVKRRVLKHAVGDVTVAVMSDHLTSKIKGVKTEEIKKGV

SEQ ID NO: 28081 - protein, 219 aa, Griffithsia japonica
MGSTEGITGPLADYECTAIAKAPAVTQLNPPHRLLCGPGPGNAHPRVHAAMSLPEIGHLDPAFISMMEDIKSLLRYAWQTNNEFTIPVSGTGSAAMEACMANLVEAGDKVLIFSNGYFGPRLADMASRYGGEVIEEKAPWGTVFSFDAIKASVEKHKPVLACLVHAETSTGAAQPLEGVGKLCHDNGALLVADTVTSIFGVPCHLDKWGSGRRVRWYPK

SEQ ID NO: 28082 - protein, 460 aa, Zea mays
MAAGTGGGGSLLLRGFLSLFFLLFLHIGHGGSCCFSPGAAARAQQEEDEAAEADGKVVGGGGGSNKRRKISPLIFSPAASSTAVTASDDSAGAPRRHVSSLAASLRLYLHRIFRSGSTGTKNGGTVVAGRDGEEEAVATTVSSPIAQSLPHQPSSTSVVLSTPSSPCAWSSPLMMSPLSVRSLSATPFPSSPQQKLLQASRQSFRSFAARGDVFPCKVCGEVLGRPQLLELHQAMKHSLSELTHLDSSLNIIRMIFLAGWRPAASGAGAGAGAGEAPAVRRVLRIHHNPRALARFEEYRDLVRARAARRCGGEGAVVEERCIADGNERLRFHCSTMLCSLGGGVCGSPYCCVCSTLRHGFAGKQADVDGIATYASAWTAHASLPADVEREFAFLQVRRAMLVCRVVAGRVARGPADDKVAYDSMVPVRGGVGGGTGDDVELLVYNPRAVLPCFVILYSSS

SEQ ID NO: 28083 - protein, 317 aa, Zea mays
MENPAPSIVVPPIAAPVSANFSRLAFRNLYIRRTGPGSREMVTVEGRRGSSDQTGDMRYVSDFPVYDGRGSDAVLVARVQGVTTTFGNSNQFFTVAFEAGRFFGSTLLTEGVVTDGSDEWAIYGGTGEFVGARGVVKRRYLADRDGAGNTDELSMQVFCPVFGSSQQPNKQARAIGLWGGEGGSAQDITTTEPPQRLHSLTVRAGGAVDSIEFTYTDRGGQRRAAGRWGGLGGNLRTIDLGDAEDVREVSGTYGTFEGATTLTSFRILTSSRTWGPWGVENGTRFCITAPVGSSIVGFYGRATSRLVAALGVYLRRL

SEQ ID NO: 28084 - protein, 447 aa, Corynebacterium glutamicum ATCC 13032
MTVDEQVSNYYDMLLKRNAGEPEFHQAVAEVLESLKIVLEKDPHYADYGLIQRLCEPERQLIFRVPWVDDQGQVHVNRGFRVQFNSALGPYKGGLRFHPSVNLGIVKFLGFEQIFKNSLTGLPIGGGKGGSDFDPKGKSDLEIMRFCQSFMTELHRHIGEYRDVPAGDIGVGGREIGYLFGHYRRMANQHESGVLTGKGLTWGGSLVRTEATGYGCVYFVSEMIKAKGESISGQKIIVSGSGNVATYAIEKAQELGATVIGFSDSSGWVHTPNGVDVAKLREIKEVRRARVSVYADEVEGATYHTDGSIWDLKCDIALPCATQNELNGENAKTLADNGCRFVAEGANMPSTPEAVEVFRERDIRFGPGKAANAGGVATSALEMQQNASRDSWSFEYTDERLQVIMKNIFKTCAETAAEYGHENDYVVGANIAGFKKVADAMLAQGVI

SEQ ID NO: 28085 - protein, 158 aa, Xanthomonas campestris pv. campestris str. ATCC 33913
MNIVRYPQWPTHALQNEIKQVFDRFFEQSGDTDESAVVTAQWVPRVDIKEEANQFVLYADLPGIDPSQIEVQMDKGILSIKGERKSESSSETERFSRIERRYGSFHRRFALPDSADADGITADGRNGVLEIRIPKRPAATPRRIQVGGGQDGGGTTVQ

SEQ ID NO: 28086 - protein, 373 aa, Triticum aestivum
AGSHRRPAAACFSLQWCLRAADGRTDGRRGSGMERYEVIKDIGSGNFGVAKLVRDVRTKELFAVKFIERGHKIDENVQREIMNHRSLRHPNIVRFKEVVLTPTHLAIVMEYAAGGELFERICGSGRFSENEARFFFQQLLSGVSYCHSMQICHRDLKLENTLLDGSEAPRLKICDFGYSKSSVLHSQPKSTVGTPAYIAPEVLSRREYDGKVADVWSCGVTLYVMLVGAYPFEDPDEPKNFRKTITRILSVQYSVPDYVRISMECRHLLSRIFVANPEQRITIQEIKNHPWFLKNLPIEMTDEYQMSLHMVGVNAPPQTLEEIMAIIQEARIPGDGSKFAGQLSVPGLGSMELDDIDDVDADVEDSGDFVCAL

SEQ ID NO: 28087 - protein, 364 aa, Zea mays
MEKYELLKDIGSGNFGVARLMRNKDTKELVAMKYIPRGLKIDENVAREIINHRSLRHHNIIRFKEVVLTPTHLAIVMEYAAGGELFDRICSAGRFSEDEARYFFQQLICGVSYCHLMQICHRDLKLENTLLDGSPAPRLKICDFGYSKSSLLHSKPKSTVGTPAYIAPEVLSRREYDGKMADVWSCGVTLYVMLVGAYPFEDPDDPKNFRKTIGRIVSIQYQIPEYVHISQDCRQLLARIFVANPAKRITIREIRNHPWFLRNLPRELTEAAQAKYYKKDNSAPTFSDQTVEEIMKIVEEARTPPQSSTPVAGFGWAEEEEQEDGKRSDDDEQYGEDEDYDGEDEYDKQVKHVHASGDFQHLLK

SEQ ID NO: 28088 - protein, 38 aa, Brassica napus
TAPDTKNPLSDPYPFNLMFQTSIGPSGLIPGYMRPETH

SEQ ID NO: 28089 - protein, 324 aa, Silicibacter sp. TM1040
MGLLVDGKWEDVWYDTKSHGGAFKRSEAQFRNWLTADGSPGPDGQTGFKAENGRYHLYVSYACPWAHRTLIFRKLKGLEDHISVSVVHPDMLDKGWEFKTDADGATGDALFGFDYMHQIYTKADPSYSGRVTVPVLWDKQENTIVSNESAEIIRMFNSAFDEITGNTLDFWPEELREPIETVNKRIYDTVNNGVYKSGFATSQEAYDAAVVPLFDSLDWLEDILSQHRYLMGEHLTEADWRLFTTLVRFDPVYHLHFKCNRRRIIDYPNLWAYTRELYQMPGVAETVVMPHIVRHYHYSHDTINPNRILPINPVLDWEAPHGRG

SEQ ID NO: 28090 - protein, 385 aa, Arabidopsis thaliana
MSEEKVVAVIMVGGPTKGTRFRPLSFNTPKPLIPLAGQPMIHHPISACKKISNLAQIFLIGFYEEREFALYVSSISNELKIPVRYLKEDKPHGSAGALYYFRDRIMEEKPSHVFLLNCDVCCSFPLQGILDAHRRYGGIGTMLVIKVSAEAASQFGELIADPDTKELLHYTEKPETFVSDLINCGVYVFTSDIFNAIEEVYSQIRDTSSNYQSATRSVPADFVRLDQDILSPLAGKKQLYTYENKDFWEQIKTPGKSLKCSALYLSQFRETSPHILASGDGTNRKPTIIGDVYIHPSVKLHPTAKIGPNVSISANVRVGPGVRLISCIILDDVEIKENAVVINSIIGWKSSIGEAVTVEDEVAVIGSIVLQNKTLNVSVQDDIIL

SEQ ID NO: 28091 - protein, 466 aa, Glycine max
SYVGPPPTSGYATDNIIRVLRGERIGTVFHKDAHLWTSIKEVSAHEMAVAARNSSRRLQVLNSEERRKILLAMADALEINESVIRLENGADVADAEEMGYEKALISRLTLRPEKISSLVKSVRMLADMEEPIGQILKRTELADKLILEKISCPLGVLLVIFESRPDALVQIAALAIRSGNGLLLKGGKEAQRSNAILHKVITSVMPDTVGDKLIGLVTSREDIPDLLKLDDVIDLVVPRGSNKLVSQIKGTTKIPVLGHADGICHVYVDKTANIDMAKKIIRDAKIDYPAACNAMETLLVHVDLSRNGGLDELVAELQRAGVQLYGGPRASNLLNISETHSFHLEYSSLACTVEIVDDVFAAIDHIHHHGSAHTECIVAEDSEVAEAFLSQVDSAAVFHNASTRFCDGTRFGLGAEVGISTGRIHARGPVGVEGLLTNRWILRGSGHVVNSDRGVTYTYKDLPVKA

SEQ ID NO: 28092 - protein, 415 aa, Nocardia farcinica IFM 10152
MTEDFQAAPQHANPQHPHGHYPTQPFSGPHPGMPAATPPPQAPARPARTGLVAAAVALALVSGGVGGAVGAVVTRSDDGRAPVTNALDAPKPSVSNVSNAPAGSTQAVAQKVLPSVVMIKVASNRAEGEGSGVVLSSDGLILTNNHVASGGGTGARMEVHFADGSTAPATVVGADPVSDLAVIKAQGRTDLTPIELGTSASLQVGQPVIAIGSPLGLAGTVTTGIVSALNRPVSTSGEGTQNPNAPQPVIDAIQTDAAINPGNSGGALVDYEGKLIGINTAIATLGAGELGGQQSGSIGLGFAIPVDQARRVADELIKTGQATYAQIGIKLRPQDTAALVLEATPGGPAAAAGIPAGAIITKLDDRVIDSGEALIAAVRSHQPGDKVKVTYTDENGNNPKTVEVTLTGAPGDGGR

SEQ ID NO: 28093 - protein, 426 aa, Hordeum vulgare subsp. vulgare
AQAVVQAMQCQVGVRGRTAVPARQPAGRVWGVRRAARATSGFKVLALGPETTGVIQRMQQLLDMDTTPFTDKIIAEYIWVGGSGIDLRSKSRTISKPVEDPSELPKWNYDGSSTGQAPGEDSEVILYPQAIFKDPFRGGNNILVICDTYTPQGEPIPTNKRHMAAQIFSDPKVTSQVPWFGIEQEYTLMQRDVNWPLGWPVGGYPGPQGPYYCAVGSDKSFGRDISDAHYKACLYAGIEISGTNGEVMPGQWEYQVGPSVGIDAGDHIWASRYILERITEQAGVVLTLDPKPIQGDWNGAGCHTNYSTLSMREDGGFDVIKKAILNLSLRHDLHIAAYGEGNERRLTGLHETASISDFSWGVANRGCSIRVGRDTEAKGKGYLEDRRPASNMDPYTVTALLAETTILWEPTLEAEALAAKKLALKV

SEQ ID NO: 28094 - protein, 171 aa, Hordeum vulgare subsp. vulgare
YNIQKESTLHLVLRLRGGMQIFVKTLTGKTITLEVESSDTIDNVKAKIQDKEGIPPDQQRLIFAGKQLEDGRTLADYNIQKESTLHLVLRLRGGMQIFVKTLTGKTITLEVESSDTIDNVKAKIQDKEGIPPDQQRLIFAGKQLEDGRTLADYNIQKESTLHLVLRLRGGK

SEQ ID NO: 28095 - protein, 132 aa, Salmonella enterica
IIWGLGISLAVYLTAGISGGHLNPAVTIALWLFACFPKQKVLPYIIAQFAGAFGGALLAYVLYSSLFTEFETAHHMVRGSVESLQLASIFSTYPAAALNVWQAALVEVVITSILMGMIMALTDDGNGIPKGR

SEQ ID NO: 28096 - protein, 414 aa, Vibrio fischeri ES114
MSKRRVVVTGMGMLTPVGNTVEASWKALLAGQSGIVNIEHFDTTEFTTRFAGLVQDFNAEEYMSKKDARKMDLFIQYGVAAGIQALDDSGFKVTEENAHRIGAAIGSGIGGLGLIEAGYKAFSEKGPRKISPFFVPSTIVNMIAGHMSIIRGLRGPNIAISTACTTGLHNIGHAARMIAYGDADAMLAGGAEKASTELGMGGFGAAKALSTNNENPQGASRPWDKNRDGFVLGDGAGMMVLEEYEHAKARGAKIYCELVGFGMSGDAYHMTSPTPDGSGGALAMEAAMRDAGVTGEQIGYVNAHGTSTPAGDVAEIKGIKRALGEAGSKQVLVSSTKSMTGHLLGAAGSVEAIITAMSLVDQIVPPTINLDDPEEGLDIDLVPHTARKVTDMEYAICNSFGFGGTNGSLIFKKM

SEQ ID NO: 28097 - protein, 488 aa, Lycopersicon esculentum
MACSVDTLAPFLGPNTTNAVAAASYICNQFSGVSDRFVDTGYAIDSTYLLFSAYLVFSMQLGFAMLLAGSVRNTMNIMLTNVLDAAAGGLFYYLFGFAFALGGPSNGFIGRHFFGLKEIPSNSFDYMNFLYQWAFAIAAAGITSGSIAERTQFVAYLIYSSFLTGFVYPVVSHWFWTPDGWASPTNSNLLFGSGVIDFAGSGVVHMVGGIAGFYGALIEGPRIGRYDHTGRSVALRGHSASLVVLGTFLLWFGWYGFNPGSFNKILVTYGASGGYYGQWSAVGRTAVTTTLAGCTAALTTLFGKRILSGHWNVTDVCNGLLGGFAAITAGCSVVEPWAAIICGFVAALVLIGFNMLAEKFKYDDPLEAAQLHGGCGAWGIIFTGLFAKGEFVDQVYPGKPGRPHGLFMGGGGKLLGAHIIQILVIIGWVSATMGPLFYILHKFKLLRISSEDEMAGMDLTRHGGFAYYHEEDPKLGMQMRRIEPTTST

SEQ ID NO: 28098 - protein, 155 aa, Zea mays
  misc_feature (76)..(76): Xaa can be any naturally occurring amino acid
  misc_feature (120)..(120): Xaa can be any naturally occurring amino acid
  misc_feature (144)..(144): Xaa can be any naturally occurring amino acid
  unsure (1)..(155): unsure at all Xaa locations
MEEEHEVCKKKDGLFGKLHRTMSISSSSSDEEEEAIDENGEIIKRKKKKVGLKEKIKEKLPGHKDGHHTVAPSPAXPGPVETHAHHQEDGHNRPNVGPGPGSVASTVREDARSPARARHXVSRQKVEADVKTGTPLHAPDEEKXGLLDKIKESSP

SEQ ID NO: 28099 - protein, 331 aa, Geobacillus kaustophilus HTA426
MAQNRHQALGLSDDTVLEMYETMLLARKLDERMWLLNRAGKIPFVISCQGQEAAQVGAAFALDRTKDYVLPYYRDVGVVLTFGMTPRELMLAAFAKAEDPNSGGRQMPGHFGKKKNRIVTGSSPVTTQVPHAVGFALAAKMEKKDFVAFVTFGEGSSNQGDFHEGANFAGVHKLPVIFMCENNKYAISVPISKQLACEKVSDRAIGYGMPGYTVDGTDPLEVYRVVKEAADRARRGEGPTLIEAVTYRLTSHSSDDDHRVYRTEEELAEARAKDPIVSFANYLKETGVLTDQLDEDIQARVMKEVNEATDYAEKAPYAEPEHALRYVYAEE

SEQ ID NO: 28100 - protein, 382 aa, Zea mays
  misc_feature (310)..(310): Xaa can be any naturally occurring amino acid
  unsure (1)..(382): unsure at all Xaa locations
MALSIYTPTSSSLVPPSIQEVRLTSRPPKPATFSLRRPHLAARAAAGNAPTSPVREVVTELDAVAGFSEIVPDTVVFDDFERFAPTAATVSSSLLLGITGLPDTKFKSAIDTALADGECNALEKAEDRMSCYLTKALANVGAELAHQVPGRVSTEIDARLAYDTQGIIHRVHELLNLYNQHDVSTDRLLFKIPATWQGIEASRLLESEGIQTHLTFVYSFAQAAAAAQAGASVVQMFVGRLRDWARHHSGDPEIDEALKNGEDAGLSLAKKVYAYIHRNGYKTKLMAAAIRNKQDVFSLLGIDYIIAPIXDVKYGYVPKLTPAIGKTYNFTEEELVKWDQLSLSAAMGPAAEELLASGLEGYVNQARRVEELFGKIWPPPNV

SEQ ID NO: 28101 - protein, 473 aa, Geobacillus kaustophilus HTA426
MAKEYDVVILGGGTGGYVAAIRASQLGLKTAVVEKGKLGGTCLHAGCIPSKALLRSAEVYAQTKNGEAFGVIADGVRLDFAKVQARKAAIVEQLHKGVQHLMKKGKIDVYAGTGRLLGPSIFSPLPGTVSVEMNDGSENEMLVPKFVVIATGSRPRTLPGLEPDGEFVMTSDEALQMETLPSSILIVGGGVIGMEWASMLNDFGVDVTVLEYADRILPTEDEDVSKEMEKLLRRRGVNIVAGAKVLPETLEKGNGVTIQAEHQGERKTFTADKMLVSVGRQANIEGIGLENTEIVVEKGYIQTNEFGQTKESHIYAIGDVIGGLQLAHVAAHEGIVAIEHLAGHNPAPIDYTMVPRCIYTRPEAAAVGLTEQEAKAKGYDVKVGKFPFKAIGKALVFGEAEGFVKLIADRNTDDLLGVHMVGPHVTDLISEAGLARVLDAAPWEVAHAIHPHPTLSEAMAEAALAVDGKAIHF

SEQ ID NO: 28102 - protein, 411 aa, Schizosaccharomyces pombe
MDFEIENESEIPQLVDVEEVNTQPHSETLSVPTVSSNNDIDSFEQQSDFLLVDHDSTLDPVPVTILTGFLGAGKTSLLRSILENRNGKRVAVLMNEVGDSGDLERSLMEDVGGEELYEEWVALSNGCMCCTVKDNGIKALEKIMRQKGRFDNIVIETTGIANPGPLAQTFWLDDALKSDVKLDGIVTVIDCKNIDNILKDESDIGFIQISHADCLILNKTDLISSEALSVVRQTILKINCLAKIIETTYGRLDDISEILDLDAYGNENTSNLEWSIQRSNDSNINCSTCLDVDCQHLHSLDTHSLDISTHTFKLPPLMSKEVFQQFLQWVRHTLWSCLEEGEDEEFMIYRSKGIFNKDDGSWYIFQGVREVFEIMPLSEKPRAFLEKDIHPEIILIGRNLHRISPFVVGNQ

SEQ ID NO: 28103 - protein, 367 aa, Geobacillus kaustophilus HTA426
MELFQYMEKYDYEQVLFCQDKESGLKAIIVIHDTTLGPALGGTRMWMYNSEEEALEDALRLARGMTYKNAAAGLNLGGGKTVIIGDPRKDKNEAMFRAFGRFIQGLNGRYITAEDVGTTVADMDIIYQETDYVTGISPEFGSSGNPSPATAYGVYRGMKAAAKEAFGSDSLEGKVVAVQGVGNVAYHLCRHLHEEGAKLIVTDINKEAVARAVEEFGAKAVDPNDIYGVECDIFAPCALGGIINDQTIPQLKAKVIAGSANNQLKEPRHGDMIHEMGIVYAPDYVINAGGVINVADELYGYNRERAMKKIEQIYDNIEKVFAIAKRDNIPTYVAADRMAEERIETMRKARSQFLQNGHHILSRRRAR

SEQ ID NO: 28104 - protein, 455 aa, Salmonella enterica subsp. enterica serovar Typhi Ty2
MKKHTQLLSALALSVGLTLSAPFPALASIPGQVPGQATLPSLAPMLEKVLPAVVSVKVEGTATQSQKVPEEFKKFFGEDLPDQPSQPFEGLGSGVIIDAAKGYVLTNNHVINQAQKISIQLNDGREFDAKLIGGDDQSDIALLQIQNPSKLTQIAIADSDKLRVGDFAVAVGNPFGLGQTATSGIISALGRSGLNLEGLENFIQTDASINRGNSGGALLNLNGELIGINTAILAPGGGSIGIGFAIPSNMAQTLAQQLIQFGEIKRGLLGIKGTEMTADIAKAFKLNVQRGAFVSEVLPNSGSAKAGVKSGDVIISLNGKPLNSFAELRSRIATTEPGTKVKLGLLRDGKPLEVEVTLDSNTSSSASAEMIAPALQGATLSDGQLKDGTKGVKVDSVEKSSPAAQAGLQKDDVIIGVNRDRISSIAEMRKVMAAKPSIIALQVVRGNENIYLLLR

SEQ ID NO: 28105 - protein, 289 aa, Zea mays
MERPAPVRKSHTSTADLLVWPEGAPQELPAGSTPPSNRRPHQPSEALRKVVFGGQVTEAEAESLNKRKPCSAPKWKEMTGSGIFAAGGEGEEDESANVSATSVRTAPKNYQAISTISHISFAEEESISPKKPTSIAEVAKQRELSGTLLSEDDSKMKRQISDLKSKELSGHDIFAPPEDPRPRNSENGSTSQTPGKNAHVSNFKFGEADEDSAVKTAKKIPTKKFTDLAGNIFKGDDEAPGTAEKHHLSTAKLKEMTGSDIFADGEAPSRDYLGGIRKPPGGESSIALV

SEQ ID NO: 28106 - protein, 356 aa, Salmonella enterica subsp. enterica serovar Typhi Ty2
MFVKLLRSVAIGLIVGAILLAVMPSLRKINPIAVPQFDSTDETPASYNFAVRRAAPAVVNVYNRSMNSTAHNQLEIRTLGSGVIMDQRGYIITNKHVINDADQIIVALQDGRVFEALLVGSDSLTDLAVLKINATGGLPTIPINTKRTPHIGDVVLAIGNPYNLGQTITQGIISATGRIGLNPTGRQNFLQTDASINHGNSGGALVNSLGELMGINTLSFDKSNDGETPEGLGFAIPFQLATKIMDKLIRDGRVIRGYIGIGGREIAPLHAQQGSGMDPIQGIVVNEVTPNGPAALAGIQVNDLIISVNNKPAVSALETMDQVAEIRPGSVIPVVVMRDDKQLTFQVTVQEYPASN

SEQ ID NO: 28107 - protein, 475 aa, Arabidopsis thaliana
MAATTRRLLYSVSKRFSTAGVRRSYGGLPQSNSKSPPSSSQRLMELESEFSAHNYHPVPVVFSRANGSTIWDPEGKRYIDFLAAYSAVNQGHCHPKIMKALQEQVEKLTLSSRAFYNDKFPVFAERLTNMFGYDMVLPMNTGAEGVETALKLARKWGHEKKNIPKDEAIIVSCCGCFHGRTLAIVSMSCDNDATRGFGPLLPGNLKVDFGDADSLEKIIKEKGDRIAGFLFEPIQGEAGVIIPPDGYLKAVRELCTKYNVLMIADEVQSGLARSGKMLACDWEEIRPDMVILGKALGGGVIPVSAVLADKDVMLHIKPGQHGSTFGGNPLASAVAMASLDVIVEEKLVERSASLGEELRIQLNEIKKQFPKYIKEVRGRGLFNAIEFNSESLSPVSAYDICLSLKERGVLAKPTHNTIVRLTPPLSISSDELREGSEALHDVLELDLPNLLKINSGKTPVSHITECDRCGRNLYA

SEQ ID NO: 28108 - protein, 451 aa, Oryza sativa (japonica cultivar-group)
MRECISIHIGQAGIQVGNACWELYCLEHGIQPDGQMPGDKTVGGGDDAFNTFFSETGAGKHVPRAVFVDLEPTVIDEVRTGDYRQLFHPEQLISGKEDAANNFARGHYTIGKEIVDLCLDRIRKLADNCTGLQGFLVFNAVGGGTGSGLGSLLLERLSVDYGKKSKLGFTVYPSPQVSTSVVEPYNSVLSTHSLLEHTDVAVLLDNEAIYDICRRSLDIERPTYTNLNRLVSQVISSLTASLRFDGALNVDVNEFQTNLVPYPRIHFMLSSYAPVISAEKAYHEQLSVAEITNSAFEPSSMMAKCDPRHGKYMACCLMYRGDVVPKDVNAAVATIKTKRTIQFVDWCPTGFKCGINYQPPSVVPGGDLAKVQRAVCMISNSTSVVEVFSRIDIKFDLMYSKRAFVHWYVGEGMEEGEFSEAREDLAALEKDYEEVGSEFDDGDEGDEGDEY

SEQ ID NO: 28109 - protein, 333 aa, Chara vulgaris
MAEPVKVLVTGAAGQIGYALVPLIARGHLLGPDQPVILHMLDIAPCMDSLKGVEMELLDAAYPLLRGIVATSDVVEAATGVKVACMVGGFPRKAGMERKEVMGKNVSIYKEQATALEKYADKDVKVVVIANPANTNALVLKEYAPGIPSKNITCLTRLDHNRALGQIAQRVGVPVINVKNVAIWGNHSSTQYPDVNHGVVKTTEGVEKSIREAVADDEWLNGEFIKVVQQRGAAIIKMRKFSSALSAASAVCDHVSNWIRGTPAGTWVSMGVFSDGSYGVPAGLIYSFPVTTKNGDWEIVQGLPIDDFSRAKMDATAAELVEEKALADSIIKE

SEQ ID NO: 28110 - protein, 252 aa, Chlamydomonas reinhardtii
KDVDVAVMVGGYPRKAGEERKDVMAKNVSIYQQQASALEANASKDVKVVVVANPANTNALILAENAPSIPRENITCLTRLDHNRALGQVAERTGSHVGIVKNVIIWGNHSSTQYPDVNHGTVGGKPIRSAVNDDTWLNGDFITTVQQRGAAIIKARGLSSALSAANAVCNHVRDWVRGTPGGSWTSMGVVSDGSYGVQRGLVYSYPVTCAGGKWKVVQGLPIDGPSRERLRVTEAELVEERDLALQCLAEKK

SEQ ID NO: 28111 - protein, 421 aa, Corynebacterium glutamicum ATCC 13032
MSRISELLNNHGVDLSWQEAAYQDFHEHPELSGFESETADRIQKYLERFDCEVIPNVGGYGILAVFRNGSTDPGAPVALMRADFDGLPVKEITGVPFASTRMRPHDGANVHVMHACGHDVHVTALLGACAILDERRDAWEGTFIALFQPSEENSQGANKMVAGGLVDLIPRPDVCFGQHVVPGAAGTVMSMPGGALAACDSIEIRIQGRSAHGSMPHNSIDPTYVAAMIVVRLQGIVGREVSPEDFAVISVGTLQSGNTNNTIPASARLVLNCRFYNDKVKHKVYRAIERVVRGECLASGIEEEPVIEYFAHGDLTNNTPVVFDTVRPVFDDVFGEDSIDAYRWTASEDFPSIPKAFNSPYLYWTIGVTPRDQWTEAVERDRVASDVPANHMGDFLPDYAPTMSAATRAAAAALLTYLGTN

SEQ ID NO: 28112 - protein, 146 aa, Mycoplasma genitalium G37
MRDFNLLFQTEIGVVNNDKRLVFLRPETAQGSFINFKNILQAKKRNLPFAIAQFGKSFRNEITPGNFLFRTREFEQFEIEWFCKPDDANSLFEKQLIMVEQFLQTVLKINPELLKKHEYDQSELAHYAKKTTDFLFNFPHGLKELW

SEQ ID NO: 28113 - protein, 447 aa, Bordetella pertussis Tohama I
MKLQSLDDFLRRVAARDPQQAEFMQAVQEVMLSLWPFIEKHPHYAEHALLERLVEPERVIQFRVCWTDDQGQAQVNRAFRIQHSSAIGPFKGGMRFHPTVNLSVLKFLAFEQTLKNALTTLPMGGGKGGSDFDPKGKSDAEVMRFCQALMLELHRHLGPDTDVPAGDIGVGAREVGFMAGMMKKLSNSAASVFTGKGLCFGGSLIRPEATGYGTVYFAQEMLQRAGLSFDGMRVSVSGSGNVAQYAIEKAMALGAKVVTISDSCGTVIDEAGFTHEKLLALMHIKNDLRGRLDTYASQFGLRYEAGVRPWHVPVDVALPCATQNELDENDARTLIRNGVKCVAEGANMPATLDAAKAFIAAEVLYAPGKASNAGGVAVSGLEMSQNSARLPWTREQVNARLHAIMRDIHENCVRHGHGAGNYVNYVDGANIAGFVKVADAMRQQGLY

SEQ ID NO: 28114 - protein, 1150 aa, Ustilago maydis 521
MCQHGRPQTASKSADYPTHASAEPRPVRAGLIRSVHERRLEEFIGGQFGDYNLASVLFEARTDDPKYVSIQSWTPKAGTKPTFDEAKRQTYVKADKSIKFGPSWTNHWLKLKLTVPKDWIKKDWVQLEFDPECEALIYSEDGLPLQGITGGGDKRRVDFPLKPEYRHGITFYIEVTANGMFGMPADGSGDPDPNRYFDLASCDIVVKRPEAWKLMWDFEHLLGCVKNLPRDTELQNRALWVANQIQNTFRKADLDSISRCRKLAQEILGKDWDDNIETIYDRDVVEGREDVRIWSLGHSHIDSAWLWPYSATQQKVARSWSTQIDLMDRFPEHRFTASTAQQYQWLETLYPKLFEKLKGYIEDGRFQPIGGSWVECDANMPSGEAFARQFLYGQRYFLSRFGKRCDIFWLPDTFGYNAQIPQLARQSGCDYFFTQKLSWNNINRFPHNTLMWVGLDGTQIIVHMTPVNNYDSRGYVEEIVRGIKNNADLWVQPHALMLYGFGDGGGGPSEEMIERMRRARAVNNNGFKDMPRVHNGRSAKDFFEHVRKVTDNGNRLSTWSGEIYLEFHRGVYTSHGSIKQWNRRFEAFMQKLEWLTTLASIKASGYKYPKESLDAIWEPLLLNQFHDCLPGSSIRKVYDDLEEMYADMAIKGKKLWRQALNALGVGEEVVASSKSAYTAINSLDVPRRELVEVQLSSHMPRAEAIALSHQSMQLCKTGQSALLLLEDASGRGQATVVDNQSSSLTESQTVKAEEFEHNSFLLQSPAIAVKVTKGRITSIYDRLADRELIEGGRTAGLAISEDYPPQFDNWETEVYSLDTEEEIPFTNVRIAEAGPWRASLALEAKFGQSTVQINIVLDAVSATPLVTGKDARPLLRFDTQIGWWEKHRFLRFNVPTRLRSDVASFETQFGITRRPTTRNTSWEAAKFEVCGHRFADLSEEDYGLSILTESKYGYSVEGGAMRLSLLKAGTYPDAHEDEGLHQFAFALYPHVGGVGRGKVVQVARVFNARFDVDYGRQSRIDIATLERSGAAVTRTDLQMPIEIVDSTRAGVVLDTIKRAEDDFEYYGQKPKDPHSFGIIVRLYESLGAHAKPTIKVKLPVKDVNLTNLLEDVDADKKEEINFNTYTDEEDSTYVQLDFKPFEIKTLKISI

SEQ ID NO: 28115 - protein, 520 aa, Zea mays
  misc_feature (152)..(152): Xaa can be any naturally occurring amino acid
  misc_feature (156)..(156): Xaa can be any naturally occurring amino acid
  misc_feature (170)..(170): Xaa can be any naturally occurring amino acid
  unsure (1)..(520): unsure at all Xaa locations
MDKAYVAVLSFAFLFVIHYLVGRAGRKGNGKGKGTQRLPPSPPAVPFLGHLHLVKTPFHEALAGLAARHGPVFSMRMGSRRALVVSSPECAKECFTEHDVVFANRPRFATQDLVSFGGAALAAASYGPYWRNLRRVATVQLLSAHRVACMSXSSPXEVRAMARRMGRAGXAAPGGAARVQLKRRLFEVSLSVLMETIARTKTSRAEADADSDMSPEAHEFKQIVDEIVPHLGTANLWDYLPVLRWLDVFGVRNKITAAVGRRDAFLRRLIDAERRRLDDGGGDSDSDKKSMIAVLLSLQKSEPEVYTDTMIMALCGNLFGAGTETTSTTTEWAMSLLLNHPEALKKAQAEIDAVVGTSRLLAAEDVPRLGYLHRVISETLRMYPAAPLLLPHESSADCKVGGYDVARGTLLIVNAYAIHRDPLVWEDPDEFRPERFEDGKAEGRLLMPFGMGRRKCPGETLALRTISLVLGTLIQCFDWDRVDGHEIDMAAGGGLTLPKAVPLEATCKPRAAMRHLLLEL

SEQ ID NO: 28116 - protein, 179 aa, Malus x domestica x Pyrus communis
MASSMISSGTVATVSAPAQARMVAPFTGLKSSSAFPVTRKSNDITSIASNGGRVQCMQVWPPLGLKKFETLSYLPPLSTESLAKEVDYLLRKNWVPCLEFELEHGFVYRENNRSPGYYDGRYWTMWKLPMFGCTDSSQVLKELEEAKKAYPQSFIRIIGFDNVRQVQCISFIAYKPPGV

SEQ ID NO: 28117 - protein, 359 aa, Capsicum chinense
MGSINQSLTQTEDEAFVFAMQLASASVLPMVLKATVELDLLEIMAKSGPGAFISPSELAAQLPTKNPEAPVMLDRMFRLLATYSVLNCTLRTLPDGRVERLYSLAPVCKFLTKNGDGVSIAPILLMNQDKVLMESWYHLTDAVLDGGVPFNKAYGMTTFEYHGTDPRFNKVFNCGMSDHTTLSMKKILEDYTGFEGLNSIVDVGGGTGATVNMIVSKYPSIKGINFDLPHVIRDAPSYPGVEQVGGDMFVSVPKADAIFMKWICHDWSDDHCIKLLKNCYEALPANGKVIIVECILPEAPDTSAATKSKVHGDIIMLAHNPGGKERTEKDFEALANWGWFSRFRKVCCAYHTWVMEFNK

SEQ ID NO: 28118 - protein, 665 aa, Pseudomonas syringae pv. phaseolicola 1448A
MPSRRERANAIRALSMDAVQKANSGHPGAPMGMADIAEVLWRDYLKHNPANPAFADRDRFIMSNGHGSMLVYSLLHLTGYDLSIDDLKNFRQLHSRTPGHPEFGYTPGVETTTGPLGQGFANAVGFAAAEKTLAAQFNRPGHSIVDHHTYVFMGDGCMMEGISHEVASLAGTLQLKKLIAFYDDNGISIDGEVEGWFTDDTPKRFESYGWLVIRNVDGHDPEEIKTAIDTARKSDKPTLICCKTTIGFGSPNKQGKEESHGAPLGADEIALTRAALKWNHGPFEIPADIYAEWNAKEKGLAAEAEWDQRFAAYSAAFPELANDFIRRMSGELPADFAEKSAAYVAEVNAKGETIASRKASQNALSALGPLLPEILGGSADLAGSNLTIWKGCKSITGEDPNGNYLHYGVREFGMGAMMNGIALHGGFVPYGATFLIFMEYARNAVRMASLMKKRVIYVFTHDSIGLGEDGPTHQPIEQLTSLRTTPNLDTWRPADAVESAVAWKHAIERNDGPSALIFSRQNLTHQAREQQQIDAIARGGYVLRDCAAEPELILIATGSEVGLAVQAYDKLTEQGRNVRVVSMPCTSIFEAQDAAYKQAVLPLQVSARIAIEAAHADYWYKYVGLEGRVIGMTTFGESAPASALFEEFGFTLENVLSTAEELLED

SEQ ID NO: 28119 - protein, 109 aa, Prochlorothrix hollandica
MKTLPKERRYETLSYLPPLSDQQIARQIEYMVREGYIPAVEFNEDSDATTCYWTMWKLPLFHATSTQEVLGEVRECRTEYPNCYIRVVGFDNIKQCQSVSFIVHKPNRY

SEQ ID NO: 28120 - protein, 217 aa, Caulobacter crescentus CB15
MQIFLDSTDTKVIADLASTGLIDGVTTNPTLIAKSGRPMLEVIAEICDIVPGPISAEVAATTADAMIAEGQKLAKIAPNVVVKIPLTRDGLIACAAFADEEIKTNVTLCFSPTQALLAAKAGATYISPFIGRLDDYGFDGMDLIRDIRAIYDNYGYETEILAASVRNAAHVKEAAIVGADVVTIPPAVFSDLYKHPLTDKGLEQFLKDWASTGQSIL

SEQ ID NO: 28121 - protein, 158 aa, Streptococcus intermedius
MTKIYDFSIFDQNNRSISLEIYKGNVLLIVNTATGCGLTPQYKGLQHLYTRYQNQGFEILDFPCNQFMGQAPGTAEEINRFCSLHYQTTFPRFAKVKVNGKEADPLYIWLKEQQAGPLGKRIEWNFTKFLINREGQVVKRFSSKAEPKEIEESLQKLL

SEQ ID NO: 28122 - protein, 151 aa, Paracoccidioides brasiliensis
MSDGEETTSKPPVGTADEVEVSADTTVGSSMSVMDALKGVLKIALIHDGLARGLREASKALDRRQAHMCVLNEGCEEDAYKKLVIALCSEHKIPLIKVPDGKMLGEWVGLCVLDREGNPRKVVNCSCVVLRDWGEESQERSVLLNYFQTEQ

SEQ ID NO: 28123 - protein, 219 aa, Leymus triticoides
  misc_feature (50)..(50): Xaa can be any naturally occurring amino acid
  unsure (1)..(219): unsure at all Xaa locations
GRRRVEMEDRHVAKLALGGDPEVALFAVFDGHGGAAEFAAENMPKFMAEXVRKVDGGGSEEIEGAVKKCYLKTDEEFLKREESGGACCVAALLQKGGLTVSNTGDCRAVLSRAGTAEALASDHRASCEDERERIENLGGFIVNNRGTWRVQDSLAVSRGIGDAHLKQWVVADPDTRTLLVDPQCEFLVLASDGLWDKVDNQEAIDIARPLCIGNDKASR

SEQ ID NO: 28124 - protein, 223 aa, Corynebacterium efficiens YS-314
MEGNVTMAFFFRPEPKMVTPEEALKGGRHPVLESPQPHTVLGTPITGPWKEGQKRVWIGLGCFWGVEQMYWKMDGVESTSVGYAGGYTPNPTYREVCSGRTGHTEIVEVVYDPEKITLAELVARGLEAHDPTQGYRQGNDVGTQYRSAFYVETGEEAETVRQIVSTYGETLKSHGFGEITTEVDVITPADYYLAEDYHQQYLHKNPDGYCPHHSTGIPCGVEA

SEQ ID NO: 28125 - protein, 221 aa, Leymus cinereus
GRRRVEMEDRHVAKLALGGDPEVALFAVFDGHGGKNAAEFAAQNMPKFMAEEVRKVDGGDSDEIEGAVKKCYLKTDEEFLKREESGGACCVTALLQKGGLTVSNTGDCRAVLSRSGTAATLTSDHRASREDERERIENLGGFVVNNRGTWRVQGSLAVSRGIGDAHLKQWVVADPDTRTLLVDPQCEFLVLASDGLWDKVDNQEAIDIARPLCIGNDKASR

SEQ ID NO: 28126 - protein, 88 aa, Zea mays
QPTVWRLYKAGSAFWFVSTSGDPNDITSKFKIERLEGDHAYEIYSFKFCPSVPGALCAPVGTFEDADGTKVMAVGDDIEPYYVRFQKV

SEQ ID NO: 28127 - protein, 315 aa, Zea mays
MESLGVLLLHPFNAYLEQELDRRFRLYRFWETPREEFLRAHAGAVRAVVGNASYGADAALIDALPALEIVASFSVGIDRVDLAKCRDRGIRVTNTPDVLTDDVADLAVGLAIAVLRRIPQADRYVRAGLWKSRGDYTLTTRFSGKRVGIIGLGRIGQAVAKRVEAFDCPVSYHQRTEQRATYPSYTYYPSVVELAANSDVLVVACPLNAQTRHIVSREVMEALGPSGVLINVGRGPHVDEREMVAALADGRLGGAGLDVFEDEPNVPEALLGMDNVVLLPHVGSGTNETRKAMADLVLGNLEAHVLSKPLLTPVV

SEQ ID NO: 28128 - protein, 317 aa, Zea mays
  misc_feature (269)..(269): Xaa can be any naturally occurring amino acid
  unsure (1)..(317): unsure at all Xaa locations
MSLISMMEARLPPGFRFHPRDDELVLDYLCRKLSGKGGGGAYGGIAMVDVDLNKCEPWDLPDEACVGGREWYFFSLHDRKYATGQRTNRATRTGYWKATGKDRPISVSGRRGAGDTAALVGMRKTLVFYQGRAPRGSKTEWVMHEFRVDGPPVADRPGSPLLQLQLQEDWVLCRVFYKSRTASTRPAAGPDEAGPLSSQLIGGLPMPRMAAPADAAYLSFDVTPAAGGYYHHQDSGPADARHHLPPPPAQPFSRSSLSSLRDLLSSMVXGSDAAAAVRETELHLQLEGWTEAAYAQQQGGAMPAHPQQTWSPFLSSG

SEQ ID NO: 28129 - protein, 396 aa, Linum usitatissimum
MALKLNPVTTFPSTRSLNNFSSRSPRTFLMAASTFSSTSTKEAEAKEVTWTTKRGAYASDPFHAPTGSWEIFKSLGRLGLRDVLISHLKPVEKCWQPQDFLPEPESDGFEEQVKELRARAKELPDDYFVVLVGDMITEEALPTYQTMLNTLDGVRDETGASLTPWAIWTRAWTAEENRHGDLLNKYLYLSGRVDMRQIEKTIQYLIGSGMDPKTENNPYLGFIYTSFQERATFISHGNTARLAKDHGDMKLAQICGIIAADEKRHETAYTKIVEKLFEIDPDGTVLALADMMRKKISMPAHLMYDGEDDNLFDNYSSVAQRIGDTAKDYADILEFLVGRWKVDAFTGLSGEGNKAQDFVCGLPARIRKLEERAAGRAKQTSKSVPFSWIFSRELVL

SEQ ID NO: 28130 - protein, 546 aa, Glycine max
MGNCCSQGNVADGPADDSAAANDKGEANQQGSNNHANDNNDNSTNPTTAPTTTSKPPPTVTPPTSKPSKPAAMGPVLGRPMEDVRATYTIGKELGRGQFGVTHLCTNKATGQQFACKTIAKRKLVNKEDIEDVRREVQIMHHLSGQPNIVELKGAYEDKQSVHLVMELCAGGELFDRIIAKGHYTERAAASLLRTIMQIIHTFHSMGVIHRDLKPENFLMLNKDENSPVKATDFGLSVFFKEGETFKDIVGSAYYIAPEVLKRKYGPEVDIWSVGVMLYILLSGVPPFWAESEHGIFNAILRGHIDFTSDPWPSISNAAKDLVRKMLTTDPKQRLTSQEVLNHPWIKEDGEAPDKPLDNAVLNRLKQFRAMNQFKKVALRVIAGCLSEEEIMGLKEMFKGMDTDNSGTITIEELKQGLAKQGTKLTEQEVKQLMEAADADGNGTIDYDEFITATMQMNRMNREEHLYTAFQYFDKDNSGFITTEELEQALREYNMHDGRDIKEILQEVDGDNDGRINYDEFAAMMRKGNPEVMTKKRRDSLPLPLP

SEQ ID NO: 28131 - protein, 629 aa, Listeria monocytogenes str. 4b H7858
MAFSLWKNHLKFNPEHPTWFNRDRFVLSAGHGSAMLYSLLHLFGYDLPMSELKNFRQTGSKTPGHPEFGHTVGVDATTGPLGQGFAMGVGMAMAEAHLGAKFNQPEFPVVDHNTYVLCGDGCLMEGISYEAASLAGHLKLGKLVVLYDSNDISLDGDLNESFSEDIELRFRAAGWQTLRVDDGNDLDALDAAIHLAKTEKSRPTLIEVKTVIGYGSPGKAGKSAAHGSPLGEKELKLAKEAYDWQMPPFELPKTVENQKEFYHSKGRASESSWLRTFNAYKQKYPALAESLQQLMDDNLDADWDAELPVFDENADKAVATREVSGIVLQELEKKLPNLFGGAADLASSNKTHLKASERFAPGNYAAKNISFGVREFAMGAAVNGMTLHGGVQAFGATFFVFSDYLRSAIRSAALMGIPSTFIMTHDSIAVGEDGPTHEPIEHLASFRAMPGLHVIRPADGNETVEAYRYAFTQKEQPTMLVLSRQNLPILPNSAAKAQTGLAKGAYILADSPLDKLDIILLASGSEVHLMTAVRDNLAKKGFGARVVSMPSFDLFDKQSPEYKESVLPKAVKNRFAAEMGASYGWHKYLGDTGQILAIDSFGMSGPGDELARRFGFTVENLTELALKQL

SEQ ID NO: 28132 - protein, 402 aa, Ustilago maydis 521
MSNAPLNGVKLNPLDDPNKVIKVLASDGKTGEQREIAYTNCKVIGNGSFGVVFQAKLVSQGSEPAEGSSKESDEVAIKKVLQDKRFKNRELQIMRIVKHPNVVDLKAFFYSNGDKKDEVFLNLVLEYVPETVYRASRHYAKLKQTMPMLLIKLYMYQLLRSLAYIHSIGICHRDIKPQNLLLDPPSGVLKLIDFGSAKILIAGEPNVSYICSRYYRAPELIFGATNYTTNIDIWSTGCVMAELMQGQPLFPGESGIDQLVEIIKVLGTPSREQIKTMNPNYMEHKFPQIRPHPFSKVFRPRTPPDAIDLISRLLEYTPSARLTAIEALCHPFFDELRTGEARMPNGRELPPLFNWTKEELSVRPDLISRLVPQHAEAELLSRGIDVHNFQPIPLESLKVTLD

SEQ ID NO: 28133 - protein, 398 aa, Desulfotalea psychrophila LSv54
MWQNIEAAPADSILGLTEAFRNDPNPAKVNLGVGIYKDEQGATPILQCVKNAEARLIETEESKVYLPISGAPAYTENVQKLLFGEESEVISSKRAITAHAPGGTGALRMGAGLLKTFFPEAKVWVSTPTWANHTGIFSSTGFEIAHYPYYDETHRSVDFQAMLMSLRAVPEGDIVLLHACCHNPTGVDLTLEQWHQVVAIAQERNWIPFLDFAYQGFGVGTSEDRCAIELCAEAGIDFFVASSFSKNFGMYNERTGAITVVAANQASAAVALSHLKKTIRVVYSNPPAHGGLVAATILSDPELYDLWQQELQDMRERIIAMRVALVEGLSSRGVDQDFSFITEQSGMFSFSGLSDEIVAWLRKEKSIYVVGGGRINLAGLTASNIDYVCDAIAEALKS

SEQ ID NO: 28134 - protein, 492 aa, Oryza sativa
MVLSHGVSGSDESVHSTFASRYVRTSLPRFRMPEQSIPKEAAYQIINDELMLDGNPRLNLASFVTTWMEPECDKLIQASVNKNYVDMDEYPVTTELQNRCVNMIAHLFNAPLGDSETAVGVGTVGSSEAIMLAGLAFKRRWQNKMKAAGKPCDKPNIVTGANVQVCWEKFARYFEVELKEVKLSDGYYVMDPAKAVDMVDENTICVAAILGSTLNGEFEDVKLLNDLLTKKNAETGWDTPIHVDAASGGFIAPFLYPELEWDFRLPLVKSINVSGHKYGLVYAGIGWCIWRSKEDLPEELIFHINYLGADQPTFTLNFSKGSSQVIAQYYQLIRLGFEGYKNIMENCQENAMVLKQGLEKTGRFNIVSKDNGVPLVAFSLKDSARHNEFEISDFLRRFGWIVPAYTMPPDAQHVTVLRVVIREDFSRTLAERLVLDVEKVLHELDALPARVVANGGDAAAASASEREMEKQREVISLWKRAVLAKKKTNGVC

SEQ ID NO: 28135 - protein, 368 aa, Rubrobacter xylanophilus DSM 9941
MAGIDLDLKHLPELGSKTDYRIGAIGAGFIMRDVQLAAYDEAGFDVVAIASRTPEHARSCAERWGIGRVYETWRELLDDPEVEILDIAYPPDRQLGIVREAVEHADHIKGILAQKPLATTLEDAAEIVRLCEEAGVVLGVNQNMRYDQSMRALKTLLDRGYLGEPVVAQIVMHARPHWQDFLRGLDRLAMLNMSIHHLDIFRFLFGDPERILASVREDPSIGFEHADGMAFYILEYAGGLRAVSIDNCFTWTDHGIEWRVEGTEGVARGTIGWPDYPEGSPSTVDFTTKRQPGYWFLPRWEERWFPQAFIGTMGQLMRALEEGSEPEISGRDNLRTMALVEAAYRSVAEGRAVRLDEVGTKEATGGSA

SEQ ID NO: 28136 - protein, 487 aa, Ralstonia sp. SJ98
MQTQLFIDGRFVAALSGETLATLNPHDNSEIAQVSMAGREDVDRAVQAAKKAFPAWSAMAAADRGRLLLKLADAIEANADELARLESMDTGHPIRDTRNLDVPRTAATFRYFGGMADKFEGSVIPVEASFLNYLTREPVGIVGQVVPWNFPLMFTSWKMAPALAAGNCVVMKPAELTPLSSLAIAQLMAEVGFPAGVVNVLPGFGHVAGQYIAEHPEIGKVAFTGSTAVGRKIVQASSGNLKKVQLELGGKGANVVFGDANLDAVVQGSAFGIFHNQGQACIAASRLIVHESIADDLLERFTSLARSIRIGDPLDPSTEMGPLTSQMHRDRVLSYVDVAREQGGRVLAGGKSPDAAGLAKGCYVEPTIVQAKPTDRVAQEEVFGPFVTVSTFKSDEEGLAIANGTEYGLGAGLWTRDLQRAHLFARQLKSGMVWINCYKRVNPGSPFGGVGASGYGREMGFEVMREYTQAKSVWVNVDANIPPYYPR

SEQ ID NO: 28137 - protein, 653 aa, Caulobacter crescentus CB15
MPVSPIKMADAIRVLSMDAVHKAKSGHQGMPMGMADVATVLWGKFLKFDASKPDWADRDRFVLSAGHGSMLLYSLLHLTGFKAMTMKEIENFRQWGALTPGHPEVHHTPGVETTTGPLGQGLATAVGMAMAEAHLAARYGSDLVDHRTWVIAGDGCLMEGVSHEAISIAGRLKLSKLTVLFDDNNTTIDGVATIAETGDQVARFKAAGWAVKVVDGHDHGKIAAALRWATKQDRPTMIACKTLISKGAGPKEGDPHSHGYTLFDNEIAASRVAMGWDAAPFTVPDDIAKAWKSVGRRGAKVRKAWEAKLAASPKGADFTRAMKGELPANAFEALDAHIAKALETKPVNATRVHSGSALEHLIPAIPEMIGGSADLTGSNNTLVKGMGAFDAPGYEGRYVHYGVREFGMAAAMNGMALHGGIIPYSGTFLAFADYSRAAIRLGALMEARVVHVMTHDSIGLGEDGPTHQPVEHVASLRAIPNLLVFRPADAVEAAECWKAALQHQRTPSVMTLSRQKTPHVRTQGGDLSAKGAYELLAAEGGEAQVTIFASGTEVGVAVAARDILQAKGKPTRVVSTPCWELFDQQPAAYQAAVIGKAPVRVAVEAGVKMGWERFIGENGKFIGMKGFGASAPFERLYKEFGITAEAVAEAALA

SEQ ID NO: 28138 - protein, 559 aa, Sulfolobus solfataricus P2
MAAPVLLLKEGTSRTTGRDALRNNILAAKTLAEMLRSSLGPKGLDKMLIDSFGDVTITNDGATIVKDMEIQHPAAKLLVEAAKAQDAEVGDGTTSAVVLAGALLEKAESLLDQNIHPTIIIEGYKKAYNKALELLPQLGTRIDIKDLNSSVARDTLRKIAFTTLASKFIAEGAELNKIIDMVIDAIVNVAEPLPNGGYNVSLDLIKIDKKKGGSIEDSVLVKGLVLDKEVVHPGMPRRVTKAKIAVLDAALEVEKPEISAKISITSPEQIKAFLDEESKYLKDMVDKLASIGANVVICQKGIDDIAQHFLAKKGILAVRRVKRSDIEKLEKALGARIISSIKDATPEDLGYAELVEERRVGNDKMVFIEGAKNLKAVNILLRGSNDMALDEAERSINDALHALRNILLEPVILPGGGAIELELAMKLREYARSVGGKEQLAIEAFADALEEIPLILAETAGLEAISSLMDLRARHAKGLSNTGVDVIGGKIVDDVYALNIIEPIRVKSQVLKSATEAATAILKIDDLIAAAPLKSEKKGGEGSKEESGGEGGSTPSLGD

SEQ ID NO: 28139 - protein, 519 aa, Candidatus Blochmannia sayi
  misc_feature (510)..(510): Xaa can be any naturally occurring amino acid
  misc_feature (513)..(513): Xaa can be any naturally occurring amino acid
  misc_feature (519)..(519): Xaa can be any naturally occurring amino acid
  unsure (1)..(519): unsure at all Xaa locations
MAAKDVKFGNDARVKMLRGVNVLADAVKVTLGPKGRNVVLDKSFGAPVITKDGVSVAREIELEDKFENMGAQMVKEVASKANDSAGDGTTTATVLAQSIVNEGLKAVAAGMNPMDLKRGIDKAVVAAVEELKKLSVPCSDPKAIAQVGTISANSDETVGKLIAQAMDKVGKEGVITVEEGSGLQDELDVVEGMQFDRGYLSPYFVNKPESGTVELEHPFILLADKKISNIREMLPILESVAKAGKPLLIIAEDVEGEALATLVVNNMRGIVKVTAVKAPGFGDRRKAMLQDIAILTAGTVISEEIGLELEKSTLEDMGQAKRVVITKDATTIIDGVGNKSAINSRIAQINQQRDEATSDYDREKLQERVAKLAGGVAVIKVGAATEVEMKEKKARVEDALHATRAAVEEGVVAGGGVALIRVANAIRDLCGDNEDQNVGIKVARRAMEAPLRQIMANAGEEPSVIANNVRSGEGNTGYNAATEKYGNMIELGILDPTKVTRSALQYAASXAGXIITTEX

SEQ ID NO: 28140 - protein, 535 aa, Candidatus Blochmannia festinatus
  misc_feature (529)..(529): Xaa can be any naturally occurring amino acid
  misc_feature (532)..(532): Xaa can be any naturally occurring amino acid
  unsure (1)..(535): unsure at all Xaa locations
MAAKDVKFGNDARVKMLRGVNVLADAVKVTLGPKGRNVVLDKSFGAPVITKDGVSVAREIELEDKFENMGAQMVKEVASKANDSAGDGTTTATVLAQSIVNEGLKAVAAGMNPMDLKRGIDKAVVAAVEELKKLSVPCSDPKAIAQVGTISANSDETVGKLIAQAMDKVGKEGVITVEEGSGLQDELDVVEGMQFDRGYLSPYFVNKPESGAVELEHPFILLADKKISNIREMLPILESVAKAGKPLLIIAEDVEGEALATLVVNNMRGIVKVTAVKAPGFGDRRKAMLQDIAILTAGTVISEEIGLELEKATLDDMGQAKRVVITKDATTIIDGVGNKLAIDSRVAQINQQRDEATSDYDREKLQERVAKLAGGVAVIKVGAATEVEMKEKKARVEDALHATRAAVEEGVVAGGGVALIRVANAIRNLCGDNEDQNVGIKVARRAMEAPLRQIMANAGEEPSVIANNVRSGEGNTGYNAATEKYGNMIELGILDPTKVTRSALQYAASIAGLMITTECMVTDFLKKIXLIXGSK

SEQ ID NO: 28141 - protein, 263 aa, Methanosarcina barkeri str. fusaro
MERQKISEKFSELREKKEGALICYVMAGDPSAEKTGEIVKALVNGGADIIELGFPFSDPVADGPTIQVAGQRSLAAGMDTQRYFELIKNLDVGIPLVCMTYYNPVFRYGVEKFVEKAADAGISGLIVPDIPVEEAADLKNSCEKHGLDLIFLIAPTTTEGRVQKILERGSGFLYLVSRLGVTGAREDVSSSTRELLSRVETGLPKAVGFGISTGEQAAEVRDAGADAVIVGSAFVKIIDEGKDVNERLEALAKELKSGIKRAS

SEQ ID NO: 28142 - protein, 527 aa, Candidatus Blochmannia ocreatus
MAAKDVKFGNDARVKMLRGVNVLADAVKVTLGPKGRNVVLDKSFGAPVITKDGVSVAREIELEDKFENMGAQMVKEVASKANDSAGDGTTTATVLAQSIVNEGLKAVAAGMNPMDLKRGIDKAVVAAVEELKKLSVPCSDPKAIAQVGTISANSDETVGKLIAQAMDKVGKEGVITVEEGSGLQDELDVVEGMQFDRGYLSPYFVNKPESGAVELEHPFILLADKKISNIREMLPILESVAKAGKPLLIIAEDVEGEALATLVVNNMRGIVKVTAVKAPGFGDRRKAMLQDIAVLTAGTVISEEIGLELEKSTLEDMGQAKRVVITKDATTIIDGVGNKSAINSRVAQINQQRDEATSDYDREKLQERVAKLAGGVAVIKVGAATEVEMKEKKARVEDALHATRAAVEEGVVAGGGVALIRVANAIRNLSGDNEDQDVGIKVARRAMEAPLRQIMANAGEEPSVIANNVRSGEGNTGYNAATEKYGNMIELGILDPTKVTRSALQYAASIAGLMITTECMVTELPKE

SEQ ID NO: 28143 - protein, 447 aa, Salmonella enterica subsp. enterica serovar Paratyphi A str.
MDQTCSLESFLNHVQKRDPHQTEFAQAVREVMTTLWPFLEQNPRYRHMSLLERLVEPERVIQFRVVWLDDKNQVQVNRAWRVQFNSAIGPYKGGMRFHPSVNLSILKFLGFEQTFKNALTTLPMGGGKGGSDFDPKGKSEGEVMRFCQALMTELYRHLGPDTDVPAGDIGVGGREVGFMAGMMRKLSNNSACVFTGKGLSFGGSLIRPEATGYGLVYFTEAMLKRHGLGFEGMRVAVSGSGNVAQYAIEKAMAFGARVVTASDSSGTVVDESGFTPEKLARLCEIKASRDGRVADYAREFGLTYLEGQQPWSVPVDIALPCATQNELDVDAARILIANGVKAVAEGANMPTTIEATDLFLEAGVLFAPGKAANAGGVATSGLEMAQNAARLSWKAEKVDARLHHIMLDIHHACVEYGGDNKHTNYVQGANIAGFVKVADAMLAQGVI

SEQ ID NO: 28144 - protein, 80 aa, Ricinus communis
MSCCGGNCGCGSGCKCGNGCGGCKMYPDMSFSEKTTTETLVLGVGAEKAHFEGGEMGVVGAEEGGCKCGDNCTCNPCTCK

SEQ ID NO: 28145 - protein, 680 aa, Saccharomyces cerevisiae
MYSWKSKFKFGKSKEEKEAKHSGFFHSSKKEEQQNNQATAGEHDASITRSSLDRKGTINPSNSSVVPVRVSYDASSSTSTVRDSNGGNSENTNSSQNLDETANIGSTGTPNDATSSSGMMTIKVYNGDDFILPFPITSSEQILNKLLASGVPPPHKEISKEVDALIAQLSRVQIKNQGPADEDLISSESAAKFIPSTIMLPGSSTLNPLLYFTIEFDNTVATIEAEYGTIAKPGFNKISTFDVTRKLPYLKIDVFARIPSILLPSKTWQQEMGLQDEKLQTIFDKINSNQDIHLDSFHLPINLSFDSAASIRLYNHHWITLDNGLGKINISIDYKPSRNKPLSIDDFDLLKVIGKGSFGKVMQVRKKDTQKVYALKAIRKSYIVSKSEVTHTLAERTVLARVDCPFIVPLKFSFQSPEKLYFVLAFINGGELFYHLQKEGRFDLSRARFYTAELLCALDNLHKLDVVYRDLKPENILLDYQGHIALCDFGLCKLNMKDDDKTDTFCGTPEYLAPELLLGLGYTKAVDWWTLGVLLYEMLTGLPPYYDEDVPKMYKKILQEPLVFPDGFDRDAKDLLIGLLSRDPTRRLGYNGADEIRNHPFFSQLSWKRLLMKGYIPPYKPAVSNSMDTSNFDEEFTREKPIDSVVDEYLSESVQKQFGGWTYVGNEQLGSSMVQGRSIR

SEQ ID NO: 28146 - protein, 154 aa, Salmonella enterica
AGASLGLWEICIIWGLGISLAVYLTAGISGGHLNPAVTIALWLFACFPKQKVLPYIIAQFAGAFGGALLAYVLYSSLFTEFETAHHMVRGSVESLQLASIFSTYPAAALNVWQAALVEVVITSILMGMIMALTDDGNGIPKGPLAPLLIGILVA

SEQ ID NO: 28147 - protein, 509 aa, Candidatus Blochmannia schaefferi
  misc_feature (500)..(500): Xaa can be any naturally occurring amino acid
  unsure (1)..(509): unsure at all Xaa locations
MAAKDVKFGNDARIKMLRGVNVLADAVKVTLGPKGRNVVLDKSFGAPVITKDGVSVAREIELEDKFENMGAQMVKEVASKANDSAGDGTTTATVLAQSIVNEGLKAVAAGMNPMDLKRGIDKAVVAAVEELKKLSVPCSDPKAIAQVGTISANSDETVGKLIAQAMDKVGKEGVITVEEGSGLQDELDVVEGMQFDRGYLSPYFVNKPERGIVELEHPFILLADKKISNIREMLPVLESVAKAGKPLLIIAEDVEGEALATLVVNNMRGIVKVTAVKAPGFGDRRKAMLQDIAILTAGTVISEEIGLELEKATLEDMGQAKRVVITKDATTIIDGVGNKSAINSRIAQINQQRDEATSDYDREKLQERVAKLAGGVAVIKVGAATEVEMKEKKARVEDALHATRAAVEEGVVAGGGVALIRVANAIGNLCGDNEDQNVGIKVARRAMEAPLRQIMANAGEEPSVIANNVRAGEGNTGYNAATEKYGDMIELGILDPTKVXRSALQYAAS

SEQ ID NO: 28148 - protein, 510 aa, Pseudomonas syringae pv. tomato str. DC3000
MPLLNWSRHMVHLTAIGLISIPAAYAADTLTRDNGAAVGDNQNSQTAGAQGPVLLQDVQLLQKLQRFDRERIPERVVHARGTGVKGEFTASADISDLSKATVFKSGEKTPVFVRFSSVVHGNHSPETLRDPHGFATKFYTADGNWDLVGNNFPTFFIRDAIKFPDMVHAFKPDPRTNLDNDSRRFDFFSHVPEATRTLTLLYSNEGTPTGYRFMDGNGVHAYKLVNAKGEVHYVKFHWKTLQGIKNLDPKEVAQVQSKDYSHLTNDLVGAIKKGDFPKWDLYIQVLKPEDLAKFDFDPLDATKIWPDVPEKKIGQMVLNKNVDNFFQETEQVAMAPANLVPGIEPSEDRLLQGRVFSYADTQMYRLGANGLSLPVNQPKVAVNNGNQDGAMNSGKTTSGVNYEPSRLEPRPADEKARYSELPISGTTQQAKITREQNFKQAGDLYRSYNAKEQTDLVQSFGESLADTDTESKNIMLSFLYKADPTYGTRVTEAAKGDLAKVKSLAASLKD

SEQ ID NO: 28149 - protein, 516 aa, Candidatus Blochmannia vicinus
  misc_feature (510)..(510): Xaa can be any naturally occurring amino acid
  unsure (1)..(516): unsure at all Xaa locations
MAAKDVKFGNDARVKMLRGVNVLADAVKVTLGPKGRNVVLDKSFGAPVITKDGVSVAREIELEDKFENMGAQMVKEVASKANDSAGDGTTTATVLAQSIVNEGLKAVAAGMNPMDLKRGIDKAVVAAVEELKKLSVPCSDPKAIAQVGTISANSDETVGKLIAQAMDKVGKEGVITVEEGSGLQDELDVVEGMQFDRGYLSPYFVNKPESGTVELEHPFILLADKKISNIREMLPILESVAKAGKPLLIIAEDVEGEALATLVVNNMRGIVKVTAVKAPGFGDRRKAMLQDIAILTAGTVISEEIGLDLEKATLEDMGQAKRVLITKDATTIIDGVGNKSAINSRVAQINQQRDEATSDYDREKLQERVAKLAGGVAVIKVGAATEVEMKEKKARVEDALHATRAAVEEGVVAGGGVALIRVANAIRNLCGDNEDQNVGIKVARRAMEAPLRQIMANAGEEPSVIANNVRSGEGNTGYNAATEKYGNMIELGILDPTKVTRSALQYAASXAGLMIT

SEQ ID NO: 28150 - protein, 449 aa, Zea mays
  misc_feature (61)..(61): Xaa can be any naturally occurring amino acid
  misc_feature (91)..(91): Xaa can be any naturally occurring amino acid
  unsure (1)..(449): unsure at all Xaa locations
MESRRGGSVAEDASGAMTSFGPPQHGINTDVNSMQPSRVTDFGALAQSAGFRIEDLVNLNXNNTDVNSMQPSRVTDFGALAQSAGFRIEDXLTLMQGLKYPSLLIICLSALENWGESAMAGSPMTDTSTDPDTDERNQMFEQGLVAVPTASDSSDKSRDKLDQKTLRRLAQNREAARKSRLRKKAYIQNLESSRLKLTQLEQELHQTRQQGIFISTSGDQPQSTSGNGALAFDMEYARWLEEHNKHVNELRLAVNAHAGDNDLRGIVGSVMAHYDEFFRLKGVAARSDVFHVLSGMWKTPAERCFMWLGGFRSSEVLKLLAGHLEPLTDQQLVGISNLQQSSQQAEDALSQGMEALQQSLAETLASGSLGPAGPSGNVANYMGQMAMAMGKLGTLENFLRQADNLRLQTLQQMQRILTTRQSARALLAISDYFSRLRALSSLWLARPRE

SEQ ID NO: 28151 - protein, 417 aa, Arabidopsis thaliana
MQGHHQNHHQHLSSSSATSSHGNFMNKDGYDIGEIDPSLFLYLDGQGHHDPPSTAPSPLHHHHTTQNLAMRPPTSTLNIFPSQPMHIEPPPSSTHNKEGNRKGLASSDHDIPKSSDPKTLRRLAQNREAARKSRLRKKAYVQQLESCRIKLTQLEQEIQRARSQGVFFGGSLIGGDQQQGGLPIGPGNISSEAAVFDMEYARWLEEQQRLLNELRVATQEHLSENELRMFVDTCLAHYDHLINLKAMVAKTDVFHLISGAWKTPAERCFLWMGGFRPSEIIKVIVNQIEPLTEQQIVGICGLQQSTQEAEEALSQGLEALNQSLSDSIVSDSLPPASAPLPPHLSNFMSHMSLALNKLSALEGFVLQADNLRHQTIHRLNQLLTTRQEARCLLAVAEYFHRLQALSSLWLARPRQDG

SEQ ID NO: 28152 - protein, 200 aa, Ophioglossum pedunculosum
LCDAEVAVIIFSGTGKLSEFASSSMRRILEKHRQVVVEGSQSIKPTSQDVVEYWRHEATRLKHQLSVVQDSQRHMLGENLETLTYRDLQKLESKLNAALNQVRGRKNQIISERLVYLQEKEDLLKRENLMMRTKLAEIMAGGVPLMSQSMQDPAARESFLNESSTQPNPPVMENQNGEETNLQLGLELFPTTSFGDGAST

SEQ ID NO: 28153 - protein, 275 aa, Magnetospirillum magnetotacticum MS-1
MRAFKAACLQVNASNDLMANCEAAAAFAVEARAAGADLILMPENVAMMEWGRSNIVLKAQPEDEHQALKFFRDLAREIGAWLHIGSLHVLLEGGMVANRTYVLRPDGEIAARYSKIHMFDVDLGLGEVYKESATFQPGDDAVCVDLPWGRLGLSICYDLRFPHLYRALAHAGSSFMAVPAAFTRTTGKAHWHVLLRARAIETGCYVFAPAQCGEHVNERQTYGHALIVSPWGEVLADALERPGWVMADIDPEKVKDARRKIPCLDHDRPFGVPKR

SEQ ID NO: 28154 - protein, 487 aa, Yersinia pseudotuberculosis IP 32953
MSTHLVWFRNDLRVTDNLALHAACQDPQASVIAVFIATPVQWAAHGMAPRQAAFLRQNLQHLQAALAARGIPLHYHQCDDFQASNTWLVDFCQQQQVDSLFYSQQYELNERLRDDALAVQLSGRAITCQSFHDSVLLAPGTVLTGNNEMYKVFTPFRRAFIQRLLMSDNHCVPAPKARHAPPVLLSPLPFDYPQQSVDSQLFPAGEDAALQRLRRFCREQVQDYRQYRDLPAVPGTSCLSPYLVLGVLSPRQCFNRLWAESPEMLENADSGAFTWLNELIWREFYRHLLVAYPRLCQHHPFIGWTDGLVWNRSESQLKAWQQGQTGYPIVDAAMRQMNETGWMHNRLRMISASFLVKDLLIDWRQGERYFMSQLVDGDLAANNGGWQWAASTGTDAAPYFRIFNPTTQGERFDKDGVFIRRWLPELAAVPDSDIHQPWRWAERQQQHLDYPVPLVDHKQARLATLAAFEAAKRDSTRIPNRKEPSCY

SEQ ID NO: 28155 - protein, 421 aa, Mesorhizobium loti
MADLKRTQPLARDAMAYVLAGGRGSRLKELTDRRAKPAVYFGGKTRIIDFALSNALNSGIRRLGVATQYKAHSLIRHLQRGWNFLRPERNESFDILPASQRVSETQWYEGTADAVYQNIDIIEAYGPEYMVILAGDHIYKMDYELMLRQHVDAGADVTVGCLEVPRMEATGFGVMHVDAKDNIIAFVEKPADPPGIPGNPEFALASMGIYVFKTKFLMEQLRRDAADPGSSRDFGKDIIPYIVQHGKAIAHRFTKSCVRSTMENEAYWRDVGTVDAYWEANIDLTDVTPELDLYDRDWPIWTYAELKPPAKFVHDEDGRRGSAVSSLVSGDCIVSGASLKKSLIFTGARINSYSALEEVVMLPDVHVGRNAKLKRVVIDHGVRIPEGLVVGEDPVLDAKRFRVSEKGICLVTQDMINKLGL

SEQ ID NO: 28156 - protein, 488 aa, Ralstonia metallidurans CH34
MRRQRKAKIVATLGPASTDIAVIRQLFDAGADVFRLNFSHGTHEDHRARYDAVRQVEAETGRPIAILADLQGPKLRIGTFAAGKVAVSAGDTFVLDSDPTPGDAKRVYLPHPELFKAANAGQSLLIDDGKVRLNIESVASGSITTRVANNGTLSDRKGVNVPDAVIPIPALTEKDRKDLAFALELGADWIALSFVQRPSDILEARELIGTRAGVLSKIEKPAALQQLEEIVRVSDAVMVARGDLGVELPPERVPGVQKRILRICRQLGKPIVIATQMLESMIDSPVPTRAEASDVASAIYDGADAVMLSAESANGRHPVAAVSIMNRIITEVENDPLYRNMIDAQHEAPLSTRQDAICAALREVTQIIGAKATVTYTSSGATALRAARERPCAPIVSITPNLEIARRLAITWGVHSTVSPDVQSVDEMVEAAARAALVEGYAAPGDQITIAAGMPFGQGGTTNLLRVAEVGTEVAGLDIGKVPAAEAV

SEQ ID NO: 28157 - protein, 480 aa, Mesorhizobium loti
MQVLSVTPEIFPLIKTGGLADVTGALPIALAAKGVTMRTLIPGFPVVMAAFKKKKAVYQYPLLQGGKASVHAVQIAGLDLFVLDAPHLFDRPGGPYGNASGRTAGQLRRFAALSQVGGDIAGGAISGYQPDIVHAHDWQSAMTLAYMRYGKAVGVPSMMTVHNLAFQGQFGAGIFGELGLPAVAMALDGVEYYGGVGFLKAGLQAAWAITTVSPTYAQEIRSAEFGMGLDGLINMRASDLHGIVNGIDTAIWDPQTDKHLVSNYTAATLEARAPNRAAVEERFGLDRDDSPIVCVISRLTWQKGMDILATVIDGVVATGARLAILGSGDAGLEGALLAAAARHRGRIGVVIGYDEGLSHTMQGGCDAIVIPSRFEPCGLTQLYGLRYGCVPVVARTGGLADTIIDANEAAMAAGVATGFQFAPNNGGAMLHAIARLADAHANPAAFETIQRQGMKTDVSWDRSAEKYVGLYRLLLSKRVA

SEQ ID NO: 28158 - protein, 464 aa, Listeria monocytogenes
MLYSKENKESYLEPVFGSSAEDRDIPKYTLGKEPLEPRIAYRLVKDELLDEGSARQNLATFCQTYMEDEATKLMSETLEKNAIDKSEYPRTAELENRCVNIIADLWHAPKDQKFMGTSTIGSSEACMLGGMAMKFAWRKRAEKLGLDIYAKKPNLVISSGYQVCWEKFCVYWDIDMRVVPMDKEHMQLNTDQVLDYVDEYTIGVVGILGITYTGRYDDIYALNEKLEEYNSKTDYKVYIHVDAASGGFFTPFVEPDIIWDLRLKNVISINTSGHKYGLVYPGIGWVLWKDESYLPEELIFKVSYLGGEMPTMQINFSRSASHIIGQYYNFLRYGFEGYRTIHQKTSDVAQYLAHAVEQTGYFDIFNDGSHLPIVRYKLKDDANVNWTLYDLADRLQMRGWQVPAYPLPKSLENIIIQRYVCRADLGFNMAEEFIQDFQASIQELNNAHILFHDTQQSGVHGFTH

SEQ ID NO: 28159 - protein, 304 aa, Aspergillus fumigatus
MQIFVKTLTGKTITLEVESSDTIDNVKSKIQDKEGIPPDQQRLIFAGKQLEDGRTLSDYNIQKESTLHLVLRLRGGMQIFVKTLTGKTITLEVESSDTIDNVKSKIQDKEGIPPDQQRLIFAGKQLEDGRTLSDYNIQKESTLHLVLRLRGGMQIFVKTLTGKTITLEVESSDTIDNVKSKIQDKEGIPPDQQRLIFAGKQLEDGRTLSDYNIQKESTLHLVLRLRGGMQIFVKTLTGKTITLEVESSDTIDNVKSKIQDKEGIPPDQQRLIFAGKQLEDGRTLSDYNIQKESTLHLVLRLRGG

SEQ ID NO: 28160 - protein, 519 aa, Brassica napus
MSGAITCSAADLATLLGPNATAAADYICGQLGTVNNKFTDAAFAIDNTYLLFSAYLVFAMQLGFAMLCAGSVRAKNTMNIMLTNVLDAAAGGFFYYLFGYAFAFGGSSEGFIGRHNFALRDFPTPTADYSFFLYQWAFAIAAAGITSGSIAERTQFVAYLIYSSFLTGFVYPVVSHWFWSPDGWASPFRSADDRLFSTGAIDFAGSGVVHMVGGIAGLWGALIEGPRRGRFEKGGRAIALRGHSASLVVLGTFLLWFGWYGFNPGSFTKILVPYNSGSNYGQWSGIGRTAVNTTLSGCTAALTTLFGKRLLSGHWNVTDVCNGLLGGFAAITAGCSVVEPWAAIVCGFMTSLVLIGCNKLAELVQYGDPLEAAQLHGGCGAWGLIFVGLFAKEKYLNEVYGATPGRPYGLFMGGGGKLLGAQLVQILVIVGWVSATMGTLFFILKRLNLLRISEQHEMQGMDMTRHGGFAYIYHDNDDESHRVDPGSPFPRSALPLAFNFQLFGNLLPFKYCLGFGFEI

SEQ ID NO: 28161 - protein, 193 aa, Triticum aestivum
  misc_feature (54)..(54): Xaa can be any naturally occurring amino acid
  unsure (1)..(193): unsure at all Xaa locations
MTLTREEAHESKEMESLRVHADALLSLSSPAASSTAPAGSKPVTAAGGQEGAGXEGVFECKTCSRRFTSFQALGGHRTSHTRLQARMLLHDQAADVPGAAERDRARVHECAVSGLEFSMGQALGGHMRRHRGEAPPGPSTSSAAVHGDASSGATQQQEVMPDLNYPPMDDCGGDGQETSADRSSGHQLLDLLV

SEQ ID NO: 28162 - protein, 153 aa, Glycine max
MDWIGAYRGGQRSRDWCDPSSPFTDLWDPRRVGDADDITSSLAHAHVDWRETDKAHIFRADLPGVKKEDLKVQVEENKILQISGERVKEKEDQNDKWHRVERQCGSFLRRFRLPEDANPNQISCTLENGVLNVTVPKVEKKPENKNVRQIDVV

SEQ ID NO: 28163 - protein, 167 aa, Mesembryanthemum crystallinum
QSIDIDGKKVKAQIWDTAGQERFRAVTSAYYRGAVGALVVYDITRRTTFDSISRWLDELKTHSDTTVARMLVGNKCDLDDIRAVSTDEGKSLAEEHGLFFIETSAKDSTNVKTSFEIVIKEIYCSVSRKVLNSDSYKAELSVNRVSLVNDDKQKQNQGYISSSCCSG

SEQ ID NO: 28164 - protein, 508 aa, Candidatus Blochmannia ulcerosus
MAAKDVKFGNDARVKMLRGVNVLADAVKVTLGPKGRNVVLDKSFGAPVITKDGVSVAREIELEDKFENMGAQMVKEVASKANDSAGDGTTTATVLAQSIVNEGLKAVAAGMNPMDLKRGIDKAVVAAVEELKKLSVPCSDPKAIAQVGTISANSDETVGKLIAQAMDKVGKEGVITVEEGSGLQDELDVVEGMQFDRGYLSPYFVNKPESGTVELEHPFILLADKKISNIREMLPILESVAKAGKPLLIIAEDVEGEALATLVVNNMRGIVKVTAVKAPGFGDRRKAMLQDIAILTAGTVISEEIGLELEKSTLEDMGQAKRVLITKDATTIIDGIGNKLAIDSRVAQINQQRDEATSDYDREKLQERVAKLAGGVAVIKVGAATEVEMKEKKARVEDALHATRAAVEEGVVAGGGVALIRVANAIGSLCGDNEDQNVGIKVARRAMEAPLRQIMENAGEDPSVIANNVRSGEGNTGYNAATEKYGNMIELGILDPTKVTRSALQYAA

SEQ ID NO: 28165 - protein, 235 aa, Oryza sativa (japonica cultivar-group)
MGRGKIVIRRIDNSTSRQVTFSKRRNGIFKKAKELAILCDAEVGLVIFSSTGRLYEYASTSMKSVIDRYGRAKEEQQHVANPNSELKFWQREAASLRQQLHSLQENHRQLMGQDLSGLGVKELQTLENQLEMSIRCIRTKKDQLMIDEIHELNRKGSLIHQENMELYRKVNLIRQENAELYKKLYETGAENEANRDSTTPYNFAVIEEANTPARLELNPPSQQNDAEQTTPPKLG

SEQ ID NO: 28166 - protein, 130 aa, Salmonella enterica
ICIIWGLGISLAVYLTAGISGGHLNPAVTIALWLFACFPKQKVLPYIIAQFAGAFGGALLAYVLYSSLFTEFETAHHMVRGSVESLQLASIFSTYPAAALNVWQAALVEVVITSILMRMIMALTDDGNGI

SEQ ID NO: 28167 - protein, 518 aa, Candidatus Blochmannia pennsylvanicus
  misc_feature (510)..(510): Xaa can be any naturally occurring amino acid
  unsure (1)..(518): unsure at all Xaa locations
MAAKDVKFGNDARVKMLRGVNVLADAVKVTLGPKGRNVVLDKSFGAPVITKDGVSVAREIELEDKFENMGAQMVKEVASKANDSAGDGTTTATVLAQSIVNEGLKAVAAGMNPMDLKRGIDKAVVAAVEELKKLSVPCSDPKAIAQVGTISANSDETVGKLIAQAMDKVGKEGVITVEEGSGLQDELDVVEGMQFDRGYLSPYFVNKPESGTVELEHPFILLADKKISNIREMLPILESVAKAGKPLLIIAEDVEGEALATLVVNNMRGIVKVTAVKAPGFGDRRKAMLQDIAVLTAGTVISEEIGLELEKATLEDMGQAKRVVITKDATTIIDGVGNKSAINSRVAQINQQRDEATSDYDREKLQERVAKLAGGVAVIKVGAATEVEMKEKKARVEDALHATRAAVEEGVVAGGGVALIRVANAIRNLCGDNEDQNVGIKVARRAMEAPLRQIMANAGEEPSVIANNVRSGEGNTGYNAATEKYGNMIELGILDPTKVTRSALQYAASXAGLMITTE

SEQ ID NO: 28168 - protein, 142 aa, Salmonella enterica subsp. enterica serovar Paratyphi A str.
MRCEQMANQPSAEELKKKLSEMQFYVTQDRGTEPPFTGRLLHNKRDGVYHCLVCDTPLFHSHTKYDSGCGWPSFYQPVSEEAIRYIDDFSHGMQRVEIRCGNCDAHLGHVFPDGPQPTGERYCVNSASLAFSDEKNGDQLKG

SEQ ID NO: 28169 - protein, 493 aa, Triticum aestivum
  misc_feature (376)..(376): Xaa can be any naturally occurring amino acid
  unsure (1)..(493): unsure at all Xaa locations
MVLTHVQSDEAAASAAVFASRYVQEPVPSYELGARSISKDAAYQIIHDELLLDGSPRLNLASFVTTWMEPECDRLILEGMNKNYADMDEYPVTTELQNRCVNIIARLFNAPVGAGETAVGVGTVGSSEAIMLAGLAFKRRWQNRRKAEGKPYDKPNIVTGANVQVCWEKFARYFEVELKEVKLSEGCYVMDPDKAVEMVDENTIFVAAILGSTLTGEFEDVKRLNDLLAAKNKRTRWDTPIHVDAASGGFIAPFLYPELEWDFRLPLVKSINVSGHKYGLVYPGVGWVIWRNKEDLPDELIFHINYLGADQPTFTLNFSKGSSQIIAQYYQFLRLGFEGYRNVMDNCMENAMVLKEGLVRTGRFNIVSKDQGVPLXAFSLKDSSRHDEFEISEFLRRFGWIVPAYTMPPDAQHVTVLRVVIREDFSRTFAERLVIDIEKVLHELDALPSRSSGPALQHPNGDTVSEKDLARQREVVSVWKRAVAARKKTQGVC

SEQ ID NO: 28170 - protein, 537 aa, Chlamydophila pneumoniae AR39
MPFKCIFLTGGVVSSLGKGLTAASLALILERQRLNVAMLKLDPYLNVDPGTMNPFEHGEIYVTDDGVETDLDLGHYHRFSSAALSRHSSATSGQIYARVIKREREGDYLGSTVQVIPHITNEIIQVILDAAKEHSPDVLIVEIGGTIGDIESLPFLEAIRQFRYDHSEDCLNIHMTYVPYLQAADEVKSKPTQHSVQTLRGIGIIPDAILCRSEKPLTQEVKSKISLFCNVPNRAVFNVIDVKHTIYEMPLMLAQEKIANFIGEKLKLATVPENLDDWRVLVNQLSQDLPKVKIGVVGKYVQHRDAYKSIFEALTHAALRLGHAAEIIPIDAEDENLTMELSQCDACLVPGGFGVRGWEGKIAAAKFCREQGIPYFGICLGMQVLVVEYARNVLNLDQANSLEMDPNTPHPIVYVMEGQDPLVATGGTMRLGAYPCLLKPGSKAHKAYNESSLIQERHRHRYEVNPDYIQSLEDHGLRIVGTCPPQGLCEIIEVSDHPWMIGVQFHPEFVSKLISPHPLFIAFIEAALVYSKDASHV

SEQ ID NO: 28171 - protein, 230 aa, Mannheimia succiniciproducens MBEL55E
MKKLFAEFFGTFWLVFGGCGSAVLAAAYPELGIGFAGVALAFGLTVLTMAYAVGHISGGHFNPAVTLGLVAGGRFQAKEAFSYILAQVVGGVMGATVLYAIASGKVGFDAVNGGFASNGFGEHSPNGYSLAAVFIAEVVLTAFFLIIIHGATDKRAPAGFAPIAIGLALTLIHLISIPVSNTSVNPARSTAVAVFQGGWALEQLWVFWVAPIIGGIIGGIIYRVLLESKD

SEQ ID NO: 28172 - protein, 514 aa, Candidatus Blochmannia chromaiodes
  misc_feature (2)..(3): Xaa can be any naturally occurring amino acid
  misc_feature (510)..(510): Xaa can be any naturally occurring amino acid
  misc_feature (514)..(514): Xaa can be any naturally occurring amino acid
  unsure (1)..(514): unsure at all Xaa locations
MXXKDVKFGNDARVKMLRGVNVLADAVKVTLGPKGRNVVLDKSFGAPVITKDGVSVAREIELEDKFENMGAQMVKEVASKANDSAGDGTTTATVLAQSIVNEGLKAVAAGMNPMDLKRGIDKAVVAAVEELKKLSVPCSDPKAIAQVGTISANSDETVGKLIAQAMDKVGKEGVITVEEGSGLQDELDVVEGMQFDRGYLSPYFVNKPESGTVELEHPFILLADKKISNIREMLPILESVAKAGKPLLIIAEDVEGEALATLVVNNMRGIVKVTAVKAPGFGDRRKAMLQDIAVLTAGTVISEEIGLELEKATLEDMGQAKRVVITKDATTIIDGVGNKSAINSRVAQINQQRDEATSDYDREKLQERVAKLAGGVAVIKVGAATEVEMKEKKARVEDALHATRAAVEEGVVAGGGVALIRVANAIRNLCGDNEDQNVGIKVARRAMEAPLRQIMANAGEEPSVIANNVRSGEGNTGYNAATEKYGNMIELGILDPTKVTRSALQYAASXAGLX

SEQ ID NO: 28173 - protein, 446 aa, Streptococcus thermophilus CNRZ1066
MTSIGLNITSFELALLFMLLFVAFYFIFLAYRDYQQVKNIRKLTKRVKSLMAGNYNEKLCIKGDSELLELANSLNDLSDVFRLTHENLIQEKNRLSSVLSYMSDGVIATNRLGQITMINSTAQRLLNLDRETATQMSILDILDGENPYTYSELLSKTPEIHLSRRDANDEFVTLRVNFALIRKESGFISGLVAVLHDATEQEKEERERRLFVSNVSHELRTPLTSVKSYLEALDDGALNEEIAPNFIKVSLDETNRMMRMISDLLALSRIDNKSTQLNVEMTNFTAFMTYILNRFGQIKSQETNPGKSYEIIRDYPVNSIWVEIDTDKMTQVIDNILNNAIKYSPDGGKITVSMKTTDTQLIVSISDQGLGIPKKDLPLIFDRFYRVDKARSRAQGGTGLGLSIAKEIVKQHNGFIWAKSEYGKGSTFTIVLPYDQDAMMVDEWEM

SEQ ID NO: 28174 - protein, 340 aa, Burkholderia sp. 383
MTAKGTILVTGGAGYIGSHTAVELLDNGYDVVIVDNLVNSKAESVRRIERITGKTPAFHQVDVCDEAALAKVFDAHPITGTIHFAALKAVGESVAKPLEYYQNNIGGLLAVLKVMRERNVRQFVFSSSATVYGVPERSPIDESFPLSATNPYGQSKLIAEQILRDLEVSDPSWRIATLRYFNPVGAHASGLIGEDPAGIPNNLMPYVAQVAVGKLERLRVFGSDYATPDGTGVRDYIHVVDLAKGHIAALDALAKRDASFIVNLGTGQGYSVLEVVRAFEKASGRPVPYELVARRPGDIAECYANPQAAADIIGWRATLGIEEMCADHWRWQEGNPRGFV

SEQ ID NO: 28175 - protein, 325 aa, Arabidopsis thaliana
MTSLKAVRCTCKKWNVLSKDRIICAARKEFLGFMMMDSRVCWMKFDLQGIRNNTLVDISLYKASQTVRIQPRNSFHRLDRYALGYDKNRNHKILRFVDDHLAVGEHVFGYEIYDFSSSSWRVLDVTPDWDIQFYQRGVSLNGNTYFFAQEKITEDGEYEEFEDFLLYFDFSTERFEPRLPLPFHFYVLETVSLSSVRDEQLAVLYQRLDSYEILDIWLTTKIEPSAVSWSMFLKLDMRPLTGFQFMVDGGSFFIDEEKKVAVVFDLTKHKQTVTRRYQTAYIIGQDGYFKPVSLGEAPYLGDPHELYCLPLVCPSYAPSLVQLYN

SEQ ID NO: 28176 - protein, 545 aa, Candidatus Blochmannia castaneus
MAAKDVKFGNDARVKMLRGVNVLADAVKVTLGPKGRNVVLDKSFGAPVITKDGVSVAREIELEDRFENMGAQMVKEVASKANDSAGDGTTTATVLAQSIVNEGLKAVAAGMNPMDLKRGIDKAVVAAVEELKKLSVPCSGPKAIAQVGTISANSDETVGKLIAQAMDKVGKEGVITVEEGSGLQDELDVVEGMQFDRGYLSPYFVNKPESGTVELEHPFILLADKKISNIREVLPILESVAKAGKPLLIIAEDVEGEALATLVVNNMRGIVKVTAVKAPGFGDRRKAMLQDIAILTAGTVISEEIGLELEKATLEDMGQAKRIVITKDATTIIDGVGNKFAINSRVSQINQQRDEATSDYDREKLQERVAKLAGRVAVIKVGAATEVEMKEKKARVEDALHATRAAVEEGVVAGGGVALIRVANAIRNLCGNNEDQNVGIKVARRAMEAPLRQIMANAGEEPSVIANNVRSGEGNTGYNAATEKYGNMIELGILDPTKVTRSALQYAASIAGLMITTECMVTESPKEDKPDLGNAGGAGGMGGMM

SEQ ID NO: 28177 - protein, 218 aa, Pseudomonas syringae pv. tomato str. DC3000
MALSALLFDLDGTLIDTDELHLNAYNQLLARWDRSTDIEYYKAHVMGFPDDMIFGGLFPDIPASQYAGLAAEKETMFRAQLGETIPVAGVLRILDHAQKAGLRTAVVTNAPRENAVAMLTGLGIVDRFEAIVIGGELQRGKPHPIPYLTALELLGVKADQAIAFEDSLAGVQSAHAAGIHTFGVLSGLQEHQLRQAGARDVIRDFNADALWQFLQTAD

SEQ ID NO: 28178 - protein, 397 aa, Thermococcus litoralis
MVKASKRAMSIEYAIRDVVLPARELEKQGIKIIKLNIGDPVKFDFQPPEHMKKAYCEAIMEGHNYYGDSEGDRELREAIVEREKKKNGVDITPEDVQVTAAVTEALQFIFGALIDGGEEILIPGPSYPPYVGLVKFYGGVPKAYRTVEEEGWQPDIDDMRKKITEKTKAIAVINPNNPTGALYEKKTLQEIIDLAGEYDLPIISDEIYDLMTYEGKHVSPGSLTKDVPVIVMNGLSKVYFATGWRLGYMYFVDPENKLAEVREAIGKLARIRLCPNTPAQKAAIAGLRGPMDYLEEYMAKLKERRDYIYKRLNEMPGISTQKPQGAFYIFPKIEEGPWKSDKEFVLDVLHNAHVLFVHGSGFGEGGEMHFRSIFLAPVPVLEEAMDNLEKFMKERLG

SEQ ID NO: 28179 - protein, 518 aa, Candidatus Blochmannia noveboracensis
  misc_feature (510)..(510): Xaa can be any naturally occurring amino acid
  unsure (1)..(518): unsure at all Xaa locations
MAAKDVKFGNDARVKMLRGVNVLADAVKVTLGPKGRNVVLDKSFGAPVITKDGVSVAREIELEDKFENMGAQMVKEVASKANDSAGDGTTTATVLAQSIVNEGLKAVAAGMNPMDLKRGIDKAVVAAVEELKKLSVPCSDPKAIAQVGTISANSDETVGKLIAQAMDKVGKEGVITVEEGSGLQDELDVVEGMQFDRGYLSPYFVNKPESGTVELEHPFILLADKKISNIREMLPILESVAKAGKPLLIIAEDVEGEALATLVVNNMRGIVKVTAVKAPGFGDRRKAMLQDIAVLTAGTVISEEIGLELEKATLEDMGQAKRVVITKDATTIIDGIGNKSAINSRVAQINQQRDEATSDYDREKLQERVAKLAGGVAVIKVGAATEVEMKEKKARVEDALHATRAAVEEGVVAGGGVALIRVANAIRNLCGDNEDQNVGIKVARRAMEAPLRQIMANAGEEPSVIANNVRSGEGNTGYNAATEKYGNMIELGILDPTKVTRSALQYAASXAGLMITTE

SEQ ID NO: 28180 - protein, 355 aa, Zea mays
MAASDVEYRCFVGGLAWATDDHSLHNAFSTYGEVLESKIILDRETQRSRGFGFVTFSTEEAMRNAIEGMNGKELDGRNITVNEAQSRGGRGGGGGGGYGGGRGGGSSGGGGRLEAVAGRTSRPSRDAWKGSDPQTLSTFFPCSIRAAASPATAAMARRRKTDAPPRLDEADRTLYSTFCGAANSLSQLYAQAMAQQKLNFHAGERHALEKLYQWILRKHDEEARLTVAEIMSHIQHEIDYVGTDAHVSPRVPQHPQIANPFANSVVPPGTGLYGQSAAGFAPRPSVTDQSKNTIFSNALSSPVRRSLQNSHTTQGAGNGGRNAEANLAGANREANSTSSNDTSMDMVSDTNEFYQ

SEQ ID NO: 28181 - protein, 155 aa, Salmonella enterica
KVAGASLGLWEICIIWGLGISLAVYLTAGISGGHLNPAVTIALWLFACFPKQKVLPYIIAQFAGAFGGALLAYVLYSSLFTEFETAHHMVRGSVESLQLASIFSTYPAAALNVWQAALVEVVITSILMGMIMALTDDGNGIPKGPLAPLLIGVLV

SEQ ID NO: 28182 - protein, 291 aa, Triticum aestivum
MERPAPVRKSHTNTADLLAWPEGAQPELADAATPPPNRRPHQPSEAIHKVVFGGQVTEEEAESLNKRKQCSAPKWKEMTGSGIFAAGGEAEEDESANASATPVRTASKNYQAISTISHISFAEDESVSPKKPTSIAEVAKQRELSGTLQSEDDSKLQKQVSNAKSKELSGHGIFSPPEDPRPRNSENGSTSQTPGKNAQMSSIKFGEADDADSVVKTAKKIPTKKFNDLTGNNIFKGDAAEAPGTAEKQLSDAKLKEMSGSNIFADGKAPARDFLGGIRKPPGGESSIALV

SEQ ID NO: 28183 - protein, 430 aa, Methanopyrus kandleri AV19
MGYEDEFPESLELFKRAERVMPGGVSSPVRRFDPYPFYVERAEGSRLYTVDGHVLIDYCLAFGPLILGHAHPEVVEAVVERVREGFHYGTPTLPELKLAEKVVELVPNVEKVRLVNTGTEATMSAIRLARAYTGREKIVKFEGCYHGAHDAVLVRAGSGASELGAPDSPGIPESVAENTLVCPFNDVEAFVETVERFDEEIGAVIVEPVLGNAGCVPPDEEFLKVLREYCDGTERLLIFDEVITGFRLELGGAQEYYGIDADLVCLGKILGGGLPIGAFGGPEEYMSRVAPEGKVYQAGTFNGNPVSATAGLVTLEVLERERPYDELSSKAERLASALEDGLEDRGIEGVVNRVESMFQVYFGIEEVRDYADVNSADHDAFKRFHRELLEHGVWIAASNYEAWFLSIAHTETDLERTEEAFEEALDRLTG

SEQ ID NO: 28184 - protein, 333 aa, Pseudomonas fluorescens Pf-5
MGLLIEGRWHDQWYESGKDGAFQREQAQRRNWVTADGRPGPSGEGGFAAEAGRYHLYVSLACPWAHRTLILRKLKGLEQLIDVSVVSWLMRENGWTFDSAHGSSGDALDHFDFMHQRYTADTADYTGRVTVPVLWDKQQQRIVSNESAEIIRMFNSAFDGLTGNGLDFYPQPLRARIDELNARIYPALNNGVYRAGFATSQQAYETAFDDVFAELDALEALLDKQRYLAGEYLTEADVRLFTTLIRFDAVYHGHFKCNLRRIADYPNLSNWLRELYQWPGIAETVDFAHIKGHYYASHTTINPTGIVPKGPLQDFSRAHDRQRLSGQGVWCRG

SEQ ID NO: 28185 - protein, 279 aa, Glycine max
MLKIPEHQVAGHKAKDGILGPLVDDFGKFYKPLQTNKDDDTRGSTELSFYTSLAAAAHDYSIRSFFPAFHGTRLLDASDGSGPHPHLVLEDLLCGYSKPSVMDVKIGSRTWHLGDSEDYICKCLKKDRESSSLPLGFRISGVKDSISSWEPTRKSLQCLSAHGVALVLNKFVSSNNINHDDHHPDCAFATEVYGAVLERLQKLKDWFEVQTVYHFYSCSVLVVYEKDLGKGKATNPLVKLVDFAHVVDGNGVIDHNFLGGLCSFIKFLKDILAVACLHK

SEQ ID NO: 28186 - protein, 116 aa, Glycine max
VSSVTEALDCSQVRSAEDAQLIEEAREATRSGERMSWEQYGALRRKIGGTYTDFFKSYVEVDGAYVEEGWVDKTCKVCKKDSKGEARQVDKLGRYVHVACLEKANAGNFLTRLSSR

SEQ ID NO: 28187 - protein, 270 aa, Mycobacterium bovis AF2122/97
MNDKRRAIYTHGYHESVLRSHRRRTAENSAGYLLPYLVPGLSVLDVGCGPGTITVDLAARVVPGSVTGVEPTDDALSLARAEAQLHRLSNISFTTSDVHKLDFPDDAFDVVHAHQVLQHVADPVRALQEMRRVCTPGGIVAARDADYSGFIWFPKLPALDRWLDLYERAARANGGEPDAGRRLLSWARAAGFDDVTPTASVWCFATASAREWWGLVWADRILQSDLAHQLVDSGLATAAQLEEISTAWREWAAAPDGWLAIPHGEILCRA

SEQ ID NO: 28188 - protein, 452 aa, Brucella suis 1330
MRDSNFLIENNARHLWHPMAHPAEMQANPPRIVNGGEGVEVIDIHGKKVLDAVGGLWNVNLGYSCEPVKKAIRDQLDSLPYYSTFRGTTNSPLIELSYELAEFFKEDGLTRAFFTSGGSDSVETALRLARQFHKINGQPERTKFVSLKKGYHGTHFGGASVNGNANFRRNYEPLLPGVFHLAAPYPYRNPFNMDDPAAIAAAIARQFEDEIAFQGADTIAAFIMEPVLGAGGVIVPHESFMLLMREICDRHGILLIADEVITAFGRTGAWTGSRGWGVKPDMMTTAKAITNGYFPFGAVMISDKVASVFEANKNSLGAIGHGYTYSGHPVGAAAALATLKETARANTAANAGARGVELMAGLNQLKEKHELVGDVRGKGLMAALELVSDREKKSAAAKTVVQKVYDVAYEEGVMVRTSGANVIISPPLVITSADVNRIVSALDAGLSAAKGQ

SEQ ID NO: 28189 - protein, 444 aa, Solanum ochranthum
WSPELSSDLYRVDGWGAPYFTVNSSGDISVRPHGTDTLPHQEIDLLKVVKKASDPINSGGLGLQLPLVVRFPDVLKNRLESLQSAFDYAVQSEGYEAHYQGVYPVKCNQDRFVVEDIVKFGSGFRFGLEAGSKPELLLAMSSLCKGSSEGLLVCNGFKDAEYISLALVARKLQLNTVIVLEQEEELDLVIDISRKMAVRPVIGLRAKLRTKHSGHFGSTSGEKGKFGLTTTQILRVVRKLKESGMLDCLQLLHFHIGSQIPSTELLADGVGEAAQVYSELVRLGAGMKFIDIGGGLGIDYDGTKSSDSDVSVGYGLQDYASTVVQAVRFVCDRKNVKHPVICSESGRAIVSHHSVLIFEAVSSTTTGSQELSSMSLQKLNDDARADYRNLSAAAVRGEYDTCMLYADQLKQRCVDQFKDGNLDIEQLAAVDAVCDFVSKAIGAS

SEQ ID NO: 28190 - protein, 483 aa, Nocardia farcinica IFM 10152
MVSVPELLESVPTQLWIGGPVDATGGATFPVHDPATGEVLTHVADATPEDAVRALDAAVAVQDEWAATPARTRGEILRAVFDAITARAEDFALLMTLEMGKALGESRNEVRYGAEFFRWFSEEAVRVHGRYQHAPSGTGRIIVHKQPVGPCLAITPWNFPLAMGTRKIGPALAAGCTMIVKPASETPLTMLLLARLCSEAGLPDGVLSVITTKHSSAVTKPLLDDPRLRKLTFTGSTEVGKKLVEQSANKLLRTSMELGGNAPFVVFDDADVDAAVQGAMLAKLRNGGEACTAANRFHVQRGVAEEFTDKLVEAMRSSVRLGPGTDPETTLGPLVNADQLATVTELVDDAVSAGARVRLGGEAPGGPGWFYPATVLSDVPDRARILNEEVFGPVAPVVTFDTEEQGLAAANDTRFGLVSYIYTRDLDRALRVAEGLESGMVGINRGVISDPAAPFGGVKESGFGREGGFEGIEEYLSTKYIAL

SEQ ID NO: 28191 - protein, 227 aa, Nicotiana tabacum
RFLQVLHNPTGIDPTIEQWEKIADVIQEKNHIPFFDVAYQGFASGGLDEDASSVRLFAARGMELLVAQSYSKNLGLYGERIGAINVPCSSADAATRVKSQLKRLARPMYSNPPIHGARIVANVVGIPEFFDEWKQEMEMMAGRIKSVRQKLYDSLSAKDKSGKDWPYILKQIGMFSFTGLNKAQSENMTNKWHVYMTKDGRISLAGLSAAKCEYLADAIIDSYYNVS

SEQ ID NO: 28192 - protein, 580 aa, Nitrosomonas europaea ATCC 19718
MICSICLNGCQPVLRLKSRPDEVWREAGNRKSNIDINSLAGEYKMKPLRGKALLNDPVQNKSTAFTREERERYGLQGLLPYSVTDIGKQQQRVLANLRSKNSNIEKYGYLNDLLERNQRLFYRTLIDYIGEIMPLVYTPTVGEACMKFTQIFRKPQGFYITPEDRGKILPLFENWPENDVRIIVVTDGERILGLGDLGANGMGIPIGKMALYVACAGIRPEYCMPVMLDVGTSNQILREDPLYLGYPRPRLTGQDYLSLVEEFVAAVQNKFPQALIQFEDFSSQNAFRLLDRYAGSVRCFNDDIQGTAAVTLAGIYASCRITHKPFVDLKIMLLGTGSAATGVAELLLSAFMMAGLSEAEARSRISFVDRQGLVVTVREEIKPRVRSFASEHAAMDFVGAITAIRPDVLIGATGTAGAFDEIAIRQMARCQEHPVIIALSNPTSHTECTADQAYRWSDGRAVFASGSPFAPVTLDGRTRYPAQGNNVYIYPGIGLGMVASHARLVVEHMFLATAEELANCVLPEEIERGSIYPEIARVRDVSQKIAVKVCQVARQEGLAGVDLPDDLETYVYTLMYEPGY

SEQ ID NO: 28193 - protein, 199 aa, Penicillium marneffei
MASGPATQSLKCVVTGDGAVGKTCLLISYTTNAFPGEYIPTVFDNYSASVMVDGRPISLGLWDTAGQEDYDRLRPLSYPQTDVFLICFSIVSPPSFDNVKAKWFPEIEHHAPGVPIILVGTKLDLREDRATAEALRAKKMEPVSYEQALAVAKEIRAHKYLECSALTQRNLKSVFDEAIRAVLNPRPQPKNKAKRCTIL

SEQ ID NO: 28194 - protein, 803 aa, Chenopodium rubrum
MAGRLTRVPSLKERLDETLTAQRNEILSFLSRIVSHGKGILQPHELLSEFEAVSDKHKLADGPFGEVFRHTQEAIVLPPWITLAVRPRPGVWEYIRVNVDELAVEELTPSQFLHVKEELVDGSVNGNFVLDELDFEPFNASFPRPTLSKSIGNGVEFLNRHLSAKMFHDKESMRPLLDFLRMHHYKGKTMMLNDRIQNLDSLQSVLRKAEEFLATLPADTPYSEFDHKFQEIGLERGWGDTAERVMDMIQLLLDLLEAPDSCTLEKFLGRIPMVFNVVILSPHGYFAQANVLGYPDTGGQVVYILDQVRALENEMLQRIKQQGLDIIPRILIVSRLLPDAVGTTCGQRLEKVFGTEHSHILRSLQTEKGIVRRWISRFEVWPYLETYTEDVANEIAGELQAKPDLIIGNYSDGNIVASLLAHKLGVTQCTIRHALEKTKYPNSDIYWKSFEEKYHFSCQFTADLIAMNHTDFIITSTFQEIAGNKDTVGQYESHMAFTLPGLYRVVHGIDVFDPKFNIVSPGADLSIYFPYTEEKKRLKALHPEIEELLYSEVQNEEHICVLKDRNKPIIFSMARLDRVKNMTGLVEWYGKNKKLRQLVNLVVVAGDRRKESKDIEEKEEMKKMYGLIEEYNLNGQFRWISAQMNRVRNGELYRYIADTKGAFVQPAYYEAFGLTVVEAMTCGLPTFATCHGGPAEIIVNGKSGYHIDPYHGDKAAELLVEFFEKSTANPSHWEAISNGGLKRIEEKYTWKIYSDRLLTLAGVYGFWKYVSNLDRREARRYLEMFYALKYKKPAESVPLLVED

SEQ ID NO: 28195 - protein, 245 aa, Sulfolobus solfataricus P2
MEMGKMLVVYMTLGYPNVQSFKDFIIGAVENGADILELGIPPKYAKYDGPVIRKSYDKVKGLDIWPLIEDIRKDVGVPIIALTYLEDWVDQLENFLNMIKDVKLDGILFPDLLIDYIDDLDKIDGIIKNKGLKNVIFTSPSVPDLLIHKVSKISDLFLYYGVRPTTGVPIPVSVKQLINRVRNLVENKLIVGFGLSSESDLRDALSAGADGIAIGTVFIEEIERNGVKSAINLVKKFRAILDEYK

SEQ ID NO: 28196 - protein, 542 aa, Ruminococcus flavefaciens
MAKDIKYGEDARKALQAGIDKLADTVRITMGPKGRNVVLDKKFGAPLITNDGVTIAKDIELEDAFENMGAQLVKEVATKTNDAAGDGTTTATLLAQTIVREGMKNIAAGANPMVLKKGIAKAVDAAVKAIVDNSKAVQGSEDIARVGTVSSADENVGKLIAEAMEKVTSDGVITIEESKTAETYSEVVEGMQFDRGYISPLHGLQMPDKMEAVYDDAYVLITDKKISSIQEDPPALEQIVKMGQKVVIIAEDVEGEALTNYHPQQPSRGTFKVAAVKAPGFGDRRKEMLKDIAVLTGGEVISSELGLELSETQLSQLGQAKQVVIQKENTIIVDGAGDKEAIKSRVAQIRAAIENTTSDFDREKLQERLAKLAGGVAVIKVGAATEIEMKEKKLRIEDALAATKAAVEEGIVAGGGTAFVNAIPAVIKLVPTLEGDEKTGAKIILKALEAPVRQIAENAGLEGSVIVDKIIRSRKVGYGFDAYNEVYTDMIPAGIVDPTKVTRSALQNAASVASMVLTTESLVADIKEDAPAAPAMPAGGMY

SEQ ID NO: 28197 - protein, 518 aa, Candidatus Blochmannia americanus
  misc_feature (509)..(514): Xaa can be any naturally occurring amino acid
  misc_feature (516)..(518): Xaa can be any naturally occurring amino acid
  unsure (1)..(518): unsure at all Xaa locations
MAAKDVKFGNDARVKMLRGVNVLADAVKVTLGPKGRNVVLDKSFGAPVITKDGVSVAREIELEDKFENMGAQMVKEVASKANDSAGDGTTTATVLAQSIVNEGLKAVAAGMNPMDLKRGIDKAVVAAVEELKKLSVPCSDPKAIAQVGTISANSDETVGKLIAQAMDKVGKEGVITVEEGSGLQDELDVVEGMQFDRGYLSPYFVNKPESGTVELEHPFILLADKKISNIREMLPILESVAKAGKPLLIIAEDVEGEALATLVVNNMRGIVKVTAVKAPGFGDRRKAMLQDIAILTAGTVISEEIGLELEKATLEDMGQAKRIVITKDATTIIDGVGNKFSINSRVAQINQQRDEATSDYDREKLQERVAKLAGGVAVIKVGAATEVEMKEKKARVEDALHATRAAVEEGVVAGGGVALIRVANAIRNLCGDNEDQNVGIKVARRAMEAPLRQIMANAGEEPSVIANNVRSGEGNTGYNAATEKYGNMIELGILDPTKVTRSALQYAAXXXXXXIXXX

SEQ ID NO: 28198 - protein, 90 aa, Ruminococcus flavefaciens
MTIKPLQDRVVVKMAEAEETTQSGIILTGSAKEKPEFAEVIEVGPGTSDVKMEVKKGDKVLISKYSGTNVKLDGEEYIIVRMEDILAIVK

SEQ ID NO: 28199 - protein, 318 aa, Corynebacterium efficiens YS-314
MTIILNRVENVARGSQEKGRPKMSVEDIVVVAVDGSEASKQAVRWAANTANKRGIPLRLASSYTMPQFLYAEGMVPPQELFDDLQAEALEKIDEARAIAHEVAPDIKIGHTIAEGSPIDMLLEMSKSVTMIVMGSRGLGGLSGMVMGSVSGAVVSHAHCPVVVVREDSSVNEDNKYGPVVVGVDGSEVSQRATEVAFAEASARGAELIAVHTWMDMQVQASLAGLAAAQQQWDEVEREQTELLTERIQPLADQYPDVPVKKVITRDRPVRALAEASEGAQLLVVGSHGRGGFKGMLLGSTSRALLQSAPCPMMVVRPA

SEQ ID NO: 28200 - protein, 458 aa, Bradyrhizobium sp. BTAi1
MSMQHVVSDPIRLTAPRRNSLTHIPGDEGWPIIGKTFEVLADPKGHVERNARKYGPVYRSHMFGEVNVVLLGPEANELVLFDQAKLFSSAHGWGHILNLLFPRGLMLLDFEEHRMHRKALSVAFKAGPMKSYLTGLDRGIAARIAQWKQTPGEMLFYPAIKQLTLDLAATSFLGTEIGPEVDAINRAFVDMVAASVAPIRKPLPGTQMARGVKGRQRIVAYFSEQIPLRRAKGDGDDLFSHLCRATDDHGALLSTQDIVDHMSFLMMAAHDTLTSSITSFIAQLAAHPEWQQKLRDEVASLGLVAGAPMASEHLEKMKLTEMAFQETLRLMPPVPSLPRRPIRDFTFKGYAIPAGTGVGVNPMFTHHMPEIWPEPERFDPLRFTDEAQRGRHRFAWVPFGGGAHMCLGLHFAYMQVKCFARHFLSNIEVSFAPGYRPNWQVWPIPKPRDGLRVMLKAV

SEQ ID NO: 28201 - protein, 505 aa, Candidatus Blochmannia nearcticus
  misc_feature (3)..(3): Xaa can be any naturally occurring amino acid
  misc_feature (481)..(481): Xaa can be any naturally occurring amino acid
  unsure (1)..(505): unsure at all Xaa locations
MAXKDVKFGNDARVKMLRGVNVLADAVKVTLGPKGRNVVLDKSFGAPVITKDGVSVAREIELEDKFENMGAQMVKEVASKANDSAGDGTTTATVLAQSIVNEGLKAVAAGMNPMDLKRGIDKAVVAAVEELKKLSVPCSDPKAIAQVGTISANSDETVGKLIAQAMDKVGKEGVITVEEGSGLQDELDVVEGMQFDRGYLSPYFVNKPESGTVELEHPFILLADKKISNIREMLPILESVAKAGKPLLIIAEDVEGEALATLVVNNMRGIVKVTAVKAPGFGDRRKAMLQDIAILTAGTVISEEIGLELEKSTLEDMGQAKRVVITKDATTIIDGVGNKSAINSRIAQINQQRDEATSDYDREKLQERVAKLAGGVAVIKVGAATEVEMKEKKARVEDALHATRAAVEEGVVAGGGVALIRVANAIRNLCGDNEDQNVGIKVARRAMEAPLRQIMANAGEEPSVIANNVRSGEGNTGYNAXTEKYGNMIELGILDPTKVTRSALQ

SEQ ID NO: 28202 - protein, 508 aa, Candidatus Blochmannia floridanus
MAAKDVKFGNDARVKMLRGVNVLADAVKVTLGPKGRNVVLDKSFGAPVITKDGVSVAREIELEDKFENMGAQMVKEVASKANDSAGDGTTTATVLAQSIVNEGLKAVAAGMNPMDLKRGIDKAVVAAVEELKKLSVPCSDPKAIAQVGTISANSDETVGKLIAQAMDKVGKEGVITVEEGSGLQDELDVVEGMQFDRGYLSPYFVNKPESGTVELEHPFILLADKKISNIREMLPILESVAKSGKPLLIIAEDVEGEALATLVVNNMRGIVKVTAVKAPGFGDRRKAMLQDIAILTSGTVISEEIGLELEKATLEDMGQAKRVLITKDATTIIDGVGNKSSIDSRVAQINQQRDEATSDYDREKLQERVAKLAGGVAVIKVGAATEVEMKEKKARVEDALHATRAAVEEGVVAGGGVALIRVANAIRNLCGDNEDQNVGIKVARRAMEAPLRQIMANAGEEPSVIANNVRSGEGNTGYNAATEKYGNMIELGILDPTKVTRSALQYAA

SEQ ID NO: 28203 - protein, 154 aa, Salmonella enterica
IIWGLGISLAVYLTAGISGGHLNPAVTIALWLFACFPKQKVLPYIIAQFAGAFGGALLAYVLYSSLFTEFETAHHMVRGSVESLQLASIFSTYPAAALNVWQAALVEVVITSILMGMIMALTDDGNGIPKGPLAPLLIGILVAVIGASTGPLTG

SEQ ID NO: 28204 - protein, 337 aa, Streptococcus thermophilus CNRZ1066
MSILITGGAGYIGSHTTVELLNAGFDVVLVDDFSNSSPAVLERLEKITGKKFPFYQGSILDTEFLDKVFTKEDIELVIHFAAFKAVGESVKKPLKYYKNNISGTITLLEKMKEYDVKNIVFSSSATVYGTNNPSPMTEDMPTSAINPYGYTKLMMEQILTDVAASDPSWSVTNLRYFNPIGAHESGLIGELPNGIPNNLMPYITQVAIGKLPELNVFGDDYPTPDGTGVRDYIHVLDLASGHLAAVKYNLSHKGAEIFNLGTGHGYSVLDLVKTFEAENKVTIPYRIQGRRAGDIATCYASPEKAKEVLGWEAKKTLKDMVRDSWRWQTTNPNGYED

SEQ ID NO: 28205 - protein, 774 aa, Arabidopsis thaliana
SPISATLERRLDSEVQTRANNVSFEQTKEKIRKMLEKVELSVSAYDTSWVAMVPSPSSQNAPLFPQCVKWLLDNQHEDGSWGLDNHDHQSLKKDVLSSTLASILALKKWGIGERQINKGLQFIELNSALVTDETIQKPTGFDIIFPGMIKYARDLNLTIPLGSEVVDDMIRKRDLDLKCDSEKFSKGREAYLAYVLEGTRNLKDWDLIVKYQRKNGSLFDSPATTAAAFTQFGNDGCLRYLCSLLQKFEAAVPSVYPFDQYARLSIIVTLESLGIDRDFKTEIKSILDETYRYWLRGDEEICLDLATCALAFRLLLAHGYDVSYDPLKPFAEESGFSDTLEGYVKNTFSVLELFKAAQSYPHESALKKQCCWTKQYLEMELSSWVKTSVRDKYLKKEVEDALAFPSYASLERSDHRRKILNGSAVENTRVTKTSYRLHNICTSDILKLAVDDFNFCQSIHREEMERLDRWIVENRLQELKFARQKLAYCYFSGAATLFSPELSDARISWAKGGVLTTVVDDFFDVGGSKEELENLIHLVEKWDLNGVPEYSSEHVEIIFSVLRDTILETGDKAFTYQGRNVTHHIVKIWLDLLKSMLREAEWSSDKSTPSLEDYMENAYISFALGPIVLPATYLIGPPLPEKTVDSHQYNQLYKLVSTMGRLLNDIQGFKRESAEGKLNAVSLHMKHERDNRSKEVIIESMKGLAERKREELHKLVLEEKGSVVPRECKEAFLKMSKVLNLFYRKDDGFTSNDLMSLVKSVIYEPVSLQEESLT

SEQ ID NO: 28206 - protein, 528 aa, Saccharomyces cerevisiae
MSYNNGNTYSKSYSRNNKRPLFGKRSPNPQSLARPPPPKRIRTDSGYQSNMDNISSHRVNSNDQPGHTKSRGNNNLSRYNDTSFQTSSRYQGSRYNNNNTSYENRPKSIKRDETKAEFLSHLPKGPKSVEKSRYNNSSNTSNDIKNGYHASKYYNHKGQEGRSVIAKKVPVSVLTQQRSTSVYLRIMQVGEGTYGKVYKAKNTNTEKLVALKKLRLQGEREGFPITSIREIKLLQSFDHPNVSTIKEIMVESQKTVYMIFEYADNDLSGLLLNKEVQISHSQCKHLFKQLLLGMEYLHDNKILHRDVKGSNILIDNQGNLKITDFGLARKMNSRADYTNRVITLWYRPPELLLGTTNYGTEVDMWGCGCLLVELFNKTAIFQGSNELEQIESIFKIMGTPTINSWPTLYDMPWFFMIMPQQTTKYVNNFSEKFKSVLPSSKCLQLAINLLCYDQTKRFSATEALQSDYFKEEPKPEPLVLDGLVSCHEYEVKLARKQKRPNILSTNTNNKGNGNSNNNNNNNNDDDDK

SEQ ID NO: 28207 - protein, 291 aa, Brassica napus
  misc_feature (163)..(163): Xaa can be any naturally occurring amino acid
  unsure (1)..(291): unsure at all Xaa locations
MGNVNAREKEEEEEEEANSNNHHNDNDAATRSHQASDFTPSEQLMGGHHHHQSPPHSPRATQSPLMFAPQVPVIPLQRPDEIHIPNPSWMMQSPYEEASNEQGIPTMITWCHGGKEISVEGSWDNWKSSRLQRSGKDFTIMKVLPSGVYEYRFIVDGQWMHAXPELPFARDDAGNTFNLLDLQDYVPEDIQSISGFEPPQSPEASYSSLLLGAEDYSKEPPLVPPHLQMTLLNLPPANPDVPSPLPRPQHVVLNHLYMHKGKSGPSVVALGSTNRFLAKYVTVVLYKSLQR

SEQ ID NO: 28208 - protein, 146 aa, Brassica napus
  misc_feature (142)..(142): Xaa can be any naturally occurring amino acid
  unsure (1)..(146): unsure at all Xaa locations
KILMKHSDSVLAATKAKNGFDAFHIAAKNGNLKVLDVLMEANPELSFTFDSSKTTALHTAASQGHGEIVCFLLDKGVDLAAIARSNGKTALHSAARNGHTEIVKELIGKKVGMVTRVDKKGQTALHMAVKGQNAEIVDALMXADLR

SEQ ID NO: 28209 - protein, 361 aa, Glycine max
MARLTDGTLSEVLPRISDTDVQISRQRISAFLSSHTAYELLPESGKVVALDVDLPVKQAFHILHEQGVFMAPLWDFCKGQFVGVLSASDFILILRELGNHGSNLTEEELETHTISAWKEGKSYLNRQNNGHGTAFSRCFIHAGPYDNLKDIAMKILQKEVSTVPIIHSSSEDASFPQLLHLASLSGILKCICRYFRHCSSSLPVLQLPICAIPVGTWVPKIGESNRRPLAMLRPTASLASALNLLVQAQVSSIPIVDDNDSLLDIYCRSDITALAKNRAYTHINLDEMTVHQALQLGQDAYSPYELRSQRCQMCLRSDPLHKVMERLANPGVRRLVIVEAGSKRVEGIVSLSDIFKFFIGG

SEQ ID NO: 28210 - protein, 580 aa, Zea mays
MGEVEDMYTQDGTVDMKGNPAVKKGTGNWRACPYILANECCERLAYYGMSTNLVNYMKTRLGQVNSVASNNVTNWQGTCYITPLIGAFFADAYMGRFWTIAIFMIIYIFGLALLTMASSVKGLVPTSCGDKDVCHPTDAQAAVVFVALYLIALGTGGIKPCVSSFGADQFDENDEREKKSKSSFFNWFYFSINIGALVASTVLVYVQTHVGWGWGFGIPAVVMAIAVGSFFVGTPLYRHQKPGGSPLTRIAQVLVACARKWNVAVPADKSRLHETVDGESGIEGSRKLEHSEQLACLDRAAVVTAEDGAEASPWRLCSVTQVEELKSVIRLLPIWASGIVFAAVYSQMSTMFVLQGNTLDQSMGPRFKIPSATLSMVDTISVIVWVPVYDRAIVPLVRSYTGRPRGFTQLQRMGIGLVVSIFSMVAAGVLDIVRLRAIARHGLYGENDIVPISIFWQIPQYFIIGCAEVFTFVGQLEFFYDQAPDAMRSMCSALSLTTVALGNYLSTVLVTIVTHITTRHGRIGWIPENLNRGHLDYFFWLLAVLSLLNFLAYLVIASWYKYKKTADDYPGAKGEHGTEH

SEQ ID NO: 28211 - protein, 525 aa, Escherichia coli CFT073
MPPQFLSLTPLPRKNWHSTSMCLDSFMNINGCFLLWRAKGETLMSAIDSQLPSSSGQDRPTDEVDRILSPGKLIILGLQHVLVMYAGAVAVPLMIGDRLGLSKEAIAMLISSDLFCCGIVTLLQCIGIGRFMGIRLPVIMSVTFAAVTPMIAIGMNPDIGLLGIFGATIAAGFITTLLAPLIGRLMPLFPPLVTGVVITSIGLSIIQVGIDWAAGGKGNPQYGNPVYLGISFAVLIFILLITRYAKGFMSNVAVLLGIVFGFLLSWMMNEVNLSGLHDASWFAIVTPMSFGMPIFDPVSILTMTAVLIIVFIESMGMFLALGEIVGRKLSSHDIIRGLRVDGVGTMIGGTFNSFPHTSFSQNVGLVSVTRVHSRWVCIASGIILILFGMVPKMAVLVASIPQFVLGGAGLVMFGMVLATGIRILSRCNYTTNRYNLYIVAISLGVGMTPTLSHDFFSKLPAVLQPLLHSGIMLATLSAVVLNVFFNGYQHHADLVKESVSDKDLKVRTVRMWLLMRKLKKNEHGE

SEQ ID NO: 28212 - protein, 571 aa, Legionella pneumophila str. Lens
MLDFSLNRDPQTGELYIETSLCGKPLLTTPQLNKGTAFTQEERKDFGLLGKLPHRVETLDEQVKRAYLQYSSYTTRLQQHIYLNNLHDKNQIVFYKLLSRHLGEMLPIIYTPIVGAAAKRFSHEYRQPRGLYIAHSDKNQLEEIINNRSNPDIDLVVVTDGEGVLGIGDQGIGGMDIPVAKLMVYSLCGGIDPTRTLPIFLDVGTNNQELLNDPMYLGCRHPRIKSSEYDDFIKTFVNKIHKQFPNAFLHWEDFGRGNARRILDQFQDELCTFNDDIQGTGAVTLAAILAACDVTGLPLHEHRIVVFGAGSAGTGISDQIVDAMVKNRLSLTDAYDRFWLIDKQGLLLATDQELTDAQKPYARNPIDIQSWEINNKQHPSFTDTIRHVKPTILIGCSAQTGAFSQDIVETMSTACERPIIFPLSNPDEKCEAQPSDILAWSKGRALIATGTAFAPIEYQNRMVQIAQCNNALVFPGIGLGVLAVSASRLTKDMILAAAQTLSKFAPSKKDSFLPLLPSLDNAQIVAKEIAIAVAQCAIDSGYAQKNQDKELPRLIDELFWEPRYLPFRKRG

SEQ ID NO: 28213 - protein, 504 aa, Mycobacterium bovis AF2122/97
MPELATSGNAFDKRRFSRRGFLGAGIASGFALAACASKPTASGAAGMTAAIDAAEAARPHSGRTVTATLTPQPARIDLGGPIVSTLTYGNTIPGPLIRATVGDEIVVSVTNRLGDPTSVHWHGIALRNDMDGTEPATANIGPGGDFTYRFSVPDPGTYWAHPHVGLQGDHGLYLPVVVDDPTEPGHYDAEWIIILDDWTDGIGKSPQQLYGELTDPNKPTMQNTTGMPEGEGVDSNLLGGDGGDIAYPYYLINGRIPVAATSFKAKPGQRIRIRIINSAADTAFRIALAGHSMTVTHTDGYPVIPTEVDALLIGMAERYDVMVTAAGGVFPLVALAEGKNALARALLSTGAGSPPDPQFRPDELNWRVGTVEMFTAATTANLGRPEPTHDLPVTLGGTMAKYDWTINGEPHSTTNPLHVRLGQRPTLMFDNTTMMYHPIHLHGHTFQMIKADGSPGARKDTVIVLPKQKMRAVLVADNPGVWVMHCHNNYHQVAGMATRLDYIL

SEQ ID NO: 28214 - protein, 374 aa, Desulfotalea psychrophila LSv54
MKDIKELFKKKAKVLIADDDAIVRETISEILGVYGYEVELASCGGEAISKVDDSFDVIVLDINMPDLNGFETMDAIEKLGFNIPILFLTGAGSMDYAVKAINMGAYDFLTKPIKDLDLFNIQIKRAVEKRAYILREQEYKKSLEHEIRIKTAQLEKQNKLLTSYNKSIKNATVQLMASLQNAMEEKDYYTAGHTTRVTEYAVMLGLSMGISESDIAILRRAAQFHDIGKLVIDLSCIQKAGKLTDDEWALIKKHPEVGASIIEPLGFMDKEIAIIRHHHERMDGKGYPAGLRGHEIDELTRILTVVDSYDAMTSHRNYKENMTREQAVAELERCSGTQFDADIVKYFSRSIVDFTLSGKFEADKPLDCYLNYTG

SEQ ID NO: 28215 - protein, 291 aa, Cucumis sativus
MASSSVFSTTLFLSLLFTSFFLPSSASNFHQSTDITWGDGRAQILNNGDLLSLSLDKASGSGFQSRNEYLYGKIDMQIKLVPGNSAGTVTAYYLRSEGSTWDEIDFEFLGNLSGDPYTVHTNVFSQGKGNREQQFHLWFDPTADFHTYSILWNPQRIVFYVDGTPIREFKNMESIGVAFPKNQPMRLQSSLWNADDWATRGGLIKTDWTQAPFTASYRNFNENACIWSSGQSSCGSNSSPAASDKPWYSQELDTDSEGKLKWVQKNYMIYNYCTDVNRFPQGLPPECNGTA

SEQ ID NO: 28216 - protein, 206 aa, Zea mays
GRVGFFLPPCLFLLRAVQDEWAVCKVFNKELQAARSEPLLAAAGAAELERVGSLGFLNELLDSAELPALIGADVDEVIDFKGPASVSDASYLPVKMEEEHALLQMQQCQYQPPPPMLYPSQYFSLPAMNSGHLPPAIRRYCKAEQQVVSAQTASVISPSRETGLSTDPNAAGGYAEISSATTPSSSHQFLPELDDPALNLADLWKY

SEQ ID NO: 28217 - protein, 138 aa, Gluconobacter oxydans 621H
MTQSCGPNGQTGGGCGVGLTPEQRRILHEHGTERPGSSPLNDEKRAGIYACAACGRPLFASETKYDSGSGWPSFFQALPDGVETTQDSRYGMVRTEVHCANCKGHLGHVFPDGPPPTGLRYCMNGLALDFRPAEGEKA

SEQ ID NO: 28218 - protein, 419 aa, Zea mays
LFSQLHSDNSSPTENKLQLGEKSFASEAYAVNWNEPPDQQSQDSLERPEPYRVIWKQPVQGEKSFVSEAYRVKWNKSPPPHQQSQDSLEQEAYRVKWNKSPPPQQQTQDSFEQEAYRVKWNKSPPPHQQSQDSFEPEAYRVKWNKSPPPHQQSQDSFEPEAYWVGWKKHAQGATDVADETTPARGHGLHVATGMLFTRKSLLPGTALPEGTKFCGHGFLDPERFELRADADAIPFSYSQLDTILRMFRIPRGSKKAEQVAATLRTCEAESPEAHACATSEQAAADFAASSLGVRASKLVALVTTVHGGKDATRYVVAPNGITRIGKAAGAAAVVPCHPMPYPYMVHYCHQPADVEALRVELTGLGDGGVTTAIAMCHANTMNWDDRYFQMLNVTRGEEICHFMPRNYVLWLPAAELLGN

SEQ ID NO: 28219 - protein, 378 aa, Yarrowia lipolytica CLIB122
MFFSFPALLALLALSALSVAAPSNPKVVSMDVSKKTYLGSVKGRPGVYISTYISVGTPPQSFEVSFDTGSSDLWIPAVGDDQTGGPGLFNPQASSTFKSLGTSFNAAYVGGTAQGYWVTDNVNAAGLSLSNLQLGAVSNMQDQKQGILGVSFKQVEMSVRNGQPQYYNFPFSAKEQGFIDHVLYSLHFDGPHSPDGTFLLGGIDHAKYSGDLHYYNVANPSAGPQINFKSLVLDGHELDFNLPVTLDSGSLAIAFPDTQFRAIGSGLNLTNYNKDMGLYYIDCQAEISVDFKFDGLTISANSSSLVLPMGFFSGDTTDPSCVLGVQNSALYESPNDAVLGEPFLKNAYVVYDLEDYSIGLAPAVYTDKSDVQAVSRTL

SEQ ID NO: 28220 - protein, 328 aa, Rubrivivax gelatinosus PM1
MSKKPVRVAVTGAAGQIGYALLFRIASGEMLGKDQPVILQLLEIPDEKAQKALKGVMMELEDCAFPLLAGMEAHGDPMTAFKDADYALLVGSRPRGPGMERAELLSINGAIFTAQGKALNAVASRNVKVLVVGNPANTNAYIAMKAAPDLPRKNFTAMLRLDHNRAASQIAAKTGKPVSSIKQLAVWGNHSPTMYADYRFATIDGASVKDMINDQVWNKDVFLPTVGKRGAAIIEARGLSSAASAANAAIDHMRDWALGTNGAWVTMGVPSNGEYGIPKDVMFGFPVTCANGEYKIVDGLAIDAFSQECINKTLAELQGEQDGVKHLI

SEQ ID NO: 28221 - protein, 596 aa, Rubrivivax gelatinosus PM1
MTTKLPTRKFDVVIVGAGGSGMRASLQLARAGLNVAVLSKVFPTRSHTVAAQGGIGASLGNMSEDNWHYHFFDTVKGSDWLGDQDAIEFMCREAPKVVYELEHFGMPFDRNPDGTIYQRPFGGHTANYGEKPVQRACAAADRTGHAMLHTLYQQNVKARTQFFVEWMALDLICDADGDVVGVTALEMETGDVHVLQGKTVLLATGGAGRIFAASTNAFINTGDGLGMAARAGIPLEDMEFWQFHPTGVHNAGVLLTEGCRGEGAILRNSNGERFMERYAPTLKDLAPRDFVSRCMDQEIKEGRGCGPNKDYIQLDMTHLGGETIMKRLPSVFEIGHNFANVDITKEPIPVVPTIHYQMGGIPTNVHGQVVVPNNGKPNDIVNGLYAVGECACVSVHGANRLGTNSLLDLLVFGRAAGNHIVEFNQKNKLHKSLPADAADRTLARLARLDGSSSGEYAQDVANDIRTTMQQHAGVFRTQAMLDEGVTKMAAVAERVRSIALKDKSKVFNTARIEALEVENLIEAAQATIVSAAARKESRGAHTVNDYGDTPEHPNGRNDAVWMKHTLWYSDGNRLDYKPVNLKPMSVESIPPKVRTF

SEQ ID NO: 28222 - protein, 385 aa, Streptomyces carzinostaticus
MTLPTSDRSPTVPAPGFTDAVNAFMTRPQEPETLQLLTPAGTLVAPPEEIPGYAPELLRTLYRDMVISRGLDTEATALQRQGELGLWPPLAGQEAAQVGSAHALRPDDYVFPSYREHGVAWCRGVDPVDVVRLFRGVTNGGWDPRESGFHLYTLVVGAHTLHATGYAMSLAKNGSDAAAVAYFGDGASSEGDVAEAFTFAAVHDAPVLFFCQNNQWAISEPVTRQQRGPLYRRAHGYGFPGVRVDGNDVLAVHAVTRFALDHIRSGNGPFLVEAFTYRMGAHTTSDDPTRYRTQTELEYWRARDPIARLRVHLTEAGHAAPSFFEEVEEQARDLAHRVRREVRNMPDPQPPAVFDHVYAEGHAVLEEERRQFEEYHRSFARPESG

SEQ ID NO: 28223 - protein, 376 aa, Vigna unguiculata
HLVESKGGAIACMFLALFFLGTWPALLTMLERRGRLPQHTYLDYSITNFFAALLIAFTFGEIGKGKPDEPNFLAQLAQDNWPSVLFAMGGGVVLSLGNLSSQYAFAFVGLSVTEVITASITVVIGTTLNYFLDDKINKAEILFPGVGCFLIAVFLGFCRFNSSNASDNKAKLSNYTSDYKEVAISSKESDLVKSKDLERGSSSADNVEAGTAVFLLELEERRAIKVFGKSTLIGLALTFSAGLCFSMFSPAFNLATNDQWHTLPNGIPHLTVYTAFFYFSISCFVIAIILNITFLYHPVLNLPKSSLKAYLADSDGRIWALLAGLLCGFGNSLQFMGGQAAGYQQQSLCRHFLCKHFWGVLLFGEYRRSSRKTYIC

SEQ ID NO: 28224 - protein, 456 aa, Mannheimia succiniciproducens MBEL55E
MTKHYDYISIGGGSGGIASINRAAGYGKKCAIIEAKHLGGTCVNVGCVPKKVMFYGAHIADAINHYAEDYGFDVSVNKFDFAKLVESRQAYIGRIHTSYGNGLSKNKVDVFNGFARFVDAKTVEVSYEDGSSEQITADHILIATGGRPSIPNVKGAEFGISSDGVFALNELPKRVAVVGAGYIAVELAGVFNSFGVETHLFVRQHAPLRNQDPLIVDTLVEVLVQDGIQLHQKAIPQEVVKNADGSLTLKLEDGRETVVDSLVWAIGREPATDVINLQAAGVETNDRGFIKVDKYQNTNIPGIYAVGDIIEGGIELTPVAVAAGRRLSERLFNNKPDEHLDYNLVPTVVFSHPPIGTVGLTEPKAIEKYGAENVKVYTSSFTAMYTAVTQHRQPCRMKLVCAGADEKIVGLHGIGFGVDEMIQGFAVAIKMGATKADFDNTVAIHPTGSEEFVTMR

SEQ ID NO: 28225 - protein, 527 aa, Bacillus anthracis str. Sterne
MSEETIIPSKIKGIASKIILKKSVFTFNHTCGILLCKFARLVKSTKNNKKRKITISTMPANSFETLLKTNLLASILFICKHVLVQMHLLLQHKCYSLFLFLNRNHYDLLLIFPFQSFNIKRNHYDLKERNNFMKKIPITVLSGFLGSGKTTLLHHILTNKNNLKVAVIVNDMSEVNFDASLIKKGGFSRTEEKLVEIQNGCICCTLREDLIIEVNRLVENGDIDYIVIESSGISEPIPVAQTFTYTDDVLNIDLTKNCRLDTMVTVVDANRFWDDFADGESLLDRKQAINENDTREVIDLLIDQIEFANVIILNKIDLLEKEDVIELHQLLQKLNPNAKIIESSFSNVPLQEILNTNVFNYEEASQSAGWIQELNSEHHTPETEEYGINSFVYRRKYPFHPERLMNWLEKWPVDVVRAKGFFWLASRNNMIGLLSQAGSSITIQGAGEWIAALPETERNQMIIEEPEVLKNWDKQYGDRITELVFIGIDMNRSLIEQSLDDCLLTEKEMTQNWNTFIDPIPAFTYTS

SEQ ID NO: 28226 - protein, 102 aa, Glycine max
DSLDWKLMGMEYVRARRLALHKVYADSFVDAEIGSFEQYKFKISKPLSVPGSPKIRGSNGIESGGDNNSIKISNEIINGLSFFDDDEEWISIPHKYQIQQYH

SEQ ID NO: 28227 - protein, 297 aa, Mannheimia succiniciproducens MBEL55E
MPLFFYFILYIMTHILCENREFKKIPNGLFLIKTTNHNFFKHNSQSSKEKNMNPYLAEFLGTALLVLMGNGVVANVCLNKTKGNGSGWIVITTAWAFAVYVAVVATGPYSGAHLNPAVTLGLAANGGFSWTMVPGYIIAQILGGIFGGLVVYLFYRDHFSATEDEGAKRASFCTEPAIRNYGSNLFSEIIGTVVLVSVIFYISAGSITLPGAEGATPVGLGSIGGLPVAILVWAIGLSLGGTTGYAINPARDLGPRIALTLLSKKLKTSPDWGYAWVPVLGPCIGGLLAAIGYQIVM

SEQ ID NO: 28228 - protein, 152 aa, Salmonella enterica
ICIIWGLGISLAVYLTAGISGGHLNPAVTIALWLFACFPKQKVLPYIIAQFAGAFGGALLAYVLYSSLFTEFETAHHMVRGSVESLQLASIFSTYPAAALNVWQAALVEVVITSILMGMIMALTDDGNGIPKGPLAPLLIGILVAVIGASTG

SEQ ID NO: 28229 - protein, 328 aa, Shigella flexneri 2a str. 301
MTRTNLITGFLGSGKTTSILHLLAHKDPNEKWAVLVNEFGEVGIDGALLADSGALLKEIPGGCMCCVNGLPMQVGLNTLLRQGKPDRLLIEPTGLGHPKQILDLLTAPVYEPWIDLRATLCILDPRLLLDEKSASNENFRDQLAAADIIVANKSDRATPESEQALQRWWQQNGGDRQLIHSEHGKVDGHLLDLPRRNLAELPASAAHSHQHVVKKGLAALSLPEHQRWRRSLNSGQGYQACGWIFDADTVFDTIGILEWARLAPVERVKGVLRIPEGLVRINRQGDDLHIETQNVAPPDSRIELISSSEADWNALQSALLKLRLATTA

SEQ ID NO: 28230 - protein, 560 aa, Mycobacterium bovis AF2122/97
MTPQKSDACSDPVYTVGDYLLDRLAELGVSEIFGVPGDYNLQFLDHIVAHPTIRWVGSANELNAGYAADGYGRLRGMSAVVTTFGVGELSVTNAIAGSYAEHVPVVHIVGGPTKDAQGTRRALHHSLGDGDFEHFLRISREITCAQANLMPATAGREIDRVLSEVREQKRPGYILLSSDVARFPTEPPAAPLPRYPGGTSPRALSLFTKAAIELIADHQLTVLADLLVHRLQAVKELEALLAADVVPHATLMWGKSLLDESSPNFLGIYAGAASAERVRAAIEGAPVLVTAGVVFTDMVSGFFSQRIDPARTIDIGQYQSSVADQVFAPLEMSAALQALATILTGRGISSPPVVPPPAEPPPAMPARDEPLTQQMVWDRVCSALTPGNVVLADQGTSFYGMADHRLPQGVTFIGQPLWGSIGYTLPAAVGAAVAHPDRRTVLLIGDGAAQLTVQELGTFSREGLSPVIVVVNNDGYTVERAIHGETAPYNDIVSWNWTELPSALGVTNHLAFRAQTYGQLDDALTVAAARRDRMVLVEVVLPRLEIPRLLGQLVGSMAPQ

SEQ ID NO: 28231 - protein, 97 aa, Brassica napus
MKPISNNDETWDATLKDLTSNVKEIQDNVLEEIITPNLKTEYLQRFNMDRFDKKLFKKNVPVVSYEDIKPDIDRVVNGESSDVISARPITGFLLSSG

SEQ ID NO: 28232 - protein, 570 aa, Pinus taeda
MEVFNQHVCARLVLMAIWLTLLTAMASAKLRTETFVLQSTSVKRLCGTHNIITVNGQFPGPTLHVRNGDTLVVKVYNNAQYNATIHWHGVRQFRTGWSDGPEYITQCPIRPGGSYTYRFTITGQEGTLWWHAHSSWLRATVYGALVISPSPGATYPFTRPHGQVPILLGEWWSRNPIDVVDQATRTGAAPNVSDAFTINGQPGDLYQCSSSDTIRVSINNGETKLLRVINAALNTDLFFTVGGHTMTVVAVDALYTKPFQTNLLMLGPGQTTDVLVTADQTTGRYYMAARAYSSGQGVPFDNTTTVAILEYKGSSSSTSVPTVPNLPAYNDTQTATRFANALRSLASHDHPVFVPQSVDQNLFYTIGLGLINCPGQSCGGPNGSRFAASMNNASFVLPTTSSILEAQHFGMKGVFSGDFPDNPPVQFDYTAQNVSRGLWSPVKSTRVKILNYNTTVQVILQGTNIFAGESHPIHLHGYDFYIVGSGFGNYNPKTDPQKFNLVDPPMRNTVNVPVNGWAAIRFVADNPGAWVMHCHLDVHITWGLAMVFVVSNGPSSLLSIESPPLDLPQC

SEQ ID NO: 28233 - protein, 420 aa, Leifsonia xyli subsp. xyli str. CTCB07
MFLLHGVAVMTKKIVITGLGASSPLGGTAPESWAALLAGESGARSLTHDWVTELELPITFAAEAKVRPSAVLERPVAKRLDPSSQFALVSAMEAWADAGSPRVAPERLGVDYATGIGGVWTLLDAWDTLRERGPRRVLPMTVPMLMPNAAAAAVSMHFEARAFARTVASACASSTESLVNAYEHLQAGLADIVITGGSESAIHPITLASFASMQALSRRNDDPATASRPYSIDRDGFVMGEGAASLVLETEKHAFARGARIYAEVVGGGVTADSYHITANDPEGRGASRAVRMALEQAGASPDEVTHINAHATSTPVGDPSEYVALREVFGDRVHSVPVSATKASTGHLLGGTGALEAVFTVLALRDRIAPPTINITEMDPAIPLQVSGESQPLGNGPQLAISNSFGFGGHNAVVAIRSV

SEQ ID NO: 28234 - protein, 590 aa, Candida albicans SC5314
MGQILSQPVVEKHSDEHKDKYLAYGISCMQGWRINMEDAHATILNLYDLPLKKSLSSNSEQDEDEEDEEEEADSQDSTTTNTTKSQQQQNQKEDLQQNNDKQNSQQDIKDGDNDTQMSDSDENHHHAAPQQQHIAFFGVYDGHGGEKAAIFTGEKLHHLIKETKEFKQKDYINALKQGFLNCDQEILKDFYMRDDDSGCAATSAIITPDLIVCGNAGDSRTIMSTNGFAKALSFDHKPSNEGEKARICAAGGYVDMGRVNGNLALSRGIGDFDFKKNVDLPAEEQIVTCYPDVIQHNIDYKSDEFVVLACDGIWDCLTSQKCVECVRRGIYERKSLSIICEEIMDLCCAPTSDGSGIGCDNMSIAIVALLDYTKNETLDQWYEKIISRVEQQQQQKNDPNSLNKYGPISQPYNELYKEMYGEYYDIGQQGQGGNGRSNIGSGNGSGRGSGASGSSSGGGASINGNSIFGRSGYDDEDDDDDEEKNIERRRRDQDESNLNGGAISLQKLLASNAITNENGVIYLDTSSAQSLLAHFGVADAGAHGDEEDEEEEGEGEDVHQGLAHEEEEEEEEEKEGSKIEEISEKIDDEV

SEQ ID NO: 28235 - protein, 1152 aa, Candida albicans SC5314
MSHIDGDDHMTKDLIDSLESKDNDLSLVTSNTQIPDVEVANLTHDADEINQLFDTATNNVLPESNKKDKPIDTQDLHEDDPKAVPKTTSNGESTSNSNSVSPKLLPNDGKSTPKIQKELRRKSTFVPVTSNSKSLEPSEDDNNNNNNNSRISAYARLDFENFTFFVQTLQVVLGRKSNDETLQQNVDVHLSSKKAISRRHAKIFYNFGTQRFEISILGRNGAFVDNVFVEKGLTIPLTDGNKIQIGDIPFKFVLPSNEPNEENNNQDSSEKQFNPSDAINLRSNLYSKSSSPQSSPKRKPQPSKKVKKEPVSASNTSKDIKPTPPVPTTAISPTASISTSTNAATAATATTPATTTAARKNSINRRNSLLKIRRLSNARRKSLAANDEINELLKDLGVTSIDEINEEDSELLDAQIQSLLDEDNENLGGIEDSLMKLAEFNESAIDDDDDEEEGNENSQADLDRLEKTMEHDAIDDEIKAIDSNLTLLDDEISKLTPLINDTNQGLLEEKETKKKQLEEEKRKKQLQQLQHKNSLAKFPRRSAPLMGKPASIQPPASSSIYSRINGLDKIGKTVSPRPPPPKLIAPVLRVTAEPSAIRSRPPLRAITVSDSSYIATFSYPKTIEEPSKYPKPKVKKEHHKKHSKKVYSLDEIPEPYRSKPNISFQIMITNVLKTEAARNGLIINEITEAIKEVYPYYKYCTDGWQFSINHCIKFTKIYKRLQKRGSEWLYAMDELYINERENIRIKQREIAKAKAKAEALRQEEIRQRQRLEAQKSLPHNIVGRNFASPYANTRVPPNQYNQFSQSSSSSSSSATTTTNGQYGSTTMVGGTSPQAGSIRAQLAAVRGNGNTPATTSTTPSLPAMNDPKTKKSLEYLQKELFTLYKARKLTYDTQTATSLITKAVATTIAQVNSIGAKAGAGDNALVFLVERAPEKVSKILDIALTKSIKEYEGIASKSPSQPATPGMRPAQLTTTSQSAATPTTTPQISNLQSLPVKPPISTPLPQVPQQQVSGVNIPGPIATPNIGVTSGVGNLGTTSIGTPTPTQIQSPATSVIPAMQSPQKPVSTPIPTSVPVPLPVPSAPLARPPSFGKPPGAGSSLSRPKAFGKPPGAGSSLSRPPTFLSNKPSYKRELEDDEEEGEQATNKIAKTE

SEQ ID NO: 28236 - protein, 209 aa, Elaeis guineensis
  misc_feature (136)..(136): Xaa can be any naturally occurring amino acid
  misc_feature (190)..(190): Xaa can be any naturally occurring amino acid
  unsure (1)..(209): unsure at all Xaa locations
MVRGKTQVRRIENATSRQVTFSKRRNGLLKKAFELSVLCDAEVALIVFSPRGKLYEFSSSSSSMEKTIDRYIMHAKDVNINKKSREHNAQQLKSDAASLMKKIERLEASKRKLLGENLESCAIEELHDLELQLEQXLSSIRNRKYQMLEEQICRLKEKEKILTASIQEKLNAEPRLQLCAPAVSDDYDSXNTDVETELVIGRPGTCKVK

SEQ ID NO: 28237 - protein, 357 aa, Methanopyrus kandleri AV19
MAEVRLEPVKEVSPPLLRVVRKGVEERELVINTSKCAACGICEAACPVGAISVAPPSAVVRKGEDPIDVDESKCVLCGICAFVCPYDVIQLLVNGKPMTEAGLPNLPKSVEVDEEECVYCSLCADTCPQEAITVEREVPTPGDLVMGEIEIDEEKCIYCKACEEACPADAITVERPKPSAADPEPEFTIEVDEDKCVYCGVCMRTCPVDAIKVGCMVCYGTTRGEIPAKGEVDGSVDVDPSSCVYCGWCGFVCPVDAIEVIKPYEGTLEVDDEECVGCGLCVEVCPCGALEFEKGGKAGKTKIVAHPETCAYCGACARACPVNAITVVREGVTAMPELPTKAWKKALDRVLGPVEKE

SEQ ID NO: 28238 - protein, 224 aa, Elaeis guineensis
  misc_feature (62)..(62): Xaa can be any naturally occurring amino acid
  misc_feature (126)..(126): Xaa can be any naturally occurring amino acid
  misc_feature (199)..(199): Xaa can be any naturally occurring amino acid
  unsure (1)..(224): unsure at all Xaa locations
MGRGKIEIKRIENTTNRQVTFCKRRNGLLKKAYELSVLCDAEVALIIFSSRGRLYEYANNSXKATIERYKKHVLDTSNSGSVSEADSQYYQQESLKLRQQITSLQNSNRNLMGDSLGSMSLRDLKXLEGRLEKGINKIRTKKNELLFAEIEYMQKRETELQNANMYLRNKIAENEGAQQQMNMLPATTEYEVMPPYDSXNFLQVNLMQSNQHYSHQQQTALQLG

SEQ ID NO: 28239 - protein, 212 aa, Oryza sativa (japonica cultivar-group)
MSLSLGFSAGAGVGADRLAAAPALQAAGALPPRVDVSLSLARAANGQPSSYLPLNENDSLDMVLFDVLREASAVAALSSSSSSSPELGARTTAPVVAGHPAGRKGGGGGGGGRGAAARGGAAGGRHYRGVRRRPWGKYAAEIRDPTRHGARLWLGTFGTAEEAAAAYDRAAFRMRGAKALLNFPPAVAGDGARRGAAAAAKQVGMSDGECVI

SEQ ID NO: 28240 - protein, 306 aa, Oryza sativa
MGKEVDVSTLEAGGARDYIDPPPAPLVDVDELGKWSLYRALIAEFVATLLFLYVTVATVIGYKHQTDAAVNGADAACGGVGVLGIAWAFGGMIFILVYCTAGVSGGHINPAVTLGLFLARKVSLVRALLYMAAQCLGAICGVALVKGFQSSLYDRYGGGANELAAGYSTGTGLAAEIIGTFVLVYTVFSATDPKRNARDSHVPQFAHCKNSSSLLLFNFDKSKVLAPLPIGFAVFMVHLATIPITGTGINPARSLGAAVMYNNSKAWSDQWIFWVGPFIGAAIAALYHQVILRASARGYGSFRSNA

SEQ ID NO: 28241 - protein, 448 aa, Lycopersicon chmielewskii
WSPELSSDLYRIDGWGAPYFTVNSSGDISVRPHGTDTLPHQEIDLLKVVKKASDPINSGGLGLQLPLVVRFPDVLKNRLESLQSAFDYAVQSEGYEAHYQGVYPVKCNQDRFVVEDIVKFGSGFRFGLEAGSKPELLLAMSSLCKGSSEGLLVCNGFKDAEYISLALVARKLQLNTVIVLEQEEELDLVIDISRKMAVQPVIGLRAKLRTKHSGHFGSTSGEKGKFGLTTTQILRVVRKLKESGMLDCLQLLHFHIGSQIPSTELLADGVGEAAQVYSELVRLGAGMKFIDIGGGLGIDYDGTKSSDSDVSVGYGLQDYASTVVQAVRFVCDRKNVKHPVICSESGRAIVSHHSVLIFEAVSSTTTRSQELSSMSLHSFVEKLNDDARGDYRNLSAAAIRGEYDTCMLYADQLKQRCVDQFKDGNLDMEQLAAVDAVCDFVSKAIGAS

SEQ ID NO: 28242 - protein, 390 aa, Yarrowia lipolytica CLIB122
MGNAQSQEEANNNGAARQHRPADNNGHHDPKGTADPQPIPQEGSDNTQNHVSHSPEQMSANSSHVSATPFNNPFEPASYHKESPAPESVPVPVAPAKSHPQRPKMRRKSTLLLDEDEPVGENDDDIPFDKLNITHPTSNEPKPLSRVDSGEEIELTSPQVTEGKIPLEIKWTQGGSKVYVTGTFTGWRKMVALTPDPNKKGVFSTTLHLPPGTHRLRFVVDNELRCSDYLPTATDSMGNLLNYVEVGLSDTEERADQKDLHPISRAGIIPSNDDLGGGYERFTEEDLPKEEYEFTPEIPALFTDTEVMEQYISKELPTPPQLPPHLDSVILNTNSTEKEDNSVLPIPNHVILNHLATTSIKHNVLAVASVSRYSRKYVTQVLYAPLPLQA

SEQ ID NO: 28243 - protein, 437 aa, Rubrivivax gelatinosus PM1
MTPSDVKATLSFSDGSPSMDLPIYKGSVGPDVIDIRKLYAQTGKFTYDPGFLSTASCQSAITYIDGDKGELLYRGYPIEQLAENCDFLETCYLLLNGELPNVTEKAKFVKTVNGHTMVNEQMQFFLRGFRRDAHPMAVLTGLVGGLSAFYHDSTDVQNPEHRAIAAIRLIAKMPTLVAMAYKYSIGQPYIYPRNDLSYTSNFMRMMFGTPCEEYVPNDVLVRAMDRIFILHADHEQNASTSTVRLCGSSGTNPFAAIAAGVACLWGPAHGGANEACLNMLEDIQKMGGVAKVGKFIEQVKDKNSGVRLMGFGHRVYKNYDPRAKLMRETCHEVLAEMGLQNDPLFKLAMELEKIALEDDYFVSRKLYPNVDFYSGIVQRAIGIPVSLFTAIFALARTVGWIAQLNEMIGDPEYKIGRPRQLFVGATARDVTPIAERA

SEQ ID NO: 28244 - protein, 663 aa, Yarrowia lipolytica CLIB122
RRQKRVERASAAPKNHCSNTKLCERLHHHYPHLSIRQLATSPKAVVSLFATQPKSHRHKDPCSCFSSTFSKLLPTTLTNIMSNTLVKKGQGQAASNAKKIGYNKKKGGGQTKGRPAFVFKLWNMVNDPAYDEYIRWMPDGKSFQITGREQLEKIVLPRFFKHNNFSSFVRQLNMYGWHKVQDVTSGSMQSNDEVWQFKSPNFIRGREDLLDNIVRNKGTKGSDEEEEMDMTTLMDELQQIKLNQLNLTQEVNKLRTDNQLLWQENLGFKDKHKQHGETLERIMRFLASLYGNQGKVLGEAISGNRNQRLLLGNTDPAQATHMINEAAAAAAAENSGNFPFEMNDMFNNNNNNNNNSNNPNDSPSFARVQPLSSTNSPQTVTGSPREENNKTNNTNNTSNNYDKITAYDTDTGSELPDNLQDLTDLSDFTPSMLDPQTVQQSMEPPMGFGDLNKNSSLILSNNSNNSINMPQTPMRNNSTSSHSSQNMSHHNYNYQPSTPGALFPELEAFQGANDQLIRSAERPRNNLNINGNGKADDLQRQLQDHGRHIDQFTDRLKKQQGYQPQQLQHQQQPQQPQQQPTPMQAPAPTPASTISSAPTPDPTSDLFNVGDPNIVPMQDFNMDDYIDNEADMFDPEVKIEEDMPLVTELDSPAPRPKKRKAGE

SEQ ID NO: 28245 - protein, 701 aa, Xanthomonas campestris pv. campestris str. ATCC 33913
MAKSPSKPAQIPSVGSSASAHELRGTGDELHQKAGGSHPQLTTNQGIPVGDNQNSLRATPRGPTLLEDFILREKITHFDHERIPERIVHARGSAAHGYFELTKSLSQYTTAKLLTEVGEKTPLFTRFSTVAGGAGSVDTPRDVRGFAVKFYTKEGNWDLVGNNIPVFFIQDAMKFPDLIHAVKMEPDRGFPQAASAHDTFWDFISLTPESMHMIMWAMSDRTIPRSLRMIEGFGIHSFRLLNENGDSTFVKFHWRPKLGLQSTIWDEAVKLAGADPDFQRRDLFEAIQKGDFPEWELGVQLFTEAEAEAFPFDHLDSTKVIPEELVPLQIVGRMVLDRWPDNFFAETEQVAYCPANIVPGIDFSNDPLLQGRLFSYLDTQLSRLGGPNFHQIPINAPKCPFANNQRDGHMQMGVPKGRVAYEPSSLQADAPREALRGFPSHATPAEDGAKGRVRAESFADHYSQARMFFRSQTAPEQAHLASALVFELSKVETAHVREAIVGHLRHIDEALAKRVADGMGMTSLPPAPPAAVAPTDMQLSPALQLIGKMKDTLQGRTVGILIHDGSDAAAIKAVRKAAEAAGATVKIVAPKLGGAKLSDGKQLAADGQLAGTPSIVFDAVAVLLSSEAAKALTRESAALDFVSNAWAHLKAIAFDDGAQLLLKAGNVGKDPGVVDAADTKAFITAAKTRQWAREPKVRMLA

SEQ ID NO: 28246 - protein, 551 aa, Oceanobacillus iheyensis HTE831
MQRYREIVVAFSRNGFGYIVKELGLHKISSLPKRLFEQGDREVHNKTTGERIRLFLEELGPTFIKLGQIASTRQDLIPKDIIEELEKLQDQVAPFSFSDVKEIIDKELQEPIDVVFESFDEDPIAAASIGQVHYGVLRTGQEVAVKIQRPNLEEKVHTDLEILMNIAKLAESRLDWAKKYQLCAIIKEFSNSLTAELDYTLEGRNAHRIAQQFKKHDDVVVPNVYWDLTTEKVLTMEYIKGIKLDENTKLVREGYNPKLIAEKLIQKQFQQILIDGFFHADPHPGNVMVLPNHKILFMDFGMVGRLTATMKDHLSSLIVAIMRQNTKSIIKAIYRMGIVSEGVDADYMYADIDDLRDKYYDIPFSQVSIGEAINDLFRVATTHGIRIPTDLSLVGKSLLTLEGTVERLDPDISIVKIAEPFGKRLLREKYQPKKVADEVYQQAEDYKDLILDFPDHINHLYKVIRRGKLPLEISVSRVEAFLKKLDRISNRLSFSIVLLAFSIIMVGLIIGSALAGESSYLWSLPVIEIGFVVAIGMFLWLLYSIFRSGRF

SEQ ID NO: 28247 - protein, 373 aa, Sulfolobus solfataricus P2
MMLIPGPVNVPYSVLQASLNLVNHRSEKFRETVKTLEFLMNKHFGSTRVALLSGSGTLAVESMVYSLVKREEKVITFPYGEFGHRLEESLIRRGAKVISYQKKLGESFTVEEIKKAIEENKDATTVALVHNETSTGIAFRDLKKIADVVKGVGLKLLVDSVSGFAAYPLYVNQWKIDCVVTGSQKALASIPGVGFAALSEEGVNELVESDLPSYLDLSFHLKFQDKGETPFTPTVGAFFASRRAAELLDKEGIENRWKRHEACARYLREVMLEMGFKLLGNDTNFSNTVVAAFPPIPLDTFMSELKKRNIEISKGMGELRDKIVRIGILGVVDDRAIRRLVGSMGEILKKNVEFEVPRECKLPEELKVEVLWD

SEQ ID NO: 28248 - protein, 300 aa, Glycine max
MSDSLLTFYSLSAILALLPIFIFILIKRKQSKPRLNLPPGNMGWPFLGETIGYLKPYSATTIGEFMEQHIARYGTIYKSKLFAGPAIVSADAGLNRFILQNEGKLFECSYPRSIGGILGKWSMLVLVGDMHRDMRVISLNFLSHARLRTHLLKEVEKQSLLVLNSWSQNSIFSAQDEAKKFTFNLMAKHIMSMDPGDIETEQLKKEYVTFMKGVVSAPLNLPGTAYRKALKSRSIILKFIEGKMEERVRRIQEGNESLEEDDLLNWVLKNSNLSTEQILDLILSLLFAGHETSSVAIALA

SEQ ID NO: 28249 - protein, 272 aa, Rubrivivax gelatinosus PM1
MSRIAATFERLRGQRRTALIPYITAGDPYADATVDIMLAMAGAGADVIELGVPFSDPMADGPVIQKASERALAKGIGMGQVLAMVRSFREHNDTTPVVLMGYANPVERYGIDRFVADAKSAGVDGVLVVDYPPEECEAFAAQLQGADLDPIFLLAPTSTEQRMKDVGRIARGYVYYVSLKGVTGAGHLDTDAVATMLPRIREHVKVPVGVGFGIRDAATAKALAAVADAVVIGSRIVQLLEAEPRESVAAVGGTFIASIREALDSSTEGVRA

SEQ ID NO: 28250 - protein, 634 aa, Citrus sinensis
MESCDCIDTQWPPDELLVRYQYISDILIALAYFSIPVELIYFVQKSAFFPYRWVLMQFGSFIILCGLTHFISLWTFTVHSKAVAVVMTIAKMACAFVSCITALMLVHIIPDLLSVKTRELFLKNRADELDREMGLILTQEETGRHVRMLTHEIRSTLDRHTILKTTLVELGRTLGLEECALWMPSRTGLNLELSYTLNNQIQIGSSVPINLPIVTDVFNSAQAMRLPYNCPLARIRLLVGRYVPPDIVAVRVPLLHLSNFQINDWPELPAKSYAVMVLMLPTDGGRKWRDHELELIDVVADQVAGALSHAAILEDSMRARNQLMGQNVALDSARREAEKAIHARNDFRAVMNHEMRTLMHAIIALSSLLLETDLTPEQRVMIETVLKSSNLLTTLVDDVLDLSRLEDGSLELDNGPFNLQIVLREVIKLIKPVASCKKLSMTLIMAPELPTYAVGDEKRLMQTILNIVGNAVKFTKEGYVSIIAFVAKPESLSDWRPPKFYPVSTDGHFYLRVQVNDSGCGVPPQDIPLIFTKFAQSRGSSCQTPRAGLGLAICRRFVNLMGGHIWLESEGLDKGSTVTFLVKLGICNNPGSPIHPVALKGRASHGSADLTGPKPLFRDNDQIASTKSRYQRSV

SEQ ID NO: 28251 - protein, 499 aa, Arabidopsis thaliana
MEALMLIFTFCFIVLSLIFLIGRIKRKLNLPPSPAWALPVIGHLRLLKPPLHRVFLSVSQSLGDAPIISLRLGNRLLFVVSSHSIAEECFTKNDVILANRQTTISTKHISYGNSTVVSASYSEHWRDLRRIGALEIFSAHRLNSFSSIRRDEIRRLIGRLLRNSSYGFTKVEMKSMFSDLTFNNIIRMLAGKCYYGDGKEDDPEAKRVRTLIAEAMSSSGPGNAADYIPILTWITYSETRIKKLAGRLDEFLQGLVDEKREGKEKKENTMVDHLLCLQETQPEYYMDRIIKGTMLSLIAGGTDTTAVTLEWALSSLLNNPEVLNKARDEIDRMIGVDRLLEESDIPNLPYLQNIVSETLRLYPAAPMLLPHVASKDCKVGGYDMPRGTMLLTNAWAIHRDPLLWDDPTSFKPERFEKEGEAKKLMPFGLGRRACPGSGLAQRLVTLSLGSLIQCFEWERIGEEEVDMTEGPGLTMPKARPLEAMCRARDFVGKILPDSS

SEQ ID NO: 28252 - protein, 287 aa, Mesembryanthemum crystallinum
MTKDVEVAEQQAPEFSAKDYHDPPPAPLIDFEELRKWSFYRAVIAEFIATLLFLYITVLTVIGYKSQTDPNTNADQCGGVGILGIAWAFGGMIFILVYCTAGISGGHINPAVTFGLFLARKVSLIKAVLYMVAQCLGAICGVGFVKAFQKAYYVRYGGGANEMASGYTKGTGLGAEIIGTFVLVYTVFAATDPKRNARDSHVPVLAPLPIGFAVFMVHLATIPITGTGINPARSFGAAVIYNQQKAWDDHWIFWVGPFIGAAIAAFYHQYILRAAAIKALGSFRSSA

SEQ ID NO: 28253 - protein, 480 aa, Corynebacterium efficiens YS-314
MFGGRTHPGPTRTPSRTGVVLCAGMLIDAGYPRPTGVVFPHMNLTRNDRLDRLPVTSKHRKLLGGSGIGWALDAMDVGLISFIMAALVTHWDLSPTEASLLGSIGFVGMALGATFGGLLADKVGRRQVFALSLLVYGLATGASALSVSLVMLMALRFVVGLGLGAELPVASTLISEFSPRRIRGRMVVILEAFWALGWIMAAIIGTFVVTIGENGWRWALALGCVPAAYAIYVRLGLPESVRFLESKGRHEEAEAIVVSFEEQAVREGKPLTDSLPESRDVEVEGSESIWAKNLRRRTAALWVVWFCINLSYYGAFIWIPSLLVADGFTLVRSFQFTLIITLAQLPGYAAAAWLIEKWGRRATLSTFLAGSAVSAAMYGMADAEWQILVAGCLLSFFNLGAWGALYAIGPELYPTDVRGTGTGAAAGFGRIASIIAPLIVPPVISLGGPVLLFALFASAFALAAVAAFTLPEQKGKALAD

SEQ ID NO: 28254 - protein, 490 aa, Novosphingobium aromaticivorans DSM 12444
MGVTIPPLERSDFLTGQPLVDGTEICAGSTYAVTNPATGKTLANVVKLGAAQTRRAIESNSRALIDWRKRPAQERARLLHDWLALVRLHRHDLGLLMTAEQGKPLAEALGEVDYAASFIQWFAEEARRVYGEVIPASADRRIVVIRQPVGVAGAITPWNFPAAMITRKVAPALAAGCTVTLKPSELTPMTAFALAKLAREAGVPPGVFNVVCGDAPEIGSVLTSHPDVTKFTFTGSTAIGKLLTAQCAATLKRVSMELGGNAPLLVFDDADLDQAVEGAIASKFRNTGQTCVCANRILVQSGIHDRFVEALAARVSAFRVGNGLEGATDQGPLITASALAKVQGHVADAVAQGAQLVTGGKRHEAGELFFQPTVLTGARPAMRLADEETFGPVAPVFRFETEAEALALANATHSGLAAYAFTRDIDRAWRVSEGLETGMVGLNSGIVSTETAPFGGIKESGLGREGSRHGIEEFLEMKTISVGVRPESPV

SEQ ID NO: 28255 - protein, 692 aa, Saccharomyces cerevisiae
MNGKEVSSGSGRTQSNNNKKNNNGGSTGISHASGSPLTDGNGGNSNGNSRSRSRSRKSSGTTGGLLKKPPLLVNNEAVHASVPDASHTSCNNGTLEVSINNPEPHVVDAVARHLIRNPSNSLQLQGGDITRDLYKWTNDHPSSPSQYQYPSQPALSTSIPSQAPSFSNRKRSMSFSAASIASSSHLNNNSEANGNPLAAIGLAPAPMTHEEIRAPGGFRRSFIIQKRRKHNVDAPIPNFFTRNFIEFLTLYGHFAGEDLSEEEEEEEETEEEPEEEALETESTQLVSREHGRHPHKSSTVKAVLLLLKSFVGTGVLFLPKAFHNGGWGFSALCLLSCALISYGCFVSLITTKDKVGVDGYGDMGRILYGPKMKFAILSSIALSQIGFSAAYTVFTATNLQVFSENFFHLKPGSISLATYIFAQVLIFVPLSLTRNIAKLSGTALIADLFILLGLVYVYVYSIYYIAVNGVASDTMLMFNKADWSLFIGTAIFTFEGIGLLIPIQESMKHPKHFRPSLSAVMCIVAVIFISCGLLCYAAFGSDVKTVVLLNFPQDTSYTLTVQLLYALAILLSTPLQLFPAIRILENWTFPSNASGKYNPKVKWLKNYFRCAIVVLTSILAWVGANDLDKFVSLVGSFACIPLIYIYPPLLHYKASILSGTSRARLLLDLIVIVFGVAVMAYTSWQTIKMWSQ

SEQ ID NO: 28256 - protein, 691 aa, Sorghum bicolor
MSAVSSSSLCGGDPAMRSVVWFRRDLRVEDNPALAAAARAGGEVVPAYVWSPEEEGPYYPGRVSRWWISQSLKHLDASLRRLGAGKLVTRRSADAVVALLQLVRDTGATHVYFNHLYDPISLVRDHRLKEMLAAEGIVVQSFNADLLYEPWEVVDDERQPFTMFTAFWNRCLSMQYDPPAPLLPPKKINSGDLSMCPSEDLIFEDDSERGSNALLARAWTPGWQNADKALTAFLNGPLADYSVNRKKADSASTSLLSPHLHFGELSVRKVFHLVRMKQLVWSNEGNHAAEESCTLFLRSIGLREYSRYLSFNHPSSHERPLLAHLRFFPWVVNESYFKIWRQGRTGYPLVDAGMRELWATGWLHDRIRVVVSSFFVKVLQLPWRWGMKYFWDTLLDADLESDALGWQYITGSLPDSRELDRIDNPQFEGYKFDPHGEYVRRWIPELVRLPTEWIHHPWDAPVSVLQAAGIELGSNYPLPIVELDAAKARLQEALSEMWQLEAASRATMNNGMEEGLGDSSEVPFPEELQMEVDRATANVVMTVRRREDQMVPTMTSSLNRAETEVSADLGNSEDTRAQVPFHAHFHPRVEREDMIQNTEGPALRINGTHQHNIFQQPQNHRREALAPSVSEASSSWTGREGAVVPVWSPPAASGHSETFAADEADVSSRSYLDRHPQSHRLMNWSQLSQSL

SEQ ID NO: 28257 - protein, 640 aa, Saccharomyces cerevisiae
MLSLKKSALSKLTLLRNTRTFTSSALVRQTQGSVNGSASRSADGKYHIIDHEYDCVVIGAGGAGLRAAFGLAEAGYKTACISKLFPTRSHTVAAQGGINAALGNMHKDNWKWHMYDTVKGSDWLGDQDSIHYMTREAPKSIIELEHYGVPFSRTENGKIYQRAFGGQTKEYGKGAQAYRTCAVADRTGHALLHTLYGQALRHDTHFFIEYFALDLLTHNGEVVGVIAYNQEDGTIHRFRAHKTIIATGGYGRAYFSCTSAHTCTGDGNAMVSRAGFPLQDLEFVQFHPSGIYGSGCLITEGARGEGGFLVNSEGERFMERYAPTAKDLACRDVVSRAITMEIREGRGVGKKKDHMYLQLSHLPPEVLKERLPGISETAAIFAGVDVTKEPIPIIPTVHYNMGGIPTKWNGEALTIDEETGEDKVIPGLMACGEAACVSVHGANRLGANSLLDLVVFGRAVAHTVADTLQPGLPHKPLPSDLGKESIANLDKLRNANGSRSTAEIRMNMKQTMQKDVSVFRTQSSLDEGVRNITAVEKTFDDVKTTDRSMIWNSDLVETLELQNLLTCASQTAVSAANRKESRGAHAREDYPNRDDEHWMKHTLSWQKDVAAPVTLKYRRVIDHTLDEKECPSVPPTVRAY

SEQ ID NO: 28258 - protein, 348 aa, Arabidopsis thaliana
MSKSGDNQPVDRYLRRQILGEGTYGVVYKATDTKTGKTVAVKKIRLGNQKEGVNFTALREIKLLKELNHPHIVELIDAFPHDGSLHLVFEYMQTDLEAVIRDRNIFLSPGDIKSYMLMTLKGLAYCHKKWVLHRDMKPNNLLIGENGLLKLADFGLARLFGSPNRRFTHQVFATWYRAPELLFGSRQYGAGVDVWAAGCIFAELLLRRPFLPGSTEIDQLGKIFQAFGTPVPSQWSDMIYLPDYMEFSYTPAPPLRTIFPMASDDALDLLAKMFIYDPRQRITIQQALDHRYFSSSPSPTEPGKLQIPASKGDALEPKASEQNQHGNSPAVLSPPGKMRRVMGPEGFT

SEQ ID NO: 28259 - protein, 502 aa, Mentha x piperita
MYSIAFMLVLRKMDEIISHTLAFQALVSLILLISITKWLSNSPKNKNSSPPSPRKLPILGNLLQLGSLPHHNLRSMARKHGPIMLLHLGSVRPVSSRRRPRGNHENSRSRLRRPRGSRSAALQLQGRVGGYGEYWRQLKTICVVQLLSNKRVQSFRSVREEETELLMKKIGDSSGNVNLSHMFTQLTNDVVCRSAIGRKYGAGDENGEKFLEILREFLELLGAISIGDFVPSLWWINRINGFDRRVDRIAKEMDEFLEKVIHERLENPAAKAEENFVDILLEIYRNNSAGVSIDRDSIKAIILDVFAAGTDTTAVVLEWAMTELLRHPEIMKKLQSEVRQVVKDKHNITDDDIEKMHYLKAVMKETMRFHTPIPLLVPRVARNDVEVMGYDVPVGTMVMINAWAIGRDPTSWDEPEKFRPERFLNSSVDFKGLDFELIPFGAGRRGCPGTTFPMATLEFTLANLMQKFDWELPHECRELDMSERPGVAIRRVIPLLAIGTKM

SEQ ID NO: 28260 - protein, 421 aa, Sulfolobus solfataricus
MEEVLSSSLYTQQVKKLYKVGELLGLDNETLETLSQPERIIQVKIQIRGSDGKLKTFMGWRSQHNSALGPYKGGVRYHPNVTQDEVEALSMIMTWKNSLLLLPYGGGKGGVRVDPKKLTREELEQLSRKYIQAIYKYLGSELDIPAPDVNTDSQTMAWFLDEYIKITGKVDFAVFTGKPVELGGIGVRLYSTGLGVATIAKEEAANKFIGGVEEARVIIQGFGNVGYYAGKFLSEMGAKIVGVSDSKGGVINEKGIDVGKAIEIKEKTGSVINYPEGRKVTNEELLISDCDILIPAALENVINKFNAPKVKAKLIVEGANGPLTADADEIMRQRGIAVVPDILANAGGVVGSYVEWANNKMGEIISDEEAKKLIVDRMNNAFNTLYDYHQKKKLEDHDLRTAAMALAVDRVVRAMKARGIL

SEQ ID NO: 28261 - protein, 325 aa, Desulfotalea psychrophila LSv54
MKPPVRVAITGAAGHVSYSLIFRIAAGHMLGKDQPVILQLLEIPQAMDVLKGVVLELEDCAFPLLHGLVCSDDVHVAFKDADYAILVGARPRGPGMERSDLIQANGPIFTTQGEALSAEANPEVKVLVVGNPANTNALILLKNAPYINPRNITAMMRLDHNRALFQVAKKMGCHCSDVEKMVVWGNHSASQFPDISYAEIAGEKVAKGVENNWHGDNLIPIIQQRGAAVIKARGASSAASAASAAIDHMRNWVLGSGGKWVSMGVYSRGNSYGLDEDIMFSLPVICEDGDWREVAGLELSSFQRAMLEATEAELQAEREAVADII

SEQ ID NO: 28262 - protein, 182 aa, Pseudomonas fluorescens Pf-5
MFKYIGDIVKGTGTQLRSLVMVFGHGFRKRDTLQYPEEPVYLPPRYRGRIVLTRDPDGEERCVACNLCAVACPVGCISLQKAETEDGRWYPDFFRINFSRCIFCGLCEEACPTTAIQLTPDFEMAEFKRQDLVYEKEDLLISGPGKNPDYNFYRVAGMAIAGKPKGSAQNEAEPINVKSLLP

SEQ ID NO: 28263 - protein, 448 aa, Lycopersicon pimpinellifolium
WSPELSSDLYRIDGWGAPYFTVNSSGDISVRPHGTDTLPHQEIDLLKVVKKASDPINSGGLGLQLPLVVRFPDVLKNRLESLQSAFDYAVQSEGYEAHYQGVYPVKCNQDRFVVEDIVKFGTGFRFGLEAGSKPELLLAMSSLCKGSSEGLLVCNGFKDAEYISLALVARKLQLNTVIVLEQEEELDLVIDISRKMAVQPVIGLRAKLRTKHSGHFGSTSGEKGKFGLTTTQILRVVRKLKESGMLDCLQLLHFHIGSQIPSTELLADGVGEAAQVYSELVRLGAGMKFIDIGGGLGIDYDGTKSSDSDVSVGYGLQDYASTVVQAVRFVCDRKNVKHPVICSESGRAIVSHHSVLIFEAVSSTTTRSQELSSMSLHSFVEKLNDDARGDYRNLSAAAIRGEYDTCMLYADQLKQRCVDQFKDGNLDIEQLAAVDAVCDFVSKAIGAS

SEQ ID NO: 28264 - protein, 370 aa, Cytophaga sp. KUC-1
MDATFATGKELQKMDPVFGQLSFDDHEQIVFCNDKDTGLKAIIGIHNSVMGPALGGTRMWNYNTEWEALNDVLRLSRGMTYKSAITGLNIGGGKAVIIGDAKTQKTPELMRKFGEFVHSLGGRYITAEDVGMETKDMDTVRDVTPYVTGISEGRGGSGNPSPITAYGVYLGMKAAAKSQFGTDVLEGKKVLVQGIGHVGEALVEYLTKEGAIVTITDINEEKLFQVAQKYNATVYTGTDLYTADVDIYAPCAMGAIINDDTVNKIKAKVIAGAANNQLADENVHGQRLQERGILYAPDFLINAGGIINVYAELEHYGKAEIMTKTENIYNTTLEIIDYAVKNGMTTHKAALTIAQNRIDLRKIENAAAKK

SEQ ID NO: 28265 - protein, 448 aa, Lycopersicon pimpinellifolium
WSPELSSDLYRIDGWGAPYFTVNSSGDISVRPHGTDTLPHQEIDLLKVVKKASDPINSGGLGLQLPLVVRFPDVLKNRLESLQSAFDYAVQSEGYEAHYQGVYPVKCNQDRFVVEDIVKFGSGFRFGLEAGSKPELLLAMSSLCKGSSEGLLVCNGFKDAEYISLALVARKLQLNTVIVLEQEEELDLVIDISRKMAVQPVIGLRAKLRTKHSGHFGSTSGEKGKFGLTTTQILRVVRKLKESGMLDCLQLLHFHIGSQIPSTELLADGVGEAAQVYSELVRLGAGMKFIDIGGGLGIDYDGTKSSDSDVSVGYGLQDYASTVVQAVRFVCDRKNVKHPVICSESGRAIVSHHSVLIFEAVSSTTTRSQELSSMSLHSFVEKLNDDARGDYRNLSAAAIRGEYDTCMLYADQLKQRCVDQFKDGNLDIEQLAAVDAVCDFVSKAIGAS

SEQ ID NO: 28266 - protein, 376 aa, Brassica napus
MGKSEEPKVTKSDNKPSSPPADQTNVHVYPDWAAMQAYYGPRVAMPPYYNSAMAAASGHPPPPYMWNPQHMMSPYGTPYAAVYPHGGGVYAHPGFPMPQGQKGATPLTTPGTPLNIDTPSKSTGNTENGLMKKLKEFDGLAMSLGNGNNGDEGKRSRNSSETDGSSDGSDGNTTGADEPKLKRSREGTPAKDEKKHLVQSSSFRSVSQSSGDNNCVKPSVQGGGGAIVSAAGVSANSNPTFMSQSLAMVPPETWLQNERELKRERRKQSNRESARRSRLRKQAETEELARKVEALTAENMALRSELNQLNEKSNNLRGANATLLDKLKSSEPEKRVKSSGNGDDKNKKQGDNETNSTSKLHQLLDTKPRADGVAAR

SEQ ID NO: 28267 - protein, 308 aa, Bradyrhizobium japonicum USDA 110
MAESPNDAATPASIVDALKAVAGNPPKVRASFAKGWCVRGTYTPSDRAEEITRSQSFTRPSRVLARFSVGGGNPNVADTNNLVLRGFSFKLGDDDHRSDILVESAPVHFARTLDQMLAFLKARIPGPDGKPDMAKVKAFSAANPETLNQANYIAARALPGSFAGTTYWGVHAFPATNEQGETRFIKFKVVPARGEITLSEDEARTKPADFLHDDLGTRIAAGNVRFNVMALLDRPGDPTMDVTIRWPDEDQRDEVRLGTIVITGFEPDQACDVTIFNPANLAEGIGHPPDEIFAARRAAYMISLAKRR

SEQ ID NO: 28268 - protein, 312 aa, Bradyrhizobium japonicum USDA 110
MTTSDSLRDTRIPTHESVTIPAVGFGTLIPDPLVTRQAIRAALEAGFRHLDCAERYRNEAAVGDAMQDAFKAGKLRREELFVTTKLWNTNHRPERVKPAFDASRRRLQLDEIDCYIIHTPFAFQPGDEQDPRDASGRVIYDSGVTLVETWHALERLVDEGHCKSIGLSDITLEKLREIVAVARIRPAMVQVESHPYLPEWDLLDFCREHGIVLQAFAALGHAMEPRVLEDPVITAIARRVQKTPAQVCLAWAVQRGTAFLTTSTNPARIRENFDISALPEDAMREIRDGITTNVRFNAVVETGVPGFIPRAR

SEQ ID NO: 28269 - protein, 342 aa, Rhodospirillum rubrum
MRVFFSPRQLAHAPASEFSRGEMIAFRECPVRAQSILAALAAAGFPAPSQPVDPGLAPVLAIHDGEYVEFLRTAWTRWRAGGATVAAYPTAWPVPGIGERRPDTVEGLLGWYIFDSGTPIVAETWDAVKAGADTAHAGALAVATGAHSAFALCRPPGHHAARALAGGYCYLNNAAIAAQTLRDQGAGRVAILDVDYHHGNGTQEIFYERGDVLFVSLHADPAFGYPYYTGYGDQSGRGAGEGTTLNLPLAAGTTEAEWLAALEHGLARLGEFAPDAVVVSLGVDTWAGDPLSHFKVSARAFPALGARLAGLGLPTLFVMEGGYATAELGKNVVGVLSGFEDA

SEQ ID NO: 28270 - protein, 483 aa, Zea mays
  misc_feature (11)..(11): Xaa can be any naturally occurring amino acid
  unsure (1)..(483): unsure at all Xaa locations
AMAEELGVFIXYVGGVEHAHVLLPPLETLCTVEETCVRDKAVESLCQIGAQMKENDIVDWFAHVVKLCQDDMPMVRRAAASNLGKFAATVEQSHLKTEIMSMFDDLTQDDQDSVRLLAVEGCAAPGKLLEPQDCAAHILPVIVNFSQDKSWRVRYMVANQLYELCEAVGTEPTRGDLVSAYVRLLCDNEAEVRIAAAGKVTKFCKILNPQIAIEHIFPCIKELSSDSSQHVRSALASVIMGMAPVLGKDATLEQLLPIFLSLLKDEFPDVRLNIISKLDQVNQVIGIDLLSQSLLPAIVELSEDRHWRVRLAIIEYIPLLASQLGVGFFDDKLGALCMQWLEDKVFSIRDAGANNLKRLTEEFGPEWAMQHIIPQVLEKINNPHYLYRMTTLQAISLLAPVMGPDITCQQLLPVVIASSKDRVPNMKFNVAKVLQSLVPILDQSVVEKTVKPCLVELSEDPDVDVRYYAHQALRACDQMVISS

SEQ ID NO: 28271 - protein, 162 aa, Zea mays
MSAAEGAVVFSEEKEALVLKSWAIMKKDSANLGLRFFLKIFEIAPSAKQMFPFLRDSDVPLEKNPKLKTHAMSVFVMTCEAAAQLRKAGKVTVRETTLKRLGATHLRYGVADGHFEVTGFALLETIKEALPADMWSLEMKKAWAEAYSQLVAAIKREMKPDA

SEQ ID NO: 28272 - protein, 337 aa, Omphalotus olearius
MVVKVGINGFGRIGRLVIRNALEAQGVEVVAVNDPFIPLDYMVYMFKFDSVHGRYKGTVEAKDGKLIIAGKPIAVFGERDPASIPWGASGADYVVESTGVFTTIDKASAHLKGGAKKVIISAPSADAPMYVCGVNLDAYDPRRPSISNASCTTNCLAPLAKVIHDKFGIVEGLMSTIHATTATQKTVDGPSNKDWRGGRSVNNNIIPSSTGAAKAVGKVIPSLNGKLTGLSFRVPTLDVSVVDLVVRLEKEATYDEIKAAVKEAVAGPLKGILDYTEDALVSTDFTGNTHSSIFDASAGIALNKNFVKLIAWYDNEWGYSRRVVDLITFVAQKDGNA

SEQ ID NO: 28273 - protein, 451 aa, Saccharomyces cerevisiae; identical to SEQ ID NO: 744

SEQ ID NO: 28274 - protein, 419 aa, Corynebacterium glutamicum ATCC 13032
MGADQAARPTRRTTRRIFDQSEKMKDVLYEIRGPVAAEAERMELDGHNILKLNTGNPAVFGFDAPDVIMRDMIANLPTSQGYSTSKGIIPARRAVVTRYEVVPGFPHFDVDDVFLGNGVSELITMTTQALLNDGDEVLIPAPDYPLWTAATSLAGGKPVHYLCDEEDDWNPSIEDIKSKISEKTKAIVVINPNNPTGAVYPRRVLEQIVEIAREHDLLILADEIYDRILYDDAEHISLATLAPDLLCITYNGLSKAYRVAGYRAGWMVLTGPKQYARGFIEGLELLAGTRLCPNVPAQHAIQVALGGRQSIYDLTGEHGRLLEQRNMAWTKLNEIPGVSCVKPMGALYAFPKLDPNVYEIHDDTQLMLDLLRAEKILMVQGTGFNWPHHDHFRVVTLPWASQLENAIERLGNFLSTYKQ

SEQ ID NO: 28275 - protein, 54 aa, Arabidopsis thaliana
MRAPPLRGIITAILLPPLGVFLRFGCGVEFWICLVLTLLGYIPGIIYAIYVLTK

SEQ ID NO: 28276 - protein, 714 aa, Arabidopsis thaliana
MASATTLLFHHGSTRVLVARRRCQASVLRPYGGLKPFLSFCSLPNSTAPFRDSLRAKSDGLARAYVTGAPPIVEEPDPKIEESKSEAESKDLISWGLLWSLMSKHKLRLSVCLLTLLGCSTCTLSMPVFSGRFFEVLIGVRPEPLWRLLSKIAVLYSLEPIFTIAFVTNMTAIWENVMAILRAQIFRRVLIQKAEFFDKYKVGELTGLLTSDLGALNSIVNDNISRDRGFRAFTEVFGTICILFTLSPQLAPVLGLLMLAMSVLVAVYKRSTVPVYKSHGLAQATMSDCVSETFSAIRTVRSFSGEKRQMSIFGSQILAYKLSGLKLGTFKSINESITRVAVYISLLALYCLGGSKVKTGELAVGTVVSFIGYTFTLTFAVQGLVNTFGDLRGTFAAIDRINSILNAVDIDEALAYGLERDIHTKKVQDENLKLFLSAGPNVNIRHLDKYYMSNLKSTNNLRTLTWAGDVCLDDVHFAYPLRPDVKVLDGLSLTLNSGTVTALVGSSGAGKSTIVQLLARFYEPTQGRITVGGEDVRMFDKSEWAKVVSIVNQEPVLFSLSVAENIAYGLPNEHVSKDDIIKAAKAANAHDFIISLPQGYDTLVGERGGLLSGGQRQRVAIARSLLKNAPILILDEATSALDAVSERLVQSALNRLMKDRTTLVIAHRLSTVQSANQIAVCSDGKIIELGTHSELVAQKGSYASLVGTQRLAFE

SEQ ID NO: 28277 - protein, 120 aa, Glycine max
MAKTSSFKLEHPLERRQSEANRIREKYPDRIPVIVEKAERSDIPDIDKKKYLVPADLTVGQFVYVVRKRIKLSAEKAIFIFVKNTLPPTAALMSSIYEENKDEDGFLYMTYSGENTFGLL

SEQ ID NO: 28278 - protein, 308 aa, Zea mays
MVAAAGGGAVRALSQKEQDIQMMLAADVHLGTKNCDFQTERYVFKRRSDGIYIINLGKTWDKLQLAARVIVAIENPQDIIVQSARPYGQRAVLKFAQYTGAHAIAGRHTPGTFTNQLQTSFSEPRLLILTDPRTDHQPIKESALGNIPTIAFCDTDSPMRYVDIGIPANNKGRNSIGCLFWLLSRMVLQMRGTILPGHKWEVMVDLFFYRDPEEAKEQEEEVAAAPEFAAITDYQGADQWGGDQWTSDVAAPPVAPTGADWGAAPAPVPTGEGWDQAGAPVPADGTVPPVVAPTGWDQAAPPTAQGWE

SEQ ID NO: 28279 - protein, 376 aa, Triticum aestivum
MAPPLAAPRFHAALPRGLLLRPRKPLPTWRRAARPDDQDLYVDDDIGDGFSFSGGKYAEAEGPSKSDEWFAQGRMVKAHALYGNKEKAKDPFFGLTMGSGSQSSGDVFNWFCVEAGSSSNPTVLLIHGFPSQAYSYRNVLPVLSDKYRSIAFDWLGFGFSDKPQPKYGFDYTLDEYTSALESLIDAVAPDKLSIVVQGYFAPIVVKYAKEHQDKLNHLILVNPPITDKHAKLPSTLACFSNFLLGEVFSQDPLRASDKALTSSGPYMMKEEDATVYRRPYLVSGASGFALNAITRAMGKDLKAYIESMRSILASDSWNTKTTICWGLRDRWLTYDGVEDFCDGLKHNVVQLPMAGHHAQEDRGEELGNILKRILRG

SEQ ID NO: 28280 - protein, 767 aa, Candida albicans SC5314
MVQSSVLGFPRIGGQRELKKITEAYWSGKATVEELLAKGKELREHNWKLQQKAGVDIIPSNDFSYYDQVLDLSLLFNAIPERYTKFDLAPIDVLFAMGRGLQKKATETQAAVDVTALEMVKWFDSNYHYVRPTFSHSTEFKLNTAAGIKPVDEFNEAKALGVQTRPVILGPVSYLYLGKADKDSLDLEPISLLPKILPVYKELLQKLKEAGAEQVQIDEPVLVLDLPEAVQSKFKEAYDALVGADVPELILTTYFGDVRPNLKAIENLPVAGFHFDFVRVPEQLDEVASILKDGQTLSAGVVDGRNIWKTDFAKASAVVQKAIEKVGKDKVVVATSSSLLHTPVDLESETKLDAVIKDWFSFATQKLDEVVVIAKNVSGEDVSKQLEANAASIKARSESSITNDPKVQERLTTINEALATRKAAFPERLTEQKAKYNLPLFPTTTIGSFPQTKDIRINRNKFAKGQITAEEYEAFINKEIETVVRFQEEIGLDVLVHGEPERNDMVQYFGEQLNGFAFTTNGWVQSYGSRYVRPPIIVGDVSRPKAMTVKESVYAQSITSKPMKGMLTGPVTILRWSFPRDDVSGKIQALQLGLALRDEVNDLEGAGITVIQVDEPAIREGLPLRAGKERSDYLNWAAQSFRVATSGVENSTQIHSHFCYSDLDPNHIKALDADVVSIEFSKKDDPNYIQEFSEYPNHIGLGLFDIHSPRIPSKQEFVSRIEEILKVYPASKFWVNPDCGLKTRGWPEVKESLTNMVEAAKEFRAKY

SEQ ID NO: 28281 - protein, 535 aa, Arabidopsis thaliana
MFKRVDEFNLVSSTIDHRIFKSRMDGSGTGSRSGVESILPNYKLGRTLGIGSFGRVKIAEHALTGHKVAIKILNRRKIKNMEMEEKVRREIKILRLFMHPHIIRLYEVIETPTDIYLVMEYVNSGELFDYIVEKGRLQEDEARNFFQQIISGVEYCHRNMVVHRDLKPENLLLDSKCNVKIADFGLSNIMRDGHFLKTSCGSPNYAAPEVISGKLYAGPEVDVWSCGVILYALLCGTLPFDDENIPNLFKKIKGGIYTLPSHLSPGARDLIPRMLVVDPMKRVTIPEIRQHPWFQAHLPRYLAVPPPDTVQQAKKIDEEILQEVINMGFDRNHLIESLRNRTQNDGTVTYYLILDNRFRASSGYLGAEFQETMEGTPRMHPAESVASPVSHRLPGLMEYQGVGLRSQYPVERKWALGLQSRAHPREIMTEVLKALQDLNVCWKKIGHYNMKCRWVPNSSADGMLSNSMHDNNYFGDESSIIENEAAVKSPNVVKFEIQLYKTRDDKYLLDLQRVQGPQFLFLDLCAAFLAQLRVL

SEQ ID NO: 28282 - protein, 132 aa, Thiobacillus denitrificans ATCC 25259
MSTDEPKTDAQWRAELSPEQYRILREQGTERAFTGEYWDHHANGEYRCAACGAPLFSSSAKFDSGTGWPSFYEALNAQAVRERTDTTHGMVRTEALCSRCNSHLGHVFPDGPPPTGLRYCINSASLSFHPKD

SEQ ID NO: 28283 - protein, 398 aa, Candida albicans
MFLKNIFIGLAIALLVDATPTTTKRSAGFVALDFSVVKTPKAFPVTNGQEGKTSKRQAVPVTLHNEQVTYAADITVGSNNQKLNVIVDTGSSDLWVPDVNVDCQVTYSDQTADFCKQKGTYDPSGSSASQDLNTPFKIGYGDGSSSQGTLYKDTVGFGGVSIKNQVLADVDSTSIDQGILGVGYKTNEAGGSYDNVPVTLKKQGVIAKNAYSLYLNSPDAATGQIIFGGVDNAKYSGSLIALPVTSDRELRISLGSVEVSGKTINTDNVDVLLDSGTTITYLQQDLADQIIKAFNGKLTQDSNGNSFYEVDCNLSGDVVFNFSKNAKISVPASEFAASLQGDDGQPYDKCQLLFDVNDANILGDNFLRSAYIVYDLDDNEISLAQVKYTSASSISALT

SEQ ID NO: 28284 - protein, 878 aa, Yersinia pestis CO92
MNEQYSAMRSNVSMLGTLLGDTIKEALGEHILDRVETIRKLSKSSRAGNEASRQELLTTLQNLSNDELLPVARAFSQFLNLTNTAEQYHSISPHGEAASNPEALAQLFTRLKDKKLSDQDMRSAVDDLSIELVLTAHPTEITRRTLIHKLVEVNTCLSQLDHNDLADYERNKIMRRLRQLVAQSWHTDEIRKLRPSPVDEAKWGFAVVENSLWEGVPAFLREFNEQLENSLDYRLPVEAVPIRFTSWMGGDRDGNPNVTAEITRHVLLLSRWKATDLFLRDIQVLVSELSMSECTPELRELAGGEEVLEPYRQLMKNVRTQLTNTQAYLEARLKGERVLPPHDLLVSNDQLWEPLYACYQSLKACGMEIIANGQLLDTLRRVRCFGVPLVRIDVRQESTRHTDAIAELTRYLGLGDYESWSESDKQAFLVRELNSKRPLVPLKWEPSAETQEVLETCRVIAEAPQGSIAAYVISMAKVPSDVLAVHLLLKEAGCPFTLPVAPLFETLDDLNNADDVMTQLLGIDWYRGLIQGKQMVMIGYSDSAKDAGVMAASWAQYRAQDALIKTCEKAGITLTLFHGRGGSIGRGGAPAHAALLSQPPGSLKGGLRVTEQGEMIRFKFGLPEVTISSLALYAGAILEANLLPPPEPKKEWIEVMDLLSDASCDMYRSYVRENPEFVRYFRAATPELELGKLPLGSRPAKRRPDGGVESLRAIPWIFAWTQNRLMLPAWLGAGAGLQRAIDAGKQDVLATMCRDWPFFSTRIGMLEMVFAKADLWLAEYYDQRLVDKSLWPLGQQLRDQLAADIKVVLAIANDDHLMADLPWIAESIALRNVYTDPLNVLQAELLHRSRQQEHPDACVEQALMVTIAGVAAGMRNTG

SEQ ID NO: 28285 - protein, 448 aa, Lycopersicon pimpinellifolium
WSPELSSDLYRIDGWGAPYFTVNSSGDISVRPHGTDTLPHQEIDLLKVVKKASDPINSGGLGLQLPLVVRFPDVLKNRLESLQSAFDYAVQSEGYEAHYQGVYPVKCNQDRFVVEDIVKFGSGLRFGLEAGSKPELLLAMSSLCKGSSEGLLVCNGFKDAEYISLALVARKLQLNTVIVLEQEEELDLVIDISRKMAVQPVIGLRAKLRTKHSGHFGSTSGEKGKFGLTTTQILRVVRKLKESGMLDCLQLLHFHIGSQIPSTELLADGVGEAAQVYSELVRLGAGMKFIDIGGGLGIDYDGTKSSDSDVSVGYGLQDYASTVVQAVRFVCDRKNVKHPVICSESGRAIVSHHSVLIFEAVSSTTTRSQELSSMSLHSFVEKLNDDARGDYRNLSAAAIRGEYDTCMLYADQLKQRCVDQFKDGNLDIEQLAAVDAVCDFVSKAIGAS

SEQ ID NO: 28286 - protein, 171 aa, Bradyrhizobium japonicum USDA 110
MTTERAVLAGGCFWGMQDLIRRQPGVTSTRVGYTGGEVKNATYRNHEGYAEAIEIIFDPAKTSYRTMLEFFFQIHDPTTLNRQGNDWGTSYRSAIFTTSDEQKRIAEDTIADVEASHLWPGKVVTEVTPAGDFWEAEPEHQDYLERYPDGYTCHFIRPGWKLPRRAAAAGG

SEQ ID NO: 28287 - protein, 307 aa, Chaetosphaeria decastyla
GAGNNWAKGHYTEGAELVDQVLDVVRREAEGCDCLQGFQITHSLGGGTGAGMGTLLISKIREEFPDRMMATFSVVPSPKVSDTVVEPYNATLSVHQLVENSDETFCIDNEALYDICMRTLKLSNPSYGDLNHLVSAVMSGVTTCLRFPGQLNSDLRKLAVNMVPFPRLHFFMVGFAPLTSRGAYSFRAVTVPELTQQMFDPKNMMAASDFRNGRYLTCSAIFRGKVSMKEVEDQVRNVQSKNSSYFVEWIPNNVQTALCSIPPRGLKMSSTFVGNSTAIQELFKRVGEQFTAMFRRKAFLHWYTGEG

SEQ ID NO: 28288 - protein, 311 aa, Chaetosphaeria hebetiseta
SGAGNNWAKGHYTEGAELVDQVLDVVRREAEGCDCLQGFQITHSLGGGTGAGMGTLLISKIREEFPDRMMATFSVVPSPKVSDTVVEPYNATLSVHQLVENSDETFCIDNEALYDICMRTLKLSNPSYGDLNHLVSAVMSGVTTCLRFPGQLNSDLRKLAVNMVPFPRLHFFMVGFAPLTSRGAHSFRAVTVPELTQQMFDPKNMMAASDFRNGRYLTCSAIFRGKVSMKEVEDQVRNVQNKNSSYFVEWIPNNVQTALCSIPPRGLKMSSTFVGNSTAIQELFKRIGEQFTAMFRRKAFLHWYTGEGMDE

SEQ ID NO: 28289 - protein, 518 aa, Neurospora crassa
MAAFPFLSASFVLLQLALTCLAQHLNLTTGPLHLTGHTPGDGCVHLPIIHSTNTDHFARRGIQLALNNRSDVAYYAQLEIGTPPQTVYTQLDTGSFELWVNPDCTTVSPSDSSFCDHIGFYNASLSSTSKSLGTSKTLRYGIGAANISYVTDTISLSGSSTSLKDIQFGVATSSKDAFSGILGIGYGQGLATKYPNFIDQLYAQKITKVKAYTLALGSKTAQQGSIVFGGVDTSKFAGPLGRLPIIPAEDSPDGVPRFWVQMNGISLTPPSGQSMGVYEGSKIPAFLDSGSTMTILPPALANKIAEDFGSPEMDANGFYRVGCGYVEMNGTMDFEFVGAGQKVTVRVPYKEMIREVGQGESKMCFLGIMGSESFTLLGDTFLRSAYATSCGNTPAALRDVTDLSRVVGNCQIQLGEKEAVVDVVSETSIAPPTGSTGDTDGVTGTGGNGSGNGGTRTAWGFVTTTLAVPMATGLAGVGGSGSGSMSATALDSSGRSMAGDVVLSAAVAVGAAVLGSLL

SEQ ID NO: 28290 - protein, 403 aa, Debaryomyces hansenii CBS767
MVQYEFFGDLTLAPKDEMNDLKIKLENCQSSKVDVSAGVYRGENGESYTLSSVKAAKGVLHANDPGHDYNFTLGIKNFNLMAADIIFGKDISTGGYIATCQTISGTGACSIAIKFLVDCCKLTNFYIGTPTWPNYAPMIKAANAEVVEYVHYNPLTRSLDFESVLEAISKAKMHSVFILQLCCHNPTGTDFSIDQWKILADKMQEKKIMPVFDSAYQGFGSGDIAVDAKPIRLYYAKGLQFLVCQSFSKNLGLYSERVGALHVVVCEKKLAEIVSDQLRSIFRRECSSAPAYGARLAVIIANDPKLTEQWRNDLRTIYKRLVDKRIELHDLLIKYQTPGSFDHLLNQNGLFWFSGLSKVQCKLLVEEYHIFIPSNGRVNIAGLNNSNIHYFAKSFSEVIKISV

SEQ ID NO: 28291 - protein, 353 aa, Oryza sativa (japonica cultivar-group)
MEDSSLFMEWAMETLQHLHPLPATPPPAGGGYAGDNATFPSLQALRESSVSQNGMAPPEPTAHEGHRASNSWSSGDTDSVSGGGGGAVMEHDGWSTSPNSVRCAAGGGGGGGGGGLWPVSWNFSSAMTQPCNDQATPSNPPTTTRARYGGGGVRYLPAAVSPSPSAQTRRASSKGNGGGGSGSSSAAPYAQEHIIAERKRREKINQRFIELSTVIPGLKKMDKATILSDAVRYVKEMQEKLSELEQHQNGGVESAILLKKPCIATSSSDGGCPAASSAVAGSSSSGTARSSLPEIEAKISHGNVMVRIHGENNGKGSLVRLLAAVEGLHLGITHTNVMPFSACTAIITIMAKE

SEQ ID NO: 28292 - protein, 543 aa, Brassica napus
PTRPNTQVRERERSDNLSRFLHLHPSMTMGGASLCDSLVAACMSSASHSSVERLTQFDTRSSSIWPRRSRLVNNCSLHGSQASSRNNNASSSLFESNNTSFNPKQRRFNRASTSGQVTTLEMEKDAMVNKPRRVVVTGMGVETPLGHDPHTFYDNLLQGKSGISHIESFDCSAFPTRIAGEIKSFSTEGLVAPKLSKRMDKFMLYLLTAGKKALEDGGVTEDVMAEFDKSRCGVLIGSAMGGMKVFYDALEALKISYRKMNPFCVPFATTNMGSAMLALDLGWMGPNYSISTACATGNFCILNAANHITRGEADVMLCGGSDSVIIPIGLGGFVACRALSENNDDPTKASRPWDSNRDGFVMGEGAGVLLLEELEHAKKRGATIYAEFLGGSFTCDAYHITEPRPDGAGVILAIEKALAHAGISKEDINYVNAHATSTPAGDLKEYHALSHCFGQNPELRVNSTKSMIGHLLGASGAVEAVATVQAIKTGWVHPNINLENPDKAVDTKLLVGLKKERLDIKAALSNSFGFGGQNSSIIFAPYK

SEQ ID NO: 28293 - protein, 464 aa, Nicotiana tabacum
MQYCLLVNILIYLLGLHQNIKNESHGQLLPDLLLLLRVLRLNFLTRFYSPLPSHTMGSYLNFKNFADTSQPESSGGKPMNIDNFSLARQSSIYSFTFDELQSTCGLGKDFGSMNMDDLLKNIWTAEESQALSSSVAGGNVSVPVGNLQRQGSLTLPRTISQKTVDEVWKDFQKESVNANDGSAPGASNFGQRQSTLGEMTLEEFLVRAGAVREDMQPTRYSKDVTFTSGFTQPSSNNSSLTIAFQQATQNPQQLSNQIAGNNIFNVVTTTSSQQKPQQAQPLFPKQTTVAFASPMQLGNTAQLASPGTRAPIVGMSNPSVNTTIIQGSIMQGGVMDMAGLHNGVTSVKGGSPGNLDPPSLSPSPYACGEGGRGRRSCTSFEKVVERRRKRMIKNRESAARSRDRKQAYTLELETEVAKLKEIKQELQKKQAEFIEKQKNQLLEKMNMPWENKLICLRRTVTGPW

SEQ ID NO: 28294 - protein, 402 aa, Arabidopsis thaliana
MQAFVSINKKATWLLFSTPLFIPSQTRRLVIIISREASLLILSLSLSSSPLRASMVGNILVTGGAGYIGSHTVLQLLLGGYNTVVIDNLDNSSLVSIQRVKDLAGDHGQNLTVHQVDLRDKPALEKVFSETKFDAVMHFAGLKAVGESVAKPLLYYNNNLIATITLLEVMAAHGCKKLVFSSSATVYGWPKEVPCTEESPLSGMSPYGRTKLFIEDICRDVQRGDPEWRIIMLRYFNPVGAHPSGRIGEDPCGTPNNLMPYVQQVVVGRLPNLKIYGTDYTTKDGTGVRDYIHVVDLADGHIFALQKLDDTEIGCEVYNLGTGKGTTVLEMVDAFEKASGMKIPLVKVGRRPGDAETVYASTEKAERELNWKANFGIEEMCRDQWNWASNNPFGYGSSPNST

SEQ ID NO: 28295 - protein, 506 aa, Brassica juncea
MTSINVKLLYHYVITNLFNLCFFPLTAIVAGKAYRLTIDDLHHLYYSYLQHNLITIAPLFAFTVFGSVLYIATRPKPVYLVEYSCYLPPTHCRSSISKVMDIFYQVRKADPSRNGTCDDSSWLDFLRKIQERSGLGDETHGPEGLLQVPPRKTFAAAREETEQVIIGALENLFKNTNVNPKDIGILVVNSSMFNPTPSLSAMVVNTFKLRSNVRSFNLGGMGCSAGVIAIDLAKDLLHVHKNTYALVVSTENITYNIYAGDNRSMMVSNCLFRVGGAAILLSNKPGDRRRSKYELVHTVRTHTGADDKSFRCVQQGDDENGKTGVSLSKDITDVAGRTVKKNIATLGPLILPLSEKLLFFVTFMGKKLFKDKIKHYYVPDFKLAIDHFCIHAGGRAVIDVLEKNLALAPIDVEASRSTLHRFGNTSSSSIWYELAYIEAKGRMKKGNKVWQIALGSGFKCNSAVWVALNNVKASTNSPWEHCIDRYPVKIDSDSGKSETRVQNGRS

SEQ ID NO: 28296 - protein, 267 aa, Yersinia pseudotuberculosis IP 32953
MSIPVFGLGTFRLQDQIVIDSVCQALTLGYRAIDTAQIYENEAAVGQAIQESGINRDELFITTKIWIANLSKDKLIPSLRESIQKLKTDYVDLTLIHWPSPNDEVSVAEFMSELLKAKGLGLTRQIGISNFTIDLMKQAIAAVGAEEIATNQIELSPLLQNRNVVDFAKQNGIAVTSYMTLAYGKALAEPVIKTIAEQHGATPAQVILSWAMQLGYGVIPSSTKAANLASNLLAQKLCLNAADMALIATLDRNERLVSPDGLAPKWD

SEQ ID NO: 28297 - protein, 506 aa, Brassica juncea
MTSINVKLLYHYVITNFFNLCFFPLTAIVAGKASRLTIDDLHHLYYSYLQHNLITIAPLFAFTVFGSVLYIATRPKPVYLVEYSCYLPPTHCRSSISKVMDIFYQVRKADPSRNGTCDDSSWLDFLRKIQERSGLGDETYGPEGLLQVPPRKTFAAAREETEQVIIGALKNLFENTKVNPKDIGILVVNSSMFNPTPSLSAMVVNTFKLRSNVRSFNLGGMGCSAGVIAIDLAKDLLHVHKNTYALVVSTENITYNIYAGDNRSMMVSNCLFRVGGAAILLSNKPRDRRRSKYELVHTVRTHTGADDKSFRCVQQGDDENGKTGVSLSKDITDVAGRTVKKNIATLGPLILPLSEKLLFFVTFMAKKLFKDKVKHYYVPDFKLAVDHFCIHAGGRAVIDVLEKNLGLAPIDVEASRSTLHRFGNTSSSSIWYELAYIEAKGRMKKGNKVWQIALGSGFKCNSAVWVALSNVKASTNSPWEHCIDRYPVKIDSDSAKSEVRVQNGRS

SEQ ID NO: 28298 - protein, 364 aa, Thalictrum tuberosum
MGSTENNHNLTPAEEEEEEAYLHAMQLASASVLPMVLKAAIELDVLEIIAKAGKGAYVAPSEIASQLSTSNSQAPTVLDRMLRLLASYKVLTCNLRNLEDGGVERLYGLAPVCKFLVKNEDGVSMAPLVLMNQDKVLMESWYHLKDAVLDGGIPFNKAYGMTAFEYHGTDPRFNKVFNRGMADHSTITMKKLLELYKGFEGLKSVVDVGGGTGATVNMIVTKHPTIKGINFDLPHVIDDAPAYPGVEHIGGDMFVSVPKGDAIFMKWILHDWSDEHSVKFLKNCYESIPADGKVIIVESVLPVFPETNLAAHTCFQLDNIMLAHNPGGKERTEKDFKALSVKAGFTGFKVVCGAFGSWVMEFCK

SEQ ID NO: 28299 - protein, 350 aa, Thermococcus kodakarensis KOD1
MAEKMQAIMKTKPAYGAELVEVDVPKPGPGEVLIKVLATSICGTDLHIYEWNEWAQSRIKPPQIMGHEVAGEVVEVGPGVEDLQVGDYISVETHIVCGKCYACKHNRYHVCQNTKIFGVDMDGVFAHYAIVPAKNAWKNPKDMPPEYAALQEPLGNAVDTVLAGPIAGRSTLITGAGPLGLLGIAVAKASGAYPVIVSEPSEFRRKLAKKVGADYVVNPFEEDPVKFVMDITDGAGVEVFLEFSGAPKALEQGLKAVTPGGRVSLLGLFPREVTIDFNNLIIFKALEVHGITGRHLWETWYTVSSLIQSGKLNLDPIITHKYKGFDKFEEAFELMRAGKTGKVVFFPHKG

SEQ ID NO: 28300 - protein, 362 aa, Thalictrum tuberosum
MGSTQKNHNLTPEEEEEACLHAMQLASASVLPMVLKAAIELSVLEIIAKAGQGAYVAPTEIASQLSTSNSQAPIILDRILRLLASYKVLTCNLRTLEDGGVERLYGLAPVCKFLVKNEDGVSIAPLVLMNQDKVLMESWYHLKDAVLDGGIPFNKAYGMTAFEYHGTDPRFNKVFNRGMADHSTITMKKLLELYKGFEGLKSVVDVGGGTGATINMIVTKHPTIKGINFDLPHVIDDAPAYPGVEHIGGDMFVSVPKGDAIFMKWILHDWSDEHSVKFLKNCYESIPADGKVIIVESILPVYPETNLASNACFQLDNIMLAHNPGGKERTEKDFEALSAKAGFTGFKIVCGAFGSWVMEFCK

SEQ ID NO: 28301 - protein, 337 aa, Chaetomium globosum
MAIKVGINGFGRIGRIVFRNAVEHADVEIVAVNDPFIEPKYAEYMLKYDSTHGVFNGTIAVEGSDLVVNGKKVKFYTERDPAAIPWKDTGAEYIVESTGVFTTTEKAGAHLKGGAKRVIISAPSADAPMYVMGVNEKTYDGSAQVISNASCTTNCLAPLAKVVNDKFGIVEGLMTTVHSYTATQKTVDGPSAKDWRGGRGAAQNIIPSSTGAAKAVGKVIPELNGKLTGMSFRVPTSNVSVVDLTCRLQKEASYDEIKAALKEASEGDLKGILGYTEDEIVSSDLNGNPNSSIFDAKAGISLNKNFVKLVSWYDNEWGYSRRVLDLLAYVAKVDASK

SEQ ID NO: 28302 - protein, 362 aa, Thalictrum tuberosum
MGSTQKNHNLTPEEEEEACLHAMQLASASVLPMVLKAAIELDVLEIIAKAGQGAYVAPTEIASQLSTSNSQAPIILDRVLRLLASYKVLTCNLRTLEDGGVERLYGLAPVCKFLVKNEDGVSIAPLVLMNQDKVLMESWYHLKDAVLDGGIPFNKAYGMTAFEYHGTDPRFNKVFNRGMADHSTITMKKLLELYKGFEGLKSVVDVGGGTGATINMIVTKHPTIKGINFYLPHVIDDAPAYPGVEHIGGDMFVSVPKGDAIFMKWILHDWSDEHSVKFLKNCYESIPADGKVIIVECILPVYPETNLASNACFQLDNIMLAHNPGGKERTEKDFEALSAKAGFTGFKIICGAFGSWVMEFCK

SEQ ID NO: 28303 - protein, 183 aa, Brassica napus
  misc_feature (69)..(69): Xaa can be any naturally occurring amino acid
  unsure (1)..(183): unsure at all Xaa locations
LMEISHQYLHKQISIVSQEPILFNCSVEENIAYGFDGEATLSDIENAAKMANAHEVIETFPDKYKTVVXERGVRLSGGQKQRIAIARALLTNPRVLLLDEATSALDAESEYLVQDAMDSLMAGRTVLVIAHRLSTVKTADCVAVISDGQVAEKGTHEELLSFNGIYTNLVKRQLQSSSSVTNL

SEQ ID NO: 28304 - protein, 374 aa, Thiobacillus denitrificans ATCC 25259
MSTSVVRHARRIVVKVGSSLVTADGRGLDHAALSRWAEQIAALAEQGKEVVLVSSGAIAEGIARLGWKKRPKAVNELQAAAAVGQMGLVQAYESIFRTHKLHAAQVLLTHEDLADRTRYLNARSTLRTLLELRVVPIINENDTVATDEIRLGDNDTLGALVTNLIEADCLVILTDQAGLYTADPRKVADASLVMEAHAGDPELERMAGGAGSSVGTGGMLTKILAAKRAARSGAHTVICSGREPRVLLRLAEGEPIGSQLVARQAPLAARRQWLADHLQLRGGLVLDDGAVRALQEDGKSLLPVGVRGVTGEFERGEVVAVVDASGREIARGLTNYSAAEARRIAGKPSTAIEAELGYMDEPELIHRDNLVVLA

SEQ ID NO: 28305 - protein, 364 aa, Thalictrum tuberosum
MGSTENNHNLTPAEEEEEEACLHAMQLASASVLPMVLKAAIELDVLEIIAKAGKGAYVAPSEIASQLSTSNSQAPTVLDRMLRLLASYKVLTCNLRNLEDGGVERLYGLAPVCKFLVKNEDGVSMAPLVLMNQDKVLMESWYHLKDAVLDGGIPFNKAYGMTAFEYHGTDPRFNKVFNRGMADHSTITMKKLLELYKGFEGLKSVVDVGGGTGATVNMIVTKHPTIKGINFDLPHVIDDAPAYPGVEHIGGDMFVSVPKGDAIFMKWILHDWSDEHSVKFLKNCYESIPADGKVIIVESVLPVFPETNLAAHTCFQLDNIMLAHNPGGKERTEKDFKALSVKAGFTGFKVVCGAFGSWVMEFCK

SEQ ID NO: 28306 - protein, 500 aa, Pseudonocardia sp. K1
MTVIAKPDHLLRDDVQKFIDRPKKLFINGQWHDSIKGETLEVYDPAVGTKICTVAAGDAEDVDRAVAAARHAFDEGPWSKLNPSERGRLVWRLADLLEEHADEFAQIDALDNGKPVTDARAVDVAFSIELLRYMAGWSNKIYGETIPLTNPADFHAYTLREPVGVVGQIVPWNFPLMMAVWKVAPALAAGCTVILKPAEQTPLSALRLAELTEEAGFPPGVFNVITGFGETAGAAIAAHDNIDKVAFTGSTEVGRLIAQAASGNLKKVSLELGGKSPVIVFGDSDIEQAVAGASSAIFYNNGQTCTAGSRLYVHRKVYDKVVEGIASEASALPIGHGLDPATRIGPLISAEQRDRVTGYIAQGREAGAEVIVGGDTVGDGGYFIQPTILTKTDPSMSVVREEIFGPVLCAMAFDEDTIDSVVREANNSVYGLAASIYTRDISVAHRVAKRLKAGTIGINTHHVVDVALPFGGFKQSGYGRDMGRDAIDQYTEVKSIGIAL

SEQ ID NO: 28307 - protein, 369 aa, Anabaena variabilis ATCC 29413
MTKTIVVKIGTSSLTQPETGQLALSTIATLAETLSYLRQQGNQVILVSSGAVGVGCARLGLTERPKAIALKQAVAAVGQGRLMRVYDDLFTTLQQPIAQVLLTRSDLVQRSRYLNVYNTFRELLALGVIPVVNENDTVAVDELKFGDNDTLSALVASLVEADWLFLLTDVDRLYSADPRSVPDARPISLVTSIKELADLQVQTGSQGSQWGTGGMMTKISAARIAIAAGVRTVITQGRYPRNIEKIIQGELIGTHFQPQPEPTSARKRWIAYGLVPTGKLYLDSGAIAAIVKAGKSLLPAGVKTVAGEFEPQDAVQLLDPQGNEIARGLVNYSSKDLQQICGRHSKEISTILGYVGAETVIHRDNLVLT

SEQ ID NO: 28308 - protein, 344 aa, Bacillus cereus G9241
MGEKMLGIINATGSFPSLKKVTGHRSLAALPFGGRYRLIDFMLSNMVNSNIHSVAVFTSHKNRSLMDHVGSGKQWDLDRKRDGLFLFPPNCQCDQDEFGSFAHFRRHIDYFLRAREEYVVITNSHLVTALNFQAVLERHIHTAADITEVCHEGVSLQTYVLKKQLLLDLFESYKDVEQYSLFDVVREKRGKSLHIATYEHTGYVAIIDSIESYYKHSLEILQPAIWKQLFKKEAPIFTKVKDEPPTRYLKGAAVKNTMIANGSIIEGEVENSVISRSVKIGKGSIVRNSIIMQKSQIGDNCIIDGVIIDKDVKIGDGVVLKGTADEPYVVEKGSVQNSTINSYS

SEQ ID NO: 28309 - protein, 134 aa, Brassica napus
  misc_feature (70)..(70): Xaa can be any naturally occurring amino acid
  unsure (1)..(134): unsure at all Xaa locations
PESFKKLGISFETRGGGLKVWHWGRPFWVFFPKGQRADRKGPLKKKVIYTAIFFLIFLVGSKFPFYGINXTTGADPFYWMRVILASNRGTVMELGITPIATFGLGMQLLAGSKIMEVDNNGPKDRALWNGAQKL

SEQ ID NO: 28310 - protein, 304 aa, Brassica napus
MIRFCYSFRSLCVRVAEKMLKVPEHQVAGHIAKDGKLGPLVDNQGRFYKPLQGDARGENEAKFYESFSSNKNVPDHIRGYFPVYHGVQLVEASDGSGKLPHMVLEDVVSSYVKPSVMDVKIGSRTWYPDVSEEYFNKCIKKDRATTTVSLGFRVSGLKIFDCQESGFWRPDKRVVLAYKADGARTALRKFVSSNSLADDSVPDCAYASGVYGGSNGILMQLLELKAWFETQTLYHFNSCSVLMVYENESGGDEERRPQVKLVDFAHVLDGNGVIDQNFFGGLCSFIKFIQDILESSDNRCENGH

SEQ ID NO: 28311 - protein, 570 aa, Bacillus anthracis str. Sterne
MSKFTVASNGSLETTLRGVEVLSTPLLNKGVAFTQEEREELGLKGLLPPAVLTLEEQARRAYEQFCSQPDDLLKNVYLTALHDRNEVLFYRILTDHLREMLPIVYTPTVGVAIQRYSHEYRKPRGVYLSINDPSGIEEAFANIGATAENIDLVVVTDGEGILGIGDWGVGGINIAIGKLAVYTAAVGIDPSRVLPVILDVGTNREELLNNPFYIGNRHPRITGEAYDEFIDTFVQAVNKQFPKALLHWEDFSSRNARKILDKYRHDICTFNDDIQGTGAVSLAAVLSAVKASGVPLSEHRVVVFGAGTAGIGIADQVRDAMVRVGVSEEESYKRFWCIDRNGLVTDNMEDLLDFQIPYARKEAEVSEWKENGVIGLAEVVKHVKPTILIGTSTVAGAFKEEIIKEMASHVERPIILPMSNPTPLAEAKPADLIEWTEGRALVATGSPFEPVTYNGVTYVIGQSNNALIFPGLGLGTIVVRASVMTDGMFAAAAEAVASMVDTSQPGAPILPEVEELRNISEMVAIEVAKVAVAEGVARENFSDNDIKIAVKEAIWEPEYRQIKAVEKVTI

SEQ ID NO: 28312 - protein, 218 aa, Triticum aestivum
  misc_feature (146)..(147): Xaa can be any naturally occurring amino acid
  misc_feature (149)..(149): Xaa can be any naturally occurring amino acid
  misc_feature (151)..(151): Xaa can be any naturally occurring amino acid
  misc_feature (158)..(159): Xaa can be any naturally occurring amino acid
  misc_feature (175)..(175): Xaa can be any naturally occurring amino acid
  misc_feature (179)..(179): Xaa can be any naturally occurring amino acid
  unsure (1)..(218): unsure at all Xaa locations
AGRTPWLDGSTAPRLKICDFGYSKSSVLHSQPKSTVGTPAYIAPEVLLKKEYDGKIADVWSCGVTLYVMLVGAYPFEDPDEPKNFRKTIQRILSVQYSIPDYVHISSECRDLIAKIFVGNPATRITIPEIRNHPWFLKNLPADLVXXSXMXSQYEEPXXPMQSMDEIMQILAEAXIPAXGSRINQFLNDGLDLDDDMDDLDSDADLDVESSGEIVYAM

SEQ ID NO: 28313 - protein, 202 aa, Debaryomyces hansenii CBS767
MSSEATAPKTEENASAPQPPSSNVFSMFGAKKEAKKEDSDETKKEDKKESKDEEKEDDKADEEEVDVHFEPLVQLEKVDVKTNEENEDVLYKVRAKLFRFHADTKEWKERGTGDVKFLKHKESGKTRILMRRDKTLKVCANHLIAPEYELKANIGSDRSWVYNVTADVAEGEPEAQTLAIRFGNKENADKFKEQFDKAKETK

SEQ ID NO: 28314 - protein, 297 aa, Carica papaya
MAKLSCVLMAPLLFSFLLILMVSSQGPPSPGYYPTSRFPSLGFDQGFRNRWGPQHQRVEQGVLTIWLDSTSGSGFKSLHTYQSGYFGAAIKLQPGYTAGVITSFYLSNNEDYPGNHDEIDIEFLGTTPGEPYTLQTNVFIRGSGDRNIVGREVKFHLWFDPTQDFHNYAILWTPSEIVFFVDDVPIRRYPRKSDATFPLRTMWVYGSIWDASSWATDDGKYKADYQYQPFVGRYKNFKIAACRADGQASCRPPSVSPSGFGVLSPQQESAMEWAQRNSLVYNYCLDPKRDHTPTPEC

SEQ ID NO: 28315 - protein, 846 aa, Debaryomyces hansenii CBS767
MSNPSHSRSVSSSSEDDNPYDTPENYYGPKTNPVGAGKNSKLGKVRTFSVFEPKRSQFFDDYNPGLANYDPGLANSDVTEQPDKETSPFSDSPTPEVECKWDFKQSSGLAPLTGKKVDDIPSTHNPKRGNRNSIVPIYEDISLDSVEDFNASTKPDPKRLHYRRASMDDTFLKPRKFYINDIDLTLKELLKNEDTDHNFQITIEDNGPKVIKLGTANSNGYRQAPIRGTYMLSNLLQELTIAKRLGRDQMILDETRLNENPVYRMKRLITTQFWRSLTRLLTRDNIMEMSKDTKIEEEITDENGQVQHNKESHRIYIPYNRKDQFDYFNSIKEANPDISLDVQYLPEIIDADYVKSINKKPGLLALSAAPDPNDSTNLISQPYIVPGGRFNELYGWDSYMETIGLLVDVTVDDQEHLKLARGMTENFIYEIHHYGKILNANRSYYLTRSQPPFLTDMALRVFNKTMEVAPERLEESMDFIRRAIEAAIKEYNNVWFAEPRLDKETGLSCYHPVGKGIPPETEASHFNAILDPYIKKYGISQTDFIEEYNNGTIKEPELDEYFLHDRAVRESGHDTSYRLEGKCADLATVDLNSLLYKYEADIAFVIESLCDGKLENKDTGEIETPEKWREKANLRKKRITKYLWNEEDSIFYDYNIKKKRQTGYESATTFWPLWSQVASAEQADMLVKNSTQKLEEFGGLAAGTLKSRGGINLHRPSRQWDYPYGWAPQQILAWIGLCNYGYEGVARRLAYRWLYLMTQAFVDYNGVVVEKYNVTKGAIPHKVDAEYGNQGLDFKGVAMEGFGWVNASYVFGLTFMNLHACRCLGTLTPPDVFLRYLHPQQRKDYQ

SEQ ID NO: 28316 - protein, 448 aa, Lactococcus lactis
MSQATEYIKEVRANLAQRDGNQAEFLEAVDNFLATITPVFEAHPEYIEANILGQITEPERAFQFRVPWVDDAGKVQINRGFRVQFNSAIGPYKGGLRFHPSVNLSVVKFLGFEQIFKNSLTGLPIGGGKGGSDFNPKGKSDGEVMRFAQSFMTELQKHIGPDIDVPAGDIGVGGREIGYLFGQYKRLNGFSGGILTGKGLSYGGSLVRPEATGFGLLYYVDAMLKAHRDDLSGKKIKLSGAGNVAIYAIQKATELGAKIVTVSDSDGYIYDERGIDYKVVQQIKEVERGRISEYAKRVSTAEYSKGSVWEAPIDCDVALPCATQNEIDVDGAKLLISSGVQVVAEGANMPSTPEAIKAYRQAGLLYGPAKAANAGGVAVSALEMSQNSQRLAWSFADVDQRLQKIMQDIFQKSADAAKQYNLGDDYVAGANIAGFLKVADAMYAQGIV

SEQ ID NO: 28317 - protein, 363 aa, Catharanthus roseus
MGSANPDNKNSMTKEEEEACLSAMRLASASVLPMVLKSAIELDLLELIKKSGPGAYVSPSELAAQLPTQNPDAPVMLDRILRLLASYSVLNCTLKDLPDGGIERLYSLAPVCKFLTKNEDGVSMAALLLMNQDKVLMESWYHLKDAVLEGGIPFNKAYGMTAFEYHGKDPRFNKVFNQGMSNHSTIIMKKILEIYQGFQGLKTVVDVGGGTGATLNMIVSKYPSIKGINFDLPHVIEDAPSYPGVDHVGGDMFVSVPKGDAIFMKWICHDWSDAHCLKFLKNCHEALPENGKVILAECLLPEAPDSTLSTQNTVHVDVIMLAHNPGGKERTEKEFEALAKGAGFRGFIKVCCAYNSWIMELLK

SEQ ID NO: 28318 - protein, 362 aa, Triticum aestivum
  misc_feature (49)..(49): Xaa can be any naturally occurring amino acid
  misc_feature (73)..(73): Xaa can be any naturally occurring amino acid
  unsure (1)..(362): unsure at all Xaa locations
MGSTAADMAASADEEACMYALQLVSSSILPMTLKNAIELGLLETLVAAXGGKLLTPAEVAAKLPSTANPAAAXDMVDRMLRLLASYNVVSCTMEEGKDGRLSRRYRAAPVCKFLTPNEDGVSMAALALMNQDKVLMESWYYLKDAVLDGGIPFNKAYGMSAFEYHGTDPRFNRVFNEGMKNHSIIITKKLLEVYKGFEGLGTIVDVGGGVGATVGAITAAYPAIKGINFDLPHVISEAQPFPGVTHVGGDMFQKVPSGDAILMKWILHDWSDEHCATLLKNCYDALPAHGKVVLVECILPVNPEATPKAQGVFHVDMIMLAHNPGGRERYEREFEALAKGAGFKAIKTTYIYANAFAIEFTK

SEQ ID NO: 28319 - protein, 86 aa, Brassica napus
MMATTAVVGLNAGKRLLSSSFYYSDVTEKFLSVNDLCSSQYYYHIASTRSGITAKKTSSSSSSSNYSPSFHSSSRHTQSAKALKES

SEQ ID NO: 28320 - protein, 173 aa, Brassica napus
MCDLVARTGRLQQRYKDGSRLIAGCIPFRYIKDGNSESGKVVQVLMISSSSGPGLLFPKGGWENDETVKEAAVREAVEEAGVRGILMDFLGDYEFKSKTHQDEFSPEGLCKAAMYALYVKEELETWPEQKTRTRTWLTIGEAVESCRHAWMKDALVDGFCKWHKEKMGKGDED

SEQ ID NO: 28321 - protein, 342 aa, Leifsonia xyli subsp. xyli str. CTCB07
MAEIYYDNDADLSIIQGKKVAVIGYGSQGHAHAQNLRDSGVEVVIGLKDGSKSTPKAEEAGFRVLSAAEAAQWADVVVILAPDQVQRTLYADDIRANLEAGNALVFGHGFNIRFGYIEAPEGVDVIMVAPKGPGHTVRREYEAGRGVPVIVAVEKDATGAAWPLVLSYAKGIGGLRAGGIKTTFTEETETDLFGEQAVLCGGVSQLVQYGFETLTEAGYQPQVAYFEVLHELKLIVDLMWEGGIAKQRWSVSDTAEYGDYVSGPRVIGPHVKENMKAVLSDIQDGTFAKRFIADQDAGAPEFLALRVKGEQHPIEATGRELRKLFAWNASNDDDYVDGEVAR

SEQ ID NO: 28322 - protein, 431 aa, Mycobacterium bovis AF2122/97
MADTDDTATLRYPGGEIDLQIVHATEGADGIALGPLLAKTGHTTFDVGFANTAAAKSSITYIDGDAGILRYRGYPIDQLAEKSTFIEVCYLLIYGELPDTDQLAQFTGRIQRHTMLHEDLKRFFDGFPRNAHPMPVLSSVVNALSAYYQDALDPMDNGQVELSTIRLLAKLPTIAAYAYKKSVGQPFLYPDNSLTLVENFLRLTFGFPAEPYQADPEVVRALDMLFILHADHEQNCSTSTVRLVGSSRANLFTSISGGINALWGPLHGGANQAVLEMLEGIRDSGDDVSEFVRKVKNREAGVKLMGFGHRVYKNYDPRARIVKEQADKILAKLGGDDSLLGIAKELEEAALTDDYFIERKLYPNVDFYTGLIYRALGFPTRMFTVLFALGRLPGWIAHWREMHDEGDSKIGRPRQIYTGYAERDYVTIDAR

SEQ ID NO: 28323 - protein, 362 aa, Thalictrum tuberosum
MGSTQNNHNLTPEEEEEACLHAMQLASASVLPMVLKAAIELDVLEIIAKAGQGAYVAPSEIASQLSTSNSQAPIILDRILRLLASYKVLTCNLRTLEDGGVERLYGLAPVCKFLVKNEDGVSMAPLVLMNQDKVLMESWYHLKDAVLDGGIPFNKAYGMTAFEYHGTDPRFNKVFNRGMSDHSTITMKKLLELYKGFEGLKSVVDVGGGTGATVNMIVTKHPTIKGINFDLPHVIEDAPAYPGVEHIGGDMFVCVPKGDAIFMKWILHDWSDEHSVKFLKNCYESIPADGKVIDVESILPVCPETNLAANACFQLDNIMLAHNPGGKERTEKDFEALSVKAGFTGFKVVCGAFGSWVMEFCK

SEQ ID NO: 28324 - protein, 727 aa, uncultured archaeon GZfos34A6
MRRLLIISNRLPVSVERRKNEFRFSSSVGGLATGLNALHQRYESVWVGWPGIAINREETDYVESKLSEFNCYPVFLSQGEVEKYYYGFSNKTLWPLFHYFPQYAKYEHSEWSAYEHVNRKFCERVAEIAKPEDVIWIHDYHLMLLPGLIRERFPDATIGFFLHIPFPSADLFRLIPWRRRILEGVLGADLIGFHTYDYAHNFLCSVLRLLGYEHELGKFAIGDRIVQVDVHPMGIEVQKFVSATSGRGIKREVARLRSRFKNCKIIFSMDRLDYTKGIPERLFAFELFLETHPEWHEKVVFILKIAPSRTKGGQYRVLKQEIDELVGRINGKYGTPEWAPISYFYRSLPFQTIVAFYLAADVALLTSMRDGMNLIAKEFVASRVDGKGVLILSEMAGAARELGEALVVNPNNKEEVVEALNEALRMPEEEQKSRNEEMQKRLCHYDVFHWGSGFIRSVLETKRLQEELNMKKLSEKIREELKNAYKAADKCLLLLDYDGTLVPFADKPERAKPDKELLYLFRALSEPPENTVVIISGRDKETLERWFGGTEVCLVAEHGVWLREEEGEWEAIELLKEDWKEKIIPILDLFVDRAPGSFIEEKSFSLVWHYRKVDPELGELRAKELTDQLIDLAACTELQVMKGNKVVEVKDGRVNKGIAASHWLTKGFGFILAVGDDLTDEDMFKVLPGDAYSVKIGFTPSKARFYLGSPKEVRALLDEMEMVEVYK

SEQ ID NO: 28325 - protein, 267 aa, Leifsonia xyli subsp. xyli str. CTCB07
MTSTASPQPSTSADLAAAVSALAGTERLLVALDFDGTLAPFVDIPKAARALPEAKAALDRLEQMPGTRVAYVSGRPLSSLETVTEADGDALLIGSHGVEIRFGREGVSLDLATEERAALDRLGEVLGALVQSVPGTRLEVKPVGFGVHYRLLEGEGAEDVVARARAAAASVSSDLTIRDGKDIIEFSVWDADKGDGIDRLREYTKATAVLFAGDDVTDEDGFRVLVPGRGDVGVKVGPGETTAQYRVADERAIAALLTLLSEARAAR

SEQ ID NO: 28326 - protein, 673 aa, Escherichia coli CFT073
MPFIIRSGVKMSSRKELANAIRALSMDAVQKAKSGHPGAPMGMADIAEVLWRDFLKHNPQNPSWADRDRFVLSNGHGSMLIYSLLHLTGYDLPMEELKNFRQLHSKTPGHPEVGYTAGVETTTGPLGQGIANAVGMAIAEKTLAAQFNRPGHDIVDHYTYAFMGDGCMMEGISHEVCSLAGTLKLGKLIAFYDDNGISIDGHVEGWFTDDTAMRFEAYGWHVIRDIDGHDAASIKRAVEEARAVTDKPSLLMCKTIIGFGSPNKAGTHDSHGAPLGDAEIALTREQLGWKYAPFEIPSEIYAQWDAKEAGQAKEFAWNEKFAAYAKAYPQEAAEFTRRMKGEMPSDFDAKAKEFIAKLQANPAKIASRKASQNAIEAFGPLLPEFLGGSADLAPSNLTLWSGSKAINEDAAGNYIHYGVREFGMTAIANGISLHGGFLPYTSTFLMFVEYARNAVRMAALMKQRQVMVYTHDSIGLGEDGPTHQPVEQIASLRVTPNMSTWRPCDQVESAVAWKYGVERQDGPTALILSRQNLAQQERTEEQLANIARGGYVLKDCAGQPELIFIATGSEVELAVAAYEKLTAEGVKARVVSMPSTDAFDKQDAAYRESVLPKAVTARVAVEAGIADYWYKYVGLNGAIVGMTTFGESAPAEQLFEEFGFTVDNVVAKAKALL

SEQ ID NO: 28327 - protein, 217 aa, Candida glabrata CBS138
MSKITTSHVRENVKELLKYSAETKKRNFLETVELQVGLKNYDPQRDKRFSGTLKLPVCPRPNMSICIFGDAFDVDRAKSCGVDAMSVDDLKKLNKNKKLIKKLSKKYNAFIASEVLIKQVPRLLGPQLSKAGKFPTPVSHNDDLYGKVTDVRSTIKFQLKKVLCLAVAVGNVEMDEDTLVNQILMSVNFLVSLLKKNWQNVGSLVIKSTMGPAFRLY

SEQ ID NO: 28328 - protein, 492 aa, Leifsonia xyli subsp. xyli str. CTCB07
MIVSNRLPVDRVVDETGESSWRPSPGGLVAALKPVMRAEDGVWIGWAGVAGEEVEPFEVDGIAILPVPLSEQDLQEYYEGFSNDTLWPLYHDVIAPPSYHREWWETYVAVNRRFAAAAAAVAAKGAVVWVHDYQLQLVPEMLRESRPDLVIGFFNHIPFPPYGIYSQLPWRRQIIDGLLGADVVGFQRVADASNFSRAVRRLKGYETRGPIIDVPIESDDPEAGSHRHVTANRHGGLVRTVLARAFPISIDVEQYQELARRPEIRARAAAIREELGNPETIMLGVDRLDYTKGIGHRLKAFGELLRDGRLDVEKATLVQVASPSRERVETYRQLRDEIELTVGRINGDYSTLGHTAVAYLHHGYPREEMVALYLAADVMLVTALRDGMNLVAKEYVATRVDEDGVLILSEFAGASDELRQALLINPHDIEGLKDAIAQAVEMPRRDRTRRMRALRKKVLTNDVARWSASFLDALIRRAHGDHPLQNSPVNRR

SEQ ID NO: 28329 - protein, 662 aa, Escherichia coli CFT073
MRFAMSDDMSMGLPSSAGEHGVLRSMQEVAMSSQEASKMLRTYNIAWWGNNYYDVNELGHISVCPDPDVPEARVDLAQLVKTREAQGQRLPALFCFPQILQHRLRSINAAFKRARESYGYNGDYFLVYPIKVNQHRRVIESLIHSGEPLGLEAGSKAELMAVLAHAGMTRSVIVCNGYKDREYIRLALIGEKMGHKVYLVIEKMSEIAIVLDEAERLNVVPRLGVRARLASQGSGKWQSSGGEKSKFGLAATQVLQLVETLREAGRLDSLQLLHFHLGSQMANIRDIATGVRESARFYVELHKLGVNIQCFDVGGGLGVDYEGTRSQSDCSVNYGLNEYANNIIWAIGDACEENGLPHPTVITESGRAVTAHHTVLVSNIIGVERNEYTVPTAPAEDAPRALQSMWETWQEMHEPGTRRSLREWLHDSQMDLHDIHIGYSSGTFSLQERAWAEQLYLSMCHEVQKQLDPQNRAHRPIIDELQERMADKMYVNFSLFQSMPDAWGIDQLFPVLPLEGLDQVPERRAVLLDITCDSDGAIDHYIDGDGIATTMPMPEYDPENPPMLGFFMVGAYQEILGNMHNLFGDTEAVDVFVFPDGSVEVELSDEGDTVADMLQYVQLDPKTLLTQFRDQVKKTDLDAELQQQFLEEFEAGLYGYTYLEDE

SEQ ID NO: 28330 - protein, 593 aa, Rubrivivax gelatinosus PM1
MIDIKVPDIGDFKDVAVIELLVKPGDTVAADQSLITVESDKASMEIPSSHAGVVKALKLKVGDTVNEGSVILSLDAASAAAEPAASSAAAAAPAVAAPAAAAVAPSAASYAGGADVECDLLVLGAGPGGYSAAFRGADLGLKVVLVERYATLGGVCLNVGCIPSKALLHVAAVMDEVSHFEALGVSFGKPSVDLARLKAHKDKVVGKLTGGLAAMAKMRKVTVVTGSGEFVDPHHLKVVPSKDGAPQTIRFKQAIIAAGSEAVKLPFLPKDDPRIVTSTGALELRQQPKKMLVIGGGIIGLEMGTVYSTLGAKLDVVEMLDGLMQGADRDLVKVWQKMNAPRFDKLMLKTKTVGAEATKDGVRVQFEGLDGTKSEGVYDLVLQAVGRTPNGKKIGAEKAGVLVGERGFVPVDIQMRTNVPHIFAIGDIVGQPMLAHKAVHEAHVAAEVAAGAVLGDAKLATSSFNARVIPSVAYTDPEVAWVGLTEDEAKARGVKVKKGLFPWTASGRAIANGRDEGFTKLLFDEATHRIVGGGIVGTHAGDMIGEIALAIEMGADAVDIGKTIHPHPTLGESIGMAAEVAHGSCTDLPPAKR

SEQ ID NO: 28331 - protein, 349 aa, Idiomarina loihiensis L2TR
MQQLSSTLRFLLQSVGLGLVVAAIVIIAKPFWAQSESLRQNGNEITSFNQAVRKAAPAVVNIYSMGEIQGSYYQPQSSRVWRLGSGVIMDSQGYILTAHHVVDNVDKIEVALQDGRRYAAQLIGSDRYTDLAVLKIDAENLPVIPVQSTRRVRVGDIVLAIGNPYNIGQTITQGIVSASGGRVGVSNSYSDLIQMDAVINQGASGGALVNTAGELIGINNARYNSAFGDGGEGIYFAVPYENARKVMKTLIQEGKVVRGYIGISVNPNFSEEQSLSGILITGVERNSPAAKAGLQPNDFLVAIGGDPVRSAPEGLDRVAGSEPGTKLEVEFYRNEKRMTTTVTVAELPR

SEQ ID NO: 28332 - protein, 451 aa, Idiomarina loihiensis L2TR
MKRVLALFSLICVVSFTSIPSAHAGIPFFGNDDEQPTLAPMLEEVTPAVVNISVKGKREVRQRLPEALRFFFGPDSPREQVRERPFRGLGSGVIIDAEKGYVVTNNHVVDDATEILVTLKNGREFDAKVIGTDERSDVALLKIENGENLTAIELGKSSELRVGDFVVAIGNPFGLGQTVTSGIVSALGRAGLGIEELENFIQTDAAINSGNSGGALVTLDGKLIGINTAILGPNGGNIGIGFAIPSDMMNNLVQQLIEFGEVRRGVLGVRGNDLTHDVAQALNIPVNRGAFVSQVVPGSSADEAGIESGDVIISVDGQTIRSFSELGAMVGSIGSGNSLKLGVIRDGEEQSINVTLGAQDMSVTAESIHPALQGATLAATDGNGIEVEELEERSPAARIGLEEGDIIQGVNRKAVSSISELRAAIEDKSGVIALNIKRGDSSLFIVLRNAN

SEQ ID NO: 28333 - protein, 459 aa, Rubrivivax gelatinosus PM1
MKSYDFDLFVIGAGSGGVRTARMASERGLRVAIAEVSRLGGTCVNVGCIPKKLFVYAAQFTEAFQQARGYGWRVPEAAFNWSTLRDNKDAEIERLNGVYRALLVDSGCQLIEGHATIKGAHTVAVDGRSWSTERMVIATGGWPFVPNVPGREHAITSNDFFLLEHFPKRAVIVGGGYIALELASIAAGLGAQTRLVYRGALFLRGFDEDIRRVAAEEMMRRGVFLNFGCEISAIEKQADGSLLVTFSNGRRESTDCVLYATGRLPNVAGLGLENTRIRQQAHGAIVVNEHLQTDEPSIYAIGDAVGRTQLTPVALAEGMQLVRHLLGDEGPQVDYEMVPSAVFSLPAIATVGLTEAQARLRYKDVVVYKSSFRALKQTLAEGNERTFAKLLVDHDSDRVVGVHMVGADAAEIIQGMAIALRAGATKQVFDTTLGVHPTSAEEFVALRKPSHEPFITTGP

SEQ ID NO: 28334 - protein, 336 aa, Gluconobacter oxydans 621H
MSSTPDTTPETAAAPARTGTVPVTVLTGFLGAGKTTLLNHILTAEHGRKYAVVVNEFGELGIDNDLVVDADEEVFEMNNGCICCTVRGDLIRILGSLLRRRNRFDGIIVETTGLADPAPVAQTFFVDENLREKARLDAVVTVVDAFNVMETLDESPEAVNQIAFADVIVLNKVDLADEERRKEIVARLRKINAVAQIHEAQHGGVNLTDILDRGGFDLTRALKTMPDFLENEHHSHEEGITSISLSIKDLIDQRRFQAWIGAILQEQGADILRAKGILHFKGEKDRFAFQAVHMMADGDFIGPFREGESRESRLVFIGRNLNRPQLRRGFESCIAE

SEQ ID NO: 28335 - protein, 309 aa, Chaetosphaeria myriocarpa
SGAGNNWAKGHYTEGAELVDQVLDVVRREAEGCDCLQGFQITHSLGGGTGAGMGTLLISKIREEFPDRMMATFSVVPSPKVSDTVVEPYNATLSVHQLVENSDETFCIDNEALYDICMRTLKLSNPSYGDLNHLVSAVMSGVTTCLRFPGQLNSDLRKLAVNMVPFPRLHFFMVGFAPLTSRGAHSFRAVTVPELTQQMFDPKNMMAASDFRNGRYLTCSAIFRGKVSMKEVEDQVRNVQSKNSSYFVEWIPNNVQSALCSIPPRGLKMSSTFVGNSTAIQELFKRVGEQFTAMFRRKAFLHWYTGEGM

SEQ ID NO: 28336 - protein, 279 aa, Arabidopsis thaliana
  misc_feature (168)..(168): Xaa can be any naturally occurring amino acid
  unsure (1)..(279): unsure at all Xaa locations
MARAVGSGSDVEVGFAKLQGEDFEYYMQSYSIILGRNSKKATVDVDLSSLGGGMNISRNHARIFYDFTRRRFSLEVLGKNGCFVEGVLHLPGNPNVKLDSQDLLQIGDKEFYFLLPVWSILGGPLGPRHHVSGKATVVPYHNYHSGPGSGSGKNGVRSRELYEYDDEXDDDDDEEEDIRGSGKKTWRDGHEGVYASGEKKREGRSKADREILKEYGNVWHHSRVRRYLSQEDWAIPEAKGKPWYGLLMLLRKYPEHFVINTRSKGRVTLEFVSLVTLLS

SEQ ID NO: 28337 - protein, 310 aa, Chaetosphaeria pygmaea
SGAGNNWAKGHYTEGAELVDQVLDVVRREAEGCDCLQGFQITHSLGGGTGAGMGTLLISKIREEFPDRMMATFSVVPSPKVSDTVVEPYNATLSVHQLVENSDETFCIDNEALYDICMRTLKLSNPSYGDLNHLVSAVMSGVTTCLRFPGQLNSDLRKLAVNMVPFPRLHFFMVGFAPLTSRGAHSFRAVTVPELTQQMFDPKNMMAASDFRNGRYLTCSAIFRGKVSMKEVEDQVRNVQSKNSSYFVEWIPNNVQSALCSIPPRGLKMSSTFVGNSTAIQELFKRVGEQFTAMFRRKAFLHWYTGEGMD

SEQ ID NO: 28338 - protein, 421 aa, Rhodospirillum rubrum
MTLFNYQDFFTNELTQLHREGRYRVFADLERETRSGIHALDHRTGKRVTIWCSNDYLSMGVHPDVITAALGALEHYGAGAGGTRNISGTSHEHVLLERELADLHGKQSALLFTSGYVANDAALSSLGRLLPGCVIFSDALNHASMIEGIRRSGAEKRVFAHNDWHDLERQLASVDPHRPKLICFESCYSMDGDFAPMEAICDLAEKHTAFTYVDEVHAVGLYGARGAGIAERDGLLDRIDMFQGTLSKGFGAMGGYIAGSLEAVDFVRGFAPGFIFSSALPPCVVAGIRAALHHLKEDDTPRRALARRTASLKAKMQANAIPALPSPSHIVPVMIGDAALAKAITDRLMVEHGIYIQPINYPTVPRGTERLRITPTPLHTDEDEDTLVAALVAIRQEFPRWRELAQAARPDPSALGRGDVA

SEQ ID NO: 28339 - protein, 397 aa, Glycine max
MARGKAKKKEEGEDTDVANPETLERKRLKSLAISNKILSETPARSSVHLNPSSVVAKHHGKDIIKKSQRKSCRYLFSFPGLIAPIAGGKIGDLKDLGTKNPVLYLDFPQGQMKLFGTIVYPKNRYLTLQFPKGGKSVMCEDYFDNMIVFSDAWWIGRKEENPEEAKLEFPKELYEGHQSEYDFKGGAGAGAASVVNQGVPRTKIQRVEQESPKTPTEDDLSDSEINLEDTKELVPVRHSTRTAKKSYKFAEISSGDDSGENSPDLSDHEEKVAEVDTAVNDHNSSKKKTVVFDLDDEDDAPVDQPAKKNNESASRSKCKGRCLNLLQRVHLLKLSPVIVVHLFRLLYPHYSRKWKKRKLQEVRGNLHLQNLLARSHSLLVQKERLIWLNFLFLFFIS

SEQ ID NO: 28340 - protein, 329 aa, Silicibacter pomeroyi DSS-3
MGLLIEGIWHDTWYDTKSSGGAFRRSAAQFRNWVTPDGAPGPTGKGGFAAASGRYHLYVSYACPWAHRTLIFREIKGLSAHIPVSAVHPDMLDQGWTFAPEPQGRTGDRLYGLNYAHQVYTRADPTYSGRVTVPILWDSERQTVVSNESSEIIRMFNSAFDGLTGNRDDFWPEALREAIEPVNARIYDTVNNGVYKCGFATTQEAYDAAIEPLFDTLDWLDSHLAQNRYLMGDRLTEADWRLFTTLIRFDPVYHLHFKCNRRRLVDYPNLWAYTRELYQWPGVAGTVHMDHIIRHYHYSHDSINPHRIIPVGPALDLLEPHRRDQRTVA

SEQ ID NO: 28341 - protein, 257 aa, Chlamydophila caviae GPIC
MNRIETAFKNTKPFIGYLTGGDGGFDYSVACAHALIRGGVDILEIGFPFSDPVADGPIIQKAHTRALEEKTDSTTILEIAKALRETSNIPLVLFSYYNPLLQKGPQYLHQLKAAGFDAVLIVDLPIPQHANESEPFFQALIEAKLFPIVLATPSTREERLLQIRKLAKGFLYYVSQKGTTGIRSKLSDDFSTQIARLRCYFQIPIVAGFGIANRASAAAALKHADGIVVGSAFVEKLEKKISPEELTTFAQSIDPRQ

SEQ ID NO: 28342 - protein, 61 aa, Brassica napus
  misc_feature (10)..(10): Xaa can be any naturally occurring amino acid
  misc_feature (20)..(20): Xaa can be any naturally occurring amino acid
  unsure (1)..(61): unsure at all Xaa locations
MSWRWTGAIXLPRKKSSNTXPTQTYESVALFIWVTGIARNSLAEIVPVSDTPVCTLKVYGI

SEQ ID NO: 28343 - protein, 398 aa, Saccharomyces cerevisiae
MYVDPMNNNEIRKLSITAKTETTPDNVGQDIPVNAHSVHEECSSNTPVEINGRNSGKLKEEASAGICLVKKPMLQYRDTSGKYSLSDFQILRTLGTGSFGRVHLIRSNHNGRFYALKTLKKHTIVKLKQVEHTNDERRMLSIVSHPFIIRMWGTFQDSQQVFMVMDYIEGGELFSLLRKSQRFPNPVAKFYAAEVCLALEYLHSKDIIYRDLKPENILLDKNGHIKITDFGFAKYVPDVTYTLCGTPDYIAPEVVSTKPYNKSVDWWSFGVLIYEMLAGYTPFYNSNTMKTYENILNAELKFPPFFHPDAQDLLKKLITRDLSERLGNLQNGSEDVKNHPWFNEVIWEKLLARYIETPYEPPIQQGQGDTSQFDRYPEEEFNYGIQGEDPYMDLMKEF

SEQ ID NO: 28344 - protein, 240 aa, Yersinia pestis KIM
MILLARLSISVTGHGNLCCFLFVAIFFCHDIGGCMLTVWGRNNSTNVKKVLWCLEELGIPYQRIDVGGQYGKLNDPQYRALNPNGLIPCLQDKDFILWESNTIVRYLAAQYGQNSLYLADHHQRASAEKWMDWATSSVVEPFKAVFIGLVRTPPEQQDKVKIAQGMEKMNTLMSIANDALGEQAYLSGDAFGIGDIPLGCLAYAWFNLPIERPELPHLQRWYQSLTQRIAFQKVIAIGLS

SEQ ID NO: 28345 - protein, 483 aa, Pseudomonas syringae pv. phaseolicola 1448A
MTVRRTKIVATLGPASNSPEVIEQLILSGLDVARLNFSHGTPDEHKARAKLIREIAARHGRFVALLGDLQGPKIRIAKFTDKRIELKVGDKFTFSTAHPLTSGNQQIVGIDYPDLVKDCGVGDELLLDDGRVVMRVDTQTADELHCTVLIGGPLSDHKGINRRGGGLTAPALTEKDKQDIKLAAEMDLDYLAVSFPRDAADMEYARQLRDESGGTAWLVAKIERAEAVANDEVLDELIRASDAVMVARGDLGVEIGDAELVGVQKRIILHARRHNKAVIVATQMMESMISSPMPTRAEVSDVANAVLDYTDAVMLSAESAAGSYPIEAVQAMARICIGAEKHPTGKTSSHRIGHSFTRCDESIALAAMYTANHFPGVKAIIALTESGYTPLIMSRIRSSVPIYAFSPHRGTQARAAMFRGVYTVPFDPAALPPGQVSQAAVDELLKRGLVEQGDWVILTKGDSYHTIGGTNGMKILHVGDPLV

SEQ ID NO: 28346 - protein, 60 aa, Spinacia oleracea
YQGVYPVKCNQDRYVVEDIVEFGSPFRIGLEAGSKPEILMAMGCLCKGSPEAFLVCMGFK

SEQ ID NO: 28347 - protein, 248 aa, Brassica napus
  misc_feature (21)..(21): Xaa can be any naturally occurring amino acid
  misc_feature (52)..(52): Xaa can be any naturally occurring amino acid
  misc_feature (67)..(67): Xaa can be any naturally occurring amino acid
  misc_feature (84)..(84): Xaa can be any naturally occurring amino acid
  unsure (1)..(248): unsure at all Xaa locations
MGKRERETPCSPCGQYHQSEXGAVCGICGHRKPDSSYVGALQGQFSAFPTEXLPEFHYLGSYDTASXGSEVLNTQEIPRVLNTXVPMWQNLYSLQFDDAIQFLDQCEKDKARVLVHCMSGKSRSPAVVVAYLMKRKGWRLAESHQWVRQRRPTIDITPEFYQQLEAFERTILGSREGMMAAMNINDPPTFGFGFPKVNNNSQAQVPVFNNTSAASIFSSPASSIPQGFTFGAAPPKPTTGDDTIMGGS

SEQ ID NO: 28348 - protein, 951 aa, Sulfolobus tokodaii str. 7
MRTLNELEARLTLIYGNSFVNVKRLNWINLEIEGKENSYLIILDHEGSGLIKIDGEPYFELDKYHVIIPLPVGKHKISVEMSEYKDFGEKVHPSPGIPYYAELDFNAYRLYIYGTQVLDLIKSVEDEELRNDLIYALTKALKEAYFETISNDQLFIISKLAKTSLDLSRIYKELEYRMEEDKNREKYKKGLEVLKEELLKLKEKYGKRGVLIGIGHAHIDTAWLWPFDETKRKVIRTFSTVLTLLDKYNFRFIQSSALYYEWVKEIYPELFEKIKVKVKENKWELGAFYVESDTNMISGESLARQLLYSQRFYLENFDKIAKILWLPDTFGFSASLPQIAKLGGIELFATHKVFWNDTNKFPYNVFKWVTPNNDYLPSIAFGNGKGGYNSDFSVSSVLEQYKNWREKDQPVLYSFGYGDGGGGPNEEMLIRAEAIDLLPILPSVKFEEIKVNPIDEWKGELYLETHRGVFTSHSKMKLLNRKAEVSLREAELWSSLAGNYDKERFRRLWKIVLKNQFHDVLPGSAIKDVYKVAYEELEKVIEEAENIAKEAMLKLLGSQGEEIYLFNSLNWDREEYVEINGKFYKVKVPSIGFTAFKPEEVKEKVNVKEFEDYYQIENKFFVLKLGKEGKLLSLYDKEAKREVLKGPSNVLTFYENIPGWADAWDIEKGYEETNFVVKASSSTVIEDTVVNVKYTYKFRNSEVYQIVRIYPDHRRIDFITTLRMRDRELLLKAWFNFDVNTDKAISDIPFGVIERFTWQNTSWDMARFEVPIQKFVDLSEGNYGVALLSEGKYGVSLRGTSVGLSLTKTPLYPDPTTDLEEVTFTYSLYPHIGDWRKAEVIKRAYELNIPIKIVRGKSAEKEKSFVKINNLILEAVKIAEDDDSLIFRLYDVENVRDECEIVLPFEVLSAESLDLLELNRVPRVVKVESNKVRVSFKNRDILTLRLRYKIA

SEQ ID NO: 28349 - protein, 236 aa, Mycobacterium bovis AF2122/97
MGGMDTGVTSPRVLVVDDDSDVLASLERGLRLSGFEVATAVDGAEALRSATENRPDAIVLDINMPVLDGVSVVTALRAMDNDVPVCVLSARSSVDDRVAGLEAGADDYLVKPFVLAELVARVKALLRRRGSTATSSSETITVGPLEVDIPGRRARVNGVDVDLTKREFDLLAVLAEHKTAVLSRAQLLELVWGYDFAADTNVVDVFIGYLRRKLEAGGGPRLLHTVRGVGFVLRMQ

SEQ ID NO: 28350 - protein, 60 aa, Platanus occidentalis
YQGVFPVKVNQDRFVVEDIVEFGSSFRFGLEAGSKPEILLAMSCLCRGSPEAFLICNGYK

SEQ ID NO: 28351 - protein, 323 aa, Enterococcus faecium
MNKKMDITVFGCESDEMEVFQKISYELGVTATLIKDSISESNAGLADGCCCVSVSHKAELSEPILLALKNAGVKYISTRSIGFNHIDIQAAGLLGMVVGTVEYSPGSVADYTVMLMLMLMRGTKSILRETQRQNYCLNDLRGKELRDMTVGVLGTGRIGQAVMERLKGFGCKVLAYDRNQKAGTDYVSFHELLKKSDIVTLHIPLAEDTRHMIGCEELEMMKQEALLINTGRGALVDTAALVEALKGQKIGGAALDVLEGEEGIFYHDCTQRTIEHPFLSVLQGMPNVIVTPHTAYHTDRVLVDTVSNTIRNCLNFERSLGNV

SEQ ID NO: 28352 - protein, 180 aa, Saccharum hybrid cultivar SP-80-3280
MFPMLTGFISYGQQTIRAARYIGQGLIITLSHTNRLPITIHYPYEKSITSERFRGRIHFEFDKCIACEVCVRVCPIDLPLVDWKFEKDIKRKQLLNYSIDFGVCIFCGNCVEYCPTNCLSMTEEYELSTYDRHELNYNQIALSRLPISIMGDYTIQTIRNSPQSKIDEEKSWNSRTITDY

SEQ ID NO: 28353 - protein, 60 aa, Hamamelis virginiana
YQGVYPVKGNQDRFVVEDIVEFGSPFRFGLEAGSKPEILMAIAFLCKGSPEAFLICNGYK

SEQ ID NO: 28354 - protein, 323 aa, Ustilago maydis 521
MTSAPAQKSVPLTCSGHTRPVVHLEFSELQDDGTYSLLSSCKDGNPMLRDWLGDWVGTFLGHKGAVWCGKLSGGDASIAVTGSADFSAKVWDTFTGDCLHTFPHNHIVRTVAINGVGEKVVTAGHEKKLRLFDLHRPDAEALLFRKSAGGDLAHDGVIKSCVWHRGSAESSVVSAGEDMVVRWWDTRSLAQVSEMTFSEPITSMERSAGVWGELLTVTSGKQVFFIDATTREVRKKHSLSIPISSASLHPTLADRFVAGSSADGWVRIFDLESGHERELNKGHHGPAHAVSYSPDGELAASGSEDGTIRLWQTWPSKKYGLWT

SEQ ID NO: 28355 - protein, 466 aa, Escherichia coli O157:H7
MPHSYDYDAIVIGSGPGGEGAAMGLVKQGARVAVIERYQNVGGGCTHWGTIPSKALRHAVSRIIEFNQNPLYSDHSRLLRSSFADILNHADNVINQQTRMRQGFYERNHCEILQGNARFVDEHTLALDCPDGSVETLTAEKFVIACGSRPYHPTDVDFTHPRIYDSDSILSMHHEPRHVLIYGAGVIGCEYASIFRGMDVKVDLINTRDRLLAFLDQEMSDSLSYHFWNSGVVIRHNEEYEKIEGCDDGVIMHLKSGKKLKADCLLYANGRTGNTDSLALQNIGLETDSRGQLKVNSMYQTAQPHVYAVGDVIGYPSLASAAYDQGRIAAQALVKGEATAHLIEDIPTGIYTIPEISSVGKTEQLLTAMKVPYEVGRAQFKHLARAQIVGMNVGTLKILFHRETKEILGIHCFGERAAEIIHIGQAIMEQKGGGNTIEYFVNTTFNYPTMAEAYRVAALNGLNRLF

SEQ ID NO: 28356 - protein, 329 aa, Shewanella sp. MR-7
MRIGFFSAKHYDMQHFNRTNAAFGAQIEYFDYRLCMQTVKLAEGFEVVCAFVNDSLCEEVLVELAKGGTKIIAMRCAGFNNVDLVAAKRLGMQVVNVPAYSPESVAEHTVALMLTLNRKIHKAYQRTRDANFSLEGLVGFNMFGKTVGVIGTGKIGVATIKVLLGFGCKVIAFDPYPNPAVEALNVEYQDLDTIYANSDIISLHCPLTADNHHLLNKESFAKMKPGVMVINTSRGGLLNAFDAMEALKLGQIGSLGLDVYENEKELFFEDKSNQIIQDDVFRRLSACHNVIFTGHQAFLTEEALGAIAHTTLSNVKALLAGERSGNELF

SEQ ID NO: 28357 - protein, 309 aa, Chaetosphaeria raciborskii
SGAGNNWAKGHYTEGAELVDQVLDVVRREAEGCDCLQGFQITHSLGGGTGAGMGTLLISKIREEFPDRMMATFSVVPSPKVSDTVVEPYNATLSVHQLVENSDETFCIDNEALYDICMRTLKLSNPSYGDLNHLVSAVMSGVTTCLRFPGQLNSDLRKLAVNMVPFPRLHFFMVGFSPLTSRGAYSFRAVTVPELTQQMFDPKNMMAASDFRNGRYLTCSAIFRGKVSMKEVEDQVRNVQNKNSSYFVEWIPNNVQTALCSIPPRGLKMSSTFVGNSTAIQELFKRVGEQFTAMFRRKAFLHWYTGEGM

SEQ ID NO: 28358 - protein, 237 aa, Anabaena variabilis ATCC 29413
MSSNLAVKLRAGTQQAHTAAENVGFMKCFLKGVVDRESFAKFLSNLYFVYSELEAAIQSHANNPAIAPIYFPELNRLASLEKDMVFYYGSEWRSLIAPSASAQSYIKHIRELSATAPALLIGHSYTRYMGDLSGGQMLQKIAQSTLKLSGYEGTSFYNFEQIPDKKAFKDQYRQALDSVPVDDATADKIVAEANRAFQFNMQMATDLEGNLIKALGQVVFNSLTSTRNPGSTEAAVS

SEQ ID NO: 28359 - protein, 656 aa, Yarrowia lipolytica CLIB122
MSTRPADQELNRETLDAVLKRRFFYAPAFEIYDGVSGLYDYGPPGCALQTRIIDTWRDHFVLEDDMLEVDTTMLTPHEVLKTSGHVDKFADWMCRDLASGEIFRADHLVEEVLEARLKGDKEARGIKEDVVEDESAKKRKKKVKEIVAIKLDDNVKEEYETILAKIDGFSGPELGEIMDKYKIVNPVTGGPLEKPMEFNLMFETAIGPSGKLKGFLRPETAQGQFLNFNKLLDCNNTKMPFASASIGKSFRNEISPRSGLLRVREFTMAEIEHFVDPLDKDHHRFDEVKDVKLRFLAKDVQSAGKTDIQEMTIGQAVETGLVDNKTLGYFLARIYLFLIKIGVNPDRLRFRQHMSNEMAHYATDCWDAELHTSYGWIECVGCADRSAYDLSVHEARTKVKLQVQQKLDAPLVEDKFVCEYDKKKFGPLLKKAAKPVEEWFESRTQCELEDLAKALEAGKIVLPEIEGVEVAGTELDKSHIKIEKKTITTHVRDYTPNVIEPSFGIGRILYSLIEHCFWTRPEDASGAKGVLSFPPRIAPTKVLVVPLSSQKELAPFTQEVSKKLRQARISAKVDDSSASIGKRYARNDEMGTPFGITVDFDTVKDNSVTLRERDSTRQVRGSIDAVIAAINVMTADDVAWEEATKDLTPFDSTDKE

SEQ ID NO: 28360 - protein, 411 aa, Rubrivivax gelatinosus PM1
MTIHPGFPLSASPIALEEHYGAANYAPLPVVLTRGEGVYLWGQDGRRYLDMMSAYSAVSFGHGHPRLVEALVAQARQLAVTSRAFHTDRLGPFLERLCRLTGMDRALPMNTGAEAVETALKAARKWGYTVKGIAEGHAQIIVAANNFAGRTTTIVGFSSEAQYRSGFGPFAPGFVTVPYGDAAALEAAITDDTCAFLVEPVQGEAGIVVPPVGYLKAVREICTRRGILMICDEVQTGLGRTGRVLACDHEGVRPDGLTLGKALGGGLLPVSAFLAREEVMAVFTPGDHGSTFGGNPLAAAVGDTALQVLVEEKLSERAAEQGAVLLERLHALRHPAIRDVRGKGLLVGVEIDPGFASARTVCEGLMQEGVLSKDTHGTVVRFAPPLVIGAREIGDAVAALGRALERLGKAP

SEQ ID NO: 28361 - protein, 407 aa, Arabidopsis thaliana
MDVSSIVRNTTLTDQDPLLMDHGNREHIVDITSNDEEDSSSRSSLDELTPQGNSHQGEETVLSSSNATQQHPTHPSPPQQRPTSSRRGDNGNGRRTRSPLNSGLWISVELVVTVAQIVAAIVVMVLAKDEHPEAPLFTWVIGYTCGCLATLPILYWRFRTYNRATGQDSSQRATSSQGNSESTPYTAVSVAQAADEENSTGVSAAPRNNQVGESLRTRLNGLVDHFKMAIDCFFAVWFVVGNVWIFGGHSSPSDSPKLYRLCIAFLTFSCIGYAMPFILCATICCCLPCLISVLGFRENFSQTRGATAEAINALPVYRFKSKSRNDLEFSEEGEGGFLLLGSQKKRLISGEDASCCICLTRYGDDEQVRELPCSHVFHVDCVDKWLKINATCPLCKNEVGESSSASS

SEQ ID NO: 28362 - protein, 464 aa, Pseudomonas aeruginosa UCBPP-PA14
MVALLALSLAMTARAELPDFTPLVEQASPAVVNISTRQKLPDRAMARGQLSIPDLEGLPPMFRDFLERSIPQVPRNPRGQQREAQSLGSGFIISNDGYILTNNHVVADADEILVRLSDRSEHKAKLVGADPRSDVAVLKIEAKNLPTLKLGDSNKLKVGEWVLAIGSPFGFDHSVTAGIVSAKGRSLPNESYVPFIQTDVAINPGNSGGPLLNLEGEVVGINSQIFTRSGGFMGLSFAIPIDVALNVADQLKKAGKVSRGWLGVVIQEVNKDLAESFGLDKPSGALVAQLVEDGPAAKGGLQVGDVILSLNGQSINESADLPHLVGNMKPGDKINLDVIRNGQRKSLSMAVGNLPDDDEEIASMGAPGAERSSNRLGVTVADLTAEQRKSLDIQGGVVIKEVQDGPAAVIGLRPGDVITHLDNKAVTSTKIFADVAKALPKNRSVSMRVLRQGRASFITFKLAE

SEQ ID NO: 28363 - protein, 209 aa, Zea mays
MAEPAEHRPAEEEEAAAAGEDEDTGAQVAPIVKLEEVAVTTGEEDEDALLDMKAKLYRFDKEGNQWKERGTGTVKLLKHKDTAKVRLVMRQAKTLKICANHLVVATTKMQEHAGSDKSCVWHALDFADGELKEEMFAIRFGSVENCKKFKDTVEEIAEQQGKSEEKENDEVSTAASDLAQKLTVAEPSKEENAEKEEAPASDDKKDAKE

SEQ ID NO: 28364 - protein, 544 aa, Actinobacillus pleuropneumoniae serovar 1 str. 4074
MTCKNTRRLYQIITTFLRYGIDEIIPDIPLTRHARLGRKALFWVRNQHKDQPFGVRLRLALQELGPVWIKLGQMLSTRRDLFEPELAEQLALLQDSVEPFDGKSARQIIEQALGGSLETWFDEFDEQALASASIAQVHTAKFNQNQPLAGKDVVLKVIRPDIEPIIKADIALMYRLASWIPRLSNDAKRLRATEVVREYEKTLLDELDLTREMANAIRLRNNFENSEMLYVPEMYQDFCHKNVIVMERIYGIPVSDVETLKANGTDMKLLAERGVQVFFTQVFRDSFFHADMHAGNIFVNPNHPENPQYIGIDCGIVGTLNQNDKRYLAESFVAFFNRDYRRVALMHVESGWTPPDTDIDAFEQAFREVCEPIFAKPLSEISFGHVLLNLFNVAREFNMEVQPQLVLLQKTLLYIEGLGRQVYPQLDLWQTAKPFLQNWLNEQVGVKAILRDLKQRAPQFREHFAEFPEAVFNALQQQKQINFRLDELNKTLQAQGRQKSHNVRSIVSGVIILGVLWRFDDLPLWLSCGTLVTVLLVLLLQRKS

SEQ ID NO: 28365 - protein, 85 aa, Verbascum nigrum
GSVSEANTQYYQQEASKLRAQISNLQNQNRNMLGESLGGLTLRDLKNLETRVEKGISRIRSKKNELLFTEIEYMQKRQEIDLHHN

SEQ ID NO: 28366 - protein, 351 aa, Gluconobacter oxydans 621H
MTPDPHHDCACDHDHHGTTLPHEHHAHDHADHDHDDHHHDHDHCDGHSHGFGFGHQHVHAPASFGMAFAVGITLNTAYVAGEVLWGVWAHSLSLLADAGHNLSDVLGLAGAWLAQVLATRPSSARFTYGLRRSTILSALANATILLLVTGGIVWESVLRLFSHQNVQGEVISWVALVGIAVNAVTALLFMKGASSDLNVRGAFLHMAADAVMAFSVVIAGLLIAFTGYTIIDPIMSLIVSVSIVIGTWSLLRSSLNLALDAVPAGIDPDAVQAALLSLDGVSGLHHLHIWAMSTTETALTVHLVCDPTKPVSTDLVIARAAELVRTRFDIAHPTFQLETQPSVCDTHQPCC

SEQ ID NO: 28367 - protein, 364 aa, Solibacter usitatus Ellin6076
MKTVSIPRCAADCTNNSAPFGIEPPCYYNRGSNPVTPQMTSRKILVTGGAGYIGSHTVRMLLNQGHDVTVVDNLSKGYRHNVPAERLHEIDLADTQAIAALLREKKCEAVIHFAAFIAVGESMREPAKYFTNNVCGSLSLLDAMTQAGVKHLVFSSTAAVYGDVKKSPITEDFPIQAVNPYGESKVMVETLLGWFDQIHHLTSVCLRYFNASGCDPEGGLGEEHEPETHLIPLVLRAVQTGKPITVFGGDYPTPDGTCIRDYIHVNDLAQAHILAVEYLIKGGASDQFNVGTGTGHSVLEMIHAVEEVTGKKVPYVVGARREGDPPSLVASSKKLRERLGWAPRYEELKVIVEHAWRFANKRAG

SEQ ID NO: 28368 - protein, 427 aa, Gluconobacter oxydans 621H
MTDATTRSAVTSSSQGSLSALLPYWQVTFASFLGWFLDAFDQTTLMFTLPDIAHDFGCTIADLGAVLMGQSIGRAVGNTGWGWLADRYGRKPAFMLGVIWFAVFSALTGLSHHFYVLMAVQFMFGIGFGGEWTASAALLMESVPAWTRPMASALMMSGYEVGYFVAAGVQALVLPHYGWRVLFFIGLAPAALALFIRIGVPESPVWLRNREARLAQGRKEHAPPQLRPKFRLTGAAFQAIAFMSFLEFQKAAIYTYYPTILRGSHHLTQQAVFWPVTLYCIGSFSGKVFCGWLAERFGELRVMLSALVVVMLAIWPFLSAPGWTMLLAAAFVMGAAASGIFALVPHYLAQRFPSDTRSFGMGLGYALGSIGQGMAQKFVPMFGPTALTLPLSAEIFVLGTSLVTGAIALIRPKELPGEHMEGDETAS

SEQ ID NO: 28369 - protein, 95 aa, Alkalilimnicola ehrlichei MLHE-1
MNIRPLHDRVVIKRMEEERTSPGGIVIPDSAAEKPIKGEVVAVGNGKLLDNGETRPLDLKVGDKVLFGKFAGTEVKVDGEELLVMREDDVMAIVE

SEQ ID NO: 28370 - protein, 406 aa, Debaryomyces hansenii CBS767
LKMTIKSNFSNLTREAPDPIVETMTMYAQDTSPDKIDVSIGVYKGEKGESYVFPAVSKAKKHLFENDPGHSYTNMAGIPEYTSGARKVVFGEKYGTEGKIASLQTISGTGACHMAFLLLREAGLTNFYVGTPCWSNYGPMITHVGSKYSTYTHYDESLRGIDFDAVLEALQNAPSKSVFLFQACCHNPTGADFSKDQWKQIASIVKSRDIFPVFDIAYQGFSSGDKDVDAWPVRYFYEQNLEFLVCQSFSKNMGLYSERAGCLHAVVQDTDYVPNVQSQLVALFRSECSFAPAYGARIASIIINEPGLENQWGQEVSDVTTRLKNIRKQILDKFLELGTPGKWDHVVKQQGLFWYSGLSPEQNDKLIEDHHIYSTSIGRVNIAGLNESSVDKFVGAIDKVVRDSIG

SEQ ID NO: 28371 - protein, 553 aa, Alkalilimnicola ehrlichei MLHE-1
MAAKEIRFSDDARQRMMKGVNTLANAVKATLGPRGRNAVLDKSFGAPTVTKDGVSVAKEIELEDKFENMGAQMLKEVSSQTSDIAGDGTTTATVLAQAILREGMKAVAAGMNPMDLKRGIDKGVSAATKYLADELSKPCETDTSIAQVGSISANSDESVGRIIADAMQKVGKEGVITVEEGSGLENELDVVEGMQFDRGYLSPYFINNQQSMKAELEDAFILLHDKKISNIRDLLPLLENVAKANKPLLIISEDIEGEALATLVVNSIRGIVKVAAVKAPGFGDRRKAMLQDIAVLTGGTVISEEVGLSLEKATLDDLGQAKKVDVSKEETTIVGGAGRHDDIMARVEQIRAQIEESTSEYDKEKLQERVAKLAGGVAVIKVGATSEIEMKEKKARVEDALHATRAAVEEGIVPGGGTALLRAQASLDGLEYANHDQEVGINIVRRAMEEPLRQIVYNAGGDGAVVVNEVRNGEGNYGYNAQSGEYGDLVEMGILDPTKVTRTALQNAASVAALMITTEVMVADLPKDDDAGAGGGMGDMGGMGGMGGMGGMM

SEQ ID NO: 28372 - protein, 503 aa, Yersinia pestis KIM
MTQQNTKIPAQQGAQRLRRELKSRHLAMIAIGGSIGTGLFVASGATVSQAGPGGALLSYALIGLMVYFLMTSLGELAAFMPVSGSFSTYGSKYVEEGFGFALGWNYWYNWAVTIAVDLVAAQLVMNYWFPDAPGWIWSALFLGLMFLLNYISVKGFGEAEYWFSLIKVTTVVIFIIVGVMMITGIMKGGETAGWHNWTIGDAPFAGGFSAMIGVAMIVGFSFQGTELIGIAAGESKDPGKNIPKAIRKVFWRILLFYIFAILIISLIIPYTDPSLLRNDVKDISVSPFTLVFQNAGLLSAAAVMNAVILTAVLSAGNSGMYASTRMLFTLASEGKAPRIFAKLSKGGVPRNALYATTVVAGLCFLSSMFGNQTVYLWLLNTSGMTGFIAWLGIAISHYRFRRGYMMQGRDLNDLPYQSGFFPLGPIFAFVLCLIITLGQNYQAFLQDRIDWYGVTATYIGIPLFLVIWFGYKLSRGTRVVKYQEMEFPKWRDESEEHQKPTSR

SEQ ID NO: 28373 - protein, 405 aa, Gluconobacter oxydans 621H
MNYDAMFQSALDGLHADGSYRYFADLERRAGNFPKAFHHGLGRDVTVWCSNDYLGMGQHPEVLTAMHKALDETGAGAGGTRNISGTNHYHVELEKELASLHGKESALLFNSGYLSNWVTLGTIAGRLRNCVVLSDELNHASMIEGIRHSRAEKQIFRHNDVEDLERRLKELPADVPKIIAFESVYSMDGDIAPIEAFCDLADKYGAMTYLDEVHAVGMYGDHGAGVAEKLGLSHRLTVIEGTLGKGYGVVGGYIAASAALCDFVRSFGSGFIFSTALPPMIAAGALASVRYLRSSSAEREGQQRAVAYLRQALDKAGIPHVMNPSHIVPVMVGEAELCRSLSDELLNRFGNYIQPINFPTVPRGTERLRITPTPLHTNEMIDELVEALATLWQERQLKTSKSAAA

SEQ ID NO: 28374 - protein, 151 aa, Zea mays
  misc_feature (94)..(94): Xaa can be any naturally occurring amino acid
  misc_feature (127)..(127): Xaa can be any naturally occurring amino acid
  misc_feature (132)..(132): Xaa can be any naturally occurring amino acid
  unsure (1)..(151): unsure at all Xaa locations
PSVPIAELIDDLKNDDIQLRLNSIRRLFDNCTALLREERTRNELIPFLSENNDYEDEALLAMIEELLELIPYAGGEEHAHDVLRPFANLCTEEXACVRDTECESLRRIGELLQVTDIVHWIIPVVKXLADAXRCTSRVSSCDIFHILYPSV

SEQ ID NO: 28375 - protein, 474 aa, Pyrus communis
MHMLSRNATFNPHGQDSSYFLGWQEYEKNPYHEVHNTNGIIQMGLAENQLCFDLLESWLAKNPEAAAFKKNGESIFAELALFQDYHGLPAFKKAMVDFMAEIRGNKVTLDPNHLVLTAGATSANETFIFCLADPGEAVLIPTPYYPGFDRDLKWRTGVEIVPIHCTSSNGFQITETTLEEAYQEAEKRNLRVKGVLVTNPSNPLGTTMTRNELYLLLSFVEDKGIHLISDEIYSGTAFSSPSFISVMEVLKDRNCDKNSEVWQRVHVVYSLSKDLGLPGFRVGAIYSNDDMVVAAATKMSSFGLVSSQTQHLLSAMLSDKKLTKNYIAENHKRLKQRQKNLVSGLQKAGISCLNGNAGLFCWVDMRHLLRSNTFEAEMELWKKIVYEVHLNISPGSSCHCTEPGWFRVCFANLPERTLDLAMQRLKAFVGEYYNVPEVNGRSQSSHLSHSRGQSLTRKWVSRLSFDDRCSIHGR

SEQ ID NO: 28376 - protein, 516 aa, Arabidopsis thaliana
MDGADGTVRVKPGRGFETETDVAVSSPVTRQKAAAAKQFIENHYKNYLQGLHERMERRREFQRKVQEAQLPVEEQDEMMRNLARRETEYMRLQRRKIGIDDFELLTVIGKGAFGEVRLCRLRSTSEVYAMKKLKKTEMLSRGQVEHVRSERNLLAEVDSRYIVKLFYSFQDSECLYLIMEYLPGGDIMTLLMREDILSEDVARFYIAESILAIHSIHQHNYVHRDIKPDNLILDKSGHLKLSDFGLCKPLDDKYSSLLLEDDEMLSQDSENQSGKSDADKAPWQMPKEQLLQWKRNRRALAYSTVGTLDYMAPEVLLKKGYGMECDWWSLGAILYEMLVGYPPFCSDDPRITCRKIINWRVCLKFPEEPKISDEARDLICRLLCDVDSRLGTRGVEEIKSHPWFKGTPWDKLYDMEAAYRPIVDGELDTQNFEKFPEVEGSPSEAPQVGPWRKMLTSKDTNFIGFTFKKSDITRSMESSGSADMKSNGSGEAPSLISLLGRINMEEGEGGELNHKT

SEQ ID NO: 28377 - protein, 526 aa, Oryza sativa
  misc_feature (482)..(482): Xaa can be any naturally occurring amino acid
  misc_feature (496)..(496): Xaa can be any naturally occurring amino acid
  unsure (1)..(526): unsure at all Xaa locations
MVTLLIETTQGVGRYGGIKVYAVLGDDGADYAKNNAWEALFHVDDPGPRVPIAKGKFLDVNQALEVVRFDIQYCDWRARQDLLTIMVLHNKVVEVLNPLAREFKSIGTLRKELAELQEELAKAHNQVHLSETRVSSALDKLAQMETLVNDRLLQDGGSSASTAKCTSLAPSTSSASRVVNKKPPRRSLNVSGPVQPYNPSLKNFWYPVAFSSDLKDDTMVPIDCFEEQWVIFRGKDGRPGCVMNTCAHRACPLHLGSVNEGRIQCPYHGWEYSTDGKCEKMPSTKMLNVRIRSLPCFEQEGMVWIWPGNDPPKSTIPSLLPPSGFTIHAEIVMELPVEHGLLLDNLLDLAHAPFTHTSTFAKGWSVPSLVKFLTPSSGLQGYWDPYPIGMEFRPPCMVLSTIGISKPGKLEGKSTKQCSTHLHQLHICLPSSRNKTRLLYRMSLDFAPWIKHVPFMHILWSHFAEKVLNEDLRLVLGQQERXDQWRKCLELASIIXKLGIRYRLWRDAIERGVDRLPFSNQSESGS

SEQ ID NO: 28378 - protein, 60 aa, Cercidiphyllum japonicum
YQGVYPVKGNQDRFVVEDIVKFGSPFRFGLEAGSKPELLMAMSCLCKGSPEALLVCNGFK

SEQ ID NO: 28379 - protein, 446 aa, Pyrus communis
MAIDIEQQQQPSPGLSKIAISDTHGEDSPYFAGWKAYDENPYHESSNPSGVIQMGLAENQVSFDLLEKHLEENSEASNWGSKGSKGASGFRENALFQDYHGLLSYKKAMANFMEQIRGGRAKFDPVRVVLTAGATAADELLTFIIADPGDALLVPTPYYPGFDRDLRWRTGVNIVPIHCESSNNFQITPQALEAAYKEAEARNMRVRGVLFTNPSNPLGATIQRTVLEEILDFVTQKNIHLVSDEVYSGSAFSSSEFISVAEIMEDRQYKDAERVHIVYSLSKDLGLPGFRVGTVYSYNDKVVTTARRMSSFTLISSQTQHLLASMLSDKEFTENYIKTNRERLRRRYDMIVEGLKKSGIECLKGNAGLFCWMNLSPFLDEPTRESELTLWDSMLHEVKLNISPGSSCHCSEPGWFRVCFANMSEQTLGIALTRIHNFMEKRERAC

SEQ ID NO: 28380 - protein, 446 aa, Pyrus communis
MAIDIEQRKQPSPRLSKIAVSDTHGEDSPYFAGWKTYDENPYHESSNPSGVIQMGLAENQVSFDLLENHLEENSEASTWGSKGSKGVSGFRENALFQDYHGLLSFRKAMASFMEQIRGGRAKFDPARVVLTAGATAANELLTFVIADPGDALLVPTPYYPGFDRDLRWRTGVNIVPIHCESSNNFQITPQALEAAYKEAEAKNMRVRGVLFTNPSNPLGATIQRTVLEEILDFVTQKNIHLVSDEIYSGSAFSSSEFISVAEILENRQYKDAERVHIVYSLSKDLGLPGFRVGTVYSYNDKVVTTARRMSSFTLISSQTQHLLASMLSDKEFTENYIKTNRERLRRRYDMILEGLKKSGIECLKGNAGLFCWMNLSPFLDEPTRESELTLWDSMLHEVKLNISPGSSCHCSEPGWFRVCFANMSEQTLGIALTRIKNFMEKRERAC

SEQ ID NO: 28381 - protein, 60 aa, Ranunculus repens
YQGVYPVKGNQDRFVVEDIVEFGSPFRFGLEAGSKPELLMAMSCLCKGSPEAFFICNGYK

SEQ ID NO: 28382 - protein, 506 aa, Acinetobacter sp. ADP1
MSDDKLKCPVTHLTTDAGAPVVDNQNSMTAGARGPLLTQDLWLNEKMANFAREVIPERRMHAKGSGAFGTFTVTHDITQYSRAKIFSEIGKKTEMFARFSTVAGERGAADAERDIRGFALKFYTEEGNWDMVGNNTPVFFMRDPRKFPDLNKAVKRDPKTNLRSATYNWDFWTLLPEALHQVTIVMSDRGIPDGYRHMHGFGSHTYSFINASNERFWVKFHFRTQQGIKNLTDAEAEAIVAKDRESSQSDLFNAIEQGNYPKWTMFVQIMPETDAEKVPYHPFDLTKVWPHGDYPLIEVGEFELNRNAENYFQDVEQATFAPSNLVPGISYSPDRMLQARLVNYADAHRYRVGVNHTQIPVNAPRCPVHSNRRDGQGRMDGNYGGLPHYEPNSFHQWQEQPEFREPPLKITGDADFWDFRQDDSDYFSQPRALFNLMNDEQKQALFGNTARAMGDALDFIKYRHIRNCYACDPAYGEGVAQALGMTVADAQAARDSDPAKGHPGFL

SEQ ID NO: 28383 - protein, 226 aa, Triticum aestivum
  misc_feature (149)..(149): Xaa can be any naturally occurring amino acid
  misc_feature (160)..(160): Xaa can be any naturally occurring amino acid
  unsure (1)..(226): unsure at all Xaa locations
CLAGAMLMAFFKGPKLLGALLLPATDDWVRGGIYLMGNAFCFSIWYILQVPVCKSYLDPLSLATWMCFLATLQCAVMAFFLEANYMEIWKLASIWELPCILYGGVFASGANFFMQSWCISVKGPLYSAIFTPLSAVITTILSTLVLHEXELHIGSVLGAXVSNLGLYVVLWGKADDASSEGLAIRSGDSESILEQDCMGVKVESGTNLSEPLLLSENADADASRCQ

SEQ ID NO: 28384 - protein, 484 aa, Enterococcus faecalis
MKNQHLTTSQGSPVGDNQNSLTAGEFGPVLIQDVHLLEKLAHFNRERVPERVVHAKGAGAHGIFKVSQSMAQYTKADFLSEVGKETPLFARFSTVAGELGSSDTLRDPRGFALKFYTDEGNYDLVGNNTPIFFIRDAIKFPDFIHSQKRNPRTHLKSPEAVWDFWSHSPESLHQVTILMSDRGIPLSFRHMHGFGSHTFKWVNAAGEVFFVKYHFKTNQGIKNLESQLAEEIAGKNPDFHIEDLHNAIENQEFPSWTLSVQIIPYADALTMKETLFDVTKTVSQKEYPLIEVGTMTLNRNPENYFAEVEQVTFSPGNFVPGIEASPDKLLQGRLFAYGDAHRHRVGANSHQLPINQAKAPVNNYQKDGNMRFNNGNSEINYEPNSYTETPKEDPTAKISSFEVEGNVGNYSYNQDHFTQANALYNLLPSEEKENLINNIAASLGQVKNQEIIARQIDLFTRVNPEYGARVAQAIKQQAHHHHHH

SEQ ID NO: 28385 - protein, 351 aa, Acinetobacter sp. ADP1
MNAIPVVNLVNKPCYSQFEDQDWEILSQHWYPVARIEEVSMQPQQVTLLDVKMALYKTASGDIHLVRDICPHRGVPLTKGWVEGEEIVCPYHGLRYNAEGKCTKIPAQPELTKISDRFSLTKFPVIQKYGLIWTSIQNRNVASANLPELDTWDMPEHQAILPPFVDIAGSSGRQLEGFIDVAHFAWVHHEAFASRENPVVPKYSTVKTDYGLRTEYMSDVSNYPHELQHLAPKDFLWKRTFDVYPPFSAVLTVDFPNDGVLKILNACCPISPNKTRLFVPLTRNFDTTGDLQAVYDFNAQIFAEDQEMVEAQKPEELPLDLTMEAHFEADRSSTMYRRILADLGLSKRYIV

SEQ ID NO: 28386 - protein, 246 aa, Triticum aestivum
  misc_feature (181)..(181): Xaa can be any naturally occurring amino acid
  misc_feature (204)..(204): Xaa can be any naturally occurring amino acid
  unsure (1)..(246): unsure at all Xaa locations
MQLNTMSHLPHEPEFEQAYGELASALENSSLFNEHPEYRTALAVAAIPERVIQFRIVWEDDKGNLQVNRGYRVQFNSALGPYKGGLRFHPSVNLSILKFLGFEQIFKNALTGLSMGGGKGGADFDPKGKSDAEIRRFCQSFMTELSKHIGAETDVPAGDIGVGGREIGYLFGAYRKLRNRXWEGVLTGKGLFWGGSLIRPEATXGYGLVYYVDYMLKHANRGSFEGKRVALSGSGHVAQYAALRSS

SEQ ID NO: 28387 - protein, 290 aa, Campylobacter jejuni RM1221
MKIALIQQKFHLNKEQTIKKTCEFIEEASKQGAELVCLGELHQSEYFCQSENVDFFDYANDYEKDVKFWANIARKNQIVLIASLFEKRSAGLYHNTAVVFEKDGSIAGKYRKMHIPDDPCFYEKFYFTPGDLGFEPINTSLGKLGVLICWDQWYPEAARIMALKGAEILIYPTAIGWFDKDKDEEKQRQLNAWLGVQKGHAIANGLYVVAINRVGFEKDVSGVEEGIRFWGNSFVFGPQGEELCLLDSQNECVKIIEIDKKRSENVRRWWPFLRDRRIEYFADLTKRFID

SEQ ID NO: 28388 - protein, 325 aa, Campylobacter jejuni RM1221
MIKSIPEWSEQEYLMLSLPHEKSDWNPYLEEILQSYKEFVKAVSEFQKVLLIAPKQSDFENFKDIKKVEYFKCDTNDTWIRDFGAIDIIENGRLKALDFTFNAWGNKFQSELDNAVNSKLFKEKFKEELKKVDFILEGGSIDFNGEGVMLTSSHCLLNENRNSHLNKTQIDIKLKEIFGLKQIIWLENGFIKGDDTDHHIDTLARFIDKNTIAHCICEDEEDEHYLPLQKMKEELKKTGFDLVELPIPNPLYYEGRRLGATYANFVFINNALIVPFYKDKNDEIIAKRLSKALPSHKIIGVDARVFLRQNGSLHCSCQNRFKGLR

SEQ ID NO: 28389 - protein, 311 aa, Lasiosphaeria ovina
SGAGNNWAKGHYTEGAELVDQVLDVVRREAEGCDCLQGFQITHSLGGGTGAGMGTLLISKIREEFPDRMMATFSVVPSPKVSDTVVEPYNATLSVHQLVENSDETFCIDNEALYDICMRTLKLSNPSYGDLNYLVSAVMSGVTVSLRFPGQLNSDLRKLAVNMVPFPRLHFFMVGFAPLTSRGAHSFRAVSVPELTQQMFDPKNMMAASDFRNGRYLTCSAIFRGKVSMKEVEDQMRNVQNKNSSYFVEWIPNNVQTALCSIPPRGLKMSSTFVGNSTAIQELFKRIGEQFTAMFRRKAFLHWYTGEGMDE

SEQ ID NO: 28390 - protein, 279 aa, Candida glabrata CBS138
MTIATDACNEHRLKVYREIKANEEHLNSLDHDGSKVTFVVDQEIPEPDENLRVFYFDIDNCLYPSSTRIHDLMQIAIVNYFEKQLGLDKVHAEELNRTYYKQYGLAIRGLTLHNGIDPMDYNTLVDDALPLQHILKPNLKLRETLIRLRECGKIDKLWLFTNAYKNHALRCVRLLGIADLFDGITYCDYNHAESLICKPDPAAFEKAKRESGLGDFKNAYYVDDSGSNIKTGLSLGIPKCAHLVEDKVLDVLGKTPEGSIVIKDITDLDKAFPELFQIN

SEQ ID NO: 28391 - protein, 469 aa, Yarrowia lipolytica CLIB122
MPNVLVISNRLPVTISREEDGTYKYTMSSGGLVTALSGLKQSTTFQWFGWPGLEIPEKDKPRLINDLETMFSCVPVFMDDDLADLHYNGFSNSILWPLFHYHPGEMNFDQVAWEAYTQANRLFAKKVASIVKPGDIVWVHDYHLMLLPEMLREECENNSALDGLKIGFFLHTPFPSSEIYRILPVRKEVLTGVLSCNLIGFHTYDYARHFLSSVSRILDLETMPNGTYYKGRHVVVGAFPIGIDVNKFLEGCKRPAVQERIAQLQDKFKGIKVVVGVDRLDYIKGVPQKLHAFEVFLSEHPEWIGKVVLVQVAVPSRGLVEEYQNLRAVVNELVGRINGMFGTVEFTPIHFMHRSVDFNELIALYSISDVCFVSSTRDGMNLVSYEYVACQTEKHGSLILSEFTGAAQSLNGALIVNPWNTEDMAEALYDSLTFSPEKKAENHRKLFKYVSKYTSQHWGEAFVSELKRC

SEQ ID NO: 28392 - protein, 193 aa, Zea mays
MGGLSVIAPPARDSASPQHRRARRAFLVSNYLILGCASGCGFLTLSLRLAPSVDGFLLILLHALTVAAAVAGCAVIAAPDPPRGRCYTVHMSATVVVSILQGAAAVLAFSRTSEFLSDGLKSYVREEDGAVILRMVGGLGVGIFCLEWVALALAFVLRYYVYVDRECGGNPMRRSAKVGGEDGAGTWPWPFQV

SEQ ID NO: 28393 - protein, 483 aa, Thermococcus kodakarensis KOD1
MCLIAGGMGGNLREKLIKMAIAGKHRGPESFGVWTDGGVLKSDDFSKLTEIPDGRIGLLQCRLAITGSKSFTQPFINDLALVHNGEIYNHAALREYLERRGVSFESDVDSEVVLRLIEFLREEHLSYPEIVKKLFWMLEGDYAVAFSDGERIYLFRDPLGIRPLYFSRNGLFASEKKVLWAVGEREVEPVQPGELVVLEKNGVRRARLFSLENLKSKAKCERKDPVGGVGKLLRYAVKNRVSKKTGVLFSGGLDSTLVAYLASQYSDVILYTAGTEDSPDIEWARKVADHFGWALRERTFEVEDVRDAVKRVMYAIEEPNPMNLAIGLPLYFASGLASSDGTRVLLSGQGADELFGGYAKYLERPELMEEDIALISERNLARDDKITMLNGVEGRYPFLALPVVSFALKLPLEAKIVDGTRKVILRKLALRLGIPEWIAEREKRAAQYGSRAQKLLEKIAREEGLTLREFAEKLFRETFPNAF

SEQ ID NO: 28394 - protein, 162 aa, Thiobacillus denitrificans ATCC 25259
MRRITHFFGSLFLVELLRGMMLTGRHLFARKVTVQFPEEKTPQSPRFRGLHALRRYPNGEERCIACKLCEAVCPALAITIDSEQRADGTRRTTRYDIDLTKCIFCGFCEESCPVDSIVETRILEYHGEQRGDLIYTKPMLLAIGDKYEAQIAQDRAQDAKYR

SEQ ID NO: 28395 - protein, 80 aa, Ginkgo biloba
MARRMGSLSVFLVVLVLVISLEMQAEVAEARTCKTQSSKFKGYCLSDTNCRNVCRTEGFPTGSCDFHVASRKCYCYKPCV

SEQ ID NO: 28396 - protein, 338 aa, Rubrivivax gelatinosus PM1
MKVYYDKDADLSLIKGKSVAIIGYGSQGHAHAQNLNDSGVKVTVGLRRGGASWNKVEKAGLKVAEVADAVKSADVVMILLPDEQIASVYSAEVAPNIKQGASLAFAHGFNVHYGQVVPREDLDVWMVAPKAPGHTVRNTYTQGGGVPHLIAVHADKTGKARDLALSYAAANGGGKAGIIETNFREETETDLFGEQAVLCGGTVELIKAGFETLVEAGYAPEMAYFECLHELKLIVDLIYEGGIANMNYSISNNAEYGEYVTGPRVVTEDTKAAMRQCLKDIQTGEYAKSFILENRAGAPTLLSRRRLTAEHDIEVVGEKLRAMMPWIKANKLVDKSRN

SEQ ID NO: 28397 - protein, 553 aa, Bacillus cereus G9241
MKDWHKSVVYQIYPKSFNSYYNKETGDIKGVTEKLDYLKELGVDYIWLTPIYQSPQNDNGYDVSDYYRIDSSYGTMEEFEELLEEAKARNIEIMLDIVVNHSSTEHKWFKEAKEDKNSPYRNYYIWRDEKNNWQSKFGGSAWKYDEKTEQYYLHLFDETQADLNWENEKLREEVYDMMRFWLDKGVTGFRLDVINLISKDQQFLNDDGSTATSDGRKYYTDGPRVHEYLQEMNRNVFEGKDVITVGEMSSTTIDNCIKYSNPERNELSMTFSFHHLKVDYPNGDKWTKANFDFIKLKEIMSNWQIEMQKGGGWNALFWCNHDQPRIVSRFGDDREYRNESAKMLATAMHMLQGTPYIYQGEEIGMTNPKFESIEQYRDVESLNIYDIKLEEGLLKEEIIGILKQKSRDNSRTPMQWNEEMNSGFTTSTPWISVAENFKEINVEKALEDKESVFYHYKKLIELRKTYDVITEGEYAILDKNDPKIWAYTRTIESEVLLVINNFYGEEITYSVPAHVQLDGMKQEILLSNYKDASKDITKLNLRPYESIVYRYTK

SEQ ID NO: 28398 - protein, 670 aa, Zea mays
MEANPKNTFTIKVEDGKPGKDGRLAVGPVFRSVLAKDGFPQLEPDMKTSWDVFRVAAVKYADNRMLGWRPFKDGVPGPYLWKSYKEIYDEVLQAGSALQKLGVQPGSRVGIYGANCPQWIVAMQACNGYSLVCVPLYDTLGAGAVDYIIDHAEIDVVFIQDKKIKEILSPNCKSAKRLKALVAFTSATTEQNKEADQIGIKMYAWDDFLKVGKDNPRQPCPPQASDICTVMYTSGTSGQPKGVMLTHESHAMYVKGVDLFMDQFDDKMTTDDVFLSFLPLAHILDRMIEEYFFHKGASIGYYHGDLNALRDDIVELKPTLLVGVPRVYERIYEGILKAIAELRPLRRVIFNALYNRKLASMKAGYSHKTASPFADMLAFRKVKARLGGRLRLLISGGAPLSNEIEEFMRVTTCAYFIQGYGLTETLGPSTVCYIDDMALVGSAGVPATYTEIRLEEVPEMGYNPLGVPSRGEICIRGKSLFAGYYKSPELTNEAIVDGWFHTGDIGEMTPDGILKVIDRKKNIFKLSQGEYVAVEYLEKVYGFPPLVEDIWVYGDSFRSSLVAVVNPHQENTMKWAESNGYKGSFDEICKLEGLKEYILKELAAVAQKNKLRGFEYIKGVVLDPVPFDIERDLVTATMKKKRKNMLNYYQSEIDTIYKKLEAQKSAARAK

SEQ ID NO: 28399 - protein, 356 aa, Datisca glomerata
MSLLSDLVNLNLSDSTEKVIAEYIWIGGSGLDIRSKARTLPGPVSDPSKLPKWNYDGSSTGQAPGKDSEVILYPQAIFRDPFRRGNNILVMCDAYTPAGEPIPTNKRCAAAKIFSHPNVVAEVPWYGIEQEYTLLQKDVKWPIGWPVGGFPGPQGPYYCGVGADKAFARDVVDAHYKACLYAGVNISGINGEVMPGQWEFQVGPSVGISAGDELWVARYILERITEIAGVVLSFDPKPIQGDWNGAGAHTNYSTKSMREKGGYEVIKKAIEKLGLRHKEHIAAYGEGNERRLTGRHETADINTSLWGVANRGASIRVGRDTEKEGKGYFEDRRPASNMDPYVVTSMIAETTLLWKP

SEQ ID NO: 28400 - protein, 417 aa, Shewanella sp. MR-7
MTQRNPLGRRVVVTGIGGISALGHDWPSIASSIKAQKNCVVTMAEWDKYDGLNTRLAAPITDFEVPSHYSRKKIRSMGRVSIMATRASELALIDAGLLDDPIVTSGEMGIAYGSSTGSTDPITAFGDMLKNGDMSGVTATSYIRMMAHTTAVNVGVFFGLKGRIHTTSSACTSGSQGIGYAYEAIKYGQQTLMLAGGGEELCPTEAVVFDTLFATSTQNATPELTPRPFDANRDGLVIGEGACTLVLEELEHAMARGAKIYAEIVGFGTNSDGQHVTQPNSDTMEIAIRLALKDAALTPDAIGYVNAHGTATDRGDVAETHATHAVFGADMPISSLKSYTGHTLGACGALEAWVSIEMMNAGWFAPTLNLDNIDPECAALDYIRGEPRALDTDYVMSNNFAFGGINTSLIFKRWKTT

SEQ ID NO: 28401 - protein, 334 aa, Brassica napus
MATAPLSGFFLTSLSPSQPSLQKQTLRSSPTVACLPSSSSSSSSSSSSRSVPTLIRNEPVFAAPAPIITPYWSEEMGSEAYEEAIEALKKLIIEKEELKTVAAAKVEQATAALQTGTSSDKKAFDPVENIKQGFITFKKEKYETNPALYGELAKGQSPKYMVFACSDSRVCPSHVLNFQPGEAFVVRNIANMVPPFDKVKSTHASAAIEYAVLHLKVENIVVIGHSACGGIKGLMSFPLDGNNSTDFIEDWVKICLPAKSKVISELGDSAFEDQCGRCEREAVNVSLANLLTYPFVREGLVKGTLALKGGYYDFIKGAFELWGLEFGLSETSSV

SEQ ID NO: 28402 - protein, 407 aa, Shewanella sp. MR-7
MNNRVAITQIGLCTPLGQTPEQVLARLIAGDTSAMQTSDTLLFGESTLVAPVTEPLPTIPAALAQFDCRNNQLLLAAALQIRDAVEQAKSDFGADRIGVVLGTSTSGISKGEAALAYRNQHGHFPADYHYFQQELGSTSDFLRQLFELQGPCYTISTACSSSAKVFASAKRLLEAKLCDMVIVGGIDSLCQLTVNGFHALESVSKGHCNPFSANRDGINIGEGAALFTLTLAENETLGPTQANVLLAGIGESSDAHHMSAPHPEGAGAIAAMQAALDDAQISAQQIDYINLHGTATPKNDAMESRAVLSVFGDTPPPASSTKPLVGHTLGAAGAIEAAFCYLLLSPHNHHLALPPHRYDGRPDPQDPSIALVAPKQCAEHGKLNYVMSNSFAFGGSNASLIFCRKGA

SEQ ID NO: 28403 - protein, 614 aa, Cryptococcus neoformans var. neoformans B-3501A
MTTLSQSNLPLDPEAHQDAKKARDLEEAGAAPQDELYYEDTSSEEVLTGVSKVEAAAAVWGPKSQWFLFIGIALSAYIYSLDGVTTYQYLSYATSYVLDHSVSGTISTANAIIIAVGKPLMAKLADVVGRGETFIIVTILYVVGYIVIATANDVGQIAGGQVIYSFGYTGLQMLQQIIIADMTNLRWRGLVTGLVSAPFIINNFVSAEIAEGVLPNWRWGYGMFAILVPVSLSPIIIALMWAQHKAAKQLKIRYSRPPIKVGFWITIREACLEMDFMGLILIAASLALILLPLGLAPSASNGWKTPSMIVMLVIGGLLFPVFLYYESRFPRKPVLPMRWLKRGPILGACLIGFFDFVSFYLQYTYLYSYVYVTEDWSYRNLTYFSSTQSLALTIFGIMAGFIMYATRRFKWMLFIGLLIRLLGVGLMLKARSATGNTAELVMCQILQGMGGGAAATAIQVSAQAAVAHVDVATVTAVVLLITEVGNSVGSAVASGIWASYMPKELAKNVPTTNATLLAELYGSITDIALYPSDDPIRLGAIAAYQNVMFRLVLGAVIVAIFPPIWCLLFTKDVKLTRAQNAVDAKDLSGRPTDEPTLDERTPSEAGMSDPRRKD

SEQ ID NO: 28404 - protein, 213 aa, Zea mays
MMRETYMDVLPPVDHIAASRSGGWFPGAARLWTAAENKQFERALAGLDLCRPDWEKVARAIPGRTVREVVSHFKSLQVDVQQIESGLVPMPVYGAGAGAGSFTLQWDGCYGPADSRHNGYRFGSGGCGMRHHGRTPEQDRKKGVPWTEEEHRLFLLGLKKYGKGDWRNISRNYVHTRTPTQVASHAQKYFIRQASAASRGDTKRKSIHDITTP

SEQ ID NO: 28405 - protein, 312 aa, Sulfolobus tokodaii str. 7
MYNEWLPVAFSDEVKDVYETNVLGQDIVIIRKNEKLYGLSNRCPHRLAKLSKGKIIEDEIQCPYHGWRFNLEGKLTIVPSLGKKINVNLRKYYIKEKYGIIWVCINEPKDDLPEIKEWESFRKIKCGPYYINANPFRVLENLFDVSHFPYVHENYLGDPKYPYIPEYNVEITNEGIVAKNIKIYQPNPDGSHAEKYESYTYIIYRPLFLYFTKTDESERTFSMIFAIKPESKNKSVVFAWIFMNYDYETDENVIRNFEDTIIMQDKEVLETQPDIYYLDLSKEIHVKADKLSIFYRHYLKRRIGKFPELGLL

SEQ ID NO: 28406 - protein, 398 aa, Arabidopsis thaliana
MEQPKKVADRYLKREVLGQGTYGVVFKATDTKNGETVAIKKIRLGKEKEGVNVTALREIKLLKELKHPHIIELIDAFPHKENLHIVFEFMETDLEAVIRDRNLYLSPGDVKSYLQMILKGLEYCHGKWVLHRDMKPNNLLIGPNGQLKLADFGLARIFGSPGRKFTHQVFARWYRAPELLFGAKQYDGAVDVWAAGCIFAELLLRRPFLQGNSDIDQLSKIFAAFGTPKADQWPDMICLPDYVEYQFVPAPSLRSLLPTVSEDALDLLSKMFTYDPKSRISIQQALKHRYFTSAPSPTDPLKLPRPVSKQDAKSSDSKLEAIKVLSPAHKFRRVMPDRGKSGNGFKDQSVDVMRQASHDGQAPMSLDFTILAERPPNRPTITSADRSHLKRKLDLEFL

SEQ ID NO: 28407 - protein, 60 aa, Liriodendron tulipifera
YQGVYPVKVNQDRFIVEDIVRFGSPFRFGLEAGSKPELLLAMSCLCKGSPEAFLICNGYK

SEQ ID NO: 28408 - protein, 245 aa, Triticum aestivum
  misc_feature (202)..(202): Xaa can be any naturally occurring amino acid
  unsure (1)..(245): unsure at all Xaa locations
MAPSTFKLNTGQEIPAVGLGTWQSPAGEVEKAVTYALKDGYKLIDCAYCYGNEEEVGAGLKAAFKAGVKREDIFVVTKAWATYNTRVELALDKSLKALGLDYVDLFLVHWPLLLNPDGNDDKFPKKPDGSRDVIRDYNHVDGWKLMEKLPATGKTRAVGVCNYSKKYLEELLPHATIVPAVNQIENHPELPQQEIVDFCKEXGIHIEAYSPLGSTGGPVMSAEPVVKIADKKGVSASTVLLSYHV

SEQ ID NO: 28409 - protein, 347 aa, Triticum aestivum
MALVDALCASSVDNAALVYSTFNAAGFLFDNAAGFYDDTGIAGGPALALQAADRAPGLSAAGDVAPCLEKQATLSPAPPRRKRRRRARSCKSREETECQRMTHIAVERNRRRQMNEYLVVLRSLMPESYVQRGDQASIVGGAIDFVKELEQQLQSLEAQKRALAHQQQHKAGRDAAPLPTAMPARASTSGGIGNACVESTSNCSSSVTEADGAPDAPPFAGFFTYPQYVWRQSPRDATTLSADESRAGVADIEVTLVETHASLRVMAPRRPGQLLRMVAGLQALRLTVLHLNVTALDSLALYSLSLKVEEGCGLTTADDIAAAVHHVLCFIHAEAEAAPQQLLAPAQ

SEQ ID NO: 28410 - protein, 342 aa, Physcomitrella patens
MVGSAKIKVGINGFGRIGRLVARVALERDDIELVAINDPFITPEYMTYMFKYDSTHGQWKKTEVTLHSEGHLTFGGNPVAVYACRDPSEIPWGKHGADFVVESTGVFTDKDKAAAHLKGGAKKVVISAPSKDAPMFVMGVNENKYSDEDIVSNASCTTNCLAPLAKVINDKFGILEGLMTTVHATTATQKTVDGPSSKDWRGGRSAATNIIPSATGAAKAVGKVLPELNGKLTGMAFRVPTTDVSVVDLTVRLEKPASYDAIKTAIKEASEGQMKGILGYTEDDVVSTDFITDSRSSIFDAKAGIALSDTFVKLVAWYDNEWGYSNRVVDLIVHMAKQGTSQ

SEQ ID NO: 28411 - protein, 60 aa, Magnolia stellata
  misc_feature (31)..(31): Xaa can be any naturally occurring amino acid
  unsure (1)..(60): unsure at all Xaa locations
YQGVFPVKGNQDRFIIEDIVRFGSPFGFGLXAGSKPELLLAMSCLCRGQPEAFLICNGYK

SEQ ID NO: 28412 - protein, 110 aa, Oryza sativa (japonica cultivar-group)
MASSASRFIKCVTVGDGAVGKTCMLICYTSNKFPTDYVPTVFDNFSANVVVDGTTVNLGLWDTAGQEDYNRLRPLSYRGADVFVLAFSLVSRASYENVMKKVQKKKISCN

SEQ ID NO: 28413 - protein, 304 aa, Arabidopsis thaliana
  misc_feature (85)..(85): Xaa can be any naturally occurring amino acid
  misc_feature (100)..(100): Xaa can be any naturally occurring amino acid
  misc_feature (150)..(150): Xaa can be any naturally occurring amino acid
  misc_feature (186)..(186): Xaa can be any naturally occurring amino acid
  misc_feature (214)..(214): Xaa can be any naturally occurring amino acid
  misc_feature (230)..(230): Xaa can be any naturally occurring amino acid
  unsure (1)..(304): unsure at all Xaa locations
MATNGSASSAQLSQKEADVRMMCAAEVHLGTKNCNYQMERYVFKRRNDGIYIFNLGKTWEKLQMAARVIVAIENPQDIIVQSARXPYGQRAVLKFAPVHXGANAIAGRHTPGTFTNQMQTSFSEPRLLILTDPRTDHQPIKEGALGNIPXIIAFCDTDSPMRFVDIGIPANNKGKHSIGCLFWLLXARMVLQMRGTIAAGQKWDVMVDLFFYRXEPEETKPEDEDEAGPXQAEYGALPAPEYGMVGGDQWTTAQIPDAAWPGEGQAPISAAPAAASWSDSAAAPADGGWEAAAPPSGAPAAGWE

SEQ ID NO: 28414 - protein, 60 aa, Canella winterana
YQGFFHVKGNQDRFIVEDIVQFGSPYRFGLEAGSKPELLLAMSCLCNGIPEAFLICNGYK

SEQ ID NO: 28415 - protein, 194 aa, Triticum aestivum
  misc_feature (175)..(175): Xaa can be any naturally occurring amino acid
  misc_feature (181)..(181): Xaa can be any naturally occurring amino acid
  unsure (1)..(194): unsure at all Xaa locations
MDYHQQQQFLMPPPASLPAQQQQLCAPMMGMDMEMEMEEQLCFVGRGGGGRGAERKRRFTEEQIRSLESMFHAHHAKLEPREKAELARELGLQPRQVAIWFQNKRARWRSKQLEHDFAALRADYDALHSRVESLKQEKLALAAPLHELGERLRERDGGRRVAPPPASTSCNGGGXELDDDXRNVVAGCVDVEPP

SEQ ID NO: 28416 - protein, 455 aa, Burkholderia vietnamiensis G4
MTNTQKPWGSRETASFFHTFTDLPSLREDGATVIDHGEGPFIVDTNGNRFFEGNSGLWNMTLGFSEHRLAKVAAEQYSAFPGYHTFFGRNSKPTVELSERMLALAPVPMSRVFFTNSGSEANESVIKLLWMMWAAEGQPQRRKLLTRKNAYHGATVMASALTGKDYVKAFGLPTPDVITLDCPHAWRFAQAGESEEAFVKRLVSNLEKTILAEGPDTIAGMFAEPVMGAGGVIVPPAGYFEQVQAVLKKYQIPLVADEVICGFGRTGNLWGCQTVGLRPDIIVASKSMSAGYFPVGAVMLSAEIDRRATAASEQWEEFPHGFTTAGHPVACAVSLEAIRIITDEGILENVQKVGRKFQDGLRALADHPMVGDVRGVGLMGALEMVSDKSSKTSFSGELRVGERIAKAAREFGYIIRPLGASVVLAPPFITTSEQIDDLLTVLKRVLDSVYKDISG

SEQ ID NO: 28417 - protein, 60 aa, Cinnamomum verum
YQGVFPVKGNQDRFIVEDMVDFGSPFRFGLEAGRKPELLLAMRCLCKGSPDAFLVCNGYK

SEQ ID NO: 28418 - protein, 60 aa, Asimina parviflora
  misc_feature (11)..(11): Xaa can be any naturally occurring amino acid
  unsure (1)..(60): unsure at all Xaa locations
YQGVFPVKWNXDRFVVEDIVRFGSPFRFGLEAGSKPELLLAMSCLCKGSPDAFLVCNGYK

SEQ ID NO: 28419 - protein, 1118 aa, Shewanella sp. MR-7
MGLKYMAFDWFSQFFISSQDSLLLNVYYNPLLVTISILIAIFSAFMAFQVTTQAVLSQSKSRQQIMLLTGSVVLGGGVWSMHFIGMLAFDLCSPVTYDFGLTALSLLPSIGASWVALNLLSKPSFKFSQVLISGILVGAGIGTMHYVGMAAMDMAPLLRYDPWIFALSIVVAVLLAIIALWVRTGLNQLIASNMSAITSNFIASIVMGLAISGMHYTGMAAARFVKPEGLELSEQSSEISFYLALGVSVTTVIIICLVLIVNVIFKYKDLSLLAKSNEDRMRAMMNTAVDGIITIDGQGIIVNVNKAVTTILGWSPAELLGENVKKIVPESIRPHHDGYLARYINTREAQIIGTGREVEAQHKAGHSVPVRLSIGHVMQGKAHYFVGFLSDLSLRNEMEQELKNNEAKFRSLITNIPGIAYRCKSTEGWPMVFISEAVLNITGYPAEDFELPHPKRFFSDLYYPDDIESIYAQAQPPTFSMEYRIIRADGEVRWLFEHGNYILDETSNEVWIDGFLMDITERKVMEQDLVTAKNNAEQAAAARAAFLANMSHEIRTPMNAIIGFSDILLESVLDNEQHKQLSTINRSAKSLMHLLNDVLDSAKLDKGKLELENRVFCLTDEIDTVISTLWLQAKKQRLSLEVDIAPSMAANFIGSPERIRQVLINLIGNAVKFTCEGKVTVSVFPQNDNLVTFEIIDTGIGMTPEQLNRVFEAFAQADASMSRKYGGTGLGTTISKQLVELMGGQLEAESTLGQGSTFRFTIPLQPSSEPLETERADHGSLPPLTLLVVDDIQQNIDLLSVWLTRQGHKVITARDGEQALLRMQKADIDITLMDLQMPVMDGLTAAKMRREQEAESQLPHMPIIALTASVLEQDKSAAEQAGMDGFANKPIDFALLTREIARVLQLNPPQAEFESLQPLGNQLVDEAKGVKLWGSKPQFIKELMKFIAQWPEKSQALQQAISEQDTATIKLLSHSLKGVSGNLGLLQWMSYFAQLEKLTQAESLSFEAMEAIIAKISDSLVEIGDYIESTTVSSASGSELAQSGTDDPAQLLAHIDALLASVVHHSFDESDLEALTARIDEHLRLSVTIITEALDNFDFDIAHNELLELRRIITANQE

SEQ ID NO: 28420 - protein, 450 aa, Yersinia pestis CO92
MTKHYDYLAIGGGSGGIASINRAAMYGKKCALIEAKQLGGTCVNVGCVPKKVMWHAAQIAEAIHLYGPDYGFDTTVNHFDWKKLIANRTAYIDRIHQSYERGLGNNKVDVIQGFARFVDAHTVEVNGETITADHILIATGGRPSHPDIPGAEYGIDSDGFFELDEMPKRVAVVGAGYIAVEIAGVLNGLGTETHLFVRKHAPLRTFDPLIVETLLEVMNTEGPKLHTESVPKAVIKNADGSLTLQLENGTEVTVDHLIWAIGREPATDNLNLSVTGVKTNDKGYIEVDKFQNTNVKGIYAVGDNTGVVELTPVAVAAGRRLSERLFNNKPDEHLDYSNIPTVVFSHPPIGTIGLTEPQAREKFGDDQVKVYTSSFTAMYSAVTQHRQPCRMKLVCVGAEEKIVGIHGIGFGMDEILQGFAVAMKMGATKKDFDNTVAIHPTAAEEFVTMR

SEQ ID NO: 28421 - protein, 413 aa, Thermococcus kodakarensis KOD1
MKAVILAGGFGTRLRPISSTRPKPMVPVLGKPNLQYLLENIEKIPEIDEVILSVHYMRGEIREFIDEKMADYPKDIRFVNDPMPLETGGALKNVEEYVSDDFLVIYGDVFTNFNFRELIEAHRNNDGLITVAVTKVYDPERFGVVETDENGKVTHFEEKPHRPKTNLVDAGIYVVNKKVLEEIPKGKEVYFEREVLPKFVARGEVYAYRMPRDAYWVDLGTPDDLFYAHQIAMDEIAKDNGYITIKEGAEVPDDVEIQGPVYIDEGAKIGHGVKIKAYTYIGPNTIVEDKAYLKRSILIGSDIIKERAELKDTILGEGVVVGKNVIIKENAVVGDYARIADDLVIYGAKVLPWKKVEEYEAYIKVKLDPTKVRPGQYPDHCPLGLPECIYKKFKAIAGEKPPCDECIENQWLF

SEQ ID NO: 28422 - protein, 152 aa, Casuarina glauca
MALTERQEALLKQSWEVLKQNIPGHSLRLFALIIEAAPESKYVFSFLKDSNEIPENNPKLKAHAAVIFKTICESATELRQKGQAVWDNNTLKRLGSIHLKNKITDPHFEVMKGALLGTIKEAVKENWSDEMGCAWTEAYNQLVATIKAEMKE

SEQ ID NO: 28423 - protein, 169 aa, Triticum aestivum
  misc_feature (84)..(84): Xaa can be any naturally occurring amino acid
  unsure (1)..(169): unsure at all Xaa locations
MAPTVMASSVTSVAPFQELKSTAGLPVSRRSNGASLGSVSNGGRIRCMQVWPIEGIKKFETLSYLPPISTEALLKQVDYLIRSXWVPCLEFSKVGFIFREHNTSPGYYDGRYWTMWKLPMFGCTDATQVINEVEEVKKEYPDAYVPIIGFNNMSQVQCVSFIAFKPPGC

SEQ ID NO: 28424 - protein, 283 aa, Yarrowia lipolytica CLIB122
MDAASVLDQYVQDLANLPSEVAHILEEVRDKDLKFYETRKRIQQRDNQIHKFIRANGSLAENPKEQAAYPKIRQDFQTAMELQDEKCTLAAQALTLVAKHVKKLNDDIDKLDAEGLLGGAPPQKPISANRSRATSSATPAPEPPSRNYTRDRANSRRGGSPAASRSSTPGTRPPKKRATDKNNEAASMSKESSVGASEQLRNMPETVAVGSLDAAIRAGPGEDDEVLYCFCQQPSFGEMVACDNDDCQYEWFHYDCVGLAEPPQGVWFCPSCSKGRKGDKKKR

SEQ ID NO: 28425 - protein, 785 aa, Zea mays
  misc_feature (116)..(116): Xaa can be any naturally occurring amino acid
  misc_feature (154)..(154): Xaa can be any naturally occurring amino acid
  unsure (1)..(785): unsure at all Xaa locations
VGAGGALGAANASWWIQTGGASPSSVEEQFSQAMSYIRDMQSDGDVLVQLWVPVNHDDGKLVLTTSEQPFTLDHRSDSLLRFREVSTKYQFSADVKSGDSPGLPGRVFISRLPEWXPDIRYFTSYEYPRVRDAQYLDVHGTMGLPMFEKGSYNXLGVIELIMTRQKINFTSELNTICRCLQAVNLRSTEVSSIPRIKFSTASYKDALPEILEVLRAACLTHKLPLAQTWVTCAQQGKRGSRHSDENYRYCISTIDEACFVNEAEMRGFHEACSEHHLLRGEGVAGKAFTTYQPCFLPDIGSSTKLEYPLSHHAKIFKLKGAVAIRLRCTRTGTADFVLEFFLPTDCEALEEQKSVLDSLSGTMRSVCQTLRVVTDREMEDETVLEMNELNSFTPHGKDKVELSFGCNSADRRGEASWTSLAGTSQQESELAALRMHGMFSPGGQGPSLSGVQATAEGSKAKRRTKAEKTVSLQILRQYFAGSLKDAARSLGVCPTTLKRICRQHGITRWPSRKIKKVDHSLRKLQQIIDSVHGAETAFQLNTLYKDITNTSISSDNNLSGSVTVPPTNQSNLTDVNKHQPHKSSSNVPSTSHSHSSCSHSSESSPSCSGGATKHAQQGIIDQMKSENPVKDSSIQTLQTENTSLFEHFSVNETPIDLLQDVTEKANGGHHSSRSPLSPNPKQNTDANMRVKATFGSEKVRFRLNPECNFQELKHEIAKRLSIVDTNPLVLKYLDDDSEWVLMTCDADLQECLHVYKLAGIQTIKISVHLAVSPATRVTTGHTGLS

SEQ ID NO: 28426 - protein, 388 aa, Yarrowia lipolytica CLIB122
MQGWRVTMEDAHATVLELKDAKGQPEKKKVAFFGVYDGHGGDKVAIYTGDNLHHIVARQEAFAKGDYGQALKDGFLSTDRAILEDAALKHDSSGCTATTAIVSDGKVICANAGDSRTVLGVKGIAKPMSFDHKPQHEGERTRICAAGGFVEAGRVNGNLALSRAIGDFDFKRSPYFPPEEQIVTAYPDVIEHQLTADDEFLILACDGIWDCFLSQEVVEFVRRGIAEKQTLVDICENLIDNCLAPTSDLSGVGCDNMTVMVVALLQGKTEEEWYNMVAERVKNGEGPAASREAVERVAGEEREVTAQQLQQNAQAQQANSASLALQQLLSSGATITDENGMVVLKAENAAELLAKVGFAPEDVGQLVESGDLVEEDVEVGGDRITEEQ

SEQ ID NO: 28427 - protein, 605 aa, Oryza sativa
  misc_feature (202)..(202): Xaa can be any naturally occurring amino acid
  unsure (1)..(605): unsure at all Xaa locations
MELALVGDPSNGVAKPSCDSVGSLPAVSSKAVIHPPVTSAAGATLGRHLARRLVQIGATDVFAVPGDFNLTLLDYLIAEPGLKLIGCCNELNAGYAADGYARARGVGACAVTFTVGGLSVLNAIAGAYSENLPVICIVGGPNSNDYGTNRILHHTIGLPDFSQELRCFQTITCYQAVINNLDDAHEQIDTAIATALRESKPXYISLGCNLGGLFNPTFSRESVPLFISPRLSNKANLEHAVEAAADFLNKAVKPVMVGGPKIRVAKAKKAFAGIAESSGYPFAVMPSAKGLVPEHHPRFIGTYWGAVSTTFCAEIVESADAYLFAGPIFNDYSSVGYSLLLKREKAVIVQPDRVVVGNGPAFGCILMTEFLDALAKRLDRNTTAYDNYRRIFIPDREPPNGQPDEPLRVNILFKHIKELLSGDTALIAETGDSWFNCQKLRLPEGCGYEFQMQYGSIGWSVGATLGYAQAAKDKRVMSCIGDGSFQMTAQEVYTMLRCGQKSIIFLINNGGYTIEVEIHDGPYNVIKNWDYTGLIDAIHNSDGNCWTKKVRTEEELIEAIATATGAKKDCLCFIEIIVHKDDTSKELLEWGSRVSAANSRPPNPQ

SEQ ID NO: 28428 - protein, 397 aa, Staphylococcus aureus
MITMQEAYIVAYGRSAAAKAKQGALFHERPDDVAAKVLQGVLKRIDGKFNKNMIEDVIVGTAFPEGLQGQNIARTIALRAGLSDTVPGQTVNRYCSSGLQTIAIAANQIMAGQGDILVAGGVELMSAVPMGGNEPTNNPTLQYDDIGASYPMGLTAENVASQFDVSREDQDAYAVRSHQRAYDAQRDGRFKDEIIPIQVNSVEYTNAGPKVHTNIFDQDEFIRPDTTMEALAKLRTVFKADGTVTAGTSAPLSDGAGFVVLMSGDKVKELGVTPIARFVGFKAVGVDPKIMGIGPAYAIPEVLSLSNLSVEDIDLIELNEAFASQTIASIKEVGLDISRTNVNGGAIALGHPLGATGAMLTARLLNEMGRRPDSRYGMVTMCIGVGMGAAAIFEYVR

SEQ ID NO: 28429 - protein, 284 aa, Arabidopsis thaliana
MGNANGKDEDAAAGSGGADVTSSSARSNGGDPSARSRHRRPSSDSMSSSPPGSPARSPSPFLFAPQVPVAPLQRANAPPSPNNIQWNQSQRVFDNPPEQGIPTIITWNQGGNDVTVEGSWDNWRSRKKLQKSGKDHSILFVLPSGIYHYKVIVDGESKYIPDLPFVADEVGNVCNILDVHNFVPENPESIVEFEAPPSPDHSYGQTLPAAEDYAKEPLAVPPQLHLTLLGTTEETAIATKPQHVVLNHVFIEQGWTPQSIVALGLTHRFESKYITVVLYKPLTR

SEQ ID NO: 28430 - protein, 311 aa, Striatosphaeria codinaeophora
SGAGNNWAKGHYTEGAELVDQVLDVVRREAEGCDCLQGFQITHSLGGGTGAGMGTLLISKIREEFPDRMMATFSVVPSPKVSDTVVEPYNATLSVHQLVENSDETFCIDNEALYDICMRTLKLSNPSYGDLNHLVSAVMSGVTTCLRFPGQLNSDLRKLAVNMVPFPRLHFFMVGFAPLTSRGAHSFRAVTVPELTQQMFDPKNMMAASDFRNGRYLTCSAIFRGKVSMKEVEDQMRNVQNKNSSYFVEWIPNNVQTALCSIPPRGLKMSSTFVGNSTAIQELFKRIGEQFTAMFRRKAFLHWYTGEGMDE

SEQ ID NO: 28431 - protein, 517 aa, Yersinia pestis KIM
MQALLGIDIGTSGCKALLIGIDGAVIAADTASYPLSQPQLGWAEQDPELWVEGARRAVAGALAKAPTLELLCVGLSGQMHGLVSLDAGHQVLRPAILWNDQRNSAECEQITEAAGGLKGLLAATNNRMLVGYTGGKIVWMQQHEPDLFARMTTVLNPKDYLRLRLTGEVATEVSDASGTGLFDVRARQWASDLIENVGIDRALLPPVFESQVISGQVSAVGAELFGIPKGTPVAGGGGDAVIQTFGSGVIAPGELQTTIGTAGILAAALDTPQANPDGRLQVFCHVVADKWHCMGVSLNAGGAMSWFRDTFYVGVNAAVPSFDQFTPSDQITPSFEQIVAEAAASPAGARGLLFLPYLNGERCPHPDPAARGAFIGLTACHNRGDVARAVMEGVVHALVDMHTLMKPLGINGRVVKTSGGGARSPLWRQMQADIFGCDVLTTKGAAEGAAFGAALVAGLAIGVWPDATSATANCRIITREPPNPATAAVVAEAQRIYRTLYPALRETFAELGDPTFM

SEQ ID NO: 28432 - protein, 498 aa, Yersinia pestis KIM
MSEYHEKNNALFKSITALDGALFINGEFRKGAGGRLPVENPATGKVIGHLAAATPEEIEEAVAAARRAFPAWAAERPKARANALHRLGDLIAGDALNMARNMTIEQGKPVNEAQGEILKLAEICHFYGEEATRVQGDVVPNDPPGFQSLVVREPVGVVGAITPWNYPAELVGWKLCASLAAGCTLIIKPAELTPYTALAIAEKCLEAGIPAGVVNVLTGKGEQVGQALVEHPQVDKIAFTGSSAVGLHIQQSCPQVKRLSLELGGNGPMVVTACADVAAAVKGAVRRSFRNCGQVCIAINRIYVHRSCYRAFVSKMGVATNGLRLGNGLDDPAADLGAMASVEPLNKTRAHLEDALAKGARLVAGGKAPEGVEYAKGHFFRPTVLADCTHQMRVMTEETFGPLVGLAPFDDIDEVISRANDTPYGLAAYVYARDLAAIHRLSAALDYGNVAINNVDASMMNAPYGGRKQSGVGYEHGREGLLEYFNFKHIRLYHGIGD

SEQ ID NO: 28433 - protein, 684 aa, Triticum aestivum
NDDCTRHVVRALLRKCGYEVISAENGLHAWQYLEDVQNRIDLVLTEVAMPCLSGIGLLSKITSHSICKGIPVIMMSKNDSMSTVFRCLSKGAVDFLVKPIRKNELKTLWQHIWRRCHSSSGSESGIHTQKCSKPKAGDEYENNSHDDDDDCGSHDDDDDDDDDADDDFSVGPNARDGSDNGSGTQSSWTKRAVEIDSPQLLSSDHLAESPDSTCAQVIHPRSEIGSNRWLPTANKRNINNQKENNDDSMGKYLEIGAPRNSSLGYQSSPNEMSVNPTEKKLENQAYLGDTIEQVCTKKQAVRDEPTSQTADLISSIARNTESKQAARITDAPDCSSKMAHGTEMKNDSPINMPSQELGLKISETARCGTEIHDERSILKRSNLSAFTRYHTPMASDQGGATFRGSCSPQDNSSEAVKTNSTCKMESNSDAAQIKQGSNGSSNNNDMGSSTKNAIAKPCTDRERVMSPSLVKSNQQTSAFHPVQHQVSPADAARKDKASEEIVNAVKVGHSSEAQQSSVQHHHHAHYYRHVIAQQQTLIDRASNARCGSSNASDLPLEGHAANYGVNGSISGSNNGSNTQNASSSAPNIARPNMDSGAMDKTEAGGGNGSGSGPSGSGNDMVCQNQLSQREAAVNKFRQKRKERNFGKKVRYQSRKRLAEQRPRVRGQFVRQSGQEDEAGQAEDR

SEQ ID NO: 28434 - protein, 537 aa, Chlamydophila caviae GPIC
MPFKCIFLTGGVVSSLGKGLTAASLALLLERQNLKVAMLKLDPYLNVDPGTMNPYEHGEVYVTNDGIETDLDLGHYHRFSSVNLSKYSTATSGQIYARVIKREREGVYLGSTVQVIPHITNEIIEVILECAKENQPDVLIVEIGGTVGDIESLPFLEAIRQFRCEHAANCFSIHMTYVPYLKAAGEVKTKPTQHSVQSLRGIGIIPDAILCRSETPLSNEVKKKISLFCNVPDSAVFNVVDVEHSIYEMPLMLSREKISTFITEKLGLFTKQEDLSDWKILIERLRNPLPNKVRIGLVGKYVQHKDAYKSVFESITHAALSLNCAVDILPLDSEDPHFLEALEECDGCLVPGGFGIRGWEGKITAAKLCRERGIPYFGICLGMQVLVVEYARNVMDLEKANSTEMDQDTPHPVICMMDGQAALVATGGTMRLGAYPCTLSPGTKVYEAYGQSEIMERHRHRYEVNFDYIQQLKDHGLNIVGRCPQQGLCEIVETENHPWMVGVQFHPEFLSKLITPHPLFVGFIQAALLYSKNKSHV

SEQ ID NO: 28435 - protein, 321 aa, Yersinia pestis KIM
MSESKMRLVVTDQAFGNTVYEQAAANAVGADFAAYQCRTEDETRDAVQGADVVLNNFAPMTERVMAAMPPGAVIVRYGVGVDNIDLSAARKRGMRICNVPDYGIEEVADHAAAMTLALARKLGRYEAGIRSGRWEIDQMVDGVRSLRDTTVGLIGLGRIARAYATRMAVFGCRIIGFDPYVTETEARSAGIEPLPQDKVIASAHILSLHVPLTPETRDLIDTTAIARMPEGAILINCARGGLVNEVALIEALTRGHLSGAGLDVFEQEPLPADSALRKAPHLLLSPHAAFFSDASVKKLQQLASEEALRGLRGEPLRCPLT

SEQ ID NO: 28436 - protein, 161 aa, Glycine max
MSLIPNFFGGRRNNVFDPFSLDVWDPFKDFPFPNTLSSASFPEFSRENSAFVSTRVDWKETPEAHVFKADIPGLKKEEVKVQIEDDKVLQISGERNVEKEDKNDTWHRVERSSGKFMRRFRLPENAKVEQVKASMENGVLTVTVPKEEVKKPDVKAIEISG

SEQ ID NO: 28437 - protein, 220 aa, Debaryomyces hansenii CBS767
MSDNTDDYSYDYEYLYKIVLIGDSGVGKSNLLSRFTRDEFNLESRSTIGVEFATRTLEIDGKRVKAQIWDTAGQERYRAITSAYYRGAVGALIVYDISKAESYESVSRWLKELKEHADANIVIELVGNKSDLDHLRAVPTDEAKNFANENNLLFTEASALSSDNVDLSFHQLLKNIYEMISKHQLDTNEGSNGNKPSGGPTISLTPAPQEKKSKNNSNCC

SEQ ID NO: 28438 - protein, 60 aa, Persea americana
YQGVFPVKGNQDRYIVEDVVDFGSPYRFGLEAGSKPELLLAMSCLCKGSPDAFLICNGYK

SEQ ID NO: 28439 - protein, 324 aa, Hordeum vulgare
MSLQIGRTERARSPVFVFAHKRQLLHGRCSTIDNANCSTCSMKINSTCTLTALPIAALPGPRTTSHYSTAAANWCYATVAPRARSSTIAASLGTPAPSSSASFRPKLIRTTPVQAAPVAPALMDAAVERLKTGFEKFKTEVYDKKPDFFEPLKAGQAPKYMVFACADSRVCPSVTLGLEPGEAFTIRNIANMVPAYCKNKYAGVGSAIEYAVCALKVEVIVVIGHSRCGGIKALLSLKDGADDSFHFVEDWVRIGFPAKKKVQTECASMPFDDQCTVLEKEAVNVSLQNLLTYPFVKEGVTNGTLKLVGGHYDFVSGKFETWEQ

SEQ ID NO: 28440 - protein, 60 aa, Drimys winteri
YQGVFHVKGNQDRFVVEDIVQFGCPFGFGLEAGSNPELLLAMSCLCKGSPEAFLVCNGYK

SEQ ID NO: 28441 - protein, 377 aa, Zea mays
MAQDEAVATQKTGNTTSPSKDYPTPSPYPDWSTMQAYYGPGVLPPTYFTPAIAPGHPPPYMWGPQPIMPPPFGTPYAAVYPHGGAYPHPLVPMMSTPMSVEPAKSANSKEKNSNKKLKEIDRTAVSAGSGNSKRTVSSIEDYSAEGSSDVNDQNVNETSRKRSSDGGPGAETTTGGNTECVLAPNHTLGNATILPQHCFSAPVIKPSATNVANSRAIGTALSPPPGVMVPVHNAVPSDLSVKDERELKREKRKQSNRESARRSRLRKQAETEELATQVESLAAENTSLRSEIGRLTESSEKLRLENSALMVKLKDTAEPSPSKAAASPSSPRASAENFLSMIDSANAPSVSRHTEHGGPRLRQLLDSSPATDVAAVS

SEQ ID NO: 28442 - protein, 163 aa, Xylella fastidiosa Temecula1
MMNRVMHYFKSLLLLELLAGLWLTLKYTFRPKYTVLYPMEKFPQSPRFRGLHALRRYPNGEERCIACKLCEAVCPALAITIDSAKREDGTRRTTRYDIDLFKCIFCGFCEESCPVDSIVETHILEYHFEKRGENIVTKPQLLAIGDRFEAEIAERRAADAAFR

SEQ ID NO: 28443 - protein, 152 aa, Casuarina glauca
MALTEKQEALLKQSWEVLKQNIPAHSLRLFALILEAAPESKYVFSFLKDSNEIPENNPKLKAHAAVIFKTICESATELRQKGHAVWDNNTLKRLGSIHLKNKITDPHFEVMKGALLGTIKEAIKENWSDEMGCAWTEAYNQLVATIKAEMKE

SEQ ID NO: 28444 - protein, 60 aa, Peperomia polybotrya
YQGVFPVKGNQDRFIVEDIVEFGSPFRFGLEAGSKPELPLAMRCLCKGSPEAFLVCNGYK

SEQ ID NO: 28445 - protein, 145 aa, Casuarina glauca
EALLKQSWEVLKQNIPGHSLCLFALIIEAAPESKYVFSFLKDSNEIPENNPKLKAHAAVIFKTICESATELRQKGQAVWDNNTLKRLGSIHLKNKITDPHFEVMKGALLGTIKEAVKENWSDEMCCAWTEAYNQLVATIKAEMKE

SEQ ID NO: 28446 - protein, 60 aa, Saururus cernuus
YQGVYPVKGNQDRFVVEDVVEFGSPFRFGLEAGSKPELPLAMSCLVKGSPEAFLVCNGYK

SEQ ID NO: 28447 - protein, 60 aa, Illicium parviflorum
YQGVFPVKGNQDRFIVEDIVEFGAPFRFGLEAGSKPELLLAMSALCKGSHDALLVCNGYK

SEQ ID NO: 28448 - protein, 519 aa, Arabidopsis thaliana
MAETDVGSVKGKEKGSGKRWILLIGAIAAVLLAVVVAVFLNTQNSSISEFTGKICNCRQAEQQKYIGIVEDCCCDYETVNRLNTEVLNPLLQDLVKTPFYRYFKVKLWCDCPFWPDDGMCRLRDCSVCECPESEFPEVFKKPLSQYNPVCQEGKPQATVDRTLDTRAFRGWTVTDNPWTSDDETDNDEMTYVNLRLNPERYTGYIGPSARRIWEAIYSENCPKHTSEGSCQEEKILYKLVSGLHSSISVHIASDYLLDEATNLWGQNLTLLYDRVLRYPDRVQNLYFTFLFVLRAVTKAEDYLGEAEYETGNVIEDLKTKSLVKQVVSDPKTKAACPVPFDEAKLWKGQRGPELKQQLEKQFRNISAIMDCVGCEKCRLWGKLQILGLGTALKILFTVNGEDNLRHNLELQRNEVIALMNLLHRLSESVKYVHDMSPAAERIAGGHASSGNSFWQRIVTSIAQSKDFNREVRQEVETYFLWSPLAEMQLYLGREARCSMRSGGCGIKRSDGGRVYFVVK

SEQ ID NO: 28449 - protein, 310 aa, Gluconobacter oxydans 621H
MSSKPDILTIDPLVPVMKERLEKSFTLHPYTSLENLKNIAPAIRGITTGGGSGVPSEIMDALPNLEVISVNGVGTDRINLDEARRRNIGVAITQNTLTDDVADMAVALMMAVMRSIVTNDAFVRAGKWPSATAPLGRSLTRKKVGIAGFGHIGQAIAKRVSAFGMEVAYFNSHARPESTCHFEPDLKALATWCDVLILAVSGGPRSANMIDRDTLDALGKDGFLVNIARGTVVDEAALLSALQEKRIAGAGLDVFQNEPNINPAFLSLPNTVLQAHQASATVETRTTMANLVVDNLIAYFTDKTLLTPVI

SEQ ID NO: 28450 - protein, 517 aa, Zea mays
MDKAYIAALSAAALFLLHYLLGRRAGGEGKTKGSQRRLPPSPPAIPFLGHLHLVKAPFHAALARLAARHGPVFSMRLGTRRAVVVSSPDCARECFTEHDVNFANRPLFPSMRLASFDGAMLSVSSYGPYWRNLRRVAAVQLLSAHRVACMAPAIEAQVRAMVRRMDRAAAAGGGGAARVQLKRRLFELSLSVLMETIAHTKTSRAEADADSDMSPEAHEFKQIVDELVPYIGTANRWDYLPVLRWFDVFGVRNKILDAVGRRDAFLRRLIDGERRRLDAGDDSESKSMIAVLLTLQKSEPEVYTDTVITALCANLFGAGTETTSTTTEWAMSLLLNHREALKKAQAEIDAAVGTSRLVTADDVPHLTYLQCIVDETLRLHPAAPLLLPHESAADCTVGGYDVPRGTMLLVNVHAVHRDPAVWDDPDRFVPERFEGGKAEGRLLMPFGMGRRKCPGETLALRTVGLVLGTLLQCFDWDTVDGAQVDMKASGGLTMPRAVPLEAMCRPRTAMRDVLKRL

SEQ ID NO: 28451 - protein, 621 aa, Populus alba x Populus tremula
MEQYEVLEQIGKGSFGSALLVKHKHEKKKYVLKKIRLARQTDRSRRSAHQEKELISRIRNPFIVEYKDSWVEKGCYVCIIIGYCEGGDMAEAIKKANGVHFPEEKLCKWLVQLLMALDYLHMNHILHRDVKCSNIFLTKGQDIRLGDFGLAKILTSDDLASSVVGTPSYMCPELLADIPYGSKSDIWSLGCCIYEMTSLKPAFKAFDMQALINKINKSIVAPLPTKYSGAFRGLVKSMLRKNPELRPSAAELLRHPHLQPYVLKIHIKMNSPRQNTLPFQWPEPHYMKKTKFLVPEDNPLKAHREKRYSLSNDRALNPSISAAEQDSVCSTEGIHDTPSYLNQSLSDSSIESSHEGTVICRSIASKPSNFAKTTKPAPTKASVTTRRRTEPVKKRESLPVTRTPTKKSNPTTRRTSLPLPSRTAIQNSAHGTNNSILLQIKSPDVSVNAPRIDRIAEFPLASYDKPYLPFRRTSSTSAQGSSNSLHHGDRSITKDKCTVQISDRTSAKPNFTEAWQGIEHGMFQVDEENGSNSSNQNATAGASSRTSSDIRRRRFDTSSFQQRAEALEGLLEFSARLLQDARYDELGVLLKPFGPGKVSPRETAIWLTKSFKENTAKTEDC

SEQ ID NO: 28452 - protein, 128 aa, Thiobacillus denitrificans ATCC 25259
MSYSDKVLDHYENPRNVGAFNKEDEGVGTGMVGAPACGDVMKLQIKVGKDGLIEDAKFKTYGCGSAIASSSLVTEWVKGKTLDQAMEIKNTAIAEELALPPVKIHCSILAEDAIKAAVADYKQKKGLE

SEQ ID NO: 28453 - protein, 324 aa, Candida glabrata CBS138
MSGIGESRTELLNWLNDLLKLNYKKIEECGTGAAYCQIMDSIYGDVPMHRVRFNSTADYENQINYKVLQSNFTKHNIEKTVYVDKLIRCRFQDNLEFLQWLKKYWVNNKDGTPYDAEARRNYRPISSTNSGTPGTPSGLSSASNSSSTLNISKRRNMSDSTSLSRTQSLSTRYASGTSGNNINRRVTSEQIIALQTELSQSHNKIQEMEQEMGTFKEALTAMEAENNFYFSKLRDIEILVQTTQDFIKEGLYKGDVEELDKFTNKVQHILYATIESASNEETKDTNESNRITTNNTSSGNIASQTLEGESLRSSNNLIIDEETF

SEQ ID NO: 28454 - protein, 580 aa, Kluyveromyces lactis NRRL Y-1140
MSESGYYLGFDLSTQQLKCLAIDDQLNIVTTAAIEFDKDFPHYNTRKGVYIKDEGVIDAPVAMWLEAIDLCFERLGKCIDLKKVKSMSGSCQQHGTVFWNCDHLPKDLQPSSNLVKQLASCFSRDVAPNWQDHSTRKQCDELTDKVGGPQELARITGSSSHYRFSGSQIAKVHETEPEVYANTKKISLVSSFLASVLVGDIVPLEEADACGMNLYGIEKHEFNEDLLSVVDEDIASIKRKLFDPPTSSDEPKSLGPVSTYFQEKYGVNPDCQIYPFTGDNLATICSLPLQKNDVLISLGTSTTILLITDQYHSSPNYHLFIHPTVPNHYMGMICYCNGSLAREKIRDDINGESQTHDWTKFNEALLDNSLSNDNEIGLYFPLGEIVPNMDAVTKRCYFKYIDNKVVLTNVNMFPDKRLDAKNIVESQALSCRVRISPLLSEEANAINETQVLKSELKVKFDYDFFPLASYAKRPNRAFFVGGASKNEAIIKTMANVIGAKNGNYRLETANSCALGGCYKALWSLLKEQNPETPSFDRWLNAFFNWERDCEFVCNSDAAKWENYNNKIRTLSEIEREASSH

SEQ ID NO: 28455 - protein, 71 aa, Glycine max
QLVYDLDMTKCICCGFCQEACSADALALGPDFEFATDTHEELLYDKEMLFEYDDRWETETAENLRSDSLYH

SEQ ID NO: 28456 - protein, 360 aa, Corynebacterium diphtheriae NCTC 13129
MSTTTIVVDMSTQYEKYTSTENGGEFIRDTQYIDDRIVDSVSAPTPLEDGHTLWPAEPRRYRLVAARACPWAHRTVITRRLKGLEDVISLGLVGPTHDWRSWTFDLDPNEVDPVLGIPRLRDAYLKRFPDYPHGITVPAIVEVATGKIVTNDYPSIVCDLNDQWSKYERPGAPDLYPETLREEIDAITKRIFTEVNNGVYRCGFAGSQEAYDKAYDRLFTAVDWLEERLSHQRYLVGKHITIADIYLYTTLVRFDAVYHGHFKCNRNKITEMPNLWGYLRDLFQTPGFGDTTDFTEIKQHYYITHQDVNPTQIVPKGPSLESFFSPHGREKLGDSPFTEGVTPPGEISYEERLKNKIDGQ

SEQ ID NO: 28457 - protein, 311 aa, Zignoella ovoidea
SGAGNNWAKGHYTEGAELVDQVLDVVRREAEGCDCLQGFQITHSLGGGTGAGMGTLLISKIREEFPDRMMATFSVVPSPKVSDTVVEPYNATLSVHQLVENSDETFCIDNEALYDICIRTLKLSNPSYGDLNYLVSAVMSGVTTCLRFPGQLNSDLRKLAVNMVPFPRLHFFMVGFAPLTSRGAYSFRAVTVPELTQQMFDPKNMMAASDFRNGRYLTCSAIFRGKVSMKEVEDQMRNVQSKNSSYFVEWIPNNVQTALCSIPPRGLKMSSTFVGNSTAIQELFKRVGEQFTAMFRRKAFLHWYTGEGMDE

SEQ ID NO: 28458 - protein, 339 aa, Escherichia coli K12
MKSILIEKPNQLAIVEREIPTPSAGEVRVKVKLAGICGSDSHIYRGHNPFAKYPRVIGHEFFGVIDAVGEGVESARVGERVAVDPVVSCGHCYPCSIGKPNVCTTLAVLGVHADGGFSEYAVVPAKNAWKIPEAVADQYAVMIEPFTIAANVTGHGQPTENDTVLVYGAGPIGLTIVQVLKGVYNVKNVIVADRIDERLEKAKESGADWAINNSQTPLGEIFTEKGIKPTLIIDAACHPSILKEAVTLASPAARIVLMGFSSEPSEVIQQGITGKELSIFSSRLNANKFPIVIDWLSKGLIKPEKLITHTFDFQHVADAISLFEQDQKHCCKVLLTFSE

SEQ ID NO: 28459 - protein, 523 aa, Arabidopsis thaliana
IQSDHMNNTIHVTNKKLPNFLLSVRLKYVKLGYHYLISNAVYILILPVGLLAATSSSFSLTDLTLLYNHLLKFHFLSSTLFAALLIFLTTLYFTTRPRRIFLLDFACYKPDSSLICTRETFMDRSQRVGIFTEDNLAFQQKILERSGLGQKTYFPEALLRVPPNPCMSEARKEAETVMFGAIDAVLEKTGVNPKDIGILVVNCSLFNPTPSLSAMIVNKYKLRGNVLSYNLGGMGCSAGLISIDLAKQLLQVQPNSYALVVSTENITLNWYLGNDRSMLLSNCIFRMGGAAVLLSNRSSDRCRSKYQLIHTVRTHKGSDDNAFNCVYQREDNDDNKQIGVSLSKNLMAIAGEALKTNITTLGPLVLPMSEQLLFFATLVARKVFNVKKIKPYIPDFKLAFEHFCIHAGGRAVLDEIEKNLDLSEWHMEPSRMTLNRFGNTSSSSLWYGLAYSEAKGRIKRGDRTWQIAFGSGFKCNSAVWRALRTIDPSKEKKKKTNPWIDEIHEFPVPVPRTSPVTSSSESR

SEQ ID NO: 28460 - protein, 475 aa, Bacillus cereus G9241
MQQPTNEKLHRTMKSRHLFMIALGGVIGTGFFLGSGYTINQAGPGGAILSYLVGGFIMYLTMLCLGELTVAMPVSGSFQKYATKFIGPGTGFMIGWLYWLGWAVTVGLELTSIGLMMKRWFPNVDVWVWCLVFGVILYASNAISAKSYAELEFWFSSIKVVTILAFVVLGGSALLGFISYDGKEAAPLFSNFVSDGGLFPNGLAAVLLTMITVNFSFQGTELIGIAAGESENPEKTIPRAIRNTVWRIMLFFILTMTILVGLISWKEAGVIESPFVVVFDKIGIPYAADIMNFVIITALLSVANSGLYAATRILWSLANEGMAPKSFQKVNKRGIPITALVVTIAVAALSLLTSFLAEDTVYMYLLSIAGLSAVSSWIIIALSQLRFRSQYIKGGGKLEDLKYRTPLYPIVPILALITNSIVVISLAFIPEQRMALYCGIPFIIFCYIYYYISKKRQKPMKVEMEKTNETNNQTR

SEQ ID NO: 28461 - protein, 304 aa, Oryza sativa
MSGMNSLSMVEARLPPGFRFHPRDDELVLDYLERKLLDGGVGGAAAAAAAVTIYGCPVMVDVDLNKCEPWDLPEIACVGGKEWYFYSLRDRKYATGQRTNRATESGYWKATGKDRPISRKGLLVGMRKTLVFYKGRAPKGKKTEWVMHEFRKEGQGDPMKLPLKEDWVLCRVFYKSRTTIAKLPTEGSYNNIDSVATTSLPPLTDNYIAFDQPGSMQNLEGYEQVPCFSNNPSQQPSSSMNVPLTSAMVDQEQNNMGRAIKDVLSQFTKFEGNVKREALQSNFSQDGFDYLAESGFTQMWNSLS

SEQ ID NO: 28462 - protein, 309 aa, Zignoella pulviscula
SGAGNNWAKGHYTEGAELVDQVLDVVRREAEGCDCLQGFQITHSLGGGTGAGMGTLLISKIREEFPDRMMATFSVVPSPKVSDTVVEPYNATLSVHQLVENSDETFCIDNEALYDICMRTLKLSNPSYGDLNYLVSAVMSGVTTCLRFPGQLNSDLRKLAVNMVPFPRLHFFMVGFAPLTSRGAHSFRAVTVPELTQQMFDPKNMMAASDFRNGRYLTCCAIFRGKVSMKEVEDQMRNVQNKNSSYFVEWIPNNVQTALCSIPPRGLKMSSTFVGNSTAIQELFKRIGEQFTAMFRRKAFLHWYTGEGM

SEQ ID NO: 28463 - protein, 54 aa, Zea mays
  misc_feature (35)..(35): Xaa can be any naturally occurring amino acid
  unsure (1)..(54): unsure at all Xaa locations
EDRMRGSNDQVEAVIHFDDHVEDLQLWDHQIPVVXQSLYHILCTMSSKAICIPV

SEQ ID NO: 28464 - protein, 234 aa, Brassica napus
MLGIFSGAIVSLPEELVAAGSRTPSPKTTGATLVNKFVQKNPSAVSVQVGDYVQLAYTHHKESPLRPRSFGAKDEIFCLFQGSLDNLGSLKQQYGLAKNANEVLLVIEAYKTLRDRAPYPANHVVSHLSGDFAFVVFDKSTSTLFVASDQVGKVPLYWGITADGYVAFADDLDLLKGACGKSLASFPQGCFYSTALGGLRSFENPKNKITAIPAKEEEIWGATFKVEGATVLAD

SEQ ID NO: 28465 - protein, 138 aa, Actinobacillus pleuropneumoniae serovar 1 str. 4074
MIQQTLCLIKPDATQRNLIGKILSHLEEAGLTIKALKKVQLNQEQAEGFYAEHQGKEFFAPLVEFMISAPIVAVVLEGENAIAHYRELMGATNPEQRKAGTIRALYAISGRENSVHGSDSEQSAKREIAYFFTPNEIL

SEQ ID NO: 28466 - protein, 333 aa, Rhodobacter sphaeroides
MGELIEGVWHPNWYDTASNGGRFVRSRARFRNWITADGSPGPSGEGGFPAEAGRYHLYVAHACPWAHRTMIFRALKDLAPLIDVSVVHPEMLEDGWTFDRSFPGATGDRLYGLAFLREIYLKADPGISARVTVPVLWDRKRETIVSNESAEIIRMFNAAFDHITGNRLDFLPEGDLDEIDRLNDRIYGTVNNGVYRAGFATTQEAYDEAAAPLFETLDWLEERLATRRYLVGDRLTEADWRLFTTLVRFDKVYHTHFKCNRRQIVQYPNLWGWLRELWQVPGVAETVHFDHIVRHYYFSHDTINPHRIVPLTPDPDFAAPHGRDQLFQASRLR

SEQ ID NO: 28467 - protein, 1682 aa, Gloeobacter violaceus PCC 7421
MPPLGLRTSRDDRLQQAEVGRLWMLMVGIDTYADPGLGGLGCAVCDCRELAAALAELTGRFERRVELVHHGQDGRSPRLEAVRASLAQLVAEAQPEDTVVFYFSGHGVLDRRCTEVFFCLADTRLGALEQTALGLPELLGSLASCRAHQQLLWLDACHSGAGFVPAGAMQADDAAGRLVAALQRHAPQRRSLYALLSCDAGERSWEFPELGHGVFTYYLIRGLRGEAADCQGVIDIDGLYKFVYYQTLRHIDQINKQLRLLNRQKGRRGEIERFRLHSLQTPKRFVGGVAPVVLGRALRAAGASQTRRALVIESPVGRGVGVKLSRELARLGRFDIRYWSAESAPRQWLARRLAGDSPVARTVLVYLGGRVVCTGAGDLHLDLGGTAVGLLWLGQQMQAGRPDRRIWVCDWVVEPENLEAVRRWIQSQQQPQTLGLCLMAGLSAPDEAGRFGEALVTTLAAAAAGLSAAEWIAQLQDQTAAETTHFEGWLSGVEGIVEVLPGDSAAPFDTRICPYMGLRAFAEAAAPFFYGRGPLVARLLHGLQERSFVAVVGASGCGKSSLVQAGLMAQLRQGGMIPGSGRWRLCTMQPGTHPLANLIARLGESGAMGAGETERRELEGLVYLGAEGFVRWLRTRPQPVLVLVVDQFEELLTLSAALECDRFVELVLGALEHAPDRFKLVITLRADCAEGALRLRGLHRLLERSVVYLSAELSQADYRDIILKPAAQVGLQVEPELVEVLLRDLERSRGELALLEFVLEQLWERRAGGWLTLRAYRQQIGGIEGALERKAEEVFGALCPQARACAHWLFLSLTQLGEGMPDTRRRVRKADLLVPRYGPALVEQTLKAFSDARLIVIGTEENRGQAAGTGIERGAAADDDIAGAIEQLHAEVTVEVAHEVLIRNWSTLRWWLEENRARLRVQRQIEQAAHLWLQSGRSDEFLLSGARLAEAEELHQGCADELTATSNRFIEACLAQRAALQQRQQRALVRTRLAAGAMGALALVVAVLGGVLFKLVGDLQHNEIATHTAYARSFLSTHRGPEGLQAALRAGRQQLQTLSADTGQTRQTESILREALSTVQQWNRIEHPQWVTSVAFSPGAALLASGSVDGQVRLWRPDGTLVRKIAALASSTDHKPNLQVRFSPDGGLLAVARDDGIVALQRSEGGPVTTLRHPRGVYDVRFSPGEATLATASSDGCVRVWSIEGRLLRTLADPGNPVFALAFSPDGDLIAAASADGAIRLWRRDGRLGATLRGHRDWALAVAVSPDGRVIASGDRTGAVRLWSREGHGLKSLRGHSEAVFAVAFSPDGALLATAGFDRTVRLWRPDGTPAGVLQGHSSDITSLSFGGDGQTLATASLDRTVRLWRLQPPLRRTLYGHTDGVLSARFSPDGALVASAGDDRTTRLWSRDGKPLAILRGHAQAVIEVAFSPKGDRLATGGGDGTVRLWRRDGTALGQLSGHSGPVHSLHYSPDGQILAAAGETVRLWNAQGILQAAFGGTPGGVLEVAFSPKGDRLATGGGDGTVRLWRRDGTALGQLSGHSGPVHSLHYSPDGQILAAAGEEGMVRIWEADGLLRQNWAAHTDWIGALAFSPDGRTLATAGHDRLVKLWSLDGTLLKVLEGHTAPVTSVGFSPDSRTVISAGLDKTVLLWNDWQLDMAGLVARGCNWLAASSDNTPNRPCKY

SEQ ID NO: 28468 - protein, 539 aa, Corynebacterium glutamicum ATCC 13032
MQARLKAARNVIGAFAGEGPLYPPSDVVDAFEDADEILDEHAEILLGEPLPDTPSCIMVTLPTEAATDIELVRGFAKSGMNLARINCAHDDETVWKQMIDNVHTVAEEVGREIRVSMDLAGPKVRTGEIAPGAEVGRARVTRDETGKVLTPAKLWITAHGSEPVPAPESLPGRPALPIEVTPEWFDKLEIGSVINVPDTRGSRRAFTVTRVFDGAVLAEGPQKAYISNGTLLEHNYDRSRVYGIPAVVQRINLKVGDRLILTDEELTYDPSLGSGRTPRISCTLPQAVDAIKVGHRVLFDDGAIAAVCIDKTSTADGHNDVELEVTHARPQGVNLAAYKGINLPDSELPLPSLTEEDLQHLRFVVKYADIAAISFIRNVADVEYLLQALADIGDPVAVERLGLVLKIETIPGYEGLAQILLTGMRHENFGIMIARGDLAVELGFDRMAEVPQLIMALAEAAHVPTILATQVLENMAKNGLPSRAEITDAAMALRAECVMLNKGPHINDAIKVLTEMSRKLGASQRKSRLLLRKVKSWEE

SEQ ID NO: 28469 - protein, 559 aa, Debaryomyces hansenii CBS767
MNVQDIKKIGKRVIRKWTTKDGFIGDYDYKYLFVPEIPFKKTVTKRQPFFGLNSDMPLLLGFILGFQHALAMLAGVVTPPILIASAANLDSATQEYLVSASLIVSGLLSCIQITRFHIYKTPYYLGTGLLSVVGTSFATISIVTKALPVMYLTGVCPVVDGVNQPCPDGYGMILGTGIVCSLLEILLSFMPAKQLQKIFPPIVTGPVVLLIGVHLIETGFQDWVGGSDCVGEMCGSAHPLEWGSAEFIGLGFLVYVTIIIAERFGSPIMKSCAVIVGLLIGCIVAAACGYFSKTNIDSAPAATFIWVHTFKLRVYGPAVLPFLAVYIVLMMEAIGDITATSDVSRLEVEGELYESRVQGGILADGFNGLLSGLMTVTPMSTFAQNNGVISITKCANRKVGYWCAFFMIIMGVFSKFAASIVAIPKAVLGGMTSFLFTSVAVSGIRIISTIEFTRRDRFVLTASLLPGFGSILVSNWFDNVFTYSGNNTALLGFFDAIVLVMETGFAVTGFIGLILNLILPEMDDDIEEFDDVVIESSESNQHSSDDNSKQNKIVKVESV

SEQ ID NO: 28470 - protein, 335 aa, Pichia angusta
MTANVGINGFGRIGRLVLRIALSRDDINVIAINDPFIAPDYAAYMFKYDSTHGKFKGTVTHEGKYLVINGKKIEVFQERDPANIPWGKEGVDYVLDSTGVFTTIEGAQKHIDAGAKKVIITAPSKDAPMFVVGVNHEEYTPDIKILSNASCTTNCLAPLAKVINDIFGIEEGLMTTVHSITATQKTVDGPSHKDWRGGRTASGNIIPSSTGAAKAVGKVLPALAGKLTGMSMRVPTTDVSVVDLTVNLKKPTTYEDICATMKKAAEGPLAGILGYTDEAVVSSDFLTDSRSSVFDAKAGILLTPTFVKLVSWYDNEYGYSTRVVDLLQHVAKVSA

SEQ ID NO: 28471 - protein, 327 aa, Yersinia pestis KIM
MTKTNLITGFLGCGKTTTIRHLLAQKPEHEKWAVLVNEFGEIGIDGALLADSGAVLKEIPGGCMCCVNGLPMQIGLNMLLQQAKPDRLLIEPTGLGHPKQILSLLTSDIYQPWIDLRATLCLLDARQLSEPRYTENENFRDQLAAADIIVVNKQDTYRSADNAVLQQWQQKQPLSRPLYHSEYGKLDVALLDQPHSNKDELPSGTHHHGTSQPKGLAALRLKGAEPWRRALNRGQGYLSCGWVFDANTVFDTVPLLEWVRLNPAERVKGVMRIPEGTLMVNRQGNDLQIDTRQIPPLDSRIELISATDIDWNVLQHDLLKIRLRNGV

SEQ ID NO: 28472 - protein, 400 aa, Staphylococcus epidermidis ATCC 12228
MAKIPVTVLSGYLGSGKTTLLNHILKNREGRRIAVIVNDMSEVNIDKDLVAQGGGLSRTDEKLVELSNGCICCTLRDDLLREVERLVHKGGIDQIVIESTGISEPVPVAQTFSYIDEELGIDLTSICRLDTMVTVVDANRFVNDIRSEDLLADRDESVDDEDERTIADLLIDQVEFCDVMIINKIDLISDKALEKLENVLRALQPEAKIIKTVNAKVELSDVLNTQLFDFEKASESAGWIKELTAGGHATHTPETEEYGITSFAYTRRLPFHAKRFHQWLEQMPENIVRTKGIVWLAQYNDVACLLSQAGSSCNIHPVTYWVATMSESQQQAILEARQDVVEDWDIEYGDRQTQFVIIGTDLDQEKISRELDACLIHSSEIDEDWRLLDSPYQWTYDRRM

SEQ ID NO: 28473 - protein, 464 aa, Agrobacterium tumefaciens str. C58
MTEIGFRTPSTDTTGAQPVSKLATARLALSLIRNPLKALPPEIFSEPAVFTRLGGVMRVHLADPVLIHEALVKNAALLGKGEDVRRALGPALGQGLLTADGDHWKWQRQSVAAAFRHEKLLELLPVMIETARRTQKRWRSSSTADIDIGHEMMRTTFDIIVETMMSGGYGIDIARVEQSITDYLKPTGWTFALAMLGAPEWLPHPGRRKSRAAVDYLRASLATVITGRRKNPTDRPDLVSMLLEAKDPETGRMMSDEEIIDNLLTFITAGHETTALGLAWTFHLLSQNPETERKAVEEIEAVTGGEPVAAEHIANLAYVRQVFSEAMRLYPPAPVITRTALQDFRLGEHDIPAGTVLYVPIYAVHRHTALWDEPERFDPSRFEPEKVKARHRYAYMPFGAGPRVCIGNAFAMMEAVAILAVILQKNHLENRTMASAEPLMRVTLRPQERLMMKITQRQNKSPAV

SEQ ID NO: 28474 - protein, 180 aa, Arabidopsis thaliana
  misc_feature (45)..(45): Xaa can be any naturally occurring amino acid
  misc_feature (53)..(53): Xaa can be any naturally occurring amino acid
  misc_feature (92)..(92): Xaa can be any naturally occurring amino acid
  misc_feature (112)..(112): Xaa can be any naturally occurring amino acid
  misc_feature (129)..(129): Xaa can be any naturally occurring amino acid
  misc_feature (135)..(135): Xaa can be any naturally occurring amino acid
  misc_feature (137)..(137): Xaa can be any naturally occurring amino acid
  misc_feature (140)..(140): Xaa can be any naturally occurring amino acid
  misc_feature (143)..(143): Xaa can be any naturally occurring amino acid
  misc_feature (155)..(155): Xaa can be any naturally occurring amino acid
  misc_feature (163)..(163): Xaa can be any naturally occurring amino acid
  misc_feature (167)..(168): Xaa can be any naturally occurring amino acid
  misc_feature (170)..(170): Xaa can be any naturally occurring amino acid
  misc_feature (173)..(173): Xaa can be any naturally occurring amino acid
  misc_feature (177)..(177): Xaa can be any naturally occurring amino acid
  unsure (1)..(180): unsure at all Xaa locations
MEELDRSRAFARDVKRIVVKVGTAVVTGKGGRLALGRLGALCEQXFADLQKPXTELDGKACAGVGQSSLMAYYETMFDQLDVTAAQLLVNDXSFRDKDFRKQLNETVKSMLXLRVIPIFNENDAISTRXAPYQDXSXIFXDNXALPALLALELKXADLLILLXDVEXXYXGPXSDPXLKV

SEQ ID NO: 28475 - protein, 60 aa, Cabomba caroliniana
YQGVFPVKGNQDRFIVEDIVEFGRPFRFGLEAGSKPELLLAMSALCKGNHDSLLVCNGYK

SEQ ID NO: 28476 - protein, 60 aa, Nymphaea odorata
YQGVFPVKGNQDRFIVEDIVEFGAPFRFGLEAGTKPELLLAMSALCKGNHDALLVCNGYK

SEQ ID NO: 28477 - protein, 378 aa, Burkholderia vietnamiensis G4
MISFAGGYPASDLFDVAGLQAAEARAYETPTRCLQYGPTDGLAELKKQLVSLMAQRGVACGSDELVVTTGSQQGLDLLLRVLVNPGDTVLTEQPAYPATLQALRLQQAQIVTVPVDGDGLNADMLSSLLASGAVKSPKILYTVPTFANPTGATLTLERRIALLKLAVKYRFLIVEDDPYGDLRFAGEKLPSILSLAAEVEGGRDWVVHFASLSKIVAPGLRVGWTVGPAEIVRRCVIAKQTVDLCSAPWTQATAAEYLSDGALERHLPRITDMYKRKCDTLCSELRAQFGEKVEFQKPEGGMFVWARLEGIDVSALLARSIDNKVLFVPGKAFFADKFDPCTLRLSFAAPGVDDIQEGAKRLKRAYEEVLADRVPSVQ

SEQ ID NO: 28478 - protein, 432 aa, Zea mays; identical to SEQ ID NO: 1087

SEQ ID NO: 28479 - protein, 60 aa, Ceratophyllum demersum
YQGVFPVKGNQDRFVVEDMVEFGAPFGFGLEAGSKPEFLLAMSALCKGCTDALLVCNGYK

SEQ ID NO: 28480 - protein, 341 aa, Anabaena variabilis ATCC 29413
MKVAVFSTKAYDRQFLEAANAPKQHDLVFFEPRLNQDTAILAAGFPAVCVFVHDQVDAATLEILASRGTRLIVLRCAGFNNVDLKAANKLGVNVVRVPAYSPYGVAEHAVGLILSLNRKIHRAYNRVREGNFALDGLLGFNINGRTVGIIGTGKIGLILGQIMKGFGCRLLAYDVYHNPEMLALGGEYVELPELFANSDIISLHCPLMPQTHHLINAEAIEQVKPGVMLINTSRGALIHTQAVIEGLKTGKIGSLGVDVYEQESELFFEDLSGEIIQDDIFQRLTTFPNVLITGHQAFFTEDALRNIAETTLNNIADIEQGRSCPNEIRYQPEVEAKVLVS

SEQ ID NO: 28481 - protein, 221 aa, Brassica napus
MASISNEPEREHRDEEESGANEDEDTGAQVAPIIKLEEVAVTTGEENEDAILDLKSKLYRFDKDGSQWKERGAGTVKFLKHKESGKIRLVMRQSKTLKICANHLVTSGMSVQEHAGNDKSCVWHARDFSDGELKDELFCIRFASVENCKAFMQKFKEVTDSEEEKEESKEASDTAGLLEKLTVEEKAPEEKKEENPVEKVASPKAEKAVEEKKTAESVPSA

SEQ ID NO: 28482 - protein, 60 aa, Gnetum gnemon
YPGSYPVKGNQDRYVVENVVEFGAAHDFGLEAGSKPELLLAMASMCKASSKALLVCNGYK

SEQ ID NO: 28483 - protein, 180 aa, Arabidopsis thaliana
MCDLVARTGRLQQRYEDGSRLVAGCIPFRYVNSDKDGNSESGKVIQVLMISSSSGPGLLFPKGGWENDETVREAAAREAVEEAGVRGILMDFLGNYEFKSKSHQDEFSPEGLCKAAMYALYVKEELATWPEHETRTRKWLTIEEAVESCRHPWMKDALVEGFCKWHKEKMVKGEEITGEH

SEQ ID NO: 28484 - protein, 1095 aa, Thiobacillus denitrificans ATCC 25259
MEENDPLWYKDAIVYELHVKAFFDANGDGAGDFRGLISKLDYLQELGVNALWLLPFYPSPGRDDGYDISDYHNLHPSFGDMADFRRFIREAHQRGLRVITELVVNHTSDQHPWFQAARRAPPGSVKRNYYVWSDTDTRFSETRIIFSDTEKSNWAWDEVAQAYYWHRFFSHQPDLNFNNPHVFKAIMRTMRFWFDAGVDGMRLDAVPYLCERDGTSNENLPETHAVIRRMRAELDARYSNRMFLAEANQWPEDVREYFGNGDECHMAYHFPLMPRMYMAIAQEDRHPIVEIMEQTPDIPDLCQWAVFLRNHDELTLEMVTDRERDYLYQAYASDPQARLNLGIRRRLAPLLDNDRHRIELMNLLLMTMPGSPIVYYGDEIGMGDNLLLGDRNGVRTPMQWDGGPNGGFSSAPTERLFLPPITDPVYGYGAVNVEAQQRNPSSLLNWTRRLIAMRKAHRALGRGTLRFLRPGNRKVLAYLREYEGETILCVANVARAPQAVELDLSPFKGHVPVELMGRSSFPPIGELPYLLTLGGYGCFVFRLATDVEAPAWHEERPVPPDLPVLVLVDAGWRTLFARTDEGVNQLMVRRAREQLERQIIPRYFRTQPWFVYSEAALEKFEFGTLREWGTDSGTWLLATVTVTLLDGSIYHYALPLGLAWEDEDEGRVAALLHVTLAKVRRLARVGILFDAFWDDGFCCAIVSAMERGETLAYGDGHLTFRTASAYPGFFCPLVTSSITRTVSEHGRLRVNLNDQLVLKSYPRQMQGTHPELEMSRFLTETAKFAHIPQLGGTVEYVASSGRHSTLAILERYAPNQGDAWAYTLNYLERFLDLSRTTGEQAPDGRHGRYMGLMKTLGERTAEFHRALATPDRSGDFGSEPIAPPDILEWVNKVRHEMGVMYELLERALPALPEPVAVAAQQLFLVRPKLYRRVIRASRVRVDASKTRCHGNYHLGQVWLVQNDFLIANYGGIPGRSWEERRAKHAPLRDVASMLLSLSQAGAAALARVAGDSVDVMAALQPHVDAWELAARKAFYRGYRKGMDGHAAYPTDATAAEALLTLFLAEKAIAELTEALERRAVGSAAAMRRLVQVTRR

SEQ ID NO: 28485 - protein, 664 aa, Shewanella sp. MR-7
MSSRKVLANAIRALSMDAVQKANSGHPGAPMGMADIAEVLWNDFLKHNPNNPKWVDRDRFILSNGHGSMLIYSLLHLTGYDLPIDELKQFRQLHSKTPGHPEYGYTPGVETTTGPLGAGISNAVGMAIAEKTLAAQFNREGHEIVDHYTYCFLGDGCLMEGISHEACSLAGTLGLGKLIAFWDDNGISIDGHVEGWFTDDTPKRFESYGWHVIANVDGHDSDAIRAAIEAAKAVTDKPTMICCKTIIGFGSPNKSGSHDCHGAPLGDAEIAAAREFLGWPHAPFEIPADVYAGWDAKEAGNAREAAWNDKFTAYAKAYPELAAEYERRVLKGELPADFEAKAQAFIQECQAKGEGIASRKASQNAIAAFGAVLPELLGGSADLAGSNLTLWAGSKGIQEDPAGNYVYYGVREFGMSGIMNGVSLHGGFINYGATFMMFMEYARNAVRMSALMGIQNIFVYTHDSIGQGEDGPTHQPVEQLANLRMTPNMAVWRPCDAAETAVAWKAAIERRHAPTSLVFSRQNLKAHARTAEQLANVAKGAYVLQDCAGTPEYILIATGSEVQLAVEAAAALTEQGKQVRVVSMPSNTEFDKQDAAYKESVLPKAVTKRIAIEAAHTDFWYKYVGFEGTVVGMTTFGESAPGNVLLKHFGFTVENVLNAAKSLG

SEQ ID NO: 28486 - protein, 292 aa, Arabidopsis thaliana
MYSAIRSSLPLDGSLGDYSDGTNLPIDACLVLTTDPKPRLRWTSELHERFVDAVTQLGGPDKATPKTIMRTMGVKGLTLYHLKSHLQKFRLGRQSCKESIDNSKDVSCVAESQDTGSSSTSSLRLAAQEQNESYQVTEALRAQMEVQRRLHEQLEVQRRLQLRIEAQGKYLQSILEKACKAIEEQAVAFAGLEAAREELSELAIKASITNGCQGTTSTFDTTKMMIPSLSELAVAIEHKNNCSAESSLTSSTVGSPVSAALMKKRQRGVFGNGDSVVVGHDAGWVMPSSSIG

SEQ ID NO: 28487 - protein, 90 aa, Ipomoea batatas
MATSRWIRPEVYPLFAAMSVAVGICGFQLIRNLTTNPEVRVNKEGRAAGVLENYEEGKKYAEHSLRKFVRNKSPEIMPSLNRFFSDPQRN

SEQ ID NO: 28488 - protein, 337 aa, Corynebacterium diphtheriae NCTC 13129
MAIELLYDADADLSIIQGRKVAVIGYGSQGHAHAQCLRDSGVEVVIGLREGSKSSEKAQEAGFEVKSNADAAAWADVIMLLAPDTSQAEIFSHDIEPNLKDGDALLFGHGLNIHFELIKPAVNITVGMVAPKGPGHLVRRQFVDGKGVPCLIAVAQDPKGEGKDLALSYAAAIGGARAGVIPTTFREETETDLFGEQVVLCGGLEHLMMKGFEVLAEAGYAPEMAYFEVLHEMKLIVDLIWEGGIENMNYSISETAELGGYVAGPRIITPEVKENMKAVLADIQSGKFVRDMVADVEAGQPELKRYREEIAAHPIEATGSKLRDLMSWVKNPLDETA

SEQ ID NO: 28489 - protein, 408 aa, Thiobacillus denitrificans ATCC 25259
MAGGEGSRLQPLTADRCKPAVPFGSRYRIVDFVLSNLTNSDIRSIYVLVQYRPQSLIEHVRKAWTVTSLFADQFLTVVPPQMTKTSTVFGGTADAVYQSLDLMNMHRPDLVAIFGADHIYRMDVRQMVRFHCEHDAEATVAALPVSLNQASSFGIIETDAQNRIIGFDEKPKAAKPMPDDPDHAYASMGNYLFNADVLREALEEAHRRGETDFGRHVLPRLAQSHGVYAYNFATNEVPGTKRYEEQAYWRDVGTLDTYFDAHLDVLGLEPRFDAFNPQWPIYSSHYQGPTARVLRAELDNVLLGAATIVTGAKIRNSILRREVVVEPGAEIEDSVIMDYVCIGAGAKLRRVIIDRHNVVPPGARIGYDHDADRAAGYHVTEGGVVVAPLGDVRFYAREASRHSGGYSE

SEQ ID NO: 28490 - protein, 307 aa, Corynebacterium diphtheriae NCTC 13129
MSNHHHDHHNHHDHHHGAPSSSRALLLVAGLTFAFFIVELVGGALAKSLALMSDALHMLSDSTGLIIALIAVVIGRRKATSQATYGYKRIEVLAALVNALSVTFITGWIVLEAIRRLSSHTVIDTRTTMVIAIIGLVFNIVGAVVLHGHSHEGVNVKGAYLHILVDLGGSVAVIVSSLLIMTTGWMWCDTAVSVLLAVIILPRSLSLVRSTLGILMERVPKTVDVETIRSRIAQIDGVGGVHDVHVWSIDGQQDIATVHVVVDENVNVKDCTTLDRIQKVFHDAGIDHVTVQLEHDTHMSHELPCQH

SEQ ID NO: 28491 - protein, 673 aa, Silicibacter sp. TM1040
MDLTALRSENPDHWNKAAAIRALTLDAVAGANSGHSGMPIGMADVATVLFEKHMKFDVSAPKWADRDRFILSAGHGSMLIYSLLYLMGDAQVTLEQIKNFRQSGALTAGHPENFLLDAVEVTTGPLGQGISNAVGFAMAEESLRAQYGKKVVDHYTYVIAGDGCLMEGVSQEAIGLAGRHQLGKLVVFWDNNNITIDGTVDLSDRTNQVQRFKASGWHVQEIDGHNPAEIDAAIEAAKKTKKPSMIACKTHIALGHAAQDTSKGHGALTDADQLKAAKEAYGWTGGAYEVPAEIKSQWEAIGQRGATARAEWEARFAEISKQKQDRFNRAFALEAPKKLSATVKALKKQISETKPKVATRKASEMALEVINPIMPETIGGSADLTGSNNTKTGDLGVFDTDNRKGRYVYWGIREHGMAAAMNGMALHGGIRPYGGTFFCFTDYARPAMRLAALSKIPTVFVMTHDSIGVGEDGPTHQPVEHLAICRATPNTYTFRPADAVETAEAWEIALTAKETPSVIALTRQGLPTVRTEHKLANLTEKGAYVLAEAESKRQVILMASGSEVSVAMAAKDILEGQGIGTRVVSVPCMELFHAQDEAYRRKVLPAGPVRVAIEAAVRDGGWDRLLLGERGQEKKAGFVGMQGFGASAPAGELFEKFGITAEGTVAKVKELLG

SEQ ID NO: 28492 - protein, 560 aa, Kluyveromyces lactis NRRL Y-1140
MPSITKKSAPFKAHSGPIPVTILSGFLGSGKTTLLERILTSNHGMKVAVIINDMSELNVDAALIKDHKVANKEEKLIQLQNGCICCTLRGDLLEELINLHQNNEFDYILIESTGIAEPMQVAETFSSEFSQTLLDTPDSVTSDERVLLQKVLDLGGLEKLTKIDTTVTVIDAMNFLANIETTDFLANRWGDSGQGEADRTVTDLMIDQIEFADVIIINKTDRIKKKRLTKIQKIIKSLNLVAKIIKTSYCKVPMSEILNTGLYNFEKAASSAGWLKSINEMTLKEGYGDKTKSVLSPTPETVEYGVNSFVYKSRKPFHPKRLYDALKDKFYIIEQQALAEQEHVDLYEVDEEEKEEERSLAATPDTSKVHELLQSEDEAESESEGDDDDEEELSERELIRNKKNSPFGPLLRSKGFFWLATRYLLRGEWSSAGPMLTLKGGIPWFHVAGLDKQEDIPPEALTLIKRDFQGPFGDRRNELVFIGTGIDSVKLKQILDDCLLTEDEYKQFVDCSLKEHNLLKVERRLSELFQDGFEDWLLYDDDDDDEDDDEEKEEEGEEED

SEQ ID NO: 28493 - protein, 405 aa, Triticum aestivum
MAAVATILCGGAVAGHQRSRRRAAPSLHVRGGSASDAAHLVCGRKLRPALFPASSFGALPLSSPGSRKLLRTSASAATPSSDSQGQAKPIGFLERYPALVTGFFFFMWYFLNVIFNILNKKIFDYFPYPYFVSVTHLSVGVLYCLISWSTGLLKRAPMNSTLLKLLLPVAICHAIGHVTSTVSFAAVSVSFAHTIKALEPFFNAAASQFILGQQVPFTLWLSLAPVVIGVSIASLTELSFNWTGFINAMISNISFTYRSIYSKKAMTDMDSTNLYAYISIIALIVCIPPALIIEGPQLVQHGFKDAIAKVGLAKLVSNIFLAGLFYHLYNQVATNTLQRVAPLTHAVGNVLKRVFVIGFSIIIFGNKITTQTGIGTAIAISGVALYSVIKAKIEEKKEGVAAAAP

SEQ ID NO: 28494 - protein, 374 aa, Oryza sativa
MAAAVVVAGEAAAAAAAAGAGGKKRGASRSWILFDAAGEERVLDADKYAIMHRVDINARDLRILDPLLSYPSTILGRERAIVLNLEVLLRDPLDDNVIPVVEELRRRLAPSSATQHDVEGAEEDESPFEFRALEVTLEAICSFLGARTTELESAAYPALDELTSKISSRNLDRVRKLKSGMTRLNARVQKVRDELEQLLDDDDDMADLYLSRKLAGAASPVSGSGGPNWFPASPTIGSKISRASRASAPTIHGNENDVEELEMLLEAYFMQIDGTLNKLTTLREYIDDTEDYINIQLDNHRNQLIQLELFLSSGTVCLSLYSLVAGIFGMNIPYTWNDNHGYVFKWVVLVSGLFCAFMFVSIVAYARHKGLVGS

SEQ ID NO: 28495 - protein, 475 aa, Idiomarina loihiensis L2TR
MSDKITTQVVVLGSGPGGYSAAFRAADLGLDVVLIERYSTLGGVCLNVGCIPSKALLHMTKHIEEAQHLAEEGIEFGEPKIDLDKLRKHKEKVVGQLTGGLGQMSKMRKVKVVNGYGKFTGSNTIKVEGDDGETEVKFDNAIIAAGSQAIKLPFIPHDDDRVWDSTDALELKEIPKKMLLLGGGIIALEMGQVYASLGSKVDVVEMTDQLVPPADADIIKNFNKQIKGRFENIMLNTKATNVEAKKDGVYVTFEGDKAPKDPVKYDAVLVAVGRAPNGNKIDADKAGVNVDDRGFIKVDSQMRTNVDHIFAIGDVVGQPMLAHKAVHESHVAAEVISGKKHFFEPKVIPSIMYTNPEVAWAGVTEKEAKEQGIEYDAVTFPWSASGRAIASNAQQGMTKLIFDKNNRIIGGSMCGTNAGELLGEVCLAIEMGCDAEDIALTVHAHPTLHESVGLAAEIQEGAITDMPNPKAKKKK

SEQ ID NO: 28496 - protein, 281 aa, Oryza sativa (japonica cultivar-group)
MECESNYSKEQRLNGDSLVFDLDDTLYPVTSGIGADVVRNIQAYMIEKLGVEESISLELCVLLYKQYGTTMAGLRAVGYQFDYDDFHSYVHGRLAYEKIKPDPVLRNILLSLPIRKVVFTNGDRIHASRALKRLGIEDCFERVVCFETLNPTSSSLSAAGQVEIFDIMKHLAHPEPGVELPKSPILCKPNIDAMRQALKVASINPKTSILFDDSARNIQAAKLIGMYTVLVGTSERIKGADHALESLHNMKEALPELWDEAVKDEDVRKSSKVGIETSVIA

SEQ ID NO: 28497 - protein, 1021 aa, Anabaena variabilis ATCC 29413
MVFTRGKVYKNHLDLQKNKGFPTPTKDSISECEAGNSDFTPEFQSYEKSILDLQEIINLLAEINPFPVAIIGLESHQILFKNKLVDNPVLQQLIPDFLADSDLWTQLNSKLVNGNFIRKLALEIKSSNENRFLAIISGKLVNYEHERAAFLVFTDVNTVIGASEEQQKDTLEKPELSNLITDTSDSQRLPTIKHSPWPAPSHLMEQALAAISNGIVLTDANQPDNPIIYVNQAFEAMTGYSAGEVIGQNCRFLQANETDQLSLSELRSALQEKKECHVVIKNFRKDGTEFWNELYIAPVFDSCGQLTHFIGVQNDITHHLQALETLQEQKEQYRRIVETASEGIWLLNENNETTFVNQQMASMLGYTIEEMLGASLFSFMDAEGLDIAQDLLLGRQQDIQEKHNFKFRCKDGSDLWAILSCTPFLDEQGNYTGALGMLTNISDVYDELRLRKQAEASLQESKERLDGILNSLEVVIWSIAADTFEMLYLNSAVVQVYGRSVCEFYDNSKLWFELIHPEDQQRVSQSIKPLLANGSHELEYRILRQDGQVRWLYNHSHVIYDAVGQPIRIEGVATDITERKNMEERLVYHAFYDDLTGLPNRVLFMDRLAQTINQAKESPNDLFAVLFLDLDRFKVVNDSLSHLVGDQLLVSFAQRLQSCLQPEDTLARLGGDEFTILLSHIQSIDDATRIAEKIHQALKLPFNLSGYEVFTTVSIGIALSSNDYVQAADLLRDADTALYCAKEQGKAWHIVFDSTMYDRAVALLQLETDLRWAIARQELYVVYQPIVSVATGKITGFEALVRWEHPERGLISPVEFIPVAEETGLIIQIGQFVLRESCQQLKQWHLEFPEFQHLSINVNLSGKQFSQPYLVEEIEQLLQEFELDANSIKLEITESAIMASPEQAATILQQLKTLGIQLCIDDFGTGYSSLAYLHCFPIDILKIDRSFTKRIDSDSEQLAIIRAIVTLASNLEMSVVAEGVETVNQLVQLQLLKCDQAQGYLFSKPLSSDKVSLLLAAKTQY

SEQ ID NO: 28498 - protein, 492 aa, Shewanella sp. MR-7
MANYFNSLNLRQQLEQLGQCRFMDRSEFSDGCNYIKDWNIVILGCGAQGLNQGLNMRDSGLNIAYALRPEAIAQKRASWQKATDNGFKVGTFEELIPTADLVLNLTPDKQHSNVVSAVMPLMKQGATLSYSHGFNIVEEGMQIRPDITVVMVAPKCPGTEVREEYKRGFGVPTLIAVHPENDPNGDGLEIAKAYASATGGDRAGVLQSSFIAEVKSDLMGEQTILCGMLQTGAILGYDKMVADGVEPGYAAKLIQQGWETVTEALKHGGITNMMDRLSNPAKIKAFEIAEDLKEILQPLFEKHMDDIISGEFSRTMMQDWANDDANLLRWRAETAETGFENAPVSSEHIDEQTYFDKGIFLVAMIKAGVELAFDTMVSAGIVEESAYYESLHETPLIANTIARKRLYEMNVVISDTAEYGCYLFNHAAVPMLRDYVNAMSPEYLGAGLKDGSNNVDNLQLIAINDAIRHTSVEYIGAELRGYMTDMKSIVGA

SEQ ID NO: 28499 - protein, 476 aa, Nocardioides sp. JS614
MPRKADLAVIGSGGAAYAAAIHATTLGKSVVMVERGTIGGTCVNTGCVPSKALIAAAEARHVAADAGRFPGIAATAGPVDMPALIGGKQALVETLRAERYVDLAESYGWPVLPGDARFDATPDAPVLQVTAADGTVETIEAEHYLVATGSRPWVPPIDGLDAVDYLTSTTAMELTEVPESLLVLGGGYVALEQAQLFARLGSQVTMLVRSRLASREEPEASSTLQQVFADEGIRVVRRAAVTSVTLDETTGQVVATAAVSGGEQEFRAERVLVALGRRPVTEGLNLDAVEVKTGDLGEIVVDDRLASSNPRIWAAGDVTGHREFVYVAASHGAVVVDNAFSGAERSVDYARLPRVTFTSPAVGSVGMTDADAVAAGYRCDCRVLPLQYVPRALVNRDTRGFIKVVADADTGRILGLTAVAKDAGELAAAGVYLLEGGMTVQQVAHAWAPYLTMAEGIKIACQSYTTDVSKLSCCAT

SEQ ID NO: 28500 - protein, 377 aa, Shewanella sp. MR-7
MLPAPHFSAFNPPRRILMGPGPSDVYPEVLAAQARPTVGHLDPLFVGMMDELKSLIQYAFQTKNEMTMAVSAPGSAGMETCFVNLVEPGEKVIVCRNGVFGERMRQNVERVGAIAVVVDNEWGTPVDPAAVEAALKANPDAKFLAFVHAETSTGALSDAKTLCALAKQYGCLSIVDAVTSLGGVELRVDEWGIDAIYSGSQKCLSCVPGLSPVSFSPAAVEKLKNRKTLVQSWFLDQSLVMAYWTSAGGKRSYHHTAPVNALYALHESLRLLAEEGLEQAWQRHKEMHLVLRAGLEKLGLKFVVAEASRLPQLNAIYIPEGVDDAAVRARLLKDYNLEIGAGLGALAGKAWRIGLMGFGARRENVALCLRALEEVLN

SEQ ID NO: 28501 - protein, 523 aa, Cryptococcus neoformans var. neoformans B-3501A
MGLSRQARIITLLVIDSVFFLIELITGYAVGSLALVADSFHMLNDVLSLIVALYTIRLATSPSSSANSYGWQRAEILGALINGVFLVALCVSIGLEAVGRIFSPPEISNPKLIVVVGSLGLLSNIVGLFLFHDHGHSHGGHAHGAVALPNDEDETSSLISRDDSVSELYQHPAQTRAQVIETAQEFGYGGTQLSSSLDSRAGHLAKSPNAGGHGRTGSASRRTKRGSFSRAGGHSRLGSANVVPPVPGQNDVLPPVGGDGNSTSSSTVIDNGKKKASKKDDHDQDHGREREQGSDSGKKLAGNASDAESGHTHGSPAEHGRHGGHGHSHGAMNMRGVFLHVVGDALGNVGVISAGLVIWFCQGRWTLYFDPGVSLVITCIIFSSALPLVKSASYILMQGVPSHVSLDAVRQCIYEVPGVDSVHELHIWQLSESTVVASVHVMIEAGRDYMVVASGIRERMHSHGIHSVTIQPEFYCEETDPQDTEACLIRCPPGQCSGDTCCPPGVKITGPEGDEGNGHDHEH

SEQ ID NO: 28502 - protein, 489 aa, Burkholderia vietnamiensis G4
MQKSPTEARHRETAVDVRSAEFIQYTSNGSAAISAQIQEESNSALGHGLKQRHVVMLSIGGSIGAGLFVGSGHAIAEAGPAAIVAYIFASLLVVLVMRMLGEMACAMPDSGSFSTYAGKAIGPWAGFTIGWMYWWFWVLVVPLEATAAANILNSWFPDVAVWKFCLGVTLLLTATNLVSVKHYGELEFWFATIKVVAIILFIACGVAAILGFIPGLHINATANIFSDGGFAPKGWAPIAGAMLTTMFTFLGTEVVTIAAAESANPAREISRAITSVVWRISLFYLGSILVIIAIVPWNDPSLTTIGSYQAVLQKIGVPYAKFIIDALILVAVGSCLNSAIYTASRMIFSLGARGQAPRAVTRTSRSGVPVAAVLASTLVAFVGCAANYLAPKSVFDALLSTTGAIALLVYLVIALSQLRMRRRILLTSKLKVRMWLHPFLGLFVVFLITGALVVMVSGETHRQEVVATLAFSGLLAVAGYAHQRWQRRR

SEQ ID NO: 28503 - protein, 422 aa, Staphylococcus epidermidis ATCC 12228
MKNFILSVQHLLAMYAGAILVPIIVGTSLKFSAEEIAYLVTVDIFMCGVATFLQANKVTGTGLPIVLGCTFTAVAPMILIGQTKGLDVLYGSLLISGILVVLIAPFFSYLVKFFPPVVTGSVVTIIGINLMPVAMNYLAGGEGAKNYGDTKNLILGGVTLLIILILQRFTKGFLKSIAILIGLAIGTALAGIFGMVDIKQVGDAHWFGFPVPFRFSGFGFDVSSILVFFIVAVVSLIESTGVYHALSEITGRKLERKDFRKGYTAEGLAIILGSIFNAFPYTAYSQNVGLVSLSGAKKNNVIYGMVILLLICGCIPKLGALANIIPLPVLGGAMIAMFGMVMAYGVSILGNINFQNQNNLLIIAISVGLGAGISAVPQAFKGLGEQFAWLTQNGIVLGAISAIILNFFFNGIKYKQTEENVK

SEQ ID NO: 28504 - protein, 347 aa, Legionella pneumophila str. Lens
MNTAPKQYGFYMPAEWYPHERCWMAWPCHHETWSKIGLDKAKMAYARVAKAIAQFEPVTLLVNPGDEDSAKNLCKGHNIEIISLPINDSWTRDTGATFLINNERQLAGVDWIHNAWGGNYADCSLDNFIASHIIKYTEAQYFHAPLVMEGGSFHVDGEGTILTSKECLLNSNRNPHLSQQEIEQYLINYLGAERIIWLNMGLIGDETDGHVDEIATFIAPGKVLCLITKDKEDPNYHRLQENFEILKSSKDARGRTFEVYTVEQPPATYLNGERLTLSYINFYMANQGIVMPAFGYESFDRLAYQLFVQIFPGYQITQIDALDVFSGGGGIHCITQQQPKSHKLVEQ

SEQ ID NO: 28505 - protein, 439 aa, Brassica rapa
MLLESDGEMSLETTNSPISSGTESCSSFSRLSFDAPPSTTAIIPEEESCLSLKPHRSSDFAYAEILRRRKHSLTFRDFRLMRRIGAGDIGTVYLCRLAGDQEESRSSYFAMKVVDNEALAMKKKMHRAEMEKKILKMLDHPFLPSLYAEFEASHFSCIVMEYCSGGDLHSLRHRQPQHRFSLSSARFYAAEVLVALEYLHMLGIIYRDLKPENILVRSDGHIMLSDFDLSLCSDSIAAVESSSSTPENYPHSSPRRLTRLAKLFNRVLRSKKVQTLEPNRLFVAEPVTARSGSFVGTHEYVAPEVASGGSHGNAVDWWAFGVFLYEIIYGRTPFAAPTNDVILRNIVKRPLSFPTDSPATMFELHARSLISGLLNKDPSTRLGSRRGAAEVKVHPFFKGLNFALIRTMTPPEVPSDVRRPKKSATFGGRSSKPAAFDFF

SEQ ID NO: 28506 - protein, 312 aa, Musa acuminata
RPGVWEYVRVNISELAVEELTVPEYLQFKEELADGSSQNSNFVLELDFATFNASFPRPSLSKSIGNGVQFLNRHLSSKLFQDKESLYPLLNFLRKHNLQGMSMMLNDRIQSLSALRAALRKAEQHLLSIPLKTPYSEFNHRFQELGLEKGWGDTARRVYENIHLLLDLLEAPDPTNLENFLGIIPMMFNVVILSPHGYFAQANVLGYPDTGGQVVYILDQVRALENEMLLRIKRQGLHITPRILIVTRLLPDAVGTTCGQRLEKVLGTEHTHILRVPFRTENGIVRKWISRFEVWPYLETYTEDVANELAAE

SEQ ID NO: 28507 - protein, 425 aa, Bacillus clausii KSM-K16
MYRMEKLQNQLKTWRRDLHKRPELGWCEYQTTAYIYHVLKPLCFTLHLGNEVSSKEKMGVPSSEVDRLHFKRAEEAGIDAKLLEKMAGNQTGLVATFDTGKAGKHMAYRFDIDALPIFESNDASHLPAKEGFRSIYDGHMHACGHDGHTAIGLGLAQLIHEHRNELNGVFTLIFQPAEEGVRGAKAIVEKGWLDHADYFLAGHIMGQPLGTVVPGVASALATTKLNVTFTGKSAHAGGNPEEGRNALLAAAQATVQLHSIPPHSQGATRLNVGTFHAGSGRNIIADRAELELETRGETTELNAYMAENAKRIIRHTAEAWGVDYAIDRVGEGISAKSDPQWLEMVKRALAASNLVEEVSDRYEAIGGSEDATFMMERVQQHGGLATYLLYGSTLAEKHHHPFFDYDERVLEIAVDSLWRLTLHLQ

SEQ ID NO: 28508 - protein, 284 aa, Candida albicans SC5314
MEKLLHWTIAQQSGDKAALEKIGEPDQKALNQLFGGPDEATLMKESIKVVESTDVSLEDKEIALENFEMLIENLDNANNIGNLKLWNPLIDILAKEDTPVELKVLICGIIGTAVQNNPKSQEDFNETEGLSELIELAQDDKKFELQSKALFAISSFIRNFQPGYAKFEKLQGLKLINFDNKNNKYQLRILSLISSILSNGLDDSLKAQFKEAKLPHYLASVLNEDSNTSLVDKSLNIVSQLNQLNYEFSLEEKYEINRGIQVVEGLSEKLNIDDLNNAKQATSS

SEQ ID NO: 28509 - protein, 766 aa, Zea mays
MAAAAILPELATQVLIPVAAAVGIAFAVVQWVLVSKVRVTPERRADGGAVKSGPSDYLIEEEEGLNDHNVVVKCAEIQTAISEGATSFLFTEYKYVGLFMGIFAILIFLFLGSVEGFSTKSQPCHYIKDQTCKPALANAIFSTIAFVLGAVTSLVSGFLGMKIATYANARTTLEARKGVGKAFITAFRAGAVMGFLLAASGLLVLYIAINLFGIYYGDDWEGLFEAITGYGLGGSSMALFGRVGGGIYTKAADVGADLVGKVERNIPEDDPRNPAVIADNVGDNVGDIAGMGSDLFGSYAESSCAALVVASISSFGINHEFTPMVYPLLVSSVGIIACLITTLFATDFFEIKAVDEIEPALKKQLIISTIVMTIGIALISWLGLPYTFTIFNFGVQKTVQSWQLFLCVAVGLWAGLVIGFVTEYYTSNAYSPVQDVADSCRTGAATNVIFGLALGYKSVIIPIFAIAFSIFLSFSLAAMYGVAVAALGMLSTIATGLAIDAYGPISDNAGGIAEMAGMSHRIRERTDALDAAGNTTAAIGKGFAIGSAALVSLALFGAFVSRAAISTVDVLTPKVFIGLIVGAMLPYWFSAMTMKSVGSAALKMVEEVRRQFNNIPGLMEGTTKPDYATCVKISTDASIKEMIPPGALVMLTPLIVGILFGVETLSGVLAGALVSGVQIAISASNTGGAWDNAKKYIEAGVSEHARTLGPKGSDPHKAAVIGDTIGDPLKDTSGPSLNILIKLMAVESLVFAPFFAAHGGILFKWL

SEQ ID NO: 28510 - protein, 708 aa, Anabaena variabilis ATCC 29413
MSALWTYFFNSAPFIPHGHCYLWQTDLVWLHIISDGLIAVAYYSIPATLFYFVRKRQDLPFYWMFLLFSGFIVACGTTHIMEVWTLWYPTYWVSGFLKAITAIISVFTALALIPLVPKALILPSPAQLERANKDLQNEIGERLKVEAELRKYQNHLEELVNIRTNEITNANEKLQQEIHERQRIVEILRESEERYRYLAEAIPQLVWTADANGECDYFNQNWCDYTGLTLEESLGSGWLAALHLEDLERSYETWSKAVETGTLYENEYRFKRAADGSYRWLLGRGLPLKDHQGRVVKWFGTCTDIHEQKQILEERARLLELEQTARAEAETANRIKDEFLAVLSHELRTPLNAILGWSKLLQERKLEPARTFQALATIERNATLQVQLIEDLLDISRILQGKLVINITKVNLVIVILTALETMRLAAESKLIQVSTNFPSKMGQVMGDSARLQQVVWNLLSNAVKFTPKGGKIEVSLEKVDGYAQIVVSDTGKGIKPEFLPYVFDYFRQADSSSTRRFGGLGLGLAIVRKIVEIHGGTVTAQSLGEEQGASFTVRLPILPEEDGNVTYEQHRSTSSITSSLPLEGIKVLVVDDDADSRDFLTFILEQEGAEVTLAASALEVLQLLPEIKPDVLVSDISMPDMDGYTLIRQVRTWTAEQGGAIPAIALTAFARQYDREQAFQAGFQLHLPKPLNAEEFFAAVVELVNGQ

SEQ ID NO: 28511 - protein, 305 aa, Triticum aestivum
MAAAHFTLNTGARVPSVGLGTYKAAPGVIADVLSAAVKAGYRHIDCAPLYHNEKEIGVALKRLFDDGVVRREDLFITSKIWCSDLAPEDVPLAIDSTLKDLQLDYVDLYLIHWPFQVKKGTEISPENFMQPDIPKTWQAMEQLYDSGKARAIGVSNFSSKKLGDLLGVARVPPAVDQVECHLGWQQAKLRAFCHSNGVHLSAYAPLGRMKDVSSNPVVTSVAESLGRTPAQIALRWGLQQCQSVLPKSANESRLKENIDLFDWSIPEELCTKLFEIKQVKQIRGDSFVHPQSIYKTYEELFDGEI

SEQ ID NO: 28512 - protein, 177 aa, Acinetobacter sp. ADP1
MRTIMQQALFGGGCFWCTEAVFQQIRGVEKIVSGYAGGVNENPTYEAVCTGETNHAEVILIDFDESQVSYDDLLHVFFAIHDPTTLNRQGNDIGTQYRSVIYYFDEHQKQDAEKLIAELKAEGMSVVTELSPMPTFYPAEDYHQDFYTKNPSQGFCNFAIPPKIAKLRSKFQSLLKA

SEQ ID NO: 28513 - protein, 736 aa, Neurospora crassa
MSNIISQAGQKAKEALTSAPSSKKVDDLKNEFKETDKSARLTTDYGVKQTTADDWLRIVSDDKIGPSLLEDPFARERIMRFDHERIPERVVHARGSGAFGKFKVYESASDLTMAPVLTDTSRETPVFVRFSTVLGSRGSADTVRDVRGFAVKFYTEEGNWDLVGNNIPVFFIQDAIKFPDVIHAGKPEPHNEVPQAQSAHNNFWDFQFNHTEATHMFTWAMSDRAIPRSLRMMQGFGVNTYTLINAQGKRHFVKFHWTPELGVHSLVWDEALKLAGQDPDFHRKDLWEAIENGAYPKWKFGIQAIAEEDEHKFDFDILDATKIWPEDLVPVRYIGEMELNRNPDEFFPQTEQIAFCTSHVVNGIGFSDDPLLQGRNFSYFDTQISRLGVNFQELPINRPVCPVMNFNRDGAMRHTISRGTVNYYPNRFDACPPASLKEGGYLEYAQKVAGIKARARSAKFKEHFSQAQLFYNSMSPIEKQHMINAFGFELDHCEDPVVYGRMVQRLADIDLGLAQTIAEMVGGEAPTTTNHPNHGRKTINLSQTEFPPATPTIKSRRVAIIIADGYDNVAYDAAYAAISANQAIPLVIGPRRSKVTAANGSTVQPHHHLEGFRSTMVDAIFIPGGAKAAETLSKNGRALHWIREAFGHLKAIGATGEAVDLVAKAIALPQVTVSSEAEVHESYGVVTLKKVKPESFTDAVKIAKGAAGFLGEFFYAIAQHRNWDRELDGLHSMIAY

SEQ ID NO: 28514 - protein, 397 aa, Saccharomyces cerevisiae
MSTEEQNGGGQKSLDDRQGEESQKGETSERETTATESGNESKSVEKEGGETQEKPKQPHVTYYNEEQYKQFIAQARVTSGKYSLQDFQILRTLGTGSFGRVHLIRSRHNGRYYAMKVLKKEIVVRLKQVEHTNDERLMLSIVTHPFIIRMWGTFQDAQQIFMIMDYIEGGELFSLLRKSQRFPNPVAKFYAAEVCLALEYLHSKDIIYRDLKPENILLDKNGHIKITDFGFAKYVPDVTYTLCGTPDYIAPEVVSTKPYNKSIDWWSFGILIYEMLAGYTPFYDSNTMKTYEKILNAELRFPPFFNEDVKDLLSRLITRDLSQRLGNLQNGTEDVKNHPWFKEVVWEKLLSRNIETPYEPPIQQGQGDTSQFDKYPEEDINYGVQGEDPYADLFRDF

SEQ ID NO: 28515 - protein, 473 aa, Lactobacillus plantarum WCFS1
MNQPAVHPNKPIADVSSKPKTSTIANSLPNLPLKTIFAITFGFCGVNMAFSLQSSQMSRIFQTIGADPTKLGLFFILPPLAGLFVQPLVGKYSDRTWTRFGRRMPYLLFSAPLAALVMVLLPNAGSFGFGYASTAALLFGAIAILFMDLSSNVCMQPFRMIIGDMVNENQKDKAWSWQQAFSNLGGVLATILPFVLTYFGVANTAQKGVVPLSVRIAFYIGAIILLGISAYTIHTVKEYDPDTYALYHHINPEQHKHTKPIWQLVKEAPKAFWEVALVQLFAWIGIQYMWTYTTGAIAENVWHTTNAASAGYQAAGNWYGILTFIQSMAAVLYGFLVLSRTNPYKRKFWYRFGLASFAVGLVWVFFIHNQYLLIAPFCLIGIGFFTVHVEPFNIFTSSLDGANEGSYIGIFNGTICLPQILASVASFMVFKFVGNSMPGMMLIAGISMFIAVLAISIIKQDNPQEDLSENPTK

SEQ ID NO: 28516 - protein, 303 aa, Triticum aestivum
MERATPVRSPHTSTADLLTWSATGADASAASPAAPSRPSLKPAGGITPAMFGAPVSEHEAEDLSNSERRLMSGSKMKEMTGSGIFAEKNENSDSESSNPANRTSVRMYQQTVTGVSQISFSADGSVSPKKPSSIPEVAKQRELSGTFETDAEAKINKQLSEAKNKELSGSNIFGPPPETPARPLAARNMELQGNVDFALPQRRSVHTSVKVSNPAGGPSNITFSEDPVAKTAKKIHNQKFQELTGNNIFNEDAPPGSADKSLSSAKLKEMSGNDIFSDGKASSRDYLGGVRKPPGGESSIALI

SEQ ID NO: 28517 - protein, 280 aa, Leuconostoc mesenteroides subsp. mesenteroides ATCC 8293
MSLNELYELNDGHQLPKIGLGTFQIRGYQGVDQILNAIQIGYRLLDTSTNYDSEGAVGEAIRRSGIPRSQFYVTTKLPGKYHHFDDALKIIEESLLRLGLDYLDLYLIHWPLPKRDNYVEAWQALIEAQRRGLVRSIGVSNFEKEHLDKIISATGVTPAVNQNEIHPYWPQESLVATNQEYGIVTEAWSPLGRGSSELTEPLILKLAEKYDKNAGQIILRWHIQRGILPVAKSTTPQHQRRNLDIFDFTLTETEVSQISDLERKDGRVDDQDPKEYEEFV

SEQ ID NO: 28518 - protein, 665 aa, Lactobacillus plantarum WCFS1
MFDKVDELGVNTIRTLSIEAIQKANSGHPGLPMGAAPMAYVLWTKHLNINPKTHMNWVNRDRFILSAGHGSAMLYSLLHLAGYDVSIDDLKHFRQWDSRTPGHPEYGHTDGVEVTTGPLGQGFGMAVGMAMAEAHLAAQYNRPNFPIVDHYTYTIVGDGDLMEGISHEAGSLAGHLKLGKLIALYDSNGISLDGKTSQAFTENVGDRFTAYGWQHLVVEDGNDLDAIDAAIELAKKTTDRPSLIEVKTVIGYGAPKQGTNAVHGNPIGADGIKAAEKVYGWNYSDFEVPSAVSDRFEVTIQENGARAEQQWKRLFEEYEAKYPDQAQSFKQAFNGQFSDDLKSTLPHYQLTDALASRAASAKAINAAAKVIPSLWGGAADLSSSNKTMIAETSDFQPESYDGRNIWFGVREFGMAAAMNGIVLHGGTRVFGGTFFVFTDYLRAAVRLSALQHAPVIYVLTHDSIAVGEDGPTHEPIEQLASLRCMPNVQVIRPADGNETSAAWEQALKTTDKPTVLVLSRQALKTLPVSVDTAFAGVEKGGYVVSAAQKEIPDGLLIATGSEVNLALEAKAQLAKHNQDVAVVSIPSFDRFAQQSPEYRASVLPSAVTRRVTIEAGSTFGWDQYAGDHGAKIGVDRFGTSAPGDLVLDKYGFNVTNVVNTYLKLK

SEQ ID NO: 28519 - protein, 464 aa, Silicibacter sp. TM1040
MAAASYDVIVIGAGPGGYVAAIRASQLGLKTCVVEREHLGGICLNWGCIPTKALLRSSEVFHLMERAKDFGLKAENIGYDLGAVVKRSRGVAKQLSSGVKGLLKKHKIDVIMGEATLPAKGKVAVKTDKGSEELTGKNIILATGARARELPGLEADGDLVWTYKHALDPKRMPKKLLVIGSGAIGIEFASFYNTLGADTTVVEVMERVLPVEDEEISKFAKKAFEKQGMKIMQKAMVKQLDRASGKVTAHIEVGGKVEKHEFDTVISAVGIVGNVEGLGLEGLGVKIDRTHVITDEYCRTGVDGLYAIGDIAGAPWLAHKASHEGVMVAELIAGKHAHPVKPESIAGCTYCHPQVASVGYTEAKAKELGYKVKVGRFPFIGNGKAIALGEPEGLIKTVFDEKTGELLGAHMIGAEVTELIQGYVVGRQLETTEEDLMNTVFPHPTLSEMMHESVLDAFDRVIHI

SEQ ID NO: 28520 - protein, 154 aa, Arabidopsis thaliana
MPVPLAPYPTPPAPALAPSYNTPPANGSTSGQSQLVCSGCRNLLMYPVGATSVCCAVCNAVTAVPPPGTEMAQLVCGGCHTLLMYIRGATSVQCSCCHTVNLALEANQVAHVNCGNCMMLLMYQYGARSVKCAVCNFVTSVGGSTSTTDSKFNN

SEQ ID NO: 28521 - protein, 346 aa, Glycine max
MDKYETVKDLGAGNFGVARLMRNKVTKELVAMKYIERGPKIDENVAREIMNHRSLRHPNIIRYKEVVLTPTHLAIVMEYAAGGELFERICSAGRFSEDEARYFFQQLISGVHFCHTMQICHRDLKLENTLLDGSPAPRLKICDFGYSKSSLLHSRPKSTVGTPAYIAPEVLSRREYDGKLADVWSCAVTLYVMLVGAYPFEDQDDPRNFRKTIQRIMAVQYKIPDYVHISQDCRHLLSRIFVANPLRRITIKEIKNHPWFLRNLPRELTESAQAIYYQRDSPNFHLQSVDEIMKIVGEARNPPPVSRAVKGFGWEGEEDLDEEVEEEDEYDKRVKEVHASGEFQIS

SEQ ID NO: 28522 - protein, 823 aa, Pneumocystis carinii
MDYLKKVRLWSEEEVGEWLESNNFGDYMDIFKENNINGDILLECNAAVLKELGVKKLGDRIRLSVCIKGLREKCIESARKSKMSFLMIDNQIQGFSFTLQSPTDPLIPVKSSELASPTSNFQLDNSYSDACCFDSLNNFHSVLSNISCSTKSISRNSSISTQKVFEKSPIFLETNVMQSDSIKKNCLKFIGEKGQTRIVNISLCYTADAILSKALKKFNITENPSEWRVFITNEDGSFECISNDTLLTISRQLSRPERERLILKRKSDPLTQEEFKKSQTIAREQRDAIYHTAVMAKTSGNLRKLETFFGEKLAPTLTSSFTTPLPSPLPKDNKYGNITHIRNFFGQRPPSELINSNLAEYFPGHEKKVLEQTIKNSIKSNHLNSFKGSNFDTPSSTLTYDLSSIPAVGEERIQYEGRRLSGVSHTLSLSRFISTRFPTLLESSILRENSSHHTLSSSSKLNSEGNTQDSKPSFRKKLEEKASSDETFKSESPNMLMEPSILSDFYDASLETDRDLLDDNIFENNEAKDFNTEKEIENNNSGPTRWIKGALIGSGSFGSVFLGMNALSGELMAVKQVEIPSIDIQGCKRKRAMLDALQREISLLKELHHENIVQYLGSSMDETHLTFFLEYVPGGSVTALLNNYGAFEEPLIRNFVRQILKGLNYLHNKKIIHRDIKGANILVDNKGGIKISDFGISKKVEANLLSMTRNQRPSLQGSVYWMAPEVVKQTLYTRKADIWSLGCLIVEMFTGKHPFPKMNQLQAIFKIGQYVSPDIPEHCTSEARHFLEKIFEPDYHARPTAADLLKYSFLGPMVSSPLTDAKK

SEQ ID NO: 28523 - protein, 630 aa, Legionella pneumophila str. Lens
MNNNTLSDDNLYNIENWGEGYFRINSKGNIEISKKPGKPGVELQTIVDAADRAGLHLPLLIRCSDILHDRVHRIYQAFTQAREDTYYAGNYQLVYPIKVNQEQSVVRELLKSPDNQIGLEAGSKPELMAVIGMLGDHQSTIVCNGYKDTSYIRTALIAQQMGHKVFIVIEKKSELDIILKESARLQIKPTLGVRIRLVSKSAGKWENTGGVKSKFGLNAKQVLELILQLKANDMLDCLQLMHCHLGSQIANIHDIRHCMQEVARYYIELRQLNAPIGTIDVGGGLSVDYEGTRSNKGCSMNYSLVEYATHIMLALKHLCQEAEISEPDLISESGRALTAHHAVLISNITDVEIINKAPVLPEISEDDSHVIRDIYDTYQAITDSSPTEIYNYAAHSLNEAHSLFKHGVISLQEKAKVEAFYTNICMEIKDKLDEENPSEKALLMRINECMAAKIFCNISFFQSIPDAWAIGQIFPVAPISQLNRTLSMHSVLQDLTCDSDGTIKQYPGSSCVTTTLMLPSYDINNPYNIGFFLVGAYQEILGNLHNLFGDTNSLDVKLSDDGQFELDDLVSGDTVTNVLNLAHFDTKKLIQSYEKQLIKSELPKEKALSYLNELRSIFSQLTYLDGNIAQ

SEQ ID NO: 28524 - protein, 341 aa, Streptomyces avermitilis MA-4680
MLGCVIHGRGDLRVDELPEPAAGPGQALVAVRYGGVCGSDLHYWRHGGVGDFRLREPMVLGHEVVGTVLSYGPGAAGPAPGTAVAVHPATPCGVCPECADGRANVCRDTRYLGSAARMPHVQGGFAARVVVPAAQVRALPEGLDLRRAALAEPLSVALHAVRRAGPVAGRPVLVTGAGPIGCLVVAAAKAAGAGRVTVTDLLPRALSYAAGVGADDVVRADDPADAGWPDSVDVAVEASGVAAGLDTCLRLVRRGGVVVQLGMLPPGQTPFAGNLVVSREIELRGAFRFADEFDEALTLLAREPAFDSLISAVVPLEEAESAFALAADRGEACKVLLDFGV

SEQ ID NO: 28525 - protein, 437 aa, Chlamydophila caviae GPIC
MPVIDETPMTYTEACRYFPGGVNSPIRACIPVGIVPPIVSSASRDVFIDSFGKNFIDFCGSWGSLIHGHSHPKILDALCSAASQGTSYGLTSENEISLATTLFSCLGLQDHKLRFVSSGTEAAMTSVRLACGVTQRSVMIKFLGCYHGHADVLLKGMTIDENNLMEVPHLVDRYFSSDPCLPLTLILPYNDLKTFEEVMEKIGERVACVIFEPIAINMGVVLPEAGWIESIITTCRRYGALSIMDEVVTGFRMGSRGMRSILDVTPDITVYGKILGGGMPVAAVLAHQSIMEHLMPVGTVFQAGTLSGNPIAMAAGQASIELCQERDFYPKLENLTEGFLSPIEDFIRCKGFPIALVRAGSMFSFFFRETPPRNLRDVQECDQKTFGIFYRHAFSRGVYLSPASMEASFISSVHSRENLAYTQNVLIDSLVKTFEGI

SEQ ID NO: 28526 - protein, 142 aa, Brassica rapa subsp. pekinensis
KNLGVRPGEALAVNFAFVLHHMSDESVSTENHRDRLLRMVKSLSPKVVTLVEQESNTNTAAFFPRFKETMDYYDAMFESIDVTLPRNHKQRINVEQHCLARDVVNIIACEGADRVERHELLGKWRSRFGMAGFTPYPLSPLV

SEQ ID NO: 28527 - protein, 371 aa, Zea mays
MAHRVLLLLSLAAAAAVAAAVDAEDPLIRQVVPGGDDNDLELNAESHFLSFVQRFGKSYKDADEHAYRLSVFKANLRRARRHQLLDPSAEHGITKFSDLTPAEFRRTYLGLRKSRRALLRELGESAHEAPVLPTDGLPDDFDWRDHGAVGPVKNQGSCGSCWSFSASGALEGAHYLATGKLEVLSEQQFVDCDHECDSSEPDSCDSGCNGGLMTTAFSYLQKAGGLESEKDYPYTGSDGKCKFDKSKIVASVQNFSVVSVDEAQISANLIKHGPLAIGINAAYMQTYIGGVSCPYICGRHLDHGVLLVGYGASGFAPIRLKDKPYWIIKNSWGENWGENGYYKICRGSNVRNKCGVDSMVSTVSAVHASKE

SEQ ID NO: 28528 - protein, 159 aa, Arabidopsis thaliana
MAEQTEKAFLKQPKVFLSSKISGKGKRPGKGGNRFWKNIGLGFKTPREAIDGAYIDSKCPFTGTVSIRGRILAGTCHSAKMQRTIIVRRNYLHFVKKYQRYEKRHSNIPAHVSPCFRVKEGDHVIIGQCRPLSKTVRFNVLKVIPAGASAFGKKAFTGV

SEQ ID NO: 28529 - protein, 207 aa, Brassica rapa subsp. pekinensis
WFQGTADAVRQYLWLFEEHNVLEFLVLAGDHLYRMDYEKFIQAHRETDADITVAALPMDEKRSTAFGLMKIDDEGRIIEFAEKPKGEQLKAMKVDTTILGLDDERAKEIPFIASMGIYVVSKNVMLDLLRDQFPGANDFGSEVIPGATDLGLRVQAYLYDGYWEDIGTIEAFYNANLGITKKPVPDFSFYGRSAPIYTQPRYLPPSK

SEQ ID NO: 28530 - protein, 468 aa, Bacteroides thetaiotaomicron VPI-5482
MKTTINLGYIIFLSVVAALGGFLFGYDTAVISGTIAQVTHLFQLDTLQQGWYVGCALIGSIVGVLFSGILSDSIGRKRTMILSAILFSTSAIGCAFCIDFNQLVVYRIIGGIGIGVVSIVSPLYISEVSVAQFRGRMVSLYQLAVTVGFLGAYLVNYQLLAYSESGNHLPIAWLEKIVVTEVWRGMLGMETLPAIIFFIIIFFIPESPRWLIVKGQERKATYILEKIYNSFKEADFQLNETKSVLVSETRSEWSILLKPGILKAVIIGVCIAILGQFMGVNAVLYYGPSIFENAGLSGGDSLFYQVLVGLVNTLTTILALLIIDKVGRKKLIYYGVSGMVVSLILIGSYFLFGNAWNISSLFLLAFFLCYVFCCAISICAVIFVLLSEMYPTKIRGLAMSIAGFALWIGTYLIGQLTPWMLQNLTPAGTFFLFAIMCVPYMLIVWKLVPETTGKSLEEIERYWTRSER

SEQ ID NO: 28531 - protein, 280 aa, Propionibacterium freudenreichii subsp. shermanii
MIIPTTPTPTVELSGGTRMPMLGMGTWPLKGEECRAAVASAIEQGYRLVDTAEAYGNEEAVGKAVREAGPDRAEIFVTTKFSKQWHSRKGVHEALEHSLERLGLDYVDLFLMHWPMPGEGSYVDAYRGMVELKEQGLAKAIGVSNFKVHHLDDLITEGMTPEVNQIQLDPSRPRLEVRDFLDNHDIVTEAWSPLGRGADGVLNAPAVLDAAKKHGITPAAAVLAWELNQGIVTIPKSANPEHQRTNLEAIGVELSAQEMKAIDALADPNAKIDDSDKTGN

SEQ ID NO: 28532 - protein, 369 aa, Perilla frutescens
MAEAVTPGICTTGWRRGGVHAPTYNISIKPATALLVGCTTKTKSITSFSTDSLRTRGRARRPTMSLNAAAAEMETEMETLRKGIAEFYDESSGVWENIWGDHMHHGFYEPAADVSISDHRAAQIRMIEESLRFASFSPITTTEKPKNIVDVGCGIGGSSRYLARKYGAKLSRAITLSSPVQAQRAQQLADAQGLNGKVSFEVADALNQPFPEGKFDLVWSMESGEHMPDKKKFVNELVRVAAPGGRIIIVTWCHRDLSPSEESLRQEEKDLLNKICSAYYLPAWCSTADYVKLLDSLSMEDIKSADWSDHVAPFWPAVIKSALTWKGITSLLRSGWKTIRGAMVMPLMIEGYKKGVIKFAIITCRKPAS

SEQ ID NO: 28533 - protein, 616 aa, Pseudomonas syringae pv. phaseolicola 1448A
MSGKAQQQSRIKELITLGREQKYLTYAEVNDHLPEDISDPEQVEDIIRMINDMGIPVHESAPDADALMLADADTDEAAAEEAAAALAAVETDIGRTTDPVRMYMREMGTVELLTREGEIEIAKRIEEGIREVMGAIAHFPGTVDHILSEYTCVTSEGGRLSDVLSGYIDPDDGIAPPAEVPPPVDPKAVKAEGTDDDEEESADASDDEDEVESGPDPVIAQQRFGAVSDQMEITRKALKKFGRDDKHAIAEMVALAELFMPIKLVPKQFEGLVERVRGALERLRAQERAIMQLCVRDARMPRADFLRQFPGNEVDESWTDALAKGKSKYAEAIGRLQPDIQRCQQKLSALEEETGLKIAEIKDINRRMSIGEAKARRAKKEMVEANLRLVISIAKKYTNRGLQFLDLIQEGNIGLMKAVDKFEYRRGYKFSTYATWWIRQAITRSIADQARTIRIPVHMIETINKLNRISRQMLQEMGREPTPEELGERMEMPEDKIRKVLKIAKEPISMETPIGDDEDSHLGDFIEDSTMQSPIDVATVESLKEATREVLSGLTAREAKVLRMRFGIDMNTDHTLEEVGKQFDVTRERIRQIEAKALRKLRHPTRSEHLRSFLDE

SEQ ID NO: 28534 - protein, 513 aa, Bacteroides thetaiotaomicron VPI-5482
MAQEDVFKKLVSHCKEYGFVFPSSDIYDGLGAVYDYGQMGVELKNNIKKYWWDSMVLLHENIVGIDSAIFMHPTIWKASGHVDAFNDPLIDNKDSKKRYRADVLIEDQLAKYDDKINKEVAKAAKKFGESFDEAQFRSTNGRVLEHQAKRDALHTRFSKALNDNNLDELRQIIVDEEIVCPISGTKNWTEVRQFNLMFSTEMGSTSDGAMKIYLRPETAQGIFVNYLNVQKTGRMKVPFGIAQIGKAFRNEIVARQFIFRMREFEQMEMQFFVKPGTELDWFKKWKEIRLKWHKALGFGDASYRYHDHDKLAHYANAATDIEFLMPFGFKEVEGIHSRTNFDLSQHEKFSGKSIKYFDPELNESYTPYVIETSIGVDRMFLSIMSAAYCEEQLENGESRVVLKLPAALAPVKLAVMPLIKKDGLPEKAREIIDALKFHFHCQYDEKDSIGKRYRRQDAIGTPFCVTVDHQTLEDNCVTLRNRDTMQQERVAISELNNIIADRVSITSLLKTLQ

SEQ ID NO: 28535 - protein, 966 aa, Zea mays
MARNAVDKATSIDAQLRLLAPQKLSDDDKLVEYDALLLDRFLDILQDLHGEDIRETVQECYELAAEYENKLDPKMLDEIGNVLTSLDPGDSIVITKSFSHMLILANLAEEVQIAYRRRIKLKKGDFVDENSATTESDIEETLKRLMHQLKKSPLEVFDALKNQTVDLVLTAHPTQSVRRSLLQKHGRIRNCLTQLYAKDITPDEKQELDEALQREIQAAFRTDEIRRAPPTPQDEMRAGMSYFHETIWKGVPKFLRRVDTALKNIGINERLPYNAPIIQFSSWMGGDRDGNPRVTPEVTRDVCLLARMMAANLYNAQIEDLMFELSMWRCSDELRVKVDQLYHSSKKDTTKHYIEFWKQVPPSEPYRVILSDVRDKLYNTRERARHLLASGFSEIPEEATFTDVEQFLEPLELCYRSLCACGDRSVADGSLLDFLRQVSTFGLSLVRLDIRQESDRHTDVMDAITEYLGIGSYRKWPEEKRQEWLLSELNGKRPLFGPDLPKSDEIADVLDTFHVLAELPSDSFGAYVISMATAPSDVLAVELLQRECHVKKPLRVVPLFEKLADLESAPAALARLFSVEWYRNRISGKQEVMIGYSDSGKDAGRFSAAWQLYKAQEELINVAKLYGVKLTMFHGRGGTVGRGGGPTHLAILSQPPETIHGSLRVTVQGEVIEQSFGEEHLCFRTLQRFTAATLEHGMHPPISPKPEWRALMDEMAIVATKEYRSIVFEEPRFVEYFRLATPEMEYGRMNIGSRPSKRKPSAGIESLRAIPWIFAWTQTRFHLPVWLGFGAAFKHVLDKDIRNLQTLQEMYNQWPFFRVTIDLVEMVFAKGDPGIAALYDKLLVSEDLWPLGARLRANYEETKQLLLQVAGHKDLLEGDPYLKQRLRIRDSYTTALNVCQAYTLKRIRDPGFQVKPRPHLSKDIMDMGKPASELVKLNTTSEYAPGLEDTLILTMKGIAAGMQNTG

SEQ ID NO: 28536 - protein, 157 aa, Propionibacterium freudenreichii subsp. shermanii
MTALDPFREIERLLGTAMRQAPSAAAIPMDLYRSGDDAFVAKIDLPGVDPDSIDIDVDDRTLTVRAERRPEEAEAQWLVRERPAGIFARQLTLGRGLATDRIEAGYADGVLTLTIPVAEESKPRKIQVTASDRTAAIEQGSSSGEQQATGEGSGQRQ

SEQ ID NO: 28537 - protein, 370 aa, Synechococcus elongatus PCC 6301
MAPMSETLVVKIGTSSLTNPHHPGLALSTIAGLVEVICQLRRQGYNVVLVSSGAVGVGCTRLGLRDRPSRIAQRQAIAAVGQGRLMRTYDDLFTTLGQPIAQVLLTRGDLAQRQRYINAYQTFQELFELGVVPIVNENDTVAVEELKFGDNDTLSALVASLVEAQWLFLLTDVDRLYTADPRQDPNAKPITIVHDLSELESIQAGGQGSRWGTGGMATKLTAAKIATQASVRTVITQGRSPENLLKILAGEAIGTWFEPQPETVNARKRWIAHGLVPTGKLLLDAGAVQAIQAGGKSLLAAGIQAIEGDFEAQDAVQLCDLNGTEIARGLVNYDSHELQQIRGCQSDQIVQILGYEGAETIVHRDNLVLS

SEQ ID NO: 28538 - protein, 316 aa, Bacillus cereus G9241
MIPVTILTGFLGSGKTTLLNRILTENHGQKLAVIVNEIGQIGIDNQLIMNVEEEIMEMTNGCLCCTVREDLLVALKQLLDVKAEGKMDFDGLVIETTGLANPGPIIQTFFLDPVIQSAYQINGVVTVVDSYHIHKHFEKGLEAKEQIAFADVVLVNKLDLIEESEKENLLHELQGINPTAKLIQSINCDVDIPSLLKIQTFKTKDTLQIYPHTEHNHLEGVKSFVLREERPLDLQKLNEWMSAVVQELGEYLYRYKGILSIDGVDKRIVFQGVHTLFAASYDREWQEGEERVSEVVFIGKDINKEWFQEHFKECVK

SEQ ID NO: 28539 - protein, 259 aa, Bordetella parapertussis 12822
MISLPYLQRFALSGQVALVTGSARGLGLRIAQALAGSGAHVLLNGRDAHAVEAAVSDLCQQGLRASALPFDVSDEQATEQAFARIDAEHGRLDILVNNVGARNRKPLAETSPAEIRAMMDTNLVAGILLARLAAQHMVRQRYGRLIAITSVAGELARANDAVYPAAKQGLTGMMRALAVEFGRHGITSNAIAPGAFATETNAAMANDPQAGAAMAARNPTGRWGDPEEIAGAAVFLASPAASYVNGHVLVVDGGLSVQF

SEQ ID NO: 28540 - protein, 459 aa, Yarrowia lipolytica CLIB122
MIPLRTARVARTSVSSMVQKRFASDLKGALKEAIPAKLELFKKVKSEYSQKSLGDCKVENLLGGMRGLKCMLWEGSVLDADEGIRFHGKTIKECQEVLPKAVEGGEMLPESMLWFLFTGKVPTEEQVRGLSRELAEKGEVPEFVNKMLDNLPPTLHPMTQFSMAVSALNHDSKFAKAYERGIPKSEYWEYTFDDSIDLIAKLPQIAAKIYQNSYLGGGPLPGKIDLNRDWSYNYAAMMGKGDETGFVDLLRLYFALHGDHEGGNVSAHATHLVGSALSDPYLSYSAGLQGLAGPLHGLAAQEVLRFILDMEKNVPKGYSNEDLVKYLWSVLKSGRVIPGYGHAVLRKPDPRFEALMNFANSRQEIRDDPVFQLVSRTSEVATGVLTEHGKTKNPHPNVDSSSGVLFHHYGIHETLYYTVTFGVSRALGPLPQLVWDRILGLPIERPKSLSLEEIIKVAK

SEQ ID NO: 28541 - protein, 67 aa, Mesembryanthemum crystallinum
QNLDSLQGVLRKAEEFLSALPADTHYSEFEHKFQELGLERGWGDTAERVQDMIQLLLDLLEAPDSCS

SEQ ID NO: 28542 - protein, 213 aa, Bacillus cereus ATCC 10987
MEDAVNEYLLSFIDPKDKLILEMEDYAKENHVPIMDRLGMEFMLQFLRLIGPKSILELGTAIGYSSIRMMQAIPNSRIVTVERNRDRYEKALEYIERSPVKERISVIYGDALETGEQVEEHGTFDVIFIDAAKGQYRRFFDLYEPLLNPGGVIISDNVMYHGLVTTKEKIENRRTRGLIRRIKTYNEWLMNHEGYDTTIFPIGDGVAVSKKKG

SEQ ID NO: 28543 - protein, 252 aa, Bordetella parapertussis 12822
MRLNGKTAIVTGAGSGFGEGIAATFAREGAKVVVADINEAGGQRVAAAINAAGGQAVFVRADVSDNAAVANLLAATLKAFGGLDIVVNNAGTTHRNRPMLEVEEDEFDRIYAINVKSIYLTARHMVPHFRAHGGGSFINIASTAAIRPRPGLTWYNGSKGAVVTTSKSMAAELGPDNIRVNCVNPVIGATGLLADFMGVPDTPENRKRFLATIPLGRFSTPQDIANACLYLASDEAAFITGACLEVDGGRCV

SEQ ID NO: 28544 - protein, 217 aa, Lactobacillus plantarum WCFS1
MKFFLDTANTEDIKHFAELGLVDGVTTNPTLVSREGRDFETVIKEITQIVSGPVSAEVTATKAEEMIAQARNEIKWASNIVVKIPMTEEGLKAVKVLSGEGIKTNVTLVFSVSQGLLAAKAGATYISPFLGRLDDIGGNGIQLVKDLRQVLDTYGFKTEIIAASVRGPQHVQEAALAGADIATIPATVFGKLWSHPLTDKGLASFASDWKAFQATQK

SEQ ID NO: 28545 - protein, 444 aa, Yarrowia lipolytica CLIB122
MREIVHLSIGQCGNQIGSAFWQTISGEHGIGADGVYGGEEDIQRERLNVYYNEAAANKYVPRAVLVDLEPGTMDAVKGGPYGELFRPDNFVFGQSSAGNNWAKGHYTEGAELVDQVLDVVRREAENCDSLQGFQITHSLGGGTGSGMGTLMIAKIREEFPERMMATFSVVPSPKVSDTVVEPYNATLSVHQLVEHSDETFCIDNEALYDICMRTLQLPHPVYGDLNHLVSSVMSGVTTCLRYPGQLNSDLRKLAVNLVPFPRLHFFMVGYAPLTSLKSANFRSLSVPELTQQMFDSRNMMAASDPKHGRYLTAAAFFRGKVSVKEVEDQMLSVQTRNSNYFVEWIPHNVQTAVCSQPPKGLPMSGTFVGNSTSIQELFKRVGDQFSAMFRRKAFLHWYTSEGMDEMEFSEAESNMNDLVCEYQQYQEAQVDDEEGEFYDEQDMM

SEQ ID NO: 28546 - protein, 352 aa, Lactobacillus plantarum WCFS1
MEAVVKTESGYDNMELKQIPIPEVTGDKVLLKVAYTGICGTDIHTFKGQYANAVTPLVLGHEFSGEVVEVGPDVKTLKPGDRVTSETTFATDGTCVYCQDKEYNLCPNRVGIGTKANGSMANYVLTREESAHILPDNVSYKMAAMSEPLASCVHAMYQKTPFTLHDTLLIMGPGPMGLLSLQIAKEIGAFVIVSGITKDADRLQIAKELGADIIVDTQKEDLAKVVMDATDGVGVTKVYDCSGATPAVNSALPLIRKGGTFQQVGLFAKPMNELDERSIIQHEITYRGSRSQNPYDWAIALHLESKGAINQDAMITKVFDLEHWRDAFDAMMAGKELKVMIASNPDDPDLAD

SEQ ID NO: 28547 - protein, 483 aa, Nicotiana tabacum
MDFIIYLFLSFSISLITFLLLRAAAAAHFRRRKTRLPPGTLGLPFIGETLQLISAYKTENPEPFIDDRVSKYGNIFTTHIFGEPTVFSTDAETNRFILQNEGRPFESSYPSSLQNLLGKHSLLLMRGSLHKRMHSLTMSFANSSILKDHLLADIDRLVRLNLDSWTGRVFLMEEAKKITFNLTVKQLMSLDPCEWTEKLMKEYMLVIEGFFTIPLPFFSSTYRKAIQARRKVAEALGLVVKERRKERGGGERLKNDMLEALFEGDGVEGFSDEVIVDFMLALLVAGYETTSTIMTLAVKFLTETPHALSLLKEEHEEIRLRKGDVESLLWEDYKSMPFTQCVVNETLRVGNIISGVFRRTMTDINIKGYTIPKGWKVFACFRAVHLDHEHFKDARTFDPWRWQSNAGSTSSPNVFTPFGGGPRRCPGYELARVELSVFLHHLVTRHSWVPAEPDKLVFFPTTRMQKRYPIIVQRRSLFDPCKE

SEQ ID NO: 28548 - protein, 459 aa, Leuconostoc mesenteroides subsp. mesenteroides ATCC 8293
MENGSTKRIASSFIYFFGAFGGILFGYDIGVMTGALPFLQKDWHLTDAGTIGWITSTLMLGAILGGALAGQLSDRLGRRRMILASSFIFAVGAIMAGVSPNNGVVWLLIARFLLGLAVGAASALVPSYMSEMAPAKNRGRLSGLNQLMIVSGMLLSYIVDYLLQGLPHTIAWRLMLGLAAVPAIILFVGVLRLPESPRFLVKTHKLAEARQVLTYIRTASEVDPELEDIQNTVAIESGAQKNITLSTLFSSKYRYLVTAGIGVAAFQQFMGANAIFYYIPLIVEKASGQAASSALLWPIVQGVILVLGALLYMVIADKFKRRTLLMVGGTVMALSFLMPSALNALVGADKFPPMLIVVFLSIFVAFYSFTWAPLTWVLVGEVFPLAIRGRASGLASSFNWLGSFAVGLLFPIMTAAMPQATVFAIFGVISIIAVLFIKFAVPETHGRTLEEIEAQGTNH

SEQ ID NO: 28549 - protein, 241 aa, Zea perennis
SIRNNPVQNKLMNGEDPINNHAQTAGLGVRLATSSSSRDPSPSDEDMDGEVEILGFKMPTEERVRKRKESNRESARRSRYRKAAHLKELEDQVAQLKAENSCLLRRIAALNHKYNDANVDNRVLRADMETLRAKVKMGEDSLKRVIEMSSSVPSSMPISAPTPSSDAPVPVPPPIRDSIVGYFSAPAADDDASVGNGFLRLQAQEPAAMIVGGTLSATEMNRVAAATHCAGAMELIQTAMG

SEQ ID NO: 28550 - protein, 336 aa, Idiomarina loihiensis L2TR
MKTIDVVGIGNALVDQEFEVSEDFLKKHDLKKGMMELIDEYAQNTLIAELSQLGELKKQSGGGSAANSLVAFAQFGGKAYYCCKVADDEAGMFYRQDLEKIGIETSLHQQKNPGTTGRCLVMVTPDAERTMRTHLGITADLSSAEIDDHAIAAADYLYIEGYLITSEIARGAIQHAKKVARENNTKLVMTCSDPAMVKFFRSGIDEILDGGVDLMFCNREEAELLTGKDDPQAALSVLLKQADTVAITLGKDGAVIANRERQVHIPGVPVKAIDTNGAGDMFAGAMLYGLTRNMSLEDAGRLASHAAAELVTEFGPRLNKDRQQQLIERVMSAQTA

SEQ ID NO: 28551 - protein, 298 aa, Zea mays
WIGKIIHLAPAAAAFCCTQVQSLILRCLQMYMDQKEVVDALSHHSKIEPCITELVWRQLEHQNPLFFKAYYMRLMLKTQIMVFNKLLQDQFEVINKEFSSGIPSMSLPNGSNSNLLKQNSCFLPETAPGSAMPDGIMHNGSSRGIINGTPSGDQLLNASKDLHGLHNGIDASTSLQSDQNAAAVLYGVDNETSATIKTESCYSSNADFAFCGNTFLESCQSIGDASGGGSFSSSELNGQPLNDSILDMESSSFSFLNQMPQSFIFPDLADDFNQSAEITPFLTPETNFSDSTGGDHTG

SEQ ID NO: 28552 - protein, 449 aa, Clostridium symbiosum
SKYVDRVIAEVEKKYADEPEFVQTVEEVLSSLGPVVDAHPEYEEVALLERMVIPERVIEFRVPWEDDNGKVHVNTGYRVQFNGAIGPYKGGLRFAPSVNLSIMKFLGFEQAFKDSLTTLPMGGAKGGSDFDPNGKSDREVMRFCQAFMTELYRHIGPDIDVPAGDLGVGAREIGYMYGQYRKIVGGFYNGVLTGKARSFGGSLVRPEATGYGSVYYVEAVMKHENDTLVGKTVALAGFGNVAWGAAKKLAELGAKAVTLSGPDGYIYDPEGITTEEKINYMLEMRASGRNKVQDYADKFGVQFFPGEKPWGQKVDIIMPCATQNDVDLEQAKKIVANNVKYYIEVANMPTTNEALRFLMQQPNMVVAPSKAVNAGGVLVSGFEMSQNSERLSWTAEEVDSKLHQVMTDIHDGSAAAAERYGLGYNLVAGANIVGFQKIADAMMAQGIAW

SEQ ID NO: 28553 - protein, 244 aa, Zea perennis
SIRNNPVQNKVMNGEDPINNNHAQTAGLGVRLATSSSSRDPSPSDEDMDGEVEILGFKMPTEERVRKRKESNRESARRSRYRKAAHLKELEDQVAQLKAENSCLLRRIAALNHKYNDANVDNRVLRADMETLRAKVKMGEDSLKRVIEMSSSSVPSSMPISAPTPSSDAPVPVPPPIRDSIVGYFSAPSADDDASVGNGFLRLQAQEPASMIVGGTTLSATEMNRVAAATHCAGAMELIQTAMG

SEQ ID NO: 28554 - protein, 188 aa, Brassica rapa subsp. pekinensis
AGGVQFGWALQLSLLTPYVQELGIPHAWASVIWLCGPLSGLFVQPLVGHSSDRCTSKYGRRRPFIVAGAVAISISVMVIGHAADIGWAFGDREGKIKPRAIVAFVLGFWILDVANNMTQGPCRALLADLTGKVPDFSVDWVKGSKFGILVIIHSHAKHGNAQICDFGYNLGYWSIAIKRSLLCFWSVA

SEQ ID NO: 28555 - protein, 242 aa, Zea diploperennis
SIRNNPVQNKLMNGEDPINNNHAQTAGLGVRLATSSSSRDPSPSDEDMDGEVEILGFKMPTEERVRKRKESNRESARRSRYRKAAHLKELEDQVAQLKAENSCLLRRIAALNQKYNDANVDNRVLRADMETLRAKVKMGEDSLKGVIEMSSSVLLSMPISAPTPSSDAPVPPPPPIRDSIVGYFSAPAAEDDASVGNGFLRLQAQEPASMVVGGTLSATEMNRVAAATHCAGAMELIQTAMG

SEQ ID NO: 28556 - protein, 321 aa, Triticum aestivum
MSTSMSVSVSAAASSSLPPLLARRRSPPASLVPVRSLRSCPRPRLLSSARTTPVLLPAAAMAAPAPAASSKRDLLIFDAEENLAVALAKYTADISAKFAAERGAVTVVLSGGSLIYALRKLTEAPYLETVDWSKWHVFWVDERVVPKDHEDSNYKLALDGFLSKVPIPAGQVYAINDALSAEGAAEDYETILKQLVKNGVLAMSKTTGFPRFDLQLLGMGPDGHIASLFPGHPLVKENKKWVTHILDSPKPPPQRITFTFPVINSSAYVAMVVTGAGKAGAVQKAISDKKTSDLLPVEMAILDDGEFTWFTDKEAVSMLQN

SEQ ID NO: 28557 - protein, 339 aa, Glycine max
MNAIATAAVLSLPFSFSKSSKLDTKKGLKGRFRVFAVYGEEIDKKNAWSALFDVEDPRSKVPQYKGKFLDVYQALEVARYDIQYCDWRARQDLLTIMLLHEKVVEVLNPLARDYKSIGTMKKELAELQEELAQAHQQVHISEARVSSALDKLAYMEELVNDKLLQERSTTEVSQTSSSPSTSFKPVDIEKRRSPRKSLDISGPVQSYHPHLKNFWYPVAFSTDLKDDTMIPIECFEEPWVIFRGKDGKPGCVQNTCAHRACPLHLGSVNEGRIQCPYHGWEYTTDGKCEKMPSTRLLNVKIKSLPCFETEGMIWVWPGNDPPTATLPSLLPPSGFEVHA

SEQ ID NO: 28558 - protein, 404 aa, Streptococcus agalactiae A909
MANASLRHQLFEKLDQKCDQMVAIRRYLHENPELSFKETKTAAYISDFYKGKDCHVQTQFGGMNGVVVDIYGDKATDKPIKHIALRADFDALPIQEETGLSFASKTAGVMHACGHDAHTAYLLILAESLIELKSEFSGHIRILHQPAEEVPPGGAKAMIEAGCLDGIDAVLGIHVMSTMEEGTVQYHAGPIQTGRATFKVILQGKGGHGSMPHRANDTIVAASSFVMAAQTIVSRRVNPFDTAVVTIGSFDGKGSANVIKDSVTLEGDVRVMSEETRGVVEEEFKRILDGIAQTYGVSYQLDYQNDYPVLVNNSEVTQKVANSLKSVAIKEILDVIDCDPQTPSEDFAYYAQTIPACFFYVGAHEEGQPYYPHHHPKFQIAESSLMVSAKSMATAALAMLVEGE

SEQ ID NO: 28559 - protein, 338 aa, Bacteroides thetaiotaomicron VPI-5482
MKAVQIVNPSEMKVVELEKPTVGAGEVLVRIKYVGFCGSDLNTFLGRNPMVKLPVIPGHEVGAVIEEIGPDVPAGFEKGMNVTLNPYTNCGKCASCRNGRVNACEHNETLGVQRNGVMCEYAVLPWTKIIPAGNISSRDCALIEPMSVGFHAVSRAQVIDNEYVMVIGCGMIGIGAIVRAALRGATVIAVDLDDEKLVLAKRVGASYAVNSKTENVHERIQEITAGFGADVVIEAVGSPVTYVMAVDEVGFTGRVVCIGYAKKEVAFQTKYFVQKELDIRGSRNALPADFRAVINYMKEGKCPVEELISKIAKPEDALEAMKEWAADPGKVFRILVEM

SEQ ID NO: 28560 - protein, 363 aa, Ralstonia solanacearum
MSTVGSFQIDYTQYLDPEGQPVQPLPAFAQDVPTLLALYRAMVLTRAFDTKAIALQRTGKLGTFASSVGQEAIGVGVASAMRAEDVLFPSYRDHSAQLLRGVSMAESLLYWGGDERGSCFAAVREDFPNCVPIGTQVCHAAGAAYAFQLRREPRVAVAVFGDGGTSKGDFYEGMNLAGVWGAPLVLIVNNNQWAISVPRSRQTAAQTLAQKAIAAGIAGRQVDGNDVIAVRQAAQDALDKARSGGGPTLIEALSYRLGDHTTADDATRYRDPDSVKQAWAREPILRLRNYLMRLSAWDKAQEEQLGRACYAQVEEAVAAYLAVGQPGPSAMFDHLYAALPRALEAQRAMALAFAPQGGEGGHG

SEQ ID NO: 28561 - protein, 493 aa, Pseudomonas syringae pv. phaseolicola 1448A
MNKPLDPASMPAIPESAVSQWPDVDSLYRRFDELVKQPIRPIKREAMSKVMGYFDERCQGSKRLSEAAKKVIPGGVQHNLAFNYPFPLAFAQAKGAHLTDVDGNRYTDFLQAGGPTLLGSNHPAIRKQVNRILDECGPVTGLLHEYEVKLAELVCEVMPGVDMLRLLGSGTEAVMAAVRLARAYTRKKWVIKIGGAYHGWSDQLVYGMRLPGTGRMEAVGIPRGATANTQESPPNNLDALRRRLQINRLRGGTAAIMVEPFGPESGTRPVHADFNRQLRALCNEFGALLIFDEVVTGFRAGLGGAQAYFNVMPDITVLGKCLTGGYPMAGAIGGRRDVMQLLAGGIGTSSRRAFVGGTLSANPLSCVAGYYALLEARRLNAPALAGRAGDRMRAGLDEIINRRGLPYVAYNMGSIVHLQTSGVLLLDTSNPLKLLRARNEAKTRKHMMEEMGAAYTAHGLITLAGSRIYTSLADTDDVIDDALDRFDAVFQLV

SEQ ID NO: 28562 - protein, 160 aa, Brassica napus
  misc_feature (37)..(37): Xaa can be any naturally occurring amino acid
  misc_feature (153)..(153): Xaa can be any naturally occurring amino acid
  unsure (1)..(160): unsure at all Xaa locations
FRESPNLWLFGDNMGPAREDTPLLGKERPLSSQFKTXANVFIAIVGAGVLGLPYAFKRTGWLMGVLTLFSVAALITHCMMLLVHIRRKLGAANIGSFGDLGFAVCGPLGRFLVDILIILSQAGFCVGYLIFIGTTLANLFNPTTTLTLRHVSXKSLYIWG

SEQ ID NO: 28563 - protein, 428 aa, Rickettsia rickettsii
MSNQRVNKRVVITGLGLVTPVGLNVNSSWKNIVDGVSGIKTITEFDTSKLACKIAGLIDNSEKDGFKLENFTQADDINRLSKMDKFIHYGVAAATEAVEDSGWLPDDEKSRDRTGLILGSGIGGLKMIEDTSIKLYQENNGKVSPFFIPASLINLLSGLVSIKYGFSGPNQTAVTACSTGAHAIGDAMRMIKHGYADVMIAGGAEAPVTPVGVAGFVAARALCTKYNDNPKKASRPWDKDRSGFVMGEGAGVVVLEEYEHALNRGAKVYGEVIGYGSTGDAYHMTAPHPEGRGAYRAMRDAMLDATITPDMIDYINAHGTSTTLGDGIELAAVQKLFLEANPKVLMSSTKSSIGHLLGAAGSVEFIFSALAIRDQIAPPTLNLDTPMDEVNIDLVALKAKKTKIDYVLSNSFGFGGTNASLVIKSILV

SEQ ID NO: 28564 - protein, 609 aa, Glycine max
FGSSAMIGEISLEEQHLRIENARLKDELDRVCALAGKFLGRPISSLTGSIGPPLPNSSLELGVGSNGFGGLSTVPSTMPDFGVGISSPLAMVSPSSTRPTTTVTTTLVTPPSGFDNRSIERSIVLELALAAMDELVKMAQTDEPLWIRSLEGGREILNHDEYTRTITPCIGLRPNGFVTEASRQTGMVIINSLALVETLMDSNRWSEMFPCMIARTSTAEVISNGINGTRNGALQLMHAELQVLSPLVPVREVNFLRFCKQHAEGLWAVVDVSIDTIRDTSGAPTFVNCRRLPSGCVVQDMPNGYSKVTWVEHAEYDESQIHQLYRPLLSSGTGFGAQRWVATLQRQCECLAILISSAVPSREHSVSSGGRRSMLKLAQRMTNNFCAGVCASTVHKWNKLNAGNVGEDVRVMTRKSVDDPGEPPGIVLSAATSVWLPVSPQRLFDFLRDERLRSEWDILSNGGPMQEMAHIAKGQDHANCVSLLRASAINANQSSMLILQETCTDASGSLVVYAPVDIPAMHVVMNGGDSAYVALLPSGFAIVPDGSVEENGGASQQRAASGGCLLTVAFQILVNSLPTAKLTVESVETVNNLISCTVQKIKSALHCES

SEQ ID NO: 28565 - protein, 140 aa, Synechococcus elongatus PCC 6301
MTEKIRKSEEEWRAQLTPEQFQVTRKHGTERAFTGAYWDTKDPGLYRCICCDAPLFRSDTKFDSGTGWPSFWAPVDESAITYKKDFSFLMMRTEILCARCDAHLGHVFPDGPKPTGQRYCLNSASLKLDTETPASPSSEA

SEQ ID NO: 28566 - protein, 455 aa, Yarrowia lipolytica CLIB122
MRLVSFLPLLLIHTTAATSADTTAVDLSDFYAGTNPSALDSAISVPEGNYKPKHVVHISRRRLICRTNEDTGEEICKVDNSDPQESIIEEVDCSKKERNTNVGLRVGALFAVLGTSALGVFPPVLAESIWRINLETLPMTFIKQFGTGVVLSTAFVHLGAEATEEFNNPCIGEVEYKPTPLAFVLAGLFISFLIEYLGARLLRWRANTLEARRNENQDCEETKCGHDHDHGHIIDNTGGDTEDSDNGGEPVQEIVEDVIEKAPSRLSSSSVRRSTTQTTAPPPPIAGGCHSHGLIDPTDKFSVWIMEAGIIFHSVLVGVTVSLAEEDTFITLFIAILFHQMFEGVGLGSRIAGLKESRLISKCLMCLWFSIITPIGMAIGLGVLDHFEENPTTLWALGSIDGLCCGVLVYAGVVEMLGFDWLFGDLQDAPPLRVCVGLVGLTLGMLLMSLVGHWA

SEQ ID NO: 28567 - protein, 422 aa, Zea mays
YYYNGQKLPFAAAQIGQAFRFEISPRQGLLRVREFTLAEIEHFVDPEDKSHPKFVDVADLEFLMFPRELQLSGESAKLMKLGEAVSKGTVNNDFLGYFIGRVYLFLTSLGIDKGRLRFRQHLPNEMAHYAADCWDAEIECSYGWIECVGIADRSAYDLKAHTDKSGVPLVAHEKFSKPREVEKLVIVPSKKDLGLAFKGNQKMVLEALEAISEKEAFEMKAELETKGETNFKVCTLGKDVVITKKMVSISMEKKLEHQRVFTPSVVEPSFGIGRIIYCLFEHSFYTRPSKSEEEQLNVFRFPPLVAPIKCTVFPLVKNQEFDDAAKVIAKALTTAGISHIIDTTAISIGRRYARTDEIGVPFAVTVDSATNVTIRERDSKEQVRVDIDEVAPVVKQLTEGQSTWTDVSAKYPAHVGPQSEQE

SEQ ID NO: 28568 - protein, 581 aa, Treponema denticola ATCC 35405
MKELIRKSTMGHPKQMTEPVIWYFLEGFTVGFPAVAVYFAINLFITYFNNPSIIFDKGYWNIALWLAGFFLLQLTVSTVTFLKTFLPGARNSAQNKKDFIQKIKRLPLGFFSKTRSGELINTFTGDFLAIEQGMVGSFTGLFGVVFSCILTSVFMFWFNWKMALAFYIALPISAIIILISFKVLGNLIVSSRTAKDNTAEALNEYLSGMKILRSYNQIGKGFSKLEDAYKNLKDISIRGETLGGSFLGFALTFARAGLPLMCFAGTYLIVGGEIGLTEFLSIIIIGTKIISPLLTWIRYTAVLRMQYVSATRIDNAMKKKELSGEKSIQVKDLGDIEFAHTSFSYLQGKNVIDDISCTFKKNSLTAIVGQSGGGKSTILKLIARFWDVKSGSIKIGGVSLNEINPDQWLKHISMVLQEVYLFHDTIRENIMFGNKNATEEDMIRASKLAGCHEFIEKLPEGYNTIVGEGGSTLSGGEKQRISIARAILKNAPILLLDEPTASLDSKNEVLVQKAISNLVKDKTVIMIAHRLKAIKNADKIIVLDKGRIVEEGRHSELLEKQGLYARLWHLQNKSKEWKISL

SEQ ID NO: 28569 - protein, 362 aa, Arabidopsis thaliana
MDPATNSPIMPIDLPIMHDSDRYDFVKDIGSGNFGVARLMTDRVTKELVAVKYIERGEKIDENVQREIINHRSLRHPNIVRFKEVILTPSHLAIVMEYAAGGELYERICNAGRFSEDEARFFFQQLISGVSYCHAMQICHRDLKLENTLLDGSPAPRLKICDFGYSKSSVLHSQPKSTVGTPAYIAPEILLRQEYDGKLADVWSCGVTLYVMLVGAYPFEDPQEPRDYRKTIQRILSVTYSIPEDLHLSPECRHLISRIFVADPATRITIPEITSDKWFLKNLPGDLMDENRMGSQFQEPEQPMQSLDTIMQIISEATIPTVRNRCLDDFMADNLDLDDDMDDFDSESEIDVDSSGEIVYAL

SEQ ID NO: 28570 - protein, 333 aa, Candida glabrata CBS138
MFIPTTQKVVLIDGKSDDYDVIKYQDFAVPSIGSTDVLVKNKYAGVNFIEAYFRKGYYPCELPYVLGREASGEVVQVGSEVKDFKIGDKVAYLGGSTFAQYTKKSTENHIMNLGQSCPDEDLKLYGSSLVQCLTAISFIDEAYKVMEGDYILVYAASGGVGSILCQLISQRKAHVIAVASSAEKLAMAKENGAEFLINYAEDDILEKVMQYTNGKGVHAAFDSIGKDTFETDLAALRRKGTLVSFGNASGMVPPFAINKLSPKNLKLLRPQVYGYLGTRSEWDHYCSIFKHFVQSKSLKVDISGIYPLSEYAEVAKLLERRQTTGKVTLEIPQ

SEQ ID NO: 28571 - protein, 424 aa, Thermus thermophilus HB8
MERPISEAYFQEAKRHIPGGVSSPVRAFKAVGGTPPFLVRGEGAYVWDADGNRYLDYVMSWGPLILGHAHPKVLARVRETLERGLTFGAPSPLEVALAKKVKRAYPFVDLVRFVNSGTEATMSALRLARGYTGRPYIVKFRGNYHGHADGLLVEAGSGALTLGVPSSAGVPEEYAKLTLVLEYNDPEGLREVLKRRGEEIAAIIFEPVVGNAGVLVPTEDFLKALHEAKAYGVLLIADEVMTGFRLAFGGATELLGLKPDLVTLGKILGGGLPAAAYAGRREIMEKVAPLGPVYQAGTLSGNPLAMAAGLATLELLEENPGYYAYLEDLGARLEAGLKEVLKEKGLPHTVNRVGSMITVFFTEGPVVTFQDARRTDTELFKRFFHGLLDRGIYWPPSNFEAAFLSVAHREEDVEKTLEALRKAL

SEQ ID NO: 28572 - protein, 298 aa, Zea perennis
SSEVQVCVTGGAGFIGSYLVKKLLEKGYTVHATLRNTKDEEKTGLLQRLVPGAAERLRLFEADLFDAATFAPAIAGCQFVFLVATPYGLEAAGSKYKSTAEAAVAAMRVILRQCEESKTVKRVIHTASISTASPLKDKEAEGSGDGFKDFISESCWTPLNVDYHLRSAHFDKYILAKLRSEQELLSYNGGESPAFEVVTLPLGLVAGDTVLGHAPETLEHAVSPVSREELSFKFLRLLQSLLGSEPLVHVDDACEALLFCMERPSIAGRFFCAAAYPSIRDITDHYASKFPHLDVLRA

SEQ ID NO: 28573 - protein, 255 aa, Escherichia coli K12
MFNSDNLRLDGKCAIITGAGAGIGKEIAITFATAGASVVVSDINADAANHVVDEIQQLGGQAFACRCDITSEQELSALADFAISKLGKVDILVNNAGGGGPKPFDMPMADFRRAYELNVFSFFHLSQLVAPEMEKNGGGVILTITSMAAENKNINMTSYASSKAAASHLVRNMAFDLGEKNIRVNGIAPGAILTDALKSVITPEIEQKMLQHTPIRRLGQPQDIANAALFLCSPAASWVSGQILTVSGGGVQELN

SEQ ID NO: 28574 - protein, 346 aa, Thermus thermophilus HB8
MKPKVVRYLDEGEFPLAEEEALRLYRAMRRARFFDEKALTLQRQGRLGVYAPFMGQEAAQVGVALALEERDWVVPSYRESAMLLAKGLPIHTLILYWRAHPAGWRFPEGVRAVNPYIPIATQIPQAVGLALAGRYRGEDWVVATSIGDGGTSEGDFHEGLNFAAVFGAPVVFLVQNNGYAISVPKSRQMKVDYVARRAEGYGMPGVVVDGNDAFAVYLEAKKAVERARKGEGPTLLEALTYRLAPHTTSDDPSRYRSKEEEEAWRAKDPILRLRKALEGRGLWGEEAEKALLLELEEEFQRELALADEAPEPRPEEIVEHVYAEMGPDQRRAWEALRRGLHVEEVE

SEQ ID NO: 28575 - protein, 298 aa, Zea perennis
SSEVQVCVTGGAGFIGSYLVKKLLEKGYTVHATLRNTEDEEKTGLLRRLVPGAAERLRLFEADLFDAATFAPAIAGCQFVFLVATPYGLEAAGSKYKSTAEAAVAAMRVILRQCEESKTVKRVIHTASISTASPLKDKEAEGSGDGFKDFISESCWTPLNVDYHLRSAHFDKYILAKLRSEQELLSYNGGESPAFEVVTLPLGLVAGDTVLGHAPETLEHAVSPVSREELSFKFLRLLQSLLGSEPLVHVDDACEALLFCMERPSIAGRFFCAAAYPSIHDITDHYASKLPHLDVLRA

SEQ ID NO: 28576 - protein, 386 aa, Glycine max
MAKEGPNWDGLLKWSIAHSDGTRPTRNLSEEDRRWFMEAMQSQTIDVVKRMKEITLVMQTPEQVLKDQGVTPADIEDMLDELQEHVESIDMANDLHSIGGLVPLLGYLKSSHANIRAKAADVVTTIVQNNPRSQQLVMEANGFEPLISNFSSDPDVTVRTKALGAISSLIRHNKQGITVFRLANGYAALKDALASENVRFQRKALNLTHYLLHENNSDCNIVNELGFPRLLMHLASSEDSDVREAALRGLLELARNTQDGKDGNEEDSEKMKQLLQERINNISLMSAEDLGVVREERQLVDSLWSTCFNEPSSLREKGLLVLPGEDAPPPDVASKFFEPPLRSSTANPSSKKDSNNEKKEIPLLLGSGPSLADTNNQGSNRENANS

SEQ ID NO: 28577 - protein, 199 aa, Brassica napus
LSLLWVAGRCSTVGIPGRPTRPFLGTIYSVPPFRMKRFPVAAFLIIATVRGFLLNFGVYHATRAALGLSFQWSAPVAFITSFVTLFALVIAITKDLPDVEGDRKFQISTLATKLGVRNIAFLGSGLLLVNYISAISLAFYMPQVFRGSLMIPAHMILASCLVFQTWVLEKANYTKEAIAGYYRFIWNLFYAEYLLFPFF

SEQ ID NO: 28578 - protein, 245 aa, Zea luxurians
SIRNNPVQNKLMNGEDPINNNHAQTAGGLGVRLATSSSSRDPSPSDEDMDGEVEILGFKMPTEERMRKRKESNRESARRSRYRKAAHLKELEDQVAQLKAENSCLLRRIAALNQKYNDANVDNRVLRADMETLRAKVKMGEDSLKRVIEMSSSVPFSMPISAPTPSSDAPVPVPVPPPIRDSIVGYFSATAADDDASVGNGFLRLQAQEPAPMVVGATLSATEMNRVAAATHCAGAMELIQTAMG

SEQ ID NO: 28579 - protein, 762 aa, Bacillus anthracis str. 'Ames Ancestor'
MAIQTSNLGYPRIGLQREWKKTLEAFWSNKINEEQFLTTMKEIRLQHVKVQQEKGIELIPIGDFTYYDHVLDTAYMLGFIPSRFSEFTSYLDVYFAMARGSKDHVASEMTKWFNTNYHYIVPEYEEGLQISLKDNRPLRLYEEAKQELGVDGKPVILGPYTFLKLAKGYTQEQFATILKQLVAPYVQLLSELHAAGAQIIQVDEPIFASLTKEEVQQAKEIYEAIRKEVPNATLLLQTYFDSVEENYEEIITFPVSSIGLDFVHGKEGNLNAISKYGFPADKTLAVGCIDGRNIWRADLDEVLTLFTTLQKQVQTKDLIVQPSCSLLHTPIDKTEETHLSTELFDALAFANQKLEELVLIHSALTQGTESISNELETYRNVHHTIRSSAARNREDVKAARTALKEEDFSRPLPFEKRYELQQVALKLPLLPTTTIGSFPQTTEVRQTRKEWRNGIISNEQYEQFIEKETEKWIRYQEEIGLDVLVHGEFERTDMVEYFGERLAGFSFTKNGWVQSYGSRCVKPPVIYGDVAFINGMTIKETVYAQSLTEKVVKGMLTGPVTILNWSFVRNDIPRKEVSYQIALALRHEIELLESSGIRVIQVDEPALREGMPLKEKDWDAYITWAVQSFLLATSSVANETQIHTHMCYSNFEDIVDAIRALDADVISIETSRSHGEFIDTLKHTTYEKGIGLGVYDIHSPRVPSKDEMYKIVEQSLQVCDPKYFWINPDCGLKTRRTEEVIPALEHMVQAAKDARSLLKTNA

SEQ ID NO: 28580 - protein, 298 aa, Zea perennis
SSEVQVCVTGGAGFIGSYLVKKLLEKGYTVHATLRNTEDEEKTGLLRRLVPGAAERLRLFEADLFDAATFAPAIAGCQFVFLVATPYGLEAAGSKYKSTAEATVAAVRVILRQCEESKTVKRVIHTASISTASPLKDKEAEGSGDGYKDFISESCWTPVNVDYHLRSAHFDKYILAKLRSEQELLSYNGGESPAFEVVTLPLGLVAGDTVLGHAPETLEHAVSPVSREELSFKFLRLLQSLLGSEPLVHVDDACEALLFCMERPSIAGRFFCAAAYPSIRDITDHYASKFPHLDVLRA

SEQ ID NO: 28581 - protein, 219 aa, Triticum aestivum
  misc_feature (28)..(28): Xaa can be any naturally occurring amino acid
  unsure (1)..(219): unsure at all Xaa locations
MGRPPCCDKVGVKKGPWTPEEDIILGVXYIQENGPGNWRAVPINTGLMRCSKSCRLRWTNYLRPGIRRGNFTTHEEGIIVHLQSLLGNRWAAIASYLPQRTDNDIKNYWNTHLKKKLKKQQAMGAIFAPPPPPSSSAETAANLPAAVHLDNHHHRYHHDAIAASSSTVDHGCYSNPEITPHTTITMRRSPFADVAADCSSVVYASRMEKISRFLGGFMK

SEQ ID NO: 28582 - protein, 299 aa, Sinorhizobium meliloti
MITVFGSINMDLIATTARLPKPGETVAGTDFSTAAGGKGANQALAARRAGASVRMAGAVGSDAFAEGALALLKEAGTDLDLTKTVGEPTGTAHIIVGGDGENVIVVVASANARVSGDDAANVVAQMSAGDTLMLQLEIPSASVEKALSEAKRRGIRSIINIAPLTPDAARLGRMADIVIANETEFELLAGKAGIAGAEREEAMNGLHAETRQTVIVTLGAEGVVAIHEGELHRAKGLTIEPVDTVGAGDTFCGYLAAGLDAGLAFSEALRRAAIAGSLACLKPGAQPSIPLAAEVAARL

SEQ ID NO: 28583 - protein, 427 aa, Cupriavidus necator
MLTWYKTGTPQQKKTFWACYSGWALDSFDMQMFSFLLPALTLAWGLNKAEVGVLGTVALIVTAIGGWGAGILSDRYGRARILVFAIVWFTFFGVLAGFAQTYHQLLMARTLQGLGFGGEWAVGAALMAEVIDPKHRGKAMGYVQSGFALGWALAAVVATLLLAWLPQDMAWRAAFWIGIIPASIVLFIRRHIKDAPMFERARQSSAPRASLASVFNRRYARSLILSSVLVIGLQAGCYAILVWLPSLLSQREVAATSRIVTVFIMAFGSFCGFAVAADLCDRIGRRPTLIMLSICAWIVTVSYMLLPLNPTLTAILGFLVGFSAIGMFAALGPFLSELFPTNVRTTCMGFAYNVGKSVGAGSVVGVGVLSTHIGLANAMGAFCLAAYAFAVFGMLLLPETRGIVIENIGTEDDGDTVTIANPARAPS

SEQ ID NO: 28584 - protein, 327 aa, Gloeobacter violaceus PCC 7421
MKAFVLAAGKGTRLRPFTDALPKPLMPVMNKPVMAHILGLCRKHGLDQVVANLHYKGEKISEYFGNGSQYQVSLGYSREEQLLGTAGGVRRQADFLAGGPFLVISGDVMTDLDLTALLQFHKQSGAVATMAVKEVGDPSRFGVVVSDSHGKVESFQEKPIRGTERSRWANTGIYVLEPEVFNYIPEATFFDFGNDLFPMLVAEGAPVFAMRTGAYWSDVGTLAQYLYTHWELLTHPEIVQRIGEGTVVEPGAVISDQALIGRHCTIEKGARVLGYSCVSDGCVIRAGSVVVDSVMWTSEQLGERLSGDLVRSIWGDGKHVCLGIPNL

SEQ ID NO: 28585 - protein, 741 aa, Arabidopsis thaliana
MASTSSLALSQALLTRAISHNGSENCVSIPAFSALKSTSPRTSGTISSRRRNASTISHSLRPLVRAAAVEAIVTSSDSSLVDKSVNTIRFLAIDAVEKAKSGHPGLPMGCAPMSHILYDEVMKYNPKNPYWFNRDRFVLSAGHGCMLQYALLHLAGYDSVREEDLKSFRQWGSKTPGHPENFETPGVEATTGPLGQGIANAVGLALAEKHLAARFNKPDNEIVDHYTYSILGDGCQMEGISNEVCSLAGHWGLGKLIAFYDDNHISIDGDTDIAFTESVDKRFEALGWHVIWVKNGNNGYDEIRAAIREAKAVTDKPTLIKVTTTIGYGSPNKANSYSVHGAALGEKEVEATRNNLGWPYEPFHVPEDVKSHWSRHTPEGAALEADWNAKFAAYEKKYPEEAAELKSIISGELPVGWEKALPTYTPDSPGDATRNLSQQCLNALAKAVPGFLGGSADLASSNMTMLKAFGNFQKATPEERNLRFGVREHGMGAICNGIALHSPGFIPYCATFFVFTDYMRAAMRISALSEAGVIYVMTHDSIGLGEDGPTHQPIEHLSSFRAMPNIMMFRPADGNETAGAYKIAVTKRKTPSVLALSRQKLPQLPGTSIESVEKGGYTISDNSTGNKPDVILIGTGSELEIAAQAAEKLREQGKSVRVVSFVCWELFDEQSDAYKESVLPSDVSARVSIEAGSTFGWGKIVGGKGKSIGIDTFGASAPAGKLYKEFGITIEAMVEAAKSLI

SEQ ID NO: 28586 - protein, 57 aa, Triticum aestivum
MAVEGTDNCIDIILAIILPPLGVFFKFACGIEFWICLLLTFFGYLPGIIYAVWVITK

SEQ ID NO: 28587 - protein, 579 aa, Zea mays
MASTFGATSTVGLMAAPTGKNVRLQRRANFRVKAAKELYFNKDGSAIKKLQTGVNKLADLVGVTLGPKGRNVVLESKYGSPKIVNDGVTVAREVELEDPVENIGAKLVRQAAAKTNDLAGDGTTTSVVLAQGLIAEGVKVVAAGANPVQITRGIEKTAKALVEELRKLSKEVEDSELADVAAVSAGNNYEIGNMIAEAMSKVGRKGVVTLEEGKSSENFLYVVEGMQFDRGYISPYFVTDSEKMTAEYENCKLLLVDKKITNARDLINVLEESIRGAYPILIIAEDIEQEALATLVVNKLRGSLKIAAIKAPGFGERKTQYLDDIAILTGATVIRDEVGLSLDKADKSVLGTAAKVVLTKESTTIVGDGSTQEEVTKRVAQIKNLIEAAEQEYEKEKLNERIAKLAGGVAVIQVGAQTETELKEKKLRVEDALNATKAAVEEGIVVGGGCTLLRLAAKVDAIKDTLENDEQKVGAEIVRRALSYPLKLIAKNAGVNGSVVTEKVLSNDNFKYGYNAATGQYEDLMAAGIIDPTKVVRCCLEHAASVAKTFLTSDVVVVDIKEPEAAPVANPMDNSGYGY

SEQ ID NO: 28588 - protein, 421 aa, Mycobacterium avium subsp. paratuberculosis K-10
MTGSASPCGPVLAGLPGIRGWQEDLYRDLHRHPELSHQEHRTAAAVAERLRGFGYDVHEGVGGTGVVGVLRNGTGPAVLLRADMDALPVREDTRLPYASAVTATDPHGDERPVMHACGHDVHVTCLLGAASLLAGAREHWRGSLVAVFQPAEELGDARAPHGRRRAGEAGRSRRRRPGPARAAVSGRPDRHPIGALHGHRRQHAGHRVRPGRPRVDAADDRRSRRAGRHDRDPVADRRLARGGAHRDRGADDRQDRVGRQEQRDRRPRGAGAEPAHLQRPDPRPDARRGPAHRHRRMPGVRVAAGPRVRADEPLPGHRQRPGGHRAGAGGVRRAFRRPGDGDSRADRKRRLQRHRQRARRAVQLLGFRGSRPRRVSARRGGRSAGRGRPRQPLREVRPRHPAHPRHRHRGADRRRAGLAGP

SEQ ID NO: 28589 - protein, 115 aa, Brassica napus
SQYDIEVAHMKRDNGGVIDKEKLPIPIKAVTASSLAFSRGAIVPLLAAAFVKTYKVRIGVIVAAVTLALVMFGWLRPVLGKAPVVKSSAMVLIGGWLAMAVTYGLTKLVGSHGMS

SEQ ID NO: 28590 - protein, 132 aa, Candida albicans SC5314
MNSKEIRIVALLILDTVFFLLEAIIGYTVHSLALIADSFHMLNDIISLIIALWAVRVKNTKPADGKYTYGWQRAEILGALINAVFLLALCFTIIMDSIQRFFEPQEISNPKLILIVGIAGLVSNGVGLVLFP

SEQ ID NO: 28591 - protein, 156 aa, Triticum aestivum
  misc_feature (68)..(68): Xaa can be any naturally occurring amino acid
  unsure (1)..(156): unsure at all Xaa locations
MSLIRRGDVFDPFSLDLWDPFDGFPFGSGSGSIFPRTTSSDTAAFAGARIDWKEMPEAHVFKADVPGXLKKEEVKVEVDDGNVLQISGERNKEQEQKTGTWHRVERSSGKFLRRFRLPDNVKSEEIKAAMENGVLTVTVPKAEAKKPDVKPVQITG

SEQ ID NO: 28592 - protein, 515 aa, Glycine max
MASMAAIGSLNVPRSASSRSSFVGRKSVPRSLSFSASQLCGDKIPTDSVLLAPKIGRSPVIVTPKAVSDSQNSQTCLDPDASRSVLGIILGGGAGTRLYPLTKKRAKPAVPLGANYRLIDIPVSNCLNSNVSKIYVLTQFNSASLNRHLSRAYASNMGGYKNEGFVEVLAAQQSPENPNWFQGTADAVRQYLWLFEEHNVLEFLVLAGDHLYRMDYEKFIQAHRETDADITVAALPMDEKRATAFGLMKIDEEGRIIEFAEKPKGEQLKAMKVDTTILGLDDERAKELPYIASMGIYVVSKNVMLDLLREKFPGANDFGSEVIPGATSIGMRVQAYLYDGYWEDIGTIEAFYNANLGITKKPVPDFSFYDRSSPIYTQPRYLPPSKMLDADVTDSVIGEGCVIKNCKIHHSVVGLRSCISEGAIIEDTLLMGADYYETEADKRFLAAKGSVPIGIGRNSHIKRAIIDKNARIGENVKIINSDNVQEAARETDGYFIKSGIVTVIKDALIPSGTVI

SEQ ID NO: 28593 - protein, 502 aa, Arabidopsis thaliana
MATAAVIGLNTGKRLLSSSFYHSDVTEKFLSVNDHCSSQYHIASTKSGITAKKASNYSPSFPSSNRHTQSAKALKESVDVASTEKPWLPNGTDKELEEECYDDDDLISHSVEAILLLQKSMLEKSWNLSFEKAVSSEYPGKGTIRKKKIPVITCSGISARQRRIGAKKKTNMTHVKAVSDVSSGKQVRGYVKGVISEDVLSHVEVVRLSKKIKSGLRLDDHKSRLKDRLGCEPSDEQLAVSLKISRAELQAWLMECHLAREKLAMSNVRLVMSIAQRYDNLGAEMSDLVQGGLIGLLRGIEKFDSSKGFRISTYVYWWIRQGVSRALVDNSRTLRLPTHLHERLGLIRNAKLRLQEKGITPSIDRIAESLNMSQKKVRNATEAVSKVFSLDRDAFPSLNGLPGETHHSYIADTRLENNPWHGYDDLALKEEVSKLISATLGEREKEIIRLYYGLDKECLTWEDISKRIGLSRERVRQVGLVALEKLKHAARKRKMEAMILKN

SEQ ID NO: 28594 - protein, 581 aa, Triticum aestivum
  misc_feature (227)..(227): Xaa can be any naturally occurring amino acid
  misc_feature (240)..(240): Xaa can be any naturally occurring amino acid
  misc_feature (262)..(262): Xaa can be any naturally occurring amino acid
  misc_feature (323)..(323): Xaa can be any naturally occurring amino acid
  misc_feature (330)..(330): Xaa can be any naturally occurring amino acid
  unsure (1)..(581): unsure at all Xaa locations
MAAPTSSAASTLAPFSHPKTLAAAAAAASSSVAFSPAASHPACALTRRRAVAAMVAAPAKVGAAMPSLDFDTAVFNKEKVSLAGHEEYIVRGGRNLFPLLPEAFKGVKQIGVIGWGSQGPAQAQNLRDSLVEAKSDIVVKIGLRKGSKSFEEARGAGFTEENGTLGDIWETVSGSDLVLLLISDSAQADNYEKIFSHMKPNSILGLSHGFLLGHLQSHGLDFPKNIXSVVAVCPKGMGPXSVRRLYVQGKEVNGAGINASFXAVHQDVDGRATDVALGWSVALGSPFTFATTLEQEYKSDIFGERGILLGAVHGIVEALFRRXLTLGLFXELAYKSTVEGITGIISKTISKKGMLEVYNSLSEEGKKEFNKAYSASFYPCMDILYECYEDVASGSEIRSVVLAGRRFYDKEGLPAFPMGKIDQTRMWKVGEKVRSTRPDGDLGPLHPFTAGVYVALMMAQIEVLRKKGHSYSEIINESVIESVDSLNPFMHARGVAFMVDNCSTTARLGSRKWAPRFDYILTQQAFVTVDKDEPINQDLISNFMSDPVHGAIEVCAELRPTVDISVTADADFVRPELRQSS

SEQ ID NO: 28595 - protein, 150 aa, Arabidopsis thaliana [sequence omitted]

SEQ ID NO: 28596 - protein, 298 aa, Zea perennis
SSEVQVCVTGGAGFIGSYLVKKLLEKGYTVHATLRNTKDEEKTGLLQRLVPGAAERLRLFEADLFDAATFAPAIAGCQFVFLVATPYGLEAAGSKYKSTAEAAVAAMRVILRQCEESKTVKRVIHTASISTASPLKDKEAEGSGDGFKDFISESCWTPLNVDYHLRSAHFDKYILAKLRSEQELLSYNGGESPAFEVVTLPLGLVAGDTVLGHAPETLEHAVSPVSREELSFKFLRLLQSLLGSEPLVHVDDACEALLFCMERPSIAGRFFCAAAYPSIHDITDHYASKLPHLDVLRA

SEQ ID NO: 28597 - protein, 455 aa, Escherichia coli O157:H7 EDL933
  misc_feature (89)..(89): Xaa can be any naturally occurring amino acid
  unsure (1)..(455): unsure at all Xaa locations
MKKQTQLLSALALSVGLTLSASFQAVASIPGQVADQAPLPSLAPMLEKVLPAVVSVRVEGTASQGQKIPEEFKKFFGDDLPDQPAQPFXGLGSGVIINASKGYVLTNNHVINQAQKISIQLNDGREFDAKLIGSDDQSDIALLQIQNPSKLTQIAIADSDKLRVGDFAVAVGNPFGLGQTATSGIVSALGRSGLNLEGLENFIQTDASINRGNSGGALLNLNGELIGINTAILAPGGGSVGIGFAIPSNMARTLAQQLIDFGEIKRGLLGIKGTEMSADIAKAFNLDVQRGAFVSEVLPGSGSAKAGVKTGDIITSLNGKPLNSFAELRSRIATTEPGTKVKLGLLRNGKPLEVEVTLDTSTSSSASAEMITPALEGATLSDGQLKDGGKGIKIDEVVKGSPAAQAGLQKDDVIIGVNRDRVNSIAEMRKVLAAKPAIIALQIVRGNESIYLLMR

SEQ ID NO: 28598 - protein, 250 aa, Neurospora crassa
MSDTENKPVEEVKPDAPAAAEETKTEEKPAAFSSSSVFSMFGGGAKKEKKEDEERGDTSGSAKAQREAAAAAAAEKGEEDEAPESEDVHFEPVIHLTEKVETKTNEESEEQVFKMRAKLFKFVKEASEWKERGTGDVRLLKHHENGKTRLVMRRDKTLKVCANHYIVPEMKLSPNVGSDRSWVWNAAADVSEGEPEAVTLAIRFANSDNANAFKDAFIKAQKDNEALFKAAEEAAEKKEAEEDSEDEKAE

SEQ ID NO: 28599 - protein, 355 aa, Escherichia coli O157:H7 EDL933
  misc_feature (164)..(164): Xaa can be any naturally occurring amino acid
  unsure (1)..(355): unsure at all Xaa locations
MFVKLLRSVAIGLIVGAILLVAMPSLRSLNPLSTPQFDSTDETPASYNLAVRRAAPAVVNVYNRGLNTNSHNQLEIRTLGSGVIMDQRGYIITNKHVINDADQIIVALQDGRVFEALLVGSDSLTDLAVLKINATGGLPTIPINARRVPHIGDVVLAIGNPYNXGQTITQGIISATGRIGLNPTGRQNFLQTDASINHGNSGGALVNSLGELMGINTLSFDKSNDGETPEGIGFAIPFQLATKIMDKLIRDGRVIRGYIGIGGREIAPLHAQGGGIDQLQGIVVNEVSPDGPAANAGIQVNDLIISVDNKPAISALETMDQVAEIRPGSVIPVVVMRDDKQLTLQVTIQEYPATN

SEQ ID NO: 28600 - protein, 298 aa, Zea perennis
SSEVQVCVTGGAGFIGSYLVKKLLEKGYTVHATLRNTKDEEKTGLLRRLVPGAAERLRLFEADLFDAATFAPAIAGCQFVFLVATPYGLEAAGSKYKSTAEAAVAAVRVILRQCEESKTVKRVIHTASISTASPLKDKEAEGSGDGFKDFISESCWTPLNVDYHLRSAHFDKYILAKLRSEQELLSYNGGESPAFEVVTLPLGLVAGDTVLGHAPETLEHAVSPVSREELPFKFLRLLQSLLGSEPLVHVDDACEALLFCMERPSIAGRFFCAAAYPSIHDITDHYASKFPHLDVLRA

SEQ ID NO: 28601 - protein, 665 aa, Shewanella sp. MR-4
MIRHSLLFALVLTASSPLSISAQTNNSPVSSTASFHLEPLSWWAGMHNPKLQLMLHSNALPADATQLKVEITGQDVVFEGIEQTDNPHYLFINLDLRQAKPQTFDIRILAGDKQLFKLPYTLAARADGSRERQGFSNKDVIYLITPDRFANGNPNNDNQADMLEHAAPDNSDGRHGGDIEGIRQHLDYLAKLGVTQLWINPLLENNQAQYSYHGYAITNLYRVDPRFGSNQDYQKLVTEAKQHGLGVIKDVVLNHIGSNHWWLKDLPSSDWLNYPQQPNVTDANTAPAASFTSPSFTSPSFTSHRRTTVQDPYADTQDKSDFVDGWFVDSMPDLNQRNPKVATYLIQNSIWWVEYAGLSGIREDTYSYADKTFLAQWSKALMAEYPHFNIVGEEWTANPITVSYWQKGKINADGYRSDLPSLMDFPLNEKLVESLNEPEGWDTGFIKLYEMLANDVVYANPSQLVLFEGNHDTNRIYSLLKENLPLYQMALTYVLTAKRIPQLFYGTEVLMTSPTEGRHDGVVRSDFPGGFANSKVNGFSGKGLNVKQQQALAFVRTLLNYRKHSAALQTGDLLHFVPQNGIYVLFRCAAKRPAAGNACYQADADKVMVIYNKNDQTQTLDLSRFNKVLAGNTSANSVFTGDKFKLNQSVTLPHAGVMLLELNHQ

SEQ ID NO: 28602 - protein, 245 aa, Zea mays subsp. huehuetenangensis
SIRNNPVQNKLMNGEDPINNNHAQTAGGLDVRLATSSSSRDPSPSDEDMDGEVEILGFKMPTEERVRKRKESNRKSARRSRYRKAAHLKELEDQVAQLKAENSCLLRRIASLNQKYNDANVDNRVLRADMETLRAKVKMGEDSLKRVIEMSSSVPSSMPISAPDPQSDAPVQVPVPPPIRDSIVGYFSAPAADDDASVGNGFLRLQAQEPASMVVGATLSATEMNRVAAATHCAGAMELIQTAMG

SEQ ID NO: 28603 - protein, 245 aa, Zea mays subsp. huehuetenangensis
SIRNNPVQNKLMNGEDPINNNHAQTAGGLGVRLATSSSSRDPSPSDEDMDGEVEILGFKMPTEERVRKRKESNRESARRSRYRKAAHLKELEDQVAQLKAENSCLLRRIAALNQKYNDANVDNRVLRADMETLRAKVKMGEDSLKRVIEMSSSVPSSMPISAPDPQSDVPVQVPVPPPIRDSIVGYFSAPAADDDASVGNGFLRLQAQEPASMVVGATLSATEMNRVAAATHCAGAMELIQTAMG

SEQ ID NO: 28604 - protein, 375 aa, Clavispora lusitaniae
MTSVKLAEKNFEQDKEFAKAMHGDSYKKRGISALMAKAKEASDVATNGYFKHWDGGVSEDDEKKRLDDYSSLTKNYYNLVTDFYEYGWGSSFHFSRYYKGEAFRQATARHEHFLAHKMNINENMRVLDVGCGVGGPGREICRFTDCTIVGLNNNDYQVERAQYYAKKYKLDDKLSYVKGDFMQMDFEPESFDAVYAIEATVHAPVLEGVYSEIYKVLKPGGVFGVYEWVMTDKYDENNEEHRKIAYGIEVGDGIPKMYKREVAEQALKNVGFDIEYEKDLADVNDEIPWYYPLAGEWKYVQTLSDCFTIFRTSKIGRTVTTNVVGLMEKIGLAPKGSKQVTGALEDAAVNLVAGGEQKLFTPMMLYIARKPLDAK

SEQ ID NO: 28605 - protein, 747 aa, Magnaporthe grisea 70-15
MQQATRNAAKIRRRDVGVGGYEKQKNKLKLGPNPRLVWFQKGKWGQMVRRCVEVKNIKMNCTRNSGRDSWNGVLRTGQDASRCGFGYEPSSLAEQTFNRRVTTSTLSHGMLSQRTVAAIGFLVAVNIVVLTFALNSGFISRPASVFSFGSNHPQASSNLESESKSHGTHPPGLVGQQPAKLEEWRLDTDQYILDRSWDLTAPPTTRTYDLVITRGKAWPDGVVRDVLLVNGKFPGPLIEANKGDTVVVNVTNKLDSEPTAIHWHGIQQKETPYYDGTVGVSQCGIPPGQSLVYNFTLEGQFGTFWWHAHHEGQAMDGVLGPLVIHAPEEKQVRQTYDEDRIVILQDWYHDPSQVNLARYLAPGVENDEPIPDNGLINGRNYFNCSSYGTESNRTCHDGTSHAILSLNRNSKTRLRLINAGGFASFEFGIDKHLLNIIEADGILTRPTSVRRVPIHVGQRYSVVVDTNQGTESNNYWIRSRMISHCFKGEENPVLDSTTKAVLHYQGKDQGIIPTAASKDWEDAMAVMCEDPAKGVLVPLISQPPPPATKIVAVDFHFNIGAYQMTYAKINETVTWMPLKNSTTLLEAVDGLRSPKASGWSETGRIGLFPEDQYVIGVSNSNTTEVVDLLVYSLDDGSHPFHLHGHDFWIMATGDSGFDWNKYNSEIMSSTGESLANVTKRDTLTIKPYAWALIRFVADNPGLWAFHCHMSWHMEAGLMMQFMSGAKGLEKLHIPDDVANLCTAPHPG

SEQ ID NO: 28606 - protein, 245 aa, Zea mays subsp. huehuetenangensis
SIRNNPVQNKLMNGEDPINNNHAQTAGGLGVRLATSSSSRDPSPSDEDMDGEVEILGFKMPTEERMRKRKESNRESARRSRYRKAAHLKELEDQVAQLKAENSCLLRRIAALNQKYNDANVDNRVLRADMETLRAKVKMGEESLKRVIEMSYSVPLSMPISAPDPQFGRSSAVPVPPPIRDSIVGYFSAPAADDDASVGNGFLRLQAQEPASMVVGATLSATEMNRVAAATHCAGAMELIQTAMG

SEQ ID NO: 28607 - protein, 245 aa, Zea mays subsp. huehuetenangensis
SIRNNPVQNKLMNGEDPINNNHAQTAGGLGVRLATSSSSRDPSPSDEDMDGEVEILGFKMPTEERMRKRKESNRESARRSRYRKAAHLKELEDQVAQLKAENSCLLRRIAALNQKYNDANVDNRVLRADMETLRAKVKMGEDSLKRVIEMSSSVPLSMPISAPTPSSDVPVQVPVPPPIRDSIVGYFSAPAADDDASVGNGFLRLQAQEPASMVVGATLSATEMNRVAAATHCAGAMELIQTAMG

SEQ ID NO: 28608 - protein, 455 aa, Salmonella typhimurium LT2
MKKHTQLLSALALSVGLTLSAPFPALASIPGQVPGQATLPSLAPMLEKVLPAVVSVKVEGTAAQSQKVPEEFKKFFGEDLPDQPSQPFEGLGSGVIIDAAKGYVLTNNHVINQAQKISIQLNDGREFDAKQIGGDDQSDIALLQIQNPSKLTQIAIADSDKLRVGDFAVAVGNPFGLGQTATSGIISALGRSGLNLEGLENFIQTDASINRGNSGGALLNLNGELIGINTAILAPGGGSIGIGFAIPSNMAQTLAQQLIQFGEIKRGLLGIKGTEMTADIAKAFKLNVQRGAFVSEVLPNSGSAKAGVKSGDVIISLNGKQLNSFAELRSRIATTEPGTKVKLGLLRDGKPLEVEVTLDSNTSSSASAEMIAPALQGATLSDGQLKDGTKGVKVDSVEKSSPAAQAGLQKDDVIIGVNRDRISSIAEMRKVMAAKPSIIALQVVRGNENIYLLLR

SEQ ID NO: 28609 - protein, 280 aa, Candida albicans SC5314
MKSTPSEVFDYLPDNVVERYSNYQPSFSGQSPLNGTSANSSDANTVVNNNNTSDHSGTNNNTPQSALQKIKQKSMNMEGVFLHVLGDALGNIGVIITALVIWKTDYSWRFLADPITSLFITLIILNSALPLVRKASRILLQSAPPYIDSNLIVNQIKQLPLIKNIHDFHVWNLNEDILIASLHIELNPNCEVNLPLPLPSNGGDNNNNNTKNGSNGDSSIDEEQDQDQELELEEAPSQIDRKLFLAAVGQVREVLHIYGINSVTIQPEFSNSKKVCRSIF

SEQ ID NO: 28610 - protein, 367 aa, Zea mays
MALEAVVFSQPQAAAGHFGYGRGDSTTYAVPWCDLLQGGVGGGGGGFGDLCAAGEWDLDIDTWAAAAAAAAPTVELGGDDWDWEALSRDYQSSDASTEYYHGGSRKAAAAPEPAGRRKRRRAKAVKNKEEIESQRMTHIAVERNRRRQMNEYLAVLRSLMPPSYAHRGDQASIVGGAINYVRELEQLLQSLEVQKSIRSRPGAGAGAADSSPFAGFFSFPQYSATTTSAHGGCSGNNNNNTGSGGNRSDAAAAAAGAGAGAGAGAGAAGSAVADVEVTMVEGHASLKVLARRRPKQLLKLVAGLHQLRIPPLHLNVTTVDAMVLYTFSLKVEDDSNMGSVEDIAAAVHEIIGSIEQQQQEEGETAVM

SEQ ID NO: 28611 - protein, 294 aa, Picea abies
MEQYEKVEKIGEGTYGVVYKARDRLTNETIALKKIRLEQEDEGVPSTAIREISLLKEMQHGNIVRLQDVVHSEKRLYLVFEYLDLDLKKHMDSCPELAKDPRLIKTFLYQILRGIAYCHSHRVLHRDLKPQNLLIDRKTNALKLADFGLARAFGIPVRTFTHEVVTLWYRAPEILLGSRHYSTPVDVWSVGCIFAEMVNQRPLFPGDSEIDELFKIFRVLGTPNEETWPGVTSLPDFKSAFPKWPAKDLATVVPGLEPAGIDLLSKMLCLEPSKRITARSALEHEYFKDLGFVP

SEQ ID NO: 28612 - protein, 239 aa, Arabidopsis thaliana
MVQELGIREEFMDLNRETETSYDFLDEMRHRFLKFKRQKYLPEIEKFKALAIAQSPKVMVIGCADSRVCPSYVLGFQPGEAFTIRNVANLVTPVQNGPTETNSALEFAVTTLQVENIIVMGHSNCGGIAALMSHQNHQGQHSSLVERWVMNGKAAKLRTQLASSHLSFDEQCRNCEKESIKDSVMNLITYSWIRDRVKRGEVKIHGCYYNLSDCSLEKWRLSSDKTNYGFYISDREIWS

SEQ ID NO: 28613 - protein, 494 aa, Triticum aestivum
  misc_feature (48)..(48): Xaa can be any naturally occurring amino acid
  misc_feature (316)..(316): Xaa can be any naturally occurring amino acid
  misc_feature (325)..(325): Xaa can be any naturally occurring amino acid
  unsure (1)..(494): unsure at all Xaa locations
RPGLPPGRQVSSTLPAMEAPLVGGRSDTEETGGPKESLVVTEVKKQLXYLAGPLIAGCLPQNVVQMISVMFVGHLGELALSSASIATSFANVTGFSLMAGMASSLDTLCGQAFGAKRYHLLGIYKQRAILVLTLVGVVVAVLWAYTGQILLLFGQDPEIAMGAGSYIRWMIPALFAYGLLQCHVRFLQTQSIVLPVMASAGLTALSHVLVCWLLVYKLGLGNKGAALANAVSDLANVSILALYIRVSPSCKSTWTGLSKEAFHDIVSFMKLALPSALMVCLEWWSFELLVLLSGTLANPKLEASVLSICLNTASLXSMIPFGLGXISTRVSNELGAGRPEAARLATRVTMVLGLVTGVSLGLIMISVRNLWGYAYSNEKEVVEYIARMMPLLSVSIIFDDMQCVLSGVVRGCGLQRIGACVNLSAYYLVGIPAALCFAFVFHLGGMGLWFGIICGLIVQMLLLLAITMRTNWDKEALKAKDRVFSSSLPLDVST

SEQ ID NO: 28614 - protein, 229 aa, Triticum aestivum
MDQPKPTPSAAASPAGADAAPNPYAFTCELPQSIYALAFSPSAPVLAAGSFLEDLHNRVSLLCFDSVHPTAASFRAVPSLSFDHPYPPTKLQFNPRAASTPLLASSSDALRLWHAPLDDLSASAPAPELRSVLDNRKASASDFCAPLTSFDWNEIEPRRIGTACIDTTCTVWDIERGVVETQLIAHDKAVHDIAWGEAGVFASVSADGSVRVFDLRDKEHSTIVYESPR

SEQ ID NO: 28615 - protein, 421 aa, Acinetobacter sp. ADP1
MQDSIEQYMQAVGQQARKASRVLSSASTHTKNNALSAIYTALVNHEPEILAANAVDMQKGRDSHLDSALLDRLELTPTRFKGMLQGLKDVIALTDPIGEITDLAYRPSGIQLGKMRVPLGVIGMIYESRPNVTLEAASLALKSGNAIILRGGSEALQSNKAIATAIQHGLKVAGLPEHAIQVIETADRAAVGQLITMTEYVDVIVPRGGKSLIERISNEARIPVIKHLDGNCHVFIDVEADLHKALPIALNAKTHRYGVCNAMETLLVHEEIAEEFLPRIAELYAEKHVELRGCQETRRILGSSVKTATEEDWYTEYLAPILAIKVVEHIDQAIEHINKYGSHHTDAIVTENYSKVRKFLAEVDSSSVMINASTRFADGFEYGLGAEIGISTDKIHARGPVGLEGLTSQKWIVFGDGQIRH

SEQ ID NO: 28616 - protein, 549 aa, Shewanella sp. MR-7
MTLASIRRGYHVIKTLLQYGLDDVLPPKMTPWYFKLARNSLFWIRNKHKGKSGGERLKLAMQELGPVYIKLGQMLSTRRDLLSDEWANELAMLQDKVPPFDGALARQAIEAELKAPIESFFDDFNETPLASASISQVHTATLKSNGKAVVLKVLRPNVEAKIQADLLLMSQTAKVIDYLLGEGNRLRPSEVIEDYRVTILGELNLKLEALNAIKLRNNFLDSDALYIPYVYEEFCYPRLMVMERIYGIPVSDIAALKAQGTNFKLLAERGVELFFTQVFRDNFFHADMHPGNIFISRDHPENPYYIGLDCGIMGTLSEVDKRYLAENFLAFFNRDYHRIAQLYIESGWVSEKTDLQAFEQAIKVVCEPMFNKPLDEISFGHVLLELFRTARHFDIVVQPQLVLLEKTLLYIEGLGRQLYPQLDLWQTAKPFLEQWMAEQVGPKAMFKKVSTKLPYWSDKLPEFPELIYDNLKLGRKLLSSQQQMLDKYLKYQQQAHKSNYLLITSAILLICGTLLFNQDATLWSPYVCLISGAALWIIGWRSRPKNRKF

SEQ ID NO: 28617 - protein, 137 aa, Helicobacter hepaticus ATCC 51449
MEQTLSIIKPDAVKKGVIGKIIDRFESNNLRICAMKKLQLTRCDAEAFYAIHKERPFFKDLVDFMISGPVVVMVLEGNNAVMKNRDLMGATNPKEAEAGTIRADFAQSIDANAVHGSDSLENAKNEIAFFFSTREIC

SEQ ID NO: 28618 - protein, 152 aa, Arabidopsis thaliana
LPSYLSHIPTSSPFCGQNPNPFFSFETGVNTSQFMSLISSNNSTSDEAEENHKEIINERKQKRKISNRESARRSRMRKQRQVDELWSQVMWLRDENHQLLRKLNCVLESQEKVIEENVQLKEETTELKQMISDMQLQNQSPFSCIRDDDDVV

SEQ ID NO: 28619 - protein, 146 aa, Brassica napus
RMYKKARMGLEECEREMEEKAKEVAELKMERQKKKQQIEEVERIVRLKQAEAEMFQLKANEAKMEAERLERIVKAKKEKTEEEYASNYLKQRLSEAEAEKEYLFQKLKEQESGGNGGGGEASQSVMYSKIREMLSGYNAPSPRVDP

SEQ ID NO: 28620 - protein, 381 aa, Bacillus thuringiensis serovar konkukian str. 97-27
MASNLEQLTDQLISIRRNLHENPELSYEEFKTTKAIKNWLEEKNITIINSSLETGVIAEISGNSNGPLIAIRADIDALPIQEETNLSYASKIHGKMHACGHDFHTAAIIGAAYLLKEKESSLSGTVRFIFQPAEESSNGACKVIEAGHLRGVQAIFGMHNKPDLPVGTIGIKDGPLMAGVDRFEIEIHGVGTHAAVPDAGVDPIVASSQIVMALQTIISRNISSSHNAVVSVTNIHSGNTWNVIPEKATLEGTVRTFQNETREKIPALMKRIIQGVSDALGVKTEFRFYAGPPAVHNDTSLTNLSTQVAETMNLNIVSPTPSMAGEDFSFYQQEIPGSFVFMGTSGTHEWHHPAFTVDERALPISAEYFALLAERALKQFA

SEQ ID NO: 28621 - protein, 352 aa, Neurospora crassa
MASQPSSSTKIKLAAAHSAPVYMSKSATLAKAINLIHAAARDGVSMLVFPETYVPGYPYFIECYPPLKQVAALAKYAEESVVVDEDLDGVVEACRTTGVSVVLGVSERMKGGYTCFNSQVFVAGGKGGGITGTHRKLQPTYVERIIWAQGDGSTLKTWKGMLGPEAADGKEKSWNVGGLACWEHTMLLARQALITQQEHVHAAAWPALSTMAGFEESADSQIEALMKCHALTAQCFVVAASNYVDETCLEWMKENIGEQGFVKRGGGWSAVIHPFCNVLAGPVTGEKEELVTAEVDLKDLGMVKIWVDADGHYSRPEILPFVWDKEAYWEAGTKNHELRVSGVKGGEEAEEA

SEQ ID NO: 28622 - protein, 484 aa, Lactobacillus plantarum WCFS1
MTEKLTTETGQPWANNEHSQTAGARGPVLMQDYNLLEKLAHFDRERIPERVVHAKGAGAKGFFELENDMGEYTKADLFNGVGKKTPVILRFSQVAGEKGYPDTVRDVRGFALKFYTQQGNYDLVGNNTPVFFVNDPLKFPDFIHSQKRDPKTNRRTQNMQWDFWAHSPESLHQVTYLMGDRGLPASYRTMNGYGSHTFKWVNQNGEQFWVKYHFISDQGVKNMTAQAAEKAMSQDLDYLQDDLYDAIQEKNYPSWTMYVQILPYEEGLNYKWDIFDVTKVISHKDYPLIKVGKLTLNENPTNNFTDIEEAAMSPANFVPGIEPSPDKLLQGRLFSYKDAQRYRLGANFEDLPVNKPVVPVHNYERDGYMKINNQGAEVNYEPNALHGPEEVPDAAFSPDSVRGETRAQPYRYQVDYTTQAGDLYRLMSEPEQERLINTIKDALGQVTLPGVKELEIKQFYEADKNYGTRVANALGMNIADIISD

SEQ ID NO: 28623 - protein, 298 aa, Zea diploperennis
SSEVQVCVTGGAGFIGSYLVKKLLEKGYTVHATLRNTEDEEKTGLLRRLVPGAAERLRLFEADLFDAATFAPAIAGCQFVFLVATPYGLEAAGSKYKSTAEAAVAAVRVILRQCEESKTVKRVIHTASISTASPLKDKEAEGSGDGFKDFISESCWTPLNVDYHLRSAHFDKYILAKLRSEQELLSYNGGESPAFEVVTLPLGLVAGDTVLGHAPETLEHAVSPVSREELSFKFLRLLQSLLGSEPLVHVDDACEALLFCMECPSIAGRFFCAAAYPSIHDITDHYASKFPHLDVPRA

SEQ ID NO: 28624 - protein, 459 aa, Streptococcus pyogenes M1 GAS
MSIKEQTDNNELENGMVRGLENRHVQLIAIAGTIGTGLFLGAGRSIALTGPSIIFVYMITGAFMFMMMRAIGEMLYYDPDQHTFINFISKYIGPGWGYFSGLSYWISLIFIGMAEITAVGAYVQFWFPSWPAWLIQLVFLVLLSSINLIAVRVFGETEFWFAMIKILAILALIATAIFMVLTGFETHTGHASLSNIFDHFSMFPNGKLKFFMAFQMVFFAYQAIEFVGITTSETANPRKVLPKAIQEIPTRIVIFYVGALVSIMAIVPWHQLPVDESPFVMVFKLIGIKWAAALINFVVLTSAASALNSTLYSTGRHLYQIANETPNALTNRLKINTLSRQGVPSRAIIASAVVVGISALINILPGVADAFSLITASSSGVYIAIYALTMIAHWKYRQSKDFMADGYLMPKYKVTTPLTLAFFAFVFISLFLQESTYIGAIGATIWIIIFGIYSNVKFK

SEQ ID NO: 28625 - protein, 100 aa, Arabidopsis thaliana
MVSSLLMSFAPATVRVYATSTKGGSGGQKEEKNPIDFVLGFMTKQDQFYETNPLLKKVDEKEGTTTGGRGTVRGGKNSAPTPVPKKSEGGFGGLGSLFKK

SEQ ID NO: 28626 - protein, 527 aa, Neurospora crassa
MFGGGSSSAASKSVSGSASDSGSSGKDRSSSKSPSPEKEAPGNGGASPKSIKSADQSTAGDTQIGNGSPPSAGSSSDSKKKRSSGVSGRASSLIAQAKNTLFTQVANRNSGDMSTDSKNSNQTSLQKLGKQDQALAVPQGQHNNAAGESLPGPRSTFKVGVWEDRNKKCRRTMEDTHAFLYNFLHTPAPTDNGYFAIFDGHAGTFAADWCGKKLHIILEDIIKKNPNAPIPELLDQTFTTVDTELEALPLKNSGCTAAVASATRQRVLYTANVGDARIVLCRSGKALRLSYDHKGSDENEGKRIANAGGLILNNRVNGVLAVTRALGDTYIKDLVTGHPYTTETVIQPDWDEFMIIACDGLWDVCSDQEAVDLVRDIQEPVIAAKKLVDHALSRFSTDNLSCMIVRFDKQALLENQNNKDSAIGVEGDATTAAGTVTESEKIVTATKQKIAEGSTPAVGISASNFGRGHDPTPLEDGEKKPFVPTTIEGSVEEEPVVLSDSPEATPDGSVTAMKLDSLPEAKKSLDA

SEQ ID NO: 28627 - protein, 436 aa, Rubrobacter xylanophilus DSM 9941
MAEAERQSAAERGILNLEWYRSLRGNARHAFWAAFLGWALDAFDFMVLSFSLSAITATFALSSGQAGLIGTVTLVVSALGGVLAGVLADRIGRVKTLMITVAVFSVFTFLSGLAQSYWQLLLFRSLQGLGFGGEWAAGAILLAEVSDPVQRGRVLGVIQSAWAIGWGLAAVAFTAVFSLADPELAWRILFWLGILPALLILYIRARVEEPRIWVETSRARLRRTREAIERGATANPLVQIFRRDLIGTTAAASLLSIGAQGGYYAIFFWLPSFLESERNLEVVGTGSYLAVVIAGSFIGYVTAGYVHDWLGRRPTFALFSVLSAVLIFLYTRMPEGANTLLLFLGFPLGFFASGIFSGFGSFLAELYPSRARGAGQGFCYNFGRAMGAFFPTIIGVLSASIGLAGAIGFGAAAYGLCLIALLLLPETRGKELVALD

SEQ ID NO: 28628 - protein, 442 aa, Arabidopsis thaliana
  misc_feature (229)..(229): Xaa can be any naturally occurring amino acid
  misc_feature (242)..(242): Xaa can be any naturally occurring amino acid
  unsure (1)..(442): unsure at all Xaa locations
MNALAATNRNFRHASRILGLDSKIERSLMIPFREIKVECTIPKDDGTLVSYIGFRVQHDNARGPMKGGIRYHPEVDPDEVNALAQLMTWKTAVADIPYGGAKGGIGCSPRDLSLSELERLTRVFTQKIHDLIGIHTDVPAPDMGTNAQTMAWILDEYSKFHGHSPAVVTGKPIDLGGSLGREAATGRGVVFATEALLAEYGKSIQGLTFVIQVKPLSANLRSQALLCIXYKTEMLRDLDDMXQGFGNVGTWAAKLIHEKGGKVVAVSDITGAIRNPEGIDINALIKHKDATGSLNDFNGGDAMNSDELLIHECDVLIPCALGGVLNKENAGDVKAKFIVEAANHPTDPDADEILSKKGVIILPDIYANAGGVTVSYFEWVQNIQGFMWEEEKVNLELQKYMTRAFHNIKTMCHTHSCNLRMGAFTLGVNRVARATQLRGWEA

SEQ ID NO: 28629 - protein, 530 aa, Triticum aestivum
  misc_feature (17)..(17): Xaa can be any naturally occurring amino acid
  misc_feature (187)..(187): Xaa can be any naturally occurring amino acid
  misc_feature (273)..(273): Xaa can be any naturally occurring amino acid
  misc_feature (386)..(386): Xaa can be any naturally occurring amino acid
  misc_feature (418)..(418): Xaa can be any naturally occurring amino acid
  unsure (1)..(530): unsure at all Xaa locations
MGNCCRSPAAAAREDVXSSHFPAAAAKRKPHQPRSGAAGGAPAPGGGGGGGAKRLAVLGEEGCDFIGGIDDKYLLDRELGRGEFGVTYLCVDRDTKEQLACKSISKRKLRTPVDVEDVRREVAIMRHLPRSHSIVALREACEDEGAVHLVMELCEGGELFDRIVARGHYTERAAANVTRTIVEVVQXCHRHGVIHRDLKPENFLFANKKENSPLKAIDFGLSIFFKPGEKFSEIVGSPYYMAPEVLKRNYGPEIDIWSAGVILYILLCGVPPXFWAETEQGVAQAILRGNIDFKREPWPNVSENAKDLVRRMLEPDPKLRLTAKQVLEHHWLQNAKKAPNVPLGDIVKSRLKQFSRMNRFKRRALRVIADHLSAEEVEDIKEMFKXAMDTDNDGIVSCEELKSGIAKFGSHLAESEVXDEYEAVDTIGKGSTRLCRGFLAVSLRSARRVANRRARGGPSYCSEKDGTGYIERDERRRRAQLAPARLHGGGSLPMILVSASFTHTRWRQGHGPDGDGKREHRRGRGARASG

SEQ ID NO: 28630 - protein, 258 aa, Sinorhizobium meliloti
MANRVAGEQTVLLRKAGRVINPPMKKLDRMPTHAEFAHVTDWVFDLDNTLYPHHVNLFSQIDRNMTAYVAELLSLEPTEAKKLQKEYYRDHGTTLQGLMLHHGIDPNDFLERAHAIDYSVVPADPALGEAIKALPGRKFIFTNGSVAHAEMTARALGILEHFNDIFDIVAAGFIPKPAGDTYDKFMGLHRIDTANAVMFEDLPRNLVVPKALGMKTVLLVPRNLEYEFAEAWETSSDADDQIDYVTEDLAGFLRSVIV

SEQ ID NO: 28631 - protein, 557 aa, Arabidopsis thaliana
METKPNPRRPSNTVLPYQTPRLRDHYLLGKKLGQGQFGTTYLCTEKSTSANYACKSIPKRKLVCREDYEDVWREIQIMHHLSEHPNVVRIKGTYEDSVFVHIVMEVCEGGELFDRIVSKGHFSEREAVKLIKTILGVVEACHSLGVMHRDLKPENFLFDSPKDDAKLKATDFGLSVFYKPGLIFLFWLIDSLILQLVFWLFVFSMNRKLKQSGFLIETGLLCFIWIANRNKVFGMYRFDDLFGQYLYDVVGSPYYVAPEVLKKCYGPEIDVWSAGVILYILLSGVPPFWAETESGIFRQILQGKLDFKSDPWPTISEAAKDLIYKMLERSPKKRISAHEALCHPWIVDEQAAPDKPLDPAVLSRLKQFSQMNKIKKMALRVIAERLSEEEIGGLKELFKMIDTDNSGTITFEELKAGLKRVGSELMESEIKSLMDAADIDNSGTIDYGEFLAATLHMNKMEREENLVAAFSYFDKDGSGYITIDELQSACTEFGLCDTPLDDMIKEIDLDNDGKIDFSEFTAMMRKGDGVGRSRTMMKNLNFNIADAFGVDGEKSDD

SEQ ID NO: 28632 - protein, 242 aa, Zea mays subsp. mexicana
SIRNNPVQNKLMNSEDPINNNHTQTAGGLGVRLATSSSSRDPSPSDEDMDGEVEILGFKMPTEERVRKRKESNRESARRSRYRKAAHLKELEDQVAQLKAENSCLLRRIAALNQKYNDANVDNRVLRADMETLRAKVKMGEDSLKRVIEMSSSVPSSMPISAPTPSSDAPVPPPPIRDSIVGYFSAPAADDDASVGNGFLRLQAQEPASMVVGATLSATEMNRVAAATHCAGAMELIQTAMG

SEQ ID NO: 28633 - protein, 246 aa, ASPERGILLUS NIDULANS FGSC A4
MGESRQELLAWLNNLLQLNMTKIEQCGTGAALCQIFDSIFMDVPMSRVKFNVNTEYAYLQNFKILQNVFARHQIDKPIPVESLSKCRMQDNLEFLQWTKKYWDQHYPGGDYDALARRKASGAPPGSAGTSRAGATSASSARRGTTPTVGRARPAAGGASSATVAALQAELNSTKEAISGLEKERDFYFAKLRDIELLLQNAIEADPELEKDDDSLVKHIQGILYSTEEGFEIPAEGEVAGDELETF

SEQ ID NO: 28634 - protein, 324 aa, Rubrobacter xylanophilus DSM 9941
MKAVRVHEPGGPEALRYEEVPTPEPGPGEVRVRLEACGVNFIDVYHRKGLYPRQTPFVLGQEGAGRVDAVGEGVEEFSEGDYVAFASAPGGAYAEYAVVPADRLVPVNVTLVEARVAAAAMLQGMTAHYLTHSTFPLEEGHVALAHAAAGGVGLLLIQMAKMRGATIIGTAGTPEKARLAREAGADEVILYTERDFVEETRRITGGQGVHVVYDSVGRATFEGGLDVLRLRGYMVLFGQSSGPVPPVDLQILNQKGGLFVTRPSLAHYTATREELLWRAESVLSWIGNNTLKVRIGGTYPLAEAARAHADLEGRRTTGKLLLIP

SEQ ID NO: 28635 - protein, 165 aa, Oryza sativa
MQHHILSNYLELNYLKSISSRTKLKGKRVATLFTKIKHPCREETPVEAPPAPVLGEPMDLMTALQLVMKKSSAHDGLVKGLREAAKAIEKHAAQLCVLAEDCDQPDYVKLVKALCAEHNVHLVTVPSAKTLGEWAGVRYITLLLAIPCQLLYCVNLMSRLPDKIF

SEQ ID NO: 28636 - protein, 243 aa, Zea mays subsp. mexicana
SIRNNPVQNKVMNGEDPINNNHAQTAGGLGVRLATSSSSRDPSPSDEDMDGEVEILGFKMPTEERMRKRKESNRESARRSRYRKAAHLKELEDQVAQLKAENSCLLRRIASLNQKYNDANVDNRVLRADMETLRAKVKMGEDSLKRVIEMSSSVPSSMPISAPTPSSDAPVPVPPPIRDSIVGYFSAPAADDDASVGNGFLRLQAQEPASMVVGATLSATEMNRVAAATHCAGAMELIQTAMG

SEQ ID NO: 28637 - protein, 343 aa, Ralstonia solanacearum
MLELPQFKAAAVQAAPVFLDTDATVDKVCRLIQEAAENGARLVAFPEVFVAGYPYWSWIMNPVEGSPWFEKLARSAIELPGPEIAKIAQAAARHRINVVIGVNERSRYGIGTLYNTIVTIADDGRILGRHRKLVPTWAEKLTWAPGDASALRVHDTSIGPLGALACGENTNTLARFALLAQGELVHVASYISLPVAPPDYDMAEAIKVRAAAHCFEGKVFTVVSCSTVSEEIIEAMAATHPQSRALLARRNSAFSGILGPDGRVIGQPLIDQEGIVYADIDLSRCIQPRQMHDITGHYNRFDIFDLRVNRKPLRAAQFDDAIDPDSGAIAAESAPDSNLENLS

SEQ ID NO: 28638 - protein, 355 aa, Lycopersicon esculentum
MGKGGSDENMAAWLLGVNTLKIQPFNLPALGPHDVRVRMKAVGICGSDVHYLKTMRCADFVVKEPMVIGHECAGIIEEVGGEVKTLVPGDRVALEPGISCWRCNLCKEGRYNLCPEMKFFATPPVHGSLANQVVHPADLCFKLPDDISLEEGAMCEPLSVGVHACRRANVGPETNILVLGAGPIGLVTLLAARAFGAPRIVIVDVDDYRLSVAKKLGADDIVKVSINIQDVATDIENIQKAMGGGIDASFDCAGFNKTMSTALGATRPGGKVCLVGMGHHEMTVPLTPAAAREVDVIGIFRYKNTWPLCLEFLRSGKIDVKPLITHRFGFSQEEVEEAFETSARGGDAIKVMFNL

SEQ ID NO: 28639 - protein, 486 aa, Oryza sativa
MAPWRAAAMASSQLARRAARRLLSSQHRRHCAAPACPWLLGSAPPVLAPSPVAAAAAGDRRGFCSVRRFTGESNAAAAVEEAENGLVAGGDQAIDFPGGKVSFVAEMNFLPESQRDRINCYRVLDDDGRTISGSRFQEVSKELALKMYNEMATLQVMDTIFFEAQRQGRISFYLTSHGEEAINIASAAALTIDDIVLPQYREPGVLLWRGFTLQEFANQCFGNKLDYGKGRQMPIHYGSNRLNYFTVSSPIATQLPHAVGAAYSLKMDKKDACAITYFGDGGTSEGDFHAALNFAAVMEAPVIFFCRNNGWAISTPTSEQFRSDGAVIRGQAYGMRSIRVDGNDALAVYSAVHTAREMAIKEGRPILVEALTYRVGHHSTSDDSTKYRPVDEIEHWRTARDPISRYRKWVQGNGWWCDEDESELRNNVRQELLKAIQVAERMPKPPLAELFTDVYDEVPSNLREQERLLRDTIKKHPADYPADVHI

SEQ ID NO: 28640 - protein, 409 aa, Synechococcus elongatus PCC 6301
MQCSSRPVTSFNGSKHFSHLPQGCPMTVTLPSVSEKHRVRLQPLELPERLLLGPGPSNAHPAVLEAISRPPIGHLDPKFLELMTEVQGLLRYIWQTDNRLTIPVSGTGSAAMEATIANSVEPGDVVLVGVMGYFGNRLVDMAGRYGADVRTIHKPWGDVFSLAELRQALEEHRPQILALVHAETSTGAEQPLAGVGDLCREFDCLLLIDTVTSLGAVPTLLDEWGVDLAYSCSQKGLSCPPGVSPFTMGPRAEEKLARRKGKVANWYLDMSLLNQYWGSDRVYHHTAPVNMNFGIREALRLIADEGIETVWKRHRDNAEYLWAGLEDLGLTCHVPVENRLPTLTTVRIPEGVDGKAVSRQLLDEHGIEMGGGLGELAGKVWRIGLMGYNSRRENVDRLLSILADVLPRS

SEQ ID NO: 28641 - protein, 606 aa, Delphinium 'MagicFountains dark blue'
MDSCACIDTQWPADELLVKYQYISDFFIALAYFSIPLELIYFVQKSAFFPYRWVLMQFGAFIVLCGATHLINLWTFSMHSKTVAMVMTIAKISTAVVSCATALMLVHIIPDLLSVKTRELFLKNKAEELDREMGLIRTQEETGRHVRMLTHEIRSTLDRHTILKTTLVELGRTLGLEECALWMPSRTGMNLQLSHTLRHQIPVGSTVSTNLPIVTQVFNSNQAIKIPHTCPLARIGPTAGRYVPPEVVAVRVPLLHLSNFQINDWPELSAKSYAVMVLMLPTDSARKWHDHELDLIEVVADQVAVALSHAAILEESMRARDMLMEQNIALDMARREAEMAIRARNDFLAVMNHEMRTPMKAVIALSSLLLEIELTPEQRVMIETVLKNSNLLAALINDVLELSRLEDGSLELDIRTFSLHGIFREVLNMIKPITAVKKLSLTLMLSPDLPVVAVGDEKRLVQIMLNVVGNAVKFTKEGYVSVIASVAKAESLRDWQAPEIFMVSSDSHFHLCVQVKDSGCGISPQEIPHLFTKFTQLRSGQNRSNDGAGLGLALCKRFLNLMEGHIWVNSDGTDKGCTVTIIVKLGICEGQPEPSNLQVVSRPRLS

SEQ ID NO: 28642 - protein, 478 aa, Rickettsia akari str. Hartford
MINNFFNLIRIFRIISKKRILIDSRSPKYFTFIGYILALFSAPLSLFKKPYEDYGKRLIDCLSDLGPIYIKFGQTLSTRPDLVGAEIAGNLRVLQDKLAPFDGVVAREIIEREFGKCIVSPWLDHGIQKKIKKDWIPQSSLGMTLFLNNSPIAAASISQVHKAQLATGEYVAVKILRPGIHKKYNRDIKLLYFLAKIIAKFSKAKRLKPIKVVDKFHETMRFELDLRLEAAAASELMDNMRHDVNVIIPKIYWDLTSENILTTEWLEGTSIYDTLRLEELGLEPTKIAQNFAVMFFNQAYRDGFFHADLHAGNILVNKQGKIILLDFGIMGRLKEKDRLAVAESLFGFLKRDYKLVAKVHLRAGYIPSNTDLDLFAQSCRAVTEPIVGIPTKNISIGKLLAHLFKITEEFGMEVQPELLLLQKTLIMVEGIGRQLDGNVNMWQLAEPWIKKWAVKNLSTEAKLLRLVKHYLDILEDIV

SEQ ID NO: 28643 - protein, 143 aa, Acinetobacter sp. ADP1
MAVERTLSIIKPDAVGKNHIGEIIARFEKAGLKPVAMKYKHLSQAEAEGFYAEHKERGFFADLVAFMTSGPVVVSALEGENAVLAHREILGATNPKEAAPGTIRADFATSIDENAAHGSDSVASAEREIAYFFAADEIFPRTR

SEQ ID NO: 28644 - protein, 177 aa, Triticum aestivum
  misc_feature (98)..(98): Xaa can be any naturally occurring amino acid
  misc_feature (122)..(122): Xaa can be any naturally occurring amino acid
  misc_feature (162)..(162): Xaa can be any naturally occurring amino acid
  misc_feature (175)..(175): Xaa can be any naturally occurring amino acid
  unsure (1)..(177): unsure at all Xaa locations
MRGWREEVVALSLEAHGPGDDRPEKPRRYGVTEMRSPCYTFRPAHHALQEILDNIGPFVDGLKFSGGSHSLMGKELIREITDLAHKHDMYVSTGDWAXEHLLRQGPSSLQSNMLEECKEFGXSDTIGLNAGSLKLPEEAILRLVRLIKNTGRRAKPLFSVKXFDSPDIPAAGDRXWG

SEQ ID NO: 28645 - protein, 429 aa, Nostoc punctiforme PCC 73102
MKKVLSIILGGGAGTRLYPLTKLRAKPAVPVAGKYRLIDIPVSNCINSEIFKIYVLTQFNSASLNRHIARTYNFTGFNEGFVEVLAAQQTPENPNWFQGTADAVRQYLWLMEEWDVEEYLILSGDHLYRMDYRQFIQRHRDTGADITLSVIPIDERRASDFGLMKIDDSGRIIDFSEKPKGEALTQMQVDTSVLGLTKEQAQKQPYIASMGIYVFKKEVLFKLLRESVERTDFGKEIIPDASKDYNVQAYLFDDYWEDIGTIEAFYHANLALTQQPQPPFSFYDEHAPIYTRARYLPPTKLLDCQITESIIGEGCILKNCRIQHSVLGVRSRIESGCVIEESLLMGADFYQASVERQCSLIENDIPVGIGTDTIIRGAIIDKNARIGHDVKIVNKDNVQEAERENQGFYIRSGIVVVLKNAVIPDGTII

SEQ ID NO: 28646 - protein, 658 aa, Helicobacter hepaticus ATCC 51449
MKVVYSDALIIGGGLAGLRASIAAKQAGLNTIVLSLVPVKRSHSAAAQGGMQASLGNSVKSDGDNEDLHFADTVKGSDWGCDQNVARMFVTTAPKAIRQLAGFGVPWTRIQKGDRPAVINGEKVTITEDDFRHGYIHSRDFGGTKKWRTCYTADATGHTMLYAVANEAYKLGVDIQDRKEAISLIHQDGRCYGAVVRDLVTGELIAYVSKGTLLATGGYGRVYRNTTNAVICEGTGAAIAMETGVAKLGNMEAVQFHPTPIVPSGILLTEGCRGDGGVLRDVDGYRFMPDYEPEKKELASRDVVSRRMLEHIRNGKGVKSPYGDHLWLDISILGRAHVERNLRDVQDICKTFAGIDPATPGVWAPVRPMQHYSMGGIRTDYRGETYLKGLFAAGEVACWDLHGFNRLGGNSVSEAVVAGMIIGEYFTEYCQGANLDVQTTLLEKFVKKEEEYLASLLNSTGNEDVYVLKNAMKDIMDNDVGIFRDGKSLQEAVNKLEDLYKRSKNVRVQNKKLHNNPELEDAYRTPKMLKIALCVAKGALDRTESRGAHTREDYPKRDDANWLKRTLTSWEDPNQTLPTVTYEDLDIMKMEIAPGFRGYGAKGMIIEHPNSAIRQAEIEKITQEIQAKGGDRYALQEALMPFNLQPQFKARNQRLGDK

SEQ ID NO: 28647 - protein, 173 aa, Rhodopseudomonas palustris CGA009
MIGFGWLEALLRVGRKLFVKPETQLYPEQKPKLYPRARGRIVLTRDPDGQERCVACNLCATVCPVGCIDLAKAVADDGRWYPEYFRVNFARCIFCGFCEDACPTAAIQLTPDYELSEWRRDALVYEKHDLLISGEGKVRGYRYWSVAGKAIPGKDKGEAEHEAPPVNLKGLLP

SEQ ID NO: 28648 - protein, 603 aa, Candida albicans SC5314
MIRLVRLGPGSSILRRQIGYIPNRVFPIFRNVKPTLESRIPTVSYKSNKLYSTSTVSSTINSSAKKTKSSTSSSSSRYGKFFKFGLAIGLGTTILYYTNDSFKHIVLTIDRVNTVTVAMIRCFALYKETLGATYDGDIDRHKALSKTHKKAAEITLKALEKNGGIYIKLGQHITALTYLLPPEWTNTMLPLQDKCPQSSLEEIEKLFENDLGKKMSDLFIEFDPNPVGVASLAQVHIATLKNGEKVAVKIQHPSLKEFVPLDVALTKMVFDLMYKVFPEYPLTWLGDEMQNSIYIELDFTKEAENAQQTAEYFKNYQRETALRIPKIVEAQSRILVMEYVSGERLDNLKYMEQNNIDPSEVSSCLSHIFNNMIFTPGVALHCDPHGGNLAIRSVPKSEHNKSGHNFEIILYDHGLYRTIPLQMKRDYSHFWLAVLDNDVPNMKKYAMKIANIGDDDQKFRIFMSAITGRAPEEALNYDISSRRSNEEIQKIQGQINNDNRVLEDLMDILSNMPRMVLLILKTNDLTRNLDENLESSLGPERTFLIMANYCAKCVYDESKEEINQKYRGWSWLTHSISNWWYYQKRLSTLYLYDFVLMIRRLTF

SEQ ID NO: 28649 - protein, 398 aa, Thiobacillus denitrificans ATCC 25259
MIPLHLSHFTASSCLGAGLDPTLAALRAGRSGLAPCRFETVHDLDTHIGEVAGVDETPLPADFAEHDCRNNRLAWLGLQQDGFDAAVRAAIARHGRRRVGVFLGTSTAGILQTEQAYRRRDAASGALPADFVYRTTHNTYSLAGFVRALYGIEGPAAVASTACSSGAKVFASAQRMIATGLIDAAIVGGVDSLCLTTLYGFNSLELLSPEPCRPFDAGRRGLSIGEAAAFALLEAVPASLDADAVLLLGAGESSDAHHMSSPHPEGAGARQAMAATLAAAGLAPDQIDYVNLHGTATPSNDAAEGRAVAALFGDRVACSSTKGATGHTLGAAGGLEAVIAALALQHGFMPGGVNTRTPDPAIPVRYLRTNTDVAPRRVLSNSFGFGGTNCSLVLGRAG

SEQ ID NO: 28650 - protein, 343 aa, Mycobacterium leprae
MADVLDESLSLFYDDNADLSIIQRRKVGVIGYGSQGYAHSLSLRDSGVQVRVGLPEGSKSRPKAFEQGLDVDTPAEVAKWADVIMLLVPDTAQADVFENDIEPNLQPGDALFFGHGLNIHFELVKPSGDVTVAMVAPKGPGYLVRRQFVDGKGVPCLIAVNQDPTGTGEALALSYAKAIGGTRAGVIKTTFKDETETDLFGEQAVLCGGTEELVKAGFDVMVEAGYPPEMAYFEVLHELKLIVDLMYEGGIARMNYSVSDTAEFGGYLSGPRVIDADTKERMRGILRDIQDGSFVKKLVANVEGGNKQLEVLRKENAEHPIEVTGKKLRDLMSWVDRQSTETA

SEQ ID NO: 28651 - protein, 390 aa, Cryptococcus neoformans var. neoformans JEC21
MTQTSSSSVSVPGEPLKNVLVTGGLGYIGSHVVLSLLMSGRYLPIVIDNAHNAYPQALERCNQIAQSEVGPHAPKPLYHQCDIRNAEEINKVFKQYQSKGGIWAVIHLAALKAVGESSEIPLDYYEVNVGGSISLLKIMQQSQTNNLVFSSSATVYGTPAVIPIPETSEIIPESVYGRTKAITEEVIRDVCRAGAATADNQGLKAISVRYFNPAGAHPSGKLGEEPKGRPGNLLPILAQIAVGRLSSDLKVFGNDYPTRDGTCLRDYLHIMDLAEGHLLALDALAKSEIKTQSSGIFQSIDTKKEGYFRAFNLGRGKGITVLEMINEMKIATGYEYQFEIVERRSGDVPDLTADPRLAQEELGFIARRGLQEMCQDLWRFQSSNVNGYSS

SEQ ID NO: 28652 - protein, 666 aa, Bacillus thuringiensis serovar konkukian str. 97-27
MSHSIEQLSINTIRTLSIDAIEKANSGHPGMPMGAAPMAYTLWTQFMKHNPNNPTWFNRDRFVLSAGHGSMLLYSLLHLSGYDVTMDDLKNFRQWGSKTPGHPEYGHTAGVDATTGPLGQGIATAVGMAMAERHLAAKYNRDAYNVVDHYTYAICGDGDLMEGVSAEASSLAAHLQLGRLVVLYDSNDISLDGDLNRSFSESVEDRYKAYGWQVIRVEDGNDIEAIAKAIEEAKADEKRPTLIEVRTTIGFGSPNKSGKSASHGSPLGVEETKLTKEAYAWTAEQDFHVAEEVYENFRKTVQDVGETAQAEWNTMLGEYAQAYPELANELQAVMNGLLPEGWEQNLPTYELGSKAATRNSSGAVINAIAESVPSFFGGSADLAGSNKTYMNNEKDFTRDDYSGKNIWYGVREFAMGAAMNGIALHGGLKTYGGTFFVFSDYLRPAIRLAALMQLPVTYVFTHDSIAVGEDGPTHEPIEQLAALRAMPNVSVIRPADGNESVAAWRLALESTNKPTALVLTRQDLPTLEGAKDDTYEKVAKGAYVVSASKKETADVILLATGSEVSLAVEAQKALAVDGVDASVVSMPSMDRFEAQTAEYKESVLPKAVTKRFAIEMGATFGWHRYVGLEGDVLGIDTFGASAPGEKIMEEYGFTVENVVRKVKEML

SEQ ID NO: 28653 - protein, 702 aa, Xanthomonas campestris pv. phaseoli
MAKSPSKSAQVPALAPVSATVDGARGTGDELHQKAGGTHPQLTTNQGIPVGDNQNSLRATPRGPTLLEDFILREKITHFDHERIPERIVHARGSAAHGYFELTKSLSQYTTAKIFTEVGEKTPLFTRFSTVAGGAGSVDTPRDVRGFAVKFYTKEGNWDLVGNNIPVFFIQDAMKFPDLIHAVKMEPDRGFPQAASAHDTFWDFISLTPESMHMVMWAMSDRTIPRSLRMIEGFGIHSFRFLNDKGESTFVKFHWRPKLGLQSTIWDEAVKIAGADQDFHRRDLFEAIQNGDFPEWELGVQLFTEAQAATFPFDHLDSTKVIPEELVPLQIVGRMVLDRWPDNFFAETEQVAYCPANIVPGIDFSNDPLLQGRLFSYLDTQLSRLGGPNFHQIPVNAPKCPFANNQRDGHMQMGVPKGRVAYEPSSLQADAPREALRGFPSHATPAEEGAKGRVRAESFADHYSQARLFFRSQTAPEQAHIASALVFELSKVETAHVREAIVGHLRHIDQELAQRVADGMGMTALPPAPPAAVAPIDMPLSPALQVIGKMKDTLKGRTVGILIHDGSDAAAIKAVRKAAEAAGATVKIVAPKLGGAKLSDGKQLAADGQLAGTPSVVFDAVAVLLSSEAAKLLTRESAALNFVSFAWAHLKAIAFDEGAQVLLKAGNVGKDAGVVPAADTKAFITAAKTRQWAREPKVRMLA

SEQ ID NO: 28654 - protein, 100 aa, Mycobacterium bovis
MAKVNIKPLEDKILVQANEAETTTASGLVIPDTAKEKPQEGTVVAVGPGRWDEDGEKRIPLDVAEGDTVIYSKYGGTEIKYNGEEYLILSARDVVGRRFK

SEQ ID NO: 28655 - protein, 541 aa, Mycobacterium avium subsp. paratuberculosis K-10
MAKTIAYDEEARRGLERGLNALADAVKVTLGPKGRNVVLEKKWGAPTITNDGVSIAKEIELEDPYEKIGAELVKEVAKKTDDVAGDGTTTATVLAQALVREGLRNVAAGANPLGLKRGIEKAVEKVTETLLKSAKEVETKDQIAATAAISAGDQSIGDLIAEAMDKVGNEGVITVEESNTFGLQLELTEGMRFDKGYISGYFVTDAERQEAVLEDPFILLVSSKVSTVKDLLPLLEKVIQAGKPLLIIAEDVEGEALSTLVVNKIRGTFKSVAVKAPGFGDRRKAMLQDMAILTGGQVISEEVGLSLESADISLLGKARKVVVTKDETTIVEGAGDSDAIAGRVAQIRTEIENSDSDYDREKLQERLAKLAGGVAVIKAGAATEVELKERKHRIEDAVRNAKAAVEEGIVAGGGVALLHAIPALDELKLEGEEATGANIVRVALEAPLKQIAFNGGLEPGVVAEKVRNSPAGTGLNAATGEYEDLLKAGIADPVKVTRSALQNAASIAGLFLTTEAVVADKPEKAAAPAGDPTGGMGGMDF

SEQ ID NO: 28656 - protein, 411 aa, Glycine max
MSSKERPTLGGTRIKTRKRNIAAPLDPAAFSDAVVQIYLDNAGDLELIAKSIESSDLNFSRYGDTFFEVVFTGGRTQPGTTKPDEGDRHPYSIIECEPKREVILPSVIYIQKILRRRPFLIKNLENVMRKFLQSLELFEENERKKLAIFTALAFSQKLSGLPPETVFQPLLKDNLVAKGLVLSFMTDFFKEYLIDNSLDDLISILKRGKVEENLLDIFPPTKRSNEAFSEHFTKEGLVALVEYNEKKNFEVKLKEMKSSLTAQLTDEADTSEVIETVKLRVRDAKLPDIEVVRILWDVLMDAVQWSGKNQQQNANAALRQVKTWAELLNTFCTTGKLELELMYKVQMQCYEDAKLMKLFPEIVRSLYDQDVLAEDTILHWFRKGTNSKGRQTFVKALEPFVNWLEEAEEEE

SEQ ID NO: 28657 - protein, 522 aa, Trametes sp. 420
MAKFQSLLTYIILSLAATAFAGIGPKTDLTIADGDVSPDGFTRAAILVNNQFPSPLITGNKGDRFQLNVVDNLTNHTMLKSTSIHWHGFFQHGTNWADGPAFINQCPIASGHSFLYDFQVPDQAGTFWYHSHLSTQYCDGLRGPFVVYDPQDPHASLYDVDDDSTVITLADWYHTAARLGPAFPLGADSTLINGLGRSTSTPNAELAVIKVTKGKRYRFRLVSLSCDPNHVFSIDGHTLNIIEVDSINTEPHTVDNLQIFAAQRYSFVLTADQDVGNYWIRANPNFGTTGFADGVNSAILRYDGAAEDEPTTSQTPFSNPLVETDLHTLDALTVPGTATRGGVDLAINMAFNFNGTNFFINGASFTPPTVPVLLQILSGASAAQDLLPSGSVYALPSNADIEISLPATAAAPGAPHPFHLHGHAFAVVRSAGSSTYNYDNPVWRDVVSTGTPANNDNVTIRFRTDNPGPWFLHCHIDFHLEAHLSFRSLFLNPRRHGQVSVSAHLHHPLSRRDRVRWHRSKD

SEQ ID NO: 28658 - protein, 471 aa, Parachlamydia sp. UWE25
MTNPSIVWFRQDFRLEDNPALNAATQKGGPVIPVFNWVFNPEKEWQLGGASQWWLYYSLISLKNDLSELGLSLIIRKEDPLKSLLEIAHETGADTVYWNRRYEPMLIQDDAKIKTELQKQGIKAHSFNGNLLFEPWTIANKQGKPFQVFTPFWNQCLKLNDPEVPLPVPHSLKKFVGQLQTESIDSLNLLPKIKWDKGLKEVWSPGAKSAKALLKKGLTGVIDQYLDIRDLPDHDGTSLLSPYLHFGEISPRMIWQAVKENSTSKGAEGYLRQIGWREFAHHLLYHFPETPQKPLRSQFNSFSWKNDKQNLKAWQKGQTGYPIIDAGMRQLWKIGWMHNRVRLIVGSFLVKDLMIHWIEGAKWFWDTLVDADLANNTMGWQWIAGCGADAAPYFRIFNPITQGEKFDPEGNYVKKWVPELINLPKEWLHQPWEAPEEILRQSGIELGINYPKPIVNHAKAREEALQAYSRL

SEQ ID NO: 28659 - protein, 361 aa, Leuconostoc mesenteroides subsp. mesenteroides ATCC 8293
MTKVALILKHNRTKIYYLVVTILLLLLFSWTIMTGFDALRHRFSFISFNIWNVLEFVTFVSGNIGIVFWQYLKWRRDESLYRLIREMRQVARENSDMTISWRAPYAPTTQALIDVSNTIAENTRRIREEERQSERSKDEMITNISHDLRTPLTAIIGYLGLVEMGQALSEKDRKKYIHTAYSKSNQMKVLVEDLFEYSQTQAQDAALNITSLSLNDLFGQLLAGYELEAQEKNIALNQLTNPEMIVIEADSDKLARVLMNLVSNAFKYGDGATFIKLTAQIDDKNVVIRVTNDGVKIPDEAIGDIFDRFYRVESSRNSKTGGTGLGLAIVKGIVVQHHGSVAVESDDDMTSFIITLPLKQT

SEQ ID NO: 28660 - protein, 509 aa, Vitis vinifera
MNPLALIFCTALFCILLYHFLTRRSVRLPPGPKPWPIVGNLPHLGPVPHHSIAALAKTYGPLMHLRMGFVDVVVAASASVAAQFLKTHDANFSNRPPNSGAKHIAYNYQDLVFAPYGPRWRMLRKICSVHLFSGQALDDFRHIRQEEVLALMRALAREGQTPVKLGQLLNVCTTNALGRVMLGRRVFGDGSGGEDPKADEFKEMVVELMVLAGVFNIGDFVPALEWLDLQGVASKMKKLHARFDAFLGAIVEEHKISGSAGSERHVDLLSTLISLKDNADGEGGKLTDVEIKALLLNLFTAGTDTSSSTVEWAIAELIRHPEMMAQAQQELDAVVGRGRLVTDLDLPKLTYLQAIVKETFRLHPSTPLSLPRMAAESCEINGYHIPKNATLLVNVWAIARDPEVWEEPLEFRPNRFLPGGERPNADVRGNDFEVIPFGAGRRICAGMSLGLRMVHLLTATLVHAFNWELPEGQVAEKLNMDEAYGLTLQRAAPLMVHPRPRLSPQVFGK

SEQ ID NO: 28661 - protein, 400 aa, Frankia sp. CcI3
MTNAAPPAAAVPGLAARAGAVRTSPVREILALTAHPEVISFAGGLPAPELFDADGIRRAYDRVLTEEPRRVLQYSATEGDPDLRQTVAERLARRGLPTRADDLLITTGSQQALTLLSATLVEPGDAVLVEDPTYLAALQCLGLAGARVVPVPTDEHGILPDRLAETVARERPRLLYLVPTFQNPTGRTLSAARRAAVARVAAEQGLWIVEDDPYGELRFQGTREPWIASFADAADRTVLLGSFSKIIAPGMRLGWLRAPAMLRRACVIAKQAADLHTSTVDQAAAARYLADADPDLHIARMCAAYRERRDALLDGLAWALPPGSSWNRPEGGMFVWARLPDGHDATALLPGVVEHDVAYVPGAPFFAGPPDPATLRLSFTTHPPVEITKGLTRLARAFGV

SEQ ID NO: 28662 - protein, 509 aa, Vitis vinifera
MNPLALIFCTALFCILLYHFLTRRSVRLPPGPKPWPIVGNLPHLGPVPHHSIAALAKTYGPLMHLRMGFVDVVVAASASVAAQFLKTHDANFSNRPPNSGAKHIAYNYQDLVFAPYGPRWRMLRKICSVHLFSGKALDDFRHIRQEEVAVLTRALARAGQTPVNLGQLLNVCTTNALGRVMLGRRVFGDGSGGEDPKADEFKEMVVELMVLAGVFNIGDFVPALEWLDLQGVAAKMKKLHARFDAFLGAIVEEHKISGSAGSERHVDLLSTLISVRDNADGEGGKLTDVEIKALLLNLFTAGTDTSSSTVEWAIAELIRHPEMMAQAQQELDAVVGRGRLVTDLDLPQLTYLQAIIKETFRLHPSTPLSLPRMAAESCEINGYHIPKNATLLVNVWAIARDPEVWEKPLEFRPSRFLPGGERPNADVRGNDFEVIPFGAGRRICAGMSLGLRMVHLLTATLVHAFNWELPEGQVAEKLNMDEAYGLTLQRAAPLMVHPLPRLSPQVFGK

SEQ ID NO: 28663 - protein, 509 aa, Vitis vinifera
MNPLALFFCTALFCVLLYHFLTRRSVRLPPGPKPWPIVGNLPHLGPVPHHSIAALAKTYGPLMHLRMGFVDVVVAASASVAAQFLKTHDANFSNRPPNSGAKHIAYNYQDLVFAPYGPRWRMLRKICSVHLFSGKALDDFRHIRQEEVAVLTRALARAGQTPVNLGQLLNVCTTNALGRVMLGRRVFGDGSGGEDPKADEFKEMVVELMVLAGVFNIGDFVPALEWLDLQGVAAKMKKLHARFDAFLGAIVEEHKISGSAGSERHVDLLSTLISVRDNADGEGGKLTDVEIKALLLNLFTAGTDTSSSTVEWAIAELIRHPEMMAQAQQELDAVVGRGRLVTDLDLPQLTYLQAIIKETFRLHPSTPLSLPRMAAESCEINGYHIPKNATLLVNVWAIARDPEVWEKPLEFRPSRFLPGGERPNADVRGNDFEVIPFGAGRRICAGMSLGLRMVHLLTATLVHAFNWELPEGQVAEKLNMDEAYGLTLQRAPPLMVHPRPRLSPQVFGK

SEQ ID NO: 28664 - protein, 222 aa, Nostoc punctiforme PCC 73102
MVLTLYHSPISPNSRRVWITLLEKGLEFELVDIKLDGEQFQPEFLAINPFHHIPALVDDDFNVVESLAILDYLEAKYPTPAMLPKDAKDLAIARMVQLVTVNELLPAATTFLPQILGLPGADPEKIEKAKHKIATVLKFFENLLDDRPYFASHNLTLAEVVAGTVVNVLPSVGIFLSEYPKLNAWHDRLIVRPSWQATESTPEAMEAFKSVIVARNTRQTQT

SEQ ID NO: 28665 - protein, 143 aa, Rickettsia rickettsii
MALTLKYFFKPKVTINYPYEKSPISPRFKGEHALRRYEHGEERCIACKLCEAICPAQAIVIEADEREDGSRRTTRYDIDMTKCIYCGLCQEACPVDAIVEGPNFEFASLTHTALIYDKERLLQNGDRWEQALASKLHKDYEYR

SEQ ID NO: 28666 - protein, 448 aa, Treponema denticola ATCC 35405
MKNLTQGDELKQITLFSLPMLLGNIFQQLYNVVDSIVVGKSIGDHALAAVGISFPVWFIFISLVIGFTMACNILIAQFVGAKKEEEISKVIQTSILILFWAGLIATAIGFVFAPYILKIMNTPSDVFEEALIYLRLIFTGIIFLFIYNAFTAMLRGFGDSMTPLYALIISTIINIGLDCLFVIVFKWGIAGAAIATIIAQFISCFWLIFYCRIKYKDFRVNFFKLKFDKTICIQSVKMGFPSGIQQALVGGGFMALLSIVNTFGTQTAAAYSAAGKLDGFIVMPALNIGVALSSFTGQNIGAGRLDRVKKGLRASLFLGLGITITATTAIVIFGKAVMFLFVNNPEVIELGARYLIIVAPAYFFNTITFTLNGVIRGAGETVFPMISTLLAMWVFRVPAAAVLSRYLGSDGIWLAVSVGSAAGFLLTLFYYCSGKWKKKTAEILNLKK

SEQ ID NO: 28667 - protein, 88 aa, Treponema denticola ATCC 35405
MKVKPLGDRVLVKPDAVETKTAGGIIIPDTAQEKTQRGVVVAVGDDKEKIKVSVGQKVIHDKYAGTQIQIDGVDHLILKSNDLVAVVE

SEQ ID NO: 28668 - protein, 286 aa, Treponema denticola ATCC 35405
MYNRTKNNYDAEMNSLATYLKEINQIPLLTAEEEIKYAKLAEKGDEDAKNMLVNSNLRFVVNVAKKYQNQGLPLMDLISEGNIGLMNAAERFDVSKGYKFISYAVWWIKQSILKAICEKSRMIRLPLNRANELVQIEKAKKEIDFSGNETKELNEIAGILNMDNSMVHTIMNAAREPISIDAPVFDEPGSSSVNDFLQDETHQMPEDYAMDMSLRDEVNELLKNLDDREAEIIRYRFGLGGYAPLSLKEVGLIFNLTKERIRQIEKKALQQLKKPAEKQKLAVYVA

SEQ ID NO: 28669 - protein, 673 aa, Clostridium tetani E88
MESFIVYSVLAGVIALIFAFMLSSFISKESAGNERMQEIAGHIHDGAMAFLKTEYKYLTGFIVIVTVILAIFVGWQTAACFILGAIFSIFAGYFGMNVATKANVRTAEAARHSQGKALNIAFSGGAVMGMSVVGLGVVGIGIMYYIFGGNMEFVTGFGLGASSIALFARVGGGIYTKAADVGADLVGKVEAGIPEDDPRNPAVIADNVGDNVGDVAGMGADLFESYVGSIISALTLGTVVYANKEGVMFPLILSSIGIVASIIGILFSRKSKAKDPQKALNTGTYIGGIIVIVSAAILSNTIFGNLKAFFAVASGLVVGMIIGKITEMYTSDAYSSVQKIANQSETGPATTIISGLAVGMYSTLWPIVLISIGVLVSFFVMGGGSNAMVGLYGISLAAVGMLSTTGLTVAVDAYGPIADNAGGIAEMSELPHEVREITDKLDSVGNTTAAIGKGFAIGSAALTALSLFASYAQATELESIDILNTVTLVGLFIGAMLPFLFGALTMESVGKAANEMIEEVRRQFKTIPGIMEGKATPDYKKCVDISTAAAIREMILPGVLAIVVPVAMGLLLGKEALGGLLAGALVSGVLVGILMSNAGGAWDNAKKYIEGGAHGGKGSEAHKAAVVGDTVGDPFKDTSGPSMNILIKLMTIVSLVFAPVVLQYGGILLNLIK

SEQ ID NO: 28670 - protein, 579 aa, Rhodospirillum rubrum
MRPHLGTIALAVMWMLVLAAATVAVAHMLKPAIDGIVVGSDPQALWGIGLGILLAFAVKAVSNFFSVVLVAKAGLAAVSDARNRLYRHLSEMDLGFFLAHSASALAARFTVDLHLLRLAVSNGLTSLGRDLMTLIGLVAYTFWVDWQMALLAYIALPLAIWPVARLGRRIRRIAGRTQRDLGSLNAQLTQTLRGIRMVKIYGAEEMERARVHRLIAAVQTQSFKAEWTRALVTPIMEGVVGLAAGAALYYGGARVLAGEVTPGDLTAFLGAVMLAYQPAKRLANLHTILQEGLAAADRMYHLLDLKPAVAEAPGAPPLRPGPGTVRFDDVTFAYDGGPGPELGDDASGPAAAPPALRGVDLTLEAGTVVALVGPSGAGKSTLMNLIPRLHDPQRGRVLIDGQDVRAVSFASLWARIGLVSQDVVVFDDTVRANIAYGRPEASAEEVERAARRAAAHDFIAALPDGYDTRLGEQGVRLSGGQRQRLCIARAFLKDAPILLLDEPTAALDTESERLVQSALAALMAGRTCLIIAHRLSTIAGADVIHVMAEGAVVESGDHAGLLAKDGLYARLHAANRLGA

SEQ ID NO: 28671 - protein, 268 aa, Salmonella typhimurium
MERYENLFAQLNDRREGAFVPFVTLGDPGIEQSLKIIDTLIDAGADALELGVPFSDPLADGPTIQNANLRAFAAGVTPAQCFEMLALIREKHPTIPIGLLMYANLVFNNGIDAFYARCEQVGVDSVLVADVPVEESAPFRQAALRHNIAPIFICPPNADDDLLRQVASYGRGYTYLLSRSGVVGAENRGALPLHHLIEKLKEYHAAPALQGFGISSPEQVSAAVRAGAAGAISGSAIVKIIEKNLASPKQMLAELRSFVSAMKAASRA

SEQ ID NO: 28672 - protein, 977 aa, Synechococcus elongatus PCC 7942
MKLRRQFLLFGVGTTFTAIAAISLSDVITNTRLSESSREEVQSLLQREQESILSRTYTVVRVQGTSIEKQLSRQIQVLDEALQRAGGLRTGSRLVRWQAKNQYTGAIQPVELPELQLGGRWLDQVSRFDQAVPVIDTVSRQMGGTVTIFQRINDRGDMLRVATTVPNQDKQRAIGTYIPVTNPSGDPNPVIAAVLKGQTYRGPAYIVNDWYIAIYQPLKDAQGRVIGMIYAGQRQDQTGELARSFQDLRFGQTGSAFVFLGQGSQRGETILTSDPSLQKKNFWDAKDASGQFFLRTSIADAIRQPGAFIRVRYLARPWTEGLQSTQPARQEQMLLVYYRPWNWVIGIRQDEQEFAEPFRRLEAIQQRSLYIQLLLGVIIAVLGAIAARGWAAHLGMRIEQLAHAADAMASGQLQQQIPTSGRDELTVLAQAFNRMAVTLRELLVSLEHRVQERTAALRETNDRLEQAREQAEAANQAKSAFLANMSHELRTPLNAIIGYSEMMMEEAEDGIEVEELLPDFRKINNAGKHLLELINSILDLSKIEAGRMELYLESFSLPELINGVKSIIKPLIEKNQNQLLVDCPADIGLMTADVTKLRQTLLNLLSNASKFTHQGTDSAAGCCQGDQVVFKVVDSGIGMSPEQIDRIFEAFAQADDSTTRKFGGTGLGLSISRHFIEMMGGKITVESVLGEGSTFTITLPRQVQPPQSIPAVDPVLTDEAIATATEQEDQNQPVVLVVDDEPSARELLRRMLEKEGYRVVTAAGGAEGLQRAQELRPALITLDLMMPQVDGWSVLTALKADPMLAEIPVVMVSMVEGRSLSYALGAADYLHKPIDRDQLRRILERYTHPDRQPLALVIEDDPVNRSLLRQLLERDGWQVAEANQGQQGLAVLESLEQPPDLILLDLMMPQMDGFAFVDALRANGNWQTLPVIVVTAKDLTEQDRQRLQGRVSQVIAKGNLAIDRLLAEIRQVGANRV

SEQ ID NO: 28673 - protein, 711 aa, Streptococcus pyogenes M1 GAS
MMSKLVFFWQNREKEFRDFGGFSEKSVYFCDTIDNRKRLILVVINREVLLMTFDAIDQLAVNTVRTLSMDAIQAANSGHPGLPMGAAPMAYVLWNHFMNINPKTSRNWSNRDRFILSAGHGSAMLYSLLHLAGYDLSVEDLKNFRQWGSKTPGHPEVNHTDGVEATTGPLGQGIANAVGMAMAEAHLAAKFNKPGFDIVDHYTFALNGDGDLMEGVSQEAASMAGHLKLGKLVLLYDSNDISLDGPTSMAFTEDVKGRFEAYGWQHILVKDGNDLEEIAAAIEAAKAETEKPTIIEVKTIIGFGAEKQGTSAVHGAPLGAEGIAFAKKAYQWTHQDFEVPAEVTERFAQGLQARGEKAEQAWNDLFAAYEAEYPELAAEYQKAFTNEAAQVELEAHELGSSMASRVSSQQAIQQISEQVASFWGGSADLSASNNTMVKAETDFQPGHYEGRNIWFGVREFAMAAAMNGIALHGGTRVYGGTFFVFSNYLLPAVRMAALQNLPTVYVMTHDSIAVGEDGPTHEPIEQLASVRSMPNLNVIRPADGNETNAAWKRAIAETDRPTMLVLTRQNLPVLEGTKELAEDGLSKGAYILSEAKGDLDGILIATGSEVKLAMDTQEALEAEGIHVRVVSMPSQNIFDEQSAEYKESILPAAVTKRLAIEAGSSFGWAKYVGLSGKTLTIDTWGASAPGNRIFEEYGFTVANATELYKSL

SEQ ID NO: 28674 - protein, 500 aa, Bacillus halodurans
MKKSYGVMGGVLAVFFAIAGCSSDDHSEMDHGNNQQDEQNEGTFEDGKKVFNLEVTETHWMFNDEVMMDAWTYNGTLPGQEIRVQEGDEVVINVKNSLNVPTALHLHGFPVPNEMDGVPGVTQNAIMPGEEFTYEYQANVPGTYWYHSHQDGATQVDRGLYGVFIVEPVDPESYDTDVAIVIDEFASMGMGMGMDHSTMDHGDMEHDGNDDMSHSEMMNEMYDTMVINGKADPQIESINVVEGNRVKLRFVNAGLFTQVVSIPEHSFKITHYDGQPVNEPDVLQDTAFRIAPAERYDLEIIMDNPGAWGIQVFAEENQERLQALIPLVYEEYEDEELQTVDSISSFFDLTTYGIPKELDIGDITKEYDMLLGSDDGGDTFTINGKKFPNHEIYDVEEGDVVKFTIINDTDFDHPMHLHGDFFHVISKGGKAIQGSPVLKDTLNVRPGETYEIVFEAKNPGNWMFHCHEFHHASGGMVAEIHYEGFELPFTPDPNIPNMPE

SEQ ID NO: 28675 - protein, 413 aa, Cryptococcus neoformans var. neoformans JEC21
MSFTNFWAGVPEGPPDPILGVTDAFKKDTSPKKVNLGVGAYRDEDGKPYVLDSVLKAEDILHKKRLDKEYLPITGAADFIKLASELAYGKDSKPLREGRVAVSQSISGTGALRIATGFLSSFYSGPKVIYLPNPTWGNHVPLAESVGIKVERYRYFDKKTVGLDFEGMKEDIKNAESGSIILLHACAQNPTGIDPTQEQWKELSDLLKAKKHLPLFDMAYQGFASGDIIRDAFAVRYFVEQGHQIILCQSFAKNLGLYAERAGTFSMVCASPEEKERVMSQIKRVVRPLYSSPPIHGAQLVATILGTPELYDEWLTEVKKMADRIIAMREKLYNLLIELKTPGEWGHIKSQIGMFSFTGISKEQVDDLAEYAHVYMTKDGRISMAGLNEHNIQYFAESLSKAVKGELRTKSAL

SEQ ID NO: 28676 - protein, 559 aa, Arabidopsis thaliana
MENQEEDEVVLAKVTSEVEDNFEDEGLVSNSTLEKVAAAKKYIENHYNRRMRHIQQRKERRWVLEQKIASLDVSEKEQLELLEDLQRKETEYTRLMRNRLCVDDFDLLSIIGRGAFGEVRLCREKKTGNIYAMKKLKKSEMLSRGQVEHVRAERNLLAEVASDCIVKLYYSFQDPEYLYLIMEYLSGGDVMTLLMREETLTETVARFYIAQSVLAIESIHKHNYVHRDIKPDNLLLDKYGHMKLSDFGLCKPLDCRNISAMNVNEPLNDENINESIDGDENCSIGRRGRRWKSPLEQLQHWQINRRKLAYSTVGTPDYIAPEVLLKKGYGVECDWWSLGAIMYEMLVGYPPFYSDDPVTTCRKIVSWRTHLVFPEGARLTPEARDLICRLLCDSEHRLGSHGAGAEQIKAHTWFKDVEWEKLYEMDAAFKPVVNGELDTQNFMKFDEVECPKPARTGSGPSWKVLQFSGKSYIIISLIRGVLLCTYRSTGPLFLLVSITPQNINFVGYTYRNFDAVRGSRHSLDIKGSVSPPRSSTDSTRSDSAIDYTKLSTGGDGSQQ

SEQ ID NO: 28677 - protein, 670 aa, Cupriavidus necator
MNAPERIDPAARCANALRFLAADAVELARSGHPGAPMGMAEMAEVVWRRHLRHNPANPAWPDRDRFVLSNGHASMLQYALLHLTGYDLPMSQLRQFRQLHAVTPGHPEVDVTPGVETTTGPLGQGLANAVGMALAEKLLAATFNRPGFDIVDHHTYVFLGDGCLMEGLSHEACSLAGTLGLGKLICLYDDNGISIDGEVAGWFADDTPKRFAAYGWHVIADVDGHDAHALDAALHEAKAERDRPTLICCRTVIGKGAPAKAGGHDVHGAPLGAPEIAAMRTALGWEAEPFTVPADVADAWDARAQGAAREAEWEARFVSYCAAHPELAEEFVRRANGRLPEGFDAELMALLDAPSPLQGKIATRKASQLCLEALTPALPELLGGSADLTGSNLTNVKASVWVNHAGHGNYVSYGVREFGMAAVMNGIALHGGLIPYGGTFMTFSDYSRNAIRMAALMRLRVVHVLTHDSIGLGEDGPTHQPVEHAASLRLIPNNQVWRPCDGAETAYAWLAALQRENGPTCLVLSRQALMPFERDAAQRADIARGGYVLRDVPAPRVVLIATGSEVEIAARAALDLADAGIAARVVSMPCVELFYAQDAAYRDSVLPPGLPRISVEAGATWYWRGVVGEQGLALGIDSFGESAPAEALYQHFGLTPAHVAAAARVLLEDA

SEQ ID NO: 28678 - protein, 233 aa, Streptococcus pyogenes M1 GAS
MDIFGEFLGTALLVLLGNGVVAGVVLPKTKTHASGWIVIATGWGIAVAVAVFISGKVAPAHLNPAVSLAFAMSGTIAWSTAIAYSLAQLLGAMVGSTLVFLQFRPHYLAAESQADILGTFATGPAIRDTSSNLLSEIFGTFVLMLGILAFGLYDMPAGLGTLCVGTLVIGIGLSLGGTTGYAINPARDLGPRLVHAILPLNNKGDSDWSYAWIPVVGPIIGAVLAVLLFQVMS

SEQ ID NO: 28679 - protein, 333 aa, GIBBERELLA ZEAE PH-1
MSDKPIVLVTGANGYIAGSVVEAFLKAGYAVRGTVRSKASGDSLVKALSSYGSDLEIVQVPDIVAPGAFDTAVKAAGVSLSFTDPDPVLEVAIKGTESVLESALTEPSIKSVVLMSSIAAISATGNPSSNRVTEADWNDAALDAVKKLGKASPSPLIYVASKVAGERAFWKFRDEKKPSFTMTALNPTFVMGPQPGLESISKIGGTTAFIWQVFSGQDIPKPIVPNPSFVDARDIARVAVFSVDHPEKANGERFLLTAGLVPPQAAADVLRKAYPDRQDIIKVGQPGEGYYPGYAFPEEKILDASKTIKLTGQDFYPVEKSIIDTAKSLEKFL

SEQ ID NO: 28680 - protein, 137 aa, Thermus thermophilus HB27
MERTFVMIKPDGVRRGLVGEILARFERKGFRIAALKLMRISQELAERHYAEHREKPFFPGLVRFITSGPVVAMVLEGPGVVAEVRKMMGATHPKDALPGTIRGDFATTIDENVIHGSATLEDAQREIALFFRPEELL

SEQ ID NO: 28681 - protein, 164 aa, Triticum aestivum
MAVLVARQGRELQRYSASTRGRIVVGCIPYRVRGGGGEGEGELEVLVISSQKGHGMMFPKGGWELDESMDDAARREALEEAGVRGEMGKVLGCWHYQSRRYQTTYEGIMYPLRVTDELQQWPEMASRKRTWATVQQVMEGCQHCWMREALEELVARHAKPQSAL

SEQ ID NO: 28682 - protein, 158 aa, Brassica napus
MENPAPSIVVPPIAAPVSANFSRLAFRNLYIRRTGPDSREMVTVEGRRGSSDQTGDMRYVSDFPVYDGRGSDAVLVARVQGVTTTFGNSNQFFTVAFEAGRLKGSTLLTEGVVTDGSDEWAIYGGTGEFAMARGVVKRRYLADRDGAGNTDELSMQVF

SEQ ID NO: 28683 - protein, 327 aa, Magnetococcus sp. MC-1
MVNRMRDATICVYLGEEIAQYGFPDGHPWTTTRMDAFWQEATRQSLSSKVVIADPVMAQPEQLHSFHTPQYVELVKRCSDAGEGFLDHGDTPAFPGIYEAAAYVVGSAVAAAEQIMQQRFRRIFIPIAGLHHAQPDVAGGFCVFNDAAVVVKHLRKQHGIKKIAYVDIDAHHGDGVFYPFEADPHLIFADIHEDGRYLYPWCGSEDETGVGPAYGTKVNIPMAPDASDADFFSAWPRIEALLMEHKPEFIILQCGADSLKNDPLTHLAFSTAAHSHAATRLCHMAETLGHGRVLALGGGGYNLSNVAQGWSAVLRALIEAPIIPAQP

SEQ ID NO: 28684 - protein, 500 aa, Glycine max
MMSVTVAADTTSAAVGSCLSRSRRRCLTVALRSKVSVTPTRILTKLKHECATPLPLLQQVANNMSSDMRAGLAAEAGPGPGLPMIPSYVENLPTGNEKGLFYALDLGGTNFRVLRVQLGGKDERVIATEFDQVSIPHQLMFATSQELFDFIASGLAKFASKEDGRFHISPGKKGEIGFTFSFPVKQASIDSGILIKWTKGFAVSGTAGRDVVACLNEAMERQGIDMRVSALVNDTVATLAGAEYWDNDVVVAVILGTGTNACYVEQISAIPKLQGHVSSSGKMIISTEWGAFSNGLPLTKIDREMDAASINPGEQIFEKTISGMYLGEIVRRVLLEMAEEGGLFGKSVPQKLSTPFILGTPDLCAMQQDSSGDLHAVGSLLYDKAGVESNLSERKTVLEVCETIVKRGGSLAGAGIVGILQKMEEDQRGLVFGNGKRSVVAIDGGLYENYPQYRAYLQDSVTELLGTEKSNNVVIEHTKDGSGIGAALLAASNSMYNQDL

SEQ ID NO: 28685 - protein, 551 aa, Triticum aestivum
MGNCCRSPAAAAREDVSSSHFPASAGKRKPHQARNGGGGGAGGGGGGGGAGAGGEKKRLSVLGEEGPDVSGGIDGKYALDRELGRGEFGVTYLCMDRGSKELLACKSISKRKLRTPVDVEDVRREVAIMRHLPRSASIVTLREACEDDGAGHLVMELCEGGELFDRIVARGHYTERAAAAVTRTIVEVVQLCHHHGVIHRDLKPENFLFANKKENSPLKAIDFGLSIFFKPGEKFSEIVGSPYYMAPEVLKRNYGPEIDIWSAGVILYILLCGVPPFWAETEQGVAQAILRGNIDFKREPWPHVSDNAKDLVRQMLQPDPKIRLTAKQVLEHTWLQNAKKAPNVPLGDIVKSRLKQFSRMNRFKRRALRVIADHLSAEEVEDIKEMFKVMDTDNDGIVSYEELKSGIAKFGSHLAESEVQMLIEAVDTNGRGALDYGEFLAVSLHLQRMANDEHLRRAFLFFDKDGDGFIEPEELQEALAEDGAVDITEVVKDILQEVDTDKDGKISFEEFVAMMKTGTDWRKASRHYSRGRFNSLSIRLIKDGSVKMGNE

SEQ ID NO: 28686 - protein, 445 aa, Pseudomonas fluorescens PfO-1
MTLRKFAGLGALLSIVMPGLAMAADEVAAPVLNSGDTAWMLTSTALVLFMTIPGLALFYGGMVRSKNILSVMMQCFAITGLISVLWVIYGYSIAFDTTGMEQGVVNFNSFVGGFGKAFLAGVTPASLTGPAALFPEAVFITFQMTFAIITPALIVGAFAERMKFSAMLIFMGIWFTLVYAPIAHMVWSGNGGLMWDWGVLDFAGGTVVHINAGVAGLIACLVLGKRKGFPTTPMAPHNLGYTLMGAAMLWVGWFGFNAGSAAAANGTAGMAMLVTQIATAAAALGWMFAEWITHGKPSALGIASGVVAGLVAITPAAGTVGPMGALVIGLAAGVVCFFCATTLKRKLGYDDSLDAFGVHGIGGILGAILTGVFAAPSLGGFGTVTDIAAQVWIQCKGVGFTVIYTAIVTFIILKVLDAVMGLRVTEEEESVGLDLAQHNERGYNL

SEQ ID NO: 28687 - protein, 618 aa, Chromobacterium violaceum ATCC 12472
MCGIAGFFSRRPVNPAVPQAMLDELHRRGPDDASRLLLDSELNPADGGAIHNAMLHARLAIVDPRPVANQPMASDDGQVWICYNGEVYDWEIGKAELEAGGAVFRTHSDTEFILRGYQAWGIEGLLERLRGMFAFAILDKRCEKVHLARDRMGEKPLLYSLQDGDFAYGSLVRAVLPFLPADKRAFSPAAIDAYLAHRYIPSPATVFSHINRLENGYRLEFDLNTRQLTKQRYWQPKAESGDWLPELDRAVAMRTVADRPLGVLLSGGIDSTVIASRLAIQQLTQFSSFTAAFPGSTLDESGDAADSARRMGLPNVRVDMPENLAADFERIVADLDQPFADPSSFPTWYLAREVTKHVKVVLVGDGGDELLAGYKRMGKHLRTRWRQNIRLPLPIKPQLDSKRGKLATELAMDWKSAYSLRFSGFTPGQRSFLQGGRKLEKLCHWRAPDDIGPEPGDGSPGLHQLLELDFANYLPDYILQKSDLCTMAHGLEGRAPLLDHGFYQRLLSTSAAERYTRPAKLIFRRAIHPALPTDFFQRKKRGFNPPLSGWLKTSLAPRFDGLGSRLAEASGGQLDAGAVDAFARAYRDGAGHLAEQMLQLLILDESLTQLRRLCRELG

SEQ ID NO: 28688 - protein, 343 aa, Streptomyces coelicolor A3(2)
MTFKAEYIWIDGTEPTAKLRSKTKIITAAPAGLDALPVWGFDGSSTNQAEGSSSDCVLKPVFSCPDPIRGGEDILVLCEVLDTDMTPHPSNTRAALAELSERFAAQEPVFGIEQEYTFFKGTRPLGFPEGGFPAAQGGYYCGVGSDEIFGRDVVEAHLENCLKAGLGISGINAEVMPGQWEFQVGPLAPLEVSDQLWVARWLLYRTAEDFEVSATLDPKPVKGDWNGAGAHTNFSTKAMREGYDAIITAAESLGEGSKPMDHVKNYGAGIDDRLTGLHETAPWNEYSYGVSDRGASVRIPWQVEKDGKGYIEDRRPNANVDPYVVTRLLVDTCCTALEKAGQV

SEQ ID NO: 28689 - protein, 809 aa, Zea mays
  misc_feature (534)..(534): Xaa can be any naturally occurring amino acid
  unsure (1)..(809): unsure at all Xaa locations
MDVWLDSCVAHWALGFEGRVTCICMEEGGDPQLPSISARTTSEGAGGVDLDLLEQLLSDDNGWLEVVSRSPNSVAFPPLSAFFSADVTATTVTTTATAAPAANASWWIQTGGASPSSVEEQFSQALSYIRDTQSDGDVLVQLWVPVNHDDGKLVLTTSEQPFTLDHRSDSLLRFREVSTKYQFSADVKSGDSPGLPGRVFIGRLPEWSPDIRYFTSYEYPRFSTASYKDALPEILEVLRAACLTHKLPLAQTWVTCAQQGKRGSRHSDENYRYCISTIDEACFVNEAEMRGFHEACSEHHLLRGEGVAGKAFTTNQPCFLPDIGSSTKLEYSLSHHAKIFKLKGAVAIRLRCTRTGTADFVLEFFLPTDCEALEEQKSVLDSLSGTMRSVCQTLRVVTDREMEDETVLEMNELNSFTPHGKDKVELSFGCNSADRRGEASWTSLAGTSQQESELAALRMHGMFSPGGQGPSLSGVQATAEGSKAKRRTKAEKTVSLQILRQYFAGSLKDAARSLGVCPTTLKRICRQHGITRWXSRKIKKVDHSLRKLQQIIDSVHGAETAFQLNTLYKDITNTSISSDNNLSGSVTVPPTNQSNLTDVNKHQPHKSSSNVPSTSHSHSSCSHSSESSPSCSGGATKHAQQGIIDQMKSENPVKDSSIQTLQTENTSLFEHFSVNETPIDLLQDVTEKANGGHHSSRSPSSPNPKQNTDANMRVKATFGSEKVRFRLNPECNFQELKHEIAKRLSIVDTNPLVLKYLDDDSEWVLMTCDADLQECLHVYKLAGIQTIKISVHLAVSPATRVTTGHTGLS

SEQ ID NO: 28690 - protein, 575 aa, Treponema denticola ATCC 35405
MANLNKKPWAFLDEWRGSKFKGEWPTLPEMFEITAERYPDRNCFTVFEPDRVTLSYSESLKVVKDLAYWMTENGVTKGTHVAVSGKNSPEWAVVYLASLFAGGIIIPIDYGLHNEEIETLLKTAKPKLFFVDEEKFDFFAEKAKTESYIGSLYSLSKKHPEIYVYNLKPSGSPELAKAQENDTAAILFTSGTTGNPKGVMLSNKNFVSDCYIAQSNLNIYHTDVFYALLPLHHSYTMLAVFIEALSVGAELVFGKTLAVSKMLAELKAGKITMLLGVPLLFNKLLAGIFKGIKAKGIVVFGIIKTLMGISYFFKKVFKVNIGSKLFHGILDKASLGNVRIAICGGGPLAPNVCRAYNEFGIDFVQGYGLTETSPIIALNPKEHFKIASVGQYFISCMEMKILDPDEKGIGEVAVKGPMVMQGYYNMPEETAEVLSPDGWLKTGDLGWLDDEGYLYLCGRAKNLIVTAGGKNVFPEEIENMFQLYYNEIEQITAAGYQAEEGEEVEALVYPADELYKKLNMTRGTSEGDAAVQKEIDAIIETVNKKLLPYQRITKTTYLSEPLEMTTTKKVKRFKK

SEQ ID NO: 28691 - protein, 403 aa, Chromobacterium violaceum ATCC 12472
MSTDNATIELNLDRELRVLFEDRLTQLKSEGLYRSFMPCEHDASHPGTTRYRQRQVEVWCSNDYLGLSQDPQVIERLRESAALHGSGTGGSRNIAGTSISHVELERQLAQWHGKEQALVFNGGYTANFEFLSTLIAAVPDMAIFSDSLNHRSLIEGIRRHPCQKFIFPHNDVETLEKQLASVPLSQPKLIVFESIYSMDGDIAPIQVILDLADRYQAWTFLDETHAIGLYGGSGAGLCEEIEETRATFIQGVFGKAMGTLGGYIAGPASVVDFVRSSAPGFIFTTALPQALLDATLCSFERVREDRQLVQDLHSNVIFFRAQLDAAGIPYLPAQSHLVLVPVAGAERIKTVARRLLEEFDIYVQPINYPSVPRGGERFRLTVGPRRSHEEIQRFVAALKHCLA

SEQ ID NO: 28692 - protein, 481 aa, Pinus taeda
MADQISLLLVVFTAAVALLHLIYRWWNAQRGQKRTSNEKNQELHLPPGSTGWPLIGETYSYYRSMTSNRPRQFIDDREKRYDSDVFVSHLFGSQAVISSDPQFNKYVLQNEGRFFQAHYPKALKALIGDYGLLSVHGDLQRKLHGIAVNLLRFERLKFDFMEEIQNLVHSTLDRWVDKKEIALQNECHQMVLNLMAKQLLDLSPSKETNEICELFVDYTNAVIAIPIKIPGSTYAKGLKARELLIRKISNMIKERRDHPHIVHKDLLTKLLEEDSISDEIICDFILFLLFAGHETSSRAMTFAIKFLTTCPKALTQMKEEHDAILKAKGGHKKLEWDDYKSMKFTQCVINETLRLGNFGPGVFRETKEDTKVKDCLIPKGWVVFAFLTATHLDEKFHNEALTFNPWRWELDQDVSNNHLFSPFGGGARLCPGSHLARLELALFLHIFITRFRWEALADEHPSYFPLPYLAKGFPMRLYNRE

SEQ ID NO: 28693 - protein, 487 aa, Pinus taeda
MGSGIMTETLTDSWLVGLLCLVLGFLLLQLYKLVWGASSRAYKLPPGSTGWPLIGETISFFRGINSTAQPRQFIQEREQRYGEIFRSNLFGRSRIVVSVDPEFNKHVLQHEGRQFQANYPKPLRNLIGKYGLLSVHGDLQRKLHGAAVNLLRFERLSVDFMEDIQNLLHITLAKWEAKRDIHLQEECHQLVLNLMAKQLLDLSPSKDTEEICEAFGHFSEALLAVPIKIPGTKYARGFKAREFLIKKIYESIEDRRQHPEAVHNDLLTKLLKEDSFSEEIIADFILFLLFAGHETSSRSMSFAIKFLTDCPRALEELKAEHDALLKRKGNLKNQKLNWDDYQSLKFTQCVIHETLRVGNFGPGVFRETKEDIKTKGGFVIPRGWTVYVFLTGTHLDEKYHSSALKFDPWRWQPHLQDQELLKNPSFMPFGGGARLCPGMHLAKMELALFLHNFVTKFRWEALQDDKISYFPFPRLIKGLPIRLRLRE

SEQ ID NO: 28694 - protein, 339 aa, Cryptococcus neoformans var. neoformans JEC21
MALSNAPKVLFLDTIKLAKSQLSSFSKIANVIPNTSKTREEFLHDLGTKYKDVTGIYRHFKASESIKITGRFDEELVSKLPSNLKFIAHNGAGYDQIDIPPCTARNIQVSNVPSAVDNATADTAMFLLLGAIRNFSSALLHARQGTFNSQLPLSHDPQGKVLGILGMGGIGSALARRAKPFGLKVQYHNRRRLTEEKEKETGATYVENMDQLLATSDIVSLNLPLTAATKHLISDDTFSKMKPTSILINTARGPIVDEAALVRALESGKIAGCGLDVYENEPQITKELLDHPNALCLPHVGTVTVETQTEMEAVCLRNLEHGLKTGKLAFTVPEQAHML

SEQ ID NO: 28695 - protein, 431 aa, Mycobacterium avium subsp. paratuberculosis K-10
MTSHYDVVVLGAGPGGYVAAIRAAQLGLSTAIVEPKYWGGVCLNVGCIPSKALLRNAELAHIFTKEAKTFGINGEATFDYGAAFDRSRKVAEGRVAGVHFLMKKNKITEIHGYGRFTDPHTLAVELNDGGTETVTFDNAIIATGSSTRLVPGTSLSANVVTYEEQILSRELPESIIIAGAGAIGMEFGYVLHNYGVEVTIVEFLPRALPNEDADVSKEIEKQFKKLGVKILTGTKVESISDDGSQVTVVVSKDGNSQELKAAKVLQAIGFAPNVEGYGLEAAGVALTDRKAIGITDYMRTNIEHIYAIGDVTGKLQLAHVAEAQGVVAAETIAGAETLALGDYRMMPRATFCQPNVASFGLTEQQARDEGHDVVVAKFPFTANGKAHGVGDPSGFVKLIADANTVSCWAGTWSATTSPSCCRSSPWRRSGT

SEQ ID NO: 28696 - protein, 401 aa, Thermus thermophilus HB8
MPEAWIVEAVRTPIGKHGGALASVRPDDLLAHALSALVDRSGVPKEEVEDVYAGCANQAGEDNRNVARMALLLAGFPVEVAGCTVNRLCGSGLEAVAQAARAIWAGEGKVYIGSGVESMSRAPYAVPKPERGFPTGNLVMYDTTLGWRFVNPKMQALYGTESMGETAENLAEMYGIRREEQDRFALLSHQKAVRAWEEGRFQDEVVPVPVKRGKEEILVEQDEGPRRDTSLEKLAALRPVFREGGTVTAGNSSPLNDGAAAVLLVSDDYAKAHGLRPLARVRAIAVAGVPPRIMGIGPVPATRKALERAGLSFSDLGLIELNEAFAAQALAVLREWSLSMEDQRLNPNGGAIALGHPLGASGARILTTLVHEMRRRKVQFGLATMCIGVGQGIAVVVEGMG

SEQ ID NO: 28697 - protein, 279 aa, Streptococcus pyogenes M1 GAS
MVTTVKMTSGYEIPVLGFGTYQAADGEEAYQSTLAAIKAGYRHIDTAAIYKNEESVGRAIKDSGVLREDLFITTKLWNDAHSYEGAKDALAASLDRLGLDYVDLYLIHWPNPKALRNTWKEANAQAWQYMEEAVEAGLIKSIGVSNFMVHHLEALQETAKITPAINQIRLAPGCYQKEVVDYCKANEILLEAWSPLGQGEIFDNETMQQLANKYDKTVAQVALAWSLAEGFIPLPKSVHDERIKENMAIFDVSLTQEDKKTIRYLSGMSAIPNPDTTSF

SEQ ID NO: 28698 - protein, 478 aa, Rhodospirillum rubrum
MDRLTPSLGRLIGAAMLVCVPATAVLLGLTLWGRLSVGVALVAGVLIWTLTALLLRSILREFMVVSRHIRGLGGRSEAGEGAAPTPRLEIAQGLLGAAQHLDRGWRRRTQALRDQLRSDEQVLNTLPDPLLMIAKEAVVTRANEAARSLFGRDPAGQEIITLLRDPGVLDSVERVLAGGTAPRQTIWVMPGAVEREFEVRATPLPSPSIDGSVALLGLHDITALRRLEQMRADFVANASHELRTPLSSLIGFTETLSTSAKNDPEARERFLAIMLEQGRRMQRLIEDLLSLSRIEMEEHTPPDEAVVLPGLIASVTRFLEIKAREKTMTLSVEAPPDLPPAIGDADQLSQIFQNLLDNAIKYGRPGTPVEVRLAVVERGPPAMPAGLRAPCLRVSVIDHGEGIAKAHLPRLTERFYRVDKARSRALGGTGLGLAIVKHVVVRHRGAMTIESDPGLGTTVSVFLPLHGPRPPRRAAPSA

SEQ ID NO: 28699 - protein, 492 aa, Capsella bursa-pastoris
MVLDGNNGGAVWLGGGGEREENEEGSWGRNQEDGSQFKPMLEGDWFSNPPHPQDLQMLQNHQDCRFLGGFPFNPNDNLLLQHSIDSSSSCSPSQAFSLDPSQQNQFLSTNNKSCLINVPSSANPFDNAFEFGSESGFLSQIHAPMSMGFGSLTQLGNRDLSSVPDFLSARSLLAQDHNSSNSVLCGGGGGFTAPLELEGFGSPANGGFVGNRAKVLKPLEVLASSGAQPTLFQKRAAMRQSSRSKMGNSESSGMRRLSDDGDMDETGIGVSGLNYESDEPNESGKAAESVQIGGGKGKKKGMPAKNLMAERRRRKKLNDRLYMLRSVVPKISKMDRASILGDAIDYLKELLQRINDLHNELESTPPGSLPPTSSSFHPLTPTPQTLSCRVKEELCPSSLPSPKGQQARVEVRLREGRAVNIHMFCGRRPGLLLATMKALDNLGLDVQQAVISCFNGFALDVFRAEQCQEGQEILPDQIKAVLFDTAGYAGMI

SEQ ID NO: 28700 - protein, 336 aa, Neurospora crassa
MAAEIPKTMSGVVIEKPGGVDVLKYKTDLPVPEIKEGELLVKNEYIGVNFIDTYFRTGLYPSASGYPLITGKEASGTVVSSKHPRFSPGDRVAYLGDAAYAEYTAVSASRCIGPLPERISSETAAAALLQGLTALTLVREAAGIEQKLGISEGPWALVHAAAGGTGSLLVQILSIMGAKVIATAGGQEKCEQAHHHGAHWTIDNKSEDVVERVKEITNGRGVDVIFDGVGKATFDADLEMVARKGTVISFGNASGKVEPLDILRLGAKNIKVMRPVLFGYIVTPEEWERWTTELFELIKTEKVKIKVHEVYPLQEVARAHTDLEGRKTTGKLLLKL

SEQ ID NO: 28701 - protein, 223 aa, GIBBERELLA ZEAE PH-1
MAEKDITKYLQQSHDRLFVNNREWAENKAKVNPDFFKNLVAGQAPEYLWIGCADSRIPAEQICGLEPGEAFIHRNIANLVCNTDLNAMGVINYAVKHLGVKHIIVCGHYGCGGVKAAMTPQDLGLLNPWLRNIRDVYRLHEKELDAIADESERYDRLVELNVIEQCRNVIKSADVQQSWHENKYPIVHGWVFGFKDGLLKDLKIDFEAVLGDIQKIYNLVDKK

SEQ ID NO: 28702 - protein, 375 aa, Neurospora crassa
MAVGTVLVTGGTGYIGSFTTLALLDNGYDVVIVDSLLNSSKAALDRIELICGKRPTFYQVDITDEAGLDDVFSKHPDIDSVIHFAALKAVGESGEIPLEYYRVNVGGSITLLRSMAKHNVSNIVFSSSATVYGDATRIPGMIPIPENCPIGPTNTYGHTKVMIETVISDHIEAERRKAKKAGKPFEQWNGALLRYFNPCGAHPSGIMGEDPQGVPYNLLPLLGKVATGERDKLLVFGDDYASKDGTAIRDYIHVLDLASGHLAALNYLREKKPGVKAWNLGSGRGSTVFEMIKAFSKVVGRDLPYQVVDRRLGDVLDLTANPALANEELQWKTKLTLEDACADLWRWVENNPKGYRQDPPAELLEKLKASKAVKN

SEQ ID NO: 28703 - protein, 279 aa, Flaveria bidentis
MFKNCIALCCAKRPSVAEDMEANGVPVYIDDVIDRLNKLLSEKNDLQIFAAEKIKQLTAELEVSDAGEFKAVERIRNGFARFKKEKYDTNPTLYGELAKGQSPKFLVFACSDSRVCPSHILNFQPGEAFVVRNIANMVPPYDTIKHSGAGAAIEYAVLHLKVENIVVIGHSCCGGIKGLMSIPDDGTTASDFIEQWVKIGLPAKSKVKADCSDLEYSDLCTKCEKEAVNVSLGNLLTYPFVREAALNKKLSLKGAHYDFVNGSFDLWNLNIGFSSSIIY

SEQ ID NO: 28704 - protein, 258 aa, Flaveria bidentis
MGSKSYDEAIAALKKLLSEKKELAPMAAAKIDQITAQLQTLDSTKPGFDPVERIKTGFAKFKTEKYLKNPALYGELSKGQSPKFMAFACSDSRVCPSHVLDFQPGEAFVVRNVANIVPPFDKLKYAGVGSAVEYAVLHLKVEQIVVIGHSKCGGIKGLMTFPDEGPTSTDFIEDWVKVGLPAKSKVKAEHGSASIDDQCVSCEKEAVNVSLANLLTYPFVRNGLINKTLAIKGAHYDFVNGTFELWALEFSLSPTTSA

SEQ ID NO: 28705 - protein, 353 aa, Thermus thermophilus HB27
MLLLTPGPTPIPERVQKALLRPMRGHLDPEVLRVNRAIQERLAALFDPEEGALVAALAGSGSLGMEAGLANLDRGPVLVLVNGAFSQRVAEMAALHGLDPEVLDFPPGEPVDPEAVARALKRRRYRMVALVHGETSTGVLNPAEAIGALAKEAGALFFLDAVTTLGMLPFSMRGMGVDYAFTGSQKCLSAPPGLAPIAASLEARKAFTGKRGWYLDLARVAEHWERGGYHHTTPVLLHYALLEALDLVLEEGVAARERRAREVYAWVLEELKARGFRPYPKASPLPTVLVVRPPEGVDADRLVRALYAEGVAVAGGIGPTRGQVLRLGLMGEGARREAYQAFLKALDRALALA

SEQ ID NO: 28706 - protein, 182 aa, Pseudomonas fluorescens PfO-1
MKCNPHAQVIWITGLSGAGKSTLAGDLVDRLRSRGESVVMLDGDELREVFGATAASSQNHGREGRLALAMQYAHLCRMIAAQGHTVVIATISLFREVHAWNRAHLPGYFEVYLKVPLEELGRRDPKGIYRRFHAGELHNVAGLDLPVDEPQAADWLVEFDPLRSRHDLADDLLNKINTRNPA

SEQ ID NO: 28707 - protein, 258 aa, Bacillus cereus E33L
MGVERIQAAFENGKKAFIPYVMGGDGGLEILKERIRFLDEAGASIVEIGIPFSDPVADGPTIQRAGKRALDSGVTVKGIFQALIEARKEVQIPFVLMTYLNPVLAFGKERFIENCMEAGVDGIIVPDLPYEEQDIIAPLLREANIALIPLVTVTSPIERIKKITSESEGFVYAVTVAGVTGVRQNFKDEIHSYLEKVKSHTHLPVVAGFGISTKEHVEEMVTICDGVVVGSKVIELLENEKREEICEFIQATKQKEEA

SEQ ID NO: 28708 - protein, 493 aa, Cucumis sativus
MGFQQTHETNQVLLSKIAISDGHGEDSPYFDGWKAYDNDPFHPENNPSGVIQMGLAENQLSPDLLVDWIKKHPKASICTDEGLLNFKDIANFQDYHGLPEFRNAIASFMGKARGGRVKFDPSRIVMGGGATGASEAVIFCLADPGDAFLIPSPYYAAFDRDLQWRTRAQIIPVHCNSSNNFQITREALEVAYKKAEESNIKVKGLIITNPSNPLGTIYDRDTLKSLVNFVNDNNIHLVCDEIYCATVFKSPSFISIAEIIEEMDHCKKELIHILSSLSKDMELPGFRVGILYSYNDTVVSIARKMSSFGLVSSQTQHLLAAMLSDDEFVDNFLVENSKRLAKRHARFTKELEKMGITCLNGNAGLFVWMDLRKLLKDQSFESEMELWRVIINEVKLNVSPGSSFRVTEPGWFRVCFANMDDNTVDVALGRIHSFVGKIDKKENNTIPMPPKKKPRENKLRLSFSFSGRRYEEGNVLKSPHMMSPHSPLVRAKT

SEQ ID NO: 28709 - protein, 609 aa, Bacillus cereus ATCC 14579
MCMCGITGWVDWKEDLSNQHVILKKMANSIEHRGPDAEGFWFSPHAAFAHRRLIVIDPEGGTQPKTFRAGDYTYALTYNGEIYNFRELKEQLQKCGHAFETHSDTEVLLHAYLEWKEDCVQHLNGIFAFALWDDQKQQLFLARDHLGVKPLFYTERNDSIIFGSEIKALLAHPSVPAEIDADGINEIFGLGLFRTPGCGVFKHIQEVRAGHSITFTRHKKVVTKYWNLESKFHTDSIEDTSSHILSILQDTVKRQLIADVPLVCMLSGGLDSSGITALAGKEFAAENKTLHTYSVDFVNSAKDFELTFARTGLDAPWVKRVSEHVGTAHHDIIVNAEELANHLFVPLHAKDLPSAGEMETSLYLLFCEMKKDATVALSGESADEVFGGYPWFHQEELLYVDKFPWLTNWKNTSPLLLNEVSNQCNLENYIDTRFQEAILEVPTLEGESKKSAKQRQMFYLFLTRFLPFLLDRKDRMSMAVGFEVRVPFCDYRLVEYLWNVPFNIKSIDNIEKGILRRALQPALPDDVRNRRKSAYPTSQDPHYLQTIRNLTLDMCSHKNNPIFSLINHSILLSIADQSNKEINNFEARSAMEYMLQVNEWLKTYHIHIA

SEQ ID NO: 28710 - protein, 669 aa, Arabidopsis thaliana
MKSFAAKVEEGVKGIDGKPSVGPVYRNLLSEKGFPPIDSEITTAWDIFSKSVEKFPDNNMLGWRRIVDEKVGPYMWKTYKEVYEEVLQIGSALRAAGAEPGSRVGIYGVNCPQWIIAMEACAAHTLICVPLYDTLGSGAVDYIVEHAEIDFVFVQDTKIKGLLEPDCKCAKRLKAIVSFTNVSDELSHKASEIGVKTYSWIDFLHMGREKPEDTNPPKAFNICTIMYTSGTSGDPKGVVLTHQAVATFVVGMDLYMDQFEDKMTHDDVYLSFLPLAHILDRMNEEYFFRKGASVGYYHGNLNVLRDDIQELKPTYLAGVPRVFERIHEGIQKALQELNPRRRFIFNALYKHKLAWLNRGYSHSKASPMADFIAFRKIRDKLGGRIRLLVSGGAPLSPEIEEFLRVTCCCFVVQGYGLTETLGGTALGFPDEMCMLGTVGIPAVYNEIRLEEVSEMGYDPLGENPAGEICIRGQCMFSGYYKNPELTEEVMKDGWFHTGDIGEILPNGVLKIIDRKKNLIKLSQGEYVALEHLENIFGQNSVVQDIWVYGDSFKSMLVAVVVPNPETVNRWAKDLGFTKPFEELCSFPELKEHIISELKSTAEKNKLRKFEYIKAVTVETKPFDVERDLVTATLKNRRNNLLKYYQIFAAILSANVQIDEMYRKLASKKI

SEQ ID NO: 28711 - protein, 361 aa, Zea mays
  misc_feature (141)..(141): Xaa can be any naturally occurring amino acid
  unsure (1)..(361): unsure at all Xaa locations
MDKYEAVRDIGSGNFGVARLMRNSETRELVAVKCIERGYRIDENVYREIINHRSLRHPNIIRFKEVILTPTHLMIVMEFAAGGELFDQICDRGRFSEDEARYFFQQLICGVSYCHYMQICHRDLKLGNVLLDGSPAPRLKXCDFGYSKSSVLHSRPKSAVGTPAYIAPEVLSRREYDGKWYLFMQLADVWSCGVTLYVMLVGAYPFEDPDDPKNIRKTIQQIMQVQYKIPDYVHISTECQQLIARIFVANPVRRITMKEIKSHPWFLKNLPRELTETAQGMYYRRDNKVPSYSDQTSEEIMKIVRDARTMPKSSRSGYGWSAEYSDEEEKEEEHRLEEDEYDRRVKEVHASGELRMDTLHI

SEQ ID NO: 28712 - protein, 276 aa, Glycine max
PTVHRKGSRAQFPWTQQQHQHGMGVATGASQMAYSSHYPTAPMVASGTPAVAVPSPTQAPAAFSSSAHQLAYQQAQHFHHQQQQHQQQQLQMFWSNQMQEIEQTIDFKNHSLPLARIKKIMKADEDVRMISAEAPVIFAKACEMFILELTLRSWIHTEENKRRTLQKNDIAAAISRNDVFDFLVDIIPRDELKEEGLGITKATIPLVNSPADMPYYYVPPQHPVVGPPGMIMGKPVGAEQATLYSTQQPRPPMAFMPWPHTQPQQQQPPQHQQTDS

SEQ ID NO: 28713 - protein, 489 aa, Cucumis sativus
MVLVSSNDNGNAKKVLSKLAKGNGHGEDSSYFDGWKAYDSDPFHPIINPRGVIQMGLAENQLSFEFVEKWMKNNPRASICSVEGIDEFKDIAIFQDYHGLPEFRNAVANFMGKVRGNRVKFDPDRVVMSGGATGAHETMAFCLADPGEAFLVPVPYYPGFDRDLRWRTGVEIVPVICESSNNFKLTREALETAYEEAQKSNIKIKGLLITNPSNPLGTVYDRQTLETAVSFINEKNIHLVCDEIYAATVFAEPGFISISEVIDNSDIECDRNLVHVVYSLSKDMGFPGFRVGIIYSYNDAVVACARKMSSFGLVSSQTQYLIASMLLDDVFVDNFLAGSAEKLAARHRNFTKGLAQVGIGYLKGSGGLFLWMDLRHLLKEKTLEAEMALWKVIINEVKLNVSPGSSFHCSEPGWFRVCFANMDDNTMDISITRIRNFVLQNKEVTTKVKKQKFCWRQSSLELRLSSRRLEDIMSPHSPLPQSPMHRATT

SEQ ID NO: 28714 - protein, 372 aa, Lactobacillus johnsonii NCC 533
MAESKTTKETTMTLDKKVKEVVKEVKKDKQITEKEFTAQLIKPYDLQGKAVDQLVQEFEDNGISIVDENGEPSKLALKKQKDVEKAELKDMSAPSSVRMNDPVRMYLKEIGRVSLLNADQEIALAKRIESGDEEAKQELAEANLRLVVSIAKRYVGRGMSFLDLIQEGNMGLMKAVDKFDYRLGFKFSTYATWWIRQAITRAIADQARTIRIPVHMVETINKLIRIQRQLLQDLGREPTPEEIGAEMDMPTDKVREILKIAQEPVSLETPIGEEDDSHLGDFIEDKDATSPEQHASYELLKEQLEEVLDTLTDREENVLRLRFGLDDGRTRTLEEVGKVFGVTRERIRQIEAKALRKLRHPSRSNQLKDFLD

SEQ ID NO: 28715 - protein, 1037 aa, Nostoc punctiforme PCC 73102
MGSLLYSSSQTADIYPVSELFLRHRLQVVEELWESVLRQECGQNMVDLLRQLRDLCSPEGQATNDQASSAVKLIEQLNINEAIRAARAFALYFQLINIIEQEYEQRQQLSRYEAETEPTDSERASNVNYSSNQREDDAPVSKGIAAELLAKNYLEKAQVKPKGTFAALFPYLFKQNVPPQQIQRLIAHLDVRLVFTAHPTEIVRHTIRDKQRQVVQLLQKLDTLENHAGGTGGGYAWEAADVREQLLEEIRLWWRTDELHQFKPTVLDEVDYALHYFQEVLFDGIPQLYKRFKHTLSNTFPWLEPPSKNFCSFGSWVGSDRDGNPSVTPEVTWQTACYQRKMVLGRYIQSVKNLIELLSVSMHWSDVLPDLLESLELDQSQLSEVYDALALRYRQEPYRLKLAYVLKRLENTRDRNLALYNRETPKNQDSPLYRSGDDFLAELRMIQRNLTETGLSCRDLENLICQVEIFGFNLTQLDIRQESSRHADALNEILQYLQILPQPYNELSEEQKVAWLTGELQTRRPLIPAELPFSEKTNDVIETFRVVRSLQQEFGLNICQTYIISMCRDVSDVLEVLLLAKEARLFDPAIAVGTIQVVPLFETVEDLQRSRSVMRKLFELPLYRALLAGGYEQTKTESVVVDENSSSLASPAPPASPASPAPSPSPLTPNLQEVMLGYSDSNKDSGFLSSNWEIHKAQKSLQQIAEGYDINLRIFHGRGGSVGRGGGPAYEAILAQPGHSINGRIKITEQGEVLASKYSLLDLALYHMETITTAVIQASLLRTGFDDIEPWNEIMEELAARSRQHYRALIYEQPDFVDFFHQVTPIEEISQLQISSRPARRPSGKKDLSSLRAIPWVFSWTQTRFLLPSWYGVGTALQEFLNAEPEEHLKLMRYFYVKWPFFKMVISKAEMTLAKVDMQMAHHYVQELSQSEDQLRFAKVFDQIASEFYLTRDLVLKITDHNQLLDGDPVLQRSVQLRNGTIVPLGFIQVSLLKRLRQSMNTNATSGVIHSRYSKGELLRGALLTINGIAAGMRNTG

SEQ ID NO: 28716 - protein, 464 aa, Pseudomonas fluorescens PfO-1
MQRPVRTELWAILRLAGPLIASQLAHMLMVLTDTLMMARLSPEALAGGGLGAASYSFVSIFCIGVIAAVGTLVAIRQGAGDIIGAARLTQAGLWLAWLMALGAGLLLWNLKPVLLLFGQTETNVNAAGQFLIALPFALPGYLSFMALRGFTSAIGRATPVMVISLAGTVANFLLNYALITGMFGLPKLGLTGIGLVTAIVANCMALALAWHIRRHPAYDAYPLREGLSRPNRQYLKELWRLGLPIGGTYAVEVGLFAFAALCMGTMGSTQLAAHQIALQIVSVAFMVPAGMSYAITMRVGQHYGAGQLSDARMSGRVGIVFGAVVMLGFAMVFWLLPNQLVGLFLDHNDPAFAEVIRLAVSLLAVAAWFELFDGTQTIAMGCIRGLKDAKTTFLVGLVCYWLIGAPAAWLMAFHLHWGPTGVWWGLALGLACAAVSLTLAFEWKMKRMIRLEPQSQGFKIAQPE

SEQ ID NO: 28717 - protein, 460 aa, Glycine max
MEQKGGVLMQRYELGRLLGQGTFAKVYHARNIITGMSVAIKIIDKEKILKVGMIDQIKREISVMRLIRHPHVVELYEVMASKTKIYFVMEHAKGGELFNKVVKGRLKVDVARKYFQQLISAVDYCHSRGVCHRDLKPENLLLDENENLKVSDFGLSALAESKCQDGLLHTTCGTPAYVAPEVINRKGYDGIKADIWSCGVILYVLLAGHLPFQDTNLMEMYRKIGRGEFKFPKWFAPDVRRFLSRILDPNPKARISMAKIMESSWFKKGLEKPAITVTENEELAPLDADGIFEACENDGPIAEPKQEQAKPCNLNAFDIISFSTGFDLSGLFEDTFLKKETRFMSKKPASIIVLKLEEICKRLCLKVKKKDGGLLKLEGSKEGRKGTLGVDAEIFEITPHFHMVELRKSNGDTMEYQKLFKQDIRPALKDIVWTWQGEKPQQEQEQHEVVQEEHQPSHTA

SEQ ID NO: 28718 - protein, 481 aa, Arabidopsis thaliana
MESVPESVPSPNSNTPSIPPPVNSVPPFLSKTYDMVDDPLTNEVVSWSSGNNSFVVWSAPEFSKVLLPKYFKHNNFSSFVRQLNTYGFRKVDPDRWEFANEGFLRGRKQLLKSIVRRKPSHVQQNQQQTQVQSSSVGACVEVGKFGIEEEVERLKRDKNVLMQELVRLRQQQQATENQLQNVGQKVQVMEQRQQQMMSFLAKAVQSPGFLNQLVQQNNNDGNRQIPGSNKKRRLPVDEQENRGDNVANGLNRQIVRYQPSINEAAQNMLRQFLNTSTSPRYESVSNNPDSFLLGDVPSSTSVDNGNPSSRVSGVTLAEFSPNTVQSATNQVPEASLAHHPQAGLVQPNIGQSPAQGAAPADSWSPEFDLVGCETDSGECFDPIMAVLDESEGDAISPEGEGKMNELLEGVPKLPGIQDPFWEQFFSVELPAIADTDDILSGSVENNDLVLEQEPNEWTRNEQQMKYLTEQMGLLSSEAQRK

SEQ ID NO: 28719 - protein, 145 aa, Brassica napus
DEERPYLPKHILYRQKEQFSDGVGYSWIDGLKAHAAENVNDKMMSNAAFIFPHNTPLTKEAYYYRMIFERFFPQNSARLTVPGGATVACSTAKAVEWDASWSNNMDPSGRAAIGVHLSAYDGSKVALPLPPHKAIDDIPMMMGQE

SEQ ID NO: 28720 - protein, 475 aa, Burkholderia vietnamiensis G4
MADSPPLLTRLAFTMPHALIVEDDPNSLSGLTALLAADGFSVDTATSLAEARTALGRAIPDVVLVDLNLPDGSGFDLLQHLPQQQPNGSLPVIVLTGNATVESAIEGLRHGIWDYLLKPINIPRLRSLLARIPRPYELIDEVQALRASLRRLGRFGALVGRSEAMQHVYDMIEHNARTETAVLFAGEAGTGKKLAARTLHDLSRRRKGPFLSFDCRMIAQANRHGASLDSVLFGHERGAFDGAERRETGLFEQAGGGTLFLDEITALPLVLQEALLHALDSQNFMRIGGTSSIASDFRLIAATRRPAREAVANGTLREDLWLRLDAASITMPPLRERDGDVLAIADALIDELNREARATGRSTTDKRAAPGFVRECLSYEWPGNVRELHERVRFAYDASGDFIETLRAGEASFAAGAALNGSSVQIKVGTPLSDVEDLLIRATLDAVGGTRHRAATLLGISPKTLYNKLQRMKVN

SEQ ID NO: 28721 - protein, 125 aa, Moorella thermoacetica ATCC 39073
MYSEKVMDHFTNPRNVGEIENADGVGQVGNPVCGDIMRLYIKVEDGIIKDVKFKTFGCGAAIATSSMVTEMVKGKTVEEALKISNAAVAEALDGLPPQKMHCSNLAADALHKAIEDYQNRNKKAS

SEQ ID NO: 28722 - protein, 850 aa, Pinus taeda
MALPSSSLSSQIHTGATTQCIPHFHGSLNAGTSAGKRRSLYLRWGKGPSKIVACAGQDPFSVPTLVKREFPPGFWKDHVIESLMPSYKVAPSDEKRIETLITEIKNMFRSMGYGETNPSAYDTAWVARIPAVDGSEKPQFPETLEWILQNQLKDGSWGEEFYFLAYDRILATLACIITLTIWQTGDTQVQKGIEFFKTQAGKIEEEADSHRPSGFEIVFPAMLKEAKALGLALPYELPFIQQIIEKREAKLQRLPPDLLYALPTTLLYSLEGLQEIVDWEKIMKLQSKDGSFLSSPASTAAVFMRTGNKKCLEFLNFVLKKFGNHVPCHYPLDLFERLWAVDTVERLGIDHHFKEEIKDALDYVYSHWDERGIGWARENPVPDIDDTAMGLRILRLHGYNVSSDVLKTFRDENGEFFCFLGQTQRGVTDMLNVNRCSHVAFPGETIMEEAKLCTERYLRNALEDGGASDKWALKKNIRGEVEYALKYPWHRSMPRLEARSYIENYGPNDVWLGKTMYMMPNISNEKYLELAKLDFNRVQFFHRQELQDIRRWWNSSGFSQLGFTRERVAEIYFSPASFLFEPEFATCRAVYTKTSNFTVILDDLYDAHGTLDNLKLFSESVKRWDLSLVDQMPQDMKICFKGFYNTFNEIAEEGRKRQGRDVLSYIQKVWEVQLEAYTKEAEWSAVRYVPSYDEYIGNASVSIALGTVVLISALFTGEILTDDILSKIGRDSRFLYLMGLTGRLVNDTKTYQAERGQGEVASAVQCYMKDHPEISEEEALKHVYTIMDNALDELNREFVNNRDVPDTCRRLVFETARIMQLFYMDGDGLTLSHNMEIKEHVKNCLFQPVA

SEQ ID NO: 28723 - protein, 307 aa, Thermus thermophilus HB8
MVEKPAIALVGESLVDLVLEGESPLTFTGSLGGSVLNTATVLARLGYPVRFFSEVGEDWLSAWSEAEMARRGLNPKLRRHPGPMPLALVRLDPEGNARYSFHRPFQAPFLPEAGALRGVGAFHFGSLFALEARTAKGVAALLEEAARAGALLSYDPNLRGLPSPEERARVEAYLGRVDLLKLSLEDARLLFPEAPLEAVRRLPPRLKVLTLGPEGALAFLGEGEVRVPGVRVRVVDTVGAGDTFTAGLLALLLRRGGGRGVLEGLDLEGLREALEAAVALSALACTVRGAGLPEEGLAAWRARWLAG

SEQ ID NO: 28724 - protein, 475 aa, Thermus thermophilus HB8
MEVKEAPTEALIGGAWRRLARRFPVVSPATGERVAEVADCGEEEAREALEEAVLAFPAWSRATAYERAQVLRRWYERILEHKEPLARLMALEMGKPLKEGRAEVAYAAGFVEWYAEEAKRVYGETVPSQFPHKRILVRYEPVGPVYGITPWNFPAAMVTRKVAPALAAGCTFVLKPAEESPLTALYLAKLFLEAGGPPGVFQVLPTSRPAEVSRPFLEDERVRKLTFTGSTEVGVRLYEEAAKTLKRVSLELGGGAPVLVFADADLDRAVEETLRAKFRNAGESCVAANRIFVQAEVAEAFAEAYARRVQALKVGDPLSEETDIGPLVNEAALRKVRTHVEDALAKGARLVAGGEAKGLFFAPTVLLDVKPESLLFREETFGPVAPLTVFREEEEAVRWANGFPVGLAAYVFTRDLSRAFRVAEALEYGIVGVNDGVPSTPQAPFGGVKRSGLGREGGKWGLLEYLEVKYVSFGL

SEQ ID NO: 28725 - protein, 285 aa, Arabidopsis thaliana
MAKDVEGPEGFQTRDYEDPPPTPFFDADELTKWSLYRAVIAEFVATLLFLYITVLTVIGYKIQSDTKVGGVDCGGVGILGIAWAFGGMIFILVYCTAGISGGHINPAVTFGLFLARKVSLIRAVLYMVAQCLGAICGVGFVKAFQSSYYDRYGGGANSLADGYNTGTGLAAEIIGTFVLVYTVFSATDPKRNARDSHVPVLAPLPIGFAVFMVHLATIPITGTGINPARSFGAAVIYNKSKPWDDHWIFWVGPFIGAAIAAFYHQFVLRASGSKSLGSFRSAANV

SEQ ID NO: 28726 - protein, 203 aa, Methanopyrus kandleri AV19
MSENDDLLVPLNDYLAAGVHIGTQQKTKDMEPFIYRTRADGLHVIDVRKTDERIRIAANFLSMYNTDEILVVSRRYYGQKPVSKFAEATGTTAIPGRFVPGTLTNPEYDGYLEPEVIVLTDPRADFQALVEAQSVGIPIVALCDTDNFTGNVDLAIPTNNKGRKALALVYWLLARELLKKLGRLEEDEEFEYDPEDFEGPPPR

SEQ ID NO: 28727 - protein, 167 aa, Zea mays
  misc_feature (68)..(68): Xaa can be any naturally occurring amino acid
  unsure (1)..(167): unsure at all Xaa locations
MNVEKLKKMAGAVRTGGKGSMRRKKKAVHKTTTTDDKRLQSTLKRIGVNTIPGIEEVNIFKDDVVIQXKIVNPKVQASIGANTWVVSGTPQTKKLQDLLPSIINQLGPDNLDNLRRLAEQFQKQAPGASGAEAGASAGAAQDDDDDVPELVPGETFEEAAEEKKESS

SEQ ID NO: 28728 - protein, 449 aa, Lactococcus lactis subsp. lactis Il1403
MENSTGLKSSLKTRHIVMLSLGGAIGSGLFLGSGKVIAQAGPSVLLSYILAGLTLYVVMYGVGKMVIHQDEHKAGMAGVVAPFIGDHWAHFADWVYWATWMAVLIAEEAGVSTFLAMLIPGVPLWVFALIVAVLGTAINLWSVRAFAETEYWLAFIKVAVILILIALGIYLLVINDAHLGFVADTAQKVSTKSTAPSFAPNGFSGFLTSLLVVIFSFGGSELAAITVAETENPKVAIPRAIRGVLIRIISFYVIPIFLFLHLLPWSEVLNPDAASPFATIFARVGIPHADKIVLVIIVIAIFSAVNSAIYATSRSLYSRIQGSNSYVGQRLGKLSKNQVPTNAILVSSFVLFIGVLLSAILGDGFWQFVAGSISFTISIVWILLLVAALVLYFKHKEVTNWFVKLATLVVLIALTIIFIMQIVTNPWTLSVFALVICLLSYFTYRKKKA

SEQ ID NO: 28729 - protein, 418 aa, Nicotiana tabacum
AADGYARARGVGACVVTFTVGGLSVLNAIAGAYSENLPLICIVGGPNSNDYGTNRILHHTIGLQDFSQEPRCFQTVTCYRAVVNNLEDAHELIDTAVSTALKESKPVYISIGCNLPGIPHPTFSREPVPFALSPRLSNMMGLEAAVEAAAEFLNKAVKPVLVGGPKMRVAKASDAFVELSDACGYAVAVMPSAKGLFPEHHSHFIGTYWGAVSTAFCAEIVESADAYLFAGPIFNDYSSVGYSLLLKKEKAIIVQPDRVTIGNGPAFGCVLMRDFLAALAKRLKHNPTAFENYHRIYVPEGHPLKCEPKEALRVNVLFQHIQNMLSGDSVVIAETGDSWFNCQKLKLPKGCGYEFQMQYGSIGWSVGATLGYAQAAPEKRVIACIGDGSFQVTAQDISTMLRCGQRTIIFLINNGGYT

SEQ ID NO: 28730 - protein, 450 aa, Bartonella sp. NVH1
IAGDGTTTATVLGQAIVQEGVKAVAAGMNPMDLKRGIDAAVEEVVANLFKKAKKIQTSAEIAQVGTISANGAEEIGKMIADAMEKVGNEGVITVEEAKTAETELEVVEGMQFDRGYLSPYFVTNAEKMVADIDDPYILIHEKKLSNLQSLLPVLEAVVQSGKPLLIIAEDVEGEALATLVVNKLRGGLKIAAVKAPGFGDRRKAMLEDIAILTSGQVISEDVGIKLENVTLDMLGRAKKVNISKENTTIIDGAGQKAEINARVNQIKAQIEETTSDYDREKLQERLAKLAGGVAVIRVGGATEVEVKEKKDRVDDALNATRAAVEEGIVAGGGTALLRAANALTVKGNNPDQEAGINIVRRALQAPARQIATNAGEEAAIIVGKVLENNADTFGYNTATGEFGDLIALGIVDPVKVVRSALQNAASIASLLITTDAMVASKKDTPMPPMP

SEQ ID NO: 28731 - protein, 329 aa, Crocosphaera watsonii WH 8501
MGKKYHVYGVGNALVDMEFRVTPELLQELQIDKGVMTLVDESRQGEIIAKFNGNLCKQSGGGSAANTMVALSQLGASGFYSCKVAKDEAGFFYLEDLQNCGLDTNVHDEKEVDGTTGKCLVMVTPDADRTMNTFLGISGSLSETELVPGAIADSEYLYMEGYLVTSPTAKAAAIKAREIAQESGVKTTFSLSDPNMVSFFKEGLLEIIGEQIEFIFANESEALKMADTEDFSEAVNYLKSLSQGFAITRGSQGSVVFDGQELIEITPYPVEAVDTVGAGDMYAGAFLYGVTHGMSYAQAGDLASRASSRIVTCYGPRLETETLKQLLNS

SEQ ID NO: 28732 - protein, 614 aa, Nicotiana tabacum
MDGSVAKGTSCIQDSQSSSVIANTDATLGRHLARRLVEIGIQDVFSVPGDFNLTLLDHLIAEPRLKNIGCCNELNAGYAADGYARARGVGACVVTFTVGGLSVLNAIAGAYSENLPVICIVGGPNTNDYGTNRILHHTIGLPDFSQELRCFQTVTCYQAVVNNLDDAHEQIDRAISTALKESKPVYISISCNLPAIPHPTFSRDPIPFSLSPRLSNKRGLEAAVDAAVTFLSKAVKPVMIGGPKLRVAKACDAFVELADSSGYAMAVMLQPKGLVAEQHPHFIGTYWGAVGTSYCAEIVESADAYLFAGPIFNDYSSVGYSLLIKKEKSIIVQPDRVVIGNGPAFGCVLMKDFLSELAKKIKKNETAYENYRRIFVPEGTPLKSEPNEPLRVNVLFQHIQKMLSDETAVIAETGDSWFNCQKLKLPEGCGYVTNNSLSAWYPFYLQTLEEKSSCCRYEFQMQYGSIGWSVGATLGYAQSVPKKRVISCIGDGSFQVTAQDVSTMIRCEQKNIIFLINNGGYTIEVEIHDGPYNVIKNWNYTGLVDAIHNGEGNCWTMKVRTEEELTEAIATATGEKKDCLCFIEVIVHKDDTSKELLEWGSRVCSANGRPPNPQ

SEQ ID NO: 28733 - protein, 388 aa, Zea mays
MALHAAAPACAVFCRLPSPSPSHAGGRRSLPAVASPRGVVSAAPLRTRAVPTKAIVNSDGIPETSDSPHVVCFGELLIDFVPTVNGVSLAEAPAFKKAPGGAPANVAVGIARLGGSSAFIGKVGDDEFGYMLADILKQNNVNNQGLLFDPHARTALAFVSLRSDGEREFMFYRNPSADMLLEEKELDLDLIRKAKIFHHGSISLITEPCKTAHIAAARAAKDAGVLVSYDPNLRLSLWSSPEDARDGILSVWRTADIFKVSEEEVSFLTNGEDPYDDAVVKKLIHSNLKLLLVTEGPDGCRYYSKDFSGRVGGLKVSAVDTTGAGDAFVAGVLSQLATDFSLLQDEGRLREALKFANVCGALTVTQRGAIPALPTRQQVLDALTNFVA

SEQ ID NO: 28734 - protein, 436 aa, Bartonella weissi
IAGDGTTTATVLGQAIVQEGIKAVAAGMNPMDLKRGIDSAVAEVVESLFKKAKKIQTSAEIAQVGTISANGASEIGKIIADAMEKVGNEGVITVEEAKTAETELEVVEGMQFDRGYLSPYFVTNAEKMVADLDDPYILIHEKKLSNLQSLLPVLEAVVQSGKPLLIIAEDVEGEALATLVVNKLRGGLKIFCAVKAPGFGDRRKAMLEDIAILTSGQVISEDVGIKLENVTLDMLGRAKKVHISKENTTIVDGSGQKAQISARVSQIKAQIEETTSDYDREKLQERLAKLAGGVAVIRVGGATEVEVKEKKDRVDDALNATRAAVEEGIVAGGGTALLRAANALTVKGNNADQEAGINIVRRALQAPARQIATNAGEEAAIIVGKVLENSSDTFGYNTATGQFGDLISLGIVDPVKVVRSALQNAASIASLLITTE

SEQ ID NO: 28735 - protein, 341 aa, Triticum aestivum
  misc_feature (87)..(87): Xaa can be any naturally occurring amino acid
  misc_feature (113)..(114): Xaa can be any naturally occurring amino acid
  unsure (1)..(341): unsure at all Xaa locations
MEKKKAAVPPGSATGHSRPVVDLFYSPVTPDGYFLISASKDSNPMLRNGETGDCIGTFEGHKGAVWSCCLDTNALRAASGSADFSAXVWDALTGDELHSFEHKHIVRACAFSXXTHLLLTGGMEKILRVYDLNKPDVAPKELDKSPGSVRTVAWLHNDQTILSSCTDTGGVRLWDVRSEKIVQTLETKGPVTSAEVSQDGRFITTADGSSVKFWDANHFGLVKSYDMSFIVESASLEPKSGSKFIAGGEDMWVHVFDFLTGEEITCNKGHHGPVHCVRFAPGGESYASGSEDGTIRIWQLSPPNADAEEAVDTNGKPKAGAEEIACKIEGFHIAKEEKAGE

SEQ ID NO: 28736 - protein, 630 aa, Rhizobium sp. NGR234
MLSSRLGLFNMFRLLAAILVFTGLASAVNADLLQTGGSRWVVLASTRDLDNAIGIANLYQHRFDDVRVAEASNGWLAVIAGPVSIARGAKAAREELWSAGGFPPDLFLSNGQSLRRTVWEPPKGRPIPTWSYKGGQPLVFSAGGLEIEVSHLAEGNTRYPSITLRRAGRLLIKEVLKGSESFGDNMNAEVRLVWLDRAVAEPQIIFSSHWNGAHCCTVSKILTKVGNGWTSIEGATLDGGGYRLQDIDGDGSVELLSVDNSFLYTFAPYVFSSAPLVISKLDGDRLIDMRWNSAFRRYYRRELFGWEYRAKLEPEIWRKNGFLSAWLALKSVLGESDQAWTVVLENYDRSSEWPLTVCDAPLKEGVCPEEATREVSFPEALRDHLARNGYLGPQVAKIEETSKPTEQPSPADSTSTPAAPEKGAASSAGTGFFISKQGHLVTNHHVIKGCSAIEVRRPGQLRLPANIVAVDPTNDLALLRVESDTGAYASVRVETRLGESVAVFGYPLSHVLASGGNFTLGNVTALAGLGNDTRFIQISAPVQPGNSGGPLIDSYGNVIGVVTSKLDALAALAVTGDIPQNVNFALRGASLYAFLLSYGISPVAGSNTQKLDAPELAERASSFSVAVTCE

SEQ ID NO: 28737 - protein, 235 aa, Griffithsia japonica
ARGGMAPTAYVLFKKFMKFNPKNPDFVNRDRFVLSAGHGSMLQYALLYLFGYDSVSMDDIKQFRQYGSVTPGHPENFETKGIEVTTGPLGQGICNAVGIAMAEAHLAATYNKPDAKIIDNYTYCIMGDGCHMEGISSEACSLAGHYGLGKLIAMYDDNHISIDGHTDISFTEDVGARFEAYGWQVINVPNGNTNIAALEKAIEDAKACTDKPTLIKVTTIIGFGSPNKGDSHDSH

SEQ ID NO: 28738 - protein, 185 aa, Lactobacillus johnsonii NCC 533
MKDVKSLDINENSHYDTAIFAGGCFWCMVAPFDTYPGVIKVESGYTGGVVPNPTYEQVCTGLTGHTEAVRITYDPNKLSYKDLVNIYWQVTDPTDAMGQFQDRGSQYQPVIYYNSLEQKEIAEQSRKSLADSNKFSDPIVTRIEPAKPFYLAEDYHQDFYKKDPARYALEEAGGREQFIKEHWKK

SEQ ID NO: 28739 - protein, 658 aa, Salmonella enterica subsp. enterica serovar Paratyphi A str.
MSDDMSMGSPSSAGEQGVLRSMQEVAMSSQEASKMLRTYNIAWWGNNYYDVNELGHISVCPDPDVPEARVDLAKLVKAREAQGQRLPALFCFPQILQHRLRSINAAFKRARESYGYNGDYFLVYPIKVNQHRRVIESLIHSGEPLGLEAGSKAELMAVLAHAGMTRSVIVCNGYKDREYIRLALIGEKMGHKVYLVIEKMSEIAIVLEEAERLNVVPRLGVRARLASQGSGKWQSSGGEKSKFGLAATQVLQLVETLRDAGRLDSLQLLHFHLGSQMANIRDIATGVRESARFYVELHKLGVNIQCFDVGGGLGVDYEGTRSQSDCSVNYGLNEYANNIIWAIGDACEEHGLPHPTVITESGRAVTAHHTVLVSNIIGVERNEYTDPTAPAEDAPRALQNLWETWQEMHKPGTRRSLREWLHDSQMDLHDIHIGYSSGVFSLQERAWAEQLYLSMCHEVQKQLDPQNRAHRPIIDELQERMADKMYVNFSLFQSMPDAWGIDQLFPVLPLEGLDQVPERRAVLLDITCDSDGAIDHYIDGDGIATTMPMPEYDPENPPMLGFFMVGAYQEILGNMHNLFGDTEAVDVFVFPDGSVEVELSDEGDTVADMLQYVQLDPKTLLTHFRDQVKQTDLDDALQQQFLEEFEAGLYGYTYLEDE

SEQ ID NO: 28740 - protein, 220 aa, Vitis riparia
MGRRPARCYRQIKNKPYPKSRYCRGVPDPKIRIYDVGMKKKGVDEFPFCVHLVSWEKENVSSEALEAARIACNKYMTKYAGKDAFHLRVRVHPFHVLRINKMLSCAGADRLQTGMRGAFGKPQGTCARVSIGQVLLSVRCKDGNSHHAQEALRRAKFKFPARQKIIVSRKWGFTKFNRTDYIKWKSQNRILPDGVNAKLLGCHGPLANRQPGKAFINACT

SEQ ID NO: 28741 - protein, 142 aa, Lactobacillus johnsonii NCC 533
MFDKKEALKKLNSEQYEVTQHAATEMPFSGKYNDFNQKGIYVDVVSGEPLFSSQDKYDAGCGWPSFTKPIKKLSYKRDQSHGMERTEVKSPIADSHLGHVFTDGPVDQGGLRYCINSASLKFIPYDKLEEEGYNQYKKIFEE

SEQ ID NO: 28742 - protein, 447 aa, Lilium longiflorum
MGKEKVHINIVVIGHVDSGKSTTTGHLIYKLGGIDKRVIERFEKEAAEMNKRSFKYAWVLDKLKAERERGITIDIALWKFETTKYYCTVIDAPGHRDFIKNMITGTSQADCAILIIDSTTGGFEAGISKDGQTREHALLAFTLGVKQMICCCNKMDATTPKYSKARYDEIVKEVSSYLKKVGYNPDKIPFVPISGFEGDNMIERSINLDWYKGPTLLEALDMINEPKRPSDKPLRLPLQDVYKIGGIGTVPVGRVETGVLKPAMVVTFGPTGLTTEVKSVEMHHEALVEALPGDNVGFNVKNVAVKDLKRGFVASNSKDDPAKEAANFTSQVIIMNHPGQIGNGYAPVLDCHTSHIAVKFNEILTKIDRRSGKELEKEPKFLKNGDAGMIKMIPTKPMVVETFSEYPPLGRFAVRDMRQTVAVGVIKNVEKKEPTGAKVTKSAVKKK

SEQ ID NO: 28743 - protein, 480 aa, Zea mays
METYTTDDALTIMGFGKFQALVLFYAGMGWVAEAMELMLLSFLGPFIREEWNVSPENESLLSSVVFAGMLLGACAWGFVSDKYGRSGTGLIFSTLFTSGMGFLSALSPNYLCLVALRFLVGVGVGGSHVFISWFLEFVPAQNRGTWMVIFSLFWTLGTILEASLAWVVLPALNWRWLLVFTALPCFLLLPFFGLTPESPRYLCAQNRMSDATSVLERMANANQSALPPGVLTYNRQTKCDHDVLAPESECLLPVREKECTVDNAKSSESGSLAALRMLLSRELLRSTLLLWFVFYANSFAYYGLVLLTSQLSDANKSCASGVSFGLRQKEINLYKDTFITSLAEIPGLFLSAVLVDWFGRKASMWSMMFACCAFLGPLVLQQTELLTTILLFGARACAMGSFTVLCLYAPEVYPTFVRSTGAGIATAIGRIGGVVCPLVAVAMLRSCHQMEALIVFEVILCLAAVACMFFPVETKGRGMD

SEQ ID NO: 28744 - protein, 460 aa, Ashbya gossypii ATCC 10895
MQNLILTPPNISSPALSNVCSINNLVGDGSSNPTASTSMRATPVLPPVKGLLFHNNQLPPPGPFNYGSMANSALPHGLPAGAKYEQMTPPPLFHSRSVPPQMPSAQPQAAQPQRFANPFDQLSQLLTHIESSSSSSLKVITGHLMADKIIRDNGDYSLQLKEIFGSLREIHLSLLNWPMVQYSQDIPNGEIMRELVSFIEYRDLEKLDFLIDKFKRQLDLVKYWKDKLGHLYVEKIDSGTWCSPGERLRQENGTPIPVIHSAAVGSSASRLASPSPSVSTGPGVIQGGSTATSSRSVSFSIPAEERVGYIPEHVGEFRNDFFQDLIVPSWFIVIRDPKTMNCLQCGSRDTSEWRSGPLGRKSMCNACGIWYMKLKQRFGEEDAAVIMEYRRLTNRHDDRRVPKKFEVPLPEVEKVKRAIRARVVEYLNDVEIPVKTRRRALLHKGKPGSALKTEMKTPAA

SEQ ID NO: 28745 - protein, 328 aa, Bacillus cereus G9241
MKAIIVTSFGGPEVMQYTDVDIPAISKDQVLIRVVATSVNFADIKSRYGKKGNKALPFIPGIDVAGIVECVGSHVKNIHPGQRVIAFPQNGSYAEYVVANENLTFVLPDEVDFQTAAACPIVSFTSYNLLANVARLQQGESVLIHAAAGGIGTTAIQLAKLLGAGKVIGTVGSEGKKEIALDAGADYVFCHQDEDFVEKVNELTYGEGVNIILDSISGSVSERSLKCLAYYGRLVHFGNASGEIGNFHTKDLHASCRSILGFSFGTTRKKRPELLQETANEVFRYLRDGRLQIKATKSFPLQDAGKAHEWVESRKSTGKVILTVQSSS

SEQ ID NO: 28746 - protein, 288 aa, Zea mays
MAKDIEASGPEAGEFSAKDYTDPPPAPLVDAEELTQWSLYRAVIAEFIATLLFLYITVATVIGYKHQTDASASGPDAACGGVGILGIAWAFGGMIFILVYCTAGISGGHINPAVTFGLFLARKVSLVRALLYIVAQCLGAICGVGLVKGLQSAYYVRYGGGANELSDGYSKGTGLAAEIIGTFVLVYTVFSATDPKRSARDSHVPVLAPLPIGFAVFMVHLATIPITGTGINPARSLGAAVIYNKDKAWDDQWIFWVGPLIGAAIAAAYHQYVLRASATKLGSYRSNA

SEQ ID NO: 28747 - protein, 447 aa, Lilium longiflorum
MGKEKVHINIVVIGHVDSGKSTTTGHLIYKLGGIDKRVIERFEKEAAEMNKRSFKYAWVLDKLKAERERGITIDIALWKFETTKYYCTVIDAPGHRDFIKNMITGTSQADCAILIIDSTTGGFEAGISKDGQTREHALLAFTLGVRQMICCCNKMDATTPKYAKARYDEIVKEVSSYLKKVGYNPDKIPFVPISGFEGDNMIERSTNLDWYKGPTLLEALDQISEPKRPSDKPLRLPLQDVYKIGGIGTVPVGRVETGVIKPGMVVTFGPTGLTTEVKSVEMHHEALLEALPGDNVGFNVKNVAVKDLKRGFVASNSKDDPAKEAANFTSQVIIMNHPGQIGNGYAPVLDCHTSHIAVKFAEILTKIDRRSGKELEKEPKFLKNGDAGMVKMIPTKPMVVETFAEYPPLGRFAVRDMRQTVAVGVIKNVEKKDPTGAKVTKSAVKKK

SEQ ID NO: 28748 - protein, 411 aa, Helicobacter hepaticus ATCC 51449
MRRVVVTGLGMINSLGLNKSDSFKAIINGQCGIKRISCFDVENFPVKIAGEITDFNVEEVLDPREVKKADRFIQLGLKAAKEAMSECGLLEGNVVNMSLSERFGVSSGAGIGGLGNIEKNSVVCEQKGPRRINPFFIPSALVNMLGGFISIEYALKGPNLASVTACAAGTHAISEAAKTIMLNGADAMLVIGSESSICPVGIGGFAAMKALSDRNDEPLKASRPFDKERNGFVMGEGAGALVLEEYESAKKRGAKIYAELIGFGESGDANHITTPAPQGEGALRAIKAALKMANKPVGYVNAHGTSTAYNDLYETMALKAAFGSKESVPPVSSTKGQIGHCLGAAGAIEAVISIMAMQEGILPPTINQENPDPECDLDYIPNTAREAKVDVVMSNSFGFGGTNGVVIFSKI

SEQ ID NO: 28749 - protein, 274 aa, Mycobacterium avium subsp. paratuberculosis K-10
MRIALAQILSGTDPAANLALVGEYTRRAAGAGARLVVFPEATMCRFGVPLAPIAEPVDGPWADGVRRIATEANVTVIAGMFTPSGDGRVKNTLLVANSDDQAVTHYDKIHLYDAFGFTESRTVAPGREPVVVGVDGVRVGLSVCYDIRFPELYTELARRGAQLIAVCASWGAGPGKLDQWTLLARARALDSMSYIAAAGQADPGEILSASGAPTGVGGSLVASPLGEVVASAGAQPQLVLADIDVDRVAQARKTIAALSNRSDFAQVGRAESVG

SEQ ID NO: 28750 - protein, 648 aa, Bacillus cereus G9241
MFFQFFLLAVIMSFISGRLIGTKLNFFKQASAATLGVSLTSAMYWFLYLRYQDETIVGVDRYFWLGSSLIVSMLCYLVFELFDPIKRGEMDDVVMESRNPIAKFFAKIGRQKRYMRVSSIAIKHGMGKYLALKRSPEADRKLAISLRNTLEECGGVFIKFGQVLSTRSDLLPPVFIHELSNLQENVTRLSQQQVEEILQKELHIPKDEIFSSFEMEPLAAASIGQVHKAKLKDSDQDVVVKLLRPNISETIKRDLDILIHFSLWISNKSTWAKNIGFVDLAHGFSMAMKEEIDFKIEARNFEQVSDSLKNSETTVKIPKVYQEYSNSKILVLEFLDGVSVKSGSALLNELQIDTKKVQRQLFDCILEQIFFKGIFHADPHPGNVYILRDGTPALLDFGSVGRLGTLQQDAFKRLLIGFERKNSYVLLDGLLQLVEKKPNVDKEGLEQSISQLLIQSTYVSTNSSEEFIQGLFQIIAEFELAFYPMVAGAFRSLITLEGTMLHLNPEFNLMDEAKRFAKDHAASFMPVNNYSSLKEAATNELLSMLPAMRRIPRKLDDLSSKLENGELSVKVGFFSDETNASFITTFISQFLIAFIGTAFGGISVGVLHLANNAKEPNDQFLSVVGYGGLFISAILLVRVAIHAVRKFK

SEQ ID NO: 28751 - protein, 224 aa, Cycas edentata
MGRGKIEIKRIENTTNRQVTFCKRRNGLLKKAYELSVLCDAEVALIVFSSRGRLYEFANNSVKRTIERYKKTCADNTQGGAISESNSQYWQQEAGKLRQQIDILQNANRHLMGDALTSLSVKELKQLEIRLERGLSRVRSKKNEMLLEEIEIMQRREHILLAENQFLRTKIAEYESNQNTNVLIPGPEFDALPAFDSRNFLHANLIEAAAHHYTQQDQAALQLG

SEQ ID NO: 28752 - protein, 284 aa, Candida albicans SC5314
MEKLLHWTIAQQSGDKAALEKIGEPDQKALNQLFGGPDEATLMKESIKVVESTDVSLEDKEIALENFEMLIENLDNANNIGNLKLWNPLIDILAKEDTPVELKVLICGIIGTAVQNNPKSQEDFNETEGLSELIELAQDDKKFELQSKALCAISSFIRYFQPGYAKFEKLQGLKLINFDNKNNKYQLRILSLISSILSNGLDDSLKAQFKEAKLPHYLASVLNEDSNTSLVDKSLNIVSQLNQLNYEFSLEEKYEINRGIQVVEGLSEKLNIDDLNNAKQATSS

SEQ ID NO: 28753 - protein, 557 aa, Glycine max
EAEVAEVQAWWNSERFRLTKRPYTARDVVSLRGNLRQTYASNEMAKKLWCLLKNHQANGTASRTFGALDPVQVTQMAKHLDTIYVSGWQCSATHTTSNEPGPDLADYPYDTVPNKVEHLFFAQQYHDRKQREERMRMSREERARTPYVDYLRPIIADGDTGFGGTTATVKLCKLFVERGAAGIHIEDQSSVTKKCGHMAGKVLVAISEHINRLVAARLQFDVMGVETVLVARTDAEAANLIQSNIDTRDHQFILGVTNPNLKGKSLATLMQQGMAAGKSGAELQALEDEWLSKAQLKTLSEAVVEAIERQNIGEEEKRRKLNEWMHHSSYERCLSNEEGREIAEKLGVRNLFWDWDLPRTREGFYRFKGSVIASVVRGWAFSPHADVIWMETASPNVIECTQFSEGVRSKHPQMMLGYNLSPSFNWDASGMSDEQMRDFIPKIAKLGYVWQFITVGGLHSNALITSTFARDFANRGMLAYVERIQREERNNGVDTLAHQKWAGANYYDRYLKTVQGGVASTAAMGKGVTEEQFKESWTRPGAVEIDRGSIVVAKARM

SEQ ID NO: 28754 - protein, 296 aa, Escherichia coli
MSYYHHHHHHLESTSLYKKAGLANPTVIKLQDGNVMPQLGLGVWQASNEEVITAIQKALEVGYRSIDTAAAYKNEEGVGKALKNASVNREELFITTKLWNDDHKRPREALLDSLKKLQLDYIDLYLMHWPVPAIDHYVEAWKGMIELQKEGLIKSIGVCNFQIHHLQRLIDETGVTPVINQIELHPLMQQRQLHAWNATHKIQTESWSPLAQGGKGVFDQKVIRDLADKYGKTPAQIVIRWHLDSGLVVIPKSVTPSRIAENFDVWDFRLDKDELGEIAKLDQGKRLGPDPDQFGG

SEQ ID NO: 28755 - protein, 543 aa, Ashbya gossypii ATCC 10895
MGTRESLYHAYRVLISSKDVFCGSVDIARESFYIWASTSSLTRPLLSKSRWFHDPEWNRARQLSDKTRQEAAGQLRRNASAPRGTRQYSTSSKRNEDDAEVRHMESSSVPSSRISRLFHYGSLAAGVGISAASQGLSQMSRGQSPTLKSLLLSDTNIARITKKFSQMRGAALKIGQMMSFQDSKVLPAELYQILSRVQNSAHYMPQRQLDRLMARELGVEWRNKFASFENVPIAAASIGQVHKAVLPNGDDCVVKVQYPGVKDSIDSDLNNILVLLTASSLLPKGLFLEKTVANAKTELGWECDYIREATALKHFEKLLADDSVFVVPHVYDSLTTPNIIVMSRMRGTEIMKLPADVASQEVRDFICENIMRLCLKEIAEFKYMQTDPNWANFLYNPTTRKIELLDFGASRGFPDEFIRNYRKLLTYATQGDREGVHQMSEQLGYLTGLESRAMINAHVDSVMTLGEPFSGEVDKTFDFSDQDVTDRIRGNIGLMLNERMCPPPEETYSLHRKFSGVFLLCARMGARVHCAKLFDEIFALNEK

SEQ ID NO: 28756 - protein, 816 aa, Zea mays
MGEGAGDRVLSRLHSVRERIGDSLSAHPNELVAVFTRLKNLGKGMLQPHQIIAEYNNAIPEAEREKLKDGAFEDVLRAAQEAIVIPPWVALAIRPRPGVWEYVRVNVSELAVEELRVPEYLQFKEQLVEEGPNNNFVLELDFEPFNASFPRPSLSKSIGNGVQFLNRHLSSKLFHDKESMYPLLNFLRAHNYKGMTMMLNDRIRSLSALQGALRKAEEHLSTLQADTPYSEFHHRFQELGLEKGWGDCAKRAQETIHLLLDLLEAPDPSTLEKFLGTIPMVFNVVILSPHGYFAQANVLGYPDTGGQVVYILDQVRAMENEMLLRIKQCGLDITPKILIVTRLLPDATGTTCGQRLEKVLGTEHCHILRVPFRTENGIVRKWISRFEVWPYLETYTDDVAHEIAGELQANPDLIIGNYSDGNLVACLLAHKMGVTHCTIAHALEKTKYPNSDLYWKKFEDHYHFSCQFTTDLIAMNHADFIITSTFQEIAGNKDTVGQYESHMAFTMPGLYRVVHGIDVFDPKFNIVSPGADLSIYFPYTESHKRLTSLHPEIEELLYSQTENTEHKFVLNDRNKPIIFSMARLDRVKNLTGLVELYGRNKRLQELVNLVVVCGDHGNPSKDKEEQAEFKKMFDLIEQYNLNGHIRWISAQMNRVRNGELYRYICDTKGAFVQPAFYEAFGLTVVEAMTCGLPTFATAYGGPAEIIVHGVSGYHIDPYQGDKASALLVDFFDKCQAEPSHWSKISQGGLQRIEEKYTWKLYSERLMTLTGVYGFWKYVSNLERRETRRYLEMLYALKYRTMASTVPLAVEGEPSSK

SEQ ID NO: 28757 - protein, 805 aa, Solanum tuberosum
MAERVLTRVHSLRERLDATLAAHRNEILLFLSRIESHGKGILKPHQLLAEFESIHKEDKDKLNDHAFEEVLKSTQEAIVLPPWVALAIRLRPGVWEYVRVNVNALIVEELTVPEFLQFKEELVNGTSNDNFVLELDFEPFTASFPKPTLTKSIGNGVEFLNRHLSAKMFHDKESMTPLLEFLRVHHYKGKTMMLNDRIQNLYTLQKVLRKAEEYLTTLSPETSYSAFEHKFQEIGLERGWGDTAERVLEMICMLLDLLEAPDSCTLEKFLGRIPMVFNVVILSPHGYFAQENVLGYPDTGGQVVYILDQVPALEREMLKRIKEQGLDIKPRILIVTRLLPDAVGTTCGQRLEKVFGTEHSHILRVPFRTEKGIVRKWISRFEVWPYMETFIEDVGKEITAELQAKPDLIIGNYSEGNLAASLLAHKLGVTQCTIAHALEKTKYPDSDIYLNKFDEKYHFSAQFTADLIAMNHTDFIITSTFQEIAGSKDTVGQYESHMAFTMPGLYRVVHGIDVFDPKFNIVSPGADVNLYFPYSEKEKRLTTFHPEIEDLLFSDVENEEHLCVLKDRNKPIIFTMARLDRVKNLTGLVEWYAKNPRLRELVNLVVVGGDRRKESKDLEEQAEMKKMYELIKTHNLNGQFRWISSQMNRVRNGELYRYIADTRGAFVQPAFYEAFGLTVVEAMSCGLPTFATNQGGPAEIIVHGKSGFQIDPYHGEQAADLLADFFEKCKVDPSHWEAISEGGLKRIQEKYTWQIYSDRLLTLAAVYGFWKHVSKLDRLEIRRYLEMFYALKFRKLAQLVPLAVE

SEQ ID NO: 28758 - protein, 589 aa, Burkholderia mallei ATCC 23344
MHPVAHVVVLVSVLAAVGCALGSQYAIKHLIDVLAAGRHHPGPLWGAFALLVGLIAADNLLWRVGGWVAAHAFVAVTGDLRRDLFQYLSGHSPTYYAEKQPGTLASRITATSNAIYTSENTMAWNVLPPCIAVMGAILMIIVVNPLMALGLLSCSGVLAIVLFKLAKLGSARHHRFAAKAAAVDGELVDVIGNMGLVRAFGMTLREQKRFSATVKAEMDARQQSLLYLEKLRLLHAVITAMLSAGLLGWALWLWDQGRATSGDIVLVSSLGFTILHGTRDLAVALVDVTQHVARLAEAVKTLLEPHGMPDRSDAIALAPRGGRVDFERVTFAYPHRRPILDHFDLHIEPGQRVGLIGKSGAGKSTVLALLQRFYDIQQGAIRIDGQDLGTITQESLRQSIALVPQDISLFHRSIYENIAYGRPDATHEEVLAAAREARCTEFIEAMPEGFETIVGDRGVKLSGGQRQRIAIARAILKNAPILLLDEATSALDSASEEAIQAALDRLMMGRTVIAIAHRLSTLRNFDRIIVMSAGKVIDDGSPGVLRERPGLYRDLLAKQHGRHLAAPAPAPAHHHSDDDDSSSDDERVA

SEQ ID NO: 28759 - protein, 264 aa, Oryza sativa
  misc_feature (91)..(91): Xaa can be any naturally occurring amino acid
  unsure (1)..(264): unsure at all Xaa locations
MEAMDVKYKPLVFPNGAIKKAAKPAAVAPAVGGGGGGETVYRECLKNHAASLGGHALDGCGEFMPSPAANPGDPTSLRCAACGCHRNFHRXHMLLSLGSSGQAQRLPPQVMSPAAAAAPPPGGGGGGMPRKRFRTKFTAEQKQRMQELSERLGWRLQKRDEAIVDEWCRDIGVGKGVFKVWMHNNKHNYLGGHSARRSASSSSAAAAAAPPFNPPTSPPPPPPPPPHATDFNINGTATAATAAAAATIAAGNHQENGASSPQSA

SEQ ID NO: 28760 - protein, 166 aa, Glycine max
MGQVFDKLEGKEWRQRQIRKITDRVFDKVKNQIETDNLSFEDLYIAVLLVYNDINKYIPGPHFDPPSKDKVREVKQSCDINLDGDIDRDEFYDFILIMTADTFTIVSQKLILTLVVAPTVAVATKKATEGVPGVGRLVQKIPNSVYASLVTIAAVWFQKKAQSSPL

SEQ ID NO: 28761 - protein, 756 aa, Haemophilus influenzae R2846
MTTSHILGFPRVGAKRELKFAQERYWRKELSEQDLLDLAKALREKNWKHQAAANADFVAVGDFTFYDHILDLQVATGAIPARFGFDSQNLTLDQYFQLARGNKDQFAIEMTKWFDTNYHYLVPEFQKSTAFKANPAHYVNQIREAKALGLNFKPVIVGPLTFLWLGKEKGEAFNRFDLLNQLVPVYVEILNALVAEGAEWIQIDEPALALDLPAEWVEAYKSVYTELSKVNAKLLLATYFGSVAEHAELLKALPVAGLHLDLVRAPEQLAAFEDYSKVLSAGVIEGRNIWRANLNKVLDVLEPLKAKLGERLWIAPSCSLLHTPFDLEVEVQLKEKNTALYSWLSFTLQKVEELNVLKQALNNGRASVQAALDASQAAADARAMSKEIHRPEVAERLANLPKGADQRKSPFAERIVKQNAWLNLPLLPTTNIGSFPQTTEIRHARASFKKGELSLADYEAAMKKEIEYVVRRQEELDLDVLVHGEAERNDMVEYFGELLDGFAFTKFGWVQSYGSRCVKPPVIYGDVTRPEPMTVRWSQYAQSLTNRVMKGMLTGPVTILQWSFVRNDIPRSTVCKQIGVALSDEVLDLEAAGIKVIQIDEPAIREGLPLKRADWDAYLQWAGEAFRLSSMGVQDDTQIHTHMCYSEFNDILPAIAALDADVITIETSRSDMELLTAFADFKYPNDIGPGVYDIHSPRVPTAAEVEHLLRKALNVIPKERLWVNPDCGLKTRGWAETIDQLKVMVDVTKKLRAELA

SEQ ID NO: 28762 - protein, 254 aa, Glycine max
MLSIFHKGFAHPPEELKSPASNSGSNKPKIPEETLREFLSHHPHNTFSLSFGHSAVLAYTRPDPPSFVHQRLFCGIDDIYCIFLGSLNNLCSLNKQYGLAKGTNEAMFVIEAYKTLRDRGPYPADQVVKDLDGSFGFVVYDSKVGSVFAALGSDGGIKLYWGIAADESVVISDDLDVMKEGCAKSFAPFPPGCMFHSEGGLMSFEHPMNKLKAMPRIDSEGAICGANFKVDKYARVNSIPRVGSQANWMEWTQH

SEQ ID NO: 28763 - protein, 249 aa, Mycobacterium avium subsp. paratuberculosis K-10
MGETATLVLLRHGESEWNSLNLFTGWVDVGLTDKGRAEAVRSGELLAEQGLLPDALYTSLLRRAITTAHLALDAADRLWIPVRRSWRLNERHYGALQGLDKAETKARYGEEQFMAWRRSYDTPPPPIERGSTYSQDADPRYADIGGGPLTECLADVVVRFLPYFTDVIVPDLRSGKTVLIVAHGNSLRALVKHLDQMSDDDVVGLNIPTGIPLRYDLDARLRPLVPGGTYLDPEAAAAGAAAVASQGRG

SEQ ID NO: 28764 - protein, 95 aa, Fagopyrum tataricum subsp. potanini
GRLYEYANHSVKATIDRYKKACSDSAGVTSVAEANAQYYQQEAAKLRNQIRTLQNNSRNLSRHMMGEGLSSLSMKDLKNLETRLEKGISGIRAKK

SEQ ID NO: 28765 - protein, 154 aa, Methanopyrus kandleri AV19
MAEVQREFVMIKPDGVVRGLVGEVIRRLERKGLKIVALEMRQLDRETAEKLYEEHRDKPFFEDLIEYVTSGPVVVMIVEGRKAVKVVRNIIGATDPAEAAPGTVRGDFALDIGRNVVHASDSPESAEREIEIVFGKDLSTIDYERCDEEWLYES

SEQ ID NO: 28766 - protein, 329 aa, Fusobacterium nucleatum subsp. nucleatum ATCC 25586
MSILVCGGAGYIGSHVVKYLLEKNEDVVVVDSLITGHIDAVDEKAHLELGDLKDEEFLNRVFEKYQIDGVIDFAAFSLVGESVGEPLKYFENNFYGTLCLLKVMKNNNVDKIVFSSTAATYGEAENMPILETDRTEPTNPYGESKLAVEKMFKWCANAYGLKYTALRYFNVAGAYPSGEIGEAHTCETHLIPLILQVALGQREKISIYGDDYPTPDGTCIRDYIHVMDLADAHYLALNRLRNGGDSQIFNLGNGEGFSVKEVIEVTRKVTGYPIPAEVSPRRAGDPARLIASSKKAIDELKWKPKYDKLEQIIETAWNWHKNHPNGYED

SEQ ID NO: 28767 - protein, 95 aa, Fagopyrum homotropicum
GRLYEYANHSVKATIDRYKKACSDSAGVTSVAEANAQYYQQEAAKLRNQIRTLQNNSRNLSRHMMGEGLSNLSMKDLKNLETRLEKGISRIRAKK

SEQ ID NO: 28768 - protein, 472 aa, Neurospora crassa
MSYPGYPPASPYGQPPPQGGGYYQQPPPQQHHQQPPYGGPPPHAHYNTYQQPQQGYGQPPPGPPPGQYGAPPPQPYGAPAHSPPPGTYGAAPPPSPSYYPLGPPPAGYGAPPPHGYGQPPGPPPQQSYGAVPPTPTAYTPQPYAVQYPPTPPSPGYGPAMNIPWNPDPDADRLRKAMKGWGTDEKELIRVLADKDPFQINMLRDAFQRRHRRDLIADIKSETSSWFEEGLVMLARGPLLNDVHMLFNAMDGAGTNEDILNDILLRRSNADLKAIKAEFSRVCHRPLEEMVRGELSMKTERHFMIVLGATRAEDSAPVVKADIDRDVDDLYNATEGKIGTDEMRVCSILSLRNDNQIRAISYEYRQKYARDLDTVIQKEFSGHMKDALLIQLRHGTDKYMLQARLLEDAMAGMGTKDRLLTSRLVRAHWDRNNMRNVRNAYEQRYKKKLAKRVQGETSGDYQRLLMAICGEPI

SEQ ID NO: 28769 - protein, 475 aa, Listeria monocytogenes EGD-e
MAKEYDVVILGGGTGGYVAAIQAAKNGQKVAVVEKGKVGGTCLHRGCIPTKALLRSAEVLQTVKKASEFGISVEGTAGINFLQAQERKQAIVDQLEKGIHQLFKQGKIDLFVGTGTILGPSIFSPTAGTISVEFEDGSENEMLIPKNLIIATGSKPRTLSGLTIDEEHVLSSDGALNLETLPKSIIIVGGGVIGMEWASMMHDFGVEVTVLEYADRILPTEDKEVAKELARLYKKKKLNMHTSAEVQAASYKKTDTGVEIKAIIKGEEQTFTADKILVSVGRSANTENIGLQNTDIATENGFIQVNDFYQTKESHIYAIGDCIPTIQLAHVAMEEGTIAANYIAGKAAEKLDYDLVPRCIYTSTEIASVGITEEQAKERGHEVKKGKFFFRGIGKALVYGESDGFIKIIADKKTDDILGVSMIGPHVTDMISEAALAQVLNATPWEVGNTIHPHPTLSESFREAALAVDGNAIHG

SEQ ID NO: 28770 - protein, 668 aa, Pirellula sp. 1
MSSVLDSKWTRSDASKTYDIDRWGAGYFSISDAGTVLVSPDRDPSQSIDLKELVDRLGQRNLDLPILLRFNGILRDRLRELDRCFKNAIHDHKYQSRYRCVFPIKVNQQREVVQQIVSEGARLGFGIEAGSKPELVAAVAMGDANVPIVCNGFKDEEFIRLALLAQRLGRNVLPVVEKVSELDLILDVAKDIGVRPTIGMRVKLATRGSGRWQASGGYRSKFGLTVAELLAQLDRLIAMDMGDCLQLLHFHVGSQIGNIRQLKSAILEAARIYVDLVRRGAGMRYLDVGGGLGVDYDGSRSDSESSMNYTMQEYANDVVYHTQTVCDEAGVPHPELISESGRAVAAHHSVLVMETLGVTSQGVANLPCWAKVEGEPVSPDHGGIEMDSVGAIETSEMEGPPESYEQPVHDLWVGYVNMTQANMMETFHDAQVALDLCMNLFSGGYLPLEQRVAAENLYFAICHRVRELAESMKERPDDLKHLDRMLSDIYFANFSLFQSMPDSWAIDQLFPIMPIHRLLEKPSRHAVLGDITCDSDGKVDAFVCGGGRQRTLMLHPLKSGEPYQLAVFMVGAYQEILGDLHNLFGDTHAVHVDIEDGVTKVRSIVKGDTVSEVLGYVQYEDRELIENLQESVESAIGNGHIDHQQAGETVAAYERALSGYTYLSTRTK

SEQ ID NO: 28771 - protein, 331 aa, Listeria monocytogenes EGD-e
MTLKEAGLTEDKLIKMYETMLMARRLDERMWLLNRSGKIPFTISGQGQETAQIGAAFAFDLDKDYALPYYRDLAVVLAFGMTAKDIMLSAFAKAEDPNSGGRQMPAHFGQKSNRIVTQSSPVTTQFPHAAGIGLAAKMAGDEIAIYASTGEGSSNQGDFHEGINFASVHKLPVVFVIHNNQYAISVPASKQYAAEKLSDRAIGYGIPGERVDGTNMGEVYAAFKRAADRARNGEGPTLIETVSYRFTPHSSDDDDSSYRSREEVNEAKGKDPLTIFQTELLEEGYLTEEKIAEIEKNIAKEVNEATDYAESAAYAEPESSLLYVYDEEANS

SEQ ID NO: 28772 - protein, 381 aa, Zea mays
MAGAASMEVEQDLPGFRFHPTEEELLGFYLSRVVHGKQLHFDIIGSLNIYRYDPWDLPAMAKIGEREWYFFVPRDRKAGSGGRPNRTTERGFWKATGSDRAIRSSADAKRVIGLKKTLVFYQGRAPRGTKTDWVMNEYRLPDHSAAGPRRSAAASQAAAANKHCSYSSKRQAAAAAATVETSSRTSRLTLTGGRQIADHLPVRDTSLVYIWWSVREDMVICKIYRKATPLKELEQRASAMEEMQRRIGGATATSLVQAAGSTGDDYLSSDDTYDTSFLQFPSSSSPAPSGDSYGAPAAAPREAKTEAADATTVTVASTSSSSSLLHAASVAGPAVRHGDLPTLQVPTHLGVADWTQMQDPFQLRSPWQDQLFFSPLAHLLY

SEQ ID NO: 28773 - protein, 762 aa, Geobacter sulfurreducens PCA
MKSLLAIRTKIFLAILLILLVSYSFLVVITIRTVDSSLEAELSRKLAEQVRYAKDQYTNRAEQIQYSLMHPASAPPVRERMVARDSLWLRDAARRWMMILPFVELIVFVDSRGTVITGGNQYRMDRTFELTPVVERALRERHPIVSTELVTTEFLCSEGLVNYCRGGDAGNTGEVMMQTVVVPVVDTRGAMVGAFVAGDILETDTRLPSQVQEVFGRQVYVTITRKEIIPPDSFGKNGPQAIPARILGGLRQGLPFRGDAEIGGKVFTAAFDPLTNSRGDFVGALVVALSRDDYKGVLQGSLGNIVASAILGLVLSFVTAYWVSLRLTKPVRELADGVRRIEEGELQQRVAVTSSDEIGELAEAFNRMAAAIDERDRTIRTKAHDLENLNLKLTDMNEFLERRVEERTAALQVEMGRLEAILTSMAEGIAVTDRDGRVILFNPAAQQLFEMVPHRVVGQPILDICNQGEFCRLVEHITSMGENRDQATVREVDLDARGKKLKVTLAPLVDGDGHFAGVVMSVRDVTAEEEVDRMKTEFISTVSHELKTPLTSIKGSLQLIVDKSRGFTDVEKELLGVCLRNTERLIRLVNDILDIAKIESGKMEFALSPHSPAELVEWSVRELEGFAREHGVTVVNEVSADLPAIYGDGDRLGQVLTNLIANAVKFSPRGAVVTISAEQSDNFVAVSVKDRGREIQWADRGKLFKRFQQIDSGDRRQHGGTGLGLAICKEIVERHHGRIFYSEGIGGGNVFTFTVPIHEGEP

SEQ ID NO: 28774 - protein, 360 aa, Zea mays
MGLDVGEIGMGLDLGLDLRLFAARSAGGMAKGAAPAGIQSCIRSLEVERRKIEVFRRELPLCLRLLADVIDELKEEAAKRGEDDDGATVVDDGDKRKWMSTAQLWVDSDAKSDESDKEQQSEITSPPEPKLLGGGAPTPIRAAVSAVAVPPPLPPPLFRREDSSASSGLSLVSLSPATKAAVPISPPVVAASGTTTSARFCGTTMPPSGSEVINMHSQAQQQASRKARRCWSPELHRRFVAALHELGGPQGQTLPPLICPNKKSSPLENDEVKSHLQKYRLHNRRSSPGAAAAPVSQSIMLVDGVWAAQEQSSGSQSGSRQGPLQFSRAGMAVGGGDDSSSSDDDEDDDKSEDGYSLKCV

SEQ ID NO: 28775 - protein, 713 aa, Thermococcus kodakarensis KOD1
MGRLVSVVLIVLLLTPIASAWEVPERGIIYQVMVDRFYDGNTSNNEPFYDPTHSNYRLYWGGDLEGLIEKLDYIKSLGVSMIWVSPLNDNINSLAYGSAPYHGYWTRDYKRIEEHFGGWEDFRRLVKEAKKRGICIIVDYVPNHSNPVNYGEYGALYDNGTFLTDYFKDTKNAEVNPITGIRENVYHHNGNIYTWSGIPLKYANLYGLADFNQLNPWVDSYLTEGAMLFVDSGACGLRIDAVKHMELGWLETFYLRLYSKGPLFIYGEYFTPSLQKGDDLYEFYRYSNVSPVLSIPIREDIVRIFAFFGGLDKLSEELGDYYSHFVYPTKAVNFLDSHDLVRFLNAGDRKDEIQRFHMALALTLTLPGIPVIYYGDESYLVSKDGKGDPYNRPTMVFDNTTEASRIIRTLGGLRKTNDALVFGDFMTVTASYETWAFERTFGNHSLLVVMNKGPAVNLTFSVDWPDGNYRDALYGGEMVVSGGKASVYLPRDSVYVFHIEGEQKKPLIGSITPYAARPGQEIVIGGAGFGKGGKVIIGGREAKVLSWEDGKIVVEVPRLETSAAWVNVTVVSDGGRSPPRPLRYYSGNDVPALIALNASLVGEVSGTLWLSGDLPELGEPRPLLKSSMGYYFTVAPLPEGVPFSVRLYEGKAWGALRPLNLTLYGVGNRTVTLTEKPPGVSEGQKAGQKDVALYALSVVMIAALIAVVWKRKG

SEQ ID NO: 28776 - protein, 472 aa, Frankia sp. CcI3
MRSRLRPEHRPGPHCRRGPVGRQRFRWLPVGDRPRRPDAMNAAVEASVATAAGPAYRDGSPQAPVRPVVTGLGVLAPSGIGTEEYWASTLRGELKIAPISRFDTTWYDATLAGEVAGFAVEDYVDKRYIVQTDRWTWFGMAASRLAMTDARYDPAAHDPYATSVVFGSGSGGVDIGQRELGRLWTRGRTAVSVYQSIAWFYAATTGQTSIRYGLKGPSGVLVSDGAGGIDSLAQARRIIRRGTPTVLAGGAEASLTPYAIAGHLSGGRVSTATVAADGYKPFDVRANGYLPGEGGATLVLEDPAAAAARGAPHVYGEIAGYAATHDAAHHERPAPDARWLATAMRRALRDASLTPDDVDVVFADGAGSPDLDAQEAAAIRTVFGARTVPVTAPQGFVGRLLAGGSALTVAAALLSIRDGVIPAVGNLDTPDPAHGLDLVRTPRRVPVRVALVNARGYGGFNSSLVVRAVGPC

SEQ ID NO: 28777 - protein, 432 aa, Frankia sp. CcI3
MSGPRRTAVTGIGVVAPGGVNRKEFWTLLTDGRTATRRLSFFDPTQFRSQVAAECDFDPAAAGLTAREIARNDRFAQFALAAALEAVEDSGLDLRGGGDGSGDGGDGGDGPIVGVSIGSAVGATTRLENEYVEVSDSGRDWEVDPRYASSFLYHAMVPSCLATELACRFGAHGPAFVVSTGCTSGIDAVGYGHQLIVDGEADIVIAGASDAPISPISMASFDAIRATTARNDDPEHASRPFDASRDGFVMGEGCAVLILEELTAARSRGAHIYCEVGGYASRSNAFHMTGLRPDGVEMAEAIRVAMDAARVGADDIDYINAHGSGTKQNDRHETAAFKRSLGQRAYDIPVSSIKSMIGHSLGAIGSIEIAACALAIENDVIPPTANWTTRDPECDLDYVPNIARDHTVDVALSVGSGFGGFQSAIVLAAPTR

SEQ ID NO: 28778 - protein, 473 aa, Pseudomonas fluorescens PfO-1
MTLYVNLAELLGTRIEQGFYRAGDRLPSVRALSVEHGVSLSTVQQAYRMLEDSGLATPKPKSGYFVPVGRELPELPAVGRPAQRPVEISQWDQVLELIRAVPRKDVVQLGRGMPDISSPTMKPLLRGLARISRRQDMPGLYYDNIHGTLELREQIARLMLDSGCQLSASDLVVTTGCHEALSTSIHAICEPGDIVAVDSPSFHGAMQTLKGLGMKALEIPTDPLTGISLEALELALEQWPIKVIQLTPNCNNPLGYIMPESRKRALLNLAQRFDVAIIEDDVYGELAYTYPRPRTIKSFDEDGRVLLCSSFSKTLAPGLRIGWVAPGRYLERVLHMKYISTGSTAPQPQIAIAEFLKSGHFEPHLRRMRTQYQRNRDVMIDWVTRYFPAGTRASRPQGSFMLWVELPDGFDTLKLNRALHDQGVQIAVGSIFSASGKYRNCLRMNYAAKPTPLIEEAVRKVGAAAIRLLAEAD

SEQ ID NO: 28779 - protein, 319 aa, Thermus thermophilus HB27
MRAIRVHEVGGPEVLRLEELPVPEPGPGEVLVRLLAIGVNFIDTYKRKGLYPVPTPFTLGEEGAGVVEKVGEGVVGVRPGDRVAFANVQGAYAEYLVVPAERLVPVPEGLDPKLAAAALLQGMTVHYLLKSTYPVAPGDQVLVHAGAGGVGQLLIQWAKRLGATVYATASTEEKRGLCLQAGADYALPYEGFAEAVKALSGGGVDVVYDGVGKDTFLGSLAALRPRGMLVLFGQSSGPVPPQDPQILNRMGSLFLTRPTLHHYTASRKELLFRAGEVFRGVLEGWLKVRIGAEFPLEKAREAHEALEGRRTTGKVLLLP

SEQ ID NO: 28780 - protein, 469 aa, Bacillus cereus ATCC 14579
MKPPADNNKEGAESHKLESESKPIWKSMSMFLVPLLLSNVLQSVGQLFGMVVVGRWLGVNDLAAISAFFPLFFLLVSFVIGIGSGSSILIGQAFGAKNEDRLKAIVGTTLTFTFIIGVLLAIIGSIFAMDIMRLMGTPENIIEISVHYARILFISMPVLFLYFAYTTFMRGTGDSKTPFYFLIVSTALNMILLPILIFGWLGAPKLDVYGAAYASVISTVITFIVMLVYLKKKNHPLQLDGTVRKYLRMDGELLKLLLRLGIPASINMILVSLSEIAVIAFVNRYGSDATAAYGVVNQVASYVQMPAVSLGITVSIFAAQSIGANQFDRLQKVVKAGIIMNYVIGGVLISLIYVFSRDILSLFLTSQTTIEIAHSLVMITLWSYLIFGHAQIISATMRASGTVLWPTVIGVVSIWLVEVPVAYYLSYHTSLGIEGIWIGYPAAFIVSLILQYAYYKLSWQKKRITRLVS

SEQ ID NO: 28781 - protein, 584 aa, Chromobacterium violaceum ATCC 12472
MKDSFKNSWAIYRRLLGYLLGYWKVLLLSMLSMAVAALTEPAVAKLLKPLIDGGFVNKDPQVIMWVPLAIIGIYLIRGLAGFINEYTASWLTGQLVQRLRQQMFAKLVNLPARYYDEHQSGRLMSRITNDVNQVTEAGFNVITVTVRDGLTALGMLGLMLTTDWQLTLICLVVMPAVTYCMRLVGQRLRGLARQNQQHMAQMTQVLAESIQCQRAIKVYGGQEREMARFDHTATSVRRNQVKQSAASAANTGVTQLMIACALAAILYFAGLRAQHGGLTAGDFMVFLTAMLGLFAPVKRISSVSQAMQRGLAAAESVFAFIDEPGEPDDGASALPATRGRLSFDAVSFAYPNVDSPALSGIDLEIQPGETVALVGSSGSGKTTLASLVPRFYEPSAGRLLLDGVPLADIPLRQLRGHIALVSQQVELFNDTVAANIAYGREDASREEIVEAARAANAMEFIEGLPDGLETVIGENGARLSGGQRQRLAIARALLKNAPLLILDEATSALDTQSERLVQAALENLMKNRTTIVIAHRLSTIENADRIVVMHQGRLAEQGRHQALLEQGGLYARLHSLQFSEPQAD

SEQ ID NO: 28782 - protein, 306 aa, Zea mays
MASLQVTPTSAFTEWNELKFEGLYLFHTPLGSGANQARVIDNKAPIGIGATVVNNWTVYDGPGPNAKLVARAQGLHIQAGNWVNSFSLVFVDQRFSGSTLEVTGIVVESGEWAIVGGTGQFAMANGVIFKKFHEQRSEGNIIQLTIHAFCPVLGPRKRSAAKVGPWGGSGGSPVDITAEPQRLKSITVATGIAVTSIAFSYVDSAGQTQSAGRWGGSGGETEPVIQLGDSEVLTELSGTIGNVDGHTVITSIKFVTSLKTYGPFGAWGDGSDTPFAIPVQQGSAIVGFFARAGVYLDALGVYVRSL

SEQ ID NO: 28783 - protein, 766 aa, Pseudomonas aeruginosa UCBPP-PA14
MALAHTLGFPRIGRDRELKKAQEAFWKGELDEAGLRAVGRQLRAAHWQVQKDAGIQLLPVGDFAWYDQVLTHSLTFGVIPERFRAHGEAGPTLHTLFGMARGVSDDSCCGGAHAQEMTKWFDTNYHYLVPEFSADQQFQLSWEQLFEEVDEARALGHQVKPVLIGPLTYLWLGKAKGAEFDRLDLLDRLLPLYGQILRRLAGQGVEWVQIDEPILVLDLPQAWKNAFERAYNLLQSEPLKKLVATYFGGLEDNLGLAANLPVDGLHIDLVRAPEQYPSILDRLPAYKVVSLGLVNGRNVWRCDLEKALEVVRHARERLGERLWVAPSCSLLHSPVDLEREDGLDAELKSWLAFAVQKCREVAVLARAATEPEAAEVLAALEESRAVQASRASSPRIHKPAVQARLAAIKASDAQRRSPFAERIARQRAGLDLPAFPTTTIGSFPQTSSIRLARQSFKQGKLSEAEYIEAMHSEIRHAVQIQEQLGLDVLVHGEAERNDMVEYFAEQLDGYVFTRFGWVQSYGSRCVKPAVIYGDLSRPRAMTVEWIRYAQSLTDKVMKGMLTGPVTMLMWSFPREDVSREVQARQLALAIRDEVVDLEAAGIRIVQIDEAAFREGLPLRRNAWPHYLEWATEAFRLCASGVRDETQIHTHMCYSEFNDVIESIAAMDADVITIETSRSDMELLEAFEQFDYPNEIGPGVYDIHSPRVPSREEIVALLRKAARRIPAERLWVNPDCGLKTRAWPETEAALVNMVAAARELRGDLARG

SEQ ID NO: 28784 - protein, 805 aa, Glycine max
MATDRLTRVHSLRERLDETLTANRNEILALLSRIEAKGKGILQHHQVIAEFEEIPEENRQKLTDGAFGEVLRSTQEAIVLPPWVALAVRPRPGVWEYLRVNVHALVVEELQPAEYLHFKEELVDGSSNGNFVLELDFEPFNAAFPRPTLNKSIGNGVQFLNRHLSAKLFHDKESLHPLLEFLRLHSVKGKTLMLNDRIQNPDALQHVLRKAEEYLGTVPPETPYSEFEHKFQEIGLERGWGDNAERVLESIQLLLDLLEAPDPCTLETFLGRIPMVFNVVILSPHGYFAQDNVLGYPDTGGQVVYILDQVRALENEMLHRIKQQGLDIVPRILIITRLLPDAVGTTCGQRLEKVFGTEHSHILRVPFRTEKGIVRKWISRFEVWPYLETYTEDVAHELAKELQGKPDLIVGNYSDGNIVASLLAHKLGVTQCTIAHALEKTKYPESDIYWKKLEERYHFSCQFTADLFAMNHTDFIITSTFQEIAGSKDTVGQYESHTAFTLPGLYRVVHGIDVFDPKFNIVSPGADQTIYFPHTETSRRLTSFHPEIEELLYSSVENEEHICVLKDRSKPIIFTMARLDRVKNITGLVEWYGKNAKLRELVNLVVVAGDRRKESKDLEEKAEMKKMYGLIETYKLNGQFRWISSQMNRVRNGELYRVICDTRGAFVQPAVYEAFGLTVVEAMTCGLPTFATCNGGPAEIIVHGKSGFHIDPYHGDRAADLLVDFFEKCKLDPTHWDKISKAGLQRIEEKYTWQIYSQRLLTLTGVYGFWKHVSNLDRRESRRYLEMFYALKYRKLAESVPLAAE

SEQ ID NO: 28785 - protein, 591 aa, Synechococcus elongatus PCC 6301
MPHPLVRLYRYSAPHQRQVLSAIACSILNKIFDLAPPVLIGMAVDVVVQRQDSWLAKWGVVPVEQQLGLLVLFSFVIWSLESLFEYLYAWQWRTLAQTLQHELRLDAYGHLQELELSFFEERSTGQLLSVLNDDINQLERFLDHGANEILQVTTTVLAVGGAMAYLSPTVAGLAILPIPVILWGSLRFQRRLAPRYARVREQAGLISARLANNLGGIATIKSFTAEAFEKGRVAEDSDAYRQANRRAIALSSAFVPLIRFAILFAFIAILYVGGMETINGRLDVGTYSFLVFITQRLLWPLTSLGRVLDDYQRAMASTQRVMDLLAIPVQIPSGRQSLPIGQVQGAVQFEGITFAYRDREPSVIDLNLNIPAGQTIAIVGATGSGKSTLVKLLLRFYEPQTGRILLDGIDLRDLKLKDLRQAIGFVSLDVFLFHGSVAENIAYGSFDATQTEIEQAAKLAEAHEFIMDLPQGYDTVVGERGQKLSGGQRQRLAIARAILKDPPILILDEATSAVDNETEAAIQRSLEQITRDRTTLAIAHRLSTIRHADCIYVMDQGRLVEAGHHDELLALDGLYANLWKVQTGERLSDRV

SEQ ID NO: 28786 - protein, 250 aa, Burkholderia vietnamiensis G4
MQSVPASLSLTDTAFFFDFDGTLVELAPTPDSIHVPPSLLTLLDTLRQRSHGAVAVVSGRGIDNLDTFLSMPDLPIAGLHGAERRDSNGDTQRIGFNDERLLRIERELAAVVDRHPGMLLEIKGAAVALHYRNAADREPVAREAAERLVAEYADAYVLQPGKMVFEIKPKGVDKGRALAAFLDEPPFAGRVPLFAGDDLTDEKGFAVVNARGGLSIKVGAGETSARMRLDSVAALHAQIARWLDLELPGA

SEQ ID NO: 28787 - protein, 356 aa, Brassica napus
  misc_feature (156)..(156): Xaa can be any naturally occurring amino acid
  misc_feature (258)..(258): Xaa can be any naturally occurring amino acid
  misc_feature (266)..(266): Xaa can be any naturally occurring amino acid
  misc_feature (349)..(350): Xaa can be any naturally occurring amino acid
  unsure (1)..(356): unsure at all Xaa locations
MVRASSSKKGGDKDDPESKQRKRLKSLALDNKLLSDSPSRCLSSLKPSKQVLKHHGCDIIRKSQRKNRFLFSFPGLLAPVSGATIGDLDRLSTKNPVLYLNFPQGRMKLFGTILYPKNRYLTLQFSRGGKNVLCDDYFDNMIVFSESWWIGTKEEXPEESRLDFPKELSPQAEQTEFDFRGGAAAAAAAASAASVKTTVATPETGSQPTDRETDSPEVEMDEILSDDGEFMDDKIQVTPVQVTPVRQSQRNSGKKFNXAETSPENXSGESEDNTSDEEDEKPVLETDSSVREEPQADITTASTGKLPTELPAKKEKSNSKDGKLVQATVANLFKKAEQKTVGTSKAKSXXKAAQKK

SEQ ID NO: 28788 - protein, 458 aa, Burkholderia vietnamiensis G4
MSRLIIVSNRVAPISEGEPAAGGLAIGVYDALKETGGMWFGWSGEVVASGAPQIRIEERGPVTFATVGLSRRDYDQYYRGFSNATLWPAFHYRADLIQYDRHEFEGYGRVNVWLAQQLVPLLQDDDVIWVHDYHLIPFARALRASGVKNRIGFFLHIPFPAAQVLVNVPPHRELVESLCAFDLLGFQTEPDLRAFCDYVEFEAGGEVTRDGRTVRVSAFGSTLRAAAYPIGVYPDEIASLAQAGEHGKAARMATSLRGRQLIMSVDRLDYSKGLVERFRAFEKLLEHQASIRNRVSFLQIAPSTRADLRAYQDIRLQLEAESGRINGRYAELDWAPILYIHRQYDRQVLAALYRLARVGFVTPLRDGMNLVAKEYVSAQNPDDPGVLVLSRFAGAARELTGALIVNPIDIDGMADALSQALTMPLAERRARYADMIAQLRENNVSVWRDNFLRDLQRA

SEQ ID NO: 28789 - protein, 694 aa, Oryza sativa
MMMGREDKYVRFEDWRSEQSVMSPRRHNALSSLKERTAGVFAFLGNLVHSETLKRLVLHERKLTTRTLHPQGPFLQSWNKIFVLSCIFAVSVDPLFFYIPVINDNNTCWYLDKKLEITASVLRFFTDIFYILHIIFQFRTGYIASSLTTFGRGVLVEDRYAIAKRYLSTYFLIDVFAVLPLPQVVILVVLPNLGGSEVTKAKNILMFIVICQYVPRLIRIRPLYLQITRSAGVITETPWAGAVLNLLIYLLASHVLGALWYLLSIERKDACWRDMCSNNSTVCNQAYLYCGDKENSILRTACLPIDSNDIDPNFGIYVPALNNVSQSTNFLAKLFYRVSWGLQNLSSLGQNLKTSTYAWENLFAVFVSISGLVLFALLIGNVQTYLQSAHLREEEMRVKSRDTDQWMSYRLLPENLKERIRRHEKYRWHQTSGVDEELLLMNLPKDLRRAIKRHLCLSLLMRVPMFENMDDQLLNALCDRLKPVLYTEGSCIIREEDPVNEMLFIMRGNLMSMTTNGGRTGFFNSDVLKGGDFCGEELLTWALDPTSVSSLPSSTRTVKTMSEVEAFALRAEDLKFVATQFRRLHSKQLQHTFKFYSQHWRTWAACFIQAAWHRYCRKKIEDSLREKEKRLQFAIVNDGATTLSFRAAIYASRFAGNMMRILRRNATRKARLKESVPARLLQKPAEPNFAAEEQ

SEQ ID NO: 28790 - protein, 160 aa, Bacillus cereus G9241
MTVYDFSAKTITGEDKSLKDYEGKALLIVNVASKCGFTPQYKGLQEVYDKYKDQGLEILGFPCNQFGGQEPGTEADITSFCELNYGVNFPMFAKIDVKGDKAHPLYTYMTEQAPGLLGMKAVKWNFTKFLIGKDGKVVGRFAPQTKPVDLEVEIEKVLGE

SEQ ID NO: 28791 - protein, 275 aa, Griffithsia japonica
MRPLLLKGHERPLTRVKFNRDGDLLFTAAMDKAPTLWRASSGERLGTYHGHNGAVQDLDISHNTERIITGSGDNSAILWNAETGQPIFKWEFKSPARAVAFSPGDSHVAIATANLMGQQSNVYVYRHDRTTEEQETEPVIVLEGHTATIVRVLWYPTAEYILTAARDLTLRKWEVSTGKEADLVEAHTSAIQDCQWGPDGMTMITSSKDQSAKLWSFHDFQLLKNVLHGSFPVNSCRNLAHFLAHLAWWGVRRQPQVNDHPPDRQGKFRSQRFSH

SEQ ID NO: 28792 - protein, 805 aa, Lycopersicon esculentum
MAERVLTRVHRLRERVDATLCAHRNEILLFLSRIESHGKGILKPHELLAEFDAIRQDDKDKLNEHAFEELLKSTQEAIVLPPWVALAIRLRPGVWEYVRVNVNALVVEELSVPEYLQFKEELVDGASNGNFVLELDFEPFTASFPKPTLTKSIGNGVEFLNRHLSAKMFHDKESMAPLLEFLRAHHYKGKTMMLNDRIHNSNTLQNVLRKAEEYLIMLPPETPFFEFEHKFQEIGLEKGWGDTAERVLEMVCMLLDLLEAPDSCTLEKFLGRIPMVFNVVILSPHGYFAQENVLGYPDTGGQVVYILDQVPALEREMLKRIKEQGLDIIPRILIVTRLLPDAVGTTCGQRLEKVYGTEHSHILRVPFGTEKGIVRKWISRFEVWPYMETFIEDVAKEISAELQAKPDLIIGNYSEGNLAASLLAHKLGVTQCTIAHALEKTKYPDSDIYWKKFDEKYHFSSQFTADLIAMNHTDFIITSTFQEIAGSKDTVGQYESHMAFTMPGLYRVVHGINVFDPKFNIVSPGADINLYFPYSESEKRLTAFHPEIDELLYSDVENDEHLCVLKDRTKPILFTMARLDRVKNLTGLVEWYAKNPRLRGLVNLVVVGGDRRKESKDLEEQAEMKKMYELIETHNLNGQFRWISSQMNRVRNGELYRYIADTKGAFVQPAFYEAFGLTVVEAMTCGLPTFATNHGGPAEIIVHGKSGFHIDPYHGEQAADLLADFFEKCKKEPSHWETISTGGLKRIQEKYTWQIYSERLLTLAAVYGFWKHVSKLDRLEIRRYLEMFYALKYRKMAEAVPLAAE

SEQ ID NO: 28793 - protein, 377 aa, Schizosaccharomyces pombe
MEEVVHYFLEGNMPVAQFREALALHYTNEKELFEQAKRCLNICCGSNNFAKRNDVLFSLLDVAVSISSLELRKELISELYVPVQSLEEAPSEYLVSCCLQLATIYEAEQNFELLCSSLEAVEKHGHFENDLEQLLLLRIRLGDAYLKLGKAEKAILTVRTSIPLAFKVSNDQLLMELQLCNARALDETGQFLEAAKCYYRVLQYKVPGNELIYRENLCSVAQCLLLAIPSPIVLQFLQEISLQPSVREIPFYSLVEKYLKRKFIGKEDGAFLLPFLLPHQVIHMNRLIEDGRHFLETNILFLSEFFEVSSTSILAKHFKLSEEQVDTVVADMVIQERLNASIDQCEGYITFLPEYGKANNLPNYVNKIATVLQHYGS

SEQ ID NO: 28794 - protein, 165 aa, Helicobacter hepaticus ATCC 51449
MAVIYLAGGCFWGIQGYFDKLKGTLCSQVGYANSAVENPSYEFVCSGNSGAVEALELHYDEDLLPLREIIGRFLSVINPCALNFQGNDIGTQYRNGVYFVQESDESIIKECLKLWEKKHHKKAVTEVEKLQNFYSAELYHQKYLEKNALGYCHINTDLALQKWEE

SEQ ID NO: 28795 - protein, 95 aa, Fagopyrum esculentum subsp. ancestrale
GRLYEYANHSVKATIDRYKKACSDSAGVTSVAEANAQYYQQEAAKLRNQIRTLQNNSGNLSRHMMGEGLSNLSMKDLKNLETRLEKGISRIRAKK

SEQ ID NO: 28796 - protein, 427 aa, Cryptococcus neoformans var. neoformans JEC21
MPVAPTVKSARTTSVYDRSCRASASPKSSRRLSSQTKAKIQAVAAPVSQARAVPQHRKVEEVMYFEEDYSEEIIAYMNSMDNSTLASAELMDMQPELQWFMRSYLIDFIIEVHQQFRLRPEVLYLAMNIVDRYISKRVVYKKHYQLVGCAALWIAAKFEDAKDKVPLVHELSEMCCKAYDESAFIQMEGHVLSTIGWVLGHPSAEAWLRVFTTGIRYEDQKVANMARFLMEITLFHREFIGIQSSIIAAGALMLARFICGKPYKPCFPNVPETVAARVSIAIDKRFSQELEKVSEIVIRKYAPTYYDRVSTVCREWYLSGRRYTYNPVMPSTPVSGLSTPGLAPSCSSSWAKRGSWVTGSPAGSCASSEAGDDTPVTPITPIYTHVIDPFSVAAKENIAPDAGKPMAKVIPRVHNVTAPRVMRRLSN

SEQ ID NO: 28797 - protein, 229 aa, Arabidopsis thaliana
MSAMVSALTQVVSARSQTEAEGAHSQTEAEGAHSSSSSAGHKRGWLGIDSAPIPSSFARVDSSHNPIEESMSKAFPEEAREKKRRYRGVRQRPWGKWAAEIRDPHRAARVWLGTFDTAEAAARAYDEAALRFRGNKAKLNFPEDVRILPPPPPLLRSPADTVANKAEEDLINYWSYTKLLQSSGQRSFLERGQEESSNIFEHSPMEQPLPPSSSGPSSSNFPAPSLPNT

SEQ ID NO: 28798 - protein, 391 aa, Glycine max
  misc_feature (34)..(34): Xaa can be any naturally occurring amino acid
  unsure (1)..(391): unsure at all Xaa locations
VSSQTISRVPVQVDSFDKLPTSLDKNPLTNQTEXQSLQLQKVQLSNLVSGDTEHQEESAMADASPRTDISTDVDTDDKNPRFDRSQSLVAVASDSSDRSKDKSDQKSLRRLAQNREAARKSRLRKKAYVQQLESSRLKLTQLEQELQRARQQGIFISNSGDQAHSMSGNGAMAFDVEYARWLEEQNRQINELRAGVNSHAGDTELRMIIDGIMAHYDEIFRLKANAAKADVFHLLSGMWKTPAERCFLWLGGFRSSELLKLLVNQLEPLTEQQLVGITNLQQSSQQAEDALSQGMEALQQSLSETLSTGSLGSSGSSGNVANYMGQMAMAMGKLGTLEGFIKQADNLRQQTLHQIHRILTTRQSARALLAIHDYFSRLRALSSLWLARPRD

SEQ ID NO: 28799 - protein, 336 aa, Zea mays
MPGGSSGPDGEVDAGFAKLQGEDFEYYMQTYSIMLGRNSKKSTVDVDLSSLGGGMNISRHHARIFYDFQRRRFALDVIGKNGCLVEGVLHLPGNPPVKLDSQDLLQIGDKKFYFLLPTRSIFASAAAARHAPIIPQQLPPPPYAHARAGRPRLSEFHDRSFEGDYGREVDEIGNGISETGMRGKLVKRNKKSSGDLDIYGGHRINVEPIGTLGEDSRSEIRSRGDRDIDNQQALQAEEKDVVSSVATVLSDLCGPGEWMPMAKLHNELLEQFGNVWHPSRVRKYLTQDDWSPTETKGRPWFGLLALLRKYPEHFVINTRSKGRMTSEFVSLVSLLS

SEQ ID NO: 28800 - protein, 548 aa, Schizosaccharomyces pombe
MKGIKSKMLSRGKSQDTQKSSKKKESKKSNSHDSSKAPKESPSTDPNGSVIGAQNDFLTVPKHSGKKVPIDTTPTPRDEILLENVRTVRKQRSSLYHISENRNLVRLPSFTDVPVNKWHSLALEKLEQCCVVFDFNDPSTDLYGKEVKREALQDLIDLISVRKEAIDESLYPSIVHMFAVNVFRPLPPPSNPPGEIMDLEEDEPALEVAWPHLHLVYDFFLRFFESPSLNTSVAKVYINQKFIRKLLVLFDSEDPRERDFLKTTLHRIYGKFLSLRAFIRRSINNLFLQFVYENEQFNGIAELLEILGSIINGFALPLKEEHKIFLSRVLIPLHKAKSLPLYYPQIAYGIVQFVEKDSSVTEEVVLGLLRYWPKVNSSKEVLFLNEIEDIIEVMEPSEFLKIQVPLFHKLATSISSQNFQVAERALYFFNNDYFVHLVEENVDIILPIIYPALFEISKSHWNRVIHSMVCNVLKLFMDINPSLFDEVDAEYSESRRKKEDEEIIREERWTILENIAKENAMKLKSQNPTTVHSTTERLKKLSLDYTNG

SEQ ID NO: 28801 - protein, 539 aa, Methylococcus capsulatus str. Bath
MTDGNGTLAWWQTGIIYQIYPLSFQDSDGDGRGDLPGILHRLDYLADLNIAAVWLSPVFASPMRDFGYDVADYTSIHPWFGTLSDFDRLLAGLHGRGIKLILDLVPNHTSDRHPWFLESRSSRDNPRRDWYLWRDPAPGGGPPNNWLSFFGGPAWTYDETTGQYYLHQFTPEQPELNLRHPAVLEAMLEVMRFWLDRGVDGFRVDVPWLLIKDAGFRDEPENPAWDGIDPHGRLLHIHTAHQPELHRIIRAMRAVVDGYPGERVLIGETNVPEEELVKYYGAARDEFHLPFNFRLIHAPWDARKIRQMVETYEAILPQRASPAWVLGNHDQPRIASRFGPDAARVATMLLLTLRGTPTCYYGDELGMENGVIPRDRIRDPQALNQPGISGVFNRDEARTPLPWDTSPNAGFAPEGVDPWLPLGEDWPMRNVARQAADPRSMLALFRALTRLRQCHPALSHGSYESVDTKADGVFAYKRTAGAERLLIVLDFAGSEHLLDSGELADGAEILLSTGMRRTGRVDLRRLRLLSNEGLILKIS

SEQ ID NO: 28802 - protein, 585 aa, Saccharomyces cerevisiae
MLHRHGSKQKNFENIAGKVVHDLAGLQLLSNDVQKSAVQSGHQGSNNMRDTSSQGMANKYSVPKKGLPADLSYQLIHNELTLDGNPHLNLASFVNTFTTDQARKLIDENLTKNLADNDEYPQLIELTQRCISMLAQLWHANPDEEPIGCATTGSSEAIMLGGLAMKKRWEHRMKNAGKDASKPNIIMSSACQVALEKFTRYFEVECRLVPVSHRSHHMLDPESLWDYVDENTIGCFVILGTTYTGHLENVEKVADVLSQIEAKHPDWSNTDIPIHADGASGGFIIPFGFEKEHMKAYGMERWGFNHPRVVSMNTSGHKFGLTTPGLGWVLWRDESLLADELRFKLKYLGGVEETFGLNFSRPGFQVVHQYFNFVSLGHSGYRTQFQNSLFVARAFSFELLNSSKLPGCFEIVSSIHESIENDSAPKSVKDYWEHPQAYKPGVPLVAFKLSKKFHEEYPEVPQAILSSLLRGRGWIIPNYPLPKATDGSDEKEVLRVVFRSEMKLDLAQLLIVDIESILTKLIHSYEKVCHHIELASEQTPERKSSFIYEMLLALASPQDDIPTPDEIEKKNKLKETTTRNYRGTC

SEQ ID NO: 28803 - protein, 355 aa, Pirellula sp. 1
MAVPSFDSTCSVRWLLPLPLNATEHVLDRDEIVAVMHRLVICRNHLPFPTGSPPMTFSESLEQDELTLLKKSRRKTPTRRSEAAQSPLETYLREINETPLLSAEEELELAARIAQGDVMARDQMVRANLRLVVNISRGYTGKGLGLQDLIEEGNLGLLRAVEGFDPIHGTRFSTYASYWIKQSIKRALINSAKTIRIPAYMVELLSKWRRATARLNEELGRTPTNEEVARVLGLPKKKLPIIRKAIKINNSTPQSDQTEAGWSLGDMVQDERLKAPDEEMLDHDILKHAMSLLGDLEERESTVLKLRFGLGGVEPMTLKEIGAELGLTRERVRQIETEALRRLADGLTDPRERGY

SEQ ID NO: 28804 - protein, 295 aa, Zea mays
  misc_feature (57)..(57): Xaa can be any naturally occurring amino acid
  misc_feature (65)..(65): Xaa can be any naturally occurring amino acid
  misc_feature (109)..(109): Xaa can be any naturally occurring amino acid
  misc_feature (113)..(113): Xaa can be any naturally occurring amino acid
  misc_feature (158)..(158): Xaa can be any naturally occurring amino acid
  unsure (1)..(295): unsure at all Xaa locations
HQGDGGGRGSQGKKKKGHTDVIWTQKRVLDRVSLGKPFYWEIRDEHGLFYALDLGGXGGRVLLFXLGGKEKRVVKQQYEEGSIPPHLRGGTSMGLFDFIAAALAKFVGXEGEXFQLPEGRQRELGFTFSFPGNQTSISSGTLIKWTKGFSINGTGGEXVVSELSRAMERQGLDMKATALVNDTVGTLAGGRYMDTDVVAAVILGTGTNAAYVEHANAIPKWTGLLPKSGKMVINTEWGSFKSNKLPLSEYDKAMDFESLNPGEQIYEKMISGMYLGEIVRRILLKLAHEASLFGD

SEQ ID NO: 28805 - protein, 432 aa, Daucus carota
MASKAVITQRHKEAEGKQKNVQAERRNRRVLGDIGNVVKAVDAGKPKNPIKTNRPMTRSLCAQLVAKGLPVVGGKDPKDIQLIDGVVGRKDASVLEAAAVKKKDTDQRTTVTLSCEEEIKPKSSGRKSRPDYSEKTEKAFTSILSARSKAACGLINKPQNEIIANIDASDVDDELAAVEYVDDIYKYYKLTEGDGQVHDYMPSQTDINSKMRSILIDWLVEVHRKFELMPESLYLTINIVDRYLSMKIVPRRELQLVGVGSMLIACKYEEIWAPEVNDFIAISDNAYNREQVLLMEKSILAKLEWYLTVPTPYVFLVRYIKSSVPSDPEMENMTFFLAELGLTHYTTVMTYCPSVIAASAVYAARCTLKKSPFWTETLKHYTGYSEDQLRDCAKLLVSYHAALSESKLKAVYKKFARPEKGVVALVPPLKLI

SEQ ID NO: 28806 - protein, 287 aa, Triticum aestivum
MGAARGGVSALLVAALLLGAFAPPASAASYPAKVVSGFLSNAASAVLKRLWSLKSTVKTASGAKSMVKYEGGYTVETVFDGSKLGIEPYSVEVTQGGELLVMDSMNSNIYRIALPLSRYSRPKLVAGSPEGIPGHVDGRLREAKMNHPKGFTVDGRGNIYVADAMNMAVRKISDTGVTTIAGGFSSRGGHVDGPSDDAKFSTDFEVRYIASSCSLLVIDRGNQAIREIQLNFDDCVYQYEAGFPLGVALLLAAAFFGYMLALLQRRVLGMVSTEDELQTPMKASIAS

SEQ ID NO: 28807 - protein, 592 aa, Saccharomyces cerevisiae
MTEDFISSVKRSNEELKERKSNFGFVEYKSKQLTSSSSHNSNSSHHDDDNQHGKRNIFQRCVDSFKSPLDGSFDTSNLKRTLKPRHLIMIAIGGSIGTGLFVGSGKAIAEGGPLGVVIGWAIAGSQIIGTIHGLGEITVRFPVVGAFANYGTRFLDPSISFVVSTIYVLQWFFVLPLEIIAAAMTVQYWNSSIDPVIWVAIFYAVIVSINLFGVRGFGEAEFAFSTIKAITVCGFIILCVVLICGGGPDHEFIGAKYWHDPGCLANGFPGVLSVLVVASYSLGGIEMTCLASGETDPKGLPSAIKQVFWRILFFFLISLTLVGFLVPYTNQNLLGGSSVDNSPFVIAIKLHHIKALPSIVNAVILISVLSVGNSCIFASSRTLCSMAHQGLIPWWFGYIDRAGRPLVGIMANSLFGLLAFLVKSGSMSEVFNWLMAIAGLATCIVWLSINLSHIRFRLAMKAQGKSLDELEFVSAVGIWGSAYSALINCLILIAQFYCSLWPIGGWTSGKERAKIFFQNYLCALIMLFIFIVHKIYYKCQTGKWWGVKALKDIDLETDRKDIDIEIVKQEIAEKKMYLDSRPWYVRQFHFWC

SEQ ID NO: 28808 - protein, 658 aa, Ralstonia eutropha JMP134
MADAIRVLAMDAVQQANSGHPGAPMGMADIAVALWGRHLKHNPANPHWADRDRFVLSNGHGSMLIYALLHLTGYDLPIEELKNFRQLHSKTAGHPEYGITPGVETTTGPLGQGITNAVGMALAERLLGEEFNRPGFNIVNHYTYVFLGDGCLMEGISHEACSLAGTLKLNKLIALWDDNGISIDGDVVHWFNDDTPKRFEAYGWNVIRGIDGHDVTAVDLAISQAKASDKPTLICCRTKIGKGAPNKEGGHDVHGAPLGGAEVLATREALGWAHAPFEVPADVYDAWDAKATGLALEKAWNALFEGYADRHPYEAGEFQRRMRGELPGSFDAAVDAFIAKCEEKAETIATRKASQNTIEAFGPVLPEFLGGSADLTGSNLTNWSGSQAVRVDAWGNHINYGVREFGMSAILNGITLHGGYIPYGATFLTFSDYSRNALRMAALMKIRSLFVFTHDSIGLGEDGPTHQSIEHVASLRLIPNMDVWRTADTTETAVAWAEAIRRENGPSCLIFSRQNLPFQQRDDATRANIARGGYVLRDGTNANTGRPDAVILATGSEVGLAVGAADQLAAEGVHVRVVSIPATTVFDKQDSAYKASVLPAGVPRVAVEAGVTDFWWKYQVQAVVGIDTFGQSAPAGVLFKHFGFTVENVVRTVKDTLQ

SEQ ID NO: 28809 - protein, 299 aa, Oryza sativa
MRGGASLRLRWPAALVAVVAAAVTAAAAAGHGDHNFHRDFDAVWGKGNARFRDGGRMVELTLDEQTGARLQSKERFLFGRFDLEIKLVRGESAGTITSFYICSGGARHDEVDFEFLGNVSGEPYLLHTNIFSDGKGEREQQFVLWFDPTADFHTYSILWNPHNIILYIDGTPIRVFKNNEAYGVPFPTRQPVHVFASIWNAEEWATQGGRVKTDWSRAPFVATYRRYNVSNACVWDAAGAGASRCAGGGGGWMRRRMDWWSWMTLNWVRMNYMAYDYCADRKRFPHRFPAECIIPIGRT

SEQ ID NO: 28810 - protein, 190 aa, Griffithsia japonica
ARGTGGVYATAERCAVTTTLAGATGGVVTLIVIKIRDHIFDLLACLNGILAGLVAITACCAFVDPWAAVVIGAIGAVVYIGAAMLLLKFQIDDPLEAFPIHGASGAWGCLAGTLFNKQGHQVTAGFTDQIWGLFYGGGGRLLGVNALGMVVITVWTVGLVTPLFLVMKFTGILRISPEEEIIGNDVSKHG

SEQ ID NO: 28811 - protein, 281 aa, Physcomitrella patens
MEEKLILLSERIEDRKRMIKNGQILSASNRRSVKPRLYGITEIHGPHHSVTGPEHLQNLFESMGEYIDGLKFSGGCMSLMARDILKQLIRQAHDHDVYVSTGGWAEHILRKGPGSFKQYVQDCKELGFDSIELNASFIELNEDNLLRLIRLVKNSGMRPKPELGLSFFGGENAELASSGKVDLDWVIRRAERYLEAGADMIMVNSDGLTNSTNNCHTDLVAKIIERLGLEKIMFEANDPNVSEWFIQNYGPKVNLNVNYSQVGQLERLRSGLPGTRSIHFA

SEQ ID NO: 28812 - protein, 5192 aa, Stigmatella aurantiaca
MANRNDESNELSPAKRMLVALEKMQTRLNAVEGAAKEPIAIVGMACRFPQADNVEAFWRLLQGGVDAVREIPLERWPKDEVADIGDGAMRWGGFLDSVDSFDPGFFGISPREAVRMDPQQRLLLEVAWEALEDAGLDVDKLSGSRSGVFIGACNDDYHCMQVERPETGDAFSATGVAASVLSGRLSYLFNLQGPSLVVDTACSSSLVSLHLACQSLRNRECNMALAGGVNLILSPQSVLLVSKLQALSPDGRSKAFDASANGFTRGEGCGIVVLKRLSDALADGDHILATIRGSAINQDGKSTGLTTPNVLSQQALIRQALESSGLKAEQVSYVEAHGTGTPLGDPIEAEALRETYGVPRPDGSVCGIGSVKTNVGHLESAAGIAGIMKVVLAMRHQSIPPHLHLKQVNPRIQLEGSALTIPTRLTPWKASGQPRRAGVSSFGISGTNAHVIIEEAPAPVAKDALPQRPEVLPLSARSREALVALAERYAERLGREGGGSLSDVCYTASAHRTHHTHRLAVLADSREHTAERLRAFARGEQPSGAWSGRKAFGGRRKIVFVYPGQGAQRAGMGRALMESEPVFRDALVKVDKALQPHLGWSVLDEIAADEQRSRLAEIDVNQPVLFAVEVALTALWRSWGIEPDAVMGHSMGEVVAAHVAGALSLEDAVLIICHRSKLMRTLGGRGATMAMVELSVEEAEEAIRPWNGKIWLGGLNGPRSQVLSGEPEAVKEAVEALGKRGVFTRWVKMDVPSHTPLVEVISRELEGRIARITPRAADIPLCSTVTGEFLDGAKLDAAHWGNNLRNPVRFAAAAQHLLASDHGTFVEVSPHPVLLPAVEQTMSAGNTEGVVLASLRRNEDERHTMLSSLGALYSSGHRVAWNRVYPGKGQLVPLPTYPWQRERFWMEPAVRGVRASRTSSGHPLIGERIDLSAQGEVSRLWQVQLGPKHFPLLAEHRVQGVPALPAAAMADMALSAAKQTLGEPVSLEDVSFSALLSFPEDEERVLQLWLSTERPGASAFRLFSAPVMRETPSDELTWALHAEGSLRHGDASVVEKAAPVALDELRARCGEEASVEAHYQTLKEIGLEYGPSFRVVRELYRAKGEALGRVQLEGELTAEEERYSLHPALLDGCFQVLAAALEGLDSEGGVYVPVALSRLRVLVRPEAALWSHVRIVSGAEAGSNTIECDVTLLNDQGRVVAEVRRLVCKKIAAASAPADEVDRWIYSAQWEPQQRQARAETGSSRTAGRWLVFADARGIGQSLASGLAERAGGCVVVEAGPSYERLEADRYRINPSKLEDFQALLKEAFSDQSPCKGMVHLYGLDVASNVTEPESFERALSLSSTSVVYLLQAWAQRGWRDTPRLWLVTTGVQVIASGEQPGSPAAAPLVGLAAVITHEHPELRCAHVDLSAQPSPEEIASLTEELLGDGAEDRIALRGAVRHVARLGRGISGRKAAEPREFTADGTYLITGGLGGLGLEVAKWFIQRGARNLALTGRGAPSEEAQKVLGELRANGAEVRVYRADVTSAADVARLLGSIDSELPPLRGVVHAAGVIADGVLTQLDEPRLRAVLAPKVQGAWNLHVQTQGRPLELFVMFSSAASMMGSPGQGNYAAANAFMDVLAHHRRAAGLPGLSVNWGPWADVGLAAVATNRGDRLALRGVGNMPPAQALEALGRLLVQEAAQVAVVPLDLRQWREFYLSAAQSPFLSVLMQEKVSTPASRKGSARELLAAAEPEQRKGILEGYLREQLGRILRMEPSRIEPDQPFGDLGMDSLTGLELRNRIESGLKLTLSATLIYAYPTVQALTTYLYGKLEPVLEAEARPTVRPTQTEPRVSVGVAPASQGPELLAIVGMGCRFPGGANEPEAYWRLLSDGVDAVREVPADRWQSSTDAAEHKGTRWGGFLDRVDGFDPEFFGIAPREAVAMDPQQRLLLEVAWEALENAGLPKSRLAGTRTGVFVGVCGYDYAMLQAERDVEGDVYSVIGCSNSVIAGRLSYLMDLRGPAMTVDTACSSSLVALHLASQSLRNRECDAALVGGVNLLLSQRPSSWLSKLMALSPDGRCRTFDSRANGFVRGEGCGVVVIKRLSDALASGDNVLGVIRASAVNQDGGSTGLTAPNVLSQQALIRDALKSANLSPKEIGYIEAHGTGTPLGDPIEVEALRETYGVRRDDGFPCFLGSAKTNIGHLEAAAGMAGLIKVLLALRHEAIPKHLHFKALNPRITIEDTPFVIPTQMQPWPVSQRRRYAAVSSFGISGTNAHVILEEAPSPLPAPVAAEAGAQLLALSARSEGALRALARSYQELLAKPQDEALRLEDIAYTAALRRNPHEHRLSVAGRSKQELSEQLQSFLDGSTPPYLTTGLAESRREKVVFVFGGQGSQWQGMGRDLLARSEPFAAALRECDSLLAQHTGFSIIEALEVEGPTSRLDETEVAQPAIFAIQVALAAAWRALGVVPAAVVGHSVGEIAAAHVAGALSLAEAARLVAHRSRLMQRATGKGRMAAVELSSEDAQRELARYSDRLSVGAINDARSVVLSGEPSALGEVLESLRARGLSTRDLGVNYAFHSQQMASLQPELIEALGQLETRPTSIPMISTVSGQVIEGQALDAAYWASNIREAVRFSDAVGALIDEGHRLFVELGPQPALGRYVSQALERRELEGAAVPSLRKGRDGQTVMLGALGGLHVKGFPVDWARLFPSGGRLVSLPLYPWQRSRYWIDLDDASATSQAPTTSARGVASGAPASSTSRPDDWVYDITWQARERGAASPRAQQGTGTWLILGHREGTGAALAALLEQRGEPCWLVVPGEEAEVLGPTLRSIHPQRSEHFERLLQEVGPIRAVVHLWGADASPASEPKLAEVESAQQLGVHAVVRLVQAFLKSGSASGARLWLCTRGSQAVGGAMGGSPLQAPLWGLGRVMALEYPDAWGGLLDLDPSAPAGEVEALWKELSGFDGEDQAAFRDGVRYVARLVPAAPKPALAPVALRPDASYLVTGGLGGLGLHVARWLVSKGARHLVLLGRKGLPDRSEWPTIARESDVGRQIAAVEALEANGAVVHALSADVGNPIRMAEVIQSIQQGPAPLKGIIHAAGVSTLVSLDTMDEAALASILRPKVTGGWVLHQVTQGLDLDFTVYFSSGSAVWGSARMAHYAAGNQFLDSLAHYRRARGLHALSINWGPWAAEGMVAEEGLRWFERMGLRGVSVEGGLHVLEALLAMDVTQRSVAQIDWSLFKSVYESRTRKPLLEALGPASVPVPRSVEVAAGNEELAQLRNASPARRKELVIAWVREEVARVLGFPSSASVKLEQGFFETGMDSITAVELRRRLVARFGVQLATTVAFDRPTVLALSTHILQDVLRLDVEAKEEASRVVGNATEPIAIVGIGCRVPQASGPEAFWKLLEGGVDAIREVPASRWKVEDYYDPQPGVPGKTYTRWGGFLDGADQFDAQFFGIAPREAANMDPQQRLLLEVAWESLEHAGIAPARLANTRTGVFIGIGSNEYAMLNGVGSASAAGDAYIATGNDSSFAAGRLAYLLRFQGPTMSLNTACSSSLVAVHLACQSLRAGESNLALAGGVNMTLAPHSTIYLAQLRALSQDGRCKTFDASADGYVRSEGCGIVVLKRLSDAKRDGDDVLAVIRGSAVNHDGPSSALTVPNGDAQQQVLRAALANAGVAPADVDYIEAHGTGTSLGDPIEVQALANVLGQGRTSEQRLLIGSVKTTIGHLEAAAGIAGLIKVVLAHRHGVVPPHLHLKKLNPHIELNGFPLDIPTQVTPWPERARPRIAGISAFGLSGTNAHVLVEEAPAPEPRAEQAERSLHVLALSAKTKGALTQLAARVGEYLAEQPEQKLADVCHAANTQRTWFSHRLALVVESVEQTRERLLAFARGEEVPRLAQNRVEGEDPKVVFVFTGQGAQYAGMGRELYETEPVFRAALDRCNALIEGKWAESLLSVMHGTGSRIDDTEYTQPALFALEYALAELWRSWGVEPWAVLGHSVGEYVAACVAGVMELEEALGLITERARLMQALPRNGEMVAVSASEAQVQEMLAPYADRVSIAAVNGPADTVISGEREAVEAISASLQAKGVKARRLTVSHAFHSPLMDPMLDAFEKAAGKIAFRAPRLHLASNVTGQLLGDGAVLDAAYFRRHVREAVRFHDGLKALRALGGTVFVEVGPHPTLTSMALKGLGDDAGTWLPSLRKGQPEQPQILSSLGALYTQGVAVNWIALNGERHRSPVALPVYPWQHQRHWLETAKTPRPVAPTTCAQSLVGQRVRSPLNKSIVFEGRYSAQSLPFLDDHRLYGTVVVPGSCHIARIIATAAQSFGTGPYTIEKCLFSQPIVLADDEEQLVQLVLAPKGQGRYDFEIYSLSPTADEETEGWLLNGTGTLQVGGDGHSRPEPISRQDIEARCTRLMESGLYEKNWDIGFNLGHAFRWIERVQSGGREALCQMRLPTERDDRGLYVHPGLVDSFLQAMGTDLIREDAQLSTVYVPISVERFRFYEQPTGPVWAYAVRRDAEEAVGEVITGDVYVVNAEGRVLIEIEGLKHKRAPREALMAVLRHGQRDTLYELGWKRQPLPEGVPGSGRWIVFADETGTGEALAERLLKSGCRPVLVRPGEAFARQDGDRFTLDAQRAEDYARLLKEAVPSGESLGGVVHLWAMRGAHGNDVESLHAAHQLGGGSALHLAKAVASFPSAARLWLVTRGARALPSHSGPLALNQVPVWGLGVVFSQEHPERCGALIDLDPSASGEDATAIWRELSAADGERQVVIREGQRHVARIRASRDEQRNAAQRLRPDASYLLTGGLGGLGLSLARWMVDQGARNLVLIGRGAAKPEAQETLRTLEAAGAKVLVLQADVSKQADVRRTLEEAEKLAPLRGVVHAAGVLDDGVLLQQDWERFSRVFAPKVDGAWHLHELTKDKELDFFVLYSSAATLLGPPGQGSYAAANAFLDALAHHRRSQGLPALSINWGPWAEVGMAAQHASRFQTQGIEAFSPEAALKAFSQALSRAQPQLTLMQVQWSRYLAQYPRGAAPTVLAEVSGRAVAEPEANGHSASEFRRRLESAEPRQRLPLLLEHVQGEAVRVLGLDASASLEPRQRLFEVGMDSLMALELRNRLQTTVGASLPSTLVFDYPTAEAIANYLLGEALGLEKQSAGNAQGEVQDTALLERIMELSPDELAASLEAKLSALMEEGS

SEQ ID NO: 28813 - protein, 713 aa, Bacillus anthracis str. A2012
  misc_feature (647)..(680): Xaa can be any naturally occurring amino acid
  misc_feature (688)..(688): Xaa can be any naturally occurring amino acid
  unsure (1)..(713): unsure at all Xaa locations
MSHSIEQLSINTIRTLSIDAIEKANSGHPGMPMGAAPMAYTLWTQFMKHNPNNPTWFNRDRFVLSAGHGSMLLYSLLHLSGYDVTMDDLKNFRQWGSKTPGHPEYGHTAGVDATTGPLGQGIATAVGMAMAERHLAAKYNRDAYNIVDHYTYAICGDGDLMEGVSAEASSLAAHLQLGRLVVLYDSNDISLDGDLNRSFSESVEDRYKAYGWQVIRVEDGNDIEAIAKAIEEAKADEKRPTLIEVRTTIGFGSPNKSGKSASHGSPLGVEETKLTKEAYAWTAEQDFHVAEEVYENFRKTVQDVGETAQAEWNTMLGEYAQAYPELANELQAAMNGLLPEGWEQNLPTYELGSKAATRNSSGAVINAIAESVPSFFGGSADLAGSNKTYMNNEKDFTRDDYSGKNIWYGVREFAMGAAMNGIALHGGLKTYGGTFFVFSDYLRPAIRLAALMQLPVTYVFTHDSIAVGEDGPTHEPIEQLAALRAMPNVSVIRPADGNESVAAWRLALESTNKPTALVLTRQDLPTLEGAKDDTYEKVAKGAYVVSASKKETADVILLATGSEVSLAVEAQKALAVDGVDASVVSMPSMDRFEAQTAEYKESVLPKAVTKRFAIEMGATFGWHRYVGLEGDVLGIDTFGASAPGEKXXXXXXXXXXXXXXXXXXXXXXXXXXXXXXXXXXAKAYFGRXICFLIYLLDFQNLGPFRRKKCYINK

SEQ ID NO: 28814 - protein, 416 aa, Ralstonia eutropha JMP134
MRLDTMAAPRVSHSTHSVSPLHLSHFTATSCIGTGLDDTVSALREQRGGLAPCQFGDIRLDTWVGEVPGVDSVTLPPGLADFACRNNSLALLALEQDGFADRVREAVARYGADRIGVFLGTSTAGVLQTELAYRQRDPQTGALPAGLSYAGTHSPYSLPGFVRAYFGLQGPANAVSSACSSGAKVFTSARRLIEAGLIDAAVVGGVDSLCHTTLYGFGSLELLSNQPCRPFDADRNGISIGEAAAFVLVERTPDPAPDGAILLLGIGESSDAHHMSAPHPEGLGASMAMEQALTRAGVSPEQVDYVNLHGTATRANDATEARAISALLPGTPCSSTKGATGHTLGAAGALEAVISALALRHGLLPAGINTTQIDPALAVDYCLATREQPLRHVLSNAFGFGGSNCSLLLGRATGAQ

SEQ ID NO: 28815 - protein, 95 aa, Fagopyrum rubifolium
GRLYEYANQSVKATIDRYKKACSDSAGVTSVAEANAQYYQQEAAKLRNQIRTLQNNSRNLSRHMMGEGLSSLSMKDLKNLETRLEKGISRIRAKK

SEQ ID NO: 28816 - protein, 281 aa, Glycine max
MSGLYNSNFSPVRAASPQIRTNPEVDSQYLTELLAEHQKFGPFMQALPICSRLLNQEILRVSGMLSNQGFGDFDRLRHRSPSPMASSNLMSSVTGTGLGGWNSLQQERLRGTPGMTMDWQVAPASPSSYTVKRILRLEIPVDTYPNFNFVGRLLGPRGNSLKRVEASTGCRVYIRGKGSIKDPDKEEKLRGRPGYEHLNEQLHILIEADLPANVVDLRLRQAQEIIEELLKPVEESEDYIKRQQLRELAMLNSNFREESPGPSGSVSPFNSSGMKRAKTGR

SEQ ID NO: 28817 - protein, 453 aa, Cryptococcus neoformans var. neoformans JEC21
MLPRLGAIQSTTHPFFFTTTKMLVHSSKYLLARSAAISKVLPAVAARRAGSTWTNVPAGPPDPILGVTEKFKADKSPKKINLGVGAYRDGSGKPYVLPTVRKAEKILAEAMQDKEYLPITGLSDFTKLAAELAYGKDSKPLVENRLAITQSISGTGALRIGTAFLARWFPGAKSIYLPTPTWGNHIPIAKDSGLEVKQYKYFDKKTVGLDFEGMKADIKAAPEGSIVLLHACAHNPTGIDPTEAQWKELSDIVKEKKHFPFFDMAYQGFASGDTLKDAFAVRYFVEQGHQLLLCQSFAKNMGLYGERAGAISFVCESPEEKARVDSQLKIIIRPMYSNPPVHGARLVSTILGSPELTKEWLVEVKGMADRIIEMRERLYNKLVELDTPGEWGHIKSQIGMFSFTGLKPEQVDKLAEKASIYLTRDGRISMAGLNSNNVDYFAESVSKAVKGTL

SEQ ID NO: 28818 - protein, 95 aa, Fagopyrum statice
GRLYEYANHSVKATIDRYKKACSDSAGVTSVAEANAQYYQQEAAKLRSQIRTLQNNSRNLSRHMMGEGLSSLSMKDLKNLETRLEKGISRIRAKK

SEQ ID NO: 28819 - protein, 160 aa, Clostridium difficile
MKKEMLAMILAGGQGSRLGVFTKRIAKPAVSFGGKYRIIDFVLSNCSNSGIDTVGVLTQYRPLILNSHIGMGSHWDLDRINGGVYVLQPFMNEKEGNWYNGTAHAIYQNMDFVDTYNPEYVLILSGDHIYKMDYSKMLKFHKEKGSKATIAVIEVPWDEA

SEQ ID NO: 28820 - protein, 554 aa, Clostridium acetobutylicum ATCC 824
MKSEYTIGRYLLDRLSELGIRHIFGVPGDYNLSFLDYIMEYKGIDWVGNCNELNAGYAADGYARINGIGAILTTFGVGELSAINAIAGAYAEQVPVVKITGIPTAKVRDNGLYVHHTLGDGRFDHFFEMFREVTVAEALLSEENAAQEIDRVLISCWRQKRPVLINLPIDVYDKPINKPLKPLLDYTISSNKEAACEFVTEIVPIINRAKKPVILADYGVYRYQVQHVLKNLAEKTGFPVATLSMGKGVFNEAHPQFIGVYNGDVSSPYLRQRVDEADCIISVGVKLTDSTTGGFSHGFSKRNVIHIDPFSIKAKGKKYAPITMKDALTELTSKIEHRNFEDLDIKPYKSDNQKYFAKEKPITQKRFFERIAHFIKEKDVLLAEQGTCFFGASTIQLPKDATFIGQPLWGSIGYTLPALLGSQLADQKRRNILLIGDGAFQMTAQEISTMLRLQIKPIIFLINNDGYTIERAIHGREQVYNNIQMWRYHNVPKVLGPKECSLTFKVQSETELEKALLVADKDCEHLIFIEVVMDRYDKPEPLERLSKRFANQNN

SEQ ID NO: 28821 - protein, 462 aa, Streptomyces avermitilis MA-4680
MSSRTTLDTAPETSAADAPLSHGLKQRHLSMIALGGVIGAGLFVGSGAGIAAAGPSIVIAYSVSGLLVMLVMRMLGEMSAAYPSSGSFSAHAERAIGPWAGFTAGWSFWVLLCTAVGLEGIGAAKIVTGWLPGTPEWGWVALFMVVFCVANLAAVKNFGEFEFWFAALKVGAISLFLVLGVLAMTGVLPGTDSPGASNLHDFLPNGSEGLVIGLLASVFAYGGLETVTIAAAESENPVQGVARAVRTAMWRIALFYIGSMAVIVTLVPWDSKEVVEKGPYVAALDHLGIPGAGQLMNVVVLVALLSAMNANIYGSSRIAYSLVERGQGPKALGRVSGGVPRIAVLVSCVFGFVCVVLSYWRPNDVFPWLLNMIGAVILVVWIFIAVSQLLLRRKVEREAPEKLVVRMWAYPVLTWVALAGMAAIFILMARQPDTRVQLYSTGAMTLVLAAVGYAWQRARARA

SEQ ID NO: 28822 - protein, 548 aa, Oryza sativa
MGFFRRIAGMFGISRDDADHHPHHHHHDGAAGDSAAAAEVPQDKVVAAAAAAAAAGNVQRRGFSVQVPVPVERPGPGPVLVPCPQGDGGVQGFRWYTRKLRIDEDGDVADEFLDEVVPEISINNDSTPAGRYQVKYNTKSAALAMRKQISVIDGDICHSLEYQGRLRWNCQSLLAKGLQEFDMRVCLGASQECGSVEFLVDASFLNLSVLGCLMGTNDPGTPSKATKASEPEQSPATTSGTTAPVYPEWPGFQAYSAIPPHGFFPPPVAASPQAHPYMWGAQGVHPFNHYPMLANGNVETAGTAPGASEINGKNELGRTSGPSANGITSHSESGSESESEGSDANSQNDSHSKENDVKEDGSSQNGISHTALNQNMSMAPTQTGVVIGGVAPTTNLNIGMDYWGAAGSSPVPAMHGKASSGSVRGEQWDERELKKQKRKQSNRESARRSRLRKQNIMDSLIEAPKYLFQAECEELSVRADNLRAENSSLRAELERIKKEYEALLSHNASLKEKLEGNSDSIPYMNEQNDTNGTHQKQQDSDAQPNDAP

SEQ ID NO: 28823 - protein, 94 aa, Glycine max
  misc_feature (15)..(15): Xaa can be any naturally occurring amino acid
  unsure (1)..(94): unsure at all Xaa locations
GSFQVQFAACRDLRXCSKLGSMIQTLFNWLSTSENLLVSIQEKIKWADAMSEIEKKRRKDVEEKVQELKSVIKGRLNLFSSFLLTASFPPPHYK

SEQ ID NO: 28824 - protein, 175 aa, Triticum aestivum
MAPTVMASSATSVAPFQGLKSTAGLPVSRRSNGASLGSVSNGGRIRCMQVWPIEGIKKFDTLSYLPPLSTEALLKQVDYLIRSKWVPCLEYSKVGFIFREHNASPGYYDGRYWTMWKLPMFGCTDATQVINEVEEVKKEYPDAYVRIIGFDNMRQVQCVSFIAFKPPGCEESGKV

SEQ ID NO: 28825 - protein, 365 aa, Lactobacillus sakei subsp. sakei 23K
MKTLQTSPKKDGYRMPGEFEAHKDVYLLWPERPDNWREGAKPAQATFAKVAETIAQFESVTVGVSDRQYTNARHMLADNIQVVEMSNNDSWIRDCGPTFVVNDKGDSRGVDWTFNAWGGLVDGLYFPWDKDDRVAQKVCEIEGRDRYRLDDLVLEGGSTHVDGEGTLLVTEECLLSDGRNPQLSKEQIESILKEYLNVEKIIWLKKGIYLDETNGHVDNIANFVKPGQVVLAWTDDQSDPQYAISKENYDMLINETDAKGRKLQVEKLYLPKPILITEAESQGVDTVDGTLPRLAGDRLAASYVNYYTANGGIVFPLFNDPMDEKAQEILQKLYPDRKIVGVPAREILLGGGNIHCITQQIPAGR

SEQ ID NO: 28826 - protein, 271 aa, Pisum sativum
MLNQKIFLQDDSLFNYALLTLFLIAPPTFISLAFLQAPYGKHHRPGWGPNLSPPLAWFLMESPTLWFTLYLFPFGNNSSNPKSIILITPFLIHYFNRTIIYPVRLFITMKTKKKSTLSKTPSGFPFSIALMAFVFNLLNSYVQARWVSHYKSYDDGLFFWVVFFCGVLVFSGGMGINVWSDKELLRLKGEGKGYVVPKGGFFEFVSCPNYFGEIVEWFGWALMTWSWAGLGFFAYTFANLGPRARANHQWYLEKFGEDYPKKRKAVIPYLY

SEQ ID NO: 28827 - protein, 207 aa, Arabidopsis thaliana
  misc_feature (132)..(132): Xaa can be any naturally occurring amino acid
  misc_feature (157)..(157): Xaa can be any naturally occurring amino acid
  misc_feature (178)..(178): Xaa can be any naturally occurring amino acid
  unsure (1)..(207): unsure at all Xaa locations
MYAYKPQIKVNLSRNTKTNIKTPKKNQSSLLEFEKMGISLLEFDTMGMSKSKGNTHNLPPPRPNTLRGPASRRLHPHNRHRGIRPLAGRPLHILYTLTIATAVSGCSNFASTTSATASDRLDGSDMVGIVLXTGIFQGAVSVRGIHENMGVFLRLLXKSYVREEDGAVRLRLAIILSXSVVDDDDFKVRGQEEDLKDWPSYPFQLKI

SEQ ID NO: 28828 - protein, 628 aa, Bordetella bronchiseptica
MCGVLGAWWRHHDEHEDARFAAGLRKLAHRGPDDRGSEHFAAPHGRLSLGHTRLAVIDLSAAGHQPMHADADRLAVVFNGEIYNYRELRSELRQIGASFRGDSDTEVLLAAWQHWGVAALRRFKGMFAFALYDRRQQTLTLARDAFGIKPMYYHAAPERLLFGSELPAVQALLPHPPRLNWQRAYDYLAYGQYDQPPDTFIAGIRQLPAGHLLTLDLRTGQAGEPMAWDDPASQECRPIGFQEAAEELRARFLDNVRLHLRSDVPIGAALSGGIDSSAIVCAMRWLEPDLPIQTFSFISDDTHRSEERWVDLVNQHCGATGHKIHIAPHELLDDLDDLIRVQGEPVGSTSIYAQYRVFKLAREHGVVVTLDGQGADELLGGYGGYPTERLASLLETGRLGAAARLLRQQGRGAPARLLQAAALAAGGRHLANLRHATGRQHAPAWLDAQVLRDQGVTMREPAHAWAAATPLRGRRLVNELAHALYHRGLGALLRHGDRNSMRFSVESRVPFLTQDLAEFALSLPERYLVSDSGQTKHIFRKAMRGIVPDSILDRDDKIGFATPEQQWMQATAPQMRQWLVDAADIPFLRNAEVTAQFDAMIAGATPFSWQAWRWVNFQRWMQHATVLP

SEQ ID NO: 28829 - protein, 121 aa, Arabidopsis thaliana
  misc_feature (71)..(71): Xaa can be any naturally occurring amino acid
  misc_feature (99)..(99): Xaa can be any naturally occurring amino acid
  misc_feature (114)..(114): Xaa can be any naturally occurring amino acid
  unsure (1)..(121): unsure at all Xaa locations
GQLAATPADVIEHPNAYAFVVDMPGIKGDEIKVQVENDNVLVVSGERQRENKENEGVKYVRMERRMGKFNXRKFQLPENADFGQDLLLFCHDGVLKGYXVQKLPSLPEPKKPKXNSKFKLP

SEQ ID NO: 28830 - protein, 296 aa, Triticum aestivum
ELVQKHVDDNADITLSCAPVGESRASEYGLVKFDSSGRVVQFSEKPKGDDLEAMKVDTSFLNFAIDDPAKYPYIASMGVYVFKRDVLLNLLKSRYAELHDFGSEILPRALHDHNVQAYVFTDYWEDIGTIRSFFDANMSLCEQPPKFEFYDPKTPFFTSPRYLPPTKSDKCRIKEAIILHGCFLRECKIEHSIIGVPSRLNSGSELKNAMMMGADSYETEDEISRLMSEGKVPIGVGENTKISNCIIDMNARIGRDVVISNKEGVQEADRPEEGYYIRSGIVVIQKNATIKDGTVV

SEQ ID NO: 28831 - protein, 568 aa, Bacillus cereus ATCC 14579
MSKFTVASNGALETTLRGAEVLSTPLLNKGVAFTQNEREELGLKGLLPPAVLTLEEQARRAYEQFSSQPDDLLKNVYLTALHDRNEVLFYRILTDHLREMLPIVYTPTVGVAIQRYSHEYRKPRGVYLSINDSSGIEEAFTNIGATAENIDLVVVTDGEGILGIGDWGVGGINIAIGKLAVYTAAVGIDPSRVLPVILDVGTNREELLNNPFYIGNRHPRITGEAYDEFIDTFVQAVNKQFPKALLHWEDFSSRNARKILDKYRHDVCTFNDDIQGTGAVSLAAVLSAVKASGVPLSEHRVVVFGAGTAGIGIADQVRDAMVRVGVSEEESYKRFWCIDRNGLVTDNMEDLLDFQIPYARKEAEVSEWKENDVIGLAEVVKHVKPTILIGTSTVAGAFKEEIIKEMASHVERPIILPMSNPTPLAEAKPADLIEWTEGRALVATGSPFEPVTYNGVTYVIGQSNNALIFPGLGLGTIVVRASVMTDGMFAAAAEAVASMVDTSQPGAPILPEVEELRNISEMVAIEVAKVAVAESVARVNLSDNDIKMAVQEAMWKPRVSPNKSGRKG

SEQ ID NO: 28832 - protein, 935 aa, Zea mays
EYDALLVDRFLNILQDLHGPSLREFVQECYEVSADYEGKGDTTKLGELGAKLTGLAPADAILVASSILHMLNLANLAEEVQIAHRRRNSKLKKGGFADEGSATTESDIEETLKRLVSEVGKSPEEVFEALKNQTVDLVFTAHPTQSARRSLLQKNARIRNCLTQLNAKDITDDDKQELDEALQREIQAAFRTDEIRRAQPTPQDEMRYGMSYIHETVWKGVPKFLRRVDTALKNIGINERLPYNVSLIRFSSWMGGDRDGNPRVTPEVTRDVCLLARMMAANLYIDQIEELMFELSMWRCNDDVRVRAEELHSSSGSKVTKYYIEFWKQIPPNEPYRVILGHVRDKLYNTRERARHLLASGVSEISAESSFTSIEEFLEPLELCYKSLCDCGDKAIADGSLLDLLRQVFTFGLSLVKLDIRQESERHTDVIDAITTHLGIGSYREWSEDKRQEWLLSELRGKRPLLPPDLPQTDEIADVIGAFHVLAELPPDSFGPYIISMATAPSDVLAVELLQRECGVRPAVPVVPLFERLASLQLRPASVERLFSVDWYMDRIKGKQQVMVGYSDSGKDAGRLSAAWQLYRAQEEMAQVAKRYGVKLTLFHGRGGTVGRGGGPTHLAILSQPPDTINGSIRVTVQGEVIEFCFGEEHLSFQTLQRFTAATLEHGMHPPVSPKPEWRKLMDEMAVVATEEYRSVVVKEPRFVEYFRSATPETEYGRMNIGSRPAKRRPGGGITTLRAIPWIFSWTQTRFHLPVWLGVGAAFKFAIDKDVRNFQVLKEMYNEWPFFRVTLDLLEMVFAKGDPGIAGLYDELLVAEELKPFGKQLRDKYVETQQLLLQIAGHKDILEGDPFLKQGLVLRNPYITTLNVFQAYTLKRIRDPNFKVTPQPPLSKEFADENKPAGLVKLNPASEYPPGLEDTLILTMKGIRAGMQNTG

SEQ ID NO: 28833 - protein, 836 aa, Arabidopsis thaliana
MTTKRAYKLQEFVAHSAAVNCLKIGRKSSRVLVTGGEDHKVNLWAIGKPNAILSLYGHSSGIDSVTFDASEVLVAAGAASGTIKLWDLEEAKIVRTLTGHRSNCISVDFHPFGEFFASGSLDTNLKIWDIRKKGCIHTYKGHTRGVNVLRFTPDGRWVVSGGEDNIVKVWDLTAGKLLTEFKSHEGQIQSLDFHPHEFLLATGSADRTVKFWDLETFELIGSGGPETAGVRCLSFNPDGKTVLCGLQESLKIFSWEPIRCHDGVDVGWSRLSDMNVHEGKLLGCSYNQSCVGVWVVDLSRTEPCMAGDTAQSNGHPEKRSCSGRDPVVLNDNNSKTVLGKLSVSQNVDPLLKETKSLGRLSVSQNSDPSTKETKSIGRSSTSQNSESSMKESKPLGRLSVSQNSDVSKESRTFSSTGSLPGTPHRVSSTNVSKATSGVSTAVSNAATSRRNFTKANPKANPVNKAADFAPVIVPRADPRIEQATESRAELDIIARTMPYSLQAADSRRSPSSRNNPDLPDASVLEMSESQPVEPNNIPDGGTLPGGKVGMRGATERSINDFRYKRYGRSNSRSRMGSPPRNHDENYDLVSHRSNRDPSPTESQKGGRFQSLVINRERRGRFSNFEGPVSNFSSGNMPAPNIRPSNMFKQRGNHMPVEQGIDSPSEENIVEDIMGKHNQFVSSMQSRLAKLQVVRRYWERNDVKNSIGSIEKMADNAVTADVLGIITERNEILTLDNCTSLLPLLTALLGSGMDQHLSVSLDLLLKLVRLYGSPIYSSLSAPASVGVDIEAEQRIERYSRCFVELEKVKACLPSLARGGLVAKSVLELNLAFQEVSS

SEQ ID NO: 28834 - protein, 136 aa, Desulfitobacterium hafniense DCB-2
EPTPEEIAVQMDISVERVREIMKIAQEPVSLETPIGEEEDSRLGDFIPDEDAPAPSEAASFILLKEQLEEVLETLTPREEKVLRLRFGLDDGRTRTLEEVGQEFGVTRERIRQIEAKALRKLRHPSRSKKLKDYLE

SEQ ID NO: 28835 - protein, 456 aa, Clostridium tetani E88
MENTLKGKVNNSEFYKVLGRLALPIIIQNFITAFLNMVDTVMVGKLGEVEIASVGVANQYFFFFNLLALGISSGGGIFISQFWGKRDEKNIRKILGVNVIAGVTISLLMTLIALLMPETIISLFNKDPQVIHFGAKYLKTIAISYILTAITLAYSISLRCIGEAIIPMAISGIALITNIFFNYGLIFGNFGLPALGVKGAALATVIARLVECVALLIYVYSKKGVLAASIKEMTDINMKFINKIYRTIASVLFNEACWGLAMVMYAAIYGRIGTKAIASIQICTTVQNLFMVVTLGVANASAVMIGNKIGEGKEEEGKEYAKKFTKMGIILGIILGVSMAISAPFILNLFNVSQEVMRSSLLILYITSIIMVMRVFNAVMIVGVLRGGGDAKYALISEAVTMWLVGLPLTLIAAFIIKLPVYVVAGMAGIEEFGKFILSYKRVKSNKWIKNVIYNL

SEQ ID NO: 28836 - protein, 410 aa, Desulfitobacterium hafniense DCB-2
MANTSRLKKLVLYRSTLPGESYLQNNFLEGVGVGMKAIVYEGIRDVKVKNVGDPGIQKPDDIIVKVTSTAICGSDLHLIHGMVPGMPEGFVLGHETMGIVEEVGGDVYNIKKGDRVIVPFPIACGHCWYCEHDLWSQCDNANPEAEVGAYFGYSNTFGGYDGGQAEYLRVPYANVGPKVVPEELTDEQVLFLTDILPTSYWGVEIGGVKKDDTVVVLGCGPVGLLTIKWAIFQGAKRVIAVDHISYRLDHAYRYYGVEVINFEDHDNTGEYIKEITHGGADVVIDCVGMDGKASTLEKIETLLKLQGGSKSAIEIATQAVRKGGTVALVGVYGSKYNLFPLGDFFSRNITLKMGQCPAHSYVEPIMELIKTGRFDATDIITHRLSLDKGEHAYEVFDEKKDNCIKVVLKP

SEQ ID NO: 28837 - protein, 485 aa, Moorella thermoacetica ATCC 39073
MSQKQPAKIVMVSNRGSYNLQATRDGIQVVPAISGLVSAVEPFLREKGGVWVAWGGREAPQENSPGLRLPVPEGNPAYTFREVPLTADEINLYYHGFTNSALWPLCHYFLEKCRYEVREWSAYVDVNAKFAAATLEEAGERDTVWVNDYHLALVPAHLRHRRPQLKQFFFWHIPFPHHDLLATLPWATHILRGLLGTDVLGFHLQAYVDNFLQAVAHMLGARVDFEAGIVFWEQRRIHVGAWPMGIDYQAFQRQAASPATMARAQKLREQIGVERLALSVERLDYTKGILERLLAWERLLEEAPEWRGRAALIQVAVPSRTAVPAYRQLKEQVEATVGRINGRFSDGNYQPVYYFWRGLPRRELVAYYLAADVMLVTPLRDGLNLVAKEYVASRRDQTGVLVLSRFAGAAQELKGAVLVNPYDIDGMAMIFNTALGMGRAEQSKRLQLLQERVRRHDVHWWMNCFHQAMAVREGETGDVSGSAGS

SEQ ID NO: 28838 - protein, 131 aa, Arabidopsis thaliana
MAFSKSLVFVLLPALLISSAVAQSPAPAPSNVGGRRISPAPSPKKMTAPAPAPEVSPSPSPAAALTPESSASPPSPPLADSPTADSPALSPSAISDSPTEAPGPAQGGAVSNKFASFGSVAVMLTAAVLVI

SEQ ID NO: 28839 - protein, 326 aa, Cercophora areolata
PDNFVFGQSGAGNNWAKGHYTEGAELVDQVLDVVRREAEGCDCLQGFQITHSLGGGTGAGMGTLLISKIREEFPDRMMATFSVVPSPKVSDTVVEPYNATLSVHQLVENSDETFCIDNEALYDICMRTLKLSNPSYGDLNHLVSAVMSGVTVSLRFPGQLNSDLRKLAVNMVPFPRLHFFMVGFAPLTSRGAHSFRAVSVPELTQQMFDPKNMMAASDFRNGRYLTCSAIFRGKVSMKEVEDQMRNVQNKNSSYFVEWIPNNVQTALCSIPPRGLKMSSTFVGNSTAIQELFKRIGEQFTAMFRRKAFLHWYTGEGMDEMEFTEAE

SEQ ID NO: 28840 - protein, 483 aa, Borrelia burgdorferi B31
MSNYVEVIKVEKKFFSGFLLSFLALSIGFFIGMHYLASNRSNIVFAEEKDNTVRALQDSFREVSKKILPSSVEVHATGVIKQSFPIPFFFFDMPEFDSERKSNWAGSGVIIGRDSQKKSLFYVVTNSHVVDKATELEVVSYDKKKHKAKLIGKDEKKDIALISFESDDATIKVADLGDSDKLEIGDWVMAVGSPFQFSFTVTAGIVSGLQRSANPNLQSRNLFIQTDAAINRGNSGGPLVNIKGEVIGINAWIASNSGGNIGLGFAIPVNNIKSTVDFFLKGKKIESAWLGISFYPLKTRDSEVLKSLGVESNDVSAAIIASLYPGSPAVKSGLRAGDIIMKVNGVSMSVFQDVTSYISDFYAGEKVNVEILRGNVKKNIEIVLAVRPKDKELSSSKMLPGFVVYPLVEDIKAQLNLRNWIKGVVVDYIDKNLASNIKMKSGDVILSVNSKSVSNLREFYDALEVGKNTYKILRGNDSFKITF

SEQ ID NO: 28841 - protein, 318 aa, Cercophora sparsa
GQSGAGNNWAKGHYTEGAELVDQVLDVVRREAEGCDCLQGFQITHSLGGGTGAGMGTLLISKIREEFPDRMMATFSVVPSPKVSDTVVEPYNATLSVHQLVENSDETFCIDNEALYDICMRTLKLSNPSYGDLNHLVSAVMSGVTVSLRFPGQLNSDLRKLAVNMVPFPRLHFFMVGFAPLTSRGAHSFRAVSVPELTQQMFDPKNMMAASDFRNGRYLTCSAIFRGKVSMKEVEDQMRNVQNKNSSYFVEWIPNNVQTALCSIPPRGLKMSSTFVGNSTAIQELFKRIGEQFTAMFRRKAFLHWYTGEGMDEMEFTE

SEQ ID NO: 28842 - protein, 95 aa, Fagopyrum sp. C97106
GRLYEYANHSVKATIDRYKKACSDSAGVTSVAEANAQYYQQEAAKLRNQIRTLQNNSRNLSRHMMGEGLSSLSMKDLKNLEARLEKGISRIRAKK

SEQ ID NO: 28843 - protein, 805 aa, Beta vulgaris
MASRLTRVPSLKERLDETLTAQRNEIISFLSKIASHGKGILQPHEVLSEFEAVADKHKLADGPFGEVLRHTQETIVLPPWITLAVRPRPGIWEYIRVNVDALAVEELTPSQFLHVKEELVDGSTNGNFVLELDFEPFTASFPRPTLSKSIGNGVEFLNRHLSAKMFHDKESMRPLLDFLRMHHYKGKTIMLNDRIQNLDSLQAVLRKAEEFLTTIPADTPYSEFDHKFQEIGLERGWGDNAERVMDMIQLLLDLLEAPDSCTLEKFLGRIPMVFNVVILTPHGYFAQANVLGYPDTGGQVVYILDQVRALEHEMLLRIKQQGLDIIPRILIVSRLLPDAVGTTCGQRLEKVFGTEHSHILRVPFRTEKGIVRRWISRFEVWPYLETYTEDVANEIAGELQAKPDLIIGNYSDGNIVASLLAHKLGVTQCTIAHALEKTKYPNSDIYWKSFEEKYHFSCQFTADLIAMNHTDFIITSTFQEIAGNKDTVGQYESHMAFTLPGLYRVVHGIDVFDPKFNIVSPGADLSIYFNYTEEKKRLTALHPEIEELLFSETQNEEHICVLKDRKKPIIFSMARLDRVKNMTGLVEWYGKNKKLRELVNLVVVAGDRRKESKDTEEKEEMKKMYSLIEEYNLNGQFRWISAQMNRVRNGELYRYIADTRGAFVQPAYYEAFGLTVVEAMTCGLPTFATCHGGPAEIIVHGKSGFHIDPYHGDKAADLLVDFFEKSTADPSYWENISKGGLQRIEEKYTWKIYSDRLLTLAGVYGFWKYVSNLDRREARRYLEMFYALKYKKLAESVPLAIEDAN

SEQ ID NO: 28844 - protein, 599 aa, Haemophilus influenzae R2846
MNLDLHFVHRIQQQAKTRANMTALRYKEHGLWRDISWKNFQEQLNQLSRALLTHNIDVQDKIAIFAHNMERWTIADIATLQIRAITVPIYSTNTAQQAEFILNHADVKILFVGDQEQYDQALEIAHHYPKLQKIVAMKSTIQLQQDPLSCTWESFIETGSNAQQDELTQRLNQKQLSDLFTIIYTSGTTGEPKGVMLDYANLAHQLETHDLSLNVTDQDISLSFLPFSHIFERAWAAYILHRGAILCYLEDTNQVRSALTEIRPTLMCAVPRFYEKIYAAVLDKVQKAPKLRQIMFHWTISVGQKHFDLRANNKAIPFLLKKQFALADKLVLSKLRQLLGGRIKMMPCGGAKLEPAIGLFFHAIGINIKLGYGMTETTATVSCWHDFQFNPNSIGTLMPKAEVKIGENNEILVRGKMVMKGYYKKPEETAQAFTKDGFLKTGDAGEFDEQGNLFITDRIKELMKTSNGKYIAPQYIESKIGKDKFIEQIAIIADAKKYVSALIVPCFDSLEEYAKQINIKYHDRLELLKNSDILKMFEQRINAVQKELAHFEQVKKFTLLSQAFSIKLGEITPTLKLRRKVILERYRKQIEAMYHSQEA

SEQ ID NO: 28845 - protein, 325 aa, Cercophora sulphurella
DNFVFGQSGAGNNWAKGHYTEGAELVDQVLDVVRREAEGCDCLQGFQITHSLGGGTGAGMGTLLISKIREEFPDRMMATFSVVPSPKVSDTVVEPYNATLSVHQLVENSDETFCIDNEALYDICIRTLKLSNPSYGDLNHLVSAVMSGVTVSLRFPGQLNSDLRKLAVNMVPFPRLHFFMVGFAPLTSRGAYSFRAVSVPELTQQMFDPKNMMAASDFRNGRYLTCSAIFRGKVSMKEVEDQMRNVQNKNSSYFVEWIPNNVQTALCSIPPRGLKMSSTFVGNSTAIQELFKRIGEQFTAMFRRKAFLHWYTGEGMDEMEFTEAE

SEQ ID NO: 28846 - protein, 95 aa, Fagopyrum sp. C97107
GRLYEYANHSVKATIDRYKKACSDSAGVTSVAEANAQYYQQEAAKLRNQIRTLQNNSRNLSRHMMGEGLSSLSMKDLKNLETRLEKGISRIRAKK

SEQ ID NO: 28847 - protein, 327 aa, Lasiosphaeria glabrata
RPDNFVFGQSGAGNNWAKGHYTEGAELVDQVLDVVRREAEGCDCLQGFQITHSLGGGTGAGMGTLLISKIREEFPDRMMATFSVVPSPKVSDTVVEPYNATLSVHQLVENSDETFCIDNEALYDICMRTLKLSNPSYGDLNYLVSAVMSGVTVSLRFPGQLNSDLRKLAVNMVPFPRLHFFMVGFAPLTSRGAHSFRAVSVPELTQQMFDPKNMMAASDFRNGRYLTCSAIFRGKVSMKEVEDQMRNVQNKNSSYFVEWIPNNVQTALCSIPPRGLKMSSTFVGNSTAIQELFKRIGEQFTAMFRRKAFLHWYTGEGMDEMEFTEAE

SEQ ID NO: 28848 - protein, 494 aa, Streptomyces avermitilis MA-4680
MTSQPTLSKAENGPDRPGEPGGGLQAGLKNRHLSMIAIGGVIGAGLFVGSSTGIATAGPGILLSYALVGTLVVLVMRMLGEMSAANPTSGSFSAHADRALGRWAGFSIGWLYWFFWVVVLAVEATAGAKILEGWMPGVPQWGWALIVMVVLTATNLVSVGSYGEFEFWFAGIKVVAIGAFIVVGGLAIFGVLPGVDAPKAGLGNLTDSGGFLPHGPGAILTGVLLVVFSFMGSEIATLAAGESEDPQRAVTKSTNSIIWRIGVFYLGSILVVVSLLPWNDPSIKDKGSYVAALDSLGIAHAGQIMNFIVLTSVLSCLNSGLYTASRMAFSLGQRGDAPKAFARTTSRGVPLAAIVVSVVFGFVAVFFNYKFPDSVFLFLVNSSGAVALFVWLVICFSQLRMRKIIQRESPEKLVVKMWLYPYLTWATAALIVFVLGYMLTDTEHDGRETVLLSLLVAAVVLVIAVVKQKLDGSRAVAAAGADEPAVAEAVADAH

SEQ ID NO: 28849 - protein, 214 aa, Zea mays
MVPMKLYGSVMSWNVTRCATALEEAGSDYEIVPINFATAEHKSPEHLVRNPFGQVPALQDGDLYLFESRAICKYAARKNKPFLLREGNLEEAAMVDVWIEVEANQYTAALNPILFQVLISPMLGGTTDQKVVDENLEKLKKVLEVYEARLTKCKYLAGDFLSLADLNHVSVTLCLFATPYASVLDAYPHVKAWWSGLMERPSVQKVAALMKPSA

SEQ ID NO: 28850 - protein, 398 aa, Borrelia burgdorferi B31
MIKKVAIIDGLRTPNFKFGGSFKGLNIIDESSKVVKALLERNKLYKVDEVIIGNVISAGLGQNIARQIALKSDLGDTVPAFSVNKVCGSGLKALELAFNSIALGDNDIVLAGGVEDLTNSPYLLPRKIRFDGLKFGNFGIEDSIQKDALIDSLNFISMGLTAENLSEKYRITREMQDEFAYNSHVKALKARELGYFEDEIYPLTVFDKKTNSSVTISSDEEIRDNLTLNKLASLNPVFKESGTVTAGNSSSLNDGACFLILASEERVKSLGLSPLAYIGGFKSVGLDPLYMGFGAYMAIEGIISKLSLNPSEIDLIEVNEAFAAQALSIEKALFKKYNITSDIINVNGGAIALGHPFAVSGSRILLTLSRSMKMKNKTKGIASVCIGGGQGISSFLYR

SEQ ID NO: 28851 - protein, 367 aa, Bacillus cereus E33L
MKKQRIVVKIGSSSLADSHEGISKEQLSDHVAALARLKEEGHEVLLITSGAVAAGFSALGYPSRPVTIKGKQAAAAVGQSLLMQAYTEEFRKYGIVTAQLLLTRSDFSRKEQYSNAYATLGELLNRSALPIINENDSISLEELTFGDNDMLSALVSGLVSADMLMIFTDVNGLYDKNPQKNEDAKKYYFLPEVTEEIASLAGDAGSKLGTGGMKSKVDAAKTALSLGVSVFIGTGRGQEKFVDVLKGKGDGTYVGNAPQKEMKMNKQWIALHSVVSGQIEIDAGAATAIIQHGKSLLPAGVTNVSGFFQVGEVVEVMTQQGRVIGKGQCTYSAEELRDVKGMQSQHIQARGERHSYEVIHRDHWVSL

SEQ ID NO: 28852 - protein, 292 aa, Exiguobacterium sp. 255-15
MKQISVVGSISMDLVVESDRRPSAGETVIGSAFHTVPGGKGANQAVAIARLGGHVEMVGCIGDDANGVAIRQNFETEHVGTTHLQTIADQRTGTAHITLAEGDNSIVVVQSANLAVVYDENQLDSLLGQADMILLQLEIPLATVKQVARYGKTHGIPVVLNPAPAIVLDDELLADVTYLTPNEHECGLIFGQQQPLEHWLTQYPNKLIVTEGSRGARFYDGEAIVTVPAIKTDVVDTTGAGDTFNGALAVSLTDGATLTEAIRFANKAAGMSVRALGAQGGMPTHEQMEVEA

SEQ ID NO: 28853 - protein, 214 aa, Triticum aestivum
MKPIRLLSLSPTTLPVTVSTNFSAASSLSRQLSVTRFSSRSRFTACAKPPRTRTFATSRPLNAFRLQKSQKRTKDTMTSSATTLKGQPLDKAVLESILRRRMFYTPSFEIYGGVGGLFDYGPPGCALQAAVIDQWRKHFILEEDMLEVDCSVLTPHEVLKTSGHVDKFADWMCKDPKNGEILRADHFVEAILEARLNGDKEARGQKVEEKEEDP

SEQ ID NO: 28854 - protein, 237 aa, Paenibacillus macerans
MKKKSCFTLVTTFAFSLIFSVSALAGSVFWEPLSYFNPSTWEKADGYSNGGVFNCTWRANNVNFTNDGKLKLGLTSSAYNKFDCAEYRSTNIYGYGLYEVSMKPAKNTGIVGSFFTYTGPAHGTQWDEIDIEFLGKDTTKVQFNYYTNGVGGHEKVISLGFDASKGFHTYAFDWQPGYIKWYVDGVLKHTATANIPSTPGKIMMNLWNGTGVDDWLGSYNGANPLYAEYDWVKYTSN

SEQ ID NO: 28855 - protein, 461 aa, Burkholderia fungorum LB400
MTFLKSPPPTPEDVADEYAATISGSSLPKYRIPEASSDRRAVFDLVRDELFMDGNSRQNVATFCTTYADDEVRHLMDLSIDKNMIDKDEYPQTAEIEMRCVHMLADLWHASKAWKTTGCSTTGSSEACMLGGLALKWQWKKRREAQGKPTDKPNFVCGPVQVCWAKFARYFDVEMRQVPLRGEATGLTPEDLAEYCDENTIGVVATLGITFTCVYEPVKALAGALDALQANVGLDIPIHVDAASGGFVAPFIQPDLEWDFSVPRVKSINASGHKYGLAPLGVGWVVWRSTQDLPDELIFRVDYLGGDMPTFALNFSRPAGQIIAQYYMLLRLGREGYRRIQQECADTAQALADGLAKIDQLEMIYDGRGALPAVCYKLKHPETAGFTLFDLSDQVRMRGWQIASYELPAGREDTIVQRVLIRRGVTRDMAAMLLEDIRHAIGHLTKNPVLHSSAGPTFHHN

SEQ ID NO: 28856 - protein, 461 aa, Escherichia coli
  misc_feature (193)..(193): Xaa can be any naturally occurring amino acid
  unsure (1)..(461): unsure at all Xaa locations
MADNKPELQRGLEARHIELIALGGTIGVGLFMGAASTLKWAGPSVLLAYIIAGLFVFFIMRSMGEMLFLEPVTVAFAVYAHRYMSPFFGYLTAWSYWFMWMAVGISEITAIGVYVQFWFPEMAQWIPALIAVALVALANLAAVRLYGEIEFWFAMIKVTTIIVMIVIGLGVIFFGFGNGGQSIGFSNLTEHGXFFAGGWKGFLTALCIVVASYQGVELIGITAGEAKNPQVTLRSAVGKVLWRILIFYVGAIFVIVTIFPWNEIGSNGSPFVLTFAKIGITAAAGIINFVVLTAALSGCNSGMYSCGRMLYALAKNRQLPAAMAKVSRHGVPVAGVAVSIAILLIAHAWNYIIPNPQRVFVYVYSASVLPGMVPWFVILISQLRFRRAHKAAIASHPFRSILFPWANYVTMAFLICVLIGMYFNEDTRMSLFVGIIFMLAVTAIYKVFGLNRHGKAHKLEE

SEQ ID NO: 28857 - protein, 102 aa, Gossypium arboreum
MGISDEKVVAVIMVGGPTKGTRFRPLSLNIPKPLFPLAGQPMVHHPISACKRIPNLAQIYLVGFYEEREFAMYVSSISTELRVPVRYLREDKPHGSAGGLTL

SEQ ID NO: 28858 - protein, 492 aa, Zea mays
MLVQHRPSSAFNAPYWTTNSGAPVWNNDSSLTVGARGPILLEDYHLVEKLANFDRERIPERVVHARGASAKGFFEVTHDITHLTCADFLRAPGVQTPVIVRFSTVIHERGSPETLRDPRGFAVKFYTREGNWDLVGNNFPVFFIRDGIKFPDMVHALKPNPRTHIQDNWRILDFFSHHPESLHMFSFLFDDVGIPADYRHMDGSGVHTYTLVSRAGTVTYVKFHWRPTCGVRSLMDDEAVAVGGANHSHATKDLTDAIAAGNFPEWTLYIQTMDPEMEDRLDDLDPLDVTKTWPEDAFPLQPVGRLVLNRNIDNFFAENEQLAFCPGLIVPGIYYSDDKLLQTRIFSYSDTQRHRLGPNYLLLPANAPKCAHHNNHYDGSMNFMHRHEEVDYFPSRYDAVRNAPRYPIPTAHIAGRREKTVISKENNFKQPGERYRAMDPARQERFITRWVDALSDPRLTHEIRTIWLSNWSQADRSLGQKLASRLSAKPSM

SEQ ID NO: 28859 - protein, 253 aa, Moorella thermoacetica ATCC 39073
MSPDQLAARVQEYPELLLMCDYDGTLVPLAPRPEDAVPDPGLLKLLRQLVSRPGLHLAVISGRPLADLRDLLPIPGLLLAGLHGAQVAGPEGPVINLLPPPPGKNPWPEIFSLARQLAAGVPGLLVENKGEGVALHYRLAEPDAAAGILEEFRHALEPFLQDGLELIPGHKVLEVRRRGVNKGLAVTYFTRRWPRAFPVYLGDDRTDEDAFAALPGNGLAIGVGQRQSGYAHYFLASPAEVIEFLQLLNRSRT

SEQ ID NO: 28860 - protein, 102 aa, Gossypium bickii
MGVSDEKVVAVIMVGGPTKGTRFRPLSLNIPKPLFPLAGQPMVHHPISACKRIPNLAQIYLVGFYEEREFAMYVSSISTELRVPVRYLREDKPHGSAGGLTL

SEQ ID NO: 28861 - protein, 387 aa, Salmonella enterica subsp. enterica serovar Typhi Ty2
MEQVVIVDAIRTPMGRSKGGAFRNVRAEDLSAHLMRSLLARNPSLTAATLDDIYWGCVQQTLEQGFNIARNAALLAEIPHSVPAVTVNRLCGSSMQALHDAARMIMTGDAQVCLVGGVEHMGHVPMSHGVDFHPGLSRNVAKAAGMMGLTAEMLSRLHGISREMQDQFAARSHARAWAATQSGAFKTEIIPTGGHDADGVLKQFNYDEVIRPETTVEALSTLRPAFDPVSGTVTAGTSSALSDGAAAMLVMSESRARELGLKPRARIRSMAVVGCDPSIMGYGPVPASKLALKKAGLSASDIDVFEMNEAFAAQILPCIKDLGLMEQIDEKINLNGGAIALGHPLGCSGARISTTLINLMERKDAQFGLATMCIGLGQGIATVFERV

SEQ ID NO: 28862 - protein, 510 aa, Triticum aestivum
  misc_feature (168)..(168): Xaa can be any naturally occurring amino acid
  unsure (1)..(510): unsure at all Xaa locations
MTLSGSGDGQSGSVRAHFVLVPMMAQGHTIPMTDMARLLAEHGAQVSFITTPVNAARLEGFAADVKAAGLAVQLVELHFPAAEFGLPDGCENLDMIQSKNLFLNFMKACAALQEPLMAYLLEQQRLPPSCIISDMVHWWTGDIARELGIPRLTFSGFCGFSSLVRYIXFHNNVLQHVTDENELITITGFPTPLELTKAKCPGNFCIPGMEQIRKKFLEEELKSDGEVINSFQELETLYIESLEQTTKKKVWAVGPMCLCHRDNNTMAARGNKASMDEAQCLQWLDSMKPGSVVFVSFGSLACTTPQQLVELGLGLETSRKPFIWVIKAGAKLPEVEEWLADEFEERVKNRGMVIRGWAPQLMILQHQAIGGFVTHCGWNSTIEGICAGVPMITWPHFGEQFLNEELLVDVLKIGMEVGVKGVTQWGSENQEVMVTRDEVQKAVNTLMDEGVAAEEMRVRAKDCAIKARRAFDEGGSSYDNIRLLIQEMEIKTNACRSVVDTDGNKLSFLV

SEQ ID NO: 28863 - protein, 189 aa, Cryptococcus neoformans var. neoformans JEC21
MAGLMGKYAAFLTRRPVLGNMISSAVLFGTGDVIAQQLIEKKGADHDLPRTARIVTWGGILFAPTVNLWFRTLERIPIRSRWPATFARVGLDQFGFAPVILSGFFTAMTFMEGKDFNAAKVKWHESFFPTLQANWMLFIPFQILNMLVPLQYRLLAVNAVNIPWNAFLSLQNAKGRKAEEDPVAISKKE

SEQ ID NO: 28864 - protein, 325 aa, Listeria monocytogenes str. 4b H7858
MNLNKHSERKFDLITVGRACIDLNAVEYNRPMEETMTFSKYVGGSPANIAIGTAKLGLKVGFIGKISADQHGRFIEKYMRDLNINTDGMVKDTEGRKVGLAFTEIKSPDECSILMYRENVADLYLTPEEISEDYIKEARVLLISGTALAQSPSREAVLKAVSLARKNDVAVAFELDYRPYTWTNTEETAVYYSLVAEQADVIIGTRDEFDMMENQVGGKNEATKAHLFQHQAEIVVIKHGVEGSFAYTKAGETFQAKAYKTKVLKTFGAGDSYASAFLYGLFSGESIETALKYGSAAASIVVSKHSSSDAMPTADEIKALIAQAE

SEQ ID NO: 28865 - protein, 367 aa, Bacillus cereus ATCC 14579
MKKQRVVVKIGSSSLADSHGGISTEQLSDHVAALARLKEDGHEVVLITSGAVAAGFSALGYPSRPVTIKGKQAAAAVGQSLLMQAYTEEFRKYGIVTAQLLLTRSDFSRKEQYSNAYATLGELLNRSALPIINENDSISLEELTFGDNDMLSALVSGLVSADMLMIFTDVNGLYDKNPQKNADAKKYYFLPEVTEEISSLAGDAGSKLGTGGMKSKIDAAKTALSLGVSVFIGTGRGQEKFVNVLKGKGDGTYVGNAPQKEMKMNKQWIALHSLVSGQIEVDAGAATAIIQHGKSLLPAGVTNVSRFFQVGEVVEVVTQQGRVIGKGQCTYSAEELIDVKGMQSQDIQVRGERHSYEVIHRDHWVSL

SEQ ID NO: 28866 - protein, 271 aa, Triticum aestivum
MSDQEAAAGAAGGDALFSRCLLALYVISPVTVFLLRFVSAPYGKLSRPGWGPAIPAALAWCAMESPTLWLPPLVSPLPLLLAAAAASGSPLAALPTALYALHYVNRTVLHPLRILRLRRAAAPVPVLVAACAFGFNLLNAYVQARSWALHAGRPASAFALARCLAGLALFAWGMRVNVAADRELLRLKEAGGGYKIPRGGWFDAVTCPNYFGEIVEWLGYCLVAWSPAAWAFFLYTCANLMPRARDHRQWYLNKFGGEYPASRKAVIPCIY

SEQ ID NO: 28867 - protein, 509 aa, Zea mays
MRPPEVAVAALLLVAAAAVAAAAAAAESAAPLPAALRLQRAVPHQGVPLEELRRRDAARHRVSRRRLLGGVAGVVDFPVEGSANPYMVGLYFTRVKLGNPAKEFFVQIDTGSDILWVTCSPCTGCPTSSGLNIQLESFNPDSSSTASRITCSDDRCTAGFQTGEAICQTSNSQSSPCGYTFTYGDGSGTSGYYVSDTMFFETAMGNEQTANSSASIVFGCSNSQSGDLTKADRAVDGIFGFGQHQLSVISQLNSLGVSPKVFSHCLKGSDNGGGILVLGEIVEPGLVYTPLVPSQPHYNLNLESIAVNGQKLPIDSSLFTTSNTQGTIVDSGTTLAYLADGAYDPFVSAIAAAVSPSVRSLVSKGSQCFITSSSVDSSFPTVTLYFMGGVAMSVKPENYLLQQASVDNSVLWCIGWQRNQGQEITILGDLVLKDKIFVYDLANMRMGWADYDCSMSVNVTTSSGKNQYVNTGQFDVNGSARRASYKSLIPAGIVTMLVHMLIFGTGSRR

SEQ ID NO: 28868 - protein, 398 aa, Bordetella bronchiseptica RB50
MFALNPHPSGRHFLQIPGPTNVPDRVLRAIDQPTIDHRGPAFGQLGLAVLAGLKHVFRTESPVLIFPASGTGAWEAALVNTLSPGDTVLMAETGHFASLWRRLAGRLGLEVDCLESDWRHPADPQAIGARLAQDTQHRIKAVCVVHNETSTGVTSDIAAVRAAIDQAGHPALLMVDTISSLGSIDYRHDEWGVDVTVAGSQKGLMLPPGLSFNAIGPRALAAAGQARLPRSYWDWREMLVANERGYFPYTPATNLLYGLHEALAMLREEGLPQVYARHRRHAHATRLAVAAWELELLCLDPAQCSPALTAVLMPGGHSADAFRQRALERFDISLGQGLGKLADRVFRIGHLGYFNDLMLCGTLAGVEMGLAAAGVPHRAGGVQAAMAFLAQTPAGQPA

SEQ ID NO: 28869 - protein, 515 aa, Citrus unshiu
MASIGSLKVPSSPSTAATSSNSNNHSRRSVVKRLAFSSSQLSGDKIFSKAVTGDRRRERRRSLCLLQAVSDSKNSPLDPEASRRVLGIILGGGAGTRLYPLTKKRAKPAVPLGANYRLIDIPVSNCLNSNISKIYVLTQFNSASLNRHLSRAYASNMGGYKNEGFVEVLAAQQSPENPNWFQGTADAVRQYLWLFEEHNVLEFLVLAGDHLYRMDYERFIQAHRETDADITVAALPMDEKLATAFGLMKIDEEGRIIEFSEKPKGEQLKAMKVDTTILGLDDARGKEMPFIASMGIYVISKDVMLSLLRDKFPGANDFGSEVIPGATSIGMRVQAYLYDGYWEDIGTIEAFYNANLGITKKPIPDFSFYDRSDPIYTQPRYLPPSKMLDADVTDSVIGEFCVIKNCKIHHSVVGLRSCISEGAIIEDTLLMGADYYETDADRRFLAAKGSVPIGIGKNSHIKRAIIDKNARIGNNVKIVNRDSVQEAARETDGYFIKSGIDTIIKDALIPSGTII

SEQ ID NO: 28870 - protein, 323 aa, Lasiosphaeria lanuginosa
FVFGQSGAGNNWAKGHYTEGAELVDQVLDVVRREAEGCDCLQGFQITHSLGGGTGAGMGTLLISKIREEFPDRMMATFSVVPSPKVSDTVVEPYNATLSVHQLVENSDETFCIDNEALYDICMRTLKLSNPSYGDLNYLVSAVMSGVTVSLRFPGQLNSDLRKLAVNMVPFPRLHFFMVGFAPLTSRGAHSFRAVSVPELTQQMFDPKNMMAASDFRNGRYLTCSAIFRGKVSMKEVEDQMRNVQNKNSSYFVEWIPNNVQTALCSIPPRGLKMSSTFVGNSTAIQELFKRIGEQFTAMFRRKAFLHWYTGEGMDQMEFTEAE

SEQ ID NO: 28871 - protein, 474 aa, Bacillus cereus ATCC 14579
MAQVSNTNNELKRTMKSRHLFMIALGGVIGTGLFNGSGFIISQAGPGGSVLAFIAGGLLMYFVMLCLGELAVAMPVSGSFQEYATKFINPATGFTIGWLYWLSWANTTGLEFTTAGITMQRWFPDIPVWVWCLIFGVTIFTINALSARSYAETEFWFSSIKVSAIIAFILLGGAAMFGFIDLKGDEPAPLLSNFVNHGGLFPNGLAAILLTMVTVNYSFQGTELVGIAAGESEDPAKTLPRSIRNIIWRTMFFFVLAIFVLVALIPWEEAGLTKSPFVAVFDNIGIPYAADIMNFVILTAVLSVANSGLYAATRMLWSLSKNEMAPAFLKKLSSRGIPLNALIMTIAISAFSLLTSVVAAETVYLWLISISGVITIIVWMSICVSQFFFRKHYLADGGKLEDLKFKTPLYPLVPILGFGLYGIILISLIFIPEQRLGIYCTVPFIIFCYTYYHFKVKKRNSTNTHSETKISETS

SEQ ID NO: 28872 - protein, 624 aa, Pseudomonas syringae pv. tomato str. DC3000
MLPQQAAAKTAVIQFGLFLIQRTLMTTPESSATSSVKIYFRLLSYVRPYVGIFLLSILGFVIFASTQPMLAGILKYFVDGLSNPEAVLFPNVPYLRELQLLQAVPLLIVLIAAWQGLGSFLGNYFLAKVSLGLVHDLRVELFNKLLVLPNRYFDTTNSGHLISRITFNVTMVTGAATDAIKVVIREGLTVVFLFIYLLMMNWKLTLVMLAILPLIAVMVSSASKKFRKQSKKIQVAMGDVTHVASETIQGYRVVRSFGGEAYEQNRFAEASDSNTRKQLRMTKTGAIYTPMLQLVIYSAMAVLMFLVLFLRGDATAGDLVAYITAAGLLPKPIRQLSEVSSTIQKGVAGAESIFEQLDVEEEVDTGTIELDRVSGHLEVKNLSFFYPQTERQVLNDISFSAAPGQMIALVGRSGSGKSTLANLIPRFYGHEMGNILLDGVEINDYRLRNLRKHIAQVNQNVTLFNDSIANNIAYGDLAGAPRADIEAAAADAYAKEFIDQLPQGFDTQVGENGVLLSGGQRQRLAIARALLKNAPLLILDEATSALDTESERHIQAALDHVMKGRTTLVIAHRLSTIEKADMILVMDAGKIVERGTHTELLAQNGYYARLHAMGLDEPAPAGAV

SEQ ID NO: 28873 - protein, 470 aa, Pseudomonas putida KT2440
MATPSKAFAIAHDPLVEADKAHYMHGYHVFDEHREQGALNIVAGEGAYIRDTHGNRFLDAVGGMWCTNIGLGREEMALAIVDQVRQLAYSNPFSDMANDVAIELCQKLAQLAPGDLNHVFLTTGGSTAVDTAYRLIQYYQNCRGKPHKKHIIARYNAYHGSTTLTMSIGNKAADRVPEFDYHHDLIHHVSNPNPYRAPDDMDEAEFLDFLVAEFEDKILSLGADNVAAFFAEPIMGSGGVIIPPEGYFQRMWQLCQTYDILFVADEVVTSFGRLGTFFASEELFGVTPDIITTAKGLTSAYLPLGACIFSERIWQVIAEPGKGRCFTHGFTYSGHPVCCTAALKNIEIIEREQLLDHVNDVGSYLEQRLQSLRDLPLVGDVRCMKLMACVEFVANKASKALFADEVNIGERIHSKAQEKGLLVRPIMHLNVMSPPLIITHAQVDEIVETLRQCIIETARELTALGLYQGR

SEQ ID NO: 28874 - protein, 322 aa, Lasiosphaeria lanuginosa
VFGQSGAGNNWAKGHYTEGAELVDQVLDVVRREAEGCDCLQGFQITHSLGGGTGAGMGTLLISKIREEFPDRMMATFSVVPSPKVSDTVVEPYNATLSVHQLVENSDETFCIDNEALYDICMRTLKLSNPSYGDLNYLVSAVMSGVTVSLRFPGQLNSDLRKLAVNMVPFPRLHFFMVGFAPLTSRGAHSFRAVSVPELTQQMFDPKNMMAASDFRNGRYLTCSAIFRGKVSMKEVEDQMRNVQNKNSSYFVEWIPNNVQTALCSIPPRGLKMSSTFVGNSTAIQELFKRIGEQFTAMFRRKAFLHWYTGEGMDKMEFTEAE

SEQ ID NO: 28875 - protein, 473 aa, Alkalilimnicola ehrlichei MLHE-1
MKQDLIIIGGGVGGLVTASVAGQLGVKTVLIDAGANLGGDCLHYGCVPSKTLIRSAEVAALTRRAGEFGLQAELGPVDLGAVMDRVRQVIDQIQVHDDPDRFRGYGVDVRFGHARFLDRDTVSVDGERLQARRFVIATGSAPAVPPVPGLAEAGFHTNETIFQLRTLPRRLAVMGGGPIGIELAQAFSRLGSQVTVVEMAAQILPRDDAEQAAELRSVLDAEGITVHTATTVERVEQSEGITRLACRNGESHWTVTADALLLAAGRKPNLDLGLEAAGVAYGPRGIRVDRRQRSSVRHIYAVGDCCGPYPFTHMAEYQAGIVIANALFRIPKKVDYRVVPWVTYTAPELATVGLTEDEARARNLKVEVLRFPFREVDRALAEGETAGQAKLIVRRGRLVGASVLGPHAGELIHEAVLAIQARLRVGTLAAAIHAYPTLAQVFRRAVNTRYTEQLYSDRTRKLVAFLQRWLPGR

SEQ ID NO: 28876 - protein, 293 aa, Oryza sativa
MAMASTLPLLLVHRSTPPTPRPTAPPLLHSRRLTLPSRLASLPATIAVVHPRKGVRLSKLHAASCCDSASAAGVTTGGGAGGGGAKGAMDWRLLLAWYLLALDKHPITTKAVTSAVLTLTGDLICQLAIDKVPKLDLKRTFVFTFLGLVLVGPTLHVWYLYLSKLVTINGASGAIARLLLDQFIFSPIFIGVFMSLLVTLEGKPSLVVPKLKQEWLSSVIANWQLWIPFQFLNFYFVPQKFQLDFPKATQTTFLYLLQFKMMLIGAKGAVCSFVTHEEQPVVSLEAKEMDKVK

SEQ ID NO: 28877 - protein, 248 aa, Methanosarcina acetivorans C2A
MTRVSLVLPAYNEVTRIEKTVNQTAETLRDITSSFEIIIAEDGSIDGTDRIAGKLAQEHNCISHLHSDSRQGRGRALNRAFKSASGDVLCYIDVDLATDMSHLKELIESISIEGYDFATGSRMMPQSNVKRPLKRGIASKGFNFLVHTVLHSKLYDHQCGFKAFKKAPLFELIDDVEDEHWFWDTELMVLAQAREFKVKEFPVIWRHGGTTKVNLKKDILEMGSQIFRLWWSLKRQPKEKTVKSCEML

SEQ ID NO: 28878 - protein, 208 aa, Zea mays
  misc_feature (84)..(84): Xaa can be any naturally occurring amino acid
  unsure (1)..(208): unsure at all Xaa locations
MGRGKIEIKRIDSATSRQVTFSKRRSGLFKKAKELAILCDAEVGLAVFSSTGRLYDFASTSMKCVIERYSEAREEHRQTMSASXLRPRQLLGQQLSGLNVGDLQNLENKLETSLRNIRLKKDQLIFYQIQELNRKGSLMHQESIELYNKVNLLHQHNTELQRKVYGQGVNNEQTSTTVRHSTRDTENLPINLELSVQRDKSETPSVGL

SEQ ID NO: 28879 - protein, 106 aa, Arabidopsis thaliana
CSTTARLGSRKWAPRFDYILTQQALVAVDSGAAINRDLISNFFSDPVHGAIEGLPHSSGPTPFDNPPVALAELPRTFWFRTPEFAVQILSQLEVERGLKKVLSSSS

SEQ ID NO: 28880 - protein, 531 aa, Burkholderia fungorum LB400
MVEGVNILANAVKVTLGPKGRNVVLERSFGGPTVTKDGVSVAKEIELKDKLQNMGAQMVKEVASKTSDNAGDGTTTATVLAQSIVREGMKYVASGMNPMDLKRGIDKAVFAAIEELRKISKPCTTNKEIAQVGAISANSDSSIGDRIAEAMDKVGKEGVITVEDGKSLQDELDVVEGMQFDRGYLSPYFINNPDKQVAVLENPFVLLHDKKVSNIRDLLPILEQVAKAGRPLLIIAEDVEGEALATLVVNNIRGILKTVAVKAPGFGDRRKAMLEDIAILTGGQVIAEETGLTLEKATLAELGQAKRIEVAKENTTIIDGAGEAANIEARVKQVRTQIEEATSDYDREKLQERVAKLAGGVAVIKVGAATEVEMKEKKARVEDALHATRAAVEEGIVAGGGVALIRARTAIAGLKGANADQDAGIKIVLRAMEEPLRQIVTNGGEEASVVVAAVAAGTGNYGYNAATGEYVDLVDAGVVDPTKVTRTALQNAASVAGLLLTTDAAVCELPKEDAPMAGGMPGGMGGMGMDM

SEQ ID NO: 28881 - protein, 646 aa, Candida albicans
MTSLQQQQQQQRVKYGPPHHIKRRPYHPILESLEFQTNQHLIQEYSLDIVNTLSQLESLTLVNPAMIDLQPEIQWFMRPFLLDFLIELHSSFKLQPTTLFLCLNIIDRYCAKRIVFKRHYQLVGCTALWIASKYEDKKSRVPTLKELTIMCRNAYDEEMFVQMEMHILSTLDWSIGHPTLEDCLQLAIDSNNLSNNTTNDIENKSVRPNRKSSISSAVTAVARFLCELSLYDKYFLSVPPSLIAITANLLSCSMLQIPHASITLKNLIEQEIINPQQKKQKKAFSSNSSRTTTASYTHQNQSDVRHSSFDEDIDLDSGDEGDDDEDYIDEFYETNNYDDTNATTFDESINKSTTINDENQPPQIHTPFLSGLDEDSILSIKKICLMLIIQLSKVTEVLSKKYENLGVIQVINNFHSNYKFIIQSIYENQELLLNTINDSTNNNEIDYKLIQSSEILLQFPKFDEYLTEDEDENVSTDDEANSQPQGYDGSGSDGNNQLFTPKSPNAFSSNSSLTLNNHPQSMVPVTPPSATSQYSLFSNKNNRTHESTSGLNSTCNTPTHISISSFAPPQPPPGSILKPKLTSINSTNSLKIKKLTSNSNSSNINIHHGHHNTKQEKRYSHISIGSNSSSKYDGFSPIKSISTNGS

SEQ ID NO: 28882 - protein, 149 aa, Candida albicans
MAEKLSEQQIAEFKEAFSLFDKDSDGKITTKELGTVMRSLGQNPSESELTDMINEVDVNSDGSIDFPEFLTMMARKMKDTDSEAEIAEAFKVFDRNGDGKISAAELRHLLTSIGEKLSDADVDQMIKEADTNNDGEIDIQEFTSLLAAK

SEQ ID NO: 28883 - protein, 734 aa, Pantoea agglomerans
MKGSIVVSGMGIYTPPVADLDEVTRFSSDQHRLINNPEYNELGIKNATVSVFNKKRTEPFGKQGWVNNASIFALRATEAAIKNSGINLAEYDMRRVSVVLGSYNSGTDSYSKMFNKVLNNEQDSVSHSELMSSMLSHCGNAIAARYNLQGKKIVVSSACSSSLTAIGIATDLLHTDKADVVICGGSDCIDLPVVAGFNSLSALNEGRCAPFSEPKGINLGEGAGILILTKNKDSVNNKWLVTGCGVSSDAYHETSPEPNGAGATQAIDAALSAAGLSRNDVDLISAHATGTGANDIPESKAYEKLFGLDVPVSVMKPFYGHTLGASGIIELISVLSLLDRGITPENNNLRELREGCSPINLHYRDYPADKIHTVLANSFGFGGSNSSVIVTKRANERPVKYTRSAIPIMKASANDGVAKTVIGTKTGVVKEECQIHLQNKRFKRDSPEIKYCIESVGDVMNGFEQVLQSNARAGVITGNSLRPQRCLESFLTSIYDGDPRYASARHFPGHIVSATCGQVSIAHKIIGHSTVLCSPTAAFEYTVDLLRNDTQDFMIACSSDDVTPVQEDLVHHVFAGADYVMAKGSAALLLSGRQQLSSSEHAPAAWVRSMLHSSWNGLVLRNDEQFHRLLERLVLDSLEEACMSFAEIEHCLVSNALMDSSIVDGVKQVLSQYHPHLVVESKKDKRLSSDFMTHIVDATEMISTGVKSHVMVIAIDLSSNVGACIISSQDSQTR

SEQ ID NO: 28884 - protein, 157 aa, Salmonella enterica
ASLGLWEICIIWGLGISLAVYLTAGISGGHLNPAVTIALWLFACFPKQKVLPYIIAQFAGAFGGALLAYVLYSSLFTEFETAHHMVRGSVESLQLASIFSTYPAAALNVWQAALVEVVITSILMGMIMALTDDGNGIPKGPLAPLLIGILVAVIGAS

SEQ ID NO: 28885 - protein, 310 aa, Glycine max
MATATNAAAAPPRQLSQKEADIQMMLAADVHLGTKNCDFQMERYIFKRRNDGIYIINLGKTWEKLQLAARVIVAIENPQDIIVQSARPYGQRAVLKFAQYTGAHAIAGRHTPGTFTNQLQTSFSEPRLLILTDPRTDHQPIKEAALGNIPTIAFCDTDSPMRYVDIGIPANNKGKHSIGCLFWLLARMVLQMRGTIRPGLKWDVMVDLFFYREPEEAKQQEEEEAPAVDYAITDFNAGAIAADGQWPGTIDQSWSDAVPQPIPAVPGVNWGAPAEAPAAAGGDWGEAVPPPQQIPVPPSGIDTVQPSGWD

SEQ ID NO: 28886 - protein, 546 aa, Salmonella enterica subsp. enterica serovar Typhi Ty2
MTPGEVRRLYFIIRTFLSYGLDELIPRMRLTLPLRLWRYSLFWMPNRHKDKLLGERLRLALQELGPVWIKFGQMLSTRRDLFPPQIADQLALLQDKVAPFDGRLAKAQIEEAMGGLPVEAWFDDFDIQPLASASIAQVHTARLKSNGKEVVIKVIRPDILPVIQADLKLIYRLARWVPRLLPDGRRLRPTEVVREYEKTLIDELNLLRESANAIQLRRNFENSPMLYIPEVYSDYCSQNMMVMERIYGIPVSDVAALEKNGTNMKLLAERGVKVFFTQVFRDSFFHADMHPGNIFVSHEHPENPQYIGIDCGIVGSLNKEDKRYLAENFIAFFNRDYRKVAELHVDSGWVPPDTNVEDFEFAIRTVCEPIFEKPLAEISFGHVLLNLFNTARRFNMEVQPQLVLLQKTLLYVEGVGRQLYPQLDLWKTAKPFLESWIKDQVGIPALTRALKEKAPFWVEKMPEIPELVYDSLRQGKYLQHSVDKIARELQVNHVRQSQSRYLLGIGATLLLSGSFLLVNRPEWGLMPGWLMVGGVVVWLVGWRKTR

SEQ ID NO: 28887 - protein, 93 aa, Lactobacillus paracasei subsp. paracasei
MLKPLGDRVIVEVVEEEEQTVGGIVLANNAKQKPQTGKVVAVGEGALTPEGKRLPMAVKVGDTVLYDKYAGSEVKYEGQDYLVLHEKDIKAIA

SEQ ID NO: 28888 - protein, 544 aa, Lactobacillus paracasei subsp. paracasei
MAKEIKFSEDARAAMLRGVDQLANTVKTTLGPKGRNVVLDKSYGSPEITNDGVTIAKSIDLEDHYENMGAKLVAEVASKTNDIAGDGTTTATVLAQSIIREGMKNVTAGANPVGIRTGIEKATKAAVDELHKISHKVNGKKEIAQVASVSSSNTEVGSLIADAMEKVGHDGVITIEESKGIDTELSVVEGMQFDRGYLSQYMVTDNDKMEADLDDPYILITDKKISNIQDILPLLQEIVQQGKALLIIADDVAGEALPTLVLNKIRGTFNVVAVKAPGFGDRRKAQLEDIATLTGGTVISSDLGLDLKDTKLEQLGRAGKVTVTKDNTTIVDGAGSKDAIAERVNIIKKQIDDTTSDFDREKLQERLAKLAGGVAVVKAGAATETELKERKYRIEDALNATRAAVEEGYVAGGGTALVDVLPAVAALKEEGDVQTGINIVLRALEEPVRQIAENAGKEGSVIVEQLKKEKQGVGYNAATDEWEDMAKSGIIDPTKVTRSALQNAASVAALMLTTEAVVADKPDPNANNNAAAGANPAAGMGGMM

SEQ ID NO: 28889 - protein, 531 aa, Citrus unshiu
MDSCCVGLRANTHVVKASKYGSKIGDNALWGERIRGSVRNDGCTKQLKKSLKAEKRDEKVKPGVAYAIMTSKHPNEVMTLAPPRLERRRVDPKNVAAIILGGGAGTKLFPLTLRAATPAVPVSGCYRLIDIPINSGINKIFVLTQFNSASLNRHIARTYFGNGTNFGDGFVEVLAATQTPGESGKNWFQGTADAVTRFTWVFEDAKNRNIENVAILCGDHLSILCGDHLYRMDYMDFIQSHVDRDADITISCAAVGESRASDYGLVKIDNMGRIAQFAEKPSGANLKAMQVDTSLLGFSPQEARKSPYVASMGVYVFKKDVLLKLLRWRYPTSNDFGSEIIPAAIMEHDVQAYIFRDYWEDIGTIKSFYEANMALTKESPAFHFYDPKTPFYTSPRFLPPTKIDNCRMKDAIISHGCFLRECTVEHSIVGERSRIDYGVELKDTVMLGADYYQTESEIASLLAEGKVPIGVGRNTKIRNCIIDKNVKIGKDVVIVNKDGVQEADRPELGFYIRSGITIIMEKATIEDGMVI

SEQ ID NO: 28890 - protein, 194 aa, Chlamydomonas sp. HS-5
MDESNATCGKRLDSIGVENTEENRRAYRDLLLSTPGLGQYISGAILFEETLYQSTKDGKTFVQVMNDQGIVPGIKVDKGLVPLVNSNGESWCMGLDGLDKRCAEYYKAGARFAKWRSVISIPAGPSIIAQRDCPTAWPATPPLPSPLAWCPSSSPRCCWTVTRTLTRLWRLPRTSGLRLSSTWPTTRSCSRVSC

SEQ ID NO: 28891 - protein, 341 aa, Cryptococcus neoformans var. neoformans JEC21
MKPIILQGHERSLNQIVFNSEGDLLFSASKDSVVNAWYTSNGERLGTYGGIKGGDGHNGSVWTVAVDSQTRFLLTGGADNAMKLWEVKTGECLYTWEFLTAVKRVAWNEDDDMFLSITEQRSGQPSVIRIFSINREDPRSQSTTPITEMRLSGSRATVAIWAPLSDYIITGHESGKIAKYDVKTGEEVQAVEDEHSALISDIQLSPDGTYFITASKDKTARLWDIETLEVMKVYTTETPVNSAVITPDRPYIILGGGQDAMNVTTTSQRAGKFESRFFHKLFEEEVGRVKGHFGPINTLSVHPQGRAYASGAEDGFVRVHWFEESYFRSRPFGDLEPEPEV

SEQ ID NO: 28892 - protein, 754 aa, Salmonella enterica subsp. enterica serovar Typhi Ty2
MTILTHTLGFPRVGLRRELKKAQESYWAGNTTREALLAVGRELRARHWEQQKQAGIDLLPVGDFAWYDHVLTTSLLLGNVPARHQNNDGSVDIDTLFRIGRGRAPTGEPAAAAEMTKWFNTNYHYIVPEFSKGQQFRLTWTQLLEEVDEALALGHKIKPVLLGPVTYLWLGKVKGEPFDRLTLLKDILPVYQHVLAELAKRGVEWVQIDEPALVLELPQAWLDAFKPAYDALAGQVKLLLTTYFEGVTPNLDTIIVLPVQGLHVDLIHGKDDVVELHQRLPVDWLLSAGLINGRNVWRADLTEKYAQINAIVGKRALWVASSCSLLHSPIDLSVETRLDTEVKSWFAFALQKCGELALLRDALNSGETAALEEWSVPIQARRHSHRVHNAAVEKRLAAITAQDSQRENPYEVRAEAQRARFKLPAWPTTTIGSFPQTTEIRGLRLDFKKGNLDANNYRTGIAEHIKQAIIEQERLGLDVLVHGEAERNDMVEYFGEHLDGFVFTQNGWVQSYGSRCVKPPVVIGDISRPAPITVEWAKYAQSLTDKPVKGMLTGPVTILCWSFPREDVTRETIAKQIALALRDEVADLEAAGIGIIQIDEPALREGLPLRRSDWDAYLEWGVEAFRINAAVAKDETQIHTHMCYCEFNDIMDSIAALDADVITIETSRSDMELLESFEAFDYPNEIGPGVYDIHSPNVPSVEWIEALLKKAAQRIPAQRLWVNPDCGLKTRGWPETRAALANMVKAAHNLRQAK

SEQ ID NO: 28893 - protein, 314 aa, Arabidopsis thaliana
MYSGTLAGSVGPYGRHVFLCYKSHETWLPRVETEGLPQRFAKLFKDRKADFAVETKLTVCGGGGESDGDVLIFPEMVRYKAIQDTDVDAFVEDVLVKGKTWTSGIQEELTGSFVFVCAHGSRDKRCGVCGPVLMEKFEQEISSRGLSDKIFVLPCSHIGGHKYAGNLIVFSPDSAGNVSGHWYGYVTPDDVPAMLDQHIAKGEIIQNLSRGQMRLRPEGEEAEKEDEHKIPNGNSVMVEEREPVEQKGFTGGCCQGANGVSCCQEQAAEPVKKEGCMKLNWLKSMGKEEVLLGAAVVSAVATVAVAYSIYRRSG

SEQ ID NO: 28894 - protein, 618 aa, Desulfovibrio desulfuricans G20
MCGIFGIISQLVPPSKRELETSCELLAHRGPDGYGYFIKGPVGFAHRRLSIIDIAQGSQPMSTQEGELTITYNGEIYNFRHIKASLVAKGYSFQTNSDTEVILAAYKEWGTECVQHLRGMFAFAIADHIRQTVFLARDPFGIKPLVYRESSLGFAFSSELPALVRLKKWPSVTVSPKAVSLFFRHQYIPAPYTIYNETQKLPPAHAMLVDFNGCIQQKWRYWTPAFHPSVTYSLQDAIKDAHNSVTESIDAHTLSDVPIGVFLSGGIDSTLVAARLAQRHSRSIPAFTIGYKESDFSELPYAQHAADKLGLKLYAQTLDEKALKFAPEILSHYGEPFGDSSVIPTWHVCKLASEHVPVCLSGDGADELFGGYQKYQIWSESTPWRQLQLAGSAIAKRKLRTAWWMLRRASRSFCDDKAFWLDHVQYYPPQGIRQLTHPDMHPYANAFAPAFDEPFLNIDKLGRFEYAQRMDLLSYLPDCLLAKVDLASMAHGLEVRPALLDKYVFQLAATLPTDVKLHPQKGGKVVLKELLLRQGFSEEFVYRPKQGFALPLRHWFISGQPANNMLCELVSSYKRELSEHLTVSDIERMLTAHSPACDYSGPLWLAFAFTCWVANTSK

SEQ ID NO: 28895 - protein, 461 aa, Burkholderia mallei ATCC 23344
MPAARAGLPDFADLVERVGPAVVNIRTTANVPADTRGALPPGLDNGDMSEFFRRFFGIPLPQGPGGQKNAPSTPDAPDTEQNRGVGSGFILSPDGYVMTNAHVVDDADTIYVTLTDKREFKAKLIGVDERTDVAIVKINASSLPTVAIGDSNRVRVGEWVVAIGSPFGLDNTVTAGIVSAKGRNTGDYLPFIQTDVAVNPGNSGGPLINMQGEVIGINSQIYSRTGGFMGISFAIPIDEAMRVAEQLKASGKVTRGRIAVAIGEVTKEVADSIGLPKAEGALVSSVEPGGPADKAGLQPGDIILKFNGRPVEAASDLPRMVGDTKPGAKATVTVWRKGQSRDLPITIAEFPADKAAKADSRQAPQQKPRSSALGLTVSDLSPEQLKTLKLRNGVQIDAVDGPASRAGLQRGDIVLRVGDVDITSAKQFVDVTSKLDPQRAVAVLVRRGENTQFIPIRPRQK

SEQ ID NO: 28896 - protein, 354 aa, Oryza sativa (japonica cultivar-group)
MQTLHSEGMIVLFVMEMLEFHENDPRRTRIANAYFSLFMALGNILGYATGAYSGWYKIFPFTVTPSCSISCANLKSAFLLDIIILVVTTCITVASVQEPQSFGSDEADHPSTEQEAFLWELFGSFRYFTLPVWMVLIVTALTWIGWFPFILFDTDWMGREIYRGSPDDPSITQSYHDGVRMGSFGLMLNSVLLGFTSIVLEKLCRKWGAGLVWGVSNILMALCFVAMLVITYVAKNMDYPPSGVPPTGIVIASLVVFTILGAPLAITYSIPYAMAASRVENLGLGQGLAMGILNLAIVIPQVIVSLGSGPWDQLFGGGNAPAFAVAAAASFIGGLVAILGLPRARIASRRRGHR

SEQ ID NO: 28897 - protein, 396 aa, Methylococcus capsulatus str. Bath
MVPILISAFTVTSSLGCGQESTFHALTNGECGLIPCRFETVALNTFVGEVAGVDRVVIPPGLSAFDCRNNRLALLGLTQDGFADAVRGAVGRFGTRRIGVFIGTSTSGMLETELAYRRRDPDSGALPADFDYGGTHNCFSAGAFVRAYFGIEGPAVVVSSACSSSAKVFGNAARMIQAGLIDAAVVGGVDSLCLTTLYGFNSLELLSPRPCRPFDARRDGISIGEAAAFALLQRTPDDAGSDALFLLGIGESSDAHHMSAPHPEGLGAKAAIGAALASAGLSPARIGYVNLHGTGTRANDAAEALAVQAVFGNAVACSSTKGSTGHTLGAAGAVEAVISLLAIRHGFMPAGVNTGILERGFELDYVRSSRHARLEAVLSNSFGFGGSNCALVFGRP

SEQ ID NO: 28898 - protein, 287 aa, Arabidopsis thaliana
METEKKVSLPRILRISVTDPYATDSSSDEEEEVDFDALSTKRRRVKKYVKEVVLDSVVSDKEKPMKKKRKKRVVTVPVVVTTATRKFRGVRQRPWGKWAAEIRDPSRRVRVWLGTFDTAEEAAIVYDNAAIQLRGPNAELNFPPPPVTENVEEASTEVKGVSDFIIGGGECLRSPVSVLESPFSGESTAVKEEFVGVSTAEIVVKKEPSFNGSDFSAPLFSDDDVFGFSTSMSESFGGDLFGDNLFADMSFGSGFGFGSGSGFSSWHVEDHFQDIGDLFGSDPVLTV

SEQ ID NO: 28899 - protein, 288 aa, Mycoplasma genitalium G37
MIDHLKRTKIIATCGPALTKSLVSLKMLDDNEYAAIKKVAYANIEAIIKSGVSVIRLNFSHGTHEEQQVRIKIVRDVAKAMNIPVSIMLDTNGPEIRIVETKKEGLKITKDSEVIINTMSKMIASDNQFAVSDASGKYNMVNDVNIGQKILVDDGKLTLVVTRVDKQHNQVICVAKNDHTVFTKKRLNLPNAQYSIPFLSEKDLKDIDFGLSQGIDYIAASFVNTVADIKQLRDYLKLKNASGVKIIAKIESNHALNNIDKIIKASDGIMVARGDLGLEIPYYQVPYW

SEQ ID NO: 28900 - protein, 98 aa, Mycoplasma genitalium G37
MIKACRFFNKRSITATQMLDSLEKNIQPTRAEVTDVYFAVDRGNDATMLSGETASGLYPLNAVAVMQKIDKQSETFFDYQYNVNYYLKNSTANKSRFW

SEQ ID NO: 28901 - protein, 412 aa, Burkholderia mallei ATCC 23344
MSRRRVVVTGLGLISPVGNNVADGWANLVAGKSGIVNITKFDATNFSTRFAGEVKGFNVEEYIPAKEARHMDTFIHYGIAAGMQAMQDSGFQVTDENAERVGVVVGSGIGGLPMIEVTQTELLNRGPRRISPFFVPASIINMISGHLSIKFGIKGPNLAIVTACTTGLHCIGEAARLIEYGDADVMIAGGAEATVSPLGIGGFAAARALSQRNDDPATASRPWDKDRDGFVLGEGAGVMVLEEYEHAKARGAKIYAEVAGYGMSGDAYHMTAPLENGDGARRCMLAALRNAGVNADQVNYLNAHGTSTPLGDLAETVAIKRAFGDHSKDIVVNSTKSMTGHLLGGAGGLESVFTVLAVHNQVSPPTINIFNQDPECDLDYCANEAREMKIDVALKNSFGFGGTNGTLVFKRA

SEQ ID NO: 28902 - protein, 217 aa, Candida albicans SC5314
MSSSSRKKTLLKVIILGDSGVGKTSLMQQFVNSKFSHQYKATIGADFLTKEITVDNNKSVTLQIWDTAGQERFQSLGVAFYRGADCCVLCFDVTNEKSLNNLTSWKDEFLVQSNVSNPQDFPFIIIGNKIDVDDSKKIPSLSKKLNNITNNQMGGLNYPVFETSAKDGVNVEAAFEVIAKMALQQEELNASNGNDVNDDYNDAINIHLDSEASACGC

SEQ ID NO: 28903 - protein, 333 aa, Aquifex aeolicus VF5
MAKIYYDEDASLDILKDKVIAILGYGSQGHAHALNLRDSGLNVIIGLHEGSRSREKAKADGFEVYTPREAAKRADIIMFLIPDTVQPEVYKNEVEPELNSSKTLAFAHGFNIHFRQIVPPKDVDVFMVAPKGPGHLVRWMYTEGKGVPALVAIHQDASGTCKDKALAYAKGIGATRAGVIETTFKEETETDLFGEQMVLCGGVTALIKAGFETLVNAGYQPEVAYFECLHELKLIVDLIYEHGISGMRYSISDTAKYGDVTRGERIYKVVKPVMEKTLEEIQKGEFAREWILENKAGRPVYYALLERDREHLVEKVGEELRKMMPWLGKKELK

SEQ ID NO: 28904 - protein, 321 aa, Lasiosphaeria ovina
FGQSGAGNNWAKGHYTEGAELVDQVLDVVRREAEGCDCLQGFQITHSLGGGTGAGMGTLLISKIREEFPDRMMATFSVVPSPKVSDTVVEPYNATLSVHQLVENSDETFCIDNEALYDICMRTLKLSNPSYGDLNYLVSAVMSGVTVSLRFPGQLNSDLRKLAVNMVPFPRLHFFMVGFAPLTSRGAHSFRAVSVPELTQQMFDPKNMMAASDFRNGRYLTCSAIFRGKVSMKEVEDQMRNVQNKNSSYFVEWIPNNVQTALCSIPPRGLKMSSTFVGNSTAIQELFKRIGEQFTAMFRRKAFLHWYTGEGMDEMEFTEAE

SEQ ID NO: 28905 - protein, 348 aa, Oryza sativa
  misc_feature (325)..(325): Xaa can be any naturally occurring amino acid
  unsure (1)..(348): unsure at all Xaa locations
MGLDVGEIGMGLDLSLDLKMFAARSAVRMAAAAAKEATGVEACIRSLEEERRKIEMFRRELPLCARLRAAVIELMKEEAGKRRKDGDDAEAKAEDGDKTKWMSTAQLWVDSRGSDADSENDRRSGSTSPASRLLGGAEESSSRAVAPPPYFRREERVVLRPAMPLLPPASHRSPPPAAAAAATAAGDDHRHVVASSFATAVPSPVPAALSLQAQAQQQQQQARKSRRCWSPELHRQFVAALQQLGGPQVATPKQIREVMKVDGLTNDEVKSHLQKYRLHNRKSPGTASASHSIVLVGDLWASQEVSCSQSGSPQGPLQLSGSGVXVSAATAGDSCCEDDDKSEGYVRK

SEQ ID NO: 28906 - protein, 395 aa, Thermococcus kodakarensis KOD1
MGKLDWIREELQELKDKGLYVTIRKLESAQGPWVVVDGKKVLNMCSNNYLGLAAHPEIRYAAIRAILDYGVGAGAVRTIAGTMELHVELEEKLAKFKKREAAILFQSGYNANLGAISALLKKGEDGVFISEELNHASIIDGMRLSGAPKVIYKHIDMEDLKKRLEENKDKKKKIIVSDGVFSMDGDLAPLPEMAELAEQYDAILYIDDAHGEGVLGDSGRGIVDHFKLHDKVDFEMGTLSKAFGVIGGYVAGPEEAIEYLRQRARPFLFSSAPNPPDVAAAIAAVEILQRSDELVRKLWDNTNFLQKGLRDLGYDLGNTKHPITPVMLYDEKLAQEFSRRLYDEYNIFAQAIVYPTVPLGTARIRLEPSAAHSKEDLQYVIDAFEDLGKKTGFLK

SEQ ID NO: 28907 - protein, 517 aa, Streptococcus thermophilus CNRZ1066
MLIRRKSDNKYKGVLYIMNKRVKIVATLGPAVEIRGGKKFGEDGYWSEKLDPDASAKNIAQLIEEGANVFRFNFSHGNHAEQGERMDVVRMAESIAGQKVGFLLDTKGPEIRTELFEGDAKEYAYKTGEQIRIATKQGLKSTRDVIALNVAGALDIFDDVEVGKQVLVDDGKLGLRVVDKDAEKREFIVEVENDGIIAKQKGVNIPYTKIPFPALAERDNADIRFGLEQGINFIAISFVRTAKDVQEVRAICEETGNGHVKLLAKIENQQGIDNIDEIIEAADGIMIARGDMGIEVPFEMVPVYQKMIITKVNAAGKIVVTATNMLETMTEKPRATRSEVSDVFNAVIDGTDATMLSGESANGKYPVESVRTMATINKNAQTLLKEYGRLNSSTFDRSSKTEVVASAVKDATNSMNIKLIVALTESGNTARLISKYRPEADILAITFDELTQKSLMLNWGVIPVVTETPSSTDDMFEVAERVALESGLVESGDNIVIVAGVPVGSGNTNTMRIRTVK

SEQ ID NO: 28908 - protein, 126 aa, Salmonella enterica
CIIWGLGISLAVYLTAGISGGHLNPAVTIALWLFACFPKQKVLPYIIAQFAGAFGGALLAYVLYSSLFTEFETAHHMVRGSVESLQLASIFSTYPAAALNVWQAALVEVVITSILMGMIMALTDDG

SEQ ID NO: 28909 - protein, 589 aa, Saccharomyces cerevisiae
MSGVSNKTVSINGWYGMPIHLLREEGDFAQFMILTINELKIAIHGYLRNTPWYNMLKDYLFVIFCYKLISNFFYLLKVYGPVRLAVRTYEHSSRRLFRWLLDSPFLRGTVEKEVTKVKQSIEDELIRSDSQLMNFPQLPSNGIPQDDVIEELNKLNDLIPHTQWKEGKVSGAVYHGGDDLIHLQTIAYEKYCVANQLHPDVFPAVRKMESEVVSMVLRMFNAPSDTGCGTTTSGGTESLLLACLSAKMYALHHRGITEPEIIAPVTAHAGFDKAAYYFGMKLRHVELDPTTYQVDLGKVKKFINKNTILLVGSAPNFPHGIADDIEGLGKIAQKYKLPLHVDSCLGSFIVSFMEKAGYKNLPLLDFRVPGVTSISCDTHKYGFAPKGSSVIMYRNSDLRMHQYYVNPAWTGGLYGSPTLAGSRPGAIVVGCWATMVNMGENGYIESCQEIVGAAMKFKKYIQENIPDLNIMGNPRYSVISFSSKTLNIHELSDRLSKKGWHFNALQKPVALHMAFTRLSAHVVDEICDILRTTVQELKSESNSKPSPDGTSALYGVAGSVKTAGVADKLIVGFLDALYKLGPGEDTATK

SEQ ID NO: 28910 - protein, 390 aa, Prochlorococcus marinus str. MIT 9313
MATLLEQLSTMTVVVADTGDLDAIRKFTPRDATTNPSLILAAAQIPAYQSLIDEALHSSRQLLGNSAAVEEVVHEALDEICVIFGKEILKIVPGRVSTEVDARLSFNTEATIAKAHKLIGLYNDAGITNDRVLIKIASTWEGIKAAEVLEKDGIHCNLTLLFGFSQAVACAEAGVTLISPFVGRILDWYKASTGRDSYAGPEDPGVISVTKIFNYFKTYDYKTEIMGASFRNLDEIIELAGCDLLTISPKLLDQLGSTEAPLKRKLDAVNPVAAESQIHVDKESFESMMRADRMAFEKLDEGIRGFSKAIETLEAQLAHRLAVLEGGAAFCHVVQEIFMLNDLDGDGCITREEWLGSDAVFDALDHDHDGRLLQEDVRSGLGAALALTTA

SEQ ID NO: 28911 - protein, 230 aa, Streptococcus thermophilus CNRZ1066
MVKLVFARHGESEWNKANLFTGWADVDLSEKGTQQAIDAGKLIKEAGIEFDKAYTSVLKRAIKTTNLALEASDQLWVPVEKSWRLNERHYGGLTGKNKAEAAEQFGDEQVHIWRRSYDVLPPKMDRDDEYSAHKDRRYASLDDSVIPDAENLKVTLERALPFWEDKIAPALKDGKNVFVGAHGNSIRALVKHIKKLSDDEIMDVEIPNFPPLVFEFDEKLNVVSEYYLGK

SEQ ID NO: 28912 - protein, 164 aa, Salmonella enterica
ASLGLWQICIIWGLGISLAVYLTAGISGGHLNPAVTIALWLFACFPKQKVLPYIIAQFAGAFGGALLAYVLYSSLFTEFETAHHMVRGSVESLQLASIFSTYPAAALNVWQAALVEVVITSILMGMIMALTDDGNGIPKGPLAPLLIGILVAVIGASTGPLTGF

SEQ ID NO: 28913 - protein, 284 aa, Burkholderia sp. 383
MAAITYRRADVDGFNVFYRESALPGAPKLLLLHGFPSASHMFRDLIPALADRFHIVAPDLPGFGQSDMPARDAFTYTFDNIANVIERFTEVIGFDRFAVYVFDYGAPTGFRLALRHPERITAIVSQNGNAYEEGLSDGWNPIRTYWHDPSAANRDALRALLARDTTIWQYTHGTPDPAAVSPDGYSLDYYYLGRPGAHEVQLDLFRDYRSNVALYPAFQEYFRTHRPPFLAVWGKNDPFFLPAGALAFRRDLPDADVRFFDTGHFALETHAAEIAEAMSAFLVR

SEQ ID NO: 28914 - protein, 272 aa, Legionella pneumophila str. Lens
MNRIDKTLEKLKANRKKMLSPYITAGDPYPELTVSLMHQLVKSGADVLELGIPFSDPMAEGPVIQRAMERALAHSIHCDDVLNMVRQFRKTDTETPVILMGYLNPIEQYGYDLFAQQAVEAGVDGTILVDLPPEEADGVSRVWQKHGLYSIYLCSPTTSAERMNFINQHANGYLYYVSLKGVTGSDALKLPELKAQYLQRKAQSKLPLMVGFGIKTPEMAAQVAEFADGVIVGAALINEIIEAYEAKKDPLQASGALLSSMRQAIDNIGSMV

SEQ ID NO: 28915 - protein, 573 aa, Neurospora crassa
MWSLLVSLALLCFGTVARAAVVTINWNVTWVWASPDGFGRPVIGINNQWPCPKLEANVGDTLIVNLHNGLGNQTTGIHWHGINQLQTPEMDGPSGVVQCPTPPGSSVQYKFVLDEPGTFWYHSHEKGQYPDGLRGPLIVQDPNDPYKGRYHSQSIPLVQNMLSPANTRFAPPFPDTILLNDKKDVKFNFVKGKTYRVRLINMSAFASAFLWIDSHPLTMIMSDSTYLQTETAYQLHASSAQRYDFLISAIDRDSGNYPILVALDINRDFRNQTLAPAFPHNQTAWLMMDENAPLTRPTNTIDVWRPADDTHFKPLDNLAMVPAYDHLVKLDFRFCLDANGYPRACLNGKPFISQKVPSLYTAATVGGNNTNPLVYGQINPVVVRKGDIVQLVINNQEAAGHPFHLHGHSFQILDRARPYAGDWPGRDVNYNPVPNRRDTVTVWSWSHAVLRFRADNPGVWLFHCHIEWHVEMGLTASFIEGPEQLRGKQFPADHLENCRVGGVPTRGNAAGNELDPLDTTGMLTISPTGYTGATWIPPPANTVSMTPGNSTSPLARRRAASRVQRRDTVFENS

SEQ ID NO: 28916 - protein, 426 aa, Debaryomyces hansenii CBS767
MSNQGTIYSIPNSKKPTNNKLPNLLIPSPVSINKSDQTYKQPRRKPPPIDFLRIHGAYSNTPDTISPNPSSGTHSGIQSATSDILENLRAHNIGNNTKQNNEQCKNNEQSKNNNDEIQKRVEDLSPDDWNRLANDNQIIELNKLGEGNGGSVSKCTLVNGSQIFALKLINADPNPNIQKQIIRELQYNRVCDSPNIVKYYGTFMVEKQLMIGISMEYMGGRSLDAIYKRVIELDPTNRINEKVLGKVAESILTGLNYLHQQRIIHRDIKPSNILLDSEGNIKLCDFGVSGEVVNSLATTFVGTQYYMAPERIMGKPYTVSCDIWSLGLTLLEVAICKFPFITDDTMVGPIELLSLILEYEPKLNDIPEQGIFWSDSFKNFIGYCLKKNSEERPSPRQMLSHPWCVSQLKIKVRMDKFVKKLWGQLD

SEQ ID NO: 28917 - protein, 877 aa, Listeria monocytogenes str. 4b H7858
MKMAKTKVHVIPHSHWDREWYFTSSRSTIYLVKHLKEVIETLEAKDDYHFYLMDAQSSLIEDYLRYCPEDKTRLEKLIAEKRLITGPWYTQTDQLVISQESIVRNLLYGTRIAREMGHSMAVGYVPDAFGQGGNMPQIYKEFGISKFLFWRGVADNRLKQTEFIWRGDDGTEMLAEQIPFGYYYGANIPENEAELKTYLDDQIGALEEKASTRNVYFPNGLDQAPVRKNLPELVAKFNELDSTREYQIASPETFFADLEKDVTNLPVIAGELTEGKHSRLHKSIFSTRADLKQANNEIENFLSNVLEPVLSISYSLGNRYPHNELAEIWKLMFENAAHDSIGGCNSDTTNRDVKHRYKLASDLATNLLDLNMRLISEKIEQKQPFQFTVFNPLPYEKSGVIKMTAYIPEDNFEIEDTQGNTLEYTILEKTDLTDYVLNQHIDLNPSKSIYLPEKVFLATMLVNVNSLPALGYDTIYFNLEKETAEQEPTQSTMTKIENEFYEIQLAANNSLTIHDKKAGRTYTDQMLFVENGDDGDSYNYSPPRKDLVISSEEAVVESLESSISSVNQTLTISFKLNVPYNLEERANGEKSNEMTIKTVISLRKNEELIRFDVQVANQVLSHRLCVTFATEIASKFSTADQLFAPIQRPVRLPEMDVWEAEEWQEAPISIEAMQSFVSLHDEAHGVAVMTEGVREYEIIGENYDTISLTLFRTFSHMGKTDLLYRPGRASGESIVATPDAQLLGEINATFALTLFESSFDEADIAKKAKEYLSNPPVYQMSDFLNGRLIYVYRDEEKTLDATYSLALPTIDGAIISAVKKAEDADAFITRFFNPYLQKEITIPEVFQGKERHLDESESNEKQTRLKHAKVQSYLFEK

SEQ ID NO: 28918 - protein, 469 aa, Bordetella bronchiseptica RB50
MASTMETDLLVLGGGPGGYTAAFRAADLGLSVVLVEQRPTLGGVCLNVGCIPSKALLHCAKALDEARAMSELGIEFSEPRIRLDKLRAHKEALVAKLCGGLGGLARQRKVQVVTGTGRFDGPHSLAVSDGSRVAFKQAVIAVGSRPVRLPFLPDDPRIMDSTGALELKEIPRRLLVIGGGVIGMELATVYAALGARVTVVELTDGLLPGCDRDLVKPLAQRVAGRYEAVLLGTRVSAAQARDDGIHVGFEGPQAPGPQVYDQVLVAAGRRPNGAAIDAERAGVRVDEGGFIRVDAQQRTNVGHIYAIGDVVGEPMLAHKAAHEGKVAAETAAGMRVANDARVIPAVAYTDPEVAWVGLTETAAQRDGIAYEKAAFPWAASGRALSLGRGEGLTKILVDPATHALLGVGMVGPQAGDLIAEAALAIEMGAEPGDIALTIHPHPTLSETLAFAAEAYEGTLTELYLTRKKS

SEQ ID NO: 28919 - protein, 495 aa, Saccharomyces uvarum
MTTDNAKAQLTSSSGGNIIVVSNRLPVTITKNSSTGQYEYAMSSGGLVTALEGLKKTYTFKWFGWPALQIPDDEKDQVRKDLLEKFNAVPIFLSDEIADLHYNGFSNSILWPLFHYHPGEINFDENAWLAYNEANQTFTNEIAKTMNHNDLIWVHDYHLMLVPEMLRVKIHEKQLQNVKVGWFLHTPFPSSEIYRILPVRQEILKGVLSCDLVGFHTYDYARHFLSSVQRVLNVNTLPNGVEYQGRFVNVGAFPIGIDVDKFTDGLKKESVQKRIQQLKETFKGCKIIVGVDRLDYIKGVPQKLHAMEVFLNEHPEWRGKVVLVQVAVPSRGDVEEYQYLRSVVNELVGRINGQFGTVEFVPIHFMHKSIPFEELISLYAVSDVCLLSSTRDGMNLVSYEYIACQEEKKGSLILSEFTGAAQSLNGAIIVNPWNTDDLSDAINEALTLPDVKKEVNWEKLYKYISKYTSAFWGENFVHELYSTSSSSTSSSATKN

SEQ ID NO: 28920 - protein, 326 aa, Lasiosphaeria ovina
PDNFVFGQSGAGNNWAKGHYTEGAELVDQVLDVVRREAEGCDCLQGFQITHSLGGGTGAGMGTLLISKIREEFPDRMMATFSVVPSPKVSDTVVEPYNATLSVHQLVENSDETFCIDNEALYDICMRTLKLSNPSYGDLNYLVSAVMSGVTVSLRFPGQLNSDLRKLAVNMVPFPRLHFFMVGFAPLTSRGAHSFRAVSVPELTQQMFDPKNMMAASDFRNGRYLTCSAIFRGKVSMKEVEDQMRNVQNKNSSYFVEWIPNNVQTALCSIPPRGLKMSSTFVGNSTAIQELFKRIGEQFTAMFRRKAFLHWYTGEGMDEMEFTEAE

SEQ ID NO: 28921 - protein, 630 aa, Borrelia burgdorferi B31
MSIAKAFFEVADQQKDKIAQMYKVCNGYAHVTYGDLKNNVLKLASFLKSINVKHQDKIFICSENRAEWTVIDFAILSLGAVDIPKGSDVTLFEAEIIFNSVLPSVVILENLNLLNMFIQIKFTVKPIFIIIENLNQEDRLKYSDFEIYTYSDCILFGDTLRKDSEIIEIASKVDSNDMATIIYTSGTTGHPKGVMLSHANLLYQVSSFSLMVDTHVGQIFMCILPIWHSFQRSFSYNIFLKGMVCLFSTIVPRAMLDDIKNVNPHYIAAVPRLWIAIRQNIYKEVSKKPFISRMIFHFFVKAAFLSDICYRVVMGLYPDNGFSLFFPIKKILGIFGLICAFPFKALGNVLIFNKINKILGNNFVVGITGGGSMPLSAVRFFNSIGIELANAYGLTETSPGVASNKHKKVIIGTCGKILPGTVAEIRDIDGNKLKKPGKGILFVKGPQVMLGYYKDKEATCKIIGSDGFLNTGDIAKLSKDNVVQIIGREKDTIVLNNGENVEPAPIEIKLEESALIEKAVVVGQDQKFLGALILPNFEEINKYLESVGQKIFDANNRRQIIANNIVLKAINDEIKKLINKANGFKPFEQILKFTLLEKPFEVGKEMSIKMDIKRSYILNFYKNEIKNLFI

SEQ ID NO: 28922 - protein, 328 aa, Lasiosphaeria ovina
FRPDNLVFGQSGAGNNWAKGHYTEGAELVDQVLDVVRREAEGCDCLQGFQITHSLGGGTGAGMGTLLISKIREEFPDRMMATFSVVPSPKVSDTVVEPYNATLSVHQLVENSDETFCIDNEALYDICMRTLKLSNPSYGDLNYLVSAVMSGVTVSLRFPGQLNSDLRKLAVNMVPFPRLHFFMVGFAPLTSRGAHSFRAVSVPELTQQMFDPKNMMAASDFRNGRYLTCSAIFRGKVSMKEVEDQMRNVQNKNSSYFVEWIPNNVQTALCSIPPRGLKMSSTFVGNSTAIQELFKRIGEQFTAMFRRKAFLHWYTGEGMDQMEFTEAE

SEQ ID NO: 28923 - protein, 536 aa, Deinococcus radiodurans
MSDENNKGVGTAVQGVGGPRDGRTAPGEQGTTLTTRQGHPVHDNQNSRTVGSRGPMTLENYQFIEKLSHFDRERIPERVVHARGVGAHGVFRATGKVGDEPVSKYTRAKLFQEDGKETPVFVRFSTVGHGTHSPETLRDPRGFAVKFYTEDANWDFVVNNLKIFFIRDALKFPDLIHSQKPSPTTNIQSQERIFDFFAGSPEATHMITLLYSPWGIPASYRFMQGSGVNTYKWVNDQGEGVLVKYHWEPVQGVRNLTQMQADEVQATNFNHATQDLRDAIERGDFPQWDLFVKIMEDGEHPELDFDPLDDTKIWPREQFPWRHVGQMTLNRNPENVFAETEQAAFGTGVLVDGLDFSDDKMLQGRTFSYSDTQRYRVGPNYLQLPINAPKKHVATNQRDGQMAYRVDTFEGQDQRVNYEPSLLSGPKEAPRRAPEHTPRVEGNLVRAAIERPNPFGQAGMQYRNFADWERDELVSNLSGALAGVDKRIQDKMLEYFTAADADYGQRVREGIQAKEAEMKGQKQEAPVYGTEASSLY

SEQ ID NO: 28924 - protein, 685 aa, Methanosarcina acetivorans C2A
MLSGRMVEIMDMLIYLAPICALIGLIFAGISYKNVQNEGAGNDLIKKITASIHGGAMVYLNRQYRAIAVFVVFLAIIIALILPNGALTAACFVFGAVLSATAGYAGMLTATIANGRTTNAATRGIGPAFRVSFASGTVMGMSVVGLGLFGLSLSFIILESVYTDLDLLTIVNIVAGFSLGASSIALFARVGGGIFTKAADVGADLVGKVEAGIPEDDPRNPAVIADNVGDNVGDIAGMGADLYESYVGSILATMLLAASTAATTFPNIPVENVILVPLIISAIGILASIVGTFFVRTNKTESSAIHMAFNMGLIAAIILTVIASYFVTSMLLGEYGLNVFFATVAGLVAGFLIGQITEHYTSYDRKPTLRVANSCQTGSATNIITGFAKGMESTLWPVVIISIAIYIAFQLSGLYGIAIAAVGMLATLGISLSVDAYGPVADNAGGIAEMSHQKEEVRQITDTLDAVGNTTAAIGKGFAIGSAALTALALFASYGIAVGLSAIDVMNPNVFIGLTIGAMLPYLFSSMTILAVGNAAGEVVVEVRRQFREIAGLMEGKADPDYGKCIAISTHSALKEMIPPGLLAVIAPLLVGLVLGPGALGGLLAGSVASGFMIAITMSNAGGAWDNAKKYIELGNFGGKGSDAHKAGVTGDTVGDPFKDTAGPAINILIKLMSIVAVVFAPLFM

SEQ ID NO: 28925 - protein, 137 aa, Streptomyces avermitilis MA-4680
MSQRTLVLLKPDAVRRGLTGEIISRIERKAGWAITALELRTLDQDTLEQHYGEHKGKPFYEPLVEFMASGPVVALVVEGERVIEGVRALAGPTDPIAAAPGSIRGDYGVIVRENLIHASDSEESAERELKIFFPGRV

SEQ ID NO: 28926 - protein, 325 aa, Lasiosphaeria rugulosa
DNFVFGQSGAGNNWAKGHYTEGAELVDQVLDVVRREAEGCDCLQGFQITHSLGGGTGAGMGTLLISKIREEFPDRMMATFSVVPSPKVSDTVVEPYNATLSVHQLVENSDETFCIDNEALYDICMRTLKLSNPSYGDLNYLVSAVMSGVTVSLRFPGQLNSDLRKLAVNMVPFPRLHFFMVGFAPLTSRGAHSFRAVSVPELTQQMFDPKNMMAASDFRNGRYLTCSAIFRGKVSMKEVEDQMRNVQNKNSSYFVEWIPNNVQTALCSIPPRGLKMSSTFVGNSTAIQELFKRIGEQFTAMFRRKAFLHWYTGEGMDEMEFTEAE

SEQ ID NO: 28927 - protein, 435 aa, Glycine max
  misc_feature (218)..(218): Xaa can be any naturally occurring amino acid
  unsure (1)..(435): unsure at all Xaa locations
METENGDTRSKKMEEYEVIEQIGRGAFGSAFLVLHKSEKKRYVLKKIRLAKQTEKFKRTAHQEMNLIAKLNNPYIVDYKDAWVEKEDHICIITGYCEGGDMAENIKKARGSFFPEEKVCKWLTQLLIAVDYFASNRVIHRDLKCSNIFLTKDNNIRLGDFGLAKRLNAEDLASSVVGTPNYMCPELLADIPYGYKSDMWSLGCCMFEIAAHQPAFRAXDMAGLINKINRSSISPLPIVYSSTLKQLIKSMLRKNPEHRPTAAELLRHPLLQPYVLRCHNASSNVLPVYPLVNPKDKARRPNKSSGGKDHKDKEAGLREDSNLEDSGKSTMSSEGSSSTDKDKSINEERSSLIVHPIRVENDTESGNRLKKSENPDQRADALESLLELCAQLLKQDKLEELAGVLRPFGKEAVSSRETAIWLAKSLISSQKFNPET

SEQ ID NO: 28928 - protein, 372 aa, Oryza sativa
MMTYGPVLLCGLCLCLSPLPTRRLLSPSPSASLTTTTVRCSKGEMAVVKCIRVHELGGPEVLRWEQVEVGEPKEGEIRIKNTAIGVNFIDVYYRQGVYSAPLPFVPGREAVGVVTAVGPGLTGRKVGDVVAYAGNPMGSYAQEQIIPASVAVPLPPSIDHNTAAAIMLKGMTAHVLLRRVYKVQSGDCVLVHAAAGGVGSLLCQWANALGATVIGTVSNEEKAAQAAEDGCHHVIIYTKEDVVTRVKEFTAGKGVNVVYDSVGKDTYKGSVECLAWRGMLVSFGQSSGRPDPIPLSDLASKSLLVTRPSLMHYTATRDELLESAGEVFANVGSGVLRIRVNHTYPLSQAARAHADLQARKTTGSILLIPDDA

SEQ ID NO: 28929 - protein, 212 aa, Arabidopsis thaliana
KALHKYDCLRANKSTSAFGLEARVPFLDKDFINTAMSLDPESKMIKPEEGRIEKWVLRRAFDDEERPYLPKHILYRQKEQFSDGVGYSWIDGLKDHAAQNVNDKMMSNAGHIFPHNTPNTKEAYYYRMIFERFFPQNSARLTVPGGATVACSTAKAVEWDASWSNNMDPSGRAAIGVHLSAYDGKNVALTIPPLKAIDNMPMMMGQGVVIQS

SEQ ID NO: 28930 - protein, 651 aa, Thermus thermophilus HB27
MKETRDLETLSVNAIRFLAIDAVEKARSGHPGMPMGMAPLAYLLFREVMRHNPLDPDWPDRDRFVLSAGHGSMLLYAVLHLTGYDLPLEELKSFRQWGSKTPGHPERGHTPGVEVTTGPLGQGISTAVGLALAERKLAAEFNRPGHVVVDHYTYVLASDGDLMEGVSGEAASLAGHWGLSKLIVFWDDNRISIDGPTDLAFTEDVLARYRAYGWQTLRVEDVNDLEALRKAIKLAKLDERPTLIAVRSHIGFGSPKQDSAKAHGEPLGPEAVEATRRNLGWPYPPFVVPEEVYRHMDMREKGRAWQEAWEKALEAYARAYPDLYQELMRRLRGELPPLPEEPPSFDKPIATRAASGRALNLLAPRLPELLGGSADLTPSNNTKAEGMEDFSRANPLGRYLHFGVREHAMGAILNGLNLHGGYRAYGGTFLVFSDYMRPAIRLAALMGVPTVFVFTHDSIALGEDGPTHQPVEHLMSLRAMPNLFVIRPADAYETFYAWLVALRRKEGPTALVLTRQAVPLLSLEKARGLLRGGYVLEDVEEPQGVLVATGSEVHLALRAQALLREKGVRVRVVSLPSFELFAAQPEAYRKEVLPPRLPVVAVEAGASLGWERYAHKVVALDRFGASAPYPEVYERLGFTPERVAEAFLSLV

SEQ ID NO: 28931 - protein, 581 aa, Hordeum vulgare
MCGILAVLGCGDESQGKRVHVLELSRRLKHRGPDWSGLHQVADNYLCHQRLAIIDPASGDQPLYNEDKSVAVAVNGEIYNHEELRERLSGHRFRTGSDCEVIAHLYEEHGESFIDMLDGVFSFVLLDARDHSFIAARDAIGVTSLYIGWGIDGSVWISSEMKGLNDDCEHFEIFPPGNLYSSKEKCFKRWYNPPWFSEVIPSVPYDPLRLRSAFEKAVIKRLMTDVPFGVLLSGGLDSSLVAAVAARHFAGTKAAKRWGTRLHSFCVGLEGSPDLKAAKEVADHLGTVHHEFNFTVQVRIDAIEDVIYHIETYDVTTIRASTLMFQMSRKIKALGVKMVISGEGADEIFGGYLYFHKAPNKEEFHQETCRKIKALHQYDCLRANKATSAWGLEVRVPFLDKEFIDEAMSIDPEWKMIRPDLGRIEKWILRKAFDDEEKPFLPKHILYRQKEQFSDGVGYSWIDGLKDHAASNVSDKMMSNAKFIYPHNTPTTKEAYYYRMIFERYFPQSSAILTVPGGPSVACSTAKAIEWDAQWSGNLDPSGRAALGVHLSAYEQDTIAVGGSNKPGPMETVVNGVAIES

SEQ ID NO: 28932 - protein, 213 aa, Exiguobacterium sp. 255-15
MNDFTAYVEGMIRPRDPLLQEMEAYAKEHHIPIIELTGSEVLLSLLTLQQPKRILELGTAIGYSAIRMARALPDARITTVERNAKRYAEAKMFIERSDVADRIDIVFADAVELAETLEQQFDAVFIDAAKGQYKKFFNGYGRLVPIGGVLYTDNLFLHGDVLETDPKTFDRRRRRLVRLVKEFTAWMMEQDQYDTTIFPLGDGVSVSRKVKSE

SEQ ID NO: 28933 - protein, 132 aa, Salmonella enterica
LGLWEICIIWGLGISLAVYLTAGISGGHLNPAVTIALWLFACFPKQKVLPYIIAQFAGAFGGALLAYVLYSSLFTEFETAHHMVRGSVESLQLASIFSTYPAAALNVWQAALVEVVITSILMGMIMALTDDG

SEQ ID NO: 28934 - protein, 154 aa, Oryza sativa
SSATHILSPVGATPLMTVDNPRTFRKTFTRILSVQYMVPDYVRVSMECRHLLSRIFVANPEQRITIPEIKNHPWFLKNLPIEMTDEYQMSVQMNDINTPSQGLEEIMAIIQEARKPGDGSKFSGQIPALGSMELDDIDTDDIDVEDNADFVCPL

SEQ ID NO: 28935 - protein, 339 aa, Prochlorococcus marinus str. MIT 9313
MHPSMVIPRFSDRPLDVVGIGNAIVDVLVQADDAFLDAHSLSKGNMALVDEAQAEALYSISGPGLETSGGSAANTLVGLAQLGGKAGFIGRVKNDQLGSIFSHDIRSVGARFETPPASDGPSTARCLILVTPDAQRTMCTYLGASVQLDPEDLDLSMVRQAKVLYLEGYLWDSPAAKKAFIAAAQVCRDSGGQVALSLSDGFCVDRHRDSFLELVDSHVDLLFANDSEITSLYKSVSFEAALEEVKGRCKVAALTRSEHGSVVLAGDQRWDIPAYKLGNVVDTTGAGDLYAGGFLHGYTQGTTLETCGQIGSICAGQVITQLGPRSQVSLPELVAKHLN

SEQ ID NO: 28936 - protein, 726 aa, Zea mays
MGEVSDDNSNMSFLKRIATSDVPLLKEYGVNGVVVALLLAVVTPVLLSMMFGKKTKQRAVRADVGGEEGFAMRNNRFSSLVEVPWEGATTMSALFEMASKKYSRRRCLGTRKLIKREFMESSDGRKFEKLHLGEYEWDTYTEAFNRACNFSSGLIKMGHDLDSHAAIFSDTRAEWIIAAQGCFRQNLTVVTIYASLGEDALVHSLNETQVSTLICDSKQLKKIPAISSKLQSLRRIIYIEDEPVEAETLNQMKHLTTLSFTEVEELGKTSHVDARLPSGSDTAVIMYTSGSTGLPKGVMITHGNMVATTAAVMTIVPNLGMNDVYLAYLPLAHVFELAGETVMLASGSAIGYGSALTMTDTSNKIKKGTKGDVSVLNPTLMISVPAILDRIRDAVFKKVGEKGGLTKKLFDFSYKRNIAAIEGSWFGSWAPERMLWDHIIYKPIRAMLGGRLRFVLCGGAPLSSDTQRFMNICLGVPVGQGYGLTETCAGAAFTEWDDTNVGRVGPPLPCCYVKLVSWEEGGYKISDSPMPRGEVVVGGHSITKGYFNNEAKTNEVYKVDERGIRWFYTGDIGQFHPDGCLEIIDRKKDIVKLQHGEYVSLGKVESALATSNYVENIMVYADPFHNYCVALVVPAHQALEKWAQNSGINYEGFAELCQNDRAIKEVQQSLSKAAKAARLEKFEVPAKIVLLPEPWTPESGLVTAALKLKREQIKAKFKDDLDKLYH

SEQ ID NO: 28937 - protein, 466 aa, Legionella pneumophila str. Lens
MSKIRINNMITRIKLFIASLLVFFIPVADAAQDLTNMPSLAPVLKNAMPAIVNVAVQGYLPNNMASGNADDDDGENSKQPSRIPEKGRKFESIGSGVIIDPKNGIIITNDHVIRNANLITITLQDGRRLKARLIGGDSETDLAVLKIDAKNLKSLVIGDSDKLEVGDYVVAIGNPFGLNSFGNSQSATFGIVSALKRSDLNIEGVENFIQTDAAINPGNSGGALVNAKGELIGINTAIISPYGGNVGIGFAIPINMAKDVAQQIIKFGSIHRGLMGIFVQHLTPELAQSMGYAEDFQGALVSQVNENSPAQLAGLKSGDVIVQINDTKITQATQVKTTISLLRAGSTAKIKILRDNKPLTLDVEVTDIKKHEQKLQSNNPFLYGLALRNFEQESPPHGNVVGVQVVGASETSAGWRAGLRPGDIIISANKTPIKDIKSLQTVAHEKKKQLLVQVLRGAGALYLLII

SEQ ID NO: 28938 - protein, 181 aa, Triticum aestivum
  misc_feature (91)..(91): Xaa can be any naturally occurring amino acid
  misc_feature (130)..(130): Xaa can be any naturally occurring amino acid
  misc_feature (132)..(132): Xaa can be any naturally occurring amino acid
  misc_feature (141)..(141): Xaa can be any naturally occurring amino acid
  unsure (1)..(181): unsure at all Xaa locations
MGVLDHLSDLCSMTDTKAALKLRKRRPMQTVNIKVKMDCEGCERRVKNAVKSIRGVTAVSVNPKMSKVTVTGFVEPSKVLARVKSTGKVAXEMWPYVPYSLTTYPYVGGAYDKKAPAGFVPRRAASQWAXPXGAPGRSGYXNMFQTNEGTSTPCAILCYDRTHLERFPTLKQAPKLTPALK

SEQ ID NO: 28939 - protein, 462 aa, Brassica napus
MDPYKYRPASSYNSPFFTTNSGAPVWNNNSSMTVGPRGPILLEDYHLVEKLANFDRERIPERVVHARGASAKGFFEVTHDISNLTCADFLRAPGVQTPVIVRFSTVIHERGSPETLRDPRGFAVKFYTREGNFDLVGNNFPVFFIRDGMKFPDMVHALKPNPKSHIQENWRVLDFFSHHPESLNMFTFLFDDIGIPQDYRHMEGSGVNTYMLINKSGKAHYVKFHWKPSCGPTRPCLLDEEAIKVGGSNHSHATKDLYDSIAAGNYPEWHLFVQVMDPAHEDKFDFDPLDVTKIWPEDVLPLQPVGRLVLNKNIDNFFNENEQIAFCPAIVVPGVHYSDDKLLQTRIFSYADSQRHRLGPNYLQLPVNAPKCAHHNNHHEGFMNFMHRDEEVNYFPSRLNPVRHADKYPTTPVFCSGNREKCMIEKENNFQQPGERYRSWDADRQERFVKRFVEALAEPRVT

SEQ ID NO: 28940 - protein, 433 aa, Ustilago maydis 521
MMLTAATIRTAVRASQAPLLGAMSLPAVRQFKSTWAHVKAGPPDPILGVTEAFKRDQDPRKINLGVGAYRDENGKPYVLPSVRQAEELVITAKGDKEYLPITGLADFTKNAAVLAYGKDSAPIKENRIAITQSISGTGALRIGGAFLQRHYPEAKTIYLPTPSWGNHTPIFRDSGLEVKQYRYYDKKTVGLDFKGMIEDIKAAPAGSIVLLHACAHNPTGVDPTVEQWKEISNVVKEKGHFPFFDMAYQGFASGDTDKDAFAVRHFVAEGHQICLSQSFAKNMGLYGERVGAFSIVCADPDERARVDSQIKIIVRPMYSNPPMHGAKIAGTILADQQLYQQWLGEVKGMADRINGMRSTLKDLLVQDFNSKLNWDHITNQIGMFAFLGISPEQVAKLVNEHHVYLTGDGRISVAGITDHNVKHLAESLHKVTS

SEQ ID NO: 28941 - protein, 110 aa, Arabidopsis thaliana
MEFLVTVAEFSLWLLLIVLFGFLSVVVFEAWRRRHSNVSVETVTTLDDPKSIKPIPCPHITDPAEKYLSLIVPAYNEELRLPAALEETMDYLQDRASRDKSFSFGVVICE

SEQ ID NO: 28942 - protein, 605 aa, Aspergillus terreus
MPSLKDWVAAGLVPMTIASSTGRLPSNCTNGPSSRRCWQDGFDIWSDYTDPKVAPPGKLVEYDLTVTQVTISPDGYERLGTVFNGQYPGPLIEADWGDTLRITVHNNLTNGNGTAVHWHGIRLFETNWIDGVPGVTQCPIPPGESQVYEFRATQYGTSWYHSHFSLQYSNGLYGPLVIHGPSSSDWDVDLGPWTLTDWYHEDAFTLNWISLAGQLAPIPVSTLLNGKGTYDCDPGLDPACTGKQEYFETTFQQGTKYKMAIVNTATLLTYTFWIDGHNFTVIEVDFVPVEPYSTNVLNVGMGQRYEIVVEANADRTQGSSFWIHAHYCDIPDVIPNNKVGIIRYDESDTSEPATPPLSEQHRDFGCSDPSLGDLVPVVKKTVGPRVNQIGPHDYLTIGEQGKIPTPWEKDPRVHLWTIKNTAMYVDWQTPSLGKLTADHDEEFPPETVPVTLDFDTGEWVYFLLTSNYSLEDVVTPRNLTPSVHPIHLHGHDFAILAQGKGPFTPDIAPQLDNPPRRDVVDVDIGGYAWIAFEVDNPGAWLLHCHLQYHASEGMALQYIEQPSKIKPLIENAGVLNDFENRCASWKRYYNAVDIPNDRPQDDSGI

SEQ ID NO: 28943 - protein, 328 aa, Lasiosphaeria rugulosa
FRPDNFVFGQSGAGNNWAKGHYTEGAELVDQVLDVVRREAEGCDCLQGFQITHSLGGGTGAGMGTLLISKIREEFPDRMMATFSVVPSPKVSDTVVEPYNATLSVHQLVENSDETFCIDNEALYDICMRTLKLSNPSYGDLNYLVSAVMSGVTVSLRFPGQLNSDLRKLAVNMVPFPRLHFFMVGFAPLTSRGAHSFRAVSVPELTQQMFDPKNMMAASDFRNGRYLTCSAIFRGKVSMKEVEDQMRNVQNKNSSYFVEWIPNNVQTALCSIPPRGLKMSSTFVGNSTAIQELFKRIGEQFTAMFRRKAFLHWYTGEGMDEMEFTEAE

SEQ ID NO: 28944 - protein, 451 aa, Oryza sativa (indica cultivar-group)
MRECISIHIGQAGIQVGNACWELYCLEHGIQADGQMPSDRTVGGGDDAFNTFFSETGAGKHVPRAVFVDLEPTVIDEVRTGLYRQFFHPEQLINGKEDAANNFARGHYTIGKEIVDLCLDRIRKLADNCTGLQGFLVFNAVGGGTGSGLGSLLLERLSVDYGKKSKLGFTVYPSPQVSTSVVEPYNSVLSTHSLLEHTDVAVLLDNEAIYDICRRSLEIERPTYTNLNRLVSQVISSLTASLRFDGALNVDVNEFQTNLVPYPRIHFMLSSYAPVISAEKAYHEQLSVAEITNSAFEPSSMMAKCDPRHGKYMACCLMYRGDVVPKDVNAAVATIKTKRTIQFVDWCPTVFKCGIIYQPSSVVPSGDLAKVQRAVFMISNSTSVVEVFSRIDHKFDLMYAKRAFVHWYVGEGMEEGEFSEAREDLAALEKDHEEVGAESDENEDGDDGDEY

SEQ ID NO: 28945 - protein, 259 aa, Bordetella pertussis Tohama I
MISLPYLQRFALSGQVALVTGSARGLGLRIAQALAGSGAHVLINGRDAHAVEAAVSDLRQQGLRASAQPFDVSDEQAMEQAFARIDAEHGRLDILVNNVGARNRKPLAETSPAEIRAMMDTNLIAGILLARLAAQRMMRQRYGRLIAITSVAGELARANDAVYPAAKQGLTGMMRALAVEFGGHGITSNAIAPGAFATETNAAIANDPQAGAAMAARNPTGRWGDPEEIAGAAVFLASPAASYVNGHVLVVDGGLSVQF

SEQ ID NO: 28946 - protein, 622 aa, Ehrlichia ruminantium str. Welgevonden
MKDLQTDKELIRTLVSKGIKQGFVTFNDINDVFSDYVLSADNIDETISLLQDSGINVLEQSDEDEASSIVESGRLKDGIDDDDVSDTSIKSWDFGQTDDPIRMYLCEMSSVELLSREGEIEIAKKIKSEKVNMLRSLVESPMVLRTFMSWRDDLVNEQIMLRDLIDLDANYRYEFPEKFSDVDDESVLDYDKDLMDEDDTDDISDDDDDDDNTSINASILEMESALLPKVVSILDAVIESAEKILELKKQHKGKLTKDIEKQYNDLHDNIWEMIYQIKLSNSAVLSITQQIYSLNKSIAAEEAKIISLAESYGIPRKEFLDAYNTNSVLEKKGTSPAWNNMIEKEETNIVSMYNKIKLLSGENSLAEFKSLVTKIQKHERAATQAKQEMIKANLRLVVSIAKKYSNRGLQFLDLVQEGNIGLMKAVDKFDYKRGYKFSTYATWWVRQAITRAIADQARTIRIPVHMIETVNKINRTLRQMLHEIGREPTLEELSARLNINVDKIRKVMKIVKDPVSLESPIGDDDSSTFGDCIEDKRAVRPEDAAVLADLREITTKVLSTLTPKEERILRMRFGIGKGGKDHTLEEVGKLFNVTRERIRQIEAKALRKLRHPSRARKLRGFF

SEQ ID NO: 28947 - protein, 328 aa, Lasiosphaeria sorbina
FRPDNFVFGQSGAGNNWAKGHYTEGAELVDQVLDVVRREAEGCDCLQGFQITHSLGGGTGAGMGTLLISKIREEFPDRMMATFSVVPSPKVSDTVVEPYNATLSVHQLVENSDETFCIDNEALYDICMRTLKLSNPSYGDLNYLVSTVMSGVTVSLRFPGQLNSDLRKLAVNMVPFPRLHFFMVGFAPLTSRGAHSFRAVSVPELTQQMFDPKNMMAASDFRNGRYLTCSAIFRGKVSMKEVEDQMRNVQNKNSSYFVEWIPNNVQTALCSIPPRGLKMSSTFVGNSTAIQELFKRIGEQFTAMFRRKAFLHWYTGEGMDEMEFTEAE

SEQ ID NO: 28948 - protein, 252 aa, Bordetella pertussis Tohama I
MRLNGKTAIVTGAGSGFGEGIAAAFAREGAKVAVADINEAGGQRVAAAINAAGGQAVFVRADVSDNAAVANLLAATLKAFDGLDIVVNNAGTTHRNRPMLEVEEDEFDRIYAINVKSIYLTAKHMVPYFRAHGGGSFINIASTAAIRPRPGLTWYNGSKGAVVTTSKSMAAELGPDNIRVNCVNPVIGATGLLADFMGVPDTPENRKRFLATIPLGRFSTPQDIANACLYLASDETAFITGACLEVDGGRCV

SEQ ID NO: 28949 - protein, 323 aa, Bordetella bronchiseptica RB50
MARANKEQLLDAYQRMLGIRLVELRLGRLFADGEVPGFIHLSVGQEAVAAAMGMVLRPDDTVASTHRGHGHALAKGIDMDDFFLELMAREEGICKGRGGSMHVANMSIGMLGANAIVGASIPIALGSALAHQVRKTDALAVAFFGDGAMAEGVLHESLNLAALWQLPLLFLCENNGWAEFSPTHKQFVAPLDKLSAAFSIPHAKVDGNDVLAVMDAAQAAVADIRAGKGPRVLECITHRWRGHYEGDPQKYRDSDEISGLDEHDPVARFEAVLDSKGVNQAQRQKVRDAVQAQVDQAVERARKGRPPAWEAARADVYTQAEAR

SEQ ID NO: 28950 - protein, 328 aa, Lasiosphaeria sorbina
FRPDNFVFGQSGAGNNWAKGHYTEGAELVDQVLDVVRREAEGCDCLQGFQITHSLGGGTGAGMGTLLISKIREEFPDRMMATFSVVPSPKVSDTVVEPYNATLSIHQLVENSDETFCIDNEALYDICMRTLKLSNPSYGDLNYLVSTVMSGVTVSLRFPGQLNSDLRKLAVNMVPFPRLHFFMVGFAPLTSRGAHSFRAVSVPELTQQMFDPKNMMAASDFRNGRYLTCSAIFRGKVSMKEVEDQMRNVQNKNSSYFVEWIPNNVQTALCSIPPRGLKMSSTFVGNSTAIQELFKRIGEQFTAMFRRKAFLHWYTGEGMDEMEFTEAE

SEQ ID NO: 28951 - protein, 137 aa, Penicillium rolfsii
QVSEYKEAFSLFDKDGDGQITTKELGTVMRSLGQNPSESELQDMINEVDADNNGTIDFPEFLTMMARKMKDTDSEEEIREAFKVFDRDNNGFISAAELRHVMTSIGEKLTDDEVDEMIREADQDGDGRIDYNEFVQL

SEQ ID NO: 28952 - protein, 150 aa, Haloarcula argentinensis
ERTFVMVKPDGVQRGLIGDIVSRFEDRGLKMVGGKFMQIDQELAEEHYGEHEDKPFFDGLVDFITSGPVFAMVWEGQDATRQVRNMMGETDPAESAPGTIRGDYGLDLGRNVIHGSDHEDEGANEREIELFFDEDELVDWDQIDSSWLYE

SEQ ID NO: 28953 - protein, 218 aa, Ehrlichia ruminantium str. Welgevonden
MRSKILNKKSQYIHDLFSVTDTELISINKSINEDISSMQLSPTEGQILQLLIKMNNVTSIVEIGTFIGFSAMCMAKVLPKNGHIYTIENNSINAQQAQNNFNEYNLSNKITIINNTAIVALNQLTSMSPFDMIFIDAKKSEYCDYLDWAEINIKKNGIIVADNTLLFGNVYADNITKKVSKNTIDNMCNFNKRLSNKNKYLTTLLPTEEGMTIALKLF

SEQ ID NO: 28954 - protein, 489 aa, Methanosarcina acetivorans C2A
MNINVNINGRENMQIPDHKTKIVCTIGPASFSEEVLRKLVLAGMNVARINFSHGDFESHGKVIRRVRKVAEELDRTVAILADLPGPKIRVGKLKKEPLMLHKGNRITLTTDETSGSEDRIPVNYKQLPESVSPGSLIYLSDGFIQLLCLEISGKDVVCEVMVGGQLYSHKGLNLPGAKIYLDSVTEHDFKILEFALNEEVDAVSISFVEKAEDIRKVRNFASTMGKPVYVVSKIERSQAVQNIEEILEETDALMVARGDLGVEIPIQEVPSVQKELIRSAKLLSIPVITATHMLASMTDNIRPTRAEATDVANAILDGTDAVMLSEETAVGNYPVETVEMMAKIAKTTENWRSRTKWGLDTMLKGITAQKMSVDEVIALQVHEALQKLPVAVVLTPTRSGATPRRLSRFKPEPWILAFTRFPKTCSSLALSYGVYPIIVKEVSENWETETTEKAKELGFAKSGELVVFTQGPASGKPGGTNMLKILTLD

SEQ ID NO: 28955 - protein, 445 aa, Bradyrhizobium sp. BTAi1
MPDAISIDVPPNDLEAFWMPMTANRRFKKTPMFFSAAEGMYYATPDGRRVLDAIAGLWCVNAGHCHPRIVEAIRAQAGKLDYASSFGVGHPLAFHFANRVVEIAPPGFRHLFLAGSGSEAVDSALKFALAYHRARGEGHRQRLIGRQRAYHGVGFGGLSVSGIGWQRAQFGALLPATSHLPHTHDLARNAFSRGQPAHGVEFADALEGLLFAVDPSTVAAVIVEPVAGAGGVLPPPQGYLQRLREICDRHGILLIFDEVVTGFGRLGAPFAAQALGVGPDLITCAKGMTSGTVPMGGVLISDRVHDGLSQGPEAVPELAHGYTYSGHPLACAAGLAALDVYRDEGLFERAARLAPIWEDALHGLRTLGPVRDIRNLGLLGAIEIDGGDGAPSERARACAEVCLERGVFIRALGDTLILSPPLVIDEGQIGQIVDAIGSGLRRLAA

SEQ ID NO: 28956 - protein, 635 aa, Arabidopsis thaliana
MEHKANMAMVFVQIVYAGMPLLSKVAISQGTNPFVFVFYRQAFAALALSPFAFFLESSKSSPLSFILLLKIFFISLCGLTLSLNLYYVAIENTTATFAAATTNAIPSITFVLALLFRLETVTLKKSHGVAKVTGSMVGMLGALVFAFVKGPSLINHYNSSTIPNGTVPSTKNSVKGSITMLAANTCWCLWIIMQRFSKVESLVFGKMSFLSIVRDVRDTVGSFSRRSFDVRVSNGTTHQRSKSHGVEAHIEDLIVIKNTRWANLPAALLRDVMKKLDESESTWPARKQVVACAGVCKTWRLMCKDIVKSPEFSGKLTFPVSLKQPGPRDGIIQCYIKRDKSNMTYHLYLSLSPAILVESGKFLLSAKRSRRATYTEYVISMDADNISRSSSTYIGKLKSNFLGTKFIVYDTAPAYNSSQILSPPNRSRSFNSKKVSPKVPSGSYNIAQVTYELNLLGTRGPRRMNCIMHSIPSLALEPGGTVPSQPEFLQRSLDESFRSIGSSKIVNHSGDFTRPKEEEGKVRPLVLKTKPPRWLQPLRCWCLNFKGRVTVASVKNFQLMSAATVQPGSGSDGGALATRPSLSPQQPEQSNHDKIILHFGKVGKDMFTMDYRYPLSAFQAFAISLSTFDTKLACE

SEQ ID NO: 28957 - protein, 175 aa, Triticum aestivum
MAPTVMASSATSVGPFQGLKSTVGLPVSRRSNGASLGSVSDGGRIRCMQVWPMEGIKKFDTLSYLPPIRTEALLKQVDYLIRSKWVPCLKFSKVGCIFREHNASPGYYDGRYWTMWKLPMFGCTDATQVINEVEEVKKEYPDAYVRIIGCDNMRQVQCVSFIAFKPPGCEESGKA

SEQ ID NO: 28958 - protein, 150 aa, Haloarcula japonica
ERTFVMVKPDGVQRGLIGDIVSRFEDRGLKMVGGKFMQIDQELAEEHYGEHADKPFFDGLVDFITSGPVFAMVWEGQDATRQVRNMMGETDPAESAPGTIRGDYGLDLGRNVIHGSDHEDEGANEREIELFFDEDELVDWDQIDSSWLYE

SEQ ID NO: 28959 - protein, 150 aa, Haloarcula quadrata
ERTFVMVKPDGVQRGLIGDIVSRFEDRGLKMVGGKFMQIDQELAEEHYGEHEDKPFFDGLVDFITSGPVFAMVWEGQDATRQVRTMMGETDPAESAPGTIRGDYGLDLGRNVIHGSDHEDEGANEREIELFFDEDELVDWDQIDSSWLYE

SEQ ID NO: 28960 - protein, 415 aa, Kluyveromyces lactis
MKVGELLESSGAGGSRSIIAYTNDKNAGFETEMDSILPSDDLKQGSLHSKNSHGNDVKIVPDEDEVITRRTVVKGHSNPRSQLLFHAVTPEIVGNGSFGVVFRTKVKETGRMLSLRRFYRIRRFKNRELEIMKLISHPNLIDLKYYFLEQSDQELYLNLIVDYMPMSLYQRLKEFISLHQPMDRYEIKIYMFQLFKSLNYLHQVVNVCHRDIKPQNILVDPDTLLLKICDLGSAKQLKPNEPNVSYICSRYYRAPELIFGATNYTTKIDIWSAGCVMAELLLGQPIFPGESKIDQLVEIIKVLGTPTREEICSMNENYSEHKFPQIRPIPLNRIFKKETQETIDLLYHIMKYDPNIRYSALQCMFNSTYFTDIVSNTGSDSNLSLIDSLPLLHFEESELQGLSSNDIYRLTGKLI

SEQ ID NO: 28961 - protein, 321 aa, Oryza sativa
MVSSALPRGEPVTHICVDLADPAAVSAALAPLTDITHVFYVAWAPHFFEEDQNREANSRMLRNVLSAVVPNCPALVHVSLQTGSKHYIGPPESIGKFTIETPFSEDMPRLDNCPNLYYDQEDALFDAVSRSRRRGAAVISWSVHRPSLVFGFSPQSAMNVVCTLCVYAAICRKEGGRKLRWPGSLGAWEGFSNASDADLVAEQHIWAAVDPAARNEAYNCSNGDVRDGVVGVRGGGEQGEPDGGGIVREEGLVAAAELDQVANWWFVDALFMDKWEFLDTMNKSKEHGFLGFRNTVKSFGTWIDKLRLYKIVPSCRIVSSL

SEQ ID NO: 28962 - protein, 449 aa, Bacillus subtilis subsp. subtilis str. 168
MKKRSFKVFTLSLQHVLAMYAGAILVPLLVGRALNVTTEQLSYLLAIDLLTCGVATLLQTLRGTYIGIGLPVMLGSSFVAVTPMIAIGSNYGIHAIYGSIIAAGVFIFLFARFFGKLTVLFPPVVTGTVVTLIGLSLVPTGVKNMAGGEKINGSANPEYGSLENLLLSVGVLVLILVLNRFLKGFARTLSVLIGIAAGTAAAAIMGKVSFSSVTEAPFFQIPKPFYFGAPAFEIGPILTMLIVGIVIIVESTGVFYAIGKICGRPLTDKDLVKGYRAEGIAILIGGLFNAFPYNTFAQNAGLLQLTKVKTRNIVVTAGCILVCLGLIPKIAALASAVPAAVLGGATVVMFGMVIASGVKMLSTADLKNQYHLLTIACSIALGIGASTAPGIFAEFPAPIRILVSDGTITGSLTAIFLNLFFSLRDKKELTAQQTELPVLEHTLALEKEV

SEQ ID NO: 28963 - protein, 289 aa, Zea mays
HASAHSHSPFPLSGSHSPPTGYPTHHTQTATPHLPRPPVHVLLLPMSPPLDLDYIGLSPAAAAAAAHDDLKGTELRLGLPGSGSPDRRVVAATATTLDLLPAKGAKRGFSDEAPTPSPGAASGKGKKVAEEEDDKKVAATPQPVAKAQVVGWPPIRSYRKNTMSTTQLKGSKEDAEAKQDQGFLYVKVSMDGAPYLRKIDLKTYKNYKDLSTALEKMFSGFSTGKDGLSEYRKDGEYVLTYEDKDGDWMLVGDVPWEMFADSCRRLRIMKGSDAIGLAPRAADKSKNRN

SEQ ID NO: 28964 - protein, 430 aa, Bacillus subtilis subsp. subtilis str. 168
MKEQHNALQLMMLGLQHMLAMYAGAILVPLIVGAAIGLNAGQLTYLIAIDLFMCGAATLLQLWRNRYFGIGLPVVLGCTFTAVGPMISIGSTYGVPAIYGAIIAAGLIVVLAAGFFGKLVRFFPPVVTGSVVMIIGISLIPTAMNNLAGGEGSKEFGSLDNVLLGFGVTAFILLLFYFFKGFIRSIAILLGLIAGTAAAYFMGKVDFSEVLEASWLHVPSLFYFGPPTFELPAVVTMLLVAIVSLVESTGVYFALADITNRRLSEKDLEKGYRAEGLAILLGGLFNAFPYTAFSQNVGIVQLSKMKSVNVIAITGIILVAIGLVPKAAALTTVIPTPVLGGAMIVMFGMVISYGIKMLSSVDLDSQGNLLIIASSVSLGLGATTVPALFSSLSGAASVLAGSGIVIGSLTAIALHAFFQTKQPNSADIKT

SEQ ID NO: 28965 - protein, 461 aa, Prochlorococcus marinus str. MIT 9313
MGSAPSFPLSSFIPSPAMSPAATQAAAAKAQPKASAKTAKPQVAKGTAKTKAKKVKATAAKAKTAAKPVSSAAKASSPKAKKAKATPPPTVSKNLDLTADQLLATAATSAPKASAETESSQAAAKATSEADAKARALANIKIGPKGVYTEDSIRVYLQEIGRIRLLRPDEEIELARKIADLLHLEELAEQFNSDHGHYPNNKEWASLVEMPNIKFRRRLMLGRRAKEKMVQSNLRLVVSIAKKYMNRGLSFQDLIQEGSLGLIRAAEKFDHEKGYKFSTYATWWIRQAITRAIADQSRTIRLPVHLYETISRIKKTTKVLSQEFGRKPTEEEIAESMEMTIEKLRFIAKSAQLPISLETPIGKEEDSRLGDFIESDTENPEQDVAKNLLREDLEGVLATLSPRERDVLRLRYGLDDGRMKTLEEIGQIFEVTRERIRQIEAKALRKLRHPNRNGVLKEYIK

SEQ ID NO: 28966 - protein, 880 aa, Cochliobolus carbonum
MSAAIDNEDLEELSISMPSQRRGAAQTSTTKAQDPAPPPPTALGTAVHETKSKDTKASQRLGQYTIVRTLGEGSFGKVKLATHQVSGQKVALKIINRKRLVTRDMAGRIEREIQYLQLLRHPHIIKLYTVITTPTEIIMVLEYAGGELFDYIVNHGKLQEAQARKFFQQIVCAVEYCHRHKIVHRDLKPENLLLDHDSNVKIADFGLSNIMTDGNFLKTSCGSPNYAAPEVISGKLYAGPEVDVWSCGVILYVLLVGRLPFDDEYIPTLFKKIAAGQYSTPSYLSPGATSLIRKMLMVNPVHRITIPELRQDPWFTTDLPAYLEPPAQEFFDSGADPNKAIDPKALAPLADAPRVQALHENVVTKLGKTMGYAKHDVQDALARDEPSAIKDAYLIVRENEMMRENPLLTNQDGVPVWNHQSPPAHDSYMEKFRPQSLNAVSRPQFIPPAPSDHERARQGSNASSQLASIRSPVSTIAILPSSLTEYHKAYMKGHPRPTNKISESEALPPTPEQTEEQRQISARRLKPNFRTMPEAGRTKPEPMTSLPTKKPRATKWQFGIRSRNQPAEAMLAIFKALKAMGADWEVPKIRRAGGRSGSRSRSTSQAPEDRKSKSRNHSQDSISSHSSDEDQGSRKGSPRREPLSVRNNGTSEQEARGRQKKHYNHTNDWGYHVPEDPWVIHARFLKEGMFPPGVAHPSSTHSSRVDLANDSSGARRRSSTNTSTSSAGHGVEGMTPSERAGSVSEDHVNPDEAVYIYMSIQLYSIDRDFFVVDFKCAGYERLVTNLVREIKASIPLSGSHQPPPHHQDGWDDEQGVWRRLDENEPLPEDLAKKLNEGGTEILRERTELVGAGRQEGEKIVTSPFPFLDVASTLILQLSGE

SEQ ID NO: 28967 - protein, 200 aa, Triticum aestivum
  misc_feature (58)..(58): Xaa can be any naturally occurring amino acid
  misc_feature (71)..(71): Xaa can be any naturally occurring amino acid
  misc_feature (95)..(95): Xaa can be any naturally occurring amino acid
  unsure (1)..(200): unsure at all Xaa locations
AYLGDTIEQVCTKKQAGTGPEFPGYRRPTRPIDDNGEVIKRKKKKGLKEKLQGRLPGXHKDPEGEHLTGLXPAPAAPASVQTHGGHHDTDVVVEXKIDGDVKTEAAPAVPEEEKKGFLEKIKDKLPGGHKEPEDPAAVPVTHAAPAPVHAPAPAPEEVSSPDAKEKKGLLGKIMDKLPGYHQTGEEDKAAAATGEHKPSA

SEQ ID NO: 28968 - protein, 443 aa, Neurospora crassa
  misc_feature (199)..(199): Xaa can be any naturally occurring amino acid
  unsure (1)..(443): unsure at all Xaa locations
MDSERRPLLANGTGNGGRWTTESDSDFSWRDFFLDTTKTPGTNHPNPLVKYPTRVWNVTKVTLLSSWINILLIFVPLGIIAGERGWSAPAVFTLNFFAIIPLAAVLSFATEEIAHRLGETLGGLVNATFGNAVELIVSIVALRAGEIEVVQASMLGSILSNLLLVLGMCFLLGGIFNMRDSNGVGIEQTFASGTAQTTXSMMTLASASLIIPAALYTMLNHSDSQEKQDSILMLSCGTAVILLLLYCAYLVFVLRTHKELFEPEAQAVVDVVTEPKEDPVLSPWSAALVLIVTTVIISYAADYMVDSIDDIAATGAMSKTFIGLILIPIVGNAAEHVTACVVAVKNKMDLAMGVAIGSSIQIALLVTRLWVLLGWAIGQPMSLHFETFETIAFALSVMVVTYTVQDGKSNYLEGAMLMGLYIIIALAFWASPADALQKLSTIF

SEQ ID NO: 28969 - protein, 461 aa, Salmonella enterica subsp. enterica serovar Typhi Ty2
MAEKKPELQRGLEARHIELIALGGTIGVGLFMGAASTLKWAGPSVLLAYIIAGLFVFFIMRSMGEMLFLEPVTGSFAVYAHRYMSPFFGYLTAWSYWFMWMAVGISEITAIGVYVQFWFPEMAQWIPALIAVGLVALANLAAVRLYGEIEFWFAMIKVTTIIVMIIIGLGVIFFGFGNGGQAIGFGNLTEHGGFFAGGWKGFLTALCIVVASYQGVELIGITAGEAKNPQVTLRSAVGKVLWRILIFYVGAIFVIVTIFPWNEIGSNGSPFVLTFAKIGITAAAGIINFVVLTAALSGCNSGMYSCGRMLYALAKNRQLPAAVAKVSRHGVPVAGVALSILILLVGSCLNYIIPNPQRVFVYVYSASVLPGMVPWFVILISQLRFRRAHKEAIADHPFRSIMFPWANYLTMAFLVCVLIGMYFNEDTRMSLFVGVIFLLAVTLVYKVFGLNRHGTAHKVGE

SEQ ID NO: 28970 - protein, 753 aa, Ustilago maydis 521
MASNMLRGLWPSGPADQTTPKASSSHSNGAERNPFDSMLPPAMTKQSSRSSLNTSIITNHLPGDVTPGMRTPGGITSQSAIPTTSISLSDPDFTMKLPPPKHKNEPNMPLALPSNHTATPISDAVPTASSSTSTDSVASVSSGSGSGSGSSKTRNTYAPRGHLTVKIVAGRNLAVSSPAARPYAVIQFDKNEFIGREPVDEFGEEAKGVAQPRSEAGEAGRSRARTVTPADALSRTGQNHNPVWKHEVTFDVTQDSQPIYISVYDRHSEDEGFLGMREIKPRLVHKMMSDQWYPLSSRDDEEDMENHRGEIRVQITYERMPQKKLTPHDFEYLKLIGRGTFGRVFQVRKKDTKRIYAMKVLSKREIALKKEVTHTMGERKILEKSLDCPFLVGLKFSFQSATELYFVTDYKSGGELFWHLQREGRFTEERARFYIAELVLALEHLHKYDIVYRDLKPENILLDATGHVALCDFGLSKPDLGAGQLTNTFCGTTEYLAPEVLLDESGYSKLVDFWSLGVLLFEMCCGWSPFYAEDTQQMYRNICFGKIKFPRGAIGDDGKQFVKGLLNRNPRHRLGAQRDAQDLKEHPFFKDIDFDALSKKQLTPPFKPLVESDESVANFDPEFTETDLKDVAVIPGFEGSSTDAAKALQNGDILSEQDANGKGVAISKSRGGEVDDDHLLTRSIQDKFRGFSYSGTYEGSVAGSFGGRRGSGGFGLAGASLGMSRMGVNDDAPMDDDVAALESLDADEVMHPR

SEQ ID NO: 28971 - protein, 349 aa, Triticum aestivum
  misc_feature (106)..(106): Xaa can be any naturally occurring amino acid
  misc_feature (254)..(254): Xaa can be any naturally occurring amino acid
  unsure (1)..(349): unsure at all Xaa locations
SKEVSDFAAKYMYHNPLHLDTYKEVSKMEAEILRMTASLVSKNPAYGVITSGGSESLIMSLYAYRKYFNKAKPNIVVPNTIHAAIDKGAMYLNIEVRKARLNERFXVDVAHMKSLIDHNTIALYASYPNFPHGIIDPIADIAPIAKKHKIGFHVDGCLGGFVAAFLKEHEGKFSLDIDGVTSISLDNHKFGLAPKGVAVLLFKEKKLRASMYFIYTEWVGGIYATPSFPGSRSGFASAGAWYALTHVGRKQYLXNSMRVVEATKKAAKELAKIEGVRVLGNPELCVLAFQTDIVDCFSVSSFLTKEKGWKISAIHLPKGLHISVTLANCNNVGQNLAKDVKEAIEKVKL

SEQ ID NO: 28972 - protein, 166 aa, Capsicum frutescens
MAANNPSANMLDGSFRSLDSPDSDDFSNHLINFELSDILEIDNWPIQQDPTLIPQYSNYAANQVVNTSSYQEEPSNNIGSSSSKRKEVKDKVAFRTLSQIEILDDGYKWRKYGKKMVKNSPNLRNYYRCSVEGCPVKKRVERDKEDSRYVITTYEGVHNHQGLSPF

SEQ ID NO: 28973 - protein, 606 aa, Desulfovibrio desulfuricans G20
MPRGMACPCIHEEQRLLKNKASGLSGEFRPASCPVAYVWCRTLLSDFKQKAETHMASRQEMTESGAIAACGEGADSRSLEAEILRLRQREKELLHERQMLKDILKAIPDMLTVHDRDGNVMFSNCKPNEDCWQHHGGTKHGLRCYQCHFHGDRNCEDCYIPDVFDSGEQRVVEMYNPDMKSFRSITVFPVRDGQGDVTMVAEYVRDVTATRNLERELRVAKEAAEAADRAKSEFLASMSHEIRTPMNGVLGMLDLAMTTSLDEEQREYLEAVQNSAEALLSLINDILDFSKIEAGMVELDQQVFRLSKRLSSLHTMFVHRAAERNLEFAINISPDVPDGLSGDPLRLRQIVVNLLDNAFKFTDQGQVVLSVEVLERGAENVLLQFSVQDTGPGILERHQERIFDSFAQADASFTRRHQGSGLGLAICKRLTGLMGGDIKVRSTPGEGSTFVFSARFGVAVLDEEPVRVRSRTAEPAPVRGRILVAEDHPMNLMFIEKFLKKQGYESVSVTDGSEVVPALTRSRFDLVLMDIAMPAMDGMEATRAVRAATGMKTPSDVPIIAMTAHAMKGDREQFLEAGMDDYIGKPINSDNLRSMIIRHLQARRKS

SEQ ID NO: 28974 - protein, 450 aa, Silicibacter sp. TM1040
MASVIYPTTNFTATEQLCITHGEGIYVYDDTGKQYIEGLAGLWCTSLGYSNTEVVEAITEQLKRLPFQHTFGGKTHAPVMELAEKLKAMVPVEDAYFFFGNSGSDANDSHYKMLRYYFNAIGKPHKRKIITRERGYHGVTVAAGSLTSLPANLAHFDAPLEALSILRTDAPHYYTGRQGNETEAQFVERILQNLEDQILAEDPDTIAAMIIEPITGASGVIVPPEGYYEGLQALLRKHGILIWADEVICGFGRTGADFGCTTMGIKPDLMTFAKQLSSAYFPISASVIPGWMYKAMVDQTNEVGVFGHGYTYSGHPAACAAALKTLEIYERDKIFDHAAEVGTYLQEQLRATFTDHPLVGEVRGKGLIAALELVSNKTTGATIAGGKGGAAAVKACQTEGVILRAVAGNALAFCPPLIITKPEVDEMLKRTKAGVDAAYEALRSEGLLNS

SEQ ID NO: 28975 - protein, 184 aa, Triticum aestivum
  misc_feature (122)..(122): Xaa can be any naturally occurring amino acid
  misc_feature (130)..(131): Xaa can be any naturally occurring amino acid
  misc_feature (133)..(133): Xaa can be any naturally occurring amino acid
  misc_feature (139)..(139): Xaa can be any naturally occurring amino acid
  misc_feature (142)..(142): Xaa can be any naturally occurring amino acid
  misc_feature (147)..(147): Xaa can be any naturally occurring amino acid
  misc_feature (153)..(153): Xaa can be any naturally occurring amino acid
  misc_feature (156)..(157): Xaa can be any naturally occurring amino acid
  misc_feature (162)..(162): Xaa can be any naturally occurring amino acid
  misc_feature (169)..(169): Xaa can be any naturally occurring amino acid
  misc_feature (172)..(172): Xaa can be any naturally occurring amino acid
  misc_feature (175)..(177): Xaa can be any naturally occurring amino acid
  misc_feature (181)..(181): Xaa can be any naturally occurring amino acid
  unsure (1)..(184): unsure at all Xaa locations
MNLWTDDNASMMEAFMASADMPAFPWGAAATPPPPAFNQDTLQQRLQAIIEGSRETWTYAIFWQSSTDAGASLLGWGDGYYKGCDDADKRRQQPTPASAAEQEHRKRVLRELNSLIAGGKGXAAPDEAVXXRXSRDTEXWVXLVSNXQSFPNXIGXXPGEGXFSGKPTXFPXGVXXXPCEXAKK

SEQ ID NO: 28976 - protein, 150 aa, Haloarcula sinaiiensis
ERTFVMVKPDGVQRGLIGDIVSRFEDCGLKMVGGKFMQIDQELAEEHYGEHEDKPFFDGLVDFITSGPVFAMVWEGQDATRQVRTMMGETDPAESAPGTIRGDYGLDLGRNVIHGSDHEDEGANEREIELFFDEDELVDWDQIDSSWLYE

SEQ ID NO: 28977 - protein, 471 aa, Carboxydothermus hydrogenoformans Z-2901
MKSLGKFIVVFLLSLVLFNYRPVLAKTVNYPPQILTISASKTVVTSGESITLSAKAYDKNKDKVYYEWTVSGSSSDKGKFSSTRAAKVTWTAPKVTGDTYFTIKLKVYDSKKAAAYKSIKIQVKPKTLTQLFKELKDSTVLITTGSGLGSGFIISSDGRILTCYHVIKGEKQAYVTLANGTQYEVVSLERYDPENDWAIIKINARNVKPVALTTKLPEVGEQVFTIGNPQGLSWSMASGIVSSNNREIDGKSYLQITAPVNPGNSGGPLFNMKGEVIGIINMKLNGSEGLNFAISYNTVVQNMNTAFVVNAPLAEVFSDETFQAGIDELVKTLNEGNYDYLNPLIIGSTNFGRVTYENGTWVDENTGAVHYGIDVVVNYQQFLKIYLNHQVNADFNNDWSILARTLTEKFSNYLGIPAFHVWFRVYEDLDQMPAENLVPAKYITPNNGKYTVDWYFYEAVSGFNDFSEKWY

SEQ ID NO: 28978 - protein, 150 aa, Haloarcula vallismortis
ERTFVMVKPDGVQRGLIGDIVSRFEDRGLKMVGGKFMQIDQELAEEHYGEHEDKPFFDGLVDFITSGPVFAMVWEGQDATRQVRTMMGETDPAESAPGTIRGDYGLDLGRNVIHGSDHEDEGANEREIELFFDEDELVDWDQIDAPWLYE

SEQ ID NO: 28979 - protein, 481 aa, Glycine max
MAAASRRLRDLQSEAGNKICVDCSQKNPQWASVSYGVFMCLECSGKHRGLGVHISFVRSVTMDSWSDIQIKKMEAGGNDKLNAFLAQYSIPKETDIVTKYNTNAASVYRDRIQAIAEGRPWRDPPVLKENLSAAGKGKPPLTQTRRNNNEGGWDDWGNEASPRSKSKSTGDFRNLNGGGGAPARSRSTEDIYTRTQLEASAAKKEDFFARKIAENESRPEGLPPSQGGKYVGFGSSPQPPQRRNEAQNDYFSVVSQGIGKLSLVAASAANVVQAGTKEFTSKVKEGGYDHKVNETVNVVTQKTSEIGQRTWGIMKGVMAMASQKIEEYTKDDPNWKNDNWQRNENDRNGYYQDFNQENKGWNSSIGREQSSSGQFKTQSSSSWDDWDHNDSRKEVPAKGSSHSSGGLFSTHNSSSWDDWEHRDSRKEEPAKGSAPHNNEDWAGWDNAKDDGFDNYYEGASNKKGVGHNGKSDGTWTEGGFL

SEQ ID NO: 28980 - protein, 917 aa, Pseudomonas fluorescens
MLRKMGIKGRVLLLTLLPTSLMALLLGGYFTWMQLSELQTQLLQRGEMIAEQLAPLVAPPLSSKNTDLLERIATQSLEQPDVRTVSFLAPDRSSLAHAGPTMLNQPPIGNSSYLLQRTGNDATRYLLPVFGRHRNLAGELIPDESDRLLGWVEVELSHNGMLLRGYRSLFASLLLIAIGLICNAALALRISRTINLPISQIKLAVAQLKDGNLETRLPPLGSQELDQLASGINRMAETLQNAQEELQHSIDQATEDVRQNLETIEIQNIELDLARKEALEASRIKSEFLANMSHEIRTPLNGILGFTHLLQKSEMSPRQLDYLGTIEKSADNLLGIINEILDFSKIEAGKLVLDSVPFNLRDLLQDTLTILAPAAHAKQLELVSLVYRDTPLALVGDPLRLKQILTNLVSNAIKFTREGTIVARAMIEDEQEDSVQLRISVQDTGIGLSNQDVRALFQAFSQADNSLSRQPVGTGLGLVISKRLIEQMGGEIGVDSTPGEGSEFWISLNLPKTRDDVEDLPAAPLLGRRVAVLENHELARQALQHQLEDCGLEVTPFNSLENLTNGITSAHQTEQAIDLAVLGVTANDIPPERLNQHLWDLEHLGCKVLVLCPTTEQMLFNQSVPNPNSQLQAKPACTRQLRRALADLISPRPSRSEPGEPLSSRAPRVLCVDDNPANLLLVQTLLEDMGAKVLAVESGYAAIDAVKQETFDLVLMDVQMPGMDGRQSTEAIRQWESERHGTPLPVVALTAHAMANEKRALLQSGMDDYLTKPISERQLAQVVLKWTGLALRNQGPERAPDGLAPGVRLQVLDHEEGLRLAANKADLAADMLAMLLASLEADRQAITAAREANDNNALIERVHRLHGATRYCGVPQLRAACQRAETLLKQDDAKAMTALDELDMAIARLASEARVSA

SEQ ID NO: 28981 - protein, 78 aa, Triticum aestivum
  misc_feature (10)..(10): Xaa can be any naturally occurring amino acid
  unsure (1)..(78): unsure at all Xaa locations
TREQRVISFXGVGLSVAEEIKYGDVTAQSRNADVARGIFSEALYNSVVDQYNVLKSAIFRDRGAVSSNPAISLSQPWR

SEQ ID NO: 28982 - protein, 133 aa, Glycine max
MASVCKSDCVKDSHRPLRPTFVNRHKWPESEVEFVKTVNSNIHAKPKGAVDSFSCRQMYLRSYKFSREKVGVREKTLKCFNKLKERVVCVRNKLNLKSKYKVLVRAKDVTFAAFSIFQSFLPCSAKVDVLHDF

SEQ ID NO: 28983 - protein, 286 aa, Hordeum vulgare
MAKDIEAAPQGGEFSSKDYSDPPPAPIVDFEELTKWSLYRAVIAEFVATLLFLYITVATVIGYKHQSDPTVNTTDAACSGVGILGIAWAFGGMIFVLVYCTAGVSGGHINPAVTFGLFLARKVSLIRALLYIIAQCLGAICGVGLVKGFQSSYYVRYGGGANELSAGYSKGTGLAAEIIGTFVLVYTVFSATDPKRNARDSHIPVLAPLPIGFAVFMVHLATIPITGTGINPARSLGAAVIYNTDKAWDDQWIFWVGPLIGAAIAAAYHQYVLRASAAKLGSYRSN

SEQ ID NO: 28984 - protein, 374 aa, Listeria monocytogenes EGD-e
MSDKTKNTKPVAELSVEQVKEALIEEGKKKGILTYAKIAARLAPFTLDSDQMDEYLEHVGEAGIEVSDDADDEDPDETELVKEETESFDLTDMSVPPGVKINDPVRMYLKEIGRVDLLTADEEIALAKRIEAGDIEAKGRLAEANLRLVVSIAKRYVGRGMLFLDLIQEGNMGLMKAVEKFDFNKGFKFSTYATWWIRQAITRAIADQARTIRIPVHMVETINKLIRVQRSLLQDLGRDPSPEEIGEEMDLPTEKVREILKIAQEPVSLETPIGEEDDSHLGDFIEDQDATSPSDHAAYELLKEQLEDVLDTLTDREENVLRLRFGLDDGRTRTLEEVGRVFGVTRERIRQIEAKALRKLRHPSRSKQLKDFLE

SEQ ID NO: 28985 - protein, 361 aa, Arabidopsis thaliana
MDKYELVKDIGAGNFGVARLMRVKNSKELVAMKYIERGPKIDENVAREIINHRSLRHPNIIRFKEVVLTPTHIAIAMEYAAGGELFERICSAGRFSEDEARYFFQQLISGVSYCHAMQICHRDLKLENTLLDGSPAPRLKICDFGYSKSSLLHSMPKSTVGTPAYIAPEVLSRGEYDGKMADVWSCGVTLYVMLVGAYPFEDQEDPKNFKKTIQRIMAVKYKIPDYVHISQDCKHLLSRIFVTNSNKRITIADIKKHPWFLKNLPRELTEIAQAAYFRKENPTFSLQSVEEIMKIVEEAKTPARVSRSIGAFGWGGGEDAEGKEEDAEEEVEEVEEEEDEEDEYDKTVKQVHASMGEVRVS

SEQ ID NO: 28986 - protein, 386 aa, Digitalis lanata
MKNILFSTMRNFMVYVVVLMEVSVRSSEAKCYFKAIFNFGDSNSDTGGFWAAFPAENPPNGMTYFKRPAGRVTDGRLIIDFLAQGIGIPFLSPYLLSIGSDFRHGANFATAASTVLLPRTSLFVTGVSPFSLGIQLNQMKQFKLQVDRLHHSPGKLNLPAPDIFRKSLYTLYIGQNDFTGNLGSLGISGVKKKIIPQVVSQISSTIQKLYELGGRTFLVLNLAPIGCYPLFLVDLPHNSSDIDSFGCTISYNKAVVEYNYMLKEALAQTRKDIQDADVIYTDIHSVMLQLFQHPTSNGLKYGTKACCGYGGGAFNFNQQVFCSYSKLINGKNVTANACKDPQNYVSWDGIHATEAANKHVAHAILEGSHFDPPFSLHKPCDIQPIG

SEQ ID NO: 28987 - protein, 206 aa, Triticum aestivum
MASALSAPAASAVAAARCKVFGGGRNDGRAGCRVGVARKNTGHITMALAVDASRFEGVPMAPPDPILGVSEAFKADTSDLKLNLGVGAYRTEELQPAVLNVVKKAEKLMLEKGENKEYLPIEGFAAFNKATADLLLGADNPVIKQGRVATLQSLSGTGSLRLAAAFIQRYFPDSKVLISSPTWGNHIKENIFNDARVPWSEYRYYE

SEQ ID NO: 28988 - protein, 138 aa, Salmonella enterica
AGASLGLWEICIIWGLGISLTVYLTAGISGGHLNPAVTIALWLFACFPKQKVLPYIIAQFAGAFGGALLAYVLYSSLFTEFETAHHMVRGSVESLQLASIFSTYPAAALNVWQAALVEVVITSILMGMIMALTDDGNG

SEQ ID NO: 28989 - protein, 173 aa, Triticum aestivum
MHPTRWELSHMVDLQAAALVISVVRPRSEYSGHSIPVGGLAYYVTAPSSMADILANPFHALFYVVFMLSACALFSKTWIEVSGSSAKDVAKQLKEQQMVMPGHRESNLQKELNRYIPTAAAFGGVCIGALTVLADFMGAIGSGTGILLAVTIIYQYFETFEKERATELGFFGF

SEQ ID NO: 28990 - protein, 548 aa, Triticum aestivum
  misc_feature (520)..(520): Xaa can be any naturally occurring amino acid
  unsure (1)..(548): unsure at all Xaa locations
LGRTSLYKKAGWYRSGIPGISSTHASGAVMSKNDSMSTVFRCLSKGAVDFLVKPIRKNELKTLWQHIWRRCHSSSGSESGIHTQKCSKPKAGDEYENNSHDDDDDCGSHDDDDDDDDDADDDFSVGPNARDGSDNGSGTQSSWTKRAVEIDSPQLLSSDHLAESPDSTCAQVIHPRSEIGSNRWLPTANKRNINNQKENNDDSMGKYLEIGAPRNSSLGYQSSPNEMSVNPTEKQHENLTSQNKSVNKIVIDKPTCQTADLISSIARNTESKQAARITDAPDCSSKMPNGNEMKNDSPINMPSQELGLKISETTRCETEIHDERSIPKRSNLSAFTRYHTPMASDQGGATFRGSCSPQDNSSEAVKTNSTCKMESNSDAAQIKQGSNGSSNNNDMGSSTKSAIAKPCTDRERVMLPSLVKSNQQTSAFHPVQHQVSPAHVARKDKAAEEIANAVKVGHSSEAQQSSVQHHHHAHYYRHVMAQQQTLIDGASNARCGSSNASDSPMEGHAANYGVNVSVSXSNNGSNTQNGSSSAPILQAKHGEWYHGQ

SEQ ID NO: 28991 - protein, 221 aa, Gibberella moniliformis
SSGVFTTIDKAKAHLTGGAKKVIISAPSADAPMYVVGVNENKYDGSADIISNASCTTNCLAPLAKVINDKFGIVEGLMTTVHSYTATQKTVDGPSAKDWRGGRGAAQNIIPSSTGAAKAVGKVIPELNGKLTGMSMRVPTANVSVVDLTVRLEKGASYDQIKKVIKEASEGDLKGVLAYTEDDVVSSDLNGNTNSSIFDAKAGISLNDNFVKLVSWYDNEW

SEQ ID NO: 28992 - protein, 155 aa, Salmonella enterica
IIWGLGISLAVYLTAGISGGHLTPAVTIALWLFACFPKQKVLPYIIAQFAGAFGGALLAYVLYSSLFTEFETAHHMVRGSVESLQLASIFSTYPAAALNVWQAALVEVVITSILMGMIMALTDDGNGIPKGPLAPLLIGILVAVIGASTGPLTGF

SEQ ID NO: 28993 - protein, 418 aa, Escherichia coli
APAVADKADNAFMMICTALVLFMTIPGIALFYGGLIRGKNVLSMLTQVTVTFALVCILWVVYGYSLAFGEGNNFFGNINWLMLKNIELTAVMGSIYQYIHVAFQGSFACITVGLIVGALAERIRFSAVLIFVVVWLTLSYIPIAHMVWGGGLLASHGALDFAGGTVVHINAAIAGLVGAYLIGKRVGFGKEAFKPHNLPMVFTGTAILYIGWFGFNAGSAGTANEIAALAFVNTVVATAAAILGWIFGEWALRGKPSLLGACSGAIAGLVGVTPACGYIGVGGALIIGVVAGLAGLWGVTMLKRLLRVDDPCDVFGVHGVCGIVGCIMTGIFAASSLGGVGFAEGVTMGHQLLVQLESIAITIVWSGVVAFIGYKLADLTVGLRVPEEQEREGLDVNSHGENAYNADQAQQPAQADLE

SEQ ID NO: 28994 - protein, 336 aa, Debaryomyces hansenii CBS767
MATNKEGKPLEILKFADDSGSYKRQSSKFRNFISNAENSKFKPELNRYHLYVSMACPWAHRTLITRVLKGLTQIISVSVVHWHMDNNGWRFMNKEEASKRSSNSDILNGTEDHLHGFDRIKQLYFKADPEYSGRFTVPVLWDKKLETIVNNESSEILRMLNSEFNSLLSSEYAELDLYPKDMREAIDEINSWIYDNINNGVYKTGFSTKQEVYDKEVVNVFNHLDKVELILAKNHEGPNKIEFLLDNKITEADIRLFTTIVRFDAVYVQHFKCNLKMIRYDYPNIHNWLRLLYWKIPGFNETTDFHHIKCHYTKSHVGINPNGITPLGPVPDVLHY

SEQ ID NO: 28995 - protein, 279 aa, Phaseolus vulgaris
QDYHGLPSFKKALVDFMAEIRGNKVTFDPNHIVLTAGATSANETLMFCLAEEGDAFLLPTPYYPGFDRDLTWRTGAEIVPIQCTSSNNFHITESALKQAYEEAGRRNLRVKGVLVTNPSNPLGTTMSRSELNLLVDFIKEKKDSHLISDEIYSGTVFSSPGFVSIMEILKERNDADGIWNRVHVVYSLSKDLGLPGFRVGAIYSENDTVVAAATKMSSFGLISSQTQYLLSAMLGDKKFTRNYIVENQKRLKRRQRMMVSGLQKAGISCLESNAGLFCW

SEQ ID NO: 28996 - protein, 335 aa, Debaryomyces hansenii CBS767
MATDKRGNLLGNLNFADETGAFKKKASTFRNFISSAENARFRPELNRYHLYVSMACPWAHRTLATRVLKGLTQIISVSVVHWHMDNNGWRFMNKEEASKRSSKSDILNGTEDHLYGFDRFKQLYFKADPEYAGRFTVPVLWDKKLETIVNNESSEILRMFHSEFNSLLPSEYAELDLYPKEKRHEIDEINSWIHDNINSGVYKTGFSTKQEIYDKEVANVFNHLDMVEQILAKNKESFNSFLIGNKLTEADIRLFTTIVRFDAVYVQHFKCNLKMIRYDYPNIHKWLRFLYWKIPGFKETTDFDHIKYHYTKSHPGINPNGITPLGPVPNILNYS

SEQ ID NO: 28997 - protein, 427 aa, Burkholderia sp. 383
MSNNQILFERAQKTIPGGVNSPVRAFRSVGGTPRFVARAQGPYFWDADGKQYIDYIGSWGPMIVGHVHPEVLSAVQNVLADGFSFGAPTEAEIEIAEEICKLVPSIEQVRMVSSGTEATMSALRLARGFTGRSRIVKFEGCYHGHADSLLVKAGSGLLTFGNPTSAGVPADIAKHTTVLEYNNVAALEEAFGAFGDEIAAVIVEPVAGNMNLVRGTPEFLNALRALCTKHGAVLIFDEVMCGFRVALGGAQQHYGITADLTCLGKVIGGGMPAAAFGGRRDIMAHLAPLGGVYQAGTLSGNPIAVAAGLKTLQLIQAPGFYDALTAQTKRLADGLAAEARAAGVPFVADSIGAMFGLYFTERVPTSFAEVTKSDTERFNRFFHLMLDEGVYFAPSAYEAGFVSSTHDDAVIDATLAAARRAFAALAA

SEQ ID NO: 28998 - protein, 235 aa, Capsicum annuum
MGSPQENCSFDMIRQHLDDISLMEYYCPENTLYSQSCESLDQTSVSFETSSNLDDISSFFSSSKTDFGCFEFETKPITSAATSISSNSPKKRSFNERKPSLNIAVPVKPVVVQKVEVVREKKHYRGVRQRPWGKFAAEIRDPNRKGTRVWLGTFDTAVDAAKAYDRAAFKLRGSKAILNFPLEVANFKQQNSTVEVPQQVNSSGSKRAREKEELAINEKKKKKKKNLAAPRPSPI

SEQ ID NO: 28999 - protein, 414 aa, Clostridium acetobutylicum ATCC 824
MRRVVITGYGVISSSGNDVDTFWSNIVNGISGIREITDPSFSNIASRIAGYINDFNPYEYFDKREIRHYDLYTQYAFAAAKQAIDNANVKEGNFDTSRVGIYVGSGIGGISTVLNSHKAYLEKGTRHVSPFMIPMMISNMASGVIAIKTGFKGPSFSPVSACATANQAIGEAFLSIRHGYTDAIIAGGSEAPINTLAFSGFANMKAMSTNNANPTEASRPFDKLRDGFVMSEGAGILFLEELTHAKRRGAKILGEIIGYGSTTDAYHITSPDYHGAARAMEMALEMADISASQIDYINAHATGTKGGDKSETNAIKAVFKENVKKLKISATKSMTGHLFGAAGGIEAIITLKALEYGIIPPTINLKNVDEECDLDYVPNKAIKHDSNFAISNGFGFGGHNASLLFKKWNPAMEY

SEQ ID NO: 29000 - protein, 384 aa, Candida albicans SC5314
MQLINQFSKSPPLLQFNSPNFKFIFKYSLLLFFLIIVIFLFLYPPSIYQIMSILPETQKVVLHRENGDYDVIEYSDFPTPKIESSHDIIVKNSYAGVNFIEAYFRKGIYKASLPYVFGREASGEVVAVGDEVSTLKVGDKIAYLSPNTFAQYTKITDDNYKYIKLPDNASDEELKIYGSLFLQGLTALTFVNEAYKVQKDDYILVWAAAGGVGKILVQLISQLGAHVIAVASTPEKLKIAQDLGAEFLINSTSDDIVEKVKEITNGEGVAASFDSVGKDTFEISLNSIKRKGTFVSYGNASGPVTPFPLSILSPKNIKIARPQLYAYIGNADEWDHYSTELLKLFESGKLKFDIFKTYDLKDYVQAAKDLEGRKTTGKLTLKIS

SEQ ID NO: 29001 - protein, 339 aa, Magnetospirillum magnetotacticum MS-1
MRVYYDRDADVNLIKGKKVVVVGYGSQGHAHALNLRDSGVKDVAVALRAGSATAKKAEAEGLKVMTPADAAKWGDVVMILTPDELQADLYYQDLAGNMKQGAALVFAHGLNIHFKLIEARADLDVFMVAPKGPGHTVRGEYLKGGGVPCLVAVAQNASGNALEIALSYASAIGGGRSGIIETTFREECETDLFGEQVVLCGGLTKLIQYGFETLVEAGYAPEMAYFECLHEVKLIVDLIYEGGIANMRYSISNTAEYGDYVTGPRIITNETKAEMKRVLEDIQAGRFVRDWMLECKAGQPSFKATRRIQAEHGIEVVGEKLRAMMPWIAKNKLVDKAKN

SEQ ID NO: 29002 - protein, 406 aa, Streptomyces venezuelae
MPEAVIVSTARSPIGRAFKGSLKDLRPDDLTATIVQAALAKVPELDPRDIDDLMLGCGLPGGEQGNNLGRIVAVQMGMDHLPGCTIHRYCSSSLQTSRMALHAIKAGEGDVFISAGVEMVSRFVKGNSDSLPDTHNPLFADAEARTAAVAASEGSSWHDPREDGLVPDAYIAMGQTAENLARWKGITRQEMDEFGVRSQNLAEQAIKNGFWEREITPVTLPDGTVVSTDDGPRAGVTLEGVSGLKPVFRPDGLVTAGNCCPLNHGAAALVIMSDTKARELGLTPLARIVSTGVSGLSPEIMGLGPVEASKQALQRAGLTIGDIDLAEINEAFAAQVIPSYQELGLDLDKVNVNGGAIAVGHPFGMTGARITGTLINSLQFHDKQFGLETMCVGGGQGMAMVIERLS

SEQ ID NO: 29003 - protein, 440 aa, Taxus cuspidata
MGRFNVDMIERVIVAPCLQSPKNILHLSPIDNKTRGLTNILSVYNASQRVSVSADPAKTIREALSKVLVYYPPFAGRLRNTENGDLEVECTGEGAVFVEAMADNDLSVLQDFNEYDPSFQQLVFNLREDVNIEDLHLLTVQVTRFTCGGFVVGTRFHHSVSDGKGIGQLLKGMGEMARGEFKPSLEPIWNREMVKPEDIMYLQFDHFDFIHPPLNLEKSIQASMVISFERINYIKRCMMEECKEFFSAFEVVVALIWLARTKSFRIPPNEYVKIIFPIDMRNSFDSPLPKGYYGNAIGNACAMDNVKDLLNGSLLYALMLIKKSKFALNENFKSRILTKPSTLDANMKHENVVGCGDWRNLGFYEADFGWGNAVNVSPMQQQREHELAMQNYFLFLRSAKNMIDGIKILMFMPASMVKPFKIEMEVTINKYVAKICNSKL

SEQ ID NO: 29004 - protein, 80 aa, Arabidopsis thaliana
DEAAPVVVPPPVAEPAAIPEDMDLMTALELTLRKARAYGGVVRGLHECAKLIEKRVAQLVVLAEDCNQPDYVKLVKPLCA

SEQ ID NO: 29005 - protein, 342 aa, Rhodococcus sp. S9
MTTNYLARAAGHRPGSNATATLEVVIPVYNEEADLEKCIRRLHEHLEERIPFRSRITIADNASNDGTLAVAHRLADEIDGVRVHHLDEKGRGRALKAVWLASDADVVAYMDVDLSTDLNALMPLVAPLLSGHSDLAIGSRLNRSSRVVRGVKRELISRSYNLILRTSLRARFSDAQCGFKAMRTDVARQLLPLVEDTGWFFDTELLVIAEKVGLRIHEVPVDWVDDPDSSVHLLDTAVKDLQGCWRVGRALATGVLPVAELRRSLGREPLVAGVPHGMIGQLVRFGIIGVASTVAYALLYLVLHPMIGAQAANFAGLLITAVLNTAANRAIHFRRPRARERG

SEQ ID NO: 29006 - protein, 363 aa, Glycine max
MSIGTTLSTTPNHSFHSNTRTSLLNTVSPIQFLSFRNHTHNLRVLCFSSNPSQQLPPVVVVGSANADIYVEIDRLPREGETLAAKSGQTLAGGKGANQATCSAMLSYPTYFVGQVGDDAYGTLLSDALRGGGVRLDSLTVVASAPTGHAVVMLQSNGQNSIIIIGGSNMSGWPSTLPRQHLDLVAQAGIVLLQREIPDAVNVQVAQAARNAGVPVVFDAGGMDGPLPPQLLNFVDILSPNETELARLTGMPTESFEEIAQAALKCHELGVKQVLVKLGEKGSALFVEGEKPIQQPAILAKTVVDTTGAGDTFTAAFAVALVEGKSKKECLRFAAAAACLCVQVKGASPSMPDRKSVLDLLICQ

SEQ ID NO: 29007 - protein, 715 aa, Medicago truncatula
MANADPCRDFVKDVKRIIIKVGTAVVTRQDGRLAVGKLGALCEQIKELNILGYEVILVSSGAVGLGRQRLRYRKLIQSSFADLQKPQVELDGKACAAVGQSSLMATYDDLFSQLDVTSAQLLVTDNDFRDQDFRNQLSETVKSLLALKVIPIFNENDAVSTRKAPYEDSSGIFWDNDSLSALLALELKADLLILLSDVDGLYNGPPSDPLSKLIHTYIKEKHQNEITFGDKSRVGRGGMTAKVKASVHAADAGIPVIITSGNAAENLTKILQGQRIGTLFHKDAHKWVPSKEVDVREMAVAARDCSRRLQAVSSEERKQILLNIADALQSREKEIRIENEADVVAAQEAGYEKSLVARLVLKSEKIVGLANNIRIIANMEDPIGRVLKRTELAEGLILEKTSSPLGVLLIIFESRPDALVQIASLAIRSGNGLLLKGGKEANRSNAILHKVITEAIPDTVGSKLIGLVTSRAEIPELLKLDDVIDLVIPRGSNKLVSDIKSSTKIPVLGHADGICHVYVDKSANLEMAKQIVLDAKTDYPSGCNAMETLLVHKDLVEKGWLNSISVNLRSEGVTLYGGPKASSLLNVPLARSLHHEYCSLACTVEIVDDVYAAIDHINRYGSAHTDSIVTEDHEVANVFLRQVDSAAVFHNASTRFSDGARFGLGAEVGISTSRIHARGPVGVDGLLTTRWLLKGNGQVVDGDKKVTYTHRDITT

SEQ ID NO: 29008 - protein, 625 aa, Bradyrhizobium japonicum USDA 110
MCGIFGWVLAAAKHQNRDTLIGLTDLMSHRGPDASGYWLHQTSDERYQIGFGHRRLSIIDIGGGAQPMATEDGRFNLVFNGEIYNYLELRKELVALGHHFRTDSDTEVLIEAYRAWQLDAVRRLRGMFAFALWDDAEQRLVLARDAFGKKPLFLAEAQGAVLFGSEIEPLVQFPGFSRALDSDAIGHYLLNRYVPGPSTFFQSVKKLQPGHCAVWQNGMLKSTRYYTPPFATTVPDVKDFNSAIRLFEGAFDEAVRIRMRSDAPYGAYLSGGIDSSAVVATMVKHSTEPVRTFSVGFRETGYSELDHARVIAGQFGTIHNDLIVEPSAFMDHWSTAALRRGAPVSEASDIPIFMLSEMASRSVKMVLTGEGADELMGGYPKYRAERWIGLYQWLIPHLLHERLIHPLVRSLPYGMRRAKIVALAAGERDLANRMRVWFGGLSVGESEAMLGRLLSATPPDLFPYSSQIGSSLRRTLFFDQTSWLPDNLLERGDRMMMAGSIEGRMPFMDTVLAGVVARFPDDFLTGGKGGKRVLRAAMDKILPSEIIRRKKIGFRVPIGEWFRGPYREFLRDMLVSETSAVAQMVRGDRLRQLVTEHLDARQNHERLLWSFVNLEIFVRAFRVAS

SEQ ID NO: 29009 - protein, 469 aa, Medicago truncatula
MASTRRVQCLMRRFYRGSRTFGVATQPNASSSSQTIIDKEFQHSAHNYHPLPIVFAHAKGSAVWDPEGNKYIDFLSGYSAVNQGHCHPKILKALKNQAGRLTVSSRAFYNDRFPVFAEYSTALFGYDMVLPINTGAEGVETALKLARKWGYDKKKIPNDEALIVSCCGCFNGRTLGVISMSCDNEATRGFGPLIPGHLKVDFGDAEALEKILKEKGDAIAAFILEPIQGEAGVKIPPDGYLKAVRDLCSKYNVLMIADEIQTGLARTGKMLACEWEEVRPDVVVLGKALGGGIIPVSAVLADKEVMLCIKPGQHGSTFGGNPLASAVAIASLEVIKEERLAERSTKLGGELLGLLEKIQKQYPDHVKEVRGRGLFIGVELNSESLSPVSFFELSEKLKDRGVLAKSTHDTIIRFTPPLCISADEIQQGSKALADVLEIDLPMLKKMKPKDAAPPAGPSACDRCGRVVYG

SEQ ID NO: 29010 - protein, 401 aa, Pseudomonas sp. B13
MSREVYICDAVRTPIGRFGGSLAAVRADDLAAVPVKALVERNPQVDWSQLDEVYLGCANQAGEDNRNVARMALLLAGLPDSVPGVTLNRLCASGMDAVGTAFRAIASGEAELVIAGGVESMSRAPYVMGKADSAFGRGQKIEDTTIGWRFINPLMKAQYGVDAMPETADNVADDYKVSRADQDAFALRSQQLAGRAQAAGYFAEEIVPVVIKGKKGETVVDADEHLRPDTTLEALAKLKPVNGPDKTVTAGNASGVNDGSVALILASAEAVKKHGLKARAKVLGMASAGVAPRVMGIGPVPAVRKLLERLNLSVADFDVIELNEAFAAQGLAVTRELGIADDDARVNPNGGAIALGHPLGASGARLVLTAVHQLEKSGGQRGLCTMCVGVGQGVALAVERV

SEQ ID NO: 29011 - protein, 136 aa, Methanosarcina barkeri str. fusaro
MVLKNIKYAIRNITRPPVTRMYPEKQSELSDRFRGLQILDKSKCIGCGICANTCPNAAIKIVKAPIAPGSTKQRWFPQIDIGHCLFCGLCIDQCPKGALSSGKEYAKGLVKWKHKDLLITPEKLAREVDLEEGDEK

SEQ ID NO: 29012 - protein, 154 aa, Oryza sativa
MSMIRRSNVFDPFSLDLWDPFDGFPFGSGSGSLFPRANSDAAAFAGARIDWKETPEAHVFKADVPGLKKEEVKVEVEDGNVSRSAGERIKEQEEKTDKWHRVERSSGKFLRRFRLPENTKPEQIKASMENGVLTVTVPKEEPKKPDVKSIQITG

SEQ ID NO: 29013 - protein, 257 aa, Medicago truncatula
GSKLIGFVTSREAIPDLLKLDDVIDLVVPRGSNKLVSQIKDSTKIPVLGHADGICHVYIDKAANINVAKKIVKDAKTDYPAACNAMETLLVHKDLAGNGGLNELAAELQKQGVQLYGGPKASVLLKISEAKSFHLEYSSLACTIEIVDDVFAAIDHIHEYGSSHTDCIVTEDSKVAETFLHQVDSAAVFHNASTRFCDGARFGLGAEVGISTSRIHARGPVGVEGLLTNRWVLRGNGQVVDGDRSMIYTHKDLQVKA

SEQ ID NO: 29014 - protein, 154 aa, Salmonella enterica
EICIIWGLGISLAVYLTAGISGGHLNPAVTIALWLFACFPKQKVLPYIIAQFAGAFGGALLAYVLYSSLFTEFETAHHMVRGSVESLQLASIFSTYPAAALNVWQAALVEVVITSILMGMIMALTDDGNGIPKGPLAPLLIGILVAVIGASTGP

SEQ ID NO: 29015 - protein, 394 aa, Legionella pneumophila str. Lens
MTDVYVVDVLRTPVGKAPRGVFKNTLPDDLLAHTIKCLIHRHQNIDWQEIADVVIGCAMPEAEQGMNVARIASLLADLPQSVPAMTINRFCSSGIQSIVTAADTIRNQEAHLALGGGVESMSMVPMGGNKYTANPSIFNDEHVAIAYGMGITAENVAKRWEITREQQDEFAIESHKKAIAAQERLDFNAEISPIEISVRCPDLNTSKVEIKKKLINKDEGPRADTSYEAISKLKPVFSLKGTVTAGNSSQMSDGAGIALLASEKALKQYDLKPLGRLMSYAVAGVPPEIMGIGPVKAIPMALKRAGITLDQLDWIELNEAFAAQALAVIKDLDLPGEKVNPLGGAIALGHPLGATGTIRTATLLHGLRRTKGRYGMVTMCIGTGMGAAAIFEAL

SEQ ID NO: 29016 - protein, 979 aa, Debaryomyces hansenii CBS767
MSSQVVTNLEETTNQHKAINNPNVVKRIHREVRFGLYILGSTLGEGEFGKVKLGWRKDGKHPSQVAIKLIKRDTIMKDSESEIKIHREINSLKMLNHPNIVNLVEVMKSGKYIGIVLEYASGGELFDYILQHKYLKENVAKKLFAQLVSGVDYMHSKGLIHRDLKLENLLLDKHKNVIISDFGFVNSYNKDKNDLMKTSCGSPCYAAPELVLTQAPYEGRKVDTWSLGVILYAMLAGYLPFDDDPENEDGSDIVRLYHYICKTPLTFPEYISPLARDLLRKIIVPDPKKRITIKNIKNHPWLTPYVNLLSVTQPEWDKVHKDNKTVNPKSAATANNSYTNLIHSNTNKRFSMINEKTNSSSLMMPAGRSYSSTNVVNQLYSNPSAPTTSSSLANAVALSKPKDPASDRSRTPSPTKQLPNGNNYSSTNYQRGHAKSTSISNPYSSASNALKAMVTENDSKRNSLVSLDSTTSSMISLTSSTKPAQHNHLPSPHLPRSTTYTGSAISTIAESPSKPSPATHLAVDNESNVTHHNTASSSNITNLKPNSSSRESAKLPHANKKPRPTSYHPSSMSASLMSSNGSSLQDYIKIPTPLLPIPQLLSTSPTKASPSSETSSPVFTDTNNSSPTMRSNASINSRRNSVVTHVHVNGVLTSESNANHNENKRNSVLSYLEDKMDALELTELHSPLKSNKPGFTDNASDTNITPQINQLPMFDGQTESPIIHTSKAEESQVKDQSEEGNKIETDEHPFVNVANQVDENKVVDLALEKESISEAPEEPNVSHSQDRTNQQENITLEFEEPKYTLEAQPAEPVSQTFKDEPVVSLDEQLIKRDHVNIIDEQEKENLDRKTTNTKKETSREINKSSAKEIKDNKKRNRFSLLSFYSNYNGSSSSNVVLQQAPTSNVSHSGKRILEPSLEQNVPTQPQDQKRNVSNSSGKSSTSKKSNNSGTAHISSNNGKEASAARKVMDFFKRRSVKIG

SEQ ID NO: 29017 - protein, 387 aa, Geobacillus stearothermophilus
MKKKCIAMLLAGGQGSRLRSLTTNIAKPAVPFGGKYRIIDFTLSNCTNSGIDTVGVLTQYQPLLLHSYIGIGSAWDLDRRNGGVTVLPPYSVSSGVKWYEGTANAVYQNINYIEQYNPDYVLVLSGDHIYKMDYQHMLDYHIAKQADVTISVIEVPWEEASRFGIMNTNEEMEIVEFAEKPAEPKSNLASMGIYIFNWPLLKQYLQIDNANPHSSHDFGKDVIPMLLREKKRPFAYPFEGYWKDVGTVKSLWEANMDLLDENNELDLFDRSWRIYSVNPNQPPQYISPEAEVSDSLVNEGCVVEGTVERSVLFQGVRIGKGAVVKESVIMPGAAVSEGAYVERAIVTPDSIIPPHSSVCPEDADDVVLVTAEWLKQSNEETARKDEA

SEQ ID NO: 29018 - protein, 343 aa, Geobacillus stearothermophilus
MNNKMLGVIDATTYIEALEPLIEQRSIAAVPFAGRYRLIDFVLSSMVNSGIESVAIFPKYQYRSLMDHLGSGKNWDLNRKRDGLFFFPSPDLLFSGERRVGAFAHFEQHIDYFLRSRQKYAVIANGYTVCNIDFDAVLNRHIENGCDVTEIRHRGRSLEMYLLETSLLLDLIADYKNHGYYSIVDVIRDYHRSLSICEYEYSGYAAVIDSVEQYFRSSMELLDRDVWEQLFLPSHPIYTKVKDEPPTKYGREGNVKRSMIANGCVIEGTVENSVLFRSVKIGKGAVVRNSIIMQKCQIGDGCVLDGVIIDKDAKVEPGVVLKGTKEQPFIVRKGTVQGEVISR

SEQ ID NO: 29019 - protein, 111 aa, Calonectria kyotensis
GKAPRKQLASKAARKSAPSTGGVKKPHRYKPGTVALREIRRYQKSTELLIRKLPFQRLVREIAQDFKSDLRFQSSAIGALQESVESYLVSLFEDTNLCAIHAKRVTIQSKD

SEQ ID NO: 29020 - protein, 640 aa, Corynebacterium glutamicum ATCC 13032; identical to SEQ ID NO: 1374

SEQ ID NO: 29021 - protein, 333 aa, Onobrychis viciifolia
WFYNGDIKTRKTVQTMETKADKIGLQRSEQLKELYKFLVLGEAEPNAKRPSASLSPEDLSDSEWYYLACMSFVFYLNQSLPGKALEVGETIWLCNAQHADSKVFSRSLLAKSASIQTVVCFPYLGGVIEIGTTELVSEDPNLIQHVKSCFLEFSKPICSDKSFSDHYKPHDEKYPTCTKGDTMALENTCSLVEEIKLDQYPLEESNFDMDDDSPDGCNSMVVRTIGLMEESMIEGINVELPSQVQCVNDNGSPDSLSSCDCMSEASETRGKASKDVIQIQDCNIGAADESGLYYTRTLCAVLGNSATFGQSPYASNSNRKSSFMKWKNGGVSE

SEQ ID NO: 29022 - protein, 563 aa, Kluyveromyces lactis
MSEITLGRYLFERLKQVEVQTIFGLPGDFNLSLLDNIYEVPGMRWAGNANELNAAYAADGYARLKGMSCIITTFGVGELSALNGIAGSYAEHVGVLHVVGVPSVSSQAKQLLLHHTLGNGDFTVFHRMCSNISETTAMITDINTAPAEIDRCIRTTYVSQRPVYLGLPANLVDLTVPASLLDTPIDLSLKPNDPEAEEEVIENVLQLIKEAKNPVILADACCSRHDAKAETKKLIDLTQFPAFVTPMGKGSIDEKHPRFGGVYVGTLSSPAVKEAVESAHLVLSVGALLSDFNTGSFSYSYKTKNIVEFHSDYTKIRRPTFPGVQMKFALQKLLTKVADAAKGYKPVPVPSEPEHNEDVADSTPLKQEWVWTQVGEFLREGDVVITETGTSAFGINQTHFPNNTYGISQVLWGSIGFTTGATLGAAFAAEEIDPKKRVILFIGDGSLQLTVQEISTMIRWGLKPYLFVLNNDGYTIERLIHGETAQYNCIQNWQHLELLPTFGAKDYEAVRVSTTGEWNKLTTDEKFQDNTRIRLIEVMLPTMDAPSNLVKQAQLTAASNAKN

SEQ ID NO: 29023 - protein, 415 aa, Rubrobacter xylanophilus DSM 9941
MSSTGNGHALITGLGAVTPLGSGVENFWDAALHGKSGIGEITLFDPSPYPSRIAGECRDFDPTDYMSRKEARRMDRYGQFGVAAGIEAAQHAGIVDIVRRRPERVAIVIGSGIGGISTWEREYRVLHERGPGRVSPFLITMMVPNMAAGQLAIMLGATGPTQCPVLACATGGEAIAEGLELIRRGDADVVIAGSSEAPITPLSMAGFCAIRAVSRRNEEPHRASRPFDAGRDGFVMSEGAGAMVLESPEHAERRGAEPIAAVAGYGRTTDAYHVTAPDEQGRGVERAIRLALEDAGMSPEDVGHVNAHATATPTGDGPETRAIARVVPHAHVSGTKSMTGHSFGAVGTTEGIMCALALKHKVVPPTINLERVADDCERLNYVGPEARRVPDLKGAISNSMGFGGHNVVVAFRSVE

SEQ ID NO: 29024 - protein, 148 aa, Vicia faba
MEFTLRQEALVNSSWEAFNQNLPLFSVLFYTFILEKAPIAKNMFSVLKDANEIPLANPSINAHTEMVFEMVRDAAAQLQTTGQVVLGDTTLGVVHTQKRVDGLHFMVVKEALLKTIKEAVGDKWSEELSNAWEIAYDGLAVAIMKEMS

SEQ ID NO: 29025 - protein, 292 aa, Bradyrhizobium sp. BTAi1
MSNDRSFTAAMVQMRTALLPEPSLEQGTRLIREAVAQGAEYVQTPEVSNMMQLNRTALFAQLKSEEDDPSLKAYRALAKELGIHLHIGSLALRFSDEKAVNRSFLIGPDGTVLASYDKIHMFDIDLPGGESYRESANYQPGETAVISDLPWGRLGLTICYDVRFPALYRALAESGASFISVPSAFTRKTGEAHWHTLLRARAIETGCFVFAAAQCGLHENKRETFGHSLIIDPWGEILAEGGVEPGVIVARIDPARVETVRQTIPSLQHGRRFGIADPKAGPDYLHLVRGSA

SEQ ID NO: 29026 - protein, 502 aa, Caulobacter crescentus CB15
MATLEAFWRLTGAGWALVRADALIPRELEPLLPPSAKLAGRVLRLFAGPAARKGRPGERLAAVLERQGPAAIKMGQFLSTRADIFGAAFADDLSRLKDRLPAFPLSVAKAEIARNLGKPLDEIFAEIGEPVAAASLAQAHPATLVDGQKVAVKVLRPGVERQVARDTAVLRLAARLAETLVPVSRRLRPTEFVEVVIRALELEMDLRFEAAGCAELGEAMAKDPYMRAPAVCWEGVGKRVLTLSWAEGAPLSDPAALDLPGLDRKALAENVTRGFLAQALDHGLFHADLHEGNLFIAAPAAITAVDYGIVGRLGPGERRYLAEILYGFLNRDYARVAKIHFDAGYVPAHQDMDAFAQALRAVGEPVFGRNAREVSMGRLLAQLFEITALFDMALRPELVLLQKTMVTVEGVARRIDPTHDLWAAADPVVRRWIGRELSPAAKARDFAEEAIRAIKALARLAETPTTPPPVAAERLHTWPLLWFLVGAATAGAAFVTGVLLAR

SEQ ID NO: 29027 - protein, 146 aa, Vicia faba
MGFTQQQEALVNSSWESFKQNPSYSVLFYTIILEKAPAAKGMFSFLKDSAGVVDSPKLQAHAEQVFGMVRDSAIQLQATGEVVLKNGSLGAIHIQKGVVDPHFVVVKEALLKTIKEASGDKWSEELSIAWEVAYDGLATAIKKAMS

SEQ ID NO: 29028 - protein, 326 aa, Nitrosomonas europaea ATCC 19718
MGLLINGKWQDQWYTLQNGEFVRENAQYRHWVTPDGQPGPSGEGGFTAESGRYHLFVSLACPWAHRTLIFRHLKDLQAHIGITIVDPRMLEHGWAFSEISRDNPVQDIRYLHQLYTRAKPDYTGRVTVPVLWDKQRDTIVSNESADIIRMFNSAFDSLTGNDLDFYPEALRNEIGTINEVVYRDFNNGVYKAGFATDQLIYEKAYDRIFNRLDAIDDSLNTRRYLAGNRLTEADWRFFTTLIRFDAVYYSHFKLNKQRIEDYPNLSNYLRALYQISGIAGTVNFEHIKTHYYYSHSTINPTQIIPKGPDIDYTRPHNRVQAFSSPG

SEQ ID NO: 29029 - protein, 147 aa, Vicia faba
MGFTDKQEALVNSSWESFKQNLSGNSIFFYTIILEKAPAAKGLFSFLKDTAGVEDSPKLQAHAEQVFGLVRDSAAQLRAKGEVVLGNATLGAIHVQKGVTDPHFVVVKEALLQTIKKASGSNWSVELSTAWEVAYDGLASAIKKAMN

SEQ ID NO: 29030 - protein, 410 aa, Oryza sativa (japonica cultivar-group)
MAKATTMEGRPAKMGFRMPAEWEPHEQCWMGWPERRDNWRELAGPARKVFARTAIAISKFESVTICASAKQYPYVHELMLHQPNIRVVEMSMNDCWFRDIGPTFIVRKGAPGLGITEKNIAGIDWEFNAWGGATDGCYVDWSLDSYVAKKIVEIERIPRFPHTMVLEGGSIHVDGEGTCITTEECLLNPNRNPNMTKLEIENELKDFLGVAKVIWIPHGLYGDDDTNGHVDNLCCFIKPGVVLLSWTDDENDPQYQRSVDALSTLSKSVDAKGRQIEVVKIHVPGPLYMTKEESEGVVKTEHAIPREPGTRLAASYVNFYIANGGIVAPAFGDKWDEEACAVLQKAFPDHEVIFTDPFHFETLSSDAVISVCQRPQLKQAVAVGCYSAMATTSELKTVLGVLTEPVNFRW

SEQ ID NO: 29031 - protein, 146 aa, Vicia faba
MGFTEKQEALVNSSWELFKQNPGNSVLFYTIILKKAPTAKGMFSFLKDSAGVVDSPKLQAHAEKVFGMVRDSAVQLRASGEIVLGDATLGAIHIQKGVLDPHFVVVKEALLETIKEISGDKWSEELSAAWEVAYEGLAVAIKKAMS

SEQ ID NO: 29032 - protein, 142 aa, Streptococcus thermophilus
MLNKIQPRNSDTYSMTPFDFFEDFSRNLFNDFKSNLIKTDIHETDNEYLVEAELPGIPKENIQVTYEDGVLTISGQQQIDTVDEDKKGKLIRSERSSTSLRRQYLLENVKEDEIKASYSDGILKVTLPKDSNKEIKKSIPIE

SEQ ID NO: 29033 - protein, 534 aa, Zea mays
MAGGGGGGAAPKHDDFTPHPVKDQLPGVSYCITSPPPWPEAVLLGFQHYLVMLGTTVIIPTALVPQMGGNNEDKAVVIQTLLFVAGINTLLQSFFGTMLPAVIGGSYTFVLPTISIILAGRYANEPNPHIKFLRIMRGTQGALIVASALQIIVGFSGLWRNVARYLSPLSAAPLVALVGFGLYELGFPSVAKCVEIGLPQLILLVIFTMYLPHAVHMLKSIFDRFAVLFTIPIVWLYAYLLTVGGAYRNAPPKTQFHCRTDRSGLIGGAPWIRVPYPFQWGAPTFDAGEAFAMMAASFVALVESTGAFIAVSRYASATPIPPSVLSRGIGWQGIGILLDGLFGTGNGSSVSVENAGLLALTRVGSRRVVQISAGFMIFFSILGKFGAVFASIPAPIFAAMYCIFFAYAGSAGIGFLQFCNLNTFRTKFILGFSVFMGLSVPQYFNEYTSIAGYGPVHTHSRWFNDIVNVIFSSKAFVAGFVAYLLDNTIDRHEASVRRDRGYHWWDKFRSYRTDTRSEEFYSLPFNLNKFFPSV

SEQ ID NO: 29034 - protein, 280 aa, Corynebacterium efficiens YS-314
MSRYTDMFTRLDEAGEGAFVPFIMLNDPSPEDSFQIISTAIEAGADALELGVPFSDPVADGPTVAESHLRALDGGSTVDSCLALIARVREAYPEIPIGMLIYGNVPFTRGLDKFYREFAEAGADSILLPDVPVREGAPFIQAAEGAGIDPIFIAPAQASETTLEGVSAASKGYIYAISRDGVTGTERESSTTGLTDVVDNIKRFGGAPILLGFGISSPKHVADAIAAGAAGAITGSAITKIIASHCEGEHPNPSTITDPEGLRKELTEFISAMKAATKKQ

SEQ ID NO: 29035 - protein, 415 aa, Solibacter usitatus Ellin6076
MGLERRVVVTGVGLISPVGIGTENTWKAITAGKSGIASITQFDATDYDCQIAGEVKGFDPTNWIERKDVKKLGRFAQFAVAASQMALTDAGLKIDETNAERVGVLIGAGIGGFEVIEREYRTLMEKGPSRISPFFIPATIINLAAGQVSIRTGAKGPNSAVATACTTGAHAIGDAFKLIQRRAADAMICGGTEAAITPLGVAGFCAMRAMSTRNQDPERASRPWDRDRDGFVIGEGGGILILEERESALRRGAPIVAEIVGYGMSSDAYHLSAPLEDGDGILRVMRNALDDAGLVPEQIEYLNAHATSTPLGDRGEACAIMRLFGETPRRLAVSSTKSMTGHLLGGSGSLEAGLAVLAIRDQVAPPTINLENRDPEIWLDLVPKCARPLPITYAMSNSFGFGGTNGCLIFHSHSI

SEQ ID NO: 29036 - protein, 439 aa, Arabidopsis thaliana
MDKNGIVLMRKYELGRLLGQGTFAKVYHARNIKTGESVAIKVIDKQKVAKVGLIDQIKREISVMRLVRHPHVVFLHEVMASKTKIYFAMEYVKGGELFDKVSKGKLKENIARKYFQQLIGAIDYCHSRGVYHRDLKPENLLLDENGDLKISDFGLSALRESKQQDGLLHTTCGTPAYVAPEVIGKKGYDGAKADVWSCGVVLYVLLAGFLPFHEQNLVEMYRKITKGEFKCPNWFPPEVKKLLSRILDPNPNSRIKIEKIMENSWFQKGFKKIETPKSPESHQIDSLISDVHAAFSVKPMSYNAFDLISSLSQGFDLSGLFEKEERSESKFTTKKDAKEIVSKFEEIATSSERFNLTKSDVGVKMEDKREGRKGHLAIDVEIFEVTNSFHMVEFKKSGGDTMEYKQFCDRELRPSLKDIVWKWQGNNNNSNNEKIEVIH

SEQ ID NO: 29037 - protein, 541 aa, Bifidobacterium longum NCC2705
MAKIISYDEEARQGMLEGLDKLANTVKVTLGPKGRNVVLDKTYGAPTITNDGVSIAKEIDLEDPYERIGAELVKEVAKKTDDVAGDGTTTATVLAQSLVHEGLKNVVAGSNPIALRRGIEKATEVIVKELVAAAKDVETKDQIAATATISAADPEVGEKIAEALDKVGQDGVVTVEDNNRFGLDLDFTEGMRFDKGYIAPYFVTNADDQTAVLEDPYILLTSGKVSSQQDIVHVAELVMKTGKPLLIIAEDVDGEALPTLILNNIRGTFKSCAVKAPGFGDRRKAMLQDMAILTGAQVVSDELGLKLESVDTSVLGHAKKVIVSKDETTIVQGAGSKEDIDARVAQIRAEIENTDSDYDREKLQERLAKLAGGVAVIKVGAATEVEAKERKHRIEDAVRNAKAAIEEGLLPGGGVALVQAAAKAEKTEAVTSLTGEEATGAAIVFRAIEAPIKQIAENAGVSGDVVINTVRSLPDGEGFNAATDTYEDLLAAGVTDPVKVTRSALQNAASIAGLFLTTEAVVANKPEPKSAAPAAGADMGY

SEQ ID NO: 29038 - protein, 579 aa, Saccharomyces cerevisiae
MKYVVVSGGVISGIGKGVLASSTGMLMKTLGLKVTSIKIDPYMNIDAGTMSPLEHGECFVLDDGGETDLDLGNYERYLGVTLTKDHNITTGKIYSHVIAKERKGDYLGKTVQIVPHLTNAIQDWIERVAKIPVDDTGMEPDVCIIELGGTVGDIESAPFVEALRQFQFKVGKENFALIHVSLVPVIHGEQKTKPTQAAIKGLRSLGLVPDMIACRCSETLDKPTIDKIAMFCHVGPEQVVNVHDVNSTYHVPLLLLEQKMIDYLHARLKLDEISLTEEEKQRGLELLSKWKATTGNFDESMETVKIRLVGKYTNLKDSYLSVIKALEHSSMKCRRKLDIKWVEATDLEPEAQESNKTKFHEAWNMVSTADGILIPGGFGVRGTEGMVLAARWARENHIPFLGVCLGLQIATIEFTRSSLGRKDSHSAEFYPDIDEKNHVVVFMPEIDKETMGGSMRLGLRPTFFQNETEWSQIKKLYGDVSEVHERHRHRYEINPKMVDELENNGLIFVGKDDTGKRCEILELKNHPYYIATQYHPEYTSKVLDPSKPFLGLVAASAGILQDVIEGKYDLEAGENKFNF

SEQ ID NO: 29039 - protein, 113 aa, Calonectria hongkongensis
GGKAPRKQLASKAARKSAPSTGGVKKPHRYKPGTVALREIRRYQKSTELLIRKLPFQRLVREIAQDFKSDLRFQSSAIGALQESVESYLVSLFEDTNLCAIHAKRVTIQSKDI

SEQ ID NO: 29040 - protein, 263 aa, Mycobacterium bovis AF2122/97
MILDMFRLDDKVAVITGGGRGLGAAIALAFAQAGADVLIASRTSSELDAVAEQIRAAGRRAHTVAADLAHPEVTAQLAGQAVGAFGKLDIVVNNVGGTMPNTLLSTSTKDLADAFAFNVGTAHALTVAAVPLMLEHSGGGSVINISSTMGRLAARGFAAYGTAKAALAHYTRLAALDLCPRVRVNAIAPGSILTSALEVVAANDELRAPMEQATPLRRLGDPVDIAAAAVYLASPAGSFLTGKTLEVDGGLTFPNLDLPIPDL

SEQ ID NO: 29041 - protein, 237 aa, Desulfotalea psychrophila LSv54
MGINYFNTLPLRRQIEELSKCRFMDSSEFAGVEALKGKKIVVVGCGAQGLNQGLNLRDSGLDVSYALRDSAIAEKRQSWKNASENSFTVGTYQEVIPTADLVINLTPDKQHSNVVTAVMPLMKKGACLSYSHGFNIVEEGMQIREDLTVVMVAPKSPGTEVREEYKRGFGVPTLIAVHSENDPNGEGWDIAKAYCCGTGGDKAGVLESSFVAEVKSDLMGEQTILCGMLQRRFYPLL

SEQ ID NO: 29042 - protein, 112 aa, Calonectria hongkongensis
GGKAPRKQLASKAARKSAPSTGGVKKPHRYKPGTVALREIRRYQKSTELLIRKLPFQRLVREIAQDFKSDLRFQSSAIGALQESVESYLVSLFEDTNLCAIHAKRVTIQSKD

SEQ ID NO: 29043 - protein, 137 aa, Penicillium rivolii
QVSEYKEAFSLFDKDGDGEITTKELGTVMRSLGQNPSESELQDMINEVDADNNGTIDFPEFLTMMARKMKDTDSEEEIREAFKVFDRDNNGFISAAELRHVMTSIGEKLSDDEVDEMIREADQDGDGRIDYNEFVQL

SEQ ID NO: 29044 - protein, 570 aa, Oryza sativa (japonica cultivar-group)
MAASSRHGPFINWSDGLFLFLSSSSSRNRFLRVFLPFPDPSTMMAGLEVATTAVTGGDASLVVVVGVLFLMVAVVVMTRLGDGGAAPSPPAMPVLGHLHLIKKPLHRSLAEVAARVGAAPVVSLRLGARRALLVSTHAAAEECFTACDAAVAGRPRLLAGDVLGYGHTTVVWASHGDHWRALRRLLGVELFSNARLAALAADRRAEVASLVDAVLRDAAAGGGGGGTVTLRPRLFELVLNVMLRAVTARRHAGDETRRFQEIVEETFAASGSPTVGDFFPALRWVDRLRGVVATLQSLQKRRDAFVAGLVDDHRRTRRAAAAAADKDQKKNGIIDALLTLQETDPDHYTDNVVKGIVLVLLTAGTDTSALTTEWAMAQLVAHPEAMTKVRAEIDANVGAARLVEEADMASLPYLQCVVKETLRLRPVGPVIPAHEAMEDCKVGGYHVRRGTMILVNAWAIHRDGDVWGSPEEFRPERFMDDGAGAGAVTAVTAPMLPFGLGRRRCPGEGLAVRLVGLTVAALVQCFDWEIGEGGAVDMAEGGGLTMPMATPLAAVCRPREFVKTVVSDCF

SEQ ID NO: 29045 - protein, 108 aa, Cylindrocladium indonesiae
PRKQLASKAARKSAPSTGGVKKPHRYKPGTVALREIRRYQKSTELLIRKLPFQRLVREIAQDFKSDLRFQSSAIGALQESVESYLVSLFEDTNLCAIHAKRVTIQSKD

SEQ ID NO: 29046 - protein, 263 aa, Arabidopsis thaliana
MLGIFSGAIVSPPEELVAAGSRTPSPKTTGSTLVNRFVEKNPSAVSVQVGDYVQLAYSHHNESPLRPRSFGAKDEIFCLFQGSLDNLGSLKQQYGLAKNANEVLLVIEAYKTLRDRAPYPANHVVAHLSGDFAFVVFDKSTSTLFVASDQVGKVPLYWGITADGYVAFADDVDLLKGACGKSLASFPQGCYYSTALGGLRSFENPKNKITAVPANEGEIWGATFKQHLKSLYNTNFGGGNRWKEQQFLQIENERETQKKFHVS

SEQ ID NO: 29047 - protein, 134 aa, Penicillium jensenii
EYKEAFSLFDKDGDGQITTKELGTVMRSLGQNPSESELQDMINEVDADNNGTIDFPEFLTMMARKMKDTDSEEEIREAFKVFDRDNNGFISAAELRHVMTSIGEKLTDDEVDEMIREADQDGDGRIDYNEFVQL

SEQ ID NO: 29048 - protein, 334 aa, Acinetobacter sp. ADP1
MILVTGGLGFLGSHIALSLLAQGQEVILVDNLANASLQTLERLEYISGMYIPFVKVDVRNTPALNKVFEQYSIDAVIHTASFKALEESKLKPLEYYNDNVSCIMSLLRSMQRTGVRKLVHLSSLMVYGKSSSKLTEDEPFDTVYPNPYIKSQQMIEEIIRDTFKTDHEWKIAILRLSNIAGAFEHGVLGEMITQLPKNIIPLAMQVAAMQRDYLELQRQADTTDQTVERSFLHVLDVCEAVFASLYWLNQQDHCCESFNIAHNEVTSIQQLLEVISQVTQTQINTHDAMYPTEELAQVGANIDKAKQVLNWQPKRTLQQMIEHQWQFYQNTLKG

SEQ ID NO: 29049 - protein, 333 aa, Oryza sativa
MGKPGKLALPSHESTIGKFLTQSGTFKDGDLLVNKDGLRIVSQSEEGEEPLDHNQLSLDDLDAIKVIGKGSSGIVQLVRHKWTGQFFALKVIQLNIQENIRRQIAQELKISLSTQCQYVVACCQCFYVNGVISIVLEYMDSGSLSDFLKTVLKGLMYLHHEKHIIHRDLKPSNILINHMGEVKISDFGVSAIIASSSAQRDTFTGTYNYMAPERISGQKHGYMSDIWSLGLVMLELATGEFPYPPRESFYELLEAVVDHPPPSAPSDQFSEEFCSFVSACIQKNASDRSSAQILLNHPFLSMYDDLNIDLASYFTTDGSPLATFNTSNRYDDR

SEQ ID NO: 29050 - protein, 444 aa, Candida albicans SC5314
MVNLLKKLHITKSHQSNQSNSDSNSLNSNTSMDNHQQQQQLQHQQYQQQFQQPQQQLYPGEQIVHPAAAQTGQNTTNVTAVSSSNITQSATSSLHSQQLQHVDVSKSAAEEAIRRSLLPERSTVSKGKYSLTDFSIMRTLGTGSFGRVHLVRSVHNGRYYAIKVLKKHQVVKMKQVEHTNDERRMLKLVEHPFLIRMWGTFQDSKNLFMVMDYIEGGELFSLLRKSQRFPNPVAKFYAAEVTLALEYLHSHDIIYRDLKPENILLDRNGHIKITDFGFAKEVSTVTWTLCGTPDYIAPEVITTKPYNKSVDWWSLGVLIFEMLAGYTPFYDSTPMKTYEKILAGKIHYPSFFQPDVIDLLTKLITADLTRRLGNLINGPADIRNHPWFSEVVWEKLLAKDIETPYEPPITAGVGDSSLFDHYPEEQLDYGSQGEDPYASYFLDF

SEQ ID NO: 29051 - protein, 388 aa, Prunus armeniaca
YFDGWKAYDRNPFHPTKNPEGVIQMGLAENQLSFDLIEERIKKNPKASICTPEGVEEFKNVAIFQDYHGFPEFRKAVAMFMSKARGGRVTFDPNRVVMSGGATGANELVMFCLADPGDAFLVPSPYYPAFFRDLGWRTGVQIVPVDCHSSNNFKITKEALEAAYEKAQKNNIKVKGLIITNPSNPLGTTLDRDTLESLVEFINQKNIHLVCDEIYAATVFSSPTFTCISEVIQNMNCNPNLIHIVYSLSKDMGLPGLRVGIVYSYNDDVVNIGRKMSSFGLVSSQTQHMLASMLLDEEFVARFLETSSKRLANRHGVFTKGLEEVGINCLKSNAGLFCWMDLRRLLKDQTFDGEMVLWRVIVNEVGLNVSPGSSFKCVEPGWFRVCFA

SEQ ID NO: 29052 - protein, 299 aa, Glycine max
  misc_feature (83)..(83): Xaa can be any naturally occurring amino acid
  misc_feature (128)..(128): Xaa can be any naturally occurring amino acid
  misc_feature (243)..(243): Xaa can be any naturally occurring amino acid
  misc_feature (246)..(246): Xaa can be any naturally occurring amino acid
  misc_feature (253)..(253): Xaa can be any naturally occurring amino acid
  misc_feature (255)..(255): Xaa can be any naturally occurring amino acid
  misc_feature (267)..(268): Xaa can be any naturally occurring amino acid
  misc_feature (270)..(270): Xaa can be any naturally occurring amino acid
  misc_feature (274)..(277): Xaa can be any naturally occurring amino acid
  misc_feature (279)..(282): Xaa can be any naturally occurring amino acid
  misc_feature (284)..(285): Xaa can be any naturally occurring amino acid
  misc_feature (288)..(288): Xaa can be any naturally occurring amino acid
  misc_feature (291)..(292): Xaa can be any naturally occurring amino acid
  unsure (1)..(299): unsure at all Xaa locations
TWFVEVLAATQTPGEAGKKWFQGTADAVRQFIWVFEDAKNKNVEHILILSGDHLYRMDYMDFVQRHVDTNADITVSCVPMDDXRIIQFAEKPKGSDLKAMRVDTTLLGLLPQEAEKHPYIASMGVYVXRTETLLQLLRWKCSSCNDFGSEIIPSAVNEHNVQAYLFNDYWEDIGTIKSFFDANLALTEQPPKFESYDPKTPFFTSPRFLPPTKVEKCKIVDAIISHGCFLRECSVQHSIVGVXSRXESGVELXDXMMMGADYYHTEXXIXSLGXXXXVXXXXGXXTIXRTXXPTGLQMP

SEQ ID NO: 29053 - protein, 355 aa, Bradyrhizobium japonicum USDA 110
MSEMILVTGGAGYIGSHVCIALLDAGFDVVVVDNLSNSNKASLERVQSICGRSLVFRHADIRNEELIYDMLRTCGVTAVIHLAGLKAVGDSNVRPMMYYENNVLGTMRLLSAMERANVTTLVFSSSATVYGMPQYLPLDEKHPLGPTNPYGRTKLVIEEMLKDLCRSHDGWRIGNLRYFNPVGAHESGLVGEDPLGVPSNLVPFVAQVAIGRREKLRIWGNDYDTPDGTGIRDFIHVVDLASGHLSALRQLRQPGLITVNLGTGNGSSVLDIVRTFESVSGRSIPYEIGERRAGDVAACYADPTVAKDALGWASTRSLEQMCADHWRWQLQNPNGYQGGELPRARERSRHLRRHA

SEQ ID NO: 29054 - protein, 492 aa, Arabidopsis thaliana
MDPYRVRPSSAHDSPFFTTNSGAPVWNNNSSLTVGTRGPILLEDYHLLEKLANFDRERIPERVVHARGASAKGFFEVTHDITQLTSADFLRGPGVQTPVIVRLSTVIHERGSPETLRDPRGFAVKFYTREGNFDLVGNNFPVFFVRDGMKFPDMVHALKPNPKSHIQENWRILDFFSHHPESLHMFSFLFDDLGIPQDYRHMEGAGVNTYMLINKAGKAHYVKFHWKPTCGIKCLSDEEAIRVGGANHSHATKDLYDSIAAGNYPQWNLFVQVMDPAHEDKFDFDPLDVTKIWPEDILPLQPVGRLVLNKNIDNFFNENEQIAFCPALVVPFIHYSDDNVLQTRIFSYADSQRHRLGPNYLQLPVNAPKCAHHNNHHDGFMNFMHRDEEVNYFPSRLDPVRHAEKYPTTPIVCSGNREKCFIRKENNFKQPGERYRSWDSDRQERFVKRFVEALWEPRVTHEIRSIWISYWSQADKSLGQKLATRLNVRPNF

SEQ ID NO: 29055 - protein, 368 aa, Prunus armeniaca
QMGLAENQVSFDLLEKYLELEKHSKSSNLGSKGVSGFKKNALFQNYHGLLSFKKAMAIFMDQIKGGRAKFDPDRVFLTAGATAANELLTFIIADPGDALLVPTPYYPGFDKNLRWRTGVNIVPIHTDSSNNFQVTPQALEAAYKEAEAKNMKVRGVLITNPSNPLGATIQRQVLERILGFVTQKNIHLVSDEIYSGSAFSSSEFISVAEILESQQYKNSERVHIVYSLSKDLGLPGFRVGTVYSYNDKVVTTARRMSSFTLISSQTQHLLASMLSDKEFTENYIKTNRERLRKRYDMIIEGLKKAGIECLRGNAGLFCWMNLSPLLEKPTRGGELALWDSMLHEVKLNISPGSSCHCSEPGWFRVCFA

SEQ ID NO: 29056 - protein, 403 aa, Caulobacter crescentus CB15
MRRVVVTGLGIVSSIGNNAHEVLASLREAKSGVIAAPEYAELGFRCQVHAAPQIDWEAMVDRRAARFLAPGTAYAHIAMEQAIADSGLSETELSHERTGLIVGSGGPSTRVIIDAAAITREKGPKRIGPFAVPKAMSSGPSAVLSTWFKIRGINYSISSACATSAHCIGAAAEQIQMGKQDVVFAGGCEELDWSLSNLFDAMGAMSSNFNDRPAVASRAYDKNRDGFVIAGGAGIVVLEEYERAKARGAKIYGEVVGYAANSDGYDMVAPSGEGAARCMRLAMAEAGNRAIDYLNPHGTSTPVGDSKEMGAVREVFGDKAPMISSTKSLTGHSLGAAGAQEAIYSILMLNNDFAAESANIEELDPEFADLPILRQRVDKPLETVMSNSFGFGGTNGTLIFSRV

SEQ ID NO: 29057 - protein, 471 aa, Pseudomonas aeruginosa UCBPP-PA14
MSSVGEQKVQDGSLKRELGERHIRLMALGACIGVGLFLGSAKAIQMAGPAIMISYILGGLAILVIMRALGEMAVHNPVAGSFSQYAKDYLGPLAGFITGWNYWFLWLVTCVAEITAVAVYMGIWFPDVPRWIWALAALASMGTINLIAVRAFGEFEFWFALIKIVTILAMVVVGIGMIAFGFGNDGIATGISNLWAHGGFMPNGIQGVLMSLQMVMFAYLGVEMIGLTAGEARNPTKTIPSAINSVFWRILLFYVGSLFVIMSLYPWNEIGTQGSPFVMTFERMGIKTAAGIINFVVITAALSSCNGGIFSTGRMLYSLAQHRQAPAFFGKASRSGVPRRALILSILALLLGVLLNYLVPEKVFVWVTSIATFGAIWTWAMILLAQLRFRKTLSPAECDKLQYRMWLYPLSSYLALAFLVMVVVLMAFFEDTRIALYIGPPFILLLTVLYYAFNLAPKEPAGTGSVSRAAS

SEQ ID NO: 29058 - protein, 231 aa, Glycine max
EEIQKQILEPAIKGTVNVLKAAKEAGVERVVATSSISSIMPSPNWPADKIKAEECWTDLEYCKQKGLYYPIAKTLAEKAGWEFAKETGFDVVMINPGTALGPLLPPRINSSMEMLVSVLKGGKETYEDFFMGMAHFKDIALAHILALENKKAAGRHLCVESIRHFSDLVDKVSELYPEYDVVKLPKDTQPGLLRASTKDASTKLIDLGLEFTPVDQIIKDAVESLKSKGYV

SEQ ID NO: 29059 - protein, 352 aa, Oryza sativa (japonica cultivar-group)
MAATGDSSGALVCVTGGSGFIGSWLVRLLLDRGYTVHATVKNLQDDGETRHLQALDGADTRLRLFQMDLLDPASITPAVDGAHGVFHLASPLTLHPTQDPEATNSPFTIAQLQLQYCLHTCTNAVLSGELLKPAVSGTLNVLRAAKDCGVARVMLMASQVAIVPNPEWPADKVIDDDSWADVELLKKHQHWYNVSKTLAEKAAWDFAAKEGLQLVALNPGLVLGPMLMPSPTSSLHMLLQILGGQRFDIDDFYIGCVDVRDVAQSAVVIYENTSAQGRHLCIESIERLIDFHDKLAELYPEFPIHRIQEDKQGWVVRSKAASKKLIDLGVHFIPFEKTIRDSVDCLRSKGYI

SEQ ID NO: 29060 - protein, 1229 aa, Methanosarcina barkeri str. fusaro
MGPEFQAYVGPRPFEQEDKFIFFGRDREARDLLSLVIAHNLVLVYAQSGAGKTSLLNAGLIPLLEENQFEVFPIVRVKGTILENITTDEISNIYVFNTLASWDEGDYDVESLAKMKLVDFLNEQEHMLDEDGMPLPRAVIFDQFEEIFSLYQDRWKDREGFFEQVSAALEADPLLRVIFVMREDFIAQLDPYVYLLPERLRTRFHMERLRSEAALLAIKEPLRYTGRSFAEGVAEKLVEDLLKIRVETAPGETAEVTGEFIEAVQLQVVCQNLWRELPPDITQITFQHLKTYGNVEQELYRFYEEAIEVATEKTRVDEEGLRRLCGEVLITTMGTRGMVYRAPEYTYGVPNTAIDVLESMHLIRAEWRAGARWYELTHDRFIEPILSSNKVFNDKLAEKKRVEKERAEKERAEKEWAEKEQLEKERLEKEWAERKRAEKERSRNRVIKGLAAISIIILILALSTTYLWIQTEQNKKGALASYLNAKSQNLQEYPTTLDESILLAIESFRISETLHDERLRQELSLDADKLIRQELLSIPHRVVVLNHNGWVNNVVFSPDGKYAATASNDNTARLWDADTGKQIFVLNHSGWVNNVVFSPDGKYAATASNDNTARLWDADTGKQIFVLNHGDWVNNVVFSPDGKYVATASNDNTARLWDADTGKQIFVLNHNGSVNNAVFSPDGKYIATASNDNTARLWNADTGKQIFVLNHNGSVNNAVFSPDGKYIATASNDNTAGLWDADTGKQIFVLNHGSWVNNVVFSPDGKYIATASFDNTARLWDIATGNSIFALNHDSWVYDVMFSPDGKYVATASGDNTARLWDTDTGNPILIMNHNGSVNNVVFSRDGKYIATASDDKTAGLWDIAATEVLNHNGPVYGVVFSRDEKYVATASGDNTARLWDTDTGKQIFVLNHNGPVYNVVFSPGGKYVATASKDNTARLWNADTGKQIFVLNHNGRVYNAVFSPDGKYIATASGDDTARLWDTDTGKQIFVLNHSGWVYDVVFSPDGKYIATASFDNTARLWNAATGEQIFVLRHSDKVLSAVFSPDGKYVATASNDNTARLWDADTGKQIFVLNHGSWVNNVVFSPDGKYIATASNDNTARLWDADTGKQIFVLNHSGWVNNVVFSRDGKYIATASYDKTARLWNADTGKQVFVLNHNGPVYKVVFSSDGKYVATASDDNKARLWIHNKTEDLIHEAGNRLTRNLNKEEWKNYMFDEPYDKTFPNLP

SEQ ID NO: 29061 - protein, 234 aa, Exiguobacterium sp. 255-15
MSNFTSELIGTMILILLGDGVVAGVVLRKTKSENGGWIVITFAWGLAVMTGAYIAASSGAHLNPALTLALAMNSDLPWADVPVYIAGQLIGAFIGAVLVWLHYMKHFEATDDQAAKLGVFATGPAIRHTPSNLISEIIGTFVLVFGILSFGLTTFGDGLKPFIVGLLVVVIGLSLGGTTGYAINPARDLGPRIAHAILPIKGKGSSDWSYSWIPIVGPIIGGGVAVLLYQLLQN

SEQ ID NO: 29062 - protein, 440 aa, Chlamydophila pneumoniae AR39
MLNCSNQKHTVTFEEACQVFPGGVNSPVRACRSVGVTPPIVSSAQGDIFLDTHGREFIDFCGGWGALIHGHSHPKIVKAIQKTALKGTSYGLTSEEEILFATMLLSSLKLKEHKIRFVSSGTEATMTAVRLARGITNRSIIIKFIGGYHGHADTLLGGISTTEETIDNLTSLIHTPSPHSLLISLPYNNSQILHHVMEALGPQVAGIIFEPICANMGIVLPKAEFLDDIIELCKRFGSLSIMDEVVTGFRVAFQGAKDIFNLSPDITIYGKILGGGLPAAALVGHRSILDHLMPEGTIFQAGTMSGNFLAMATGHAAIQLCQSEGFYDHLSQLEALFYSPIEEEIRSQGFPVSLVHQGTMFSLFFTESAPTNFDEAKNSDVEKFQTFYSEVFDNGVYLSPSPLEANFISSAHTEENLTYAQNIIIDSLIKIFDSSAQRFF

SEQ ID NO: 29063 - protein, 151 aa, Salmonella enterica
GLWEICIIWGLGISLAVYLTAGISGGHLNPAVTIALWLFACFPKQKVLPYIIAQFAGAFGGALLAYVLYSSLFTEFETAHHMVRGSVESLQLASIFSTYPAAALNVWQAALVEVVITSILMGMIMALTDDGNGIPKGPLAPLLIGILVAVI

SEQ ID NO: 29064 - protein, 102 aa, Chlamydophila pneumoniae AR39
MSDQATTLRIKPLGDRILVKREEEEATARGGIILPDTAKKKQDRAEVLVLGTGKRTDDGTLLPFEVQVGDIILMDKYAGQEITIDDEEYVILQSSEIMAVLK

SEQ ID NO: 29065 - protein, 685 aa, Mannheimia succiniciproducens MBEL55E
MKKSLLYLCLFTSSAAFAQGWQHTHFQHFNDNAESNLFQSQTPLGKGNYPLTFTLDNQCYQPQSAVKLNQTVSLIPCSGEAPQLRLFRQGNYIAQIDMRSGTPTLRISVEQRAENDNNTVKSCPVWNKQPIEIDVSSTFTEGESVRDFYSGQTAKVKNGKVTMMPAENAGGLILLEKSADKKTEVFDWKNATVYFVLTDRFHNGNPANDNSYGRHKDGMQEIGTFHGGDLQGLTAKLDYLQQLGVNVLWISSPLEQMHGWVGGGNKGDFPHYGYHGYYHLDWTKLDANMGTEADLKNLMRQAHRRGIRVLFDVVMNHTGYATLADMQEFNFGDFYLKPEEMAATLGKKWTTWQPQKGQNWHSFNDFIKFGDSKAWQNWWGKDWVRADIGDYDSPKFDDLKMSLSALPDLKTESESAVKLPRFFQHKNTNAKELANAKVRDYLITWLTDWVRRYGVDGFRVDTAKHVEKPTWLALKQASQQALKEWQQKNPQESFGDDFWMTGEAWGHGVFKSDYYQNGFDAMINFDFQDQAKNALDCFARIDPVYQDMSNKLKDFNVLSYLSSHDTRLFFHSDSERNAVKQKTAANLLLLSSGAVQIYYGDESGREFGATGSDPVQGTRSDMNWKELQNDQSKQALHQHWQKLAQFRQRHRAVGAGVHQTLKSEGYFAFSRTLGEDKVMVVWAGN

SEQ ID NO: 29066 - protein, 544 aa, Chlamydophila pneumoniae AR39
MAAKNIKYNEEARKKIHKGVKTLAEAVKVTLGPKGRHVVIDKSFGSPQVTKDGVTVAKEIELEDKHENMGAQMVKEVASKTADKAGDGTTTATVLAEAIYSEGLRNVTAGANPMDLKRGIDKAVKVVVDELKKISKPVQHHKEIAQVATISANNDSEIGNLIAEAMEKVGKNGSITVEEAKGFETVLDVVEGMNFNRGYLSSYFSTNPETQECVLEDALILIYDKKISGIKDFLPVLQQVAESGRPLLIIAEEIEGEALATLVVNRLRAGFRVCAVKAPGFGDRRKAMLEDIAILTGGQLVSEELGMKLENTTLAMLGKAKKVIVTKEDTTIVEGLGNKPDIQARCDNIKKQIEDSTSDYDKEKLQERLAKLSGGVAVIRVGAATEIEMKEKKDRVDDAQHATIAAVEEGILPGGGTALVRCIPTLEAFLPMLANEDEAIGTRIILKALTAPLKQIASNAGKEGAIICQQVLARSANEGYDALRDAYTDMIDAGILDPTKVTRSALESAASIAGLLLTTEALIADIPEEKSSSAPAMPSAGMDY

SEQ ID NO: 29067 - protein, 321 aa, Brassica rapa
MLKEESNESGGTRACDTCRSAACTIYREADSTYLCTTCDARVHAAKRVRVCDSCESAPAAFFCKADAAPLCTACDAEIHSANPLARRHQRVPITSNSCGSMATDGDNNVMMVSEEKEDADEVASWLMLNPGKNNQNNGFLFGVEYLDLVDYSSSIDNQFEDQYNHYQRSFGGGEDGVVPLQLEESTSHMQQSQHNFHLGVNYGFSTEPHYSYISVVPESTSSDTTVQHAKETMDQVSGPPTQMVQQLTPADREARVLRYREKKKRRKFEKTIRYASRKAYAEVRPRIKGRFAKRIDMEADAEQLFSTSLMSNTSYGIVPSF

SEQ ID NO: 29068 - protein, 1124 aa, Arabidopsis thaliana
MNSPASDETAPRRNRRKVSRKNYDENAMDELIEKQLGGKAKKKYRTKQDLEKETETEALIALSVGFPIDELLEEEIRAGVVRELGGKEQNDYIVVRNHIVARWRGNVGIWLLKDQIRETVSSDFEHLISAAYDFLLFNGYINFGVSPLFAPYIPEEGTEGSVIVVGAGLAGLAAARQLLSFGFKVLVLEGRSRPGGRVYTQKMGGKDRFAAVELGGSVITGLHANPLGVLARQLSIPLHKVRDNCPLYNSEGVLVDKVADSNVEFGFNKLLDKVTEVREMMEGAAKKISLGEVLETLRVLYGVAKDSEERKLFDWHLANLEYANAGCLSNLSAAYWDQDDPYEMGGDHCFLAGGNWRLINALAEGLPIIYGKSVDTIKYGDGGVEVISGSQIFQADMILCTVPLGVLKKRSIKFEPELPRRKQAAIDRLGFGLLNKVAMLFPSVFWGDELDTFGCLNESSINRGEFFLFYAYHTVSGGPALVALVAGEAAQRFECTEPSVLLHRVLKKLRGIYGPKGVVVPDPIQTVCTRWGSDPLSYGSYSHVRVGSSGVDYDILAESVSNRLFFAGEATTRQHPATMHGAYLSGLREASKILHVANYLRSNLKKPVQRYSGVNINVLEDMFKRPDIAIGKLSFVFNPLTDDPKSFGLVRVCFDNFEEDPTNRLQLYTILSREQANKIKELDENSNESKLSCLMNTLGLKLMGANSVLDTGEQPFLRTSTPKLLKLERMTTMGDLPGDLVEEILSRVPLTSLRAIRSTCQKWNSLSKSQICGRKATAAENKFLGFMMKDSRVCSMKFDLQGIRNDDGELVEPSIKQVSKLDQIEVSQVFHCDGLVLCIIKDNTGLLVWNPYLGQTRWIHPRNNYQIEDRYALGYDNNRNHKILRIFDLYPSSNRVFGYEVYDFSSNSWKVLDVIPEWDIQSHFRGASLKGNAYFPAQKKETVGGIKTINIEDVLLCFDFTRERFGPPLPLPFHSYNADFFVSLACVREEQLAVLYQRWGAFETIEICVTNKIDPNTVSWSKFLITSTGFPVDTFSGSFFIDEEKKVAVVFDLDRYKPTETCRYQIVYIIGQDEYFKSVNMGVAPNIAKNSYQAYCVPLVCSSSYVPSLVQLQINKPGKRKESN

SEQ ID NO: 29069 - protein, 364 aa, Candida tropicalis
MTANPSLVLNKVDDISFEEYEAPKLESPRDVIVEVKKTGICGSDIHYYAHGSIGPFILRKPMVLGHESAGVVSAVGSEVTNLKVGDRVAIEPGVPSRFSDETKSGHYHLCPHMSFAATPPVNPDEPNPQGTLCKYYRVPCDFLFKLPDHVSLELGAMVEPLTVGVHGCKLADLKFGEDVVVFGAGPVGLLTAAVARTIGAKRVMVVDIFDNKLKMAKDMGAATHIFNSKTGGDYQDLIKSFDGVQPSVVLECSGAQPCIYMGVKILKAGGRFVQIGNAGGDVNFPIADFSTRELALYGSFRYGYGDYQTSIDILDRNYVNGKDKAPINFELLITHRFKFKDAIKAYDLVRAGNGAVKCLIDGPE

SEQ ID NO: 29070 - protein, 186 aa, Triticum aestivum
ADVLLWKDKKTSAVVIGGATVIWVLFEVLDYHLLTLISHALIGVLAILFLWSKATTFIRKSPPDIPVVQIPEDLVVNVSRALCNDINRALHLFHEIAMGHDLKKFLFVIVGLWVNSVFGSSCDFLTLIYIAVLLLHTVPILYDKYQDKVDHFAGRAHTEALKQYEVLDAKVLSKIPRGPVKSKKQN

SEQ ID NO: 29071 - protein, 508 aa, Vicia faba var. minor
MSSIVTSGVINVPRSSSSSKNLSFSSSSQLSGNKILTVSGNGAPRGRCTLKHVFLTPKAVSDSQNSQTCLDPDASRSVLGIILGGGAGTRLYPLTKKRAKPAVPLGANYRLIDIPVSNCLNSNISKIYVLTQFNSASLNRHLSRAYASNLGGYKNEGFVEVLAAQQSPENPNWFQGTADAVRQYLWLFEEHNVLEYLILAGDHLYRMDYEKFIQAHRESDADITVAALPMDEKRATAFGLMKIDEEGRIIEFAEKPKGEQLKAMKVDTTILGLDDERAKEMPFIASMGIYVISKNVMLDLLRDKFPGANDFGSEVIPGATSIGMRVQAYLYDGYWEDIGTIEAFYNANLGITKKPVPDFSFYDRSSPIYTQPRYLPPSKMLDADITDSVIGEGCVIKNCKIFHSVVGLRSCISEGAIIEDTLLMGADYYETEADKRFLAAKGSVPIGIGKNSHIKRAIVDKNARIGENVKIINSDNVQEAARETEGYFIKSGIVTIIKDALIPSGTVL

SEQ ID NO: 29072 - protein, 183 aa, Zea mays
MGAAESVPETSIHEFTVKDCNGKEVSLETYKGKVLLVVNVASKCGFTETNYTQLTELYQKYRDKDFEILAFPCNQFLRQEPGTDQQIQDFACTRFKAEYPVFQKVRVNGPDAAPVYKFLKASKPGLFGSSRIKWNFTKFLVGKDGKVIERYGTSTAPMAIEVSFPLCLCLSLPLSRRLPTFSF

SEQ ID NO: 29073 - protein, 267 aa, Candida albicans SC5314
MSTTVFVAGAGGYIGKHIVSQLLSKGYTVIGSVRNDEKGERLVSLFENDNFTYVVVEEAEAKGAFDKPLKDHPHIKVFIDTASPLPIGVNYEKQLIRRTSKGIKYILSSIKDHGPNITKVVVTSSIASCMNEKQSHDPNFVVDESKWNPDKHSVGKNNPTSAYFYAKASAEHEAWDFMKKKTHFTLATILPGYTFGPQCFDEDVSDLLETSVEIVTKIFELNKNDPIPKESGLFVDVRDVAAAHIRAFELNEAQNKRLMLVTEPFSA

SEQ ID NO: 29074 - protein, 512 aa, Vicia faba var. minor
MAAIGVLKVPPSSSSSSSSSSSKAIARNLSFTSSHLSGDKIFTLSGRTRRTSGRNPFIVSPKAVSDSKNSQTCLDPDASRSVLGIILGGGAGTRLYPLTKKRAKPAVPLGANYRLIDIPVSNCLNSNISKIYVLTQFNSASLNRHLSRAYASNLGGYKNEGFVEVLAAQQSPENPNWFQGTADAVRQYLWLFEEHNVLEYLVLAGDHLYRMDYERFIQAHRESDADITVAALPMDEARATAFGLMKIDEEGRIIEFSENPKGEQLKAMKVDTTILGLDDDRAKEMPYIASMGIYVVSKHVMLDLLRDKFPGANDFGSEVIPGATELGMRVQAYLYDGYWEDIGTIEAFYNANLGITKKPVPDFSFYDRSSPIYTQPRYLPPSKMLDADITDSVIGEGCVIKNCKIHHSVVGLRSCISEGAIIEDTLLMGADYYETDADRRFLAAKGGVPIGIGKNSHIRRAIIDKNARIGDDVKIINSDNVQEAARETEGYFIKSGIVTVIKDALIPSGTVI

SEQ ID NO: 29075 - protein, 108 aa, Cylindrocladium malesianum
LASKAARKSAPSTGGVKKPHRYKPGTVALREIRRYQKSTELLIRKLPFQRLVREIAQDFKSDLRFQSSAIGALQESVESYLVSLFEDTNLCAIHAKRVTIQSKDIQLA

SEQ ID NO: 29076 - protein, 493 aa, Ralstonia metallidurans CH34
MTKRQASTATTTKTTAKARRRASEVSAEPVVERVPRRKRSVRPTTREADFVVIGAGSGGVAAARRAASHGARVILVERDAIGGTCVNRGCVPKKMLSYGANWASILSTCLSHTGGKEDWRDASVRVNAEVARLNASYAQRLNEAGVEILHGDARLSGADEVVVGNEIIRTRKTLIATGAHPLALPVPGGELASSSDDVFTWQTVPASIAVIGGGYIAVEMASILSRYGVKVDLLVRGDRLLPKFDHDIAAALAEALAAKGVRLHFRADVTMLSQANGATEVCYTQQNNPGRTQTVRAQAVLAAIGRRPSIAELGLDALGVQLGERGGICVDRQFRTTVRSIHAIGDCMDRNLHLTPVAIAQGRWLADRLFGKRGDIADFDFVPTAVFSEPAIGAVGLTEAQAIEAAGGRADRVRTEIKRFVSLENRFGGVAQPSVFKLVFNARSGRVLGAHLMDNAAPEIIQTFAVALRLGVKDAHLKTTMPLHPTVAEELFG

SEQ ID NO: 29077 - protein, 277 aa, Rickettsia sibirica
DFLEVAYLLIYGGLPSGEQYNNFTKQVAHHSLVNERLHYLFQTFCSSSHPMAIMLAAVGSLSAFYPDLLNFKEADYELTAIRMIAKIPTIAAMSYKYSIGQPFIYPDNSLDFTENFLHMMFATPCTKYTVNPIIKNALNKIFILHADHEQNASTSTVRIAGSSGANPFACISTGIASLWGPAHGGANEAVINMLKEIGSSEYIPKYIAKAKDKNDPFRLMGFGHRVYKNYDPRAAVLKETCKEVLKELGQLDNNPLLQIAIELEAIALKDEYFIERK

SEQ ID NO: 29078 - protein, 402 aa, Avena fatua
QQQPWGYQQQPGAMDAGANAASFSAPAVQATSSEMAPSGGVYRQTHSQRRSSDDGYNWRKYGQKQVKGSENPRSYYKCTFPNCPTKKKVETSIEGQITEIVYKGTHNHAKPLSTRRGSGGGGGGAAQVLQSGGGGDASEHSFGAMSGAPVSTPENSSASFGDDEIGASSPRAGNVGGDDLDDDEPDSKKWRKDGDGEGSNSMAGNRTVREPRVVVQTMSDIDILDDGYRWRKYGQKVVKGNPNPRSYYKCTTVGCPVRKHVERASHDLRAVITTYEGKHNHDVPAARGSAALYRPAPRAAADSAMSTSQQYTANQQQPSAMTYQTSAAAGTQQYAPRPDGFGSQNQGSFGFNGSFGFSAGFDNPTGSYMSQHQQQQRQNDAMQASGAKEEPREDMFFQHSQF

SEQ ID NO: 29079 - protein, 1046 aa, Xanthomonas campestris pv. campestris str. ATCC 33913
MQNITTSRDRWIWVIAAGLMAGTLGVELVTPLGYAVWLTYFVAVGVTVFQNHVRVPLVVGVLSCVLLAIGFHLAPSSTNSSFSSVNRSIGGISFLAMALVVMQAIRARRQAETALWLQQAENTVEASLRGDQSPEALADAAVRALCDTLEAQVGALYRLEGERLRLTGGAALAEDVPSTLPTNLGQLGETLQRGSVRRVRGVDAGHLQIASSLGKSDCQELLLAPVTADGRIIGIVELGRTGAPGTAATREEELLARCGENIGVALRTALLRAQLVSLLEETQRQSEELQTQQEELRVANEELEEQSRSLQQSQSDLEQQQAELEQTNVQLEERTQALEAQKQALLVAQGQLVRNSNELSTASRYKSEFLANMSHELRTPLNSSLILAKLLADNKDHTLTAEQVKYAQAIHSSNNDLLALINDILDLSKIEAGHVELSDDTVAMSSVVQRLRDTFEPLARQKGLQLEISADAAAPTQLVVDNQRLQQILKNLLANAIKFTEHGQVSLAVQSHGNGRVRFVVCDTGIGIAREQSEVIFEAFRQADGSTRRRYGGTGLGLSISRDLALRMGGSISVDSEPGRGSCFTLELPVDGAPADAAAPAAAPATHLAPTPRSDTTQLFAARTSAVISAAPVTTPASNAAPSVRAEDDRDQRTRPGRLILAVEDETRFAQALVDLAHELDFDCVVAPNAEEALRLAAELRPSGILLDIGLPDASGLSVLERLKRNPATRHIPVHVVSALERSQIALELGAVGYLIKPATRELLAGAIRQLEETNARALRRLLIVEDDSALRANLELLLARDQLEIVAVGTIAEAMDQLGSATFDCMVTDLALPDGSGYDLLERMAGNDAVAFPPVIVYTGRALTRDEEQRLRRYSKSIIIKGVRSPERLLDEVTLFLHSVEASLPSDQQRLLREARRRDAVLDGATVLLAEDDVRNIFALSSVLEPLGVTLQIARNGREALEHLAKHEVDLVLMDIMMPEMDGITAMRQIRANRQWQDLPIIALTAKAMADDREHCLQAGANDYIAKPIDVDKLVSLCRVWCSRQ

SEQ ID NO: 29080 - protein, 115 aa, Cylindrocladium pacificum
GGKAPRKQLASKAARKSAPSTGGVKKPHRYKPGTVALREIRRYQKSTELLIRKLPFQRLVREIAQDFKSDLRFQSSAIGALQESVESYLVSLFEDTNLCAIHAKRVTIQSKDSQL

SEQ ID NO: 29081 - protein, 289 aa, Datisca glomerata
DGSSTGQAPGEDSEVILYPQAIFKDPFRRGNNILVICDAYTPAGEPIPTNKRHAAAKTFSHPDVVAEVPWYGIEQEYTLLQKDIKWPIGWPVGGYPGPQGPYYCGAGADKAFGRDIVDAHYKACLYAGINISGINGEVMPGQWEFQVGPAVGISAGDELWVARYILETITEIAGVVVSFDPKPIQGDWNGAGAHTNYSTKSMREDGGYEKIKAAIEKLGKRHKEHIPAYGEGNERRLTGKHETADINTFLWGVANRGASIRVGRDTEKAGKGYFEDRRPASNMDPYVVL

SEQ ID NO: 29082 - protein, 344 aa, Caulobacter crescentus CB15
MLQLSNACQRELFKPPMAARKLKVIVTRKLPDPVETRMCELFDTELNVSDKPMTADELVDAMSRADVLVPTITDRIDSRLLSRSGDRLKLIANFGAGVDNIDVATANARGIIVTNTPGVLTEDTADLTMTLIMAASRRIVEGAEVVKAGGFHGWSPTWMMGRRLWGKRLGIIGMGRIGQAVARRAKAFGMQVHYHNRKPVSPRIAEELGCTYWESLDQMLARMDFVSVNCPHTPATYHLLSARRLKLLRPHAVVVNTARGEVIDEGALANMLAKGEIAGAGLDVYEHEPAINPKLLKLPNVVLLPHMGSATVEGRIDMGEKVIVNVKTFMDGHRPPDRVIPAML

SEQ ID NO: 29083 - protein, 452 aa, Sulfolobus solfataricus P2
MRKTKIVATLGPSSEEKVKELAEYVDVFRINFAHGDETSHRKYFDLIRTYAPESSIIVDLPGPKLRLGELKEPIEVKKGDKIVFSQKDGIPVDDELFYSAVKENSDILIADGTIRVRVKSKAKDRVEGTVIEGGILLSRKGINIPNVNLKSGITDNDLKLLKRALDLGADYIGLSFVISENDVKKVKEFVGDEAWVIAKIEKSEALKNLTNIVNESDGIMVARGDLGVETGLENLPLIQRRIVRTSRVFGKPVILATQVLTSMINSPIPTRAEIIDISNSIMQGVDSIMLSDETAIGNYPVESVRTLHNIISNVEKSVKHRPIGPLNSESDAIALAAVNASKVSKADVIVVYSRSGNSILRVSRLRPERNIIGVSPDPRLAKKFKLCYGVIPISINKKMQSIDEIIDVSAKLMQEKIKDLKFKKIVIVGGDPKQEAGKTNFVIVKTLEQQKK

SEQ ID NO: 29084 - protein, 392 aa, Escherichia coli W3110
YLHLFAPEQADLNWENPAVRAELKKVCEFWADRGVDGLRLDVVNLISKDPRFPEDLDGDGRRFYTDGPRAHEFLHEMNRDVFTPRGLMTVGEMSSTSLEHCQRYAALTGSELSMTFNFHHLKVDYPGGEKWTLAKPDFVALKTLFRHWQQGMHNVAWNALFWCNHDQPRIVSRFGDEGEYRVPAAKMLAMVLHGMQGTPYIYQGEEIGMTNPHFTRITDYRDVESLNMFAELRNDGRDADELLAILASKSRDNSRTPMQWSNGDNAGFTAGEPWIGLGDNYQQINVEAALADDSSVFYTYQKLIALRKQEAILTWGNYQDLLPNSPVLWCYRREWKGQTLLVIANLSREIQPWQAGQMRGNWQLVMHNYEEASPQPCAMNLRPFEAVWWLQK

SEQ ID NO: 29085 - protein, 414 aa, Sesamum indicum
SYFHETIWKGVPKFLRRVDTALKNIGIDERVPYNAPLIQFSSWMGGDRDGNPRVTPEVTRDVCLLARMMAANLYCSQIEDLMFELSMWRCSDELRVRADELHRSSKRDAKHYIEFWKTIPPNEPYRVILGDVRDKLYQTRERSRHMLAHGICDIPEEATYTNIEQFLEPLELCYRSLCACGDRPIADGSLLDFLRQVSTFGLSLVKLDIRQESDRHTDVLDAITKHLDIGSYRDWSEERRQEWLLSELASKRPLFGADLPKTEEIADVLDTFHVLAELPSDCFGAYIISMATAPSDVLAVELLQRECKVRQPLRVVPLFEKLADLEAAPAAVARLFSIDWYKNRIQGKQEVMIGYSDSGKDAGRLSAAWQLYKAQEELIKVAKEYGVKLTMFHGRGGTVGRGGGPTHLAILSQP

SEQ ID NO: 29086 - protein, 374 aa, Streptococcus thermophilus CNRZ1066
MTTVEIDGLKDMIACNTRISSIIDDHLSYAGYDISEFMNNKASFEEVIYLLWNGHLPTQMELKYFEAELRKNYDISDAVEQCILIQSRPHLHPMSVLRSTVSLLGVYNVDAEERSMEAVYQQSIELMAKLPTIITTFARLRTGKMPLKPRKDLGFAANFLYMLNGVEPSEIEIEAMNKTLILHADHELNASTFAARVCASTLTDIYSCVTTAIGALKGPLHGGANERVFDMLKEVRESGDVNAYLQEKLDSKEKIMGFGHRVYKKKDPREIFLRDMAKKLTEGTENEEFFNKSQEIEEFMRDKKGLIPNVDFYSATVYHTLGIDSDIFTLIFAMSRVAGWIAHIHEQQKNNKLIRPRSQYIGQENMTYIALEKR

SEQ ID NO: 29087 - protein, 159 aa, Salmonella enterica
ASLGLWEICIIWGLGISLAVYLTAGISGGHLNPAVTIALWLFACFPKQKVLPYIIAQFAGAFGGALLAYVLYSSLFTEFETAHHMVRGSVESLQLASIFSTYPAAALNVWQAALVEVVITSILMGMIMALTDDGNGIPKGPLAPLLIGILVAVIGASTG

SEQ ID NO: 29088 - protein, 132 aa, Oryza sativa (japonica cultivar-group)
AVSVKSQLQQIARPMYSNPPVHGALVVSIILNDPELKSLWLKEVKGMADRIIGMRKALRENLEGLGSPLSWDHITNQIGMFCYSGMTPEQVVRLTNEYHIYMTRNGRISMAGVTTGNVAYLANAIHEVTKTK

SEQ ID NO: 29089 - protein, 362 aa, Bradyrhizobium sp. BTAi1
MTIQLAKSPIGLDGIPAAETVLSHVDGQQGELIIAGRRVADLAASAGFEGVTARLWSAATKRSVSDAEVRASLGLARQRAFARLPELLAATAELPIIDGFRAAVAALRPEAGLSDEATIVGACPVIAGALVQRALGSQPIAPDPTATHAADTLRMVRGGTPEAGEVTALDTYLVTVSDHGMNASTFAARVIASTQADLFASVTAGYCALTGPLHGGAPEPVLEMLNAIGTRDNIKPWVDAALGRGERLMGFGHRIYRVRDPRADVLKAAIARLAGSGADLPFASEVEAYIRAALRQKNPERVLDTNVEFFTAILLDALKIPRQAFTPIFAVARVAGWTAHAREQQRTGRLIRPSSAYIGPKP

SEQ ID NO: 29090 - protein, 250 aa, Arabidopsis thaliana
  misc_feature (168)..(168): Xaa can be any naturally occurring amino acid
  misc_feature (178)..(178): Xaa can be any naturally occurring amino acid
  misc_feature (180)..(181): Xaa can be any naturally occurring amino acid
  misc_feature (183)..(184): Xaa can be any naturally occurring amino acid
  misc_feature (189)..(189): Xaa can be any naturally occurring amino acid
  misc_feature (191)..(192): Xaa can be any naturally occurring amino acid
  misc_feature (194)..(194): Xaa can be any naturally occurring amino acid
  misc_feature (199)..(199): Xaa can be any naturally occurring amino acid
  misc_feature (202)..(202): Xaa can be any naturally occurring amino acid
  misc_feature (204)..(204): Xaa can be any naturally occurring amino acid
  misc_feature (206)..(208): Xaa can be any naturally occurring amino acid
  misc_feature (215)..(215): Xaa can be any naturally occurring amino acid
  misc_feature (218)..(218): Xaa can be any naturally occurring amino acid
  unsure (1)..(250): unsure at all Xaa locations
MTEVISKTSLFLGACGNHHRVDDFSFSPIVFGDSQDESFRRSSAITAQTTLRIGTAQKWWEKGLKDNMREISSAQELVDSLTNAGDKLVVVDFFSPGCGGCKALHPKICLFAEMNPDVQFLQVNYEEHRSMCYSLGVHVLPFFPISVALRGRVLAALAVTHPPDQENXRDALGKTMGXKXXAXXGTDPXGXXKXKKLVXPLXAXQXXXNFSLPPXRPXPFGKKQPLVFTPPLPFSGRRKTFVFPGGCKFF

SEQ ID NO: 29091 - protein, 381 aa, Nostoc sp.
MSTNHLLEIKQYGQSIWMDNLTRDIIQSGELKDMVENQGISGITSNPAIFEKAIAGNAIYDADIEAGVRAGLPIYKIYESLVFADIRNACDILRPVYEASNRLDGYVSIEVPPTIAHDTEATISEARRYFQEIGRENLMIKIPGTEPGLPAVEQVIAEGMNVNITLLFSVESYVNTAWAYVRGLEKRLAEGKDISRIASVASFFLSRIDSNIDAKIDAKLKKGVDDIAVEAKLKAVKGKVAIANAKLAYQEYKKIIRSERWQELVAKGATVQRLLWASTSTKDPNYNDVMYIEELVGPDTVNTVPPATIKACADHCNVSDRLETDVNNAYTLIENLKDPDINIDLDTVMDELLVEGIDKFIQPFQSLMNSLEDKIKVLSPV

SEQ ID NO: 29092 - protein, 342 aa, Mannheimia succiniciproducens MBEL55E
MTKSVCLNKELTMKVAVYSTKNYDRKHLDLANKKFNFELHFFDFLLDEQTAKMAEGADAVCIFVNDDASRPVLTKLAQIGVKIIALRCAGFNNVDLEAAKELGLKVVRVPAYSPEAVAEHAIGLMLTLNRRIHKAYQRTRDANFSLEGLVGFNMFGKTAGVIGTGKIGLAAIRILKGFGMDVLAFDPFKNPTAEALGAKYVGLDELYAKSHVITLHCPATADNYHLLNEAAFNKMRDGVMIINTSRGVLIDSRAAIEALKRQKIGALGMDVYENERDLFFEDKSNDVITDDVFRRLSSCHNVLFTGHQAFLTEEALNNIADVTLSNIQAVSKNATCENSVEG

SEQ ID NO: 29093 - protein, 247 aa, Glycine max
MATMLTKEHGLNLKETELCLGLPGGGGGGGGGGGGGGGEVETPRATGKRGFSETVDLKLNLHSKEDLNENLKNVSKEKTLLKDPAKPPAKAQVVGWPPVRSYRKNMMAVQKVSTEDVAEKTTSSTANSGAFVKVSMDGAPYLRKVDLTMYKSYKELSDALAKMFSSFTMGNYGAQGMIDFMNESKLMDLLNSSEYVPSYEDKDGDWMLVGDVPWEMFVESCKRLRIMKGSEAIGLAPRAMEKCKSRS

SEQ ID NO: 29094 - protein, 428 aa, Arabidopsis thaliana
  misc_feature (96)..(96): Xaa can be any naturally occurring amino acid
  misc_feature (313)..(313): Xaa can be any naturally occurring amino acid
  unsure (1)..(428): unsure at all Xaa locations
MGSIVEPWAAIAENGNANVTAKGSSRELRHGRTAHNMSSSSLRKKSDLRLVQKVPCKTLKNILSNLQEVILGTKLTLLFLAIPLAILANSYNYGRXQLAFYTGPTVGGLLNATCGNATELIIAILALANNKVAVVKYSLLGSILSNLLLVLGTSLFFGGIANIRREQRFDRKRADVNFFLLLMGLLCHLLPLLLRYAATGEVSTSMINKMSLTLSRTSSIVMLIAYIAYLIFQLWTHRQLFEAQQDDDDAYDDEVSVEETPVIGFWSGFAWLVGMTIVIALLSEYVVDTIEVLIIIISLPIVVNSSDHSLSIXIFAFNNKLDISLGVALGSATQISLFVVPLSVIVAWILGIKMDLNFNILETSSLALAIIITAFTLQDGTSHHMKGLVLLLCYVIIAACFFVDQIPQPNDLDVGLQPMNNLGEVFSA

SEQ ID NO: 29095 - protein, 87 aa, Arabidopsis thaliana
  misc_feature (38)..(38): Xaa can be any naturally occurring amino acid
  unsure (1)..(87): unsure at all Xaa locations
MANRAPIQVLVMLLLAQTHIFFSPSHGRSLGSLMEKPXFVRPNKETLMVVNKTSKKRMVMKFSGHPGTGATNRPLPRLKRSALENSC

SEQ ID NO: 29096 - protein, 116 aa, Brassica napus
MAATAPNGNPTVSSLAATVPVQAVLFDIDGTLCDSDPLHHVAFQEMLLEIGYNNGVPIDEEFFIKNIAGRSDVEAAQNLFPDWELEKGLKFLEDKEAKYRSLAKERLVPVKGLAKV

SEQ ID NO: 29097 - protein, 238 aa, Leptospira interrogans serovar Copenhageni str. Fiocruz L1-130
MGSPILGEFLGTFVLILLGNGVVAGVLLEKSKSKDGGWIVITAGWAFAVMIGVFVSNAFGSLDAHLNPAVTLAFAIQSGDYTKLIFYIPAQIAGAFLGAVFNYLHYLPHWKETKDPGKILAVFSTEPAISHNVYNFFSEFLGTFLLILGIVSIFSPKLQGLSVHFGTFLVGILVWSIGLSMGGTTGYAINPARDLGPRIAHFILPIAGKGTSNWKYAWLPVFAPLSGAACAGILIRFL

SEQ ID NO: 29098 - protein, 251 aa, Brassica napus
RPTRPELEDWETEFTKNRVKFKDLYSATEGFKEKDVLGSGGFGSVYKGVMPNTKKEIAVKRVSNESKQGLKEFVSEIVTIGRMSHRNLVPLLGYCRREKELLLVYDYMPNGSLDKYLHNSPEVTLDWKQRIKVIKGVASALFYLHEDWEQVVIHRDIKSSNVLLDAEYNGRLGDFGLARLCGHGTDPQTSHVAGTWGYLAPDHMRTGKTTTATDVFSFGVLLLEVACGRRPIEVHKKSGETVLLVDWVFGF

SEQ ID NO: 29099 - protein, 515 aa, Saccharomyces cerevisiae
MSKLGQEKNEVNYSDVREDRVVTNSTGNPINEPFVTQRIGEHGPLLLQDYNLIDSLAHFNRENIPQRNPHAHGSGAFGYFEVTDDITDICGSAMFSKIGKRTKCLTRFSTVGGDKGSADTVRDPRGFATKFYTEEGNLDWVYNNTPVFFIRDPSKFPHFIHTQKRNPQTNLRDADMFWDFLTTPENQVAIHQVMILFSDRGTPANYRSMHGYSGHTYKWSNKNGDWHYVQVHIKTDQGIKNLTIEEATKIAGSNPDYCQQDLFEAIQNGNYPSWTVYIQTMTERDAKKLPFSVFDLTKVWPQGQFPLRRVGKIVLNENPLNFFAQVEQAAFAPSTTVPYQEASADPVLQARLFSYADAHRYRLGPNFHQIPVNCPYASKFFNPAIRDGPMNVNGNFGSEPTYLANDKSYTYIQQDRPIQQHQEVWNGPAIPYHWATSPGDVDFVQARNLYRVLGKQPGQQKNLAYNIGIHVEGACPQIQQRVYDMFARVDKGLSEAIKKVAEAKHASELSSNSKF

SEQ ID NO: 29100 - protein, 765 aa, Thermococcus kodakarensis KOD1
MKKGGLLLILLILVSIASGCISESNENQTATASTVPPTSVTPSQSSTPTTSTSTYGPSERTELKLPSVNYTPIYVGIEKGCPSGRVPVKFTYNPGNKTVKSVSLRGSFNNWGEWPMELKNGTWETTVCLRPGRYEYKYFINGQWVKDMSDDGTGRPYDPDADAYAPDGYGGKNAVRVVEGREAFYVEFDPRDPAYLSIADKRTVVRFEAKRDTVESAVLVTDHGNYTMKLQVWWDFGETWRAEMPVEPADYYILVTSSDGGKFAVLNTSESPFFHFDGVEGFPQLEWVSNGITYQIFPDRFNNGNKSNDALALDHDELILNQVNPGQPILSNWSDPITPLHCCHQYFGGDIKGITEKLDYLQSLGVTIIYINPIFLSGSAHGYDTYDYYRLDPKFGTEDELREFLDEAHRRGMRVIFDFVPNHCGIGNPAFLDVWEKGNESPYWDWFFVKKWPFKLGDGSAYVGWWGFGSLPKLNTANQEVREYLIGAALHWIEFGFDGIRVDVPNEVLDPGTFFPELRKAVKEKKPDAYLVGEIWTLSPEWVKGDRFDSLMNYALGRDILLNYAKGLLSGESAMKMMGRYYASYGENVVAMGFNLVDSHDTSRVLTDLGGGKLGDTPSNESIQRLKLLSTLLYALPGTPVTFQGDERGLLGDKGHYDEQRYPIQWDTVNEDVLNHYRALAELRKRVPALRSSAMRFYTAKGGVMAFFRGHHDEVLVVANSWKKPALLELPEGEWKVIWPEDFSPELLRGTVEVPAIGIIILERG

SEQ ID NO: 29101 - protein, 418 aa, Candida albicans
MFLKNILSVLRFALLIDAAPVKRSPGFVTLDFNVKRSLVVPDDPTAESKRSPLFLDLDPTQIPVDDTGRNVGVDKRGPVAVKLDNEIITYSADITVGSNNQKLSVIVDTGSSDLWIPDSKAICIPKWRGDCGDFCKNNGSYSPAASSTSKNLNTRFEIKYADGSYAKGNLYQDTVGIGGASVKNQLFANVWSTSAHKGILGIGFQTNEATRTPYDNLPISLKKQGIIAKNAYSLFLNSPEASSGQIIFGGIDKAKYSGSLVELPITSDRTLSVGLRSVNVMGRNVNVNAGVLLDSGTTISYFTPSIARSIIYALGGQVHFDSAGNKAYVADCKTSGTVDFQFDKNLKISVPASEFLYQLYYTNGKPYPKCEIRVRESEDNILGDNFMRSAYIVYDLDDKKISMAQVKYTSESNIVAIN

SEQ ID NO: 29102 - protein, 711 aa, Rubrobacter xylanophilus DSM 9941
MRGEGDPLPRRRGAGRRAAAGGRPPGAGEHAGPLRTQALRAAGGGRALRAGGGGGLPPDPGRRPGAGAAQRHRERGGHLGLRGRGPARRRGAGGARQARAGAQGQDPRRRPGDGGREAERTPAPPPPQQRPPHGRGGGGRGARALSRRPGVRRGERGGLLLRRAQGLAGAARDGARGARGVLLGEDHGGQGQHLRGGRRLSHGLPAGRRPPARALPTAGGLRDMPERYGPRVIEHLVNPRNAGEVGGPSGVGEAGNAACGDQVRFTLRVGGDLRLQEVRYRAYGCAACIAAGSALAELAEGRSITGAAQISRGDIQEALGGPLPPGKEHGATLALDALHRAFEDYWSRQGDALLGGEGLGDGSGGRRGVVAAMSGGVDSAVTALLLKERGYEVVAVTFRLHDGEPGSRSCCSPDTVLFARETAHGLGIPHFTLNLRELFDRRVMRDFVGSYAAGRTPNPCVACNAHVKFHAAAFLADRLGLRHVATGHYARVGEGPCLERPEDGRKDQTYVLWPVPPRLLGRTIFPLGDYRKSEVRRIAEERGLAVARTPESQDICFIPDGDYRSFVRRRVRSEPGEIVDRQGRVLGRHAGVVDFTVGQRRGLGISAPTPLYVTEVRPRSRQVVVGSRRELEVRRMLVRGANWFLDPREAALVQVRYNGEPVPCELEEGAGGWEVALLEPVFGVAPGQSAVFYTRDGAKVVGGGIIARRDA

SEQ ID NO: 29103 - protein, 570 aa, Thermococcus kodakarensis KOD1
MGEKPDKYEILQDLMRRRGFAWGSFEIYGGSRGFYDYGPLGATIKRKIERKIREAFQREGFFELETPDITPEKVFIASGHVEKFVDPLVECKKCGARFRADHLVEEALGIDTEGMSAEHLTQLIREHDIRCPECGGELSDVWYFNLMFETRIGPYGDQKGYLRPETAQGIFVNFRRLNAFARNKLPFGVFQIGKAYRNEISPRQGMLRLREFTQAEAEIFFNPNETEHPHFDEVKDEKLRLYPIEHQLKNLSMIELTAEEAVKKGYIMNTFFAYYMVMVKRVLLDIGIPEDKIRFRQQLPEERAHYSRDTWDAEIHSERFGWVECVGIANRGDYDLSRHMRESGADLTVLIHYDEPKIVKKLEVSLNMKRVGPKLKKDAKRINELIKGWGEEKKRELVELLEKEGKVTIEGYELEKDDFIIREVEEKITGEKIVPHVLEPSFGIDRPFYLLLENSLVIEEDRTYLRIKKDMAPIEVAVLPLVAKEPLKSIAYDIFRTLQKEGFIAVYDEKDTVGRRYMRYDEIGTPYCVTVDNQTPEDGTVTIRDRDTREQIRVKIEELPKKLRELIFES

SEQ ID NO: 29104 - protein, 410 aa, Bradyrhizobium japonicum USDA 110
MNSPTPLRFHVPEPASRPGGKPDFSGVSIPKAGSVRRPPVDVLPEEIRDLAYSIIRVLNHEGRAIGPWVPDLSLDELVAGLRHMMTLRTFDARMQMAQRQGKTSFYMQHTGEEAVSCAFRIALGPDDMNFPTYRQAGLLIAHDYPLVDMMCQIYSNEHDPLKGRQLPVMYSSKRHGFFSISGNLATQFVQAVGWAMASAIKRDNRIAAAWIGDGSTAESDFHAALVFASTYKAPVVLNVVNNQWAISTFQGIARGGSGTFAARGLGFGIPALRVDGNDYLATYAVAKWAIERARLNLGPTLIEYVTYRAGAHSTSDDPSAYRPKHESEEWPLGDPVIRLKQHLIAAGAWSEERHKQTEAEILATVIAAQKEAEAFGTLHSGGKPSARDIFEDVYAELPPHLRRQRQQIGV

SEQ ID NO: 29105 - protein, 412 aa, Yarrowia lipolytica CLIB122
MSTKALILVGGGTRGTRFRPLSLDTPKVLFPVGGKPILSHAVDAVASLKDVKEVLLVGFYEDSVFSQFIADTNKQYPNLSIKYLREYKAMGTAGGLYHFRDVILKGNPSRFFVIHADVCCSFPLKEIEEFYEEKKAKYVILGTTVPAAVANNFGAIVTDPETQRVIHYVEKPESHISNLINAGVYLFDQTIFDTIAAAKKVREEKAQDPSFVGEGDEDHLRLEQDILVQLPATDAFYAYETKDFWRQIKTAGSAVPANALYLQQAFQADPKQPGLQAPSANIVPPVYIDPSAKIDSTAKLGPNVSIGPRAVIAAGARIKDSIVLEGVEVKHDAAVFHSILGRGCKIGSWARIEGSAVAPNDHSETLVKDGAKIQSVTILSSDVNVSEEVHVQNTIVLPHKDIKNDVVNEVIM

SEQ ID NO: 29106 - protein, 319 aa, Arabidopsis thaliana
MNGEGKVVCVTGASGYIASWIVKLLLLRGYTVRATVRNPMDTKKTNHLLTLEGASERLKLFKSDLLEEGSFDQAIEGCDGVFHTASPVSLTVTDPQTEMIDPAVNGTLNVLRTCAKVSSVKRVIVTSSTAATLSINPNDVVDETVFTDLSVYLAMKAWYGYSKTLAEETAWRFAKENGIDLVVMNPGNVIGPVLQPTLNYSVEVIVDLINGKNPSNSFYYRFMDVRDVSLAHIKAFEVPSASGRYILADPDVTMKDIQKLLHELFPDLCRVDKDNENEVGEMAYKVCVDKLKSLGIEFTPIKESLKDTVVSLKERCLLI

SEQ ID NO: 29107 - protein, 465 aa, Bradyrhizobium japonicum USDA 110
MTEITCQLLVVGAGPGGYVCAIRAGQLGLDTVLVERGKLGGSCLNVGCIPSKAMIHVAEEFEKLVEAADGKTPFGLTAAQPALDFKQAIAWKDGIVHRLNNGVAALLRKAKVKIVQGHGRFRDGKTIVVETETGPKTIKAETVVIATGSAPVELPTLPFGGRVISSTGALSLAEVPKSLVVVGGGYIGLELGTAFAKLGSKVAVVEAQDNILPLYDVELTAPIARRLTALGVEVLTGARALGLTAQGDGLRVETPDGQERSLTADKILVTVGRTPVTEALGLEQLVLDMDGRFIRIGQHCETSMRGIYAIGDVTGEPMLAHRAMAQGEMVAEIAAGMPRAWDKCCIPAICFTDPEIVSAGLSPDEARRAGINIKVGQFPFAANGRAMTRHGEPGFVRVVARADNQRVLGIQALGQGVSELSAAFGLAIEMGAVLQDIAGTIHAHPTLGEAIQEAAFKALGHAIHV

SEQ ID NO: 29108 - protein, 228 aa, Bradyrhizobium japonicum USDA 110
MSKDNAFLNTAESITGPISKTISRSGLKAVYEQLEDKEKAAFRAAYNASYHPCREILEEIYDDVASGNEVRSVIQATRRHGIYPMRNIDTTEMWTVGDKVRVDKERNYAPVNPETAGVYLACMMAQVDVLKDHGHPYSEIANESIIEAVDSLNPYMSHKGVSYMVDNCSTTARLGARKWASRFDYILKQQAFPIIGGGLGRRQHSVRQVPRQRYPRGACGLRRTAPVG

SEQ ID NO: 29109 - protein, 236 aa, Zea mays
  misc_feature (143)..(143): Xaa can be any naturally occurring amino acid
  unsure (1)..(236): unsure at all Xaa locations
MAEVEAPAAAVAAATPEVATVTEGGAATEAKGPHKLHRQWTFWYDIQSKPKPGAAWGTSLKKAYTFDTVEEFWGLYDHVFRPSKLPGTADFHLFKAGVEPKWEDPECANGGKWTADFHLFKAGVEPKWEDPECANGGKWTVPXNRKPTFETMWLETLMALVGEQFDETDDICGIVASVRPRGDKLALWTRTASNEAVQVNIGKKWKDVIDYNDKITYTFHDDSRRDKPSRGGRYTV

SEQ ID NO: 29110 - protein, 370 aa, Geobacillus stearothermophilus
MTKEEIKRLVDEVKTDVIAWRRHLHAHPELSFQEEKTAQFVYETLQSFGHLELSRPTKTSVMARLIGQQPGRVVAIRADMDALPIQEENTFEFASKNPGVMHACGHDGHTAMLLGTAKIFSQLRDDIRGEIRFLFQHAEELFPGGAEEMVQAGVMDGVDVVIGTHLWSPLERGKIGIVYGPMMAAPDRFFIRIIGKGGHGAMPHQTIDAIAIGAQVVTNLQHIVSRYVDPLEPLVLSVTQFVAGTAHNVLPGEVEIQGTVRTFDETLRRTVPQWMERIVKGITEAHGASYEFRFDYGYRPVINYDEGDPRHGGNGVRAVRRRGSGPLETEHGRRRFLRLFAKSARQLFLRRRGQCRKRHRLPAPPPALYD

SEQ ID NO: 29111 - protein, 163 aa, Salmonella enterica
ASLGLWEICIIWGLGISLAVYLTAGISGGHLNPAVTIALWLFACFPKQKVLPYIIAQFAGAFGGALLAYVLYSSLFTEFETAHHMVRGSVESLQLASIFSTYPAAALNVWQAALVEVVITSILMGMIMALTDDGNGIPKGPLAPLLIGILVAVIGASTGPLTG

SEQ ID NO: 29112 - protein, 371 aa, Oceanobacillus iheyensis HTE831
MMLQLEQIRRDLHQIPELGFQEFKTQAYLLERINEIATENVEIKKWSTGILVYVHGKSPARKIGFRADIDGLPILEQTNLPYASLHEGRMHACGHDLHMTIALGALEKLIQDPINDDVIFVFQPAEEGPGGAKPMLESEEFQQWKPDMMFALHIAPELPVGTVSSKAGLLFANTSELFIDFEGVGGHAAYPHLTKDMTVAASNFVVQLQQIVSRGLNPLDGSVITIGKMESGYVQNAIAETARLEGTIRSTDADAIDMIKSKLNRLMKGFEISYDCTIKVDYGANYYQVVNDATYVQQFENVINQTQTITYQQADAAMTGEDFGDMLKEIPGFMFWLGVDSSYGLHNARLNPKEEAIDVGVNAVISMITSF

SEQ ID NO: 29113 - protein, 284 aa, Glycine max
  misc_feature (217)..(217): Xaa can be any naturally occurring amino acid
  unsure (1)..(284): unsure at all Xaa locations
MGNANGREDGSIPPAAADPSAAARGTHAPPVSLPPVRAFSSDSMANSPPHSPRRSRSPILFGPQVPLAPLQRGNGPPFLNQMWQNESHGIVNHPSEQGIPVMITWNYGGNNVAVEGSWDNWTSRKALQRAGKDHSFLIVLPPGIYHYRFIADGEERFIPELPNVADEMGHVCNLLDVNDYVPENPDGVSEFEAPPSPESSYGQAFPAEEDFAKEPMXAVPSQLHLTVLGMENSDIGSSSKPQHVVLNHVFIEKNLASKSVVALGLTHRFQSKYVTVVLYKPLKR

SEQ ID NO: 29114 - protein, 162 aa, Cicer arietinum
DIGEWQPNGSMKIIDRKKNIFKLSQGEYVAVENLENIFGQVPSIESIWVYGNSFEAFLVAVVNPRKQALEHWAEQNGISMDFNSLCEDSRAKGYILEELSKIGKEKKLKGFEFIKAVHLDPVPFDMERDLITPTYKKKRPQLLKHYQSVIDNMYKSGSKPRA

SEQ ID NO: 29115 - protein, 111 aa, Brassica napus
  misc_feature (86)..(86): Xaa can be any naturally occurring amino acid
  misc_feature (90)..(90): Xaa can be any naturally occurring amino acid
  unsure (1)..(111): unsure at all Xaa locations
MFEHTLLSLLLLPSLLSLLLFLILLKRRSRHRFNLPPGKSGWPFIGETIGYLKPYTATTLGDFMQQHISKHGKIYRSNLFGEPTIXSADXGLNRFILQNEGRLFECSYPRS

SEQ ID NO: 29116 - protein, 168 aa, Saccharum hybrid cultivar H32-8560
MALTVMASSATAAAPFQGLKSTASLPVARRSTTSLAKVSNGGRIRCMQVWPAYGNKKFETLSYLPPLTQEQLLKQVDYLLRNNWVPCLEFSKEGFVYRENSTSPCYYDGRYWTMWKLPMFGCTDASQVYKELQEAIASYPELRAILGFDNIRQTQWLTFIAYKPAGSE

SEQ ID NO: 29117 - protein, 129 aa, Salmonella enterica
LNPAVTIALWLFACFPKQKVLPYIIAQFAGAFGGALLAYVLYSSLFTEFETAHHMVRGSVESLQLASIFSTYPAAALNVWQAALVEVVITSILMGMIMALTDDGNGIPKGPLAPLLIGILVAVIGASTG

SEQ ID NO: 29118 - protein, 966 aa, Saccharum hybrid cultivar H32-8560
MARNAVDKATSIDAQLRLLAPQKLSDDDKLVEYDALLLDRFLDILQDLHGEDIRETVQECYELAAEYENKLDPKMLDEIGNVLTSLDPGDSIVITKSFSHMLILANLAEEVQIAYRRRIKLKKGDFVDENSATTESDIEETLKRLMHQLKKSPLEVFDALKNQTVDLVLTAHPTQSVRRSLLQKHGRIRNCLTQLYAKDITPDEKQELDEALQREIQAAFRTDEIRRAPPTPQDEMRAGMSYFHETIWKGVPKFLRRVDTALKNIGINERLPYNAPIIQFSSWMGGDRDGNPRVTPEITRDVCLLARMMAANLYNAQIEDLMFELSMWRCSDELRVKVDELHRSSKKDTTKHYIEFWKQVPPSEPYRVILSDVRDKLYNTRERARHLLASGFSEIPEEATFTDVEQFLEPLELCYRSLCACGDRSVADGSLLDFLRQVSTFGLSLVRLDIRQESDRHTDVMDAITEYLGIGSYRKWTEEKRQEWLLSELNGKRPLFGPDLPKSDEIADVLDTFHVLAELPSDSFGAYVISMATAPSDVLAVELLQRECHVKKPLRVVPLFEKLADLEAAPAALARLFSVEWYRNRINGKQEVMIGYSDSGKDAGRFSAAWQLYKAQEELINVAKLYGVKLTMFHGRGGTVGRGGGPTHLAILSQPPETIHGSLRVTVQGEVIEQSFGEEHLCFRTLQRFTAATLEHGMHPPISPKPEWRALMDEMAIVATKEYRSIVFEEPRFVEYFRLATPEMEYGRMNIGSRPSKRKPSAGIESLRAIPWIFAWTQTRFHLPVWLGFGAAFKHVLDKDIRNLQTLQEMYNQWPFFRVTIDLVEMVFAKGDPGIAALYDKLLVSEDLWSFGKRLRANYEETKQLLLQVAGHKDLLEGDPYLKQRLRIRDSYITALNVCQAYMLKRIRDPGFQVNPGPHLSKDIMDMGKPASELVKLNTTSEYAPGLEDTLILTMKGIAAGMQNTG

SEQ ID NO: 29119 - protein, 380 aa, Petunia x hybrida
MASEAVHAPSPPVAVPTVCVTGAAGFIGSWLVMRLLERGYNVHATVRDPENKKKVKHLLELPKADTNLTLWKADLTVEGSFDEAIQGCQGVFHVATPMDFESKDPENEVIKPTVRGMLSIIESCAKANTVKRLVFTSSAGTLDVQEQQKLFYDQTSWSDLDFIYAKKMTGWMYFASKILAEKAAMEEAKKKNIDFISIIPPLVVGPFITPTFPPSLITALSLITGNEAHYCIIKQGQYVHLDDLCEAHIFLYEHPKADGRFICSSHHAIIYDVAKMVREKWPEYYVPTEFKGIDKDLPVVSFSSKKLTDMGFQFKYTLEDMYKGAIDTCRQKQLLPFSTRSAEDNGHNREAIAISAQNYASGKENAPVANHTEMLSNVEV

SEQ ID NO: 29120 - protein, 135 aa, Salmonella enterica
LNPAVTIALWLFACFPKQKVLPYIIAQFAGAFGGALLAYVLYSSLFTEFETAHHMVRGSVESLQLASIFSTYPAAALNVWQAALVEVVITSILMGMIMALTDDGNGIPKGPLAPLLIGILVAVIGASTGPLTGFA

SEQ ID NO: 29121 - protein, 412 aa, Legionella pneumophila str. Lens
MNSRRVVITGMGMLTPVGLNVEETWRSILAGVSGVGLVEDFDTTEYPTKIWAKVKNFNVENHMPIKDARKMDVFTQYGMAAADEAMLDSGLKIDEALSRRIGVAVGAGIGGIQTITNNQDKLVAGGPRKVSPFFIPAGIINMVAGQISIKHNLKGPNISVVTACTTGTHNIGLAGRIIAYGDADVMICGGAEMTTTPLCLAGFSAVRSLSKRNDEPEKASRPWDKDRDGFVMGEGAGILVLEEYEHAKARGAKIYAELVGFGMSGDAYHITAPDEDADGASRAMEAAIQDAGIDPRQVDYINAHGTSTYLNDLNETKAIKRVFENHAYDLAVSSTKSMTGHLLGAAGAVEAIISILAIRDQVAPPTINLDNPDEGCDLNYVAHVPQSRTINYVLSNSLGFGGTNGSLLFKRI

SEQ ID NO: 29122 - protein, 268 aa, Glycine max
  misc_feature (127)..(127): Xaa can be any naturally occurring amino acid
  misc_feature (165)..(165): Xaa can be any naturally occurring amino acid
  misc_feature (199)..(199): Xaa can be any naturally occurring amino acid
  misc_feature (214)..(214): Xaa can be any naturally occurring amino acid
  misc_feature (235)..(235): Xaa can be any naturally occurring amino acid
  unsure (1)..(268): unsure at all Xaa locations
MVAANERVVAVIMVGGPTKGTRFRPLSFNIPKPLFPLAGQPMVHHPISACKRIPNLAQIYLLGFYEEREFALYVSSISNELKVPVRYLKEDRPHGSAGGLYHFRDLIMEEDPSHIFLLNCDVCCSFXLPDMLGAHRRYGGMGTILVVKVSAESASEFGELVTDPXTNELLHYTEKPETFVSDRINCGVYIFTPNIFTAXEGVSTQRKDRANLRXVSSFEAMQPDTRSLPVNYVRXDQDILSPLAGKKQLYIYETNDFWEQIKTPGMSI

SEQ ID NO: 29123 - protein, 297 aa, Arabidopsis thaliana
MASKENLTPSKADGDLAKEELENPILNDHIIIFMLLCSCRQQRLDGKIVIITGGASGIGAEAARLFTDHGAKVVIVDLQEELGQNVAVSIGLDKASFYRCDITDETEVENAVKFTVEKHGKLDVLFSNAGVMEPHGSILDLDLEAFDRTMAVNVRGAAAFIKHAARSMVASGTRGSIVCTTSVTAEIGGPGPHSYTASKHALLGLVRSACGGLGKYGIRVNGVAPYGVATGLTSYNEETVKMVEDYCSATAILKGVVLKARHVADAALFLASDDSVYISGQNLGVDGGYSVVKLTSN

SEQ ID NO: 29124 - protein, 429 aa, Rhizobium tropici
MDNNNACVLVDGHSAELKLRSSTIGPNVLGIGSLYEQTKMFTYDPGFTSTASCESSITFIDGDEGVLLHRGYPIEQLAEHGDFLEVCYLLLYGELPTAAQKKDFDYRVVHHTMVHEQMSRFFTGFRRDAHPMAVMCGCVGALSAFYHDSTDITDPHQRMVASLRMIAKMPTLAAMAYKYHIGQPFVYPKNDLDYASNFLRMCFAVPCEEYVVNPVLARAMDRIFILHADHEQNASTSTVRLAGSSGANPFACIAAGIACLWGPAHGGANERALNMLTEIGTVDRIPEYIARAKDKNDPFRLMGFGHRVYKNYDPRAKIMQKTAHEVLGELGIKDDPLLDIAIELERIALTDDYFIEKKLYPNVDFYSGITLKALGFPTTMFTVLFALARTVGWIAQWNEMIEDPDQRIGRPRQLYTGAPLREYVPLSKR

SEQ ID NO: 29125 - protein, 275 aa, Methanopyrus kandleri AV19
MSGLVLERIFEEAEGEGRGALIGYLTCGHPGLEETVSLARALRDGGVDILELGVPFSEPIADGPTIQKAVDEALRAGTTPWDCLEVAEEVSEFVPVVLLCYYNTLHANGFERYLSAAAEAGVSGIIVADMPVEESDEVHSVARDLEIDVIYLVAPSTTDERLKKIGERASGFVYVISRYGVTGARRDLSEDTLELVRWVRDHVDVPVAVGFGISERWHVEEVIAAGADGAIVGSAFIKEIHRSEDIAEAEERVRELAKELVEGARDGYRRRSSSE

SEQ ID NO: 29126 - protein, 180 aa, Shigella flexneri 2a str. 301
MTLKELLVGFGTQVRSIWMIGLHAFAKRETRMYPEEPVYLPPRYRGRIVLTRDPDGEERCVACNLCAVACPVGCISLQKAETKDGRWYPEFFRINFSRCIFCGLCEEACPTTAIQLTPDFEMGEYKRQDLVYEKEDLLISGPGKYPEYNFYRMAGMAIDGKDKGEAENEAKPIDVKSLLP

SEQ ID NO: 29127 - protein, 383 aa, Campylobacter jejuni RM1221
MNLIPEILDLQGEFEKIRHQIHENPELGFDELCTAKLVAQKLKEFGYEVYEEIGKTGVVGVLKKGNSDKKIGLRADMDALPLQECTNLPYKSKKENVMHACGHDGHTTSLLLAAKYLASQNFNGTLNLYFQPAEEGLGGAKAMIEDGLFEKFDSAYVFGWHNMPFGSDKKFYLKKGAMMASSDSYSIEVIGRGGHGSAPEKAKDPIYAASLLVVALQSIVSRNVDPQNSAVVSIGAFNAGHAFNIIPDIATIKMSVRALDNETRKLTEEKIYKICKGLAQANDIEIKINKNVVAPVTMNNDEAVDFASEVAKELFGEKNCEFNHRPLMASEDFGFFCEMKKCAYAFLENENDIYLHNSSYVFNDKLLARAASYYAKLALKYLK

SEQ ID NO: 29128 - protein, 484 aa, Desulfotalea psychrophila LSv54
MNSWSPALTRGICLHLLCSFFFVTSLAYASENDLEILEKSSKAFASVARQAKPAVVNIRVEKTIKGGQMDGWQIPDEMLEHPFFKQFFGPQLRKRQNVPPRLQQGQGSGFIVSDDGYILTNNHVVDGADSITVRLNDDSSYQAKLIGTDPLSDVALIKIESSKKLPSLAMGSSAALEVGEWVIAIGNPFGLSQTVTVGIVSAKGRSQVGLNEYENFIQTDAAINPGNSGGPLLNIRGQVIGINSALFSQTGGYMGIGFAIPIDMVKSIERQLQATGKVSRGWLGVMIQDIDENLAQSFGLKSSSGVLLTGVQPDSPAEKGGLLGGDVIIAIDGSAVKNASALRNRVALVLPGSKVVLQVIRKGKKRDIGVLIGERPVGANGLSIEDHTVLNNNFGLSFEKLTPEIAKKFGYAQKKGVVIREVAPQSPASRAGLKAGMLIEEVNRMAIGQVADIKKALALGKDARHVLLRVGFGQGSRYIALVAK

SEQ ID NO: 29129 - protein, 231 aa, Arabidopsis thaliana
MDQQDHGQSGAMNYGTNPYQTNPMSTTAATVAGGAAQPGQLAFHQIHQQQQQQQLAQQLQAFWENQFKEIEKTTDFKNHSLPLARIKKIMKADEDVRMISAEAPVVFARACEMFILELTLRSWNHTEENKRRTLQKNDIAAAVARADVLDFLVDIVPREDLRDEVLGSIPRGTVPEAAAAGYPYGYLPAGTAPIGNPGMVMGNPGGAYPPNPYMGQPMWQQQAPDQPDQEN

SEQ ID NO: 29130 - protein, 279 aa, Mycoplasma genitalium G37
MKYLYATQHLTLNAIKHAKGGHVGMAIGASPILFSLFTKHFHFDPDQPKWINRDRFVLSAGHGSMALYSIFHFAGLISKQEILQHKHGQINTSSHPEYAPNNFIDASTGPLGQGFGMAVGMVLAQKLLANEFKELSDKLFDHYTYVVVGDGDLQEGVSYEVSQIAGLYKLNKLIVLHDSNRVQMDSEVKKVANENLKVRFENVGWNYIHTDDQLENIDQAIIKAKQSDKPTFIEVRTTIAKNTHLEDQYGGHWFIPNEVDFQLFEKRTNTNFNFFNLSR

SEQ ID NO: 29131 - protein, 548 aa, Candida albicans SC5314
MARAPQGMPDLSNAIVAQDEMGRPFIIVRDQGKKERKHGIEATRSHILAARSVASIVKTSLGPRGLDKILISPDGEITITNDGATILSQMDLENQIAKLLVELSRSQDDEIGDGTTGVVVLASALLDQALELIDKGIHPIKIANGFDEACRIAVEHLNTVADNILIDDKENLLRAAKTSLGSKIVSKAHDHFAKMAVDAVLEVADLDRKDVDFELIKMEKKVGGSIEDSSLIKGVLLDKDFSHPQMPKEVRDCKIAILTCPFEPPKPKTKHKLDISTVEEFKVLQEYEQKKFQEMIDAVKQSGANVVACQWGFDDEANHLLLANGLNAIRWIGGSELELLAIATNGRIVPRFEDLTPDKLGTAGVIRELEFGTTKDRMLVIEECSNTKAVTCFIRGSNEMIAAEGIRALHDSLCVVRNLVRDSRVVYGGGAAELTCSLAVSEAADRQKGIDQYAFRAFATALDTIPMTLAENSGLDPIETLSALKSKQVNENSSHLGVDCLGKGTNDMKELFVIDPLIGKRQQLLLATQLTRMILKINDVIISGKDEY

SEQ ID NO: 29132 - protein, 584 aa, Thiobacillus denitrificans ATCC 25259
MNRRRFDALIVGGGGAGLRAALQLARSDHKVAVVSKVFPTRSHTVSAQGGITAALANVDDDRWEWHMYDTVKGGDWLGDQDAIEFMCREAASAVYELEHMGLPFSRLDDGRIYQRPFGGQSKNFGGEQATRTCAAADRTGHALLHTLYQQNIAHRTQFFDEYFALDLVRDDAGYCLGVTALSIETGEPVLIEARTTLLATGGAGRIFGNTSNAMINTGDGLGMVLRAGLPLQDMEFWQFHPTGIAGVGSLITEGARGEGGYLLNRHGERFMERYAPHARDLAGRDVVARAIAIEIAEGRGCGPRADYVELKIDQLGEQTISEKLPGIRELAIRFAGVDPVEKPIPVAPTAHYMMGGIPTDLHGQVVAPARFGPEEPVPGLYAVGECACVSVHGANRLGGNSLLDLIVFGRAAGRHMLDYLRDNPYPRALPENAAEASLQRLARWERPGGERVAAITDDLRRMMGAHAGVFRTETSLREGLRKLDLLEARLAHAGLQDTSRIFNTARIEALELENLIGVARATLVSAIHRTESRGAHTREDFPRRDDENWLRHTLYSREGDQVDSKPVRLKPLTVESIRPKERVY

SEQ ID NO: 29133 - protein, 287 aa, Mycoplasma genitalium G37
MYCLNADVSRSCFIKIGDDNLHENPCSRNIQIGIREFAMATIMNGMALHGGIKVMGGTFLAFADYSKPAIRLGALMNLPVFYVYTHDSYQVGGDGPTHQPYDQLPMLRAIENVCVFRPCDEKETCAGFNYGLLSQDQTTVLVLTRQPLKSIDNTDSLKTLKGGYILLDRKQPDLIIAASGSEVQLAIEFEKVLTKQNVKVRILSVPNITLLLKQDEKYLKSLFDANSSLITIEASSSYEWFCFKKYVKNHAHLGAFSFGESDDGDKVYQQKGFNLERLMKIFTSLRN

SEQ ID NO: 29134 - protein, 431 aa, Thiobacillus denitrificans ATCC 25259
MKKTVTLTFSDGSPAIELPIEEGTYGKPVIDIRALGAHGYFTHDPGFTATSSCTSSITYIDGDEGLLYYRGYPIDQLAYQSDFMEVSYLLLHGELPTAEQKAGFEQSIRHHTLLHDQIENVFRGFRRSAHPMAVMIGVTGAMSAFYHAGLDNFNPEHREIVAHRLIAKIPTVAAWAYKFNEGQPFVYPQNRLSYAENFMYMMFSSPCEEYVPNPVLARALDRIFILHADHEQNASTSTVRLAGSSGANPYACIASGMASLWGPLHGGANEAVLRMLEEIDDASKIPDFIKRAKDKSDPFRLMGFGHRVYKNMDPRAAIIRRTCYEVLDELGLRDDPQFKIALELERIALEDEYFIERKLYPNVDFYSGIIFRAMGIPTSMFTALFAMARTAGWVAQWHEMLSDPAHKIGRPRQLYAGPARRDFVPLDQRRA

SEQ ID NO: 29135 - protein, 872 aa, Actinobacillus pleuropneumoniae serovar 1 str. 4074
MRNNIHMLGDFLGETIREAQGNEILELIESIRVLSRDSRAGDEKAREQLLDKLANISTENVLPVARAFSQFLNLTNIAEQYQTISRHHQDESLGNRSLSALFARLKAQGTPVETVIKTVEKLSIELVLTAHPTEVTRRSLVHKHVEINKCLGQLEHDDLTEAEQTKLKRRLMQLIALAWHTNEIRAARPTPVDEAKWGMAIIENSLWKAVPDFCRELNFQLEKHFDVQYEVALSPVRFSSWMGGDRDGNPFVTAEITQKVLRMNRWKAAELFLNDVSDLVEELSIVQCTPEFREKYGDHIEPYRVVVKGLRSKLQKTLTYFGELIEAKPTTVDPSEIITCDNDLWEPLYDCYQSLHACGMRIIANGSLLDCLRRIRCFGLGLSRLDIRQESSRHETAIAEITRYIGLGDYAQWTEDDKQAFLVRELSSRRPLVPTNWTPSPETQEILDTCKVVAQQPEGTISAYVISMAREASDVLAVHLLLKEAGCNYTLPVAPLFETLDDLDHSEKVMTDLFNIGWYRGVINNYQMVMIGYSDSAKDAGMLAASWAQYRAQEALVNLAEKYHIELVLFHGRGGTVGRGGAPAHAALLSQPPRSLKSGLRVTEQGEMIRFKLGLPAVAVETLNLYASAILEANLLPPPEPKQKWRDIMDKGAAISCEIYRGVVRGEPDFVPYFRSATPEQELGKLPLGSRPSKRNPNGGVESLRAIPWIFAWMQNRLMLPAWLGAGAALRQMIEQGEESTLKEMCNEWPFFSTRIGMLEMVFSKADLWLAEHYDQRLVAKELHRLGKTLRAQLSADIQTVLTLAHDGQLMADLPWIAESIALRNVYTDPLNLLQVELLQRLRSQGEVRDPQLEQALMITITGIAAGMRNTG

SEQ ID NO: 29136 - protein, 544 aa, Saccharomyces bayanus
MKGIKREGWISYKADGMFSFLWQKRYLVLNDSYLSFYKSNKFSEEPVLSVALTSITNVSRIQLKQNCFEILRLADQKDNVSPMNSYFYESNSRKSIFISTRTEQDLHGWLDAIFAKCPLLSGVSSPTNFTHKVHVGYDPKVGNFVGVPDSWAKLLQTSEITYDDWNRNSKAVIKALQFYEDYNGLDTIQTNKSNPSLDFKPLKSPTKYIVNKRTNSIKRSLSKTLRKSKADSILPVYQSELKPFPRSVVNNNSINSEDAKPHENDIVYASKENPTNLRTKQLKRKEQQAIQHHLQKHDSNATLKPRRVAPAAPVAKFHDGKAKIPKGNLLELKDADDSEEIIMKMKTVAIDVNPRPYFQMIEKAGQGASGAVYLSKRIKLPQKNDSRFSNSHCDRIIEERVAIKQIHLSEQPKKQLIMNELLVMNDSHHENIVNFLEAYIIDDEELWVIMEYMEGGCLTDILDATAEVNASNNSSPLNENQMAYIVKETCQGLKFLHDNKIIHRDIKSDNILLNSQGLVKITDFGFCVELTEKRSKRATMVGTP

SEQ ID NO: 29137 - protein, 582 aa, Oceanobacillus iheyensis HTE831
METFKKLKRFYWPYKKYFIWSILFMLVVTSITVVYPIMLQITIDDVVVQSRYELIPWICGLFLGLMVIKGFSTFSFQYLGDLFGMTSVYKLRESLYDKLQTLAFKYYDNAKTGDIMSRLTADVEGFRFFLSVGFAELLRIISLILISLSIMFYYSVPLALVTMAAMPFLAIVVFQFDKRVHPAFRNVRKSFGQLNTRVQENISGMNTVKSLSREDFEIGRFSNSNDNYRQKYLFTSKLWARFFPMMEFIGNVSAVVLLAYGGYLVINETMNPGELVAFFSLVWYIMGPLMNLGFIINQFSQAKASGERLLEILEAKEDIVEKESAIETTIKGHVEFNDVTLTYIKDDDEALKNISFDAPPGKTIGLIGATGSGKTSITQLITRFYEPEQGEVLLDGRPVSDYKLKTLRSQIGFVLQEPFLFSTTIRENISYGNPEVTEDQIVQAAKMAQAHDFIMELPNGYDTLLGERGMGLSGGQKQRIAIARAICIDPSILILDDATSAVDMQTEFKIQKALREVMKNRTSFIIAHRISSLKHADEILVLEDGEIVERGTHDDLVNNNGPYERIFNIQYQDREEILSAVK

SEQ ID NO: 29138 - protein, 573 aa, Saccharomyces bayanus
MLSKSEKHIDLLAGNMSNLSFDGPGTPSSTGLFNVNQNNTNRRMRPTGFNDSPSPIKSSLFPHEDSSNMDIDEVSQSDMDITNSPKKLPPKFYERATSNKTQRVVSVCKMYFLEYYCDMFDYVISRRQRTKQVLEYLQQQSQLPTADQAKLNEEWSSYLQKEHQVLRKRRLKPKNRDFEVITQVGQGGYGQVYLARKKDTKEVCALKILNKKLLFKLNETKHVLTERDILTTTRSEWLVKLLYAFQDLQSLYLAMEFVPGGDFRTLLINTRCLKSGHARFYISEMFCAVNALHDLGYTHRDLKPENFLIDAKGHIKLTDFGLAAGTISNERIESMKIRLEKIKDLEFPAFTEKSIEDRRKMYNQLREKEVNYANSMVGSPDYMALEVLEGKKYDFTVDYWSLGCMLFESLVGYTPFSGSSTNETYDNLRRWKQTLRRPRQSDGRAAFSDRTWDLITRLIADPINRLRSFEHVKRMSYFADINFSTLRSMIPPFTPQLDSETDAGYFDDFTSEADMAKYADVFKRQDKLTAMVDDSAVSSKLVGFTFRHRNGKQGSSGILFNGSEHSDPFATFY

SEQ ID NO: 29139 - protein, 298 aa, Bacillus cereus G9241
MPNIAVVGSISMDLVAVSKKRPKAGETVIGEAFHTIPGGKGANQAVAAARLGANVAMIGAVGNDNYGTVVRKNLENERVFIDYVVPVTDAVTGIAHIVLAEEDNSIVVVQGANALVNEPVVDRSKDLLTKADMVVLQLEIPLETVKYVLAICEEHKIPVMLNPAPAQVLSEDILEKATYITPNEHECRIVLDDFTSPIEELLAKYPNKLLMTEGSNGVRFHNGTEIVHVPSIAVDVVDTTGAGDTFNGALAVALSEGETLQKAIRFANIAGGLSVTKLGAQGGMPTRDKVREVQVIVG

SEQ ID NO: 29140 - protein, 360 aa, Oceanobacillus iheyensis HTE831
MKQVLENIESQFEMFQILDENGKIVNKDDMPDLSDDELKEIMRRMVYTRILDQRSTALNRQGRLGFYAPTAGQEASQLGSQFALEKEDFILPGYRDVPQLIWQGLPLYQAFLFSKGHFHGNQYPDELRALSPQIIIGAQYVQTAGVALGIKKRGNKNVAITYTGDGGTSQGDFYEGINFAGAYKAPAIFVVQNNRFAISVPVEKQTNAKTLAQKAVAAGIEGIQVDGMDVLAVYAATKFARERAVNGEGPTLIETLTYRFGPHTLSGDDPTRYRTEDMDNEWEKKDPIVRFRTYLESKKLWSEEDENNAIEQAKEDIKKAIKQAEEQPKQKVTDLIANMYEELPTHLQEQNEIYKEKESK

SEQ ID NO: 29141 - protein, 475 aa, Vibrio parahaemolyticus
MSKEIKAQVVVLGSGPAGYSAAFRCADLGLETVLVERYSTLGGVCLNVGCIPSKALLHVSKVIEEAKAMADHGVVFGEPQTDINKIRIWKEKVVNQLTGGLSGMAKMRNVTVVNGYGKFTGPNSILVEGEGESTVVNFDNAIVAAGSRPIKLPFIPHEDSRIWDSTDALELKEVPEKLLIMGGGIIGLEMGTVYHSLGSKVEVVEMFDQVIPAADKDIVKVYTKRIKDKFKLMLETKVTAVEAKEDGIYVSMEGKKAPAEAERYDAVLVAIGRVPNGKLIDGEKAGLEIDERGFINVDKQMRTNVPHIFAIGDIVGQPMLAHKGVHEGHVAAEVISGKKHYFDPKVIPSIAYTEPEVAWVGKTEKEAKAEGIKYEVATFPWAASGRAIASDCSDGMTKLIFDKETHRVIGGAIVGTNGGELLGEIGLAIEMGCDAEDIALTIHAHPTLHESVGLAAEVFEGSITDLPNKKAVKKK

SEQ ID NO: 29142 - protein, 448 aa, Zea mays
MVMKEAAEEHDGRRDVTVTVEPALPVQQHRLPLSNLDLLLPPLDVSLFFCYLHPAPTAIALKEALAKTLVAYYPLAGEVVANGDGEPELLCSGRGVDFTETAAAGVELREVRLGAVDEGVEKLVPVKKTGVTMAVKLSKFTCGGAVVGCTFDHRVCDAYSFNMFLVAWAAAARGSSAPPPPDPCFRRSLVAPRDTPHRRAPSTDALINRLFSPRSAAPPPPPAAAGSVNRIYRIAAEDIAALKASAGPGRTKMEAFTALLWQLCARAASPRQSQCCMGVVVDGRTRMFPDGAMKAYFGNVLTIPYGVIGSEDLRCMALADVADDVHRWVAEAATGDHFRGLVDWVEALRPKPAAARAYLGGTGGNEAMACIVSSGMSFPVGKADFGTGLPAFASYHFPWPAGAGYVMPMPSARGNGDWVVYVHVAPEVAKVMEESTVFQALVNSYAFE

SEQ ID NO: 29143 - protein, 337 aa, Schizophyllum commune
MAVKVGINGFGRIGRIVLRNALQLGNIEVVAINDPFIALDYMVYMFKYDTVHGRYKGTVEVKDGKLVVDGHAITVFAEKNPADIKWGSAGADYIVESTGVFTTVEKASLHLQGGAKKVVISAPSADAPMFVVGVNLDKYDSKYQVISNASCTTNCLAPLAKVIHDKYGIAEGLMTTVHATTATQKTVDGPSHKDWRGGRSVNNNIIPSSTGAAKAVGKVIPSLNGRLTGLAFRVPTLDVSVVDLVVRLEKEASYDEIVATVKEASEGPLKGILGFTDESVVSTDFTGANESSIFDSKAGIAISKSFVKLIAWYDNEWGYSRRVCDLLVYAAKQDGAL

SEQ ID NO: 29144 - protein, 546 aa, Triticum aestivum
MGAGARATAAALLLVAAALAGVAAGGDIVHQDDDAPKIPGCSNDFMLVKVQTWVKNRETDEFVGVGARFGPIIESKEKHANRTGLLIADPFDCCTPLKEKVAGEVLLVQRGDCKFTTKAKVAEDAGASAIIILNNRHELYKMVCDQNETDLDINIPAVLLPKDAGTILQGLLSLGKVSVQLYSPDRPLVDTAEVFLWLMAVGTILGASYWSAWSAREALIEQEKLLKDGHESSVNIEAEGSTGMVDITMTSAMLFIVVASLFLVMLYKLMSHWFVELLVVIFCIGGVEGLQTCLVALLSRWFKPAARSFVKVPFFGAVSYLTLAVCPFCIVSAVLWAVYRRMPYAWIGQDVLGIALIVTVIQIVRIPNLKVGSVLLGCSFLYDIFWVFISKMLFHESVMIVVARGDNTDEDGVPMLLKIPRMFDPWGGYSIIGFGDILLPGLLVAFALRYDWAARKTLQSGYFLWSMVAYGSGLLITYVALNLMDGHGQPALLYIVPFTLGTFISLGKKRGELRNLWMKGQPPRVCTHSHHPLKDSADSASHVISS

SEQ ID NO: 29145 - protein, 577 aa, Arabidopsis thaliana
MCGILAVLGCVDNSQAKRSRIIELSRRLRHRGPDWSGLHCYEDCYLAHERLAIVDPTSGDQPLYNEDKTIAVTVNGEIYNHKALRENLKSHQFRTGSDCEVIAHLVKHGEEFVDMLDGMFAFVLLDTRDKSFIAARDAIGITPLYIGWGLDGSVWFASEMKALSDDCEQFMCFPPGHIYSSKQGGLRRWYNPPWFSEVVPSTPYDPLVVRNTFEKAVIKRLMTDVPFGVLLSGGLDSSLVASVALRHLEKSEAACQWGSKLHTFCIGLKGSPDLKAGREVADYLGTRHHELHFTVQDGIDAIEEVIYHVETYDVTTIRASTPMFLMSRKIKSLGVKMVLSGEGSDEIFGGYLYFHKAPNKKEFHEETCRKIKALHQYDCLRANKSTSAWGVEARVPFLDKEFINVAMSIDPEWKMIRPDLGRIEKWVLRNAFDDEKNPYLPKHILYRQKEQFSDGVGYSWIDGLKDHANKHVSETMLMNASFVFPDNTPLTKEAYYYRTIFEKFFPKSAARATVPGGPSVACSTAKAVEWDAAWSQNLDPSGRAALGVHVSAYGEDKTEDSRPEKLQKLAEKTPAIV

SEQ ID NO: 29146 - protein, 967 aa, Glycine max
MANRNLEKMASIDAQLRLLVPAKVSEDDKLVEYDALLLDRFLDILQDLHGEDLKETVQEVYELSAEYEGKHDPKKLEELGNLITSLDAGDSIVVAKSFSHMLNLANLAEEVQIAHSRRNKLKKGDFADENNATTESDIEETLKKLVVDMKKSPQEVFDALKNQTVDLVLTAHPTQSVRRSLLQKHGRIRNNLTQLYAKDITPDDKQELDEALQREIQAAFRTDEIRRTPPTPQDEMRAGMSYFHETIWKGVPTFLRRVDTALKNIGINERVPYNAPLIQFSSWMGGDRDGNPRVTPEVTRDVCLLARMMAANLYYSQIEDLMFELSMWRCNDELRVRADELNRSSKKNSVAKHYIEFWKAIPPNEPYRVLLGEVRNRLYQTRERSRHLLAHGYSDIPEEETFTNVEEFLEPLELCYRSLCACGDRAIADGSLLDFLRQVSTFGLSLVRLDIRQESDRHTDVLDAITKHLEIGSYQEWSEEKRQQWLLSELSGKRPLFGPDLPQTEEIRDVLETFHVIAELPLDNFGAYIISMATAPSDVLAVELLQRECHVKHPLRVVPLFEKLADLEAAPAALARLFSVDWYRNRINGKQEVMIGYSDSGKDAGRFSAAWQLYKAQEELIMVAKQYGVKLTMFHGRGGTVGRGGGPTHLAILSQPPETIHGSLRVTVQGEVIEQSFGEQHLCFRTLQRFTAATLEHGMHPPISPKPEWRALMDEMAVIATEEYRSIVFKEPRFVEYFRLATPELEYGRMNIGSRPAKRRPSGGIETLRAIPWIFAWTQTRFHLPVWLGFGAAFKHVIEKDVRNIHVLQEMYNQWPFFRVTIDLVEMVFAKGDPGIAALYDRLLVSEDLWSFGEQLRTMYEETKELLLQVAGHRDLLEGDPYLKQRLRLRDSYITTLNVCQAYTLKRIRDPNYNVKLRPHISKESIEISKPADELITLNPTSEYAPGLEDTLILTMKGIAAGLQNTG

SEQ ID NO: 29147 - protein, 477 aa, Burkholderia vietnamiensis G4
MSTDDKIQTYEQEDLKRDLKNRHIQMIAIGGAIGTGLFYGSSWAIRTAGPAILLVYLVAAIAIYFVMRALGEMAVEEPVSGSYISYSNRYIHRFAGFLNGWNAFIFLLATSAADLNALGNYMHFWFPGIPIWVTAGAAVSLMFVVNIIGVKIYGEAEFWFSLVKVVAIVAMIVFGVGMVLFGIGNNGVPIGYHNLIDHGGFFPKGAGGTFLAIVMVAFAFGGVENLGLAAGEAQDVKTTMPKAVNATFWRLLIFYVGAIAVLLLVFPWTSLTSKGSPFVEVFTKIGIPAAAGIMNLVVIMAVLSAVNASVFTNSRTFYNLSLQKNAPAFLGVTNSRKVPHRAILMVFATMFAGVMLNYLMPEQAFELFSSVTVFALVCAWGSIVISHLRFRKNKIRKGEDGQLGYKMPFYPYSNYIALIFLAAVLIGIAILPDMRMSLVVSAVWVLVVFIAYTFYVRKESTRESIASETGDAKDLLA

SEQ ID NO: 29148 - protein, 72 aa, Glycine max
ASSWMKKVERKLEEKRARALEKMQNDVAKARRKDEERKASAEAKRGTKVARVLEIANLMRAVGRAPTKRSFF

SEQ ID NO: 29149 - protein, 519 aa, Zea mays
MMEKLNEIVFDILEKVYLVVGGDMQFALALDTNSGPHQIRSCEGDGIDRLEKLSIGGRKQEKALRNRCFGGRVAATTQCILTSDACPETLHSQTQSSRKNYADANRVSAIILGGGTGSQLFPLTSTRATPAVPVGGCYRLIDIPMSNCFNSGINKIFVMSQFNSTSLNRHIHRTYLEGGINFADGSVQVLAATQMPEEPAGWFQGTADSIRKFIWVLEDYYSHKSIDNIVILSGDQLYRMNYMELVQKHVEDDADITISCAPVDESRASKNGLVKIDHTGRVLQFFEKPKGADLNSMRVETNFLSYAIDDAQKYPYLASMGIYVFKKDALLDLLKSKYTQLHDFGSEILPRAVLDHSVQACIFTGYWEDVGTIKSFFDANLALTEQPSKFDFYDPKTPFFTAPRCLPPTQLDKCKMKYAFISDGCLLRECNIEHSVIGVCSRVSSGCELKDSVMMGADIYETEEEASKLLLAGKVPIGIGRNTKIRNCIIDMNARIGKNVVITNSKGIQEADHPEEGVI

SEQ ID NO: 29150 - protein, 473 aa, Citrus sinensis
MAQTQSQPRPHIAVLNFPFSTHASSVPSIIKRLAVSSPTAMFTFFSTPQSNKALFSTGQQRHLPSNVKPYDVSDGVPEGHVFSGKRQEDIELFMNAADANFRKAVEAAVAETGRPLTCLVTDAFIWFAAEMARDWNNVPWIPCSPAGPNSLSAHLYTDIIRDKIGTQSQNQDQQLIHFIPGMNKIRVADLPEGVVSGDLDSVFSVMVHQMGRQLPKAAAVFINSFEELDPELTNHLKTKFNKKFLSVGPFKLLLASDQQPSSATDLDDKYGCLAWLDKQKKKPASVAYVGFGTVATPSPNEIAAIAEDQPGPSLEASKVPFIWSLRHRSQANLPNGFLERTRSDGIVVDWATQVNVLAHEAVGVFVTHCGWGSILESIAAGVPMIGRPFFGDQRINGRMMEQIWGVGIAVDGGGICTKEGLLSSLDLILCQEKGIKIREKVTKLKQLCQNAIGPGGSSMQNLDALVDMISRSY

SEQ ID NO: 29151 - protein, 97 aa, Brassica napus
RSGLTVLRNMAARWHEHLQCWCLNFHGRVTVASVKNFQLVATVDQSQPSGKGDEETVLLQFGKGGDDTFTMDYRQPLSAFQAFAICLASSGTKLACE

SEQ ID NO: 29152 - protein, 657 aa, Silicibacter pomeroyi DSS-3
MAQTQSGAEGLQSLPALLHRNATQYGNHPAYREKEFGIWQCWTWAEVAAEIRAMALGFLELGVAKGDHVAVIGRNRPAHYWSMVAAQMVGAVPVPFYQDAVAEEMAYVMEHCGAKFIVCGDQEQVDKVIEIQETVNQVQQILYTDKRGMRKYDHSQMNALEDVMAEGRAGHYRFDAELDRRIAEITYDDTCVMLYTSGTTGKPKGVVLSNRNVIESAKNSAKFDNLTKDENILSYLPMAWVGDFIFSIGQAYWCGFCVNCPESPDTMMTDLREIGPTYFFAPPRVFETQLTNVMIRMEDASTLKRNMFHHFMAHAKKVGGKILDGEQVSAGDRLKYAIGNALVYGPLKDTLGFGNVRVGYTAGEAIGPEIFDFYRSLGINLKQLYGQTEATVFITVQPDGQVRADTVGVPAPDVEIKIAENGEIFYRSPGTFVEYYKNPESTASTKDAEGWVATGDAGFFEEDTGHLRIIDRAKDVGKMADGSMFAPKYVENKLKFYPDILEAVLFGNGKDRCVAFINIDLTAVGNWAERNNIAYASYQELAGHPKVLDTIRSHVEKVNVSVAEDPMLSGCQVHRFVVLHKELDADDGEMTRTRKVRRRIVEEKFADIIAALYDGSEKVSTVTEVTYEDGRKGAIKATLTICDAKVMPTAPQQVAAE

SEQ ID NO: 29153 - protein, 560 aa, Mesorhizobium sp. BNC1
MPRELSRAACRILVTAALPVAVAAMPAIGFAQTGNGNTVIEPSQQQAPTQQQPEGAPEQPAQPEGSPEQLPAPGGDTELLPVPDTGTQGMRAPQTGIRPQHGPDSVADLAENLLKAVVNISTSQNGGSRRGRVPMPRLPEGSPFEEYFGEFFDGEGGQPRTPGPGASLGSGFVIDGEEGIIVTNNHVIVDADEITVNFSDGSARKAELVGVDTKTDLAVLKIDPEGAALSEVHFGDSETMRIGDWVMAIGNPFGFGGSVTVGIISARNRQIGSGPYDDYIQTDAAINRGNSGGPLFNMAGEVIGINTAIISPSGGSIGIGFAIPSNLALNVVGQLREFGETRRGWLGVRIQPVTDEIAESLGLDEAAGVLVSGIEKGGPADNGLLQAGDIIVGFNGTKVADDRQLRRLVAESGVGKEIDLEILRKGERETVKVTLGRLEEESQPASDTQGEDTEEEGSPLASAQLLGMTIKELDEEGRSQFNLPEDVTGVLVAEVEANSAAAEQGIQPGDVIVEIALQSVSSPQDVLDEVEALKQQGRKNALLMLSSKSGELRFVTLRMN

SEQ ID NO: 29154 - protein, 240 aa, Urochloa panicoides
MSALAIRSAPSSIIASVRTPAHRRPGLVRNAAATTAELTMDPVERLQSGFKQFKSEVYDKKPELFEPLKEGQAPTYMVFACSDSRCCPSVTLGLKPGEAFTVRNIAAMVPPYDKNRYTGIGSAIEYAVCALKVKVLTVIGHSRCGGIKALLSMQDGAADNFHFVEDWVRIGFLAKKKVLTDHPMAPFDDQCSILEKEAVNVSLYNLLTYPWVKEGVSNGSLKLVGGHYDFVKGAFVTWEK

SEQ ID NO: 29155 - protein, 215 aa, Urochloa panicoides
MSGCLCLPGYKKKTMDPVERLQSGFKQFKSEVYDKKPELFEPLKEGQAPTYMVFACSDSRCCPSVTLGLKPGEAFTVRNIAAMVPPYDKNRYTGIGSAIEYAVCALKVKVLTVIGHSRCGGIKALLSMQDGAADNFHFVEDWVRIGFLAKKKVLTDHPMAPFDDQCSILEKEAVNVSLYNLLTYPWVKEGVSNGSLKLVGGHYDFVKGAFVTWEK

SEQ ID NO: 29156 - protein, 405 aa, Shigella flexneri 2a str. 301
MSPIEKSSKLENVCYDIRGPVLKEAKRLEEEGNKVLKLNIGNPAPFGFDAPDEILVDVIRNLPTAQGYCDSKGLYSARKAIMQHYQARGMRDVTVEDIYIGNGVSELIVQAMQALLNSGDEMLVPAPDYPLWTAAVSLSSGKAVHYLCDESSDWFPDLDDIRAKITPRTRGIVIINPNNPTGAVYSKELLMEIVEIARQHNLIIFADEIYDKILYDDAEHHSIAPLAPDLLTITFNGLSKTYRVAGFRQGWMVLNGPKKHAKGYIEGLEMLASMRLCANVPAQHAIQTALGGYQSISEFITPGGRLYEQRNRAWELINDIPGVSCVKPRGALYMFPKIDAKRFNIHDDQKMVLDFLLQEKVLLVQGTAFNWPWPDHFRIVTLPRVDDIELSLSKFARFLSGYHQL

SEQ ID NO: 29157 - protein, 902 aa, Corynebacterium diphtheriae NCTC 13129
MTAAISDRVREDIRLLGRVLGRVIAQQEGEEVYELVEATRRMAFDVSHGDADPEDLMVIFRDLDITKTNLVARAFSYFALLANLVEDLDDESVEADVSLRKTFAKLKREGVSAADAASVIRSAEVAPVLTAHPTETRRRTVFDTQTRIKQLLKDAHHGGDMQVIEQEMYLRMTLLWQTALIRIARPTLEDEIDVGLRYYKKSLLEQVPALNRSIRHSMRETFGLQLPDIAVMRPGSWIGGDHDGNPYVNARTLTYATRQAAKTVARYYVEQLGELERELSLSDRYSSCSKELLALAEASGNNWESRVDEPYRRAVYGMRARMKSNVDALERPEKTAGKKSSKRTPYATPEEFLRDLDVIDRSLRAHNDDVIADDRLARIRSAVTTFGFHLYTLDIRQNSESFEAVIEEVFAAARRVPGGKRYSELAEAEKVELLIQELQTPRPLLFPGALEVEDAFSADTTKELGIFLAAAQAVRDFGSRSIAHCIISMTATVSDILEPMVLLKEVGLRDVDVVPLFETIDDLRCGAAILRELWSHPFYREHLRARGDIQEVMLGYSDSNKDGGYLQANWALYDAELGLVELCREHNIELRLAHGRGGAVGRGGGPTYDAILAQPKGAVSGSVRITEQGEVISAKYGAPETARRHLEAFVSGALEASLLDTEPIADPDRAYAIMRDLAGFSGQRYQELVGDPGFIEYFTQSTPLHEIGELNLGSRPAARKQTTAISDLRAIPWVLSWSQSRTNIPGWFGVGSAVSRFVSAVPEKDRESRWQELRDLYATWPFFRSVMSNMAQVMAKAEISLARLYADLVDDPEVADRIYALIAEEFELTRRAYLAITGNEALVSENQRQARSLKRRYPYLLPLNAIQLELLRRYRGGDDQFLVSKTIQVTMNGLATALRNAG

SEQ ID NO: 29158 - protein, 551 aa, Desulfotalea psychrophila LSv54
MKNTTNTKRTKFIFVTGGVLSSLGKGLAAASIGALLESRGLSITFQKLDPYINVDPGTMNPFQHGEVYVTDDGAETDLDMGHYERFTNAVMGQKNNFTSGRIYHTVINKERRGEYLGGTVQVIPHITDEIKKSVRQLDGSVDIAIIEIGGTVGDIEGLPFIEAIRQLRGDLGRDYTLFIHLTLVPYIKTAGEVKTKPTQHSVRELRADGIQPDILVCRTEVPLEENIKAKIALFCDVQQDAVINCVDVDSIYKLPIALHAEGLDSKILELLNIWTANPNIKPWQDLVENIQNPKNEVTIAITGKYVDLTEAYKSLHEALIHGGLANHTKVKLRYVSAEDLESGDPDSYLKGCDGILVPGGFGRRGVEGKIKAITYARENRIPFFGICLGMQLAVVEFARNMAGMSEAHSTELEPNSPDPVIYLTKEWFDYRTNKIQRRDENSDLGGTLRLGAYPCVLQQESHAGDAYGTQEVFERHRHRFEFNNDYRQQLIEKGLVISGTSPDGDLVEIVEIEDHPWFVGCQFHPEFKSKPMQAHPLFRDFISAAVANKKG

SEQ ID NO: 29159 - protein, 622 aa, Campylobacter jejuni RM1221
MNAKTQEAELEELFQENAKDYITYEKLVKYLTKQPSASTAKKVQALMKKHKVQLFSAAEIAQMKNIEDAKRLQEEKQKLQDTSLENEFDLANENDLLEWSRSDSPVRMYLREMGQIALLNKDEEIEISKKIELGEDIIIDAFCSVPYLIDFILDYKEPLINRERRVKELFKSFDDEEKSDDKLDELDIDEDEENETELESDEENTKKNSKKEDERTLKVIEKFKALEKAKKDWLKTSKDKESGDELLDKLSIAFKKNILKEKLMDLGPTSKLISEIVKSMETALKSDEEFDKELKRLEYRLPMFSDELKKRHADILKDITKLSKEEITERALETTMVSTYMEIKKLFQTKEASEKSFDLEKSRLKEILEQIKRGKKISDEAKGRMAKSNLRLVVSIAKRYTNRGLPFLDLIQEGNIGLMKAVDKFEYKRGYKFSTYATWWIRQAISRAIADQARTIRIPIHMIETINQINKIIREHLQKDGKEPDVSVIAKEVGLSVDKVKQVIKITKEPISLEAPIGNEDDGKFGDFVEDRNSLSPMDHILKDDLKEQIDEVLDQLNDREKAVIRMRFGLMDDESDRTLEEIGKELNVTRERVRQIESSAIKKLKHPKVGRKLKNYIEGWK

SEQ ID NO: 29160 - protein, 564 aa, Candida albicans SC5314
MESITKVSMSVCPFVRSTSTQALRQLSQTSGALANQARQCPIAGNAIRAKEISIRSYSSATKPARATAATPSTPEATFNVTSSFELGSKETAFDYNGYLGNELEKKRSDKSYRYFNNINRLANEFPKAHRTQEEDKVTVWCSNDYLGMGKNENTLKEMKRVLDKYGSGAGGTRNIAGHNSHAIKLESELAALHKHDAALVFSSCFVANDAVLSLLGQKIKDLVIFSDELNHASMIQGIRNSRARKHIFKHNNLADLESKLAQYPKSTPKLIAFESVYSMCGSIAPIEAICDLAEKYGALTFLDEVHAVGMYGPHGAGVAEHLNFEAHLKSGIERPEITTVMSRVDMVTGTLGKAYGVVGGYITGKTNLIDWFRSYAPGFIFTTSLPPAIMAGCSASIRYQRATLKDRIAQQKNTRLVKNNLNELGIPVIPNPSHIVPVLVGNAADAKRASDLLLNKHDIYVQAINFPTVPIGEERLRITPTPGHGPELSKQLVEAVDSVFTELNLNRINDWKKLGGLVGVGVEGAAKVEHIWTEEQLALTDADLNPNVVNPAISPLDVSSGIST

SEQ ID NO: 29161 - protein, 351 aa, Glycine max
  misc_feature (101)..(101): Xaa can be any naturally occurring amino acid
  unsure (1)..(351): unsure at all Xaa locations
GNGKLGRRWTFSFPTGCSFVGPHPQQQTERVPPSDSVSRDDDVAVEAQTEEVSGFADDHGSFDIHNLSPNGSGYFRSWQKGDILGKGSFGTVYEGFTDDGXFFAVKEVSLLDDGSQGKQSLFQLQQEISLLSQFRHDNIVRYLGTDKDDDKLYIFLELVTKGSLASLYQKYRLRDSQVSAYTRQILSGLKYLHDRNVVHRDIKCANILVDANGSVKLADFGLAKATKLNDVKSSKGSPYWMAPEVVNLRNRGYGLAADIWSLGCTVLKMLTRQPPYSHLEGMQALFRIGRGQPPPVPESLSTDARDFILKCLQVNPNKRPTAARLLDHPFVKRPLLSPISPVSPSINLLMS

SEQ ID NO: 29162 - protein, 1083 aa, Saccharomyces cerevisiae
MSSEDIIYDPQFKPVQGIYENRLRQFIDTGGDYHDLNLPKFYDKKRISLDHDHVKVWWYQVSFERGSSPVSPDKRPSWKSIIERDKKGELEFREANINQPFGPSWSTTWFKVKISLPEDWVKSNEQLLFQWDCSNEGIVIDPKTLIPVTAFSGGERTEYVLPKTSDGKHFFYIEAGNNGMFGCGAGSTINPPDDNRFFHLRKADIVWPDLDARALYIDFWMLGDAARELPGDSWQKHQARQLGNAVMNLFDPNDRSSVRKCRELLQREYFDSFLESSKVYEQGESQVLTNVYGIGNCHIDTAWLWPFAETRRKIVRSWSSQCTLMDRFPEYKFVASQAQQFKWLLEDHPEFFNKVLIPKIQQSQFFAVGGTWVENDTNIPSGESLARQFFFGQRFFLKHFGLKSKIFWLPDTFGYSSQMPQLCRLSGIDKFLTQKLSWNNINSFPHSTFNWAGIDGSQLLTHMPPGNTYTADSHFGDVLRTAKQNKTPEYYGSGLMLYGKGDGGGGPTEEMLQKMRRIRSMNNRNGNVIPKLQVGITVDEFYDDILKRTNQGHDLPTWSGELYFEFHRGTYTSQAQTKKLMRLSEIKLHDLEWIAAKTSVLYPDSYKYPSKQINELWENVLLCQFHDVLPGSCIEMVYKYEAVPMLHNVVKECTSLIDKTVQFLQSQSKADLVEMRTLTWSKPEKVSEECSLNGSYTSSVTGYDDYIVLANGKLKVIICKKTGVITSITDETLGVEYLDTEHGRNKLGANQFVIYDDKPLGWQAWDTELYSVNQYKYVTKPKKVQLSCNTKEKCAVEAIFQISEKCKIKSVISLNATAVTDAKLSKVDISTTVENWDARNKFLKVEFPVNIRNDFASYETQFGITKRPTHYNTSWDVAKFEVCHHKFADYSEYSKGVSILNDCKYGFSTHGNLMRLSLLRSPKAPDAHADMGTHEIKYAIYPHRGALSSDTVKLAHEFNYCFKYKLPKDIGMNFDDIISISGDENVILSNIKRGEDDSAVKSNYSLNPRDEQSIVVRVYESLGGESFASLNTTLNLKRIEKVDNLEMKVYKSLTATRDESNHAINRIPIKLRPFEIASFRLYF

SEQ ID NO: 29163 - protein, 124 aa, Calonectria ilicicola
QTARRSTGGKAPRKQLASKAARKSAPSTGGVKKPHRYKPGTVALREIRRYQKSTELLIRKLPFQRLVREIAQDFKSDLRFQSSAIGALQESVESYLVSLFEDTNLCAIHAKRVTIQSKDIQLAR

SEQ ID NO: 29164 - protein, 968 aa, Hydrilla verticillata
MAARNSNHVERMASVDAQLRMLAPSKVSEDDNLVEYDALLLDRFLDILQDLHGEDLRETVQSCYELSAEYESTLNPEKLEELGKMLTSLDPGDSIVVASSFSHMLNLGNLAEEVQIAFRRRIKLKKGDFADENSATTESDIEETLRKMVVQLKKSPQEVFDALKNQTVDLVLTAHPTQSIRRSLLQKHSRIRNCLAQLYAKDVTPDDKQELDEALQREIQAAFRTDEIRRTPPTPQDEMRAGMSYFHETIWKGVPKFLRRVDTALRNIGINERVPYNAPLIQFSSWMGGDRDGNPRVTPEVTRDVCLLARMMAANLYYSQIEDLMFELSMWRCSDELRVRATEIHGSSKSVAKHYIEFWKQIPPHEPYRVVLGEVRDKLYKTRERARQLLANGFSDIPEETTFTNIEQFLEPLELCYRSLCSCGDQPIADGSLLDFLRQVSTFGLSLVKLDIRQESERHTDVMDAITNHLGIGSYRAWSEEKRQEWLLSELRGKRPLFGPDLPKTEEIADVLDAMHVIAELPFDNFGAYIISMATAPSDVLAVELLQRECHVKKPLRVVPLFEKLADLETAPASVARLFSIDWYLNRIDGKQEVMIGYSDSGKDAGRLSAAWQLYKAQEELIQVAKKYGVKLTMFHGRGGTVGRGGGPTHLAILSQPPETINGSIRVTVQGEVIEQSFGEERLCFRTLQRFTAATLEHGMRPPISPKPEWRALMDEMAVVATDEYRSIVFKDPRFVEYFRSATPELEYGRMNIGSRPSKRKPSGGIESLRAIPWIFAWTQTKFHLPVWLGFGSAFKHVIGKDPKNLQMLQEMYNEWPFFRVTIDLVEMVFAKGDPVIAAMYDKLLVSKDLQPFGECLREKYTETKDLLLKVAGHKDLLEGDPYLKQRLQLRDSYITALNACQAYTLKRIRDPGYNVQARPHLSKDMVNNGKSAAELVKLNPGSEYAPGLEDTLILTMKGIAAGMQNTG

SEQ ID NO: 29165 - protein, 876 aa, Kluyveromyces lactis NRRL Y-1140
MTGEKKLSNKVINCITQLPYKIEKISDDDTEANDPSCWSIEPISGNSALQSSLKYLNESPNWEHHIVAWTGEILNSDENPDRSMYLTQAEKEVIATMLQGKEAEGCTHTVHPVWLLRKDQYRWRKFAENVIWPALHYILNAPDDGTLENVWWYDYVKFNEAYAMKVAQIYQPGDIIWVHDYYLMLLPQLLRMRFNNATIAYFHDTPWPSNEYFRCLSRRKPVLDGLLGSNRICFQNDGFARHFVSSCQRLLGCTATKSSNSNANNSDEYRITSYGGDVLVDSLPIGVDTEQIQRDAFSPDVDEKVNAIKKAYEGKKIIIGRDRLDTVKGVLQKLQAYQVFLAMYPEWRGKVVLIQVSGPTAKTDANIKLESQVNELVSSINGEYGNLNYSPVQHYYLRIPQDVYYSLLRVADVCLITSVRDGMNTTALEFVTVKSQLSKYNCYASPLILSEFSGTSTILTDAIIINPWDAVAVSKAINKALKLTPEQKETLELKLRKEVPTIQDWTDKFLGKVVDLVEHKIGNQKITPALNRPLLLKTYKKAKRRLFLFDYDGTLTPIVQDPAAAIPSARLYSIITKLAQDPKNKIWLISGRDQQFLNRYFGTKIPQVGLSAEHGCFMKDVSSEEWINLTSKFDMSWQKEVGQIMEEYTKKTPGSFIERKKVALTWHYRRSDPQLGEFNADALKTSLEKITDGLGVEVMEGKANIEVRPSFVNKGEIVKRLVWTPHGAKQLIEDNFSIDENVLRDELPEFVLCLGDDVTDEDMFKQLNHIEEQWDEKYPNFESSDGFGIYPVTVGSASKKTVAKAYLTDPQQVLDTLGLLVGDVSLFQSAGTVDLDDRGHLKDSESSLRSEQASAAYAMKRSTSSNNGLKKSSKNN

SEQ ID NO: 29166 - protein, 970 aa, Hydrilla verticillata
MASTARNPNHLERMASVDAQLRMLAPSKVSEDDNLVEYDALLLDRFLEILQDLHGEDLRETVQSCYELSAEYESTLDPQKLEELGNMLTSLDPGDSIVVASSFSHMLNLGNLAEEVQIAFRRRIKLKKGDFADENSAATESDIEETLKKLVVQLKKSPQEVFDALKNQTVDLVLTAHPTQSIRRSLLQKHSRIRNSLAQLYAKDVTPDDKQELDEALQREIQAAFRTDEIRRTPPTPQDEMRAGMSYFHETIWKGVPKFLRRVDTALRNIGINERVPYNAPLIQFSSWMGGDRDGNPRVTPEVTRDVCLLARMMAANLYYSQIEDLMFELSMWRCSDELRVRATALHRSSRSVAKHYIEFWKQIPPNEPYRVILGEVRDKLYKTRERARQLLSNGFSDIPEESTFTNIEEFLEPLELCYRSLCSCGDQPIADGSLLDFLRQVSTFGLSIVKLDIRQESDRHTDVLDAITNHLGIGSYRDWSEEKRQEWLLSELRGKRPLFGPDLPKTDEIADVLDTMHVIAELPFDNFGAYIISMATAPSDVLAVELLQRECHVKKPLRVVPLFEKLADLETAPAAVARLFSIDWYLNRINGKQEVMIGYSDSGKDAGRLSAAWQLYKAQEELIKVAKQYGVKLTMFHGRGGTVGRGGGPTHLAILSQPPDTINGSIRVTVQGEVIEQSFGEERLCFRTLQRFTAATLEHGMHPPLSPKPEWRALMDEMAVVATDEYRSIVFKDPRFVEYFRSATPELEYGRMNIGSRPSKRRPSGGIESLRAIPWVFAWTQTKFHLPVWLGFGSAFKHVIDKDPKNLQMLQEMYNEWPFFRVTIDLVEMVFAKGDPGIAAMYDKLLVSKDLLPFGERLREKYTETKNLLLKVAGHKDLLEGDPYLRQRLRLRDSYITTLNACQAYTLKRIRDPGYNVQLRPHLSKEMVDSSKSAAELVKLNPGSEYAPGLEDTLILTMKGIAAGMQNTG

SEQ ID NO: 29167 - protein, 468 aa, Oceanobacillus iheyensis HTE831
MVVGDFPVEVDTLVVGAGPGGYVAAIRAAQLGQKVTIVDKGALGGVCLNVGCIPSKALIEAGHKYENAHGSEDLGIKTDKVEVDFSKVQDWKGSVVNKLTSGVESLLKGNKVDIVKGEAYFVDANTAKIAGESSSQTYKFKDCIIATGSSPIEIPSFKFSDRVLDSTGALSLKEIPKKMVVIGSGYVGTELGTAYANFGTEITFLEGAKDILGGFEKQMTQLVKKGLKKKGATIITEAMAKGVEETKDGVKVSYEVNGKEETIEADYVLVTVGRRPNTDELGLEQMGVKMTDRGHIEIDKQCKTSVDNIYAIGDIVEGPALAHKASYEGKIAAEAISGEKSEIDYVGIPAVAFTEPELATVGLSEQDAKDAGYDVKVGKFPFGANGRALSLNNTEGFLKLITRKDDGLVIGGQIAGPNASDMISEIGLAIEAGMTAEDISLTIHAHPTLGEITMEAAEVALGTPIHTM

SEQ ID NO: 29168 - protein, 316 aa, Bradyrhizobium japonicum USDA 110
MSTSANIGDLANVSSGAKPVHVICLGLSALDQVWRVDRPFSGGSEKIKAVAYGTLGGGMAANASVAVAKLGASVAFWGRAGNDAAGHEMKSAFTAEGVDVENFRLFADGRSSVSGIIVDSSGERQIVNFRGLFPEAANWLPLDAVARASAVLADPRWVEGAATLFCEARSRGIPTVLDGDMADAEVFERLLPLTDHAIFSEPALTAFAGSADDKSLAALARFGCRVIAVTRGEGGVSWYEDSELHRQAAFSVDVVDTTGAGDVFHGAYTLAIAAGLDVRAAMMFSAATAAMKCRHAGGRNGIPTINECLVFMRTKP

SEQ ID NO: 29169 - protein, 609 aa, Rubrivivax gelatinosus PM1
MSQAVTGGAAAGAGAKARSVRPLRGLLPFLKPYRGRIVLAGLFLVGAALTTLVFPVALKALIDQGLVSSDPGERVLALRGHFFALFGVGAALGVFSALRFYMVTWLGERITADLRNAVYAHVVKQSPQFFETTQTGEVLSRLTTDTTLVQTVVGSSLSMGLRNTVMGLGALVMLVITNPVVMAQVLGILVLVVLPALWFGRKVRSLSRASQDRVADSSAIAAEVLNAVPVVQSYTQEAREAQRFDESTARAFATAVRRTRMRAGLVAFIITATFGALLWGLYQGTQAVIRGEISAGHLGQTVVYVILLVSSVAVLAEVWGDLLRAAGASERLMELLATRSPIESPARPRALAAAPIGSRVSLRDVVFRYPSRPLTPALDGVTIDVEPGQTVALVGPSGAGKSTVFQLLLRYYDTQGGTVAIDGVPVREADLGALRSRIGLVPQDSVIFSTSAMENIRYGRPEASDDEVIAAARAAHADTFIRALPEGYASFLGERGVRLSGGQRQRISIARAILKNAPLLLLDEATSALDSESERAVQAALDEAMRGRTTLVIAHRLGTVMHADRIVVLDAGRVVDSGTHTELLARSGLYQRLAASQFSDAQAMAVNDA

SEQ ID NO: 29170 - protein, 210 aa, Oryza sativa (japonica cultivar-group)
MVMVTAAAARRRPSLGRQKIEIRRIESEEARQVCFSKRRAGFFKKASELSILCSADVAAVVFSPAGKAYSFGHPSVEFLLDRFLSSSLPATAGKEEGSSVSVVAELNRQYGELRAMVDAHKARRERAEKTMEKQRQRQPAAWMDPEAEVGRMAPEELMALGTKLVAVQGGVAARADQMLRDALLLGRRPNTTTTTTTRAPPGFFHLHPHF

SEQ ID NO: 29171 - protein, 436 aa, Oryza sativa
MAQWDALVDAALARLASRNLLRATRPIALAPPPAPPETFAGPGPWDRAAVEIQLDRATLHQWLAEGGEATGQEEEVDEKLILFSGNDYMGLSSHPAIRKAAVKAAQEYGMGPRGSALICGYTTYHKLVEESLAELKKKEDCLLCPTGFSANMAVMTALGSVSSILSVGRKPAEGERIAVFSDALNHASIIDGIRLVERQQEVVAFVYKHCDMHHLDFLLLFSMDGDFAPLPELVKLRRKYGFLLVIDDAHGTLVCGENGGGAPELFGCENDIDISVGTLSKAAGCQGGFIVCSNRWKRLIQSRGRSFIFSTALPVPVVASVYAALHVSKKERWRRSVIWRHVQYFASLTKLDLTSPIISIVVGSEEAALRAGRHMLRSGFHVTPIRPPTVPQNSCRLRITLSASHSLDDIKRLVDALSPWLPDKHDEQTYVMASKL

SEQ ID NO: 29172 - protein, 166 aa, Pseudomonas aeruginosa UCBPP-PA14
MRKEYVMSAFHDLTLLGLDGQDLPLSPFKGKVLLVVNVASKCGLTPQYAGLENLYQTYRERGFAVLGVPCNQFAGQEPGSEADIQSFCSLNYGVSFPMSAKVEVNGSARHPLYRLLAGEGAEFPGDITWNFEKFLLGPDGRVLARFSPRTAPDDPALVQAIEKALG

SEQ ID NO: 29173 - protein, 1170 aa, Botryotinia fuckeliana
MNSNDEEALNSVYKKIQRERALLNAANQMRQQTQNEQVRASIDIQMRDGRRNISYLEERMRELQLRTEGRTGSAGSSAGRPPSSGLRDDRAAPPPTPPPKDARGNPIETGDQAGYGDQEYSQIGGHGDMMPPRNPFAPPAPGSGMPRSRPNYTKLDLIKYDTPYLGPRIQLMLSQLEFKLNVEKQYLKGIEKMVQLYQMEGDRKSKADAAARRVESNQKIQILKQALKGYEDLHIDMESSADAPDDDSINTPNMRKPLTGQLVLRIQAVKDVDHATTSRFTRGPETLIAVKVEDNVVARTKNSRTDKWENEIHNIYVDKANEIELTVYDKAGDQALPIGLLWVRISDIVEEMRRKRIEAEINNSGWVSADRMASGGAPPAQFPMSGTSQFGPPPGSAGAGAQPAGANEFGGPGNTVVAPQPIDAWFALEPSGAVKLNISFTKQTKDRRPFDLALGRKGAIRQRKEEVHEMYGHKFISQQFYNIMRCALCGDFLTYTAGMQCEDCKYTCHTKCFSQVVTKCISKSNAETDPDEEKINHRIPHRFEKFNNMSANWCCHCGYVLPFGKKNCRKCTECFLTCHAHCVHLVPDFCGMSMAVANAILDGIRTQKRRQTTPVPLSAKTLREKKPETEGAQIDRNSYGSPEHTRPPRAESYGAPSSSEATQAAQAMYQQSTTSPQQRPAGPDRTSTSSSATAAAAAATAAMGGRQPIPPKDQYSRASTDYTNQVGAQRGSAGHAQPLDKHSEDSPYGATPSAQMPTQPTYNPALYANVDSGYSQPVPQLQNSPLPPPPPTATMYAPPSQGPPPEVPLPAQPGSQQVVPQGQQRKQVPAANDAGTGRRIGLDHFNFLAVLGKGNFGKVMLAETKQTKKLYAIKVLKKEFIIENDEVESTRSEKRVFLIANKERHPFLLTLHACFQTETRVYFVMEYISGGDLMLHIQRGQFGTKRAQFYAAEVCLALKYFHENGVIYRDLKLDNILLTLDGHIKIADYGLCKEDMWYGSTTGTFCGTPEFMAPEILLDKKYGRAVDWWAFGVLIYQMLLQQSPFRGEDEDEIYDAILADEPLYPIHMPRDSVSILQKLLTREPEQRLGSGPTDAQEIMSQPFFRSINWDDVYHKRIAPPFQPSITNATDTSNFDSEFTSVTPVLTPVQSVLSQAMQEEFRGFSYSADFV

SEQ ID NO: 29174 - protein, 542 aa, Novosphingobium aromaticivorans DSM 12444
MAEVSGEQIALSIGHASLRVGGRDGHAIGINGATPGPVIRLKEGQKVRLAVNNTLKEETSIHWHGLLVPFQMDGVPGVSFPGIKAGQTFVYEFPVRQSGTYWYHSHSGMQEAMGMYGAIVIDPAAPDPIAYDREHVIMLADWSFMHPHTQLRKLKAQPGYFNLQKQTLSGLLAGKDQSASERRMWAGMRMDPTDISDVTGATYHFMVNGHDSAANWTGLFAPGERVRLRIINAAAMTNFNVRIPGLAMTVVAADGQNVQPVETDEFQIGIAETYDVIVVPRADEAYGFIAEAIDRSGQVRATLAPRLGMVAPIPAIRERPLLSMQDMGMGDMAAPGADASATDHAAMGHAMPGMDHGSMKMRDPAVAPQVKMGPGVATLSPMPMDRTGERPTGLEKVDHRVLTYRDLKALPPNADKRTPSREIDIHLTANMERYMWSFDGVKFSENTEPIAFRHMERVRVNLINDTMMPHPIHLHGHFFELVTGNPGHHPLKHTVNVLPGGKVSFDLTADELGDWAFHCHMLLHMMSGMFRVVTVRHEEDAA

SEQ ID NO: 29175 - protein, 475 aa, Vibrio vulnificus YJ016
MNSLFRQQCYLLGEWRSAPQTMTITNPFNDEVIGTVPNMGEKETQEVIAGADKAFQQFKALTAQERANLLHRWHQLILEHSDELAHIMTLEQGKPLAEAKGEVLYAASFIEWFAEEARRAYGTLVPSHKANAKILVTKEPIGVVAAITPWNFPAAMITRKCGPAFAAGCPVILKPAPDTPFTALALAVLAEKAGFPAGVFNVITGDAVAIGGELTSNKRVRKLSFTGSTPVGKLLMRQSADNIKKLSLELGGNAPFIVFEDADLDAAVEGAMIAKFRNAGQTCVCANRLYVQRSVYTEFCEKLVEKVSALNVGNGFDQGVHLGPLINDAAVAKVVQHVEDAQSKGAHIECGQLPTAGSRLVQPLVLSGVTDEMLVAQEETFGPMAPLFVFDSEEEVLARANNTDFGLAAYFYTQSLSRAWRVSEALEAGIVGVNEGLISTTVAPFGGVKESGLGREGSFLGMDDYMESKYILMGL

SEQ ID NO: 29176 - protein, 141 aa, Haematococcus pluvialis
MMVWQPINNKQYETFSYLPPLTSDQIARQVDYVVGNGWIPCLEFADASQAYVSNASTVRFGSVSACYYDNRYWTLWKLPMFGCTDPSAVLTEISRASKAFPQAYIRMVAFDNVRQVQIMSFLVQRPRAATDYCELSKRSVA

SEQ ID NO: 29177 - protein, 384 aa, Xylella fastidiosa Temecula1
MTGIPPPSRFPEQPIPPWRRAVLKVGSSLLAADGGGLSPRFALDLAHFVSANITAGRQLVIVSSGAVAAGRALIPPLPESGGALAARQALAALGQAQLIALWQRFFDRPVAQVLLTHDDLRNRRRYLNARATLRELLHLGTLPVVNENDTVSVDELKLGDNDNLAAIVAALIDAQALFIATDIDGLYTTDPRHHSDAQPLHEVRTLTPENLAMAGDSSSTVGTGGMRTKLEAALKAGAAGIDTYLFNGRSSDVVRGLAQHRLRGTRIHPTCTPIAARKYWLRHAPVEPGAILIDAGAAAALAQQGASLLPGGVLSAEGDFRRGDMIQIATRSPDHPSHPLARGLVQYSAADVRRIAGCHSRDIQTLLGYTYGDTIVHRDDLVLL

SEQ ID NO: 29178 - protein, 425 aa, Xylella fastidiosa Temecula1
MSHIRHLAQQCRDAARILATLSTDAKRRLLETMATALNTDAATILAANAADLDAARTQQVGTAMLDRLALDPQRLAAMADALRDIAALPDPVGQVTRDDRRPNGIHIQKIRVPLGVIAMIYEARPNVTADAAALCIKAGNGIILRGGSEAIRSNIAIATALQRALRLASLPETALILVQDMARHTMLELLQLSDLIDLVIPRGGEGLIRFVAEHARIPVIKHYKGVCHQFVDASADIEMAIRLLIDGKTTRPAACNALETLLVHTDIAPRFLPAAAAALRPYGVQLRGDHATCTLLPDVLLATDADYAAEYLDLILAIRIVPNLDAALEHIRRYGSDHTEVIVTADPAHADTFVQQLPSAVVMVNASSRFSDGGALGLGAEIGISTTRLHAYGPMGLDALTVERFVVRGQGQVRHCPPYPPAPRR

SEQ ID NO: 29179 - protein, 461 aa, Zea mays
MQSLLVPTAASAPVAAPRARRNLPMRLSVRASATAAAAPRRETDPKKRVVITGMGLVSVFGNDVDAYYDRLLAGESGIGPIDRFDASKFPTRFAGQIRGFSSEGYIDGKNDRRLDDCLRYCIVSGKKALEAAGIAHGSKPMEKIDKTRAGVLVGTGMGGLTVFSDGVQNLIEKGYRKITPFFIPYAITNMGSALLGMDIGFMGPNYSISTACATSNYCFYAAANHIRRGEADIMIAGGTEAAIIPIGVGGFVACRALSQRNDDPKTASRPWDKDRDGFVMGEGAGVLVMESLEHAIKRDAPIIAEYLGGAVNCDAYHMTDPRSDGLGVSSCIKQSLEDAGVAPEEVNYINAHATSTLAGDLAEVNAIKQVFKDPSGIKINATKSMIGHCLGAAGGLEAIATVKAITTGWVHPSINQFNPEEAVEFDTVPNVKKQHEVNVGISNSFGFGGHNSVVVFAPFKP

SEQ ID NO: 29180 - protein, 125 aa, Calonectria ilicicola
KQTARRSTGGKAPRKQLASKAARKSAPSTGGVKKPHRYKPGTVALREIRRYQKSTELLIRKLPFQRLVREIAQDFKSDLRFQSSAIGALQESVESYLVSLFEDTNLCAIHAKRVTIQSKDIQLAR

SEQ ID NO: 29181 - protein, 126 aa, Calonectria ilicicola
TKQTARRSTGGKAPRKQLASKAARKSAPSTGGVKKPHRYKPGTVALREIRRYQKSTELLIRKLPFQRLVREIAQDFKSDLRFQSSAIGALQESVESYLVSLFEDTNLCAIHAKRVTIQSKDIQLAR

SEQ ID NO: 29182 - protein, 124 aa, Calonectria ilicicola
QTARRSSGGKAPRKQLASKAARKSAPSTGGVKKPHRYKPGTVALREIRRYQKSTELLIRKLPFQRLVREIAQDFKSDLRFQSSAIGALQESVESYLVSLFEDTNLCAIHAKRVTIQSKDIQLAR

SEQ ID NO: 29183 - protein, 714 aa, Candida albicans SC5314
  misc_feature (695)..(695): Xaa can be any naturally occurring amino acid
  unsure (1)..(714): unsure at all Xaa locations
MSKKNPGDPRVKKNAFVHKLYTMLHDPALSHLIWWTNRNGEQNTFALCPGKEFADCLTQYFKHGNVASFVRQLHMYGFHKVSDPLPITYPPNGNNNNNNNNKEVPPVWEFKHSSGRFKRGDETSLVYIKRRSSSNHTSGSTIYAEPIYNPLLTNPYNQPQFMYQDYSMGPPVEVQQFYNYQNQPLMYYQQPPGQVPPPPPPSLPPHQQPEMALQYHQYNNYQQPPPAPPAPPPQPGNVLFGYQQVAPPQQPGSTVQQIPANAPPTLDQTQPLSYTPQLEYQQQQYPQPPLPPPPPQLQLQTSPGIPKVNDNLSRPSPNEQHLQFRKIWPDENNEANSKPRNPSLMFDPLLRVNSEGSPKTQPNHSVSLLNNEVRSESSTSSSSTTVTSTALPPPSAIDRSVSLVGGSPFDLSSRMNNQQSFNRTPSISTPPTQNGRLPKISSPLIPSNTESQSPTMVTGTDNDVGVTSKGSTSIISVSKKPSVFSNSLQERLRPSMFEYHPIGNNLSKDVLTIPKISTNSNSGSRTTSQSSMSSASALSSKKSSLSSISSTHGNLSILNSTNYRSTSVGGSGSGPFSTSTSTSTTSPTLSSLLHHPQHEPQNSTIANGTSIRSSISSSQSISSPPLTTTTTTTTTDQRQLSNSPISRQQQQQPNNNTNKKVSVTSLLLPSHSQSQGYAQPLYKSSVIAEEENSTXSSGGGYRSKSDDDTDNMNK

SEQ ID NO: 29184 - protein, 274 aa, Vibrio vulnificus CMCP6
MVAEIVAGTLYGSMALLADGWHMGTHAAAFCITLFAYRYAKKHAHSARFSFGTGKVSVLGGFTSAIALGIVALLMVVESVHRLFNPESIQFNEAILVAVVGLSVNVASMFLLHDHHHHDHGDHHHDHHHEHAHEHHHDHNLRAAYLHVLADALTSILAIAALIIGKFYGWIWLDALMGIVGALVIGKWTFGLVKQTAPILLDESIESNYIEQLKHALSPYATVTDLHVWRISGHHYGAIISLVDHSKTSYEEYKHMLEKFDKIHHLTLELQPAK

SEQ ID NO: 29185 - protein, 116 aa, Cylindrocladium pseudonaviculatum
TGGKAPRKQLASKAARKSAPSTGGVKKPHRYKPGTVALREIRRYQKSTELLIRKLPFQRLVREIAQDFKSDLRFQSSAIGALQESVESYLVSLFEDTNLCAIHAKRVTIQSKDIQL

SEQ ID NO: 29186 - protein, 218 aa, Arabidopsis thaliana
MHSGKRPLSPESMAGNREEKKELCCCSTLSESDVSDFVSELTGQPIPSSIDDQSSSLTLQEKSNSRQRNYRGVRQRPWGKWAAEIRDPNKAARVWLGTFDTAEEAALAYDKAAFEFRGHKAKLNFPEHIRVNPTQLYPSPATSHDRIIVTPPSPPPPIAPDILLDQYGHFQSRSSDSSANLSMNMLSSSSSSLNHQGLRPNLEDGENVKNISIHKRRK

SEQ ID NO: 29187 - protein, 107 aa, Cylindrocladium sumatrense
RKQLASKAARKSAPSTGGVKKPHRYKPGTVALREIRRYQKSTELLIRKLPFQRLVREIAQDFKSDLRFQSSAIGALQESVESYLVSLFEDTNLCAIHAKRVTIQSKD

SEQ ID NO: 29188 - protein, 716 aa, Zea mays
MATADQSRIFMKDVKRVIIKVGTAVVTRHDGRVSTGNFGVLCEQVKEINALGYEVIIVSSGAVGVGKQRLNYRKLVNSSFADMQKPQTELDGKACAAVGQSGLMALYDMLFTQLDVSSSQLLVTDSDFENPNFRERLRETVESLLDLKVVPIFNENDAISTRKAPYEDSSGIFWDNDSLAGLLAIELKADLLVLLSDVDGLYSGPPSEPQSKMIHTYIKDKYHNEITFGDKSRVGRGGMTAKVKAALVASNSGTPVVITSGSASGSIIRVLQGEKIGTLFHKDASLWEPSSDVSACEMAVTARECSRRLQNLSSDERNKILLDVADALEKNENLIRTENEADVAAAQDAGYEKFLVDRLTLKPGKISALAKSIRTLARMEDPINQILKRTEVAEDLVLEKTSCPLGVLLVVFESRPDALVQIASLAVRSGNGLLLKGGKEAMRSNTVLHKVITGAIPGNVGQKLIGLVTSRDEIADLLKLHDVIDLVIPRGSNKLVSQIKASTKIPVLGHADGICHVYIDKSADMNMAKRIVMDAKTDYPAACNAMETLLVHKDLIKAPGLDDLLLSLKTEGVAIFGGPVAHEVLCIPKADSFHHEYSSMACTIEFVDDVQSAINHIHRYGSAHTDCIITTDDKVAETFLRQVDSAAVFHNASTRFSDGARFGLGAEVGISTGRIHARGPVGVEGLLTTRWIMRGSGQVVNGDKNVAYTHKNLPLQ

SEQ ID NO: 29189 - protein, 248 aa, Salvia miltiorrhiza
TRHSSLKMSEELKYTSHETAKPANEPCETATPVAVESTDRGLFGFGAKKEEEKCQETAISAEFEEKVKVCEEEKKEEAPEEKKHEGFIEKLRRSDSSSSSSDEEEVGEDGLKKKKKKGLKEKVVEKVSGDKEKVSGDKEEEEVKCVDTSVPVEKYDDVVPTQEHEEKKGFLDKIKDKLPGGKKTEEVVSAPPPPAPVAHEYGATPEAEGKEKKGFLDKIKEKLPGYHPKTDEEKEKEKEKEKEKEAAC

SEQ ID NO: 29190 - protein, 479 aa, Yarrowia lipolytica CLIB122
MTITLSQKVGEFASEFAIDGSYVQQGVKHFVDQTAQALSANMERAMPMIPSFVTRIPTGKEKGVQLAVDLGGTNFRVSSVHLNGDHTHKTVASKVAVSDDLMTGTQADFFGFLAQQVKDFLTEHHSEHFSQTEPLRMGVTFSFPVNQVALDKGYLLRWTKGYDIKDAVGKDVVELFQIQLDALDLNVKIVALVNDTVGTLLARAYASKSDDGKHKQTLIGAIFGTGTNGAYSERLKRVPKFTAANYPEVFKRYSPEHIANQTMIINTEWGSYDNDIDVLPNTKWDIDLDENTHNKSFHMFEKRISGMFLGELLRLCLLDLKSEGLLLQSTKLEGNPVWKGFGMDTSVLSFIEAATEAQIETGKGDYEKIIKAMGLAAKDITPEQVAALKPLVTAIGRRSAYLSAIPLAAITLHTHALEKFDVVDIGVDGSVFQFYPKFADMVKEAMGYVEGISVDRIDIGHAEDGSGVGAALAAYPDDS

SEQ ID NO: 29191 - protein, 149 aa, Oryza sativa
MSLVRRSNVFDPFADFWDPFDGVFRSLVPATSDRDTAAFANARVDWKETPESHVFKADLPGVKKEEVKVEVEEGNVLVISGQRSKEKEDKNDKWHRVERSSGQFMRRFRLPENAKVDQVKASMENGVLTVTVPKAEVKKPEVKAIEISG

SEQ ID NO: 29192 - protein, 248 aa, Arabidopsis thaliana
MEEGGSSHDAESSKKLGRGKIEIKRIENTTNRQVTFCKRRNGLLKKAYELSVLCDAEVALVIFSTRGRLYEYANNSVRGTIERYKKACSDAVNPPSVTEANTQYYQQEASKLRRQIRDIQNSNRHIVGESLGSLNFKELKNLEGRLEKGISRVRSKKNELLVAEIEYMQKREMELQHNNMYLRAKIAEGARLNPDQQESSVIQGTTVYESGVSSHDQSQHYNRNYIPVNLLEPNQQFSGQDQPPLQLV

SEQ ID NO: 29193 - protein, 381 aa, Deinococcus radiodurans R1
MPPAVRVPGGLKFMIQPFTADPIRFVAEDGRPVLALPERYTPALLRELHRLMLQGREFDRKLITLLRQGRTSFYSQASGMEATQIGLAKAIRAGHDWVWGYYRDQVLGMGLGVPMFTLISQCLGSNTDECRGRQMPHHFSSRAHNFVSASSSIASQVPPAAGNARAQKYLGTDEITVVTFGDGATSEGDWHTGMNMAGAMQAPCLFVCENNQWAISTHIRHQTASENIHIKAKAYGMPGFYVDGNDVVAVMEVCHHAAEWVRAGNGPALVECLTYRVGSHSNADADAEKSYRTRDEVNEWLGRDPIQRVENLLEHLGDPISAEERAGMIAEIHKQIDDDVRRAEAAGYPDWRIMFEDVYSDMPDHLRQQAAMLREEQGGSA

SEQ ID NO: 29194 - protein, 338 aa, Mannheimia succiniciproducens MBEL55E
MTILVTGGAGYIGSHTIVELLNAGEDVVVLDNLCNSSPKSLERVKQITGKSVKFYEGDVLDRTLLQRIFAENQIKSVIHFAGLKAVGESVQKPAEYYMNNVTGSLVLVQEMKKAGVWNLVFSSTATVYGEPETIPVTENCKVGGTNSPYATSKLMVEQILTDVVKAEPRFSMIILRYFNPVGAHESGLIGEDPNGIPNNLMPYISQVAIGKLPELSIFGNDYDTHDGTGVRDYIHVVDLAIGHLKALTRHEDDAGLHIYNLGTGIGYSVLDMVKAFEKANNMTLPHKFVARRPGDIAAYYSDPSLAAKELSWTAQRGLEQMMKDTWNWQKNNPKGYRD

SEQ ID NO: 29195 - protein, 685 aa, Gluconobacter oxydans 621H
MSTLPQLAINTIRTLSMEGVERANSGHPGTAMALAPAMYAVWQHDLKYDPADPCWPARDRFVLSVGHASMLLYSTLFLTGVKDIRDGKVVDAPSLTVEDLSQFRQLNSKTPGHPEYRFTAGVETTTGPLGQGCGNSVGMAIAQKWMSARYDRPGFKLFDYHVTVFCGDGDMMEGVASEAASTAGHLALGNLTWIYDSNQISIEGSTDLAFTENVGKRFEAYGWHVQTLTDGNDVDAILAALKAARAVTDRPSLIVLKTVIGYGAPKKAGTASAHGEPLGADEIKGAKQAYGWPEDAPDFYVPDGVKEHFAEGLGKRGAEAHAEWRELFSAYREAHPELAAEIDCIIEHRLPEGWDKDIPTFDADAKGIASRASSGQVLNAVAKNLPWMIGGSADLTPSTKTDIKGGGSFQPEKWNGSYGGRNIHFGVREHAMGSICNGIALSGIRAYGSGFLIFSDYMKAPIRLSAIMELPVLYIFTHDSIGVGEDGPTHQPIEQLAQLRATPGIMTIRPSDANEVAEAWRTLIPMTHKPAVLALSRQNLPTIDRTKYASAAGLAKGGYVLASCEGKPDVILIASGSEVSLVVAAYEKLTEEGIKARVISMPSFDLFEEQSQEYRDSVLPPDVIGRVAVEQAAAFGWDRYVGLGGAIIAMNTFGASAPASALLTKFGFTPEAVYDAAKRQALRGK

SEQ ID NO: 29196 - protein, 109 aa, Anabaena variabilis ATCC 29413
MQTLPKERRYETLSYLPPLTDVQIEKQVQYILSQGYIPAVEFNEASEPTEFYWTLWKLPLFGAKTSREVLGEVQACRSQYPGHYIRVVGFDNIKQCQVLSFIVHKPSRY

SEQ ID NO: 29197 - protein, 957 aa, Gluconobacter oxydans 621H
MADTISNTGLNEVGSVLRDLEKYGQSPWLDFIQRSFTEDGSLSKLVEEDGLRGVTSNPAIFEKAIGHGTEYDPQIRKLLEGEGLSPGELYEHLAIDDIRSACAVLDPVFEKTKGLDGYVSLEVSPYLAFDAHGTITEARRLWKAVGRPNLMIKIPGTVEGTGAIREAIADGINVNVTLLFSLDAYKAVLEAYISGLEARVARGEEISRISSVASFFVSRIDAKIDAEIDRRVAAGDPEAEALKAIRGKVAIANAKMAYQYYLEVRNSPRWKALAEKGANPQRLLWASTGTKDKAYSDVLYVEELIGPETVNTIPPATFDAYRDHGKSRASLTENVDQARHVMAEAERLGLGLDGITAKLVKDGCAAFSVSFDTLLTAVATKREAVLGDRLLRVSADLPPDLRDDVAAAEKDWSHSGGLRRIWKKDPSVWTNGPEAGWLNWLTVVQDRLWHIEELEVLARDVRSRGFKDILLLGMGGSSLGPEVLAETFGKREGWPKLHVLDSTDPQQVTAFEKAIDPKNTLFIVASKSGGTLEPNILFAHFWQVAGQALGKKPGDSFIAITDPGSHMQKVAEENGFWRIFYGDPKIGGRYSVLSNFGLVPAAASGIDVRKLLTVTRLMVESCDGSAPPSANPGAVLGLILGHAAHCFNRDKVTILASEGIASLGAWLEQLIAESTGKKGLGLIPIDEEELGTPDVYGTDRVFVDLLLGDDVPDSRLGALRAAGAPVVTIRLADKAQIGQAFFLFEFATAVAGAVLGIDPFDQPDVEFSKLETRKLTSAYAETGSLPPETPFAKDGPLSFYADAKNTEASGNKGDAVSILKALFDRVKPGDYVGLLAYIRRDQQTRDWAQSVRMELRDALKVATAAEFGPRFLHSTGQAYKGGPDSGVFLQVTATDAADVPVPGHGFSFSVVKAAQARGDFEVLAARGRRALRVHIDGPLEDGLKALETAIHKALAGA

SEQ ID NO: 29198 - protein, 246 aa, Gluconobacter oxydans 621H
MTTDIRAATLETLPDSEAVALRMADLLVEGILAKTDGPFRVALSGGSTPKRLFEILATPSRAKQIPWERVEIFYGDERHVPEGHADSNHTVGQSVLLSRVPVPAQNVHAIPTGGTAEEDAKAYEKTLQAAYGAMTLDPQRPLFDLVMLGLGTDGHTASLFPGQPVLKERTAWVGTAAPSTAPYERITLTYPAIQSSALVVFLVTGASKVEMLERLVEGDSSIPSARVTSEGRIIILADRAAVGEYP

SEQ ID NO: 29199 - protein, 300 aa, Hordeum vulgare subsp. vulgare
AVERPVVRLFKPFDELVVDSKDFDVSALEKFIDASSTPKVVIFDKNPDNHPYLLKFFQSNAPKAMLFLNFSTGPFESFKSAYYGAVEEFSGKDVKFLIGDIESSQGAFQYFGLKVDQAPLILIQDGDSKKFLKEHVEAGQIVAWLKDYFDGKLTPFRKSEPIPEANNEPVKVVVADNVHDVVFKSGKNVLIEFYAPWCGHCKKLAPILDEAAATLQSEEDVVIAKMDATENDVPGEFDVQGYPTLYFVTPSGKKVSYEGGRTADEIVDYIRKNKETAGQAAAATEKAAEPAATEPLKDEL

SEQ ID NO: 29200 - protein, 464 aa, Agrobacterium tumefaciens str. C58
MTMTAYDYDLFVIGGGSGGVRSGRVAASLGKRVGIAEEYRYGGTCVIRGCVPKKLFVYASQFPEYFEDAEGFGWSVGERRFDWKKLIAAKDKEITRLEGLYRKGLENAKADIFDSRAELVDAHTVKLTKTGETYTAERIVIAVGGTPNEHKALPGHELTISSNEAFDLEEPPKSILIAGGGYIAVEFANIFHGLGVETTLIYRGKEILSRFDHDMRKGLHEAMEAKGIRIILEDIIEEVSKDGAGGFVARTKQGSSLHVGLVMLALGRDPNTKGLGLENAGVKVDARGAIIVDDYSRTNVPSIFALGDVTDRVQLTPVAIHEAMCFIETEYKNNPTKPDHELIATAVFSQPEIGTVGLSEEEAGKKYRELEVYRAQFRPMKATLSGRQEKTIMKLIVNASDRRVVGVHILGHEAGEMAQLLGITLKAGCTKDDFDRTMAVHPTAAEELVTMYAPSYRVVNGERV

SEQ ID NO: 29201 - protein, 456 aa, Sulfolobus tokodaii str. 7
MTEMRLVIVGNGAAAFAALIRANELGVKPVMISHGIIGGTCVNVGCVPSKRMLRIGEVYDYTRKTLGKDVYPDFFKAFEDKQEIVETLRKEKYIDVLSSYDVEYVEGKAHFVSPKEVKVNGKIIEGDKFIIATGSSPQIPDIPGLKELGYWTNVEALSPNRKISSLAVIGGRALALEFAQMYKRLGVDVLILQRSKIIIPNWEPEISIAVQNYLSKEEGIYIVTDVKIKEIKKGDEGGKIIVTDKGEAEVDEILVATGRRPNVDLNLDVAGVKLNEKGGILVNETLQTTNPNIYAAGDVIGDLMLESLAGKEGSVAAENAILNSGKKIDRLSIPQVIFIEPNVARVGLTYLEAQREYSVESRVVKMSSVAKARILREPQGLIKMNVDKNTKKILGVQMFGKYAAEVINEAALAIRLRATIDDIIDTVHVFPTMAESLKLAAMSFYRDVDKMSCCVD

SEQ ID NO: 29202 - protein, 1102 aa, Rhodobacter sphaeroides 2.4.1
MNQNVSPSTVAVRRTDGIDRSQTDWYKDAIIYQLHIKAFQDANGDGIGDFAGLMQRLDYVQALGVTAIWLLPFYPSPLRDDGYDISDYRSINPSYGAMRDFKLFVQEAHKRGLRVITELVINHTSDQHPWFQRARRAKKGSAARDWYVWSDTDQKFPETRIIFLDTEKSNWTWDPVAGAYYWHRFYSHQPDLNFDNPRVLEEVLKIMRMWLEMGVDGLRLDAIPYLVEREGTNNENLPETHDVLKKIRANLDQHFPDRMLLAEANQWPEDTRPYFGEGDECHMGFHFPLMPRMYMALAQADRHPITDIIRQTPEIPEGCQWGIFLRNHDELTLEMVTAEERDYMWRFYAEDSRARINLGIRRRLAPLMKNDRRKIELLNQMLMSMPGTPIVYYGDEIGMGDNYYLGDRDGVRTPMQWSADRNGGFSRCNPQQLYLPTILDPVYGHQAINVEAQAADPSSLLNWTRRLIAVRKQHPAFGRGSMSLLYPRNRKVLAYVRSHEGTDILCVANLSDTAQAVELDLGRFRGAVPVELTGRSEFPPVGDLPYMLTLPPYGFYWFILSDQQALPSWHQPMPETLPDFITLTTRDGRAETALTGRETRQLEADVLPNWLPLQRWFGAKEEKISAVKLAVLGSLSADHALVRLEADVGGEVQQYFLPASALWGEEQLRAGAPKLSFTLAKVRRGPQVGALIDGAYDEQMAQAMLEALRDGRRLSGAGGEVVFEPGSGLAEIADPGEPRYLGAEQSNISIAFGDRLILKLYRRLRAGEQPDVEVARFLTEVAGYTHTPRYLGVVSLRPAEGEATVLAAAFAFVANMGDAWRGLFDALVRDLGEFGGWSTAEAPEVEKDGFSFPLTIPGLLGQRTAELHQAFATETDEAAFRMEPLTAQHLTGWAEGARREAEAMLSVLERQRTHLPDEVLPLAEALLARREDLLARLDRVTGFEPSGALTRIHGDYHLGQVLLAQDDVAIIDFEGEPRRTLAERREKSSPLRDVAGMLRSFDYAAAAALARHEESFGPASERAVERAEAWRQQAVADFLAAYEGASAGTASLPSDPALKEALLDLFLVQKAVYETSYELGSRPAWVGIPLRGLLELLDRKPA

SEQ ID NO: 29203 - protein, 464 aa, Mycobacterium bovis AF2122/97
MAKLARVVGLVQEEQPSDMTNHPRYSPPPQQPGTPGYAQGQQQTYSQQFDWRYPPSPPPQPTQYRQPYEALGGTRPGLIPGVIPTMTPPPGMVRQRPRAGMLAIGAVTIAVVSAGIGGAAASLVGFNRAPAGPSGGPVAASAAPSIPAANMPPGSVEQVAAKVVPSVVMLETDLGRQSEEGSGIILSAEGLILTNNHVIAAAAKPPLGSPPPKTTVTFSDGRTAPFTVVGADPTSDIAVVRVQGVSGLTPISLGSSSDLRVGQPVLAIGSPLGLEGTVTTGIVSALNRPVSTTGEAGNQNTVLDAIQTDAAINPGNSGGALVNMNAQLVGVNSAIATLGADSADAQSGSIGLGFAIPVDQAKRIADELISTGKASHASLGVQVTNDKDTPGAKIVEVVAGGAAANAGVPKGVVVTKVDDRPINSADALVAAVRSKAPGATVALTFQDPSGGSRTVQVTLGKAEQ

SEQ ID NO: 29204 - protein, 705 aa, Ajellomyces capsulatus
MPSGQKGPLDRRHDTLSDPTDQFLSKFYIDDEQSVLTTDVGGPIEDQHSLKAGNRGPTLLEDFIFRQKIQHFDHERVPERAVHARGAGAHGVFTSYNNWSNITAASFLNAAGKQTPVFVRFSTVAGSRGSVDSARDIHGFATRLYTDEGNFDIVGNNVPVFFIQDAIQFPDLIHAVKPQPDSEIPQAATAHDTAWDFLSQQPSSLHALFWAMSGHGIPRSMRHVDGWGVHTFRLVTDEGNSTLVKFRWKTLQGRAGLVWEEAQALGGKNPDFHRQDLWDAIESGRYPEWELGFQLVNEADQSKFDFDLLDPTKIIPEELVPFTPIGKMVLNRNPKSYFAETEQIMFQPGHVVRGIDFTDDPLLQGRLYSYLDTQLNRHGGPNFEQLPINRPRIPFHNNNRDGAGQMFIPLNTAAYTPNSMSNGFPQQANRTHNRGFFTAPGRMVNGPLVRELSPSFNDVWSQPRLFYNSLTVFEKQFLVNAMRFENSHVRSETVRKNVIIQLNRVDNDLARRVALAIGVEPPSPDPTFYHNKATVPIGTFGTNLLRLDGLKIALLTRDDGSFTIAEQLRAAFNSANNKVDIVLVGSSLDPQRGVNMTYSGADGSIFDAVIVVGGLLTSASTQYPRGRPLRIITDAYAYGKPVGAVGDGSNEALRDVLMAAGGDASNGLDQPGVYISNDVSEAYVRSVLDGLTAYRFLNRFPLDRS

SEQ ID NO: 29205 - protein, 417 aa, Hordeum vulgare
MASAMELSLLNPAMHHYGIAAKTASHLPVVPARRASSGAVRFRVRAAAAAPPAPAAKPGSPKKRGKTEVNESLLTPRFYTTDFDEMEQLFNAEINKQLNQDEFDALLQEFKTDYNQTHFIRNPEFKEAADKMQGPLRQIFVEFLERSCTAEFSGFLLYKELGRRLKKTNPVVAEIFSLMSRDEARHAGFLNKGLSDFNLALDLGFLTKARKYTFFKPKFIFYATYLSEKIGYWRYITIFRHLKANPEYQVYPIFKYFENWCQDENRHGDFFSALLKAQPQFLNDWKAKLWSRFFCLSVYITMYLNDCQRSAFYEGIGLNTKEFDMHVIYETNRTTARIFPAVPDVENPEFKRKLDRMVDINLKIISIGESNDLPLVKNLKRVPLIAQLVSEIIAAYLMPPIESGSVDFAEFEPKLVY

SEQ ID NO: 29206 - protein, 474 aa, Perilla frutescens
MQSLHSTGLRPSPLDPLLKPHRSSAAALPGSNARPPAKKLPFRVSAAAAVAAAPKRETDPKKRVVITGMGLVSVFGNDVDAYYEKLLSGESGITLIDRFDASKFPTRFGGQIRGFKAEGYIDGKNDRRLDDCLRYCIVAGKKALEGADLGGEKLNKIDKIRAGVLVGTGMGGLTVFSDGVKALIEKGHRKITPFFIPYAITNMASALLAIDLGLMGPNYSISTACATSNYCFYAAANHIRRGEADLMIAGGTEAAMIPIGLGGFVACRALSQRNDDPQTASRPWDKDRDGFVMGEGSGVLVMESLEHAMKRGAPIIAEYLGGAVNCDAYHMTDPRADGLGVSSCIQSALEDSGVSPEEVNYINAHATSTIVGDLADVNAIKKVFKNTSGIKINATKSMIGHCLGAAGGLEAIASVKAITTGWLHPTINQFNPEPSIGFDTVANEKQQHEVNVAISNSFGFGGHNSVVAFSAFKP

SEQ ID NO: 29207 - protein, 96 aa, Buchnera aphidicola str. Sg (Schizaphis graminum)
MKIRPLHDRVLVKRNEAELKSAGGIVLTGSAAAKSTRGTITAVGNGRVLDNGQIKPLDVKVGDVVIFNEGYGAKTEKIDNEELLILNESDILAIVE

SEQ ID NO: 29208 - protein, 316 aa, Capsicum annuum
MASLKVPASVPDPCEDAEQLKKAFKGWGTNEELIIQILAHRNAAQRKLIRDSYAAAYGEDLLKDLDSELTSDFQRIVLLWTLSPAERDAYLANEATKRLTASNWVIMEIACTRSSDELFKARQAYHTRYKKSFEEDVAYHTTGDFRKLLVPLITAFRYEGEEVNMTLARKEANILHEKVSGKAYNDEELIRIISTRSKTQLNATFNHYNDQHGHEIIKDLEADDDDEYLKLLRAAIECLKTPEKYFEKVLRVAIKGLGTDEWDLTRVVATRAEVDMERIKEEYNKRNSVTLDRAITGDTSGDYERMLLALIGHGDA

SEQ ID NO: 29209 - protein, 548 aa, Buchnera aphidicola str. Sg (Schizaphis graminum)
MGAKDVKFGNEARIKMLRGVNVLADAVKVTLGPKGRNVVLDKSFGAPSITKDGVSVAREIELEDKFENMGAQMVKEVASKANDAAGDGTTTATLLAQSIVNEGLKAVAAGMNPMDLKRGIDKAVISAVEELKNLSVPCSDSKAITQVGTISANADEKVGALIAEAMEKVGNDGVITVEEGTGLQNELEVVKGMQFDRGYLSPYFINKPETGIVELENPYILMADKKISNVREMLPILESVAKSGKPLLIISEDLEGEALATLVVNSMRGIVKVAAVKAPGFGDRRKAMLQDISILTGGSVISEELAMDLEKSTLEDLGQAKRVVINKDTTTIIGGSGEKQAIQSRIGQIRQEIQEATSDYDKEKLNERLAKLSGGVAVLKVGAATEVEMKEKKARVEDALHATRAAVEEGVVAGGGVALVRVAGKISNLRGHNEDQNVGIRVALRAMEAPLRQIVSNSGEEPSVVTNNVKDGKGNYGYNAATDEYGDMIDFGILDPTKVTRSALQYAASVAGLMITTECMVTDLPREDKSSDVASSPAGGMGGMGGMM

SEQ ID NO: 29210 - protein, 659 aa, Xanthomonas oryzae pv. oryzae KACC10331
MMGSDSGVGIRDSQEQFAASGKIDGSALANPHSPLLTPGTIGAYLQQHESKPLLRFITCGSVDDGKSTLIGRLLYDSKRLFDDQLAALESDSRRHGTQGESIDYALLMDGLAAEREQGITIDVAYRYFDTDRRKFIVADCPGHEQYTRNMATGASTADVAVVLVDARKGLLAQTRRHSYIVSLLGIRHVVLAVNKMDLVDYDAQVFADIAQGYAALAAQLGIADVQCIPLSALAGENLSSASTRMPWYSGPHLLQHLDTVQLEPPEAGSGLRLPVQWVNRPNAQFRGYAGTIAAGQVQVGDAVVVVPSGRRTQVARVLDANGEVDSARAGQAVTLTLRNEIDISRGDIIAAVDDPPEVADQFAGHLLWMDDAALLPGRPYWLKIGTRTVTASISEIKHKVDVNTQERLAAKRLELNEVGYCNLALDEPIAFSPYARNRVLGGFILIDRQSNATVAAGTLEFALRRAGNVHWQHLDVDRSARARIKGQAPRVLWFTGLSGAGKSTVANLVDKRLHALGYHTFILDGDNVRHGLNRDLGFTDEDRVENIRRVAEVARLMADAGLIVLVSFISPFRAERQLARERFDQGEFVEVFVDVPLAVAESRDVKGLYRKARAGQIPNFTGIDSPYEAPETPEIHLHADGENVEALARHVLEYLGLER

SEQ ID NO: 29211 - protein, 442 aa, Escherichia coli K12
MAMFGFPHWQLKSTSTESGVVAPDERLPFAQTAVMGVQHAVAMFGATVLMPILMGLDPNLSILMSGIGTLLFFFITGGRVPSYLGSSAAFVGVVIAATGFNGQGINPNISIALGGIIACGLVYTVIGLVVMKIGTRWIERLMPPVVTGAVVMAIGLNLAPIAVKSVSASAFDSWMAVMTVLCIGLVAVFTRGMIQRLLILVGLIVACLLYGVMTNVLGLGKAVDFTLVSHAAWFGLPHFSTPAFNGQAMMLIAPVAVILVAENLGHLKAVAGMTGRNMDPYMGRAFVGDGLATMLSGSVGGSGVTTYAENIGVMAVTKVYSTLVFVAAAVIAMLLGFSPKFGALIHTIPAAVIGGASIVVFGLIAVAGARIWVQNRVDLSQNGNLIMVAVTLVLGAGDFALTLGGFTLGGIGTATFGAILLNALLSRKLVDVPPPEVVHQEP

SEQ ID NO: 29212 - protein, 239 aa, Thiomicrospira crunogena XCL-2
MAHFTEEMLDTHLTEEHFSHRMGWLRAAVLGANDGIISVVSLLVGVIASGAEKDAILLVAVAALVAGALSMAAGEYVSVSSQSDTEKADLEKEKIALEEDWETEHAELALIYRQRGVSEATANQVATELMEHDALGAHARDELGLSEIHTARPLQAAFASAASFVSGAAVPVILVAILPMENLGIIIASSSLALLAILGAVAAKTGGANMLKGALRMSIWGFLAMALTTYVGLVFGAMG

SEQ ID NO: 29213 - protein, 284 aa, Beta vulgaris subsp. vulgaris
MASSSIVFATIFLASLIATTRANFNNDFAITWGDGRAKILNNGDDLTLSLDKATGSGFQSKNEYLFGSIDMQLKLVPGNSAGHVTAYYLSSFGYNPDEIDFEFLGNASGQPYTLHTNVFAQGKGNREQQFHLWFDPTKDFHTYSILWNPQRIVFSVDGIPIREFKNMESQGVSFPKNQPMRIYSSLWNADDWATQGGRVKTDWTHAPFTASYRNFNANACVWASGSSSCGSSPSADSGSDWLNQELDSASLERMRWVQTNYMVYNYCADLQRFPQGLPTECTTT

SEQ ID NO: 29214 - protein, 457 aa, Ralstonia eutropha JMP134
MKHTPLELMRVRTGDRLERLPVCGYHRFLFAVIALAFFFDNLDLAMMTYLLGSIRSEFGLTPAQAGMLGSASFVGMAVGALGSGVLADRFGRKPVFQVSMIIWGVGSYLCSTAHSPTELGAYRVLLGLGMGMELPLAQTLMSEFIPARQRGKYLALMDGNWPIAFICAGMMSYYVLSAYSWRTMFLLGAVPALFLLVIRRYVPESPRWLESRGRHAEAADIVERIEQSVMRRMKLHALPEVTPMVAAPEPAASGLRVLWSREYRSRTLTVWGLWFFALLGFYGLNTWIGALLQQSGVGVTKSVLYTVYISIGGIPGFLWAAWAVERWGRKPACVATLVGGACMVFIYGRVAGSHSEALVLFLSGGMMQFFMFGMWAVLYTYTPELYPTRARASGCGMASTVGRVGSLLGPALVGLILPVAGQAGVFCLGALCFLAAAGIVCRFGIETRGRALETIAD

SEQ ID NO: 29215 - protein, 124 aa, Zea mays
  misc_feature (54)..(54): Xaa can be any naturally occurring amino acid
  unsure (1)..(124): unsure at all Xaa locations
MARSSFKLEHPFERRQAEANRIREKYPDRIPVIVEKAERSDIPDIDKKKSAISXYLVPADLTVGQFVYVVRKRIKLSAEKAIFIFVKNTLPPTAALMSAIYEENKDEDGFLYMTYSGENTFGLF

SEQ ID NO: 29216 - protein, 267 aa, Oryza sativa (japonica cultivar-group)
MGMHPLPSLVSGGGGGSGLTRRWRRQIRPPRSLAAVDPAPSSPRGERRQGEEKADRRRLRSRLVRRRCSCLVRRLLRHGSQEQGRRGREWIRWRWGEENRVRWRKFSPSLARSPAIREPPPTLATAAPRQFPSLKTLAHRTSLFTSSANAPAPAKEHGYCELGCAARRASAAGTTRGMGRVVDPLALFKRPSPSAGEFCKWVDWELPCYLTSFLTVVILGIRLNAKPNFTLQTRPHQKERQQATATEQQELVSMEAQTERSARLRSP

SEQ ID NO: 29217 - protein, 480 aa, Gluconobacter oxydans 621H
MTEKNNLFINGSWVAPKGGEWIKVENPATKAVVAEVAKGGQADVDAAVSAAKSAFIGWSRRTATERADYIHALKDLVKRDKEKLAAIITSEMGKPLKEARIEVDFAIGLLRFSAENVLRLQGEIIPGSSPEEKILIDRVPLGVIGAITAWNFPLALCARKIGPAVAAGNTIVVKPHELTPLACLHLAKLVEEAKIPHGVINVVTGDGKDVGVPLVAHKDIKLITMTGSTPAGKKIMAAASETLKEVRLELGGKAPFMVMEDADIDRAADAAVTARFNNAGQVCTCNERTYIHEAVYDRFVQKVREKIEALKVGLPTDPSTDMGPKVSEDELNKVHEMVEHAVRQGARLAIGGKRLTGGVYDKGYFYAPTLLTDVTQDMDIVHNEVFGPVMSLIRVKDFDQAIAWANDCRYGLSAYLFTNDLSRILRMTRDLEFGEVYVNRPGGEAPQGFHHGYKESGLGGEDGQHGMEAYVQTKTIYLNA

SEQ ID NO: 29218 - protein, 748 aa, Staphylococcus epidermidis ATCC 12228
MTTIKTSNLGFPRLGRKREWKKAIENYWAHKIDKAELDQTLTDLHKENLLLQKNYHLDSIPVGDFSLYDHILDTSLLFNIIPERFQGREVNDDLLFDIARGNKEHVASALIKWFNTNYHYIVPEWDNVEPKVEKNTLLERFKYAQSINVNAHPVIVGPITFVKLSKGGHQSFEEKVETLLPLYKEVLQSLVDAGAEYIQIDEPILVTDDSESYEDITRKAYDYFANEGLGKYLVIQTYFERVHLKFLSSLPVGGLGLDLVHDNGYNLKQIEDGDFDQSKALYAGIIDGRNVWAADIEAKKQLIETLQQHTQQLVIQPSSSLLHVPVSLDDETLDESIAEGLSFATEKLDELDALRRLFNDNDLSKYEHYKARYERFQSQSFKNLEYDFESVPTHRKSPFAKRKQLQNQRLNLPDLPTTTIGSFPQTREVRKFRADWKNNRITDAEYQEFLQNEIARWIKIQEDIGLDVLVHGEFERNDMVEFFGEKLQGFLVTKFGWVQSYGSRAVKPPVIYGDVKWTAPLTVKETVYAQSLTDKPVKGMLTGPVTILNWSFERVDVPRKVVQDQIALAIDEEVLALEEAGIKVIQVDEPALREGLPLRSEYHEQYLEDAVHSFKLATSSVHDETQIHTHMCYSQFGQIIHAIHDLDADVISIETSRSHGDLIQDFEDINYDLGIGLGVYDIHSPRIPTEEEITTAINRSLQQIDRSLFWVNPDCGLKTRKENEVKDALTVLVNAVKKKRQESESTTA

SEQ ID NO: 29219 - protein, 357 aa, Pisum sativum
MSSLSDLINFNLSDSTEKIIAEYIWVGGSGIDIRSKARTLPGPVSDPAKLPKWNYDGSSTDQAPGKDSEVILYPQAIFKDPFRRGNNILVICDVYTPAGEPLPTNKRYNAAKIFSHPDVAAEVPWYGIEQEYTLLQKDINWPLGWPIGGYPGKQGPYYCGIGADKAYGRDIVDAHYKACLFAGINISGINGEVMPGQWEFQVGPSVGISAGDEIWAARYILERITEISGVVVSFDPKPIPGDWNGAGAHANFSTKSMRENGGYEVIKKAIEKLGLRHKEHIAAYGEGNERRLTGKHETADINVFSWGVANRGSSIRVGRDTEKDGKGYFEDRRPASNMDPYVVTSMIAETTILWKKS

SEQ ID NO: 29220 - protein, 329 aa, Chlamydophila pneumoniae AR39
MPMSNQFDQLKKLSTIVCDSGDPELVKASGSQDATTNPSLILKVAQEPKFQELLNEAVVWGIRQNGDDLQTLSFILDKIQVNFALEIIKNIPGRISLEIDARLSFNVEAMVQRAVFLSQLFEAMGGDKKRLLVKIPGTWEGIRAVEFLEAKGIACNVTLIFNLVQAIAAAKAKATLISPFVGRIYDWWIAAYGDEGYSIDADPGVASVSNIYAYYKKFGIPTQIMAASFRTKEQVLALAGCDLLTISPKLLDELKKSQHPVKKELDPAEAKKLDVQPIELTESFFRFLMNEDAMATEKLAEGIRIFAGDTQILETAITEFIKQIAAEGA

SEQ ID NO: 29221 - protein, 176 aa, Triticum aestivum
MLGQGATQEGSSNVLSVGLPSVVVHQQDEHQPASGVSKVDSSVQGPPPQVGQVTGAKKRKLGSVRRFKQDEAQQEQGQVVNGTSEKPGNEKTDSAQGETGDRTKGVDGANRCITKIIKPVRYHATMTDDVQQVSITFRALRSDGQEVLVDDKELKSTNPLVLINYYEQHLRYSPTA

SEQ ID NO: 29222 - protein, 154 aa, Sesbania rostrata
QKKTKNMGFTDKQEALVNTSYEAFKKNLPGHSVLFYSFILEKEPAAKGLFSFLKDSDGVPQNNPSLQAHAEKVFGLVHDAAAQLRATGVVVLADASLGSVHVQKGVTDPHFVVVKEALLKTLKEAAGATWSDEVSIAWEVAYDGLAAAIKKAMS

SEQ ID NO: 29223 - protein, 578 aa, Agrobacterium tumefaciens str. C58
MFAFRLAPSQIRQQRIFETMKFGLAESEVKRYPVNPMARYVFITGGVVSSLGKGIAAAALGALLQSRGYRVRLRKLDPYLNVDPGTMSPTQHGEVFVTDDGAETDLDLGHYERFTGRSATKTDNITTGRIYKNIIDKERRGDYLGATVQVIPHVTNEIKDFVTEGNDDYDFVICEIGGTVGDIEAMPFMEAIRQLGNDLPRGTAIYVHLTLMPYIPAAGELKTKPTQHSVKELQALGIHPDILLVRADREIPEAERRKLSLFCNVRPSAVIQALDVANIYDVPIAYHNEGLDSEVLAAFGIEPAPKPRLEQWEEVCNRIRTPEGEVTIAIVGKYTGLKDAYKSLIEALHHGGFANRVKVKLEWIESEVFEKEDPTPYLEKVNGILVPGGFGERGSEGKIMAAQFARERNVPYFGICFGMQMAVVEAARHLAGIENASSTEFGPTAEPVVGLMTEWVKGNELEKRSTKGDLGGTMRLGAYKAALKKDTKIAEIYGTTDISERHRHRYEVNVDYKDRLEECGLVFSGMSPDGVLPETVEYPDHPWFIGVQYHPELKSRPLDPHPLFASFVEAAVEQSRLV

SEQ ID NO: 29224 - protein, 148 aa, Sesbania rostrata
GAFTESQEALVTSSYETFKQNASDLSVLFYTFILEKAPGAKNLFSFLKDSDGVPKDNPNLKAHAAKVFELVVDSAVQLRTKGAVVIADANLGPVHVQKGVTDAHFVVVKEALLKTVKEATGAKWSDELSNAWEVAYDELAAAIKKAMG

SEQ ID NO: 29225 - protein, 243 aa, Oryza sativa
  misc_feature (23)..(23): Xaa can be any naturally occurring amino acid
  unsure (1)..(243): unsure at all Xaa locations
MTTGNGDAPVIKNAHSDIDSTNXTLLKSDALYKYVLDTTVLPREPECMRDLRLITDKHQWGFMQSSADEAQLLGMLLKMAGAKRTIEVGVFTGYSLLATALALPEDGKVVAIDPDRESYEIGRPFLEKAGVAHKVDFREGKGLEKLDELLAEEAAAGREAAFDFAFVDADKPNYVKYHEQLLQLVRVGGHIVYDNTLWAGTVALPPDTPLSDLDRRFSVAIRDLNSRLAADPRIDVCQLAIAD

SEQ ID NO: 29226 - protein, 759 aa, Oryza sativa (japonica cultivar-group)
MEEWKDSNHRGADYLMTMPMQNFLADAFPPPELLEGEGGFEKHGLSVAVGSPPPTPPPPEDGCSPLPLTPQFGQKFGSGGGGGGSLADRRARGGFSNVARISVPYNQPAADVSSAGAPSPYVTIPPGLSPTTLLESPVFSNAMGQASPTTGKLHMLGGANDSNPIRFESPRIEEGSGAFSFKPLNLASSHYAAEEKTKSLPNNQHQSLPISVKTEATSIQTAQDEAAANQLMQPQFNGGKRSRAAPDNGGDGEGQPAEGDAKADSSSGAAAVAVVAAAAAAVAEDGYSWRKYGQKQVKHSEYPRSYYKCTHASCAVKKKVERSHEGHVTEIIYKGTHNHPKPAASRRPPVHPPPPSPATTTTTPLPPGDAQADHAPDGGGGSTPVGAGQAGAEWHNGGVVGGEGLVDATSSPSVPGELCESTASMQVHEGAAAAQLGESPEGVDVTSAVSDEVDRDDKATHVLPLAAAAADGESDELERKRRKLDSCATMDMSTASRAVREPRVVIQTTSEVDILDDGYRWRKYGQKVVKGNPNPRSYYKCTHPGCLVRKHVERASHDLKSVITTYEGKHNHEVPAARNSGHPAGSASPGGGAGSSSQPHGVGVGGRRPEVPSVQESLMRLGGGCGAAPFPPHFGLHLPPPPPRDPLAPMSNFPYSLGHAPSPALRGLPPPPPPPPSASALAVAGLGGVVEGLKYPMLAPPSVHSLLRHRQGGGMEAVVVPKAEVKQEAMRPAAAVAGAGRGAAVYQQAMSRVSLGNQL

SEQ ID NO: 29227 - protein, 817 aa, Debaryomyces hansenii CBS767
MNEFPDEHRNSTSFTMHLLGDQVLGELYQDSRELKQWLIKSNCQHHYNKFIENGITFDLLKELDSSSLKEIGINKLGDRLRLELAISSMKSEKLADNITVDELYKIMNLHLTDSITLLSGGNISNGSVSTPTNESGTLTTLTNNPYLHSNVSSSSNAANKDANKNVTFILQDGSTKKVNVTGCFNAQSIKRKVLKRLGIKQQETLYNTYIHTSLNSKSNPGVNLLFDVELVTICYSPDRLEKHRIILCRKDEYPSDMAIESSKRLMAKYERYSQTDSLKTKSQDNFSQYHMPDPRKTHASPILRNFFGQRPPSELISSNLAEYFPEAHQKDLEATVRNSVRYSVRLSRRFNLPSSILSGASSNISIHNSQNKRSSILSNGTVSGPNGAPGTPSVSSMDQNSVAAKRKPSGRTIGEMMVNNINAIDQAVSSNDVQSVFSKPQSIGSDISGPGQGSFEPKSMKSHTSPILNRSSIAASFVDPFHTDNNRNSRIELLSIDSDDDEDDFIDEYGTYTSGELDHDFKDNMLDSISEDGPKNWLQGARIGAGSFGTVYLGMNPLTGELMAVKQVSLPDKNSINNSLQTAMIEALQHEMTLLKEINHENIVRYLGSSTDDNFLNIFLEYVPGGSVQSMLSSYGPFEEPLIRNFIRQILIGLSYLHGEDIIHRDIKGANILIDIKGTVKISDFGISKKVGNSDVDMDDETNSQKKGERRASLQGSVYWMAPEVVKQTAYTKKADIWSVGCLIVEMFTGKHPFPDFSQMQAIFKIGTHITPQIPEWCTSEAKDFLYKTFELDYEKRPDAIDMLAEPFLNPLIMSKQ

SEQ ID NO: 29228 - protein, 311 aa, Triticum aestivum
  misc_feature (130)..(130): Xaa can be any naturally occurring amino acid
  misc_feature (178)..(178): Xaa can be any naturally occurring amino acid
  misc_feature (196)..(196): Xaa can be any naturally occurring amino acid
  unsure (1)..(311): unsure at all Xaa locations
MAGGFRVLHLVRPFLAFLPEVQSADRKIPFREKVIYTVISLFIFLVCSQLPLYGIHSTTGADPFYWMRVILASNRGTVMELGITPIVTSGMVMQLLVGSKIIEVDNSVREDRALLNGAQKLLGILIAIGXAVAYVLSGMYGSVSQLGTGNAILIILQLFFAGIIVICLDELLQKGYGXLGSGISLFIATTICGDYXIGKAFSPTTINSGRGAEFEGAVIALFHLLITRSDKVRALREAFYRQNLPNVTNLLATVLVFLIVIYFQGFRVVLPVRSKNARGQQGSYPIKLITSAAACRSTRGRARQRVGSMAC

SEQ ID NO: 29229 - protein, 1127 aa, ASPERGILLUS NIDULANS FGSC A4
MSPTAIETVPTGKNNWWKEATIYQVYPASFKDSNGDGWGDIPGVIEKVPYLHSLGVDVVWLSPMYDSPMLDMGYDVSDYENVLPAYGTVVDVEKLVEECHKYGMRLILDLVINHTSDQHKWFLESRSSKDNPKRDWAIGCLRATIGGILQGVHVRSLFPTAGHALIRTGTWDEHTQEYYLHLYAKEQPDLNWDNLETRKAIYDSAVRFWLDRGVDGFRVDTVNKYSKYTDFPDAPITDPKSYIQPAIGMWCNGPRIHEFIREMYDEALEPYGDVVTVGELANTPDPAHVLRYVGASAKQLSMVFHLDIGHIGMGSLEDKYVLQPWKLTEMKSIVAKWQTFIEGTDGWTTAFCENHDNGRSVSRFASDAPEHRERSAKMLALMMVAMTGTLFLYQGQEIGMINAPRDWPIDEYKDIEGLGYYREAQAQVASGVDPMREERIMDGLRVLARDHSRLPMQWDDSPEAGFTTGVPWMRTHDLYREINVKKQEGDPDSVLSFWKKVLLLRKRYRHLFIHGAFEVLDFDNLDTFCFIKSRGEERALVVLNFSAGEQPFTQAEMAADMELLVGNYAEAELFPHPCAGISYYSDRWILVTRFIAEGLAFALLHCNRFSLTSIFPCDACRRRKVKCDGQQPCGRCRDAEISCRTTSVRRKKGRQGATATVLHELRKAPAPVAQVQSVPSPQPTVISDPFIRQPGLLHPSVVQSCAEYFFPRMLGTVPILVPTTFQDHVARIEESLHSYCLVTAFCAFVFAQTGYVSWLNAGNQSASLGRLLLDEAMAARRHLDLFSASTRQGITISFLLYGCQIGMGNQRQAYYFLREATTLYTAGMLDPADADDEDAGNLFWLLLISERAHAIRRHRPITLQVTRDSPILCDTRSDAFSLGFRCLAELYRPFDQTFLSRWNGTDSSATTEQLIQLEDHLLQAVPADVELPDIVLADLRVSQQWLRTMIWQLATSAGFLSSTPSRPCLGFAYPLQIARDLSLATWKLSKESLETHGIGLAEKIFEITCTLTDVMACMTSAGLRSSSFDLGPQDYLKHLCTLIHSLPGGETKFLPLLLAKISQTLPSMLTPVTRHLSLPSCMAEQVSVSPNVGIGSPVSHRDDWSKALNWAEMSRIGDRTPEARRGA

SEQ ID NO: 29230 - protein, 530 aa, Perilla frutescens
MAACMSVTCERESGVSALSTTSSNSRRLTKWAAHRRKRVLAKCAPRIRNLVDSSLSLEPRHHLHKSHECFFGFESRNAPMQRGRQKLLHPSAYSGEMMAVAVNPAMEVSPKKKPPTKHRRVVVTGMGVETPLGSDPDVFYNNLLEGVSGISEIEAFDCSQFPTRIAGEIKSFSTDGWVVPKLSKRMDKFMLYMLTAGKKALADGGITVDAMDELNKAKCGVLIGSAMGGMKVFYDAIEALRVSYRKMNPFCVPFATTNMGSAMLAMDLGWMGPNYSISTACATSNFCILNAANHIIRGEADLMLCGGSDAAIIPIGLGGFVACRALSQRNSDPTKASRPWDSNRDGFVMGEGAGVLLLEELEHAKSRGATIYAEFLGGSFTSDAYHMTEPHPQGTGVILCLEKALAQSGVSKEDVNYINAHATSTPAGDLKEYQALLHCFGKNPELRVNSTKSMIGHLLGAAGAVEAVATVQAIRTGWVHPNINLENPDGGVDANVLVGPTKERLDIKVALSNSFGFGGHNSSILFAPYK

SEQ ID NO: 29231 - protein, 325 aa, Mesorhizobium sp. BNC1
MVKAIRLRETGGPEILRLEDYDPGKPGPGEALIEQRAIGLNFIDVYHRTGLYPTAKPFTPGSEAAGVVLEVGEGVEDLKPGDRVAYCVATGGAYAEQRLVRADRLVRVPDAVSDEQAASAMLKGLTAWYLLRRTFPVKAGDTILCHAAAGGVGLVLGQWAKHLGAKVIGTAGSPEKVELAKAHGYDHVIDYTKEDFVAAVGELTSGGKCDVVYDSVGKDTFPGSLDCLRPFGMFVSFGQSSGVVPPFSINLLAQKGSLFATRPSLFTYIAARKDLEEGAQELFSMIERGAVQVRVNQRYPLADVGRAHKDLEARRTTGMTVLIPG

SEQ ID NO: 29232 - protein, 484 aa, Capsicum annuum
SSAFNSPFCTTNSGAPVWNNNSSLTVGARGPVLLEDYHLVEKLANFDRERIAERVVHARGASAKGFFEVTHDITHLTCADFLRAPGVQTPVIVRFSTVIHERGSPETLRDPRGFAVKFYTREGNFDLVGNNFPVFFIRDGMKFPDMVHSLKPNPKSHIQENWRVLDFFSHHPESLHMFTFLFDDIGIPQDYRHMDGSGVHTFTLINKAGKSTYVKFHWRPTCGVKSLLEEEAIRVGGANHSHATQDLYDSIAAGNYPEWKLFIQTMDPAHEDRFDFDPLDVTKTWPEDIFPLQPLGRLVLNKNIDNFFNENEQLAFCPSIVVPGVYYSDDKMLQTRIFSYSDTQRYRLGPNYLQLPANAPKCAHHNNHYDGSMNFMHRDEEIDYFPSRYDPVRHAENYPIPTTVCSGKREKCIIQKENNFQQPGERYRSFSADRQERFIRRWVEALSDPRITYEIRSIWISYWSQADKSLGQKLASRLNVRPSI

SEQ ID NO: 29233 - protein, 324 aa, Hordeum vulgare subsp. vulgare
MPVGPTPGTAAGPPEVGGLPRSSAANEAAAGQQTRPNSMTERARMARVPQPEPALKCPRCDSTNTKFCYYNNYSLSQPRHFCKACRRYWTRGGALRSVPVGGGCRRNKRSSKSSAGAASSSKPSSSSARQLPGGASSMPSTATTTLGPDGASIPPGLSSMSHHLPFMGAMHPPGPNLGLAFSAGLPQLAMQQHHHHMDGVDQFPLASGGGATFGASLEQWRVQQQQQQQFPFLELPPAPPMYQLGLQANRAAGSSAAAPSPVMFTLGQSSASTSRRDEGSMKQTDSKGQEMTLQRHYMQWRLYPRGWRLGWQPSDNTAMAWHWQ

SEQ ID NO: 29234 - protein, 503 aa, Silicibacter pomeroyi DSS-3
MGGPTNSRRRHAMLDAATDLKSLLKTPDLLATKAYIGGQWVDGDNGTFAVTNPARGDVIAEVADLSRAQVAGAIAQAEAAQKEWAKYTGKERAVILRRWYDLMMEHAQDLGRILTAEQGKPLAEAVGEVAYGASFIEFFAEEAKRIYGETIPGHQRDKRITVLKQPIGVAASITPWNFPNAMITRKAGPALAAGCAFVARPAAETPLSALVLAVLAEKAGIPAGVFNVVPSSRSSEIGKEFCENPGVRKLTFTGSTEVGRILLKQAADQVMKCSMELGGNAPFIVFDDADLDAAVEGAMLCKFRNNGQTCVCANRIYVQAGVYDAFAEKLAAAVAKLNVGDGLSDGVTTGPLINAEAVEKVLEHLGDVTAKGGAVLTGGKPHALGGTFFEPTVVTGVTQEMKVAKEETFGPLAPLFKFDDVDEVIAMANDTIFGLAAYFYAKDLSRVYKVAEALEYGIVGVNTGIISTEVAPFGGIKQSGLGREGSHHGIEDYLEMKYICMSV

SEQ ID NO: 29235 - protein, 239 aa, Anabaena variabilis ATCC 29413
MSATQSNDLPLWVQDRDLVIAESTDVQWRYQTPPDYSRSKENLANESTRNHLEGTLEAIVQNLVRTFEMEVSFKTDPQQWLSIVNDQFRVSTNGGPEFTAEDVSAQGTYNLFMADSEHYKASQESFESSAKLFHTTFPQGFPWEVLEVYSGPPTVTFKWRHWGHFQGAYKDYAPTGETVEIIGLSVAHVTDDLKIISLEHYFDNTLFLDKLTAGGKQANGKPEGRGCPFSSWFKKSPKS

SEQ ID NO: 29236 - protein, 492 aa, Capsicum annuum
MDPYKHRPSSAANSPYWTTNSGAPVYNNNSSLTVGARGPILLEDYHLLEKLANFDRERIPERVVHARGASAKGFFEVTHDITRLTCADFLRAPGVQTPVIVRFSTVIHERGSPETLRDPRGFAVKFYTREGNFDLVGNNFPVFFVRDGMKFPDMVHALKPNPKSHIQENWRILDFFSHHPESLHMFSFLFDDLGIPQDYRHMEGSGVNTYTLINKAGKAHYVKFHWKPTCGVKCLLDDEAVKVGGTNHSHATQDLYDSIAAGNYPKWKLFIQTIDPDHEDKFDFDPLDVTKIWPEDILPLQPVGRLVLNKNIDNFFVENEQLAFCPAIIVPGIHYSDDKLLQTRVFSYADTQRHRLGPNYLQLPPNAPKCAHHNNHHEGFMNFMHRDEEVNYFPSRFDPCRHAEQYPIPPRVLNGKRDRCIIQKENNFKQPGERYRSWAPDRQERFICRWVDALSEPRVTHEIRTIWLSYWSQADKSLGQKLASRLNVKPTM

SEQ ID NO: 29237 - protein, 482 aa, Panicum miliaceum
MAATVAVENLNPKVLKCEYAVRGEIVIHAQHLQQQLQTQPGSLPFDEILYCNIGNPQSLGQQPVTFFREVLALCDHPCLLEKEETKSLFSADAISRAKQILSTIPGRATGAYSHSQGIKGLRDAIAAGIASRDGFPANADDIFVTDGASPGVHMMMQLLIRNEKDGILCPIPQYPLYSASIALHGGTLVPYYLDEKTGWGLEISDLKKQLEDARSKGIDVRALVVINPGNPTGQVLAEDNQCDIVRFCKNEGLVLLADEVYQENIYVDDKKFNSFKKIARSVGYGEDDLPLVSFQSVSKGYYGECGKRGGYMEITGFSAPVREQIYKIASVNLCSNITGQILASLVMNPPKVGDESYAAYKAEKDGILQSLARRAKALEDAFNNLEGISCNKAEGAMYLFPQIHLPKKAIEAAKAANKAPDAFYALRLLESTGIVVVPGSGFGQVPGTWHIRCTILPQEDKIPAVITRFKAFHEAFMAEYRD

SEQ ID NO: 29238 - protein, 143 aa, Daucus carota
MQIFVKTLTGKTITLEVESSDTIDNVKAKIQDKEGIPPDQQRLIFAGKQLEDGRTLADYNIQKESTLHLVLRLRGGGKKRKKKTYTKPKKTKHKHRKVKLAVLQFYKVDESGKVQRLRKECPNGECGAGTFMANHFDRHYCGK

SEQ ID NO: 29239 - protein, 450 aa, Desulfotalea psychrophila LSv54
MLEKEFLGKKRELFQSIEETPLATASIAQVHRARLYDGSKIVLKIIRPGNKKLIEEDMALFETLAQIVDQYFSNLGYSARAVAKEFSRQLSQETNFINEGQSTERLGKYFTDDPQIHFPKVYWEATTRNVLALEEIQGEMLASLNPEELTKAQRRSIVANGTNAVFKQCLEFGLFHADPHPGNIILRKDGSLCFIDCGMVGRLDKRTTDQLINLVTGIIDGDSEKLRRVVIELTDVDPALTTTRDFYIELQHLTSQLQSDNLDNFNISEMLSDFFTMLQRFKIRCPSDLLLLTKALTTIEGVAEQFDPSFDVINHVRPMIEKVIVTRYSMKAIHKRFGRSIVQYLELLEEIPGGLHDILERFRRDRFTFNLELKRIEHLASHIDTSSRIMGMSMIIAALIVGSSILILADRISQQPGFIGTLGLLGLAFAGVSTAGFIVSFLLPKAKVDD

SEQ ID NO: 29240 - protein, 534 aa, Desulfotalea psychrophila LSv54
MTIGKESLAGVGECRVSGEFSLDKTIVPLALTKQKKSSPVLGEPLVAGSDLLKEGVRAPKRRISSSQRKQGDSTAAADSMNIYMREMGSLKLLKYDDERKLAQTIEKGKKQVQFAVLQSTLAMPILLQMKETIVENPGKISLFVGGIPDAQFDVIAEACDVFLANWQTCVGLDGQRKKYLKKYLSPSLSADAREKLLFNILQCGKQIAELFEDRVLSSEYVNMVAQAAEDLSKRFRKIFVELIAGEGDLPEEEMRSPEELERLVDLQFIRESGSSLQSLNELLKEVEEGRFISKEAKEALVRANLRLVISVSKRFVNRGLQFSDLIQEGNIGLMKAVEKFDYRRGFKFSTYATWWIRQSITRGIADQGRTIRLPVHMIETINRMLRVSKDFYLEEHREPSVEEVAGQLGTEVDKVKSALKIAKDAISLDTPVGDDGETYLGDFIVDKNCLGPDGFAMVASLKECLSQVLSSLSPREEKVLKMRYGILEKREYTLEEVGRCFNVTRERIRQIEAQAISKLKHPSRCGDLKVFMTD

SEQ ID NO: 29241 - protein, 538 aa, Cicer arietinum
AAFLSENNDDDDEVLLATAEELGVFVPYVGGVEYASVLLPPLETLCTVEETCVRDKSVESLCRIGAQMREQDLVEHFIPLVKRLASGEWFTARVSSCGLFHIAYPSASEGLKTELRAIYGQLCQDDMPMVRRSAATNLGKFASTVEAAHLKTDIMSVFDDLTQDDQDSVRLLAVEGCAALGKLLEPQDCVAHILPVIVNFSQDKSWRVRYMVANQLYELCEAVGPDSTRAELVPAYVRLLRDNEAEVRIAAAGKVTKFSRILNPELAIQHILPCVKELSTDSSQHVRSALASVIMGMAPVLGKDATIEQLLPIFLSLLKDEFPDVRLNIISKLDQVNQVIGIDLLSQSLLPAIVELAEDRHWRVRLAIIEYIPLLASQLGVGFFDDKLGALCMQWLKDKVYSIRDAAANNVKRLAEEFGPEWAMQHIIPQVLDMINDPHYLYRMTILHAISLLAPVLGSEITSSNLLPLVVNAAKDRVPNIKFNVAKVLQSLIPIVDESVVESTIRPCLVELSEDPDVDVRFFASQALQSSDQVKMSS

SEQ ID NO: 29242 - protein, 378 aa, Anabaena variabilis ATCC 29413
MMVCEYKPGLEGIPAAQSSISYVDGQKGILEYRGIRIEDLAQKSTFLETAYLLIWGELPTKEELQVFEEEVRLHRRIKYRIRDMMKCFPESGHPMDALQASAAALGLFYSRRDLHNPVYIRDAVVRLIATIPTMVAAFQLMRKGNDPVKPRDDLDYSANFLYMLNEKEPDALAAKIFDICLILHVEHTMNASTFSARVTASTLTDPYAVVASAVGTLGGPLHGGANEEVIQMLEEIGSVENVRSYVEERLQRKDKLMGFGHRVYKVKDPRATILQGLAEQLFAKFGADKYYDIAQEMERVVEEKLGHKGIYPNVDFYSGLVYRKMGIPTDLFTPIFAIARVAGWLAHWKEQLEENRIFRPTQVYNGKHSVTYTPIDQR

SEQ ID NO: 29243 - protein, 267 aa, Triticum aestivum
  misc_feature (215)..(215): Xaa can be any naturally occurring amino acid
  misc_feature (228)..(228): Xaa can be any naturally occurring amino acid
  misc_feature (230)..(230): Xaa can be any naturally occurring amino acid
  unsure (1)..(267): unsure at all Xaa locations
HYRTSLYKKAGWYRSGIPGISSTHASASSSPSESLPSSSPIAPLQMESPVGQFLSQILVTHPHLLPAAAEQQLEQLQTVQDSAEKKDAQAPPAAGDIVLYRRIAEVKEKERKRTMEEILYALVVQKFVEAGVSLVPALSHSIDTSSGRVDQWAEHVEGKLERLHSHEAYEMIENHLNLILGQRQADGTVAAISKLRVGQVYAASVMYGYFLKRVXQRFQLGESMKSLXPXGSDDDALNQGMTTDSRPSDQTYSSPSRGGGRELPQNL

SEQ ID NO: 29244 - protein, 125 aa, Cicer arietinum
PKCAHHNNHHEGFMNFIHRDEEVNYFPSRHDPVRHAERFPTPPAALSGKRERCIRPKENNFKQPGERYRTWAPDRQDRFARRWIEALSDPRVTHEVRSIWISYWSQADRSLGQKIASHLNMRPSI

SEQ ID NO: 29245 - protein, 355 aa, Streptomyces globisporus
MKALVLSGGSGTRLRPISYAMPKQLVPIAGKPVLEYVLDNIRNLDIKEVAIVVGDWAQEIIEAMGDGSRFGLRLTYIRQEQPLGIAHCVKLARDFLDEDDFVLYLGDIMLDGDLSAQAGHFLHTRPAARIVVRQVPDPRAFGVIELDGEGRVLRLVEKPREPRSDLAAVGVYFFTADVHRAVDAISPSRRGELEITDAIQWLLEQGLPVEAGRYTDYWKDTGRVEDVVECNRRMLGRLALQVSGEVDPESELVGAVVVEEGARVTRSRVVGPAVIGAGTVVEDSQIGPYASIGRRCTVRASRLSDSIVLDDASILAVSGLHGSLIGRGARIAPGARGEARHRLVVGDHVQIEIAA

SEQ ID NO: 29246 - protein, 354 aa, Malus x domestica
MTVSSSLSVAKNGRVLIAGATGFIGRFVAEASLAAGQPTYVLVRPGPLHPSKADTVKSFKDKGAIILHGLISDKTLMEKMLREHEIEIVISAVGGATILDQITLVDAIAAVGTVKRFLPSEFGHDVDRADPVEPGLTMYLEKRKVRRSVETSGVPYTYICCNSIASWPYFDNTHPSEVLPPLDRFQIYGDGTVKAYFVDGTDIGKFTMKTVDDMRTINKNVHFRPPSNLYDINGLASLWEKKIGRTLPRVTVTEDHLLALAADNRIPESIVASFTHDIFIKGCQVNFAVEGPHDVEVGTLYPGDSFRTLDECFDGFLLKLKDNLELELLQEEEDQKVSTENTVVESRTVTATCA

SEQ ID NO: 29247 - protein, 194 aa, Anabaena variabilis ATCC 29413
MLKFLKQVGDYAKEAVQAGRYIGQGLSVTFDHMRRRPVTVQYPYEKLIPGERFRGRIHYEFDKCIACEVCVRVCPINLPVVDWEFDKATKKKKLNHYSIDFGVCIFCGNCVEYCPTNCLSMTEEYELATYDRHELNYDSVALGRLPYKVTDDPMVTPLRELVYLPKGVLDPHDLPANAPRAGARPEDLVEKTEA

SEQ ID NO: 29248 - protein, 757 aa, Buchnera aphidicola str. Sg (Schizaphis graminum)
MTIFNHTLGFPRIGLNRELKKAQEDYWSGNLLYEDFLCVGSQLRRENWKKQKDAGIDYIPVGDFAWYDHVLSTSMMLGNIPERHLNVNDNKIDLDCLFRIARGCSPDVAASEMTKWFNTNYHYIVPEFNKNRILKFSWKQILEETDEALLLGYKVKPIILGPITYLWLGKIKGEYFDRLDLLKNILPIYKQVLRELSQRNIDFVQIDEPALVLDLPEKWKKAYSYAYEYLNGTTKILLTTYFDSIEHNIEYIRDLPIYGIHIDLVFGKYNLFDFNSKLPKEWILSLGVINGRNVWRADLIKLFKSISTILKFRKKLLIGSSCSLLHSPIDLQKEKNLDKESKKWFSFAVQKCTELSLLSKALNKNDTDSIQKWCSSIYERNFSKRVQKIEVQNRLSEILNVNFKRSDSYNIRSREQKKKFNLPILPTTTIGSFPQTLQIRKLRRDYKQGLINDVDYEIGIKKHIKEVIKEQEKLGIDVLVHGEPERNDMVEYFGENLDGFIFTDNGWVQSYGSRCVKPPIIIGDVSRLKPITVKWSKYAQSLTDKPVKAMLTGPVTILFWSFPREDISLEKIAKQIGLALRDEVLDLEKEKIEIIQIDEPALREGLPLRKSLWNEYLSWAVDAFRLSSSGVKNTTQIHTHMCYCEFHDIMHAISFLDADVITIETARSDMELLKSFKTFKYPNEIGPGVYDIHSSNIPSITSIKFLLNKAIAYIPVERIWVNPDCGLKTRNWNETILALKNMVCAAKEMRDKIKKIT

SEQ ID NO: 29249 - protein, 447 aa, Parkia platycephala
SLKGMISVGPWGGSGGNYWSFKANHAITEIVIHVKDNIKSISFKDASGDISGTFGGKDPRENEKGDEKKIKIHWPTEYLKSISGSYGDYNGVLVIRSLSFITNLTTYGPFGSTSGGESFSIPIADSVVVGFHGRAGYYLDALGIFVQPVPHGTISFGPWGGPAGDDAFNFKVGSWIKDIIIYADAAINSIAFKDANGHCYGKFGGQDPNDIGVEKKVEIDGNLEHLKSISGTYGNYKGFEVVTSLSFITNVTKHGPFGIASGTSFSIPIEGSLVTGFHGKSGYYLDSIGIYVKPRDVEGSISIGPWGGSGGDPWSYTANEGINQIIIYAGSNIKSVAFKDTSGLDSATFGGVNPKDTGEKNTVSINWPSEYLTSISGTYGQYKFKDVFTTITSLSFTTNLATYGPFGKASATSFSIPIHNNMVVGFHGRAGDYLDAIGIFVKPDTAV

SEQ ID NO: 29250 - protein, 335 aa, Oryza sativa (japonica cultivar-group)
MPAGSSGGDGEVEAGFAKLQGEDFEYYMQTYSIMLGRNSKKSTVDVDLSSLGGGMNISRHHARIFYDFQRRRFALDVIGKNGCLVEGVLHLPGNHPVKLDSQDLLQIGDKKFYFLLPTRSIFASAAAARHPPIIPQQMPPPSYVRTGRPRLSEFHDRSFEGDYGREGDEIGNGISESGGMRGKLIKRNKKLSAESEMYGGHRINVEAIGTLGEDSRSEIRSRGDRDMDNQHILQAEEKDVVSSVATVLSDLCGPGEWMPMAKLHTELLEQFGNVWHHSRVRKYLSPEDWSPTETKGRPWYGLLALLRKYPEHFVINTRSKGRVTSEFVSLVSLLS

SEQ ID NO: 29251 - protein, 313 aa, Cicer arietinum
ETVAIKKVLQDKRYKNRELQTMRLLDHPNVVTLKHCFFSTTEKDELYLNLVLEYVPETVYRVIRHYSKMNQRMPLIYVKLYFYQICRALAYIHNCVGVSHRDIKPQNLLVNPHTHQLKLCDFGSAKVLVKGEPNISYICSRYYKAPELIFGATEYTTAIDIWSAGCVLGELLLGQPLFPGASGVDQLVEIIKVLGTPTREEIKCMNPNYTEFKFPQIKAHPWHKIFRKRMPPEAVDLVSRLLQYSPNLRSTALEALVHPFLDELRDPNTRLPNGRHLPPLFNFKANELKGVSAEMLVKLIPLHARKQCALFVS

SEQ ID NO: 29252 - protein, 205 aa, Kluyveromyces lactis NRRL Y-1140
MDTETEAEKQERHNNYLNELAEQDRWLPINNVARLMKNTLPATTKVSKDAKECMQECVSEFISFVTSEACDRCTSGKRKTINGEDILLSLHALGFENYAEVLKIYLAKYRQQQAIKNQMMYPKEDVEGSYTEEESRAEDADHVTQERQQPLHPVPSSASTTTSTEVSASEHVQSSSKSTHNPAQAQPRIVVQQPLGSRHSTADHL

SEQ ID NO: 29253 - protein, 448 aa, Xanthomonas oryzae pv. oryzae KACC10331
MCRMPHATCAVLRRRRSGEVARAPNTHEFEPTHAWLCATAPSHVVTATSHCAAGNQPRAMLSSADSRFPIPAMRAAPDILSRVSRVIGCRHSVKECRRVSSLYFRSPRSCHRNYMSIEQLAETAQAMVAPGKGIIAIDESTSTIAKRFASVGIENIEENRRAYRELLLTTPKLSDYISGAILFDETIRQKTKDGVPFAEYMTAHGIIPGIKVDKGAQPLAGMPGELVTEGLDGLRARLEEYYTLGARFAKWRAVITIGEDIPSGTCIEANSHALARYAALCQEQGLVPMVEPEVIMDGSHDIETCYEVTEATLRSLFGALYEQNVVLEGTILKASMVISGKSCEEQASIEEVAESTVMCLKSTVPAILPGIVFLSGGQTDEQSTAHLNEMHQLGTLPWPLSFSYGRAMQQAALKLWAKDMTVNFAKAQQVIYERAKENGLAALGKWKG

SEQ ID NO: 29254 - protein, 76 aa, Zea mays
ILAEKGVVVLPDTYANSGGVVVSYFEWVQNIQGFMWAEEKVNDELEKYMSSAFQHMKAMCKSLVLPKCAMTLELRV

SEQ ID NO: 29255 - protein, 489 aa, Yarrowia lipolytica CLIB122
MVTQQSAAETSATQTNEYDVVIVGAGIAGPALAVALGNQGRKVLVVERDLSEPDRIVGELLQPGGVAALKTLGLGSCIEDIDAIPCQGYNVIYSGEECVLKYPKVPRDIQQDYNELYRSGKSADISNEAPRGVSFHHGRFVMNLRRAARDTPNVTLLEATVTEVVKNPYTGHIIGVKTFSKTGGAKIYKHFFAPLTVVCDGTFSKFRKDFSTNKTSVRSHFAGLILKDAVLPSPQHGHVILSPNSCPVLVYQVGARETRILCDIQGPVPSNATGALKEHMEKNVMPHLPKSIQPSFQAALKEQTIRVMPNSFLSASKNDHHGLILLGDALNMRHPLTGGGMTVALNDALLLSRLLTGVNLEDTYAVSSVMSSQFHWQRKHLDSIVNILSMALYSLFAADSDYLRILQLGCFNYFKLGGICVDHPVMLLAGVLPRPMYLFTHFFVVAIYGGICNMQANGIAKLPASLLQFVASLVTACIVIFPYIWSELT

SEQ ID NO: 29256 - protein, 328 aa, Trichosporonoides megachiliensis
MSYNKNIPLNDGNSIPALGYGTWQAEPGQVGEGVKLAVKAGYRHLDLAKVYQNQTEIGQALKELFDEGVVKREDLFITSKLWNNRHAPEHVEPALDETLKELGLSYLDLYLIHWPVAFKFTTPDELLPADPTNKDLAYVDDSVKLSDTWKAVVALKKTGKTKSVGVSNFSTRLVDLVEEASGERPAVNQIEAHPLLQQDELVAHHKSKNIVITAYSPLGNNVAGKPPLTENPGIVDAAKRLNHTPAAVLIAWGIQRGYSVLVKSVTPSRIKSNFEQITLSDEEFQRVTNLIKEYGESRNNVPFNYKPSWSIDVFGTQDEAKATHKINA

SEQ ID NO: 29257 - protein, 264 aa, Streptomyces avermitilis MA-4680
MSSSDIFIGETIGTAVLILLGGGVCAAVTLKASKARNAGWLAITFGWGFAVLTAVYISAPLSGAHLNPAVTLALAIKDNDWSNVPTYWAGQLLGAMIGAALVWVAYYGQFHAHLTDHEIVGGPGAQATKTKAVEAQETGAGPVLGVFSTGPEVRNVVQNLATEIIGTVVLVLAILTQGLNDNGNGLGTIGALITSLVVVSIGLSLGGPTGYAINPARDLGPRIVHALLPLPNKGGSDWSYAWIPVVGPLIGAAIAAGIYNVAFA

SEQ ID NO: 29258 - protein, 472 aa, Pseudomonas aeruginosa UCBPP-PA14
MDGQHPHSGELKRGLKNRHIQLIALGGAIGTGLFLGSAGVLKSAGPSMILGYAIAGFIAFMIMRQLGEMIVEEPVAGSFSHFAHKYWGGFAGFLSGWNCWVLYILVGMSELTAVGKYIHYWWPEVPTWATAALFFVVVNAINLANVKAFGEAEFWFAIIKVVAIIGMILLGCYLLFSGSGGPQASVSNLWAHGGFFPNGVSGLVMAMAIIMFSFGGLEMLGFTAAEADKPRTVIPKAINQVIYRILIFYIGALVVLLSLTPWDSLLQTLNASGDAYSGSPFVQIFSMIGSGTAAHLLNFVVLTAALSVYNSGTYCNGRMLLGLAEQGDAPRALARVDKRGVPVRALVVSALVTFLAVVVNYVIPHQALELLMSLVVAALVINWAMISMAHLKFRAQMDRQGTRTHFRAFWYPYGNYLCMAFVVFILGVMLLIPGIQVSVYAIPVWLLVMWACYRLKGAPRPMPGLRVKPVTE

SEQ ID NO: 29259 - protein, 328 aa, Trichosporonoides megachiliensis
MSYNKNIPLNDGNSIPALGYGTWQAEPGQVGEGVKLAVKAGYRHLDLAKVYQNQTEIGQALKELFDEGVVKREDLFITSKLWNNRHAPEHVEPALDETLKELGLSYLDLYLIHWPVAFKFTTPDELLPADPTNKDLAYIDDSVKLSDTWKAVVALKKTGKTKSVGVSNFSTRLVDLVEEASGERPAVNQIEAHPLLQQDELVAHHKSKNIVITAYSPLGNNVAGKPPLTENPGIVDAAKRLNHTPAAVLIAWGIQRGYSVLVKSVTPSRIKSNFEQITLSDEEFQRVTNLIKEYGESRNNVPFNYKPSWSIDVFGTQYEAKATHKINA

SEQ ID NO: 29260 - protein, 524 aa, Arabidopsis thaliana
MDLVKPEEISHPPMDQLQGLEYCIDSNPPWGEAIALGFEHYILALGTAVMIPSILVPMMGGDDGDKVRVVQTLLFLQGVNTLLQTLFGTRLPTVIGGSYAFMVPIISIIHDSSLTRIEDPQLRFLSTMRAVQGAIIVASSVQIILGFSQMWAICSRFFSPIGMVPVIALTGFGLFNRGFPVVGNCVEIGLPMLILFVIFSQYLKNFQFRQFPVVERFALIIALIIVWAYAHVLTASGAYKHRPHQTQLNCRTDMSNLISSAPWIKIPYPLQWGAPSFDAGHAFAMMAAVLVSLIESTGAFKAAARLASATPPPPHVLSRGIGWQGIGILLNGLFGTLSGSSVSVENIGLLGSTRVGSRRVIQISAGFMIFFSMLGKFGALFASIPFTIFAAVYCVLFGLVASVGLSFLQFTNMNSLRNLFIVGVSLFLGLSIPEYFRDFSMKALHGPAHTNAGWFNDFLNTIFLSSPMVALMVAVFLDNTLDYKETARDRGLPWWAKFRTFKGDSRNEEFYTLPFNLNRFFPPS

SEQ ID NO: 29261 - protein, 330 aa, Trichosporonoides megachiliensis
MSYKQYIPLNDGNKIPALGFGTWQAEPGQVGASVKNAVKAGYRHLDLAKVYQNQSEIGVALQELFDQGIVKREDLFITSKVWNNRHAPEHVEPALDETLKELGLSYLDLYLIHWPVAFKFTTPQELFPTEPDNKELAAIDDSIKLVDTWKAVVALKKTGKTKSVGVSNFTTDLVDLVEKASGERPAVNQIEAHPLLQQDELVAHHKSKNIVITAYSPLGNNVSGKPPLTQNPGIEATAKRLNHTPAAVLLAWGIQRGYSVLVKSVTPSRIESNYDQITLSPEEFQKVTDLIKEYGESRNNIPLNYKPSWPISVFGTSDEAKATHKINTNL

SEQ ID NO: 29262 - protein, 457 aa, Silicibacter sp. TM1040
MLKNDQLDQWDRDNFFHPSTHLAQHARGESANRVIKTASGVFIEDRDGTKLLDAFAGLYCVNVGYGRQEIAEAIADQARELAYYHSYVGHGTEASITLAKMILDRAPKNMSKVYFGLGGSDANETNVKLIWYYNNILGRPEKKKIISRWRGYHGSGLVTGSLTGLELFHKKFDLPVEQVIHTEAPYYFRREDLNQTEEQFVAHCVAELEALIEREGADTIAAFIGEPILGTGGIVPPPAGYWEAIQTVLNKHDILLVADEVVTGFGRLGTMFGSDHYGLEPDIITIAKGLTSAYAPLSGSIVSDKVWKVLEQGTDENGPIGHGWTYSAHPIGAAAGVANLKLLDELNLVSNAGEVGAYLNATMAEALSQHANVGDVRGEGLLCAVEFVKDRDSRTFFDAADKIGPQISAKLLEQDKIIARAMPQGDILGFAPPFCLTRAEADQVVEGTLRAVKAVLG

SEQ ID NO: 29263 - protein, 320 aa, Bacillus anthracis str. Sterne
MNTFEIKKWMVDQMNKVEIHILGGFLGSGKSTLLQNLLLAEKKKNRKVAVLMNEIGEYSVDTDIIGKENVLRELLKGCICCTLKEELEIQLHSLYQQERPDVIYIETTGVAHPIEVLDACVSPILAPFLEVKSIVVVLDAVRWLNRSVLSANVQQLLHEQLKFGSHILINKSDLLIEADKNKVIEEVKAINNHAKLFETKYCNISLEDIEEAEFTNDTEHETLHVKQHLHIQTMTYQFTKSIDQDKLYEWLSNLPDSIYRVKGFVKFHGDKYPHLFQYSFGVPTLLEQDFGFPTNLVVIGEGLDKKQLAEGLEKVELNSN

SEQ ID NO: 29264 - protein, 491 aa, Silicibacter sp. TM1040
MSLSALSARAEISDKALVRSFSYINGKWCASSNGEVVAVHDPATGDFIGDVTAMTAEDSSAAVDAAHAAFTSWALMLPQDRCALLRRWFELMIEHKEDLARLMVLEQGKPLSEARGEIDYGAAFVEFYAEESKRPNIEGVTSHLPDAEVELWREPVGVAALITPWNFPSAMLTRKAAAALAAGCTVVAHPSAETPFSALALAELAERAGIPKGVFNVITGKAPVVVEPWTRDARVRALSFTGSTEVGKLLYRQSAETVKRLVMELGGHAPVIVFKNCDLDRAVAETIKAKFATSGQDCLGANRIFVERDIYDEFCTRFVAATQALSVGKGIDDPDIGPLMNEKAVQKQEEHVADALEKGATLACGGKRHALGPLFYEPTVLTDVPADALILHEETFGPVAPITPFDSEDEVIQRANDSEYGLVAYVHSHDPRRIYRLSRALQFGMVAVNRTKVTGAPIPFGGTKQSGMGREGARLGMEEFTEVKYVCRDWA

SEQ ID NO: 29265 - protein, 420 aa, Rhodobacter sphaeroides 2.4.1
MRRVVVTGLGMVTPLACGVEETWKRLLAGQSGAGPIQRFDTSNVTTQYACEIPVGDGSDGTFNADDWMEPKDRRKVDDFILYAMAAATQAVKDSGWEPQSEEDRCRTGVMIGSGIGGLSAIADTAVLIKEKGPKRVSPFFIPSALINLASGQVSIRFGYKGPNHAVVTACSTGAHAIGDAARLIQLGDADVMLAGGAESPISEIGIAGFNACKALSTKRGNEPEAASRPWDADRDGFVMGEGAGVVVLEEYEHARARGAKIYAEVLGYGLSGDAYHITAPSEDGDGGFRSMTMALKRAGLEPSAVDYINAHGTSTMADVIELGAVERLLGEAAAAATMSSTKSSIGHLLGAAGAVEAIFCVLAIRDQVAPPTLNLDNPAVEARIDLAPKAARPRKIDVALSNSFGFGGTNASLVLGRVTS

SEQ ID NO: 29266 - protein, 576 aa, Arthrobacter globiformis
MTIEETEEEATYRAGREWFKSAVVYQIYPRSFADSDGDGVGDLRGIIGKLDYLQKLGVDVVWLSPVYRSPQDDNGYDISDYREIDPVFGGLETLDELLDGLHARGMKLVMDLVVNHTSDEHPWFVESRSSKDSPKRDWYWWRPAREGAEPGTAGAEPNNWGSAFSGPAWEYDAATGEYYLHLFSRKQPDLNWENPEVRAAVYDMMNWWLDRGVDGFRMDVINFISKDQTLPDGPRADGMLFGDGGPHYICGPRIHEFLQEMHQEVFAGRDKDLLTVGEMPGVTVDEAVLFTDPGRREVDMVFQFEHVALDQEGGNKWRPKKLLLTDLKKSLGRWQEALGERGWNSLYWGNHDQARAVSRFGDDGEYREQSAKMLAAVLHLHRGTPYVYQGEELGMTNMAFGAISDYRDIEVLNHHREATTHLGHTDAEVLAALAPLNRDNARTPVQWDASRHGGFTTGAPWIAVNPNANTINAAAQVDDPDSVFSFYRRVIALRHADPVVAYGDFTMLLPDDEHVYAFRRSLPDAELLVLGNFSGTGQSAGVDGSWGDAELVLGNYPAAPGLGLRPWEVKVFRRNL

SEQ ID NO: 29267 - protein, 413 aa, Shigella flexneri 2a str. 301
MKRAVITGLGIVSSIGNNQQEVLASLREGRSGITFSQELKDSGMRSHVWGNIKLDTTGLIDRKVVRFMSDASIYAFLSMEQAIADAGLSPEAYQNNPRVGLIAGSGGGSPRFQVFGADAMRGPRGLKAVGPYVVTKAMASGVSACLATPFKIHGVNYSISSACATSAHCIGNAVEQIQLGKQDIVFAGGGEELCWEMACEFDAMGALSTKYNDTPEKASRTYDAHRDGFVIAGGGGMVVVEELEHALARGAYIYAEIVGYGATSDGADMVAPSGEGAVRCMQMAMHGVDTPIDYLNSHGTSTPVGDVKELAAIREVFGDKSPAISATKAMTGHSLGAAGVQEAIYSLLMLEHGFIAPSINIEELDEQAAGLNIVTETTDRELTTVMSNSFGFGGTNATLVMRKLKRLIRSRPE

SEQ ID NO: 29268 - protein, 456 aa, Arabidopsis thaliana
MENKPSVLTERYEVGRLLGQGTFAKVYFGRSNHTNESVAIKMIDKDKVMRVGLSQQIKREISVMRIAKHPNVVELYEVMATKSRIYFVIEYCKGGELFNKVAKGKLKEDVAWKYFYQLISAVDFCHSRGVYHRDIKPENLLLDDNDNLKVSDFGLSALADCKRQDGLLHTTCGTPAYVAPEVINRKGYEGTKADIWSCGVVLFVLLAGYLPFHDTNLMEMYRKIGKADFKCPSWFAPEVKRLLCKMLDPNHETRITIAKIKESSWFRKGLHLKQKKMEKMEKQQVREATNPMEAGGSGQNENGENHEPPRLATLNAFDIIALSTGFGLAGLFGDVYDKRESRFASQKPASEIISKLVEVAKCLKLKIRKQGAGLFKLERVKEGKNGILTMDAEIFQVTPTFHLVEVKKCNGDTMEYQKLVEEDLRPALADIVWVWQGEKEKEEQLLQDEQGEQEPS

SEQ ID NO: 29269 - protein, 189 aa, Glycine max
MISGHWNVTDVCNALLGGFAAITAGCSVVEPWTAIVCGFVASVVLIACNKLAEKVKFDDPLEAAQLHGGCGAWGVIFTALFAKKEYVSQVYGEGRAHGLFMRGGGKLLAAHVIQILVIVGWVSATMGPLFWGLNKLKLLRISSEDELAGMDLTRHGGFAYAYEDDESHKHGIQLRKVGPNASSTPTTDE

SEQ ID NO: 29270 - protein, 389 aa, Basidiobolus ranarum
ELYCLEHGIQPDGQVATEKLTTDDSFSTFFSETGAGKYVPRTVFVDLEPTVIDEVRTGTYRQLFHPEQLINGKEDAANNYARGHYTIGKEMVDSVLDRIRKLADNCNGLQGFLVFHSFGGGTGSGFGALLLERLSVDYGKKSKLEFSVYPAPQVSTAVVEPYNSILTTHTTLEHTDCSFMVDNEAIYDICKRNLDIERPSYANLNRLIAQAVSSITASLRFQGSLNVDLNEFQTNLVPYPRIHFPLITYAPIISAAKAYHETLSVNEITTACFEPNNQMVKCDPRHGKYMACCLLYRGDVVPKDVNAAIAGIKTKRTIQFVDWCPTGFKVGINSQVPAVVPGGDLAKVNRAVCMLSNTTSISEAWARLDHKFDLMYAKRAFVHWYVGEG

SEQ ID NO: 29271 - protein, 518 aa, Xanthomonas oryzae pv. oryzae KACC10331
MPESEDGYAAMPSLVRDVCVNFRGFYREAIMKERQRRTKILATLGPSTDAPGVLDTLFKAGVNVVRLNFSHGDPSGQAKRAAEVRAAAARVGAEVGILADLPGPKIRIERFAEGKIKLTMGDRFDLVADANAPAGDQHQVGVSYLGLPQDVTAGDVLLLDDGLMQLQVTDVQGARIVTTVLNDGVLSDRKGLNKQGGGLSLGALTERDKELIGIVAKIGVDFIAVSFCRNAQDMQDARQIAKQHGCDAQLVSKIERTEAIENLVEIVEASDVVMVARGDLGVEIGDAELPGLQKKIIRESLAQNKVVITATQMLQSMVESPIPTRAEVLDVANAVIDGTDAVMLSAETAAGAYPVRAVEAMARICLGAEHQFEFDTDFEAAQRNLQRADQAIAMATMFLSEHIGLGGVVALTESGGTPRFLSRFRSNMPIYAFTRHDGARRQMAMMRGVFPINFDSRGLTPREAARAAIRLLVENERMGPGDRVVFTSGEHMETHGATNTLRLLEVGDDGRATGLGEL

SEQ ID NO: 29272 - protein, 181 aa, Cicer arietinum
MASSMISSSAVTTVKRASSVPSGAVAPFVGLKSMAGFPVRKVNNDITSIASNGGRVHCMQVWPPIGKKKFETLSYLPPLTEEQLLKEVEYLLRKGWVPCLEFELEKGFVYREHNNSPGYYDGRYWTMWKLPLFGCTEAVQVLKELQEVVKAYPNAFVRIIGFDNVRQVQCISFIAHTPKEF

SEQ ID NO: 29273 - protein, 389 aa, Basidiobolus ranarum
ELYCLEHGIQPDGQVATDKTSSDDSFSTFFSETGSGKYVPRTVFVDLEPTVIDEVRTGTYRQLYHPEQLISGKEDAANNYARGHYTIGKEMVDSVLDRIRKIADNCNGLQGFLVFHSFGGGTGSGFGALLLERLSVDYGKKSKLEFSVYPAPQVATAVVEPYNSILTTHTTLEHTDCSFMVDNEAIYDICKRNLDIERPSYANLNRIIAQAVSSITASLRFQGSLNVDLNEFQTNLVPYPRIHFPLITYAPIISAAKAYHETLSVNEITTACFEPNNQMVKCDPRHGKYMACCLLYRGDVVPKDVNVAIAGIKTKRTIQFVDWCPTGFKVGINSQVPAVVPGGDLAKVNRAVCMLSNTTSISEAWARLDHNFDLMYAKRAFVHWYVGEG

SEQ ID NO: 29274 - protein, 387 aa, Conidiobolus coronatus
ELYCLEHGIGQDGKLVGDQAIGGPQTFFSETGSGKYVPRTVFVDLEPSVVDEVRTGSYSKLFHPDTLISGKEDAANNYARGHYTVGKEMIDSVVERIAKQAENCSGLQGFTVFHSFGGGTGSGFGALLLERLSQDYGKKSKLEFSIYPSPTVSSAVVEPYNSILTTHSTLEHSDCSFLLDNEAIYDICKNNLGVERPNYTNLNRLIAQVVSSVTTSLRFGGSLNVDLAEFQTNLVPYPRIHFPLVSFAPIISAARAGHESSSVAEISAACFEPSNTMVKCDPRTGKYVASCLLYRGDVASKDSTATIANLRTKKTIQFVDWSPCGFKVGINDQAPTVIPDGEMAPIKRAVCMLSNNTAIANAWASLDHKFDLMYAKRAFVHWYVGEG

SEQ ID NO: 29275 - protein, 374 aa, Streptomyces antibioticus
MTPRRVVITGIGVLAPGGIGVKNFWSLLSEGRTATRGITFFDPAQFRSRVAAEIDFDPEEHGLNPQETRRMDRAAQLAVVATREAVADSGIELTGIDPYRVGVTVGSAVGATMGLDQEYRVVSNGGLLDLVDHTYAVPHLYNHMVPSSFAAEVAWQVGAEGPSTVVSTGCTSGLDSVGHAVELIREGSADVMIAGSSDAPISPITMACFDAIKATTPRNDDPEHASRPFDGTRNGFVLGEGSAFFVLEELESARARGAHVYAEIAGYATRSNAYHMTGLRPDGAEMAEAIRVALDEARINGDEIDYINAHGSGTKQNDRHETAAFKKSLGDHAYRTPVSSIKSMVGHSLGAIGSIEIAASALAMVLARPERSVA

SEQ ID NO: 29276 - protein, 407 aa, Streptomyces antibioticus
MTGTATKVVVTGLGVAAPNGLGTQDYWAATRTGKGGIGRITRFDPSQYPSRLAGEVPGFEARDHLPSRLLPQTDHMTRLALVAADWALADAGVKPQELPEFDMGVVTASSSGGFEFGQRELQALWSKGGQHVSAYQSFAWFYAVNSGQISIRNGMKGPSGVVVSEQAGGLDALAQARRQIRKGTRLIVSGGMDASVCTWGWVAQLAGKRLSTSDDPERAYLPFDAGARGHVPGEGGAILILENAEAARSRGARTYGEIAGYGSTFDPKPGSGRPPGLRKAIELALADAGAAPDEVDVVFADAAAVPELDRIEAEALTAVFGARGVPVTAPKTMTGRLYSGAAPLDVATALLAIEEGLIPPTTNVEPADGYDLDLVTGEARPAEVRTALVLARGFNGFNSALVVRATH

SEQ ID NO: 29277 - protein, 387 aa, Conidiobolus coronatus
ELYCLEHGIGQDGKLTGDSVIGNPGTFFSESSNGKYVPRTVFVDLEPSVIDEVRNGPTRQLFHPDTLISGKEDAANNYARGHYTVGKEMIDNVVERINKQAENCSGLQGFTVFHSFGGGTGSGFGALLLERLSQDYGKKSKLEFSIYPSPTVSSAVVEPYNSILTTHSTLEHSDCSFLLDNEAIYDICRKNLGIERPNYTNLNRLIAQVVSSVTASLRFGGSLNVDMNEFQTNLVPYPRIHFPLVSFAPIISTARAGHESSSVAEISAACFEPSSTMVKCDPRSGKYMAACLLYRGDVTNKDSSDAIAKLRNKSSIQFVDWSPCGFKVGINDQAPATVPGGDMAPVKRAVCVLSNNTAIAEAWSRLNHKFDLMYAKRAFVHWYVGEG

SEQ ID NO: 29278 - protein, 298 aa, Zea diploperennis
SSEVQVCVTGGAGFIGSYLVKKLLEKGYTVHATLRNTEDEEKTGLLRRLVPGAAERLRLFEADLFDAATFAPAIAGCQFVFLVATPYGLEAAGSKYKSTAEAAVAAVRVILRQCEESKTVKRVIHTASISTASPLKDKEAEGSGNGFKDFISESCWTPLNVDYHLRSAHFDKYILAKLRSEQELLSYNGGESPAFEVVTLPLGLVAGDTVLGHAPETLEHAVSPVSREELSFKFLRLLQSLLGSEPLVHVDDACEALLFCMERPSIAGRFFCAAAYPSIHDITDHYASKFPHLDVPRA

SEQ ID NO: 29279 - protein, 448 aa, Helicobacter pylori 26695
MYVEKILQSLQKKYPYQKEFHQAVYEAITSLKPLLDSDKSYEKHAILERLIEPEREIFFRVCWLDDNNQIQVNRGCRVEFNSAIGPYKGGLRFHPSVNESVIKFLGFEQVLKNSLTTLAMGGAKGGSDFDPKGKSEHEIMRFCQAFMNELYRHIGATTDVPAGDIGVGEREIGYLFGQYKKLVNRFEGVLTGKGLTYGGSLCRKEATGYGCVYFAEEMLQERNSSLEGKVCSVSGSGNVAIYTIEKLLQIGAKPVTASDSNGMIYDKDGIDLELLKEIKEVRRGRIKEYALEKKSAEYTPTENYPKGGNAVWHVPCFAAFPSATENELSVLDAKTLLSNGCKCVAEGANMPSSNEAIGLFLQAKISYGIGKAANAGGVSVSGLEMAQNASMHPWSFEVVDAKLHHIMKEIYKNVSQTAKEFKDPTNFVLGANIAGFRKVASAMIAQGV

SEQ ID NO: 29280 - protein, 307 aa, Candida glabrata CBS138
MERAEYTKEKKVGEGTYAVVYVGTKQSTGRRIAVKEIKTSEFKDGLDMSAIREVKYLQEMQHVNVIELVDIFMSYGNLNLVLEYLPTDLEVVIKDKSILFTPADIKSWMLMSVRGVHHCHRNFILHRDLKPNNLLIAPDGQIKVADFGLARAVPSPHEVLTSNVVTRWYRAPELLFGAKHYTSAIDVWSLGVIFAELMLRIPYLPGQNDLEQMEVTFRALGTPTDKDWPEVSSFNSYNKLQMYPPPSRDELRKRFIAATENALNFMNGMMCLNPAKRWSTAQCLESEYFKELPRPSDPATIDITRKE

SEQ ID NO: 29281 - protein, 475 aa, Rubrivivax gelatinosus PM1
MSKTFDVVVIGGGPGGYIAAIRAAQLGFNTACIDEWKNDKGGPAPGGTCTNVGCIPSKALLQSSEHFEHAGHAFADHGIGLKDLSIDVAKMLGRKDTVVKQNNDGILYLFKKNKVSFFHGRGSFVKAGDAGYEIKVSGATEDTLIGKDIIIATGSSARALPGAPFDEESILSNDGALRIPSVPAKLGVIGSGVIGLEMGSVWRRLGAEVTVLEALPTFLGAVDEQIAKEAQKAFMRQRLKIELGVKISEVKKDKKGVSVSYTSAKGDAKTLEVDKLIVSIGRVPNTTGLNAEAVGLKLDERGAIVVDDDCRTNLPKVWAIGDVVRGPMLAHKAEEEGVAVAERIAGQHGHVNFNTIPWVIYTSPEIAWVGQTEQQLKAAGRAYKAGTFPFLANGRARALGDTTGMVKFLADAATDEILGVHIVGPMASELIAEAVVAMEFKASAEDIARICHAHPSLSEATKEAALAVDKRTLNF

SEQ ID NO: 29282 - protein, 193 aa, Glycine max
MATANPTMASRPSHTSKLFPSWVLGSHLMETGIAWHAALVPNSARGLSSPSQFISSLSLNLIPQSIIFTCLFETMAKSPFKLEHPLERRQAESARIRDKYPDRIPVIVEKAERSDIPDIDKKKYLVPADLTVGQFVYVVRKRIKVSAEKAIFVFVNNTLPPTAALMSSIYEENKDDDGFLYMTYSGENTFGSR

SEQ ID NO: 29283 - protein, 366 aa, Rhodospirillum rubrum
MSIFFADPFDDHESVVFARDAASGLRAIIAIHSTALGPAVGGCRMWPYRSEEEALADVLRLSRAMSYKNALAGLALGGGKAVILGESRSEKSPELLRAFGRAVDRLGGAYRTAEDVGTSAADMDIIGEETRHALGRSAKGAVTVGDPSPYTARGGLAAMRAAVRHRLGRDGLAGLTIAIQGCGQVGAHLARLLQAEGALVVVADLDPARARALAGETGAVAVEADRILSIKADVMAPCALGAILDDQVIAALNVPIVAGLANNQLAQPRHAALLHDRGILYVPDYVANAGGIIAIAAEHDGRVDRAEILGKIEGIGATTAKILDRAVRENRTTAVIADTLARERLAAASPRPAAAQPRRQAGRALG

SEQ ID NO: 29284 - protein, 298 aa, Zea diploperennis
SSEVQVCVTGGAGFIGSYLVKKLLEKGYTVHATLRNTEDEEKTGLLRRLVPGAAERLRLFEADLFDAATFAPAIAGCQFVFLVATPYGLEAAGSKYKSTAEAAVAAVRVILRQCEESKTVKRVIHTASISTASPLKDKEAEGSGDGFKDFISESCWTPLNVDYHLRSAHFDKYILAKLRSEQELLSYNGGESPAFEVVTLPLGLVAGDTVLGHAPETLEHAVSPVSREELSFKFLRLLQSLLGSEPLVHVDDACEALLFCMERPSIAGRFFCAAAYPSIHDITDHYASKFPHLDVPRA

SEQ ID NO: 29285 - protein, 239 aa, Triticum aestivum
MAQLPPRAPSAGEQDWPVAGEFLGFAAARRGVHRRSASDPAAFLEAVPMDHILSGGGGDDEFDRLDDEQLMSMFSNVDGGCDRPGFMDTGEAEEGAASAGAMTAADGFGDPKRVKRILANRQSAQRSRVRKLQYISELERSVTGLQMEVSALSPRVAFLDHQRSLLTVGNSHLRQRIAALAQDKIFKDAHQEALKEEIERLRQLFHHQKIKATGGTDMATAASMQAKQELLMCEGAAMR

SEQ ID NO: 29286 - protein, 396 aa, Silicibacter sp. TM1040
MSFQNPVFIPGPTNIPESLRKACDMPTIDHRSPLFGQILHPAREGVRKVLKSDSAEVFIFPSSGTGGWETALSNTLSPGDTVLAARNGMFSHRWIDMCQRHGLEVEIIETPWGEGLPADRYEEILTADTSHKIKAVLATHNETATGVKSDIAALRRALDAAAHPALLFVDGVSSIASMDFRMDEWGVDVAVTGSQKGFMLSAGLAIVGFSAKAMDATQSARLPRTFFDVHDMAKGYANNAYPYTPAVGLMNGLNESCKMLLAEGLEDVFARHHRIAEGVRAAVGAWGLELCAATPEVYSDTVSAIRTPEGFNATDIVTHAAEKYGVAFGVGLGEVAGKVFRIGHLGSLTDVMALSGIATAEMCMVDLGLDIRLGSGVAAAQDYYRGHTAAAQKDAA

SEQ ID NO: 29287 - protein, 575 aa, Debaryomyces hansenii CBS767
MESITRVSMSVCPFVKSSSAQALRQLSKNSALTSQARQCPFMGAALNAKESTRSYSSATKPVRATASSLASNPPSTMQSKYSFKAEELVGNKDAINLESKENTFDFKGYLNSELSKKRTDKSYRFFNNINRLANEFPKAHRSEENDKVTVWCSNDYLGMGKNENTINEMKRVLTKYGSGAGGTRNIAGHNIHALKLESELAALHKHEAALVFSSCFVANDAVLSLFGQKIKDLVIFSDELNHASMIQGIRNSRAKKQVFKHNDLADLEEKLAQYPKSTPKLIAFESVYSMCGSIAPIEAICDLAEKYGALTFLDEVHAVGMYGPHGAGVAEHLDFDAHLKSGIASPQTQTVMNRVDMVTGTLGKAYGTVGGYITGKANLIDWFRSFAPGFIFTTTLPPSIMAGSSASIRYQRSTLQDRIAQQTNTRYVKNNLTDIGIPVIPNPSHIVPVLVGNALDAKKASDLLLDKYNIYVQAINFPTVPIGQERLRITPTPGHGPELSNQLIGALDSVFNELSLSRIGDWEGKGGLCGVGEPDIEPIEHIWTSEQLALTDADINPNVIDPVIQPIGVSSGVRD

SEQ ID NO: 29288 - protein, 484 aa, Kluyveromyces lactis NRRL Y-1140
MSIRNTINRIIIRRNMSDSIRHYDYLVIGGGSGGVASSRRAASYGAKTLLIEAKAMGGTCVNKGCVPKKVMWYASDLATRIGHAHSYNLFEDLPLTKENLTFNWPEFKKKRDAYIHRLNGIYERNLTKEGVDYVYGWASFTVDGKVQVKKADNCTETYTADHILVATGGKPIYPAKIPGYDYGVSSDEFFELEDQPKKVVVVGAGYIGVEIAGVFNGLGSDSHLVIRGETVLRKFDDCIQETVTDTYIKEGVNIHKSSNVTKVEKDESTGKLNIQLDTGKNIDNVDSLIWTIGRRSLLGLGLENIGVKLDAKEQIVVDEYQNSSVKNVYSLGDVVGKVELTPVAIAAGRKLSNRLFGPEKFKNQKQDYENVPSVVFSHPEAGSIGLSEREAIEKFGKDNVKVYNSKFNAMYYAMMEEKDKTPTRYKLVCTGEEEKVVGLHIIGDSSAEILQGFGVAIKMGATKADFDSCVAIHPTSAEELVTLT

SEQ ID NO: 29289 - protein, 425 aa, Shewanella sp. MR-7
MSQTNQAQYLQQLGSQAKQASYALANLSAAQKADLLEAIAEALTQNIQAILAANAKDVAAAKAEGLNDAMIDRLLLNESRLAGIIGDIGDVVRLADPVGEEFGSRVLDNGLRLTRRRVPLGVIGVIYEARPNVTVDIAVLALKTGNAVILRGGKETLESNKLISEVIRGAIASQGLPVDAVQLIDSPDRALVTGLLKLDQYVDMIVPRGGQALQRLCAEQATIPVILGGIGICHLYVDKHADLERALEVIANAKVQRPTVCNALDTLLVDNAVAERFVPQIAEYLHRLGVRFSVCEQSYALLDGLGFDISPATEQSFATEWLSLTLGIKVVNGIDTAIAHIRTYSSGHSEAILTDDIHAATHFMNEVNSAAVYVNASTRFTDGGQFGLGAEVAVSTQKLHARGPMGLEALTTYKWLAWGDYTSRA

SEQ ID NO: 29290 - protein, 143 aa, Lentinula edodes
MARTKQTARKSTGGKAPRKQLASKSATKSSAARKTAQGAAGGVKKPHRFRPGTVALREIRRYQKSTELLIRKLPFQRLVREIAQDFKTDLRFQSSAVMALQEAAEAYLVSLFEDTNLAAIHAKRVTIQPKDLALARRLRGERS

SEQ ID NO: 29291 - protein, 372 aa, Shewanella sp. MR-7
MNLSEIAYRRVVVKLGTSVLTSGSKQLDKAHMVELARQMAALMRSGVEVVLCTSGAIAAGREHLQYPVLPDTMANKQLLAAVGQSQLILAWAQLFSIYGLHVGQLLLTRADLHDRERYLNARDTLNALLANNIIPIINENDAVATNEIKVGDNDNLSARAALLCDADLLILLTDQKGLFDADPRTNPNAKLISQVEKIDDSLRLLAGGSVSGLGTGGMSTKLEAADIARRAGIEVVIASGHHPDVIKKVVGKESVGTHFSAIENPLESRKQWILAGPAAQGSLVLDAGAVKAVTEKGRSLLSKGIIGVKGEFERGATLQLVDQKGKIIARGITRYCGEALGVIAGKHSDEIESVLGYDYGDAIVHRNDMVVL

SEQ ID NO: 29292 - protein, 910 aa, Gloeobacter violaceus PCC 7421
MDGVVSVMKRAATGKFIQHWAGECKQRVNLSLTATAWERLRRQAAERGISRSEIVEQFARAEEPDDSSLERRVLDLERQNEQLRRELEQARGEAAERHRVETALCRSEARFRQLVAENLIAIGFGDCAGMIVEANDAFLQLVGYNREELAAGRVRWAQMTPPEYRERDEQAMAELASTGACRPYEKEYIHKDGRRVPILIGATLLEGGERVACFVFDLGGHRRARADLERANERFQLAAKAAGCLVYDWDLEANRVEHAYGLLELLGYNAEEISEPAHLWWAEQIHPDDRERANAEVWAALQDAEMPNYAIEYRVRNRQGHHINVCDRGVVRRAPDGRAIRVVGCTLDLSESKNLEARVRSTDEHYRFLAESIPQIVWTARPDGALDYYNRRWYDYTGLTPQQSEGWGWQPVLHPEDLDRCLKYWRQAVATGSSYEIEYRFRRAGDGAYRWHLGRALPMRDREGQIVKWFGTSTDIDDQKRAAAELAAREQAQRFLAEAASILASSLDYTVTLDRVAQLTVPLLADWCSVDMVSEDGGIEKLVIAHVDAQKALQIRELQRRYPFDPREASGVANVLRTGRSEFYPKITDELLIAIARSPEHLELLRKAGFSAALLVPLTARGRTFGAITLVMSDSGRRYGRTDLALAEDLACHAAIAIDNARLYHQAWEANRIKDEFLATVSHELRTPLNAILGWTQILRRRKLDAESQARALETIERNGRAQNQLIEDILDVSRIITGKLKLDVRPLDLAAVIEEALDSVCLASEAKHIALHCTLDAEAASVSGDPARLQQVVWNLLSNAIKFTPEGGRIDVRLAADGASALLSVRDSGVGITPEALPYIFERFRQADGSNTRAFGGLGLGLAIVRHLVELHGGTVTAHSDGPGRGALFAVRLPRRRPGGDRAEGGLAA

SEQ ID NO: 29293 - protein, 193 aa, Brassica napus
QTGRLAYMHNVAEVCHRDLKPQNLLVDPLTHQVKICDFGSAKQLVKGEANISYICSRFYRAPELIFGATEYTTSIDIWSAGSVLAELLLGQPLFPGENAVDQLVEIIKVLGTPTREEIRCMNPHYTDFRFPQIKAHPWHKIFHKRMPSEAIDFASRLLQYSPSLRCTALEACAHPFFDELREPNARLPNGRPF

SEQ ID NO: 29294 - protein, 448 aa, Arabidopsis thaliana
MATLLKLDIATTFLAFIVPRANTSLNHRFASARLSTATVSLRTKSSSFYSAALYSDSRRRFHSAVASDSSLAVVDDEDIFDVASEILPDNRIPATIITGFLGSGKTTLLNHILTGDHGKRIAVIENEFGEVDIDGSLVAAQTAGAEDIMMLNNGCLCCTVRGDLVRMISEMVQTKKGRFDHIVIETTGLANPAPIIQTFYAEDEIFNDVKLDGVVTLVDAKHARLHLDEVKPEGYVNEAVEQIAYADRIIVNKTDLVGEPELASVMQRIKTINSMAHMKRTKYGKVDLDYVLGIGGFDLERIESSVNEEEKEDREGHDDHHHGHDCHDHHNEHEHEHEHEHHHSHDHTHDPGVGSVSIVCEGDLDLEKANMWLGALLYQRSEDIYRMKGILSVQDMDERFVFQGVHEIFEGSPDRLWRKDETRTNKIVFIGKNLNREELEMGFRACLI

SEQ ID NO: 29295 - protein, 480 aa, Yersinia pestis KIM
MMSKKKGLTTAAGAPVVDNNNVITAGRRGPMLLQDVWFLEKLAHFDREVIPERRMHAKGSGAYGTFTVTHDITQYTRAKIFSEIGKKTDMFVRFSTVAGERGAADAERDIRGFAMKFYTEEGNWDLVGNDTPVFYLRDPLKFPDLNHVVKRDPRTNLRNPVYKWDFFSQLPEALHQLTIDFSDRGLPKSYRHMHGFGSHTFSLINANNERFWVKFHFRCQQGIENLMDDEAEKLIGSDRESSQRDLYEAIERGDFPRWKLQIQVMPEHEASQTPYNPFDLTKVWPHGDYPLIDVGYFELNRNPENYFAEVEQSSFNPANVVPGISFSPDRMLQGRLFSYGDAARYRLGVNHHQIPVNSAKCPFHNYHRDGAMRVDGNSGNGATYEPNSFGLFQEQPDFSEPPLTLEGAADHWNHREDTDYFSQPRALFNLLSEEEHQRMFTRIAGELSQVPEAIQRRQIALFTQVDPAYGAGVKKALGLN

SEQ ID NO: 29296 - protein, 336 aa, Arabidopsis thaliana
MDLASNLGGKIDKSDVLTAVEKYEQYHVFHGGNEEERKANYTDMVNKYYDLATSFYEYGWGESFHFAQRWKGESLRESIKRHEHFLALQLGIQPGQKVLDVGCGIGGPLREIARFSNSVVTGLNNNEYQITRGKELNRLAGVDKTCNFVKADFMKMPFPENSFDAVYAIEATCHAPDAYGCYKEIYRVLKPGQCFAAYEWCMTDAFDPDNAEHQKIKGEIEIGDGLPDIRLTTKCLEALKQAGFEVIWEKDLAKDSPVPWYLPLDKNHFSLSSFRLTAVGRFITKNMVKILEYIRLAPQGSQRVSNFLEQAAEGLVDGGRREIFTPMYFFLARKPE

SEQ ID NO: 29297 - protein, 574 aa, Neurospora crassa
MQRALTRASVGKAATRLPAQQLRFAHKELKFGVEGRAALLAGVETLAKAVATTLGPKGRNVLIESSFGSPKITKDGVTVAKSISLKDKFENLGARLIQEVAGKTNEVAGDGTTSATVLARAIFSETVKNVAAGCNPMDLRRGIQAAVEAVVEYLQANKRDVTTSEEVAQVATISANGDKHIGELIASAMEKVGKEGVITCKEGKTLYDELEVTEGMRFDRGYVSPYFITDPKSQKVEFEKPLILLSEKKISQASDIIPALEISSQTRRPLVIIAEDIDGEALAVCILNKLRGQLQVAAVKAPGFGDNRKSILGDIAVLTNGTVFTDELDVKLEKATPDMLGSTGSITITKDDTIILNGEGSKDAIAQRCEQIRGVMADPSTSEYEKEKLQERLAKLSGGVAVIKVGGASEVEVGEKKDRFVDALNATRAAVEEGILPGGGTALIKASVHALKNVKPANFDQQLGVTIVRNAITRPAKTIIENAGLEGSVVVGKLTDEFANDFNKGFDSAKAEYVDMIQAGILDPLKVVRTGLVDASGVASLLGTTEVAIVEAPEEKGPAPMGGMGGMGGMGGMM

SEQ ID NO: 29298 - protein, 393 aa, Conidiobolus lamprauges
ELYCLEHGINPDGTMSDQTINTNPLDNDAFNTFFYETSNKKYVPRAIFADLESGVIDEVRQGSYRQLFHPDQLISGKEDAANNYARGHYTVGKEFLEPVLEKVRKLSDNCESLQGFLLFSSFGGGTGSGFGSLLLEKIATEFGKKSKLEFSIYPSPELSSSVVEPYNSVLVTHSTLEHSDCSFIVDNQAIFDICKTKLNIDRPSYSDLNRIIAQAVSSITTSLRFSGSLNVDLAEFQTNLVPFPRIHYPLISLAPIISESKKSHETLSVTDITNSCFEPGQVLVKCDPRKGKYMACALLYRGDVAPNDTNKVISTLKTKSSIQFVDWSPCGFKVGISHQPPTTVSGDHQAKVSRSVCLLSNNTAIAEAWNRLDYNFDLMYAKRAFVHWYVGEG

SEQ ID NO: 29299 - protein, 251 aa, Brassica napus
  misc_feature (208)..(208): Xaa can be any naturally occurring amino acid
  misc_feature (218)..(218): Xaa can be any naturally occurring amino acid
  misc_feature (227)..(228): Xaa can be any naturally occurring amino acid
  unsure (1)..(251): unsure at all Xaa locations
STHASGEKSRDISRWSLRGVTALVTGGSKGLGEAVVEELSMLGARVHTCARDETQLQESLLEWQAKGGQVTTSVCDVSSRVQREKLMETVSTLFQGKLNILVNNAGTCITKPTTEFSAEDFSFLMATNLESAFHLSQLAHPFLKASGSGSIVFMSSAAGGVHINGGSIYGATKGAMNQLARNLACEWASDSIRVNSVCPWFIATPLAXKYIDHEEYNXEVEKKTPMXXRVGEANEVSSLVAFLCFPAASYI

SEQ ID NO: 29300 - protein, 402 aa, Zea mays
FADYNIQKESTLHLVLRLRGGMQIFVKTLTGKTITLEVESSDTIDNVKAKIQDKEGTPPDQQRLIFAGKQLEDGRTLADYNIQKESTLHLVLRLRGGMQIFVKTLTGKTITLEVESSDTIDNVKAKIQDKEGIPPDQQRLIFAGKQLEDGRTLADYNIQKESTLHLVLRLRGGMQIFVKTLTGKTITLEVESSDTIDNVKAKIQDKEGIPPDQQRLIFAGKQLEDGRTLADYNIQKESTLHLVLRLRGGMQIFVKTLTGKTITLEVESSDTIDNVKAKIQDKEGIPPDQQRLIFAGKQLEDGRTLADYNIQKESTLHLVLRLRGGMQIFVKTLTGKTITLEVESSDTIDNVKAKIQDKEGIPPDQQRLIFAGKQLEDGRTLADYNIQKESTLHLVLRLRGGQ

SEQ ID NO: 29301 - protein, 150 aa, Streptococcus thermophilus
MLNKIQHRNLNTYSVTPLDFYSVTPLNFFEDFSRSLFNDFKPHFIKTDIHETDNEYLVEAELPGIPKEDIQVTYENGVLTISGQQQIDAVNEDKKGNLIRSERNLTSVRRQYLLENVKEDEIKASYSDGVLKVTLPKDSNKEIKKSISIE

SEQ ID NO: 29302 - protein, 335 aa, Pseudomonas oleovorans
MALSKEVPEFDIDDDLLLMETGIVLETDVVSDEPAVSSVRTRAKSGSSLKQHKYIDYSRALDATQLYLNEIGFSPLLSPEEEVHFARLSQKGDPAGRKRMIESNLRLVVKIARRYVNRGLSLLDLIEEGNLGLIRAVEKFDPERGFRFSTYATWWIRQTIERAIMSQTRTIRLPFHVVKELNVYLRAARELTQKLDHEPSPEEIATLLEKPVAEVKRMLGLNERVSSVDVSLGPDSDKTLLDTLTDDRPTDPCELLQDDDLSQSIDQWLGELTDKQREVVVRRFGLRGHESSTLEDVGLEIGLTRERVRQIQVEGLERLREILEKNGLSSESLFQ

SEQ ID NO: 29303 - protein, 389 aa, Capniomyces stellatus
ELYCLEHGIKPDGTVEGVNQRRDDSSSTFFSETSSGKRVPRTVFVDLEPTVIDEVRNGEYRQLYHPDQLITGKEDAANNYARGHYTIGKEIIDNVLDCIRKLADNCTGLQGFLVFHSFGGGTGSGFGALLLERLSVDYGKKSKLEFSVYPAPQISNAVVEPYNSILTTHTTLEHSDCSFMVDNEAIYDICRRNLDIERPSFDNLNRLIAQIVSSITASLRFEGSLNVDLNEFQTNLVPYPRIHFPLVTYAPIISANKASHESLSVSEITMACFEPSNQMVKCDPRRGKYMSCCLLYRGDVIPKDVNAAVANIKTKRTIQFVDWCPTGFKLGINAQPPACVPGGDLAKVSRAVCMLSNTTAIAEAWARLDHKFDLMYAKRAFVHWYVGEG

SEQ ID NO: 29304 - protein, 747 aa, Xanthomonas oryzae pv. oryzae KACC10331
MCLHTLWRSCALTCEHALRMLTHPVNGHAPRLEGIASISARQRGVPMAKSSGKPASAVSVDRSASAPDARGTGDELHQKARGRHPQLTTNQGIPVGDNQNSLRATPRGPTLLEDFILREKITHFDHERIPERIVHARGSAAHGYFKLTKSLSQYTTAKIFTEIGEKTPLFTRFSTVAGGAGSVDTPRDVRGFAVKFYTKEGNWDLVGNNIPVFFIQDAIKFPDLIHAVKMEPDRGFPQAASAHDTFWDFISLTPESMHMIMWAMSDRTIPRSLRMIEGFGIHSFRFLNDKGESTFVKFHWRPKLGLQSTIWDEAVKIAGADQDFHRRDLFEAIQNGDFPEWELGVQLFTEAEADAFPFDHLDSTKIIPEELVPLQIVGRMVLDRWPDNFFAETEQVAYCPGNIVPGIDFSNDPLLQGRLFSYLDTQLSRLGGPNFHQIPINAPKCPFVNNQRDGHMQMDVPKGRVAYEPSSLQADAPREALRGFPSHSTPAEDGAKGRVRAERFADHYSQARLFFRSQTAPEQAHMASALVFELSKVETAHVREAIVGHLRHIDQKLAQRVADGMGMTTLPPAPPAAVAPIDMPLSPALQVIGKMKDTLKGRTVGILIHDGSDASTIKAVRKAAEAEGATVKIVAPKLGGAKLSDGKQLAADGQLAGTPSVVFDAVAVLLSSEAAKLLTRESAALDFVSCAWAHLKAIAFDEGAQLLLKAGNIGKDAGVVPAADTKAFISAAKTRQWAREPKVRMLA

SEQ ID NO: 29305 - protein, 259 aa, Oryza sativa
MEPSSQPQPVMGVATGGSQAYPPPAAAYPPQAMVPGAPAVVPPGSQPSAPFPTNPAQLSAQHQLVYQQAQQFHQQLQQQQQQQLREFWANQMEEIEQTTDFKNHSLPLARIKKIMKADEDVRMISAEAPVVFAKACEVFILELTLRSWMHTEENKRRTLQKNDIAAAITRTDIYDFLVDIVPRDEMKEEGLGLPRVGLPPNVGGAADTYPYYYVPAQQGPGSGMMYGGQQGHPVTYVWQQPQEQQEEAPEEQHSLPESS

SEQ ID NO: 29306 - protein, 398 aa, Entomophaga destruens
ELYCLEHGIDKEGNKINTNGNSDSNGAKEAHSNAFETFFYETSKGKYVPRAIFADLEPSVIDEIRQGEYRTLFHPDQLITGKEDAANNYARGHYTVGKEFLEPVLDRLNKLCERSESLQGFLFFNSFGGGTGSGFGSLLLDYVATDYTKKSVLNFSIYPSPELSSAVVEPYNSVLHTHSSIDHTDCTFMIDNQAVFELCKSKLGIERPDYKDLNQIIAQAVSSVTTSLRFSGQLNVDLAEFQTNLVPFPRIHFPLTSMAPIISNAKSSHETFSVADLTTSCFEPDNVFVKCDPRKGKYMSCALLYRGDVTPNDVTKVTSILKTKSTIQFVDWTPCGFKIGISNQIPTIVPGSSLAKTNRSVCLLSNNTAVAEAWRRLDQNFDLMYAKRAFVHWYVGEG

SEQ ID NO: 29307 - protein, 383 aa, Entomophaga maimaiga
LYCLEHGIQNDGTLLKEPSSIEDDSFSTFFYEVGKGKYVPRTVFVDLEPAVVDEVRIGAFRQLFHPEQLISGKEDAANNYARGHYTVGKGMIEPVMERIRKLTDNCSGLQGFLLFHSFGGGTGSGFGALLLEHLAADFGKKSKLEFSVYPAPEISSAVVEPYNSILTTHTTLDRSDCSFMVDNQAIYDICQRNLNIERPSYGNLNRIIAQVVSSITTSLRFNGSLNVDLNEFQTNLVPYPRIHFPLVSYAPIISASRASHEALSVAEITNSSFEPESVMVKCDPRHGKYMACALLYRGDVVPKDVNQVISSLKSKRTIQFVEWSPCGFKVGINNEPPSIFHNGEQAKVTRAVCMLSNNTAIAEAWSRLDHKFDLMYAKRAFVH

SEQ ID NO: 29308 - protein, 617 aa, Buchnera aphidicola str. Sg (Schizaphis graminum)
MEHNPKSQLKLLVTHGKEQGYLTYAEVNDHLPEEIIDSEQIDDIIQMINDMGIQVVEEAPDADDLILNEINTDTDEDAVEAATQVLSSVESELGRTTDPVRMYMREMGTVELLTREGEIDIAKRIEEGINQVQSSVSEYPEAITYLLEQYDRIKTGQIRLSDIITGFVDPNAEEIFSHSTSAIHIGSEILDNITNDSNENEDENEDENEDEDENSIDPELANEKFRELRKQYTNTSNTIKNKNRNHQDSLLEIYNLSEIFKQFRLVPKQFDHLVNNMRNMMNRVRKQERKIMKLCIEECKIPKKIFLKIFSGKETDQNWFKKEQSSNQSWSKKLEEIKEKVFSSMKKLKQIEKETGLTIEQVKDINKRMSIGEAKAKRAKKEMVEANLRLVISIAKKYTNRGLQFLDLIQEGNIGLMKAVDKFEYRRGYKFSTYATWWIRQAITRSIADQARTIRIPVHMIETINKLNRISRQMLQEIGREPTPEELSEKMLIPEDKIRKVLKIAKEPISMETPIGDDDDSHLGDFIEDTTLELPLDSATSESLRSATHDVLSGLTAREAKVLRMRFGIDMNTDHTLEEVGKQFDVTRERIRQIEAKALRKLRHPSRSEVLRSFLDD

SEQ ID NO: 29309 - protein, 383 aa, Furculomyces boomerangus
ELYCLEHGISPDGTVDGINKKRDDSSSTFFSETSTGKHVPRTVFVDLEPTVVDEVRTGTYRQLYHPEQLITGKEDAANNYARGHYTVGKEIIDTVLDRIRKLADNCTGLQGFLVFHSFGGGTGSGFGALLLERLSVDYGKKSKLEFSIYPAPQISNAVVEPYNSILTTHTALEHSDCSFMVDNEAIYDICRRNLDIERPSFDNLNRLIAQIVSSITASLRFEGSLNVDLNEFQTNLVPYPRIHFPLVTYAPIISANKASHESLSVSEITMACFEPSNQMVKCDPRHGKYMSCCLLYRGDVIPKDVNAAVANIKTKRTIQFVDWCPTGFKLGINAQPPACVPGGDLAKVSRAVCMLSNTTAIAEAWARLDHKFDLMFAKRAFVH

SEQ ID NO: 29310 - protein, 709 aa, Kluyveromyces lactis NRRL Y-1140
MSVLLRQAFENAKKEGRNALVTFMTAGYPTLEDTIQIMKGFQDGGVDVIELGLPFSDPVADGPVIQIANTVALKNGIDMPKVLALVKQAREEGITVPIVLMGYYNPILNYGEEKFIKDAGAAGVNGFLIVDLPPEEALKVRNYVGENGLSLIPLVAPSTTDERLSLLSHLADSFIYVVSRMGTTGARESVANDLSALVQKVRSFSGDIPLAVGFGISTKEHFDVVGSVSDGVVIGSKIVTLIGEAAQDKRYETAKNYAEEISGGKKGKVLSKEEFWNIHKANVATAKENKTVAKEFEEFHKFPARFGEFGGQYVPEALHACLRQLERGFEDAVADPAFWEEFKSLYSYIGRPSSFHKADRLTEYCGGAQIWLKREDLNHTGSHKINNALAQVLIAKRLGKKKVIAETGAGQHGVATATACAKFGLECTVFMGAEDTRRQALNVFRMRILGAKVVPVTNGTQTLRDATSEAFRYWVSNLESTHYIVGSAIGPHPYPTLVRTFQSVIGNETKQQFAALNDGKLPDAIVACVGGGSNSTGMFSPFEHDASVRLIGVEAGGDGIDTDHHSATLTVGRPGVLHGVKTYVLQDSDGQVHDTHSVSAGLDYPGVGPELAAWKASGRADFMAATDAEALEGFRLLSQLEGIIPALESSHAVYGAVQIAKTMKKDQHLIINISGRGDKDVQSVAEILPRLGPQIGWDLRFEKDPTAGN

SEQ ID NO: 29311 - protein, 222 aa, Arabidopsis thaliana
MGRGKIEIKRIENTTNRQVTFCKRRNGLLKKAYELSVLCDAEVALIVFSSRGRLYEYSNNNIRSTIERYKKACSDHSSASTTTEINAQYYQQESAKLRQQIQMLQNSNRHLMGDALSTLTVKELKQLENRLERGITRIRSKKHEMLLAEIEYFQKREIELENENLCLRTKITDVERIQQVNMVSGPELNAIQALASRSFFNPNMLEGGTVYPHSDKKILHLG

SEQ ID NO: 29312 - protein, 167 aa, Adiantum capillus-veneris
MFLAIIKFQNYGQQVLEAANYIGQGFAVTLDHSNRLPITVQYPYEKKLPSERFRGRIHFEFDKCIACEVRVRVCPINLPVVDWIFLKDVKKKKLKNYSIDFGVCIFCGNCVEYCPTNCLSMTEEYELSSYNRHELNFDQTALGRLPPPASEDVSIQLVLNSRNSFRR

SEQ ID NO: 29313 - protein, 141 aa, Rubrivivax gelatinosus PM1
MAIERTLSIIKPDAVAKNVIGQIYARFEGAGLKIVAAKLVHLSRGEAEQFYAVHKARPFFKDLVEFMISGPVMIQALEGEGAIAKNRELMGATDPKKAEKGTIRADFADSIDANAVHGSDAPETAAVEVAFFFPGMNVYSR

SEQ ID NO: 29314 - protein, 242 aa, Shigella boydii
LKERKEGAFVPFVTLGDPGIEQSLKIIDTLIEAGADALELGIPFSDPLADGPTIQNATLRAFAAGVTPAQCFEMLALIRQKHPTIPIGLLMYANLVFNKGIDEFYAQCEKVGVDSVLVADVPVEESAPFRQAALRHNVAPIFICPPNADDDLLRQIASYGRGYTYLLSRAGVTGAENRAALPLNHLVAKLKEYNAAPPLQGFGISAPDQVKAVIDAGAAGAISGSAIVKIIEQHINEPEKML

SEQ ID NO: 29315 - protein, 242 aa, Shigella boydii
LKERKEGAFVPFVTLRDPGIEQSLKIIDTLIEAGADALELGIPFSDPLADGPTIQNATLRAFAAGVTPAQCFEMLALIRQKHPTIPIGLLMYANLVFNKGIDEFYAQCEKVGVDSVLVADVPVEESAPFRQAALRHNVAPIFICPPNADDDLLRQIASYGRGYTYLLSRAGVTGAENRAALPLNHLVAKLKEYNAAPPLQGFGISAPDHVKAAIDAGAAGAISGSAIVKIIEQHINEPEKML

SEQ ID NO: 29316 - protein, 467 aa, Gloeobacter violaceus PCC 7421
MAVVQHWTTGSFVWGFLESLAFADAPLQRWWRASLPGRVQQWLLHWAASGMAARVAEPVAMGVFCLLLLISPFVPTAAVGAVLAVGLALVVLLFCVRARPLSPLALPVSAFWLSGWVALIGSPRLLSSLDGWLKMTLYAAGFALGAHLLQKPLYRTLAVGTYLAATLPVSIYGLLQYVNGAPPLATWVDPESPLADTTRVYSFLGNPNLLAAYLIAAIPLGVVGALVWKNWAAKAMAALAAGAGALCLVLTYSRGGWIALTATVLVLAVLLWPWLAERLKPEWRLWVPVVILGTVAAALVVAVVAVPAVGERALSIFDGRDDSSNNFRITVWGAVFEMIRAYPLTGIGPGNLTFEAIYPFFQRPKFDALSAYSIVLELTVELGIVGLLAFLWLASAMLVQGFTVWVRRAEPVGALWCAAATCAVVGLLVNGLTDTVWFRPSVQVVWWMLCALIGAEYLRAAGQADQD

SEQ ID NO: 29317 - protein, 327 aa, Chlamydophila caviae GPIC
MSSQFEQLKLLSVLVCDTGDPELVKTSGSQDATTNPSLILKVAQEPKYQELLTEAIAWGIRQNGDDIQTLTFVLDKIQVNFGLEILKCIPGRVSLEIDARLSFNTEAMIQRAIFLSELFAATGGDKKRLLVKIPGTWEGIRAVEVLEKQGIACNVTLIFNLIQAIAAAKANATLISPFVGRIYDWWIAAYGDEGYSIDADPGVASVSNIYTYYKKFDIPTQIMAASFRSKEQVLALAGCDLLTVSPKLLDELKKDQSPVAKKLDVAAAKKLDVQPVELTESVFRFLMNEDAMATEKLAEGIRIFSGDTQILEAAVTEFIKQIAAQDA

SEQ ID NO: 29318 - protein, 377 aa, Zea mays
MAQDEAVATQKTGNTTSPSKDYPTPSPYPDWSTMQAYYGPGVLPPTYFTPAIAPGHPPPYMWGPQPIMPPPFGTPYAAVYPHGGAYPHPLVPMMSTPMSVEPAKSTNSKEKNSNKKLKEIDRTAVSAGSGNSKRTVSSIEDYSAEASSDVNDQNVNETSRKRSSDGGPGAETTTGGNTECVLAPNHTLGNATILPQHCFSAPVIKPSATNVANSRAIGTALSPPPGVMVPVHNAVPSDLSVKDERELKREKRKQSNRESARRSRLRKQAETEELATQVESLAAENTSLRSEIGRLTESSEKLRLENSALMVKLKDTAEPSPSKAAASPSSPRASAENFLSMIDSANAPSVSRHTEHGGPRLRQLLDSSPATDVAAVS

SEQ ID NO: 29319 - protein, 670 aa, Burkholderia fungorum LB400
MSAPAPAASRFAPGRSRDIVCLGRLAVDLYAQQVGARLEDVSSFAKYLGGSSANIAFGCARLGLASSMLARVGNDHMGRFLTETLTKEGCDVSHVRIDRERLTALVLLGLKDRDTFPLIFYRENCADMAVDEADFDEAFIASSKALLITGTHFSTEQVNRTSRRALDYARRNQVRTVLDIDYRPVLWGLTGKADGETRFVASEGVTAHLQRILPLFDLVIGTEEEFRIAGGKTELVDALAMVRAVTPATLVLKRGPLGCQIIDGQVPASLDNVPIHGGVEVEVLNVLGAGDAFASGFLSGWLRDQPLEACARAANASGALVVSRHGCAPAMPTPAELDYFLREAKADPQRMRRPDRDAALARLHRVSPARKQWDEVLGFAFDHRNQFFELAQQTGADEARIARLKGLFVEAVAQTESALGLQNRIGVLIDDRYGQDALNAATGRGWWIGRPVELPGSVPLVFDHGRSIGTTLIPWPQEHIAKCLVQFHPDEPIEQRLEQEAQLRALYDATQASGHELLLEVIPPKHAHLPQAPDVVYRALKRLYNIGIYPEWWKLEPMDAAQWRSVDALIAERDPYCRGVVLLGLSAGVEQLNEGFRAAAQSATCRGFTVGRTIFHEPSHAWLAGEIGDDELIARVRRTFETLIASWRATRGAGAAQPGTPNPVHQEQAA

SEQ ID NO: 29320 - protein, 429 aa, Pirellula sp. 1
MSSRRRVVVTGIGMINPMGWDVATVWSGLQESGSGVAPTTLFNASGFPTRISAEIKNWDITKAVEDGEKHVQRGRHTQFAIAAATQAMKDSGVLSSIKDPTRIGVYLGSGEGNQDFNTFSKMMVAALADGTYDPTKFIAAGLSLLDPAKELEQEPNMPAAHLAARFNAQGPNFNCLTACAASSQAVGEATEIIRRGEADAMLAGGTHSMIHPFGVTGFNLLTALSESNDDPTKASRPFDAGRNGFVLGEGSAMVVLEELESAKKRGATIYGEVAGYGTTADAYRITDIPPDGHGGIGSMRMAIADAGLNPSDIGYVNAHGTSTKVNDRVETKACREVFGEHAEQTPVSSTKSMMGHLIAAAGVTEMIVCLMAIRDSVLPPTINQETPDPDCDLDYVPNEARPAEIKHALNNSFGFGGQNVTLCLSRFDG

SEQ ID NO: 29321 - protein, 441 aa, Sulfolobus tokodaii str. 7
MDDDKKIIREHTFKTWSKQSSWEPIIVTSSRGVYFYDSNGKKYLDFSSQFVNVNLGYGNERVINAIKEQLDTLQYINPSFGAVVRAKATKALLEVMPKNLTKFFFSTSGTEANEAAVKVSRLYKKPSYKILARYRSYHGSTEASISLTGDYRRWFVEPNTMPGVVRFPEPYCFRCPLKLKYPECNLACANYVDYIIKQEKNVAAIIVEPITGTNGVIVPPKEYMPLLWKIAKENDVLFIADEVMTGWGRVGEWFAVNLWNIQPDILTTAKGASASYVPIGITAFNKEIGEFFEDHIFAHGHTFEAHPVSLAAIPAVIEEYKRLNLLSHVKVMGEYLGKRLLELKERHKSIGDIRGIGLFWAVELVKDKNNTPFGDYEDKYEGKPTVVDIISKKALEKGVYVYNGPSWLIISPPLIINKEEIDQGIETLDEVIKEADSAFKD

SEQ ID NO: 29322 - protein, 329 aa, Rhodobacter sphaeroides 2.4.1
MATRKSPEQSNASKEELVRYYREMLLIRRFEEKAGQLYGMGLIGGFCHLYIGQEAVVVGLEAAAKEGDKRITSYRDHGHMLACGMDAKGVMAELTGREGGYSKGKGGSMHMFSKEKHFYGGHGIVGAQVPLGAGLAFADRYLGNDNVTFTYFGDGAANQGQVYEAYNMARLWSLPVIFVIENNQYAMGTSVKRSTKSPSLWERGAAYGIKGESVDGMDVLAVKAAGEKAVAACRAGQGPYILEMMTYRYRGHSMSDPAKYRTREEVQRMRDEKDAIEHVRDLLIQGNLATDDDLKAIDKEIKAVVNEAADFAKESPEPALEELWTDIYA

SEQ ID NO: 29323 - protein, 596 aa, Xylella fastidiosa Temecula1
MSAYTITEHKYDMVVVGAGGAGLRATFGLAHKGLQTVCLTKVFPTRSHTVAAQGGISAALGNMGEDDWRYHFYDTIKGSDWLGDQDAIEYMCREAIPAVIELEHYGVPFSRTAQGKIYQRPFGGMTTRYGEGPRAERTCAAADRTGHAMLHTLYQQALAHDARFMIEYFALDLIFDSEGLCRGVLALDMAEGSLHLFRAHGVVLATGGYGRTYFSATSAHTCTGDGGGLVMRAGLPMQDMEFVQFHPTGIYGAGCLITEGVRGEGGILRNSNGERFMERYAPHYKDLASRDVVSRSMIIEIREGRGVGEHKDHILLDLTHLGPSMIQEKLPGIAESARIFAGVDVTKQPIPVLPTVHYNMGGIPTNYHGEVVRKVGNDPDAVVPGLYAVGEAACVSVHGANRLGSNSLLDLVVFGRAVANRCSETIKPNQPHKVLPSDSCDKALGLLDKLRHADGSTPTAVIRDTMQRTMQSDASVFRTSKTLQEGCEKMNEIFALFDDVKVSDRSLVWNSDLIETYELHNLLLNALATINSAEQRKESRGAHAHEDYPDRDDENWLKHTLVSVDEKGSCSFDYRPVHMYTLSKDVDVIPPKPRVY

SEQ ID NO: 29324 - protein, 425 aa, ASPERGILLUS NIDULANS FGSC A4
MAILNPTIEQVRASIDEALQSANASLRTFNQKIWSNPETAYEERRAHDTICDFLEEKGFAVTRHAFGLNTSFEAKSGSGGRLINFNAEYDALPEIGHACGHNLITTSSVAAFLALSTVLKQYNMPGRTQLLGTPAEENGGGKAKLIDAGAYKGVDISLMAHAGPRELFPGVVLDGCAGVLMNARKELHCEFTGVSAHAGGNPWDGVNALDALVSAYNNIAMLRQQMMPDERMHCAFLETPKVANVIPAHTKAYWQVRSPTLKGLNSLMSRARRCVEAGAAASGCDVKITEKELYADIKLNDTLCALYQTHMATYGRNVLKRHEKILTGSSDIGMRDLYLLEQTAANKLSGNVSYIMPTLHAIFAIPATNGSFLHHPSFASAAGTDEAHEEALVVGKTLGLVGWEMLTNDELFEQSKSQWQKCVNE

SEQ ID NO: 29325 - protein, 656 aa, Burkholderia mallei ATCC 23344
MCGITGFVGPVACAPQTARATLARMTDSLAHRGPDDTGLWIDHDAGVALGHRRLSIVDLSEHGHQPMLSACGRYAMTFNGEIYNFRQLRSELEREHRAPEWRGHSDSEVLLAAFCAWGVDRALQKAVGMFALALWNRESRVLTLARDRIGEKPLYYGRIGGSFVFGSELKALRRFPGFDAHPIDRDALCLYLRHASVPAPYTIYEGIRKLPPGTYAQLEDLAEAPAPRRYWSLERAIAAGRANPFDGDANAAVAQLDYVLRDAIAEQSVADVPLGAFLSGGVDSSVIVALMQTQTAQPVQTFTIGFHEAGYDEAGYAKAVARHLGTSHTELYVKPADVLATVPRMPCVYDEPFADSSQIPTLLVSELTRRHVKVSLSGDGGDELFGGYTRYFLTPRLWGRLRRVPAAVRMRIAAALHALRPDHADQIASLVQGAWSASAQRDASPRVGDRLHKLANVMTADSRASLYRLLMSSVHHPERFTLAGHEPQTLIDTPGAWPAGLSFAEQAMAVDTLTYLPTDILTKVDRAAMAVSLETRMPFLDHRVVEFAWRLPEALRIPDGQDKWLLRKLLYRYVPRPLIDRPKQGFCAPVGAWLRGELSDWAAELLRPARLRDEGYLDAARVERLWRQHQSGRMNWQHPLWTVLMFQAWLERQRAE

SEQ ID NO: 29326 - protein, 939 aa, Arabidopsis thaliana
MIKTKKVILSCWLQLKTCWFWQKLAKTTSKEFWLQCEGIVQDLDDRRQELPPGVLKQLHTRMLFILTRCTRLLQFHKESWGQEEDAVQLRQSGVLHSADKRDPTGEVRDGKGSSTANALKVPSTKKAYSQEQRGLNWIEGFFVRPAPLSSPYNETSKDSESPANIDKMSSWKRLPSPASKGVQEAAVSKEQNDRKVEPPQVVKKLVAISDDMAVAKLPEVSSAKASQEHMSKNRHNISWGYWGHQSCISEESSIICRICEEEIPTTHVEDHSRICALADKYDQKGVGVDERLMAVAVTLEKITDNVIQKDSLAAVESPEGMKISNASLTEELDVLSPKLSDWSRRGSEDMLDCFPETDNSVFMDDMGCLPSMSCRTRFGPKSDQGMATSSAGSMTPRSPIPTPRPDPIELLLEGKGTFHDQDDFPQMSELADIARCAANAIPVDDQSIQLLLSCLEDLRVVIDRRKFDALIVETFGTRIEKLIQEKYLQLCELMDDEKGTIIDEDAPLEDDVVRSLRTSPVHLRDRISIDDFEVMKSISRGAFGHVILARKNTTGDLFAIKVLRKADMIRKNAVESILAERDILINARNPFVVRFFYSFTCSENLYLVMEYLNGGDFYSMLRKIGCLDEANARVYIAEVVLALEYLHSEGVVHRDLKPDNLLIAHDGHVKLTDFGLSKVGLINNTDDLSGPVSSATSLLVEEKPKLPTLDHKRSAVGTPDYLAPEILLGTGHGATADWWSVGIILYEFLVGIPPFNADHPQQIFDNILNRNIQWPPVPEDMSHEARDLIDRLLTEDPHQRLGARGAAEVKQHSFFKDIDWNTLAQQKAAFVPDSENAFDTSYFQSRYSWNYSGERCFPTNENKDSSEGDSLCGSSGRLSNHHDEGVDIPCGPAEFETSVSENYPFDNFSFKNLSQLAYINYNLMSKGHKDETQPSLQRR

SEQ ID NO: 29327 - protein, 760 aa, Oryza sativa
MENTSGGIGGGRQQSTQDGDFDLPLLAASPRPSDLAQMFSHGADSAHDAGAVSTGASGVPTRFVWPYGGKRVYLTGSFTRWTEHLPMSPVEGCPTVFQAICSLSPGIHQYKFCVDGEWRHDERQPTITGDYGVVNTLCLTRDFDQINTILSPSTPGSRMNMDVDNDNFQRTVSLSDGIIQEGPQRISEAAIQISRCRVADFLNGQTGYDLLPDSGKVIALDVNLPVKQSFHILHEQGIPVAPLWDSFRGQFVGLLSPLDFILILRELETHGSNLTEEQLETHTISAWKEAKRQTYARNEGSWRANHHLVHATPYESLREIAMKILQNGVSTVPIMFSSSPDGSYPQLLHLASLSGILKCICRYFKNSQGNLPILSQPVCTIPLGTWVPKIGDPNGRPLAMLRPNTSLSAALNLLVQAGVSSIPIVDDNDSLLDTYSRSDITALAKDKVYTHIRLDEMTIHQALQLGQDANSPFGFFNGQRCQMCLRSDTLLKVMERLANPVNSSFSCLVKVKVKVQVQRAVRPWSLSSNGDGLGVERKDLERLNEKVKEHIEEKAGRAVAKHSQLVKEVDVRLSARGGELSRGPKICRCEITLFTKRHGVIRAEEDAESTYASIDLASSIIKRKLRKIKEKETDVRHLKGTKPPVSDWPPSLLDNNDDDAQAQLKDLEEAVGAEDEDTVLTKVVRTKVFEMPPLSVEEAMEQLVNVDHNFYAFRDEKTGEMNVLYKRKEGGFGLIVPKGDGHLHKETIPNSDHHHPSLAA

SEQ ID NO: 29328 - protein, 384 aa, Karlingiomyces sp. JEL93
LYCLEHGIQPDGQMPSDKTIGGGDDSFNTFFSETGAGKHVPRTVFVDLEPTVVDEVRTGTYRQLFHPEQLITGKEDAANNYARGHYTIGKEIVDLVLDRIRKLADNCTGLQGFLVFHSFGGGTGSGFGALLLERLSVDYGKKSKLEFSVYPAPQVSTAVVEPYNSILTTHTTLEHSDCAFMVDNEAMYDICRRNLDIERPTYTNLNRLIAQVVSSITASLRFDGSLNVDLTEFQTNLVPYPRIHFPLVTYAPVISAEKAYHEQLTVAEITYSCFEPANQMVKCDPRHGKYMACCLLYRGDVVPKDVNAAIATVKTKRTIQFVDWCPTGFKVGINYQPPTVVPGGDLAKVQRAVCMLSNTTAIAEAWARLDHKFDLMYAKRAFVH

SEQ ID NO: 29329 - protein, 416 aa, Acinetobacter sp. ADP1
MVRKTVTHQQQHSAAVGIQLSASLSALGSSSQQVRQNLTQPNSTQQTTLSLQQHWLSEHAVWVGAYQENFIEQLPERCAPWQSRNLRFAVTALSQIETELRQRTAHINPSRLAIVVGTSTSGIADNESLLAEYFQGKTEVVIDHHKQEMNALAKGLQAYLGWCGAAYTISTACSSSAKAFIAGQRLLNAGLADAVLVGGVDTLCRLTLNGFNSLESLSASICQPCGAERDGINIGEAASLFLLTRDIAPVMFLGGGEAMDAWHISAPHPDGLGAAQAMQRALKAANLEAAQIDYLNLHGTATPQNDAMEIKAVRQVFAGHPIKLSSTKHQTGHCLGAAGAVEAFICQQALLDQSWLPWHQQGQLDHELADQTYVNASTKIESLHYMMSNSFAFGGSNVSLIFGRNFEQNLLGTAST

SEQ ID NO: 29330 - protein, 282 aa, Beta vulgaris
MCESFKRQYQLCDEIGRGRFGVVFRCFSPSSHTSFAVKSIDKRLLLDDETDRECLDKEPKILQILSPHPNILQIHDIFDSDSHLLIVTDLCQESTLYDRVVSAGPFSETDACSVFTQLIDALAHCHRNYICHRDVKPDNILFDSRNRVKLCDFGSAEWFGGVEGRERMNGIVGTPYYVAPEVLAGREYNEKIDVWSAGVILYIMLGGVPPFYGDTVEDTFAAVLRGNLRFPTKIFRSISPEAKDLMRKMLSKDVSRRFSAEQVLRHPWVTSGGMTSTMNDMS

SEQ ID NO: 29331 - protein, 407 aa, Acinetobacter sp. ADP1
MKRVVVTGMSGITSLGETADAIFEKFAQGKSGIRYMADWEQYTDLRTKLGGPVESFSIPKHFNRKVTRGMGRVALMSVIAAEAALKDAKLFDDPILKSGDTGVAFGSSAGSVDAVREFGCMLIDNDMTKMNATTYIRMMSHTSAVNMTVYFGLKGLTLPTSSACTSGSMAIGQAYEAIKYGKQTVMLAGGAEEISAAGAAVFDVLLATSGMNDHPEQSPRPFDAKRDGLVIGEGAGCLVLEEYEHAQARGATIYAEIVGYGSNTDGQHVTRPDQAMMARCMQLSLKDAGLSAEQIGYVNAHGTSTDQGDIAETQATAQVLGKKPISSLKSYFGHTLGACGAIEAWLSIEMMQRNQYIPTLNLDDVDPLCGDLDYITGQSRALGADIVMSNNFAFGGINTSLIFKRVE

SEQ ID NO: 29332 - protein, 382 aa, UMBELOPSIS RAMANNIANA
LYCLEHGINPDGHLPEGEGNGDNSFDTFFSETSSGKHVPRTVFVDLEPTVVDEVRTGTYRQLFHPEQLITGKEDAANNYARGHYTIGKELVDVVLDRIRRLADNCTGLQGFLVFHSFGGGTGSGFGALLLERLSVDYGKKSKLEFSVYPAPQVSTAIVEPYNSILTTHTTLEHSDVAFMVDNEAIYDICRRNLDIERPTYSNLNRLIAQVVSSITASLRFDGSLNVDLNEFQTNLVPYPRIHFPLVTYAPIISAAKAGHENLSVSEITNSCFEPNNQMVKCDPRHGKYMACCLLYRGDVVPKDTNAAVAAIKTKRTIQFVDWCPTGFKIGINYQAPTVVPNGDVAKVSRAVCMLSNTTAIAEAWARLDHKFDLMYAKRAFVH

SEQ ID NO: 29333 - protein, 465 aa, Bacillus cereus G9241
MTIVTFSKSTTDKPSYTYEELSEKNKAYVWHPFTQMKDYLEEDPVIIERGEGRKLYDVNGNEYWDGVSSIWLNVHGHQVPELDEAIREQLNKIAHSTMLGLANVPSILLAEKIIEVVPEGLKKVFYSDSGSSAVEIAIKMAFQYWQHKGKAKKQRFVTLKEAYHGDTIGAVSVGAIDLFHQVYSSLLFEAIKMPYPYTYRSPYGNDKAEIVRKHLEEMEELLKDKHEEIAAIIVEPLMQGAGGMITMPKGYLRGLRNLCTKYNVLFITDEVATGFGRTGKMFACEHENVTPDILTAGKGLTGGYLPVAITVTTDEIYNAFLGGYEEQKTFFHGHSYTGNPLGCAVAIANLELYEKTNLIEEVACKTEYVATQLEELFACKHVGDIRQCGLMVGIELVKNKETKEAFEWTERVGVQVCKRSRELGMILRPLGNTIVFMPPLASTIEEIDDMLRILYKAISDVTEGE

SEQ ID NO: 29334 - protein, 113 aa, Brassica napus
  misc_feature (17)..(17): Xaa can be any naturally occurring amino acid
  unsure (1)..(113): unsure at all Xaa locations
ELIAAGIRIWVFSGDAXADAVVPVTSTRYSIDALNLSTTSPYGPWYIDGQVGGWTQQYAGLNFVTVRGAGHEVPLHRPKEALALFKAFISGTPLLSTPEKSIRSEMSELVSDS

SEQ ID NO: 29335 - protein, 302 aa, Triticum aestivum
MVLSRAASDTDVSVHSTFASRYVRSSLPRYRMPENSIPKEAAYQIINDELMLDGNPRLNLASFVTTWMEPECDKLIMASINKNYVDMDEYPVTTDLQNRCVNMIAHLFHAPLGESETAVGVGTVGSSEAIMLAGLAFKRRWQNKRKAEGKPFDKPNIITGANVQVCWEKFARYFEVELKEVKLREGYYVMDPEQAVEMVDENTICVAAILGSTLNGEFEDVKRINDLLEEKNKQTGWETPIHVDAASGGFIAPFLYPELEWDFRLPWVKSINVSGHKYGLVYPGIGCCVWRTKEDLPDELIF

SEQ ID NO: 29336 - protein, 306 aa, Rhodospirillum rubrum
MSTYRYKLPAVSDEGGLSRYLTEIKRFPMLTPEEEFMLAKRLQDEGDRDAAHRLVTSHLRLVAKIAMGYRHYGLPVSDLVAEGNMGLMKAVKKFEADRGFRLATYAMWWIKASINEYILNSWSLVKVGTVAAQKKLFFNLRRLKAKLGVYEEGDLSPEDVKTIATQLKVTEADVVMMNRRLAGPDASLNVPVGEDQSMDRMDLLMDEGDNQEEVYAAHEEQSLGNRLLKDALSTLTERERHIITARRLRSEPVTLEELGGEYGVSRERVRQIENRAFEKLQTAVRKAARALNDRQPHHGGVEPAMA

SEQ ID NO: 29337 - protein, 487 aa, Xanthomonas campestris pv. vesicatoria str. 85-10
MMAPTMSVTSAISQWPDVDQLYRRFDALVKQPMRPVRREGMDKVMRYFEQRCQGSKQLGDAAQRVIPGGVQHNLAFNYPFSLAMRSAEGAYLTDVDDNRYIDFLQAGGPTLLGSNPPALRARVNEVLDQCGPVTGLLHEYEVKLAELVCASMPAVEMVRLLGSGTEAVMGAVRLARAYTRKRWIIKIGGAYHGWSDQLVYGLRLPGTGRMEAIGIPRGATAHTQECLPNDLDALRRKLQFNRLRGGTAAVLLEPLGPESGTRPVHADYNRQVRALCDEFGALLIFDEVVTGFRLGPGGAQGYFGVAPDITVLGKCLAGGYPMAGAIGGRREVMMSLVGGIGTTARRAFVGGTLSANPLSCVAGYYALLEAQQNDAAGRAGRAGDRLRAGLEAIIQRRGLPYVVYNMGSIVHLQTSGVLLLDTGNLYKLWRVRNEAKARKHMMEEMGAAYSAHGLITLAGSRIYTSMADTDAVIDEALNRFDDVFALV

SEQ ID NO: 29338 - protein, 411 aa, Leuconostoc mesenteroides subsp. mesenteroides ATCC 8293
MSEKRYEFATRVAGLLPNPLREQAKHVQEADDYIKLTYGYPSNQAFPVEKLAKISEKIYRDHAFDFMQYGETEGIPRLRAQIKERLAKYQSLDVENNDVLITSGSTQGMDLVFKIFVNEGDIVLTEEQTFVGAVNAIKSYGGTVQGLPFDFSAGSIDTSALKATLEADTEHRIKVLYLIPTFQNPVGTSMPLEKRQEVYDICQAHEVMIYEDDPYGDLLYAEKTAIPKIKSFDQTGNVIYAGSFSKILAPGSRLGYLLAPKDVFDKLVLMKQVADSFANLYWQYLASQLIDDYDFNEHIDYLRQLYKEKMDTMISSLAQKSDDNMAFVVPDGGYFISVKLNDDIETEAFYDELEQRHIGVIPGNIMSAAGSGYEQYFRLNFTLPTLSEIKIGIERISEAAAAAKQTKSPVI

SEQ ID NO: 29339 - protein, 462 aa, Oryza sativa
MSFRSIVRDFRDSFGTLSKRSFEVKISGFSGRHRGKSIGPSSELDDTPVVAQQSKWAGLPPELLRDVMKRLEEDDSNWPSRKDVVACASVCTTWRDMCKDIVRNPEFCGKLTFPVSLKQPGPRDGVIQCFIKRDKSKLTYHLYLCLSSAVLDETGKFLLSAKRSRRTTHTDYIISMDSKNISRSSSGYIGKLRSNFLGTKFIIYDTQPPYNARTLCSQERTSRRFSSRKVSPKVPTGCYPIVQVNYELNVLGTRGPRRMQCAMHSIPASAVEPGGIVPGQPKELLPRLFEESFRSMATSFSKYSITDHSTDFSSSRFSEFGGGALQGQEQEQDGDDVNKERPLVLRNKAPRWHEQLQCWCLNFRGRVTVASVKNFQLIAAAPQPSSGAASEPSQAGQAAQQQTQPSQPSSSSSSSSSNHDTVILQFGKVAKDMFTMDYRYPLSAFQAFAICLTSFDTKLACE

SEQ ID NO: 29340 - protein, 623 aa, Claviceps purpurea
MAALARLTAALAVSMSLAAAATINHDFNVTWVRANPDNAFERPVIGINGQWPIPTIECNVGDRIVINLNNQLGNQSTSLHFHGLYQNGTNQMDGPSGVTQCGVPPGSSITYNFTVDQPGTYWYHSHNDGQYPDGLRGPVVVHDPEFPYSKEIDQEVVLTLSDCYHDEIRDLIPQFLSKTNPTGVSLSNAALSMIAECTVSVQPGKTYHFRVINMGAFAGQYLWFEGHKMRIVEVDGVYTKQAEADMIYLSAAQRVSFLLTTKNDTNANFPFVASMDTSLFDQLPKDLNYNSTGWLSYDQTKTLPDPALVDELNPFDDMTLEAYDGMELLPEPDYNVELNVVMDNLGNGANYAFFNNITYKSPKVPTLYSVLSAGEQAENPAIYGEYTHPFVLKKDEIVQIVVNNLDSGRHPFHLHGHSFQAIYRSNESAGTWEAEGGPSGKTFPKVPMRRDTIVLYPPGNMVLRFKADNPGVWLFHCHIEWHVVSGLMATFIEAPTELQKKVSIPEDHLAVCRAGNVPTEGNAAGNTKDLLDLSGQNAPPDPLPEGFTTRGIVALVFSCITGLLGICVVAWYGMSQPTEEAPKAVAELIREVGENDSETRLGRENGVVGVGAETGAEGLRQRT

SEQ ID NO: 29341 - protein, 376 aa, Bacillus anthracis str. A2012
MAQKQKCVAMLLAGGKGSRLSALTKNLAKPAVPFGGKYRIIDFTLSNCANSGIETVGILTQYQPLELHNYIGIGNAWDLDRVSGGVTVLPPYAESSGVKWYTGTASAIYQNLNYLSQYEPEYVLILSGDHIYKMDYSKMLDYHIEKEADVSISVIEVPWDEASRFGIMNTNEEMEIVEFEEKPQFPRSNLASMGIYIFNWAILKEYLEMDARNPESSNDFGKDVLPLLLDEGKKLMAYPFEGYWKDVGTVKSLWEANMDLLRDETSLNLNDRDWRIYSVNPNEPPQYIAEKAKVEESLINEGCVIEGDVKHSVLFQGVTVEEGSMVIDSVVMPGAKIGKNVVIERAIVGSEMVIEDGTIIRPEKNVDDVVLIAEGK

SEQ ID NO: 29342 - protein, 439 aa, Photorhabdus luminescens subsp. laumondii TTO1
MRHCNSLIEKIDMKRQFSVAASVVASCVPSLSQAAEGVVDKADNAFMMICTVLVLFMTIPGIALFYGGLLRSKNVLSLMAQVMVSFALVCVLWVIYGYSLAFEPGNGFFGGFSQVMLKNLAFTDLSGNFYQLIHVAFQGSFACITVALIIGALGERIRFPALLVFTVLWLTFSYLPMAHMVWGGGVLSQDGALDFAGGTVVHINAAVAGLVGAYLLGKRTGFGKEAFKPHNLPMVFTGTTVLYIGWFGFNAGSASAANEIAALAFLNTIVATAAAILSWVFAEWLFRNKPSLLGACSGCIAGLVGITPAAGMVGVGGALIIGLIAGFTGLWGVVALKRWLRVDDVCDVFGIHGVCGIVGCLLTGVFTAKSLGGIGYAEGITMLGQVGIQAFSILVCVIWSVVVAFIAFKIADLLVGLRVTVEIEREGLDINSHGESAYN

SEQ ID NO: 29343 - protein, 505 aa, Gloeobacter violaceus PCC 7421
MTAEGHLKVLRTNIAAVRAIVETVAGTLGPKGLDVLLVDDAGRMTLTNDGVEILGQLDAQHPAARLVIQVAEAQDRSVGDGTTTATVLAGALLDACLERVEQGIAINALIAGLRAGVQAALDALRSAAVPVTDLADPRVPAVTRIAARGDEAIARIVWEAANHIGFERLRAGRVRLGELVSSRVGESHRWIEGLVLAKQPLQLPPEGFSRTGGVLVLSDPFESESFDAQVLATEGGFARYLEAQEQLRRRVQVLVEAGVVLLVCEKSISPTAEPLLAEAGIVALQRILRRDSERTAGFSGAVPVRQGQLARGATALAPVLGKATVRYERPSQKLVLSAGGGEPLAAMIVGAVSAEVAAELERVAVDACSALQAALTSGVVTGGGVAELASRRAVSALAARTEGVVRYGIEAVAAALRRPLEQIVSNSGYSALEKVAQLEAMHQRTANPHLGIDCENGEVVDLWQAGVIDPLAVKTCALEAAAEIAERILRIQTVVRRRETPPGGA

SEQ ID NO: 29344 - protein, 701 aa, Debaryomyces hansenii CBS767
MTRDIKNHLLFEVATEVAHKVGGIYSVLKSKAPITVAEYRERYTLIGPLNYNSAQIEVEELPVKDPLILKALDSMSERGIRWLYGRWLIEGAPRVLLFDIHSAGHHLNEWKADLWNIAGIPTPEHDQESSEAILLGYLVAWFLGELVYHDRERAVICHCHEWLAGIALPLCRKRRIDVTTVFTTHATLLGRYLCAGSTDFYNNLANFDVDAEAGKRGIYHRYCIERSATHSADVFTTVSHITAFEAEHLLKRKPDGVLPNGLNVVKFQAVHEFQNLHALKKEKINEFVKGHFYGNYDFDLDNTLYFFIAGRYEFRNKGCDFFVESLARLNHRLKEAGSKMTIVAFIIMPGKTNSYTVETLKGQAVIKQLEGTIEEVQKKVGERLFEHCARFPNNHSTTTANGNEVPSIDDLIKPADRVLLKRRIFALKRDGLPPIVTHNMTDDSTDPVLNHIRRVELFNKPDDRVKIIFHPEFLNANNPILSLDYDEFVRGCHLGVFPSYYEPWGYTPAECTVMGVPSITTNLSGFGCYMEDLIENTSDYGIYIVDRRMKAVDESINQLTDYMFDFAEKTRRQRINQRNRTERLSDLLDWKRMGLEYIKARQLSLKRAYPDKFKNGANPFNNTSNLKLTRPLSVPGSPRSKVGLMTPGDLGSLQEAHQSLNTDDYIGFKLGENEDDDATEDANVYPLTLRGNSVPPTDDAT

SEQ ID NO: 29345 - protein, 494 aa, Agrobacterium tumefaciens str. C58
MASRPFRDDATPDATSGIEIYSVPGFFMYQFDLIVVGSGPAGRRAAIQAAKLEKKVLVIEKGSRVGGVSVHTGTIPSKTLRETALNLTGWRERGFYGRAYRVKQEIDADDLRRRLLITLDHEVEVLEHQFARNRVQHIRGTASFIDANTMKVVKSDGEVMTVTATSILLTIGTRPYRPPHIPFDGQAVLDSDEILEIKELPRSMVVVGAGVIGIEYATIFSALDTQVTVVEPRETMLEFIDKEIVEDFTYQLRDRNMKLIFGQKAEKVERDESGKCLVSLSNGRVLKAETVLFAAGRVGATDTLNLSACGLEADSRGRLKVDPETFQTSVPNIYAAGDIIGFPSLASTSMEQGRIAARHAVGAPAGEPPQFFPYGIYAVPEISTCGLTEEEVVERGIPYECGIAHFRETSRGHIMGLDSGLLKMIFSLKTRRLLGVHIVGEGATELVHIGQAVLNLKGTVEYFVENTFNYPTLAEAYKIAGLDAWNRMGELKKD

SEQ ID NO: 29346 - protein, 223 aa, Cryptococcus neoformans var. neoformans B-3501A
MASTIDLKQLEQHLATRSYIDGFKPTTADVEIYKSLGSAPEATFPHCHRWYIHIASFADEFDSLPAGTNPLSSTSAGAAAAAGEEEDDEVDLFGSDDEEADEEAERIKAERIAKYNEAKEAKKQEKLAAGKTLEVAKSVVTLQVKPWDDETDMQALEDGVRAIEKDGLVWGASKLVPVGYGIKMLQINLVIEDAKISLDELQEEIAELEDYVQSSDVAAMQKL

SEQ ID NO: 29347 - protein, 716 aa, Triticum aestivum
MAGADPNRSSMKDVKRIIIKVGTAVITRNDGRLALGRIGALCEQVKDLNAQGYEVIMVTSGAVGVGRQRLRYRKLVNSSFADLQKPQMELDGKACAAVGQSGLMALYDMLFTQLDVSSSQLLVTDSDFDNSNFRERLRETVESLLELRVIPIFNENDAISTRKAPYEDSSGIFWDNDSLAGLLALELKADLLVLLSDVDGLYSGPPSEPSSKLIHTYIKEKHYHEITFGDKSRVGRGGMTAKVQAAVWAATGGVPVVITSGCASQSLVKVLRGEKIGTLFHKNASLWEPSKDTSVREMAVAARDCPRHLQNLSSEERKKILLDVADALEANEDLIRSENEADLAAAHEAGYESALVSRLTLKPGKIASLAKSVRTLANMEDPINEILKRTEVADGLVLEKTSCPLGVLLIIFESRPDALVQIASLAIRSGNGLLLKGGKEAMRSNAILHKVITNAIPDNVGEKLIGLITTRDEIADLLKHDDVIDLVIPRGSNKLVAQIKSSTKIPVLGHADGVCHVYIDKSADMDMAKRIVMDAKIDYPAACNAMETLLVHKDLMKIPELNDILVALKAAGVNLYCGPVAHKVLGYPKADSLHLEYSSMACTVEIVDDVQSAIDHIHRYGSAHTDCVVTTDDKVAETFLRQVDSAAVLYNASTRFSDGARFGLGAEVGISTGRIHARGPVGVEGLLTTRWLLRGKGQVVNGDKDVEYTHKSLPLQ

SEQ ID NO: 29348 - protein, 384 aa, Nowakowskiella elegans
LYCLEHGIQPDGQMPSDKTIGGGDDSFNTFFSETGAGKHVPRTVFVDLEPTVVDEVRTGTYRQLFHPEQLITGKEDAANNYARGHYTIGKEIVDLVLDRIRKLADNCTGLQGFLVFHSFGGGTGSGFGALLLERLSVDYGKKSKLEFSVYPAPQVSTAVVEPYNSILTTHTTLEHSDCAFMVDNEAIYDICRRNLDIERPTYTNLTRLLAQVVSSITASLRFDGSLNVDLTEFQTNLVPYPRIHFPLVTYAPVISAEKAYHEQLTVAEITNSCFEPANQMVKCDPRHGKYMACCLLYRGDVVPKDVDAAIATIKTKRTIQFVDWCPTGFKVGINYQPPTVVPGGDLAKVQRAVCMLSNTTAIAEAWARLDHKFDLMYAKRAFVH

SEQ ID NO: 29349 - protein, 384 aa, Nowakowskiella elegans
LYCLEHGIQPDGQMPSDKTIGGGDDSFNTFFSETGAGKHVPRTVFVDLEPTVVDEVRTGTYRQLFHPEQLITGKEDAANNYARGHYTIGKEIVDLVLDRIRKLADNCTGLQGFLVFHSFGGGTGSGFGALLLERLSVDYGKKSKLEFSVYPAPQVSTAVVEPYNSILTTHTTLEHSDCAFMVDNEAIYDICRRNSDIERPTYTNLTRLLAQVVSSITASLRFDGSLNVDLTEFQTNLVPYPRIHFPLVTYAPVISAEKAYHEQLTVAEITNSCFEPANQMVKCDPRHGKYMACCLLYRGDVVPKGVNAAIATIKTKRTIQFVDWCPTGFKVGINYQPPTVVPGGDLAKVQRAVCMLSNTTAIAEAWARLDHKFDLMYAKRAFVH

SEQ ID NO: 29350 - protein, 698 aa, Oryza sativa
MASSTTTSEDALRRALAERQAAVDAQAEAVRALKAAGAAAAKAEVDAAVEALKALKVEAGAAARRLQAAVGASGGGGGAAREEMRQAVVNTLERKLFYIPSFKIYRGVAGLYDYGPPGCAVKANVLAFWRQHFVLEENMLEVDCPCVTPEVVLKASGHVEKFTDLMVKDEKTGTCYRADHLLKDHCKEKLEKDLTLSPEKAAELKHVLAVLDDLSADELGAKIKEYGIVAPDTKNPLSDPYPFNLMFQTSIGPTGLNVGYMRPETAQGIFVNFKDLYYYNGQKLPFAAAQIGQAFRNEISPRQGLLRVREFTLAEIEHFVDPEDKSHPKFVDVADLEFLMFPRELQLSGESAKLVKLGEAVSKGTVNNETLGYFIGRVYLFLTRLGIDKNRLRFRQHLPNEMAHYAADCWDAEIECSYGWIECVGIADRSAYDLRAHSDKSGVPLVAHEKFSKPREVEKLVIVPSKKDLGLAFKGNQKMVVEALEAMSEKEAMDMKAALESKGETNFQVCTLGKDVVITKKMVSISMEKKLEHQRVFTPSVIEPSFGIGRIIYCLFEHSFYTRPSKSEEEQLNVFRFPPIVAPIKCTVFPLVKNQEFDDAAKVIDKALTTAGISHIIDTTAISIGRRYARTDEIGVPFAVTVDSATSVTIRERDSKEQIRVGIDEVASVVKQLTDGQSTWADVSFKYPSHIGPQGDQE

SEQ ID NO: 29351 - protein, 431 aa, Corynebacterium diphtheriae NCTC 13129
MENNSFAQFDRDHIWHPYGPMPATVAPYVVAATNNTDIILDNGTRLIDGMSSWWAAAFGHGNERLKAAAHRQIDVMSHVMFGGLTHVPAIKLARQLCELTDEPLTKVFFSDSGSVAVEVALKMVYQYQLGQGHPERRRMLTWRGGYHGDTFATMSLCDPEGGMHAMWEGRVMDNVFASRPPLWGAASNEISAYIDHLDSLIDSTIAGIIVEPVVQGAGGMRFHAPEILKGIRQLCDQHGILFIADEIATGFGRTGNLFATQAAKVTPDILCVGKSLTGGFMSLAATITTDAVAESISSAAGGGALMHGPTFMGNPLACAVASEALSIIAEGDWKQQVAEIESELKKGLVPLASNPAVRDVRVLGAIGVVEMKEPVDMKRATHAAVNAGVWLRPFGRLVYTMPPFVCTHKQIQKISCAIASIVHTEQERFER

SEQ ID NO: 29352 - protein, 384 aa, Rhizophydium sp. JEL138
LYCLEHGIQPDGQMPSDKTIGGGDDSFNTFFSETGAGKHVPRTVFVDLEPTVVDEVRTGTYRQLFHPEQLITGKEDAANNYARGHYTIGKEIVDLVLDRIRKLADNCTGLQGFLVFHSFGGGTGSGFGALLLERLSVDYGKKSKLEFSVYPAPQVSTAVVEPYNSILTTHTTLEHSDCAFMVDNEAIYDICRRNLDIERPTYTNLNRLIAQVVSSITASLRFDGSLNVDLTEFQTNLVPYPRIHFPLVTYAPVISAEKAYHEQLTAAEITYSCFEPANQMVKCDPRHGKYMACCLLYRGDVVPKDVNAAIATIKTKRTIQFVDWCPTGFKVGINYQPPTVVPGGDLAKVQRAVCMLSNTTAIAEAWARLDHKFDLMYAKRAFVH

SEQ ID NO: 29353 - protein, 470 aa, Escherichia coli K12
MKKTKIVCTIGPKTESEEMLAKMLDAGMNVMRLNFSHGDYAEHGQRIQNLRNVMSKTGKTAAILLDTKGPEIRTMKLEGGNDVSLKAGQTFTFTTDKSVIGNSEMVAVTYEGFTTDLSVGNTVLVDDGLIGMEVTAIEGNKVICKVLNNGDLGENKGVNLPGVSIALPALAEKDKQDLIFGCEQGVDFVAASFIRKRSDVIEIREHLKAHGGENIHIISKIENQEGLNNFDEILEASDGIMVARGDLGVEIPVEEVIFAQKMMIEKCIRARKVVITATQMLDSMIKNPRPTRAEAGDVANAILDGTDAVMLSGESAKGKYPLEAVSIMATICERTDRVMNSRLEFNNDNRKLRITEAVCRGAVETAEKLDAPLIVVATQGGKSARAVRKYFPDATILALTTNEKTAHQLVLSKGVVPQLVKEITSTDDFYRLGKELALQSGLAHKGDVVVMVSGALVPSGTTNTASVHVL

SEQ ID NO: 29354 - protein, 516 aa, Zea mays
MQFALALDTNSGPHQIRSCEGDGIDRLEKLSIGGRKQEKALRNRCFGGRVAATTQCILTSDACPETLHSQTQSSRKNYADANRVSAIILGGGTGSQLFPLTSTRATPAVPVGGCYRLIDIPMSNCFNSGINKIFVMSQFNSTSLNRHIHRTYLEGGINFADGSVQVLAATQMPEEPAGWFQGTADSIRKFIWVLEDYYSHKSIDNIVILSGDQLYRMNYMELVQKHVEDDADITISCAPVDESRASKNGLVKIDHTGRVLQFFEKPKGADLNSMRVETNFLSYAIDDAQKYPYLASMGIYVFKKDALLDLLKSKYTQLHDFGSEILPRAVLDHSVQACIFTGYWEDVGTIKSFFDANLALTEQPSKFDFYDPKTPFFTAPRCLPPTQLDKCKMKYAFISDGCLLRECNIEHSVIGVCSRVSSGCELKDSVMMGADIYETEEEASKLLLAGKVPVGIGRNTKIRNCIIDMNARIGKNVVITNSKGIQEADHPEEGYYIRSGIVVILKNATINDGSVI

SEQ ID NO: 29355 - protein, 382 aa, Rhizopus microsporus var. oligosporus
LYCLEHGIQPDGRIPSENEVTNHSFATFFSETGGGKHVPRTVFVDLEPTVVDEVRTGAYRQLFHPEQLITGKEDAANNYARGHYTVGKELVDSVLDRIRKLADNCSGLQGFLVFHSFGGGTGSGFGALLMERLSVDYGKKSKLEFSVYPAPQVSTSVVEPYNSILTTHTTLEHSDCSFMVDNEAIYDICRRNLDIERPTYANLNRLIAQVVSSITASLRFDGSLNVDLNEFQTNLVPYPRIHFPLVTYAPIISSAKAFHEQLTVPEITYSCFEPNNQMVKCDPRNGKYMACCLLYRGDIVPKDTNAAIATIKTKRTIQFVDWCPTGFKVGINHQRPTVVPGGDLAEVQRAVCMLSNTTAISEAWARLDHKFDLMYAKRAFVH

SEQ ID NO: 29356 - protein, 461 aa, Lactobacillus plantarum WCFS1
MMKKVSAEDTVKTSVKEDQTSFGFDNSLPNLPIKTILAMTFGCIGVNMAFTLQGSQMSRITQTIGVNPNSLGWFFLLPPLLGMFVQPLLGKYSDSTWTRWGRRIPYLLVGAPITVIVMIMLPFTGSFGFGYGSMTAMVYAAIAIALMDLFSNVCLAPYKMLAGDMVNEKQKNLAWSWQQVFGYAGGILAALLPYILTKVGIANTASKGQVPATVIWAYLIGAVMLLVTSLVTIFNVHEYDPKTYAKYHKINESKQKVTPSLWKLLKTAPRSFWELAIVQLFSWIGIMYTWTYATGAMANNIWNTTNPASSGFQAAGNWYGVMTAFYSVAALLWGLFYAKTKATQRKFWYSFGLFADAISIIIVATTHNQWVALIAFALYGIGNFTINTLPYTMLTTSLDGRNNGSYLGLFNIAVCLPQIIGSLASFIIFPLVGNSQSMMMIIGFVAMVIGGFSVAIVHEGK

SEQ ID NO: 29357 - protein, 425 aa, Xylella fastidiosa Temecula1
MMSNSPQTPLVTRQRLSEVRYEIRGELARRARELEAEGRKLIKLNIGNPGAFGFRAPEHLQRAIADDMGRTDPYTHQQGLPIAREAIAAAYARRHYPDVDADRVFVGNGVSELIDLSLRALLNPGDEVLVPSPDYPLWSAATILNDGRPVYYRCAPENGFQPDAVEIETLVSSRTRAIVLINPNNPSGANYSQELLERIVAISVKHHLLLLVDEIYDQILYDGAVFVPVAPLAGTHPCITFSGLSKVHRACGWRVGWALLSGSSIQVDNLRNAMDLLGALRLCANVPGQYAIDAAVNGPDTITPLCSPGGPLYETRRAVIDACAASEHLSLVVPAGALYAFPSVVGPAARHFDDYAFALELMNEEGVLVVPGSSFNVPYRDHFRVTLLPDAGLIREVFSRIDRALSRRAEVAEKVVPLKSRSAAA

SEQ ID NO: 29358 - protein, 336 aa, Idiomarina loihiensis L2TR
MILVTGGAGYIGTHCCVELIESGYDIVVLDNLKNSTLEGLRQVERIVNKRVRFVEGDVRDLGLLEKLFGEFKFNAVLHLAGLKSVNESLSHPVEYYENNVTGSLSLLKVMEKFGCKCIVFSSSATVYGHPECVPISENSTLSTINPYGSSKLMVENILRDLSSSTLGWSIGILRYFNPVGAHESGLIGELPLGVPNNLMPYIAQVALGKLEKLTVFGNDYNTKDGTGVRDYIHVVDLAKGHVEALRELFGKEDLFIANLGTGVGYSVLELIKNFEKISGRKVPYEVGNRRRGDVAACYADPSYAKSRFGWSAEFDIDRMCHDTWRWMVKSNKTSVD

SEQ ID NO: 29359 - protein, 446 aa, Shewanella sp. MR-4
MADSPYNTTHEHPSLEHYWMPFTANRQFKASPRLLAQAEGMYYTDINGNKVLDSTAGLWCCNAGHGRREISEAVSKQIREMDYAPSFQMGHPLAFELAERLTELSPEGLNKVFFTNSGSESVDTALKMALCYHRANGQASRTRFIGRELGYHGVGFGGISVGGLSNNRKAFSGQLLQGVDHLPHTLDIQNSAFSRGLPSLGAEKAEVLEQLVTLHGAENIAAVIVEPMSGSAGVILPPQGYLKRLREITQKHGILLIFDEVITAFGRVGAAFASQRWGVIPDIITTAKAINNGAIPMGAVFVQDFIHDTCMQGPTELIEFFHGYTYSGHPVAAAAALATLSIYENEQLFERSFELERYFEDAVHSLKGLPNVIDIRNTGLVAGFQLAPNSQGVGKRGYSVFEHCFHQGTLVRATGDIIAISPPLIVDKHQIDQIVNSLSDAIRAVG

SEQ ID NO: 29360 - protein, 336 aa, Triticum aestivum
MALEAAVLSRAAAGLFGRCAMAGAGGAWNGLFGGSEGLAGLDGGDWDAAVAAACSSMLLPPAAFQDLDISATAPQEESGGRGEMSAAGVGQDDAAPVTAAATGRRKRRRTRTAKNSEEVESQRMTHIAVERNRRKQMNEYLAALRSLMPPSYALRGDQASIVGGAINFVKELEQLLQTLETQRQTRERAAVDGGEAQPPLFANFFTFPQYSMSVTSAPAPPPANNDEGADGCAEAEASGSKPSAVADVEVTMVESHANLRMLSRRRPRQLLRLLVGLQGHRLTVLHLNMSSASHMVLYSLSLKVEDDCQLTSVDEIATAAHQIIEKIQEEQDFTSA

SEQ ID NO: 29361 - protein, 483 aa, Gluconobacter oxydans 621H
MSLKRPLPSAEVSKARKAGMMQDFDLFVIGAGSGGVRCARIAAQNGARVAIAERRHWGGTCVNLGCVPKKLMVYAAEYGREIADAPSYGWDVKPVAHDWSTLISAKDREIERLNRIYVSMLEKAGVTLFTGDASFVDAHTVEIGPSELAPDASVQRVRAKNIVIATGSTPTRLNIPGAEHAIVSDDAFHLADRPERVAVIGSGYIGIEFAGIFAGLGSKVDLVFRQQLPLRGFDHEMRAHLSELLPLNGIKAHPGRSPERIEKVADGYRLHLEGGDVIETDCVFMATGRHPNLAPLKLGNAGVATWDGRIPAKPDDATTNVAGIYAIGDVTDTYNLTPTAIAEGHILAERLFGEPGREWSFATTPKAVFFSQPLATVGLSEEEAVQSHDVDIYTSSFTPMRQTLSGRKGKTLMKLVVDAKSKIVLGAHMIGPDAPEIIQGLAIAITAKLTKRDFDRTIGLHPTSAEEFVTMRSLTRHVPRKAG

SEQ ID NO: 29362 - protein, 353 aa, Hordeum vulgare subsp. vulgare
MDFRSSNGGSSSERRPAAEGASLTRQGSIYSLTFEEFQSTLGGGAGVGGGDLGKDFSSMNMDELLRSIWTAEESQAMAASASGAGAGAPPMSLQGQGSLTLPRTLSAKTVDEVWRNLVRDDPLPVGAEGAEPQPHRQATLGEMTLEEFLVKAGVVREIPTAPAVPPPPMQPRPVPVAPKGATFYGNFPSANDVGTAALGFPPVAMGDLALGNGLMPRALGMGGAPLVVQTAVKPVDSGSKGSEDLSSPSEPMPYSFEGIVRGRRTGGGVEKVVERRQRRMIKNRESAARSRARKQAYTMELEAEVQKLKDLNEELVKKQTEILKMQKREAPEMKDQFGRKKRQCLRRTLTGPW

SEQ ID NO: 29363 - protein, 362 aa, Gloeobacter violaceus PCC 7421
MHIVDIDRMATPDELEGGPDPVLDPQTLEAFVQVDITDERPARPGSSTDLVRVYLQEIGRVPLLGRDEEVELAQQVQKLMKLTALKESLQTSLGSEYSDEQWAEAAKVGLFELKRQVLAGSRAKKKMIEANLRLVVSVAKKYQNRGLELLDLVQEGTLGLERAVEKFDPTKGYRFSTYAYWWIRQGITRAIATQSRTIRLPVHITEKLNRIKKTQRKLSQNLGRTPTISEIAEELEMEPAHVRELMSRVPRSVSLETRVGKDKDTELGELLEAEEVSPEESAVQESLRRDVKELLDDLTLRERDVITMRYGLLDGRTYSLSEIGRALDLSRERVRQIESKALQKLRQPRRRAKVRDYLELME

SEQ ID NO: 29364 - protein, 150 aa, Triticum aestivum
MSSPSRRSSSPESNIDGGSGSGSAGDERKRKRMLSNRESARRSRARKQQRMEELIAEASRLQAENKRVEAQIGAYTTELTKVDGENAVLRARHGELAGRLQALGGVLEIFQVAGAPVDIPEIPDPLLRPWQSPFAPQLATAGGMPDAFQF

SEQ ID NO: 29365 - protein, 367 aa, Hordeum vulgare subsp. vulgare
MRSSEAETPAKANKASTPQEQQPPTSSTTTPTVYPDWTNFQGYPPIPPHGFFPSPVVSNPQGHPYMWGPQPMMPPYGTPPYVIYPPGGVYAHPSMRPGTTTTPATAGGETNGKSSDGIEKSPIKRSKGSLGSLNMITGKNCVEHGKTSGASANGTISQSGESGSESSSEGSEANSQNDLQHKESGQEQDGDVRSSQNGVSPSPSQAQLKQTSAIMQMPSSGPVPGPTTNLKIGMDYWANTASSSPALHGKVTPTAIPGDLAPTEPWMQDERELKRQKRKQSNRDSARRSRLRKQAECEELAQRAEVLKQENASLKDEVSRIRKEYDELLSKNSSLKDNIGDKQHKTDEAGLHNKLQRSGDDNQKDTN

SEQ ID NO: 29366 - protein, 354 aa, Triticum aestivum
MDFRSSNGGSSSERRPADGAPLTRQGSIYSLTFEEFQSTLGGGAGVGGSDLGKDFSSMNMDELLRSIWTAEESQAMAASASGAGAGAGPPPTSLQGQGSLTLPRTLSAKTVDEVWRNLVRDDPLPVGPEGAEPQPHRQATLGEMTLEEFLVKAGVVREIPTAPAVPPPPMQPRPVPVVPKGPSFYGNFPSANDAGAAALGFAPVAMGDLAIGNGLMPRAVGMGGAPLVVQTAVNPVDSGSKGSEDLSSPSEPMPYSFEGIVGGRRTGGGVEKVVERRQRRMIKNRESAARSRARKQAYTMELEAEVQKLKDLNQELVRKQAEILEMQKREAPEMKDQFGRKKRQCLRRTLTGPW

SEQ ID NO: 29367 - protein, 1390 aa, Cryptococcus neoformans var. neoformans B-3501A
MSLPDAYPPVIATEGSTAFQSHILSLLSVISQHPSPDYPFPSSGDSTLQDNASVTAKKNATLSTFPGKKTPAEDAIERAIIALGDRVWTSERTQAHLVKDVKRDVPAQPGSDLLTPDWTPPVPTLNDSSPDPVCPTCTRPVSSSETSSFTPQQIASFYHPFTAALSTPPPPLPEQMFFPQSVLAAYVSATSDSESAGDSGMSAEKELELLKAQVQDIARVCKAVATGDLTQKIIVPVKGQTMTELKNIINAMVDRLQTFAVEVERVSLEVGTEGKLGGQAVVPNVEGTWKVLTAVVNKLAANLTNQVRSIAKVTKAVAKGDLSETIDVEASGEIAELKTTVNGMVMSLRTLADEVSRVSLEVGSQGKLGGQANVPDVEGVWKDLTVNVNRMCESLTTQVRSIGSVTTAVARGDLSKMIEIEAEGEMAVLKNTVNSMVRQLTVFAKEVTRVALEVGTHGQLGGQAVVPGVEGVWDDLTTNVNKMARNLTDQVREIAMVTKAVARGDLSKTVNADVQGEILDLKCTVNEMLTNMPCKVAQLTVFAAEVTRVSLEVGTEGKLGGQAVVPNVEGTWMVLTDNVNLMALNLTTQVRSVAEVTTAVAAGDLSKKINVAAFGEILELKNTVNNMVDSLRSFSSEVTRVAREVGTDGRLGGQAKVPGVAGTWKDLTDCVNIMAANLTEQVRTIAHATTAVARGDLTQKVVGVKVSGEILDLVNTINNMIDQLAIFAAEVTRVAREVGTEGKLGVQAEVENIEGTWQEITSNVNTMASNLTSQVRAFAQISAAATDGDFTRFITVEASGEMDSLKTKINQMVYNLRESIEKNTKARQEAEMANRSKSEFLANMSHEIRTPMNGIIGMTVLTLESELTRQQRENLMIVSSLAGSLLTIIDDILDISKIEAGRMTMEQIPFSLRVAVFSVLKTLCVKAAQNKLDLIFDVDPTMPDQLIGDPLRLRQVITNLIGNAVKFTTKGQVALSCRVKRYVTVADAVELEFCVADTGIGIKQDKLDVIFDTFAQADGSTTRKYGGTGLGLTISKRLVNLMSGDLWVESEYGQGSRFYFTTVAEMTSVPRDQIIERLSPWSGRSVLFIDTLGDQTGIVEMLQELGLKPIVIHSVNDVYLLQDQGLTVFDTMIVDSLKAAGELRGIEYLRYIPIVLLAPSNKPSGPSNPSFISLPESRRRLLALPSASEQLLSPIPVKDCLEMGINTYYTTPLSLQELSNAIVPALESHQIQPGDTVKDTILSVLLAEDNLVNQKLAVKLMEVAGHKIEVADNGEIALEKYKRRQLARTPFDVILMDVSMPVMGGMEATGLIREFEANEGVPRTPIIALTAHAMIGDKERCLAAGMDEYVTKPLRRGDLLASIAKVLAPKQSASGLEMPTVPIPANIYGR

SEQ ID NO: 29368 - protein, 672 aa, Ustilago maydis 521
MSNIHRLVQSLARSSAWRSEALTSRTTKLASPPALPWSGRVAPAAKRWASHHARPASIGSSADRAYRSGVIAFRATLGATALAALAFSITDPLHLDAQAASHAKEIARAHEQDVQREDESHRPYRPLRSQPVSMLLTNYAVFTLCSFGSLAKVGPSLIEWSSNTSLPFVWAVTEYIIRRTFFRQFISDDTAEGSLPLLSSLSRDNLGAMLNFSVEVNHDGKPAKASDADKTPKSAVHRPFVDELLHSIDVSAKLASLPACHGAADNDQAAELAARPDRSGSTFVAIKLSGLLYDSSVLERASAAIVPREWFSSPPEPLPPLSINGKGPCGGLAIPVAALPPKDVEALKQLWEALREIAERAKQHGSVRLAIDAEYSWYQPAIDAMYEAIAAEYNRPAKASSDTPQGSVTGPLVYNTFQAYLRRTPSHLAASFERARLNGYTLGVKLVRGAYVDIENRIWSDKIVDAPPVPGKGADAAAYQGWGSPVWPNKDLTDRCYDGCAIRLVQEIHEDLVRGAKRGLLPSLAVVFASHNTQSSLKVIREMVRLGMAKPVPALLQATKDAHPGKDLGELLERVPLIDLQLQESVRGRIFFAQLYGMASVLTARIQAAFDANSGGVGPHMVLKYIPYGPLELTLPYLIRRALENGDIMTGGAAAEKTLVRDELMHRIGLRR

SEQ ID NO: 29369 - protein, 132 aa, Boechera holboellii
ASWHPPWYSSYTAHYREAESMKEAMEELLYSYGTDIVFNGHVHAYERSNRVYNYELDLCGPVYIVVGDGGNREKMAIEHADEPGKCPEPLTTPDPFMGGFCAWNFTPSGKFCWDHQPDYSAMRESSFGHGIL

SEQ ID NO: 29370 - protein, 411 aa, Nicotiana plumbaginifolia
MNALAATNRNFRQAARILGLDSKLEKSLLIPFREIKVECTIPKDDGTLVSYVGFRVQHDNARGPMKGGIRYHPEVDLDEVNALAQLMTWKTAVADIPYGGAKGGIGCKPKDLSKSELERLTRVFTQKIHDLIGINTDVPAPDMGTNAQTMAWILDEYSKFHGHSPAIVTGKPIDLGGSLGREAATGRGVVYATEALLAEYGKNIKDLTFAIQGFGNVGAWAAKLIHERGGKVIAVSDITGAVKNPNGLDIPALLNHKEATGKLIDFSGGDVMNSDEVLTHECDVLIPCALGGVLNRENADNVKAKFIIEAANHPTDPEADEILCKKGIVILPDIYANAGGVTVSYFEWVQNIQGFMWDEEKVNRELRKYMTKAFHNLKNMCQSHNCSLRMGAFTLGVNRVARATTLRGWEA

SEQ ID NO: 29371 - protein, 382 aa, Rhizopus microsporus var. oligosporus
LYCLEHGIQPDGRIPAEKEVTNHSFATFFSETGGGKHVPRTVFVDLEPTVVDEVRTGTYRQLFHPEQLITGKEDAANNYARGHYTVGKELVDSVLDRIRKLADNCSGLQGFLVFHSFGGGTGSGFGALLMERLSVDYGKKSKLEFSVYPAPQVSTSVVEPYNSILTTHTTLEHSDCSFMVDNEAIYDICRRNLDIERPTYANLNRLIAQVVSSITASLRFDGSLNVDLNEFQTNLVPYPRIHFPLVTYAPIISSAKAFHEQLTVPEITYSCFEPNNQMVKCDPRNGKYMACCLLYRGDIVPKDTNAAIATIKTKRTIQFVDWCPTGFKVGINHQRPTVVPGGDLAEVQRAVCMLSNTTAISEAWARLDHKFDLMYAKRAFVH

SEQ ID NO: 29372 - protein, 132 aa, Boechera holboellii
ASWHPPWYSSYTAHYREAERMKEAMEELLYSYGTDIVFNGHVHAYERSNRVYNYELDLCGPVYIVVGDGGNREKMAIEHADEPGKCPEPLTTPDPFMGGFCAWNFTPSGKFCWDQQPDYSAMRESSFGHGIL

SEQ ID NO: 29373 - protein, 158 aa, Brassica napus
  misc_feature (74)..(74): Xaa can be any naturally occurring amino acid
  misc_feature (143)..(143): Xaa can be any naturally occurring amino acid
  unsure (1)..(158): unsure at all Xaa locations
KTPQLKFICRRNLILSINIDKNTERDLQLSVESAARRLSEEKIEVIDFSSHVDVTTEPGHYVIFWEVSGETEEXVLQDCCNCLDRGFIDAGYMSSRKCKTIGALELRVVERGTFRKVQEHFLGLGSSAGQFKMPRCVKPSNGXVLKILCENAVSRFFS

SEQ ID NO: 29374 - protein, 382 aa, Rhizopus microsporus var. oligosporus
LYCLEHGIQPDGHIPQNLQADDNSFDTFFSETSSGKHVPRTVMVDLEPTVVDEVRTGAYRQLFHPEQLITGKEDAANNYARGHYTVGKELVDSVLDRIRKLADNCTGLQGFLVFHSFGGGTGSGFGALLMERLSVDYGKKSKLEFSVYPAPQVATSVVEPYNSILTTHTTLEHSDVSFMVDNEAIYDICRRNLDIERPSYLNLNRLIAQVVSSITASLRLDGSLNVDLNEFQTNLVPYPRIHFPLVTYAPIISAAKAHHEQMSVQEITNACFEPNNQMVKCDPRHGKYMSCCLLYRGDVVPKDTNAAIANIKTKRTIQFVDWCPTGFKVGINCRRPAAVPGGDLAEVKRALCMLSNTTAIAEAWARLDHKFDLMYAKRAFVH

SEQ ID NO: 29375 - protein, 132 aa, Boechera holboellii
ASWHPPWYSSYTAHYREAECMKEAMEELLYSYGTDIVFNGHVHAYERSNRVYNYELDLCGPVYIVVGDGGNREKMAIEHADEPGKCPEPLTTPDPFMGGFCAWNFTPPGKFCWDQQPDYSAMRESSFGHGIL

SEQ ID NO: 29376 - protein, 383 aa, Spiromyces minutus
LYCLEHGIHPDGFINTEAKQRQNSSFSTFFSETKAGKHVPRAVFVDLEPTVVDEVRTGDYRQLYHPEQLITGKEDAANNYARGHYTVGKELIDQVLDRIRKIADACTGLQGFLVFHSFGGGTGSGFGALLLERLSVDYGKKSKLEFSVYPAPKISNAVVEPYNSILTTHTTLEHSDCSFMVDNEAIYDICQKNLNIEQPSLKNLNRLIAQVVSSITASLRFEGSLNVDLTEFQTNLVPYPRIHFPLVTYSPIIGANKASHESLSVQEITSACFEPNNQMVKCDPRHGKYMACCLLYRGDIIPKDVNNAVAIMKTKRTIQFVDWCPTGFKIGINTEPPAHVPGGDLAQVNRAVCMLSNTTAIGEAWARLDHKFDLMFAKRAFVH

SEQ ID NO: 29377 - protein, 155 aa, Arabidopsis thaliana
MSLIPSFFGNNRRINNNIFDPFSLDVWDPFKELQFPSPSSSAIANARVDWKETAEAHVFKADLPGMKKEEVKVEIEDDSVLKISGERHVEKEEKQDTWHRVERSSGGFSRKFRLPENVKMDQVKASMENGVLTVTVPKVETNKKKAQVKSIDISG

SEQ ID NO: 29378 - protein, 165 aa, Candida glabrata CBS138
MDSQSSFYDLSPHDKDNNEFPFSNLKGQVVLIVNVASKCNFTPQYNDLQYLHEKYSYRGLKIIGFPCNQFGQQEPENDEVIQKFCLSNYGVSFKILKKIKVNGPNADPVYTYLKNEMPSQIGLKVIRWNFEKFLVDKHGRVRHRYSSLTSPKSLQRTIDQLLDDK

SEQ ID NO: 29379 - protein, 390 aa, Syncephalis depressa
ELYCLEHDILPNGTIKEDGDAELVASSQTFFSEASTGRFVPRTVFVDLEPTVIDEIRTGEYRQLFHPDQLITGKEDAANNYARGHYTVGREILHSVLDRIRKQVDNCEGLQGFLLFRAFGGGTGSGFGSLLMERLSEEYGKKTKLEFGVYPAPQISTAVVEPYNTVLTTHTMLEHVDCSFMVDNEAINDLCKKKLKLDRPTYSNLNRLIAQVVSSISSSLRFSGSLNVDLLEFQTNLVPFPRIHFPLISYAPIIGVGKMGHETLTVDELTRTCFEPGCQMVKCDINEGKYMACCLLFRGDILPAEANRSVNKVRNQRTIQFVDWCTTGFKVGINHQPPAAVPKSDMAPVKRAVSLLANTTAIAEAWTRIDKKFDLMYAKRAFVHWFVGEG

SEQ ID NO: 29380 - protein, 558 aa, Lactobacillus plantarum WCFS1
MEKWWKNAVVYQVYPSSYQDSNNDGIGDLPGITKRLDYIKKLGVDIVWLSPIYKSPQVDNGYDISDYRAINPDFGSMEDFDKLLGKAHDLGLKIMMDLVVNHTSDENKWFEESRKSKTNPYRDYYIWRDGNAGKSPNNWGSFFRGPAWKYDEQTGQYYLHLFAPQQPDLNWENPNVRHSVYDMMNWWASKGVDGFRMDVINYISKPEGLPDAQLQADEELGNPEPLVANGHRVHEFLQEMNNKVMSKHRMVTVGEAPSVTTDEAIKYAGLDGKELDMVFQFEHMGLDGNENPVLGHWSDRKASLKDLRSNLTKWQEALEGKAWNSLYWNNHDQPRVVSRFGDDSNEEYRVLSAKMLATMLHLQQGTPFIFEGEEIGMTNSYFKKLSDYVDLDSINTYHQFVDKQHLVGSQTMLKYLAMHSRDNARTPMQWNSTDNGGFSKHEPWEHVNPNYKHINVKQSLDDPNSIFYYYQKLIRLRHELPVITDGKYRLVKGNEDDEAVYAYTRKDENTTLLVILNYTKTTLDRDYQVPDNAELVINNYPDDKGNTLRPYEAKVYKY

SEQ ID NO: 29381 - protein, 405 aa, Zea mays
  misc_feature (11)..(11): Xaa can be any naturally occurring amino acid
  unsure (1)..(405): unsure at all Xaa locations
MSVKEIEPALXEQLIISTVLMIFGIALISWLALPAKFTIYNFGTQKEVSNWGLFFCVSIGLWAGLIIGFVTEYYTSNAYSPVQDVADSCRTGAATNVIFGLALGYKSVIIPIFAIAVSIYVSFSIAAMYGIAVAALAIDAYGPISDNAGGIAEMAGMSHRIRERTDALDAAGNTTAAIGKGFAIGSAALVSLALFGAFVSRAGVKVVDVLSPKVFIGLIVGAMLPYWFSAMTMKSVGSAALKMVEEVRRQFNTIPGLMEGTAKPDYATCVKISTDASIKEMIPPGALVMLTPLIVGTLFGVETLSGVLAGALVSGVQIAISASNTGGAWDNAKKYIEAGASEHARTLGPKGSDCHKAAVIGDTIGDPLKDTSGPSLNILIKLMAVESLVFAPFFATQGGLLFKYL

SEQ ID NO: 29382 - protein, 298 aa, Zea mays
PSGWARTQGALWTVDVNPSTELLATGGADNTMRLWHVPTGKLLHTWEFNTSIKRCEFSPDGRQLLGVTEKRSGHLSTICVYEINPDPEAQQSDEQLLRIVCDESKATVAGFSYLAKYIISGHEDGSITQWDGKTGELLSSNYDAHEPDMQITDIQWAPDRSYFITASKDKTAKLIDVEDLSVLKSYVADTPLNSAAITPVKDYVILGGGQAAMDVTTTSARQGKFEARFYHKIFMEEIGRVRGHFGPLNYVAVHPKGTSYCSGGEDGYVRVHHFDKPYFDFMYEVEREAAREAAQANL

SEQ ID NO: 29383 - protein, 407 aa, Buchnera aphidicola str. Sg (Schizaphis graminum)
MKRVVITGFGIISSIGNNKKEVLNSLYNGISGITFSEEMKESGMRSQVWGNIKLENKKFFKKNKISRFMNNGSIYAFLSMEQAIKDANLQTKQYQKNPRIGIIAGSGGGFPKYHIQGIDAIRSNRGLNSVSPYIAIKAMNSGISACLSTLFKIYGVNYSISSACATSGHCIGNAFELIKFGKQDLIFAGGGEEVSWELAYEFDAMKALSSNFNKNPTKSSRVYDVNRDGFVISGGGGIIVIEELNCALSRSAHIYAEIIGYAATSDGKDMVVPSGDGAVRCMNLAKKQNKMLFIDYLNVHGTSTKIGDLIELEAIKKSFFHEKKPMISATKSMTGHALGVSGVHEIIYTLLMMKYNFIAPSINIETIEPSADNMNIVQKTFHKKIKTALSNSFGFGGTNVSLILKKY

SEQ ID NO: 29384 - protein, 161 aa, Candida glabrata CBS138
MSPFHQLRPVDGQGNIYPFEMLKGKVVLIVNTASNCGFTPQYIELENMYQKYKNEGFEILGFPCNQFGHQEPGSDAEIQKFCSSKYKVTFPIMKKIDVNGPYEDPVFKYIKEQKPGMLGLKGIKWNFEKFLIDRQGNVVLRASSLTKPSTLNETIEKLLKN

SEQ ID NO: 29385 - protein, 390 aa, Syncephalis depressa
ELYCLEHGIQPDGHLNENADPALVASSSSFFSQIHDGRYVPRTIFVDLEPNVIDQVRTGDYRGLYHPDQLISGKEDAANNYARGHYTIGKDILDNVVNRVRKLADDCEGLQGFLMFHSFGGGTGSGFGSLLMERLAAEYGKKTKLEFAVYPAPQISTAVVEPYNAVLTTHTMLEHVDCTFIVDNEAISDICKTRLHLERPTYSSLNRLICQVVSSITASVRFSGTLNVDLQEFQTNLVPYPRIHFPLVSYAPIVSAEKAGHESFTVDELARSCFEPTSHMVKCKASEHKYMACCLLSRGDILSKETTAAVERMRAQRTVQFVDWCPTGFKVGINPQAPTHVPNGDLAPVKRAVTLLANTTAIVDAWSRINHKFDLMYAKRAFVHWYVGEG

SEQ ID NO: 29386 - protein, 316 aa, Buchnera aphidicola str. Sg (Schizaphis graminum)
MNQLNALKQFTTIVADTSDIESICKYKPQDATTNPSLILKAVSSSVNKRFIDQAIEYARKKGGSYNYKIVNASDKILVDLGVEILKHIPGYISSEVDARLSFNKEKCILKAKKIIDMYEEKGISRNRVLIKLAATWECIKAAEELKKNNIACNLTLLFSFAQARACAESNVFLISPFVGRIYDWYLSQNLILKNPADQDPGVLSVCKIYDFYKKYNYKTIIMGASFRNVQQILSLSGCDRLTISPVLLKELESSNKELNRKLCPPTSFLNPPVPLTEAEFRWEHNQDEMAVQKLSEGIRNFGKDQLSLEKIFSKLI

SEQ ID NO: 29387 - protein, 429 aa, Bacillus cereus ATCC 10987
MKKFDKSIAAFEEAQDLMPGGVNSPVRAFKSVGMNPLFMERGKGSKVYDIDGNEYIDYVLSWGPLIHGHANNRVVEALKAVAEKGTSFGAPTEIENKLAKLVIERVPSIEIVRMVNSGTEATMSALRLARGYTGRNKILKFIGCYHGHGDSLLIKAGSGVATLGLPDSPGVPEGVAKNTITVAYNDLESVKYAFEQFGDDIACVIVEPVAGNMGVVPPQPGFLEGLREVTEQNGALLIFDEVMTGFRVAYNCGQGYYGVTPDLTCLGKVIGGGLPVGAYGGKAEIMRQVAPSGPIYQAGTLSGNPLAMAAGYETLVQLTPESYVEFERKAEMLEAGLRKAAEKHGIPHHINRAGSMIGIFFTDEPVINYDAAKSSNLEFFAAYYREMVEQGVFLPPSQFEGLFLSTAHSDADIEATIAAAEIAMSKLKA

SEQ ID NO: 29388 - protein, 665 aa, Buchnera aphidicola str. Sg (Schizaphis graminum)
MCVRRELANAIRMLSIDAVQNAKSGHPGMPMGMADIAEVLWRKFFKHSPTNPNWNNRDRFILSNGHGSMLLYSLLHLTGYDLSIDELKKFRQLHSKTPGHPETGETPGVETTTGPLGQGLANAVGMAIAERTLSAYFNRPDYDIVDHYTWVFVGDGCLMEGISHEVCSLAGTLKLGKLIVFYDKNGISIDGKISNWFTDDTVMRFKSYNWHVVDKVDGHDANSIKNSIEEAKSVKDQPSIIICNTIIGFGSPNKSGTADSHGAPLGEEEIFLTRKNLNWKYSPFEIPNKIYDKWNFVKQGLKLEENWNKQFHLYKSEYPALAEEYSRRIKKKLPTQWYKKTKDYIFNLQKNPQNIATRKASQNAIEEFAALLPELIGGSADLSPSNLTMWSKSSSITENLCGNYIHYGVREFGMTAIANGISHHGGFIPYTSTFLMFVEYARNAVRMAALMNTKHIFVYTHDSIGLGEDGPTHQPIEQLANLRMTPNIDVWRPSDQVETAVAWKYAIEEKNGPTALILSRQNLFQFSRNNEQIKNISYGAYILYDSKKPIDIIFISTGSELQITLTSAKKIAALGYSVRVVSMPSNNVFDRQNIDYKESILPSYITKRIVIEASIKDFWYKYAGSEGLIIGMETFGESASEEVLFKKFGFTVENIVNKSKILLKH

SEQ ID NO: 29389 - protein, 250 aa, Bacillus cereus ATCC 10987
MNALAGKTVLVTRAQHQAKQMSVAVKEKSGIPLEIPLLRMEGMSHRQIQHIAGQLHSYDWVIFTSKNGVAFFLDRLRQKLPVTTKIAAVGVKTKLELEKRGYEVDFVPTSFVAEVFAEEFVKRLSGNECILFPKGNLARDVIPVALREMGVSLDELIVYGTKENVEKKQELIEALEVGKVDIITFTSPSTVTSFVRLLEGTNWREWTKKCTIACIGPITEKEASLYFPHIIMPKEYTVEALLQCVCESIK

SEQ ID NO: 29390 - protein, 308 aa, Sinorhizobium meliloti
MIVCCGEALIDMLPRETTAGESAFAPYAGGAIFNTAVALGRLGVPTGFFTGLSDDMFGDILRATLKAANVDFAPCATLPLHTTLAFVKLVDGHASYAFFDENTAGRMITAEHLPALGDFCEALHFGAISLIPEPCGSTYEALMAREHEKRVISFDPNIRPGFIKDREAHVGRMNRMAAMSDIVKFSDEDLAWFGMEGSHDALAAEWLKRGPKLVLITRGADGAVGYTNGHKVEVASERVEVVDTVGAGDTFDAGVLASLKFNNLLTKERVASLTDEAIRQALTLAAKAAAVTVSRAGANPPWRHELGL

SEQ ID NO: 29391 - protein, 254 aa, Ipomoea batatas
MRVRFFFYFAYFLITLVFFPSVTLQSYSGGHRQEATGFCGEEGEREDNLIRMATTTLGGISDSASAENSVEIESLARFAVEEHNKKENAMIELVRVVKAEEQVVAGKLHHLTLEVIDAGKRKLYEAKVWLKPWMNFKELQGFNHIEDIPTLTSSDLGARRDCPNTGLKSVPVNDPVVQEAAQHAVKTIQQRSNSLLPYELQEIVHANAEVIDDSAKVHMLIKTKRGEKEEKFSVEVHKNNEGAFLLHHMAPANS

SEQ ID NO: 29392 - protein, 1089 aa, Cryptococcus neoformans var. neoformans B-3501A
MASNDPKAKVILQSIATEKRNIEGARAVIRAFEASSKNETVIQQAQNEIRTATMSIKFLEDELAKLQVGGSGGASGTPGRGEPSGGTGAGVPGKQGPQGVVASSPGGRGMAGDRERPLPPPPPGAEQDSAKKPETKNYSQLDLLRYDAPLTGAKITRMLNQLQFKLQVEEQYKTGIEKMAQAYRAEGDKRLKSETDAKKSESEGKIQLLRKAKKRYESLAKFGGAVEDDEDLMSDGKRKEALRKPISGKLVISLRSARDLNHRALPRRSSKTYSETTVVIKVEGNERAVSHPSRNDKWHEDFHIPVEKANEVEITIYDTVAPGDSAPIGMLWLRVSDLVEALRRQKVGIEGQGAGWVTAATAATMGPRSSGNAPDSVTLHSAGTLRGKPDAEGKGPDGIDGWWSVEPAGAISLRMDFVKDTVAGARRPYEALGRQGAVRMRKGDVYEMNGHKFVQRQFYQPIMCALCQEFLLTGEGYQCEDCRYACHKKCYPKVVTKCISKSNADGEGDEEKINHRIPHRFTPYTNMSANWCCHCGYMLPFGRKNAVKCSDITECALTCHQTCSHLVPDFCGMTMEMANLLLKNLRDIKTTQHRKPVPSTSTSSSVSTLPSYHSQESRSHPVQSAALQQPAPSSRPPAGALPSTDQRPIQPQVQNQQTGAYDNLRPAGGRAMPQLPPVAVPSNKISFEGDRLQEPHGQIPPVMPAAQPQPQTLPPSAQSVQSPVKPQYVPQPAVQQQVAQRLPPQQPLMARKRKVGLDDFNFLAVLGKGNFGKVMLAEEKTSSNLYAIKVLKKEFIIENDEVESTQSEKRVFLAAAQERHPFLLGLHSCFQTETRVYFVMEYISGGDLMLHIQKKQFTLRQAKFYACEVLLALQYFHSKGIIYRDLKLDNILLTLDGHVKVADYGLCKEEMWFGKTTSTFCGTPEFMAPEILLEQRYGRAVDWWAFGVLTYEMLLGQSPFRGEDEDEIFDAILEDEPLYPITMPRDAVSLLQRLLTRDPTRRLGAGEGDAEEIKQHLFFRDVNFDDVYHKRIPPPYFPVIGNATDTSNFDQEFTREQPTLTPVHTQLSEADQKEFAGFSWIAPWAAAQT

SEQ ID NO: 29393 - protein, 175 aa, Triticum aestivum
MAPTVMVSSATSVAPFQGLKSTAGLPVSRRSNGASLGSVSNGGRIRCMQVWPIEGIKKFETLSYLPPVSTEALLKQVDYLIRSKWVPCLEFSKVGFIFREHNASPGYYDGRYWTMWKLPMFGCTDATQVINEVEEVKKEYPDAYVRIIGFDNMRQVQCVSFIAFKPPGCEESGKA

SEQ ID NO: 29394 - protein, 651 aa, Cryptococcus neoformans var. neoformans B-3501A
MTTHETGEFVEDQDGKAEDDGLHTHNEEHEHGHEEGDQEHLEQSHKTLRSEKGKEDNREQGKDEEAEIEGKKSGKKKFELQDQTNLLPTKQVIFVFVGLTCALFCSLLDQTIVTTALPTLGQVFGRADISPWVGTAYLLTSTATQPVYGRLSDIFGRKFTLLGCLFIFLMGSLACALAQTMIQLIIFRAIQGLGGGGILTLAMIIISDVVSLKERGKYQGITGCVVALANSCGPIVGGAFTENASWRWCFYINLPLTSISMIIIVFLLPLRRVRGSMVAKIKKLDFYGSILTLAWAAPFLIALSWAGSQYAWDSAAVLVPLLVGLALLGLFIFVEAKVVSLPLVPMHIFKNASVSACFFTTFMNGLSFYATLYYLPQYFQIVRGASAIRSGVLTLPLMLVQTVTSFTSGIIQSKTGDYWWNLVVGYTIWTIGLGLISSITSTTSIAKLSGYQIIVGIGAGQTFQTSLVAIQAGVERKDMATATGLRNFLRQLGGTIALAACNSIVNNCVRRNLSGVLPGTAYKAILEDPTRATSLGLSASELSAVTDAYGNADREGGDLNVARGINEVFWFCAPCVGICIPITIFLIKKVTLNRSDDAVKKAEAKAWVESKKAKRAKKRKGSEETVVDSGASTMVSGEEKKRDGRRIGKEQ

SEQ ID NO: 29395 - protein, 466 aa, Arabidopsis thaliana
MREEREDMLSWPLIGEKEKRSRFVKEEVEKQLLLSGPLIAVSLLQFCLQIISVMFVGHLGSLPLSAASIATSFASVTGFTFLMGTASAMDTVCGQSYGAKMYGMLGIQMQRAMLVLTLLSVPLSIVWANTEHFLVFFGQDKSIAHLSGSYARFMIPSIFAYGLLQCLNRFLQAQNNVIPVVICSGVTTSLHVIICWVLVLKSGLGFRGAAVANAISYWLNVILLSCYVKFSPSCSLTWTGFSKEARRDIIPFMKLVIPSAFMVCSLEMWSFELLVLSSGLLPNPVLETSCPRTVWMIPFGLSGAASTRVSNELGSGNPKGAKLAVRVVLSFSIVESILVGTVLILIRKIWGFAYSSDPEVVSHVASMLPILALGHSLDSFQTVLSGVARGCGWQKIGAFVNLGSYYLVGVPFGLLLGFHFHVGGRGLWLGIICALIVQGVCLSLITFFTNWDEEVKPSPCLVYFYF

SEQ ID NO: 29396 - protein, 482 aa, Shewanella sp. MR-4
MLLKDPSLLRQQCYINGQWCDAQSKETVAIANPATGVVIASVPVMGQAETQAAIAAAEVALPAWRALTAKERGAKLRRWFELLNENSDDLALMMTSEQGKPLAEAKGEVTYAASFIEWFAEEAKRVYGDTIPGHQGDKRIMVIKQPVGVTAAITPWNFPAAMITRKAAPALAAGCTMVVKPAPQTPFTALALAVLAERAGIPAGVFSVITGDAIGIGNEMCSNPTVRKLSFTGSTQVGIKLMEQCAPTLKKLSLELGGNAPFIVFDDANIDAAVEGAMIAKYRNAGQTCVCANRIYVQAGVYDEFARKLSIAVGKLKVGEGITEGVTTGPLINRAAVEKVQSHLEDALSKGASVVAGGKPHSLGGNFFEPTVLTHVDSSMRVAREETFGPLAPLFKFTDVDDVIKQANDTEFGLAAYFYGRDISLVWKVAEALEYGMVGVNTGLISTEVAPFGGMKSSGLGREGSKFGIEEYLEIKYICMSV

SEQ ID NO: 29397 - protein, 675 aa, Oryza sativa
MELCTSSVSGSVQWSRISAFDYRTRSHGYASSSSWVSQRRRKTSFYVMNAASTGALPPTKKLIPRTNVRNISGDKPSSALEQLDIERGVCIPFRKYTPEMVRNRVLGSRGSVLSLASRGVEIIWKLGLYWSALMYDFLVGRDEEIVPFRARQLRNLLCDLGPSFIKAGQVLANRPDIIREDYMNELCILQDDVPPFPNQVAFSIIEEELGQPLERLFSRISSRTIAAASLGQVYRATLRETGEDVAIKVQRPGIEPIIYRDLFLFRTLASFLNGISLQKLGCNAELIVDEFGEKLLEELDYTLEATNIEDFLENFKDDPTVKIPQVYKQYSGSRVLVMEWIDGIRCTDPQAIKEAGIDVEGFLTVGVSAALRQLLEFGLFHGDPHPGNIFAMRDGRIAYVDFGNVAVLSQQNKQILIDAVVHAVNEDYAEMANDFTRLGFLASGTDVSPIVPALEAIWQNSAGKGLADFNFRSVTGKFNQLVYNYPIRIPERFSLVIRSLLTQEGICFTLQPDFKFLEVAYPYVAKRLLTDPNPALRERLIQVLFKDGLFQWKRLENLIVLAKENVSKMSSNPALKKNSSQIERNRQMEKKLDLTDTIKDGARLFLIDAGIRRQLIMAFTEDSKLHVEELVDVYRLVEDQIDIPSVALEVIQDLPSVARDFMLSWSDSILSDRQY

SEQ ID NO: 29398 - protein, 251 aa, Oryza sativa
MGRSPCCEKAHTNKGAWTKEEDDRLIAYIKAHGEGCWRSLPKAAGLLRCGKSCRLRWINYLRPDLKRGNFTEEEDELIIKLHSLLGNKWSLIAGRLPGRTDNEIKNYWNTHIRRKLLSRGIDPVTHRPINDSASNITISFEAAAAAARDDKAAVFRREDHPHQPKAVTVAQEQQAAADWGHGKPLKCPDLNLDLCISLPSQEEPMMMKPVKRETGVCFSCSLGLPKSTDCKCSSFLGLRTAMLDFRSLEMK

SEQ ID NO: 29399 - protein, 501 aa, Oryza sativa (japonica cultivar-group)
MPRRPSGGGGGAGPAAAAVRKVPLRKLLRAASVACGVQFGWAPQLSLLTPYVQELGIPHAFASLVWLCGPLSGLLVQPLVGHLSDRIAPAASPLGRRRPFIAAGAASIAAAVLTVRFSADLGRIFGDSITPGSTRLGAITAYLVGFWLLDVGNNATQGPCRAFPADLTENDPKRTRIANAYFSLFMALGNILGYATGAYSGWYKIFPFTVTPSCSISCANLKSAFLLDIIILVVTTCITVASVQEPQSFGSDEADHPSTEQEAFLWELFGSFRYFTLPVWMVLIVTALTWIGWFPFILFDTDWMGREIYRGSPDDPSITQSYHDGVRMGSFGLMLNSVLLGFTSIVLEKLCRKWGAGLVWGVSNILMALCFVAMLVITYVAKNMDYPPSGVPPTGIVIASLVVFTILGAPLAITYSIPYAMAASRVENLGLGQGLAMGILNLAIVIPQVIVSLGSGPWDQLFGGGNAPAFAVAAAASFIGGLVAILGLPRARIASRRRGHR

SEQ ID NO: 29400 - protein, 595 aa, Oryza sativa (japonica cultivar-group)
MDSAAGGGGLTAIRLPYRHLRDAEMELVSLNGGTPRGGSPKDPDATHQQGPPAARTTTTRKLVLACMVAAGVQFGWALQLSLLTPYIQTLGIDHAMASFIWLCGPITGFVVQPCVGVWSDKCRSKYGRRRPFILAGCLMICFAVTLIGFSADLGYILGDTTEHCSTYKGSRFRAAIIFVLGFWMLDLANHTVQGPARALLADLSGPDQCNSANAIFCTWMAVGNVLGFSSGASGNWHKWFPFLMTRACCEACSNLKAAFLVAVVFLLFCMSVTLYFAEEIPLEPTDAQRLSDSAPLLNGSRDDNNASNEPRNGALPNGHTDGSNVPANSNAEDSNSNRENVEVFNDGPGAVLVNILTSMRHLPPGMYSVLLVMALTWLSWFPFFLFDTDWMGREVYHGDPNGNLSERKAYDNGVREGAFGLLLNSVVLGFGSFLVDPLCRLMGARLVWAISNFTVFICMLATAILSWISFDLYSSKLHHIIGANKTVKNSALIVFSLLGLPLSITYGVPFSVTAELTAGTGSGQGLATGVLNLAIVVPQIVVSLGAGPWDALFGGGNVPAFALASVFSLGAGVLAVLKLPKLPNSYRSAGFHGFG

SEQ ID NO: 29401 - protein, 632 aa, Arabidopsis thaliana
MWRCLRVASSSRRSESNGAFITSQLSRFFSAPPSAGDKSSYTIVDHTYDAVVVGAGGAGLRAAIGLSEHGFNTACITKLFPTRSHTVAAQGGINAALGNMSVDDWRWHMYDTVKGSDWLGDQDAIQYMCREAPKAVIELENYGLPFSRTEDGKIYQRAFGGQSLEFGIGGQAYRCACAADRTGHALLHTLYGQAMKHNTQFFVEYFALDLIMNSDGTCQGVIALNMEDGTLHRFHAGSTILATGGYGRAYFSATSAHTCTGDGNAMVARAGLPLQDLEFVQFHPTGIYGAGCLITEGARGEGGILRNSEGEKFMDRYAPTARDLASRDVVSRSMTMEIRQGRGAGPMKDYLYLYLNHLPPEVLKERLPGISETAAIFAGVDVTREPIPVLPTVHYNMGGIPTNYHGEVITLRGDDPDAVVPGLMAAGEAACASVHGANRLGANSLLDIVVFGRACANRVAEIQKPGEKLKPLEKDAGEKSIEWLDRIRNSNGSLPTSKIRLNMQRVMQNNAAVFRTQETLEEGCDLIDKTWDSFGDVKVTDRSMIWNSDLIETMELENLLVNACITMHSAEARKESRGAHAREDFTKRDDANWMKHTLGYWEEGNVKLEYRPVHMKTLDDEVDTFPPKPRVY

SEQ ID NO: 29402 - protein, 387 aa, Entomophaga destruens
IGTKFWEVISEEHGILSDGIYGGSDDQQLERINVYYNEAADGRYVPRSILVDLEPGTMDAIRSGPIGKMFRPDNFIYGQSGAGNNWAKGYYTEGAELVDSILEVVRKEAEGCDSLQGFQVAHSLGGGTGSGLGSLLISKIREEFPDRMMCTFSVVPSPKGSDTVVEPYNATLTVHHLVENADETFCIDNEALYDICFRTLKLSSPNYGDLNHLVSQVMSGITTSLRFPGQLNADLRKLAVNLIPFPRLHFFMIGFAPLTAQGSKQYNAITVPELTAQMFDARNMMAASDPRHGRYLTCAAFFRGRLSMKEVEQQMADVRTKNSDYFVEWIPHNVKTAVCNIPPAGLKMSSTFVGNNTAIQELFKRVNEQFTSMFRRKAFTHWYTTEG

SEQ ID NO: 29403 - protein, 535 aa, Oryza sativa (japonica cultivar-group)
MEEGRRGDREGKSAAGWTALSTTKTMLEEKRRLQANGSVGGDAGTSGFRRIVRLFFACMVAGGIQYGWALQLSLLSPYSQTLGISHSYVSLTWICGPIAGFVVQPIVGYYSDRCTMKMGRRRPFILVGCLIICISVMIIGFSADIGRHLGDTKEHCSTYTGPRWSAAMVYIVGFWFLDFANNTVQGPARAMMADLSAGHHGPNVGQSIFSLWMAIGSVLGYLSGADGKWHEWFPWLKTAACCDACANLKGAFFTAVLLIVVSMTVTMYLADEMPLDKQDVDTSGGGGCAVFVDLFKSLRNLPPAMFKVLAVTAVTWLSWFPFIQYNTDWMGREIYHGEPQGTAAKADVYDAGVREGAMGLLFCSVALGVTSFVIPKLCRRLTSKVVWSISNFLVFALMAVMVAVGMVSMRGYRPSLAAGLTGPDPTLKAVALVVFALIGIPQAVLFSVPWAVASEVTAEEGGGQGLAIGVLNIAIVVPQLVIALTAGPIDGAFNKGNTPAFGIGGAFAFICGVLALIWLPKTRGVSNAAVVAGGH

SEQ ID NO: 29404 - protein, 661 aa, Arabidopsis thaliana
GSVRRSLVFRPSSDDDNQENQPPFPGVLADKITSCIRKSKIFIKPSFSPPPPANTVDMAPPISWRKGQLIGRGAFGTVYMGMNLDSGELLAVKQVLIAANFASKEKTQAHIQELEEEVKLLKNLSHPNIVRYLGTVREDDTLNILLEFVPGGSISSLLEKFGPFPESVVRTYTRQLLLGLEYLHNHAIMHRDIKGANILVDNKGCIKLADFGASKQVAELATMTGAKSMKGTPYWMAPEVILQTGHSFSADIWSVGCTVIEMVTGKAPWSQQYKEVAAIFFIGTTKSHPPIPDTLSSDAKDFLLKCLQEVPNLRPTASELLKHPFVMGKHKESASTDLGSVLNNLSTPLPLQINNTKSTPDSTCDDVGDMCNFGSLNYSLVDPVKSIQNKNLWQQNDNGGDEDDMCLIDDENFLTFDGEMSSTLEKDCHLKKSCDDISDMSIALKSKFDESPGNGEKESTMSMECDQPSYSEDDDELTESKIKAFLDEKAADLKKLQTPLYEEFYNSLITFSPSCMESNLSNSKREDTARGFLKLPPKSRSPSRGPLGGSPSRATDATSCSKSPGSGGSRELNINNGGDEASQDGVSARVTDWRGLVVDTKQELSQCVALSEIEKKWKEELDQELERKRQEIMRQAGLGSSPRDRGMSRQREKSRFASPGK

SEQ ID NO: 29405 - protein, 387 aa, Conidiobolus lamprauges
IGTKFWEVISEEHGILNDGIYGGKDDQQLERINVYYNEAADGRFVPRSVLVDLEPGTMDAIRSGPIGKMFRPDNFIYGQSGAGNNWAKGYYTEGAELVDSILEVVRKEAEGCDSLQGFQVAHSLGGGTGSGLGSLLISKIREEFPDRMMCTFSAVPSPKVSDTVVEPYNATLTGHHLVENADETFCIDNEALYDICFRTLKLSNPDYGDLNHLVSQVMSGITTSLRFPGQLNSDLRKLAVNMIPFPRLHFFMIGFAPLTAQGSKQYNAITVPELTAQMFDARNMMAASDPRHGRYLTCAAFFRGRLSMKEVEQQMADVRTKNSNYFVEWIPHNVKTAVCNIPPTGLKMSSTFVGNNTAIQELFKRVNDQFTSMFRRKAFIHWYTNEG

SEQ ID NO: 29406 - protein, 615 aa, Helicobacter pylori 26695
MQEVHDYGIKFWSNNEFKIEKGLVKVCHGKNPSLLEIVQSVRDKGYRGPLLVRFPHLVQKQIKSLFDAFSSAIKEYQYSGAFKAVFPLKVNQMPSFVFPLVQGAKGLNYGLEAGSKSELIIAMSYTNPKAPITVNGFKDKEMIELGFIAKSMQHEITLTIEGLNELKTIIAVAKQNEFLACPKIGIRIRLHSTGTGVWAKSGGINSKFGLSSTEVLEAMRLLEENDLLEHFHMIHFHIGSQISDISPLKKALREAGNLYAELRKMGAKNLNSVNIGGGLAVEYTQHKHHQDKNYTLEEFSADVVFLLREIVKNKQEIEPDIFIESGRYISANHAVLVAPVLELFSHEYNEKSLKIKENNNPPLIDEMLDLLANINEKNAIEYLHDSFDHTESLFTLFDLGYIDLIDRSNTEVLAHLIVKKAVQLLYVKDHNDILRIQEQVQERYLLNCSFFQSLPDYWGLRQNFPVMPLNKLDEKPTRSASLWDITCDSDGEIAFDSTKPLFLHDIDIDEEEYFLAFFLVGAYQEVLGMKHNLFTHPTEFSVVFDEKGDYEVEDICEAQTILDVLDDLDYDTKEIERLLKQKIEDNNQLDMEEKKEIMGRLYVMLSENGYLRTIS

SEQ ID NO: 29407 - protein, 376 aa, Arabidopsis thaliana
MQDFFGSVRRSLVFRPSSDDDNQENQPPFPGVLADKITSCIRKSKIFIKPSFSPPPPANTVDMAPPISWRKGQLIGRGAFGTVYMGMNLDSGELLAVKQVLIAANFASKEKTQAHIQELEEEVKLLKNLSHPNIVRYLGTVREDDTLNILLEFVPGGSISSLLEKFGPFPESVVRTYTRQLLLGLEYLHNHAIMHRDIKGANILVDNKGCIKLADFGASKQVAELATMTGAKSMKGTPYWMAPEVILQTGHSFSADIWSVGCTVIEMVTGKAPWSQQYKEVAAIFFIGTTKSHPPIPDTLSSDAKDFLLKCLQEVPNLRPTASELLKHPFVMGKHKESASTDLGSVLNNLSTPLPLQINNTKSTPDSTCDDMMRIS

SEQ ID NO: 29408 - protein, 387 aa, Karlingiomyces sp. JEL93
IGSKFWEVISEEHGIDPTGRYVGDNDLQLERIDVYYNESTGGRYVPRSVLVDLEPGTMDSVRAGPYGRLFRPDNYIFGQAGAGNNWAKGYYTEGAELVENVLDVVRREAESSDALQGFQLVHSLGGGTGSGMGSLLVSKIREEYPDRMMCTFSVVPSPKVSDTVVEPYNATLSIHQLVENSDETMCIDNEALYDICFRTLKLSTPTYGDLNHLVSSVMSGITTCLRFPGQLNADLRKLAVNMIPFPRLHFFMVGFAPLTARSSQQYRVLTVADLTGQIFDSRNMMAASDPRHGRYLTVAAIFRGKLSMKDVEQHMLNVQTKNSSYFVEWIPNNVKTAVCDIPPRGLRMSATFIGNSTSIQELFKRIQGQFVSMFRRKAFLHWYTGEG

SEQ ID NO: 29409 - protein, 518 aa, Arabidopsis thaliana
MNNTIHVTNKKLPNFLLSVRLKYVKLGYHYLISNAVYILILPVGLLAATSSSFSLTDLTLLYNHLLKFHFLSSTLFAALLIFLTTLYFTTRPRRIFLLDFACYKPDSSLICTRETFMDRSQRVGIFTEDNLAFQQKILERSGLGQKTYFPEALLRVPPNPCMSEARKEAETVMFGAIDAVLEKTGVNPKDIGILVVNCSLFNPTPSLSAMIVNKYKLRGNVLSYNLGGMGCSAGLISIDLAKQLLQVQPNSYALVVSTENITLNWYLGNDRSMLLSNCIFRMGGAAVLLSNRSSDRCRSKYQLIHTVRTHKGSDDNAFNCVYQREDNDDNKQIGVSLSKNLMAIAGEALKTNITTLGPLVLPMSEQLLFFATLVARKVFNVKKIKPYIPDFKLAFEHFCIHAGGRAVLDEIEKNLDLSEWHMEPSRMTLNRFGNTSSSSLWYELAYSEAKGRIKRGDRTWQIAFGSGFKCNSAVWRALRTIDPSKEKKKKTNPWIDEIHEFPVPVPRTSPVTSSSESR

SEQ ID NO: 29410 - protein, 387 aa, Powellomyces variabilis
IGAKFWEVISDEHGIDPTGTYHGDSDLQLERVNVYYNEATGGKYVPRAVLIDLEPGTMDSVRAGPFGQLFRPDNFIFGQSGAGNNWAKGHYTEGAELVDSVLDVVRKEAESCDCLQGFQITHSLGGGTGAGMGTLLISKIREEYPDRMMCTFSVVPSPKVSDTVVEPYNATLSVHQLVENSDETFCIDNEALYDICFRTLKLTTPTYGDLNHLVSAVMSGITTCLRFPGQLNADLRKLAVNMVPFPRLHFFMVGFAPLTSRGSQQYRALTVPELTQQMFDAKNMMAASDPRHGRYLTVAAMFRGRMSMKEVDEQMLNVQNKNSSYFVEWIPNNVKTAVCDIPPKGLKMSVTFIGNSTAIQELFKRISDQFTAMFRRKAFLHWYTGEG

SEQ ID NO: 29411 - protein, 524 aa, Glycine max
LELSSLFLQKNQLTGSLSALVGLPLDTLNVANNNFSGWIPHELSSIHNFIYDGNSFENRPAPLPPTVTSPPPSGSHRRHHSGSGSHNKTQASDNEKSNGHKGLTVGAVIGIVLGSVLVAAIVFLALVFCIRKQKGKKKGARNFSGSLPRGVINVTPQMQEQRVKSAAVVTDLKPRPAENVTVERVAVKSGSVKQMKSPITSTSYTVASLQSATNSFSQEFIIGEGSLGRVYRADFPNGKVMAIKKIDNSALSLQEEDNFLEAVSNMSRLRHPNIVTLAGYCAEHGQRLLVYEYIANGNLHDMLHFAEDSSKDLSWNARVRIALGTARALEYLHEVCLPSVVHRNFKSANILLDEELNPHLSDCGLAALTPNTERQVSTQMVGSFGYSAPEFALSGVYTVKSDVYSFGVVMLELLTGRKPLDSSRVRSEQSLVRWATPQLHDIDALAKMVDPTLNGMYPAKSLSRFADIIALCVQPEPEFRPPMSEVVQALVRLVQRASVVKRRPSEESGFGHKTPDHDAMDMSF

SEQ ID NO: 29412 - protein, 387 aa, Powellomyces variabilis
IGAKFWEVVSDEHGIDPTGHYQGDSDLQLERISVYYNEASGGKYVPRAVLVDLEPGTMDSARAGPYGQLYRPDNFVFGQSGAGNNWAKGYYTEGAELVESVLDVVRKEAENSDSLQGFQVFHSLGGGTGSGMGSLLVSKIREEFPDRMLATFSVMPSPKVSDTVVEPYNATLAIHQLVENSDLSFMIDNEALYDICLRTLKITSPAYSDLNHLVSTVISGITTCLRFPGQLNADLRKLAVNMVPFPRLHFFTVGFAPLTARGSQAYSSLTVPELTAQLFDAKNMMAACDPRHGRYLTVSTIFRGKVSTKEVEQQMYNMQTKNSSYFVEWIPSNIKTAICDIPPRGLKMSATFIGNTTSIQEPFKRVQVQFSAMFRRKAFLHWYTGEG

SEQ ID NO: 29413 - protein, 230 aa, Leptosphaeria maculans
MGFTDFVSDAGLTLLNNWVKTRSYIVGYTPSQADVKVFQQIKQIPAPEKFPYAWRWYNHILTFEGEFESLPGDPTKEHTAYGPDSSELTLNPAKAPEKEAEDEDDIDLFGSDDEEEDAEAEKVKAERLAEYNKKKAGKVKPAAKSIVTLDVKPWDDETNMDELKANVLAIEKDGLVWGASTLVAVGFGIKKLQINLVIEDEKVSLDDLQQLIEEDEDHVQSTDVVAMQKL

SEQ ID NO: 29414 - protein, 541 aa, Lactobacillus plantarum WCFS1
MQAHWWQRATVYQIYPRSFQDSNGDGIGDIPGIISRLDYLATLGVDALWLSPVYKSPNTDNGYDIADYQAIDPAYGTMADMDQLIAQAAQRGIKIVMDLVVNHTSDEHLWFVDACQNPDSPTRDYYVWADAVDGHAPNDLTSGFSGGSAWELDELTGQYFLHLFSKKQIDLNWQNPDLRRAIYRMMNFWIDKGIEGFRMDVIDMIAKEPRAKILVNGPHLHEYLHEMNRQTWRNRDFLTVGEAWSASPEDARQYSDEQREELSMVFQFGHLWADRQVGGEKWEQRPLDVAQLKQALYACQTTMATHGWNSLFWSNHDLPRAVSRFGATGQYRELSAKMLAIALHGLKGTPFVYQGEEIGMTDCPVATIDQVNDVEARTIYRQLRAQGDDAGTAMQKINIFNRDNARTPMQWTAKQHAGFTTGKPWLAINANYPRINVAAAQADYQSIWWTYQRLIRLRKQSAVLQQGEFTELSAVPAPIVAYTRTWQQTQWLICANFADTLITVDLPKRASELIISNYQDYPEQLGRVVLRPYEAFILALS

SEQ ID NO: 29415 - protein, 150 aa, Brassica napus
  misc_feature (148)..(148): Xaa can be any naturally occurring amino acid
  unsure (1)..(150): unsure at all Xaa locations
MNALAATNRNFKLASRLLGLDSKLEQSLLIPFREIKVECTIPKDDGTLASFVGFRVQHDNARGPMKGGIRYHPEVEPDEVNALAQLMTWKTAVAKIPYGGAKGGIGCDTSELSISELERLTRVFTQKIHDLIGIHTDVPAPDMGTGSXTM

SEQ ID NO: 29416 - protein, 561 aa, Pseudomonas stutzeri
MTHLKITGITCDSCAGHVKEALEKVPGVQSALVSYPKGTAQLAIVPGTSPDALTAAVAGLGYKATLADAPLADNRVGLLDKVRGWMAAAEKHSGNEPPVQVAVIGSGGAAMAAALKAVEQGAQVTLIERGTIGGTCVNLGCVPSKIMIRAAHIAHLRRESPFDGGIAATVPTIDRSKLLAQQQARVDELRHAKYEGILGGNPAITVVHGEARFKDDQSLTVRLNEGGERVVMFDRCLVATGASPAVPPIPGLKESPYWTSTEALASDTIPEPLAVIGSSVVALELAQAFARLGSKVTVLARNTLFFREDPAIGEAVTAAFRAEGIEVLEHTQASQVAHMDGEFVLTTTHGELRADKLLVATGRTPNTRSLALDAAGVTVNAQGAIVIDQGMRTSNPNIYAAGDCTDQPQFVYVAAAAGTRAAINMTGGDAALNLTAMPAVVFTDPQVATVGYSEAEAHHDGIETDSRTLTLDNVPRALANFDTRGFIKLVIEEGSGRLIGVQAVAPEAGELIQTAVLAIRNRMTVQELADQLFPYLTMVEGLKLAAQTFNKDVKQLSCCAG

SEQ ID NO: 29417 - protein, 228 aa, Sorghum bicolor
KVQLKRIENKINRQVTFSKRRNGLLKKAHEISVLCDAEVAVIVFSPKGKLYEYATDSRMDKILERYERYSYAEKALISAESESEGNWCHEYRKLKAKIETIQKCHKHLMGEDLESLNPKELQQLEQQLESSLKHIRSRKSHLMAESISELQKKERSLQEENKALQKELAERQKAAASRQQQQGAVGPADTDPGPDKLIIVLLHDEAGSAGSAASTKHMLPAADNRRER

SEQ ID NO: 29418 - protein, 431 aa, Anabaena variabilis ATCC 29413
MRATVPNQNYFSDRTPIKGIILAVDDNPNNLQVLSSFLDNSSFEVWAARSGEKALQRLENDLLPDLILLDVMMPGMDGFETCQRLKSDQRFCDIPVVFMTALSETEDKVKGFQLGAVDYITKPFQHEEVLVRIEHQLKLRHLTASLIAKNAELQKTQTQLIQTEKIASLGQMAAGIAHEVNNPINFIAGNLTFVQKYVQEVVDLLYLYQQHFPNLPAEIENAINRTDLTYLLDDLSNVIKSMRVGTDRVQEIVSSLNKFSRHRETGKKLANLHEAIENTLLILGHRLKANSERPAIEIVKKYGNLPLIECYPGEISQVFMNLIANAIDAIEETQKNQNYCEIAENPGVIHITTELIGEQVICKIADNGAGISEEIQSQIFNAFYTTKPIGKGTGLGLSIAYQIVTVNHHGKISCHSQPGAGLEFIIELPIN

SEQ ID NO: 29419 - protein, 242 aa, Triticum aestivum
  misc_feature (53)..(53): Xaa can be any naturally occurring amino acid
  misc_feature (193)..(193): Xaa can be any naturally occurring amino acid
  misc_feature (233)..(233): Xaa can be any naturally occurring amino acid
  unsure (1)..(242): unsure at all Xaa locations
MTPCPEGASAISKAESAPGEKGPVYEQFIPTIKNLSSLPTADDLNAIVDSFFXPALGVVATRTILSSFIAALREIENQDLWIEVGNRTLDTIAAQSSSSSFVDVVVTLRELIATAHEKNEDFLDAAKTLADIPLDSSQRKITDEEKARTWARIVRNYLEADDSTAAEMYINKLKNIMHSVADQELNLHFKLSXARILDAQRDFLSASQRYHEISFFPAIDEDDRAHTLSMAIXGAVLAPAGP

SEQ ID NO: 29420 - protein, 1185 aa, Leptosphaeria maculans
MASVDETVANVQRKIDRERALINAANAMRQSTNNPAVLSRLDGQIKDGHRNIEYFESKLRDLDVQRTSTGMENMSLQPGSGGSGARKPVNNPLTPPPKDGWSSYTQPDQGGYGGPQSQYSNLSGGDGLMPPRAPYAPPGPGTTNKRPNYSKLGKSHLIKYDTPHLGPRIQLMLSQLEFKLSVEKQYKDGIEKMVRLYQMEGDRKSKTDAEAKRIESAQKIQLLKHSLKRYEDLHVDIEGEGGDDDSLNIPSQRKPLSGHLSLRIHAVADVDHAATGRFSRGPETFVNIKVEDAIKGRTKPTRNDRWIDEQHEFAIDKANEIEITVYDKTGDHLLPIGMLWVRISDIAEEMRRKKIETELQNSGWVAADKMSGAAAGIQPDLQFQPPPGQNPAGTPGAPAPGGARPQGGPQPQTGPIMIDDWFSLEPVGRIHLTMSFAKNTGNKQPFDLGLGRKGAVRQRKEDVVEQYGHKFVQQQFYNVMRCALCGEFLKYAAGMQCSDCNYTCHKKCYPKVVTKCITQSNAETDPDEAKLNHRIPHRFENFSNMGANWCCHCGYVLPLGRKQTKKCAECNLTCHAHCVHFVPDFCGMSMEVANQILMEIKRTRRGQSASGPGVPPMAQRTLRPQSAKPLPPAQSQYPAQPGQEPSQTDRYSYGKEQMSPPPGPPRQPSYATSAASVDAARVSYSTSNSTPTPTSPTSSTTSRPSSGARTQSSVAAAQAAMSKTTPPAPGYGRSNTDYQPQGNRTSGGNYPADQRTPQQPQAPQQAPYDPSAYANIPSYPPAQAQQGGMQSYPPGKGSYALPQPSPQMQQPHQSPMSQKQPEAIAQIPPSKQLPPANPENKVTPSANTQGSGKRIGLDHFNFLAVLGKGNFGKVMLAETKSTKQLYAIKVLKKEFIIENDEVESTRSEKRVFLIANKERHPFLLSLHACFQTETRVYFVMEYISGGDLMLHIQRGQFGTKRAQFYAAEVCLALKYFHENGVIYRDLKLDNILLTLDGHIKIADYGLCKEEMWYGSTTSTFCGTPEFMAPEILLDKKYGRAVDWWAFGVLIYQMLLQQSPFRGEDEDEIYDAILADEPLYPIHMPRDSVSILQKLLTREPEMRLGSGPTDAQEIMSHAFFRNINWDDIYHKRVAPPFVPQISSPTDTSNFDTEFTSVTPVLTPVQSVLSQAMQEEFRGFSYSADFN

SEQ ID NO: 29421 - protein, 619 aa, Shewanella sp. MR-4
MISMDHTPQSQLKLLLAKGKEQGYLTYAEVNDHLPADMVDSDQIEDIIQMINDMGIRVFEEAPDADDMMMSEDNTDEDAAEEAAAALATVESELGRTTDPVRMYMREMGTVELLTREGEIVIAKRIEEGINTVQSSVAEYPQAIAMILEQYDQYEADELRLSDIISGFVNPDEEDLGPTATHIGSELSEEDLDDEDDDEEDEDEDGDGDGDDDGNKGPDPEEARERFGQLRTAYENALKIIEAKGREHPESIKALFEIGEIFKEFRLVPKQFDRLVKSMRSMMDRVRVQERLLMKLCVEQAKMPKKNFVKFFTGNETNLDWFDAEKNSNKPYAEGLKMVEEDVQRCRSKLAAIEEETGLVIAAIKDINRRMSIGEAKARRAKKEMVEANLRLVISIAKKYTNRGLQFLDLIQEGNIGLMKAVDKFEYRRGYKFSTYATWWIRQAITRSIADQARTIRIPVHMIETINKLNRISRQMLQEMGREPSPEELAERMMMPEDKIRKVLKIAKEPISMETPIGDDEDSHLGDFIEDTTLELPLDSATSESLKSATHEVLAGLTAREAKVLRMRFGIDMNTDHTLEEVGKQFDVTRERIRQIEAKALRKLRHPSRSEILKSFLDE

SEQ ID NO: 29422 - protein, 515 aa, Arabidopsis thaliana
MSFRDDNTEEGRNDLRRPFLHTGSWYRMGSRQSSMLESSQVIRDSSISVLACVLIVALGPIQFGFTCGYSSPTQAAITKDLGLTVSEYSVFGSLSNVGAMVGAIASGQIAEYVGRKGSLMIAAIPNIIGWLSISFAKDTSFLYMGRLLEGFGVGIISYTVPVYIAEIAPQTMRGALGSVNQLSVTIGIMLAYLLGLFVPWRILAVLGVLPCTLLIPGLFFIPESPRWLVCLYNRIAYIVEFVALLAKMGLTDDFETSLQVLRGFETDITVEVNEIKVVTKLKKCFDRSVASSSKRSAVRFVDLKRRRYYFPLMVGIGLLALQQLGGINGVLFYSSTIFESAGVTSSNVATFGVGVVQVVATGIATWLVDKAGRRLLLMISSIGMTISLVIVAVAFYLKEFVSPDSNMYNILSMVSVVGVVAMVISCSLGMGPIPWLIMSEILPVNIKGLAGSIATLLNWFVSWLVTMTANMLLAWSSGGTFTLYALVCGFTVVFVSLWVPETKGKTLEEIQALFR

SEQ ID NO: 29423 - protein, 299 aa, Cryptococcus neoformans var. neoformans B-3501A
MTSTAIPPAAVAANNNTLNSALAAEQISSPASPVDKPVDEKKQLEEGEIEENPSEGDSQTKTIFDDASKFNVKHPLFSTWTLYFDSPQSKSLPKTPQTTPAMPQGSHGWMADIRKVVSFDSVEEFWGLYNNIIPPSQLPGKANYYLFKNGIIPAWEDPQNKNGGKWSIQVPKNSESKSSIDRMWLYTMLAAIGETFETASTDSENAPSPTQSDLITGVIVSPRPAFYRISIWTREASDVNVPDTDAIKARLLNIGKHFKTSVLGYELEQKLTEGGFQTELTFDAHKDSEKKVNKNKFTV

SEQ ID NO: 29424 - protein, 257 aa, Alkalilimnicola ehrlichei MLHE-1
MDSGHKTHLWRRPDLAFFLDLDGTLLPIVPHPDDATLDACGRTVLRELMALSGGAVALVSGRTISAVDRVVEPLRLPVAGVHGAEWRDPAGRYHRPSAPSPRLMTALRDRLRALTAAYPGTFVEEKGIALAVHFRRAPEYQMPIQRALSEIAAGAAGQLTLQAGKCVYELRPADGDKGRAVRHFMAEAPFASRAPVYLGDDLTDEHAFVAVNALGGYSIKVGAGHTEARWRLPDQPAVIDWLRGNRPAAAIRGEHGD

SEQ ID NO: 29425 - protein, 595 aa, Neurospora crassa
MAQYTASTGSSLRASPNLRQHHADTSAAPDTTEKFPDFDTSQTTNGYPSGNGRSTNAGSNAPSDQWRPRRESKVTWAPRDSPGPVNAYSHGRGHSRQTSISNAIHRMRSGSMSQNAHEIAEALRAPVSYKLIGLCMMWYWSSALTNTSSKSILTTFDKPATLTLIQFAFVCSYCLLASWLASTFPKLRTAVPALKHPIRKPSRDVIVTTLPLAAFQIFGHLLSSSATSKIPVSLVHTIKGLSPLFTVLAYRLIFDIRYPRATYYSLVPLTIGVMLACSGKHSFGEGQFLGILYALIATIIFVTQNIFSKRLFNEAARAEQEDGHSNGHRSKKLDKLNLLCYSSGMAFILTGPIWLWSEGFSIIGDFLWDGSVDLSETPNSFDHGRLTLEFIFNGTFHFGQNILAFVLLSMVSPVTYSVASLLKRVFVIIIAIIWFRSPTTNVQAVGIALTFLGLYLYDRSQEKNKADQRARSLSRSKMHESILPLNTKQTTETSSQYQPSSSLNTQIGGYGYMPSIQPTTSSADLGANKKDDGPNPSSVSTTAGGGRQRGASMAKANGGWLPPGTRQEHTWRVGDGRGQNGGAEVSGPAGVAVMS

SEQ ID NO: 29426 - protein, 175 aa, Triticum aestivum
MAPTVMASSATSVAPFQGLKSTAGLPVSRRSNGASLGSVSNGGRIRCMQVWPIEGIKKFETLSYLPPLSTEALLKQVDYLIRSKWVPCLEFSKVGFIFREHNASPGYYDGRYWTMWKLPMFGCTDATQVINEVEEVKKEYPDAYVRIIGFDNMRQVQCVRFIAFNPPGCDESGKA

SEQ ID NO: 29427 - protein, 263 aa, Streptomyces avermitilis MA-4680
MTEATEQTSCRRLVGRTAVITGAGSGIGLATARRLASEGAHVVCGDIDEVSGKAAADEVGGTFVQVDVTDAEQVEALFRTAYDTYGSVDIAFNNAGISPPDDDSILETGLEAWKRVQEVNLTSVYLCCKAAIPYMRRQGRGSIINTASFVARMGAATSQISYTASKGGVLAMSRELGVQFAREGIRVNALCPGPVNTPLLQELFAKDPERAARRLVHIPVGRFAEADEIAAAVAFLASDDSSFVNATDFLVDGGISGAYVTPL

SEQ ID NO: 29428 - protein, 462 aa, Alkalilimnicola ehrlichei MLHE-1
MSLITISNRVALPSQLQGAQGGLAVGLRSALEDGGGLWFGWDGRHEPRLPDPRPLAVQNANGVRYATLRLTRAEYERFYLGFSNQVLWPLFHYRLPYVHCQRADREGYWAVNRLFADRLPDLPDAESPIWIHDYHFIPLGQMLRERGITNPLGFFLHTPFPAWDVYRALPDHQALLEALCAHDLVGFQTDLDRDNFLDCLRHTDAIEVIDTARARYRGRVVHIGVFPIGIDVDSVAAHARHGFYSQQGRRLQASLGDRRLIIGVDRLDYSKGLDIRFEAYRRMLERRREHRARVVYLQIAPISRGEVPEYDEIRRELEYQAGHLNCQFAEYDWAPLRYLNRGFHRANVLGFLSRAHVGLVTPMRDGMNLVAKEFVAAQDPDDPGVLVLSHLAGAARELDAAVLVNPYDPDEVAERLHQALTMPLAERRERWTRMIRCLREQDITCWRDDYLQALQTAAGASG

SEQ ID NO: 29429 - protein, 167 aa, Rhodobacter sphaeroides 2.4.1
MARTSAIDYGRAAKYFLLLDFIKGFGLGMKYFFAPKHTVNYPHEKGPLSPRFRGEHALRRYPNGEERCIACKLCEAVCPAQAITIDAEPREDGSRRTTRYDIDMTKCIYCGFCQEACPVDAIVEGPNFEFSTETREELFYNKDRLLENGARWEAEIARNLELDAPYR

SEQ ID NO: 29430 - protein, 442 aa, Candida albicans SC5314
MNGANQNIPNTLPRLPSFQQLSETIRNPDFPDSSQKTHHQYHQQHRFQNTPIDCKSLMLFPINYTPVNDNGVATAAATATATAPVNGIVTTNSLNGNSIMEYSYGPTLHGRHESYPNQYVFPNQESKTGIPISNRVSPTSMDRTKAHSLDLELTNRVNTTNNDAKTYSKKYKVVFDLIQFLKKFEIKYNELKHYTFDLENDKNSNVLEKMVTELSIDDINEALVNTKKLANVFENIKSINENSTKSTNDMRRKNGLFVYENGNKKQQQQQQQHGEKRKIRKKHQHQMAKTKSLSTNGEAIPMQMSVSRNNGSITSTGFLQSVQQQAPQPQPQSQPQTQHQQLQPASELVPPHTQAQTLSAVTSNLTNGNLNTELSAKPEITCQHCCSQETPEWRRGPEGSRTLCNACGLFYSKLIKKYGLREADKVMLHRKQTGTVNDRRIF

SEQ ID NO: 29431 - protein, 387 aa, Nowakowskiella hemisphaerospora
IGAKFWEVISDEHGIDPTGTYHGDSDLQLERINVYYNEATGGKYVPRAVLVDLEPGTMDSVRAGPFGQLFRPDNFVFGQSGAGNNWAKGHYTEGAELVDSVLDVVRKEAESCDCLQGFQITHSLGGGTGAGMGTLLISKIREEYPDRMMCTFSVVPSPKVSDTVVEPYNATLSVHQLVENSDETFCIDNEALYDICFRTLKLTTPTYGDLNHLVSAVMSGITTCLRFPGQLNADLRKLAVNMVPFPRLHFFMVGFAPLTSRGSQQYRALTVPELAQQMFDAKNMMAASDPRHGRYLTVAAMFRGRMSMKEVDEQMLNVQNKNSSYFVEWIPNNVKTAVCDIPPKGLKMSVTFIGNSTAIQELFKRISDQFTAMFRRKAFLHWYTGEG

SEQ ID NO: 29432 - protein, 388 aa, Nowakowskiella elegans
IGSKFWESVCDEHGIDGSGEYVGDNPLQLERVSVYFEEGMTNRKYVPRAIMVDLEPGTIDTVRGGTFGNLFRPDNSVFGQSGAGNNWAKGYYTEGAELVDPVMDIIRQTAERCDSLQGFQLIHSLGGGTGSGMGALLLTKIREEFPDRMLCTFSVVPSPKVSDTVVEPYNATLSINQLVEHCDETFCIDNEALYDICFRTLKLPNPTYGDLNHLVSSVMSGVTTCLRFPGQLNADLRKLAVNMVPFPRLHFFMVGYAPLTARGSQGYRNVSIADLTTQMFDSRNMMAATDPRHGKYLTVAGMFRGKLSMKEVEEQMLAVQIKNSSYFVEWIPSNMKTAVCDIPPRGLRMSVTFIGNSTSIQELFKRIQIQFNAMFNRKAFLHWYTGEG

SEQ ID NO: 29433 - protein, 387 aa, Nowakowskiella elegans
IGAKFWEVISDEHGIDPTGTYHGDSDLQLERINVYYNEATGGKYVPRAVLVDLEPGTMDSVRAGPFGQLFRPDNFVFGQSGAGNNWAKGHYTEGAELVDSVLDVVRKEAESCDCLQGFQITHSLEGGTGAGMGTLLISKIREEYPDRMMCTFSVVPSPKVSDTVVEPYNATLSVHQLVENSDETFCIDNEALYDICFRTLKLTTPTYGDLNHLVSAVMSGITTCLRFPGQLNADLRKLAVNMVPFPRLHFFMVGFAPLTSRGSQQYRALTVPELTQQMFDAKNMMAASDPRHGRYLTVAAMFRGRMSMKEVDVQMLNVQNKNSSYFVEWIPNNVKTAVCDIPPKGLKMSVTFIGNSTAIQELFKRISDQFTAMFRRKAFLHWYTGEG

SEQ ID NO: 29434 - protein, 249 aa, Rosa rugosa
MEFPKQITPADDPESSSQKKLGRGKIEIKRIENTTNRQVTFCKRRNGLLKKAYELSVLCDAEVALIVFSTRGRLYEYANNSVRATIERYKKACDSSNTGSVTETNVQFYQQEASKLRRQIREIQNSNRHILGEALSTLNVKELKNLEGRLEKGISRIRSKKNEMLFAEIEYMQKREIELQNHNNFLRAKIAENDRAQQQQANMMPGTLSAYDQSMPPPQSYDRSFLPVILESNHHYNRQGQNQTPLQLV

SEQ ID NO: 29435 - protein, 994 aa, Ralstonia solanacearum
MATMLRRALPAPAHLWRRGRTALLLCATAIALLTTSDRAQADRTTRALPPMGHPLMPSAAAQMASGTPAAAIALWTLAVLSMRHVQLRRENRRRRRAEADLARQLDFHHRLLESLPFPLAAQDTQHRYVAVNAAFCHLFGQPREALLGRTPAHLGWRCAHTAARAQDIDRRATAASQGACEALTITAADGRERHVLYWVAPVHGPDGRPGGTVASLIDIDGIRDAQAPAEQRAQRLHELTESLPALVCQFEMRPGTAARGRMRHLAGNASETLGAPAGKARGRLPSPARLVHRDDRQRMRGAALQSAAQLTLLDQQFRHGNGDGPVRWLHIRARPRRGADGCTVWNGYLRDVTAERAQADALVSARQAAESALRAKDRFLATMSHEIRTPMNGVLGLVELLLQTRLEREQQRMMTLVQESSRALLHVLDDILDYAKIEADRLSITPAPTDLRALLDSTVGLLASRAHERSLAVRVDVDAAVPATVSVDGMRLRQVLCNLLSNAIKFTEHGSVRLSAKCMETAADTVHLIIRVTDTGIGIAPEAQATLFTPFVQADSTITHRQCGTGLGLAISRQLARLMGGSLDMDSTPNVGTTLTLRLEVPVVDARYRLPRLASATVRVAVDDDTCRHGLEQFAVAAGLRVVHTGTADLTLVDSVRAPADAPRIVPVTGDAPYTGPGRSIPRPEALSTNPLNWQAFVQACDTALARPADGHAANGMPKSRTVPEPAPAAETPGMHILVAEDHPINRELITRQLRLLGYRVTLAEDGAAALQRLCETRFDALLTDCCMPRLDGFDLARQIRQREQQAPGGRRLPILAITATTLAEEHARCRTVGMDGYVLKPTTLATLQDALSRLGNAAVSPDAAKAPATAPDNALAFRLDDLRQTLGDGPAAVSLIRVFTTALGDDARQLGGLLATADRPALRKWTHRTGGALALLHHTAIDAEMSAFRHAVHSADDTGLRQAGARMLQLLAHLQGVMRLAETPSPGTAPTCQ

SEQ ID NO: 29436 - protein, 387 aa, Rhizophydium sp. JEL138
IGAKFWEVISDEHGIDPTGTFHGDSDLQLERINVYFNEASGGKYVPRAVLVDLEPGTMDSVRAGPFGQLFRPDNFVFGQSGAGNNWAKGHYTEGAELVDSVLDVVRKEAESCDCLQGFQITHSLGGGTGAGMGTLLISKIREEYPDRMMCTFSVVPSPKVSDTVVEPYNATLSVHQLVENSDETFCIDNEALYDICFRTLKLTTPTYGDLNHLVSAVMSGITTCLRFPGQLNADLRKLAVNMVPFPRLHFFMVGFAPLTSRGSQQYRALTVPELTQQMFDAKNMMAASDPRHGRYLTVAAMFRGRMSMKEVDEQMLNVQNKNSSYFVEWIPNNVKTAVCDIPPKGLKMSVTFIGNSTAIQELFKRISDQFTAMFRRKAFLHWYTGEG

SEQ ID NO: 29437 - protein, 248 aa, Rosa rugosa
MAYENKPNTVLDSDAQRRLGRGKIEIKRIENTTNRQVTFCKRRNGLLKKAYELSVLCDAEVALIVFSNRGRLYEYSNNSVRETIERYKKACADSSNNGSVSEATTQYYQQEAAKLRAQITTLQNSNRGYMAEGLSNMSIKELKGVETKLEKAISRIRSKKNELLFAEIEYMQKRELDLHNNNQLLRAKIAENERHQQSINAIAGGHGSYDIMQPTQPFHEARNYFQVNALQPNIHQYSRHDQISLQLV

SEQ ID NO: 29438 - protein, 387 aa, Rhizophydium sp. JEL138
IGAKFWEVISDEHGIDPTGTFHGDSDLQLEHINVYFNEASGGKYVPRAVLVDLEPGTMDSVRAGPFGQLFRPDNFVFGQSGAGNNWAKGHYTEGAELVDSVLDVVRKEAESCDCLQGFQITHSLGGGTGAGMGTLLISKIREEYPDRMMCTFSVVPSPKVSDTVVEPYNATLSVHQLVENSDETFCIDNEALYDICFRTLKLTTPTYGDLNHLVSAVMSGITTCLRFPGQLNADLRKLAVNMVPFPRLHFFMVGFAPLTSRGSQQYRALTVPELTQQMFDAKNMMAASDPRHGRYLTVAAMFRGRMSMKEVDEQMLNVQNKNSSYFVEWIPNNVKTAVCDIPPKGLKMSVTFIGNSTAIQELFKRISDQFTAMFRRKAFLHWYTGEG

SEQ ID NO: 29439 - protein, 249 aa, Rosa rugosa
MAYENKPNTVLDSDAQRRLGRGKIEIKRIENTTNRQVTFCKRRNGLLKKAYELSVLCDAEVALIVFSNRGRLYEYSNNSSVRETIERYKKACADSSNNGSVSEATTQYYQQEAAKLRAQITTLQNSNRGYMAEGLSNMSIKELKGVETKLEKAISRIRSKKNELLFAEIEYMQKRELDLHNNNQLLRAKIAENERHQQSINAIAGGHGSYDIMQPTQPFHEARNYFQVNALQPNIHQYSRHDQISLQLV

SEQ ID NO: 29440 - protein, 350 aa, Arabidopsis thaliana
MATPMENENPNFARTATSFRNFVSKDPDSQFPAESGRYHLYISYACPWASRCLAILKLKGLDKAISFSSVQPLWRNTKENDEHMGWVFPDSDTEVLGAERDHINGAKSVRELYDIASSNYTGKYTVPVLWDKKLKTIVNNESSEILRMFNTEFNHVAENPSLDLYPPNLRAIIDETNEWIHDGINNGVYKCGFATNQETYDVEVKRLYEALDRCEDILRKQRFLCGNTLTESDIRLFVTVIRFDEAYAVIFKCDKRLVREYYHLFNYTKDIYQIAGMSSTVKMDHIKQNYYGSFPSINPLEIIAHGPNIDYSLPHDRHRFSLESDYTRLELFESASFVCELKLIEIFDSL

SEQ ID NO: 29441 - protein, 231 aa, Sorghum bicolor
MGRGRVELKRIENKINRQVTFAKRRNGLLKKAYELSVLCDAEVALIIFSNRGKLYEFCSGQSITKTLERYEKHMRPDTAVQNKENELVQSSRNEYLKLKARVDNLQRTQRNLLGEDLGSLGIKELEQLEKQLDSSLRHIRSTRTQHMLDQLTDLQRREQMLCEANKCLRRKLEETSNQVHSKCGARCQLTRLRAATPPHSRPHHILAMDCSFIPWKLQQSQPCRSGSLLNI

SEQ ID NO: 29442 - protein, 250 aa, Rosa rugosa
MAYENKPNTVLDSDAQRRLGRGKIEIKRIENTTNRQVTFCKRRNGLLKKAYELSVLCDAEVALIVFSNRGRLYEYSNNSVRETIERYKKACADSSNNGSVSEATTQYYQQEAAKLRAQITTLQNSNRGYMAEGLSNMSIKELKGVETKLEKAISRIRSKKNELLFAEIEYMQKRELDLHNNNQLLRAKGQIAENERHQQSINAIAGGHGSYDIMQPTQPFHEARNYFQVNALQPNIHQYSRHDQISLQLV

SEQ ID NO: 29443 - protein, 183 aa, Escherichia coli K12
MQDSILTTVVKDIDGEVTTLEKFAGNVLLIVNVASKCGLTPQYEQLENIQKAWVDRGFMVLGFPCNQFLEQEPGSDEEIKTYCTTTWGVTFPMFSKIEVNGEGRHPLYQKLIAAAPTAVAPEESGFYARMVSKGRAPLYPDDILWNFEKFLVGRDGKVIQRFSPDMTPEDPIVMESIKLALAK

SEQ ID NO: 29444 - protein, 798 aa, Magnaporthe grisea 70-15
MPDSKNLIPRMQAKGPFSVPVPGATAAPGETVPRRHPDAATELWTRPAPEVSTTWELVKYSVEKFGNAKCVGSRRLVRTHQETKKIKKMVDGQEREVDKQWTYFELSGYEYLTYNEYYRLVVQLGAGLRKVGLVAEDRVHIYAATSQNWLAMSHAAGSQSMAIVTAYDTLGEEGLRHSMVATKAKAIFLDPHLLPTLGNVLKDATDITHVIWNTQNKVKQEHIDKLNQTYPNVTVLSFDDLKKLGDENPVDAVPPNADDLCCIMYTSGSTGTPKGVPLKHSNVVAAVAGVSVVVQPYIGPGDGLLTYLPAAHILEFVFENSAMFWGATMGYGNPKTLSDASVRNCNGDIKEFKPTVLVGVPAVWENVKKGIIGKVNAGSPVVRNLFWGAMSMKNNLMGMNLPGSGILDAVVFKKIKEATGGRLKICLNGGGPVAKETQRFLSMAICPMIIGYGLTETTAMGTLQNPMEWSTDTIGSMPASVEAKLVDFADAGYHVTNKPNPQGEVWLRGPTVMSGYYQNDKETAEAMTEDGWFKTGDIGEFDSQGHLKLIDRKKNLIKTLNGEYIALEKLESIYRSAPVVANICCYADDSQAKPVALIVPAEPALKKLAASVGAKGETLEELIHDSKVNAAVLKDMQNVGRQGGLAGIEIIDGVVLSDEEWTPQNGLVTAAQKLNRKGILQKYKKEVDQAYGIKNPARQKSCLDENHSERRSSQRIELPIPGTHTPPQCRRKQMSTSYVGERLPCQSPLTMYLDLPPTHQGYPGFAFASRGEPSQITPHTTWKPNNINPTHDRGSKEC

SEQ ID NO: 29445 - protein, 167 aa, Oryza sativa
MDSEHWISRLAAAKRFYAAQLGHADRAGMEEVDMDEEVRPEFACPYCYEDHDVVSLCAHLEEEHPFEPHAANRRRLRRFVIPGSQALSLLSRDLREAHLQVLLGGGGHTSNDSSNTTNISADPLLSSFGLSFPTSDTEETSKPPISIPDDASVIKETPAQPWDSSID

SEQ ID NO: 29446 - protein, 255 aa, Neurospora crassa
MSDSPQSNSKDVEQGAPSPGEEPQMNDPQDPHSSGLNQYEFEVKEQDRWLPIANEHFQNKRCAYSLYTSMSHHSSSKSPEAPRASSSSSKADRCDAYDANIRNFAPVARIMKNALPENAKIAKEAKECMQECVSEFISFITSEASEKCQQEKRKTVNGEDILFAMTSLGFENYAEALKIYLSKYREQQQNQTNRSENQQNRPSSQGYGAPQGQNQPGQGGFSSNDLGGQQESGDASGYNLYGAQTGHNGGGAEGY

SEQ ID NO: 29447 - protein, 427 aa, Idiomarina loihiensis L2TR
MKKLIISLMLASSFGYSAQAAAQQSPVKVSSDLEAQVIEWRRHIHANPELSNREFETAKMVAEHLRSLGMEVETGVAHTGVVGMLKGGKPGPTIALRADMDALPVTEQTDVPFKSTVKSEYRGNEVGVMHACGHDTHVAMLMGAAEKLAEMKDELAGNVMFIFQPAEEGAPEGEEGGAALMLEEGLFADNKPEKVFGIHVWAGFPTGHVGYRKGPLMASADRFEIKVKGKQAHGSAPWTGVDPIVTSAQIINNAQTIISRQTNITKAPAVLSFGIVEGGVRNNIIPDEVTLIGTIRNFDMDIRSDIHEKLKLTAEKTAEANGAEAHVHVDLGYPVTSNDADLVEQMLPITKAVAGANKVQEVPLVTGAEDFSYYALEVPGMFVFLGVTPPERDMANEPSNHSPHFYADEDALKTGTELYVNWALESL

SEQ ID NO: 29448 - protein, 542 aa, Chlamydomonas reinhardtii
MSEACLLAAKSALVGVANGDSLASAICAAMEAAAPVARHLQETTVDLTTLQETVDTIGLNLQGTMDGLNTLLLLYGGALVFLMHGGSAMLEAGAIRSKNAMNILLQTVLDASCSALMWYFVGFAFAFGIGDKPNKFIGNAMFALVDIDTHNTGSGTGKWIDWFFQWAFAATAVTIPAGAVAERFNFNAYLGYSMFIGGWVYPIIAHWVWCIEGWLGYGVIKPFINAGMIDFAGSGVIHMTGGLAGLIGAIMVGPRLGRFDADGKPVDMPGHSAILVVLGTVLLWFGWYGFNPASVLLINSSTYAIVCGRAAVCTTLAGAAGGVSCLIFGFARHRGWDLVGLCNGILCGFVAVTACPHVIYPWAAIICGLVAGLWFEFLCWLLLKLKIDDPLSAGPMHFGCGMWGVFFTGLFARQQYIQEYYVHGPSAAGELSKPYPWGAFYKGYNADGELVMSDGKLLASQIVGILVIIGWVIGMMVPFFGIFQFFGALRIPPEEEEMGLDRSKHGGSAYNGTGANTLGGLSPGNDVMRNNSPLGKVLPVTA

SEQ ID NO: 29449 - protein, 420 aa, Sinorhizobium meliloti
MRNEDIVLDGAKVFWRTLLPRLKAERGLLGLSVVLAFLAALAGIHPLAVLPFWIVLVAAILNRGAPPVQTAPASVGAAVETKADPLAPLLDALDMPVLVVAADETVVFQNAAAEKAFGTIPQDSYLSARVRSPGILDMVRETIATGKVNQIEHAERLPSEAVYVVRVAPVDIGSDVSGRRIFLLTYRDISQARRIDRMRSDFVANASHELRTPLASLRGFIETLQGPARDDRKAQEKFFGIMHEQVTRMSRLVDDLLSLSRLELKSHIAPDDAVDLGPLLGHVRDSLAPLAGELDVTIALEVPETPVFVQGDRDELVEVFENLIENACKYGQEGKQVDVRLTGGNGHQAEVTVTDHGPGIPAEHVPRITERFYRVNVEASRSKKGTGLGLAIVKHILTRHRARLLIHSEVGKGTVFKVRF

SEQ ID NO: 29450 - protein, 96 aa, Candidatus Legionella jeonii
MKIRPLHDRVVVRRLEEERTTAGWIVIPDSATEKPMRGEIIAIGAGKILDNGDVRAFVVKVGDVVLFGKYSGTEVKVAGQELVVMREDDIMGVIEK

SEQ ID NO: 29451 - protein, 551 aa, Candidatus Legionella jeonii
MAKELRFGDDARQQMLAGVNALADRVKATMGPSGRNVVLERSFGAPTVTKDGVSVAKEIEFENRFKNMGAQMVKEVAAKTSDTAGDGTTTATVLARSIVVEGHKAVAAGMNPMDLKRGIDKAVTAITKELQKMSKPCKDGKAIAQVGTISANSDQAIGSIIAEAMEKVGKEGVITVEDGNGLENELSVVEGMQFDRGYISPYFINNQQNMSAELEHPFILLVDKKIATIRDMLSVLEAVAKSGRPLLIVAEDVEGEALATLVVNNMRGIVKVCAVKAPGFGDRRKAMLQDIAILTNGQVISEEIGTSLETASLESLGTAKRIVVTKENTTIIDGEGKATEINARIAQIRAQMEETSSDYDREKLQERVAKLAGGVAVIKVGAATEIEMKEKKARVEDALHATRAAVEEGIVAGGGVALIRAQKVLDGLKGDNADQDMGINILRRAIESPLRQIVANAGYESSVIVNKVAEHKDNFGFNAATGQYGDMVEMGILDPTKVTRTALQNAASVRSLMLTTECMVADLPKKDEGMAGAGDMGGMGGMGGMGGMGMM

SEQ ID NO: 29452 - protein, 259 aa, Geobacter sulfurreducens PCA
MNRTVKAGAVQFTVRLGDIDANVAYVQKALRRLASQGCRLAVLPEMWSTGYAYKELNELAKRTPEVVAELGRLSRELEMVIVGSMPEPHGEKVFNTAYVLDRGELLGSYRKIHLFSLMGEDRSLDGGDRWLVVDTHVGRLGVFICYDLRFPELARRLAVEGAEIIVVPAEWPKPREEHWRALLRARAIENQLFVVAANCCGVQGKLDFFGSSLIIDPKGELLAEGGYDPCEPMATLDFQVMETWRDQIPCFADRRPSCY

SEQ ID NO: 29453 - protein, 165 aa, Brassica napus
MASSSCFTIQSSFFSASTRLDSISKPSLSGFACRSLTKPRNLNLSVLLRCSMGSFNSSQKSDNVQGEWKKRLTPEQYYITRQKGTERAFTGEYWNTKTPGVYKCICCDTPLFDSSTKFDSGTGWPSYYQPIGNNVKSKLDLSIIFMPRQEVICAVCNAHLGHVFD

SEQ ID NO: 29454 - protein, 331 aa, Streptococcus agalactiae A909
MAILVLGGAGYIGSHMVDYLLTKTDETVVVVDNLVTGHREAIHLEAIFYKGDLADKTFMRQVFVENPSIDTVIHFAAYSLVAESMEQPLKYFNNNTAGMINLLEVMTEFAIKFIVFSSTAATYGIPNDIPIKEITPQRPINPYGESKLMMETIMKWADAAYGVKFVPLRYFNVAGAKPDGSIGEDHKPETHLLPIILQVAQGKREKVMIYGDDYQTSDGTNIRDYVHPFDIAAAHLLAVDYLRKGNPSTAFNLGSSIGFSNFQILEVARRVTGKDIPVEVTKRRIGDPDILIADSSKARDILGWQPEFDDIEKIISSAWAWHSSHPDGYKS

SEQ ID NO: 29455 - protein, 131 aa, Alkalilimnicola ehrlichei MLHE-1
MVEVEKSDAEWRAQLTDEQYAVCRQGGTEQPFSGAYYHCKEPGTYHCVCCDAPLFSSRAKYDSGSGWPSFWAPISDDHLRILEDRSLGMVREEVRCARCDAHLGHVFPDGPMPTGLRYCINSVCLDLKRSG

SEQ ID NO: 29456 - protein, 366 aa, Pirellula sp. 1
MSDSFILCSGKTATGTKKVFRRLASMTKCKLEYIWLDGYQPTQSMRSKTKIVEDFSGKVEDAEMWSFDGSSTEQAPGGASDCLLKPVFCLPDPDRLGTGFLVMCEVMNADGTPHRSNGRATIKDDDNDFWFGFEQEYTIFDPETKKPIGFPAEGFPGPQGPYYCSVGAGKAVGREIVEEHLELCLQAGLNVEGINAEVMMGQWEFQIFAKGAAQAGDEIWLARYLLDRTGEKYGMEINYHCKPVKGDWNGSGMHANFSNTTLRTCGSKEVYEAICQAFEPRITEHIDVYGADNDQRLTGLHETQSIDKFSYGISDRGASIRIPIATVEKGWKGWLEDRRPASNADPYMVASAIIATVKTANVPAGV

SEQ ID NO: 29457 - protein, 213 aa, Triticum aestivum
  misc_feature (149)..(149): Xaa can be any naturally occurring amino acid
  unsure (1)..(213): unsure at all Xaa locations
ESLRPIDNVKAKIQDKEGIPPDQQRLIFAGKQLEDARTLADYNIQKESTLHLVLRLRGGMQIFVKTLTGKTITLEVESSDTIDNVKAKIQDKEGIPPDQQRLIFAGKQLEDGRTLADYNIQKESTLHLVLRLRGGMQIFVKTLTGKTIXTLEVESSDTIDNVKAKIQDKEGIPPDQQRLIFAGKQLEDGRTLADYNIQKESTLHLVLRLRGGQ

SEQ ID NO: 29458 - protein, 617 aa, Armoracia rusticana
MTTNKKTIVWFRRDLRIEDNPALAAAAHEGSVFPVFIWCPEEEGQFYPGRASRWWMKQSLAHLSQSLKALGSELTLIKTHNTVSAILDCIRITGATKVVFNHLYDPVSLVRDHTVKEKLVELGISVQSFNGDLLYEPWEIYFEKGKPFTNFSSYWKKCLDMSIESVMLPPPWRLMPISTAAEAVWACSIEELGLENETEKPSNALLTRAWSPGWSNADKILNEFIEKQLIDYAKNSKKVVGNSTSLLSPYLHYGEISIRRIFQCARMKQIIWARDKNSEGDESADLFLKGIGLREYSRYICFNFPFTHEQSLLSHLRFFPWDTDVDKFKAWRQGRTGYPLVDAGMRELWATGWMHNRLRVIVSSFAVKFLLLPWKWGMKYFWDTLLDADLECDILGWQYISGSLPDGHELDRLDNPAIQGAKYDPEGEYIRQWLPELARLPTEWIHHPWDAPLTVLKASGVELGTNYAKPIVDIDTARELLTKAISRTREAQIMIGAAPDEIVVDSFEALEGNTVKEPGLYPSVSSNDQQVPSAVRYNGSKRVKHVEEEERDMKKSRGFDEVMREERDLFSTAESSSSSTTVRFLVSHSCSLVSEGKSLEGIQDPSDQITTSLGKNC

SEQ ID NO: 29459 - protein, 378 aa, Arabidopsis thaliana
MAILDTKSSRWIPHNLLFLLLLLLLQSVPYGFGQTQTTPPGTTKTKPNDPVVVVITVLFLVIFFMVFGSIFCRRSNAQFSRSSIFRSTDADAESQVVRIRRLTARGLDAEAIETFPTFLYSEVKAVRIGKGGVECAVCLCEFEDDETLRLMPPCCHVFHADCVDVWLSEHSTCPLCRADLVLNQQGDDDDSTESYSGTDPGTISSSTDPERGMVLESSDAHLLDAVTWSNSNITPRSKSTGLSSWQITGILFPRSHSTGHSLIQPAGNLDRFTLRLPDDVRRQLMKTSRTMGHVALLPQARSSRSGYRSGSVGSERSAFPYGRKSNNNNRRLHSLSFSFSFRSGSVRSTFSGDAPKNLPTSIEAGERSFERLRPDERV

SEQ ID NO: 29460 - protein, 570 aa, Euglena gracilis
TMNRAGVLARRGYSSKGKDILFGVDARVKMLAGVNRLSQAVSVTLGPKGRNVVIEQPFGAPKITKDGVTVAKAIEFKDSFENLGAQLVRQVANTTNEIAGDGTTTSTVLANAIFSEGYKAVTQGTSPVDMKRGIDRAVEVVLQSLTEQSKTIVSKEEVTQVATISANGDVEIGQLIGHAMEKVGKAGVITVSDGKTLDTELEVVEGMSLDRGYISPYFVTNAKTQKVEIEDAFILLCQKKVSTIQQILPVLEHIAKANRPLVIIADDVDSEALATLIINKINGKLKVCAVKAPGFGDNKTNMLHDVAIFTGGEVYNEELGMNLEQHFDHRILGFAKKVSVGKDQTIILNGAGDPKAVEERKELIQGMLGKTDSSYEKEKLNERLAKLSGGVAVIKVGGASDVEVGEKKDRVTDALNATRAAVSEGIVPGGGAALLYASSALAELAADPTLTEDQKTGVRIVMSAIKLPAITIVKNAGGEGAVVIHQLLAEKKMQQGYDAQQGKYVNMFEAGIIDPAKVVKTALVDAASVAGLMITTEAAITDIPAPAPAAGGGMDGMGGMGGMGGMGGMY

SEQ ID NO: 29461 - protein, 397 aa, Gossypium hirsutum
MALNFNAIASKSQKLPCFALPPKATLRSPKFSMISTIPSGSKEVGNLKKPFTPPKEVPVQITHSMPPHKIEIFKSLEGWAENNILTHLKPVEKCWQPADFLPDPNSDGFHEQVKELRERAKEIPDDYFVVLVGDMITEEALSTYQTMLNTLDGTRDETGASLTPWAIWTRAWTAEENRHGDLLNKYLYLSGRVDMRQIERTIQYLIGSGMDPHTENSPYRGFIYTSFQERATFISHGNTGRLAKEYGDINLAQICGSIASDEKRHETAYTKIVEKLFEIDPDETVLAFADMMKKKIAMPAEFIYDGRDYNLFDHYSAVAQRIGVYTAKDYVDIVEHLVDRWKVKELAGLSAEGRKAQDYLCSLPSRIRRLEERAQEKAQGSTPVSPFSWIFDREVKL

SEQ ID NO: 29462 - protein, 617 aa, Armoracia rusticana
MTTNKKTIVWFRRDLRIEDNPALAAAAHQGSVFPVFIWCPEEEGQFYPGRASRWWMKQSLAHLSQSLKALGSELTLIKTHNTVSAILDCIRVTGATKVVFNHLYDPVSLVRDHTVKEKLVELGISVQSFNGDLLYEPWEIYCEKGKPFTSFSSYWKKCLDMSIESVMLPPPWRLIPITAAVEAVWACSIEELGLENDAEKPSNALLTRAWSPGWSNADKILNEFIDKQLIYYAKNSNKVVGNATSLLSPYLHYGEISVRRVFQCARMKQIIWARDKNSEGEESTDLFLKGIGLREYSRYICFNFPFTHEQSLLSHLRFFPWDADVDKFKAWRQGRTGYPLVDAGMRELWATGWMHNRIRVIVSSFAVKFLLLPWKWGMKYFWDTLLDADLECDILGWQYISGSLPDGHELDRLDNPAIQGAKFDPEGEYIRQWLPELARLPTEWIHHPWDAPLTVLKASGVELGTNYVKPIVDIDTARELLTKAISRTREAQIMIGAAPDEIVADSFGALEGNTVKETGLCPSVSSNDQQVPSAVRYNGSKRVKHVEEEERDMKKSRGFDEVMREERDLFSTAESSSSSTTVRFLVSHSCSLVSEGKNLEGIQDPSDQITTKLGKNG

SEQ ID NO: 29463 - protein, 169 aa, Nicotiana tabacum
GLIVSFGEMLIDFVPTVSGVSLAEVPGFLKAPGGAPANVAIAVTRLGGKSAFVGKLGDDEFGHMLAGILKQNGVQADGINFDKGARTALAFVTLRADGEREFMFYRNPSADMLLTPDELNLEVIRSAKVFHYGSISLIVEPCRSAHLKAMEVAKEAGALLSYDPNLRLP

SEQ ID NO: 29464 - protein, 413 aa, Treponema denticola ATCC 35405
MASTYEKLLTTITEAAKTANLEEDDYISLLSPEREMHVSIPVKMDNGKIKVFSGYRVQHSTLRGPAKGGIRFHQDVNIDEVRSLSAWMTFKCAVADIPYGGGKGGICVNPSNLSETELEKLTRGYTRRITSFIGPKTDIPAPDVGTNAKIMSWIVDSYSSYAGEFTPAVVTGKPLPLGGSKGRVEATGRGVLFATREILKKLNKTLKDQSVVIQGLGNVGGVTADLFYKEEARIIAISDTSSAIYNEKGLDIPQILKHKKGGKKLKSFEGDFKRITNEELLELKADILIPAALENQITEKNASNIKASIIIEAANGPITPEADKILEKKNIITVPDVLANSGGVIVSYFEWVQNLQGFYWTEEEVNKRLEDKMIEAFKLVWDVKEAYKVSMRKAAYIKALKELVETQKVKGIN

SEQ ID NO: 29465 - protein, 384 aa, Karlingiomyces sp. JEL93
LYCLEHGIQPDGQMPSDKTIGGGDDSFNTFFSETGAGKHVPRTVFVDLEPTVVDEVRTGTYRQLFHPEQLITGKEDAANNYARGHYTIGKEIVDLVLDRIRKLADNCTGLQGFLVFHSFGGGTGSGFGALLLERLSVDYGKKSKLEFSVYPAPQVSTAVVEPYNSILTTHTTLEHSDCAFMVDNEAIYDICRRNLDIERPTYTNLNRLIAQVVSSITASLRFDGSLNVDLTEFQTNLVPYPRIHFPLVTYAPVISAEKAYHEQLTVAEITYSCFEPANQMVKCDPRHGKYMACCLLYRGDVVPKDVNAAIATIKTKRTIQFVDWCPTGFKVGINYQPPTVVPGGDLAKVQRAVCMLSNTTAIAEAWARLDHKFDLMYAKRAFVH

SEQ ID NO: 29466 - protein, 282 aa, Shewanella sp. MR-7
MRISLLQCQSSRDVSANLLFIESQLEELTRQRLQWDKDAPHLVVLPECSLLFGGHESQQLAYAGDSHLSPLKSALSALAARYCVYMVAGTIPALAEDGRVYSRCYLFDDKGDTLGQYDKLHLFDVDVADGTKQYRESETFCPGNHISVIDTPFGKIGLTICYDLRFPDLFRALRLAGAEIITVPSAFTKVTGEAHWQVLLQARAIETQCFILAAAQWGAHNEGSRETWGQSMVIGPWGEVIVEQKTGTGWVHADIDVAEVHSIRSKMPVAQHNRFTAPNLKP

SEQ ID NO: 29467 - protein, 306 aa, Lactobacillus plantarum WCFS1
MNTVTVIGSINLDRTIRVENMPKPGETIHTKEIFSAGGGKGANQAVAAQRSGANTHFIGAVGDDAAGKTMLDLLTQEKINLAGITKMTNQSTGQAYVTVDDAGENQIMIHGGANMAFTPADVEAHRDIIETSDFVVAQFESAVDSTVEAFKIAQAAGVRTILNPAPAMEKVPAELLAVTDMIVPNETETETLTGIAITDEVSMLKASAALHALGISAVIITIGSKGAFYDIDGRHGIVPAFKVEAVDTTSAGDTFIGAMSSVLNKDFSNLEDAIRYGNRASSIAVQRFGAQPSIPYKNEITAAEGK

SEQ ID NO: 29468 - protein, 102 aa, Guillardia theta
MTDKITKKKRNETYSIYIYKVLRQVHPKIGVSSKAMNIMNSFVNDLFERLVSESYNLSNSSRSKTLTAREIQTSVRLVIPGELAKHSVSEGTKAVAKYRSSI

SEQ ID NO: 29469 - protein, 589 aa, Candida albicans SC5314
MTIQSSISSSNQSITPKTKLTNLELELELELEEEEGEEQPQEVQEINSTSFSSSITFGLYDESDGDKAYLAKSKLIAESIQSIGFGKYQIGLFFVAGFGWLSDNAWPVATSLILPRLNEINGVHPPPPSSSSSSSSSPNKGPYLMLAQNLGLLLGAAFWSISSDIIGRKWAFNLTFLITGIWAIIGGSSPNFIALCCFEAFWSFGVGGNLSVDSAIFLEALPSSYQWLLTVMSAWWAIGQIVVNLISWGLIANFSCPTIDNDVGSGSGSGNIICYKEDNKGWRYFLFTMGGLTLLMFFARFAFQIFESPRYYLARGDSIKTIETLEKIAKINGKTCPITIKDLQDIDELYDESELEKETETETDTTTTTTKKNNRLIKEKLKKYNLSHVRQCFTTSKKMTLSIILVVWLWGVIGLAFPLYNAFIPSYLESRGDANKPLTVHETYRNTLIISILGIPGSLIGGILVELKIGRKGTLFLSLILTGIFLFGSTTAKTSKANLAWNCMFSFMSTIMYGVLYAYTPEVFYSQIRGTAIGLAASFNRIMGVFAPIIAIYADLTTSAPIFVSGALFIFAGILSLCCPYEPRGKPSY

SEQ ID NO: 29470 - protein, 446 aa, Triticum aestivum
SLQLSHTLRHQITVGSSIPINLPVVNQVFSSNRAIIIPHTSPLARIRPLAGRYVPPEVAAVRVPLLNLSNFQINDWPELSAKSYAIMVLMLPSDSARNWHVHELELVEVVADQVAVALSHAVILEESMRARDLLMEQNVALDLARREAEMAIRARNDFLAVMNHEMRTPMNAIIALSSLLLETELTPEQRLMVETVLKSSNLLATLINDVLDLSKLEDRSLELEIRAFNLHAVFKEVMGFIRPIAAIKRLSMSVMLTPDLPLCAIGDEKRLMQTILNISGNAVKFTKEGHITLLASVLKPDSLREFRTPDFHPAASDDHFYLKVQLKDTGCGISPQDLPHVFTKFAQTQPGGNQGYSGSGLGLAICRRFVTLMGGHIWLDSEGAGRGCTATFIIRLGVSDNTDAYQQQLAPLAWPGSANVESAGPKALHEETWPPSSLKPRYQRSV

SEQ ID NO: 29471 - protein, 412 aa, Zea mays
MAAMPGGAHGAGAADPMQVDQPLPPAAAGTAHAPADAKHAGSMIEGSDPVTGHIISTTIGGKNGEPKRTISYMAERVVGTGSFGIVFQAKCLETGETVAIKKVLQDKRYKNRELQIMRSMDHCNVVSLKHCFFSTTSRDELFLNLVMEFVPESLYRVLKHYSNMNQRMPLIYVKLYTYQIFRGLAYIHTVPGVCHRDVKPQNLLVDPLTHQVKICDFGSAKMLVKGEANISYICSRYYRAPELIFGATEYTTSIDIWSAGCVLAELLLGQPLFPGESAVDQLVEIIKVLGTPTREEIRCMNPNYTEFRFPQIKAHPWHKIFHKRMPPEAIDLASRLLQYSPNLRCTALEACAHPFFDELREPHARLPNGRPFPPLFNFKQELANASPELINRLIPDHARRHLGLTLLPTAGP

SEQ ID NO: 29472 - protein, 306 aa, Mesorhizobium loti MAFF303099
MAGNGVASIGECMLELSGQTGPNWCMGFAGDTFNTLWALHALSEDRPATYVSAFGDDPFSQGQIGFFAENGIGIGSSPVIPGARPGLYAITLTGAERSFTYWRGDAAARQLASDPAALSKNLENQALVYFSGITLAILDDASRKTLLEAVTKARAAGSLIAFDPNYRPRLWRNRESAQAAIVEALGVTDVALPTFPDEQMLFGDETPRATAERLGQWVGEVIVKNGEQPALIAESGTLHDVPAIHVAAPVDTTGAGDSFNGGYLAARLAGHGPQEAASRAHRVAAAVVQVRGALAPFETLRAAFDS

SEQ ID NO: 29473 - protein, 485 aa, Mesorhizobium loti MAFF303099
MLQKTSHFMRQANLINGEWVQADSGQTVDVNNPATGLKIGTVPKSGKAETRRAIEAADAAFKTWRKTTALERSKLLRKLHDAMMDNQDVLAELLTIEQGKSLFESKGEIGSAAAYILWFAEEGRRTYGDVVPSPWADRRILVTKEPVGVIAAITPWNFPSSMLARKLGPALAAGCTAVVKPASQTPYSGLAWGALAEEVGFPKGVVNILTGSASEIGDEICANPLVSKITFTGSTEVGKLLIQKSSVTVKKVSMELGGNAPFIVFDDADIERAVAGAITAKYRNSGQTCVCTNRFLVQAGVYDKFVEKLAAASNGLKVGSGLEEGVQQGPLIDEKAVEKVEELIADATSKGGKIVAGGKRHALGGSFFQPTVIANATPKMRFMKEEIFGPVAPVFKFETEAEAIALANDTEFGLACYFYTGDLGRAFRVMEGLKYGMVGVNEGLITTPEAPFGGVKESGLGKEGGHQGIEDYLDTKYVCIGGLGL

SEQ ID NO: 29474 - protein, 387 aa, Streptomyces avermitilis MA-4680
MSVGTSGAQKAPRAQDVRGTPASRRGDLAELGIDPDELPDGLVVADEHGRVICFNAAAARITAVSAADALGQRLERALPLEDLEGRRWWQLTDPYGGLAIRVAQPERNLLLPGGREVLVSVRYVRTRPTGPVRRLVVSLRDTEARRRTERSHAELIATVAHELRSPLTSVKGFTATLLAKWERFTDDQKKLMLETVDADANRVTRLIAELLDISRIDSGRLEVRRQPVDIGAAVGRHIQAYVAAGQPADRFLLRIEQPLPALWADPDKIDQVLSNLLENAVRHGEGTVTIDVTPSASPRERTDDEGTAHAATSVTVSDEGPGIPEESMNRVFTRFWRGSKRGGTGLGLYIVKGIVEAHGGGITVGRAPGGGAEFRFTLPVATPAYLL

SEQ ID NO: 29475 - protein, 370 aa, Candida albicans SC5314
MNSDSISQVFEYLNKRDECPTDNDYNGNIGTRISSIFVIMVTSAIGTLLPLLSSKYSFIRLPPMVYFICKYFGSGVIVATAFIHLLEPAADSLGNECLTGPITEYPWAFGICLMTLFFLFFFELLAYQGIDRKIAKESQLDNQGPHTHSHFGDASMYVKKDDEEEDLENQNEKQADANPYPSHFAHAQEHQDPDVMGTTVNDQSKEQYYGQLLGVFVLEFGVMFHSVFIGLALAVSGDEFKSLYIVLVFHQMFEGLGLGTRIATTNWARHRYTPWILAICYTLCTPIAIAVGLGVRKSYPPGSRRALITNGVFDSISAGILLYTGIVELMAHEFLYSGEFKGPGGFKNMLLAYFVMCWGAGLMALLGKWA

SEQ ID NO: 29476 - protein, 531 aa, Zea mays
ESPLVSRYSQHRESMEPAYVVTLSFLFLFLLHHLLGRHRRRTNGKNKRTQLPPSPPAIPVLGHLHLLRKPIHAALARLAERYGPVFFLRLGSRQAVVVSSAACATECFTENDVCFANRPRFPTLLLVSFGGATLPMCRYGPYWRNLRRVATVQLLSAHRVSCMLPVISAEVRAMARRMYQSAAAAPAGAARVELKRRLFELSHSALMETIARTKTSRAVADDDTDMSPEAQEFMKALDVFLPLLSGANAWDYLPVLRWLDVFGVRNKILRAVSARDAFLRRLIDAERRRLEEGGENNDKKSMIGVLLSLQKSEPEVYTDTMIMALCSSMFAGGSETTATTAEWAMSLLLSHPDVLKKAQAEIDASVGHSRLLGADDLPRLGYLHCIISETLRLYPVVPTLVPHESTADCTVGGHRVPSGTMLLVNVYAIHRDPAIWADPAAFRPERFEDGRADGLFVMPFGMGRRKCPGEALALRTLGLVLGTLIQCFDWDTVGGAEVDMAEGGGITLPRAVPLEAICKPRHAMLGVLKGL

SEQ ID NO: 29477 - protein, 447 aa, Nocardioides sp. JS614
MEGSRVSRATTPQSKLERVTDSLTVRDNRTGQEYEVPITDGTIKAADLGQIKAEEDAPGLAVYDPGFVNTASCRSSVTFIDGDKGVLEYRGYPIEQLAEKSSFLEVAYLLVHGSLPTRAEYEAWVHEITYHTFVHENVKEFMQGFRYDAHPMGMLMASVGALSTFYPDARNISDADNRHMQIVRMIAKMPTLGAWSFRHAQGKPFVYPDNELGYTANFLSMLFKMSEHRFEADERLVKALDVLFILHADHEQNASTNAVRSVGSTQVDPYSAVAAGVGALYGPLHGGANEAVLRMLRRIGTKENIPSFIQGVKDGNERLMGFGHRVYKNYDPRAKIIKKSAEDVFEVTGTNPLLDIALELEKIALEDEYFVKRRLYPNVDFYSGLIYEAFQFPPEMFTVLFAIGRTPGWLSQWLELVQDKEQKIARPKQIYTGERGLDFVPAAERWA

SEQ ID NO: 29478 - protein, 617 aa, Armoracia rusticana
MTTNKKTIVWFRRDLRIEDNPALAAAAHEGSVFPVFIWCPEEEGQFYPGRASRWWMKQSLAHLSQSLKALGSELTLIKTHNTVSAILDCIRVTGATKVVFDHLYDPVSLVRDHTVKEKLVELGISVQSFNGDLLYEPWEIYCEKGKHFTIFSSYWKKCLDMSIESVMLPPPWRLRPITAAADAVWACSIEELGLENDAEKPSNALLTRAWSPGWSNADKILNEFIDKQLIYYAKNSKKVVGNSTSLLSPYLHYGEISVRRVFQCARMKQIIWARDKNSEGEESTDLFLKGIGLREYSRYICFNFPFTHEQSLLSHLRFFPWDTDVDKFKAWRQGRTGYPLVDAGMRELWATGWMHNRIRVIVSSFAVKFLLLPWKWGMKYFWDTLLDADLECDILGWQYISGSLPDGHELDRLDNPAIQGANFDPEGEYIRQWLPELVRLPTEWIHHPWDAPLTVLKASGVELGTNYAKPIVDIDTARELLTKAISRTREAQIMIGAAPDEIVADSFGALEGNTVKETGLCPSVSSNDQQVPSAVRYNGSKRVKHVEEEERDMKKSRGFDEVMREERDLFSTAESSSSSTTVRFLVSHSCSLVSEGKNLEGIQDPSDQITTKLGKNG

SEQ ID NO: 29479 - protein, 217 aa, Brassica napus
MSKLQSEAVREAISSMITHCKETKPRKFTETIELQIGLKNYDPQKDKRFSGPVKLPHIPRPKMKICMLGDAQHVEEAEKIGLESMDVEALKKLNKNKKLVKKLAKKFHAFLASESVIKQIPRLLGPGLNKAGKFPTLVSHQESLESKVNETKATVKFQLKKVLCMGVAVGNLGMEEKQIFQNVQMSVNFLVSLLKKNWQNVRCLYLKSTMSPPTRVF

SEQ ID NO: 29480 - protein, 154 aa, Triticum aestivum
  misc_feature (129)..(129): Xaa can be any naturally occurring amino acid
  unsure (1)..(154): unsure at all Xaa locations
MSMVRRSNVFDPFADLWADPFDTFRSIVPAMISGNNNNDETAAFANARVDWKETPEAHVFKADLPGVKKEEVKVEVEDGNVLVVSGERTKEEEDKNDKWHRVERSSGKFVRRFRLPEDAKVEEVKAGLXNGVLTVTVPKAEVKKPEVKAIEITG

SEQ ID NO: 29481 - protein, 325 aa, Malus x domestica
MSSGAGKVVCVTGASGYIASWLVKLLLQRGYTVKASIRDPNDPTKTEHLHALDGAQDRLQLFKANLLEEGSFDSAVEGCEGVFHTASPFYHDVTDPKAELLEPAVKGTLNVLNSCAKSPSIKRVVLTSSIAAVAYNGKPRTPDVVVDETWFTDPDVCKESKLWYVLSKTLAEDAAWKFVKEKGIDLVTINPAMVIGPLLQPTLNTSAAAVLNVIKGARTFPNASFGWINVKDVANAHIQAFERPTASGRYCLVERVAHFSEVVRILRELYPTLQLPEKCADDKPFVPTYQVSKEKAKSLGVEFIPLDVSLKETVESLKEKGFVNF

SEQ ID NO: 29482 - protein, 1749 aa, Arabidopsis thaliana
MEQLRPFFLLLAIFVASLVNAEVHFHEFVIQETPVKRLCRVHNSITVNGQFPGPTLEVRNGDSLVITAINKARYNISLHWHGIRQMRNPWADGPEYITQCPIQPGGSYTYRFTMEDQEGTLWWHAHSRWLRATVYGALIIRPPLSSPHYPFPVIPKREITLLLGEWWDRNPMDVLNLAQFTGAAPNISDAFTINGQPGDLYRCSSQETLRFLVGSGEIVLLRVINSALNQELFFGVANHKLTVVAADASYTKPFSTNVIMLGPGQTTDVLLTADQPPAHYYMAAHAYNSANAAFDNTTTTAILKYKDASCVTLQAKSQARAIPAQLPGFNDTATAAAFTAQMKSPSKVKVPLEIDENLFFTVGLGLFNCPTPNTQRCQGPNGTRFTASINNVSFVFPKQNSIMQAYYQGTPTGVFTTDFPPTPPVTFDYTGNVSRGLWQPTRGTKAYKLKFNSQVQIILQDTSIVTTENHPMHLHGYEFYVVGTGVGNFNPNTDTSSFNLIDPPRRNTIGTPPGGWVAIRFVANNPGAWLMHCHIDSHIFWGLAMVFLVENGEGHLQSVQSPPLDLPQWYYSTTRPLVLVCPKRKIHLYYQTYNNACSFVQLNLTEHFSSRRDTNIVTFAAMASALECWTTRNAAGGCADDDFVDQVLMSSEDRSESLTAPPPSDQTSSAMQKRFQRLGRNVSDAIASLKNSLNLDSSRDNQNAATGGGRKLVWATVVRNLAKMYPGSQLPDKLVSNLRKHYDSLPLSYSQTGFDMKDVFVHIKLIEQAFGDDNPVFVIQEVCDEEADDQGSVFKLTFACTCSLPWSTISGSLDGALICCKKVQIFEKKGLTLGVVLLLVESGQEKMFKVKVVNALRSAVRKPKSTSVKLPFGLCGCEEQNAGVGEFGDVDVESIDQCYRHELDDLNTRIQLQMPPPSSSFSVSVDEWQTIQSGGDDIRKWLLNSDDLEFSGQLGPNSFKGVYRGTKVAIEKLKGCEKGNSYEFAIRKDFLELMTCGHKSILQFYGVCIDENHGLCVVTKLMQGGSLRELVLKKKKLQTKLIFQIAVDIAEGMKFINDHGVAYRDLNTQRILLDKQCNACLGDLGIVTACKSVNEAMEYETDGYRWLAPEIIAGDPEKTRESWMSNAYSFGMVLWEMVTGEEAYGSCSPVQAAVGIAACGLRPDIPKECPQVLKYLMIKCWNTCPSTRLNFSQIHCILLRAISRLLRPAFFIFFFLFFLPHNLTFGLCFNTEALALMKFKERIEIDPFGALVNWGELSHCSWSGVVCSHDGRVVILNLRDLSLQGTLAPELGNLTHLKSLILRNNSFSGKVPEEVTELQELEILDLCDNNFGQPFPFARRLLQISPPPSQPSPPSPMEEVPIDFPFFFAPPPQNIGASPPTETQVIPNPSPVPPPPAQPPPAQTPPPQLSEVPHAVNKKKSHKSKMYIIVGVLVGVLGVMAALVAFFFLWNQKVKLIKPWGETGSSGQLQDVVTTGVPKLKLAELETACEDFSNIIGSTSSDATIYKGTLSTGSEIAVLAVASGSLQDWSEDHETQFQEKRLSQVNHKNFLNVIGYCHEDEPFNRMLVFEYAPNGSLFEHLHDQDAEHLDWPMRLRIVMGIAYCMEHMHNLNPKPISHTNLNSSSVYLATDYAAKVSDFTFLSSTPLDPMTNVSSFGALLQEIITGKIPDPDSLLQEETKPVADPTLKSFQEEVMERVWEVVKECLSQKVEMKEVVVKLREITGITPEAALPSRSPAWWAELEIISTEM

SEQ ID NO: 29483 - protein, 396 aa, Haloarcula marismortui ATCC 43049
MHIDTAVVLAAGEGTRLRPLTRNRPKPMLPAANRPILEHVFDALVEAGIEKLVVVVGYKRDRVQDHFGPTYRGVPISYVSQTKQLGSGHALLQARSVVDGPVLVMNGDRLVDAATIEEVDTSYAETGNTSIAVLERQDTSRYGAVEVQDRDIVDIVEKPQHDEFRLINGGVYAFDGDIFEAIDETTRHAGELALTDTIELLLESDRVQAVEVDGMWVDATYPWDLLTVAREVLARGRVVESARDEQVWVDNSARVHDEATLQSPVVIGPDCEIGPDAVIGPNVALGRNTTIGANSVIQHTVLDADTRVDPSSTLIDTVTGQDVDLGVNTVVPGGPADVQVGTEVFEDQRLGAVIADRAVALGDVSFVSGSLVGPNARLATGVTVNGTVREGAEVVR

SEQ ID NO: 29484 - protein, 509 aa, Mycobacterium avium subsp. paratuberculosis K-10
MAATKASPATDGPVKRTATKSPSSPAKRPAAKAANGSAPAKRATKTASRSAKSEAGAAAEPAKKTRSSAKGADAKAPSARGTKAAKGGPADPDALDTDGAVEDLDTEPDLEGEPGEDLDIDTDLNLDDLEEDVAADDADIEPGDAEEGEDEEAAAPKAAGATVADEDDEIAEPSEKDKASGDFVWDEDESEALRQARRDAELTASADSVRAYLKQIGKVALLNAEEEVELAKRIEAGLYATQLMSEMAERGEKLPAAQRRDMMWICRDGDRAKNHLLEANLRLVVSLAKRYTGRGMAFLDLIQEGNLGLIRAVEKFDYTKGYKFSTYATWWIRQAITRAMADQARTIRIPVHMVEVINKLGRIQRELLQDPGREPTPEELAKEMDITPEKVLEIQQYAREPISLDQTIGDEGDSQLGDFIEDSEAVVAVDAVSFTLLQDQLQSVLETLSEREAGVVRLRFGLTDGQPRTLDEIGQVYGVTRERIRQIESKTMSKLRHPSRSQVLRDYLD

SEQ ID NO: 29485 - protein, 448 aa, Guillardia theta
MREVLSIHIGQAGIQVGNACWELYCLEHGINPDGSIIQDFNKKKNDDAFSTFFSETSTGKRVPRCVFLDLESGVIDEVKNGRYKNLYHPEQLICGNEDAANNYARGHYTIGKEIIEIALDRIRKLVENCSGLQGFLIFNSVGGGTGSGLGSLLLERLSLDYGKKSKLGFTVYPSPQVSTAVVEPYNSVLATHSLLEHTDVAVVLDNEAIYEICQRSLNIERPTYTNLNRLIAQVISSITASLRFDGALNVDITEFQTNLVPYPRIHFMLSSLAPVISLEMANHEQYSTAEITNAAFEPNSMMAKCDPRRGKYMACCLMFRGDVAPKDVNGSVAAIKTKKTIQFVDWCPTGFKCGINYQPPTVVPDGDLAKVDRAVCMISNSTAISEVFSRINKKFDLMYSKRAFVHWYVGEGMEEGEFNEAREDMAALEKDYEEVGSESQDLISNSFF

SEQ ID NO: 29486 - protein, 267 aa, Acinetobacter sp. ADP1
MSRLATRFEQLKSQQRKALVSYVMAGDPQPQVSVPLLHKMVEAGVDVIELGLPFSDPMADGPVIALAAERALAAGTNTLDALNMVKEFRQNDSETPVVLMGYLNPVEVIGYEKFVSHAKACGVDGVLLVDLPPEEAKEFDVVLKQHDMDQIFLLAPTSTDQRIEHVVKQASGFIYYVSLKGVTGAATLDVTEAAERIAKIKTKTSVPVGVGFGISDAASAKAMGQVADAVIVGSAFVKPFATLAIDQAVEQTVNKVKELRAALDELV

SEQ ID NO: 29487 - protein, 251 aa, Haloarcula marismortui ATCC 43049
MKAVVLAAGEGTRLRPLTEDKPKGMVEVAGKPILTHCFEQLIELGADELLVVVGYKKQAIINHYEDEFDGVPITYTHQREQNGLAHALLTVEEHVDDDFMLMLGDNIFEANLQDVVNRQAEERADAAFLVEEVPWEEAGRYGVCDTNKYGEITEVVEKPEEPPSNLVMTGFYTFTPAIFHACHLVQPSNRGEYEISDAIDLLLHSGRTIDAIRMDGWRNDIGYPEDRDQAEERLQGEINPEIAAENIAASE

SEQ ID NO: 29488 - protein, 1039 aa, Rhodospirillum rubrum
MDRSNDLAGTLPAPPSVPGPAEDGQSMPIFRWIWRSYLRSALIPLVFIELVFLAIYLLSHQISTSRTLESFGSAVENEFYGAAEREAALLSERLAALGTTASVFAHQAARVLSTPCQPAPRERARLALGANGVLYSTGAPEGSAALFYSGIIPVGPAQIDKAVCSAALDPLMRDISAVEPLVDQIYVNTWDSMNRIYPPIDVLSQYAPHMDIPSFNFFYEADQEHNPERKVVWTDVYLDPAGRGWIASAIAPAYRGTILEGVVGLDVTVGTFIDRVLAAELPFDAYGLLLDRNGGILGAPKVAGEDWGAKPLTEATYGGAITKDTFVDPAFNLFARAEPADLLAALQSQSNGVRPVTLAGKQKVVAWAKVASTGWTYLMVADRDTVFGDILRLDRLFTVIGYLMAGGLLVFYLGFLAFLYIRVREMSVRLSGPLSALNAMIRRIASGSYFQTAPAFDVRELDETGREVAAMGDRLGRANEELIANREELVRARDAAQAAARAKAEFLATMSHEIRTPMNAVIGMTGLLLDGPLEPRQIDYARTIQRSGEHLLGLINDILDFSRIDTGRLVLVDRDFSLSHEVQAVVSLCGVAASAKRLSVRIDLDRALAPGYRGDSQRLRQILVNLVGNAVKFTDKGMVTVQGDVLKIENDIHWLRLRVVDTGCGIPRERFNDLFAAFQQLDGSATRTHGGTGLGLAISRKLARLMGGDITVSSTPGEGSVFSVVVPMVPLSRTPAPDGTLGDGDAERGEEPPAADVPTEAAASRALVVLVAEDILENQILVQAVLEKQGHRVILAANGREALAKLRGADPVDVVLMDIQMPVMDGLDACRAIRGLPPEVHFSDGRPIAGVPIIAFTADALPGDRERFLSAGMNEHLAKPLNARRLRALLGDIAAGRPLTPRSSAAPSPRKSLEAPRRLLDPEALAQLRTSLGEDYPIYLRAAEEALRHRARALPEALARGAFEEASQLLHGLRGTLAAFGMEAEATLCQRLRGDLAGGAGIAIRVEARKLADQALAAADEVRGHRGLPSIDPRAPTPL

SEQ ID NO: 29489 - protein, 150 aa, Apium graveolens
MADQLTDDQISEFKEAFSLFDKDGDGCITTKELGTVMRSLGQNPTEAELQDMINEVDADGNGTIDFPEFLNLMARKMKDTDSEEELKEAFLVFDKDQNGFISAAELRHVMTNLGEKLTDEEVDEMIREADVDGDGQINYEEFVKVMMANV

SEQ ID NO: 29490 - protein, 316 aa, Mycobacterium avium subsp. paratuberculosis K-10
MLALGGVIGAGLFVGSGVVIKDTGPAAFLTYALCGLLIVLVMRMLGEMAAANPSTGSFADYAAAALGRWAGFSVAWLYWYFWVIVVGFEAVAGGKVLNYWFHAPLWVLSLGLMLLMTATNLFSVSSFGEFEFWFAGIKVATIVIFLAVGAAYVVGLVPGHHDGLTNLVSHGGFFPRGVGAVFAAIVVVIFSMVGAEIVTVAAAESRDPRRAVQKATRSVVTRIGIFFVGSVFLLVAILPWDSVELGASPYVAALKHLGLAGADQVMNAVVLTAVLSCLNSGLYTASRMLFVLAERGEAPARLVRLSGRGVPHIAIL

SEQ ID NO: 29491 - protein, 445 aa, Mycobacterium avium subsp. paratuberculosis K-10
MGSSDQATAHARAQAASARLFDDACAVIPGGVNSPVRAFTAVGGTPPFITAARGCRLTDADGNHYVDLVCSWGPMILGHAHPAVVEAVAKAAASGLSFGAPTPAESELAAEMIARVAPVERIRLVNSGTEATMSAVRLARGFTGRAKIVKFSGCYHGHVDALLADAGSGVATLGLPSSPGVTGATAADTIVLPYNDIDAVRQAFTEFGDQIAAVITEASPGNMGVVPPAPGFNAALRALTADHGALLIVDEVMTGFRVSRSGWYGIDPVDADLFTFGKVMSGGLPAAAFGGRAEVMERLAPLGPVYQAGTLSGNPVAMAAGLATLRHADAAAYAALDANADRLARLLSDALTNAGVPHQIPRAGNMLSVFFTDTPVTDFASARATQTWRYPPFFHALLDAGVYPPCSAFETWFVSTALDDDAFDRIAAALPAAARAAAGADEGNS

SEQ ID NO: 29492 - protein, 1174 aa, Cochliobolus heterostrophus
MANVEETVANVQRKIDREKALINAANAMRQSTNNPAVLSRLDGQIKDGRRNIDYFESKLRDLDLQRTTSGVDNMSLQPGRSPTNPLTPPPKDNWDGYAQQDQGGYGGPQSQYSQLSGGEALQPPRAPFAAPPPATANKRPNYSKLDLIKYDTPHLGPRIQLMLTQLEFKLSVEKQYKDGIEKMVRLYQMEGDRKSKQDAEAKRIESNQKIQLLKHSLKRYEDLHVDIDGDGDDNDSLDIPSQRKPLSGQLSLRIHAVADVDHAATGRFSRGPETFVNIKVEDTIKGRTKPTRNDRWTDEVHDFSIDKANEIEITVYDKTGDHLLPIGMLWVRISDIAEEMRRKKLETELANSGWVAADKMGGHTGIQPDMQFQPPPGQSPAGGPGGGPTPAGVRPPGAPQPQTGPIMIDDWFSLEPVGRIHLTMSFIKNTGNKQPFDLGLGRKGAVRQRKEDVVEQYGHKFVQQQFYNVMRCALCAEFLKYAAGMQCSDCNYTCHKKCYPKVVTKCITQSNAETDPDEAKLNHRIPHRFENFSNMGANWCCHCGYVLPLGRKQTKKCNECGLTCHAHCVHFVPDFCGMSMEVANQILMEIKRTRRGQSSSGPGMSQRTLRPQSAAKPLPPTQPQSPGQPGQESPTQSDRYSYGKEQMSPPPGPPRQPSYPSSATSVDAARASYSTTGTASTGAPTSPTSGSRPPSGPRTQSSVAAAAAAMNKATQPGYGRSNTDYSPQSGRSSGSGYPTEQRMSQQQAPQPAAYDPSVYANIPSYPPSHQQPAPVPSYPTKSSYPLPQPPPPQSPPQHPQQPTPSQQKMPEQQALTQQPPSAVGEVPGKKVTPAANTQGTGKRIGLDHFNFLAVLGKGNFGKVMLAETKTTKQLYAIKVLKKEFIIENDEVESTRSEKRVFLIANKERHPFLLNLHACFQTETRVYFVMEYISGGDLMLHIQRGQFGTKRAQFYAAEVCLALKYFHENGVIYRDLKLDNIMLTLDGHIKVADYGLCKEEMWYGSTTSTFCGTPEFMAPEILLDKKYGRAVDWWAFGVLIYQMLLQQSPFRGEDEDEIYDAILADEPLYPIHMPRDSVSILQKLLTREPEMRLGSGPTDAQEIMSHAFFRNINWDDIYHKRVQPPFIPQITSPTDTSNFDTEFTSVTPVLTPVQSVLSQAMQEEFRGFSYSADFA

SEQ ID NO: 29493 - protein, 733 aa, Bordetella pertussis
MAAEKAPAKTAVKVAKPAAKTAAKKTATKTVAAKTAAADKPAKTTKARAKKAEDKLADLVGAARPAPSGRRPGRPAKNANNDSDAFDDSMDGEGEVLPDLKPPKRGGKRGKADPKDLIARGPVSPEEYEARRNRLKQLIKLGKDRGYLTYGEINDHLPDDLVDAEAIDGIISTFSDMGIAVYDQAPDAETLLMSENAPVASNDDDVEDEAEAALTTVDSDFGRTTDPVRMYMREMGSVELLTREGEIEIAKRIEDGLKHMVMAISACPTTINEILAHITRVREGQAQIDEVVDGLVDPEDGEEYAGAGVTADEDEGDDGPAGGMSSKQLEDLRVKALAKFDEVSKQFEKMRQSYEKEGYKSDAYLKAQDIIQTELMGIRFTAKMVEKLADTLRAQVEEVRQLERAVLHTCVDRAGMPRSHFLKAFPGNETNLQWVLDEVAAAHAYSETLERQIPAVQELQQKLIDLQTRVVLPLKDLKDVNKRMATGEAKARKAKREMTEANLRLVISIAKKYTNRGLQFLDLIQEGNIGLMKAVDKFEYRRGYKFSTYATWWIRQAITRSIADQARTIRIPVHMIETINKMNRISRQILQETGAEPDPATLAQKMDMPEDKIRKILKIAKEPISMETPIGDDDDSHLGDFIEDTATLAPSDAALHGSMRDVVKEVLDSLTPREAKVLRMRFGIEMSTDQTLEEVGKQFDVTRERIRQIEAKALRKLRHPSRADKLKSFLEGQ

SEQ ID NO: 29494 - protein, 220 aa, Leuconostoc mesenteroides subsp. mesenteroides ATCC 8293
MAAKLVLVRHGESTANRDNEFTGWTDVPLTLKGVRQANRVGEVLKRHGLQFDVSFTSFLKRAIITDNIILEEIEQLWLPLHKAWQLNERHYGALRGLNKDYARQQYGANKVALWRRSYTATPPLLEHVIPDRRYPEDLEPRGESLKMASDRLVPYWHSEILPQIQQDKNVLIVAHGSSLRALVKYIEHISDEDIDGLEIDNGEPILYEYEEGFSERIYLE

SEQ ID NO: 29495 - protein, 185 aa, Glycine max
  misc_feature (11)..(11): Xaa can be any naturally occurring amino acid
  unsure (1)..(185): unsure at all Xaa locations
MQIFVKTLTGXTITLDVEPSDSIENVKAKIQDKEGIPPDQQRLIFAGKQLEDGRTLSDYNIQKESTLHLVLRLRGGMQIFVKTLTGKTITLDVEPSDSIENVKAKIQDKEGIPPDQQRLIFAGKQLEDGRTLSDYNIQKESTLHLVLRLRGGMQIFVKTLTGKTITLDVEPSDSIENVKAKIQDK

SEQ ID NO: 29496 - protein, 580 aa, Photorhabdus luminescens subsp. laumondii TTO1
MSNIEIIQREIITIFAETFGLSKEEIKLEIPLVELGAESLLLFEALEPIHKQFGVKLSVRQFFAELQTVRQLSEYILMVGKNRVVEDNHSVTQPVLSDQEKRSEQSDTSDIPPINKERFFQWMLRSAPSIESEERKKYLASFISEYNERTIKSKIHSVAVRKNIADSRSGIGFKLSIKELLYPIVCTKFAGPVVKDIDGNDYIDMTMGFGAHLFGHSPPFVVKALTQQIDNSFGLGTRHEIGLEVAELIKEITGMDRVAFVNSGTEAVMNAVRAARALTRRNHIVLFSSSYHGHWDAVLARAGDYDEANATKPVSVGIPENMVADVSVFGFGSNEAIEFLKTNRTDIAAVLVEPVPTRDPGLSNPDYLRHLRRVTRELDILLIFDEIVTGFRSHPAGIQGLFGIEADIVIYGKTIGGGMPLGVITGRKKMLDSIDGGNWNFNDDSFPAAEPTFFGGTYFQHPLCMTAAKATLQEIKRRGETFTKVLTQRTESFVSRLNQLFLSRRVPIEARSFSSFFRLMHRDNMDLLYYNLLMRGVYIWEWRCWFISDAHDDTHLEKVYLAFVDSLDELEENNLLPRYS

SEQ ID NO: 29497 - protein, 96 aa, Triticum aestivum
  misc_feature (31)..(31): Xaa can be any naturally occurring amino acid
  misc_feature (38)..(38): Xaa can be any naturally occurring amino acid
  misc_feature (44)..(44): Xaa can be any naturally occurring amino acid
  misc_feature (46)..(46): Xaa can be any naturally occurring amino acid
  unsure (1)..(96): unsure at all Xaa locations
MEDDKKEGKYRGVRKRPWGKFAAEIRDPERXGSRVWLXTFDTAXEXAARAYDRAAFAQKGANAILNFPGEGGEEWGVFFRAAQRGPRKGRPLKRGG

SEQ ID NO: 29498 - protein, 300 aa, Bacillus halodurans
SFMSELSNYIGPDIDVPAGDIGVGAKEIGYMFGQYKKMRGGFEAGVLTGKGIGYGGSLARKEATGYGTVYFVEEMIKDHGFSFAGSTVVVSGSGNVSIYAMEKAMQLGAKVVACSDSGGYVYDKNGIDLQTVKRLKEVERKRISEYVNEHPHAHYVQGCSGIWSVPCDIALPCATQNELDEAAATMLIANGVKAVGEGANMPSTLQAVHTFQEHGVLFAPAKAANAGGVSVSALEMAQNSTRLAWTFEEVDAKLYEIMKNIYRESIKAAELYEASGNLVVGANIAGFVKVADAMISHGVV

SEQ ID NO: 29499 - protein, 417 aa, Nocardioides sp. JS614
MNDQPTSPPPGPPNPYFSTPAPLGPPPQGPPPGVAPDPQPGQRRPRRTGLAAAVVATALVAGGAAGVGGAAAWSALDDGGSSSAGGPSSRTTAQVVDTPDSEAPAGSVEQVAAKVLPSVVKIDVAGAQGAGSGSGIILSSDGEILTNNHVVELAGDNGSIRVSFNDGSTAKAEILGTDPLTDTAVIKAQDVSGLTPATIGKSGDLKVGESVVAIGSPFGLDSTVTSGIVSALDRPVDVGSDGQGNSTTYPAIQTDAAINPGNSGGALVDLDGNVVGINSSIRTASSMEGQAGSIGLGFAIPMDEVMPIVDQMVNGETPTHARLGISVSDVASRPGAEVTEGAEVQDVNAGSTADDAGLAKGDIITKVDDQLISGADSLVATIRSYRPGDEVTVTYEHGGDTKTVTLQLDSDADTSNS

SEQ ID NO: 29500 - protein, 341 aa, Sinorhizobium meliloti 1021
MKAAVLVEPRRFEVREVGIPEIGPADVLIRVTRAGICGTDLHIFNGHYAADRLPIVPGHEFCGTIAEIGASVTHLKTGMRVVADINIGCGNCYWCRRNEVLNCGEVEQIGIGRDGAFAQYVALPGRLVLPVPDGVPEAVLALVEPVACVVRAARKAGAAFGRSGVVLGAGPIGNLHVQMMRLVGMAPIIVADLSSERCRMAVEAGADAAVSEPATLRSKVLEMTGGRGADFVVESVGSSKLYRQAFDLVRKGGHVAFFGITPPGETIPIEILRTVLEENSLKGSVAGMGEDMHDALTLLSHGRFRTAAFTAAHYPLERIQEAFETIPARTGHLKTQILLDA

SEQ ID NO: 29501 - protein, 185 aa, Brassica napus
RVIFHINYLGADQPTFTLNFSKGSSQIIAQYYQLIRLGFEGYKNVMQNCRENMLVLKEGIEKTERFNIVSKDVGVPLVAFSLKGQSFHSEFEISEMLRRFGWIVPAYTMPADAQHITVLRVVIREDFSRTLAERLVADILKVLHELDTLPSKISRKMGAEDFGNVKGKKVERDILMEVIVGWRKV

SEQ ID NO: 29502 - protein, 1064 aa, Shewanella sp. MR-7
MEAITMFKASEVLAGRYDSANLDELFKAVTDNYIVDEEQYLSELIKLVPSSDEAIERVTRRAHELVNKVRQFDKKGLMVGIDAFLQQYSLETQEGIILMCLAEALLRIPDAATADALIEDKLSGAKWDEHLSKSDSVLVNASTWGLMLTGKIVKLDKKIDGTPSNLLNRLVNRLGEPVIRQAMMAAMKIMGKQFVLGRTMKEALKNSEDKRKLGYTHSYDMLGEAALTRKDAEKYFNDYANAITELGAQSYNESESPRPTISIKLSALHPRYEVANEDRVLTELYDTVIRLIKLARGLNIGISIDAEEVDRLELSLKLFQKLFNSDATKGWGLLGIVVQAYSKRALPVLVWLTRLAKEQGDEIPVRLVKGAYWDSELKWAQQAGEAAYPLYTRKAGTDVSYLACARYLLSDATRGAIYPQFASHNAQTVAAISDMAGDRNHEFQRLHGMGQELYDTILSEAGAKAVRIYAPIGAHKDLLPYLVRRLLENGANTSFVHKLVDPKTPIESLVVHPLKTLTGYKTLANNKIVLPSDIFGSDRKNSKGLNMNIISEAEPFFAALDKFKSTQWQAGPLVNGQTLTGEHKTVVSPFDTTQTVGQVAFADKAAIEQAVASADAAFATWTRTPVEVRASALQKLADLLEENREELIALCTREAGKSIQDGIDEVREAVDFCRYYAVQAKKLMSKPELLPGPTGELNELFLQGRGVFVCISPWNFPLAIFLGQVSAALAAGNTVVAKPAEQTSIIGYRAVQLAHQAGIPTDVLQYLPGTGATVGNALTADERIGGVCFTGSTGTAKLINRTLANREGAIIPLIAETGGQNAMVVDSTSQPEQVVNDVVSSSFTSAGQRCSALRVLFLQEDIADRVIDVLQGAMDELVIGNPSSVKTDVGPVIDATAKANLDAHIDHIKQVGKLIKQMSLPAGTENGHFVSPTAVEIDSIKVLEKEHFGPILHVIRYKASELAHVIDEINSTGFGLTLGIHSRNEGHALEVADKVNVGNVYINRNQIGAVVGVQPFGGQGLSGTGPKAGGPHYLTRFVTEKTRTNNITAIGGNATLLSLGDSDA

SEQ ID NO: 29503 - protein, 157 aa, Brassica oleracea var. alboglabra
MSLIPSFFGGRRTNVFDPFSLDLYDPFEGFLTPSGMTNTTSKDVAAFTNAKVDWRETAEAHVFKADLPGLKKEEVKVEVEDGNILKISGERSSENEEKSDKWHRVERSSGKFMRRFKLPENAKVDEVKASMENGVLSVTVPKMPERKPEVKSMDISG

SEQ ID NO: 29504 - protein, 1017 aa, Shewanella sp. MR-4
MAPLSLSRSSLTGRLMLAFGVLGVLLLLLVSLGSLSLHWLKQADSYLYEESLPASQAARQLVQASNALSDGVTQLGQVEDERQREFIGRKLSLESATMLNSIKVLLTLDVNEDNHLSVLAGQIIEQLTLLGKSVGQRITLGDELQLRARELSVAAGHASELLQSELAVVDSAILAKLSQSYPDMAGDKRSGQLLDDVIERELDVQEQLNRALKLVHQIALLSQLFEASELQSELQLSVPRLLATFASTTPSHPAAQSKPVLGTAIEQASSAVTQPPRGDVGIDLMALTTVSELIRDPGRLKALKAELAILLHTPKIIKLQRELSQSLQRQQRQQQELAEKLYSLNTLVDSALNQQQQRAELARSDYLMQLSYARLGLWGTGILMLVIIGVVVYRVIYRGIALRLNQATEAMSRLSLGDTNVSLDAHGDDELTAMANAIEAFKRKTAHNLKLQADLRQVADELTEHKKALEQTVATRTQELAEANLRLDAEAKGHAKARIVAEEASQAKSQFLATMSHEIRTPLNGLLGTLTLLGHSQLPPAQQQMLALSQYSGTLLQTVLSDILDFSRLEQGNLTNEPRPTDINALLDEVLAIMVAGANLAGLSLRLNRPQLPACIQIDGPKLRQVLFNLIGNGIKFTPEGGVSLNVSVRGDKLAFVVADTGVGIAPEVREQLFMPYCVLPNQGRSRGTGLGLAICKQLVELMDAEGPGIWVKSEPGKGSEFGFELSFTQCDKALDTQTQVQKRVNPQRVLVIEDNKVNAMVAQGFLAHLGHSSSLAVSCQQALAHVSGDKAFDAVMLDIQLSDGSGLTLLPQLKALFANDNVKFAAFTAQMQTEDLSLYREAGFDTVLAKPLSLQTLTEWLGVARVPASMPALPYESSSQSAQSLQSPNQAESTSQSHQAETLLDLNQLQQDLEVLGVKAVSDILALYRCSSAEQIERLSALTSVAHFSEGAKLLHALKGSSASMGLKALTECCQQWEKTLNTTGENVLDSKVVAELTACWQVSMTALEQWLARQN

SEQ ID NO: 29505 - protein, 115 aa, Hordeum vulgare
MSCCGGKCGCGAGCQCGTGCGGCKMFPDVEATAGAAAMVMPTASHKGSSGGFEMAGGETGGCDCATCKCGTRAAAPAAAASEPAPGRPAGRGEHEDERRTSNTNQAPSPSPSYHQ

SEQ ID NO: 29506 - protein, 106 aa, Triticum aestivum
CTTSTPYPEKSVCVVTGLPAKYRDPKTGLPYATMAAFKIIRESFLKEESDKKRPNMSNMGELFESVAGEHSTPKKKRIESRSPISGDLRHGGRFRRIPALDVMDED

SEQ ID NO: 29507 - protein, 332 aa, Mycobacterium avium subsp. paratuberculosis K-10
MNPMTVQAEREVAMANASTSRFDGDLDAQSPAADLVRVYLNGIGKTALLNAAGEVELAKRIEAGLYAEHLLETRKRLGENRKRDLEAVVRDGQAARRHLLEANLRLVVSLAKRYTGRGMPLLDLIQEGNLGLIRAMEKFDYTKGFKFSTYATWWIRQAITRGMADQSRTIRLPVHLVEQVNKLARIKREMHQNLGREATDEELAAESGIPIDKINDLLEHSRDPVSLDMPVGSEEEAPLGDFIEDAEAMSAENAVIAELLHTDIRSVLATLDEREHQVIRLRFGLDDGQPRTLDQIGKLFGLSRERVRQIERDVMSKLRNGERADRLRSYAS

SEQ ID NO: 29508 - protein, 471 aa, Mycobacterium avium subsp. paratuberculosis K-10
MSSPQEYDMVVIGSGPGGQKAAIASAKLGKSVAVVERGQMLGGVCVNTGTIPSKTLREAVLYLTGMSQRELYGASYRVKEKITPADLLARTQHVIGKEIDVVRNQLMRNRIDLLIGHGRFVDPHTIEVEDPSRREKITISGKYVVIATGTRPARPSGVEFDEDRVLDSDGILDLKSLPTSMVVVGAGVIGIEYASMFAALGTKVTVVEKRDDMLDFCDPEVVEALKFHLRDLAVTFRFGEEVTAVDVGSAGTVTTLASGKQIPAETVMYSAGRQGQTDHLDLHNAELEADNRGRIFVDDNFQTKVPHIYAVGDVIGFPALAATSMEQGRLAAYHAFGEASDGITELQPIGIYSIPEVSYVGATEVELTKDAIPYEVGVARYRELARGQIAGDSYGMLKLLVSTQDLKVLGVHIFGTSATEMVHIGQAVMGCGGTVEYLVDAVFNYPTFSEAYKVAALDVMNKVRALNQFRR

SEQ ID NO: 29509 - protein, 391 aa, Desulfitobacterium hafniense DCB-2
MLEKVMKAAHAIEETLITIRRDIHKQPELALQEYKTAKYIADRLRALGCEVTENVGSTGVVGLLRGRETGKTLAIRADMDALPIEEATEHGFCSATPGVMHACGHDAHIAVVLGAAEILSGLKDSLAGSIKLIFQPSEESPIGGADRMIEEGVLENPHVDAALGLHVTPELPAGQMGCKEGPFFASVAYFTIEIMGKGGHGALPQHSVNPILVAAECIQALQTIPSAQIDPMEPFVLSIGSIHGGQKSNIIPEKVTIEGTVRCFGDELMSRTGQIMENLLCSITSAYGAAYRLNFRSEVKTLINDQGMIRLIKEAGEEILGKDHTLAAQPVLLGDDFASFSQLLPSAYIYLGVGFPGQPNPPLHHPKFDLDERALPMGAALLSYTALKFLS

SEQ ID NO: 29510 - protein, 595 aa, Glycine max
  misc_feature (144)..(144): Xaa can be any naturally occurring amino acid
  misc_feature (474)..(474): Xaa can be any naturally occurring amino acid
  unsure (1)..(595): unsure at all Xaa locations
MAVDSAISSPLGPPACEKDAKALRFIEEMTRNADAVQERVLEEILTRNAQTEYLKRFELDGAADRQAFKSKIPVITYEDVQPEIQRIANGDRSPILSAHPISEFLTSSGTSAGERKLMPTIKEELDRRQLLYSLLMPVMNLYVXPGLDKGKGLYFLFVKSETRTPGGLLARPVLTSYYKSDHFKTRPYDPYNVYTSPNEAILCSDSFQSMYTQMLCGLIERHHVLRLGAVFASGLLRAIRFLQLNWPELAHDIQTGTLNSRITDPAIRSYMDKVLKSDPELAQFVTQQCSKDNWEGIITRIWPNTKYLDVIVTGAMAQYIPTLNYYSGGGLPLACTMYASSECYFGLNLNPMCKPSEVSYTIMPNMAYFEFLPHDPKPGSTSSKLVELADVEVGKEYELVITTYAGLYRYRVGDILRVTGFHNSAPQFHFVRRKNVLLSIDSDKTDESELQKGIENASKLLSEFNTSVVEYTSXDTTTIPGHYVIYWELLTKDSTNSPSHEVLNRCCLEMEECLNSVYRQCRVADHSIGPLEIRVVRNGTFEELMDYAISRGASINQYKVPRCVNFTPIMELLDSRVVSVHFSQELPHWTPERRR

SEQ ID NO: 29511 - protein, 708 aa, Oryza sativa
MPAWWPRKSRSKAKGVGKPPGAGAASAASSPRKSLDLVDLSASPSVTPRAREKARSLDSPSAAAPRHGGGRCGGGFGEVGYKLPVPVGDAGPGGQGQGQEPELEPAPVRFEENGDVVGGVAGDASSEELSVCSHDSSDEATDQQVCRSTDPASFVRGRNMPSDSHKILNEDNHFMSYSMPREHRKFFEVPVTNMGELHLHCDDLSTSETSSRGRMLPEDFLAPRTRSLSPGPKGHTFAVNNVNSREFGFSPRSPVKMMDGLKSPPHPLPLPPGPATCSPLPPSPTAYSPHPLGPTTCLQSESQWKKGKLLGSGTFGQVYLGFNSENGQFCAIKEVQVISDDPHSKERLKQLNQEIDMLRQLSHPNIVQYYGSEMTDDALSIYLEFVSGGSIHKLLREYGPFKEPVIRNYTGQILSGLAYLHGRNTVHRDIKGANILVGPNGEVKLADFGMAKHISSFAEIRSFKGSPYWMAPEVIMNGRGYHLPVDIWSLGCTIIEMATAKPPWHKYEGVAAIFKIANSKEIPEIPDSFSEEGKSFLQMCLKRDPASRFTATQLMDHPFVQDHPAVRAAKSGALRNAFAPADGTHTTSNREFSRKSITPLKDIGVSARDFTGFSTAVPSPHTASPISVVRTNMSLPVSPCSSPLRQFKQSNWSCLPSPPHPTFSNGATSYNLSSYMMNETRRIPTISDTWQDISQLKVQSPYGSPKRF

SEQ ID NO: 29512 - protein, 468 aa, Pseudomonas putida KT2440
MTDSVEKIQLTRALKSRHIFMLSLGGVIGTGLFMGSGVTINQGGPVGAILAYLVAGLLMYLVMVCLGELSVQMPVSGSFQAHATKYIGPATGFMIGWVYWMSWATTVGLEFTAAGMLMTRWFPEVPIWYWSALFVVVLFGLNALATRAFGEAEYWFSGIKVATILGFIVIGLLVIFGAIPLSSGAPAPMLNNLVGESLFPHGLSAVFAVMMTVVYAFQGCEIMGVAAGETEHPEKSIPRAVRNVVFRVLIFYVLAIAVLSAIVPHEQAGLMESPFVQVFDMVGIPYAADLMNFVILTAILSVGNSGLYASTRILWAMSKTGMAPKSLSPLSKRGVPLRALSITLCFALISLMTSFVAADTLFMVLMAVSGMSGTVTWIVIALAQYRFRKAWLRDGGQLQDLKYKAPLYPLVPLLCITLCSSLFVFLALDETQRPSLYWGFGFIALCYAAYFFVNRRRQGAFAPSTPGV

SEQ ID NO: 29513 - protein, 542 aa, Oryza sativa
METTVSLLPHLLVKPSSSFSCCFTMGIGRRYGRIKVYAVLGDDEAQHAKNNMRGALFHVDNPGPMAPIAKGNFLDVNQALEVVRFGIQYCDWRARQDLLTIMVLHNKVVEVLKSLAIEFKSNGTLRKELAELQEELAKAHNQVHLSETRASSALDKLAQADNLVNDRLLQDGGSSASIDNYVSLASRTSSASRFVNKKTLRPSLDVSGPVQPYNPNLKNFWYPVVFSGDLKDDTMVPIDCFEEQWVIFRGKDGRPGCVQNTCAHRACPLHLGSVSEGRIQCPFHGWEYSTDGKCEKMPATKLLNVRIRSLPCFEQEGMVWIWPGDGTPESTIPSLQPPSGFTIHAEMVMELPVEHGLLLDNLLDIAHAPFAHTSTFAKGWSVPSLVKFLTPASGLQGYWDPYPIDMEFRPPCMVLSTTGISKPGKLEGKSIKQCSTHLHQLHICLPSSRNKTRMLYQMSLNFAPWLKHIPFMHILWSHFGEKVLNEDLRLVLGQQERMINGANVWNWPVSYDKLGIRYRLWRDAIERGANRLPFNNQSESGS

SEQ ID NO: 29514 - protein, 1290 aa, Magnaporthe grisea 70-15
MLGISALLIVCASLGSFAAASDGVVQWHIERRQVPTPTAKLAKRVATTFEEVIQNEKSRGGYFAKCSVGGQDVTLQLDTGSSDLWVPAESACQSDRVPNGCSLGSFKKDLSSSFKVTGKDQFSIQYIDGSFARGDYFTDAFSIGGVRVINLTMGLGKQTDIPYGLAGVGYALNEAIVGGNSSNFTTYPNLPATMLNDGLINTNAFSLWLNNLDASTGRILFGGVDVAKFKGGMARIRIYEDVFSQEYMSFTVALTSLEAHSGSGQDTLTSRSFPIPVVLDSGTTLSYLPNDLAVQTWTEVGALYSAEYGQALLPCAMEDSKGYFVFGFAGPDGPKIQVEMKELVLDLTNGPAPKFTNGKYQGQDACTFGIQNFTGQTMVLGDTFLRSAYVVYDLVNHEIGIAQTDFNSTTSEIIAFPSSGAPIPSATLAPNQDQAVVKPQVTIPAFNAQPGFREGVSQATPLLKPLNKTHILLIITMSPAQSLILLQISVFECVPGRRGQANAVNGHMRTYKPVAAIIDRSLLGARSAAPRRLFSVEGSLRTARPVSSLQSATRLGHERRWFSESSRLRNLSAAQQALKAAQDAAKNLTAETVAKSMTDAEKMKLARVRNIGIAAHIDSGKTTCTERVLFYTGRIKAIHEVRGKDAVGAKMDSMELERERGITIQSAATFADWTKKENGEDATYHLNLIDTPGHIDFTIEVERALRVLDGAVLVLCAVSGVQSQTITVDRQMKRYDIPRISFVNKMDRMGANPFKAVEQINKKLKIPAAAVQVPIGAEKDFEGVVDLIHMKTIRTEGARGTNVKVSSQIPDDVKELAEEKRQELIEKLADVDDEIAEIFLEEQTPTPEQIKAAIRRATIARKFTPVLMGSALADKCIQPMLDAVCDYLPNPSEVENVALDRTKGEAPTALIPYDALPFVGLAFKLEENPFGQLTYIRVYQGSLKKGMYLFNSRNNKKIRIPRIVRMHSNEMEDVNEIGAGEICAVFGVDCASGDTFTDGNLPYTMSTMFVPDAVMSLSIKPKRSSDADNFSKAMNRFQREDPTFRLHVDEESEETIISGMGELHLEVYVERLRREYRCECETGQPRVAYRETITRRADYDFLLKRQSGGPGDYARVVGYIEPNDKSAEENFFEARVVGGNIPDKFLSACGKGFEEAARKGPLLGHRVIGTTMIVNDGATHVTDSSDYAFNLATQMAFRKAFVDAGGQVLEPLMKTTITAPNEFQGSVLMLMNKRGTVIDTEIGPDDFTLIADCSLNAMFGFSSHLRAATQGKGEFNMEFSHYAAAPPHLQ

SEQ ID NO: 29515 - protein, 706 aa, Neurospora crassa
MVIPTLTPVPKLVAKPPYTLDVPGQTPVEGETPVRRIPLAIDGLHAIPPNRRWGENEAIGEEIDTVYKLVKWAALAHGESQCMGSRKLVNTHVETKKVKKMVDGEEREVDKNWTYFELGHYEFITFKDYEQLTLDVGAGLRAIGLNKGDRVHIFAATSQNWLAMSHGSATQSMPIVTAYDTLGAEGLKYSMVATNAKAIFLDPHLLPTLNGVLEHAKGITHVIWNNQNKVKEAHIEALRNERGVTVLSFDELVQLGKQNPVAPVAPAPEDLCCIMYTSGSTGTPKGVPLKHSNVVAAVAGVCPVVQPFVGPGDRLLTYLPLAHILEFVFENASLYWGSTMGYGNPKTLSDTSVRNCLGDIREFQPSVLVGVPAVWETVKKGILAKVNAGSPLLRNLFWGALALKEKLMGLGLPGSGLLDAIVFKKIKDATGGRMKLCLNGGGPVAKDTQKFISMAICPMIIGYGLTETTAMGTLQNPNEWTAESIGAMPASIEAKLVDFADAGYFATNKPNPQGEIWLRGPSVLSEYYENPEETAAAVTADGWFKTGDIGEWDQNGHLKIIDRKKNLVKTLNGEYIALEKLESIYRSAAVVANICVYADQDRSKPIAIIVPAEPALKKLASSSGVKGDSLEELVHNKKLQAAVLKELQNAGRAGGLSGIEIIEGVVMSDEEWTPQNGLVTAAQKLNRKGILNKYKKEVDEAYGPKQ

SEQ ID NO: 29516 - protein, 497 aa, Zea mays
MFSHGADSAHDAGTVGVSSGVGATVPARFVWPYGGKRVFVSGSFTRWSEHLPMSPVEGCPTVFQAICSLSPGIHEYKFYVDGEWRHDERQPTISGEFGIVNTLYLTREFNQINALLNPSTPGSRMNMDVDNENFQHTVTLSDGTIPEGTVRVSEAAIQISRCRVSEYLNLHTCYDLLPDSGKVIALDINLPVKQSFHILHEQGIPVAPLWDSFRGQFVGLLSPLDFILILRELETHGSNLTEDQLETHTISAWKEAKRQTCGRNDGQWRAHQHLVHATPYESLRDIAVKLLQNDISTVPVIYSSSSDGSFPQLLHLASLSGILKCIFRYFKNSTGNLPILNQPVCSIPLGSWVPKIGDPNSRPLAMLRPNASLSSALNMLVQAGVSSIPIVDENDSLLDTYSRSDITALAKDKVYTHVRLDEMTIHQALQLGQDANTPFGFFNGQRCQMCLRSDPLLKVMERLANPGVRRVFIVEAGSKRVEGIISLSDIFKFLLSL

SEQ ID NO: 29517 - protein, 128 aa, Brassica oleracea var. alboglabra
DPFEGLLTPSSARDMAAFTNARVDWKETPEAHVFKADLPGLMKEEVKVEVEDKNILQISGERSKENEEKNDKWHRLERASGKFMRRFKLPENAKMEEVKATMENGVLTVTVPKAPEKKPEVKSIDISG

SEQ ID NO: 29518 - protein, 466 aa, Triticum aestivum
FRRWRDCRYRMPSGSIPKEAAYQIISDELMLDGNPRLNLASFVTTWMEPECGKLMMDSVNKNYVDMDEYPVTTELQNRCVNMIAHLFNAPIGEDETAIGVSTVGSSEAIMLAGLAFKRKWANKMKEQGKPCDKPNIVTGANVQVCWEKFARYFEVELKEVKLTEGYYVMDPKKAIEMVDENTICVAAILGSTLTGEYEDVKLLNDLLVEKNKKTGWNVPIHVDAASGGFIAPFLQPELEWDFRLPLVKSINVSGHKYGLVYPGVGWVIWRSKDDLPDELIFHINYLGTDQPTFTLNFSKGASQIIAQYYQLIRLGFEGYKHIMENCKLNAAVLKEGIDATGRFDVLSKADGVPLVAIRLKDSTNFSVFDISENLRRFGWIVPAYTMPADAEHVAVLRIVIREDFNRSLAQRLLADINKIVRELDAHAVHAIKLSNAAAAEGASQSTVDAVTEAFKGLAGNKKAGVC

SEQ ID NO: 29519 - protein, 446 aa, Streptococcus agalactiae A909
MYQTQTNKEKFVLFLKLFIPVLIYQFANFSATFIDSVMTGQYSQLHLAGVSTASNLWTPFFALLVGMISALVPVVGQHLGRGNKEQIRTEFHQFLYLGLILSLILFLIMQFIAQPVLGSLGLEDEVLTVGRGYLNYMLIGIMPLVLFSICRSFFDALGLTRLSMYLMLLILPFNSFFNYMLIYGKFGMPRLGGAGAGLGTSLTYWAIFIVIIIVMALHPQIKTYHIWTLERIKAPLIIEDIRLGLPIGLQIFAEVAIFAVVGLFMAKFSSIIIAAHQAAMNFSSLMYAFPLSISTALAITISFEVGAERFQDANTYSRIGRLTAVGITSGTLLFLFLFRENVAAMYNSDPHFVAITAQFLTYSLFFQFADAYAAPVQGILRGYKDTTKPFMIGAGSYWLCALPLAVILEKNSQLGPFAYWIGLITGIFVCGLFLNQRLQKIKKLYY

SEQ ID NO: 29520 - protein, 125 aa, Oryza sativa
MHGKHQHQQQEQQQGGMVVVAPKGCVTVRVGAEGEEQRRFAVPLAHLKHPLFGALLEEAEREYGFAQRGAIAIPCRVDRFVHVEHLIVQDLHGAAASHLLDLDSSSHHHTQIHLHLPRFAGCFRA

SEQ ID NO: 29521 - protein, 315 aa, Nocardioides sp. JS614
MTRSVHVLGNVQLDVIATPVTRLPDPGGDDVIDHISVRPAGAAGNVSLALAGLEVAHRLFGAVGDDQAGRWVAAELRRAGLGDDLQVVAGQETGISIALEAPGRERAFLTAHGVLRTYTQADVPAEATAADLVMLTGYFSLPGLRGAGTLEILRRARAHGARTLFDTGWDPDDWRGDAGREVLAILPSVDIFLPNEPEAQALTGEADPEAAADTLQRACGGWVVVKLAERGLVARGPDGARLRLAAPPVVAKDTTGAGDSLAAGMLAELVEHDDMAQALATGVRVASTVIGRDSLARYPSRAELLGVEETVPPLS

SEQ ID NO: 29522 - protein, 136 aa, Triticum aestivum
  misc_feature (129)..(129): Xaa can be any naturally occurring amino acid
  unsure (1)..(136): unsure at all Xaa locations
MVSSMKHCRDQAPEVPLSLSLSLGAMADRSKKQRRGADGEFVCKTCSRAFPSFQALGGHRTSHLRARHGLALGLTGGSDQPATNKATDQKQAHQCHVCGLEFEMGQALGGHMRRHREQEAATTAQAPPXVLLQLFV

SEQ ID NO: 29523 - protein, 445 aa, Saccharomyces cerevisiae
REAAAAAYGPDTDIPRGKLEVTIIEARDLVTRSKDSQPYVVCTFESSEFIRLYPMIHNLAHASQHQWHSLKPRVIDEVVSGDILIKWTYKQTKKRHYGPQDFEVLRLLGKGTFGQVYQVKKKDTQRIYAMKVLSKKVIVKKNEIAHTIGERNILVTTASKSSPFIVGLKFSFQTPTDLYLVTDYMSGGELFWHLQKEGRFSEDRAKFYIAELVLALEHLHDNDIVYRDLKPENILLDANGNIALCDFGLSKADLKDRTNTFCGTTEYLAPELLLDETGYTKMVDFWSLGVLIFEMCCGWSPFFAENNQKMYQKIAFGKVKFPRDVLSQEGRSFVKGLLNRNPKHRLGAIDDGRELRAHPFFADIDWEALKQKKIPPPFKPHLVSETDTSNFDPEFTTASTSYMNKHQPMMTATPLSPAMQAKFAGFTFVDESAIDEHVNNNRKFL

SEQ ID NO: 29524 - protein, 462 aa, Bacillus anthracis str. 'Ames Ancestor'
MTFSKSTTDKPSYTYEELSVKNKAYVWHPFTQMKDYLEEDPVIIERGEGRKLYDVNGNEYWDGVSSIWLNVHGHQVPELDEAIREQLNKIAHSTMLGLANVPSILLAEKIIEVVPEGLKKVFYSDSGSSAVEIAIKMAFQYWQHKGKPKKQRFVTLKEAYHGDTIGAVSVGAIDLFYQVYSSLLFEAIKMPYPYTYRSPYGNDKAEIVKKHLEEMEELLKDKHEEIAAIIVEPLMQGAGGMITMPKGYLRGLRNLCTKYNVLFITDEVATGFGRTGKMFACEHENVTPDILTAGKGLTGGYLPVAITVTTDEIYNAFLGSYEEQKTFFHGHSYTGNPLGCAVAIANLELYEKTNLIEEVARKTEYVATQLEELFACKHVGDIRQCGLMVGIELVKNKETKEAFEWTERVGVQVCKRSRELGMILRPLGNTIVFMPPLASTIDEIDEMLRILYKAISDITEGE

SEQ ID NO: 29525 - protein, 391 aa, unidentified bacterium
EFQTGDVLRISMDENLEGTKEKIAVTYAGLFDDVQVGGQVLFDDGLLGTTVLEKDVANRELVVRVDNDGILGSRKGVNAPGVSINLPGITEKDADDIRFGLDHGINYIAASFVRKPEDVLEIRGLLKEKNMEHVQIVPKIESQEGIDNLDAIIAVSDGLMVPRGDMGVEIPAENVPLVQKEMIRKMNLAGLPVITATQMLDSMEENPRPTRAEASDVANAVFDGTDATMLSGESANGEYPVEAVATMAAIDEKAESSLPYYGRHQDLHFDETDSTEAVASAVSRIAHSVNAKAIVVSTNSGYTACMVSKYRPEVNILAVTYSERVQRGLTLNYGVLPVVYEAPATIDEMIALAKTAVKEQGLANSGDTIVIAAGVPMSQSGTTNMITVQTV

SEQ ID NO: 29526 - protein, 474 aa, Zea mays
  misc_feature (224)..(224): Xaa can be any naturally occurring amino acid
  misc_feature (462)..(462): Xaa can be any naturally occurring amino acid
  unsure (1)..(474): unsure at all Xaa locations
MAFFRGLTAVSRLRSRMAQEATTLGGVRWLQMQSASDLDLKSQLQELIPEQQDRLKKLKSEHGKVQLGNITVDMVLGGMRGMIGMLWETSLLDPEEGIRFRGLSIPECQKVLPTAVKGGEPLPEGLLWLLLTGKVPTKEQVDALSKELLERSTVPAHVYKAIDALPVTAHPMTQFTTGVMALQVESEFQKAYDNGLPKSKFWEPTYEDCLNLIARLPPVASYVXYRRIFKSGKSIEADNSLDYAANFSHMLGFDDPKMLELMRLYVTIHTDHEGGNVSAHTGHLVGSALSDPYLSFAAALNGLAGPLHGLANQEVLLWIKSVIQETGSDVTTDQLKEYVWKTLKSGKVVPGFGHGVLRKTDPRYSCQREFALKHLPEDPLFQLVSKLYEVVPPILTELGKVKNPWPNVDAHSGVLLNHFGLSEARYYTVLFGVSRSMGIGSQLIWDRALGLPLERPKSVTMXEWLENYCKNKAA

SEQ ID NO: 29527 - protein, 221 aa, Cucumis sativus
MGRGKIEIKRIENTTNRQVTFCKRRNGLLKKAYELSVLCDAEVVLIVFSSRGRLYEYANNSVKATIDRYKKASSDSSNTGSTSEDNTQFYQQEAAKLRVQIGNLQNSNRNMLGESLSSLTAKDLKGLETKLEKGISRIRSKKNELLFAEIEYMRKREIDLHNNNQMLRAKIAVSERNVSMMGGEFELMQSHPYDPRDFFQVNGLQHNHQYPRQDNMALQLV

SEQ ID NO: 29528 - protein, 178 aa, Bacillus cereus ATCC 14579
MSEKTYELATFAGGCFWCMVKPFDELPGIHKVLSGYAGGHVENPTYEQVKAGTSGHLEVVQITFDPSIFPYQKLLDLYWPQIDPTDDGGQFFDRGPSYRTAIFYHNETQKGLAEKSKQALAESGMFKDPIVTEIRPAAPFYEAEEYHQHFYKKNPEKYATEQKESGREDFIKENWQKK

SEQ ID NO: 29529 - protein, 902 aa, Chromobacterium violaceum ATCC 12472
MASNAALSRYQAGLEAEIVRRTEALRQSEKLSQSIIAGAPVGVVVVDGAGAIKDINRTALAVFGVEAGAGLPATLGGLARLEGDGPLPGALSRGLAGADLAALSGEFWELLLRRADGSATQVEAGLTVVDMSGERTGTLFIRDISNRKLQEGKLKQAMEEAESATRAKSDFLANMSHEIRTPMNAIIGLAHLALRTGLDPKQRDYLQKIHNSGKHLLGIINDILDFSKIEAGKLDLENAEFDLERVLDNLAALLGEKAEAKGLELIFDIGPGLDRSLIGDPLRLGQILINYANNAVKFTERGEVTVRARCREERGDSLLLHFEVSDTGIGLSAEQKAKLFQSFQQADTSTSRKYGGTGLGLAISRKLAEMMGGEVGVDSEPGKGSTFWFTARLGKGEPHPERLPGVGMRNRRALVVDDSRAAREILAEQLRGMTFRVDEAEDGEQALERVEQAERDGDRYEVVFLDWRMPRMDGIEAARRLMRHDAALRPHRVMVTGYGREEVFRLAEDAGIEMTLIKPVSASVLFDSTMRLFGGEAAAGARAAPAADEIDLSPLRGMRVLLAEDNELNQQVATELLSAADIEVTVASNGEEALSLAEAQPFDLALMDMQMPVMDGLEATRRLRRLASWGKRPILAMTANAMSGDRERCLEAGMNDHVTKPIDPDKLFAALKRWDPRAGRADAAEPAASAARERPDQEDSDDPLRRIPGLDVGGALRRMMGRRPLYEGLLRRFVADQADAFGQVRLALARDDRDAAVRGAHTLRGLAGTVGADHLQQLSGRLEAALQAGLQLSGLDAEMAEAQAELGRLIGALGAALPESAPPAADGEADPAVLDRLEALLAEDDADAVEVYGAESGRVRPALGEAAAAFEQALRQYRFDDALARLREARAGMREGGHGQSV

SEQ ID NO: 29530 - protein, 242 aa, Escherichia coli
LKERKEGAFVPFVTLGDPGIEQSLKIIDTLIEAGADALELGIPFSDPLADGPTIQNATLRAFAAGVTPAQCFEMLALIRQKHPTIPIGLLMYANLVFNKGIDEFYAQCEKVGVDSVLVADVPVEESAPFRQAALRHNVAPIFICPPNADDDLLRQIASYGRGYTYLLSRAGVTGAKNRAALPLNHLVAKLKEYNAAPPLQGFGISAPDQVKASIDAGASGANSGSAIVKIIEQHINEPEKML

SEQ ID NO: 29531 - protein, 221 aa, Schizosaccharomyces pombe
MFIAKSIVIGLLICVLFFFFFVSRFNDKYELQPLLTLGLLNASLTALSDLLAQALDSYKLLKFRNKRDVSLEKYGNTILLPASTSKLDVHRTIRYAAYGLCLTPIQFRWFVALSNVIQTENPFIAIVLRVALDQFIFAPLGIVFFFLFMGITECKSYERLKSYFRKHYWPTLKANYILWPAVQLFNFTFVPLVLQVIFANAVSMVWTAYLSLKNSSPNADV

SEQ ID NO: 29532 - protein, 520 aa, Agaricus bisporus
MRLSNALVLVAACISSVVAKTRTFDFDLVNTRLAPDGFERDTVVINGEFPGTLIQVNKGDSVRIPLHNKLTSPTMRRSVSIHWHGFFQARTSGQDGPSFVNQCPQPPNTTFTYEFSVAEQSGTFWYHSHLSTQYCDGLRGAFIVYDPRDPLRHLYDVDDESTVITLAEWYHILAPDATNEFFSSGIIPVQDSGLINGKGRFNGGPLTPFAVVNVRRGKRYRLRVIAISCRPFFTFSVDNHSLVFMEADGVEHDPVEVQNVDIYAAQRVSVILHANQPIDNYWIRAPMTGGNPDRNPNLNISLTLAILRYHGARHVEPTTVNVPGHKLLDQEMHPIRQEGPGKLGDGPPDKHITLNIAQPNAPFFDINGISYISPTVPVLLQILSGAKRPEDVLPSEQIFFVPKNSLIEVNIPGEGAHPFHLHGHNFDVVLASNDDTFNFKNPPRRDVYPINGGNTTFRFFTDNPGAWFLHCHIDWHLEAGLAIVFAEAPEDNVSGPQSQITPQDWLDLCPEYNAIEPEFQ

SEQ ID NO: 29533 - protein, 1955 aa, Cryptococcus neoformans var. neoformans JEC21
MDDLTPLPTTFDPDNDDFDVEDRRGLGHGGGEVDEDGEGDLLIVHGEEEEEEQEEGNEGEGEGEGEDQTNLMEYIASLQQIGEHDNDGNQDQDQDQDHDTETGDNTHEHGHDAEVELGQEMEEESTGQVVDTELGEADRNRDSPPDPNPDPNPDPITVPSYARLQSEQQGQESNVISGPMEVEMEEEELGESIEVDPGQEPGELHEPEPEPEPEPEIQREASSPLSDLPDLPDELEFSPPPSPGPFAPSRNGQRHRQPSSNSNNSNMGTGMDMEVDRDSSLTPLYDDYDHEGGGKDGVGLPRPRFRAESSAAGARRSASMSHANATKRGRNTTRNRDSRGREKQGRRSSLSFSSSPPLESIEVAPDIAPGTAGTLGAGRKKRQRERASKGKLPLRHGHERGDGLSDGEGDNEFELVPKSAKRSKSAHPFPASHAASHAASASHPPHHPSRKPLDPISTGLKLPGPRALPPSRPRALNDQSIKKFLVGKTEEVQLGICLRERYKKWGKSNPPAHANRINPKTTEITGPGYFKSTTWPEPLTPLPTKFTSPLDGDKVEEIQRTVAGVLLPLITGEARHCFWPFHLQGRGKRDGEGEEVSDPAHSTHRARNPITLHRGVDTALHRSVCDFCSSTIFGGYYFCKKCGRDYCLQCERYFPESMEAVGESPWELTDAARPRLLKCIKQPWEEMMSGGGGEMGGDSTGNGNGNGSTRTNTTNANTDGGSNTNKNGRKREKAIAWHVRSDLQPVSRFTKEEIEGHWLSLAEFVIGHGYGPDASSGSGSGFDFLFGADDGDEPEGEKKKEEWRLQWERMLRLMGLQMDEEVKSVLEQWSKNARVVREKESGSVTHLGPGANVESNLDTDTNSHPVNQPESSSNNPIDSQAPIDKTSTSVRRSAAMTTKNENDNKLEPEMDEVEELETGEPKSASEMLKGMMDKENGEETSAAHTGPAASLNSVASAPAAVRSSTQVTKVEIPVAANASPTVSSSSSPQANPPFEKSGLPSASPLRSVPTSGNFRTGSNPMPDQQQDLEKIAFSYTKHTHPNPPSDPASLSDYSLPFIYLPSPEGLDNKAFDELWSKGEPIVVGGVNVYVGGGGGRRRREEGEKMGKEGEEWGPEKFIERFGEEQCSVVDCQSDTPLVSTVGAFFAAFGESVGKPWEREGEDGKRKEKKRQGILKLKDWPPGDEFVDTHPELYHDFCAALPVPDYTRRDGVLNLYSHFPPGPTRPDIGPKMYAAFAALETPGGFGSTRLHMDVADAINIMLHASPIPDDSPGCAVWDIYPAQDADKIREFLKEKFDKTHNFVDPIHSQMFYLDAKSRKELWERKRVVSWRVYQYPGQAVFIPAGCAHQVCNLSDCIKMALDFVSPHNVPRCQQLTKDFRRENYLKAWKEDVLQLYNVLWYAWLSARETIARREKEVAAAEARQKQLQSFQLDDSNSPLFQSKHPTSSPLCSATPTITSTLDLDASSRMGYDRLNMGIGLGERGMGMGLGRVGMGSWGNVSSVRDEPPRGGPLLLMLNDESEKVSRGQLTEGEKSSEPVRGKGEDHEKSDQGKQLSSDPVSFASSLSNSYSLQLAKSLFTLSLQRDETNPSELFVPSAAAMNHRPRGPSLPDSHSSIAHPRTSSRAPSTHTMDNRSSQTSASVRTKDIKEKENKFTPPKKLKNPARPLRTSTLIKLGAKRMDEILELARGDLGEGESLSNALGGLGNFAELGTMESHGGMQGWAGLRAMSESVRSREDGDREGSPLVSINDVHNSNSSPNAETDTSTPPDDAIDRTDAEAAADIAAEILSMDIDHQEDETNIEDDGDLEGLRRIVERGILEQEQGQEQGQEQEREQEREQEDDERDNELGEEGREAIASIQRLQAVEEAEEEERERENLAKEEEREREMGRPEGVVINDDKEEGEGEEEEDEQADREKARQREEEEEEEIEGVDEDAEGEEFEEVSKMSVDFGMFI

SEQ ID NO: 29534 - protein, 192 aa, Triticum aestivum
MLPRACAGPDQSSDTMEEHRSRSPASSNVAEAPRRRYRGVRQRPWGKWAAEIRDPHKAARVWLGTFETAEAAARAYDDAALRFRGSRAKLNFPEDARLHPATVTPAAAPARAPIAAQSASTPAMYAGSTQASDYLRYQMLLQGQRRRRPTKANLLRGFYGRRPPAGRRPCPALVRAPGLDQLLYRRPSAATH

SEQ ID NO: 29535 - protein, 242 aa, Escherichia coli
LKERKEGAFVPFVTLGDPGIEQSLKIIDTLIEAGADALELGIPFSDPLADGPTIQNATLRAFAAGVTPAQCFEMLALIRQKHPTIPIGLLMYANLVFNKGIDEFYAQCEKVGVDSVLVAHVPIEESAPFRQAALRHNVAPIFICPPNADDDLLRQIASYGRGYTYLLSRAGVTGAENRAALPLNHLVAKLKEYNAAPPLQGFGISAPDQVKAAIDAGAAGAISGSAIVKIIEQHINEPEKML

SEQ ID NO: 29536 - protein, 179 aa, Gossypium hirsutum
MLVFGYLRDALTVGWAPSDHSSPTFPPIKPEPQEIPTETAVKEVPTVANAAVPTVVPAKGKHYRGVRQRPWGKFAAEIRDPAKNGARVWLGTFETAEDAALAYDKAAYRMRGSRALLNFPLRVNSGEPDPVRITSKRATPEPSTSSSSGSENGSPKRRRKVGSAAPVVAQAGLNMGFGA

SEQ ID NO: 29537 - protein, 280 aa, Thalassiosira weissflogii
PHSFPPHSVALQVLGTFILWFGWYGFNPGSTLGISGEGVPDVAALCAVTTTIAAASGSVSAMFTDMLPSRRSTGETMYDITMCMNGALSGLVGITAGCSVVEPWAAFVIGIVAGWTYIFWSALLVKLKIDDAVDAIPVHFGNGIWGCIAVGLFAEPTRTINAFGEHGHYGRFYSWGNGSADAHLLAAQVCGVLWIIGWVTVIMLPYFLILNAIGLFRVDALEEEVGLDISHHKGAAYDMSGPSADVQEKFEISRSQRKIRFPRRTLMKQPKQATLQLLDF

SEQ ID NO: 29538 - protein, 146 aa, Treponema denticola ATCC 35405
MNSLSLFSPSFTDSVFDALDRSLGPNFGVFAPIKNASCGMPSVDIRETEKAYVMEVDLPGYSEKDVEISLKDRLMTISSSKKEEKEDKGAEYIIKERSSRHFMRRFTLPEDINSDEVSAKFENGVLVVNIPRKPDTQPKQIEIKTA

SEQ ID NO: 29539 - protein, 295 aa, Zea mays
MLQHRMGCVILPFLEKLHRRYVVKRNQRKRQREEDLKKEEKSSEKRSKTTHETTKTESVDNPGGSFKMTKEGEEKMSTDQSANVHAELSKEGQIKLGTDHPIANHGEPAKGGDENMEEDPEYEEDPEEVEVYEDDEDMDDAHAEEQIAEQNENTNDREIKPKEVATTDGGNNKSTRQPEVENVTNIHERAASMEEKQSVPEIGDLVGGGEKVVSKEIKPAKDEVIDKDLLQAFRYFDINGAGYLKVDDLKCILHNMGKFLSSRDVKDLVQIALVESNSARDNRIIYPKLVKIVDL

SEQ ID NO: 29540 - protein, 262 aa, Gossypium hirsutum
MCGGAIISDFVAPKYDRKLTGDDLWSELDIFSDLLGFDNNGKSFVNHQFHNNNNNKLINPKDNQLNKERSETIQKTSQVTKKVEKTQRTRKNFYRGIRQRPWGKWAAEIRDPQKGVRVWLGTYNTAEEAARAYYEAAKRIRGDKAKLNFPQTPTKNQAASPALTQLPPAKKRCIVPELTQPSFQTDSPPYPMGLGYGRSEDYKPIEVVESELELKEQIWSLESFLGLETNHETMTQLSGNGGTDSLELWTLDDLVTQYKQRR

SEQ ID NO: 29541 - protein, 242 aa, Escherichia coli
LKERKEGAFVPFVTLGDPGIEQSLKIIDTLIEAGADALELGIPFSDPLADGPTIQNATLRAFAAGVTPAQCFEMLALIRQKHPTIPVGLLMYANLVFNKGIDEFYAQCEKVGVDSVLVADVPVEESAPFRQAALRHNVAPIFICPPNADDDLLRQIASYGRGYTYLLSRAGVTGAENRAALPLNYLVAKLKEYNAAPPLQGFGISAPDQVKAAIDAGAAGAISGSAIVKIIEQHINEPEKML

SEQ ID NO: 29542 - protein, 101 aa, Frankia sp. EAN1pec
MTTATKVAIKPLEDRIVVQPSDAETTTASGIVIPDTAKEKPQEGTVLAVGPGRFEDGKRVPLDVKVGDVVLYSKYGGTEVKYAGEEYLVLSARDVLAIIEK

SEQ ID NO: 29543 - protein, 549 aa, Frankia sp. EAN1pec
MPKILTFNEDARRSLERGVNALADAVKVTIGPRGRNVVINKSYGAPTITNDGVTIAREVELDDPYQNLGAQLAKEVATKTNDVAGDGTTTATVLAQEMVRQGLRQVTAGAAPLSLKIGIEAAVAAVSSALLEAAIEIGSKETIAQVAAISAQDAQVGELIAEAMDKIGKDGVITIEESQTMGLDLELTEGMQFDKGYISPYFVTDQESMEAVLEDAYVLLHPGKISALNDILPILEQVVQERKPLLIIAEDVEGEALSTLVVNAVRKTFQVVAVKAPGFGDRRKAMLQDLAVLTGGQVVATEVGLKLDSITLAELGRARRIVVDKDLTTIVDGAGDADAVAERVRQMKAEIELSDSDWDREKLQERLAKLAGGVAVIRVGAATEVELKEKKHRLEDAVSATRAAVEEGIVAGGGSALVHAAKVLDGDLGLTGDERSGVRVVRAALDAPLTWIARNAGLEGAVIVSKVREGDVGRGFNAATGEYVDLVAAGVVDPVKVTRSAVANAASIAALLITTESLVAEKPEEAEAGHGHDHSHGGHGHGHSHGPGF

SEQ ID NO: 29544 - protein, 139 aa, Schizosaccharomyces pombe
MATNVGPQIRSGELVFGVAHIFASFNDTFVHITDLTGKETIVRVTGGMKVKTDRDESSPYAAMLAAQDAAAKCKEVGITALHIKIRATGGTATKTPGPGAQAALRALARAGMRIGRIEDVTPIPTDSTRRKGGRRGRRL

SEQ ID NO: 29545 - protein, 140 aa, Francisella tularensis subsp. tularensis SCHU S4
MTKQRTLSIIKPDAVEKNVIGEIYSRFEKAGLRIIAAKMKHLSKAEAERFYAVHKDRPFFSALVEFMISGPVMIQVLEGENAIAKNRELMGATNPKEAKAGTIRADFADSIDANAVHGSDAEDTAAQEIRYFFSDTEIFG

SEQ ID NO: 29546 - protein, 355 aa, Pseudomonas putida KT2440
MYPKNTWYVACTPDEIATKPLGRQICGEKIVFYRARENQVAAVEDFCPHRGAPLSLGYVEDGNLVCGYHGLVMGCDGKTVSMPGQRVRGFPCNKTFAAVERYGFIWVWPGDQAQADPALIPHLEWAVSDEWAYGGGLFHIGCDYRLMIDNLMDLTHETYVHASSIGQKEIDEAPPVTTVTGDEVVTARHMENIMAPPFWRMALRGNGLADDVPVDRWQICRFTPPSHVLIEVGVAHAGKGGYHAEAQHKASSIVVDFITPESDTSIWYFWGMARNFAAHDQTLTDNIREGQGKIFSEDLEMLERQQQNLLAHPERNLLKLNIDAGGVQSRKVLERIIAQERAPQPQLIATSANPA

SEQ ID NO: 29547 - protein, 783 aa, Cryptococcus neoformans var. neoformans JEC21
MTTNLYAIAGPSKPTTPTSTPSPRSEPPSPLKSLTSLPTNPLNSHGTSTPNTLTNQLSSTGIGISKPGLSVDENGEVMKVPAFLNKLYTMVSDPEVDDLIYWGESGDSFFVPNAELFGRELLPRWFKHSNFSSFVRQLNMYGFHKVPHLQSGALKNETPIELWEFANPYFKRGQPQLLTKVTRKNNRPSNSGVGPSSSVGGSGAGGGMSTRSASAAAASGSASGQIQQAISQGHEAGNHSTSGKYLITDGTTPGSVPPSHTSAGPLIAPQTLDLSAINSGIAAIRQTQASIATDLRKLQASNEALWRQAYETQEKQRKHEETIDLIVSFLERLFGTEGEGLKGLKEAMRRGVGVRRDRDGREGRDSRDSRFAEDDDGGQKKRRRVGIDRMIEGGTGDGTGEHGEIESPTSDDRLVEIGSNSEYSIPSVKRTSSSSHPISLGQLGSSRFTALPSEDPSPSASGPGSTSYEGLHTTQTNARGAGADVNVTDPTLGMNHLSPLSDTDPLLPSSSNALAPYSSHLPFPSSNSNQSNSFNPSNPSSAWASNPSQPLLSPTSAAAAAHAYNLDPSLLQTTIGSLLQSPAAAQMFLNSLSASAQGQALASHSHPHNPSPLNPNPNGNASTSASASAHGMNTGGMGTGSGTKDVDPTLALFSPLPSHSSLTSQSNDLLKSYSDALTVGEGVDNLQESIDSLVRSMGLDLPNGGSSVGVDVGDGAGVGTETGEGDGEFNVDEFLQGLAKEGEEEGEREVEGDGGVSSSGAGAGAENGRKEDVIAQSGLKSES

SEQ ID NO: 29548 - protein, 546 aa, Francisella tularensis subsp. tularensis SCHU S4
MNSNTKIIFVTGGVVSSLGKGVTAASLATLLESRGLNVTMMKLDPYINVDPGTMSPLQHGEVFVTEDGAETDLDLGHYERFIRNKMTQANNFTTGKVYQSVLRRERKGDYLGATIQVIPHITDEIKRRICSGIADDVDVAIVEIGGTVGDIESQPFLEAIRQLRIELGRNRTLFVHLTLLPYIKVAGEIKTKPTQHSVKELRGIGIQADVLVCRCEKKFDDSEKRKIALFTNVDQDCIFTAEDVDTIYEVPLKYNQQGFDAKLVELLNLNAKEADLSEWQNVVNTIRDVKGEVTIAMVGKYVSLTEAYKSLNEALYNAGYKKGVKVKIKFVDSEDVNENNVESYFKDVAAILVPGGFGSRGVEGKIISIKYARENQIPFLGICLGMQLAVIEYARNILGIKDAHSSELEPTTANPVIGLITEWQAEDGTVHQRTHSSDLGGTMRLGGYKCVLKQGSRAREIYQADEVVERHRHRYEVNSNYVERLEEAGLIFSGRSEDNKLMELIEIPQHKWFIACQAHPEFTSTPRYGHKLFESYIQAAIENSNN

SEQ ID NO: 29549 - protein, 168 aa, Yarrowia lipolytica CLIB122
MSAEKTNTAFYNLAPLDKNGEPFPFKQLEGKVVLIVNVASKCGFTPQYKGLEEVYQKYKDQGFTIIGFPCNQFGGQEPGSADEISSFCQLNYGVTFPVLQKINVNGNDADPVYVYLKEQKAGLLGFRGIKWNFEKFLVDKHGNVVDRYASLKTPAGLESTIETLLKKP

SEQ ID NO: 29550 - protein, 225 aa, Bacillus thuringiensis serovar konkukian str. 97-27
MIFFDIDGTLLDYEAAERNGIIDFFQIYNTIFSGNELEATEVWHELSEEYFNKFLSRELSFQEQQLMRMYRLFKTYGVNLSPKESQHRFNQYIELYKNNWTAFEDVNYTLQALQEKGHSLGIISNGEYEQQVEKLTALNILQYFKYIFTSSELGISKPNPEIFQRTVLQLNLEMKDCYYIGNRLETDAISSTAAGMQGIWLNRDNSQLKCDVPTIYSLHEVLTII

SEQ ID NO: 29551 - protein, 446 aa, Pseudomonas putida KT2440
MNTDLKQRLDNDPMGRFQCLAIGICIILNMIDGFDVLVMAFTAASVSAEWGLNGAQVGLLLSAGLFGMAAGSLFIAPWADRFGRRPLILLCLALSGIGMLLSALSQSPLQLALLRGLTGLGIGGILASSNVIASEYASERWRGLAVSLQSTGYALGATLGGLLAVWLLGHWGWRSVFLFGGVVTVLVIPLVLLWLPESLDFLLARRPANALARVNRLAVRLGQPALAQLPAVAARAEGAKTGFRQLLAPAMRRTTLVIWLLFFLVMFGFYFVMSWTPKLLVAAGLSAQQGITGGVLLSVGGIVGAALIGGLASRWPLTRVLALFMLITAALLVLFVANGASVTAALALGLLIGLFSNGCVAGLYALSPVVYDASVRATGVGWGIGIGRMGAILSPTVAGVLLDGGWQPLHLYGVFASVFVLAAGCLLLLRPTAKPASALPADALSH

SEQ ID NO: 29552 - protein, 449 aa, Francisella tularensis subsp. tularensis SCHU S4
MNAQKYIDSVIAQVEKRDGHEKEFIQAVKEVFSTLKPALEHNPKYIEENILARMVEPERGISFRVPWVDKDGNIQVNRGYRYQFNGAIGPFKGGIRFHPSVYSGIIKFLGFEQVFKNSLTTLPMGGGKGGADFDPKGKTDAEIMNFCQSFMIELQRHIGPDIDVPAGDIGVGGKEIGYMYGQYRRIRACFENGVLTGKSLESGGSLIRPEATGYGAVFFLDEMLKHDGETLQGKTVVTSGYGNVAWGVCKKVAQLGGKVVTISGSKGFVHDPEGITTDEKIEFLLKIRNGEKTMQDYSKEFNASWHAGQKPWGIKADIAIPAATQNEIDVEDAQKLIDSGVKYVVEASNMPTTNEAIEFLMKKGIILAPGKAANAGGVAVSGLEMSQNSARLSWSAEEVESKLQQIMANIFHACKFASSKYNLGYNLVAGANLAGFEKVAEAMIQQGRY

SEQ ID NO: 29553 - protein, 415 aa, Rhodospirillum rubrum
MTSLAPPLAAGLASPTPEDLRDYLEVEHRLGAHNYKPLDVVLTRGQGVWVWDVAGRRYLDCLSAYSAVNQGHCHPRILEALIAQAGRLTLTSRAFHNDQLAPFYEEICALTGSHKVLPMNSGAEAVESALKCVRKWGYREKGVAEDQAEIIVCSDNFHGRTIAIVGFSSDPDARRDFGPFAPGFRCVPFGDGDALEAAITPRTVAVLIEPIQGEAGVIIPPPGYLKRVRDLCTAQGVMLILDEIQTGLGRTGALLAEEHEGIEADLTLVGKALSGGFYPVSAVLSNSEVLGVLRPGEHGSTFGGNPLACAVARMALKVLVDEDMIGNAARQGAYFLEKLRGLGNPLIRAVRGRGLMLAVEFAPEAGGARPFCEKLKDKGILCKETHRDIIRFAPPLVITEKEIDWAMERIAEVIG

SEQ ID NO: 29554 - protein, 479 aa, Leuconostoc mesenteroides subsp. mesenteroides ATCC 8293
MSEHKGHIQRNLKTRHVSMIALGGSIGTGLFVASGATVAQAGPLGAIVAYLAIGVMVYFLMTSLGEMATYSPTSGSFSDYAGKYVDPALGFAMGWNYWFNWAITLAVDIVAVGLVAEFWFPNTPGWIFSAIALLLIFLINIFSVGTFGEAEFWLSMIKVVTIIAFLIVGLATIFGVIHSDINVMKNLSVGNHGFVGGPQAILSVFVVAGFSFQGTELIGITAGEAEDPDKSVPKAINQVFWRILLFYILAIFVISALVYYKDPRLLSSSTQNIAVSPFTIVFKNAGIAFAASLMNAVILTSIVSSANSGSYASTRMLYAMARKGDAPKIFAKLSTRGVPVAALVLTTAIGLLAFIANTKGGSVAYTWLVNASGLTGFIAWVGIAISHYRFRRAYVAQGKSLSDLKYKAKWFPFGPLFALVISIGVIIGQDPDSFAHLNWEKIFVTYLSVPLFVILYFWYKVSHKTKLIALKDVDLKQYK

SEQ ID NO: 29555 - protein, 346 aa, Neurospora crassa
MASSDTITNWVDPNDKTGEFKRQVSSFRSFISRSDPSSPFPPEKGRYHLYVSYACPWATRALIVRKLKGLEDIISFSSVHWHMGPLGWRFPLAEEGKEGGDAAGDQVVPDPVGGKQYMREVYFGVEPEYNARFTVPVLFDKKEGRIVNNESSEIVRMLGSEFNEIVEDAKARELDLYPEDLRAEIDEVNEWVYHDINNGVYKSGFATTQEAYERNVIKLFEGLDKVEKHLKEVQKKGKGEFWFGDRLTEVDVRLFPTIIRFDPVYVQHFKCNLRDIRSGYPAIHRWMRHLYWNVPAFRETTNFLHIKKHYTCSHPQINPKGITPLGPVPDILPLDEEVEAVKAAKN

SEQ ID NO: 29556 - protein, 447 aa, Oryza sativa (japonica cultivar-group)
MAAALCSASPAISAAAAAALGAAARRLRVRVRAASRPYCAAPAPPRAAAAVGAQSWRARRRFAASAASTTTEEEEEGAGAEVMIPPDNRIPATIITGFLGSGKTTLLNHILTAHHGKRIAVIENEYGEVDIDGSLVAAQTAGAEDIMMLNNGCLCCTVRGDLVRMIGELVDKKKGKFDHIIIETTGLANPAPIIQTFYAEDTVFNDVKLDGVVTLVDAKHARLHLDEVKPKGIVNEAVQQIAYADRIIVNKIDLVSEPEVSSLVERIRSMNRMAHLKRAEYGKVDLDYVLGIGGFDLERIESAVTEVSHDHHTGHEHKHDHEHHHHDHHHHDHEHKHDHHAHDHTHDPGVSSVSIVCEGEMDLEKADMWLGNLLLERSDDIYRMKGLLSVSGMPQRFVFQGVHDIFQGSPERMWEPNEPRINKIVFIGKNLNGEELEKGFKDCLLKK

SEQ ID NO: 29557 - protein, 150 aa, Triticum aestivum
  misc_feature (28)..(28): Xaa can be any naturally occurring amino acid
  misc_feature (35)..(36): Xaa can be any naturally occurring amino acid
  misc_feature (44)..(44): Xaa can be any naturally occurring amino acid
  misc_feature (46)..(46): Xaa can be any naturally occurring amino acid
  misc_feature (48)..(50): Xaa can be any naturally occurring amino acid
  unsure (1)..(150): unsure at all Xaa locations
NVPWLKQTLKYFLERKVPINYPFEKGPXSPLFPQXXQVQDVKKXRXGXXXTMKTTTRTKEIILSENPPAYIAKTEMQSRTTRYDIDMTKCIYCGFCQEACPVDAIVEGPNFEFSTETHEELLYDKEKLLENGDRWETEIAENLKSEALYR

SEQ ID NO: 29558 - protein, 342 aa, Zea mays
MHAYVSSEFGSRAAGQSSISARGLRAERQGAMAASVALSSGHRMPAVGLGVWRMEKADIRGLIHTALRVGYRHLDCAADYQNEAEVGDALAEAFQTGLVKREDLFITTKLRNSDHGHVLEACKDSLKKLQLDYLDLYLIHFPVATRHTGVGTTSSALGDDGVLDIDTTISLETTWHAMEELVSMGLVRSIGISNYDIFLTRDCLAYAKIKPAVNQIETHPYFQRESLVKFCQKHGICVTAHTPLGGSTANAEWFGTVSCLDDPVIKSLAEKYGKTPAQLVLRWGLQRDTVVIPKTSKAERLQENFDVFGFDISGEDMERMKAVDRKYRTNQPAKFWGIDLYA

SEQ ID NO: 29559 - protein, 498 aa, GIBBERELLA ZEAE PH-1
MQSTLCLPVPSRSLLRFLRSLTTACERRVTTVEPSLFDKDPVTRKLPDRNQPLTSQNHFSTSRNAQGFWSGRKSSSSYMPTWNSFLKFAGKKNEKALKPDDLPNHDEFGDNSSIFNNRRTLAAKAASEPRLRCTEVDEHGNVILVDGEFKKTELIAKFGLLPRDLRKIDSSNLPHILIRPSAILLNLLHLKVLIKHDRVLLFDIYGSKTSYPQSAFMYDLQGKLQQKTAPGNASLPYEFRALEAVLTSVTSELEADFEAVREPVMHILSELEDDIDRHKLRMLLILSKRVSTFEQKAKLVRDAIEDLLEADDDLADMYLTEKTHDLYRGEDDHTEVEMLLESYHKLTDEIVQEAGNLVSGIRNTEEIVRAILDANRNALMLLDLKFSVGTLGLAMGTFLAGLYGMNLENFIEETNWGFAGVTGVSVVFSLIVCWYGLTKLRRVQRIKMMDAERPAIARGQSYFPDDRSALGLLDNRNREMLRRINMQKAVSQQKKKWL

SEQ ID NO: 29560 - protein, 450 aa, Sinorhizobium meliloti 1021
MLIAAARQLEKGRMTTITVDDALDRAGTGTYQRRLMAIFGLVWAADAMQVLAVGFTAASIAATFGLTVPQALQTGTLFFLGMLFGAAGFGRLADRIGRRRVLIATVACDAVFGLLSVFAQDFTVLLLLRFLTGAAVGGTLPVDYAMMAEFLPARNRGRWLVMLEGFWAVGTLIVALAAWAASLAGVADAWRYIFAVTAIPALIGVGLRFLVPESPLYLLRLGKTSEAKAIVDEILVVNGKMRLGAGASLVPPPPTASAGIFSADLRKRSLMILAIWFLVSISYYGVFTWMPPRLAGEGFGFVRGYGFLVVLALAQIPGYALAAYGVEKWGRRPTLIGFCLLSALGCLLFVAAGTAMLIGVSLLIMSFALLGTWGALYAYTPELYPTASRATGMGAAGAMARLGGLLAPSLMGLVVAQSFGLAIGIFAGLLLVAAVAAFLIDAETRRVSLA

SEQ ID NO: 29561 - protein, 132 aa, Brassica napus
GFSGYGKENFAGLDELNRGPRAKGFKIGQESSQPETLKEQEIGKKTSEDVSLPDSKDYNKEDFSETYSNAKLCVIKSYSEDDIHKSIKYNVWSSTPNGNKKLDAAYNEAKEKSNGCCPGFLMFSGNTSGQFV

SEQ ID NO: 29562 - protein, 215 aa, Geobacter sulfurreducens PCA
MITRLLEGNRRFVAEVFEKERETFATLARGQRPTVLWIGCSDSRVPVNTITQTKAGEVFVHRNVGNVVSVNDWNLSAVLEFSINHLCIPDIVICGHYGCGGIQALDEERADDKYIPIWLINAYKAKERVDEKIRALHIGLPPEQRMKLIVEENVRLQLEHLREYPFVRTAMRQGKLSIHGWIYDMESGEIKILSTERPGEGAAVSSRATEYCPLP

SEQ ID NO: 29563 - protein, 633 aa, ASPERGILLUS NIDULANS FGSC A4
MPVATLDQRRLFSSSRPAARIFGTNPLRAKPAEGYISEKYPVIDHEYDAVVVGAGGAGLRAAFGLAEAGFNTACVSKLFPTRSHTVAAQGGINAALGNMHPDDWRWHMYDTVKGSDWLGDQDAIHYMTREAPASVRELEGYGCPFSRTEEGLIYQRAFGGQSKEFGKGGQAYRCCAVADRTGHALLHTLYGQSLRHNTNYFIEYFAMDLLMENGECRGIIAYNQEDGTLHRFKAHHTVLATGGYGRAYFSCTSAHTCTGDGMAMVARAGLPNQDLEFVQFHPTGIYGAGCLITEGARGEGGYLLNSEGERFMERYAPTAKDLASRDVVSRSMTMEIREGRGVGPEKDHIYLQLSHLPASLLHERLPGISETASIFAGVDVTKQPIPVLPTVHYNMGGIPTKFTGEVLTQDENGNDKVVPGLYACGEAACVSVHGANRLGANSLLDLVVFGRAVSHRVKEIASPGKPHAELASDAGAESIKDLDTVRTAEGPKSTFEIRNAMQKTMQTDVSVFRTQESLDEGVEKITKVDQLFDQVGTKDRSMIWNSDLVETLELRNLLTCATQTAVAAANRKESRGAHAREDYPDRDDENWMKHTLTWQKKPHGKVEIGYRSVVHNTLDENECKPVPPFKRVY

SEQ ID NO: 29564 - protein, 184 aa, Triticum aestivum
KYPYIAGMGVYVFKRDVLLNLLKSRYAELHDFGSEILPRALHDHNVQAYVFTDYWEDIGTIRSFFDANMALCEQPPKFEFYDPKTPFFTSPRYLPPTKSDKCRIKEAIISHGCFLRECKIEHSIIGVRSRLNSGSELKNAMMMGADSYETEDEISRLMSEGKVPIGVGENTKISNCIIDKNRSI

SEQ ID NO: 29565 - protein, 740 aa, Oryza sativa
MGRGGIGGAGLVAAVAKADVENTDSTRGFVKDVKRIIIKVGTAVVTGPNGRLAMGRLGALCEQVKQLNFEGYEVILVTSGAVGVGRQRLKYRKLVNSSFADLQNPQMDMDGKACAAVGQSVLMAIYDTLFSQLDVTSSQLLVTDRDFMDPSFGNQLRETVNSLLDLKVIPVFNENDAISTRRQPYEDSSGIFWDNDSLARLLAQELKADLLIMLSDVEGLYSGPPSDPQSKIIHTYVHEQHGKLISFGEKSRVGRGGMQAKVAAAFTASSKGIPVVIASGFAIDSIIKVMRGEKIGTLFHREANQWGCSKEATAREMAVAARDCSRHLQKLSSEERKKILLDIADALEANEDLITSENQADLDLAQDIGYDKSLVARMTIKPGKIKSLAGSIREIADMEDPISHTLKRTEVAKDLVFEKTYCPLGVLLIIFESRPDALVQIASLAIRSGNGLLLKGGKEAMRSNTILHKVITGAIPDVVGKKLIGLVKNKDEIADLLKKYSVQLDDVIDLVIPRGSNKLVSQIKAATKIPVLGHADGICHVYIDKSADMDMAKRIVLDAKVDYPAACNAMETLLVHKDLNRTEGLDDLLVELEKEGVVIYGGPVAHDTLKLPKVDSFHHEYNSMACTLEFVDDVQSAIDHINRYGSAHTDCIITTDGKAAETFLQQVDSAAVFHNASTRFCDGARFGLGAEVGISTGRIHARGPVGVDGLLTTRCILRGSGQVVNGDKGVVYTHRELPLQ

SEQ ID NO: 29566 - protein, 335 aa, Bacillus cereus ATCC 14579
MKTYYEKDANVELLQGKTVAVVGYGSQGHAQAQNLRDSGVEVVVGVRPGKSYEVAKADGFEVMSVSEAVRTAQVVQMLLPDEQQAHVYKAEVEENLREGQMLLFSHGFNIHFGQINPPSYVDVAMVAPKSPGHLVRRVFQEGNGVPALVAVHQDATGTALHVALAYAKGVGCTRAGVIETTFQEETETDLFGEQAVLCGGVTALVKAGFETLTEGGYRPEIAYFECLHELKLIVDLMYEGGLTTMRHSISDTAEFGDYVTGSRIVTDETKKEMKRVLTEIQQGEFAKKWILENQAGRPTYNAMKKAEQNHQLEKVGAELREMMSWIHAPKELVKK

SEQ ID NO: 29567 - protein, 537 aa, Emericella nidulans
MSYIEEEDQRYWDEVAAVKNWWKDSRWRYTKRPFTAEQIVAKRGNLKIEYPSNVQAKKLWGILERNFNKEASFTYGCLDPTMVTQMAKYLDTVYVSGWQSSSTASSTDEPSPDLADYPMNTVPNKVNHLWMAQLFHDRKQREERMTTPKDQRHKVANVDYLRPIIADADTGHGGLTAVMKLTKLFVERGAAGIHIEDQAPGTKKCGHMAGKVLVPISEHINRLVAIRAQADIMGTDLLAIARTDSEAATLITSTIDHRDHPFIIGSTNPDIQPLNDLMVMAEQAGKNGAELQAIEDEWLAKAGLKLFNDAVVDAINNSPLPNKKAAIEKYLTQSKGKSNLEARAIAKEIAGTDIYFDWEAPRTREGYYRYQGGTQCAINRAVAYAPFADLIWMESKLPDYKQAKEFADGVHAVWPEQKLAYNLSPSFNWKKAMPRDEQETYIKRLGALGYAWQFITLAGLHTTALISDTFAKAYAKQGMRAYGELVQEPEMANGVDVVTHQKWSGANYVDNMLKMITGGVSSTAAMGKGVTEDQFKS

SEQ ID NO: 29568 - protein, 441 aa, Streptococcus agalactiae A909
MTLNAKGESNQILVDKEVHSTNLLLDIDEKPELFQGLLLSFQHVFAMFGATILVPLILGMPVSVALFASGCGTLIYQVATKFKVPVYLGSSFAYITAMALAMKQMHGDISAAQTGILFVGLIYVVVATVIKFVGNSWVDKILPPIIIGPMIIVIGLGLANSAVTNAGFVAKGDWRKMLVAVVTFLIAAFINTKGKGFIKIIPFLFAIIGGYILSIILGLVDLSPVEKADWFELPKFYLPFKTGLFHSYKLYFGPEMLAILPISIVTIAENIGDHTVLGQICGRNFLKKPGLNRLLIGDGLATAFSALIGGPAETTYGENTGVIGMTRIASVTVIRNAAFIAIAFSFFGKFTALISTIPSAVLGGMAILLYGVIASNGLKVLIENRVNFAEVRNLIIASSMLVLGLGGAVLDLGALTLSGTALSAIVGIILNLILPKESMKS

SEQ ID NO: 29569 - protein, 172 aa, Triticum aestivum
MGQVWASLQEKLQGRHWKERQVRKITDRVFDRLTEDTQKPEKDALKFEEVYIAVLCVYNDINKYLPGPHYDPPSKERLKELMKEFDIDMNGLLDREEFAEFIRKLTAESLCAISLKLIITLVAAPALALATKRATEGVPGVGKVVHKVPNAIYAAAITMAAVLIQRSAEGVE

SEQ ID NO: 29570 - protein, 499 aa, Arabidopsis thaliana
MTMISDLSKDLVEEILSKAPITSLGAVRSTHKQWNALSKGRLLYKAEAKDQFLGFMVMDHRFLSMIFHLNGILKGDGEGFDRPSIREVGDIVNQIDISKVFQCDGLVLCVPSDNSSVVVWNPYLGQTKWIEAREPHDESDMFALGYDKDKNHKILRLYDECYYYYEVYNFKTESWGEEDHLPGWDIDSYNRGVSLNGNTYFLTQEQRAKDKYRVFLLCFNFTTEKFENFIAMPFKYHRKYVGTLSCVGNEKLAALYQRWDTGEMAIWVTTKIESNEVLWSNLFKVDMKPLVRFGFQQCKDEAGSFFIDEEKKLAVVFNLDKKRGKRNNKTRCYHTAYIIGEKGYLKKEVLGEAVEVRKDVYRSALVCSSSYVPSLEKINQIEEEEEDKCKSIKMVDTKRQLETSFGLDFELHEDSCFFIDEEKKLAVVFDLAESKRCKTANAYIIGVQIDDPIARRDKRERNRKWMSKRKEKKRKGTNKQQGLTPMKKKQEVHLLLINR

SEQ ID NO: 29571 - protein, 212 aa, Escherichia coli
  misc_feature (19)..(19): Xaa can be any naturally occurring amino acid
  misc_feature (71)..(71): Xaa can be any naturally occurring amino acid
  misc_feature (90)..(90): Xaa can be any naturally occurring amino acid
  misc_feature (105)..(105): Xaa can be any naturally occurring amino acid
  misc_feature (205)..(205): Xaa can be any naturally occurring amino acid
  unsure (1)..(212): unsure at all Xaa locations
LKERKEGAFVPFVTLGDPXIEQSLKIIDTLMEAGAAPLELGIPFSDPLADGPTIQNATMRAFAGGVTPAQXFEMLALIRQKHPTIPIGLXMYANLVFNKGIDEFXAQCEKVGVDSVLVADVPIEESAPFRQAGLRHNVAPIFICPPNADDDLLRQIASYRRGYTYLLSRAAVTGAENRAALPLNYLVTKLKEYNAAPSLQGFGIXAPDQVKE

SEQ ID NO: 29572 - protein, 648 aa, Mycoplasma pneumoniae M129
MKNLFACQHLALSAIQHAKGGHVGMALGASPILYTLWTKHIQFNPNCPKWINRDRLVMSAGHGSMALYPILHFAGLITKQEMLHHKYGQVNTSSHPEYAPNNFIDASTGPLGQGLGMAVGMALTQRVLAAEFKALSPKLFDHFTYVVVGDGDLQEGVSYEVAHLAGVYQLNKLIVLHDSNRVQMDSVVRDVSLENLQTRFTNMGWNYLETSDAVADIDAAIKQAKKSDKPTFIEVHTTIAKNTTLEDQPAGHWFIPTDKDFARFNSNTKTNFTPFEYPQTVYDFFHKQVIARQAKPVQAYKELLEKLKDKPLYTKFINWTENDYQALYLNQLDERKVAQANAATRNYLKDFLGQINNSNSNLYCLNADVARSCNIKLGDDNLHTNPHSRNIQVGIREFGMSTIMNGMALHGGVKVMGGTFLAFADYSKPAIRLGALMNLPTFYVYTHDSYQVGGDGPTHQPYDQLPMLRAIENVQVWRPCDEKETAAGVNYGLLSQDQTNVLILTRQALPSLEQSDSVQTLKGGYIISNRKQPDVIVAASGSEVQLALQLEQALNEQQLKTRVVSVPNINMLLSQPQSYLQQLFDPNSVLLTLEASASMEWYALAKYVKKHTHLGAFSFGESNDGQVVYEHKGFNVTNLLKLIKTLKS

SEQ ID NO: 29573 - protein, 367 aa, Cryptococcus neoformans var. neoformans JEC21
MQGYSNGYSTLPPSLNPNPVIGQYAPSQQVQLSGQPRLGSVPSSQSNETIKVQPLLCSGHTRPVTHLQFSNVLDDGTYLLISACKDGNPMLRSWLGDWIGTFIGHKGAVWSSKISLDTSRAVTGSADFTAKIWDTYSGEALHTFSHNHIVRSVALNPQQTPQYLLTGGHEKKIRLFDLGRPDAEPLVLGTNPDGLSCEGIIKSLVWDEGQNGTMGVSAAEDGKVRWWDLRTLSQIASLDLGEPISSMELAHGGGTLSVTAGKNVHFLDILRQHPPVTIPLPHPVTSASLHPYLRDRFVAGSTSDPWVRVYDLDSGKEREVYKGHHGPVLCASYSPDGEVYASGSEDGTIRLWQTNPGKAYGLWQTSD

SEQ ID NO: 29574 - protein, 483 aa, Vibrio vulnificus CMCP6
MVFADRKRPNVPRTLSIFIFFLNIGVNVHRYKKEASNLIKLATPVLIASVAQTGMGFVDTVMAGGVSATDMAAVSVAASIWLPSILFGIGLLMALVPVVAQLNGAGKREQVPFEIQQGAVMALLISIPIIGVLFQTQWILGYMNVDAVMATKTIGYIHAVMFAVPAFLLFQTLRSLTDGLSLTKPAMVIGFIGLLLNIPLNWMFVYGKLGAPALGGVGCGVATAIVYWIMFLLLLFYVTTSHRLRQVQLFTTFHPPQLNAQVKLFKLGFPVAAALFFEVTLFAVVALLVAPLGSTVVAAHQVAINFSSLVFMLPMSIGAATSIRVGHMLGEKSTEGARIASHVGILVGLSTAVFTALLTVILREQIALLYTDNRVVITLAMQLLIFTAIYQCTDAIQVIAAGALRGYKDMRAIFNRTFIAYWLLGLPTGYVLGLTDWIVEPMGAQGFWIGFIVGLSSAAAMLGVRLHWLHRQNDEIQLNYEAR

SEQ ID NO: 29575 - protein, 242 aa, Escherichia coli
LKERKEGAFVPFVTLGDPGIEQSLKIIDALIEAGADALELGIPFSDPLADGPTIQNATLRAFAAGVTPAQCFEMLALIRQKHPTIPIGLLMYANLVFNKGIDEFYAECEKVGVDSVLVADVPVEESAPFRQAALRHNVAPIFICPPNADDDLLRQIASYGRGYTYLLSRAGVTGAENRAALPLNHLVTKLKEYNAAPPLQGFGISAPDQVKAAIDAGAAGAISGSAIVKIIEQHINEPEKML

SEQ ID NO: 29576 - protein, 467 aa, Arabidopsis thaliana
MLEDRSPDSCLSTRVFSSSRLSESNWSNSYMYPEDDDKLLGNGKRALEVVGEVRQTKSLKLMGFSIIYDSDSSDYSLSGGEEQADAAIGDGSSSRQEQEQQSDFNDNGGDSSDSHSLINEIGRDNSIDCLIRCSRSDYGSIASLNRNFRSLVKSGEIYRLRRQNGFVEHWVYFSCQLLEWVAFDPVERRWMQLPTMPSSVTFMCADKESLAVGTDLLVLGKDDFSSHVIYRYSLLTNSWSSGMKMNSPRCLFGSASLGEIAIFAGGCDSQGKILDFAEMYNSELQTWITLPRMNKPRKMCSGVFMDGKFYVIGGIGGADSKGLTCGEEYDLETKKWTQIPDLSPPRSRADQADMSPAAEAPPLVAVVNNQLYAADHADMEVRKYDKENKKWLTVGRLPERAGSVNGWGLAFRACGERLIVIGGPKCSGGGFIELNSWIPSDGGPPQWTLLDRKHSPTFVYNCAVMGC

SEQ ID NO: 29577 - protein, 459 aa, Bacillus cereus ATCC 14579
MNEKYDKHRKELLEEDFNKHRELTEPAKFHSQTVGSRGPVLEQDSVLHESLQQFIHEKILERPVHVKGFGAFGYFQTIYSMSEHTKLSFLQNSNEKVPVMVRFSLAVSTKGTPDTARNVRGFSTKFYTKEGIFDLLCNHIPVFSVRDPMRFPETIQALLPSPKNNLIDPNRFWSFVAKAPESIHFVVRLYSNNGTAKSLRHIPGHSVNTYVWRNAEGNRKYVKYHWYPFEGVQYITSKEAIKLAAENPDYSGKDLYDAIENGKPVEYGLYVQLMDPKDETHLSYDPLDDTKVWDEQTYPLIPVGKMVLNKNPENFMEQVEKVAFSPSNLLEGAELSDDKMLQGRANIYSDSQRRRIGPEFRKLTINQQQDWTPANQITTGEGRYVEGKLERASITKQDDFTQAGEFYTKLQPIEKEHLAENLASDLKVISDDIREIVLGYFNQVSTDLKTSIETKMKEH

SEQ ID NO: 29578 - protein, 474 aa, Schizosaccharomyces pombe
MAAQPKDLSHHLSVESASRKQSPLKAVALSKSSRNIKIISLAGGLPNPEYFPIREMDAEIPAINSWKKDSSNSGKLDTVSVPMSSSDSDVLPLSVALQYGQGSGAALLSQFLKEHTRIIHNPPYEGWNIIMTTGNTSCLDIALRMLTNRGDSILVEKYSFPSALQSMRPLGLSCIPIDMDQFGFLPESMDDILTNWDATSYGSPKPHVLYTIPTGQNPTGSTLSVERRKQIYTLAQKHDIIILEDEPYYYLQMDAYEGKPEAADKAFTNEQFVKELIPSFLSMDVDGRVIRMDSLSKVVAPGSRVGWFTAQPLFIERGLRAAETATQSASGISQGILYAMFKHWGQDGYLEWLKHIRYSYTLRRNYLLYAMDTYLPKSVCSYIPPVAGMFIWFEVDKSRYIHADKNESIPEIESKIHAEAVEEGVNLACGNWFVVDPRVNDKIFFRVTFAHAELEEFNVAIERFAGVLKNNFKC

SEQ ID NO: 29579 - protein, 250 aa, Cryptococcus neoformans var. neoformans JEC21
MAPITIKARGILFDLDGTLISSTTICESVWHKWAEVYPVDLTEVFKSSHGIRTRELLRHWLNITDPVELETATEKFETDVLKEAQRLASIGKGGITLLPGVEKLLLALNAASKDAARWAIVTSATNAYATNAITTLSLPRTSHLITADEVSQGKPHPEPYIMGAAALGLKPTDCIVFEDAPSGVKAGVASGARVVAVCTSHKRSALEGLGAHLIVENLSDINLDTEGDEGYQWDHLNYCFHRSVCYILHQ

SEQ ID NO: 29580 - protein, 438 aa, Bacillus thuringiensis serovar konkukian str. 97-27
MQRFKLKEDVTMEQKPVLDVNEVPKPGKWLFLSIQHLFAMFGSTVLVPFLTGLNPSVALISSGLGTLAFLLITKGQVPAYLGSSFAFIAPIITAKTAGGPGAAMLGGLLAGLVYILISLGIKKSGSKWIMKLLPPIVVGPVVMVIGLALAHTAVNMAMNGADGKYSFTHFSVALVTLAITIICSIFGRGFFSIIPVLLGIIGGYIFAYFQGLVDLKPVAEAKWFVVPDFTVPFVTYTPEFSWKIVLLMVPVALVTISEHIGHQIVLGNVIKRDLIEKPGLHRSIFGDGVATLIASLIGGPPNTTYGENIGVLAITRAYSVYLFIGSAVFAIMFGFIGKISALIHSIPTPVMGGVSILLFGVIASSGLRMMVDDKTDLSDKRNLMIASVILVIGIGGAVLHVGESFQVEGMALAAIVGVLLNLLLPETKQIKQSNQIAS

SEQ ID NO: 29581 - protein, 459 aa, Cryptococcus neoformans var. neoformans JEC21
MGKDKLHVNVVVIGHVDSGKSTTTGHLIYKCGGIDKRTIEKFEKEAQELGKSSFKYAWVLDKLKAERERGITIDIALWKFETPRYQVTVIDAPGHRDFIKNMITGTSQADCAILIIATGIGEFEAGISKDGQTREHALLAFTLGVRQLIVACNKMDTCKWSEDRFNEIVKETNGFIKKVGYNPKAVPFVPISGWHGDNMLEETTNMPWYKGWTKETKSGVSKGKTLLEAIDAIEPPTRPTDKPLRLPLQDVYKIGGIGTVPVGRVETGVIKAGMVVKFAPTNVTTEVKSVEMHHEQIPEGLPGDNVGFNVKNVSIKDIRRGNVCGDSKNDPPMEAASFNAQVIVLNHPGQIGAGYTPVLDCHTAHIACKFAELIEKIDRRTGKVMEAAPKFVKSGDAAIVKLVAQKPLCVETYADYPPLGRFAVRDMRQTVAVGVIKSVDKTEKGGKVTKAAEKAAKKK

SEQ ID NO: 29582 - protein, 459 aa, Mesorhizobium loti MAFF303099
MTYQNYSLKQLQQIDAAHHLHPFTDHKELREAGSRIITHANGPFIYDSEGTELLDGMAGLWCVNIGYGRDELAEAAYAQMKELPYYNSFFKCSTPTPVLLSKKLAEIAPKNVNQVFYGSSGSEANDTALRLVRHYWVIEGKPEKNRVISRKMAYHGSTIAGTSLGGMDAMHKQLNGAVPNIVHVMMPYAYELALPGESDHDFGLRAAKSVEDAILEAGVDKVAAFIGEPVMGAGGVKIPPASYWPEVQRICRKYDVLLMLDEVITGYGRTGEWFAAQTFGIEPDTITTAKALTSGYQPLSALLVGDRITSTLVEKGGEFNHGYTYSGHPVACAVALKNLEIIEQEGLVDRVRNDTGPYFAKALQECIAGHDLVGEVRSIGLMGAIEIVKDKATKERFLPSGSAAVTVRDHAIANGMMLRATGDTMILSPPLIWTRDTIDMACERIGKALDLAQADLRKR

SEQ ID NO: 29583 - protein, 453 aa, Rhodococcus globerulus
MDVREAIRTQPMRRYQISTIAICLILSMIDGFEILVMAFVAPHLGKSWDISSVEIGYLLSAGIIGTALGAIFISPLADKIGRRRLAIWCLVGITVGMALSACAVNVPQLIAFRAFAGLGIGGLVANLNVLVSEFSSDKRRGTALGIYGVGYPLGGAVGGAISGVLISVFDWRSAFIFGTIITAIMLVVVIKTLPESIEFLIEKRPVGALERYNEIADRLGYEQSSELPVPIRKTERVVRDGLFKGIMLRRTVFLWLGYSCLIASFYFANTWTPKLLSDATGDSNMGVTAGVLVNVGGVIGSIIFAGLSIVLRPRVVTVLLMFGGVFAFIGYASGFHIVALALTLAVLVGIFANGGITGFYAISPPIYPAAARGTGVGWMIGCGRTVSIIAPILTGYLLDGGWTPKSVYMMFGGVLVIAGIATLLLDATYRGRSENPETPEARREEDLAAAATA

SEQ ID NO: 29584 - protein, 461 aa, Raphanus sativus
MERRREFQRKVQEAQLPVEEQDEMMRSLARRETEYMRLQRRKIGIDDFELLTVIGKGAFGEVRLCRLRSTGEVYAMKKLKKTDMLSRGQVEHVRSERNLLAEVDSRYIVKLFYSFQDSECLYLIMEYLPGGDIMTLLMREDILSEDVARFYIAESILAIHSIHQHSYVHRDIKPDNLILDKSGHLKLSDFGLCKPLDDKYSSLLLEDEEMLSQEAESQSGKADSDKAPWQMPKEQLLQWKRNRRALAYSTVGTLDYMAPEVLLKKGYGMECDWWSLGAILYEMLVGYPPFCSDDPRITCRKIINWRVCLKFPEEPKISEEARDLICRLLCDVESRLGTRGAEEIKTHPWFNGTQWDKLYEMEAAYRPTVDGELDTQNFEKFPEVEGSASEAPQVGPWRKMLTSKDNNFIGFTFKKSDITRSMENTGTDMKPNGSGDAPSLISLLGRINMEEAEGGELNQKT

SEQ ID NO: 29585 - protein, 541 aa, Raphanus sativus
MAIHVERIRRRRLWRERERERKEMEDIQEEENGTDVEVLGSSLTMEKVAAAKQYIENHYKAQNKNIQERKERRWILERKLASSGVPKEEQINMIKDLERKETEFMRLKRNKISVDDFELLTIIGRGAFGEVRLCREKKSGNIYAMKKLKKSEMVMKGQVEHVRAERNLLAEVASHYIVKLYYSFQDAEYLYLIMEYLPGGDMMTLLMREDTLREDVARFYIAQSVLAIESIHRYNYIHRDIKPDNLLLDKDGHMKLSDFGLCKPLDCRTLPSIQENRATDDEAVSEPMDVDRAFPDTDNKRSWRSPQEQLQHWQMNRRTLAFSTVGTPDYIAPEVLLKKGYGMECDWWSLGAIMYGMLVGYPPFYADDPLSTCRKIVNWRNHLQFPEDAKLSREAKDLICRLLCNVDHRLGTGGGAQQIKVHPWFKDVVWEKLYEMEAAYKPEVNDELDTQNFMKFDEVNSPATERTKSGTSRKNLAPKDLSFVGYTYKNFDAVKGLRHSLEMARTMSLDRSPAEVMPVGRISGEAAEAQMVSTMDDPMVI

SEQ ID NO: 29586 - protein, 587 aa, Haemophilus influenzae R2846
MQEQKLQENDFSTLQTFKRLWPMIKPFKAGLIASGIALVFNALADSGLIYLLKPLLDDGFGKANHSFLKIMAFVVVGMIILRGVTNFISNYCLAWVSGKVVMTMRRRLFKHLMFMPVSFFDRNSTGKLLSRITYDSEMIASSSSGSLITIVREGAYIISLLAVMFYTSWELTLVLFVIGPIIAVLITIVSKIFRKLSKNLQDSMGELTATTEQMLKGHKVVISFGGQFVEEERFNKVSNNMRRKGMKMVTADSISDPVVQIIASFALVAVLFLATTPLIAEDNLSAGSFTVVFSSMLAMMRPLKSLTNVNSQFQRGMAACQTLFAILDLEPEKDNGTYKAEPAKGELEFKNVSFAYQGKEELALNNISFSVPAGKTVALVGRSGSGKSTIANLVTRFYDIEQGEILLDGVNIQDYRLSNLRENCAVVSQQVHLFNDTIANNIAYAAQDKYSREEIIAAAKAAYALEFIEKLPQGFDTVIGENGASLSGGQRQRLAIARALLRNSPVLILDEATSALDTESERAIQSALEELKKDRTVVVIAHRLSTIENADEILVIDHGEIRERGNHKTLLEQNGAYKQLHSMQFTG

SEQ ID NO: 29587 - protein, 518 aa, Raphanus sativus
MEDIQEEENGTDVEVLGLSLTMEKVAAAKQYIENHYKAQNKNIQERKERRWILERKLASSGVPKEEQINMIKDLERKETEFMRLKRNKISVDDFELLTIIGRGAFGEVRLCREKKSGNIYAMKKLKKSEMVMKGQVEHVRAERNLLAEVASHYIVKLYYSFQDAEYLYLIMEYLPGGDMMTLLMREDTLREDVARFYIAQSVLAIESIHRYNYIHRDIKPDNLLLDKDGHMKLSDFGLCKPLDCRTLPSIQENRATDDEAVSEPMDVDRAFPDTDNKRSWRSPQEQLQHWQMNRRTLAFSTVGTPDYIAPEVLLKKGYGMECDWWSLGAIMYEMLVGYPPFYADDPLSTCRKIVNWRNHLQFPEDAKLSREAKDLICRLLCNVDHRLGTGGGAQQIKVHPWFKDVVWEKLYEMEAAYKPEVNDELDTQNFMKFDEVNSPATERTKSGTSRKNLAPKDLSFVGYTYKNFDAVKGLRHSLEMARTMSLDRSPAEVMPVERISGEAAEAQMVSSMDDPMVI

SEQ ID NO: 29588 - protein, 567 aa, Cryphonectria parasitica
MALRAFLSLLPALSLVTAAPSVEPYQLSKRCVNSADDRSCWGDYDLSTNYYDEAPFTNVTREYWFNIVNTTASPDGVEKIVLAVNGSIPGPTIVADWGDTVVVHVTNSMQNNGSSIHFHGIRQNFTNQNDGVASITQCPTAPGDTTTYTWRALQYGTSWWHSHFYVQAWDGVYGGIQINGPATANYDEDLGVVSMMDWDHDTADNLVLQSAVTGPPTMANGLINGMNVYTLEDNSTVGSRYEMEFTSGQRYRLRLVNTAADTHFKFTIDNHTMEVIASDFVPIQPYTTDVVNIGIGQRYDVIVTADAPSDNYWMRAIAQLACSDNDNPDNIKAIIRYSDAANSTADPTSTATADASVDECVDEPAASLVPYLAIPAGGSADVTDNFAVAVEQLAGRVDWAMGNTTFINEWGYPSIQQVYDGNNTWGESQNVIQLPQANEWVYWIVQTTMGVTHPMHMHGHDFWVLGAGTGTFDSATASLSTVNVPRRDVTMLPASGWTVIAFITDNPGVWLTHCHIAWHTSEGLAVQMVERESEIVDLIDADLMNSTCGAWNDYANKVALVQDDSGI

SEQ ID NO: 29589 - protein, 128 aa, Arabidopsis thaliana
MGRLFVIDLEGLVYSCKYCQTHFAVTNDIISKSFHCKHGRAYLFDNVVNVTVGEKEHRVMITGWHTVADIFCVSCGSLVGWKYEIAYDKSQKYKEGKFILERFKVLGPYGGGYDMNQNEPMTGSDDEE

SEQ ID NO: 29590 - protein, 342 aa, Sinorhizobium meliloti
MAVLVTGGAGYIGSHMVWSLLDGGEAVVVLDCLSTGFRWAVAPEARFYFGDVGDRALLQRVFAENEIDSVVHFAGSAVVPESVANPLAYYENNTANTRTLIAATVEAGIRHFVFSSTAAVYGTQDTPDPVSETAALRPQSPYGRSKLMSEMMLQDAAAAHDFRFVALRYFNVAGADPLGRAGQSTLGATHLIKVACEAALGRRRKIDVLGTDYPTADGTGVRDYIHVSDLVAAHRSALAYLRAGGEPLVANCGYGHGFSVLQVLDTVRQVSGRDFMVDYAPRRPGDPAQIVADPSVARLKLDWVPTHASLEHIVRSAFDWESHLSRKNSFDEEQDERLIANG

SEQ ID NO: 29591 - protein, 296 aa, Escherichia coli
  misc_feature (133)..(133): Xaa can be any naturally occurring amino acid
  unsure (1)..(296): unsure at all Xaa locations
MVIKVIRPDILPVIKADLKLIYRLARWVPRLLPDGRRLRPTEVVREYEKTLIDELNLLRESANAIQLRRNFEDSPMLYIPEVYPDYCSEGMMVMERIYGIPVSDVAALEKNGTNMKLLAERRAGVLHSGLSRXFFHADMHPGNIFVSYEHPENPKYIGIDCGIVGSLNKEDKRYLAENFIAFFNRDYRKVAELHVDSGWVPPDTNVEEFEFAIRTVCEPIFEKPLAEISFGHVLLNLFNTARRFNMEVQPQLVLLQKTLLYVEGVGRQLYPQLDLWKTANVSWSRGLKIRSVFLRW

SEQ ID NO: 29592 - protein, 437 aa, ASPERGILLUS NIDULANS FGSC A4
MSATQVVKSHGPFQGLPTYPQTPELSDLCAVVTGANGLSGYNMVRVLSAAPERWSKIYCLSRRAAPSNFFTDLGDGAARVEHIPVDFLSETAEIASRLREDIPKVDYVFFFSYMQPEQEGNVLGMWSDAEALTKVNSTMLNNFLGALQEANLHPKRFLIQTGAKHYGFHIGPSTNPSFETDRRVSLEQNFYYLQEDALAAYCAGTGVGWNVVRPSYIIGAVRDGALNHMIGLAIYAAIQAHLNQPLYFPGDYIAWDREVCQSTALLNAYFEEWAVLTPDAENQAFNIQDGLPFTWGRFWPNLAEWYGTTWKAPEVERAKYRAATSRHVQTPRGYGPTGTTLSTFSFQEWSGLSSVQAAWQELREKHELVLDPFTPQYRAQIFGMTDSAVLGGWALSLSMRKARRMGFLGTVDSFESARTAIRDLTKLKLVPPMRKTT

SEQ ID NO: 29593 - protein, 105 aa, Triticum aestivum
HTPHQLYPSLPQHPDIRALVGRSMEASRRLLSAALLLVLLLAATGELGGPVMVAEARTCESRSHRFRGPCVRRSNCANVCKTEGFPDGKCRGFRRRCFCTTHCHH

SEQ ID NO: 29594 - protein, 400 aa, Paracoccus sp. 12-A
MAKVVCVLYDDPVDGYPTSYARDSLPVIERYPDGQTLPTPKAIDFVPGSLLGSVSGELGLRNYLEAQGHELVVTSSKDGPDSELEKHLHDAEVVISQPFWPAYLTAERIAKAPKLKLALTAGIGSDHVDLQAAIDRGITVAEVTFCNSISVSEHVVMTALNLVRNYTPSHDWAVKGGWNIADCVTRSYDIEGMHVGTVAAGRIGLAVLRRFKPFGMHLHYTDRHRLPREVELELDLTWHESPKDMFPACDVVTLNCPLHPETEHMVNDETLKLFKRGAYLVNTARGKLCDRDAVARALESGQLAGYGGDVWFPQPAPQDHPWRTMPHNAMTPHISGTSLSAQARYAAGTREILECHFEGRPIRDEYLIVQGGSLAGVGAHSYSKGNATGGSEEAAKFKKA

SEQ ID NO: 29595 - protein, 471 aa, Geobacter sulfurreducens PCA
MFVRRLLLISLVFVTTLTACSKKEEKLFYESGRADAPVKEVPRDILATQQAFVELVKKVTPSVVNISTVSRRKIEQPFFEFSPFFNDFFDNRPRFRREQSLGSGFIINREGYIVTNDHVVRDAESIKVKLSNENVYDGHIVGSDPKTDIAVIKIDSREELPVAVLADSDKLQVGQWAVAIGNPFGLDRTVTVGVVSATGRSNMGIETYEDFIQTDASINPGNSGGPLLNVHGEVIGINTAIVAAGQGIGFAIPVNMAKQIVTQLITKGKVTRGWLGVTIQPVTDDLAKEFGLKKAQGVLVSDVVKGSPAAGAGIRQGDIILRFAGKEIKDAQHLQRVVGDTAPGTKVPVVVFREGKEVQLSLATASSDSAQARQARPQGGAPDTLGLAVEELPREYRQEGFTGVLVVQVDDGSAAGEAGIREGDVIVAVNRRPVANLAEYDRVMREAARRGSVVLLVRRGEASIYFSLRLR

SEQ ID NO: 29596 - protein, 588 aa, Magnetococcus sp. MC-1
MWMHHGTDLIPLQQTPTLPDLFRIRCERTPQGIAYWQFAEDRAPRWEPHTWQQAARQAAQWQAALRNERLKQGSRVAICMPNRMEWVLFDVAAMSLGLVVVPLYPHDRPEAMVYILKDAGVKLLLVEDERQLQSLKPHLAQLRQLKRVVVLQGHCSESCGDCVAAGDWLPQGKQTWLRVAGATDPHGLATLVYTSGTTGPPKGVMLSHRNLLSNASAALARIRAYTDDRFLSFLPLSHALERTAGCYLPMMAGCEVAFSRGIPYLSEDLAVMQPTVLISVPRIFERIHGEVQAKLQHAPEWKVRLFQHTVESGWDHFEHQQGRRGLHLKGLLWPLVKPLVAHKLLKKLGGRLRLAVSGGAALDPHISRFFLGLGLPLVQGYGLTETAPVVSVNTPGDNEPSSVGQPLPGVQVRIDAQGELCVKGASVMSGYWHNPRATRRVIDQEGWYHTGDKGELDAAGHIKVVGRLKEILVTATGRKIPPGDVEGAILADPLFAQVLVVGEGYPYLAALVVLNSEIAQGVTLDEMALVARMNDRLHRFPRYAEIMRAATVAPWTVENGLLTPTLKVKRTAVIQQYQDVIAQLYVGH

SEQ ID NO: 29597 - protein, 237 aa, Streptococcus agalactiae A909
MTQFLGEFLGTFILVLLGDGVVAGNVLSKTKEEGTGWTAIVFGWGIACTVAVYVSGLFSPAHLNPAVTLAMASIGAISWGQVIPFIIAQMLGAMVAATILWLHYYPHWKETKDSGLILASFSTGPAIRHTPSNLLGEIIGTAILVITIMAIGPSKVAAGLGPIIVGIVIFAVGFSLGPTTGYAINPARDLGPRLMHAILPIENKGNSDWSYAWIPVVGPIIGGVLGAILYNIALTLV

SEQ ID NO: 29598 - protein, 334 aa, Oryza sativa
MASGGGGGGEGETVLVTGASGFIGSCLVRRLLARGYSVHAAVLNPDDKAETDHLHALAAAGGGEGRRLRVFPGDLLDGAALLAAARGCSGVFHLASPCIVDRVLDPQAQLMVPAVEGTLNVLRAAKDAGGVRRVVVTSSISAIVPSPGWPAGEVRDERCWTDLDYCEKNGVWYPASKTLAEKAAWKFAEENGLDVVVVNPGTVMGLVIPPTINASMAMLVRLLEGCTEEYADFYMGPVHVEDVALAHILLYENPSASGRHLCVQSIAHWSDFASKVAELYPEYKVPKLPKETQPGLVRAEAASKKLIALGLQFSPMEKIIRDSVESLKSRGFIS

SEQ ID NO: 29599 - protein, 348 aa, Thermus thermophilus HB27
MRALLLLALLLALVLGQRLVAPEEVARAQVIQKALPAVVRVQGSALSPGGEDVVGTGFFVGPSQVVTNYHVIRDLKDLTVRLADGRTFLAERYAVDPGIDLALLTVRGARAPGVLTFAQVEARRLPLGMGVVLVGFPYGQGPLASFGILSGVGPLEVPLPDPSVGAEVGTYLFTDAPLTVGNSGSPLLNLQGEVVGLVADVIGGPAGIGGIGVAVPGDLVAQSIADLERFGVPQRGWLGASLISLDELPPVLLRAVGLTSTQGAMVDRVEPGSPAARAGLKGAQRDTQGRLLALGDVILAVDGVAVKDKADVVRLVAQRRPGDRVRLTLWRDRRRLEVTVVLMARPRE

SEQ ID NO: 29600 - protein, 426 aa, Rickettsia akari str. Hartford
MSNQRVNKRVVITGLGLVTPVGLNVSSSWKNIVNGVSGIKTITEFDASKLACKIAGLIDYSEKDGFKLENFTQADNVNRLSKMDKFIHYGVAAATEAVEDSGWLPENEESRDRTGLILGSGIGGLKMIEDTSIKLYQENNGKVSPFFIPASLINLLSGLVSIKYGFSGPNQAAVTACSTGAHAIGDAMRMIKHGYADVMVAGGAEAPVTPVGVAGFVAARALCTKYNDNPEKASRPWDKDRSGFVMGEGAGVVVLEEYEHALNRGAKIYGEVIGYGSTGDAYHMTAPHPEGRGAYRAMRNAMLDAAITPNMIDYINAHGTSTNLGDEIELAAVQKLFLEANPQILMSSTKSSIGHLLGAAGSVEFIFSALAIRDQIAPPTLNLDNPMDEVKIDLVKLKARETKIDYVLSNSFGFGGTNASLVIKRV

SEQ ID NO: 29601 - protein, 80 aa, Arabidopsis thaliana
MAKTFSSICFTTLLLVVLFISTEIPKSEAHCDHFLGEAPVYPCKEKACKSVCKEHYHHACKGECEYHGREVHCHCYGDYH

SEQ ID NO: 29602 - protein, 178 aa, Erwinia sp. Ejp 556
MATEYAIIAGGCFWCTEAVFKQINGVESVESGYIGGHTENPTYKQVCHGDTGHAEAIRIGFDPEKVSFGDLLDISFATHDPTQLNRQGNDIGTQYRSAIFPTGAQQAEEAKAAISRAQSEHSDPIVTSIEADAVWYPAEDYHQDYWAGEGQENRYCLAVIPPKLQKLRKRFAAYAVSE

SEQ ID NO: 29603 - protein, 376 aa, Paracoccus denitrificans
MLGNLKPQAPDKILALMGEFRADPRQGKIDLGVGVYKDATAHTPIMRAVHAAEQRMLETETTKTYAGLSGEPEFQKAMGELILGDGLKSETTATLATVGGTGALRQRGTGAHGNPDLRVFVSDPTWPNHVSIMNFMGLPVQTYRYFDAETRGVDFEGMKADLAAAKKGDMVLLHGCCHNPTGANLTLDQWAEIRSILEKTGALPLIDLAYQGFGDGLEEDAAGTRLIASRIPEVLIAASCSKNFGIYRERTGCLLALCADAATRELAQGAMAFLNRQTYSFPPFHGAKIVSSVKTKLRTRAELRWRAGSGCAAACCACASNGGELRDLSGSDRFGFVAEHRGIMFSRLGATPEQVKRIKEEFGIYMVGDSRINIAG

SEQ ID NO: 29604 - protein, 223 aa, Oryza sativa
MEWTTVEAANGAKLSVRLFKPAAGAEAAAAEDVAVVLVHPYTILGGVQGLLRGIAEGVARRGYRAVTFDMRGAGRSTGRASLTGSTEVGDVEAVCRWVADNLNPRGVLLVGSSAGAPIAGSAVDKVDQVIGYVSIGYPFGLMASVLFGRHHNAILKSEKPKLFVMGTKDGFTSVKQLQNKLKNAAGRVDTHLIEGAGHFQMEGPAFDARMVDLIVNFIKSLPK

SEQ ID NO: 29605 - protein, 242 aa, Escherichia coli
LKERKEGAFVPFVTLGDPGIEQSLKIIDTLIEAGADALELGIPFSDPLADGPTIQNATLRAFAAGVTPAQCFEVLALIRQKHPTIPIGLLMYANLVFNKGIDEFYAECEKVGVDSVLVADVPVEESAPFRQAALRHNVAPIFICPPNADDDLLRQIASYGRGYTYLLSRAGVTGAENRAALPLNHLVAKLKEYNAAPPLQGFGISAPDQVKAAIDAGAAGAISGSAIGKIIEQHINEPEKML

SEQ ID NO: 29606 - protein, 389 aa, Zea mays
RRRLGDRRRLKPGAQVCHLALRRRRAPNRNGAQKLLGILIAIGEAVAYVLSGMYGSVSQLGTGNAILIILQLFFAGIIVICLDELLQKGYGLGSGISLFIATNICENIIWKAFSPTTINSGRGAEFEGAVIALFHLLITRTDKVRALREAFYRQNLPNVTNLLATVLVFLIVIYFQGFRVVLPVRSKNARGQQGSYPIKLFYTSNMPIILHSALITNLYFISQLLYRKYSGNFLVNLLGKWKESEYSGHSVPVGGLAYYVTAPSSLADVLANPVHALFYVVFMLSACALFSKTWIEVSGSSAKDVAKQLKEQQMVMPGHRESNLQRELNRYIPTAAAFGGVCIGALTVLADFMGAIGSGTGILLAVTIIYQYFETFEKERATELGFFGF

SEQ ID NO: 29607 - protein, 242 aa, Escherichia coli
FKERKEGAFVPFVTLGDPGIEQSLKIIDTLIEAGADALELGIPFSDPLADGPTIQNATLRAFAAGVTPAQCFEVLALIRQKHPTIPIGLLMYANLVFNKGIDEFYAECEKVGVDSVLVADVPVEESAPFRQAALRHNVAPIFICPPNADDDLLRQIASYGRGYTYLLSRAGVTGAENRAALPLNHLVAKLKEYNAAPSLQGFGISAPDQVKAAIDAGAAGAISGSAIVKIIEQHINEPEKML

SEQ ID NO: 29608 - protein, 458 aa, Nostoc punctiforme PCC 73102
MTFDYDLFVIGAGSGGLAASKRAASYGAKVAIAEYDLVGGTCVIRGCVPKKLMVYASHFPALFSEASGYGWKVGNAELDWEYFITSIDKEVRRLSQLHINFLEKAGVELFSGRATLLDSHTVEVDGRKVTADKILIAVGGRPIKPDLPGMEYGITSNEIFHLKEQPKHIVILGAGYIGTEFACIMRGLGSEVTQITRGDKILNGFDEDVRTEIEEGMTNHGIRLIKNNVVKTVERVAEGFKLTLSGEDQEPIIADVFLVATGRTPNVDGLGLENAGVDVVASSIEGPGYPTTSAIAVNEYSQTNQPNIFAVGDVTDRINLTPVAIGEGRAFADSEFGNNRREFSHKTVPTAIFSNPEAATVGLTEAEAREKLGDAVTIYRTRFRPMYYTLTGKQEKTMMKLVVDSNTEKVLGAHMVGDSSAEIIQGVAIAVKMGATKKDFDATVGIHPSSAEEFVTMR

SEQ ID NO: 29609 - protein, 289 aa, Bacillus thuringiensis serovar konkukian str. 97-27
MKNEEKTACIKSPSKEILYTVQQLPIGGNTLTRNKVEICGVDTAKLPVLKNDEMRKLFREMQSGEISAREKLVNGNLRLVLSVIQRFNNRGEYVDDLFQVGCIGLMKSIDNFDLGQNVKFSTYAVPMIIGEIRRYLRDNNPIRVSRSLRDIAYKALQVREKLIAENSKEPTAMDIAKVLEVTHEEIVFALDAIQDPVSLFEPIYNDGGDPIFVMDQLSDEKQKDEQWVEELALKEGMKRLNDREKMIIRKRFFQGKTQMEVAEEIGISQAQVSRLEKSAIKQMNKTIQG

SEQ ID NO: 29610 - protein, 242 aa, Escherichia coli
LKERKEGAFVPFVTLGDPGIEQSLKIIDTLIEAGADALELGIPFSDPLADGPTIQNATLRAFAAGVTPAQCFEMLALIRQKHPTIPVGLLMYANLVFNKGIDEFYAQCEKVGVDSVLVADVPVEESAPFRQAALRHNVAPIFICPPNADDDLLRQIASYGRGYTYLLSRAGVTGAENRAALPLNHLVAKLKEYNAAPPLQGFGISAPDQVKAAIDAGAAGAISGSAIVKIIEQHINEPEKML

SEQ ID NO: 29611 - protein, 463 aa, Lentinus tigrinus
AVGPVADLTVTNANISPDGFERAAIVVNNVFPAPLITGNMGDNFQLNLVNQMTNHTMLKTTSIHWHGFFQKGTNWADGPAFINQCPIASGNSFLYDFQVPGQAGTFWYHSHLSTQYCDGLRGPFVVYDPNDPHANLYDVDDESTVITLADWYHVAAKLGPRFPLGADSTLINGLGRSTSTPTADLAVISVTKGKRYRFRLVSLSCDPNYTFSIDSHQLTVIEADGVSTQPVTVDSIQIFAAQRYSFVLNANQDVDNYWIRANPNFGTTGFADGVNSAILRYDDADPVEPVTNQTGTTLLLETDLHPLTSMPVPGNPTQGGADLNLNMAFNFDGTNFFINGESFTPPTVPVLLQIISGANTAQDLLPSGSVYSLPSNSSIEITFPATTAAPGAPHPFHLHGHVFAVVRSAGSTSYNYDDPVWRDVVSTGTPQAGDNVTIRFQTDNPGPWFLHCHIDFHLEAGFA

SEQ ID NO: 29612 - protein, 412 aa, Helicobacter hepaticus ATCC 51449 [sequence omitted]

SEQ ID NO: 29613 - protein, 360 aa, Ashbya gossypii ATCC 10895
MSEWKVDPDNRRRLLQLQKLGGNKKCADCGAPNPQWASPKFGIFICLECAGIHRGLGVHISFVRSITMDQFKPEELERMEHGGNAQFHEYLAKHGVDQKLPQKAKYDNPVAASYKEKLTCVCEGKDWVEPDLSGAGGATLDRGSSEQASPGTATPNGGAEKLESRRATGPADEQKLRNENYFATLGKKNQTKPEHLPPSQGGRYQGFGNTPTPTNPNQARQGGTTADLSLDNLQKDPWGTLTKGWGLFSTAVTKSVEEVNESVIKPGVQHLQSSELSAEAQRAAQQFGQKFQETSSSGISAFSRWTKNLQQQYVQQSPGAPDQDSQYSRLFDSLESRSKDHSQLRAQKKGGEADTEWDDF

SEQ ID NO: 29614 - protein, 495 aa, Arabidopsis thaliana
MASETTKPSPLHFVLFPFMAQGHMIPMVDIARLLAQRGVIITIVTTPHNAARFKNVLNRAIESGLPINLVQVKFPYLEAGLQEGQENIDSLDTMERMIPFFKAVNFLEEPVQKLIEEMNPRPSCLISDFCLPYTSKIAKKFNIPKILFHGMGCFCLLCVHVLRKNREILDNLKSDKELFTVPDFPDRVEFTRPQVPVETYVPAGDWKEILEGMVEADKTSYGVIVNSFQELEPAYAKDFKEARSGKAWTIGPVSLCNKVGVDKAERGNKSDIDQDECLEWLDSKEPGSVLYVCLGSICNLPLSQLLELGLGLEESQRPFIWVIRGWEKYKELVEWFSESGFEDRIQDRGLLIKGWSPQMLILSHPSVGGFLTHCGWNSTLEGITAGLPLLTWPLFADQFCNEKLVVEVLKAGVRSGVEQPMKWGEEEKIGVLVDKEGVKKAVEELMGESDDAKERRRRAKELGDSAHKAVEEGGSSHSNISFLLQDIMELAEPNN

SEQ ID NO: 29615 - protein, 305 aa, Ralstonia solanacearum
MALEPAEIFEKVSPSVWEVRVIGPDGKGLSMGSAVVIGDGVVITNCHVLRGGKQVWLKRGNANFGARLQYPDVERDLCQLRVADFHYPPVTLAPGSALVTGQKVYAIGNPLGLELTISEGLISSLRTDDDGRLKSVQTSAAISRGSSGGGLFDANGRLIGITDHQVVLTLGQNLNFAIPADWIADVPARAQKALAARAAAASAVVASTPAPQSAAPTPAPAPAPRHQGELGPNQQTGFSVYLQKTWPKAFVAADGDHYYYWTGKNAELYALSACQERWQNCSVYARNNTVVEPVEGTGERPGAAR

SEQ ID NO: 29616 - protein, 292 aa, Cryptococcus neoformans var. neoformans JEC21
MPAARLRLEHKVAIITGAGSGIGLETALQFAAEGARLVISDINLRNVEAAAQLINTHFPECGAVAIKCDVSKEEEVKAMVDKAVEVFGRLDVLFNNAGIMHPADDNAITTEEKVWDLTQNINVKGVWFGCKYGILAMKKNKPDPSKGLGIGGSIINVASFVAILGAATPQLAYTASKGAVLAMTRELAMVHAREGIRFNSLCPGPIRTPLLMDFLNTPEKLNRRMVHVPMGRFGEAVEQAKAVVFLASDDSSFINGTDFLVDGGLHKCYVTPEGEPAQPGPTGLLATLSKTA

SEQ ID NO: 29617 - protein, 268 aa, Lycopersicon esculentum
WKHHELKVKDEKTLLFGEKAVTVFGIRNPEDIPWGEAGADFVVESTGVFTDKDKAAAHLKGGAKKVVISAPSKDAPMFVVGVNENEYKPELDIVSNASCTTNCLAPLAKVINDRFGIVEGLMTTVHAMTATQKTVDGPSMKDWRGGRAASFNIIPSSTGAAKAVGKVLPQLNGKLTGMAFRVPTADVSVVDLTVRLEKEASYEDIKAAIKEESEGKLKGILGYTEDDVVSTDFVGDSRSSIFDAKAGIALSKNFVKVVSWYDNEWGYS

SEQ ID NO: 29618 - protein, 243 aa, Ashbya gossypii ATCC 10895
MHQPMELKQLTGEQAAALDAELMGPDVGYSLHQLMELAGLAVAQVVVRHWGAAQAKKKVLVLCGPGNNGGDGLVAARHLRLFGYDPVVYLPRLSAKQPFYAQLAKQLHFVGVPVLSEGDDWRAHLEPRDTLCVVDALFGFSFRPPLREPFASIVAELKRHEDDIPIVAVDIPSGWDVDAGPLTPSDLMPRVLISLTAPKRCSAHIDTGVTTHYVGGRFIPDALARRHGFDPFPYSGTDQILRI

SEQ ID NO: 29619 - protein, 523 aa, Candida albicans SC5314
MYQHQDQTQHQYYQQYNSYNPSIEDLIASSDDKRYQNGGIGNSLQRPPVAGLPYISSQVNPNTSSANLSKLTSNINNYGYNNNNNSHIQLHTPPLSSNPSFTSFQNLNYPLSPLSKPTSPEPILSAASVTTSNFLASSFFSWLPPIDVKIVSFCIGWYLCSIISSNSTKLILNDFKFPVTLTQFQFSASFTFCLVFLNIVKVNPESISSKLPPGFIPSMTDTNRISLSEFITPTRLIIQTTLPMGMFQFIGHITSHKATSLIPVSIVHTIKSLSPIITVLIYRFLFGKSYRMRTYVTLIPLCCGIMLTCYKKSHTSNQNNVPGAGSSVINNNLDKINTNNNYSTGLIFAFISMIIFVSQNIFAKKRLTVESTNAIPMNNKSSLRINSNKVDKLTILFYCSIIGFILTCPIYFVTEWMNYNAFGAISLLQLNSYVMSLVLLNGLSHFVQSLLAFQILGMVSPINYSIANILKRIFIILISFIWESKQFSNSQSIGLVITLFGLYCYDRWGTVSNSGSASNPGKY

SEQ ID NO: 29620 - protein, 144 aa, Aquifex aeolicus VF5
MDRRSMIVWRPFEEVERLRRDFERLLEEFVPRRAEQETLVPPVEVYETDKEVVIKMDLPGVKKEDIEITVKENAVHVRAERKEEKEEKTENIIRAERFYGVIERVIPLPVEVDPEKAEAKYENGVLEIRIPKVHVEKEKKIKLA

SEQ ID NO: 29621 - protein, 162 aa, GIBBERELLA ZEAE PH-1
MSDVQERLKKLGLGARTGRTSQLTEQLSGKGTPRRKVKRAPARSGADDKKLQLALKKLNTQPIQAIEEVNMFKQDGNVIHFAAPKVHAAVPSNTFAIYGNGEDKELTELVPGILNQLGPDSLASLRKLAESYQNLQKEKGEDDDEIPDLVEGENFEGEPKVE

SEQ ID NO: 29622 - protein, 612 aa, Streptomyces coelicolor A3(2)
MTPEPRTAGEPPDASARRTLPRLLARNARDHPRLPALSWQPPEGDGNGDWTTLTWAEIHEHTEHLAAGYAGLGVGRGDHVLMMMANRPEHWLSDLALVRLGAVPVSVYGTAAPEQITHIARNCRARVAVVEGADQAQLWEPLLTDADTPLERLVLAEPGAEGGHVPYAALLREPTAERFAEELDVARPEDPLTVVYTSGTTGEPKGVVLTHRQVLANALALDAVVELPPHVEHICYLPFAHIAERMLGIYLPCHRASHVYLCADPAAVGTVVRKVRPAQFFGVPRIWEKLCAAVRAVLSLMPAEQREVIDAASAVAREHVGYRERGESPPAELEERYARAREEVLLPLLAAGGLDRVTWAASASAPMPVDVVHFWAGFGVVIMDAWGLTETTGVATTNSPRTGFRIGSVGRPVESVEVRLAADGEIEVRGESVFSGYLRPDGSVRSALDADGWLATGDIGRTDDDGYLWLTDRKKEMIITSTGKNVSPALVENALKEHPLIGQALVHGDRRSYLVALLVLDAEAAPAWAAAHGVEADGTVAGLVAHPAVRAEVDRAVAAANSRLSRTEQVKRYELLAGEWGPATGELTPSLKMRRRVIRDKYAEALAGLYGD

SEQ ID NO: 29623 - protein, 324 aa, Zea mays
MGRPPCCDKVGVKKGPWTPEEDLMLVSYVQEHGPGNWRAVPTNTGLMRCSKSCRLRWTNYLRPGIKRGNFTDQEEKLIIHLQALLGNRWAAIASYLPERTDNDIKNYWNTHLKKKLKKMQAGEGGGGDGDGAAGASEGGAVATAGAGGKRPAVPKGQWERRLQTDIHTARQALRDALSLEPSPSAPPPAKVEPLPATAPGYKTYASSAENIARLLEGWLRPGSGGGKGPEASGSTSTTATTQQRPQCSGEGAASASASHSGGAPANAAAQTPECSTETSKVAGAGSAPPAFSMLESWLLDDGMGHGEDGLMTDVVPLGDPSEFF

SEQ ID NO: 29624 - protein, 506 aa, Arabidopsis thaliana
MWPEVVRNLSKGQSSTVTNNILLSEHKSISTKDKSAHAFSSSKFSKILRDQKHQQMEIVIASLALVVVLWCIWRILEWVWLKPKMLESYLRRQGLVGTRYTPLVGDLIKEVYNKFYDFEKTHTFPLTSLLTDGLANADGDKWVKHRKIINPAFHFEKIKNMVPTFYKSCIEVMCEWEKLVSDKGSSCELDVWPWIVNMTGDVISRTAFGSSYKEGQRIFILQAELAHLIILALGKNYIPAYRHFPTKNNRRMKTIVKEIQVILRGIISHREKARDAGEAPSDDLLGILLKSNSEQSKGNGLNMEEIMEECKLFYFAGQETTSVLLAWTMVLLSQHQDWQARAREEVMQVFGHNKPDLQGINQLKVMTMIIYEVLRLYPPVIQMNRATHKEIKLGDMTLPGGIQVHMPVLLIHRDTKLWGDDAAEFKPERFKDGIAKATKNQVCFLPFGWGPRICIGQNFALLEAKMALALILQRFSFELSPSYVHSPYRVFTIHPQCGAHLILHKL

SEQ ID NO: 29625 - protein, 505 aa, Arabidopsis thaliana
MEISVACVTVSVVVVVVSWWVWRTLQWVWFKPKMLESYLRRQGLAGTPYTPLIGDLKRNVNMLTEATSKPIKLTEDITPRVLPHPFQMLKTHGRTFFTWLGPKPTITIMDPELIKEVFNKVYDYPKAQTFLLGRLIATGIINYDGDKWAKHRRIINPAFHIEKIKNMVPAFHQSCSDVVGEWSKLVSDKGSSSCEVDVWPWLVSMTGDVISRTAFGSSYKEGQRIFELQAELVHLILQAFWKVYIPGYRMKAAAREIQVILKGIVNKRLRAREAGKAAPNDDLLGILLESNLGQAKGNGMSTEDVMEECKLFYFAGQETTSVLLVWAMVLLSHHQDWQARAREEVKQVFGDKEPDTECLSQLKVMTMILYEVLRLYPPVTHLTRAIDKEMKLGDLTLPAGVHISLPIMLVQRDPMLWGTDAAEFKPERFKDGLSKATKSQVSFFPFAWGPRICIGQNFAMLEAKMAMALILQTFTFELSPSYVHAPQTVVTIHPQFGAHLILRKL

SEQ ID NO: 29626 - protein, 455 aa, Oryza sativa
  misc_feature (408)..(408): Xaa can be any naturally occurring amino acid
  unsure (1)..(455): unsure at all Xaa locations
MVLRRFAWPYGGQRASFCGSFTGWRECPMGLVGAEFQVVFDLPPGVYQYRFLVDGVWRCDETKPCVRDEYGLISNEVLVDNTHPVVQPETSIRVVSMDEGTILTTMPPDQLSQNSGVGTRQIAIFRHRVSEILLHNTIYDVVPVSSKIAVLDARLPVKQAFKIMHDEGLSLVPLWDDQQQTVTGMLTASDFVLILRKLQRNIRTLGHEELEMHSVSAWKEAKLQFYGGPDVAAIQRRPLIHVKDSDNLRDVALAIIRNEISSVPIFKPSTDSSGMPLLGLATLPGIVKFICSKLQEQPEGYSFLQNQIVSMPIGTWSPHTGKASNRQLRTSRPSTPLNSCLDLLLEDRVSSIPIVDDNGALLDVYSLSDIMALGKNDVYTRIELEQVTVEHALELQYQVNGRRHCHTXCLSTSTFLEVLEQLSAPGVRRVVVIEPRSRFVQGIISLRDAFTFLIG

SEQ ID NO: 29627 - protein, 179 aa, Oryza sativa
  misc_feature (110)..(110): Xaa can be any naturally occurring amino acid
  misc_feature (117)..(117): Xaa can be any naturally occurring amino acid
  misc_feature (155)..(155): Xaa can be any naturally occurring amino acid
  misc_feature (169)..(169): Xaa can be any naturally occurring amino acid
  unsure (1)..(179): unsure at all Xaa locations
MAPTVMASSGTSVAPFQGLKSTAGLPVSRRSTNSGFGNVSNGGRIKCMQVWPIEGIKKFETLSYLPPLTVEDLLKQIEYLLRSKWVPCLEFSKLGFVYRENHRSPGYYDXRYWTMWXLPMFGCTDATQVLKELEEAKKAYPDAFVRIIGFDKRQXQCQLISFIAYKPPXGCEESGGKLS

SEQ ID NO: 29628 - protein, 544 aa, Methanothermococcus thermolithotrophicus
MAANQPVVVLPENVKRFMGRDAQRMNILAGRIIGETVRSTLGPKGMDKMLVDDLGDIVVTNDGVTILKEMSVEHPAAKMLIEVAKTQEKEVGDGTTTAVVIAGELLRKAEELLDQNVHPTIVIKGYQLAVQKAQEVLKEIAMDVKADDKEILHKIAMTSITGKGAEKAKEKLGEMIVEAVTAVVDESGKVDKDLIKIEKKEGASVDETELINGVLIDKERVSPQMPKKIENAKIALLNCPIEVKETETDAEIRITDPTKLMEFIEQEEKMLKDMVDTIKASGANVLFCQKGIDDLAQHYLAKEGILAVRRVKKSDMEKLSKATGANVVTNIKDLKAEDLGEAGIVEERKIAGDAMIFVEECKHPKAVTMLIRGTTEHVIEEVARAVDDAIGVVACTIEDGKIVAGGGAAEIELAMKLRDYAEGVSGREQLAVRAFADALEVVPRTLAENAGLDAIEMLVKLRAKHAEGNNAYYGLNVFTGDVENMTENGVVEPLRVKTQAIQSATEATEMLLRIDDVIAAEKLSGGSGGDMGDMGGMGGMGGMM

SEQ ID NO: 29629 - protein, 762 aa, Oryza sativa (japonica cultivar-group)
MAILSDVATEVLIPIAAIIGIGFSIAQWVLVARVKLAPSQPGASRSKDGYGDSLIEEEEGLNDHNVVAKCAEIQNAIAEGATSFLFTEYQYVGVFMSIFAVVIFLFLGSVEGFSTKTHPCTYSKDKECKPALFNALFSTVSFLLGAITSVVSGFLGMKIATYANARTTLEARKGVGKAFITAFRSGAVMGFLLASNGLLVLYIAINLFKMYYGDDWEGLFESITGYGLGGSSMALFGRVGGGIYTKAADVGADLVGKVERNIPEDDPRNPAVIADNVGDNVGDIAGMGSDLFGSYAESSCAALVVASISSFGINHDFTGMCYPLLVSSMGIIVCLITTLFATDFFEIKAVKEIEPSLKKQLIISTALMTVGIALVSWLALPYKFTIFNFGEQKEVTNWGLFLCVSIGLWAGLIIGYVTEYYTSNAYSPVQDVADACRTGAATNVIFGLALGYKSVIIPIFAIALGIYVSFTIAAMYGIAVAALGMLSTIATGLSIDAYGPISDNAGGIAEMAGMSHRIRERTDALDAAGNTTAAIGKGFAIGSAALVSLALFGAFVSRAGVKVVDVLSPKVIIGLIVGAMLPYWFSAMTMKSVGSAALKMVEEVRRQFNTIPGLMEGTGKPDYANCVKISTDASIKQMIPPGALVMLTPLIVGTLFGVQTLSGVLAGALVSGVQVAISASNTGGAWDNAKKYIEAGASEHARSLGPKGSDCHKAAVIGDTIGDPLKDTSGPSLNILIKLMAVESLVFAPFFATHGGILFKLF

SEQ ID NO: 29630 - protein, 283 aa, Arabidopsis thaliana
MSSHSDEIEEEQISRIEKGKGKDCQGGIETVICTSPSIVCLTQKLIAEMIGTYFIVFSGCGVVVVNVLYGGTITFPGICVTWGLIVMVMIYSTGHISGAHFNPAVTVTFAIFRRFPWHQVPLYIGAQFAGSLLASLTLRLMFKVTPEAFFGTTPADSPARALVAEIIISFLLMFVISGVATDNRAVGELAGIAVGMTIMVNVFVAGPISGASMNPARSLGPALVMGVYKHIWVYIVGPVLGVISGGFVYNLIRFTDKPLRELTKSASFLRAVSPSHKGSSSKT

SEQ ID NO: 29631 - protein, 370 aa, Sinorhizobium meliloti 1021
MNAFSPPPRLLMGPGPSNVSPEVLAAQARPTIGHLDPSFVGLMDRIKDQLRLAFRTDNRVTFPLSAPASLAMEMALVTLLEPGDTAIIAQNGVFGGRMAEIAQRAGAEVRLVSVEWGKPVDPEAVRASILEAPQAKLLAFVHAETSTGVRSDAASLCALAREAGLLSVVDTVTGLGGIPVSVDEWQADAVYAGTQKCLSAPPGLAPITFSDRAVSAVKARKTPIQSWFLDLGLMLGYWEGEGARSYHHTAPVNALYGLHESLSRLLGEGLETAWARHRAAHDRLVERLQGLGIAFVVDKEHRLPQLNTVWLPEGVKDVPERRRLLDEFGIEIGGGLGPLAGRIWRIGLMGETCRIENVDRLAEAIAAVLP

SEQ ID NO: 29632 - protein, 182 aa, Thermus thermophilus HB27
MTLKALAQSLGITLKYLFSKPVTVPYPDAPVALKPRFHGRHVLTRHPNGLEKCIGCSLCAAACPAYAIYVEPAENDPENPVSAGERYAKVYEINMLRCIFCGLCEEACPTGAIVLGYDFEMADYEYSDLVYGKEDMLVDVVGTKPQRREAKRTGKPVKVGYVVPYVRPELEGFKAPTEGGKR

SEQ ID NO: 29633 - protein, 587 aa, Zea mays
MAMIDEPLYPIAVLIDELKNEDIQLRLNSIKKLSTIARALGEERTRKELIPFLSENNDDEDEVLLAMAEELGVFIPYVGGVEHAHVLLPPLETLCTVEETCVRDKAVESLCQIGAQMKENDIVDWFAHVVKRLAVGEWFTARVSSCGLFHIAYPSAPEQLKAELRTIYGQLCQDDMPMVRRAAASNLGKFAATVEQSHLKTEIMSMFDDLTQDDQDSVRLLAVEGCAALGKLLEPQDCAAHILPVIVNFSQDKSWRVRYMVANQLYELCEAVGTEPTRGDLVSAYVRLLCDNEAEVRIAAAGKVTKFCKILNPQIAIEHILPCIKELSSDSSQHVRSALASVIMGMAPVLGKDATLEQLLPIFLSLLKDEFPDVRLNIISKLDQVNQVIGIDLLSQSLLPAIVELSEDRHWRVRLAIIEYIPLLASQLGVGFFDDKLGALCMQWLEDKVFSIRDAGANNLKRLTEEFGPEWAMQHIIPQVLEKINNPHYLYRMTTLQAISLLAPVMGPDITCQQLLPVVIASSKDRVPNMKFNVAKVLQSLVPILDQSVVEKTVKPCLVELSEDPDVDVRYYAHQALRACDQMVISS

SEQ ID NO: 29634 - protein, 448 aa, Magnaporthe grisea 70-15
MDLKGAVTHSDPSMKAPKSLGTVVIKLGTSSIVDETTKKPLLSILTLIVETAVKLREDGHKVVIVSSGAIGVGLRRMDIAVRPKKHMSKLQALAAIGQCRLMSLWDSLFTQLRQPIAQILLTRNDIADRSRYLNAQNTVMELLDMGVIPIVNENDTLAVSEIKFGDNDTLSAITAAMVHAEMLFLMTDVDCLYDKNPRAHPDAKAIEVVEDIGALSADGKSAPYLSKDSRLATSAGVTTIIARASNPGNILNIVKWIEANPAATSSRISVNDHTDSFMPRNESGIQPPLHTRFLPSTDPIRDRSFWILHGLKPHGTVYIDQGAYQALLDKAGLLPVGVVDVEGHFAQQEAVRIVVVEKKLSTPTPDGKYWEGSTNEVGRALVNYSSAEIARIKGHQSTDIKDLLGYADSEYVVHRAQISFFRRESRPVSPTMEMEPITRGIGSYEVTH

SEQ ID NO: 29635 - protein, 226 aa, Oryza sativa
MAGHVLGGAHDAPSAANSVETDALARFAVDEHNKRENALLEFVRVVEAKEQVVAGTLHHLTLEALEAGRKKVYEAKVWVKPWLDFKELQEFRNTGDATTFTNADLGAKKVTHSCLVEFVICALLNLKGGHEPGWRDVPVHDPVVKDAADHAVKSIQQRSNSLFPYELLEIVRAKAEVVEDFAKFDILMKLKRGNKEEKFKAEVHKNLEGAFVLNQMQQEHDESSSQ

SEQ ID NO: 29636 - protein, 158 aa, Zea mays
TRPVQGQGQGSSVTKIGLWGGPGGSAQDITAERPPQRLHSVTVRAGVAVDSIEFTYTDSAGQRRAAGRWGGLGGNVRTIDLGNAEDVREVSGTYGAFEGATTLTSLRLVTSSRTWGPWGVENGTRFSVTAPIGSSIVGFYARAGTRLVDAIGVYLRQI

SEQ ID NO: 29637 - protein, 240 aa, Medicago sativa
RGKIQIKRIENTTNRQVIFSKRRNGLLKKAKELAILCDAEVGVMIFSSTAKLYDFASTSLRSVIGRYNKSKEEHNQLGSTASEIKFGQREAAVLRQQLHNLQESHRQIMGEELSGLTVKELQGLENQLEISLRGVRMKKEQLFMDEIQELNRKGDIIHQENVELYRKVYGTKDKNGTNRVLSLTNGVGIGDDSNRTCESPAQPATETRTTTALMHSLEISVLTCKQGKWTQILISYMNGI

SEQ ID NO: 29638 - protein, 403 aa, Bacillus halodurans
MMNREVVIVGGGPAGMLMGLLLAKEKIQVTVLEKNTTFNRDFRGETIAPGSVFLLKKLGVFKALEEHGFIKVQKIKMYDREEKLFSVNFDDFNHPQKFGIDIPQPVVLEALKQKASSYPNFEYIHGATCTDLIKDGEKVVGIRYSKEKEEHQIKCRLVIGAEGRFSRLRTLGHFAVEKKEFSRDLIWFKVPKPEGWEEGNLIKVYKHDHVIILPTYPNDLRVGTYIYLGGNRETKAKGIAAFIDKVCMIEPRLRKPMEKHIKSWDDTTLLKIFTAHVDQWAKDGLILIGDAAHTLSPILGQGVNIAMQDAFELLPYVNSGLKTYEGPLPAHHFDDYISKRKKQVSFVAGFQERQEQNLAASTPFQCMLRKVKMKLLDKAPFKIKVMKKLQYGVVANETTEGLT

SEQ ID NO: 29639 - protein, 447 aa, Lactobacillus johnsonii NCC 533
MDENNKVSGLPELAKSVIWMINFGYLGIQIAFTLETSQMSRIFQTLGADPTKLGWFFILPPLAGLVVQPAIGSFSDRTWAPKLGGRRLPYLLIGMIFAVIMMLFLPNIGSLGLGYGSIEALVFGAIAIAILDVAANMAMQPFKMMIGDMVNDEQKSYAYGIQSMLSNSGAVIAAFFPFLLTVLGVANTAKKGVVPQSVVISFYVGATILVITSLLTVTKVHEYDPKTYARYHGIKEEDNKEGGNWFELLKKAPKVFWQVSLVQLFCWFSFQYLSTYATGAIAENVWKVTDPSSAGYQLAGNWFGVLTAVQSIAAVIWSYVLAKVPNDHHKVGYGISLLLGAIGYGSIFFVHSQNILIVSFILIGISWAAMNTYPLTMVSNALSGKHMGTYLGLFNCSICLPQIIASLLSFILFPLMKYSMPAMMLTAGISGILAAVCVLFIKETYKN

SEQ ID NO: 29640 - protein, 416 aa, Bacillus subtilis subsp. subtilis str. 168
MSGRRELCTPLRTIMTPGPVEVDPRVLRVMSTPVVGQFDPAFTGIMNETMEMLRELFQTKNRWAYPIDGTSRAGIEAVLASVIEPEDDVLIPIYGRFGYLLTEIAERYGANVHMLECEWGTVFDPEDIIREIKKVKPKIVAMVHGETSTGRIHPLKAIGEACRTEDALFIVDAVATIGGCEVKVDEWKIDAAIGGTQKCLSVPSGMAPITYNERVADVIAARKKVERGIATQADRAALSGNRPITSNYFDLSQLEDYWSERRLNHHTEATTMLYALREGVRLVLEEGLETRFERHRHHEAALAAGIKAMGLRLFGDDSCKMPVVTCVEIPGGIDGESVRDMLLAQFGIEIASSFGPLAGKIWRIGTMGYSCRKENVLFVLAGLEAVLLRHNAGIEAGKALQAALDVYENAGRQAAV

SEQ ID NO: 29641 - protein, 186 aa, Triticum aestivum
LAWVAAEVWTLGGKNVSVEGSWDNWKSRKPMQKSGKDHSLLLILPSGVYRYRFVVDGERRCFPDLPCETDAMGNAVNLLDVHDFVPESVESVSEFEAPPSPESSYSFQAPEEKDFANEPPALPSQLHLGVLNSQNSEEICARPQHIVLNHLFIEKGWGAHPLVALGVTHRFESKYVTVVLYKPIER

SEQ ID NO: 29642 - protein, 339 aa, Clostridium tetani E88
MNYIKFDEKKPLDVIPIGRVTIDFNPNEINRPLEESRTFTKYLGGSPGNIAVGLARLGKKVGFLSTVSDDQFGNFVVNYLKNEGIDISQINRAKNGEKLGLTFTEILSPKESSILMYRKGIADLQLSSKEVSEDYIKSAKAIVISGTALSKSPSREAAFVALEYAKKHNTRIIFDLDYREYTWNCKEEIAIYYSLAARMSDVIMGSREEFNLMEGLISPEESNDKETAERWIGYGNKIVVIKHGKDGSTAYLHDGTSYKIKPFPVKLLKSFGGGDAYASAFIYGIMEGWDVIDALEFGSASAAMLVASHSCSEAMPKVEEIKQFIKEKKEEHGEMVVRG

SEQ ID NO: 29643 - protein, 340 aa, Clostridium tetani E88
MKVMINLGVIGFGRIGKVHAESLTKYVPNVSLKAVADPFMNEEGINCAKSMGVENAYKDYKEVLNDPEIDAVLVCSSTDTHSKISIEALKAGKHVFCEKPIDHDIERIKEVLKEVEKSNLKFQVGFNRRFDHNFKTIKNTIKAGKIGEPHIIKITSRDPEAPPIEYVKVSGGIFLDMSIHDFDMVRYLSGSEVEEVYAIGDALINPDIKKEGDVDTAIITLKLANGALGVIDNSREAAYGYDQRAEVFGSKGSVQISNDANSTAVVSTKDGVTGEKPLYFFLERYMQSFADEIKEFVKAIEEDKEVPVTAIDGLNAVLIGIAATKSLKEGRAVKISEIGL

SEQ ID NO: 29644 - protein, 359 aa, Hortaea werneckii
MAEFVRAQIFGTTFEITSRYTDLQPVGMGAFGLVCSAKDQLTSQAVAVKKIMKPFSTPVLSKRTYRELKLLKHLRHENIICLSDIFISPLEDMYVVTELLGTDLHRLLTSRPLEKQFIQYFLYQILRGLKYVHSAGVVHRDLKPSNILINENCDLKICDFGLARIQDPQMTGYVSTRYYRAPEIMLTWQKYDVEVDIWSAGCIFAEMLEGKPLFPGKDHVNQFSIITELLGTPPDDVIATICSENTLRFVQSLPKRERQPLKNKFKNADPQAIELLERMLVFDPRKRVKAGEALADPYLAPYHDPTDEPEAQEKFDWSFNDADLPVDTWKIMMYSEILDFHNVDANAEQAAHNNDTVAG

SEQ ID NO: 29645 - protein, 675 aa, Cryptococcus neoformans var. neoformans JEC21
MSRPSVDAPSVVSAINQRPAFERVATDHKDAKPDPTDLEINHLHQDDDKSSIEIEQSAGVTKIEALYLVFGNGWKLWTLWGSIALISIAYGLSQMTTYYYTAFATSAFGEHTVLGTISVITGIMAGVAKPFLAKLADLFSRPWALALSVLFYTIGYIVVAASKSVADVAGGEVIYTIGNTGLDFITSILLADITSLQWRGLVIGLYSLPFIPFAFVAGNIADGINAYSANGWRWGYGMFCIMIPCVVIPAILVLFWADWRAKKIGALSLASSTYAREKLLAGQTVEKRPFIATCLYYARRIDAVGLLLMGFAFGCILSPFTLYTTAKGGYKNPSLIALLVVGGVLFISFCLWEWKVASHPIMPKRVFNRTFVCCLLIDWNYYLSGYLSDTYWSSWLYVVKDYNDKDYTYIMNILTVGLCFFSVLAGLVQRYTHRFKYLQLSGLAIRIIGMGLNYLSVNGNMSDGVIVMSRVLISIGGGISVTSSQVACQGSVAHQDMALAMAILALWTSIGGAIGSAISASVWNRRVPEALTKYLGSTHNSTEIAEIFGSIVIARTTEPRDLVITGKTSDLLFLTPAFTNFFLAYNEAIKPLYLAALIMSMLSLAFGIFTYDIHLGKNHNAIEKRETAIRSEDEVRPEVIAAKAREVEEKIAAEVLRKEQLQAQVERTNVKAGEE

SEQ ID NO: 29646 - protein, 657 aa, Cryptococcus neoformans var. neoformans JEC21
MSRPSVDAPSVVSAINQRPAFERVATDHKDAKPDPTDLEINHLHQDDDKSSIEIEQSAGVTKIEALYLVFGNGWKLWTLWGSIALISIAYGLSQMTTYYYTAFATSAFGEHTVLGTISVITGIMAGVAKPFLAKLADLFSRPWALALSVLFYTIGYIVVAASKSVADVAGGEVIYTIGNTGLDFITSILLADITSLQWRGLVIGLYSLPFIPFAFVAGNIADGINAYSANGWRWGYGMFCIMIPCVVIPAILVLFWADWRAKKIGALSLASSTYAREKLLAGQTVEKRPFIATCLYYARRIDAVGLLLMGFAFGCILSPFTLYTTAKGGYKNPSLIALLVVGGVLFISFCLWEWKVASHPIMPKRVFNRTFVCCLLIDWNYYLSGYLSDTYWSSWLYVVKDYNDKDYTYIMNILTVGLCFFSVLAGLVQRYTHRFKYLQLSGLAIRIIGMGLNYLSVNGNMSDGVIVMSRVLISIGGGISVTSSQVACQGSVAHQDMALAMAILALWTSIGGAIGSAISASVWNRRVPEALTKYLGSTHNSTEIAEIFGSIVIARTTEPRDLVITAYNEAIKPLYLAALIMSMLSLAFGIFTYDIHLGKNHNAIEKRETAIRSEDEVRPEVIAAKAREVEEKIAAEVLRKEQLQAQVERTNVKAGEE

SEQ ID NO: 29647 - protein, 242 aa, Escherichia coli
LKERKEGAFVPFVTLGDPGIEQSLKIIDALIEAGADALELGIPFSDPLADGPTIQNATLRAFAAGVTPAQCFEMLALIRQKHPTIPIGLLMYANLVFNKGIDEFYAQCEKVGVDSVLVADVPVEESAPFRQGGLRHNVAPIFICPPNADDDLLGQIASYGRGYTYLLSRAGVTGAENRAALPLNHLVTKLKEYNAAPPLQGFGISAPDQVKAAIDAGAAGAISGSAIVKIIEQHINEPEKML

SEQ ID NO: 29648 - protein, 242 aa, Escherichia coli
LKERKEGAFVPFVTLGDPGIEQSLKIIDTLIEAGADALELGIPFSDPLADGPTIQNATLRAFAAGVTPAQCFEMLALIRQKHPTIPIGLLMYANLVFNKGIDEFYAQCEKVGVDSVLVADVPVEESAPFRQAALRHNVAPIFICPPNADDDLLRQIASYGRGYTYLLSRAGVTGAENRAALPLNHLVTKLKEYNAAPPLQGFGISAPDQVKAAIDAGAAGAISGSAIVKIIEQHINEPEKML

SEQ ID NO: 29649 - protein, 725 aa, Cryptococcus neoformans var. neoformans JEC21
MSPVAVHNKHGDSASHGTALSKNPHVKSSEVDTEKLVINAIRCLAADLCQQYKGGHPGTVMGAAAIATALWKYSMRYNPANPDWINRDRFVLSAGHACLLQYIMLHLSGYSSWTLDQIKKYHAPTMDGIAAGHPEIEFPGVELTTGLLGQGIANAVGLAVANKNMAATYNKDGFPIIQNKVWCFTGDGCLQEGVGQEALSMAGHWGLDNMILVYDNNSVTVDGNIDICFTDDTSAKLKSLGWHVLEVEDGSNDLAAIVDAFEQAQKLTGKPVFINIKTIIGIGSINQNSGKVHGAALGEDDVARVKTALGFDPKDKFIVPDAVYDYFKETKIKGAQYEQEWNDLFKRYKESFPSEAAEFQRRLDGKLEEAWENKFPSKDALPKDPKATRQSSGIALRSVIPEDKSFLVGSADLCESTFVNWDGMVEFQNPKSGYGDYSGRQIRYGIREHAMVAAANGLAAWHKGAIVPIMSSYFIFWLYAAPSLRMAALMKLRFIAIATHDSIGVGEDGPTHQPIAFPLFLRALPNFNYIRPADAEEVIGAWILGLRDADHPSLLSLTRQPVPLLSGTDRNKVQYGGYVVYGDENSIPDITLVATGSEVARAVDTAELLKDKYSVRVVSMPHTGRFDAQPLEYRRSVIPSTKSLVVSIEPYASFGWAKYAHAGAHMTGFGHSAPYSVLFEHFGFGPKTLAEKIRAWAEPKRNGDGWDIPGVGEFEELLVNSGNGH

SEQ ID NO: 29650 - protein, 411 aa, Schizosaccharomyces pombe
MALYSISKPVGSKINKHSYQDENTLVGKQALSKGTEKTKLSTNFEINLPRRTVLSDVSNVGKNNADEKDTKKAKRSFDESNLSTNEEADKPVESKFVKKLKVYSKNADPSVETLQKDRVSNVDDHLSSNPLMAEEYAPEIFEYIRKLDLKCLPNPKYMDQQKELTWKMREILNEWLVEIHSNFCLMPETLYLAVNIIDRFLSRRSCSLSKFQLTGITALLIASKYEEVMCPSIQNFVYMTDGAFTVEDVCVAERYMLNVLNFDLSYPSPLNFLRKISQAEGYDAQTRTLGKYLTEIYLFDHDLLRYPMSKIAAAAMYLSRRLLRRGPWTPKLVESSGGYEEHELKEIAYIMLHYHNKPLEHKAFFQKYSSKRFLKASIFVHQLVRQRYSVNRTDDDDLQSEPSSSLTNDGH

SEQ ID NO: 29651 - protein, 665 aa, Cryptococcus neoformans var. neoformans JEC21
MGAAAIATALWKYSMRYNPANPDWINRDRFVLSAGHACLLQYIMLHLSGYSSWTLDQIKKYHAPTMDGIAAGHPEIEFPGVELTTGLLGQGIANAVGLAVANKNMAATYNKDGFPIIQNKVWCFTGDGCLQEGVGQEALSMAGHWGLDNMILVYDNNSVTVDGNIDICFTDDTSAKLKSLGWHVLEVEDGSNDLAAIVDAFEQAQKLTGKPVFINIKTIIGIGSINQNSGKVHGAALGEDDVARVKTALGFDPKDKFIVPDAVYDYFKETKIKGAQYEQEWNDLFKRYKESFPSEAAEFQRRLDGKLEEAWENKFPSKDALPKDPKATRQSSGIALRSVIPEDKSFLVGSADLCESTFVNWDGMVEFQNPKSGYGDYSGRQIRYGIREHAMVAAANGLAAWHKGAIVPIMSSYFIFWLYAAPSLRMAALMKLRFIAIATHDSIGVGEDGPTHQPIAFPLFLRALPNFNYIRPADAEEVIGAWILGLRDADHPSLLSLTRQPVPLLSGTDRNKVQYGGYVVYGDENSIPDITLVATGSEVARAVDTAELLKDKYSVRVVSMPHTGRFDAQPLEYRRSVIPSTKSLVVSIEPYASFGWAKYAHAGAHMTGFGHSAPYSVLFEHFGFGPKTLAEKIRAWAEPKRNGDGWDIPGVGEFEELLVNSGNGH

SEQ ID NO: 29652 - protein, 137 aa, Yarrowia lipolytica CLIB122
MRPSTFHSVEWSRVRSKFKDEHPFEKRRAEAERIRKKYDDRVPVICEKVEKSDIPVIDKKKYLVPADLTVGQFVYVIRKRIKLSSERAIFIFVDDVLPPTAALMSSIYEEHKDEDGFLYVTYSGENTFGDLEQYRLE

SEQ ID NO: 29653 - protein, 465 aa, Yarrowia lipolytica CLIB122
MISAIRPAVRSSVRVAPMANTAFRAYSTQDGLKERFAELIPENVEKIKKLRKEKGNTVIGEVILDQAYGGMRGIKGLVWEGSVLDPEEGIRFRGLTIPDLQKQLPHAPGGKEPLPEGLFWLLLTGEIPTDAQVKGLSADWASRAEIPKHVEELIDRCPPTLHPMAQLGIAVNALESESQFTKAYEKGVNKKEYWQYTYEDSMNLIAKLPVIASRIYRNLFKDGKIVGSIDNSLDYSANFASLLGFGDNKEFIELLRLYLTIHADHEGGNVSAHTTKLVGSALSSPFLSLSAGLNGLAGPLHGRANQEVLEWILEMKSKIGSDVTKEDIEKYLWDTLKAGRVVPGYGHAVLRKTDPRYTAQREFALEHMPDYDLFHLVSTIYEVAPKVLTEHGKTKNPWPNVDSHSGVLLQYYGLTEQSYYTVLFGVSRAIGVLPQLIMDRAYGAPIERPKSFSTEKYAELVGLKL

SEQ ID NO: 29654 - protein, 441 aa, Cryptococcus neoformans var. neoformans JEC21
MQAAVSLVQDYMGTEPTSTKSPYKHRQDGSTMRALAWFGKEDVRMVDAPIPDITQDTDVIVKVTGTTICGSDLHLYHSEMLGMQKGDILGHEFMGIIDRVGPSVNHLKIGDRVVVSFQIACGTCRYCQQKLSSFCDKTNDSSVVVNLWGQRDSAFFGYSHLTGGWPGGQSEYVRVPFGEVNCLKVPAEVPDEQALYLSDVLPTSYHAVVDTGVQKGDIVGIWGLGPIGICCVKWALLKGASKVYAIDTNPTRLALARSLGPEVITVDFKADDVKKRIHDEVPQGLDVCIDATTFHEPKTFLHKVEKALMLETDVSETPNEMIWLVKKMGRVGLIGVYTAYTNHFNIGALMEKGVRFIGNGQAPVHLYWEEILHDYIMTGKFDVGFMISHRVDLEDFPQLYDKFDRRVAGVEKVFVQTKASAPPAKGFPALSKVDDWADKII

SEQ ID NO: 29655 - protein, 519 aa, Pseudomonas putida KT2440
MISAAVEPHVDAFKPDNREPLTPDFATTGKAPGAQRQHNPNKRKILFVTSEIADLVKTGGLGDVSAALPRALAHLHDVRVLIPGYRQVMESDNPIHIVGELGGHAALPPCKIGRMDMADGLVIYVLICPELYQRDGTPYGANNGRDWPDNHIRFARLGLAAAEIAAGEGKIHWTPEVVHAHDWPAGLAPAYMHWRGLNTPTLFTIHNLAYQGVYSRGCSPELAIPEHAMQQEGMEFYGKLSFLKAGLAYSSHITTVSATYAREITTPEFGCGLDGFLASKAQQGLLGGIPNGIDESWDSATDKHLQHNFSINDWEGKARNTQEVRELFGLDDSEGPLFAVVSRLVYQKGLDLTLGVADYIVEQGGQIAIIGRGEPEEEQAMRELALRHPGRIGVRIGFNETDARRMFAGSDFLLMPSRYEPCGLSQMYAQRFGSLPVARNTGGLADTIECGVTGFLFNESTVESYREALSRAFYVYGKKDLLNAMRCLSMTQPFNWCQAVEPYARLYEDLVKQTQLSHY

SEQ ID NO: 29656 - protein, 128 aa, Fusobacterium nucleatum subsp. nucleatum ATCC 25586
MKFMQYTEKVMQHFMNPHNVGVIENPDGYGKVGNPSCGDIMEIFIKVDNNIISDVKFRTFGCASAIASSSISTDMIIGKTVEEALKLTNKQVVDELGGLPAVKMHCSVLAEEAIKMAIEDYISKRDGK

SEQ ID NO: 29657 - protein, 326 aa, uncultured proteobacterium RedeBAC7D11
MKVIGFGAALVDKQFLIKDDALNALGIEKGLMTLNSEEEQNELLTFLQNQNYDQISSCGGSATNSIYAAAALGTSSGFIGKVAEDEDGEIYNADLKDNNIEISNCITSSNGKTGNCIVLITPDAERTMNTYLGVSSETKFSEINFEQVSATNLLFMEAYVVTSPDTKDTAKKLIKSCHESNIKIALSLSDPGIVAGFKDELKSWMNVKIDYVFCNHEEAKTFCDANEFDDLRNYAKTIFITNGVNPTIVLEEDQTYEVSAYKAKAVDTNGAGDMFAGGVIHGLSEGWENAESVRFGNFLASKGVAEIGPRLKKNRYIEYLEEFSKK

SEQ ID NO: 29658 - protein, 238 aa, Stylosanthes hamata
MAPREKTPAVKVNGKSNAGVKEVHFRGVRKRPWGRYAAEIRDPGKKSRVWLGTFDTAEDAARAYDAAAREFRGPKAKTNFPFPDSDDINNNNIVVVKNNNRSPSQSSTVESSSRDRDSYSAAAATAVADSSPLDLNLAPQELDSPDPFGSHSTQPFAVFPGGMPAAKQALYLDAVLRASMASHGQFGFGYNRPAAAGAQSDSDSSSVIDLNQNEGDVAKNNGRGLVLDLNEPPPQEMA

SEQ ID NO: 29659 - protein, 464 aa, Leptospira interrogans serovar lai str. 56601
MEKKESLDSSLKEIVSVCKRRGFVYPGSEIYGGLSNTFDYGPYGVELLQNLKQLWWKYFVHLREDIVGLDSSILLNPKVWEASGHVSNFNDPLIDCKNCKTRIRADKFLEDQKGEGFATGLTLEKMNQVIKESNFACPNCGQRGTFTEARDFNLMFKTSHGASAEDSLDIYLRPETAQGIFLNFKNVVSTTRRKIPFGIAQIGKSFRNEIMARQFVFRTREFEQMEMEFFCEPGTQKEWFSHWVNYCMNWLTEQVGIKKENLRVREHEKEELSFYSEGTSDIEFKYNFGWGELWGIASRTDYDLNQHQKFSGEDLKYQDQVQNKKYVPFVVEPALGVNRLFLAVVTDAYEEEKLPDGETRTVLRFSPKIAPVKAAIFPLMKKDGLPEKSREIFADLSKLGNIEYDDGGAIGKRYRRQDEIGTPFCITVDYDTLKDDTVTVRERDSMSQERIAVNQLKNWLFERL

SEQ ID NO: 29660 - protein, 188 aa, Sinorhizobium meliloti 1021
MSRALDKAGRWIGWAFFADLANGLALTFGYMFSRPVTMQYPDKEKWLPYSRYRGHHFLKRDDEGEIKCVACELCARICPCDCIEVVPYEDEKGNRRPAKFEIDTARCLFCGLCEDACPADAIALGQQYEFSSFSSRDLVIGRDDLLAKPGKAMTGGGVVAARLNTERDVLVEASEPRGYNWWRNIRRK

SEQ ID NO: 29661 - protein, 289 aa, Glycine max
MEDGHKFQEVSKPKYDCLLFDLDDTLYPYSSGVSVQIAKNIDEYMIQKLGVEAAKVAELNYSLYKTYGTTMAGLRAIGYDFGYDDFNSFVHGRLPYDVLLKPDPVLRGILQSLPVRKLIFTNADSKHAIRALKTLGLEDCFESIISFDTLNPSNTTNPSHNKDGSESRSTTAEIFDFCEHIRRAESDMVLPRTPVVCKPFDDAFGNAFKLADIDPQRALFFDDSIRNLLTAKRLGLHTVAIGTSVRTTGVDHALESIHNIKEAFPELWDAEVKHEFVQYNVGIETSVKA

SEQ ID NO: 29662 - protein, 262 aa, Escherichia coli
MLVAAGQFAVTSVWEKNAEICASLMAQAAENDASLFALPEALLARDDHDADLSVKSAQLLEGEFLGRLRRESKRNMMTTILTIHVPSTPGRAWNMLVALQAGNIVARYAKLHLYDAFAIQESRRVDAGNEIAPLLEVEGMKVGLMTCYDLRFPELALAQALQGAEILVLPAAWVRGPLKEHHWSTLLAARALDTTCYMVAAGECGNKNIGQSRIIDPFGVTIAAASEMPALIMAEVTPERVRQVRAQLPVLNNRRFAPPQLL

SEQ ID NO: 29663 - protein, 330 aa, Moorella thermoacetica ATCC 39073
MAVVYYDQDADLNVLKGKKIAVMGYGSQGHSQAQNLKDSGLDVVVGLRPESKSRAAAQAAGLEVKTVAEAAAEADIIQILLPDETQARVYREEIAPYLTGGKVLMFSHGFNIHFNQIVPPADVDVIMVAPKGPGHLVRRTYVEGQGVPALIAIYQDASGKAKEIGLAYAKGIGATRAGVIETTFKEETETDLFGEQAVLCGGTTALVKAGFETLVEAGYQPEIAYFECLHELKLIVDLMYEGGIKYMRYSISDTAEYGDVTRGPRLIDDHVKSTMKSILKEIQDGVFAREWILENQAGRPSFNAFRKKEREHLIEQVGDQLREMMSWLKK

SEQ ID NO: 29664 - protein, 376 aa, Oryza sativa
  misc_feature (75)..(75): Xaa can be any naturally occurring amino acid
  unsure (1)..(376): unsure at all Xaa locations
MILQQMEKGNSLMLHTRRSGNQIRIRPRHRWSLLIIYRMAMLPSLMLLTQSSGVHVLMGLLNNQPPSLLLQMVRXAEFTDSAYSVKWSPRSVAPPKAPGIFAQHSNGNKAQFTDAGYPVDWNPRSVAPPTPPAALSSVAHPAAGIHIQRGMLFLMKKLHPGAVLPEGTKLALPHGDHGVAAAAPRFIIYKDKGDAVPFDLRAMDAILAMFGILPGSDKAAQVADTLRTCGELTAAGGEEPRACCATSREAVLDFAASALGTSAPRAVTTLVHGREPRRYVVAADGVARIGGDAVVACHPMPYPYEVYYCHRPADAVALRVDLHAVAGVGLGGATAVDVCHVNTTTWDSAYFELLKASRGDAICHYMPQGYVLWLAN

SEQ ID NO: 29665 - protein, 586 aa, Rhizobium sp. NGR234
MLQKFISKSNQSLLMRLLAENFKHQAPWYGIAIGSMVVVAVMTSASAWIMRDVVNSTVVSKDIEKVFGVAVTVAIIFAVKGLATYVQSIFLSKAGNNIIAHTQRRLFEHVLRQGLSFYSIYPSSELLVRLTNNAQAVRSVIELVVTSFIRDLFSLMGLLAVMVIQQPLLSLVSAAVGPGAILGVRVLTRKVRKIMELEIASIGQIIQSVQETSTGIRIVKAFALEDFMRRRMDKYIGDVERRANSIARLEAASSPIMETLSGFAIAGVIALSGVLVLQQGNTPGELMSFITALLLAYEPAKRLARMRISLESALVGVRMMYQLADHPIELTEKNSAIPLPEGPGEIRFKDVNFSYKNGERLFQNLNVTFPAGKTTALVGPSGAGKSSIINLIMRLYDPDVGSVTVDGHDLKDVTFRSLRDRIGFVGQDTFLFSGTIKYNISLGREGASDEEIIEAAKTANAHDFIMKMPHGYDTEVGENGIKLSGGQKQRITIARAMLRNAEILIFDEATSALDSESEIQIRQALARLTRKRTTIMIAHRLSTVTAADNIVVMEGGQVAEQGPQGRLLSQDGVYRRLYELQLLPSA

SEQ ID NO: 29666 - protein, 672 aa, Moorella thermoacetica ATCC 39073
MELLAPLTGIVALLFAFYLTNKINRSDPGNPRMQEIAVAIHEGAMAFLMREYRTLIFFVLGMTALIVVAGFMTRGAESMQPATAIAYVAGTLCSIGAGYIGMQVATRANVRTANAARHSSNAALDIAFSGGSVMGMAVVGLGLLGLGIINYVFKNPSIVNGFALGASSIALFARVGGGIYTKAADVGADLVGKVEAGIPEDDPRNPAVIADNVGDNVGDVAGMGADLFESYVGSIISGIALAAALNIPNGTLVPLMIAAIGIVSSILGAFFVKTGEGANAQKALNTGTMVASILAIVGTFLATRLLPAHFTAGSMSYTSTGVFAATIAGLIAGVLIGRITEYYTSGDYEPVKEIAKASQTGTATNIIEGLSTGMLSTVLPILVIVIAIIASYRFAGLYGIAMAAVGMLSTTGTTVAVDAYGPIADNAGGIAEMAELDPKVRKITDALDSVGNTTAAIGKGFAIGSAALTALALFSAYTAAARITAIDLTDPKVVGGLFIGGMLPFLFAALTMKAVGRAAFQMIEEVRRQFKSIPGLMEGKARPDYARCVAISTGAAIKEMIVPGLLAVLVPLAVGLIPGLGKEALGGLLAGATVTGFLMAVMMANAGGAWDNAKKYIEGGQYGGKGSPAHAAAVNGDTVGDPFKDTSGPAMNILIKLMTIVSLVFAPLFMQL

SEQ ID NO: 29667 - protein, 257 aa, Arabidopsis thaliana
MGRSPCCEKAHMNKGAWTKEEDQLLVDYIRKHGEGCWRSLPRAAGLQRCGKSCRLRWMNYLRPDLKRGNFTEEEDELIIKLHSLLGNKWSLIAGRLPGRTDNEIKNYWNTHIKRKLLSRGIDPNSHRLINESVVSPSSLQNDVVETIHLDFSGPVKPEPVREEIGMVNNCESSGTTSEKDYGNEEDWVLNLELSVGPSYRYESTRKVSVVDSAESTRRWGSELFGAHESDAVCLCCRIGLFRNESCRNCRVSDVRTH

SEQ ID NO: 29668 - protein, 406 aa, Arabidopsis thaliana
MSEEKVVAVIMVGGPTKGTRFRPLSFNTPKPLIPLAGQPMIHHPISACKKISNLAQIFLIGFYEEREFALYVSSISNELKIPVRYLKEDKPHGSAGALYYFRDRIMEEKPSHVFLLNCDVCCSFPLQGILDAHRRYGGIGTMLVIKVSAEAASQFGELIADPDTKELLHYTEKPETFVSDLINCGVYVFTSDIFNAIEEVYSQIRDTSSNYQSATRSVPADFVRLDQDILSPLAGKKQLYTYENKDFWEQIKTPGKSLKCSALYLSQFRETSPHILASGDGTNRKPTIIGDVYIHPSVKLHPTAKIGPNVSISANVRVGPGVRLISCIILDDVEIKENAVVINSIIGWKSSIGRWSRVQASGDYNDRLGITILGEAVTVEDEVAVIGSIVLQNKTLNVSVQDDIIL

SEQ ID NO: 29669 - protein, 452 aa, Nostoc punctiforme PCC 73102
MAFDYNLFVIGAGPGGLAAAKKAASYGVRVAIAEQESIGGTCVNRGCIPKKLIVYAADFALQKQIAPSYGWSECQTYFDWTLFIKSVHQHLDTLNQSYFQQLHKAGIELISDRATFIDAHTVDINGLKVTADKILIAVGGQPLKPKIPGIEYAITSREMFQLPYLPKRLAIIGGGYIGVEFSSMMHAFGCQVTVIEKDEMILSGFDDEIRSAVEQGLRKRGIKLLTSSTVQEIKYSDESLLLTITGKKREIITADTILVATGYAPNTKNLGLENAHVELGEHGAIKVDEYSRTTQENIFAVGDCTSRVQLSPVAKAEGIAFANTVFGNKVQKLDYDYVPSAVFCRPEAAGVGMTEAKAREKFGESVQCYYTQFQPLLYQLTDQNEPTTMKLVLNGDSGQVLGAHLVGEHAADIIQSLGVAIRKGITKEDLDEIIGIHPTVGEEFFSLDRVQE

SEQ ID NO: 29670 - protein, 307 aa, Arabidopsis thaliana
MYSAIRSLPLDGGHVGGDYHGPLDGTNLPGDACLVLTTDPKPRLRWTTELHERFVDAVTQLGGPDSEYYFVYLSLCSVSLLEATPKTIMRTMGVKGLTLYHLKSHLQKFRLGRQAGKESTENSKDGESQDTGSSSTSSMRMAQQEQNEGYQVTEALRAQMEVQRRLHDQLEVQRRLQLRIEAQGKYLQSILEKACKAFDEQAATFAGLEAAREELSELAIKVSNSSQGTSVPYFDATKMMMMPSLSELAVAIDNKNNITTNCSVESSLTSITHGSSISAASMKKRQRGDNLGVGYESGWIMPSSTIG

SEQ ID NO: 29671 - protein, 390 aa, Magnaporthe grisea 70-15
MSKQQHPSSKTQITRRRDTADMTFEQVLHKGSSANMGGLSSMLGKDREASKTAVDQYFRHWDGKTAKTETTKVREERKADYATLTRQYYNLVTDFYEYGWGQSFHFCTFAPGETFASAITRYEHTLAHRIGIKKGMKVLDIGCGVGGPARQIAKFTGANITGITINEYQVERARRYAEMEGYGAGEQLKFVQGDFMALPFEKETFDAVYSIEATVHAPKLEDVYKQIFNVLKPGGIFGLYEWVMTDAYDENDPHHKEIRFGIEHGGGIANLQTAQTAIAAIKAAGFELLESEDLADNSDRAPWYWPLGGNAWQYASTFGDILSTFTMTPAGRAIAHTVLGVVESIGLVPPGTKKTADSLSTTAAALVAGGKEGLFTPMFLMVARKPVAKE

SEQ ID NO: 29672 - protein, 372 aa, Bacillus sp.
MAEKPLRPLAEGELSIDQVKEQLVELGKKRGVLTYAEITEKLAPYDQDSDQMDEFFEYLGEQGVEILNDNEEVPSLQQVEKEEEEFDLNDLSVPPGVKINDPVRMYLKEIGRVPLLTAEEEIELATRIEQGDEEAKRRLAEANLRLVVSIAKRYVGRGMLFLDLIQEGNMGLIKAVEKFDYNKGFKFSTYATWWIRQAITRAIADQARTIRIPVHMVETINKLIRVQRQLLQDVGREPSPEEVAEEMDLTPEKVREILKIAQEPVSLETPIGEEDDSHLGDFIEDQDALAPSDAAAYELLKEQLEDVLDTLTDREENVLRLRFGLDDGRTRTLEEVGKVFGVTRERIRQIEAKALRKLRHPSRSKRLKDFLE

SEQ ID NO: 29673 - protein, 544 aa, Rhodopseudomonas palustris CGA009
MNFQPRGISAIHAPTSYKSEIEAAEALLKDKPTWNGVTAEAVARMRLQNRFKTGLDIARYTAAQMRADMAAYDADPTKYTQSLGCWHGFIAQQKLISIKKHGGGRTDRRYIYLSGWMIAALRSEFGPLPDQSMHEKTSVPALIEEIYTFLRQADSRELNDLFRQLDKAREAGDKAKETAIIDQIDNFQTHVVPIIADIDAGFGNAEATYLLAKKMIEAGACALQIENQVSDEKQCGHQDGKVTVPHDVFIAKVRAIRHAFLEMGVEDGIIVTRTDSLGAGLTQQIAVSHQPGDIGDQYNSFLDCEEVDASKIGNGDVIISRNGKLLRPKRLPSNLYQFRPGTGADRCVLDCITSLQNGADLLWIETEKPHIEQIASMVDRIREVVPNAKLAYNNSPSFNWTLNFRWQVYDAWKEEGKDVSKYNRAELMKAEYDETPLAIEADARIRTFQADSAKRAGIFHHLITLPTYHTAALSTDNLAREYFGDQGMLGYVKNVQRQEIRQGIACVKHQNMAGSDIGDDHKEYFAGDAALKAGGEHNTMNQFS

SEQ ID NO: 29674 - protein, 285 aa, Glycine max
  misc_feature (50)..(50): Xaa can be any naturally occurring amino acid
  misc_feature (91)..(91): Xaa can be any naturally occurring amino acid
  misc_feature (101)..(101): Xaa can be any naturally occurring amino acid
  misc_feature (113)..(113): Xaa can be any naturally occurring amino acid
  unsure (1)..(285): unsure at all Xaa locations
LLFFEALLQAKEDLKEVDKEITGGELADATNMSIIQVRKAIEVGRAARNXLIKHILRLGLFVINRYFQDFASLPEGSFQVGGKLPGFFEEXERKDPKRRLXLSTYSLFGIRHXIVRSITLSSFTRVSFGLERVRVDIQRTKLKLTFELQRSPTEEELVERIGISLERYHEVMKASKPILSLHSRHITTQEEYINGITDVDGVNGDNRRQLAVLRLALDDVLDSLKPKESLVIRQRYGLDGKGDRTLGEIAGNLNISREIVRKHEVKALMKLKHPARLDYLRRYVV

SEQ ID NO: 29675 - protein, 358 aa, Cryptococcus neoformans var. neoformans JEC21
MSILTRLSSRVPYLAKQLSTMPSFQIPKTMKAIQVDAPGGPEVNVLREIPVPTPNPDEVLIKVQYTGVNYIDTYYRSGLYPKKFPYTVGQDAVGTLVQGPSSPDVKFDIPLGTTVFTPAGSSFAEYLVAPSSRVGVVPEGVDPKDGVSWSTVGLTALALAKESYPVKKGDWVLIRAAAGGVGLVLTQIVKYLGGHVIGTVSSQDKAELVKSYGADLVLLSTDPSEDNVKKILEVTNGGVHGVYDGVGKDTWEEDFLVVRRKGTIVTFGNASGAVPAFAPLKLTPKALKVTRPTVWSIVTTPEEFKEYTTELVDIVKKAGLKFEVYKVYELTQEGVVQAQKDITSRGTTGKLLIHVADK

SEQ ID NO: 29676 - protein, 125 aa, Helicobacter hepaticus ATCC 51449
MKLLVVDDSSTMRRIIKNTLQRLGYEDILEAEHGVEAWQIMDTTEGIQVLITDWNMPEMNGLDLVKKVRSDERYTSIPIIMVTTEGGKAEVITALKAGVNNYIVKPFTPQVLKEKLEVVLGVNED

SEQ ID NO: 29677 - protein, 385 aa, Desulfitobacterium hafniense DCB-2
MGYYDQNDYSDYSAKRRRPGLFATIALALISALIGGLISVALVPSLYGNQPGGGKEVILGQGSSAPPVTITQPTGFPTVEVAKAVGPAVVGIANFQSRGRIFGGAGLTEAGTGSGFIIDAQYGYIVTNYHVVANASKLMVSLADGRNAEATLVGQDPRTDLAVLKISADGLTVAQLGNSEQVQVGEPVVAIGNPGGEEFARSVTQGVVSAKNRILLIEGESSFNLIQTDAAINPGNSGGPLVNYNGQVVGINSAKNAEAGFEGMGFAIPITDAIPVIEQLIAKGYFSHPGFLVSIDTRYTPEWAAQRGWPAGAYISNVDPSGPAAQAGIQAGDVLVKIEGVTVRSSLELTHELFKFKPGDTVTVTYYRNGQNTDVQVKLVEIIAN

SEQ ID NO: 29678 - protein, 303 aa, Bacillus cereus ATCC 14579
MKRWQMEWLLVSVALVWGANYTIGKYGVAYMSSIQFNSLRFLVASPVLLLITFLMERSLRIDRKDWLRLVAVGIVGTTMYQTMFMLSVKYTSATNASLLIAMSPIFTGILAVLHKQERFSMKVQIGSIVAFIGAAFVLLTGHTGGTTYEYAWLGNIIGLVAAIAWGWYPILAQPLITKYSAMRVTSWSTLIGIVPLVVYCLFNVNTLTWPVDMPSWGSLAYSIVFATIFGLAMWYVGISKIGSTKVMVYMYLVPLFAVIFAAVTIGEQINMMQLVGGLIIFIGLYVVKKGGIQKPALNLKKVS

SEQ ID NO: 29679 - protein, 464 aa, Yarrowia lipolytica CLIB122
MDSDTESVKRRKSSGSESESSVRDPKRTKIEDEDFQENGIDDEDEEEEEEEAKDEGDEDDEEKGEDDEEDDEEKEGEDGEGEEEDEEEDEEKKREEEEKYVTSFNFDGVEYKYKERPAVIEEREGKIEFRVVNNDNSKENLMILTGLKNIFQKQLPKMPREYIARLVYDRSHVSMAVVRKPLTVVGGITFRPFDTRKFAEIVFCAISSTEQVRGYGAHLMNHLKDYVKATSPVMYFLTYADNYAIGYFKKQGFSKEISLDRSVWMGYIKDYEGGTLMQCSMLPRIRYLDVNKILLLQKALIHKKIRAISKSHVVRKGLDHFRDSTTPVDPMTIPGLKEAGWTPEMDELARRPKRGPHFAVMQHVLSELQNHASAWPFAQAVNRDEVPDYYEVIKEPMDLSTMEQRLEADSYKTMEEFVYDARLVFNNCRAYNNETTTYYKNANKLEKFMVAKIKEIPEYSHLVE

SEQ ID NO: 29680 - protein, 489 aa, Francisella tularensis subsp. tularensis SCHU S4
MRVLHVCSELYPILKTGGLADVTAALPPALAGFGVDSRVLVPGFPAFINAIKDKQLLINIPSRFGAEEINIFLAKISNTKIDIYVIDAPSLFARPGNPYADSSNQAYADNYLRFALLGWVAARISEGLDAKWKPEIVHSHDWHAGLVPAYIKASELASGKKAVKTVFTVHNLAYQGLFPMSVFAELDLPGIFLSMNGLEFYGQVSFMKAGLYFADKITTVSPTYAKEIQIYEQGCGLEGLLADRHNDLYGVLNGVDPQIWNPKKDSLIATNYSSTTVATGKAKCKLALQQMMGLAEKEDALLFGIVTRLTEQKGLNLLIEAIGEITSRGGQIVLLGSGDKALEEVFLAAAKKYSKSIAVQIGYDEEQAHRIIAGSDVIMVPSRFEPCGLTQLYGLTYGTLPLVHKVGGLADTVIDSSLENLADGTATGFVFDEFSVESLTLAIRRAFALYNRKTDWKKVRKTAMQQQVTWDSSAEKIYQIYKNLVRENN

SEQ ID NO: 29681 - protein, 271 aa, Rhodospirillum rubrum
MSATTPTTDRLSRRFAALKAEGRGGLVTYVMAGDPDQETALALMRGLPGAGADIIELGMPFSDPMADGPAIQAAALRALAAGMTLTGTLETLKAFRATDDDTPVVLMGYYNPIHYYGAEAFARDAALAGADGLIIVDLPPEEADELLPFLRAQGLHLIMLATPTTDEARLPAILERASGFLYYVSIAGITGTAAADAGGVAQAVARIRRKTDLPIAIGFGVSTPAQAATMARVGDAAVVGSAIVRRLAEGGDVLGFVGELAGALRKVDAAG

SEQ ID NO: 29682 - protein, 201 aa, Aquifex aeolicus VF5
MGVKKLSRKDYLNILESILFIDFLKGLSVTLKNLLRRPITTEYPKEKLTPPKRFRGAHGHYVWDGTEPDSLKAIEKFMSYEKAKSRCVACYMCQTACPMPTLFRIEAVQLPNGKKKVVRFDMNLLNCLFCGLCVDACPVGCLTMTDIFELANYSRRNEVLRMEDLEKFAIDFKQRRGNEPDRIWPNDEEREKLWGKIEWSG

SEQ ID NO: 29683 - protein, 721 aa, Pyrobaculum aerophilum
MNMISYALLGVILGISGVIYAVYLAVWVLRQDPGNEKMRFISQAIATGARAYLFRQYRTLAVLLVILAVLILVAIDMPRRTFGLTALAFIVGALGSMLAGYLGMYVTTRSASRVAQAAATGGMGKALLVSWRAGAVMGLSLASIALLLISGFYLVFRSVLPDDWAVPLVALGFGASLVTLFMRVGGGIYTKAADLGADLVGKVEAGIPEDDPRNPGVIADNVGDNVGDVAGMAADVYESYIVTVTAAIFLAAILGLPTQFIEAIILFAALALVATFAGVNLLKTTGVKHPLSSISLAIYATIGLTVVLFFIGAFTLGLDSTKALALAATTSLGAVIAPLIVKITDYYTSYNYGPVRKIAEQAKISPATVIITGYGVGLMSAIPVIAVIVAVLGISYMIGYYTVPVSGFGELSKYLAGIFGTAMASVGLLVVAGIIITADSYGPVSDNAGGVVEMAGLPDEVREITDVLDSVGNTTKATTKGYAIASAALAALVLFIALIFEIVYSASKILGKGIVDMISESLSGLQLINANVLIGAFLGVALVYFFSSRTLEPVGRTAMEIVEEIRRQFREKPGILEWKEQPDYARVVDIATRRALGEFLIPGLAAIVLPLITGLLLGWNALAGLIMGAIVAGVPRALLMANAGGAWDNAKKYIEIQGLKKTEMHKAAVIGDTVGDPMKDTVGPSLNPLIKVLNTLSVVFTYVIVSTNIALGIWPSGLLPF

SEQ ID NO: 29684 - protein, 619 aa, Candida albicans SC5314
MRSLSIFSLVFLFFSTLITAKTHTWYYKTGWVNANPDGGFERPMIGFNDSWPLPTLRVKKGDTVNLYLINGFDDRNTSLHFHGLFQHGTNQMDGPEMVTQCPIPPGETFLYNFTVDDQVGSYWYHSHTSGQYGDGMRGVFIIEDDDFPYDYDEEVILTLGEHYHDFSDDLHKNFMSRYNPTGAEPIPSNILFNETRNNTWKVEPGKTYFVRIINIGRFVSQYVWMEDHEFTIVEVDGIYVEKNTTDLIYITVAQRYGVLITTKNSTDKNYAFMNRVDIDMLDVIPDELELNGTNYIEYNSKADKPEPYLLDSIDDYFDDFYLKPLSKEKLLDDADYTITVDVQMDNLGNGVNYAFFNNITYTTPRVPTLLSVLSAGDDASNELVYGTNTNSFVLQSGDVVDIVLNNLDTGKHPFHLHGHVFQLIERHEEIPETEDPVGYNASDHADWPEYPMLRDTVYVRPQSYIVMRFKADNPGVWLFHCHIEWHLDQGLAIQLIEDPQGIQKNTSQHITDNHKQICEKVGVSWEGNAAANSKDYLNLKGENVQHKRLPTGFTARGIVALVFSCIAGVLGLATIAYYGMNDIADVEERVARDLDVDFDEEDNEIVNEGSSSSGSNSKH

SEQ ID NO: 29685 - protein, 429 aa, Alkalilimnicola ehrlichei MLHE-1
MQRSHELFERARQHIVGGVNSPVRAFTGVGGEPPFIARAEGPYLYDEDGNRYVDYVCSWGPMVAGHAHPKVVRAVQAAAADGLSFGAPTEVEIRMAEKLKAMLPSLERVRMVNSGTEATMSALRLARGHTGREKIIKFRGCYHGHVDALLVQAGSGALTLGIPGSPGVPAAVVEQTITLPYNDAEAVRECFQRMGDEIAAVIVEPVAGNMNCVPPVPGFLEALRECCDDHGSVLIFDEVMTGFRVGVQCAQGRYGITPDLTCLGKVIGGGMPVGAFGGKAQIMADLAPEGPVYQAGTLSGNPVAMAAGLATLALVDDPATHRALEEATATLVDGLRERAEAAGVSVSLNQAGSMFGLFFTDQNPVTTFEQVQACDLEAFKVFFHAMLEEGVYMAPSAFEAGFLSTAHDTPAIEYTLAAAERAFARVARR

SEQ ID NO: 29686 - protein, 209 aa, uncultured proteobacterium RedeBAC7D11
MFGFKSLEIPIKEDCLPGRTQAIYNPENHFVTGAPMSECMSQDSPRILFGMGCFWGAEKMFWDLDCVKVTGVGYAAGHTPNPTYEEVCSGLTAHSEIVFVTYEDASNLEELLQVFWEGHDPTQFMRQGGDVGTQYRSGIYFFDKAQEELALKTKEIYQAKLDANGFGEIVTEILPVSEEFYAEDYHQQYLAKNPNGYCGHGGCGVRFKD

SEQ ID NO: 29687 - protein, 1106 aa, Pseudomonas putida KT2440
MAKRSRPAAFIDDPLWYKDAVIYQLHIKSFFDSNNDGIGDFAGLISKLDYIAELGVNTLWLLPFYPSPRRDDGYDIAEYKAVHPDYGSMADARRFIAEAHKRGLRVITELVINHTSDQHPWFQRARHAKRGSKAREFYVWSDDDQKYDGTRIIFLDTEKSNWTWDPVAGQYFWHRFYSHQPDLNFDNPQVLKAVIGVMRFWLDLGVDGLRLDAIPYLIERDGTNNENLAETHDVLKAIRAEIDANYPDRMLLAEANQWPEDTRPYFGEGDGDECHMAFHFPLMPRMYMALAMEDRFPITDILRQTPEIPANCQWAIFLRNHDELTLEMVTDRERDYLWNYYAEDRRARINLGIRRRLAPLLQRDRRRIELLTSLLLSMPGTPTLYYGDELGMGDNIYLGDRDGVRTPMQWSPDRNGGFSRADPQRLVLPPIMDPLYGYQTVNVEAQSHDPHSLLNWTRRMLAVRKQQKAFGRGSLRTLTPSNRRILAYIREYTDADGNTEVILCVANVSRAAQAAELELSQYADKVPVEMLGGSAFPPIGQLPFLLTLPPYAFYWFLLASRDRMPSWHIQPTEGLPELTTLVLRKRMEELLQAPASDTLQSTILPQYLPKRRWFAGKEGPIDAVRLCYGVRFGTATTPVLLSEIEVLSDGTATRYQLPFGLLREEQIHTALPQQLALSRVRRAHQVGLITDAFVLEPFIHAVMQACQDGLRLPCGDAEGELRFECTEQLAGLALDEESEVRYLSAEQSNSSVVIGDRVVLKLIRRVNPGIHPELEMSAYLTAAGFANISPLLAWVSRVDEQHAPHLLMIAQGYLSNQGDAWGWTQNTLERAIRDQMEPTRNDAEAHTDALAELSGFAALLGQRLGEMHLLLAAPTEDPAFQPRPSDAQDSERWCAQISTELTHALDLLAQHRDTLDSDSQSLVDDLQQQRDGLAQHIDTLSKQAQGGLLMRVHGDLHLGQVLVVQGDAYLIDFEGEPARPLEERRAKHSPYKDVSGVLRSFDYAAAMILRSASAVDLSEPARQARQRVARQYLHQSRHAFVEAYGLATAAMPHAWQHAEGERAALELFCLEKAAYEITYEAENRPSWLAVPLHGLHGLISTWGESE

SEQ ID NO: 29688 - protein, 465 aa, Oryza sativa (japonica cultivar-group)
MQSLLLPTFAAASAAPPRRGRVPPAGRASVSVRASASAAAVAPRRETDPRKRVVITGMGLVSVFGNDVDAYYDRLLAGESGIGPIDRFDASNFPTRFAGQIRGFSSEGYIDGKNDRRLDDCLRYCIVSGKKALESAGLALGSKSMDKIEKTRAGVLVGTGMGGLTVFSDGVQNLIEKGHRKITPFFIPYAITNMGSALLGMDIGFMGPNYSISTACATSNYCFYAAANHIRRGEADVMIAGGTEAAIIPIGVGGFVACRALSQRNDDPKTASRPWDQDRDGFVMGEGAGVLVMESLEHAMKRDAPIIAEYLGGAVNCDAYHMTDPRSDGLGVSSCIKQSLADAGVAPEEVNYINAHATSTLAGDLAEVNAIRQVFKDPSEIKINATKSMIGHCLGAAGGLEAIATVKAITTGWVHPSINQFNPEPAVEFDTVPNVKKQHEVNVGISNSFGFGGHNSVVVFAPFKP

SEQ ID NO: 29689 - protein, 176 aa, Zea mays
MAAASSATSVHDFTVKDSSGKDVDLSVYRGKVLLIVNVASQCGLTNSNYTQQAQLYEKYKNQGLFLIHCSCFEILAFPCNQFGGQEPGTNEEIAQFACTRFKADYPIFDKVDVNGNNAAPIYKFLKSSKGGLFGDSIKWNFSKFLVDKEGRVVDRYAPTTSPLSIEKDIKKLLGSS

SEQ ID NO: 29690 - protein, 239 aa, Stylosanthes hamata
MAPREKTPAVKVNAGVKEVHFRGVRKRPWGRYAAEIRDPGKKSRVWLGTFDTAEDAARAYDAAAREFRGPKAKTNFPFPDSDDINSNNNNIVVVKNNNRSPSQSSTVESSSRDRDSYSAAAAATAVADSSPLDLNLAPAGAGFAGSIRFPFQQPFAVFPGGMPAAKQALYLDAVLRASMASHGQFGFGYNRPAAAAAGAQSDSDSSSVIDLNQNEGDVAKNNGRGLVLDLNEPPPQEMA

SEQ ID NO: 29691 - protein, 230 aa, Borrelia turicatae
MIQKLTKIVATISDLRCDPEHIKELYEAGVNVIRLNTAHQSHDDAIRVINNVRKVSNKIALMIDTKGPEVRTANIENPITVKIGDKIIISTSPINESNALQTNYDGFVNEVPNGSTILIDDGELEMTVIEKLTDRLICKVKNDGQIKNKKSINTPGISLKLQSVTEKDKGFIELAAKQNIDFIAHSFVRHAKDIQDVKDILNAAGNPDVKIIAKVENQEGIDNIEEIAKA

SEQ ID NO: 29692 - protein, 310 aa, Erwinia chrysanthemi
MTTKNIAIIGECMIELSRKARISIRGFGGDTLNTAVYISRQVKPDALDVHYVTALGTDSFSSEMMASWQKEGVKTDLIQRLDNKLPGLYFIETDATGERTFYYWRNDAAARYWLESPDADTISQQLAQFDYIYLSGISLAILNQASRARLLTVLRACRANGGKVIFDNNYRPRLWQSKEETRQAYSDMLACTDIAFLTLDDEDMLWGELPVDEVLKRTHGAGVMEVVIKRGADACLVSIQGEALLEVPAIKLPKEKVVDTTAAGDSFSAGYLSVRLNGGSAQDAAKRGHLTASTVIQYRGAIIPLEAMPA

SEQ ID NO: 29693 - protein, 235 aa, Oryza sativa (japonica cultivar-group)
MSSVQLSGAGVAAVAFTKNGASSFDGLRLAPPSVRVCSSRRPSRSLVVKAATVVTPKYTSLKPLGDRVLVKLGAAEEKTVGGILLPSTAQSKPQGGEVVAVGEGRTIGDKKVEVSLQIGAEVVYSKYAGTEVQFNDTKHLILKEDDIIGVLETDDVKDMKPLNDRVLIKVAEAEDKTAGGLILTETTKEKPSIGTVVAVGPGPLDDEGKRQPLSVSAGSTVICFNFEFRIDGSRW

SEQ ID NO: 29694 - protein, 494 aa, Rubrobacter xylanophilus DSM 9941
MNVEREGRVETRMIERLFVGGEWVGEASTGRTFEVENPASGRVIAVLPDGGGGEMRRAVEAAVAAQPGWEEATAYERASVLWRAAGLMRERAEHLARVMTLEQGKPLAESRGEISYAASFVEWFAEEGKRVYGESVPSSFRDKRILVLKRPVGVAAAITPWNFPAAMITRKLAPALAAGCAMVVKPSELTPLSALELAKIFEEAGLPRGLLSVVVGTDPGDITAPLMEDGRVRKLSFTGSTEVGKHLMRQAAKTMKRLSLELGGHAPFIVFEDADLEAAVEGALVSKMRNMGQTCVCANRIFVQKSVLEPFAERLVERMGRMKVGDGLQEGVSVGPLIEERALRKVERHVEDARQKGARVLLGGSRLSSGGGYFFAPTVLCGADESMLVFREETFGPVAALASFESEQEVVERANATPYGLAGYYYTRDVGRVMRLAEKLRYGILGANDGLPSTAQAPFGGLKESGFGREGGHWGIEEYLDVKYLSLGGLGSSS

SEQ ID NO: 29695 - protein, 270 aa, Magnaporthe grisea 70-15
MAMNPHDATQAQAQGQAQDGRPQANYDLSKGGHYGASSQLAQQGYAPSEHYTGPWANVHQGLKGPYKNILTTYWQHTIDHLENDTHDYKLHQLPLARIKKVMKADPEVKMISAEAPILFAKGCDIFITELTMRAWIHAEENKRRTLQRSDIASALSMSDMFDFLIDIVPREEAAGHAKRAAGQAGAANAAAGQPQMGGMPAQNHTQHMGAEYGLPGHPMGGEADYRQAQNMYPGQVPTGAPNAYGQPQQPMYEVDPNMYSSYTMQPPQSA

SEQ ID NO: 29696 - protein, 125 aa, Magnetococcus sp. MC-1
MKLLSIDDSRTIRRVISGVGAMLGFEVLEAENGMVGLKVLEESSHEVGLILLDWNMPGLNGLEVLKKVKADERFMHIPVMMVTTEGEKDNIIRAIQAGACHYMTKPFSQEEMAGRIMEAIGMGGM

SEQ ID NO: 29697 - protein, 1059 aa, ASPERGILLUS NIDULANS FGSC A4
MGGDVLRQTPSSLPRAPDGPVGQRIRSIYTDRLNQFTSRGQYQNQNLIGKLFEATNSDEDHVKISVYSVPDLQRPSFEEATSNEFQPTHIGASFGPSWSTHWFRIRLTIPEDMRERERLEFHWDANNEGLVWTEDGHPLQGLTGGGERIEWIIPDAWRDGNEHVFYIEMACNGMFGNAPGGDSIQPPAPDKYYTLTTARITAVNLEARALFYDFWIISDAAREFPAEGWESHEANMVANSIIDAFIAGNGSLESIKEGRRIAQKYLGDKVDCSEVYDSGTQPIVYGIGHCHIDTCWLWPWAETKRKVARSWSNQCDLMDRYPEHRFTCSQAQQFKWLKQYYPSVFDRVKGWVKKGHFQPIGGSWVEHDTNMPSGESLVRQFIYGQRFFESNFGERCTTFWLPDTFGYSTQIPQLCRLAGMSRFFTQKLSWNNINNFPHTTFQWVALDGSQVMCHMPPSETYTAEAHFGDLKRSITQHKSLDKDNTSLLVFGKGDGGGGPTFEHLEKLRRCRGLSDKTGLLPRATMGTSVDDFFAKLEKKAADGTKFATWYGELYFELHRGTYTTQANNKRNNRRAEFLLRELEFLATIASITRSDYEYPKKDIDEMWEGVLLCQFHDCLPGSSIEMCYDDSDELYAQIFETGLRAREAALEALGFSMAGRVPVAINTLPWNRSEVVRLPADMATNGSMHALLNGGPGVIPHSQAIARVPEVSVTEIKPGVFRLNNGKLRVDVEDGLITSLYDIEADREVIAADGRAGQLVIFDDKPLYWQAWDVEVFHLDSRKELQSGKTTIAENDPYRVSVVTETKISEKSWVKTTISLAATEGNRPSYVELESEVEWQETMKFLKVEFPVDITNTEASYETQYGIIRRPTHYNTSWDMAKFEVCAHKWADLSENGYGVSILNDSKYGFATCGNLMRLSLLRAPKAPDAHADMGRHTIRYAIFPHSGPLDFRTVRAGYEFNHPLILDTSLALPDEQSVFAVSALFRKIELTGSPSLILDVVKRGEDDEDIDGDPDISLPSSKRSGQSIILRIYESLGGKSRGAIRTALPFFIAWSGMF

SEQ ID NO: 29698 - protein, 410 aa, Triticum aestivum
  misc_feature (130)..(130): Xaa can be any naturally occurring amino acid
  misc_feature (170)..(170): Xaa can be any naturally occurring amino acid
  misc_feature (191)..(191): Xaa can be any naturally occurring amino acid
  misc_feature (199)..(199): Xaa can be any naturally occurring amino acid
  misc_feature (269)..(269): Xaa can be any naturally occurring amino acid
  misc_feature (287)..(287): Xaa can be any naturally occurring amino acid
  misc_feature (349)..(349): Xaa can be any naturally occurring amino acid
  misc_feature (361)..(361): Xaa can be any naturally occurring amino acid
  misc_feature (377)..(377): Xaa can be any naturally occurring amino acid
  unsure (1)..(410): unsure at all Xaa locations
MQIFVKTLTGKTITLEVESSDTIDNVKAKIQDKEGIPPDQQRLIFAGKQLEDGRTLADYNIQKESTLHLVLRLRGGMQIFVKTLTGKTITLEVESSDTIDNVKAKIQDKEGIPPDQQRLIFAGKQLEDGXRPLADYNIQKESTLHLVLRLRGGHANLWSRPSLGKTITLXEVESSDTIDNVKAKIQDKEGXIPPDQQRXLSLPANQLEDGRTLADYNIQKESTLHLVLRLRGGMQIFVKTLTGKTITLEVESSDTIDNVKAKIQDKEGXPPDQQRLIFAGKQLEDGXTLADYNIQKESTLHLVLRLRGGMQIFVKTLTGKTITLEVESSDTIDNVKAKIQDKEGIPPDXQQRLIFAGKQLXEDGPHPLPDYNIPRRXHSPLVLQAPVGGYARFFPSKTLQQAKTITPWRF

SEQ ID NO: 29699 - protein, 342 aa, Listeria monocytogenes EGD-e
MKNNVLVTGGTGFLGMHIIFQLLQQGYQVKTTVRSLKSKEKVIEILQNNGITDFTHLSFVELDLSKDEGWKEAMLDCEYVLSVASPVFFGKFKNEEELISPAIEGITRILQAAKEAKVKRVVMTSNFGAIGFSNADKNSITTEAYWTDELAKGLSAYEKSKLIAEKEAWKFMENETELEFATINPVAIFGPSQSNHVSGSFDLLKNLLNGSMKRVINIPLNVVDARDVADLHIRAMITPEANGERFIASADGEISMADIAHLLQRERPELVDKMPKKTLPNAAIRAAALFSKHAKEGELMINMNRQISNSKARDVLGWKPISTKEEAVLAAVDSLAKYGLLD

SEQ ID NO: 29700 - protein, 522 aa, Triticum aestivum
MARGGGNGEVELSVGVGGGGAGAGGADAPAVDISLGRLILAGMVAGGVQYGWALQLSLLTPYVQTLGLSHALTSFMWLCGPIAGLVVQPCVGLYSDKCTSRWGRRRPFILTGYILICIAVVVVGFSADIGAALGDSKEECSLYHGPRWHAAIVYVLGFWLLDFSNNTVQGPARALMADLSAQHGPSAANSIFCSWMALGNILGYSSGSTNNWHKWFPFLRTRACCEACANLKGAFLVAVLFLAFCLVITVIFAKEIPYKAIAPLPTKANGQVEVEPTGPLAVFKGFKNLPPGMPSVLLVTGLTWLSWFPFILYDTDWMGREIYHGDPKGTPDEANAFQAGVRAGAFGLLLNSVVLGFSSFLIEPLCKRLGPRVVWVSSNFLVCLSMAAICIISWWATQDMHGYIQHAITASKEIKIVSLALFAFLGVPLAILYSVPFAVTAQLAANRGGGQGLCTGVLNIAIVIPQVIIAVGAGPWDELFGKGNIPAFGMASAFALIGGIVGIFLLPKISRRQFRAVSGGGH

SEQ ID NO: 29701 - protein, 199 aa, Arabidopsis thaliana
MEQSEEGQQQQQQGVMDYVPPHAYQSGPVNAASHMAFQQAHHFHHHHQQQQQQQLQMFWANQMQEIEHTTDFKNHTLPLARIKKIMKADEDVRMISAEAPVIFAKACEMFILELTLRAWIHTEENKRRTLQKNDIAAAISRTDVFDFLVDIIPRDELKEEGLGVTKGTIPSVVGSPPYYYLQQQGMMQHWPQEQHPDES

SEQ ID NO: 29702 - protein, 302 aa, Oryza sativa
MASLTLPPAPTNPRQDAIDLHKAFKGRTVVVGVLDCQMLKTWTGRAEVGNGAAFKGSSGDWKAMLLWILDPAGRDATVLREALSGDTIDLRAATEIICSRTPSQLQIMKQTYHAKFGTYLEHDIGQRTSGDHQKLLLAYVGIPRYEGPEVDPTIVTHDAKDLYKAGEKRLGTDEKTFIRIFTERSWAHMASVASAYHHMYDRSLEKVVKSETSGNFELALLTILRCAENPAKYFAKVLRKSMKGMGTDDSTLIRVVVTRTEIDMQYIKAEYYKKYKKSLAEAIHSETSGNYRTFLLSLVGSH

SEQ ID NO: 29703 - protein, 260 aa, Moorella thermoacetica ATCC 39073
MGVERITAAFAARKKEGRKALIVYLCAGDPSLEVTGQAVRELAGAGVDLIELGVPFSDPVADGPVIQAASKRALAAGVTLPEILELVKSLRSGLAVPLILMSYYNPLLQYGLERLTADLAAAGVDGLIVPDLPLEENPPLRQTLEPAGLALIPLVAPTTPGERLARIAATARGFIYCVSLTGVTGVREGLPPGIDEYLAGVRAVTDLPLGIGFGIGSPDQARLLAPMGDGIIVGSALVDVLYQEGLPAALRLVERLRHAL

SEQ ID NO: 29704 - protein, 136 aa, Brassica napus
MADKEPVVERPVAEEEGEDSAAAAAAGEEEDTGAQVAPIVRLEEIAVTTGEEDEDSLLDMKAKLYRFDKDGNQWKERGTGTVKLLKHKENGKVRLVMRQAKTLKICANHLVISTTKMQEHAGSDKSCVWHAADFAD

SEQ ID NO: 29705 - protein, 491 aa, Salmonella enterica subsp. enterica serovar Typhi Ty2
MANYFNTLNLRQQLAQLGKCRFMGRDEFADGASYLQGKKVVIVGCGAQGLNQGLNMRDSGLDISYALRKEAIAEKRASWRKATENGFKVGTYEELIPQADLVVNLTPDKQHSDVVRSVQPLMKDGAALGYSHGFNIVEVGEQIRKDITVVMVAPKCPGTEVREEYKRGFGVPTLIAVHPENDPKGEGMAIAKAWAAATGGHRAGVLESSFVAEVKSDLMGEQTILCGMLQAGSLLCFDKLVAEGTDPAYAEKLIQFGWETITEALKQGGITLMMDRLSNPAKLRAYALSEQLKEIMAPLFQKHMDDIISGEFSSGMMADWANDDKKLLTWREETGKTAFETAPQFEGKIGEQEYFDKGVLMIAMVKAGVELAFETMVDSGIIEESAYYESLHELPLIANTIARKRLYEMNVVISDTAEYGNYLFSYACVPLLKPFMAELQPGDLGSAIPEGAVDNAQLRDVNDAIRSHAIEQVGKKLRGYMTDMKRIAVAG

SEQ ID NO: 29706 - protein, 137 aa, Brassica napus
MAAPLILKYHIDHQQDPNPTRLFSSIQEAKSIAKISLPIILTGLLLYSRSMISMLFLGRLNDLPALSGGSLALGFANITGYSLLSGLSTGMEPICVQAFGAKRFKLLGLALQRTILLLLLCSLPVSILWLNIKKILL

SEQ ID NO: 29707 - protein, 451 aa, Pseudomonas aeruginosa UCBPP-PA14
MSFDFDLFVIGAGSGGVRAARFAAGFGARVAVAESRYLGGTCVNVGCVPKKLLVYGAHFSEDFEQARAYGWSAGEAQFDWATLIGNKNREIQRLNGIYRNLLVNSGVTLLEGHARLLDAHSVEVDGQRFSAKHILIATGGWPQVPDIPGKEHAITSNEAFFLERLPRRVLVVGGGYIAVEFASIFNGLGAETTLLYRRDLFLRGFDRSVREHLRDELGKKGLDLQFNSDIARIDKQADGSLAATLKDGRVLEADCVFYATGRRPMLDDLGLENTGVKLTDKGFIAVDEHYQTSEPSILALGDVIGRVQLTPVALAEGMAVARRLFKPEEYRPVDYKLIPTAVFSLPNIGTVGLTEEEALSAGHKVKIFESRFRPMKLTLTDDQEKTLMKLVVDAHDDRVLGCHMVGAEAGEILQGIAVAMKAGATKQAFDETIGIHPTAAEEFVTLRTPTR

SEQ ID NO: 29708 - protein, 265 aa, Ralstonia solanacearum
MSRIAQTFSQLSAQGRKGLIPFITAGDPYPELTVDLMHALVKGGANVIELGVPFSDPMADGPVIQRASERALAKKIGLRTVLDYVRAFRATDKTTPVVLMGYANPIERMGIDAFAKAASEAGVDGVLVVDYPPEECEAFAKTMRAAGIDPIFLLAPTSTEARMAQIARVASGYIYYVSLKGVTGAATLDLDSVAARIPQIRQHARLPVGVGFGIRDAATARAIGGVADAVVIGSRIVQLLEEASREQAVQCLTDFIADIRQALDA

SEQ ID NO: 29709 - protein, 351 aa, Glycine max
MDKYEAVKDLGAGNFGVARLMRNKETKELVAMKYIERGQKIDENVAREIINHRSLRHPNIIRFKEVVLTPTHLAIVMEYAAGGELFERICNAGRFSEDEARYFFQQLISGVHYCHAMQICHRDLKLENTLLDGSPAPRLKICDFGYSKSSLLHSRPKSTVGTPAYIAPEVLSRREYDGKLADVWSCGVTLYVMLVGAYPFEDQDDPRNFRKTIQRIMAVQYKIPDYVHISQDCRHLLSRIFVANPLRRISLKEIKSHPWFLKNLPRELTESAQAVYYQRGNPSFSIQSVEEIMKIVGEARDPPPVSRPVKGFGWDGEEDEGEEDVEEEEDEEDEYDKRVKEVHASGEFQIS

SEQ ID NO: 29710 - protein, 406 aa, Vibrio vulnificus CMCP6
MSDTASQVHGAVQTLTQSSDTLFLLLGAIMVFLMHAGFAFLEVGTVRHKNQVNALVKILADFGISTLAYFFIGYWVAYGAHFFADAETLAQGNGYELVKFFFLLTFAAAIPAIVSGGIAERARFYPVLIATFFTVGIVYPLFEGIIWNGNFGIQAWFEATFGVGFHDFAGSVVVHGVGGWIALVAVIFLGMRRGRVRAGKHTNFAPSNIPFLALGAWILCVGWFGFNVMSAQTLNGISGLVAMNSLMAMAGGIVAALIAGKNDPGFIHNGPLAGLVAVCAGSDLMHPLGALVTGSVAGVLFVYLFTYLQNKTKIDDVLGVWPLHGVCGAWGGIAAGIFGQSSLGGLGGVSFTVQLLGTLLGISVALIGAGIVYGAINRLSGLRLSQEDEFNGADLAIHKISSVNAE

SEQ ID NO: 29711 - protein, 482 aa, Moorella thermoacetica ATCC 39073
MHGSGGCFYRLGSAKVIGLEGFSMSYQIAIIGGGPGGYVAAIRAAQLGAKVVVIEQDALGGTCLNRGCIPTKALLAGAAMVRGIKGAAAFGIDVEDYRVDYARLAARKDAVVKQLTGGIAYLFKKNKVDLIKGRGFLKGPGQIEVATADGTIENLQAENIILATGSEPALIKALGYNGRTVVTSTEALAWTEVPAELLIIGGGVIGCEFATLFATLGSKVTIVEMMPAILPMIDSEISRRFSMLLKKTGVEIKTKAQITEVKEAGGRVQATLADGQTINADKVLISIGRQFNTRGLGLEDAGITLGPKGEIVVDEYLRTSVPGIYAIGDVTNKIQLAHVASAQGLAAVTTIMGRPTKVNYDAVPSCIYTLPEIAGVGLTKEAAEGRGMKVRVGKFPFQASGKALCSGETDGMVKIIAEAESDRVVGVFIMGPHATELIAEGALAVNKGITAGELAATIHAHPTLSEAVMEAAEAVHGLSIHS

SEQ ID NO: 29712 - protein, 264 aa, Mycoplasma pneumoniae M129
MFNLSDFSELPRWIGAEFLGTFFLILSGNGAGSQLTLNKMFAKESKAKLLTAAFAWGIAVLVGVLIANSLFEGAGNINPAVSLFYAVSGTIQKALYPLHVNFSIPLLWVALLLAWVAQFAGAMLAQALLNFLFWKHIEQTDPQSVLVTHCTNPAIFNIPRNFATEFVATSVLIASLLVAGSFGANRFDQSPRGVVPMLVVTGLIMSFGAATGTAINPARDLGPRIVYWLSPIKNKDPNLKYSWIPVAAPLSASVILGVLVAVIV

SEQ ID NO: 29713 - protein, 192 aa, Ralstonia solanacearum
MTPAPSTLWLTGLSAAGKTTLAHALAEALTAAGAACQVLDGDVVRQALSRDLGFSRADRSQNIRRVADRCRQLNDAGSWAIAAVISPYRADREQARRTVGEPRFFEIHLATPLTVCERRDPKGLYRRARAGEIAHFTGISDAYEVPQHPDLRFDTATRSVAECVDATMALLAAVSGNVMTLSSESVSNAGSI

SEQ ID NO: 29714 - protein, 175 aa, Triticum aestivum
MAPTVMASSDTSVAPFQGLKSTAGLPVSRRSNGASLGSVRNGGRIRCMQVWPIEGIKKFETLSYLPPVSTEALLKQVDYLIRSKWVPCLEFSKVGFIFREHNASPGYYDGRYWTMWKLTMFGCTDATQVINDVEEVKKEYPDAYVRIIGFDNMRQVQSVSFIAFKPPGCEEYGKA

SEQ ID NO: 29715 - protein, 469 aa, Francisella tularensis subsp. tularensis SCHU S4
MNKNLFLTANLSEYFSYNSLGQLCINYADGYRKTIPIVDFLQQANFQGATYPLVLYFEHILKNQLDKLYTSFGKAIDDFSYTCKYSLAYPIKVNPEQKIIKAIYDYHQHNQVSLDYEVGTKSEFLAVLSTAAKTQKIICNGFKDLSFYKIAQLAAKIGYKIIIVIENISEINIIQDLLDNNVNIKFDFGIRTKPFDNCIHTQKFGLSLSQINECINFLKTNQLQQKLLLLHSHIGSQIKSTDKVVANIQRLMRIYSELKSDFVNLEYIDFGGGLAVNYDEYDRPSYDFDSYAKNIIKNCKYYAEYYNCDMPSIVTESGRAITAESSLLITKPLIKQHESDIENEILHQQWLDREVSLGELQSYLPQNQKNTQQAWLNFSIFQSLPDHWGIDQKFPILPLEFFNSYVTSEVKLYDISCDVDGVVKSTSEYIEIATDNIEYIVFMCVGAYQGMLSAKHNMLGNISAVNIYR

SEQ ID NO: 29716 - protein, 168 aa, Ehrlichia ruminantium str. Welgevonden
MINKRSLLASFINLPYSLFITFKGMYITLRYMFKPKVTLNYPLEKNPLSTRFRGEHALRTYKNGEERCIACKLCEAICPAQAITIEAQERDTDNSRRTVRYDIDMTKCIYCGFCQEACPVDAIVEGPNFEYATETREELMYNKSKLLHNGQIWEEAIDLRIKKNSKFY

SEQ ID NO: 29717 - protein, 130 aa, Chlorella vulgaris
MAKKIEKSAKKKFREKVLLGVAHIQSTFNNTIVTITTNKGNVLAWSSAGACGFKGARKKTPLAAKQAAENAAQTCVSQGMREIRVNVKGAGAGREAALRGLRDAGLNITIIRDITPIPHNGCRPPKKRRI

SEQ ID NO: 29718 - protein, 491 aa, Bacillus cereus ATCC 14579
MLNMNSATNQATSKTETTQGKGELRRGLKSRHLTMISLGGTIGTGLFLASGGVIHSAGPGGALIAYAAIGIMVYFLMTSLAELAAYMPVTGSFSTYATKFVDPSLGFALGWNYWYNWAITIAAELAAVTLIMKFWFPDTPSLIWSGLCLAIIFLLNYLSVKGFGESEYWFALIKVVTIIIFLIVGFMMIFGIMGGETVGFKNFTVADAPFNGGIMAIIGVFMAAGFSFQGTELLGVAAGETSDPERNIPKAIRSIFWRILLFYILAILVIGLLIPYTTESLAASDVTVSPFTLIFEKAGVAFAASVMNAVILTAVLSAGNSGMYASTRMLWDLARQGKAPKFLGKLDSRGVPVNALIVTSIVGSIAFIASLFGDGVVYIWLLNASGMSGFIAWVGIAISHYRFRKAYIAQGKDLNDLPYRAKWFPFGPIFAFTLCIIVILGQNYGAFMGESIDWNGVLVSYIGLPLFLVLWLGYKFTKKTKVIPLDKCELK

SEQ ID NO: 29719 - protein, 328 aa, Francisella tularensis subsp. tularensis SCHU S4
MLLWPAEWEEHSATWMIWPARIDMWPNITKAYEIYAKVANTIAKYEPVNMVVNQHQLDIAKKYLGKNMTLISEAVDDSWARDIMPIFSFKADKLIANNFDFNCWGNKFSPFDNDRRLKNDIAKQQKWQVNSSKMILEGGAVHSNGQGVLLTTKECLLNLNRNPNMQKEQIESELISILGVKKILWLPYGVAGDFDTDGRVDNVACFANKNTIIIQSCYDENDENFARHQANMTYLDKYASEFNIVEIPQPRAQYFAGERLALSYLNFYIVNNAIIMPAFGDPNDVIAFEILQKCFKDRSIEQLNIIDLVIGGGGIHCITMQQPAIKEI

SEQ ID NO: 29720 - protein, 478 aa, Debaryomyces occidentalis
MVHLGPKPPQHRKGSFLDVPEYLLKELTELEGLLTVSGETLRKITDHFISELEKGLSKQGGNIPMIPGWVMDFPTGKEMGDYLAIDLGGTNLRVVLVKLGGNRDFDTTQSKFALPENMRTAKSEELWEFIAECLQKFVEEEFRNGVLSNLPLGFTFSYPASQGSINEGYLQRWTKGFDIEGVEGHDVVPMLQAAIEKRKVPIEVVALINDTTGTLVASMYTDPEAKMGLFSGTGCNGAYYDVVDNIPKLEGKVPDDIKSSSPMAINCEYGAFDNEHIILPRTKYDIQIDEESPRPGQQAFEKMISGYYLGEVLRLILLDLTSKQLIFKDQDLSKLQVPFILDTSIPARIEEDPFENLSDVQELFQEILGIQTTSPERKIIRRLAELIGERSARLSICGIAAICKKRGYKTAHCAADGSVYNKYPGFKERAAKGLRDIFQWESEEDPIVIVPAEDGLGAGAAIIAALTEKRLKDGLPLV

SEQ ID NO: 29721 - protein, 286 aa, Francisella tularensis subsp. tularensis SCHU S4
MANIKVAVVQLSFNDNEAENLAKLESKIIQAAKNGAKIILTPELPSYLYFCKKQNSKYFDLAKTIDESPIVKLYKLLAHKYNIVLPASFFERDGNACYNSIAMIDADGSIMGVYRKAHIPDGIGYQEKYYFSPGSAGFKVWDTKYAKVGVGICWDQWFPEAARVMALKGAEILLYPTAIGSEPHLPDYDSKDHWQRVMQGHAAANMLPVLASNRYATEANDDITATYYGSSFITDHTGDKIAEADRSGDDILYATFDFAELQQQRFYWGLFRDRRPELYDEIVRKY

SEQ ID NO: 29722 - protein, 311 aa, Ralstonia eutropha JMP134
MSIDILAYGEPLVEFNQQPDDPTRYLQGFGGDTSNFCIAAARQSATTGYISAVGADSFGERLMALWTRERVDTRHVRVDPVAPTGVYFVSHDNHGHRFDYLREGSAASRYQHEHLPLGAIAQASFLHLSGISLAISTSACDAGLAAMEHARKAGTKVSLDTNLRLRLWSLARARGIMREAFSLTDVCLPSWDDITVLTGLDDRDAIVDYLLGCGIGLVALKLGEEGAYVATPESRTLVQPFAVKPVDATGAGDCFGGSFIARLAAGADPFEAARYANVAAALSTTGYGAVAPIPSAETVLARLAQSVSVIA

SEQ ID NO: 29723 - protein, 135 aa, Candida albicans
MRSQFKDEHPFEKRQAEAARIAQRFKDRVPVICEKVENSDIPEIDKRKYLVPVDLTVGQFVYVIRKRIKLPSEKAIFIFVNDILPPTAALISTIYEEHKDEDGFLYVLYSGENTFGEKLAIDISSLDFSDIPDYV

SEQ ID NO: 29724 - protein, 557 aa, Providencia rettgeri
MILLSIEGMTCPSCVAHVKEALDAIEGVNKVEISYENARATITTNGGVSVTVLIGAIEALGYIAKESTGTAKEITSPNDCCDNENASNTESNQTQHVAIIGTGSGAFACAIKAAEGGAKVTLIEGADVIGGCCVNVGCVPSKILIRAAQLAQQQRNNPFTGLENHAPQLSRALLTQQQTARVEELRAAKYQNILETNPALSLLKGWAQFKNANTLIVRKNDGTEQAVHADKILIATGSTPTIPPIDGLTETPYWTSTEALFAQELPQHLVVIGSSVVALEIAQAYRRLGSEVTILARHTLLYREDPLLGEKLTGCFEKEGIRVLNSTQATKVTHDGSQFTLETNAGDLRCDRLLVSTGRHANTCQLNLGAVGVTTNKKGEIVVNERMETNVPGIYAAGDCCNMPQFVYVAAAAGSRSGINMTGGYAKLDLSTMPAVIFTDPQVATVGLTEEQANAQDIETDSRVLEMENVPRALANFETDGFIKLVTEKATGRLIGAQILAHEGGELIQSAALAIRNRMTVTELADQLFPYLTMVEGLKLCAQTFNKDVKELSCCAG

SEQ ID NO: 29725 - protein, 531 aa, Aquifex aeolicus VF5
MAKYIFITGGVLSSLGKGITSASIASILEEMGYRVTLQKLDPYLNVDAGTMSPYQHGEVYVTEDGAETDLDLGHYERFTNAVMTRDNNVTAGRIYYNVISKERKGDYLGATVQVIPHITEEIKESIKRVEKDNDIVIVEIGGTVGDIEGLPFLEAVRQLSLELGRKNSMFIHLTYVPYIKAAGELKTKPTQHSVKELRAIGIQPDMIICRADRELPKGIKSKIALFTNVKEEAVISAPDLEFSYEVPLKLKEQGIDRIITERLNLEHREVNLGKWKKIVNVLRNPEEEVNVALVGKYVELKDSYKSVIEALIHGGIANKVKVNVILKNSEQLDISELQEDIHGIMVPGGFGERGIRGKIEALNFGRENNIPTFGICLGMQLMAIEFARNVLGFSNANSTEFDPDTPFPVIDIMEEQKKVDKLGGTMRLGAYPCKVKENTLAHRIYQKDLIYERHRHRYEFNNRYRKDFESKGVVFSGTSPDDKLVEIMELKNHMWYLGCQFHPEFKSKPFAPHPLFRDFIRACLEYKRKFT

SEQ ID NO: 29726 - protein, 253 aa, Rubrobacter xylanophilus DSM 9941
MENVRPQRTERENETPELIPGYFARIDKGELLTHQEEIELSRRAKKGDRKARQKLIEKNLRLVVSVAKKYRGYGLPFEDLIQEGNIGLMKAVEKFDPERGFRFSTYATWWIRQAVQRAVADKGRTIRVPVHMTEKIRKMARTYNELSAQLEREPTDEEVAEALGWTPEEVREVKGAMPDATSLNQPLSSDEDSSEIGEFVEDERASDTAGAVARDIENAALRKAIERLPERNRHVLVRRYGLDDREPATLAEL

SEQ ID NO: 29727 - protein, 434 aa, Geobacter sulfurreducens PCA
MRNELVTPGAGELTYEIRNIVNVAEKLQKHGVKINWENIGDPIVKKEEIPRWMKEIVAAAVMENDTWGYCHTRGVLETREFLCGLTNNRGGAQITPDDIIFFNGLGDAISTVYGNLRHESRILMPSPTYTTHSIGEAAHAQAAPVCYRLKPEDNWFPDVEDLENHVKYNPQISGILLINPDNPTGMVYPREILEQIVAIARRYDLFIIADEVYNNITYNGQTTVPISDVIGEVPAIAMKGISKEIPWPGSRCGWIEVYNGNRDEQFHKFLNSILTAKMNEVCSTTLPQKCIPAIMKHPEYQTYLRERIACYERMSTITYDCLKQVPGLMVNRTNGAFYMSVAFRDGLLTDRQSLPIESVEVRELVEKLVNAPGVSPDKRFVYYILASTGICIVPLSSFNTPLQGFRVTLLEKDENECMRIYRTLAERIKEYLNS

SEQ ID NO: 29728 - protein, 554 aa, Sulfolobus solfataricus
MATATVATTPEGIPVIILKEGSSRTYGKEALRANIAAVKAIEEALKSTYGPRGMDKMLVDSLGDITITNDGATILDKMDLQHPTGKLLVQIAKGQDEETADGTKTAVILAGELAKKAEDLLYKEIHPTIIVSGYKKAEEIALKTIQEIAQPVTINDTDVLRKVALTSLGSKAVAGAREYLADLVVKAVAQVAELRGDKWYVDLDNVQIVKKHGGSVNDTQLVYGIVVDKEVVHPGMPKRIENAKIALLDASLEVEKPELDAEIRINDPTQMHKFLEEEENILKEKVDKIAATGANVVICQKGIDEVAQHYLAKKGILAVRRAKKSDLEKLARATGGRVISNIDELTSQDLGYAALVEERKVGEDKMVFVEGAKNPKSVSILIRGGLERVVDETERALRDALGTVADVIRDGRAVAGGGAVEIEIAKRLRKYAPQVGGKEQLAIEAYANAIEGLIMILAENAGLDPIDKLMQLRSLHENETNKWYGLNLFTGNPEDMWKLGVIEPALVKMNAVKAATEAVTLVLRIDDIVAAGKKSGSEPSGKKEKDKEEKSSED

SEQ ID NO: 29729 - protein, 297 aa, Crocosphaera watsonii WH 8501
MTTKKKVDTVRHYLQSIGKTPLLSSAEEIKLAEEIQAMLPLLEKEQLSREEEKIVAKGQKARERMIEANLRLVVSIAKKYLNSGLSLLDLIQEGSLGLIRGVEKFDPARGYKFSTYAYWWIRQGITRAIAEQSRTIRLPIHINENLNKYRKSIRELTLKLGRKPTQREIAENMEISVDRLQFLQQAAFKTKSRSLNVVIDENQTELGQLLPDEESISPSDFVKQEEKISQINNLLESLTPRQKEVIILRFGLRDGKQMSYKAIGEKCGVSHERARQIYSRALKILRKQTGEAEKLAV

SEQ ID NO: 29730 - protein, 610 aa, Schizosaccharomyces pombe
MANSGLWELITIGSAVRNVAKSYLKAEASSITAKQLYDASKITSSKRSTSDLHVQLLEKYRNGKVKHASQIKELGLSSKDTKRTLLGNSLDVQKDASGVKHLQEQSSKEIKNPISQPILPNKKDEISPAKPSAIDSSIKDVTKSHPATNANFTADFESSIEESYSTENKSPVILSSSKVPSSQWSRLWHYGGLATSLSVGAIGEKMKRMWGISKDDGALLLNERNVEILVNKLTQMRGAALKMGQMLSFQDSKLIDPRVSQILERVRDGAHSMPEKQLEQVMVKNLGKNWMTHYSEFDRKPMAAASIGQVHRARLASNHMEVVVKVQYPGVMSSIDSDLNNLAYLLKASRILPKGLFLENSLAAARKELKWECDYEREAAFAERFGSLLKNDSDFKVPMVFREASGPSVITLEYLHGIALGKQKYSQATRNHIGYLLTKQCLREISEYHFMQTDPNWSNFLYNGKTKKIELLDFGASIEYDEKFIKKYCRLLLAAAHRNREKCKKLSVELGYLNNHESAQMIDAHINSIFTLAEPFAFDAPDVYDFGDQTITARVKQQIPVMLDLRLQPPPEETYSLHRRLSGHFLLCAKLGAKVRCKELFSGMLKHYAD

SEQ ID NO: 29731 - protein, 153 aa, Rubrobacter xylanophilus DSM 9941
MLSPFRGFWDVRSELDRMFDDVVRDAFRLWRGEGRAARTAEWAPAIDVYSKDGDLVIKAELPGMKPEDVDITLQEGVLTISGERKAEEEREGAGYFVRERRYGSFRRSMRLPEGVDESKIHARFEDGVLEVVVEGAGAVTEPRRIQIEAPKGS

SEQ ID NO: 29732 - protein, 194 aa, Magnaporthe grisea 70-15
MVVATIKCVVVGDGAVGKTCLLISYTTNKFPSEYVPTVFDNYAVTVMIGDEPYTLGLFDTAGQEDYDRLRPLSYPQTDVFLVCFSVTSPASFENVREKWFPEVHHHCPGVPCLIVGTQVDLRDDPSVREKLSKQKMQPVRREDGERMAKELGAVKYVECSALTQYKLKDVFDEAIVAALEPPTPKRKSKKCLIL

SEQ ID NO: 29733 - protein, 576 aa, Rubrobacter xylanophilus DSM 9941
MQGAAHPAPARAGGRAAGRRGLRPRPPFGDPGPRRPRAGRGAAAAAGGGGDEPGGRDRPAGRADRGRGQQDAGEGHRLPARRGGRAARRDHHHLRRDGDAGVSGRGQRAREPPGGAHARPAGKPGGGGRHLRGARDKHRERGHRAPPEVPRRRHPGPGGGLPGGHHRPLPRDRGAAARGIRSALAPAGFVSGRAAIVHDRSLEEYGFGEDHPFNPLRIRLTLELCDALGLLDGYDFLAPEPVSEEELTSVHTLTYVRMVQQASRGAGDPERLLDYGLGTPDNPLFAGMHEACSRVVGGTVLACRLVAAGEAEHAMCISGGLHHALRSKASGFCIYNDAAVAIALLKRERPGIRVAYVDTDAHHGDGVQWMFYEDPEVLTVSMHESGRYLFPGTGGVDEKGRGAGAGYSVNVPLEPFTGDDSWIECFEAVVPEVLRAFGPDLIVSQNGCDGHALDPLTHLCATTRLYEHIPRRMHELAHELCGGRWVALGGGGYDHWRVVPRAWSALWAAVSHRPLPERLPEGWLLEHAQHSPVELPRLMRDDPADYPPVPRIKEIEAANRRAAEAALKTVLHLIRR

SEQ ID NO: 29734 - protein, 336 aa, Acholeplasma laidlawii
MSKEYEIIIVGGGPGGYVAAIKAAQYGAKVALVEKEVVGGICLNHGCIPTKTFLKSAKVFNTVKKSMDFGVSTSGEVGFDWSKIVSRKDGVVKQLTNGVAFLLKKNGVDVYNGFGDIKSANEVVVNGESLKTKNVIIATGSSAVVPPIPGVKEAYEKGIVVTSRELLNVKNYPKSIVIVGGGVIGVEFATVFNSFGSKVTIIEMMDGILPTMDDDIRVAYAKTLKRDGIEILTKAEVKKVDDHKVTYSLDGKETTIEGDLILMSVGTRANSKGLEHLGLEMDRANIKTNEYLQTNVPGVYAIGDVNGKFMLAHVAEHEGITAVQHILKIGHAKMNY

SEQ ID NO: 29735 - protein, 546 aa, Bacillus cereus ATCC 14579
MKRFVLTAVTVSVIFLIAACSVTTNITTDHKNMNDKKTLQTETATTPLKVEKGPEVTLIAKEEKQKLSNGVIVPVWTFNGSSPGSEIRVKKGEKVKVTLKNELSAPVSIHWHGYPVPNNMDGIPGVTQDAVEPGKSFTYEFEANVPGTYWYHSHQDSVNQLDRGLYGALIVEDTKEKYDKDYTLMLDEWVTDKEEMNKQLKEMTKGQIGNKSKGNENGEKNDDKNGMDHSDMNMGSDKKDSSNMEGMDHGNMKMEGHDMSMYDLFTINGKSGDLVAPLKVNKGDNVRLRLVNAGYLSHDIHVHGHDIKVIATDGQPINDPKVIKDKVISIAPGERYDIEFTANNPGKWYVEDHSKNKGAKGMKAVIEYDGSKEMKDKTDEKEKLPKVDIMKYGTKKLGSFTLNQEYTATYNMDLNTQMNGNEMVYTINGKVFPDIDPIQVKKGDLVKVRLVNRSKMDDHPMHLHGHFFQVLSKDGKPIEGSPIVKDTLNLKPGEEYEVAFVADNPGDWMFHCHDLHHASAGMVTEVKYTDYKSDYVPNRNIPNKPE

SEQ ID NO: 29736 - protein, 391 aa, Bacillus subtilis subsp. subtilis str. 168
MKEAVIVSGARTPVGKAKKGSLATVRPDDLGAICVKETLKRAGGYEGNIDDLIIGCATPEAEQGLNMARNIGALAGLPYTVPAITVNRYCSSGLQSIAYAAEKIMLGAYDTAIAGGAESMSQVPMMGHVTRPNLALAEKAPEYYMSMGHTAEQVAKKYGVSREDQDAFAVRSHQNAAKALAEGKFKDEIVPVEVTVTEIGEDHKPMEKQFVFSQDEGVRPQTTADILSTLRPAFSVDGTVTAGNSSQTSDGAAAVMLMDREKADALGLAPLVKFRSFAVGGVPPEVMGIGPVEAIPRALKLAGLQLQDIGLFELNEAFASQAIQVIRELGIDEEKVNVNGGAIALGHPLGCTGTKLTLSLIHEMKRRNEQFGVVTMCIGGGMGAAGVFELC

SEQ ID NO: 29737 - protein, 474 aa, Pseudomonas aeruginosa UCBPP-PA14
MTLYLQLAETLGSRIEQGLYRPGDRLPSVRAMSIEHGVSLSTVQQAYRLLEDRGLAEPRPKSGYFVPVARQMPPLPAIARLAQRPVEISQWEQVLALVSTVPRPDVVQLGRGMPDISSPSLKPLTRSLARLNRHADARALAYDGIHGSPLLREEVARLLVDSGCRATASDVVITTGCHEALSVSIRAVCEPGDIVAVESPSFHGAMQSLKGLGMKALEIPTDPVNGISLEALELALEQWPIKAIQVTPNCNNPLGYIMPESRKRALLALAQRYDVAIIEDDVYGDLAYTYPRPRTIKSYDDDGRVLLCGSFSKVLAPGLRIGWMVPGRYADRVLHMKYISTGASALQPQLAIAEFIGNGHYEPHLRRMRAQYQRGRDLMIDWVARYFPEGTRASRPQGGFLLWVELDEAFDTLRLDKALRNRGVQVAVGCIFSASGKYRNCLRMNYAALPTPAIEQAVRRVGESACELLEPCEA

SEQ ID NO: 29738 - protein, 455 aa, Debaryomyces hansenii CBS767
MVLPHEPEFQQAYNELVSALEDSTLFTEKPEYKKVIPVVSVPERIIQFRVAWENDNGDVEVNNGYRVQFNSALGPFKGGLRFHPSVNLSILKFLGFEQIFKNALTGLSMGGGKGGCDFNPKGRTDSEIRRFCVAFMRQLARYIGSDTDVPAGDIGVGSREVGYMFGAYKQMQNNWSGILTGKGLSWGGSLIRPEATGYGVVYFVEKMIEKATGGKESFKGKRVAISGSGNVAQYAALKVIELGSTVVSLSDSKGCIISQTGITPDQIKAIAAAKIHFKTLEEITKESASLFSGSNEVQYIAGVRPWTHCGQVDVALPSATQNEVSGEEAKALVEAGCKFIAEGSNMGSTKEAIDVFEANRSKAVWYAPGKAANCGGVAVSGLEMAQNSQRVTWAAEEVDEKLKNIMYTCFDNCYANAAKYSAEKDAENLPSLLKGANITGFIKVADAMFDQGEVF

SEQ ID NO: 29739 - protein, 285 aa, Streptococcus suis 89/1591
MTHFSVGEEAAAVGPIAGLTDEDIIFSHHRGHGHVIAKGIDINGMMAELAGKATGTSKGRGGSMHLANVEKGNFGSNGIVGGGYALAVGAALTQQYLGTDNIVIAFSGDSATNEGSFHESMNLAAVWNLPVIFFITNNRYGISTDISYSTKIPHLYQRAAAYGIPGHYVEDGNDVIAVYEKMQEVIEYVRAGNGPAMVEVESYRWFGHSTADAGVYRTKEEVNEWKAKDPLKKYRKYLTENKIATDEELDAIEAQVAEQVEASVKFAQESPDPDISVAYEDVFVD

SEQ ID NO: 29740 - protein, 426 aa, Debaryomyces hansenii CBS767
MDDIPDLVEELPDNGNQFAKGSNDNKLGAVGKSASPPVKQVKELDITDEKTKIPITIITGYLGSGKSTLLEMIGKSSKKRLAIILNEFGDSSAIEKAITVKDTENNESVQEWLDLGNGCLCCTVKDNGVLAIEQLIENSRGKIDYILLETTGIADPAPIAKMFWMDEGLSSNVYIDGVITVLDAQNILKCLDDVGGHWHRANKHLKVSQSVNADDLTEEELEDERKKLDEGLTTAHLQIALADTILINKVDTLEKESYDHRIKAIVDKVKGINSSTPIHTTSFGDIDLAKILDLHAFEANTEKLTESINYMNSSTYHDDRIATVTITFPFFENGEFNKVESFLQYVLWENTANNNPIEIHRTKGILVNKSKNEQLDVRVIQGVRDTYDIIEGGRLVDGITQNKLVFIGKNLTHDDLYTELQAYLRK

SEQ ID NO: 29741 - protein, 586 aa, Streptococcus suis 89/1591
MAIEIIMPKLGVDMQEGEIIEWKKQEGDFVNEGDVILEMMSDKTSMELEAEESGVLLKIVHGNGATVPVTEVIAYLGAEGESVEVGSAPAPAEVAQATADLKAAGLEVPAAPAAAPQAPKAELAADEYDMVVVGGGPAGYYAAIRGAQLGGKIAIVEKSEFGGTCLNKGCIPTKTYLKNAEILDGLKIAAERGINLASTNYTVDMDKTVDFKNKVVKTLTGGVQGLLKANKVTIFNGLGQVNPDKTVVIGDKVIKGRSIILATGSKVSRINIPGIDSKLVLTSDDILDLREIPKSLTVMGGGVVGVELGLVYASYGTEVTVVEMADRIIPGMDREVSVELQKVLSKKGMKFLTSVGVSEIVEANNQLTIKLNDGSEIISEKALLSIGRVPQLAGLENLHLELDRGRIKVNAYQETSIPGIYAPGDVNGTKMLAHAAYRMGEVAAENAIHGNHHKAKLDFTPAAVYTHPEIAMVGLTEDQAIEKYGKENILIGRNSFTGNGRAIASNEAHGFVKVIAEKKYHEILGVHIIGPVAAEMINEAATIMESELTVDDVAASIHGHPTFSEVMYEAFLDVLGVAIHNPPKRK

SEQ ID NO: 29742 - protein, 549 aa, Shigella flexneri 2a str. 301
MLNQKIQNPNPDELMIEVDLCYELDPYELKLDEMIEAEPEPEMIEGLPASDALTPADRYLELFEHVQSAKIFPDSKTFPDCAPKMDPLDILIRYRKVRRHRDFDLRKFVENHFWLPEVYSSEYVSDPQNSLKEHIDQLWPVLTREPQDHIPWSSLLALPQSYIVPGGRFSETYYWDSYFTMLGLAESGREDLLKCMADNFAWMIENYGHIPNGNRTYYLSRSQPPVFALMVELFEEDGVRGARRYLDHLKMEYAFWMDGAESLIPNQAYRHVVRMPDGSLLNRYWDDRDTPRDESWLEDVETAKHSGRPPNEVYRDLRAGAASGWDYSSRWLRDTGRLASIRTTQFIPIDLNAFLFKLESAIANISALKGEKETEALFRQKASARRDAVNRYLWDDENGIYRDYDWRREQLALFSAAAIVPLYVGMANHEQADRLANAVRSRLLTPGGILASEYETGEQWDKPNGWAPLQWMAIQGFKMYGDDLLGDEIARSWLKTVNQFYLEQHKMIEKYHIADGVPREGGGGEYPLQDGFGWTNGVVRRLIGLYGEP

SEQ ID NO: 29743 - protein, 171 aa, Oryza sativa (japonica cultivar-group)
MLGTTAAQPTSRRGGLSTPRTRHGFGCGVDKMNRLRLAIPSASKNVSRCGKLAICRAQSEDSKGGGGFLTGFLIGGAIFGTLGYVFAPQISKTLDSLLDENGQDSESDEHGLVKPRYGRYYDEGLEKTRQTLGDKISQLNLAIDKAASRLKRVAGNVEKEAINDESEVETS

SEQ ID NO: 29744 - protein, 195 aa, Oryza sativa (japonica cultivar-group)
MLGTTAAQPTSRRGGLSTPRTRHGFGCGVDKMNRLRLAIPSASKNVSRCGKLAICRAQSEDSKGGGGFLTGFLIGGAIFGTLGYVFAPQISKTLDSLLDENGQDSESDEHGLVKPRYGRYYDEGLEKTRQTLGDKISQLNLAIDKAASRLKRVAGNVEKEAINDESEIEISSFNDNELVAENLNEQGFVQGETAT

SEQ ID NO: 29745 - protein, 873 aa, Rhodopseudomonas palustris CGA009
MSGLWQSMTTAWMSRTDRSALLDFWLGGRGAGTLIANTDIDEQEMRRIRAAQINSVTRLTPVTMSINVANAALILFTFWDNDARPQLLAWTAMIVFAAGSAVQSWLRNRFEPRLEASAHAIRRMTLHALLLGLIWGAMPVMVFVKADPGDQLIVACVAAGMISGGAFTLSTVPRAGLAYTWSLAAGSALSLALCDGMAYRITAAFLVLYAVFMSRNLISHGEMFFDNLRAKFELERQTEIISLLLKDFQANASDWLWQTDAHGRLVHVPERFVEVAKLPPSLLIGAPLADVIGMLCPEDGRCAMGVAAKMAQREPMNDLVVHVVIGGTPRLWSLTAKPMFDAAGEFAGYRGVGRDVTERWRAEQAEAENRAKSSFLAMMSHEIRTPMNGVLGLANSLLETKLDPEQQQAVTTIRDSGDDLLRILNDILDLSKLEAGRLEFEQADFSPTTLVESVRAIIEPEVRGKGIELKVDIDPRLPPSLNGDAARIRQVLLNLAANAVKFTEQGSIAIVLTCVKRNDSHATVEWQVTDTGIGISPDRVGSLFTDFAQADVSINRRFGGTGLGLAISRRIVEQMGGDIAVTSREGEGSTFRFSLDLPWSNAWIADHRLDRLGSDDLRTRIAMLGRPLRVLIAEDDSTNQMVVMKMLQEFAAEITVVSDGTDAVQAAGEGEFDVVLMDVRMPNMDGLAATRAIRGKGGALAKLPIIALTANAFPDDVKVCRDAGMNDFLAKPLRKPALVAAVLRALRGASTPVTMPSPPMLVDLDTLAELTAEIGQDQVNEMVALFFAETERRIALFRRFAEHMDRHDLEVEAHSLKGGARTLGFHPIAEIARSIEREAGSISPEALDLFTGQLNKALIELRRQCEGSLKLAS

SEQ ID NO: 29746 - protein, 252 aa, Gnetum parvifolium
MGRGRVQLRRIENKINRQVTFSKRRNGLLKKAYELSVLCDAEVALIIFSTRGKLYEFASSSMSKTLERYEKCSYSMQENASTDRDAQNWHHEVTKLKAKLESLHKAQRNLMGEDLGPLNIKELQSLEQQLEVALGHVRNRKTQLLIQTIDELRDKERTLQEVNKSLQKKLSETEGRNVIPALPHATTGSGEWESSTLTTTYALQTQQPSGIHHVDCEPTLHIGPYHQAVHHEAIPGPPATHSEPHNQYIWWV

SEQ ID NO: 29747 - protein, 197 aa, Oryza sativa
TIDNVKAKIQDKEGIPPDQQRLIFAGKQLEDGRTLADYNIQKESTLHLVLRLRGGMQIFVKTLTGKTITLEVESSDTIDNVKAKIQDKEGIPPDQQRLILADYNIQKESTLHLVLRLRGGMQIFVKTLTGKTITLEVESSDTIDNVKAKIQDKEGIPPDQQRLIFAGKQLEDGRTLADYNIQKESTLHLVLRLRGGQ

SEQ ID NO: 29748 - protein, 247 aa, Oryza sativa (japonica cultivar-group)
MAVEAVLEASRSSSEEEAEVIVTHGGGGGGGGGGGQVEGWGKRKRSRRRRPQLPPSEEEYLALCLLMLARGRRDGDDVAASASAAAAAVEHRCSVCGKAFASYQALGGHKASHRKPPPPAMVDDDEVVVETKPAAIATPSSSASGVSGGGGGRAHECNVCGKAFPTGQALGGHKRCHYDGTIGSAAGAGASKPAAKTTVAVAASRGFDLNLPALPDVAAAADQRCAAEDDEVLSPLAFKKPRLMIPA

SEQ ID NO: 29749 - protein, 374 aa, Methylococcus capsulatus str. Bath
MTDIFDPSDEFGPARIIQVREPSVGLRATVIIDNVALGPAIGGLRIASAGSTADGCRLARTMTLKSAAADLPHGGGVAMLHPAPGSPENACRQHRVRALACALRSEDQFIFAPDMGSGETTMAWIRDENGRAVGLPRELGGIALSRIGAAGWGLYHATEVALRYCGFKLEDARVVIQGFGTVGQNTARYLVENGAVVVGIADSGGTLYHPRGLDIAELVAIKAKGGSVVDSSEGERLAPDAAVDLDCDIWIPAAGSDVITPDNAARLKARLVVEAADASLAPAAERYLHEKGIICVPDFIANAGGLIGAAMECRGANKTQVLSAIKEKIRRNTEKVLQSVETDGTLPREAAVRLAMKPIVKAMSYRRWSGLSAD

SEQ ID NO: 29750 - protein, 141 aa, Brassica napus
MSSPAILPVTNQQATQSNTPAFRTFLSRLSSSLRDSLSQRRPWLELIDRTSFARPDSLTDSISRIRKNLAYFKVNYAAIVSLVLAFSLLSHPFSLLVLLSLLGAWMFLYLFRSSDQPLVIFGRGFSDRETLLGLVVATVVV

SEQ ID NO: 29751 - protein, 213 aa, Aquifex aeolicus VF5
MRVILFDLDGTLIDSAKDIALALEKTLKELGLEEYYPDNVTKYIGGGVRALLEKVLKDKFREEYVEVFRKHYLENPVVYTKPYPEIPYTLEALKSKGFKLAVVSNKLEELSKKILDILNLSGYFDLIVGGDTFGEKKPSPTPVLKTLEILGEEPEKALIVGDTDADIEAGKRAGTKTALALWGYVKLNSQIPDFTLSRPSDLVKLMDNHIVEF

SEQ ID NO: 29752 - protein, 272 aa, Glycine max
FGSSVILGDPSPVLFYPISSTEIRCLVDVPGQKLPSLGGGEMACYLKTVVAPQVPPELYDSFIAAIDKGNIRTMPNRSMPASPYPTPGALLMGDAFNMRHPLTGGGMTVALSDIVVLRDLLKPLHDLHDASALCRYLESFYTLRKPVASTINTLAGALYKVFCASPDPARKEMRQACFDYLSLGGVFSDGPIALLSGLNPRPLSLVLHFFAVAIYGVGRLLIPFPSPKRMWIGARLISGASGIIFPIIKAEGVRQMFFPATVPAYYRTPPVH

SEQ ID NO: 29753 - protein, 242 aa, GIBBERELLA ZEAE PH-1
MSASEPTEPKVEETKVEETKPEETKPEETKPAEAEKPVTSSSMFSMFGGGAKKEKKDDEERGDNSGSAKAQREAAEAAKGDEEDAPESEDVHFEPVIKLTEKVDTKTNEEAEEQTFKMRAKLFKFVKESSEWKERGTGDVRLLKHKENGKTRLVMRRDKTLKVCANHYIVPEMKLSPNVGSDRSWVWNAAADVSEGEPEAVTLAIRFANAENANNFKDSFMKAQKENEEIFNKAQEAEAPPS

SEQ ID NO: 29754 - protein, 400 aa, Nicotiana tabacum
MNFKNFADTPQTESNSGMSMGSGNFPLARQYSVCSLTFDELQSTCGLGKDLGSMNLEDLLKNIWTAEESQVVASSAGVGNLQREGSLTLPRTLSQKTVDELWRDFQKETTVSSKDVSGTEWPNLGQRQSTLGEMTLEEFLVRAGVVREDMQPTGSSTDVRFTGGLSQPSTNNNGLNIAFQQPTQTPGLLSNQFEDNNMLNVVSATSSQQILNVAFTSPMQLGTNVQLANAGAREPAVSMSSPSVNTSTIVQGSVMQGGTKGLAGLRNGVTPAKRGSPGNQLSPDMMSKKVLDRSSLSPSPYAFIEGGKGRRPCNSLEKVVERRRKRMIKNRESAARSRARKQAYTLELEAEVEKLKEINKELHKKQAEFIEMQKNQLMEKMNMPWGNKLRCLRRTLTGPW

SEQ ID NO: 29755 - protein, 276 aa, Rubrobacter xylanophilus DSM 9941
MEGRTVCAAAIQMSSTPDRGENRRVAEALIREAAAAGATLVALPELWSCHGLEEVYRENAEPIPGPTTEFLGSLARELGIYLLGGSILERVSGSERLGNTSTLYAPDGSLVAVYRKVHLFDVEVSGRRYLESANIAPGGEAVAAKAGPVTVGLSVCYDVRFPELYRLLALRGAEVLAVPAAFTLQTGKDHWELLLRARAVENQAYVLAPAQWGRKADGRWTYGRSMIVDPWGTVLSTCPDRDGYALATLDLGYLERLRAEFPSLANRRPRVYRGLC

SEQ ID NO: 29756 - protein, 258 aa, Jatropha curcas
MESKNRKWLQERSNSTGNNLNQNSNTAETRYRGVRKRPWGRYAAEIRDPGKKTRVWLGTFDTAEEAARAYDAAAREFRGSKAKTNFPTVTELNNAAAAAVAAGAVTVARSPSQSSTVESSSPTPPRAASPPPPLDLTLNIPSHQHHHLRHGHFPTGVIFPGGAWISLAAEAHPVFFFDAFSVQGESNNNNKNNIINNNKIHSKNINLCRLDRTVMVSSGVHSDSDSSSVVVDYDHDRSPCNKGLSLDLDLNFPPAEVA

SEQ ID NO: 29757 - protein, 1390 aa, ASPERGILLUS NIDULANS FGSC A4
MAATIDRPLFEPIAGGPATDAASITPPHSINGKKDGPDGAPSELSDLELDSKPTDAQEDISVEEGDQEIEPDHYYGGGKIPVFKPFRDFQSFIKRIDKYGMRSGVVKVIPPKEWRDALPPLDEAVKKIRVKNPIMQEFHGSHGTYTQANIEKQRSYNLPQWKALCEDGSHQPPARRGERRRNQERVTRAPSAPKAQTTRADTPKRGPGRPAKRSNQAKVKEEPVKIKEEPAADEVMEKIKPEGPPTPVSPESIPAETKSEALSDGESLSAPKSRGRQPKSVTARRKQNKGDTVEHVDEEAYKNFDYRIHDNEDYTPERCEELETAYWKSLMFNNPMYGADMPGSLFDDRITSWNVAKLPNLLDVIGQKVPGVNTAYLYLGMWKATFAWHLEDVDLYSINYIHFGAPKQWYSISQEDAPRFEQAMKSIWPSDAKTCDQFLRHKTYLVSPSLLKSQYGITVNKMVHYEGEFVITYPYGYHSGYNLGYNCAESVNFATEKWLDYGRVAKKCNCEADSVWIDVEEIERKLRGELTPEYYGEYDSDLDGYEAASDLLTPPRSVPEKTSNRGRKRKHDGDMNKAKRMRADMGIPRRLPCLLCPNDLDYEDLLPTEDGKSHAHRRCALYTEETSILRDGSGKEVVCDIDKIPKARMGLKCLYCREVRGACFQCNFGKCTRSYHATCALLAGVQVEEGLVTVVADDGSQYSVPSVDLKCKYHRQKKPTWMTSSESPENDRKLMDTARRLVTGDILQFQADKEIYGAVVIENRVAERTLQVKVLPRGSNFAPLAAGIKPLPAHLSRKPEGRRELESALPVAGNPFGDGRSPYQWAEFETVDSTNRPAAPPAVQVDLGKMEQIWYYLGQSSTECRAQYTHNPSVPIHNPRSNFLDSVKSLGAVMARLPSYPHHRLPSYVLTTPPPHLLSSAAATTTASAVAAAAASRPLLPPRPPFAPPRSSPAAPTSAAVAASAMPSAYRSLPNQIARHAPYPQVTKAHLQSQQQHSHQQQQQNTNGSHSTANSHLPANNFANVRELIARRRLAQITDHANVFAGYTIVGPELVVETLLGPMGSVPPSNGLEKLELAMAQQRVQPRAPDGTLLPMQPLNMRSEEVTRLLQMLRFSLISHRDRLDVLQKKETETAKQEAANKVKGATPKLPRKYAYLELQREQAPTVYQSPYDMPSGFTEYARTTFGLTRHEPELPKPSLANDYFASLSPENQEKILKTCGSFVQRAIERSAPHSRQSSSSNFRLASALAQQTENPTIDITTVENMPLSGLDFPLRADSPCSNFSRSHLRFHSPNDFSHHGTEVHHDHHDLFGDQQANTRFWQHGPWAAGDGNTPNEENRPFFGPHERLKHDYASSDISLGRGGPGSLHSVDMAGFGLDNPDDLCAALSP

SEQ ID NO: 29758 - protein, 274 aa, Arabidopsis thaliana
  misc_feature (109)..(109): Xaa can be any naturally occurring amino acid
  misc_feature (170)..(170): Xaa can be any naturally occurring amino acid
  unsure (1)..(274): unsure at all Xaa locations
MATDSFIKLNPISFNRARFDLRDFAGISPKSISSLCCISPRLISCNHFSPRTLISGENGNILFSKKKIPAFVRCQTSLGIGRNQKWWEKELKPNMKSVTSPQDLVVSLXRNAGDKLVVVDFFSPSCGGCKALHPKICKIAEKNPEVEFLQVNYEEHRSLCQSLNIHVLPXFRFYRGSSGRVCSFSCTNATIRKFKEALEKHGREQCSIGETKGLEEKELVAMAANKDLSFDYKPTSCGNIQEQKKKEIFLPKSPTFNKQKEVEHSLLLVSPAPA

SEQ ID NO: 29759 - protein, 217 aa, Listeria monocytogenes EGD-e
MNDIIHDYLLKNIPKSSPFFKELEAYAKENEVPIMEPDSLYCLLQILDIQKPKRILELGTAIGYSALKMADKLPDAEIITVERDEERYEQAIHNIQRYGASDRVKVLLTDAIEGAEEILAHGPFDAIFIDAAKAQYEKFFHIYTVSLAENGVIYSDNVLFKGLALDMTPEKQRKLRVARKMRHFNDFLVTHPDFETTTIPLGDGLSISKRKKTGGVS

SEQ ID NO: 29760 - protein, 325 aa, Triticum aestivum
  misc_feature (285)..(285): Xaa can be any naturally occurring amino acid
  misc_feature (289)..(289): Xaa can be any naturally occurring amino acid
  misc_feature (293)..(293): Xaa can be any naturally occurring amino acid
  unsure (1)..(325): unsure at all Xaa locations
VSVLLARMAVSVLAILLASFALAAASFDKEFDITWGDGRGKILNNGQLLTLGLDKVSGSGFQSKHEYLFGKIDMQLKLVPGNSAGTVTAYYLSSQGPTHDEIDFEFLGNVTGEPYTLHTNVFTQGQGQREQQFRLWFDPTNDFHTYSILWNPKHIIFMVDDMPIRDYKNLEGKGIAFPKNQPMRLYSSLWNADDWATQGGRVKTDWSHAPFSASYRGFKADACVVTAGGRPRCGASVGTEVAPGTGATGEWYNQELDLTRQQRMRWVQRNYMIYNYCTDPKRVAXGVPXECSXVSPCPPKQPALDRPCIPSPEKGKMGASVLMIK

SEQ ID NO: 29761 - protein, 1612 aa, Debaryomyces hansenii CBS767
MYDDPESIANMGMPPSTQNRIASDGVIYSNQHMSGYMMHPNRNNEFIPHKDNLDNCIDERKLSLPYPSNDNFGTLLQDETSTPNKQNIQVTTNNSSSPIQSDHKDLKSFSFSEQNDSIQEFQVSPIKEDPPRLSRRAFDGFPRDEVSNENSRSARPYSPAPNSSGSDNSNAIGLIIGGYDYSKSSLELASKDNNNNFHNDRKSNTLIQRDDDPTGQFCLTNNPLQSNEVDINVKVHNRNSSESSTVSNTSTTSTITPSTISKGKRFVRYAMNTQSKSSMTNTSTKWHILNVLKWLDYYGFNSSWQETFRRNEISGNRFLELCNYEVDSMIWKQFSKYLVLDNENNSIERFIELLKGHLSTSEPVDDYNANKEYQMQSHSRKGSNESHLSPVLPNSTAENRKSVPIFHKRKSVSISAAYGSSSLNNNIASSGNQRPVSYVDIGSQKPSKDLQSHHKFFRKSKSSYSDIPQTYTGINNISIAPSNNQNISGHRKSNSRTSLSLNDDFIVDSNKIKYTGAPLLKTSSLQNFPTPNNEAIPATTYGRKSGLFSTLKKYSSDKAVGIVKQVQNTSSSSATKTSGINKSNSKNVVSPVSPVEFRELLLPKAKQNITQSNAEQESTNTTTMDDINTRSIAMSSDETLPSPLMNSSAKVINFNNNTYIDLIKKADLLDNLDEKYLPTLHDSFVDKKMILASKDNKHFTPINLTREEIRNIELIRNRVIQELELIDVGIITFHLTEFNSTEGIALKDDVLLDVIRTDILVKLFVNQELTSDTTTTFSTTSSDSKSFELIGENNDERSYPSTPQYLLQNARDPKVDYWNFKDTNNDKLSSISEINSTRAGRKSPSNPQFSMKLHLPENKKFSQDSKPPSLLINTTQIDNSLPSLSPNSSKLSDSHNSFKILRKEGREIDFDKRRKSPYESKAPKLIPNIYSSSVSNPSKSPISATTIATLKDENVESNHNKLSPSISSGSMDRDKSGSIVAKRIAPPPPLDRKLSVIGSHSLKKASILPSISTLSKTLSYSSRSPSGSERSMGSRKAFNKRKGSTSSKNSFVTDDSFAFRENDVSFDDVPTVQRDNNASSDDEDFFVKPIKNQKSNVNDDDNESDEDFFMKPIRSPDSEAPKETLKRRTLTDPISIKMNVRPPVEEVYRNLEKYFPNTNLDKPIIDDSPVSPVNKHQPSIEASNAIPMRKPTISRTFSNANMSPVHPKLDSGDEILYAENQEPTLSRRRMKTIRVVANEARKKRLERQNSPQAGRSLESSYCNTPNSGNFNSLNRTNTKLWGQKVVEVTSTEIEKGFVSKLKNGKHGEFEEFAWIKGELIGRGSFGAVYLALNVTTGEMLAVKQVIVPNDFQNGSPKVSEGIDALHKEVETMKDLDHLNIVQYLGFEQKKNIYSLFLEYVAGGSIASCMKSFGRFEEPLIKFIIKQVLLGLEYLHSNGILHRDLKADNLLLEIDGTCKISDFGISKKSKDIYVNNAEMSMQGTVFWMAPEVIDSIVADKKQGYSAKVDIWSLGCVVLEMFAGKRPWSNEAVVSAIYKIGKTKLAPPIPDDITHLISDEARSFIGRCFTIDPEERPTARDLLGDPFISNESKFSFETTRLAQMIKDNYKKYNI

SEQ ID NO: 29762 - protein, 215 aa, Gracilaria lemaneiformis
MPFVSVRPVDYLFKVVLIGDAGVGKSNLLSRFTRNEFSLESKSTIGVEFATRSIQCEGKIIKAQIWDTAGQERYRAITSAYYRGAVGALLVYDITKKDSFDNVQRWLKELKDHADANIVIMLVGNKSDLQHLKAVTTDDASAFAESNGLSFIETSALDNSNVEEAFRSILSEIYRLGSKKALEKGSTSNFAPNATQTIVINPPADEGKTEKAKCC

SEQ ID NO: 29763 - protein, 266 aa, Gnetum parvifolium
MGRGKIEMKKIECTSSRQVTFSKRRSGLLKKAHELSVLCDAEVAVIIFSNTGKLYEYASSSMRKTIERYQKFEENSTNSTKSFKTKSEQGSSADVGSLLLEMKAMENKHRNSMGEELSSLSVPELKRLEQELEVGINRVRARQNELFEAEICGLKRKEHDLIEENMMLHKLLSETGSSSEMAASAPAHSFGDESAMMACQYRQQVCMGESSSSRNQTRHHIYGVSDVARHLALQISCPNQSRNDYNLVLDGWEYMPEYAPPLVSMD

SEQ ID NO: 29764 - protein, 492 aa, Manihot esculenta
MDPCKFRPSSSNNTPFWTTDAGAPVWNNNSSMTVGTRGPILLEDYHMIEKLANFTRERIPERVVHARGMSAKGFFEVTHDVSHLTCADFLRAPGVQTPVIVRFSTVIHERGSPETLRDPRGFATKFYTREGNFDIVGNNFPVFFIRDGIKFPDVIHAFKPNPKSHIQEYWRIFDFLSHHPESLSTFAWFFDDVGIPQDYRHMEGFGVHTFTFINKAGKVTYVKFHWKPTCGVKCLMDDEALKIGGANHSHATQDLYDSIAAGNYPEWRLFIQTMDPADEDKFDFDPLDMTKIWPEDIFPLQQIGRLVLNRNIDNWFAENEMLAFDPGHIVPGIHYSNDKLFQLRTFAYADTQRHRLGPNYKMLPVNAPKCAYHNNHYDGFMNFMHRDEEVDYFPSRYDPVRHAERSPIPNAICSGRREKCVIEKENNFKQPGERYRSWAPDRQERFLCRLVNALSEPRITFEIRSIWVSYWSKCDASLGQKLASRLNVRPNI

SEQ ID NO: 29765 - protein, 762 aa, Bacillus thuringiensis serovar konkukian str. 97-27
MAIQTSNLGYPRIGLQREWKKTLEAFWSNKINEEQFLTTMKEIRLQHVKVQQEKGIELIPIGDFTYYDHVLDTAYMLGFIPSRFSEFTSYLDVYFAMARGSKDHVASEMTKWFNTNYHYIVPEYEEGLQISLKDNRPLRLYEEAKQELGVDGKPVILGPYTFLKLAKGYTQEQFATILKQLVAPYVQLLSELHAAGAQIIQVDEPIFASLTKEEVQQAKEIYEAIRKEVPNATLLLQTYFDSVEENYEEFITFPVSSIGLDFVHGKEGNLNAISKYGFPADKTLAVGCIDGRNIWRADLDEVLTLFTTLQKQVQTKDLIVQPSCSLLHTPIDKTEETHLSTELFDALAFANQKLEELVLIHSALTQGTESISNELETYRNVHHTIRSSAARNREDVKAARTALKEEDFSRPLPFEKRYELQQVALKLPLLPTTTIGSFPQTTEVRQTRKEWRNGIISNEQYEQFIEKETEKWIRYQEEIGLDVLVHGEFERTDMVEYFSERLAGFSFTKNGWVQSYGSRCVKPPVIYGDVAFINGMTIKETVYAQSLTEKVVKGMLTGPVTILNWSFVRNDIPRKEVSYQIALALRHEIELLESSGIRVIQVDEPALREGMPLKEKDWDAYITWAVQSFLLATSSVANETQIHTHMCYSNFEDIVDAIRALDADVISIETSRSHGEFIDTLKHTTYEKGIGLGVYDIHSPRVPSKDEMYKIVEQSLQVCDPKYFWINPDCGLKTRRTEEVIPALEHMVQAAKDARSLLKTNA

SEQ ID NO: 29766 - protein, 200 aa, Triticum aestivum
NKFVQKSRLVPVRNSRDIVDPRCPLITNLYFISQLLYRKYSGNFLVNLLGIWKESEYSGHSIPVGGLAYYVTAPSSMADILANPFHALFYVVFMLSACALFSKTWIEVSGSSAKDVAKQLKEQQMVMPGHRESNLQKELNRYIPTAAAFGGVCIGALTVLADFMGAIGSGTGILLAVTIIYQYFETFEKERATELGFFGF

SEQ ID NO: 29767 - protein, 283 aa, Pisum sativum
MDPSSQQMSRQSSMENMLVCSKEQQESKPKPQPEQALKCPRCDSTNTKFCYYNNYSLTQPRYFCKSCRRYWTKGGTLRNVPVGGGCRKNKRSSSSKRIQDQAFAPNHNPFSNLPHFDQSNDFALRLARLQKQSCGGQMGYDENELSMLGNSGSSMNQSMSINHGFMDAIRSGLFLGNGMHYNNSVQNMYGGGYGNGDNGEVNSGNNNCGVSEEMMFNYDQEMSHCNAAINMKQEQSESRVFGGFPWQINGGIGNMGEVEQARASWNNGFTTPSWQGLLHSPLM

SEQ ID NO: 29768 - protein, 328 aa, Vibrio vulnificus YJ016
MSRGFVAVIIAAITLRRHPMNHINRVAIIGECMVELKKVNGELQQGFGGDTLNTAVYLSRLTQQSGVSTSYVTGLGQDPFSREMLAAWQDEGINTDMVYLSQDKLPGIYAIETADNGERSFFYWRNDSAAKYWLRDRAILTLAKELCQHQMIYLSGISLAILSQDCREALIKLLALCRSDGVKIAFDNNFRPALWSNVADAQAFYQQILQVTDMAFLTFDDEMLLWGDTHEDQAIERTKGFGVSEIVIKRGGDECFVVTEAGRHAVAPLKIDHVVDTTAAGDSFSAGYLAKRILGGDCQQAAVAGHTVAGHVIQHRGAIIPREAMPTI

SEQ ID NO: 29769 - protein, 309 aa, Arabidopsis thaliana
MEITLNSGFKMPIIGLGVWRMEKEELRDLIIDAIKIGYRHLDCAANYKNEAEVGEALTEAFTTGLVKREDLFITTKLWSSDHGHVIEACKDSLKKLQLDYLNLLLVHIPIATKHTGIGTTDSALGDDGVLDIDTTISLETTWHDMEKLVSMGLVRSIGLSNYDVFLTRDCLAYSKIKPAVNQIETHPYFQRDSLVKFCQKHNICVTAHTPLGGATANAEWFGTVSCLDDPVLKDVAEKYKQTVAQIVLRWGIQRKTVVIPKTSKPERLEENFQVFDFQLSKEDMEVIKSMKRNYRTHQTAKFWGIELYA

SEQ ID NO: 29770 - protein, 400 aa, Ralstonia eutropha JMP134
MDNWKTGTDAMFILLGAIMVLAMHAGFAFLELGTVRKKNQVNALVKILVDFAVSTIAYFFIGYTVAYGVQFMSGADTLAQKSGYELVKFFFLATFAAAIPAIISGGIAERSRFNPQLCATFVLVGFVYPFFEGIAWNQRFGIQDWITHLTGAPFHDFAGSVVVHAVGGWIALPAVLLLGARRGRYQKDGRISAHPPSNIPFLALGAWVLAVGWFGFNVMSAQTVDKISGLVAINSLMAMAGGTLAAWWAGRNDPGFAYNGPLAGLVAVCAGSDLMHPVGALVTGAVAGVLFVHLFTLAQNKWHIDDVLGVWPLHGLCGAWGGIAAGIFGSHALGGIGGVSLGAQLIGTLLGIVIAVAGGTIVYGTLKKLVGIRLDAEAEFNGADLTLHRISATPERETNW

SEQ ID NO: 29771 - protein, 550 aa, Pyrococcus abyssi GE5
MAQLAGQPILILPEGTQRYVGRDAQRMNILAARIIAETVRTTLGPKGMDKMLVDSLGDIVITNDGATILDEMDIQHPAAKMMVEVAKTQDKEAGDGTTTAVVIAGELLKKAEELLDQNIHPSIVIKGYMLAAEKAQEILDSIAKEVKPDDEEVLLKAAMTAITGKAAEEEREYLAKLAVEAVKLVAEEKDGKFKVDIDNIKFEKKEGGAVSDTKLIRGVVIDKEVVHPGMPKRVEKAKIALINDALEVKETETDAEIRITSPEQLQAFLEQEEKMLKEMVDKIKEVGANVVFVQKGIDDLAQHYLAKYGILAVRRVKKSDMEKLAKATGAKIVTNIRDLTPEDLGEAELVEERKVAGENMIFVEGCKNPKAVTILIRGGTEHVVDEVERALEDAVKVVKDILEDGKIIAGGGAAEIELSIKLDEYAKEVGGKEQLAIEAFAEALKVIPRTLAENAGLDPIETLVKVIAAHKEKGPTIGIDVYEGEPADMMERGVIEPVRVKKQAIKSASEAAIMILRIDDVIAAQKLEKEKEGEKGGGGSEDFSSSSDLD

SEQ ID NO: 29772 - protein, 602 aa, Cryptococcus neoformans var. neoformans JEC21
MIPPLDDSSLVKAADKAWWKSATVYQVYPASFCDHADAGHGTLLGILTKVDYLQSLGVDIVWLSPIYESPQADMGYDISNYRQIDKRYGSLEDWDRLLAALHQRGMKLVMDLVVNHTSDQHPWFKESRSSRDNPKRDWYIWRPPRYNEKNERIPPNNWKGTFGQGSAWEFDETTNEYYLHLFLKEQPDLNWENPQVRAEVYDLMHWWLKRGADGFRMDVINFIAKAPGLPDAPVIDPGRTYQSFGMMSINRPEVHGWLKEMNRAVLSHYDCFAVGECPGDEAVVSYAPYSVPHNKELQMVFHFHHQSFDRAAGGLGRVHNPDWKLSELKRVFNTWQIEMAREGGWNSNYLENHDQPRIISRMASDHPSDRARCAKLLAMFHCSLGGTIYVYQGQELGMINVPRGWGLVEYKDVETIQNSEAEVQHRQVICGHANPDISDLLESNRITARDNGRTPMQWDSSLNAGFSKGEPWMRIHDDYREGWNAAAQVNDPDSAWSFWKQMLRLRKKYDAMIYGDFIALDESNEETYAYIREHPPSGQKLLVVLNLSRGNDGRGAPSTFVLPCGLDTSGSKLLISNGEVQEGQRIEGNILLGPWEGRIYLL

SEQ ID NO: 29773 - protein, 577 aa, GIBBERELLA ZEAE PH-1
MFGGSSNNSAGNKSESDSKSDKSPSPEPGTGLSAPSPIKTTDQAASGEKRSGNGSPPTRQDVGGPSDKKRRSSSVSSRASSLLASAKNSLNFSSQSSRGGGSEVNSQTSLQKLGKQDPALAVPQGQHNNSAGDSMPGPKSTFRVGVWEDRNKKCRRTMEDTHAFLYNFVQTPALNDASAKDKPEGDDLVTSDMVESDNGYFAIFDGHAGTFAADWCGKKLHIILEDIIRKNPNALIPEVLDQAFTAADAQLEKLPLKNSGCTAAVAVLRWEDRASNDRSAIKPVKPEEPIEMDKANDGSSNEEATKATNSKGKGSGRQRVLYTANVGDARIILCRGGKALRLSYDHKGSDEVEGKRIAAAGGLILNNRVNGVLAVTRALGDAYMKKLVTGHPYTTETVIQPDSDEFIIIACDGIWDVCSDQEAVDLVRNVNDPISASKQLVDYALNRFSTDNLSCMVVRLDQNKEAAVEVEGAASQVSEADKIVSETKQKIAEGIAPAVGVSATSNAPQSQPPIAVQEGDFVPTSLDDIVTEEPPHVADPKSDDVPILNKAAVLEARKDKPAEEKPVEEQETPPGQE

SEQ ID NO: 29774 - protein, 468 aa, Pseudomonas syringae pv. tomato str. DC3000
MGLNDQWMQRDLKVLWHPCTQMKDHENLPLIPIKRGEGVWLEDFEGKRYLDAVSSWWVNVFGHANPRINQRIKDQVDQLEHVILAGFSHQPVIELSERLVKLTPEGLTRCFYADNGSSCIEVALKMSFHYWLNRGQPAKKRFVTLTNSYHGETMAAMSVGDVPLFTETYKALLLDTIKVPSPDCYHRPDGMGWEEHSRNMFAAMEQTLAEHHASVAAVIVEPLIQGAGGMRMYHPIYLKLLREACDRYGVHLIHDEIAVGFGRTGTMFACEQAGIRPDFLCLSKALTGGYLPLAACVTTDDVYDAFYDDYPTLRAFLHSHSYTGNPLACAAALATLDIFEQDNVIENNKALAQRMATATAHLVDHPHVAEVRQTGMAIAIEMVQDKATKTAYPWQERRGMKVFQHALERGALLRPLGSVVYFLPPYVITPEQIDFLAEVATEGIDIATRSSISVAVRENFHPDFRDPG

SEQ ID NO: 29775 - protein, 150 aa, Zea mays
MSRRKTREPKEENVTLGPTVREGEFVFGVAHIFASFNDTFIHVTDLSGRETLVRITGGMKVKADRDESSPYAAMLAAQDVAQRCKELGITALHIKLRATGGNKTKTPGPGAQSALRALARSGMKIGRIEDVTPVPTDSTRRKGGRRGRRL

SEQ ID NO: 29776 - protein, 88 aa, Oryza sativa (japonica cultivar-group)
MGRGKIVIRRIDNSTSRQVTFSKRRNGIFKKAKELAILCDAEVGLMIFSSTGRLYEYSSTSMKSVIDRYGKSKDEQQAVANPNSELKI

SEQ ID NO: 29777 - protein, 359 aa, Arabidopsis thaliana
MGNSSEEPKPPTKSDKPSSPPVDQTNVHVYPDWAAMQAYYGPRVAMPPYYNSAMAASGHPPPPYMWNPQHMMSPYGAPYAAVYPHGGGVYAHPGIPMGSLPQGQKDPPLTTPGTLLSIDTPTKSTGNTDNGLMKKLKEFDGLAMSLGNGNPENGADEHKRSRNSSETDGSTDGSDGNTTGADEPKLKRSREGTPTKDGKQLVQASSFHSVSPSSGDTGVKLIQGSGAILSPGNERELKRERRKQSNRESARRSRLRKQAETEELARKVEALTAENMALRSELNQLNEKSDKLRGANATLLDKLKCSEPEKRVPANMLSRVKNSGAGDKNKNQGDNDSNSTSKLHQLLDTKPRAKAVAAG

SEQ ID NO: 29778 - protein, 215 aa, Corynebacterium glutamicum ATCC 13032
MTSIIASNSDLSEALRTHTAQAHEEAEHSTFMNDLLTGKLDAQAFIKLQEQSWLFYTALEAAARACAEDSRAAGLLDPRLERKETLEADLDKLHENTTWRDNVTATAATASYVERLESIEAAKDFPRLVAHHYVRYLGDLSGGQVIARLVNREYGVSEEALSFYCFEDLGKLKPYKDNYRAELDALELTAEERAALLDEASDAFRFNQQVFQALA

SEQ ID NO: 29779 - protein, 598 aa, Proteus vulgaris
MQTFNADIAIIGAGGAGLRAAIAAAEANPQLKIALISKVYPMRSHTVAAEGGSAAVTQAHDSYDFHFNDTVSGGDWLCEQDVVDYFVEHCPTEMTQLELWGCPWSRKEDGSVNVRRFGGMKIERTWFAADKTGFHMLHTLFQTSLKYPQIQRFDEHFVLDILVDEGHARGVVAINMMEGTKVQIRANAVIMATGGAGRVYRFNTNGGIVTGDGMGIALRHGVPLRDMEFVQYHPTGLPGSGILMTEGCRGEGGILVNKDGYRYLQDYGLGPETPLGKPENKYMELGPRDKVSQAFWHEWRAGRTIKTHRGDVVHLDLRHLGAKKLHERLPFICELAKAYVGVDPVNEPIPVRPTAHYTMGGIETNQRTETRIKGLFAVGECSSVGLHGANRLGSNSLAELVVFGRLAGEEAVRRAQEATPANASALDAQTRDIEDNLKKLMNQKGSENWAQIRDEMGEAMEEGCGIYRTPELMQKTIDKLTELKERFKHVEIKDTSSVFNTDLLYKIELGFGLDVAECMAHSAFNRKESRGAHQRLDEGCTERDDVNFLKHTLAFYNPEGAPRLEYSDVKITKSAPAKRVYGGEATAQDKQNKEKANG

SEQ ID NO: 29780 - protein, 685 aa, Leptospira interrogans serovar lai str. 56601
MKMYKNLADMLIQSTEKYGDRPVFWSKGEDKEFHPTSYNQLYDMGIALAEALIQLGLKAREHVGVLADNRLEWILTDYAVQFSGAANVPRGTDVTESELEYILNHSEAKIVFIENDKMLEKYNKVKSKVPKVETIIIMDKSSSAKGKNIHKIYDLVEEGRSLRAKGSKKAEKRIEEIKPEDLFTLIYTSGTTGMPKGVMLMHSNMIHQMVYVVPMLLTEIKPTDSMLSILPIWHIFERINEYGAISSGIQTYYTKVADLRNDLAKAKPSFMASAPRVWENVYANIYNKINDPKQTPPIRRVLFKLAYFFSKHYNASRRFLNGLEVDYENRNIMKSLVIGIRSLIVLLLTGPFTLSAISILAYLTLPVYGIHLPNWLFFSLVGLGLVFNAKTLDTIVLSKIRAATGGRLKASLSGGGALQSHVDNFFNDIGMLVLEGYGMTETSPVISVRPFVKPIIGSVGFLVPKSELIIKDENGNVLTHINDQYEVLAGKLGQKGIVFVKGPQVMKGYYKNPEVTKKTIVDGWMNTGDIGFINFKKTLTLTGRAKDTVVLLGGENVEPVPIENKMDESPFIKQSMVIGQDQKVLGAIIVPDMEHLGVWCKENGIDSSKIDEIIKNPKVIDFYKKEVRSYNSTKTGFKSFEQVQHVILAKKPFEVGDELTDLLKMKRHVITEKYSKEIKKIYEKD

SEQ ID NO: 29781 - protein, 365 aa, Caulobacter crescentus CB15
MSQGDGQPSRCHGRSHPLIATLLGPSVLFFQRFFRLMTALYDVAAIGNAIVDVIAQCDDAFLEREGLVKGSMALIDPARAASLYDVMSAAIEASGGSAANTVAGVASFGGKAAFLGKVADDQLGRVFRHDMNAIGCVFTTPPLAEGPATAQSLINVTPDAQRTMSTYLGACVELNPADVDPDIIEAAQISYLEGYLFDPPEARRAFAKAAALAHGSDRKIALTLSDSFVVDRHRGALLGFVETQCDIVFANAAEVCALFETDDFDAAVKALAERCEIAAVTRSEKGSVVAANGQLHEISAYPVEKVVDTTGAGDQYAAGFLFGLSQGRPLPICGQLGSLAAAEVIDHYGPRPQVSLRELAEKNGL

SEQ ID NO: 29782 - protein, 258 aa, Triticum aestivum
  misc_feature (225)..(225): Xaa can be any naturally occurring amino acid
  unsure (1)..(258): unsure at all Xaa locations
MSTAVVKWCYATVVPRARSSTIVASLGTPAPSNSSSFRPKLIRNTPVQAAPVAPVLMDAAVERLKTGFEKFKTEVYDEKPDFFEPLKAGQAPRYMVSACADSRVCPSVTLGLEPGEAFTIRNIVNMVPSYCKNKYAGVGSGIEYAVCALKVEVIVVIGHSRCGGIKALLSLKDGAYDSFHFDEDWVRIGFPVNKKVQTECASMPFDDQCSVLEKEVVNVSLQKLXTYPFVKEGVSNGTLRLVGAQYDFVSGKFETWEQ

SEQ ID NO: 29783 - protein, 145 aa, Arabidopsis thaliana
MAPKAEKKPAEKKPVEEKSKAEKAPAEKKPKAGKKLPKEAGAGGDKKKKMKKKSVETYKIYIFKVLKQVHPDIGISSKAMGIMNSFINDIFEKLASESSKLARYNKKPTITSREIQTAVRLVLPGELAKHAVSEGTKAVTKFTSS

SEQ ID NO: 29784 - protein, 371 aa, Nicotiana tabacum
MSSATTSQAAAEKGSKASTKKGIKETLLTPRFYTTDFDEMTDFEEMEPLFNTDQAEFEALLQEFKTDYNQTHFVRNKEFKEAADKMQGALREIFVEFLERSCTAEFSGFLLYKELGRRLKKTNPVVAEIFSLMSRDEARHAGFLNKGLSDFNLALDLGFLTKARKYTFFKPKFIFYATYLSEKIGYWRYITIYRHLKANPEFQCYPIFKYFENWCQDENRHGDFFSALLKAQPQFLNDWKAKLWSRFFCLSVYVTMYLNDWQRTAFYEGIGLNTKEFDMHVIIETNRTTARIFPAVLDVENPEFKRKLDRMVEINQKILAVGETDDIPLVKNFKRIPLIAALASELLAAYLMKPIESGSVDFAEFEPQLVY

SEQ ID NO: 29785 - protein, 695 aa, Pichia stipitis
MSSVDQKAISTIRLLAVDAVAAANSGHPGAPLGLAPAAHAVFKKMRFNPKDTKWINRDRFVLSNGHACALLYSMLVLYGYDLTVEDLKKFRQLGSKTPGHPENTDVPGAEVTTGPLGQGICNGVGIALAQAQFAATYNKPDFPISDSYTYVFLGDGCLMEGVSSEASSLAGHLQLGNLIAFWDDNKISIDGSTEVAFTEDVIARYKSYGWHIVEVSDADTDITAIAAAIDEAKKVTNKPTLVRLTTTIGFGSLAQGTHGVHGAPLKADDIKQLKTKWGFNPEESFAVPAEVTASYNEHVAENQKIQQQWNELFAAYKQKYPELGAELQRRLDGKLPENWDKALPVYTPADAAVATRKLSEIVLSKIIPEVPEIIGGSADLTPSNLTKAKGTVDFQPAATGLGDYSGRYIRYGVREHAMGAIMNGIAAFGANYKNYGGTFLNFVSYAAGAVRLSALSEFPITWVATHDSIGLGEDGPTHQPIETLAHFRATPNISVWRPADGNETSAAYKSAIESTHTPHILALTRQNLPQLEGSSIEKASKGGYTLVQQDKADIIIVATGSEVSLLSMTLKVLEGQGIKAGVVSLPDQLTFDKQSEEYKLSVLPDGVPILSVEVMSTFGWSKYSHQQFGLNRFGAPVKLQKSSSSSNSPQKVLLKELPRLLPSTRARMLCLHCVLPSERLVMSLFYLVTFSYVKF

SEQ ID NO: 29786 - protein, 487 aa, Klebsiella pneumoniae
MYLGIDLGTSEVKALVIDENHEVIASHSAPLSIQRPHPHWSEQAPELWWEATEYLMATLREKCAQHWPAIKAIGLSGQMHGAVLLDAEGKAIRPAILWNDTRCAAECAELEAMAPELHQVAGNLAMPGFTAPKLLWVRRHEPQHFQRTATVLLPKDYLRYRMTGKKVSDMSDAAGTLWLDVAKRDWSDALLDKCGLSRSQMPKLVEGCEVSATLDPQVAARWGLNASVMVAGGGGDNAVSAIGVGAVSPGDAFISLGTSGVLFVVTDAYRPAPQSAVHAFCHVLPNLWHQMSVMLSAASCLQWFCRLTGTTEVALLAEIAELSEEDKANAPFFLPYLSGERTPHNDPDARGIFWGMTHASLRAQLGYAVLEGVSFGINDGLQALKESGTPIAQCSLVGGGARSPFWAQLLADILAMPVVTHKGGETGGALGAARLACLAAGKPIAAVCEKPEVWQTWRADPIRHHTLMQRYAQFKALYLNDLHYRQH

SEQ ID NO: 29787 - protein, 428 aa, ASPERGILLUS NIDULANS FGSC A4
MDSPRRSDASSPAEPCSPVCVDTPATQSSVLFDGNLDDLLRNFPLRQYILVTGGLGFIGSHTTLELLKASYNVVVIDNLSNSFQSVFDRIKHLAQKHHDERGTEMPALHLAAHDYRDTAALRQLLDQYQVDSRWGTPKSKISGVIHFAAYKAVEESIKNPLKYYANNVSGLIDFASTLGKYGIKTFIFSSSATVYGTLATSGLPLKEELCAHKDEIYHDADGVAQTIRAGSTGITNPYGRTKWMCEAILADLAASDPEWTIVALRYFNPIGCDESGLLGEDPKQTPTNLLPVVVKVMTGEYNELSMFGTDWETEDGTAVRDFIHVTDLARGHIAALDAANERKLAENFRAFNLGTGRGHSVKEVVDAMESVSRKQIPVRAAPRRPGDVGSCVAVATRSQQELRWKTEKSLTDACGSLCKFLEVSGVTL

SEQ ID NO: 29788 - protein, 181 aa, Crocosphaera watsonii WH 8501
MEQRGVTVWFTGLSGAGKTTITQALEKKLREAGYPLEILDGDIVRTNLTKGLGFSKEDRDTNIRRIGFVSQLLTRHGVIVLVSAISPYREIREEVKGKIGDFVEVFVNAPLNVCEDRDVKGLYQRARAGEIKSFTGIDDPYEPPLNPEVECRTDLETLEESVNKVWQKLEEMGYLAKPVAV

SEQ ID NO: 29789 - protein, 546 aa, Thermococcus kodakarensis KOD1
MAQLAGQPVVILPEGTQRYVGRDAQRLNILAARIIAETVRTTLGPKGMDKMLVDSLGDIVITNDGATILDEMDIQHPAAKMMVEVAKTQDKEAGDGTTTAVVIAGELLRKAEELLDQNIHPSIIIKGYALAAEKAQEILDEIAKDVDVEDREILKKAAVTSITGKAAEEEREYLAEIAVEAVKQVAEKVGETYKVDLDNIKFEKKEGGSVKDTQLIKGVVIDKEVVHPGMPKRVEGAKIALINEALEVKETETDAEIRITSPEQLQAFLEQEEKMLREMVDKIKEVGANVVFVQKGIDDLAQHYLAKYGIMAVRRVKKSDMEKLAKATGAKIVTNVRDLTPEDLGEAELVEQRKVAGENMIFVEGCKNPKAVTILIRGGTEHVVDEVERALEDAVKVVKDIVEDGKIVAAGGAPEIELAIRLDEYAKEVGGKEQLAIEAFAEALKVIPRTLAENAGLDPIETLVKVIAAHKEKGPTIGVDVFEGEPADMLERGVIAPVRVPKQAIKSASEAAIMILRIDDVIAASKLEKDKEGGKGGSEDFGSDLD

SEQ ID NO: 29790 - protein, 337 aa, Oryza sativa (japonica cultivar-group)
MYGSVSQLGTGNAILIILQLFFAGIIVICLDELLQKGYGLGSGISLFIATNICENIIWKAFSPTTINSGRGAEFEGAVIALFHLLITRTDKVRALREAFYRQNLPNVTNLLATVLVFLIVIYFQGFRVVLPVRSKNARGQQGSYPIKLFYTSNMPIILHSALITNLYFISQLLYRRYSGNFLVNLLGKWKESEYSGHSVPVGGLAYYVTAPSSLADVLANPFHALFYVVFMLSACALFSKTWIEVSGSSAKDVAKQLKEQQMVMPGHRESNLQKELNRYIPTAAAFGGVCIGALTVLADFMGAIGSGTGILLAVTIIYQYFETFEKERATELGFFGF

SEQ ID NO: 29791 - protein, 299 aa, Methanosarcina barkeri str. fusaro
MDRVISIVGHTALDYIVDVERIAGKNESSPVIDYEEYPGGGAANIAVAIAKLGGKSQLISPVGTDFVSSGYEKLLTEANVDLSRLYRIEDQKISKAFIFTDKEDNQTTYFYWGASSKFKKLEPEPVDFVHLATADSVYNAKLAQIAGFVSFDPGQDLVTYSKENLELILAHTDILFANRHEIRRVSEMTGKSFSELKAMIDIIVVTYDSKGSKIYTDKNEFLIPVISVQAADPTGAGDAYRAGFLLALTRGYPLPTCGKIGSTVASFAVQARGCQTDLPTWEEMKARYEANFGRLEKEC

SEQ ID NO: 29792 - protein, 463 aa, Moorella thermoacetica ATCC 39073
MTGEKIISLETALQAGRQETRDLYRRYINPGLATMLALLDFDKAFVRAEGMAVWDKDGKRYLDFLGGYGALNLGHNPPEVLAAVKEAMGRPNLLQASLNPLAAALAHNLAQVTPGDLERVFFSNSGTETVEGALKLARASTGREKIIYCQNSFHGKSFGSLSVTGRQKYQRPFGPLLPGCEAVPYDDLEALEAKLSRRDAAAFIVEPIQGEGGVIVPHDGYLKGARELCDRYGSLLIIDEIQTGFGRTGYLFACEHEGVVPDIMCLAKSLGGGVMPIGAYIARPAVWDRAYGGMDKALLHTSTFGGNSLATAAGLAALQSILDQDLAGRAAAMGRYFLERLRQLKEKYDLIKDVRGRGLIIGLEFNQPVGGLLDKLTRGKVNELAGEYFGSLVAGELMNKYQVITAYTLNNPNVIRLEPPLIVGEEEIDHVVNALEAVLRGHGFLGVTLSSTRTALGSLFKRK

SEQ ID NO: 29793 - protein, 138 aa, Exiguobacterium sp. 255-15
MEQTFLMVKPDGVERGLIGEIIARIERKGFVIREMKMMQVTEELAQAHYAEHAEKPFFGELVTFLTSGPVVALRVEGEDVVTVSRMMIGKTKPTEALPGTIRGDFANTMSENVIHGSDSVESAERELGLWFQGQPLNV

SEQ ID NO: 29794 - protein, 576 aa, Arabidopsis thaliana
MSCSATDLAVLLGPNATAAANYICGQLGDVNNKFIDTAFAIDNTYLLFSAYLVFSMQLGFAMLCAGSVRAKNTMNIMLTNVLDAAAGGLFYYLFGYAFAFGSPSNGFIGKHYFGLKDIPTASADYSNFLYQWAFAIAAAGITSGSIAERTQFVAYLIYSSFLTGFVYPVVSHWFWSVDGWASPFRTDGDLLFSTGAIDFAGSGVVHMVGGIAGLWGALIEGPRLGRFDNGGRAIALRGHSASLVVLGTFLLWFGWYGFNPGSFNKILVTYETGTYNGQWSAVGRTAVTTTLAGCTAALTTLFGKRLLSGHWNVTDVCNGLLGGFAAITGGCSVVEPWAAIICGFVAALVLLGCNKLAEKLKYDDPLEAAQLHGGCGAWGLIFTALFAQEKYLNQIYGNKPGRPHGLFMGGGGKLLGAQLIQIIVITGWVSATMGTLFFILKKMKLLRISSEDEMAGMDMTRHGGFAYMYFDDDESHKAIQLRRVEPRSPSPSGANTTPTPIFPEEENEEETKREMRPMQLDMLSEMDDAGSSMAMDVDDLEAMEILNEGGLVSDNKLADADFFNKFDDDFDDTDIN

SEQ ID NO: 29795 - protein, 188 aa, Triticum aestivum
VTYRTSLYKKAGWYRSGIPGISSTHASGTFHFEKQLMDLGRDYKVWTMDFLGQGMSLPCEDPAPKAMAGEKDEESYWGFGQDSQPWADELVYSVDLWRDQVQHFIEEVIGEPVYIVGNSLGGFVALYLAASSPHPVKGVTLLNATPFWGFLPNPAKSPRLSKIFPWAGKFPLPSIGEANYRTPCCSKT

SEQ ID NO: 29796 - protein, 170 aa, Oryza sativa
MAEQTEKAFLKQPKVFLSSKKSGKGKKPGKGGNRFWKSIGLGFKTPREAIEGTYIDKKCPFTGTVSIRGRIIAGTCHSAKMNRTIIVRRNYLHFVKKYQRQGANLPPCRYEKRHSNIPAHVSPCFRVKEGDHVIIGQCRPLSKTVRFNVLKVIPAGSTGGSGGKKAFTAA

SEQ ID NO: 29797 - protein, 532 aa, Desulfitobacterium hafniense DCB-2
MTKFIFVTGGVVSSLGKGITASALGCLLKNRGLSVAIQKFDPYINIDPGTMSPYQHGEVFVTDDGAETDLDLGHYERFIDVPVSKNSNVTTGKIYWSVLNKERRGDYLGGTVQVIPHITNEIKERIYRVARENHPDIVITEIGGTVGDIESLPYLEAIRQMRSDIGRENVLYLHVTLIPYLNASGELKTKPTQHSVKELRGIGIQPNILVCRTEHAISEDMKEKLALFCDIDREAIIQMVDAKSIYEVPLNILEEGMDDIVLKILGLEAPPADMTDWRAMVDRINNPQSETEIAIVGKYVELPDAYLSVAEALRHAGIEHLAKVKIRWVNSEEIEGSSAAELLKGVSGILVPGGFGNRGIEGKIEAIRYARENKIPFLGICLGMQTAVIEFARNVCGMTNANSSEFDVDAPYPVIDLLPEQKEIEDKGGTMRLGISPVKLIESTLVSSIYQDEVIYERHRHRYEVNNQFRAELEKGGLKFSGTSPDGRLVEITEYPDHPWFVASQFHPEFKSRPYRSHPLFREFVKATLANR

SEQ ID NO: 29798 - protein, 634 aa, Mycoplasma pneumoniae M129
MLSSCRAVTSMSRWSKHKKTKEVISMLSHNQKPNSWKILWRLIKSVQGRTSSKVLYVMVCAIFGILTGVTNSILLAQGLGFIFPTTNTETDGIQSVYLLVFAHNLPVMERLTIVCVTVVVAYILIFSFNVAQNYLGLKLYQEICALLRWKAYLKIQSMSTSFFDTQNNGDLMSRLTNDVYNINNLYAQVGGQTIQSLFILMTTATILFVLSPVIALISLTVLIALIALSFLFLKKARAAYAKVQNNLGDMSGYIEEVLSNHKVVHVLKLQEVMIDNFDKYNRPMVNPTIKANTYAVFIYSWFGFISNITYLASISIATAFSVNNIPSFGVSAINYSFMLSYIAALRQTALPLNQIFSLWNLIQLGIVSGERVFKILDLESPQKQATITKLPNIKGNIRFEKVVFGYSADKPILTGIDFSVKHGDIVAIVGPTGAGKSTIINLLMKFYKPFAGKIYMDNFEISEVSETAWREKISIVLQDPFLFSGTIKENIRMGRQDATDEEIIEACKVANAHDFIMRLPQGYNTFISNKTDYLSVGERQLLTIARAVIRNAPVLLLDEATSSIDVHSEKLIQQSIGRLMKDKTSFIISHRLSIIRNATLIIVINDGKVLEMGNHEQLMRQNGFYARLKRSAVK

SEQ ID NO: 29799 - protein, 565 aa, Vibrio vulnificus YJ016
MIANSIYNKVAKLYGEASATKITDDILALMKKWQDKAPQYQSWVDQRTSYLITYGDSFSTQAEPTLATMKTFADRHLKGALSNIHILPMFPYTSDDGFSVVDYRQVDPNLGDWDQLNALSENFDLMYDCVINHISKSSDWFQGYLAGDAKYQDYFVESDPSLDYSSVTRPRALPLHTPFSKASGETVHVWTTFSDDQIDINFHSPKVLLESIDILLMYAANGGRSIRLDAIGFIWKKLGTTCIHLEEAHEIIKLWRIILDEVMPGTLLITETNVPHKENVSYFGAGDEAHMVYQFPLPPLTLHALMSENSETLTQWATSLTNEAMARLAQGDKTTYFNFLASHDGIGVRPTEGILTDEDRQMMCAQVERKGGRVNYKNNGDGTQSPYELNINYLSAITEPTDSIDDKAKKFIAAQSILLSFIGVPAIYYHSLLGSENDVQGMLDSGINRRINREKLDLSKLESELADEDSLRSKVFKSMTHLLNLRQQYAAFSPQASQQVLNLGDGIFALQRGDGEEAIRFAVNLTSQAQAVVLADSGFDLISEQLMPAEFELAPYQFVWLTQQK

SEQ ID NO: 29800 - protein, 413 aa, Bordetella pertussis Tohama I
MNMPAPAATRRDRIEDELGAHNYQPLDVVLARGSGVWLYDTAGRRYLDCLSAYSAVNQGHCHPRILAAMVEQAQRLTLTSRAFRHDQLAPLYEDLARLTGAHKVLPMNSGAEAVETALKAVRKWGYEARGVPAGQAEIIVCANNFHGRTLGIVGFSTDPDARGGYGPFAPGFTVVPFGDFAALQAAVTPRTVAFLVEPIQGEAGVILPPPGYFRQVRKLCSERDIVLILDEIQTGLGRTGAFLAEAHEGIEADVTLIGKALSGGFYPVSAVLSNQAVLGIFQPGQHGSTFGGNPLACAVARAALRVLHDEGMIDNAREQGAYFMQRLRALPGPVREVRGRGLMLALELEPDAGPARAYCERLMARGMLVKDTHGQTLRLSPPLIVTREQIDWACAQLAHVLAHSAPGSSGGPS

SEQ ID NO: 29801 - protein, 556 aa, Ashbya gossypii ATCC 10895
MDSLARQSAKICPFVSRVTSSMQQVQVLHKTNMSAMAQQCPVMRRAMAARGYVTASPPAGAAAADVGEARPITPVLERGTQERTFDYDGLFETELQKKRLDSSYRFFNNINRLAKEYPMAHRLEEEDKVTVWCSNDYLTYSRNEKVMETMKRTIDKYGAGAGGTRNIAGHNRHAMRLEAELAALHKKEGALVFSSCFVANDAVLSLLGQKMPNMVIFSDEMNHASMIMGIKHANVQKHIFRHNDLQHLEELLAMYPKSQPKLIAFESVYSMSGSVADIRKICDLAEKYGALTFLDEVHSVGLYGPHGAGVAEHLDFEAHRKAGLASPAQTTVLDRVDMITATLGKSFGSVGGYLAASEKLVDFVRSYAPGFIFTSSLPPAVMAGSAAAVFDQRSSLHLRQLQQKHTSYVKTGLGDLGIPVQPNPSHIVPVLVGNPDLAKRASDILMEKHRIYVQAINFPTVPRGTERLRITPTPGHTNDLSDVLLDAMDDVWKTLQLPRVSDWAAHGGLLGVGEPDYVPEANLWTEEQMSLTNDDLHPSVFSPVEKFLEVSSGIKA

SEQ ID NO: 29802 - protein, 377 aa, Triticum aestivum
MDHRLVAALLVLLGLLLSPAPAAAAAGDEEPLIRQVVGGADPLDNDLELDSQLLGFVQRFGKTYRDAEEHAHRLSVFKANLRRARRHQMLDPSAEHGVTKFSDLTPAEFRRTFLGLKTTRRSFLREMAGSAHDAPVLPTDGLPEDFDWRDHGAVGPVKNQGSCWSCWSFSASGALEGANYLATGKMEVLSEQQLVDCDHECDPAEPDSCDAGCNGGLMTSAFSYLLKSGGLEREKDYPYTGKDGTCKFEKSKIAASVQNFSVVAVDEEQIAANLVEYGPLAIGINAAYMQTYIGGVSCPYICGRHLDHGVLLVGYGASGFAPSRFKEKPYWIIKNSWGENWGDKGYYKICRGSNVRNKCGVDSMVSTVSATHASKEE

SEQ ID NO: 29803 - protein, 436 aa, Bordetella bronchiseptica RB50
MLTKENNERLCRVGAGTPGSELFRSLWLPAVLSSQLPEGSRAPVRLRLLGEDLIAFRDGSGQVGITHAHCLHRGAPLFFGKVEERGIRCSYHGWLYGRDGQCLEMPSEKNSNLCQKMHLPAYQAQEKAGIVWIYMGAGPAPELPRFPWIDLPEKQRLASVWVQETNWMQGAEGEIDSSHVSTLHKSDQGVASDRVHRTYTYKDPRPELNVEETPIGFMSIARRRADERFYWRVTQWMAPMFSVIPSAAWPIGGRAWVPIDDENTYCWDFNYVLDGELPQAFLEFVERGISFPPEYRYGPFELNSGSIIDTWAPIRNRRNDYLVNREAQKGTSTTGIHGVNDQDRAMQEGMGRIADRTKEKLVSADLAIVMARRKVLDFMASPEALQKFRALVRDGTVFSMAPVDTVADTRELADFLKSLSYPAVPDAEAMQEQVPQ

SEQ ID NO: 29804 - protein, 433 aa, Haemophilus influenzae R2846
MKSGDLNKYDLVKNTLVLVLAGGRGSRLHELTDKRAKPALYFGGNRRIIDFALSNCINSDLNRIGVVTQYAAHSLLRHLQTGWSFLPQERGEFVDMLPARQQIDDSTWYRGTADAVYQNMAIIKNHYRPKYILILAGDHIYKQDYSVMLMDHVNSGAKCTVGCIEVPRSEAHEFGVMAVNENLKVKAFVEKPKDPPAMVGKPDVSLASMGIYVFDADYLYKMLEQEVNTPQTSHDFGKDVLPKCLEEGALYAHPFSRSCMGRNTEGEIYWRDVGTLDSFWQSNIDLVSENPQLDIYDQSWPIRGNPIQAYPSKFFYKHSNVHPVDNSLIGGGCVITDASISNSVLFDHIKIDAFSKVDHCVVLPQVKIGKNCVLKNCIIDRECEIPDGMQIGVDIEEDKKRFRISSTGKVILVTPKMLKKLEGHEIEEDGHLD

SEQ ID NO: 29805 - protein, 64 aa, Ustilago maydis 521
MTKCIYCGFCQEACPVDAIVETQNTEYSTETREELLYNKEKLLANGDRAEAEIAANIYADHLQR

SEQ ID NO: 29806 - protein, 499 aa, Aquifex aeolicus VF5
MKILKAHEMSSIDNKTIEEIGIPSLVLMENASKGVFENIRKYFPDAKNILVVAGKGNNGGDGLALARHLYLNGFSVDIFLAFGEVKGDAKTQLEILKKIGIEPLKKKPDFKEYDLIVDAIFGTGFQPPVKGEVANLIKEINNSSVPIVSIDIPSGLSADTGESFEPSVKADLTVTFQFPKICHYLYPAAKKCGKVEVVDISIPEFLAKDVKRDLLRKSDLKPYKREPDTYKTKEGSVLLVGGSVGKTGAVIMSAKAASRAGAGLVTVGIPRELNPIFESLLIEEMSLPLSGTSRLSVFCVEEILELKDRFHALGIGMGMDRYEEGQDIVISLLEKWEKPILIDADGINNLADYGDYTPLKDREIPAVLTPHIGEFSRLTGYDTKTITYNQIDIAQEFSEKNRCYLVLKGARTVISTPDGRAYLFADGTPALAKGGTGDVLAGILTALIAKMDTEEALKLGVYLHGLAGKVAEKKLHTESVKATDVTESLPEAFREIYVN

SEQ ID NO: 29807 - protein, 380 aa, Alkalilimnicola ehrlichei MLHE-1
MSRGMRERLPHAIRWVVKVGSALVTSDGQGVARGAIQGWASEVVGLRRGGRQATLVSSGAVAEGMSRLGWSQRPNALYQLQAAAAVGQMGVVEAWESGFRAEGLRTAQVLLTHDDLANRRRYLNARTTLRELLRLGVVPVVNENDTVVTDEIRFGDNDTLAALVANLVEADVLVILTDQEGLYDADPRRHPEARLIREASAEDPGLERYCGSGGGALGRGGMLTKVQAAARAARSGCITVIASGRERDVLARIAAGERLGTLLYPEREPVAARKQWLASHLRLRGRLWLDEGAARVLREAGSSLLPVGVTRVEGRFSRGEMVACLAPDGREVARGLVNYSAKEARQILGRPSREIQSILGYVDEPELIHRDNMVVTADGG

SEQ ID NO: 29808 - protein, 235 aa, Borrelia burgdorferi B31
MEFLYSDEENYLKDRFFDFFNMNVDKDKYTSIGICGGRSIVNFLSVFLKQNFSFRRSHFFLVDERCVPLNDENSNYNLLNKNFFSKMVDKNLISISKFHAFVYSEIDEATAIHDYNIEFNSRFNIFDFIIVSVGEDGHIASLFPSRKLLFSDVEGYQYEYNSPKFPSKRISLTPKSLFGSKAVVLLFMGVDKKCALENFLASNSSINECPARLLKEHPNLLVLTNIKRDESYAGS

SEQ ID NO: 29809 - protein, 541 aa, Carboxydothermus hydrogenoformans Z-2901
MFPLTPKHLSRFREIARIFTEFGFGFILTYLKRPAALDKVEINEYRLIELAGNLREMLEKLGPTFIKLGQVLSTQRDLLPKPFQAELEKLQDRVTPVPFEVIASYIEKNLGSPLHDIFIEFDENPIASASIGQVYRAKLKNGKNVVVKVKRPGVDELIKTDLQILYQIASFIQNKTNWGKINKPLRMWEELKSSLERELDYTGEARNIENFRQNIKYKKLIIPEVFWNFTNENILVLEAVYGIKVSERFQLIEMGIDLDQLARDLVEIFILQILEDGYFHADPHPGNIAITPLGDIILYDFGMVGFLNPWLREILITLLISVVRKDFARISELLIELSQRQDIIPAEIKKDVREILNRYYFVPLSSLSLGELLKELLNLAQKHEIIIPPEIVLVAKTIIALEGIVKNLNSNLSVAELAEPLATNLLRKRIFKFPSFKKVALDLYNLVDKLFALPGMLESSLANLEKAKFTLKIEERQLERQVTSFAKSIQFLAIVIFYAAYFLGSPAILNALPADQKGKIFIFITVVYFTGGYILWKKHLL

SEQ ID NO: 29810 - protein, 496 aa, Burkholderia fungorum LB400
MTNHPTAMPSLQEPSLFRQECYIAGEWIESDPMARIDVVNPANGLKIGTVPRATLADVRTCIDAAERALPAWSGKTGKERAAILRRWYELMLQHQEDLAVIMTCEQGKPLAESRGEIVYAASFLEWFAEEAKRVYGDTIPTPASDRRIVVLKQPIGVCAAITPWNFPAAMLTRKIGPALAAGCTMVLKPASQTPFSALALCVLAERAGVPAGVLSCVTGKASMIGDEFCRNPAVRKLSFTGSTEIGKLLLQQCASTVKKTSMELGGNAPFIVFDDADLDAAVVGAIAAKFRNAGQTCVCVNRFLVQDTVHDAFVEKLSTAIAALKVGDGLDAGTRIGPLIDSKAVEKAREHVDDAIARGATVVTGGSGHALGGNYFEPTLLTGASKDMKIFREETFGPVAPVFRFRTEEEAIQLANDTEFGLASYFYGRDIGRVWRVAEALEYGMVGINEGLISTEVAPFGGVKESGLGREGSKYGIEDYLEVKYLCMGGLAARPV

SEQ ID NO: 29811 - protein, 331 aa, Glycine max
VTHIQLNDQFSCGNDYALKVRKPYTITKQRERWTDEEHKKFLEALKLYGRAWRRIEEHVGTKTAVQIRSHAQKFFSKLLRDPTGNNTNTVESIEIPPPRPKRKPVHPYPRKLVETPNKEILIPEQLMKSNSLKSSDFDQENQSPKSVLSGVGSDSLGSSDSDTPYGSLSPMSSISGIHTSSFTRAEHKTTSDEAGMDTDSAHDEKPLMKFKLPPNECVSIKDDTAEESSGRTFKLFGMTLFVTDTCKPSPTIEACKPIPLNIRVRCLSSSMGDEAKLELRGHSTASETSAISKLKVRVGPEACGKGFVPYKRCISVVTADNREEQCIHLSL

SEQ ID NO: 29812 - protein, 466 aa, Pseudomonas fluorescens PfO-1
MSNYDVVILGGGPGGYNAAIRAGQLGLKAACVEGRATLGGTCLNVGCMPSKALLHASELYEAALGAEFANLGIEVKPTLNLAQMMKQKDESVSGLTKGIEFLFRKNKVDWIKGWGHIDGPGKVSVTGDQGSRIELTAKDIVIATGSEPTPLPGVEIDNKRILDSTGALSLSEVPKHLVVIGAGVIGLELGSVWRRLGAQVTVVEYLDRICPGVDGEAGKTLQRSLSKQGISFKLSSKVTSATSSANGVQLSVEPAAGGSAEILEADYVLVAIGRRPYTQGLGLENVGLSTDKRGMLANKQHRTEAPGVWVIGDVTSGPMLAHKAEDEAMACIEQIVGKAGEVNYDLIPNVIYTRPELASVGKTEEQLKAEGRAYKVGKFPFTANSRAKINHETEGFAKVIADERTDEVLGVHLVGPSVSEMIGEFCVAMEFSASAEDIALTCHPHPTRSEALRQAAMNVEGMATQM

SEQ ID NO: 29813 - protein, 525 aa, Trametes sp. AH28-2
MGKLQSFVNVVALSLSLSRGVLGAIGPVTDLTISNADVTPDGFTRAAVVANGVFPGPLITGNKGDNFQINVIDNLTNATMLKTTTIHWHGLFQHGTNWADGPAFVNQCPIASGNSFLYDFTVPDQAGTFWYHSHLSTQYCDGLRGPLVVYDPSDPYASMYDVDDDTTVITLSDWYHTAAKLGPAFPPNADSVLINGLGRFAGGNASDLAVITVEQNKRYRFRLVSLSCDPNFTFSIDGHNMTIIEVDGVNHEPLEVDSIQIFASQRYSFVLNATQSVDNYWIRAIPNTGTIDTTGGLNSAILRYSGADIVDPTANATTSVIPLVETDLVPLDSPAAPGDPVVGGVDLAMNLDFSFNGTNFFINNETLIPPTVPVLLQILSGAQSASDLLPTGSVYTLPLNSTIELSFPITTVNGVTNAPGAPHPFHLHGHAFSVVRSAGSSDYNYVNPVRRDTVSTGNPGDNVTIRFTTDNAGPWFLHCHIDFHLEAGFAIVFAEDTPDTASVNPVPTAWSDLCPTYDALDPSDH

SEQ ID NO: 29814 - protein, 405 aa, Burkholderia fungorum LB400
MCPFYADTALNAELWDVEGRRYIDFAAGIAVLNTGHRHPKVMAAVREQLDRFTHTCWQVVPYPSYVELAEQLNRLAPGDFQKKASLFSTGAEAVENAIKIARAFTGRAAVIAFSGSFHGRTMMGMALTGKVAPYKVGFGPFPGEVYHAPYPNTLHGVTTTNALDSVRALFKTDVDPLRVAAIIFEPVQGEGGFYEAPADFVKGLRDICDQHGILLIADEVQTGFARTGKLFAMQHHAVAADLTTVAKSLAGGLPLSGVIGRADVMDAAAPGGLGGTYAGNPLSVAAALAVLDVIESENLCERATQLGNRLKSHLTSMRESLPHIAEIRGPGAMIAAEFFEPGTLIPDADFAKRFQARALELGLILLVCGVHSNVIRFLFPLTIEEAVFEEALVLIETAMKDAAAA

SEQ ID NO: 29815 - protein, 158 aa, Salmonella enterica
LGLWEICIIWGLGISLAVYLTAGISGGHLNPAVTIALWLFACFPKQKVLPYIIAQFAGAFGGALLAYVLYSSLFTEFETAHHMVRGSVESLQLASIFSTYPAAALNVWQAALVEVVITSILMGMIMALTDDGNGIPKGPLAPLLIGILVAVIGASTGP

SEQ ID NO: 29816 - protein, 414 aa, Thermus thermophilus HB27
MVKVEVLGMILAGGQGSRLYPLTAKRAKPAVPFGAKYRIIDFVLNNFVNSGIYAIYVLTQYKAQSLTEHIQRYWRFGAFLEDHFILLVPAQMYRYEELGPVWYRGTADAIYQNLHLVHNHAPKAVAVFGGDHIFKMNIRHMVEYHYDTRADITIAAYPVPVAEATRFGVLQVDEEWRITEFQEKPEEPKPIPGRPDTALASMGNYIFRTEALFELLEADARDETSAHDFGKDVIPRALREGYRVYAYDFHRNPIPGQEGPNLYWRDVGTLDAYYEASMDLVKVVPEFDLFNPEWPLRTANLFSPPAKFVHETGERVGRALNSLLAGGVIVSGGTVRESVLFRRVRVNSYSLVERSVLFDDVEVGRYCRIRNAIIDKNVKIPPHTEIGYDLELDRARGFTVTPEGVVVVPKGYRF

SEQ ID NO: 29817 - protein, 153 aa, Salmonella enterica
IIWGLGISLAVFPSAGISGGHLNPAVTIALWLFACFPKQKVLPYIIAQFAGAFGGALLAYVLYSSLFTEFETAHHMVRGSVESLQLASIFSTYPAAALNVWQAALVEVVITSILMGMIMALTDDGNGISKGPLAPLLIGILVAVIGASTGPLS

SEQ ID NO: 29818 - protein, 328 aa, Salmonella enterica subsp. enterica serovar Paratyphi A str.
MGQLIDGVWHDTWYDTKSSGGKFQRSASAFRNWLTADGAPGPSGEGGFAAEKDRYHLYVSLACPWAHRTLIFRKLKGLEPFIPVSVVNPLMLENGWTFDDTFPAATGDTLYQHEFLYQLYLHADPHYSGRVTVPVLWDKKNHTIVSNESAEIIRMFNSAFDGLGAKAGDYYPHALQSKIDELNGWIYDNVNNGVYKAGFATSQQAYDEAVEKVFTALARLEQILGQHRYLTGNQLTEADIRLWTTLVRFDPVYVTHFKCDKYRISDYLNLYGFLRDIYQIPGIAETVNMDHIRHHYFRSHKTINPTGIISVGPWQDLLEPHGRDVRFG

SEQ ID NO: 29819 - protein, 365 aa, Medicago sativa
MGSTGETQITPTHISDEEANLFAMQLASASVLPMILKSALELDLLEIIAKAGPGAQISPIEIASQLPTTNPDAPVMLDRMLRLLACYIILTCSVRTQQDGKVQRLYGLATVAKYLVKNEDGVSISALNLMNQDKVLMESWYHLKDAVLDGGIPFNKAYGMTAFEYHGTDPRFNKVFNKGMSDHSTITMKKILETYTGFEGLKSLVDVGGGTGAVINTIVSKYPTIKGINFDLPHVIEDAPSYPGVEHVGGDMFVSIPKADAVFMKWICHDWSDEHCLKFLKNCYEALPDNGKVIVAECILPVAPDSSLATKGVVHIDVIMLAHNPGGKERTQKEFEDLAKGAGFQGFKVHCNAFNTYIMEFLKKV

SEQ ID NO: 29820 - protein, 496 aa, Nicotiana tabacum
MVLSKTASESDVSIHSTFASRYVRTSLPRFKMPENSIPKEAAYQIINDELMLDGNPRLNLASFVTTWMEPECNTLMMDSINKNYVDMDEYPVTTELQNRCVNMIAHLFNAPLGDGETAVGVGTVGSSEAIMLAGLAFKRKWQNKMKAQGKPFDKPNIVTGANVQVCWEKFARYFEVELKEVKLSDGYYVMDPEKAVEMVDENTICVAAILGSTLNGEFEDVKRLNDLLIEKNKETGWDTPIHVDAASGGFIAPFLYPELEWDFRLPLVKSINVSGHKYGLVYAGIGWAIWRNKEDLPDELIFHINYLGADQPTFTLNFSKGSSQVIAQYYQLIRLGFEGYKNVMENCQENARVLREGIEKSGRFNIISKEIGVPLVAFSLKDNSQHNEFEISETLRRFGWIVPAYTMPPNAQHVTVLRVVIREDFSRTLAERLVIDIEKVLHELDTLPARVNAKLAVAEANGSGVHKKTDREVQLEITTAWKKFVADKKKKTNGVC

SEQ ID NO: 29821 - protein, 408 aa, Debaryomyces hansenii CBS767
MISGEDDLEHLGHISESSVKIEGNVRQILKSSNDNCTRYGSFRVSNSNSFNRNESANPFSINYADGTHARGFWGTDDVSFGNVTVRGLSFAVSNDTSSDIGVLGIGLLGLETTYSSQYGGNYQYENLPLKLKNQGTINKALYSVYLGEEDSRTGTILFGAVDSAKYSGDLQTVKIVNSAINYGYSEPIRIEVIVNGITLNDSNTEIQIASNDYTAVLDTGSTYSYFPRSLLTSLGESLNGQFSSSLGAYIVDCIDDDDDSYVAIDFSGFKINVPLRSLIQRYSYNQCFLSVLQQSGSDYILFGDNVLRSAYLVYDLDDFEISIAQARYTTEEDISVISSSVPNAIQAPGYSSTSLPSSADGSGGSDSTFGDDSNSGGRSSSASMNKVSKAKLYSLFIGLGLLVPLSVY

SEQ ID NO: 29822 - protein, 276 aa, Glycine max
VLLMVFESRLMPLFRQLHCHSKWEGFLLKGGKEARRSNAILHKVITSVMPDTVGDKLIGLVTSRDEIPDLLKLDDVIDLVVPRGSNKLVSQIKESTKIPVLGHADGICHVYVDKSANFDMAKQIVRDAKTDYPAACNAMETLLIHKDLSNNGGLNELVLELQREGVKMFGGPRASGLLNIAETNTFHHEYSSLACTVEIVEDVFAAIDHINQHGSAHTECIVTEDSEVAETFLSQVDSAAVFHNASTRFCDGARFGLGAEVGISTSRIHARGPVGV

SEQ ID NO: 29823 - protein, 280 aa, Lactuca sativa
GVLLMVFESRPDALVQIASLAIRSGNGLLLKGGKEAKRSNAILHKVITSALPETVGTKLIGLLTSREEIPDLLRLDDVIDLVIPRGSNKLVSQIKNSTKIPVLGHSDGICHVYVDKAANLEMAKKIVLDAKTDYPAACNAMETLLVHKDLTQNGGLQELVKELEQEGVTLFSGPRVNGLVHFTKANTFHYEYNSKACTIEVVNNVDEAIEHIPSYGSSPPECIVTEDPKVAEHFLSRVDSAAVFHNASTRFCDGARFGLGAEGGISTSKIPARGPVGVEG

SEQ ID NO: 29824 - protein, 361 aa, Oryza sativa (japonica cultivar-group)
MERAAAGPLGMEMPIMHDGDRYELVKEIGSGNFGVARLMRNRASGDLVAVKYIDRGEKIDENVQREIINHRSLRHPNIIRFKEVILTPTHLAIVMEYASGGELFERICSAGRFSEDEARFFFQQLISGVSYCHSMQVCHRDLKLENTLLDGSTAPRLKICDFGYSKSSVLHSQPKSTVGTPAYIAPEVLLKKEYDGKIADVWSCGVTLYVMLVGAYPFEDPEDPKNFRKTIQKILGVQYSIPDYVHISPECRDLITRIFVGNPASRITMPEIKNHPWFMKNIPADLMDDGMVSNQYEEPDQPMQNMNEIMQILAEATIPAAGTSGINQFLTDSLDLDDDMEDMDSDLDLDIESSGEIVYAM

SEQ ID NO: 29825 - protein, 156 aa, Ashbya gossypii ATCC 10895
MSTELTVQAERAFQKQPHIFTNPKAKANRRTKRWYKNAGLGFKTPKTAIEGSYIDKKCPFTGLVSIRGKILTGTVVSTKMHRTIIIRRDYLHYVPKYNRYEKRHKNVPVHVSPAFRVQLGDIVTVGQCRPISKTVRFNVLKVASAANKNNKQFTKF

SEQ ID NO: 29826 - protein, 334 aa, Ashbya gossypii ATCC 10895
MSDIPTEQKVVLIRETGGPEVLRYEEDYPVPEVRGSDILIKNRYAGVNFIETYFRTGLYPCEKPYVLGREAVGVVAAIGADVRRFKVGDRVACLSSGTFAQYTAVSEKSNVLKLPDDIQDGELQAVAGSLVNGLTALTLVDEAYKPQVGEIVLVYAAAGGVGQLLIQLLHARSVRVIAVASTDEKLQIAKSRGAEFLINSSREDIVAKVLEFTDGEGVGASYDSVGKDTFETTLQSVKRKGTIVSFGNASGAVPPFSIQRLTPKNLKILRPQLYGYLATREEWEYYSSKLLHLIRSKKLIINITNLSPLEEFKRLTQLLESRQTTGKLLLAIPD

SEQ ID NO: 29827 - protein, 208 aa, Aquifex aeolicus VF5
MIKKVAAKPLSWLERIFFIDFIKGLRITLKNALRKTITTHYPYEKITPPKRFRGYFAHKVVDGTEPQPAFQEWVNRYNILVEYGKSRCVVCLRCKRACPVPQLFEIEGKKLPNGKRVVSVFNMNMLLCTYCGFCVDACPVDCLYQTDIHENASYTRKDAVLTLEILEQIGRDWQRRREREPDRIWIDDEQRMKLWGENNVKLPKPEEV

SEQ ID NO: 29828 - protein, 193 aa, Triticum aestivum
NKFVQKSRLVPVRNSRDIVDPRVRSEATRELCQREGITQVPHFSFYKGTEKVHEEEGIGPDQLAGDVLYYGDNHAGVVQLHNRADVEALMAENSGEDGKLLVLDVGLKHCGPCVKVYPTVVKLSRSMADTAVFARMNGDENDACMQFLKDMEVVEVPTFLFIRDKKIVGRYVGSGKGELIGEILRYQGVRVTY

SEQ ID NO: 29829 - protein, 328 aa, Methylococcus capsulatus str. Bath
MTTLVTGATGHLGANLVRALLARGEKVRAFIRRQSDVAALDGLAVERAYGDLRDRRSIRDALEGVERLYHTAAFVSIRDGDRQELFDVNVVGTRMLMQEARRAGVRRVVHTSSFGAVGINPQGASNEHWTVSPFEPGTDYERTKAVSEHDVILEAVRGLDVTIVNPAAIVGPWDFRPSLVGRTILDFAHGRMRAFVPGAFDFVPMRDVVAVELLAMDKGIRGERYLVTGEHCTIGQILQWLEELTGHPRPRLAIPPRLMQGIALLKDPLERRFFPRRTPRFNYHSIRLLNSGKRGDSSRSRRELGLVPTSTRAAFADAVAWFRERGMI

SEQ ID NO: 29830 - protein, 326 aa, Lactococcus lactis subsp. lactis Il1403
MTVLVLGGAGYVGSHAVDMLLKRGYDVAVVDNLVTGHRESVPANVRFYEGDVRDQAFLADVFEKENIEGIMHFCAYSLVGESMQKPLMYFNNNVGGAQVILETMEEFGVKHIVFSSTAATFGIPEKSPISEKTPQKPINPYGESKLIMEKMMKWQSQATDMTYVALRYFNVAGAKDDGSIGEAHKNETHLIPIILQTALGQREFITIYGDDYHTPDGTCIRDYIDMEDLIEAHIKALEYLKAGGQSDQFNLGSSKGYSNLEVLETARKVTGKEIPSQMGERRAGDPDELVADSTKAGEILGWKAQNDLEHIITNAWKWHQSHPKGY

SEQ ID NO: 29831 - protein, 369 aa, Methylococcus capsulatus str. Bath
MSRSIRNQDVPELPRRRQVRTVGMSGNYWYVVEIDGRLKPRQVKRVRFWGQDIALFRDAAGELHAVEDRCPHRQLPLSQGFVEGGNLVCTYHGWKFDGCGRCTEIHHELGKGRTRLPRIRIRTYPVKAQWGLIWLFPGDPALADGTPLPTIPQLEGGRPWPFFPIDVTIKAHFSMIVENVCDFNHEYLHRHKRPFLQPILREWKQDADSVRVYYDTRFDGSPVAKLFMEGGARDLNEIEIWYQYPYQGSDIGGKYIHWLFMLPEDERTTRCFFVFLFGPIHVPIVNWKMPEFLRKPILWFTNKWYIEPLLGEDKWALELEQDGFERHPDAPQIELNPAISSFQRLSLEKWKAYQQSMERAGPKPAADPA

SEQ ID NO: 29832 - protein, 137 aa, Ehrlichia ruminantium str. Welgevonden
MSYSESLLEHYKNPKNVGTLPKEDYNVGTGLVGAPSCGDVMKLQIKVDDNGKIIDAKFKTFGCGAAIAASSLATELIKGKTVDEAHELKNTVLAKELSLPPVKIHCSLLAEDAVKAAINDYHMKQANKKNATKNPNE

SEQ ID NO: 29833 - protein, 75 aa, Brassica napus
MPSKCEILCEILIAILLPPLGVCLRRGCCTVEFLICLVLTLLGYVPGIIYALYVIVFQNRDEYFDEARRPLYYSA

SEQ ID NO: 29834 - protein, 60 aa, Nicotiana glauca
NCGCGSGCNCGSGGGCGMYPDLEKSTTFTIIQDVAPMNNFEEFGEKAAEGGNGCKCGSNC

SEQ ID NO: 29835 - protein, 391 aa, Sulfolobus shibatae
DLDTLEALSQPERVIQVKIQIRGSDGKLKTFMGWRSQHNSALGPYKGGVRYSPNVTQDEVIALSMIMTWKNSLLLLPYGGGKGGIRVDPKKLTLKELEDLSRKYVQLIHNYLGSDVDIPAPDINTNPQTMAWFLDEYIKITGEVDFAVFTGKPSELGGIGVRLYSTGLGVATIAREAANKFIGGIEGSRVIIQGFGNVGSFTAKFLNEMGAKIIGVSDIGGGVISDDGIDVNKALEVVQSTGSVVNYPEGKKVTNEELLTSDCDILIPAAVENVINKFNAPKVKAKLIVEGANGPLAADADEIIKQRGIVVIPDILANAGGVVGSYVEWANNKSGGIISDEEAKKLIIDRMTNAFNALYEFHKRKFADQDLRTVAMALRVDRVVGMKARAI

SEQ ID NO: 29836 - protein, 77 aa, Trifolium repens
MSCCGGNCGCGSACKCGNGCGGCKMNADLSYTESTTTETIVMGVGSAKAQFEGAEMGAESGGCKCGANCTCDPCTCK

SEQ ID NO: 29837 - protein, 542 aa, Lactococcus lactis
MSKDIKFSSDARTAMMRGIDILADTVKTTLGPKGRNVVLEKSYGSPLITNDGVTIAKEIELEVHFENMGAKLVSEVASKTNDIAGDGTNTATVLTQAIVREGLKNVTAGANPVGIRRGIELAAETAVASIKEMAIPVHDKSAIAQVATVSSRSEKVGEYISDAMERVGSDGVITIEESKGMQTELDVVEGMQFDRGYLSQYMVSNTEKMVAELDNPYILITDKKISNIQEILPLLEQILKTNRPLLIVADDVDGEALPTLVLNKIKGVFNVVAVKAPGFGDRRKAQLEHLAILTGGTVITEELGLDLKDATLEALGQAAKATVDKDHTTIVEGAGSADAISDRVAIIKAQIEKTTSDFDREKLQERVAKLAGGVAVVKVGAATETELKAMKLLIEDALNATRAAVEEGIVSGGGTALVNAIAALDKLSEEGDIQTGINIVRRALEEPVRQIAANAGYEGSVIIDKLRSEEVGTGFNAATGQWVNMIEEGIVDPAKVTRSALQNAASVAGLILTTEAVVANKPEPAAPAMPPMDPSMGMGGMI

SEQ ID NO: 29838 - protein, 519 aa, Burkholderia fungorum LB400
MPPLFRRLLLLFHALRYGARLLWLAAPADHKLHWIIGLAGRLHAAGRGGQSLNRVLPALGPLAGRFAQTLAERPELASGTLHDAIDAIDHMEAPLPPHESEQALARAFGRPLATLFSAVDLVPVRGGFAEQTHLARLVAPVNGHYEVAIKLVRADQLQQIGDELALLRWVARWLENLSGTARRLHLRAQAQSFTDDILRRFDLRAEAANLSQTGHHFDGDARIVVPDVIWDLCTTYTLTMQRVSTLPASDLAGLHAHHIKLAPLAAHIVEVVTEQAFEHGFFHATLDARRVRVSIGPDTLGRLVLAEFSIMSSLSTDEREFFVHGATALFDQDYARLAEMHRDAGHVPHDTRAEVLEAELRTRAEAHFAAEPEDRSAGSLFHHLLHAVQPFEGAVPARLATAQRSFQQAEMLARALHPGVDTWNITRGVLADIARRDIDHRGWIKRIARELPHLAHMLPRMPQLAVRYLQQEHDRARTPQQNARLVAEIGREYRRTRVLLWACAVCGGALGAGTVLLMW

SEQ ID NO: 29839 - protein, 415 aa, Carboxydothermus hydrogenoformans Z-2901
MDEVLNLAKKAKEASKKLAQLSTEQKNRALLKIAQYLEENMEKILTENQKDLAEAKKGGLSPAFIERLTLNEKRILDMAEGVRQVAKLPDPVGEVLGMTRRPNGLVIGQVRVPLGVVGIIYESRPNVTVDAAALCLKAGNAVILRGGKEAFNSNLALVTLMEEALRSEEIPEGAVGMIKTTSRDAANYLMRLNGYLDVLIPRGGAGLIKTVVENSTVPVIETGVGNCHVYVEEDADLEMAERIIINAKCQRPAVCNAMETLLVHEKIAPVFLPQIGKALKENGVEIRGCEVTRRYIPDALPATEEDYYTEFLDLILAVRVVRDLDEAIAHITKYGSGHSEAIVTRDYFKARRFTEEVDAAAVYVNASTRFTDGFEFGFGAEIGISTQKLHARGPMGLKELTTTKYVIYGTGQIRG

SEQ ID NO: 29840 - protein, 440 aa, Thermus thermophilus HB27
MGVMRVLHVAPEAYPLAKVGGLADVVGALPKALGPLGVEAHVLLPWHGGLEARRVGEVAFAFFGREERAPLGERVEGGVRFLLLGVEGFGRERVYGYPDDAERYLRFALAAKEVARGYDLVHAHDWTAALLALYAPTVYTIHNLAHQGLVDPGLFFSWTGLPWSLFHMEALEFYGRVNLMKGGIVFARRVTTVSPSYAEEIQTPEFGMGLDGVLRRHAGKLRGILNGLDTEVFDPGKDPYLPAPYTREDPSGKARAKEAFRERTGLRPPVLAYVGRLDYQKGLDLVLKALPRLLEMGFRLYVQGVGDGGLQEAFLRAEEENPEGVRFLPAYDEAMARLAYAGAEAVLVPSRFEPCGLVQMIASRYGTPPVARAVGGLKDTVEDGRAGVLFETYHPEGLLYGVLRLFRLGAEEMGLRAMEKDFSWEGPARAYREVYREALG

SEQ ID NO: 29841 - protein, 162 aa, Salmonella enterica
SLGLWEICIIWGLGISLAVYLTAGISGGHLNPAVTIALWLFACFPKQKVLPYIIAQFAGAFGGALLAYVLYSSLFTEFETAHHMVRGSVESLQLASIFSTYPAAALNVWQAALVEVVITSILMGMIMALTDDGNGIPKGPLAPLLIGILVAVIGASTGPLTG

SEQ ID NO: 29842 - protein, 663 aa, Triticum aestivum
MPAWWKGKGRSKSKAPAPAGDAGTIPAVRDGEKDRKNKKATSFDEALIGREGRGKQLQQPAPAVGHPLPRPAFMPSASAPASASASASSGGSSSLGSSAASDEPLDLGIYRISDANRTPAIDSRKQSLVLEEGRFVVHNLASENNRSCEPSVSPRKEFQPNILDLPSDRTTYCHGRKSTEIVFATRMPSSPPSSRGKNCPTSPVHSRAFGQCPGSPTAWQEDARSSSSPHPLPLPPGSPCTSSRSLHSQWKKGKLLGSGTFGQVYLGFNSEGGQMCAIKEVKVIADDSNSKECLRQLNQEMLLLNQLSHPNIVQYYGSELSSETLSVYLEFVSGGSIHKLLQEYGPFGETILRNYTAQILSGLAYLHGRNTVHRDIKGANILVDPNGDIKLADFGMAKHISAYTSIKSFKGSPYWMAPEVIMNTNGYSLSVDIWSLGCTILEMATARPPWSQYEGVAAIFKIGNSKDIPDIPDHLSSEAKSFLKLCLQRDPAARPTAAQLIEHPWVKDQASVRSSRSGSGITRDMFSTSTDGSKATVKTSIELSSYRSLSPLRDTNLRMRNLVVPASSIPSISTHRASAISASNVRMNMSLPVSPCTSPLRQYRQSNRSCLPSPPHPAYSAGAANYSPINNVLYPTRPSNYLTDPWLETPRQKTQTFDSPRRL

SEQ ID NO: 29843 - protein, 204 aa, Nicotiana tabacum
MSMRRRTLLKVIVLGDSGVGKTSLMNRYVHKKFSQQYKATIGADFVTKELQIDDRLVTLQIWDTAGQERFQSLGVAFYRGADCCVLVYDVNVMRSFDNLDNWHEEFLKQANPPDPKTFPFILLGNKIDIDGGNSRVVSEKKAKEWCSSKGIPYFETSAKEDINVDAAFLFYCKTRLANEHRQDIYFQGIPEAVSETEQRSGCAC

SEQ ID NO: 29844 - protein, 237 aa, Arabidopsis thaliana
  misc_feature (54)..(54): Xaa can be any naturally occurring amino acid
  unsure (1)..(237): unsure at all Xaa locations
ADHTLLDGIHAPLLKIGDFGYSKSSLLHSMPISAVVTPAYLAAEVLSRGEYDGXKMADVWSCGVTLYVMLVGAYPFGDHQDPKNFKKTIQRIMAVKYKIPDYVHISQDCKHLLSRIFVTNSNKRITIGDIKKHPWFLKNLPRELTEIAQAAYFRKENPTFSLQSVEEIMKIVEEAKTPARVSRSIGAFGWGGGEDAEGKEEDAEEEVEEVEEEEDEEDEYDKTVKQVHASMGEVRVS

SEQ ID NO: 29845 - protein, 412 aa, Exiguobacterium sp. 255-15
MMRKRVVVTGMGALTPIGNDVDTFWNALNAGENGIRPMERLDIDEYPTKVTGELQNFDVTEFIEAKEARKMDRFVHYSLVASMEAVKNADLDVKPNAERIGVWIGSGIGGVETIEKQAKIYFERGHRRVSPFFIPMMIPNMASGQVSIYTGAKGPNNCSVTACASGTNAIGEALRVIERGDADVMIAGGAEAPITNLAFAGFCANKAMSTNHDPNTASRPFDEGRDGFVMGEGAGILVLEEYEHAVARGAKIYAEVSGYGLTADAYHITAPDPDGDGGARAMAMAIKDAGIEPAAVQYINAHGTSTPMNDVLETKAIHTVFGEHAEKLAVNSTKSMIGHLLGGAGGVEAIATIKSLQEQTVHPTIHLENPSEGCNLDYVREGSRSWDLEYALSNSLGFGGHNASLVFKRYHT

SEQ ID NO: 29846 - protein, 166 aa, Salmonella enterica
VAGASLGLWEICIIWGLGISLAVYLTAGISGGHLNPAVTIALWLFACFPKQKVLPYIIAQFAGAFGGALLAYVLYSSLFTEFETAHHMVRGSVESLQLASIFSTYPAAALNVWQAALVEVVITSILMGMIMALTDDGNGIPKGPLAPLLIGILVAVIGASTGPLTG

SEQ ID NO: 29847 - protein, 252 aa, Rickettsia sp. DmS1
LLCLRLSSLSAFYPDLLNFKEADYEHIAIRMIAEIPTIAAMSYKYSIGQPFIYPDNSLDFTKNFLHMMFAMPCTKYKVNPIIKNALNKIFILHADHEQNASTSTVRIAGSSGANPFACISTGIASLWGPAHGGANEAVINMLKEIGSSEYIPKYIAKAKDKNDPFRLMGFGHRVYKNYDPRTAVLKEMCKVLKELGQLDNNPLLQIAIELEAIALKDEYFIERKLYPNVDFYSGIIYKAMGIPSQMFTVLFA

SEQ ID NO: 29848 - protein, 191 aa, Ralstonia eutropha JMP134
MWLLAEIGQSCHRVDMGGAFGGNREPEYLKKNPHGVVPTLIDLETVVWESNTIVRYLCNRFNARALYPDDVARRAMVERWMDWQLSTLGPANAQLFQSIVRTPAGKRVQELIDGYRDRNATLFAVLDQALDGHDYVEGNSLTLADIVLAPLTYRWFELPIERPQYTHLRRWYDLICQRPAFQEHVVGVGLS

SEQ ID NO: 29849 - protein, 253 aa, Rickettsia slovaca
YMLAAVGSLSAFYPDLLNFKEADYELTAIRMIAKIPTIAAMSYKYSIGQPFIYPDNSLDFTENFLHMMFATPCTKYTVNPIIKNALNKIFILHADHEQNASTSTVRIAGSSGANPFACISTGIASLWGPAHGGANEAVINMLKEIGSSEYIPKYIAKAKDKNDPFRLMGFGHRVYKNYDPRAAVLKETCKEVLKELGQLDNNPLLQIAIELEAIALKDEYFIERKLYPNVDFYSGIIYKAMGIPSQMFTVLFA

SEQ ID NO: 29850 - protein, 497 aa, Oryza sativa
MVLSHASSGRDDAVRCTFATRYACETLPRFRMPEQSIPREAAYQIINDELMLDGNPRLNLASFVTTWMEPECDKLIMDSVNKNYVDMDEYPVTTELQNRCVNMIAHLFNAPIKEDETAIGVGTVGSSEAIMLAGLAFKRKWQNKRKEQGKPCDKPNIVTGANVQVCWEKFARYFEVELKEVKLSEGYYVMDPVKAVEMVDENTICVAAILGSTLTGEFEDVKLLNNLLTEKNKETGWDVPIHVDAASGGFIAPFLYPELEWDFRLPLVKSINVSGHKYGLVYPGVGWVIWRSKEDLPEELIFHINYLGTDQPTFTLNFSKGSSQIIAQYYQLIRLGFEGYKNIMQNCMENTAILREGIEATGRFEILSKEAGVPLVAFSLKDSGRYTVFDISEHLRRFGWIVPAYTMPANAEHVAVLRVVIREDFSRSLAERLVSDIVKILHELDAHSAQVLKISSAIAKQQSGDDGVVTKKSVLETEREIFAYWRDQVKKKQTGIC

SEQ ID NO: 29851 - protein, 716 aa, Triticum aestivum
  misc_feature (488)..(488): Xaa can be any naturally occurring amino acid
  unsure (1)..(716): unsure at all Xaa locations
MAGADPNRSFMKDVKRIIIKVGTAVITRNDGRLALGRIGALCEQVKDLNAQGYEVIMVTSGAVGVGRQRLRYRKLVNSSFADLQKPQMELDGKACAAVGQSGLMALYDMLFTQLDVSSSQLLVTDSDFDNSNFRERLRETVESLLELRVIPIFNENDAISTRKAPYEDSSGIFWDNDSLAGLLALELKADLLVLLSDVDGLYSGPPSEPSSKLIHTYIKEKHYHEITFGDKSRVGRGGMTAKVQAAVWASTGGVPVVITSGCASQSLVKVLRGEKIGTLFHKNASLWEPSKETSVREMAVAARDCSRRLQNLSSEERKKILLDVADALEANEDLIRSENEADLAAAHEAGYESALVSRLTLKPGKIASLAKSVRTLANMEDPINEILKRTEVADGLVLEKTSCPLGVLLIIFESRPDALVQIASLAIRSGNGLLLKGGKEAMRSNAILHKVITNAIPDNVGEKLIGLITTRDEIADLLKHDDVIDLVXPRGSNKLVAQIKSSTKIPVLGHADGVCHVYIDKSADMDMAKRIVMDAKIDYPAACNAMETLLVHKDLMKTPELNDILVALKTAGVNLYCGPVAHKVLGYPKADSLHLEYSSMACTVEIVDDVQSAIDHIHRYGSAHTDCVVTTDDKVAETFLRQVDSAAVLYNASTRFSDGARFGLGAEVGISTGRIHARGPVGVEGLLTTRWLLRGKGQVVNGDKDVEYTHKSLPLQ

SEQ ID NO: 29852 - protein, 458 aa, Oryza sativa (japonica cultivar-group)
MYDDNGAADLPTSQSASIKTIVCVPFIMHGVLELGTTDPVSEDPALVDRITASLWDTPPRAAFSSEAGVADIVVFEDLDHGNTAVEATTTMVPGEPEPHAVAGGEVAECESNAHNDLEQITMDDIGELYSLCEELDVLDDDSSSWVADPWSSFQLVPTAEATDVDDAVVAALGAIDGSCRPSPSSFVAWKRTPDSDEVQAVPLISGEPPQKLLKKAVAGAGAWMNNADGSAATMTTDQGSSIKNHVMSERRRREKLKEMFLILKSVVPSIHKVDKASILAETIAYLKELEKRVEELESSSQPSPRPMETTRRRCCKSTGKKVSAGARAKRKAPAPEDTDGERRHCVSNVNVTIMDNKELLLELQCQWKELLMTRVFDAIKGVSLDVLSVQASTSDGLLGLKIQAKVVVSAAKSSQQICSIVYLSIYQSLYLRLFGVLILAILLLHACSLPHLLPSNLG

SEQ ID NO: 29853 - protein, 382 aa, Triticum aestivum
  misc_feature (132)..(132): Xaa can be any naturally occurring amino acid
  misc_feature (137)..(137): Xaa can be any naturally occurring amino acid
  unsure (1)..(382): unsure at all Xaa locations
HLRCASEHLQMTEEISDDNLIAQTEMFLNQVVLRNWKDSLKALETCDDLLPHAEDLQIVKRCIESLASKATTDPNLFGWPIREHGIMQSPGGSVLWNGISTGARPRNFSSDWWYDDVSSLSFPPLLRYRPIXGDYDXNKFVQKSRLVPVRNSRDIVDPRVRPRVRMYKRLLSGMEFRRIRPEIIAGSLAYYARKYIPGLSRRNSMGTMPLAGTLSDVEQRNLLEEIDRLLPVQKGLVPTKLLLGLLKTSMILKASSTCIANLEKRVGMQLDQASLEDLLLPNYSYTMETLYNVECVHRILEHFLAMDQANGGCSPCIDDMMASPSMIPITAVGQLLDGYLAEVAPDVNLKPPKFQPWLCLPDCPLSRISLRDLSSGRSSYSL

SEQ ID NO: 29854 - protein, 343 aa, Chrysosplenium americanum
MLFAMQLASASVLPMVLKSAIELDLLEIIASQDTCMSPTEIASHLPTTNPHAPTMIDRILRLLSSYSIVTCSVRSVDDQRVYSPAPVCKYLTKNQDGVSIAALCVAAQDKVLMECWYHMKDAVLDGGIPFNKAYGMPIFDYFAKDLGSNKVFNKGMSDFSSMIIKKILETYKGFQGLTSLVDVGGGTGATLTKILSKYPTIRGINFDLPHVIQDAPEYPGIEHVGGDMFVSVPKGDAIFMKWICHDWNEEQCLKLLKNCYDALPNNGKVIVAEYILPVVPDSSLASKLSVTADVMIVTQNSGGKERTEKEFEALAKAAGFQGFQVFCNAFTIYIIEFSKNISN

SEQ ID NO: 29855 - protein, 583 aa, Bacillus sp.
MFLEAVYHRPRKNFSYAYNGTTVHLRIRTKKDDMTAVYALAGDKYMWDHTMEYVPMTKLATDELFDYWECEVTPPYRRVKYGFLLQQGHEKRWMTEYDFLTEPPANPDRLFEYPFINPVDVFQPPAWVKDAIFYQIFPERFANGDTRNDPEGTLPWGSADPTPSCFFGGDLQGVIDHLDHLSKLGVNAVYFTPLFKATTNHKYDTEDYFQIDPQFGDKDTLKKLVDLCHERGIRVLLDAVFNHSGRTFPPFVDVLKNGEKSKYKDWFHIRSLPLEVVDGIPTYDTFAFEPLMPKLNTEHPDVKEYLLKAAEYWIRETGIDGWRLDVANEVSHQFWREFRRVVKQANPDAYILGEVWHESSIWLEGDQFDAVMNYPFTNAVLDFFIHQIADAEKFSFMLGKQLAGYPRQASEVMFNLLDSHDTARLLTQADGDKRKMKLAVLFQFTYFGTPCIYYGDEVGLDGGHDPGCRKCMEWDETKHDKDLFAFYQTVIRLRQAHAALRTGTFKFLTAEKNSRQIAYLREDDQDTILVVMNNDKAGHTLTLPVRHAQWTHLWQDDVLTAAHGQLTVKLPAYGFAVLKASSD

SEQ ID NO: 29856 - protein, 144 aa, Brassica napus
KIGTTSVCGRRRDMEDAVSVHHSLIHKNSENLHFYGVFDGHGCSHVAEKCRERLHEIVKRDVEAMAAGGEDEWKETMAKSFQKMDREVCQRDSNNGAASRSVKSSCRCELQSPQCDAVGSTAVVSVVTPEKIVVSNCGDSRAVL

SEQ ID NO: 29857 - protein, 784 aa, Zea mays
MQFPFTTGFSSSPALSLGLDNAGGGMVGRMLPVGGAPADGGMARDAADAENDSRSGSDHLDAMSAGAGAEDEDDAEPGNPRKRKKRYHRHTPQQIQELEALFKECPHPDEKQRGELSKRLGLDPRQVKFWFQNRRTRMKTQLERHENALLKQENDKLRAENMAIREAMRSPMCGSCGSPAMLGEVSLEEQHLCIENARLKDELNRVYALATKFLGKPMPVLSGPMLQPNLSLPMPSSSLELAVGGLRGLGSIPSLDEFAGGVSSPLGTVITPARATGSAPPPMVGVDRSMLLELAISAMDELVKLAQVDEPLWLPSLSGSPDKKLLNFEEYAHSFSPSVGAVKPVGYVSEASRESGLVIIDNSLALVETLMDVRRWSDMFSCMIAKATVLEEVTSGIAGSRNGALLLMKAELQVLSPLVPIREVTFLRFCKQLAEGAWAVVDVSIDGLVRDHNSGTASNAGNIRCRRLPSGCVMQDTPNGYCKVTWVEYTEYDEASVHQLYRPLIRSGLAFGARRWLAMLQRQCECLAILMSPDTVSANDSSVITQEGKRSMLKLARRMTENFCAGVSASSAREWSKLDGAAGSIGEDVRVMARKSVDEPGEPPGVVLSARTSVWVPVAPEKLFNFLRDEQLRAEWDILSNGGPMQEMANIAKGQEHGNSVSLLRASAMSANQSSMLILQETCTDASGSMVVYAPVDIPAMQLVMNGGDSTYVALLPSGFAILPDGPSSVGAEHKTGGSLLTVAFQILVNSQPTAKLTVESVETVNNLIFCTIKKIKTALQCDA

SEQ ID NO: 29858 - protein, 1162 aa, Candida albicans SC5314
MSHIDGDDHMTKDLIDSLESKDNDLSLVTSNTQIPDVEVANLTHDADEINQLFDTATNNVLPESNKKDKPIDTQDLHEDDPKAVPKTTSNGESTSNSNSVSPKLLPNDGKSTPKIQKELRRKSTFVPVTSNSKSLEPSEDDNNNNNNNNNNSRISAYARLDFENFTFFVQTLQVVLGRKSNDETLQQNVDVHLSSKKAISRRHAKIFYNFGTQRFEISILGRNGAFVDNVFVEKGLTIPLTDGNKIQIGDIPFKFVLPSNEPNEENNNQDSSEKQFNPSDAINLRSNLYSKSSSPQSSPKRKSQPSKKVKKEPVSASNTPKDIKPTPPVPTTAISPTTSSSSPTASISTSTNAATAATTTTPATTTAARKNSINRRNSLLKIRRLSNARRKSLAANDEINELLKDLGVTSIDEINEEDSELLDAQIQSLLDEDNENLGGIEDSLMKLAEFNESAIDDDDDEEEGNENSQADLDRLEKTMEHDAIDDEIKAIDSNLTLLDDEISKLTPLINDTNQGLLEEKETKKKQLEEEKRKKQLQQLQHKNSLAKFPRRSAPLMGKPASIQPPASSSIYSRINGLDKIGKTVSPRPPPPKLIAPVLRVTAEPSAIRSRPPLRAITVSDSSYIATFSYPKTIEEPSKYPKPKVKKEHHKKHSKKVYSLDEIPEPYRSKPNISFQIMITNVLKTEAARNGLIINEITEAIKEVYPYYKYCTDGWQFSINHCIKFTKIYKRLQKRGSEWLYAMDELYINERENIRIKQREIAKAKAKAEALRQEEIRQRQRLEAQKSLPHNIVGRNFASPYANTRVPPNQYNQFSQSSSSSSSSATTTTNGQYGSTTMVGGTSPQAGSIRAQLAAVRGNGNTPATTSTTPSLPAMNDPKTKKSLEYLQKELFTLYKARKLTYDTQTATSLITKAVATTIAQVNSIGAKAGAGDNALVFLVERAPEKVSKILDIALTKSIKEYEGIASKSPSQPATPGMRPAQLTTTSQSAATPTTTPQISNLQSLPVKPPISTPLPQVPQQQVSGVNIPGPIATPNIGVTSGVGNLGTTSIGTPTPTQIQSPATSVIPAMQSPQKPVSTPIPTSVPVPLPVPSAPLARPPSFGKPPGAGSSLSRPKAFGKPPGAGSSLSRPPTFLSNKPSYKRELEDDEEEGEQATNKIAKTE

SEQ ID NO: 29859 - protein, 254 aa, Borrelia burgdorferi B31
MNYTKFQEFISEFLGTFILLALGTGSVAMTVLFSSSPEIPGEIIKGGYTNIVFGWGLGVTFGIYTAARMSGAHLNPAVSIGLASVGKFPVSKLLHYIVAQILGAFTGALMTLVVFYPKWIEMDPGLENTQGIMATFPAVPGFLPGFIDQIFGTFLLMFLISVVGDFTKKHSDNPFIPFIVGAVVLSIGISFGGMNGYAINPARDLGPRILLLFAGFKNHGFNNLSIVIVPIIGPIIGAILGATIYEFTLKNNKD

SEQ ID NO: 29860 - protein, 537 aa, Coprinopsis cinerea
MSSERAQFASEVAEVERWWKSPRFARVNRPYTAADVVSKRGTIKINYPSDVQGKKLWKLLSEHAKNGTPSHTYGALDPVQVTKMAKYLETVYVSGWQSSSTASSSNEPGPDLADYPSNTVPNKVEHLFMAQLFHDRKQREARSRMSDAELANTPVIDYLRPIVADADTGHGGLTAVMKLTKMFVEKGAAGIHIEDQAPGTKKCGHMAGKVLVPIQEHINRLVAIRLQYDIMGVENLVVARTDSEAATLITSNIDDRDHPFIQGSTNPSLPPLNNVMVEAEAQGKTGDQLQAIEDGWIKAANLQLFPQALAQALANEGASRSTVEKLVARVSRLSWSQAVAVAQKEFGLKQVPYWNWDAPRTREGYYRYQGGTECAIHRANAFAPYADLLWMETKKPILAQAKEFAAGVHAVHPGQWLAYNLSPSFNWKLLPQRQDMQAYVWELGKLGFVWQFITLAGLHSNAYISDLFAQNFAKTGMKAYVELVQSREREIGCDVLTHQKWSGADYADSLIKTVTGGVSSTAAMGAGVTESQFTSKL

SEQ ID NO: 29861 - protein, 321 aa, Caulobacter crescentus CB15
MLAVQAVRTGGPEVLEVVDLPLPSPGPGQILVRHQAVGLNYIDTYHRSGLYPVKTPLVIGLEAAGVVESVGEAVTRFKVGDRVAYNGTMGAYAQAAVVPAERAVLVPDGVSLEVAAAALLKGMTAEFLVRRCFHVKQGDWVLVHAAAGGVGQILVQWCKALGATVVATVGSTAKATIARDLGADHVIDYSHEDVAARVAELTGGRGVAVVYDGVGKDTWEASLASLARRGMLVTFGNASGPAPAFPPLALAPKSAFVTRPKLFDYIVTTEELDESAQALFAVIASGAIKIDIGQTFPLAEARAAHEALEGRRTTGATLLLP

SEQ ID NO: 29862 - protein, 319 aa, Glycine max
MSRALEHDYIGLAENPSMDGSSDKLSSEDGKTSSLNLKETELRLGLPGCESPERKSGSALCLFGKELQNNNNVCSVVSPLKAGAKRGFSDVTEGSQGAALFSPRGANVGKPIIGLDTQTNTQQQANTTIKEVGAVLPQSTKPVQEKNDQVAATNGHASAPAAKAQVVGWPPIRSFRKNTMASNLTKNNDDDEGKSGFGCLYVKVSMDGAPYLRKVDLKTYNNYMELSSALEKMFSCFTIGQCNSPGLPGKDGLSESSLRDLLHGSEYVLTYEDKDGDWMLVGDVPWEMFTDSCRRLRIMKGSEAIGLAPRAMEKSRSQN

SEQ ID NO: 29863 - protein, 506 aa, Acinetobacter calcoaceticus
MNDDTKKCPFSQLTTDFGAPVVDNQNSMTAGARGPLLAQDLWLNEKLANFVREVIPERRMHAKGSGAFGTFTVTHDITQYTRAKIFSEIGKKTEMFARFTTVAGERGAADAERDIRGFALKFYTEEGNWDMVGNNTPVFFLRDPRKFPDLNKAVKRDPKTNLRSATNNWDFWTLLPEALHQVTIVMSDRGIPASYRHMHGFSSHTYSFINSVNERFWVKFHFRTQQGIKNLTDAEAGELVGHDRESHQRDLFDAIERKDFPKWTLYVQVMPEQDAEKVPYHPFDLTKVWPHGDYPLIEVGEFELNRNPENFFLDVEQSAFAPSNLVPGISASPDRMLQARLFNYADAQRYRLGVNYQQIPVNAARCPVHSNHRDGQGRIDANYGGLPHYEPNSFGQWQEQPQYKEPPLKINGDADFWNYREDDNDYFSQPRALFELMTPEQQQALFDNTERAMGDALDFIKYRHIRNCYACHPAYGEGVAKALGLTVENAQAARETDPARGLPSFI

SEQ ID NO: 29864 - protein, 287 aa, Triticum aestivum
MRTVAIGILAMACLVAVARGGNFFQDSEMTWGDGRGKVVDGGRGLDLTLDKTSGSGFQSKTEYLFGKIDMQIKLVPGNSAGTVTTFYLSSQGTAHDEIDFEFLGNVTGEPYTLHTNVFAKGQGQREQQFRLWFDPTKAFHTYSIIWNPQHVIFAVDGTAIRDFKNHEARGVSFPKSQPMRLYASLWNADDWATQGGRVKTDWSKAPFVASFRNFNADACVMSGGAQRCPAGTMEASAAGGSGSWWNQELSGMGYRRMRWVQRKFMIYNYCTDPKRVAQGVPAECKLR

SEQ ID NO: 29865 - protein, 111 aa, Oryza sativa (indica cultivar-group)
YHFSCQFTTDLIAMNHADFIITSTFQEIAGNKDTVGQYESHMAFTMPGLYRVVHGIDVFDPKFNIVSPGADMSIYFPYSESRKRLTSLHPEIEELLYSEVDNNEHKFMLKD

SEQ ID NO: 29866 - protein, 206 aa, Glycine max
  misc_feature (78)..(78): Xaa can be any naturally occurring amino acid
  unsure (1)..(206): unsure at all Xaa locations
TSSPSKAKFSFHSVSKGYYGECGQRGGYFEMTNIPPETVDEIYKVASISLSPNVPAQIFMGVMLNPPQPGDISYDKLXRESTGILESLRRRARIMTDGFNSCRNVVCNFTEGAMYSFPQIRLPPRALEAAKQAGKVPDVYYCLKLLEATGISTVPGSGFGQKKGVFHLRTTILPAEEDMPDIMDSFKKFNDEFMEQYEDDRGYSRL

SEQ ID NO: 29867 - protein, 272 aa, Listeria monocytogenes EGD-e
MIDTSLATQFLGEVIGTAILIILGAGVVAGVSLKRSKAENGGWVVITLAWGLGVTMGVYVSGYMSMAHLNPAVTIGMALAGAFPWNYVLPYILAQFIGAFIGATLIWLHYYPHWKQTEDKPTKLGVFATAPAIRHFTSNFFGEALGTFILVFGLLSLGANSFSDGLNPLVVGALIVAIGMSLGGTTGYAINPARDLGPRIAHFVWPISGKGGSDWGYSWVPVIGPIMGGALGALGYNAIINGELGMWFWVFAVLFVLILILTMQLDKKKDLA

SEQ ID NO: 29868 - protein, 90 aa, Oryza sativa
ILAGDHLYRMDYEKFIQAHRETDSDITVAALPMDEKRATAFGLMKIDEEGRIVEFAEKPKGEQLKAMMVDTTILGLDDVRAKEMPYIASM

SEQ ID NO: 29869 - protein, 464 aa, Solibacter usitatus Ellin6076
MLRMAILGPIALLLVPAPALAQTAKPSKLLADYSAALEDLARLASPSVVQIQVRRLVPLGKADSQRTGFVSEQQATGSGVIVDPDGYIVTNAHVVQNAQRIEVKVLQSDARGQAPHEHLMPAKLIGLDRQVDIAVVKIEAQNLHALSFLNSDNLHQGQLVVALGSPLGLQNSLTQGVVSAATRQLDPESPMVYIQTDAPINRGNSGGPLLDIEGRIAGINTLIFSESGGNEGIGFAIPANLAKDVYQRLRKDGRIRRGEIGVIPETITPTLGAALGLDMDSGVIVSDVLPESAAQAAGIEPVDVVLSIDGKPMREARDLILAVFQRAPGDQLKLEIRRGKERTSKTVAVLERKNEPSQLEEIANSDAALVRRLGILAVTVDAKVNAILPNLRRLSGVAVAAVPAEYAGLNPGLLAGDVIYSFNNQRIGSLEELRNALKEKKTGDPIALLVERYGQLIFVTANLE

SEQ ID NO: 29870 - protein, 609 aa, Pseudomonas syringae pv. tomato
MESRTSRRTFVKGLAAAGVLGGLGLWRSPSWAASGSPALSVLSGTEFDLSIGEMPVNITGRRRTAMAINGGLPGPLLRWKEGDTVTLRVRNRLDAATSIHWHGIILPPNMDGVPGLSFAGIEPGGVYVYQFKVQQNGTYWYHSHSGFQEQVGVYGPLVIEAKEPEPFKYDSEHVVMLTDWTDEDPVSLMRTLKKQSDYYNFHKRTVGDFVNDVADKGWAATVADRKMWAEMKMNPTDLADVSGATYTYLLNGQAPNMNWTGLFRPGEKLRLRFINGSAMTYFDIRIPGLKMTVVASDGQFVNPVEVDELRIAVAETFDVIVEPTAEAYTVFAQSMDRTGYARGTLAVREGLVAQVPPLDPRPLVTMDDMGMGGMDHGSMDGMSGMDSGADDGMQTMSSMGGDSMPAMDHSKMSTMQGMDHGAMSGMDHGAMGGMVMQSHPASENDNPLVDMQAMSPTAKLNDPGLGLRNNGRKVLTYADLKSTFEDPDGREPSRTIELHLTGHMEKFAWSFDGIKFADAQPLILKYGERVRIVLVNDTMMTHPIHLHGMWSDLEDEDGNFRVRKHTIDMPPGSKRSYRVTADALGRWAYHCHLLYHMEMGMFREVRVEE

SEQ ID NO: 29871 - protein, 331 aa, Zea mays
MASVEGKRETVLVTGASGFIGSTLVGLLLDRGYNVHASVLNPDDKAETEHLVALGAGAGEGRLRVFPGDLLDGAALMAAARGCSGVFHLATPCTVYPVSDPQGQMVVPAVEGTLNVLRAAKEARTVRRVVVTSSSSAIIPSPAWPAGEPRDERCWADVDYCKKNEVWYPVSKTLAEKAAWRFAEENGVDVVVVNPVTAMGPMIPPTINCSMIVLLRLLQGCTEEYRDIWMGAVHVHDAAMAHILVFESPAASGRHICAQSISHWSDFAAKVAELYPEYKVPKFPKDTQPGLVRQGAEEGSKKLVALGLHFSPLEKIIRDAVEALKSRGYIS

SEQ ID NO: 29872 - protein, 567 aa, Oryza sativa
MASSSSSRLLFLLSCSVLALLAGAEVHHHEFIVQETPVKRLCKTHNVITVNGQLPGPTLEVREGDTVVINVVNHAQYNVTIHWHGIRQFRTGWADGPEFVTQCPIKPGGSYKYRFTIEGQEGTLWWHAHSSWLRATVYGALIIRPRENKTYPFEKPAREVPLILGEWWDADPIQVIREAQRTGAAPNISDAYTINGQPGDLYNCSKEETTAVPVKPGETALLRFINAALNQELFVSIAQHKMTVVGVDASYTKPFTTSVLMIAPGQTTDVLVTMDQAPTRYYLAARAYDSAQGVAFDNTTTTAVIEYDCGCATDFGPSIPPAFPVLPAFNDTNTATAFAAGIRSPHEVKIPGPVDENLFFTVGVGLFNCEPGQQCGGPNNTRFTASMNNISFVFPQTTSLLHAHYYGIPGVFTTDFPAYPPVQFDYTAQNVPRYLWQPVPATKLYKLKFGSVVQIVLQDTSIVSPENHPIHIHGYDFYILAEGFGNFDPKKDAKKFNYVDPPQRNTVAVPTNGWAVIRFVADNPGVWLMHCHLDVHITWGLAMAFLVEDGYGKLETLEAPPVDLPMC

SEQ ID NO: 29873 - protein, 441 aa, Salmonella enterica subsp. enterica serovar Typhi Ty2
MIRGKIDILVVDDDVSHCTILQALLRGWGYNVALAYSGHDALAQVREKVFDLVLCDVRMAEMDGIATLKEIKALNPAIPILIMTAFSSVETAVEALKAGALDYLIKPLDFDRLQETLEKALAHTRETGAELPSASAAQFGMIGSSPAMQHLLNEIAMVAPSDATVLIHGDSGTGKELVARALHACSARSDKPLVTLNCAALNESLLESELFGHEKGAFTGADKRREGRFVEADGGTLFLDEIGDISPLMQVRLLRAIQEREVQRVGSNQTISVDVWLIAATHRDLAEEVSAGRFRQDLYYRLNVVAIEMPSLRQRREDIPLLADHFLRRFAERNRKAVKGFTPQAMDLLIHYDWPGNIRELENAIERAVVLLTGEYISERELPLAIAATPIKAENSAEIQPLVDVEKEVILAALEKTGGNKTEAARQLGITRKTLLAKLSR

SEQ ID NO: 29874 - protein, 895 aa, Arabidopsis thaliana
MSRQSQLFTLLRRRFHSPSNDAPTETLRKKIADLQKSKKRRNPIKNQFLVEVPESRSYLDTATMPMFLAVVGIALFAKVLMMIDDSKSQEMIERKIKNAPQGQGTVRMIDREEWDEFREVRPRTPFESKLARPNAQIRTGEPVRKDDLKNWTIDVLTNALERTEESVRRGSTFALMEDSGVNPMDSPSKGSDFGVYGIIGGGIVALLVPVLLSVVLNGTKKGKKRGVPIKVGGEEGYTMRHARAPELVDVPWEGAATMPALFEQSCKKYSKDRLLGTREFIDKEFITASDGRKFEKLHLGEYKWQSYGEVFERVCNFASGLVNVGHNVDDRVAIFSDTRAEWFIAFQGCFRQSITVVTIYASLGEEALIYSLNETRVSTLICDSKQLKKLSAIQSSLKTVKNIIYIEEDGVDVASSDVNSMGDITVSSISEVEKLGQKNAVQPILPSKNGVAVIMFTSGSTGLPKGVMITHGNLVATAAGVMKVVPKLDKNDTYIAYLPLAHVFELEAEIVVFTSGSAIGYGSAMTLTDTSNKVKKGTKGDVSALKPTIMTAVPAILDRVREGVLKKVEEKGGMAKTLFDFAYKRRLAAVDGSWFGAWGLEKMLWDALVFKKIRAVLGGHIRFMLVGGAPLSPDSQRFINICMGSPIGQGYGLTETCAGATFSEWDDPAVGRVGPPLPCGYVKLVSWEEGGYRISDKPMPRGEIVVGGNSVTAGYFNNQEKTDEVYKVDEKGTRWFYTGDIGRFHPDGCLEVIDRKKDIVKLQHGEYVSLGKVEAALGSSNYVDNIMVHADPINSYCVALVVPSRGALEKWAEEAGVKHSEFAELCEKGEAVKEVQQSLTKAGKAAKLEKFELPAKIKLLSEPWTPESGLVTAALKIKREQIKSKFKDELSKLYA

SEQ ID NO: 29875 - protein, 150 aa, Brassica napus
VDPRVRGIDVVRFGELMMSSGIVLNDSISWITFHGGYDFGYLVKLLTCKELPLRQADFFKMLFVYFPTVYDIKYLMTFCNGLFGGLNRLAELMGVERVGICHQAGSDSLLTLGSFRKLKERYFPGSTDKYTGVLYGLGVEDSATSTAIAN

SEQ ID NO: 29876 - protein, 292 aa, Arabidopsis thaliana
MSMEMELFVTPEKQRQHPSVSVEKTPVRRKLIVDDDSEIGSEKKGQSRTSGGGLRQFSVMVCQKLEAKKITTYKEVADEIISDFATIKQNAEKPLNENEYNEKNIRRRVYDALNVFMALDIIARDKKEIRWKGLPITCKKDVEEVKMDRNKVMSSVQKKAAFLKELREKVSSLESLMSRNQEMVVKTQGPAEGFTLPFILLETNPHAVVEIEISEDMQLVHLDFNSTPFSVHDDAYILKLMQEQKQEQNRVSSSSSTHHQSQHSSAHSSSSSCIASGTSGPVCWNSGSIDTR

SEQ ID NO: 29877 - protein, 305 aa, Arabidopsis thaliana
YSFINVYTHLFTSTTLPSIFHFLQLLQISYFPENHFPKKNKTFPFVLLPPTAITAYQSELGGDSSPLRKSGRGKIEIKRIENTTNRQVTFCKRRNGLLKKAYELSVLCDAEVALIVFSSRGRLYEYSNNSVKGTIERYKKAISDNSNTGSVAEINAQYYQQESAKLRQQIISIQNSNRQLMGETIGSMSPKELRNLEGRLERSITRIRSKKNELLFSEIDYMQKREVDLHNDNQILRAKIAENERNNPSISLMPGGSNYEQLMPPPQTQSQPFDSRNYFQVAALQPNNHHYSSAGRQDQTALQLV

SEQ ID NO: 29878 - protein, 90 aa, Zea mays
  misc_feature (42)..(42): Xaa can be any naturally occurring amino acid
  unsure (1)..(90): unsure at all Xaa locations
MEARTKREFVCVPALIKRVREGINELGLDDQVAVSACSHPGXHKHAGDVIIDSSDAKGEVTGHWYSHVVTDDKPALLHIHIGQGEGVDHL

SEQ ID NO: 29879 - protein, 483 aa, Alkalilimnicola ehrlichei MLHE-1
MFESPLLSNLHGYIDGSWTPADSGERFPVHNPVNGDELGRVAAMGAEETRRAIDAAHAALRRGSELEERQAWLDGIVDALKAHKSELGRVLTMEHGKPLKEAQGEVLYAAGFFEFCAKNVYSLGPRTLPERPREATWTIHNRPAGVVGLVTPWNFPIGMIAKKLSAAIAAGCPSVIKPSSKTPLTMLALFTLMEREVDLPPGFVNLVTGPSGPIGDTLMADDRVRVVSFTGSTEVGRKLITASAPGVKKLALELGGNAPFIVFADTDLDRAADHLIANKFRGGGQTCVCANRILVEASVEESFADKVAERAARLKVGDGMAPDTDLGPLIDRNGYEKVRRHFNNALEQGATAVLGEDPGPIPNDWGGFFPPAVLRGVKPGMDCTREETFGPLVPIMPFRDEAQALEMANDTEFGLAAYLFTADEARAQRLIAGLEFAHVGHNTGTGPTPEAPFGGMKCSGWGREGGTEGLFEFVEPQTVPRGN

SEQ ID NO: 29880 - protein, 811 aa, Methylococcus capsulatus str. Bath
MQTVGSFSEFLDDMVGRYGPRPAIQYRPRYRTLRWSYLELGTHAAKLASLLDEHGVGSGDRVFLSAENSPHWVAAFFAIAARGAVIVPLNPRSPPEQLANLVRSAGPSLVLASPRRRWEGPPLPVVDIERSGRVPSNRPATRTGPARLAEIIYTSGTTGDPKGVMLTHANLLSDLSAVARAIPLAPDDHVLSLVPLFHVYGQMTSLFCPLAAGCPVSYLTTPTTRSVLEALTHTPVTHLVAVPEVLKTMMDRLESRIGRIPGFLWPLLRGRIRARISGSLRTIVCGGAPLDPVVEEKWWALGFQVLQGYGLTETSPVIAANTPQAHRIGSVGKPLDEVELRIASDGEILVKGPMVMAGYFRDPARTEAAFADGWLKTGDAGRLDADGFLYVYGRKRYMILGPGGENVFPEDIEAVLNRTAGVTDCAVVGLESGGRTLVHAVLLADADEARAAAIVAEANRHLAPHQRIVSWSLWPEPDFPRSVTRKVKKDEVLGRLRREPSTQAVPVGRSTPLRLLLAQVAGTEAGALSDDTRLVPDLGLDSLLRIELVARIEEDLGVCLDEIDIGPLTTVADLENLLVRRQDRMPRVDAHPRWSLSPWASRLRPLAQKVFLQWWIAPFCRLRVSGLEHLAALDGPVIFMANHRSYLDSAVASFALPDRFRYRLAIAAATGVLYTRYRWAVPIGELSLNAFPLPSGPDENIRPGLELIGRLLDDGWNVLIFPEGQMNRGGLGIQPLRRGAGTIGVDMGVPVVPLVIEGTEKVMPPGRIVPRAAAPVSVRFGAPLRAGEAEPHGRMLARIEDALRRLLENSP

SEQ ID NO: 29881 - protein, 405 aa, Bordetella bronchiseptica RB50
MTGTFSTGDSKMLDAVIVSTARTPIGKARRGALNLTHGADLGAHAIRHAVLRAGLEAGEVEDVILGCGYPEGGTGRNVARLSALRAGMPVTVSGMTVQRACSSGLQAIAIAAGRIRTEGVPAIVAGGVESVSLVLDHINRSSHRNEWLSAHLPGIDMTMIETADLVAQRYGITREAQDEYALRSQRLTAAAQEAGRFEHEIAPIRTTMRTIDPATGEAVLRQVECARDEGARPDTSLDNLARLAPVRGDGQFVTAGNASQLSDGAAACVLMSGREAARRGLEPLGVFRGFATAGCEPQEMGIGPVLAVPRLLERQGLTVDDIDLWELNEAFACQVLYCRDRLGIPDARLNVDGGAISIGHPFGMSGARMVGHALIEGRRRGARYVVVTMCVGGGMGAAGLLEVQQ

SEQ ID NO: 29882 - protein, 590 aa, Arabidopsis thaliana
MAMVDEPLYPIAVLIDELKNDDIQLRLNSIRRLSTIARALGEERTRKELIPFLSENSDDDDEVLLAMAEELGVFIPFVGGIEFAHVLLPPLESLCTVEETCVREKAVESLCKIGSQMKENDLVESFVPLVKRLAGGEWFAARVSACGIFHVAYQGCTDVLKTELRATYSQLCKDDMPMVRRAAASNLGKFATTVESTFLIAEIMTMFDDLTKDDQDSVRLLAVEGCAALGKLLEPQDCVARILPVIVNFSQDKSWRVRYMVANQLYELCEAVGPDCTRTDLVPAYVRLLRDNEAEVRIAAAGKVTKFCRLLNPELAIQHILPCVKELSSDSSQHVRSALASVIMGMAPILGKDSTIEHLLPIFLSLLKDEFPDVRLNIISKLDQVNQVIGIDLLSQSLLPAIVELAEDRHWRVRLAIIEYVPLLASQLGIGFFDDKLGALCMQWLQDKVYSIREAAAAANNLKRLAEEFGPEWAMQHLVPQVLDMVNNPHYLHRMMVLRAISLMAPVMGSEITCSKFLPVVVEASKDRVPNIKFNVAKLLQSLIPIVDQSVVDKTIRQCLVDLSEDPDVDVRYFANQALNSIDGSTAAQS

SEQ ID NO: 29883 - protein, 403 aa, Arabidopsis thaliana
MASLDSLPAMKLVRFILSTLLVTSVNSQTQCRNFKSIISFGDSIADTGNLLGLSDPNDLPASAFPPYGETFFHHPTGRYSDGRLIIDFIAEFLGFPLVPPFYGCQNANFKKGVNFAVAGATALEPSFLEERGIHSTITNVSLSVQLRSFTESLPNLCGSPSDCRDMIENALILMGEIGGNDYNFALFQRKPVKEVEELVPFVIATISSAITELVCMGGRTFLVPGNFPIGYSASYLTLYKTSNKEEYDPLTGCLKWLNDFSEYYNKQLQEELNGLRKLYPHVNIIYADYYNALLRLFQEPAKFGFMNRPLPACCGVGGSYNFNFSRRCGSVGVEYCDDPSQYVNYDGIHMTEAAYRLISEGLLKGPYAIPPFKWSCLSSEIMNKMSLDTQILDEQLLQGCLKV

SEQ ID NO: 29884 - protein, 330 aa, Carboxydothermus hydrogenoformans Z-2901
MKKVYYDQDANLELLREKKIAIIGYGSQGHAQAQNLKDSGLNVVVGLHKKSKSREKAEADGFTVMKVDEAAQWADIIQILVPDQIQGELYRDKIEEHLKPGKALMFSHGFNIHYGQIVPPPDVDVFLVAPKSPGHLVRRMYLEGKGVPGLIAVYQDATGKAKDLALAYAKGIGCTRAGVFETTFKEETETDLFGEQAVLCGGVTHLIKAGFETLVEAGYAPEMAYFECLHEMKLIVDLIYEGGFSLMRYSISDTAEYGDYMVGPRIITEETKKEMKKVLEEIQNGTFAKNWILENMAGRPVYNAIKRREQEHLIEKVGAELRQMMPWLKK

SEQ ID NO: 29885 - protein, 331 aa, Arabidopsis thaliana
MSVFESETSNFHVYNNHEIQTQPQMQTFLSEEEPVGRQNSILSLTLDEIQMKSGKSFGAMNMDEFLANLWTTVEENDNEGGGAHNDGEKPAVLPRQGSLSLPVPLCKKTVDEVWLEIQNGVQQHPPSSNSGQNSDENIRRQQTLGEITLEDFLVKAGVVQEPLKTTMRMSSSDFGYNPEFGVGLHCQNQNNYGDNRSVYSENRPFYSVLGESSSCMTGNGRSNQYLTGLDAFRIKKRIIDGPPEILMERRQRRMIKNRESAARSRARRQAYTVELELELNNLTEENTKLKEIVEENEKKRRQEIISRSKQMTKEKSGDKLRKIRRMASAGW

SEQ ID NO: 29886 - protein, 933 aa, Nitrosomonas europaea ATCC 19718
MSLNTRANIIPEKNTPNEKDYPLREDIRLLGRMLGDTIRELEGETMFNLVETIRQTSVRFRRDQDEAAEHELDTILNHLSHKETIAVVRAFSYFSLLSNIAEDLHHNRRRRAHLRAGSPPQDGSVTLALQRVVKKGIDAEQLQNFFASALISPVLTAHPTEVQRRSILDYQLKIQRLLKERDRTQLTPNEMRHNEEDLRSAIQTLWQTRVLRSVRLTVQDEIENGLIYYHYTFLRQIPYIYAKLEDILERHMDKAAPRIASFLRIGSWIGGDRDGNPFVTHQIMLHAAERHSALILDFYISEVERIGQTMSLSERLIKVSSDLEGLASTAPGLPASRIDEPYRRVFLGIHARLIATSRHLGSSIRGCCQENNAEPYADSAEFVHDLDIVIRSLRQHRSDRLAQGALRDLRRAADVFGFHLAPLDMRQHSKIHEQVISELYEKNTRDDRNYLEMSRSERVEWLLAELRHPRSLVTSFSDFSDVTQGELRILKMAAEIQRRFGHAALPNYIISMATGVVHILEVALLLKEAGLLQFGDDPRSTVNIIPLFETIDDLRGCASVMDELFSLPDYRKLLLSRDNLQEVMLGYSDSNKDGGFVTSNWEIYKAEIELTRVFDRHGVRLRLFHGRGGTVGRGGGPSYQGILAQPPGSVSGQIRLTEQGEVIASKYTDPEIGRRNLETLVAATIESTLLDRDAVHYHAPHYHQIMEELSSSACAAYRDLVYKTPGFKQFFLESTPIREIAGLHIGSRPTSRKPSDKIEDLRAIPWVFSWSLNRTMIPGWYGFGTAVENFVQQAGNEQEALKQLQEMYRTWPFLQTLLSNMDMVLSKSDLGIASRYAELVTDPELRQSVFTSIRTEWELCMKWLFAITGYSELLQDNPTLARSIRIRTPYIDPLNHLQIELLRRYRSGDDDDTVRRAIHLTINGVATGLRNSG

SEQ ID NO: 29887 - protein, 172 aa, Lactococcus lactis subsp. lactis Il1403
MATERAIFAGGCFWCMVQPFEEREGILSVISGYTGGNVENPTYEQVKKHLTGHTEAVEIIFDNSKITYQSLVELYWTLTDPTDAFGQFEDRGDNYRPVIFVENEEQEKIAKESKAQLQASGNFDSPIVTSIETVQKFWPAEDYHQGFYKKNPEDYAQSSKIRHDFLEKQWKK

SEQ ID NO: 29888 - protein, 408 aa, Mycobacterium tuberculosis CDC1551
MASFLGWTMDAFDYFLVVLVYADIATTFHHTKTDVAFLTTATLAMRPVGALLFGLWADRVGRRVPLMVDVSFYSVIGFLCAFAPNFTVLVILRLLYGIGMGGEWGLGAALSMEKVPAERRGVFSGLLQEGYAFGYLLASVAALVVMNWLGLSWRWLFGLSIIPALISLIIRYRVKESEVWEAAQDRMRLTKTRIRDVLGNPAIVRRFVYLVLLMTAFNWMSHGTQDVYPTFLTATTDHGAGLSSLTARWIVVIYNIGAIIGGLAFGTLSQRFSRRYTIVFCAALGLPIVPLFAYSRTAAMLCLGSFLMQVFVQGAWGVIPAHLTEMSPDAIRGVYPGVTYQLGNLLAAFNLPIQERLAESHGYPFALAATIVPVLLVVAVLTAIGKDATGIRFGTTETAFLVRHRNRH

SEQ ID NO: 29889 - protein, 318 aa, Medicago truncatula
MATENKILILGPTGAIGRHIVWASIKAGNPTYALVRKTPGNVNKPKLITAANPETKEELIDNYQSLGVILLEGDINDHETLVKAIKQVDIVICAAGRLLIEDQVKIIKAIKEAGNVKKFFPSEFGLDVDRHEAVEPVRQVFEEKASIRRVIEAEGVPYTYLCCHAFTGYFLRNLAQLDVTDPPRDKVVILGDGNVKGAYVTEADVGTFTIKAANDPNTLNKAVHIRLPKNYLTQNEVISLWEKKIGKTLEKTYVSEEQVLKDIQESSFPHNYLLALYHSQQIKGDAVYEIDPTKDIEASEAYPDVTYTTADEYLNQFV

SEQ ID NO: 29890 - protein, 610 aa, Pseudomonas aeruginosa UCBPP-PA14
MCGITGWTDWSRDLGEQRSILERMTRTLAPRGPDAEGLWLSRHALLGHRRLAIIDLENGAQPMLAEAGGRVALTYSGEVYNFRELRAELETLGQVFRTRSDTEVVLRAYLQWGEASFARLRGIYGFALWDEREQSLWLVRDRFGVKPLYYYPTAGGVLFASEPKAIFANPEANPVLDASGIAELFALTTAPTPGHGLYKGLRQVRPGQALRFDRNGVRELVYWALRAERHEEGAEDSAERAGQLLREAVAEQLVADVPLGSLLSGGLDSSAISAFAVAALDGDARRLPTFSVDFPGEGRGFVPTPWQSSWDEPYAQLAANFLGTPHRTVLVAPEEVLEQDEAVLQARDLPGWGELDASLYLLFRQVREHTTVALSGESADEVFGGYPFFHDPSALAHDGFPWLAGKSGPWQLLRREVAERVAAPEYIRARYREALAEVPRLDGEDAAQRRQREVAYLALSRWLPAMLERKDRMSMAVGLEVRVPFCDHRLVEYVWNLPWALKSVAGESKSLLRRALRGHLPQAILERRKSGFPANPDPRYLALLRERVGRLLADGRSPLFELVDAGRVRQALEQGTPLPSPRASASPTAGLAYLLNLDRWLTRHGVDISL

SEQ ID NO: 29891 - protein, 529 aa, Thermus caldophilus
MSWWQRAVIYQVYPRSFQDTNGDGVGDLEGIRRRLPYFKSLGVDAFWLSPFYKSPMKDFGYDVADYCDVDPVFGTLQDFDRLLEEAHALGLKVLVDLVPNHTSSEHPWFLESRASRNSPKRDWYVWKDPAPDGGPPNNWQSFFGGPAWTLDEATGQYYLHLFLPEQPDLNWDNPEVREAIKEVMRFWLRRGVDGFRVDVLWLLGKDPLFRDEPGSPLWRPGLPDRARHEHLYTEDQPETYAYVREMRQVLDEFSEPGRERVMVGEIYLPLPRLVRYYAAGCHLPFNFSLVTEGLSDWRPENLARIVETYEGLLTRWDWPNWVLGNHDQPRLASRLGEPQARVAAMLLFTLRGTPTWYYGDELALPNGLIPPEKVQDPAALRQRDREPTAYHTLGRDPERTPMPWDASPYGGFSTVEPWLPLNPDYKTRNVAAQEKDPRSMLHLVKRLIALRKDPGLLYGAYRTYRAREGVYAYLRGEGWLVALNLTEKEKALELPRGGRVVLSTHLDREERVGERLFLRPDEGVAVRLD

SEQ ID NO: 29892 - protein, 182 aa, Oryza sativa
MASFLQAGTSLMHHLLPTLQRKANCGSTFHALSVTSRLRCPSSATIFRKSIALTPEMLRCSWNSGVPVVRRQYRERHGCPFQSSTLTSSQDPYFEGPPQYMMNNRTYQDPAPDPLLSQFICSMAQTDTNSDNTNTEIAVSAVSHDQRLSQRVTLTDDASKLELKERLQRIEFVKEIIMSTIL

SEQ ID NO: 29893 - protein, 276 aa, Bacillus subtilis subsp. subtilis str. 168
MPTSLKDTVKLHNGVEMPWFGLGVFKVENGNEATESVKAAIKNGYRSIDTAAIYKNEEGVGIGIKESGVAREELFITSKVWNEDQGYETTLAAFEKSLERLQLDYLDLYLIHWPGKDKYKDTWRALEKLYKDGKIRAIGVSNFQVHHLEELLKDAEIKPMVNQVEFHPRLTQKELRDYCKGQGIQLEAWSPLMQGQLLDNEVLTQIAEKHNKSVAQVILRWDLQHGVVTIPKSIKEHRIIENADIFDFELSQEDMDKIDALNKDERVGPNPDELLF

SEQ ID NO: 29894 - protein, 339 aa, Synechococcus elongatus PCC 7942
MIRIRNRWFRWLAIALASLVASIGIATVGFAATGVTPDQVLSAIEGTFGVNVGQRRNHIKGTCAVGNFVATTEAKTYSRSPLFSGQSIPVVARFSLAGGNPKAPDTAKNPRGLGLQFQLPNNRFLNMALLNTPVFGVASPEGFYENILAIRPDPTTGKPDPEKVKAFREKYPENKAQAAFLASNNPPTSYANTSYFGLHAFKFINQTNQTRLVRWQFVPQDGEKRLTDAELQAAPANFLEQKLIERTQDSPVKWDFWITLGQPGDAEDNPTIAWPSDRQQVKVGTLTLTAASPQPGAACEGINYDPLVLSDGIEPTNDPVLQFRSGVYALSYSKRTRGL

SEQ ID NO: 29895 - protein, 160 aa, Salmonella enterica
ASLGLWEICIIWGLGISLAVYLTAGISGGHLNPAVTIALWLFACFPKQKVLPYIIAQFAGAFGGALLAYVLYSSLFTEFETAHHMVRGSVESLQLASIFSTYPAAALNVWQAALVEVVITSILMGMIMALTDDGNGIPKGPLAPLLIGILVAVIGASTGP

SEQ ID NO: 29896 - protein, 256 aa, Candida albicans SC5314
MDDKGWRFPTKEELKTLKTEDDISLGTPDHNYDFSRLRELYFKAEPEYEGRFTVPVLWDKKEGTIVNNESAEIIRMLNTEFNSILPSEYAEVDLVPKDLESQIDELNSWIYDNINNGVYKAGFASKQEVYAKECQNVFDHLDKVEAILEKNHNGSKKGEFLLGNQLTEADIRLYTTIIRFDPVYVQHFKCNIGTIRTHYPYIHNWLRLLYWKIPGFQETTNFEHIKYHYTKSHIKINPYGITPLGPVPNILPLEEK

SEQ ID NO: 29897 - protein, 390 aa, Ustilago maydis 521
MSLQRNYLVWGANGVSGIAALRALVEQPKETVGAILAVSRRQPQVDLKDERIKFVSIDILKAPVDEIAEQLRANGGDKVSVALHYTYIEKKDAQELLDVNHVLLSKALDATYAAAGKSLKHFHLQTGYKWYSLHLANKDIASPVPYKEDAPRGPTDPPNFYYDQVDTLVAHAKKHGYAWSETRPNTIIGAAKGNFMNQAVSTSLYLTLEKAKGKTEVEYPGNKLNWDQIFVSQSTAINNARFQVFLTDPGNAAKTENQSFNIEDGDKRTLGQIWQDLGKELGLKILPPTLETKYNEKPPKLSLSLDEWSKRSENVEAWEKLTKEKGGDPKAFADHATFAFADFTLGATFDQQGCLDKAREAGWHVVCDTVKDGYLDTYYYLQQIGTLPQL

SEQ ID NO: 29898 - protein, 111 aa, Mesembryanthemum crystallinum
LIFAGKQLEDGRTLADYNIQKESTLHLVLRLRGGMQIFVKTLTGKTITLEVESSDTIDNVKAKIQDKEGIPPDQQRLIFAGKQLEDGRTLADYNIQKESTLHLVLRLRGGF

SEQ ID NO: 29899 - protein, 163 aa, Brassica napus
MAESGGRRIGVAVDFSECSKKALNWAIDNVVRDGDYLILITVAPNMNYEEGEMQLWETVGSPLIPLSEVSEASVMKKYGVKPDAETLDIANTAARQKSITVVMKIYWGDPREKICEAVEHIPLSSLVIGNRGLGGLKRMIMGSVSNHVVNNVACPVTVVKAHH

SEQ ID NO: 29900 - protein, 484 aa, Shigella flexneri 2a str. 301
MYIGIDLGTSGVKVILLNEQGEVVASQTEKLTVSRPHPLWSEQDPEQWWQATDRAMKALGDQHSLQDVKALGIAGQMHGATLLDAQQRVLRPAILWNDGRCAQECTLLEARVPQSRVITGNLMMPGFTAPKLLWVQRHEPEIFRQIDKVLLPKDYLRLRMTGEFASDMSDAAGTMWLDVAKRDWSDVMLQACDLSRDQMPALYEGSEITGALLPEVAKAWGMATVPVVAGGGDNAAGAVGVGMVDANQAMLSLGTSGVYFAVSEGFLSKPESAVHSFCHALPQRWHLMSVMLSAASCLDWAAKLTGLCNVPALIAAAQQADESAEPVWFLPYLSGERTPHNNPQAKGVFFGLTHQHGPNELARAVLEGVGYALADGMDVVHACGIKPQSVTLIGGGARSEYWRQMLADISGQQLDYRTGGDVGPALGAARLAQIAANPEKSLIELLPQLPLEQSHLPDAQRYAAYQPRRETFRRLYQQLLPLMA

SEQ ID NO: 29901 - protein, 461 aa, Corynebacterium glutamicum ATCC 13032
MAQQSIIDTVVNLCKRRGLVYPCGEIYGGTRSAWDYGPLGVELKENIKRQWWRSMVTSRPDVVGVDTSVILPRQVWVTSGHVEVFTDPLVESLNTHKRYRADHLLEQYEEKHGHPPVNGLADINDPETGQPGNWTEPKAFSGLLKTFLGPVDDEEGLHYLRPETAQGIFVNFKNVMNTSRMKPPFGIANIGKSFRNEITPGNFIFRTREFEQMEMEFFVKPGEDEEWHQHWIDTRLQWYINLGIKPENLRLYEHPQEKLSHYSKRTVDIEYAFNFANTKWGELEGIANRTDYDLRVHSEGSGEDLSFFDQETNERWIPFVIEPAAGLGRAMMMFLMDAYHEDEAPNSKGGVDKRVVLKLDRRLAPVKVAVLPLSKKDTLTPLAEKLAAELREFWNVDYDTSGAIGRRYRRQDEIGTPFCVTVDFDSLEDNAVTVRERDTMEQVRVPLDELQGYLAQRLIGC

SEQ ID NO: 29902 - protein, 102 aa, Brassica napus
  misc_feature (3)..(3): Xaa can be any naturally occurring amino acid
  misc_feature (18)..(18): Xaa can be any naturally occurring amino acid
  misc_feature (21)..(21): Xaa can be any naturally occurring amino acid
  unsure (1)..(102): unsure at all Xaa locations
FAXAMEGPQMWAAGWQKXFAXVGPNVVWWIAAQSVFYHLYNQVSYMSLDQISPLTFSIGNTMKRISVIVSSIIIFHTPVRAVNALGAAIAILGTFLYSQAKA

SEQ ID NO: 29903 - protein, 280 aa, Glycine max
MERSNPVRKPHTSTADLLTWPETPISDSPAPPSSAVRSHQPSDGIRKVVFGGQVTDEEVESLNKRKPCSDYKMKEITGSGIFVANGEDDASEAGSDNPNKTGVRMYQQAISGISHISFGEEESVSPKKPTTLPEVAKQRELSGTLESEDSILKKQLSDAKCKELSGHDIFAPPPEIKPRPITPRILELKGSIDIADGDQGDTNSAGKTAKKIYDKKFAELSGNDIFKGDAPPSSAEKSLSGAKLREMSGSNIFADGKVEARDYLGGVRKPPGGESSIALV

SEQ ID NO: 29904 - protein, 690 aa, Nicotiana tabacum
MQDFIGSVRRSLVFKQSGDFDTGAAGVGSGFGGFVEKLGSSIRKSSIGIFSKAHVPALPSISKAELPAKARKDDTPPIRWRKGEMIGCGAFGRVYMGMNVDSGELLAIKEVSIAMNGASRERAQAHVRELEEEVNLLKNLSHPNIVRYLGTAREAGSLNILLEFVPGGSISSLLGKFGSFPESVIRMYTKQLLLGLEYLHKNGIMHRDIKGANILVDNKGCIKLADFGASKKVVELATMTGAKSMKGTPYWMAPEVILQTGHSFSADIWSVGCTIIEMATGKPPWSQQYQEVAALFHIGTTKSHPPIPEHLSAESKDFLLKCLQKEPHLRHSASNLLQHPFVTAEHQEARPFLRSSFMGNPENMAAQRMDVRTSIIPDMRASCNGLKDVCGVSAVRCSTVYPENSLGKESLWKLGNSDDDMCQMDNDDFMFGASVKCSSDLHSPANYKSFNPMCEPDNDWPCKFDESPELTKSQANLHYDQATIKPTNNPIMSYKEDLAFTFPSGQSAAEDDDELTESKIRAFLDEKAMDLKKLQTPLYEGFYNSLNVSSTPSPVGTGNKENVPSNINLPPKSRSPKRMLSRRLSTAIEGACAPSPVTHSKRISNIGGLNGEAIQEAQLPRHNEWKDLLGSQREAVNSSFSERQRRWKEELDEELQRKREIMRQAVNLSPPKDPILNRCRSKSRFASPGR

SEQ ID NO: 29905 - protein, 391 aa, Hordeum vulgare subsp. vulgare
MTRSRPTTTMGGSVPDQHHQQQQHDGEVDGGQLQHGGEHVETVMPGFRFHPTEEELIEFYLRRKVDGKRFNIDLIASVDLYRYDPWDLPALASIGDKEWFFYVPRDRKYRNGDRPNRVTPSGYWKATGADRMVKVVEGNRSIGLKKTLVFYVGKAPKGLRSSWIMNEYRLPHGETERYQKEISLCRVYKRPGIDDNLHLTGTTTRSSGSRAAATRHSTAAHRTSAVATHRQQPPVFVEGAGHHSSSALKAYNAHTTQGTNAASTMTSLSAAGVTPPAMFRSTASVASLSSTNSTEEDGTSLYHHHLKGHNNPAVMQLHSSTHAALLNTNSSAMATIPIDELSRAIGSYSQASNPNQPTAPMQGPLLNFPSLEKIWDWNPLLESPKVCTSFK

SEQ ID NO: 29906 - protein, 429 aa, Listeria monocytogenes EGD-e
MQNYSKSEKAFKEAKKVLPGGVNSPVRAFNSVDASPVFMDHGKGAYITDVDGNEYIDYVLSWGPLILGHTDPAVVNAITKAALKGTSFGTPTEIETELAKLVIERVPSIEIVRMVSSGTEATMSAIRLARGYTKREKILKFEGSYHGHGDSLLIKAGSGVATLGLPDSPGVTKGLAADTITVPYNDIEGAKLAFEKYGEEIAAVIVEPVAGNMGVVPPIEGFLEGLRELTTKFGSLLIFDEVMTGFRVDYYSAQGYYVVTPDLTCLGKVIGGGLPVGAYGGKKEIMEQIAPAGSIYQAGTLSGNPLAMNAGFETVRQLTPQHYDVFRTLIKRMEEGLTEISARRQVPLSINKAGSMFGFFFTDQKVINFDTAKTSNLEFFRNYYREMLGQGIFLPPSQFEGVFISTMHTENEIDKTLEAFDTTCKILRG

SEQ ID NO: 29907 - protein, 240 aa, Listeria monocytogenes EGD-e
MSKKVVLTREASKNKPWQTYFSQNGYEVMSIPLIKTQPIKINLTREQQETDWLFLTSANAVEYFFTNQYERSNYKIAVIGEKTKEKLAEFGHEPSFVPSIYQSEVFLEEWLNENPEKTSILLPQSNLSRTIIKDTLIEKGYIVFSIELYETIFPEASKKLLTEQLKLNETQIIVFASPSAWKNFYSIAKSFPAQKEKWHIASIGSITTEAILADGWEVKYQPKTFTMKHLADLIIQEELK

SEQ ID NO: 29908 - protein, 109 aa, Glycine max
KRLVSSVDRLKDTFCRQHALDLIFTEEGDSHLTADMYINMDGNAEVEWTPSSIFQWKSCLFVKLNRMANIAADMFVGRERFATLLLMRLTETVMLWLSEDQSFWDDIEE

SEQ ID NO: 29909 - protein, 253 aa, Lycopersicon esculentum
MASTQLTASSISGNGFASFEGLRSTCIVKTVSFAPLKHNNSRSFSRLVVKAATTVAPKYTTLKPLGDRVLVKIKTAEEKTVGGILLPVSVQSKPNGGEVVAVGEGHSAGKTKVDISVKTGAQVIYSKYAGTEVEFDGSKHLILKEDDIVGILETDDVKDLQPLNDRVLIKVAEAEEKTAGGLLLTEAAKEKPSIGTIIAVGPGPLDEEGNRKPLSVSPGNTVLYSKYAGSEFKGADGSDYITLRVSDVMAVLS

SEQ ID NO: 29910 - protein, 155 aa, Salmonella enterica
ASLGLWEICIIWGLGISLAVYLTAGISGGHLNPAVTIALWLFACFPKQKVLPYIIAQFAGAFGGALLAYVLYSSLFTEFETAHHMVRGSVESLQLASIFSTYPAAALNVWQAALVEVVITSILMGMIMALTDDGNGIPKGPLAPLLIGILVAVIG

SEQ ID NO: 29911 - protein, 159 aa, Streptococcus suis 89/1591
MSIYDFTVQKQDGTDQSMAEYQGQVLLIVNTAPGCGLAPQYKELQELYDSYRGQGFVVLDFPCNQFLNPAPGSAEDINQTCSLNYGTTFPRFAKIAVNGSEASPLYRYLKKEKSTLLGGRIEWNFTKFLVDRQGRVVKRYLPTTSPLKLKEDIELYLEK

SEQ ID NO: 29912 - protein, 195 aa, Streptococcus thermophilus CNRZ1066
MGNNVDKPTGQSLFLAAITILIILLVNIFTKGFIKSISILIGLIIGTVIAASMGLVDFSPVAAAPVVHVPTSFYFGMPKFELSSIIMMCIIATVSMVESTGVYLALSDITKDPIDSTRLRNGYRAEGMAVLLGGLFNTFSYTGFSQNVGLVKLSGIKKRLPIYYTAGFLVLLGLLPKFGALAQIIPSPQYLVVLC

SEQ ID NO: 29913 - protein, 386 aa, Solibacter usitatus Ellin6076
MARLLQRSQLPHAVQQSRAREHAAIPSHALTRMLNWLLIFVPVAIGLEFFTPGQHTLIFITACLAVIPLAGWLGHATEELARYTGEGAGGLLNATFGNAAELIIAFMAIRKGLYSVVKASLTGSIIGNILLVLGAAVLAGGLKHKHQRFNVTGARAQATLLTLAAIALVMPAAFHALAGPPNIVKEDGLSLAIACVLLIAYGLHLLFSLRTHKQLFEGEPEHQEEPEPAAWSLKRALLTLAGATLVIAWVSEILVGSVEQTAAAFGMTKVFIGVIVVAIVGNAAEHSSAVMLALKNRMELAMGIAVGSSLQIALFVAPLLVIVSHFIGPRPMDLMFTPAEVLAIFLAVLITGQISSDGESNWIEGVQLLAVYVIMAIVFFFLPEAG

SEQ ID NO: 29914 - protein, 150 aa, Salmonella enterica
GLGISLAVYLTAGISGGHLNPAVTIALWLFACFPKQKVLPYIIAQFAGAFGGALLAYVLYSSLFTEFETAHHMVRGSVESLQLASIFSTYPAAALNVWQAALVEVVITSILMGMIMALTDDGNGIPKGPLAPLLIGILVAVIGASTGPLT

SEQ ID NO: 29915 - protein, 320 aa, Streptococcus suis 89/1591
MGLLQDGKWVDQWYDTKSTGGKFVRTVTQFRNWITPDGQAGPTGRGGFKAESGRYHLYISLACPWASRTLIMRKLKGLEDHISLSIVHPLMLENGWTFADGPGVIKDSLFNSNYLYQVYLKTDPNYTGRVTVPVLWDKETNTIVSNESAEIMRMFNSAFNDITGNYDDYYPANLQAEIDAMNDFIYPNINNGVYKAGFSTSQAVYEKEVKNLFAALDKLEEHLADKNYLVGNQLTEADIRFFTTLVRFDPVYFGHFKCNIKALVDYPNLWDYTKRIYNHSGIAETVDFDHIKQHYYGSHKTINPTGIVPVGPDLDWTLEN

SEQ ID NO: 29916 - protein, 277 aa, Zea mays
RELWISPGNLRSERSEGSLVLLLKMQIFVKTLTGKTITLEVESSDTIDNVKAKIQDKEGIPPDQQRLIFAGKQLEDGRTLADYNIQKESTLHLVLRLRGGMQIFVKTLTGKTITLEVESSDTIDNVKAKIQDKEGIPPDQQRLIFAGKQLEDGRTLADYNIQKESTLHLVLRLRGGMQIFVKTLTGKTITLEVESSDTIDNVKAKIQDKEGIPPDQQRLIFAGKQLEDGRTLADYNIQKESTLHLVLRLRGGMQIFVKTLTGKTITLEVESLDTSTR

SEQ ID NO: 29917 - protein, 462 aa, Zea mays
MPSYAHHHSSPLVRNGAGRVVRRRLRGTERDSLDVFLCFLYLYREINKKKNPETKKLFFLNRPASPLVLGICDFDIRPVWVFFRPVKDDTRMDALKCNNNCAPPEETAEDADAAGALVEKDGFSVEDLLDLEEFGEPDKDGAEHEDDDAPPVPAAAEERSKDDSQPLSVVTYDLPSPPPEMVDLPSHDVEELEWVSRIMDDSLSELPPQAQPPPAVVASLAGRPPLAQQRRPFAHDGAYRAVAPPPGPLRTPTICALSTEAMIPVKAKRSKRSRGPAWWRSGAPFLSDSASSSSTTTTSSCSSSGSFSPFLRLDSPPFGGLELGEGYYGHLLPRPPSKKSKHGAKGSKHKPKKRGRKPKHLPTNSSGAGAAASQPGPSDRRCSHCGVQKTPQWRAGPEGAKTLCNACGVRYKSGRLLPEYRPACSPTFVSSIHSNSHRKVLEMRRKKEGDMVATAAPAVASF

SEQ ID NO: 29918 - protein, 223 aa, Glycine max
SVLGVGCYSKLQSDALREAISGIMTDSKEKNRKFVETIELQIGLKNYDPQKDKRFSGSVKLPHIPRPKMKICMLGDAQHVEEAEKIGLDYMDVEALKKLNKNKKLVKKLAKKYHAFLASEAVIKQIPRLLGPGLNKAGKFPTLVTHQESLESKVNETKAMVKFQLKKVLCMGVAVGNVSMEEKQIFQNVQLSVNFLVSLLKKNWQNVRCLYLKSTMGKSYRVF

SEQ ID NO: 29919 - protein, 49 aa, Ilex perado
WEFQVGPSVGIEAADHIWCARYLLERITEQAGVVLTLDPKPIEGDWNGA

SEQ ID NO: 29920 - protein, 676 aa, Shigella flexneri 2a str. 301
MKLAACFLTLLPGFAVAASWTSPGFPAFSEQGTGTFVSHAQLPKGTRPLTLNFDQQCWQPADAIKLNQMLSLQPCSNTPPQWRLFRDGKYTLQIDTRSGTPTLMISIQNAAEPVANLVRECPKWDGLPLTLDVSATFPEGAAVRDYYSQQIAIVKNGQITLQPAATSNGLLLLERAETDTSAPFDWHNATVYFVLTDRFENGDPSNDQSYGRHKDGMAEIGTFHGGDLRGLTNKLDYLQQLGVNALWISAPFEQIHGWVGGGTKGDFPHYAYHGYYTQDWTNLDANMGNEADLRTLVDSAHQRGIRILFDVVMNHTSYATLADMQEYQFGALYLSGDEVKKTLGERWSDWKPAAGQTWHSFNDYINFSDKTGWDKWWGKNWIRTDIGDYDNPGFDDLTMSLAFLPDIKTESTTASGLPVFYKNKTDTHAKVIEGFTPRDYLTHWLSQWVRDYGIDGFRVDTAKHVELPAWQQLKTEASSALREWKKTNPDKALDDKPFWMTGEAWGHGVMQSDYYRHGFDAMINFDYQEQAAKAVDCLAQMDTTWQQMAEKLQGFNVLSYLSSHDTRLFREGGDKAAELLLLAPGAVQIFYGDESSRPFGPTGSDPLQGTRSDMNWQDVSGKSAANVAHWQKISQFRARHPAIGAGKQTTLSLKQGYGFVREHGDDKVLVIWAGQQ

SEQ ID NO: 29921 - protein, 357 aa, Corynebacterium glutamicum ATCC 13032
MPTNQPTPAQIKRWRGYLANEQAEAAAYRDLAKRREGEERDILLALADAEHRHAAYWVEKLGPDAENPPKADVKTRLLGFLARRFGSVFTLALMQSAETRSPYDDDADASRQISADERIHAEVVRGLASRGRERMSGNFRAAVFGINDGLVSNVALVMGVMATGVPAQIVLITGISGLLSGALSMAAGEYISVRSQTELLDASLPDPKAREALHALDVESNELELVYRARGMSEDEARAKASQVFQRISDQKRISDNVLGSTEIQSAGSARSAATFSFLSFAIGAFLPIVPYVFGMEGLAGAVVSLVLVGLSLMATGATTGLLSGKPPGIRAVRQLSIGYGAALVTYVLGLLFGMIL

SEQ ID NO: 29922 - protein, 179 aa, Triticum aestivum
  misc_feature (114)..(114): Xaa can be any naturally occurring amino acid
  misc_feature (141)..(141): Xaa can be any naturally occurring amino acid
  unsure (1)..(179): unsure at all Xaa locations
MAPAVMASSATTVAPFQGLKSTAGLPVSCRSGSTGLSSVSNGGRIRCMQVWPIEGIKKFETLSYLPPLSTEALLKQVDYLIRSKWVPCLEFSKVGFVFREHNSSPGYYDGRYWXTMWKLPMFGCTDATQVLNEVEESRRSXPDAYVRVIGFDNIASECVSSMPSGTRLQGIPARPKVQV

SEQ ID NO: 29923 - protein, 307 aa, Debaryomyces hansenii CBS767
MKHNVAALQIGASPLGTKATMEKIMSYESRIKELNVQLVVMPEATIGGYPKGSTFGTYLGYRTQSGREEFAKYHRSAISLPGPETEALLDFSKRTGATLVIGVIEKDGATLYCTMIYIDPEVGYIGKHRKLMPTASERLVWGQGDGSGLITPDNKHLGKLGGAICWENYMPLYRATMYAKGINVYCAPTVDDRDIWKSLMRTIGTEGRLFVISAVQFLPTPEECGLDLPEWEKGKNCINGGSVIVNPYGDIIAGPLTGEEGLLTAEIDLDMIVEARYDLDVTGHYARNDIFKLTVDERPKDGVSFIN

SEQ ID NO: 29924 - protein, 339 aa, Azorhizobium caulinodans
MAARKPSARAEAAPAGVPTFTKEQELLAYREMLLIRRFEEKAGQMYGMGLIGGFCHLYIGQEAVVVGMQMAMKQGDQVITGYRDHGHMLATGMESRGVMAELTGRKGGYSKGKGGSMHMFSIEKQFFGGHGIVGCAGVAGHRPRLREPLSAENGSVSVTYFGDGAANQGQVYESFNMAELWKLPVVYVIENNKYAMGSAVSRASAQTDFSKRGQSFNIPGEQVDGMDSAQPVKAAGERALEFARSGKGPYILEMQTYRYRGHSMSDPAKYRSKEEVQKMRTEHDPIEQVRNRLLEAGLVTEDELKKVDAEIRDIVNDAADFATHDPEPDPSELYTDIVR

SEQ ID NO: 29925 - protein, 549 aa, Methylococcus capsulatus str. Bath
MGTVEPGAIGQHLLACLYQAGVGHIFGVPGDYVLGFYDLMAKGPVRHIGTTREDTAAFAADGYARCRGMGALAVTYGVGALNTVNAVAGAYAESSPVVVISGAPGVREQREDPLIHHRFGPFRFQREIFERITCAAVVLDDPVIAFRQVERALAAARQHCKPVYIEIPADRVMAPGYPIPQETPETPSSDDSALAEAVAEAAELLGRAVSPVILAGVELHRRGLQDALVGLVEQARLPVAATLTGKSVFAERHPAYLGVYEGAMSTENARYMVEQSDLLLMLGVTLNDVDTGIYTARLDPQRIVRAAQNEVVIRHHRYPRVLLADFVTALARSVKARGEAFPMPAGPEPWDFPAPDRPMTIARLVERLDRALTSDMIVVCDVGDCLFAATDLRVHERSEFLASAFYTSMGFAVPAALGAQIARPDHRALILVGDGAFQMTGTELSTHARLGLAPIVVVLDNRGYSTERFILDGAFNDIADWRFHRLGEVFGPLQGYDAPDEAAFENALSEALVNRNMPSLINVRLSPGDASIAMKRLAGHLQCRVKGEG

SEQ ID NO: 29926 - protein, 208 aa, Ralstonia metallidurans CH34
MSRQRTLESVQRTALAGALTLAAAVAVMLPPPAHAAEKAVPAAAQPAGNCPASLNFRFPRLQDESPQNLCQYAGKVVLVVNTASYCGFTPQYEGLEALYAKYRERGLVVLGFPSNDFSQEPGSSKDIADFCYNTYGVKFPMLGKSHVRGSDANPMYALLAQETGTAPKWNFYKYLIDRKGQVIGSYNSMVKPDDKQFVSKIEELLNAR

SEQ ID NO: 29927 - protein, 520 aa, Arabidopsis thaliana
MASVSAIGVLKVPPASTSNSTGKATEAVPTRTLSFSSSVTSSDDKISLKSTVSRLCKSVVRRNPIIVSPKAVSDSQNSQTCLDPDASSSVLGIILGGGAGTRLYPLTKKRAKPAVPLGANYRLIDIPVSNCLNSNISKIYVLTQFNSASLNRHLSRAYASNMGGYKNEGFVEVLAAQQSPENPNWFQGTADAVRQYLWLFEEHNVLEYLILAGDHLYRMDYEKFIQAHRETDADITVAALPMDEQRATAFGLMKIDEEGRIIEFAEKPKGEHLKAMKVDTTILGLDDQRAKEMPFIASMGIYVVSRDVMLDLLRNQFPGANDFGSEVIPGATSLGLRVQAYLYDGYWEDIGTIEAFYNANLGITKKPVPDFSFYDRSAPIYTQPRYLPPSKMLDADVTDSVIGEGCVIKNCKIHHSVVGLRSCISEGAIIEDSLLMGADYYETATEKSLLSAKGSVPIGIGKNSHIKRAIIDKNARIGDNVKIINSDNVQEAARETDGYFIKSGIVTVIKDALIPTGTVI

SEQ ID NO: 29928 - protein, 220 aa, Ehrlichia ruminantium str. Welgevonden
MKIFLDTIDISFLEEFCISGLIDGVTTNPSLFSKSELKCSDLIFKLCSLIKGPVSIEVISTSYKDMISEALEISKIAENVVIKLPLTYDGLIACRILSNEHNLKVNVTLCFSPAQAILAAKSGAYFISPFVGRLDDIGQIGMELIKDIREIYSKYHSFNTQILVASIRHPMHVVQAAKIGADIVTISPSIFKQMFVHPLTNKGLEDFLRNWSESGKKMFS

SEQ ID NO: 29929 - protein, 329 aa, Acinetobacter sp. ADP1
MTQSALDQLKKLTTVVADSSDIEAIRKFLPLDATTNPSLITAAASIPENKALIEDAFNQAHQEGYENDLLIERTIDILTVKFGVEILKLIQGRVSTEVDASLSYNTEATIEKARELSKLYKEYGIDQSRILIKIASTWQGIQAAKVLEAEGIPCNLTLLFGLHQAQACADAKVTLISPFVGRILDWYKKAENVDHYPIEKDPGVVSVKKIFTYYKQQGTPTQVMGASFRSIDQVLGLAGSDLLTISPALLSELEQDHRTVEATLTIEEAKQAEIIHRAAQTEQSFKDELEHDLMAFQLLQSGIDGFIKAREQLSTLLRQSYGIDAEIQP

SEQ ID NO: 29930 - protein, 939 aa, Marinomonas mediterranea
MLALNSVSLRSKLFFAIYTPCLILSIIASFAFTLSRFDTIDRNFKEGVEKSVSQMTVSAEHALSHSDEGMLNDTLRTLLKHDHINTVQLYNAEEKLITELGKTSEGNTLPFTNANESDENPHFFATIAPIKHPVTRLEHQSNTNFITSSYSVPQVSGWLKVEASKEASIVSKYRYLSATLGTFFIFNLLAIFALLNVTASLLRPIEKISDTVNKITQGHFGATKGLNLPTQYSTVVSDLNDISSRLENHRAEILSNVDQATEDIRRNMDSLEEKSAQLHIANKEATESNRLKSQFLANISHEIRTPLNAIMGYIQILQKDQLDKQQRLYMDTIAQSTTNLLTIISDILDFSKIEAGKLSLDLTDINIRDIVDEVYQILSSANLVNASKELDLIPEFDLDVPTWVIGDPVRIRQVLTNLIGNAIKFTHEGSVRTTVKILEKSNSSLKLSFQIIDTGVGIPENKLDNLFKPFSQVDTSTTRKFGGTGLGLVITKKLVKQMGGNVEVSSEHGIGSNFRFTIVLKPSQKEQKVEDPISKSLLVFEPSLNYRNYLKTYLNHVGANCTFTSSLEQTVTLLNSQTSLDAVLLNIDSHTEKLEEIQELVAYITQQFRLPCILLTKRPHDISKSSILHTLCSEILMTPISHNRLNKSLRSLEEPKLLSEDRLYADETTTTELTTELELEAVEPPEETSPLSGIQILAVDDTQINLQLLGHWLEPHGLQVDLAYSGKQAIEMAKETQYDLILMDIQMPEMDGMEATQRLRKLTNYVHTPIVALTAHALGSEQKQIVSSGMNAYLTKPVNEDILLETITQWCQSKKSYQDLADEKVVALFDIDKALSIANGKSVIAKDMFDMLLNTLEADKKLILHHFEEKDLAKLIHVVHRLHGGSKYTGAIELSKHAGFLETHLKELQFDDVEGVLEDFTDSIDALIDIAPLIKWPQE

SEQ ID NO: 29931 - protein, 80 aa, Mesembryanthemum crystallinum
MSCCGGNCGCGSACKCGNGCGGCKMYPDMAENGASSTATLVTGVAPKISYFDNGSEMGVGAENDGCKCGSDCKCDPCTCK

SEQ ID NO: 29932 - protein, 180 aa, Helianthus annuus
MATQTVFDFPDDVLQQPPMPADNAFSDKDVKGQDVELSKYKGKVLLIVNVASQCGFTNSNYPELTTLYQKYKDQGFEILAFPCNQFGGQEPGSNEEIQVFACTRFKAEYPVFSKVNVNGKEADPLYKFLKSSKGGFLGDSIKWNFTKFLVDREGKVVDRYAPTTSPLSIEKDIKKLLNVA

SEQ ID NO: 29933 - protein, 445 aa, Zea mays
  misc_feature (388)..(388): Xaa can be any naturally occurring amino acid
  misc_feature (398)..(398): Xaa can be any naturally occurring amino acid
  unsure (1)..(445): unsure at all Xaa locations
MATRNHRAAAAPQPANRGAARVAGKQKAAAAGTRRALGDIGNVVSDALDRAIKLPEGIHRPITRSFGAQLMKAALANKNADAAVAPAQPVAARAVTKPARKVTTKNVPRPGAGQAPKENKKPSAEGAAAGSGRSVQKNRRKKPACTLSTVLSARSKAACGLTEKPKEPIEDIDKFDGDNQLALVDYVEDIYTFYKTAQHESRPIDYMGNQPELSPRMRSILADWLIESHRRFQLMPETLYLTIYIVDRYLSLQPTPRRELQLVGVAALLIACKYEEIWAPEVNDLIHIADGAFNRSQILAAEKAILNSMEWNLTVPTPYHFLLRFAKAAGSADEQLQHTINFFGELALMDYGMVMTNPSTAAACAVYAARLTLGRSPLWTETLKHHTXPQRAADHGRXAKTLVGSHAASASPDARLKAVYQKYATEQFGRVALHPPAPTALPDLV

SEQ ID NO: 29934 - protein, 449 aa, Streptococcus thermophilus CNRZ1066
MHETHSLRERFLVFFKIFVPILIYQFANFSAAFVDTTMTGQYDALHLAGVAMATGLWSPFFTFLTGIVSALVPIIGHHLGAGRKDRVAPDFYQFLYMALGLSLILFALVFLGAPLVLGHLGLEPVVRKVALGYLRFLSLGIIPLLLFSVVRSFLDALGLTRLSMYLMLLLLPLNGFFNFLLIYGIAGLPELGGAGAGLGTSLAYWALFFISIAVIRKHKKVKPYQIEKIQPLDKTALLDALKLGLPIGGTVFAEVSIFSGVGLVMAKYPSLVIASHQAAMNFSNLTYAFPLSVSSAMAIIISYEFGAKRMDAVKSYSKLGRLTALVFAGFTLFFLYFLRYDLAELYGHEPEFLRMTTVFMTYSLFFQVSDAFAAPLQGILRGYKDTKVPFYLGVLSYWGLTFPVGYLLEKVTGLGPYSYWIGLIASLIVSGLCYQWRLNRIVKRYESHH

SEQ ID NO: 29935 - protein, 166 aa, Salmonella enterica
LAASLGLWEICIIWGLGISLAVYLTPGISGGHLNPAVTIALWLFACFPKQKVLPYIIAQFAGAFGGALLAYVLYSSLFTEFETAHHMVRGSVESLQLASIFSTYPAAALNVWQAALVEVVITSILMGMIMALTDDGNGIPKGPLAPLLIGILVAVIGASTGPLTGF

SEQ ID NO: 29936 - protein, 340 aa, Streptococcus thermophilus CNRZ1066
MRNIPKSVTLKAWRCKYLVKGVLKMSNPNNHVIYLAGGCFWGVEEYFSRVPGVLDAVSGYANGSSETTRYELISQTGHAETVQVTYDAGKVTLREILLHFFRIINPLSKNKQGNDVGTQYRTGVYYTDVNDLPIIEKVFQEMSEQYGQPLAVELLPLQHFIPAEEYHQDYLKKNPNGYCHINVNQAVNPVIDSSSYHKPSQEELKVSLSPEAYAVTQENRTERAFTSPLWNHFEPGIYVDVVTGEPLFSSRDKFYSACGWPSFSRPISPEVANYKEDHSHNMDRIEVRSRVGDSHLGHVFPDGPSDKGGLRYCINGVATRFVPKADMEKEGYAYLLDQVD

SEQ ID NO: 29937 - protein, 373 aa, Petunia x hybrida
MPLHLRCSATVCVTGAAGFIGSWLVMRLLERGYNVHATVRDPENKKKVKHLLELPKADTNLTLWKADLTVEGSFDEAIQGCQGVFHVATPMDFESKDPENEVIKPTVRGMLSIIESCAKANTVKRLVFTSSAGTLDVQEQQKLFYDQTSWSDLDFIYAKKMTGWMYFASKILAEKAAMEEAKKKNIDFISIIPPLVVGPFITPTFPPSLITALSLITGNEAHYCIIKQGQYVHLDDLCEAHIFLYEHPKADGRFICSSHHAIIYDVAKMVREKWPEYYVPTEFKGIDKDLPVVSFSSKKLTDMGFQFKYTLEDMYKGAIDTCRQKQLLPFSPRSAEDNGHNREAIAISAQNYASGKENAPVANHTEMLSNVEV

SEQ ID NO: 29938 - protein, 193 aa, Brassica oleracea
MQDQLVCHGCRNTLMYPRGATNVRCALCHIVNMVPLHPHPPPPPPPHHAHAGMDMAHIVCGGCRTMLMYTRGASSVRCSCCQTVNLVPGPPPSNQVAHINCGNCRTTLMYPYGASSVKCAVCQFVTNVNMSNGRVPLASNRPNGTAAPGTMPSTSTSTPPSQTQTVVVENPMSVNESGKLVSNVVVGVTTGQK

SEQ ID NO: 29939 - protein, 342 aa, Oryza sativa
MDRKKAGVPLVCHGHSRPVVDLFYSPVTPDGCFLISASKDSNPMIRNGDTGDWIGTFEGHKGAVWSCCLDTNALRAASGSADFSAKVWDALTGEELHSFEHKHIVRACAFSEDTHLLLTGGLEKILRIYDINRPDAAPREIDKSPGSVRTVAWLHSDQSILSCCTDMGGVRLWDVRSGKIAQTLETKATVTSAEVSQDGRYIITADGSSVKFWDANYFGLVKSYNMPCNVESASLEPKYGNKFIAGGEDMWVHVFDFFTGEEITCNKGHHGPVHCVRFAPGGESYASGSEDGTIRIWQLGPATSDEQESPPNANGKLKVNTVSDAARKIEGFHLPKDGQTEG

SEQ ID NO: 29940 - protein, 364 aa, Pichia angusta
MKGLILVGGYGTRLRPLTLSLPKPLVEFGNRPMILHQIEALANAGCTDIVLAVNYKPEVMVGALKQYEKEYGVSITFSVEEEPLGTAGPLKLAEKILKKDNTPIFVLNSDVICEYPLRDLLEFHTAHGGEATIVATKVDEPSKYGVIVHDRDVPNLIERFVEKPVEFVGNRINAGIYVLNPSVIDLIEMRPTSIEHETFPILVEQKKLYSFDLPGYWMDVGQPKDFLSGMCLYLSALTKKNSNLLTSTSEEYVNGGNVLIDPSAKIGKGCKIGPNVVIGPNCIIGDGVRIQRSTILKNSQIKDHAWVKSTIVGWNSTVGKWARLEGVTVLGEDVTVKDEVYVNGGKVLPHKSIKDNVETPQIIM

SEQ ID NO: 29941 - protein, 49 aa, Ilex perado
  misc_feature (12)..(12): Xaa can be any naturally occurring amino acid
  unsure (1)..(49): unsure at all Xaa locations
WEFQVGPSVGIXAADHIWCARYLLERITEQAGVVLTLDPKPIEGDWNGA

SEQ ID NO: 29942 - protein, 404 aa, Solibacter usitatus Ellin6076
MKAVVYKGKNKVAVEEVSNPKIEAPGDVIVKITTAAICGSDLHMYEQRSNAEPGTVFGHENQGVVEEVGNGVVSIKRGDRVVLPFNIACGFCFNCARGYTNACLTANPEAPTAGYGYAGMGPYRGGQAEFLRVPFADFNCLKLPGQPGDQFEDDFVLLADIFPTGWHAAELANVKGGDSVAVFGAGPVGLLSAYSAFIKGASEVYVVDRAPDRLARAKSIGAIAVDFTQGDPVEQIKELRSKNRAHSQALRPGEEKMAGVNCAIDAVGYQARSQSDPDREDPMQTIRQITDIVNPTGSVGLIGVYFDEDPGGVDKHAKKGEFLFPLGKLWSKGITIGQGQAPVKKYNVYLRDLIIAGKAKPSFIVSHRLPLARAEEAYAHFDHRGVGSGKDWTKVLLKPEMKAA

SEQ ID NO: 29943 - protein, 400 aa, Arxula adeninivorans
  misc_feature (380)..(380): Xaa can be any naturally occurring amino acid
  unsure (1)..(400): unsure at all Xaa locations
MADFIRTQIFGTCFEITSRYVDLNPVGMGAFGLVCSARDQLTNQNVAIKKIMKPFSTPVLAKRTYRELKLLKHLRHENLITLSDIFISPLEDIYFVTELLGTDLHRLLTSRPLEHQFIQYFLYQILRGLKYVHSAGVVHRDLKPSNILINENCDLKICDFGLARIQDPQMTGYVSTRYYRAPEIMLTWQKYDVEVDIWSAGCIFAEMLRGKPLFPGKDHVHQFSIITELLGNPPDDVIETIGSENTLNFVKSLPKRERIPLSQKFPNADPDAVDLLEKMLVFDPRKRINAADALAHPYLAPYHEPSDEPVASEKFDWSFNDADLPVDTWKVMMYSEILDFHNVDSSAVEQQQQQPQPPQPQLQQQQQPPQQPQQPQQPQXAQQPVQPVQGDYVPQVAPRS

SEQ ID NO: 29944 - protein, 356 aa, Legionella pneumophila str. Lens
MKIIIKVGTQSILSVDGSPIYSVLNNLVNQIIYLKNLGHQVILVSSGAVGSGRKIAKNSLGKTYGDTVGEKQLLASIGQPELMNLYSSLFKNENILVSQLLLTKQDFHTRQHYLNIARLLTELLKHQNIIPIVNENDSVAIEELMFTDNDELAGLIAAQINADYLILLTNVDGVFTSHPNDPESKLINTIDPNSGWPNVSVVKSKLGRGGMVSKLDTARKMAGLGINTVIANVNVESIVPKILNREAVGTIILASKRKSSIKRWIAFSHRTSLPSIVINDNLITLLRSGNRVMSILPIGIEDFRGECKKGDLIDILNSNNEKIGVGIARYDFLRLKDYLRLQNKPAFIHYDQLHIL

SEQ ID NO: 29945 - protein, 289 aa, Arabidopsis thaliana
MLNSITLTRKPPLPFNSVGFSGNHSSSFCRRTITEGSSSKALSFGYKNVGSLKCGRSNWPGRSGTAFGHLVRVSAVSGGNSGGSGGLGGSGGGGNGGSGGGGGDGSDGKGKKRSLLSWYQALLSNSPVLTKAVTAALLNLVGDLICQLTINKTSSLDKKRTLTFTFLGLGLVGPTLHFWYLYLSKVVTASGLSGAVIRLLLDQFVFAPIFVGVFLSAVVTLEGKPSNVIPKLQQEWTGAMIANWQLWIPFQFLNFRFVPQNYQVLASNVVALAWNVILSFKAHKEVVAK

SEQ ID NO: 29946 - protein, 430 aa, Desulfotalea psychrophila LSv54
MESLKSKKLFAEAKKVIPGGVNSPVRACLSVGCDPLFIERAEGSYIYDADGQKYLDFVNSWGPMIMGHAHPDIIKAIQDAAVYGTSYGAPTSSEVDLASMVVEAVPSIEKVRFVSSGTEATMSAVRLARGYTGKNVIVKFDGCYHGHADSFLVKAGSGVLTLGIPGSPGVPEDIVKNTISIPYNSVEALETTLRDADLNIACVIVEPVAGNMGCVPPAPGFLQKLREITAEEGIVLIFDEVITGFRLSYGGAQQYYGVTPDLTCLGKIIGGGLPVGAYGGKADIMNSVAPDGPVYQAGTLSGNPLAMAAGKAALKLLQQDGFYEDLNQKSAAYADGLLEVAGRVGLPMQLNRVGSVMTSFFTATPVTDFETAMKADTGLYGRHYRQMLDSGIYLAPSQFECSFMSSTHSDADLKRALLETEKSFSLLKNA

SEQ ID NO: 29947 - protein, 72 aa, Brassica napus
IISQLRYRIFSGNFFVNLLGQGNQSEYNGQSNPVSGLAYVNTGRKGFSDMEAHPFHALFYSVFMHTCLCSFR

SEQ ID NO: 29948 - protein, 417 aa, Legionella pneumophila str. Lens
MNTDIANQLRAAKKATTDLNLIQSDTRTIILETLAANLEKHIENIIQENQKDLSLMLEQDPRYDRLLLNKERILSLANDVRKVASLPNPLGVSLLEKSMPNGLSIKKITVPLGVIAVIYESRPNVTIDIFSLCFKSGNVCILKGGKEAHFTNSYLLLLIKNTLKNFNINTDIVCLLPPERALMTQLLNATGLVDLCIPRGSQNLINFVRDNAKIPVIETGAGIVHTYFDKSGDLGKGKKIINNAKTRRVSVCNALDTLIIHADRLKDLPELVETLSQKHVIIYADQDAYHVLDKNYPEQLLIKAKPQDFGHEFLDYKLAIKTVPNIKAAIGHIQQFSSHHSEAIIAEDESAIDQFLIEVDAAAVYANASTAFTDGGEFGLGAEIGISTQKVHARGPMGLEALTSYKWVIRGTGQIRD

SEQ ID NO: 29949 - protein, 380 aa, Phanerochaete chrysosporium
MAFASSLLALVALAAVTSAAPATTQATCPDGTKVNNAACCAFIPLAQDLQETIFQNDCGEDAHEVIRLTFHDAIAISQSKGPSAGGADGSMLLFPTIEPNFSANNGIDDSVNNLIPFMQKHNTISAGDIVQFTGAVALTNCPGAPQLEFLARRPNKTIPAIDGLIPEPQDSVTSILERFKDAGNFSPFEVVSLLASHSVARADKVDETIDAAPFDTTPFVFDTQIFLEVLLKGVGFPGTRTTRGEVASPLPLTSGSDTGELRLQSDFALARDERTACIWQGFVNEQALMASFKAAMRKLAVLGQHRNTLIDCSDVVPAPKPAVNKPASFPATTGPQDLELSCNTKPFPSLSVDAGAQQTLIPHCSDGDMTCQSVQFNGPA

SEQ ID NO: 29950 - protein, 459 aa, Magnetospirillum magnetotacticum MS-1
MPTRASNRTITEKDVDSVLHPYTNLKRHPEVGPLVITRGKGVRVYDEAGKDYIEGLAGLWCTSLGWGEERLVEAAARQMRTLPFYHLFSHKTHDVGVELCARLLEMAPVPMSKVFLAGSGSEANDTAIKLIHYRSNALGLPHKKKIIAREKAYHGVTVATASLTGLVNNQRSFDLPIPGVLRAGCPHHYRFARQGESEEDFSSRLAAELEALILAEGPDTVAAFFAEPVMGAGGVIVPPAGYFPKIQAVLDRYDILLVVDEVICGFGRTGKMFGTETFGIRPDMMTLAKGLSSGYAPISALMVNERVYGPVAEESGRIGVFGHGYTYGGHPVSAAVALETLNIYAERDILAHIAKVGPVLQEGLGSFRDHPLVGEARGIGLIGALELVADKTSRAPFPPERTMGAKVVARAQDKGVILRAMGDAIAFAPPLIITEAEIGDMLRRFKAALDEAHGALGLG

SEQ ID NO: 29951 - protein, 629 aa, Debaryomyces hansenii CBS767
MSNQSNDIAVKSAGESFGSNNSTDLTEKHLAVRNIRDEEAQAPKEKKFIESDAGDGSRREDQYLHGPKLALCFVAIFLCLFLVALDQTIVATLLTVVGNKFDGFDKIGWLSAGFLLSMAVFAATWGKISIIFGRKITMFIAIILFEAGSLMCALANDMNVLIGGRVLAGVGGGGIQSMVFILISEIVPLEVRPLGMAGLGCTFAVASVLGPLIGGAFTSNVSWRWSFYINLPIGGIAAAFFFWAFNPPKTKGNIREKLKMIDYLGTVLLSAGLVVFLLALTFGAGDQFSWDSAAVICCFVLGGAVLIVFCIWNFKYSKNPIIPPDIVKALGVDASTLMIFGMFGYFMAIVLYVSIYFQVIHGADAWHSGLHLLPIIIPVVLTSISSGILIHKTRFVKPFGLFGAIMGPIGIGLLCLLDVDSSSSRQIGLLIISGISCGFQMQAALISSQISAPKTPGGTILTTTFVNFGRAVGGTIGADLADAVYSAAFQNNFATALSNLNDKLILSELSQINERALVTSTDVIKTLSPGAQHFVKNQVMEAIRNVFYMSLGFSALGLIGCICTTNKRLPKVTGGQMAADEAKEETNEGTTNNNRSSSSLSDKNQDILVDRLNNDNLENVPEQTENRRE

SEQ ID NO: 29952 - protein, 356 aa, Alnus glutinosa
MSLLSDLINLNLSDATDKVIAEYIWIGGSGTDLRSKARTLTGPVNHPSKLPKWNYDGSSTGQAPGEDSEVIYILRQFFKDPFRRGNNILVICDTYTPAGEPIPTNKRHGAAKIFSHPEVVAEVPWYGIEQEYTLLQKDVKWPLGWPVGGYPGPQGPYYCGIGADKAWGRDIVDAHYKACLYAGINISGINGEVMPGQWEFQVGPSVGISAGDEVWAARYILERITEIAGVVLSLDPKPIQGDWNGAGAHTNYSTKSMRNNGGYEIIKKAIEKLGLRHKEHIAAYGEGNERRLTGRHETADINTFKWGVANRGASIRVGRDTEKEGKGYFEDRRPASNMDPYVVTSMIAETTLLWKP

SEQ ID NO: 29953 - protein, 173 aa, Arabidopsis thaliana
MNNKTEMGSSTSGNCSSVSTTGLANSGSESDLRQRDLIDERKRKRKQSNRESARRSRMRKQKHLDDLTAQVTHLRKENAQIVAGIAVTTQHYVTIEAENDILRAQVLELNHRLQSLNEIVDFVESSSSGFGMETGQGLFDGGLFDGVMNPMNLGFYNQPIMASASTAGDVFNC

SEQ ID NO: 29954 - protein, 451 aa, Rubrobacter xylanophilus DSM 9941
MAHSTLLEAVDRRVREAGPLVARIAREVWELAEVSHEEAESARLLMDVLEESGFAVTSRGTAGVPTAFVAEWGSGEPVLGFLPEYDALPGLGNEAVPRREPRKDGKTSGHGCGHNLLGAGLVGTAVALKGVMEERGLPGTLRVYGCAAEETEGAKVYMAREGLFSDLAAALHWHPMAYAGVFNLRLAAMNQLAVEFFGRTAHAGMEPWKGRSALHAAELFAHGINLMREHLEPTARVHYAFQRAGESPNVVPDYARVWLFVRDADRGRVEETTRWVERIAEGAALATRTASKVELRFGMYDLLPNGPLAERMQVHLERVGVPEWTEEEQRFARECQENFGVEARGMAAEVLPLSDEVTLGASSDVGDVSWNAPTMGCTMPAWPQGISAHTWPVVACGGTSIGPKAALHAARVLAGIGAEILTDEELRAAARADFERRTRGRPYVSPLPFGE

SEQ ID NO: 29955 - protein, 615 aa, Corynebacterium glutamicum ATCC 13032
MTSPNTLQEYTEPAKYTIGESETCLTALLDQIKTRPYGVLFSKPANYEWVNVTAKEFQDEVFAVAKGIISVGVEQGDRVALLSNTRYEWAVLDFAIWAAGAVSVPIYSSSSLSQIEWIIEDSGAVLAITETPDHTDLMKNLVIGEDGTPAIKGSPSKLRRILEINSSALETLKFEGRELSDELVWERIHATKAADLASLVYTSGTTGRPKGCELSHYHWLAEVRALITNDIGAIAMPGSRLLTFLPLAHVLARAVHLAFAVTGATQSHWSDFSTLTLELQRSRPNLILGVPRVFEKVRNAAAANAADGGAIKRIMFERAEKAAIEYSMALDTAEGPSKSQVMAHKAFDKLVYSKIRAAVGGDVQYAITGGSAMGQELLHFFRGVGMTIYEGYGLTESAAAAAVDFTDQKIGTVGKPMGGMTIKINEDGEIMLKGEMLFQGYWNNPEATAEALHDGWFNTGDLGELLESGHLVITGRKKDLIVTAGGKNVSPGPMEDIIRAHPLVSQAMVVGDGKPFVGLLVTLDPDMLKRWKLNHNIAESRTVSEIATDPALRAEIQDAVNNANATVSHSEAIKRFYILDRDLTEEADELTPTLKVKRNVVVRRYADAIDHIYNR

SEQ ID NO: 29956 - protein, 464 aa, Trichophyton rubrum
MGKDEKGHINLVVIGHVDSGKSTTTGHLIYKCGGIDQRTIEKFEKEAEELGKKSFKYAWVLDKLKAERERGITIDIALWKFETPKYNVTVIDAPGHRDFIKNMITGTSQADCAILIIAAGTGEFEAGISKDGQTREHRSARLHPWVSKQLIVAINKMDTTNWSETRFKEIIKGSHQLHQERLATDPKGCSIFVPISGFNGDNMIEGFTNCPWYKGWNKETKAGGAKTGKTLLEAIDAIDMPTRPTDKPLRLPLQDVYKISGIGTVPVGRVETGIIKPGMVVTFAPANVTTEVKSVEMHHQQLQQGVPGDNVGFNVKNVSVKEVRRGNVAGDSKNDPPSGCASFNAQVIVLNHPGQIGAGYAPVLDCHTAHIACKFAELLEKIDRRTGKSVEANPKFVKSGDAAIAKMVPSKPMCVEAFTDYPPLGRFAVRDMRQTVAVGVIKAVEKATGGAGKVTKSAAKAGKK

SEQ ID NO: 29957 - protein, 624 aa, Gossypium hirsutum
MATTGVQNQEKVPMNLKQQLALAVRNIQWSYGIFWSISAKQPGVLEWGDGYYNGDIKTRKTVQSFEPKADDQLGLQRSEQLRELFESLSAGETSPHTKRPSVALSPEDLTATEWYYLVCMSFVFNIDQGLPGRTLSIGQPIWLCNAQYADSKVFSRSLVAKSASIQTVVCFPYAGGVIELGVTDLVSKDPGLIHRVKSLLLDAPETITGNINDVACPGLGPNEIESELSPFLGCEQLERGSPNEISDGFEPNQPAEDPFVNGGASQVQSWQFMDDHHSLNTSDCISQTFSDHEDVVPLCQGENDNDNDFRDVEECDRINRAAFDPISDDMHYRTVVSVLLKSSHQFILGPHFGNSNKESGFISWKMNSSVKYRKAKVEIPQKLLKKMLFEVPRMHDKGLLKSPQGGDGVGDAVWRPEADELCKSHVLSERRRREKINERLMILKSLVPTNSKADKVSILDDTIEYLQDLERRVEELECCRELTESETKTKQKHHRDRAERTSSNKVTNGNKSASSNKRKAYDIEETKQDIDHVASKDGSTENLTVSTNNKDLTIEFKCRWRDGILFEIMDALSVLDLDCHSVQSSTIEGILSVTIKSKYKGSSVAKPGTIKQALLQKVQSLTFV

SEQ ID NO: 29958 - protein, 269 aa, Pseudomonas putida
MSRLEQRFAELKAEGRSALVTFVTAGDPGYDASLQILKGLPAAGADVIELGMPFTDPMADGVAIQLATLRALEAGQTLAKTLQMVREFRVDNHTTPIVLMGYYNPIHRFGVEKFVAEAKQAGVDGLIIVDLPPEHDAELATPAQAAGIDFIRLTTPTTDDARLPRVLERSSGFVYYVSVAGVTGAGSATTEHVTEAIARLRRHTDLPISVGFGIRTPEQAANIARLADGVVVGSALVDKIAQATSADQAVNDVLSLCSALAEGVRGARR

SEQ ID NO: 29959 - protein, 621 aa, Corynebacterium glutamicum ATCC 13032
MRLLGRILKTTSALWPYYLGIIVVSIVIAALSLLSPFILREATDSIVSAVTGSNTVDAVTRTIIFLALALFVASFLNTVMTNIGGYIGDVMASRMRQILATRYYAKLLALPQKYFDNQVTGTIIARLDRSINGITQFMQSFSNNFFPMLITMVAVLIISAIFYWPLAILLAMLFPIYMWLTALTSKRWQKYEGEKNHEIDVANGRFAEVVGQVKVVKSFVAETRELADFGGRYGKTVAITRPQSGWWHRMDTLRGAALNIIFLAIHLLIFYRTLHGHFTIGDMVMLIQLVTMAQQPVYMMSYIVDSAQRAIAGSRDYFEVMAQQVEPTANKELVDATLASDTPRISVGTPAALPAGEPAMEFKNVTFAYEEGKPVISDVSITARHGERIALVGESGGGKSTLVNLLLGLYKPNSGSLAVCGVDVKDLTSEELRASVGVVFQDASLFSGSIAENIAYGRPGATREEIIEVAKKANAHEFISAFPEGYETVVGERGLKLSGGQKQRVSVARAMLKDAPLLVLDEATSALDTKSEQAVQAGLEQLMENRTTLMIAHRLSTIAGVDTIVTIQNGRVEEVGSPTELAVSGGIYSELLRLTNSTAEADRERLRAFGFTGDAPAEEED

SEQ ID NO: 29960 - protein, 313 aa, Adenostoma fasciculatum
GGLGDVLGGLPPAMAANGHRVMTVSPRYDQYKDAWDTEVNIELKVGDRTETVRFFHCYKRGVDRVFADHPLFLEKVWGKTASKIYGPMAGEDYKDNQLRFSLLCQAALEAPRVLNLNGSKYFSGPYGEEVVFIANDWHTALLPCYLKAIYKSKGLYKSAKVAFCIHNIAYQGRFAFADFSLLNLPDEFKSSFDFIDGYDKPVKGRKINWMKAGILESDKVLTVSPYYAKELVSAVDKGVELDNFIRKVGILGIVNGMDVQEWNPLTDKYTTVKYDATTVTDAKPLLKEDLQAEVGLPVDRDIPVIGFIGRLEE

SEQ ID NO: 29961 - protein, 489 aa, Glycine max; identical to SEQ ID NO: 915

SEQ ID NO: 29962 - protein, 620 aa, Gossypium hirsutum
MSTGVQHQERVPMNLKKQLALAVRNIQWSYAIFWSISTRQPGVLEWGEGYYNGDIKTRKTVQSVELNTDQLSLQRSEQLRQLYESLSAGESSPQAKRPSAALSPEDLTDTEWYYLVCMSFVFNIGQGLPGRTLSSGQPVWLCNAHCADSKVFGRSLLAKSASIQTAVCFPFSGGVVELGVTDLVFEDLSLIQRVKTLLLDDPQPIVSKRSIQVDGMNNDLACPALDPLILATKLSPILGCEQLETVSPDDSPDGLEPKQSREDSLLIEGINGGASQVQSWQFMDEEFSNCVHHSLNSSDCISQTIADHRKVVPLCRGENDNGLQDVEECNQTKLTSFDRQNDDRHFHEVLSALFKSSHPLILGPQFRNSNKESSFIRWQKNGLKPQKERDETPQKLLKKILFLVPHMHDRGLIESPETNAVRDAAWRPEADEICGNHVLSERKRREKINERLMMLKSLVPANNKADKVSILDVTIEYLQTLERRVAELESCRKSEARTKIERTSDNNGKKSSLSKRKAYDVVDEADQEIGYVASKDGSTDKVTLSMNNKELLIEFKCPWREGILLEVMDALSILNLDCHSVQSSTTEGILSLTIKSKYKGSSVAKAGPIEQALQRIASKC

SEQ ID NO: 29963 - protein, 505 aa, Arabidopsis thaliana
  misc_feature (48)..(48): Xaa can be any naturally occurring amino acid
  unsure (1)..(505): unsure at all Xaa locations
MEDETQTLILITILILTLITLTFLIKKLKPKPNLPPSPPFSLPIIGHXRLLKPPLHRLFLTISKSLNGSPIFSLRLGNKLVFVVSSHSIVEECFTRNDVVLANRPKSIASKHISYNYSSMVSAPYSEHWRNLRRIGAVEIFSNHRLNSFNTIRRDEIRRLVARLSRSPPASLPTRTVEMNSMLSNLAFNNIIRMVTGKCYYGDGAEDDPEAKRVRQLIAEAMSCFGAGHAADHLPMLRWITDFERRVKKIAARLDEFFQRLVDEKRVAKEKKENTMIDHLLSLQVSQPEYYTDHTIKGTMLSLILAGTDTSAVTLEWALSSLLNNPEVLKKVRDEIDNQIGLDRLLEESDIPNLPYLQNIVSETLRLYPAGPLLVPHISSEDCKVGGYDMPCGTMLLVNVWAIHRDPRLWDDPASFKPERFEKEGETHKLLTFGLGRRACPGSGLARRLVSLSLGSLIQCFEWERIGEEEVDMTEGGGLTMPRAIPLVAMCRARAFVGKIPHESG

SEQ ID NO: 29964 - protein, 525 aa, Xanthomonas campestris pv. campestris str. ATCC 33913
MNPRIRTQMFGLLAMTLPLAACAQQPEAPAKTSAPIAANRSTTPAPQLVAGLPDFTNLVEQVGPGVVNIETTITRKDAMARSQRGGPGGRGGGAMPDDEQMPEFFKRFFGPDFQMPGGPRQGPGQGDDDGGIAGKSMGSGFIISADGYVLTNHHVVDGASEVTVKLTDRREFKAKVVGSDEQFDVALLKIEAKGLPTVRIGDSNTLKPGQWVVAIGSPFGLDHSVTAGIVSATGRSNPYADQRYVPFIQTDVAINQGNSGGPLLNTRGEVVGINSQIFSASGGYMGISFAIPIDLAFSAAEQIKASGHVSRGMLGVAVGPIDTLKAQGLGLPDTRGALVNDIPAGSPAGKAGIEVGDVIRSVNGKEIAVASDLPPMIGLMPPGTKVSLNVLRDGKPRQVTVTLGTLENESGSSAPRTAADDSKPSAPASVELLGLQVADLTAAERSRMGLEAGEGVRIASVTGSAARSTQPPLAPGLVIARVGRTKVGSVAELNRALASYKKGDVVMLLVTDGKATSYVALKAGG

SEQ ID NO: 29965 - protein, 313 aa, Aria alnifolia
GGLGDVLGGLPPAMAANGHRVMTVSPRYDQYKDAWDTGVPVEIEVGGRVETVRFFHCYKRGVDRVFVDHPSFLERVWGKTGSKIYGPSAGEDYKDNQFRFSLLCQAALEAPRVLNLNSNKYFSGPYGDEVVFIANDWHTALLPCYLKAIYKPKGIYKNAKIVFCIHNIAYQGRFPISDFSVLNLPENLKGSFDFIDGYNKPVKGRKINWMKAGIIESDRVVTVSPFYAQELVSGEDKGVELDNIIRKTGITGIVNGMDVQEWNPATDKYLDTKYDNTTVLDAKPLVKEALQAEVGLPVDRNIPVIGFIGNRIP

SEQ ID NO: 29966 - protein, 345 aa, Gossypium hirsutum
MENSTQESHLRSDNSVTYESAYTVYAMALSSTPSSTNINHQRIALGSFLEDYTNRVDIISFDPETLSFKTHPKLAFDHPYPPTKLMFQPNRKSASSSSSCSDLLASTGDFLRLWEVRESSIEPVTVLNNSKTSEFCAPLTSFDWNDVEPKRIGTSSIDTTCTIWDIEKCVVETQLIAHDKEVYDIAWGEARVFASVSADGSVRIFDLRDKEHSTIIYESPQPDTPLLRLAWNKQDLKYMATIQMDSNKVVILDIRSPTTPVAELERHHASVNAIAWAPQSCKHICSAGDDTQALIWELPTVAGPNGIDPLCVYSAGYEINQLQWSRAQPDWIAIAFSNKLQLLKV

SEQ ID NO: 29967 - protein, 401 aa, Zea mays; identical to SEQ ID NO: 987

SEQ ID NO: 29968 - protein, 702 aa, Bacillus clarkii
VFRKLLCTLVTIITLSAWIVSHGGEVHASNATNDLSNVNYAEEVIYHIVTDRFKDGDPDNNPQGQLFSNGCSDLTKYCGGDWQGIIDEIESGYLPDMGITALWISPPVENVFDLHPEGFSSYHGYWARDFKKTNPFFGDFDDFSRLIETAHAHDIKVVIDFVPNHTSPVDIEDGALYDNGTLLGHYSTDANNYFYNYGGSDFSDYENSIYRNLYDLASLNQQHSFIDKYLKESIQLWLDTGIDGIRVDAVAHMPLGWQKAFISSVYDYNPVFTFGEWFTGAQGSNHYHHFVNNSGMSALDFRYAQVAQDVLRNQKGTMHDIYDMLASTQLDYERPQDQVTFIDNHDIDRFTVEGRDTRTTDIGLAFLLTSRGVPAIYYGTENYMTGKGDPGNRKMMESFDQTTTAYQVIQKLAPLRQENKAVVYGSTKERWINDDVLIYERSFNGDYLLVAINKNVNQAYTISGLLTEMPAQVYHDVLDSLLDGQSLAVKENGTVDSFLLGPGEVSVWQHISESGSAPVIGQVGPPMGKPGDAVKISGSGFGSEPGTVYFRDTKIDVLTWDDETIVITLPETLGGKAQISVTNSDGVTSNGYDFQLLTGKQESVRFVVDNAHTNYGENVYLVGNVPELGNWNPADAIGPMFNQVVYSYPTWYYDVSVPADTALEFKFIIVDGNGNVTWESGGNHNYRVTSGSTDTVRVSFRR

SEQ ID NO: 29969 - protein, 334 aa, Bradyrhizobium japonicum USDA 110
MQDTKFKVAVVQAAPVFMDAPASVAKAIGFIAEAGAAGAKLLAFPEVWIPGYPWWLWLGTPAWGMQFVPRYHANSLRADGPDILALCAAAAEAKINVVMGFSEIDGGTLYLSQVFISDAGEIIFKRRKLKPTHVERTLYGEGDGSDFRVVESSVGRLGALCCAEHIQPLSKYAMYSMNEQVHVASWPSFTLYRDKAYALGHEVNLAASQIYALEGGCFVLHASAITGQDMFDMLCDTPEKADLLNAEGAKPGGGYSMIFGPDGQPMCEHLPQDKEGILYADVDLSMIAIAKAAYDPTGHYARGDVVRLMVNRSPRRTSVSFSEDENAAVTFTET

SEQ ID NO: 29970 - protein, 57 aa, Triticum aestivum
  misc_feature (48)..(48): Xaa can be any naturally occurring amino acid
  unsure (1)..(57): unsure at all Xaa locations
MPFTASDICKILLAIILPPLGVFLERGCNADFLIDILLTVLGHIPGIXHALYIIFQF

SEQ ID NO: 29971 - protein, 193 aa, Brassica oleracea
MQDQLMCHGCRNTLLYPRGATNVRCALCNTINMVPLHPPPPPPHHAHAGMDMAHIVCGGCRTMLMYTRGASSVRCSCCQTVNLVPATPPTNQPAHVNCGNCRTTLMYPYGAPSVRCAVCQFVTNVNMGNGRVPFPTNQPNGTASSPGPMPSTSTQSTPPSQTQTVVVENPMSVNESGKLVSNVVVGVTTDKKK

SEQ ID NO: 29972 - protein, 313 aa, Aria alnifolia
GGLGDVLGGLPPAMAANGHRVMMISPRYDQYKDAWDTGVTVGLKVGDQTETVRFFHCYKRGVDRVFVDHPLFLEKVWGKTASKVYGPVAGVDFKDNQLRFSLLCQAALEAPRVLNLNSSKYFSGPYGEEVVFIANDWHTALLPCYLKAVYKPRGIYSTAKVAFCIHNIAYQGRFAFADFALLNLPDGFKSSFDFIDGDEKPVKGRKINWMKAGILESDKLLTVSPYYAEELVSAVEKGVELDNIIRKIGIFGIVNGMDVQEWNPLTDKHTTIKYDASSVADAKPLLKETLQAEVGLPVDRDIPVIGFIGRLEE

SEQ ID NO: 29973 - protein, 302 aa, Gossypium hirsutum
MGRSPCCSKEGLNRGAWTALEDKILKDYIKVHGEGRWRNLPKRAGLKRCGKSCRLRWLNYLRPDIKRGNISPDEEELIIKLHKLLGNRWSLIAGRLPGRTDNEIKNYWNTNLSKRVSDRQKSPAAPSKKPEAARRGTAGNGNTNGNGSGSSSTHVVRTRATRCSKVFINPHHHTQNRHPKPSSTCSNHGDHREPKTMNELLLPIMSESENEGTTDHISSDFTFDFNMGEFCLSDLLNSDFCDVNELNYSNGFDSSPSPDQPPMDFSDEMLKEWTAAASTHCCHQSAASNLQSLPPFIENGIE

SEQ ID NO: 29974 - protein, 313 aa, Aria alnifolia
GGLGDVLGGLPPAMAANGHRVMTVCPRYDQYKDAWDTSVLVEIEVGGRVETVRFFHCYKRGADRVFVDHPLFLEKVWGKTGSKIYGPRTGVDYMDNQFRFSLLCQAALEAPRVLNLNSNKYFSGPYGDDVVFIANDWHAALLPCYLKTIYKPKGIYKNAKVVFCIHNIAYQGRFAFSDFSLLDLPDNLKGSFDFIDGHDKPVKGRKINWMKAGIIESDRVVTVSPYYAQELVSGEDKGVELDNIIRKTSITGIVNGMDVQEWNPATDKYLDIKYDNTTVLDAKPLLKEALQAEVGLPVDRNIPVFGFIGRLEE

SEQ ID NO: 29975 - protein, 323 aa, Candida shehatae
MSPSPIPAFKLNNGLEMPSIGFGCWKLDKSTAADQVYNAIKAGYRLFDGAEDYGNEQEVGEGVKRAIDEGIVTREEIFLTSKLWNNYHDPKNVETALNKTLKDLKVDYVDLFLIHFPIAFKFVPIEEKYPPGFYCGDGDNFVYEDVPILETWKALEKLVKAGKIRSIGVSNFPGALLLDLFRGATIKPAVLQVEHHPYLQQPKLIEYAQKVGITVTAYSSFGPQSFVEMNQGRALNTPTLFEHDVIKAIAAKHNKVPAEVLLRWSAQRGIAVIPKSNLPERLVQNRSFNDFELTKEDFEEISKLDINLRFNDPWDWDNIPIFV

SEQ ID NO: 29976 - protein, 175 aa, Triticum aestivum
MAPAVMASSATTVAPFQGLKSTAGLPVSRRSGSAGLSSVSNGGRIRCMQVWPIEGIKKFETLSYLPPLSTEALLKQVDYLIRSKWVPCLEFSKVGFVFREHNSSPGYYDGRYWTMWKLPMFGCTDATQVLNEVEEVKKEYPDAYVRVIGFDNMRQVQCVSFIAFRPPGCEESGKA

SEQ ID NO: 29977 - protein, 309 aa, Gossypium hirsutum
MGRSPCCEKVGLKKGPWTPEEDQKLLAYIEQHGHGSWRALPLKAGLQRCGKSCRLRWINYLRPDIKRGKFSLQEEQTIIQLHALLGNRWSAIATHLPKRTDNEIKNYWNTHLKKRLTKMGIDPVTHKPKTDALGSTTGNPIDAANLSHMAQWESARLEAEARLVRESKLVPSNPPQSNHFTAVAPSPTPATRPQCLDVLKAWQGVVCGLFTFNMDNNNLQSPTSTLNFMENTTTLPMSSSSSVNGMFNENFGWNSSINPCESGDILKVEYGSDQIPELKERLDHPMELHEMDCSSEGTWFQELFGFNGL

SEQ ID NO: 29978 - protein, 148 aa, Salmonella enterica
CIIWGLGISLAVYLTAGISGGHLNPAVTIALWLFACFPKQKVLPYIIAQFAGAFGGALLAYVLYSSLFTEFETAHHMVRGSVESLQLASIFSTYPAAALNVWQAALVEVVITSILMGMIMALTDDGNGIPKGPLAPLLIGILVAVIGA

SEQ ID NO: 29979 - protein, 395 aa, Streptococcus thermophilus CNRZ1066
MQCCDMYYEIFERGNPMTDTFYSKLAKVRHYIHEHPEISEQEYETTKYIKNYLSELEIKPLDYPLETGVIAEIGSGLPIIALRADIDALPIVERTNLDYASSNGAMHACGHDFHQTSLLGAAEILKEREAELNGTVRLIFQPAEENFQGGYKVIEAGGLENVSAIIGYHNNPHLKPGQIGLRSGAIMAGVEQFKVIVNGVSAHAARPDLGVDTVLVITTIINNLQNIVSRTVSPFESAVLSVTHIDVGTTWNVLPANGYFEGTIRSFDPEVRLSVIERFEKVVKAVSQQFDARVEINWGNAPNVTFNDRDLTPIIFENSKKFAEVIETLPSTGGEDFAAYQEKIPGVFAFVGSNGEENAPDWHHDDFIVRDESLPVAVNYFVESAFALLNHFKKE

SEQ ID NO: 29980 - protein, 509 aa, Schizosaccharomyces pombe
MSSSAVSPKQWVAGLNSELDIPAVNRRTSIICTIGPKSNNVETLCKLRDAGMNIVRMNFSHGSYEYHQSVIDNARKASATNPLFPLAIALDTKGPEIRTGLTVGGTDYPISSGHEMIFTTDDAYAEKCNDKVMYIDYKNITKVIQPGRIIYVDDGILSFTVIEKVDDKNLKVRVNNNGKISSKKGVNLPKTDVDLPALSEKDKADLRFGVKNGVDMIFASFIRRAEDVIHIREVLGEEGKNIKIICKIENQQGVNNFDSILDVTDGIMVARGDLGIEIPASQVFVAQKMMIAKCNIAGKPVACATQMLESMTYNPRPTRAEVSDVGNAVLDGADLVMLSGETTKGSYPVEAVTYMAETARVAEASIPYGSLYQEMFGLVRRPLECATETTAVAAIGASIESDAKAIVVLSTSGNTARLCSKYRPSIPIVMVTRCPQRARQSHLNRGVYPVIYEKEPLSDWQKDVDARVAYGCQQAYKMNILKKGDKIIVLQGAVGGKGHTSIFRLTVAE

SEQ ID NO: 29981 - protein, 771 aa, Legionella pneumophila str. Lens
MKENVSHLPRELSRMVFWSLTCLKKAIAEVYGKETYERIEQIRLSMQDTIGSESFSLGKALHNLQIELSKLEKKQLYQIAHGFSLMMELINTCENAYRIFRINQRKEQVYSDMPQGIHYVLTAHPTEARTNEFLKLFKEIRDYLIEVLKSPYLMNEPHLDQMLKISLQINISYHEKPSVEDEAQYIYQYALHPLNIKLYHSFLAKGVPIQLRTWVGGDKDGHSGVNEKIMLKSLELSRSFFIAYIQECLEEVLEIIKLSTALGKNKSLADQINQLVKKAYGLKKIQSKDHEKISAFKNELTATQINALKFLNFEPEQFSIISSIFHLYPALVMPIELREDSTIVKESLTSIKKTTITKMLEQVHSITHGTDPKNYIRGFILSMVESAEDIKNGINLVKKVFKGYALPVVPLFENQLALTNADTILNNSITEDIRQKHLKQWEGNYEVMLGYSDSSKENGVLPSRLMIAKSLKNIQSTLENKNLRPIFFHGSGGSIERGGGDVKEQTASWSKEMMSNYKVTVQGEMVARLFGSSSILKSQVDKFLDIYSQKGKNTDNGYPEELSSFSARVSQKYKTLIQSDWFWQIIEQASPYHFLKELKIGSRPTKRKSGPDQRKLRAIPWILCWTQTRLLFPTWWGIGSAWSELNGIEKNRLKALYKENALFAAFVKQLGVTLSKVYLPVWEHYLLQLTGSIEYLKPFQSELESTIQFFYQITDEKDFCFHQPWLGESIQLRSTLIHPLNLIQIEAMKRKDLPLLRKTVTGISCGMLTTG

SEQ ID NO: 29982 - protein, 368 aa, Zea mays
MVSPSVTALSPAVPFHGPPAAECALFLACRRAQVVDEPSFFHQWQSDALLEQYTEQQIAVAFGGHGGLDLDLDLDLDHGVATPPPLQRVPAPAADHRPRKAARGNASWDSCVTEQGSPEDYSSPSILSFGGHHAKAPKQELLDAAAAALPSFQQARPAPKRSYDDMMAEAARAPAAAAAAARPASQNQDHILAERKRREKLSQRFIALSKIVPGLKKMDKASVLGDAIKYVKQLQDQVKGLEDDARRRPVEAAVLVKKSQLSADDDEGSSCDDNSVGAEASATLLPEIEARLSGRTVLVRVHCDNRKGVLIAALSEVERLGLSVMNTNVLPFTASSLDITIMAMAGDDFCLSAKDIVKKLNQAFKSPF

SEQ ID NO: 29983 - protein, 251 aa, Oryza sativa
MAKEVDPCDHGEVVDAGCVRAVLAELVLTFVFVFTGVAATMAAGVPEVAGAAMPMAALAGVAIATALAAGVLVTAGFHVSGGHLNPAVTVALLARGHITAFRSALYVAAQLLASSLACILLRYLTGGMATPVHTLGSGIGPMQGLVMEIILTFSLLFVVYATILDPRSSVPGFGPLLTGLIVGANTIAGGNFSGASMNPARSFGPALATGVWTHHWIYWLGPLIGGPLAGLVYESLFLVKRTHEPLLDNSF

SEQ ID NO: 29984 - protein, 229 aa, Mycoplasma genitalium G37
MIGAKTRVAIVGGIGYIGSCFASFIKEQNDKLIVTVIDNNKNNHVIKLLKKIGIEFYFADLLDRHKLTEVIAAIQPDVVFHFAAKTSVSESVHNPLKYFDCNVIGTLNLISAISNLQKPIKLFFASSAAVYGQTTNSYISEEIVITETQATNPYGLSKFLDELILNAVAKNSQLQVVCLRFFNVAGAILPFGNFNGNTTLLIPNLVKAFLKQTPFFYMAMIMQLRMVVA

SEQ ID NO: 29985 - protein, 713 aa, Glycine max
  misc_feature (359)..(359): Xaa can be any naturally occurring amino acid
  unsure (1)..(713): unsure at all Xaa locations
HKVSWGYWGDQQNNNSEENSIICRICEEDVPTSHVEDHSRICALADRCDQKGLSVNERLGRIAETLEKMMESCTQKDTQQMVGSPDVAKVSNSSMTEESDVPSPKLSDWSRRGSEDMLDCFPEADNSVFMDDLKGLPLMSCKTRFGPKSDQGMTTSSAGSMTPRSPLMTPRTSQIDLLLAGKGAYSEHDDLPQMNELADIARCVANAPLDDDRTTSYLLSCLDDLRVVVDRRKFDALTVETFGTRIEKLIREKYLQLTEMVDVEKIDTESTVDDDLLEDDVVRSLRTSPIHSSRDRTSIDDFEIIKPISRGAFGRVFLAKKRTTGDLFAIKVLKKADMIRKNAVESILAERDILITVRXPFVVRFFYSFTCRENLYLVMEYLNGGDLYSLLRNLGCLDEEVARVYIAEVVLALEYLHSLHVVHRDLKPDNLLIAHDGHIKLTDFGLSKVGLINSTDDLSGPAVNGTSLLEEDETDVFTSEDQRERRKKRSAVGTPDYLAPEILLGTGHGFTADWWSVGVILFELLVGIPPFNAEHPQTIFDNILNRKIPWPAVPEEMSPQAQDLIDRLLTEDPNQRLGSKGASEVKQHVFFKDINWDTLARQKAAFVPASESALDTSYFTSRYSWNTSDGLVYPASDDEDSSDADSLSGSSSCLSNRQDEVGDECWGLTEFDSGTSVNYSFSNFSFKNLSQLASINYDLTKGWKDDPPTNSSA

SEQ ID NO: 29986 - protein, 921 aa, Ustilago maydis 521
MGNANSTSFKGADGAAAASADNTIDSTFKRQYSHQTGHVQGNGVAAVHPSSTAARQTSDRLSSGSRLGRTASFFGRASSHDGATAPQSTRSRSGSLTGFLVTQRRGSTTAASVAGDVYAAVKEGNEPTSGSVPSASSSSLSASNQPNSFAQYEISNSASGSSIETAIRANPRTRRLTEGLTLPQSPGGFDPRHYVSPHPSPSVATQAHYAAGLPSHHANVVVSSGLRVSSTGIDADAMPASTFRGSEPQQVPSTAARAPSRHPLFGLGGTSLFPNVGTSIGTNPAASPPIGGSSPVLSSQPLSMGDAADESETSQRLPTALPSYLKIPTAIPSSHVSPSSPPTSIYSQHSDRFRTPSERHRSPSPSLMLPLDDARPAHMVAGAGAAAAVLNTEDVVIPPGDASKASSPIDGRDGFFETFKEGSKQRTGPDEISIDEARAADIDVTDLTSNPANTNPGSVAKLPSLDVAALTDDTERASRAPQRTSQASAEAADIAPVRSSREPTPTPSDRGARALTPTRTGAPSGLRSLSPVATSSGPPTQPISVKRSHVDVQTGGESGFNTPLLPPGLTSAPPSASVPGVTPLSQVSSPATVSDRPCPSGPPRTPSATGNASQPTTPVSAKPGTGAGPHHAQAQAQTGQQQPPLMPIVLTWRAGGREVFVTGTFANEWRSKILLHKSKRDHTCVLHLPPGTHRLKFIVDDRWRVSRDLPTATDGDGNLVNYVEIPNVGPAHPGPLSAPGEDLPGADADSGRSERNSKIESKKTTMNLIEEARRAEAMRLGLDDLFDDDGNDQEETWTSEIPAALIEAQEAEEAQREAEESGRSATHAQHGSDGNGTPLPHPPALPRQLEKVILNSSPANPSNGTSTGSTVDDNSILPAPNHVVLNHLTASSIKGGVLAVGTTTRYKRKYVTTVYYRPVQV

SEQ ID NO: 29987 - protein, 721 aa, Thiomicrospira crunogena XCL-2
MSNVPLNHAIQFDQFKLVIKNSTVSSFGNIAVATFLTYLIVDALSNTLVFFWLAYMVLVSVFRTGYGRYIRTNVSLDTFKYFQKRYFVFILLTALGWGYASFALFVENDTTLQSFLVMSIAGISSSSVSSLSPVKSYFYSFIIIVITPLFLKFATSYEVYGVAFSLILLLFLIFMIKSAKHYQEAINDSLSLNYQNVGLIKELNQAKQEADASNQLKSEFLANMSHEIRTPMNGIIGMTGLLLDTSLKKEQRDLTLTVKESAESLLAIINDILDFSKIEAGKMELNYESVKLVPFLDGVMEMVASSAQSKGLNLAYFIDPILPAEIETDGVRLRQVLINLLSNGIKFTDHGYVYLTVSALDSDSNRLQFKVTDTGIGISEEGQAKLFNAFSQVDGSSMRVFGGTGLGLTISKQILSLLGGHISVKSALGKGACFCFDIPYRVMDSNNCLAAFEAEIPLIWLMPNDALKPKMVDFFKELNIVVHCDTFDELLEQSDENRRPVWIDMAEVMKTGGKPFELIRALKMKHSFLTLLLTHQQANEWYQQIADLEINTRIKPVKYSHLSDWLFANQEEKILKETPVHSKFDASLSHLKLLLAEDNLVNQKLATALLKKLGITPDIANNGEEALQKLEDNLYDLVLMDCQMPIKDGYQATKELREWARPIKDVVVIALTANAMQGDEQKCYAAGMNDYITKPVSPMVLQEKLQKWAAFIQDNSLSSKG

SEQ ID NO: 29988 - protein, 313 aa, Aronia prunifolia
GGLGDVLGGLPPAMAANGHRVMTVSPRYDQYKDAWDTSVLVEIEVGGRVETVRFFHCYKRGVDRVFVDHPLFLEKVWGKTGSKIYGPRTGVDYMDNQFRYSLLCQAALEAPRVLNLNSNKYFSGPYGDDVVFIANDWHTALLPCYLKTIYKPKGIYKNAKVVFCIHNIAYQGRFPFSDFSLLDCPTTLKGSFDFIDGHDKPVKGRKINWMKAGIIESDRAVTVSPYYAQELVSGEDKGVELDNIIRKTGITGIVNGMDVQEWNPATDKYLDIKYDNTTVLDAKPLLKEALQAEVGLPVDRNVPVFGFIGRLEE

SEQ ID NO: 29989 - protein, 271 aa, Gossypium hirsutum
MGRSPCCSKEGLNKGAWTALEDKILASYIHVHGEGKWRNLPKRAGLKRCGKSCRLRWLNYLRPDIKRGNISHDEEELIIRLHNLLGNRWSLIAGRLPGRTDNEIKNYWNTTLGKRAKAQASIDAKTIPTESRLNEPSKSSTKIEVIRTKAIRCSSKVMVPLQPPATHQHGQHHCTNNNEEMGGGIATIEAHNGIQMLESLYSDGGSNLLSFEINELLKSHDGGEFEENPMQQHFPLGEAMLKDWSTCHCLDDNGATDLESLAFLLDTDEWP

SEQ ID NO: 29990 - protein, 313 aa, Aronia prunifolia
GGLGDVLGGLPPAMAANGHRVMTISPRYDQYKDAWDTEVTVELKVGDKTETVRFFHCYKRGVDRVFVDHPLFLEKVWGKTASKVYGPVTGVDFKDNQLRFSLLCQAALEAPRVLNLNSSKYFSGPYGEEVVFIASDWHTALLPCYLKAVYKPRGVYSTAKVAFCIHNIAYQGRFAFADFALLNLPDEFKSSFDFIDGSEKPVKGRKINWMKAGILESDKLLTVSPYYAEELVSAVEKGGELGDIIRKTGIFGIVNGMDVQEWNPLTDKYTTIKYDASTVADAKPLLKETLQAQVGLPVDRDIPVIGFIGRLEE

SEQ ID NO: 29991 - protein, 254 aa, Gossypium hirsutum
MGRRPCCAKEGLNKGAWTANEDQILKNYITIHGEGKWRDLPQKAGLKRCGKSCRLRWLNYLRPDIKRGNISIEEEELIIRLHKLLGNRWSLIAGRLPGRTDNEIKNYWNTNLSKRMEGQKRNISPNTPQVSSHNVIWTKAVKCTKAVNVDTLDPKSETLVNSPSETPSSSAINEDNTNNNSMDFLVDFDIDELLAFEYNPIPELYRTQNRGDKMGNNVADNGEYSHGTEFCQACEHLDLRGLESYLNLEDEWIN

SEQ ID NO: 29992 - protein, 238 aa, Triticum aestivum
  misc_feature (57)..(57): Xaa can be any naturally occurring amino acid
  misc_feature (149)..(149): Xaa can be any naturally occurring amino acid
  misc_feature (176)..(176): Xaa can be any naturally occurring amino acid
  misc_feature (179)..(179): Xaa can be any naturally occurring amino acid
  misc_feature (183)..(183): Xaa can be any naturally occurring amino acid
  misc_feature (200)..(200): Xaa can be any naturally occurring amino acid
  misc_feature (220)..(221): Xaa can be any naturally occurring amino acid
  misc_feature (224)..(224): Xaa can be any naturally occurring amino acid
  unsure (1)..(238): unsure at all Xaa locations
MQIFVKTLTGKTITLEVESSDTIDNVKAKIQDKEGIRPDQQRLIFAGKQLEDGRTLXDYNIQKESTLHLVLRLRGGMQIFVKTLTGKTITLEVESSDTIDNVKAKIQDKEGMPPDQQRLIFAGKQLEDGRTLADYNIQESTLHLVLRLXRGGMQIFVETLTSKNITLEVESSDTIXHVXARSXDKEGIPPGQQRLIFVGXQLEDGRTLADLHIQKESTLXXCLXLCGGMQIFVRTLTG

SEQ ID NO: 29993 - protein, 313 aa, Cercocarpus betuloides
GGLGDVLGGLPPAMAANGHRVMTISPRYDQYKDAWDTEVIVELKVGDKTEKVRFFHCYKRGVDRVFVDHPLFLEKVWGKTASKIYGPITGEDYQDNQLRFSLLCQAALEAPRVLNLTSNKYFSGPYGEDVVFIANDWHTALLPCYLKANYKPKGIYKSAKVAFCIHNIAYQGRFAFADFAFLNLPDGFKSSFDFIDGYEKPVKGRKLNWMKAGILESDKVLTVSPYYAKELASTVEKGVELDNIIRKTGIQGIVNGMDVQEWNPLTDKYTTVKYDASTVVDAKPLLKEALQAEVGLPVDKTVPVIGFIGRLEE

SEQ ID NO: 29994 - protein, 264 aa, Gossypium hirsutum
MGRSPCCEKAHTNKGAWTKEEDDRLIAYIRAHGEGCWRSLPKAAGLLRCGKSCRLRWINYLRPDLKRGNFTEEEDELIIKLHSLLGNKWSLIAGRLPGRTDNEIKNYWNTHIRRKLLSRGIDPATHRPLNEASQDVTTISFSGAKEEKEKINTNSNNNPIGFITKDEKKIPVQERCPDLNLDLRISPPYYQQTQPESFKTGGRTLCFICSLGVKNSKDCTCSTITTAAGSSSSSSSHSNSNNSSGYDFLGLKSGILEYRSLEMK

SEQ ID NO: 29995 - protein, 327 aa, Bradyrhizobium sp. BTAi1
MAATSSDKIDVLIYGPLRPILEKGFPDSFNVHHATTQADLEALPAEVKGRIRGVAVTFHTVKTDAAVMASLPRLEIIASFGVGYDHIAAAHAGQHGIVVTNTPDVLTEEVADVALGLLIATCREFIKADRFVRSGEWTSKPYPLSVGSLRDRTVGMVGMGRIGQAIARRLEASLVPVVYHSRNAAAGVANKHYPDLLQMAKDVDTLVVIVPGGASTNKIVNAEVLKALGPRGVVVNVARGSVIDEAALVDALKSGTILAAGLDVFEKEPAVPDELKAMDNVVLLPHIGSAAIVTRNAMDQLVVDNLKVWFAGKPPLTPVPETPVKGR

SEQ ID NO: 29996 - protein, 545 aa, Acinetobacter sp. ADP1
MTHFIFVTGGVVSSLGKGISAASVAALLEARGLKVTMVKMDPYINVDPGTMSPFQHGEVFVTEDGAETDLDLGYYERFLRRAKMTKLNNFTSGRVYQDVLNKERRGDYLGGTVQVIPHITDNIKERVLAAGEGYDVAIVEIGGTVGDIESLPFMESVRQLMVELGHKRTMLMHLTLLPYIRSAAELKTKPTQHSVKELLSIGIQPDILICRTEHDVDADTKRKIALFTNVEARAVVVCKDAKTIYQIPRNFYEQKVDDLICERFGYNDLPQADLSDWDQVCEALFNPEYIVRVAMVGKYVELPDAYKSVNEALLHAGIQNRVKVQIDYVDAETLETQDISILSTADAILVPGGFGERGTEGKMLAIKYAREQGIPFLGICLGMQLAVIEYARNVAGLAEATSTEFNRSTKFPIIGLITEWLDERGELQQRSVESDLGGTMRLGAQKSELVEGTKTRQVYGKAEIVERHRHRYEMNDRFIEPIEKAGMKISGYSTAQHLVETVEIPEHPWFIAVQFHPEFTSSPRDGHPLFASFIDAAKKQHLKTK

SEQ ID NO: 29997 - protein, 474 aa, Brucella suis 1330
MNWRCLGFAGVVLAFFSLAAGPVAAQDSPATAVRQIPLSRGDMQLSFAPLVKETAPAVVNVYAARQVQARSPFEGDPFFEQFFGSQFGASKPRIQQSLGSGVIVDRSGIIVTNNHVIKDADEIKVALSDGREFESRILLRDETTDLAVLKIEAKQQFPVLALGNSDEVEVGDLVLAIGNPFGVGQTVTSGIVSAQSRTQVGISDFDFFIQTDAAINPGNSGGALIDMRGRLIGINTAIYSRSGGSVGIGFAIPSNMVRAVVDAALQGSTRFERPYIGATFQGITPDLAESLGMEKPYGALITAVVKDGPAETAGLKVGDVVLSVQGVRVDNQDVLGYRLSTAGIGKTISVEVMRNGKNLSLPVKLTKAPKVKQAEPKVIEGDNPFDGAAVGDLTASTAAKLRLKRGQQGVAVFDVYSGSPAARLGLRPGDIIRSINGNQIRTVDDMTAVLEAGRGLAWRLEIERNGALLRQFVR

SEQ ID NO: 29998 - protein, 314 aa, Gossypium hirsutum
MNWSVRRDKKYRLAIASLLEHYNNRLEIVQLDDSNGEIRSDPNLSFDHPYPPTKTIFIPDKECQKPDLLATSSDFLRIWRISDDHSRVDLKSLLNGNKNSEFCGPLTSFDWNEAEPKRIGTSSIDTTCTIWDIERETVDTQLIAHDKEVYDIAWGGVGVFASVSADGSVRVFDLRDKEHSTIIYESSEPDTPLVRLGWNKQDPRYMATIIMDSAKVVVLDIRFPTLTVVELQRHQASVNAIAWAPHSSCHICTAGDDSQALIWDLSSMSQPVEGGLDPILAYTAGAEIEQLQWSSSQPDWVAIAFSTKLQILRV

SEQ ID NO: 29999 - protein, 313 aa, Chaenomeles speciosa
GGLGDVLGGLPRAMAANGHRVMTVCPRYDQYKDAWDTSVLVEIKVGGRIETVRFFHCYKRGVDRVFVDHPSFLEKVWGKTGSKIYGPKTGEDYMDNQFRFSLLCQAALEAPRVLNLNSNEYFSGPYGDDVVFIANDWHTALLPCYLKTIYKPKGIHKNAKVVFCIHNIAYQGRFPFSDFSLLDLPDNLKGSFDFIDGYNIPVKGRKINWMKAGILESDRVVTVSPYYAQELVSGEDKGVELDNVIRSTGITGIVNGMDVQEWNPATDNYLNIKYDNTTVLDAKPLLKEALQAEVGLPVDRNIPVFGFIGRLEE

SEQ ID NO: 30000 - protein, 313 aa, Chamaebatiaria millefolium
GGLGDVLGGLPPAMAANGHRVMTVSPRYDQYKDAWDTCVLVELEVNGRTETVRFFHCHKRGVDRVFVDHPVFLERVWGKTGSKIYGPKAGEDYKDNQLRFSLLCQAALEAPRVLNLNSNEYFSGPYGEDVVFIANDWHTALLPCYLKTIYKPKGIYKSAKVAFCIHNIAYQGRFPFSDFSLLDLPDQLKGSFDFIDGYNKPVKGSKINWMKAGILESDRVVTVSPYYAQELVSGEDKGVELDNIIRKTGITGIVNGMDVQEWNPATDKYLDIKYDNTTVLDAKPLLKEALQAEVGLPVDRNIPVIGFIGRLEE

SEQ ID NO: 30001 - protein, 316 aa, Bradyrhizobium japonicum USDA 110
MTESYPMGPLSTPHIAATGSSPTRPPGEVNGSRDGAYPSLDIGQLLDNGPWTALQKIVVFIAALSIIMDGFDGQLIGFAVPVLIKEWGVTRGDFAPALAAGLVGMGIGSAFAGLLADRFGRRGAVIVSVMVFGLATFCIGFAANLWHIGALRFIAGLGIGGALPSSTTVAAEFTPERRRTLAITATIVCVPLGGMLAGLFAGMVLPNLGWRALFFLGGALAVLLGFIMLFILPETPRFLVRRPARWAELRRLVGRMSRPVTADIVFTDLGEQGSTNARAFLHCSRRAGPATRSRSGAPSFSTCLPYIAPSRGCRRC

SEQ ID NO: 30002 - protein, 404 aa, Streptococcus suis 89/1591
MKQFNKSTKLDDVAYDIRGPVLEEAMRMRANGEQILRLNTGNPAEFGFTAPDEVIRDLIHNARKSEGYSNSKGIFSARKAIMQYCQLKKFPNVDIEDIYLGNGVSELIVMSMQGLLDNGDEVLVPMPDYPLWTAAVSLAGGKAVHYVCDEAAEWYPDLADMESKVTSRTKAIVLINPNNPTGALYPKEILKGIIDIARRHELIIFSDEIYDRMVFDGAVHIPIATLAPDLFVVTMNGLSKSHRICGFRVGWMVLSGPKKHVKGYIEGLNMLSNMRLCSNVLAQQVVQTSLGGYQSVDELLMPGGRLYEQREFITKAINDIPGLSAVKPKAGLYVFPKIDREMYRVEDDEQFVLDFLKQEKVLLVHGRGFNWKDPDHFRIVYLPRVDELAEIQEKMSRFLRQYRR

SEQ ID NO: 30003 - protein, 394 aa, Silicibacter pomeroyi DSS-3
MSQSFLSHITDTLAQIEAEGLYKRERLITSPQGGEITVGDRQVINLCANNYLGLADHPALIAAARDALEPKGFGMASVRFICGTQDIHRELEQRLARFLNKDDAILFAACFDANGGLFEPLLGPEDAIVSDALNHASIIDGIRLCKAKRYRYANSDMGDLEAQLKQARADGARHVMIATDGVFSMDGYLANLPEITRLAHQYDAVVMVDDCHATGFMGPHGAGTPDHFGLDVDILTGTLGKALGGAIGGYIAGPQPVIDLLRQRARPYLFSNSLPPAIVAAGIEAIRLVEEGADLRARLFENARYWRAGLTDLGFDLLPGEHPIIPVMLGEAKLAQDMAARLFDEGVYVSGFFFPVVPRGQARIRTQMNAALTRDELDRALAAFATAGKALGVI

SEQ ID NO: 30004 - protein, 300 aa, Streptococcus thermophilus CNRZ1066
MHFYLISFKIILLQLEKENRMETYTLSNGVTIPKIGFGTWQIPEGEEAYNSVSFALKAGYTHIDTAQIYGNEVSVGKAIADSDVAREDLFLTTKLWNDKHDYDLAKASIDESLERLGVDYLDLFLIHWPNPKALRENDAWKVGNAGAWKAMEEAYKEGKVRAIGVSNFMQHHLEALFETAEIVPHVNQILLAPGCTQEDLVAYCRERDILLEAYSPLGTGSIFGNEDVEAVAERNGKSVAQVALRWSLQKGFLPLPKSVTPKNIEANLDIFDFDLSEEDMAVLDKIQGIKTQVDPDTVNF

SEQ ID NO: 30005 - protein, 224 aa, Arabidopsis thaliana
  misc_feature (133)..(133): Xaa can be any naturally occurring amino acid
  misc_feature (190)..(190): Xaa can be any naturally occurring amino acid
  unsure (1)..(224): unsure at all Xaa locations
MEAEKKMVLPRIKFTEHKTNTTTIVSELTNTHQTRILRISVTDPDATDSSSDDEEEEHQRFVSKRRRVKKFVNEVYLDSGAVVTGSCGQMESKKRQKRAVKSESTVSPVVSATTTTTGEKKFRGVKQRPWGKXWAAEIRDPLKRVRLWLGTYNTAEEAVMVYDNAAIQLRGPDALTNFSVTPTTATEKKXPPPSPVKKKKKKNKKAKIRYASSPSAEQQHDFSL

SEQ ID NO: 30006 - protein, 490 aa, Bifidobacterium longum NCC2705
MAQSKLDEVVSLAKRRGFVFPAGEIYGGTRSAWDYGPLGVALKDNIKREWWRSMVVTRPDVVGVDTSIILPPEVWVASGHVSVFNDPLVECLNCHKRNRADKLEESYAEKHGDKMPENGMKDIVCPNCGIRGQWTEPRDFNMMLRTHLGPVEDENSLHYLRPETAQGIFVDFKNVMTSSRSRPPFGIANMGKSFRNEITPGNFIFRTREFEQMEMEFFVTPGTDEEWHQYWIDARTRWYIDLGVKPENLRHYEHPKEKLSHYSKRTVDIEYKFGFQGSDWGELEGIANRTDYDLSAHSKHSGEDLSYFNQATGEKYVPYVIEPAAGLTRSLMCFLVDAYDVDEAPNTKGGVDKRTVLRLDPRLAPVKAAVLPLSKKPELQTVAQNLADDLRFNEWMIDYDESGAIGRRYRRQDEIGTPLCITVDFDTLEDHAVTIRERDTMAQERVALDKVADYVAARIGEKRTRVPLKPVEMGGEPWPESGVQEAGGLY

SEQ ID NO: 30007 - protein, 238 aa, Ceratopteris richardii
MVRRKIKIKRIENATTRQVTFSKRRGGLLKKAHDLSVLCDAEVAVIIFSSKGKLFQFANPSMETVLGRYVKASRDPEAGDNGSSTDNVEADRLTVFTEKLKMLQSNVIGDDLERLSLRDLIHLEQQVHESLGHIRAKKDELILEQIDEFKQKMADTRRTTNANTSMLDRLVDFCSSGITGSQNIVESEPGYVVGVPRTDTLRAGWIATSDQSNDGPEYVPCAKRFRITEDLNESPASE

SEQ ID NO: 30008 - protein, 298 aa, Rickettsia tarasevichiae
EKSDFLEVAYLLIYGELPSSEQYNNFTKKVAVHSLMNERLHYLFQTFCNSSHPMAIMLAAVGSLSAFYPDLLKFKEADYELTAIRMIAKIPTIAAMSYKYSIGQPFIYPDNSLDFTENFLRMMFATPCTKYEVNPVIKNALNKIFILHADHEQNASTSTVRIAGSSGANPFACISTGIASLWGPAHGGANEAVINMLKEIGSSENIPKYIAKAKDKDDPFRLMGFGHRVYKNYDPRAAVLKETCKEVLKELGQLENNPLLQIAIELEASALKDEYFIERKLYPNVDFYSGIIYKAMGI

SEQ ID NO: 30009 - protein, 414 aa, Arabidopsis thaliana
  misc_feature (96)..(96): Xaa can be any naturally occurring amino acid
  unsure (1)..(414): unsure at all Xaa locations
MMIAQELGIYVVESKGGAILCLLLSLLCLGTWPALMALLERRGRLPQHTYLDYSITNFLAAIFIAFVFGGIGESTHEAPSFITQLTQIQDNWPSVXLFAMAGGVGLSIGNLATQYSLAFVGLSVTEVTAASITVVVGTTVNYFLDNGLNRADILFSGVGCFMVAVCLGSAVHSSNSADIKAKLGKLSGDCETVTPEECQRLFGVEEEEEEEKEMENVKEGSAAFLIALENKRAIQVLGKSMVVGLGITFFAGLSFSLFSPLFNLATNDQWHTLKQGVPKLIVYTAFFYFSLSCFVIAVALNISFLYKPVLDSPRSSFREYLSDWNGRGWALAAGLLCGFGNGLQFMGGQAAGYAASDAVQALPLVSTFWGIYLFGEYRRSSTRTYALLVGMLVMFTVAVGLLMASAGERETRFT

SEQ ID NO: 30010 - protein, 142 aa, Glycine max
NILCLCTNEIGQSETQYPDLFEYKNFSVCDSDDYNISSIFEEACDFIDYVEQTGQKVLVHCFEGRSISVTLVLAYLMLRKNHTLSEAWQALKRVHRRAQPNDGFAKILLELDQKLHGKVSMEWHQRKPVMKICPICGKNAGL

SEQ ID NO: 30011 - protein, 358 aa, Ralstonia eutropha JMP134
MYPKNFWYVGAMKHEVGRQLLARTLLEQPVVFFRRNDGSVAALADRCSHRRVSLSLGRLIGDEVQCGYHGLTFAGDGSCTSIPGQSRVPPSACVRSYPVVERDGFVWIWPGDPALANETLVPDYAEICSSGRYVGRPAEALLVEAPFLFNIENVLDLSHVTYAHPETVGTPEVALTRPTVDVSEAKVQVTRNWDKASTGPSFKNLFGWDFVKNSQRISFWPGANMLLEIEVEPVGNNDPTQIKRLRVPGPCTPSTSTTHFKFSALYRDFLPDNEALTVGMFEQFRKTVMEDKVLMENQQRNWALDGVEVIRRIEPSSSGGMMDIAVDHAPLAARRWLQRLAMAERSAPEIKAPGVLQG

SEQ ID NO: 30012 - protein, 129 aa, Salmonella enterica
WEICIIWGLGISLAVYLTAGISGGHLNPAVTIALWLFACFPKQKVLPYIIAQFAGAFGGALLAYVLYSSLFTEFETAHHMVRGSVESLQLASIFSTYPAAALNVWQAALVEVVITSILMGMIMALTDDG

SEQ ID NO: 30013 - protein, 343 aa, Chrysosplenium americanum
MLFAMQLACASVLPMVLKSAIELDLLEIIRGQDTCMSPTEIASHLPTTNPDAPAMVDRILRLLSCYSVVTCSVRSVDDQRVYGLAPVCKYLTKNQDGVSIAALCLMNQDKVLMESWYHLKDAVLDGGIPFNKAYGMSSFEYHGTDPRFNKVFNRGMSDHSTITMKKVFQTYQGFQGLTSLVDVGGGTGATLTMILSKYPTIRCINFDLPHVIEDAPEYPGIEHVGGDMFVSVPKGDAIFMKWICHDWSDEHCLKLLKNCYDALPNNGKVILAECILPEVPDSSLATKGVVHIDVITVAHNPGGKERTEKEFEALAKAAGFQGFQVFCNAFNTYIIEFSKKICN

SEQ ID NO: 30014 - protein, 126 aa, Salmonella enterica
WGLGISLAVYLTAGISGGHLNPAVTIALWLFACFPKQKVLPYIIAQFAGAFGGALLAYVLYSSLFTEFETAHHMVRGSVESLQLASIFSTYPAAALNVWQAALVEVVITSILMGMIMALTDDGNAF

SEQ ID NO: 30015 - protein, 631 aa, Arabidopsis thaliana
MTIQIYAKTLTEKTITLDVETSDSIHNVKAKIQNKEGIPLDQQRLIFAGKQLEDGLTLADYNIQKESTLHLVLRLRGGMQIFVQTLTGKTITLEVKSSDTIDNVKAKIQDKEGILPRQQRLIFAGKQLEDGRTLADYNIQKESTLHLVLRLCGGMQIFVSTFSGKNFTSDTLTLKVESSDTIENVKAKIQDREGLRPDHQRLIFHGEELFTEDNRTLADYGIRNRSTLCLALRLRGDMYIFVKNLPYNSFTGENFILEVESSDTIDNVKAKLQDKERIPMDLHRLIFAGKPLEGGRTLAHYNIQKGSTLYLVTRFRCGMQIFVKTLTRKRINLEVESWDTIENVKAMVQDKEGIQPQPNLQRLIFLGKELKDGCTLADYSIQKESTLHLVLGMQIFVKLFGGKIITLEVLSSDTIKSVKAKIQDKVGSPPDQQILLFRGGQLQDGRTLGDYNIRNESTLHLFFHIRHGMQIFVKTFSFSGETPTCKTITLEVESSDTIDNVKVKIQHKVGIPLDRQRLIFGGRVLVGSRTLLDYNIQKGSTIHQLFLQRGGMQIFIKTLTGKTIILEVESSDTIANVKEKIQVKEGIKPDQQMLIFFGQQLEDGVTLGDYDIHKKSTLYLVLRLRQRRYDF

SEQ ID NO: 30016 - protein, 140 aa, Nicotiana tabacum
KEEFHKETCRKIKALHQYDCLRANKSTSAWGLEARVPFLDKEFINVAMSIDPEWKLIKPEQRRIEKWALRRAFDDEEHPYLPKHILYRQKEQFSDGVGYSWIDGLKAHAEQHVTNRMMLNASHIFPHNTPITKEAYYYSM

SEQ ID NO: 30017 - protein, 127 aa, Salmonella enterica
IIWGLGISLAVYLTAGISGGHLNPAVTIALWLFACFPKQKVLPYIIAQFAGAFGGALLAYVLYSSLFTEFETAHHMVRGSVESLQLASIFSTYPAAALNVWQAALVEVVITSILMGMIMALTDDGNG

SEQ ID NO: 30018 - protein, 159 aa, Nicotiana tabacum
MAMIPSFFGGRRSNIFDPFSLDIFDPFEGFPFSGTVANVPSSARETSAFANARIDWKETPDSHIFKMDVPGIKKEEVKVEVEEGRVLQISGERSREQEEKNDTWHRMERSSGKFMRRFRLPGNAKMEEIKAAMENGVLTVTVPKEEEKKSEVKAIDISG

SEQ ID NO: 30019 - protein, 413 aa, Arabidopsis thaliana
MKMALLLSSTITVAMKQNPLVAVSFPRTTCLGSSFSPPRLLRVSCVATNPSKTSEETDKKKFRPIKEVPNQVTHTITQEKLEIFKSMENWAQENLLSYLKPVEASWQPQDFLPETNDEDRFYEQVKELRDRTKEIPDDYFVVLVGDMITEEALPTYQTTLNTLDGVKDETGGSLTSWAVWVRAWTAEENRHGDLLNKYLYLSGRVDMRHVEKTIQYLIGSGMDSKFENNPYNGFIYTSFQERATFISHGNTAKLATTYGDTTLAKICGTIAADEKRHETAYTRIVEKLFEIDPDGTVQALASMMRKRITMPAHLMHDGRDDDLFDHYAAVAQRIGVYTATDYAGILEFLLRRWEVEKLGMGLSGEGRRAQDYLCTLPQRIRRLEERANDRVKLASKSKPSVSFSWIYGREVEL

SEQ ID NO: 30020 - protein, 154 aa, Salmonella enterica
YGRFAIIWGLGISLAVYLTAGISGGPLNPAVTIALWLFACFPKQKVLPYIIAQFAGAFGGALLAYVLYSSLFTEFETAHHMVRGSVESLQLASIFSTYPAAALNVWQAALVEVVITSILMGMIMALTDDGNGIPKGPLAPLLIGILVAVIGAST

SEQ ID NO: 30021 - protein, 459 aa, Rhodococcus sp. DK17
MSLAPSRVTLPDFIDSRPVSRYQYIVIALCGVVMFIDGFDTQSISYMAPHIAEEWGLSKQVLGPIFSAALAGLMVGYLALSPLSERFGHRRMILTSTVIFALGTLAAAWSQNVTELMALRFITGMGLGAAAPSAIALTGEFSPKRLRATFVLVIYCGFSLGFVAAGLVSGWLIPILGWRSVLVVGAVAPLLLLPALLRYLPDSLTSMINRGAEPNRIQAIFRKMDPALAVGPDITYEAEKRTDGQRTALRSLFTRDRVLGTLLLWLVFVINLGEFYALQSWLPSIMTSLDYNMGTVVTATTLTTVGGIAAAFVTGPCMDRLGAYVTLGTVYVVGFAFVALTGVAFTAPLWVLLTANFFAGVCISGGQKSLIALSAVFYPTPMRSTGVGWALGVGRLGGIVGPIAVGAALGMGWSASAVFYAMSVPMLVAGAAVFLLGRWVRSDNHPDRKSAESHSLARK

SEQ ID NO: 30022 - protein, 462 aa, Burkholderia sp. 383
MSHSGLTRTAAAPPSLSSHAADTARLAAPLAIAQLSQMAMSVTDTVLLGSLGPDSLAAGGLGANFFFVIVTVLQGVLSSVSVSVAHARGAKADERVPHIYWTGFALSVLLAIPAIIALSLSEPILLMFHEPPLLAHHVGEYTGILRFAALGSLIGVGLMRAFLPAIGAARRLLWVSIGGVGVNGVLNYGLIHGAFGLPRLGFLGSAVATTITIWLTALALIWLLHGRQRFRHFVTAARPKLPMMGELIGIGWPVAITYGVESTLFLATGLTIGVLGATSLAAHQIALNVASVAFMVPLAIGQAANVRVGYWVGAGAPVAARHAGFVALGLGVAFMTLSGIVLIVAPHAIVGLYLNLDDPANAATVSLAASLLGIAAVFQIVDGAQTVASGALRGLKDTRIPMLAATLGYWGIGFPTGYWFAFHVGLGARGLWWGLAAGLASVAVLMAWRFHLKSASFVTSPH

SEQ ID NO: 30023 - protein, 350 aa, Methanopyrus kandleri AV19
MGLGVALDIKEGKVVVRRSPDVREYIPISRRYDLPDDPHELATLLVERYDLDFVYVADLDAILRGEPADTSDALESLEKPVFVDVGACEPDLPSHAHRVIPTECYDDKSEYIEDLEEDESAVAGLDLNGSEILGPWDGVGDFLDTVVEVVYRRDPGVLVIDVGAVGSKEGPPYEAATSVGMYSTALIGGGVGHPEHVKLALGTPGVSGVILGTILFEGVDPMKLEQARREGKRLRVHHMGLEEEYLNLIKEGKKTVEGRVKDDKRARIKPGDKILFNRRLLVKVIDVREYDSFEEMLREEGLENVLPNVDSIEEGVEIYRRFYSSGKEKMFGVLAIEIEPIMDLWEGICD

SEQ ID NO: 30024 - protein, 464 aa, Pseudomonas fluorescens
MAVYNYDVVVLGSGPAGEGAAMNAAKAGRKVAMVDSRRQVGGNCTHLGTIPSKALRHSVRQIMQFNTNPMFRAIGEPRWFSFPDVLKSAEKVISKQVASRTGYYARNRVDLFFGTGSFADEQTVEVVCANGVVEKLVAKHIIIATGSRPYRPADIDFHHPRIYDSDTILSLGHTPRKLIIYGAGVIGCEYASIFSGLGVLVELVDNRDQLLSFLDSEISQALSYHFSNNNITVRHNEEYDRVEGLDNGVILHLKSGKKIKADALLWCNGRTGNTDKLGMENIGVKVNSRGQIEVDENYRTCVTNIYGAGDVIGWPSLASAAHDQGRSAAGSIVDNGSWRYVNDVPTGIYTIPEISSIGKNEHELTKAKVPYEVGKAFFKSMARAQIAGEPQGMLKILFHRETLEVLGVHCFGYQASEIVHIGQAIMNQPGEQNTLKYFVNTTFNYPTMAEAYRVAAYDGLNRLF

SEQ ID NO: 30025 - protein, 418 aa, Mesorhizobium sp. BNC1
MRRVVVTGVGLLSPLGLGAEHSWNKLLAGASGAKRIDTFEVDDLPCKIANTIPREGEGGFDPQAFLEPRELRKIADFVAYGIVAADQALADSGWQPNTEEERCATGVLIGSGIGGIDGIAENALLMQERGPRRISPFFIPGNIINMVSGQVSIRHGLKGPNHAVVTACSTGAHAIGDASRLIMFGDADVMLAGGAESPVTRLSIAGFSACKALSTSFNDTPEKASRPYDRDRDGFVMGEGAGVVVLEELEHAKARGARIYAEVVGYGLSGDAYHITAPSEDGDGAFRCMAAAVKRAGLTPAEIDYINAHGTSTMADTIELKAVERLVGNAASRISMSSTKSSIGHLLGAAGAAEAIFSILAIRDNVAPPTINLDNPEVETPIDLVPNEPCKRQIDVALSNSFGFGGTNASLVFRRYQT

SEQ ID NO: 30026 - protein, 143 aa, Brassica napus
  misc_feature (76)..(76): Xaa can be any naturally occurring amino acid
  misc_feature (93)..(95): Xaa can be any naturally occurring amino acid
  misc_feature (97)..(97): Xaa can be any naturally occurring amino acid
  misc_feature (125)..(125): Xaa can be any naturally occurring amino acid
  misc_feature (131)..(131): Xaa can be any naturally occurring amino acid
  misc_feature (138)..(139): Xaa can be any naturally occurring amino acid
  misc_feature (142)..(142): Xaa can be any naturally occurring amino acid
  unsure (1)..(143): unsure at all Xaa locations
ISKDQLKDYVWKTLNSGKVVPGYGHGVLRKTDPRYVCQREFALKHLPDDPLFQLVSKLYEVVPPILTELGKVKNPXPNVDAHSGVLLNYYGLXXXRXGGGLFGVSRSLGICSQLIWDRALGLPLXRPKSVXMDWLDKXXSLXR

SEQ ID NO: 30027 - protein, 501 aa, Lactobacillus pentosus
MSAVVLGIDLGTSAVKVSAIDKQGNVVAQASAKYALQQPHPGYSEQDPEDWVTQTTQAIRELLQQSEVTADQIEGLSYSGQMHGLVLLDESATVLRPAILWNDTRTTSQCRELESQFGDDFIKITGNRPLEGFTLPKLLWVKENEPNIWKRARTFLLPKDYLRYRMTGKLAMDKSDATGTVLLDITTSQWSETLCNQLDIPLTLCPPLIESTAYVGHINQTYAQLSGLSVNTKVFGGAADNAAGAVGAGILSSDKALVSIGTSGVVLKYEDNAQTDYRGVLQYERHAFPGKYYSMGVTLAAGYSLNWFKQTFAPDEDFGTVVASAEQSTIGANGLLFAPYIVGERAPYADATIRGSFIGVDGSHQRADFVRAVLEGIIFSFEDLIKLYQHNGAEFKTIVSIGGGAKSALWLQIQADIFNCKVVSLKNEQGPGMGAAMIAATGLGWFKTLADCAQTFVHYGKAYYPVTAHVAQYQEMYRLYQQIYVQTQPITAGLLEQRKQH

SEQ ID NO: 30028 - protein, 489 aa, Oryza sativa
MAAGVALHLHLQGMKVKAIRVHKIGGPEVLTWEEVEIGEPSEGEIRIKNKAIGVNYVDIYYRTGLHQEPLPFVPDLVYGDSDNKIPTYFVKSNVSSWPGENSWLPSELIEYTGKEAVGVVSAVGPGVTGIEVGDVVGYADTPMGTYTEEQIIPATLAIPIPPSVDHITAASVLLKGMTTYVLVKQAFKIQAGHTVLVHAAAGGVGSLLCQWANALGATVIGTVSTQEKAIQAAEDGCHHVIIYTEEDFVAQVAEITSRKGVHVVYDAVGKDTFKGSMECLMPRGCMISYGQCSGRPDPVPVSDLASKSLILGRPGMRHYTATRDELLHAAGEVFAGVAAGVLRVRVNHVYPLHEAARAHADLEARRTSGSVWYQSPRFGTWNNFHGSHGGEARPNVTWVAYGWWAGLRTPTSGRLTFITSGENNFHGSHGNKVVSEPKVWIPEQFPWVTWWTGQLRLISTGKRDGGDHHSDKPHAGMSFQAVNLKDLTV

SEQ ID NO: 30029 - protein, 481 aa, Streptomyces rubiginosus
MSAAEGPLVVGVDTSTQSTKALVVDVATGRVVASGQAPHTVTSGAGRESDPRQWWDALCEALRQCGEAAHEAAAVSIGGQQHGLVTLDGHGEPVRPALLWNDVRSAPQGHRLIEELGGAKFWAERTGSVPAASFTVTKWAWLAEHEPEAVRATRAVRLPHDYLTERLTGQGTTDRGDASGTGWWASGTEAYDEEILGHVGLDPALLPRVVRPGEVAGTVRDSHELPFSKGTLVACGTGDNAAAALGLGVRPGTPVMSLGTSGTVYAVTQRRPADPTGTVAGFADARGDWLPLACTLNCTLAVDRVAALLGLDREAVEPGHGVTLLPFLDGERTPNLPRSSGLLHGLRHDTTGGQLLQAAYDGAVYSLLAALDLVLDEDADPSAPLLLIGGGARGTAWQQTVRRLSGRAVQVPRAAELVALGAAAQAAGLLTGEDPAAVARRWETAAGPVLEAVERDEETLDRLAGVLSDAAPLLERGTGAG

SEQ ID NO: 30030 - protein, 210 aa, Oryza sativa
  misc_feature (147)..(147): Xaa can be any naturally occurring amino acid
  misc_feature (151)..(151): Xaa can be any naturally occurring amino acid
  misc_feature (168)..(168): Xaa can be any naturally occurring amino acid
  misc_feature (177)..(177): Xaa can be any naturally occurring amino acid
  misc_feature (192)..(193): Xaa can be any naturally occurring amino acid
  unsure (1)..(210): unsure at all Xaa locations
VTLDYARFLSKAAARRQPSAIREVTQLFARSPPSTISFGSGSPNPALFPFKEATITLTDDTTIELDPSAMAKALQYLPTPGQVNLLDWLRKLQTHYHSPKEFQRYDLCITNGSMEGLSKVFELLLNPNDSILVDSPCYSGSLDFLRXFGAXMIGVDTDSYGMSAESLXQVLSNWSNXNLMPKVIYTNSNGSXXTGASMNGERKKDIYQLD

SEQ ID NO: 30031 - protein, 583 aa, Candida albicans SC5314
MGQILSQPVVEKHSDEHKDKYLAYGISCMQGWRINMEDAHATILNLYDLPLKKSLSSNSEQDEDEEDEEEEADSQDSTTTNTTKSHQQQNQKEDLQQNNDKQNSQQDIKDGDNDTQMSDSDENHHHAAPQQQHIAFFGVYDGHGGEKAAIFTGEKLHHLIKETKEFKQKDYINALKQGFLNCDQEILKDFYMRDDDSGCAATSAIITPDLIVCGNAGDSRTIMSTNGFAKALSFDHKPSNEGEKARICAAGGYVDMGRVNGNLALSRGIGDFDFKKNVDLPAEEQIVTCYPDVIQHNIDYKSDEFVVLACDGIWDCLTSQKCVECVRRGIYERKSLSIICEEIMDLCCAPTSDGSGIGCDNMSIAIVALLDYTKNETLDQWYEKIISRVEQQQQQKNDPNSLNKYGPISQPYNELYKEMYGEYYDIGQQGQGGNGRSNIGSGSGRGSGASGSSSGGGASINGNSIFGRSGYDDEEDDDEEKNIERRRRDQDESNLNGGAISLQKLLASNAITNENGVIYLDTSSAQSLLAHFGVADAGAHGDEEDEEEEGEDVHQGLAHEEEEEEEKEGSKIEEISEKIDDEV

SEQ ID NO: 30032 - protein, 512 aa, Arabidopsis thaliana
MVSHPMEKAANGASALETQTGELDQPERLRKIISVSSIAAGVQFGWALQLSLLTPYVQLLGIPHKWASLIWLCGPISGMLVQPIVGYHSDRCTSRFGRRRPFIVAGAGLVTVAVFLIGYAADIGHSMGDQLDKPPKTRAIAIFALGFWILDVANNTLQGPCRAFLADLSAGNAKKTRTANAFFSFFMAVGNVLGYAAGSYRNLYKVVPFTMTESCDLYCANLKTCFFLSITLLLIVTFVSLCYVKEKPWTPEPTADGKASNVPFFGEIFGAFKELKRPMWMLLIVTALNWIAWFPFLLFDTDWMGREVYGGNSDATATAASKKLYNDGVRAGALGLMLNAIVLGFMSLGVEWIGRKLGGAKRLWGIVNFILAICLAMTVVVTKQAENHRRDHGGAKTGPPGNVTAGALTLFAILGIPQAITFSIPFALASIFSTNSGAGQGLSLGVLNLAIVVPQMVISVGGGPFDELFGGGNIPAFVLGAIAAAVSGVLALTVLPSPPPDAPAFKATMGFH

SEQ ID NO: 30033 - protein, 479 aa, Alkaliphilus metalliredigenes QYMF
MNCKMYIDGQWVEGKEGEKLEVVNPATGDILVYIAKAGYAETERAIESADKAFKTWSKTTAGERANYLTKLYHLMIEHKDEIAKIMTLEQGKPLQEAMGEVVYGAGFVEWYAEEAKRVYGETIPASKENKRIMVLKQPVGVVAAITPWNFPAAMITRKMAPALAAGCTVVLKPASSTPLTAIKIFELCEKAGFPKGVVNLVIGDASKIGETLMNDFRVRKLTFTGSTEVGKKLMTQAGATVKRISLELGGHAPFIVFDDADLDKAVTGALNSKLRNCGQVCVASNRFYVQEGIIDDFILKMKEKLKNYKIGSGLEEGVHLGPLIDQNAYEKVKTHIEDAVNKGAKIEFGGEGFHRGSSAAGGYFYQPTLLSNVTEEMLIMKEETFGPVIPVVSFKSEEEVIARANDTKYGLAAYFFTQSLAKGFRVSEALAYGIVGVNDGVPSTPQAPFGGFKESGIGREGGHYGIEGFLETKYVSFEI

SEQ ID NO: 30034 - protein, 82 aa, Triticum aestivum
MLLSGRMAASALLLLVLLVATEMGTPTRKVAEARDCLSKSHKFKGACLSSSNCASICRTENFPGGECKLDSFARKCFCKRVC

SEQ ID NO: 30035 - protein, 366 aa, Xanthomonas campestris pv. campestris str. ATCC 33913
MLFETLDTTGHEQVIFCHNRDAGLKAIIALHSTRLGPALGGVRMRPYANSEAALNDALRLSRTMTYKNALAGLNVGGGKAVIIGDPKTDKSEALFRAFGRFVDTLGGRYITSEDVGTDVNDMEQIYLESEYVTGVHQVHRGSGDPAPFTAYGALQALMASLNRKLGHEEVGKASIAIQGLGHIGMELVKLLKERGAKLYVADLNPALVDRAVSEYGAEAVRPEEIHEVPADVFAPCALEGAINEDTLPRLKAKIICGTANNQLSSAAIGEELHKRGILYAPDYVVNAGGVMNVSLEIDGYNRERAMRLIRSIYHNLEKVFDLSTQLGIPPQQAADQIAETRIEAISKLKLPLGRTAPRFLHKLRGE

SEQ ID NO: 30036 - protein, 409 aa, Nicotiana tabacum
MTSVGLAPVSGLRESSSHSVGVDRLPEEMNDMRIRDDKEIEAAIVDGNGTETGHIIVTTIGGRHGQPKQTISYMAERIVGQGSFGVVFQAKCLETGETVAIKKVLQDKRYKNRELQTMRLLDHPNVVCLKHCFFSTTEKDEVYLNLVLEYVPETVHRVIKHYNKLNQRMPLILVKLYTYQIFRALSYIHHTIGVCHRDIKPQNLLVNPHTHQVKLCDFGSAKVLVKGEPNISYICSRYYRAPELIFGATEYTTAIDIWSAGCVLAELLLGQPLFPGESGVDQLVEIIKVLGTPTREEIKCMNPNYNEFKFPQIKAHPWHKIFHKRMPPEAVDLVSRLLQYSPNLRCTALEAVTHAFFDELRDPNTRLPNGRVLPPLFNFKAHELKGVSAENLLKLVPEHARKQCPSLGL

SEQ ID NO: 30037 - protein, 399 aa, Alkaliphilus metalliredigenes QYMF
MSKRDEKDEILEQAVAMKRWMVEIRRDFHQYPELGREEFRTQEKIIRLLDEMGIPYQTNIAHTAVVGFIKGKHEGKTVALRADMDALPIDDAKDVPYRSKVPGKMHACGHDAHTTILLGAAKILNDMRAQLKGNVKLFFQPAEETFGGAESMIEAGVMENPKVDAVFGLHVSPEMPTGEIGLKFGQMNASSDSIKITLHGKSTHGAYPHSGVDTIMMAGQVINALQTIVSRNVDPRDSAVVTLGKINGGTQGNIIADKVEMVGTVRTLDPNVRERVLERIEKIVLQVAEAMGGSGEVLRKKGYTALINHDEMVESVKANAEALLGPDKVKIIKSPSLGVEDFAYFLQEAPGAFYRLGCRNEEKGMIHDGHNGLFDVDEDCLEIGVALQVKNVLRVLGKE

SEQ ID NO: 30038 - protein, 433 aa, Rubrobacter xylanophilus DSM 9941
MPLVDLDRFDFLYASRVRGMKTAATRDLMATLSRPGIISLAGGFPDTRLFGEEAFREISRSIAADAAQALQYGPTGGLEAVKDVIVEVMAAEGTPADQESIFVTTGAQQGLDLVAKVFLDEGDGILCEGPTYAGALNAFAAYRPKIAHVPMDRSGMIPSAARETLRRARKQGLTVKFIYTVPNFHNPAGVTMAAGRRRELLEIAEEFDLIIVEDNPYGMLRFEGEPLPTLCAMEQEEVGHPDRVVYLGTFSKIFAPGVRLGWVHAQPGILHKINVGKQGADLCSSNLSQMMLASYFKEADWRAYVRRQNALYRERRNTMLDALAEFMPGEVHWTHPEGGLFVWVTLPSYLDATAMLPRAIARNVAYVPGEGFYAGGAGKNHMRLNFSFVEPEKISRGIEILAEVVRERMELRSDLERGARRGARRGTPAGTDR

SEQ ID NO: 30039 - protein, 280 aa, Pleurotus djamor
MERYNTRTASNFPGLVFDCAEEAQSGYKHIDTAYNYHTEKYVGNAVRESGIPREELFITTKLPWHHYARVAESFQESLDALGLGYIDLYLIHWPQPILYDPNDPLPKNPDGTPKTTNYPFTKIWADMERLLDTGKVRAIGVSNFSIKNLEILLESAKVVPAVNQVELHPYLAQPELVDYCKQKGIAITAYTPTGYQTVRDDPVIVELASKYRVSPAQVILAWHMSRGVIVTPKSANAERQRENINVSFLHFPINSFDVLFLASTAATCPGACRSSAYISS

SEQ ID NO: 30040 - protein, 599 aa, Haemophilus ducreyi 35000HP
MQSVNFDVAIIGAGGGGLRAAIATAEANPNLKIALISKVYPMRSHTVAAEGGSAAVIKDSDSFDNHFNDTVGGGDWLCEQDIVEYFVEHSPLEMTQLERWGCPWSRRADGEVNVRRFGGMKIERTWFAADKTGFHLLHTLFQTSIKYPNIIRFDEHFVLDILTDNGEARGCVAMNMMEGNIVQINANAVVIATGGGCRTYRFNTNGGIVTGDGLSMAYRHGVALRDMEFVQYHPTGLPNTGILMTEGCRGEGGILVNKDGYRYLQDYGLGPETPIGKPENKYMELGPRDKVSQAFWQEWRKGNTLKTEKGVDVVHLDLRHLGEKHLTERLPFICELARAYEGVDPVKAAIPVRPVVHYTMGGIEVDMQAETSIKGLFAVGECASSGLHGANRLGSNSLAELVVFGKVAGENAARRAQEIGARHQTQINAQAQDVVDRLHMLARQEGNESWADIRNQMGDAMEEGCGIYRTQASMEGAVNKIEELKERYKNISIKDKSSVFNTDLLYKIELGFILDAAQSIACSAVERKESRGAHQRLDYTERDDVNYLKHTRAYYNAEGKPTIKYSDVKITKSQPAKRVYGAEAEAQEKVKKAAEQAQK

SEQ ID NO: 30041 - protein, 306 aa, Pleurotus djamor
MSAYPPIVLNTGARMPALALGGWAGLTEEERTQAKEWFLTALKSGYRHIDTAQIYYTEKSVGNAIRESGIPREELFITTKLPWNHHSRVAESFQKSLENLGTEYIDLYLVHFPQRVFYDETTDFPRNPDGSIKVVNSPTLNDVWADVETLLDTGKVKAIGVSNYSIKTLEELLKTAKVVPAVNQVELHPFLAQSKLLAYCKEKGIAVTAYTPTGYQTVLTDPTIVELAGKYGVSPAQIVLAWHLSRGVAAAPKSANESRQKENLNLPFLQPEDVAKISALDRGQRIANKADERGQVWGLTLEELGW

SEQ ID NO: 30042 - protein, 561 aa, Ralstonia eutropha JMP134
MTHLKITGMTCDSCAAHVKEALEKVPGVQSALVSYPKGTAQLAIVPGTSPDALTAAVAGLGYKATLADAPLADNRVGLLDKVRGWMAAAEKHSGNEPPVQVAVIGSGGAAMAAALKAVEQGAQVTLIERGTIGGTCVNVGCVPSKIMIRAAHIAHLRRESPFDGGIAATVPTIDRSKLLAQQQARVDELRHAKYEGILGGNPAITVVHGEARFKDDQSLTVRLNEGGERVVMFDRCLVATGASPAVPPIPGLKESPYWTSTEALASDTIPERLAVIGSSVVALELAQAFARLGSKVTVLARNTLFFREDPAIGEAVTAAFRAEGIEVLEHTQASQVAHMDGEFVLTTTHGELRADKLLVATGRTPNTRSLALDAAGVTVNAQGAIAIDQGMRTSNPNIYAAGDCTDQPQFVYVAAAAGTRAAINMTGGDAALDLTAMPAVVFTDPQVATVGYSEAEAHHDGIETDSRTLTLDNVPRALANFDTRGFIKLVIEEGSHRLIGVQAVAPEAGELIQTAALAIRNRMTVQELADQLFPYLTMVEGLKLAAQTFNKDVKQLSCCAG

SEQ ID NO: 30043 - protein, 289 aa, Zea mays
MGRPPCCDNGVGVKKGPWTPEEDIVLVSYIQQHGPGNWRSVPENTGLMRCSKSCRLRWTNYLRPGIKRGNFTPHEEGIIIHLQALLGNKWAAIASYLPQRTDNDIKNYWNTHLKKKVKRLQQPAADSFQTTASNAVTCSPNYYSPSSSHHSLQGMQPMSSYPHTTCSGGAPSNNEAMTDTTTGVVSNLFQAWMRPSPAAATANCKIAMQEFQEEQGAAAAASIVCKEQMVTCGDVNRPPALEMVVAPVMGASTATFSLLEDWLLDDMPGQAMDGFMGISAGCCADPIMF

SEQ ID NO: 30044 - protein, 658 aa, Pleurotus djamor
MAFNLTSTSLTPSRPAPQAPRRGTEDSFGSSSTLNSSGYSSSFSFTPASPSSSSYAASYSGIGGSPNRHPENNMYGGNQIVRNGVVSVKEDGTFASWMWKAKWLVLTDSELSIHKSEHAPKQTVVNLGDISSIERTDLKPYCLLLETKDKRFYFSLKNDEELYGWQDDVYARSPLMGVSNPTNFVHKVHVGFDPVSGAFTGMPEQWSKLLTKSAITREDYAKDPQAVLDVLEFYTDHQKREMEEMGAKESLPIQAPPPLQPSQSKDRERERERERAEREREREKDLARPGMGAPSKSSPATTQPATQPASGPAGATAGPPPVKPLQPTKKVQIQAEEKPKTTGVAAAAAALEKPKEKEKRISTMTEVQIMEKLRQVVSDEDPKTIYSKIKKVGQGASGHVYVAKTLATGKKVAIKEMDLSHQPRKELIVNEILVMKESQHPNIVNFLESYLVKSNELWVVMEYMEGGALTDIIENNTLEEDQIASICFETCKGLGHLHSQSIIHRDIKSDNVLLDAQGRVKITDFGFCAKLTDQKSKRATMVGTPYWMAPEVVKQKEYGAKVDIWSLGIMAIEMIENEPPYLDEEPLKALYLIATNGTPTLKKPEALSRELKGFLAVCLCVDVSSRATASELLDHEFLKKSCALSGLAPLLRFKTKQQ

SEQ ID NO: 30045 - protein, 803 aa, Zea mays
  misc_feature (63)..(63): Xaa can be any naturally occurring amino acid
  unsure (1)..(803): unsure at all Xaa locations
MAAKLTRLHSLRERLGATFSSHPNELIALFSRYVHQGKGMLQRHQLLAEFDALFDSDKEKYAXPFEDILRAAQEAIVLPPWVALAIRPRPGVWDYIRVNVSELAVEELSVSEYLAFKEQLVDGQSNSNFVLELDFEPFNASFPRPSMSKSIGNGVQFLNRHLSSKLFQDKESLYPLLNFLKAHNYKGTTMMLNDRIQSLRGLQSSLRKAEEYLLSVPQDTPYSEFNHRFQELGLEKGWGDTAKRVLDTLHLLLDLLEAPDPANLEKFLGTIPMMFNVVILSPHGYFAQSNVLGYPDTGGQVVYILDQVRALENEMLLRIKQQGLDITPKILIVTRLLPDAAGTTCGQRLEKVIGTEHTDIIRVPFRNENGILRKWISRFDVWPYLETYTEDVSSEIMKEMQAKPDLIIGNYSDGNLVATLLAHKLGVTQCTIAHALEKTKYPNSDIYLDKFDSQYHFSCQFTADLIAMNHTDFIITSTFQEIAGSKDTVGQYESHIAFTLPGLYRVVHGIDVFDPKFNIVSPGADMSVYYPYTETDKRLTAFHPEIEELIYSDVENSEHKFVLKDKKKPIIFSMARLDRVKNMTGLVEMYGKNARLRELANLVIVAGDHGKESKDREEQAEFKKMYSLIDEYKLKGHIRWISAQMNRVRNGELYRYICDTKGAFVQPAFYEAFGLTVIESMTCGLPTIATCHGGPAEIIVDGVSGLHIDPYHSDKAADILVNFFDKCKADPSYWDKISQGGLQRIYEKYTWKLYSERLMTLTGVYGFWKYVSNLERRETRRYIEMFYALKYRSLASQVPLSFD

SEQ ID NO: 30046 - protein, 451 aa, Deinococcus radiodurans R1
MTTLPAPTISTTAELRALLRLAGPVVVSQFAANALALIATAVIGRLGERELAAAAYANAAYYLVFIMVVGVMLSVAPRVAQAHGAGDARGVARALGGGLRLALLLSAVMLPLMWALSFVLPNFAPAGVSRDLVAAYLRVYSLGMLPNLAFIALRGTLEGTGKPGAVTGVALTGVVWALLVAPALAFGWGPLPRLGLAGAAGASASAAWIMAALLWPLARRRVAYAGPLGPLGDEVRALFRLGWPIGLTLGAEGGMFSVTTLLMARFGPEVLAAHNVTMQTITAFFMVPLGIASATGVRVGTEAGAGRLAQARRAGLVGLGLSSAVMLTFAVIELAAPRTVFSVFVNVNDPANAGLIAAATGFLSIAALFQLMDGLQVTANGALRGLQDTRVPLLVSLVAYWVVGLGLGSVLSSVAGLGARGLWFGLTAGLTLAGLSLVGRFLYRTRAGRAA

SEQ ID NO: 30047 - protein, 464 aa, Gluconobacter oxydans 621H
MSSALSSPPTDPTTPRSHALALLRVALPLALSQLSEMAMGVTDTILLGGLGVTEVAIGGLSSTFFFTTMVTFQAILGGAGVLLSHGRGAEEHGRTSHDGRSVMSATLMLAIAVFIPCALLLAFSKTIFGAIGEPAEVVTHGSRFIDILLLSLLPDLAVIGVLRVALPALGAETLLLWIMPAMAVCNGLTNAALIHGWAGLPAMGLYGSATATTLTGWVVSFALFGLCLTHPRVRAVLKPAAVQWPVVKELLKLGGPMMMGAAAEILMFQITSLRAGELGTHSLAAHQVALNVSSLLFMVCLAIGQATNVRVAYWRGAGRMEQSRRAALTGTGIVLMWSLATSSLLLIWPEKILPLYFSNRAPDPETTALVVILLRTAGLYQIVDGLQCVFSGALRGCGDAVTPMLIAVASYGLIGLVFGGWLAFHQHVGVEGLWIGMALALATTCVAFGIRLLRVMRKPVPARS

SEQ ID NO: 30048 - protein, 115 aa, Salmonella enterica
LTAGISGGHLNPAVTIALWLFACFPKQKVLPYIIAQFAGAFGGALLAYVLYSSLFTEFETAHHMVRGSVESLQLASIFSTYPAAALNVWQAALVEVVITSILMGMIMALTDDGNG

SEQ ID NO: 30049 - protein, 484 aa, Zea mays
MAPLRLRAGAAAPMAAAAATVVLAAILALFGCCAAAASAAATDVTAAAELDRIDRLPGQPPVNFSMYSGYVTVDAAAGRALFYWLMEASGVPAGSAPLVLWLNGGPGCSSLGYGAMEELGAFRVNPDGATLSLNPYAWNNVANVLFLDSPAGVGYSYTNTTDDLYAAGDNKTAHDSYAFLINWLERFPQYKHRDFYITGESYGGHYVPQLSWLVYQNNKGIKNPTLNFKGFMVGNAVIDDYHDYMGTFEYWWTHGLISDETYAKLWEDFKNDVSENPSEECQKIYEVAEAEQGNIDLYSIYTPTCKKTSLQKRRLIRGRMPWLPRGYDPCTELYITKYCNLPEVQDAFHANVTGIPYAWVGCSDPIYEYWKDSPRSMLPIYRELISAGLRIWVFSGDADSVVPLTATRYSIDALSLPTITNWYPWFDDEEVGGWCQVYEGLTLVTVRGAGPEVPLHRPRQGLKLFEPFLRGEPMPRPVDSVQSF

SEQ ID NO: 30050 - protein, 338 aa, Glycine max
MERYEILKDIGSGNFAVAKLVRDNYTNELFAVKFIERGQKIDEHVQREIMNHRSLKHPNIIRFKEVLLTPTHLAIVMEYASGGELFERICNAGRFSEDEARFFFQQLISGVSYCHSMQICHRDLKLENTLLDGSTAPRVKICDFGYSKSSVLHSQPKSTVGTPAYIAPEVLTRKEYDGKIADVWSCGVTLYVMLVGAYPFEDPADPRNFKKTIGKILSVQYSVPDYVRVSMECRHLLSQIFVASPEKRITIPEIKNHPWFLRNLPMELTEGGSWQMNDVNNPSQNVEEVLSIIQEARKSLNVPKVGGLLTGGSMDLDDFDADEDLEDLETSGEFVCPI

SEQ ID NO: 30051 - protein, 110 aa, Glycine max
  misc_feature (17)..(17): Xaa can be any naturally occurring amino acid
  misc_feature (60)..(60): Xaa can be any naturally occurring amino acid
  unsure (1)..(110): unsure at all Xaa locations
AAKHTFTASRLSNPPSXSPGTKQKTEKTTDKIEKSDGAKDAGAGGTGAAAAAGTGPRKCXKEDPTKIITDNRQTRGANTAREESLKKEEEAGKLKYVCQSNEGVEEHKVR

SEQ ID NO: 30052 - protein, 520 aa, Debaryomyces hansenii CBS767
MLRNSASNIVKATYTRRLYSTYDSSSKVLSSLKNKDLIRTQGYINGQWVASSDNSTFEVNNPALASGAGTKIADVSSMTTKDYVRAINSAQDAFSDFKKTTGRYRSDLLMNLYRLMQENQDDLAKLIVLENGKPYADAFGEVAYASSFFQWFAEEAPRVYGDIIPSALADSKILVMRQPIGVCGILTPWNFPAAMITRKLGAAAATGCTTVIKPASETPLSALALAYLAEQAGFPKGSVNVLPSSDAAGVGKLMCENPTIKKVSFTGSTNVGKLLMSQSSSTLKKLSMELGGNSPFIVFNDADIDKAVDGAIGSKFRSSGQTCICTNRLFVHESIYDEFASKLTKKLSETVKLGNGLADGTTHGPLIHGKSMNKVRSHIEDATSKGAKVLLGGNKREDLGVNFHELTVLGGVTQEMDIFNEETFGPVAPLIKFKSDEEVISLANDTDVGLAGYFYSSNINRVFKVAEELQVGMIGANTGAISESALPFGGVKESGFGREGSKYGIDDYTVVKSVVLGGLD

SEQ ID NO: 30053 - protein, 289 aa, Triticum aestivum
  misc_feature (232)..(232): Xaa can be any naturally occurring amino acid
  misc_feature (258)..(258): Xaa can be any naturally occurring amino acid
  unsure (1)..(289): unsure at all Xaa locations
VILEQVCTKKQAPTGPEFPGYRRPTRPRSSTIVASLGTPAPSNSSSFRPKLIRNTPVQAAPVAPALMDAAVERLKTGFEKFKTEVYDKKPDFFEPLKAGQAPKYMVFACADSRVCPSVTLGLEPGEAFTIRNIANMVPSYCKNKYAGVGSAIEYAVCALKVEVIVVIGHSRCGGIKALLSLKDGADDSFHFVEDWVRIGFPAKKKVQTECASMPFDDQCTVLEKEAVNVSLXQNLLTYPFGKEGGVQRKPLSSLGGQXTFSPGKFEDMEAINPPHPVNFLYIHANNQRR

SEQ ID NO: 30054 - protein, 418 aa, Cyanidium caldarium
MREVISLHIGQAGVQVANACWELFCLEHGILPDGTMASRDSAIAAANNASFGTFFSETSSGKHVPRCLFLDLEPSVVDEVRTGPYRQLYHPEQLMSGREDAANNYARGHYTVGKEIVDTALDRIRKLADNCSALQGFLIFNSVGGGTGSGLGSLLLERLSVDYGKKSKLGFTVYPSPQVSTAVVEPYNSVLSTHALLEHTDVAVLLDNEAIYDICRRSLDIERPTYKNLNRLIAQVISSLTASLRFDGALNVDLTEYQTNLVPYPRIHFMLSSYAPVISAEKAHHEQGSVAEITTAAFDPANMMAKCDPRHGKYMACCLMYRGDVQPKDVNSAVKAIKGKRSIQFVDWCPSGFKVGINSQPPTVVPNGDLAKVQRAVCMVSNSTAIAEVFARIDHKFDLMYAKRAFVHWYVGEGMEEG

SEQ ID NO: 30055 - protein, 132 aa, Boechera holboellii
ASWHPPWYSSYTAHYREAECMKEAMEELLYSYGTDIVFNGHVHAYERSNRVYNYELDLCGPVYIVVGDGGNRERMAIEHADEPGKCPEPLTTPDPFMGGFCAWNFTPSGKFCWDHQPDYSAMRESSFGHGIL

SEQ ID NO: 30056 - protein, 416 aa, Cyanidium caldarium
MREILHIQVGQCGNQVGRKFWEVISEEHGVDAQGFYRGDSEQQLERISVYYNEASTGRYVPRAVLVDLEPGTMDAVRASDYGTLFRPDNFVYGQSGAGNNWAKGHYTEGAELVDAVMDVVRKECESCECLQGFQVTHSLGGGTGSGLGTLLISKIREEYPDRMMCTYSVMPSPKVSDTVVEPYNATLSIHQLVENADEVFCIDNEALYDICQRTLKLTNPSYADLNKLVSGVMSGITCSLRFPGQLNSDLRKLAVNLIPFPRLHFFSVSLAPLTATASTAYRHLSIADLTQQMFDAKNQFVACDPRQGRYLTAAAYFRGSRISTKDVDEQMSMVQSKNSAYFVEWIPHNIKSSVCGVPPKGLDMSCVFVGNTTAVQEIFKRVGEQFSAMFRRKAFLHWYVGEGMDPMEFTEAESNM

SEQ ID NO: 30057 - protein, 448 aa, Mycobacterium leprae TN
MSSTNNHQVVKLDRVPLPVEAARIAATYWQITRAAARVATKLAGKGPWQQKVIREIPQTFANLGPTYVKFGQIIASSPSAFGESLAREFRGLLDQVPPADTNEVHKLFVEELGDAPSKLFASFSEEPFASASIAQVHSAILHSGEHVVVKIQRPGIRRRVAADLQILKRFAQAVELAKLGRRLSAQDVVADFSDNLAEELNFRLEAQSMEAWGSYLHTSPLGKNIRVPKVHWEFTGERVLTMEQVHGIRIDNADAIRKSGFDGVELVKALLFSVFEGGLRHGLFHGDLHAGNLHVDDQGRIVFFDFGIMGRIDPRTRWLLRELVFALLVKKDHAAAGKIVVLMGAVGTVKPEARAAKDLENFTTPLAMKTLGDMSYTDIGRQLSALSDAYNVKLPRELVLIGKQFLYVERYMKLLAPEWQIMLDPELTGYFANFMVEVSREHQSDVEI

SEQ ID NO: 30058 - protein, 385 aa, Geobacter sulfurreducens PCA
MPARTALIYSNDFARFSYGDDHPFKIQRFILAFELMRAYGLMELPNVKILDCPRAAEEALLTFHAPDYLDRLREFSESDDARADFRYGLGDLDNPVFRGLYDWARLGAGGTIEAARLVAEEGYDIAFNLAGGWHHAHRAKASGFSYLNDAVVAINLLLEKGLRVAYLDIDAHHGDGVQEAFYDTDRVLTISIHESGMYFFPGTGFEGETGTGAGTGYSVNIPLVAHADDALFMKAFDEVAFPLLAAYNPDVLVTQLGADTFRTDPLTRLEVTTHSYTYILRKLKALGIPWVAVGGGGYNLVNVARAWTLAWGVMNGVELPPRLPDSFVSIIGRLGYPNRMLLDAMHWAQEDDRNQALDAVERSIAVIRKTIFPVIIGSYGETSGE

SEQ ID NO: 30059 - protein, 329 aa, Burkholderia sp. 383
MQKILVARPIFPDVIERLKQYFDVDWHNGDALAPDALAARLADKDGALTAGDLVGAAELAAAPRLRVVANMAVGYNNFDMAAFNAANVLGTNTPDVLNESTADFGWALMMAAARRIAESEHWLRAGHWQKWAYDGFLGSDIYGSTLGVIGMGRIGQALARRARGFGMQVIYHNRSRVAPEIEAELNAEYVSKDALLARADHVVLVLPYTKENHHTIGAAELAKMKPTATLTNIARGGIVDDAALAVALRDGTIAAAGLDVYEGEPTVHPALLEVPNVVLTPHIASATEKTRRAMANLAADNLIAALGEGPRAGQPPNPINPDVIGKPRA

SEQ ID NO: 30060 - protein, 49 aa, Ilex canariensis
WEFQVGPSVGIEAGDHIWCARYLLERITEQAGVVLTLDPKPIEGDWNGA

SEQ ID NO: 30061 - protein, 132 aa, Boechera holboellii
ASWHPPWYSSYTAHYREAECMKEAMEELLYSYGTDIVFNGHVHAYERSNRVYNYELDLCGPVYIVVGDGGNREKMAIEHADEPGKCPEPLTTPDPFMGGFCAWNFTPSGKFCWDQQPDYSAMRESSFGHGIL

SEQ ID NO: 30062 - protein, 1019 aa, Viscum album subsp. album
  misc_feature (112)..(112): Xaa can be any naturally occurring amino acid
  unsure (1)..(1019): unsure at all Xaa locations
MAGNDWVNCYLEAILDADPGIGDAKSSLLLRERGHFSPTRYFVEEVITGFDETDLHRSWVRAAATRSPQERNTRLENMCWRIWNLARTKKQLEGDAARRKAKHHLDRERGRXEAAADMSDLSEGEKGDFTGDLSAHSDRRFPRISSVDVMENWINQHKEKKLYIVLISLHGLIRGENMELGRDSDTGGQVKYVVELARALGTMPGIYRVDLLTRQVSAPDIHWSYGEPTEMLNHGNPENLIEERGESSGAYIVRIPFGPKNKYIAKELLWPHIPEFVDGAIGHMVQMSKVLGDQIGGGESVWPVTIHGHYADAGDAAALLSGALNVPMLFTGHSLGRDKLEQLLKQVRVSLEEVNATYKIMRRIEAEELSLDVSEVVITSTQQEIDQQWRLYDGFDPILERKLRARIKRNVNCHGRFMPRMAVIPPGMEFHHIIPHDSDVDSEAEGNEDNAGSPDPPIFSEIMRFFSNPRKPMILALARPDPKKNMMTLVKAFGECRHLRELSNLTLVMGNRDDIDEMSTTNSSVLLSILKMVDKYDLYGQVAYPKHHKQSDVPDIYRLAAKTKGVFINPAFIEPFGLTLIEAAAYGLPIVATKNGGPVDIHRVLDNGLLVDPHDHQSIANALLKLVADKQLWLRCRQNGLKNIHLFSWREHCKTYLTRIASCKPRHPQWQRPDDLDSVSPGDSLRDIHDLSLNLKLSLDGENGVNDSFDNAIENAVACPNYVLEKAEHNISTGKVLTLRRRKHVFVCAFDCDGSTDFLENIKFVMEASGSSGSIGFVLSTSMAVSEVHSVLVSGGLSHLEFDAFICNSGGEVYYPSLSTDGLPYVSDLDYHSHIKYRWGGEDLRRTLVRWVGSMNDKMGEVVSEDEEGSTSHCHAFNVRNPDLVGPVRELRKSMRIQALRCHVVYCQNGYKMNVIPVLASRSQALRYLSIRWGMDLSNAVVFTGEYGDTDYEGLVGGVHRTVILKGVGGAAQKLHSDRSYPLSDVIPFESPNIVWTKGCRCSGDIRESLEQIGVVEGI

SEQ ID NO: 30063 - protein, 460 aa, Mesorhizobium sp. BNC1
MAWRQRPAWANTPAERRIVAVPARARLAGADHPATDVWSYDGMVPGPLVRLRQGEPARLIIENRLNQETTVHWHGIRLPNPMDGVPGLTQPPIKPGESFAYEFTPSDAGTFWYHPHANSLEQLGRGLAGAVIVEEREPVAVDRDLLWLLADWRLNAQGEIAAGFGNRMEAAMSGRVGNTVTLNGSVSKEVPMRAGERVRLRLVNGSLARIMALRFEGHRPVVVAVDGQPCEPHEPKGGRILLGPAMRIDVALDLQGEPGRRYRVVDDFYEGLAYWVTELAYDERPPIRTHPLETPLSLPRNPLPEPDLADAERHELTLQGGMMGGGGMAGMGGMMGGGMMGGMMGMGGGAAWAINGMSMTGDGHAGMEPALTFLRGRSVVLKLRNETAWWHPMHLHGHSMLVLSRNGASVPHRQWQDTVLMAPRDTVEVAFVADNPGDWMLHCHVMDHQMSGLMTVLRVA

SEQ ID NO: 30064 - protein, 299 aa, Zea mays
MERAVPVRKSHTNTADLLSWSATGPDASASPAASSRPSLKPAAGITPAMFGAPVTEQEAEDLSKSERKFCSGSKLKEMGGSGIFAEKSENGDAEASNPANKTSLRMYQQTVTGISQISFSADGSVSPKKPSSIPEVAKQRELSGTLEDADAKINKQLSEAKTKELSGSDIFGPPPEIPARPLAARNMELQGNVDFSLPQRSVHTSVKVSNPAGGPSNISFSEEPVVKTAKKIHNQKFQELTGNNIFKEDVPSSAEKSLSSAKLKEMSGSDIFADGTPAPREYLGGIRKPPGGESSIALI

SEQ ID NO: 30065 - protein, 353 aa, Rubrobacter xylanophilus DSM 9941
MSADRENSGNEAEVRGGESAVATSPDRLAELYGKMVLIRAFEDACQRAFRQGKIGGYLHVYTGQEAVATGFLEAFREGDRVITGYRDHAHALLLGCDPKEVMAELFGKRTGLVKGKGGSMHLFDVERGFMGGYGIVGGHIPLGVGIAYALRYGGSEGICQLYLGDGAINNGAFHEAANLAGLWGKDGMCPCFFIVENNQYGMGTSVERATAMTDLAAKFNSYAIGNEKVDGMDLEAVIECGERVAERVRETGRPYAVEAITYRIAPHGAADFFEKYRTKEEVEKWRARDPIGILEKKLLERDALDEERIEEIKDEARQRVSEAVKYADESEEPPIEELYTDVYAGEDEYMGTR

SEQ ID NO: 30066 - protein, 543 aa, Saccharomyces cerevisiae
MKSTLSLTLCVISLLLTLFLAALDIVIVVTLYDTIGIKFHDFGNIGWLVTGYALSNAVFMLLWGRLAEILGTKECLMISVIVFEIGSLISALSNSMATLISGRVVAGFGGSGIESLAFVVGTSIVRENHRGIMITALAISYVIAEGVGPFIGGAFNEHLSWRWCFYINLPIGAFAFIILAFCNTSGEPHQKMWLPSKIKKIMNYDYGELLKASFWKNTFEVLVFKLDMVGIILSSAGFTLLMLGLSFGGNNFPWNSGIIICFFTVGPILLLLFCAYDFHFLSLSGLHYDNKRIKPLLTWNIASNCGIFTSSITGFLSCFAYELQSAYLVQLYQLVFKKKPTLASIHLWELSIPAMIATMAIAYLNSKYGIIKPAIVFGVLCGIVGSGLFTLINGELSQSIGYSILPGIAFGSIFQATLLSSQVQITSDDPDFQNKFIEVTAFNSFAKSLGFAFGGNMGAMIFTASLKNQMRSSQLNIPQFTSVETLLAYSTEHYDGPQSSLSKFINTAIHDVFYCALGCYALSFFFGIFTSSKKTTISAKKQQ

SEQ ID NO: 30067 - protein, 491 aa, Bifidobacterium longum NCC2705
MSTTDAPKKPRETDDVPVPATLRKSLKNRHIQLIALGGAIGTGLFYGSSESIALAGPSILLAYLVGGLAIFAIVRALSEMSVEDPKAGAFSYYATRYWSKRAGFISGWNYWFNYILVSMVELSVVGSFVNYWFPAIPTWVSAAVFLVIICAANLLGVSKFGEFEFWFAIIKIVAVIAMIIGGLAVIIFVLPTASGVRASFANWFTVGNGFFPNGLMGQNSDGSWTGLLMALVVVMFSFGGTELIGITAGETEDPKTTIPRATNDIIWRILVFYIGALGVIMAVVPWNTIDGKSSPFVQIFDSVGIHAAAGILNFVCLTAVMSVYNSGLYANSRMLYSLAKQGNAPAYLGKLNSRGVPVAGVLTSAAITAIAVVVVFVWPEFAFNYLMSIATIAGIINWTMIMLTEMKFRKVVAAGGAPEDSELAGLSGQEALDAIHFKLPFAKVTPWVVLAFLALVVVLMCFSTSYRIAVIAGVIWLAILFAAYQLTQAKK

SEQ ID NO: 30068 - protein, 768 aa, Arabidopsis thaliana
  misc_feature (138)..(138): Xaa can be any naturally occurring amino acid
  misc_feature (313)..(313): Xaa can be any naturally occurring amino acid
  unsure (1)..(768): unsure at all Xaa locations
MASHIVGYPRMGPKRELKFALESFWDGKSTAEDLQKVSADLRSSIWKQMSAAGTKFIPSNTFAHYDQVLDTTAHASGAVPPRYGYTGGEIGLDVYFSMARGNASVPAMEMTKWFDTNYHYIVPELGPEVNFSYASHKXAVNEYKEAKALGVDTVPVLVGPVSYLLLSKAAKGVDKSFELLSLLPKILPIYKEVITELKAAGATWIQLDEPVLVMDLEGQKLQAFTGAYAELESTLSGLNVLVETYFADIPAEAYKTLTSLKGVTAFGFDLVRGTKTLDLVKAGSPEGKYLFAGVVDGRNIWANDFAASLSTLXQALEGIVGKDKLVVSTSCSLLHTAVDLINETKLDDEIKSWMAFAAQKVVEVNALAKALAGQKDEALFSANAAALASRRSSPRVTNEGVQKAAAALKGSDHRRATNVSARLDAQQKKLNLPILPTTTIGSFPQTVELRRVRREYKAKKVSEEDYVKAIKEEIKKVVDLQEELDIDVLVHGEPERNDMVEYFGEQLSGFAFTANGWVQSYGSRCVKPPVIYGDVSRPKAMTVFWSAMAQSMTSRPMKGMLTGPVTILNWSFVRNDQPRHETCYQIALAIKDEVEDLEKGGIGVIQIDEAALREGLPLRKSEHAFYLDWAVHSFRITNCGVQDSTQIHTHMCYSHFNDIIHSIIDMDADVITIENSRSDEKLLSVFREGVKYGAGIGPGVYDIHSPRIPSSEEIADRVNKMLAVLEQNILWVNPDCGLKTRKYTEVKPALKNMVDAAKLIRSQLASAK

SEQ ID NO: 30069 - protein, 149 aa, Rubrobacter xylanophilus DSM 9941
MLSPFRGFLDVRSELDRMFDEVFGGLSRRFGGGDLAEWAPAIDVYSKDGDLVIKAELPGMKPEDVDITLQEGVLTISGERKAEEEREGAGYFVRERRYGSFRRSMRLPEGVDESKIHARFEDGVLEVVVEGAGAVTEPRRIQIEAPKGS

SEQ ID NO: 30070 - protein, 72 aa, Plantago major
MGRFWSVLFALFLVLVITGPMVGEARKCRSASHRFKGTCLSDTNCASVCKTEGFPGGDCKGLRRRCFCETHC

SEQ ID NO: 30071 - protein, 245 aa, Oryza sativa (japonica cultivar-group)
MAGRSELVVSFGEMLIDFVTLRADGEREFMFYRNPSADMLLTHAELNVELIKRAAVFHYGSISLIAEPCRSAHLRAMEIAKEAGALLSYDPNLREALWPSREEARTKILSIWDQADIVKVSEVELEFLTGIDSVEDDVVMKLWRPTMKLLLVTLGDQGCKYYARDFRGAVPSYKVQQVDTTGAGDAFVGALLRRIVQDPSSLQDQKKLEEAIKFANACGAITATKKGAIPSLPTEVEVLKLMESA

SEQ ID NO: 30072 - protein, 326 aa, Vibrio vulnificus CMCP6
MSMSKKPIPVTILAGFLGAGKTTLLNHILTNANGMRMAVIVNDFGSINVDAELVKSESDNMISLENGCVCCNLAEGLVVSVMRLLALEQRPDHIVVETSGISEPKEVALNFEDPELQQHAPLNAIITTIDAKNVLTLEKQMAELAEQQIQVADIVLVNKVDLVEPEELAKVKQWCQVQAPFAKLVEIEFGKVDLPILFEVPERLQVSSHNREHGGEHHHCHDDHCDHVSHQFETFSFETEHPLSLQALYPLLQQFSIDAYRMKGILNLDDKPDHRCIFQCTGQRAQVTIGDPWQEGEKRATRLVFIGPKGGLDRNVMRKKLDALVI

SEQ ID NO: 30073 - protein, 173 aa, Saccharomyces bayanus
MTTTVPKIFAFHEFSGVAEAVADHVVHAQDSALAPKTERKHSVTNLSVNALDMTREVSCKSTASAPEVKNGGSSGNSKAKKEKRFKIALSGGSLIQVLHEGLLKRDDVQWGEWDIYFADERLVPFSSNESNYGCTKRKILDQIDTAKYGTPKVYHIDESLIDDPQECADNYEK

SEQ ID NO: 30074 - protein, 662 aa, Acinetobacter sp. ADP1
MTTPLNERRIANAIRVLAMDAVQQANSGHPGAPMGMADIADVVWREFLNHNPTNPQWANRDRFVLSNGHGSMLHYALLHLSGYDLSIEDLKQFRQLHSKTPGHPELGYAPGIETTTGPLGQGIANAIGFALAERTLAAQFNKDDLKVVDHYTYCFLGDGCLMEGISHEVCSLAGTLGLGKLIAYYDDNGISIDGEVEGWFSDDTEQRFKAYGWQVLRVDGHDTDAIRQATVEAKAQTAQPTIIICKTIIGLGSPNKQGKEDCHGAPLGTDEIKLTREALGWEEEAFVIPKDVYSAWNAKDKGQAAESAWNDVFAQYQAKYPSEAAELLRRVQGDLPAEFLAQADAFIAETNAKAETIATRKASQNTLQAFGPLLPELLGGSADLAGSNLTLWKGCEGVQDNPAGNYVYYGVREFGMTAIANGVALHGGFIPYVATFLMFMEYARNAVRMSALMKQRVIHVYTHDSIGLGEDGPTHQPIEQIASLRGTPNLNTWRPADTVETAIAWKSALERKDGPTALILSRQNLPFQSRSEAQIQDAAKGGYVLAQEKGELKAIIIATGSEISVAMDAYVQLEGVRVVSMPCAEEFMKQDAAYRESVLPSQIRARVAVEAAHVDYWWKFVGLDGKVIGMTTYGESAPAKDLFKHFGITSDAVVEAVKSLTA

SEQ ID NO: 30075 - protein, 499 aa, Arabidopsis thaliana
MEALMLIFTFCFIVLSLIFLIGRIKRKLNLPPSPAWALPVIGHLRLLKPPLHRVFLSVSQSLGDAPIISLRLGNRLLFVVSSHSIAEECFTKNDVILANRQTTISTKHISYGNSTVVSASYSEHWRNLRRIGALEIFSAHRLNSFSSIRRDEIRRLIGRLLRNSSYGFTKVEMKSMFSDLTFNNIIRMLAGKCYYGDGKEDDPEAKRVRTLIAEAMSSSGPGNAADYIPILTWITYSETRIKKLAGRLDEFLQGLVDEKREGKEKKENTMVDHLLCLQETQPEYYMDRIIKGTMLSLIAGGTDTTAVTLEWALSSLLNNPEVLNKARDEIDRMIGVDRLLEESDIPNLPYLQNIVSETLRLYPAAPMLLPHVASKDCKVGGYDMPRGTMLLTNAWAIHRDPLLWDDPTSFKPERFEKEGEAKKLMPFGLGRRACPGSGLAQRLVTLSLGSLIQCFEWERIGEEEVDMTEGPGLTMPKARPLEAMCRARDFVGKILPDSS

SEQ ID NO: 30076 - protein, 398 aa, Actinobacillus pleuropneumoniae serovar 1 str. 4074
MSMFNHIQAAPADPILGLGEAFKAEQRAGKINLGIGVYMNAEGKTPIVKAVKKAEALLLEQETNKNYLTIDGVQAFNAYTQELLFGKGAEIIASGRAKTAQSLGGTGALRIAAEFIKRQTSAKNIWISNPTWPNHNAIAEAVGLNVKGYRYYNPETHGLDWDNLLADLSQAEAGDVVLLHGCCHNPTGIDPTPEQWDALAKLSAEKGWLPLFDFAYQGFGNGLGQDAYGLRAFVKNHKELLIASSYSKNFGLYNERVGAFTLVAENADVANKAFTQIKSIIRVLYSNPAAHGANAVARVLGDETLRAEWVAELDEMRDRIKGMRNRMVQLLKEKGAKQDFDFIAKQNGMFSFSGLTPEQVDRLREEFAIYAVRSGRINVAGITDQNIDALCEAIVKVL

SEQ ID NO: 30077 - protein, 150 aa, Saccharomyces bayanus
QECADNYEKILIKRFAGRDSVKLPMFDLFLLGCAPDGHIASLFPNFQENLRENLAWVIPVEHAPSGPSNRISLTIPVICHSHRVTFVVEGATKAPVIKTIMERPEKGLPSSIVNEGAAGRVSWFVDDDALIDVFVTKKKYKFYDDDTLSE

SEQ ID NO: 30078 - protein, 545 aa, Oryza sativa
MGTSSPEMAAALLLVMAALAGVAAGGDIVHQDDEAPKIPGCSNDFVLVKVQTWVNNREDGEFVGVGARFGPTIESKEKHANRTGLLLADPIDCCDPPTQKVAGDVLLVQRGNCKFTKKAKNAEAAGASAIIIINHVHELYKMVCDRNETDLDINIPAVLLPKDAGNDLQKLLTRGKVSVQLYSPDRPLVDTAEVFLWLMAVGTILCASYWSAWSAREAVIEQEKLLKDGHESSLNLEAGGSSGMVDINMTSAILFVVIASCFLIMLYKLMSHWFVELLVVIFCIGGVEGLQTCLVALLSRWFKPAAESFVKVPFFGAVSYLTIAVCPFCIVFAVIWAVYRRMTYAWIGQDILGIALIVTVIQIVRIPNLKVGSVLLSCSFLYDIFWVFISKMWFHESVMIVVARGDKTDEDGVPMLLKIPRMFDPWGGFSIIGFGDILLPGLLIAFALRYDWAAKKTLQSGYFLWSMVAYGSGLMITYVALNLMDGHGQPALLYIVPFTLGTFIALGRKRGELRNLWTRGQPERVCTHMHMQPLPKDINCDAVSS

SEQ ID NO: 30079 - protein, 230 aa, Rubrivivax gelatinosus PM1
MIEVYSWATPNGHKVHIMLEECGLPYRAFPVDIGAGDQFEPAFLAISPNNKIPAIVDPDGPDGKPISLFESGAILLYLAGKTGQLLPADVRGKYEVLQWLMFQMGGVGPMLGQTHHFRVYAPEKIDYAIDRYTNEAKRLYGVMNRQLAKSKYIAGADYSIADIAIFPWLRSWKNQGIDWNDYPHLKGWFDEIAARPAVQRGVEVLAQQRKPLVDEQSRKMLFGTEQYKPR

SEQ ID NO: 30080 - protein, 396 aa, Salmonella enterica subsp. enterica serovar Paratyphi A str.
MFENITAAPADPILGLADLFRADDRPGKINLGIGVYKDETGKTPVLTSVKKAEQYLLENETTKNYLGIDGIPEFARCTQELLFGKGSALINDKRARTAQTPGGTGALRIAADFLAKNTPVKRVWVSNPSWPNHKSVFNAAGLEVREYAYYDAENHTLDFEALQASLSEAQAGDVVLFHGCCHNPTGIDPTLEQWQVLAELSVEKGWLPLFDFAYQGFARGLEEDAEGLRAFAALHKELIVASSYSKNFGLYNERVGACTLVAADAETVDRAFSQMKSAIRANYSNPPAHGASIVATILSNDVLRAIWEQELTDMRQRIQRMRQLFVNTLQEKGANRDFSFIIKQNGMFSFSGLTKDQVLRLREEFGVYAVASGRVNVAGMTPDNMAPLCEAIVAVL

SEQ ID NO: 30081 - protein, 483 aa, Debaryomyces hansenii CBS767
MTISETKQADREWHGPCSQLMQNSFIFQAKIAEQVPRVISGKGIRITVENPKTGKVTEVIDGMTGAAVGALGWGDPEVVEIINRAARNTFYSYPAVLGNEYSEELAKYYISNSPAGAFAAALWTGSGSESNENAMKIIRQYHVEKGNFNKTKFISRKTSYHGFTLGALSISSNARAFRFQEILLPQDQCLKMEACYPYRNKADDETLEQYSARLLLGLEIMILKENPKTIGAVIVETLPGTSLGTSPPTPGYLLGIRKLCTKYDILFMLDEVMCGTGRANPHGGLNCWENYLAPGEGPDIQSVGKALGSGYVTIAGVLVSPKVRDVFINGSGSILGSHTYSGHAFNCFVALEIQKRVKKLKLTENIFKMGNYMGGLLTEELADAVIVGDIRGLGGFWSLELVKNTQTKEYFPFSLDIAHRLQDKCFDNGLNVMGTQGCANGFGDIILLAPAFIVTKDDVDTIVHIVVMSIRDLEHELMEEGNL

SEQ ID NO: 30082 - protein, 333 aa, Streptococcus thermophilus CNRZ1066
MAILVLGGAGYIGSHMVDRLVEKGQEKVVVVDSLVTGHRAAVHPDAIFYQGDLSDQDFMRKVFKENPDVDAVIHFAAYSLVGESMEKPLKYFDNNTAGMVKLLEVMNECGVKYIVFSSTAATYGIPEEIPILETTPQNPINPYGESKLMMETIMKWSDQAYGIKYVPLRYFNVAGAKPDGSIGEDHDPETHLLPIILQVAQGVREKIMIFGDDYNTPDGTNVRDYVHPFDLADAHLLAVEYLRKGNESTAFNLGSSTGFSNLQILEAARKVTGKEIPAEKADRRPGDPDILIASSEKARTVLGWKPQFDNIEKIIASAWAWHSSHPKGYDDRG

SEQ ID NO: 30083 - protein, 309 aa, Silicibacter sp. TM1040
MVNTPQILCLGEPLVEFNQTPEGPFAMGFGGDVSNVAISAARHGAQTGLITRVGDDPFGAALCDLWANEGLVTDHAARAQGEETGVYFVTHDASGHHFTYRRKGSAASRLTPQDLPMNALQTCPIFYASGISLAVSSSMQDAVIEAAQQARAGGGIFAFDPNLRVALWPLEVARETTHRCMQICDVALPGLEDARQLTGLHDAKDIASFYHELGPRIVALTLGAEGVLISVEGTQRVLSGHRVDAKDATGAGDCFNGAFLATLLATNDPFSAAEHANMAAALSTTGYGAVTPIPTLSQTRSALETAQRA

SEQ ID NO: 30084 - protein, 482 aa, Wolbachia endosymbiont of Onchocerca volvulus
MSQNKTLTTASGPPVADNQNSRSAGPRGPLLLDDFHLIEKLAHFNRENIPERRVHAKGSGAYGTFTVTQDITQYTSAKLFDSVGKQTPTFLRFSTVGGERGSADTERDPRGFALKFYTEEGNWDIVGNNTPVFFIRDPLKFPDFIHTQKRLPQSNLKSAQMMWDFWSHSPEALHQVTILFSDRGIPDGYRHMHGFGSHTYSLINAKGERHWVKWHYKTKQGIKNLAPADAARLAGTDPDYAQRDLFGAIERGDFPKWRVCIQIMTEAQANAHYENPFDVTKTWSQKEFPLIEVGELELNRNPLNYFAEVEQAAFGPSNMVPGVGLSPDRMLQGRVFAYADAHRYRVGTNHQQLPVNAPRSPVNSYQRDGSMAFGSNGGAAPNYEPNSYADAPKQAPQYAEPALALSGAADRYDHREDTDYYSHAGALFRLMNDEQKALLINNIAGAMAGVSSDVVQRQLQYFFKADPAYGEGIASALGVSLN

SEQ ID NO: 30085 - protein, 587 aa, Aspergillus fumigatus
MWYQSASLLGVAAVAQAATVHYSLDLTWETGSPNGVSREMIFVNGQFPGPAIILNEGDEAIIDVTNHLPFNTSIHFHGIEQKNTPWADGVVGLSQWAIQPGQSYTYQWRADTYGTYWYHAHDKAEIMDGLYGPVHIRPRPNRDSPFSMISDDPADIRAMKQAERNGKLVMLSDWDHLTGQEYMKAMEETGYDIFCSDSVLINGRGSVFCHDPEELTQMVPPPELAILNSSLTDKGCLPFVPPIQGNWEHHPDKVPPGLNEGCHPSTTQETIFTVDAAHQWASFHFISAASLKVLVVSIDEHPMYVYEVDGRYIEPQLAHSVKLYNGERYSVMVKLDKEPANYKMRAANDGGNQIVSGFATVTYEGGETSQRPSQPYIDYGSRNTSADVIPLDTNHLPPYPAISPASEPDDFHILMLGRTNSSWEWSLDGAAFLPSNLAALPPAILSPQAPEFADALKITTRNDTWVDIVFQLVVSETTPIQPPHPLHKHSNKGFLLGTGHGKFNWTSIKEAKEASPESFLETPVYRDTFTTSPQGETWTAIRYHVENPGPFLLHCHMTTHLQSGMGLILMDGVDVWPEVYADMITPM

SEQ ID NO: 30086 - protein, 383 aa, Yersinia pestis KIM
MSWQDKIAQGLQRRRDAAAYRTRQVNEGANGRWLQSGERQYLNFSSNDYLGLSQNDEVIAAWQQGARRYGVGSGGSGHVTGYSQPHARLEQQLADWLGYPRALLFISGYAANQAVLTALTDADDRILADKLSHASLLEAAAHSPAQLRRFQHNQPEALQNLLIKPCQGQTLVVTEGVFSMDGDSAPLAALQQQTSAAGGWLLVDDAHGIGVHGEGGRGSCWLQGVQPELLVVTFGKAFGLSGAAVLCQEPVAEYLLQYARHLIYSTAMPPAQACALQAALRQVQQGDALRQQLQQRIRQFRTAAAHLPLQLGASKTAIQPLLVGDNQQSLIWAEQLRAAGLWVTAIRPPTVPPGSARLRITLSAAHQPEDIDRLLEVLYGLCH

SEQ ID NO: 30087 - protein, 414 aa, Pseudomonas syringae pv. tomato str. DC3000
MSRRRVVVTGMGMLSPLGNDVPSSWQGILAGRSGIGLIEHTDLSAFTTRFGGSVKGFNVEEYLAPKEARRLDLFIQYGLAASFQAVRNAGLEVTDANRERIGVAMGSGIGGLTNIENSSRLLHEQGPGRISPFFVPGSIINMISGFLSIHLGAQGPNYAIATACTTATHCIGMAARNIAYDEADVMIAGGAEMAACGLGLGGFGAARALSTRNDDPTRASRPWDKGRDGFVLSDGAGAMVLEELEHAKARGATIYAELVGFGMSGDAYHMTSPPDDGAGAARCIVNALRDAKVNADQVQYINAHGTSTPAGDLAEASAIKSVFGDHAYKLAVSSTKSMTGHLLGAAGAVEAIFSVLAMVDQVAPPTINLDEPSEGCDLNFVPHEARRMPIDVVLSNSFGFGGTNGSLVFRRFAE

SEQ ID NO: 30088 - protein, 426 aa, Yersinia pestis KIM
MTPSDLVFDQQHIWHPYTSMTEPLPCYPVVGAEGVELQLADGRRLIDGMSSWWAAIHGYNHPVLNFAAHQQLDKMSHVMFGGITHPPAVKLCRQLVAMTPPPLECVFLADSGSVSVEVALKMALQYWQAKGERRQRILTLRHGYHGDTFGAMSVCDPQNSMHSLYQGYLAENLFANAPQCGFDDPWDPQDIANFVALITQHANEIAAVILEPVVQGAGGMRIYHPSYLREVRALCDKHQILLIADEIATGFGRTGKLFACEHAQIVPDILCLGKALTGGYLTLSATLTTRAVAETISKGDAGCFMHGPTFMANPLACAVASANLSLLAENSWQQQVSKIEDQLKRELLPLAQEDTVADVRVLGAIGVVEMKKPVNVARLQRSFVEQGVWIRPFGKLIYLMPPYIISQHALTRLTAAVAAAVVDRGS

SEQ ID NO: 30089 - protein, 423 aa, Glycine max
GNSEEEKSVKTGSPSSSPATTEQTNQPNIHVYPDWAAMQYYGPRVNIPPYFNSAVASGHAPHPYMWGPPQPMMQPYGPPYAAFYSHGGVYTHPAVAIGPHSHGQGVPSSPAAGTPSSVESPTKFSGNTNQGLVKKLKGFDELAMSIGNCNAESAERGAENRLSQSVDTEGSSDGSDGNTAGANQTKRKRSREGTPITDAEGKTELQNGPASKETASSKKIVSATPASVAGTLVGPVVSSGMATALELRNPSTVHSKANSTSAAQPCAVVRNETWLQNERELKRERRKQSNRESARRSRLRKQAETEELARKVEMLTAENVSLKSEITRLTEGSEQMRMENSALREKLINTQLGPREEITLSSIDSKRAAPVSTENLLSRVNNSGANDRPAENENDICETKPNSGAKLHQLLDTNPRANAVAAG

SEQ ID NO: 30090 - protein, 215 aa, Arabidopsis thaliana
TRPDLVRGKEMNVRFNAEDGYGGKTAFLPRGEAETVPFGSEKFSETLKRFSVEAGSEEAEMMKKTIEECEARKVSGEEKYCATSLESMVDFSVSKLGKYHVRAVSTEVAKKNAPMQKYKIAAAGVKKLSDDKSVVCHKQKYPFAVFYCHKAMMTTVYAVPLEGENGMRAKAVAVCHKNTSAWNPNHLAFKVLKVKPGTVPVCHFLPETHVVWFSY

SEQ ID NO: 30091 - protein, 250 aa, Zea mays
MLSIAGAIGAGLFIGSGHAIAAAGPAAILAYIMSGTLVVLVMRMLGEMAVASPDTGSFSTYAERAMGRTAGFTIGWLYWWFWVLVIPIEAIAAAAILHAWFPAIETWEFALAVTGLLTVTNLFSVARYGEFEFWFAMLKVIAVLGFIALGALALTGALPDVSVSGVVNLSHEFGGFMPNGMTAVIGAMLTTVFSFMGTEIVTIAAAESKNPSKQITRATNSVVWRMGIFYIVSVFLIISIVPWNDPMLVQ

SEQ ID NO: 30092 - protein, 132 aa, Boechera holboellii
ASWHPPWYSSYTAHYREAECMKEAMEELLYSYGTDIVFNGHVHAYERSNRVYNYELDPCGPVYIVVGDGGNREKMAIEHADEPGKCPEPLTTPDPFVGGFCAWNFTPSGKFCWDQQPDYSAMRESSFGHGIL

SEQ ID NO: 30093 - protein, 263 aa, Triticum aestivum
MDAGAGAGAGAPYASRTAEEVFRDFRGRRAGMIKALTQEVDKFYQLCDPEKENLCLYGYPNETWEVTLPAEEVPPEIPEPALGINFARDGMNEKDWLALVAVHSDSWLLAVSFYFAARFGFDKEARRRLFNMINNLPTIFEVVTGAAKKQIKEKAPNSTHKSNNKPSMKTYSKPESQSKAPKIAAPPKDEDESGEDYGEEEEEERDNTLCGTCGTNDGKDEFWICCDNCERWYHGKCVKITPARAEHIKHYKCPDCSNKRARA

SEQ ID NO: 30094 - protein, 185 aa, Arabidopsis thaliana
MAEEIKNVPEQEVPKVATEESSAEVTDRGLFDFLGKKKDETKPEETPIASEFEQKVHISEPEPEVKHESLLEKLHRSDSSSSSSSEEEGSDGEKRKKKKEKKKPTTEVEVKEEEKKGFMEKLKEKLPGHKKPEDGSAVAAAPVVVPPPVEEAHPVEKKGILEKIKEKLPGYHPKTPVEEEKKDKE

SEQ ID NO: 30095 - protein, 357 aa, Legionella pneumophila str. Lens
MTTVAQFEITYTQYLNEQGKLVAELPPFADNQSILKELYKIMVLTRTFDKKAIALQRTGKMGTYAPINGQEAISTAIGHALKPEDVLVPYYRDYAAQFQRGVKMSEILAFWGGDERGSHYSNNAEDLPICVPIASQCLHAAGVAFAFKYKNQSRVAVVCIGEGGTSEGDFYEAMNVAGAWKLPVVFVVNNNKWAISVPIEKQTGSQTIAQKAIAAGFSGVQIDGNDIFAARQVIGDAIEKARQGGGPTLIEALTYRLCDHTTADDATRYQPSHEVEGAKAKEPIVRFKHYLMQQNIWTSEDEEKLVIECSETVEKAVEEYLNTKPQPVSSIFDYHYAELPEYLIEQRAIAMEEYSHA

SEQ ID NO: 30096 - protein, 132 aa, Boechera holboellii
ASWHPPWYSSYTAHYREAECMKEAMEELLYSYGTDIVFNGHVHAYERSNRVYNYELDPCGPVYIVVGDGGNREKMAIEHADEPGKCPEPLTTPGPFMGGFCAWNFTPSGKFCWDQQPDYSAMRESSFGHGIL

SEQ ID NO: 30097 - protein, 577 aa, Arabidopsis thaliana
  misc_feature (139)..(139): Xaa can be any naturally occurring amino acid
  misc_feature (200)..(200): Xaa can be any naturally occurring amino acid
  unsure (1)..(577): unsure at all Xaa locations
MLEKVETFDMNRVIDEFDEMTRNAHQVQKQTLKEILLKNQSAIYLQNCGLNGNATDPEEAFKSMVPLVTDVELEPYIKRMVDGDTSPILTGHPVPAISLSSGTSQGRPKFIPFTDELMENTLQLFRTAFAFRNRDIFPXDDNGKALQFIFSSKQYISTGGVPVGTATTNVYRNPNFKAGMKSITSPSCSPDEVIFSPDVXDQALYCHLLSGILFTHQLQYLFPLFAHGLVHAFRTFEQVWEEIVTDIKDGVLSNRITVPSVRTAMSKLLTPNPELAETIRTKCMSLSNWYGLIPALFPNAKYVYGIMTGSMEPYVPKLRHYAGDLPLVSHDYGSSEGWIAANVTPRLSPEEATFAVIPNLGYFEFLPVSETGEGEEKPVGLTQVKIGEEYEVVITNYAGLYRYRLGDVVKVIGFYNNTPQLKFICRRNLILSINIDKNTERDLQLSVESAAKRLSEEKIEVIDFSSYIDVSTDPGHYAIFWEISGETNEDVLQDCCNCLDRAFIDAGYVSSRKCKTIGALELRVVAKGTFRKIQEHFLGLGSSAGQFKMPRCVKPSNAKVLQILCENVVSSYFSTAF

SEQ ID NO: 30098 - protein, 559 aa, Zea mays
MHRFAADRARRAVAASLRGAASRAAAAPSRHAPAPRHPTSPVGAAAPVAAAAMARAAMSTAVAGVPPPVSLDTISPKVPPVSLDTINPKVLKCQFAVRGEIVTRAQKLQQELQRNPESLPFDEILYCNIGNPHSIGQQPVTYFREVLSLCENPALLDKSETHALYRSDAIERARKILDKIPGRATGAYSHSQGIKGLRDEIAAGIAARDGFHASADNIFLTDGASPAVHMILQLLIRSEKDGILCPIPQYPLYSASIALHGGSLVPYFLDEETGWALEVDELKKQLEEARSKGISVRALVVINPGNPTGQVLTEENQKKIVEFCKNERLVLLADEVYQENIYVEDKQFHSFKKIARSLGYTDDDLPLVSFQSISKGYYGECGKRGGYMEITGFSPQVRDQIYKMASINLCSNITGQILASLVMNPPKAGDESFESFRLERDGILSSLGRRAKALEEAFNSLEGITCNKAEGAMYLFPRLHLPQKAIGAAQAAGTAPDAYYAKRLLEATGIVFVPGSGFGQVPGTWHIRSTILPQEDKIPGIVSRFKEFHDKFMDEFRDY

SEQ ID NO: 30099 - protein, 1148 aa, Kluyveromyces lactis NRRL Y-1140
MVVIIASLFLPFQPQFEIHSSSVETASLVDQPVKIRNAGSGVKSSANSLYSGNPFDLGTSLTRKRSSSSHSRSSFAPLDLTMSAASGGDGMESSPAPSGEFSNQHRLDEVTKPVGANPQISSESFMESLTGKAHSAAASSSKNALSNYPTGSVEEFFSSGNTQLGKNYDNNTGSPDSTYSIQSSPVISAVNPTHDSTSNLLKNVNKSLLYQIVLNESNSASALEGTSKHFWNSPGSTVITPRSRALPDVNSSLSGVAKGKGHLHIKSQAPAIRHVHPAAQGPGNVTGTTGGGGGGSSKLKYSVNANHDEDSQEEKYEQSEQEEGEEENDENENVVDDEDEDMYDIEELDSSGRYHYNVPKFGGYSNKAKLKNALLKKSENIFSTAPWTIVPCAKGNGGLKNAVATALLEKTIDEQVTWVGTVGIPTDCIPEKTLDNICHELYTNYHSRAVISDDLTFKGAYKNFCKQILWPTLHYQIPDNPNSKAFEDHSWNYYQHLNQLFANEIVKTYKEGDIVWVNDYHLMLVPEMVREKLPDAKIGFFLHISFPSSEVFRCFPQREKILNGILGANSVGFQTDEYARHFMQTATRLLMTDADDHQLKLQGRVVKVNNTPIGVDVFNLDEQIDTEQVIQWRKLIRERWSDKRLIVCRDQFDRIRGLKKKMLAYERFLKENPEYVDKVVMIQICLDTARDIDLERDIMSVVDRINALSKDISISQPVVFLHQDLEFSQYLALNCEADLFIVSSMREGMNLTCHEFVVCSRERNAPLLLSEFTGSTQILKSGALLINPWDIKKFARAIKIGLEMPPDEKRRRWKKMFKSVINHDSDNWIVHALNNIDSSWEFNHERSQVFNLSFKQMYAAYSQAKRHMFVLKISEPPTPRMLRILSELSANNIVYLMNSNSRGVLERLYSRVSNVGLIAENGAYVRLNGNWFNIVEDVSWKDDVIKVFEDKMERLPGSYCKIGDSMVRFHTENAEDRDRVQGVIGEAMTHINTLFSDKGIHAYVNKNIVFVQEVGLALKTLQFLVSYYNSVDDISCSSHSPVAQPTSAETSASPLLSPISPKNGAGFFHVAAKRENRDPIGFLTITGSTSPVIEPLFQYVNELTKEGKLQYGYSVVHGDTSSTYAKEHIQGLNELFSMLQKLSSPNSS

SEQ ID NO: 30100 - protein, 172 aa, Triticum aestivum
MMLRAAGRRLIGAAGARPAALAGDSSTGAAALGAVAARRGYHERVVDHYSNPRNVGAFDKDDADVGTGLVGAPACGDVMKMQIRVDQASGRIVDACFKTFGCGSAIASSSVATEWVKGKQMEEVVAIKNTEIAKHLSLPPVKLHCSMLAEDAIKAAVKDYEAKKTKAAEADE

SEQ ID NO: 30101 - protein, 502 aa, Frankia sp. EAN1pec
MSTLTPPDAVALPFLDGGPRRLLIGGEWTDAASGRTFPSINPSTGETLTELAEGGAEDVNRAVAAARAAFEGPWRRMLPSERQDLIWAFADAVTAHQEELKLLEALDMGAPIGRRRPGTKPGSSWEAGVLRYFAGWVTKIHGETIPNSIPRQVLSYTLKEPIGVVAAIVPWNRPVSNAIWKIAPVLAAGCTMVLKPAEEASLAALRLGELLTEVGIPPGVVNIVTGPGETAGAALSEHPDVDKVAFTGSTTTGQHIVRAAAGNLKRVSLELGGKSPDVVFADADLDRAVPGAAMAVFTNSGQICCAGTRIFVERSIHDEFVERIATFTANLQVGNSLDPKTRIGPLVSAEQLERVVGYLDLSREEGARAAAGGARIETDDLARGYFVAPTVLTDVHDEMRVVREEIFGPVACVLPFDSVEEVTARSNDTQFGLAGGVWTRDVGKAHRLARDLRAGTVWVNNFNLMDPAVPFGGYKTSGWGREMGHQALDEYLNVKSVWIDMA

SEQ ID NO: 30102 - protein, 335 aa, Nitrosomonas europaea ATCC 19718
MNVLVTGGAGYIGSHTCVELLTAGYEVVIFDNFCNSHPEALRRIEQITSKKITIVTGDIRNQVAIEKALKDYGCEAVIHFAGLKAVGESVEKPLEYYDNNVIGTHRLLAAMQNCGVYTLVFSSSATVYGEPQRLPLTEDHPLSATNPYGRSKLIIEEMLRDVYRADPRFRIAILRYFNPVGAHDSGLIGEDPQGIPNNLMPFVAQVAVGRREYLNVWGSDYPTHDGTGVRDYIHVVDLALGHLGALDYLTVPQCMAINLGTGIGYSVLDVIKAFEEASSRQIDYRLASRRSGDVAACYANPALAEKLLRWKAQRDLAVMCRDHWRWQKNNPAGYV

SEQ ID NO: 30103 - protein, 420 aa, Bradyrhizobium japonicum USDA 110
MSAVGNEPLARQALAFVLAGGRGSRLLELTDRRAKPAVYFGGKSRIIDFALSNAVNSGIRRIAVATQYKAHSLIRHLQMGWNFFRPERNESFDILPASQRVSENMWYVGTADAIYQNIDIIESHNARFIVVLAGDHIYKMDYEVMLRQHVDSGADVTVGCLEMPRAESSGFGIMHIDENGWIQEFLEKPADPPPMPGKPDVSLASMGIYVFDAKFLFDQLKRDAEDPSSNHDFGKDIIPYIVKNGRAIAHQFSTSCVRSGDDPRAYWRDVGTVDAYWAANIDLTDVVPELDLFDRAWPIWSYSEITPPAKFVHDEESRRGQAVSSLVSGGCIISGASLRRSLLFTGVRINSYANVENAVIMPYVNVGRGARLKNVVIDRGVEIPEGLVIGEDPELDAKRFRTTEQGISLITQPMIDRLNT

SEQ ID NO: 30104 - protein, 390 aa, Gluconobacter oxydans 621H
MSQTISASSAAAESTSPHTDRVIAPDIGEYSPVEDVVRKTGDLRRVLSNPDYWYPVAWSRELKRGKTIGTRYAGQPIALVRPMDGSVFALEDRCAHRQVPLSLGKVSGEAVQCCYHGWAYGRSGRCIDVPYLGKGKLPNGVRTYPCREEGGLIFIFPGDPAKAESTPFPQLGSVGNPEYKTRRFGETVACHYSFMHENLMDMNHQFMHMKQMGQMKPRFLGGRDEPTLVEARYSFARTGGKQPWGETFIFGERRDASEKYAHKDVMTIRTEYPYQTLRIATGDEPPVMDLWIVYVPQDAEEKTCRVFGLLSIRRPKAKLVLDIAWPFLVAFTERIFKEDRDIVELEQAAWNELGGDHNQEVFPVINMLRRLLVRCGVPADKPAADQVSSS

SEQ ID NO: 30105 - protein, 365 aa, Glycine max
GNSEEEKSVKTGSPSSSPATTEQTNQPNIHVYPDWAAMQGPHSHGQGVPSSPAAGTPSSVESPTKFSGNTNQGLVKKLKGFDELAMSIGNCNAESAERGAENRLSQSVDTEGSSDGSDGNTAGANQTKRKRSREGTPITDAEGKTELQNGPASKETASSKKIVSATPASVAGTLVGPVVSSGMATALELRNPSTVHSKANSTSAAQPCAVVRNETWLQNERELKRERRKQSNRESARRSRLRKQAETEELARKVEMLTAENVSLKSEITRLTEGSEQMRMENSALREKLINTQLGPREEITLSSIDSKRAAPVSTENLLSRVNNSGANDRPAENENDICETKPNSGAKLHQLLDTNPRANAVAAG

SEQ ID NO: 30106 - protein, 328 aa, Triticum aestivum
MALAGGDARGELVCVTGGSGFIGSWLVRLLLDRGYTVHATVQNLQDEGETKHLQALDGADTRLRLFQMDLLDPASVRPAVEGVHGVFHLASPVILQPAQDPENELLLPAVNGALNVLRAAKDSGVKRVVMVSSQTAMCPTAADWPAGKVIDDDCWADVEILKKLELWYNVSKTLAEKAAWDFAGEEGLQLVVLNPGLVLGPTLTPAPTPSLRLLMLLLGGQRLDMEPFFVGCVDVRDVAQSLVVLYENPSAQGRHLCMESAVRLVDFHDELANLYPEFPVHRIQEDKQGWVVRSKAPSKKLINLGVRFTPFDKTVRDTVDCLRNKGEI

SEQ ID NO: 30107 - protein, 664 aa, Aspergillus fumigatus
MFHSRALLLSWLVGFTAAKDIHLDWNITWVWAAPDGFGRPMIGINNEWPCPIVNADLGDRLIVDVHNGLGNQSTGIHWHGFHQYMTGTMDGSNQVTQCALPPGSSMRYEFDVNQTGTYWYHSHEMGQYPDGLRGPFIVRDPSPPFAYDDEFTLTLTDHYHEQMSVLLQQYEADSVGAQAGVNEPLPAAALINEGFDTTTLRVEPNKTYLIHLVCVGNWPGHVIVFDDHEISVVEVDGTWVDAYPARDKKIRLATGQRMSILLKTKDNTDRNYAIWDSMDVNMMFFYQNRAIPEGFNPNTTAWLVYDEAKELPPAPDVHELDPNNDFVDDLVFVPASHEPLLEKVDRQIIFDTGVTQRDGRSVYTINGQTYVDPEEPTLYTALAASPENASNASIYGQVNPFVVQYGEVVEIIINNHHGNLHPWHMHGHQFQVLQRTIPEGGYFDGYFANISSTPVKRDTIMVQNHGHAVLRFRANNPGVWLIHCHIEWHVTKGLTGTLIEAPAQMHKISVPLDHQRICPSYGTPPGGTPSSPPHDAPRPDGASGSPQYPPKPWGEPDASAPEQDDSQPGGTPDSPEDFPQPWGEPEESPQEPPQPWSPSNNAQPPANTYAPEYPSGYVPVAPGPVIIDSELHYGGKSSHVECSGVNAGHTQDTTTGGDGCANAS

SEQ ID NO: 30108 - protein, 349 aa, Dunaliella salina
TGAGNNWAKGHYTEGAELIDSVLDVVRKEAESCDCLQGFQVCHSLGGGTGSGMGTLLISKIREEYPDRMMLTFSVVPSPKVSDTVVEPYNATLSVHQLVENADECMILDNEALYDICFRTLKLTTPTFGDLNHLISAVMSGVTCSLRFPGQLNADLRKLAVNLIPFPRLHFFMVGFTPLTSRGSQQYRALTVPELTQQMWDAKNTMCAADPRHGRYLTAAAQFRGRMSTKEVDEQMLNVQNKNSSYFVEWIPNNVKTSVCDIPPKGLKMSGTFVGNSTAIQEMFKRVSEQFTAMFRRKAFLHWYTGEGMDEMEFTEAESNMNDLVSEYQQYQDASAEEEGEFEGEEEEV

SEQ ID NO: 30109 - protein, 216 aa, Glycine max
IRLEGEDGPTHQPIETLAHFRALPNMMVWRPADGNETSAAYYVALTSEKTPSILALTRQNLPQLEGSTIENGIKGGYVAVEAEGAQITLVSTGSEVSLCLEAAKYLKDNKGVTARVVSMPCMEVFDAQPKDYKLKVIPDGIPSLSVEVMSTLGWEKYSHEQFGLNRFGASGPYKEVYAKFEFTPEGIAKRAVATIDFYKEVKPLRSPLNRAFQQLI

SEQ ID NO: 30110 - protein, 428 aa, Novosphingobium aromaticivorans DSM 12444
MSDNQASLTADGKTVEMPVKSGTIGPDVIDIRKLYGQTGMFTYDPGFTSTASCDSALTYIDGDEGVLLHRGYPIGQLAEHSSFMEVSYLLLNGELPSQQELADFTRTITRHTMLHEQLATFYRGFRRDAHPMAIMCGVVGALSAFYHDSTDISDPTHRKISSHRLIAKMPTIAAMAYKYSVGQPFVYPDNKLSYTGNFLKMTFGVPAEEYEVIPAVEKAMDRIFILHADHEQNASTSTVRLAGSSGANPFACIAAGIACLWGPAHGGANEAALNMLKEIGTPDKIPHYIERAKDKNDPFRLMGFGHRVYKNYDPRATVMQQTVREVFDALKVNDPLFETALRLEEIALNDPYFVEKKLFPNVDFYSGIILSAIGFPTTMFTVLFALARTVGWVAQWNEMISDPGQKIGRPRQLYTGPTQRDYVPLASR

SEQ ID NO: 30111 - protein, 582 aa, Salmonella enterica subsp. enterica serovar Paratyphi A str.
MHNDKDLSTWQTFRRLWPTIAPFKAGLIVAGIALILNAASDTFMLSLLKPLLDDGFGKTDRSVLLWMPLVVIGLMILRGITSYISSYCISWVSGKVVMTMRRRLFGHMMGMPVAFFDKQSTGTLLSRITYDSEQVASSSSGALITVVREGASIIGLFIMMFYYSWQLSIILVVLAPIVSIAIRVVSKRFRSISKNMQNTMGQVTTSAEQMLKGHKEVLIFGGQEVETKRFDKVSNKMRLQGMKMVSASSISDPIIQLIASLALAFVLYAASFPSVMDSLTAGTITVVFSSMIALMRPLKSLTNVNAQFQRGMAACQTLFAILDSEQEKDEGKRVIDRATGDLEFRNVTFTYPGREVPALRNINLKIPAGKTVALVGRSGSGKSTIASLITRFYDIDEGHILMDGHDLREYTLASLRNQVALVSQNVHLFNDTVANNIAYARTEEYSREQIEEAARMAYAMDFINKMDNGLDTIIGENGVLLSGGQRQRIAIARALLRDSPILILDEATSALDTESERAIQAALDELQKNRTSLMIAHRLSTIEQADEIVVVEDGIIVERGTHSELLAQHGVYAQLHKMQFGQ

SEQ ID NO: 30112 - protein, 567 aa, Arabidopsis thaliana
IVLVVAVLTHTASAAVREYHWEVEYKYWSPDCKEGAVMTVNGEFPGPTIKAFAGDTIVVNLTNKLTTEGLVIHWHGIRQFGSPWADGAAGVTQCAINPGETFTYNFTVEKPGTHFYHGHYGMQRSAGLYGSLIVDVAKGKSERLRYDGEFNLLLSDWWHEAIPSQELGLSSKPMRWIGEAQSILINGRGQFNCSLAAQFSNNTSLPMCTFKEGDQCAPQILHVEPNKTYRIRLSSTTALASLNLAVQGHKLVVVEADGNYITPFTTDDIDIYSGESYSVLLTTDQDPSHNYYISVGVRGRKPNTTQALTILNYVTAPASKLPSSPPPVTPRWDDFERSKNFSKKIFSAMGSPSPPKKYRKRLILLNTQNLIDGYTKWAINNVSLVTPATPYLGSVKYNLKLGFNRKSPPRSYRMDYDIMNPPPFPNTTTGNGIYVFPFNVTVDVIIQNANVLKGIVSEIHPWHLHGHDFWVLGYGDGKFKPGIDEKTYNLKNPPLRNTAILYPYGWTAIRFVTDNPGVWFFHCHIEPHLHMGMGVVFAEGLNRIGKVPDEALGCGLTKQFLMNRNRN

SEQ ID NO: 30113 - protein, 653 aa, Debaryomyces hansenii CBS767
MVSMKIGYGLVTLMVLPFIYASTVDGNLDIAAGEPKVRDYRLELTHAYGNPDGIYKSNFLINGQSPGPIIEGDEGDWVNITVVNYLPVSITIHFHGILQKGTPWSDGVPGITQYPILSGDCYSYLFQLKDQYGFYWYHAHYRGYLTDGLYGPIYIKPNKARERPYDLIVKSKEELDLIESLEKSPSYIIADDSFKLPMDDIMARMFHYGIDPLCILSILLNGKGRIYCHEYSTFHRLGSKSKLDRVPQFDSMGCIRSEKTNGYHDFKLDNFGLESPGFSRRCESTSRDNYVYFTNHSSWQYVNILNAGGQYTKAFSIDDHEFYVIAVDGVFIRPKLVHQLLIPVGSRYTVLLETNSSKHKNSKDPFAMRFAAIKTPQYIEALGYLIYGDNSTLSSVELQNIQQRNNINNGIKFQDLDGKLTEDNYDLVWPHETGPLSKVDQLNASKTGDHTFELYLNRTGVVEFSMFKDGTKLPAGFELSKPLLHMDFSDEENTFASFNGSLTDNIQEGDIVDIIINNFRTIDHPIHMHGHLFHLISYSETENFPYATVEEAAKNNYTNLNFENPPMFDIAYTPAKGHSVIRITANNPGIWLIHCHNLGHLLGGMGAVLFESIASIPKIPPLYLKQVHVEYNMQSDLGITELKNNTHDGSLQS

SEQ ID NO: 30114 - protein, 488 aa, Zea mays
MASLWLARASSQLARRAAARRPPPRPARHGSGQPTSSWFLGSVPQAALGSPALDTSRRGFCSVRRFAGESSAAAAAAAVVDEEPESGFAAGDQQAVDFPGGKVSFVAEMNFLPESTRERINCYRVLDDDGRTISGSRFQEVSRELALKMYSEMVTLQIMDTIFYEAQRQGRISFYLTSNGEEAINIASAAALSMDDIVLPQYREPGVLLWRGFTLQEFANQCFGNKLDYGKGRQMPIHYGSNRLNYFTVSSPIATQLPHAVGAAYSLKMDKKDACAITYFGDGGTSEGDFHAALNFAAVMEAPVIFFCRNNGWAISTPTTEQFRSDGVVIRGQAYGIRGIRVDGNDALAVYSAIHAAREMAVTEGRPILVEALTYRVGHHSTSDDSTKYRPVDEIEHWRTARDPISRYRKWVQGNDWWSDAEESELRSRVRKELLQAIQVAERMPKPPVTELFTDVYDKIPSNLHEQEQLLRDTIMRHPADYPTDVPV

SEQ ID NO: 30115 - protein, 331 aa, Zea mays
MATSTSQHALSSIKLLSTGCLHPDKRNCRVLSVSVGRRCPSARNLGLLCASNSQSSVIQPVQLPRSPKSGVAPKKSGESALILIRHGESLWNEKNLFTGCVDVPLTPKGVDEAIEAGKRICNIPVDVIYTSSLIRAQMTAMLAMMQHRRKKVPIILHNESEQAHMWSQIYSEETKKQSIPVITAWQLNERMYGELQGLNKQETADRFGKEQVHEWRRSYDIPPPNGESLEMCAERAVAYFKDQIIPKLVDGKHVMIAAHGNSLRSIIMHLDKLTSQEVISLELSTGIPMLYIFKEGKFIRRGSPAGPSEAGVYAYTKNLAQYRQKLDGIVQ

SEQ ID NO: 30116 - protein, 354 aa, Agaricus bisporus
MAFKILLSLILALNAVQFIAAVPTRRAQCADGTTVSNEACCVLLPIIADIQPNLFENECGEEVHETLRASFHDAIGFSRAAGGGGADGSLVTFGDVETTFAANAGIDEIVETLRPFINSHNISAGDFIQFATVVGLTNCPGAPRIPFFLGRPDATAASPDGLVPEPFDSVTKILERFDDAGFTPTEVVALLASHTVAASDTIEPGLEGVPFDSTPGEFDRQFFIETMLKGTSFPGTGGNQGEALSPLPGELRLESDGLLARDERTACDWQLFATDQQKMASAFSDAMVKLSLVGQDKSQLIDCSDVIPRTIPLTNEPYFPADLTKDDLEQTCPDEFPDYPSNPSVTSVAPVPTS

SEQ ID NO: 30117 - protein, 132 aa, Boechera holboellii
ASWHPPWYSSYTAHYSEAECMKEAMEELLYSYGTDIVFNGHVHAYERSNRVYNYELDLCGPVYIVVGDGGNREKMAIEHADEPGKCPEPLTTPDPFMGGFCAWNFTPSGKFCWDQQPDYSAMRESSFGHGIL

SEQ ID NO: 30118 - protein, 132 aa, Boechera holboellii
ASWHPPWYSSYTAHYREAECMKEAMEELLYSYGTDIVFNGHVHAYERPNRVYNYELDPCGPVYIVVGDGGNREKMAIEHADGPGKCPEPLTTPDPFMGGFCAWNFTPSGKFCWDQQPDYSAMRESSFGHGIL

SEQ ID NO: 30119 - protein, 86 aa, Glycine max
  misc_feature (19)..(19): Xaa can be any naturally occurring amino acid
  unsure (1)..(86): unsure at all Xaa locations
VYKIAPGVLTEHGKTKNPXPNVDAHSGVLLQYYGLPEQNYYPVLFGVSRALGVLPQLIIDRAVGAPIERPKSFSPEAYAKLVGAKL

SEQ ID NO: 30120 - protein, 309 aa, Triticum aestivum
  misc_feature (188)..(188): Xaa can be any naturally occurring amino acid
  unsure (1)..(309): unsure at all Xaa locations
SPSSTTSSSTEAESRHKSSSKNSHGKKKAKVDWTPELHRRFVQAVEQLGIDKAVPSRILEIMGINSLTRHNIASHLQKYRSHRKHMIAREAEAASWTQRRQMYAAGGPAAAVKRQDSNMWTVPTIGFAPAHPPPPPPPPSPAAMQHYARPLHVWGHPTMDSPRMPMWPRHTISRAPMPAWAPPPPPPXDPAFWHHPYMRGPAAYMPTHGTPCMAMPMTPKFPAPPVPVAMPCPVYGPPSPAPALASKNQQDSQLQLQAQPSNESIDAAIGDVLSKPWLPLPLGLKPPSLGSVMGELERQGVANVPQACG

SEQ ID NO: 30121 - protein, 454 aa, ASPERGILLUS NIDULANS FGSC A4
MLRVGFDASTNEIPDPVARDRRRRKRDQTVAQLIDNEETLYFCNLTVGTPGQSLRLILDTGSSDLWCNAANSTLCSSPKDPCRISGSFDPSSSSSYSYISSDFNITYADGTGAAGDYATDTVSIGGATIKDFQFGIGYTSSSAEGVLGIGYPSNEVQVARYGDDAYPNLPRFLMQNGFVQSSAYSLWLNDLEANTGSILFGGVDTEKYRGDLQTLPIQTVNGEYSELIIALTGVSLDTEARKHTVSSNALPAAVLLDSGSSLSYLPDSIAEKIYDDLRISYEPSTGAGYAPCSLARQNINVTFTFSSPEIAVGIDELIIDAGDLRFSNGERACIFGLVPAGDNTAVLGDTFLRSAYVVYDLTNNEISIAKTNFNSTKSNILEIGTGSDAVPGATKVSHPVTSVVADGSGSRIGAPTNTEDIVPSASTGAAVVLGRSTISPVLVGAAALGYMFAF

SEQ ID NO: 30122 - protein, 188 aa, Glycine max
MRSSNGTSSSRASNGNTGRHPVYRGVRRRSSGKWVSEIREPKKPNRIWLGTFATPEMAAIAYDVAALALKGKDAELNFPNSASSLPIPASSAAHDIQMAAALAATAVGAANDALEGSQGGNVSVSLAEEFSGGNLNHFVDEDLIFDMPNILVNMAEGMLLSPPRFDNFAATDYEYMDEDPTLWGFPNY

SEQ ID NO: 30123 - protein, 132 aa, Boechera holboellii
ASWHPPWYSSYTAHYREAECMKEAMEELLYSYGTDIVFNGHVHAYERSNRVYNYELDPCGPVHIVVGDGGNREKMAIEHADEPGKCPEPLTTPDPFMGGFCAWNFTPSGKFCWDQQPDYSAMRESSFGHGIL

SEQ ID NO: 30124 - protein, 132 aa, Boechera holboellii
ASWHPPWYSSYTAHYREAECMKEAMEELLYSYGTDIVFNGHVHAYERSNRVYNYELDPCGPVYIVVGDGGNREKMAIEHADEPGKCPEPLTTPDPFMGGFCAWNFTPSGKFCWDQQPDYSAMRESSFGHGIL

SEQ ID NO: 30125 - protein, 305 aa, Zea mays
  misc_feature (237)..(237): Xaa can be any naturally occurring amino acid
  unsure (1)..(305): unsure at all Xaa locations
MAQLPPKIPTVAPAWPEFGGGHQQQRSPSVGTFLAAAPMQPSWVDEFLDFSAAKRGAHRRSVSDSVAFLEPEPGPGDGNAGAHDFDRLDDDQLLSMFSDDLQPPPPQPQTQAAPAPVASSSSPSDHNSINDEKTDRGDAEEAQSKCHGAAAATAVDPKRVKRILANRQSAQRSRVRKLQYISELERSVTSLQTEVSALSPRVAFLDHQRSLLTLGNSHLRQRIAALAQDKIFKDAHXGGTEEGDREAEANLPAAEPEERQGARRGPVGPRRQGHDRQRGDRRARPALVMRRRWWGDTSRHPSRSL

SEQ ID NO: 30126 - protein, 405 aa, Mycobacterium bovis AF2122/97
MPEAVIVSTARSPIGRAMKGSLVGMRPDDLAVQMVRAALDKVPALNPHQIDDLMMGCGLPGGESGFNIARVVAVALGYDFLPGTTVNRYCSSSLQTTRMAFHAIKAGEGDAFISAGVETVSRFAKGNSDSWPDTKNPLFDGAQERSAAAAAGADEWHDPRTDQKLPDIYIAMGQTAENVAIMTGISREEQDRWGVRSQNRAEEAIKNGFFEREITPVTLPDGTTVSTDDGPRPGTTYEKVSELKPAFRPNGTVTAGNACPLNDGAAAVVITSDTKAKELGLTPLARIVSTGVSGLSPEIMGLGPIEASKKALERAGMAITDIDLVEINEAFAVQVLGSARELGIDEDKLNISGGAIALGHPFGMTGARITTTLLNNLQTYDKTFGLETMCVGGGQGMAMVIERLA

SEQ ID NO: 30127 - protein, 221 aa, Pseudomonas fluorescens Pf-5
MLNALLFDLDGTLTDTDALHLLALQQLLLEEDGRTFTQEEFEAHVSGQANANMCRYLFPERSVAEHEAFAERKEVRFRQLSPQLMPMPGLLRLLDFAQEHGIGVCVVTNAPRANAEHMLEVLGLRQRFQTVLVAEELPGAKPDPLPYLSGLECLQATADQALAFEDSVPGLTAAVKAGICTFGLATSQRPQTLLDAGAHRVINDFDDPQLWAEIRRRLDLP

SEQ ID NO: 30128 - protein, 257 aa, Glycine max
LYLVLDFVNGGHLFFQLYHQGLFREDLARIYTAEIVCAVSHLHSNGIMHRDLKPENILLDADGHVMLTDFGLAKQFEESTRSNSMCGTLEYMAPEIILGKGHDKAADWWSVGILLFEMLTGKPPFCGGNRDKIQQKIVKDKIKLPAFLSSEAHSLLKGLLQKEPGRRLGCGPRGVEEIKSHKWFKPINWRKLEAREIQPSFRPEVAGVQCVANFEKRWTDMPVVDSPAASPNGGNPFKDFSYVRPAASFLQRNSPAY

SEQ ID NO: 30129 - protein, 495 aa, Vibrio vulnificus CMCP6
MDLRKALYTAKQVREGEVGAAANAGVTLYELMERAGRATFAVILNYYPAVSRLCVVCGKGNNGGDGYVVARLARQQGLHVVLIQSGNAESLSGDAKQAQQAWRDAGGEISDTASLNAALSDCDLVVDALLGTGLAGAVREKMAKVIDTVNLAGKPIVSVDIPSGLCADTGQALPDAIHADHTVTFIGTKQGLVTGKARAFCGAIHFADLGVGAEFSKLVPSFKMTIERDEIAQWRLTRDRCAHKGDHGRVVLLGGNRGMSGAISLAATACARSGAGLVAALTHPESALPLQIHCPEVMTLGYNEDKRELEKKLDWADVLVVGPGLGTDEWAKKRWNDIANFQGPMVLDADALNWLARYPNHNDRRIITPHPGEAARLLGCSVNEVEADRFAAISVLQSQYGGVVVLKGAGTLICDGTQTFACSAGNPGMATGGMGDVLSGVIGALLAQKLPLLRAASLGVLLHSCAADICATEKGEIGLLASDLFDKIRQLLNAD

SEQ ID NO: 30130 - protein, 245 aa, Oryza sativa (japonica cultivar-group)
MYMAAAAAGASTPFNFCRHGSHAEYDAVFSGSWMARRPSAAPHGGGASGSGSGSGYGAASYVAPTFGAAFRQQHLDLLDYLSDDQGVPAPPPAAVPSASYVTPAPAMAPAEPVVPDAVAAAGGYPRSVAAAAAAVAGEGRDRTTTDKIAFRTRSDDEILDDGYKWRKYGKKSVKNSPNPRNYYRCSTEGCNVKKRVERDKNDPRYVVTMYEGIHNHVCPGTVYYAAQDAASGRFFVAGISHPDLN

SEQ ID NO: 30131 - protein, 264 aa, Leptospira interrogans serovar Copenhageni str. Fiocruz L1-130
MNSISSVFSSEQSVFIPYISLGDPDYDSCVIWADALIRGGAGILELGIPFTDPVADGPVIQKAFKRSLAHPFSMDKILEVTSEIHKLHPQIPLVYLTYFNPLFSMGLESFTERAKNSGIQGLIIPDLPFDTPEAEEFFSQLERKRIDFIHLVTPATTEDRIRSMKSLASGFIYYVTSYGVTGERGSIASGLEDRIRMVRKIVGLPVCAGFGISTSDQSKVISTYADGVIIGSAVQRIIEENGSDRNNCADKLLAYASEIRASMR

SEQ ID NO: 30132 - protein, 207 aa, Oryza sativa (japonica cultivar-group)
MSTSRRRTLLKVIVLGDSGVGKTSLMNQYVHKKFSQQYKATIGADFVTKEVLIEDRLVTLQIWDTAGQERFQSLGVAFYRGADCCVLVYDVNSNRSFDTLNTWHDEFLNQASPSDPKTFPFILLGNKIDVDGGKSRVVSEKKAMEWCSSKGNIPYFETSAKEDRNVDSAFLSVAKLALEHERDQDIYFQTVVPDPVPEAEQRSGCAC

SEQ ID NO: 30133 - protein, 289 aa, Kluyveromyces lactis NRRL Y-1140
MEKLLHWSIANAQGDDEAKARAGQPDPKLLEQLFGGGPDEPTLMKHAMAVISNPEATLENKLVAFDNFEMLIENLDNANNIENMKLWEPLITVLDDPEPELRAFALSVTGTAVQNNDQSQNNFAKYDGALAKVIKLASGRAEDAQVRTKAFYTLSNLIRHNKLIYDQFNQLNGLQIIAPVLKDANASEKLKLRAMALLSTVLTVADMNADFFALLRAYNIIETTLEFLHPECNLYLIDRVLNFFSQLINVGFEFSATELEKLKVGVKNIEPVEAQLNEDDYKTVQYVSK

SEQ ID NO: 30134 - protein, 506 aa, Oryza sativa
MEAAVAAAAAAAGAVTTAVAPPPGAAVSNGVATAPPPFLMKTYEMVDDPATDAVVSWGPGNNSFVVWNTPEFARDLLPKYFKHSNFSSFVRQLNTYGFRKVDPDRWEFANEGFLRGQKHLLKTINRRKPTHGNNQVQQPQLPAAPVPACVEVGKFGMEEEIEMLKRDKNVLMQELVRLRQQQQTTDHQLQTLGKRLQGMEQRQQQMMSFLAKAMHSPGFLAQFVQQNENSRRRIVASNKKRRLPKQDGSLDSESASLDGQIVKYQPMINEAAKAMLRKILKLDSSHRFESMGNSDNFLLENYMPNGQGLDSSSSTRNSGVTLAEVPANSGLPYVATSSGLSAICSTSTPQIQCPVVLDNGIPKEVPNMSAVPSVPKAVAPGPTDINILEFPDLQDIVAEENVDIPGGGFEMPGPEGVFSLPEEGDDSVPIETDEILYNDDTQKLPAIIDSFWEQFLVASPLSVDNDEVDSGVLDQKETQQGNGWTKAENMANLTEQMGLLSSHHTG

SEQ ID NO: 30135 - protein, 379 aa, Yarrowia lipolytica CLIB122
MTDITMIPGPIEFDPEVLSAMSHQSVAHNSPQFVEVFGSVLTDLRALFKSTDPKAQPFVIAGGGTLGWEIVGANLLKRDDKALVISTGFFSDAFADCLKVFCDHVDVISAPAGEAPSLGEIETALKKEKYNLITLTHVDTSSGVVIDIKAISELVHKVSPDTLVVVDGVCSVGVEPISFDDWGLDFVLTAPQKAIGAPAGLSISMASPRAVAKVESLEKIPVYFGNLKKWLPIMQAYEARKPAYFSTPAVQNVYALQVALKQILHNGISLDQRFENHKQVSDKIKKQINDWGLEIIAKPGLGAHGLTCIYLPEGVTLPDFLPKVAAKGVTLAGGLFKGINTKYFRFGHMGVSAVDPKRDDVDRTLKAIHDSLVEAGYKC

SEQ ID NO: 30136 - protein, 280 aa, Oryza sativa
MATPAAEKPDGVEIREVWEDNLEAEFAVIREIVDDFPYVAMDTEFPGVVCRPLGTFKSNADFNYATLKANVDMLKLIQLGLTFSNEHGGLPSLGPEGRPCVWQFNFRGFDPRTDVAAADSIDLLRRSGIDFTRHSADGADARRFAELLMSSGVVMNSEVRWVTFHSGYDFGYLLKLLTGTYLPDTITGFFDLIRIYFPVVYDIKHLMRFCNSLHGGLNKLAELLDVERVGICHQAGSDSLLTALSFKKLKEAYFNGLTEKYAGVLYGLGTEGGETSSAAH

SEQ ID NO: 30137 - protein, 774 aa, Arabidopsis thaliana
MAEEADTNIEIWKIKKLIKGLESARGNGTSMISLIMPPRDQVSRVTKMLGDEYGTASNIKSRVNRQSVLSAITSAQQRLKLYNKVPTNGLVLYTGTIVNDDGKEKKVTFDFEPFRPINASLYLCDNKFHTEALNELLESDDKFGFIVMDGNGTLFGTLSGNTREVLHKFTVDLPKKHGRGGQSALRFARLRMEKRHNYVRKTAELATQFYINPATSQPNVSGLILAGSADFKTELSQSELFDPRLQAKILNVVDVSYGGENGFNQAIELSAEILSNVKFIQEKKLIGKYFEEISQDTGKYVFGVEDTLKALEMGAIETLIVWENLDINRYELKNSTTGEMVVKHFGKDQESDTSNFHDSETNAELEVQEKMPLLEWFANEYKRFGCTLEFVTNKSQEGSQFCRGFGGIGASDRSGGDFLGFLLGIDFTMGTSSDPIQDGSDEQQKRSEIYTYEAPWHIYAMNWSVRRDKKYRLAITSLLEQYPNRVEIVQLDESNGEIRSDPNLSFEHPYPPTKTIFIPDKECQRPDLLATSSDFLRLWRIADDHSRVELKSCLNSNKNSEFCGPLTSFDWNEAEPRRIGTSSTDTTCTIWDIEREAVDTQLIAHDKEVFDIAWGGVGVFASVSADGSVRVFDLRDKEHSTIIYESSEPDTPLVRLGWNKQDPRYMATIIMDSAKVVVLDIRFPALPVVELQRHQASVNAIAWAPHSSCHICTAGDDSQALIWDISSMGQHVEGGLDPILAYTAGAEIEQLQWSSSQPDWVAIAFSTKLQILRV

SEQ ID NO: 30138 - protein, 135 aa, Zea mays
MSSSRRSSSPDSNDTTDERKRKRMLSNRESARRSRARKQQRLEELVAEVARLQAENAATQARTAALERDLGRVDGDNAVLRARHAELAGRLQSLGGVLEVLQMAGAAVDIPGGVTDDPMLRPWQPSFPPMQPIGF

SEQ ID NO: 30139 - protein, 193 aa, Solanum ochranthum
FVFAGVGSAIAYGKLTTNAALDPAGLVAIAVCHGFALFVAVSVSANISGGHVNPAVTCGLTFGGHITFITGSFYMLAQLTGAAVACFLLKFVTGGCAIPTHGVGAGVSILEGLAMEIIITFGLVYTVFATAADPKKGSLGTIAPIAIGLIVGANILAAGPFSGGSMNPARSFGPAMVSGNFEGFWIYWIGPLV

SEQ ID NO: 30140 - protein, 1000 aa, Magnaporthe grisea 70-15
MSTPKEVGPLPVVSPTDGSEDNSSDKQASHDKEKTAGADDPTPEDEHDVNKDVELQHGVAKIQAITKAWTFKYLMLTYVLIYLSSYCHSMQQNMNSNLGPYVTSAFSRHGLLATVGIVARLSSGIAQIPMAKIGDIWGRMEIYILVHGLTSFGLMLMAVSNSIETYAAANVFWSVGSAGVGFVHTVLISDLTSLRNRMIIYSINSTAYIGNAFAGPIVAELFLKQSSFRWAFGAFAIIFPFFGASICVVLWLNLRRAKRQGLVPVRPSSGRTTVQSVVFYLNEFDGMFLVMTVCVMIEPRLLTGRLSASVVGMILLCGGLSIFLLPFSIVSYSPYGWTSAYIIFMIIFGFFLVIAFAFWERNYAVTPLVPWKSLNDRTILGAALTAGILFASAGTWDSYFSSYLQVVHQQSISQAGFISNIYTIASCTWGPIVGYLIRLTNHYKWIAMSAVPVALLSTGLLIHFRTPDTYIGYVIMCQVLKACANGTIIICEQLAVMSVVSHNQVAVMLALIGLATSVGSSVGRAISGGIWTNQLLPLLIEKLPEDARANATVIYGSLPVQLSYPFGSPARNAIVAAYGDVQRKMVIAGACLMPLALGAVFLWRNVNVKKTKQTAGQTWLNIWVSPHATILASGNLSKLIASLKPRPLTGKGNQPEPGTGAWLTHSHGPPTSSENVKYRRWRSSPSGKVLWVRGGSVTIGTEAKLAISNLLGQKDEVESCTRDQLYSGSTWHALEALICSQESCFLVIDALDECTPSPSDKDAQAAGADLMRKLTELTERSGLKLACFSRDDPTLNPLLQKSACITLRPDLVMSDVLAVFLKEYDRDPALPPGSRERAKRRVLKTADGSFLWAKLFLQYAKSVDDAEAIDMRLEACPAKPHDVYERMLLETSRLGGFGEEDTRLRRTVFVFLLGAQTPVTVPMLVDVLKIPERGAAARIQQLCKPLVHVSESRVEICHPSARGFLLGLHPRVTDTLPPFTLVECRELLEKCPGRFWRDDL

SEQ ID NO: 30141 - protein, 223 aa, Brassica napus
MAAPFLSSPLQITSTSPILFTKVTPTNQIHFNQRTASTCTSNKLRLLRRSAAAGTAVTDQTEGGEEVLINPTPEEEKREEVVDYDWTEEWYPLYLTRDVPDDSPLGLTVFDRQIVLFRDGEGTLRCYQDRCPHRLAKLSEGQLIDGRLECLYHGWQFEGNGKCVKIPQLPASAKIPKVACVKTYEVKDSQGVVWGWMSTKTPPDPEKLPWFGNFPRPGSMTSR

SEQ ID NO: 30142 - protein, 336 aa, Rhizomucor miehei
MTVKAGINGFGRIGRIVLRASLLNPEVEVVAINDPFIDLEYMVYMFKYDSTHGRFKGTVEAKDGKLVVNGKPISVYAERDPCCIPGRIGAEYIVESTGVFTTKEKAGAHLTGGAKKVIISAPSADAPMFVVGVNLESYSSDMQVISNASCTTNCLAPLAKVIDDEFGIVEGLMTTVHATTATQKTVDGPSGKDWRAGRGAGANIIPASTGAAKAVGKVIPHLNGKLTGMAFRVPNPDVSVVDLTVRLEKSASYEDIKAAIKKASEGSLKGILGYTEDEVVSTDFIGDSHSSIFDAKAGISLNPNFVKLISWYDNEYGYSTRVVDLLVHIAKVDGRL

SEQ ID NO: 30143 - protein, 562 aa, Idiomarina loihiensis L2TR
MPQTQRPLYIPYSGPNLLETPLLNKGSAFSKEERAAFNLTGLLPPRYESIEEQAERAYMQYRSFETPINKHIYLRAIQDNNETLFYRLLTDHLEEMMPIIYTPTVGDACEKFSDIYRSSRGLFISYSERDQIDDILRNATKQKVKVIVVTDGERILGLGDQGIGGMGIPIGKLSLYTACGGISPAYTLPVMLDVGTNNEKLLEDPMYMGARHKRIEQDEYDEFLDKFIKAVTRRWPGVMLQFEDFAQPNAMPLLRRYRDEVCCFNDDIQGTASVTVGTLLAACRQKGKKLSEQKVVFVGAGSAGCGIAEQIMIQMTAEGLTEEQAKRQIFMVDRFGLVMDTMDGLRDFQQALAQKTSDLNAWEYSGEYPSLLDVMHCAEPDILIGVSGQAGLFTEQVISTMAKNVERPIIFPLSNPSKHVEAHPADVLKWSEGKAIVATGSPFGEVEYDGRIYPIAQCNNSYIFPGIGLGVLSVKSERVSDEMLRVASKTLANASPSANGKGEALLPAFNDLTQLSKDIAFAVGKVAQQEGLALEIDDDTLRERIDNNFWKPEYRFYKRVSI

SEQ ID NO: 30144 - protein, 602 aa, Kluyveromyces lactis NRRL Y-1140
MRFYFNAFRSRVNSRVFFLKGLRITPFLLSPIVPLSMQWFRGPLLNNSTALIPDKKGDTFEMGLYISSQKQLQEEAEKERERIITTSVMPSFFKRILYRINDVIIEPVLTLLRFLELSSIFIPLLIIYPITCLGHHKTLKVDSNRVVKETSGSLLWFKLLRKALEFAGPTFIKLGQWAGSRTDIFSEGLCAELGRLHSNAKPHALKFTKEAIVNSLDRKYEFDDIFDEFNEKPVGCGAIAQVYIGKLTELMMKNFDIKTDSRYFAVKVVHPNVPKKIDRDLKIMTFFADMIDSVPTMEWLSLPNEVEQFSILMKLQLDLRIECQNLQKFNDNFADNPRVKFPVGAMDLSSRYVLFEEYIHGFPMEKFLSSKDGLKRVDLCRKVSDPFIEAFLKMLILDDFIHADLHPGNVMIRFMKLNKQETKVVSSEKEMFQIVHKLRAMSRDNDPEFIPEMKRVFEEYEPQVCLIDAGLVTELNDRNRVNFIALFNALAKFDGYRAGELMIERSRTPETAIDKDLFALKVEKLVNKVKKQTFTLGTVSIGELLDKMLGMVRQHHVRMEGDFVSVIVAILLLEGIGRQLDPEMDLFARFVLFVLMNGFSST

SEQ ID NO: 30145 - protein, 338 aa, Yersinia pestis KIM
MYVLVTGGSGYIGSHTCVQLIEAGYKPVILDNLCNSKSSVLARIHSLTGYTPELYAGDIRDRTLLDSIFAAHPIHAVIHFAGLKAVGESVNRPLEYYNNNVFGTLVLLEAMRAAQVKNLIFSSSATVYGDQPQIPYVESFPTGSPSSPYGRSKLMVEQILQDVQLADPQWNMTILRYFNPVGAHPSGLMGEDPQGIPNNLMPFIAQVAVGRRESLAIFGNGYPTPDGTGVRDYIHVVDLADGHVAAMKTLHGKPGVHIFNLGAGVGHSVLQVVAAFSKACGKPLAYHFAPRREGDLPAYWADATKAAEQLGWRVSRSLDEMAADTWHWQSKNPQGYPD

SEQ ID NO: 30146 - protein, 336 aa, Kluyveromyces lactis NRRL Y-1140
MHGSYFWLFAISIFLTSFILALDATTTYSYQPYATSSFNRHSMVSTLTIANSVIGAVCQPFIAKISDISSRPTTYAVVLVLYVIGFIITACSPTIAAYVIGSVFIAIGQSGLSLMNSIVVADMTKLKWRSLFTSFLSVPYLVTTWISGYLTQHFISTNWRWGYGMFAILTPAVLTPAIIMISWLDRKANKSGETPIGVDPLAEKKRLIKQSEIDGLRAWLILLKGALIEIDAFGLVLLGFAFSLMLIPCSLYSYAVGGWNNPSMIAMEVVGGILLICYAVYEIWFAPFPLLPKRVLTNRTFICCVIIDFIYQMGGYFSLLYFTSYTSVVLNLSIQD

SEQ ID NO: 30147 - protein, 224 aa, Kluyveromyces lactis NRRL Y-1140
MGLCFFGVFWGALFRVFRRYKIFQVTGIAIKLIGMGLYVLCSTKEDGPHLGLVVAALIITCFGDAANVMGTQVAAQAAVPHQDMAATISVLSLYSSIGAAVGSAITSAVWTDHLPKALYKYIPDEASAAAAFEDLADITAQPWGTPTRLAAIHAYQDVLYTLFCMGVGVSSIMFIACLFQTNFYLGDQLNCVEGEQVEDYNHNPDGSKKTLLDRIADFWNKPLF

SEQ ID NO: 30148 - protein, 761 aa, Silicibacter sp. TM1040
MSLAEKLAQERRARLAAERLLELKQAELTDANRKLGRHALALTKRIGATQAEIATFKNENEKVKSDLNTANEKVEQAERRLWHSIQAFQDGFAFFDSDSKLIGANTAYLNIFEGVEEVSPGVSYVRILQILTDEGLIDTEELSADSWRAMMTERWMSPAPEPTVVRLWNDRYLKLIDQRGHDGDIVSLALDITATVHYEEELRSARERAEAANRAKSAFLANMSHEIRTPMNGVVGMAELLSDTTLTEEQRLYANTIKNSGEALLVIINDVLDYSKIEADKLALHPEAFDLEACMHEVVMLLQANARDKGLTLLVDYDLFMPTNFIGDPGRIRQILTNLIGNAIKFTNEGHVTARVTGVPHPEDNTVMLHISIEDSGIGIPDDKIQHIFGEFNQVEDETNRQFEGTGLGLAITERLIKLMDGEIWVESQLGKGSCFGFRLPLVVADGSQVNAPELPENLNCVMIVDDMDINREILNRQLQRLDLKVVAVTSGAEALDVLNAEIDLVITDRNLPGMDGLKLARSLHHASPQTPVLLLSSDPADGSDPALSDLFAGILQKPIPRGALFRALSKLDAPSVHPARPQDVPPAAPAIEPPSDAPVQVPAPEAGVDFGSGATIASDLRRMRVLAAEDNRTNQLVFRKMVKDMNIDLRFAGNGLEAVELYQSFKPDMIFMDISMPKMDGKEATQAIRELEKENGRRVQIVALTAHAMDGDSEGILAAGLDDYLTKPLRKSVIHDRIMKNMPTAVAPLQGEGDDLQATG

SEQ ID NO: 30149 - protein, 278 aa, Yersinia pestis KIM
MIRLIERSQRTCSLKYDGHIPNLIGVNVMAVTKLVLVRHGESQWNNENRFTGWYDVDLSEKGRSEAKAAGKLLKDEGFTFDFAYTSVLKRAIHTLWNILDELDQAWLPTEKTWKLNERHYGALQGLNKSETAEKYGDEQVKQWRRGFAITPPALEKSDERFPGHDPRYAKLTDAELPTTESLALTIERVIPYWNDVIKPRIASGERVIIAAHGNSLRALVKYLDDLGEDEILELNIPTGVPLVYEFDENFKPIKHYYLGNADEIAAKAAAVANQGKAK

SEQ ID NO: 30150 - protein, 175 aa, Triticum aestivum
MAPTVMASSVTSVAPFQGLKSTAGLPVSRRSNGASLGSVSNGGRIRCLQVWPIDGIKKVEILSYLPPLSTEALLKQVDYLIRSKWVPCLEYSKVGFIFREHNASPGYYDGRYWTMWKLPMFGCTDATQVINEVEEVNKEYPDAYVRIIGFDNMRQVQCVSFIAFKPPGCEESGKA

SEQ ID NO: 30151 - protein, 452 aa, Silicibacter sp. TM1040
MTDIKRKVLVIGAGPGGYVCAIRAGQLGLDTVIVDEARPGGTCLNIGCIPSKAMIHAADEFYKMTHAGAGPLGISAAGPTIDLEQTVAWKDGIVERLTGGVGGLLRKAGVKMISGRARFVDGKTVTVAGDEGEIQIRADYIVIATGSAPVELPFLPFGGAVMSSTEALSLTEVPESLAVVGGGYIGLELGTVFAKLGSKVTVVEAEDRILPLYDKALTRPVHKRLEELGVTVMTGTKAQSHEGGALQTDAGEIAAERVLVTVGRRPRTQGIGIDELSLTMNGPFIRIDKVCQTSMRGIYAIGDVTGEPMLAHRAMAQGEMVAEYLAGQAVEWDKRAIPAVCFTDPEIVTCGVLPGEVEGTKSAEFPFVANGRAMTTERDEGFIRVVWREADNAVLGLQGVGVGISELSSAFSLAIEMGACLEDIAATIHAHPTQSEGLQEACLKALGHALHI

SEQ ID NO: 30152 - protein, 330 aa, Salmonella enterica
MSQNTLKVHDLNEDAEFDENGVEAFDEKALSEEEPSDNDLAEEELLSQGATQRVLDATQLYLGEIGYSPLLTAEEEVYFARRALRGDVASRRRMIESNLRLVVKIARRYGNRGLALLDLIEEGNLGLIRAVEKFDPERGFRFSTYATWWIRQTIERAIMNQTRTIRLPIHIVKELNVYLRTARELSHKLDHEPSAEEIAEQLDKPVDDVSRMLRLNERITSVDTPLGGDSEKALLDILADEKENGPEDTTQDDDMKQSIVKWLFELNAKQREVLARRFGLLGYEAATLEDVGREIGLTRERVRQIQVEGLRRLREILQTQGLNIEALFRE

SEQ ID NO: 30153 - protein, 448 aa, Sulfolobus tokodaii str. 7
MTIAGRIERLPWTSFHTKLLALLSLGEFFELYDLFVGGFVVQPISSFYKIPSAEAIYYTIAIFFLGAFVGAIIFTYIGDVMGRRTALILNMFIASVGLLLTPFSPNIYLLGLLRFITGLGVGPEALIVLDVMITEFFPSRIRGRALAIGYTASWTAPIVVAILAYLLIPHSYILQGWQWLYIIGGLGILTIIPFRFLIPESPRWLETKGRIDEAEKIVNMMEEVAIREKGHLSEPLQVEVVTSQKVKISELFSPLYRKRTIMLWIFEFLQTGVYYGFASLAPSVLYAKGFSLVHTLEYSMLIYTSYFISSLASIFIIDSQKFDRKWQVSIVMLLMGIVGLAFGFSTTALEVITTGFLFGFLSNIFSNAFHQYGAELYPTRIRSFADGVQYSLSRLGNYVWLSILPILLYSKGPAFMYAVVFVMALIVTLDVGILGPKASQIELEQLSK

SEQ ID NO: 30154 - protein, 268 aa, Arabidopsis thaliana
MSMTADSQSDYAFLESIRRHLLGESEPILSESTASSVTQSCVTGQSIKPVYGRNPSFSKLYPCFTESWGDLPLKENDSEDMLVYGILNDAFHGGWEPSSSSSDEDRSSFPSVKIETPESFAAVDSVPVKKEKTSPVSAAVTAAKGKHYRGVRQRPWGKFAAEIRDPAKNGARVWLGTFETAEDAALAYDRAAFRMRGSRALLNFPLRVNSGEPDPVRIKSKRSSFSSSNENGAPKKRRTVAAGGGMDKGLTVKCEVVEVARGDRLLVL

SEQ ID NO: 30155 - protein, 347 aa, Pseudomonas putida KT2440
MLTIYSDDHRLHHGRCELIDGKLMPCFEMPSRADHVLDQVKKRKLGDIQGPTDFGRAPLLRVHSADYLDFFEGAWARWAALGQEGDLLPFTWPARTLRQVKPTGLHGELGYYSFDAGAPITAGTWQAAYSAAQVALTAQAAIQQGAHAAFALCRPPGHHAAGEVMGGYCYLNNAAIAAQAFLDQGRRKVAILDVDYHHGNGTQDIFYSRDDVFFASIHGDPQDEFPFFLGYADETGEGAGQGYNINYPLPAGSDWAAWSAALEDACKRIASYDADVLVISLGVDTFKDDPISQFKLDSPDYLEMGKRIGQLGKPTLFVMEGGYAVEEIGINAVNVLEGFQRAQSGAR

SEQ ID NO: 30156 - protein, 132 aa, Boechera holboellii
ASWHPPWYSSYTAHYREAECMKEAMEELLYSYGTDIVFNGHVHAYERSNRVYNYELDPCGPVYIVVGDGGNREKMAIEHADEPGKCPEPLTTPDPFMGGFCAWNFTPSGKFCWDQQPDYSAMRERSFGHGIL

SEQ ID NO: 30157 - protein, 543 aa, Novosphingobium aromaticivorans DSM 12444
MARYIFITGGVVSSLGKGLMAASLAALLQARGFRVRIRKFDPYLNVDPGTMSPYQHGEVYVTDDGAETDLDLGHYERFTGVSARQADNITSGRIYRDIITKERRGDYLGATVQVIPHVTDAIKDFAQAETEDLDFVLCEIGGTVGDIEGLPFIEALRQLHNELDRDQTCFVHVTLVPYIAAAGELKTKPTQHSVRELTGLGIQPDILLCRCEKPLPEGERAKIAQFCNVRKSAVIPALDASSIYAVPLQYHAEGLDGEVLRHFGLTAPDPDLARWEDIVDRYQNPEGEVTIGVVGKYVGLQDAYKSLNEALAHGGMANRVKVRVKWLDAELFEKGDDEIAAQLEPMHGILVPGGFGERGTEGKIASVRFARERKVPFFGICLGMQMACVEGARNTAGIAGASSTEFGPTDEPVVGIITEWMTAEGLEKRSEGGDLGGTMRLGAYEAHLAGNSHVANIYGSTVISERHRHRYEVNVAYKERLEKGGLVFSGMSPDGLLPEIVERPDHPWFIGVQFHPELKSRPFEPHPLFKGFIAAAVKQARLV

SEQ ID NO: 30158 - protein, 269 aa, ASPERGILLUS NIDULANS FGSC A4
MEQAQQTSGQQQGRQQPVYDTRQGGHYGASAALAAQGFAPVAELYTGTWANVNQGLQGTARDILTTYWQHVINHLESDNHDYKIHQLPLARIKKVMKADPEVKMISAEAPILFAKGCDVFITELTMRAWIHAEDNKRRTLQRSDIAAALSKSDMFDFLIDIVPREEATSHAKRSSQSAGAPAGPGGPTAAGQLPQTQHGVQHHPHHMAPPDYGALGQHPLQDQEYRQQTMYGGAVQSDPTAAYAQPQTQMFEGMYTAYPHLPPQQVRIG

SEQ ID NO: 30159 - protein, 641 aa, Burkholderia vietnamiensis G4
MTPRNSNTMDQAKPSSGRARKLNETTPKVTTVHQWMAQQAQQDLLRFITCGSVDDGKSTLIGRLLWEAQQVFDDQLRALQADSRRHGTQGQDIDFALLVDGLAAEREQGITIDVAYRFFSTPRRKFIVADTPGHEQYTRNMVTGASTADVAVLLMDARQGVLSQTRRHAYLVSLVGIRHVVLAINKMDLVGYQQTVFDAIVADFHAMANTLGLKSVTPIPLSALKGDNITKRSIHTPWYSGPTLMGCLETIKVERPTHTKAVFPVQWVNRPNAEFRGFSGTLASGRIAVGDSLRITSSGQTALLSRIVTADGDVKAAHAGEAVTLVLDREADASRGDVISLADQPLEMSDQFEARMVWMHDEPGHVGRTYDLKLANQWASASITSLKYRVEVNTQAHESCKQLELNDIAAANLALSKPVVFAAYAENPTLGGFILVDKFTHATVAAGMIRHNLRRAQNVHRQALSITREDRERLNGHKGKVIWFTGLSGSGKSTIANALEKELHAQGKRTYILDGDNVRQGLNKDLGFTDADRVENIRRVAEVAKLMMDAGLIVMTAFISPFRAEREMARELIGEENFIEVFVNTPLEVCEQRDPKGLYKKARAGQLPNMTGINSAYECPEHPELIFDQNTNLQELIGLLK

SEQ ID NO: 30160 - protein, 1041 aa, Desulfotalea psychrophila LSv54
MKRYFFSVISVCFLVVWAIPALASDLQLTPAEQSWLRAHPDIRLGVDPDYAPFESIEGGVYVGLAADYVSLVSKKLGLSLVPVPDLTWKEVMALAEQGELDLFPAVVQTPERNELWLFAKPHMAYSTVIFTRDDYWNVFGLADFAGKKVAVVRGYAILDFIRSAHPHLDIVLVDSVDMGLRQLEAGRVSAFVNDIATGVSAIQKMNLKNLKIAAYTDLKDKGLGFAVRKDWPELVAMIDKVLASITPEEHAAIHNRWIKVESFSPWQHWARWLFIGLAMVAVSLLAFTGWIYLLRKQVASRTTKLQASEAWTVAILDTASNPIITIDEDETVLSFNLGAERSFAYSAEEIIGQKVKILLPDLYEKYEDEFATSFFAKDDAHLIDMDREIDARRKNGTIFPIHLSVGEMIVSGKRMFVIILVDLSVQKQRNLELELARDAAEAAMEAKAIFLANMSHEIRTPMNAILGFLAIVLESSSLPADLRKHIVTAHGSAESLLVIINDVLDVSKFDSGRMELVFSVFHLPRTIGKALQTLYMPAQEKELNIHLNYDEDLPYCFLGDSVRLRQVIINLVANAIKFTEEGSITIEVKGTSGEDDLLLFTVVDTGIGIRPEQVARIFEPFTQADDSSTRNIGGTGLGLAICKEIVDLMGGRIWVESEKGKGSSFNFMVPLPRAECIKDCPKAGRPAETGDDCPKLAELSERAEPVSRKIFRILLAEDMKDNAELAQFRLEQQGHIVTHVWNGLEAVEAFQRDEFDLIFMDVQMPVLDGHSATRQIRKIERGAGGYIPIFALTASVMREDREKCIAAGMDVIIGKPIDFQFLFAKMEEIVSEGVGVVQRGWIDFSPVMAVAAVEQGLLTWANSVVYAGTLIDFSEAHLGDASTLQQLFQQNDIRGMQCLIHTLKGVAENLALSDLVKIISDVDSSLLMDDRERTTLLLLDLKEALKNVVVATGQLALAGEGAVQPVKKEDLKKIGDLLAELLVQLEEDNPAVVEPLVAELSQYLSQNDLLLLQKNIDDFEFVRAKLQVRKLADMLAIKLEV

SEQ ID NO: 30161 - protein, 280 aa, Arabidopsis thaliana
MAANGVATAGRQVSEKEADIQMMLSADVHLGTKNCNYHMERYVFKRRDDGIYIINLGKTWDKLQMAARVIVAIENPKDIIVQSARPYGQRAVLKFAQYTGVNAIAGRHTPGTFTNQMQTSFSEPRLLILTDPRTDHQPIKEGALGNIPTIAFCDTDSPMGFVDIGIPANNKGKHSIGCLFWLLARMVLQMRGTILAAQKWDVMVDLFFYREPEEAKQEGDEEAEVQADYGMVGGDQWTTAQISDAAWSGEVEQPISAAPAVGVTVAAGWEAASVPAAGWE

SEQ ID NO: 30162 - protein, 516 aa, Zea mays
METAYVVVLSFFFIVAIHRLLNRGESKNMSKQPLPPGPRAIPVLGHLHLLEKPYHLAFMRLAARYGPVFSLQLGSRAAVVVSTADCARECLAEHDATFANRPTYPTLHLMTYGGATIGHSAYGAHWRHVRRVVSLHLLSPQRVLSSMVPTITAEVRAMARRMYRAAAGGAARIELKGRLLELSLSTLMETIAQTKTYRPADDADTDMSPETQEFKQLLDAIISLLGLTNVLEFLPVLQTFDVLGLKKKIAAAAGRRDAFFQRLIDAERRRLDDGVEGQKKSMLAVLLALQKSEPENYTDEKIMALCFSMFIAGTDSTATAMEWAMSLLLNHPEVLKKAREEIDAHVGSSRLLGADDVPSLGYLHCVLNETLRLYPVGPTLIPHESTADCTVGGYRVPSGTMLLVNVYAIHRDPATWPDPDVFRPERFEDGGGSAEGRLLIPFGMGRRKCPGETMALQIMGLALGTMIQCFDWGAVGGGGAPKVDMTQGGGLTLPRAVPLEAMCKPRQVMLDVLQKL

SEQ ID NO: 30163 - protein, 602 aa, Bifidobacterium longum NCC2705
MAQRNTYREDEELEEQINFRDILRVGKYLKPYMAQVARILVVVISMSCIVVAVPYLTKIMIDEAIPNKDLGKLGILAVILAALIVLYEFGLRYRTVAITRVGQLMLKDMRRDIFTHIQTLPFSYFDSRPHGKILIRVVNYVNTLSDTLSSGLINVISDVFTFVITLIVMFVIDWQLALWSLILFPVLIIWVRVLQIFQRRAFQKLSNKQSNLNAYIHESIAGVKTTQTFAQEQAQFRTFQEQQGEVRSAWMHAVHIQFLMWPGVQTISVMTISFIYFVGVMGFGGVNVTTGVLIAFVGYANNFWNPVINIGNFYNQLITCSAYLERIFETLDVTPEIRNKPDAADLPQIRGRVDFNDVVFRYEKDGRNILNLVDFHVEPGRTIALVGPTGAGKTTIINLLSRFYDVSEGSVTIDGYDVRDVTLASLRRQMGVMLQDTFIFSGNVRENIRYGKLDATDEEIEAAAKAVHAHEFIMELPDGYDTVVEERGSTLSAGQRQLIAFARVLLADPRILILDEATSNIDTRTEEALQAGLQHLLKGRTSFIIAHRLSTIENADEIFYIDHGQIVEHGSHAQLLAAKGAYYRLYESQYAMIRVASGAPEE

SEQ ID NO: 30164 - protein, 477 aa, Hebeloma cylindrosporum
MVNVTYDDSGSLVAYTPDGTPIVYNLGDMAWIAASMALVWIMIPGVGLFYSGLLRRKNALSMIWTSLASIAVVSFQWFFWGYSLAFSETGNAFIGDLKYFGLKGVLDQPSIGSSRIPAILFCIYQLMFAAITAALAVGAIAERGRLGPLLVFIFVWSTIVYDPIANWTWNTNGWSFILGGLDFAGGTPVHISSGTAALAISIFLGKRRGYGTERLAYKPHNTTYVILGTVFLWFGWFGFNGGSALSANLRAIQACIVTNLAASVGGLTWMLWDYRIERKWSAVGFCSGAVSGLVAITPASGFVGAPAAVAFGVLGGTACNFATQLKFVLGYDDALDIFATHAIGGIVGNLLTGLFAQASVAGFDGITEIPGGWLDRHYIQLAHQLADSVAGFAYSFVMTTIILWVMHIIPGLTLRTTEEAEILGVDDAEMGEFAYDYVGIDQEIGHTLDTGLTATGGGREPDHAKAVSTSSVEEKSA

SEQ ID NO: 30165 - protein, 362 aa, Saccharomyces cerevisiae
MTTAVRLLPSLGRTAHKRSLYLFSAAAAAAAAAATFAYSQSHKRSSSSPGGGSNHGWNNWGKPAALASTTPLVHVASVEKGRSYEDFQKVYNAIALKLREDDEYDNYIGYGPVLVRLAWHISGTWDKHDNTGGSYGGTYRFKKEFNDPSNAGLQNGFKFLEPIHKEFPWISSGDLFSLGGVTAVQEMQGPKIPWRCGRVDTPEDTTPDNGRLPDADKDAGYVRTFFQRLNMNDREVVALMGAHALGKTHLKNSGYEGPWGAANNVFTNEFYLNLLNEDWKLEKNDANNEQWDSKSGYMMLPTDYSLIQDPKYLSIVKEYANDQDKFFKDFSKAFEKLLENGITFPKDAPSPFIFKTLEEQGL

SEQ ID NO: 30166 - protein, 231 aa, Arabidopsis thaliana
MAAFPNLNSGSGLKKLDEHLLTRSYITGYQASKDDITVFTALSKPPTSEYVNVSRWFNHIDALLRISGVSAEGSGVIVEGSSPITEEAIATPPAADSKDTAAEEEDDDDVDLFGEETEEEKKAAEERAASVKASTKKKESGKSSVLMDIKPWDDETDMKKLEEAVRSIQMEGLFWGASKLVPVGYGIKKLHIMCTIVDDLVSIDTMIEEQLTVEPINEYVQSCDIVAFNKI

SEQ ID NO: 30167 - protein, 55 aa, Adenia sp. Gilbert 9135
WEYQVGPSVGIEAGDHIWCSRYLLERITEQAGVVLTLDPKPIEGDWNGAGCHTNY

SEQ ID NO: 30168 - protein, 333 aa, Saccharomyces bayanus
MSEHEDKKQKVGGSSLDQLKNAGTHVVADSGDFESISKYEPQDSTTNPSLILAASKLEKYEKLIDAAVEFGRKHGKTDHEKVENAMDKILVEFGSQILKIVPGRVSTEVDARLSFDKKATVKKALHIIKLYKDMGVPKERVLIKIASTWEGIQAAKELEAKHGIHCNMTLLFSFTQAVACAEANVTLISPFVGRIMDFYKERSGEDYTGETDPGVLSVRKIYSYYKRHGYKTEVMAASFRNLDELKALAGIDDMTLPLNLLQQLHESTDPIENKLNAETAKQEGVEKVSFINDEPHFRYVFNEDQMATEKLSDGIRKFSVDIEALYELVEKKM

SEQ ID NO: 30169 - protein, 60 aa, Dilkea sp. Gilbert 9246
SPMGGVMPGQWEYQVGPSVGIDAGDHIWCSRYILERITEQAGVVLSLDPKPIEGDWNGAG

SEQ ID NO: 30170 - protein, 531 aa, Bradyrhizobium japonicum USDA 110
MTLLRDPLLNKGTAFTEAERAALGLRGLLPPCVLTMETQVDRVLTNLRMLPTDLEKYVALNALHDRNEALFFRVVVDNIDEIQPIIYTPTVGLACQKYGLIFQRPRGMFISSRDRGQIAEILKNWPYPARLIVVTDGERILGLGDLGANGMGIPVGKLSLYSACAGVHPEHCLPIVLDVGTNNEELLNDPYYLGLRERRLTGEAYDSFVDEFMVAARKTFPGVLIQFEDFANHSAFKLLHKYRDEACVFNDDIQGTAAVALAGLFSGLRISGGKLKDQKILFLGAGEAATGIADLVVSAMMAEGATEAEALRRNWLVDSRGLVVSGRDGLSGHKLRYAHAGQAPISDFLTAIKTLKPTAIIGVAAVGGAFTPDVLKAMAGLNEHPIVFALSNPTSKAECSAEDAYRYTEGRALFACGSPYDPVKLNGRTFVPRQGNNSYIFPGVGLGVIATRSRLVTDEMFMAAAHSLADCVGKEDLAQGSLYPALPRIREVSARIAAAVADVAYQRGLADGPAPNDVKALVQSQMYEPKY

SEQ ID NO: 30171 - protein, 229 aa, Arabidopsis thaliana
MQIFVKTLTGKTITLEVESSDTIDNVKAKIQDKEGIPPDQQRLIFAGKQLEDGRTLADYNIQKESTLHLVLRLRGGMQIFVKTLTGKTITLEVESSDTIDNVKAKIQDKEGIPPDQQRLIFAGKQLEDGRTLADYNIQKESTLHLVLRLRGGMQIFVKPLPGKTITLEVESSDTIDNVKAKIQDKEGIPPDQQRLIFAGKQLEDGRTLADYNIQKESTLHLVLRLRGGF

SEQ ID NO: 30172 - protein, 55 aa, Passiflora aimae
REYQDGPSVGIDVGDNIWCSRYILERITDQAGVVFILDPNPMEGDGTGAGCPPNS

SEQ ID NO: 30173 - protein, 413 aa, Silicibacter sp. TM1040
MSDNETYAPLALNVPEPGCRPGDTPDFSYFEVPRAGAVARPSVDVDPDDMREMAFSIVRVLNKEGEAVGDWAGTLSPEELREGLRDMMLLRAFDARMLNAQRQGKTSFYMQHLGEEAVSCAFSRALKDGDMNFPTYRQAGLLIARDYPLVTMMNQIYSNADDPLHGRQLPIMYSSKEHGFFSISGNLGTQFVQAVGWAMASAISGDTKIAAGWIGDGSTAESDFHAAMVFASTYNAPVVLNIVNNQWAISTFQGIARGGVGTFAARGHGFGIASIRVDGNDYLAVNAVAKWAAERARLGLGPTLIEHVTYRAGGHSTSDDPSAYRSADEGAAWPLGDPIDRLKRHLIRIGEWSEERHSQAEAELMDQVITAQKEAEKVGTLGGGKGPSPRDMFEGVFEKMPPHLIRQRQEAGY

SEQ ID NO: 30174 - protein, 356 aa, Silicibacter sp. TM1040
MTLNLTEETAPEGYERLVFAQDPESGLQAFICVHSTVLGPAAGGCRMWNYATVDEARMDVLRLAEGMTSKNAMADLALGGGKSVIVGNPQSDKSPALLRAFGRAVQSLDGSYYTAEDVGISPDDMKIVAEETPYAVGLEDGAHGTGDPSPFTAQGVFQCLLVGAEVVFGTSDLSGRRVLVQGLGHVGMSLAEKLYGAGAELIVADINEAALQHAKTAFGATICDPAEIFETEMDIFAPCALGGVLTEATAQKLSAKLVCGAANNQLETPEVADALRARGIRYLPDYVVNAGGIISVAGEIHKAGTSYRTERLDGVAARIRTLVDLSDKTGRTTTAVADDMVADILAKASNTARGAA

SEQ ID NO: 30175 - protein, 376 aa, Candida glabrata
TTTGHLIYKCGGIDKRTIEKFEKEAAELGKGSFKYAWVLDKLKAERERGITIDIALWKFETPKYHVTVIDAPGHRDFIKNMITGTSQADCAILIIAGGVGEFEAGISKDGQTREHALLAFTLGVRQLIVAVNKMDSVKWDESRFAEIVKETSNFIKKVGYNPKTVPFVPISGWNGDNMIEATTNASWYKGWEKETKAGVVKGKTLLEAIDAIEPPTRPTDKPLRLPLQDVYKIGGIGTVPVGRVETGVIKPGMVVTFAPAGVTTEVKSVEMHHEQLTEGLPGDNVGFNVKNVSVKEIRRGNVCGDSKNDPPKAAASFNATVIVLNHPGQISAGYSPVLDCHTAHIACKFEELLEKNDRRSGKKLEDSPKFLKSGDA

SEQ ID NO: 30176 - protein, 339 aa, Debaryomyces hansenii CBS767
MAEAENLTPPSSATPNDYIESLTPEQVEHDQKIGIKAIRLFLQSKTSYDVLPVSYRLIVLDTSLLVKKSLNILLQNNIVSAPLWNNKTSRFAGLLTSSDFINVIQYYFQFPEKFDLVDQLTLNGLRDIEKAIGVDQIETASIHPFKSLYEACVKMIDSKARRIPLIDEDEKTHREIVVSVLTQYRILKFVALNCKETKMLLKPIKNLQGLGTLKDIATCTMDTPVIDVIHLLTQKSVSSVPIVDEQGKLINVYEAVDVLGLVKGGIYNDLVLSVGDALLRRPEDFEGVHTCTLNDRLSTIMDTIRKSRLHRLFVVNDEGKLVSVITLSDILNYILFGED

SEQ ID NO: 30177 - protein, 262 aa, Arabidopsis thaliana
  misc_feature (135)..(135): Xaa can be any naturally occurring amino acid
  unsure (1)..(262): unsure at all Xaa locations
MATAVGSGSDVEVGFAKLQGEDFEYYMQSYSIILGRNSKKSTVDVDLSSLGGGMNISRNHARIFYDFTRRRFSLEVLGKNGCFVEGVLHLPGNPNVKLDSQDLLQIGDKEFYFLLPVRSILGGPLGPRHHVLGKXVVPYHNYQSGPGSGSGKRGVRSRELYEYDDEDDDDDDDEEDDMRGSGKKTRRDGHEVVYASGEKKREGRSKVDREADDQQFLQLEEKDVVSVDAYGKTSFGDIKGVWKRMASQSSKKIPITRRLGYP

SEQ ID NO: 30178 - protein, 364 aa, Debaryomyces hansenii CBS767
MQRFIDDLLVKRETCPIDNEYDGEKMGARISAVFVILVSSAFGSFFPILSSKYSFIRMPPWCFFIAKYFGSGVIVATGFIHLLEPASDSLGEECLGGTFVEYPWAFGIALMSLFAMFFIELISFHYIDLKIEKESAEGHSHSHFGSSDIYLKKDESDDDDRLETKPTPQINPYPQHFQHAAEHQDPEVLGTPVEDVNKEHYYGQLVSVFVLEFGILFHSAFVGLSLAVAGEEFVSLYIVLVFHQMFEGLGLGSRIATIEWPKRRRWTPWILALCYTLSTPIAIAIGLGVRTSYPPGSRKALITNGVCDAIAAGILFYSGIVELMAHEFLYSNQFKGPKGFRNIMAAFVVMCLGAGLMALLGKWA

SEQ ID NO: 30179 - protein, 281 aa, Novosphingobium aromaticivorans DSM 12444
MSSGAPRGPAKVALFQMTSGIDPLVNAAAIVDAATRAAEAGAAMLFTPEMCGLLDRERARATRHIVTEAENPVLASARKAARDLGIWIDLGSLAILRDDGKWANRGFVIDADGAVAARYDKIHMFDVDLATGETWRESAAYTPGEQVVTVETPVGMLGMAICYDVRFPALFEELGRRRCDAIRIPAAFTVPTGKAHWHLMQRARAVEASAWVIAAAQGGRHEDGRETFGHSLVVDPWGEVALDGGEGTSLGYAVIDPARTDEVRAQLPSLANKREIPRSAP

SEQ ID NO: 30180 - protein, 625 aa, Burkholderia fungorum LB400
MTRKKLDFRGQAFKDVLGFTFRHWAQQPWRIVVITALVLLSALADVLTPMFAGHLVDAIASGAASNAVAWRAAVTAFCVLGALGLGATLLRQGVYFNIIRLTLRMMSEIAANAFHRVQRFSTDWHANSFAGSTVRKITRGMWALDLLNDTLLIALFPSLVMLVGATVLLGWRWPMMGAVVGIGSLLYIAVTAAMSLGFVAPAARLANAWDTRMGGALADAVSCNGVVKAFGAEDREEALLARVIGKWRHRTRRTWMRGTINGGVQGGMLVAIQAAILGAALLLWARGEASVGDITFALTMFFMLQGYLRDVGMHIRNLQRSVNDMEELVSLESQPLGIEDPPGAGPIAIGKGEIRFEHVTFHYGTNGQPLYDNFSVRIAPGERVGLVGHSGSGKTTFIKLIQRLYDISEGRITIDGQDIAKVRQASLRSQIAIVQQEPVLFHRSLAENIAYARPGASRAEIEHAARLASAHDFIAALPNGYDTLVGERGVKLSGGERQRVAIARAFLADAPILILDEATSSLDSESEVLIQQAMERLMMGRTTLVVAHRLSTVRALDRLLVLDKGKVIEEGSHEALIRLENGLYRRLFERQALELIKGLGEPEFAHHTSRPGANRMDDSSLLVGK

SEQ ID NO: 30181 - protein, 293 aa, Triticum aestivum
  misc_feature (92)..(92): Xaa can be any naturally occurring amino acid
  misc_feature (239)..(239): Xaa can be any naturally occurring amino acid
  misc_feature (285)..(285): Xaa can be any naturally occurring amino acid
  unsure (1)..(293): unsure at all Xaa locations
MARMAVSVLAILLASCALAAASFDKEFDVTWGDGRGKILNNGQLLTLGLDKISGSGFQSKHEYLYGKIDMQLKLVPGNSAGTVTAYYLSSQXGPTHDEIDFEFLGNVTGEPYTLHTNVFTQGQGQREQQFRLWFDPTNDFHTYSILWNPKHIIFMVDDMPIRDFKNLEGKGIAFPKNQPMRLYSSLWNADDWATQGGRARAARAGAPFSASYRSFKADACVVTAAGRPRCGASIGTDAXPRHGGAAAAGDWYNQELDLTRQQRMRGVQSNYMIYNYCTDPKRVGXGVPAECSM

SEQ ID NO: 30182 - protein, 626 aa, Rhodobacter sphaeroides 2.4.1
MSALAAFVTLGGDPGEAQSRVLSMLSAMPTRGTELRVRALTAGVALGHGRPAGRGGLGPWRLRPGGPVLTGTVRLDNGPELRRALGLAEASDAETVLAVYDRWGLDLPLHLDGDFALALWDPVAARLIGLRDRFGVRPFLYRATPQAVAVASGIEALVAAFPACEPALDEVWIAEYLSGQPTCARRTVYRGISRLEPAHMLLVEKGRTEVRRYWQLEVAPRRRADPPEALLELLDRSVTARMQGGPVGSMLSGGLDSGTVSMLASRRSEGPLPVISMKFDDHPEIDESEWIAKIHAAGRFRPVWIDGRDAHGGDVAELLAEQGGPFFAPNLATSRWLYRRAAEAGVEILLDGHGGDEVISFGVARLTELASEAQWRTLWQSTAAVSDLFGGSRREFFLNSMAQGAQSRWLRAMARRLNVGAKRDPRAWRQALHPALVARTGLVQRVQEAAGARKRGATDDIRQHVATLTAPRYPTTLEVLDRAATLCGIEPRYPFLERRLIEHCVAQPAAAKFHDGMTRALLRDAVRGLLPDEVRLRTSKTNFTPNVRARMLTSWGDNLNRIAGCNPGRIGDYVDLAVIREGIQRLRAGEPDQPALLQTMRAVVLDEWLRGGSSALAPRLDRRTPA

SEQ ID NO: 30183 - protein, 486 aa, Burkholderia fungorum LB400
MGRLIIVSNRVAPISEGGPAAGGLAVGVYDALKETGGMWFGWSGDVLSSGQPQIKVEERGPVTFATIALMRRDYDQYYRGFSNATLWPAFHYRADLLQYDRHDFEGYWRVNAWLAQQLVPLLREDDVIWVHDYHLIPFAQALRAAGVKNRIGFFLHIPFPASQVLLAVPPHRELVEALCSFDLLGFQTAPDLRAFCDYIVNEANGTADPSASGPLTIHAFGRTLRAAAYPIGVYPDEIAELAKAGERGKPVRTMKATLHSRKLIMSVDRLDYSKGLVERFRAFERLLEHSTAQRNKVSFLQIAPPTRADMHAYQDIRLQLEGESGRINGRFAELDWTPILYIHKQYERSVLAALFRTAHVGYVTPLRDGMNLVAKEYVSAQDPENPGVLVLSRFAGAAQELDGALIVNPVDIDGMAEALARALDMPLAERQARHRDMMVQLRENNVSVWRDNFMRDLQGVAGAKGTRNGKARAVAGKKAARETQAG

SEQ ID NO: 30184 - protein, 249 aa, Burkholderia fungorum LB400
MQALPAVLSPGETAFFFDFDGTLVELAPTPDGVLVQPRVIDLLSELRSLTNGAVAVVSGRGIDSIDSFLGIPDLPIAGLHGAERRDANGDTQRIGFHDERLLRMEQVLAQVVNENPGMLLEIKGAAVALHYRNAPDREPVAREATSRLVADYAGAYVLQPGKMVYEIKPKDVDKGRALRAFLDEPPFVGRQPVFAGDDLTDEKGFAVVNERGGLSIKVGPGETMARTRIDSVPALLDWLASIVAAARAA

SEQ ID NO: 30185 - protein, 561 aa, Thiobacillus denitrificans ATCC 25259
MNPHSRFLPATPNLPRRRFLQGLAAGGILLGAPSLILPASAREAGTAAGSAPVLSGTEFDLTIAETAVNFTGKPRMATTINGSIPGPTLRLREGDTVTIRVHNRLTEDTSIHWHGILLPFEMDGVPGISFKGIPPGQTFTYRFKVKQTGTYWYHSHSGMQEQTGMYGTIIIDPARGNSVGADRDYVVQLSDWTDEHPMRVLHKLKVQGDYFNFNQPTAGDFFRDVSKEGLKAAIDKRRMWNEMRMSPTDLADVSAHTYTYLMNGAAPAGNWTGLFRPGGKVRLRFVNSAAMTFFDVRIPGLKMTVVQTDGQDVEPVTVDEIRIGVAETYDVIVSPKDEAYTIFAQSMDRTGFARGTLATRAGLVAAVPSPDKPVALEMQDMMGDMTGLARAHHARTEYGPSVDMRVDTPRTDLDDPGVGLRDNGRRVLTYDHLHSVGGPLDARGPGREIELHLTGNMERYAWSIDGVEFEKSTPVHFRHNERLRVVFVNDTMMTHPMHLHGMWSELESPEGKFQVRKHTIAVQPAQRVSFLVTADALGRWAWHCHLGLHMDMGMFREVVVA

SEQ ID NO: 30186 - protein, 453 aa, Zea mays
  misc_feature (341)..(341): Xaa can be any naturally occurring amino acid
  unsure (1)..(453): unsure at all Xaa locations
MKLRLVALVLAVASVYACSSAASAFAGDDVVRVALKHVDAGKQLSRPELIRRAMRRSKARAAALSAVRNRARFSGKNEQQTPAGVLPVRPSGDLEYVVDLAIGTPPQPVSALLDTGSDLIWTQCAPCASCLSQPDPLFAPGQSASYEPMRCAGTLCSDILHHSCERPDTCTYRYNYGDGTMTVGVYATERFTFASSGGGGLTTTTVPLGFGCGSVNVGSLNNGSGIVGFGRNPLSLVSQLSIRRFSYCLTSYASRRQSTLLFGSLSDGVYGDATGRVQTTPLLQSPQNPTFYYVHFTGLTVGARRLRIPESAFALRPDGSGGVIVDSGTALTLLPAAVLAXEVVRAFRQQLRLPFANGGNPEDGVCFLVPAAWRRSSSTSQMPVPRMVLHFQGADLDLPRRNYVLDDHRRGRLCLLLADSGDDGSTIGNLVQQDMRVLYDLEAETLSIAPARC

SEQ ID NO: 30187 - protein, 422 aa, Streptomyces collinus
MTRRVAVTGIGIVAPGGIGVPAFWNLLAAGRTATRAITFFDPSGLRSRIAAECDFDPTAHGLDPRDVERSDRYIQFAMVAGDEAVRDAGLDLAAEDPWRVGVSLGTAVGGTTRLEHDYVLVSHGGQRWDVDHREAGPDLHRAFTPGALASTVAERFGARGPVQTVSTGCTSGLDAVGYAFHTVEEGRADICIAGASDSPISPITMACFDAIKATSPNNDDPAHASRPFDADRDGFVMGEGGAVLVLEELEHARGPRCARVLRTRRLRHFGNAYHMTGLTSEGVEMARAIDDALDHARLDPTAIDYVNAHGSGTKQNDRHETAAVKRVLGPHAYETPMSSIKSMVGHSLGAIGAIELVACVLALTHQVVPPTANYETPDPECDLDYVPREARERKLDSVLSVGSGFGGFQSAVVMNRPRETSR

SEQ ID NO: 30188 - protein, 417 aa, Streptomyces collinus
MSEPRPQRVAVTGIGVVAPNGSSTETFWKSTREGISVLDRVTREGCEHLPLRVAGQVRGFDPSAAIEERFLVQTDRFTHFAMAAADLALDDARLPRSVTDEVPFSVGVVTAAGSGGGEFGQRELQQLWGKGSRFVGPYQSIAWFYAASTGQISIRRGFKGPCSVVAADEAGGLDALAHAARAVRRGTDVIVAGATEAPIAPYSVVCQLGYEELSTVDDPTRAYRPFTSAACGFVPAEGGAMVVVEAEGTARERGAPVRAHLAGHAATFTGASRWEESREGLAQAVRGALAEAGCAPEEIDVVFADALGVPEADRAEALAIADALGAHGTRVPVTAPKTGIGRGYCAAPLMDAAAAVLSMEHGLIPPTPNVFDICHDLDLVTGRARTAEVRTALVLSRGLMGSNSALVLRHGAADASS

SEQ ID NO: 30189 - protein, 512 aa, Gerbera hybrid cultivar
MTPLTLLIGTCVTGLFLYVLLNRCTRNPNRLPPGPTPWPVVGNLPHLGTIPHHSLAAMAKKYGPLMHLRLGFVDVVVAASASVAAQFLKTHDANFADRPPNSGAKHIAYNYQDLVFAPYGPRWRMLRKICSVHLFSTKALDDFRHVRQEEVAILARALVGAGKSPVKLGQLLNVCTTNALARVMLGRRVFDSGDAQADEFKDMVVELMVLAGEFNIGDFIPVLDWLDLQGVTKKMKKLHAKFDSFLNTILEEHKTGAGDGVASGKVDLLSTLISLKDDADGEGGKLSDIEIKALLLNLFTAGTDTSSSTIEWAIAELIRNPQLLNQARKEMDTIVGQDRLVTESDLGQLTFLQAIIKETFRLHPSTPLSLPRMALESCEVGGYYIPKGSTLLVNVWAISRDPKIWADPLEFQPTRFLPGGEKPNTDIKGNDFEVIPFGAGRRICVGMSLGLRMVQLLTATLIHAFDWELADGLNPKKLNMEEAYGLTLQRAAPLVVHPRPRLAPHVYETTKV

SEQ ID NO: 30190 - protein, 556 aa, Oryza sativa
IEPQNRREKKISPRSEASNRLLKMQIFVKTLTGKTITLEVESSDTIDNVKAKIQDKEGIPPDQQRLIFAGKQLEDGRTLADYNIQKESTLHLVLRLRGGMQIFVKTLTGKTITLEVESSDTIDNVKAKIQDKEGIPPDQQRLIFAGKQLEDGRTLADYNIQKESTLHLVLRLRGGMQIFVKTLTGKTITLEVESSDTIDNVKAKIQDKEGIPPDQQRLIFAGKQLEDGRTLADYNIQKESTLHLVLRLRGGMQIFVKTLTGKTITLEVESSDTIDNVKAKIQDKEGIPPDQQRLIFAGKQLEDGRTLADYNIQKESTLHLVLRLRGGMQIFVKTLTGKTITLEVESSDTIDNVKAKIQDKEGIPPDQQRLIFAGKQLEDGRTLADYNIQKESTLHLVLRLRGGMQIFVKTLTGKTITLEVESSDTIDNVKAKIQDKEGIPPDQQRLIFAGKQLEDGRTLADYNIQKESTLHLVLRLRGGMQIFVKTLTGKTITLEVESSDTIDNVKAKIQDKEGIPPDQQRLIFAGKQLEDGRTLADYNIQKESTLHLVLRLRGGQ

SEQ ID NO: 30191 - protein, 193 aa, Lycopersicon chmielewskii
FVFAGVGSAIAYGKLTTNAALDPAGLVAIAVCHGFALFVAVSISANISGGHVNPAVTCGLTFGGHITFITGSFYMLAQLTGAAVACFLLKFVTGGCAIPTHGVGAGVSILEGLVMEIIITFGLVYTVFATAADPKKGSLGTIAPIAIGFIVGANILAAGPFSGGSMNPARSFGPAMVSGNFEGFWIYWIGPLV

SEQ ID NO: 30192 - protein, 456 aa, Thiomicrospira crunogena XCL-2
MQYDYDLIAIGAGSGGLSVVERAVEYGKKCAVVEAKKMGGTCVNIGCVPKKVMWFGAHIAESLRDAPDFGFHVERKGFDWSELVKRREQYISNITTWYGGYFKELGIDVLEGWGSFVDEHTVSVDGKLVTAETIVIAPGGTPFIPNETENADLGITSDGFFALTEQPNKVAVIGSGYIAVEIAGVLQALGTQTTLISRKDLVLRGFDDMVRETLTDAMIESGIHKEYHFKVKKLMKADDGTLIIESEDGQHLEGFDEVIWAVGRETLTEPLALDKVGITPNGRGYIDVNDYHQTQVPNIYAIGDVTGQAQLTPVAIRAGRYLAERLYNNQPELKMDLSKVPTVVFSHPPVGVIGLAEHDARKEYGHDNVQVYSSVFTPMRYAFTEHQIKTALKLVCVGEEQKVVGIHIVGDGADEMLQGFAVAVQMGATKADLDATIAIHPSSSEELVTMRPMILK

SEQ ID NO: 30193 - protein, 80 aa, Glycine max
  misc_feature (73)..(73): Xaa can be any naturally occurring amino acid
  unsure (1)..(80): unsure at all Xaa locations
MLEFNFMQHILYRQKEQFSDGVGYGWIDGLKAHAEKHVTDRMMLNAANIFPFNTPTTKEAYYYRMIFERFFPXVNLINHA

SEQ ID NO: 30194 - protein, 433 aa, Vicia faba
MGSRIRVSFEDEKGAETGMPSFNSDDACYTEGNTVDAFHVSDFGAFGQPYRIEDAVALSGNSNSVFNSLKVSGQTISPGPAHISTLGKFPTSLDKSPLENQTEPHRLQLTKLQSSNLSSSSILSVHIENQEEFTMADASPRTDISTDVDTDDKNQRFDTNQSLVPVGSDSSDRSKDKSDQKTLRRLAQNREAARKSRLRKKAYVQQLESSRLKLTQLEQELQRARQQGVFISSSGEQTHSLSGNGAMQFDAEYARWLEEQNRQINELRAAVNSHASDTELRMIVDGILAHYDEIFRLKGVAAKADVFHLLSGMWKTPAERCFLWLGGFRSSELLKLLVSQLEPLTEQQLMGITNLQQSSQQAEDALSQGMEALQQSLAETLSTGAPSSSGSSGNVANYMGQMAMAMGKLGHSRASFDRLTICASRLYNKCTEY

SEQ ID NO: 30195 - protein, 193 aa, Lycopersicon chmielewskii
FVFAGVGSAIAYGKLTTNAALDPAGLVAIAVCHGFALFVAVSISANISGGHVNPAVTCGLTFGGHITFITGSFYMLAQLTGAAVACFLLKFVTGGCAVPTHGVGAGVSILEGLVMEIIITFGLVYTVFATAADPKKGSLGTIAPIAIGFIVGANILAAGPFSGGSMNPARSFGPAMVSGNFEGFWIYWIGPLV

SEQ ID NO: 30196 - protein, 332 aa, Rubrivivax gelatinosus PM1
MTGGTGFIGSHTSVALANAGHDFVILDNLANSQRDVLDRLAPLCGKRPAFVEGDVRDAATLDRVFAQYPIRAVIHFAALKAVGESVQKPLAYYENNITGTLRLLEAMRRAAVHTLVFSSSATVYGDPASVPIREDFPLSATNPYGWTKLMVEQILADLSKSEPQWRIARLRYFNPVGAHESGQIGEDPSGIPNNLMPYVAQVAVGQRPQLQVFGGDYPTPDGTGVRDYIHVMDLAEGHVAALDSLAREPGLLTVNLGTGLGVSVLDMVAAFEKASGRPVPYRIVDRRPGDVAACWADPALALQRLGWRTRRDLDQMCADAWRWQSNRAAWSA

SEQ ID NO: 30197 - protein, 60 aa, Passiflora ambigua
VMPGQWEYQVGPSVGIDAGDHIWCSRYILERITEQAGVVLTLDPKPIEGDWNGAGCHTNY

SEQ ID NO: 30198 - protein, 353 aa, Deinococcus radiodurans R1
MPSAAPGGTRMLILDEMQARGHESLKLLHHAPSGLRGVLAVHSRVLGPAIAGVRLREEDEELAVRGALALSESLTLKAALAGLNYGGGACVLLMPEAGVEDPHAREALFRALGRQVQHMNTRVVLTEDIGVTPADIAFVAQETPATLGMNTDTSSVTGYGVYRGMKAAAKHALGAESLRGVRVAILGVGAVGRTLAQHLSREGAKLTVADFRPDRAQALAEELGHVTVVPVGEIFDVPCDVFAPCGFGHSVQSADVPRLQCRLIAGGEHHPLTRRGEEAVKEAGIMYVPDFAINSAGLIAAATGVNMDQAGERVYQTVSRIMSVATQYGKPPHVVARKMAERRIDLIGSLVHV

SEQ ID NO: 30199 - protein, 495 aa, Sulfolobus acidocaldarius
PVIILKEGSSRTYGKEALRINIAAVKAVEEALKTTYGPRGMDKMLVDSLGDITITNDGATILDKMDLQHPAAKLLVQIAKGQDEETADGTKTAVIFSGELVKKAEELLYKEIHPTIIVSGYKKAEEMAIKTIEEISTKVSVNDTEILRKVALTSLSSKAVAGAREHLADIVVKAITQVAELRGDKWYVDLDNVQIVKKHGGSINDTQIVYGIIVDKEVVHPGMPKRVENAKIALLDASLEVEKPELDAEIRINDPTQMKKFLDEEENILKEKVDKIAQTGANVVICQKGIDEVAQHYLAKKGILAVRRAKKSDLEKLARATGGRVVSNIDELTSQDLGYATLVEERKIGEDKMVFIEGAKNPKAVSILIRGGLERVVDETERALRDALGTVADVVRDGRAIAGGGAVETEIAKRLRKYAPQVGGKEQLAIEAYANALESLVMILIENGGFDPIELLVKLRSAHENETNKWHGINVYTGQIQDMWSLGVIEPAVVK

SEQ ID NO: 30200 - protein, 588 aa, Yersinia pestis KIM
MNLPIREFDAVVVGAGGAGMRAALQISQMGLSCALISKVFPTRSHTVSAQGGITVALGNTHEDNWEWHMYDTVKGSDYIGDQDAIEYMCKTGPEAVLELEHMGLPFSRLEDGSIYQRPFGGQSLNFGGGQAARTAAAADRTGHALLHTLYQQNLKNHTTIFSEWYALDLVKNQDGAFVGCTAINIETGEVVYFKARATILATGGAGRIYQSTTNAHINTGDGVGMALRAGVPVQDMEMWQFHPTGIAGAGVLVTEGCRGEGGYLLNKHGERFMERYAPNAKDLAGRDVVARSIMIEIREGRGCDGPWGPHAKLKLDHLGKDVLESRLPGILELSRTFAHVDPIKEPIPVIPTCHYMMGGIPTKVTGQAITVNEKGEDVVIPGLFAVGEIACVSVHGANRLGGNSLLDLVVFGRAAGMHLQESLMEQGASRDASESDIEASLARMNRWNNTRSGEDPVEIRKALQACMQNNFSVFREGDAMAKGLEELKTIRERLQNARLDDTSSEFNTQRIECLELDNLMETAFSTAVSANFRTESRGAHSRFDFPDRDDVNWLCHSLYLPGTESMTRREVNMQPKLREAFPPKVRSY

SEQ ID NO: 30201 - protein, 535 aa, Magnaporthe grisea 70-15
MAKPPRMVICREQQCRRAGIFAVMAMQPEHENTAMWDMKTSEANTGTKIPDGNLGTNKTQPSCTNRRSKTMATTAEGDFLWGATMQARARKLLLEYQERYVAANPKSADSFGRASVSLAGGNTRSVLHYDPFPMVLVSGRDCFVSSEDGREYVDFVSEYSACMLGHSHPAVAEAVQAVMSRGINLGGASKEEQVLAALLTERIPSMARVRFCNSGTEANTMALTLARHHTGRRKILAFENGYHGGFIGFDSGVLPTTVPFEFVLARYDDATHVRELVDDSFAAIIVEPMQGVGGMIPASRRFLQTLREVADATSAVLIFDEVVTSRLNYNALQSHHGVFPDLTTIGKFWGGGGGGFSFGAFGGKADIMAAMDPPALGGSTSSAQQQRLSHSGTFNNNAFSMTAGAVACRLITREAIARANALGDRLREGITAAGRNAEASPWMWASGFGSMLNVHFGGFAAAELRDLFFFFMLDRGFYVSRRGLIALNLMHTDHHNSRSSSRHSSLVYKIEVLYLMQFFAITMFRNQKLILVSYS

SEQ ID NO: 30202 - protein, 309 aa, Oryza sativa
YHPIPVVFSKGEGSHILDPEGNKYIDFLSAYSAVNQGHCHPKVLRALKEQAERLTLSSRAFYNDKFPIFAEYLTSMFGYEMMLPMNTGAEGVETAIKLVRKWGYEKKKIPKNEALIVSCCGCFHGRTLGVISMSCDNDATRGFGPLVPGHLKVDFGDTDGLEKIFKGKALGAGVVPVSAVLADKDIMLCIKPGEHGSTFGGNPLASAVAVASLKVVTDEVDLSNEALSPASAYDICIKLKERGVLAKPTHDTIIRLAPPLSISPEELAEASKAFSDVLEHDLPQLQKQIKKTESAAEKQSCDRCGRDLY

SEQ ID NO: 30203 - protein, 426 aa, Yersinia pestis KIM
MADKKATLNLGEAAIELGVLSPTLGTDVIDVRTLGSKGYFTFDPGFTSTASCESKITYIDGDQGILLHRGFPIAQLAKDSTYLEVCYILLYGETPTPEEYKTFKTTVTRHTMIHEQITRLFHGFRRDSHPMAVLCGVTGALAAFYHDALDVNNERHREITAFRLLSKMPTVAAMCYKYSLGQPFVYPRNDLSYAGNFLHMMFSTPCEKYEVNPVLERAMDRILILHADHEQNASTSTVRTAGSSGANPFACIAAGIASLWGPAHGGANEACLKMLEEIKTVEHIPEFIRRAKDKNDSFRLMGFGHRVYKNYDPRATVMRETCHEVLEELKLNNSLLEVAMELENIALNDPYFIEKKLYPNVDFYSGIILKAMGIPSSMFTVIFAIARTIGWIAHWNEMHNDGIKIARPRQLYTGYTERDFQSQLKK

SEQ ID NO: 30204 - protein, 550 aa, Pichia pastoris
MSGPYTKIDLDKEEQDFQNQIKEIEEWWSQPRWAKTKRIYNAEDIAKRRSSLSSVPASNQQAQKLFKLLGEHAKNETASFTFGALDPIHITQMAKYLDTIYVSGWQCSSTASTSNEPSPDLADYPMDTVPNKVERLILRRQLFHDRKQREERLSVSKQERAKLPYTDFLRPIIADADTGHGGITAIIKLTKMFIERGAAGIHIEDQAPGTKKCGHMAGKVLVPVQEHINRLVAIRTSADLFQSDLIAVARTDSEAATLLTSTIDKRDHYFVIGATNPDIPDLIDVLTEAELQGKYGAELSQLEADWSKKAGLKLYHEAVFEAIDKSSSVKDKQAAKDKFSAKVGPLTGTSHKEAAKLAKEILGEEVFFDWEAPKVREGYYRYQGGTECAIMRARAYSPYADLVWMESKVPDYQEAVDFAKGVKTFTQTNWLAYNLSPSFNWNKAMSPDEQETYIKRLGKLGYNWQFITLAVLHTTALAVDNFSRDYQKIGMKAYGQQVQAKEIEDGIEIVKHQKWSGAEYIDGLLKLTTGGLSSTAAMGAGVTEDQFKDH

SEQ ID NO: 30205 - protein, 567 aa, Candida glabrata CBS138
MNSDTNMQMMSKVSIPPIWSILKGRDDEDVTSPRYTKGKQLSMLSSHGSDSLETSPRTSITSHDLTQSSSSSGVSSNYTTITEAEFYSRCSTNLEKLIIEKNEISKQLDSYKAVTKDSLVSSDFIKEFSDRLISIQKSIDEITKLQHDYEIATQQEKIRILACQYPSGSSRSSYVSPEQKFLPSFKNLASQPQQQQHQQQQQQNTTSSSPNQISSPTTVPQTSAYQRQPVSHSIPSIHSLSNPVSSPLVPTSNRTLQLKSPNQTKILGPNELANPAQQQHSYIQYTQGEYPSYGYQKQFVNAYQNTRNSEGQIFQVGNENRSKSLNVASILMDSRRGSLPFPAYGNLQPTSYAVHSPIGGNLFHSSYQFSAGSPTMTGYKSATTDAMSAVPGSGIINDKSPSLSNVLDSYSVTNPGPKKRGRKKKIKEGIVSSSFSSGLPIPHSLALANAETLKPQHINSLSKNINNSAGTVVMTSCLHCGENHTPEWRRGPYGNRTLCNACGLFYRKAISKFGVKNANLLLRYRKRISNTANRRVPKMLKIPIGIIEEFDADPYLDSNYNTIRKEE

SEQ ID NO: 30206 - protein, 105 aa, Fusarium subglutinans
  misc_feature (82)..(82): Xaa can be any naturally occurring amino acid
  unsure (1)..(105): unsure at all Xaa locations
GGKAPRKQLASKAARKSAPSTGGVKKPHRYKPGTVALREIRRYQKSTELLIRKLPFQRLVREIAQDFKSDLRFQSSAIGALXESVESYLVSLFEDTNLCAIHAKR

SEQ ID NO: 30207 - protein, 541 aa, Thiobacillus denitrificans ATCC 25259
MSEQILRVTGMTCDHCAASVKQALLRVAGVTRADVSCPDAMARVEVGVDTPVAALLNAVRARGYGAEVGGDATSKASTKLNVTIIGAGSAGFAAAIRAAEEGAEVTVIEASTIGGTCVNVGCVPSKILIRAAHVAHLQARHPFPGLVRHAPLLDRTALVAQQQARVEELRHAKYERILETNPGIKLLRGFARFEDAKTLVVRQPDDTEKRLTPDRILIAPGRSPRIPDVPGLAGTPFWTSSEALIATETPAHLIVHGGSVVALELAQAFLRLGSRVTLVARGKLLSREDPAIGEGLNAVLEEEGMRVLTDTDVKAVRFDGTTFELETSAGTLSGDRLLVATGRKPNTAGLALDRTGVTTDTSGAIVVDDHLRTSVPHIYAAGDCTNAPQFVYVAAAAGTRAAINMTGGDAALDLSVVPAVVFTDPQVATVGLTEAQANKLGMETDSRTLTLDNVPRALANFDTRGFIKLVSEKKTGRLLGAQVLAGEGGEIIQTAALAIQNRMTVADLAGQLFPYITMGEGLKLCAQTFTTDVKQLSCCAG

SEQ ID NO: 30208 - protein, 319 aa, Campylobacter jejuni
MKKLILTTGPSLGGKINLNQIHQDKFIYRINGAHGDIESIKNTIINLRKQKADIDILIDLPGNKIRTSGISEAIQVEKDKDFSLKIDQFNYKEFYKLVKPGMEVYANDSVFLFIVKEVNDKEIIFTSKSTGLLLNNKGMHVRNLHDNIPFLFEKDKELIKLCNEFDIAYVGASFVRKASDIQEIKQVLHSNTKIISKIETLEAVNNLYSILQEVEYILIDRGDLSTEIGIEKIPRFQNYIVEMAHHNAIKVFLATQILKNMEEKPIPTIAEIDDLYNIAKSGVFGVQLSEETAVGHYVEECVKILNLMQDEINNEKIIL

SEQ ID NO: 30209 - protein, 579 aa, Saccharomyces servazzii
MFSRTDKNVDTLAGDISQLSFDSPSSKLAYNANNNMTPLRQRDNNRFGVGAGMNMGTPTPSPTKSTVYDQENDSSAMMVDDEDNDDITNSPKKLPMDFYKKSSSNKTQRLVSVCKMYFLDYYCDMFDYVISRRQRTKKVMEYIEQQKVLNNVPVERLNTEWFGYLQQEHDVLRKRRLKPKHKDFEMITQVGQGGYGQVYLARKKDTKEVCALKILNKKLLFKLNETNHVLTERDILTTTRSEWLVKLLYAFQDPESLFLAMEFVPGGDFRTLLINTKYLKSAHARFYISEMFCAVNALHELGYTHRDLKPENFLIDAKGHIKLTDFGLAAGTVSNERIESMKIRLEEVKNLEFPGFKEKSIEDRRKIYHHMRETDVNYANSMVGSPDYMALEVLEGKKYDFTVDYWSLGCMLFESLVSYTPFSGSSSNETYENLRHWKQTLRRPRLDNGRPAFSDRTWDLITRLIADPISRLRSFEHVKRMPYFSDIDFDNLRNMSPPFIPQLDSETDAGYFDDFTNEADMAKYADVFKRQNKLSAMVDNSAVSSKLVGFTFRHRSGKQGSSGILYNGSEHSDPFATFY

SEQ ID NO: 30210 - protein, 499 aa, Lycopersicon esculentum
MGKLVVGATVVCTAAVVCGVTVLLMKHRVKNSGEWGKVEALLKDFEEKCATPVEKLKQVADAMTVEMQAGLASEGGSKLKMLISYVDNLPTGDEKGLFYALDLGGTNFRVMRVQLGGKEKRIVKHEVKEVSIPQNVMTGSSSEVLFDFIATALAEFVATEGDDFHLPPGRQRELGFTFSFPVKQLSIASGTLIKWTKGFSIEDLVGQDVVGELAKAMERAGLDVRVAALVNDTVGTLAGGRYNNPDVIAAVILGTGTNAAYVERAHAIPKWHGLLPKSGEMVINMEWGNFRSSHLPVTEYDQNLDIESLNPGEQIYEKIISGMYLGEILRRVLCRMAEEASLFGDYVPSKLKVPFVLRTPDMAAMHHDESADLKVVGNKLKDILEVPNSTLKMRKIVVELCDIITSRGARLSAAGIVGILKKLGRDTFKDGEKQRSVIAVDGALFEHYTKFRNCLKETMKELLGDAADSTVIELSNDGSGVGAALLAASHSQYTDLEES

SEQ ID NO: 30211 - protein, 459 aa, Rubrivivax gelatinosus PM1
MSRTTQDWQAADAAHFLHPFTDFDALAKKGSRIIERAENIYLWDSEGHKILDAMSGLWCVNVGYGRQELIDAATAQLKQLPFYNAFFQTATPPAIELAELLSEVTPPQFRHVFFSGSGSEGNDTVVRMVRRYWDVLGQPERKVIISRNNAYHGSTMAGASLGGMSGMHAQGGLPIPDITHIEQPYWYELGRPQGLSRDDFGRLAASWLEKKILEVGPERVAAFIGEPVQGAGGVIIPPATYWPAIQAICDKYGILLVSDEVICGFGRTGRWWGCETMGTRPDLMTFAKGVTSGYIPLGGVMVGERVARVLIEQGGEFNHGYTYSGHPVACAVALANIRLIQRERLVDRVRDDLGPYLAQHFEALKAHPLVGDAETCGLMGAVVLARDKASGTPFASDLEVGMVCRGHCFGNGLIMRAVGDRMIIAPPLVMTRDQIDEMMVLIKRCLDLTWADVKARGWV

SEQ ID NO: 30212 - protein, 882 aa, Alkalilimnicola ehrlichei MLHE-1
MSIQDSDAALRDDIRLLGEMLGDTLKEQEGTDLFDTVERIRALAKQARAGDQGAAEALEQELGSLDEHQIMPVARAFSQFLNLANIAEQHHRVRRSREWARSPDASPLKGSLAEAFPRLLQGETDPEALYHAACELDIELVLTAHPTETQRRTMLQKYNRIARLLDGRDRLDLTPDETEEVTAGLRREIIGAWQSDEIRRRRPTPVDEARWGLAVMEQVLWDAVPRYLRNLDRSLREHTGRALPLDAAPIRFGSWMGGDRDGNPNVTARVTREVCLAGRWMAATLYEKEIQTLINTLSMTRCDQALRELVGDAWEPYRVLLKRLRARLRLTQRWVEARLAGKRPPEGEVLLDKEDLLRPLLTCYHSLHRCGAGQVAEGELLDTIRRVSCFGLTLTRLDIRQHADRHADALSEITSALGLGRYDQWDEEARQRWLLSELASRRPLIPDDLEPGEEAAEVLETCRTLAELGSDGLGAYIISMAEHPSDILAVELLQKACGVTQPLRSVPLFETRDTLQNAAETMRVLFEQPWYRDRIGGHQEIMIGYSDSGKDAGHLTAAWTLYQAQEALVALAEENGIQLTLFHGRGGSIGRGGGPTHAAVLSLPPGSVKGTLRVTEQGEVIQSKFGLPGIALRNLEIYTAAVLEATLQPPAEPRPEWREVMDRLSDTACGAYRGLVKETPEFIEYFQAATPVREIGQLAIGSRPAKRNQKALTVDNLRAIPWIFAWTQTRLMLPAWLGVGDALSEALEEDLGDTLREMFQQWPFFEAFLDMVEMVLAKGDPGVASLYDRRLVPEELHGMGEQLRGRYRKTLDAVLSVTGHERPLADFPVVRRAVDVRNPYVDPLNLLQAELLYRSRLCDDEQLRRVLMVAINGIAAGMRNTG

SEQ ID NO: 30213 - protein, 158 aa, Zea mays
MSLIRRSNVFDPFSLDLWDPFEGFPFGSGSSSSLFPSFPRTSSETAAFAGARIDWKETPEAHVFKADVPGLKKEEVKVEVEDGNVLQISGERNKEQEEKTDTWHRVERSSGRFLRRFRLPENAKTEQITAAMENGVLTVTVPKEDAKKPEVKSIQISG

SEQ ID NO: 30214 - protein, 499 aa, Lycopersicon esculentum
MSVTVSSPAVRSFHVSRSPHKTISRPRVIISAVRSTDSLGVAPILTKLQKDCATPLPVLRHVADAMADDMRAGLAVDGGSDLKMILSYVDTLPTGNEKGLFYALDLGGTNFRVLRVQLGGKEERVVATEFEQVSIPQELMFATSEELFDFIASALGKFAQKEGGNFELQQGRTREIGFTFSFPVKQTSIRTGILIKWTKGFAVSGTAGKDVVACLNEAMERRGMDMQVSALVNDTVGTLAGARYWDDDAMVAVILGTGTNACYVERVDAIPKLAKRMSKSPITIVNTEWGAFSNGLPLTEFDREMDAESINPGEQIFEKTISGMYLGEIVRRVLVKMAKVGGLFGSSYVPEKLVTPFVLRTPDICAMQQDTSIDLEAVESVLYDVAGVKSDLSARKTVVDICDTIAKRGGRLAGAGIVGILQKMEEDSKGLIFGKRTVVAMDGGLYEHYPQYRGYLQEAVTELLGSEISKNVVIEHSKDGSGIGAALLAAANSKYEHDD

SEQ ID NO: 30215 - protein, 216 aa, Glycine max
PRRIAPRAPPDPTRPTGLRDGAQEERAGGGGGGGQGSMCDLVARTGRHQQRYEDGRRLVAGCIPFRYRADETSGDEQKKVVEVLMINSQSGPGLLFPKGGWENDETVEQAAAREAIEEAGVRGDIVQFLGFYDFKSKTHQDACCPEGMCRAAVFALHVKEELASWPEQSTRRRTWLTVPEATSQCRYQWMQEALLTGFSEWHDNWSKGGSAGGDPI

SEQ ID NO: 30216 - protein, 177 aa, Campylobacter jejuni
MKHNLTIWLTGLAGSGKSYIAQALYRKLKEKYDNVIYLDGDELRELLGYFSYDKKGRMDVSFKRSDFARFLSNQGMIVIVSAISMWNEIYEYNRKYLKNYFEIYIKCEFEELKRRDKKNLYTQALKGEISNVVGVDIPYDEPKADLVIDNTQMTALDDKVCLILTALSQNLDNSKRE

SEQ ID NO: 30217 - protein, 149 aa, Silicibacter sp. TM1040
MTKYFKNPDAIAALSEEEFYVTQNSGTERPGTGKLLSNKEPGIYVDIVSGEPLFASSDKYESGCGWPSFTKPIEPAHVQELEDRTLGMIRTEVRSTHGDSHLGHVFPDGPADRGGLRYCINSASLRFIHLDDMEAEGYGAYINQVEDHR

SEQ ID NO: 30218 - protein, 466 aa, Pseudomonas putida KT2440
MKSYDVVIIGGGPGGYNAAIRAGQLGLSVACVEGRSTLGGTCLNVGCMPSKALLHASELYEAASGDEFAHLGIEVKPTLNLAQMMKQKDESVTGLTKGIEYLFRKNKVEWIKGWGRLDGIGKVVVKAEDGSETALQAKDIVIATGSEPTPLPGVTVDNQRIIDSTGALSLPQVPKHLVVIGAGVIGLELGSVWRRLGSQVTVIEYLDRICPGTDTETAKTLQKALAKQGMVFKLGSKVTQATAGADGVSLTLEPAAGGTAESLQADYVLVAIGRRPYTKGLNLESVGLEADKRGMLNNEHHRTSVPGVWVIGDVTSGPMLAHKAEDEAVACIERIAGKPHEVNYNLIPGVIYTRPEMATVGKTEEQLKAEGRAYKVGKFPFTANSRAKINHETEGFAKVIADAETDEVLGVHLVGPSVSEMIGEFCVAMEFSASAEDIALTCHPHPTRSEALRQAAMNVDGMAMQI

SEQ ID NO: 30219 - protein, 171 aa, Silicibacter sp. TM1040
MTTTERAVLAGGCFWGMQELIRHRKGVLSTRVGYTGGDVPNATYKNHGTHAEGIEITFDPEQTSYREMLEFFFQIHDPTTVNRQGNDIGMSYRSAIYYVDARQKQIAEDTIADVEASGIWPGKVVTEVEPVGDFWEAEAEHQDYLQRLPNGYTCHFPRPDWVLPKRDQAAE

SEQ ID NO: 30220 - protein, 488 aa, Chlamydophila caviae GPIC
MTKKPLYLLLATAMFLSVPTLSPSGFAAVKKDARIAEVPQEVLLKEISGGFSKVAELATPGVVYIESFPKCNRPVAPAPGRRGPYDNPFDYFNDEFFNRFFGLPTQKERPVSKEAVRGTGFIVSSDGYVVTNNHVVEDAGKIHVTLHDGQKYPAKVIGLDPKTDLAVIKINADKLPHLTFGNSDHLKVGDWAIAIGNPFGLQATVTVGVISAKGRNQLHIADFEDFIQTDAAINPGNSGGPLLDIDGKVIGVNTAIVSGSGGYIGIGFAIPSLMAKRIIDQLISDGQVIRGFLGVTLQPIDAELAACYKLDKVYGALVTDVVKGSPAHKAGLKQEDVIIAYNGREVESLSGFRNAISLMNPDTRVLLKVVREGQVIEIPVIVSQAPQDDGVSALNRVGIRVQNLNPETAKKLGMAPDSKGVLIVAVEAGSVAGSSGVAPGQLILAVNRQKVSTVEELNSVLKDGNNENILLMVSQGEVIRFIVLKPEE

SEQ ID NO: 30221 - protein, 586 aa, Oryza sativa
MGKVGEKVRAFATNRWLVFVAAMWLQSMAGIGYLFGAISPVVKAALGYNQRQVAALGVAKDLGDCVGFLAGTLSATLPAWAMLLVGAAQNFLGYGWLWLIVTRQLPALPLSMMCLLIFVGTNGETYFNTASLVTCIQNFPKSRGPTVGILKGFAGLSSAILTQLFAVLHTPDHATLVFMVAVGPSLVAIGLMFVIRPVGGHRQVRPSDNNSFMFIYTICLLLASYLVGVMLVQDFVQLSDNMLVFITAVLFILLILPIAIPVTLTFSSKTEHPMEEALLAEPSKGQASTSQEKEPDVFLSEVEDEKPKEIDSLPPSERRKRIAELQARLVQAAARGGVRIRRRPHRGENFTLMQALVKADFWLIWLSLLLGSGSGLTVIDNLGQMSQAVGYKDAHIFVSLTSIWNFLGRVGGGYFSENIVRERTYPRHIALAFAQILMAAGHFLFAMAWPGTIYVATFLVGLGYGAHWAIVPAAVSELFGVKHFGAMYNFLTVANPTGSLIFSGVIASNLYDYEAEKQAHHQSSLSGRSLFDMSFLAEGPLKCEGAVCFFVSSLIMSAFCIVGAGLSLIVVHRTKRVYANLYRAVR

SEQ ID NO: 30222 - protein, 255 aa, Brassica napus
  misc_feature (12)..(12): Xaa can be any naturally occurring amino acid
  misc_feature (182)..(182): Xaa can be any naturally occurring amino acid
  misc_feature (187)..(187): Xaa can be any naturally occurring amino acid
  unsure (1)..(255): unsure at all Xaa locations
PIHYGSNQHNYXTVSSPIATQLPQAAGVGYALKMEKKNACAVTFIGDGGTSEGDFHAGLNFAAVMEAPVVFICRNNGWAISTHISEQFRSDGIVVKGQAYGIRSIRVDGNDALAVYSAVRSAREMAVTEQRPVLIEAMTYRVGHHSTSDDSTKYREADEIQYWKMSRNPVNRFKKWVQDNGXWWSEXEDESKLRSSTRKQLLQAIQAAEKWEKQPLTELFNDVYDVKTKNLEEQEVGLKALVEKQPQDYPTGFHI

SEQ ID NO: 30223 - protein, 798 aa, Mycobacterium leprae TN
MAGIPATVVQRCNSTNLDDRLHYSPLGDRAKEERNPMAIMDTNTEVHTLFTQEVAATQQYFDDPRFAGIIRLYTARQVVEQRGTIPTDYTVARDAATAFYARLRELFAAGKSVTTFGPYSPGQAVSLKRMGIEAIYLGGWATSAKGSITEDPGPDLASYPLSQVPDDAAVLVRALLAADRNQQYLRLHMTEQQRAATPAYDYRPFIIADADTGHGGDSHVRNLIRRFVEIGVPGYHIEDQRPGTKKCGHQGGKVLVPSDEQIKRLNAARFQLDIMRVPGIIVARTDAEAANLIDSRADERDQPFLLGATNLKIPSYKACFLALVRCFYELGVKELHGHLLYALGDGEYAAASAWLDRQGILAQVSGTVNAWQENGKQSIDDLFEQVEYRLLAAWEKDAGLMTYGEAVEEMLQFGESEGELIGMSPEEWRRFVGRASLYAAREKAKELGVDPGWDCELAKTPEGYYQIRGGIQYAIAKSLAAAPFADILWMETKTADLADARQFAEAIHAEFPEQMLAYNLSPSFNWDTTGMSDEEMKRFPEELGKMGFVFNFITYGGHQIDGVAAEEFATALRQDGMLALARLQRKMRLVESPYRTPQTLVGGPRSDAALAASSGRTATTKAMGKGSTQHQHLVQTEVPKKLLEEWLALWSEHYQLGEKLRVQLRPRRAGSDVLELGIYGNGDEQLANVIVDPIKDRRGRSILQVRDQNTFAEKLRQKRLMTLIHFWLVHRFKADTVIYVTPTEDNLYQTSKMKSHGIFSEVYQEVGEIIVAEVNHPRLVELLTPDRVALRRLITKEG

SEQ ID NO: 30224 - protein, 346 aa, Arabidopsis thaliana
MSSTEEMSSVKNTTQVIGVDPSSTVRVTIVQSSTVYNDTPATLDKAEKFIVEAASKGAKLVLFPEAFIGGYPRGFRFGLAVGVHNEEGRDEFRNYHASAIKVPGPEVERLAELAGKNNVHLVMGAIEKDGYTLYCTALFFSPQGQFLGKHRKVMPTSLERCIWGQGDGSTIPVYDTPIGKIGAAICWENRMPLYRTALYAKGIEIYCAPTADYSLEWQASMIHIAVEGGCFVLSAHQFCKRREFPEHPDYLFNDIVDTKEHDPTVSGGGSVIISPLGKVLAGPNYESEGLVTADLDLGDIARAKLYFDVVGHYSKPDIFNLTVNEHPKKPVTFMTKVEKAEDESNK

SEQ ID NO: 30225 - protein, 426 aa, Rickettsia typhi
MATKLIKHGSKAREQMLEGIDILADAVKVTLGPKGRNVLIEQSFGSPKITKDGVTVAKSIELKDKIRNAGAQLLKSAATKAAEVAGDGTTTATVLARALAREGNKLVAAGYNPMDLKRGMDLAVNAVVEEIKKSSKKINSQEEIAQVGTISSNGDKEIGEKIAKAMEEVGKEGVITVEEAKNFSFDVEVVKGMMFDRGYLSPYFVTNSEKMVAELENPFILLFEKKLSNLQPMLPILEAVVQSQRPLLIIAEDVEGEALATLVVNRLLGGLKVAAVKAPGFGDRRKAMMEDIAILTKGELITEDLGMKLENVNIKNLGTAKRVTISKENTVIVDGNGDKKNIEDRVLQIKSQIAETTSDYDKEKLQERLAKLSGGVAVLKVGGATEVEVKERKDRVEDALAATKPNSSTLAAVHLVDPSSVPSLAY

SEQ ID NO: 30226 - protein, 316 aa, Shigella flexneri 2a str. 301
MNELDGIKQFTTVVADSCDIESIRHYHPQDATANPSLLLKAAGLSQYEHLIDDAIAWGKKNGKTQEQQVVAACDKLAVNFGAEILKIVPGCVSTEVDARLSFDKEKSIEKARHLVDLYQQQGVEKSRILIKLASTWEGIRAAEELEKEGINCNLTLLFSFTQARACAEAGVFLISPFVGRIYDWYQARKPMDPYVVEEDPGVKSVRNIYDYYKQHHYETIVMGASFRRTEQILALTGCDRLTIAPNLLKELQEKVSPVVRKLIPPSQTFPRPAPMSEAEFRWEHNQDAMAVEKLSEGIRLFAVDQRKLEDLLAAKL

SEQ ID NO: 30227 - protein, 202 aa, Arabidopsis thaliana
MNILNRLGLGSSGQTNMDPSPIAQGNDDDTPAPGNQFAQFGAGCFWGVELAFQRVPGVTQTEAGYTQGTVDNPSYGDVCSGTTGHSEVVRVQYDLNDCTYESLLDLFWSRHDPTTLNRQGNDVGTQYRSGIYFYTPEQEKLARESLERHQQQMERKIMTEILPAKKFYRAEEHHQQYLSKGGRFGQGQSTAKGCNDPIRCYG

SEQ ID NO: 30228 - protein, 453 aa, Gossypium hirsutum
MGRAPCCEKVGLKKGRWTAEEDVLLTKYIQANGEGSWRSLPKNAGLLRCGKSCRLRWINYLRADLKRGNFTSQEEEVIINLHATLGNRWSLIASYLPGRTDNEIKNYWNSHLSRKIHSFRRPLTQSMPVIMDLTKTAVIAKRKGGRTSEGSMKENKSCSTQKDTGSCSNKPTENVCVNEVEPFPSTPLLEKETLSTTAIEDRMVLDQHGEDKERTTHVVPSPCHDTVVEGMLGSSEERESLVTEEGTIENSMQCPSGNAEKGTGILAPHESIDSSEIEWFNDILDSELLQPSGHLTFTELGEDRWNVKTHTTAANNEEIVSRNCSADSGGVLSSCTSTTFYFVDDWENVVPRSELWDEKEYMCSWLWEPSDYHGKGERHKVDDNGFEGHNPMIAANVAFLLMLLLVPPALVSSYTSMSIFYLGRQCEHVLPFFLFVLLLDFASLFNSDALFSL

SEQ ID NO: 30229 - protein, 394 aa, ASPERGILLUS NIDULANS FGSC A4
MSQNRSGVFSNLRMGEVVREKVQDGLTGETKEIQYSQCKIVGNGSFGVVFQTKMMPSGEDAAIKRVLQDKRFKNRELQIMRIVRHPNIVELKAFYYSNGERKDEVYLNLVLEYVPETVYRASRYFNKLKTTMPMLEVKLYIYQLFRSLAYIHSQGICHRDIKPQNLLLDPATGILKLCDFGSAKILVENEPNVSYICSRYYRAPELIFGATNYTTKIDVWSTGCVMAELMLGQPLFPGESGIDQLVEIIKVLGTPTREQIRTMNPNYMEHKFPQIKPHPFNKVFRKAPHEAIDLISALLEYTPTQRLSAIEAMCHPFFDELRDPNTKLPDSRHPNGAARDLPNLFDFSRHELSIAPSMNSRLVPPHSRPALEARGLYIDDFKPLKKEEMMAHLD

SEQ ID NO: 30230 - protein, 293 aa, Gossypium hirsutum
MFTREVSYLKLQEVKKRWRLRKGPWTEEEDSMLRAYVNIHGEGRWNAVARLSGLRRTGKSCRLRWLNYMRPEIKRGNISLEEQLLILELHSRWGNRWSKIAQHLPGRTDNEIKNYWRTRVQKQAKQLNCDVNSKQFKDAMRYVWIPRLVERIRASSESPSSQPSTTTNTTYNDRISNISSSQMSYANASGSVQVDPSLLPELSGTSSDSLDTQVSSVSDLTDCYNPQSLSNYLHKGLGLEKEGAATWGRDEEFQATEEHSNGWLVGGGESSMDTVWNEENVWFLQQQLHDDGI

SEQ ID NO: 30231 - protein, 123 aa, Arabidopsis thaliana
  misc_feature (24)..(24): Xaa can be any naturally occurring amino acid
  unsure (1)..(123): unsure at all Xaa locations
VSAPGKTLWSKAILANRVQLKFCXQKRPKTTVAVPAMTTVVSSTTPRSKKPKGSVFKFNKKSIPDVNRKVRVLGRLVSGFGKQTGPVILKKTTDYIPALEMPVKTLNSLVQVFSPYGSAPPPI

SEQ ID NO: 30232 - protein, 235 aa, Chloranthus spicatus
  misc_feature (108)..(108): Xaa can be any naturally occurring amino acid
  unsure (1)..(235): unsure at all Xaa locations
MGRGRVQLKRIENKINRQVTFSKRRSGLLKKAHEISVLCDAEVALIVFSAKGKLSEYSTDSRMDRILERYERISYAERELRSTDHRPDGNWNLEYSKLKAKLEGLQRXQRHYMGEDLEKLSLKELQPLENQLDNALKHIRTRKTQVMMDSIAELQAREKLLQEQNSMLEKKIQEKNALAHQAHWEQQNQTQSPPPFLLTHQHPTINNSTYQARGEEDRVRTNSLMPPWMLRHVNG

SEQ ID NO: 30233 - protein, 618 aa, Xylella fastidiosa Temecula1
MSNERTAQQSDIKQLISKGLEQGYLTYAEVNDHLPEDLVDPDQIEDIIGMINGMGIEVHEVAPDAETLLLNEGNTGNREVDDTAAEEAAAALSALDTEAGRTTDPVRMYMREMGTVELLTREGEIAIAKRIEEGLSEVQAALGAFPLSTELLLSEYELHKEGKRRLTEVVVGFNDLIEEDNSVTSSVDVTDESIVEVDEEDDDSVGNDEDAPMIGPDPAEVASRIESLSTEYAKFKKLYAKHGPEHKAVIKVREDVAAIFVTFKLSLPLTDLLVQQLQNMVNSVKDHERKVLHLATNVAKMPRKDFIRSWENNQTNLEWVEDAIKRKQKWSSALRDIKDQITAEQQASIDLEKVNSLTLADIKEINRMMVYGEAKASKAKKEMVEANLRLVISIAKKYTNRGLQFLDLIQEGNIGLMKAVCKFEHRRGFKFSTYATWWIRQAITRSIADQARTIRIPVHMIETINKLNRISRQMLQQFGREATPEELAKEMDMPEDKIRKVMKIAKEPISMETPIGDDEDSHLGDFIEDPNVESPVDTTTNVNLSETVREVLAGLTPREAKVLRMRFGIDMNTDHTLEEVGKQFDVTRERIRQIEAKALRKLRHPSRSEQLRSFLDID

SEQ ID NO: 30234 - protein, 180 aa, Buchnera aphidicola str. Sg (Schizaphis graminum)
MTVKEIIIGFLLQIRSILMVFKNIFSKSETKMYPEEKLYLSPRYRGRVILTRNIDGGERCVACNLCAVVCPVDCISLQKSEKKNGRWYPKFFRINFSRCIFCGLCEEACPTAAIQLMPDFELSDFNRQNLVYEKEDLLISGPGKYPDYDFYRFSGVVIKDKKVDKLEGQLKPVNVKDLLP

SEQ ID NO: 30235 - protein, 447 aa, Escherichia coli K12
MDQTYSLESFLNHVQKRDPNQTEFAQAVREVMTTLWPFLEQNPKYRQMSLLERLVEPERVIQFRVVWVDDRNQIQVNRAWRVQFSSAIGPYKGGMRFHPSVNLSILKFLGFEQTFKNALTTLPMGGGKGGSDFDPKGKSEGEVMRFCQALMTELYRHLGADTDVPAGDIGVGGREVGFMAGMMKKLSNNTACVFTGKGLSFGGSLIRPEATGYGLVYFTEAMLKRHGMGFEGMRVSVSGSGNVAQYAIEKAMEFGARVITASDSSGTVVDESGFTKEKLARLIEIKASRDGRVADYAKEFGLVYLEGQQPWSLPVDIALPCATQNELDVDAAHQLIANGVKAVAEGANMPTTIEATELFQQAGVLFAPGKAANAGGVATSGLEMAQNAARLGWKAEKVDARLHHIMLDIHHACVEHGGEGEQTNYVQGANIAGFVKVADAMLAQGVI

SEQ ID NO: 30236 - protein, 275 aa, Escherichia coli CFT073
MANPTVIKLQDGNVMPQLGLGVWQASNEEVITAIQKALEVGYRSIDTAAAYKNEEGVGKALKNASVNREELFITTKLWNDDHKHPREALLDSLKKLQLDYIDLYLMHWPVPAIDHYVEAWKGMIELQKEGLIKSIGVCNFQIHHLQRLIDETGVTPVINQIELHPLMQQRQLHAWNATHKIQTESWSPLAQGGKGVFDQKVIRDLADKYGKTPAQIVIRWHLDSGLVVIPKSVTPSRIVENFDVWDFRLDKDELGEIAKLDQGKRLGPDPDQFGG

SEQ ID NO: 30237 - protein, 152 aa, Glycine max
MLENARVLKEGIERTGRFNIISKDIGVPLVAFSLKDSSQHTVFEIADHLRKFGWIVPAYTMPPDAQHIAVLRVVIREDFSRGLAERLAADIEKVVKLLDTLPSPLTTKVAHITAITSETSETSEKVKSAIETQKEIALYWKRLVDGKRLGAC

SEQ ID NO: 30238 - protein, 435 aa, Rubrivivax gelatinosus PM1
MTTDLDAYWMPFTANRQFKKAPRLLSKASGMHFWTPEGREVLDGIAGLWCVNAGHARPKIVEAIRAQALELDFAPPFNMAHPKAFELAERLVQLTPAGLNKVFYTNSGSESVETALKMAIAYHRARGEGSRTRLIGRERGYHGVNFGGISVGGMVANRKMFGSMLTGVDHIRHTHDPARNAFSIGQPQHGAELADDLERLVALHDASTIAAVIVEPVAGSTGVLLPPQGYLERLRAICDKHGILLIFDEVITGFGRTGAPFAAQRFGVTPDLMTVAKGLTNGCVPMGAVFAKQHIHDVFMNGPEHLIEFFHGYTYSGHPLACAAALGTLDTYAEEGLLTRASEMEAYFADALHSLKGLPHVIDIRNIGLVGGIELAPIDGSPGKRAFDIFLECWERGVLIRTTGDTVALSPPLIISKTHVDQIVGTLADALKRAG

SEQ ID NO: 30239 - protein, 427 aa, Dianthus caryophyllus
QAYHLQSWLVKHRKNYNALGEKEKRFAIFRDNLEFIDQHNNNNNGGGGGEFELGLNKFADLTNDEFRRIYFGVKRPEKAESVKSDRYAVKEGDELPESVDWRKKGAVSHVKDQGQCGSCWAFSAIGAVEGINKIVTGDLITLSEQELVDCDTSYNSGCDGGLMDYAFRFIINNGGIDTDKDYPYKATDGSCDSNRKNAKVVTIDGLEDVPANNEKALQKAVAHQPVRLAIEAGGRDFQLYKSGVFTGSCGTSLDHGVVAVGYGTTDDGKDYWIVRNSWGDDWGEDGYIRMERNTESKSGKCGIAIEPSYPVKTSPNPPNPGPSPPSPPPAPKVVCDSYSSCPSATTCCCVYEYGPYCYMWGCCPLEAASCCDDDSSCCPHDYPVCNTQQGTCSKSKNNPFTVKALKRTPLHSTLISGGFKDLKKTSS

SEQ ID NO: 30240 - protein, 609 aa, Magnaporthe grisea 70-15
MTKIPLARYIFQRLRQYGVDHIHGVPGDNLLHALDHIVPAGSRWVGCCNELNAAYAADGYARVRGMGAVFTTMGVGELSAANAIAGSQAERVPVVHLVGVPSREAMMGQSQYPNVMHHALQPGGGMEPFREIGRLLTQGRDEFRSSAAVYEGATAADFASKFDSMLRRSFVQRKTMYFPLRADLVDHQVDSSWLEKSLDGPDGEQGSKPPAEEWDFLKELRSAEKPVILVDRGLGMDAFKDEINELVALSGIPTFCMPSGAGMIDNRLPNYHGVHSGPFGRINSMTWVGSADLVLAIGPMFSDTNTFGWMTVPRPSAKNPNMKLMILASHTTRPKRAMPGQTTPVMLLQTNRDILRRAIEMLKKEPIKGKAIPFMKDWRVGERRWMVGDQRINQSILYQKLDKYLRPYDTILIGNATPLLGARDFVLPEGARVIASGQWFSIGHMLPAAMGAALAKRGLKGDAGRGRTILLDGDGSFQMTAQELGTIIRQRLDVTIFIFNNGGYAYERLIHGPDEEYNDIAPWKYLELPSAFGAEHARAMHGYNTQTHLVRTWDDLDRLFMDGRFNIGPGLKLVELRLGRKDVPARFRNLFREDEEEERLTRRIRSDPE

SEQ ID NO: 30241 - protein, 292 aa, Photorhabdus luminescens subsp. laumondii TTO1
MDNQPIIRLADGNHMPQLGLGSWASDDQQIAETIHAALDIGYRAIDTAAIYNNEKGVGNALQETDIPREDIFVTTKLWNDRHLDARAALTESLEKLQLDYVDLYLIHWPAPPQDQYVGAWQQLIELQKEGLIRSIGVSNFQPEHIQRLINETGVHPVINQIELHPLLQQRQLHAWNATHNIVTESWSPLAQGGENVFDNQLVQHLTQKYGKTPAQVVIRWHIDNGMIVIPKSTTLSRIKENFDVFDFKLEKEDLTAMTTLDIGKRLGPTPEIFVDFSEFIQLLEQNSANNQC

SEQ ID NO: 30242 - protein, 576 aa, Glycine max
APPQNIHAYGSLEELSRGDSVTKLHCDISDAVNILIHTAEVKTPPWQPRIIKKIQKKYEVEDMHELYGKDSKAIGSCRRKRQKCHVGITRNPKTPEKADTSGRDSTLPGSQLKEKLNEQQSRLLNMGESRSDKEACIQGLSESAKSKLSLNVGEQEVLNLNSRLQDFDLNNHDSSCIILEKDSKLMHYKVNNVKQWCSSSGEGISLPEHMQFKTCTNDDYEKGRISAMHLMKDKFCSIYDQSDTRSVFDDLNLPTPQARVNQEHQKNYIEQSRFKSRCIHFEELPYYSGKNVSDLLFPQEQFSQHYFSVCGNGVDNTVLQDVTDTGGDFPLDESYGQDPDNDIGGYPNTSESHLPCTSTEDTKFVNGLNSLDTPCSDINVEKIESVKNDTSSNNFCQNDDHLETQYGSAVWDIFRRQDVPKLTEYLKKHHREFRHINNLPVNSVIHPIHDQILYLNEKHKKQLKQEFGVEPWTFEQHLGDAVFVPAGCPHQVRNRKSCIKVALDFVSPENVQECIRLTEEFRLLPKGHRSKEDKLEIKKMALYAADVAITEATKLMRGNDMSDEAKEVPQQHIFTK

SEQ ID NO: 30243 - protein, 131 aa, Oryza sativa (japonica cultivar-group)
MDHHHQQQQQEGELVAKYRGVRRRPWGKFAAEIRDSSRHGVRVWLGTFDTAEEAARAYDRSAYSMRGANAVLNFPADAHIYARQLHNNNAAAGSSSSSSAAAAAARPPPIEFEYLDDHVLQEMLRDHTTNK

SEQ ID NO: 30244 - protein, 134 aa, Kluyveromyces lactis NRRL Y-1140
MSDVEEVQQVPVAELTIEDALKVVLRTSLVHDGLARGLRESAKALTRGEGQLAVLVESVTEEAISKLVQGLATENNVPLIKVADAKQLGEWAGLGKIDRDGNARKVVGASVVVVKNWGADTQEREILLEHFSQQ

SEQ ID NO: 30245 - protein, 566 aa, Debaryomyces hansenii CBS767
MANRRIPKSEDSLSNLPSTASSNQSGSNDFVKKLFQMLQEDTYKDVVKWTSSGDSFVVINTTEFTKEILPRHFKHSNFASFVRQLNKYDFHKVKIPNEEKQSYEYGEDAWEFKHPDFRINDRESLENIKRKSSKKSTQNYNPNVANSGSSVDSFGYQNLKDEMDNLRLENKSLKQDISVLHTKYKTLVENIVSLKSFDEKYYRSMSVLINCLVQAGIKMPPLDFPNPNALYPQKPNVAAHQHSHSHSNSSSLPQLSPPLLSPNGGTGQQGGIGVPLGSGLPAQRFDHNTISQAHTLQHQTPLQTIHSQPNNQQSTKQTPPTNDNLNSKPQSPHLMGESTSGSPLVGNLGLDAASTTAPVNSRTSSISTNRVPQPANGASTDQPQVTTTNLTNPKFHVLLVEDDNVCIQLCRKFLVKYGCQVTIATDGLNAISTVEHTKYDLVLMDIVMPNLDGATATSVIRSFDTKTPIIAMTGNIEDNDLVTYLQNGMSDILAKPFTKDDLYSILSKHLLTSTDSASVTTDEPSETMSSLQGPAQQTLVLPQEVQQQDSNGEPMPEPHSKKPRLI

SEQ ID NO: 30246 - protein, 433 aa, Zymomonas mobilis
MTNKISSSDNLSNAVSATDDNASRTPNLNRRALVGGGVGLAARGALASGLQAATLPAGASQVPTTPAGRPMPYAIRPMPEDRRFGYAIVGLGKYALNQILPGFAGCQHSRIEALVSGNAEKAKIVAAEYGVDPRKIYDYSNFDKIAKDPKIDAVYIILPNSLHAEFAIRAFKAGKHVMCEKPMATSVADCQRMIDAAKAANKKLMIGYRCHYDPMNRAAVKLIRENQLGKLGMVTTDNSDVMDQNDPAQQWRLRRELAGGGSLMDIGIYGLNGTRYLLGEEPIEVRAYTYSDPNDERFVEVEDRIIWQMRFRSGALSHGASSYSTTTTSRFSVQGDKAVLLMDPATGYYQNLISVQTPGHANQSMMPQFIMPANNQFSAQLDHLAEAVINNKPVRSPGEEGMQDVRLIQAIYEAARTGRPVNTDWGYVRQGGY

SEQ ID NO: 30247 - protein, 518 aa, Pycnoporus cinnabarinus
MSRFQSLLSFVLVSLAAVANAAIGPVADLTLTNAAVSPDGFSREAVVVNGITPAPLIAGQKGDRFQLNVIDNLTNHTMLKTTSIHWHGFFQHGTNWADGVSFVNQCPIASGHSFLYDFQVPDQAGTFWYHSHLSTQYCDGLRGPFVVYDPNDPQASLYDIDNDDTVITLADWYHVAAKLGPRFPLGADATLINGLGRSPGTTTADLAVIKVTQGKRYRFRLVSLSCDPNHTFSIDGHTMTVIEADSVNTQPLEVDSIQIFAAQRYSFVLDASQPVDNYWIRANPAFGNVGFAGGINSAILRYDGAPEVEPTTTQTTSTKPLNEADLHPLTPMPVPGRPEAGGVDKPLSMVFNFNGTNFFINNHSFVPPSVPVLLQILSGAQAAQDLVPDGSVYVLPSNSSIEISFPATANAPGTPHPFHLHGHTFAVVRSAGSSEYNYDNPIFRDVVSTGQPGDNVTIRFQTNNPGPWFLHCHIDFHLEAGFAVVLAEDTPDTAAVNPVPQSWSDLCPIYDALDPSDL

SEQ ID NO: 30248 - protein, 517 aa, Aspergillus niger
MPSLENPTFQNEARLLLVSNRLPITIKRSDDGRYDFSMSSGGLVSGLSGLSKSTTFQWYGWPGLEVPEEEIPVVKERLKQEYNAVPVFIDDELADRHYNGFSNSILWPLFHYHPGEITFDESAWEAYKEANRLFAKAVAKEVQDGDLIWVHDYHLMLLPEMLREEIGDSKENVKIGFFLHTPFPSSEIYRILPVRNELLLGVLHCDLIGFHTYDYTRHFLSACSRLLGLTTTPNGIEFQGKIIACGAFPIGIDPEKFEEGLKKEKVQKRIAMLEQKFQGVKLMVGVDRLDYIKGVPQKLHALEVFLSDHPEWVGKVVLVQVAVPSRQDVEEYQNLRAVVNELVGRINGKFGTVEFMPIHFLHKSVNFDELIALYAVSDACIVSSTRDGMNLVAYEYIATQKKRHGVLVLSEFAGAAQSLNGSIIINPWNTEELAGAYQEAVTMSDEQRALNFSKLDKYVNKYTSAFWGQSFVTELTRISEHSAEKFHAKKASFSDNNSENGEPSNGVETPAQEQVAQ

SEQ ID NO: 30249 - protein, 612 aa, Arabidopsis thaliana
MKMDKKTIVWFRRDLRIEDNPALAAAAHEGSVFPVFIWCPEEEGQFYPGRASRWWMKQSLAHLSQSLKALGSDLTLIKTHNTISAILDCIRVTGATKVVFNHLYDPVSLVRDHTVKEKLVERGISVQSYNGDLLYEPWEIYCEKGKPFTSFNSYWKKCLDMSIESVMLPPPWRLMPITAAAEAIWACSIEELGLENEAEKPSNALLTRAWSPGWSNADKLLNEFIEKQLIDYAKNSKKVVGNSTSLLSPYLHFGEISVRHVFQCARMKQIIWARDKNSEGEESADLFLRGIGLREYSRYICFNFPFTHEQSLLSHLRFFPWDADVDKFKAWRQGRTGYPLVDAGMRELWATGWMHNRIRVIVSSFAVKFLLLPWKWGMKYFWDTLLDADLECDILGWQYISGSIPDGHELDRLDNPALQGAKYDPEGEYIRQWLPELARLPTEWIHHPWDAPLTVLKASGVELGTNYAKPIVDIDTARELLAKAISRTREAQIMIGAAPDEIVADSFEALGANTIKEPGLCPSVSSNDQQVPSAVRYNGSKRVKPEEEEERDMEKSRGFDERELFSTAESSSSSSVFFVSQSCSLASEGKNLEGIQDSSDQITTSLGKNGCK

SEQ ID NO: 30250 - protein, 434 aa, Pirellula sp. 1 [sequence omitted]

SEQ ID NO: 30251 - protein, 669 aa, Pseudomonas putida KT2440
MQSKTTRRSFVKGLAATGLLGGLGMWRAPVWAVTSPGQPNVLTGTDFDLYIGELPVNITGTVRTAMAINGSIPGPILRWREGDTVTLRVRNRLQQDTSIHWHGIILPANMDGVPGLSFHGIAPDGMYEYKFKVQQNGTYWYHSHSGFQEQVGVYGALVIDAKEPEPFTYDRDYVVMLSDWTDEDPARVLSKLKKQSDYYNYHKRTVGDFVNDVSEMGWSAAVADRKMWAEMKMSPTDLADVSGYTYTYLMNGQAPDGNWTGVFKPGEKIRLRFINGSAMTYFDVRIPGLKMTVVAADGQHVKRVAVDEFRIAVAETYDVIVEPEDEQAYTIFAQSMDRTGYSRGTLAVREGMQAAVPAVDPRPLISMSDMGMDHGSMAGMDHGNMAGMDHSKMAGMDHGNMAGMDHSKMAGMDHGNMTGMDHSKMAGMDHGSMAGMDHSKMAEMDHGGMAGMDHSKMAGMDQGGMADMDHSKMAGMDQGGMADMDHSSMEGMGGAMQSHPASETNNPLVDMQTMSPTPKLDDPGIGLRNNGRRVLTYADLRSTFIDPDGREPGRTIELHLTGHMEKFAWSFDGVKFSDAEPLRLKYGERLRITLVNDTMMTHPIHLHGMWSDLEDEDGNFMVRKHTIDMPPGSKRSYRVTADALGRWAYHCHLLFHMEMGMFREVRVDE

SEQ ID NO: 30252 - protein, 324 aa, Arabidopsis thaliana
MHSLNETVIPDVDYMQSDRGHMHAAASDSSDRSKDKLDQKTLRRLAQNREAARKSRLRKKAYVQQLENSRLKLTQLEQELQRARQQGVFISSSGDQAHSTGGNGALAFDAEHSRWLEEKNRQMNELRSALNAHAGDTELRIIVDGVMAHYEELFRIKSNAAKNDVFHLLSGMWKTPAERCFLWLGGFRSSELLKLLANQLEPMTERQVMGINSLQQTSQQAEDALSQGMESLQQSLADTLSSGTLGSSSSDNVASYMGQMAMAMGQLGTLEGFIRQADNLRLQTLQQMLRVLTTRQSARALLAIHDYSSRLRALSSLWLARPRE

SEQ ID NO: 30253 - protein, 635 aa, Pirellula sp. 1
MPSRCLDSTMVRIGCLTLALFASAISLAANLRAEESSLLPDEQKWIEQFESARVAGIAKATPSTVMVFVPGGGGGGSGVLISPDGYALTNFHVSSPAGTYMRCGLSDGKVYDAVVVGIDPVGDLALIQLLGRDDFSTAEFVPSRSVQVGDWCFAIGNPFLLATNLQPTVTAGIISGVRRYQYPSGTLLEYGNCFQTDASINPGNSGGPLYDNDGDLIGIIGRASFEKRGRVNVGVGYAISGDQAQNFLGCLHSGRIVDHATLGATVGTDEDGSVRVTNILSSSDAYRRGLRYGDEILEIDGQVIQTANDVQNILATFPASWRIPITYRQEGTSVETLVRLASVHRGSELLEKMKSALPPPPPAPPKPPTPSDPEGDAPGDLESDDETSPDGSDKAKPNDPKPLMKDAAGEPIPAMAVKQIKIREGYGNYYYNELHQTKFIERLRRQFKDVEANDSVWKIRGKTVPVVDGQEASDFLITIGDGQFKFKIGDDLQQLSRGDELLQVVDEQRDAGILACLNALQRMLTLGPRQFGDTYYWGTMPLSGQRPLRDTVVGVHSDLETRFLHHPQSERLEVIESIAGNDTDPAELWFAAEDDALPSTLQLRYGLTTVLNLQITDWSTAPANQPQVPVDGDAS

SEQ ID NO: 30254 - protein, 440 aa, Glycine max
EMHAGLASEGGSKLKMLITFVHNLPNGTEKGTYYALDLGGTNFRVLRVHLHGQQSSVLEHEVERQPIPQHLMTSTSEDLFDFIASSLKEFIEKEGNASELSLDRRRELGFTFSFPVKQMSVSSGILLKWTKGFSIVDMVGIDVPACMQEALTRKGLDVRVAALANDTVGTLALGHYNDSDTVASVIIGTGTNACYLERVDAIIKCQGLLTASGYMVVNMEWGNFWSSHLPRTSYDIDLDSESPNPNDQGFEKMISGMYLGDIVRRVILRMLLESDMFGPISSKLSIPFMLRTPMMAAMHEDDSPDLREVARILKDILEIPDVPLKLRKVVVKVCDVVTRRAARLAAAGIVGILKKIGRDGSGGITGGRRSEMKMKRTVVAIEGGLYSSYTLFREYLHEALNDILGEDIAKHVTLKVTEDGSGVGAALLAASHSSYDVDTV

SEQ ID NO: 30255 - protein, 318 aa, Crocosphaera watsonii WH 8501
MKLTKSNPDPVRAYLKEIGRVPLLSHEEEILYAKRVQRLINLEKLREEIIQETGKEPTNSQWAKAAKLSRKEFCSVVEAGEAAKRKMVEANLRLVVSVAKKYLKRNLDLLDLIQEGTIGMQRGVEKFDPTKGYRFSTYAYWWIRQAITRAIAEKSRTIRLPIHITEKLNKIKKAQRELSQQKGRAATISELAEELDLTPKQVRDYLERSRQPLSLDLRVGDNQDTELGDLLEDEGQSPEDFATHSSLQFDLEKLMEDLTIQQKQVIALRFGLMDGQPLTLAKIGSRLNISRERVRQIEREALSKLRKRKANIQEYLAS

SEQ ID NO: 30256 - protein, 586 aa, Acinetobacter sp. ADP1
MRRVLQQLWAVGICLTFSSATLAAIKEYHLNIDEQIIDLTGKPTKKITVNGQFPAPLLEFEEGDEAVIHVHNALKDRDTSLHWHGLLLPGLMDGVPGFNGFRGIKPHADFEYRFKIRQSGTYWYHAHSQGQEQDGLYGALVIYPKNKKPIVSYEQVDRDYVVMLSDFHHSSSDQIMKNLKKSSEYYQNQRETIKDVWHQLQQQGFKATWQDRKMWNQMRMLKTDLSDVTDYTFLVNGKTLEQNWTAMFKPNEKVRLRFINASAMSFFDVRIPQLRMTVVSADGQPVKPVQIDEFRIGAAETYDVIVEPQQAHYQIQAESIDRSGFALASLQNELLPAPPQIQVPTARPRSVLTMEDMGHHPMDVESDSSSMQHEMPNDDHAMSHNMMQHDVMSHEMQPSPQYKSSQQSPEGWANASTPMGLKALQYTDLKSLFPQSDLRQPDREIVIHLGGNMERYIWTMNGKKFSEASPLTLKYGERVRLKFVNDSMMAHPMHLHGMFVQLENGQAMERLPNKHTLIVPPGKTVTALLTADEVGEWAIHCHLLYHMTAGMMNKLVVAHTEVPMPSTLKTNENSTQEVKGEHHAHH

SEQ ID NO: 30257 - protein, 310 aa, Candida glabrata CBS138
MAALHKNTSTLKLNTGAHIPVIGLGTWQSSENEGYNATLEALKAGYRHIDTAAIYKNEEEIGRAIRDSNIPRNELFVTTKLWGTQHRNPTEALDQSLKRLGLDYVDLYLMHWPVALKTDLIKDGNLLQIPEREDGSRDVDLEDWNFVKTWELMQELPKEKARAIGVSNFSINNLKELLNSKGNKVVPAANQIEIHPLLPQDELINFCKEKGIVLEAYSPLGSTDAPILKEEEITEIAKKNGVNAGQLVISWHAQRGYVVLPKSVKPERIHGNQETFKLSDEDFATLSNYAKKHGERRVVSPNWGPFKPFV

SEQ ID NO: 30258 - protein, 442 aa, Bacillus cereus ATCC 10987
MKYISYRLLGRMKNLDNQHNQNHIMGTLQWFIFLLANSIALPIVVGGLFHLTTEDIFYLMQRTFFVVGISSFLQGWVGHRLPIADGPAGSWVGVFTVLAYATAGQDQLHSTLQILELGMIISGVILIGLGVTGFIGRILFLFTPLVTGTFLLLLCLQLSGVFLKGMLGITATVSQIDGFTAMIAFSIFLFVIILSNFGKGFVKSYAVLIGLISGWILFLIAGKVTIPAQVTHFVQLPQIFAWGLPKWNTGMAVSSFVMVCILVSNTVAAIIAINQATIHKATIEQKQLKDGTWVGGISHIISSVFSTVGVVPLPATAGFIRLTKQKYIRSFLLACMLLVVMSMFPSIIRYLASLPSAVASAVLMASFVQLIGIGFNNIKQVELNERNITILGVAVLFGSGVMFLPSGALQSLPSVIQYIFGNGLFVGTVVSILLEQIWRTEK

SEQ ID NO: 30259 - protein, 292 aa, Arabidopsis thaliana
  misc_feature (140)..(140): Xaa can be any naturally occurring amino acid
  unsure (1)..(292): unsure at all Xaa locations
METLHPLLSHVPTSDHRFVVQEMMCLQSSSWTKEENKKFERALAVYADDTPDRWFKVAAMIPGKTISDVMRQYSKLEEDLFDIEAGLVPIPGYRSATPCGFDQVVSPRDFDAYRKLPNGARGFDQDRRKGVPWTEEEHRXTKFSIFVILVSLFFGVLSCKLLCFLGLLRPCLIVFCRRFLLGLLKYGKGDWRNISRNFVGSKTPTQVASHAQKYYQRQLSGAKDKRRPSIHDITTVNLLNANLSRPSSDHGCLVSKQAEPKLGFTDRDNAEEEVMFLGQNLSSVFSSRTRGS

SEQ ID NO: 30260 - protein, 441 aa, Mycobacterium smegmatis
MCMLKQSQPTRRPTRPQRTFTYPGGKLELPILKATEGTDSVALGKFLAETNLTTFDSGFMNTASTKSAITYIDGEQGILRYRGIPIEQLAEKSTFIEVSYLLIYGELPTPTQLEEFTTKIQRHTLLHEDLKRFFDGFPRNAHPMPVLSSAVNALSAYYQDSLDPKDDEQVELSTIRLLAKLPTIAAYAYKKSAGQPFLYPDNSLSLVENFLRMTFGFPAEPYEVNPDVAKALDMLFILHADHEQNCSTSTVRLVGSSQANLFTSISGGINALWGPLHGGANQAVLEMLDAIKADGGDTKKFMERVKNKEAGVKLMGFGHRVYKNYDPRAAIVKKTADQILETLGVQDDLLEIAKGLEEVALNDDYFIERKLYPNVDFYTGVIYRAMGFPTRMFTVLFALGRLPGWIAHWREMHEDPTTKIGRPRQLYTGYTERDYVPMSDR

SEQ ID NO: 30261 - protein, 338 aa, Escherichia coli CFT073
MKTLICQQPGVMEYVEKDIPTPADNEVLLKIKAVGICGTDIHAFAGRQPFFSYPRVLGHEICAEAVSRGSQCQTAQLGQRYSVIPCIPCGECAACREEKTNCCERVSLYGVHQDGGFSEYLAVREDNLVPLPDEVSDSAGALVECFAIGAHAVRRAEIKAEQNVLVIGAGPIGLATAAIARAKGAHVVVADIDCQRRQHVVDHLAINAFNPTQEDFIAALREAFGGELACVVLDATGNKASMSHDVNLIRHGGKIVFIGLYIGELVIDDPTFHKKETTLLSSRNATREDFALVIKLMRSNKIHENLMKNQAFDFFSVGEDYQRNVVENKNMVKGVITF

SEQ ID NO: 30262 - protein, 326 aa, Candida glabrata CBS138
MSSVVTLNNGLKMPLVGLGCWKIPNDVCAQQVYDAIKIGYRLFDGAEDYGNEKEVGQGIRKAIDEGVVKREDVFVVSKLWNSFHHPDHVKMALKRTLSDMGLDYLDLFYIHFPIAFKYVPFEEKYPPGFYTGKEDEKNGHITEAHVPIIDTYRALEQCVEEGLIKSIGISNFSGSLVQDLLRQCKIKPVALQVEHHPYLTQEHLVEYCKDNGIQVVAYSSFGPQSYIELNHPLAKNTPNLFHHDTIKQIANNHNVATSQVLLRWATQRGIAIIPKSSKKERLQDNLMIDEKLTLTHKELEAISKLNKNLRLNDPWDWLDGKFPIFA

SEQ ID NO: 30263 - protein, 800 aa, Arabidopsis thaliana
  misc_feature (615)..(615): Xaa can be any naturally occurring amino acid
  misc_feature (648)..(648): Xaa can be any naturally occurring amino acid
  misc_feature (652)..(652): Xaa can be any naturally occurring amino acid
  misc_feature (797)..(797): Xaa can be any naturally occurring amino acid
  unsure (1)..(800): unsure at all Xaa locations
MVTSSDQIQNGSEEQSKRSEIYTYEAPWQIYAMNWSIRRDKKYRLAITSLIEQYPNRVEIVQLDESNGEIRSDPNLCFEHPYPPTKTSFIPDKECQRPDLLATSSDFLRLWRISDDESRVELKSCLSSDKNSEFSGPITSFDWNEAEPRRIGTSSIDTTCTIWDIEREVVDTQLIAHDKEVYDIAWGGVGVFASVSEDGSVRVFDLRDKEHSTIIYESGEPSTPLVRLSWNKQDPRYMATVIMGSAKIVVLDIRFPALPVVELQRHQASVNAIAWAPHSSSHICSAGDDSQALIWDISSMGQHVEGGLDPILAYTAGAEVEQLQWSSSQPDWVAIAFSNKLQILRMMYSSLLQYRHIDSLSNLKGIQVSASPILFALLSATNLNLDSFWSPWLRLLSLSPRYLPPSSSSLLQGFTEFSGLRSSSASLPFGKKLSSDEFVSIVSFQTSAMGSSGGYRKGVTEAKLKVAINGFGRIGRNFLRCWHGRKDSPLDIIAINDTGGVKQASHLLKYDSTLGIFDADVKPSGETAISVDGKIIQVVSNRNPSLLPWKELGIDIVIEGTGVFVDREGAGKHIEAGAKKVIITAPGKGDIPTYVVGVNADAYSHDEPIISNASXCTTNCLAPFVKVLDQKFGIIKGTMTTTHSYTGXTRGXLDASHRDLRRARAAALNIVPTSTGAAKAVALVLPNLKGKLNGIALRVPTPNVSVVDLVVQVSKKTFAEEVNAAFRDSAEKELKGILDVCDEPLVSVDFRCSDFSTTIDSSLTMVMGDDMVKVIAWYDNEWGYSQRVVDLADIVAXNWK

SEQ ID NO: 30264 - protein, 431 aa, Mycobacterium smegmatis
MWLRRDLRLGDLPALQAARGTDDSSVLLCFVVDPRLARSSGERRLAFLFDSLRELDDKLDGRLLVVRGRPDEEIPRLARAVDAEAVHISADFTPFGRRRDEAVAEALGEVPLEATGSPYLVSPGRITKDDGEPYKVFTPFFRRWRDHGWRRPAESSVPSSAVVDPADIANSGRIAVPTAPVKLSFPAGEDAARQRWAEFVDADLADYDEIRDDPAADATSRMSAYLKYGNIHPRTLAVDLGKGKGAQAYLRELAFRDFYADVLWHWPHSLWHNWNRRFDAIELDTDDAAYERFEVWKAGRTGFPLVDAGMRQLNETGWMHNRVRMITASFLVKDLHLPWWWGAEYFLEQLVDGDMASNNHGWQWAAGTGTDAAPYFRVFNPQTQAKKFDPKGEYVRRWVGDVEADDYPGPIVDHSAERAEALRRYGEIGEA

SEQ ID NO: 30265 - protein, 221 aa, Bacillus cereus ATCC 10987
MLKKAIAEFIGTFVLVLFGTGVAVIGGGIEGIGTLGIAMAFGLSIVAMAYSIGTISGCHINPAVSVAMFINKRMNAMELCYYVLAQILGGLLGTATLVTILKSAKTPLDNLGQNGFGTLGLSGAFLVEFILTFVFILVIVAVTGKKGSSSLAGLVIGFTLVLVHLLGIPLTGTSVNPARSIAPALFAGGEALSQLWVFIVAPIVGGIVAAIVGKFILNTEK

SEQ ID NO: 30266 - protein, 347 aa, Escherichia coli K12
MKNSKAILQVPGTMKIISAEIPVPKEDEVLIKVEYVGICGSDVHGFESGPFIPPKDPNQEIGLGHECAGTVVAVGSRVRKFKPGDRVNIEPGVPCGHCRYCLEGKYNICPDVDFMATQPNYRGALTHYLCHPESFTYKLPDNMDTMEGALVEPAAVGMHAAMLADVKPGKKIIILGAGCIGLMTLQACKCLGATEIAVVDVLEKRLAMAEQLGATVVINGAKEDTIARCQQFTEDMGADIVFETAGSAVTVKQAPYLVMRGGKIMIVGTVPGDSAINFLKINREVTIQTVFRYANRYPVTIEAISSGRFDVKSMVTHIYDYRDVQQAFEESVNNKRDIIKGVIKISD

SEQ ID NO: 30267 - protein, 459 aa, Escherichia coli K12
MEQITKPHCGARLDRLPDCRWHSSMFAIVAFGLLVCWSNAVGGLILAQLKALGWTDNSTTATFSAITTAGMFLGALVGGIIGDKTGRRNAFILYEAIHIASMVVGAFSPNMDFLIACRFVMGVGLGALLVTLFAGFTEYMPGRNRGTWSSRVSFIGNWSYPLCSLIAMGLTPLISAEWNWRVQLLIPAILSLIATALAWRYFPESPRWLESRGRYQEAEKVMRSIEEGVIRQTGKPLPPVVIADDGKAPQAVPYSALLTGVLLKRVILGSCVLIAMNVVQYTLINWLPTIFMTQGINLKDSIVLNTMSMFGAPFGIFIAMLVMDKIPRKTMGVGLLILIAVLGYIYSLQTSMLLITLIGFFLITFVYMYVCYASAVYVPEIWPTEAKLRGSGLANAVGRISGIAAPYAVAVLLSSYGVTGVFILLGAVSIIVAIAIATIGIETKGVSVESLSIDAVANK

SEQ ID NO: 30268 - protein, 489 aa, Bordetella pertussis Tohama I
MTQLTQPLSRAELLRDACYIDGKWVGAGNGPSIPVDNPSTGKTIISVPKLGRKEAEQAIDAAEAALPAWSARTGKERAAILLKWAQLMMENQQDLAVIMTSEQGKPVPEAAGEIAYAASFLEWFAEEAKRIDGDILQSPKGGQRLMVLKQPIGVTAAITPWNFPAAMITRKVGPALAAGCTMVVKPAQQTPLTALALAVLAVLAGVPAGVFQVVTGSSREIGAALCESEVVRKLSFTGSTEVGRTLMEQCAPTIKKLSLELGGNAPFIVFDDADLDRAIDGILASKYRNAGQTCVCANRIYVQAGVYEEVAKRLVEKVNAMKVGDGFEQGVTQGPLIDTAAVAKVQEHIADATAHGAKVIAGGEPHALGGSFFQPTVVRDVTQSMRFAVEETFGPVAPLFKFDSEDEVIGMANNTIFGLAAYFYTRDYARIWRVSEALEYGIVGINTGIISNEVGPFGGVKQSGLGREGSKYGIEDYLELKYLCVDLGA

SEQ ID NO: 30269 - protein, 564 aa, Triticum aestivum
  misc_feature (102)..(102): Xaa can be any naturally occurring amino acid
  misc_feature (127)..(127): Xaa can be any naturally occurring amino acid
  misc_feature (141)..(141): Xaa can be any naturally occurring amino acid
  misc_feature (155)..(155): Xaa can be any naturally occurring amino acid
  misc_feature (173)..(173): Xaa can be any naturally occurring amino acid
  misc_feature (267)..(267): Xaa can be any naturally occurring amino acid
  unsure (1)..(564): unsure at all Xaa locations
MKYVLVTGGVVSGLGKGVTASSIGVLLKACGLRVTSIKIDPYLNTDAGTMSPFEHGEVFVLDDGGEVDLDLGNYERFLDIKLTRDNNITTGKIYQAVINKEXRKGDYLGKTVQVVPPITDEIQDWIXRLAMNPVDGTDKPXDVGAIELGGPIGGXINQGPLIEAMGSIFPYRXVGAGNFCLVHVSLVPVLTVVGEQKTKPTQHSVRGLRGLGLMPDILACRSTQPLEENVKLKLSQFCQVPVSNIVNLHDVTNIWHIPLLLRDQRAXEAILKVLGLWCVGKVPQEPKLSEWTERASRFDKLKSPVRIAMVGKYTGISDSYLSILKALLHASVALDRKLVVDWVPSCDLEDSAAEETPDAYEKAWGLLKGANGVLVPGGFGLIDTVDVHRKILAAKHARENNLPYLGICLGMQIAVIEYARSVMKLRDANSTEFDAAAKTPSVIFMPEGSKTHMGATMRLGSRRTFFQVNNCKSAKLYANANYVDERHRHRYEVNPDMVSEFEKAGLSFVGRDESGRRMEIIELPTHKFFVGTQFHPEFNSRPGKPLTLFLGMMTASFGTLRAPY

SEQ ID NO: 30270 - protein, 421 aa, Bordetella pertussis Tohama I
MKNRDLNTRRTLATPRGVGVMCDFYAVRAENSTLWDAEGKEYIDFAGGIAVLNTGHRHPKVKAAIAAQLDNFTHTAYQIVPYEGYVSLAERINAVAPIEGLKKTAFFTTGVEAVENAVKIARAYTGRSGVVAFSGAFHGRTMMGMALTGKVAPYKLAFGPMPGDVFHVPFPNATQAISVADSLKALDLLFKVDIDPKRVAAIIIEPVQGEGGFNVTPPELMQALRKVCDEHGILLIADEVQTGFARTGKLFAMQHHSVQADLITMAKSLGGGMPISGVVGRAEVMDGPAAGGLGGTYAGNPLAVAAAHAVLDVIAEEKLCERAVELGKRLMDRLEGLRAKCPAIADVRGLGSMVALELNDPATGKPDAEAVKRIQQQAIERGLILLSCGVYGNVLRFLYPLTIPDDQFARALDILAEIIAA

SEQ ID NO: 30271 - protein, 454 aa, Arabidopsis thaliana
MVIKGMRVGKYELGRTLGEGNSAKVKFAIDTLTGESFAIKIIEKSCITRLNVSFQIKREIRTLKVLKHPNIVRLHEVIILLVLASKTKIYMVLECVTGGDLFDRIVRFLLAPVTVLLVSKRLVSKGKLSETQGRKMFQQLIDGVSYCHNKGVFHRDLKLENVLLDAKGHIKITDFGLSALSQHYREDGLLHTTCGSPNYVAPEVLANEGYDGAASDIWSCGVILYVILTGCLPFDDANLAVICRKIFKGDPPIPRWISLGAKTMIKRMLDPNPVTRVTIAGIKAHDWFKHDYTPSNYDDDDDVYLIQEDVFMMKEYEEEKSPDSPTIINAFQLIGMSSFLDLSGFFETEKLSERQIRFTSNSLAKDLLENIETIFTEMGFCLQKKHAKLKAIKEESTQKRQCGLSVTAEVFEISPSLNVVELRKSHGDSSLYKQLYERLLNELGSSSQVQELLA

SEQ ID NO: 30272 - protein, 358 aa, Rubrivivax gelatinosus
MLATPTIESPEEAARRAKESTLLSPRFYTTDYAAMNAIDVSSIRAEWDAMLAEYEGDNNHDHFQRTPEFAQEVAERFSQVSPELRQEFLDFLVSSVTSEFSGCVLYNEIQKNVENPDVKALMRYMARNESRHAGFINQALRDFGLGINLGGLKRTKAYTYFKPKYIFYATYLSEKIGYARYITIYRQLERHPDKRFHPIFRWFERWCNDEFRHGESFALILRAHPHLISGANLLWVRFFLLAVYATMYVRDHMRPQLHEAMGLESTDYDYRVFQITNEISKQVFPISLDIDHQAFRAGMERLVRVKTKVDAAKARGGLVGRLQQAAWAAAGAATFARMYLIPVRRHALPAQVRMAPAW

SEQ ID NO: 30273 - protein, 453 aa, Gluconobacter oxydans 621H
MARDLDNTGLMGELRRMARTSGAVGGIAARMAGSRLGFKTDKGVHAEGLKSALGNLKGPLMKAAQLLSTIPGALPDEYAEELAHLQSNAPPMGWSFVRRRMQAELGAGWEKHFRSFSHEAVAAASLGQVHRARLADGREVACKLQYPDMQAAVDSDLRQFRAALGIYRQFETAIRQDEVYTELADRLREELDYRREASHLRLYRDMLANTPEVTVPAPVEALSTGRLLTMDWVSGRSMRTVLGENLPQEDRNAMATALFKAWYTPVYRYGVIHGDPHMGNFTVRDDYGLNLLDFGAVRIFSPRFVEGVIDLFTALRENNEELAFHAYSKWGFQGISRETASILNEWARFFYRPLMTDRVCSMQESNDPAEARQVLEKVYDGLKRTGGVKLPREFVLMDRSAIGLGSAFLRLEARLNWHQMFEELIEGFDVNVLAQRQQEALAKAKVPPALSSL

SEQ ID NO: 30274 - protein, 324 aa, Campylobacter jejuni
MKNILVVGGAGYIGSHTLKHLLDNDYNCIVMDNLIYGHKQAIDKRAKFIHADLLDTFSLASVFKKEKIDALVHFAAFAYVGESVVNPAKYYQNNVVGTINLLNAMLENNVKDIVFSSTCATYGEPQYTPIDEKHPQNPINAYGRTKLMIEQVFADYEKAYGLRYISLRYFNAAGASKDGLIGESHEPETHLIPLVLKAIKGEIPAINIFGNDYDTEDGTCIRDYIHVEDLALAHRLALENLHKFSGCINLGTGIGTSVKEIISAAEVVSGKKCPINYAPRREGDPARLYADNKKAKEILSWEAKYTDIKDIIKSAWIWENNRKY

SEQ ID NO: 30275 - protein, 424 aa, Novosphingobium aromaticivorans DSM 12444
MARGNLPSLSLHVPEPKFRPGDKVDYSDLAISRAGEQPRPDEQCEASETHPLCLDLVRVLGDDDRAIGPWDPRLDADTLRRMLRTMALTRAFDDRMYRGQRQGKTSFYMKCTGEEATSVAPAMALADDDMVFPSYRQQGILIARGYPLVEMINQIYSNRADKLKGRQLPIMYSAREQSFFTISGNLATQYPQAVGWAMASAIKGDSRIAATWIGEGSTAEGDFHSAMTFAAVYNAPVIFNVVNNQWAISSFSGFAGAERTTFAARAIGYGIAGLRVDGNDPLAVFAATQWAANRARANAGPTLIEHFTYRAEGHSTSDDPTQYRSAQEREEWPLGDPVNRLKKHLVALGEWSDEQHEAMDRELVDLVKAATKEAEKNGILGHGLHHPFHTMFEDVFEELPWHLREQSEQAIRERRIKWPEWKES

SEQ ID NO: 30276 - protein, 689 aa, Pirellula sp. 1
MIRKLLSALLLRSFLVNRISTPFEMLLAVALLLGISTPIHADDPTPARYQSILAKAVRHVAEDTLPSVVTIEVIGVMQANGEVRQDAPTSGVVIDEQGHVLTSSWVTGGDSASIIVNAPSGKRFPAEVVAKDEHRDLVLLKVSSPDETWQPIAFSTNDPANDKVGETMVAVARYGENNTPMVSTGILSAVGRLDGTAIQTDARISPAFYGGPLVDLKGRFRGIVIPAVGEGGAEDPTAWYDSGIAFAVPSTIIAQKLDRLRRGENIQQGLLGFVVAGSDPYAEGTELSVVRKRSPADKAGLKVGDELKSIGGQNVTRRQEIKLALGQYDAGDEVEIEYERDGQRMSSAATMIATIPPLQPQFIGLIAADEVTEQTEEEDTEDESDSSTSVIVQHVWNKSPADGKLKVNDRLIQLDGSPILDSNAMRQRLWASDPDIPIELTIERDGKEQVVSVDPLTLDGPLDRIEAFETTKSSPADEWSVETLQLPDITNAAAIWYPKQEPAVGTSPTEAPTTPLALAIVLAPPKDRDPSAMLDPWKDLARQHHVAVCVICSDGDDQWRPNEVDAISKLTAASLKQSSASPSAVALIGGGAFMLDEKANPADSMALGASLSTVNVFSGVAISNETEPPAVRLRKDGPPRLLRVLIPSPPNSELPFWAETLRRIGCPLQTTLTLNRDLCLQWTRSLLAM

SEQ ID NO: 30277 - protein, 385 aa, Kluyveromyces lactis NRRL Y-1140
MRALAYFGKQDIRYTKDLEEPVIETDDGIEIEVSWCGICGSDLHEYLDGPIFFPEDGKVHDVSGLGLPQAMGHEMSGIVSKVGPKVTNIKAGDHVVVEATGTCLDHYTWPNAAHAKDAECAACQRGFYNCCAHLGFMGLGVHSGGFAEKVVVSEKHVVKIPNTLPLDVAALVEPISVSWHAVRISKLQKGQSALVLGAGPIGLATILALQGHGASKIVVSEPAEIRRNQAAKLGVETFDPSEHKEDAVNILKKLAPGGEGFDFAYDCSGVKPTFDTGVHATTFRGMYVNIAIWGHKPIDFKPMDVTLQEKFVTGSMCYTIKDFEDVVQALGNGSIAIDKARHLITGRQKIEDGFTKGFDELMNHKEKNIKILLTPNNHGELDATN

SEQ ID NO: 30278 - protein, 489 aa, Debaryomyces hansenii CBS767
MFKRFVSFKAAGKLKLADLNKLTINAKYAVRGKIPIRADELKEQLNDTNNELPFKEIIYANIGNPQQLDQAPLTWYRQVLSVLQNPKLLNSQIDYPKDVIDRAKILLENVGSVGAYSHSQGTPHVRKSVADFITRRDGFPSNSSDIFLTSGASAAVSYLLQVLSSSDRSGFLIPIPQYPLYTATIALNDAVPIGYYLNEENNWSTNPTQIRELIKENNEKGIQIKALVVINPGNPTGSILSYDNIVEIINIAAEHGIAIIADEVYQENVFEGEFVSVKKVLSKLNRLDPQAYNNVQLASLHSTSKGVSGECGQRGGYMELVGFSKEVRDIIFKLASINLCSVVSGQTLMELMINPPTPESPSYELYKSETSKIHKSLQSRADLLYKSFIEMEGITCNKPMGAMYLFPKLNFTPNSYSKLFEASENIGATIDEVYCIELLENTGICCIPGSGFGQVPDTYHLRTTFLPPGSKWIDRWVEFHNDFIAKYKN

SEQ ID NO: 30279 - protein, 655 aa, Novosphingobium aromaticivorans DSM 12444
MTRETTALAPMANAIRALAMDAVQAANSGHPGMPMGMADVATVLWTQFLKHDPAAPKWSDRDRFILSAGHGSMLIYALLHLSGYESPTMDDIRKFRQLDSVCAGHPENFLIPGVECTTGPLGQGLAMAVGFAMAERHLNAQFGSDLVDHKTWVIAGDGCLMEGINHEAVGLAGTLKLGRLNVLWDDNKITIDGDTSLSTSEDILGRYAASGWHVTSCDGHDFADIARALAEAQADPRPSLVACRTVIGKGAPNKQGGHNVHGAPLGADEIAAAREYLGWTAAPFEVPADILANWRSSAEAGKTARAEWEKRAAANPNAAELARRMAGELPAQTGFDAYIQSLIASPPKVATRKSSEMALEAFTANVPEMVGGSADLTGSNNTKTKSTAPFTPESYDGRYVYYGIREFGMAAAMNGMALHGGIIPYGGTFLVFSDYCRNAVRMSALQHVRAIYVFTHDSIGLGEDGPTHQPVEHVMSLRMIPNLLVFRPADAIETAEAWAIALANKDRPSVLALTRQNLPPVRFDAEMKSAKGAYRLVAAQADRKVVLLATGSEVEVAIKVAAELEAKGLGADVVSVPCWELFDEQDAAYKADLLPADALKVSVEAGVTLGWQKYIGDGLAIGIDTFGASAPAEVLFDHFGLTAEKIVPQILARVS

SEQ ID NO: 30280 - protein, 267 aa, Yersinia pestis KIM
MSIPVFGLGTFRLQDQIVIDSVSQALTLGYRAIDTAQIYENEAPVGQAIQESGINRDELFITTKIWIANLSKDKLIPSLRESIQKLKTDYVDLTLIHWPSPNDEVSVAEFMSELLKAKGLGLTRQIGISNFTIDLMKQAIAAVGAEEIATNQIELSPLLQNRNVVDFAKQNGIAVTSYMTLAYGKALAEPVIKTIAEQHGATPAQVILSWAMQLGYGVIPSSTKAANLASNLLAQKLCLNAADMALIATLDRNERLVSPDGLAPKWD

SEQ ID NO: 30281 - protein, 372 aa, Sulfolobus tokodaii str. 7
MLLIPGPVEVPRSVREASTLVVNHRSEKFREIVRKLESLMNKHFSASRTALLTGSGTLAVEAMVYSLIKPNEKVISFPYGEFGNRLVDSLRRRGAQVKVYEKKIGEIFSIDEIKKALDENKDATAVALVHNETSSGMAFRNLEDVVSEVKRRGLKLLVDSVSGFAAYKLLVNEWKIDAVATGSQKALASVPGMSFVALSDDGIEEIQGESLPSYLDISLHLKFQDKGETPFTPAVGVFNASLRAAELLEIEGIENRWKRHEACARFVREVLSSYGFLLFGNENNFSNTVVAGVPPIPDYRKKLLNEFNIEISGGMGELKEKIVRIGLLGVVDSRAVNKLLEATAKLLDKNYDYLPPRECKLPELLEKEVEWS

SEQ ID NO: 30282 - protein, 415 aa, Triticum aestivum
MMPIDPTQGAFMADTMSPNRLLFGPRPEWDRSAEGTGSFPSPAASPEPFGGVEDKTLANKAGVEHQHIPTSSHRGAAHPPPHNSQPLPLPPSVPPAAMAMESLGVLLLHPMNAYLEQELDRRFRLFRFWDSPPDGRAEFLRANASAIRAVVGNASYNADAALIDALPSLEIVASFSVGIDRVDLPKCRERGIRVTNTPDVLTDDVADLAVGLAIAALRKIPQADRYVRAGLWKAKGDYTLTARFSGKRVGIIGLGRIGLAIAPRVEAFDCPVNYYQRTKKDYPSYTYYPSVVELAANSDILVVACPLNEQTRHIVNREVIEALGPKGLLINIGRGPHVDEPELVSALVEGRLGGAGLDVFEDEPNVPEALFTLDNVVLVPHVGSGTHETRQAMADLVLGNLEAHVLKKPLLTPVV

SEQ ID NO: 30283 - protein, 581 aa, Thiobacillus denitrificans ATCC 25259
MRFDDRAPDAATMTRMLARLARRGPDAEGQHAAGPLRLGHRRLAIIDLSPRSAQPMVDAATGTALVFNGTIYNYPELRAELIALGHAFHSDGDTEVILRAYLEWGERCVERLHGMFAFAIWHRDELFLARDRLGIKPLYYSENAGSLRFASTPQALLAAGEVDTGLDAVALHHLFTLHAVVPAPRTILNGVRKLAPGTTLTVNLRGELRHRSYWSLHAQRPAETRSEAEWTDAIHDALRRAVQKRIEIADVKVGVLLSGGLDSSLLVALLAELGVSDLMTFSVGFEDHPEERGNEFEYSDPVAAMYGTRHHKYLIPNSEVLRRLPEAVGEMSEPMFAQDAVAFYLLAEQVSRTVKVVQSGQGADEVFGGYFWYPRMAAEAEGSALDRFRRHYFDRDHAEFLELADPRYHGPDYTGELIAARLAEPFADEFIDQVLRTDTTMLITDDPVKRVDNMTMAWGLEARVPFLDHTLVELAATMPPAMKLASEGKHVLKRIARGRVPDAVIDRKKGYFPMPALKYVRGEFLDFMRDILDSQACRQRGLYRRAYVEHLLDAPEQHHTRIQGSKLWHLALLEYWLQTHV

SEQ ID NO: 30284 - protein, 487 aa, Acinetobacter sp. ADP1
MSETTQPDQLQRKLGARHLNMIAIGGSIGTGLFLASGSTIANAGPGGALLAYVLIGIMIYFLMTSLGELATHNPTSGAFFTYGNRYVEEGFGFALGWNYWYNWAITVAFELVAVQFIMKFWFPDIPGFYWSAIFLVVIFAINAMTVKGFGESEFWFSMVKVVAIIAFIIIGMAMIIKIMMTPNMATFGNWTYKDAPFVGGLQAMIGVAMIAGFSFQGTEMVGVAAGESKDPKRTIPLAIKQIFWRILLFYVVCIFIIGTLVSYDDPRLLQAAHSSDIALSPFTLLYEKAGFAFAASLMNAVILTAILSAGNSGMYSSTRMLWDMAKEGRAPKWFAKLDRRGVPMNALYATTAIAALCFLTTFIGEQEVFNWLLNMSGMCGFIVWLGIAISHYRFRKGYIAQGYKLEDLAYRAKFFPFAPWFAFILCSIIILGQNYQAILGGKIDWTGLLSTYISIPLFLIIWLGYKWKYKTKLIPYQEMNVKAGKED

SEQ ID NO: 30285 - protein, 450 aa, Geobacter sulfurreducens PCA
MSPHQVDEKLQGIYQDVLKRNPGEVEFHQAVAEVLESLGPVVTKHPEYLERKIIERICEPERQIIFRVPWQDDKGQVHINRGFRVEFNSALGPYKGGLRFHPSVYLGIIKFLGFEQIFKNSLTGMPIGGGKGGSDFDPKGRSDDEIMRFCQSFITELYRHLGEHTDVPAGDIGVGGREIGYMFGQYKRITNRWEAGVLTGKGLKWGGSLVRTEATGYGATFFINEALKVRKDSFDGKICTVSGSGNVAIYTIEKIHQLGGKCVACSDSNGVIFHEKGLDLDLIKQLKEVERRRIEDYASYHKDAKYIAGGNIWDIPCQVAMPSATQNEINGKDAKTLVKNGCIAVGEGANMPTTPEGVKVFLDAKIAYGPGKAANAGGVATSALEMQQNAQRDSWSFEDTEKKLENIMKGIHRLCHETAEEYGATGNYVLGANIAGFTKVADAMVAHGLV

SEQ ID NO: 30286 - protein, 492 aa, Arabidopsis thaliana
MDPYKYRPSSAYNAPFYTTNGGAPVSNNISSLTIGERGPVLLEDYHLIEKVANFTRERIPERVVHARGISAKGFFEVTHDISNLTCADFLRAPGVQTPVIVRFSTVVHERASPETMRDIRGFAVKFYTREGNFDLVGNNTPVFFIRDGIQFPDVVHALKPNPKTNIQEYWRILDYMSHLPESLLTWCWMFDDVGIPQDYRHMEGFGVHTYTLIAKSGKVLFVKFHWKPTCGIKNLTDEEAKVVGGANHSHATKDLHDAIVSGNYPEWKLFIQTMDPADEDKFDFDPLDVTKIWPEDILPLQPVGRLVLNRTIDNFFNETEQLAFNPGLVVPGIYYSDDKLLQCRIFAYGDTQRHRLGPNYLQLPVNAPKCAHHNNHHEGFMNFMHRDEEINYYPSKFDPVRCAEKVPTPTNSYTGIRTKCVIKKENNFKQAGDRYRSWAPDRQDRFVKRWVEILSEPRLTHEIRGIWISYWSQADRSLGQKLASRLNVRPSI

SEQ ID NO: 30287 - protein, 470 aa, Methylobacterium extorquens
NSLTAGSRGPVLMQDYHLIEKMAHFNRERIPERVVHAKGYGAYGTFRLTRSLSEFTRAKVLTEVGKDVPMVARFSTVGGESGSADTARDPRGFALKFYTEEGNWDLVGNNTPIFFVRDAIKFSDFIRTQKRDPRTHLKPHWRRWDFWSLSPEAIHQVMFLYSDRGTPKSARFMNGYGSHTFSLWNDRGERHWVKFHFHTKQGIQNFSADEADEVAGKDPDYSSADLSTAIEQGDFPKWKVSVQLMPELDADTYRINPFDLTKVWPHGDYPLIEIGEMELNRNPENYFAEIEQSAFEPSNVVPGIGFSPHKMLQNRVLSYADAHRYRLGVNYQQIPVNQAKNADVQTYHRDGAMRTDGNHGAQVDYEPNSFGGPKQDPSFSEPPLRIQGDAGRYGWPGDDEDLYGQPKLFWTKVLDEGGRKRLVENIVTSMGDSPRHIQERMIAHWFKVHEDFGRGVAQGLGIDTAQAAAE

SEQ ID NO: 30288 - protein, 187 aa, Corynebacterium glutamicum
SRPSSRKQTSSVEDLRAIPWVLSWSQSRVMLPGWFGVGTALEQWIGEGEQATQRIAELQTLNESWPFFTSVLDNMAQVMSKAELRLAKLYADLIPDTEVAERVYSVIREEYFLTKKMFCVITGSDDLLDDNPLLARSVQRRYPYLLPLNVIQVEMMRRYRKGDQSEQVSRNIQLTMNGLSTALRNSG

SEQ ID NO: 30289 - protein, 617 aa, Saccharomyces cerevisiae
MSKQFSHTTNDRRSSIIYSTSVGKAGLFTPADYIPQESEENLIEGEEQEGSEEEPSYTGNDDETEREGEYHSLLDANNSRTLQQEAWQQGYDSHDRKRLLDEERDLLIDNKLLSQHGNGGGDIESHGHGQAIGPDEEERPAEIANTWESAIESGQKISTTFKRETQVITMNALPLIFTFILQNSLSLASIFSVSHLGTKELGGVTLGSMTANITGLAAIQGLCTCLDTLCAQAYGAKNYHLVGVLVQRCAVITILAFLPMMYVWFVWSEKILALMIPERELCALAANYLRVTAFGVPGFILFECGKRFLQCQGIFHASTIVLFVCAPLNALMNYLLVWNDKIGIGYLGAPLSVVINYWLMTLGLLIYAMTTKHKERPLKCWNGIIPKEQAFKNWRKMINLAIPGVVMVEAEFLGFEVLTIFASHLGTDALGAQSIVATIASLAYQVPFSISVSTSTRVANFIGASLYDSCMITCRVSLLLSFVCSSMNMFVICRYKEQIASLFSTESAVVKMVVDTLPLLAFMQLFDAFNASTAGCLRGQGRQKIGGYINLVAFYCLGVPMAYVLAFLYHLGVGGLWLGITSALVMMSVCQGYAVFHGDRRRILGAARKRNAETHTS

SEQ ID NO: 30290 - protein, 358 aa, Escherichia coli K12
MKALARFGKAFGGYKMIDVPQPMCGPEDVVIEIKAAAICGADMKHYNVDSGSDEFNSIRGHEFAGCIAQVGEKVKDWKVGQRVVSDNSGHVCGVCPACEQGDFLCCTEKVNLGLDNNTWGGGFSKYCLVPGEILKIHRHALWEIPDGVDYEDAAVLDPICNAYKSIAQQSKFLPGQDVVVIGTGPLGLFSVQMARIMGAVNIVVVGLQEDVAVRFPVAKELGATAVVNGSTEDVVARCQQICGKDNLGLVIECSGANIALKQAIEMLRPNGEVVRVGMGFKPLDFSINDITAWNKSIIGHMAYDSTSWRNAIRLLASGAIKVKPMITHRIGLSQWREGFDAMVDKTAIKVIMTYDFDE

SEQ ID NO: 30291 - protein, 119 aa, Campylobacter jejuni RM1221
MKELNEEEKKVILNKGTEAPFSGKYNDFYEKGIYQCKQCGASLYKSEDKFKSGCGWPSFDDEIKGAVKRIPDKDGIRTEIVCANCNGHLGHVFEGEGFSAKNVRHCVNSISLEFVKTKD

SEQ ID NO: 30292 - protein, 137 aa, Escherichia coli K12
MANKPSAEELKKNLSEMQFYVTQNHGTEPPFTGRLLHNKRDGVYHCLICDAPLFHSQTKYDSGCGWPSFYEPVSEESIRYIKDLSHGMQRIEIRCGNCDAHLGHVFPDGPQPTGERYCVNSASLRFTDGENGEEING

SEQ ID NO: 30293 - protein, 230 aa, Triticum aestivum
MVRGKTQMKRIENATSRQVTFSKRRNGLLKKAFELSVLCDAEVALVVFSPRGRLYEFASATSLQKSIDRYKAYTKDTVNNKTVQPDIQQVKADALSLAKKLEALEDSKRKILGENLGGCSTEELHFLEGKIEKSLRVIRGKKTQLLEQQIAKLKEKERTLLKDNEDLRGKQRNLEAPLLLPAPNCVAPLQPRGEPAPEQQPVQRDEDVETELYIGLPGVRCSSLRSGQAK

SEQ ID NO: 30294 - protein, 598 aa, Streptomyces coelicolor A3(2)
MREFSLPALYEVPADGNLTDIVRRNAAQHPDVAVIARKVGGVWQDVTARAFLAEVHSAAKGLIASGVQPGDRVGLMSRTRYEWTLLDFAIWSAGAITVPVYETSSPEQVQWILGDSGATACVVESAGHAAAVESVREQLPALKNVWQIDAGAVEELGRLGQDVTDRTVEERGSIAKADDPATIVYTSGTTGRPKGCVLTHRSFFAECGNVVERLRPLFRTGECSVLLFLPLAHVFGRLVQVAPMIAPIKLGNVPDIKNLTDELAAFRPTLILGVPRVFEKVYNSARAKAQADGKGKIFDKAADTAIAYSKALDAPSGPSVGLKIKHKVFDKLVYSKLRTVLGGRGEYAISGGAPLGERLGHFFRGIGFTVLEGYGLTESCAATAFNPWDRQKIGTVGQPLPGSVVRIADDGEVLLHGEHLFKEYWNNPGATAEALADGWFHTGDIGTLDEDGYLRITGRKKEIIVTAGGKNVAPAVMEDRIRAHALVAECMVVGDGRPFVGALVTIDEEFLGRWCAEHGKPAGSTAVSLREDPELLAAIQDAVDDGNAAVSKAESVRKFRVLGAQFTEDSGHLTPSLKLKRNVVAKDYADEIEAIYSK

SEQ ID NO: 30295 - protein, 530 aa, Bacillus cereus G9241
MTTNTTNDHKKMNDKKTVQTETATKPLKFEKGPEVTLIAKEEKQKLSNGVNVPVWTFNGSSPGPEIRVKKGEKVKVTLKNELSAPVSVHWHGYPVPNNMDGIPGVTQDAVEPGKSFTYEFEANVPGTYWYHSHQDSVNQLDRGLYGALIVEDTKEKYDKDYTLMLDEWVTDKEEINKQVKEMTKGKKEKAASKKSSMDNDNTKKNDDMKGMDHSGMNMGSDKKDSGNMAGMDHGNMKMEGHDMSMYDLFTINGKSGDLVAPLKVNKGDKVRLRLVNAGYLSHDIHVHGHDIKVIATDGQPINNPKVIKDQVISIAPGERYDIEFTANNPGKWYVEDHSENKDAKGMKAVIKYDGSKEMKDKADEKEKLPKLDMTKYGAKKLGSFTLDQQYTATYNMDLNTQMNGNEMVYTINGKVFPDIDPIQVKKGDLVKVKLLNRSKMDDHPMHLHGHFFQVLSKDGKPIEGSPIVKDTLNLKPGEEYEVAFVADNPGDWMFHCHDLHHASAGMVTEVKYTDYKSDYVPNPNIPNKPE

SEQ ID NO: 30296 - protein, 700 aa, Corynebacterium diphtheriae NCTC 13129
MTLSPELQALTSRHYPSDWDDLDTQAVDTARVLAADAVQNCGSGHPGTAMSLAPLAYTLFQRVMNVDPADPHWAGRDRFVLSCGHTSLTQYIQLYFGGYGLELEDLKALRTWGALTPGHPEYRHTKGVEITTGPLGQGLASAVGMAMASRRERALFDPTAADGASPFDHYIYVIASDGDLQEGVTAEACSLAGTQKLGNLIVFWDDNRISIEEDTEIAFNEKVVDRYRAYNWQVIEIDGGENVEAIEKAVAEAKADTSRPTFIRVRTVIGYPAPTKMNTGAVHGAALGAEEVAGTKKALGFNPEESFAVAPEVISHTRKLLERGAQRHAEWREHFESWAETNPENKALFDRMASRELPDGFDADLPSWEPDAKGVATRKASEATLQALGATLPELWGGSADLAGSNNTVIKGSPSFGPSTISTSTWTAEPGGRNLHFGIREHAMGAIINGISLHGGTRPYGGTFLIFSDYMRPAVRLAALMGTDAYYVWTHDSIGLGEDGPTHQPVEQLASLRAIPGVSMLRPADANETAAAWRAALLYKEGPKGLALTRQNVLVLEGTKEKARDGVSRGAYVLVEGSKKTPDVILMASGSEVQLAVEAAKTLEAEKIAARVVSVPCLDWFEEQDAAYQEEILPQAVSARVSVEAGVALSWYRHLGTHGRAVSLEHFGASAPYEKLFSEFGITTEAVIAAARESLAAAQQ

SEQ ID NO: 30297 - protein, 360 aa, Corynebacterium diphtheriae NCTC 13129
MTAIDQLKNVGTSTWLDDLSRDRLQSGNLAELIKSKSIVGVTTNPAIFAAAMSKGTAYDSQIEKLKAAQADADSAVYAMSIDDVRAACDVFSEIYAESEGKDGRVSIEVDPRISEDRDATISQARELWNKVNRPNVMIKIPATRGSLPAITDALAEGISVNVTLIFSVARYREVIAAYIEGIKKAAENGLNVSQIHSVASFFVSRLDTEVDKRLEQIGSDEALSLRGKAGVANAQRAYAVFLEAFQAADLPVGAHVQRPLWASTGVKNPDYSPTFYVSELAGPDTVNTMPESTIDAVLAADDIHGDTLSSSSDSANEIFTRISQTGIDFEDVFAVLEQEGVDKFVAAWSDLLDSMESRLK

SEQ ID NO: 30298 - protein, 389 aa, Ustilago maydis 521
MPGTKECKTAMPKRHYESRYTRRAAVQLNPHFFFRSHTSQTRDSRSDRAPNPMSDTNDEVVLCCVQDSPVSFDLAASLDKLTKLAREAASKARAAASSSSTPIVVLFPEAFLSAYPRGLDFGAKIGHRTAEGRSWFARYHASSVPVCDTNGPEMTVIRNAAMENRITLVVGVIERCDRPETGKKRHEYGSSVAGGTGSIYCTALTISETGEVLASHRKLMPTGTERLVWGQGDGEGVRIATTRAGAVGAVICWENYMPLLRTAMYERGVEIYCAPTADSRTTWTSSMQHIAMEGRCYVISCNQFNTRSDYPEDYPALNDLKPDDIVTRGGSVIVGPLGEILAGPLFDEAGILVARVKKNELVEAKMDFDVTGHYARNDVLRLQFNDKSG

SEQ ID NO: 30299 - protein, 481 aa, Helicobacter pylori 26695
MIVRTQNSESKIKEFFEFCKENEVEFVDFRFSDIKGTWNHIAYSFGALTHGMLKEGIPFDASCFKGWQGIEHSDMILTPDLVRYFIDPFSADVSVVVFCDVYDVYKNQPYEKCPRSIAKKALQHLKDSGLGDVAYFGAENEFFIFDSIKIKDASNSQYYEVDSEEGEWNRDRSFENGVNFGHRPGKQGGYMPVPPTDTMMDIRTEIVKVLNQVGLETFVVHHEVAQAQGEVGVKFGDLVEAADNVQKLKYVVKMVAHLNGKTATFMPKPLYGDNGSGMHTHVSVWKNNENLFSGETYKGLSEFALHFLGGVLRHARGLAAFTNASTNSYKRLIPGYEAPSILTYSANNRSASVRIPYGISKNSARFEFRFPDSSSNPYLAFAAILMAGMDGVKNKIDPGEAMDINLFKLTLDEIREKGIKQMPHTLRRSLEEMLADKQYLKESQVFSEEFIQAYQSLKFNAEVFPWESKPHPFEFITTYSC

SEQ ID NO: 30300 - protein, 396 aa, Cucumis sativus
MALKFHPLTSQSPKLPSFRMPQLASLRSPKFVMASTLRSTSREVETLKKPFMPPREVHLQVTHSMPPQKMEIFKSLEDWAEENLLVHLKPVERCWQPQDFLPDSAFEGFHEQVRELRERAKELPDEYFVVLVGDMITEEALPTYQTMLNTLDGVRDETGASPTPWAIWTRAWTAEENRHGDLLNKYLYLSGRVDMRQVEKTIQYLIGSGMDPRTENNPYLGFIYTSFQERATFISHGNTARLAKEHGDIKLAQICGTITADEKRHETAYTKIVEKLFEIDPEGTVIAFEEMMRKKVSMPAHLMYDGRDDNLFHHFSAVAQRLGVYTAKDYADILEFLVGRWKVESLTGLSGEGQKAQDYVCALPARIRKLEERAQGRAKEGPTIPFSWIFDRQVKL

SEQ ID NO: 30301 - protein, 501 aa, Pisum sativum
MAMANLARRKGYSLLSSETLRYSFSLRSRAFASGSDENDVVIIGGGPGGYVAAIKAAQLGFKTTCIEKRGALGGTCLNVGCIPSKALLHSSHMYHEAKHSFANHGVKVSNVEIDLAAMMGQKDKAVSNLTRGIEGLFKKNKVTYVKGYGKFVSPSEISVDTIEGENTVVKGKHIIIATGSDVKSLPGVTIDEKKIVSSTGALALSEIPKKLVVIGAGYIGLEMGSVWGRIGSEVTVVEFASEIVPTMDAEIRKQFQRSLEKQGMKFKLKTKVVGVDTSGDGVKLTVEPSAGGEQTIIEADVVLVSAGRTPFTSGLNLDKIGVETDKLGRILVNERFSTNVSGVYAIGDVIPGPMLAHKAEEDGVACVEYLAGKVGHVDYDKVPGVVYTNPEVASVGKTEEQVKETGVEYRVGKFPFMANSRAKAIDNAEGLVKIIAEKETDKILGVHIMAPNAGELIHEAAIALQYDASSEDIARVCHAHPTMSEAIKEAAMATYDKPIHI

SEQ ID NO: 30302 - protein, 229 aa, Arabidopsis thaliana
MAAFPNLNSGSGLKKLDEHLLTRSYITGYQASKDDITVFTALSKPPTSQYVNVSRWFNHIDALLRISGVSAEGSGVIVEGSSPITEEAVATPPADSKDAAPDEEDDDDVDLFGQETEEEKKAAEERAASVKASTKKKESGKSSVLDIKPWDDETDMKKLEEAVRSIQMEGLFWGASKLVPVGYGIKKLHIMCTIVDDLVSIDTMIEEQLTVEPFNEYVQSCDIVAFNKI

SEQ ID NO: 30303 - protein, 369 aa, Neurospora crassa
MVLLKSLVVASLAAAVAAKSAVLDLIPSNFDDVVLKSGKPTLVEFFAPWCGHCKNLAPVYEELATALEYAKDKVQIAKVDADAERALGKRFGVQGFPTLKFFDGKSEQPVDYKGGRDLDSLSNFIAEKTGVKARKKGSAPSLVNILNDATIKGPIGGDKNVLVAFTAPWCGHCKNLAPTWEKLAATFASDPEITIAKVDADAPTGKKSAAEYGVSGFPTIKFFPKGSTTPEDYNGGRSEADLVKFLNEKAGTHRTPGGGLDTVAGTIAALDEIVAKYTGGASLAEVAEEAKEAVKSLKNSAELKYADYYLRVLDKLSKSEGYATKEFARLEGILKKGGLAPAKVDELTVKVNVLRKFVEKAAEEAKEEL

SEQ ID NO: 30304 - protein, 331 aa, Alkalilimnicola ehrlichei MLHE-1
MSVPCNLITGALGVGKSTAIRHLLKHHRPKGERWAVLVNEVGAVPVDQAALSVDDNVVVADLPGGCLCCTLGAPFDRTLKRLLRRERPDRLLIEPTGLGHPARILQTLREGPVAASVRLGATITLVDPRQWRSGELADNPAWWDQIELADVLVANKADLAPSGDVAAFMGWAADLFPPKARVEITRHGQLNPEWLSEPCDSGRSPLFPDAHQVAAGDYVQQGAEPVDEGVWRACGRSLGQRSVGWVFAAATVFDRQRLLRTLNELRPAQRLKGVFRTGRDWLLVNADRDGVRAEVCDWRRDSRLEVIGHEDARALEAALLACRRQREKDPV

SEQ ID NO: 30305 - protein, 231 aa, Arabidopsis thaliana
MAAFPNLNSDAGLKKLDEHLLTRSYITGYQASKDDITVFAALAKPPTSQYVNASRWYNHIDALLRISGVSAEGSGVIVEGSAPITEEAVATPPAADSKDAAPDEEDDDDVDLFGQETEEEKKAAEERAASVKASTKKKESGKSSVLIDIKPWDDETDMKKREEAVKSIQMEGLFWGASKLVPVGYGIKKLQILCTIVDDLVSIDTMIEEQLTVEPINEYVQSCDIVAFNKI

SEQ ID NO: 30306 - protein, 461 aa, Kluyveromyces lactis NRRL Y-1140
MSAEPYEPEFQQAYNEVYNCLKDSTLFDKKPVYKKVLPVVSVPERIIQFRVTWENDKGEQEVATGFRVQFNSAKGPYKGGLRFHPTVNLSVLKFLGFEQIFKNALTGLSLGGAKGGLCFDPKGRSDSEIRRVCYAFMKELSRHIGQDVDVPAGDIQVGGREIGYLFGAYRHYKNSWEGVLTGKDLNWGGSLIRPEATGYGLIYYTEAMIKYASQGKESFEGKRVVISGSGNVAQYAALKCIELGATVLSLSDSKGSVISETGITAEHIYAIQDGRAAWKTLEQIVGEASVFSGSSVKYIAGARPWVHVGKVDVALPCATQNEVSGAEAEHLVANGVKFVAEGSNMGSTQEAIDVFEGVRLQTASASAPAVWYAPGKASNMGGVAVSGLEMAQNSARVSWTRETVDAELKKIMTTCFDDCVTTAKEYSNESNVEALPSLVKGANLTGFIRVADAMLHQGDVF

SEQ ID NO: 30307 - protein, 387 aa, Shewanella sp. MR-7
MKQAVIVDCIRTPMGRSKAGVFRNVRAETLSAELMKGLLLRNPQLDPNAIEDVIWGCVQQTLEQGFNIARNASLLAGIPKTAGAVTVNRLCGSSMEAIHQAARAIMTGMGDTFIIGGVEHMGHVPMNHGVDFHPGLANNVAKASGMMGLTAEMLGKLHGISREQQDAFAVRSHQRAHAATVEGRFAKEIYAIEGHDANGALIKVLHDEVIRPETSMESLAALRPVFDPANGTVTAGTSSALSDGASAMLVMEESKARALGLPIRARIRSMAVAGCDAAIMGYGPVPATQKALARAGITVNDLDVIELNEAFAAQSLPCVKDLGLLDVVDEKINLNGGAIALGHPLGCSGARISTTLINLMEHKDATLGLATMCIGLGQGIATVFERV

SEQ ID NO: 30308 - protein, 418 aa, Alkalilimnicola ehrlichei MLHE-1
MRCRWFVAVGCGGYASSQGGKAVILPGSRSNQVRRRTVTRNNPLRELIELGQSPWFDNIHRRMLEQGELQRLVEEDGLRGVTSNPTIFQKAIGGSDAYDAAIADALAAAPELDAEGLFMHLALADIRAAADVLRPVWEQTDGADGFVSMEVSPELAWDTDRTIAQARELFARVDRPNVMIKVPATREGLPAIEALIADGISVNVTLLFSVQRYTEVVESWLEGLRRRREAGLPVNDVQSVASFFVSRVDNKADPILQAAGDAGARELLGSAAIANARAAYAHMQRWLSGPRWPELAAVGARPQRLLWASTGTKNPDYSDVLYVDRLVGRNTVTTLPPATWEAFRDHGAARPVLEDGDDGAATLAALARHGVQMDTITAELEREGVQAFVDSYRDLLGTLQRKAAQLGATPARGNAEGA

SEQ ID NO: 30309 - protein, 448 aa, Cordyceps bassiana
MREIVHLQTGQCGNQIGAAFWQTISGEHGLDSSGVYNGTSELQLERMNVYFNEASGNKYVPRAVLVDLEPGTMDAVRAGPFGQLFRPDNFVFGQSGAGNNWAKGHYTEGAELVDQVLDVVRREAEGCDCLQGFQITHSLGGGTGAGMGTLLISKIREEFPDRMMATFSVVPSPGNSDTVVEPYNATLSVHQLVENSDETFCIDNQALYDICMRTLRLSNPSYGDLNHLVSVVMSGITTCLRFPGQLNSDLRKLAVNMVPFPRLHFFMVGFAPLTSRGAHSFRAVSVPELTQQMFDPKNMMAASDFRNGRYLTCSAIFGKVAMKEVEDQMRNVQTKNSSYFVEWIPNNIQNALCAVPPRGLKMSSTFIGNSTYIQDLFKRVGEQFSAMFRRKAFLHWYTGEGMDEMEFTEAESNMNDLISEYQQYQDAGIDDEEEEYEEELPVEGEEPL

SEQ ID NO: 30310 - protein, 331 aa, Chlamydophila caviae GPIC
MHFSRYLLQSFGNQSLPEPLYQKFQIYHQNYLDAATKKCSLEKAEELCLQWLKIVIEDLKDPFIFPPYHKKIRSPIDLFDFGKQFFSVLVDDENSKVHNLHHLDQIQEFIDRKDNVILLANHQTECDPQLMYYALGKTHPELVENMIFVAGDRVTSDPLARPFSMGCDLLCIYSRRHINNPPEQKEEKLHHNQKSMKTLRTLLNEGGKFIYVAPAGGRDRKTPENLLYPSEFQPESVEMFRLLTKASGRPAHFYPFALKTYDILPPPPTIEDAIGEYRAIFFAPLSFSFGEEILLDHLCSEEELSQCDKRRQRALRSKKAFSILTQLYEEL

SEQ ID NO: 30311 - protein, 158 aa, Crocosphaera watsonii WH 8501
MLFFRKLRELYNCNSVITHLIQDVMMTAAYPHQTPISIPEFTASRQAGFFDSLKQPRFSGQLVLTNSRQETWFFYLYLGRIMYATGGTHPVRRWRRHIARYLPEIANQLSSLQLDLASLGNQDFRLCWEYQLLCLWVEQQKISREQAARMIRSVIRVC

SEQ ID NO: 30312 - protein, 113 aa, Brassica napus
MSSSSNFVVESCDVDSEEGVKLHTRIFKPRDEQVSDDGDLAIVLVHPFSLLGGCQALLKGIASELACKGFKAVTLDTRGAGKSTGRATLTGFAEVKDVIAACRWVSQNLGAHR

SEQ ID NO: 30313 - protein, 693 aa, Arabidopsis thaliana
MEQEKSLDPQLWHACAGSMVQIPSLNSTVFYFAQGHTEHAHAPPDFHAPRVPPLILCRVVSVKFLADAETDEVFAKITLLPLPGNDLDLENDAVLGLTPPSSDGNGNGKEKPASFAKTLTQSDANNGGGFSVPRYCAETIFPRLDYSAEPPVQTVIAKDIHGETWKFRHIYRGTPRRHLLTTGWSTFVNQKKLIAGDSIVFLRSESGDLCVGIRRAKRGGLGSNAGSDNPYPGFSGFLRDDESTTTTSKLMMMKRNGNNDGNAAATGRVRVEAVAEAVARAACGQAFEVVYYPRASTPEFCVKAADVRSAMRIRWCSGMRFKMAFETEDSSRISWFMGTVSAVQVADPIRWPNSPWRLLQVAWDEPDLLQNVKRVSPWLVELVSNMPTIHLSPFSPRKKIRIPQPFEFPFHGTKFPIFSPGFANNGGGESMCYLSNDNNNAPAGIQGARQAQQLFGSPSPSLLSDLNLSSYTGNNKLHSPAMFLSSFNPRHHHYQARDSENSNNISCSLTMGNPAMVQDKKKSVGSVKTHQFVLFGQPILTEQQVMNRKRFLEEEAEAEEEKGLVARGLTWNYSLQGLETGHCKVFMESEDVGRTLDLSVIGSYQELYRKLAEMFHIEERSDLLTHVVYRDANGVIKRIGDEPFSDFMKATKRLTIKMDIGGDNVRKTWITGIRTGENGIDASTKTGPLSIFA

SEQ ID NO: 30314 - protein, 187 aa, Saccharum officinarum
MASLRSVLAVSLALALFAVAPASFALDERELHLSLYLNQTYSGNGLNQAVVVEPGLPGEFGNNAIQDWPVTNGEGSDATVVGRAQGIQFKPSERNDQAWYTTLTIVFERTSLKGSTLQMMGYIPQDGQWSIFGGTGQLTMARGVVNHKVVRQTNGRRMYKINIYAFYTPLGASSSCRINPRRLDFDA

SEQ ID NO: 30315 - protein, 242 aa, Escherichia coli
LKERKEVAFVPFVTLGDPGIEQSLKIIDALIEAGADALELGIPFSDPLADGPTIQNATLRAFAAGVTPAQCFEMLALIRQKHPTIPIGLLMYANLGFNKGIDEFYAQCEKVGVDSVLVADVPVEESAPFRQAGLRHNVAPIFICPPNADDDLLRQIASYGRGYTYLLSRAGVTGAENRAALPLNHLVTKLKEYNAAPPLQGFGISAPDQVKAAIDAGAAGRISGSAIVKIIEQHINEPEKML

SEQ ID NO: 30316 - protein, 533 aa, Gerbera hybrid cv. 'Terra Regina'
MENLRPKLAMAVKSIQWSYAIFWSISTVPGVLAWCDGYYNGDIKTRKTIQAEEINDDDNDDYEVGLQRTEQLRQLYESLSSASETHPYSYEQQTRRPAAALSPEDLTDTEWYFLVCMTFEFTKGQGLPGRTLAKNTASWLCNAHFADSKVFSRSLLAKSASIQTVVCFPYLEGIVEFGITEKVLEEQNIIKQIKASIFDTPSKRFLETPLESCSAMLDHDDLDMILECETIKNRNNSPKNSLNCSREQSLQFLDDEEDGDVSFFNNNSVGSSDCISQNLISGPNDLWSDDDSRYQCVLSTIFKNTRRLILGPHFTQCNGKESGFVSWKNDGMEWNVSSSQSLLKKVLYEVPKMYENGSGLAGFPGRVWKPEGDDVKNINHRFSVLGSLVPSRGKVLDKVSLLDDTIEYLKALEKRVEALQSTKDERERTSDNYANKRKASCNLEELRQDCPSDCITVSAIEKEVTIEIRCRWRDNMMVQVFDAMNSLNLESHSVHSSTVDGILSLSIESKSKGCTVSTAKMIRQALQRVIGRY

SEQ ID NO: 30317 - protein, 242 aa, Escherichia coli
LKERKEGAFVPFVTLGDPGIEQSLKIIDALIEAGADALELGIPFSDPLADGPTIQNATLRAFAAGVTPAQCFEMLALIRQKHPTIPIGLLMYANLVFNKGIDEFYAQCEKVGVDSVLVADVPVEESAPFRQAALRHNVAPIFICPPNADDDLLRQIASYGRGYTYLLSRAGVTGAENRAALPLNHLVTKLKEYNAAPPLQGFGISAPDQVKAAIDAGAAGAISGSAIVKIIEQHINEPEKML

SEQ ID NO: 30318 - protein, 505 aa, Geobacter sulfurreducens PCA
MSDNFASPHDRDLDERVRPPGWINPSPAPRYDLVVVGAGTAGLVCAAGAAGLGARVALVERHRLGGDCLNYGCVPSKALIRAARAAHDAGNGAPFGVTGCHGTGVDGAAVMERMRRLRAEIGRHDAAVRFRDLGVHVFFGQGSFISRNALEVDGRRLNFVHAAVCTGARAAAPPVPGLAEAGYLTNETIFSLATLPARLAVIGGGPIGCELAQAAARLGSSVTVIEAAPEILPREDTDAAALVRHALERDRVSFLTAAAVVGVERRSGARTLIVRQGDQSHEVTADEILVGAGRTPNIEGLGLERAGIVADPLRGVRVNDRLRTDNPRVYAAGDICSPYRFTHAADAMARIVVANALFGARQRFSTQIIPWCTYTDPEVAHVGLYEREAGERGLAVDTLTVPLTEVDRALLDGEDEGFARVHLKRGTDRIVGATIVARHAGEMLNELTLAMSAGLGLSAIGRSIHPYPTQAEAIKKLADAWNRTRLTPGVKRLMGIMLTLRRLWR

SEQ ID NO: 30319 - protein, 305 aa, Escherichia coli
MSAKVWVLGDAVVDLLPESDGRLLPCPGGAPANVAVGIARLGGTSGFIGRVGDDPFGALMQRTLLTEGVDITYLKQDEWHRTSTVLVDLNDQGERSFTFMVRPSADLFLETTDLPCWRHGEWLHLCSIALSAEPSRTSAFTAMTAIRHAGGFVSFDPNIREDLWQDEHLLRLCLRQALQLADVVKLSEEEWRLISGKTQNDRDICALAKEYEIAMLLVTKGAEGVVVCYRGQVHHFAGMSVNCVDSTGAGDAFVAGLLTGLSSTGLSTDEREMRRIIDLAQRCGALAVTAQRGNDSAAMSTRTGK

SEQ ID NO: 30320 - protein, 181 aa, Staurastrum punctulatum
MINGLKNYSQDALRAARYIGQGFFVTLDHMNRTPITIQYPYEKLIPSERFRGRIHFEFDKCIACEVCVRVCPINLPVVDWEFQKSMKKKQLKSYSIDFGVCIFCGNCVEFCPTNCLSMTEEYELSSYDRHELNYDQVALGRLPNPASKDPLVHPILGLGYLQKKLLTQSTESKTITNFDKS

SEQ ID NO: 30321 - protein, 167 aa, Citrus sinensis
MASQSKTSVHDFTVKDAKGQDVDLSIYKGKLLLIVNVASQCGLTNSNYTELSQLYDKYKNQGLEILAFPCNQFGAQEPGDNEQIQEFACTRFKAEFPIFDKVDVNGDNAAPLYKHLKSSKGGLFGDSIKWNFSKFLVDKEGNVVERYAPTTSPLSIEKDIKKLLETA

SEQ ID NO: 30322 - protein, 238 aa, Corynebacterium diphtheriae NCTC 13129
MVEVIRVSDLDAVIQEAHRRFLQVIDDVVSNGGVHGDGVARIVLTGGGAGIGLLKELSHSSIDWSKIHVFFGDERNVPVTHPDSNEGQAREVLLNRIAIPSSNIHGFHLNGGEMSTPASAYSECINKYAPRGFDLHLLGMGGEGHINSLFPDSSAIKEDVHLVSVVTDSPKPPAQRVSLTLPAVNSSARVWLLVAGAEKAEAAQHVVAASPADQWPAAGVHGTKETLLILDNSAAQLL

SEQ ID NO: 30323 - protein, 381 aa, Hevea brasiliensis
MQIFVKTLTGKTITLEVESSDTIDNVKAKIQDKEGIPPDQQRLIFAGKQLEDGRTLADYNIQKESTLHLVLRLRGGMQIFVKTLTGKTITLGVESSDTIDNVKAKIQDKEGIPPDQQRFIFAGKQLEDGRTLADYNIQKESTLHLVLRLRGGMQIFVKTLTGKTITLEVESSDTIDNVKAKIQDKEGIPPDQQRLIFAGSSLRMVAPLADYNIQKESTLHLVLRLRGGMQIFVKTLTGKTITLEVESSDTIDNVKAKIQDKEGIPPDQQRLIFAGKQLEDGRTLADYNIQKESTLHLVLRLRGGMQIFVKTLTGKTITLEVESSDTIDNVKAKIQDKEGIPPDQQRLIFAGKQLEDGRTLADYNIQKESTLHLVLRLRGGF

SEQ ID NO: 30324 - protein, 250 aa, Zea mays
MAKNYPTVSAEYSEAVEKARRKLRALIAEKSCAPLMLRLAWHSAGTFDVSSRTGGPFGTMKCPAELAHGANAGLDIAVRLLEPIKEEFPTLSYADFYQLAGVVAVEVTGGPEIPFHPGREDKPQPPPEGRLPDATKGSDHLRQVFGKQMGLSDQDIVALSGGHTLGRCHKERSGFEGAWTTNPLVFDNSYFKELLSGDKEGLLQLPSDKALLSDPVFRPLVEKYAADEKAFFDDYKKAPLKLSELGYADA

SEQ ID NO: 30325 - protein, 475 aa, Arabidopsis thaliana
MGGGFRVLHLVRPFLAFLPEVQSADRKIPFREKVIYTVISLFIFLVCSQLPLYGIHSTTGADPFYWMRVILASNRGTVMELGITPIVTSGLVMQLLAGSKIIEVDNNVREDRALLNGAQKLLGILIAIGEAVAYVLSGMYGPVGQLGFGNAILIILQLFFAGIIVICLDELLQKGYGLGSGISLFIATNICESIIWKAFSPTTINTGRGAEFEGAVIALFHMLITKSNKVAALRQAFYRQNLPNVTNLLATVLIFLIVIYFQGFRVVLPVRSKSARGQQGSYPIKLFYTSNMPIILQSALVSNLYFISQLLYRKFSGNFFVNLLGQWKESEYSGQSIPVSGLAYLITAPASFADMAAHPFHALFYIVFMLTACALFSKTWIEVSGSSARDVSKQLKEQQMVMPGHRESNLQKELNRYIPTAAAFGGVCIGALTVLADFMRAIGSGTGILLAVTIIYQYFETFEKEKASELGFFGF

SEQ ID NO: 30326 - protein, 280 aa, Brassica napus
  misc_feature (95)..(95): Xaa can be any naturally occurring amino acid
  misc_feature (139)..(139): Xaa can be any naturally occurring amino acid
  misc_feature (161)..(161): Xaa can be any naturally occurring amino acid
  unsure (1)..(280): unsure at all Xaa locations
MAIAFKSGVCFLHSPKPQVGIRHSSPDSSLSFKRLAPIAALSTSSPTLGLADTFKELKKQGKVAFIPYITAGDPDLSTTTSSPTLLLACVLVRLXGSDIIELGVPYSDPLADGPVIQAAATRSLEKGTNLDSILDVQDXLLFRVVPLEETEFLRKEALNTXIELVLLTTPTTPTERMKRIVDASEGFISLVSSIGVTGARASVSGKVQSLLKDIKEAPAKPVAVGFGISKPEHVKQIAGWGADGVIVGSAMVRLLGDVKSPTEGLKELESLPKSLKSAFF

SEQ ID NO: 30327 - protein, 455 aa, Kluyveromyces lactis NRRL Y-1140
MMMKWTHHRPNTGVSMSQPKIFRKKRQESRYHGGSQSRYQPNRPNNHHNTAGNVNVNRSLGKRNPRGKFNRPSNGPETSGSRFEGHGSIPRGPRAMGSSAESAGDSHSRNIFGKKPLALISFQDVKSSFQPLAQVGEGTYGKVYKAENVHTGKLIALKRLRLEQERDGFPITSIREIKLLQQLNHPNISLIHEIIVSDKNTISMGFQYMENDLSGMLMDKSIQFSDSNIKHLMKQLFVGLQYLHQQQIVHRDIKGSNLLIDNRGNLKITDFGLAKKLTDVSSPASNTNRVITLWYRPPELLLGATDYKYEVDCWGCGCLLVELFAGAAIFPGSNEVDQFQRILSIMGSPTLEQWPKMLDMPWWFMLVPQISKTYKNVFFDEFSKVPQDALDLASKLLRYDQDTRFTTTEALQHHYFTNEPKPQPLLLGPEFKGSHEYEVKKIRRKERERQKETTV

SEQ ID NO: 30328 - protein, 733 aa, Zea mays
PPPPQLSVDGDARTPANDRDPAGLLQHDDTENQQQQQACWERFLLKETLNVLLVESDDSTRQVVSALLRCCMYQVISAENGQQAWAYLEDKRNNIDLVLTEVFMPGVSGISLLSRIMSHNICKNIPVIMMSSSDAMSTVFKCLSKGAVDFLVKPIRKNELKNLWQHVWRQRCHSLSCSSGSGSESGIQTQKCTKSKGANESGNNSGSNDDEAGMGLNARDDSDNGSGTQAQNSWTKLAVEIDSPQAMSLDQLADPANSTCAQVIHSKSEICSHRWLPGSSNRNCKKQKYTNDDFKGKDLEIDGPGNLYMDHQSSPNERPIKAADHENNSKEPIKAADHENNSKESMIENLEEPTVRAADLIGSMAKNMDTQQAARAAEDTPNFSSKVPEGKGKNDQHDNYVLPSLELSLKRSRSCGDGANDTVNDDEQRNSALRRSNLSAFTRYHTSAASNQGGTGLVGSCSPHDNSSEAVKTDSTYNMKSNSDAAAIKQGSNGSSNNNDMGSTTKDVVTKPSTNNERVMLPSAIKANGYTSTFHPVQQWMVPDNATAGKAKADEVANNAGRNSHPGDVQSNLTQQHRPTLHYVHFENSGSGALQCGSSNVFDPPLEGQATNNYGVKAGSNSGSNKGQNNGSTAGASTAAANAGRTDTEIRAIDKSGPGGGSGSGNDTYVRRLAASMTPRQEQLKKYREKKKDRNFGKKVRYQSRKRLADQRPRVRGQFVKQAVQNQEGDGER

SEQ ID NO: 30329 - protein, 316 aa, Arabidopsis thaliana
MVNPSSPGIAILGAGIFVKTQYIPRLAEISDLVDLKAIWSRTEESAKGAVEIARKHFPEVKCKWGDEGLNEIIQDSSIVGVAVVVAAETMVELSLKMLKAGKHVLQEKPAAASISEIETAMSSYRNISADSPCRPIWAVAENYRFEPAFVELKKLIAEIGDMMNVQLIIEGSMNSSNPYFSSSWRRNLSDVCSIVSSRTDALGFLLWLCLQGLQRHVILWRIVGLKGTVQLERGVEGGRHGYMATIYGEGGTSRTIFYPFSGVTEELKAFFNDISETSKEQEPRLSYVEGARDVAVLEAMLESGAKNGAVVPVNKF

SEQ ID NO: 30330 - protein, 505 aa, Arabidopsis thaliana
MASLARRKAYFLTRNLSNSPTDALRFSFSLSRGFASSGSDENDVVIIGGGPGGYVAAIKASQLGLKTTCIEKRGALGGTCLNVGCIPSKALLHSSHMYHEAKHSFANHGIKVSSVEVDLPAMLAQKDNAVKNLTRGIEGLFKKNKVTYVKGYGKFISPNEVSVETIDGGNTIVKGKHIIVATGSDVKSLPGITIDEKKIVSSTGALSLSEVPKKLIVIGAGYIGLEMGSVWGRLGSEVTVVEFAGDIVPSMDGEIRKQFQRSLEKQKMKFMLKTKVVSVDSSSDGVKLTVEPAEGGEQSILEADVVLVSAGRTPFTSGLDLEKIGVETDKAGRILVNDRFLSNVPGVYAIGDVIPGPMLAHKAEEDGVACVEFIAGKHGHVDYDKVPGVVYTHPEVASVGKTEEQLKKEGVSYRVGKFPFMANSRAKAIDNAEGLVKILADKETDKILGVHIMAPNAGELIHEAVLAINYDASSEDIARVCHAHPTMSEALKEAAMATYDKPIHI

SEQ ID NO: 30331 - protein, 335 aa, Glycine max
EYYDLMHEFMTAVKQNYGEKVLVQFEDFANHNAFELLAKYGTTHLVFNDDIQGTASVVLAGVVAALKLIGGTLPEHTFLFLGAGEAGTGIAELIALEMSKQTKAPIEESRKKIWLVDSKGLIVSSRKNSLQHFKKPWAHEHEPVNSLLEAVKVIKPTVLIGSSGVGRTFTKEVVEAMTSNNDKPLILALSNPTSQSECTAEEAYQWSEGRAIFASGSPFDPVEYKGKVYASGQANNAYIFPGFGLGLVISGAIRVHDDMLLAASESLAKQVSEENYKNGLIYPPFSNIRRISANIAANVAAKAYELGLATRLPRPQNLVKCAESCMYTPVYRNYR

SEQ ID NO: 30332 - protein, 614 aa, Photorhabdus luminescens subsp. laumondii TTO1
MEQNPQSQLKLLVTRGKEQGYLTYAEVNDHLPEDIVDSDQIEDIIQMINDMGIQVMEEAPDADDLMLAETANDTDEDAVEAAAQVLSSVESEIGRTTDPVRMYMREMGTVELLTREGEIDIAKRIEDGINQVQCSVAEYPEAITYLLEQYDRVEAGEARLSDLITGFVDPNAEEELAPTATHVGSELPQEELDDDEDDDDEDSDDDSDDDNSIDPELARQKFQELRQQYDITRQEIKENGRNHPNTAAEILKLSEVFKQFRLVPKQFDYLVNNMRSMMDRVRLQERQIMKMCVEQCKMPKKNFITLFSGNETSDIWFTAAKAMNKPWSEKLLEVEDEVQRSLQKLRQIEEETGLTIEQVKDINRRMSIGEAKARRAKKEMVEANLRLVISIAKKYTNRGLQFLDLIQEGNIGLMKAVDKFEYRRGYKFSTYATWWIRQAITRSIADQARTIRIPVHMIETINKLNRISRQMLQEMGREPTPEELAERMLMPEDKIRKVLKIAKEPISMETPIGDDEDSHLGDFIEDTTLELPLDSATSESLRSATHDVLAGLTAREAKVLRMRFGIDMNTDHTLEEVGKQFDVTRERIRQIEAKALRKLRHPSRSEVLRSFLDE

SEQ ID NO: 30333 - protein, 449 aa, Sinorhizobium meliloti
MFNRRQLLGASAALVSTAAWAKTSNMGLPEAAIMETAETQAPVRPASGPDYNPVVTVNGWTAPHRMNSGVKEFHLVAEPVEREMAEGMTAYLWGYNGQSPGPTIEAVEGDRVRIFVTNKLPEPTTIHWHGMILPSGMDGVGGLSQPHIPPGKTFVYEFDLVKSGTFMYHPHSDEMVQMAMGMMGFFVIHPKDPKFMPVDRDFVFLLNAYDIEPGSYVPRVMEMTNFNMWCWNSRIFPDISPLVVSKNDRVRVRVGNLTMTNHPIHMHGYDFEVTCTDGGWVRPEARWPEVSIDIPVGAMRAYEFDAKYAGAWAIHCHKSHHTMNAMGHDIPTFIGVDKKEVAQKIRKVRPEYMPMGTAGMSDMGKMEMELPENTIPMMTGWGPHGPIEMGGMFSVVKVREGISADDYSDPGWYENPPGTQAWEWTGELPDWTRADNAKTQITPKHSKHG

SEQ ID NO: 30334 - protein, 153 aa, Glycine max
MSLIPNFFGGRRSNVFDPFSLEVWDPFKDFHFPSSVSAENLAFVSTRVDWKETPEAHVLKADIPGLKKEEVKVQIEDDRVLQISGERNLEKEDKNDTWHRVERSSGKFMRRFRLPENVKVEQVKASMENGVLTVTVPKKEVKKPDVKAIEISA

SEQ ID NO: 30335 - protein, 853 aa, Abies grandis
AHHLTANTQSIPHFSTTLNAGSSASKRRSLYLRWGKGSNKIIACVGEGGATSVPYQSAEKNDSLSSSTLVKREFPPGFWKDDLIDSLTSSHKVAASDEKRIETLISEIKNMFRCMGYGETNPSAYDTAWVARIPAVDGSDNPHFPETVEWILQNQLKDGSWGEGFYFLAYDRILATLACIITLTLWRTGETQVQKGIESFRTQAGKMEDEADSHRPSGFEIVFPAMLKEAKILGLDLPYDLPFLKQIIEKREAKLKRIPTDVLYALPTTLLYSLEGLQEIVEWEKIMKLQSKDGSFLSSPASTAAVFMRTGNKKCLDFLNFVLKKFGNHVPCHYPLDLFERLWAVDTVERLGIDRHFKEEIKEALDYVYSHWDERGIGWARENPVPDIDDTAMGLRILRLHGYNVSSDVLKTFRDENGEFFCFLGQTQRGVTDMLNVNRCSHVSFPGETIMEEAKLCTERYLRNALENVDAFDKWAFKKNIRGEVEYALKYPWHKSMPRLEARSYIENYGPDDVWLGKTVYMMPYISNEKYLELAKLDFNKLQSIHQTELQDLRRWWKSSGFTELNFTRERVTEIYFSPASFIFEPEFSKCREVYTKTSNFTVILDDLYDAHGSLDDLKLFTESVKRWDLSLVDQMPKQMKICFVGFYNTFNDIAKEGRERQGRDVLGYIQNVWKVQLEAYTKEAEWSEAKYVPSFNEYIENASVSIALGTVVLISALFTGEVLTDEVLSKIDRESRFLQLMGLTGRLVNDTKTYQAERGQGEVASAIQCYMKDHPKISEEEALQHVYSVMENALEELNREFVNNKIPDIYKRLVFETARIMQLFYMQGDGLTLSHDMEIKEHVKNCLFQPVA

SEQ ID NO: 30336 - protein, 1060 aa, Ralstonia eutropha JMP134
MGMTCAAIALILLLSAHVLETLHSQERARVKAERQAALHAVTRMIGMLREDGETRLRTIIENPYQIDLARRIAAAPGDQALRAEYEAWITPVFRSRGFEGYSLISPQRVIVAASSRAYVGKPVSTAVVIEALARAQHADYAATRPNRSPMPILTAEGEQPPGTLFQQVCARIGTPEAPIAFLCLRTDPQDRLFEILRVGWSGKSGKAYVIDAAGRLLSPGLPGDRALQPSAKPRVSAPFGLWAQVPTRPRGGGPSVPADGNGQLTELAAALIDARDGETRVFDHYLDYRGRRVIGVAHWFPDTAMGVIVELDTDEAYRSFHLARQAIIALTALAICLILALTALHWRSRREMRQNAERWQAFRKNVPAGLAYMSPGGRVDMANDIYCEFAGLPLHDLLGRNAWTALPDRRVAGICERGHADVLRTGQTHVDEHTLNVRAHGQRVYRVARFPVRSRHDAVIMGVGTVVTDISEQERTRQALENLASTLEWKVAERTRELMEARESAEAAARAKSQFLANMSHEIRTPLNGISGMTHLAIGEPDSGRQGQYLARIEESCQHLQRIVNDILDFSKMEAGMLAVDAASFPLARLLDHVLSLFREQVRKKGLVLQMEVDPALPLHVIGDSQRIGQILINLLGNALKFTDAGEIRLRVRACNADDDTVAVRFEVSDTGIGIAEDALLVLFSPFHQADSSAARRFEGTGLGLAISKRLAELMGGRITVQSQAGVGSLFTLEIGLGVSKPPAWQGRAARLPAVTPKQDAVQSSAEHVHDDLPGAARTATPHALRGRTVLLVEDNPINQEVAQALLTQAGMQVTQANNGQHALGLLAQGRFDLVLMDVQMPMLDGLETTQRIRRDPRHASMPVVALTASALEDDRQRCLAAGMDDYVSKPIEPRKLYQVMARLVGGDAQSLQSAAAIMSTPAQAVAKVPCIVSLRAIPALDVGPALERLQGRREIYVGLVQRILAERMDFHRQLHQAVSEARYRDASLLAHNMHAILATLGAVELAPMLRTLERQLLDDRPDEALLSAFMDQFESLLSSLSTALKFVDAPTPTQSCAAE

SEQ ID NO: 30337 - protein, 245 aa, Sulfolobus tokodaii str. 7
MRRMLVTYMTLGYPNLESFYQFIEKSVELGTDILEIGLPPKYAKYDGPVIRKSYKAVTSWLKDYITPLKEVRKKVNIPIIILTYLEDYLSNLDNFLTTLHEIGIDGVLFPDLLIDFIDEYEEYVSKIKGKGVKAVLFTGPSLPDNLIIKASRISDIFLYYGVRPTTGIIIPVSVDSLITRVRNLVQNKLVVGFGLNDFNDLRKALSAGADGVAIGTAFIEEIEKNGIQSALHLVKTIRGILDEYS

SEQ ID NO: 30338 - protein, 445 aa, Pirellula sp. 1
MSQDARLRPSPICFSQPPLRSFGPAVAGMVLILALVVANASSWLVGLVSLVVIGLLLVFRHWHSSQQDDAVSAYVRDSTEEIQKWQERLRCLHAETRQNASALLQLSDGVIVLAKDFSVLLINPSAVRLLGLKKRDALLGRCFTELVRVPQLLASIRSAVREQQPQEFTVEVHDQGVMRPLRVRVDLIDTGEEPNLQLSLRDETEARRVEEMRREFIANVSHELKTPLAAIKGYAETVELAVQDDPDAALHFMQQIMSQCLRLERLVHEMMQLARAQAGPANLHLSSVSLSEIVSDAIRTYEPVAAANGLDLIQEVPSGEAKIIADREATLTIANNLIGNALRYTPSGGEIRVSIVEQTDQWALVVEDTGVGIPYSEQQRIFERFYRGSRNEESSTSGTGLGLAIVKHLTQAQQGDVSVTSTPGEGSRFCVCLPAVQASTELNRV

SEQ ID NO: 30339 - protein, 134 aa, Rhodobacter sphaeroides 2.4.1
MTDEREKVVKSDAEWRAELSELAYKVTRKHGTERAGTHDDFPKEPGVFRCVGCGAPLFDQAQKFESGTGWPSFWAPIDPEAVETSVDRSFFMRRTEVHCARCEAHLGHVFPDGPQPTGLRYCMNGVAMTFEPKG

SEQ ID NO: 30340 - protein, 226 aa, Xylella fastidiosa Temecula1
MMVSAPLSFMPEAVIFDMDGLMLDSERVSIECRCRAAFDLEHQIEPDYWLQMVGVSDIACHVQLSARIGAVSATALLARSDALYEAVVMKGVPHRPGIVTLLEWLFARGIPCAVGTSTRRPLALRKLNTAGLLSRFDVVCTASEVAQAKPAPDIYLLAAHTLGIVPRRCLVVEDSPIGVRAALAAGMTPIQVPDLLMPDAQVSALGHRIVASLTEVQSLLEACFDV

SEQ ID NO: 30341 - protein, 242 aa, Escherichia coli
LKERKEGAFVPFVTLGDPGIEQSLKIIDTLIEAGADALELGIPFSDPLADGPTIQNATLRAFAAGVTPAQCFEMLALIRQKHPTIPIGLLMYANLVFNKGIDEFYAQCEKVGVDSVLVADVPIEESAPFRQAALRHNVAPIFICPPNADDDLLRQIASYGRGYTYLLSRAGVTGAKNRAALPLNHLVAKLKEYNAAPPLQGFGIFAPDQVKAAIDAGAAGAISGSAIVKIIEQHINEPEKML

SEQ ID NO: 30342 - protein, 242 aa, Escherichia coli
LKERKEGAFVPFVTLGDPGIEQSLKIIDTLIEAGADALELGIPFSDPLADGPTIQNATLRAFAAGVTPAQCFEMLALIRQKHPTIPIGLLMYANLVFSKGIDEFYAQCEKVGVDSVLVADVPVEESAPFRQAALRHNVAPIFICPPNADDDLLRQIASYGRGYTYLLSRAGVTGAENRAALPLNHLVTKLKEYNAAPPLQGFGISAPDQVKAAIDAGAAGAISGSAIVKIIEQHINEPEKML

SEQ ID NO: 30343 - protein, 410 aa, Arabidopsis thaliana
MESRVLLRATANVVGIPKLRRPIGAIHRQFSTASSSSFSVKPIGGIGEGANLISGRQLRPILLLDSSAINGGEKREILKPVKAAAAEGGDTAGEAKVGFLAKYPWLVTGFFFFMWYFLNVIFNILNKKIYNYFPYPYFVSVIHLFVGVVYCLISWSVGLPKRAPIDSNLLKVLIPVAVCHALGHVTSNVSFAAVAVSFTHTIKALEPFFNAAASQFIMGQSIPITLWLSLAPVVLGVAMASLTELSFNWLGFISAMISNISFTYRSIFSKKAMTDMDSTNVYAYISIIALFVCIPPAIIVEGPKLLNHGFADAIAKVGMTKFISDLFWVGMFYHLYNQLATNTLERVAPLTHAVGNVLKRVFVIGFSIVIFGNKISTQTGIGTGIAIAGVAMYSIIKAKIEEEKRQGKKA

SEQ ID NO: 30344 - protein, 349 aa, Malus x domestica
MTVSPSLSVTRNGRVLIVGATGFIGRFVAEASLAAGRPTYVLVRPGPLHPSKADTVKSFKHKGAIILHGLISDKTLVEKILREHEIETVISVVGGATILDQIALVEAIAAVGTVKRFLPSEFGHDVDRADPVEPGLTMYEEKRKVRRWVEKSGVAYTYICCNSIASWPYFDNTHPSEVLPPLDRFQIYGDGTVKAYFVDGTDIGKFTIKTVDDIRTINKNIHFRPPSNLYDINGLASLWEKKIGRTLPRITITENHLLALAAENRIPESIVASFTHDIFIKGCQVNFAVEGPRDVEVGTLYPGDSFRTLDECFNDFLLKLKDNLEPVHEENVSTKNAVVESRAVTPTCA

SEQ ID NO: 30345 - protein, 612 aa, Candida albicans SC5314
  misc_feature (604)..(604): Xaa can be any naturally occurring amino acid
  unsure (1)..(612): unsure at all Xaa locations
MRFIVSSFIFFISFLSSLITAETHTWYFKTSWVDANPDGVFPRKMIGFNDSWPLPTLRAKKGDRIQLYLINGFEDLNTTLHFHGLFQHGTNQMDGPEMVTQCPIPPGETYLYNFTIDDQVGTYWYHSHTSGQYGDGMRGVFIIEDDDFPYDYDEEVVLTLSEHYHDYSKDLMPGFLSRFNPTGAEPIPSNILFNETRNNTWKVEPGKTYFVRIINIGRFVTQYLWMEDHEFTVVEVDGVYVEKNTTDMLYITIAQRYGVLITTKNSTDKNYAFMNRVDDTMLDTIPKDLQLNGTNYIVYNESAPLPDAYDVDSIDDYLDDFYLKPLNKEKLLDDADYTITVDVQMDNLGNGVNYAFFNNITYMTPKVPTLLSVLSAGDASTNELVYGSNTNSFVLQGGDVVDIVLNNLDTGRHPFHLHGHVFQLIERHKEIPDTEDPVSYNVSDHAEWPEYPMSRDTVYVKPQSYIVMRFKADNPGVWFFHCHIEWHLDQGLAIVLIEDPEAIQKNSSQHLTDNHKQICEKVGVSWEGNAAANSNNYLDLKGENIQVKRLPTGFTARGIVALVFSCIAEFLGIAAIAYYGMNDIEDLEEKSGKRFGCGIWMKKXRRKKKQKL

SEQ ID NO: 30346 - protein, 231 aa, Escherichia coli
LKERKEGAFVPFVTLGDPGIEQSLKIIDTLIEAGADALELGIPFSDPLADGPTIQNATLRAFAAGVTPAQCFEMLALIRQKHPTIPIGLLMYANLVFNKGIDEFYAQCEKVGVDSVLVADVPVEESAPFRQAALRHNVAPIFICPPNADDDLLRQIASYGRGYTYLLSRAGVTGAENRAALPLNHLVAKLKEYNAAPPLQGFGISAPDQVKAAIDAGAAGAISGSAIVKII

SEQ ID NO: 30347 - protein, 624 aa, Candida albicans SC5314
MRTFLSSFIILTTFLASLIAAETHTWYFKTGWVDANPDGVYPRKMIGFNDSWPLPTLRVKKGDRVQLYLINGFDNLNTTLHFHGLFVRGANQMDGPEMVTQCPIPPGETYLYNFTVTDQVGTYWYHSHTGGQYGDGMRGVFIIEDDDFPYHYDEEVVLTLSDHYHKYSGDIMPAFLTRFNPTGAEPIPQNFLFNETRNATWKVEPGKTYFVRILNIGGFVSQYLWMEDHEFTIVEIDGVYVEKNTTDLIYITVAQRYGVLITTKNSTDKNYAFMNGVDTTMLDSVPADLQVNGTNYIVYNESSALPDAYDIDSYDDALDDFYLKPLSKQKLMDDADYTITVDVQMNVLNDGINYAFFNNISYKAPKVPTLLTVLSAGEAATNELIYGTNTNSFVLQGGDIVDIVLNNFDTGKHPFHLHGHVFQLIERHEAIGSKESAVTFNVSDHAEWPEYPMIRDTVYVKPHSYMVLRFKADNPGVWFFHCHVDWHLEQGLAIVLIEDPQAIQKNEKITENHKRICEKVGVPWEGNAAANSNDYLDLKGENVQVKRLPTGFTTKGIVALVFSCVAAFLGLFTISFYGMNDIAHVEDKVARDLDIDLEAENEDEEEAVVLNQNSSSSDSNSKPH

SEQ ID NO: 30348 - protein, 476 aa, Buchnera aphidicola str. Sg (Schizaphis graminum)
MHQEIQSEVVIIGSGPAGYSAAFRCADLGLETVLIEHQERLGGVCLNVGCIPSKSLLHIAKIIKDASELSESGVFFNKPIIDIKKINNWKEKIIKKLTTGLSNMGEKRKVRIVQGKALFNTDHSVLVKNKKNDFTIFFKHAIIATGSKPIKIPSLPNEDNRIWNSTDALSLKSIPNRFLIIGGGIIGLEMATIYSALGSKVDIVDRFNAFLPSVDKDITDIYIKSIKKRFKLLLNTHVKSVEKSKDNDLIVKIAEENSDENVCCYDNILVAIGRSPNVDFLGLEKIGLKLNESGFIEINQQLKTNISHIYAIGDVTGFPMLAHKAVQQAHIAAEVISGKKHYFEPKVIPSVAYTDPEIAWVGLSEKEAENNDIDYEVSLFPWSASGRAHASNCTLGMTKLIFNKNTNKIIGGSIIGTNASELISEIGLAIEMGSDAEDISLTIHPHPTLSESISLASEVFQGTITDLLNLKKSLLN

SEQ ID NO: 30349 - protein, 151 aa, Candida albicans SC5314
MRATLTSLLVSITFLVSLVAAETHTWYFKTGWVNANPDGVYERPMIGFNDTWPLPTLRVKKGDRVQLYLINGFDNLNTTLHFHGLFQNGTNQMDGPEMVTQCPIPPGETYLYNFTVDQVGTYWYHSHTAGQYGDGMRGVFVIDDDDFPYDY

SEQ ID NO: 30350 - protein, 416 aa, Arabidopsis thaliana
MDDYEVVEQIGRGAFGSAFLVIHKSERRKYVVKKIRLAKQTERCKLAAIQEMSLISKLKSPYIVEYKDSWVEKDCVCIVTSYCEGGDMTQMIKKSRGVFASEEKLCRWMVQLLLAIDYLHNNRVLHRDLKCSNIFLTKENEVRLGDFGLAKLLGKDDLASSMVGTPNYMCPELLADIPYGYKSDIWSLGCCMFEVAAHQPAFKAPDMAALINKINRSSLSPLPVMYSSSLKRLIKSMLRKNPEHRPTAAELLRHPHLQPYLAQCQNLSPVFKPVVSKSEHNTNENRTGLPPKTKSAKTPIKHNQESEETEKKNKDTSSSSKDKERPAKSQEMSVISTLTLLREFQKKSPKSEERAEALESLLELCAGLLRQEKFDELEGVLKPFGDETVSSRETAIWLTKSLMNVKRKQNDDETNI

SEQ ID NO: 30351 - protein, 674 aa, Magnaporthe grisea 70-15
MVPRAEGSQLKRARPSTADSDGESFKKPRRTERAAHKAEESTAQPKTPVDTKQQLPSPITHNPTEGSFDAYKEGTVTPPEGRPSQVAHRSPVQGFSSPPQDTQATQAIPSQIVDPKAALSDEVEDEVKEGVWGYLFPLDTRYGGKCVVLRKRGSCPMPDTNGKSDDKPCDKASKDIVVDDPIVSNRHCLIFAEHKGNDTVVILEDLSSNGTFVNEAIVGRNQRRELLEQDEIAVKDTARFIFRYPKYRQTSAFSQQYTLLGKLGKGHFAEVFACVEKSTGQRYAVKIFSMVPGLEERSRTEGLQLEIAVLMGVSHPNVLCLKDTFHEGNAVYLVLELAPEGELFNFIVMKQKLSEAESRKLFTQLFHGVKYLHDRNIVHRDIKPENILLVDKDLHVKIADFGLAKIIGEESFTTSLCGTPSYVAPEILVDGRHRKYTKAVDVWSLGVVLYICLCGFPPFSDELTSESFPYTLTQQIKNGIFHYPSPYWDSVGDPALSLIDCMLVVDPEKRYTIDQCLAHPWMTQAQPSVHDSTDGLVGGFAGLEVNRRGIVRERTLLSSINSVQVTRVPAGPNQEPVKVFIKNPKDGKANRAPEPGPSQNRRPDEFIEMGGKGDQPLFGHDGGSNYPSADIASQKTAISQPALNGAETSKDDEVKEINANGKTKPTAAGKGKEH

SEQ ID NO: 30352 - protein, 537 aa, Glycine max
MAALNLCRMALRSSKLLSRPYHRLSVQLQMQMQPSSPPLTRKMSMDAQSVASQLNSSGLLRTQGLIGGKWSDAYDGKTIKVYNPATGESIVDVACMGGRETNDAISAAYDAYGSWSKTTAAERSKLLRKWYDLLMVHKEELAQLITLEQGKPLKESVGEIVYGAGFIEFAAEEAKRIYGDIVPAPFSDRRLFVLKQPVGVVGAITPWNFPLAMITRKVGPALACGCTVVIKPSELTPLTALAAVELSIQAGIPPGVVNVVMGNAPDIGDALLASPQVRKITFTGSTAVGKKLMAGSAETVKKVSLELGGNAPCIVFDDADLDVAVKGTLAAKFRNSGQTCVCANRIIVQEGIYEKFANALRDAVQNMKVGDGFSEGVSQGPLINEAAVKKVESLIHDATSKGAKVILGGKRHSLGLTFYEPTVISDVNSDMHISREEAFGPVAPLLRFKTEEEAIRIANDTNAGLGSYVFTNSIQRSWRVAEALEYGLVGVNEGVISTEVAPFGGFKQSGLGREGSKYGMDEYLEIKYVCFGNMNKE

SEQ ID NO: 30353 - protein, 449 aa, Zea mays
  misc_feature (398)..(398): Xaa can be any naturally occurring amino acid
  unsure (1)..(449): unsure at all Xaa locations
ARDHYLEHPNRNFKVAAELGSDSLGAYVISMASNASDVLAVELLQKDARLAVSGDLGRPCPGGTLRVVPLFETVKDLQAAGSAIRKLLSIDWYREHIIKNHNGHQEVMVGYSDSGKDAGRFTAAWELYKAQEDVVAACNEFGIKVTLFHGRGGSIGRGGGPTYLAIQSQPPGSVMGTLRSTEQGEMVQAKFGLPQTAVRQLEIYTTAVLLATLRPPHPPRDANWRNVMEEISRVSCAHYRSTVYEDPEFITYFHEATPQAELGHLNIGSRPAKRKPAGGISSLRAIPWVFAWTQTRLVLPAWLGVGTGLQDALDRGHGEELRAMYAEWPFFQSTVDLIEMVTAKADAPMAAHYEEMLVARERRGVGAGLRRELARTERCVLAVSGHSKLTAHNRSLRXLIESRLAYLNPINMLQVEVLRRLRRDDDNRRLRDALLITINGIAAGMRNTG

SEQ ID NO: 30354 - protein, 119 aa, Brassica napus
MEIEYPKYDTLLFDLDDTLYPLSSGIARECGQNIKDYMVEKLGIDKSKILELSNSLYKNYGTTMAGLRAIGYDFDYDEYHSYVHGRLPYDNIKPDPILRTILLSLPLRKIIFTNADKLH

SEQ ID NO: 30355 - protein, 880 aa, Neurospora crassa
MATTLSSGAAAELPIRSQSVRTRRPPTTSRPEPPLPRSESTNRAEASRPHRRSSQRSASGATTAATTTTTTSTATSSRHHPHPSQQQQQYHHQQQPDMSAAAAAAAAPHGHASAGDDHRNGADAGVSTHRSATGTTKQRYRTVIPAPSGNYAFIKTIGQGSMGKVKLAKKEGTNELASQPIKCDISLVACKIIERVSPDDGRQSREEREKADAAREDRNAREAAIVSLLNHQYICGLRDNLRTRWHWYMLFEYVNGGQMLDYIISHGKLKEKQARKFARQIASAVDYCHRNSIVHRDLKIENILISKTGDIKIIDFGLSNLFSPEEDRKLKTYCGSLYFAAPELLQARPYTGPEVDVWSFGVVLFVLVCGKVPFDDQYMPALHQKIKKGAVDYPNWLSSECKHLISRMLVTDPKQRATMQEVMNHPWMLKGYNGPPDNYLPRREPLTLPLDPEVISQMTGFKFGPPEYITAELTKRIKSPKYQAAVRRLEKERERPEPIAKDAEKKRGFGFDFYKRRNSVTSKDTLTAASSEGLSLGDDPLNAFDPLISIYYLVREKLERERNHVYIDLQQPSKAQQPPPSSSQTVMPVPPSPVIRPKEKHSLADIVPPQPVHNAEPRSRQRTRSHSEDQPREPIQGGLLSPDMVPAKKESTAAGILRRLSTRDRRKEPPATASSTDGKPPLRGSMSMRAKSLGHARRESIQMRRAKREAEAAAAQQAQSQTTEPQRSYQSHHHSVREETDAELVDSDIRGETSGGSNERLEPEDPDLVKPVFLKGIFSVSTTSTKPLSEIRADIKRVLRVLGVEFNEIKGGFSCRHTPSINHAERQPTVMTEGGNEIEFEILIVKVPIVSLHGVQFKRLAGNTWQYKALAEQIVRELRL

SEQ ID NO: 30356 - protein, 696 aa, Arabidopsis thaliana
MAFGRNNRVRFRDWISEGTEYGYGRNKARPSLNTVLKNVRRGLKKPLSFGSHNKKRDSNSSTTTQKNIINPQGSFLQNWNKIFLFASVIALAIDPLFFYIPIVDGERHCLNLHRNLEIAASVLRTFIDAFYIIHIVFQFRTAYISPSSRVFGRGELVDDPKAIAIKYLSSYFIIDLLSILPLPQLVVLAVIPNVNKPVSLITKDYLITVIFTQYIPRILRIYPLYTEVTRTSGIVTETAWAGAAWNLSLYMLASHVFGALWYLISVEREDRCWREACEKIPEVCNFRFLYCDGNSSVRNDFLTTSCPFINPDDITNSTVFNFGIFTDALKSGIVESDDFWKKFFYCFWWGLRNLSALGQNLNTSKFVGEIIFAVSICISGLVLFALLIGNMQKYLESTTVREEEMRVRKRDAEQWMSHRMLPDDLRKRIRRYEQYKWQETRGVEEENLLRNLPKDLRRDIKRHFCLDLLKKVPLFEIMDEQLLDAVCDKLKPVLYTENSYAIREGDPVEEMLFVMRGKLMSATTNGGRTGFFNAVYLKPSDFCGEDLLTWALDPQSSSHFPISTRTVQALTEVEAFALAADDLKLVASQFRRLHSKQLQHTFRFYSVQWRTWGASFIQAAWRRHCRRKLARSLTEEEDRFRNAITKRERNAASSSSLVATLYASRFASNALRNLRTNNLPLLPPKPSEPDFSLRNP

SEQ ID NO: 30357 - protein, 512 aa, Arabidopsis thaliana
MDNSRTRQNMNGSANWSQQSGRTSTSSLEDLEIPKFRSFAPSSISISPSLVSPSTCFSPSLFLDSPAFVSSSANVLASPTTGALITNVTNQKGINEGDKSNNNNFNLFDFSFHTQSSGVSAPTTTTTTTTTTTTTNSSIFQSQEQQKKNQSEQWSQTETRPNNQAVSYNGREQRKGEDGYNWRKYGQKQVKGSENPRSYYKCTFPNCPTKKKVERSLEGQITEIVYKGSHNHPKPQSTRRSSSSSSTFHSAVYNASLDHNRQASSDQPNSNNSFHQSDSFGMQQEDNTTSDSVGDDEFEQGSSIVSRDEEDCGSEPEAKRWKGDNETNGGNGGGSKTVREPRIVVQTTSDIDILDDGYRWRKYGQKVVKGNPNPRSYYKCTTIGCPVRKHVERASHDMRAVITTYEGKHNHDVPAARGSGYATNRAPQDSSSVPIRPAAIAGHSNYTTSSQAPYTLQMLHNNNTNTGPFGYAMNNNNNNSNLQTQQNFVGGGFSRAKEEPNEETSFFDSFMP

SEQ ID NO: 30358 - protein, 862 aa, Taxus brevifolia
MAQLSFNAALKMNALGNKAIHDPTNCRAKSERQMMWVCSRSGRTRVKMSRGSGGPGPVVMMSSSTGTSKVVSETSSTIVDDIPRLSANYHGDLWHHNVIQTLETPFRESSTYQERADELVVKIKDMFNALGDGDISPSAYDTAWVARVATISSDGSEKPRFPQALNWVFNNQLQDGSWGIESHFSLCDRLLNTTNSVIALSVWKTGHSQVQQGAEFIAENLRLLNEEDELSPDFQIIFPALLQKAKALGINLPYDLPFIKYLSTTREARLTDVSAAADNIPANMLNALEGLEEVIDWNKIMRFQSKDGSFLSSPASTACVLMNTGDEKCFTFLNNLLDKFGGCVPCMYSIDLLERLSLVDNIEHLGIGRHFKQEIKGALDYVYRHWSERGIGWGRDSLVPDLNTTALGLRTLRMHGYNVSSDVLNNFKDENGRFFSSAGQTHVELRSVVNLFRASDLAFPDERAMDDARKFAEPYLREALATKISTNTKLFKEIEYVVEYPWHMSIPRLEARSYIDSYDDNYVWQRKTLYRMPSLSNSKCLELAKLDFNIVQSLHQEELKLLTRWWKESGMADINFTRHRVAEVYFSSATFEPEYSATRIAFTKIGCLQVLFDDMADIFATLDELKSFTEGVKRWDTSLLHEIPECMQTCFKVWFKLMEEVNNDVVKVQGRDMLAHIRKPWELYFNCYVQEREWLEAGYIPTFEEYLKTYAISVGLGPCTLQPILLMGELVKDDVVEKVHYPSNMFELVSLSWRLTNDTKTYQAEKVRGQQASGIACYMKDNPGATEEDAIKHICRVVDRALKEASFEYFKPSNDIPMGCKSFIFNLRLCVQIFYKFIDGYGIANEEIKDYIRKVYIDPIQV

SEQ ID NO: 30359 - protein, 150 aa, Alkalilimnicola ehrlichei MLHE-1
MAIMRYDPWSTLRQIQTDLDRMFGQRGMITAGEGENAESAGQWLPAVDISEDDKAYHIHADLPGVAPEDIEISMDQGVLSIKGSRESESTESEEGWKRVERARGTFYRRFALPESVDADNIAARSRNGVLEITVPKKVAPPAQRIEVKSE

SEQ ID NO: 30360 - protein, 143 aa, Rickettsia akari str. Hartford
MSLTLKYFFKPKVTINYPYEKSHVSPRFKGEHALRRYESGEERCIACKLCEAICPAQAIVIEADEREDGSRRTTRYDIDMTKCIYCGLCQEACPVDAIVEGPNFEFASLTHAALIYDKERLLQNGDRWEQALASKLHKDYEYR

SEQ ID NO: 30361 - protein, 463 aa, Triticum aestivum
MAAMNEKVLAKCGQNIVSLKRKRDSPAAYHADACHTSQSHQHPTGNSDIRLYVGEDRKANIACHFNKQILQSYQNYMTSASPKRILLRQSGNWKEFPEKIVKLAQVDFRTKKTITEVGYQNQLFLLDFVHMTFIDSKSGLQRPIAWIDDNGRRYFPEVLIEDQIVYRRKDLGNGDHVYVRAEPNGAREINDQYGASESSAESSNFESSTEEVSSDKRVRAEKGIIRKINCDHRETVGENEPHTSLPAVFSCQPQQDKLGGQSRAQGTTSVVQKMLLQGMGTAIGSKDIIGIHRTPFLNNYREDRYNLFQKQAEITKSQHGNANVRYAWLPCSKAAVDEMMLNGTLQIKKPTRCPPYGTGVLLAPANCSINCVNYSDVDENGIIYMMLCRVVMGNVEIVHHGSKQHQPSNEYFDSGVDDLKNPQHYIVWDMNLDSHIYSEFVVTIKLPSKAKDPSSHKKMSRFI

SEQ ID NO: 30362 - protein, 259 aa, Oryza sativa
  misc_feature (31)..(31): Xaa can be any naturally occurring amino acid
  misc_feature (190)..(190): Xaa can be any naturally occurring amino acid
  unsure (1)..(259): unsure at all Xaa locations
MAPSLLRPASPCLNLAPPTADGPGRSRSAVXRRDFPCTTMASRDHSGLTRQLLDFQHGTVDEIDGEHDPFMELKARFMDFKHRNCVDNISNYQNLAQQQTPKFMVVACADSRVCPSSVLGFQPGEAFTVRNIANLVPPYQHGASETSAALEFAVNTLEVENVLVVGHSRCGGIQALMSMKSKQDDSQSRXSSSHLLHYVSFYFSFTSCIYGVCFLNRSFIRDWVSIAKSARLSTEAAAGNLNFELQCKHCEKVILIFLV

SEQ ID NO: 30363 - protein, 417 aa, Streptococcus agalactiae A909
MTYIEILGQNAKKASQSVARLSTASKNEILRDLARNIVADTETILTENARDVVKAKDNGISEIMVDRLRLNKDRIQAIANGIYQVADLADPIGQVVSGYTNLDGLKILKKRVPLGVIAMIFESRPNVSVDAFSLAFKTGNAIILRGGKDAIFSNTALVNCMRQTLQDTGHNPDIVQLVEDTSHVVAEELMQATDYVDVLIPRGGAKLIQTVKEKSKIPVIETGVGNVHIYIDEFADLDMAAKIVINAKTQRPSVCNAAEGLVVHQAIAKGFLSQLEKMLKESNQSVEFRADEEALQLLENAVAASESDYATEFLDYIMSVKVVDSFEQAISWINKYSSHHSEAIITNNISRAEIFQDMVDAAAVYVNASTRFTDGFVFGLGAEIGISTQKLHARGPMGLEALTSTKYYINGTGQVRE

SEQ ID NO: 30364 - protein, 316 aa, Glycine max
MATLIAPSNHSPQEDAEALRKAFEGWGTDEKTVIVILGHRTVYQRQQIRRVYEEIFQEDLVKRLESEIKGDFEAQSKAVYRWILEPADRDAVLANVAIKNGKNYNVIVEIATILSPEELLAVRRAYLNRYKHSLEEDVAAHTSGHLRQLLVGLVTSYRYVGDEINPKLAQTEAEILHDAVKEKKGSYEETIRVLTTRSRTQLVATFNCYREIHGTSISKKLVDEGSDEFQRALYTAIRGIKDPIKYYEKVVRNAIKKVGTDEDALTRVVVSRAEKDLKIISEVYYKRNSVLLEHAIAKETSGDYKKFLLTLLGKED

SEQ ID NO: 30365 - protein, 1027 aa, Crocosphaera watsonii WH 8501
MNITEIIDRLRQLTQVTVQHNWLGTSEEIDINDIRFDNLQSITANEKGYLTWEAGSQVKWLVQKIVIPEQLNGYPLEKLSLRLSLVWWAEIAQIFVNGKLVQEGDLFDCLARVLLTSSAQIGQEFLVCLRLVSPSHDIGALMKSQLIYESDYNAIDPGFIADELAVLFNYLSTFYPENLEFLEETVNNLNWNYVDLADKFNEELIQLRKQLQPFSYLIKQRKFNIVGHAHLDMAWLWKVDETWEVAERTFSSVINLQQEFNSLTFCHTTPVLYEWVEKNRPELFKQIQDSYKVGTWEILGGMWVEPEVNLVSGESLVRQLLYGQKYIQEKFGTITEVAWLPDSFGFCLQLPQIFKQSGINYFVTGKLHWNNTVEFPYGAFWWRSLDGTELLTVMSPPNVEGVMTTHPIPMTNYSVKWEQQTGLQEILWIPGVGDHGGGPTRDMIEVSQRWKQSPFFPQVNFTTAKNYLDKVKHTVENGLKIPVWDDELYLDLHRGCYTTHADQKYYNRRSEDLLYQAELWSCLAAMIESKPMDDEVKSNIEFAWKKVLFNQFHDILPGTSITDVFIQANQDWEEVQIIGNNILKSAFKKIMSWIVIPSISKLKAKPIIIFNSLNWERSEIVEIDYMDNNYEIYDLEENKLVTQVSHDNKLLFVAENIPSIGYGVFYLVPNDKEREKEEILQQNETILENEYLKVIINAKTGNIDSIYDKNNQLEILKREGNKLQSFQDKGQYWDAWNIDPNYNSYPLPCPKLISIETLEVGPIQWKVRVIRKMGDSEFTQDYVLQKKSAILQIKTKVDWQEKYVLVKAAFPFNLTAEYSSYEIPFGTIQRSNCPKTPYQKAKWEVPALRWADLTDNSKNYGVSLLNDCKYGYDSQSDRLRLTLLKSPRWPDPTCDIGKQEFTYAIYPHQGSWQEAKTVQKARELNIPLQVVITDNKKNNKGTLPPVFSGLNIPAENLIISALKPAEEEGKDNYILRCYECEGKAATMEIESDLNLKLGQGRNLLEEATNDEQKIQPWKIVTFDLKKE

SEQ ID NO: 30366 - protein, 134 aa, Triticum aestivum
  misc_feature (50)..(50): Xaa can be any naturally occurring amino acid
  unsure (1)..(134): unsure at all Xaa locations
MSFSSVSAASQARVGVVQMTSVGDLDANYATCSRLTKEAAAAGVKFLCFXKESVKLAEPLDGPIMQRYCSLANESSMWLSLGGFQERGPDDSHQYNTHILIDESGKVRSSYRKIHLFDVDVPGNMVYKESRFTT

SEQ ID NO: 30367 - protein, 242 aa, Escherichia coli
LRERKEGAFVPFVTLGDPGIEQSLKIIDTLIEAGADALELGIPFSDPLADGPTIQNATLRAFAAGVTPAQCFEMLALIRQKHPTIPIGLLMYANLVFNKGIDEFYAQCEKVGVDSVLVADVPVEESAPFRQAALRHNVAPIFICPPNADDDLLRQIASYGRGYTYLLSRAGVTGAENRAALPLNHLVAKLKEYNAAPPLQGFGISAPDQVKAAIDAGAAGAISGSAIVKIIEQHINEPEKML

SEQ ID NO: 30368 - protein, 542 aa, Streptococcus suis
MTIDKRKVVYQIYPKSYKDTTGNGVGDLRGIIEKLPYLKELGIDMIWLNPFYPSPQRDNGYDISDYTAVNPDFGTMADFEEMVTVGKELGIEFMLDMVLNHCSTDHEWFQKALSGDQYYQDFFILRDQPTDWVSKFGGNAWAPFGDTGKYYLHLFDVTQADLNWRNPHIREELFKVVNFWKDKGVKGFRFDVINLIGKDEAREDCPINDGKPAYTDRPITHDYLKMMNNATFGSEKGFMTVGEMSATTIENCILYTAPERKELSMAFNFHHLKVDYKDGQKWTIMDFDFEELKHLFHTWGEEMSVGNGWNALFYNNHDQPRALNRFIDVENFRKEGATMLAASIHLSRGNNLTSTWVRRSVSSTLTTIAWTTTWTWSLSMPTRCSWTKVTRLSRPSRLSRPSPVTIPAPRCNGTLLTMQASQQATPWLKAGKSYQTINVEQEKTGPIFTFYKRTHPLRKELPLISEGDYKAAYKDSQKVYAFERLLNDEKLLVLNNFFAEEVELDLADDYAHGQVLISNYPDNKLGKKIILKPYQALAIQVK

SEQ ID NO: 30369 - protein, 242 aa, Escherichia coli
LNARKEGAFVPFVTLGDPGIEQSLKIIDTLIEAGADALELGIPFSDPLADGPTIQNATLRAFAAGVTPAQCFEMLALIRQKHPTIPIGLLMYANLVFNKGIDEFYAQCEKVGVDSVLVADVPIEESAAFRQAALRHNVAPIFICPPNADDDLLRQIASYGRGYTYLLSRAGVTGAENRAALPLNHLVAKLKEYNAAPPLQGFGISAPDQVKAAIDAGAAGAISGSAIVKIIEQHINEPEKML

SEQ ID NO: 30370 - protein, 242 aa, Escherichia coli
LKKRKEGAFVPFVTLGDPGIEQSLKIIDTLIEAGADALELGIPFSDPLADGPTIQNATLRAFAAGVTPAQCFEMLALIRQKHPTIPIGLLMYANLVFNKGIDEFYAQCEKVGVDSVLVADVPVEESAPFRQAALRHNVAPIFICPPNADDDLLRQIASYGRGYTYLLSRAGVTGAENRAALPLNHLVAKLKEYNAAPPLQGFGISAPDQVKAAIDAGAAGAISGSAIVKIIEQHINEPEKML

SEQ ID NO: 30371 - protein, 309 aa, Burkholderia fungorum LB400
MDKGVEKAVRLIEEAAKNGAKLIAFPEVWLPGYPWWIWLDSPAWGMQFVQRHFENALLVGSPQWERLCAAAAEHRIFVVLGFCERQDGTLYIAQAIIDDEGRVVSTRRKLKPTHAERTVYGEGDGSHLSVHQTSIGRIGALSCAEHIQPLSKYAMYSQNEQIHVAAWPSFSVYRGAAFQLSPEANLAASQVYALEGGCYVLAPCALVSKEMLEMLADTPQKRQLLLEGGGFAQIFGPDAKPLCEPFPETQEGLLYADVDLGFIGVAKAAYDPTGHYSRPDVVRLLWNSKPATRVHSFQADPTEYNTQGE

SEQ ID NO: 30372 - protein, 532 aa, Thiobacillus denitrificans ATCC 25259
MVAGVNVLADAVKVTLGPKGRNVVLDRSFGAPTVTKDGVSVAKEIELKDKLENMGAQMVKEVASKTSDVAGDGTTTATVLAQSIVNEGMKFVAAGMNPMDLKRGIDKAVNAITEELKKISKPCTTSKEIAQVGSISANSDAPIGQIIADAMDKVGKEGVITVEDGSGLENELDVVEGMQFDRGYLSPYFINNADKQMAIMDDPFILLFDKKISNIRDLLPVLEQVAKAGKPLMIVAEDVDGEALATLVVNNIRGILKTCAVKAPGFGDRRKAMLEDMAILTGGTVIAEEVGLSLEKATLQDLGRAKRIEVGKENTTIIDGAGDGNAIKGRIAQINKQIEEVTSDYDKEKLQERKAKLAGGVAVIKVGAATEVEMKEKKARVEDALHATRAAVEEGIVPGGGVALLRAKAAAAAIKGDNHDQDAGVKIVLRAIEEPLRQIVKNCGDEPSVVVNKVLEGEGNFGYNAGTSEYGDMVAMGVLDPTKVTRTALQNAASIAGLMLTTDCMVADLPEDKAPAMPMGGGMGDMGGMGMM

SEQ ID NO: 30373 - protein, 242 aa, Escherichia coli
LKERKEGAFVPFVTLGDPGIEQSLKIIDTLIEAGADALELGIPFSDPLADGPTIQNATLRAFAAGVTPAQCFEMLALIRQKHPTIPIGLLMYANLVFNKGIDEFYAQCEKVGVDSVLVADVPVEESAPFRQAALRHNVAPIFICPPNADDDLLRQIASYGRGYTYLLSRAGVTGAENRAALPLDHLVAKLKEYNAAPPLQGFGISAPDQVKAAIDAGAAGAISGSAIVKIIEQHINEPEKML

SEQ ID NO: 30374 - protein, 82 aa, Thiobacillus denitrificans ATCC 25259
MEEERKTASGIVIPDTAAEKPDQGEIVAVGAGKKDDQGKLISLDVKVGDRVLFGKYAGQTVKVEGEELLVMREEDIMGVVEQ

SEQ ID NO: 30375 - protein, 332 aa, Brassica napus
MSPEEELQSNGSVASSTRNIVGVLKEHNYLGLSDCSSVGSSNLSGLADDDKATISLKATELTLGLPGSQSPARDTELNLLGPAKLDEKPFFPLLPSKDEMCSSSSHKNIASGNKRGFSDTMDKVPLYTEKNWMFPEAVVATQSVIKKEVAQNLPKGKLSTTNNSSSPPAAKAQIVGWPPVRSYRKNTLATTCKNSDEVDGKPGSGPLFVKVSMDGAPYLRKVDLRSYTNYGELSAALEKMFTTFTLGQCGTSGATGKDVRNETKLKDLLNGKDYVLTYEDKDGDWMLVGDFSWEIFIGVCKKLKIMKGCDAIGLAAAPAPAPRAMEKSKMRA

SEQ ID NO: 30376 - protein, 356 aa, Zea mays
MEKYELLKDIGAGNFGVARLMRNKETKELVAMKYIPRGQKIDENVAREIINHRSLRHPNIIRFKEVVLTPTHLAIVMEYAAGGELFDRICNAGRFSEDEARYFFQQLICGVSYCHSMQICHRDLKLENTLLDGSPAPRLKICDFGYSKSSLLHSKPKSTVGTPAYIAPEVLSRREYDGKTADVWSCGVTLYVMLVGGYPFEDPDDPKNFRKTIGRIMSIQYKIPEYVHVSQDCKELLSRIFVANSAKRITIREIRNHPWFLKNLPRELTEAAQAMYYKKDNSAPTYSVQSVEEIMKIVEKARTPPPSSTPVAGFGWAEEDEQEDSKEPDEEHEDGEDEYEKQVKQVHASGEFHLSC

SEQ ID NO: 30377 - protein, 180 aa, Acinetobacter sp. ADP1
MYKVLAGVGSIVRTLWMVFTHITRKRDTILYPEVPAEEIVPPRYRGRIVLTRDPDGEERCVACNLCAVACPVGCISLQKAEKEDGRWYPEFFRINFSRCIFCGMCEEACPTTAIQMTPDFELGEYVRQDLVYEKENLLISGPGKYPDYNFYRVAGMAIDGKEKGQAQKESAPIDVRSLLP

SEQ ID NO: 30378 - protein, 214 aa, Escherichia coli
DPGIEQSLKIIDTLIEAGADALELGIPFSDPLADGPTIQNATLRAFAAGVTPAQCFEMLALIRQKHPTIPIGLLMYANLVFNKGIDEFYAQCEKVGVDSVLVADVPIEESAPFRQAALRHNVAPIFICPPNADDDLLRQIASYGRGYTYLLSRAGVTGAENRAALPLNHLVAKLKEYNAAPPLQGFGISAPDQVKAAIDAGAAGAISGSAIVKI

SEQ ID NO: 30379 - protein, 381 aa, Arabidopsis thaliana
  misc_feature (293)..(293): Xaa can be any naturally occurring amino acid
  misc_feature (310)..(310): Xaa can be any naturally occurring amino acid
  unsure (1)..(381): unsure at all Xaa locations
MSFRSIVRDVRDSIGSLSRRSFDFKLSSLNKEGGKSRGSVQDSHEEQLVVTIQETPWANIPPELLRDVIKRLEESESVWPARRHVVACASVCRSWRDMCKEIVQSPELSGKITFPVSLKQPGPRDATMQCFIKRDKSNLTYHLYLCLSPALLVENGKFLLSAKRIRRTTYTEYVISMHADTISRSSNTYIGKIRSNFLGTKFIIYDTQPAYNSNIARAVQPVGLSRRFYSKRVSPKVPSGSYKIAQVSYELNVLGTRGPRRMHCAMNSIPASSLAEGGTVPGQPDIIVPRSIXSHESFRSITSSSSQKNXYDYSNDFSSARFSDILGPLSEDQEVVLEEGKERNSPPLVLKNKPPRWHEQLQCWCLNFRGRVTVASVKNFQ

SEQ ID NO: 30380 - protein, 359 aa, Arabidopsis thaliana
MTMMSDISQDLLEEILSRVPITSLRAVKSTCKRWKDLLNDPSFSKKYGGKRDNEFLAIMTSGSRASLMSVNLHGPRDNKDLEDPFIKQIGELNQDQIFKVFHCDGLLLCITNEDNTRLVVWNPYLAQTRCIQPIDKFYIYDWYCLGYDKDKNHKILVVYSPMFGRIEYEIYSFLSKSWIVLSFPTDWQISRDECLSLKGNTYFIAYKKMEVEEVGFQEFLLCFDFTNERFGPLLPLPFQCYNQTSLVLSTVQEEQLAVLCKRCDAYETKIWITTKIEPNAVSWSYFLKFDFKVDISGGSFFVDVEEKVAVLFCINREKEKGINNKTYMIGEDGYYKEVDLGESNWCPSMCSYVPSCVQV

SEQ ID NO: 30381 - protein, 128 aa, Brassica napus
MSVSNIGMMDGAYFVGRNEILAWINTTLQLSLAKVEEAASGAVACQLMDAAHPGAVPMHKVNFDAKNEYDMIQNYKVLQDVFNKLKITKHIEVNKLIKGRPLDNLEFMQWMKRYCDSVNGGFMTSYNA

SEQ ID NO: 30382 - protein, 208 aa, Triticum aestivum
MVSLKLQKRLAASVLKCGKGKVWLDPNEVSEISMANSRQNIRKLVKDGFIIKKPQKIHSRSRARRAHEAKQKGRHSGYGKRRGTREARLPTKILWMRRMRVLRRLLRKYREAKKIDKHMYHAMYMKVKGNMFKNKRVLMESIHKTKAEKTREKTLSDQFEAKRAKSKASRERKIARREERLAQGPREPTAAPAAAPAPAAAAPKKAKK

SEQ ID NO: 30383 - protein, 392 aa, Anabaena variabilis ATCC 29413
MAHVLTSEKVFPRMVELRRYLHSHPELAFEEKKTASIVIDELKRLGIPFWYGGVGSGIIGKLINAGQRAPTIALRADMDALPGQENTGLPFASLHPGKMHACGHDGHMAMVLGAAALLKENPPPGNVVFIFQPAEEKGAGAKVMIQSGALEGVNAIFGGHVTRHYQVGEIMVAKGVITAQSDGFTIRVKGRGGHGARPHEAVDAVVVAGLLIMAVQTLVSREINPAYPSVVTIGKVEAGSAGNVIAEEAILEGTIRTTNLDVQNHIIDGLKRIATAVGELHNARVEIEIRHGYPPVINTGKETEIARRAIVDILGSKGLVTMDYPSMGAEDFSFYLLHVPGCYVRFGACQQGCENIPLHSPSFDFDEEALKVGAAFFDRVVREAIAEYADNS

SEQ ID NO: 30384 - protein, 186 aa, Neurospora crassa
MSHTVNSSTMNPWEVEAYQQYHYDPRTAPTANPLFFHTLYAPGGYDIMGYLIQIMNRPNPQVELGPVDTSCALILCDLKQKDTPIVYASEAFLYMTGYSNAEVLGRNCRFLQSPDGMVKPKSTRKYVDSNTINTMRKAIDRNAEVQVEVVNFKKNGQRFVNFLTMIPVRDETGEYRYSMGFQCETE

SEQ ID NO: 30385 - protein, 207 aa, Arabidopsis thaliana
PRVREDVTSRDSPLSSRFFFFPLILSPSAFHFFANGHTSFIWPIFQNRCVYMIANLFHAPVGQDEAVIGCGIVASSESAGLAFKMKWQHRRKAQGLPIDKPNIVTGVNVQVCWEKFARYFEVELKEVKLSEDYYVMDPAKAVEMVDENSICVAAILGSTFTGEFEYLKLLNDLLAEKNAKTAWETPIHVDAASGGFIASMGEEYQCQ

SEQ ID NO: 30386 - protein, 327 aa, Zea mays
MDEINLLRQAQRQHQHHLMVRGIGEEIDLEIGPVDDPSFSGASLVAVTSTHDTVVHADDHKSLLIPCSQPGAADGLAPQQHLSQGEEHDGMLRSPSGHTKKKKKVVKKWREEWADTYKWAYVAVHDTTTRIFCSVCKEYGRKHRRNPYGNEGSRNMQMSALEEHNNSLLHKEALRLQMASKEKLQPPEIEGPVYVKALSKTAASILECVLRRDPHEAEYIQSIQETLKNALSLYKLGGAAGGSDFDPKGKSDNEIMRFCQSFMDELYRYLGPDQDFSAEDIGVGPREMGYLFGQYRRLSGHFQGNFTGPKIFWSGSSFRTEATGYGL

SEQ ID NO: 30387 - protein, 459 aa, Rickettsia akari str. Hartford
MEQYDVAVIGGGPSGYVAAIRAAQLRKKVVLIEKEHLGGVCLNWGCIPTKSLLKSAEVFEYTKHAKDYGIDSEGAEINIKKIVERSREISNKLAGGVKLLLKKNKVTVIDGVASLAGNKVVNINNKSTVKAENIIIATGARSRVLKGFEPDSKQIWTSKEAMIPRHVPKSMIIVGSGAIGIEFASFYNSIGVDVTVIEAHNRILPAEDTEISGIAHKNFEKKGIKIITNAKLIKQTKSKDKIEVELELSSKTQKLQAEILLMAVGITANTESLGLEKTKVKVENGYIVTNGLMQTAELGIYAIGDVAGVPCLAHKASHEGIIAAESIAGLKPYAINKHNIPGCTYSSPQIASVGLTEEAAKALGYELKIGKFPFMANGKALVIGDSDGLIKTIFDAKTGELLGAHMIGLEVTELIQGYVVSKNLEATELDLINTIFPHPTLSEMMHESVLAAYDRVVHV

SEQ ID NO: 30388 - protein, 370 aa, Carboxydothermus hydrogenoformans Z-2901
MKEIMQNEKLMEIVEKGKKRGVLTYNDLLDSLQNVDINSEQIDELYEYLANQGIEVVPEIPELELDSINSLDDDVDFKPSDIDEVDLDLTIPEGIAIDDPVRMYLKEIGRVPLLTPEEEIELAKRKEEGDEEAKRKLAEANLRLVVSIAKRYVGRGMLFLDLIQEGNLGLLKAVEKFDYRKGYKFSTYATWWIRQAITRAIADQARTIRIPVHMVETINKLIRVSRNLLQELGREPTPEEIAKEMGISEDKVREIMKIAQEPVSLETPIGEEEDSHLGDFVEDPDAKAPVEEASYTLLREQLDEVLKTLTEREQKVLRLRFGLDDGRARTLEEVGQIFGVTRERIRQIEAKALRKLRHPSRSKKLKDFLE

SEQ ID NO: 30389 - protein, 184 aa, Arabidopsis thaliana
MRRFLINQAKGLVDHSRRQHHHKSPSFLSPQPRPLASSPPALSRFFSSTSEMSASDSTSSLPVTLDSINPKVLKCEYAVRGEIVNIAQKLQEDLKTNKDAYPFDEIIYCNIGNPQSLGQLPIKFFREVLALCDHASLLDESETHGLFSTDSIDRAWRILDHIPGRATGAYSHSQGIKGLRDVIA

SEQ ID NO: 30390 - protein, 217 aa, Artocarpus heterophyllus
MAYSSLFSLSVLALLFSISSADTRKWFLAKGINQNPIGIIEAAVGVSEDLLNLNGMEAKNNEQSGISQTVIVGPWGAKVSTSSNGKAFDDGAFTGIREINLSYNKETAIGDFQVVYDLNGSPYVGQNHKSFITGFTPVKISLDFPSEYIMEVSGYTGNVSGYVVVRSLTFKTNKKTYGPYGITSGTPFNLPIENGLIVGFKGSIGYWLDYFSMYLSL

SEQ ID NO: 30391 - protein, 217 aa, Artocarpus heterophyllus
MAYSSLLSLSVLALLFSISSADTRKWFLAKGINQNPIGIIEAAVGVSEDLLNLNGMEAKNNEQSGKSQTVIVGSWGAKVSTSSNGKAFDDGAFTGIREINLSYNKETAIGDFQVVYDLNGSPYVGQNHKSFITGFTPVKISLDFPSEYIVEVSGYTGNVSGYTVVRSLTFKTNKKTYGPYGVTSGTPFNLPIENGLVVGFKGSIGYWLDYFSMYLSL

SEQ ID NO: 30392 - protein, 483 aa, Oryza sativa
SVNRTPKSQRKKNLPSKRRRANRLLKMQIFVKTLTGKTITLEVESSDTIDNVKAKIQDKEGIPPDQQRLIFAGKQLEDGRTLADYNIQKESTLHLVLRLRGGMQIFVKTLTGKTITLEVESSDTIDNVKAKIQDKEGIPPDQQRLIFAGKQLEDGRTLADYNIQKESTLHLVLRLRGGMQIFVKTLTGKTITLEVESSDTIDNVKAKIQDKEGIPPDQQRLIFAGKQLEDGRTLADYNIQKESTLHLVLRLRGGMQIFVKTLTGKTITLEVESSDTIDNVKAKIQDKEGIPPDQQRLIFAGKQLEDGRTLADYNIQKESTLHLVLRLRGGMQIFVKTLTGKTITLEVESSDTIDNVKAKIQDKEGIPPDQQRLIFAGKQLEDGRTLADYNIQKESTLHLVLRLRGGMQIFVKTLTGKTITLEVESSDTIDNVKAKIQDKEGIPPDQQRLIFAGKQLEDGRTLADYNIQKESTLHLVLRLRGGQ

SEQ ID NO: 30393 - protein, 162 aa, Chromobacterium violaceum ATCC 12472
MNSIRNFFKTFLLVELVKGLMVTGRYFFARKITVQFPEEKTPISPRFRGLHAQRRYANGEERCIACKLCEAVCPAMAISIESEQREDGTRRTSRYDIDLTKCIFCGFCEEACPVDAIVETHIFEYHGEKRGDLYYTKPMLLAIGDKYEAEIAANKAADAKYR

SEQ ID NO: 30394 - protein, 242 aa, Escherichia coli
RTERIEGAFVPFVTLGDPGIEQSLKIIDTLIEAGADALELGIPFSDPLADGPTIQNATLRAFAAGVTPAQCFEMLALIRQKHPTIPIGLLMYANLVFNKGIDEFYAQCEKVGVDSVLVADVPIEESAPFRQAALRHNVAPIFICPPNADDDLLRQIASYGRGYTYLLSRAGVTGAENRAALPLNHLVAKLKEYNAAPPLQGFGISAPDQVKAAIDAGAAGAISGSAIVKIIEQHINEPEKML

SEQ ID NO: 30395 - protein, 405 aa, Nostoc punctiforme PCC 73102
MINAIATKFRQLIAARKSPISYFDRHNHKNKTKRSIALYTCVGLVSAILALLLITSPGLAQKPEPQQSLKLQQPLLVATRVIPPFVLSNKGELSGFSIDLWRSIATQIGIESKLIEYSSVPELISAIKDNKVNLGIAAISITAEREQNFDFSLPIFASGLQIMVRNLESKNSAFPNILQLFFSTSLLQVIGVALVLIVIAAHIIWLSERNHKEGMISESYFPGIFKACWWAAATLATQADEMPKGVLGRFIAIVWMFIGVLFVAYFTASATTSLTVQQLQGDIRSIDDLPGKVVATTAGSTAATYLREHHISVLEVPKIEEAYKALQTKKADAVVFDAPVLLFYAANEGKGKVEIVGSILREESYGIILPNNSPYRKPINQALLNLKENGTYQSLYDKWFDPKNS

SEQ ID NO: 30396 - protein, 217 aa, Artocarpus heterophyllus
MAYSSLLSLSVLALLFSISSADTRKWFLANGINQNPIGIIEAAVGVSEDLLNLNGMEAKNDEQSGISQTVIVGPWGAKVSTSSNGKAFDDGAFTGIREINLSYNKETAIGDFQVVYDLNGSPYVGQNHKSFITGFTPVKISLDFPSEYIMEVSGYTGNVSGYVVVRSLTFKTNKKTYGPYGVTSGTPFNLPIENGLIVGFKGSIGYWLDYFSMYLSL

SEQ ID NO: 30397 - protein, 242 aa, Escherichia coli
SEERKEGAFVPFVTLGDPGIEQSLKIIDTLIEAGADALELGIPFSDPLADGPTIQNATLRAFAAGVTPAQCFEMLALIRQKHPTIPIGLLMYANLVFNKGIDEFYAQCEKVGVDSVLVADVPIEESAPFRQAALRHNVAPIFICPPNADDDLLRQIASYGRGYTYLLSRAGVTGAENRAALPLNHLVAKLKEYNAAPPLQGFGISAPDQVKAAIDAGAAGAISGSAIVKIIEQHINEPEKML

SEQ ID NO: 30398 - protein, 424 aa, Thermus thermophilus
MKSEPLSYLGKDGGPWEIFTEQVDRVVPYLGRLAPLAESLKRPKRVLIVDVPVRLDDGSVAYFEGYRVHHNTARGPAKGGVRYHPEVTLSEVMALAGWMTIKNAAVGLPYGGGKGGIRVDPRKLSPGELERLTRRYTSEIGILLGPDRDIPAPDVNTGEREMAWMMDTYSMNVGRTVPGVVTGKPIALGGSLGRRDATGRGVFITAAAAAEKIGLQVEGARVAIQGFGNVGNAAARAFHDHGARVVAVQDHTGTVYNEAGIDPYDLLRHVQEFGGVRGYPKAEPLPAADFWGLPVEFLVPAALEKQITEQNAWRIRARIVAEGANGPTTPAADDILLEKGVLVVPDVIANAGGVTVSYFEWVQDFNSYFWTEEEINARLERVVRNAFEAVWQVAQEKKIPLRTAAYVVAATRVLEARAPPGLYP

SEQ ID NO: 30399 - protein, 758 aa, Helicobacter hepaticus ATCC 51449
MSSILGFPRIGKNRELKKALESFWSGKCSSQELESVAKSLRAKHWEIQKGLDYVCVNDFSLYDNVLDLAYALNAKPYRFKDLEGLEGYFAMARGHQKGVACEMTKWFNTNYHYVVPELSDDDDYKANIENIKAQYNEALALGYQPKISLIGLFTFFGLSKIVKGDAAAIFNKLKNAYMDLIDEISALGSDVVVEFSEPIFALGFKDNKELFESLHCVYDRSVLECVYNEISKKGIKAIVSTFFEHSNELSEILLQTDIYGIGLDFIYGEKNKQSLELIGKSNKVLYAGVIDGRNIWVADIESKLALLEHIATFIPKDRIVVSSSCSLLHVPFSKEGEEKIDSQILSWFSFAQEKIQEISVLESVFKGRVDNQIQGFLQENKNINATRKNSDKTNNKAVRERVQNHTQNQRSVPFAQRIKLQKEQFNFPILPTTTIGSFPQTPELRALRLNYKKGEINKAQYEEGIKTYIRDCVKFQEEIGIDVLVHGEPERNDMVEYFGEQLEGFVFSQNAWVQSYGSRCVKPPIIFGDVARPKPMTLEWSKFAQSLTQKVMKGMLTGPVTILNWSFVRDDLERSAVCRQISLAIADEIDDLQKGGIKIIQVDEAAFKEGYPLRSENIKAYETWALECFKISTAVALPQTQIHTHMCYSEFNDIIKTIEALDADVISIETARSGNELLKVFKQVGYTHEVGPGVYDIHSPRIPSVEELNVQIKALLEVLPKEQLWINPDCGLKTRKWEEVKPSLKNIVEAVKSVRAAL

SEQ ID NO: 30400 - protein, 240 aa, Escherichia coli
ERKEGAFIPFVTLGDPGIEQSLKIIDTLIEAGADALELGIPFSDPLADGPTIQNATLRAFAAGVTPAQCFEVLALIRQKHPTIPIGLLMYANLVFNKGIDEFYAECEKVGVDSVLVADVPVEESAPFRQAALRHNVAPIFICPPNADDDLLRQIASYGRGYTYLLSRAGVTGAENRAALPLNHLVAKLKEYNAAPPLQGFGISAPDQVKAAIDAGAAGAISGSAIVKIIEQHINEPEKML

SEQ ID NO: 30401 - protein, 242 aa, Escherichia coli
LKERKEGAFVPFVTLGDPGIEQSLKIIDTLIEAGADALELGIPFSDPLADGPTIQNATLRAFAAGVTPAQCFEMLALIRQKHPTIPIGLLMYANLVFNKGIDEFYAQCEKVGVDSVLVADVPVEESAPFRQAALRHNVAPIFICPPNADDDLLRQIASYGRGYTYLLSRAGVTGAENRAALPLNHLVAKLKEYNAAPPLQGFGISAPDQVKAAIDAGAAGAISGSAIGKIIEQHINEPEKML

SEQ ID NO: 30402 - protein, 240 aa, Triticum aestivum
  misc_feature (142)..(142): Xaa can be any naturally occurring amino acid
  misc_feature (156)..(156): Xaa can be any naturally occurring amino acid
  misc_feature (213)..(213): Xaa can be any naturally occurring amino acid
  unsure (1)..(240): unsure at all Xaa locations
MNALAATSRNFKQAAKLLGLDSKLEKSLLIPFREIKVECTIPKDDGTLASYVGFRVQHDNARGPMKGGIRYHHEVDPDEVNALAQLMTWKTAVANIPYGGAKGGIGCSPGDLSISELERLTRVFTQKIHDLIGIHTDVPAPXLGTNAQTMAWILDXEYSKFHGYSPAVVTGKPVDLGGSLGRDAATGRGVLFATEALLAEHGQGIAGQRFVIXGFGNVGSWAAQLITEAGGKVIAISDVT

SEQ ID NO: 30403 - protein, 144 aa, Glycine max
MKRQRENEVTTLESWDMQICSTSITPDTSVSSSTISPEDVFECKTCNRKFNSFQALGGHRACHNKRVKMEGEEQQLKTRAKYLGLGKHSEPKMHNCSICGQGFSLGQALGGHMRRHRASTNDVFSSIKQVVAKVSVLKRSCNDK

SEQ ID NO: 30404 - protein, 242 aa, Escherichia coli
  misc_feature (217)..(217): Xaa can be any naturally occurring amino acid
  unsure (1)..(242): unsure at all Xaa locations
LKERKEGAFVPFVTLGDPGIEQSLKIIDTLIEAGADALELGIPFSDPLADGPTIQNATLRAFAAGVTPAQCFEMLALIRQKHPTIPIGLLMYANLVFNKGIDEFYAQCEKVGVDSVLVADVPVEESAPFRQAALRHNVAPIFICPPNADDDLLRQIASYGRGYTYLLSRAGVTGAENRAALPLNHLVAKLKEYNAAPPLQGFGISAPDQVKAAIDAXAAGAISGSAIVKIIEQHINEPEKML

SEQ ID NO: 30405 - protein, 523 aa, Candida albicans SC5314
MYQHQDQTQHQYYQQYNSYNPSIEDLIASSDDKRYQNGGIGNSLQRPPVAGLPYISSQVNPNTSSANLSKLTNNINNYGYNNNNNSYIQLHTPPLSSNPSFTSFQNLNYPLSPLSKPTSPEPILSAASVTTSNFLASSFFSWLPPIDVKIVSFCIGWYLCSIISSNSTKLILNDFKFPVTLTQFQFSASFTFCLVFLNIVKVNPESISSKLPPGFIPSMTDTNRISLSEFITPTRLIIQTTLPMGMFQFIGHITSHKATSLIPVSIVHTIKSLSPIITVLIYRFLFGKSYRMRTYVTLIPLCCGIMLTCYKKSHTSNQNNVPGAGSSVINNNLDKINTNNNYSTGLIFAFISMIIFVSQNIFAKKRLTVESTNAIPMNNKSSLRINSNKVDKLTILFYCSIIGFILTCPIYFVTEWMNYNAFGAISLLQLNSYVMSLVLLNGLSHFVQSLLAFQILGMVSPINYSIANILKRIFIILISFIWESKQFSNSQSIGLVITLFGLYCYDRWGTVSNSGSASNPGKY

SEQ ID NO: 30406 - protein, 345 aa, Escherichia coli O157:H7 EDL933
MVINCAFIGFGKSTTRYHLPYVLNRKDSWHVAHIFRRHAKPEEQAPIYSHIHFTSDLNEVLNDPDVKLVVVCTHADSHFEYAKRAMEAGKNVLVEKPFTPTLAQAKELFALAKSKGLTVTPYQNRRFDSCFLTAKKAIESGKLGEIVEVESHFDYYRPVAETKPGLPQDGAFYGLGVHTMDQIISLFGRPDHVAYDIRSLRNKANPDDTFEAQLFYGDLKAIVKTSHLVKIDYPKFIVHGKKGSFIKYGIDQQETSLKANIMPGEPGFAADDSVGVLEYVNDEGVTVREEMKPEMGDYGRVYDALYQTITHGAPNYVKESEVLTNLEILERGFEQASPSTVTLAK

SEQ ID NO: 30407 - protein, 249 aa, Zea mays
MGRRACCAKEGVKRGAWTSKEDDALAAYVKAHGEGKWREVPQKAGLRRCGKSCRLRWLNYLRPNIRRGNISYDEEDLIIRLHRLLGNRWSLIAGRLPGRTENEIKNYWNSTLGRRAGAGAGGSRVVVAPDTGSHATPAATSGSSETGQKGAAPRADPDSAGTTTTSAAAVWAPKAVRCTSGLFFFHRDTTPAHAGETATPMAGGGGVGGGGGEAGSSDDCSSAASVSPRVGSHDEPCFSGDGDGDSWTT

SEQ ID NO: 30408 - protein, 586 aa, Zea mays
MCGILAVLGVVEVSLAKRSRIIELSRRLRHRGPDWSGLHCHEDCYLAHQRLAIIDPTSGDQPLYNEDKTVVVTVNGEIYNHEELKAKLKTHEFQTGSDCEVIAHLYEEYGEEFVDMLDGMFSFVLLDTRDKSFIAARDAIGICPLYMGWGLDGSVWFSSEMKALSDDCERFITFPPGHLYSSKTGGLRRWYNPPWFSETVPSTPYNALFLREMFEKAVIKRLMTDVPFGVLLSGGLDSSLVASVASRHLNETKVDRQWGNKLHTFCIGLKGSPDLKAAREVADYLSTVHHEFHFTVQEGIDALEEVIYHIETYDVTTIRASTPMFLMSRKIKSLGVKMVISGEGSDEIFGGYLYFHKAPNKKEFLEETCRKIKALHLYDCLRANKATSAWGVEARVPFLDKSFISVAMDIDPEWNMIKRDLGRIEKWVMRKAFDDDEHPYLPKHILYRQKEQFSDGVGYNWIDGLKSFTEQQVTDEMMNNAAQMFPYNTPVNKEAYYYRMIFERLFPQDSARETVPWGPSIACSTPAAIEWVEQWKASNDPSGRFISSHDSAATDHTAVSRRWPTAAARPANGTVNGKDVPVPIAV

SEQ ID NO: 30409 - protein, 473 aa, Zea mays
WDPRGRPGPFSCPCPSPLFLYFFPPLASPRLRQVVDAMVVEMHAGLASDGGSKLKMLLTFVDALPAGNEEGTYYSIDLGGTNFRVLKVEVGAGSVVTRRKVELPIPEELTKGTIEELFNFVAVTLKEFVEAEDGKDEQRALGFTFSFPVRQTSVSSGSLIRWNKGFLIEDVVGKDVAQCLNEALARSGLNVRVTALVNDTVGTLALGHYHDEDTVAAVIIGAGTNACYIERTDAIIKCQGLLTNSGGMVVNMEWGNFWSSHLPRTPYDISLDDETQNRNDQGFEKMISGIYLGEIARLVLHRMALESDVFGDAADNLSTPFTLSTPLLAAIRKDDSPDLSEVRKILQDHLKIPDTPLKTRRLVVKVCDIVTRRAARLAAAGIVGILKKLGRDGSGVASSGRTGGQMRRTVVAIEGGLYEGYPVFREYLDEALVEILGEEVARTVALRVTVDGSGAGAALLAAVHSSNRQQGSI

SEQ ID NO: 30410 - protein, 305 aa, Schizosaccharomyces pombe
MGTSGIEIFAALNDFTDAIVSVPESVCGKFTSLKEIDAQVRDIRQNVIQEIGVVLKNEKNDELSGEERCERLQKTLKEILPYSDSKICLATDAMNNIKSCIDRLDAGFEYVELEIPQQLRLGYPDDRALMNYHSTVTPQTSERRRETRRHQNNQHSQQYSSQERSSSYNNFEDASSPQSSYHTPTKRRKNAVPRKSSSPPLSSTKHAPQSTERRPVRRSESRLKQTNGEPLVKHDTLDSSDISREGEQLYCYCQQVSYGQMIGCDNENCKREWFHLPCVGLVEPPKGIWYCKECEELAKSSESRQ

SEQ ID NO: 30411 - protein, 805 aa, Glycine max
MATDRLTRVHSLRERLDETLTANRNEILALLSRIEAKGKGILQHHQVIAEFEEIPEENRQKLTDGAFGEVLRSTQEAIVLPPWVALAVRPRPGVWEYLKVNVHALVVEELQPAEYLHFKEELVDGSSNGNFVLELDFEPFNAAFPRPTLNKSIGNGVQFLNRHLSAKLFHDKESLHPLLEFLRLHSVKGKTLMLNDRIQNPDALQHVLRKAEEYLGTVPPETPYSEFEHKFQEIGLERGWGDNAERVLESIQLLLDLLEAPDPCTLETFLGRIPMVFNVVILSPHGYFAQDNVLGYPDTGGQVVYILDQVRALENEMLHRIKQQGLDIVPRILIITRLLPDAIGTTCGQRLEKVFGTEHSHILRVPFRTEKGIVRQWISRFEVWPYLETYTEDVAHELAKELQGKPDLIVGNYSDGNIVASLLAHKLGVTQCTIAHALEKTKYPESDIYWKKLEERYHFSCQFTADLFAMNHTDFIITSTFQEIAGSKDTVGQYESHTAFTLPGLYRVVHGIDVFDPKFNIVSPGADQTIYFPPTETSRRLTSFHPEIEELLYSSVENEEHICVLKDRSKPIIFTMARLDRVKNITGLVEWYGKNAKLRELVNLVVVAGDRRKESKDLEEKAEMKKMYGLIETYKLNGQFRWISSQMNRVRNGELYRVICDTKGAFVQPAIYEAFGLTVVEAMTCGLPTFATCNGGPAEIIVHGKSGFHIDPYHGDRAADLLVDFFEKCKLDPTHWETISKAGLQRIEEKYTWQIYSQRLLTLTGVYGFWKHVSNLDRRESRRYLEMFYALKYRKLAESVPLAVE

SEQ ID NO: 30412 - protein, 699 aa, Oryza sativa
MLTFMELAGPTEGDGGGSVDSQLWAACAGSMSSVPPVGAAVYYFPQGHAEQASAAVDLSSARVPPLVPCRVVAVRFMADAESDEVFAKIRLVPLRPGDAVVDVGEAAAAEARREEENSRPRPTSFAKTLTQSDANNGGGFSVPRFCAETIFPELDYSREPPVQSVCAKDVHGVEWTFRHIYRGTPRRHLLTTGWSPFVNKKQLTAGDSIVFMRDEGGNIHVGLRRAKRGFCSIGGDDESLSSIPGWDQYRGLMRRNATATATGGRTPPKGKVPPENVLTAATRATTGQPFEVLYYPRASTPEFCVRAAAVRTAMAVQWCPGMRFKMAFETEDSSRISWFMGTVAGVQASDPVRWPQSPWRLLQVTWDEPELLQNVKRVCPWLVELVSSMPNLHLPSFSPPRKKPRNPPYAELPLEGQIFTGPVFPPNPMAHDHHHHHGFPFLPFPDSSAQPAGIQGARHAQFASPFPEFHIGNLQPNLMLYAGIRLPPADRAAPAPRPPRIIISTDLTIGSPGKPDDAACSPSSGGKKIDDTKPRGFLLFGQAILTEEQIKNGNSDGRPASPNWDAEKAPNTSEGSDSGVTQGSPTKNTTPSWSLPYFGGNNISRASEYELNPGQCKVFVESETVGRSLDLSALSSFEELYACLSDMFSIGSDELRSHLVYRSPAGEVKHAGDEPFCAFVKSARKLRILTDAGSDNLGD

SEQ ID NO: 30413 - protein, 676 aa, Ralstonia eutropha JMP134
MCGFAGFLGGIPGSLEDRAILLTRMGQRILHRGPDHGDLWCEPGAPFGFTHRRLAIVDLSPAGRQPMISASGRYVIVFNGEIYNHPEIRAELESAGAAPRWRGHSDTETLLAGIDAWGADATVRRTIGMFAFAVWDRQTHSLTLARDRLGEKPLYYGWQGSGQARAFLFGSELKALRPHPAFDGSIDRNALTLYMRYNNVGGGHSIYQGIAKLPPAHLLTVSMLAREPVLRAYWSGSAAALQGKQDPFTGGPQEAVDSLDALLRDAVARQMMADVPLGAFLSGGIDSSTVVALMQSQSTQPIRTFSIGFHDAGYNEAAHAKAVARHLGTSHTELYVSPEHAMAVIPRLPEIYDEPFSDSSQIPTLLVSGLARQHVTVSLSGDAGDELFGGYNRYQITAELWGRLARIPGPVRAAAAWGLTRLSPHQINRVAALLPMASRWSHVGEKVHKGAGVMAAHTVDELYRGMVSQWQCPDAIVMGGAEPATLPEPVARALAMLGDVERMMAADLLTYLPDDILTKVDRAAMARSLETRIPFLDHRVVEFAWRLPLAYKIRQEDAGHTTKWVLRRVLDRYVPRELIERPKMGFGVPIDAWLRGPLRDWADDLLSEERLRREGFLNPQPIRQRWTEHLSGRRNWQHPLWCVLMFQAWLGHETTERTAPPLTDIPTSDRRLACAF

SEQ ID NO: 30414 - protein, 496 aa, Oryza sativa (japonica cultivar-group)
MATCADTLGPLLGTAAANATDYLCNQFADTTSAVDSTYLLFSAYLVFAMQLGFAMLCAGSVRAKNTMNIMLTNVLDAAAGALFYYLFGFAFAFGAPSNGFIGKHFFGLKQVPQVGFDYSFFLFQWAFAIAAAGITSGSIAERTQFVAYLIYSAFLTGFVYPVVSHWIWSADGWASASRTSGSLLFGSGVIDFAGSGVVHMVGGVAGLWGALIEGPRIGRFDHAGRSVALRGHSASLVVLGSFLLWFGWYGFNPGSFLTILKSYGPPGSIHGQWSAVGRTAVTTTLAGSTAALTTLFGKRLQTGHWNVIDVCNGLLGGFAAITAGCSVVDPWAAIICGFVSAWVLIGLNALAARLKFDDPLEAAQLHGGCGAWGVIFTALFARKEYVDQIFGQPGRPYGLFMGGGGRLLGAHIVVILVIAAWVSFTMAPLFLVLNKLGLLRISAEDEMAGMDQTRHGGFAYAYHDDDASGKPDRSVGGFMLKSAHGTQVAAEMGGHV

SEQ ID NO: 30415 - protein, 258 aa, Clusia minor
CEEIGRGRFGVVYKCTKLSTNETYALKSIVKNSLNDDLLDARCLVTEPKILRHVSPHPHVTQLHDSHEDDCYLHLIIDLCPNGDLYTLLLSTGPIPEAQSKAQFVQLMKAVSHCHKSGVVHRDIKPDNILFDSRESLKLADFGSAECGKGSDLNGVVGTPYYVAPEILEGREYGEKVDVWSAGVVLYVMLAGFPPFYGETVVEIFEAVLRGNLRFPTRAFCTVSSSVKDLLRRILCRDVSRRFTADQVLRHPWVTSGG

SEQ ID NO: 30416 - protein, 260 aa, Clusia minor
CEEIGRGRFGVVYKCTKLSTNETYALKSIVKNSLNDDLLDARCLVTEPKILRQVSPHPHVTQLHDSHEDDCYLHLIIDLCPNGDLYTLLLSTGPIPEAQSKAQFVQLMKAVSHCHKSGVVHRDIKPDNILFDSRESLKLADFGSAEVICGKGSDLNGVVGTPYYVAPEILEGREYGKKVDVWSAGVVLYVMLAGFPPFYGETVVEIFEAVLRGNLRFPSRAFCTVSSSVKDLLRRILCRDVSRRFTADQVLRHPWVTSGG

SEQ ID NO: 30417 - protein, 243 aa, Brassica napus
  misc_feature (213)..(213): Xaa can be any naturally occurring amino acid
  misc_feature (222)..(222): Xaa can be any naturally occurring amino acid
  unsure (1)..(243): unsure at all Xaa locations
RPTRPGLQNLSSLGQNLKTSTYIWEICFAVFISISGLVLFSFLIGNMQTYLQSTTTRLEEMRVKRRDAEQWMAHRLLPESLRKRIRRYEQYKWQETRGVDEENLLSNLPKDLRRDIKRHLCLALLMRVPMFEKMDEQLLDALCDRLQPVLYTEESYIVREGDPVDEMLFIMRGKLLTMTTNGGRTGFFNSEHLGAGDFCGEELLTWALDPHTXSNLPISTRXTVRALVEVEAFALKADDLKFV

SEQ ID NO: 30418 - protein, 388 aa, Streptomyces coelicolor A3(2)
MTVMEQRGAYRPTPPPAWQPRTDPAPLLPDTEPYRVLGTKAADRADTELLRTLYARLVRGRRYNAQATALTKQGRLAVYPSSTGQEACEIAAALALEERDWLFPSYRDTLAVVSRGVDPVEALTLLRGDWHTGYDPYEHRVAPLSTPLATQLPHAVGLAHAARLKGDDVVALAMVGDGGTSEGDFHEALNFAAVWRAPVVFLVQNNGFAISVPLDKQTAAPSLAHKAVGYGMPGRLVDGNDAAAVHEVLSDAVRHARAGGGPTLVEAVTYRVDAHTNADDATRYRGDAEVETWRRHDPVELLERELTERGLLDEDGIRAAREDAETMAADLRARMNQDPELDPLELFAHVYAEPTPQLREQRDQLRAELAAEAETAARQAGALEGGRR

SEQ ID NO: 30419 - protein, 331 aa, Triticum aestivum
  misc_feature (280)..(280): Xaa can be any naturally occurring amino acid
  unsure (1)..(331): unsure at all Xaa locations
MSRGSICWLLLAVALAAAAVEAGRTRPLLPGRPARPGKRNARFFDDGRVVELALDRETGSRLESKDRYLFGRFDLDIRLVAGESAGTITSFYICTGGARHDEVDFEFLGNVSGEPYILHTNIFSDGKGEREQQFVLWFDPTADFHTYSILWNPLNIILYIDGTPIRVFKNNEANGVPFPTRQPVHVFASIWNAEEWATQGGRVKTDWSEAPFVAAYRRVDATSACVWQGEASPTRCGGEHLPSSASSWMAQRLDWWSWMTLNWVRMNYMTYDYCADRKRXPHAFPTECIIPSPGLIWSDAVHQFVHAYLGVEKIRLSSVIVCLQDWFLRGQ

SEQ ID NO: 30420 - protein, 796 aa, Crocosphaera watsonii WH 8501
MEIVKQLKQIVIILLVFAVVNLCLLSFQSYQMTKYGRVVNFSGIVRGASQKLVKNELSNYPKDQEIEKINAIIQGLIKGDKTLDLPLVKNKIFQVKISIVQEKWTDLKAEIIAFREGKSTKQQLLQISEDFWIVTNDATFASENTASSHIQSLRKLYLVLFLINLTVLTFVWKINKKISLNIKDRIRAEISLKSSEEKFQQLANNINEVFWMTDINFREIIYVSPAYEKIWGKTCESLYLDINQWKNSIYPQDVSFFDRVLENFLINQEGTFYLEYRILSSDNQIYWIHHRGFLIKNIENQAYRIAGIAEDITQKKNIEICLREELKQTILLQTITKKIRASLEIETILNNTAHILAIKMKIDSCLIYTYIGDDQFQLNLIGTNINKNIRHYDFLNQLDKDDSYLKRIIDEDKAVVINKIEEEPLLISNQHLLQAENIKSLLTIRTSYKQNINGVIELHQYDKIHNWQPKDIKLIEAVASQLGIAIAQANLLAENKKQLEKLNQQNIQLQEKSKQAEAANKAKTNFLANMSHEIRTPLNAILGFSDLLSQKIIDPENVNHLQSIIFSSNNLLALINDIFELIRLESGIVKVESETVNLTEIIRQIYYKFSEKANQKNIKLIVNLNKNIPDILEFDKLKLYQIINNLLSNAIKFTKLGSVKVDVWANYFQSDLKTRQENCSIVIRIKDTGIGISQEKQKIIFDRFTQVSQETNREYEGIGLGLTLTQKMIQLLEGNLKLESELEKGTTITVTLPHLNIIQLSNQKALNLITETQLTTQEQKNIGQQKKLVLSNYQNS

SEQ ID NO: 30421 - protein, 242 aa, Escherichia coli
LKESKEGAFVPFVTLGDPGIEQSLKIIDTLIEAGADALELGIPFSDPLADGPAIQNATLRAFAAGVTPAQCFEMLALIRQKHPTIPIGLLMYANLVFNKGIDEFYAQCEKVGVDSVLVADVPVEESAPFRQAALRHNVAPIFICPPNADDDLLRQIASYGRGYTYLLSRAGVTGAENRAALPLNHLVAKLKEYNAAPPLQGFGISAPDQVKAAIDAGAAGAISGSAIGKIIEQHINEPEKML

SEQ ID NO: 30422 - protein, 153 aa, Emericella nidulans
MTSEQTFIAIKPDGVQRGLVGPIISRFENRGFKLAAMKLTSPSRSLLEQHYSDLKEKPFFPGLVTYMLSGPIVAMVWEGKDVVKTGRTILGATNPLASAPGTIRGDFAIDVGRNVCHGSDSVESAKKEIGLWFTPEEIQNYKLNAFGWIYEKE

SEQ ID NO: 30423 - protein, 242 aa, Escherichia coli
LKERKEGAFVPFVTLGDPGIEQSLKIIDTLIEAGADALELGIPFSDPLADGPAIQNATLRAFAAGVTPAQCFEMLALIRQKHPTIPIGLLMYANLVFNKGIDEFYAQCEKVGVDSVLVADVPVEESAPFRQAALRHNVAPIFICPPNADDDLLRQIASYGRGYTYLLSRAGVTGAENRAALPLNHLVAKLKEYNAAPPLQGFGISAPDQVKAAIDAGAAGAISGSAIGKIIEQHINEPEKML

SEQ ID NO: 30424 - protein, 242 aa, Escherichia coli
  misc_feature (6)..(6): Xaa can be any naturally occurring amino acid
  unsure (1)..(242): unsure at all Xaa locations
LKESKXGAFVPFVTLGDPGIEQSLKIIDTLIEAGADALELGIPFSDPLADGPTIQNATLRAFAAGVTPAQCFEMLALIRQKHPTIPIGLLMYANLVFNKGIDEFYAQCEKVGVDSVLVADVPVEESAPFRQAALRHNVAPIFICPPNADDDLLRQIASYGRGYTYLLSRAGVTGAENRAALPLNHLVAKLKEYNAAPPLQGFGISAPDQVKAAIDAGAAGAISGSAIGKIIEQHINEPEKML

SEQ ID NO: 30425 - protein, 259 aa, Bacillus thuringiensis serovar konkukian str. 97-27
MKVACIQMDIVFGDVEKNIENAKNKISEAMKERPDVIVLPELWTTGYDLTRLSEIADKDGLETKEKLIEWSKQYGVHIVGGSIAKQTKQGVTNTMYVVTNKGELVNEYSKVHLFQLMDEHKYLIAGNSTGEFKLDDVECAGTICYDIRFPEWMRVHTAKGAKVLFVVAEWPLVRLAHWRLLLQARAVENQCYVVACNRAGKDPNNEFAGHSLIVDPWGEVVVEANKEESILFGELTFEKIKEVRKGIPVFADRRPELYK

SEQ ID NO: 30426 - protein, 372 aa, Zea mays
  misc_feature (155)..(155): Xaa can be any naturally occurring amino acid
  misc_feature (285)..(285): Xaa can be any naturally occurring amino acid
  unsure (1)..(372): unsure at all Xaa locations
MVKVIQGRPAEMGFRMPAEWEPHEQCWMGWPERPDNWRENAGPAQEVFARTAIAISKFEPVTLCASAKQYPKVHELMEHETNIRVVEMSMNDSWFRDMGPTFVTHKGDSGIAEQTIAGIDWQFNAWGGIYDDWSLDSDVAKKIVEIERIPRFPQXIILEGGSIHVDGEGTCITTEECLLNPNRNPNMTKLEIENELKDFLGVSKVIWIPRGLYGDEDTNGHVDNLCCFIKPGVILLSWTDDEKDHQYERSVEALSVLSQSVDAKGRQLQVVKIHVPGPLYMTEEXAQGVVSSGHSVPRPAGTRLAASYVNFYIANGGIIAPSFGDRWDEEAYAVLQKAFPDHEVVMVEGGREIALGGGNIHCITQQQPVRPS

SEQ ID NO: 30427 - protein, 412 aa, Helicobacter pylori 26695
MRRIVVTGMGMINSLGLNKEDSFLAIAKGECGIKHIESFDASAFPVRIAGEITDFDPTEVMNPKDVKKAGRFIQLALKATREAMKDSGILDAHNRCPEELANRMGVSSGSGIGGLGNIEANSIFCFEKGPRKVNPFFITSALVNMIGGFTSIEFGIKGPNLSSVTACAAGTHAIIEAVKTILLNGADKMLVVGAESTICPVGIGGFASIKALSTRNDDPKKASRPFDKDRNGFVMGEGAGALVLEEYESAKRRGAKIYAEFAGYGESGDANHITAPAPEGEGAFRAMKMALEMAKVEIGYVNAHGTSTHYNDLYESIALKNVFGSKEKVPPVSSTKGQIGHCLGAAGALEAVISIMAMNQGILPPTINQEMPDPECDLDYIPNAAREKRVDAVMSNSFGFGGTNGVVIFKKA

SEQ ID NO: 30428 - protein, 473 aa, Acinetobacter sp. ADP1
MRGIYVAIFLENLSRIEVSAMNTKATSPEHEHLGLTKNLTYGFQHVLTMYGGLIAAPLVVGLGIGLSQADIGLLITASILVAGLATLLQTLGFKWFGSRLPIVQGTSFAAVASMIAIGANGGSFQSILGAIIVSSIFGIIVAPFFSKIVRFFPPIVTGSIIAIIGISLLPVAIRWIMGGNPKAPNWGSLENLGLAGITLVFLLLLTKFGSTSIKRLAVLLSIIFGAIVAFAFGLADFSKVSQGAWMALPNILGFGMPVFEWPAILSMCIVTLVILTETTASLLAIGEIVETKVDNHRIADGLRADMLSSALAPFFGAFMQCAFVQNVGLVAITGVKSRFVVATAGGILVVLGLLPVFGRLVASIPMPVLGGAGLVLFGSVAVSGIRTLSKVDYQLQSNMIIVAVSLGAGLIPLISPEFFHSMPGAVQTLFHSGISITCIMALLLNLFFNHLNFGKKTVSEGLTKPSATAQNHL

SEQ ID NO: 30429 - protein, 151 aa, Cryptococcus neoformans var. neoformans JEC21
MSDIYSYSVEFPKSTLPLSDLKGKTLLFVNVASKCGLTPQYKDLQALHEKYGDKGLAIIGFPCNQFKAQEPGTDDEVLQFCQVNYGVTFPIAKKGDVNGENTQPIWKYLKENAEPPVSDIDWNFSKFLVKDGKITWFPARSTKVSDVEAAL

SEQ ID NO: 30430 - protein, 83 aa, Rhodospirillum rubrum
PERVVHARGFGAHGTFETYEDLSALTSADIFQRAGEKTPAFVRFSTVAGNLGSSDVARDVRGFAVKLYTKQGNWDIVGNNTPV

SEQ ID NO: 30431 - protein, 452 aa, Mycobacterium avium subsp. paratuberculosis K-10
MSSTKHREVAKLDRVPLPVEAARVAATGWQVTRSAARVLTKLPAKGPWQQKVIKQLPQTFADLGPTYVKFGQIIASSPGAFGESLSREFRGLLDRVPPADPDEVHKLFLEELGADPSELFASWDETPFASASIAQVHYATLHTGEEVVVKIQRPGIRRRVAADLQILKRFAQAVELAKLGRRLSAQDVVADFSDNLAEELNFRLEAQSMEAWVSHLHASPLGKNIRVPQVYWDFTTDRVLTMERVSGIRIDDVAAVRKAGFDGVELVKALLFSLFEGGLRHGLFHGDLHAGNLYVDEAGRIVFFDFGIMGRIDPRTRWLLRELVYALLVKKDHAAAGKIVVLMGAVGTVKPEAQAAKDLEKFATPLTMQTLGDMSYADIGRQLSALADAYDVKLPRELVLIGKQFLYVERYMKLLAPKWQMMSDPQLTGYFANFMVEVSREHSSEFESDVEV

SEQ ID NO: 30432 - protein, 243 aa, Schizosaccharomyces pombe
MADAEDSRHSKNEGFPNTSLITEKLDLLDLFGSPKVKTEREGRPARLLEGLSAVNAETAFVKTHPLQHEWTLWFLKPPTQGLEWSDLLKEIISFKTVEEFWGIFKTISKASMLPAKSDYSYFLKGIRPEWEDPQNMNGGKWAYQSKHKGSNLDELWLYMVLAAIGETLDPTGKEVTGVVCNMRKGFYRIAVWTRNCNDKDVLEKIGLRFKEVLGISDKETIEYSAHEDSSKAGSMRAKTRMSL

SEQ ID NO: 30433 - protein, 419 aa, Bordetella pertussis Tohama I
MSSIETYMQSVGEQARTASRAMMRATGAAKNQALLAMAEAILAQRAELQAANAKDVAAARANGLEAALLDRLTLSDRSIELMAEGLRQIAALPDPGGSITATSVRPNGMRVAQMRVPLGVIGIIYESRPNVTIDAAALCLKSGNATILRGGSEALHSNVALGRIVQAGLQAAGLPTAAVQVIDTTDRAAVGKLVTMTEHVDVIVPRGGKGLISRLAQEARVPLIKHLDGNCHVYVDAAADLAKAHDIAFNAKTYRYGVCGAMETLLVHADVAQRLLPALGQALREHGVELRGCARALQWLPEGKPADDADWATEYLGPILAVRVVDTIDEAMDHISRWGSGHTDAIVTENLSAAQRFQREVDSSSVYVNLPTCFADGFEYGLGAEIGISTNRLHARGPVGLEGLTTLKWVLNGEGQVRA

SEQ ID NO: 30434 - protein, 431 aa, Leptospira interrogans serovar lai str. 56601
MSMDKPKTNHNSRVAITGIGVILPNTYSVDTFWKNLSEGNSQIDTITRFSTDDMPVKVAAEMNDFDWKKFLPDLDEKHSKHYNRETFAIMSAMEEARRDAKLEKDSVDPSKVGFIDSSSRASLAWWEHAWKLYHEEKDPNVFDRYSVLTSMASNPTNLTAIYANVQGFVTTITAACVGGHHAISLCYQAIRKGRAEVMYAGGHEFPLIKPLMMMYSDPVSSVMSSEKDNPKSAIKPYDRNRDGFILGEGAAVLCMERMDHAIARGARIYAEVLGTFSYNEADHAMRMDLTGKKAANGLNRLLKISGLNLGDIDYFCGHGTATINNDMAESRALKILYNGLARNKWAPLGSIKPIFGHTFGAAGIINVAATALMLEKQILCPTINLKDVDPECDHDHITDGARKVRLRNAISMAFAIGSQSSFVSLTAPDLL

SEQ ID NO: 30435 - protein, 127 aa, Lycium californicum
  misc_feature (78)..(78): Xaa can be any naturally occurring amino acid
  unsure (1)..(127): unsure at all Xaa locations
VWGKTASKIYGPKVGQDWVDNELRFSFLCQAALEAPRVLNLNCSKYFSGPYGEDVLFIANDWHTALIPCYLKSMYHSXGIYLNAKVAFCIHNIAYQGRFPFSDFSLLNLPDEYRSSFDFIDGYEKPI

SEQ ID NO: 30436 - protein, 460 aa, Pseudomonas putida KT2440
MASQDNKKQRSLQHGLTSRQVSMISIAGIIGAGLFIGSSNAIATAGPAILISYAMTGLLVLLVMRMLGEMAIANPNSGSFSTYASEAIGPWAGFTIGWLYWWFWVLIIPVEAIAGADILHAYFPGVPSWLFAFLIMLVLSGTNLVSVKNFGAFEYWFALVKVVAIIGFIGVCTLAVFGFWPLAEVSGVSRLWDSGGFMPNGFGTVLGGVLITIFSFFGAEIVTIAADETANPKDKIRRATNLVVYRIAIFYLASIFLVVSLVAWNDPGLKAVGSFQRVLEVLNVPGAKLLVDLVVLVAVTSCMNSGLYTASRMLYSLGARGQALSVTKRISGSGVPTVAVIFSTLAGFAGCFVNYVFPGKVFGFLLSTTGAIALLVYLVIAVSQLRMRARAEREGRPLELKMWLFPWLTWLVIGTIVMVLGYMLFSDAYRYETLMTAGVTAFILLVSLTQRRAKMVAQTA

SEQ ID NO: 30437 - protein, 458 aa, Photorhabdus luminescens subsp. laumondii TTO1
MKRKHLFLSALAISIGLSAISVPTISNAALPAAIAGQTLPSLAPMLEKVLPAVVSVHVSGTQVQQEQSIPEEFRFFFGPNLPMGRESTRPFQGLGSGVIIDAAKGYILTNNHVIENADKIRVQLNDGREYEAKLLGRDPQTDIALLQLKDAKNLTAITMADSDKLRVGDFAVAVGNPFGLGQTATSGIISALGRSGLNLEGLENFIQTDASINRGNSGGALVNLNGELIGINTAILAPGGGNIGIGFAIPSNMAKTLSEQLIAHGEVKRGILGIKGTEMNSDIAKAFNIDAQRGAFVSEVLPKSAAAKAGIKSGDILISVDGKKISSFAELKAKIGTTIPGKEIKIGLLRKGKPMEVSVTLENSEGQTTKAGNLTLALQGATLSNGEVKGTYGVKIDSVAQNSPAALSGLQKNDLIVGINNERIQNINELRKVIDSKPPVIALNILRGEESIYLLLRN

SEQ ID NO: 30438 - protein, 730 aa, Mycobacterium sp. JC-1
MRPPEADEPKGRNRDSDSRCDPCRAQFDTVGVELDNRGPACRGHRPGAGRGCVEKVGNGHPGTAMSLAPAAYLLFQKLMRHDPRDPDWVGGDRFILSPGHSSVTLYIQLFLAGYGLELEDLKSFRTWGSLTPGHPEYKHTKGVEITTGPLGQGLASSVGFAYSQRRMRGLLDPDAAPGTSPFDHTIWVIASDGDLQEGVTSEASSLAGHQELGNLVVVYDENHISIEDDTDISFTEDVLGRYESYGWHVQRVDWTRTGEYREDVEELFAALLARRRKPRSRPSFVRTIIGYPAPKKQNTGKIHGSALGAEEVAAVKEVLGFDPAKSFDVDPAILAHARAAIDRGAAARSEWDESFQSWQAANPDAAALLRRIEARQLPDGVDAVLPVFEAGKDVSTRAASGKVLNALGPVLPELWGGSADLAESNNTTIEGSPSFIPVSRSANAWKGNPYGRVLHFGIREQLPRSIVNGISLHGPTRAFSGTFLIFSDYQRPAIRLSALMGVPSVYVWSHDSIGLGEDGPTHQPVEQLSTLRAIPGLDVVGPGDANEVGIAWKTILENHENPAGVVLTRQNIPTFARGEGAAEGDTFASAAGVAKGGYVLAEASRDGATVPAQVLLIATGSEVQLAVQAREALQAEGIPTRVISMPCVEWFNKQDAAYRESVLPAAVTARVSVEAGLALGWKEFVGDAGRSVSLEHFGASADYKRLFQEFGITADAVVAAAKDSITAAGN

SEQ ID NO: 30439 - protein, 591 aa, Chlamydomonas eugametos
MAAKFVEGTLDVTLKSASDLREDMSVKLDAYCVVSCASTAHRSNTVTDAGKTMNWEQTFHFDKVASTSVLKLESSMRRTPSDRSSCACKIPLTRACTSGSDEVCVPVLDKKGKPIGETHVSMTFKATSMADGPTKGNWILPTYANKDCWKDYEQGKVVGKGSFGTTYLVTKKDTQEQYAVKVISKRKLTTMEEVEDIQREVRIMHHLAGHPNVVQLKNVYEDKSYVYLVMDACMGGELFDAIVERGTYSEKDARALMRTIVSVVAHCHDMGVIHRDLKPENFLLLDKSANPVLKSIDFGLSSFYQEGQVFHDIVGSPFYVAPEVVRRSYGKEADIWSCGVILYILLCGYPPFHGDNETKIFEAIMNKSLDFQSDPWPKVSEPAKECIRRMLDRNPKTRASAQQTLEHEWMRENGVATEKRLEMEVLTSMKKFSAGNRLKKEAAKIIAANLPTDEICGLREMFIAIDVDHSGSITAEEFANALRMKGNSLPEDEVQRLVSNADVDGDGTCDYEEFLAATINQSKLEREDRLKIAFEHFDLDHDGSITHDELMQSLANLGINDAGIKEIIADVDRDGNGQIDYNEFCLMMRNL

SEQ ID NO: 30440 - protein, 352 aa, Photorhabdus luminescens subsp. laumondii TTO1
MIAKLLRSAFLGLLIAVILLMTIPSLRPSGLTSAITNNSNDEVPFSFNKGVRRAAPAVVNVYSSNMGSFSHQGRENHTLGSGVIMSDKGYILTNKHVINNAGQIIVALQDGHFYEALVIGSDSLTDLAVLKIDAENLPVITINPNRVAHVGDVVLAIGNPYNLGQTITQGIISATGRVGLSPTRRQNFLQTDASINQGNSGGALINTLGELVGINTLSFDKSENGETPEGLGFAIPTELATKIMQKLIRDGRVIRGFIGITSQELPHIRSSNGSINQIQGLRVFQVTTNGPAQKVGIKVGDIITSVNNKPAISAVETMDQVAEIRPGSVVPVTLLRNGKILSLQVTIEEFES

SEQ ID NO: 30441 - protein, 103 aa, Lycium californicum
  misc_feature (85)..(85): Xaa can be any naturally occurring amino acid
  unsure (1)..(103): unsure at all Xaa locations
VWGKTASKIYGPKVGQDWVDNELRFSFLCQAALEAPRVLNLNCSKYFSGPYGEDVLFIANDWHTALIPCYLKSMYHSKGIYLNAXVAFCIHNIAYQGRFPFSD

SEQ ID NO: 30442 - protein, 386 aa, Leuconostoc mesenteroides subsp. mesenteroides ATCC 8293
AAGKASKPKSAKKSGPLKNPEYDKATKALIAEYKAAKQITYAALSKRLAEPFNLDEENIERLMEKVEDAGIAIVDDNGDPAPEVLKAKQNKPTDQELAEAEETPAGIKINDPVRMYLKEIGRVNLLKGNEEIDIAKRIENGDVEAKQELAEANLRLVVSIAKRYVGRGMQFLDLIQEGNMGLMKAVDKFDYTKGFKFSTYATWWIRQAITRAIADQARTIRIPVHMVETINKLIRIQRQLLQDLGREPLPEEIGAEMDLTADKVREILKIAQEPVSLETPIGEEDDSHLGDFIEDNEAVSPADSAAYEMLREQLESVLDTLTDREENVLRLRFGLEDGRTRTLEEVGRVFGVTRERIRQIEAKALRKLRHPSRSKQLKDFMDESTN

SEQ ID NO: 30443 - protein, 355 aa, Arabidopsis thaliana
MTIECVNPEGLRFNQMKSSSHQTLETRMRPILMKGHERPLTFLRYNRNGDLLFSCAKDHTPTVWFADNGERLGTYRGHSGAVWCCDISRDSSRLITGSADQTAKLWDVKSGKELFTFKFGAPARSVDFSVGDHLAVITTDHFVGTSSAIHVKRIAEDPEDQVGDSVLVLQSPDGKKKINRAVWGPLNQTIVSGGEDAAIRIWDAETGKLLKQSDEEVGHKEAITSLCKAADDSHFLTGSHDKTAKLWDMRTLTLIKTYTTVVPVNAVAMSPLLNHVVLGGGQDASAVTTTDHRAGKFEAKFYDTILQEEIGGVKGHFGPINALAFSPDGKSFSSGGEDGYVRLHHFDSNYFNIKI

SEQ ID NO: 30444 - protein, 131 aa, Lycium californicum
VWGKTASKIYGPKVGQDWVDNELRFSFLCQAALEAPRVLNLNCSKYFSGPYGEDVLFIANDWHTALIPCYLKSMYHSKGIYLNAKVAFCIHNIAYQGRFPFSDFSLLNLPDEYRSSFDFIDGYEKPIIGRK

SEQ ID NO: 30445 - protein, 516 aa, Glycine max
MASACVTLKSNTHLANSEKGFLGERIKGGFNNSALVMNQLAIRSRSHKRVKHGVGVVSAVLTSNNAKESLTLQVPSFLRRRADPKNVISIILGGGPGTQLFPLTKRAATPAVPVGGCYRLIDIPMSNCLNSGINKIFVLTQFNSASLNRHIARTYFGNGINFGDGIVEVLAATQTPGEAGKNWFQGTADAVRQFTWVFENTNVENVLILAGDHLYRMDYMDLVQSHVDRNADITVSCAAVGDSRASDYGLVKVDDRGRIIQFSEKPNGDDLKAMQADTSLLGLSPQDALKSPYIASMGVYVFKTDVLLNLLKWRYPTSNDFGSEIIPAAVRDHDVQSYFFEDYWEDIGTIKSFYDANLALTEESHKFEFYDPKIPIYTSPGFLPPTKIDKCQIVDAIISHGCFLRECTVQHSIVGERSRLDYGVELLDTVMMGADYYQTESEIASLLAEGKVPIGIGRNTKIRNCIIDKNAKIGKDVIIANKDGVQEADRPEDGFYIRSGITIIMEKATIEDGTVI

SEQ ID NO: 30446 - protein, 153 aa, Brassica napus
NKEDFPVDYENAMFFVIKSYSEDDVHKSIKYNVWASTPNGNKKLAAAYEEAQQKPGGCPIFLFFSVNASGQFVGLAEMTGPVDFDTNVEYWQQDKWTGSFPLKWHIVKDVPNSLLKHITLENNENKPVTNSGDTQEVKLEQGLKIVKIFKEHT

SEQ ID NO: 30447 - protein, 453 aa, Nocardioides sp. JS614
MPPSTPAVLWFRRDLRLADNPALVEAAADGPVLPLFVLDPVLWGPAGAARRAYLGASLRALDASLRERGTRLSVVRGDPARLVPRAARAVGAARVHVAADFGPYGSRRDGAVEQALTGAGAELVRTGSPYAVAPGRVTNTAGAPYRVFTPFHRAWAEHGWRGPVGVPEGTGWLRLAEGTAEIPDPALPDGLTLPAAGEAAARRRWAEFLDRVDEYAEDRDRPAVDGTSQMSAHLKWGEIHPRTMLADLARRRGAGAATYRKELAWREFYADVLHARPETARQYLRPEFARMRYDEPGEHLDAWRHGRTGFSVVDAGMRQLRATGWMHNRVRMITASFLVKDLHLEWQLGARHFLRWLVDGDLASNQHGWQWTAGCGTDAAPYFRVFNPTAQGRRFDPRGEYVRRWVPELADPDVVADPHDPSPSERQAVGYPEPIVDHAAERREALGRWERIR

SEQ ID NO: 30448 - protein, 537 aa, Nocardioides sp. JS614
MAGMDLNDQTHGAGPEWWRHAVTYQIYVRSFADADGDGIGDLSGITARLEHVRDLGVDAIWLNPFYVSPQRDAGYDVADYCDIDPLFGTLADADAMVERAHELGLRVIVDLVPNHTSSEHAWFQKALAAGPGSPERDRYLFRDSPDGPPNNWKSVFGGPAWTQVADGQWYLHLFDSTQPDLNWRNPEVGDMFVDVLRFWLDRGVDGFRVDVAHGLFKEETLRDQVVPEGVESATGASAGESGGESMVERTEADEPMWDQPEVHEVYRRWHEVLAKYDGDRMMVAEAWTQSPESMARYIRADEFSQAFNFAWLLAPWSAKAFAEVITGTFEAVDQVDASPTWVLSNHDVDRHPSRYGGGATGLARARAATLTMLALPGSAYLYQGEELGLEQVEVEPEFRQDPLWFRTGNPGRDGCRVPMPWSGAEPPFGFGPGAGQPWIPQPAEWSGLTVEAQTADPVSTLSFYRAALAARRTFSETAGEEVEMVEAGTDVLSFRRGPITVVLNCSTEAVGLPAGEVLMASGPVNGSLPPDTAVWLR

SEQ ID NO: 30449 - protein, 186 aa, Triticum aestivum
  misc_feature (156)..(156): Xaa can be any naturally occurring amino acid
  misc_feature (164)..(164): Xaa can be any naturally occurring amino acid
  unsure (1)..(186): unsure at all Xaa locations
AWSRPRYSKKHMNDFPELIEMKRRANTRSLKEMALLLRGGSHIIWIAPSGGRDRPDPLTGEWHPAPFDASAVDNMRRLLEHSGVPGHIYPLSLLCYEIMPPPQQIEKEIGEQRVISFHGVGLSVAEEIKYGDVTAQSRNADEARGTFSEALYQPGXGPNNVLKXAIFRDRGAVSSNPAISLSQPWG

SEQ ID NO: 30450 - protein, 242 aa, Escherichia coli
LKERKEGAFVPFVTLGDPGIEQSLKIIDTLIEAGADALELGIPFSDPLADGPTIQNATLRAFAAGVTPAQCFEVLALIRQKHPTIPIGLLMYANLVFNKGIDEFYAECEKVGVDSVLVADVPVEESAPFRQAALRHNVAPIFICPPNADDDLLRQIASYGRGYTYLLSRAGVTGAENRAALPLNHLVAKLKEYNAAPPLQGFGISAPDQVKAAIDAGAAGAISGSAIVKIIEQHINEPEKML

SEQ ID NO: 30451 - protein, 242 aa, Escherichia coli
  misc_feature (176)..(176): Xaa can be any naturally occurring amino acid
  misc_feature (200)..(200): Xaa can be any naturally occurring amino acid
  unsure (1)..(242): unsure at all Xaa locations
LKERKEGAFVPFVTLGDPGIEQSLKIIDTLIEAGADALELGIPFSDPLADGPTIQNATLRAFAAGVTPAQCFEVLALIRQKHPTIPIGLLMYANLVFNKGIDEFYAECEKVGVDSVLVADVPVEESAPFRQAALRHNVAPIFICPPNADDDLLRQIASYGRGYTYLLSRAGVTGAXNRAALPLNHLVAKLKEYNAAPSLXGFGISAPDQVKAAIDAGAAGAISGSAIVKIIEQHINEPEKML

SEQ ID NO: 30452 - protein, 281 aa, Oryza sativa (japonica cultivar-group); identical to SEQ ID NO: 1359

SEQ ID NO: 30453 - protein, 242 aa, Escherichia coli
LKERKEGAFVPFVTLGDPGIEQSLKIIDTLIEAGADTLELGIPFSDPLADGPTIQNATLRAFAAGVTPAQCFEMLALIRQKHPTIPIGLLMYANLVFNKGIDEFYAQCEKVGVDSVLVADVPVEESAPFRQAALRHNVAPIFICPPNADDDLLRQIASYGRGYTYLLSRAGVTGAENRAGLPLNYLVAKLKEYNAAPPLQGFGISAPDQVKAAIDAGAAGAISGSAIVKIIEQHINEPKKML

SEQ ID NO: 30454 - protein, 210 aa, Triticum aestivum
  misc_feature (61)..(61): Xaa can be any naturally occurring amino acid
  misc_feature (71)..(71): Xaa can be any naturally occurring amino acid
  misc_feature (97)..(97): Xaa can be any naturally occurring amino acid
  misc_feature (111)..(111): Xaa can be any naturally occurring amino acid
  unsure (1)..(210): unsure at all Xaa locations
MAPTVMGGAATSVAPFQGLKSTAGLPVSRRSNGASLGSVSNGGRIRCMQVWPIEGIKKFEXTLSYLPPLKXTEALLKQVDYLIRSKWVPCLEFSKVXGFIFREHNASPWVXYNGRYWAMWESCPMFGCTDATQVNHEVEEVKKDHPDAYVRIIGINNMRQGQGVTFFALQPTGLQRNPERPKRLTPDGPYKKGLWHFVNPEIALGLSFPN

SEQ ID NO: 30455 - protein, 136 aa, Glycine max
KLTEYLKKHHREFRHINNLPVNSVIHPIHDQILYLNEKHKKQLKQEFGVEPWTFEQHLGDAVFVPAGCPHQVRNRKSCIKVALDFVSPENVQECIRLTEEFRLLPKGHRSKEDKLEIKKMALYAADVAITEATKLM

SEQ ID NO: 30456 - protein, 242 aa, Escherichia coli
LKERKEGAFVPFVTLGDPGIEQSLKIIDTLIEAGADALELGIPFSDPLADGPTIQNATLRAFAAGVPPAQCFEMLALIRQKHPTIPIGLLMYANLVFNKGIDEFYAQCEKVGVDSVLVADVPVEESAPFRQAGLRYNVAPIFICPPNADDDLLRQIASYGRGYTYLLSRAGVTGAENRAALPLNHLVAKLKEYNAAPPLQGFGISAPDQVKAAIDAGAAGAISGSAIVKIIEQHINEPKKML

SEQ ID NO: 30457 - protein, 242 aa, Escherichia coli
LKERKEGAFVPFVTLGDPGIEQSLKIIDTLIEAGADALELGIPFSDPLADGPTIQNATLRAFAAGVTPAQCFEMLALIRQKHPTIPIGLLMYANLVFNKGIDEFYAQCEKVGVDSVLVADVPVEESAPFRQAALRHNVAPIFICPPNADDDLLRQIASYGRGYTYLLSRAGVTGAKNRAALPLNHLVAKLKEYNAAPSLQGFGIFAPDQVKAAIDAGAAGAISGSAIVKIIEQHINEPEKML

SEQ ID NO: 30458 - protein, 451 aa, Pseudomonas putida KT2440
MAFDFDLFVIGAGSGGVRAARFAAGFGAKVAVAESRYLGGTCVNVGCVPKKLLVYGAHVADELEQAAGFGWTLEEGHFDWGTLIANKNREIERLNGIYRNLLVNSGVTLLQGHARLTGANEVEVDGQRYTAEHILIATGGWPQVPDIPGKELAITSNEAFYLKDLPRRVLVVGGGYIAVEFAGIFQGLGADTTLLYRGDLFLRGFDGSVRTHLKQELEKRGLDLQFNADIQRIDKLEDGRLKATLKDGRELVADCVFYATGRRPMLDNLGLENTGVELDERGYIRVDEQYQTTAPSILAIGDVIGRVQLTPVALAEGMAVARRLFKPEQYRPVDYQNIPTAVFSQPPIGTVGLTEEQALEAGHKVQVFESRFRAMKLTLTDIQEKTLMKLVVDAETDKVLGCHMVGPDAGEIIQGLGIALKAGATKQQFDETIGVHPTAAEEFVTMRTVTR

SEQ ID NO: 30459 - protein, 166 aa, Oryza sativa
MALVEDNNAVAVSFSEEQEALVLKSWAILKKDSANIALRFFLKIFEVAPSASQMFSFLRNSDVPLEKNPKLKTHAMSVFVMTCEAAAQLRKAGKVTVRDTTLKRLGATHLKYGVGDAHFEVVKFALLDTIKEEVPADMWSPAMKSAWSEAYDHLVAAIKQEMKPAE

SEQ ID NO: 30460 - protein, 771 aa, Oryza sativa (japonica cultivar-group)
MAAILPDLATQVLVPAAAVVGIAFAVVQWVLVSKVKMTAERRGGEGSPGAAAGKDGGAASEYLIEEEEGLNEHNVVEKCSEIQHAISEGATSFLFTEYKYVGLFMGIFAVLIFLFLGSVEGFSTKSQPCHYSKDRMCKPALANAIFSTVAFVLGAVTSLVSGFLGMKIATYANARTTLEARKGVGKAFITAFRSGAVMGFLLAASGLVVLYIAINLFGIYYGDDWEGLFEAITGYGLGGSSMALFGRVGGGIYTKAADVGADLVGKVERNIPEDDPRNPAVIADNVGDNVGDIAGMGSDLFGSYAESSCAALVVASISSFGINHEFTPMLYPLLISSVGIIACLITTLFATDFFEIKAVDEIEPALKKQLIISTVVMTVGIALVSWLGLPYSFTIFNFGAQKTVYNWQLFLCVAVGLWAGLIIGFVTEYYTSNAYSPVQDVADSCRTGAATNVIFGLALGYKSVIIPIFAIAFSIFLSFSLAAMYGVAVAALGMLSTIATGLAIDAYGPISDNAGGIAEMAGMSHRIRERTDALDAAGNTTAAIGKGFAIGSAALVSLALFGAFVSRAAISTVDVLTPKVFIGLIVGAMLPYWFSAMTMKSVGSAALKMVEEVRRQFNSIPGLMEGTTKPDYATCVKISTDASIKEMIPPGALVMLSPLIVGIFFGVETLSGLLAGALVSGVQIAISASNTGGAWDNAKKYIEAGASEHARTLGPKGSDCHKAAVIGDTIGDPLKDTSGPSLNILIKLMAVESLVFAPFFATHGGILFKWF

SEQ ID NO: 30461 - protein, 308 aa, Brucella suis 1330
MILCCGEALIDMLPRETTGGETAFQPFAGGSVFNTAIALGRLGVPTGFFSGISSDFFGDVLRDTLARSNVDYSFAAISNRPTTLAFVRLVDGQARYAFYDENTAGRMLSRNDMPYVDETISAMLFGCISLISEPCGSVYETLLAREAPNRVMFLDPNIRANLITVRETHLTRMKRMIALADIVKLSDEDLDWFGEKGSHDEIAAEWLKLGPKLVVITKGAHGAVVYTNHATVPVPGVKVDVVDTVGAGDTVNAGILASLHSQGLLTKDALANLSEDQIHSAVALGVRAAAVTVSRAGANPPWAHEMRD

SEQ ID NO: 30462 - protein, 600 aa, Cryptococcus neoformans var. neoformans JEC21
MLRTPFTLSSRSTDSVFKIRQSLSIVLSHASTKIISRGYITIPTTSTVASHRPTIQRFKMTIAVPARTLSSSQPLKRSTSPLPAITPAQNLLRLKAHLQNLPTPLLKHVHLSKIRREDPNLFFSVMRDELTELAPIVYTPTVGEACQKYSQIYSGPEGLYLNIEDKDRIPEILHQYASKLVAPPQILVVTDGSRILGLGDLGIGGMGISVGKLNLYVAGGGVNPHGCLPVVLDMGTNNEAVRNDPLYIGLKQPRVGLEEATEFMDAFMAAASEAFPKAVIQHEDFYSEAAFDFLARYKEKYRMFNDDIEGTGSVILAGFLAAAKHASEASGKPLRDHKVVFLGGGSAAVGVAKEMMNFFMMQGLTEDEARERFWLIDTKGLITSTRADVVSGKVASHKKFFIRNDTEGKEYPSLESVIEYVQPTALVGLSTTFGAFSESAVRRMAELNQSPIIFPLSNPTSKCELAFSDALEWTDGRVLFASGSPYAPQQFKGTFREPGQGNNFLVFPGIGFGALQAGCKRITTGMITASAIALSEALTPEEKQKGLLYPRLERIRAVSARVAAGVVKQAQEDGVDTNEKLRGLDIETLTEEMNKAQWWP

SEQ ID NO: 30463 - protein, 130 aa, Lycium californicum
VWGKTASKIYGPKVGQDWVDNELRFSFLCQAALEAPRVLNLNCSKYFSGPYGEDVLFIANDWHTALIPCYLKSMYHSKGIYLNAKVAFCIHNIAYQGRFPFSDFSLLNLPDEYRSSFDFIDGYEKPIMGR

SEQ ID NO: 30464 - protein, 138 aa, Lycium californicum
VWGKTASKIYGPKVGQDWVDNELRFSFLCQAALEAPRVLNLNCSKYFSGPYGEDVLFIANDWHTALIPCYLKSMYHSKGIYLNAKVAFCIHNIAYQGRFPFSDFSLLNLPDEYRSSFDFIDGYEKPIMGRKINWMKAG

SEQ ID NO: 30465 - protein, 1303 aa, Arabidopsis thaliana
MVFKNKLFFSSKKSGSSSPDSSNSPRSVGSNSPIRSDKKKSKSASKDEPPIPIPGFVGVGCKQTQIKDGLKKKDGSSKGKQLSSEVQAHSIGKSNLSPSSEVKKPPPPEVKEGPAFVSPIMASSLGLNRIKTRSGPLPQERVFNYRNDPATSNLSKMGADGGDLGSGSATSGSGSGNRKKEAGSSKLGLEENMDRTRPSDNKSDRDSLSPDTGPPRSLSPTLPPSGSRLQNVASSSGTGRSEMSSGRSGPLRNSDFCTPENSYEWENPKESESPRYQALLRMTSAPRKRFPGDIKSFSHELNSKGVRPFPLWKPRRSNNVENLIVCLFQEVLNLIRAKFEKAKEEVNSDLAVFAADLVGVLEKNAESHPEWEETFEDLLILARSCAMTTPGDFWLQCEGIVQDLDDRRQELPPGVLKQLHTRMLFILTRCTRLLQFHKESWGEEEQVVQLRQSRVLHSIEKIPPSGAGRSYSAAKVPSTKKAYSQEQHGLDWKEDAVVRSVPPLAPPENYAIKESESPANIDRMSSWKKLPSPALKTVKEAPASEEQNDSKVEPPNIVGSRQGRDDAAVAILNFPPAKDSHEHSSKHRHNISWGYWGEQPLISEESSIMCRICEEEVPTTHVEDHSRVCTLADKYDQKGLSVDERLMAVAGTLDKIAETFRHKDSLAAAESPDGMKVSNSHLTEESDVLSPRLSDWSRKGSEDMLDCFPEADNSIFMDDLRGLPLMSCRTRFGPKSDQGMTTSSASSMTPRSPIPTPRPDPIEQILGGKGTFHDQDDIPQMSELADIAKCAADAIPGDDQSIPFLLSCLEDLRVVIDRRKFDALTVETFGTRIEKLIREKYVHMCELMDDEKVDLLSTVIDEDAPLEDDVVRSLRTSPVHPRDRTSIDDFEIIKPISRGAFGRVFLAKKRTTGDLFAIKVLKKADMIRKNAVESILAERDILINVRNPFVVRFFYSFTCRDNLYLVMEYLNGGDLYSLLRNLGCLEEDIVRVYIAEVVLALEYLHSEGVVHRDLKPDNLLIAHDGHIKLTDFGLSKVGLINSTDDLAGPAVSGTSLLDEEESRLAASEEQLERRKKRSAVGTPDYLAPEILLGTGHGATADWWSVGIILFELIVGIPPFNAEHPQQIFDNILNRKIPWPHVPEEMSAEAHDIIDRFLTEDPHQRLGARGAAEVKQHIFFKDINWDTLARQKAAFVPASESAIDTSYFRSRYSWNTSDEQFFPSGEVPDYSDADSMTNSSGCSSNHHEEGEDIPCGPAEFETSVSENYPFDNFSFKNLSQLAYINYNLMSKGHKDETQPSLQRR

SEQ ID NO: 30466 - protein, 626 aa, Candida albicans SC5314
MRFIVSSFIFFISFLSSLITAETHTWYFKTSWVDANPDGVFPRKMIGFNDSWPLPTLRAKKGDRIQLYLINGFEDLNTTLHFHGLFQHGTNQMDGPEMVTQCPIPPGETYLYNFTIDDQVGTYWYHSHTSGQYGDGMRGVFIIEDDDFPYDYDEEIVLTLSEHYHDYSKDLMPGFLSRFNPTGAEPIPSNILFNETRNNTWKVEPGKTYLLRIANTGRFVTQYLWMEDHEFTVVEVDGVYVEKNTTDMLYITIAQRYGVLITTKNSTDKNYAFMNRVDDTMLDTIPKDLQLNGTNYIVYNESAPLPDAYDVDSIDDYLDDFYLKPLNKEKLLDDADYTITVDVQMDNLGNGVNYAFFNNITYMTPKVPTLLNVLSAGDASTNELVYGSNTNSFVLQGGDVVDIVLNNLDTGRHPFHLHGHVFQLIERHEEIPDTEDPVSYNVSDHAEWPEYPMSRDTVYVKPQSYIVMRFKADNPGVWFFHCHIEWHLDQGLAIVLIEDPEAIQKNSSQHLTDNHKQICEKVGVSWEGNAAANSNNYLDLKGENIQVKRLPTGFTARGIVALVFSCIAAFLGIAAIAYYGMNDIEDVEERVARDLDVDLDEENEDEEEAEIVNEGSSSSGSNSKQH

SEQ ID NO: 30467 - protein, 1230 aa, Candida albicans
MSILSENNPTPTSITDPNESSHLHNPELNSGTRVASGPGPGPEVESTPLAPPTEVMNTTSANTSSLSLGSPMHEKIKQFDQDEVDTGETNDRTIESGSSDIDDSQQSHNNNNNNNNNNNESNPESSEGDDEKTQGMPPRMPGTFNVKGLHQGDDSDNEKQYTELTKSINKRTSKDSYSPGTLESPGTLNALETNNVSPAVIEEEQHTSSLEDLSLSLQHQNENARLSAPRSAPPQVPTSKTSSFHDMSSVISSSTSVHKIPSNPTSTRGSHLSSYKSTLDPGKPAQAAAPPPPEIDIDNLLTKSELDSETDTLSSATNSPNLLRNDTLQGIPTRDDENIDDSPRQLSQNTSATSRNTSGTSTSTVVKNSRSGTSKSTSTSTAHNQTAAITPIIPSHNKFHQQVINTNATNSSSSLEPLGVGINSNSSPKSGKKRKSGSKVRGVFSSMFGKNKSTSSSSSSNSGSNSHSQEVNIKISTPFNAKHLAHVGIDDNGSYTGLPIEWERLLSASGITKKEQQQHPQAVMDIVAFYQDTSENPDDAAFKKFHFDNNKSSSSGWSNENTPPATPGGSNSGSGSGGGGAPSSPHRTPPSSIIEKNNVEQKVITPSQSMPTKTESKQSENQHPHEDNATQYTPRTPTSHVQEGQFIPSRPAPKPPSTPLSSMSVSHKTPSSQSLPRSDSQSDIRSSTPKSHQDVSPSKIKIRSISSKSLKSMRSRKSGDKFTHIAPAPPPPSLPSIPKSKSHSASLSSQLRPATNGSTTAPIPASAAFGGENNALPKQRINEFKAHRAPPPPPSAPPAPPVPPAPPANLLSEQTSEIPQQRTAPSQALADVTAPTNIYEIQQTKYQEAQQKLREKKARELEEIQRLREKNERQNRQQETGQNNADTASGGSNIAPPVPVPNKKPPSGSGGGRDAKQAALIAQKKREEKKRKNLQIIAKLKTICNPGDPNELYVDLVKIGQGASGGVFLAHDVRDKSNIVAIKQMNLEQQPKKELIINEILVMKGSSHPNIVNFIDSYLLKGDLWVIMEYMEGGSLTDIVTHSVMTEGQIGVVCRETLKGLKFLHSKGVIHRDIKSDNILLNMDGNIKITDFGFCAQINEINSKRITMVGTPYWMAPEIVSRKEYGPKVDVWSLGIMIIEMLEGEPPYLNETPLRALYLIATNGTPKLKDPESLSYDIRKFLAWCLQVDFNKRADADELLHDNFITECDDVSSLSPLVKIARLKKMSESD

SEQ ID NO: 30468 - protein, 516 aa, Neurospora crassa
MSSNDAPVYTLAEGRPVQDPSAATVLMGSKPRGGALSLLADTQLIETLAHFPRERIPERVVHAKAAGAWGEFECTEDVSDFTSVDFLNKVGKKTKVLARISTVAGEKGSADTVRDIRGFAVKFFTEEGNWDFVGNDLPVFFIRDPVKFPSLNRSHKRHPQTNVPDSTMFWDFHNNNQEGVHCLMQLFGGRGIPASLRNVNAFGNHTYKFGKPEDGTFKYVKIHLKPDAGIKNLESDEALRLAGEEPDFHIKDMYNAIERGDYPTWTMYFQIMDPKDAETYRYNIFDITQTWSHRDYPLRPIGKLRLNKNPENHFQDIEQAAFSPSTMVPGIGPSADPMLQARMFSYPDAARYRVGPNYQQLPCNRALHVYSPYQRDGPMRVDGNYGGDPDYVRSSFRPMRFGPPDVAHDEWAGKVALFTSEVTDLDFEQPRDLWKIFKETGEDKRFAKNVAAHVGKALPEVQKKTIEMFSKVDQEVGEAIQRELDELEKKGGAGIEHDKAPVKGKGMRCKDSKDDE

SEQ ID NO: 30469 - protein, 445 aa, Rubrobacter xylanophilus DSM 9941
MTQEPQGRSDGAASTVQKDGSLSVTDNRTGRSYEIEIKDGTVRSMDFRQIKVDEDDFGLMTYDPGYTNTASCRSAITYIDGERGILQHRGIPIEELCEHSTYLEVAYLLIHGHLPTEEELSQWVYDITHHTYVHENIKSFMDGFRHDAHPMGILLASVGALSTFYPEASDIDDEEQRNMAAIRLIAKMPTIAAFAYRHSLGLPYVYPDNDLSYTGNFLSMLFKMAEPKYEPDPRLEKALDVLFILHADHEQNASTSAVRTVGSTRADPYTAVAAGVAALYGPLHGGANVAVLKMLQRIGSVKNIPDFLETVKQGKERLMGFGHRVYKNYDPRARIIKSHVDEVLEATGKESPWLDIAVELEKRALDDEYFTSRKLYPNVDFYSGLIYEALGIPTEAFTVMFAIPRTSGWIAQWMEMLRDPELKIARPRQIYTGPRDQHYVPMSER

SEQ ID NO: 30470 - protein, 148 aa, Lycium californicum
VWGKTASKIYGPKVGQDWVDNELRFSFLCQAALEAPRVLNLNCSKYFSGPYGEDVLFIANDWHTALIPCYLKSMYHSKGIYLNAKVAFCIHNIAYQGRFPFSDFSLLNLPDEYRSSFDFIDGYEKPIMGRKINWMKAGILESHRVVTV

SEQ ID NO: 30471 - protein, 479 aa, Pseudoalteromonas haloplanktis
MSTNSCCSSDNSQPEQLHVAIIGSGSGAFASAIKAAEGGARVTIIEGADVIGGCCVNVGCVPSKILIRAAQLAHQQRTNPFDGLENIQPQLSRSLLAHQQTARVEELRGAKYQSILENNPALSLLKGYARFKNENTLLVQMADGSEEELVADRILIATGSTPSIPPIDGLVDTPYWTSTEALFSDVLPSSLVVIGSSVIALEIAQAYARLGSSVTVLARHTLLYAEDPLLGEKLTECFEKEGIRVLNNTQANHVSYSNNGFPLETNEGTLTAEKLLISTGRHANTDKLGLENVGVETDKSGAIVVNSMMETSTANIYAAGDCSNMPQFVYVAAAAGSRAGINMTGGNAQLDLSTMPAVIFTDPQVATVGLTEEQAITGGFEVISRVLDMENVPRALANFETDGFIKLVADKSTGKILGAQILAHEGGELIQSAALAIHNKMTVEELAGQLFPYLTMVEGLKLCAQTFSKDVKELSCCAG

SEQ ID NO: 30472 - protein, 419 aa, Gloeobacter violaceus PCC 7421 [sequence omitted]

SEQ ID NO: 30473 - protein, 381 aa, Pinus taeda
MDSNMNGLAKSNGCEISRDGFFESEEEELQGQAEAWKCTFAFAESLAVKCVVLLGIPDMIAREGPRATLSLCEIVANLPTESPDAACLFRIMRFLVAKGIFPASKSARRRAFETRYGLTPASKWLVKGRELSMAPMLLMQNDETTLAPWHHFNECVLEGGVAFQKANGAEIWSYASDHPDFNNLFNNAMACNARIVMKAILSKYQGFHSLNSLVDVGGGTGTAVAEIVRAYPFIRGINYDLPHVVATASSLSGVQHVGGDMFETVPTADAIFMKWIMHDWNDEDCIKILKNCRKAIPDTGKVIIVDVVLDADQGDNTDKKRKKAVDPIVGTVFDLVMVAHSSGGKERTEKEWKRILLEGGFSRYNIIEIPALQSVIEAFPR

SEQ ID NO: 30474 - protein, 396 aa, Escherichia coli
  misc_feature (1)..(1): Xaa can be any naturally occurring amino acid
  unsure (1)..(396): unsure at all Xaa locations
XFENITAAPADPILGLADLFRADERPGKINLGIGVYKDETGKTPVLTSVKKAEQYLLENETTKNYLGIDGIPEFGRCTQELLFGKGSALINDKRARTAQTPGGTGALRVAADFLAKNTSVKRVWVSNPSWPNHKSVFNSAGLEVREYAYYDAENHTLDFDALINSLNEAQAGDVVLFHGYCHNPTGIDPTLEQWQTLAQLSVEKGWLPLFDFAYQGFARGLEEDAEGLRAFAAMHKELIVASSYSKNFGLYNERVGACTLVAADSETVDRAFSQMKAAIRANYSNPPAHGASVVATILSNDALRAIWEQELTDMRQRIQRMRQLFVNTLQEKGANRDFSFIIKQNGMFSFSGLTKEQVLRLREEFGVYAVASGRVNVAGMTPDNMAPLCEAIVAVL

SEQ ID NO: 30475 - protein, 334 aa, Arabidopsis thaliana
MATATSHQSVVSFASLRSSPSSTISQCGFKIDSSLSFTSKKTNFCKIKAMASSVSYDNTLLSPSKTIPDNSQKKSNEAALILIRHGESLWNEKNLFTGCVDVPLTEKGVEEAIEAGKRISNIPVDVIFTSSLIRAQMTAMLAMIQHRRKKVPIILHDESEQAKTWSQVFSDETKNQSIPVIPAWQLNERMYGELQGLNKQETAERYGKEQVHEWRRSYDIPPPKGESLEMCAERAVAYFQDNIEPKLAAGKNVMIAAHGNSLRSIIMYLDKLTCQEVISLELSTGIPLLYIFKEGKFMKRGSPVGPTEAGVYAYTKRLAQYRQKLEDDSEVLCA

SEQ ID NO: 30476 - protein, 48 aa, Pinus sylvestris
TPNGTFVSMGVYSDGSYDVPPGIIFSYPVTCENGSWSIVPGLPINEFS

SEQ ID NO: 30477 - protein, 396 aa, Escherichia coli
MFENITAAPADPILGLADLFRADERPGKINLGIGVYKDETGKTPVLTSVKKAEQYLLENETTKNYLGIDGIPEFGRCTQELLFGKGSALINDKRARTAQTPGGTGALRVAADFLAKNTSVKRVWVSNPSWPNHKSVFNSAGLEVREYAYYDAENHTLDFDALINSLNEAQAGDVVLFHGFCHNPTGIDPTLEQWQTLAQLSVEKGWLPLFDFAYQGFARGLEEDAEGLRAFAAMHKELIVASSYSKNFGLYNERVGACTLVAADSETVDRAFSQMKAAIRANYSNPPAHGASVVATILSNDALRAIWEQELTDMRQRIQRMRQLFVNTLQEKGANRDFSFIIKQNGMFSFSGLTKEQVLRLREEFGVYAVASGRVNVAGMTPDNMAPLCEAIVAVL

SEQ ID NO: 30478 - protein, 534 aa, Cucumis sativus
MALAFDEYGRPFIILKEQEQKTRLRGLDAQKANIASGKAVARILRTSLGPKGMDKMLQSPDGDVTITNDGATILEQMDVDNQIAKLMVELSRSQDYEIGDGTTGVVVMAGALLEQAERLLERGIHPIRVAEGYELASRIAVDHLEHIAQKFDFGEKNIEPLIQTCMTTLSSKIVNRCKRSLAEIAVKAVVAVADLERRDVNLDLIKVEGKVGGKLEDTELVYGIIVDKDMSHPQMPKQIEDAKIAILTCPFEPPKPKTKHKVDIDTVEKFQTLRLQEQKYFDDMVQKCKDVGATLICQWGFDDEANHLLMHRNLPAVRWVGGVELELIAIATGGRIVPRFQELTSEKLGKAGLVREKSFGTTKDRMLYIEHCANSRAVTIFIRGGNKMMIEETKRSIHDALCVARNLIRNNSIVYGGGSAEISCSVAVETAADKYPGVEQYAIRAFADALDAVPMALAENSGLQPIETLSAVKSQQIKENNPYCGIDCNDIGTNDMREQNVFETLIGKQQQILLATQVVKMILKIDDVISPSDY

SEQ ID NO: 30479 - protein, 396 aa, Escherichia coli
MFENITAAPADPILGLADLFRADERPGKINLGIGVYKDETGKTPVLTSVKKAEQYLLENETTKNYLGIDGIPEFGRCTQELLFGKGSALINDKRARTAQTPGGTGALRVAADFLAKNTSVKRVWVSNPSWPNHKSVFNSAGLEVREYAYYDAENHTLDFDALINSLNEAQAGDVVLFHGWCHNPTGIDPTLEQWQTLAQLSVEKGWLPLFDFAYQGFARGLEEDAEGLRAFAAMHKELIVASSYSKNFGLYNERVGACTLVAADSETVDRAFSQMKAAIRANYSNPPAHGASVVATILSNDALRAIWEQELTDMRQRIQRMRQLFVNTLQEKGANRDFSFIIKQNGMFSFSGLTKEQVLRLREEFGVYAVASGRVNVAGMTPDNMAPLCEAIVAVL

SEQ ID NO: 30480 - protein, 48 aa, Pinus sylvestris
TPKGTFVSMGVYSDGSYDVPPGIIFSYPVTCENGSWSIVPGLPINEFS

SEQ ID NO: 30481 - protein, 242 aa, Escherichia coli
LKERKEGAFVPFVTLGDPGIEQSLKIIDTLIEAGADALELGIPFSDPLADGPTIQNATLRAFAAGVTPAQCFEMLALIRQKHPTIPIGLLMYANLVFNKGIDEFYAQCEKVGVDSVLVADVPVEESAPFRQAALRHNVAPIFICPPNADDDLLRQIASYGRGYTYLLSRAGVTGAENRAALPLNHLVAKLKEYNAAPSLQGFGISAPDQVKAAIDAGAAGAISGSAIVKIIEQHINEPEKML

SEQ ID NO: 30482 - protein, 112 aa, Arabidopsis thaliana
MASKQLSREELDEKAKQGETVVPGGTGGHSLEAQEHLAEGRSKGGQTRKEQLGHEGYQEIGHKGGEARKEQLGHEGYKEMGRKGGLSTMEKSGGERAEEEGIEIDESKFTNK

SEQ ID NO: 30483 - protein, 428 aa, Arabidopsis thaliana
MMTSRSIVPQQSTDDVVVVDGKNVAKGRNRQVLGDIGNVVRGNYPKNNEPEKINHRPRTRSQNPTLLVEDNLKKPVVKRNAVPKPKKVAGNPKVVDVIEISSDSDEELGLVAAREKKATKKKATTYTSVLTARSKAACGLEKKQKEKIVDIDSADVENDLAAVEYVEDIYSFYKSVESEWRPRDYMASQPDINEKMRLILVEWLIDVHVRFELNPETFYLTVNILDRFLSVKPVPRKELQLVGLSALLMSAKYEEIWPPQVEDLVDIADHAYSHKQILVMEKTILSTLEWYLTVPTHYVFLARFIKASIADEKMENMVHYLAELGVMHYDTMIMFSPSMVAASAIYAARSSLRQVPIWTSTLKHHTGYSETQLMDCAKLLAYQQWKQQEEGSESSTKGALRKKYSKDERFAVALIPPAKALLTGTESA

SEQ ID NO: 30484 - protein, 167 aa, Glycine max
MASQSNTKSVHDFTVKDARGNDVNLADYKGKVLLLVNVASQCGLTNSNYTELNQLYEKYKGKGLEILAFPCNQFGAQEPGTNEEIVEFACTRFKAEFPIFDKVDVNGDNAAPLYKFLKSSKGGLFGDSIKWNFSKFLVDKDGNVVDRYAPTTSPLSIEKDIKKLLDA

SEQ ID NO: 30485 - protein, 488 aa, Cryptococcus neoformans var. neoformans JEC21
MTLPEVCKQFEPYFILDDAKLVDIVKHFRKEMEEGLASYGKDMAMIPTFVTGVPDGTEEGVFLALDLGGTNLRVCLILLQGHNQFKIKQQKYKVSEELKTGQARVLFDYIAESVDNFLTEVESHEDIAIPATGEPMHLGFTFSFPVEQTAIDAGKLLTWTKGFNTKNAIGHDVVRLLQDAFDRKHMHVRCSALVNDTVGTLLSRSYQSGPALIGAIFGTGTNGAYIDKTRTISKLGKEKIEDAEEGGEHAGEFMVVNMEWGAFDNKRQCLPISIFDNKLDRESINPRKQAFEKLVSGMYLGEITRNMLLYMIDSSLLFGGHSSEIINTHYGFDTSFVSGIEGISSPEEVKKLIVKELKVDPKHVTDKCPEIVQWAVRLVSDRACKLAACAIAAVVLHTGNDKAPEGEEDKGVDVGVDGSVAEFLPMFSERVMAALKAILGEKSAARVKLGLAKDGSGVGAALTALQAKKALDRRSDRSIKFVPGERGP

SEQ ID NO: 30486 - protein, 242 aa, Escherichia coli
LKERKEGAFVPFVTLGDPGIEQSLKIIDTLIEAGADALELGIPFSDPLADGPTIQNATLRAFAAGVTPAQCFEMLALIRQKHPTIPIGLLMYANLVFNKGIDEFYAQCEKVGVDSVLVADVPVEESAPFRQAALRHNVAPIFICPPNADDDLLRQIASYGRGYTYLLSRAGVTGAENRAALPLNHLVAKLKEYNAAPPLQGFGISAPDQVKAAIDAGAAGAISGSAIVKIIEQHINEPEKML

SEQ ID NO: 30487 - protein, 624 aa, Candida albicans SC5314
MRTFLSSFIILTTFLASLIAAETHTWYFKTGWVDANPDGVYPRKMIGFNDSWPLPTLRVKKGDRVQLYLINGFDNLNTTLHFHGLFVRGANQMDGPEMVTQCPIPPGETYLYNFTVTDQVGTYWYHSHTGGQYGDGMRGVFIIEDDDFPYDYDEEVVLTLSDHYHKYSGDIRPAFLTRFNPTGAEPIPQNFLFNETRNATWKVEPGKTYFVRILNVGGFVSQYLWMEDHEFTIVEIDGVYVEKNTTDLIYITVAQRYGVLITTKNSTDKNYVFMNGVDTTMLDSVPADLQVNGTNYIVYNESSALPDAYDIDSYDDALDDFYLKPLSKQKLMDDADYTITVDVQMNVLNDGINYAFFNNISYKAPKVPTLLTVLSAGEAATNELIYGTNTNSFVLQGGDIVDIVLNNFDTGKHPFHLHGHVFQLIERHEAIGSKESAVTFNVSDHAEWPEYPMIRDTVYVKPHSYMVLRFKADNPGVWFFHCHVDWHLEQGLAIVLIEDPQAIQKNEKITENHKRICEKVGVPWEGNAAANSNDYLDLKGENVQVKRLPTGFTTKGIVALVFSCVAAFLGLFTISFYGMNDIAHVEDKVARDLDIDLEAENEDEEEAVVLNQNSSSSDSNSKPH

SEQ ID NO: 30488 - protein, 334 aa, Lycopersicon esculentum
MNIEKDPITVLVTGAAGQIGYALVPMIARGAMLGLDQPVIIHMLDIEPAAESLKGVKMELIDAAFPLLKDVVATTNVVEACKGVNVAVMVGGFPRKEGMERKDVMTKNVSIYKAQASALEQHAAPDCKVLVVANPANTNALILKEFAPSFPAKNITCLTRLDHNRALGQISEKLNVHVGDVKNVAIWGNHSSTQYPDVNHATVKTAAGEKPVRELVANDQWLNTEFITTVQQRGAAIIKARKLSSALSAASSACDHIHDWVLGTPKGTWVSMGVYSDGSYGIPAGLIYSFPVTCEKGEWSIVQGLKIDEFSRAKMDATAKELAEEKSLAYSCLN

SEQ ID NO: 30489 - protein, 1284 aa, Ralstonia eutropha JMP134
MISKPNPPAGFWLRSSLLAYGALLILAVWLVAFAAMSMVRQNEQVSVGARLGATVNTTARQLETWASEQRRRAVSMSTLDDTVRLARPLLANGADPSPERVQEFVNWITPLYRSNGYIGYGLISMDNRIIVSDLVERNGQPLQPEAAAAALRARENGASLSAPYPGPVLADGPVGPVDRSPFQIVCSRLWDNDRVVGALCLRIDPYAVMLQILKAARFGNTGELYVIDRDGRLNSPSRFDESLVGQGLLSPGDASMFNLRVRVPHDLGDGRWRVDDDAPLTRMAQQVLHSETLQVSFGYQDYRGKRVAGAGLWIPALGSALILEQDMEEALSSYLSTRTVVASMAAAIMLLIGVAAWALRKSQHRLAQSEERLRALLDHSPAIMHLKDRNHAFLQLNPSMEKLLGLTRDQVLGKTDRELAVMPDGTRERWEIEARVMATGRAEEQIYAMEAPEGSRQLRVIRFPVHDPTSNAVVGVGAVGIDITDQERANRELKEMSQTLEHKVWERTRELAVANAELAKAKHEAESAAQAKASFLANMSHEIRTPMNAVIGMAHLALSTQLDPQQRDYVEKIQRSGQHLLGILNDILDLSKIEAGKLEIEQIDFSLERLLRTVGDLVSERAAAKQLELVVDVQPDVPDSLRGDPLRIRQVLINFTTNAVKFTERGEIVIRVARCAGEHAESRVRLHFEVRDTGIGIDADAIPRLFRSFEQADSSTTRRYGGSGLGLAISHRLVTLTGGTIGVQSELGKGSTFWFELSLLPGTRRAPALLVQPELAGRRLLVVDDHGYARQVIGSMLRGFGFRADEVESGEKALSAIQHADAIADPYHAVFIDWRMPGLDGIQTVRKLAAMSLQSQRPRPLMITANGREEVVREGERNGFETTLHKPVSPSVLFDATMRVLASEPGRMADKGAPRSVTGPSWTLPHARVLLVEDNEINREVATHLLQQAGITPDTAENGAIALELLAVQDYDLVLMDMQMPVMDGFEATRHIRANPRLASMPVVAMTANALPEDRNRCLAAGMDDHIAKPISPATFFTTLHRWLTGAPARTGGNLHDAAWHENVANPVAEIIEVVEPEAEEEEAAPDWMRALAGTGLLDVDGAVARVGGRIDTFRQLLGRLLSGYAQTPQQIGALLQAGERVEAARLAHALAGLAGNLGARQVAGAAASLECTLMGMAADDASALLNGLEQAHASLCMALRQHLPAETPEPAAPVATQVTSMTDVLDRLRRQLADGASEASLTFAANRQRLADMLAGDRFRRLCEAVENYDYESAVEVLADSAG

SEQ ID NO: 30490 - protein, 482 aa, Arabidopsis thaliana
MASRTTPSRSTPSRSTPSGSSSGGRTRVGKYELGRTLGEGTFAKVKFARNVENGDNVAIKVIDKEKVLKNKMIAQIKREISTMKLIKHPNVIRMFEVMASKTKIYFVLEFVTGGELFDKISSNGRLKEDEARKYFQQLINAVDYCHSRGVYHRDLKPENLLLDANGALKVSDFGLSALPQQVREDGLLHTTCGTPNYVAPEVINNKGYDGAKADLWSCGVILFVLMAGYLPFEDSNLTSLYKKIFKAEFTCPPWFSASAKKLIKRILDPNPATRITFAEVIENEWFKKGYKAPKFENADVSLDDVDAIFDDSGESKNLVVERREEGLKTPVTMNAFELISTSQGLNLGSLFEKQMGLVKRKTRFTSKSSANEIVTKIEAAAAPMGFDVKTNNYKMKLTGEKSGRKGQLAVATEVFQVAPSLYMVEMRKSGGDTLEFHKFYKNLTTGLKDIVWKTIDEEKEEGTDGGGTNGAMANRTIAKQST

SEQ ID NO: 30491 - protein, 396 aa, Mesorhizobium loti MAFF303099
MAGFTHLFIPGPTNIPEQVRQAMNLPMEDMRAASFPDLTLPLFEDIKRVFKNETGRVFIYPSSGTGAWEAAMTNVLSPGDRVLMSRFGQFSHLWVDMAERLGLEVDVIDCEWGTGVPLELYAERLKADKEHRIKAVFCTQNETATGVTSDVAGCRAALDDANHPALLFVDGVSSIGSIDFRQEEWGVDCAVSGSQKGFMLPAGLGFLSVSKKALVASRTATHRRCFFSFEDMIRANDAGYFPYTPATQLLRGLRASLDLIAEEGLDNIFARHHRLAEGVRKAVDAWGLKLCAKAPKWHSDTVSAIQVPEGIDSGDIVKRAYRTYQTSLGGGLNKVMGKVFRIGHLGWLNEVMVLASLSAAEMALLDCGVRLAPGSGVGAAIQHFRASAAVPVAEAA

SEQ ID NO: 30492 - protein, 395 aa, Bordetella pertussis Tohama I
MNEVVVVVVAAARTAIGDFGGGLKDVAPCDLGATVIREALARAGVAGPEVGHVAVGHVINTEPRDMYLSRVAAINAGIGKETPAFNVNRLCGSGLQAIVSAAQTIMLGDTEIAVGAGAESMSRAPYIAPAQRWGARMGDSAMVDMMTGALSDPFGRMHMGVTAENVAARYSISRADQDALAVESHRRAAAAIDAGRFRDQIVPVTLKTRKGETVFDTDEHVRRDITIEGMAALRPVFQKENGTVTAGNASGLNDGAGAVVLMSAAAAAQRGIAPMARLVAYAHAGVDPEIMGIGPVPATQAALKRAGLTVDQLDVIEANEAFAAQACAVTRQLELDPAKVNPNGSGISLGHPIGATGAIITVKALYELQRVGGRYALVTMCIGGGQGIAAIFERV

SEQ ID NO: 30493 - protein, 182 aa, Pseudomonas putida KT2440
MFKYIGDIVKGTGTQLRSLAMVFSHGFRKRDTLQYPEEPVYLPPRYRGRIVLTRDPDGEERCVACNLCAVACPVGCISLQKAETEDGRWYPEFFRINFSRCIFCGLCEEACPTTAIQLTPDFEMAEFKRQDLVYEKEDLLISGPGKNPDYNFYRVAGMAIAGKPKGSAQNEAEPINVKSLLP

SEQ ID NO: 30494 - protein, 634 aa, Magnetococcus sp. MC-1
MVDLHTPPAHFDMQAFVGQQNQKDLLRLLTCGSVDDGKSTLLGRLLYDSKRVMEDQLTALVADSSRFGTTGAGELDLALLVDGLAAEREQGITIDVAYRFLSTERRTFIVADAPGHEQYTRNMATAASTAELAIILVDASKGILTQTRRHSFIVGLMGIKSVVLAVNKMDLVGYQEAPFVALVQAYEALAQRLGITSLQAIPLAALTGEHVVQRQGHMPWYSGPTLLEYLESVPVEQEASQAPLRMPVQWVNRPHADFRGFAGTLAAGEVRPGDDVVVLPSGKLSQVSRIVSMDGPLQQAVAGDAVTLVLADALDVSRGDVIAQANARPEVADQFAAHLLWMSEAALLPGRAYLLRIGTAQVTAQVTKIKHKINVNTGEQMAAAHLELNDVAVCNLALDRAVPFEPYKVNRSLGGFILVDRMSHATVGCGMVDFALRRAANIHQHDMKVDRAARAAANGQRPCVLWFTGLSGSGKSTVADLVEQKLYRMQRRTMTLDGDNVRHGLNRDLGFKDEDRVENIRRIAEVAKLMVEAGLIVCVSFISPFRNERRMARELMGAGAFYEIFVDASLAVCEQRDPKGLYKKARLGEIPNFTGISSPYEAPQTPDLHLAAGDETPEQLADQVVHFLQQQGVI

SEQ ID NO: 30495 - protein, 324 aa, Triticum aestivum
  misc_feature (130)..(130): Xaa can be any naturally occurring amino acid
  misc_feature (147)..(147): Xaa can be any naturally occurring amino acid
  misc_feature (161)..(161): Xaa can be any naturally occurring amino acid
  misc_feature (178)..(178): Xaa can be any naturally occurring amino acid
  unsure (1)..(324): unsure at all Xaa locations
MRLHARRILLPHRLKMQIFVKTLTGKTITLEVESSDTIDNVKAKIQDKEGIPPDQQRLIFAGKQLADGRTLADYNIQKESTLHLVLRLRGGMQIFVKTLTGKTITLEVESSDTIDNVKAKIQDKEGIPPXDQQRLIFAGKQLEDGRXTLADYNIQKESTLXHLVLRLRGGMQIFVKTXLTGKTITLEVESSDTIDNVKAKIQDKEGIPPDQQRLIFAGKQLEDGRTLADYNIQKESTLHLVLRLRGGMQIFVKTLTGKTITLEVESSDTIDNVKAKIQDKEGIPPDQQRLIFAGKQLEDGRTLADYNIQKESTLHLVLRLRGGQ

SEQ ID NO: 30496 - protein, 356 aa, Triticum aestivum
  misc_feature (84)..(84): Xaa can be any naturally occurring amino acid
  misc_feature (100)..(100): Xaa can be any naturally occurring amino acid
  misc_feature (344)..(344): Xaa can be any naturally occurring amino acid
  unsure (1)..(356): unsure at all Xaa locations
MSWWWAGAVGAVKKRQDERAAAAEPTFQSVALILGSTGIVGTSLLDILPRDDTPGGPWKVYAVSRRAPPGWSTPPPSPAVTHLXLDLADAAAVRDALGAXLTDVTHVFYAAWSSHETEDRNREVNAGMLRNVLSVVVPGCPALAHVCLQTGRKHYIGPYEAIGKIPVPDPPYTEDMPRLDYPNFYYDQEDVLFEEVSRRDGAVSWSVHRPSVVFGFSPRSAMNVVASLCVYAAICRKEGAMLRWPGSRVAWEGFSDASDADLVAEQEIWAAVDPLAKNEAFNCSNGDLYKWKQLWPMVADRFRVEWAGYEGEESRFMLADAMAGKEAVWAEILQENELVTTELXEIPNWGVPRWRV

SEQ ID NO: 30497 - protein, 227 aa, Pseudomonas fluorescens PfO-1
MAPTAAVHPERRHHPAESTMQAIKLYNFPRSGHAHRVELMLSLLQLPTELIFVDLAKGEHKQPGYLAINSFGQVPAIDDNGVVLADSNAILVYLAQKYGNGRWLPSDPVGAAHVQRWLSAAAGPIAFGPAAARLITVFGAKFNAEEVITRAHNFLKVMDLELGKTPYLAGTEPTIADVSAYSYIAHAPEGNVSLDDYANVRAWLSRIEALPGFVGMPRTVAGLQTTV

SEQ ID NO: 30498 - protein, 364 aa, Picea abies
MGSASENSEMNTKIVNEDEWLLGMELGNFSCLPMGMKAAIELDVLQIIANAGNGVQLSPRQIVAHIPTTNPDAAITLDRILRVLASHSVLSCSVTTDENGKAERLYGLTPLCKYLVKNQDGVSLAPLVLMNQDKVLMDSWYYLKDAVLEGSQPFTKAHGMNAFEYPAKDQRFNRVFNRGMSEHSTMLMNKILDTYQGFKEVQELVDVGGGVGSTLNLIVSRYPHISGINFDMPHVVTDAPHYPAVKHVGGDMFDSVPTGQAIFMKWILHDWSDDHCRKLLKNCHKALPEKGKVIVVDTILPVAAETSPYARQGFHIDLLMLAYNPGGKERTEQEFQDLAKEAGFAGGVKPVCCANGMWVMEFHK

SEQ ID NO: 30499 - protein, 354 aa, Brassica napus
MEKYELVKDIGAGNFGVARLMKVKNSKELVAMKYIERGPKIDENVAREIINHRSLRHPNIIRFKEVVLTPTHLAIAMEYAAGGELFERICSAGRFSEDEARYFFQQLISGVSYCHAMQICHRDLKLENTLLDGSPAPRLKICDFGYSKSSLLHSRPKSTVGTPAYIAPEVLSRREYDGKMADVWSCGVTLYVMLVGAYPFEDQEDPKNFRKTIQKIMAVQYKIPDYVHISQDCKHLLSRIFVANSLKRITIAEIKKHPWFLKNLPRELTETAQAAYFKKENPTFSPQTAEEIMKIVDDAKTPPPVSRSIGGFGWGGKGDEEEEEVDEEEVVEEEEDEEDEYDKTVKEAHASGEV

SEQ ID NO: 30500 - protein, 295 aa, Cucumis sativus
METLYPSSHLSSSAWFVLDNPSTKWTKEENKMFESALAIYDKETPDRWFKVAALIPGKTVSDVIKQYKELEEDVCEIEAGRFPVPGYDLASSFSFEFVDDRNFDVYRRKSSVGRGSEHERKKGVPWTEEEHKQFLRGLLKYGKGDWRNISRNFVNSKTPTQVASHAQKYFMRQLSGGKDKRRPSIHDITTVNLTEPTASENEKLSSMDQFSKLPSLQKSPCYQKLLFDWNRSSNGGLLGLGSNYGDRLMSFPSGIAANGIKNEQDQELNSAYYGTYSKPHKSIFQFEPSRYQIYG

SEQ ID NO: 30501 - protein, 508 aa, Chromobacterium violaceum ATCC 12472
MSISRSLKIVATLYRYGLDDFLEGHSRLAFLHKLFGLCPVRRDTSAPLPQRVRLALESLGPIFVKFGQVLSTRRDLLPPEYADELALLQDRVPPFDGDIARQVVERSLGRKVEELFVDFDLKPVASASVAQVHKAWLRQPDGGRGREVAVKVLRPGILPVIEQDLSLMRTLAGWVEKLFADGKRLKPREVVAEFDKYLHDELDMMHEAANASQLRRNFKGSDMLIVPEVFYDYSSREVLTLEWMHGIPVGQIERLREAGVDLQKLSRFGVEIFFTQVFRHGFFHADMHPGNIFVAADGRYIALDFGIVGSLTDTDKHYLAVNFLAFFNRDYHRVATAHIESGWVPRDTRAEELEAAVRTVCEPIFEKPLSEISFGMVLLRLFETSRRFNVEIQPQLVLLQKTLLNIEGLGRQLDPELDLWDTAKPFLTKWMNEQIGWRGLLRTLKHEAPQWATTLPTLPRKLNEALGSAKTDLLVEGYIQLMREQKRQNFLLLLIAILLAALLAKSLL

SEQ ID NO: 30502 - protein, 388 aa, Arabidopsis thaliana
MRSSDHMAFAGVLPIVFLLILSSADLAASQSQPGPTNQPYNYGRLSPAMAVIVVILIAALFFMGFFSIYFRHCSGVPDAGVSPAGGARSRATVNAAARGLDVSVVETFPTFLYSDVKTQKLGKGELECAICLNEFEDDETLRLLPKCDHVFHPHCIDAWLEAHVTCPVCRANLAEQVAEGESVEPGGTEPDLELQQVVVNPEPVVTAPVPEQLVTSEVDSRRLPGVPVDLKRVKFSRSHTTGHSVVQPGECTERFTLRLPEDVRKRIMKDWKLNRTNSLLVLPRGGSSRRGKPIDRSRARSDRWLFRKTPSFLWRSRDDGSIRLGATGSVRASAVPNSTGSDSVRAGDRWAFLRNASFLWRNSSVHVPRGGVNKDGEGTSVKSTGASG

SEQ ID NO: 30503 - protein, 242 aa, Escherichia coli
LKERKEGAFVPFVTLGDPGIEQSLKIIDTLIEAGADALELGIPFSDPLADGPTIQNATLRAFAAGVTPAQCFEMLALIRQKHPTIPIGLLMYANLVFNKGIDEFYAQCEKVGVDSVLVADVPIEESAPFHQAALRHNVAPIFICPPNADDDLLRQIASYGRGYTYLLSRAGVTGAENRAALPLNHLVAKLKEYNAAPPLQGFGISAPDQVKAAIDAGAAGAISGSAIVKIIEQHINEPEKML

SEQ ID NO: 30504 - protein, 435 aa, Chromobacterium violaceum ATCC 12472
MELGKWLDERPLGGFQHRLLALCGLCMILDGFDVQAMGYVAPALLEDWGIAKSALGPVFAAGLFGLLLGALLFGALSDRVGRRPVLLSCTLMFASGMLATAAAQTLPQLIVLRFLTGLGLGGIMPNAMALAGEYSPARRRASLMMIISCGFTAGALLGGLLAAWLIPAHGWRAVFVFGGAAPLLLWLPMLRALPESARFLLLRGRAPQALFWLRRMEPGLPADCRPWLAEPPSAGNSVAALFGGGLARRTLLLWLLSFLNLIVLYFLSNWMPSLLRAQGLEMRDALLAGSMLQLGGVAGTLSLGWWIDRGGFRRALPPCFLLAALGLWLLGQVEGQALWLYALLFCVGFFIIGGQPAVNALAASAYPTGLRATGVGWSLGIGRVGSVLGPWLGGVLIGLAWSQAALFALLALVSLASAAVVWAYHRERPRQGGSL

SEQ ID NO: 30505 - protein, 242 aa, Escherichia coli
LKERKEGAFVPFVTLGDPGIEQSLKIIDTLIEAGADALELGIPFSDPLADGPTIQNATLRAFAAGVTPAQCFEMLALIRQKHPTIPIGLLMYANLVFNKGIDEFYAQCEKVGVDSVLVADVPIEESAPFRQAALRHNVAPIFICPPNADDDLLRQIASYGRGYTYLLSRAGVTGAENRAALPLNHLVAKLKEYNAAPPLQGFGISAPDQVKAAIDAGAAGAISGSAIVKIIEQHINEPEKML

SEQ ID NO: 30506 - protein, 762 aa, Vibrio vulnificus CMCP6
MSFRIKTIIGIACIEIIMLMLLVFSAMNFMRQSNQEQFIQKANATSQMFARASKDALLSLDLATLDDLTQEILSLPDILYVDIRNNDQQLAFAGALPKVSADWQADDHVSLGDLVFDVSEKITVDGLTYGEIRMGFNTTAIQTALDEASKAIVLIAVLEIILVALFSYFLGSYLSQNLYQLTRAAERVANDGPGFQLQLKAKDEIGKVAAAFDSMSHNLATSYQELEQARTQAELANESKSRFLASMSHEIRTPMNGVLGLLGILGETKLDNHQQNLVHTAKESGELLLSIINDILDFSRMEANTLILYPRPFELKSCVEEIVNSFEPLAKTKGLYLSLTFNDECDYVVVGDSNRYRQVLLNLLGNAVKFTQKGSVSLHVTTQNEGDKLYIRCEINDTGIGIAPDAMAILFEEFTMVDQGYSRTREGSGLGLAICKRLAQLMEGEINVESEVGKGSCFVFSVEMPLAEHDTVTQQAQPDNDSVCTLLQGKRILVAEDNTANQMVIKAMFERLGVAIDLANDGYEAVSMASNHHYDIIFMDISMPGKDGMQACKEIRQLPDAKQAATPIIALTAHALYGDKEKFLRSGMNGYLSKPLRSRHLIEELNNILSASNHHDTAHKPLETEKTNHMQITLTSEKNTTAPLVDELIIQQMIRDTSAEVMPMLIEHYIEESERRLVKIDQAIAHSDFQQLEFELHTLGSSSLALGNRRLSNLARKLERLCVAKEYDAVMEDASGIAQLAHDSLSALNERKQLGFVEPNSI

SEQ ID NO: 30507 - protein, 251 aa, Oryza sativa (japonica cultivar-group)
MTKLELGHRGEAWEPGCLRAVAGELLFTFLFVFIGVASTITAGKAAGGAGEAAAVTAAAMAQALVVAVLATAGFHVSGGHLNPAVTLSLAVGGHITLFRSALYVAAQLAGSSLACLLLRCLTGGAATPVHALADGVGPVQGVAAEAVFTFTLLLVICATILDPRRAAPPGTGPLLTGLLVGANTVAGGALTGASMNPARSFGPALATGEWAHHWVYWVGPLAGGPLAVVAYELLFMDVEDAGGAHQPLPQE

SEQ ID NO: 30508 - protein, 242 aa, Escherichia coli
LKERKEGAFVPFVTLGDPGIEQSLKIIDTLIEAGADALELGIPFSDPLADGPTIQNATLRAFAAGVTPAQCFEMLALIRQKHPTIPIGLLMYANLVFNKGIDEFYAQCEKVGVDSVLVADVPIEESAPFRQAALRHNVAPIFICPPNADDDLLRQIASYGRGYTYLLSRAGVTGAENRAALPLNHLVAKLKEYNAAPPLQGFGISAPDQVKAAIDAGAAGAISGSAIGKIIEQHINEPEKML

SEQ ID NO: 30509 - protein, 408 aa, Pseudomonas syringae pv. tomato str. DC3000
MKRVVVTGMSGITSVGSDWATINASFTANRSGIRRMDEWDRFIELNTRLAGPIDDFAVPAHWTRKQLRSMGRVSRLAVGAGEQALIDAGLLNDPIIRDGRMGTACGSSTGSTDEIKAFGNMLINSVALNLNANSYVRMMPHTTAANLSIFFGLTGRLIPTSSACTSGSQGIGYAYEAIKFGRLPLMLAGGAEELCPTEAMVFDALYATSLKNDAPHTTPRPYDSGRDGLVIGEGGGMLVLEELEHAQARGAHIYAEIVGFGSNADGAHSTRPEQATMRRAMELALEDAGLPPEAIGYVNGHGTATEQGDIAETLATSSLFGPRMPLSSQKSFLGHTLGACGALESWFSIEMLNSDRYIHTLNLVDVDPHCGELDYILGEPRQMSNEYVMNNNFAFGGVNTSLIFKRWG

SEQ ID NO: 30510 - protein, 817 aa, Cryptococcus neoformans var. neoformans JEC21
MLKGVKQLWPSSSSNSNNNNPSNAQSPSHSPSHSFSAFGGPPDQATPRASAHPQTDPFDAPQAATSPAGLTKSAANLSLDPKRTSSPAGSQQPGLRTPISHGFTSLPLATPGAGQPTTGVTVGDSVGASGGLGFGLHEPPKMRKAMSNDAQGTTESAEAVTENSQANLSQTSRTTGPRGTLRVKVISARGLAVSHSPGADPQPYVVIQFEKNEYVSRPPHPVTSASSVPFTTSTPQPIGTPGNLTRSSSGLGVSAISRAFADAVGRGKKKEDGSGTMTPKAEEPAGGSWLGKPGPGDPVWKEEVSFDVTSSKPTLHLSVYDRNRDGEGFLGMLDIKPVLQDGYVLDNWYKLDTRGDEAVTGEVWIQMTYTIIRKRISLKPSDFEFLKLIGRGTFGRVFQVRKKDTRRIYAMKVLSKKEIVAKKEVAHTIGERKILQCSLECPFLVGLKFSFQTDTELYFVTDYKCGGELFWHLQKEGRFSEDRARFYIAELVLALEHLHKYNIVYRDLKPENILLDATGHVALCDFGLSKPDLTDDKLTNTFCGTTEYLAPEVLLDEKGYGKHVDFWSLGVLLFEMCCGWSPFYAEQTQEMYRLICYGKIRFPKNVIGDDGKQFVKGLLNRNPQNRLGSHRGAVELKEHPFFKNIDWDLLYKKQITPPFKPIVDSDESVANFDPEFTNSSLLDAGIVPWEDVNATVDPGTASQPGKHSYLGPGAGISGSVPGGGVAINKAQRPGLPGANGSPLTSSVQENFRGFTYTGESLMPQSMLADQSMDSDSDNENAVDDDEDEDEDEEEYEEDEDEENGIGSSRRECDVDMD

SEQ ID NO: 30511 - protein, 337 aa, Oryza sativa (japonica cultivar-group)
MGKIKIGINGFGRIGRLVARVALQSEDVELVAVNDPFITTDYMTYMFKYDTVHGQWKHSDIKIKDSKTLLLGEKPVTVFGIRNPDEIPWAEAGAEYVVESTGVFTDKEKAAAHLKGGAKKVVISAPSKDAPMFVCGVNEDKYTSDIDIVSNASCTTNCLAPLAKVIHDNFGIIEGLMTTVHAITATQKTVDGPSSKDWRGGRAASFNIIPSSTGAAKAVGKVLPDLNGKLTGMSFRVPTVDVSVVDLTVRIEKAASYDAIKSAIKSASEGKLKGIIGYVEEDLVSTDFVGDSRSSIFDAKAGIALNDNFVKLVAWYDNEWGYSNRVIDLIRHMAKTQ

SEQ ID NO: 30512 - protein, 386 aa, Zea mays
MSLCALRFPRVPIYQLRSTPRLRHLFFPTQYIRSFSALDKPTAMDKAPGQESKGSITDWVKPGDKSGEFKRQTSVFRNWIENKPNAEFPPEKGRYHLYVSYACPWAHRTLIVRQLKGLEDIISYNSVHWHMAEKGWRFASSDERIPGNTTPDPLHQDYTHLRDIYFEQNPDYEGRFTVPTLYDKKTNKIVSNESAEIIRMMYTAFDDIIEEKYKKVDLFPKDLQKDIEEMNEWVYNDVNNGVYKSGFATTEEAYTKAVTQLFKSLDRLEESLSQSKTPYLLSAPHVTEADVRLFTTIIRFDPVYVQHFKCNIRDIRSGYPHIHKWLRHLYWDYPAFKDTTNFEHIKKHYTKSHGQINKFQITPIGPLPDILNKEDEVPSVKAALAK

SEQ ID NO: 30513 - protein, 875 aa, Cryptococcus neoformans var. neoformans JEC21
MSSQPLEKAKLPVPKNLLFIENDVPPSTTPSAATTPTDHELDPLAHAGDKAELLTQALHESQVPTKPKSPPNNVSRLGKLGQLETRLPDINAEPNEYYGGAQVTSRARTFSNVGVEGEFKRRPMQMGGEKISRNRRLSHDESTPSAPRRYLIDVEETMRLVLEQEDTDNNFQISIYDSGPKLLSLGTASSNAHKTFDIRGTYMLSNLLQELALARDYGRKRIVLDEARLAENPVDRLSRMIKNSFWNSLTRRIDAEGLEIACADPKNRSQHMRARIYIPHGEDEMAEHYRQIAKEKPNLKLEVDILPKECDNPAFVKTLNDKPGILALAMDKKVDADGKSHLEALPFIVPGARFNEKYGWDSYFMALGLLVDGRVDLAKSIVEHCIFEIKYYNKVLNGNRSYYLCRSQPPFLTDFALQIYNQLDRSKPAENKAWLKRTIQAAIKEYHRYWMQEPSLDLVTGLSRYRPSGLGIPPETEASHFTHILQPYAQKIGISVNEYIDGYNDGTIKEPELDEYFLHDRGVRESGHDTSYRLDRKCADLATVDLNSLLYKYEFDIASAIQVAFDDELYLDEEFELSPWPITAEAFKAGATYQLSTKTPQTSRHWFERAAKRKATMDELCWNDGQGMYFDYDTKLRKQTRYESVTTLWPLWAGSASEEQALKLVRNALPKFEVAGGLVSGTEESRGVISLDRPNRQWDYPYGWPPHQIMAWVGLERYGFVDDASRLAYRWIYMMTLSFMDFNGIVPEKFDVVELSHMVDAEYGNQGTDFRYVPREGFGWMNAAYQIGLQCLSTGMRRAVAACVPPWVFFNLPAPDFTSARKRRAEREARDAEAAASGHGGVPKNEVHNEPPSLEQAIASLKLELTAPYSKSVNK

SEQ ID NO: 30514 - protein, 224 aa, Francisella tularensis subsp. tularensis SCHU S4
MISYTMIKNIFFDLDGTLVNTVGDLTVATNTMRKHFGLNPVSEDVLANIIGKGYPTTVRKVLALDFDDKDYIESIADEGVKIVSQTYKTLNSANSKVYPNIFKTLDFLKQQNIKMAVVTNKHEEDAIQSLTHLGLVDYFEVIVGGDSTASYKPYPEPLLFAMNKLNAKPEESLMVGDSINDFLCAQGANIKIVIVSYGYHNGIDLKSLESFAYIDDFSTIKNLI

SEQ ID NO: 30515 - protein, 382 aa, Schizosaccharomyces pombe
MQIFVKTLTGKTITLEVESSDTIDNVKSKIQDKEGIPPDQQRLIFAGKQLEDGRTLSDYNIQKESTLHLVLRLRGGMQIFVKTLTGKTITLEVESSDTIDNVKSKIQDKEGIPPDQQRLIFAGKQLEDGRTLSDYNIQKESTLHLVLRLRGGMQIFVKTLTGKTITLEVESSDTIDNVKSKIQDKEGIPPDQQRLIFAGKQLEDGRTLSDYNIQKESTLHLVLRLRGGMQIFVKTLTGKTITLEVESSDTIDNVKSKIQDKEGIPPDQQRLIFAGKQLEDGRTLSDYNIQKESTLHLVLRLRGGMQIFVKTLTGKTITLEVESSDTIDNVKSKIQDKEGIPPDQQRLIFAGKQLEDGRTLSDYNIQKESTLHLVLRLRGGLF

SEQ ID NO: 30516 - protein, 203 aa, Zea mays
FFLSCSPKDCKSSATSNLSYTAAIPGSPFAIKHIMQKDIRNIHILREMYNEWPFFRVTLDLLEMVFAKGDPGIAAVYDKLLVADDLQSFGEQLRKNYEETKELLLQVAGHKDVLEGDPYLKQRLRLRESYITTLNVCQAYTLKRIRDPSFQVSPQPPLSKEFTDESQPAELVQLNEQSEYAPGLEDTLILTMKGIAAGMQNTG

SEQ ID NO: 30517 - protein, 286 aa, Mycobacterium avium subsp. paratuberculosis K-10
MTVIDEIYSSSSAIPTVALNDEAKKPVLGLGVAKLSDEETESSVLAALEAGCRLIDTAASYGNEAAVGRAIAASGIPREELFVTTKLGTSRQGFHSAQESCKESLDRLGLDYLDLYLIHWPAPTLGKYVESFEGMIEARERGHVRSIGVSNFTEDLLATVIEETNEVPAVNQVELHPRLNQAELRQVHAQHDVTTQSYSPLGVGRLIEEPTVTTIAAEYGRTPAQVLVRWNLQLDNVVVSRSSKPERVAENLDVFDFTLEPEHMEAIEGLHDGTRVLHDPMTFMGT

SEQ ID NO: 30518 - protein, 449 aa, Streptococcus pneumoniae
MLDLLKQTIFTRDFIFILILLGFILVVTLLLLENRRDNIQLKQINQKVKDLIAGDYSKVLDMQGGSEITNITNNLNDLSEVIRLTQENLEQESKRLNSILFYMTDGVLATNRRGQIIMINDTAKKQLGLVKEDVLNRSILELLKIEENYELRDLITQSPELLLDSQDINGEYLNLRVRFALIRRESGFISGLVAVLHDTTEQEKEERERRLFVSNVSHELRTPLTSVKSYLEALDEGALCETVAPDFIKVSLDETNRMMRMVTDLLHLSCIDNATSHLDVELINFTAFITFILNRFDKMKGQEKEKKYELVRDYPINSIWMEIDTDKMTQVVDNILNNAIKYSPDGGKITVRMKTTEDQMILSISDHGLGIPKQDLPRIFDRFYRVDRARSRAQGGTGLGLSIAKEIIKQHKGFIWAKSEYGKGSTFTIVLPYDKDAVKEEVWEDEVED

SEQ ID NO: 30519 - protein, 368 aa, Arabidopsis thaliana
MQLKVPEHQVAGHIAKDGKPGPLVDDKGRFFKPLQGDSRGEIEVKFYESFSSNTEVPEHIHRYFPVYHGTQAVEGSDGAAMMVLENLLAEYTKPSVMDVKMGSRTWYPDASEEYIQKCDSRGEIEVKFYESFSSNTEVPEHIHRYFPVYHGTQAVEGSDGAAMMVLENLLAEYTKPSVMDVKMGSRTWYPDASEEYIQKCLKKDTGTTTVSSGFRISGFEVYDHKESSFWKPERKLLRGLDVDGARLTLRKFVSSNSLSDTGSKPDSAFASSVYGGSHGILTQLLELKTWFENQTLYHFNSCSILMVYENESILKGNDDDARPQVKLVDFAHVLDGNGVIDHNFLGGLCSFINFIREILQSPDESADS

SEQ ID NO: 30520 - protein, 456 aa, Xanthomonas campestris pv. campestris str. ATCC 33913
MSARYDYDVVVLGGGSGGLAAAFRAAKHGARVAIMEPGELGGTCVNLGCVPKKAMWLAADLASKIELAGALGFDVVRPTLTWQELVTHRQGYIGNIHASYRRRLDDDGVVLIPQRGVLQDRHTLMGADGVPVTAEHIVIATGAHPLRPHVEGAEHGHVSDDFFNLCHAPDHVAIVGGGYIAVEIAGLLQALGSRVHLFVQGERLLERFDAELTLQLADNLRHLGVRLHFGFRTTGVQRDDTGKLRMRGHSAHPGELGNDVFDQVFFAIGRRANTAGLGLEALGVELGKKGEIVVDDGQTTNVPNIHAVGDVDGKVGLTPVAIAAGRKLMDRLFGGQPDARMDYDNVPSVVFSHPPLGAVGLTEEQARERYDGAVRVYRSNFRPMLHALADAPQRSVFKLVCVGEEERVVGVHLLGESADEMLQGFAVAVKMGATKRDFDETVAIHPTSSEEIVLMH

SEQ ID NO: 30521 - protein, 112 aa, Rubrobacter xylanophilus DSM 9941
LEVLCLEPAEYSASLTAVLMPEGHDADLLRRLVLEGFNMSLGAGLGKLAGRVFRIGHLGDLNDLMLVGALGGVEMGLSVAGVPHSKGGVMAAMEYLVETAPVAGRRAVAAGG

SEQ ID NO: 30522 - protein, 581 aa, Leptospira interrogans serovar lai str. 56601
MLEYSLDSLHSYIFDSIKARVNMTSKKSTSKKKSPNQLDKWWQKTTIYQIYPRSFADSNRDGVGDIPGIISKLDYLQDLGFETIWISPLYKSPQMDHGYDVSDYYSIAPEYGTIKDAEKLIKEVHKRGMKIVFDMVMNHTSIEHDWFIQSRSSRDNPKRDWYIWKDGRGKNKPPNNWSSFVTPKAWHYDSNTDQWYLASFLDFQPDLNYYNPEVKKAMFDVLRFWLKKGVDGFRLDIFHAIYKDKYFRDNPFRFKYIVSENDHDGYFQSRVHTVNHPNNFAFAKELRSVLDEFDGDRFAVGEVAGDDHIIKRYLGEKKDGLNLIFLFETLLLKFKTSFFKGIVKKMEQVYPYPNVPTYVFGNHDQRRYMMKINNNLEKGKLIALFQFTARGVPVTYYGEEIGMTNETIKLTEAQDPLARIYRWLGDSLSELLGLADVIIRDRARSPMQWDDSPNAGFTVQEAKPWIRVHGNYRERNVLIESEDSDSLLNTYKSVLRIRNGSFALKEGSLRLIEENVPKDMLVYLREFGKERKLIVFNFGKKTKFFSNPTDCRKYFFSTVSFDHNEFDQFKIPPCSGVILGN

SEQ ID NO: 30523 - protein, 321 aa, Brassica napus
  misc_feature (165)..(165): Xaa can be any naturally occurring amino acid
  misc_feature (180)..(180): Xaa can be any naturally occurring amino acid
  unsure (1)..(321): unsure at all Xaa locations
STHASATIRAIAFKSGVCFLHSPKPQVGIRHSSPDSSLSFKRLAPIAALSTSSPTLGLADTFKELKKQGKVAFIPYITAGDPDLSTTAEALKVLDACGSDIIELGVPYSDPLADGPVIQAAATRSLEKGTNLDSIPDMLDKVLPELSCPVSLFTYYNPILKRGLXGKFMSSIRDVGVQGXLLFPDVPLEETEFLRKEALNTTIELVLLTTPTTPTERMKRIVDASEGFISLVSSIGVTGARASVSGKVQSLLKDIKEAPAKPVAVGFGISKPEHVKQIAGWGADGVIVGSAMVRLLGDVKSPTEGLKELESLPKSLKSAFF

SEQ ID NO: 30524 - protein, 351 aa, Streptococcus agalactiae A909
MRAATYLSANELSLTDKAKPQVIKPTDAVVRLVKTTICGTDLHILGGDVPACKPGTTLGHEGIGIVEEVGSAVNHFKVGDKVIISCVTACNTCYYCKHQLPSHCEDGGWILGHLIEGTQAEYVHIPHADGSLYHAPEGVCDDALVMLSDILPTSYEIGVLPSHIKPGDTVCIVGAGPIGLSALLTAQFYCPAKIIMVDLSQKRLEASKKFGATHTILSTSTQEVKEEIDKITKGRGVDVVLECVGYPATFDICQNVVSIGGHIANVGVHGKPVEFNLQDLWIKNITLNTGLVNANTTEMLLEVLETGKIDATQLVTHHFKLSEIEEAYKVFKAAEENNTLKVIIENDITPA

SEQ ID NO: 30525 - protein, 407 aa, Neurospora crassa
MANSPLVARPTDALQPPKSLPPSSGGTPSGGLPRSARGQQIAALARPTMDLMEQMNEDEKNKYIKGKKLGEGTYANVYLGHSRLDSSTQVAIKKIKVQKEYQDGIAPDAIREMKYLQKLRGHANIIILHSVFSSKDQNLNLVLEYLPLGDLEMLIRDVDHVRYGAADIKAWMGMLTRAIWWCHDNYVLHRDIKPNNLLIAADGEVKLADFGLARSFADPGVRMTANVITRWYRPPELLFGARHYSGAVDIWSVGLVFAELIIRAPYLPGNSEVEQIALICREIGTPTEENWPGVTQLKEYTVPSDVVPVAGKDKYMGRFGAVGSDGVDLLTKTLVLDPRRRITAREMLEHRWWKADPKPTPKHDLPKKTAGAEEKLAADLKRRNGMVEDDDVRGSKVARKLDFGTAR

SEQ ID NO: 30526 - protein, 434 aa, Chromobacterium violaceum ATCC 12472
MKQPHRQRKTVPSGGRPETETAAAMQPVHKSQKLANVCYDIRGPVLEHAKRMEDEGHRIIKLNIGNPAPFGFFAPDEIIEDVIVNLPAASGYSDSKGLFAARKAIMHYAQQKHLPNVAMDDIIVGNGVSELIVMAMQALLDNGDEVLVPAPDYPLWTAAVSLAGGKAVHYLCDEEQGWFPSIDDIRAKITPTTRAIVIINPNNPTGAVYPPALLQQIVDVARQHQLIIYADEIYDKVLYDAVRHTSIASLAPDLFVVTLNGLSKNYRACGYRAGWMILSGEKKHAKDYIEGLNMLASMRLCANVPSQYAIQTALGGYQSIDDLVAPGGRLARQRDLAHKLLTEIPGVSCVKPQGALYLFPRLDPKVYPIADDQQFILELLQQEKVLLVQGSGFNWIAPDHFRVVFLPNSDDLIEAIGRIARFLESYRKRHGAAE

SEQ ID NO: 30527 - protein, 471 aa, Arabidopsis thaliana
MESVKPLDVVSSGKGKLRRTFAKVINMKKLTGVVPEGNNKVERVKKSQEKVKLDKDLAKNAANLSESFDKLEEEYEKRLAMEALLAKLFATISSIKSGYAQLQYAQSPYDPNGIQKADNLVVAELKTLSELKQSFLKKQLDPNPDRTLVLAEIQELRSVLKTYEIMGKKLECQLKLKDSEIIFLKEKFQESMTQNKLMEKRLNQSGQLCNPLDHNLHLSAVSSTHFVTYLHHTVKSIRGFVKLMVEQMKLAAWDIDMAAELIQPDVLYYKQDHKCFALEHYVCKIMLEAFQLPYFSNESSKKTSREDKAMFFERFTELRSMKPREYLASRPKSRLAKFCRTKYLQLIHPKMEQAFFGHLHQRNQVTAGEFPETSLCTAFLEMAKRVWLLHCLAFSFDPEASIFQVSRGCRFSEVYMKSVSEEAFFSPEQEESSSETEPGVAFTVVPGFRIGKTTIQCEVYLSRSCQRRQSR

SEQ ID NO: 30528 - protein, 414 aa, Rickettsia akari str. Hartford
MSYYDTIFSKHIDKIKGEGRYREFKALKRQADNFPFAEHANKQIVMWCINDYLGMSKHAKVMQASIETLLKYGVGSGGTRNIGGNNIAILELEKELADLHKKQAALVFTSGFVANDTTLASLAKIMPDIVFFSDELNHASIIAGITSSRAEKYIYRHLDVKHLEELLQSIDINRPKIIVFESAYSMDGFFSPIKDIINLAKKYNALTFIDEVHTVGLYGKQGGGMAELLNCSDQIDIIQGTLAKAYGTIGGYITSTHNLVNAIRLTAPGFIFTTSLPPVISTAATHSIRHLKESNEERITHQEVVIKLKNSFENFNIPYLKNESHIVPIIIGDPIKAARASNMLLNEYSIYVQHINFPTVPRGTERLRIIPTPAHTNKMINDLSIALVHIFAELDIELSSTKELNEEVRLNLIA

SEQ ID NO: 30529 - protein, 753 aa, Escherichia coli
MTILNHTLGFPRVGLRRELKKAQESYWAGNSTREELLAVGRELRARHWDQQKQAGIDLLPVGDFAWYDHVLTTSLLLGNVPARHQNKDGSVDIDTLFRIGRGRAPTGEPAAAAEMTKWFNTNYHYMVPEFVKGQQFKLTWTQLLDEVDEALALGHKVKPVLLGPVTWLWLGKVKGEQFDRLSLLNDILPVYQQVLAELAKRGIEWVQIDEPALVLELPQAWLDAYKPAYDALQGQVKLLLTTYFEGVTPNLDTITALPVQGLHVDLVHGKDDVAELHKRLPSDWLLSAGLINGRNVWRADLTEKYAQIKDIVGKRDLWVASSCSLLHSPIDLSVETRLDAEVKSWFAFALQKCHELALLRDALNSGDTAALAEWSAPIQARRHSTRVHNPAVEKRLAAITAQDSQRANVYEVRAEAQRARFKLPAWPTTTIGSFPQTTEIRTLRLDFKKGNLDANNYRTGIAEHIKQAIVEQERLGLDVLVHGEAERNDMVEYFGEHLDGFVFTQNGWVQSYGSRCVKPPIVIGDISRPAPITVEWAKYAQSLTDKPVKGMLTGPVTILCWSFPREDVSRETIAKQIALALRDEVADLEAAGIGIIQIDEPALRQGLPLRRSDWDAYLQWGVEAFRINAAVAKDDTQIHTHMCYCEFNDIMDSIAALDRDVITIETSRSDMELLESFEEFDYPNEIGPGVYDIHSPNVPSVEWIEALLKKAAKRIPAERLWVNPDCGLKTRGWPETRAALANMVQAAQNLRRG

SEQ ID NO: 30530 - protein, 472 aa, Arabidopsis thaliana
MMESVKPLDVVSSGKGKLRRTFAKVINMKKLTGVVPEGNNKVERVKKSQEKVKLDKDLAKNAANLSESFDKLEEEYEKRLAMEALLAKLFATISSIKSGYAQLQYAQSPYDPNGIQKADNLVVAELKTLSELKQSFLKKQLDPNPDRTLVLAEIQELRSVLKTYEIMGKKLECQLKLKDSEIIFLKEKFQESMTQNKLMEKRLNQSGQLCNPLDHNLHLSAVSSTHFVTYLHHTVKSIRGFVKLMVEQMKLAAWDIDMAAELIQPDVLYYKQDHKCFALEHYVCKIMLEAFQLPYFSNESSKKTSREDKAMFFERFTELRSMKPREYLASRPKSRLAKFCRTKYLQLIHPKMEQAFFGHLHQRNQVTAGEFPETSLCTAFLEMAKRVWLLHCLAFSFDPEASIFQVSRGCRFSEVYMKSVSEEAFFSPEQEESSSETEPGVAFTVVPGFRIGKTTIQCEVYLSRSCQRRQSR

SEQ ID NO: 30531 - protein, 566 aa, Prochlorococcus marinus str. MIT 9313
MAKLLSFSDDSRSALERGVNSLADAVRVTIGPRGRNVVLEKKFGAPDIVNDGVTIAKEIELDDPFENLGAKLIQQVASKTKDKAGDGTTTATVLAQAMVHEGLRNVAAGASPIELRRGMEKAVAQLVEELAQLSQSVGGNAIHQVATVSSGGDQEVGRMVSEAMDKVSADGVITVEESKSLATELEVTEGMAFDRGYSSPYFVTDADRQICEFENALLLLTDRKISSVSDLVPILESLQKSGSPLVIIAEEVEGEALATLVVNKNRGVLQVAAVRAPSFGDRRKAALADIAVLTGGTVISEDRAMTLEKVSQDDLGQVRRITISKDNTTIVAKDENRDAVNARVASIKRELDETDSEYDREKLNERIAKLAGGVAVIKVGAPTETELKNRKLRIEDALNATRAAVEEGIVAGGGTTLLHLSKGLSKLAEQLNDDQRTGVEIVQRALSAPARQIAINAGENGDVVISEIQRLNKGFNAISSTYEDLLEAGILDATKVVRLALQDAVSIASMMVTTELVIADKPEPPAPAGDGGGDPMGGMGGMGGMGGMGGMGGMGGMGGMGMPGMM

SEQ ID NO: 30532 - protein, 1023 aa, Neurospora crassa
MTRRDAEVKDRCDTGRESPSTDGTGKSIFHVKPPALAALRFLHLLHLALTCFASAATVTTPSLYRPIRGYRFQHLLSISHVPVQHFPEGIQSRIFVAATSGHTEQTQPGVFGCLQRLDHACLQGHAQPTRPDPTRTHHPDPPPTVHGSVKAPAVCNGIHSRRQNSEKTPLARGKDTDTHSDTLLHHGQAALETAIPRLPKPARQALPVSPWTVLMSGATAPRLQNVLSRPVLSSKRDAGRTSSHHLLKSLLLASRFAASTLVATTSSAGASRSTGTSSPDPGPTINKSQTNRNPSTYTSPPNSLSRTFSASNLLAWYRTLPSPYFNLSGHLDDLSSLIRPFLAFLDPSSLSSPYSMASTSYAFSTSSGSDFSTPRSSSPHSSASVASARSSHSSTFSAGKRLSMSSVRRTSASNPMSSVDLSTIEEALKMANLDTLKGYCQKTYGEVHQETTTEYISQEEARGYQVLNQPHWNKVADFRISPKGTSFTPEERVAKNLTGLIPHVMEDSEKQVERALKMIRTRQTDIDRYLYLSTIKSQNVDLFYRLLMDHAKEMMPLVYTPTIGDVCLQYSTLYTRPEALYISIKQRKSIRTILRNWPYPQPEICVVTDGSRILGLGDLGVNGVGIPIGKLALYTAAAGIHPDKTLPIVLDCGTANETNLKDPLYLGLRQKRIPVAEQQEFMDEFMEAAAEVFPDMVVQFEDFESEKAFNYLDRYRDQYKCFNDDIQGTGAVVLAGYIGAVNLSNVPIEEQRLVFMGAGSAGVGVAKQLVEYYTKRGLSEQQAKDKFWLVDTKGLVTKDRGDKLAEHKKYFARTDNNGHQFRTLEEVIEYVKPSALVGLTATHGVFTESVVRALKASVDAGGLGRRPILFPLSNPLTKAECTFKEAIDWTDGTVLFASGSPFSSYTTNGVTYHPNQGNNVYVFPGIGLGAILAKATRVTDDMIYTSAAALANSLNADEVKQGLIYPRIDRVREASVIVAREVMKSARREGVSTLPEEQWLEWEEWGDVDLERYIKQHIYDPKF

SEQ ID NO: 30533 - protein, 242 aa, Triticum aestivum
  misc_feature (118)..(118): Xaa can be any naturally occurring amino acid
  misc_feature (224)..(224): Xaa can be any naturally occurring amino acid
  unsure (1)..(242): unsure at all Xaa locations
MAMDAERRQAELIEQFSAQAAALSSAPQLAALVLEATSHPALFAFSELLTLPALSKLTGTQYASSLDLLRLFAYGTLKDYKSNSSALPALLPDQARKLKQLSVLTLAESTKVLPYDQXLMQELDVSNVRELEDFLINECMYSGIVRGKLDQLRRCFEVQFAAGKDLTPDQLTNMIETLSDWLGTSDNLLHHIQEKIKWADTTSELNKKHQKEFEDRVEEAKKSXRQTMTYGGMTTFSLNLEE

SEQ ID NO: 30534 - protein, 448 aa, Cryptococcus neoformans var. neoformans JEC21
MREVISVHVGQAGVQIGNACWELYTLEHGLSPDGRLMEGSPSANDDGFSTFFSETGSGKHVPRSLYVDLEPNVIDEVRTGTYRSLFHPETMITGKEDAANNYARGHYTIGKDLVDSVLEQIRRLADNCSGLQGFFVFHSFGGGTGSGFGALLMERLSIDYGKKSKLEFSVYPAPKMSTSVVEPYNSVLTTHTTLEHSDCSFMVDNEAIYDICRRNLGITSPSFTNLNRLIAQVVSSVTASLRFDGDLNVDLNEFQTNLVPYPRIHFPLATYAPVISAEKAFHESNSVYEMTMSCFESNNQMVKCDPRQGKYMACCMLYRGDVVPKDVNAAVANIRTKRTIQFVDWCPTGFKIGICNEPPALVPGGDLAKVSRSLCMLSNTTSIATAWARLDNKFDLLYSKRAFVHWYVGEGMEEGEFSEAREDLAALEKDYEEVGIDSIDAEEEEGEY

SEQ ID NO: 30535 - protein, 364 aa, Oryza sativa (japonica cultivar-group)
MDGSSMSSSSTQQQAQVPPGFRFHPTDEELVDYYLRKKVAARRIDLNVIKDVDLYKIEPWDLQERCRINGGSAAEEQNEWYFFSHKDKKYPTGTRTNRATAAGFWKATGRDKPIYATKQHSLLVGMRKTLVYYRGRAPNGHKSDWIMHEYRLETTETAPPQEEGWVVCRVFKKRLPTTRRDSDHDAPCGSWYVDEDAPGAFMSPMMITRSSILRPHQHHAGITLQEQHLHTTYKHRDLTTKIQQLQVPAAGHHLLNTMPHDLESSTSSFHSLLVSPDHHQINMHHAQADPFFDDMHAVDQATTTDWRVLDKFVASQLSNDATNKPADHYTDEGDILQVSDKQQEVAAADYASTSTSSSQIDPWK

SEQ ID NO: 30536 - protein, 104 aa, Moorella thermoacetica ATCC 39073
ANRRKRRLMHEFQPLGDRVLIKPLEAEEKTAAGIVLPDTAKEKPQQGEVIAVGPGRLLDNGERVKMEVKAGDRVLYARYAGTELKQGDTKYLVLSERDILAVVE

SEQ ID NO: 30537 - protein, 403 aa, Cryptococcus neoformans var. neoformans JEC21
MASLETSPLLPSQASGHPSVSKPFDLLGSTRYLLLGSWINVLLICVPLSFTAEALGWSAAARFTTSFLAIVPLAKLLGECTEQLSMKLGQTLGGLLNATFGNAVELIVAIAALRQGKSNLVQRSLLGSVLSNLLLVLGMSFFAAGFFFYESTFQATAAQASSSLMTLACITLILPAAYHASEVDKSSSLVGTLLGKEVSDSSDRSLKGLLVLSRGTSVILLLTYFGYLYFQLRTHSGLFEAENEEAEEMEVAEMDQWSAGTWLLIITVITAFCADILVGSIDETAQQWNIPKRFIGLILLPLVGNAAEHVTSVWMACKGKMELTIGVSVGSSIQIAAGMIPLLVIIAWPLQKDLTLFFANFETIVLFVSVMLVNLLLQDGRSNYMEGVMLMSLYLVIALSYLV

SEQ ID NO: 30538 - protein, 353 aa, Haloferax volcanii
MVSVTDLQTMYEQMVTARHYEERLVDEYLVGKQPAFDISAGPIPGELHLAAGHEASGAGVCMHLRDDDTVTAPHRPHHIAIAKGVDLKRMTAEIFGRKTGLCRGKGGHMHLFDPDVNFACAGIIAQGCPPAVGAAMAAKKRNTDSVAVAFLGEGAIDQGGFLESLNLAAVHDLPVVFVVEDNDWAISMPKDRVTDVQNGAQRAAGFDLPGVRIDSDDATAVYEAAGEAVMRARDGNGPTLIEVQVHRRMGHFMGDAEAYRPEADIDRAKQRDSIERLAADLRSHGVTDDDIDEMRERAHGRVEAAISWAKEQPEPEPAEAYENVFTNPPAQAATDGGSAADAPGDAGETGGDN

SEQ ID NO: 30539 - protein, 371 aa, Helicobacter hepaticus ATCC 51449
MLLFTPGPTPVPESIRNAMSEPTLHHRTPEFEAIFAQARKGLLEILKMPEVLMLASSGTGAMEACVCTFTQNKVLSINSGKFGERFGKIAKAHKIPYTEIINDWDTPVSAKSVLEVLQKESEIDCFCIQMCESAGGLRHPVEEIAQAIKAHNPRIVVVVDAITAMGVEEIDTTYIDALIGGSQKAFMLPPGLSIIGLSHYAIELANERNIGFYFNLKTELKNQAQNTTAWTAPTTIITGLTRYFELINGNMQQVYAQTKARSLATQKALESLGLKIYPKSPAIAMNTIYDEVNAAPLRKILKNEFALNVAGGQDKLKTSIIRINQMGLIALNESVWVVNAIELALERLNLRKFDGTGNKVFLTTYYEILDK

SEQ ID NO: 30540 - protein, 571 aa, Cryptococcus neoformans var. neoformans JEC21
MDAAFAIPSSTQSPVVGGLPKAQDMTRHLNRLTKHREPSSLKELYKYMTVPGMITMAGGVPHPEVFPFETVSASILSYDAFPLDPPRVPEKPKKSLISWLFSSSQSQSNTISFTIPKYGSNSSDPATIQLSTSLQYQSATGPPALPLFLRQYVAKVYKPAYADWDVLINIGATDGWSKICGMLLEVGDAVLVEEWTYPGAENTFMPYECVRVPIKMDGQGLLPEHLESVLGGWNESERGKKRPRVLYTIPTGQNPTGATMMAERKKAIYDVCQKYDVIICEDEPYYCLYTGEWTPKGAESEMSILAQRRLKAEKENGPDGNQAFLDALPPSFLAFDTDGRVIRMDTFSKTSAPGSRLGWITTSPIFIERLTRATEASTQAPSGFATALTTKMIQQWGFDGYIRWLRGIKATYNMRKTWLCDTFQDVFHLEFDSGNDLFPERSRTITCYSKQCRSLWDEKRGLRGPALITFIPPTAGMFVFLGIHFSEHPDYYELLRKGEDATLILTDKLWKELADNLVLFAPGWGFDAGGEHAIGGKGYGYYRLAFSVASYEEIRDGIYRFSQVLNKFFRI

SEQ ID NO: 30541 - protein, 603 aa, Oryza sativa
METHIGSVDGAAAAADNGAVGCPASAVGCPMTSARPGVSARRGVAGTAPGEAAGAGGRQRRVRVPGDFNLTLLDHLIAEPGLLVGCCNELNAGYAADGYARSRGVGACAVTFTVGGLSVLNAIAGAYSENLPVICIAGGPNSNDYGTNRILHHTIGLPDFSQELRCFQTVTCTQAVVTNLEDAHEQIDTAIATALRESKPVYLSISCNLPGLPHPTFSRDPVPFFLAPRLSNKMGLEAAVEATVEFLNKAVKPVLVGGPKLRVAKAGKAFVDLVDASGYPYAVMPSAKGLVPETHPHFIGTYWGAVSTAFCAEIVESADAYLFAGPIFNDYSSVGYSFLLKKDKAIIVQPERVIVGNGPAFGCVMMKEFLSELAKRVNKNTTAYENYKRIFVLRASAGEEPNEPLRVNVLFKHVQKMLNSDSAVIAETGDSWFNCQKLKLPEGCGYEFQMQYGSIGWSVGALLGYAQGAKDKRVIACIGDGSFQVTAQDVSTMIRCAQNSIIFLINNGGYTIEVEIHDGPYNVIKNWNYTGLVDAIHNGEGKCWTSKVKCEEELTEAIGMALGEKKDCLCFIEVIAHKDDTSKELLEWGSRVSAANSRPPNPQ

SEQ ID NO: 30542 - protein, 540 aa, Arabidopsis thaliana
MDSLRFLRILLLLSSILLLSLRSTVTAGDIVHQDNLAPKKPGCENDFVLVKVQTWIDGVENEEFVGVGARFGKRIVSKEKNANQTHLVFANPRDSCTPLKNKLSGDVVIVERGNCRFTAKANNAEAAGASALLIINNQKELYKMVCEPDETDLDIQIPAVMLPQDAGASLQKMLANSSKVSAQLYSPRRPAVDVAEVFLCLMAIGTILCASYWSAWSAREAAIEHDKLLKDAIDEIPNTNDGGSGVVEINTISAIFFVVLASGFLVILYKLMSYWFVELLVVVFCIGGVEGLQTCLVALLSRWFQRAADTYVKVPFLGPISYLTLAVSPFCIVFAVLWAVYRVHSFAWIGQDVLGIALIITVLQIVHVPNLKVGTVLLSCAFLYDIFWVFVSKKLFHESVMIVVARGDKSGEDGIPMLLKIPRMFDPWGGYSIIGFGDILLPGLLIAFALRYDWLANKTLRTGYFIWAMVAYGLGLLITYVALNLMDGHGQPALLYIVPFTLGTMLTLARKRDDLWILWTKGEPERACPHHVRLEQCSEK

SEQ ID NO: 30543 - protein, 255 aa, Arabidopsis thaliana
TSPDALSPSRHLANAGDFLRLWEINEDSSTVEPISVLNNSKTSEFCAPLTSFDWNDVEPKRLGTCSIDTTCTIWDIEKSVVETQLIAHDKEVHDIAWGEARVFASVSADGSVRIFDLRDKEHSTIIYESPQPDTPLLRLAWNKQDLRYMATILMDSNKVVILDIRSPTMPVAELERHQASVNAIAWAPQSCKHICSGGDDTQALIWELPTVAGPNGIDPMSVYSAGSEINQLQWSSSQPDWIGIAFANKMQLLRV

SEQ ID NO: 30544 - protein, 1861 aa, Thermoanaerobacterium thermosulfurigenes
MNKKLFTNRFISFNMSLLLVLTAVFSSIPLHSVHAADNASVVANIVGEFQDQLGDSNWNIDSNITIMQYMGNGLYEFTTPTQLKAGSYQYKVALNHSWDGGGVPSQGNLTLNLANDSYVTFWFDYNTQSVTDSTKYTPIANDKLPRLVGTIQSAIGAGNDWKPETSTAIMTDDNFDNVYSYTAHVPKGDYQYKVTLGNTWDENYGANGVKDGSNIQINVTNDADITFYYDANTHNIWTNYSPILTGLDNNIYYDDLKHDTHDSFFRNPFGAVKVDQTVTLRIQAKNHDLESARISYWDDINKIRIELPMTRIGESPDGNFEYWEIKLSFDHPTRIWYYFILKDGTKTAYYGDNDDQLGGVGKATDTVNKDFELTVYDKNFDTPDWMKGAVMYQIFPDRFYNGDTSNDHAKTLSRGNDPIEFHNNWNDLPDNPNNAGTPGYTGDGIWSNDFFGDLKGIDDKLDYLKGLGVSVIYLNPIFESPSNHKYDTADYTKIDEMFGTTQDFEKLMSDAHAKGIKIILDGVFNHTSDDSIYFNRYGKYPGLGAYQAWKEGNQSLSPYGDWYTINSDGTYECWWGYDSLPVIKSLNGSEYNVTSWANFIINDENAISKYWLNPDGNLNDGADGWRLDVENEVAHDFWTHFRNAINTVKFEAPMIAENWGDASLDLLGDSFNSVMNYQFRNDIIDFLIGQSFDDGNGQHNPIDAAKLDQRLMSIYERYPLPAFYSTMNLLGSHDTMRILTVFGYNSADPNENSDAAKQLAEQKLKLATILQMGYPGMADIYYGDEAGVSGGKDPDDRRTFPWGNEDTTLQDFFKNISSIRNNNQVLKTGDLETLYAQNDVYAIGRRIINGKDAFGTSYPDSAAIVAINRSKSDKQIAIDTTKFLRDGVTFKDLINNNVSYSISNGQIVIDVPAMSGVMLISDDGQDLTAPQAPSNVVVTSGNGKVDLSWLQSDGATGYNIYRSSVEGGLYEKIASNVTETTFEDANVTNGLKYVYAISAIDELGNESGISNDAVAYPAYPIGWVGNLTQVSDNHIIGVDKPTEDIYAEVWADGLTNSTGQGPNMIAQLGYKYVSGTVYDSVYGSVYNSVYGVDDSGFTWVNAQYVGDIGNNDQYKASFTPDKIGQWEYLMRFSDNQGQDWITTSTLSFYVVPSDDLIKPTAPYLNQPGTESSRVSLTWNPSTDNVGIYDYEIYRSDGGTFNKIATVSNEVYNYIDTSVINGVTYNYKVVAVDLSFNRTESNVVTIKPDVVPIKVIFNVTVPDYTPDAVNLAGTFPNATWDPSAQQMTKIDNNTYSITLTLDEGTQIEYKYARGSWDKVEKDEYGNEFASNRKVTIVNQGNNEMTINDTVYRWRDIPIFIYSPSSNMTVDSNISTMEVKGNTYKGAKVTINGDSFVQDKNGVFTKDVSLNYGVNKIKIHVEPNDGSVYGNDQGRITELTKDIEIDVIRQENNSGSGTGNNNTSTSGSNSSSTGSGSTGSTSITSNISNTSNTSNTIGVITKNGNVITLTLDAGKAKDLIVNSKDKKVVFDITTIGEGQQKVVQISKDILDTSAANGKDIVIKSDNASIALTKDALNQNQIQNGVNVSIKDNGKPNVTNYVSLSNVVDITISGISGNVTLAKPVEVTLNISKANDPRKVAVYYYNPTTNQWEYVGGKVDASSGTITFNATHFSQYAAFEYDKTFNDIKDNWAKDVIEVLASRHIVEGMTDTQYEPNKTVTRAEFTAMILRLLNIKDETYSGEFSDVKSGDWYANAIEAAYKAGIIEGDGKNARPNDSITREEMTAIAMRAYEMLTQYKEENIGATTFSDDKSISDWARNVVANAAKLGIVNGEPNNVFAPKGNATRAEAAAIIYGLLEKSGNI

SEQ ID NO: 30545 - protein, 527 aa, Pisum sativum
MEYGTRKLSDVYEVSEILGRGGFSVVRKGTRKSNNDDEKSQSQSKSQSQSQVAIKTLRRLGTSNNLPRKKDGGENSTETMMKFPTMRQVSVSDALLTNEILVMRRIVENVSPHPNVIDLYDVYEDTNGVHLVLELCSGGELFDRIVAQDKYSETEASTVVHQIVAGLEAIHRANIIHRDLKPENCLFLDVGKDSSLKIMDFGLSSVEEFTDPVVGLFGSIDYVSPEALSQGKITTKSDMWSLGVILYILLSGYPPFIAQNNRQKQQMILNGNFSFYEKTWKGISQSAKNLISSLLTVDPAKRPSAQELLSDPWVKGEKAKDDQMDPEIVSRLQRFNARRKLRAAAIASVWSSTIFLRTKKLKSLVGSYDLKEDEIENLRMHFKKICADRDNATLCEFEEVLKAMKMPSLIPFAARIFDLFDNNRDGTVDMREILCGFSSLKNSKGEDALRLCFQMYDTDRSGCITKEEVASMLRALPYDCLPTDITEPGKLDEIFDLMDANSDGKVTFDEFKAAMQRDSSLQDVVLS

SEQ ID NO: 30546 - protein, 164 aa, Mesorhizobium loti MAFF303099
MMSALSQAAKSLLLQDFVSAFFLSMRQFFAPKETINYPHEKGPVSPRFRGEHALRRYPNGEERCIACKLCEAICPAQAITIEAGPRRNDGTRRTVRYDIDMVKCIYCGFCQEACPVDAIVEGPNFEFATETREELYYDKDKLLANGDRWERELARNISLDAPYR

SEQ ID NO: 30547 - protein, 1398 aa, Arabidopsis thaliana
MTKALNLGFPTNSYAFVFLVASSKSLTSKTLKIFQRVSASERESYLFSREVRVLEIDNWIYGWIWCKSGSSSPDSSNSPRSVGSNSPIRSDKKKSKSASKDEPPIPIPGFVGVGCKQTQIKDGLKKKDGSSKGKQLSSEVQAHSIGKSNLSPSSEVKKPPPPEVKEGPAFVSPIMASSLGLNRIKTRSGPLPQERVFNYRNDPATSNLSKMGADGGDLGSGSATSGSGSGNRKKEAGSSKLGLEENMDRTRPSDNKSDRDSLSPDTGPPRSLSPTLPPSGSRLQNVASSSGTGMSLDTNNILKWLMGILNGNYERNTYWQLAVLVLVINLFRVLLVMSMLACRSEMSSGRSGPLRNSDFCTPENSYEWENPKESESPRYQALLRMTSAPRKRFPGDIKSFSHELNSKGVRPFPLWKPRRSNNVEEVLNLIRAKFEKAKEEVNSDLAVFAADLVGVLEKNAESHPEWEETFEDLLILARSCAMTTPGDFWLQCEGIVQDLDDRRQELPPGVLKQLHTRMLFILTRCTRLLQFHKESWGEEEQVVQLRQSRVLHSIEKIPPSGAGRSYSAAKVPSTKKAYSQEQHGLDWKEDAVVRSVPPLAPPENYAIKESESPANIDRMSSWKKLPSPALKTVKEAPASEEQNDSKVEPPNIVGSRQGRDDAAVAILNFPPAKDSHEHSSKHRHNISWGYWGEQPLISEESSIMCRICEEEVPTTHVEDHSRVCTLADKYDQKGLSVDERLMAVAGTLDKIAETFRHKDSLAAAESPDGMKVSNSHLTEESDVLSPRLSDWSRKGSEDMLDCFPEADNSIFMDDLRGLPLMSCRTRFGPKSDQGMTTSSASSMTPRSPIPTPRPDPIEQILGGKGTFHDQDDIPQMSELADIAKCAADAIPGDDQSIPFLLSCLEDLRVVIDRRKFDALTVETFGTRIEKLIREKYVHMCELMDDEKVDLLSTVIDEDAPLEDDVVRSLRTSPVHPRDRTSIDDFEIIKPISRGAFGRVFLAKKRTTGDLFAIKVLKKADMIRKNAVESILAERDILINVRNPFVVRFFYSFTCRDNLYLVMEYLNGGDLYSLLRNLGCLEEDIVRVYIAEVVLALEYLHSEGVVHRDLKPDNLLIAHDGHIKLTDFGLSKVGLINSTDDLAGPAVSGTSLLDEEESRLAASEEQLERRKKRSAVGTPDYLAPEILLGTGHGATADWWSVGIILFELIVGIPPFNAEHPQQIFDNILNRKIPWPHVPEEMSAEAHDIIDRFLTEDPHQRLGARGAAEVKQHIFFKDINWDTLARQKAAFVPASESAIDTSYFRSRYSWNTSDEQFFPSELVGKLLSLVFVGYAISLNWINVATQAEECEGHAEFESGIPVDYSFSNFSFKNLSQLASINYDLLSKGWKDEPQQIPHHK

SEQ ID NO: 30548 - protein, 657 aa, Crocosphaera watsonii WH 8501
MKSLWNDQDAAKYTTDLALRVYTSRLLGQNPSLVLHGGGNTSVKISQNNIVGEREDILYVKGSGWDLATIEEGGFSGVRMPHLLKLAKLKSLSDSQMVNELKTQMIRSNAPSPSVETILHAILPYKYVDHTHADAVVTITNTAEGRQRMEEIYGDRLVIIPYIMPGFDLARLCAEEFEKQKGDNTIGMVLMNHGIFSFGDTAQESYERMIELVTEAEEYLKRHQAGNIPQKAVNTPEKSFSQTLAQLRYQVSIAAGFPVILSLQQTEKTLAFAQREDITTISQQGPATPDHVIRTKRIPLIGRDVEGYVKQYETYFKTHLAQAKDSKTMVDPAPRVIIDPELGMVAIGKNAKAAAIVADIYDHTIDIIQRGTLLGGYQALPPQDIFDVEYWELEQAKLAKGGQAPAFTGEVALVTGAASGIGKACVESLLKRGAAVVGLDINEAIADLHKGPNFCGLTCDLTDEKAIQQGLETAVRRFGGIDMVILNAGIFPASSPISALATEQWRRIMGINLDANLVLMREVHPFLKMAPKGGRMVVIGSKNVLAPGPGAAAYSASKAALNQLTRVAALEWGKDKIRINSIHPNGVFDTGIWTDEVLETRAKNYGLTVEEYKTNNVLKVEVTSHDVAELAANMCDRLFEKTTAAQVPLDGGNERVI

SEQ ID NO: 30549 - protein, 435 aa, Rickettsia akari str. Hartford
MTNDNDSDSEFAELKIRGKIFQLPILKASIGEDVIDISRVSAEVNCFTYDPGFMSTASCKSTITYIDGDKGILRHRGYNIKDLAEKSDFLEVAYLLIYGELPSIEQYNNFTKQVAHHSLVNERLHYLFQTFCSSSHPMAIMLAAIGSLSAFYPDLLNFKEADYELTAIRMIAKIPTIAAMSYKYSIGQPFVYPDNSLDFTENFLHMMFATPCTKYKVNPIIKNALNKIFILHADHEQNASTSTVRIAGSSGANAFACISTGIASLWGPAHGGANEAVINMLKEIGSSENIPKYIAKAKDKSDPFRLMGFGHRVYKNYDPRASVLKETCKEVLKELGQLENNPLLQIAIELEAIALKDEYFIERKLYPNVDFYSGIIYKAMGIPSQMFTVLFAIARTVGWMAQWKEMHEDPGQKISRPRQLYTGYVHREYTGIGER

SEQ ID NO: 30550 - protein, 342 aa, Oryza sativa
MERYEVMRDIGSGNFGVAKLVRDVATNHLFAVKFIERGLKIDEHVQREIMNHRSLKHPNIIRFKEVVLTPTHLAIVMEYAAGGELFERICNAGRFSEDEARFFFQQLISGVSYCHSMQVCHRDLKLENTLLDGSVTPRLKICDFGYSKSSVLHSQPKSTVGTPAYIAPEVLSRKEYDGKVADVWSCGVTLYVMLVGAYPFEDPDDPRNFRKTITRILSVQYSIPDYVRVSADCRHLLSRIFVGNPEQRITIPEIKNHPWFLKNLPIEMTDEYQRSMQLADMNTPSQSLEEVMAIIQEARKPGDAMKLAGAGQVACLGSMDLDDIDDIDDIDIENSGDFVCAL

SEQ ID NO: 30551 - protein, 536 aa, Moorella thermoacetica ATCC 39073
MAKQVVFDREAREALEKGITKLTEAVRVTLGPRGRNVVLEKKFGAPTITNDGVTIAKEVELEDPLENVGALLVREVASKTNDVAGDGTTTACVLAQAIVREGMKNVAAGANPMFMKRGIEKAVAAVVENLKAQARPVETKDSISQVASISANDPQIGALVADAMEKVGKDGVITVEESKGMETAVDVVEGMQFDRGYISPYMVTDNERMEAVLEEPYILITDKKITAVADLVPVLERVVRTGKPLLIICEDMEGEALATLVVNKIRGTFTCVAVKAPAFGDRRKAMLQDIAILTGGQVITEEAGLKLENTTLDMLGQARQVRVGKEETTIVEGRGKEEAIEARIAQIRREYEESTSDYDREKLQERLAKLAGGVAVIKVGAATETEMKEKKMRIEDALAATRAAVEEGIVPGGGTALVRAQTALDGVQAQGDELTGVRLVYRALEEPMRQIAANAGVDGSVVVEKVRQSGDSMGFNAATREYVNLFEAGIVDPLKVTRSALENAASIASLVLTTESLIADIPEEEPPVPGGGMPPM

SEQ ID NO: 30552 - protein, 208 aa, Arabidopsis thaliana
MLAIFQKAFAHPPEELNSPASHFSGKTPKLPGETLSDFLSHHQNNAFSMNFGDSAVLAYARQETSLRQRLFCGLDGIYCMFLGRLNNLCTLNRQYGLSGKNSNEAMFVIEAYRTLRDRGPYPADQVLRGLEGSFAFVVYDTQTSSVFSALSSDGGESLYWGISGDGSVVMSDDIQIIKQGCAKSFAPFPNGKPKLKFFISPIKKETYF

SEQ ID NO: 30553 - protein, 418 aa, Zea mays
  misc_feature (128)..(128): Xaa can be any naturally occurring amino acid
  unsure (1)..(418): unsure at all Xaa locations
ISEERNGTRETNHQFGASESSAESSNFDSSIGDVSSPKRARAENNSIIKKYCDMGEAIGENEPCTLLPTACNLLPRQANLGEVSRAQRTIEAVEKLLLQGMGSVIESKDIIGIYRTPLLDDHGQVRYXITKKHVQVTRCHRGNANVRYAWLPCSKSTVHEMMLNSSLQVHKPPIKCAAYGEGTFLTPANRSDACVKFSAVDENRFVHMMLCRVIMGNVEIVHPGFKQHQPSSDYFDSGVDDLKNPQHYIVWDMNLNRHIYPEFVVTVKLPSKTKDYFVSQEDCQNSSDLSLVLNSSSPDCISEEMNLEAPPALGGGCAAPMLGDSMAKAPSSPWMPFSMLFAAISTKVSPQIMDMVIGCYEEFKSKKISRCELIKELRHVVGDRVLISTIMRLQDKQLPPVERREGPGASAAKMVAKP

SEQ ID NO: 30554 - protein, 186 aa, Arabidopsis thaliana
MLAIFQKAFAHPPEELNSPASHFSGKTPKLPGETLSDFLSHHQNNAFSMNFGDSAVLAYARQETSLRQRLFCGLDGIYCMFLGRLNNLCTLNRQYGLSGKNSNEAMFVIEAYRTLRDRGPYPADQVLRGLEGSFAFVVYDTQTSSVFSALSSDGGESLYWGISGDGSVDVCFIVRQGLRALTIRLI

SEQ ID NO: 30555 - protein, 215 aa, Triticum aestivum
IEFKKERKGQAKPGAGAAMSASRFIKCVTVGDGAVGKTCLLISYTSNTFPTDYVPTVFDNFSANVVVDGSTVNLGLWDTAGQEDYNRLRPLSYRGADVFLLAFSLISKASYENVTKKWIPELRHYAPGVPIILVGTKLDLRDDEQFFVDHPGAVPISTAQGEELKKVIGATAYIECSSKTQQNIKAVFDAAIKVVLQPPKQKRKKRKSQKGCSIL

SEQ ID NO: 30556 - protein, 151 aa, Mycoplasma pneumoniae M129
MSKYQKKSDGELKRTLTKLQYDVTQNAHTEPPYTNEYNRHYEKGIYVDITSGEPLFISTDKFKSGCGWPAFTKPISQDLIANYRDESHGMIRTEVRAKNSNSHLGHVFRDGPEEHGGLRYCINSAALKFIPFAEMESAGYGEYLKLFKESN

SEQ ID NO: 30557 - protein, 336 aa, Arabidopsis thaliana
MEFLVTVAEFSLWLLLIVLFGFLSVVVFEAWRRRHSNVSVETVTTLDDPKSIKPIPCPHITDPAEKYLSLIVPAYNEELRLPAALEETMDYLQDRASRDKSFSFEVVIVDDGSVDGTKRVAFDFIRKYTIDNIRVIPLGKNQGKGEAIRKGMLHSRGQLLLMLDADGATKVTDLEKLENQINAVAREEYSIRNPASKDMDFKIGDVQVSAFGSRAHLEEKALATRKWYRNFLMKGFHLVVLLAAGPGIRDTQCGFKMFTRAAARRLFTNVHLKRWCFDVELVYLCKRFNIPMVEISVKWSEIPGSKVSMLSIPNMLWELALMSVGYRTGMWKIHQV

SEQ ID NO: 30558 - protein, 484 aa, Cryptococcus neoformans var. neoformans JEC21
MGAGCCKPEAIDFEGEVNLFHFYLLRSVGKGAFGKVRVVQHKHTKTLFALKYINKQKCVKMRAVANIVQERRLLEEIDHPFVVNLRYAFQDDENCFFVLDLMLGGDLRFHLDRAGAMSEEIVRFYVAEIALAIDYLHSKRIVHRDLKPDNILLDEKGHAHITDFNIAVHFSDRRLLTGVAGSMAYMAPEVLTKRGYSAPVDFWSLGILAYELLFGKRPFRGRTNSGLTNSILNEPLSWPEDAPGRCSSDGMHAIRGFLERDPNKRLGYRPGGGGMDDIKNHPWFRNINWEQLYDKDVVPPFEPDSKRANFDATHELEELLLEENPLKARKRKEGQDIALLSPEMRMMEQHFKVFDYTKAQRRSYYIPNPSQDSTLSAAAAISSSNAIRQSPQIDITRPETPSDQTGVISKTGMDVEAQILDGGGMANMGGRGGWRSSDLLERGHTVSDIRPTSTKLLTTSQHSSSEPSPTLEEHVVDRYGENAF

SEQ ID NO: 30559 - protein, 244 aa, Vibrio vulnificus CMCP6
MINHKIYQTAEQVVESLANDMKAFSEMGRPVHISLSGGSTPKMLFKLLASETYATSIQWQNLHFWWGDERCVAPDDAESNYGEANALLFSKLRELSQVSIPAENIHRIRGEEQPEVEAARFAKEMADVIPTDNGTPVFDWILLGVGADGHTASLFPGQTNYDDENLSVLASHPESGQIRVSKTARVLEAAKRISYLVLGAGKADIVEEINSNPAEELPYPAAKIHAKAGLTEWYLDLDAAAKIA

SEQ ID NO: 30560 - protein, 124 aa, Glycine max
MEDLKEKVNEGEPTQIKYRGVRRRPWGKFAAEIRDSARHGARVWLGTFNTAEEAARAYDRAAFEMRGATAILNFPDEHPPCNVTSLSKKSSSSNTEIGKQVVVFECLDDKLLEELLDCDGENHQ

SEQ ID NO: 30561 - protein, 348 aa, Magnaporthe grisea 70-15
MDADSYRYRPPRPNYLPRDVEVDKPIVEDYVDPLDVVSDADNAAFYNKIKRVAETYNITRPKGHNVSFHVNPEMEKHHFGQTHPMKPWRLTLSKALISSYGMNFAMDNYVSRAATYDELTMFHASDYIQFLGTVLPEPIPRDVDNPYPDLKFNLGGSDCPLFEGLYDYCSMSAGGSLDAARKICNNQSDIAIAWGGGLHHAKRSEASGFCYINDIVIAILQLLRCHPRVLYIDIDVHHGDGVEEAFYSTDRVMTVSFHKYDPVNFFPGTGPLDENGPKNELNPGAHHAINVPLNDGITDDQYSALFENVIGQCVAKFRPTAIALQCGADSLAGDRLGRFNLQVQGHGS

SEQ ID NO: 30562 - protein, 343 aa, Cryptococcus neoformans var. neoformans JEC21
MPAETRSADRVSNYNKFWEKKSANDNDTHRANRLDQYTEVVNGYYDGATELYEYGWAESFHFCRFYKGEAFLQALARHEHYLASMMQLKPGMRVLDVGCGVGGPAREIARFSDATIVGVNNNDFQIGRATAKSKKAGLSDKVSFVKGDFMKLSEQFGENSFDAIYAIEATCHAPNFEGIYGEIFKCLKPGGVFGVYEWCMTDAWDPSNPEHKEIAHGIEVGDGIPEMRNLAAARSALKTVGFEIEHEEDLADRDDAVPWYYPLEGDIWKAQTTWDMFTCWRTSKMGYTITQNAVWFLEKFGLVPKGTYSVGQSLIVASKALVAGGRTKLFTPMALWVARKPAN

SEQ ID NO: 30563 - protein, 214 aa, Cynodon dactylon
MAPMKLYGATLSWNVTRCVAALEEAGSEYEIVPIDFGTGQHKSPEHLARNPFGQVPALQDGDLYVFESRAICKYACRKNKPELLKEGDIKEAAIVDVWLEVEAHQYSSALNPILFEVLIKPMLGGTCDQQKVEENLEKLKNVLQVYEARLSKCKYLAGDFISLADLNHIAMTLCLFATPHASVLDAYPHVKAWWTGLMERPSAQRVAALMKPPA

SEQ ID NO: 30564 - protein, 282 aa, Atriplex canescens
MSKEVISEEGQVHQHGKDYVDPPPAPFFDMGELKLWSFWRAAIAEFIATLLFLYITVATVIGYKKETDPCASVGLLGIAWSFGGMIFVLVYCTAGISGGHINPAVTFGLFLARKVSLLRALVYMIAQCAGAICGVGLVKAFMKGPYNQFGGGANSVALGYNKGTAFGAELIGTFVLVYTVFSATDPKRSARDSHVPILAPLPIGFAVFMVHLATIPITGTGINPARSFGAAVIYNKKRVWDDHWIFWVGPFVGALAAAAYHQYVLRAAAIKALGSFRSNPTN

SEQ ID NO: 30565 - protein, 476 aa, Bacillus cereus ATCC 14579
MQNKIIVMFQKDFRLYDNPALFEAVQSGEVLPVYIQDETFSIGSASKWWLHHAVIDVKKQLEALGSTLIIRKGRTEEEILSLIEQLDITAVYWNICYDPDRLQSNQKMKMMLEDKGIICKEFNSHLLLEPWIIKKKDNTEYKVFTPFYNAFQKQVIPKPFSRVQSIKWGNSLPASLSVSELQLLPIIPWTSHMEVIWDPTEEGAYKTFKKFFSSKLVSYSEGRDFPGQNVHSMLAPYLSFGQISVKLMFHYLINKSTERQCSLFEKQVNSFIRQLIWREFSYYLLYHYPFTVYKPLNKSFENFPWDKEEELLRVWQKGKTGYPFIDAGMRELWQTGFMHNRARMAVASFLVKHLLIPWQEGAKWFMDTLLDADIANNTMGWQWVAGSGADASPYFRIFNPITQGEKFDKNGEYIRRWVPELRDIPNKYIHKPWEAPEHILQKSNIKLGDTYPFPIVDHKAARERALCAYKSMKEFV

SEQ ID NO: 30566 - protein, 449 aa, Thermus thermophilus
MGLIIVANRAPFRLTPEGLVPAVGGLATALLPVLERRHGVWVAAGEWREKGQAATPRESQVRLEQVFLPEKEWQGYYGGFSNRVLWPLCHYFLERVELRRDFYQDYQRANRRFAERVAQVFREGDTVFVQDYHLLLLPRLLRERIPAKIGFFFHIPWPSSGVFRILPWGRALVEGVLGADLIGFHTPEYVENFLRTAAYYGYQVEENRVRVGERWVRVEAHPLGIDTGRFGELAQDPHIGLHARALKRLAGAERLILGVDRLDYTKGILERLLAYERLLQSYPQWRGRVAFFQIATPSRTSVHAYRELKRRVDEVVGRIMGSFLREDWVPLRYFYQTYTQEELAAFYRAADVALITPLRDGMNLVAMEYAYTTEDGVLVLSNLAGAAEYLKEALLVNPYDLDGMAQALDRALRMPGGERRERLSALKARIEALDVQGWAERFLASLEEG

SEQ ID NO: 30567 - protein, 278 aa, Zea mays
MAQLPPRVPTAVHRWPEGGHHGAAAWADDFAEFAASRRGAHRRSLSDSVAFVEVAPAAGEFDRLDDDQLMSMFPDEAAAGGGGGGSSAAGSENNGGSSDSYGDRRGGGGPAAGGTSTTTSCNGFDGGEHNEAADAQATGQAAAAAAASTELIRDPKRVKRILANRQSAQRSRVRKLQYISELERSVTTLQNEVSALSPRVAFLDQQRTILTVGNSHLKQRIAALAQDKIFKDAHQEALKKEIERLRQVYEQQNLKMSAGAAASDHGPPPVRAEKELMS

SEQ ID NO: 30568 - protein, 965 aa, Thermus thermophilus
MDPLWYKDAVIYQLHVRSFFDANNDGYGDFEGLRRKLPYLEELGVNILWLMPFFQSPLRDDGYDISDYYQILPVHGTLEDFKRFLDEAHGRGMKVIIELVLNHTSIDHPWFQEARKPGSPMRDWYVWSDTPEKYKGVRVIFKDFETSNWTFDPVAKAYYWHRFYWHQPDLNWDNPEVEKAIHQVMFFWADLGVDGFRLDAIPYLYEREGTSCENLPETIEAVKRLRKALEERYGPGKILLAEANMWPEETLPYFGDGDGVHMAYNFPLMPRIFMALRREDRGPIETMLKETEGIPETAQWALFLRNHDELTLEKVTEEEREFMYEAYAPDPKFRINLGIRRRLMPLLGGDRRRYELLTALLLTLKGTPIVYYGDEIGMGDNPFLGDRNGVRTPMQWSQDRNAGFSRAPYHALFLPPVSEGPYSYHFVNVEAQRENPHSLLSFNRRFLALRNQHAKIFGRGSLTLLPVENRRVLAYLREHEGERVLVVANLSRYTQAFDLPLEAYQGLVPVELFSQQPFPPVEGRYRLTLGPHGFALFALKPVEAVLHLPSPDWAEEPAPEEADLPRVHMPGGPEVLLVDTLVHERGREELLNALAQTLKEKSWLALKPQKVALLDALRFQKDPPLYLTLLQLENHRTLQVFLPLLWSPQRREGPGLFARTHGQPGYFYELSLDPGFYRLLLARLKEGFEGRSLRAYYRGRHPGPVPEAVDLLRPGLAAGEGVWVQLGLVQDGGLDRTERVLPRLDLPWVLRPEGGLFWERGASRRVLALTGSLPPGRPQDLFAALEVRLLESLPRLRGHAPGTPGLLPGALHETEALVRLLGVRLALLHRALGEVEGVEGGHPLLGRGLGAFLELEGEVYLVALGAEKRGAVEEDLARLAYDVERAVHLALEALEAELWAFAEEVADYLHAAFLQAYRSALPEEALEEAGWTRHMAEVAAEHLHREERPARKRIHERWQAKAGKA

SEQ ID NO: 30569 - protein, 230 aa, Zea mays
  misc_feature (59)..(59): Xaa can be any naturally occurring amino acid
  misc_feature (74)..(74): Xaa can be any naturally occurring amino acid
  misc_feature (83)..(83): Xaa can be any naturally occurring amino acid
  misc_feature (95)..(95): Xaa can be any naturally occurring amino acid
  unsure (1)..(230): unsure at all Xaa locations
GFPLNYPLYSQPGCGGLLSLAAKVKEIQVSLVLGFQVERKQSIFVEGKTIQRTERLILXTLQWRMHPGTAISFXDHIIRGFGXKWHQQLDFCRKXERLEISVNADPRFMRCFPSVLDNAIMILVFEELKPCDEVEYQSQIGTLLKVNQEKVNECYELLLEHNSSKKRMTTSVDQDSPSGVLVFDVSSNSSWNVYTGASVSSSYQSPERPVKRRRVQEQQMRLPSIQAVDF

SEQ ID NO: 30570 - protein, 164 aa, Solanum tuberosum
FTTSVMKPLRHILGERKSRKIALFLLINTAYMVVEFAAGFMSNSLGLISDACHMLFDCAALAIGLYASYISRLPANGQFNYGRGRFEVLSGYTNAVLLVLVGALIVLESFERILDPQEVTTNSLLSVSVGGLLVNIVGLIFFHEEHHHAHGGSCSHSHSHSKTQ

SEQ ID NO: 30571 - protein, 456 aa, GIBBERELLA ZEAE PH-1
MTSSAKLGENPISTLANGQPTENPGSTQQIRYGQSNGGLVVLSDTQTIEILAHFARERIPERSVHAKAAGATGEFEVLEDLSDITDANFLSEKGKKTPMLMRISTVGGEKGSADTVRDVRGWSTKLYTEEGIQDFVFNDLPVFFIREPIKFPSMNRSHKRHPRTNVPDNAMFWDYHVNNPEGIHALMHLFGQRGIPASLRHISGFGVHTYTLNKADGSYVYVKWHYKPEGGIETMDSETAARLAGTDPDYHVKDLFNAIEKGDYPSWIVYIQVMRPEEVMAAPIDIFDCTYTWPHEKYPLRRVGQMTLKKNPDNYFQDIEQACFSPSNMVPGIGPSADPVLQARMFSYPDAHRYRVGPNYFQLPPNRPRNQVYAPCVRDGPGTMNGNYGGDPDYVFSQLRPVSARELWKIICGEDKGKRQFFNNIAPTIKDLPVKLQDYLSGVDPEIKTILTAHMN

SEQ ID NO: 30572 - protein, 332 aa, Leptospira interrogans serovar Copenhageni str. Fiocruz L1-130
MKFYKIFISTYPFGYYNSEPMEILNQSGWEIVTNPLKRKLTPLEVSEFAKEVDGIIAGTEDLTPLIHKNRNLKIISRVGIGLDSVPLNLCKERGIAVAYTPDAVTMAVAELTIGLMISSTRKVFLAHQELKTGGWSRFTGKRLGESTIGIVGVGRVGLNVIRILSEFRPKMILINDLKDKKKEVSEILDFKNVPYRFTEKEEIYSSSDIVSLHIPLSHKTKNLIGKKEFDLFPKDSFLINTARGGIVNENDLYDVLRSNRIGGAAIDVFEQEPYKGNLTELDNIILTEHMGSCSYDCRLLMEKGAAEEVTRFFRGESLLNPVPEEEYQNQIV

SEQ ID NO: 30573 - protein, 279 aa, Crocosphaera watsonii WH 8501
MANVDQEKTKTASPSTTFSMTQGTREPPAPICFPKFATTQQATLFNKLKNNQFSGKVSCQTEQGRESHIYCYLGRIIYVTGGTHPVRRWRRSVLKISPKLRKIGLQSIAIQQYIAASIRQNNPISWDYDLLCSWLKQQKINRTELLEIITSMVIEVLFDLMQGGQVSCHFYPHKKVLYPSVLLDPEQTIVTTWKSWQNWHLSTLGSHSPNEAPVIKSLEKLKKRSSAKTYEVLSKYIDGNRSLRDLAVYMEQDVLRLTSSLALYIQLGLINLKEIKDLP

SEQ ID NO: 30574 - protein, 411 aa, Vitis vinifera
MNALAATNRNFRHASRILGLDSKLEKSLLIPFREIKVECTIPKDDGSLATYVGFRVQHDNARGPMKGGIRYHPEVDPDEVNALAQLMTWKTAVVDIPYGGAKGGIGCTPKDLSMSELERLTRVFTQKIHDLIGTHTDVPAPDMGTNAQTMAWILDEYSKFHGHSPAVVTGKPIALGGSLGREAATGRGVVFATEALLAQHGKSIKGLTFVIQGFGNVGSWVARLIGERGGKIIAVSDVTGAVKNQNGLDIVDLLRHKEETGCLTNFSGGDHMDPNELLTHECDVLIPCALGGVLNKENAADVKAKFIIEAANHPTDPEADEILSKKGGVILPDIYANAGGVTVSYFEWVQNIQGFMWEEEKVNNELQKYMTKAFHNIKAMCQSHNCSLRMGAFTLAVNRVACATTLRGWEA

SEQ ID NO: 30575 - protein, 131 aa, Crocosphaera watsonii WH 8501
MPQEKSLAHDENKLIACVDDNPRMCQLMKDIIAEAGHQFLGINDSSKIIPLCFIHQPNLIFIDLEMLGIDTWKVCRKLRNSKALQQRPIIVLVGQKGVWEPLHNKISGSSAFISKPLSKEDILDTILQHLP

SEQ ID NO: 30576 - protein, 413 aa, Fusobacterium nucleatum subsp. nucleatum ATCC 25586
MKRVVVTGLGLISSLGIGLEESWKKLIDGETGIDLITSYDTTDQPVRIAGEVKGFEPTDYGIEKKEVKKLARNTQFALIATKMALEDANFKIDETNADDVGVLVSAGVGGIEIMEEQYKNMLEKGPKRISPFTIPAMIENMAAGNIAIYYGAKGPNKSIVTACASGTHSIGDGFDLIRHGRAKAMIVGGTEASVTKFCINSFANMKALSTRNETPKTASRPFSKDRDGFVMGEGAGILILEELESALARGAKIYAEMVGYGETCDANHITAPIETGEGATKAMRAALKDANIPLEDVTYINAHGTSTPTNDVVETRAIKALFGDKAKDLYISSTKGATGHGLGAAGGIEGVIIAKAIADGIIPPTINLHETEEECDLNYVPNKAIKTDVKVAMSNSLGFGGHNSVIVMKKFEK

SEQ ID NO: 30577 - protein, 3788 aa, Streptomyces bikiniensis
MSSTSPATNEEKLRDYLRRAMTDLHEAREQIRRTESARHEPIAIVGMGCRLPGGVSSPEGLWDLVASGVDAVSPFPTDRGWDVGGLFDPEPGVPGRSYVREGGFLHEAGEFDAGFFGISPREALAMDPQQRLLLETSWEALERAGIDPHTLRGSRTGVYAGVMYHDYGSTATVSVASDDETAGFLGTGTSGSVASGRISYVLGLEGPAVTVDTACSSSLVALHLAVRALRSGECDLALAGGVTVMAEPGVFVEFSRQRGLAADGRCKAFAAAADGTGWAEGVGVLAVERLSDAVRHGRRVLAVVRGSAVNQDGASNGLTAPNGPSQQRVIRQALADARLGVADVDVVEGHGTGTRLGDPIEAQALLATYGQRDAGRALRLGSLKSNVGHTQAAAGVAGVIKMVMAMRHGVLPKTLHVDEPTAEVDWSAGAVSLLREQEAWPEVGRLRRAAVSSFGVSGTNAHVVVEEAPASEAPVAGEPVEPVEPGAVGLLPVVPVVVSGRSAGAVAELASRLNESVRSDRLVDVGLSSVVSRSVFEHRSVVLAEDSAELHTGLVAVGTGVPSPGVVSGVASVEGGRSVFVFPGQGTQWAGMALGLWAESAVFAESMARCEAAFAGLVDWRLADVLGDRSALERVDVVQPASFAVMVSLAELWRSLGVVPDAVVGHSQGEIAAAVVAGGLSLEDGARVVVLRARLIGRELAGHGGMASVALPVAVVEERLAAWAGRLGVAVVNAPSATVVAGDVDAVAEFVTACEVEGVRARVLPVDYASHSAHVEELRAELEQILAGIDPVAGETPLYSTVEAGVVDTASMDAGYWFRNLRRPVRFQETVERLLADGFRVFVECGAHPVLTGAVQETAESTGRQVCAVGSLRRDEGGLRRFLTSAAEAFVQGVEVSWPVLFDGTGARTVDLPTYPFQRRRYWLESRPPAAVVPSGVQDGLSYEVVWKSLPVRESSRLDGRWLLVVPETLDADGTRIAHDLQHALTTHGATVHTLALDPSAAHFDGLFDGILQEETDVTGIFSLLGLASGPHPDHGEVELAGAASLTLMRQAQRDGFRAPVWAVTRGAVSVVPGEVPETAGAQLWALGRVAGLELPDRWGGLIDLPADADARTAGLAVRALAAGIADGEDQLAVRPSGAYGRRLVRATARRGRKDWRPQGTVLLAGHLDAVGEPLARWLLTGGADHVVLADPALTELPATLADLAQTVTTAAAPDLADRAVLAALVTEYVPATVVVVPPAAELAPLASISPADLAAAVTAKSATAAHFDALLDGPHAPELVLISSVAGIWGGVRQGAYAVGAAHLDALAARRRARGLSAASVAWTPWAGSVTADGSAAESLRQYGIAPLEPQAALAELDRALNQQLHGGGGDAAVADIDWERFLASFTSVRPSVLFDELPEVRRLREAEAAAMADQAAARTGAPGGTELARSLRAKSLNAQRTALLELVTAHVAAVLGESVPEAIDRSRAFKDIGFTSMTAMELRNRLKEATGLALPASLVFDHPHPGALADHLREELLGEDGAAGADSAAEEPSATSPTVQDEPIAIIGMACRLPGDVGTPDELWELLETGRDAMSDLPVNRGWDVAGLYDPDPDAAGRSYVREGGFLHDAGEFDAEFFGISPREALAMDPQQRIVLELAWESFERAGLDPAGRRGSRTGVFMGTNGQHYMPLLQNGNDSFDGYLGTGNSASVMSGRISYTLGLEGPALTVDTACSSSLVALHLAVRALRNGECDLALAGGATVMSTPEVLVEFSRQRAVSADGRCKAFSASADGFGPAEGAGVLLVERLSDAVRHGRRVLAVVRGSAVNQDGASNGLTAPNGPSQQRVIRQALADARLGVADVDVVEGHGTGTRLGDPIEAQALLATYGQRDAGRPLRLGSLKSNVGHTQAAAGVAGVIKMVMAMRHGVLPKTLHVDEVSPHVDWSAGAVSLLTEQEPWPEVGRPRRAAVSSFGLSGTNAHVVVEEAPVGEAGQAAGDARLAVVPVVVSGRSAGAVAELASRLNESIRSDRLVDVGLSSVVSRSVFEHRSVLLAGDSGELHTGLVAVGTGVPSPGVVSGVASVGGGRSVFVFPGQGTQWAGMALGLWAESSVFAESMARCEAAFEGLVDWSLADVLGDGSALERVDVVQPASFAVMVSLAELWRSLGVVPDAVVGHSQGEIAAAVVAGGLSLEDGARVVVLRARLIGRELAGRGGMASVALPVAVVEERLAGWAGRLGVAVVNGPSATVVAGDVDAVAEFVTACEVEGVRARVLPVDYASHSAHVEDLKAELEEVLAGIGPVTGGIPFYSTSEAAQIDTAGLDAGYWFGNLRRPVRFQETVERLLADGFRVFVECGAHPVLTGAVQETAESTGRQVCAVGSLRRDEGGLRRFLTSAAEAFVQGVGVFWPALFDGTGARIVDLPTYPFQRRHYWYNDPARRTGDATSFGMAQAGHPLLDAGTELPESGEHLYTARLAADSHPWLLEHTLLGAPLLPGAAFVDLVLWAGGEVGCDLIEELTLTSPLLLSDSAALQLRLVVGTADAEGRRTITVHSRPDGDPRTTRTPAASSETSPDAESDTEIRRDTSAWTKHAQATVAPAPDVPPSGVDAEGDAVRPAVEWSVAATESDAFQAEDFYASFAAHGYGYGPLFQGVRSGRQDGTDVYAEVALDHDRLPSAEQFGLHPALLDAAFQTMRLGSFFPDDGQARVPYTFRGIRLYAPGAARLRVRVSAVGADAVRVECADERGRLVCEIDALVVSTVSPDQLRPAGQDATQDMLHRIEWPVLSPPTGSATSPAPPRWIVVGGEDEGLGLGGLRLDGPRLDGPGLAEALSEAGMGTERHRNLADALSAVRTPVDTAGSAAAAGTTSLIAVPVPQSPTMDAGAVRHAVHRALELVQGWVAADEAAEEGGSDGAAADRRLVLVTSGAVSTGDADPLRDPVAAAVWGLIKSAQSEQPGRIVLVDLDEGAVDGAALAAAISTGEPQLALRDGDVHVPRLAPLSVRDSQTLLPPAGTRAWHLVGAGTGTLSDLALVPAQTDTVALAPGQVRIAVRAAGLNFRDTLIALGMYPGEGVMGAEGAGVITEVGPDVVSLAVGDRVLGMWTDGFGPYVVADHRMVAPMPRDWSYAEAASVPAVFLSAYYGLRHLAGLRAGQSVLVHAAAGGVGMAAVQLARHFGAEVFGTAGTAKWDALRAQGLDDRHIAGSRTLDFADRFLDATEGRGVDVVLNSLAGDFVDASLRLLPRGGRFVELGKADVRDAAQVAADRPGTVYRAFELMEAGPELIGRMLNELLELFESGALRLLPVTPYDIRRAPDAFRTLSQAGHVGKLVLTMPPAFEPHGTVLITGGTGNLGGTLARHLVTEHGVRHLLLAGRRGPEAEGAAELVRELHDLGASVTVAACDVADRAALRKLLGGIPPERPLTGVVHAAGVLDDGVVTSLTPDRVDGVLRPKVDAALNLHEAALDPELGLDITAFVLFSSVAALLGGSGQGSYAAANGFLDGLAQYRRGRSLPALSLGWGLAGSGRMTSHLDSRALLRRMARGGVLPLSPAESMALFDAAQGFDEALQVPARFHTAALGADGNVPPLFNGLIRGGTAHAEARRRTVGASPAGGPAGGEPVNLADRLSGLTEDEQRALLLDTVRTHAALVLGHTGTDGIQADRAFKDLGFDSLTAVEMRNRLTAATGLHLAATLVFDHPAPADLAEHLRSRLVPEGTDVPPLLAELGRLETAFKKLTTADLASVVPDDIARDEIAVRLAALGSLWNGLHGNGLSGDAAQKHGDSIVEDIDSADDDEIFAFLDESFGDS

SEQ ID NO: 30578 - protein, 373 aa, Listeria monocytogenes EGD-e
MTLSKGLENVYVAETSISSIIDDMLTYVGYGIDDLMENNASFEEVIYLLWHLRLPNKDEFKKFKREIQENMAVSETIITSLRMQNHQKLHPMSVLRTTVSMLGVFDTEAELDDGEAVYRKGLRLQAKMPTIVAAFSRIRRGLDPIPPREDLNMAANFLYMITGEEADELSVEAMNKALVLHADHEFNASTFTARVCVATLSDVYSGVTAAIGALKGPLHGGANERVFDMLEEIDQAGDVRNYIQEKIDTKQKIMGFGHRVYRGGDPRAQHLREMSRKLTAEKGEEKWFDISLQVEESVWELKHLKPNVDFYSASVYHALGIDRDLFTLVFSVSRVSGWLAHIFEQYRDNRLIRPRAIYVGPENRSYLPVEERI

SEQ ID NO: 30579 - protein, 170 aa, Brassica napus
LTSCTDIGGVRLWDVRSGKIVQTLETKSPVTSAEVSQDGRYITTADGSSVKFWDANHFGLVKSYDMPCNIESASLEPKSGEKFVAGGEDMWVRMFDFYTGEEIGCNKGHHGPVHCVRFSPTGESYASGSEDGTIRIWQTTPNHSVDEVAKKIEGFHINKEGKTADKLSDA

SEQ ID NO: 30580 - protein, 482 aa, Zea mays
MAASVTVENLNPKVLKCEYAVRGEIVIHAQRRQQQLQTQPGSLPFDEILYCNIGNPQSLGQQPVTFFREVLALCDHPCLLEKEETKSLFSADAISRAKQILATIPGRATGAYSHSQGIKGLRDAIAAGIMSRDGFPANADDIFITDGASPGVHMMMQLLIRNEKDGILCPIPQYPLYSASIALHGGTLVPYYLNEKNGWGLEISDFKTRLEDVRSKGIDVRALVVINPGNPTGQVLAEDNQYDIVKFCKNEGLVLLADEVYQENIYVDNKKFNSFKKIVRSMGYGEDDLPLVSLQSVSKGYYGECGKRGGYMEITGFSAPVREQIYKIASVNLCSNITGQILASLVMNPPKAGDESYASYKAEKDGILESLARRAKALEDAFNKLEGFSCNKAEGAMYLFPQIHLPQKAIEAAKAAKKAPDAFYALRLLESTGIVVVPGSGFGQVPGTWHIRCTILPQEDKIPAVISRFRAFHEAFLAEYRD

SEQ ID NO: 30581 - protein, 599 aa, Frankia sp. CcI3
MREYTSPPLVTIADDATLTDAVFRNAAAHPDSTLIQHKIDDEFVGMTVREFHDHVVATARGFIARGVRPGDRVGLASRTRFEWTIVDYAAWLAGAVCVPIYETSSPGQIEWILRDAGVEVLVVENDELAERVAQIRDGVPALREVLVIEHGALAGLAVDGAGIAPERLTAARASVNADSLATIIYTSGTTGQPKGCEITHRALLFTAEAAIATLPELFAPGASTLLFLPLAHVFARMLQVGVVQGAFTLAYTPDSRTLLPDLAKVRPTFLLSVPRVFEKVHAGARHKAHAEGRGWIFDAAENTAVAYSRALDGGGPGLLLRLRHRLFAALVYGKLQAALGGRARYAVSGGAPLGERLGHFFRGIGFTVLEGYGLTETSAPAAANRPGNVRMGTVGQPFPGVTIAIADDGEILIRGPLLFRGYRNNELATKEALDAEGFLHTGDLGDLDADGFLRITGRKKELLVTAGGKNIAPAPLEHIIQSHPLVSQAMLIGDRRPFVAALVTLDPEAFDRWRSSAGKPAGATVADLIDDAGLRTEIQNAIDAANATVSHAESIKKFAILPQDFTVETGELTPSLKVRRSLVLDRFSQAVEDIYATPR

SEQ ID NO: 30582 - protein, 452 aa, Oryza sativa
  misc_feature (341)..(341): Xaa can be any naturally occurring amino acid
  unsure (1)..(452): unsure at all Xaa locations
MAAAAGKAAMERHQSIDAQLRLLAPGKVSEDDKLVEYDALLVDRFLDILQDLHGPHLREFVQECYELSAEYENDRDEARLDELGRKLTSLSPGDSIVVSSSFSHMLNLANLAEEVQIAHRRRIKLKRGDFADEASAPTESDIEETLKRLVTQLGKSREEVFDALKNQTVDLVFTAHPTQSVRRSLLQKHGRIRNCLRQLYAKDITADDKQELDEALQREIQAAFRTDEIRRTPPTPQDEMRAGMSYFHETIWKGVPKFLRRIDTALKNIGINERLPYNAPLIQFSSWMGGDRDGNPRVTPEVTRDVCLLARMMAANLYFSQIEDLMFELSMWRCSDELRIXADDLHCSSRKAAKHYIEFWKQIPPNEPYRVILGGVRDKLYYTRERTRHLLTTGVSEIPEEATFTNVEEFLEPLELCYRSLCACGDKPIADGSLLDVNVKGGLIWLLQPDPK

SEQ ID NO: 30583 - protein, 197 aa, Oryza sativa
  misc_feature (60)..(60): Xaa can be any naturally occurring amino acid
  misc_feature (136)..(136): Xaa can be any naturally occurring amino acid
  misc_feature (138)..(138): Xaa can be any naturally occurring amino acid
  misc_feature (154)..(154): Xaa can be any naturally occurring amino acid
  misc_feature (177)..(177): Xaa can be any naturally occurring amino acid
  misc_feature (181)..(181): Xaa can be any naturally occurring amino acid
  misc_feature (185)..(185): Xaa can be any naturally occurring amino acid
  unsure (1)..(197): unsure at all Xaa locations
MQIFVKTLTGKTITLEVEPSDTIENVKAKIQDKEGIPPDQQRLIFAGKQLEDGRTLSDYXIQKESTLHLVLRLRGGMQIFVKTLTGKTITLEVEPSDTIENVKAKIQDKEGIPPDQQRLIFAGKQLEDGRTLSDYXIXKESTLHLVLRLRGGMXIFVKTLTGKTITLEVEPSDTIEXVKAXIQDXEGIPPDQQRLIF

SEQ ID NO: 30584 - protein, 441 aa, Arabidopsis thaliana
MVEDRTYLMSRIFSSSRLSESKWPYMYPQPEDSSESNLINGKRALENDVDELRQSKSPRLMGFSIHGNEAIEEDEQEQDQSDSNNNGNSDGDSLINDIGRDNSISCLIRCSRSGYGSIASLNRSFRSLVKTGEIYRLRRQNQIVEHWVYFSCQLLEWVAFNPFERRWMNLPTMPSGVTFMCADKESLAVGTDLLVLGKDDYSSHVIYRYSLLTNSWSSGMRMNSPRCLFGSASLGEIAIFAGGFDSFGKISDSAEMYNSELQTWTTLPKMNKPRKMCSGVFMDGKFYVIGGIGGNDSKVLTCGEEFDLETKKWTEIPEMSPPRSREMPAAAEAPPLVAVVNNELYAADHADMEVRKYDKESKKWFTLGRLPERADSVNGWGLAFRACGERLIVIGGPRSSGGGYIELNSWIPSSDRSPPLWTLLGRKHSSNFVYNCAVMGC

SEQ ID NO: 30585 - protein, 144 aa, Glycine max
  misc_feature (16)..(16): Xaa can be any naturally occurring amino acid
  misc_feature (111)..(111): Xaa can be any naturally occurring amino acid
  misc_feature (130)..(130): Xaa can be any naturally occurring amino acid
  misc_feature (135)..(135): Xaa can be any naturally occurring amino acid
  unsure (1)..(144): unsure at all Xaa locations
MASNLAANMATCSHLXQSEAASAGAKLLCFPEAFSYVGTMDGDSVLVAEPLDGPIMNHYCSLARESDIWLSLGGFQEIGSDPQHLCNTHVIVDDTGKIISSYRKIHLQDHXTIWFDVDVPGGRVYKESSXTESGXDIVAVDSPI

SEQ ID NO: 30586 - protein, 432 aa, Moorella thermoacetica ATCC 39073
MSSRFIGVDEKPALPYLIMYGIQHVLAMFAGIVAVPLMVGTALKLPGEQITILVQGSLLTSGIGTLVQSLGIGRLGARLPICMGTAFVFISPFISVGSQLGIQAILGAVIVGGIVEFVFSFFVWRIQKYVPPVVTGTVVVLIGMGLMPLGFTWLAGGESSLFGQPISFAIGGLVLVILILINQFTKGFWPSISVALAIVVGYLAAGIAGVLNLGLVKEATWFAIPKVFSFGLPKFSFPAILAVLVAQFASMLETIGDTYATGLVAHKEIGRRELSGAISVDGLLSSIAVLFNGLSITSFSQNIGVISITGVASRFAVAVSGIILLLMGLVPKFAALIASMPAPVLGGAALVMFGAIAGSGILQFREAKVFGEREIFIFAISVALGMGFGLHPEGALEHLPSYLTVILGSGVAVGGITAIILNQLLPLRQKEE

SEQ ID NO: 30587 - protein, 568 aa, Zymomonas mobilis
MSYTVGTYLAERLVQIGLKHHFAVAGDYNLVLLDNLLLNKNMEQVYCCNELNCGFSAEGYARAKGAAAAVVTYSVGAHSAFDAIGGAYAENLPVILISGAPNNNDHAAGHVLHHALGKTDYHYQLEMAKNITAAAEAIYTPEEAPAKIDHVIKTALAKKKPVYLEIACNIASMPCAAPGPASALFNDEASDEASLNAAVDETLKFIANRDKVAVLVGSKLRAAGAEEAAVKFTDALGGAVATMAAAKSFFPEENPHYIGTSWGEVSYPGVEKTMKEADAVIALAPVFNDYSTTGWTDIPDPKKLVLAEPRSVVVRRIRFPSVHLKDYLTRLAQKVSKKTGSLDFFKSLNAGELKKAAPADPSAPLVNAEIARQVEALLTPNTTVIAETGDSWFNAQRMKLPNGARVEYEMQWGHIGWSVPAAFGYAVGAPERRNILMVGDGSFQLTAQEVAQMVRLKLPVIIFLINNYGYTIEVMIHDGPYNNIKNWDYAGLMEVFNGNGGYDSGAAKGLKAKTGGELAEAIKVALANTDGPTLIECFIGREDCTEELVKWGKRVAAANSRKPVNKLL

SEQ ID NO: 30588 - protein, 201 aa, Chlamydomonas reinhardtii
  misc_feature (75)..(75): Xaa can be any naturally occurring amino acid
  unsure (1)..(201): unsure at all Xaa locations
MLLTRKNVAVRPARAARRDVRAMSLLGNLFGGGSKPTSSTSNFHQLSALDIDKKNVDFKSLNNRVVLVVNVASKXGLTAANYKEFATLLGKYPATDLTIVAFPCNQFGGQEPGTNAEIKAFASARGFSGAGALLMDKVDVNGANASPVYNFLKVAAGDTSDIGWNFGKFLVRPDGTVFGRYAPTTGPLSLEKYIVELINSR

SEQ ID NO: 30589 - protein, 433 aa, Arabidopsis thaliana
MRRRRCDLQPKRTRMCDLQPKRTSMCDLPPKLVGEKILTRIPITSLRAVRSTCKLWNALTKDRVLGKAAAQFLGFMTMDSKVCSVRFHLRRSKEEEEDTMDLSIKQVDLLNQVEISRVYHCDGLLLCVAKDNSRVVVWNPYLGQTRWIRPRTESNIGDSYALGYDINRNHKILRMVQTRNVSVYRYEIYDLRSNSWRVLEVTPNGEMDPNHPLYGVSVKGNTYFFAHEDSSSGEIDEDGDIIDLEDFLLCFDFTTETFGLRLPLPFHSTIDATVTLSCVRDQQLAVLYHNEGLHSDDRFTTVEFWVTTSIEPNSVSWSKFLTVDMRPLALTGVRFDNDMGATFFIDEDEKVAVVFDLDGYLSTESARYHTAFISGKDGFFKPVTLGVAPNVGEPCPRTGHIPTTYRPPLVCSSTYLPSLVQVNQQRKRRERHV

SEQ ID NO: 30590 - protein, 466 aa, Salmonella enterica subsp. enterica serovar Typhi Ty2
MPHSWDYDAVVIGSGPGGEGAAMGLVKQGARVAVIERYHNVGGGCTHWGTIPSKALRHAVSRIIEFNQNPLYSDHSRLLRSSFADILNHADNVINQQTRMRQGFYERNHCEILQGNAHFIDEHTLALECHDGTVETLTAEKFVIACGSRPYHPNDVDFSHPRIYDSDSILSLHHEPRHVIIYGAGVIGCEYASIFRGMDVKVDLINTRDRLLAFLDQEMSDSLSYHFWNSGVVIRHNEEYEKIEGCDDGVIMHLKSGKKLKADCLLYANGRTGNTDSLALENIGLETDSRGQLKVNSMYQTALPHVYAVGDVIGYPSLASAAYDQGRIAAQALVKGEATAHLIEDIPTGIYTIPEISSVGKTEQQLTAMKVPYEVGRAQFKHLARAQIVGMNVGTLKILFHRETKEILGIHCFGERAAEIIHIGQAIMEQKGGGNTIEYFVNTTFNYPTMAEAYRVAALNGLNRLF

SEQ ID NO: 30591 - protein, 420 aa, Cryptococcus neoformans var. neoformans JEC21
MPSVAAVPVKLDYQSFLSQEAKGRVRSPLRDLRYFHAIPGMISLNSVTEPLIPDLARDLQYSSNFGLPYFVDWLTQHVKRIHDPPYPENQWQVLATAGNTDASDGVVRTLCSPGDSILLEEFAFPGSLTHYKSLGIKCAGVPMDGEGIVPSALEKILAEWDDEARGGPKPKVILIVPTCSNPSGITYPASRKREIYAVCRKWNLLIIEDDPYCYLQVRPNGADTPLIPSFLSLDLDGRVVRLDSFSKFIAPGSRCGWITGAKELVTTIMVKAEASSNGPSGFAVASISAVIKAWGGHEGLERDYLPHISEAAECPDGSGGMFLWVRLRVESHPQLSTLSPEEISDKVFHTLIGEKVMVAPSSYFKTPGGPVWSKDEESKRIFVRLSFSLSTADEMEEGVKRFARGLRKEWGIRNLDEAEH

SEQ ID NO: 30592 - protein, 286 aa, Glycine max
SYIHILEVRSFLQVFLTPTHLAIVLEYAAGGELFERICNAGRLSEDEARFFFQQLISGVSYCHSMQICHRDLKLENTLLDGNPAPRLKICDFGFSKSALLHSQPKSTVGTPAYIAPEVLSRKEYDGKVADVWSCGVTLYVMLVGAYPFEDPEDPKNFRKSIGRIMSVQYAIPDYVRVSKECRHLISCIFVANPAKRISISEIKQHLWFRKNLPREIIEAERRGYEETQKDQPSQSVEEIMRIIQEARTKIHTGEQAGTGTSDAVHGDEANEEVDINDHYAKYLALN

SEQ ID NO: 30593 - protein, 105 aa, Aspergillus nomius
SLFDKDGDGQITTKELGTVMRSLGQNPSESELQDMINEVDADNNGTIDFPEFLTMMARKMKDTDSEEEIREAFKVFDRDNNGFISAAELRHVMTSIGEKLTDDEV

SEQ ID NO: 30594 - protein, 250 aa, Bordetella pertussis Tohama I
MYKLVLMRHGESQWNLENRFTGWTDVDLTETGREQARKAGELLKREGYAFDLAYTSVLKRAIRTLWIALDAMDAMYTPVGINWRLNERHYGQLQGLNKAETAAKYGDEQVLIWRRAYAIAPEPLDLEDPRHPRFDGRYAKIPADQLPATECLKDTVARVLPFWNESIAPAIRAGRRVLVAAHGNSLRALIKHLDNVSDDDIVGVNIPTGQPLVYELDEDLKPIRHYYLGDAAEIEAAMAAVAAQGKAKKD

SEQ ID NO: 30595 - protein, 608 aa, Magnaporthe grisea 70-15
MATWSGRAAIKGGSDTMRMVLLTCNAVGVTFTWGVEMTYCTPYLLSLGLTKGQTSLVWIAGPLSGLIVQPVIGVISDTWTSKWGRRRPFIMMCSVIVAMGLLTLGFTRDIVSFFIPSSAAGAAAAAAAEVPTAIRRDHPENNGFTGFLTIALAVLALYTTDFAINAVMSCARSLIVDTLPMHKQQDGAAWASRMSAIGHILGYGAGAIDLVALLGTTLGETQFKQLTLIAASGILFFSTLTCWAVSERVLVAPAPEPKGLVAGGERFKVPRQIWSTLMTLPVRIQAICWAVFWSWIGWYPFLIYSSTWVGETYFRYDVPADAKSSSDALGEMGRIGSYALTVYSIITFLGAWLIPPLVRSPEDDDEDDDGIPVTSQAAKSQSFLHSWFPGVARSLGQLGHLKPDLLTVWTFGYIMFAFAMFMAPLASSFRFATILVALCGIPWTISMWAPTALMGVEVNRMTHGITGQPYRRLSTSSAVELLTPVIRVNGEETEVVAAAAAPSSAPQAALLEDGNGTRVGGGGGELSGIYFGILNIYTTLPQFIGTFISAVVFAILEPGKSPELSHGGGGEELPQAPSDGPNAIGICLFIGAISAVGAAYATRRLRYL

SEQ ID NO: 30596 - protein, 453 aa, Aquifex aeolicus VF5
MRKFLLPFLLIISVTFSSTLKDLEEDIVKLVNKVAPSVVTIFVIKEEKSIFPMPEFPFDFPFRFREPFTRKERSLGSGVIVKYDEDKKVVYILTNAHVVKNGVRILVKLDRHTEKKGEIVGIDTKTDIAVVKISTRGINDIEDRIAKLGDSDNLKVGQIVFAIGNPYGLERTVTMGVISALRRSIGITQYESFIQTDAAINPGNSGGPLINVEGEVIGINTAIIAGAQGLGFAIPINLAKWVMEQIIEHGKVIRGWLGVVIQDITPDISEALGIKEGVLVAQVVPGSPADKAGLKVGDVIVEVNGKKIEDARDLQFTIMKMKPGTKAVLKVIRNGKEKEITVIIGQYPEEGVSREGKATPENLGLLLRDLTLKEKQEAGVPYGVLVEGIYPDSPAEYSGLQPGDIILKVNNRPVRSVREFYEIINRLKEMGRSKALLLVRRGDRNIFITLDLE

SEQ ID NO: 30597 - protein, 214 aa, Zea mays
MAPMKLYGAVMSWNVTRCATALEEAGSDYEIVPINFATAEHKSPEHLARNPFGQVPALQDGDLYLFESRAICKYAARKNKPELLRVGNLEESAMVDVWMEVEANQYTSVLNPILFQVLISPMLGGTTDQKVVDENLEKLKKVLEVYEARLTKCKYLAGDFLSLADLNHVSATLCLFATPYASVFDAYPHVKAWWSSLMERPSVQKVAAMMKPSA

SEQ ID NO: 30598 - protein, 310 aa, Aquifex aeolicus VF5
MIPDTEQELINQYLKKISKIPLLTPEEEKELARRAKQGDKEALKKLVESNLRFVVSVAKQYIGYGLPFSELIAAGNLGLLEAAKRFDPDRGVKFISYAVWWIRQAIMQALSQQTGAVRIPLKQSHIINKISHIYGELSKKLEREPSPEEIAEELSKQMIAKELEKELGREPTEEEIEERFKKEGYKITPEEVEKYLQVCRVPLSLDAPVGENEDTFFIDFLSKHGTAEVEEKVIQEVIQKEIDDLLSKLTDKERKVIELRFGLKGNEPKTLREIGEILGLSRERVRQLETRALRKLRSLAMKRHLKDFLS

SEQ ID NO: 30599 - protein, 1249 aa, Magnaporthe grisea 70-15
MADAATLAAVAAIVENIATNSGAPGKNASFRSSTYVQLPGPESDEKKQLERELAALVIRVQQLETRANAAPATIFPDTPNETAYSLFGDDSSSPTSSSSGREPKRLKSASSTTRNGFTTDGRPSKLNAITDEELEGLREHVDGQSRLLDSQRAELDGVNAQLLEQKQLQERALAIIEQERVATLERELWKHQKANEAFQKALREIGSIVTAAARGDLSKRVKINPIEMDPEITTFKRTMNAMMDQLGVFSSEVSRVAREVGTEGILGGQAQIEGVDGTWKELTDNEVTRVARDVGTEGMLGGQADVEGVKGMWNELTVNVNAMANNLTTQVRDIINVTTAVAKGDLTQKVQAECRGEIFELKNTINSMVDQLQQFAREVTKIAREVGTEGRLGGQATVHDVQGTWRDLTENVNGMAMNLTTQVREIANVTSAVAAGDLSKKIRVEVKGEILDLKNTINTMVDRLGTFAFEVSKVARAVGTDGTLGGQAQVENVEGKWKDLTENVNTMASNLTSQVRGISTVTQAIANGDMSRKIDVEAKGEILILKETINNMVDRLSIFCNEVQRVAKDVGVDGIMGGQADVAGLKGRWKEITTDVNTMANNLTAQVRAFGDITNAATDGDFTKLVEVEASGEMDELKRKINQMVYNLRDSIQRNTQAREAAELANKTKSEFLANMSHEIRTPMNGIIGMTQLTLDTDLTQYQREMLNIVNNLAMSLLTIIDDILDLSKIEAKRMVIEEIPYTLRGTVFNALKTLAVKANDKFLDLTYRVDSSVPDHVIGDSFRLRQIILNLVGNAIKFTEHGEVSLTIQKGNDVTCLPNEYMIEFVVSDTGIGIPTDKLGLIFDTFQQADGSMTRKFGGTGLGLSISKRLVNLMGGDVWVKSQYGKGSSFYFTCRVRLADVDISLIRKQLKPYKGHQVLFIDKGKTGHGPEVGQMLGQLGLVPIVLESEQNHTLTRVRGKECPYDVIVVDSIDTARRLRGIDDFKYLPIVLLAPTVHVSLKSCLDLGITSYMTMPCKLIDLGNGMVPALENRATPSLSDNTKSFEILLAEDNTVNQRLAVKILEKYNHVVTVVSNGAEALEAVKDNKYDVILMDVQMPVMGGFEATAKIREYERSLGTQRTPIIALTAHAMMGDREKCIEAQMDEYLSKPLQQNHLIQTILKCATLGGALLEQNRERELELARHAEHKGGLSTDPARASSVMRPPLHHRPVTTAESLSGGAESPSLMANDGEDPIQRARSSLSEPGCL

SEQ ID NO: 30600 - protein, 585 aa, Listeria monocytogenes EGD-e
MKKTKIVCTIGPASESVDTLVQLIEAGMNVARLNFSHGDFEEHGARIVNIREASKKTGKQVAILLDTKGPEIRTNDMVGGKLEFQTGDVVRVSMTPVEGTKEKFSVTYGELYDDVEIGSSILLDDGLIGLEVIEKDEANRELVTKVLNPGVLKNKKGVNVPNVSINLPGITEKDAADIRFGLEQGIDFIAASFVRRATDVLEITKILEEHNATHVQIIPKIENQEGVDNIDEILQVSQGLMVARGDLGVEIPAEEVPIVQKELIRKCNKLGKPVITATQMLDSMQRNPRPTRAEASDVANAIFDGTDAIMLSGETAAGDYPVEAVKMMAKIAVRTEEVLVAQDKFALKLHENTDMTEAIGQAVGHTAKNLNVQTIVAATQSGHTARMISKYRPKSHIVAVTFNEHVYRGLALSWGVYPRLATPVSNTDEMFDLAVKESLASGVAKQGDLIIITAGVPVTESGTTNVMKIQLIGEKVVKGQGIGSKSVIGKAIVAKSNAEALEKAEEGGILIVKTTDKEILPAFEKSAAVVVEEGGLTSHAAVVGINLGIPVIVGAKDATSLVKDGEIITVDSRQGVVYNGKTATH

SEQ ID NO: 30601 - protein, 219 aa, Leptospira interrogans serovar Copenhageni str. Fiocruz L1-130
MHIIEFSNERDFLDHCLDRIKEISANKIQTKSSFHIVLTGGDTAKLLYSELKHLKTDWSKWFFYFGDERCVPKDHIDSNWLMAERVLFKFIPVNERQIFKIPGHLGPQRGALEYSESIKSISSFDLVLLGLGEDGHIASLFPGMDLTNEEDVIAIYDSPKLPKERVSLSLRKINLSDFILIIAKGRKKEEIIERIKMDEALPVTSLSSRKSVELCYFYN

SEQ ID NO: 30602 - protein, 651 aa, Oryza sativa (japonica cultivar-group)
MAGSERTVVWFRRDLRIDDNPALASAARDGAVLPVFIWCPADEGQFYPGRCSRWWLKQSLPHLSQSLESLGCPLVLIRAESTLEALLRCIDSVGATRLVYNHLYDPVSLVRDDKIKKELSALGISIQSFNGDLLYEPWEIYDDSGLAFTTFNMYWEKCMELPIDASPSLAPWKLVPVPGLESVRSCSVDDLGLESSKDEESSNALLMRAWSPGWRNAEKMLEEFVSHGLLEYSKHGMKVEGATTSLLSPYLHFGEVSVRKVYQLVRMQQIKWENEGTSEAEESIHFFMRSIGLREYSRYLCFNFPFTHEKSLLGNLKHYPWKVDEERFKSWRQGMTGYPLVDAGMRELWATGWTHNRIRVIISSFAVKFLLIPWTWGMKYFWDVLLDADLESDILGWQYISGSLPDGHELSRLDNPEVQGQKYDPDGVYVRTWIPELARMPTEWIHHPWDAPSCILEVAGVELGFNYPKPIVDLHIARECLDDSISTMWQLDTAEKLAELDGEVVEDNLSNIKTFDIPKVVLRETSPCALPIDQRVPHASSKDHNLKSKVLKASNRSSICVDMIRSSKMEATSSVANSPVSRKRSFCETAFHVPSYSSSAEVHSHIQDHGGSLVGPSRYLLQEAGRNYVDEVEDSSTADSGSSISRQRKAA

SEQ ID NO: 30603 - protein, 1122 aa, Ralstonia metallidurans CH34
MRKLIKGEKLAALPLSISQIRNLVYVFVTCLLVLIGLSWFVLLKYRMDEAVDRQKILFQARAEQVEANLTAVRRMTLRAQGTLERLIEVGVGKPMAQTTSRDWIDHLQKRGERPYVALPISAGREAIPADASIAPLANVLAFMLRVSSVQYQGLENVWLVDLNADRFYVTPRNLPQARETLRNDATYQAFVEGSIARLRSRKLLEQLKAAPGRVVMLEPGYDWVSRTPIVTVATLIHVDGEPRAVFAMDFPLSAIFPEDDDLEDGFFVQTAEGTILRPDSMSRDPLPPAVSQALVKRAHVATNLPTFVGSGLLPSVMVLDGPVDRSGWRAVEVVETGMLWESLRRNTLWLFALTGLTCTLMLAWVRLVDRRIMRPTQTQSLRLQESEVLGRTIIESTGVGLVILDSTNAAVLMENDVSDRITAHAKPGELARFHRAACNALADGERGNTVGRHGKFNFELAHTDETVSYLTVRVVESTYQGKPAKLCAMDDVTAARQSESTLLQAIHDADAANRAKSAFLATMSHEIRTPLNGMLGSIELLEVSALDAAQRDQLEVMQQSAQSLIQIINDVLDFSKIEAGQMALQARPCQIDSLVEDVCRRFAPDAERRSLQLLCVIDPALHAPILLDPLKTEQVLGNLVSNAIKFTEQGKVVVEATTMTEGGRDWLKLRVIDTGIGIAIEDQQRLFAPFVQAEQSDSRRFGGTGLGLSICNRLVGLMNGSIRLVSEPGLGSCFDVRIPMEPVTVTQPADIVQTGLLNDLYIANGLSGLTVGLCSPSRETYHGIEHLLQHYGAVVVRFDSSQPPATPVDVVVCEHGDIHACPDADVVIESNASLLPDTSQTPIRASRYAWRGLVQAILTAAGLELPMPVQRRADSAQGHLALKSLRILLVEDHRVNQVVMRRLLEWLGQRVDVAGDGREALALTASQSYDLILTDLQMPSMDGYELARTMRERGITVPIIAVTASVGPDLQSACQKAGINRCLTKPVRLAALRELIEPLDASPPLPGTEPSLIPKEAMMSLSEYLGEDLAELSEAAAAGDTVRLMRKLHALAGALATLGHASESQACRWLERTIEESGLAGMEEQWIALRTALETLIAQYAGVDLGQPVRRASAPGLPLPDR

SEQ ID NO: 30604 - protein, 893 aa, Arabidopsis thaliana
MSASKFIKCVTVGDGAVGKTCMLICYTSNKFPTDYIPTVFDNFSANVAVDGQIVNLGLWDTAGQEDYSRLRPLSYRGADIFVLAFSLISKASYENVLKKWMPELRRFAPNVPIVLVGTKLDLRDDKGYLADHTNVITSTQGEELRKQIGAAAYIECSSKTQQNVKAVFDTAIKVVLQPPRRKEVPRRRKNHRRSGCSIAVKDSSGEYESTEEEAGEIQPTTGDCDAADLGNSNAVAWESNDDLSDPNADSCAEEEEATNAVVQHDDGANKDDGDDDNLPQNMQDGDDDLQPQNMQDDDDDDDDNQPLPPEVMYFDPTTYTKVCKIGTRCQLVQTVEFIETLDAELKWFKNHDQFKHIFHMPKEPNHMIQGMWMLMVRTAKTELARECWFVVNGVPIRYSIREHALLTGLNCREYPKNYKTLGSLKFVEKLFKRTEDIKIKDVEEKLEEFKSEKSTARLKLTILLFLAKVMKADSKGDSKIEELLLRIVDNVRACETFPWGRFSFEQCMEGVRRVMKNMKGVVKPKAQTAFYGFITPLEILAFECIPQLGKRFREAVPADKECPRMCKHKFSESCMKGFTLEEINEALGDITDISSILEPDMDERKMLSRVVEKHVDDAVPEPEIPGTSILSFKEAMERGFDKLTDKLAVMDSEIKRICVRVQGIEEYVADQLEKEAEKDKYEDMRPGSAADFVPPSYQPRDTQSKALVIHSGIRDPAPPTIESLSDGSDESDEEDKKKKKKKQISKKKRKHVGPTLESGEKRGRKPSKVAKLTQLAGTPRDRVARQLFKLLSSSSSSSVRPQSSSARLQALPITATISSPSCQLVSSSDSSSSYQLIPQLQNSSTSSPSGSSSIDCIVHLSRRPARLYLQQTTRFVQFASLPRFIQLVRAHLF

SEQ ID NO: 30605 - protein, 635 aa, Rickettsia akari str. Hartford
MSNSNIDNDLDQIDSLLKKAKSKKIPVTYDDINKALPLNENPSIRQLEEAILKFSDAGVDILESNEDDDIKLDIGMDEEFKLSTNIDNEPEDEAEEENIGTTDDPVRLYLKDMGGVDLLTREHEVEIAKRIEEGRKTMTASLCRSPIAMRCFIVWYEDLVNEKMLLRDLIDLEANILHDETPENDEEHSSETEGEEHDDNHLSMSRVETQILPNIIERMKKISFICEELLIEAKKCYEKSFEPKVLQNSKKYNNNLELLLHEVSEIHFNSKRTEEILGKMYGINRDLINKETAFLKLAEKYGVTRQNFLDEYIGSVINAAWKEKMLKNKKVAWKELITKESDYIDQMIAELSVIESNTGLLVNDFKKLVNTIQKSERQTLQAKKDMIEANLRLVISIAKKYANRGLQFLDLIQEGNIGLMKAVDKFEYRRGYKFSTYATWWIRQAITRAIADQARTIRIPVHMIETINKILRTSRQMLNELGYEPTATEIANRLSMPLDKVRKVMKIAKEPISLENPVGDDSDGGQLGDFIEDKNAIAPIDAAIQSNLREVTTRVLATLTPREERVLRMRFGIGMNTDHTLEEVGQQFKVTRERIRQIESKALRKLQHPIRSKKLNSFRSGGKRGEGNPSDLLEA

SEQ ID NO: 30606 - protein, 360 aa, Zea mays
  misc_feature (36)..(36): Xaa can be any naturally occurring amino acid
  unsure (1)..(360): unsure at all Xaa locations
MADASSRTDTSTVVDMDDKNQRIILRNFNFSLWDIXWYRSWRDACKVLENGQSGAMVPASNSSDRSDRSDKPMDQKVLRRLAQNREAARKSRLRKKAYVQQLESSKLKLASLEQELQKARQQGIFISSSGDQTHTMSGNGAMTFDLEYSRWQEEQNKQINELRTAVNAHASDSDLRLIVDGIMAHYDEIFRLKGIAAKADVFHILSGMWKTSAERCFLWLGGFRSSELLKLLVNQLEPLTEQQLMGLSNLQQSSQQAEDALSQGMEALQQSLAETLAGSLGPSGSSGNVANYMGQMAMAMGKLGTLENFLRQADNLRQQTLHQMQRILTIRQAARALLAIHDYFSRLRALSSLWLARPRE

SEQ ID NO: 30607 - protein, 883 aa, Salmonella enterica subsp. enterica serovar Typhi Ty2
MNEQYSALRSNVSMLGKVLGETIKDALGEHILDRVETIRKLSKSSRAGNEANRQELLTTLQNLSNDELLPVARAFSQFLNLANTAEQYHSISPKGEAASNPEVIAHTLRKLKNQPDLNDATIKKAVESLSLELVLTAHPTEITRRTLIHKMGEINNCLKQLDNTDIADYERHQVMRRLRQLIAQSWHTDEIRKQRPSPVDEAKWGFAVVENSLWQGVPNYLRELNEQLEENLGYKLPVDFVPVRFTSWMGGDRDGNPNVTAEITRHVLLLSRWKATDLFLKDIHVLVSELSMVDATPELLALVGEEGASEPYRYLMKKLRARLMATQSWLEARLKGEKLPKPAGLLTQNEQLWEPLYACYQSLQACGMGIIANGELLDTLRRVKCFGVPLVRIDIRQESTRHTEALGEITRYLGIGDYESWSEADKQAFLIRELNSKRPLLPRNWEPSNDTREVLETCKVIAEAPKGSIAAYVISMAKTPSDVLAVHLLLKEAGIGFAMPVAPLFETLDDLNNADDVMTQLLNIDWYRGLIQGKQMVMIGYSDSAKDAGVMAASWAQYQAQDALIKTCEKAGIELTLFHGRGGSIGRGGAPAHAALLSQPPGSLKGGLRVTEQGEMIRFKYGLPEVTVSSLSLYTSAILEANLLPPPEPKDSWRHIMDELSVISCETYRGYVRENKDFVPYFRSATPEQELGKLPLGSRPAKRRPTGGVESLRAIPWIFAWTQNRLMLPAWLGAGTALQKVVEDGKQSELEAMCRDWPFFSTRLGMLEMVFSKADLWLADYYDQRLVAKTLWPLGKELRDLLEEDIKVVLAIANDSHLMADLPWIAESIQLRNVYTDPLNVLQAELLYRSRLTEEQGKSPDPRVEQALMVTIAGVAAGMRNTG

SEQ ID NO: 30608 - protein, 476 aa, Triticum aestivum
  misc_feature (336)..(336): Xaa can be any naturally occurring amino acid
  misc_feature (343)..(343): Xaa can be any naturally occurring amino acid
  unsure (1)..(476): unsure at all Xaa locations
MAGGFRVLHLVRPFLGFLPEVQSADRRIPFREKLIYTVISLFIFLVCSQLPLYGIHSTTGADPFYWLRAILASNRGTVMELGITPIVTSGMVMQLLVGSKIIEVDNSVREDRALLNGAQKLLGILIAIGEAVAYVLSGMYGSVSQLGTGNAILIILQLFFAGIIVICLDELLQKGYGLGSGISLFIATNICENIIWKAFSPTTINSGRGAEFEGAVIGLFHLLITRTDKVRALREAFYRQNLPNVTNLLATVLVFLIVIYFQGFRVVLPVRSRNARGQQGSYPIKLFYTSNMPIILHSALITNLYFISQLLYKKFSGNFLVNLLGIWKESEYSGQXSIPVGGXAYYVTAPSSLADVVANPFHALFYVVFMLSACALFSKTWIEVSGSSARDVARQLKEQQMVMPGHRESNLERELNRYIPTAAAFGGVCIGALTVLADFMGAIGSGTGILLAVTIIYQYFETFEKERATELGFFGF

SEQ ID NO: 30609 - protein, 544 aa, Treponema denticola ATCC 35405
MAKQLLFNEEARKSLLAGVEQISNAVKVTLGPKGRNVLIDKSFGAPTVTKDGVSVAREVELENKFENMGAQLLKEVATKTNDVAGDGTTTATVLAYSMVKEGLKAVAAGMTPLELKRGIDKAVAIAVEDIQKNSKEIKGSEEVAHVASVSANNDAEIGKIIADAIAKVGKDGVIDVGEAQTMETVTDYVEGMQFDRGYISSYFVTDRDRMETVFENPYILIYDKSISTMKDLLPLLEQVAQSGRPLLIIAEDVEGEALATLVVNSLRGALKTCAVKAPGFGDRRKEMLEDIAVLTGGQVVSEELGFKLEAAQISMLGQAKSIKIDKDNTMIIDGAGKSKDIKDRVTQIKAQLDATDSEYDSEKLRERLAKLSGGVAVIKIGAVTEVEMKEKKHRVEDALSATRAAIEEGIVAGGGLAMIQAIAALEKADMSSLTEDEKVGFKIVKRALEEPIRQIAENAGLDGAVIAEKAKEKKGVGFDAAKMEWTDMVKAGIIDPAKVTRSALQNAASIASLLLTTECAITDIPEKQAGPAMPSPDMGGMGMY

SEQ ID NO: 30610 - protein, 539 aa, Pseudomonas syringae pv. tomato str. DC3000
MKLLAVRRLFRIQRVVIRYRLDDLLFALPLPWWMLAVRFVLPWRWLPRRKSELSRGVRFRLALQDLGPIFIKFGQLLSTRRDLLPEDIADELMLLQDRVPPFDQQVAIKLIEEQLGARICDVFSRFDETPLASASVAQVHAACLKTGEEVVVKVVRPGLKPIIGQDLAWLFILARMAERVSADARLLHPVQVVMDYEKTIYDELDLLREAANSSQLRRNFEGSDLLYVPQVYWDWCRPKVLVMERIYGLQVTDMAGLADQRTDMKMLAERGVEIFFTQIFRDSFFHADMHPGNIFVSTVNPWAPKYIAIDCGIVGSLTPEDQDYLARNLFAFFKRDYRRVAQLHIDSGWVPAETKLNEFEAAIRTVCEPIFEKPLKDISFGQVLMRLFQTARRFNMEVQPQLVLLQKTLLNIEGLGRQLYPELDLWSTAQPYLERWMRERVSPKTLLGNLQSQVEQLPHIAGMTRDLLERMSRPHASDPPRPWHDRKDEPVLRLIGAALLVGGAIQGWVMSEAATQLLTLTAWPAAIMLIAGLYLIVRR

SEQ ID NO: 30611 - protein, 469 aa, Bordetella pertussis Tohama I
MASTMETDLLVLGGGPGGYTAAFRAADLGLSVVLVEQRPTLGGVCLNVGCIPSKALLHCAKALDEARAMSELGIEFSEPRIRLDKLRAHKEALVAKLCGGLGGLARQRKVEVVTGTGRFDGPHSLAVSDGSRVAFKQAVIAVGSRPVRLPFLPDDPRIMDSTGALELKEIPRRLLVIGGGVIGMELATVYAALGARVTVVELTDGLLPGCDRDLVKPLAQRVASRYEAVLLGTRVSAAQARDDGIHVSFDGPQAPGPQVYDQVLVAAGRRPNGAAIDAERAGARVDEGGFIRVDAQQRTNVGHIYAIGDVVGEPMLAHKAAHEGKVAAETAAGMRVANDARVIPAVAYTDPEVAWVGLTETAAQRDGIAYEKAAFPWAASGRALSLGRGEGLTKILVDPATHALLGVGMVGPQAGDLIAEAALAIEMGAEPGDIALTIHPHPTLSETLAFAAEAYEGTLTELYLTRKKS

SEQ ID NO: 30612 - protein, 584 aa, Vicia faba
MGSVEDDSSRLEEALIQDEESKLYTGDGSVDFKGRPVLKKNTGNWKACPFILGNECCERLAYYGIATNLVKPILLAKLHEGNVSAARNVTTWQGTCYLAPLIGAVLADSYWGRYWTIAIFSMIYFIGMGTLTLSASIPALKPAECLGAVCPPATPAQYAVFFIGLYLIALGTGGIKPCVSSFGADQFDDTDSRERVKKGSFFNWFYFSINIGALISSSFIVWIQENAGWGLGFGIPALFMGLAIGSFFLGTPLYRFQKPGGSPLTRMCQVVAASFRKRNLTVPEDSSLLYETPDKSSAIEGSRKLQHSDELRCLDRAAVISDDERKRGDYSNLWRLCTVTQVEELKILIRMFPVWATGIVFSAVYAQMSTMFVEQGTMMDTSVGSFKIPAASLSTFDVISVIFWVPVYDRFIVPIARKFTGKERGFSELQRMGIGLFISVLCMSAAAIVEIKRLQLAKELDLVDKAVPVPLTIFLQIPQYFLLGAAEVFTFVGQLEFFYDQSPDAMRSLCSALSLLTTSLGNYLSSFILTVVLYFTTRGGNPGWIPDNLNKGHLDYFSGLAGLSFLNMFLYIVAAKRYKSKKAS

SEQ ID NO: 30613 - protein, 234 aa, Lycopersicon esculentum
MDQQLPPTNFPVDFPVYRRNSSFSRLIPCLTEKWGDLPLKVDDSEDMVIYGLLKDALSVGWSPFNFTAGEVKSEPREEIESSPEFSPSPAETTAAPAAETPKGRHYRGVRQRPWGKFAAEIRDPAKNGARVWLGTYETAEEAAIAYDKAAYRMRGSKAHLNFPHRIGLNEPEPVRVTAKRRASPEPASSSGNGSMKRRRKAVQKCDGEMASRSSVMQVGCQIEQLTGVHQLLVI

SEQ ID NO: 30614 - protein, 367 aa, Glycine max
MGGLASNLPLIVMVGLQIHYAALAIFTRAALLDGLSTTVFVVYRQGIATLALAPMFFSPKRRQSVKDSLGFRSFFLMFVTALVGVTANQNAYFKGLFYASSTAATAMSNLIPALTFVIAAIAGFEKVDISLRSTAKILGTVCCVAGALTMALVKGQKLLHTEFLPSIHLTGSQGDDWLLGCLLLLASSVFWSCWMILQVPITSCCPDHLLSTFWMCLFSTIQAALFALLSESDLQAWILQSPLQISCSLYAGIGIAVSFFIQSWCISERGPLYCAMFNPLATVITALISATFLEEEVYVGSLVGAVGVIAGLYVVLWGKAKEFAEIKPEAPQSSNLLDDEISSRIDLEQPLLSEKLSEHATEADSKV

SEQ ID NO: 30615 - protein, 372 aa, Glycine max
MANLPNSKLYGKEKMKGEQELEDEESFSRAMLLCSSVVVSMALQSATELGVFDVLQEAGAKLSAKEIASKLSCDNNPEADSMLDRLLALLASHSILNCSLILDHQNLGTFQRLYTITPVARFFARNSDGVSLGPLMALLQDKIFLHSWSELKDSIREGGIPFNRVYGTHAFEYPRLDARFNQVFNTAMINHTTIVMKKVLECYKGFENIKMLVDVGGGLGININLITSKYPHIQGINFDLPHVLEHAPSYPGVEHVGGDMFENVPKGDAIFMKWILHDWSDEYCLKLLKNCYDAIPDDGKVIVVEAVLPIIPETSNAAWKAVSQTDVLMMTQNPGGKERSDQEFMDLATAAGFSGIRYECYVRTFWIMEFFK

SEQ ID NO: 30616 - protein, 176 aa, Methylococcus capsulatus str. Bath
MAKKEAHEKESTGKEVKAAEPVATRAYPSPWEEMERWMEQVFPAGWLEHEPWALMRRPWPSLFRTGLSGVRVPKVDVIDRADEVVVRAELPGITKDDLEVTLSEDMFTLQASSQSESKEEKGQYFYREMSRGEFSRSLRLPCAVDADKAKASFKDGILEVVIPKAAGSKRQSIKID

SEQ ID NO: 30617 - protein, 695 aa, Bifidobacterium longum NCC2705
MREHVEEPRYVTTDDDTVYSLLSKRAARTPDDIIAEWQDDNTHQWRSATATEMLSRVREVAKGLLGLGVKAGTMVLIYSPTCYEWGVADFACAAIGAVVVPVYETDSARQTAGIVEEVDPAIAFAGDFQRAQTLEQIRVNHPGMKYVFNFKADGLDAVVDFGHGVSDETLDAAIARIKADDLLTVVYTSGSTGKPKGAMLSNRNYTHIVLNGYEILRGMLYDDNRLLLFLPLAHCFARYIQYVCIGGCGVVGYIPDTKRLLADIRSFKPTYLLGVPRVFEKVYNAASQKAGAGIQGHIFAQSVKHFVKWSKDEQAGRGHSFIERMRHSFYMATVGKSIRSALGPNLKWLACGGAPLNVDLAHFFNGMNDITFIQGYGMTETAAPMLVNWEDDNEIGSVGKPGPGMGVRLGEDDEIELTGPNVFLGYYKQPELTAQTMTADGWIKTGDLGRIDDRGFTFITGRKKDIIITAGGKNISPAPMEDVIDTCPIVAHAVVVGDGKPFVSALIELDPEMLHSWLEGQGLNADMTLAEASDNDAVRAFIQQYIDQANANVSRAESVRKFAVLDEEFSQEHGTLTPSMKVVRPKVLQRYATVIEEDLYAPKPSNKPLPATAKIIDSTLETVKKSSESVKQASEQVKQASEQMKTSVSDSIASVSEKIKKSKAEPEEGETGDSADNAADTGSKPDQPADEKNEE

SEQ ID NO: 30618 - protein, 345 aa, Zea mays
  misc_feature (224)..(224): Xaa can be any naturally occurring amino acid
  unsure (1)..(345): unsure at all Xaa locations
MSKSGALDLASGLGGKINKVEVKSAVDEYEKYHGYYGGKEEARKSNYTDMVNKYYDLATSFYEYGWGESFHFAHRWNGESLRESIKRHEHFLALQLGLKPGMKVLDVGCGIGGPLREIARFSSTSVTGLNNNEYQITRGKELNRLAGISGTCDFVKADFMKMPFDDNTFDAVYAIEATCHAPDPVGCYKEIYRVLKPGQCFAVYEWCITDHYDPNNATPQRIKXDEFELGNGLPDIRSTRQPLKAVKDAGFEVVCYKDLAEDSPLPWYLPLDPSRFSLSSFRLTSVGRMITRTMVKALEYVGLAPQGSERVSNFLEKAAEGLVEGGKKEIFTPMYFFLVRKPLLE

SEQ ID NO: 30619 - protein, 175 aa, Cicer arietinum
LSVLRSLMPDSYIQRGDQASIIGGAINFVKELEQKLHFLGSKKEEVKSDDVGEGSNKSFSEFFSFPQYSTSGGNSASVIGEKVGEIADIEVTMVESHANLKIRSKKRPKQLLKMVSGLHNMHLTILHLNVTTTCEIVLYSLSVKVEDDCKLGSVDDIAAAVYQMLNRIQQETMLN

SEQ ID NO: 30620 - protein, 330 aa, Leptospira interrogans serovar Copenhageni str. Fiocruz L1-130
MILITGADGFIGSHLTETLVRQGHEVRAFVLYNSFNSWGWLDQCPDDIKGKFEVFSGDIRDPNGVRAAMKGCDAVLHLAALIAIPYSYHSPDTYIDTNVKGTLNVVQAARDLNVSKVIHTSTSEVYGTARFVPITEEHPLQGQSPYSASKIGADQIAMSFYNSFGTPVSIIRPFNTYGPRQSARAVIPTIITQIAKGNRKIKLGAVHPTRDFNFVKDTVAGFIAALNSDVCVGEVINLGSNYEISVGDTVRLIAEVMKVNVEIESDDQRLRPEKSEVERLWASNQKAKDLINWSPEYGGRDGFKRGLSETIDWFSDIDNLSFYKTDIYNI

SEQ ID NO: 30621 - protein, 557 aa, Zea mays
HASGSAHTHNQISPKSTRRHLRFKMQIFVKTLTGKTITLEVESSDTIDNVKAKIQDKEGIPPDQQRLIFAGKQLEDGRTLADYNIQKESTLHLVLRLRGGMQIFVKTLTGKTITLEVESSDTIDNVKAKIQDKEGIPPDQQRLIFAGKQLEDGRTLADYNIQKESTLHLVLRLRGGMQIFVKTLTGKTITLEVESSDTIDNVKAKIQDKEGIPPDQQRLIFAGKQLEDGRTLADYNIQKESTLHLVLRLRGGMQIFVKTLTGKTITLEVESSDTIDNVKAKIQDKEGIPPDQQRLIFAGKQLEDGRTLADYNIQKESTLHLVLRLRGGMQIFVKTLTGKTITLEVESSDTIDNVKAKIQDKEGIPPDQQRLIFAGKQLEDGRTLADYNIQKESTLHLVLRLRGGMQIFVKTLTGKTITLEVESSDTIDNVKAKIQDKEGIPPDQQRLIFAGKQLEDGRTLADYNIQKESTLHLVLRLRGGMQIFVKTLTGKTITLEVESSDTIDNVKAKIQDKEGIPPDQQRLIFAGKQLEDGRTLADYNIQKESTLHLVLRLRGGQ

SEQ ID NO: 30622 - protein, 455 aa, Streptomyces griseus
MSVAVVLFTSDLRLHDNPVLRAALRDADEVVPLFVRDDAVHRAGFDAPNPLAFLADCLAALDAGLRHRGGRLIVRRGEAATEVRRVAEETGAARVHIAAGVSRYAARREQRIREALADSGRELHVHDAVVTALAPGRVVPTGGKDHFAVFTPYFRRWEAEGVRGTQTAPRTVRVPDGVASDPLPDRDCVENLSPGLARGGEEAGRKLVTSWLNGPMADYEDGHDDLAGDATSRLSPHLHFGTVSAAELVHRAREKGGLGGEAFVRQLAWRDFHHQVLADRPDASWSDYRPRHDRWRSDADEMHAWKSGLTGYPLVDAAMRQLAHEGWMHNRARMLAASFLTKTLYVDWREGARHFLDLLVDGDVANNQLNWQWVAGTGTDTRPNRVLNPVIQGKRFDARGDYVRGWVPELAEVEGSAIHEPWKLQGLDRAGLDYPDPVVDLAEARARFERARGLD

SEQ ID NO: 30623 - protein, 421 aa, Dechloromonas aromatica RCB
MAIVLVVDDEVGIRELLSEILIDEGYDVRLAENATAARLVREELRPDLVLLDIWMPDTDGISLLKEWHAAGHLNMPVVMMSGHGTIDTAVEATRFGAFDFLEKPIALQKLLSTVQKALKHDKPPARPALTLEAFSRSAFVKEFKRRLEQAAAKSPVLLLKGANGGMAEICARTLQPPRAPWLDLSGISSALTQDMLEKVTGGILFVPDLAVLGKMQQMNLAFAIERLEKLNLQLIAASVSSITALNEAGWDSKLLTRLSEIWVAMPSLAGHGDELPEIASLLLSNFVERGEVPLRRFSTAALNALRTLSWKRQPESSWSDLYALVRNLAVTSLDEEISADDVARVMPHDGGESPEVLSLLPLFDQPLREARDAFEKMYFEHHLRLEGGNMTKLAERSGLERTHLYRKLKQLDVKLGKRGEE

SEQ ID NO: 30624 - protein, 478 aa, Pseudomonas putida KT2440
MTQKFDVVVIGAGPGGYVAAIKAAQLGLKTACIEKYTDAEGKLALGGTCLNVGCIPSKALLDSSWKYKEAKESFNVHGISTGEVKMDVAAMVGRKAGIVKNLTGGVATLFKANGVTSIQGHGKLLAGKKVEVTKADGTTEVIEAENVILASGSRPIDIPPAPVDQNVIVDSTGALEFQAVPKRLGVIGAGVIGLELGSVWARLGAEVTVLEALDTFLMAADTAVSKEAQKTLTKQGLDIKLGARVTGSKVNGNEVEVTYTNAEGEQKITFDKLIVAVGRRPVTTDLLASDSGVTIDERGYIFVDDYCATSVPGVYAIGDVVRGMMLAHKASEEGIMVVERIKGHKAQMNYDLIPSVIYTHPEIAWVGKTEQALKAEGVEVNVGTFPFAASGRAMAANDTGGFVKVIADAKTDRVLGVHVIGPSAAELVQQGAIAMEFGTSAEDLGMMVFSHPTLSEALHEAALAVNGGAIHVANRKKR

SEQ ID NO: 30625 - protein, 279 aa, Rhizobium sp. NGR234
MAQIGHNISLPERARRIRRHALRMGEVQGQGYIAQALGIADVLAVAYFHATTYRPDDPEWEGRDRFLLSIGHYAIALYAALIEAKIIPEDELETYGADDSRLPMSGMAAYTPGMEITGGSLGHGLGIAVGMSLALKRKGSRSFVYNLFSDGELDEGSTWEAAMSAGSYKLDNLIGIVDVNQMQADGPSLGVLNFEPLGPKFEAFGWYVQRIDGNDIDALVDAFDNARQHRHPQPRIIICDTKMAKGVPFLEARERNHFLRVEPQEWAEAIRIIDAGVTA

SEQ ID NO: 30626 - protein, 310 aa, Zygosaccharomyces rouxii
MVTLQNSTSTLKLNTGQTIPQVGLGTWRSKENEGYKAVIEALKAGYRHIDGAAVYGNEGEVGKAIQDSGVPRNEIFLTTKLWCTHQRNPQEALDQSLQRLGLDYVGLYLVHWPVPLRTENIKDGNLFQFAEKPDGSKDVDLEWNFIKTWELMQKLLESGKTKAIGVSNFSVNNLKDLLAAPTTKVTPAVNQVEFHPLLPQEELIQYCSEKGIVIEAYSPLGGENAPILSDPTVQEIAKANGVEAGHVVISWAVQKGLVTLPKSVTPSRIVGNLKVLTLSDSDVAKVDGLLKAKGERRTCYQDFSPFPIFQ

SEQ ID NO: 30627 - protein, 95 aa, Zymomonas mobilis
MNFRPLHDRVLVRRVAAEEKTAGGIIIPDTAKRKPQEGEVIAAGNGTHSEDGKVVPLDVKAGDRVLFGKWSGTEVRVDGEDLLIMKESDILGIIS

SEQ ID NO: 30628 - protein, 340 aa, Debaryomyces hansenii CBS767
MTRTVFVSGASGFIAQNIVKLLIEKGYNVIGTVRTAEKGENLKKCLASEKFTYEIVPDISVEGAFDKVLEKHSEINVLLHTASPFFYDTTDPENDLVLPAINGTKNILKAVKQYGAQIERVVITSSDAAIYSADDEQNSDLSFNESNWNSISYEDAIKDPIAAYYGAKTFAEKAAWDFVKENNSNFKLTAVNPVYVFGPQAFASEVKGKLNTSNELINTLIKLGPSDLFDNDKGGFIDVRDVAKAHVMAFESEDTINKRLYLTNGHFSTQMMLDIVNKNFPELKGKIPIGNPGTGSQDILTLAKMSNDATRQILNFDFNSLEKVVADTVAQILDARKRTL

SEQ ID NO: 30629 - protein, 636 aa, Moorella thermoacetica ATCC 39073
MLLNHDLLREAGRVRRQLALTVELGLGAGLLAILQAWFLARVVNGVFLEGRDLPGVWPWLLILLGLIFLRAAFAWGMEVAGHRTAARIKYDLRRRLVAHLLALGPVPLKDGHTGELVNVLVEGVEDLETYFAGYLPRLALAALMPMAVLGFVFPLDLFSGLFLLGTAPLLPLFMFLIGGQAERLTSNQWETLGRLSGHFLDVLQGLTTLKIFGRSKAQAEVLARLSDRFRSTTLGVLRVAFLSALVLELAATLGTALVAVSVGLRLLYGRLPFQEALFLLLLAPEFYLPLRLLGSRYHAGLAGVTAAARIFDLLSRPLPAGEGGKAGSAVGQDEVVAPFIAGHPGRATELSEDKKMVAGICLKHGIRSDGESIPGAAGDGGRPAGEKGLLRPGLHIILEDVYYAYDPGNRPALQGLSLELRPGEKVALVGPSGSGKSTVAHLLLRFLEPDRGRITADGHPLDRVPPEDWRRQVSLVPQHPYLFSGTIADNILLGRPHASWEEMVTAASLAGAHEFINALPQGYATPIGERGLRLSGGQARRLAIARAFLKEAPLLILDEATAGLDPATDQIIQTALERLLRGRTSLIIAHRLSAAVRADRIVVLDSGRVIEEGRHEELLARRGLYYRLVTASRGAA

SEQ ID NO: 30630 - protein, 97 aa, Zea mays
  misc_feature (48)..(48): Xaa can be any naturally occurring amino acid
  unsure (1)..(97): unsure at all Xaa locations
KRSEAMSMSKTGQAAEKDEQQQSRGIALMQGICAVVYRKADNTPCPIXAAFNKDALKSLNITHILIVAKSLDPVFPAEFNYKKIEVEQEWRMQPVQH

SEQ ID NO: 30631 - protein, 213 aa, Desulfitobacterium hafniense DCB-2
MEFLLDSANPEEIRQAWAMGVIGGITTNPSLVAKEGRDFHQLLQELVQIVNGPISAEVIALDTEGMLGEARELAAMHPNIVVKIPMTEEGLKAVKVLKAEGIKTNVTLVFSAVQALLAARAGATYVSPFLGRLDDIGENGLLLLADICEVFGVHGLETKVIAASIRNPVHVTEAAKIGADYATVPFNVLCQLFKHPLTEAGIKKFLADWQKLK

SEQ ID NO: 30632 - protein, 410 aa, Mycobacterium avium subsp. paratuberculosis K-10
MKALVYGVAPEPVAVPDDANPLVQNLARTPTGLRDMPEPVLPHEDWVLTRPRLTGICGSDAKQILMDFGEGDADNAMSAFCSFPQVMGHEVVADVVALGPGARGLAVGQRVVLNPWLSCGPRGIQPPCPACEAGDYSLCWSFADGDLKPGIHTGVSADVTGGYAELMPAHDSMLFAVPERVPDEMAVFADPFSVSLHAITRHPPPRSGRALVYGAGSLGLCAVAILRALYPEVAVAVVARFDAQAELARRFGAAKVVAHEPRTAVIEELVGWGGGRLRRPLLGLPMAHPGAVDVVYDTVGKPETLEVAVRLLRSRGTLVKAGVHAPGRWEDSPLYFKEIALVGSNAFGVEEVDGQRRHAIAHYLDLAAAGRVDLRPMLTHTFTLDRWRDAFHALADQGRTGAVKVAFDQR

SEQ ID NO: 30633 - protein, 323 aa, Bordetella pertussis Tohama I
MARANKEQLLDAYQRMLGIRLVELRLGRLFADGEVPGFIHLSVGQEAVAAAMGMVLRPDDTVASTHRGHGHALAKGIDMDDFFLELMAREEGICKGRGGSMHVANMSIGMLGANAIVGASIPIALGSALAHQVRKTDALAVAFFGDGAMAEGGLHESLNLAALWQLPLLFLCENNGWAEFSPTHKQFVAPLDKLSAAFSIPHAKVDGNDVLAVMDAAQAAVADIRAGKGPRVLECITHRWRGHYEGDPQKYRDSDEISGLDEHDPVARFEAVLDSKGVSQAQRQKVRDAVQAQVDQAVERARKGRPPVWETARTDVYTQAEAR

SEQ ID NO: 30634 - protein, 157 aa, Triticum aestivum
  misc_feature (88)..(88): Xaa can be any naturally occurring amino acid
  misc_feature (104)..(105): Xaa can be any naturally occurring amino acid
  misc_feature (121)..(121): Xaa can be any naturally occurring amino acid
  misc_feature (123)..(124): Xaa can be any naturally occurring amino acid
  misc_feature (129)..(129): Xaa can be any naturally occurring amino acid
  misc_feature (136)..(137): Xaa can be any naturally occurring amino acid
  misc_feature (153)..(153): Xaa can be any naturally occurring amino acid
  unsure (1)..(157): unsure at all Xaa locations
MAAGRELVVSFGEMLIDFVPTVAGVSLAEAPAFLKAAGGAPANVAIAVSRLGGGAAFVGKLGDDEFGRMLAAILRDNGVDGGGVVFDXGARTALAFVTLRADGXXIHFYRNPNAESPHCRXLXXRLIRXGCVFHYXXISLIADLAGNNLRAMXIAKR

SEQ ID NO: 30635 - protein, 406 aa, Climacodon septentrionalis
VDSGKSTTTGHLIYKCGGIDKRTIEKFEKEAAELGKGSFKYAWVLDKLKAERERGITIDIALWKFETPKFMVTVIDAPGHRDFIKNMITGTSQADCAILIIAAGTGEFEAGISKDGQTREHALLAFTLGVRQLIVAINKMDTTKWSEDRFNEIVKETSTFIKKVGYNPKAVAFVPISGWHGDNMLEESPNMTWYKGWTKETKAGVVKGKTLLDAIDAIEPPVRPVEKPLRLPLQDVYKIGGIGTVPVGRVETGVIKAGMIVTFAPVGVTTEVKSVEMHHEQLEQGVPGDNVGFNVKNVSVKDIRRGNVASDSKNDPAKEAASFNAQVIILNHPGQIGAGYAPVLDCHTAHIACKFAELIEKIDRRTGKSIEAAPKFVKSGDACIAKLVPSKPMCVEEYNTYPPLGR

SEQ ID NO: 30636 - protein, 216 aa, Xanthomonas campestris pv. campestris str. 8004
MLGIGAFKQRMPRSGEALPGRTQALPLHNTHLINGHPLRGEFTGLAQVQFGLGCFWGAERKFWNVPGVYTTAVGYAGGKTPNATYSEVCSGQTGHTEAVLVVYDAQAVSFEQLLRTFWESHDPTQGMQQGSDVGTQYRSAIYCSTQAQYDAAIASRDAYQQQLTAAGYGDITTEILYPAPTFYYAEDDHQQYLAKHPNGYCGLGGTGVSCPIGLDA

SEQ ID NO: 30637 - protein, 537 aa, Streptococcus pyogenes M1 GAS
MNNHWWHKATIYQIYPRSFKDTSGNGIGDLKGITSQLDYLQKLGITAIWLSPVYQSPMDDNGYDISDYEAIADVFGDMADMDELLAAANERGIKIIMDLVVNHTSDEHAWFVEARENPNSPERDYYIWRDEPNNLMSIFSGSAWELDEASGQYYLHLFSKKQPDLNWENAQLRQKIYDMMNFWIAKGIGGFRMDVIDLIGKVPDLEITGNGPRLHDYLKEMNQATFGNHDVMTVGETWGATPEIARQYSRPENKELSMVFQFEHVGLQHKPDAPKWDYAKELDVPALKAIFSKWQTELKLGEGWNSLFWNNHDLPRVLSIWGNDSTYREKSAKALAILLHLMRGTPYIYQGEEIGMTNYPFKDLTEVNDIESLNYAKEAMGNGVSAARVMDSIRKVGRDNARTPMQWSKDTHAGFSEAKETWLPVNPNYQDINVADALADPDSIFYTYQKLIALRKEQDWLVEADYHLLPTADKVFAYQRQLGEETYVIVVNVSDEEQVFATDLAGAQVIIANTDVDTVLETKHLQPWDAFCLKLKA

SEQ ID NO: 30638 - protein, 267 aa, Oryza sativa (indica cultivar-group)
EPHDYIGLSAAAASPTPSSSSCSSSPNPGGEARGPRLTLRLGLPGSESPEREVAAAGLTLGPLPPTTTKAASKRAFPDSSPRHGASSGSVAAAAAACQDKAAPAAAPPAAKAQVVGWPPVRNYRKNTLAASASKGKGEDKGTAEGGPLYVKVSMDGAPYLRKVDLKMYSSYEDLSMALEKMFSCFITGQSGLRKSSNRDRLTNGSKADALQDQEYVLTYEDKDADWMLVGDLPWDLFTTICRKLKIMRGSDAAGIAPRSIEQSGQSR

SEQ ID NO: 30639 - protein, 393 aa, Fomitopsis pinicola
VDSGKSTTTGHLIYKCGGIDKRTIEKFEKEAAELGKGSFKYAWVLDKLKAERERGITIDIALWKFETPKFVVTVIDAPGHRDFIKNMITGTSQADCAVLIIAAGTGEFEAGISKDGQTREHALLAFTLGVRQLIVAINKMDTTKWSEDRFNEIVKETSTFIKKVGYNPKAVSFVPISGWHGDNMLEESANMPWYKGWTKETKAGVVKGKTLLDAIDAIEPPSRPSDKPSRLPLQDVYKIGGIGTVPVGRVETGIIKAGMVVTFAPSNVTTEVKSVEMHHEQLEQGVPGDNVGFNVKNVSVKDIRRGNVASDSKNDPAKEAASFNAQVIILNHPGQIGAGYAPVLDCHTAHIACKFAELIEKIDRRTGKSLEASPKFVKSGDACIAKLVPSKPL

SEQ ID NO: 30640 - protein, 655 aa, GIBBERELLA ZEAE PH-1
MLRNAMLRPSARATMRCRPRALMAPPYRRLQSGGPFQTMRPPSPEELGAPRRAKEYQRGRRWARKFLIISAVGGIVYLGDRQIYASGFTRSLRTFGTGLLVAFDYKLNFRPQPITGGTVQDLHNRNAERLFHVLRSNGGLYLKIGQAIAMQSAVLPPEFQKMFSRMFDDAPQDDWADIEAVIRQDFGKSVEEVFGVSFIGKEGMGLMERKARASASVAQVHWARLPDGREVAIKIQKREIAKQISWDLWAFKTVAWIYSKWFDLPLYKMVPFITERLELETDFVNEAKNSEKMRELVNGEKSLRGRVYIPTVYPEFTTKRVLVTEWIEGIRLWDKKAMTSRWLGGHGNGSPGAGSPLPKIDLEAARRELRTRPYQENLKPERQEWRGRRGRGGLGLSSREVMTTMVDLFSAQIFKWGVVHCDPHPGNIFIRRLPNGRAELVLIDHGLYVYMSQKFRNEYATFWKALMTFDNKTISRVTDAWGIKAADLFASATLLRPYEGGDGRTRNGIMKGLEGKTPAERHYAMQQRMKQGIREILADEEKWPQELIFIGRNMRIVQGNNQYLGSPVNRVKMMGEWASRSLFEDPHLPLSQRFQNRWRHLIFKTVMAASDIAFYMFKLRQWLGLGGGMEDEMEKRMKDVASDFGIELQHDVFDG

SEQ ID NO: 30641 - protein, 313 aa, Chamaebatiaria millefolium
GGLGDVLGGLPPAMAANGHRVMTISPRYDQYKDAWDTEVSIEVKVGDKTETVRFFHCYKRGVDRVFVDHPLFLEKVWGKAASKIYGPITGEDYKDNQLRFSLLCQAALEAPRVLNLNSSKYFSGPYGEEVVFIANDWHTALLPCYLKAIYKPEGIYNTAKVAFCIHNIAYQGRFAFADFSLLNLPDEFKSSFDFIDGYDKPVKGRKINWMKAGILESDKVLTVSPYYAKELVSSVDKGVELDKFIRKVGIRGIVNGMDVQEWNPLTDKYTNVKYDATTVTDAKPLLKEALQAEVGLPVDRNIPVIGFIGRLEE

SEQ ID NO: 30642 - protein, 353 aa, Haemophilus influenzae R2846
MKLSKTFLFITALCCAAPTLAIQNSTSSSGEQKMVMENTQNIREIYLAGGCFWGMEAYMERIHGVKDAISGYANGNTGKTSYHMIGLTDHAETVKVTYDANQISLDKLLKYYFKVIDPTSVNKQGNDRGRQYRTGIYYQDGADKAVIEQALAQLQTKYKKPVQIEVQPIKNYIVAEEYHQDYLKKNPNGYCHIDITKADEPVIDEKDYPKPSDAELKAKLTPLQYSVTQNKHTERSFSNEYWDNFQPGIYVDVTTGEPVFSSNDKFESGCGWPSFTKPIIKDVVHYETDNSFNMQRTEVLSRAGNAHLGHVFDDGPKDKGGLRYCINSASIKFIPLAEMEKAGYGYLIQSIKK

SEQ ID NO: 30643 - protein, 405 aa, Grifola frondosa
VVVIGHVDSGKSTTTGHLIYKCGGIDKRTIEKFEKEAAELGKGSFKYAWVLDKLKAERERGITIDIALWKFETPKFMVTVIDAPGHRDFIKNMITGTSQADCAILIIAAGTGEFEAGISKDGQTREHALLAFTLGVRQLIVAVNKMDTTKWSEDRFNEIIKETSTFIKKVGYNPKAVAFVPISGWHGDNMLEESANMPWYKGWQRETKAGVVKGKTLLDAIDAIEPPVRPSDKPLRLPLQDVYKIGGIGTVPVGRVETGIIKAGMIVTFAPTNVTTEVKSVEMHHEQLEQGVPGDNVGFNVKNVSVKDIRRGNVASDSKNDPAKEAASFNAQVIILNHPGQIGAGYAPVLDCHTAHIACKFAELIEKIDRRTGKSIEASPKFVKSGDACIAKLVPSKPMCVESYN

SEQ ID NO: 30644 - protein, 313 aa, Chamaemespilus alpina
GGLGDVLGGLPPAMAANGHRVMTVSPRYDQYKDAWDTGVPVEIEVGGRVETVRFFHCYKRGVDRVFVDHPSFLERVWGKTGSKIYGPSAGEDYKDNQFRFSLLCQAALEAPRVLNLNSNKYFSGPYGDEVVFIANDWHTALLPCYLKAIYKPKGIYENAKVVFCIHNIAYPGRFPIADFSVLNLPETLGGSFDFIDGYTKPVKGRKINWMKAGIIESDRVVTVSPFYAQELVSGEDKGVELDNIIRKTGITGIVNGMDVQEWNPATDKYLDTKYDNTTVLDAKPLVKEALQAEVGLPVDRNIPVIGFIGRLEE

SEQ ID NO: 30645 - protein, 313 aa, Chamaemespilus alpina
GGLGDVLGGLPPAMAANGHRVMTISPRYDQYKDAWDTQVTVELKVGDKTETVRFFHCYKRGVDRVFVDHPLFLEKVWGKTASKIYGPTAGVDFKDNQLRFSLLCQAALVAPRVLNLNSSKYFSGPYGEEVVFIANDWHTALLPCYLKAIYKPKGIYKTAKVAFCIHNIAYQGRFAFADFALLNLPNEFKSSFDFIDGYNKPVKGRKINWMKAGILESDKVLTASPYYAEELVSSVEKGVELDNIIRKTRIQGIVNGMDVQEWNPLTDKYTTVKYDASTVANAKPLLKEALQAEVGLPVDRDIPVIGFIGRLEE

SEQ ID NO: 30646 - protein, 426 aa, Oryza sativa (japonica cultivar-group)
MEVVSSSHSCLAFNRTPSSAWRFPGNGLGPGHAKLTRPRSAILCVRSGTASNPADSGKVHASHGFYVSDVDAALQGIPKKVGEIEKMIIPSLPEGPESSLISTGFWEWKPKLSVYYEKSGIDNSKAPSVLFLPGFGVGTFHFEKQLKDLGRDYKVWTMDFLGQGMSLPCEDPAPKSTSGELDEDTYWGFGQELQPWAEELVYSIDLWRDQVQHFIEEVIGEPVYIVGNSLGGFVSLYLAASCPHLVKGVTLLNATPFWGFLPNPATSPRLSKIFPWAGTFPLPSFVRKLTETVWQKISDPRSIQGILKQVYADHSTNVDMVFSRIIETTQHPAAAASFASIMCAPKGQISFEEALSRCQRQGIPISLMYGREDPWVRPIWGIKVKQQVPESPYYEISPAGHCPHDEVPEVPGKSLAWWITGRLQAS

SEQ ID NO: 30647 - protein, 590 aa, Pseudomonas putida KT2440
MASIPTISFDAIIIGGGGAGMRAALQLAQGGHKTAVVTKVFPTRSHTVSAQGGITCAIASADPNDDWRWHMYDTVKGSDYIGDQDAIEYMCQEGPAAVFELDHMGLPFSRTETGRIYQRPFGGQSKDFGKGGQAARTCAASDRTGHALLHTLYQGNLKAGTTFLNEYYAVDLVKNQDGAFVGVIAICIETGETLYIKSKATVLATGGAGRIYASTTNALINTGDGIGMALRAGVPVQDIEMWQFHPTGIAGAGVLVTEGCRGEGGYLINAHGERFMERYAPNAKDLAGRDVVARSMVKEIIAGNGVGPNKDHVLLKLDHLGEEVLHSRLPGICELSKTFAHVDPVVAPVPVVPTCHYMMGGVATNIHGQAITMDADGQDHIIPGLFAVGEVACVSVHGANRLGGNSLLDLVVFGRAAGLHLEKALSEGVEYRDASDTDVDVALNRLNKLNERTSGEDVASLKRELQSCMQNYFGVFRTGEYMQKGIEQLAGLRDRIANVKINDKSQAFNTARIEALELQNLLEVAEATAIAAEARKESRGAHAREDFEDRDDENWLCHTLYYPGEKRVAKRGVNFAPKTVPAFEPKVRTY

SEQ ID NO: 30648 - protein, 313 aa, Chamaemespilus alpina
GGLGDVLGGLPPAMAANGHRVMMISPRYDQYKDAWDTGVTVALKVGDKTETVRFFHCYKRGVDRVFVDHPLFLEKVWGKTASKVYGPVAGVDFKDNQLRFSLLCQAALEAPRVLNLNSGKYFSGPYGEEVVFIANDWHTALLPCYLKAVYKPRGIYSTAKVAFCIHNIAYQGRFAFADFALLNLPDEFKSSFDFIDGDEKPVKGRKINWMKAGILESDKLLTVSPYYAEELASAVEKGVELDNIIRKTGVFGIVNGMDVQEWNPLTDKHTTIKYDASNVADAKPLLKETLQAEVGLPVDRDIPVIGFIGRLEE

SEQ ID NO: 30649 - protein, 313 aa, Chamaemespilus alpina
GGLGDVLGGLPPAMAANGHRVMTVCPRYDQYKDAWDTSVLVEIEVGGRAETVRFFNCYKRGVDRVFVDHPLFLEKVWSKTGSKIYGPRTGVDYMDNQFRFSLLCQAALEAPRVLNLNSNEYFSGPYGDDVVFIANDWHTALLPCYLKTIYKPKGIYKNAKVVFCIHNIAYQGRFSFSDFSLLDLPDNLKGSFDFIDGHAKPVKGRKINWMKAGILESDRVVTVSPYYAQELVSGEDKGVELDNIIRKTGITGIVNGMDVQEWNPATDKYLDIKYDNTTVLDAKPLLKEALQAEVGLPVDRNIPVFGFIGRLEE

SEQ ID NO: 30650 - protein, 98 aa, Bifidobacterium animalis subsp. lactis
MSFPLTPLEDKIIVKQAEAETQTASGLIIPDNAKEKPQQGEVLAVGPGRRDDEGKRVPMDVKVGDKVLYSKYGGTEVHFKGEEYLIVSARDLLAVVND

SEQ ID NO: 30651 - protein, 575 aa, Aquifex aeolicus VF5
MLGRESVKALIEMGKEKGYVTYDEINEVLEEDVTSSELFEELIDILHRMNIQVVESKEEYEEESEETQEEEEEVVVSGSLTSSSRDGDPVKLYLREMGKIPLLKREEEIYYARQIEIGRKIMRRGLMRTSFLVEKILDDWAKLCNGKLKIQEVMDLVEYENDDDFEDRFDEFKRFFIEKGYELAKAYRNLLDVREEYIKNPSEESRKKYLYAHARMNKIIKEMKIKYAKFERVTEEIIKIYKEYARKRKDLNARIRKLKALYKDPDYFAQNFLTDENLQKIVQEKNIPTEKVLNLINEYNSLKREVQRIQNLIGVFPEEELPKVMKIIEQGRKKVVQAKQVMIQSNLRLVVSIAKKYVNRGLHFLDLIQEGNIGLMKAVDKYDYRKGYKFSTYATWWIRQAITRAIADQARTIRIPVHMIETINKIIKASKKLFQENGREPTPEEIAEYLDIPVEKVKKVMKFSQEPISLETPIGDDDDTFLKDFIEDKSIPNPEEQVTRKLLREQLQKVLSTLSEKEREILMYRYGLVDGTEYTLEQVGKMFNVTRERIRQIENKALRKLRHPARAKYLKDFEF

SEQ ID NO: 30652 - protein, 429 aa, Pseudomonas putida KT2440
MADKKAQLVIEGAAPVELPILTGTVGPDVIDVRGLGATGHFTFDPGFMATASCESKITYIDGDKGILLHRGYPIEQLAEQSDYLETCYLLLNGELPNAEQKAQFVSTVKNHTMVHEQLKSFFNGFRRDAHPMAVMCGVVGALSAFYHDSLDINNPQHREISAVRLVAKMPTLAAMVYKYSMGQPMMYPRNDLSYAENFLHMMFNTPCEIKPISPVLAKAMDRIFILHADHEQNASTSTVRLAGSSGANPFACIAAGIAALWGPAHGGANEAVLTMLDEIGDVSNIDKFIAKAKDKNDPFKLMGFGHRVYKNRDPRATVMKQTCDEVLRELGIKNDPQLELAMRLEEIALTDPYFIERSLYPNVDFYSGIILKAIGIPTSMFTVIFALARTVGWISHWKEMLSSPYKIGRPRQLYTGEQKRDIVALKDRK

SEQ ID NO: 30653 - protein, 489 aa, Ralstonia metallidurans CH34
MQPEDFAMQLKDPSLFKQLAYVDGQWISADSGATFDVTDPATGEVIARVADLGAAETTRAVAAAEVAQKAWAAKTGKERANILRRWFDLMLANTDDLAYLMTREQGKPLAEAKGEIAYAASFIEWFAEEAKRVDGEVLATPAADKRLVTLRQPVGVCAAITPWNFPAAMITRKVAPALAAGCAIVIKPAELTPLSAFALAELAHRAGVPAGVLQVVTGDARNIGGVLTASPIVRKLSFTGSTEVGRILMAQSAPTIKRLSLELGGNAPFIVFDDADVDAAVEGAIVAKYRNGGQTCVCANRFYIQDGIYDAFAAKFAERTAQLRVGNGLEAGVVIGPLIEDAAIEKVNSLVEDATSKGGKVLAGGGKHPLGGTYYTPTVIGNATADMRMAREEIFGPVAPLFRFKQDDEAVAAANATEYGLAAYLYTRDISRAWRTAEALEYGMVGLNTGLISNEVAPFGGIKQSGVGREGSRHGIEEYLEIKYLCLQM

SEQ ID NO: 30654 - protein, 1193 aa, Dechloromonas aromatica RCB
MAPSSQIPAEALEEALMIAGVGCWSWHTETRQFRISRNFHSLLGYSPDALPETPEAWLALAHADERPQLSTLFARLSANTARGYPPFTLRLKHTNGLWHWFEVRTPCTGTGDGAAPLVITFNEITQQKQAEAALRDSQLRFRALYNTSPLAFILWDRQGHITEWNRRAEQMFGWKAAEVIGKQVHHLLLSTEHHEAFADTVRAVMHGTGTGKFTGPAHGKDGVLLVCNWYNVALRTAQGKLVGILSLLLDITEERLTHQRIEKSEKIYRTLVETSPDAILLLGLDGGLKTANQQAHRLFGLDEMLDLDSTNVRDLLPDNASTEHFLDDPEDFNGFIVTRQLSMQRLDGGRFDADTAFTTIMDSTGQPTGIVLFARDVTGKLQAERELEAHREDLERLVQERTYDLENAHDTLAKIIDGSPVPTLVLDADHKITHWNEACEQIIGVKAGDIVGTSNQWKAFYPSQRPIMADLVLNGEMAQIQALYSDKYRRSRLVQGGYEAEDFFPMFKRWLFFTAAPLYDKQGRIVGAIETLQDITERKQAEIALTEAKHAAEAAAEAKAAFLANMSHEIRTPMNAVIGLAHLLLKGDLSGKQRDYISRIHGSGQMLLGLINDILDFSKIEAGRMVLEETEFALDDVLDNVTSVLLHRAQEKGLIMQYVVEPDVPTNLLGDPLRLAQILINLLGNALKFTASGSITVFVRRLPGNTARAELEIDVQDTGVGMSQEQQQVLFQAFSQADSSITRKYGGTGLGLTICKRLAQLMRGDIWVTSQSGVGSTFTFTVNLGLSTLEANPPLSAMRRALVVDDSPLARAILIRLLEKHGYSAIPAESGAEALGLLADTRTAPFEFVTIDFNMPGMDGLELSEAIRNQISPCPRLVMVTASDTAALGSDERLHCVDAVLSKPVTAAQIGKLVRDRELQNHAKPNAPAPLAGLRILLVDDMPTNLLIAGEMLESFGITVDTADNGVLALKKVIDEGNDYDIVLMDIQMPEMDGLEATRRLRAVERSQSLPIIAMTANAQDSERQRCLAAGMNDFLTKPIDPGLLQDTLFRWRPRQDTTAPTRKQETIPMTPADGLPDLPGINTAEGLRRMMNKPSLYEKVLRDFHARFTDEAKAIRAAISAGDFSTAERRAHSTKGLAGTIGAVGLQNAALNLEQALHNGEAALESIFDQFENELSIVIGSIARAFGIDLAG

SEQ ID NO: 30655 - protein, 392 aa, Crocosphaera watsonii WH 8501
MLSQIKTLAEELAPRLIEIRRHFHSHPELSGQEYQTAAYVSGVLSSYGIHVQEAVGKTGVVGNLEGNGTKKGILAIRTDMDALPIEERTKLEFASCKSGVMHACGHDVHTTLGLGTAMILAQLRDQLPGNIRFLFQPAEEIAQGASWMVQDGAMRDVDSIFGVHVFPSLTARSVGIRYGALTAAADDIEIFIQGESGHGARPHEAVDAIWIASQVITTLQQAISRTQNPLRPLVLTIGQITGGRAPNVIADQVRMAGTVRSLHPETHANLPEWIEGIIANVCNAYNAKYEMNYRRGVPSVQNDINLTQIIESACREAWGNDLVEILPEPSLGAEDFALYLEHAPGTMFRLGVGHEKKDNYPLHHPLFEVDESAIVTGVVTLAYSACKYWGIQ

SEQ ID NO: 30656 - protein, 665 aa, Haemophilus influenzae R2846
MATRKQLANAIRVLAMDSVQKAKSGHPGAPMGMADIAEVLWRDFLKHNPTNPKWADRDRFVLSNGHGSMLIYSLLHLTGYDLSIEDLKQFRQLHSKTPGHPEYGYAPGVETTTGPLGQGITNAVGMAIAEKTLAGQFNREGHEIVDHHTYVFLGDGCLMEGISHEACSLAGTLGLGKLIAFYDDNNISIDGHVDGWFSDDTAARFEAYGWQVIRNVDGHDAEQIRAATILAQAEKEKPTLIICKTIIGFGSPNKSGSHDSHGAPLGDEEIALTRKALGWEYAPFEIPAEYYAEWSAKEKGSAAEKSWEEKFAAYAKAYPELAAEFKRRVSGELPANWAAESKAFIEKLQANPASIASRKASQNAIEAYAHVLPEFLGGSADLASSNLTLWSGSKPIRAHENVGGNYINYGVREFGMSAIMNGIALHGGFIPYGATFLMFYEYAHNAVRMAALMKQRALFVYTHDSIGLGEDGPTHQPVEQTASLRLIPNLETWRPCDQVESAIAWQQAVERQDGPSALIFTRQNLAQMNRTSAQLDAVKRGAYVLKDCDGTPELIFIATGSEVELAVKAADVLSAEGKKVRVVSMPSTNRFDKQDAAYRESVLPAAVTKRVAIEAGIADFWYKYVGFNGRVVGMNSFGESAPADQLFKLFGFTVENVVAKAKEIL

SEQ ID NO: 30657 - protein, 348 aa, Oryza sativa (japonica cultivar-group)
MVEQLRREISIMRMVRHPNVVGIREVLASRARVFVVMEYARGGELFAKVARGRLTEEHARRYFQQLVAAVGFCHGRGVAHRDLKPENLLLDEEGRLKVTDFGLAALPEQLRQDGLLHTQCGTPAYVAPEVLRKRGYDGARADLWSCGVVLYVLLCGFLPFQHENYAKMYQKIFKAEYQVPPWVSGDARRLIVRLLVVDPAKRISIPEIMRTPWFKKGFVPPVPTSPVSPKKWEEDDVLLDGGDSGAMSPRTCNAFQLISSMSSGFDLSGMFESEQKAATVFTSRAPAATVIQKLEAVGRSLGYSATRGKGWKLRLEATASVQRDVKSVGCISFSFFARGYVQAKSRDV

SEQ ID NO: 30658 - protein, 245 aa, Moorella thermoacetica ATCC 39073
MRLGAAQMFIADSMAVNEATILRLAGEAAGRGVELLVFPEMGLTGYNPAALGRPGFKEELEGALARIARRAADLGVGLIVGRAEFAGERLFNSASVFLPDGSVHTYRKIYLTDAEARYFTPGTGHLVFNYKGSKFGVIICRDQNYPELARQIAAEGARALFILSAHYYQPGEARWKLPKNRALPIARAVENHCYVLLANAVGSHIGMVSLGNSLIADPEGGLVVMADEASETLLTCDLPGDSQCS

SEQ ID NO: 30659 - protein, 323 aa, Zea mays
MSTEREVVCVTGASGCIGSWLVHLLLLRGYSVHATVKNLQDEKETKHLEALEGAATRLHLFEMDLLKYDTVSAAVNGCSGVFHLASPCIVDEVQDPQKQLLDPAVKGTLNVLTAAKEAGVKRVVVTSSISAITPSPNWPADKIKNEDCWADEDFCKQNGLWYPLSKTLAKKAAWEFAEEKGLDVVVVNPGTVMGPVIPPSINASMLMLQRLLEGCTETYENFFMGSVHFKDVALAHILVYENPSAKGRHLCVEAISHYGDFVAKVAELYPNYSVPKLPRETQPGLLRAKNAAKKLMELGLEFSSMEVIIKDGVESLKSKGFIS

SEQ ID NO: 30660 - protein, 388 aa, Lactobacillus johnsonii NCC 533
MLQDVYIVGMNRIPFGKYRGFYKDKSAVDLGVLALKGLLKKNIVPQDKIDSILVGNVLSAGLGQNVARQIALKSGLPESVVGTSVDDVCGSSLKALRFAQGQMLLGDSQIAIVGGAESMTNAPLLLDKSKKHDENPAYQDSLMIDGIGDAYSRKPMGITAENVADKYHITRQDMDEFARDSHAKAYAAQENDWFKEEYAPIELDGHVLDHDETIRPDSSLEALGQLKPVFKENGRVTAGNSSPLTDGASMLLLSNQQKLDELNLTPLAYLGAYAEIGCDPAYMGYAPYFAIKKLLTKTNSTIEDYDLIEINEAFAAQAYAVARDLNIPKEKLNIAGGAISLGHPLGATGTRLVMSAVNSLRKINGRRAIVSLCIGGGQGIAYEIRRII

SEQ ID NO: 30661 - protein, 381 aa, Oryza sativa (japonica cultivar-group)
MMHGLEEITTRELDEDDNVEAKGGGGAGAGAGAAMDVDSVECLSLPDSSSSSGAGAGGGGGGGGGGGVGAMDAADDVGLALHAHGALLAAAAAARAAACSKGGGGGGAAAGSGVHELLECPVCTNSMYPPIHQCQNGHTLCSTCKARVHNRCPTCRQELGDIRCLALEKVAESLELPCKYCSLGCPEIFPYYSKIKHEAQCMFRPYNCPYAGSECAVVGDIPYLVAHLRDDHKVDMHSGCTFNHRYVKSNPREVENATWMLTVFHCFGQYFCLHFEAFQLGMAPVYMAFLRFMGDENEARNYSYSLEVGANGRKMVWEGTPRSVRDSHRKVRDSHDGLIIQRNMALFFSGGDRKELKLRITGRIWKEQQTPDGACIPNLCS

SEQ ID NO: 30662 - protein, 898 aa, Streptococcus suis 89/1591
MAIQKLENYNNKEAIREEVTILTSILEKVAAQMMPAETFAKIVELSQLSRQDDYRALIAIISQLNNDELAVISRYFAVLPLLINISEDVDLAYEINHQNNIDQDYLGKISTTIDMVSKQENAAEILEKLNVVPVLTAHPTQVQRQSMLDLTKHIHELLRRYRDVKLGLLNKNKWEDELRCYIEIIMQTDMIREKKLKVTNEITNVMEYYNSSFIKAVTKLQREYKRLAAEKGIVLNNPRPITMGMWIGGDRDGNPFVTAETLKLSALTQCEVIMNYYDDQLYKLYRNFSLSTSIVNVSTAVKMLADLSEDSSIYRENEPYRRAFHYIQMKLANTRDYLVHNKPSDVRYSNVAEFKADLLAIKQSLVENKSMALLKGDFTELLEAVEAFGFYLASIDMRQDSSIHEASVAELLASARIVEDYSSLSEEAKCHVLLKQLETDPRILSATHMPKSEQLEKELAIFAAARELKDKLGEEIIKQHIISHSESVSDLLELAVLLKEVGLVDVDKARVQIVPLFETIEDLDNAPDTMRQYLQLDLAKRWIAGNKYYQEIMLGYSDSNKDGGYLSSGWTLYKAQNELTQIGQDYGVNITFFHGRGGTVGRGGGPSYDAITSQPFGSIKDRLRLTEQGEVIGNKYGNKDAAYYNLEMLVSATLDRMVTQMITDPNEIDGYRETMDEIVSDSYRIYRDLVFNNPHFYDYFFAASPIREVSSLNIGSRPAARKTITEIGGLRAIPWVFSWSQNRVMLPGWYGVGSSFKRFIDKHPDNLSKLQKMYESWPFFRSLLSNVDMVLSKSNMNIAFEYAKMCESEEVRNIFHVILDEWQLTKEIILSIEQNDELLAELPFLKASLDYRMPYFNVLNYIQIELIHRLRRGELSKEQENLIHITINGVATGLRNSG

SEQ ID NO: 30663 - protein, 441 aa, Clostridium tetani E88
MNVNELKELVCKVIDDNFDKLFNLAGDIENNPELGFKEIKTAEKVCKLFDELNISYKDKLALTGVKGKLKEKSEGPNVAILGELDGVICFDSANANKETGASHTCGHNLQITAMAAAALGLKLSNIEDKLHGNVSFMAVPAEEFIEIEYRQKLKEEGKIHFLAGKQELIYRGAFDDVDMAMMIHSLKDAPKPTVALGSSSNGFIGKTIQYIGKTAHAAEAPHTGVNALNAAMLGLMGVNALRETFRDEDSIRVHPIITKGGDTVNSVPADVRMETYVRANNVDAMKITNKKVDKALIAGGYAIGAETIINTIPGHLPLKSSLPLNEIFKENSLSLLPEDSVIDAGHFAASTDMGDVSNLIPAIHPFIGGVSGALHTKDFKVEDFYSACILPGKIMAMSVIDLLFNNAEKAEEIINSYTPTFESKEKYIEFLEECFERKVEK

SEQ ID NO: 30664 - protein, 281 aa, Salmonella enterica subsp. enterica serovar Typhi Ty2
MSQTSTLKGQCIAEFLGTGLLIFFGVGCVAALKVAGATFGQWEISVIWGLGVAMAIYLTAGVSGAHLNPAVTIALWLFACFDKRKVVPFIISQVAGAFCAAALVYGLYYNLFVDFEQTHHIVRGSVESLDLAGIFSTYPNPHINFVQAFAVEMVITAILMGLILALTDDGNGVPRGPLAPLLIGLLIAVIGASMGPLTGFAMNPARDFGPKMFAGLAGWGEIAFTGGRDIPYFLVPLFGPIVGAILGAFAYRKFIGRHLPCDICVVEEKDSTAATQQNASL

SEQ ID NO: 30665 - protein, 223 aa, Cupriavidus necator
MTDAIAQLFRNNREWVDRVNAEDPTFFMRLANQQAPEYLWIGCSDSRVPANQILGLAPGEVFVHRNIANVIAHSDLNALAVIQFAVEVLKVRHITVVGHYGCGGVKVALKRERIGLADNWLRHVRDVADKHEAYLGTLLREDDAHTRLCELNVIEQVNNVCQTTVLQDAWSRGQAVTVHGWVYGVSDGLLRDLGMAASSNDELREQLAAAYRQYGDPPQASIR

SEQ ID NO: 30666 - protein, 252 aa, Oryza sativa
  misc_feature (62)..(62): Xaa can be any naturally occurring amino acid
  misc_feature (97)..(97): Xaa can be any naturally occurring amino acid
  misc_feature (118)..(118): Xaa can be any naturally occurring amino acid
  misc_feature (135)..(135): Xaa can be any naturally occurring amino acid
  unsure (1)..(252): unsure at all Xaa locations
MVDSTPAVAIADAGWPLSSSVADLLPASLSLTLLLDSLVVRVVLGAAAFFFEHIRKIGCTHXLERNEVSAAFFEDPNSLNKVRCPSHYEPADKYNNXSSPTYNEEHRLTEALTQTLKXLKERTDVEKSYTYEVLXIAHAGRTDHTSKVDFAFAMQTNSDHVQHPQCDTQATAQRPRQGYHTARAHSSPNHRPRPGRTNNTNNSKHTPTQLNQTDDRRTNNIAQKEQRNNRRHRTRPPVFSLFSLSIRKRKNK

SEQ ID NO: 30667 - protein, 443 aa, Ashbya gossypii ATCC 10895
MTQTNQVRASTKGVLGMTRNVVGAFTANWRCRRQHQALGRVPEAMPDQILGLTERFNQDRNPHKVNLTVGIYKDDNGEVTSFPSVARAQLMVEGQRGGRLAYLPIAGCPSYGARVSDFLYSECAPQGREFLASGCVSFMQTLSGTGALSLASLFLSNFISKTIWVPQPSWANHMNIFKLNGFEEVRRYRYYEDGAVDVDSWLAQLERAAADRPYPQCILLHACCHNPTGVDPTREQWSRILSVINGLGMVPIVDMAYQGLESGDLRADAYLLRMCLEHRWDNGLYVCHSFAKNMGLYGERVGSLSVVHPLGQFQAKAATDSQLKCIIRASYSSPPSYGSRVATTVLSVPEIKQQWHEDVHGMCNRLWSVRCMLHEKLRWPKLIDSTSQHGMFYYTGIGPDAVDTLREKYSVYLTKDGRLSLAGINTGNVDYVARALRNVSTYP

SEQ ID NO: 30668 - protein, 397 aa, Arabidopsis thaliana
MMSLSGSSGRTIGRPPFTPTQWEELEHQALIYKYMVSGVPVPPELIFSIRRSLDTSLVSRLLPHQSLGWGCYQMGFGRKPDPEPGRCRRTDGKKWRCSREAYPDSKYCEKHMHRGRNRARKSLDQNQTTTTPLTSPSLSFTNNNNPSPTLSSSSSSNSSSTTYSASSSSMDAYSNSNRFGLGGSSSNTRGYFNSHSLDYPYPSTSPKQQQQTLHHASALSLHQNTNSTSQFNVLASATDHKDFRYFQGIGERVGGVGERTFFPEASRSFQDSPYHHHQQPLATVMNDPYHHCSTDHNKIDHHHTYSSSSSSQHLHHDHDHRQQQCFVLGADMFNKPTRSVLANSSRQDQNQEEDEKDSSESSKKSLHHFFGEDWAQNKNSSDSWLDLSSHSRLDTGN

SEQ ID NO: 30669 - protein, 301 aa, Corynebacterium glutamicum ATCC 13032
MNNRIVVVGSINADLNVLVDRHPAPGETLLGSGGHITAGGKGANQAVAAALQGADVAFVGAVGKDPYAAPALEFLRSSGVDLTAVSEVDDTTGLAVITVAKDGENNIVVIPGANSLVNCDYVSSQSALLAEAGILLLQGEIPADGFKEAIHHTMGRVVVNLAPVIEVEKSALLEADPIIANEHEAGLILDQFGAGIDSMDPHELAQALLDAGFASVVLTLGSAGALVADATGITDIATPTVQAVDTTGAGDAFAGAFCARLIKGDSLIDAATHAARVGAYSVQTAGAQASYPDASVSLPSV

SEQ ID NO: 30670 - protein, 623 aa, Oryza sativa (japonica cultivar-group)
MGQCYGKGASGRTADDEGGVVTEHQSPPPANGLPSTPPRQQAQAQAQQVGTPRRRGSKSGSTTPGHQTPGVAWPSPYPSGGASPLPAGVSPSPARSTPRRFFKRPFPPPSPAKHIKATLAKRLGGGKPKEGTIPEEGGVGAGGGGGGAADGAETERPLDKTFGFSKNFGAKYELGKEVGRGHFGHTCSAVVKKGEYKGQTVAVKIIAKAKMTTAISIEDVRREVKILRALSGHNNLVKFYDACEDGLNVYIVMELCEGGELLDRILARGGRYTEEDAKAIVVQILSVVAFCHLQGVVHRDLKPENFLFTTRDENAPMKLIDFGLSDFIRPDERLNDIVGSAYYVAPEVLHRSYSMEADIWSIGVITYILLCGSRPFWARTESGIFRSVLRADPNFDDSPWPTVSAEAKDFVKRFLNKDYRKRMTAVQALTHPWLRDEQRQIPLDILIFRLIKQYLRATPLKRLALKALSKALREDELLYLKLQFKLLEPRDGFVSLDNFRTALTRYLTDAMKESRVLEFLHALEPLAYRRMDFEEFCAAAISPYQLEALERWEEIAGTAFQQFEQEGNRVISVEELAQELNLAPTHYSIVQDWIRKSDGKLNFLGFTKFLHGVTIRGSNTRRH

SEQ ID NO: 30671 - protein, 1425 aa, Ashbya gossypii ATCC 10895
MTAGHRDERPDREGGSERDEHLNRVVQSVSDATKRLSQISNSSTAHTKTGKRKNRDTVGPWKLGKTLGKGSSGRVRLAKNMQSGKLAAIKIVPKRNVRHNQKQVTALPYGIEREIIIMKLITHPNIMALYEVWENKSELYLVLEYVEGGELFDYLIARGKLPEQEAIHYFKQIVQGVSYCHNFNICHRDLKPENLLLDKKNKTVKIADFGMAALETTNRLLETSCGSPHYASPEIVMGQKYHGSPSDVWSCGIILFALLTGHLPFNDDNVRKLLLKVQHGRYQMPSNVSKEAKDLISKILVVDPEKRITVDKILEHPLLVKYDNPGKGGLACPLEKPEERPKVLDIHSIDDIDETILSNLQILWHGAPKEYLVDKLLQSGFTEEKLFYALLLRYQQRQSVEPTSVPSNMASTNGSGAFARASNNDQSVINAPKVTQKSQFSINSLLVSPKKTREGYVASSSRVFKHSVSRRSLHVSPSPMKSSTSCRSLKSSSSKRLQSPNPKAITQPVKVTSPQPRRRTLHNSASKRSLYSLTSISKRSLNLNEFLQEANEVKTPKLPSMPLQDQPRSEAPKTPTKTTYGADSHGGEKPTFISVLHDCPTVDSEGMVFKSSSGTPMIAANAPIIQPAFIFGVGAFPGTKQPSSNSLSKPSLNSQSSPKQAQEATANSMRETIRDRQTLVVEKRVPSKTESVPPAFPRVRPIMERKHGSDLTLVRDTRSVAKEKRSSLSLDPRRTAPEPPRGIETLLRRYSLKNSIKSRSSLKKKRDSGAWSITDKTIFQDLGQVPEDEEQEKDSEEKGNDTFISTTETSDTPSSKFKVTTSTPIKKDDATAISAENAAVGTEQSGSEDEATNFDSNAHSYPISTDLKTEDDLTPIKPQGQTDLLRMPSSFMNSSNTFANLNNFISNIDKEYSPENSDSGRIEKDEPAGKAQPEQITVKKRQRTLAPGGYLSPSIPRMESENSLNQELGSRISDLSDLSFANDMPTYTNTAHAVSISPGTRNVCSFSPLEPRSPQDVSNNGKMRSNLHIPLRQLSEDMCDKTITTQEGESVNIFEDAPEEEGSLTTSTSGSVPNIHQKAISIDTMNTSCALVPVSHVRTSIHMNGDSSVLDWSTSDGILSKARPLPTSNHVRKKSGNRLSNNLTLSKSMMSMFKNLDQINVTDIQDPMPVSDLLSKGVDPIEPIEPLKNDQVTLKAESIGAESDSINMDLADRKHVTIFHDNVSDKNFKSTRMENSDKGSLGSGAPQATHLFHTGNKDMKSHETLLSPITETPAAALSATSLTRKESISSDGKSVKDETKKSGKGNWFMRLIMSFTKPKKTVIQEHMTVLPFDDVNIITLQQFSYQGVEYEIRQMERRKDKQKVEYDCRLLDGDFKFKINIYGENSAATKVSVKQKGRSDELAFTKLNTDIEALIKAKENAANVK

SEQ ID NO: 30672 - protein, 341 aa, Shigella flexneri 2a str. 301
MKALSKLKAEEGIWMTDVPVPELGHNDLLIKIRKTAICGTDVHIYNWDEWSQKTIPVPMVVGHEYVGEVVGIGQEVKGFKIGDRVSGEGHITCGHCRNCRGGRTHLCRNTIGVGVNRPGCFAEYLVIPAFNAFKIPDNISDDLASIFDPFGNAVHTALSFDLVGEDVLVSGAGPIGIMAAAVAKHVGARNVVITDVNEYRLELARKMGITRAVNVAKENLNDVMAELGMTEGFDVGLEMSGAPPAFRTMLDTMNHGGRIAMLGIPPSDMSIDWTKVIFKGLFIKGIYGREMFETWYKMAALIQSGLDLSPIITHRFSIDDFQKGFDAMRSGQSGKVILSWD

SEQ ID NO: 30673 - protein, 398 aa, Shigella flexneri 2a str. 301
MRGEFYQQLTNDLETARAEGLFKEERIITSAQQADITVADGSHVINFCANNYLGLANHPDLIAAAKAGMDSHGFGMASVRFICGTQDSHKELEQKLAAFLGMEDAILYSSCFDANGGLFETLLGAEDAIISDALNHASIIDGVRLCKAKRYRYANNDMQELEARLKEAREAGARHVLIATDGVFSMDGVIANLKGVCDLADKYDALVMVDDSHAVGFVGENGRGSHEYCDVMGRVDIITGTLGKALGGASGGYTAARKEVVEWLRQRSRPYLFSNSLAPAIVAASIKVLEMVEAGSELRDRLWANARQFREQMSAAGFTLAGADHAIIPVMLGDAVVAQKFARELQKEGIYVTGFFYPVVPKGQARIRTQMSAAHTPEQITRAVEAFTRIGKQLGVIA

SEQ ID NO: 30674 - protein, 401 aa, Bacillus cereus ATCC 14579
MGATGVTSQRKTIEESIERNKEKYIETSHDIHANPEIGNQEFYASRTLSLLLGSAGFQLQHNIAGHETGFIARKSSGKQGPAIAFLAEYDALPGLGHACGHNLIGTISVAAAIALSETLEEIGGEVVVFGTPAEEGGPNGSAKSSYVKAGLFKDIDAALMIHPSGKTATTSPSLAVDPLDFHFYGKTAHAAASPEEGINALDAVIQLYNSINALRQQLPSDVRIHGVITEGGKAPNIIPDYAAARFFIRAATRKRCAEVTEKVRNIAEGAALATGAKVKIHQFQNEIDELLVTKTYNDIVAEELELLGEDVNRKERVGIGSTDAGNVSQVVPTIHPYIKIGPDDLIAHTNEFREAARSELGDKALITSAKALANTAYRLITEEGLLEKVKEEFREAQRNQG

SEQ ID NO: 30675 - protein, 333 aa, Streptomyces viridifaciens
MAELFYDADADLSIIQGRKVAVIGYGSQGHAHALSLRDSGVDVRVGLHEGSKSKAKAEEQGLRVVTPAEAAAEADVIMILVPDPIQAQVYEESVKDNLKDGDALFFGHGFNIRFGFIKPPAGVDVCMVAPKGPGHLVRRQYEEGRGVPCIAAVEQDASGNAFALALSYAKGIGGTRAGVIKTTFTEETETDLFGEQAVLCGGTSALVKAGFETLVEAGYQPEIAYFECLHELKLIVDLMYEGGLEKMRWSVSETAEWGDYVTGPRIITDATKAEMKKVLAEIQDGTFAKNWMDEYHGGLKKYDDYKEQDSEHLLETTGKQLRKLMSWVNEETM

SEQ ID NO: 30676 - protein, 313 aa, Cormus domestica
GGLGDVLGGLPPAMAANGHRVMTISPRYDQYKDAWDTEVTVELKVGDKTETVRFFHCYKRGVDRVFVDHPLFLEKVWGKTASKVYGPVAGVDFRDNQLRFSLLCQAALEAPRVLNLNSSNCFSGPYGEEVVFIANDWHTALLPCYLKAVYKPRGIYSTAKVAFCIHNIAYQGRFAFADFALLNLPDEFKSSFDFMDGYEKPVRGRKINWMKAGILESDKLLTVSPYYAEEIVSAAEKGVELDNIIRKTGIFGIVNGMDVQEWNPLTDKYTTIKYDASTVADAKPLLKETLQAEVGLPVDRDIPVIGFIGRLEE

SEQ ID NO: 30677 - protein, 334 aa, Phaeodactylum tricornutum
MPVSLGINGFGRIGRLVMRAALEHPDATVVAVNDPFLTPEYAAYQFKYDSVHGTYSEDVSFEEGYLVVGDKKIRFFSERNPEEIGWGSVGAEIVCESTGVFTTIDKAQAHINGGAEKVVISAPSADAPMYVMGVNHTTYSGATVFSNASCTTNCLAPLAKVLHEEFGIVEGLMTTIHAGTATQLVVDGPAKRGKDWRAGRSSLANLIPASTGAAKAVGKVIPELNGKLTGMAVRVPTADVSMVDLTIRTEKAVSAAELKAALKKASEGPMKGILGYTEDAVVSQDFVHDPRSSIVDASAGIALNDNFHKVIAWYDNEWGYSNRLVDLAIYTSGK

SEQ ID NO: 30678 - protein, 313 aa, Cormus domestica
GGLGDVLGGLPPAMAANGHRVMTISPRYDQYKDAWDTEVTVELKVGDKTETVRFFHCYKRGVDRVFADHPLFLEKVWGKTASKIYGPTAGVDFKDNQLRFSLLCQAALVAPRVLNLNSSKYFSGPYGEEVVFIANDWHTALLPCYLKAIYKPKGIYKTAKVAFCIHNIAYQGRFAFADFALLNLPNEFKSSFDFIDGYDKPVKGRKINWMKAGILESDKVLTVSPYYAEELVSSVEKGVELDNIIRKTRIQGIVNGMDVQEWNPLTDKYTTVKYDASTVADAKPLLKEALQAEVGLPVDRDIPVIGFIGRLEE

SEQ ID NO: 30679 - protein, 537 aa, Bifidobacterium animalis subsp. lactis
MAKIIEYDEEARQGMLAGLDKLADTVKVTLGPKGRNVVLDKTYGAPTITNDGVSIAKEIDLEDPFERIGAELVKEVAKRTDDVAGDGTTTATVLAQSLVHEGLKNVVAGSNPIALRRGIEKASDALVKQLVASAKPVETKEQIAATATISAGDPEVGEKIAEALDKVGQDGVVTVEDNNRFGLDLDFTEGMRFDKGYISPYFVTNAEDQTAVLDDPYILLTSSKVSSQQDVVHIAELVMKTGKPLLIVAEDVDGEALPTLILNNIRGTFKSCAVKAPGFGDRRKAMLQDMAILTGGQVVSEDLGLKLDSIDLSVFGTAKKVIVSKDETTIVSGGGSKEDVAARVAQIRAEIEKTDSDYDREKLQERLAKLAGGVAVIKVGAATEVEAKERKHRIEDAVRNAKAAIEEGLVPGGGVALVQAAEKVEKDFNLEGDEATGAAIVFSGIEAPIKQIAENAGLSGAVVIDKVRSLPEGEGFNAATDTYEDLMAAGVTDPVKVTRSALQNAASIAGLFLTTEAVVANKPEPAAAPAAGQDMGY

SEQ ID NO: 30680 - protein, 376 aa, Odontella sinensis
MKLSIAALLVGSAAAYAPSSFSGTSLKASSNGASMSMSTGMGVNGFGRIGRLVTRIMMEDEDCSLNAINAGSATPDYMAYQYKYDTIHGIAKGSVEIDGDFLVLNGKKIQTSRCRDPKEVGWGALGADYVCESTGVFLTKEKAQAIIDGGAKKVIYSAPAKDDSQTIVMGVNQAEYDGSEDFISCASCTTNGLAPMVKAIHDEFVIEEALMTTVHAMTATQAVVDSSSRKDWRGGRAASGNIIPSSTGAAKAVTKVIPSLQGKLTGMAFRVPTIDVSVVDLTCRLEKATTYEEICAYVKSKAEGDMKGFLGYSDEPLVSTDYEGNTISSIFDADAGIMLNPNFVKLVAWYDNEWGYSCRVVDLMKHVAAVDAKVEA

SEQ ID NO: 30681 - protein, 497 aa, Mrakia psychrophilia
RSHTVAAQGGINAALGNMHKDNWKWHMYDTVKGSDWLGDQDSIHYMTREAPKSIIELEHYGVPFSRTENGMIYQRAFGGQTKEYGKGAQAYRTCAVADRTGHALSHTLYGQALRHDTHFFIEYFALDLLTHNGEVVGVIAYNQEDGTIHRFRAHKTIIATGGYGRAYFSCTSAHTCTGDGNAMVSRAGFPLQDSEFVQFHPSGIYGSGCLITEGARGEGGFLVNSEGERFMERYAPTAKDLACRDVVSRAITMEIREGRGVGKKKDHMYLQLSHLPPEVLKERLPGISETAAIFAGVDVTKEPIPIIPTVHYNMGGIPTKWNGEALTIDEETGEDKVIPGLMACGEAACVSVHGANRLGANSLLDLVDFGRAVAHTVADTLQPGLPHKPLPSDSGKESIANLDKLRNANGSRSTAEIRMNMKQTTQKDVSVFRTQSSLDEGVRNITAVEKTFDDVKTTDRSMIWNSDLVEILELQNLLTCASQTAVSAANRKESRGA

SEQ ID NO: 30682 - protein, 313 aa, Cormus domestica
GGLGDVLGGLPPAMAANGHRVMTVSPRYDQYKDAWDTGVPVEIKVGGRVETVRFFHCYKRGVDRVFVDHPSFLERVWGKTGSKIYGPSAGEDYMDNQFRFSLLCQAALEAPRVLNLNSNKYFSGPYGDEVVFIANDWHTALLPCYLKAIYKPKGIYENAKVVFCIHNIAYQGRFPTSDFSVLNLPENLKGSFDFIDGYNKPVKGRKINWMKAGILESDRVVTVSPFYAQELVSGEDKGVELDNIIRKTGITGIVNGMDVQEWNPATDKYLDTKYENTTVLDAKPLVKEALQAEVGLPVDRNIPVIGFIGRLEE

SEQ ID NO: 30683 - protein, 339 aa, Odontella sinensis
MTVSLGINGFGRIGRLVMRAALENPDTTVVAVNDPFMNIDYAAYQIKHDSVHGMYPGSVEVDGDSLVFDGTTKVKFFAERDPASIPWGASGAEYVCESTGVFTTIEKASLHLKGGAKKVIISAPSANAPMFVMGVNHKSYDGSADVVSNASCTTNCLAPLAKVLHENFGIEEGLMTTIHAATATQLVVDGPSKGGKDWRGGRSAMANMIPASTGAAKAVGKVLPELNGKLTGMAVRVPTPDVSMVDLTVRTTKACTGAEIDAALKAASESEDLKGILGYTDLPVVSQDFVHDKRSSIVDSTACIHLSDTFHKVISWYDNEWGYSNRLVDLCLFMKTVDN

SEQ ID NO: 30684 - protein, 205 aa, Populus x canadensis
TFDVNTKTGGPFGTIRHPDELAHGANNGLDIAVRLLEPLKEQFPNLSYADFYQLAGVVAVEITGGPEVPFHPGRPDKSDPPPEGRLPDATKGSDHLRDVFGHMGLSDKDIVALSGGHTLGRCHKERSGFEGPWTPNPLVFDNSYFKELLSGEKEGLIQLPTDKTLLEDPVFRPLVEKYAADEDAFFADYAEAHMKLSELGFAEAY

SEQ ID NO: 30685 - protein, 606 aa, Bifidobacterium longum NCC2705
MTTSQRTVIPDSIRTNGATPNPWWSNAVVYQIYPRSFQDTNGDGLGDLKGITSRLDYLADLGVDVLWLSPVYKSPQDDNGYDISDYQDIDPLFGTLDDMDELLAEAHKRGLKIVMDLVVNHTSDEHAWFEASKNKDDEHADWYWWRPARPGTTAGEPGAEPNQWGSYFGGSAWEYCPERGEYYLHQFSKKQPDLNWENPAVRRAVYDMMNWWLDRGVDGFRMDVITLISKRTDLSGKLPGEYGSELDDLPVGEEGYSNPNPFCADGPRQDEFLAEMRREVFEGREGFLTVGEAPGVTAQRNEYITDPANGELDMLFLFEHVDFDCEGVKWKPLPLDLPKLKSIMAGYQAAVKNAGWASLFTGNHDQPRVVSRWGDDSSEESRVRSAKALGLMLHMHRGTPYIYQGEELGMTDAHFTRLDQYRDLESLNAYRQRVEEAKVQSPESMLAGIAARGRDNSRTPMQWDGSVYAGFTAPDAAKEPWISVNPNHAAINAVGEFDDPDSVYAFYKQLIALRHDMPVVAAGDWHLLDADDAHVYAFTRTLGDEKLLVVVNMSGRTVDLPRETAELAAAGITESNVVISTYDAPHAVASLANRELDPWEAAVIQL

SEQ ID NO: 30686 - protein, 313 aa, Cormus domestica
GGLGDVLGGLPPAMAANGHRVMTVSPRYDQYKDAWDTSVLVELEVGGRVETVRFFHCYKRGVDRVFVDHPLFLEKVWGLTESKIYGPRTGVDYMDNQFRFSLLCQAALEAPRVLNLNSNKYFSGPYGDDVVFIANDWHAALLPCYLKTIYKPKGIYKNAKVVFCIHNIAYQGRFPNSDFSLLDLPDNLKGSFDFIDGHDKPVKGRKINWMKAGILESDRVVTVSPYYAQELISGEDKGVELDNTIRKTGITGIVNGMDVQEWNPATDKYLDIKYDNTTVLDAKPLLKEALQAEAGLPVDRNIPVFGFIGRLEE

SEQ ID NO: 30687 - protein, 348 aa, Plantago major
MILVYLVLQVAIVVIRCDGALSPSERYWKAVLPNSPMPQAVKVLLPTPTGVGVDAANGRIERHAAGRTIYAAAANGKIERHAAAYTIYAAAANGRIVRHAAPIILIYAAATNGRIERANVTGTQLHDDPTASLFFLEKDMHAGTKMKLQFVKTSNQATFLPRQVADSIPFSSKRFPEILRKFKPTSDEADIMKDTIKDCEDEGIKGEEKFCATSLESMIDFCTSKLGSRNVEAISTNAQENAENSSPKEYTLVGAPRKMPGNKAVVACHKMDYAYAVFYCHKIAKTVAYEVSLAAADGCKVEAVAVCHHDTSQWNPKHFAFQVLKVQPGSVPVCHFLPQQQIVWVPKY

SEQ ID NO: 30688 - protein, 615 aa, Odontella sinensis
MISGTARALASSASNASKRAFHASARSDARKFFVGGNWKCNGSVQQVNDLVSMLNQSTLSTDTEVVVCPSQVYVQGVSEKLRKDIGVGAQDCWVQGNGAFTGETSADMLADMGVGWVVIGHSERRGKGEADEEVARKAKYALDKGLKVIACCGEPLESREAGTTNDFVFPQIKAYADVFSKEDWANVVIAYEPIWAIGTGLTATPEQAQDTHADIRQYLGEVAGADVAESTRILYGGSATGATAPGLSAKPDIDGFLVGGASLKPEFADIVNCQGGETSLKPVNIGINGFGRIGRLVMRAAQNDPMVNIVSVNDPFIPVNYMEYMLQYDTVHGEYPGTVKQTGDDTLSIDGKDVKVFGEMDPSKIQWGSVGADYVIESTGVFTSTEKASMHMKGGAKKVVISAPSGDAPMFVMGVNQEKYESSMDVVSNASCTTNCLAPLAKVINDEFGLKEGLMTTVHAVTATQQTVDGPSQKDWRGGRAACYNIIPSSTGAAKAVGKVIPELNGKLTGMSFRVPTANVSVVDLTARLDKGASYETICAAIKEASEGKMKGILGYQDKDIVSSDFISDRHSSIFDEKAGIALTDDFVKLVSWYDNECGYSNRVLDLIKHMDVSK

SEQ ID NO: 30689 - protein, 313 aa, Cotoneaster apiculatus
GGLGDVLGGLPPAMAANGHRVMTVSPRYDQYQDVWDTSVLVEIEVGGRVETVRFFHCYKRGVDRVFVDHPVFLEKVWGKTESKIYGPRTGEDYMDNQSRFSLLCLAALEAPRVLNLNSNEYFSGPYGDDVVFIANDWHTALLPCYLKTIYKPKGIYKNAKVAFCIHNIAYQGRFPFSDFSHLYLPDNLNGSFDFIDGYDKPVEGKKINWMKAGILESHRVVTVSPYYAQELVSGEDKGVELDNIIRKTGITGIVNGMDVQEWNPATDKFLEIKYDNTTVLDAKPLLKEALQAEFGLPVDRNIPVFGFIGRLEE

SEQ ID NO: 30690 - protein, 265 aa, Leptospira interrogans serovar Copenhageni str. Fiocruz L1-130
MDDRSKQLRKLIVEMMESEKRGHIGPALSLIEILRVLYDDILKYDSKKLNWENRDRLILSKGHGCLALYSILADKGFFPLDVLKTFGKPDSILGGHPERGKIPGVEASTGALGHGLSIGVGIAIAAKIKKKDHRVFVITGDGEINEGSVWEAALCASKHSLSNLAVIIDYNKLQSYGLTKDVLDLEPLMDKWKSFGFAIEEVDGHNIKELKSLFSKLPLNKTKPTAIIAHTIKGKGFAMAEGNPQWHHKNKITPEEFSVMYQSLN

SEQ ID NO: 30691 - protein, 379 aa, Phaeodactylum tricornutum
MKFSAATFAALVGSAAAYSSSSFTGSALKSSASNDASMSMATGMGVNGFGRIGRLVTRIMMEDDECDLVGINAGSATPDYMAYQYKYDTIHGKAKQTVEIDGDFLVLDGKKIITSRCRDPKEVGWGALGADYVCESTGVFLTKESAQSIIDGGAKKVIYSAPAKDDSLTIVMGVNQEAYDGSEDFISCASCTTNGLAPMVKAIHDEFVIEEALMTTVHAMTATQAVVDSSSRKDWRGGRAASGNIIPSSTGAAKAVTKVIPSLVGKITGMAFRVPTIDVSVVDLTAKLEKSTTYEEICAVIKAKSEGEMKGFLGYSDEPLVSTDFEGDLRSSIFDADAGIMLNPNFVKLIAWYDNEYGYSGRVVDLMKHVAAVDAKIKA

SEQ ID NO: 30692 - protein, 320 aa, Synechococcus elongatus PCC 7942
MAKTETPTSDLVRTYLREIGRVPLLTHEEEVVLGKRVQQWMKLQELRQTLQSEEGDRDPSDLEWAAAAGLSIEELRQQQHLGEQAKRKMIEANLRLVVSVAKKYLKRNMDLLDLIQEGTIGMQRGVEKFDPTKGYRFSTYAYWWIRQAITRAIAEKARTIRLPIHITEKLNKIKKMQRQLSQQLGRTATLPELAAALDLTPAQVRDYLEKARHPLSLDLRVGDNQDTELGDLLETDCTTPEEFTLQASMRRDIDRLLDQLTEQQRQVIALRYGLEDGQVMTLASIGDRLQISRERVRQLEREALHTLRQARSQVQEYLAS

SEQ ID NO: 30693 - protein, 337 aa, Yersinia aldovae
MTILVTGGAGYIGSHTVLTLLEQADDDVVVLDNLSNASAESLLRVSTLTGRNAIFYQGDVLDRGCLKRVFSDHKIDSVIHFAGLKSVGESVVKPIEYYQNNVIGSIVLLEEMVAAGVTKLIFSSSATVYGDPEFIPLTEDARTGGTTNPYGSSKVMVEQILKDFSVAHPDFSITALRYFNPVGAHPSGLIGEDPNGIPNNLLPFITQVAIGKLPKLAVYGNDYPTVDGSGVRDYIHVMDLAEGHLCALNKLTKGFKVYNLGSGTGYSVLQMITEFERISGKKVPYHIVARRSGDIAECWASAELALKELDWKAKRSLTDMLTDAWNWQQSNPNGYVR

SEQ ID NO: 30694 - protein, 296 aa, Triticum aestivum
  misc_feature (25)..(25): Xaa can be any naturally occurring amino acid
  misc_feature (86)..(86): Xaa can be any naturally occurring amino acid
  misc_feature (123)..(123): Xaa can be any naturally occurring amino acid
  misc_feature (147)..(147): Xaa can be any naturally occurring amino acid
  misc_feature (160)..(160): Xaa can be any naturally occurring amino acid
  misc_feature (174)..(174): Xaa can be any naturally occurring amino acid
  misc_feature (179)..(180): Xaa can be any naturally occurring amino acid
  misc_feature (196)..(196): Xaa can be any naturally occurring amino acid
  misc_feature (254)..(254): Xaa can be any naturally occurring amino acid
  misc_feature (267)..(267): Xaa can be any naturally occurring amino acid
  misc_feature (275)..(275): Xaa can be any naturally occurring amino acid
  unsure (1)..(296): unsure at all Xaa locations
MGNASARAVENGHAAAPMEQVAVAXSAGAPRRPRRRPDAVMRELPPPVPYVFAPQVPVAPMQIPNEFSPAFNHSWMNGSDESTNNXPREVEIPTLITWSQGGNEVFVEGSWDNWTSRKVLEKXSGKDHAVLLVLPSGIYHYKDDCLXGAKYFPELTQSTXDKKGKVATPFKSNXIPKIXXKTWREFDAPPSPEHSXYNMDFPTDEELTKQDPPALPPQLLMTALGGTDHFDEHALKPKPQHVVLNHLFIREVGXRASLLALGVIHRXQSKYVNFXVYKPLVRKVTDLLMEDGQAAD

SEQ ID NO: 30695 - protein, 177 aa, Plantago major
MASSMLSTSSTAVAGRAQATMVAPYAGLKSTSVFPATRKTGNAKLARNAGKVRCMQVWPPLGKKKYETLSYLPDLTVEQLAKEIDYLLRSKWIPCLEFELEHGFVYRENNRSPGYYDGRYWTMWKLPMFGCTDASQVIAELEECKKEYPNAWVRIIGFDNVRQVQCISFIAAKPPGL

SEQ ID NO: 30696 - protein, 357 aa, Arabidopsis thaliana
MACMKKALPFILMVLLQIGYAGMDILTKDVLNKGMSIYVLSVYRHGVATVVMAPFAFYFDKIVRPKMTALIFFKIAILGLLDPVIAQNLFNLGMKYTTATFAIALYNTLPAVTFILALIFRLESVKFQSIRSAAKVVGTVTTVGGIMVMTLVKGPALDLFWTKGPSAQNTVGTDIHSSIKGAVLVTIGCFSYACFMILQAITLKTYPAELSLATWICLIGTIEGVVVALVMEKGNPSVWAIGWDTKLLTITYSGIVCSALGYYIGGVVMKTRGPVFVTAFKPLCMIVVAIMSSIIFDEQMYLGRALGATVICVGLYLVIWGKAKDYEYPSTPQIDDDLAQATTSKQKEQRRTVIESV

SEQ ID NO: 30697 - protein, 81 aa, Oryza sativa; identical to SEQ ID NO: 1307

SEQ ID NO: 30698 - protein, 499 aa, Dechloromonas aromatica RCB
MKRLLALLALVGAVGFGAPAWAEEKAAAPEAVAATAPAAAPAAAAPAAAPAAAAPAAAPAAAPIPPNKGDNAWVMISAALVILMSIPGLALFYGGLVRTKNMLSVLMQVFVTFSLISVLWVVYGYSAAFTEGNEFFGVLDKLFLKGVTVDSVAATFSKGVNISEFAYVIFQGAFAAITCGLIVGAFAERAKFAAILVFMVIWFTLSYIPMAHMVWYWAGPDAYIDAAAGELAGKTAGFLFQKGALDFAGGTVVHINAAIAGLVGAYMVGKRSGLGNVSMAPHSLTLTMIGASLLWFGWFGFNAGSALEASGGAALAMVNTWVATACAALSWMFAEWILKGKPSMLGAASGAVAGLVAITPAAGFVGVMGSIIIGLLAGVVCLWGVNGLKKLLGADDSLDVFGVHGVGGILGAMLTGVFADPALGGTGVYDYVANAVGPYDMTAQLISQAWGVGTVIVWSGVVSIVAYKLVDIVIGLRVPEEEEREGLDLTSHGETAYHH

SEQ ID NO: 30699 - protein, 595 aa, Solibacter usitatus Ellin6076
MPPGLTIRRLLRPHAKSLAVGIAAVVVEGMATLAEPWPLKVVLDNVLKSKGGHGWLNQLIFNAAGTDKLAILKFAALAVLVIAAVGALTSYTEKYITTNLGQWVMHDLRRTLYSHLQRLSLGFHNKKQTGDLISRLTSDIDAIQGFVTSGLLGVLINSLTLVGMVVIMFCLNWRFTLIALSVAPLLFAVVFHYTRRIKKATREVRKKEGEMVSVIQEVLSSMRVVKAFGREDFEQERMAEESRESVEIAMRVRGLKVKLAPMVDVIIAVGTCLVLWFGGRMALTGALSAGSLVLFVWYLGRMYKPMRELSKMTDAYSKAAVGYERIREVLDTDRAVDDLPGARRAPAFRGRIELSDVSFGYEPNYPVLKRVSMMVEPGQVAALVGPTGAGKTTIINLIPRFYDPDAGTVKIDGTDVKLFQQESLRQQISFVLQETLLFHGPVWYNIAYGKPGASHAEIEHAAELANAHEFIERMPQGYDTIIGERGVTLSGGQRQRIAIARAVIRQSPILILDEATTGLDAASEKLVFEALDRLMEGKTSIVIAHRLPTVRSADQIFVIDRGEIVERGNHAELLRKAGLYSALHELQFQGEEPAA

SEQ ID NO: 30700 - protein, 447 aa, Bacillus subtilis subsp. subtilis str. 168
MKNDNQTLKRTMTSRHIMMMALGGAIGAGLFKGSSSAIDVAGPSVIIAYLLGGIILLFIMQGLAEMAVRNRNARTFRDLVQQVLGNYAAYFLDWIYWKMWVLNIAAEAVVAAIFIQYWLPGCPIWVLALGISLIVTIVNLLSVKIFAETEYWLAMIKITVIIIFIILGLLLLFVSFGDHTASGFSNLTDHGGFFPHGGTGLITAMLVVIYSYGGTEIIGVTLAETKNPEKVVPKAVRSTLTRIVAFYLLPFFIIVSLIPWNQVNSVPESPFVMVFKMVGIPGADHIMNAVILLAIISSMNSGLYGSSRILYTQASDGRLPKVFSKLSSKNVPMFAILMCTSSLYIGVLISLFAGSQTFNYLMGSLGYTVLFIWLIIGFAHLKSRKQQTETPAYYVKWFPYTTWFAIVALLAILIGVIMTTSIVITGITAAIYLLITVAYLVKGRKHQ

SEQ ID NO: 30701 - protein, 554 aa, Zea mays
RSAHTHNQISPKSTRRHLRFKMQIFVKTLTGKTITLEVESSDTIDNVKAKIQDKEGIPPDQQRLIFAGKQLEDGRTLADYNIQKESTLHLVLRLRGGMQIFVKTLTGKTITLEVESSDTIDNVKAKIQDKEGIPPDQQRLIFAGKQLEDGRTLADYNIQKESTLHLVLRLRGGMQIFVKTLTGKTITLEVESSDTIDNVKAKIQDKEGIPPDQQRLIFAGKQLEDGRTLADYNIQKESTLHLVLRLRGGMQIFVKTLTGKTITLEVESSDTIDNVKAKIQDKEGIPPDQQRLIFAGKQLEDGRTLADYNIQKESTLHLVLRLRGGMQIFVKTLTGKTITLEVESSDTIDNVKAKIQDKEGIPPDQQRLIFAGKQLEDGRTLADYNIQKESTLHLVLRLRGGMQIFVKTLTGKTITLEVESSDTIDNVKAKIQDKEGIPPDQQRLIFAGKQLEDGRTLADYNIQKESTLHLVLRLRGGMQIFVKTLTGKTITLEVESSDTIDNVKAKIQDKEGIPPDQQRLIFAGKQLEDGRTLADYNIQKESTLHLVLRLRGGQ

SEQ ID NO: 30702 - protein, 394 aa, uncultured archaeon GZfos12E1
MNEKLFANRMGTTHKSFIREILKVTENPKIISFAGGLPNPKFFPVKEIANASLKVLEENGENVLQYSTTEGYLPLREYIAERYRKKNGLKVDPDEILITNGSQQGLDLIGKIFLDKGDQIVIERPGYLGAIQAFSMYEPIFQSIPLLDDGIDTELLEKTFMGNRIKLFYAVPNFQNPSGITYSRQRRRDVANILKEHDAIFVEDDPYGELRFIGEDLPSIRAYLEDDTILLGSFSKIITPGLRLGWVCAKRDIMERIIVAKQASDLHSNYLSQRIVHQYLIENDIDKHILKIRGAYKKRRDLMVSMIAEYFPEEIKYTKPEGGMFLWITLPDGISSLDLFDLAIKENVAFVPGNPFYVDGGGNNTLRLNFSNSDEEKIEEGIKRLANIIKKSLV

SEQ ID NO: 30703 - protein, 292 aa, Iris hollandica
MRRARRHQQLDPTAVHGVTQFSDLTPGEFKRTYLGLRKGKKHLVGSAHEAPLLPTNDLPEDFDWRDKGAVTGVKNQGSCGSCWSFSTSGALEGANFLATGKLETLSEQQMVDCDHECDAEEPDDCDQGCNGGLMNTAFQYLQKVGGLESEKDYPYTGTDRGTCKFDESKIKASVHNFSVVSIDEEQIAANLVKHGPLAIAINAVFMQTYIGGVSCPYICGKHLDHGVLLVGYGSAGYAPIRLKEKPYWIIKNSWGETWGENGYYKICRGRNVCGVDSMVSTVTAIHTTAPKV

SEQ ID NO: 30704 - protein, 344 aa, Vibrio vulnificus YJ016
MTMKTLLPTSTAGSLPKPSWLAEPETLWSPWKLQGDELTDGKRDALRLSLHEQERAGVDIVSDGEQTRQHFVTTFIEHLSGVDFENRKTVTIRNRYEASVPTVVGPVSRTKPVFVDDAKYLRQQTKLPIKWALPGPMTMIDTLYDDYYGSREKLAWEFAKILNQEAKELEAAGVDIIQFDEPAFNVFFDDVNDWGIACLERAIEGLKCETAVHICYGYGIKANTDWKKTLGSEWRQYEEVFPKLQKSNIDIISLECHNSRVPIELLELIRGKKVMVGAIDVATNEIETPEEVANTLREALKYVDADKLYPCTNCGMAPLARDVSTAKLNALAAGAAIVRKELAK

SEQ ID NO: 30705 - protein, 461 aa, Desulfitobacterium hafniense DCB-2
MEQYQVGILGGGPGGYVCALRAAQLGLSVVLVEKERLGGTCLNKGCIPTKTLVKSAELWREIKHAEEFGIQLGGALLHYPQIAARKKEVVNTLVSGIEQLMKAKKITVLKGWGEVKEANRIEVTTETGKVELHVENLVLATGSIPTKIPVPGVDLPGVVTSEELLEQETLPDSLVVIGGGVIGLEFASIYHEFGVKVSVVEMLPSLLPNIDEEIPKRLAPLLKRSGLEILTKAFVREIKPKEEGLVVIVEDGKGLKELPAQQVLLATGRRPSLSGIHGDALGLELDRGAIKVNSQMQTSVPKVYALGDVVGGAMLAHVASMQGMVAAEHMAGQQVSMEGRAIPSAIFTYPEIAAVGETEQALKASGQNYKVSKFPFSANGKALALGEIMGLVKLLADEEGVVIGASIMGPQASSLIQECVLAVEKKIKAEDLAKIIHAHPTLPEAIMEAAHGISAKPLHLA

SEQ ID NO: 30706 - protein, 722 aa, Ashbya gossypii ATCC 10895
MTMYGWKLTNKLKFGRSKEEKDKDREKERDSRHNSGSKHGVFGHLSKRLSSTEEQVRCRTEEANTGAGTPRTSKDRKETIVATANSIAPVRLSTDVAAPGWPNEGVQSSVPSSFRDAGSETTDVGDEERAGTSSGSVVPEQANHSSASVSEERGEASMVNSTGIMTIKVYNGNSFKLPFALTSNPQILGKLLSSGVNAISRTGRSSVDELISSVEQVTLSEDEDKLLPGDAATNYIPATIKLPDSEDLNPLIYLTIEFDNTVATIEPECGNLKSPVFNKISTFDVTRKLPYLKVNVFVRIPSILLPSKAWQQVYAAQDPELQDLLKKVNSNMDVQLDSFQLPLNLQFNSATSIRLYNHQWLNMEKGLGRVNITIDYKPSKNKPLSIDDFDLLKVIGKGSFGKVMQVKKKDTNKIYALKAIRKSYIVSKSEVTHTLAERTVLARVDNPFIVPLKFSFQSPEKLYLVLAFINGGELFFHLQKEGRFDLSRARFYTAELLCALETLHSLNVIYRDLKPENILLDYQGHIALCDFGLCKLNMKDQDKTNTFCGTPEYLAPELLLGQGYSKVVDWWTLGVLLYEMLTGLPPYYDEDVPKMYKKILQEPLRFPDGFDREAKNLLIELLCRDPKRRLGYNGADEIKRHPFFSQLSWKRLWMKGYIPPYKPPVMSALDTSNFDQEFTREKPVDSVVNDFLSESVQQQFGGWTYVGSEQLGSSIIPGKNIR

SEQ ID NO: 30707 - protein, 189 aa, Glycine max
MAINHETWAFVFGLLGNVISFMVFLAPLPTFYQIYKKKSTEEFQSLPYVVALFSSMLWIYYALVKKDASLLLITINSFGCVIETIYLAIFLIYAPSKTRLWTIKLLLMLNVFGFGAMLLSTLYLTTGSKRLTVIGWICLVFNISVFAAPLCIIKRVIKTKSVEFMPFSLSFFMTINAGMWYFYGLLLKD

SEQ ID NO: 30708 - protein, 501 aa, Triticum aestivum
MARKMLKDGEAPAVADGGGGEGEGSYDYDLFVIGAGSGGVRGSRTAAGFGAKVAICELPFHPISSEWLGGHGGTCVIRGCVPKKILVYGASFRGEFDDAKQFGWEINGDINYNWKKLLENKTQEIVRLNGVYKRILGGSGVTMIEGAGSIVDAHTVEVTQPDGSKQRHTTKHILIATGSRATLVDIPGKELAITSDEALSLEELPKRAVILGGGYIAVEFASIWKGLGAEVDLFYRKELPLRGFDDEMRTVVASNLEGRGIRLHPGTNLTELSKTADGIKVVTDKGDELIADVVLFATGRAPNSNRLNLEAVGVEVDQIGAIKVDEYSRTSVPSIWAVGDVTNRINLTPVALMEATCFAKTVFGGQTVKPDYKDVPCAVFCIPPLSVVGLSEQEALAEAKNDLLVYTSSFNPMKNSISKRVEKSTMKLVVDAETDKVLGAAMCGPDAAEIMQGIAVALKAGATKATFDSTVGIHPSAAEEFVTMRTLTRRVSPPSKPKTNL

SEQ ID NO: 30709 - protein, 313 aa, Cotoneaster apiculatus
GGLGDVLGGLPPAMAANGHRVMTITPRYDQYKDAWDTEVTVELKVGDKTETVRFFHCYKRGVDRVFVDHPLFLEKVWGKTASKIYGPVAGVDFKDNQLRFSLLCQAALVAPRVLNLNSSKYFSGPYGEEVVFIANDWHTALLPCYLKAIYKPKGIYKTAKIAFCIYNIAYQGRFTFADFALLNLPNEFKSSFDFIDGYDKPVKGRKINWMKAGILESDEVLTVSPYYAEELVSSVEKGVELDNILRKTGIQGIVNGMDVQEWNPSTDKYTTVKYDASTVADAKPLLKEALQAEVGLPVDRDIPVIGFIGRLEE

SEQ ID NO: 30710 - protein, 212 aa, Aquifex aeolicus VF5
MAFICPEEIEAYAEEHSSELHPILEELVEFTYKNTDLPQMMVGRAEGNFLKMLVEISGAKRVLEIGTFTGFSALMMAQGLPEDGKLTTIEVNPEYAQMAKSFIERAPWGKKIEVIVGDARKVLEEFKKESFDFIFIDADKSSYPYYYEKCLELLKKGRLMAIDNALWEGKVLEPDDNRSKAIARMNEMIKEDPRVEKVLLTVRDGIFLVRKI

SEQ ID NO: 30711 - protein, 614 aa, Phaeodactylum tricornutum
MLASSRTAAASVQRMSSRAFHASSLTEARKFFVGGNWKCNGSVQQAADLVSMLNQSSLSQDTEVVICPSQVHLQSVQSTIRGDVAVGAQDVWTQGNGAFTGETSANMLKDLGVKWAVIGHSERRGKGEPDAQVAAKAKYALDQGLSVIACCGEPLEAREAGTTNEYVFPQIKAYVDALEPKDWDRVVIAYEPIWAIGTGLTATPEQAQDTHEAIRQYLGQVAGAEVAANTRILYGGSASAKTAPGLSAKPDIDGFLVGGASLKPEFADIVNCQGDTKSLKPVNIGINGFGRIGRLVMRAAQNDPMINIVAVNDPFIPTDYMEYMFQFDSTHGLYTGTVNMVDESNIAVDGKPIRVFNERDPSKIQWGSAGADYVVESTGVFTTTEKASAHMVGGAKKVVISAPSGDAPMFVMGVNQEKYESSMDVVSNASCTTNCLAPLAKVINDEFGLKEGLMTTVHAVTATQQTVDGPSQKDWRGGRAACYNIIPSSTGAAKAVGKVIPALNGKLTGMSFRVPTIDVSVVDLTCRLDKGAPYATICAAIKAASEGPMKGILGYQNKDVVSSDFISDSHSSIFDEKAGIALTDDFVKLVSWYDNEAGYSMRVLDLIKHMEKSK

SEQ ID NO: 30712 - protein, 499 aa, Trametes versicolor
AIGPAASLVVANAPVSPDGFLRDAIVVNGVFPSPLITGKKGDRFQLNVVDTLTNHTMLKSTSIHWHGFFQAGTNWADGPAFVNQCPIASGHSFLYDFHVPDQAGTFWYHSHLSTQYCDGLRGPFVVYDPKDPHASRYDVDNESTVITLTDWYHTAARLGPRFPLGADATLINGLGRSASTPTAALAVINVQHGKRYRFRLVSISCDPNYTFSIDGHNLTVIEVDGINSQPLLVDSIQIFAAQRYSFVLNANQTVGNYWIRANPNFGTVGFAGGINSAILRYQGAPVAEPTTTQTTSVIPLIETNLHPLARMPVPGSPTPGGVDKALNLAFNFNGTNFFINNASFTPPTVPVLLQILSGAQTAQDLLPAGSVYPLPAHSTIEITLPATALAPGAPHPFHLHGHAFAVVRSAGSTTYNYNDPIFRDVVSTGTPAAGDNVTIRFQTDNPGPWFLHCHIDFHLEAGFAIVFAEDVADVKAANPVPKAWSDLCPIYDGLSEANQ

SEQ ID NO: 30713 - protein, 81 aa, Streptomyces rimosus
MCGIAGWIDFERNLAQERATAWAMTDTMACRGPDDAGLWTGGHAALGHRRLAVIDPAHGRQPMHSTLPDGTSHVITFSGEI

SEQ ID NO: 30714 - protein, 313 aa, Cotoneaster apiculatus
GGLGDVLGGLPPAMAANGHRVMTVSPRYDQYKDAWDTGVPVEIEVGGRVETVRFFHCYKRGVDRVFVDHPSFLERVWGKTGSKIYGPSAGEDYNDNQFRFSLLCQAALEAPRVLNLNSNKYFSGPYGDEVVFIANDWHTALLPCYLKSIYKPKGIYENAKVVFCIHNIAYQGRFPISDFSVLNLPENLKGSFDFIDGYNKPVKGRKINGMKAGILESDRVVTVSPFYAQELVSGEDKGVELDNIIRKTGITGIVNGMDVQEWNPATDKYLDTKYDNTTVLDAKPLVKEALQAEVGLPVDRSIPVIGFIGRLEE

SEQ ID NO: 30715 - protein, 403 aa, Oryza sativa (japonica cultivar-group)
MAAMPGGPDLAGAGGAVAVAVDAMQVDDPPRASAEEKHGPTIMGGNDPVTGHIISTTIGGKNDEPKRTISYMAERVVGTGSFGVVFQAKCLETGETVAIKKVLQDKRYKNRELQIMRSMDHCNVISLKHCFFSTTSRDELFLNLVMEFVPESLYRVLKHYKDMKQRMPLIYVKLYMYQIFRGLAYIHTVPGVCHRDIKPQNILVDPLTHQVKVCDFGSAKMLIKGEANISYICSRYYRAPELIFGATEYTTSIDIWSAGCVLAELLLGQPLFPGESAVDQLVEIIKVLGTPTREEIRCMNPNYTEFKFPQIKACPWHKIFHKRMPPEAIDLVSRLLQYSPNLRCTALEACAHSFFDELREPHAKLPNGRPFPPLFNFKQELANTHPELVSRLLPEHAQRHSGF

SEQ ID NO: 30716 - protein, 168 aa, Ralstonia eutropha JMP134
MTTQSETAILAGGCFWGMQDLLRRYPGVLATRVGYSGGDVPNATYRNHGTHAEAIEIVFDPQQISYRQILEFFFQIHDPTTRNRQGNDIGTSYRSAIFYRDDAQKQVAEDTIADVNASGLWPGKVVTKLAPAGPFWEAEPEHQDYLERYPNGYTCHFIRPGWKLPQRG

SEQ ID NO: 30717 - protein, 510 aa, Ralstonia metallidurans CH34
MSNTNTTPAVPVPGLRRELRARHLTMIAIGGSIGTGLFVASGATIAQAGPGGALAAYILIGAMVYFLMTSLGELAAYMPVSGSFATYGALYVDEGFGFALGWNYWYNWAVTIAVELAAAQLVMQYWFPDTPGVLWSALFLGLMFALNAISVRGFGEAEYWCALIKVLTVIAFIVIGTLMIFGIMRGDFSHAGGLANLTTGDAPFVGGLPAMIGVAMIAGFSFQGTELIGVAAGESDEPAKNIPRAVRQVFWRILLFYVLAILIIGILIPYTDPSLLKTDVETVGVSPFTLVFRHAGLAFAAGVMNAVILTAVLSAGNSGMYASTRMLYNLATEGRAPRIFAQLTRNGVPLVALLATTAVGGLCFLTSLFESKSVYLWLLNLSGMTGFIAWLGIAVSHYRFRRGFMAQSLDLNRLPYRSPFFPYGPIFAFVLCMIVTLGQNYQAFSEGKIDWVAVTATYVGIPIFLLIWLGYRLVRKSRFVPYAEMKFPALPEIEKDDSPVTRPLAPASAE

SEQ ID NO: 30718 - protein, 328 aa, Vigna radiata
MSSSSINGWCLSSISPAKTSLKKATLRPSVFATLTTPSSPSSSSSFPSLIQDKPVFAAPSHIITPTVREDMAKDYEQAIEELQKLLREKTELKATAAEKVEQITASLGTSSSDSIPSSEASDRIKSGFLYFKKEKYDKNPALYGELAKGQSPKFMVFACSDSRVCPSHVLDFQPGEAFVVRNVANIVAPYDQSKYSGTGAAIEYAVLHLKVSNIVVIGHSACGGIKGLLSFPFDGTYSTDFIEEWVKIGLPAKAKVKTQHGDAPFAELCTHCEKEAVNVSLGNLLTYPFVRDGLVNKTLALKGGYYDFVKGTFELWSLNFGLASSFSV

SEQ ID NO: 30719 - protein, 1747 aa, Oryza sativa
MPPAPWPTPRTVRQAAELHAHLTTSGRLLHPPSAHHLLNSLVNCLPPSDPLHLRYALHLFDRMPASTFLFDTALRACFRAGTSSGDPDIPFVLFRRMRRAAVRPDGFTFHFLFKCSSSSRPRALLCTMLHAACLRTMLPSAAPFVANSLIHMYTELGLAGDVRRAFDEIPVKDAVSWTMVISGLAKMGMLSDARLLLAQAPVRDVISWTSLIAAYSRADRAKEAVDCFKNMLSEGIAPDDVTVIGVLSACSQLKDLELGCSLHLLVKEKGMSMSENLVVALIDMYAKCGDFGHAREVFDAVGRGRRPQSWNAIIDGYCKHGHVDVARSLFDQMEVRDIITFNSMITGYIHSGQLREALLLFMNMRRHDLRVDNFTVVSLLSACASLGALPQGRALHACIELRLVETDIYIGTALLDMYMKCGRVNEATIVFQRMGKRDVHAWTAMIAGLAFNGMGKAGLEYFYQMRCDGFQPNPVSYIAVLTACSHSCLLNEGRLYFDEMRILYNIHPQIEHYGCMIDLLGRSGLLDEAMDLVKTMPMQPNSVIWASILSACRVHKRIDLAQCAAEHLLKIEPDEDAVYVQLYNICIDSRKWEDASKIRMLMEERQVKKTAGYSSVTVAGQVHKFVVSDKSHPRILEIIAMLEEISHRLKSAGYSPITSQVTVDVDEEEKEQTLLAHSEKLAIAFGLVSLAPNLPVHIIKNLRPTIFRPLGADDGKQKQPDRRVVFLLPPSRRDAPVLVRPIPSSPAPFSLRSSVTMAVRDVASLNRMITGFIRDGLADRARAVYRWMVASGIRETPHTFSTILGVCSTYEALQLHGRVLALGLCCNPFVGSALVNHYMHVESPHAALSLFRELPLQNTAMCNVVLRGLGNLKLTEELICCFLDMRRQYLELNGLSYCYAMKGCYQNGEWLEQGRQLHGVVLKAGWIPSNIFLSNSLVDLYSAIGDSVDTVKALNDILSEDVISWNSILSMYADRGHMKEAVYYLKQMLWHGKMPSVRSFVSLLALSGKTGDWQLGVQIHGIVHKLGFSCSSVHVQTTLIDMYGKCCCFDHSLAIFNEIPSIALECCNSLITSSLGCNMFDAALEILHCMIVEGVTPDDVTFSATMKAISLSASPSLTSCQMLHSCLVKLGFEMDMAVCSSLITAYACAGQLSSSHLIFEGLLDPNVICFTAIISACARYGDGARAMELFDQMVSSGLKPDNVTFLCAIAGCDQAGMFEEGRLVIELMRASRELDPDERHFACMVNLLSRDGFVKEAMEMMEQSPLRHYTKAWSSLLQSCKAHGENVLGKRAANMLIDVGRKDPATTLQVSNFFNDIGDRETALRIKEMTNVKEVKKSGHSLIEMFVARRLFCCIWWWRLTTVLSTSTKSKTAECRPVDEVSTGVGWGCVKWGKVQEGIRAGGVEKAPATCQERTSTRTLVDSCWVLLLNSLVLGLFAEDTVPLKFDLRAYSDSAILGLQCMQAHKVQNLIHCCLQLYMDKKEVVDALSREAKIEPSVTQHVWQKLEENNREFFKAYYLRLMLKNQITAFNKLLEDQLRIINKEYHPGPSSMPLPNGSNSNLLKQNPCFLSESTPMPAMPDDVMCNGNSSGIVDRTQSSDQLIYAGKDIQGLHSSMDASNLLPVQNANSVLFGVENGTTIKTESGYSSNGNFGFCGNAFLESCQSIGDASGGSFSSSELNGQPLDDSILDIESSSFGFLSQLPRNFFSDLPEDFSQSTEILDNYGKSPFLPSEQNNFSDSTGGEHTG

SEQ ID NO: 30720 - protein, 313 aa, Cotoneaster apiculatus
GGLGDVLGGLPPAMAANGHRVMTISPRYDQYKDAWDTEVTVELEVGDKTETVRFFHCYKRGVDRVFVDHPLFLEKVWGETASKVYGPVAGVDFKDNQLRFSLLCQAALEAPRVLNLNSSKYFSGPYGEEVVFIANDWHTALLPCYLKAVYKPRGLYSTAKVAFCIHNIAYQGRFASADFALLNLPDEFKSSFDFIDGYEKPVKGRKINWMKAGILESDKVLTVSPYYAQELVSAVEKGVELDDIIRKTGIFGIVNGMDVQEWNPLTDKYTTIKFDASTVADAKPLLKETLQAEVGLPVDRDTPVIGFIGRVEE

SEQ ID NO: 30721 - protein, 398 aa, Ralstonia metallidurans CH34
MFEHIEAFPGDPILSLNEDFQQDPRTNKVNLSIGIYFDDEGRLPVMKAVAEAEAALLSDMGPRPYLPMSGMAAYRQAVQALVFGEDCAARAEGRVATLQTLGGSGALRVGADFLKRYFPKAEMWISDPSWENHRVVFERAGFKVNTYPYYDPATGGLKFDAMLAAIEAIPQGDIVLLHACCHNPTGVDLNQDQWRQVIGVLKARKLLPFVDMAYQGFGSGLDDDAFAVRELARQNVPCLVANSFSKNFSLYGERCGGLSVVCQSADEASRVLGQLTGAVRANYSNPPTHGARVVARVLTTPALRANWEQELAAMCQRITRMRQAIHDHLREHVSGEKLSRYITQRGMFTYTGLSADQVDRLKNEHGVYVLRSGRMCVAGLNERNVGVVANAIGQVLKA

SEQ ID NO: 30722 - protein, 462 aa, Ralstonia metallidurans CH34
MHAPDNQGTLKRGLKNRHIQLIALGGAIGTGLFLGIAQTIKLAGPSVLLGYALAGVVAFFIMRQLGEMVVDEPVAGSFSYFANKYCGHFAGFMSGWNYWVLYILVSMAELSAVGIYVQYWWPGIPTWISALAFFLIINAINLASVKSFGEMEFWFSIIKVAAIVGMIGFGGYLLATGTAGPDASIANLWQHGGFFPNGFSGLVMAMAVIMFSFGGLELVGITAAEADSPEKSIPKATNQVIYRILIFYVGALAVLLSLYPWEKVVTGGSPFVLIFHAMNSNVVATVLNIVVLTAALSVYNSGVYCNSRMLLGLAQQGNAPRSLMRVNRRGIPLTALAVSAIATGICVVINYFMPGEAFELLMGLVVSALIINWAMISIIHLMFRRAKAAAGKTTRFQSLGYPLTNYVTLAFLAGILVVMFLTPGLRISVYLIPVWLGVLGVSYRLRQKKAGSAMPAASAQIQ

SEQ ID NO: 30723 - protein, 313 aa, Crataegus rivularis
GGLGDVLGGLPPAMAANGHRVMTVSPRYDQYKDAWDTSVLVEIEVGGRVETVRIFHCYKRGVDRVFVDHPLFLEKVWGKTGSKIYGPRTGEDYMDNQFRFSLLCQAALEAPRVLNLNSNEYFSGPYGDDVVFIANDWHTALLPCYLKTIYKPKGIYKNAKVVFCIHNIAYQGRFPFSDFSLLDLPDNLKGSFDFIDGHDKPVKGRKINWMKAGIIESDRVVTVSPYYAQELVSGEDKGVELDNIIRKTGITGILNGMDVQEWNPATDEYLDIKYDNTTVLDAKPLLKEALQAEVGLPVDRNIPVFGFIGRLEE

SEQ ID NO: 30724 - protein, 450 aa, Crocosphaera watsonii WH 8501
MSYDFDLFVIGGGSGGIATARRAAEYGAKVGLAEYNRLGGTCVNVGCVPKKLMVYTSHFSAQFQESQGYGWSPVKSTLDWSKMITAVNEETQRLNGIYLRMLDNSKVKLYRDYAKLLDPHTIEVGNSKITADKILIAVGGHPVRPDIPGIENTIISDQMFTLAEQPKRMVIWGGGYIGVEFACIMRGLGSDVIQVIRRDKILRGFDEDIRSTIQESMENHGIKILKNCTITAIEKTSQGLKIAVQGDQNNEMVLVDTIGLAATGRKPSLDNLGIENTAVEVNNGAIAVDQYGCTAQDNIYAVGDCTDRINLTPVAINEGRAFADTHFGGKSRVMSYENVPSAVFSTPEAATVGLTEEEAKQQYGEDAIKVYRSKFRPMYYVLPGKEEKTLMKLIVHQESEKVLGAHMVGDYAAEIIQGVAIAVKMGAKKSDFDATVGIHPTSAEEFVTMR

SEQ ID NO: 30725 - protein, 380 aa, Eucalyptus globulus subsp. bicostata
EPTVIDEVRTGTYRQLFHPEQLISGKEDAANNFARGHYTIGKEIVDLCLDRIRKLADNFTGLQGFLVFNAVGGGTGSGLGSLLLERLSVDYGKKSKLGFTVYPSNQVSTSVVEPYNKVLSTHSLLEHTDVAVLSDNEAIYEICRRSLDIERPTYTNSNRLVSQVISSLTASLRFDGALNVDVTEFQTNLVPYPRIHFMLSSYAPVISAEKAYHEQLSVAETTNSAFEPSSLMAKCDPRHGKYMACCLMYRGDVVPKDVNAAVATIKTKRTIQFVDWCPTGFKCGINYQPPTVVPGGDLAKVQRAVCMISNSTRLAEVFSRIDHKFDLMYAKRAFVHWYVGEGMEEGEFSEAREDLAALEKDYEEVGAELAEGEDDEGDEY

SEQ ID NO: 30726 - protein, 313 aa, Crataegus rivularis
GGLGDVLGGLPPAMAANGHRVMTISPRYDQYKDAWDTRVTVELKVGDKTETVRFFHCYKRGVDRVFVDHPLFLEKVWGKTASKIYGPTAGVDFKDNQLRFSLLCQAALVAPRVLNLNSSEYFSGPYGEEVVFAANDWHTALLPCYLKAIYKPKGIYKTAKVAFCIHNIAYQGRFAFADFALLNLPNEFKSSFDFIDGYDKPAKGRKINWMKAGILESDKVLTVSPYYAKELVSSVEKGVELDNIIRKTGIQGIVNGMDVQEWNPLTDKYTTVKYDASTVVDAKPLLKEALQAEVGLPVDRDIPVIGFIGRLEE

SEQ ID NO: 30727 - protein, 133 aa, Gossypium hirsutum
MKRSLALQKGLPILGVFRSFAAVGVDPAVMGIGPAVAIPAAVKSAGLEIDDIDLFEINEAFASQFVYSCKKLGLDREKVNVNGGAIALGHPLGVTGARCVGTLLYEMKRRGKDCRFGVISMCIGTGMGGSSCF

SEQ ID NO: 30728 - protein, 438 aa, Arabidopsis thaliana
MATISNLANLPRATCVDSKSSSSSSVLPRSFVNFRALNAKLSSSQLSLRYNQRSIPSLSVRCSVSGGNGTAGKRTTLHDLYEKEGQSPWYDNLCRPVTDLLPLIARGVRGVTSNPAIFQKAISTSNAYNDQFRTLVESGKDIESAYWELVVKDIQDACKLFEPIYDQTEGADGYVSVEVSPRLADDTQGTVEAAKYLSKVVNRRNVYIKIPATAPCIPSIRDVIAAGISVNVTLIFSIARYEAVIDAYLDGLEASGLDDLSRVTSVASFFVSRVDTLMDKMLEQIGTPEALDLRGKAAVAQAALAYKLYQQKFSGPRWEALVKKGAKKQRLLWASTSVKNPAYSDTLYVAPLIGPDTVSTMPDQALEAFADHGIVKRTIDANVSEAEGIYSALEKLGIDWNKVGEQLEDEGVDSFKKSFESLLGTLQDKANTLKLASH

SEQ ID NO: 30729 - protein, 275 aa, Crocosphaera watsonii WH 8501
MVAATQSLQELCINSIRFLAVDAVEKAKSGHPGLPMGAAPMAYVLWDKFMRFNPKNPKWFNRDRFILSAGHGCMLQYALLYLTGYDSVTIEDIKQFRQWGSKTPGHPENFETEGVEVTTGPLGQGIANGVGLALAEAHLAATFNKPDATIVDHYTYVILGDGCNMEGVAGEACSIAGHWGLGKLIALYDDNHISIDGSTDVAFTEDVSKRFEAYGWHTIHVPNGNTDLDAIAKAIEEAKKVTDKPTMIKVTTTIGYGFSQQTRHRRCSRCCFGCR

SEQ ID NO: 30730 - protein, 709 aa, Pseudomonas aeruginosa UCBPP-PA14
MSEQNNEQRSQAAGTDTVDRGNSNAKLEQLEAYREDATGEALSTNTGTRIADNQNTLKAGERGPSLLEDFIMREKITHFDHERIPERVVHARGSAAHGYFEAYEDLSDLTKAGFLAEAGKRTPVFVRFSTVQGPRGSADTVRDVRGFAVKFYTDEGNFDLVGNNMPVFFIQDAIKFPDFVHAVKPEPHNEIPTGASAHDTFWDFVSLTPESAHMVMWLMSDRAIPIAYRNMQGFGVHTFRLVNAAGESVLVKFHWRPKSGTCSLVWDEAQKLAGKDPDFNRRTLWEDIEKGDYPEWELGLQVIPENQQDSFDFDLLDPTKLVPEELVPVRVVGRMVLNRNPDNFFAETEQVAFHVGHLVPGIDFTNDPLLQGRLFSYTDTQLLRLSGPNFNEIPINRPLCPFHNNQRDAPHRQTINRGRASYEPNSIDGGWPKETPPAARNGGFSSYHEPVSGSKLRKRADSFADHFSQAALFWHSMSEAEQAHIVAAYSFELSKVERQSIREREVNQILLNIDPQLAARVAANVGVQLAAPANPAPQPKPSPALSQMNLLSGDIRSRKVAILIADGVAESDVSDLRDALRQEGADAKLIAPSASPVQAENGAELNPEGTWDGLPSVAFDAVFVPGGAASSQAIGADGRGLHYLLEAYKHLKPVAFAGDAQALASQLSLPGDPGVLLGATATDVFPGLRQALMQHRIWQREAATKAIPA

SEQ ID NO: 30731 - protein, 418 aa, Escherichia coli
MRGSHHHHHHGSMKRVVITGLGIVSSIGNNQQEVLASLREGRSGITFSQELKDSGMRSHVWGNVKLDTTGLIDRKVVRFMSDASIYAFLSMEQAIADAGLSPEAYQNNPRVGLIAGSGGGSPRFQVFGADAMRGPRGLKAVGPYVVTKAMASGVSACLATPFKIHGVNYSISSACATSAHCIGNAVEQIQLGKQDIVFAGGGEELCWEMACEFDAMGALSTKYNDTPEKASRTYDAHRDGFVIAGGGGMVVVEELEHALARGAHIYAEIVGYGATSDGADMVAPSGEGAVRCMKMAMHGVDTPIDYLNSHGTSTPVGDVKELAAIREVFGDKSPAISATAAMTGHSLGAKGVQEAIYSLLMLEHGFIAPSINIEELDEQAAGLNIVTETTDRELTTVMSNSFGFGGTNATLVMRKLKD

SEQ ID NO: 30732 - protein, 411 aa, Synechococcus elongatus PCC 7942
MPGGVSSPVRAFKSVGGQPIVFDRVKDAYAWDVDGNRYIDYVGTWGPAICGHAHPEVIEALKVAMEKGTSFGAPCALENVLAEMVIDAVPSIEMVRFVNSGTEACMAVLRLMRAYTGRDKIIKFEGCYHGHADMFLVKAGSGVATLGLPDSPGVPKSTTANTLTAPYNDLEAVKALFAENPGEIAGVILEPIVGNSGFIVPDAGFLEGLREITLEHDALLVFDEVMTGFRIAYGGVQEKFGVTPDLTTLGKIIGGGLPVGAYGGKREIMQLVAPAGPMYQAGTLSGNPLAMTAGIKTLELLRQPGTYEYLDQITKRLSDGLLAIAQETGHAACGGQVSGMFGFFFTEGPVHNYEDAKKSDLQKFSRFHRGMLEQGIYLAPSQFEAGFTSLAHTEEDIDATLAAARTVMSAL

SEQ ID NO: 30733 - protein, 347 aa, Oryza sativa
MALDTLCSAGGDVLIYDTFNASAAAAAAVVPPASFLFGNNNAGGAAGTETRVQVAAGAVPEVDQLLKQAQQPGRRKRRRRARSCKSREDAESQRMTHIAVERNRRRQMNEYLAVLRSLMPESYVHRGDQASIVGGAIDFVKELEQLLQSLEAQKRTLLMQPPPPPQQQREPKCDAADSTSAADQETPAAAAAAAAADGPPFARFFTYPQYVWCHNPAQDGGGGGGAAAENRAGVADIEVSLVETHASIRVMAARRPGQLLKMVAGLQALRLTVLHLNVTALGSLALYSISVKVEEGCGMATVDDIAAAVHHVLCIIDAEAASQMLLAGEASGESGDLGVGGVGQKPV

SEQ ID NO: 30734 - protein, 1100 aa, Pseudomonas aeruginosa UCBPP-PA14
MARREKPVFLNDPQWYKDAVIYQVHVKSFYDANNDGIGDFAGLIEKLDYIADLGVNTLWLLPFYPSPRRDDGYDIAQYRGVHSDYGSLADARRFIAEAHRRGLRVITELVINHTSDQHPWFIRARHAKKGSRARDYYVWSDSDEKYQGTRIIFIDTEQSNWTWDPVAQQYYWHRFYSHQPDLNFDNPQVLREVLGVMRYWLDMGVDGLRLDAIPYLIERDGTSSENLPETHQVLKRIRAELDAHYPDRMLLAEANQWPEDTRPYFGGEDGGEGDECHMAFHFPLMPRMYMAIAQEDRYPITDILRQTPDIPANCQWAIFLRNHDELTLEMVTDDERDYLWNHYAADRRARLNLGIRRRLAPLVERDRRRIELLHSLLLSMPGTPTLYYGDEIGMGDNIYLGDRDGVRTPMQWSVDRNGGFSRADPAKLVLPPILDPLYGYQTINVEAQARDPHSLLNWMRRLLAVRSQQKAFGRGSLKMLAPSNRRILAYLREYAEGERQDSILCVANLSRAAQAVELDLASHAGKVPVEMIGGMSFPPIGELTYLLTLPPYGFYWFYLADATQMPSWHVAADERLPELPTLVVKQRLGELLQGASRNILEGETLPAYLPKRRWFAGEKGQPRLCYIVPLDEAEPRCALCEVEIDGLRYQLPLGFLDADQRGDSLPQLLALARLRRGRKVGLLTDAASLPLFARKVLAQLRAEAVIAHGDGEIQFIPAAGLAELDDIADEDVLPFSVEQSNSSIRFGERMVLKVLRKILPGLHPEIEVGGYLTRHGYPGIAPLLGEVRRVGADGEPHTLMILQGYLNNQGDAWNWTLDNLERAVRDEISAASEALEGQYDSLAELRGFAANLGARLGEMHSVLAGESDDPAFGSRESDEASVQAWALRIAEQLREAGKRLSEPPRPLQGEAAEQARRLLERLPALLERLPLLARQAAGGLLIRVHGDLHLGQVLMVQGDARFIDFEGEPARSLEERRQRHSPMKDVGGMLRSFDYAAAMVLRNAQSTDSSEQADSARRKVAMRYRSEARDAFLVGYRAAAAGLAHAWHGREGEGAALVLACLEKAAYELLYEADYRPDWLEVPLAGLAELTEHLLKGKNR

SEQ ID NO: 30735 - protein, 319 aa, Salmonella enterica subsp. enterica serovar Typhi Ty2
MKAMNKVWVIGDASVDLVPEKQNSYLKCPGGASANVGVCVARLGGECGFIGCLGDDDAGRFLRQVFQDNGVDVSSLRLDAALTSAVLIVNLTADGERSFTYLVHPGADTYVSPQDLPPFRQHEWFYFSSIGLTDSPAREACLEGARRMREAGGYVLFDVNLRSKMWRNTDEIPELIARSAALASICKVSADELCQLSGASHWQDARYYLRDLGCDTTIISLGADGALLITAEGEFHFPAPRVDVVDTTGAGDAFVGGLLFTLSRANCWDHALLAEAISNANACGAMAVTAKGAMTALPFPDQLNTFLSSHSLAQAMTVK

SEQ ID NO: 30736 - protein, 574 aa, Triticum aestivum
  misc_feature (95)..(95): Xaa can be any naturally occurring amino acid
  misc_feature (465)..(465): Xaa can be any naturally occurring amino acid
  misc_feature (476)..(476): Xaa can be any naturally occurring amino acid
  unsure (1)..(574): unsure at all Xaa locations
MASKAVAEIVDDKQCSKSAAESSEAAPSRRQSEELIGGASKSGPASPRAVPPGDVATSSGVKEQDKDCSSVDGSVKLDEDEDAEKSSLRGSVKDXSSVSAKYSDGASSLTKASGSTKVSGHADLVQSGKSSVYRASAGSDVSDDSTCSSICSSASKPHKSNDSRWEAIQVIRTKEGSLGLSHFRLLKRLGCGDIGSVYLSELSGTKCYFAMKIMDKASLAGRKKLLRAQTEREILQCLDHPFLPTLYTHFETDKFSCLVMEFCPGGDLHTLRQKQPGKYFPEQAAKFYVAEVLLALEYLHMLGIIYRDLKPENVLVREDGHIMLSDFDLSLRCDVSPTLLKSSNPGVDPNQKGNQAYCVQPVCIEPACIQPACVTTTTCFSPRFFSSKSKREKKEKKAKADMATQVRPLPELVAEPTDARSMSFVGTHEYLAPENHKGEGHGSAVDWWTFGIFLYELLFGKTPFXGSGNRPRYSMXVGQPLRFPESPVVGFAARDLIGGLLIKEPQHRLAYKRGATEIKHHPFFEGVTWALIRGATPPDIPKPVEIPRPGASTSQKATPSAEKGPDNYLEFDFF

SEQ ID NO: 30737 - protein, 697 aa, Ashbya gossypii ATCC 10895
MKSASVIVGEPAGPHETAPRRNSKCPDAVVERPLGFSCNTVYEFALEAMERGGRQRAMGWRETVEIHEDRKMVTKVVDGKETEVEKTWLYYEMGPYQYVTYDQLHVEMHDYGRGMVKMGLQPGGEDRLHIFGATSHRWMRTFLAAQSQAITVVTAYDTLGESGLIYSLQQTGSKAIFVDNNLLEKLVKPVQEIPDLKYVIHADPLDPEDKRYGGRMYSDAQKAIDRMKEVRPDIEVYSMDEVVELGSLCRDSIFVHRPRKKDLACIMYTSGSTGDPKGVSLTHANIVAGIGGVSVVINRAIVKPDDRVIAFLPLAHIFELVFELTCLYWGALIGYGSVKTLSEASVRNCKGDMKEFRPSVMVGVAAVWEGVRKAIVAQVTKLPPFKQKIFWAAYHTKLRMKKCHIPGGDLIGSMIFKKVRETTGGNLRYILNGGSPLSRDTQVFISNLICPVLIGYGLTETVANGCIVPPHHFKYGVVGDILGSLTVKLVDVEELGYLAKNNQGELWVKGPAVFKDYLQNEAETAAALEDGWFKTGDIAEWTKKGQLRLIDRKKNLVKTLNGEYIALEKLECIYRSNKYVANICVYADQTKVKPIAIVVPNVNAVTDLAISLGLIKDGCEVRDVYDSKKLKKVILDDMHKTAKGQGLGGIELILGFVIFDDEWTPQNGYVTSAQKLQRRKILSAVQSEVDALYAANS

SEQ ID NO: 30738 - protein, 248 aa, Anthurium andraeanum
MTAKAKRGAAVAAEARVAKKRVVKLNKGPWTAEEDQKLVEYVDAHGDRKWTSLPTKAGLNRCGKSCRLRWLNYLRPGIKRGNISEAEEDMIIRLHNLIGNRWSLIAGRLPGRTDNEIKNYWNTHLSKKPLTISDLNDKLNDDGGSRSDVDEPPSSGQSQGPLDSRRPAEPRISEASNEVAFNVDELVNLPAILDFDDLLDSGSCSDGIITSSQIFWTPNFSAHDQQDISDFDDLGMLMDIMDYVICPP

SEQ ID NO: 30739 - protein, 430 aa, Oryza sativa (japonica cultivar-group)
MAMSRAAAAAAGTPVARRRLMGAVAARSMASWFGHVEPAAKDPILGVTEAFLADPSPDKVNVGVGAYRDDSGKPVVLECVREAERRIAGSMNMEYLPMGGSIKMIEESLKLAYGENCEFIKDKRIAAVQALSGTGACRLFADFQKRFLPDSQIYIPTPTWANHHNIWRDAQVPQKTFTYYHPESRGLDFAGLMDDIKNAPDGSFFLLHACAHNPTGVDPSEEQWREISHQFKVKKHFPFFDMAYQGFASGDPERDAKAIRIFLEDGHQIGCAQSYAKNMGLYGQRAGCLSILCDDEMQAVAVKSQLQQIARPLYSNPPVHGALIVSTILGDPELKSLWLKEVKGMADRIIGMRTALKENLEKLGSPMSWEHITNQIGMFCYSGMTPEQVDRLTKEFHIYMTRNGRISMAGVTTGNVAYLANAIHEVTKTK

SEQ ID NO: 30740 - protein, 465 aa, Ehrlichia ruminantium str. Welgevonden
MQNYDIVVIGGGPGGYKCAIRSAQLGLKVACVDKNEILGGTCLRVGCIPSKALLHFSHEYYHIKNHLDEVGITCNSLSFNLDKIMSFKNKNITELSNGINYLFASNKIDRLCGVGKIRSINSNNFDITVTGNNGEEKITAKYVVIATGSEVASFPGIEIDEKNVVSSTAALSFKEVPKKLVVVGAGAIGLEMSSVWSRFGSEVTVVEFFDKIAPSMDIDISKALLASLKKQGINFKLSTKVTSIDKSSDNLTIHLESVKDGKSEIIEAEKVLISIGRMPYTDGLIDQNCIECDSRGFIKVNNKYETNIPGIFAIGDVIGGAMLAHKAEEEGIAVAELIAGNIPHVDYDIIPSVIYTHPAVASIGKTEESLKNINYAYNVGKSNFSANSRSKITNNGEGFVKVLTSKENNAILGVHIIGAYADTIINEAAIAMAYRASSEDVFRISHSHPDVNEAFKDACEAAYLK

SEQ ID NO: 30741 - protein, 385 aa, Arabidopsis thaliana
MKKMYNLPRDLPEEVLCRIPLTSLRPVRSTCKKWSTLSKCGSFAKKHLAQAKVLADAKEFMVVLMMNFRVYLMRVNLQNNVVESSSSSSSSSSSCIKREAKLISLGDEEADISQVFHCDGLLLCISITESKTRLVVWNPYWGHTRLFEPTHQFNKFDSYSYALGYDKSRKSHKILRGITCLDPFKIYDFNSDLWRDLDVTPEWHLWQMLHGVSLKGNAYWFARENYTETMDTDHFFLLCFDFTSETFGPPLPLPFEFAVSEDTMSVSSVREEQLVVLYQPWDYLQLDIWVTSKIEPNAVSWNSKVFLSVSLKQLVSPQFQLTFGSFFIDEEKKVAVVFDKDYDNKRNIAYIFGVDGSFKAVDLGDSDRKCFPLVCSYVPSLVQLN

SEQ ID NO: 30742 - protein, 701 aa, Ashbya gossypii ATCC 10895
MATVGASAEQLLQDINCEGYLGAFRKYEISSVDQLQHLDHEILEQVGIRSIGDRIRILNKSRTLQAGRDKGLLEELQQVIGKINALSAGPMAISEELVTDRHSVIFILNDGSAKKVNVNGCFNADSIKKKLIKRLPPEFVAVAQNGEETSSQDYDVFVVDYAKNVLHLLYDVELVTICHSSDRVEKNRLIFVSKDQTPSDKAILTSKKLYLKTMSAIHQLGSLPTMLQTQGATTVGNYATPGAEAPAGDEDSLRIDNSKESLRRIFNQRPPSELISTNLPEYFPHTDFKRLQKTLRSSFRQSVRMSMLRPGAPLPEGNNVGNILVNQNQAVDRALLQSLDGTKTSSRSSGRSSVDGDASSMGSERRTNASKSTTLDGRDSDAGGRIELLNSESESECDDDNIVSLPTKVVTPKSWLKGARIGSGSFGSVYLGMNAHTGELMAVKQVELEPTTVMASSDDKKSHPSSNAVVKKLTDPPQDGGRASSTKMNLLKELHHENIVTYYGSSQEGGNLNIFLEYVPGGSVSSMLNSYGPFEEPLVKNFTRQTLVGLTYLHRKNIIHRDIKGANLLIDIKGSVKITDFGISKKLSPLNKKQNKRASLQGSVYWMAPEVVKQVVTTEKADIWSVGCVVVEMFTGKHPFPDFSQMQAIFKIGTNTIPELPSWASDGAKAFLYQTFELDYKKRPSSVELLQHKWLDTTTML

SEQ ID NO: 30743 - protein, 72 aa, Populus x canadensis
MSLLNDLININLSDTTEKIIAEYIWIGGSGMDLRSKARTLPGPVTDPAKLPKWNYDGSSTGQAPGEDSEVIL

SEQ ID NO: 30744 - protein, 313 aa, Cydonia oblonga
GGLGDVLGGLPPAMAANGHRVMTVSPRYDQYKDAWDTSVLVEIEVGGRVETVRFFHCYKRGVDRVFVDHPLFLEKVWGKTESKIYGPRTGVDYMDSQFRFSLLCQAALEAPRVLSLNSNKYFSGPYGDDVVFIANDWHTALLPCYLKTIYKPKGIYKNAKVVFCIHNIAYQGRFPFSDFSLLDLPDNLKGSFDFIDGHDKPVKGRKINWMKAGILESDRVVTVSPYYAQELVSGEDKGVELDNTIRKTGITGIVNGMDVQEWNPAADKYLDIKYDNTTVQDAKPLLKEALQAEVGLPVDRNIPVFGFIGRLEE

SEQ ID NO: 30745 - protein, 510 aa, Oryza sativa
MDPSSAGAGGNSLASASCGDAQKRRVCYFYDPEVGNYYYGQGHPMKPHRVRMTHALLAHYGLLAPAKMEVLRPLPARGIDLCRFHSDDYVAFLRAVTPETQLGQVRALRRFNIGPDCPVFDGLYAYCQTYAGASVGAAVKLNHGTHDIAINWSGGLHHAKKSEASGFCYVNDIVLAILELLKLHERVLYIDIDIHHGDGVEEAFYTTNRVMTVSFHKFGDYFPGTGDIRDIGYSEGKYYCLNVPLDDGIDDDSYQSIFKPIISKVMEMYRPGAVVLQCGADSLSGDRLGCFNLSGKGHAECVKFMRSFNVPLLLLGGGGYTIRNVARCWCYETGVALGEELQEKLPYNEYYEYFGPEYSLYVAASNMENRNTNKQLEEIKCNILDNLSKLQHAPSVQFQERIPETKLPEPDEDQEDPDERHDPDSDMVLDDHKPTGHSARSLIHNIGVKREITETETKDQHGKRLTTEHKGPEPMAEDLGSSKQAPEFTIVSFVEEVHNVQAILDVEALV

SEQ ID NO: 30746 - protein, 60 aa, Populus x canadensis
FINDIFEKLAQESSRLARYNKKPTITSREIQTAVRLVLPGELAKHAVSEGTKAVTKFTGS

SEQ ID NO: 30747 - protein, 313 aa, Cydonia oblonga
GGLGDVLGGLPPAMAANGHRVMTISPRYDQYKDAWDTEVTVELKVGDKTETVRFFHCYKRGVDRVFVDHPLFLEKVWGKTASKIYGPTAGVDFKDNQLRFSLLCQAALVAPRVLNLNSSKYFSGPYGEEVVFIANDWHTALLPCYLKAIYKPKGIYKTAKVAFCIHNIAYQGRFAFADFALLNLPNEFKSSFDFIDGYDKPVKGRKINWMKAGILESDKVLTVSPYYAEELVSSVEKGVELDNILRKTGIQGIVNGMDVQEWNPLTDKYTTVKYDASTVADAKPLLKEALQAEVGLPVDRDIPVIGFIGRLEE

SEQ ID NO: 30748 - protein, 302 aa, Xanthomonas campestris pv. campestris str. 8004
MLVFTHPACLGHDAGPEHPESPARLTAVVEALRAAFTDLDWREAPLAKLGDLCRVHEREQVDAVLETNFQGYHQLDVDTLMSPGSRAAALRAAGAGIAAVDAVMQDGAGTAFCAVRPPGHHATGQVSMGFCLFNNIAVAAAHARDRHGLERITVVDFDVHHGNGTQAIFERDPTVQYLSTHQSGLYPHSGSVHERGIGNIHNLLLPPGSDGLRFRNVWEDEMLPLIDAFRPQLVLISAGFDAHLRDPLADLMLDADDFAWLTGALRALATRHARGRVVSMLEGGYDLQALRESSVAHVGALR

SEQ ID NO: 30749 - protein, 313 aa, Dichotomanthes tristaniicarpa
GGLGDVLGGLPPAMAANGHRVMTISPRYDQYKDAWDTEVKVELKVGDKTEAVRFFHCYKRGVDRVFVDHPLFLEKVWGKTASKIYGPTAGVDFKDNQLRFSLLCQAALVAPRVLNLNSSKYFSGPYGEEVVFIANDWHTALLPCYLKAIYRPKGIYKTAKVAFCIHNIAYQGRFAFADFALLNLPNIFKSSFDFIDGYDKPVKGRKINWMKAGILESDKVLTVSPYYAEELVSSVEKGVELDNILRKTGIQGIVNGMDVQEWNPLTDKYTTVKYDASTVADAKPLLKEALQAEVGLPVDRGIPVIGFIGRLEE

SEQ ID NO: 30750 - protein, 130 aa, Leptospira interrogans serovar Copenhageni str. Fiocruz L1-130
MTNAVLNEKNHSVTSEETKKERVRILAPRVDIYSDEENIYLLADLPGVEEKDVQVQLEKDQLIISGKTSNKDIQGELRYSEFRTGEYKRTFTLTESVEEDRISAVYKNGVLNLTLPKRKPLTKKIEVRSE

SEQ ID NO: 30751 - protein, 243 aa, Oryza sativa (japonica cultivar-group)
MGQSKKKFRGVRQRHWGSWVSEIRHPLLKRRVWLGTFETAEEAARAYDEAAILMSGRNAKTNFPVARNATGELTPAAAVAGRDGRVGGGSGSSSSMTANGGGNSLSQILSAKLRKCCKTPSPSLTCLRLDPEKSHIGVWQKRAGARADSSWVMTVELNKDTAVSSAATVAAATAVSSSDQPTPSDSTVTTTSTSTTGSPSPPPPAMDDEERIALQMIEELLGRSGPGSPSHGLLHGGEGSLVI

SEQ ID NO: 30752 - protein, 276 aa, Listeria monocytogenes EGD-e
MKKITPKAMCAWIPKREDETHKGDYGRVLIVAGNKQFGGAAIMAAEACVKSGAGLTTVASDSVNRPALQTRIPECMFIDYENITSLSEQISQFDTILIGPGLGLDAYAEEIFRLVLQKSTEHQQVIIDGDGITIYAKGENPHPAAKLTFTPHAGEWERLKVLAPDAVTPTDVALAIDATIVLKGHRTKVYSGESAWQNMYGTPAMATGGMGDTLAGTICGLMAQTEKPITGTLAAVFLHSYIGEILAKKRYVVLPTEIAEELPTYLKIFSETDEHA

SEQ ID NO: 30753 - protein, 313 aa, Dichotomanthes tristaniicarpa
GGLGDVLGGLPPAMAANGHRVMTLSPRYDQYKDAWDTGVPVEIEVGGRVETVRFFHCYKRGVDRVFVDHPSFLERVWGKTGSKIYGPSAGEDYKDNQFRFSLLCQAALEAPRVLNLNSNKYFSGPYGDDVLFIANDWHTALLPCYLKAIYKPKGIYENAKVVFCIHNIAYQGRFPISDFSVLDLPENLKGSFDFIDGYNKPVKGRKINWMKAGILESDRVVTVSPYYAQELVSGEDKGVELDNIIRKTGITGIVNGMDVQEWNPATDKYLDTKYDNTTVLDAKPLVKEALQAEVGLPVDRNIPVIGFIGRLEE

SEQ ID NO: 30754 - protein, 414 aa, Crocosphaera watsonii WH 8501
MGSPNKQDTAGVHGAALGADEVALTRKNLGWDYEPFDIPQDVLKAMNKAEQGASYEAEWNQAFAAYKAKYPTEAAEFERYLSGQLPDGWDKDLPTFTPDDDGQPTRKHSAAILNILAPVVPELIGGSADLTHSNLTELKVSGDFQKGAYANRNVHFGVREHGMGAICNGMSLHNSGLIPYGATFLIFTDYMRASIRLSALSQVGAIWVMTHDSIGQGEDGPTHQPVEVLASLRAIPDLTVFRPADGNECSGAYKVAVEKAKAHAPSLLAFTRQKVPNLPGTSMEGVAKGAYTIVDCDGTPDIILMGTGSEVSLCVAAAEKLTGEGKKVRVVSMPSWELFEAQDEAYKESVFPKAVTKRLSVEAGVSFGWSKYVGPEGYSVSIDTFGASAPGGTCMEKFGFSVDNVLAKAKAVLG

SEQ ID NO: 30755 - protein, 401 aa, Pseudomonas sp. Y2
MNEALIIDAVRTPIGRYAGALASVRADDLGAIPLKALIARHPQLDWSAVDDVIYGCANQAGEDNRNVARMAALLAGLPVSVPGTTLNRLCGSGLDAVGSAARALRCGEAGLMLAGGVESMSRAPFVMGKSEQAFGRSAEIFDTTIGWRFVNKLMQQGFGIDSMPETAENVAAQFNISRADQDAFALRSQHKAAAAIANGRLAKEIVAVEIAQRKGPAKIVEHDEHPRGDTTLEQLAKLGTPFRQGGSVTAGNASGVNDGACALLLASSEAAQRHGLKARARVVGMATAGVEPRIMGIGPVPATRKVLELTGLALADMDVIELNEAFAAQGLAVLRELGLADDDERVNPNGGAIALGHPLGMSGARLVTTALHELEERQGRYALCTMCIGVGQGIALIIERI

SEQ ID NO: 30756 - protein, 254 aa, Sinapis alba
MGRGRVQLKRIENKINRQVTFSKRRAGLLKKAHEISVLCDAEVALVVFSHKGKLFEYSTDSCMEKILERYERYSYAERQLIAPESDVNTNWSMEYNRLKAKIELLERNQRHYLGEDLQAMSSKELQNLEQQLDTALKHIRSRKNQLMHDSINELQRKEKAIQEQNSMLSKQIKEREKILRAQQEQWDQQNHGHNMPPPPPPQQIQHPYMLSHQPSPFLNMGGLYQEEDPMEMRRNDLDLSLEPVYNCNLGCFAA

SEQ ID NO: 30757 - protein, 313 aa, Dichotomanthes tristaniicarpa
GGLGDVLGGLPPALAANGHRVMTVSPRYDQYNDAWDTNVLVEIEIGGRVETVRFFHSYKRGVDRVFVDHPLFLEKVWGKTGSKIYGPRTGVDYMDNQFRFSLLCQAALEAPRVLNLNSNKYFSGPYGDDVVFIANDWHTALLPCYLKTIYKPKGIYKNAKVVFCIHNIAYQGRFPFSDFSLLDLPDNLKGSFDFIDGYDKPVKGRKINWMKAGILESDRLVTVSPYYAHELVSGEDKGVELDNIIRKTGITGIVNGMDVQEWNPATDKYLDIKYDNTTVLDAKPLLKEALQAEVGLPVDRNIPVFGFIGRLEE

SEQ ID NO: 30758 - protein, 575 aa, Saccharomyces cerevisiae
MITMINNKTFNRKTTGTLKKLVLSSDKSLRRSFNGASSTKDFVFSESSKVEEWWESARFKNISRPYSATDVVKHRGSLPANTSIYPSSYQARKLFNLLEENFKNGTPLHTLGVIDPVQMSQLARCRNIKVAYISGWACSSTLVGSTNEVSPDFGDYPYDTVPNQVERIFKAQQLHDRKAFLEASIKGSTPVDYLKPIIADADMGHGGPTTVMKVAKLFAEKGAAGIHLEDQMVGGKRCGHLSGAVLVPTATHLMRLISTRFQWDIMGTENLVIARTDSCNGKLLSSSSDPRDHEFIRGIIRDNVVPWSEKLIEMEDKKIPNSAIADMEKEWYHENELFTFEEALEKQFTASEFESYKEKKEDLMVNKLGRAYLSLREMKLLAQEVTPLKKIIFDWDAPRTKEGYYMFNGCIEAAIRRSLVFAPYSDMIWLETKTPDLEQARSFSRKIHKQLPATKLVYNLSPSFNWSAHGFDDKALKSFVWDLAKEGFTLQLVSLAGLHSDGVSFWELANSFQSDGMKAYVEKVQKREKETNCDIMTHQLWSGAEYVDSLMKVVQNGASSQTLSTSGESFTETQF

SEQ ID NO: 30759 - protein, 257 aa, Listeria monocytogenes EGD-e
MTKTLTNKLAEKEHAAVVTYIMGGDGGLDNLEEQLLFLEKSGVSAIEIGIPFSDPVADGPIIQLAGLRALKEQVSLEAILNKLAMSKVQIPLIIMSYINPIFHLGIPKFVELVQKTPVKGLIIPDLPYEHQKLITPELQGTDIALIPLVSLTSPKERLEEIAKQAEGFIYAVTVNGTTGVRSEFDAHIDSHLAYLKSISPVPVLAGFGVSSIEHVEKFAHVCDGVIIGSKVVQMLHEEKTAELGAFLQKAAEVRIKN

SEQ ID NO: 30760 - protein, 315 aa, Streptococcus pyogenes SSI-1
MIILFIILLPLHSSISLLKWYLLYFIIWRKPENMEMTWTVKYITEFIATAFLVILGNGAVANVDLKGTKGHNSGWLVIAFGYGLGVMMPALMFGNVSGNHINPAFTVGLAVSGLFPWAHVLQYVVAQLLGAIFGQLVVVMVYKPYFMKTENPNHVLGSFSTISSLDNGQKDSHKASYINGFLNEFVGSFVLFFGALALTKNYFGVELVGKLIEAGYDQTTAATQISPYVTGSLAVAHIGIGFLVMVLVTSLGGPTGPALNPARDFGPRLLHHFLPKSVLGQAKGDSKWWYAWVPVVAPILAAIVAVAAFKYLYIR

SEQ ID NO: 30761 - protein, 265 aa, Rhizobium sp. NGR234
MSCQTQLLSASEAALGEDFLSALSTDLDNWALFLDIDGTLLDLAETPDAVAVPPSLPASLDHLSKKLGGALALVTGRGLDYADQLFSPANFPIAGLHGAERRDPDGRVHKAAETADFERLKAELVAATASWAGVLIEDKGAAVAAHYRLAPDRQLELEQLMEWALYRAGPDWAIQHGKMVVEIRPARANKGDAVAAFLGQPPFAGRRAIAIGDDVTDEAMFRTVNRLGGLSIRIGPPVPASEALGSIPSAEALRGIIAALALLNI

SEQ ID NO: 30762 - protein, 146 aa, Salmonella enterica
IWGLGISLAVYLTAGISGGHLNPAVTIALWLFACFPKQKVLPYIIAQFAGAFGGALLAYVLYSSLFTEFETAHHMVRGSVESLQLASIFSTYPAAALNVWQAALVEVVITSILMGMIMALTDDGNGIPKGPLAPLLIGILVAVIGA

SEQ ID NO: 30763 - protein, 437 aa, Zea mays
MAGGIILLLLVIPLVVRIEGSVMGERSNSFSQDSNNSSPAENKLEPGVANTYAVNWNEPPDLQMQDSFERPELYRKQSVQGEKSFASEAYPVKWSISPSLGQQSQESFEPEAYPMKWKEPPPSSQQSQDSFEPEAYRVKWNKSPPPHQQSQDSLEPEAYRGEMEQITTTTPAIPRLLRARSISGEMEQITTTTPTIARLFRAGGILGGMEATCARKSLLPGTALPEGTRFSGHGFPDPQRFALRADADAIPFSYSQLDAILRMFRIPRGSKKAEQVADTLRACEAESSDAHACATSEQAAADFAASSLGVRASDLVSVVTAVHGGKDATRYVVAPDGVTRIGKAAGAATAVPCHPMPYPYMVHYCHRPTDVEALRVELTGLGDDGATIAIAMCHANTMSWDDRYFQMLNATRGEEICHFMPWNYVLWLPAADLLANN

SEQ ID NO: 30764 - protein, 464 aa, Rhizobium sp. NGR234
MSRLVIVSNRVPVPDKGGIAPAGGLAVALKVALEEQGGGIWMGWSGKSSGEDEPAPLAQLQQGNITYALTDLTDTDVEEYYHGFANRVLWPICHYRLDLAEYGRKEMAGYFRVNRFFAHRLAPLVKPDDVIWVHDYPLIPLAAELRQMGLENRIGFFLHIPWPPADVLFTMPVHEEIMRGLSHYDVVGFQTDHDLENFASCLRREGIGDALGGGRLSAYGRIFKGGVYAIGIETAAFAEFAKKASTNSTVKKARESIERRSLIIGVDRLDYSKGLTQRIEAFERFILANPAQRGRVTYLQITPKSRSEVPEYEAMQRTVAEQAGRVNGALGAVDWVPMRYINRSVGRRVLAGLYRLGKVGLVTPLRDGKNLVAKEYVAAQDPDDPGVLVLSRFAGAARELQGALLVNPYDIEGTANAMARSLSMPLEERQERWTTMMDQLLEHDVSRWCRDFLNDLTASSDRCG

SEQ ID NO: 30765 - protein, 473 aa, Brassica napus
MSATLTGSGTALGFSCSSKIPKRVSPSSSNRCSIKMSVSVDEKKKSFTLQKSEEAFNAAKDLMPGGVNSPVRAFKSVGGQPVLIDSVKGSKMWDIDGNEYIDYVGSWGPAIIGHADDEVLAALAETMKKGTSFGAPCLLENVLAEMVISAVPSIEMVRFVNSGTEACMGVLRLARAFTNKEKFIKFEGCYHGHANAFLVKAGSGVATLGLPDSPGVPKAATSDTLTAPYNDIEAVAKLFEAHKGEISAVILEPVVGNSGFITPTLEFINGLRQLSRDNGALLIFDEVMTGFRLAYGGAQEYFGITPDLTTLGKIIGGGLPVGAYGGRRDIMEMVAPAGPMYQAGTLSGNPLAMTAGIHTLKRLKQPGTYEYLDKITKELTNGILEAGKKTGHAMCGGYISGMFGFFFTEGPVYNFADAKKSDTEKFGRFFRGMLEEGVYFAPSQFEAGFTSLAHTTEDVQFTIAAAERVLGRI

SEQ ID NO: 30766 - protein, 243 aa, Solibacter usitatus Ellin6076
MSLTRRAMAELVGTFWLVFGGCGSAVLAAAFPILGIGFLGVSLAFGLTLLTMAYAIGHISGCHLNPAVSIGLAVARRFPAHELLHYIAAQVGGGILASAILYLIASGKPGFDLSGGFAANGYGLHSPGGYALLACLVAEMVLTFMFLMIILGATDERAPVGFAPIAIGFGLTLACLIGIPVTNLSVNPARSTGPALIVGGWALEQLWLFWVAPILGAVLAGVVYPALAHRGATETVRTPRLAA

SEQ ID NO: 30767 - protein, 215 aa, Debaryomyces hansenii CBS767
MSGRKKTLLKVIILGDSGVGKTSLMQQFVNNKFSHQYKATIGADFLTKEITIDNNKQVTLQIWDTAGQERFQSLGVAFYRGADCCVLCYDVTNEKSLNNLSSWKDEFLIQSNVSNPQDFPFIIIGNKIDVDDSKKIPSLQKKLNNITNNQLGGLNYPVFETSAKDSINVELAFEVVAKMALQQEELNDANGNDVSDDYNDAINIHLENDAGGCAC

SEQ ID NO: 30768 - protein, 82 aa, Brassica napus
  misc_feature (47)..(47): Xaa can be any naturally occurring amino acid
  unsure (1)..(82): unsure at all Xaa locations
EDGEGEGEGEEDNKEGGEQKMSHVTVERNRRKQMNEHLTVLLSFMPXFYFKRGDQALIIGGVVEYICELQQVLQSLEAKKQL

SEQ ID NO: 30769 - protein, 410 aa, Burkholderia sp. 383
MSRRRVVVTGLGLISPVGNNVADGWANLVAGKSGIATVTKFDPSNLAVHFAGEVKGFVPEEYIPAKEARNMDTFIHYGIAAGVQAIKDSGLEVNEANAERIGVLVGSGIGGLPMIEDTHQTYVDRGARRISPFFVPGSIINMISGHLSIMFGLKGPNLAAVTACTTGLHSIGLAARLIQAGDADVMVAGGAESTVSPLGIGGFAAARALSTRNDDPASASRPWDKDRDGFVLGEGAGVMVLEEYEAAKARGAKIYAEVSGFGMTGDAYHMTAPNMDGPRRCMVAALRDAGVNADEVQYLNAHGTSTPLGDKNESDAVKAAFGEHAYKIVVNSTKSMTGHLLGGAGGLESVFTVLALHNNVSPPTINIFNQDPECDLDYCANTARDMKIDVAVKNNFGFGGTNGTLVFKRV

SEQ ID NO: 30770 - protein, 394 aa, Bordetella pertussis Tohama I
MLDAVIVSTARTPIGKARRGALNLTHGADLGAHAIRHAVLRAGLEAGEVEDVILGCGYPEGGTGRNVARLSALRAGMPVTVSGMTVQRACSSGLQAIAIAAGRIRTEGVPAIVAGGVESVSLVLDHINRSSHRNEWLSAHLPGIDMTMIETADLVAQRYGISREAQDEYALRSQRLTAAAQEAGRFEHEIAPIRTTMRTIDPATGEAVLRQVECARDEGARPDTSLDNLARLAPVRGDGQFVTAGNASQLSDGAAACVLMSGREAARRGLEPLGVFRGFATVGCEPQEMGIGPVLAVPRLLERHGLTVDDIDLWELNEAFACQVLYCRDRLGIPDARLNVDGGAISIGHPFGMSGARMVGHALIEGRRRGARYVVVTMCVGGGMGAAGLLEVQQ

SEQ ID NO: 30771 - protein, 141 aa, Legionella pneumophila str. Lens
MAKELTLSIIKPDAVAKSVIGEIYTRFEKAGLDIVAAKMTQLSREQAESFYDIHRARPFFKDLVDFMISGPVMIQVLKGENAVAKNREIMGATNPKEAAPGTIRADFADSIDANAVHGSDSLENAAREIAFFFEPHELCNR

SEQ ID NO: 30772 - protein, 588 aa, Thermus sp.
MRKEAIHHRSTDNFAYAYDSETLHLRLQTKKNDVDHVELLFGDPYEWHDGAWQFQTMPMRKTGSDGLFDYWLAEVKPPYRRLRYGFVLRAGGEKLVYTEKGFYHEAPSDDTAYYFCFPFLHRVDLFQAPDWVKDTVWYQIFPERFANGNPAISPKGARPWGSEDPTPTSFFGGDLQGIIDHLDYLADLGITGIYLTPIFRAPSNHKYDTADYFEIDPHFGDKETLKTLVKRCHEKGIRVMLDAVFNHCGYEFAPFQDVLKNGAASRYKDWFHIREFPLQTEPRPNYDTFAFVPHMPKLNTAHPEVKRYLLDVATYWIREFDIDGWRLDVANEIDHQFWREFRQAVKALKPDVYILGLIWHDAMPWLRGDQFDAVMNYPLADAALRFFAKEDMSASEFADRLMHVLHSYPKQVNEAAFNLLGSHDTPRLLTVCGGDVRKVKLLFLFQLTFTGSPCIYYGDEIGMTGGNDPECRKCMVWDPEKQNKELYEHVKQLIALRKQYRALRRGDVAFLTADDEVNHLVYAKTDGNETVMIIINRSNEAAEIPMPIDARGKWLVNLLTGERFAAEAETLCVSLPPYGFVLYAVESW

SEQ ID NO: 30773 - protein, 371 aa, Oryza sativa (japonica cultivar-group)
MWAASPAFRRRLFLLRSLSPSPCAALPGNAACSSSPSPSTSIRVNAMSASGPVYEADAEAVVRRITPPLDRARHKGQAGKIAVIGGCREYTGAPYFAAISALKVGADLSHVFCTRDAATVIKSYSPELIVHPILEESYSVSDGERESVSSRILTEVAKWMERFDCIVVGPGLGRDSFLLDCVSNIMRHARQANIPTVVDGDGLFLITNNLSLVEGNLLAILTPNVYEYKRLVQKVLNCEVNEENASEQLTALCQKIGGITIMRKGKADIISDGKTVTQVSTFGSPRRCGGQGDILSGSVAVFASWARHFLLTNEYPTEKSVNPMMLGCIAGSLLLRKAASHAFEKNKRSTVTTDIIELLGKSLEDICPAGH

SEQ ID NO: 30774 - protein, 808 aa, Arabidopsis thaliana
MANAERMITRVHSQRERLNETLVSERNEVLALLSRVEAKGKGILQQNQIIAEFEALPEQTRKKLEGGPFFDLLKSTQEAIVLPPWVALAVRPRPGVWEYLRVNLHALVVEELQPAEFLHFKEELVDGVKNGNFTLELDFEPFNASIPRPTLHKYIGNGVDFLNRHLSAKLFHDKESLLPLLKFLRLHSHQGKNLMLSEKIQNLNTLQHTLRKAEEYLAELKSETLYEEFEAKFEEIGLERGWGDNAERVLDMIRLLLDLLEAPDPCTLETFLGRVPMVFNVVILSPHGYFAQDNVLGYPDTGGQVVYILDQVRALEIEMLQRIKQQGLNIKPRILILTRLLPDAVGTTCGERLERVYDSEYCDILRVPFRTEKGIVRKWISRFEVWPYLETYTEDAAVELSKELNGKPDLIIGNYSDGNLVASLLAHKLGVTQCTIAHALEKTKYPDSDIYWKKLDDKYHFSCQFTADIFAMNHTDFIITSTFQEIAGSKETVGQYESHTAFTLPGLYRVVHGIDVFDPKFNIVSPGADMSIYFPYTEEKRRLTKFHSEIEELLYSDVENKEHLCVLKDKKKPILFTMARLDRVKNLSGLVEWYGKNTRLRELANLVVVGGDRRKESKDNEEKAEMKKMYDLIEEYKLNGQFRWISSQMDRVRNGELYRYICDTKGAFVQPALYEAFGLTVVEAMTCGLPTFATCKGGPAEIIVHGKSGFHIDPYHGDQAADTLADFFTKCKEDPSHWDEISKGGLQRIEEKYTWQIYSQRLLTLTGVYGFWKHVSNLDRLEARRYLEMFYALKYRPLAQAVPLAQDD

SEQ ID NO: 30775 - protein, 432 aa, Corynebacterium glutamicum ATCC 13032
MSSTTLTDDQIRDNERTEVLAKATAAKNIVPDIAVLGTGPKNAILRAAADELVARSAEIIEANASDIEAGRANGMEESMIDRLALDESRIEGIAGGLRQVAGLTDPVGEVLRGHVMENGIQMKQVRVPLGVMGMVYEARPNVTVDAFGLALKSGNVALLRGSSTAVHSNTKLVEILQDVLERFELPRETVQLLPCQTRGSVQDLITARGLVDVVIPRGGAGLINAVVTGATVPTIETGTGNCHFYIDAEAKLDQAIAMVINGKTRRCSVCNATETALLDAALSDSDKLAVVQALQEAGVTIHGRVAELEAFGATDVVEATETDWDSEYLSFDIAVAVVDGVDGALAHIAKYSTKHTEAIATQNIETAQRFADRVDAAAVMINASTAYTDGEQYGMGAEIGISTQKLHARGPMALPELTSTKWILQGTGQIRP

SEQ ID NO: 30776 - protein, 346 aa, Oryza sativa
RQRRMSGRRRGRTKNGAAHFAVSPELIQSRNRIYLRGTVSKELLTHKQVVHLSHKIKDGIWLQQQRSKLKEKLGNEPSYKQLAHSLKISPPELRSRMHESFLAREMLTMSNLRLVISIAQKYDNLGVELADLIQGGLIGLLRGIEKFDASRGFRISTYVYWWIRQGVSRALAENSKTFRLPTYLHERLIAIRGAKYELEDQGIAPTIENIAGSLNISEKKVLNATEAVNKVLSLDQQAFPSLNGLPGETLHSYIEDQNVANDPWHGFEEWYLKEEVNKLLNSTLNERERDIIRLYHGIGKQCHTWEDISRQFGLSRERVRQVGLIAMEKLKHAARRKNLEALLEDY

SEQ ID NO: 30777 - protein, 659 aa, Corynebacterium glutamicum ATCC 13032
MDKFHIEDEGTTPNAVTTSTTTRVKHPVDQVPPAPKLAALGLQHVLAFYAGAVIVPLLIAQSLNLDTATTIHLINADLLTCGIATLIQSVGIGRHIGVRLPIVQGVTTTAVAPIIAIGLGVTDGQGGVASLPAIYGAVIVSGIFTFFAAPVFARFLKFFPPVVTGTVLLVMGASLLSVSANDFVNYADGVPAARDLAYGFGTLAVIILAQRFFRGFMGTLAVLIGLVGGTAVALILGDANLDEVGNAEAFDITTPFYFGVPEFNAVAIFSMIIVMIITMVETTGDVFATGEIVGKRTRRSDVTRALRADGLSTLMGGVMNSFPYTCFAQNVGLVRITGVKSRWVAAAAAGFMIILGVLPKAGAIVASIPSPVLGGASLALFANVAWVGIQTIAKSDLADSRNSVIVTSALGLAMLVSFRPDVAQAFPEWARIFVSSGMSVGAITAILLNLLFFHVGRQSGGQVATSKSGERINLDAVNKMDRTDFVETFAPLFNSKTWPLETAWESQPFANVTELREAIQVAVLTAPLSDREELIHDYPDMAQLILATEEEAATISQDRGSIGLDDLDDVDQEKLITVTEQYRERFNMPYVAYFDTMDSVDTVVAAGLRRLDNSDEQEHRQALSEIIEIANDRFDILLADANPARSAFDRKFTETDFLG

SEQ ID NO: 30778 - protein, 215 aa, Ashbya gossypii ATCC 10895
MSTNVTWHANINYDERVSLRNQKGCTVWLTGLSASGKSTIACTLEKLLLLEGISAYRLDGDNIRFGLNKDLGFTEEDRNENIRRIAEVAKLFADSCTVAIAAFISPYKADREKARELHKDAGLDFIEVFIDVPIEVAENRDPKELYKKARAGIIKDFTGISAPYEAPENPDIHLRTDKETVEQCADHILQFLKKLEILQSSSACSNHSNSVETAV

SEQ ID NO: 30779 - protein, 313 aa, Docyniopsis tschonoskii
GGLGDVLGGLPPAMAANGHRVMTISPRYDQYKDAWDTEVTVELKVGDKTETVRFFHCYKRGVDRVFVDHPLFLEKVWGKTASKIYGPTAGVDFKDNQLRFSLLCQAALVAPRVLNLNSSKYFSGPYGEEVVFIANDWHTALLPCYLKAIYKPKGIYKTAKVAFCIHNIAYQGRFAFADFALLNLPNEFKSSVDFIDGYDKPAKGRKINWMKAGILESDKVLTVSPYYAEELVSSVEKGVELDNIIRKTGIQGIVNGMDVQEWNPLTDKYTTVKYDASTVADAKPLLKEALQAEVGLPVDRDIPVIGFIGRLEE

SEQ ID NO: 30780 - protein, 279 aa, Zea mays
EIAFCAITADEQVKGYGTRLMNHLKQHARDADGLTHFLTYADNNAVGYFVKQGFTKEITLDKERWQGYIKDYDGGILMECKIDPKLPYVDVATMIRRQRQAIDEKIRELSNCHIVYSGIDFQKKEAGIPRRLIKPEDIPGLREAGWTPDQLGHSKSRSSFSPDYNTYRQQLTTLMQTALKNLNEHPDAWPFKEPVDSRDVPDYYDIIKDPIDLRTMLRRVDSEQYYVTLEMFVADMKRMFSNARTYNSPDTIYYKCATRLENFFSGRITVLLAQLSTKS

SEQ ID NO: 30781 - protein, 313 aa, Docyniopsis tschonoskii
GGLGDVLGGLPPAMAANGHRVMTISPRYDQYKDAWDTEVTVELKVGDKTETVRFFHCYKRGVDRVFVDHPLFLEKVRGKTASKVYGPVAGVDFKDNQLRFSLLCQAALEAPRVLNLNSSKYFSGPYGEEVVFIANDWHTALLPCYLKAVYKPRGIYSTAKVAFRIHNIAYQGRFAFADFGLLNLPDEFKSSFNFIDGYEKPVKGRKINWMKAGILESDKVLTVSPYYAEELVSAVEKGVELDNIIRKTGIFGIVNGMDVQEWNPLTDKYTTIKYDASTVADAKPLLKETLQAEVGLPVDRDIPVIGFIGRLEE

SEQ ID NO: 30782 - protein, 160 aa, ASPERGILLUS NIDULANS FGSC A4
MSKITVVFSTAGVRQNVEQLLNYSQNEKKRNFLETVELQIGLKNYDPQRDKRFSGTIKLPTVPRPGMTICVLGDQHDLDRAKHHGIDAMSADDLKKLNKNKKLIKKLARKYDAFLASDGLIKQIPRLLGPGLSKGSSTLLSPFPSQVKNPSYPKSSPSSQ

SEQ ID NO: 30783 - protein, 113 aa, Triticum aestivum
  misc_feature (98)..(98): Xaa can be any naturally occurring amino acid
  unsure (1)..(113): unsure at all Xaa locations
AARILQRDHGINVNLTLMFSQVQAIAAAEAGTFLISPFVGRILDWYKAKTGKTYSKEEDPGVELLRKYSDYYKKLGYKTIRHGCLIQEILGEITELAXGCDYLTSLPNLLEEF

SEQ ID NO: 30784 - protein, 313 aa, Eriobotrya japonica
GGLGDVLGGLPPAMAANGHRVMTVSPRYDQYKDAWDTSVLVEIEIGGRVETVRFFHCYKRGVDRVFVDHPLFLEKVWGKTGSKIYGPRTGVDYMDNQFRFRLLCQAALEAPRVLNLNSNKYFSGPYGDDVLFIANDWHTALLPCYLKTIYKPKGIYKNAKVAFCIHNIAYQGRFPFSDFSLLDLPDNFKGSFDFIDGYDKPIKGRKINWMKAGILESDRVVTVSPYYAKELVSGEDKGVELDNIIHRTGITGIVNGMDVQEWNPATDKYLDVKYDNTTVLDAKPLLKEALQAEVGLPVDRNIPVFGFIGRLEE

SEQ ID NO: 30785 - protein, 262 aa, Aquifex aeolicus VF5
MGRISDKFTELKEKREKALVSYLMVGYPDYETSLKAFKEVLKNGTDILEIGFPFSDPVADGPTIQVAHEVALKNGIRFEDVLELSETLRKEFPDIPFLLMTYYNPIFRIGLEKFCRLSREKGIDGFIVPDLPPEEAEELKAVMKKYVLSFVPLGAPTSTRKRIKLICEAADEMTYFVSVTGTTGAREKLPYERIKKKVEEYRELCDKPVVVGFGVSKKEHAREIGSFADGVVVGSALVKLAGQKKIEDLGNLVKELKEGLRE

SEQ ID NO: 30786 - protein, 773 aa, Arabidopsis thaliana
MVKEIASWLLILSMVVFVSPVLAINGGGYPRCNCEDEGNSFWSTENILETQRVSDFLIAVAYFSIPIELLYFVSCSNVPFKWVLFEFIAFIVLCGMTHLLHGWTYSAHPFRLMMAFTVFKMLTALVSCATAITLITLIPLLLKVKVREFMLKKKAHELGREVGLILIKKETGFHVRMLTQEIRKSLDRHTILYTTLVELSKTLGLQNCAVWMPNDGGTEMDLTHELRGRGGYGGCSVSMEDLDVVRIRESDEVNVLSVDSSIARASGGGGDVSEIGAVAAIRMPMLRVSDFNGELSYAILVCVLPGGTPRDWTYQEIEIVKVVADQVTVALDHAAVLEESQLMREKLAEQNRALQMAKRDALRASQARNAFQKTMSEGMRRPMHSILGLLSMIQDEKLSDEQKMIVDTMVKTGNVMSNLVGDSMDVPDGRFGTEMKPFSLHRTIHEAACMARCLCLCNGIRFLVDAEKSLPDNVVGDERRVFQVILHMVGSLVKPRKRQEGSSLMFKVLKERGSLDRSDHRWAAWRSPASSADGDVYIRFEMNVENDDSSSQSFASVSSRDQEVGDVRFSGGYGLGQDLSFGVCKKVVQLIHGNISVVPGSDGSPETMSLLLRFRRRPSISVHGSSESPAPDHHAHPHSNSLLRGLQVLLVDTNDSNRAVTRKLLEKLGCDVTAVSSGFDCLTAIAPGSSSPSTSFQVVVLDLQMAEMDGYEVAMRIRSRSWPLIVATTVSLDEEMWDKCAQIGINGVVRKPVVLRAMESELRRVLLQADQLL

SEQ ID NO: 30787 - protein, 164 aa, Plantago major
MATCGVPVSISGVKTSGNFSSVSVNVVKPTVMAIQRKANSRNFSVRAEYNDRSGSDSDFVAGFLLGGAIFGTLGYIFAPQIRRSLLDENEHGFRKARLPAYYDQGLAKNPVKAYYDEGLEKTRETLSEKISQLNSAIDNVSTRLRGGKKVPEVPVESNAEEMYL

SEQ ID NO: 30788 - protein, 313 aa, Eriobotrya japonica
GGLGDVLGGLPPAMAANGHRVMTISPRYDQYKDAWDTEVTVELKVGDKTETVRFFHCYKRGVDRVFVDHPLFLEKVWGKTASKIYGPTAGVDFKDNQLRFSLLCQAALVAPRVLNLNSSKYFSGPYGEEVVFVANDWHTALLPCYLKAIYKPEGIYKTARAAFCIHNIAYQGRFAFEDFALLNLPNEFKSSFDFIDGYDKPVKGRKINWMKAGILESDKVLTVSPYYAEELVSSAEKGVELDNIIRKTGIQGIVNGMDVQEWNPLTDKYTTVKYDASTVADAKPLLKEALQAEVGLPVDSDIPVIGFIGRLEE

SEQ ID NO: 30789 - protein, 181 aa, Triticum aestivum
MAHGKRSRQQAESTSVSLLDLDSGDMARILLLFSGHHQHHAHYGPSSPERVFECKTCSRRFPSFQALGGHRASHKKPRLADGAGAEPPKPKVHGCSICGLEFAVGQALGGHMRRHRAVAAAGPGVGLGLSLGLGLGPNEDGNKKAAAAAELALDLNEPALEEEPADRAMLGLAVGFRPRGG

SEQ ID NO: 30790 - protein, 458 aa, Triticum aestivum
MGIGDASPSENQSAHKEQRDETTPLLPVKAEEEDGIHEFNGASFSGAVFNLSTTIVGAGIMALPASIKMLGIIPGILMIILVALLTEASIDMMVRCSHQAKITSYGWLMGDSFGQWGRIALQASVVINNVGVMIVYMIIIGDVLSGTSTTGVHHRGIFEGWFGPHFWNSRPVVLLATTIFVFAPLVSFKRLDSLRYTSALSVALAVVFVVITAGIAILRLIEGTAEIPKLFPEIHELNSIWELFTAVPVLVTAYICHYNVHSIDNELEDRSQTKPIVRTSLALCSSVYVATSFFAYLLFGEGTLSDVLANFDSDLHIPFSSVFNDIVRVSYVVHVMLVFPIVFFALRLNLDGLLFPTSRHISHDNRRFIIITVSLLAVIYLAANFIPSIWDAFQFTGATAAVLIGFIFPAMIILRDSYGIATKRDKVLAVTMIVLAVLSNSVALYSDAMSIFYRKVEA

SEQ ID NO: 30791 - protein, 493 aa, Eremothecium gossypii
ITPEHVQSLNESPGLLALAMESHRDPITGESTLVGFPYVVPGGRFNELYGWDSYLMALGLLDCNKVDIARGMVEHFIFEIEHYGKILNANRSYYLCRSQPPFLTDMALKVFEKFGGDQNPTAVDFLKRAFIAAIKEYKSVWMAEPRYDKTTGLSCYHPDGIGFPPETEPDHFDAICRKFAEKHNVTIPEFRCMYDAGEVHEPELDEFFLHDRAVRESGHDTSYRLENVCAYLATIDLNSLLYKYEKDIAYVVSKYFDDSITDYAGETTTSSHWEALADIRKQRITKYLWDEETGFFYDYNVHIGKRTSYDSATTFWAMWAGLATQEQANAMVEKALPRLEMLGGLVACTEESRGEITMNRPSRQWDYPYGWAPHQMLAWTGLDNYGFTGVARRLAYRWLFLMTKAFVDYNGIVVEKYDVTRGTDPHRVDAEYGNQGADFKGVATEGFGWVNSSYILGLKFMNTYAKRALANCTVPDIFFKHMKPEEKARYALI

SEQ ID NO: 30792 - protein, 451 aa, Solanum tuberosum
MREILHIQGGQCGNQIGSKFWEVICDEHGVDPTGRYKGTAAESDLQLERINVYFNEASGGRYVPRAVLMDLEPGTMDSIRSGPYGQIFRPDNLVFGQSGAGNNWAKGHYTEGAELIDAVLDVVRKEAENCDCLQGFQVCHSLGGGTGSGMGTLLISKVREEYPDRMMLTFSVFPSPKVSDTVVEPYNATLSVHQLVENADECMVLDNEALYDICFRTLKLTTPSFGDLNHLISATMSGVTCCLRFPGQLNSDLRKLAVNLIPLPRLHFFMVGFAPLTSRGSQQYISLTVPELTQQMWDAKNMMCAADPRHGRYLTASAMFRGKMSTKEVDEQMINVQNKNSSYFVEWIPNNVKSSVCDIPPTGLKMASTFVGNSTSIQEMFRRVSEQFTAMFRRKAFLHWYTGEGMDEMEFTEAESNMNDPVAEYQQYQDATADDEEEYDDEAADDHQYES

SEQ ID NO: 30793 - protein, 195 aa, Plantago major
VTTIFYLLCGCMGYAAFGDQAPGNLLTGFGFFDPYWLLDIANIAIVVHLVGAYQVYCQPLFAFIEKWSVRKWSRSDFVTAEYDIPIPLCGVYQLNLFRLVWRTIYVVFTTLIAMLLPFFNDVVGILGALGFWPLTVYFPVEMYIAQNKVRKWTSQWIGLQLLSIACLLVSVAAAVGSIAGVILDLRTFKPFKTVY

SEQ ID NO: 30794 - protein, 329 aa, Oryza sativa
MADMSPRTDTSTDDTDDNHMLEPGQLALAAASDSDRSKDKHEDQKTLRRLAQNREAARKSRLRKKAYVQQLENSRLKLTQLEQELQRARQQGIFISSSVDQTHSMSGNGALAFDMEYARWLEEHNRQINELRSAVNAHAGDNELRGVVDKIMSHYEEIFKQKGNAAKADVFHVLSGMWKTPAERCFLWLGGFRPSELLKLLSTQLEPLTEQQLSGIANLQQSSQQAEDALSQGMEALQQSLAETLAGSLGSSGSTGNVANYMGQMAMAMGKLGTLENFLRQADNLRQQTLQQMQRILTTRQSARALLVISDYSSRLRALSSLWLARPKE

SEQ ID NO: 30795 - protein, 332 aa, Oryza sativa
MADTSPRTDTSTDPDTDERNQMFEQGQLAAPTASDSSDRSKDKLDHKTLRRLAQNREAARKSRLRKKAYIQNLESSRLKLTQIEQELQRARQQGIFISTSSDQSHSASGNGALAFDMEYARWLEEHNKHINELRAAVNAHAGDNDLKSTVDSIMAHYNEIFKLKGVAAKADVFHVLSGMWKTPAERCFMWLGGFRSSELLKLLAGQLEPLTEQQLAGIANLQQSSQQAEDALSQGMEALQQSLAETLASGSLGPAGSSGNVANYMGQMAMAMGKLGTLENFLRQADNLRLQTLQQMQRILTTRQSARALLAISDYFSRLRALSSLWLARPRE

SEQ ID NO: 30796 - protein, 420 aa, Thermus thermophilus HB27
MGPLLVWHRGDLRLHDHPALLEALARGPVVGLVVLDPNNLKTTPRRRAWFLENVRALREAYRARGGALWVLEGLPWEKVPEAARRLKAKAVYALTSYTPYGRYRDAKVQEALPVPLHLLPAPHLLPPDLPRAYRVYTPFARRFLGVEAPLPAPEALPKGPEEGEIPREDPGLPLPEPGEEAALAGLRAFLEAKLPAYAEERDRLDGEGGSRLSPYFALGVLSPRLAAWEAERRGGEGARKWVAELLWRDFSYHLLYHFPWMAERPLDPRFQALPWQEDEALFRAWYEGRTGVPLVDAAMRELHATGFLSNRARMNAAQFAVKHLLLPWKRCEEAFRHLLLDGDRAVNLQGWQWAGGLGVDAAPYFRVFNPVLQGERHDPEGRWLKRWAPEYPSYAPKDPVVDLEEARRRYLRLARDLARG

SEQ ID NO: 30797 - protein, 500 aa, Burkholderia sp. 383
MMKLTLRKWLAAAALSACLPLVPHTAFAVTAPAASLPDFADLVEKVGPAVVNIRTTANVPTSSGPRGMLPPGFDNGDMSEFFRRFFGIPLPQAPGNGSGNGGNNPKNAPAPDNPPDTEQNRGVGSGFIVSADGYVMTNAHVVDDADTIYVTLTDKREFKAKLIGVDDRTDVAVVKIQASNLPVVAIGDSNKVRVGEWVVAIGSPFGLDNTVTAGIVSSKSRNTGDYLPFIQTDVAVNPGNSGGPLINMQGEVIGINSQIYSRTGGFMGISFAIPIDEAMRVADQLKATGKVTRGRIAVAIGEVTKDVADSIGLPKAEGALVSSVEPGGPADKAGIQPGDIILKFNGRSVDTASDLPRMVGDTKPGAKATVSVWRKGQARDLPITIAETPAETTAKAEQRKNAPQKPRQTNSLGLTVSDLTAEQMKTLKLKNGVQIDGVDGPAARAGLQRGDIVLRVGDTDITNAKQFADVTAQLDPQKAVAVLVRRGDNTQFVPVRPRQK

SEQ ID NO: 30798 - protein, 342 aa, Neurospora crassa
MVTSEPCWFDLEGGVRKTIDFINEAGQAGCKLVAFPEVWIPGYPYWMWKVTYQQSLPMLKKYRENAMAVDSDEFRRIRRAARDNQIYVSLGFAEIDHATLYLAQALIDPTGEVINHRRKIKPTHVEKLVYGDGAGDTFMSVTPTELGRLGQLNCWENMNPFLKSLNVSMGEQIHIAAWPIYPGKETLKYPDPATNVADPASDLVTPAYAIETGTWTLAPFQRLSVEGLKKNTPEGVEPETDPSTYNGHARIYRPDGSLVVRPDKDFDGLLFVDIDLNECHLTKALADFAGHYMRPDLIRLLVDTSRKELVTEVDRNGGIVQYSTRERLGLNTPLENDKEGKK

SEQ ID NO: 30799 - protein, 324 aa, Oryza sativa
MAFTVKASSPSSPAASSSSSSAPAKLGAAPGRVAVRKLTAAATSLRLDRAPAAPATERGLSSVSRTMSRLMEKGKTAFIPYITAGDPDMGTTAEALRLLDACGADVIELGVPFSDPYNDGPVIQASAARALSAGATMDGIMSMLAEVTPELSCPVVLFSYLGPIVRRGPANFTAAAKEAGVQGLIVPDLPYLEACSFRSEVIKNNLELVLLTTPTTPPDRMKAITAASGGFVYLVSVNGVTGSRQDVNPRVEHLLQEIKQVTDKAVCVGYGISTPDHVRQIAEWGADGVIIGSAMVRQLGEAASPKQGLKRLEKYARSLKNALP

SEQ ID NO: 30800 - protein, 590 aa, Zea mays
MAKPLNLTPAFLSPMKATSCRFSSGGHAQCFPSSLPCRRRTPTPRTTSSSTRPAAQVSPGRSKQHDEAASETTIRQQLQQVDVLENMGISRHFAGEIKCILDRTYRCWLQRHEEIMLDTTTCAMAFRILRLNGYNVSSDELYHVVEASGLHNSLGGYLNDTRTLLELHKASTVSISEDESILDSIGSRSRTLLREQLESGGALRKPSLFKEVEHALDGPFYTTLDRLHHRWNIENFNIIEQHMLETPYLSNQHTSRDILALSIRDFSSSQFTYQQELQHLESWVKECRLDQLQFARQKLAYFYLSAAGTMFSPELSDARTLWAKNGVLTTIVDDFFDVAGSKEELENLVMLVEMWDEHHKVEFYSEQVEIIFSSIYDSVNQLGEKASLVQDRSITKHLVEIWLDLLKSMMTEVEWRLSKYVPTEKEYMINASLTFGLGPIVLPALYFVGPKISESIVKDPEYDELFKLMSTCGRLLNDVQTFEREYNEGKLNSVSLLVLHGGSMSISDAKRKLQKPIDTCRRDLLSLVLREESVVPRPCKELFWKMCKVCYFFYSTTDGFSSQVERAKEVDAVINEPLKLQGSHTLVSDV

SEQ ID NO: 30801 - protein, 320 aa, Synechococcus elongatus PCC 7942
MAKTETPTSDLVRTYLREIGRVPLLTHEEEVVLGKRVQQWMKLQELRQTLQSEEGDRDPSDLEWAAAAGLSIEELRQQQHLGEQAKRKMIEANLRLVVSVAKKYLKRNMDLLDLIQEGTIGMQRGVEKFDPTKGYRFSTYAYWWIRQAITRAIAEKARTIRLPIHITEKLNKIKKMQRQLSQQLSTATLPELAAALDLTPAQVRDYLEKARHPLSLDLRVGDNQDTELGDLLETDMQRRRKEFTLQASMRRDIDRLLDQLTEQQRQVIALRYGLEDGQVMTLASIGDRLQISRERVRQLEREALHTLRQARSQVQEYLAS

SEQ ID NO: 30802 - protein, 313 aa, Eriolobus trilobatus
GGLGDVLGGLPPAMAANGHRVMTISPRYDQYKDAWDTEVTVELKVGDKTETVRFFHCYKRGVDRVFVDHPLFLEKVWGKTASKVYGPVAGVDFKDNEPRFSLLCQAALEAPRVLNLNSSKYFSGPYGEEVVFIANDWHTALLPCYLKAVYKPRGIYSTAKVAFCIHNIAYQGRFASADFALLNLPDEFKSSFDFIDGYEKPVKGRKINWMKAGILESDKVLTVSPYYAQELVSAVEKGVELDHIIRKTGIFGIVNGMDVQEWNPLTDKYITIKYDASTVADAKPLLKETLQAEVGLPVDRDIPVIGFIGRLEE

SEQ ID NO: 30803 - protein, 578 aa, Desulfotalea psychrophila LSv54
MSSDLYRFKYDEFGNTRDIAVYGTGPSIMSCSYTNKSTAFSSKERDDFGLQGSLPPGFRDLEAQVENCHIKLGEKESEEEKYIFIRSLFDRNVTLAHALIQSDLEKFMGIIYTPTVGLAVQKYSAMFRQANGLHFSPDTIDQAEDILRRFAHRDIRVAVVTDNQGILGIGDQGAGGIAICLGKLMLYTQGAGIAPWHCLPISLDIGTDNEALLADKHYLGWRQKRLVGDEYTAFIDRFARAFRNVFPNALCQWEDFSKQNAFDIRDKYRHSMVSFNDDVQGTGAITFSAILSAMKVKRAKLTDQVFLIHGAGAGGVGIGEQIQVALMAEGLSEEEARDKVFTIDSRGVVTVDRKIEAYKKKFAKDGAKLSWLADPENHKLENVIKQAGVTVLIGTSGQGGCFTETVVKNMLGNTERPVIFPLSNPTHMAEAQPKDIYAWTNGQALVATGSPFAPVEHDGKTSRIGQCNNVFVFPGVGLGVLASGAREVLPEFFTAAAYAVSNSLSQEALDRGCLVPEVSEISKVSEKVALAVATCAIEHGVSRPCVYSDFSHNNDPARMKVLISKMRWSPEYLPMTAM

SEQ ID NO: 30804 - protein, 257 aa, Triticum aestivum
  misc_feature (29)..(29): Xaa can be any naturally occurring amino acid
  misc_feature (223)..(223): Xaa can be any naturally occurring amino acid
  misc_feature (233)..(233): Xaa can be any naturally occurring amino acid
  unsure (1)..(257): unsure at all Xaa locations
MAFGMAFRTALLCLLGMLIASPAILPFLXSGTHYQIGLMWPGAYCAQTTRGCCMPKSPVVPAADFYVSGFTVFNATTDAPETSCSSTPLNSDEILEISGLRQFWSNIKCPSNNGQSSWKSAWKTSGVCSGLDDKAYFQAAIALRSKINPLSRLVSKGIKPDFGLYSLEKIKKVIQAGTGVTPVIQCSKGPFDKFQLYQIFICVAGDAKTLIECPKPQKFTCSXRILFPPFKKXMLKQAASSVSYAEAFEMAGAVMGY

SEQ ID NO: 30805 - protein, 477 aa, Borrelia burgdorferi B31
MISKLTKIVATISDLRCEPEHIKDLHDAGVNVIRLNTAHQSHEDTIKVIDNVRKISNKIALMIDTKGPEVRTANIENPIIVKTGDKVIISTSPINEPNNFQTNYDGFVKEVPQGSKVLIDDGELEMTVVAKLPDRLICEIKNDGQIKNKKSINTPGISLKLQSVTEKDKGFIELAAKYNVDFIAHSFVRHSKDVQDVQEILTASGNPDVKIISKIENQEGIDNIEEIAKASYGIMVARGDMGVEIPAEDVPIAQLKITQTCIKYGIPVITATQMLHTMIENPRPTRAEVSDIANAILNGTDAIMLSGETAYGKYPIEAVKMMTSIAKKVEKHRKMTLYKDELFYDKSITRNYIIKCAIDATKLMDIKAIIVDSLKGKTARIMATYRASVPLFITTNSERLARELALSYGVYSNLVDNNFKRTTEFVVTSLKMLKEQGVVNDKDTVIIISGNPNRNIEKGTEFMEINTVEDAIKGRNI

SEQ ID NO: 30806 - protein, 313 aa, Eriolobus trilobatus
GGLGDVLGGLPPAMAANGHRVMTVSPRYDQYKDAWDTSVLVEIEVGSRVETVRFFHCYKRGVDRVFVDHPLFLEKVWGKTGSKIYGPRTGVDYMDNQFRFSLLCQAALEAPRVLNLNSNEYFSGPYGDDVVFIANDWHAALLPCYLKTIYKPKGIYKNVKVVFCIHNIAYQGGFPYSDFSLLDLPDNLKGSFDFIDGHDKPVKGRKINWMKAGILESDRVVTVSPYYAQELVSGEDKGVELDNIIRKTGITGILNGMDVQEWNPATDKYLDIKYDNTTVLDAKPLLKEALQAEVGLPVDRNIPVFGFIGRLEE

SEQ ID NO: 30807 - protein, 136 aa, Corynebacterium glutamicum ATCC 13032
MTERTLILIKPDGVTNGHVGEIIARIERKGLKLAALDLRVADRETAEKHYEEHADKPFFGELVEFITSAPLIAGIVEGERAIDAWRQLAGGTDPVAKATPGTIRGDFALTVGENVVHGSDSPESAEREISIWFPNL

SEQ ID NO: 30808 - protein, 313 aa, Eriolobus trilobatus
GGLGDVLGGLPPAMAANGHRVMTVSPRYDQYKDAWDTGVPVEIEVGGRVETVRFFHCYKRGVDRVFVDHPSFLERVWGKTGSKIYGPSAGEDYKDNQFRFSLLCQAALEAPRVLNLNSNKYFSGPYGDEVVFIANDWHTALLPCYLKAIYKPKGIYENAKVVFCIHNIAYQGRFPISDFSVLNLPENLKGSFDFIDGYNKPVKGRKINWMKAGILESDRVVTVSPFYAQELVSGEDKGVELDNIIRRTGITGIVNGMDVQEWNPATDKYLDTKYDNTTVLDAKPLVKEALQAEVGLPVDRNIPVIGFIGRLEE

SEQ ID NO: 30809 - protein, 80 aa, Brassica rapa subsp. pekinensis
MSCCGGNCGCGSGCKCGNGCGGCKMYPDLGFSGESTTTETFVFGVAPAMKNQYEASGEGVAENDRCKCGSDCKCDPCTCK

SEQ ID NO: 30810 - protein, 275 aa, Nitrosomonas europaea ATCC 19718
MNRIQSVFSQLKSQNRAALIPFITAGDPDATTTVALMHRLTQAGVDLIELGVPFSDPMADGPTIQRSSERALKHHISLKDVFSMVAEFRKTNQSTPVVLMGYANPIEAMGYKDFVQTAGHAGVDGVLVVDYPPEECTEWVRYLKEQNIDPIFLLSPTTPESRIRRVAELARGYVYYVSLKGVTGASHLDLHEVGDKLSQLRSYINIPIGVGFGIRDEQTARRIAEQADAVVIGSRIVEEIEHSPAADLLANVGALVESLRRAIDAKSDHSSITEK

SEQ ID NO: 30811 - protein, 311 aa, Synechococcus elongatus PCC 7942
MNVQERRNLNAAVERHTSDHVSWYLSSIGRIPLLTAEEEVELSRKVQLMMALLENPDAESNSENQAVLQAGQRAKTKMLKANLRLVVSVAKKCQNQGLELLDLIQEGSLGLERAVEKFDPALGYKFSTYAYWWIRQSMTRAIDNHARTIRLPIHVSEKISRIKKMTRELTHQLKRLPSRAEIAEALKLPLQDVEMLLSQSTPCTSLDAQARGDDGRSFLGDLIPDPKSLEPMDAMDRHIQHEQISTWLAHLTEREQQVLQLRFGLHDGEQHTLAEIGRRLNVSRERIRQVEARALQKLRVLSQQPLCPEAC

SEQ ID NO: 30812 - protein, 313 aa, Eriolobus trilobatus
GGLGDVLGGLPPAMAANGHRVMTISPRYDQYKDAWDTEVTVELKVGDKTETVGFFHCYKRGVDRVFVDHPLFLEKVWGKTASKIYGPTAGVDFKDNQLRFSLLCQAALVAPRVLNLNSSKYFSGPYGEEVVFIANDWHTALLPCYLKAIYKPKGIYKTAKVAFCIHNIAYQGRFAFADFALLNLPNELKSSFDFIDGNDKPVKGRKINWMKAGILESDKVLTVSPYYAEELVSSVEKGVELDNIIRKTGIQGIVNGMDVQEWNPLTDKYTTVKYDASTVADAKPLLKEALQAEVGLPVDRDIPVIGFIGRLEE

SEQ ID NO: 30813 - protein, 80 aa, Fragaria x ananassa
MSCCGGKCGCGAGCKCGSGCNGCGNYADITEQSSASETLVMGVVGTQKLNYGQAEAGVATEGSCSGCKCVYCTCDPCTCK

SEQ ID NO: 30814 - protein, 452 aa, Solanum tuberosum
MREILHIQGGQCGNQIGSKFWEVICDEHGVDPTGRYKGTAAESDLQLERINVYFNEASGGRYVPRAVLMDLEPGTMDSIRSGPYGQIFRPDNLVFGQSGAGNNWAKGHYTEGAELIDAVLDVVRKEAENCDCLQGFQVCHSLGGGTGSGMGTLLISKVREEYPDRMMLTFSVFPSPKVSDTVVEPYNATLSVHQLVENADECMVLDNEALYDICFRTLKLTTPSFGDLNHLISATMSGVTCCLRFPGQLNSDLRKLAVNLIPLPRLHFFMVGFAPLTSRGSQQYISLTVPELTQQMWDAKNMMCAADPRHGRYLTASAMFRGKMSTKEVDEQMINVQNKNSSYFVEWIPNNVKSSVCDIPPTGLKMASTFVGNSTSIQEMFRRVSEQFTAMFRRKAFLHWYTGEGMDEMEFTEAESNMNDPVAEYQQYQDATADDEEEYDDEAADDHHQYES

SEQ ID NO: 30815 - protein, 864 aa, Arabidopsis thaliana
MGNCGTRDEAAVFTPQAQAQQLQKKHSRSVSDLSDPSTPRFRDDSRTPISYAQVIPFTLFELETITKSFRPDYILGEGGFGTVYKGYIDDNLRVGLKSLPVAVKVLNKEGLQGHREWLTEVNFLGQLRHPNLVKLIGYCCEDDHRLLVYEFMLRGSLENHLFRSNPRTLLHFLKMMIALGAAKGLAFLHNAERPVIYRDFKTSNILLDSDYTAKLSDFGLAKAGPQGDETHVSTRVMGTYGYAAPEYVMTGRKSVDKTRPSKEQNLVDWARPKLNDKRKLLQIIDPRLENQYSVRAAQKACSLAYYCLSQNPKARPLMSDVVETLEPLQCTGDALIPCATTTAGAAFAMGGVPDYRMHRRFAKNVGPATGRSMESSLHSVIFLGLLATILVTTNGQGDGTGLNAEEMWPVEVGMEYRVWRRKLMTPLELCLECKCCSSTTCATMPCCFGINCQLPNKPFGVCAFVPKSCHYRAKNLKMASTEGLMPITRAFLASYYDKYPFSPLSDDVSRLSSDMASLIKLLTVQSPPSQGETSLIDEANRQPPHKIDENMWKNREQMEEILFLLSPSRWPVQLREPSTSEDAEFASILRTLKDSFDNAFTAMISFQTKNSERIFSTVMTYMPQDFRGTLIRQQKERSERNKQAEVDALVSSGGSIRDTYALLWKQQMERQLAQLGSATGVYKTLVKYLVGVPQVGLPVSTLSGKALHLPPSKDQMNLLSEAAIVYTSEFERFVTFISDVFANSPFFISADTAGILWSRDNEEYKEIIVQAGRTYEISLMVESENSYIAWDFSLMQGKISMDIGFSVEYINASGEKTVSLLINFQTLLILPYRRYEADQGNFSTLMAGNYKLVWDNSYSTFFKK

SEQ ID NO: 30816 - protein, 313 aa, Frangula alnus
GGLGDVLGGLPPAMAANGHRVMTVSPRYDQYKDAWDTEVTIELKVGEKLEKVRFFHCYKRGVDRVFVDHPLFLEKVWGKTKSKIYGPITGEDYQDNQLRFSLLCQAALEAPRVLNLTSSKYFSGPYGDDVVFVANDWHTAPLPCYLKSLYKGRGIYKSARVAFCIHNIAYQGKFAFADFSLLNLPDEFKSSFDFIDGYDNPVKGRKINWIKAGILESDKVLTVSPYYAKELVSSVEKGVELDNILRKTGITGIVNGMDVQEWNPLTDKYTSVKYDASTVLDAKPILKEALQAEVGLPVDRKIPVVGFIGRLEE

SEQ ID NO: 30817 - protein, 770 aa, Arabidopsis thaliana
MVAPALLPELWTEILVPICAVIGIAFSLFQWYVVSRVKLTSDLGASSSGGANNGKNGYGDYLIEEEEGVNDQSVVAKCAEIQTAISEGATSFLFTEYKYVGVFMIFFAAVIFVFLGSVEGFSTDNKPCTYDTTRTCKPALATAAFSTIAFVLGAVTSVLSGFLGMKIATYANARTTLEARKGVGKAFIVAFRSGAVMGFLLAASGLLVLYITINVFKIYYGDDWEGLFEAITGYGLGGSSMALFGRVGGGIYTKAADVGADLVGKIERNIPEDDPRNPAVIADNVGDNVGDIAGMGSDLFGSYAEASCAALVVASISSFGINHDFTAMCYPLLISSMGILVCLITTLFATDFFEIKLVKEIEPALKNQLIISTVIMTVGIAIVSWVGLPTSFTIFNFGTQKVVKNWQLFLCVCVGLWAGLIIGFVTEYYTSNAYSPVQDVADSCRTGAATNVIFGLALGYKSVIIPIFAIAISIFVSFSFAAMYGVAVAALGMLSTIATGLAIDAYGPISDNAGGIAEMAGMSHRIRERTDALDAAGNTTAAIGKGFAIGSAALVSLALFGAFVSRAGIHTVDVLTPKVIIGLLVGAMLPYWFSAMTMKSVGSAALKMVEEVRRQFNTIPGLMEGTAKPDYATCVKISTDASIKEMIPPGCLVMLTPLIVGFFFGVETLSGVLAGSLVSGVQIATSASNTGGAWDNAKKYIEAGVSEHAKSLGPKGSEPHKAAVIGDTIGDPLKDTSGPSLNILIKLMAVESLVFAPFFATHGGILFKYF

SEQ ID NO: 30818 - protein, 289 aa, Plantago major
  misc_feature (104)..(104): Xaa can be any naturally occurring amino acid
  unsure (1)..(289): unsure at all Xaa locations
MAKTIVDSDYLRDVEKARRELRALISNKNCAPIMLRLAWHDAGTYDVSTKTGGPNGSIRNEEELTHGANNGLKIALEFCEQVKSKCAKISYADLYQLAGVVAVXVTGGPTITFVPGRKDSKISPREGRLPDAKKGAPHLKDVFYRMGLSDKDIVALSGGHTLGRAHPERSGFEGPWTAEPLKFDNSYFIELLQGESEGLLKLPSDLALLDDPEFRRYVELYAKDEEAFFKDYAESHKKLSELGFTPSPAAGVKAIVKDSTVLAQSAVGVAVAATVVILSYLYEVRRKMK

SEQ ID NO: 30819 - protein, 234 aa, Plantago major
SIKSYVAEFIATLLFVFAGVGSAIAYNKLTSDASLDPAGLVAIAIAHAFALFVGVSMAANISGGHLNPAVTLGLAVGGNITIITGLFYWIAQCLGSIVACFLLSFVTNGLAVPTHGVSAGQTALQGVVMEIIITFALVYTVYATAADPKKGSLGTIAPMAIGFIVGANILAAGPFSGGSMNPARSFGPAVAAGDFSQNWIYWVGPLIGGGLAGLVYGDVYIASYAALPASEDYA

SEQ ID NO: 30820 - protein, 330 aa, Quercus suber
MAARSTSHSASSFLLIVSLAVLVIFSGNSSAKLSTNFYYKSCPKVFSTVQSVVHSAISKQPRQGASLLRLHFHDCFVNGCDGSVLLDDTPTFTGEKTAGPNKGSIRGFEFVDEIKSKVEKECPGVVSCADILAIAARDSVKILGGPKWDVKLGRRDSKTASLKAANSGVIPPPTSTLSNLINRFKAKGLSTKDMVALSGAHTIGQARCTVFRDRIYKDKNIDSSFAKTRQNTCPKTTGLPGDNKIAPLDLQTPTAFDNYYYKNLIKQKGLLRSDQQLFNGGSTDSLVKKYSQDTKSFYSDFVNAMIKMGDIQPLTGSSGEIRKNCRKVNH

SEQ ID NO: 30821 - protein, 294 aa, Saccharomyces cerevisiae
MKTLVHVASVEKGRSYEDFQKVYNAIALKLREDDEYDNYIGYGPVLVRLAWHISGTWDKHDNTGGSYGGTYRFKKEFNDPSNAGLQNGFKFLEPIHKEFPWISSGDLFSLGGVTAVQEMQGPKIPWRCGRVDTPEDTTPDNGRLPDADKDAGYVRTFFQRLNMNDREVVALMGAHALGKTHLKNSGYEGPGGAANNVFTNEFYLNLLNEDWKLEKNDANNEQWDSKSGYMMLPTNYSLIQDPKYLSIVKEYANDQDKFFKDFSKAFEKLLENGITFPKDAPSPFIFKTLEEQGL

SEQ ID NO: 30822 - protein, 407 aa, Arabidopsis thaliana
MSFKSLIQDMRGELGSISRKGFDVRFGYGRSRSQRVVQDTSVPVDAFKQSCWASMPPELLRDVLMRIEQSEDTWPSRKNVVSCAGVCRNWREIVKEIVRVPELSSKLTFPISLKQPGPRGSLVQCYIMRNRSNQTYYLYLGLNQAAASNDDGKFLLAAKRFRRPTCTDYIISLNCDDVSRGSNTYIGKLRSNFLGTKFTVYDAQPTNPGTQVTRTRSSRLLSLKQVSPRIPSGNYPVAHISYELNVLGSRGPRRMQCVMDAIPASAVEPGGTAPTQTELVHSNLDSFPSFSFFRSKSIRAESLPSGPSSAAQKEGLLVLKNKAPRWHEQLQCWCLNFNGRVTVASVKNFQLVAAPENGPAGPEHENVILQFGKVGKDVFTMDYQYPISAFQAFTICLSSFDTKIACE

SEQ ID NO: 30823 - protein, 330 aa, Quercus suber
MAAHSTSHSASSFLLIVSLAVLVIFTGNSSAKLSTNFYSKSCPKVFSTVQSVVHSAVSKQPRQGASLLRLHFHDCFVNGCDGSILLDDTPTFTGEKTARPNNGSIRAFEVVDEIKSKVEKECPGVVSCADILAIAARDSVKILGGPKWDVKLGRRDSKTASFSAANSGVIPPPTSTLGNLINRFKAKGLSTKDMVALSGAHTVGQARCTVFRDRIYKDKNIDSSFAKTRQNKCPKTTGLPGDNKIAPLDLQTPTAFDNYYYKNLIKEKGLLRSDQQLFNGGSTDSLVKKYSQDTKTFYSDFVNAMIKMGDIQPLTGSSGEIRKNCRKVNN

SEQ ID NO: 30824 - protein, 147 aa, Eremothecium sinecaudum
ALWDTAGQEDYDRLRPLSYPDSDVVLICFSVDIPDSLDNVEEKWINEVHHFCRGVPTLLVACKLDLREEQHVVSQLAVLGQHPVTTAEGNAVARKIGAASYVECSAKTGEGVKEVFDIATRAALTRKSRSSTAGRRAASGRKKCILL

SEQ ID NO: 30825 - protein, 427 aa, Synechococcus elongatus PCC 7942
MLAIILGGGAGSRLYPLTKQRAKPAVPLAGKYRLIDIPVSNCINADINKIYVLTQFNSASLNRHLSQTYNLSSGFGNGFVEVLAAQITPENPNWFQGTADAVRQYLWLIKEWDVDEYLILSGDHLYRMDYSQFIQRHRDTNADITLSVLPIDEKRASDFGLMKLDGSGRVVEFSEKPKGDELRAMQVDTTILGLDPVAAAAQPFIASMGIYVFKRDVLIDLLSHHPEQTDFGKEVIPAAATRYNTQAFLFNDYWEDIGTIASFYEANLALTQQPSPPFSFYDEQAPIYTRARYLPPTKLLDCQVTQSIIGEGCILKQCTVQNSVLGIRSRIEADCVIQDALLMGADFYETSELRHQNRANGKVPMGIGSGSTIRRAIVDKNAHIGQNVQIVNKDHVEEADREDLGFMIRSGIVVVVKGAVIPDNTVI

SEQ ID NO: 30826 - protein, 163 aa, Eremothecium sinecaudum
MSQQMNNPSIRRKLVIVGDGACGKTCLLIVFAKGKFPQVYVPTVFDNYVADVEVDGRRVELALWDTAGQEDYDRLRPLSYPDSNVVLICYSIDLPDSLENVMEKWISEVLYFCQGVPIILVGCKADLRNDPQVIEQLRQQGQQPVSQSQAQEVADQIGAVEYI

SEQ ID NO: 30827 - protein, 126 aa, Salmonella enterica
SLGLWEICIIWGLGISLAVYLTAGISGGHLNPAVTIALWLFACFPKHKVLPYIIAQFAGAFGGALLAYVLYSSLFTEFEAAHHMVRGSVESLQLASIFRSYPAAALNVWQAALVKVVITSILMGMI

SEQ ID NO: 30828 - protein, 422 aa, Debaryomyces hansenii CBS767
MSNNPFITCNMASSMTATEDYSHTDQFLPTHNHTSSGNSILSSPKTINSSFEESPKFGVINYSPKHSRKPSSLTVNRNINMKNLSLNLSHSNNNTSTEQLTTDPTTEKATTRKHEAEKPETGDIFNKPPITRRKTLTLSIPANSMAEDLPLVTPNVTKTPSMPPLMSGFKSNTESDLLDREHEHNSFRFEPPNVGSSNPFLNSNLQSPFMNDKTFVHDFSKISINNEKPIYSRIPEELQEQSQLDAYRNGPSDVLNHSIYLYSDPNHGNPKIDINEFDLVINVAKECKDLSSEFDNKNGKKEYLYIPWSHTSLILKELPQITRKIGQFDDSNKSHDKRKILVHCQCGVSRSACVIVAYFMYKFKIGVNEAYELLKSGTDNINESTNTLIKNKGYNIDACDRICPNMSLIFELMEFSDALKNE

SEQ ID NO: 30829 - protein, 429 aa, Legionella pneumophila str. Lens
MSRSSDLFHKAQTIIPGGVNSPVRAFKGVGGEPVFFKSGKGAYLTDVDDKQYIDYVGSWGPLILGHCHPKVIEAVDNVLHSGMSFGAPTELEIQLAEKIASLMPSIEKIRMVNSGTEATMTAIRLARGFTNKNKFIKFNGCYHGHSDSLLVKAGSGLLTLGIPSTPGIPQCITEHTLTADFNNLEQVAQLFEKYPNDIATVILEPVPGNMGFILPKIEFLKGLRELCDQYNALLIFDEVMTGFRVGLHGAQGLFGIKPDITTLGKIIGGGMPVGALGGKREIMSFLAPEGPVYQAGTLSGNPLAMAAGLATLKEIEKINFFEDLSSTTNKLTEALSDAAENANIPLFAASLGGMFGFCFTDKNSVENYLDVASSDEVLFKKFFHAMLAQGVYFAPSMYEAGFVSSMHGDLEIQKTYDAAELVLNQLKSA

SEQ ID NO: 30830 - protein, 226 aa, Debaryomyces hansenii CBS767
MFKQMIQVSKRAGVKPQQIRYLSGTSVFNKPAVAADYLTTGGSTQSVWPKGFRLPKPKSWEESGESALSKATKFFFLNEIARGMYVCLEMYFRAPYTIYYPFEKGPISPRFRGEHALRRYPSGEERCIACKLCEAICPAQAITIEAEERMDGSRRTVKYDIDMTKCIYCGYCQDSCPVDAIVESPNVEYSTETREELLYNKEKLLENGDKWEQELQYCIDADAPYR

SEQ ID NO: 30831 - protein, 312 aa, Triticum aestivum
MEKSRVLVVGGTGYLGRRIVKASLAQGHETCVLMRPEIGLDIDKLQMLLSFKAQGARLLEASLDDHRGLVAAVKQVDVVVSAMSGVHFRSHNLLLQLKLVEAIKEAGNVKRFLPSEFGMDPARMGHALEPGRVTFDEKMEIRKAIEEANIPHTYISANCFAAYFVPNLCQMRTLLPPKEKVHVYGDGNVKVIFMDEDDVATYTIKSIDDPRALNKTIYLRPPENILSQNELISKWEKLSGEVLERIPIPSDEFLASMEGTDITNQMAVGHFHHIFYEGCSTDFDIEEDGEEASLLYPEVRCTRMEDYMKRYL

SEQ ID NO: 30832 - protein, 372 aa, Legionella pneumophila str. Lens
MSSKSGGLAGVVAGQSAIATVGLAGKGLNYRGYSINDLAEYASFEEVAYLLHYGELPTQKELDVYIKKLVNLRHIPDVLKTVLKLIPKNTHPMDVLRTACSFLGTIEPEENFKQQYEIADRLLALFPGIMCYWYTYHFKNKEISGLSEENTTGGHFLALLHGRKPSKIETDMMNVSLILYAEHEFNASTFAARVTAATLADFYSAITSAIGTLRGPLHGGANEAAMELIERFKTPDEAAIGIKQMLASKELIMGFGHRVYTTCDPRSDIIKKWSFRLGEEKGNLLLYHISERIEEIMWQEKKLFPNLDFYSASAYHYCDIPTHLFTPIFVMSRITGWSAHVFEQRANNKLIRPTSEYIGPDSRPFPAIETRG

SEQ ID NO: 30833 - protein, 213 aa, Brassica napus
  misc_feature (22)..(22): Xaa can be any naturally occurring amino acid
  misc_feature (161)..(161): Xaa can be any naturally occurring amino acid
  unsure (1)..(213): unsure at all Xaa locations
RRVGSFKKVARSMGYGEKDISXVSFQSISKGYYGECGKRRGYMEVTGFTSDVREQIYKVASVNLCSNISGQILASLVMSPPKPGDESYESYIAEKEGILSSMARRAKTLEEALNKLEGITCNRAEGAMYLFPCINLPQKAIAAAEAAKTAPGAFYCKRLLXATGIVLVPGSGFRQVPGTWHFRCTILPQEDKIPAIVNRLTEFHKSFMDEFRN

SEQ ID NO: 30834 - protein, 170 aa, Vibrio vulnificus YJ016
MKEIGAMCGLIERINKGGVMLTWQDIITFTHQGNPQPDTVVRKSDAQWREQLGEAQYYVMRQHGTERPFSNQMCELFEPGLYRCAGCQNLLFDSGSKFDSRTGWPSFAQPMKSNAISYHLDETLARPRIEVRCNQCESHLGHVFPDGPAPSGLRYCVNAVSIEKVNQEAS

SEQ ID NO: 30835 - protein, 175 aa, Vibrio vulnificus YJ016
MNTQLATFGGGCFWCTEAMFSQLKGVLDVKSGYSGGHVKHPCYREVCSGKTGHAEVIQVSFDPDIIRYEALLLVHLTTHNPTTLNRQGADRGTQYRSIILAHDEEQKRIAQQVIAEVAPYFDEPIVTEVVDFEQFYQAETHHQNYYSDNPKKQYCAVVIEPKLRRLRERYADLLG

SEQ ID NO: 30836 - protein, 965 aa, Solanum tuberosum
MTTRNLDKLASIDAQLRQLVPAKVSEDDKLVEYDALLLDRFLDILQDLHGEDLKETVQECYELSAEYEAKHDPKKLEELGNVLTSLDPGDSIVIAKAFSHMLNLANLAEEVQIAYRRRQKLKKKGDFGDESNATTESDIEETFKKLVGDLKKSPQEVFDAIKNQTVDLVLTAHPTQSVRRSLLQKHGRIRDCLAQLYAKDITPDDKQELDEALQREIQAAFRTDEIRRTPPTPQDEMRAGMSYFHETIWKGVPKFLRRVDTALKNIGINERVPYNAPLIQFSSWMGGDRDGNPRVTPEVTRDVCLLARMMAANLYYSQIEDLMFELSMWRCNEELRVRADDLQRSSRRDEKHYIEFWKQVPPNEPYRVILGDVRDKLYQTRERARQLLGHGYSEIPEEATYTNIEQFLEPLELCYRSLCACGDLSIADGSLLDFLRQVSTFGLSLVRLDIRQESDRHTDVLDAITQHLEIGSYRDWSEERRQEWLLSELSGKRPLFGPDLPKTEEIADVLDTFHVIAELPADCFGAYIISMATAPSDVLAVELLQRECRVRQPLRVVPLFEKLADLDAAPAAVARLFSIEWYRNRINGKQEVMIGYSDSGKDAGRLSAAWQLYKAQEELIQVAKEFDVKLTMFHGRGGTVGRGGGPAHLAILSQPPETIHGSLRVTVQGEVIEQSFGEEHLCFRTLQRFTAATLEHGMHPPVSPKPEWRALMDEIAVVATEKYRSIVFKEPRFVEYFRLATPELEYGRMNIGSRPSKRKPSGGIESLRAIPWIFAWTQTRFHLPVWLGFGAAFKYAIEKDIKNLRMLQEMYNAWPFFRVTIDLVEMVFAKGDPGIAALFDKLLVSEDLWSFGELLRSKYEETKSLLLQIAGHKDLLEGDPYLKQRLRLRDSYITTLNVCQAYTLKRIRDPDYSVTPRPHISKEYMEAKPATELVNLNPTSEYAPGLEDTLILTMKGIAAGMQNTG

SEQ ID NO: 30837 - protein, 173 aa, Glycine max
SYIHILEVRSFLQVFLTPTHLAIVLEYAAGGELFERICNAGRLSEDEVGCVCVISLYLYKLSSDDFYEFPILQARFFFQQLISGVSYCHSMQICHRDLKLENTLLDGNPAPRLKICDFGFSKSALLHSQPKSTVGTPAYIAPEVLSRKEYDGKVADVWSCGVTLYVMLVGAYP

SEQ ID NO: 30838 - protein, 555 aa, Arabidopsis thaliana
MERYEVLEQIGKGSFGSALLVRHKQERKKYVLKKIRLARQSDRARRSAHQEMELISTVRNPFVVEYKDSWVEKGCYVCIVIGYCQGGDMTDTIKRACGVHFPEEKLCQWLVQLLMALDYLHSNHILHRDVKCSNIFLTKEQDIRLGDFGLAKILTSDDLTSSVVGTPSYMCPELLADIPYGSKSDIWSLGCCMYEMAAHKPPFKASDVQTLITKIHKLIMDPIPAMYSGSFRGLIKSMLRKNPELRPSANELLNHPHLQPYISMVYMKLESPRRSTFPLQFSERDATLKERRRSSFSNDRRLNPSVSDTEAGSVSSSGKASPTPMFNGRKVSEVTVGVVREEIVPQRQEEAKKQSGAARTPRVAGTSAKASTQRTVFKHELMKVSNPTERRRRVSLPLVVENPYTYESDITALCSLNSPDVSVNTPRFDKIAEFPEDIFQNQNRETASRREVARHSFSSPPCPPHGEDNSNGSITKDKCTVQKRSVSEVKQRRFDTSSYQQRAEALEGLLEFSAKLLQQERYDELGVLLKPFGAERVSSRETAIWLTKSFKEASV

SEQ ID NO: 30839 - protein, 478 aa, Xanthomonas campestris pv. campestris str. ATCC 33913
MRGRMGRHRSGPRMSEPSSTDAPQFQRSMQVRHLVMLSLGGVIGTGLFFNTGYIIASTGALGTVLAYLIGALVVYLVMQCLGELAVAMPQTGAFHVYAARYLGPATGYVVAWLYWLTWTVALGSSLTAAAFCMQYWFPHSPAWPWCLLFCVLIFSLNMVSARWFAEGEFWFSLINVVTIVVFIVLGGAAVVGWLPLADGSPAPGVRHLRADGWFAHGTVPILMTMVAVNFAFSGTELIGIAAGETAQPARAIPLAIRTTLIRLVVLFVGTVLVLAALLPAHAAAVETSPFVRAFELLGIPYAAGLLNAVILTAILSAANSGLYAAARMLWSLANEGTLPARFARLTRRGIPLPALVLSMLGGLLALLTGVYAADTVFVAISAVSGFAVVVVWLSICASHYCFRRQLLRDGIALDSLAYRAPWYPWTPLIGGALCVLACAGLAFDPQQRIALWCGIPFVALCYGAHAVTQRLAARRVRP

SEQ ID NO: 30840 - protein, 458 aa, Peanut witches'-broom phytoplasma
MKKISFFSEPINPTLLPTDLSEREQEEINKLKKSWESSLGYLNEEKSVINEYQNKCDEYQAQLNSIQPQIENETKNLIKLKLTLEKLTKPKSKNSKLKIWKLLVKSAKSKFKIWKLLVKSAKSKFKLVNYKQPKENTKKCYLMLKNTEKNLKNDLKKVKNNIKIQLFLDLTSTNTSNWGIIKKELLFKMMQVKKKLHLLFNEFFRYVFNNQYSSHYGIKQLSNLRIVVSIAKKQSERGQYFLDLIHEGNMGLMKTVDKFDYTKGFKFSTYATWWIRQAITRAVADQSRTIRCPVHVSDILNKNFAFKSKLTQDLARKARKAENHEIAKAMNIETKKLMIYKWLKRNDFFRNIYSWWRWFFFRWFYKRSLRYFASWLYVTRNFKKTLEESLEEALTPREQLVLKMRYGILEGDNRVHTLEEVGAKLGVTRERIRQIETKALRKLRHPSRSNPLSFLKKD

SEQ ID NO: 30841 - protein, 364 aa, Aspergillus fumigatus
MKALILVGGFGTRLRPLTLTLPKPLVEFGNRPMILHQVESLAAAGVTDIVLAVNYRPDVMVAALKKYEEQYNVRIEFSVESEPLGTAGPLKLAEKILGKDDSPFFVLNSDIICDYPFKQLAEFHKKHGDEGTIVVTKVDEPSKYGVVVHKPNHPSRIDRFVEKPVEFVGNRINAGIYILNPSVLKRIELRPTSIEQETFPAICSDGQLHSFDLEGFWMDVGQPKDFLTGTCLYLTSLAKRNSKLLAPNSEPYVYGGNVMVDPSAKIGKNCRIGPNVVIGPNVVVGDGVRLQRCVLLENSKVKDHAWIKSTIVGWNSSVGKWARLENVTVLGDDVTIADEVYVNGGSILPHKSIKQNIDVPAIIM

SEQ ID NO: 30842 - protein, 223 aa, Ralstonia metallidurans CH34
MSDAIAQLFRNNREWVDRVNAEDPTFFTRLANQQAPEYLWIGCSDSRVPANQILGLAPGEVFVHRNIANVISHSDLNALSVLQFAVDVLKVRHVTVVGHYGCGGVKVALKRERVGLADNWLRHVQDVADKHAGYLGTVLREDDAHTRLCELNVIEQVNNVCQTTVLQDAWARGQAVTVHGWVYGVSDGLLRDLGMAASNNDELHAQIAAALRQYGDPPQASIR

SEQ ID NO: 30843 - protein, 313 aa, Frangula alnus
  misc_feature (185)..(185): Xaa can be any naturally occurring amino acid
  misc_feature (246)..(246): Xaa can be any naturally occurring amino acid
  misc_feature (258)..(258): Xaa can be any naturally occurring amino acid
  misc_feature (266)..(266): Xaa can be any naturally occurring amino acid
  unsure (1)..(313): unsure at all Xaa locations
GGLGDVLGGLPPAMAANGHRVMTVSPRYDQYKDAWDTEVQVEIKVGDRIETVRFFHCYRRGVDRVFVDHPMFLEKVWGKTGSKVYGPETGVDYQDNQLRFSLLCQAALEAPRVLNLNSNKFFSGPYGEDVVFLTNDWHTALLPCYLKSMYKSRGIYKSAKVAFCIHNIAYQGRFGFSDFSLLNLXDEFKSSFEFIDGYEKPAKGRKINWMKVGVLEADRVVTVSPSYAQELVSGVEKGVELDNIIXKTGITGIVNGMXVQEWNPAXDKYIDVKYDATTVMDAKPLLKEALQSEVGLPVDSNIPVIGFIGRLEE

SEQ ID NO: 30844 - protein, 312 aa, Gillenia trifoliata
GGLGDVLGGLPPAMAANGHRVMTVSPRYDQYKDAWDTSVPVEIEVGGRVETVRFFHCYKRGVDRVFVDHPLFLERVGKTESKIYGPRAGVDYTDNQFRFSLLCQAALEAPRVLNLNSNKFFSGPYGDDVMFIANDWHTALLPCFLKTIYKPKGIYKNAKVAFCIHNIAYQGRFPFSDFSLLGLPENLKSSFDFIDGYNKPVKGRKINWMKAGIIESDRAVTVSPYYAQELVSGEDKGVELDNIIRKTGITGIVNGMDVQEWNPATDKYLDIKYDNTTVLDAKPLLKEALQAEVGLPVDRNIPVIGFIGRLEE

SEQ ID NO: 30845 - protein, 160 aa, Acinetobacter sp. ADP1
MTNLYQFEAELLEGDTKSLADYQGKVLLIVNTASKCGFTPQFAGLEKIYEKYKDRGFEVLGFPCNQFGGQDPGSNNEIGAFCQRNYGVSFPMFAKVDVKGPEAHAIFRYLTREAKGILGSENIKWNFTKFLVGRDGKVLNRYAPTTKPESLEEDIEKALA

SEQ ID NO: 30846 - protein, 328 aa, Corynebacterium glutamicum ATCC 13032
MNSPQNVSTKKVTVTGAAGQISYSLLWRIANGEVFGTDTPVELKLLEIPQALGGAEGVAMELLDSAFPLLRNITITADANEAFDGANAAFLVGAKPRGKGEERADLLANNGKIFGPQGKAINDNAADDIRVLVVGNPANTNALIASAAAPDVPASRFNAMMRLDHNRAISQLATKLGRGSAEFNNIVVWGNHSATQFPDITYATVGGEKVTDLVDHDWYVEEFIPRVANRGAEIIEVRGKSSAASAASSAIDHMRDWVQGTEAWSSAAIPSTGAYGIPEGIFVGLPTVSRNGEWEIVEGLEISDFQRARIDANAQELQAEREAVRDLL

SEQ ID NO: 30847 - protein, 313 aa, Gillenia trifoliata
GGLGDVLGGLPPAMAANGHRVMTISPRYDQYKDAWDTEVTVELKVGDKTETVGFFHCYKRGVDRVFVDHPLFLEKVWGKTASKIYGLITGVDFKDNQLRFSLLCQAALEAPRVLNLNSSKYFSGPYGEEVVFIANDWHTALLPCYLKAIYKPKGIYKTAKVAFCIHNIAYQGRFAFADFALLNLPDEFKSSFDFIDGYDKPAKGRKINWMKAGILESDKVLTVSPYYAEELVSAVEKGVELDNIIRKTGILGIVNGMDVQEWNPLTDKYTTVKYDASTVADAKPLLKEALQAEVGLPVDRDIPVIGFIGRLEE

SEQ ID NO: 30848 - protein, 277 aa, Triticum aestivum
  misc_feature (121)..(121): Xaa can be any naturally occurring amino acid
  misc_feature (209)..(209): Xaa can be any naturally occurring amino acid
  misc_feature (211)..(211): Xaa can be any naturally occurring amino acid
  unsure (1)..(277): unsure at all Xaa locations
RCAPPPPPRLSQIRPSVDPWRRRRRRRRRWRRETSSSSSRSWRRRRRPRRGRGKRGRREMRRIEDATSRQVTFSKRRSGLLKKAFELGVLCDAEVALIVFSPRGRLYEYASAPDLQKTIDXRYLNHTKGTSANEKTVEQPAAGVQMCRSEATALKHKIDAIEAYQRKLSGEGRGSRPALEPQELELQLEKSLSCIRQKKQQKMLDKILXEXEKERKLLTENSVLRKEYKALPLLELATAAAAERSPDGAGAEEAEEDERRRHYMEVETELVIGRPVV

SEQ ID NO: 30849 - protein, 139 aa, Acinetobacter sp. ADP1
MGKLNKTEREWQRELSPEEYRITRQKGTEPAFTGQYWNTKQSGTYVCRCCGTELFSSISKYDSGCGWPSFYKPINTTAIEEHDDFSHGMVRTEIVCHHCDAHLGHVFEDGPQPTGLRYCVNSASLQLKTDEKNDEETYP

SEQ ID NO: 30850 - protein, 476 aa, Acinetobacter sp. ADP1
MSQKKSVIFKNLLPVIKQYQQAGFTHEKIVALLKDQHDLDLVTTETFKSYLYRYAKVTPTPSESLKMTNTIQTPREIKKSSKLEHVCYDIRGPVLRAANEMEEQGHKIIKLNIGNPAPFGFEAPQEIINDVALNLPNAIGYTDSKGIFPARKAICQYYQQKGIRDMHVNDVYVGNGVSELIVMAMQGLLNDGDEMLVPMPDYPLWTAAVNLSGGTAIHYKCDEENSWYPDIVDMESKITPNTRGIVVINPNNPTGSVYPRHVLQQIVALAKKHDLILFADEIYDKIIYDGIEHVALASLAGDQLCISFNGLSKSYRVAGYRSGWMAITGDKSRAKDYIEGLDMLASMRLCANHQAQYAIQTALGGYQSINDLIRPSGRLYEQRNIAWEMLNEIHGVSCVKPEGAMYCFPKLDPNIYQVEDDEQLMLDFLRAEKVLLVQGTGFNWPTHDHFRLVFLPAENELREAITRLSRFLATRR

SEQ ID NO: 30851 - protein, 443 aa, Physcomitrella patens
MREILHIQGGQCGNQIGAKFWEVVCEEHGIDPTGTYQGVSDLQLERINVYYNEASGGRYVPRGVLMDLEPGTMDSVRSGPYGQIFRPDNFVFGQTGAGNNWAKGHYTEGAELIDSVLDVVRKEAESCDCLQGFQVCHSLGGGTGSGMGTLLISKIREEYPDRMMLTFSVFPSPKVSDTVVEPYNATLSVHQLVENADECMVLDNEALYDICFRTLKLITPSFGDLNHLISATMSGITCCLRFPGQLNSDLRKLAVNLIPFPRLHFFMVGFAPLTSRGSQQYRSLTVPELTQQMWDAKNMMCAADPRHGRYLTASAMFRGKMSTKEVDEQMINVQNKNSSYFVEWIPNNVKSSVCDIPPTGLKMSSTFIGNSTSIQEMFRRVSEQFTAMFRRKAFLHWYTGEGMDEMEFTEAESNMNDLVSEYQQYQDASAEEEGEYEEDLEEA

SEQ ID NO: 30852 - protein, 313 aa, Heteromeles arbutifolia
GGLGDVLGGLPPAMAANGHRVMTVSPRYDQYKDAWDTSVLVEIQVGGRVETVRFFHCYKRGVDRVFVDHPLFLEKVWGKTGSKIYGLRTGVDYMDNQFRFSLLCQAALEAPRVLNLNSNKYFSGPYGDDVVFIANDWHTALLPCYLKTIYKPKGVYKNAKVAFCIHNKAYQGRFPFSDFSLLDLPDNLKGSFDFVDGYEKPVKGRKINWMKAGILESDRVVTVSPYYAQELISGEDKGVELDNIIRKTGITGIVNGMDVQEWNPATDKYLDIKYDNTTALDAKPLLKEALQAEVGLPVDRNIPVFGFIGRLEE

SEQ ID NO: 30853 - protein, 81 aa, Plantago major
MSCCNGNCGCGSGCKCGSGCGGCKMYPDLSYSEASTTVSVSSVLGLAPKVTYFEGSETGVTVSENGCKCGDNCSCNPCNCK

SEQ ID NO: 30854 - protein, 313 aa, Heteromeles arbutifolia
GGLGDVLGGLPPAMAANGHRVMTVSPRYDQYKDAWDTGVPVEIEVGGRVETVRFFHCYKRGVDRVFVDHPSFLERVWGKTGSKIYGPSAGEDYNDNQFRFSLLCQAALEAPRVLNLNSNKYFSGPYGDEVVFIANDWHTALLPCYLKAIYKPKGIYENAKVVFCIHNIAYQGRFPISDFSVLNLPENLKGSFDFIDGYYKPVKGRKINWMKAGILESDRVVTVSPFYAQELVSGEDKGVELDNIIRKTGITGIVNGMDVQEWNPATDKYLDTKYDNTTVLDAKPLVKEALQAEVGLPVDRNIPVIGFIGRLEE

SEQ ID NO: 30855 - protein, 680 aa, Bradyrhizobium sp. BTAi1
MHKIWSAAWFVVVACIPVSSVSAIAGTHDIVIERHLVNVTGRERVGMLINGQLPGPILRLKEGEDAVINVTNRLDENASIHWHGLIVPPEMDGVPGIAPGYGDGIKPGETFTYRFKVRQSGTYWFHSHSSGEQEQLGIYAPLIIEPRTRDPFKYDSEYVIMFSDWTDEDPKRIISNLKKDSSWYNFNRQTLVGLIQELSNAPNEEARKASVNSRIAWGLMRMDPTDVADVAGYTFLVNGQSPERNFTALARRGERVRLRFINASTSTYFDVRIPGLKMTVVQADGNNVSPVRVDEFRIAVAETYDVIVQPTEDRAYTIVGEPMDRTGFARATLAPRPGMVGELPPHRLRPLMQMSDMAMNPGPKGLDRGTLQPEQDMIGHVAPEDPVAMAIGGMGDMSGMSDASKPKGMQRGGGMSDGKMAMPKSSPAREGQGTKTGKPPEASPMPGMGPGSMPGMNSQNQMPMPKEKQAMDHGAMSSMGPKSSADHQSQVTSSTSGVQQGPQAYVLRDGEDMPNVGPSVQQTMPDPITNDTGAPLGTRVLSYRDLRALNPYPYKRYDRIIEIRLTGNMQRYFWSINGRKFSEAEPIVLRFGERARFRFINETMMNHPMHIHGTWMLPEVGNGARNPKKHTVNIKPGTTLDVDIPADAEGPWAFHCHLLYHMETGMMRQVNVVRQTASLK

SEQ ID NO: 30856 - protein, 77 aa, Plantago major
MSSCGSSNCSCGSSCKCGSGCGCSMYPDVEKNANQVTIIEGLAPSKMFSEGVEESFSAEGGQGCKCGAGCKCDPCTC

SEQ ID NO: 30857 - protein, 90 aa, Apium graveolens
YVEPPPAAFIGIDELGKWSFYRALIAEFIATLLFLYITVLTVIGYKSQSATDPCGGVGILGIAWAFGGMIFVLVYCTAGISGGHINPAVT

SEQ ID NO: 30858 - protein, 3652 aa, Mycobacterium smegmatis
MVSAEHPIEPTPSFAIIGYAARFPGAASAEEYWALLRDGREAISDVPKDRWDIEEFFDPDPSTPGKVVTRRAGFVDDVTGFDAPFFGMSAREVRLMDPQHRILMETAWRAVEHSGIAPTSLANSNTGVFVGLATHDYLGMASDELTYPEIEAYMAIGTSNAAAAGRISYRLGLQGPAVAVDTACSSSLVAIHQACQALRLNECDLALAGGANVLLTPATMITFSNAHMLAPDGRCKTFDAAADGYVRGEGCGVVVVKRLEDAVRDGDRIRAVIRGSAINQDGASGGLTVPNGVAQQRVIADALKRAGLRPADVGYLEAHGTGTSLGDPIEAQAAGEVLGAGRAPEEPLLIGSAKTNIGHLEAAAGIAGVIKVVMALENETLPKHLNFETPSPHIPWERLPIEVVRETVPWQRNGKPRIAGVSSFGFAGTNAHVILEEAPAVGTPATTEPVEDPRRYSVLPLSARTPEALVRLAGEYRDWLRAHPQARLADVSHTAGTARAHLEQRAALVVNSRESAIELLGALADDRPAPGLVRGESHEAPKTAWLFTGQGSQYPGMARELFDTEPVFAETVRKCAEAVADILEKPLLDVIFDADELDGDTESPLRHTTYAQPALFAVELGLARLWQSWGFEPDVVVGHSVGQYSAACVAGVFDVEDGARLIAERGRLFGSLPAGGRMAAVFTAPERAERLTDEYPSLSVAAYNGANTVLSGPAKDLESAVATLVADGVRCDWLDTSHAFHSALLDPILDDFESFAQKLEYREPQRILIDNRTGSALGRSTRLDGAYWRRHARQPVEFAKSVRTLADMNCRVLLEIGPRPVLTATALAAWPDPATTPQVLASLRPTTADHRQITEAVAAAYAAGHLPDFRAFRQPDARKLDLPTYPFEHRQFWFSDNRAIDRDTQTASAGSVTPHRTQAVRLLEDGQIEELAALIDGETVDEQTLRVLNKLAARHNQQRSTHVDPDARYEIRWDAIASAAASTGAAADWILVGDDTAAVLEFADALTAGGHRHQIVALPGSDADEAQLVDTLRAASAGELYVVHIAAGDGAAAPMRDLLRVQHRTLGGLRRLFRAANDAELRSPIWLVTRDGQRVTDTDTVVPEQSCLWGFGRAAALELPHIWGGLADLSGADTEWPRLIARITSPRDGEDQIALRGDAVYAPRLVRRTGEPSDTPLPVREDRTYLVTGGLGAIGLEVAGYLASHGAGHVVLTSRREPGDDARRRLDGLREQYACDVRVITADVADAHDVARLMTTVAAELPPLAGIVHAAGEIGTTPLSGLDDAEVDRVFAGKVWGAWHLSEALTDLRTDLDFFVSTSSIASVWGGFGQTAYGAANAFLDGLAWRLRERGVTAVSVNFGPWAAGMADAESRARLEQRGVRTLSPAEALAGMADVVAGPVQGVVAKIDWSRFLPLYQQAGRRAFLSELESELPAAATGAAAPATVPGKPPLVEQLTKAPVQQRKSLITNYLRNAVAEVTRVDADEIRDEAGFFDLGMDSLMAVELRRRIEQGVGKDIPVTLVMDHPRLSDAADYLLVEVLGLGEQTNVRQASTVTARTDDPIAVVAVSCRFPGAPDPESFWELLAGGVDAIREVPEDRWDIDEFYDPDPDTPGKTYTRFGGFLDGIDGFDPEFFGISPREAVWIEPQQRLMLETVWEGLERAGYAPSDLRGSRTGVFTGVAANEYAHLLSAESIDKIEPHFITGNALNAISGRVAFALGFEGPAVAVDTACSSALVAVHQACQALQSGDCDLALAGGVNVLLSPVTVVAASRARMLSPVGRCKTFDASADGYVRSEGCGVLVLKRLSDAVRDGDRVCAVIPASSVNQDGASSGLTVPNGGAQQRLIEATLARAGLSGADVDYLEAHGTGTPLGDPIEVQAAAAAYGAGRDADRPLLMGSVKTNIGHTESASGAAGLIKVVLSLQHGVLPQSLHFENPSPHIPWDALPVRVIDEPVPWQTNGRVRRAGVSSFGFTGTNAHVLVEEAPPQLHTADAAPVEPAATAEAGTDDSPQVLALSARSPEALVELARRYDDWLSATPGLDIADVCHTAGVGRSHFEYRAALVVDSVERAREGLAALAEGRTPAGVVRGEHVHRPTTAWLFTGQGSQYPGMARELFDTQPVFAQTVRQCAEAVADMLPRPLLDVLFATDRETADLLQHTSFAQPALFAVEMGLARLWQSWAIEPDVVLGHSVGQYAAACVAGVFSLDDGARLMAERGRMFGSLPEGGRMVAVFADAEHVEQVAGEFPRVSVGAYNGPNTVLSGPGEDLEEIVERFEDEGIRCTWLATSHAFHSELLDPVLDEFEAYAAQFQFAAPTLPLVCNRTGAVLTGQTPLDAQYWRRHSRQPVQFAESVRTVAALGCSVLMEIGPQPVLTGAAVQVWPEHMAAPRAVASLRKGVADRRQIADALASAYVGGHRPDFAAVHRQPRRPVELPTYPFQRRRFWPKASSIAVDGGTAASGILGSGKDLASGDTIYTSRLSVKSQPWLADHVIYGTVVVPGATYAAMALAAVGTPARLKDVFFYEPIILPEKASREVQLTLHPADGGSVLSFQIHSRPYGERGADWSLNAEGTVDTAGSDPDAAADEQSDPVDEVIERLERMRPQDLFETFADLELAWGPTWSGSLKSLWLGDGEAVGDILVGAELAEQLGSEPMHPVLMDLCTGVAFPAFPALLAAEQGVNDLFLPLRYGQVTLAEKMPRRFYCRARWHRSALDSETQVFELEFVDLGGRALGGIREFTVKRAPREALLRGLGGDATRLLYTLGWHEVPPPPSADDAVGTWLIAGFDELAAKVPGCVPIDRNTDLQVLGEVLSQAHARGAGFSGVVWRCATPGRKESGSASAESARLEAEITNLLSAVHAAQGPSVKLPGGLWIVTEHGVACESGEPVDPVQAALWGFGRTTINEEPALHCRLVDCDGSSEAVDLLAALLAAPGIQEPEIAVRQGKLLASRLLPWARSGHLTLPRGGDFVLAPTERGAIDNLRLTETDVPEPDEGYVQVRVEAAGLNFRDVLNVLGLYPGDPGPIGGDFAGTVTQLGAGVSGLEIGQRVYGSMQGAFASRFNVPAQFLAPIPDGIGAVEAATIPAAALTVRLAFDWAQLKPGDKVLIHAASGGVGLAAIQMAQQSGAEVFATASTFKRSTLRRLGVKYVYDSRTTDFADQILADTNGAGVDVVLNSLTSAGFVEATLKATAQGGRFAEIAKRDIWSHEQMAEARPDIAYEIVALDTVMFTEPDRIRDLLTEVSDGMARGEWTPLPAEIYPITEARSAFRRMQQARHIGKIVLQVPKPLQPQQDRSYLITGGLGAIGLHTAAYLAQLGAGDIVLTSRRDPDESAQRAIDEITERHKCRIHTYAADVGDEAQVADLLARIRAELPPLAGIAHLAGVLDDALLSAQNPERFRTTLAPKAYGASHLDRLTRDDDLDFFIVSSSVSSLFGSPGQANYATANAMLDGLVAKRRAQGLVATGINFGPWGQGGMASSEAATANITAQGLIPLDPSAALHALAEVIANGSGQATVLKANWQRAAKVLGSARPPILDLVLPSAAGEATGDSELLKQLMEIPIPQRAGFVTEFLQREVQNFLRLASPPAASSRFLDLGTDSLMAIELRNRLHSQFGGKFTINATAVFDYPTIGGLAEYLVGQLPDAEAPETA

SEQ ID NO: 30859 - protein, 582 aa, Ashbya gossypii ATCC 10895
MIHQKDVEKAASELSNTSAVQRVLKKRSSVLEESRLLEESRTNKRGLVRRCIDSFKPPVDGSFDPDNLKRTLKSRHLIMIAIGGSIGTGLFIGSGKALATGGPLAVLIGWTLAGTQMVGTIHGLGEVTVRFPVVGAFANYSTRFLDPSVSFVVSSIYVLQWFFVLPLEIIASAITMEFWTTSVDPVVWVAVFYTLIISINLFGVRWFGKPKFVFSVIKMVPICGFIILCLVLILGGGPTHEFIGARYWHDPGALANGFKGVAAVMVTASYSLGGSEMTCLASGETDPKEIPHAIKQIFWRIIFFFLVSLTLVGFLVPYTNDQLLGGSNVNNSPFVIAIKMHNIRVLPHIINGVILVSILSVGNSCIFASSRTLCSMAHQGLLPRIFGYVDRAGRPLTGILTNSLFGLLAFLVKSSSTGTVFTWLMAVAGLATAVVWLSINVSHIRFRLAMKAQGKSLDELEFVSAVGMWGSVYSGVMNVVVLVAQFYVSLWPIEGWKDPRGRTEAFFQNYLCALILLFMFVAHKIYYRSTTGQWWKILPLAEIDLESGRKNIDIEVVKHEVAARKKYISEQRWYIRYYHYWC

SEQ ID NO: 30860 - protein, 159 aa, Salmonella enterica
VAGASLGLWEICIIWGLGISLAVYLTAGISGGHLNPAVTIALWLFACFPKQKVLPYIIAQFAGAFGGALLAYVLYSSLFTEFETAHHMVRGSVESLQLASIFSTYPAAALNVWQAALVEVVITSILMGMIMALTDDGNGIPKGPLAPLLIGILVAVIGA

SEQ ID NO: 30861 - protein, 307 aa, Arabidopsis thaliana
  misc_feature (133)..(133): Xaa can be any naturally occurring amino acid
  misc_feature (147)..(147): Xaa can be any naturally occurring amino acid
  unsure (1)..(307): unsure at all Xaa locations
MATVANFLAKPISTVVPRPSSAVASTSSFVFFNHKTNPLFRRKNLPKRLFSAVKIKAGAASPGKVGTPPANDEKVQKIHSGEEFDVALKNAKSKLVVAEFATSKSDQSNKIYPFMVELSRTCNDVVFLLVMGXDESDKTRELCQNSXRREKIEKVPHFSFYKSMEKIHEEEGIEPDQLMGDVLYYGDNHSAVVQLHGRPDVEKLIDENRTGGKLIVLDVGLKHCGPCVKVYPTVLKLSRSMSETVVFARMNGDENDSCMEFLKDMNVIEVPTFLFIRDGEIRGRYVGSGKGELIGEILRYSGVRVTY

SEQ ID NO: 30862 - protein, 173 aa, Apium graveolens
GCLHLDQVPALEREMIKRIKEQGLDIKPRILIVTRLLPDAVGTTCNQRLEKVFGAEHAHILRVPFRTEKGILRKWISRFEVWPYIETFTEDVAKEIALELQAKPDLIIGNYSEGNLVASLLAHKLGVTQCTIAHALEKTKYPDSDIYWEKFDKKHHFSSQFTADLIAMNHTDF

SEQ ID NO: 30863 - protein, 749 aa, Streptococcus suis 89/1591
MTTTIIGFPRIGEHRELKFITEKYFRNEIPQEELLEVAKDLRAKHWNIVKEAGITEIPSNDFSHYDNVLDAAVLFNIVPKAVQNLDLTDLEKYFALARGYQGEKGDVRARPMKKWFHTNYHYIVPAIEKDTEIKLAGHKIFDEFQEAKNLGITTRPVLIGPFTLLQLTDFEEGLTATDFADSLVAAYGQVFEKLAELGAEKIQLDEPSLVKDLTAEEKALFLRIYQTLLADKKGLQVLIQTYFGDVRDIYTELTSLPVDAIGLDFVEGKETAALVATGFPANKTLYAGIVNGKNIWRNNYEKSLAVLDAIPAEHVVITTSCSLLHVPFTTANEEFEPAILNHFAFAVEKLSELRDLDAIRNSQGEVALTANKELFALERVGRDAALADRLAGLTDADYTRLPVFAEREAIQREKLNLPLLPTTTIGSFPQTKEVRSTRLAFRKGNISEEEYDTFVKAQTDEWIAWQEEVDFDVLVHGEFERNDMVEYFGENLSGYLFSKNGWVQSYGMRGVKPPIIWGDVTRLNPITVKWSSYAQSRTNKPVKGMLTGPVTILNWSFPREDISIKESTLQIALAIKEEVLDLEAAGIKIIQIDEAALREKLPLRRSDWYSEYLDWAIPAFRLVHSTVAPETQIHTHMCYSEFTDIIPAIDNMDADVISFEASRSNLVILDELKAKNFQTQVGPGVYDIHSPRVPAVDEIAHTIQAILAKVPKEKVWINPDCGLKTRGESETKASLIHLTQAAKTARKEL

SEQ ID NO: 30864 - protein, 316 aa, Oryza sativa (japonica cultivar-group)
MATIVVPPVTPSPAEDADALLKAFQGWGTDEQAVIGVLAHRDATQRKQIRLTYEENYNENLIQRLQSELSGDLERAMYHWVLDPVERQAVMVNTATKCIHEDYAVIVEIACTNSSSELLAVKRTYHVLYKCSLEEDVAARATGNLRSLLLALVSTYRYDGDEVNDALAKSEAKILHETVTNGDTDHGELIRIVGTRSRAQLNATFSWFRDERGTSITKALQHGADPTGYSHALRTALRCISDANKYFVKVLRNAMHKSGTNEDSLTRVIVLHAEKDLKGIKDAFQKRASVALEKAIGNDTSGDYKSFLMALLGSGI

SEQ ID NO: 30865 - protein, 340 aa, Streptococcus suis 89/1591
MTVTMQYEKDVTVAALDGKRIAVIGYGSQGHAHAQNLRDTGHDVIIGVRAGKSFDKAKEDGFETFEVAEAAKQADVIMILAPDEIQADLYENEVAPNLEAGNALGFAHGFNVHFEFIKVPADVDVFMCAPKGPGHLVRRTFEEGFGVPALYAVYQDATGNAKHIAMDWAKGVGSARVGLLETTFKEETEEDLFGEQAVLCGGLTALMQAGFEVLTEAGYAPELAYFEVLHEMKLIVDLVYEGGFKKMRQSISNTAEFGDYVSGPRVITDQVKENMKAVLADIQSGKFANDFVNDYKAGRPRMEAYRKEAENLEIEKVGAELRKAMPFVGRNDDDAFKIYN

SEQ ID NO: 30866 - protein, 298 aa, Salmonella enterica subsp. enterica serovar Typhi Ty2
MVRIACVGITVMDRIYYVEGLPTEGGKYVAKRYTEVGGGPAATAAVAAAKLGAQVDFIGRVGDDDTGNSLLAELESLGVNTRYTRRYTQAMSSQSAIMVDAKGERIIVNYPSPDLLPDADWLNDIDFSQWDVVLADVRWHDGAKQAFTLARQAGVMTVLDGDITPQDISELVALSDHAAFSEPGLARLTGMSEAIDALKKAQMLTNGHVYVTRGSEGCNWLEKAAVRHQPGFTVEVVDTTGAGDVFHGALAFGLASGYAIEEAVRFASGVAALKCTRPGGRAGIPDCEQTRSFLSLFV

SEQ ID NO: 30867 - protein, 477 aa, Oryza sativa
PIGSAPMAAAAVLLAAILLALSPLPMSLSAGGGGGGDTGTAEAAADRITALPGQPRVNFSMYSGYVTVDAAAGRALFYWLIEAADPASAPLVLWLNGGPGCSSVGYGASEELGAFRINPDGRSLYLNPYPWNRVANMLFLDSPAGVGYSYSNTTSDLFTAGDNKTAHDSYAFLVNWLERFPQYKYRDFYIAGESYGGHYVPQLSQLVYRNNKDVEKPILNFKGFMVGNAVIDDYHDYVGTFEYWWTHGLISDDTYQKLQVACDFESSAHASEACNKIYEVAEAEQGNIDAYSIYTPTCKKTSFLKRRLIRGNSPWLPRGYDPCTEKYSTKYYNLPEVQKAFHANVTGIPYAWTTCSDDLFYYWKDSPRSMLPIYRELIAAGLRIWVFSGDADSVVPLTATRYSIDALYLPTVTNWYPWYDDEEVAGWCQVYQGLTLVTIRGAGHEVPLHRPRQALKLFEHFLQDKPMPQPVHSIQSF

SEQ ID NO: 30868 - protein, 1436 aa, Ustilago maydis 521
MSIGSGEASSDSIQVHPGPAAAGSTPSANPEPLPHTPTPPLPSKQQQSALISSQQQQIQHHQQGQLPSPQDASSTSIAPVTTSADPAPSTPATTPPTDQAPQRPPPPASAVSLHAAAAAANRQAGAQSNSTSQLAPSSASNGKTGADSAPKKAAKPKTTKAPGATKPKQKRKANQAGVNDEVVYRPALSTAGGTIGAAPDSTIPAMLSAAGGGRKAMPELVLPFQLPFVDVRPEMPMLDNASVQAAMAMGASETSSLDTGSDSDDYSVLSDNSDLDQEAEESRKDARRRKREPATIEESLVLLQSLRQSRLSHLSSLLTPFSQRVRSGMIYPNVLPLSLLHGLNPRDPHVLIQLGRADIHVGPHVFLKTKFWEVRPDYELPPTMNTLGGMHAPGPYATLSVYPRLPVPQPMAQQLPQPQPAKLPLPRAAPSPVAPQPSVPLARPPIAPNKSPVARPATTSTPAATASNATMPATLNPPASRQISLTTSAVLPTPTLPATPMQSSTAVRPVVTLKAAIPAPATPTASTPMVKLPALSAGIASTPTTASATSLSTAPKVSIPVAASPPVSGSTTPTSASSDSKPATSITTSTATPLAPKPMSVSVSLPRPPMTTPSLPRPPSINQNNVPSSVNPATSSSSSAAGSAAPRKALSPVSAASAEQGGTGANANVNATPSAASPLAAKVAAAPFETSTSTNAASATVSSQGSTAAKPAAPTNTNANTASPQAPSRPSGVPPPPAIDAVLVSRVNATAALNPELQELLHIAASGKANPNQLKALGVWIQAITAQLRQDEARNAAAAGNTAAASGSRAGNTASTTAEGKKSKKSKVDEAAKASKKQAKIEEREAKKKAKAEAKAKAQADKQQAQKQQKQKQAHAQPQQTPQQQKTQQTQHQPPVSNKLRHPPPGWPTDGPPKPPVIIVEFRENPSMRFILPLWKCLVERTEGVERPSSPKVKKERRSFFDNDSDDEDSPRIEPELKLSFFAPSLGSDAADGSGLRELEEELKRKAAEEAKLNAASAASTGGQGDAARSSASPEAASAAVASDKAVDDSTSSQEKKKKGGPSDGSSKKGSKATNQASSDASLSSDYSQSKKHEVYPLTWSIKGGVTESLWEAFGRVPGTMTCQPVKREPEIELEPDVAEFLVPEIRYHLLDLPMEEIKIHKETTDTFVDLYSQMPDRRFILPRVAPALLPAGLEDHLHDRFAVRTQCVQDRPIVKRKAGAREDDVSFSYEGIGLTVIGPNGVKTEPGATAPPKPPKRKRHVATHNPDGSIKSCGACGKTKTPMWRRGPKGPSQLCNACGARWKAGRLVVPEVAPAPIIEAEEDKSKEEEARKEDEVQASMHGSNALVIPQSSGADDASYTVMASNGLVGAAAFGDHFSLSSKDESGIDFGASHLSRGSSSPSPFIRSPIPEDDVMPASVDPSMLSGSNRVFSHRR

SEQ ID NO: 30869 - protein, 227 aa, Ralstonia metallidurans CH34
MTAANQAARFDCVIFDCDGVLVDSEPIVHRVLNRVLNEIGIEITLEESMKWFLGRAVRDELGNIEARLGKPLPRNFLSEWFVRRDAALIEELEAVPHVRQAIEAVKARGLPVCVASGADRIKVKLQLNHTQLVELFTDDAAREHIFSATEVEHSKPAPDVYLLAARTMGVDPSRCAVIEDSPTGATAGVAAGMTVFGYAASTNADALRAVGVTTIFTDMRELPGLIG

SEQ ID NO: 30870 - protein, 376 aa, Corynebacterium glutamicum ATCC 13032
MTLSERKLTTTAKILPHPLNAWYVAAWDYEVTSKKPMARTIANKPLALYRTKDGRAVALADACWHRLAPLSKGKLVGTDGIQCPYHGLEYNSAGRCMKMPAQETLNPSAAVNSYPVVEAHRFVWVWLGDPTLADPTQVPDMHQMSHPEWAGDGRTISADCNYQLVLDNLMDLTHEEFVHSSSIGQDELSESEFVVTHTEDSVTVTRWMHDIDAPPFWQKNMNDKFPGFEGKVDRWQIIHYYYPSTICIDVGVAKAGTGAQEGDRSQGVNGYVMNTITPDSDRSSHYFWAFMRNYRLESQTITTQLRDGVSGVFKEDEDMLTAQQDAIDANTDYEFYSLNIDAGGMWVRRILEEALSKEGRLDIPTTFPRATPKPEA

SEQ ID NO: 30871 - protein, 139 aa, Zea mays
MASVSAIGVLKVPPASTSNSTGKATEAVPTRTLSFSSSVTSSDDKISLKSTVSRLCKSVVRRNPIIVSPKAVSDSQNSQTCLDPDASSSVLGIILGGGAGTRLYPLTKKRAKPAVPLGANYRLIDIPVSNCLNSNISQI

SEQ ID NO: 30872 - protein, 664 aa, Yersinia pseudotuberculosis IP 32953
MSSRKELANAIRALSMDAVQKAKSGHPGAPMGMADIAEVLWRDYLNHNPTNPHWADRDRFVLSNGHGSMLIYSLLHLTGYDLPMEELKNFRQLHSKTPGHPEYGYTAGVETTTGPLGQGIANAVGFAIAERTLGAQFNRPGHDIVDHHTYAFMGDGCMMEGISHEVCSLAGTMKLGKLTAFYDDNGISIDGHVEGWFTDDTAARFEAYGWHVVRGVDGHNADAIKAAIEEAHQVTDKPSLLMCKTIIGFGSPNKAGTHDSHGAPLGEAEVAATREALGWKYPAFEIPQDIYAAWDAKEAGKAKEAAWNEKFAAYAKAYPELAAEFKRRVSGELPANWAVESKKFIEQLQANPANIASRKASQNALEAFGKVLPEFLGGSADLAPSNLTIWSGSKSLSDDLAGNYIHYGVREFGMSAIMNGIALHGGFIPYGATFLMFVEYARNAVRMAALMKIRSVFVYTHDSIGLGEDGPTHQPVEQMASLRVTPNMSTWRPCDQVESAVAWQYALERKDGPSALIFSRQNLAQQPRTAEQLANIAKGGYVLKDCAGQPELILIATGSEVELAVAAADQLTATGRKVRVVSMPSTDAFDKQDAAYRESVLPSAVSARVAVEAGIADYWYKYVGLNGAVVGMTTFGESAPAELLFKEFGFTVENVVAKAQALLK

SEQ ID NO: 30873 - protein, 313 aa, Heteromeles arbutifolia
GGLGDVLGGLPPAMAANGHRVMTISPRYDQYKDAWDTEVTVELKVGDKTETVRFFHCYKRGVDRVFVDHPLFLERVWGKTASKVYGPVAGVDFKDNQLRFSLLCQAALEAPRVLNLNSSKYFSGPYGEEVVFIANDWHTALLPCYLKAVYKARGVYGIAKVAFCIHNIAYQGRFAFADFALLNLPDEFKSSFDFIDGYEKPVKGRKINWMKAGILESDKLLTVSPYYAEELVSAVEKGGELDNIIRKTGIFGIVNGMDVQEWNPSADKYTTIKYDASTVAYAKPLLKETLQAEVGLPVDRDIPVIGFIGRLEE

SEQ ID NO: 30874 - protein, 406 aa, Ralstonia metallidurans CH34
MLLDHLKRAAAERDAQSLTRRRRIAHTACAPHQSVGGIDATPTPLLTFCSNDYLGLANHGSIAHALAEGAHRYGAGSGASHLVSGHSLAHAQLERELARWLAPYIPQAQALYFCTGYMANLAVLTSLGATGATLFCESLNHASLIDGARLARADVQRYPHGDAGALDALLAASTTALKLIVTDSVFSMDGDIAPLAALLEVAERHDAWIIVDDAHGFGVLGENGHGVLEHLGLRSERLIYIGTLGKAAGVAGAFVAAHETIVEHLINTARPYIYTTAAPPAVAHALLTSLEIIAGEEGRSRRAHLTGLIAQLRAGLAVLAAQAGWSLGESETAIQPLIVGDNAAALALSAALEAEGIRVGAIRPPTVPAGTARLRITLSASHSAADVARLLETIARAAPQLHKEAA

SEQ ID NO: 30875 - protein, 75 aa, Passiflora amethystina
GTNGEVMPGQWEYQVGPSVGIDAGDHIWCSRYILERITEQAGVVLTLDPKPIEGDWNGAGCHTNYSTSSMREDGG

SEQ ID NO: 30876 - protein, 374 aa, Triticum aestivum
  misc_feature (184)..(184): Xaa can be any naturally occurring amino acid
  misc_feature (320)..(320): Xaa can be any naturally occurring amino acid
  misc_feature (322)..(322): Xaa can be any naturally occurring amino acid
  misc_feature (325)..(326): Xaa can be any naturally occurring amino acid
  misc_feature (332)..(332): Xaa can be any naturally occurring amino acid
  misc_feature (335)..(335): Xaa can be any naturally occurring amino acid
  misc_feature (340)..(340): Xaa can be any naturally occurring amino acid
  misc_feature (345)..(345): Xaa can be any naturally occurring amino acid
  misc_feature (355)..(355): Xaa can be any naturally occurring amino acid
  unsure (1)..(374): unsure at all Xaa locations
MQIFVKTLTGKTITLEVESSDTIDNVKAKIQDKEGIPPDQQRLIFAGKQLEDGRTLADYNIQKESTLHLVLRLRGGMQIFVKTLTGKTITLEVESSDTIDNVKAKIQDKEGIPPDQQRLIFAGKQLEDGRTLADYNIQKESTLHLVLRLRGGMQIFVKTLTGKTITLEVESSDTIDNVKGKIQXDRRGIPPGQQRLIFGGQQLEGWPHPCGFTLQKESTLTLSSRLRGGMQIFVKTLTGKTITLEVESSDTIDNVKAKIQDKEGIPPDQQRLIFAGKQLEDGRTLADYNIQKESTLHLVLKLRGGMQDICEDLTGKDITXGXGSXXHIDNVXAKXQDKEXIPPGXERLIFAGNSXGWRTWGAKLHLTWCPSPWQ

SEQ ID NO: 30877 - protein, 313 aa, Lindleya mespiloides
GGLGDVLGGLPPAMAANGHRVMTISPRYDQYKDAWDTEITVELKVGDKTETVRFFHCYKRGVDRVFVDHPLFLEKVWGKTASKIYGPVAGVDFKDNQLRFSLLCQAALEAPRVLNLNSSKHFSRPYGEEVVFIANDWHTALLPCYLKARYKTKGIYKTAKVAFCIHNIAYQGRFAFADFALLNLPDEFKSSFDFIDGYDKPVKGRKINWMKAGILESEIVLTVSPYYAKELVSSVEKGVELDNIIRITGICGIVNGMDVQEWNPLTDKYTTVKYDASAVADAKPLLKEALQAEVGLPVDRDIPVIGFIGRLEE

SEQ ID NO: 30878 - protein, 313 aa, Lindleya mespiloides
GGLGDVLGGLPPAMAANGHRVMTVSPRYDQYKDAWDTSVQVEIEVGGRVETVRFFHCYKRGVDRVFVDHPLFLERVWGKTGSKIYGPRAGVDYKDNQFRFSLLCQAALEAPRVLNLNSNKYFSGPYGDDVVFIANDWHTALLPCYLKTIYEPKGIYENAKVAFCIHNIAYQGRFPFSDFSHLDLPDNLKGSFDFFDGYNKPVKGRKINWMKAGILESDRVVTVSPYYAQELVSGEDKGVELDNIIRKTGITGIVNGMDVQEWNPATDKYLDIKYDNTTVLDAKPLLKESLQAEVGLPVDRNIPVIGFIGRLEE

SEQ ID NO: 30879 - protein, 484 aa, Lactobacillus plantarum
MTEKLTTETGQPWANNEHSQTAGARGPVLMQDYNLLEKLAHFDRERIPERVVHAKGAGAKGFFELENDMGEYTKADLFNGVGKKTPVILRFSQVAGEKGYPDTVRDVRGFALKFYTQQGNYDLVGNNTPVFFVNDPLKFPDFIHSQKRDPKTNRRTQNMQWDFWAHSPESLHQVTYLMGDRGLPASYRTMNGYGSHTFKWVNQNGEQFWVKYHFISDQGVKNMTAQAAEKAMSQDLDYLQDDLYDAIQEKNYPSWTMYVQILPYEEGLNYKWDIFDVTKVISHKDYPLIKVGKLTLNENPTNNFTDIEEAAMSPANFVPGIEPSPDKLLQGRLFSYKDAQRYRLGANFEDLPVNKPVVPVHNYERDGYMKINNQGAEVNYEPNALHGPEEVPDAALSPDSVRGETRAQPYRYQVDYTTQAGDLYRLMSEPEQERLINTIKDALGQVTLPGVKELEIKQFYEADKNYGTRVANALGMNIADIISD

SEQ ID NO: 30880 - protein, 313 aa, Lindleya mespiloides
GGLGDVLGGLPPAMAANGHRVMTVSPRYDQYKDAWDTSVLVEIEVGGRVETVRFFHCYKRGVDRVFVDHPLFLEKVWGKTGSKIYGPRTGLDYADNQFRFSLLCQAALEAPRVLNLNSNKYFSGPYGDDVVFIANDWHTALLPCYLKTIYRPKGIYKNAKVAFCIHNIAYQGRFPFSEFSLLDLPDTLKGSFDFIDGYDKPVKGRKINWMKAGVLESDRVVTVSPYYAQELVSGEDKGVELDNIIRKTGITGIVNGMDVQEWNPATDKYLDIKYDNTTVLDAKPLLKEALQAEVGLPVDRNIPVIGFIGRLEE

SEQ ID NO: 30881 - protein, 671 aa, Ehrlichia ruminantium str. Welgevonden
MSQKYSNMIAMANAVRVLSIDAIQKAASGHPGMPLGMADVGTMLFAKFLKFNPKDPNWFDRDRFVLSNGHGSMLLYSILYFLGCLDIEEIKKFRQIHSLTPGHPEYGCTPGVDATTGPLGQGLASAVGMAIAEKILSEKFGADIVSHNTYVMVGDGCLMEGISHEAASLAGHLQLDKLIVLFDDNNVSIDGPISLSVSDNVKGRFLSYGWDVDEIDGHDFSQIESSIKNAKNSKKPSLICCKTIIGKTIPSKENTCDIHSWPVTEEDIIVMKKRLGWAYKPFEFPEEILQLWQDIACNSEEEYKLWVERVSEYGKTSQDFMDVMADGVSNEVFLNLKSLKEELCSLNLNEATRKSSGRVLDVIMGSTGKLIGGSADLSNSNNTKPKFTSVINKDNFSGSYLHYGVREHAMAACMNGMALHKGVIPYGGTFLIFSDYCRPAIRLSALMKRQVIYIMTHDSIGVGEDGPTHQPVEHLPSLRLIPNLYVFRPADAIEVLECWEIALKLIDAPSVLILSRQNVKCVRSTYVAENMSNKGAYIIREYKNDLDVTIFATGSEVEIALKASDILIGKGLGVRVVSVPCWELFYKQDKKYIISLLNNKSIKAAVEAANSFGWCKYIGEDGIFVGLEDFGISAPFKDLYKYFGITPENLVDKILSKLRINSNYESNVTAD

SEQ ID NO: 30882 - protein, 520 aa, Ustilago maydis
MTASVSSNQTSLSRRSSHNRHSRISSGSSSASSGSSRPRSSRGRSTSPINPTKQEAAVQMAAKRASVSSVGSTISSSYSTLTADSKVADTTAATSTVSASASSNKVPAGLRAMLFEEEYQEEAIEHMHHMELQTVAAVELMDVQPELKWFMRPYLVDFLIEIHQTFRLPSRNTFLTMNIVDRYVSKRIVYKRHYQLVRCAALLIAAKFEDAKDRVLSVKELSQMCCNAYDESAFAQMEGHVLSTIGWTLGHPTAEAWLRIESVRGGEDLKTVNLARFFLEVSLFHRDFISLKSSALTTGALILARFICGLPQSTQLSLNAEAAKAAHMLDAYVWENLQDLSLILIKKYSYAYFSSASTVACEWYRARVAAAKSSPPSGLLPAQALTRNAGAVAQEVDDDDSMCSQPTTPASSVQSTPSRSMDEDEDEDEEDDMPVTPLSLYSLHDPLVAAANAAGLPVPMPSSRASAQDKERRLSSSSASTEKPMPSSKSASTHLTVQQPMLGARKPLGNVVWNVNVQQF

SEQ ID NO: 30883 - protein, 612 aa, Carboxydothermus hydrogenoformans Z-2901
MCGIAGMISFSKDLSPFVPLLEKMTQSLTHRGPDALGIWHSENIILGHRRLAVIDPERGRQPMIRTFGDWQYVIVYNGELYNTKELRDELEARGHHFYTTCDTEVLLVSYIEWGKECLSKLNGIFAFAIFDEKENQLFLARDRLGVKPLFYALVNDTLIFASEIKTLLLHPDIPSRLSTDGLKEVLFLGPARTPGMGVFAHISELLPGDYAVFNPEGLFIKPYWRLTSNPHPDDFPTTVKKTRELLEDAVIRQLVSDVPICTLLSGGLDSTVITAFAASHLHSRGETLNTFSVDYAENELYFTESAFQPNCDAMFIPLVAKEFNTLHRNIVLTQEELFEALFPALIARDLPGMVDIDSSLWLFSREIKKEATVGLSGECADEIFGGYPWFFRKEALEAKTFPWALSLDRRKTLFRQDLIAELKPDEYVQKRYHEALEEIPEISGLSPEEKRLREITYLTLTRWMPILLDRKDRMTMAWGLEVRVPYCDHRLVEYLWNVPWHFKTAGGQEKGLLRQAVADLIPDYILKRKKSPYPKTHHPLYTKLVREALTQILAENSSPINFLIDENEVRKLITNPSPPNARPWFGQLMGDTQIMAYLIQLNYWFKKYHISF

SEQ ID NO: 30884 - protein, 227 aa, Plantago major
MVESCTKMNFEETELRLGLPGGAAAAGEKTTNNNNYGKRGYEQTVDLKLNLSSKDLPNQTDLAENKKNDQPVKPPAKAQVVGWPPVRNFRKNVMAVQKTEKAEESGGSAAFVKVSMDGAPYLRKVDLKMYKTYEELSDALGKMFSSFTMSKCDAQGMMDFMNESKLMDLLNGSDYVPTYEDKDGDWMLVGDVPWEMFVGSCKRLRIMKGTEAIGLAPRAMEKCKSRS

SEQ ID NO: 30885 - protein, 313 aa, Lyonothamnus floribundus subsp. asplenifolius
GGLGDVLGGLPPAMAANGHRVMTVSPRYDQYKDAWDTSVLVELEVGGKIETVRFFHCYKRGVDRVFVDHPLFLERVWGKTASKIYGPRAGVDYKDNQLRFSLLCQAALEAPRVLNLDSNKYFSGPYGEDVVFIANDWHTALLPCYLKTIYKPKGIYKNAKVAFCIHNMAYQGRFSFSDFSLLDLPDQLRGSFDFIDGYNKPVKGRKINWMKAGILESDRVVTVSPYYAQELVSGEDKGVELDNIIRKTGITGIVNGMDVQEWNPATDKYLDVKYDNTTVLDAKPLLKEALQAEVGLPVDRDIPLIGFIGRLEE

SEQ ID NO: 30886 - protein, 260 aa, Mycobacterium tuberculosis CDC1551
MSGRLIGKVALVSGGARGMGASHVRAMVAEGAKVVFGDILDEEGKAVAAELADAARYVHLDVTQPAQWTAAVDTAVTAFGGLHVLVNNAGILNIGTIEDYALTEWQRILDVNLTGVFLGIRAVVKPMKEAGRGSIINISSIEGLAGTVACHGYTATKFAVRGLTKSTALELGPGGIRVNSIHPGLVKTPMTDWVPEDIFQTALGRAAEPVEVSNLVVYLASDESSYSTGAEFVVDGGTVAGLAHNDFGAVEVSSQPEWVT

SEQ ID NO: 30887 - protein, 385 aa, Arabidopsis thaliana
MEKRVEKRRIVLVPLPLLGHFTPMMQLGQALILKGFSIIVPQGEFNRVNSSQKFPAEELKLPNFIFSTQTATHKVCCNVLSKLNAKKYLIDMEEHDVQNKVVENMHPLRYKDLPTATFGELEPFLELCRDVVNKRTASAVIINTVTCLESSSLTRLQQELQIPVYPLGPLHITDSSTGFTVLQEDRSCVEWLNKQKPRSVIYISLGSMVLMETKEMLEMAWGMLNSNQPFLWVIRPGSVSGSEGIESLPEEVSKMVLEKGYIVKWAPQIEVLGHPSVGGFWSHCGWNSTLESIVEGVPMICRPYQGEQMLNAIYLESVWRIGIQVGGELERGAVERAVKRLIVDKEGASMRERTLVLKEKLKASIRGGGSSCNALDELVKHLKTE

SEQ ID NO: 30888 - protein, 229 aa, Plantago major
MADQYTTTHQETTKFEEPCETPAPAVEASDRGLFGFGKKDEEKKCEEEVIATEFDEKVKVCEEEKVEEPKHESLLQKLHRSDSSSSSSSEEEYIDDNGEKKKKKKLKDKIKEKISGDKKEEEKAEVKCEDTVVPIEKCDDVPEAEKKGLLEKIKDKLPGGNKKTEEVVAPPPPVTETQPLAECYGEPAAAPVEPEKEKKGFLEKIKEKIPGYHPKTEEEKEKEKEKEAC

SEQ ID NO: 30889 - protein, 339 aa, Bradyrhizobium japonicum USDA 110
MRVYYDRDADLNLIKGKKVAIVGYGSQGHAHALNLKDSGVKEVAIALRKDSSSVKKAEAAGFKVMDVAEAAKWADLVMMLTPDELQGDIYREHLHDNMKKGAALVFAHGLNVHFNLLDPRADLDVLMIAPKGPGHTVRSEYQRGGGVPCLIAIAKDVSGNAHDLGLSYASAVGGGRAGIIETTFKEECETDLFGEQVVLCGGLVELIKGGYETLVEAGYAPEMAYFECLHEVKLIVDLIYEGGIANMNYSISNTAEYGEYVTGPRIVTAETKAEMKRVLADIQGGKFARDWMLENKVNQTSFKATRAKLAAHPIEEVGAKLRDMMPWIKKGALVDKSKN

SEQ ID NO: 30890 - protein, 108 aa, Arabidopsis thaliana
MVRPRAAAGSRHGHGSHAFSCSFLKACYLCKRELSSDKDVYMYRGDQGFCSEECRWQQILVDEAREREAAAVMSNKELQRRAQARHHSPHRTPMPIRGRPPRKTLAVA

SEQ ID NO: 30891 - protein, 595 aa, Nitrosomonas europaea ATCC 19718
MSNHSSAPLIRLLRYGHAFRGRIWLATLFSILNKLFDLAPPVLIGMAVDIVVNQQSSVFARLGFPEVSTQLWILATITLIVWGFESIWEYLLKLCWRNLAQSIQHTLRLDAYDHVQKLELAYFEARSTGGMMAILNDDINQLERFLDVGANDLIQLLTTVITVGGMFIYLTPGVAWMALLPMPFVVAGSYLFQKRIAPRYMAVREQVSILNSYLSNNLGGIATIKSYTTEPYELRQIERESQIYQEKNQHAIALSAAFVPIIRMVIALGFSAIMIAAGLMAAGGELNVGAYSILVFMTQRLLWPLTRLGETLDLYQRAMASTHRVLDLLQAQPTITDGPQTLPAAQVSGEIIFDDISFNYERRASTLNHLSLTVHAGQTIALVGATGSGKSTIVKLLLRFYEPQQGRILLDGHDIRDLRLHDLRKSIGLVSQDVYLFHGTVYENIAYGSSGAHMEDVIAAARTAEAHDFIMELPDDYQTIVGERGQKLSGGQRQRISIARAVLKNPPVLVLDEATSAVDNETEAAIQRSLERITVGRTTIVIAHRLSTIRNAHCIYVLDKGEVVETGTHEALLARNGLYTNLWQVQTGEKMRAHG

SEQ ID NO: 30892 - protein, 109 aa, Plantago major
MSQTVELKVGMSCQGCVGAVKRVLGKMEGVESFDIDIEKQKVTVKGNVEKEAVLQTVSKTGKKTEFWPEEAAEPEAKITEAPAPVPEAKPTEAPAAEPESKPTEAVVTA

SEQ ID NO: 30893 - protein, 311 aa, Zea mays
REASPDHPSNKSLFAPAPTRTLSPSLPFPLPGSHSHPFRLPTQTAHELTATSHVPHPLVHVLLLPMSPPLELDYIGLSPPAAAAAAENDELKGTELRLGLPGSGSPDRRVVAATATTLDLLPAKGAKRGFSDEAPPPSPVATAGKGKKVAEEEYDEKKVAATPQPAAKAQVVGWPPVCNYRKNTMTTTQLEGSKEDGDAKQGQGFLYVKVSMDGAPYLRKIDLKTYKNYKDLSTALEKMFSGFSTGKDGSSEYRKDGEYVLTYEDKDGDWMLVGDVPWEMFAGSCRRLRIMKGSDAIGLAPRAADKSKNRN

SEQ ID NO: 30894 - protein, 114 aa, Salmonella enterica
ISGGHLNPAVTIALWLFACFPKQKVLPYIIAQFAGAFGGALLAYVLYSSLFTEFETAHHMVRGSVESLQLASIFSTYPAAALNVWQAALVKVVITSILMGMIMALTDDGNGIPK

SEQ ID NO: 30895 - protein, 294 aa, Chenopodium rubrum
MDQYEKVEKIGEGTYGVVYKARDKVTNETIALKKIRLEQEDEGVPSTAIREISLLKEMQHGNIVRLQDVVHSEKRLYLVFEYLDLDLKKHMDSCPDFAKDPRMIKRFLYQILRGIAYCHSHRVLHRDLKPQNLLIDRQTNALKLADFGLARAFGIPVRTFTHEVVTLWYRAPEILLGSRHYSTPVDVWSVGCIFAEMVNQKPLFPGDSEIDELFKIFRTLGTPNEETWPGVTSLPDFKSSFPKWISKDLSAVVPNLDPAGIDLLNKMLCLDPSKRITARNALEHEYFKDIGFVP

SEQ ID NO: 30896 - protein, 419 aa, Vibrio fischeri ES114
MITKAAIYHRSHSSYSYAYDKDTLHLRIRTAKGEVDNATLRIGDPYDWTFGGGGGNLNAEDASGWTGGTNLPMIKECETELFDYWFCEAQPRFYRARYAFLLEGKDSEKLLVSEKLITQITDDADPILSQLLNFYCFPYMNPTDVFNAPEWVKETIWYQIFPERFANGDPSISPKNVLPWGSEDPKTNSFFGGDLQGVIDHLDYLQDLGITGIYFTPITQGETNHKYDTTDYLKVDPAFGSDETVHTLIDEAHKRGMKVMLDAVFNHIGANSIQWQDVIKHGKDSQYIDWFYVEQFPLIDESKKAYHSKEQLNYRAFAFAQNMPKLNTENPEVIEYLIEVGRYWVKNFDIDAWRLDVANEVDQRFWRRFRDELKAIKPELYILGEVWHDSMNWLGGDQFDGVMNYPLADAMLGFFAHDT

SEQ ID NO: 30897 - protein, 250 aa, Burkholderia sp. 383
MQSVPASLSLTDTAFFFDFDGTLVELAPTPDSIHVPPSLLTLLDELQRRSHGAVAIVSGRGIDNIDTFLKMPDMPIAGLHGAERRDANGDTQRIGFNDERLLRIERELAAVVDRHPGMLLEIKGAAVALHYRNAPEREAAARAATERLVADYADAYVLQPGKMVFEIKPKGVDKGRALAAFLDEPPFAGRVPVFAGDDLTDEKGFAVVNARGGLSIKVGAGETSARMRLDSVDALHEQIACWLGAGQSDA

SEQ ID NO: 30898 - protein, 305 aa, Saccharum hybrid cultivar H32-8560
  misc_feature (22)..(22): Xaa can be any naturally occurring amino acid
  misc_feature (25)..(25): Xaa can be any naturally occurring amino acid
  misc_feature (27)..(27): Xaa can be any naturally occurring amino acid
  misc_feature (57)..(57): Xaa can be any naturally occurring amino acid
  misc_feature (67)..(67): Xaa can be any naturally occurring amino acid
  misc_feature (139)..(139): Xaa can be any naturally occurring amino acid
  misc_feature (142)..(143): Xaa can be any naturally occurring amino acid
  misc_feature (149)..(149): Xaa can be any naturally occurring amino acid
  misc_feature (160)..(160): Xaa can be any naturally occurring amino acid
  misc_feature (175)..(175): Xaa can be any naturally occurring amino acid
  misc_feature (180)..(180): Xaa can be any naturally occurring amino acid
  misc_feature (225)..(225): Xaa can be any naturally occurring amino acid
  unsure (1)..(305): unsure at all Xaa locations
MQIFVKTLTGKTITLEVESSDXIDXVXAKIQDKEGIPPDQQRLIFAGKQLEDGRTLXDYNIQKESTXHLVLRLRGGMQIFVKTLTGKTITLEVESSDTIDNVKAKIQDKEGIPPDQQRLIFAGKQLEDGRTLADYNIQXESXXHLVLRXRGGMQIFVKTXTGKTITLEVESSDTXDNVKXKIQDKEGIPPDQQRLIFAGKQLEDGRTLADYNIQKESTLHLVLRXRGGMQIFVKTLTGKTITLEVESSDTIDNVKAKIQDKEGIPPDQQRLIFAGKQLEDGRTLADYNIQKESTLHLVLRLRGGQ

SEQ ID NO: 30899 - protein, 387 aa, Symbiobacterium thermophilum IAM 14863
MMRMEKSLLMIPGPTPIPPQVAAAMTQPMLNHRGEAFSALFAEVSTKLQKVFRTAQPVYIFPGAGSGGWEAALVNTLNPGDAVLSVSIGDFGERWHKVAVQLGFAVERLRFEPGRAADPERIAERLAEDRERRIKAVLIQHNETSTGVTNDVRAIARAVREHGALLMVDSVSGLGALPLEMDEWGLDVVLTGAQKALMCPPGLSIIAFSERARAAAEKSAMPKFYWDLKAAHSSLQKWQTPYTPAISLLHALKAALELLETETLEGSWARHRLMGEMCRAGVKAMGLRLLAVDERTASNSVTAVVAPVDPKRLRKVAREQFGVELAGGQGDLADQIFRIGHLGYVVPGDVLQALAATEMALAQLGVDVQIGRAVAAAQEVWMNHVRG

SEQ ID NO: 30900 - protein, 446 aa, Chenopodium rubrum
MAARAVLQEQPRGGVQQKNGQGGERRNRTALGDIGNVVTARGGAIGAANGIAKPQAINRPLTRSFCAQLVANAQAAAEKKKKQGVKAVDVNVGGARKAGVGVAVAPAAAAQKKVQEKKKTEVVVAETKTPSGHGKVEQKPASKKKKTPTFTSFLTARSKEACGLSKKPQELIVNIDEGSVEDELAVVEYVEDIYSFYKIAEDESRVRDYMDSQPDINEKMRSILVDWLIEVHYKFELRQETLYLTINIIDRFLSMKIVPRKELQLVGIASMLIACKYEEIWAPEVNDFVQISDKAYVREQVLCMEKTILGNLEWYLTVPTPYMFLTRYVKASVTLDSEMENMSYFFSELGMMNYSTTIKYPPSLLAASSVYTARCTLNNSPSWTETLKHYTGYSENQLLECARLLVSFHMAAPEGRLRAVYKKFSKPDNGAVALRPPAKSLLASTS

SEQ ID NO: 30901 - protein, 459 aa, Burkholderia sp. 383
MSRLIIVSNRVAPISEGEPAAGGLAIGVYDALKETGGMWFGWSGEVVASGAPQIRVEEHGPVTFATIGLSRRDYDQYYRGFSNATLWPAFHYRTDLIQYDRHEFEGYSRVNVWLAQQLVPLLQDDDVIWVHDYHLIPFARALRAAGVKNRIGFFLHIPFPAAQVLVNVPPHRDLVESLCAFDLIGFQTEPDLRAFCDYVESEADGVIERDGHLATVRAFGRTLRAAAYPIGVHPDEIASLAQAGEHGKAVRTLAISLRGRKLIMSVDRLDYSKGLVERFRAFEKLLEHEPSHRNRVSFLQIAPSTRAELRAYQDIRLQLEGESGRINGRFAELDWAPILYIHRQYDRQLLAALYRLARVGYVTPLRDGMNLVAKEYVSAQNPEDPGVLVLSRFAGAARELTGALIVNPIDIDGMADALSQALTMPLAERRARYTDMIAQLRENNVSVWRDNFLRDLQHA

SEQ ID NO: 30902 - protein, 427 aa, Escherichia coli
MADTKAKLTLNGDTAVELDVLKGTLGQDVIDIRTLGSKGVFTFDPGFTSTASCESKITFIDGDEGILLHRGFPIDQLATDSNYLEVCYILLNGEKPTQEQYDEFKTTVTLHTMIHEQITRLFHAFRRDSHPMAVMCGITGALAAFYHDSLDVNNPRHREIAAFRLLSKMPTMAAMCYKYSIGQPFVYPRNDLSYAGNFLNMMFSTPCEPYEVNPILERAMDRILILHADHEQNASTSTVRTAGSSGANPFACIAAGIASLWGPAHGGANEAALKMLEEISSVKHIPEFFRRAKDKNDSFRLMGFGHRVYKNYDPRATVMRETCHEVLKELGTKDDLLEVAMELENIALNDPYFIEKKLYPNVDFYSGIILKAMGIPSSMFTVIFAMARTVGWIAHWSEMHSDGMKIARPRQLYTGYEKRDFKSDIKR

SEQ ID NO: 30903 - protein, 381 aa, Saccharum hybrid cultivar H32-8560
  misc_feature (119)..(119): Xaa can be any naturally occurring amino acid
  misc_feature (210)..(210): Xaa can be any naturally occurring amino acid
  misc_feature (271)..(271): Xaa can be any naturally occurring amino acid
  misc_feature (286)..(286): Xaa can be any naturally occurring amino acid
  unsure (1)..(381): unsure at all Xaa locations
MQIFVKTLTGKTITLEVESSDTIDNVKAKIQDKEGIPPDQQRLIFAGKQLEDGRTLADYNIQKESTLHLVLRLRGGMQIFVKTLTGKTITLEVESSDTIDNVKAKIQDKEGIPPDQQRXIFAGKQLEDGRTLADYNIQKESTLHLVLRLRGGMQIFVKTLTGKTITLEVESSDTIDNVKAKIQDKEGIPPDQQRLIFAGKQLEDGRTLAXYNIQKESTLHLVLRLRGGMQIFVKTLTGKTITLEVESSDTIDNVKAKIQDKEGIPPDQQRXIFAGKQLEDGRTLAXYNIQKESTLHLVLRLRGGMQIFVKTLTGKTITLEVESSDTIDNVKAKIQDKEGIPPDQQRLIFAGKQLEDGRTLADYNIQKESTLHLVLRLRGGQ

SEQ ID NO: 30904 - protein, 249 aa, Triticum aestivum
  misc_feature (5)..(5): Xaa can be any naturally occurring amino acid
  misc_feature (8)..(10): Xaa can be any naturally occurring amino acid
  misc_feature (13)..(13): Xaa can be any naturally occurring amino acid
  misc_feature (15)..(15): Xaa can be any naturally occurring amino acid
  misc_feature (17)..(17): Xaa can be any naturally occurring amino acid
  misc_feature (20)..(20): Xaa can be any naturally occurring amino acid
  misc_feature (24)..(24): Xaa can be any naturally occurring amino acid
  misc_feature (26)..(26): Xaa can be any naturally occurring amino acid
  misc_feature (28)..(28): Xaa can be any naturally occurring amino acid
  misc_feature (30)..(31): Xaa can be any naturally occurring amino acid
  misc_feature (34)..(34): Xaa can be any naturally occurring amino acid
  misc_feature (46)..(46): Xaa can be any naturally occurring amino acid
  misc_feature (52)..(52): Xaa can be any naturally occurring amino acid
  misc_feature (58)..(58): Xaa can be any naturally occurring amino acid
  misc_feature (60)..(60): Xaa can be any naturally occurring amino acid
  misc_feature (63)..(63): Xaa can be any naturally occurring amino acid
  misc_feature (71)..(72): Xaa can be any naturally occurring amino acid
  misc_feature (105)..(105): Xaa can be any naturally occurring amino acid
  unsure (1)..(249): unsure at all Xaa locations
APWPXESXXXLVXRXKXGKXIFSXPXRXKXXSPXVESSDTIANVKXKIQDKXGIPPDXQXRFXFAGKQLEXXRTLADSNIQKESTLHLVLRLRGGMQIFVKTLTXQKTITLEVESSDTIDNVKAKIQDKEGIPPVRPRLIFAGKQLEDGRTLADYNIQKESTLHLVLRLRGGMQIFVKTLTGKTITLEVESSDTIDNVKAKIQDKEGIPPDQQRLIFAGKQLEDGRTLADYNIQKESTLHLVLRLRGGQ

SEQ ID NO: 30905 - protein, 124 aa, Actinobacillus actinomycetemcomitans
MSSSVPSLGAFLAKVEQRDGNQPEFLQAVREVFTSIWPFLEQNPKYCSEALLEALVEPERAIQFRVAWTDDKGQVQVNRAFRIQFKSAIGPFKGGMRFHPSVNQSILKFLGFEQIFKNALTTFA

SEQ ID NO: 30906 - protein, 2420 aa, Botryotinia fuckeliana
MSHHSQEPVAIIGFACRLPGGNTTPKKLWEFLERGDIASNKVPKSRFNIEGHWDGSQKPRTMRPCGGMFLEDIDPADFDASFFEISRSEAISMDPNQRQMLEVVFEGLENAGIPLESLDGAPVGCFVGSYASDYGDMQNRDPEDRPASITVGVGRAIMANRLSHFLNIKGPSMTIDTACSGSLVGLDVACRYLQSREIDSAIIATSNLYLNPEHVMDLGAVGNAHSPTGLCHTFDIDADGYVKAEAVSSIIVKRLSDAIRDRDPIRAVIRGSATNSDGRTPGIASPSAEAQSAAIRAAYANAGITNLNDTAYLECHGTGTQAGDPTEVKGAASAFSGTRSADKPLIIGSIKSNLGHAEPSAGISGILKAVMAIENGIIPGNPTFLKPSPKIDFAGLKVKATRTAIPWPESSIRRASVNSFGYGGSNAHVILEQPKFPDGPHHITSYLSVADELTLDEDDSDHPYTLVLSANDNVSLKANIKALSNHLINPRVKVNLEDLAYTLSERRTKLWHRAYITTRSTEIDENDFVVGKKNPEALRIGFVFTGQGAQWPQMGKDLLQFFPWTRNILNNLDDALQSLPQPPNWLLIHELTKVRSAEHFRQPEFSQPLVTALQLCIIDVLRKWGIKPQSVVGHSSGEIAAAYAAGFLDQATAIKVAYYRGRAAVNRKNEVESDVGMLAVGLGTEALFPFLEKYAGRAWIACFNSPSSLTVSGKREALEKLAEELKANGHFARLLQVDLAYHSELMEVIGEEYEKLLKSGFASLGGSSDVSMFSSVTGLKKATTTDALYWKTNMVSPVRFDKALNEMLSDEKAPNYLIEIGPSGALAGPISQILKSLPNSGGISYSPSWSRGQNAGKAIFDLAGRLFVAGHDISLRSVNQYTNAKTLIDLPNYTWNHSVKYWHENASSKDWRFKQFVNHDLLGSKVIGTTWKSPTWRKLLNLADVPWLKDHKMGSDVLMPGAGFIAMAVEALYQKTRSTATEDIIISSPNELSYRFRNIRFDKALVLEDDKESPVLLSLTQQHGSKDWQEFRISSTTGDLLIEHCSGLIRIQDPVDEHLADSDNTSLQYPTSGKVWYKAQEEAGYGFGPSFQKLLKVESSSGQRQSRAQVSLSEPASKWSPQSYYPIHPAALDGCFQTVTPALWAGERSSVNAVLVPSIIDDLIINSVPSGLQEGLSLATSEYSGRGRLEEAKSYFANCSVYHPDNGALLMQMSGLRFAKLDMGARTDPHVFDRISWKPDITFFSQEKLGSLDAANPETQLDSVINLIAHKRPALKILEVSLNHSETRSIWFESEDSLSRSAYLQYDYASGDAKGLVSVQNKYKAKSNSSFFLINPTKDALDLPQDAIYDLVILKVAKNPVVDQSLNDSLDYIKSHLSDKGFALVVQESDLQSSISSVTTPLLDEKSQSPLSAGSPNTPGIAIESSEFIVKDSEIPIVTENITPNELQESETKLLESDATLAGVTQRLSISLTIQEAAKLKGITSVLQIADNNDSPAWSLYTSEVKITSQPRNLSVIRLSETTPSLDSSLKAVLEVSGWTVTEVAYSPNNVATTGTVVLILDELHTPVLTQINAIQWEGLKMLINSGTHLLWVTKGAQYKVTDPNNALVHGLFRVARREDPSVKLSVLDVESSAGSATNYAIDAVLNSLQINQDPKTVIETEFVERDGTLYVQRVVPDLRVNEFKRAEVEGAEPILKNLHETEAAVQLRAERLGTFQGLTWCETAVGEVPVDSGKIEVEVMAVGVNFKDVAVTMGIVPENEYTTGYEGAGIVKRLGPDVTKFKVGDRVCFLNGGSYANRLQLGVGRAHIIPDSMSFEDAATIPSVYLCSIYSLYDIANLREGQSILIHSASGGVGIACIQLAQYKKAEIYVTVGTEEKRRFLTDHYGIPPSRIFSSRNTKFAKQIMHATNGRGIDVIINSLAGELLDASWRICADGGTMVEIGKKDIVDRNTLSMEPFDRNCSYRAMDFSYTENIILTFCATLFRLLDQIFELVHGGHVKPIHPVTIFGFNDIPAALAYIRSGRHIGKVVISDKGIDSQVPIRPATRKLNLRSDASYLIVGGLKGLCGSLAIHMARHGAKHIVACSRSGISDVASQKIVKNCLAYGCEVVDAQGDAASASFMSKVFKETSPRIAGIIQGAMILRDKPFETMTLDDYHTALHAKFNGTWNLHHVSQEQKEPLDFFTLLSSISGIVGNKGQANYAAGNTFLDAFAQYRETLGLRANSVDLGLIEDVGYVAEQEGFDARFDKRQWTPVTENTLRKILSYSILQQDEKAPINASSSTQLIAGIGFPLPEDSDLSYEGRFGYLFQSAAGGNKDGGSSQGDETIEAFRMMRKSGADKAALAKVCVEVIAAQFTKILRLETEMETAKPLISYGLDSLAAVELRNWIRIELGAELTTLDITNASSLNALCEKLVSKLS

SEQ ID NO: 30907 - protein, 2544 aa, Botryotinia fuckeliana
  misc_feature (1719)..(1725): Xaa can be any naturally occurring amino acid
  unsure (1)..(2544): unsure at all Xaa locations
MGSLGPTRVTNGNPVNNGSAAVNGDSPTAAHGGHLEPIAVVGMSCRLSGDASDTQKLWELLIKGRSAWSKVPKDRFNQEAFHDPSAEGKPGRTSTDGGHFLKDDIKAFDASFFGINPIEATAMDPQQRLLLEIAYEAFENAGLTLEQLSGSNTGVYVGQWASDYQEMLLRDIDFPPIYQASGVGAAISSNRISYCFNLHGPSLTLDTGCSASLVALHQAVHSLRAGETDKCFVAGVNLQLDPQRYGYQNKLSMFSKQGKSFTFDHRAKTASGYGRGEGCSGVVLMPLSQAQKQGFPIRAVVQNSVANQDGKTNGITVPSAEAQSAAIEKAYSQVGLVPYADYVEAHGTGTAVGDPIEARAIAKVLGAGRESDSPLPIGSLKANIGHTESAAGLTGLIKAVLMLEHNMIPPQVNFEKANPEIDLDALNLRIPITLESRPLKRISVNSFGYGGTNAHVVVDAAREIATVKPTSQNNGISTTYDHHVPEDASRAKERLFVLSAASEKSCQDMSSKVAKYLESKADSPDADTLLSRLAYTLSRRSVMANRVGVIASDLNDLVAQLTSLSTEAIPRADHQTTPRIGFVFSGQGAQYPRMGQSLLGTWPTFTASMKRAAACIKACGSSWDLLEELLKKPAESRMEDPRIAQPISTAVQISLVDTLKDLGVFPSAVIGHSSGEIAAAYCAEAISFEDAMTVAYHRGRLTGDLRKENKGKAGAMIAVGASATTVKQSIDQMGAAVSSRIAIACFNSPESVTVSGDEDVINSLKQRLDERDIWNRILRTGGAAYHSPQMLQVAEKYHEALKDLSGGVPVSNISMVSSVTGEDHADKPITRDYWVHNLVSPVRFTDALKKTCVGESGTRKVDLLLELGSHFQLEGPIKQTLRTFTGQPAKIHYAGSLKRGENAQRRLLEMLRSLYLERFPVAFWKANAGFVETAPELLTDLPPYPFDHSKTYWHESRVSKAYKHRTFLPHELLGSLVHDNNPQEPRWRCFLNLKDVPWLSGHIIQGQTIFPATAYLAMVFQAARQDTAMRNPQATINRFILRNVNMSQALVMENNKPDLEISLSLRPQAVSARKSSQLWQEFRIFSTSAEDIWTEHCRGLVQVVLKSESATQDDSIVPTRVTLPPHAHHIQAKQFYHRARDIGVNWSAPFDNLTDIKIASGSCIADSSFVPGAGASETDYTIHPGVMDAVLYHGMMGVLIFDENDKSPVVPTFIEKMIVAEQDRAKPVQEVTCHATRTDNALTFDIGIFEKQNEENMVLQAWGVVATKLPDVSIGEGRKRDLCHVPDWVTYMPKTTQKHIDDLCKKSLEERSIIPEIKALEALTVNYVKRALASTPADEVAEGYQRNWFKWMKTLADQEPDPVFLKAGEEDGSVSAEVARRLGPRLSEILRGTTHPLDILNEDNLLSGLYLEGGNARCIAQIAAYMGELGRLNPNMKIIEVGAGTGSATLPVLQALQAPNRVLASEYDFTDISPGFFPAARELLSDFENIMQYKTLNVEKTAEENGFEPNSYDVLIASNVLHATPCIDVVLENVRSLLRPGGKLILMEPTENLPHYGLVFGSLAGWWAGVDEGRTLSPMLSRSAWIQKLSKNGFVHNEAVFEDYPVADGGSISVFVSEVPVPAPSAAPLDVEIVSYSGDGVYSSFTEKLQKNLWDRSVEACVASPSVSEDKISIIMPDICERVAWNMDGPLFESIKARVANSKVIVFVMCTAKGKEQRXXXXXXXFCRSIRYEYVSVRLVSLELESGLDAGVEALSTILNSPTADMSLPIDEVELEYMDRDGQLYVSRVRSEPNLDSYVSRDLGRSVSEEAPFFNDRAMSAELGIPGVLDTLRWADNPEISGPVDPDCVRLQLSAASINFKDVLVASGQLEGITQMRNDCSGIVLEVGANMTSKFKPGDRVCSLYSQSFTNYPMVHGLCCHVIPQDMDFADAASIPLVWCTVYYCLITIARLQKGESILIHSAAGAVGQASIMLARHLGAEIFVTCGNDAKVELLNTEFNIPKDHIFSSRTTAFRDKIHAMTKGKGVDVVLNSLGGEMFRESCNTLAAHGRFVEIGRKDLMENALMPMEFLLNNITFTYVDFAHILATKTWLASQLLGDVMKLFASGAVQHVRQIKYSISEMAAAFRLIQAGKHTGKVVLTVDPEVKVQVVPSKPTSVQLNPEATYIVVGGLGGLGKRLVDWTTEKGARHICIFSRTAQPDSDTQSFLDKLKSMGVKVRVEKCDVSSEESLKKAVAMIQKTMPPIRGLFQAAMVLHDVLLEDMTVEQWCKVTAPKVQGTWNLHKLLPDDMDFFIMLSSVVSMVGTVGASNYASSCAFQDGIARYRRRLGLPAYAINIGAIVEAGYVSENPDVAVNLRKNGLGSVAISEFLSHLADVIQYKTEYTQSSLGILPNGTERGLGEARWSNDKRLAQIFGSESQAGSKAVGSGADNVGFVLQAATTFHEAQDIVCKAIVKQLATILAIDASDIIPARSLDSYGLDSLVGVELRNWIGAYLQVNLPLLVMWNTSSINELAEIVTKGSRLVKVKSEETEEEKKDVEEAKEE

SEQ ID NO: 30908 - protein, 378 aa, Nostoc sp. PCC 7120
MNFELERSDLTKTIVVKIGTSSLTQPETGQLALSTIATLAETLSHLRQQGNRVILVSSGAVGVGCARLGLTERPKAIALKQAVAAVGQGRLMRVYDDLFTTLQQPIAQVLLTRSDLVQRSRYLNVYNTFRELLALGVIPVVNENDTVAVDELKFGDNDTLSALVASLVEADWLFLLTDVDRLYSADPRSVPDARPISLVTSIKELADLQVQTGSQGSQWGTGGMMTKISAARIAIAAGVRTVITQGRYPRNIEKIIQGELIGTHFQPQPEPTSARKRWIAYGLVPVGKLYLDSGAIAAIVKAGKSLLPAGVKTVAGEFEPQDAVQLCDPQGNEIARGLVNYSSNDLQKICGRHSKEIPTILGYVGAETVIHRDNLVLT

SEQ ID NO: 30909 - protein, 557 aa, Pediococcus pentosaceus
MAATIKWWQQAVVYQVYPRSFQDTNHDGIGDLKGITAHLDYLKQLGIDVIWLNPIYRSPNDDNGYDISDYQQIAADFGTMADFDELLQAAHDRGLKIIMDLVVNHTSDEHPRFKRSRQDRTNQYRDFYFWRSGNGKKAPNNWEAAFGGSAWQYDEQTQQYYLHTFSTKQPDLNWENPTLRESVYTMMTWWLNKGVDGFRMDVINQISKLPGLPDGPLKPHSQFGDARVTNGPRVHEFLQEMNQEVLSQFDIMTVGETHGVTPADALKYAGADQHELDMVFEFQHLRLDNSQHGLGKWSTRKTPLVALKKVISDWQVGLEGRAWNSLFWNNHDTPRAVSRFGDDRPAYRVRSAKMLATCLHLLQGTPYIYQGEELGMTDAHFTELASYRDIESLSAYRDLVTERQLLSPADMMARLAAASRDNSRTPMQWDTEVNAGFSDAAPWLTVNPNYRQINAAAALADPDSVWYYYQHLIQLRHQYPSVTLGSFELLWADDPQYSYMHGNGKADLASLLQFHSRDTVPTTGSISDPTAKCLISNYGEQQPNKLRPYEAWVYQLA

SEQ ID NO: 30910 - protein, 269 aa, Sinorhizobium meliloti
MEDKFDLSSARLVVVKIGSTLVLDRETSGIRSSWLESLTEDVSRLLTRGQQVVLVSSGAVAIGSTIVDRLATYSQVSHKQAAAALGQVQLTHAYSESLKRHGLQVAQLLMGRGDLVDPAHRLNTRAVLLRLIDLGAVPLVNENDTTATCGTRVGDNDRLAAWIAEIINADLLILLSNVDGLFMKDPRNNPLTPMLTEVESITREIEAMATQSVDPYSSGGMISKIEAGKIAMNAGCRMIIANGTRSHPLYAIESGGPSTHFIPVARDRV

SEQ ID NO: 30911 - protein, 99 aa, Actinobacillus actinomycetemcomitans
HPQLPPSVASKQLLAAVGQSQLIQTWEKLFAIYDIHIGQMLLTRADIEDRERFLNARDTLHALLDNRIIPVINENDAVATAEIKVGDNDNLSALMAILV

SEQ ID NO: 30912 - protein, 904 aa, Xanthomonas campestris pv. campestris str. 8004
MNEYRSSLVFATPDVPLRDDVRRLGALVGDLLAEQVSADFLEEIERIRTTAIARRESDTPPAGLLSLLEGREPRAAEALVRAFSTYFQVVNIAERVHRIRRRRDYQRSGTDTPQPEGLHDALRRLKAQGVTLDELSEWLPRIDVEPVFTAHPTEAVRRALLEKEQLMVASLVDNLDGMRTPNERATDAARFRMALTASWQTADSSPVRPTVEDEREHVGFYLTQVLYRVIPVMYETLEHAIEETYGSTLALPRLLRFGTWVGGDMDGNPNVDAHTIAGTLDAQRRAVLDRYLNELWQLASLLSQSTTLVAVSPALSAQLERYQALLPDAAARSRPRHGDMPYRLLNDLMRARLQATLDDADGAYAAPAELEHDLQLILDSLQANKGLHAGWFAVRRLLWRVRSFGFHLARLDVRQESSVHARAVADALGQADWDSQDATHRAGLLGPYASGEQALPQVDDEGNARLDAVFAALADARTRHGADALGSYIISMAHNRADVLTVLALARRGGLVDDAGAVPLDIVPLFETVDDLRGGTGTVQDLLADPVYRQHLRARGDTQMVMLGYSDSGKDGGIAASRWGLQRAQVELLEAAAELGVRLTFFHGRGGSIVRGGGKTTRALDAAPRGSVDGRLRVTEQGEVIHRKYGIRALALRSLEQMTGAVLLSSLRPRAPEPREDAWRPVMDLVAERSTVAYRGFVGAPDFMQYFRLATPIDVIERMTLGSRPSRRLGQDAALSNLRAIPWVFAWSQARAVIPGWYGVGSGLQAAVEAGHEDSLREMAQDWPFFRTFLDDIAMVLSKGDLNIAELFSRLAGPLHARFFPRIRDELALTKHWVKTLLGQRSLLQHDPRLALSIRLRNPYIDPISVLQVDLLQRWRATDGEDEELLRALVACVNGVAQGVQNTG

SEQ ID NO: 30913 - protein, 408 aa, Corynebacterium glutamicum ATCC 13032
MNPQDIVICSPLRTPVGAYGGSFTGVPVEELATTVINAIVEATGITGDDVDDLILGQASPNGAAPALGRVVALDSKLGQNVPGMQLDRRCGSGLQAIVTAAAHVASGAADLIIAGGAESMSRVEYTVSGDIRWGVKGGDMQLRDRLAEARETAGGRNHPIPGGMIETAENLRREYGISREEQDKISAASQQRWGKAADAGLFDDEIVPVTVPAKKRGQEPTIVSRDEHGRPGTTVEKLAALRPIMGRQDAEATVTAGNASGQNDGAAAVIVTTRAKAEEKGLRPVMRLAGWSVAAVPPETMGIGPVPATKKVLDRLGLTLEDIGAIELNEAFAAQALSVLKEWNISWEDERVNPLGSGISMGHPVGATGARMAVTLAHRMQRENTQYGLATMCIGGGQGLAAVFEKEN

SEQ ID NO: 30914 - protein, 383 aa, Campylobacter jejuni
MNLIPEILDLQGEFEKIRHQIHENPELGFDELCTAKLVAQKLKEFGYEVYEEIGKTGVVGVLKKGNSDKKIGLRADMDALPLQECTNLPYKSKKENVMHACGHDGHTTSLLLAAKYLASQNFNGTLNLYFQPAEEGLGGAKAMIEDGLFEKFDSDYVFGWHNMPFGSDKKFYLKKGAMMASSDSYSIEVIGRGGHGSAPEKAKDPIYAASLLVVALQSIVSRNVDPQNSAVVSIGAFNAGHAFNIIPDIVTIKMSVRALDNETRKLTEEKIYKICKGLAQANDIEIKINKNVVAPVTMNNDEAVDFASEVAKELFGEKNCEFNHRPLMASEDFGFFCEMKKCAYAFLENENDIYLHNSSYVFNDKLLARAASYYAKLALKYLK

SEQ ID NO: 30915 - protein, 443 aa, Physcomitrella patens
MREILHIQGGQCGNQIGAKFWEVVCEEHGIDPTGTYKGLSDLQLERINVYYNEASGGRYVPRAVLMDLEPGTMDSVRSGPYGQTFRPDNFVFGQTGAGNNWAKGHYTEGAELIDSVLDVVRKEAESCDCLQGFQVCHSLGGGTGSGMGTLLISKIREEYPDRMMLTFSVFPSPKVSDTVVEPYNATLSVHQLVENADECMVLDNEALYDICFRTLKLITPSFGDLNHLISATMSGITCCLRFPGQLNSDLRKLAVNLIPFPRLHFFMVGFAPLTSRGSQQYRSLTVPELTQQMWDAKNMMCAADPRHGRYLTASAMFRGKMSTKEVDEQMINVQNKNSSYFVEWIPNNVKSSVCDIPPTGLKMSSTFIGNSTSIQEMFRRVSEQFTAMFRRKAFLHWYTGEGMDEMEFTEAESNMNDLVSEYQQYQDASAEEEGEYEEDLEEA

SEQ ID NO: 30916 - protein, 313 aa, Malacomeles denticulata
GGLGDVLGGLPPAMAANGHRVMTISPRYDQYKDAWDTEVTVELKVGDKTEPVRFFHCYKRGVDRVFVDHPLFLEKVWGKTASKIYGPTAGVDFKDNQLRFSLLCQAALVAPRVLNLNSCKYFSGPYGEEVVFVANDWHTALLPCYLKAMYKPKGIYKTAKVAFCIHNIAYQGRFAFADFALLNLPDEFKSSFDFIDGYDKPVKGRKINWMKAGILESDKVLTVSPYYAEELVSSVEKGVELDNIIRKTGILGIVNGMDVQEWNPLTDKYTTVKYDASTVADAKPLLKEALQAEVGLPVDRDIPVIGFIGRLEE

SEQ ID NO: 30917 - protein, 59 aa, Passiflora arborea
MPGQWEYQVGPSVGIEAGDHIWCSRYILERITEQAGVVLTLDPKPIEGDWNGAGCHTNY

SEQ ID NO: 30918 - protein, 316 aa, Alkaliphilus metalliredigenes QYMF
MIVTLTLNPAVDKTIEIDSFQINHVNRVSSARLDAGGKGINVSKGVHTLGEKSKAMGILAGKSGQFIKEQLDILKIDNDFLFVGGETRTNIKVVDRINHSNTDINEKGPDIAEPDLAEVICKTLEAVHDGDILVLSGSVPSNIDSNIYGVLIARAKEKGVKTILDADGALLKQGIKAGPYLVKPNIYELERLYNTQITSKEKAIEVAMDIFAYGVELIVISLGEEGSILMTKEETVIVEGIEVDVISTVGAGDSMVAALAVAIHRDYPLEKAIRLATATSAASVMTSGTETGEMNVIEQLEKKVKLISYDNREVVK

SEQ ID NO: 30919 - protein, 363 aa, Ralstonia metallidurans CH34
MSKLIPVTILTGFLGSGKTTLLKRILNEQHGMKIAVIENEFGEENIDNEILVQDGREQIVQMSNGCICCTIRGDLVQALSDLVTQRDEGKIAFDRVVIETTGVANPGPVAQTFFMDEEIASRYLLDAVITLVDAKHANLQLDKQEEAQRQVGFADAIFITKADLVSEAEVADLRHRLLHMNPRAPINAAHFGEAPIDLIFDLRGFNLNEKLEIDPDFLRADEHDHEHDHEHGEHCGTDCGHDHGHEHGHDHGHGHAHDHHHHHHHTDRIASFVFRSDKPFHYGKLEEFLSGILSVYGEKLLRYKGVLYMEGVDRKVVFQGVHQLMGSDIGAKWEDEQPGTKMVFIGVDLPRDAILKGLAACLA

SEQ ID NO: 30920 - protein, 313 aa, Malacomeles denticulata
GGLGDVLGGLPPAMAANGHRVMTVCPRYDQYKDAWDTSVLVEIEVGGRVETVRFFHCYKRGVDRVFVDHPLFLEKVWGKTESKIYGPRTGVDYMDNQFRFSLLCQAALEAPRVLNLNSNKYFSGPYGDDVVFIANDWHTALLPCYLKTIYKPKGIYKNAKVVFCIHNIAYQGRFTFSDFSLLDLPENLKGLFDFIDGHSKPVKGREIDWMKAGILESDRVVTVSPYYAQELISGEDKGVELDNIIRKAGISGIVNGMDVQEWNPAADKYLDIKYDNTTVLDAKPLLKEALQAEVGLPVDRNIPVFGFIGRLEE

SEQ ID NO: 30921 - protein, 59 aa, Passiflora aurantia
MPGQWEYQVGPSVGIDAGDHIWCSRYILERITEQAGVVLTLDPKPIEGDWNGAGCHTNY

SEQ ID NO: 30922 - protein, 313 aa, Malus sargentii
GGLGDVLGGLPPALAANGHRVMTVSPRYDQYKDAWDTSVLVEIEVGGRVETVRFFHCYKRGVDRVFVDHPLFLEKVWGKTGSKIYGPRTGVDYMDNQFRFSLLCRAALEAPRVLNLNSNEYFSGPYGDDVVFVANDWHAALLPCYLKTIYKPKGIYKNAKVVFCIHNIAYQGRFPYSDFSLLDLPDNLKGSFDFVDGHDKPVKGRKINWMKGGILESDRVVTVSPYYAQELVSGEDKGVELDNIIRKTGITGILNGMDVQEWNPATDKYLDIKYDNTTVLDAKPLLKEALQAEVGLPVDRNIPVFGFIGRLEE

SEQ ID NO: 30923 - protein, 349 aa, Glycine max
MDKYEAVKDLGAGNFGVARLMRNKVTKELVAMKYIERGPKIDENVAREIMNHRSLRHPNIIRYKEVVLTPTHLAIVMEYAAGGELFERICSAGRFSEDEARYFFQQLISGVHFCHTMQICHRDLKLENTLLDGSPAPRLKICDFGYSKSSLLHSRPKSTVGTPAYIAPEVLSRREYDGKLADVWSCAVTLYVMLVGAYPFEDQDDPRNFRKTIQRIMAVQYKIPDYVHISQDCRHLLSRIFVANPLRRITIKEIKNHPWFLRNLPRELTESAQAIYYQRDSPNFHLQSVDEIMKIVGEARNPPPVSRALKGFGWEGEEDLDEEVEEEEDEDEYDKRVKEVHASGEFQIS

SEQ ID NO: 30924 - protein, 59 aa, Passiflora auriculata
WEYQVGPSVGIEAGDHIWCSRYILERITEQAGVVLTLDPKPIEGDWNGAGCHTNYSTQS

SEQ ID NO: 30925 - protein, 193 aa, Lycopersicon pimpinellifolium
FVFAGVGSAIAYGKLTTNAALDPAGLVAIAVCHGFALFVAVSISANISGGHVNPAVTCGLTFGGHITFITGSFYMLAQLTGAAVACFLLKFVTGGCAIPTHGVGAGVSILEGLVMEIIITFGLVYTVFATAADPKKGSLGTIAPIAIGLIVGANILAAGPFSGGSMNPARSFGPAMVSGNFEGFWIYWIGPLV

SEQ ID NO: 30926 - protein, 551 aa, Brassica napus
  misc_feature (71)..(71): Xaa can be any naturally occurring amino acid
  misc_feature (88)..(88): Xaa can be any naturally occurring amino acid
  misc_feature (104)..(104): Xaa can be any naturally occurring amino acid
  misc_feature (128)..(128): Xaa can be any naturally occurring amino acid
  misc_feature (250)..(250): Xaa can be any naturally occurring amino acid
  unsure (1)..(551): unsure at all Xaa locations
GEDWEGLFECCTGYGPGGSSRPLFGRFHGGQYTKASDVCADLGCCLQWNIRAGYWRNLADSSNPYRDYRDXVRFRVPDMCGHCRRRSXAGPVLSSIALSGVHLXFTALCFALLLCPMWILAPLITTLXATYLFEIKAVKEIEPALKKQLIISTVIMTVGIAVVSWIGLPSSFTIFNFGSQKVVENWQLSVCVCCRLWAGLIIGFVTEYYTSNAYSPVQDVADSCRTGAATNVIFGLALGYKSVIIPIFAXIAVSIFVSFSFAAMYGVAVAALGMLSTIATGLAIDAYGPISDNAGGIAEMAGMSHRIRERTDALDAAGNTTAAIGKGFAIGSAALVSLALFGAFVSRAGVHTVDVLTPKVIIGLLVGAMLPYWFSAMTMKSVGSAALKMVEEVRRQFNTIPGLMEGTAKPDYATCVKISTDASIKEMIPPGCLVMLTPLIVGFFFGVETLSGVLAGSLVSGVQIAISASNTGGAWDNAKKYIEAGVSEHAKSLGPKGSEPHKAAVIGDTIGDPLKDTSGPSLNILIKLMAVESLVFAPFFATHGGILFKYL

SEQ ID NO: 30927 - protein, 313 aa, Mespilus germanica
GGLGDVLGGLPPAMAANGHRVMTVSPRYDQYKDAWDTGVPVEIEVGGRVETVRFFHCYKRGVDRVFVDHPSFLERVWGKTGSKIYGPSAGEDYKDNQFHFSLLCQAALEAPRVLNLNSNKYFSGPYGDDVLFIANDWHTALLPCYLKAIYKPRGIYENAKVVFCIHNIAYQGRFPISDFSVLDLPENLKGSFDFIDGYNKPVKGGKINWMKAGILESDRVVTVSPYYAQELVSGEDKGVELDNIIRKTGITGIVNGMDVQEWNPATDKYLDTKYDNKTVLDAKPLVKEALQAEVGLPVDRNIPVIGFIGRLEE

SEQ ID NO: 30928 - protein, 59 aa, Passiflora auriculata
WEYQVGPSVGIEAGDHIWCSRYILERITEQAGVVLTLDPKPIEGDWNGAGCHTNYSTKS

SEQ ID NO: 30929 - protein, 434 aa, Oryza sativa
GTRAEDVVEAARLASGGQPFEVVYYPRASTPEFCVRAAAVRAAMRVQWCPGMRFKMAFETEDSSRISWFMGTVASVQVADPIRWPQSPWRLLQVTWDEPDLLQNVKRVSPWLVELVSSMPAIHLSSFSPPRKKPRILAYPEFPFEGQLLNPAFPPNPLAHGHHHYHHNHPSFFPFPDVSAPAGIQGARHAQFGPSLSDLHLTHLQSSLMYPGLGRPDHVGPTSIPPPRISTDLTMGSSPPARALSMGAKKPDDAKPPGLMLFGQRILTERQMSLSGTTSPADTGNSSLNWNTEKGASEGSGSGVIQNSPTDNTSSERLQWFRENSTVSELGLEPGQCKVFIESDTVGRNLDLSSLASFEQLYGRLSEMFCIDSAELRSRVLYRGATGEVRHAGDEPFRGTNFGGGVKNKRERKSGNERHGAVYTADYYCKTSTR

SEQ ID NO: 30930 - protein, 313 aa, Mespilus germanica
GGLGDVLGGLPPAMVANGHRVMTVSPRYDQYKDAWDTSVQVEIEVGGRVETVRFFHCYKRGVDRVFVDHPLFLEKVWGKTGSKIYGPSAGVDYLDNQFRFSLLCQAALEAPRVLNLNSNKYFSGPYGDDVVFIANDWHTALLPCYLNTIYKPKGIYKNAKVVFCIHNIAYQGRFPFSDFSLLDLPDDLKGSFDFIDGHNKPVKGRKINWMKAGILESDRVVTVSPYYAQELVSGEDKGVELDNIIRKTGITGILNGMDVQEWNPATDKYLDIKYDNTTVLDAKPLLKEALQAEVGLPVDRNIPVFGFIGRLEE

SEQ ID NO: 30931 - protein, 379 aa, Arabidopsis thaliana
YSDSRGLPGVRKEVAEFIQRRDGYPSDPELIFLTDGASKGVMQILNCVIRGNGDGILVPVPQYPLYSATISLLGGTLVPYYLDESENWGLDVANLRQSVAQARSQGITVRAMVIINPGNPTGQCLSEANIREILKFCYNEKLVLLGDEVYQQNIYQDERPFISSKKVLMEMGSPFSKEVQLVSFHTVSKGYWGECGQRGGYFEMTNLPPRVVEEIYKVASIALSPNVSAQIFMGLMVNPPKPGDISYDQFARESKGILESLRRRARLMTDGFNSCKNVVCNFTEGAMYSFPQIRLPTGALQAAKQAGKVPDVFYCLKLLEATGISTVPGSGFGQKEGVFHLRTTILPAEDEMPEIMDSFKKFNDEFMTQYDNNFGYSKM

SEQ ID NO: 30932 - protein, 372 aa, Chenopodium rubrum
MAPSFDLLCAEDNSSIFDEVDDNYYGVVDDDVLQICNLQQQHGNLRNFDDFTLILLIIIKEHNFEALISGFFVANHECLASLFDNERQHFLGLDYLKRFRNGDLDLGARNLVIDWIHKVQSHYNFGPLCVYLSVNYLDRFLSAYELPGKAWMMQLLGVACLSLAAKVDETDVPLILDLQVSESKFVFEAKTIQRMELLVLSTLKWRMQSVTPFSFIDYFLYKLSGDKMPSKSLIFQAIQLILSTIKGIDLMEFRPSEIAAAVAISVTQQTQIVEFTDKAFSFLTDHVEKERLMKCVEIMHDLRMSSRSNGALASTSVPQSPIGVLDASACLSYKSDDTSTTPSGSCGNSAHSSPASAPPPKRRKLDRTSQIS

SEQ ID NO: 30933 - protein, 245 aa, Plantago major
ADENKAPKLPTSNLPEEFDWREKGAVTAVKNQGSCGSCWSFSTTGALEGANYLATGELISLSEQQLVDCDHECDPEEGADSCDAGCNGGLMNNAFEYALKAGGLQKEKDYPYTGKDGTCKFDKTKIAASVHNFSVVSIDEDQIAANLVKYGPLAVGINAAWMQTYIGGVSCPYICGKSLDHGVLIVGYGTGYAPVRLKNKPYWIIKNSWGESWGESGYYKICRGRNVCGVESMVSSVTAAHFTTT

SEQ ID NO: 30934 - protein, 683 aa, Vibrio vulnificus YJ016
MSEKSNKEINVKQVLTTLSLAVTAALLAGCNASSKVDTPPTANAYRCDAVSMNKADDLRIYQVMVESFVNGNDQIGHGTGYGTSHHKGDIQGIIDSLDYIQSLGMNGIWLTPIFNSEPKAGQDHWADRLDATGYFATNYFEVDPRFGTMDDAKRLVEEAHARGLYVFFDGVFGHHKGNVAASPTGKLPAGSNNPVDYPESLAFYQEVAEFWIKELKIDGWRLDQAYQVPKEAWVEIRKTVDNASKAVTYTNSKGETVNPLGYMVAEIWAGENRIIETGYGSNENPALCSAFDFPVRYRLVETFGVNEAGVGGKSGEWLAEGMNLHALYPEHAKPNLMIGNHDLVRFGDLLQRGNIAQPQDEEYWLRHKAVFAFQAAYTGPITLYYGDEIGDQVENFAAKVEQDCAVKGLCDDHVARSSGKVEGVTATLNANEQDLKHYIQQLMNLRNQHPALSQGKRVNVLADNKTYIDHKSTDSEAILYVANISKHLQYLQLDAVKAGSEGHLTDLINGEEIKLIDGQYLIPLAPLEARFLSIEQPAKAGPQIAKMALASGIGEGFMAQCDNPTVDEKGPMRKKLYVVGDFSDSSWQHKDHRQFEYKGDGIYQVVTNEKPGSYRMQYAAKTWTPQFTAKGLSLKLGQENPLIKGGYGKDTAVTIMDEGRYVWSLQFDEQGTPLNVMASKCAE

SEQ ID NO: 30935 - protein, 509 aa, Triticum aestivum
  misc_feature (47)..(47): Xaa can be any naturally occurring amino acid
  misc_feature (112)..(112): Xaa can be any naturally occurring amino acid
  misc_feature (141)..(141): Xaa can be any naturally occurring amino acid
  misc_feature (201)..(201): Xaa can be any naturally occurring amino acid
  unsure (1)..(509): unsure at all Xaa locations
MGKAGFGVAAGCAAVTCAIAAVMVARRVAARARWRRAVALLRDFEEXGCATPPARLRQVVDAMVVEMHAGLASDGGSKLKMLLTFVDALPNGDEEGVYYAIDLGGMAFRVLXRVEIDVGSTAVIDQRVETHAIPEELMGTXQDLFHFVALTLKNFVEREDGKDAQKPLGFTFSFPVRQNSVSSGSLIRWTKGFSVGDTVGXDVSQCLDEALARCGSNMRVTALVNDTVGTLALGHYYYKDTVAAVIIGAGTNACYIERTDAIIKCQGLLTNSGGMVVNMEWGNFWSSHLPRTAYDISLDDETQNRNDQGFEKMISGIYLGEIARLVLQRMAQESDIFGDGAESLSTPFILSTPYLAAICEDDSQDLSEVRRILQEHLKIPDAPLKTRRLVVKICDIVTHRAARLAAAGIVGILKKLGRDGSASAASSSGRMREQPKETVVAIEGSLYQEYPVFKEYLDEALVEILGEEVARTVTLRVMVDGPGTGAALLAAVHSSNRQQQQGGGGGGSI

SEQ ID NO: 30936 - protein, 164 aa, Salmonella enterica
ASLGLWEICIIWGLGISLAVYLTAGISGGHLNPAVTIALWLFACFPKQKVLPYIIAQFAGAFGGALLAYVLYSSLFTEFETAHHMVRGSVESLQLASIFSTYPAAALNVWQAALVEVVITSILMGMIMALTDDGNGIPKGPLAPLLIGILVAVIGASTGPLTGF

SEQ ID NO: 30937 - protein, 474 aa, Legionella pneumophila str. Lens
MANKIKTDVVVLGSGPGGYTAAFRAADLDKKVVLVERFDSLGGVCLNVGCIPSKALLHIAKVVDEAHEMSEQGVAFGKPKFDNKKLVAWKNSVVAKLTGGLKALAKQRKVEVITGTGKFSGTHQILVETKEGTVEIEFDNAIIAVGSESIKLPFIPEDKRIFSSTGALELADIKGDLLVLGGGIIGLEMATVYSSLGVNVTVVEFMDQLIPNADADLVNILQKRMTKKGVKFLLKTKVTAVEAKKDGIYVSMEGEHATDKPLCFQQVLVAVGRKPNGGAINAEKAGIKVDERGFIPVDNQLRTNVPHIFAIGDVNGQPMLAHKAIPEGKVAAEVIAGKKHYFEPKCIPSVAYTDPELAWAGLTEKEAKEKGINYEKASFPWAASGRALSMGREEGMTKLLFCPETNRILGAGIVGVNAGDLIAETALAIEMCCDVEDIALTIHPHPTLSETIAQSAEAFEGTITDLYLPKKKKK

SEQ ID NO: 30938 - protein, 343 aa, Solibacter usitatus Ellin6076
MNALLLTQYMHLEMVEMPVPAIGADDVLVRVRACGICGSDVHGLDGKTGRRIPPLVMGHEAAGEVVETGANVTDLRPGDRVTFDSTVYCGRCFHCTRGEVNLCDNREVLGVSPGPYRRHGAFAEYVSVPRRIMYRLPDSLSYEQAALIEAVSVAVHAVNLTPVRLGDSAVVVGSGMIGLLAMQAAKHAGCTRVIAVDPDEGRLRLAIGAGATDAINPKSTDAAAAIRELTEGRGADLAIECVGATDPIRTAIAGVRKGGAVTLVGNVAPEIEFPLQSVVTRQIRLQGSCASNGEYPACIDMMARGAIRVDELITAVAPLEEGPSWFDRLYRHEPHLMKVILRP

SEQ ID NO: 30939 - protein, 351 aa, Arabidopsis thaliana
MMQLGRAHSLKGFSITVAQTKFNYLNPSKDLADFQFITIPESLPASDLKTLGPIWFIIKLNKECEISFKKCLGQFLLQQQEEIACVIYDEFMYFAEAAAKEFNLPKVIFSTENATAFACRSAMCKLYAKDGIAPLTEGCGREEELVPELHPLRYKDLPTSAFAPVEASVEVFKSSCEKGTASSMIINTVSCLEISSLEWLQQELKIPIYPIGPLYMVSSAPPTSLLDENESCIDWLNKQKPSSVIYISLGSFTLLETKEVLEMASGLVSSNQYFLWAIRPGSILGSELSNEELFSMMEIPDRGYIVKWATQKQVLAHAAVGAFWSHCGWNSTLESIGEGIPIVGLLLLIKR

SEQ ID NO: 30940 - protein, 488 aa, Zea mays
  misc_feature (185)..(185): Xaa can be any naturally occurring amino acid
  unsure (1)..(488): unsure at all Xaa locations
MARGREGEVRNLVLGKYELGRMLGQGSFAKVYYGRDLRDGQSVAIKVIDKARLRQTDGMVEQLRREISIMRMVRHPNVVGIREVLASRQRVFVVMEYARGGELFAKVARGRLTEDAARKYFQQLVAAVAFCHSRGVAHRDLKPENLLLDEEGRLKVTDFGLAALPEQLRHDGLLHTQCGTPAYVXAPEVLRKRGYDGARADLWSCGVVLYVLLCGFLPFQHDNYVKLYQKIFKADYQVPPWVSGDARRLIARLLVVDPAKRASIAEIMCTPWFRKGFVPPVLSPPVTPKKQQLDEGGALFDNDDDDNSNSNHSGATSPRSGNAFQLISSMSSGFDLSGLFESEQKTATVFTARAPAATVVEKRESVARPLGFEVTRGKGWKVRMEAKAEGTNGRLAATAEVLEVAVDGAVVEFVHDAGDALDFNKFCAVDVPPGLTEIVWGGQGDSPPPPVGPGGTSVLGGPRLGRGSGSNFGWELNTAARPPPFCTR

SEQ ID NO: 30941 - protein, 240 aa, Zea mays
MGRGKIVIRRIDNSTSRQVTFSKRRNGIFKKAKELAILCDAEVGLVIFSSTGRLYEYSSTSMKSVIDRYGKAKEEQQDVANPNSELKFWQREAASLRQQLHNLQENYRQLTGDDLSGLNVKELQSLENQLETSLRGVRAKKDHLLIDEIHDLNRKASLFHQENTDLYNKINLIRQENDELHKKIYETEGPSGVNRESPTPFNFAVVETRDVPVQLELSTLPQQNNIEPSTAPKLGLQLIP

SEQ ID NO: 30942 - protein, 591 aa, Listeria monocytogenes str. 4b H7858
MEKAGIYHQPASSYAYSYDAKTLHIRIRTKRLDISEVTLIAADPYLWKDGKWQSESYTMRKIAETEEHDYWFFAITPEHRRLQYGFLLTDTEGETTFYGGRGFFEPTEANLATMDYYFKFPFIHAVDTFEAPEWVGNTIWYQIFPERFANGNPAISPENALPWGSKDPNTTDFFGGDIEGIIEHLDYLAELGINGVYLTPVFEAPTNHKYDTVDYKKIDPHFGDKETFRKLVQEAHKRGIRIMLDAVFNHIGDTSAEWQDVVLNEEKSAYRDWFHIHSFPVRQNENGNIEGEPTLSYDTFAFTTHMPKLNTANPEVQKYLLDIATYWIREFDIDGWRLDVANEVDHAFWKEFKKAVQAEKEDIYILGEIWHDSWIWLLGDEFHAVMNYPFTQTIIENFIEEKITPEQMVSGINEQYMRYPNQVNEVMFNMLDSHDTARILTRANNDEDKVKQALAFMFAHTGSPCIYYGTEIGMDGGNDPGCRKCMEWDETKQNQDMLAFTKQLIALRKDNQAIITSGELTWLGASSETGITAFSKELNGEKLHFLFNQAKEDKDFTISFENTATDIWNNRAVTENLVVPAKGFLVVKENS

SEQ ID NO: 30943 - protein, 54 aa, Poncirus trifoliata
MGTATCVDIILAVILPPLGVFLKFGCKAEFWICLLLTILGYIPGIIYAVYVITK

SEQ ID NO: 30944 - protein, 288 aa, Leptospira interrogans serovar Copenhageni str. Fiocruz L1-130
MRLGIASSYSLRKNMNEIKEIKNFANELRKSVIKMVTAANSGHPGGPLGLADIYAVLYKKILNHKPSDPDWEERDRLILSNGHVCAIRYAAMAHSGYFPLEDLMTFRKLGSKLQGHPSTRYMNGIESSSGSLGQGLSVSVGLALGARFKKQNHKIYTCISDGECGEGMTWEAAQSAVHYKLDNLIAFMDKNGIQIDGFTKDVMNLEPLKEKFISFGWNVLEADGHDVEQIISAFEKAKLHKGSPTIILFKTVLGKGVSFMENNPGWHGTPPKPEEEKKALEELSTISI

SEQ ID NO: 30945 - protein, 526 aa, Aspergillus niger
MAASSSLDHLSNRMKLEWHSKLNTEMVPSKNFRRTSIIGTIGPKTNSVEKINSLRTAGLNVVRMNFSHGSYQYHQSVIDNAREAAKTQVGRPLAIALDTKGPEIRTGNTPDDKDIPIKQGHELNITTDEQYATASDDKNMYLDYKNITKVISPGKLIYVDDGILSFEVLEVVDDKTIRVRCLNNGNISSRKGVNLPGTDVDLPALSEKDIADLKFGVRNKVDMVFASFIRRGSDIRHIREVLGEEGKEIQIIAKIENQQGVNNFDEILEETDGVMVARGDLGIEIPAPKVFIAQKMMIAKCNIKGKPVICATQMLESMTYNPRPTRAEVSDVANAVLDGADCVMLSGETAKGNYPNEAVKMMSETCLLAEVAIPHFNVFDELRNLAPRPTDTVESIAMAAVSASLELNAGAIVVLTTSGKTARYLSKYRPVCPIVMVTRNPAASRYSHLYRGVWPFLFPEKKPDFNVKVWQEDVDRRLKWGINHALKLGIINKGDNIVCVQGWRGGMGHTNTVRVVPAEENLGLAE

SEQ ID NO: 30946 - protein, 59 aa, Passiflora biflora
WEYQVGPSVGIDAGDHIWCSRYILERITEQVGVVLTLDPKPIEGDWNGAGCHTNYSTKS

SEQ ID NO: 30947 - protein, 344 aa, Rhododendron simsii
MKDVNGSPATTVCVTGAAGFIGSWLVMRLLERGYVVRATVRDPANIKKVKHLLELPKADSNLTLWKADLNEEGSFDEAIEGCFGVFHVATPMDFESKDPENEVIKPTINGVLSIIKSCTKAKTVKRLVFTSSAGTVNVQEHQQPVYDENNWSDLDFINEKKMTGWMYFVSKTLAEKAAWDAAKENNIDFISIIPVLVVGPFIMPTFPPSLVTALSPITGNEPHYSIIKQGQFVHLDDLCESHIFLFEHPEAEGRYICSSHDATIYDLAKMMREKWPEYNVPTEFKGIDKDIPKVSFSSEKLIGMGFKFKYSLEDMFRGAIDTCREKGLLPYSNATTANGTNGTI

SEQ ID NO: 30948 - protein, 313 aa, Mespilus germanica
GGLGDVLGGLPPAMAANGHRVMTISPRYDQYKDAWDTQVTVELKVGDKTETVGFFHCYKRGVDRVFVDHPLFLEKVWGKTASKIYGPTAGVDFKDNQLRFSLLCQAALVAPRVLNLNSSKYFSGPYGEEVVFVANDWHTALLPCYLKAIYKPKGIYKTAKVAFCIHNIAYQGRFGFADFALLNLPNEFKSSFDFIDGYDKPVKGRKINWMKAGILESDKVLTVSPYYAEELVSSVEKGVELDNIIRKTGIQGIVNGMDVQEWNPLTDKYTTVKYDASTVADAKPLLKEALQAEVGLPVDRDIPVIGFIGRLEE

SEQ ID NO: 30949 - protein, 313 aa, Peraphyllum ramosissimum
GGLGDVLGGLPPAMAANGHRVMTVCPRYDQYKDAWDTSVLVEIEVGGRVETVRFFHCYKRGVDRVFVDHPLFLEKVRGKTGSKIYGPRTGVDYMDNQFRFSLLCQAALEAPRVLNLNSNEYFSGPYGDDVVFIANDWHTALLPCYLKTIYKPKGIYKNAKVVFCIHNIAYQGRFPFLDFSVLDLPENLKGSFDFIDGHDKPVKGRKINWMKGGILESDRVVTVSPYYAQELISGEDKGVELDNIIRKTGITGIVNGMDVQEWNPATDKYLDIKYDNTTVLDPKPLLKEALQAEVGLPVDRNIPVFGFIGRLEE

SEQ ID NO: 30950 - protein, 492 aa, Vibrio parahaemolyticus
  misc_feature (266)..(266): Xaa can be any naturally occurring amino acid
  misc_feature (268)..(268): Xaa can be any naturally occurring amino acid
  misc_feature (272)..(272): Xaa can be any naturally occurring amino acid
  misc_feature (280)..(280): Xaa can be any naturally occurring amino acid
  misc_feature (308)..(308): Xaa can be any naturally occurring amino acid
  misc_feature (316)..(316): Xaa can be any naturally occurring amino acid
  misc_feature (322)..(323): Xaa can be any naturally occurring amino acid
  misc_feature (332)..(332): Xaa can be any naturally occurring amino acid
  misc_feature (344)..(344): Xaa can be any naturally occurring amino acid
  misc_feature (398)..(398): Xaa can be any naturally occurring amino acid
  unsure (1)..(492): unsure at all Xaa locations
LKLLVIKGKEQGYLTYAEVNDHLPAEIVDSEQVEDIIQMINDMGIKVVETAPDADDLALNDDTNITDEDAAEAAAAALSSVESEIGRTTDPVRMYMREMGTVELLTREGEIDIAKRIEEGINQVQSSVAEYPGTIPYILEQFDKVQAEELRLTDLISGFVDPDADDTAAPTATHIGSELSETQLEEEDEEDLEDDEESDDDSDDSEEDVGIDPELALEKFNQLRSTYQNLQLAINEYGYDSPKATVANEMMLDVFKEFRLTPKQLXHXVNEXRTAMDRVXTQERLIMKSVVEYGKMPKKSFIALFTGXESSDAWLXEILASXXPYAEKIKRXEEEIRRSIAKLXMIEEETSLNVQNIKDISRRMSIGEAKARRAKKEMVEANLRLVISIAKKYTNRGXQFLDLIQEGNIGLMKAVDKFEYRRGYKFSTYATWWIRQAITRSIADQARTIRIPVHMIETINKLNRISRQMLQEMGREPLPEELAERMQMPEDK

SEQ ID NO: 30951 - protein, 313 aa, Peraphyllum ramosissimum
GGLGDVLGGLPPAMAANGHRVMTISPRYDQYKDAWDTEVKVELKVGDKTETVRFFHCYKRGVDRVFVDHPLFLERVWGKTASKVYGPAAGVDFKDNQLRFSLLSQAALEAPRVLNLNSSKDFAGPYGEEVVFIANDWHTALLPCYLKAVYKPRGIYSTAKVAFCIHNIAYQGRFAFADFALLNLPDEFKSSFDFIDGYETPVKGRKINWMKAGILESDKLLTVSPYYAEELVSAVEKGVELDNIIRKTGIFGIVNGMDVQEWNPLTDKYTTIKYDASTVADAKPLLKETLQAEVGLPVDRDIPVIGFIGRLEE

SEQ ID NO: 30952 - protein, 153 aa, Streptococcus pyogenes
PMAYVLWNHFMNINPKTSRNWSNRDRFILSAGHGSAMLYSLLHLAGYDLSVEDLKNFRQWGSKTPGHPEVNHTDGVEATTGPLGQGIANAVGMAMAEAHLAAKFNKPGFDIVDHYTFALNSDGDLMEGVSQEAASMAGHLKLGKLVLLYDSND

SEQ ID NO: 30953 - protein, 166 aa, Triticum aestivum
  misc_feature (111)..(111): Xaa can be any naturally occurring amino acid
  misc_feature (152)..(152): Xaa can be any naturally occurring amino acid
  misc_feature (154)..(154): Xaa can be any naturally occurring amino acid
  unsure (1)..(166): unsure at all Xaa locations
MATSSAKSVHDFTVKDAKGNDINLGDYKGKVLIIVNVASQCGLTNSNYTELSQLYEKYKQKGLEILAFPCNQFGAQEPGSNEQIQEFVCTRFKAEFPVFDKVDVNGDKAAXLYKYLKSSKGGLFGDGIKWNFSKFLVDKEGNVVDRYAPTTXPXSIEKDLLKLLDA

SEQ ID NO: 30954 - protein, 60 aa, Passiflora capsularis
WEYQVGPSVGIDAGDHIWCSRYILERITEQAGVVLSLDPKPIEGDWNGAGCHTNYSTKSR

SEQ ID NO: 30955 - protein, 313 aa, Peraphyllum ramosissimum
GGLGDVLGGLPPAMAANGHRVMTVSPRYDQYKDAWDTGVPVEIEVGGRVETVRVFHCYKRGVDRVFVDHPSFLERVWGKTGSKIYGPSAGEDYKDNQFRFSLLCQAALEAPRVLNLNSNKYFSGPYGDEVVFIANDWHTALLPCYLKAIYKPKGIYENAKVVFCIHNIAYQGRFPISDFSVLNLPENLKGSFDFIDGYNKPVKGRKINWMKAGILESDRVVTVSPFYAQELVSGEDKGVGLDNIIRKTGITGIVNGMDVQEWNPATDKYLDTKYDNTTVLDAKPLVKEALQAEVGLPVDRNIPVIGFIGRLEE

SEQ ID NO: 30956 - protein, 153 aa, Streptococcus pyogenes
PMAYVLWNHFMNINPKTSRNWSNRDRFILSAGHGSAMLYSLLHLAGYDLSVEDLKNFRQWGSKTPGHPEVNHTDGVEATTGPLGQGIANAVGMAMAEAHLAAKFNKPGFDIVDHYTFALNGDGDLMEGVSQEAASMAGHLKLGKLVWLYDSND

SEQ ID NO: 30957 - protein, 340 aa, Bradyrhizobium sp. BTAi1
MLSTKQPVLRRFWYAIMPMDHLKDGPKPFTLLGQPIVLFLDDKGEPAALEDRCCHRTARLSKGWCNNGHVVCGYHGWEYDRDGKLVMVPQFPFEQPIPEARARAFRARQRYGYVWVALDEPLSDIPDIPEDGKPGYRRIHQFYDTWNTAALRLMENSFDNAHFAFVHKSTFGDISQPKPEKYEIVETEEGFDAETIITVRNPPNAARITGTTEPVTKRHQRNKWFMPFCRRLDMEYPSGIRHIIFNCATPIADGRIQVVQLLFRNDTEADCSTQELIDWDAAIIAEDREMLESTDPDAIVDMSRKIEMHMPSDRPGMIMRKRLLDLLRAHDEDEIPAGAA

SEQ ID NO: 30958 - protein, 374 aa, Triticum aestivum
  misc_feature (302)..(302): Xaa can be any naturally occurring amino acid
  misc_feature (314)..(314): Xaa can be any naturally occurring amino acid
  unsure (1)..(374): unsure at all Xaa locations
LAWSRPRSTVEQSHLKTEIMSIFDDLTQDDQDSVRLLAVEGCAALGKLLEPQDCVAHILPVIVNFSQDKSWRVRYMVANQLYELCEAVGPEPTRADLVPAYVRLLRDNEAEVRIAAAGKVTKFCRILSPQLAIQHILPCVKELSSDSSQHVRSALASVIMGMAPVLGKDATIEQLLPIFLSLLKDEFPDVRLNIISKLDQVNQVIGIDLLSQSLLPAIVELAEDRHWRVRLAIIEYIPLLASQLGVGFFDDKLGALCMQWLEDKVFSIREAAANNLKRLAEEFGPEWAMQHIIPQVLEKINXPHYLYRMTILQXISLLAPVMGAEITCQKLLPVVIISSKDRVPNIKFNVAKVLNPLVPILDNLFRKNCEPLPP

SEQ ID NO: 30959 - protein, 313 aa, Photinia villosa
GGLGDVLGGLPPAMAANGHRVMTVSPRYDQYKDAWDTGVPVEIEVGGRVETVRFFHCYKRGVDRVFVDHPSFLERVWGKTGSKIYGPSAGEDYKDNQFRFSLLCQAALEAPRVLNLNSNKYFSGPYGDDVLFIANDWHTALLPCYLKAIYKPKGIYENAKVVFCIHNIAYQGRFPISDFSVLDLPENLKGSFDFIDGYNKPVKGRKINWMKAGILESDRVVTVSPYYAQELVSGEDKGVELDNIIRKTGITGIVNGMDVQEWNPATDKYLDTKYDNTTVLDAKPLVKEAPQAEVGLPVDRNIPVIGFIGRLEE

SEQ ID NO: 30960 - protein, 153 aa, Streptococcus pyogenes
PMAYVLWNHFMNINPKTSRNWSNRDRFILSAGHGSAMLYSLLHLAGYDLSVEDLKNFRQWGSKTPGHPEANHTDGVEATTGPLGQGIANAVGMAMAEAHLAAKFNKPGFDIVDHYTFALNGDGDLMEGVSQEAASMAGHLKLGKLVLLYDSND

SEQ ID NO: 30961 - protein, 153 aa, Streptococcus pyogenes
PMAYVLWNHFMNINPKTSRNWSNRDRFILSAGHGSAMLYSLLHLAGYDLSVEDLKNFRQWGSKTPGHPEVNHTDGVEATTGPLGQGIVNAVGMAMAEAHLAAKFNKPGFDIVDHYTFALNGDGDLMEGVSQEAASMAGHLKLGKLVLLYDSND

SEQ ID NO: 30962 - protein, 356 aa, Medicago truncatula
MSLLSDLINLDLSETTEKIIAEYIWIGGSGLDLRSKARTLPGPVTDPSQLPKWNYDGSSTGQAPGEDSEVIIYPQAIFKDPFRRGNNIFVMCDAYTPAGEPIPTNKRHAAAKVFSHPDVVAEVPWYGIEQEYTLLQKDINWPLGWPVGGFPGPQGPYYCGAGADKAFGRDIVDSHYKACLYAGINISGINGEVMPGQWEFQVGPSVGISAGDEIWVARYILERITEIADVVLSFDPKPIKGDWNGAGAHTNYSTKSMREDGGYEVILKAIEKLGKKHKEHIAAYGEGNERRLTGRHETADINTFLWGVANRGASIRVGRDTEKAGKGYFEDRRPSSNMDPYVVTSMIADTTILWKP

SEQ ID NO: 30963 - protein, 334 aa, Schizosaccharomyces pombe
MTLSGKPAALLVGTLKHAHKEWEALGKYAELKTYSDGTREDFLAKCKTEFQNVKAICRTYNSKFYMGIWDKEIIDNLPPSVKFICHLGAGYETVDVAACTARGIQVSHVPKAVDDATADVGIFLMLGALRGFNQGIFELHKNNWNANCKPSHDPEGKTLGILGLGGIGKTMAKRARAFDMKIVYHNRTPLPEEEAEGAEFVSFDDLLAKSDVLSLNLPLNAHTRHIIGKPEFQKMKRGIVIVNTARGAVMDEAALVEALDEGIVYSAGLDVFEEEPKIHPGLLENEKVILLPHLGTNSLETQYKMECAVLMNVKNGIVNDSLPNLVPEQRGDIE

SEQ ID NO: 30964 - protein, 592 aa, Mannheimia succiniciproducens MBEL55E
MNRSELDFHFVNRVRQQAKMLNQATALRHKVNGGWVDISWEEFQFQIDRVSLALLAHGIDVQDKIGIFAHNMPQWTIADLGALQIRAVTVPIYATNTAKQAEFIINNAEIKILFVGEQEQLDTILEIKNNCPTLEKIILMKSTAEFSPNESLLSWHSFMGKSADTDPNRLLERLNDARLTDLFTLIYTSGTTGDPKGVMLDFSNLAHQLKSHDLALPDVVGREDVSLSFLPLSHIFERAWVAYVLHRGAVVCYLESTNEVRNALTELKPSLMCAVPRLYEKMYSAIQDKVIHAPLHRRMLFQWAINQGQKFAHTQKSTWRHKIADKLVLSKLRNLLGGNIKMMPCGGAKLEGKIGEFFHAIGINVKLGYGMTETTATVSCWADKHFNAASIGRLMPNAEVKIGENNEILVRGGMVMKGYYNNSAETAKAFTEDGFFKTGDAGEFDENGNLYITDRIKELMKTSNGKYIAPQYIEGKLGKDKFIEQIAVIADAKKYVSALIVPSFEALEDYAKQLNIKYQDRLELIKHSEIIKLFEKRLEELQQELAHFEQVKKFTLLPQAFSIKMEEITPTLKLRRKVILERYRRQIEAMYS

SEQ ID NO: 30965 - protein, 199 aa, Glycine max
  misc_feature (189)..(189): Xaa can be any naturally occurring amino acid
  unsure (1)..(199): unsure at all Xaa locations
MQIFVKTLTGKTITLEVESSDTIDNVKSKIQDKEGIPPDQQRLIFAGKQLEDGRTLADYNIQKESTLHLVLRLRGGMQIFVKTLTGKTITLEVESSDTIDNVKAKIQDKEGIPPDQQRLIFAGKQLEDGRTLADYNIQKESTLHLVLRLRGGMQIFVKTLTGKTITLEVESSDTIDNVKARIQEQEGIXSDQQTLIFAG

SEQ ID NO: 30966 - protein, 649 aa, Glycine max
MRMTIDLVSQQSLTARLQLSILKDKLKIQCRKARGLDFGRNESSKIDSSPVKLRSREHGKEKKNNFDWDSLRIQAEAKAGKREKTENTMDSLDWDAVRRADVSEIANAIKERGMNNMLAERIQSFLNLLVDKHGGIDLEWLRDVPPDQAKEFLLSIRGLGLKSVECVRLLTLHHLAFPVDTNVGRIAVRLGWVPLQPLPESLQLHLLELYPVLESIQKYLWPRLCKLDQRTLYELHYQLITFGKVFCTKSKPNCNACPMRGECRHFASAFASARLALPGSEQKSIVITTGNNATEQNPSLVINQLPLLLPENINQAELQQTEVIRQLEAKSEINISQPIIEEPATPEPECSQVSENDIEDTFNEESCEIPTIKLDIEEFTLNLQNYMQENMELQEGEMSKALVALHPGAACIPTPKLKNVSRLRTEHYVYELPDSHPLLNGWNKREPDDPGKYLLAIWTPGETADSIQPPESKCSSQECGRLCNENECFSCNSFREASSQIVRGTLLIPCRTAMRGSFPLNGTYFQVNEVFADNDSSLNPISVPRSWIWNLDRRTVYFGTSIPSIFKGLSTREIQQCFWRGYVCVRGFDREKRAPRPLLARLHFPVSRLPKNRDKTQQESASANSQGLNFKQNPEQPELLSNIRQTGGS

SEQ ID NO: 30967 - protein, 321 aa, Vibrio fischeri ES114
MSKSNAVTKEVEEFDLDTINDAELTSIEEESERLEVSSSQKVMDATQLYLGEIGFSPLLTAEEEVYFSRLALKGDEAARARMIESNLRLVVKIARRYNHRGLALLDLVEEGNLGLIRAVEKFDPERGFRFSTYATWWIRQTIERAIMNQTRTIRLPIHVVKELNVYLRAARELSQKLDHEPTPEEIAEKLDKPVSDVSRMLRLNERVASVDSMVAGESDKALLDILPDTKNSDPESETQKDDINTSLVGWLGQLNPKQKEVVARRFGLLGYEAATLEQVGIEIGLTRERVRQIQVEGLRRLREIMTNQGLNMETLFAVEEY

SEQ ID NO: 30968 - protein, 157 aa, Salmonella enterica
EICIIWGLGISLAVYLTAGISGGHLNPAVTIALWLFACFPKQKVLPYIIAQFAGAFGGALLAYVLYSSLFTEFETAHHMVRGSVESLQLASIFSTYPAAALNVWQAALVEVVITSILMGMIMALTDDGNGIPKGPLAPLLIGILVAVIGASTGPLTG

SEQ ID NO: 30969 - protein, 484 aa, Brachymonas petroleovorans
MDAQRTLPDCSKLFLGGRWVEPAQGMYYDNENPAKRETICRVAQASAADVDAAVRGAQQALEPGSPWAQMTPAARARLLWRVAERIREQVEELAWLESLDTGKPYGEALHGDIPHAAGAFEYYAGWCSKLAGSVLPVSPRYLDYTRLEPVGVVGAIIPWNFPLQMAAMKVAPALAAGNAVLLKPAEQTPLTAFALARIFEELEFPPGVLSVLPGFGATGAALVAHPGIDKITFTGSTAVGKTIMRGAADTLKRVSLELGGKSPNIVFADADLKRAVRGATTGIYYNQGQMCTAGSRILVQDSLYDKFLEAFTAAIADLRPGDPLDPKTRMGALVSQEQFERVSHYVALGQEDGATLLAGGQGSAERGYFFPPTIFTDVKPEHRIAQEEIFGPVVSVMRFGSEEEALRLANGVSYGLAAGVWTADVGRAHRVAHGLRAGTVWVNTYNALWNEAPFGGYKQSGIGREGGREGIEPYTEVKNICLSL

SEQ ID NO: 30970 - protein, 660 aa, Oryza sativa (japonica cultivar-group)
MKHLVQVGEAREAAEEDGGAPSAGPAYRCAYGGGAASPPAVPGLECCWDIFRMTVERCPDNKMLGRREIVDGKAGKYTWITYKEAYDTVIKVGASIRSLGVGKGGRCGIYGANCPEWVISMQACNAHGIYCVPLYDTLGAGAVEFILCHAEVEIAFIEEKKIGEVLKTFPNATKYLKTIVSFGKVNPEQKEKVEQNGVSIYSWEEFLQLGGEEKYELPTKQKDDICTIMYTSGTTGDPKGVLISNRSIITIISAVDGFLANSKEQLREDDVYISYLPLAHIFDRVLEEVFIHHGASIGFWRGDVKLLVEDIGELKPTIFCAVPRVLDRIYGGLQDKVSTGGFLKKTLFNVAYKYKQGNMVKGSKHEEAAAMFDKLVFTKVKRGLGGRVRLILSGAAPLSNHVEEYLRVVTCSLVLQGYGLTETCAGSFVSLPNNMSMLGTVGPPVPYVEVHLESVPEMGYDALSKESPRGEICIRGDTLFSGYHKREDLTKEVLVDGWFHTGDIGEWQSDGSMKIIDRKKNIFKLSQGEYVAVENLENIFGQAPGVDSIWVYGNSFESCLVAVVNPNKQALERWAESNGVTGDFATMCEDPKAKEFILGELTKTGKEKKLKGFELIRAVHLEPVPFDMDRDLITPTYKKKRPQLLKYYQNVIDSMYKNMK

SEQ ID NO: 30971 - protein, 150 aa, Salmonella enterica
LGLSLAVYLTAGISGGHLTPAVTIALWLFACFPKQKVLPYIIAQFAGAFGGALLAYVLYSSLFTEFETAHHMVRGSVESLQLASIFSTYPAAALNVWQAALVEVVITSILMGMIMALTDDGNGIPKGPLAPLLIGILVAVIGASTGPLTG

SEQ ID NO: 30972 - protein, 150 aa, Agrostis stolonifera var. palustris
MSIVRWSNVFDPFSLDLWADPFDAFRSILPAASGNHDTAAFVNARMDWKETPEAHVFKADLPGVKKEEVKVEVEGGNVLVVSGERKGEGGQERQVATLERSSGKFVRRFRLPENAKVEEVKAGLENGVLTVTVPKAEVKKPEVKAIEISG

SEQ ID NO: 30973 - protein, 259 aa, Triticum aestivum
MPVRVAKLPLPPPFLRRLLLSLSLSLSLAAALATHPPHPKTLEKQRRRRDMAEVEAALPVAATETPEVAAEGDAGAAEAKGPHKLQRQWTFWYDIQTKPKPGAAWGTSLKKGYTFDTVEEFWCLYDQIFRPSKLVGSADFHLFKAGVEPKWEDPECANGGKWTVISSRKANLDTMWLETCMALIGEQFDESQEICGVVASVRQRQDKLSLWTKTASNEAVQVDIGKKWKEVIDYNDKMVYSFHDDSRSQKPSRGGRYTV

SEQ ID NO: 30974 - protein, 312 aa, Arabidopsis thaliana
MESVELTLKNSNMKDKTLTGGAQNGDDFSVDDLLDFSKEEEDDDVLVEDEAELKVQRKRGVSDENTLHRSNDFSTADFHTSGLSVPMDDIAELEWLSNFVDDSSFTPYSAPTNKPVWLTGNRRHLVQPVKEETCFKSQHPAVKTRPKRARTGVRVWSHGSQSLTDSSSSSTTSSSSSPRPSSPLWLASGQFLDEPMTKTQKKKKVWKNAGQTQTQTQTQTRQCGHCGVQKTPQWRAGPLGAKTLCNACGVRYKSGRLLPEYRPACSPTFSSELHSNHHSKVIEMRRKKETSDGAEETGLNQPVQTVQVVSSF

SEQ ID NO: 30975 - protein, 221 aa, Desulfotalea psychrophila LSv54
MNLTGIERGEYKVLKTLKHLFERNLEWANKIKERDPDFFPQLSKEHSPDYLWIGCSDSRVPANQITNLPPGDVFVHRNIANVVVHTDLNCLSVLQYAVDVLKVKHIIVCGHYGCGGIKASMEDAEHGLIDNWLRHVKDVIRLNADKLKDLEPDKKFNLLCELNVIEQVTNVCNTTIVQNAWKKGAELSIHGWIYSLRNGILKDLTTCIDSREEFDRRKKKM

SEQ ID NO: 30976 - protein, 759 aa, Mycobacterium bovis AF2122/97
MTQPVRRQPFTATITGSPRIGPRRELKRATEGYWAGRTSRSELEAVAATLRRDTWSALAAAGLDSVPVNTFSYYDQMLDTAVLLGALPPRVSPVSDGLDRYFAAARGTDQIAPLEMTKWFDTNYHYLVPEIGPSTTFTLHPGKVLAELKEALGQGIPARPVIIGPITFLLLSKAVDGAGAPIERLEELVPVYSELLSLLADGGAQWVQFDEPALVTDLSPDAPALAEAVYTALCSVSNRPAIYVATYFGDPGAALPALARTPVEAIGVDLVAGADTSVAGVPELAGKTLVAGVVDGRNVWRTDLEAALGTLATLLGSAATVAVSTSCSTLHVPYSLEPETDLDDALRSWLAFGAEKVREVVVLARALRDGHDAVADEIASSRAAIASRKRDPRLHNGQIRARIEAIVASGAHRGNAAQRRASQDARLHLPPLPTTTIGSYPQTSAIRVARAALRAGEIDEAEYVRRMRQEITEVIALQERLGLDVLVHGEPERNDMVQYFAEQLAGFFATQNGWVQSYGSRCVRPPILYGDVSRPRAMTVEWITYAQSLTDKPVKGMLTGPVTILAWSFVRDDQPLADTANQVALAIRDETVDLQSAGIAVIQVDEPALRELLPLRRADQAEYLRWAVGAFRLATSGVSDATQIHTHLCYSEFGEVIGAIADLDADVTSIEAARSHMEVLDDLNAIGFANGVGPGVYDIHSPRVPSAEEMADSLRAALRAVPAERLWVNPDCGLKTRNVDEVTASLHNMVAAAREVRAG

SEQ ID NO: 30977 - protein, 65 aa, Passiflora cincinnata
GTNGEVMPGQWEYQVGPSVGIDAGDHIWCSRYILERITEQAGVVLFLDPKPIEGDWNGAGCHTNY

SEQ ID NO: 30978 - protein, 564 aa, Xanthomonas campestris pv. campestris str. ATCC 33913; identical to SEQ ID NO: 1206

SEQ ID NO: 30979 - protein, 58 aa, Passiflora cinnabarina
WEYQVGPSVGIDAADHIWCSRYILERITEQAGVVLTLDPKPIEGDWNGAGCHTNYSTK

SEQ ID NO: 30980 - protein, 153 aa, Streptococcus pyogenes
PMAYVLWNHFMNINPKTSRNWSNRDRFILSAGHGSAMLYSLLHLTGYDLSVEDLKNFRQWGSKTPGHPEVNHTDGVEATTGPLGQGIANAVGMAMAEAHLAAKFNKPGFDIVDHYTFALNGDGDLMEGVSQEAASMAGHLKLGKLVLLYDSND

SEQ ID NO: 30981 - protein, 131 aa, Brassica napus
ETERDMRAMFKSMIETKAKEIKKGRQADKDSDLLFSMLASNTKQIKEQGPDSGLSLDDLIDDCKAFYLAGQNVTSSLFVWTLVALSQHQDWQNKAREEISQAFGSNEPDFEGLSHLKVVSMILHEVLRLYS

SEQ ID NO: 30982 - protein, 492 aa, Vibrio parahaemolyticus
  misc_feature (265)..(265): Xaa can be any naturally occurring amino acid
  misc_feature (308)..(308): Xaa can be any naturally occurring amino acid
  misc_feature (323)..(323): Xaa can be any naturally occurring amino acid
  unsure (1)..(492): unsure at all Xaa locations
LKLLVIKGGEQGYLTYAEVNDHLPAEIVDSEQVEDIIQMINDMGIKVVETAPDADDLALNDDTNITDEDAAEAAAAALSSVESEIGRTTDPVRMYMREMGTVELLTREGEIDIAKRIEEGINQVQSSVAEYPGTIPYILEQFDKVQAEELRLTDLISGFVDPDADDTAAPTATHIGSELSETQLEEEDEEDLEDDEESDDDSDDSEEDVGIDPELALEKFNQLRSTYQNLQLAINEYGYDSPKATVANEMMLDVFKEFRLTPKQXDHLVNELRTAMDRVRTQERLIMKSVVEYGKMPKKSFIALFTGXESSDAWLDEILASDXPYAEKIKRNEEEIRRSIAKLKMIEEETSLNVQNIKDISRRMSIGEAKARRAKKEMVEANLRLVISIAKKYTNRGLQFLDLIQEGNIGLMKAVDKFEYRRGYKFSTYATWWIRQAITRSIADQARTIRIPVHMIETINKLNRISRQMLQEMGREPLPEELAERMQMPEDK

SEQ ID NO: 30983 - protein, 264 aa, Frankia sp. EAN1pec
MVLSRGAGLDANPPVCPEDGSRPKPMTVEWASYAQSLTGKPVKGMLTGPVTMLAWSFVRDDQPRGDTARQVALALRDEVAGIEVAGIGVIQVDEPALRETLPLTAGALGGGGHRAPGRRHRRLPGPAAVGQPGLQAQDPWVPRGPGDPHQPGRRGPPGENTALSLARGVGGCADPTPRGEPTPLGPGPVRLVSRRFRDRCGIAAVGPCARRGPGGCVRSGCRARRRGRGSARGTWWRLRCRATLSGRPVRWHAAVRRRRRAGAG

SEQ ID NO: 30984 - protein, 571 aa, Schizosaccharomyces pombe 972h-
MSGDILVGEYLFKRLEQLGVKSILGVPGDFNLALLDLIEKVGDEKFRWVGNTNELNGAYAADGYARVNGLSAIVTTFGVGELSAINGVAGSYAEHVPVVHIVGMPSTKVQDTGALLHHTLGDGDFRTFMDMFKKVSAYSIMIDNGNDAAEKIDEALSICYKKARPVYIGIPSDAGYFKASSSNLGKRLKLEEDTNDPAVEQEVINHISEMVVNAKKPVILIDACAVRHRVVPEVHELIKLTHFPTYVTPMGKSAIDETSQFFDGVYVGSISDPEVKDRIESTDLLLSIGALKSDFNTGSFSYHLSQKNAVEFHSDHMRIRYALYPNVAMKYILRKLLKVLDASMCHSKAAPTIGYNIKPKHAEGYSSNEITHCWFWPKFSEFLKPRDVLITETGTANFGVLDCRFPKDVTAISQVLWGSIGYSVGAMFGAVLAVHDSKEPDRRTILVVGDGSLQLTITEISTCIRHNLKPIIFIINNDGYTIERLIHGLHASYNEINTKWGYQQIPKFFGAAENHFRTYCVKTPTDVEKLFSDKEFANADVIQVVELVMPMLDAPRVLVEQAKLTSKINKQ

SEQ ID NO: 30985 - protein, 147 aa, Salmonella enterica
LGLWKICIIWGLGISLAVYLTAGISGGHLNPAVTIALWLFACFPKQKVLPYIIAQFAGAFGGALLAYVLYSSLFTEFETAHHMVRGSVESLQLASIFSTYPAAALNVWQAALVEVVITPILMGMIMALTDDGNGIPKGPLAPLLIGI

SEQ ID NO: 30986 - protein, 546 aa, Vibrio fischeri ES114
MTTNYIFVTGGVVSSLGKGIAAASLAAILEARGLKVTMMKLDPYINVDPGTMSPTQHGEVFVTEDGAETDLDLGHYERFIRTKMTKRNNFTAGRVYADVLRKERRGDYLGATIQVIPHITNAIKERVISGAEGHDIAIVEVGGTVGDIESLPFMEAIRQLAVELGRERAMFMHLTLVPYLAAAGEVKTKPTQHSVKELLSIGIQPDILVCRSDRVIPANERKKIALFCNVQEKAVISMKDVDSIYKIPQLIKAQGTDDLVCQRFGITAPEADLSEWEQVIYEEANPTGDVVIGMVGKYIELPDAYKSVNEALKHAGLKNRLSVTIKYVDSQDVESKGTEILEGLDAILVPGGFGDRGVEGKILAAQYARENKVPYLGICLGMQVALIEYARNVANMEGAHSSEFSKDTKFPVVGLITEWIDSEGNVEERTEKSDLGGTMRLGSQLCHLAKGSKARELYGNATVEERHRHRYEVNNNLLPQLEKAGLKVSGLSADKKLVEIIEIPNHPWFVAAQFHPEFTSTPRDGHPLFEGFVKAAGESVRGELEK

SEQ ID NO: 30987 - protein, 147 aa, Salmonella enterica
CIIWGLGISLAVYLTAGISGGHLNPAVTIALWLFACFPKQKVLPYIIAQFAGAFGGALLAYVLYSSLFTEFETAHHMVRGSVESLQLASIFSTYPAAALNVWQAALVEVVITSILMGMIMALTDDGNGIPKGPLAPLLIGILVAVIG

SEQ ID NO: 30988 - protein, 369 aa, Streptococcus thermophilus CNRZ1066
MATKKQNTAFNVQVADFIRNHKKAGTAIDDEITEKLVIPFVLDADGIDDLLERLTDGGISITDKDGNPSSKYVVEAPKPEELTDEELLGSNSAKVNDPVRMYLKEIGVVPLLSNEEEKELAIAVENGDLEAKQRLAEANLRLVVSIAKRYVGRGMQFLDLIQEGNMGLMKAVDKFDYSKGFKFSTYATWWIRQAITRAIADQARTIRIPVHMVETINKLVREQRNLLQELGQDPTPEQIAERMDMTPDKVREILKIAQEPVSLETPIGEEDDSHLGDFIEDEVIENPVDYTTRVVLREQLDEVLDTLTDREENVLRLRFGLDDGKMRTLEDVGKVFNVTRERIRQIEAKALRKLRHPSRSKQLKDFIED

SEQ ID NO: 30989 - protein, 453 aa, Arabidopsis thaliana
MEEKQERRRRIVLIPAPAQGHISPMMQLARALHLKGFSITVAQTKFNYLKPSKDLADFQFITIPESLPASDLKNLGPVWFLLKLNKECEFSFKECLGQLLLQKQLIPEEEIACVIYDEFMYFAEAAAKEFNLPKVIFSTENATAFACRSAMCKLYAKDGLAPLKEGCGREEELVPKLHPLRYKDLPTSAFAPVEASVEVFKSSCDKGTASAMIINTVRCLEISSLEWLQQELKIPIYPIGPLHMVSSAPPTSLLDENESCIDWLNKQKPSSVIYISLGSFTLLETKEVLEMASGLVSSNQHFLWVIRPGSILGSELTNEELLSMMEIPDRGYIVKWAPQKQVLAHSAVGAFWSHCGWNSTLESMGEGVPMICRPFTTDQKVNARYVECVWRVGVQVEGELKRGVVERAVKRLLVDEEGEEMKLRALSLKEKLKVSVLPGGSSHSSLDDLIKTL

SEQ ID NO: 30990 - protein, 541 aa, Symbiobacterium thermophilum IAM 14863
MAKFIFITGGVVSGLGKGITAASLGRLIKSRGYRVTALKFDPYLNVDPGTMSPIQHGEVFVTEDGGECDLDVGHYERFMDVNMGKGNNVTTGKIYSSVIAKERRGDYLGGTVQVIPHITNEIKSHIRRVAEDSDADVILVEIGGTVGDIEGQPFLEAIRQFKNEVPSKDDVLFIHVTLVPYIAASGELKTKPTQHSVRELRSIGIQPDVIVCRSDREIPKDLREKIALFCDVPPEAVIPNEDLGSLYEVPLAMEKEGLAEIVCRRLGLDSRTPDLAEWEALVQRAKHPEREVEIALVGKYVALEDAYLSVVESLNHAGIHNNARVRIHWVDSEKLENGITPEALEACLGRADGILVPGGFGYRGIEGKINAIRYAREKGIPFFGICMGMQSAVIEAARNLLGLSKANSTEFVTDCKDPVIDMMAQQKQVTDLGGTMRLGAFPCRLKPGSKAHAAYGTEVVHERHRHRFEVNNAYLERLEAVGLKAVGVWPEGNLVEVVEMEGHPWFVGVQFHPEFKSRPNRPHPLFRDFIKAALEYRAGKK

SEQ ID NO: 30991 - protein, 181 aa, Shigella flexneri 2a str. 301
MLKLLKTIMRAGTATVKYPFAPLEVSPGFRGKPDLMPSQCIACGACACACPANALTIQTDDQQNSRTWQLYLGRCIYCGRCEEVCPTRAIQLTNNFELTVTHKADLYTHATFHLQRCSRCERPFAPQKTVALAAELLAQQQNAPQNREMLWAQASVCPECKQRATLINDDTDVPLVAKEQL

SEQ ID NO: 30992 - protein, 422 aa, Arabidopsis thaliana
MATLKCIDWQFSGSEAAKDAAAASLGSYTSALYALCDPHGKPILPPRNEILETSNTAEKAVVKAVLYGSGNAYAPSLGLAAAKSAVAEYLNQGLPKKLTADDVFMTLGCKQAIELAVDILAKPKANVLLPSPGFPWDLVRSIYKNLEVRHYNFLPEKNFEIDFDSVRALVDENTFAIFIINPHNPNGNTYSEAHLKQLAELAKELKIMVVSDEVFRWTLFGSNPFVPMGKFSSIVPVVTLGSISKGWKVPGWRTGWLTLHDLDGVFRNTKVLQAAQDFLQINNNPPTVIQAAIPDILEKTPQEFFDKRQSFLKDKVEFGYSKLKYIPSLTCYMKPEACTFLWTELDLSSFVDIEDDQDFCNKLAKEENLVVLPGIAFSQKNWLRHSIDMETPVLEDALERLKSFCDRHSNKKAPLKDVNGVK

SEQ ID NO: 30993 - protein, 363 aa, Triticum aestivum
MFVFCLCTRCRICRVSSFPVLLLFMFIHLSYFFLVLLLILGQFFFTRYEKYHGYYGGKEESRKSNYTDMVNKYYDLATSFYEYGWGESFHFAHRWNGESLRESIKRHEHFLALQLELKPGMKVLDVGCGIGGPLREIARFSSTSVTGLNNNDYQITRGKALNRSVGLGATCDFVKADFMKMPFSDNTFDAVYAIEATCHAPDPVGCYKEIYRVLKPGQCFAVYEWCITDHYDPNNATHKRIKDEIELGNGLPDIRSTRQCLQAVKDAGFEVIWDKDLAEDSPLPWYLPLDPSRFSLSSFRLTTVGRIITRNMVKVLEYVGLAPEGSQRVSSFLEKAAEGLVEGGKKEIFTPMYFFVVRKPLSE

SEQ ID NO: 30994 - protein, 289 aa, Bifidobacterium longum NCC2705
MTNGHINPANVPDIALKDGHSIPQVGLGVLRIDDEGVVPVVESALEAGYRHIDGAAGYNNEAGVGRALAASGYNKGAKRETLWVTTKLRDSQQGYDSALKAFDNSLKLLQLDYVDMYMIHWPTPFDWRSTDTWKAFVKLRDEGMARTLGVCNFMPADLKRLHEETGAWPAVNQIELHPTWQQREVVAFCKEHGIAVEAYSPMARGADLNAGDGTIEKIAAAHEVSPAQVILRWHIENGTIIIPKSVHADRQKENLNLFGFALTADEHAAIDALDGPTRAGHDPLTFTYA

SEQ ID NO: 30995 - protein, 172 aa, Glycine max
KMACLVSRSGRELQRYNNMGGRQVVGCIPYRYKQDIEGKMSNELEVLVVSSQKGQGLMFPKGGWELDESVEEAAYRESLEEAGVMGMIERELGQWNFISKRYGIYYEGHMFPMFVKEQLDIWPEKNLRRRIWMTVAEAREVCQHWWMKEALDILVQRIVSSQQRKEDLYSIG

SEQ ID NO: 30996 - protein, 270 aa, Triticum aestivum
  misc_feature (118)..(118): Xaa can be any naturally occurring amino acid
  unsure (1)..(270): unsure at all Xaa locations
SARGFTVDDRGNIYVADAMNMAIRKISDTGVTTIAGGKSMRGGHMDGPSDDAKFSTDFEIRYVSSSCSLLVIDRGNQAIREIPLQPDDCEYQDEAGFPLGVALLFAAGFFGYMLPSVXYSDLVGSEISTMQEPQTPPRPSNASIPPYQPYQPYQQPFKPSFGPPLIPNEDQAGKHEAEEGFFTSVGKLMGGAKSSVADMFSRKKRPARQHHQQHQQRRANPWPVQESYAIPHGETPPPLDSRGPTPQKNYAFVTTEPEKAHHVWHGQPYL

SEQ ID NO: 30997 - protein, 51 aa, Passiflora citrifolia
  misc_feature (42)..(42): Xaa can be any naturally occurring amino acid
  unsure (1)..(51): unsure at all Xaa locations
WEYQVGPSVGIEAGDHIWCSRYILERITEQAGVVLTLDPKPXEGDWNGAGC

SEQ ID NO: 30998 - protein, 519 aa, Orobanche ramosa
MTEQLGAAAKFRRSGGSPTKALINKPKKNMYALLISVMASMTSILLGYDTGVMSGATLYIKKDLKITDVQVEILVGLINIYSLIGSAVAGRTSDYLGRRITIVIASVIFFVGAAVMGLANNYAVLMVGRFVAGLGVGYALMIAPVYAAEVAPASSRGFLTSFPEVFINFGVLLGYLSNYAFAKFSLKLGWRLMLGVGALPAIFIGLAVIVMPESPRWLVMQGRLGDAKKVLDRTSDSPQEAQLRLADIMEAAGLPEDCHDDVVPVLKQDRGGGGVWKELIVHPTKPVLHITIAAVGCQFFQQASGIDAVVMYSPRIYEKAGITSDEKKLLATIAVGLCKTVFILVTTFMVDRIGRRVLLLTSCGGLVLSMLTLATGLTVIDHYGADRFPWVVVLCVLTTYSSVAFFSMGMGPIAWVYSSEIFPLKLRAQGCGLGVAINRATNGVILMSFISLYNAITIGGAFYLFSGIGIVTWIFFFTLLPETRGRTLEDMEVLFGTFFKWRTTMRELHKKEAEDALYA

SEQ ID NO: 30999 - protein, 213 aa, Saccharomyces cerevisiae
MSVEEVSKKFEENVSVDDTTATPKTVLSDSAHFDVKHPLNTKWTLWYTKPAVDKSESWSDLLRPVTSFQTVEEFWAIIQNIPEPHELPLKSDYHVFRNDVRPEWEDEANAKGGKWSFQLCGKGADIDELWLCTLLAVIGETIDEDDSQINGVVLSIRKGGNKFALWTKCEDKEPLLRIGGKFKQVLKLTDDGHLEFFPHCSANGRHPQPSITL

SEQ ID NO: 31000 - protein, 520 aa, Trametes sp. I-62
MAKLQFSNFFVTLAVVTGALAAVGPKADLTITNAVVAPDGFSRDAVVVNGVFPGPLITGKKGDRFQLNVIDNLTNHTMLKSTSIHWHGFFQAGTNWADGPAFVNQCPISTGHAFLYDFHVPDQAGTFWYHSHLSTQYCDGLRGPIVVYDPLDPHAFRYDVDDESTVITLSDWYHTAARLGPRFPLGADATLINGLGRSSSTPTANVTVINVQHGKRYRFRLVSLSCDPNHTFSIDGHNLTVIEVDGVNSKPLTVDSIQIFAAQRYSFVLNANQTVGNYWIRANPNFGTTGFAGGINSAILRYQGAPIIEPTTVQTTSVIPLVETNLHPLVPTIVPGLPVSGGVDKAINLAFNFNGTNFFINNATFTPPTVPVLLQILSGASTAQDLLPPGSVYPLPAHSSIEITLPATTLAPGAPHPFHLHGHVFAVVRSAGSTAYNYVDPIFRDVVSTGTPAAGDNVTIRFHTDNPGPWFLHCHIDFHLEAGFAIVFAEDVADVKAANPVPKAWSDLCPTYDALAEGDL

SEQ ID NO: 31001 - protein, 632 aa, Bacillus cereus G9241
MCGYVGCLYNTAKRYSETEKIQFENMTNLLYHRGPDDQGYFRDEHVQFGFRRLSIIDLDAGHQPLAYENERYILMFNGEIYNYIELREMLIKQGACFSTQSDTEVIVALYAQVKEECVNYLRGMYTFVIWDRQEKKLFGARDHFGIKPLYIAQQNDITFFASEKKSILHVMQDKGVNPTALQHYFTYQYGPEPETLTNDINKIEPGHYFIKEIGKELEVYRYWKPYFNASDKTKEDHIRAIRDVLYDSVKVHMRSDVPVGAFLSGGIDSSIIASIAKEINPNLLTFSVGFEHRGFSEIDVAKETAEKLGVKNYSVLVTPQEFMNEFPKIMWHMDDPLADPAAVPLYFVAKEARKHVTVVLSGEGSDELFGGYNIYREPNSLKMFSYIPTSGKTVLKALSGVLKEGFKGKSFLERGCTPIEERYYGNAKIFREEEKIKLIKSYNESVNYKDVTKPLYNEIKNYDDVSKMQYIDMYTWLRGDILLKADKMSTAHSLELRVPFLDKEVFDVASKIPTELKIANRTTKVILREAVRGIVPDHVLDRKKLGFPVPIRHWLKDEMYDWALNIIKESKTEHLIDKQYVLNLLEAHCADKGDYSRKIWTVIAFMVWHQIYIEHKYDTNLFSEECRVYNLV

SEQ ID NO: 31002 - protein, 492 aa, Vibrio parahaemolyticus
  misc_feature (266)..(266): Xaa can be any naturally occurring amino acid
  misc_feature (270)..(270): Xaa can be any naturally occurring amino acid
  misc_feature (308)..(308): Xaa can be any naturally occurring amino acid
  misc_feature (316)..(316): Xaa can be any naturally occurring amino acid
  misc_feature (322)..(323): Xaa can be any naturally occurring amino acid
  misc_feature (332)..(332): Xaa can be any naturally occurring amino acid
  misc_feature (344)..(344): Xaa can be any naturally occurring amino acid
  misc_feature (372)..(372): Xaa can be any naturally occurring amino acid
  unsure (1)..(492): unsure at all Xaa locations
LKLLVIKGKEQGYLTYAEVNDHLPAEIVDSEQVEDIIQMINDMGIKVVETAPDADDLALNDDTNITDEDAAEAAAAALSSVESEIGRTTDPVRMYMREMGTVELLTREGEIDIAKRIEEGINQVQSSVAEYPGTIPYILEQFDKVQAEELRLTDLISGFVDPDADDTAAPTATHIGSELSETQLEEEDEEDLEDDEESDDDSDDSEEDVGIDPELALEKFNQLRSTYQNLQLAINEYGYDSPKATVANEMMLDVFKEFRLTPKQLXHLVXELRTAMDRVRTQERLIMKSVVEYGKMPKKSFIALFTGXESSDAWLXEILASXXPYAEKIKRXEEEIRRSIAKLXMIEEETSLNVQNIKDISRRMSIGEAKAXRAKKEMVEANLRLVISIAKKYTNRGLQFLDLIQEGNIGLMKAVDKFEYRRGYKFSTYATWWIRQAITRSIADQARTIRIPVHMIETINKLNRISRQMLQEMGREPLPEELAERMQMPEDK

SEQ ID NO: 31003 - protein, 520 aa, Trametes sp. I-62
MAKLQFSNLFVTLAVVTGALAAVGPKADLTITNAVVAPDGFSRDAVVVNGVFPGPLITGKKGDRFQLNVIDNLTNHTMLKSTSIHWHGFFQAGTNWADGPAFVNQCPISTGHAFLYDFHVPDQAGTFWYHSHLSTQYCDGLRGPIVVYDPLDPHAFRYDVDDESTVITLSDWYHTAARLGPRFPLGADATLINGLGRSSSTPTANVTVINVQHGKRYRFRLVSLSCDPNHTFSIDGHNLTVIEVDGVNSKPLTVDSIQIFAAQRYSFVLNANQTVGNYWIRANPNFGTTGFAGGINSAILRYQGAPIVEPTTVQTTSVIPLVETNLHPLVPTIVPGLPVSGGVDKAINLAFNFNGTNFFINNATFTPPTVPVLLQILSGASTAQDLLPPGSVYPLPAHSSIEITLPATTLAPGAPHPFHLHGHVFAVVRSAGSTAYNYVDPIFRDVVSTGTPAAGDNVTIRFHTDNPGPWFLHCHIDFHLEAGFAIVFAEDVADVKAANPVPKAWSDLCPTYDALAEGDL

SEQ ID NO: 31004 - protein, 153 aa, Streptococcus pyogenes
PMAYVLWNHFMNINPKTSRNWSNRDRFILSAGHGSAMLYSLLHLAGYDLSVEDLKNFRQWGSKTPGHPEVNHTDGVEATTGPLGQGIANAVGMAMAEAHLAAKFNKPDFDIVDHYTFALNGDGDLMEGVSQEAASMAGHLKLGKLVLLYDSND

SEQ ID NO: 31005 - protein, 436 aa, Methanocaldococcus jannaschii
MKKLIPILEKIPEVELPVKEITFKEKLKWTGIVLVLYFIMGCIDVYTAGAQIPAIFEFWQTITASRIGTLITLGIGPIVTAGIIMQLLVGSGIIQMDLSIPENRALFQGCQKLLSIIMCFVEAVLFVGAGAFGILTPLLAFLVIIQIAFGSIILIYLDEIVSKYGIGSGIGLFIAAGVSQTIFVGALGPEGYLWKFLNSLIQGVPNIEYIAPIIGTIIVFLMVVYAECMRVEIPLAHGRIKGAVGKYPIKFVYVSNIPVILAAALFANIQLWGLALYRMGIPILGHYEGGRAVDGIAYYLSTPYGLSSVISDPIHAIVYMIAMIITCVMFGIFWVETTGLDPKSMAKRIGSLGMAIKGFRKSEKAIEHRLKRYIPPLTVMSSAFVGFLATIANFIGALGGGTGVLLTVSIVYRMYEQLLRERTSELHPAIAKLLNK

SEQ ID NO: 31006 - protein, 314 aa, Nostoc sp. PCC 7120
NGFGRIGRLVLRAGINNPNIEFVGINDLVPPDNLAYLLKYDSTHGRLRSQVETKDDGIVIDGHFIPCVSVRNPAELPWGKLGADYVVESTGLFTDSEGASKHLQAGARRVIISAPTKDPDRVRTLLVGVNHDLFDPSKDLIVSNASCTTNCLAPIAKVINDNFGLTEGLMTTVHAMTATQPTVDGPSKKDWRGGRGAAQNIIPSSTGAAKAVALVLPELKGKLTGMAFRVPTPDVSVVDLTFKTAKATSYKEICAAMKQASEGSLAGILGYTDEEVVSTDFQGDTHSSIFDAGAGIELNSNFFKVVAWYDNEWG

SEQ ID NO: 31007 - protein, 153 aa, Streptococcus pyogenes
PMAYVLWNHFMNINPKTSRNWSNRDRFILSAGHGSAMLYSLLHLAGYDLSVEDLKNFRQWGSKTPGHPEVNHTDGVEATTGPLGQGIANAVGMAMAEAHLAAKFNKPGFDIVDHYTFALNGDGDLMEGVSQEAASMAGHLKLGKLVLLYDSND

SEQ ID NO: 31008 - protein, 351 aa, Triticum aestivum
MAGAAWPLSAAAGLLPASLSLTLLLGSLVVVLVLGVAAVFLEHIRKIGCMHSLERTAVSDAFFEDPGSLKKVPCPSIFDPAEKYISLIVPAYNEECRLPEALTETLNYLKQRSSADKSFTYEVLIVDDGSTDRTSKVAFEYVKKHNIDNVRVLLLGRNHGKGEAVRKGMLHSRGELLLMLDADGATKVTDLAKLEAEVRALAGKAKSSLAPSASSSQRLSDAEIAVFGSRAHLEKQALATRKWYRNFLMKGFHLVVLLTAGPGIRDTQCGFKMFTRSAARKLFTNIRLKRWCFDVEIVYLCKHLRIPMAEVSVSWTEIPGSKVRMTSILHMVFELLLIRVGYGLGIWKIYS

SEQ ID NO: 31009 - protein, 234 aa, Zea mays
  misc_feature (87)..(87): Xaa can be any naturally occurring amino acid
  unsure (1)..(234): unsure at all Xaa locations
SPAPRLKICDFGYSKSSVLHSRPKSAVGTPAYIAPEVLSRHEYDGKLADVWSCGVTLYVMLVGAYPFEDPDDPKNIRKTIQSLFACXQIMQVQYKIPDYVHISTECQQLIARIFVANPVRRITMKEIKSHPWFLKNLPRELTETAQGMYYRRDNRVPSYSDQTSEEIMKIVQDARTMPKSSRSGYGWSSEYSDEEEEKEEEHRPEEHEEEEDEYDRRVKEVHASGELRMDALHI

SEQ ID NO: 31010 - protein, 154 aa, Salmonella enterica
SLGLWEICIIWGLGISLAVYLTAGISGGHLNPAVTIALWLFACFPKQKVLPYIIAQFAGAFGGALLAYVLYSSLFTEFETAHHMVRGSVESLQLASIFSTYPAAALNVWQAALVEVVITSILMGMIMALTDDGNGIPKGPLAPLLIGILVAVIG

SEQ ID NO: 31011 - protein, 164 aa, Gluconobacter oxydans 621H
MTCAYDFSLPGLSGDTIDLSAYRGRPLLIVNTASKCGFTPQYEDLQHLWSRYGRDYPEGLMIIGVPSNDFGQQEPGSSEDIKNFCHRNYGVSFPMTARQHVRGPETTPLFRWLDKQGGFLARPRWNFYKYLTDRDGNLANWFTPLAKPASNRVEEAVRKVLLDH

SEQ ID NO: 31012 - protein, 220 aa, Arabidopsis thaliana
MEPRINDLQVESRVHELLDFPVHTNQISSAIYEILLQCPNDHIENPKKKPYNCPHSGAKCDVTGDIQRLLLHLRNDHNVEMSDGRSFSHRYVHHDPKHLHHATWMLTLLDCCGRKFCLYFEAFHLRKTPMYMAFMQFMGDEEEAMSFSYSLQVGGNGRKLTWQGVPRSIRDSHKTVRDSQDGLIITRKLALFFSTDNNTTDKELKLKVSGRVWREQPVSI

SEQ ID NO: 31013 - protein, 397 aa, Burkholderia sp. 383
MDGLKSGVDTLFLLIGAVMVLAMHAGFAFLELGTVRKKNQVNALVKILVDFSVSTLAYFFIGYTIAYGVEFFDDIGTLSQHSGYALVRFFFLLTFAAAIPAIVSGGIAERAKFNPQLVATLIIVGFIYPFFEGIAWNNRFGVQAWLTHAFGAPFHDFAGSVVVHAFGGWVALPAVLLLGARHGRYAKDGRIAAHPPSNIPFLALGAWVLAVGWFGFNVMSAQTLDKISGLVAVNSLMAMVGGTLAAWMAGRNDPGFTYNGPLAGLVAVCAGSDVMHPIGALVTGAAAGALFVAMFTCVQNKWRIDDVLGVWPLHGMCGALGGLAAGVFGLPALGGLGGVSFMSQLVGTLGGIAIATAGGTLVYGALKATVGLRLDREAEFDGADLSIHRISATPERD

SEQ ID NO: 31014 - protein, 539 aa, Panax ginseng
MNSSSSTTTTDTLHSFMEASALLIDQYFLGWIFAFLFGFLLLLNFKRKREKNNSTEFGTDDSNGYYTPENIAGSTDVIIVGAGVAGSALAYTLANDGRRVHVIERDLTEQDRIVGELLQPGGYLKLIELGLEDCVNEIDAQRVFGYALYMDGKNTRLSYPLEKFHSDVAGRSFHNGRFVQRMREKAASLPNVRMEQGTVTSLVEKKGSVKGVQYKTKDGQELSAFAPLTIVCDGCFSNLRRSLCNPKVEVPSCFVGLILENIDLPHINHGHVILADPSPILFYKISSTEIRCLVDVPGQKVPCISNGELANYLKTVVAPQVPKQLYNSFIAAVDKGNIRTMPNRSMPADPHPTPGALLLGDAFNMRHPLTGGGMTVALSDIVLIRDLLRPLRDLHDSSTLCKYLESFYTLRKPVASTINTLAGALYKVFCASPDKARQEMRNACFDYLSLGGICSQGPIALLSGLNPRPISLFLHFFAVAIYGVGRLLIPFPSPKRMWLGARLILGASGIIFPIIKSEGLRQMFFPAIVPAYYRAPPIH

SEQ ID NO: 31015 - protein, 156 aa, Salmonella enterica
ASLGLWEICIIWGLGISLAVYLTAGISGGHLNPAVTIALWLFACFPKQKVLPYIIAQFAGAFGGALLAYVLYSSLFTEFETAHHMVRGSVESLQLASIFSTYPAAALNVWQAALVEVVITSILMGMIMALTDDGNGIPKGPLAPLLIGILVAVIGA

SEQ ID NO: 31016 - protein, 470 aa, Novosphingobium aromaticivorans DSM 12444
MAEQYDVIVLGSGPGGYVAAIRCAQLGLKTAIVERENLGGICLNWGCIPTKALLRSAEVLNHMKHAAAYGLAADNIRADLDAVVKRSRGVAKQLNQGVTHLMKKNKITVHMGNGILKSATSVEVTGDKGSETISAKHVIVATGARARDLPFAKADGERVWTYRHAMTPKEMPTKLLVIGSGAIGIEFASFYNDMGAEVTVVEMMDRVVPVEDADVSAFLEKALTKQGMKIMTGAGVESLAVSASGVKAKIKGKDGKVAEGDYSHVIVAVGIVPNTEHIGLEALGVKAERGIIAIDGYGRTNVKGLWAIGDVTPGPWLAHKASHEGVIAAEAIAAELGNKEVHPHPMDRGNIPGCTYCHPQIASVGLTEAKAKEAGYAVKVGTFPFIGNGKAIALGEPEGFVKTVFDAKTGELLGAHMIGAEVTEMIQGYVVGKTLETTEAELMHTVFPHPTISESMHESVLAAYGRAIHI

SEQ ID NO: 31017 - protein, 2493 aa, Cochliobolus heterostrophus
MDQQPDPIAICGMALRLPGALKTPAQFWTFLTEKKDARAPIPFARFDAEAFYSASGKSGYFNSKNGYYLDDSAEVGALDTSLFRMSQQESERMDPQAKILLELARECFESAGETDWRGKDIGTYVGSFGNDWLEMAAKDRLDKNMYKVSGYSDFLLSNRLSYEYDLRGPSMTIRTACSASLMGLHEACLAIRNGDCSAALVGGSNLFWSPDTMADMSEQGVTSPNASCRSFDADADGYARAEAVNLIYIKPLSAAIKHGNPIRAIIRGSSLNADGKTPGPSMPSSSSQAALIRRAYQNAGIPESEIIRTAFVECHATGTATGDPIEATAVGNVFGNGGVYIGSVKPNVGHSEGASGITSIIKAVLALENRVIPPNIKFETPNPKIPFLEKDLKVPTDCLGWPKDKLERVSVNNFGIGGANAHFILDSAASYGVNSDIIADPEREESFLESLKWGKLFLITASTSESLEMQTRNLRDYALSNPTKAEHGSYTLACRREHFSHRAFSVIQELSVDSQAGVSIAGVSPLRLVMIFTGQGAQWPRMGIELLQSNTTFASSIKEMDQELRGLPTPPTWSIEEELAKGADSSNLNEAAISQPLCTAVQVALVDALANLAIKPHSVLGHSSGEIAAAYAANRISRRAAIVLAYYRGLVSQAATRSGAMAAIGLSWDEVTPFLQEGVVIACNNSPSNVTISGDEAVVRNVVQAIQTSNTEVFVRMLKVSTAYHSHHMLNAGNEYEEMVASFLEGEVPYNGASTNPGFFSTVTGLLLPDSERIDAQYFRRNLESPVLFLQALDSLLTGSKDSAHRNLCFLEVGPHSTLSGPLRQIFTQNSVAHPYASCLHREKNANATYLAALGTLWQHGLNFDLYRLTNPLGIAKVLPDMPTYPWYHGKSHIIQNRIAQAWRYPKFPHHELLGSLVLENNDDQPSFRNLLQLENAPWIRDHNIDGDVVFPGAAYVTMAGEACRRQCLPDQDHTFFGFSVKNMVIGAALILQENKPVEIVTSLRRWRITDHLESSGWEFMISSFSGTTWTTHCSGCVEAIYSSPPPPAVPETAFPRRTDAKKWYQAMWHLGARYGPCFQGLKNIECTPNKSSAKATICDKTPDGSESHYLIHPTTIDVFFQTMAAAACNGQGHATDRMSVPTFIKRMDIYESSGDLQVHTSAKVLAHGKFHGWGCAIGQDGALAISIDQIKLMPLDTALEIDLHAGASTTWSLEPSFTTMSSILKNATALAKQTPLMQEFALLHIRKALEQIQSIKPASDTMERYVNWMKRQSIPDTLRPMETVTSEVKTFSCPSTVDAIVKISENIIKLVLGEVSATELLMVDDMLLKIYQEAKVTDRGPYIKLLGHQKPNMRILEIGAGAGGTTHEFLSNLVNDSDGGKLWSSYTYTDISAGFFGAAKESFKEHTLEYKVLDITKDPVAQGFEGHDYDLIIATNVMHAVPNLQQALRNVHSLLRHDGTFYLEELCSDVQVTNFIMGLLPGWWVGEQDGRVDEPYVHPERWDGDLRAAGFTGVADCMLDAPRPHQGNAFMIAYPAIKDALPKPVTLLYDDASQQVVEDLKNELSQHGCFETVLQHWDSAESVVAKRNIICLLDINKPFFFDIEASRFDKFRHWMAQVAESKNGILWLTRSSQLSCEHPRWGQTPGAMRTIQKDMGIDLAICELDRLTSLSLKAVAQISERFSRRHTSSHKLELEYAIEDGNIYIPRLYPLNVDSELCKPDSSATTLPQTDNGELNLTLGTVGRLDTLQWTTCSYERPGENEVAIEIMATGLNFRDLLTAMDLIEAPRQVLGLEAAGMVRDVGSGVENLQPGDRVVVVGGTSLFRTAAVVPSTSCWKLPHSLSFEEAATMPCVFMTVIHGLLEFGQMHSGHTVLIHSACGGVGLAAIQLCHMAGATIYCTVSNEEKVQFLEDEFKIPRAHIFNSRNRSFVDDVMRATNGAGVDLVLNSLSGELLHASWECVAEFGKMIEIGKRDLLGNGRVSLHPFVLNRSFHGIDLAHLIERRPAECRRLLGRMMTLYEAGHIKPISPAKTFKVSEVEQCFRYMQQGRHIGKIILRVGDSADEATRSKDLITAHPKRNPTFNPQASYLLAGGLGGLGRIVANWMVENGARHLIFLSRNAGEKETDKAFFEELEYQGCKVMAVKGSVSVVKDVEKAIAAATAPVRGVMNICMQLQDMGFNQMTYEAWSTVNESKIKGTWNMHNVCMSREISLDFFLLFSSVSGLFGNFGQANYAAANTFLDTFVLYRHSLGLNASAIDIGMMYDHGYIAENPLLAERMQLLGAYGIRIPQLLDAITLVLSTPRSKPEKGTSRKCASLLGIGVRSGLPLSDPANRIMWKDDRRMAYYANLDSDSNAASGATSDVDKPTQAIRAFMKQVLAEPKILDQPDTSAFLARQIARKIALMLLRPLDDKEDSEVDILSPLQDAGLDSLVAIEMRRWWRTTFGFDITMLQMVGAENTMALGDRATEGLRIKYAEIEVQPVTSTPVVAVSA

SEQ ID NO: 31018 - protein, 283 aa, ASPERGILLUS NIDULANS FGSC A4
MAAYAQQIVVCTGHRDWTSRIEDDGEEQGWGEFVRGLKRLMGRGGPFADPFNNVMVTNSSFTPSSTVSCSPDTASAFLFPSFKYFPSIPVNVSDSPKTTTNLSTFVKAFLLPTQLSPMTETLPEPRHSELLRKPELASEFPDAVDIEHSPVILICGHGGRDMRCGVMAPILEEQFRKILESRGIYTPAGPDNDKFDRPDRAHIGLISHIGGHKYAGNVIIYIPKSMKYGDSSVAHPLAGRGIWYGRIEPKHVEGVVEETILGGRVLSDHFRGGIDHDGTILRL

SEQ ID NO: 31019 - protein, 381 aa, Legionella pneumophila str. Lens
MTLNIKINEYTAQLQEQGLLRTRQILETDKIDYIRFDSNDYLSLTEDRRIAEAYQKGYELYPCGSGASMVLSGYHSSHQTLERAFAEMLRVDDCLLFSSGYCANLAVTALLGRLGTHCFIDKSVHASIYDGLALSRVTYSRYIHNDMNALPALLKSHLGDSVLITEGIFSMSGQIAPLSTISMLCKENGSELFVDEAHAFGVMGPQGMGSVPGHGLTQNEVPLRVIPFGKAFASQGAVVVGRKDWIHALLQTARSFVYSTAISPALCYGLLKTLEIIAAADSRREKLNQLVAQFKELINSSPLNWLDSDTPIQQLRLGCPHKALHYASELKKDGIYCSAIRAPTVNSASSGLRIIINYKHTIEQIIELFNKLHLIHEYSSR

SEQ ID NO: 31020 - protein, 194 aa, Glycine max
AFQRHEALYGELAKGQSPKFMVFACSDSRVCPSHVLDFQPGEAFVVRNVANIVPPYDQSKYAGTGAAVEYAVLHLKVSEIVVIGHSACGGIKGLLSFPYDGTYSTDFIEEWVKIGLPAKAKVKTQHGDAPFAELCSHCEKESVNVSLGNLLTYPFVRDGLVNKTLSLKGGYYDFVKGSFELWGLQFGLASSFSV

SEQ ID NO: 31021 - protein, 444 aa, Legionella pneumophila str. Lens
MVNTDQLIAKDLKHIWHPCSQMKDFETFPPIVVNKAQGSYLYTNKGPVIDAISSWWCKSLGHGHPAVIAAIKNQLDCFEHVIGANTTHTAAVELAEKLSEITGKQHVFFASDGSSAVEIAMKLAIHASQIKGHKNKNQFIALKNGYHGETIGTMSVSDLGLYKTPYASFGVQCHYIDDIPYVSGLKDPLWTNCDAYWNNVVQQLNKICDKVCAILLEPIIQGAGGMLCYSADFLSKISSWAKEKDIYLIADEIMTGIGRTGEWLACDHARIQPDLICLSKGLTSGSIPFSCVMIDSALFDLFYDDYHTGKSFLHSHTYSGNPLAIVAALATIKTIEQDNLLMHSQELGKIMFSYLQDIARDSRKLVNVRGVGAVVAADLIESSQARIGFKIYQEAIKQGALIRPIGNTLYWLPPLNTDKEIIGKLAEITLNSIEKAYNKAQGYE

SEQ ID NO: 31022 - protein, 53 aa, Glycine max
IAWEVANKVRGIYTVLKTKVPVTVHEYGDRYCLIGPLSYKTAPMEVESPKFWG

SEQ ID NO: 31023 - protein, 191 aa, Triticum aestivum
GEWARLRMLPAAMAPGLAWSRRRSHKASCPTAARVLLRRNARSRFLHFPNPTQPCTSRRRRRRRRAAVSGKMRPILMKGHERPLTFLKYNRDGDLLFSCAKDHTPTVWYADNGDRLGTYRGHNGAVWSCDVSRHSARLITGSADQTAKLWDVKTGKELFTFRFDAPARSVDLAIGDHLAVITTDSFMRMDM

SEQ ID NO: 31024 - protein, 520 aa, Trametes sp. I-62
MSRFHSLLTFIVASLASSALASIGPVADMTISNAEVSPDGFARQAVVVNGVTPGPLVKGNMGDRFQLNVIDNLTNHTMLKSTSIHWHGLFQHGTNWADGPAFVNQCPVSAGHSFLYDFQVPGQAGTFWYHSHLSTQYCDGLRGPLVVYDPHDPHKSRYDVDNDDTVITLADWYHVAAKRRSAFPLGADATLINGLGRSPTTPSADLAVINVTQGKRYRFRLVSLSCDPNHTFSIDGHNMTIIEVDSVNSQPLVVDSIQIFAAQRYSFVLNANQAVDNYWVRANPSFGNVGFSGGINSAILRYAGAPAIEPTTNQTTSVIPLNEVNLHPLAPTPVPGKAVAGGVDTPINMAFSFNGTNFFINGASFVPPTVPVLLQILSGAQSAQDLLPSGSVYVLPSNASIEISFPATAAAPGVPHPFHLHGHTFAVVRSAGSTEYNYDNPIFRDVVSTGTPAAGDNVTIRFQTNNPGPWFLHCHIDFHLEAGFAVVMAEDTPDVKAVNPVPQSWSDLCPIYDALDASDL

SEQ ID NO: 31025 - protein, 607 aa, Bifidobacterium longum NCC2705
MLDHYTTPGESIEIRDNQTIYSLLTDRLARTGADTVIAAKKIGPGRWQNVTTGEFHERVVSAAKGLIALGIAKGDAVTIFSSTRLEWGILDFALAAVGAVSVPIYDTDSAPQAQRIMNDSVVKLAFADNRERFDRLDSVKDHCPALKQILMIEGNALGALEGLGVTVSDEELHERVATVRTDDLATIVYTSGSTGNPKGAELTHKNFVSITISASQALHEVVLDDHPRLLLFLPLAHCFARFIQYASIASDDGVVGYLPDTKTLLPDLRSFEPTYLLGVPRVFEKVYNAASHKAGAGWKGRLFVKAAEAARVWSRKEQAGEQHTFAEIAERAKYETLVYRTVRGALGPKIKYVACGGAPLSLDLAHFYNGIGLPMIQGYGMTETAAPFAATRVTDNVIGTVGQPAPGSSIRISDEGELQVKGPNVFRGYHNLPEKTAEAFTADGWLRTGDLAEIDDEGHIVITGRIKDIIITAGGKNVSPIPLEEEIAKCPIVEHCVVVGDQRPFIGALVTLDPESLALWLPAHGLSTETPVDRLATNAAVREEIQQYVDKANATVSRAESVRKFAVLDTQFTQENKCLTPSLKVVRPAVNRVFADVIDNEIYNGKR

SEQ ID NO: 31026 - protein, 524 aa, Trametes sp. I-62
MSGFRLLPSFASLAVIVSLALNTFAAVGPVTDLTISNANVSPDGFQRAAVVANGGVPGPLINGQKGDHFQINVVNQLTNHTMLKSTSIHWHGFFQKGTNWADGPAFVNQCPIATGHSFLYDFQVPDQAGTFWYHSHLSTQYCDGLRGPFVVYDPNDPHASLYDVDNEDTVITLADWYHVAAKLGPAFPPRADATLINGLGRSTDTPTADLAVIKVTSGKRYRFRLASLSCDPAFTFSIDNHDMTIIEADAVNTQPLEVDSLQIFAGQRYSFVLEANQAVDNYWVRANPFFGTTGFAGGINSAILRYDGAAEVEPTTTQSTSTKPLAETDLVPLASMPVPGSPVSGGVDKGINFAFTFNGTNFFVNGATFTPPSTPVLLQIMSGAQDASALLPSGDVYSLPSNATIELTFPATTGAPGAPHPFHLHGHTFAVVRSAGSTKYNYDNPIWRDVVSTGTPAAGDNVTIRFRTDNPGPWFLHCHIDFHLEAGFAVVMAEDIPDTKLANPVPQAWSDLCPIYDALDPSDQ

SEQ ID NO: 31027 - protein, 303 aa, Zea mays
PRARPPPLPLHSTCSLVGSSRPASPPAKGWTRFAYGRPSSPCGPARPAREAVVAALFMNIYIVGLNQLFDIEIDKVNKPTLPLASGEYTLATGVAIVSVFAAMSFGLGWAVGSQPLFWALFISFVLGTAYSINLPYLRWKRFAVVAALCILAVRAVIVQLAFFLHIQTFVFRRPAVFSRPLLFATGFMTFFSVVIALFKDIPDIEGDRIFGIRSFSVRLGQKKVFWICVGLLEMAYSVAILMGATSSCLWSKTATIAGHSILAAILWSCARSVDLTSKAAITSFYMFIWKLFYAEYLLIPLVR

SEQ ID NO: 31028 - protein, 501 aa, Saccharomyces castellii
MESRLARLTTLQVTAGDNLRRTSIIGTIGPKTNNPEVLVALRKAGLNIVRMNFSHGSYEYHQSVIENARKSEELYPGRPLAIALDTKGPEIRTGTTTGEVDYPIPPNHEMIFSTDEKYAKACDDKVMFVDYANITKVISKGKIIYVDDGVLSFEVLEVVDGKTLKVKSLNAGKICSHKGVNLPGTDVDLPALSEKDKADLRFGVKNGVHMVFASFIRTAQDVLTIREVLGEDGKDIKIVVKIENQQGVNNFDEILKVTDAVMVARGDLGIEIPAPEVLAVQKKLIAKSNLAGKPVICATQMLESMTYNPRPTRAEVSDVGNAILDGADCVMLSGETAKGNYPINAVTTMADTALIAEQAIAYQPLYDDLRNLTPKPTSTTETVAASAVAAVYEQKAKAIIVLSTSGTTPRLVSKYRPDCPIILVTRNPRAARFSHLSRGVFPFVYEADSVADWTEDVELRLKFGIEKAIEMGVMKKGDTYVSIQGFKAGEGHSNTLQVSNA

SEQ ID NO: 31029 - protein, 278 aa, Leptospira interrogans serovar Copenhageni str. Fiocruz L1-130
MNNKENPLKQTIMLNNGISMPILGLGVWKTKSGKECKEAVLNALEAGYRHIDTARIYDNEVDVGQAIRESGIPRKEIFITTKLWNADQGSDKTRKALENSLDRLGIDFVDLYLIHFPVTSKRMDSWKELEKLYHDKLCKAIGVSNYTIIHLTELLKNSQITPAVNQVEFHPFLNQIHLLEYCKKHKIQLEAYSPLAHGQKIEDPTIAKIAQKYDKTPAQILIRWAIEQKIVVIPKSIKKERIIENSKVFDFAISEEDMKILNSLDEDFRTCWDPSEVV

SEQ ID NO: 31030 - protein, 73 aa, Passiflora crassifolia
NGEVMPGQWEYQVGPSVGIDAGDHIWCSRYILERITEQAGVVLTLDPKPIEGDWNGAGCHTNYSTKSMREDGG

SEQ ID NO: 31031 - protein, 476 aa, Saccharomyces castellii
  misc_feature (457)..(457): Xaa can be any naturally occurring amino acid
  unsure (1)..(476): unsure at all Xaa locations
MLQSRLARLTHLRTEPSANDIRKTSIIGTIGPQSNNVPTIVALRKAGLNIIRMNFSHGSHEFHQSVIDNARESESQYHGRPLGIALDTKGPEIRTGSFVRDNGVPVKTGHEMIFSTDPQYKECGDDQIMYVDYANITKVMEVGKFIYVDDGAISFEVLQVKDAETLKVRALNDGTLNSHKGVNLPGTDVDLPALSEKDKQDLQFGVKNNIHMIFASFIRTPDDIRTIRQFLGEDGKQIKIIAKIENEQGVNNFDQILQLADGVMIARGDLGIEIPAPEVLAVQKKLIAKCNLAGKPVICATQMLESMTYNPRPTRAEVSDVGNAILDGADCVMLSGETAKGAYPIDAVNMMADTALIAEEATAYLPNYDDIRNCTPKPTPTTETVAASAVAAVFEQDAKAIIVLSTSGDTARLCSKYRPNCPIILITRNDNTARFSHLYRAVFPFVYNKPALDDWVXDVQNRIDFGIEMAKQMGIL

SEQ ID NO: 31032 - protein, 161 aa, Xanthomonas campestris pv. campestris str. ATCC 33913
MTTLSTYQFTDLDGQPQSLAEYAGKVVLVVNVASKCGFTPQYAGLQALWQRYRDRGLVVIGFPCDQFGHQEPGDAADIRQFCSLDYAVDFPLAAKVEVNGSGAHPLWQWLKHEKRGVLGSEAIKWNFTKFLIGRDGSVLERYAPTTKPEALAADIERALGA

SEQ ID NO: 31033 - protein, 476 aa, Saccharomyces castellii
MSAVLSTQTTRSILSNSGRRAATIALIHRLYTTASAEPTLKETFSQLIPSKIDEIKQFKKDHGKTVIGNVLLEQAYGGMRGIKGIVWEGSVLDPEEGIKFRGLTIPEIRDQLPKLGDEPLPEGIFWLLLTGEIPSRAQVEQLSADLASRAELPEHVVNLLNGLPKHLHPMAQFSIAVNALESESKFAKAYAQGVNKKEYWKYTFEDSLDLLGKLPTIAATIYRNVFKDGKLGAWDPQADYGKNLATLMGFKNKDFMELMRLYLTIHSDHEGGNVSAHTTHLVGSALSSPYLSLAAGLNGLAGPLHGRANQEVLEWLFKLREEVKGDYSKETIEKYLWDTLNSGRVVPGYGHAVLRKTDPRYTAQREFALKHFPDYELFKLVSSIYEVAPKVLTKQGKTKNPWPNVDSHSGVLLQYYGLTEASFYTVLFGVARAFGVLPQLIIDRAVGAPIERPKSFSTEKYKELVAKIESGETKVV

SEQ ID NO: 31034 - protein, 75 aa, Passiflora crenata
GTNGEVMPGQWEYQVGPSVGIDAGDHIWCSRYVLERITEQAGVVLSLDPKPIEGDWNGAGCHTNYSTKSMREDGG

SEQ ID NO: 31035 - protein, 348 aa, Hordeum vulgare
MTVVDAAAAVAQELPGHGQTVCVTGAAGYIASWLVKLLLERGYTVKGTVRNPDDPKNAHLKALDGAAERLVLCKADLLDYDAICAAVEGCHGVFHTASPVTDDPEQMVEPAVRGTEYVIDAAADAGTVRRVVFTSSIGAVTMDPNRGPDVVVDESCWSDLEFCKKTKNWYCYGKAVAEQAAWEKARARGVDLVVVNPVLVVGPLLQPTVNASAAHILKYLDGSARKYANAVQAYVDVRDVAGAHLRVFEAPQASGRYLCAERVLHRQDVVHILAKLFPEYPVPTRCSDEVNPRKQPYKMSNQKLQDLGLKFTPVNDSLYETVKSLQEKGHLPVPRKDILAPQLDGATA

SEQ ID NO: 31036 - protein, 327 aa, Nitrosomonas europaea ATCC 19718
MSSPIRIAVTGAAGQISYSLLFRIAAGDMLGSSQPVILQLLDIPESGKVLDGVLMELQDCAFPLLTDIIVTHDPMIAFDQADIAILVGARPRGKGMERKDLLQTNGEIFREQGRALNQVVKRDAKILVVGNPANTNTLITMKNAPDLSPENFSGMLRLDHNRALSQVAMKLNQPVSHIRKMIVWGNHSSTQFPDLSHAEIDHQKVIDLIKDQTWVENSFIPTVQNRGAVVIEARGLSSAASAANAIIDHMRDWIFGTRDDDWITMGILSDGSYKIPKGVIYGFPVVCKNGGRKIVQGLEISPFSRTRLDIAYDELTQELDSIKHLLL

SEQ ID NO: 31037 - protein, 401 aa, Arabidopsis thaliana
  misc_feature (298)..(298): Xaa can be any naturally occurring amino acid
  misc_feature (301)..(301): Xaa can be any naturally occurring amino acid
  unsure (1)..(401): unsure at all Xaa locations
MYVVESKAGAIGCMILSLCCLGSWPAILTLLERRGRLPQHTFLDFATANLLAAIVIAFSLGEIGKSTFLKPDFTTQLPQDNWPSVLLAVAGGVLLSIGNLATQYAFAFVGLSVTEVITASITVVIGTTLNYFLDNKINKAEILFPGVGCFLIAVFLGAAVHASNAADVKEKLKSLPSEDLYSSIENGEDKSEIEKTDVESQEKLAEKAKAGTAGFYVELENKRAIKVFGKSIMIGLFITLFAGISLSLFSPAFNLATNDQWSTLPKGVPKLVVYTAFFYFSIAGFLISLILNLIFLYXPMXGLARSSLKKYIYDSKGRGWAVFAGFLCGFGNGLQFMGGQAAGYAAADSVQALPLVSTFWGIVLFGEYRKSSKRTYALLVSMLAMFVAAVAILMASSGHRK

SEQ ID NO: 31038 - protein, 370 aa, Saccharomyces cerevisiae
MSKQWASGTNGAFKRQVSSFRETISKQHPIYKPAKGRYWLYVSLACPWAHRTLITRALKGLTSVIGCSVVHWHLDEKGWRFLDMEKQLEDSEDFLEHWHDVAGGIRTAKEDSSKSFAEIKNDSQRFMVDATNEPHYGYKRISDLYYKSDPQYSARFTVPVLWDLETQTIVNNESSEIIRILNSSAFDEFVDDDHKKTDLVPAQLKTQIDDFNSWVYDSINNGVYKTGFAEKAEVYESEVNNVFEHLDKVEKILSDKYSKLKAKYGEEDRQKILGEFFTVGDQLTEADIRLYTTVIRFDPVYVQHFKCNFTSIRAGYPFIHLWVRNLYWNYDAFRYTTDFDHIKLHYTRSHTRINPLGITPLGPKPDIRPL

SEQ ID NO: 31039 - protein, 250 aa, Oryza sativa
MRVAATTRPASSSAAAPLPLFLLLAVAAAAAALFLVGSASLAMAGHVLGGAHDAPSAANSVETDALARFAVDEHNKRENALLEFVRVVEAKEQVVAGTLHHLTLEALEAGRKKVYEAKVWVKPWLDFKELQEFRNTGDATTFTNADLGAKKGGHEPGWRDVPVHDPVVKDAADHAVKSIQQRSNSLFPYELLEIVRAKAEVVEDFAKFDILMKLKRGNKEEKFKAEVHKNLEGAFVLNQMQQEHDESSSQ

SEQ ID NO: 31040 - protein, 608 aa, Oryza sativa
  misc_feature (298)..(298): Xaa can be any naturally occurring amino acid
  unsure (1)..(608): unsure at all Xaa locations
MAGSERTVVWFRRDLRIDDNPALASAARDGAVLPVFIWCPADEGQFYPGRCSRWWLKQSLPHLSQSLESLGCPLVLIRAESTLEALLRCIDSVGATRLVYNHLYDPVSLVRDDKIKKELSALGISIQSFNGDLLYEPWEIYDDSGLAFTTFNMYWEKCMELPIDASPSLAPWKLVPVPGLESVRSCSVDDLGLESSKDEESSNALLMRAWSPGWRNAEKMLEEFVSHGLLEYSKHGMKVEGATTSLLSPYLHFGEVSVRKVYQLVRMQQIKWENEGTSEAEESIHFFMRSIGLREYSXDEERFKSWRQGMTGYPLVDAGMRELWATGWTHNRIRVIISSFAVKFLLIPWTWGMKYFWDVLLDADLESDILGWQYISGSLPDGHELSRLDNPEVQGQKYDPDGVYVRTWIPELARMPTEWIHHPWDAPSCILEVAGVELGFNYPKPIVDLHIARECLDDSISTMWQLDTAEKLAELDGEVVEDNLSNIKTFDIPKVVLRETSPCALPIDQRVPHASSKDHNLKSKVLKASNRSSICVDMIRSSKMEATSSVANSPVSRKRSFCETAFHVPSYSSSAEVHSHIQDHGGSLVGPSRYLLQEAGRNYVDEPT

SEQ ID NO: 31041 - protein, 455 aa, Burkholderia sp. 383
MKNLQRHLSARHIRFLALGSAIGTGLFYGSASAIQLAGPAVILAYILGGAAVYMVMRALGEMAVRDPVAGSFGHYATENLGPFAGFVTGWTYTLEMVIVAIADITAFGIYMGFWFPDVPQWIWVLGVVAIICGLNLCHVKVFGELEFWLSIIKVGAIVAMIGGGVAILLTGMHFGHSADVPTFANLWNHGGFLPNGVGGLIASLSVVIFAYGGIEVIGMSAGEAKDPERVIPRAINAVPARILLFYVLTMVVLMSISPWTGVGNEGSPFVQIFSALGVKSAATILNLVVISAAISAINSDIFGAGRMMFGMARQGQAPRVLMTTSRHGVPWVTVVVMAAALLVGVLLNYLMPKDVFLMVAAIATFATVWVWLMILLSQVAMRRRLSSTEVAALKFKVPLWPVAPALTIAFMGFVIVMLGWFEDTRVALYVGAAWLALLALVFYARIRPKFAPASR

SEQ ID NO: 31042 - protein, 172 aa, Brassica napus
VDPRVRESTLHLVLRLRGGMQIFVKTLTGKTITLEVESSDTIDNVKAKIQDKEGIPPDQQRLIFAGKQLEDGRTLADYNIQKESTLHLVLRLRGGMQIFVKTLTGKTITLEVESSDTIDNVKAKIQDKEGIPPDQQRLIFAGKQLEDGRTLADYNIQKESTLHLVLCLRGGI

SEQ ID NO: 31043 - protein, 328 aa, Xylella fastidiosa Temecula1
MKALVRVAVTGAAGQIGYSLLFRIAAGEMFGKDRPVILQMLELPDEKAQAALKGVMMELEDCAFPLLAGMVVTDNPDIAFKDADAALLVGSRPRGPGMERKDLLMENAKIFTAQGAALNKVARRDVKVLVVGNPANTNAYIAMKSAPDLNPKHFTAMLRLDHNRALSQLSTKLGKPVANIEKLIVWGNHSPTMYPDYRFATADGTPIIEAINDQAWNANSFIPTVSKRGAAIIEARGLSSAASAANAAIDHMRDWLLGSNGKWITMGVPSDGSYGIPEGMIFGFPVTTTNGEYSIVKDLPIDTFSKTYIDKTLAELEEERASITHLLR

SEQ ID NO: 31044 - protein, 468 aa, Mesorhizobium loti
MRLSNLGTEQLREKDRSFVFHPSTHLAKHSRGETPNRIMAGAEGVYIWDTEGRKSLDGFGGLYCVNMGYGCTEIAEAIARQAHEMPFAHIYASQGTEPVALLAEAVVEYFGQNMRRVFFGLSGSDANETNIKLVWYYNNILGRPEKKKIISRHRGYHGSGLVTGSLTGLAFFHNFFDLPLDLVRHTTTPHHYRQAHDGESEQAFSKRCADELEALIVAEGPETVAAFIGEPVLGTGGIVPPPKGYWTAIQSVLDKYDILLIADEVVCGFGRTGEKFGSHLYGMRPDFVTIAKGLSSAYLPISGSIIGDRVWSILEQGTEKHGALGHGWTYSGHTLCAAAALANIRLLKERNILEHVRDVGPYWHARMNAELAGHPIVGEVRGVGILSAVELMRDPKQRIPFESDLQVGVRAAAALFENGVIGRAMPHGDILGFAPPLIITRKEIDIIVNATAKSVETTYRALKAEGAI

SEQ ID NO: 31045 - protein, 254 aa, Triticum aestivum
MEDFVLSYVVTGLAFWSTAFLVMRALMPKRSYEFCNRAVSTMHAVAAVCMACLSVQEWSCPVCPLNAPSSPRQMKSLAVTLSYMIYDAACCHLNGDVRLDNTVHHLVSIVGIGAGLAYQRCGTEMMACMFITEISSPLLHLREMLKELGVKDTDLNLLVDILFAATFSVGRMVGGPYLTYVTLTTDYPILIKAMAAGLQLVSAYWFLRILRMVRYKLGKKKAGGAAAKVMPGDTSMYIHILACTLEQITCFLGG

SEQ ID NO: 31046 - protein, 474 aa, Cupriavidus necator
MSKQFDVLVIGAGPGGYIAAIRAGQLGLNVACCEGNPYDDPKGEARLGGTCLNVGCIPSKALLASSEEFENVQHHLGDHGITVGDVKVDVAKMLKRKDDIVGKMTKGIEFLFRKNKVTLLKGYGKFVGKSAEGFQVDVAGEVVTAKQVIIATGSKARHLPGIKVDNDLVSDNEGALKFPAVPKKLGVIGAGVIGLELGSVWRRLGSDVTVLEALPAFLGAADEGVAKEAQKQLTKQGLKFSLGVNVNEVTTGKNGVTVKYTDKDGKAQTLEVDRLIVSVGRVPNTDNLGLDAVGLAADQRGFIEVDDHCATKVPGLWAIGDVVRGPMLAHKAEDEGVAVAERIAGQKPHIDYNCVPWVIYTFPEIAWVGKTEAQLKAEGREYKAGQFPFMANGRALGMGHADGFVKMLADAKTDEILGVHIVAANASDLIAEAVVAMEFKAASEDIGRVCHPHPSMSEVMREAALAVDKRHVNM

SEQ ID NO: 31047 - protein, 346 aa, Arabidopsis thaliana
  misc_feature (106)..(106): Xaa can be any naturally occurring amino acid
  unsure (1)..(346): unsure at all Xaa locations
MSSTEEMSSVKNTTQVIGVDPSSTVRVTIVQSSTVYNDTPATLHKAEKFIVEAASKGAKLVLFPEAFIGGYPRGFRFGLAVGVHNEEGRDEFRNYHASAIKVPGPXVERLAELAGKNNVHLVMGAIEKDGYTLYCTALFFSPQGQFLGKHRKVMPTSLERCIWGQGDGSTIPVYDTPIGKIGAAICWENRMPLYRTALYAKGIEIYCAPTADYSLEWQASMIHIAVEGGCFVLSAHQFCKRREFPEHPDYLFNDIVDTKEHDPTVSGGGSVIISPLGKVLAGPNYESEGLVTADLDLGDIARAKLYFDVVGHYSKPDIFNLTVNEHPKKPVTFMTKVEKAEDESNK

SEQ ID NO: 31048 - protein, 447 aa, Avena sativa
  misc_feature (346)..(346): Xaa can be any naturally occurring amino acid
  misc_feature (427)..(427): Xaa can be any naturally occurring amino acid
  misc_feature (431)..(431): Xaa can be any naturally occurring amino acid
  unsure (1)..(447): unsure at all Xaa locations
MREIISIHIGQAGIQVGNACWELYCLEHGIQQDGTMPSDTTVGVAHDAFNTFFSETGAGKHVPRAIFVDLEPTVIDEVRTGAYRQLFHPEQLISGKEDAANNFARGHYTVGKEIVDLCLGRVRQLADNCTGLQGFLVFNAVGGGTGSGLGSLLLERLSVDYGKKSKLGFTIYPSPQVSTAVVEPYNSVLSTHSLLEHTDVAVLLDNEAIYDICRRSLDIERPTYTNLNRLISQIISSLTTSLRFDGAINVDVTEFQTNLVPYPRIHFMLSSYAPVISAEKAYHEQLSVPEITNAVFEPSSMMAKCDPRHGKYMACCLMYRGDVVPKDVNAAVVTIKTKRTVQFVDXCPTGFKCGINYQPPSVVPGGDLAKVQRAVCMISNNTAVAEVFSRIDHKFDLMYAKRAFVHWYVGEGMEEGEFSEAREDLAXLEKXYEEVGAEGADDEVTRG

SEQ ID NO: 31049 - protein, 484 aa, Schizosaccharomyces pombe
MSLHDAYHWPSRTPSRKGSNIKLNKTLQDHLDELEEQFTIPTELLHRVTDRFVSELYKGLTTNPGDVPMVPTWIIGTPDGNEHGSYLALDLGGTNLRVCAVEVQGNGKFDITQSKYRLPQELKVGTREALFDYIADCIKKFVEEVHPGKSQNLEIGFTFSYPCVQRSINDASLVAWTKGFDIDGVEGESVGPLLSAALKRVGCNNVRLNAILSDTTGTLVASNYASPGTEIGVIFGTGCNACYIEKFSEIPKLHKYDFPEDMNMIINCEWCDFDNQHVVLPRTKYDVAIDEESPRPGLQTYEKMIAGCYLGDILRRILLDLYEQGALFNGQDVTKIRDPLAMDTSVLSAIEVDPFENLDETQTLFEETYGLKTTEEERQFIRRACELIGTRSARLSACGVCALVRKMNKPSMIVGTDGSVYNLYPRFKDRLAQAFKDILGEEIGSKVVTIPAEDGSGVGAALVSALEAKGKALTSDILAEHLKN

SEQ ID NO: 31050 - protein, 294 aa, Arabidopsis thaliana
MALTNNLWAFVFGILGNIISFVVFLAPVPTFVRICKKKSTEGFQSLPYVSALFSAMLWIYYAMQKDGTAFLLITINAFGCVIETIYIVLFVSYANKKTRISTLKVLGLLNFLGFAAIVLVCZLLTKGSTREKVLGGICVGFSVSVFAAPLSIMRVVVRTRSVEFMPFSLSLFLTISAVTWLFYGLAIKDFYVALPNVLGAFLGAVQMILYIIFKYYKTPVAQKTDKSKDVSDHSIDIAKLTTVIPGAVLDSAVHQPPALHNVPETKIQLTEVKSQNMTDPKDQINKDVQKQSQV

SEQ ID NO: 31051 - protein, 411 aa, Triticum aestivum
MGSYSPTSRFKDLDTIPLDPHYALKETFQADPDPRKVILGSGLYRDDDSKPWVLPVVKKAEVLIKQTQDSGRYEYLPISGYPAFVSSARQVLFGPQSLNESRLVSIQTISGTGANFLGARFLAETLKPSAVWLSDPSWVNHANIWGLVNVNVKRYPYWNAKTKSLDFNNMIEKLQTDAIAGDVILLHACAHNPTGVDPNKEQWRKIADVCERKQLFPLFDCAYQGFATGNLDDDAWAIRHFIDRGTMELAVCQSFSKNMGLYGERVGALHMFCATSTDAEKVRGHLCRLQRGQISQPPTNGARIAATILSDSKLFQDWVTDLGEMSSRIKEMRKSLYDNLMILDTPGKWDHIVSQIGMFSYTGLTPEQVAFIQQDSHVYILKSGRISVAGLNSKNVEYVAKALDMAVRGLP

SEQ ID NO: 31052 - protein, 564 aa, Candida albicans SC5314
MESITKVSMSVCPFVRSTSTQALRQLSQTSGALANQARQCPIAGNAIRAKEISIRSYSSATKPVRATAATPSTPEATFNVSSSFELGSKETAFDYNGYLGNELEKKRSDKSYRYFNNINRLANEFPKAHRTQEEDKVTVWCSNDYLGMGKNENTLKEMKRVLDKYGSGAGGTRNIAGHNSHAIKLESELAALHKHDAALVFSSCFVANDAVLSLLGQKIKDLVIFSDELNHASMIQGIRNSRARKHIFKHNNLADLESKLAQYPKSTPKLIAFESVYSMCGSIAPIEAICDLAEKYGALTFLDEVHAVGMYGPHGAGVAEHLNFEAHLKSGIERPEITTVMSRVDMVTGTLGKAYGVVGGYITGKTNLIDWFRSYAPGFIFTTSLPPAIMAGCSASIRYQRATLKDRIAQQKNTRLVKNNLNELGIPVIPNPSHIVPVLVGNAADAKRASDLLLNKHDIYVQAINFPTVPIGEERLRITPTPGHGPELSKQLVEAVDSVFTELNLNRINDWKKLGGLVGVGVEGAAKVEHIWTEEQLALTDADLNPNVVNPAISPLDVSSGIST

SEQ ID NO: 31053 - protein, 60 aa, Passiflora edulis
VMPGQWEYQVGPSVAIDAGDHIWCSRYILERITEQAGVALSLDPKPIEGDWNGAGCHTNY

SEQ ID NO: 31054 - protein, 612 aa, Saccharomyces castellii
MSLSAAANKISERDFQNIGPAPRPPATTSPSKVNGTVGYNQTRPIPKFMNQRDGTRNLNSGMGAPQHIGSQAKVGWVSYKDDGLLSFIWQKRYLILSDSYISLYKNDKSIEEPILQIALTNIVSVSRTQLKQNCLELIRSTDRSSLSSSSSNLSISSDAGSKKSIYIATKTEHDLHSWLDSIFARCPLLSGVSSPTNFTHKVHVGFDPETGSFVGMPTNWENLLKHSRITGEDWNNDSAAVIQVLQFYQEYNGNGKAPNTTKPLTNDSKNSSQTSLINSDSSRKPSPLQATGLVPQRQAPTPPRSKVPVGPGKPQLPRLNTTPLNNTQQHQRSPYSPVNGIPPRNAARNTPYKQPTSPVDSFRPIHNMSNPYSRHEHQPSQSPSPSPLGQGKKDQGIPTRLQPQRMAPKPPVTGPSPNSASVSAAAYAFKQKQQQQQQQQQPYPRPTEQRAAPQPPRQQENEPKKDIGVTKPRKQTKPSMSNAEIMSKLKSVTINTDPSPYFQMIEKAGQGASGSVYLAERIAIPPGEFDETPEVGDKVAIKQMILSKQPRKELIVNEILVMKDSRHKNIVNFLEAYLKTEDDLWVVMEFMEGGSLTDIIEIVRQPVVHRLH

SEQ ID NO: 31055 - protein, 427 aa, Solanum ochranthum
IRKPYTISKQRERWSEEEHKKFLEALKLHGRAWRRIEEHVGTKTAVQIRSHAQNFFSKVVRESSNDDASSVKSIEIPPPRPKRKPMHPYPRKMATPRKSGTLASEKLKRSGSPDFCLSEPENQSPTSVLSALGSDAFGTVDSTKPSELSSPVSSAVAENSGDLVLSEPSDFVVEESRSSPARAYASSNPANQACVKLELFPEDNDFVKEGSDEASSTQCLKLFGKTVLVTDAHMPSSTSGQISLTDENDDEPASQTLPRSSFPAKYLLWDSECPRSTFSIVPPSPSYYFPTPNGSPGPNQSGAATHLPWGSSCAVPCTQVHSPIPMKGSPLFNDRELEGKETQKEGSSTGSNAESVDAEYLEIEAQSSRNVVESVRASVPSLFERRANSTKRVKGFVPYKRCLAERGMSSSTLTGEEREEQRTRLCL

SEQ ID NO: 31056 - protein, 55 aa, Passiflora edulis
WEYQVGPSVGVDAGDHIWCSRYILERITEQAGVVLSLDPKPIEGDWNGAGCHTNY

SEQ ID NO: 31057 - protein, 553 aa, Saccharomyces castellii
MFPRSDKDVDQLVGNLNQLGLNKPNARFVSVTPTRANKENRSSLSPSPSPNKTKRFTADETELKNSPKKLPHDFYKKALSNDTKRIVNVCQMYFLDYYCDMFDYVISRRQRTKSVLNYLERNQNSLSTEELNNEWTAYLQQEHDVLRKRRLKPKNKDFEMITQVGQGGYGQVYLARKRDTKEVCALKILNKKLLFKLNETNHVLTERDILTTTRSDWLVKLLYAFQDTESLYLAMEFVPGGDFRTLLINTRFLRNTHARFYISEMFCAVNALHELGYTHRDLKPENFLIDSEGHIKLTDFGLAAGTISTERIQSMKIRLEEVKNLEFPAFTEKSIEDRRKMYTHLRQTEVNYANSMVGSPDYMALEVLEGKKYDFTVDYWSLGCMLFESLVGYTPFSGSSTNETYENLRHWKKTLRRPVLDNGRPAFSDRTWDIITRLIADPINRLRSFEHIKRMPYFAEVNFNTLRQSAPPFTPQLDSETDAGYFDDFTNEADMAKYADVFKRQNKLSSMVDDSAVDSKLVGFTFRHRNGQKGLSGILYNGSEHSDPFATFY

SEQ ID NO: 31058 - protein, 58 aa, Passiflora edulis
WEYQVGPSVAIDAGDHIWCSRYILERITEQAGVVLSLDPKPIEGDWNGAGCHTNYSTK

SEQ ID NO: 31059 - protein, 233 aa, Mycobacterium bovis
MDTGVTSPRVLVVDDDSDVLASLERGLRLSGFEVATAVDGAEALRSATENRPDAIVLDINMPVLDGVSVVTALRAMDNDVPVCVLSARSSVDDRVAGLEAGADDYLVKPFVLAELVARVKALLRRRGSTATSSSETITVGPLEVDIPGRRARVNGVDVDLTKREFDLLAVLAEHKTAVLSRAQLLELVWGYDFAADTNVVDVFIGYLRRKLEAGGGPRLLHTVRGVGFVLRMQ

SEQ ID NO: 31060 - protein, 544 aa, Azospirillum brasilense
MTRYIFITGGVVSSLGKGLASAALGALLQARGYKVRLAKLDPYLNVDPGTMSPYQHGEVYVTDDGAETDLDLGHYERFTGVAARRGDNITTGRIYSNVIAKERRGDYLGATVQVIPHVTDQIKDFIGAETTDEDFILCEIGGTVGDIESTPFLEAIRQFGNEVGPENALFIHLTLLPYIPTAGELKTKPTQHSVKELLGMGIQANILLCRADRPIPENERKKIALFCNIRPERVIAALDVDSIYQVPVSYHEEGFDTQVLAYFGLPTEGKPDLSRWTSIVERVRKPQGEVTIAVVGKYTSLLDSYKSLAEALTHGGIANNVKVKLDWIDSEIFEDESAVQRLENVHGILVPGGFGSRGTEGKIRAAQFARERKVPYFGICFGMQMAVIESARNMAGIVDAGSTELGKPGNPVVGLLGLMTEWMRGNSLEKRTEGTDVGGTMRLGTYPAKLVPGSKVAEVYGTTDITERHRHRYEVNVYYKDRLEKVGLLFSGLSPTQLPEIVEIPDHPWFIGVQFHPELKSKPFDPHPLFTSFIKAAIEQSRLV

SEQ ID NO: 31061 - protein, 573 aa, Saccharomyces castellii
MSERKMENLTGTMHQLNFNLPNQPNRGSTSQFASLDNFSTPTKYKNDKLNGSPIPPGARRYEIDDSDSKMDIDGSSYNDIDITNSPKKLPQGFQTMASNNKTQRLVSVCKMYFLDYYCDMFDYVISRRQRTKKVLEYLEQKKNENVDLNSLNNEWNGYIQREHQVLRKRRLKPKHKDFEMITQVGQGGYGQVYLPGKKDTNEVCALKILNKKLLFKLNETNHVLTERDILTTTRSQWLVKLLYAFQDTQNLYLAMEFVPGGDFRTLLINTRFLKSTHARFYISEMFLAVNALHDLGYTHRDLKPENFLIDAKGHIKLTDFGLAAGTISNDRIQSMKVRLEEVKNLEFPEFSDKSIEDRRQMYQKYRETEVNYANSMVGSPDYMALEVLEGKKYDFTVDYWSLSCMLFESLVGYTPFSGSSTNETYENLRHWKKTLRRPMLDNGRPAFSDRTWDFITRLIADPINRLRSFEHVKRMTYFESVDFNTLRDLSPPFIPQLDNETDAGYFDDFTNEADMAKYADVFKRQNKLSTMVNDADIDSKLVGFTFRHRYGKNGSSGVLYNGLEQSDPFSTFY

SEQ ID NO: 31062 - protein, 57 aa, Passiflora edulis
WEYQVGPSVAIDAGDHIWCSRYILERITEQAGVVLSLDPKPIEGDWNGAGCHTNYST

SEQ ID NO: 31063 - protein, 371 aa, Brucella suis 1330
MAVIAGLIGSGFMGKTHALALANVNRIFDLPLAVQLHTLGDIDVQTARKAARQLGFAHATGDWRDLISNPDINLIDITTPNRFHKEMALAAIKAGKHVYCEKPLAPSAADCLEMTLAAEREGIQTAVGFNYLKNPMMKLAQEIIASGELGEIRNFRGIHAEDFMADARIPWTWRLDPAGGGGALADIGSHIIATARYLIGPIADVMGEAVTLIRERPDMADLSRTKPVEVDDVCHAFMRFENGATGTLEASWVASGRKMQHDFEISGSKGAIFFSQERFNELELFLYSDRKGQQGFRKIFAGPEHEPYGAFCVAGGHQIGFNDLKTIEVRDFVLAIAGQKTGHADFREGYEVQKTVETIYASSRERQWKKI

SEQ ID NO: 31064 - protein, 75 aa, Passiflora edulis f. flavicarpa
GTNGEVMPGQWEYQVGPSVGVDAGDHIWCSRYILERITEQAGVVLSLDPKPIEGDWNGAGCHTNYSTKSMREDGG

SEQ ID NO: 31065 - protein, 970 aa, Arabidopsis thaliana
  misc_feature (676)..(676): Xaa can be any naturally occurring amino acid
  misc_feature (697)..(697): Xaa can be any naturally occurring amino acid
  unsure (1)..(970): unsure at all Xaa locations
MEATAVNPSIVTASRTVQPYRRLSTLSLRFPTYRNKRVSPFTLTITRCSTTKSREAGQDSSISLKRGLVFDLGVSKDSWHSEEIGSPVVKRFLSDNEERWYMWYHGSSKQNPVSDSIGLAVSNNGIHWERGNGKVESSEDVGLVMSCGEDWWGFDTASVRPGEVVIMSSSKVRANSSVYWMYYTGYTKETVEFQSQDFTSVLGNPERFHLCDENAEKSRVYYRSLPGLAISQDGRHWARIEGEHHSGALFDVGSEKDWDFLYIASPHVVFHGDGDLRMYYHSFDEKTGEFCIGMARSRDGIKWLKLGKILGGRKSEKDGLGFFDELGGRYPCVTRNKRDESYVMAYEGVDRTGKTSIGFAVSKDGIKDWKRVQDEEAVIAVGEGGAWDNEGVGCPYLIEMDGDSDHQWRLYYRGVGNGGRTEIAMRGEQFELEEDRDGPLELLQSLRSKATELLLREEWEESIKVYTEFIDLSRRQVSSTGGSDPDPDSIAKLRKSLCLALCNRAEARARLRDFLEAMRDCDQALEIEKTHFKTLLCKGKVLLGLSKYSLALECFKTALLDPQASDNLETVTVYIEKCKKLEFQAKTGAFDLSDWILSEFRGKCPELAEFIGSIEIKKSELSGRGLFATKNIVAGTLVLVTKAVAIERGILGNGECGEKAQLIMWKNFVEEVTESXVRKCGRTRRVVSALSTGQGEXSLEIPEIALFRPDEAFETCGDWKQSLDTEKLLSILDVNSLVEDAVSGKVMGKNKEYYGVGLWTLASFINHSCIPNARRLHVGDYVIVHASRDIKTGEEISFAYFDVLSPLEKRKEMAESWGFCCGCSRCKFESVLYATNQEVREFEMGLERGVDAGNAVYMVEEGMKRWKVKGKDKGLLRASYWGVYDEIYNSERLMKRWGRKIPTMEVVVDSVSDVVGSDERLMKMAVEGMMKKHGGFSNIVEMEKIMKLGKGVYGKVVSKKKAMKTLLGIE

SEQ ID NO: 31066 - protein, 307 aa, Actinobacillus pleuropneumoniae serovar 1 str. 4074
MGKIWVTGDAVVDLIPDGENHYLKCAGGAPANVAVGVSRLGVEAGFIGRVGLDPLGKFMQQTLNAEKVSTEHMILDPKQRTSTVIVGLDDGERSFTFMVNPSADQFLEAGDLPTFQKGDFLHCCSIALINDPSRSTTIEAIRRIKAAGGFFSFDPNLRESLWASLEEMKQVVNSVVAMADVLKFSEEELTLLTDTATLEQATKAITAQYPEKLIIITLGKDGAIYHLNGHSQTVAGKALKPVDTTGAGDAFVSGLLAGLSQVENWKDESVLVDVIRKANASGALATTAKGAMSALPNKAELEAFLAQ

SEQ ID NO: 31067 - protein, 97 aa, Arabidopsis thaliana
MAKAMELWVGEIKKMSEKINPRNPLMQRKNSTFVVSHPPQGSEKKKGLFYPKIREKNEAVTMFELPVCFFMDRFVPWGSFQTQKILDFFFGEGEKKI

SEQ ID NO: 31068 - protein, 144 aa, Brassica napus
MSFRSIVQDLRDGLGSLSKRSFDFRLHKGKGSSFRDYSSSRDLLSPLIVQTSRWANLPPELLLDVIRRLEESESNWPARKHVVACASVCRSWRAMCQEIVLCPEISGKLTFPVSLKQPGPRDTMIQCFIKRDKSKLTFHLYLCL

SEQ ID NO: 31069 - protein, 508 aa, Vibrio vulnificus YJ016
MHMSKSFLLISMGLASISVHAQTLTRDNGAPVGDNQNSITAGENGSVLLQDVHLIQKLQRFARERIPERVVHARGTGAHGEFVASGDFSDLTLSSPFAQSGKVTPVFVRFSTVIHSKGSPETLRDPRGFATKFYTDQGNWDLVGNNLPVFFIRDSIKFPDMVHSLKPSPVTNLQDPNRFFDFFSSQPSATNMLTWVYTNLGTPASYRTMDGFGVHAYKWINQKGEVNYVKFHWKSQQGVKSLRPAEVTKVQGEDFNHLTNDLYTQINAGNFPKWDLYVKVLSPKALSKLDYNGLDATKVWLDVPEKKVGTMTLNRVPDNFFLETEQSAFAPSNIIPGIEPSEDRLLQGRLFAYADTQLYRLGANLFQLPVNSPKSPVANHNQDGPSNNSTGLGNVDSLDVNYEPSRLVNLTVDKQARAVETPLSGHVQQQAIRNPRDFFQAGVLYRSLSEQDKADLIHNLSGDLNKVNDAEVKAIMVSYFYRADKEYGTRLAKATDVNLKQVTKLASM

SEQ ID NO: 31070 - protein, 268 aa, Triticum aestivum
  misc_feature (199)..(199): Xaa can be any naturally occurring amino acid
  misc_feature (214)..(214): Xaa can be any naturally occurring amino acid
  unsure (1)..(268): unsure at all Xaa locations
MATVQAVAKGTLVSPCGNRAAGFGARRRGAVAARMSPCAPAAVRIGRKSPFLGARLTVGPRRSKLVPRNLVASPVQMNLAFAKSTKWWEKGLQPNMREIESAQDLVDSLANAGDRLVVVDFFSPGCGGCRALHPKICQFAEQNPDVLFLPVNYEEHKSMCYSLHVHVLPFFRFYRGAQGRLCSFSCTNATIKKFRDALXAKHNPDRCSLGPHQXGLEESELLALGCKHKGPGHCSRACKASCGHKAFGQAGVRRKVLGLIRKMRCIID

SEQ ID NO: 31071 - protein, 151 aa, Triticum aestivum
MSIVRRSNVFDPFADLWADPFDTFRSIVPAISGGGSETAAFANARMDWKETPEAHVFKADLPGVKKEEVKVEVEDGNVLVVSGERTKEKEDKNDKWHRVERSSGKFVRRFRLLEDAKVEEVKAGLENGVLTVTVPKAEVKKPEVKAIQISG

SEQ ID NO: 31072 - protein, 543 aa, Schizosaccharomyces pombe
MPAMKRKKLDMESSRWFPKGETCFQRWYRSFLPPEDGKPQKLKRTLTARHIQMIGIGGAIGTGVWVGSKNTLREGGAASVLICYSLVGSMVLMTVYSLGELAVAFPINGSFHTYGTRFIHPSWGFTLGWNYLASFLATYPLELITASICLQFWININSGIWITVFIALLCFVNMFGVRGYGEVEFFVSSLKVMAMVGFIICGIVIDCGGVRTDHRGYIGATIFRKNAFIHGFHGFCSVFSTAAFSYAGTEYIGIAASETKNPAKAFPKAVKQVFIRVSLFYILALFVVSLLISGRDERLTTLSATAASPFILALMDAKIRGLPHVLNAVILISVLTAANGITYTGSRTLHSMAEQGHAPKWFKYVDREGRPLLAMAFVLCFGALGYICESAQSDTVFDWLLSISNLATLFVWLSINVSYIIYRLAFKKQGKSYDEVGYHSPFGIYGACYGAFIIILVFITEFYVSIFPIGASPDAGAFFQSYLCFPVVVIVFIAHALITRQKFRKLSEIDLDTGFSKYDRLEESDKGPMTAKSLAKSVLSFCV

SEQ ID NO: 31073 - protein, 766 aa, Zea mays
  misc_feature (135)..(135): Xaa can be any naturally occurring amino acid
  misc_feature (481)..(481): Xaa can be any naturally occurring amino acid
  unsure (1)..(766): unsure at all Xaa locations
MAAAAILPELATQVLIPVAAAVGIAFAVVQLVLVSKVRVTPERRADGGAVKSGPSDYLIEEEEGLNDHNVVVKCAEIQTAISEGATSFLFTEYKYVGLFMGIFAILIFLFLGSVEGFSTKSQPCHYIKDQTCKPXLANAIFSTIAFVLCAVTSLVSGFLGMKIATYANSRTTLEARKGVGKAFITAFRAGAVMGFLLSASGLLVLYIAINLFGIYYGDDWEGLFEAITGYGLGGSSMALFGRLGGGIYTKAADVGADLVGKVERNIPEDDPRNPAVIADNVGDNVGDIAGMGSDLFGSYAESSCAALVVASISSFGINHEFTPMVYPLLLSSVGIIACLITTLFATDFFEIKAVDEIEPALKKQLIISTIVMTIGIALISWLGLPYTFTIFNFGVQKTVQSWQLFLCVAVGLWAGLVIGFVTEYYTSNAYSPVQDVADSCRTGAATNVIFGLALGYKSVIIPIFAIAFSIFLSFSLAAMYXVAVAALGMLSTIATGLAIDAYGPISDNAGGIAEMAGMSHRIRERTDALDAAGNTTAAIGKGFAIGSAALVSLRLFGAFVSRAAISTVDVLTPEVFIGLIVGAMLPYWFSAMTMKSMGSAALKMVEEVRRQFNNIPGLMEGTTKPDYATCVKISTDASIKEMIPPGALVMLTPLIVGILFGVETLSGVLAGALVSGVQIAISASNTGGAWDNAKKYIEAGVSEHARTLGPKGSDPHKAAVIGDTIGDPLKDTSGPSLNILIKLMAVESLVFAPFFAAHGGILFKWL

SEQ ID NO: 31074 - protein, 258 aa, Arabidopsis thaliana
MQVLVVSPPLIAAASLSKPLNSLSKAALSFSRAKPICPFPQTSRRPISVYKSPMNNLFNRLGFGSRPQAQADPSSAAIAQGPDDDVPSSGQQFAQFGAGCFWGVELAYQRVPGVTKTEVGYSHGIVHNPSSEDVCTGTTGHNEVVRVQYDPKECSFESLLDVFWNRHDPTTLNRQGGDVGTQYRSGIYYYTDEQERIAREAVEKQQKILNKRIVTEILPATKFYRAENYHQQYLAKGGRMGLRQSAEKGCKDPIRCYG

SEQ ID NO: 31075 - protein, 233 aa, Mycobacterium leprae TN
MDTGVSSPRVLVVDDDSDVLASLERGLRLSGFEVSTAIDGAEALRNATETRPDAIVLDINMPVLDGVSVVTALRAMDNDVPVCVLSARSSVDDRVAGLEAGADDYLVKPFVLAELVARVKALLRRRGATATSSSETIAVGPLEVDIPGRRARVNGVDVDLTKREFDLLAVLAEHKTTVLSRAQLLELVWGYDFAADTNVVDVFIGYLRRKLEANSGPRLLHTVRGVGFVLRMQ

SEQ ID NO: 31076 - protein, 478 aa, Buchnera aphidicola str. Sg (Schizaphis graminum)
MKRINIVLSGIMLFLTLLLSFGMSWGNKNFTSSQNVSSVQLAPSLAPMLEKVMPSVISINIEGSTVVHTSRLPHQFQPFFGHNSPFCQGNSPFRNSPFCRSNPNSNSMHEKFHALGSGVIINADKAYAVTNNHVVENANKIQVQLSDGRRYEASIIGKDSRSDIALIQLKNAKNLSAIKIADSDTLRVGDYTVAIGNPYGLGETVTSGIISALGRSGLNIEHYENFIQTDAAINRGNSGGALVNLKGELIGINTAILAPDGGNIGIGFAIPGNMVKNLTEQMVKFGQVKRGELGIIGMELNSDLAHVMKINAQKGAFVSQVLPNSSAFHAGIKAGDIIVSLNKKTISSFAALRAEVGSLPVSTKMELGIFRNGITKNVIVELKPSLKNSVSLGDIYTGIEGADLSDCSLNGQKGVKIENIKLNTQASKIGFKKDDIIVEVNQKVINNLNDLKNILDSKPNILVFSVKRGNNSIYLVSE

SEQ ID NO: 31077 - protein, 586 aa, Candida albicans SC5314
MSDRYRPRGPRNPQRGGYQSRSSYIPQRRDNRNRDSYIPSGPKRSAERDNYRPDNDRYQQQENRPASSIPHRESPSSLSGATASHPSPKGPRDSYASGMKRPLPSGPASFRKRRDFNSNSNRIPIPKGPRQGFNEMDGGNGNGNGNVDNYRRARQPEKQKLSLEQIYCIKTTNRPNIYQRVSQVGEGTYGKVYKAQHKLTGEYVAMKKLRLESEKEGFPITAIREIKLLQSFDHANIVGLLEMMVEYNQIYMVFDYLDHDLTGLLTHPDLQLQECHRKFIFKQLMEGLNYLHKKRIIHRDIKGSNILLDNIGRLKIADFGLARTMKIVGANEKPDYTNRVITIWYRPPELLLGATDYGREVDVWGVGCLLIELYCKMAAFRGMDEVSQLCRIFNIMGTPTLQNWPEIDQLPWFEMLKPKINVKSKFAQKYSESMSVPAFKLAEQLLQLNPKLRPTAEEALNHEYFQQDPQPKPLYFLKDIQGEWHEFETKKRRRAERKRIKEEEDAQLAASKKAAAAPAVASAPAEASAVNSIKEEVDSVDAITYSEKLVNGDDNKNRSSEIDSKIVDSVEEHNKMEEKSLDTKTT

SEQ ID NO: 31078 - protein, 106 aa, Glycine max
  misc_feature (45)..(45): Xaa can be any naturally occurring amino acid
  misc_feature (58)..(58): Xaa can be any naturally occurring amino acid
  misc_feature (86)..(86): Xaa can be any naturally occurring amino acid
  unsure (1)..(106): unsure at all Xaa locations
LVAYNTDARIVKLTLAAGAYRTDEGKPLVLNVPRPVKQLLINDAXRNTEYVPIVGLAXFTNRSANLIFGADSPALHDNRLTTCSCXSGTGCLILAGRIFGSALSPT

SEQ ID NO: 31079 - protein, 502 aa, Arabidopsis thaliana
MGKVAVATTVVCSVAVCAAAALIVRRRMKSAGKWARVIEILKAFEEDCATPIAKLRQVADAMTVEMHAGLASEGGSKLKMLISYVDNLPSGDETGFFYALDLGGTNFRVMRVLLGGKHDRVVKREFKEESIPPHLMTGKSHELFDFIVDVLAKFVATEGEDFHLPPGRQRELGFTFSFPVKQLSLSSGTLINWTKGFSIDDTVDKDVVGELVKAMERVGLDMLVAALVNDTIGTLAGGRYTSPDVVVAVILGTGTNAAYVERAHAIPKWHGLLPKSGEMVINMEWGNFRSSHLPLTEYDHSLDVDSLNPGEQILEKIISGMYLGEILRRVLLKMAEEAAFFGDIVPPKLKIPFIIRTPNMSAMHSDTSPDLKVVGSKLKDILEVQTSSLKMRKVVISLCNIIASRGARLSAAGIYGILKKIGRDATKDGEAQKSVIAMDGGLFEHYTQFSESMKSSLKELLGDEVSESVEVILSNDGSGVGAALLAASHSQYLELEDDSETS

SEQ ID NO: 31080 - protein, 398 aa, Brassica napus
MALKLNPLASQPYNFPSSARPPISTFRSPKFLCLASSSPALSSKEVESLKKPFTPPKEVHVQVLHSMPPQKIEIFKSMEDWAEQNLLTQLKDVEKSWQPQDFLPDPASDGFEDQVRELRERARELPDDYFVVLVGDMITEEALPTYQTMLNTLDGVRDETGASPTSWAIWTRAWTAEENRHGDLLNKYLYLSGRVDMRQIEKTIQYLIGSGMDPRTENNPYLGFIYTSFQERATFISHGNTARQAKEHGDLKLAQICGTIAADEKRHETAYTKIVEKLFEIDPDGTVMAFADMMRKKISMPAHLMYDGRDESLFDNFSSVAQRLGVYTAKDYADILEFLVGRWKIESLTGLSGEGNKAQEYLCGLTPRIRRLDERAQARAKKGPKVPFSWIHDREVQL

SEQ ID NO: 31081 - protein, 57 aa, Passiflora edulis f. flavicarpa
WEYQVGPSVGVDAGDHIWCSRYILERITEQAGVVLSLDPKPIEGDWNGAGCHTNYST

SEQ ID NO: 31082 - protein, 593 aa, Oryza sativa
MAAVDGGGGGELGGGGLLGSRLMKHGRGNAGDQEHEWRPPAKQARGGDASSAAAAVAAAAAVSEAVKVAAPFLLGASCSPGHGGEQMLSFSSSASSCSSGGGGAAVAAAAAAGGAMPLYYGTPASCSGLSSVSLSSSMQGAMARVRGPFTPSQWVELEHQALIYKYLAANSPVPHSLLIPIRRSLTSPYSPAYFGSSTLGWGSFQLGYSGSADPEPGRCRRTDGKKWRCSRDAVADQKYCERHMNRGRHRSRKHVEGQPGHAAKAMPAAVAAAAASATQPSAPAAHSGGAVAGLAINHQHQQMKNYAANTANPCSLQYSRDLANKHNESEQVQDSDSLSMLTSISTRNTGSLFPFSKQHNPFEVSNSRPDFGLVSPDSLMSSPHSSLENVNLLTSQSLNEQQSSVSLQHFVDWPRTPAQGALAWPDAEDMQAQRSQLSISAPMASSDLSSASTSPIHEKLMLSPLKLSREYSPIGLGFAANRDEVNQGEANWMPMFRDSLMGGPLGEVLTKNNNMEARNCLSESLNLLNDGWDSSSGFDSSPVGVLQKTTFGSVSSSTGSSPRLENHSVYDGNSNLRDDLGSVVVNHPSIRLV

SEQ ID NO: 31083 - protein, 52 aa, Oryza sativa (japonica cultivar-group)
MNTIYPLHGQCMIDCRSGAASGGSEMGAENGSCGCNTCKCGTSCGCSCCNCN

SEQ ID NO: 31084 - protein, 390 aa, Thiomicrospira crunogena XCL-2
MTKPWQGILEKAIASRHWLHQHPELTWEETQTADYIRAQLTELGIPWRACAQYGTVATLSPTAGGKHIGFRADMDALPITEASGVDYCSVESGKMHACGHDGHTATLLAAAAWFKHHESELPNPISLLFQPAEEGGHGAKKMIEDGALNGIDRLYGWHNWPALTFGKALCPDGPVMSGNGTFHITLKGKGGHASQPEMTHDPVLAAAAVTLNLQQIVSRRLPPQANAVVSVTSINAVSNVTVIPEHVKLEGSIRLSQPQWRAPINQLIEDITHATSSSYGVVAEVDIRARYDATINQADSAAEYRAALQAELGETATESELLMPLMASEDFSYYLQAIPGAFALVGMAEESENGQRFSAPCHSPEYVFNDRVIGHVVKVFSRLAGAPIPE

SEQ ID NO: 31085 - protein, 58 aa, Passiflora edulis f. flavicarpa
WEYQVGPSVGVDAGDHIWCSRYILERITEQAGVVLSLDPKPIEGDWNGAGCHTNYSTK

SEQ ID NO: 31086 - protein, 155 aa, Triticum aestivum
  misc_feature (132)..(132): Xaa can be any naturally occurring amino acid
  misc_feature (137)..(137): Xaa can be any naturally occurring amino acid
  misc_feature (144)..(144): Xaa can be any naturally occurring amino acid
  unsure (1)..(155): unsure at all Xaa locations
MSLIRRSNVFDPFSLDLWDPFDGFPFGSDGSGSLVPRTSSDTVAFAGARIDWKETPVAHVFKADVPGLKKEEVKVEVEDGNILQISGERNKEQEEKTDTWHRVERSSGKFLRRFRLPENAKAEQVKASMENXVLTVXVPKEEAXKPEVKSIQISS

SEQ ID NO: 31087 - protein, 305 aa, Arabidopsis thaliana
MSVSVAAEHDYIGLSEFPTMEATTMSDKTKTRDNNNGLNFKATELRLGLPGSESPERVDSRFLALNKSSCPVSGAKRVFSDAINDSNKWVFSPGSTTATGDVGSGSGPRTSVVKDGKSTTFTKPAVPVKEKKSSATAPASKAQVVGWPPIRSFRKNSMASSQSQKPGNNSETEEAEAKSGPEQPCLYVKVSMEGAPYLRKIDLKTYKSYLELSSALEKMFSCFTIGQFGSHGGCGRDGLNESRLTDLLRGSEYVVTYEDKDSDWMLVGDVPWEMFICSCKKLRIMKSSEAIGLAPRVMEKCRSRN

SEQ ID NO: 31088 - protein, 647 aa, Xanthomonas campestris pv. campestris str. ATCC 33913
MCGLAGLLLATPRMHGEQLEALVRPMGGALRHRGPDDAGTWCDAQAGVALAHQRLSILDLSPLGHQPMRSADSRYVLAYNGEIYNFAQLRAALAALGHRFRGHSDTEVLLAAVVEWGLDDTLARCNGMFALALWDERDHCLSLARDRVGKKPLYYGWAGDTLVFGSELKALWQHPDFDNGVDRDALTLLLRLGYIPAPACIHERTFKLMPGRVLRLDAQAVAAGAAAHRPDQAQQPFWNAREAMQRALAAPFTGTDAQAEEQLDSLLRDAVALRMVADVPVGVFLSGGTDSSIVTAMMQAQSDQPVHTFSIGFEGSHHDEAPLAREVATHLHTDHTELYVSGADALAVVPTLPDMFDEPFADASQVPTALVARLARGGVTVALSGDGGDELFFGYGRYQRALRNWRMHGLVPAPLRRLMAVAARKSGEASRTGGLAALVAEAGARGIGDIYRNRISRWRDPAAVVLGATEPDSFYSLADPLHGSGTPADAMMLADFAAYLPDDLLCKVDRTTMAVGLEARAPLLDWRVAEFAWSLPLSLKYRDGVSKYLLKRVLCRYLPEPMVYRGKRGFGAPVSAWLRGDLHGWADDLLAHGTLQREGVFAADTVAGLWRDFNGGERKWHTHLWTVLMFQAWQDHWRAQRAAIVRS

SEQ ID NO: 31089 - protein, 57 aa, Passiflora exura
  misc_feature (14)..(14): Xaa can be any naturally occurring amino acid
  unsure (1)..(57): unsure at all Xaa locations
WEYQVGPSVGIDAXDHIWCSRYILERITEQAGVVLTLDPKPIEGDWNGAGCHTHYST

SEQ ID NO: 31090 - protein, 100 aa, Gluconobacter oxydans 621H
MERSMTKFRPLHDRVVVRRLTGEEKTAGGIIIPDTAKDKPTEGEVVSVGPGARNEQGQVVALDVKAGDKVLFGKWSGTEVKIDGEELLIMKESDIMGVIG

SEQ ID NO: 31091 - protein, 68 aa, Zea mays
NCIIDKNARIGKNVVIMNSENVQEADRPAEGYYIRSGITVVLKNAVILNGKLSVMLKNMELILLHMII

SEQ ID NO: 31092 - protein, 1786 aa, Anabaena variabilis ATCC 29413
MNTYTIDNHNSYSLVTNQSQECQNTLANLRVIIADLLKCEPEEVDVKVPFLEMGADSIVLVDAIRQIENNFRIKITIRQLFEELTNLSVLANYIEENVKLEPSTLLGQETLELSVNPQPLPQSQQSEQKSETLVEIVLRQQFELMSQQLEILRESNLPTNLSVTPSQNQAAKSVPNAVVQTTPDLKTGELNKSTLKKADSPSSFWRVEQSQAKTLTSQQQQYLNSLIARYTKRTAKSKQRSQSYRPVLADRRASIGFRPETKEILYPIVGDRSQGSRIWDVDGNEYIDISMGFGVHLFGHNVPFITAALEDQIKQGIQIGPQSKLAGEVATLICEMTGMERVTFCNSGTEAAMTAMRIARAATGRAKIAIFKGAYHGHFDGTLAIPQTSEDGKLPAQPMVPGVLQNMVDDVLLLTYGTPESLEIIKANAHELAAVLVEPIQSRKPDLQPKEFLQQLRVVTQQLDIALIFDEVITGFRVHPRGAQAWSGVDADIVTYGKLIGGGMPIGVIAGKAAYMDKIDGGFWSYGDDSYPEVETTFFAGTFSKHPLTMAATRATLLHLKAEGASLQERLNQRTSNLAATLNSYFEQANVPLRIVHFSSLFRFTLSGNSSYLYQPLEMDLLYYSLIEKGVYIWEGRTCFLSTAHTDEDVDYVIQAVKDSVQELQAVGFFSKSPKLSTNQPQTPKTSERVNSAVSLTVQDTIKPEVKEAFKIPLSDAQKQLWFLAQMGDNGSVAYNISLNIQLQGTLDLAAIRQAVQQVVQRHEALRTTISSQGDFQEILPSLKIDVPVIDFSNVKDSQLQVNQWLQNYSRESFDLSNGPLFRVRILKLAEQLHLLVVSAHHIITDGWSISIILQEMMALYSAKCQGHVCQLEPPIQFSSYLDWHRQFCATDEMKAHESYWLQKFADPVPVLDLPTDRQRPPSKTYQGGRQQLLLDPNVSAAIKQLSKQNGCTLFMTLLSAYAVLLYRLTNQDDLTIGIASAGRSLEGSERLVGYCSHMLPIRTQIVGDATFVEHLKACKSVLLEAYEHQDYPFAKLIDKLRVNSNTGMSPLVNATFNLERPVAIPQMYGLESSLLPQSISFADYDIGLNVTEIDHELLLECDYNADLFDAATIDRILGHYQTLLLGIIASPQTLVSQLSLLTATERQQILVEWNQTQIDYDRNQCVHQIFEQQAQLTPNAVAVESGEQKLTYRELNHRANQLAHFLQSLGVKPEVLVGICVERSVEMLVAMLGVLKAGGAYLPLDPAYPQERLAHMLTDSQASVLLTSANLASQLPKSSAKLVKLDTDWQVISRQPIINPTGIVVPSNLAYVIYTSGSTGKSKGVLIPHQALVNHNYAIAKNYELKASDRILQFASFSFDVAAEEIFPTWLSGATLVLRPEEIFSIPDFVQFVKQQDLTVLNLPVAYWQEWVSQMPQISWTPNVRLLVVGSERVPLERFLTWQQLVGSNVSWRNAYGPTEATITATIYGSHLSSHQQTAASLFIGRPIANTQIYILDQHLQPVPIGVTGELHIGGNGLAQGYLHRPELTAEKFIAHPFSNQPTARLYKTGDLARYRSDGTIEFIGRIDHQVKIRGFRIELGEIETALNQHPQVRECVVIASDDQLAHQQLQAYIVFHQQLKVDSSELHRFLKQKLPEYMIPTSFFQLENIPLTPNAKIDRQALNRLGVLINNIEVNRVAPSNHIEEVLANIWTEVLNLKQVGIHNNFFELGGNSLLAMQLLNRVNEAFLIDLPLRSLFECSTIAELSELIQAYKLEHLESDALEQILAEVDELIDTEIEQMLAKF

SEQ ID NO: 31093 - protein, 354 aa, Ipomoea nil
MVGGNHTPASPAPTVCVTGAAGFVGSWLVMKLLQRGYIVHATVRDPGNAQKVKHLLELPKGEGKLKVWKGVLEEEGSFDEAIAGCEGVFHVAAAVNFASKDPENEVIKPAVKGILSIINSCAKAKTVKKLVFTSSTAAVHIKETQQLEYDESSWSDLDFIYANKMGGWMYFASKTLAEKEAWKAAKEKQIEFISIIPPLVIGPFLIPTFPLSLVTALSPIMGNGLHHNIIKQGKFVHLDDLCEAQIFLYQHPKAGGRFICSSHHATIHDVAKMIRHNWPEYYVPSEFKGIEKELPIVSFSSKKLQEMGFQFKYTLEDMYKGAIETLRKKGLLPYSTKEPADIEQEQHSGKEPKS

SEQ ID NO: 31094 - protein, 364 aa, Chlamydophila caviae GPIC
MSEYPIDFVTNDFLGFSRSTTLVKEVEKRYRAYCEEFSHAQLGARGSRAIAGPSQILQNLEKKIVDFHNAEAAFVVHNGYMANLGFCYHISKDTDKVFWDESVHVSVVQSLKMISGKQQSFPHNDLDALESLLIAHRAVSSGRIFIFVCSVYSFSGTSAPLEELIDLSRKYHAHIIVDEAHAMGIFGEDGRGLCHQWGYENFYSVLVTYSKAMGAMGAAILCSSEVKTELMLNSPPLRYTTALAPHALITIDSAYDHLLLEGEHSRKQMFSLKAYFQEHFGLHSQCCGQPIWLKDFNIDLFTSMLDEANLRVGLMTFVNKPFIRVNFHTYNTRDEVDVLVAMLHSYLEKCCCGIDIDHELYFRR

SEQ ID NO: 31095 - protein, 403 aa, Ipomoea nil
MVDGNHPLLPPKVCVTGAAGFIGSWLVKTLLQRGYHIHATVRDPGNTKKVKHLLELPKADTNLTIWKGVMEEEGSFDEAIAGCEGVFHVATPMDFDSKDPENEVIKPAINGVLNIINSCVKAKTVKRLVFTSSAGTLNVQPQQKPVYDETCWSDLDFIYAKKMTGWMYFASKILAEKEAWKVTKEKKIDFISIIPPLVVGPFITPTFPPSLITALSLITGNQAHYSIIKQGQYVHLDDLCEAHIFLYEHPKAEGRFICSSHHTTIHGLADMITQNWPEYYIPSEFKGIEKDLPVVYFSSKKLQDMGFQFKYSLEDMYRGAIETLRKKGLLPYSTKEAAAIEEEQETVALKVEKPTAIEQKQEAKTVPLKPSAIEQKQETAVPLKLEEEPTAIEQKQEVVPLKA

SEQ ID NO: 31096 - protein, 662 aa, Deinococcus radiodurans R1
MCPARLRTPRTASLPTHRRSAMTTANPLNTSFTSADAAELYQVPNWSGGWFRVSDKGLMEATPAPGLHASLRAIVDEIVDRGESLPVILRFPQVLAGRVKHLNEAFQAAINEYNYSGHYQGVFPIKVNQRRAVVETVAAAGYDYAHGLEAGSKAELALCLAQKMHPDALLCCNGFKDDGFIKLALWGRTLGKNVVITIEKFTELDRILKQAKALGVKPAVGVRFKLHARGSGQWEESGGDQAKFGLNAYELLRVVERLKEENMLDSLVMLHTHIGSQITDIRRVKVAVREAAQTYAGLIAAGADLKYLNVGGGLGVDYDGSKTTFYASMNYTVKEYAADIVYTVQEVCKAREVPEPVIVSESGRALTAHHAVLILPVVDVTGPTRNLEDQELTVPGEDSHQIVRDMYETLENISMRNYRESYNDAVGDKQTLHNLFDLGYVTLEDRARGEALFNAILRKIAKLIQGEKYVPDELEDLQKVLADKFICNFSLFQSLPDNWAIGALFPIVPLDRLNEQPTRQATLVDITCDSDGKVEKFIDLRDVKATLPLHEPGDRPYYLGAFLMGAYQDVLGSAHNLFGKVSEAHVTVRPGGRFNIDLFVRGQKARRMIESMGYEEPMLRDAIEDQADAAIGRGTLTQEQEHELLEDYGEELLGYTYLEYES

SEQ ID NO: 31097 - protein, 376 aa, Zygosaccharomyces fermentati
TTTGHLIYKCGGIDKRTIEKFEKEAAELGKGSFKYAWVLDKLKAERERGITIDIALWKFETPKYQVTVIDAPGHRDFIKNMITGTSQADCAILIIAGGVGEFEAGISKDGQTREHALLAYTLGVRQLIVAINKMDSVKWDESRYQEIVKETSNFIKKVGYNPKTVPFVPISGWNGDNMIEATTNASWYKGWEKETKAGVVKGKTLLEAIDAIEPPSRPTDKPLRLPLQDVYKIGGIGTVPVGRVETGVIKPGMIVTFAPAGVTTEVKSVEMHHEQLEEGLPGDNVGFNVKNVSVKEIRRGNVCGDSKNDPPKAAASFNATVIVLNHPGQISAGYSPVLDCHTAHIACRFDELLEKNDRRSGKKLEDHPKFLKSGDA

SEQ ID NO: 31098 - protein, 349 aa, Chlamydophila caviae GPIC
MKYPLVFKDINIEDYERVIEVTCESVQLHALIAIHQTLVGPALGGVRAFAYNSFDDALTDVLRLSKGMTYKAVLSETETGGGKSVIILPKGMTRPTEAMLRAFGQAVDSLGGRYIAAEDMGVSVHDINIINQETPWVCGIESVSGDPSIYTAHGVFLCIKETAEQLWGDSSLKGKKIGIQGLGAVGRKLLHSLFFEGAELYVSETNQEVLQEITKFYSVTVVSKDAFPTLECDIFVPCAFGGVINNSNVDNLRCRAIVGAANNQLENASLGAALHARGILYAPDYLANAGGLLNVALAVGKPYCPKAVLQKVSRLPLILREIYEQSKASNKDTVILSDSIVEEKLTAYI

SEQ ID NO: 31099 - protein, 376 aa, Kluyveromyces thermotolerans
TTTGHLIFKCGGIDKRTIEKFEKEAAELGKGSFKYAWVLDKLKAERERGITIDIALWKFETPKYHVTVIDAPGHRDFIKNMITGTSQADCAILIIAGGVGEFEAGISKDGQTREHALLAYTLGVKQLIVAINKMDSVKWDESRYQEIVKETSNFIKKVGYNPKNVPFVPISGWNGDNMIEATTNAPWYKGWEKETKAGTVKGKTLLEAIDAIEPPTRPTDKPLRLPLQDVYKIGGIGTVPVGRVETGVIKPGMVVTFAPAGVTTEVKSVEMHHEQLEAGVPGDNVGFNVKNVSVKEIRRGNVCGDSKNDPPKAAASFNAQVIVLNHPGQISAGYSPVLDCHTAHIACRFDELLVKIDRRTGKTLEEAPKFIKSGDA

SEQ ID NO: 31100 - protein, 397 aa, Vibrio vulnificus YJ016
MSSAFYQQIRDQLEDVKAEGLYKSERIITSHQQAAVKIASGEEVLNFCANNYLGLANHPALIEAAKEGMDGHGFGMASVRFICGTQDIHKELEQKLSQFLGKEDTILYTSCFDANAGLFETLLDKEDAIISDALNHASIIDGVRLCKAMRFRYSNNNMAELEEQLIAADAAGARHKLIVTDGVFSMDGVVANLPAICDLADKYNALVMVDDSHAVGFMGKNGAGTHEYHNVMDRIDIITGTLGKAMGGASGGYTSAKAEVIDWLRQRSRPYLFSNSVAPAIVAASIRVLDLLQESGDLRERLWENAAHFRTRMEAAGFTMGGADHAIIPIMLGDAKVAAEFAERALAKGIYVIGFSFPVVPKGQARIRTQMSAAHSREQLDRAIDAFIEVGKDMGII

SEQ ID NO: 31101 - protein, 89 aa, Oryza sativa
  misc_feature (30)..(30): Xaa can be any naturally occurring amino acid
  misc_feature (62)..(62): Xaa can be any naturally occurring amino acid
  unsure (1)..(89): unsure at all Xaa locations
TRAHQYETVEDTSKLLFGGSAPIGLGENTXIRNCLIYMNAKIVRNAIIANTQAVQDSDHPEXGYYIRTGIVVILNNATMNDRTVISKHT

SEQ ID NO: 31102 - protein, 143 aa, Shigella flexneri 2a str. 301
MAIERTFSIIKPNAVAKNVIGNIFARFEAAGFKIVGTKMLHLTVEQARGFYAEHDGKPFFDGLVEFMTSGPIVVSVLEGENAVQRHRDLLGATNPANALAGTLRADYADSLTENGTHGSDSVESAAREIAYFFGEGEVCPRTR

SEQ ID NO: 31103 - protein, 343 aa, Vibrio vulnificus YJ016
MKIKALSKLKPEEGIWMTEVDKPVLGHNDLLIKIKKTAICGTDVHIYNWDEWSQKTIPVPMVVGHEYVGEVVGIGQEVRGFEIGDRVSGEGHITCGHCRNCRGGRTHLCRNTIGVGVNRTGCFSEYLVIPAFNAFKIPANISDDLASIFDPFGNAVHTALSFDLVGEDVLITGAGPIGIMAAAVAKHVGARHVVITDVNEYRLDLARKMGVTRAVNVAEQKLDDVMVELGMTEGFDVGLEMSGNPSAFNSMLKTMNHGGRIALLGIPPSDMGIDWNQVIFKGLVIKGIYGREMFETWYKMASLIQSGLDLTPIITHHFKVDDFQQGFDIMRSGMSGKVILDWE

SEQ ID NO: 31104 - protein, 431 aa, Mycobacterium leprae TN
MADTDDTVTLKYPGGEIDLQIVRATEGNDGIAIVPVLAKTGYTTFDVGYGNTASTKSSITYIDGDAGILRYRGYPIEQLAEKSTFIEVCYLLIYGELPATDQLAEFTHRIQRHTMLHEDLKRFYDGFPRNAHPMPVLSSVVNALSAYYQDALDPMDNGQVELSTIRLLAKLPTIAAYAYKKSVGQPFLYPDNAFSLVENFLRMTFGLPAEPYEPDPEVVRALDMLFILHADHEQNCSTSTVRLVGSSRANLFTSISGGINALWGPLHGGANQAVLEMLEGIRESGDDVGGFVQKVKNCQAGVKLMGFGHRVYKNYDPRARIVKEQADKILVKLGGDDDLLNIAKGLEEAALTDDYFIERKLYPNVDFYTGLIYRALGFPTRMFTVLFALGRLPGWIAHWREMHDEGDSKIGRPRQIYTGYTERDYTAIETR

SEQ ID NO: 31105 - protein, 629 aa, Glycine max
VKLHAEEGSDEVYCQVVLVPESEQVQQKLREGEFDADGEEEDAEAVMKSTTPHMFCKTLTASDTSTHGGFSVPRRAAEDCFPPLDYSQQRPSQELVAKDLHGQEWRFRHIYRGQPRRHLLTTGWSAFVNKKKLVSGDAVLFLRGEDGELRLGIRRAAQLKSGSTFSALSGQQGSPTSLMDVVNALSARCAFSIHYNPRVSSSEFIIPIHRFVKSLDYSYSAGMRFRMRFETEDAAERRFTGLIVGIADVDPVRWPGSRWRCLMVRWDDLEATRHNRVSPWEIEPSGSASTANNLMSAGLKRTKIGLPSAKLDFPVSNAIGTSDFGESLRFQKVLQGQEMLGVNTTYDSFNAQSHQLSDLRRCYPGSNYPRIAATGNSIGISQVSSNVSNNGIGFSESFRFQKVLQGQEILPSQPYGRALSVDEACGNGRFGLFDGFQAMRSRNGWSSHVSNNSSHLHPPVPSGQVSSPSSVFMFQQAVNPVLNSDYNNQIGQVMGDKVHQRVSYASEVKGGKFVSTPYEPLLRGLSQEGTNSFGLSNFHNQLDSSRSHDSVSVLRASQELVPSCKSRCRVFGFSLTEGAPVASKEATDSSAVACAGPSFTRHVEDDFHPGHSLRSKAVASYCTKGVLQY

SEQ ID NO: 31106 - protein, 422 aa, Pseudomonas fluorescens Pf-5
MQGAGRPARERLADFGSAYSMENLQSAVDTLVHGSNTLFILIGAVMVLAMHAGFAFLEVGTVRQKNQVNALSKILSDFAVSTLAYFFIGYWISYGVSFLQPAAVISADHGYGLVKFFFLLTFAAAIPAIISGGIAERARFVPQLCATVLIVAFVYPFFEGLVWNGNFGVQAWLQQRFGAGFHDFAGSVVVHAMGGWLALAAVLLLGPRNGRYRDGKLVAFAPSSIPFLALGSWILIVGWFGFNVMSAQTLQGVSGLVAVNSLMAMVGGTVAALIVGRNDPGFLHNGPLAGLVAICAGSDLMHPVGALITGAIAGALFVWCFIAAQSQWKIDDVLGVWPLHGLCGVWGGIACGIFGQSALGGLGGVSLVSQLIGTGLGVAVALLGGLAVYGVIKAVCGLRLTQEQEYYGADLSLHKIGAVSQD

SEQ ID NO: 31107 - protein, 218 aa, ASPERGILLUS NIDULANS FGSC A4
MDPNMNNLLKWGIQNSTATQQTSDSNNNASQAPRSNITPEMLSALFGGPSEADLMKAAMEALRSDEVDLENKLIAFDNFEQLIESIDNANNLEPLGLWTPLVELLKHEEPDMRRMAAWCIGTAVQNNEKAQDKLIVMNAIPTLVSMSTQDPVPAVRKKAVYALSSAVRNYQPGTNELVKHLPGGYASGKVDAADMDTIDMIMDKLRAHPVSSSPPSAA

SEQ ID NO: 31108 - protein, 375 aa, Hordeum vulgare
EFPPSLPSVVQPGSSIPPAMALLTDLLNLDLSGSTEKIIAEYIWIGGSGMDLRSKARHLPGPVTHPSKLPKWNYDGSSTGQAPGEDSEVILYPQAILKDPFREGNNILVMCDCYTPRGEPIPTNKRYNAAKILSNPDVAKEEPWYGIEQEYTLLQKDINWPLGWPVGGFPGPQGPYYCGIGADKSFGRDIVDSHYKACLFGGVNISGINGEVMPGQWEFQVGPTVGISAGDQVWVARYILERITEIAGVVVTFDPKPIPGDWNGAGAHTNYSTESMRNDGGFKVIVDAVEKLKLKHKEHIAAYGEGNERRLTGKHETADINTSSWGVANRGASVRVGRETEQNGKGYFEDRRPASNMDPYVVTSMIAQTTILWKP

SEQ ID NO: 31109 - protein, 484 aa, Xanthomonas campestris pv. campestris str. ATCC 33913
MLRGLTCRCRVCMSYAIVWFRRDLRLEDNPALRAALDAGHDPIPLYIDAPHEEGQWAPGAASRAWRHRSLAALDASLRARGSALLIRQGDSAQVLDAVIAQTEAVAVYWNRKYEPATQPRDAQIKRSLRERGLEVQSCNAALLFEPWTLATQQGRPYKVFTPFWRNALTQLRLPDAMPAPRSLPPLPASLDGVHVDALNLLPTPAWDQGFWEHWQPGEAGAHEMLEIFVDGALSGYRENRDRPDRVGTSQLSPHLHFGEIAPWRIASTLEAQRSARNGADIDGYIRQLGWRDFAYHLLHHFPDTTTQNLNPRFAGFDWATVDPVTLDAWQRGRTGIPIVDAGLRQLWHTGWMHNRVRMIVASLLCKHLRVHWLEGARWFWDTLVDADLANNTMGWQWVAGTGADAAPYFRVFNPVTQAEKFDPQATYITRWIPELAALPVKERFAPWLHPLSLARLAPTYPRAPIIGLAEGRDAALAAYAGTRG

SEQ ID NO: 31110 - protein, 56 aa, Passiflora foetida
WEYQVGPSVGIDAGDHIWCSRYILERITEQAGVVLTLDPKPIEGDWNGAGCHTNYR

SEQ ID NO: 31111 - protein, 337 aa, Yarrowia lipolytica CLIB122
MFRSVYKRGRILSKIPIKQHIQITHKHTMTSLDFTLNNGKTIPAIGLGTWKSTTEEVAGAVECALTEGGYRHIDTAFNYRNEDAVGLGIKRAMEKGVKREDIFVTTKIWVTYHDRVEENLDMSLERLGLDYVDMLLIHWPVPLNPNGNDPVYPLRPDGSRDIDESGSQPKTWKQMEAVLKTGKTKSIGVSNFSIPYLEELLKEAEVVPAVNQVELHPLLPQLELMEFCKKNNIVMTAFSPFGSVGGPLLKNELVVSLADKYNTSPGGILTSYHIGNGTVVIPKSVTNSRIVENGKSAVTLSQEDLKALNDLHKTEGIHRTSKPKWGVDLGFPDFDFC

SEQ ID NO: 31112 - protein, 327 aa, Ralstonia metallidurans CH34
MPTTVRAVRLHEFGLPQVMRLESVELPPPAAGEARVRHTAIGFNFIDVYQRRGTYPLPVGTGLGHEAAGVVEAIGDGVTDVAVGDRVAYMNAGLGAYAEGRNIPVDKLVKLPDAISDEQAAAVIFKGMTAQYLVRHTYAVKPGDTVLVHAAAGGVGQILSGWAKALGARVIGTAGSAAKCEIARAVGCDVAIDYSHGDWVKQVRDATDGRGVNVVYDAVGKDTFLGSLDCAQTFGMVVLYGGASGPAPAIEPELLNKKGCLYLTRPSVFPHNADATRFRANAKDLFDAIAAGHVKVQIGARFPLADVARAHEAAEGRATTGAILLLP

SEQ ID NO: 31113 - protein, 356 aa, Ipomoea nil
MSGGGRNAPTLPAPKVCVTGAAGYVGSWLVMKLLQRGYVVHATVRDPGNTKKVKRLLELPKAAEGKLRLWKGVLEEEGSFDDAIAGCEGVFHVAATPVDFVSDDPENEIIRPAVKGILSIINSCAKAKTVKRLVFTSSAVTLIVQENPKPVYDESSWSDLDLIYAKKMPGWMYFASKTQAEKEAWKAAKEKQIDFISIIPPLVIGASIVPTVPLSFTIALSPVTGNEAHYFVIKQGQYVHLDDLCEAQIFLFEHPKAEGRFICSSHDATIHDLAKMIRQNWPEYYVPSEFKGIEKDLPVVSLSSKKLLDMGFQFKYTLEDMYREVIETLRNKCVLPYSIKPPPKEQEWENGKTLEA

SEQ ID NO: 31114 - protein, 436 aa, Ralstonia metallidurans CH34
MRCICLVTSSRHAYVLSSTSSPSASVTTTPPRHITGGSSPLVADCSRAAMSTAGMKALSTAHAATLRAYFKPDPTHPDCTAMHTQNLSAWTHSHVFDAGNQAAERGTRLVMWITLAMMIVEIAAGLVFNSMALLADGWHMSSHALAIGLSAFAYAAARRLSQDGRFSFGTWKIEVLAAFASAIFLLGVAGLMVFGSVERLFTPQPIHYQEAMAITAIGLIVNLACALILGGAHHGHDHGHGHDHGHQAHGHDHHDHGHGHGHGHGGHDDHGHRHHDINLRSAYLHVVADAATSVLAIVALAGGWWLGWSWLDPVMGLVGAVLVGRWAIGLMRQSGTVLLDREMDHPVVEEVREVLAQFSHGEDGTRVADLHVWRVGREKFACIASLVTHDASLTPQRVRHALSIHDELVHVSVEINQCDDGRDGHDGHAAHRGHRH

SEQ ID NO: 31115 - protein, 470 aa, Yarrowia lipolytica CLIB122
MASIPHYDYLVIGGGSGGVASARRAASYGAKTLLIEGKALGGTCVNVGCVPKKVMWNASDLAGRIRQAKEYGFPDVDPKYADNFDWSGFKAKRDAYVKRLNGIYERNLQKEGVEYVFGWATLYKQEGQEFPLVHVKSDDGNTKLYSAKKIMIATGGKPRLPDVPGAEYGIDSDGFFALETQPKRVAVVGGGYIGVELAGVFHGLNSETTLFCRGQTVLRAFDIMIQDTITDYYVKEGINVLKGSGVKKIVKKDNGELLVTYEQDGAEKDITLDSLIWTIGREPLKDTLNLGEFGIKTNKRGYIEVDEYQRSSVDNIYSLGDVCGKVELTPMAIAAGRKLSNRLFGPTEFKNQKQDYTDVPSAVFSHPEVGSIGITEAAAKEQYGEENVKVYTSKFVAMYYAMLEEKAPTAYKLVCAGKDEKVVGLHIVGADSAEILQGFGVAIRMGATKADFDNVVAIHPTSAEELVTMR

SEQ ID NO: 31116 - protein, 197 aa, Brassica oleracea var. capitata
MGRKKLEIKRIENKSSRQVTFSKRRNGLIEKARQLSVLCDASVALLVVSASGKLYNFSAGDDLVKVIDRYGEQHADDDRKALDLQSEAPKYGSHHELLELVESKLVESNSDVSVDSLVQLENHLETALSVTRARKTELLLKLVDSLKEKEKLLKEENQGLASQMEKNNLAGAEADKMEVSPGQISDINCPVTLPLLY

SEQ ID NO: 31117 - protein, 75 aa, Passiflora foetida var. hastata
GTNGEVMPGQWEYQVGPSVGIDAGDHIWCSRYILERITEQAGVVLTLDPKPIEGDWNGAGCHTNYSTKSMRDDGG

SEQ ID NO: 31118 - protein, 541 aa, Anabaena variabilis ATCC 29413
MPQLAPHIFDILYQKGVEHAFGIPGDFALTLFDALADSKIAPIVMTHEPCVGFAADAYSRMRGLGLAVVTYSVGGLNMVNAVAGAYAEKSPLVILSGGPGVREQKEHDLLHHKVKTFDTQRRVYEEVTLYATKLTDPKTADAKIHHALDYATTFKRPVYLEIPRDLVYAEITESEHLPPPIKRTDPDTLTEAIAETLEMLKRSHSPVILACVEVHRFGLQEQLLALAEKLGVPVCSTMLGKSVFPERHPQYIGIYNGEAGDLNVQKIVEESDCVLMLGVFMTDINLGMFTAHLNPGFTVYATSERLAIKHHEYPNVRFEDYITTLLDSPDLPHWDSSGIYTMKPRVTPSVGKISMSGLLYELNQFIDSNTLLVTDVGDALFAADDIQTQQGTSFLCPAFYASMGFGVPGVIGAQLADPSRRAIALVGDGAFHMTGMELLTAQRLRLNPIVIVINNGSFASLQAMGHQEAAFVQIPTMDYAQLANVLGGHGFVIHTSTQLQQALQTAQNSKTFSILDVHLSPDDVSPALQRLSALFTKSLKG

SEQ ID NO: 31119 - protein, 51 aa, Arabidopsis thaliana
MPSHKTFRIKKKLTKKMRQNRPIPYWIRMRTDNTIRYNAKRRHWRRTKLGF

SEQ ID NO: 31120 - protein, 365 aa, Anabaena variabilis ATCC 29413
MDNIFRFADELGPAKIIHIYEREADLKAIVVVDNIDCGPAIGGVRMATDVTTEEVFRLARAMTLKNAAADLPHGGGKSAILADPKQPLADKERLVRTFARAIRDVTEYIPGPDMGTDEQCMAWIKEEIGRAVGLPKAIGGIPLDEIGATGFGLSICAEIASKFCHLNLEGARIVIQGFGSVGKNAARFLTAKGALLIGAADSQGTLFNPLGIDVKQLIKLKNSGKSVISYPQGDKLDRDAVIDIECDIWIPAARPDIIHADNVDRLKTQLVISGANIPFTEAAERICHERNIIVVPDFIANAGGVICAAVEYDGGNQTTAFETIAKKIRYNTTLVLEQVAKTGKLPRQAAVELAQRRICLARQDI

SEQ ID NO: 31121 - protein, 290 aa, Silicibacter sp. TM1040
MAIWNLGSINIDMVYSLPHMPQPGETLAATSFDQGLGGKGANMSVAAARAGAHACHIGAIGPEGKWCVDRLMEYGVDTRHIVQSDTATGHAIIAVDPAGENQIILYPGANRGLGADQIGQALSAANAGDILLMQNETNMQAEAAEMGRKLGLRVAYAAAPFDAAAVQAVLPFVDLLFLNEVEAAQLQDATGKPPQDLGVDDVIVTLGAEGARHFDGRTGAVSDVAAQKVTAVDTTGAGDTFTGYVLAALDRGLPMAQAMAQASRAGALMVTRHGAADVIPDLKEVQDAKF

SEQ ID NO: 31122 - protein, 635 aa, Rhodospirillum rubrum
MDDEPADADEAASMAGAFAAAPGGRPTLRRDRAGAFAAVSLPLTPEDRFDRQPWTGRDGRITLLFDGRLDDRAGLIDRLGLDGKRAEGMADGALVAAAYERWGTAILAGLAGFWVLAVWDAAARRLVLARDPMGGRSLFYHRQGPVITFAASTLALLRLPRVERVLDETVLGDLLMLTMGERDRTFYRDISRVPSAHLVVCTPEGTVIDPFWHPPVGGELRLPRDEDYVEAARELLERAVRANLRSLRPVAVLGSGGLDSAGVAATAARLLAPRPLPLYCRVPPTDWSGPELSTSYPDERPKLAALAALHPNLRVMSVEQAGPHRFDEDQTCLFQRYGLAARAADNIGWLLGAVDQARAAGHRVLLTGDYGNTTLSAPGRGAPMALLRQGRLMALARELAGWRRQRGWSWPKVARETLLYRIPGLSPLRSLGRNPGSWRSWTLTRPEAVRALGLEARARAAGAPGFPMPTTTPAASRALILERYGRLRGDLAAQTTAVDGFELRSPLAYLPLVEFTLRVPSPQFCRDGRLRWLARRTLADRLPPEILMEDRLGAQHPEWFDTLSSLRESYQADLPRLAKSPLVATLLDLERAGHLLDSWPDIARDAAPRHHDHALALVRGLHVARFVRWNEGGND

SEQ ID NO: 31123 - protein, 388 aa, Neurospora crassa
MSVPLQNRVSDSSDGIDRIAEEKQKLSVNAPPSTRKQDALGLDDADRQSTTNRFKTFRSAFKYIHHLTPKQVDDYMHSYVIYNLDWADEDAMVKELGPDYQAKVGECLKAYYGIINHLCAMGDVEKMYIPPHMDKRASVIENQLLYEKAVAHAIGMKAGDKVLDLGCGRGRVAAHMASMTGATVTGLNIDPNQVAQAQEFNNLKGFKNTFVQQDMNTLPLPFADNSFDCFYQIQALSLCKDLPTLFREVYRVLKPGAKVSLLDWVSLPGYDPSNPEHLALMRRVKPLIGAVGTPTPKSFEKALEDAGFVVTKSENASIDGLQAPLIDRVDIYFRTMRQIILGLVKIKVLPQHFKTLINRLCLDGQAFVKMDRMRLISTSYWIVAEKPL

SEQ ID NO: 31124 - protein, 416 aa, Chlamydophila caviae GPIC
MNKKRVVVTGLGVVSCLGNEIDTFYDNLLAGISGVRTITSFPCEDYATRFAAWIPEFNPEPYLDKKQARRVDPFITYAVVAAKKAIAMSRWDKDNLPADPLRCGVIIGSGMGGLQTLDEGMERLILGNKKLSPFFIPYIITNMAPALIAMDFGLMGPNYSISTACATSNYCIDAAYQHLVSGRSDMIVCGGTEAAVNRVGLTGFIANRALSERNDAPQEASRPWDRDRDGFVIGEGAGVLVLETLENALKRGAPIYAEILGSYTTCDAFHITAPRDDGEGITSCILGALESSGIPKERVNYINAHGTSTPLGDISEVLALKKAFGSHVKNLRMNSTKSLIGHCLGAAGGVEAVATIQAIQTGKLHPTINLENPIAEIDDFDVVANKAQDWDIDVAMSNSFGFGGHNSTILFSRYIP

SEQ ID NO: 31125 - protein, 60 aa, Passiflora gabrielliana
VMPGQWEYQVGPSVGIDAGDHIWCSRYILERITEQAGVVLSLDPKPIEGDWNGAGCHTNY

SEQ ID NO: 31126 - protein, 223 aa, Silicibacter sp. TM1040
MGRLDTLKHFTLAALIIVGVLTKGSALRAQTQDTLIVAGGCFWCVESDFESVRGVSEAISGYTGGTTENPTYKQIGSGRTGHYEAVKILFDPTIVSRESLLDLFFRSIDPTDTGGQFCDRGAPYRTAVFVSNEDEKAIAQAVKAEAEAELGQQIVTPILEASPFYEAEAYHQDYYKGEGLVLTRFGPLRQSKAYVRYRKACGRDARIAELWGRDAPFIGSYGF

SEQ ID NO: 31127 - protein, 512 aa, Torenia hybrida
MSPLALMILSTLLGFLLYHSLRLLLFSGQGRRLLPPGPRPWPLVGNLPHLGPKPHASMAELARAYGPLMHLKMGFVHVVVASSASAAEQCLRVHDANFLSRPPNSGAKHVAYNYEDLVFRPYGPKWRLLRKICAQHIFSVKAMDDFRRVREEEVAILSRALAGKRAVPIGQMLNVCATNALSRVMMGRRVVGHADGTNDAKAEEFKAMVVELMVLSGVFNISDFIPFLEPLDLQGVASKMKKLHARFDAFLTEIVRERCHGQINNGGAHQDDLLSTLISFKGLDDGDGSRLTDTEIKALLLNLFAAGTDTTSSTVEWAVAELLRHPKTLAQVRQELDSVVGKNRLVSETDLNQLPYLQAVVKETFRLHPPTPLSLPRLAEDDCEIDGYLIPKGSTLLVNVWAIARDPKVWADPLEFRPERFLTGGEKADVDVKGNDFELIPFGAGRRICAGVGLGIRMVQLLTASLIHAFDLDLANGLLPQNLNMEEAYGLTLQRAEPLLVHPRLRLATHVY

SEQ ID NO: 31128 - protein, 517 aa, Arabidopsis thaliana
MAANKTLPTYFCRNCENPLALGEDLISKKFVGASGPAFMFSHAMNVVVGPKIGRKLITGSYVVADVMCSENLVGAIDHALKVFDKMAQAIGPRLYSCCNCRNHVGLHDDIISKAFQGRTGRAFLFSHAMNIVVGPKEDRNLLTGLHTVADISCVDCNEPLGWKYERAYETSQKYKEGKFIFEKAKIVKEDCLEDNLLGKKKEERERENGAREMYLKRPIWSDGASATPENPSESETGEESDAASMVVEELVTSLNTQRLYRELTLSLRTGLRDACAEFSFLRIRGLRSLLKTLRTVADSDSIIRLFSHTQTISDLQLVPVLFQHSLKEAEDDKVTSLDHIFSVEPMKITSPSTDAEVAVALRVLEGCCLLHPQSTVLAHKHGAVRVMMNVLSTRGVLEQGACLDALISVLLDSSANQVDFGACNGIEEVAMLMRDKQADENLRLRCGEFLLLLVGHVNGKDRSPIASVNEDIRRLLGEKSASLIWAASQFGSTGDPEQRITALHIQAGRVLESLDLY

SEQ ID NO: 31129 - protein, 457 aa, Torenia hybrida
MAKTYGPLMHLKFGLKDAVVASSASVAEQFLKKHDVNFSNRPPNSGAKHIAYNYQDLVFAPYGPRWRLLRKICSVHLFSSKALDDFQHVRHEEICILIRAIASGGHAPVNLGKLLGVCTTNALARVMLGRRVFEGDGGENPHADEFKSMVVEIMVLAGAFNLGDFIPVLDWFDLQGIAGKMKKLHARFDKFLNGILEDRKSNGSNGAEQYVDLLSVLISLQDSNIDGGDEGTKLTDTEIKALLLNLFIAGTDTSSSTVEWAMAELIRNPKLLVQAQEELDRVVGPNRFVTESDLPQLTFLQAVIKETFRLHPSTPLSLPRMAAEDCEINGYYVSEGSTLLVNVWAIARDPNAWANPLDFNPTRFLAGGEKPNVDVKGNDFEVIPFGAGRRICAGMSLGIRMVQLVTASLVHSFDWALLDGLKPEKLDMEEGYGLTLQRASPLIVHPKPRLSAQVYCM

SEQ ID NO: 31130 - protein, 1952 aa, Cryptococcus neoformans var. neoformans B-3501A
MDDLTPLPTTFDPDNDDFDVEDRRGLGHGGGEVDEDGEGDLLIVHGEEEEEEQEEGNEGEGEGEGEDQTNLMEYIASLQQIGEHDNDGNQDQDQDQDPDTETGDNTHEHGHDAEVELGQEMEEESTGQVVDTELGEADRNRDSPPDPNPNPKPNPITVPSSARLQSEQQGQESNVIGGPMEVEMEEEELGESIEVDPGQEPGELHEPEPEPEPEIQREASSPLSDLPDLPDELEFSPPPSPGPFAPSRNGQRRRQPSSNSNNSNMGTGMDMEVDRDSSLTPLYDDYDHEGGEKDGIGLPRPRFRAESSAAGARRSASMSHANATKRGRNTTRNRDSRGREKQGRRSSLSFSSSPPLESIEVAPDIAPGTAGALGAGRKKRQRERASKGKLPLRHGHERGDGLSDGEGDNEFELVPKSAKRSKSAHPFPASHAASHAASASHPPHHPSRKPLDPISTGLKLPGPRALPPSRPRALNDQSIKKFLVGKTEEVQLGICLRERYKKWGKSNPPAHANRINPKTTEITGPGYFKSTTWPEPLTPLPTKFTSPLDGDKVEEIQRTVAGVLLPLITGEARHCFWPFHLQGRGKRDGEGEEVSDPAHSTHRARNPITLHRGVDTALHRSVCDFCSSTIFGGYYFCKKCGRDYCLQCERYFPESMEAVGESPWELTDAARPRLLKCIKQPWEEMMSGGGGEMGGDSTGNGNGNGSTRTNNTNANTDGGSNTNKNGRKREKAIAWHVRSDLQPVSRFTKEEIEGHWLSLAEFVIGHGYSPDASSGSGSGFDFLFGADDGDEPEGEKKKEEWRLQWERMLRLMGLQMDEEVKSVLEQWSKNARVVREKESGSVTHLGPGANIESNLETDTNSHPVSQPESSSNNPIDSQAPIDKTSTSVRRSAAMTTENENDNKSEHETDEVEELETGEPKSASEMLKGMMDKENGEETSAAHTGPAASLNSVASAPAAVRSSTQVTKVEIPVAANASPTVSSSSSPQANPPFEKSGLPSASPLRSVPTSGNFRTGSNPTPDQQQDLEKIAFSYTKHTHPNPPSDPASLSDYSLPFIYLPSPEGLDNKAFDELWSKGEPIVVGGVNVYVGGGGRRRREEGEKMGKEEEEWGPEKFIERFGEEQCSVVDCQSDTPLVSTVGAFFAAFGESVGKPWEREGEDEKRKEKKRQGILKLKDWPPGDEFVDTHPELYHDFCAALPVPDYTRRDGVLNLYSHFPPGPTRPDIGPKMYAAFAALETPGGFGSTRLHMDVADAINIMLHASPIPDDSPGCAVWDIYPAQDADKIREFLKEKFDKTHNFVDPIHSQMFYLDAKSRKELWERKRVVSWRVYQYPGQAVFIPAGCAHQVCNLSDCIKMALDFVSPHNVPRCQQLTKDFRRENYLKAWKEDVLQLYNVLWYAWLSARETIARREKEVAAAEARQKQLQSFQLDDNNSPLFQSKHPTSSPLCSATPTITSTLDLDASSRMGYDRLNMGIGLGERGMGMGLGRVGMGSWGNVSSVRDEPPRGGPLLLMLNDESEKVSRGQLTEGEKSSEPVRGKGEDHEKSDQGKQLSSDPVSFASSLSNSYSLQLARSLFTLSLQRDETNPSELFVPSAAAMNHRPRGPSLPDSHSSIAHPRTSSRAPSAHTMDNRSSQTSASVRTKDIKEKEDKFTPPKKLKNPARPLRTSTLIKLGAKRMDEILELARGDLGEGESLGNALGGLGNFAELGTMESHGGMQGWAGLRAMSESVRSRGDGDREGSPLVSINDVHNSNSSPNAETDTSTPPDDVIDRTDAETAADIAAEILSMDIDHQEDETNIEDDGDLEGLRRIVERGILEQEQGQEQGQEQEREQEREQEDDERDNELGEEGREAIASIQRLQAVEEAEEEERERENLAKEEEREREMGRPDGVVINDDKEEGEGEEEEDEQADRERARQREEEEEEEIEGVDEDAEGEEFEEVSKMNVDFGMFI

SEQ ID NO: 31131 - protein, 608 aa, Hordeum vulgare subsp. spontaneum
MAALATSQLATSGTVLGVTDRSAPSMFRHAGFQGLRPRKPADGTFGMRTVGASAAPKQSRKAHRGNRRCLSVVVRATGSGMNLVFVGAEMAPWSKTGGLGDVLGGLPPAMAANGHRVMVVSPRYDQYKDAWDTSVISEIKVADEYERVRFFHCYKRGVDRVFIDHPWFLEKVRGKTKEKIYGPDAGTDYEDNQQRFSLLCQAALEAPRILNLNNNPYFSGPYGEDVVFVCNDWHTGLLACYLKSNYQSNGIYRTAKVAFCIHNISYQGRFSFDDFAQLNLPDRFKSSFDFIDGYDKPVEGRKINWMKAGILQADKVLTVSPYYAEELISGEARGCELDNIMRLTGITGIVNGMDVSEWDPTKDKFLAVNYDITTALEAKALNKEALQAEVGLPVDRKVPLVAFIGRLEEQKGPDVMIAAIPEILKEEDVQIILLGTGKKKFEKLLKSMEEKFPGKVRAVVRFNAPLAHQMMAGADLLAVTSRFEPCGLIQLQGMRYGTPCVCASTGGLVDTIVEGKTGFHMGRLSVDCNVVEPADVKKVATTLKRAVKVVGTPAYQEMVKNCMIQDLSWKGPAKNWEDVLLELGVEGSEPGIVGEEIAPLAMENVAAP

SEQ ID NO: 31132 - protein, 218 aa, Zea mays
MAEETDTRPASAGSRGRPAPEDDDREEGEITDLACAPSPPATHPLEHSWTFWFDNPQSKSKQAAWGSSIRPIHTFSTVEEFWGLYNNINHPSKLIVGADFHCFKNKIEPKWEDPICANGGKWTISCGRGKSDTFWLHTLLAMIGEQFDYGDEICGAVVSVRGKQERIAIWTKNAANEAAQVSIGKQWKELLDYKDSIGFIVHDDAKKMDKGLKERYTV

SEQ ID NO: 31133 - protein, 498 aa, Anabaena variabilis ATCC 29413
MAINTGKNKLMNRHIQPWQRLLVLAIGSMVFAVFAPTIVQAANTPTLESLSETTIKLQISIDTTWVLLSGFLVFFMQTGFAMLEAGLVRQRSVVNTLLENFIDAAVTVLAWWAVGFGIAFGTSAGGLFGIDTFFLNQLPGADGSYPLGAPGSTAAINTYTLFFFQFAFAATASTITTGSMAGRTDFIGDLIYSAIMGAISYPIIVHWAWNSNGWLGKLSYHDFAGGSIVHTVGGWTALVGAYLLGPRPDRPPWGKLPPAHNLALATLGTMILWFGWYGFNPGSTLGTANPGLIGLVTINTTLAAGAGALTALIFLYVRTGKWDLVYCLNGSLAGLVAITAPCAYVAPWASVLIGFTGGISVVLGVSLIESLHIDDPVGAFSVHGISGMMGTLSIGFLGQAELTLNQKAGLFLGGGFDLLGIQMLGIVAITVFTVAFAFLMYGGLKAVGYLRVNAEADSIGIDAYEHGASVWPDIYPVEEVSKLQDQTKISENKTLEEQ

SEQ ID NO: 31134 - protein, 318 aa, Zea mays
  misc_feature (138)..(138): Xaa can be any naturally occurring amino acid
  unsure (1)..(318): unsure at all Xaa locations
MENPPSILVTPMAPAMSAQFTRITFSNLFVRRAGPGSTELTVEGRPSDQLGRRNLTDSPVFDGRGPDASLVARVQGVATQMGDVRQLYTVVFQERPLKGATLVTEGAMTEGSDEWAIYGGTGAFAMARGVIRRTSRAXTSGGNSDELAVEVLCPVFRPAAFGSSSQPAAKVGVWGGEGGSAQDITTTEPPRRLQNLTVRAGVAVDSIEFTYTDTGGQTRTAGRWGGLGGNVRKVSEQLDLGDAEYVKEVSGTYGAFEGATTLTSLRIVTSTARAWGPWGIESGTRLCITAPIGSSIVGFYGRATTRLVAAIGVYLRQL

SEQ ID NO: 31135 - protein, 364 aa, Arabidopsis thaliana
MVIMQVLASKTKINMVMELVTGGELFDRIVSNGKLTETDGRKMFQQLIDGISYCHSKGVFHRDLKLENVLLDAKGHIKITDFGLSALPQHFRDDGLLHTTCGSPNYVAPEVLANRGYDGAASDIWSCGVILYVILTGCLPFDDRNLAVLYQKICKGDPPIPRWLSPGARTMIKRMLDPNPVTRITVVGIKASEWFKLEYIPSIPDDDDEEEVDTDDDAFSIQELGSEEGKGSDSPTIINAFQLIGMSSFLDLSGFFEQENVSERRIRFTSNSSAKDLLEKIETAVTEMGFSVQKKHAKLRVKQEERNQKGQVGLSVTAEVFEIKPSLNVVELRKSYGDSCLYRQLYERLLKDVGTSSPEQEIVT

SEQ ID NO: 31136 - protein, 128 aa, Shigella flexneri 2a str. 301
MAYSEKVIDHYENPRNVGSFDNNDENVGSGMVGAPACGDVMKLQIKVNDEGIIEDARFKTYGCGSAIASSSLVTEWVKGKSLDEAQAIKNTDIAEELELPPVKIHCSILAEDAIKAAIADYKSKREAK

SEQ ID NO: 31137 - protein, 761 aa, Hordeum vulgare
MAILGELGTEILIPVCGVIGIVFAVAQWFIVSKVKVTPGALRRRRAKNGYGDYLIEEEEGLNDHNVVVKCAEIQTAISEGATSFLFTMYQYVGMFMVVFAAIIFLFLGSIEGFSTKGQPCTYSKGTCKPALYTALFSTASFLLGAITSLVSGFLGMKIATYANARTTLEARKGVGKAFITAFRSGAVMGFLLSSSGLVVLYITINVFKMYYGDDWEGLFESITGYGLGGSSMALFGRVGGGIYTKAADVGADLVGKVERNIPEDDPRNPAVIADNVGDNVGDIAGMGSDLFGSYAESSCAALVVASISSFGINHDFTAMCYPLLVSSVGIIVCLLTTLFATDFFEIKAANEIEPALKKQLIISTALMTVGVAVISWLALPAKFTIFNFGAQKEVSNWGLFFCVAVGLWAGLIIGFVTEYYTSNAYSPVQDVADSCRTGAATNVIFGLALGYKSVIIPIFAIAVSIYVSFSIAAMYGIAMAALGMLSTMATGLAIDAYGPISDNAGGIAEMAGMSHRIRERTDALDAAGNTTAAIGKGFAIGSAALVSLALFGAFVSRAGVKVVDVLSPKVFIGLIVGAMLPYWFSAMTMKSVGSAALKMVEEVRRQFNTIPGLMEGTAKPDYATCVKISTDASIKEMIPPGALVMLTPLIVGTLFGVETLSGVLAGALVSGVQIAISASNTGGAWDNAKKYIEAGNSEHARSLGPKGSDCHKAAVIGDTIGDPLKDTSGPSLNILIKLMAVESLVFAPFFATYGGLLFKYI

SEQ ID NO: 31138 - protein, 412 aa, Arabidopsis thaliana
MTSIPLGPPQPPSLAPQPPHLHGGDSLKRRPDIDNDKEMSAAVIEGNDAVTGHIISTTIGGKNGEPKQTISYMAERVVGTGSFGIVFQAKCLETGESVAIKKVLQDRRYKNRELQLMRLMDHPNVVSLKHCFFSTTTRDELFLNLVMEYVPETLYRVLKHYTSSNQRMPIFYVKLYTYQIFRGLAYIHTAPGVCHRDVKPQNLLVDPLTHQCKLCDFGSAKVLVKGEANISYICSRYYRSPELIFGATEYTSSIDIWSAGCVLAELLLGQPLFPGENSVDRLVEIIKVLGTPTREEIRCMNPNYTDFRFPQIKAHPWHKVFHKRMPPEAIDLASRLLQYSPSLRCTALEACAHPFFNELREPNARLPNGRPLPPLFNFKQELSGASPELINRLIPEHVRRQMNGGFPFQAGP

SEQ ID NO: 31139 - protein, 161 aa, Pseudomonas fluorescens Pf-5
MTDSLLTIPCTTIKGEQKTLADFAGKAVLVVNTASKCGFTPQYKGLEELWQTYKDQGLVVLGFPCNQFGKQEPGNEGAISEFCELNYGVSFPLFKKVEVNGAGAHPLFAQLKKRAPGVLGSQGIKWNFTKFLIGQDGKLVKRFAPATKPQDLSREIEALLK

SEQ ID NO: 31140 - protein, 246 aa, Escherichia coli CFT073
MKAKARRAKKEMVEANLRLVISIAKKYTNRGLQFLDLIQEGNIGLMKAVDKFEYRRGYKFSTYATWWIRQAITRSIADQARTIRIPVHMIETINKLNRISRQMLQEMGREPTPEELAERMLMPEDKIRKVLKIAKEPISMETPIGDDEDSHLGDFIEDTTLELPLDSATTESLRAATHDVLAGLTAREAKVLRMRFGIDMNTDHTLEEVGKQFDVTRERIRQIEAKALRKLRHPSRSEVLRSFLDD

SEQ ID NO: 31141 - protein, 306 aa, Sporothrix schenckii
MDGKRQLNSFQQLEKLGEGTYATVFKGRNRHTGEFVALKEIHLDSEEGTPSTAIREISLMKELKHENIVALHDVIHTESKLMLVFEYMDGDLKKYMDTNGERGALKPMLIKSFMYQLLKGIDFCHQNRVLHRDLKPQNLLINGKGQLKLGDFGLARAFGIPVNTFSNEVVTLWYRAPDVLLGSRTYNTSIDIWSVGCIMAEMYTGRPLFPGTTNEDQMLRIFRIMGTPAEHNWPGISQFPEYKATAPRYATQDLRQILPQIDATGIDLLQRLLQLRPELRISAHDALQHPWFHDILQYQHCQQAAG

SEQ ID NO: 31142 - protein, 376 aa, Candida albicans SC5314
MSPVQLAEKNYERDEQFTKALHGESYKKTGLSALIAKSKDAASVAAEGYFKHWDGGISKDDEEKRLNDYSQLTHHYYNLVTDFYEYGWGSSFHFSRYYKGEAFRQATARHEHFLAHKMNLNENMKVLDVGCGVGGPGREITRFTDCEIVGLNNNDYQIERANHYAKKYHLDHKLSYVKGDFMQMDFEPESFDAVYAIEATVHAPVLEGVYSEIYKVLKPGGIFGVYEWVMTDKYDETNEEHRKIAYGIEVGDGIPKMYSRKVAEQALKNVGFEIEYQKDLADVDDEIPWYYPLSGDLKFCQTFGDYLTVFRTSRIGRFITTESVGLMEKIGLAPKGSKQVTHALEDAAVNLVEGGRQKLFTPMMLYVVRKPLEKKD

SEQ ID NO: 31143 - protein, 130 aa, Pseudomonas fluorescens Pf-5
MEKLEKTLEEWRSMLDPEQYNVCRLKGTERPFSGKYNGTKTDGVYHCICCNEPLFDSKAKFDSGCGWPSFYEPIADSAMVEIRDMSHGMIRTEVVCAKCDAHLGHVFPDGPPPTGLRYCINSVCLDLVPR

SEQ ID NO: 31144 - protein, 403 aa, Pseudomonas fluorescens Pf-5
MQVSKSNKLANVCYDIRGPVLKHAKRLEEEGHRILKLNIGNPAPFGFEAPDEILQDVIRNLPTAQGYSDSKGLFSARKAVMQYYQQKQVEGIGIEDIYLGNGVSELIVMAMQALLNNGDEVLVPAPDYPLWTAAVSLAGGNPVHYLCDEQANWWPDLADIKAKITPNTKALVIINPNNPTGAVYPREVLLGMLELARQHNLVVFSDEIYDKILYDDAVHICTASLAPDLLCLTFNGLSKSYRVAGFRSGWVAISGPKQHAQSYIEGIDMLANMRLCANVPSQHAIQTALGGYQSINDLVLPPGRLLEQRNRTWELLNDIPGVSCVKPMGALYAFPRIDPKICPIHNDEKFVLDLLLSEKLLVVQGTAFNWPWPDHFRVVTLPRVDDLEQAIGRIGSFLKSYRQ

SEQ ID NO: 31145 - protein, 412 aa, Oryza sativa
  misc_feature (90)..(90): Xaa can be any naturally occurring amino acid
  misc_feature (104)..(104): Xaa can be any naturally occurring amino acid
  misc_feature (223)..(223): Xaa can be any naturally occurring amino acid
  unsure (1)..(412): unsure at all Xaa locations
MAAARALLPVGGAAAVAVPRRLRSREASSTSLSGPVSDGARLVRRMQLRPAPLLGSSTCALPSLRGKRLIRTPAASSSSSLDSTGLVPPXAACREAKPVGFAEXYPALVTGFFFFMWYFLNVIFNILNKKIFDYFPYPYFVSVSHLLVGVLYWLVGWSFGLPKRASINSTVLKLLFPVAVCHAIGHVTSTVSFAAVAVSFAHTIKALEPFFNAAASQFILGQXVPLTLWLSLAPVVIGVSMASLTELSFNWTGFVNAMISNISFTLRSVYSKKAMTDMDSTNLYAYISIIALLVCIPPAIIIEGPQLVQHGFKDAIAKVGLAKLVSNLLVVGLFYHLYNQVATNTLERVTPLTHAVGNVLKRVFVIGFSIIAFGNKITTQTGIGTCIAIAGVALYSYIKAKIEEEKTQMKSA

SEQ ID NO: 31146 - protein, 472 aa, Campylobacter jejuni
MKKIFLSLSLASALFAASINFNESTATANRVNPAAGNAVLSYHDSIKDAKKSVVNISTSKTITRANRPSPLDDFFNDPYFKQFFDFDFPQRKGKNDKEVVSSLGSGVIISKDGYIVTNNHVVDDADTITVNLPGSDIEYKAKLIGKDPKTDLAVIKIEANNLSAITFTNSDDLMEGDVVFALGNPFGVGFSVTSGIISALNKDNIGLNQYENFIQTDASINPGNSGGALVDSRGYLVGINSAILSRGGGNNGIGFAIPSNMVKDIAKKLIEKGKIDRGFLGASILALQGDTKKAYKNQEGALITDVQKGSSADEAGLKRGDLVTKVNDKVIKSPIDLKNYIGTLEIGQKISLSYERDGENKQASFILKGEKENPKGVQSDLIDGLSLRNLDPRLKDRLQIPKDVNGVLVDSVKEKSKGKNSGFQEGDIIIGVGQSEIKNLKDLEQALKQVNKKEFTKVWVYRNGLATLLVLK

SEQ ID NO: 31147 - protein, 43 aa, Passiflora garckei
WEYQVGPSVGIDAGDHIWCSRYILERITEQAGVVLTLDPKPIE

SEQ ID NO: 31148 - protein, 507 aa, Campylobacter jejuni
MKKLTNDFGNIIADNQNSLSAGTKGPLLMQDYLLLEKLAHQNRERIPERTVHAKGSGAYGEIKITADLSAYTKAKIFQKGEITPLFLRFSTVAGEAGAADAERDVRGFAIKFYTKEGNWDLVGNNTPTFFIRDAYKFPDFIHTQKRDPRTHLRSNNAAWDFWSLCPESLHQVTILMRDRGIPASYRHMHGFGSHTYSFINDKNERFWVKFHFKTQQGIKNLTNQEAAELIAKDRESHQRDLYNAIENKDFPKWKVQVQILAEKDIEKLGFNPFDLTKIWPHSLVPLMDIGEMILNKNPQNYFNEVEQAAFSPSNIVPGIGFSPDKMLQARIFSYPDAQRYRIGTNYHLLPVNRAKSEVNTYNVAGAMNFDSYKNDAAYYEPNSYDNSPKEDKSYLEPDLVLEGVAQRYAPLDNDFYTQPRALFNLMNDDQKTQLFHNIATSMEGVDEKIITRALEHFEKISPDYAKGIKKAFPIVSRIRAWRNHGHRCFLCEIVIRSQFHTTYEPEA

SEQ ID NO: 31149 - protein, 350 aa, Arabidopsis thaliana
MAEEIRFFELNTGAKIPSVGLGTWQADPGLVGNAVDAAVKIGYRHIDCAQIYGNEKEIGLVLKKLFDGGVVKREEMFITSKLWCTYHDPQEVPEALNRTLQDLQLDYVDLYLIHWPVSLKKGSTGFKPENILPTDIPSTWKAMESLFDSGKARAIGVSNFSSKKLADLLVVARVPPAVNQVECHPSWQQNVLRDFCKSKGVHLSGYSPLGSPGTTWLTSDVLKNPILGGVAEKLGKTPAQVALRWGLQMGQSVLPKSTHEDRIKQNFDVFNWSIPEDMLSKFSEIGQASDFPHIVVHIGQRAFFVLLTHLGYRILKTCVSMLQGRLVRGMSFVHETSPYKSLEELWDGEI

SEQ ID NO: 31150 - protein, 463 aa, Variovorax paradoxus
MNTVDITEIIEKQKPNRKVLALLILSFLIMLCDGYDLQAIAFASPTIIADWGIQKASFGFIFSGGLFGVMVGGFLFGYVADRIGRRPALLWGTLLFGVFTLAAVLATNITQLAVLRFVAGLGIGGITPIAIALNVEYAPKRFRASVVGLVMIGYVVGTSSGGIFAAWLVPTFGWQVLFYIGGLAPLLLLPFIAMSLPESIKYLVLSGQKPEAVARVVNAIDPSIRASSQTRFVLGTAEEGARIAGWKDSVKALFGGQLSKITPALWGAFVCSSVTVFFLASWIPVLTVGTGRSASLAAVGLALFSAGGAFGGIFSSRVIDRFGIGAMASIPLIAAVFVVSVGSFEFSDTGFLSMLCLIGFFVLGGHVGLMGAMGLFYSNANRANGVGWAISIGKFGSIIGPAIAAVLIAANTAISYLFMAAAAPLLMAGMGILVLGRLQKAADHEHRMGADRANDPEARPIDA

SEQ ID NO: 31151 - protein, 212 aa, Pseudomonas syringae pv. syringae B728a
MNELQDLIDNNARWADAIKQEDPEFFAKLARQQTPEFLWIGCSDARVPANEIVGMLPGDLFVHRNVANVVLHTDLNCLSVIQYAVDVLKVKHILVTGHYGCGGVRASMQDRQFGLIDGWLRTIRDLYYENRELLAKLPTEEERVDRLCELNVIQQVANVGHTSIVQNAWHRGQSLSVHGCIYGIKDGRWKSLDVTISGFEQLPPQYRLRPQD

SEQ ID NO: 31152 - protein, 59 aa, Passiflora hahnii
WEYQVGPSVGIDAGDHIWCSRYILERITEQAGVVLTLDPKPIEGDWNGAGCHTNYSTKR

SEQ ID NO: 31153 - protein, 662 aa, Thiomicrospira crunogena XCL-2
MSTRRELANAIRVLSMDAVQKAKSGHPGAPMGMADIAEVLWNDHMKYNPTNANWADRDRFVLSNGHGSMLIYSLLHLTGFDLSIDDIKNFRQLHAKTAGHPEYGYADGIETTTGPLGQGLTNAVGMAIAERTLGAQFNKPGHNIVDHNTYVFMGDGCLMEGLSHEAAAMAGTLGLGKLIAFWDDNDISIDGHIGDWMEKGVPGRFKSYDWHVIPNVDGHDADAIDAAIREAKSVNDKPTLICTRTTIGFGSPNLCGSHDCHGAPLGDEEIKLTRENLGWDYEPFVIPDEVYQGWDHKEKGATSEAEWNAKFEAYRAEYPKEAAEFERRMAGDLPANFEVEMDNFIAKTQEEMPNIASRKASQNAIEAMGPLLPEMFGGSADLTGSNLTNWSGTVKVNSTVADGNYLSWGVREFGMAHMMNGMVLHGGFKVYGGTFFMFMEFMRNALRMSALMKIGTIYVYTHDSIGLGEDGPTHQPVEQLATMRVIPNFQTWRGCDAVESAVSWKVAMMRGDAPTALVFSRQNLTPMERTPEQVKNIEKGGYVLKDCDGTPDIIFIATGSEVGLAVEAADAMNEKVRVVSMPSTCAFDTQDQAYRDSVLIPGVKRVAIEAGVAQSWYKYVGLDGGMVCMSTFGESAPAGELFKEFGFTVENVVATANKVLGK

SEQ ID NO: 31154 - protein, 205 aa, Magnaporthe grisea 70-15
MSSRKKVLLKVIILGDSGVGKTSLMNQYVNKKFSASYKATIGADFLTREVLVDDRQVTMQLWDTAGQERFQSLGVAFYRGADCCVLVFDVNNSKSFDALDSWRDEFLIQASPRDPDNFPFVVLGNKIDVEESKRVISTKRAMTFCQSKGGIPYFETSAKEAINVEQAFEVIARNALAQEESEEFSGDFQDPINIHIDNDRDGCAC

SEQ ID NO: 31155 - protein, 58 aa, Passiflora helleri
WEYQVGPSVGIDAGDHIWGSRYILERITEQVGVVLTLDPKPIEGDWNGAGCHTNYSTK

SEQ ID NO: 31156 - protein, 249 aa, Bacillus halodurans C-125
MKGVILAGGRGTRLKPLTDQIPKPMLPIAGVPCLAHGLAHLAAHGIRDIVMLVHYLNHQMKAYFQDGSKYGMRITYVQEDAPLGTAGSLKAAERYLDEPFVVMSGDVLTTISIQEAIVFHKRQNSLMTMLTKRVKNGQNYGVVQTGPNHRVVAFREKPTEDKTREVLVNTGLYVMDPFVLSYIPKGSAVDLGKDVIPYLVDRKLDIFALEGGGYWRDIGSFHDYLQANNDVNSGSVPSFVGRPSLLSRD

SEQ ID NO: 31157 - protein, 137 aa, Frankia sp. EAN1pec
MSAERTLILVKPDGVSRGLVGEVVGRIERKGLKIVALELRTLERSVAETHYGEHASKPFFGELVEFITSGPLVALVAEGPRAVEALRGLIGATDPVKAAPGSLRGDFALEIGQNLIHGSDSPESAKREIDLFFPGLS

SEQ ID NO: 31158 - protein, 210 aa, Streptococcus pyogenes MGAS315
MRTRQKQTTGFLAELEQFARQENIPIIQPEVVAYFRFLLQSLQPKHILEIGTAIGFSALLMAENAPDATIVTIDRNREMIDFAKANFAKYDSRQQIRLLEGDAADILSTLEGNFDFVFMDSAKSKYIVFLPEILRLLRVGGVVILDDVFQGGDITKPIEDIRRGQRTIYRGLQSLFDATLTHPNLTTSLVPLSDGLLMIRKNQADIVLPD

SEQ ID NO: 31159 - protein, 301 aa, Solanum tuberosum
MNKGATGNQQLELPAGFRFHPTDDELVQHYLCRKCAGQPIAVSIITEIDLYKFDPWQLPEKALYGEKEWYFFSPRDRKYPNGSRPNRAAGTGYWKATGADKPVGKPKTLGIKKALVFYAGKAPRGIKTNWIMHEYRLANVDRSAGKNNNLRLDDWVLCRIYNKKGTLEKHYNVDNKETASFGEFDEEIKPKILPTQLAQMPPRPRSTPTNDYFHFESSESMTRMHTTNSSSGSEHVLSPCDKEVQSAPKWDEDHRNTLDFQLNYLDGLLNEPFETQMQQQSCNFDQFNNFQDMFFYMQKPY

SEQ ID NO: 31160 - protein, 143 aa, Pseudomonas syringae pv. syringae B728a
MPKTPAPYLKPDECVVLFDGVCKLCNGVVKFLIRHDPHQRLRLAAVQSEQGQALLKWAGLPLDDFHTIAVIVNNRVFVRSDAFLHIMGLLPAPWPLLKVLGIFPRFLRDWAYNRIALNRYRLFGRYDHCLLPSPEDRQRFLGD

SEQ ID NO: 31161 - protein, 507 aa, Pseudomonas sp. KIE171
MSGDYMVQATTNLVGAAYWRGRADEIQFEGRCLIDGKMVEAQSGYTFDCVSPVDGRVLTKVSAGGEADVNRAVAAARSAFRDRRWSGQSPVSRKRTLQAFAALIRLHRDELALLETLDMGKPISASRSVDVEAVASCFEWYAEAIDKLYEQIAPTAETDLALITREPLGVVGAIVPWNFPMLTAAWKTAPALACGNSVVLKPAEQSPLTAIRLAQLALEAGVPEGVFNVVPGLGGSAGRALACHMDVDGIFFTGSTATGRLLTEYAAKSNLKRVCLELGGKSPNIILASYGDIEKAAVASAESMFNNQGEVCIAPSRLIVERSIHKRVVEIVAEVAKRRQPGDPLDPTTRMGALVDANHADRVMGFIGRAKADGATLVAGGTRALTETGGSYVVPTVFDNVSNCMEIARDEVFGPVLSVIPVANVGEAVAVANDSPYGLGAGVWTDRLSDAHKISRELRAGVVYVNCYNDCDITTPFGGVKQSGNGRDKSLYALDEYTELKTTWIKL

SEQ ID NO: 31162 - protein, 140 aa, Gluconobacter oxydans 621H
MALERTLSIIKPDATKRNLTGKINAVFEGAGLRIVAQKRIQLTEKQAGAFYAVHKERPFYGSLVSSMIAEPVVVQVLQGENAVAKNREVMGATNPADAAEGTVRKLFAESIEANSVHGSDSLENAKNEISFFFAETEILP

SEQ ID NO: 31163 - protein, 188 aa, Glycine max
MAPRDINRSNVVVAGGSNPTRKEIRYRGVRKRPWGRYAAEIRDPGKKTRVWLGTFDTAEEAARAYDAAAREFRGAKAKTNFPTHAELTHAAARSPSQSSTLDSSSPPTPPLDLTLAAPLAAGGALVFPVARPVVFFDAFERAEVRASFDLPVAAFSDSDSSTVMDYERGSRRRVLDLDLNVPPPPEVA

SEQ ID NO: 31164 - protein, 277 aa, Triticum aestivum
  misc_feature (244)..(244): Xaa can be any naturally occurring amino acid
  misc_feature (259)..(259): Xaa can be any naturally occurring amino acid
  misc_feature (263)..(263): Xaa can be any naturally occurring amino acid
  misc_feature (267)..(267): Xaa can be any naturally occurring amino acid
  misc_feature (270)..(270): Xaa can be any naturally occurring amino acid
  unsure (1)..(277): unsure at all Xaa locations
MATLKVPSNVPALADDCDNLRKAFQGWGTNEALIISILGHRDAAQRRAIRKHYADTYGEELLRSITDEISGDFERAVILWTLDPAERDAVLANETAKKWHPGNPVLVEIACARGSKQLFAARQAYHDRFKRSLEEDVAAHVTGDFRKLLVPLVSSHRYEGPEVNTRLAHSEAKLLHEKIEHKAYGDDEVIRILTTRSKAQLLATFNNYNDTFGHPITKDLKADPKDEFLKTLRAVIRCFTCPDXYFEKVARVAIAGNGXDENXLTRXITXRAEVDLS

SEQ ID NO: 31165 - protein, 475 aa, Kluyveromyces lactis NRRL Y-1140
MDDLGEQLSEGHKDDYDNGIGSVPGGSGSNGKGKSQRTSFNDFVRKLFLILESEEYTSIISWSPDGKNFIVLDTNKFTTDILPKHFKHSNFASFVRQLNKYDFHKVKRKKNEVSEGIQNAWEFNHQYFRRHDEAGLDNIRRKPSSQKKILVDENSVIVRKLGGAPGDDGAFIAGDEEGMTAKMLLKNTVNKTKFNQLKRKVEDMENQVQYLTNENHNMKLDLQKIQSKYNMALESLLSTESFNSQLISNFQILVDALSQQGLKVPVGLSFEKGNSRADNKSHQQRQISDSTGSTPNANIPGLSVNTTLQKQEPIELLPMDQHPVLRPGFHVLLVEDDSVCIQLCSKFLRKYGCSVEVVTDGLSAISTLEKQRFDLVLMDIVMPNLDGATATSIVRSFDNETPIIAMTGNIDDQDLVTYLQHGMNDILAKPFTKDDLHSMLIRYLKDRIPLSEQRQNSNNDPKAYVEEPMLKKPHI

SEQ ID NO: 31166 - protein, 626 aa, Arabidopsis thaliana
MKSYKLNNPNLLISTHTHNKLFLSSSPFNLLFSFPSFIYLKQQRSLFFFFFFFLCFSFTTSMLDSDTDTDSGPVVATTKLVTFLQRVQHTALRSYPKKQTPDPKSYIDLSLKRPYSLSTIESAFDDLTSESHDQPVPVETLEKFVKEYFDGAGEDLLHHEPVDFVSDPSGFLSNVENEEVREWAREVHGLWRNLSCRVSDSVRESADRHTLLPLPEPVIIPGSRFREVYYWDSYWVIKGLMTSQMFTTAKGLVTNLMSLVETYGYALNGARAYYTNRSQPPLLSSMVYEIYNVTKDEELVRKAIPLLLKEYEFWNSGKHKVVIRDANGYDHVLSRYYAMWNKPRPESSVFDEESASGFSTMLEKQRFHRDIATAAESGCDFSTRWMRDPPNFTTMATTSVVPVDLNVFLLKMELDIAFMMKVSGDQNGSDRFVKASKAREKAFQTVFWNEKAGQWLDYWLSSSGEESETWKAENQNTNVFASNFAPIWINSINSDENLVKKVVTALKNSGLIAPAGILTSLTNSGQQWDSPNGWAPQQEMIVTGLGRSSVKEAKEMAEDIARRWIKSNYLVYKKSGTIHEKLKVTELGEYGGGGEYMPQTGFGWSNGVILAFLEEYGWPSHLSIEA

SEQ ID NO: 31167 - protein, 434 aa, ASPERGILLUS NIDULANS FGSC A4
MGPVSVMVAGEKRIGAVRSKHRVFIVCGVLVIQLASSNLQTTVQGDRKASEEALSPDSQQQSKKTRTDSPERELKPPLRIVPFPEKPAVLEERRGEIEFRVVNNDGSRDSFIVLTGLKCIFQKQLPKMPKDYIARLVYDRSHLSIAIVKHPLEVVGGITYRPFNSRRFAEIVFCAISSDQQVKGYGAHLMSHLKDYVKATSDIMHFLTYADNYAIGYFKKQGFTKEIQLDRSIWMGYIKDYEGGTIMQCTMLPKIRYLESGRMLLKQKEAVHAKIRAFSKSHIIHPPPKEWKNGPVKIDPLSIPAIKESGWSPDMDELARQPRHGPNYNQLLHLLNDMQNHSAAWPFTQPVNKDEVLDYYEVIKEPMDLSTMEEKHEKDMYPTPQDFIKDAVLMFDNCRRYNNENTPYAKSANKLEKFMWQQIRNIPEWSVSTI

SEQ ID NO: 31168 - protein, 569 aa, Mycobacterium leprae TN
MTAPKIEAVYTVGAYLLDRLAELGVTEIFGVPGDYTLEFLDHIVAHPTIRWVGNANELNAGYAADGYGRLRGISALVTTFGVGELSAANAIAGSYAEHVPVVHIVGAPPKDAQSTHRALHHSLGDGDFEHFIRISSEITCSQANLTTATACKEIDRVLSEVRKHKRPGYILLSTDVARFPTEPPAAPLPGHTDGTSPRALSLFIDAATKLIADKRMTVLADLLVHRLQVVKELETLLTADVVPYATLMWGKSLLDESSPNFLGIYAGAASTEAVRAAIEQAPVLVTAGVVFTDMVSGFFSQRIDPARTIDVGQYQSSVADKVFTPLEMGDALEALASILVRRGVSSPPVELPPGNPTADTPSPTQRLTQQILWDRLCAALTPGNVVLADQGTAFYGMVEHRLPRGVTFIGQPLWGSIGYTLPAALGAGLAHRNRRTVLLLGDGAAQLTIQELGSFYREGLSPVIVVVNNDGYTIERAIHGATAPYNNIARWRWTDIPGALGVANHSSFRAETYGELDEAFAVAAELKDQMVFVEVIVPKLDLPSLLTALTRPAQDSNRIFQLPNPGWDN

SEQ ID NO: 31169 - protein, 203 aa, Zea mays
LDDETQNRNDQGFEKMISGIYLGEIARLVLHRMALESDVFGDAADNLSTPFTLSTPLLAAIRKDDSPDLSEVRRILQDHLKIPDTPLKTRRLVVKVCDIVTRRAARLAAAGIVGILKKLGRDGSGIASSGRTRGQLRRTVVAIEGGLYEGYPEFREYLDEALVEILGEEVARTVTLEVTVDGSGAGAALLAAVHSSNRQQGSI

SEQ ID NO: 31170 - protein, 470 aa, Salmonella enterica subsp. enterica serovar Typhi
MKKTKIVCTIGPKTESEEMLSKMLDAGMNVMRLNFSHGDYAEHGQRIQNLRNVMSKTGKKAAILLDTKGPEIRTIKLEGGNDVSLKAGQTFTFTTDKSVVGNNEIVAVTYEGFTSDLSVGNTVLVDDGLIGMEVTAIEGNKVICKVLNNGDLGENKGVNLPGVSIALPALAEKDKQDLIFGCEQGVDFVAASFIRKRSDVVEIREHLKAHGGENIQIISKIENQEGLNNFDEILEASDGIMVARGDLGVEIPVEEVIFAQKMMIEKCIRARKVVITATQMLDSMIKNPRPTRAEAGDVANAILDGTDAVMLSGESAKGKYPLEAVSIMATICERTDRVMNSRLDYNNDSRKLRITEAVCRGAVETAEKLKAPLIVVATQGGKSARAVRKYFPDATILALTTNEVTARQLVLSKGVVSQLVKEINSTDDFYRLGKDVALQSGLAQKGDVVVMVSGALVPSGTTNTASVHVL

SEQ ID NO: 31171 - protein, 250 aa, Glycine max
  misc_feature (210)..(210): Xaa can be any naturally occurring amino acid
  misc_feature (234)..(234): Xaa can be any naturally occurring amino acid
  misc_feature (241)..(241): Xaa can be any naturally occurring amino acid
  unsure (1)..(250): unsure at all Xaa locations
MDFHGGGPLRSRSSQSPSPSHSASASATSSIHKRKLVSEDHAPPFPPSSFSADTRDGALTSNDDLESISARGADSDSDSESEDAVVDDDEDDYDNDNDNDSSMRTFTASRLSNPPSAPRNTKLKTENSTVKIENSDGAKDAGAVGSGAAAAAGPVPGIVVKEDPTKIFTDNLQTSGAYTAREESLKKEEEAGKLKFVCLSNDGVDEHMVXLIGLKNIFARQLPNMPKEYIVRLXMDRSHKXSVMVIRRNH

SEQ ID NO: 31172 - protein, 254 aa, Brassica napus
MTHTLQSPPSAAALSASIQKGRWKTAAAGFSVAPPPPAVNFTLRRSIPRIHASASSSSSSSSPSSPSLGAGENSELDAVSAFSEIVPDTVVFDDFERFPPTAATVSSALLLGICGLPDTIFRNAVDMALADSTCAGLDTTDSKLSCFFDKAIVNVGGDLVKLVPGRVSTEVDARLAYDTNAIIRKVHDLLRLYNEIDVPHDRLLFKIPATWQGIEAAKLLESEGIQTHLTFVYSFAQAAAAAQAGASVIQIFVG

SEQ ID NO: 31173 - protein, 342 aa, Desulfotalea psychrophila LSv54
MGASRILLTGGAGYIGSHTCLELLEAGYQVTVVDDLSNSSYEALCRVESLTGKKVTFHQVNVFDEQALDAVFLNAPESFAAVIHFAGLKVIGESVAEPLRYYHNNITGTLVLCGLMAKHGVKNIIFSSSATVYGDPARVPITEDFPLSCANPYGRTKLMVEEILADLHGADHEWNACLLRYFNPVGAHKSGRIGEDPDGIPNNLIPYIAQVAIGRLDCLSVFGNDYPTVDGTGVRDYIHVVDLAKGHVCAVKKVLEGRGVTTYNLGTGLGYSVLEIVDAFSRACGRDIAYKIVARRAGDIAACYADSAKALTELGWSASLGLAEMCEDTWRWQENNPTGYRS

SEQ ID NO: 31174 - protein, 333 aa, Thiomicrospira crunogena XCL-2
MTIKVGINGFGRIGRMAFRAAAKDFANIEVVAINDLLDPEYLAYMLKYDSVHGRFDGTVEVKDGNLVVNGKTIRITAERNPADLAWSDVGADLVIECTGFFLTEESCQAHIEAGAKKVVQSAPSKDHTPMFVYGVNHEEYAGQAIVSAASCTTNGLAPVAKVLNDNFGIKRGLMTTVHAATATQKTVDGPSMKDWRGGRGILENIIPSSTGAAKAVGKVLPALNGKLTGMAFRVPTSDVSVVDLTVELEKETSYDDICAAMKKASEGEMAGVLGYTEEANVSTDFRGDSHPSIFDAKAGIALDPTFVKVVAWYDNEYGYTCNMMRVVEHVGNN

SEQ ID NO: 31175 - protein, 480 aa, Thiomicrospira crunogena XCL-2
MPSGLRRTKIVATLGPATDRDGELEKMIKEGVDVVRINMSHGNPSEHIERAQNVRDIAARLDREVGILVDLQGPKIRIARFSEGSIFLEQGDKFSLDNNVDPLAGNQKEVGLTYKSLPYDVKAGDRLLLDDGRVVLDVDNVEGERVNCTVVVGGKLSNNKGINLHGGGLSAAALTEKDKEDILTAAEIQCDYLALSFPRSAEDVEYCRSLAEKAGLVCSIVSKIERAEAVNDDFTLDGIILASDVIMIARGDLGVEVGDAQLPALQKKMIKRARQLNRITITATQMMETMIENAIPTRAEVFDVANAVMDGTDAVMLSGETATGHSPSLVIKTMSDIAHEAEKSRSTRESTHRIDEFFTAVDETIAMSAMYAANHFGVQCIAALTESGNTPLLMSRISSGIPIIALTPHIDTRRKVTLYRGVYPTSVDYTGLNDDQVKDRILEELKEKGVAKSGDLIIVTRGQSRGAMGGTNQMEIVKVP

SEQ ID NO: 31176 - protein, 129 aa, Lycium californicum
  misc_feature (101)..(101): Xaa can be any naturally occurring amino acid
  unsure (1)..(129): unsure at all Xaa locations
VWGKTASKIYGPKVGQDWVDNELRFSFLCQAALEAPRVLNLNCSKYFSGPYGEDVLFIANDWHTALIPCYLKSMYHSKGIYLNAKVAFCIHNIAYQGRFPXSDFSLLNLPDEYRSSFDFIDGYEKPIMG

SEQ ID NO: 31177 - protein, 496 aa, Triticum monococcum
MARKMLKDGEAPLVADDGGTYDYDLFVIGAGSGGVRGSRTAAGFGAKVAICELPFHPISSEWLGGHGGTCVIRGCVPKKILVYGASFRGEFDDAKQFGWEINGDINYNWKKLLENKTQEIVRLNGVYKRILGGSGVTMIEGAGSIVDAHTVEVTQPDGSKQRHTTKHILIATGSRATLVDIPGKELAITSDEALSLEELPKRAVILGGGYIAVEFASIWKGLGAEVDLFYRKELPLRGFDDEMRTVVASNLEGRGIRLHPGTNLTELSKTADGIKVVTDKGDELIADVVLFATGRAPNSNRLNLEAVGVEVDQIGAIKVDEYSRTSVPSIWAVGDVTNRINLTPVALMEATCFAKTVFGGQTVKPDYKDVPCAVFCIPPLSVVGLSEQEALAEAKNDLLVYTSSFNPMKNSISKRVEKSTMKLVVDAETDKVLGAAMCGPDAAEIMQGIAVALKAGATKATFDSTVGIHPSAAEEFVTMRTLTRRVSPPSKPKTNL

SEQ ID NO: 31178 - protein, 148 aa, Solanum chacoense
MEQTFIMIKPDGVQRGLVGEIIGRFEKKGFSLKGLKLITVDRAFAEKHYADLSAKPFFNGLVEYIVSGPVVAMVWEGKGVVATGRKIIGATNPLESAAGTIRGDFAIDIGRNVIHGSDAVESARKEIALWFPEGIAEWQSSLHSWIYE

SEQ ID NO: 31179 - protein, 168 aa, Triticum monococcum
MAAASSATSVHDFTVKDSSGKDVDLSVYKGKVLLIVNVASQCGLTNSNYTELSQLYPKYKDQGFEILAFPCNQFGGQEPGTNDEIVQFACTRFKAEYPIFDKVDVNGNNVSPLYKFLKSSKGGLFGDSIKWNFSKFLVDKEGHVVDRYAPTTSPLSIEKDIKKLLGSS

SEQ ID NO: 31180 - protein, 132 aa, Lycium californicum
VWGKTASKIYGPKVGQDWVDNELRFSFLCQAALEAPRVLNLNCSKYFSGPYGEDVLFIANDWHTALIPCYLKSMYHSKGIYLNAKVAFCIHNIAYQGRFPFSDFSLLNLPDEYRSSFDFIDGYEKPIMGRKI

SEQ ID NO: 31181 - protein, 353 aa, Neurospora crassa
MSSESSTGPEMSATTKQMLARVRQMVPPMLEKFHKGQLGRVAVIGGSEDYTGAPYFSAMASARLGADLSHVICTPNAAQVIKTYSPNLMVHPLMRSSPPALSSSDSGSSPSRTKSAPDTDPSQIAAQIIPMLDRLHVLVIGPGLGRDPLMQETCAKVITAAREKGIPMVLDADALLLVTKDPSLIKGYDNAVLTPNVVEFGRLTKALGVDEEVEKAEETAGETAKVEALAKALGGVMVVQKGAKDYLSDGKVTLTVDLKGGLKRSGGQGDTLTGSIATFLGWRRAYLEDLWDHGHKLNKEELIGLAVFGGSAITRECSRLAFAKKGRSLQASDLTDEVHTAFLNLFGEVDAKL

SEQ ID NO: 31182 - protein, 131 aa, Lycium californicum
VWGKTASKIYGPKVGQDWVDNELRFSFLCQAALEAPRVLNLNCSKYFSGPYGEDVLFIANDWHTALIPCYLKSMYHSKGIYLNAKVAFCIHNIAYQGRFPFSDFSLLNLPDEYRSSFDFIDGYEKPIMGRK

SEQ ID NO: 31183 - protein, 316 aa, Silicibacter sp. TM1040
MAVARCRRSLLATFTWAVVTSFTLWTGQGSSTRCWRPDPMVRIALLQMTSSDLPEENLAAAREMIARTAAAGAQFVLTPEVTNCLSTSRTQQQAVLHPEENDPTLAGLRDAARQHGVWLSIGSLGVKTTDADGRFANRQFLISPDGEIKARYDKIHMFDVEVTPEETYRESDGYRPGTRAVLADAGFAKIGMTICYDVRFPALHRRLAQAGAEIITAPAAFSHVTGAAHWHSLLRARAIETGCFVLAAAQTGVHDTSRGAARQTYGHSLAVAPWGEILADAGTETGITCVDLDLEAVKKARKRVPSLTHDREFDGP

SEQ ID NO: 31184 - protein, 447 aa, Uromyces viciae-fabae
MREIVHLQTGQCGNQIGAKFWEVVSDEHGIATDGQYKGNTDLQLERISVYYNEVAANKYVPRAVLIDLEPGTMDSVRSGAFGSLFRPDNFVFGQSGAGNNWAKGHYTEGAELVDSVLDVVRKEAEGCDCLQGFQITHSLGGGTGAGMGTLLISKIREEFPDRMMATFSVVPSPKVSDTVVEPYNATLSVHQLVENSDETFCIDNEALYDICFRTLKLATPTYGDLNHLVSIVMSGITTCLRFPGQLNSDLRKLAVNMVPFPRLHFFMVGFAPLTARGSQQYRAITVPELTSQMFDAKNMMAASDPRHGRYLTVAAYFRGKVSMKEVEENMLSVQNKNSNYFVEWIPNNVQTAHCDIAPRAHKMSVTFIGNSTAIQDLFKRVADQFTAMFRRKAFLHWYTGEGMDEMEFTEAESNMQDLVAEYQQYQEAHMDDEEAEEAYEDEAPPEE

SEQ ID NO: 31185 - protein, 665 aa, Chlamydophila caviae GPIC
MVNREVDVDILEKISGTLKQLSIEIIQKAGSGHPGLPLGCAELAAYLYSYVLRHNPKDPLWIDRDRFVLSAGHGSALLYACLHLAGYDVSLEDLQQFRQLHSRTPGHPEFGETEGVEATTGPLGQGVGNAVGMALSMKMLQVRFNRPEHEIFNGKVYCLAGDGCMMEGVSHEVCSLAGTLGLDNLVVIYDYNNIVLDGFLGEVSSEDVKKRFESYGWEVYEIDGYDFSSIHETFVKIKQSQQRPVLIVAHTIIGHGSPKEGSHKAHGSPLGEDGVEQTKRFWHLPEEKFFISPAVKSFFSHKLQEDRKVQEEWQNDFRVWSRQFPDLHQEFLSLKAPISSETLETILESVEMPEVIAGRAASNKIIQNLAKNIPSLIGGSADLSSSDGTWIAEAKEINSQDFSGRNIKYGVREFGMGAIMNGLAYSQVFRPFGGTFLVFSDYLRNAIRLAALAKLPVIYQFTHDSIFVGEDGPTHQPIEQIMSLRAIPGLQVIRPGDANEVKGAWHAALRHLGPTALILSRQNLPTLAQTDRPFKEGVGRGAYIVLKETEGKPDYTLFATGSELHLALAVAQELIYLDKKVRVISFPCWELFEQQDFEYRESVVGGDLGLRVSIEAGSALGWYKYIGLDGLAIAMDRFGYSGAPADVAEACGFTADCILQRILSQ

SEQ ID NO: 31186 - protein, 371 aa, Frankia sp. EAN1pec
MVRSFVTEANRVVVKVGSSSLTTAAGGLDADRVEALVAAVAGRAGSLVLVSSGAIAAGLAPLGLTRRPRDLATLQAAASVGQSSLVHCYAGAFGRAGHRVGQVLLTATDVIRRTHYRNARTTLERLLALGVVPIVNENDAVATQEIRFGDNDRLAAIVSHLVSADLLVLLSDVDGVYESNPRLGPASMVREVRSDADLDGLTARGTGAAGVGVGGMATKIDAARMAASGGVTTVVTSAANAAAVLAGEEIGTVFHPTGPRRPSRLLWLAHATAPEGRLHLDEGAVAAVVDRRASLLPAGVTKVEGDFSAGDPVDLVDPRGRPVARGLVEFDSVELPGMLGRSTMDLAAERGPSYEREVVHRDDLVLLLTRR

SEQ ID NO: 31187 - protein, 539 aa, Oryza sativa (japonica cultivar-group)
MELAMDFALRLRDAANHHLSRYEPLVLLAAPLLALLAARTLHAAAAAVADRGLRTVLLALAMTAIKLLPGVSAYINAEKRKVVDQLQSGGTSTKSTLRTELPTVGLSNQVINDLETLKARDVNWQGKCSGTVYIAGSESEGHFALINKAYSMFSHTNPLHQDVFKSVAQLEAEVVAMTAALLGIKEKSSGGQICGNMTSGGTESILLAVKTSRDYMRTKKGITKPEMIIAESAHSAYDKAAQYFNIKVRRVPVNKEFLADVKGFKRCINGNTIMMVGSAPGFPHGLIDPIEELGELASRYDICLHVDLCLGGFVLPFARKLGYPIPPFDFCVKGVTSISTDVHKYGLAPKGTSIVLYKNHEIRKHQFVAVTEWTGGLYVSPTIAGSRPGGLIAGAWAAMTSLGLNGYMENTGHIMEVSKKIQRGIEDIPGLFVIGKPDMTVVAFGSDSVDIFEVNDIMSSKGWHLNALQRPNSLHICVTLQHTVIYEEFLKDLKDSVDTVKANPGPISGGRAPIYGAAGKMPDRGMVRELLVEFMDASC

SEQ ID NO: 31188 - protein, 327 aa, ASPERGILLUS NIDULANS FGSC A4
MDQVHHRALDALQSFIALTDSSSATSPRYIASIITNATSSPHTYVFAELLERPAVQALRSPDTPAEFQSYLTLLEIFAWGTWQDYQQTPNLPPLSEEQARKLRLLTLLSLASTIKPLTYEALMTSLSLSAPSELESLVTTAIYSSLITGRLSPATNPPTVNVTSVAPLRDVKPSSLPTMISTLTAWEARCGSVISDIETEIAKIRADSAQRRQKEHARAVAIEKTLEKWNAEGGEQLQGGNPGQGQGQGQGGLGKNAGWKPRDLSTAMFERGFFGGGSNKREFDDDGYFDGGSSDFDQHGSGMDIDEGAGARASGARHSKRFLGKKS

SEQ ID NO: 31189 - protein, 275 aa, Alkalilimnicola ehrlichei MLHE-1
MAIRDDKRVRAAAVQMASGPNLAGNLAEVERLIGQAAEQGAELVGLPENFALMGRREADKLDVAESDGEGPIQDLLAKLASRHRIHLVAGTLPLRSENPGKVRAACLLYGPDGRRLGRYDKVHLFDVGVSPTEAYRESDTLEPGSRAVVVETELGRIGLAVCYDVRFPEQFREMARQGMEILVLPSAFTAVTGAAHWRTLVTARAIENLCFTVAPDQGGRHASGRETYGDSLIVDPWGSVLASRAKGAGVVVADLDLHRQAEIRRRFPALTHRKF

SEQ ID NO: 31190 - protein, 129 aa, Oryza sativa (japonica cultivar-group)
MGRLFVMHLEGKVYSCKHCHTHLGLSSDIISKSFHCKHGKAYLFNKVVNVTSGVKEDRMMITGMHTVSDIFCVGCGSIVGWKYEAAHEKSQRYKEGKFILERYKVSGPDGSHYFVTHDAHVGGSDVDDV

SEQ ID NO: 31191 - protein, 554 aa, Xylella fastidiosa Temecula1
MTPLIFVTGGVVSSLGKGIAAASLASILEARGLKVTMVKLDPYINVDPGTMSPFQHGEVYVTDDGAETDLDLGHYERFVRTRLSRKNSVTTGRIYQNVICKERRGDYLGATVQVIPHITDEIRRCIDEATASFDVALVEIGGTVGDIESLPFLEAIRQVRIERGAERTMFMHLTLVPYIAAAGELKTKPTQHSVKELRSIGIQPDVLLCRSEQVIPDSERRKIALFTNVSERAVIGCPDIDVLYGMPLELRRQGLDEIVIDQFKLSGTASLADLSEWEDVVDAIKHPLDEVTIAVVGKYVDYQDAYKSVGEALKHGGLRQRTKVNLKWVEAQDLEGSDMAALKDIDGILVPGGFGDRGFEGKVLASRYAREQRVPYFGICYGMQAAVVDYARHVAGLEGANSTENDRQSSHPVIALITEWRTTTGEVERRDEKSDLGGTMRLGLQEQRLKAGTLARELYGRDVVGERHRHRYEFNNRYRTQLEDAGLVIAAKSMDDTLVEMIELPREMHPWFLACQAHPEFLSTPRDGHPLFIGFVKASRARKAGGKLLREVCV

SEQ ID NO: 31192 - protein, 156 aa, Zea mays
  misc_feature (128)..(128): Xaa can be any naturally occurring amino acid
  misc_feature (144)..(144): Xaa can be any naturally occurring amino acid
  unsure (1)..(156): unsure at all Xaa locations
ITMDPTKFRPSSSHDTTVTTTNAAAPVCNDNEELTVAYRGPILLEDYHLIEKVEHFARERIPERVVHARGGLRQGLLRVHHDATSLTCADFLRAPGGRTPGDPRFSTVNHETAAPAKRSRDPRRITPXKFYTPRRANWEPCLGXNFPPFFLHSGQR

SEQ ID NO: 31193 - protein, 165 aa, Zea mays
MNVEKLKKMAGAVRTGGKGSMRRKKKAVHKTTTTDDKRLQSTLKRIGVNTIPGIEEVNIFKDDVVIQFVNPKVQASIGANTWVVSGTPQTKKLQDLLPSIINQLGPDNLDNLRRLAEQFQKQAPGASGAEAGASAGAAQDDDDDVPELVPGETFEEAAEEKKESS

SEQ ID NO: 31194 - protein, 803 aa, Sorghum bicolor
MPTAAAMIGGLASYAASLGQNMMDGHHQLAMMQQQQHQNHGQQQQHPPQAATSESDARGPRHDELMMESKSGSDNMEGGAGSGSGGEELQEDLSLQPARKKRYHRHTQHQIQELEAFFKEYPHPDDKQRKELSRELGLEPLQVKFWFQNKRTQMKTQQERHENMQLRAENEKLRAENARYKDALANASCPNCGGPATAVIGEMSFDEHHLRIENARLRDEVDRISTIAAKYVGKPAGSLLPNLSNISSASMAPYPPPPPLSSHHLLPGGTDMFGGLHLHGAAAGFDKGLVVELAVAAMEELVRMAQLGEPLWIPALVVDGATIETLNEEEYARGFPSGVGPKLPELRSEASRETVVVIMNHVNLIEMLMDVNQWSTLFSSIVSRAATLEVLSTGVAGNYNGALQLMTAEFQMPSPLVPTRESQFLRYCKQHTDGSWAVVDVSVEGLRASGQAGARGRRRPSGCLIQEMPNGYSRVTWVEHVEADDMMVHDLYRPLVCSGLAFGARRWAAALERQCERLASAMASGVPAGPSSGGDAVGVVTSVEGRRSMLRLAERMVTSFCGGVTASTTHQWTKLSGSGAEDVRVMTRKSVDDPGRPPGIILNAATSFWLPVPPARVFGFLRDDATRSEWDILSNGGDVQEMAHIANGRDHGNAVSLLRVNNANSNQSNMLILQECCTDATGSYVIYAPVDVVAMNVVLNGGDPDYVALLPSGFAILPDGSGAGGAPPGFAVLPDGPGAGGGGGGGGGSLLTVAFQILVDSVPTAKLSLGSVATVNSLIACTVERIKAAVAADNIGGGGAVPQ

SEQ ID NO: 31195 - protein, 393 aa, Arabidopsis thaliana
MSCFKSKFAGKSYFRRTFHSSIIQFHPQLSILIWHRRYSIIRTYELIANAAYIGTPGKGILAADESTGTIGKRFVSINVENVESNRRALRELLFTTPGALQYISGIILFEETLYQKTASGKLFVDVMKEAGVLPGIKVDKGTVELAGTNGETTTTGLDGLGDRCKKYYEAGARFAKWRAVLKIGNNEPSELAIHENAYGLARYAVICQENGLVPIVEPEILVDGSHDIEKCAYVTERVLAACYKALSDHHVILEGTLLKPNMVTPGSDSGSKVKPEVIAKHTVRALQRTVPAAVPAVVFLSGGQSEEEATVNLNAINQLKGKKPWSLTFSYGRALQQSTLKAWGGKEENVDKAQKAFLARAKANSEATLGGYKGDAQLGEGASESLHVKDYKY

SEQ ID NO: 31196 - protein, 506 aa, Triticum aestivum
MITPRYLCDTIEYSSYASNALGALPYGRPAGGRTSDFERPPGQVPPPPLRSFSFLRVSAMGKEKTHINIVVIGHVDSGKSTTTGHLIYKLGGIDKRVIERFEKEAAEMNKRSFKYAWVLDKLKAERERGITIDIALWKFETTKYYCTVIDAPGHRDFIKNMITGTSQADCAVLIIDSTTGGFEAGISKDGQTREHALLAFTLGVKQMICCCNKMDATTPKYSKARYEEIVKEVSSYLKKVGYNPDKVPFVPISGFERDNMIERSTNLDWYKGPTLLEALDQINEPKRPSDKPLRLPLQDVYKIGGIGTVPVGRVETGVIKPGMVVTFGPTGLTTEVKSVEMHHESLLEALPGDNVGFNVKNVAVKDLKRGFVASNSKDDPAKEAANFTSQVIIMNHPGQIGNGYAPVLDCHTSHIAVKFAELVTKIDRRSGKELEALPKFLKNGDAGIVKMIPTKPMVVETFATYPPLGRFAVRDMRQTVAVGVIKGVEKKDPTGAKVTKAAIKKK

SEQ ID NO: 31197 - protein, 533 aa, Pleurotus eryngii
MAVAFIALVSLALALVRVEASIGPRGTLNIANEVIKPDGFSRSAVLAGGSYPGPLIKGETGDRFQINVVNKLADTSMPVDTSIHWHGIFVRGHNWADGPAMVTQCPIVPGHSFLYDFEIPDQAGTFWYHSHLGTQYCDGLRGPFVVYSKNDPHKRLYDVDDESTVLTVGDWYHAPSLSLSGVPHPDSTLFNGLGRSLNGPASPLYVMNVVKGKRYRIRLINTSCDSNYQFSIDGHAFTVIEADGENTQPLQVDQVQIFAGQRYSLVLNANQAVGNYWIRANPNSGDPGFANQMNSAILRYKGARNVDPTTPERNATNPLREYNLRPLIKEPAPGKPFPGGADHNINLNFAFDPATVLFTANNYTFVPPTVPVLLQILSGTRDAHDLAPAGSIYDIKLGDVVEVTMPALVFAGPHPMHLHGHSFAVVRSAGSSTYNYENPVRRDVVSIGDDPTDNVTIRFVADNAGPWFLHCHIDWHLDLGFAVVFAEGVNQTAVANPVPEAWNDLCPIYNSSNPSKLLMGTNAIGRLPAPLKA

SEQ ID NO: 31198 - protein, 167 aa, Thiobacillus denitrificans ATCC 25259
MLHTLKQAGKNIGRELNRAWESLAEGWRELLSSSGNALTHFARDKDKDEAEQGGPLDFPHWALLAGEVEETEKDVLVRLEVPGMKKEECTITIEGNTLRLSGEKHFAREAHDSTYHVMERAYGVFHRSVPLPRNVDSDKAEASYSNGVLTVRLPKLPGEQARSVPIS

SEQ ID NO: 31199 - protein, 281 aa, Silene latifolia subsp. alba
MSKSRMEFGGAKSNNELRLKGKVAIVTGGARGIGAAIAKLFASNGAHVVVADVLDELGVGLANSIGGCFVHCNVSKEADLENTVKLAMAWKGRLDIIVNNAGTSGADGSIVNVNMDRVREIVGVNLFGVVHGIKHAARAMIEGKRGGSIICTSSSAAIMGGLASHAYTMSKGAILSVMKSAACELGEHGIRVNCISPHAVPTEMLISGYRRFVGDIGDEEIAKMCAAKASLLHGKGGSVEDIAAGALFLASDDAGFITGHNLVVDGGYTAANITMAHMYRD

SEQ ID NO: 31200 - protein, 271 aa, Buchnera aphidicola str. Sg (Schizaphis graminum)
MSRYKKMFQKLSFLKEGCFVPFVVIGDPSLEMSLKIIETLIENGADALELGIPFSDPLADGPIIQKASLRALYKKNTFLQCFELIENIRNKYLHLPIGILLYANLVYNYGIKNFYYQCFRSGLDSVLIADIPIEEYEPFYKIANQYNINSIFICPPDADDSLLSKISLYAKGYIYLLSRPGVTGIEKKTISLSNIFIEKIKKYNSLPLLQGFGIENPTQIQKSILSGTNGVICGSAIIDIIEKNLNKEKKMINEIKNFTSKLKKATKFVQS

SEQ ID NO: 31201 - protein, 306 aa, Ustilago maydis 521
MAAVASVLAAPLTSTDRLEALLLVARSTKPRGAAAVNLIHQAVSAPGVFFFGELFDVAGVAELSMSSEIHLVAGYQLLCLFSYGTYTDYVHLNRSGCVPELSRDELQKLRQLTLLSLASQHKALSYALLHKAVGIPPDNSRELEDLIIETIYAGLISGKLNELQSRFEIHHVQGRDVPHPSLMSSPALSALSSLSSSTPQLDQIVASLQNWQSCTVSVLQSLQSRMDETRHSAADSALQHQQHRQALLHNLIESQHLLESQQQQQQPKKGKSAANPMDIDDVDNPWAAPKKKATVAGARGSKRSRA

SEQ ID NO: 31202 - protein, 309 aa, Yarrowia lipolytica CLIB122
MTSIDFTMNNGKTIPAIGLGTWKSTTEEVAGAVECALTEGGYRHIDTAFNYRNEDAVGLGIKRAMEKGVKREDIFVTTKIWVTYHDRVEENLDLSLERLGLDYVDMLLIHWPVPLNPNGNDPVYPLRPDGSRDIDESGSQPKTWKQMEAVLKTGKTKSIGVSNFSIPYLEELLKEAEVVPAVNQVELHPLLPQLELMEFCKKNNIIMTAFSPFGSVGGPLLKNELVLKLADKYETSPGGILTSYHIGNGTVVIPKSVTNSRIIENGKSAVNLSKEDLQALNDLHKTEGIHRTSKPKWGVDLGFPDFDFC

SEQ ID NO: 31203 - protein, 281 aa, Silene latifolia subsp. alba
MSKSRMEFGGAKSNNEQRLKGKVAIVTGAARGIGAAIAKLFASNGAHVVVADVLDELGVGLANSIGGCFVHCNVSKEADLENTVKLAMAWKGRLDIIVNNAGTSGADGSIVNVNMDRVREIVGVNLFGVVHGIKHAARAMIEGKRGGSIICTSSSAAIMGGLASHAYTMSKGAILSVMKSAACELGEHGIRVNCISPHAVPTEMLISGYRRFVGDIGDEEIAKMCAAKASLLHGKGGSVEDIAAGALFLASDDAGFITGHNLVVDGGYTAANITMAHMYRD

SEQ ID NO: 31204 - protein, 396 aa, Corynebacterium diphtheriae NCTC 13129
MSPSLDFYAHQRNVEWHERGLERTPAQFYSPQTPHAIIDNRPMLLFSSSDYLGLSEHPFLKNAAIQAISSLGTGSGGSRLTTGSSIHRSIEIHLAQFFGSPDAVFFASGYQANVTIISTLAGPHCTIYSDSLNHASIIDGCRLSKSQVKTFPTGDYEALDAALAHCDTTNSLIITDAVFSMSGTIADLEQLRQVAARHGSWLLIDDAHGIGCLGNAGRGTAHLFPHAPTDFSQEVIVGTSSKALGGEGGFALCSEQVATLLRNQGRGYVFSTAPAPATMATTDAALTVLEQEPDRIRRLQSNIAYFAQRSSNVVPFQKSGFFSPIISYTIGDENEALKSAQLLRDNGFFIPAIRYPTVSRGSAMLRITMTAMHSHHDIDQLADALNQLESHRLDNS

SEQ ID NO: 31205 - protein, 142 aa, Chlamydomonas reinhardtii
MTEVLKRGFPGMKSVKDMPIVQDAPPPGGFPTIRIERRLPSTGPTGVAIFAGLAAIMGYGFYKLHEQRQEKRFEADEILTVRKIVHPVLQAEWDLRYLEHLKREREEEAKVMKNVPGWKVGESTTRHRWLAPLESWDKRPLV

SEQ ID NO: 31206 - protein, 74 aa, Phacelia tanacetifolia
RSPLNSGLWISVELVLTVSQIVAAIVVLSLSRNENPRAPLFAWVVGYASGCVAILPLLYWRYRHRNQGSERDSS

SEQ ID NO: 31207 - protein, 492 aa, Secale cereale
MDPCKFRPSSSFDTKTTTTNPGQPVWNDNEALTVGPRGPILLEDYHLLEKIAHFARDIPEPFVHAGRASAKGFFECTHDVTGLTCADFLPSPGAGTPVIVRFSTVIHERGSPETIRDPRGFAVKFYTREGNWDLLGNNFPVFFIRDGIKFPDVIHAFKPNPKSHVQEYWRVFDFLPHHPESLHTFFFLFDDVGIPTDYRHMDGFGVNTYTFVTRAGKSHYIKFHWRPTCGVSCLMDDEATLVGGKNHSHATQDLYDSIDAGNFPEWKLFVQVIDPEQQDRFDFDPLDDTKTWPEDLVPLQPVGRLVLDRNVDNFFNENEQLAFGPGLVVPGIYYSDDKMLQCRVFAYADTQRYRLGPNYLMLPVNAPKCGFKKNHYDGAMNFMHRDEEVDYYPSRHAPLRHAEPASFPVPTRPVVGKREKTRIKKENDFVQPGERYRSWAPDRQDRFVALRRRLAHPKVSHELRVIWIDFLSKCDKSCGMKVANRLNVKPSM

SEQ ID NO: 31208 - protein, 412 aa, Bacillus cereus G9241
MEKKRVVITGLGAVTPVGTDVETAWENIKKGVSGIGRLTRIDPELFPAKVAAEINDFEVEKYIDKKEARRMDRFTQYAVAAAKMAVADAKLEITEENGPRIGVWIGSGIGGMETYEEQFKIFTEKGPRRVSPFFVPMMIPDMAAGQVSIATGAKGINTCSVTACASGANSIGDAFKAIQRGDADAMITGGAEAPLTSMAFAGFSSAKALTFNEDPATACRPFDKNRSGFVMGEGSGILILEELEHALARGAHIYAEIAGYGATGDAFHITMPAPGGEGGVRAMRQALADAGLQPEDIDYINAHGTSTDANEKYETMAIKETFGEHAYKVAISSTKSMTGHLLGAAGAVEAIFSIKSITDGVIPPTINYETPDPECDLDYVPNKARHQEVNAVLSNSLGFGGHNAVLVFKSYK

SEQ ID NO: 31209 - protein, 261 aa, Triticum aestivum
  misc_feature (206)..(206): Xaa can be any naturally occurring amino acid
  unsure (1)..(261): unsure at all Xaa locations
MKIQCDSCGVAAATVVCCADEAALCARCDVDIHAANKLASKHQRLPLDALGAKLPRCDICQEKAAFIFCVEDRALFCRDCDEPIHVPGTLSGNHQRYLATGIRVGLGPVSACAAGDHGASHDADHPAPPKLACEPQPPAQPAASAQQVPSPPQFLPQDWGVDELLQFSDYESSDKLHKDSALGFKELEWFTADMELFHDHAPKGGXGRPWEVPEFFASQAADDAAYYRPSRVAATAGLRQSKKARVEIPDDEDFFIVPDLG

SEQ ID NO: 31210 - protein, 294 aa, Kluyveromyces lactis NRRL Y-1140
MTDSRIQTFHTATLSNNTKVWYREAGDKSNPSIVLLHGYPTSSTMFRHLIPLISDKFHVIAPDLPGFGFTEVPEDYHYSFDNLAATVREFLKEINVTRFAIYVFDYGSPVGFRLALKDPSSITGIVTQNGNAYEEALGDEFWGFIKKYWQTTQTDPVFVKPLSQFIADRKNVDDQYFIGVKDKTAIEPAAYTLDFALLQRPGQTDIQLKLFHDYQNNLTIYPAIHEFLKAHRIPVLAAWGKNDYIFTPEGAEAFGKHAQKFKLTLLDSGHFALETHVQDIAHDINTFLHDNIAL

SEQ ID NO: 31211 - protein, 420 aa, Alkalilimnicola ehrlichei MLHE-1
MTEDIRAYMQTLGRQAREAAREMARADTGHKNAALHAMADALEEHAGDLKRANADDLENGRANNLDPALLDRLELNDERIHGMAEGLRQIAALPDPVGAIRDLAFRPSGIQVGRMRVPLGVIGIIYESRPNVTADAAALCLKSGNAAILRGGSEARHSNAAIAACVRAGLKRAGLPGEAVQVVETTDRAAVGELIRMDEYVDVLVPRGGKGLIERITAEATVPVIKHLDGICHVYIDDSADPAKAISVAYNAKTQRLGTCNTMETLLVAEAIAERVLPELARRYRESEVELRGCEATRRLIPDAVPATKEDWSTEYLDAIVSIRIVPGLDEAIEHIARHSSGHTESILTEDWSRARRFLREVDSSSVMVNASTRFADGFEYGLGAEIGISTDKLHARGPVGLEGLTTEKFIVLGDGHIRE

SEQ ID NO: 31212 - protein, 634 aa, Kluyveromyces lactis NRRL Y-1140
MSTEKNSVVGEDKVLKSTYSDDETNVIKSVNGAGVGVDEKQAGPTDLNEYGIPDYLKSSKSLTIRKTEILAEQYSSWQWRVVLLFSAFLCGYGYGLDGNLRSFYTTWATNSYSTHSLLSTIGVVNAVMGAASQIVYARLSDVYGRFTLFVTAIVFYVVGTIIESQAHDVQRYAAGAVFYNIGYVGVILIVLLILSDFSSLKWRLFYSFVPTWPFIINTWISGNIVDVAKPEQNWSWDIAMWAFIFPLSCLPLLGCMLHMKWRARQTEAWKELSSQKTYYQTHGLVQSLVQLFWKLDVIGVFFMIIILGCILVPLTLAGGISNKWNNPHIIAPFILGFVLIPFFIAWESKWAREPIAPFKLLRDRGIWAALCIAFLINFIFTMAAGYLYTILMVAVNESVTSATRISSVSTFTSTVFSPFFALFITRFTRLKPFIIAGCSLWMVAMGILFHFRSGQNSDKGIIGALVVWGLGTTMFTYPVTVSLQSVTSHENMATVTALSYTMYRIGSAVGSAVSGAIWTQLLYKQLLQHLDGDATLAASFYGSPLTYIAQYPWGTPVRDGVVQAYRYVQKYEVLVALVFTAPLFVFSLCLRDPPLTNEVAHENIKQGEYVDVEDDDPVANWIHDKWSRIRRKSD

SEQ ID NO: 31213 - protein, 488 aa, Cryptococcus neoformans var. neoformans B-3501A
MTLPEVCKQFEPYFILDDAKLVDIVKHFRKEMEEGLASYGKDMAMIPTFVTGVPDGTEEGVFLALDLGGTNLRVCLILLQGHNQFKIKQQKYKVSEELKTGQARVLFDYIAESVDNFLTEVESHEDIAIPATGEPMHLGFTFSFPVEQTAIDAGKLLTWTKGFNTKNAIGHDVVRLLQDAFDRKHMHVRCSALVNDTVGTLLSRSYQSGPALIGAIFGTGTNGAYIDKTRTISKLGKEKIEDAEEGGEHAGEFMVVNMEWGAFDNKRQCLPISLFDNKLDRESINPRKQAFEKLVSGMYLGEITRNMLLYMIDSSLLFGGHSSEIINTHYGFDTSFVSGIEGISSPEEVKKLIVKELKVDPKHVTDKCPEIVQWAVRLVSDRACKLAACAIAAVVLHTGNDKAPEGEEDKGVDVGVDGSVAEFLPMFSERVMAALKAILGEKSAARVKLGLAKDGSGVGAALTALQAKKALDRRSDRSMKFVPGERGP

SEQ ID NO: 31214 - protein, 472 aa, Kluyveromyces lactis NRRL Y-1140
MSLVVYSQDRDLVPGEGQIVVYNQAYFEYLQAEDGYAGFEDGARRRNSRIPEDIFVQGYYQRFFKQVGVLGNGSRAVVYKVKHMLLENELGTFALKKICIGDDMHWLYRCLKEVKLLNRLTEESSHLITYNHVWLERCPVESLILTQNDGSSVNMDIPTTMPYMFILQQFCRGGNLEDTIQYQVFNRISGNESRLERRKKLLNHKKSRIGLTTRQIVSIANDIATGLKQLHSLRIIHRDLKPSNCLLLEEFDRSDTDKFPKCVIGDFGESQLYGQLRDATGSTGTVEFVAPELTKGAQFSFKSDIYAFGMILYFVIMGQLPFNSKDMSAIKHEINELSFSPEAMSKLHDSLDLAPIDPSLYNLVCEMLNHTPSLRPDSSQIEYQLNIIMKSINKSINQEPEIRPCYFRFATLYALLIALTLTTLNHSHWNWWKYCVLFITGLCFNHGQDAGNLDLLTVLIASTIISIISMYA

SEQ ID NO: 31215 - protein, 313 aa, Ceratopteris richardii
MAMPCSDIDLLDSDNDNVDDQHISLELRQVHEDTDDGSHDEPRELSLLNHESNLCKIVNSKGKGAEAGNSLLPSTGTSRGKIQIRRIENTTSRQVTFSKRRNGLLKKAHELSVLCDAEIALIIFSSTGKLFEYSSSRGIKKILERYKRCSGILQDVGGTVIRDVEYWKQEAERLKERLTYMEEIQRNMLGESLGSLQIKDLQNLEAKLDSGLYKIRGAKTQLMARQVQELQKKEQILLQQNEALRAKLAELSCLQAPVSGLTTATTSQDVQESSSGRGSRQRETSLSAAETTLQLASHNEQTFLLRAVPHMRL

SEQ ID NO: 31216 - protein, 236 aa, Ceratopteris richardii
TQKASELGNIHRKSAVSLLSDMSLDKSDTNINASGVTHSPLETESDTRSNLQSSNQPPYRSPRIAIRRVDNATNRQVTFSKRRNGLLKKASELSILCDAEIAAIVFSSTGRLSEFASSSMDKIIRRYEDLQSQSASRALLHQREYWKNQALHLRRQVGCMNDIQSCIMGENAAALSLDELQNTEARLQIALDKIRTRRNELLAMQTQNIISKGNGLWIENTLLRKRSTSAYDGEMP

SEQ ID NO: 31217 - protein, 595 aa, Zea mays
PGPYLWKSYKEIYDEVLQAGSALQKLGVQPGSRVGIYGANCPQWIVAMQACNGYSLVCVPLYDTLGAGAVDYIIDHAEIDVVFIQDKKIKEILSPNCKSAKRLKALVAFTSATTEQNKEADQIGIKMYAWDDFLKVGKDNPRQPCPPQASDICTVMYTSGTSGQPKGVMLTHESHAMYVKGVDLFMDQFDDKMTTDDVFLSFLPLAHILDRMIEEYFFHKGASIGYYHGDLNALRDDIVELKPTLLVGVPRVYERIYEGILKAIAELRPLRRVIFNALYNRKLASMKAGYSHKTASPFADMLAFRKVKARLGGRLRLLISGGAPLSNEIEEFMRVTTCAYFIQGYGLTETLGPSTVCYIDDMALVGSAGVPATYTEIRLEEVPEMGYNPLGVPSRGEICIRGKSLFAGYYKSPELTNEAIVDGWFHTGDIGEMTPDGILKVIDRKKNIFKLSQGEYVAVEYLEKVYGFPPLVEDIWVYGDSFRSSLVAVVNPHQENTMKWAESNGYKGSFDEICKLEGLKEYILKELAAVAQKNKLRGFEYIKGVVLDPVPFDIERDLVTATMKKKRKNMLNYYQSEIDTIYKKLEAQKSAARAK

SEQ ID NO: 31218 - protein, 395 aa, Burkholderia fungorum LB400
MESLKTGTDTLFLLLGAGMVLAMHAGFAFLELGTVRKKNQVNALVKILVDFSVSTIAYFFIGYAIAYGVQFFGSAESLAAHNGYALVRFFFLLTFAAAIPAIVSGGIAERSKFNPQLFATFVLVGFIYPFFEGIAWNGRFGIQNWLAEMFGAQFHDFAGSVVVHAFGGWVALPAVLLLGARHGRYHRDGGIAAHPPSNIPFLALGAWVLAVGWFGFNVMSAQTVDKISGLVAVNSLMAMVGGTLTAWLAGRNDPGFSYNGPLAGLVAVCAGSDIMHPLGALVTGGIAGVLFVYMFTCVQNRWRIDDVLGVWPLHGLCGAWGGLAAGIFGLRALGGMGGVSFGAQLVGTLGGIVVATLGGTLVYGAIRLTVGLRLDQEDEYNGADLSIHKISATPE

SEQ ID NO: 31219 - protein, 2025 aa, Arabidopsis thaliana
MESSLPQVAALDRSTLLKAFDETKTGVKGLIDAGITEIPSIFRAPPATLTSPKPPSSSDFSIPTIDLKGGGTDSITRRSLVEKIGDAAEKWGFFQVINHGIPMDVLEKMIDGIREFHEQDTEVKKGFYSRDPASKMVYSSNFDLFSSPAANWRDTLGCYTAPDPPRPEDLPATCGFLRPHYSLVCLKDFGGHFFREMMIEYSKEVMKLGKLLFELLSEALGLNTNHLKDMDCTNSLLLLGHYYPPCPQPDLTLGLTKHSDNSFLTILLQDHIGGLQVLHDQYWLITNDKFISVEHRVLANVAGPRISVACFFSSYLMANPRVYGPIKEILSEENPPNYRDTTITEYAKFYRSKGFDACLIRVLGTLIICVMPSFMTVKAMHETVTRSIFGYIIGLCVNSRQLNHLMFQVLLFISMDAKKLDTGPRDAINWLPDEILGKILSLLATKQAVSTSVLSKKWRTLFKLVDTLEFDDSVSGMGEQEASYVFPESFKDLVDRTVALQCDYPIRKLSLKCHVGRDDEQRKACVGRWISNVVGRGVSEVVLRINDRGLHFLSPQLLTCKTLVKLTLGTRLFLGKLPSYVSLPSLKFLFIHSVFFDDFGELSNVLLAGCPVVEALYLNQNGESMPYTISSPTLKRLSVHYEYHFESVISFDLPNLEYLDYSDYALYGYPQVNLESLVEAYLNLDKAEHVESPDVTKLIMGIRNVEILSLSPDSVGVIYSCCKYGLLLPVFNNLVSLSFGTKKTRAWKLLADILKQSPKLETLIIEDLNGYPLDVSMPLNQVKELQILEYGESDDERLQSRLESKNKLGSFDFEKFLFPIPPPIKITVSPHPSDSGGDGSNSKSSSDDEFVSLDSSTSGLCSSSGKFFDLIKFLIALSVLRETKTMESTKIAPSFDRASELKAFDETKTGVKGLVDSGISKIPRIFHHSSVELANPKPLPSDLLHLKTIPTIDLGGRDFQDAIKHKNAIEGIKEAAAKWGFFQVINHGVSLELLEKMKDGVRDFHEQPPEVRKDLYSRDFGRKFIYLSNFDLYTAAAANWRDTFYCYMAPDPPEPQDLPEICRDVMMEYSKQVMILGEFLFELLSEALGLNPNHLKDMECLKGLRMLCHYFPPCPEPDLTFGTSKHSDGSFLTVLLPDNIEGLQVCREGYWFDVPHVPGALIINIGDLLQASLRNQYMFASSDFTSLFTMLDLFKKSSSWFKLITNDKFISLKHRVLANRATRARVSVACFFHTHVKPNPRVYGPIKELVSEENPPKYRETTIRDYATYFNGKGLGGTSALLDFKQLVPSLNLRKMFHSCSVIREAKTMETKNIAPSFDRASELKAFDETKTGVKGLVDSGISQIPRIFHHSSVKLANPEPVSSDLLHLKTIPTIDLGGRVFEDELKHKNAIEKIKEAAEKWGFFQVINHGVSLELLEKMKDGVRGFHEQSPEVRKDFYSRDLTRKFQYSSMSPFLILDLMCNLYSYMVNCFRDVTIEYSEQVMNLGEFLFTLLSEALGLNPNHLNDMDCSKGLIMLCHYYPPCPEPDLTLGTSQHADNTFLTVLLPDQIEGLQVLREGYWFNVPHVPGALIINIGDLLQASLHNQYIFLLCFAELITNDKFVSLEHRVLANRATRARVSVAETKTMEMMKIDPLFDRASELKAFDETKTGVKGLVDSGVSQVPRIFHHPTVKLSTPKPLPSDLLHLKTIPTIDLGGRDFQDAIKRNNAIEEIKEAAAKWGFFQVINHGVSLELLEKMKKGVRDFHEQSQEVRKEFYSRDFSRRFLYLSNFDLFSSPAANWRDTFSCTMAPDTPKPQDLPEICRDIMMEYSKQVMNLGKFLFELLSEALGLEPNHLNDMDCSKGLLMLSHYYPPCPEPDLTLGTSQHSDNSFLTVLLPDQIEGLQVRREGHWFDVPHVSGALIINIGDLLQASSLMHFCSVLHCITYLPYCSFLGFVVLMQLITNDKFISLEHRVLANRATRARVSVACFFTTGVRPNPRMYGPIRELVSEENPPKYRETTIKDYATYFNAKGLDGTSALLHFKI

SEQ ID NO: 31220 - protein, 420 aa, Triticum aestivum
MAAHPVESEASSETDNHPLLIDHMENTAHLEIAIESPRDDVASSSTARREDNDGLDRLPHISESSSETTTASNSQSAPLARRDANRARRRQSPLNSSCWISIELVVTVSQIIAAICVLSLSRKERPHSPLFEWVIGYTVGCVATLPLLYWRYLHRNRPTTGQEPASQNFPPNSIPESNSHTTNSAPGMSEAGFVTDTNGVSQNNVLTRNLRAQAYADHFRMALDCFFAVWFVVGNVWVFGGHSSAHDAPNLYRLCIAFLTFSCIGYAMPFILCALICCCLPCIISLMSFREDLNQNKGATAEAINALRTYKFKTKKSRNGEGIEVGGGVVAAGTDKERIVSAEDAICCICLARYSNNDDLRELPCTHFFHKECVDKWLKINALCPLCKAEIDSGPTTAPAIGFGRRHSDNRVGNDIESQL

SEQ ID NO: 31221 - protein, 542 aa, Zea mays
NSGGKCDFDLAATFFCSVVYLVVGGDMQFALALDTNSGPHQIRSCEGDGIDRLEKLSIGGRKQEKALRNRCFGGRVAATQQCILTSDCAPETLHSQTQSSRKNYADNARVSAIILGGGTGSQLFPLTSTRATPAVPVGGCYRLIDIPMSNCFNSGINKIFVMSQFNSTSLNRHIHRTYLEGGINFADGSVQVLAATQMPEEPAGWFQGTADSIRKFIWVLEDYYSHKSIDNIVILSGDQLYRMNYMELVQKHVEDDADITISCAPVDESRASKNGLVKIDHTGRVLQFFEKPKGADLNSMRVETNFLSYAIDDAQKYPYLASMGIYVFKKDALLDLLKSKYTQLHDFGSEILPRAVLDHSVQACIFTGYWEDVGTIKSFFDANLALTEQPSKFDFYDPKTPFFTAPRCLPPTQLDKCKMKYAFISDGCLLRECNIEHSVIGVCSRVSSGCELKDSVMMGADIYETEEEASKLLLAGKVPIGIGRNTKIRNCIIDMNARIGKNVVITNSKGIQEADHPEEGYYIRSGIVVILKNATINECLVI

SEQ ID NO: 31222 - protein, 371 aa, Bacillus cereus ATCC 10987
MTVIRGLEGVVATTSSVSSIIDDTLTYVGYNIDDLAENATFEEVVYLLWHRKLPNEQELAEFKEIVSEYYKVPGEILAYLKQVDLKIAHPMSVLRTAISMLSLYDESAEIMDEKSNYLKAVKLQAQVGTLVAAYARIRKGLDVVEPRNDLSLAANFLYMLNDREPNEVEIEAFDKALVLHADHELNASTFTARVCVATLSDVYSGITAAIGALKGPLHGGANENVMKMLTEIGEEENVESYIHNALQNKVKIMGFGHRVYEHGDPRAKHLREMSKRLCVLLGEEKWYNMSIKIEDIVTKEKGLPPNVDFYSASVYHCLGIDHDLFTPIFAISRMSGWLAHILEQYENNRLIRPRADYNGPTHQVYVPIAQR

SEQ ID NO: 31223 - protein, 411 aa, Arabidopsis thaliana
MSSKEKPTLGGTRIKTRKRNIAAPLDPAAFSDAVVQIYHDNAGDLELVAKSIESSDLNFTRYGDIFFEVIFIGGRTQPGTVKSDEGERHTYSVIDCEPKREAILPSVVYIQKILRRKPFLIKNLENVTRRFLQSLELFEENERKKLAIFTALAFSQKLSGLPPETVFQPLLKDNLVAKGIVLSFVTDFFKEYLVENSLEDLISILRRGKMEDNLMDFLPPVRRSAESFAEHFTNEGLTDLVEYHSKKMFEVKLREIKTVLTSKVTEESNVDEVIESVKQQIKDAKLPDIEVVRVVWDGLMDAVQWSGKNQQQNANSVLRQVKTWAPLLNTFCTSGKLELELMYKVQMQCYEDAKLMKVFPEVVRSLYELDVLAEDTILHWFRKGTNSKGRQTFVKSLEPFVNWLEEAEEEE

SEQ ID NO: 31224 - protein, 280 aa, Arabidopsis thaliana
MKFENRYGLATSQKYDCLLFDLDDTLYPLSSGIARECGNNIKDYMTEKLGIPKDKIVELSDLLYKNYGTTMAGLRAIGYEFDYDEYHSFVHGRLPYDNIKPDLVLRSLLLSLPLRKVIFTNADRVHAAKALKKLGLEDCFEGIICFETLNLMHTNAASNNSEIFDIVGHFNRSEPVGSLPKTPVVCKPSESAIEKALEIANIDPNRTLFFEDSVRNVQAGKRVGLYTVLVGKSTKVKGADYALENIHNMKEAIPELWESDRKSSDVGYSGKVAVETSVRA

SEQ ID NO: 31225 - protein, 373 aa, Helicobacter pylori 26695
MFSKSLEALHHAKRYRKRELFDPLLKDYASNDYLGLSVKKDLLQNAFNKLQSFVSHSPKASMLVNGYHPLHAELEERLANLLGFESALLVGSGFLGNLALIDTLLVKNALLFMDAHYHASGIFSTKIKPNQVIFFSHNDIKDLKQKLFNAPKNKIKFIAIEGVYSMDASVAPYDFYAIIQEIPNAFLIVDEAHSFGTIGENLLGFLEYYRIKEKDKIIKLSTFSKALASYGACILAPLQTIEFLTNRAKSVIYTTALSLLDTALTLAHLEYFIVQKQELKNELSKHQQIIFETLGIRTLAGFFTLEFESNPALLNAHHFLKEKGFLVGAIRPPTVSKPLLRVSLSLKNSLEDTKELANTLLNYSKIQSSFKSG

SEQ ID NO: 31226 - protein, 585 aa, Bacillus cereus ATCC 10987
MRKTKIVCTIGPASESIEKLEQLIEAGMNVARLNFSHGSHEEHGARIKNIREASKKTGKTVGILLDTKGPEIRTHDFVDGQAELVTGAEVVISTEQVLGTAEKFSVSYAGLYDDVNPGSRILIDDGLIELEVIEKADGNIRTKVLNSGTVKNKKGVNVPNVSIKLPGITEKDVKDIIFGIEQKVDFIAASFVRKAADVLEIRELLEEHNAQYIQIVPKIENQEGIDNIDSILEVSDGLMVARGDMGVEIPPEEVPLVQKRLIKKCNVLGKPVITATQMLDSMQRNPRPTRAEASDVANAIFDGTDAIMLSGETAAGQYPVEAVTMMANIAVRVEKSLQYEDMFKKRIKEFTPTITDAISQSVAHTALALDVAAIVAPTESGYTAKMISKYRPKSPIVAVTSDEQVGRRLALVWGVQAFMAEKRAASTDEMLDTAIQTGMDAGLIGLGDTVVITAGVPVAETGTTNLMKIHVVGEEVAKGQGIGRKAAKGKVVVAKTAAEAVANVNEGDILVTTSTDKDMIPAIEKAAALVVEEGGLTSHAAVVGVSIGIPVIVGVNGVTATLKNGQEVTVDAARGIVYNGHAEVL

SEQ ID NO: 31227 - protein, 243 aa, Zea mays
ASRYDICLHVDLCLGGFVLPFAHKLGYPIPPFDFSVKGVTSISSDVHKYGLAPKGTSIVLYRNHEIRKHQFVAVTEWTGGLYVSPTIAGSRPGGLIAGAWAAMMSLGLNGYLDSTSRIMDVSKKIQRGIGEIPGLFVIGKPDMTVVAFGSDVVDIFEVNDIMSSKGWHLNALQRPNSLHICVTLQHTTVYDQFLKDLQDSVNTVKANPGPISGGKAPIYGAAGKMPDRGTVRELLVEFMDSSC

SEQ ID NO: 31228 - protein, 631 aa, Rhodospirillum rubrum
MGAALAAYGPARAGISDIAAAGLALTCRQSHITDTDMIDRQPLWDGDRRICVVADARIDNAAELALGFGWAVGEGERCSDAALILAAYRRWGPDCVGRLTGDFAFALWDDQEQRLLLARDHYGGRPLFFAHRPGLFAFASMPKGLFALGEFSNALDATELGAYVALLPQEGTRTLYRDLSRVPPGHYLLVQGERRRLVQYWPGQFREPARSGDYREHVEEFGRLYTQAVRACLRVRPGGGIGSHLSAGFDSASVTALAARELSAQAKGLTAFTGAPRDGFTGPYPSARVIDESGVAGEVARRFSNIEHRIIHAGPDGPLRDLERTLPYLETPFLNICNLGWARVIEETAARSGIKVLLIGAMGNLTASFEGQIHLARLFRQGRWWQLAILARGLTREGAGWRTVASAALGPYLPDWVRRLRHRNSPGVFAHTALSPAFAASMDMDGLAAARGSFPPRFSDSRTARLFMIRLADPGVYHHASLAEHGIDIRDPTADRRLLDFCLTIPEGFFIRDGRRASLFRDAMAGLLPDTMLNRRIRGVQAADWYEKMVASRDAMAAELERLRSSPMASRVLDLDRLCRLVADLPDPATPPEQIPAERFTSPDGAMAYRLALLRGLSMGRFIRMVEGGNG

SEQ ID NO: 31229 - protein, 285 aa, Photorhabdus luminescens subsp. laumondii TTO1
MRNVNVALLQLCSGENIKHNLAQIEQQIKQLPDTIKFVMTPENALLFANADSYRRHAEQQGHGPLQQAVSEIARRYGVWLLIGSMPLISRENPERLTSSSLLFDDQGKICARYDKIHMFDVNINDEHGSYNESSVFQRGEHITVVDTPVGRLGMTICYDLRFPGLFQALREQGAELISVPAAFTRLTGKAHWEPLLRARAIENQCILLAPAQVGVHGTRQTWGHSMAVDGWGKVIKKNPDAVSALQLNVRADSLKIMREQMKVVKHNRFRPQLTSLIEKIPQIKE

SEQ ID NO: 31230 - protein, 322 aa, Idiomarina loihiensis L2TR
MSRIKEEAVENVEANEDESIVDSTDSAAEELEEALSSSSTQYQKKMDATQLYLGEIGFSPLLTAEEEVFYSRRALKGDKAARRRMIESNLRLVVKIARRYSNRGLPLLDLVEEGNLGLIRAVEKFDPERGFRFSTYATWWIRQTIERAIMNQTRTIRLPIHVVKELNVYLRAARELAHKLDHEPTAEDIAKSLNKPVGDITKMLRLNERIGSVDTPIGGDNDKALLDILTDDADTGPEGVLQDENLKGNITEWLQSLNQKQREVLARRFGLMGYEPSTLEDVGREIGLTRERVRQIQVEALRKLRDSLKQQGLTLDSLFTAQ

SEQ ID NO: 31231 - protein, 90 aa, Oryza
MARIRARGSSRVDLARFAVTEHNKKANSLLEFEKLVSVKQQVVAGTLYYFTIEVKEGDAKKLYEAKVWEKPWMDFKELQEFKPVDASANA

SEQ ID NO: 31232 - protein, 156 aa, Kluyveromyces lactis NRRL Y-1140
MSTELTVQSERAFQKQPHIFTNPKAKANRKTKRWYKNVGLGFKTPKTAIEGSYIDKKCPFTGLVSIRGKILTGTVVSTRMHRTIVIRRDYLHYVPKYNRYEKRHKNVPAHVSPAFRVQVGDIVTVGQCRPISKTVRFNVLKVASATGKANKQFAKF

SEQ ID NO: 31233 - protein, 143 aa, Bacillus halodurans C-125
MTEQNEELKKKLTPLQYEVTQNNGTEPPFRNEYYDLEAEGIYVDIVSGKPLFSSKDKYDAGCGWPSFTKPIDEEEVIEKEDRSHGMFRTEVRSKQADSHLGHVFPDGPGPNGLRYCINSAALRFIPKADLEKEGYGKYKALFD

SEQ ID NO: 31234 - protein, 179 aa, Bacillus halodurans C-125
MSESKWALATFAGGCFWCMVSPFEEEPGIHQVVSGYTGGHTENPTYKEVCSETTGHYEAVQISFDPEVFPYEKLLEIYWTQIDPTDPGGQFHDRGDSYRTAIFYHDEQQKQAADASKQKLEESGKFNAPIVTRILPAKPFYPAEEYHQKYHKKNPFHYKMYRHGSGREAFIKQHWGESR

SEQ ID NO: 31235 - protein, 431 aa, Arabidopsis thaliana
MSSQSNNSESTSTNNSSKPHTGGDIRWDAVNSLKSRGIKLGISDFRVLKRLGYGDIGSVYLVELKGANPTTYFAMKVMDKASLVSRNKLLRAQTEREILSQLDHPFLPTLYSHFETDKFYCLVMEFCSGGNLYSLRQKQPNKCFTEDAARFFASEVLLALEYLHMLGIVYRDLKPENVLVRDDGHIMLSDFDLSLRCSVNPTLVKSFNGGGTTGIIDDNAAVQGCYQPSAFFPRMLQSSKKNRKSKSDFDGSLPELMAEPTNVKSMSFVGTHEYLAPEIIKNEGHGSAVDWWTFGIFIYELLHGATPFKGQGNKATLYNVIGQPLRFPEYSQVSSTAKDLIKGLLVKEPQNRIAYKRGATEIKQHPFFEGVNWALIRGETPPHLPEPVDFSCYVKKEKESLPPAATEKKSKMFDEANKSGSDPDYIVFEYF

SEQ ID NO: 31236 - protein, 346 aa, Nicotiana tabacum
MQIFVKTLTGKTITLEVESSDTIDNVKAKIQDKEGIPPDQQRLIFAGKQLEDGRTLADYNIQKESTLHLVLRLRGGMQIFVKTLTGKTITLEVESSDTIDNVKAKIQDKEGIPPDQQRLIFAGKQLEDGRTLADYNIQKESTLHLVLRLRGGMQIFVKTLTGKTITLEVESSDTIDNVKAKIQDKEGIPPDQQRLIFAGKQLEDGRTLADYNIQKESTLHLVLRLRGGMQIFVKTLTGKTITLEVESSDTIDNVKAKIQDKEGIPPDQQRLIFAGKQLEDGRTLADYNIQKESTLHLVLRLRGGMQIFVKTLTGKTITLEVESSDTIDNVKAKIQDKEGIPRISRG

SEQ ID NO: 31237 - protein, 479 aa, Streptomyces avermitilis MA-4680
MDLGVRWKLHGDGRTPAPGAVVRPDERLSWPRTVGLGAQHVVAMFGASFVAPVLMGLDPNLAIMMSGVATVIFLLATRGRVPSYLGCSLSFVGVAAVIRAQGGTSATVTGAVFVVGVALFLVGLAVQRFGARIIHAAMPPIVTGAVVMLIGFNLAPVTASTYWPQDQWTALLVMAFTGLAVVCLRGFWSRIAIFLGLVFGYGISWASDRIFGKIHSVDASGKLTDHWRLDLSGVGKADWIGLPSFHGPSFQWSAILVALPVVIALVAENAGHVKAVGEMTGDPLDDKLGTAISADGVASMLSTAVGGPPNTTYSENIGVMAATRVYSTAAYWAAAGFALLFGLSPKFGAVVAAIPGGVLGGITVILYGMIGLLGAQIWLNARVDLRNPLNLVPAAAGIIIGVGGVSLKFTDNFSLSGIALGTLVVIIGYHGLRAMAPAHLKTQEPLLDSGTSSYDEAEGDKAGVSEAGDDKAEDQRASS

SEQ ID NO: 31238 - protein, 353 aa, Kluyveromyces lactis NRRL Y-1140
MFSAVRSVVSSGIKTSIRTMSTIPGVQKVVLIRENGGPEVLKYEEDYPVPKIGATDLLIKNKYAGINFIEVYFRKGIYPSEKPYVLGREAVGEVVAKGDQVDKYNVGDKVAYLSASTFAQFTKYPQNGHLIKLPKDISAEKEKIIAGSLVQGLTPLTFIDEAYNVQKGDFILVYAAAGGVGLIFDQLLKARGARTIAVASTDEKLQLAKEYGAEFLINSTKDDIVEKVKEFTNGEGVAAAFDSIGKDTFETTLQVVKRKGTIVSFGNASGAVPPFSINRLSPKNLKLVRPQLFAYVADPSEWEHYSSELIRLIDSGELKITISKVYPLKDYKEATEDLESRKTVGKLILEIPE

SEQ ID NO: 31239 - protein, 227 aa, Chlamydophila caviae GPIC
MAFLILLRHGKSVWNEKNLFTGWVDIPLSQQGIDEAIHAGQVIKDLPIDCIFTSSLVRSLMTALLAMTHHSSKKIPYIIHDDEQQKLMSRIYSDEEKSMIPLYRSSALNERMYGELQGKNKKETAEEFGEEQVKLWRRSYKISPPGGESLYDTGLRTVPYFQETIFPLLKNSKNVFISAHGNSLRSLIMDIEKLSEEEVLSLELPTGKPIVYLWTGHTFERHPEPLG

SEQ ID NO: 31240 - protein, 518 aa, Arabidopsis thaliana
  misc_feature (138)..(138): Xaa can be any naturally occurring amino acid
  misc_feature (145)..(145): Xaa can be any naturally occurring amino acid
  misc_feature (177)..(177): Xaa can be any naturally occurring amino acid
  unsure (1)..(518): unsure at all Xaa locations
MAFTNVCLWTLLAFMLTWTVFYVTNRGKKATQLADAVVEEREDGATDVIIVGAGVGGSALAYALAKDGRRVHVIERDMREPERIMGEFMQPGGRLMLSKLGLEDCLEGIDAQKATGMTVYKDGKEAVASFPVDNNNFXYDPSARXLFHNGRFVQRLRQKAFSLSNVRLEEGTVKSLXIEEKGVIKGVTYKNKAGEETTALAPLTVVCDGCYSNLRRSLNDNNAEVLSYQVGYISKNCRLDEPEKLHLIMSKPSFTMLYQISSTDVRCGFEVFPDNFPSIAKGEMATFVKNTIAPQVPPKLRKIFLKGIDEGAHIKAVPAKRMTATLTKKNGVIVLGDAFNMRHPAVAAGMMVLLSDILILRRLLQPLSNLGDANKVSEVIMSFNLIRKPMSATVNTLGNAFSQVLIASTDEAKEAMRQGGYDYLCSGGFRTSGMMALLGGMNPRPLSLVYHLCAITLSSIGHLLSPFPSPLRIWHSLRLFGLAMKMLVPHLKAEGVSQMLFPANAAAYRKSYMAATAL

SEQ ID NO: 31241 - protein, 264 aa, Glycine max
PVPTLLCLNTIGYRAPPRVSYVGPPPLGLDPERAKELPYIASMGIYVFSKDVMLRLLRENFPAANDFGSEVIPGATEIGLRVQAYLYDGYWEDIGTIEAFYNANLGITKKPVPDFSFYDRSAPIYTQPRYLPPSKVLDADVTDSVIGEGCVIKHCTINHSVVGLRSCISEGAVIEDSLLMGADYYETENDKNALSETGGIPIGIGKNSHIRKAIIDKNARIGENVKIINFDNVQEAVRETEGYFIKSGIVTVIKDALIPSGTII

SEQ ID NO: 31242 - protein, 432 aa, Buchnera aphidicola str. Sg (Schizaphis graminum)
MSQSDIFFDHKHIWHPYSSMVNPLPCYSVISAKGVYLKLKNGKNIIDGMSSWWSTIHGYNHPILNKSLKKQIRKMSHVMFGGITHPSAILLCRKLLKLTPKKLDCVFLSDSGSIAIEVAIKMLIQYWEALGQKRTQILTIKNGYHGDTFSAMSISDPNNSMHKIYNKFLPKNLFAETPTSSFHKEWNSIDIQSFKKIIEKKSKKIAGVILEPIVQGVGGMNFYHPTYLKEIKKLCKAYSIPLVFDEIATGFGRTGKFFAFQHANVIPDILCLGKAMTGGTITLAATLTSRNIAHTISSSKVSCFMHGPTYMGNPLACAVANANIKILEKNEWKKQVINIEKQLCQSLLPLIHHPRVVDVRVLGAIGVVECFHFVNMALIQKFFVKNGVWIRPFKKIIYIVPPYIISMNCLKKLINVIEKSLDNDTLFNVENI

SEQ ID NO: 31243 - protein, 409 aa, Mesorhizobium loti
MTQTFLAHLRRELADLKSGGLYKSERVISSRQSREIRVANGNSVLNFCANNYLGLADNEEIADAAKKALDRYGFGMASVRFICGTQEEHKQLEARISGFLGMEDTILYSSCFDANGGLFETLLGEEDAIISDALNHASIIDGARLSKARRFRYANNDMKALEEELKKADGARFKLIATDGVFSMDGIIANLRGVCDLADRYDAMVMVDDSHAVGLVGEHGRGSAEYCGVEGRVDIITGTLGKALGGASGGYTSGNSEVIDWLRQRSRPYLFSNTLAPVIAAASLKVFDIVDRAGVLRQKLYDNGRRFRSEMTKAGFTLVGADHPIIPVMLGDASVAQQMAEMMLLRGIYVIGFSFPVVPKGQARIRTQMSAAHTLADVDFAVECFVEVGKELGVIPLRLPHLDQNPGTV

SEQ ID NO: 31244 - protein, 318 aa, Thiobacillus denitrificans ATCC 25259
MAFRAIAKDFPDIEVVAINDLLDPEYLAYMLKYDSVHGNFKGDIAVEGNNLIVNGKKIRLTAEREPANLKWNEVGAELVIECTGFFLTKETCQKHIDAGAKKVVQSAPSKDDTPMFVYGVNHEKYAGEAIVSAASCTTNCLAPIAKVLNDNWGIKRGLMSTVHAATATQKTVDGPSSKDWRGGRGILENIIPSSTGAAKAVGVVLPELKGKLTGMAFRVPTSDVSVVDLTVELEKPAKYADICAAMKKASQSGDISKTLGYTDEKVVSTDFRGNGFSSIFDAEAGIALDDTFVKVVSWYDNEYGYTCNMLRFVQHVAK

SEQ ID NO: 31245 - protein, 332 aa, Buchnera aphidicola str. Sg (Schizaphis graminum)
MTIKIGINGFGRIGRVLFRLAQERENIEVVAINDLLDPKYIAYMLKYDSTHGNFKKDIEVKNNNLIINGKKIRITSIKDPEKLMWDKLLIDVVIESTGLFLTKDTAYKHILSGAKKVVITGPSKDDIPMFVRGANFDKYKGEKIVSNASCTTNCLAPLSKVIDDHFGIIEGLMTTVHASTATQKIVDSASKKDWRGGRGALQNIIPSSTGAAVAVGKVLPNLNGKLTGIAFRVPTANVSVVDLTVRYKKTATYNEICEVVKNASEQKMKGILGYTEDEVVSTDFNGKELTSIFDAKAGLSLNKNFAKLISWYDNETGYSSKVLDLVELVALK

SEQ ID NO: 31246 - protein, 322 aa, Xanthomonas oryzae pv. oryzae KACC10331
MTASPSKLAQLRELSVVVADTGDYDAIKRLQPVDCTTNPTLVKKALDLPVYADLLERELTWGRAHGGDDRTTTVDEVADRLTIGVGVKLSALVPGRVSTEVDADLAHDTQATIAKARKFVAMYAERGVPKDKILIKIAATWEGIEAARQLQLEGIDCNLTLIFNRAQALACAEANVFLISPFVGRILDYYVAQGQTPASIDEDPGVVFVRTVYNAFKQRGSSTVVMGASFRSTAQIEALAGCDRLTISPDLLEKLDAEHGELPRKLSPGNANNAQITPIDSDSFASGLAADPMATEKLASGIDTFAKDLHALRKTIADKLAG

SEQ ID NO: 31247 - protein, 338 aa, Oryza sativa
MIDGSTVLLLAEVVVVALVVVAFVAARKYSTTKPDPAKVFTKFQCKPTQGPTLSIVVPCYNEEERLPPMLQQTLDFCLDAKKRCVDDATSRAEGLFADFEIVVVDDCSRDKTADVVTKFAKDHPEAIIKLVRVNPNRGKGFAVRRGFFEASGDYVLMADGDNATQISDVTKLFKALRKPLSSSGQPASNMPPVIAIGSRAHLEEKAIARRTFFRTVLMKVFHFVVSVTYFFGTRGSLCKLRDTQCGFKLFDRRVTEILFLNNRLERWAFDVEILLTARRRGLKVAEVPVRWEEIPGSKVRLRGMVQMGLECLLMCFTYSLGVWSIVKPPSKPKSSSSS

SEQ ID NO: 31248 - protein, 293 aa, Oryza sativa (japonica cultivar-group)
MSFIGMVEARMPPGFRFHPRDDELVLDYLLHKLAAGGRGGGVYGGGGGVAIVDVDLNKCEPWDLPDAACVGGKEWYFFSLRDRKYATGHRTNRATRSGYWKATGKDRSITRRSSISSGEPSSSAAAAAVGMRKTLVFYRGRAPKGRKTEWVMHEFRLEPQPLHLKEDWVLCRVFYKTRQTIPSPSSEEAVTLPNELDLPATPSLPPLIDAYIAFDSAPTTTPSMVGSYEQVSCFSGLPALPMKGSISFGDLLAMDTSAEKKAIRVLHNSNTAKLELSPDWGQESGLSQMWNPQ

SEQ ID NO: 31249 - protein, 149 aa, Ceratopteris richardii
MAEQLTTDQIAEFKEAFGLFDKDGDGCITTKELGTVMRSLGQNPTEAELQEMINEVDADGNGTIDFPEFLNLMARKMKDTDSEEELKEAFKVFDKDQNGFISAAELRHVMTNLGEKLTDEEVDEMIREADVDGDGQVNYEEFVRMMLSK

SEQ ID NO: 31250 - protein, 229 aa, Oryza sativa
MATTSACCYRPLSAPPLHRRRGPPPQQQQLRTAVGGPRPRPSLQVAAAAATGGGQSVKAATDAEFFQTSDTRPIMLFDGVCNLCNGGVRFVQEHDPNRSIRYIPLQSESGRKLLQRSGRAPDDISSVVLVEKDRSYIKSEAVLRIMGYLNLPFPQLATFLNFVPLFLRDFAYDNVADNRYAVFGRSESESWMIKIGQPSLLQVSSHAARNAFSAEKMHGKVTNPRSTAI

SEQ ID NO: 31251 - protein, 353 aa, Glycine max
  misc_feature (310)..(310): Xaa can be any naturally occurring amino acid
  misc_feature (329)..(330): Xaa can be any naturally occurring amino acid
  misc_feature (339)..(339): Xaa can be any naturally occurring amino acid
  misc_feature (341)..(341): Xaa can be any naturally occurring amino acid
  misc_feature (343)..(343): Xaa can be any naturally occurring amino acid
  unsure (1)..(353): unsure at all Xaa locations
MQQQRRCMLMAVWPCSLLTSSPLNSLITAPSTLSISPPSCRRRNLAGSLTVVDERTGKKYQLQVSKEGTVKASEFKKILTGKNDKGLKLYDPGYLNTAPVRSTISYIDGDEGILRYRGYPIEELADKSTFTEVSYLIMYGSLPSESQLAEWEFAISQHSAVPQGVLDMIQSMPHDAHPMGVLVNAMSALSVFHPDANPALRGLDIYDSKQIRDKQITRVIGKITTIAAAVYLRMAGRPPVLPSNHLSYTENFLYMLDSFGNRSYKPNPRLTRVLDIIFILHAEHEMNCSTSAVRHLASSGVDVYTAIAGXAVGALYGPLHGGANEAVLXXLSEIGTVQXIXRXIESVKARKRK

SEQ ID NO: 31252 - protein, 586 aa, Gluconobacter oxydans 621H
MCGIAGLSCLPGHHPDQDALERMSQAIFHRGPDGEGRLDLGGAALRHRRLSIVDIAGGAQPFRLGAAALIANGEIYNDPAIRRRFPKTCFQTHSDCEPPLHLWLHDGAGYTHELRGMYAIAIVENEHGRHEMVLSRDPFGIKPLYIAAYEGGIAFASEPQALLAGGFGRRSVRDGARNELMQLQFTTGQDIIFDGIRRLLPGETLRIVDGRIVESRRRHVLHEARDTVPARLSDEQALARLDTALLDSVSAHLRADVPLGLFLSGGIDSSVILAAAHRLGLPHPRTWTARFDAGKADESADAAALAASVGAEHHVLTVTEDMVWRDLPSIVACMDDPAADYAVIPTWFLAREARKDVTVILSGEGGDELFAGYGRYRRVMKPWWKGGRAPYRSGTFGKRFAEHGRQWRRGIAMTELALGVSGLEGAQALDIAEWLPNDLLLKLDRCLMAHSVEGRTPLLDPVVAKAIWPLPEHFKVRDGYGKWLLRRWLQDALPQARPFAPKQGFTVPVGPWIEKQAHRLGPLVARQPCIRAMMPAADVERLFARASQRGVARQAWTLLFFALWHRHHIEGVPVDGDTFETLARAS

SEQ ID NO: 31253 - protein, 371 aa, Magnaporthe grisea 70-15
MGNLRSLGLFFLAAFATTQVAAESDVLDLVPSNFDDVVLKSGTPTLVEFFAPWCGHCKQLAPTYENLAQSFAASKGKVQIAKVDADAEKSLGKRFGVQGFPTLKWFDGKSDKPIDYEGGRDLDSLAGFITEKTGVKPKRKLAPPSNVVMLSDSTFSKTIGGDKNVLVAFTAPWCGHCKSLAPIWEDLAQTFALEDDVIIAKVDAEAENSKATANDQGVQSYPTIKFWAKGQSKPEDYNGGRSEADFVKFLNEKTGTQRAAGGGVDATSGTIAALDAIVVKYTGGTLLSDAAAEIKKEAESLKDAAQVKYAQYYIRVFDKLSKNDDFASKELARLDGMLKKGGLAPAKLDELTRKTNVLRKFVEKVTGKDEL

SEQ ID NO: 31254 - protein, 612 aa, Ustilago maydis 521
MQRYISPLFTALLVLSSTWMVFAKTVQHDWTISPLYEAPVLELDQGDDVEISIHNSLPVDITIHWHGILQIGSPEMDGVPGVTQWAIPPLGDYTYKFTPTNQTGLHWYHAHLRGYLDDGVKGLLYIRPSAQRPRPFQLIDPSGDQVAAMQQAEDSPRNLALYDWKHVQEDEALAMFFASGRPTTCVDSVLFNGKGSIYCASAETLNQAAGGRFDAMPFFESKLDARGCLVIPGSGIYSAHTITSPMGCSNSTGQLEIVPTHSEWTLINLANVGGEWTWVFSIDAHDLWVISADGDYIVPEKVQALPVSIGQRYGVMVRTDKPDGGDYYIRANSAGFAQVMGGVGILRYQDAPHQKRRTTEQTSVSVADPWRDMSRSHVKYNATPAEGTSTYDPIKSMPFIADAPPSKVDRTLIFHANQSEPTVFSIASRPLRMVEELNLPVLFSNSSQYTGTRDPDWLIRIAKGDVVDVILQNAQNALFPAPAEPPHPIHLHGHKFWVLGSNEYDDWQFQSAAEAMAHGVQLNLDNPPKRDTFLLPTAGWLVLRFVADNPGAWMLHCHRMGVVFLEGEDEIAAIPDRFQKRPTAHVAHQGWQTDARTKRSLDDSARHPALFV

SEQ ID NO: 31255 - protein, 159 aa, Rhodospirillum rubrum
MAVIGAGTMGRGIAAPQAIVDAVRSYAPAFVFSTSSPAPVVAAALAALTYNTRHPELRRRLLDRVAEVKAGFKRLGIPLVSDDSHVLPVLVGDPHRCKEISRRLLDDFGIYVQPVNAPTVPEGTERLRVTPTAAHSGDDVKALLSAFDKVWNTVTPGVA

SEQ ID NO: 31256 - protein, 218 aa, Zea mays
MGRSPCCEKAHTNKGAWTKEEDDRLVAYIKAHGEGCWRSLPKAAGLVRCGKSCRLRWINYLRPDLKRGNFTEEEDELIIKLHSLLGNKWSLIAGRLPGRTDNEIKNYWNTHIRRKLLSRGIDPVTHRPINEHTSNITISFEDWGQGKALKCPDLNLDLCISPPCQEEEEAMLLRPVKREEAGLCFSCSLGLPKSADCKCSNFLGLRTAMLDFRRLEMK

SEQ ID NO: 31257 - protein, 131 aa, Geobacter sulfurreducens PCA
MAEIYSAKVWDHVRNPRNVGSLEDANVVVQAGDPTCGDAVLYFLRIEEDIVRDIKFLIKGCGAAIATSSVATELVMGKGLDEVMGLSDQIIAQALDGLPEEKMHCSNMAASALHAAVEQYRATVAGETKPL

SEQ ID NO: 31258 - protein, 309 aa, Arabidopsis thaliana
MEITLNSGFKMPIVGLGVWRMEKEGIRDLILNAIKIGYRHLDCAADYRNETEVGDALTEAFKTGLVKREDLFITTKLWNSDHGHVIEACKDSLKKLQLDYLDLFLVHFPVATKHTGVGTTDSALGDDGVLDIDTTISLETTWHDMEKLVSMGLVRSIGISNYDVFLTRDCLAYSKIKPAVNQIETHPYFQRDSLVKFCQKHGICVTAHTPLGGATANAEWFGTVSCLDDPVLKDVAEKYKKTVAQVVLRWGIQRKTVVIPKTSKPARLEENFQVFDFELSKEDMEVIKSMERKYRTNQPAKFWNIDLYA

SEQ ID NO: 31259 - protein, 304 aa, Arabidopsis thaliana
MPLEAVVYPQDPFGYLSNCKDFMFHDLYSQEEFVAQDTKNNIDKLGHEQSFVEQGKEDDHQWRDYHQYPLLIPSLGEELGLTAIDVESHPPPQHRRKRRRTRNCKNKEEIENQRMTHIAVERNRRKQMNEYLAVLRSLMPSSYAQRGDQASIVGGAINYVKELEHILQSMEPKRTRTHDPKGDKTSTSSLVGPFTDFFSFPQYSTKSSSDVPESSSSPAEIEVTVAESHANIKIMTKKKPRQLLKLITSLQSLRLTLLHLNVTTLHNSILYSISVRVEEGSQLNTVDDIATALNQTIRRIQEET

SEQ ID NO: 31260 - protein, 348 aa, Arabidopsis thaliana
MLWFFLLQYDTKYYYVLGVGQTERKFWFFTPPEIGPDVPYTFGLIGNLGQSYDSNITLTHYENNPTKGQAVLFVGDISYADTYPDHDNRRWDSWGRFAERSTAYQPWIWTTGNHELDFAPEIGENRPFKPFTHRYRTPYRSSGSTEPFWYSIKRGPAYIVVLASYSAYGKYTPQYQWLEEEFPKVNRTETPWLIVLMHSPWYNSYDYHYMEGETMRVMYEAWFVKYKVDVVFAGHVHAYERSERVSNIAYNVVNGICTPVKDQSAPVYITIGDGGNIEGLATKMTEPQPKYSAFREASFGHAIFSIKNRTHAHYGWHRNHGGYAVEGDRMWFYNRFWHPVDDSPSCNS

SEQ ID NO: 31261 - protein, 448 aa, Schizosaccharomyces pombe
MREIVHIQAGQCGNQVGAAFWSTIADEHGLDSAGIYHGTSEAQHERLNVYFNEAAGGKYVPRAVLVDLEPGTMDAVKSGKFGNLFRPDNIIYGQSGAGNIWAKGHYTEGAELADAVLDVVRREAEACDALQGFQLTHSLGGGTGSGMGTLLLSKIREEYPDRMMATFSVAPAPKSSDTVVEPYNATLSMHQLVENSDETFCIDNEALSSIFANTLKIKSPSYDDLNHLVSAVMAGVTTSFRFPGELNSDLRKLAVNMVPFPRLHFFMVGFAPLAAIGSSSFQAVSVPELTQQMFDANNMMVAADPRHGRYLTVAALFRGKVSMKEVDEQIRSVQTKNSAYFVEWIPDNVLKAVCSVPPKDLKMSATFIGNSTSIQEIFRRLGDQFSAMFRRKAFLHWYTGEGMDEMEFTEAESNMNDLVSEYQQYQEAGIDEGDEDYEIEEEKEPLEY

SEQ ID NO: 31262 - protein, 281 aa, Arabidopsis thaliana
  misc_feature (135)..(135): Xaa can be any naturally occurring amino acid
  unsure (1)..(281): unsure at all Xaa locations
MANPWWTNQSGLAGMVDHSVSSGHHQNHHHQSLLTKGDLGIAMNQSQDNDQDEEDDPREGAVEVVNRRPRGRPPGSKNKPKAPIFVTRDSPNALRSHVLEISDGSDVADTIAHFSRRRQRGVCVLSGTGSVANVXLRQAAAPGGVVSLQGRFEILSLTGAFLPGPSPPGSTGLTVYLAGVQGQVVGGSVVGPLLAIGSVMVIAATFSNATYERLPMEEEEDGGGSRQIHGGGDSPPRIGSNLPDLSGMAGPGYNMPPHLIPNGAGQLGHEPYTWVHARPPY

SEQ ID NO: 31263 - protein, 489 aa, Arabidopsis thaliana
MKDKQPYIAKADEMRVAYDQKLITYIKKLERPHHTTNLEHHSFMFASVAVLDSCTSSSLTCLQEIVHLELCSVARSMMIAQELGIYVVESKGGAILCLLLSLLCLGTWPALMALLERRGRLPQHTYLDYSITNFLAAIFIAFVFGGIGESTHEAPSFITQLTQIQDNWPSVLFAMAGGVGLSIGNLATQYSLAFVGLSVTEVTAASITVVVGTTVNYFLDNGLNRADILFSGVGCFMVAVCLGSAVHSSNSADIKAKLGKLSGDCETVTPEECQRLFGVEEEEEEEKEMENVKEGSAAFLIALENKRAIKVLGKSMVVGLGITFFAGLSFSLFSPLFNLATNDQWHTLKQGVPKLIVYTAFFYFSLSCFVIAVALNISFLYKPVLDSPRSSFREYLSDWNGRGWALAAGLLCGFGNGLQFMGGQAAGYAASDAVQALPLVSTFWGIYLFGEYRRSSTRTYALLVGMLVMFTVAVGLLMASAGERETRFT

SEQ ID NO: 31264 - protein, 230 aa, Buchnera aphidicola str. Sg (Schizaphis graminum)
MKTNKLVLIRHGQSKWNKLNKFTGWHDIELSDNGINEALKAGSLLKKEKFFFDYAHTSMLKRAIHTLRYILDTLDQSWLPVQKSWRLNERHYGALEGLNKDEMISKYGEEQVNLWRRSFEIIPPQIRLNDKRFPGNDIRYSNIDNNELPLGESLELTAKRVIPYWNKFILPQIKKRNRVLIVAHGNSLRALIQFLNKIDNKKILELNIPTATPIILEFNEEYNSIKWYYL

SEQ ID NO: 31265 - protein, 473 aa, Thiobacillus denitrificans ATCC 25259
MGSETDHDNFDAVIVGAGQAAAPLAVALGAAGWRTAVVERRHVGGSCINFGCTPTKAMAASARVAALARRAAEFGLRAGTVEVDFPAVMQRARAIVARFRRRLEASLAGADNVELIFGDAIFQDARTLIVRRPDGESRTLAAAHVFINTGTRAALPPIPGLERLPLLHDDALLALETLPPHLLVIGGGYVGLEFAQMFRRFGSEVSLIQRDEQLAPREDPDVAEALREMLVEDGVKVYLEAKILDADRGRSSDGDSIALNLKTPTGPLRLLGSHLLVATGRRPNSDDLDLAAAGVETGADGYIRVNDRLETSAAGIYALGDVKGGPAFTHIAYDDARVLKTNLLGDGGASVADRPVPYTVFTDPQLGRIGLSEREARQSGRRVLRAHLQMAQVARAIETGEARGFVKALIDADSGEILGAAALGADGGELMAMLQLAMMGRIPYSRLHDAVFAHPTLAESLNALFAAPQPLPR

SEQ ID NO: 31266 - protein, 502 aa, Corynebacterium diphtheriae NCTC 13129
MANAGEASSATVKKAAKKTAAKKTARKVARKVTAVKVAATPTVTSSAESATAEPAIELPSSEPVKKAAKKTAKKTAKKVAKKAAKKTAKKTTAKKSTRKSAKKVAAPVPEEATQSSEESEDELESLAGEDSDEDYDPHLDEFDDDDEMHTDELGEDDSSDDDSDEDEGSSVWDEDESAALRQARKDAELSASADSVRAYLKQIGKVALLNAEQEVSLAKRIEAGLYATYRMEQMEEAFNNGDKEAKLTPAVKRDLRAIARDGRKAKNHLLEANLRLVVSLAKRYTGRGMAFLDLIQEGNLGLIRAVEKFDYTKGYKFSTYATWWIRQAITRAMADQARTIRIPVHMVEVINKLGRIQRELLQDLGREPTPQELAKEMDITEEKVLEIQQYAREPISLDQTIGDEGDSQLGDFIEDSEAVIAVDAVSFTLLQDQLQDVLHTLSEREAGVVKLRFGLTDGMPRTLDEIGQVYGVTRERIRQIESKTMSKLRHPSRSQVLRDYLD

SEQ ID NO: 31267 - protein, 262 aa, Buchnera aphidicola str. Sg (Schizaphis graminum)
MNFCSKKKILKQCFFEFLGTGLIIFLGISSLVVSKLTNFHFNHCEISCIWGLGVFISICFCSSVSGAHLNPAITIFLFLSSQFNKKKVIPYILSQISGTFFFTFLIYLIFNNLLNSFESKYNIVRGTKKSLELASLFCVFPKENYNFIHDFILEILIGIIFIIILMKLSEKNNLFKFYKFINPFLIGTLVIIINLFLTSYSNITLNPARDLGPRIFLSLIGWGKLAFTGDDNIIFPYFLIPTIAPIIGINLGGWIYILYIKK

SEQ ID NO: 31268 - protein, 221 aa, Xanthomonas oryzae pv. oryzae KACC10331
MRSCTMLGIGAFKQRIPRPGEALPGREQALPLHNTHLINGHPLRGEFTGLAQVQFGLGCFWGAERKFWKVPGVYTTAAGYAGGQTPNATYSEVCSGQTGHTEAVLVVFDEQAVSFEHLLRTFWESHDPTQGMQQGNDVGTQYRSAIYCTTQAQYAAALASRDAYQQQLTAAGYGAITTEIGFPAPTFYYAEDDHQQYLAKHPNGYCGLGGTGVSCPIGLDA

SEQ ID NO: 31269 - protein, 419 aa, Mesorhizobium loti
MDIDIFEAYESNVRRYGRSFPTVFTKSLGATIWDESGKPYIDFIVGSGALNYGHNNQDIMAPAIQYLANQNIVLSLDMYTTAKRDFIEVFVNSILKPRGLSYKIQFPGPTGTNANEAALALARKYTGRSSVMAFTNSYHGMSLGSLAVSGSASTRQLGGVARHDVIRVPYENYPNQTFDSASYIDHVLGDPGSGIEKPAAIILEPIQAEGGMNTASAPWLAEIQRICRKHDVVFIVDDIQAGSGRTGDFFSFEFAKVEPDIVCLSKSLSGSGNPLSIVLIRPEMDIWKPGEHSGTFRGNNLAFVTSAAMCKMWSDRQFTKAVEGTAVKLQEHLDRLVAKFPKCIEQKRGRGLMAGLKCRSQAVVGRVHDVAFENGLLIESSGPNRDVIKVLPPITISDDELDHGIAILDQALQEKTNGD

SEQ ID NO: 31270 - protein, 601 aa, Piromyces sp. E2
MLSLRQETSKIVCQNILKNGISSRIGSASRSVLSRRNYAAKDIMFSEDGRAKLAKGVNTLAKAVSVTLGPKGRNVLIDNQYGLPKITKDGVTVAKSVALKDRFENLGARIVQDVAIKTNDYAGDGTTTATVLARAIFAEGLKNVQAGINPMDLRKGVQMAVDEVVKFLKENKREIKTKKEIAQVGTISANNDKHIGNMLAEAMEKVGKDGVITIQEGRTMKDELVVTKGMSFKRQGFISSYFITDIKKQKCEFKNPLILICDQRISAIQDVIPALEIAAENRRPILIVAEDIEGEALAACILNKIRGQVQVCCVRSPSFGDNRRETIKDLGILVKGNVFNNEVENSLDKVEIGMLGTCDTVTVTKDDTVFINGAGSKEEIEKRCNAIREAIATTDSEFEKKNLRERLAKLTGGVALAKVGGVSEVDVNEKIDRFVDALCATQAAVEEGIVPGGGTALLKASKVLEKLHADSFDVQLGIDIVKKAIKVPIQTIVNNAGGEGAVVAETIYNSYKVDGVKDSNVDKYEPFSYGYDAYNNEFCDLIAEGIIDPVKVVRSAIVDASGVASLLTTSECMIVDKPKKKTTPPPAAPGMGGMGGMGGMF

SEQ ID NO: 31271 - protein, 329 aa, Corynebacterium diphtheriae NCTC 13129
MTSPSDVEASTETVDRGSRRNQTNDNPSADLVRVYLNGIGKTALLNAEDEVELAQTIEVGLYAEYLLENSQEPLTRAMKRDLKVLVKEGRKARSHLLEANLRLVVSLAKRYTGRGMPLLDLIQEGNLGLIRAMEKFDYSKGFKFSTYATWWIRQAITRGMADQSRTIRLPVHLVEQVNKLSRIKREMYQQLGREATNEELAEESGIEESKIEMLLRQSRDPVSLDMPVGADEEAPLGDFIEDSEATDAESAVVASLRHSDIRTVLDTLEQREQDVIRLRYGLDDGVPRTLDQIGRQFGLSRERVRQIEREVMSKLRDGARAEKLRAYAQ

SEQ ID NO: 31272 - protein, 474 aa, Escherichia coli K12
MSRLVVVSNRIAPPDEHAASAGGLAVGILGALKAAGGLWFGWSGETGNEDQPLKKVKKGNITWASFNLSEQDLDEYYNQFSNAVLWPAFHYRLDLVQFQRPAWDGYLRVNALLADKLLPLLQDDDIIWIHDYHLLPFAHELRKRGVNNRIGFFLHIPFPTPEIFNALPTYDTLLEQLCDYDLLGFQTENDRLAFLDCLSNLTRVTTRSAKSHTAWGKAFRTEVYPIGIEPKEIAKQAAGPLPPKLAQLKAELKNVQNIFSVERLDYSKGLPERFLAYEALLEKYPQHHGKIRYTQIAPTSRGDVQAYQDIRHQLENEAGRINGKYGQLGWTPLYYLNQHFDRKLLMKIFRYSDVGLVTPLRDGMNLVAKEYVAAQDPANPGVLVLSQFAGAANELTSALIVNPYDRDEVAAALDRALTMSLAERISRHAEMLDVIVKNDINHWQECFISDLKQIVPRSAESQQRDKVATFPKLA

SEQ ID NO: 31273 - protein, 288 aa, Arabidopsis thaliana
MEVMRPSTSHVSGGNWLMEETKSGVAASGEGATWTAAENKAFENALAVYDDNTPDRWQKVAAVIPGKTVSDVIRQYNDLEADVSSIEAGLIPVPGYITSPPFTLDWAGGGGGCNGFKPGHQVCNKRSQAGRSPELERKKGVPWTEEEHKLFLMGLKKYGKGDWRNISRNFVITRTPTQVASHAQKYFIRQLSGGKDKRRASIHDITTVNLEEEASLETNKSSIVVGDQRSRLTAFPWNQTDNNGTQADAFNITIGNAISGVHSYGQVMIGGYNNADSCYDAQNTMFQL

SEQ ID NO: 31274 - protein, 227 aa, Arabidopsis thaliana
  misc_feature (81)..(81): Xaa can be any naturally occurring amino acid
  misc_feature (105)..(105): Xaa can be any naturally occurring amino acid
  misc_feature (126)..(126): Xaa can be any naturally occurring amino acid
  unsure (1)..(227): unsure at all Xaa locations
MQIFVKTLTGKTITLEVESSDTIDNVKAKIQDKEGIPPDQQRLIFAGKQLEDGRTLADYNIQKESTLHLVLRLRGGMQIFXVKTLTGKTITFGGLRALTLIDNVXAKIQDKEGIPPDQQILIFAGXQLEDGRTLADYDIHKESTLHLVLRLRGGMQIFVKTLTGKTITLEVESTDTIDNVKAKIRDKEGIPSDQQRLIFAGKQLEDGRTLADYKIQKESTLHLVLRL

SEQ ID NO: 31275 - protein, 476 aa, Streptomyces bikiniensis
MPESRPAPEPTKTEDGTDARPDTPARPGDTHPVDQMLPPLKLFSAGLQHVAAMYAGVVAPPLVVGIGVGLSTADIAFLMSASLFTSGIATLLQTLGFWKVGARLPFVNGVSFAGVAPMLAIAKAEGPDDALPVIYGAVIVAGVFGFLLAPFFCKLIRFFPPVVTGTVITLIGVSLLPVAFNWAQGGNAQAPDYGSLTYIGLATATLLITVVLRRVLTGFLKQISILLGLVAGTLLSLPLGVADFSAVGDADVIGLPTPFHFGAPQFAAAAIISMCIVMLVSMTESTADVLALGEIVERPADEKTLAAALRADGLGTALSPLFNGFAASAFAQNVGLVAITKVRSRFVVAAAGGILLLLGLCPLLASVVALIPQPVLGGVGIALFGTVAASGIQTLAGAALERGDNVLIVAISLGAGIIPIAAPDFYHAFPEGARIVLDSGISTGCVVAVLLNLAFNHLGRRTDPAPETLPAPAAHH

SEQ ID NO: 31276 - protein, 584 aa, Kluyveromyces lactis NRRL Y-1140
MKEDEYDMSKMDNLLSPSSGDLEMKFSDGIMSKETEIDLDKKEDKNKNIVRRMIDSFKPPLDGSYHSDNLKRKLKSRHLIMIAIGGSIGTGLFVGSGKALATGGPLAMIIGWSIAGSQMVGTIHGLGEITMRFPVVGAFANYSTRLLDPSISFMVSSIYICQWYFVLPIELIASAMTVQFWTTKVDPVVWVAIFYVIVVSVNLFGVKVFGEAEFAFSLVKVITIIGFIILSIILICGGGPDHRFIGTEYWHHPGALANGFKGVASVFVTASYSLGGSEMVCLCSAETDPKELPHAIKQVFWRIVFFFLVSLTLVGFLVPYTNENLLGGSSVNNSPFVIAIKLSGIRVLPSIINAVILISILSVGNSCIFASSRTLCSMAHQGLIPRVFGYVDRAGRPLVGIIVNSLFGLLAFLVKSASMGVVFDWLMAIAGLATCVVWLSINISHIRFRLAMKAQNRSLDELEFKSSVGVYGSIYSATVNILILIAQFYISLWPVGGWTSSQQRTESFFKNYLCALVLVFVFVTHKIYFKCSTGKWFDFKPLAEIDLETDRKNIDIEIVKQEVREREMYLASKPWYIRFYNFWC

SEQ ID NO: 31277 - protein, 478 aa, Saccharomyces cerevisiae
TINKSHDVVIIGGGPAGYVAAIKAAQLGFNTACVEKRGKLGGTCLNVGCIPSKALLNNSHLFHQMHTEAQKRGIDVNGDIKINVANFQKAKDDAVKQLTGGIELLFKKNKVTYYKGNGSFEDETKIRVTPVDGLEGTVKEDHILDVKNIIVATGSEVTPFPGIEIDEEKIVSSTGALSLKEIPKRLTIIGGGIIGLEMGSVYSRLGSKVTVVEFQPQIGASMDGEVAKATQKFLKKQGLDFKLSTKVISAKRNDDKNVVEIVVEDTKTNKQENLEAEVLLVAVGRRPYIAGLGAEKIGLEVDKRGRLVIDDQFNSKFPHIKVVGDVTFGPMLAHKAEEEGIAAVEMLKTGHGHVNYNNIPSVMYSHPEVAWVGKTEEQLKEAGIDYKIGKFPFAANSRAKTNQDTEGFVKILIDSKTERILGAHIIGPNAGEMIAEAGLALEYGASAEDVARVCHAHPTLSEAFKEANMAAYDKAIHC

SEQ ID NO: 31278 - protein, 358 aa, Persea americana
  misc_feature (94)..(94): Xaa can be any naturally occurring amino acid
  unsure (1)..(358): unsure at all Xaa locations
MSAFCGKYQDELIANAAYIGTPGKGILAADESTGTIGKRLASINVENVESNRQALRELLFCTPGALECLSGVILFEETLYQKTASGKPFVDVLXERGVLPGIKVDKGTVELAGTNGENTTQGLDGLAQRCQQYYSAGARFAKWRAVLKISPNEPSQLAINENANGLARYAIICQENGLVPIVEPEILVDGSHDIDRCADVTERVLAACYKALNDHHVLLEGTLLKPNMVTPGSDAKKVTPEVIAEYTVRALQRTTPAAVPAIVFLSGGQSEEEATLNLNAMNKLKGKKPWTLSFSFGRALQQSTLKTWAGKEENVKKAQSAFLSRCKANSEATLGTYKGDAAKGEGVSESLHVKDYKY

SEQ ID NO: 31279 - protein, 511 aa, Agrobacterium tumefaciens str. C58
MSKSVSTSTDKIIVDRSKKHRNKAVFDTVKTTRERLQQGAGGNEAYEREMLTMHIAEALQGAMIMPLFIVLASIIGLYITGDISLIIWSLIALSFHAMSLVLAKRAAKQAITDDNLQHWKNLFLGMQILIGCAWAMFALAEPVRNDPTLVLFFKGSTLLIALSLTAMANFMLRRATFMTFLPVLAALCITSAISRDPFDVGLALMFGMAILFCHRITSRLYQTSIKLLSSQTEKDDLIAELEVANSVSDEARRRAEEANLAKSRFLASMSHELRTPLNAILGFSEVMSSEVLGPLNNPLYKEYSGDIHRSGQHLLDLINEILDLSRIEAGRYDLNEESISMLEIAEDCIGMIQLRARAKNIRISQQFEASLPQVWADEKSIRQVILNLLSNAVKFTPQGGEILVKAGWTAGGGQYVSIRDNGPGIPEDEIPVVLSAFGQGSIAIKSAEQGTGLGLPIVQAILAKHDGQFILKSKLREGTEGIAILPAKRVLQSLPAVEETHAIQPRRRSFA

SEQ ID NO: 31280 - protein, 472 aa, Podospora anserina
MAPAMRLTSSALRASLKASSFATKQTAFTAARCYSSKTQTLKERFAELLPEKIEEIKALRKEHGSKVVDKVTLDQVYGGARGIKCLVWEGSVLDAEEGIRFRGKTIPECQQVLPKAPGGSEPLPEGLFWLLLTGEVPTEQQVRDLSADWAARAEIPKFVEELIDRCPSDLHPMAQFSMAVTALEQTSSFARAYAKGINKKEYWGYTFEDSMDLIAKLPTIAARIYQNVFKGGKVAPVQKDKDYSFNFANQLGFGNNADFIELMRLYLTIHTDHEGGNVSAHTTHLVGSALSSPFLSLAAGLNGLAGPLHGLANQEVLNWLTEMKKVIGDDISDESITKYLWDTLNSGRVVPGYGHAVLRKTDPRYSAQREFAQKHMSEDPMFKLVSQVYKIAPKVLTEHGKTKNPYPNVDAHSGVLLQYYGLTEANYYTVLFGVSRAIGVLPQLIIDRAVGAPIERPKSFSTEKWIEICKKL

SEQ ID NO: 31281 - protein, 268 aa, Yersinia pestis biovar Medievalis str. 91001
MERYQQLFKQLAAKKEGAFVPFVQLGDPSPAMSLNIIDTLIAAGADALELGIPFSDPLADGPTIQNAALRAFAAGVTPGICFEILAEIRQKHPTIPIGLLMYANLVFHNGIDHFYQRCAEVGVDSVLIADVPFEESAPFRAAALRHGIAPIFICPPNADDDLLREIASHGRGYTYLLSRAGVTGAENHGQLPLNHLVDKLREYNAAPALQGFGISEPAQVKASLAAGAAGAISGSAIVKIIEKNVAQPVEMLVQLTRFVTEMKAATRS

SEQ ID NO: 31282 - protein, 153 aa, Mesorhizobium loti
MRDNTDNVYLFNDKLYLINPHNVGALDTPNAAGEVGAVACGDGLKLIMGFDPKTETITAATFQTFGRGSAITASSTFTEFIVGKTIDEALQITDQDMADFLGALPPHTTYSSLDRLILERGLRLMSEFFRAVRQAFEETPGFSRLVVVKASSP

SEQ ID NO: 31283 - protein, 206 aa, Emericella nidulans
MATNITHHAGLTRNERNQLRKQKGLTIWLTGLSASGKSTIAVELEHQLLQRGLHAYRLDGDNVRFGLNKDLGFSDADRNENIRRIAEVAKLFADSSSIAITSFISPFRADRDTARKLHEVPTPNDSTGLPFVEVFVDVPIEVAEKRDPKGLYKKAREGIIKEFTGISSPYEAPENPEVHVKNVDLPIQEAVKQIIDYLDSKKLLDA

SEQ ID NO: 31284 - protein, 181 aa, Zygnema circumcarinatum
MIKGLQNYSQQALRTARYIGQGFMVTLDHMNRTASTIQYPYEKLIPSERFRGRIHFEFDKCIACEVCVRVCPINLPVVDWEFQKSMKKKQLKSYSIDFGVCIFCGNCVEYCPTNCLSMTEEYELSAYDRHELNYDHVALGRLPFPAAKDPMVQPVYGIGYLEKGIVERTKGSKTITTLSTN

SEQ ID NO: 31285 - protein, 481 aa, Buchnera aphidicola str. Sg (Schizaphis graminum)
MLNRVRRTKIVATLGPSTDKANNLEKIILSGANVLRLNFSHGSSEEHKKRAKKAKEIMFKLNCHIALLGDLQGPKIRISKFKKNSIFLKVNDVFILDANLNEKNGNNERVGIDYKKLPNDLNVNDILLLDDGRIQLKVIKIEKCAIFTKVIIGGILSNNKGINKLGGGLSADALTEKDKKDIILASEIDVDYLAVSFPRCADDLIKARELLKKSGSNAQIIAKIERAEAVFDQNAIENIILSSDAIMIARGDLGVEIGDAELVGIQKKLIRTARKLNKVAITATQMMESMILNPLPTRAEVMDVANAVLDGSDAVMLSAETASGKYPSETVISMAKVCKGAEKVPSINVSRHRLNVEFQSIEEAIAMSSMYAANHLKGITAIITMTESGKTALMTSRITSGLPIFALSKHKKTLNLTALYRGVIPIYFDSDKDGVEAANEAIILLCKKKFLFNNDLVIVTQGDIMGKIGKTNTSRILRVTY

SEQ ID NO: 31286 - protein, 185 aa, Triticum aestivum
  misc_feature (152)..(153): Xaa can be any naturally occurring amino acid
  misc_feature (172)..(173): Xaa can be any naturally occurring amino acid
  misc_feature (177)..(177): Xaa can be any naturally occurring amino acid
  misc_feature (182)..(183): Xaa can be any naturally occurring amino acid
  unsure (1)..(185): unsure at all Xaa locations
MSSIGMMEARMPPGFRFHPRDEELVLDYLLHKLTGRRAYGGVDIVDVDLNKCEPWDLPEAACVGGREWYFFSLRDRKYATGQRTNRATRSGYWKATGKDRAILAHGAGDALVGMRKTLVFYQGRAPKGTRTEWVMHEFRLEEERHRHHQQQXXGAATAEARCQLKEDWVLCXXFYKXRTTSXXPP

SEQ ID NO: 31287 - protein, 450 aa, Bordetella pertussis Tohama I
MAFDFDLYVIGAGSGGVRAARFAAGYGARVAVAESRYLGGTCVNVGCVPKKLLVYGAHFHEDFEQAAGFGWNPGRPEFDWPTLIANKNREIERLNGIYRNLLVNSGVALHEGHARIVDPHTVEINGQRHSAQHILVATGGWPFVPDIPGKEHAITSNDAFFLPELPRRVLVVGGGYIAVEFASIFDGLGAQTVQVYRRELFLRGFDGSVREHLRDELVKKGLDLRFNTDVERIDKRADGVLAVTLSDGSVLETDCVFYATGRRAMLDDLGLENTGVRLAESGYIEVDDEYRTSEPSILAIGDVIGRVPLTPVALAEGMAVARRLFRPQEYRKVDYDLIPTAVFSLPNIGTVGLTTEQALERGFRVTRYESRFRPMKLTLTQSQEKTLMKLVVDADSQKVLGCHMVGPDAGEIVQGLAVALKAGATKQVFDDTIGIHPTAAEEFVTMRTAT

SEQ ID NO: 31288 - protein, 545 aa, Idiomarina loihiensis L2TR
MATNYIFVTGGVVSSLGKGIAAASLAAILEARGLNVTIMKLDPYINVDPGTMSPIQHGEVFVTVDGAETDLDLGHYERFIRTRMTSSNNFTTGRVYEDIIRRERKGEFLGATIQVIPHITNEIKRRVIEGSKGFDIAIIEIGGTVGDIESQPFLEAIRQLGTEIGRDHTLFMHLTLVPFLGAAGEVKTKPTQHSVKELRSIGIQPDVLVCRSDRSLPATERSKIALFTNVEERAVIGLRDVDSIYKIPSMLKAQSLDDIVTKRFNLDCPEADLHEWEEVLYQESNPNGEVTVGFVGKYVELPDAYKSVNEALAHAGLKNRLTVNIRYIDSQDLETKGTSKLEDVDAILVPGGFGDRGIEGKLIAAKYARENNIPYLGICLGMQVAMIEFARNVAGLTGANSTEFDENCSDPVVGLITEWMDASGQKELRDKHSDLGGTMRLGSQECHLEKGSKALKMYGKETIEERHRHRYEVNNHYIEPLEKAGLKITGYSHDKQLVEILENPKHRWFVAVQFHPEFTSTPRDGHPLFKGFIEAAGEFHKERLG

SEQ ID NO: 31289 - protein, 612 aa, Streptomyces bikiniensis
MSQGPALLPRATDHASPTPPHPVDEILPARRMLPAALQHVASMYAGLTAPPLIISSALGLTPAQLSALLAAALLIAGLGTIAQTLGVYGVGAGLPLVNGVSFAVVSPALATAATQGRDGALPAIFGATLVAGLLCLLLAPVFCRLVRFFPPVVSGCVITLVGISLLPVAGTWARGGDAEAAGFGSPADLALAATTLVITLTVHRMLSGRFLGRVAILIGMLAGTLIAIPLGKVDLDPLAQAPLFALPTPFGFGTPQFVPTVIATAAVVMIVSMMESTAALLALGAVAERPVRDRTIAGSLRALGLATVLGGVLGSFTSTSYAQNVGLVSLSRIRSRYVVTLCGAVLVLMGFVPVLGSFVALVPLPVLGGAGVVFFGSVAVTGIRTLAKAALGTGHNAVIVSVTLAFGLFPVLDPDFYARLPAPVATVLGSGITAGCLVAVLLNYLLNHLGRGTEADPDAISAEQVTALDTADTVLGPKRSSDWTPFQPSGSPSGTPDHGRHTRGTARPAPAWPYVTGPVDPTDTGRHHRPHEVPAPPHRPDEVPPPLHPSAAHEGEPPPAVTENAVFPGPLHPLHPLHPRPTGRPDRPRQRHSAEADPWQHPQTPSASGDSQ

SEQ ID NO: 31290 - protein, 198 aa, Arabidopsis thaliana
MKPTNSSICARTGLRGCAEGIEKYNEKVKNQIQALVRVIKVARTYRDDNVPSLIEQGLYLGSVAAASNKNVLKSYNVTHILTVASSLRPAHPDDFVYKVVRVVDKEDTNLEMYFDECVDFIDEAKRQGGSVLVHCFVGKSRSVTIVVAYLMKKHGMTLAQALQHVKSKRPVASPNAGFIRQLQDLEKSMQVSDQFFSF

SEQ ID NO: 31291 - protein, 551 aa, Sinorhizobium meliloti
MTMNETTSSLLEPDRDWWRGAVIYQIYPRSFQDTNGDGIGDLQGITARLPHIAGLGADAIWISPFFTSPMRDFGYDVSNYVDVDPIFGTLEDFDALIAEAHRLGLRVMIDLVLSHTSDRHPWFVESRSSRSNAKADWYVWADSKPDGTPPNNWLSIFGGSAWQWDPTRLQYYLHNFLTSQPDLNLHNPQVQEALLAVERFWLERGVDGFRLDTINFYFHDRELRDNPALVPERRNASTAPAVNPYNYQEHIYDKNRPENLEFLKRFRAVMDEFPAIAAVGEVGDSQRGLEIAGEYTSGGDKVHMCYAFEFLAPDRLTPQRVAEVLRDFHRAAPEGWACWAFSNHDVVRHVSRWADGVTDHDAHAKLLASLLMSLRGTVCIYQGEELALAEAELDYEDLQDPYGIQFWPDFKGRDGCRTPMVWESLPDGGFSSATPWLPISQSHIPRAVAVQEGDPASVLHHYRRFLAFRKANPALAKGEIEFVETRGSLLGFLRSHGNEKVFCLFNMSDEAATKELPMKRLEPLEGHGFVSEILDHEVKLPAWGAFFARLA

SEQ ID NO: 31292 - protein, 773 aa, Candida glabrata CBS138
MFGGEYDHAYDANNGQRFQPPVLDAMEFEKPGSPSVGDHFLRQQISNQSLHDQYSSHMEQQQQQQQQQHNAAYGAGFTDIPQLHPSTPPHGLVQKISNGNFHPAMNQGGNIPSTSNMNNMFNTPPPTMGNNPLYSHDNNSTNLLQDNLNQARSQFSPDRYSVDSDFNNGAGNHVMANGNYNINGSQSSSPYHQPQTFYTNSNLSSGQLSAHRSSPQRQPAQPLQQTTFTQLPQPSLPPQQQQQQQQQQQQQQQQQPKFQSMVPPQQTQLQQQQQQELQNAGSYMYFERRPDLLSKSTQDKAAAVKLKVENYYQQSVKYAIERNERRVELETELGSHNWSEERNARQLASLGKKESQFLRLRRTRLSLEDFHTVQVIGKGAFGEVRLVQKKDTGKIYAMKTLLKSEMYKKDQLAHVKAERDVLAGTDSPWIVSLYYSFQDAQYLYLIMEFLPGGDLMTMLIRWQLFTEDVTRFYMAECILAIETIHKLGFIHRDIKPDNILIDIRGHIKLSDFGLSTGFHKTHDSNYYKKLLQQDEATTKNGAPNDAGDGSNNRQTMIVDSINLTMSNRQQIQTWRKSRRLMAYSTVGTPDYIAPEIFLYQGYGQDCDWWSLGAIMYECLIGWPPFCSETPQETYRKIMNFEQTLQFPEDVHISYEAEDLIRRLLTHSNQRLGRQGGADEIKSHPFFRGVDWNTIRQVEAPYIPKLSSITDTRFFPTDELENVPDSPAMAQAAKQREQMMKNGVNPNQNQVKEDLPFIGYTYSRFDYLTRKNAL

SEQ ID NO: 31293 - protein, 305 aa, Leuconostoc mesenteroides subsp. mesenteroides ATCC 8293
MKKPMEQLKMKQMPYLIGISLNMIFVLSELVFAKLAHSTALFADAFHNLSDVLALMIAWLAVVVFGLQATKRHTYGWHNMSILASVFNTILLIFAVITIFYESIRNLILPENTVTTGWLVMVVAAVGIVINFATAMLFKASGVPDEHGHHHEQDLNAKTAYIHLLADAGVSVGVIIAGLLIQVTGWHVIDPIVSMIIGVIIAVTSWPVMKSTFNLALNGVPDNVNESDVLRYLSTHEGVEQLHDLHIWPLSTTEAAMTVHLSVKKNVDEQELLANISSDLREKYDISHVTIQIETNEFDQSCNVI

SEQ ID NO: 31294 - protein, 296 aa, Petroselinum crispum
ERALDGQIKEIVYKGTHDHPKPQPSRRFTAGALISIQEEKAVNASSLTGQGDTTYSQTLSADQNGTPLSSPRGVNADNVDGASPLLNSVTDDIDNDDQFMKRRRTDVGSIDISPVVKPIREPRVVVQTLSEVDILDDGYRWRKYGQKVVRGNPNPRSYYKCTNAGCPVRKHVERASHDPKAVITTYEGKHNHDVPAAKTNSHDVSGSAPISGMSRVRPEDCSPISLDLGVGMNYGVENNGYEQQTTLGSEHVRSQVQASTAPTCYGVANGGIILYGSRDNHVENHNFESPPLGQFS

SEQ ID NO: 31295 - protein, 1767 aa, Shewanella sp. MR-7
MDKSKLRTFRSKILSHIALPLILIMAAVYGINAWFNYLSAESKLYDSLAQASNHSAYRLQLLLEHAQINTQGMADFIGFITNKEDIRNSEKIKRILTNRLERNPDFYGSAVAFKPYTFANKKLFSPYVFRDGDDFHYLDIGAEGYDYTDGSWDWWSKAINQAGGYWSKVYFDEGAGNTLMVTYSVPFGPENAYFGVATVDLALNQLPEQLGVSPSQLVVLDDQGRLIFHSDKEKVLAMTSAEWLDRNTRQNKDFWALLDKGVNGQARFVDDKNVVYLASVASVAKHKWRVIVMVPEQQLLSTLLDDMASVVLNLSLLTLLLILTCYIAAKRLTRPLEMLESGILAFGQGKTQQLAIPNGAVSEIVTLSSTFNQMAELLAEREQAILDSRGNRFARLIDGMSDKSFYCSLDASGQLAQVSEGVTKVLGMSPELLKRKYQRLFTANPLNEKNWEYTDLALKGQNVPSHQVELLDAGGHPRRLDLFMQPLVSDTGELMSVEMLFTDVTEQFSAAAWSNAVLEAAPEAMLIVDQMGLIVFSNTRCQILFGYEASAMLGLQVESLLPEALRSNHARDRLQFLREGRDRPMANAKHVRALKADGGEFVAEIALSILPADNEGRRQVAASIRDMTQKLAVEQKIRDSELRFRGLVTNIPGAVYRTRIGDVWVMEYVSENIADITGYAASQFIENRQRTFESLILEEDRALCHQHIDRALAQQETFEVEYRIRHRDGSVRWVHEKGKASYTDEGFPLWFDGSIDDITESKLALVELESSRQQLTNITESIPCTVYQLRWISPVDRTFTFLSGAAYHMLGLHRDDLLKDFNIIAERIFDEERSEVVRALAGKSEDKLQWVREFRYRHPNGSTRWMEAGASGHICDDGAIIWNGYVMDITERKAMEEELAVSEAHFKALFDGSTIGIVNIDAKGVILDCNDQYCEDMGQSRESLCGMSIFEVLSLQDKETAKAQFKELAEGRVDHYRGERSFIRPNGEPLWMTVNVSALFDSQKRFESAVVSMVDMTELKLLSDELLVAKEEADAASKAKGDFLANMSHEIRTPMNAIIGMSQLCLQTELDKKQKNYVEKIERASKSLLSIINDILDFSKIEAGKLDIESVPFQLDTMLEDLSDMFSEKAAHKQLELLFAVAPNVPRHLFGDSLRLGQVLINLMNNAIKFTERGEVLLSLNLVEQQNDDVVLRFSVRDSGIGLTAEQQAKLFKSFSQADTSTTRKYGGTGLGLAICKQLVELMGGTIGVESQFGHGSTFYFTVKLQISSGQKLTVAQELEGMSILVADDNATARDIMRTTLESMGFRVDTVRSGEEAVTRCSQQEYAVALIDWKMPNLDGIETAKQIKQLAKNAPRILMVSAHATQEFLSQIEALGLAGYISKPISASRLLDGIMNSLGRAGVLPVRRNSESIDPKLLLPLKGKRILLVEDNEMNLEVATEFLEQVGIILSIATNGQIALDKLAQQSFDLVLMDCQMPVMDGYQATQAIRKRPELAELPVIAMTANAMAGDKEMCLKAGMNDHIAKPIEVNLLYQTLLKYLGGGVLPTEDVSLNQLVEIPVKPINLDSKSVVKWPEHPELDIDRGLQLVQNSTRLYQRIFDRFVTSQRNVVELINKALANDKRDDAVRMAHTLKGLAGNLSSSKLVELARQLELHLSEKTEYQTELDQIQVLVASICEAIERVKPQFEEPTQSATEHLSQEALVSALNQLRQSLEDADSDAVTQIDALKPQVSSKLWQQLSPALTMINQYQFDEAVDLIDEVLAELA

SEQ ID NO: 31296 - protein, 478 aa, ASPERGILLUS NIDULANS FGSC A4
MNENDENGPSTRLTRAKAAALTTDAPAANGALKKPLQTKKAATGANGTQRKRAALGDVSNVGKADNGETKDAKKATSKTGLTSKATMQSGGVQKLSRSNLSRTAVGAKDNNVKKPATEAKRPGSGSGMGSAMKRTSSQKSLQEKTIQQEEPPRKKVDIEKVVEKQAEAVSVKGDVKAGAQTEELEKPQDFVADLDTEDLDDPLMAAEYVVEIFDYLRELEMETLPNPDYIDHQPDLEWKMRGILVDWLIEVHTRFRLLPETLFLAVNIIDRFLSAEVVALDRLQLVGVAAMFIASKYEEVLSPHVANFSHVADETFSDKEILDAERHILATLEYNMSYPNPMNFLRRISKADNYDIQTRTLGKYLMEISLLDHRFLGYPQSQIGAAAMYLARLILDRGPWDATLAHYAGYTEEEIDEVFRLMVDYLHRPVCHEAFFKKYASKKFLKASIMTRQWAKKYHHLYIDSALTEPYNSIKDNE

SEQ ID NO: 31297 - protein, 462 aa, Chlamydophila caviae GPIC
MSTDFDCVVIGAGPGGYVAAITAAQQGLKTALIEEQQAGGTCLNRGCIPSKALLVGAGIVSQIKHAKQFGIHIDGYSVDYPTMVQRKNTVINGIRQGLEGLIRSNKITVLNGRGSLISSTEVRVKGQDTTVIKAKHIIIATGSESRPFPGVPFSSRVLCSTGILNLTELPKKLAIIGGGVIGCEFASLFNTLGVEVTIIEVADQILSVNNADISKTMLDKFSQRGIQVITRASINQLEDLGDRVKITVNDQPQEYEYVLVAIGRQFNTTDIGLDNAGVIRDERGVIPVDEMMRTNVANIFAIGDITGKWLLAHVASHQGIVAGRNAAGHNEIMDYSAVPAVIFTFPEVAMVGLSLEAAQKQNIPAKLTKFPFKAIGKAVAMAEADGFAAIISHETTQQILGAYVVGPHAASLIAEMTLAVRNELTLPCIYETIHAHPTLAEIWSESALLATNHPLHLPPPRL

SEQ ID NO: 31298 - protein, 551 aa, Streptococcus agalactiae A909
MTKKIFRTTLSASLGIVLVTILMIMGFLYNYFNHIQREQLRTQTALASQGISFEGKDYFENLKTSNVRITWVDNKGQVLYDTQSDAKHMKNHANRQEIKEAIKSGYGESTRWSATLTEKSIYAAQRLNNGTIVRLSVAQQTIFYLLLGMMSPLAIIILLAIILSVLIARYIAKKVSEPLNNIDLDHPLSNDSYEEITPLLRRLDSHQAKIQHQKLLLQKRQKEFDTIISKIKEGMILLDDQARIVSINAEALKLFQINDDWHGRFMMEVSRDLTLKDLIDQGLKGKKKEANIGIENNHYRVLVRPTTDNNRVTGLVVLLFDVTDQLQMEQLQREFTANVSHELKTPLHVISGYSELLANQMVPNEEVPQFAAKIHKESERLVKLVEDIINLSHLDEQEKLPQETVNLYDLTQKVLEGLQAKADKKHIQINFNGEEAILRGNPVLLNSLVYNLCDNAITYNHEKGQVNVTLKNSPDTITLEVSDTGLGIAEKDKKRIFERFYRVDKSRSKIVGGTGLGLSIVKSALDFHNGSIKVDSHLGQGTTMTVLLHKQ

SEQ ID NO: 31299 - protein, 572 aa, Carboxydothermus hydrogenoformans Z-2901
MDVNVLKHDLIIIGSGLAGLRAALEAAFLSKGELDIALVSKTQLLRPHSVCAEGGTGAALRIDEGDSPELHAWDTVKGSDFLADQDAVWRFVELIPQEILKLDHWGIPWARRENGKIDQRPFGGHSFPRAVFAADKTGFFEVHTMYDNLQRFSNVHRYDEVMVTSLLIEDGEYRGFTAIDLTRGEFLVFQSKALIIATGGACRIYGFTTYSYTVTGDGMAIAYRAGLPLKDMEFVQFHPTGLVPSGILITEAARGEGGYLINNLGERFMGKYAEKMMELAPRDIVSRSEMQEIEAGRGFTREDGLDYVLLDLTHLGREKINERLPLIREVAIKFAGIDPIEKPLPVRPVAHYSMGGIHVDIDGQTPVPGVYAAGEVACVSIHGANRLGTNSTAECLVWGGITGGKAYEYVKKQKAFPKLPTEMVLREEARINEIFNKPNKESLYTIRKELREIMDKNVGVYRDEKGLTAALNKVRELIQRFKDCGLEDKSKYYNTDLVSYLEMENMLTLAEIIVLGALERKESRGGHARRDYPNRDDENWLKHTLAYYTPEGPRLEYLPVKITTWKPVERKY

SEQ ID NO: 31300 - protein, 371 aa, Idiomarina loihiensis L2TR
MKAPSWRRAVLKVGSALIAPDETGVSTKYLLPIARFINECRERGQEVVLVSSGSVAAGRKHFNFEHKKVPVAVRKAMSAVGQNEMMGYWSRFFDSPCAQLLMTHSDLRDRARYVSIKNTLNRLLEHDILPVVNENDALATDEMKVGDNDNLSAMIATLVDADALFICSDIDGLYDSDPNLNPDAKKIPVVEQIDESIYSLAGGSVSSVGTGGMRTKVEAAEKATSHGIDTYIVNGRKGETFESLLQGDIPGTLFRRQSDPISNKKHWLRHTLVAQGEILVDEGAEKALIENGASLLSSGIVDVQGDFDRGDAVLVRSANDTDAIAKGICQYSAHELMHIKGQQTEDIAEKFGYSPITEVIHRDDLMILEDS

SEQ ID NO: 31301 - protein, 417 aa, Idiomarina loihiensis L2TR
MSQQLAKEISQRAAKAARAVATLSETDKNAVLQKMADAIRARQDKIIEVNKKDLATGKEKGLSDAMMDRLELTPERVEGMASAIEEIIALKDPVGDSYVLDERPNGMKIEKMRIPLGVICMIYEARPNVTADAGALCFKSGNAVILRCGREAIESSKAIAEALHEALEASNLPKDVITVVPTPDRELMTELLQQKDYIDLVIPRGGEGLIHFVSDTSKIPVIQHYKGVCHLYVDKDADLDKALAILLNGKTQRTGVCNALEGLLVHQDVADKFLPMAAKALAEKDVTIHADKRSVSYFDGADEIADDAFGEEYLALEIAVRTVDNYEGAIEHIQEFGSGHTEVIITENDETAKRFIREVDSAVTMANVSSRFSDGGQLGLGAEIGISTSKLHAYGPMGLEALTTEKFVVTGNGQVRD

SEQ ID NO: 31302 - protein, 152 aa, Zea mays
  misc_feature (133)..(133): Xaa can be any naturally occurring amino acid
  unsure (1)..(152): unsure at all Xaa locations
MGSLQRQTSPDSDNDPRYAAVTDERKRKRMISNRESARRSRMRKQKQLGDLINEVTVLKNDNAKITEQVDAATRRYVEMESKNDVLRAQEVELKERLRSLNSVLEMVEEISGQALDIPEIQNPWQIPCPIMQXPIMVSADMFECIVLSVRVL

SEQ ID NO: 31303 - protein, 272 aa, Oryza sativa (japonica cultivar-group)
MSTAAAAAAAQSWCFATVTPRSRATVVASLASPSPSSSSSSSNSSNLPAPFRPRLIRNTPVFAAPVAPAAMDAAVDRLKDGFAKFKTEFYDKKPELFEPLKAGQAPKYMVFSCADSRVCPSVTMGLEPGEAFTVRNIANMVPAYCKIKHAGVGSAIEYAVCALKVELIVVIGHSRCGGIKALLSLKDGAPDSFHFVEDWVRTGFPAKKKVQTEHASLPFDDQCAILEKEAVNQSLENLKTYPFVKEGIANGTLKLVGGHYDFVSGNLDLWEP

SEQ ID NO: 31304 - protein, 426 aa, Neisseria gonorrhoeae FA 1090
MNRNEILFDRAKAIIPGGVNSPVRAFGSVGGVPRFIKKAEGAYVWDENGTRYTDYVGSWGPAIVGHAHPEVVEAVREAALGGLSFGAPTEGEIAIAEQIAEIMPSVERLRLVSSGTEATMTAIRLARGFTGRDKIIKFEGCYHGHSDSLLVKAGSGLLTFGNPSSAGVPADFTKHTLVLEYNNIAQLEEAFAQSGDEIACVIVEPFVGNMNLVRPTEAFVKALRGLTEKHGAVLIYDEVMTGFRVALGGAQSLHGITPDLTTMGKVIGGGMPLAAFGGRKDIMECISPLGGVYQAGTLSGNPIAVAAGLKTLEIIQREGFYENLTALTQRLANGIAAAKAHGIEFAADSVGGMFGLYFAAHVPRNYADMARSNIDAFKRFFHGMLDRGIAFGPSAYEAGFVSAAHTPELIDETVAVAVEVFKAMAA

SEQ ID NO: 31305 - protein, 373 aa, Staphylococcus aureus subsp. aureus COL
MGLKDQAVTWRRYFHQFPELSDKEFKTTQKIKDILTEHHIRILDLPLATGLVAEVGQGLSCIAVRADIDALPIQELVEQDFKSENEGVMHACGHDIHMASILATAVKLKEIEGTLTGRVKFIFQSAEELGHGAFKIIETHALKDVQAVLGFHNDPSRSVGTFAIKTGAITSAVDRFEFHIKGVGGHAAKPEQCNDPVIVLAQLINSIQSIVSRNLSAFDEAVVTIGQISCGNTWNVIADHAYVQGTVRSFDPVVRKLVETRLQDIADGLAQAYNMKINLNYTHLPGAVMNDEALTHKAIAVAQHVGYKVEMMEQPLTIGEDFSGYSQHFPSVFALIGSHSEYDLHHPQYKPDERILEKVPEYFVEFVKRLLHE

SEQ ID NO: 31306 - protein, 339 aa, Mesorhizobium loti MAFF303099
MRVYYDRDADLNLIKGKKVAIIGYGSQGRAHALNLKDSGAKEIAIGLKAGSATAKKVEADGLKVMSVADAAKWADLMMMATPDELQADIYKNEIAPNIRDGAAIAFAHGLNVHFGLIEPKSTVDVVMIAPKGPGHTVRGEYQKGGGVPCLVAVNQDASGNALDLALSYACGVGGGRSGIIETNFREECETDLFGEQVVLCGGLVELIRAGFETLVEAGYAPEMAYFECLHEVKLIVDLIYEGGIANMNYSISNTAEWGEYVSGPRIITAETKAEMKRVLKDIQTGKFTSEWMQEYRAGLSRFKGIRRMNDSHQIEEVGAKLRAMMPWISKNKLVDKAKN

SEQ ID NO: 31307 - protein, 497 aa, Micrococcus luteus
VPHATGSTRENGAPAVSDRESLTVGSEGPIVLHDVHLLETHQHFDRMNIPERRPHAKGSGAFGVFEVTEDVSSYTKALVFEPGVETEVLLRFSTVAGENGSPDTWRDTRGFALRFYTSEGNYDLVGNNTPIFFLRDPMKFTHFIRSQKRLPNSGLRDATMEWDFWTNNPESAHQVTYLMGPRGLPRTWREMDGYGSHTYLWVNAEGAKHWVKYHFISQEGVHNLSNDEATQIAGENADFHRQDLFEVIAKGVFPKWNLYIQAIPYSQGKTYRFNPFDLTKTISQANYPRIKVGVNTLNRNPKNFFAEIESAAFSPSNTVPGIGLSPDRMLLGRAFAYHDAQLYRVGAHVNQLPVNSPDDATHNYAFEGEMWEDHTGNRSTYVPNSDGNSWSNEVGPTNNGWEAVGVLTREAEALRANDNNFGEAGTLTREVFSNEERNNFVQTVAGALKGVRSNVEAEAFVYWKLVNATNGERIQNTVKRKSGNGIPGVEAGGEARM

SEQ ID NO: 31308 - protein, 232 aa, Sinorhizobium meliloti
MSANMHIFENPSALAEALADDVGARLAAAIAARGTASLAVSGGSTPKAFFRSLSRRELDWSKVTVTLVDERFVPPENDRSNHRLVADNLLKDGAAEARFVPLYQAAETAEAAAAIASGRTASLGAPLDVVVLGMGTDGHTASFFPGGTRLEEALDPTTPRGVITMEAEGAGEPRLTFTFSSLQDAGYLVLHIEGSGKKEVLAQAEASGDEAEMPIRAMLRRAASPLQIYWAP

SEQ ID NO: 31309 - protein, 330 aa, Brassica napus
MANSGEGKVVCVTGASGYIASWLVKSLLSRGYTVKASVRDPSDPKKTQHLLSLDGAKERLHLFKADLLEQGSFDSAIDGCEGVFHTASPFYHDVKDPQAELIDPAVKGTLNVLNSCTKASSVKRVVVTSSMAAVAYNGKPLTPDVTVDETWFSDPEVCKTSKMWYVLSKTLAEDAAWKFAKEKGLDIVTINPAMVIGPLLQPTLNTSAAAILNFINGAKTFSNSTFGWVNVKDVANAHIQAYEVPSANGRYCMVERVLHHSEIVNILRQLYPNLQLPESCADENPFVPTYEVSKEKIKSLGIDYIPFEVSIKETVESLKEKGFINVRASI

SEQ ID NO: 31310 - protein, 251 aa, Ralstonia eutropha JMP134
MRLQGKVAILTGAAGGIGRATALGFAREGASIVVTDINRDGAQEVADTINAAGGRAMALAHDVGCETQWTRVVDAAVEAFGTVDVLFNNAGIFVLKPLAETTLDEWNRLMAINVTGVFLGMKHVMPLMARAGKGSVINVSSVAGLVGSPRSTMYSASKGAVRAMTKGAALEYAAKGVRVNSIHPGLIDTAMADYASGTAGRSKQDLGQVMSPMGRLGTADEVGGLALFLASDESSYMNGAELVLDGGFTAA

SEQ ID NO: 31311 - protein, 269 aa, Agrobacterium tumefaciens str. C58
MQSQELERIARQIRLRDVQAVFEAGAGHVGGEMSAIDIMTALYFRVLRIWPNDPKNPARDRFVLSKGHTACALYVTLAKRGFIPEEEISTFLQPNSRLNGHPNCNKVPGVETNTGPLGHGLPVAVGMATAAKLSGEDYHTYVMTGDGEMQEGSNWEAIMSAAQFKLNNLTLVIDHNRFQQGAAIADTNDVAPLRPKLEAFGWEVTEINGNAMAEVVPALEHRGNRPHCIVAHTNKGHGISFMQDRVDWHHKVPSKEQYEIAVKELSEAL

SEQ ID NO: 31312 - protein, 253 aa, Ralstonia eutropha JMP134
MEYIDMKLKDKVAIVTGGASGIGEATVRLFASQGASVVIADRSALGEKLARELSESSLAAHYSEVDVSREDDTRRLIDDTVSRFGRLDIMVANAGIAHPSAPVEDVSVEQWQQMIDVNLTGVFLSNKLAIVQMKKQGTGGAIVNMASILGHVGMPGAASYNAAKGGVVNLTRSLGVSHAQDGIRVNAVCPGFVATPLIERATEEARARLVAAHPIGRLGHADEVAKAVLFLASDDASFIVGTSLMVDGGYCAQ

SEQ ID NO: 31313 - protein, 480 aa, Idiomarina loihiensis L2TR
MSSLTKKDCFIEGHWVPTDKRFSVTNPATGEVIAEVADADEDLTQRAINVAETALKSWRKKTARERAMLLRKWYEAMMDNKQALGELMSAEQGKPVAEAVGEVEYGASFVDWFAGEAERIDGDILPNADSSKRVMVTKEPVGVCAAITPWNFPNAMITRKIAPALAAGCTIVVKPPQLTPLSSLALAQLASEVGIPDGVINIIPTSDAKSVGKRLATSPQVRKLSFTGSTGVGKILMQQCSEHVTKLSLELGGNAPFLVFDDADIEQAAEQLIACKFRNAGQTCVSANRILVQQSVAEKFTDAVVSKVKALKVGPGTEENVDLGPLIDQDAVDKVQRLVLAAKSDGATIETGGSVMTELGDLFYAPTVITGVTEEMDISEEEIFGPVVAINTFETEEEGIEKANNTPFGLASYFAAKDTARIFRVSDALEYGMVGVNTGGISHAYNPFGGIKESGVGREGSKYGIDEYLELKTVTLGGLG

SEQ ID NO: 31314 - protein, 347 aa, Triticum aestivum
  misc_feature (180)..(180): Xaa can be any naturally occurring amino acid
  unsure (1)..(347): unsure at all Xaa locations
AYLGDTIEQVCTKKQAGTGPEFPGYRRPTRPPNSILGLSHGFLLGHLQSHGLDFPKNISVVAVCPKGMGPSVRRLYVQGKEVNGAGINASFAVHQDVDGRATDVALGWSVALGSPFTFATTLEQEYKSDIFGERGILLGAVHGIVEALFRRYTEQGMDEELAYKSTVEGITGIISFPPFXKGMLEVYNSLSEEGKKEFNKAYSASFYPCIDILYECYEDVASGSEIRSVVLAGRRFYDKEGLPAFPMGKIDQTRMWKVGEKVRSTRPDGDLGPLHPFTAGVYVALMMAQIEVLRKKGHSYSEIINESVIESVDSLNPFMHARGVAFMVDNCSTTARLGSRNWAPPCI

SEQ ID NO: 31315 - protein, 223 aa, Triticum aestivum
MAALLARQAALALRARQTARLGPSATAMQGHLRTYMDAGAPKRFKEDEEKEQLAKELAKDWSAVFERSINTLFLTEMVRGLMLTLKYFFERKVTINYPFEKGPLSPRFRGEHALRRYDTGEERCIACKLCEAICPAQAITIEAEEREDGSRRTTRYDIDMTKCIYCGFCQEACPVDAIVEGPNFEFSTETHEELLYDKEKLLENGDRWETEIAENLKSEALYR

SEQ ID NO: 31316 - protein, 476 aa, Burkholderia fungorum LB400
MSKEFDVVVIGAGPGGYIAAIRAAQLGKTVACIEKWKNPAGALKLGGTCLNVGCIPSKALLASSEEFENASHHLADHGISVENVKVDIAKMMARKEGIVEKMTKGIEFLFRKNKITWLKGHGKFTGKTDAGVQIEVSGEGETETVTAKNVIIATGSKARHLPNIPVDNRIVADNEGALSFESTPKKLAVIGAGVIGLELGSVWRRLGAEVTVLEALPEFLGAADQALAKEAAKQFKKQGLDIHVGVKVGEVKTTDSGVTIAYTDKDGNAQTLEADRLIVSIGRVPNTDNLGLEAIGLKANERGFIDVDEHCATAVPNVYAIGDVVRGPMLAHKAEDEGVLVAEIIDGQKPHIDYNCIPWVIYTEPEIAWVGKTEQQLKAEGREIKTGQFPFMANGRALGINKADGFVKMIADAKTDELLGVHIISANASDLIAEAVVAMEFKAASEDIGRICHPHPSLSEVMREAALAVDKRALNM

SEQ ID NO: 31317 - protein, 237 aa, Neurospora crassa
MATATESAPRNHLADKPENSMGGRNLSIITPTIQMSAPPGDPMDITSSNSNSSSNSNSSSINNNNATMAAPSNSDSLPPPKSPVEDTLNAQAAPNGRPQLSSANDQLSPDNIIMPAPAAAAPAVHQPKIVQTAFIHKLYNMLEDKSIQHLISWSPTSESFVMQPSQEFSKASSQYFKHTNISSFVRQLNMYGFHKGKESPDVAGYQQSLTWSKSERCLPPWSSRRYHLGVQAWQRQL

SEQ ID NO: 31318 - protein, 276 aa, Mesorhizobium chacoense
WGFDGSSTMQAEGRSSDCVLKPVALYPDPARTNGVLVMCEVMMPDGVTPHASNSRATILDDEGAWFGFEQEYFFYKDGRPLGFPESGYPAPQGPYYTGVGYKNVGDVARKIVEEHLDLCLAAGINHEGINAEVAKGQWEFQIFGKGSKRAADQIWMARYLLLRLTEKYGIDIEFHCKPLGDTDWNGSGMHANFSTAYMRETGGKEYFEALMAAFEKNRADHIAVYGPDNHMRLTGKHETQSIHTFSYGVADRGASIRVPHSFVNNGYKGYLEDRRP

SEQ ID NO: 31319 - protein, 198 aa, Brassica napus
  misc_feature (77)..(77): Xaa can be any naturally occurring amino acid
  unsure (1)..(198): unsure at all Xaa locations
MSASRFIKCVTVGDGAVGKTCLLISYTSNTFPTDYVPTVFDNFSANVVVNGATVNLGLWDTAGQEDYNRLRPLSYRXGADVFILAFSLISKASYENVSKKWIPELTHYAPGVPIVLVGTKLDLRDDKQFFVDHPGAVPITTSQGEELMKLIGAPSYIECSSKSQENVKGVFDAAIRVVLQPPKQKKKKSKAQKACSIL

SEQ ID NO: 31320 - protein, 276 aa, Mesorhizobium sp. ICMP 11708
WGFDGSSTMQAEGRSSDCVLKPVALYPDPARTNGILVMCEVMMPDGVTPHESNSRATILDDEDAWFGFEQEYFFYKDGRPLGFPESGYPAPQGPYYTGVGYKNVGDVARKIVEEHLDQCLAAGINHEGINAEVAKGQWEFQIFGKGSKKAADQIWMARYLLLRLTEAYGIDIEFHCKPLGDTDWNGSGMHCNFSTKFMREVGGKAYFEALMAQFDKNLMDHIAVYGPDNDKRLTGKHETAPWNKFSYGVADRGASIRVPHSFVKNDYKGYLEDRRP

SEQ ID NO: 31321 - protein, 149 aa, Quercus petraea
MAEQLMEEQIAEFKEAFSLFDKDGDGCITTKELGTVMRSLGQNPTEAELQDMINEVDADQNGTIDFSEFLNLMARKMKDTDSEEELREAFKVFDKDQNGFISAAELRHVMTNLGEKLTDEEVDEMIREADLDGDGQVNYEEFVRMMLAK

SEQ ID NO: 31322 - protein, 290 aa, Hordeum vulgare
MAKDIEAAPPGGEYAAKDYSDPPPAPLFDAEELTKWSLYRAVIAEFVATLLFLYITVATVIGYKHQADPAGPNAADAACSGVGILGIAWAFGGMIFVLVYCTAGVSGGHINPAVTFGLFLARKVSLVRAVLYIIAQCLGAICGVGLVKGFQSAFYVRYGGGANELSAGYSKGTGLAAEIIGTFVLVYTVFSATDPKRSARDSHVPVLAPLPIGFAVFMVHLATIPITGTGINPARSFGAAVIYNNEKAWDDHWMFWVGPFIGAAIAALYHQYVLRASATKFGSSASFGSR

SEQ ID NO: 31323 - protein, 276 aa, Mesorhizobium sp. ICMP 12685
WGFDGSSTMQAEGRSSDCVLKPVALYPDPARTNGILVMCEVMMPDGVTPHESNSRATILDDEGAWFGFEQEYFFYKDGRPLGFPESGYPAPQGPYYTGVGYKNVGDVARQIVEEHLDLCLAAGINHEGINAEVAKGQWEFQIFGKGSKRAADQIWMARYLLLRLTEKHGIDIEFHCKPLGDTDWNGSGMHCNFSTKFMREVGGKAYFEALMAQFDKNLMDHIAVYGPDNDKRLTGKHETAPWNRFSYGVADRGASIRVPHSFIKNDYKGYLEDRRP

SEQ ID NO: 31324 - protein, 763 aa, Glycine max
MASHIVGYPRMGPKRELKFALESFWDGKSSAEDLQKVSSDLRASIWKQMADAGIKYIPSNTFSHYDQVLDATATLGAVPPRYGWTGGEIGFDTYFSMARGNATVPAMEMTKWFDTNYHFIVPELGPDVNFTYASHKAVDEYKEAKALGVDTVPVLVGPVTYLLLSKPAKGVEKSFSLLSLLPKVLAVYKEVIADLKAAGASWIQFDEPTLVLDLESHKLQAFTDAYAELAPALSGLNVLVETYFADIPAEAYKTLTSLNGVTAYGFDLVRGTNTLDLIKGGFPSGKYLFAGVVDGRNIWANDLAASLTTLQGLEGIVGKDKLVVSTSSSLLHTAVDLVNETKLDDEIKSWLAFAAQKIVEVNALAKALSGHKDEAFFSGNAAALASRKSSPRVTNEAVQKAAAALKGSDHRRATNVSARLDSQQKKLNLPILPTTTIGSFPQTVELRRVRREFKANKISEEEYVKSIKEEIRKVVELQEELDIDVLVHGEPERNDMVEYFGEQLSGFAFTVNGWVQSYGSRCVKPPIIYGDVSRPKPMTVFWSSLAQSFTKRPMKGMLTGPVTILNWSFVRNDQPRSETTYQIALSIKDEVEDLEKAGITVIQIDEAALREGLPLRKSEQAHYLDWAVHAFRITNVGVQDTTQIHTHMCYSNFNDIIHSIIDMDADVITIENSRSDEKLLSVFREGVKYGAGIGPGVYDIHSPRIPPTEEIADRINKMLAVLEKNILWVNPDCGLKTRKYTEVKPALTNMVAAAKLIRNELAK

SEQ ID NO: 31325 - protein, 132 aa, Mesorhizobium plurifarium
KGSRKAADQMWMARYLLLRLTEKYGIDIEFHCKPLGDTDWNGSGMHCNFSTKYMREVGGKTYFEALMAQFEKNLMDHIAVYGPDNDKRLTGKHETAPWNKFSYGVADRGASIRVPHSFVKNDYKGYLEDRRP

SEQ ID NO: 31326 - protein, 456 aa, Brucella suis 1330
MTAQPNSLEARDIRYHLHSYTDAVRLEAEGPLVIERGDGIYVEDIAGKRYIEAMSGLWSVGVGFSEQRLAEAAARQMKKLPFYHTFSYRSHGPVIDLAEKLVAMAPVPMNKAYFTNSGSEANDTVVKLIWYRSNALGEPERKKIISRKRGYHGVTIASASLTGLPNNHRSFDLPIDRILHTGCPHHYHDALPGESEEQFATRLANELEQLILAEGPHTIAAFIGEPVMGAGGVVVPPKTYWEKVQAVLGRYNILLVADEVICGFGRTGNLFGCQTFDIKPDILVMSKQLSSSYLPISAFLINERVYAPIAEESHKIGTLGTGFTASGHPVAAAVALENLAIIEERDLVANARERGARMQKRLRELQDHPLVGEVRGVGLIAGVELVIDKEAKTGLEQPGALGARANAALQERGVISRAMGDTLAFCPPLIINDQQVDTMVSALEAALNDVQASLGK

SEQ ID NO: 31327 - protein, 961 aa, Setaria italica
MASERHQSIDAQLRLLAPGKVSEDDKLVEYDALLVDRFLDILQDLHGPHLREFVQECYELSAEYENDRDEARLGELGSKLTSLPPGDSIVVASSFSHMLNLANLAEEVQIAHRRRIKLKRGDFADEASAPTESDIEETLKRLVSQLGKSREEVFDALKNQTVDLVFTAHPTQPVRRSLLQKHGRIRNCLRQLYAKDITADDKQELDEALQREIQAAFRTDEIRRTPPTPQDEMRAGMSYFHETIWKGVPKFLRRIDTALKNIGINERLPYNAPLIQFSSWMGGDRDGNPRVTPEVTRDVCLLARMMAANLYFSQIEDLMFELSMWRCSDELRIRADELRRSSKRAAKHYIEFWKQVPPNEPYRVILGDVRDKLYYTRERSRHLLTTGISEIPEEATFTNVEQFLEPLELCYRSLCACGDKPIADGSLLDFLRQVSTFGLALVKLDIRQESDRHTDVLDSITKHLGIGSYAEWSEEKRQDWLLSELSGKRPLFGSDLPLTEETADVLGAFHVLAELPADCFGAYIVSMATAPSDVLAVELLQRECHVKHPLRVVPLFEKLADLKSAPAAVARLFSIDWYMDRINGKQEVMIGYSDSGKDAGRLSAAWQMYKAQEELIKVAKQYGVKLTMFHGRGGTVGRGGGPTHLAILSQPPDTIHGSLRVTVQGEVIEHSFGEEHLCFRTLQRYTAATLEHGMHPPISPKPEWRALMDEMAIVATKEYRSIVFQEPRFVEYFRSATPETEYGRMNIGSRPSKRKPSGGIESLRAIPWISAWTQTRFHLPVWLGFGAAFKHLMQKDIRNIHTLKEMYNEWPFFRVTLDLLEMVFAKGDPGIAAVYDKLLVAEDLQSFGEQLRKNYEETKELLLQVAGHKDVLEGDPYLKQRLRLRESYITTLNVCQAYTLKRIRDPGFQVSPQPALSKEFTDESQPAQLVQLNPESEYAPGLEDTLILTMKGIAAGMQNTG

SEQ ID NO: 31328 - protein, 644 aa, Brucella suis 1330
MNVVMKPSQKNTAVADFLADQEHKSLLRFLTCGSVDDGKSTLIGRLLYDTKLIFEDQLASLKNDSRKFGTTDDDFDFALLVDGLEAEREQGITIDVAYRFFSTPRRKFIVADTPGHAQYTRNMATGASTADLAVVLVDARQGVLTQTRRHSFIAAALGIRHIVLAVNKIDLVDFSQDRFDGIVADYLSFAQDLGFTSIQPIPLSARFGDNVTASSPRIGWYEGPHLLEHLETVRIDTEAAAKPFRFPVQYVNRPNLDFRGFSGTVASGSIHVGDPVVVAKSGKQSRVKRIATYDGDLQRASERQAVTLVLEDEIEVSRGNMLAGVELRPEVADRFAADIVWFGEDPLLPGRSYLLRTETDQTPVTVNAIRHRTDVNTFIQEETARLDLNEIGRCHLQTVDPIAFDPYGENRATGAFVLIDRLTNATVGAGMIDAALRQATNVHLQAFDLNKQARAAQKFQKPAVLWFTGLSASGKSTIANRLEQRLHALGKHTYLLDGDNVRHGLNSDLGFSDADRVENIRRVGEVARLMADAGLITLVSFISPFREERDQVRARLPEGEFIEIFIDTPIEECMARDPKGLYAQALRGEIKAFTGIDSPYEPPVAPELRLNTAGRTVDELIAEVENYLAERGVIGSYGSDSWSI

SEQ ID NO: 31329 - protein, 258 aa, Zea mays
MKIQCDACEGAAATVVCCADEAALCARCDVEIHAANKLASKHQRLPLEALSAKLPRCDVCQEKAAFIFCVEDRALFCQDCDEPIHVPGTLSGNHQRYLATGIRVGLASASACSDACDAHDSDHHAPPKATIEPPHAAVSAAVQQVPSPPQFLPQGWAVDELLQFSDYESSDKLHKEPTLGFKELEWFADIDLFHEQAPKASRTLAEVPELFGYQAANDAAYYRPAKAAAGGGAGVRQSKKARIEVTDDEDYLIVPDLG

SEQ ID NO: 31330 - protein, 252 aa, Brassica napus
MAYQMELGGESSPQRKAGRGKIEIKRIENTTNRQVTFCKRRNGLLKKAYELSVLCDAEVALIVFSSRGRLYEYSNNSVKGTIERYKKAISDNSNTGSVAEINAQYYQQESAKLRQQIISIQNSNRQLMGETIGSMSPKELRNLEGRLDRSVNRIRSKKNELLFAEIDYMQKREVDLHNDNQLLRAKIAENERNNPSMSLMPGGSNYEQIMPPPQTQPQPFDSRNYFQVAALQPNNHHYSSAGREDQTALQLV

SEQ ID NO: 31331 - protein, 178 aa, Frankia sp. CcI3
MTVHDFTVDAADGTSRSLGDYAGQTLLIVNVASKCGLTPQYEGLESLYRDLHGRGLEILGFPCNQFGGQEPGTDAEIQEFCATKFDVTFPVLGKIEVNGPDAAPLYTHLRSEAPGDFGPDAGFLYEHIKKTRPEAIGTDEIKWNFTKFLVDPDGKVVRRYEPTVTPEEIRKDLEATLA

SEQ ID NO: 31332 - protein, 598 aa, Photorhabdus luminescens subsp. laumondii TTO1
MQIFNADLAIIGAGGAGLRAAIAAAEANPQMKIALISKVYPMRSHTVAAEGGSAAVTQAHDSYDFHFNDTVSGGDWLCEQDVVEYFVEHCPTEMIQLEQWGCPWSRKEDGSVNVRRFGGMKIERTWFAADKTGFHMLHTLFQTSLKYPQIQRFDEHFVLDILVDEGQARGLVALNMMEGTKIQIRANAVIMATGGAGRVYRYNTNGGIVTGDGMGMAFRHGVPLRDMEFVQYHPTGLPGSGILMTEGCRGEGGILVNKDGYRYLQDYGLGPETPLGKPENKYMELGPRDKVSQAFWHEWRAGRTISTPRGNVVYLDLRHLGEKKLLERLPFICELAKAYVGVDPVKEPIPVRPTAHYTMGGIETDQKCETRIKGLFAVGECSSIGLHGANRLGSNSLAELVVFGRLAGEEAVKHVQQTKPINDRTLDAQACDVVARLNNLLKQKGTESWSKIRDEMGISMEEGCGIYRTPELMLKTIDKIAELKDRFKRVKITDNSNVFNTDLLYTIELGFSLDVAECMIHSAINRKESRGAHQRLDEGCTERDDEKCLKHTLAFYDPESVPHLEYSDVKITKSIPAKRVYGGEAAAQEKKYKEQENG

SEQ ID NO: 31333 - protein, 298 aa, Fusobacterium nucleatum subsp. nucleatum ATCC 25586
MEAYMEKIYGVIDVTSGYANGKTKNPKYQDLHSSGHAETVHVKYDASKVNLSTLLKYYFKIIDPTSVNKQGNDRGSQYRTGIYYVNQNDKSVIQDEIKEQQKKYSQKIVVEVLPLKEYYLAEEYHQDYLKKNPNGYCHIDLSKADDIIVDEKKYPKLSEKELRMKLNSKQYEVTQNGDTERAFQNDYWDFFDKGIYVDITTGEPLFSSTDKYASQCGWPSFVKPIVPEVVTYHNDTSFNMIRTEVRSRSGKAHLGHVFDDGPRDRGGKRYCINSAAIQFIPYAEMEAKGYGYLLPLVK

SEQ ID NO: 31334 - protein, 258 aa, Glycine max
MAETTQRKREVFATKNELSVALAKYTAHLSAKFCKEKGIFTVVLSGCGLIDWLGKLLESPYKESVEWSKWHVFWVDERVCSHEDQNSNYKLAMDGFISKVGIPKENIYAIDKQCAADGDAERCATLYEECLRNLVKEKILPLCPNGQFPQFDLQLQGMGPDGHMASLFPERPQINVTDKWVTHITDSPKPPPRRITLTLPVINSSLYNLVAVCDDNTEQCARSIADIFKHNNLALPAAHLTAQVEQMWYLDKAAASLL

SEQ ID NO: 31335 - protein, 149 aa, Quercus petraea
MADQLTDDQISEFKEAFSLFDKDGDGCITTKELGTVMRSLGQNPTEAELQDMINEVDADGNGTIDFPEFLNLMARKMKDTDSEEELKEAFRVFDKDQNGFISAAELRHVMTNLGEKLTDDEVDEMIREADVDGDGQINYEEFVKVMMAK

SEQ ID NO: 31336 - protein, 178 aa, Zea mays
MATTHDDCVSLCLMALAAAGGGGMTTQSYAPSTAAWTTQECELRFRCSVCGKAFASHQALGGHKASHRKPTHLQTQQASSSSVTTSSAGSGGGQGRHRCSVCHRSFATGQALGGHKRCHYWDGLSVSLTASGSGSTVKGFDLNLMPATRWGEEEEVQSPLPIKKRRLSGPSLDLSLTI

SEQ ID NO: 31337 - protein, 162 aa, Nocardioides sp. JS614
MSILDAKIARLDGTPSTLGEITGGRPALLVNVASKCGLTPQYAGLEELHERLADRGFTVVGLPCNQFRGQEPGTADEIAEFCSATYGVTFPMTEKIDVNGPDRHEIYRTLVDTPNESGESGDITWNFEKFLVDASGAVLARFSPGVEPGDPRLVAAVESQVG

SEQ ID NO: 31338 - protein, 276 aa, Bradyrhizobium sp. ICMP 14291
WGFDGSSTQQAEGHSSDCVLKPVAVFPDAARTNGVLVMCEVMMPDGKTPHASNKRATILDDAGAWFGFEQEYFFYKDGRPLGFPASGYPAPQGPYYTGVGFSNVGDVARKIVEEHLDLCLAAGINHEGINAEVAKGQWEFQIFGKGSKKAADEMWMARYLMLRLTEKYGIDIEFHCKPLGDTDWNGSGMHANFSTEYMRTVGGKEYFEALMAAFDKNLMDHIAVYGPDNDKRLTGKHETAPWNKFSYGVADRGASIRVPHSFANNGYKGYLEDRRP

SEQ ID NO: 31339 - protein, 533 aa, Anaplasma phagocytophilum
MSNTVVTGEVLDKSIREVVRILEDAVGCTAGPKGLTVAISKPYGSPEITKDGYKVMKSIKPEEPLAAAIASIITQSASQCNDKVGDGTTTCSILTAKVIEEVSKAKAAGSDIVSIKNGILKAKEAVLTALMSMRREVEEDEIAQVATLSANGDKNIGSKIAQCVKEVGKDGVITVEESKGFKDLEVEKTDGMQFDRGYLSPYFVTNAEKMLVEFENPYIFLTEKKINLVQSILPILENVARSGRPLLIIAEDVEGEALSTLVLNKLRGGLQVAAVKAPGFGDRRKDMLGDIAVIVGAKYVVNDELAVKMEDIALSDLGTAKSVRITKDATTIIGSVDSSSESIASRTNQIKAQIENSSSDYDKEKLRERLAKLSGGVAVLKVGGSSEVEVKERKDRVEDALHATRAAVEEGVVPGGGAALLYALSSLDGLKGKNDDEQWGIDIIRRAACAPIKRIIKNSGSEEAPCVIQHLLKQNDKELIYNVDTMNYANAFTSGVMDPLKVVRIAFDLAVSLAAVFMTLNAVVVDVPSKNDA

SEQ ID NO: 31340 - protein, 131 aa, Triticum aestivum
  misc_feature (104)..(104): Xaa can be any naturally occurring amino acid
  unsure (1)..(131): unsure at all Xaa locations
VSEVELEFLTGINSVEDDVAMKLWRPTFKLMLVTLGDQGCKYYTKDFRGAVPSYKVQQVDTTGAGDAFIGSLLRKIVQDPSALQDKTKLEGAIKFANACGAITXTKKGAIPSLPKEDEVLRLMEKARRRGL

SEQ ID NO: 31341 - protein, 893 aa, Zea mays
MPPWWGKSSSKEVKKSAKENLIDTFQRLISSNEQKGSRKSRSSRRHGKDTAGDKGCWSTAQSRSTSPSKEVSRCQSFAADRPHAQPLPLPKSRAKVTRTSSDITNSKSTLEKHGKGQLLPLPPIQPKKRPEATEPVTEVATASVSSNCSIDSDDPGDSQLQSPVGNEAENATRITATSSSSVVRKECSSAITRKNTKEVAKPNSAILSNQILSTSPRGTFADGYQSNLQSPRQIALESAPNSLMSSPSRSPRNICPVQIPTSAFWAIKPHTDVTFLGSGQCSSPGSGQTSGHNSVGGDMLGPIFWQPSRGSPECSPIPSPRMTSPGPSSRVHSGSVSPLHPRAGGVTPESPTNRHAEGNKKQTHRLPLPPLSIANSSTFLPNSSNPTSPISRSPGRTENPPSPGSRWKKGKLIGRGTFGHVYVGFNSDRGEMCAMKEVTLFSDDPKSKESAKQLCQEISLLSRLQHPNIVRYYGSETVDDKLYIYLEYVSGGSIHKLLQEYGQFGEQAICSYTKQILLGLAYLHAKNTVHRDIKGANILVDPNGRVKLADFGMAKHINGQQCPFSFKGSPYWMAPEVIKNASGCNLAVDIWSLGCTVLEMATSKPPWSQYEGIAAMFKIGNSKELPPIPDHLSEEGKDFIRQCLQRDPSSRPTAVDLLQHPFVQNAPPLEKSSASHPLEQLTAISCRTNSKVVEHARNMSSLGLEGQSILQRRAAKFSLPNSDIHIRSNISCPVSPCGSPLLRSRSPQHQNGRMSPSPICSPRTTSGASTPLTGGSGAVPLNHVRQPAYRNEGFTVTSRGFDDHMPSRPVDPVHGRFIRVQQFSVGRQERVVSEVDILSSQYGKMRHANVWDPHDRPLPSERSSQQCFGNHAKLKPSLDLRSGPRHPGRNHGH

SEQ ID NO: 31342 - protein, 132 aa, Bradyrhizobium sp. ICMP 14753
KGSKKAADEMWMARYLMLRLTEKYGIDIEFHCKPLGDTDWNGSGMHANFSTEYMRTVGGKEYFEALMAAFDKNLMDHIAVYGPDNDKRLTGKHETAPWNKFSYGVADRGASIRVPHSFVNNGYKGYLEDRRP

SEQ ID NO: 31343 - protein, 451 aa, Anemia phyllitidis
  misc_feature (144)..(144): Xaa can be any naturally occurring amino acid
  unsure (1)..(451): unsure at all Xaa locations
MRECISIHIGQAGIQVGNARWELYCLEHGIQPDGQMPSDKTVGGGDDAFNTFFSETGAGKHVPRAVFLDLEPTVIDEVRTGTYRQLFHPEQLISGKEDAANNFARGHYTIGKEIVDLCLDRIRKLADNCTGLQGFLVFHAVGGXTGSGLGSLLLERLSVDYGKKSKLGFTVYPSPQVSTSVVEPYNSVLSTHSLLEHTDVSVLLDNEAIYDICRRSLDIERPTYTNLNRLVSQVISSLTASLRFDGALNVDVTEFQTNLVPYPRIHFMLSSYAPVISAEKAYHEQLSVAEITNSAFEPASMMAKCDPRHGKYMACCLMYRGDVVPKDVNAAVATIKTKRTIQFVDWCPTGFKCGINYQPPTVVPGGDLAKVQRAVCMISNSTSVAEVFSRIDHKFDLMYAKRAFVHWYVGEGMEEGEFSEAREDLAALEKDYEEVGAESGEGEEGDEGEEY

SEQ ID NO: 31344 - protein, 326 aa, Chromobacterium violaceum ATCC 12472
MKAPVRVAVTGAAGQIGYSLLFRIASGEMLGKDQPVILHLLDLPQAQTALKGVMMELEDCAFPLLAGMVATDDPNVAFKDVKVALLVGARPRSKGMERKDLLEANGAIFTVQGKALNDHAARDVKVLVVGNPANTNAWIAMKSAPDLDPKNFTAMLRLDHNRALSQIAAKTGKPVASIEKLAVWGNHSPTMYADYRFATIDGQSVKAMINDDVWNRDVFLPTVGKRGAAIIEARGLSSAASAANAAIDHIRDWVLGTNGKWVTMGVPSDGSYGIPEGVMYGVPVVCENGEYKRVEGLEIDAFSRERMDLTLAELEEERAAIAHLFG

SEQ ID NO: 31345 - protein, 276 aa, Bradyrhizobium sp. ICMP 14752
WGFDGSSTQQAEGHSSDCVLKPVAVFPDAARTNGVLVMCEVMMPDGKTPHASNKRATILDDAGAWFGFEQEYFFYKDGRPLGFPASGYPAPQGPYYTGVGFSNVGDVARKIVEEHLDLCLAAGINHEGINAEVAKGQWEFQIFGKGSKKAADEMWMARYLMLRLTEKYGIDIEFHCKPLGDTDWNGSGMHANFSTEYMRTVGGKEYFEALMAAFDKNLMDHIAVYGPDNDKRLTGKHETAPWNKFSYGVADRGASIRVPHSFVNNGYKGYLEDRRP

SEQ ID NO: 31346 - protein, 364 aa, Anemia phyllitidis
LFHPEQLISGKEDAANNFARGHYTVGKEIVDLCLDRVRKLSDNCTGLQGFLVFNAVGGGTGSGLGSLLLERLSVDYGKKSKLGFTIYPSPQVSTAVVEPYNSVLSTHSLLEHTDVAVLLDNEAIYDICRRSLLDIERPTYTNLNRLVSQIISSLTTSLRFDGALNVDVTEFQTNLVPYPRIHFMLSSYAPVISAAKAYHEQLSVPEITNAVFEPSSMMAKCDPRHGKYMACCLMYRGDVVPKDVNAAVATIKTKRTVQFVDWCPTGFKCGINYQPPSVVPGGDLAKVQRAVCMISNNTAVAEVFSRIDHKFDLMYAKLAFVHWYVGEGMEEGEFSEAREDLAALEKDYEEVAAEGVDEPEGDDY

SEQ ID NO: 31347 - protein, 343 aa, Arabidopsis thaliana
MERYEIVKDIGSGNFGVAKLVRDKFSKELFAVKFIERGQKIDEHVQREIMNHRSLIHPNIIRFKEVLLTATHLALVMEYAAGGELFGRICSAGRFSEDEARFFFQQLISGVNYCHSLQICHRDLKLENTLLDGSEAPRVKICDFGYSKSGVLHSQPKTTVGTPAYIAPEVLSTKEYDGKIADVWSCGVTLYVMLVGAYPFEDPSDPKDFRKTIGRILKAQYAIPDYVRVSDECRHLLSRIFVANPEKRITIEEIKNHSWFLKNLPVEMYEGSLMMNGPSTQTVEEIVWIIEEARKPITVATGLAGAGGSGGSSNGAIGSSSMDLDDLDTDFDDIDTADLLSPL

SEQ ID NO: 31348 - protein, 276 aa, Bradyrhizobium sp. ICMP 12835
WGFDGSSTQQAEGHSSDCVLKPVAVFPDGARTNGVLVMCEVMMPDGKTAHSTNKRATILDDAGAWFGFEQEYFFYKDGRPLGFPASGYPAPQGPYYTGVGFSNVGDVARKIVEEHLDLCLAAGINHEGINAEVAKGQWEFQIFGKGSKKAADEMWMARYLMLRLTEKYGIDIEFHCKPLGDTDWNGSGMHANFSTEYMRSIGGKEYFEALMAAFDKNLMDHIAVYGPDNDKRLTGKHETAPWNKFSYGIADRGASIRVPHSFVNNGYKGYLEDRRP

SEQ ID NO: 31349 - protein, 443 aa, Anemia phyllitidis
  misc_feature (105)..(105): Xaa can be any naturally occurring amino acid
  misc_feature (211)..(211): Xaa can be any naturally occurring amino acid
  misc_feature (282)..(282): Xaa can be any naturally occurring amino acid
  unsure (1)..(443): unsure at all Xaa locations
MREILHVQGGQCGNQIGAKFWEVVCTEHGIDPTGTYRGDSETQLERVNVYYNEASCGRYVPRAVLMDLEPGTMDSVRSGHYGQIFRPDNFVFGQSGAGNNWAKGXYTEGAELIDSVLAVVRKEAENCDCLQGFQVCHSLGGGTGSGMGTLLISKIREEYPDRMMMTFSVFASPKVSDTVVEPYNATLSVHQLVENADECMVLDNEALYDIXLRTLKLVTPTFGDLNHLISATMSGVTCCLRFPGQLNSDLRKLAVNLIPFPRLHFFMVGFAPLTSRGSQQYXSLTVPELTQQMWDAKNMMCAADPRHGRYLTASAMFRGKMSTKEVDEQMINVQNKNSSYFVEWIPNNVKSSVCDIPPVGLKMAVTFIGNSTSIQEMFRRVSDQFTAMFRRKAFLHWYTGEGMDEMEFTEAESNMNDLVSEYQQYQDATAEREGEYEEDYDEA

SEQ ID NO: 31350 - protein, 435 aa, Helicobacter hepaticus ATCC 51449
MDILQSINDFNEAKQVIPGGVNSPVRAFGSVGGTPRFIAKGKGAYIYDEDDNEYIDFVQSWGPLIFGHANEVIESALSLAIKDGLSFGAPTEKETTLVKQIIALSGSAEKMRLVNSGTEATMSALRLARAYSNKDDIIKFEGCYHGHSDSLLVSAGSGCATFGTPSSPGVPNDITKHTLVARYNDIESVRACFEQSKNVACVIIEALAGNMGFVPADKKFMQDLRALCDEYNALLIIDEVMSGFRAGLKGAIGLYDVQADLVTYGKVIGGGMPLAAFGGRADIMDMLSPVGGVYQAGTLSGNPIAVSAGLATLLQIKANPTLYEHLEVLAKRLIKGLKEAAQSYEIPLQVDCRGSMFGFFFNQKEVKNFDDAKCSDTAMFARFHQKMLDKGVYFACSQFETGFICSAMNEMIIDEVIMKAKAVFGEITHEIESRI

SEQ ID NO: 31351 - protein, 276 aa, Bradyrhizobium sp. ICMP 14533
WGFDGSSTQQAEGHSSDCVLKPVAVFPDGARTNGVLVMCEVMMPDGKTPHASNKRATILDDSGAWFGFEQEYFFYKDGRPLGFPASGYPAPQGPYYTGVGFSNVGDVARKIVEEHLDLCLAAGINHEGINAEVAKGQWEFQIFGKGSKKAADEMWMARYLMLRLTEKYGIDIEFHCKPLGDTDWNGSGMHANFSTEYMRSIGGKEYFEALMAAFDKNLMDHIAVYGPDNDKRLTGKHETAPWNKFSYGIADRGASIRVPHSFVNNGYKGYLEDRRP

SEQ ID NO: 31352 - protein, 399 aa, Helicobacter hepaticus ATCC 51449
MDFTHTQALDEEFVLHTYARANVAFVRGENARIFDTQGNDYIDFGAGIGVCSVGHANAKLAQTIYKQAQTLLHTSNLYYIQPQARLAQEIITLYRYNTPYTAPMRAFFCNSGAEANECAIKIARKYGKPRNAYKIITLDSSFHGRTIASLKATAQEKMHQHFGPFPDGFVYAKNLDDVIAKIDDSTCAVLLELVQGEGGVLPMDKEKINTLSTILKQKQILLMVDEVQSGVFRSGEIFASKVYEIDPDVITTAKGLAGGVPIGAVLTKLTDIFEYGDHGSTFGGNFLSCAAGLETLAILNELYNNGTLQRTITLFHAELDALVVDFADIFSHKVGLGLMCGLYTRNPDMQQEIIAQALKHYVIVLKSGKGVVRFLPPLTITQEEIKEGFARVRNALKTL

SEQ ID NO: 31353 - protein, 399 aa, Burkholderia sp. 383
MSLFSAVQLAPRDPILGLNEAFNADARPTKVNLGVGVYTNEEGKIPLLRAVREAEKVRVDAGLPRGYLPIDGIAAYDAAVQKLLLGNDSPLIAAGRVVTAQALGGTGALKIGADFLRTVNPNVKVAISDPSWENHRALFEAAGFEVVAYPYYDAATNGVNFEGMLSALNSYAAGTVVVLHACCHNPTGVDLTEAQWQQVVDVVKARNLVPFLDMAYQGFGENIEADAAAVRLFAAADLNAFVSSSFSKSFSLYGERVGALSIITSSKEEATRVLSQLKRVIRTNYSNPPTHGGAVVAAVLASPELHASWVQELGEMRDRIRSMRNGLVERLKASGVDRDFSFINEQRGMFSYSGLTSAQVDRLRDEFGIYAVGTGRICVAALNTRNLDAVANAVAAVLK

SEQ ID NO: 31354 - protein, 399 aa, Ustilago maydis 521
MAVPFIKNPACVVNVACLALARQVRSTGLAIVAPLLTASPFVLLCLTSACLKTGLVNPYFELDQRGKVQAEYIWIDGDGEIRGKTTTLDGPVKSLKDLKEWNFDGSSTNQAPGGNSDVYLRPVAYYPDPFRRGDNVIVLAECYNNDGTPNKSNYRYQCNKIMTQIADEKPWFGLEQEYSLFDMDDRPYGWPKGGFPGPQGPYYCGAGAGKVFARDLVEAHYRACLYSGVNISGINAEVMPAQWEFQVGPCEGIEMGDHLTLARYLLIRVAEEWGVKVSFHPKAVPGDWNGAGCHTNYSTASMRKEGGMKAIEAAIEKLSKRHNEHIAVYGADNDKRLTGKHETGHIGDFSSGVANRGASIRIPRHVAAQGYGYLEDRRPASNCDPYLVTGIVAETTLLL

SEQ ID NO: 31355 - protein, 217 aa, Arabidopsis thaliana
RRNGLLKKAKELAILCDAEVGVIIFSSTGRLYDFSSSSMKSVIERYSDAKGETSSENDPASEIQFWQKEAAILKRQLHNLQENHRQMMGEELSGLSVEALQNLENQLELSLRGVRMKKDQMLIEEIQVLNREGNLVHQENLDLHKKVNLMHQQNMELHEKVSEVEGVKIANKNSLLTNGLDMRDTSNEHVHLQLSQPQHDHETHSKAIQLNYFSFIA

SEQ ID NO: 31356 - protein, 199 aa, Saccharomyces cerevisiae
MAKHIVAALQIGSCPGSTKDTLKKILSYEKEIKESGAKLVVIPEATLGGYPKGSNFGVYLGYRLQEGREEYAKYLAEAIEIGNGEKYPEISQLCALSKATDASLCVGCIERDGTTLYCTMVYIDPKDGYVGKHRKLMPTAGERLIWGQGDGSTLPVVDTAAGKIGGAICWENMMPLLRYAMYKKGVEIWCAPTVDARPI

SEQ ID NO: 31357 - protein, 464 aa, Malus sylvestris
FNSHGEDSSYFLGWQEYEKNPYHEVHNTNGIIQMGLAENQLCFDLLESWLAKNPEAAAFKKNGESIFAELALFQDYHGLPAFKKAMVDFMAKIRGNKVTFDPNHLVLTAGATSANETFIFCLADPGEAVLIPTPYYPGFDRDLKWRTGVEIVPIHCTSSNGFQITETALEEAYQEAEKRNLRVKGVLVTNPSNPLGTTMTRNELYLLLSFVEDKGIHLISDEIYSGTAFSSPSFISVMEVLKDRNCDENSEVWQRVHVVYSLSKDLGLPGFRVGAIYSNDDMVVAAATKMSSFGLVSSQTQHLLSAMLSDKKLTKNYIAENHKRLKQRQKKLVSGLQKSGISCLNGNAGLFCWVDMRHLLRSNTFEAEMELWKKIVYEVHLNISPGSSCHCTEPGWFRVCFANLPERTLDLAMQRLKAFVGEYYNVPEVNGGSQSSHLSHSRRQSLTKWVSRLSFDDRGPIPGR

SEQ ID NO: 31358 - protein, 325 aa, Alkalilimnicola ehrlichei MLHE-1
MPHAIRIHETGGPDVLKWEPVEVGEPGPGEVRLRHTAVGLNYIDVYFRTGLYPPPGLPSGLGLEAAGVVEAVGDGVTEVAVGDRVVYASPPLGAYAEARLMPADRVVRLPDAIDDRTAAGMMLQGLTAWYLLHRTYPVKAGDTLLIHAAAGGVGLLVCQWAKHLGATVIGTVGSDEKAELARAHGCDHPIVYTRERFPDRVREITAGEGVPVVYDSIGKDTFEDSLDSLRPLGLMVSFGNASGPVPPLDLQLLSAKGSLFITRPTVMTYTARREDLLAGAQALFDVVQKGVLKVAVNQSWPLAQAAEAHKALEARQTTGSTVLTV

SEQ ID NO: 31359 - protein, 548 aa, Photorhabdus luminescens subsp. laumondii TTO1
MAAKDVKFGSDARVKMLRGVNILADAVKVTLGPKGRNVVLDKSFGAPAITKDGVSVAREIELEDKFENMGAQMVKEVASKANDAAGDGTTTATVLAQSIVTEGLKAVAAGMNPMDLKRGIDKAVVAAVAELKKLSVPCSDSISIAQVGTISANSDETVGKLIAEAMDKVGKEGVITVEEGTGLEDELDVVEGMQFDRGYLSPYFINKPENGSVELENPYILLVDKKISNIRELLPVLEGVAKASKPLLIVAEDVEGEALATLVVNTMRGIVKVAAVKAPGFGDRRKAMLHDIAVLTNGNVISEEIGLELEKATLEDLGQAKRIVINKDTTTIIDGVGEEDAIKGRVSQINQQIKESTSDYDREKLQERVAKLAGGVAVIKVGAATEVEMKEKRARVDDALHATRAAVEEGVVAGGGVALVRVAAAIVGLKGDNEDQNVGIRVAMRAMEAPLRQIVDNSGEEPSVIANSVKAGEGNYGYNATTEQYGDMIAMGILDPTKVTRSALQFAASIAGLMITTECMITDLPKDDKADLGAAGGMGGMGGMGGMM

SEQ ID NO: 31360 - protein, 426 aa, Streptomyces glaucescens
MTRHAEKRVVITGIGVRAPGGAGTAAFWDLLTAGRTATRTISLFDAAPYRSRIAGEIDFDPIGEGLSPRQASTYDRATQLAVVCAREALKDSGLDPAAVNPERIGVSIGTAVGCTTGLDREYARVSEGGSRWLVDHTLAVEQLFDYFVPTSICREVAWEAGAEGPVTVVSTGCTSGLDAVGYGTELIRDGRADVVVCGATDAPISPITVACFDAIKATSANNDDPAHASRPFDRNRDGFVLGEGSAVFVLEELSAARRRGAHAYAEVRGFATRSNAFHMTGLKPDGREMAEAITAALDQARRTGDDLHYINAHGSGTRQNDRHETAAFKRSLGQRAYDVPVSSIKSMIGHSLGAIGSLELAACALAIEHGVIPPTANYEEPDPECDLDYVPNVAREQRVDTVLSVGSGFGGFQSAAVLARPKETRS

SEQ ID NO: 31361 - protein, 338 aa, Magnetococcus sp. MC-1
MKVYYDSDADLGLIQSKKVAIIGYGSQGHAHALNLKDSGVDVVVGLRAGSSSWMKAEGSGLQVAEVADAVGGADLVMMLVPDEHQAKIYREQIAPNLKDDAALVFAHGFNIHYGQIEAPAGVDVFLVAPKGPGHLVRAEYLRGGGVPSLVAIHQNATGKALDLALSYASANGGGRAGIIETSFKEETETDLFGEQAVLCGGITALIQAGFETLVEAGYAPEMAYFECLHETKLIVDLIYEGGIANMRYSISNTAEYGDLTRGPRVITEETKKEMKKILDEIQTGEFPREWISENISGRPKFLGLRRRGEAHQIEQVGAKLRAMMPWIQASKLVDKAKN

SEQ ID NO: 31362 - protein, 208 aa, Brassica napus
  misc_feature (40)..(40): Xaa can be any naturally occurring amino acid
  unsure (1)..(208): unsure at all Xaa locations
MSFKSILRDLKEVRDGLGGISKRGWSKSSHIAPDHTMTPXENIPQSPWASLPPELLHEIIRRVEESEASWPARAAVVSCASVCKSWRGITMETVRVPEQCGKLTFPISLKQPGPRDLPIQCFIKRNRATASYILYYGLMPSEMENDKLLLAARRVRRATCTDFVISLSAKNFSRRSSTYVGKLRSGFLGTMFTIYDNQTGSFTAQAQP

SEQ ID NO: 31363 - protein, 415 aa, Gloeobacter violaceus PCC 7421
MEKKRVVVTGVGAVTPLGNTAADFWEGLLAGRSGVAPISLFDPSRHDARIAAEVKNFDPHQYLEKKEVKRTVRFTQMAVAASKQAVADAALAINEFNSEQVGVIIGNGTGGMEWLEQQDGILREQGPNRVSPFMVPLFIANMAAGFTAIQLGAKGPNSCTVTACAAGSNAIGDAFRLIQYGEAQAVICGGTEACITPLVVAGFAASRALSTRNDEPETASRPFDLNRDGFVIGEGAGILVLEELSHALARGARIYAEICGYAMTCDAYHMTSPAPAGEGAARAIRLALKDAGVFPDQVSYINAHGTSTPLNDTNETQAIKTVLGEAAYSVAVSSTKSMTGHLLGGSGGIEAVATALAVYHDIAPPTINLETPDPSCDLDYVPGVARTMPIEVALSNSFGFGGHNVTLVFRKFREA

SEQ ID NO: 31364 - protein, 241 aa, Brassica napus
GDPRVRDIEDVRREVEIMKHMPKHPNIVSLKDAFEDDDAVHIVMELCEGGELFDRIVARGHYTERAAAAVMKTILEVVQVCHKNGVMHRDLKPENFLFANKKETSPLKAIDFGLSVFFRPGEGFNEIVGSPYYMAPEVLRRNYGPEVDIWSAGVILYILLCGVPPFWAETEQGVAQAIIRSVIDFKRDPWPRVSDTAKDLVRKMLEPDPKKRLSAAEVLEHPWIQNAKKAPNVSLRETVKA

SEQ ID NO: 31365 - protein, 386 aa, Glycine max
  misc_feature (190)..(190): Xaa can be any naturally occurring amino acid
  misc_feature (357)..(357): Xaa can be any naturally occurring amino acid
  misc_feature (379)..(379): Xaa can be any naturally occurring amino acid
  unsure (1)..(386): unsure at all Xaa locations
MCLIRSMRSQSQRVVQEQEEAECVGDSMRQSCWANMPQELLREVLFRIEASEDAWPPRKSVVACAGVCRSWRQITIDIVKTPELSSKITFPISVKQPGPRENLLRCFIKRNRSSQTYYLYLSLTNTLAEDGKFLLAARKCRRPTCTDYIISLDADDMSKGSNAYVGKLRSNFLGTKFTIYDGQPPHAKKXSTELVVNSKQVSPRPRVPTGNYPVAHISYELNVLGSRGPRRMHCVMDTIPASAIEPGGRAGAAPPPPEFSLNNIDMFPSFPFFRSKSNRVENSVSGPWVDQKDGMLVLKNKAPRWHEQLQCWCLNFHGRVTIASVKNFQLVASAENRPAGPEHDKIILQFGKVGKDXFTMDYRFPISAFQAFAICLSSXDTKIACE

SEQ ID NO: 31366 - protein, 591 aa, Chromobacterium violaceum ATCC 12472
MGVAVRHFDAVVVGAGGAGMRAALQLSEAGLKTAVLSKVFPTRSHTVAAQGGVSASLGNSEPDNWHWHMYDTVKGSDWLGDQDAIEFMCREAPKVVVELEHFGMPFDRNPDGTIYQRPFGGHMSEFGEGKPVRRACAAADRTGHAMLHALYQRNVRANTHFFVEWMALDLIRDAEGRVQGVVAMEMETSEIVVFQAKATLFATGGAGRIFASSTNAFINTGDGLGMAARAGIPLEDMEFWQFHPTGVAGAGVLITEGVRGEGGILRNSSGERFMERYAPNAKDLASRDVVSRAMVSEINEGRGCGPNKDHVLLDITHLDPEVIMSKLPGIREISIKFAGVDPIKAPIPVVPTCHYQMGGIPTNYHGEVVVHGAPVHGFYAAGEVACASVHGANRLGTNSLLDLLVFGKSSANSMIEFIKQQPEDLPPLAMADVERSVARVARLDNQTNGVQVHDARAEMQRVMQTHCGVFRFKDMLAEGVEKILEVADMVAKTEIGDKSKVFNTARIEALELENLIEVAKATMVSANARTESRGAHVRDDAPDTPDTPNGRDDANWLKHTLWFRDGNRLEYKPVNMKPLTVDTIKLKARSY

SEQ ID NO: 31367 - protein, 276 aa, Bradyrhizobium sp. ICMP 14754
WGFDGSSTQQAEGHSSDCVLKPVAVFPDGARTNGVLVMCEVMMPDGKTPHASNKRATILDDSGAWFGFEQEYFFYKDGRPLGFPASGYPAPQGPYYTGVGFSNVGDVARKIVEEHLDLCLAAGINHEGINAEVAKGQWEFQIFGKGSKKAADEMWMARYLMLRLTEKYGIDIEFHCKPLGDTDWNGSGMHANFSTEYMRTIGGKEYFEALMAAFDKNLMDHIAVYGPDNDKRLTGKHETAPWNKFSYGIADRGASIRVPHSFVNNGYKGYLEDRRP

SEQ ID NO: 31368 - protein, 435 aa, Chromobacterium violaceum ATCC 12472
MTGSIAVETNRKVTLSYNEGKETLDLPVLGGTLGPDVVDIRGFGKTGMFTFDPGFLATASCESKITFIDGDLGHLYYRGYPIEQLAEKSDYLEVCYLLLNGELPTAAQRKEFERGVMRHNMLHDQLMSLFKGFRRDAHPMAVMVGVVGALSAFYHDSLDISNPEHRRISAHRLIAKLPTIAAQAYRYNKGLPFSYPKNGLTYAENFLHMMFSTPCEEYKVNPVLARALDRIFTLHADHEQNASTSTVRLAGSSGANPFACIAACIACLWGPSHGGANEAVLKMLDEIGSVDNVADFMQGVKDKRYKLMGFGHRVYKNMDPRAAIMKQTCDEVLNELGLHNDPKFKLAMELEKIALSDPYFIERKLYPNVDFYSGIVLSAIGIPVSMFTPIFALARTVGWIAHWNEMIGDPGMKIGRPRQLYTGAARRDFVEVAKR

SEQ ID NO: 31369 - protein, 157 aa, Mycoplasma pneumoniae M129
MKQIYFGGGCFWGTQKYFDLIKGVQKTSVGYLNSNMKNPTYEQVCSGQTNAVEAVFVEYDENKVSLNELIDAFFKVIDPTIRNRQGNDIGTQYRTGVYWVDPQDEQLITQKFRELQANYPKPIVTENRAMENYFLAEEYHQDYLKKNPHGYCHIKFD

SEQ ID NO: 31370 - protein, 254 aa, Arabidopsis thaliana
MAATQLTASPVTMSARSLASLDGLRASSVKVSSLKPGTLRQSQFRRLVVKAASVVAPKYTSIKPLGDRVLVKIKEAEEKTLGGILTFHSTAQSKPQGGEVVAVGEGRTIGKNKIDITVPTGAQIIYSKYAGTEVEFNDVKHLILKEDDIVGILETEDIKDLKPLNDRVFIKVAEAEEKTAGGLLLTETTKEKPSIGTVIAVGPGSLDEEGKITPLPVSTGSTVLYSKYAGNDFKGKDGSNYIALRASDVMAILS

SEQ ID NO: 31371 - protein, 276 aa, Bradyrhizobium sp. ICMP 14755
WGFDGSSTQQAEGHSSDCVLKPVAVFPDGARTNGVLVMCEVMMPDGKTPHASNKRATILDDSGAWFGFEQEYFFYKDGRPLGFPTSGYPAPQGPYYTGVGFSNVGDVARKIVEEHLDLCLAAGINHEGINAEVAKGQWEFQIFGKGSKKAADEMWMARYLMLRLTEKYGIDIEFHCKPLGDTDWNGSGMHANFSTEYMRTVGGKEYFEALMAAFDKNLMDHIAVYGPDNDKRLTGKHETAPWNKFSYGVADRGASIRVPHSFVNNGYKGYLEDRRP

SEQ ID NO: 31372 - protein, 227 aa, Glycine max
MAGAGGGYGDANQRIDYVFKVVLIGDSAVGKSQILARFARNEFSLDSKSTIGVEFQTRTLVIDHKTVKAQIWDTAGQERYRAVTSAYYRGAVGAMLVYDITKRQTFDHIPRWLEELRNHADKNIVIILIGNKCDLESQRDVPTEDAKEFAEKEGLFFLETSALEATNVETAFITVLTEIYNIVNKKNLTADENQGNGNSASLSGQKIIVPGPAQEIPAKRNMCCQSS

SEQ ID NO: 31373 - protein, 276 aa, Bradyrhizobium liaoningense
WGFDGSSTQQAEGHSSDCVLKPVAVFPDAARTNGVLVMCEVMMPDGKTPHPSNKRATILDDAGAWFGFEQEYFFYKDGRPLGFPASGYPAPQGPYYTGVGYSNVGDVARKIVEEHLDLCLAAGINHEGINAEVAKGQWEFQIFGKGSKKAADEMWMARYLMLRLTEKYGIDIEFHCKPLGDTDWNGSGMHANFSTEYMRTVGGKEYFEALMAAFDKNLMDHIAVYGPDNDKRLTGKHETAPWNKFSYGVADRGASIRVPHSFVNNGYKGYLEDRRP

SEQ ID NO: 31374 - protein, 223 aa, Prochlorococcus marinus str. MIT 9313
MKTTFRPLRRWWIAIFLCVALLGLPLQVLASVEEAVFAGGCFWCLEHDLEGLTGVISSESGYTGGDLPRPTYRQVSSKTTGHQEAVRVRFDAAQISYAELLRSYWRNVDPLDGDGQFCDQGDSYRPVIFTRDDQQASEARESADAAALELAQPMSNLRVEIKPLSEFWLAEDYHQNYAELNSIKYNFYRYSCGRDRRLDQLWGDRARTGVPWQRPDQANLRKK

SEQ ID NO: 31375 - protein, 477 aa, Chromobacterium violaceum ATCC 12472
MSQQFDVVVIGGGPGGYVAAIRAAQLGFSAACVDAFKNPEGKPSLGGTCLNVGCIPSKALLQSSENFHAVQHDFAKHGISVSGAKMDVGQMLSRKTDIINKNAAGIGFLFKKNKVANIHGLAAFKGRQGEKWVIEVTDGGKVVDTLEAVHVIVATGSSPRALPGLATDNQLVLDNEGALALTAVPKRLGVIGAGVIGLEMGSVWKRLGAEVTILEAAPTFLAAADQQIAKEAFKTLTKDTGLDIKLGVKIGEVKAGKKSVSVSYELNGEAVKAEFDKLIVSIGRVPNTQGLGAETVGLALDERGFVAVDDHCHTNLPNVWAIGDVVRGPMLAHKASEEGVAVAERIAGQKPHVDFGVIPWVIYTSPEIAWVGKTEEQLKAEGVEYKKGTSGFGANGRALGLGQAQGTVKILADAKTDRILGLHMIGPMVSELVSEGVVSMEFKAASEDLARIVHAHPSLSEVIHEAALAADKRALHG

SEQ ID NO: 31376 - protein, 276 aa, Bradyrhizobium elkanii
WGFDGSSTQQAEGHSSDCVLKPVACYPDAARENGVLVMCEVMMPDGKTPHPSNKRATILDDDGAWFGFEQEYFFYKDGRPLGFPEEGYPAPQGPYYTGVGYKNVGSVARKIVEEHLNLCLAAGINHEGINAEVAKGQWEFQIFGKGSKTAADQMWMARYLMLRLTESYGIDIEFHCKPLGDTDWNGSGMHANFSTKYMREVGGKEYFEKVMGAFEKNLMDHIAVYGPDNDKRLTGKHETAPWNKFSYGVADRGASIRVPHSFVNNGYKGYLEDRRP

SEQ ID NO: 31377 - protein, 553 aa, Haloarcula marismortui ATCC 43049
MPTEPETDYDPELGRKFIFVTGGVMSGLGKGITAASTGRLLKNAGFDVTAVKIDPYLNVDAGTMNPFQHGEVYVLKDGGEVDLDLGNYERFLDIDMTFDHNVTTGKTYQHVIEKERSGDYLGRTVQIIPHITDDIKRRIREAAEGNDVCIIEVGGTVGDIEGMPYLEALRQFAHEEDEDDILFTHVTLVPYSKNGEQKTKPTQHSVKELRSIGLQPDILVGRCSDKLDIDTKEKIGLFCDVPTEAVFSNPDVDDIYHVPLMVEEEGLDQYVMEELDIASEALPEDERENRWRDLVTQNTEGEVEVALVGKYDLEDAYMSVHEALKHAGLEKNVDVNVRWVNSEKMNDHHADRMREADAIVVPGGFGARGTEGKIEAIRYARENDIPFLGLCLGFQMAVVEYARNVLDLDDAHSAELEEDTPHPVIDILPEQYEIEDMGGTMRLGAHETEINANTLAATLYGGESCTERHRHRYEVNPEYIDDLEAAGLKFSGRAGNRMEILELGPEDHPYFIGTQFHPEFRSRPTRASPPFVGLLEAVLGDDPHTATTEEVSH

SEQ ID NO: 31378 - protein, 428 aa, Lycopersicon esculentum
ILSKLATNEEHGENSPYFDGWKAYDSDPFHPLKNPNGVIQMGLAENQLCLDLIEDWIKRNPKGSICSEGIKSFKAIANFQDYHGLPEFRKAIAKFMEKTRGGRVRFDPERVVMAGGATGANETIIFCLADPGDAFLVPSPYYPAFNRDLRWRTGVQLIPIHCESSNNFKITSKAVKEAYENAQKSNIKVKGLILTNPSNPLGTTLDKDTLKSVLSFTNQHNIHLVCDEIYAATVFDTPQFVSIAEILDEQEMTYCNKDLVHIVYSLSKDMGLPGFRVGIIYSFNDDVVNCARKMSSFGLVSTQTQYFLAAMLSDEKFVDNFLRESAMRLGKRHKHFTNGLEVVGIKCLKNNAGLFCWMDLRPLLRESTFDSEMSLWRVIINDVKLNVSPGSSFECQEPGWFRVCFANMDDGTVDIALARIRRFVGVEK

SEQ ID NO: 31379 - protein, 356 aa, Clostridium tetani E88
MNKLLMTPGPTNVPQRVLEKMSENMLHHRTSQYSKLFEEFNERLKYVFQTKNSVLTFPSSGTGGLESAIINPFSKGDKILAVSIGDFGNRFINIAKIHSLKVDEIVIPWGKAVTLEDIKKNLRPDHKGLIITHNETSTAVVNPIEEIGNFLKDKDVLYIVDAVSSLGGIDIKMDEWNIDILISASQKALMSPPGLAFVGVSEKALYRCTQSNISKYYFDYLLAKKYLDKVEPQNPYTPAISLILAANESLKIIEKEGLQNVFLRHQKLANKFRDGIKSMNLKLYAQNHCYSNTVTAISFEEEGLASRIKDKLDKEYNIIISGGQGFTRGKLIRVGHMGCVNDEMIDKTLYAIQKSL

SEQ ID NO: 31380 - protein, 188 aa, Glycine max
MSEAPPSQPPPPTANASPPPYWCYHCEKRVSIETLANLPDVVCGECKNGFVESIHTPSRSRSPSASSDDPYFGSQFLQVLRLIAQSARDDDASPPPPPSRSPENDFLRIELGGWDNDEENDNDNNDDEEFEEHEEAEDRSGNEDPHGRDDEDLRRRGASCFGFGLGIWPTARGACGTGSWVGARVPEG

SEQ ID NO: 31381 - protein, 397 aa, Bordetella pertussis Tohama I
MSKLDSLFTAALEQAAQRQVRRRLRHAAATPPGRLALDGRTLVNFSSNDYLGLARHPLLAERASLWATRHGAGAQASRLVCGNLDLHEQVEAKLARLKGTEAALLLASGWQANAAVLPALFKAAAAQGEPQVYTDRLNHASLHHGCQAAGVRQIRFRHNDLAHLEHLLAERAGAPGARFIVTESVFSMDGDRADVPALAALAARHHAFLYLDEAHATGVLGPRGMGLAGLAPGGVDLAMGTFSKGLGSFGAYVAGSRALCDYLVNACSGFIYTTALPPAVLGAIDAALDLVPRLDQARATLQGHGERLRASLAAQGIDCGASSTQIVPAIIGDAGHALALAAELERRGLLAVAIRPPTVPAGTSRLRIALSAAHGEAELDQLIEALAAGWRAVRQAA

SEQ ID NO: 31382 - protein, 228 aa, Francisella tularensis subsp. tularensis SCHU S4
MSDISELIKGNRAWAEEIKKTNPGFFETLSKGQSPEYLWIGCSDSRVPANQVCGLIPGEVFVHRNVANVVSLTDLNCLSVLQFAIEVLKIKKIIVCGHYACGGVETVVKDKSYGLIDNWLTSIHEVKEQNKQFIEESLSCYKDNQEEYMKKKVDMMCELNALHQALNLCKTTVVKNAWAKGLTFTIHAAIYGIGDGKLYEIGGGVGSRAEMDTTYAQAIKDIKSRYCR

SEQ ID NO: 31383 - protein, 542 aa, Oryza sativa (japonica cultivar-group)
MGNQCQNGTLGSDYHNRFPREHAVGYVQGDSYLDLKKFDDTWPEVNNFKPTAASILRRGLDPTSINVLGRKTADLREHYIIGRKLGQGQFGTTYLCTEINTGCEYACKTIPKRKLITKEDVEDVRREIQIMHHLSGHKNVVAIKDVYEDGQAVHIVMELCAGGELFDRIQEKGHYSERKAAELIRIIVSIVAMCHSLGVMHRDLKPENFLLLDKDDDLSIKAIDFGLSVFFKPGQVFTELVGSPYYVAPEVLHKRYGPESDVWSAGVILYVLLSGVPPFWAETQQGIFDAVLKGHIDFQSDPWPKISDSAKDLIRKMLSHCPSERLKAHEVLRHPWICENGVATDQALDPSVISRLEQFSAMNKLKKLALRVIAERLSEEEIAGLREMFKAVDTKNRGVITFGELREGLRRFGAEFKDTEIGDIMEAAHNDNNVTIHYEEFIAATLPLNKMEREEHLLAAFTYFDKDGSGYITVDKLRRACGEHNMEDSLLEEIISQVDQNNDGQIDYAEFVAMMPGSNVGLRWQTMESSLNVALRDAPQVH

SEQ ID NO: 31384 - protein, 97 aa, Photorhabdus luminescens subsp. laumondii TTO1
MNIRPLHDRVIVKRKEVESKSAGGIVLTGTAAGKSTRGEVLAVGNGRILESGDVKALCVKVGDIVIFNDGYGVKSEKIDNEEVLIMSESDILAIVEA

SEQ ID NO: 31385 - protein, 424 aa, Streptomyces coelicolor A3(2)
MKRRVVITGVGVRAPGGNGTRQFWELLTSGRTATRRISFFDPSPYRSQVAAEADFDPVAEGFGPRELDRMDRASQFAVACAREAFAASGLDPDTLDPARVGVSLGSAVAAATSLEREYLLLSDSGRDWEVDAAWLSRHMFDYLVPSVMPAEVAWAVGAEGPVTMVSTGCTSGLDSVGNAVRAIEEGSADVMFAGAADTPITPIVVACFDAIRATTARNDDPEHASRPFDGTRDGFVLAEGAAMFVLEDYDSALARGARIHAEISGYATRCNAYHMTGLKADGREMAETIRVALDESRTDATDIDYINAHGSGTRQNDRHETAAYKRALGEHARRTPVSSIKSMVGHSLGAIGSLEIAACVLALEHGVVPPTANLRTSDPECDLDYVPLEARERKLRSVLTVGSGFGGFQSAMVLRDAETAGAAA

SEQ ID NO: 31386 - protein, 433 aa, Magnetococcus sp. MC-1
MSKETITIRDNRTGKEVELPIQQGTAGPPVVDVTKFYKDFGLFTLDPGFRSTGSCRSTITFIDGDKGVLLHRGYPIEQLAAKSSFLEVCYLLLNEKLPTKAEFDDFDDKITHHTMVHEQLLRFFAGYRRDAHPMAIMVGVVGALSAFYHDALDISDPKHREISAHRLIAKIPTIAACSYKYHYGQPFVYPNNKMSYAENFLNMTFRTPCDDDFKIDPRLVSAMDKIFILHADHEQNASTSTVRLAGSSRANPFAAVSAGISALWGPAHGGANEAVLKMLGEIGSVERIDEYIAKAKDPNDPFRLMGFGHRVYKNYDPRAAVLKGACQEVLDAVGKHDEPLFKIAMKLEEIALNDDYFISKKLFPNVDFYSGIILSAMGFPTNMFTVIFALARTVGWVSQWKEMIEEEGQAIGRPRQLYMGAPQRDYVPMDQRG

SEQ ID NO: 31387 - protein, 149 aa, Gloeobacter violaceus PCC 7421
MPTKVFKSEAEWKKILTPEQFLITRKKGTERAFTGKYHDTKQAGIYQCVCCETPLFSSAQKYDSGTGWPSFWGPVNPKNIATKADFSLFMRRTEVLCAVCDAHQGHLFNDGPPPTGLRYCINSAALKFVKLPLVSRLGRGFIEYLTSQA

SEQ ID NO: 31388 - protein, 257 aa, Arabidopsis thaliana
  misc_feature (241)..(241): Xaa can be any naturally occurring amino acid
  unsure (1)..(257): unsure at all Xaa locations
MEESINQNPEAMEALISNLFGNISSLKSAYIELQSAHTPYDPEKIQAADKVVISELKNLSEMKHSYRENNPKPVCVSPQDSRLAAEIQEQQSLLKTYYEVMVKKFQSEIQNKDSEITQMLQKIEEANQKRLKLEKNLKLRGMSTNQGSGGDGNLQFPDLTTELFVSTYEAAAKAVHDFSKPLINMMKAAGWDLDSAANSIEPDVVYAKRPHKEYAFESYICQRMFSGFQQKNFSVNSESAXDTFFRQFLALKDMDPL

SEQ ID NO: 31389 - protein, 416 aa, Nostoc punctiforme PCC 73102
MPATSFYADAPYNTKKSRQALDSDLTVDESELSVDDLQELEIASVDNANFAASTNRRSTDLVRLYLQEIGRVRLLGRDEEVSEAQKVQRYLRMRIVLANAAKLGDEVIIPYLRLVEVQERLTSELGHRPSLERWAATADIVLSDLRPTLANGKRRWAEIAKLTVEELEQVQSQGLQAKEHMIKANLRLVVSVAKKYQNRGLELLDLVQEGTLGLERAVEKFDPTKGYRFSTYAYWWIRQGITRAIATSSRTIRLPVHITEKLNKIKKAQRKIAQEKGRTPTLEDLATELEMTPTQVREVLLRVPRSVSLETKVGKDKDTELGELLETDCVTPEEMLMRESLQRDLHHLLSDLTSRERDVILMRFGLADGHPYSLAEIGRALDLSRERVRQIESKALQKLRQPKRRNLIRDYLESLS

SEQ ID NO: 31390 - protein, 276 aa, Mesorhizobium sp. ICMP 14330
WGFDGSSTQQAEGHSSDCVLKPVAVYPDPARSNGVLVMCEVMMPDGVTPHASNKRATILDDEGAWFGFEQEYFFYKDGRPLGFPESGYPAPQGPYYTGVGYSNVGSVARQIVEEHLDLCLAAGINHEGINAEVAKGQWEFQIFGKGSKKAADQMWMARYLMQRLTEKYGIDIEYHCKPLGDTDWNGSGMHANFSTAYMREVGGKAYFEALMAAFDKNLMDHIAVYGPDNDKRLTGKHETAPWNRFSYGIADRGASIRVPHSFIKNDYKGYLEDRRP

SEQ ID NO: 31391 - protein, 184 aa, Mesorhizobium amorphae
WGFDGSSTMQAEGRSSDCVLKPVALYPDPARTNGILVMCEVMMPDGVTPHESNSRATILDDEDAWFGFEQEYFFYKDGRPLGFPESGYPAPQGPYYTGVGYKNVGDVARKIVEEHLDQCLAAGINHEGINAEVAKGQWEFQIFGKGSKKAADQIWMARYLLLRLTETYGIDIEFHCKPLGDTDW

SEQ ID NO: 31392 - protein, 685 aa, Prochlorococcus marinus str. MIT 9313
MASSTSQAIAEWAPPGDGQPPPEPPGWGERIYLWWAEFSLQTKLLAIATLVVSLLMTGVTFFVLNGIQRDAGMNDTRYARDLGLLLSGNVTELVAQGRDRELATVAEQFWRSRSLRYIFFADPDGLIYLGIPISASPVSGDNDLQLNHRLELPAELPSRPENALIRQHLTPQGQLTDVFVPLVWKGDYLGTLALGVNPNDTALASAALTRQVTIAVFISIWVLVILGAVFNALTITQPVKELLRGVRAIASGNFEARIALPMGGELGELLNGFNAMASQLEAYDAANIEELTAAQVKQQSLIATMADGALLLDEVGQIVLANPTARRIFRWEGRNLEGQELLNELPEIIANELHDPLQSLLRNIGESNDLRCSLEEPSRTLRIVLQSVRDQSGETLKGIAITVQDLTREVELNAAQSRFISNVSHELRTPLFNIKSYVETLHDLGDQLSEEEKKEFLGIANSETDRLARLVNDVLDLSRLESGRTVQFEPMDLRPAIEQTLRNYRLNADDKQIHIELNTDDELPTILGNWDLLLQVLDNLVGNGLKFSRAGGSLMVRAYTWPDSCKMSPIESSKSAPHCEFFSPLPKLRVEVADTGHGINQDDQQHIFDRFYRVENAVHTEAGTGLGLSIVRGIIEKHGGQIRMASEVELGTTFWFDLPLEQTDADELIVQSVRTTRQQEQGLEL

SEQ ID NO: 31393 - protein, 701 aa, Zea mays
  misc_feature (162)..(162): Xaa can be any naturally occurring amino acid
  misc_feature (465)..(465): Xaa can be any naturally occurring amino acid
  misc_feature (585)..(585): Xaa can be any naturally occurring amino acid
  misc_feature (602)..(602): Xaa can be any naturally occurring amino acid
  misc_feature (613)..(614): Xaa can be any naturally occurring amino acid
  unsure (1)..(701): unsure at all Xaa locations
MAAVATPPAPAPPAPAPAPAPAAAPAPVTVAPAADQTTDLLQKLSLDSQPKAAGATEPAAAAAAAKEGAVTNQPLSVAIPPERSITPVLQDFMDPNLFYLPAYYYGGYDSSMSEWDDYPRYLNSDGVEIAPAVYGDIYGYGYAPYGAYSPATSPVPTVDGQXFGAQHYQYPTTYFQPPTPIPSTTQSNLQSSNNTEKPAAKADPAKATANGVPNGTGHTYSGTVPSQQNSALTPDGTYRAPLLGGVPSAGYLDTTYGYDSTGAQFAWYDGSAYANGQQRTTTTNRFPSSSFSGNGSSARYQNKSSTTQQMGMQNRRLTTTSAAPTYPNRMYPSPRPYTQYGNSVKTGLPYGSNGYDSRIYGRCGLGMDNRYRPRACSGYYGYGNESQDGTIELNRGPRSGRFKNQKLYGHTVTIAVKGQSLPSSESKNDSAVPDRAKYNRDDFPIQYDAAKFFVIKSYSEDDIPXSVKYNVWASTTNGNKKLDAAYQEAQSKGSACPIFLFFSVNTSGQFVGVAEMTGAVDFEKTLEYWQQDKWNGSFSVKWHIVKDVPNNILKHIILENNENKPVTNSRDTQEIRLEQGLQMLXKIFKDHVSKTSILDDFXPFYEGRQKLMXXDKRSKQQQLQKQVWDTRTPVSVTGERPQEPANGKPNPSVPDGVTAEVKAVKAPAENGITAPVVSYAAKVAQTAPEKPVLSNGVAKTG

SEQ ID NO: 31394 - protein, 338 aa, Bacillus anthracis str. 'Ames Ancestor'
MAILITGGAGYIGSHTCVELLNNNYKIIVVDNLSNSSIESLNRVKEITGKQFEFYKENVLNREKMNEIFLENNIEAVIHFAGFKAVGESTTTPLAYYYNNIISAIVLCDVMQKHNVKNFIFSSSATVYGIPKTLPITEEFPLSVTNPYGQTKLMIEQIMRDVAKADDEWSIALLRYFNPFGAHQSGRIGEDPNGIPNNLMPYVTQVAVGKLKELNIFGNDYPTKDGTGVRDYIHVVDLAKGHVKALEKVLKTKGIEAYNLGTGKGYSVLEMVKAFEKVSGKKIPYKVIGRRPGDVAICFADVSKAKRELGWEAEYGLEEMCVDSWRWQVNNKNGYQMI

SEQ ID NO: 31395 - protein, 486 aa, Arabidopsis thaliana
MPAPTTEIEPIEAQSLKKLSLKSLKRSLELFSPVHGQFPPPDPEAKQIRLSHKMKVAFGGVEPVVSQPPRQPDRINEQPGPSNALSLAAPEGSKSTQKGATESAIVVGPTLLRPILPRGLNYTGSSGKSTTIIPANVSSYQRNLSTAALMERIPSRWPRPEWHAPWKNYRVIQGHLGWVRSVAFDPSNEWFCTGSADRTIKIWDVATGVLKLTLTGHIEQVRGLAVSNRHTYMFSAGDDKQVKCWDLEQNKVIRSYHGHLSGVYCLALHPTLDVLLTGGRDSVCRVWDIRTKMQIFALSGHDNTVCSVFTRPTDPQVVTGSHDTTIKFWDLRYGKTMSTLTHHKKSVRAMTLHPKENAFASASADNTKKFSLPKGEFCHNMLSQQKTIINAMAVNEDGVMVTGGDNGSIWFWDWKSGHSFQQSETIVQPGSLESEAGIYAACYDNTGSRLVTCEADKTIKMWKEDENATPETHPINFKPPKEIRRF

SEQ ID NO: 31396 - protein, 184 aa, Mesorhizobium sp. ICMP 13190
WGFDGSSTMQAEGHSSDCVLKPVAVYPDPTRTNGVLVMCEVMMPDGVTPHASNKRATVLDDEGAWFGFEQEYFFYKDGRPLGFPETGYPAPQGPYYTGVGYKNVGDVARQIVEEHLDLCLAAGINHEGINAEVAKGQWEFQIFGKGSKKAADQMWMARYLLLRLTEKYCIDIEFHCKPLGDTDW

SEQ ID NO: 31397 - protein, 388 aa, Bacillus cereus ATCC 10987
MSSAFIYSDDFRGYSFSPDHPFNQLRVTLTYDLLQKGGFISPSQIISPRMATDEEIAYIHTEEYINAVKRAGEGKLEKSIAMTYGLGTEDTPMFPNMHEASALLVGGTLTAVDAVLSGKVKHALNLGGGLHHGFRGKASGFCIYNDSSIAMKYIQKKYGLRVLYIDTDAHHGDGVQWSFYDDPNVCTISLHETGRYLFPGTGAVNERGQGNGYSYSFNVPLDAFTEDESFLDSYRTVVKEVAAYFKPDIILTQNGADAHYYDPLTHLCATMNIYREIPKLAREIANEYCEGRWIAVGGGGYDHWRVVPRAWALIWLEMNNIQNISGYLPPEWIEAWKGQAETELPLTWEDPDNMYKPIPRKPEIEEKNALTVAKSLEIIRNNMTKSLY

SEQ ID NO: 31398 - protein, 276 aa, Mesorhizobium sp. ICMP 11541
WGFDGSSTMQAEGHSSDCVLKPVAVYPDPTRTNGVLVMCEVMMPDGVTPHASNNRATILDDEGAWFGFEQEYFFYKDGRPLGFPETGYPAPQGPYYTGVGYKNVGDVARQIVEEHLDLCLAAGINHEGINAEVAKGQWEFQIFGKGSKKAADQMWMARYLLLRLTEKYRIDIEFHCKPLGDTDWNGSGMHANFSTSYMREVGGKAYFESLMAQFDKNLMDHIAVYGPDNDKRLTGKHETAPWNKFSYGIADRGASIRVPHSFIKNDYKGYLEDRRP

SEQ ID NO: 31399 - protein, 106 aa, Glycine max
ECDEDNAAGSEIRSVVLAGQRFYEKEGLPADPMAKIDQTRMWNVGDPVCSTRPPGDLRPSSPFTARVYLALMMAHIDILRKNVHSYSDTNTESVTESVDSLNPIKH

SEQ ID NO: 31400 - protein, 392 aa, Burkholderia vietnamiensis G4
MTEAVIVSTARTPLAKSWRGAFNMTHGATLGGHVVAAALERAKLDPARIEDVIMGCANPEGATGANIARQIALRAGLPVSVPGMTVNRFCSSGLQTIALAAQRIIAGEGDVYVAGGVESISCVQNEMNRHMIQEGWLVEHKPEIYWNMLQTAENVAKRYGIAKERQDEYGVRSQLRAAAALEAGRFRDEIVPITVRAGIADKATGRLYTQEVTVSADEGIRPDTTLEGVSKIRSAVPGGVITAGNASQFSDGAAACVVMNADVAQREGLQPLGVFRGFAVAGCEPDEMGIGPVFAVPKLLKQTGLKIDDIGLWELNEAFAVQVLYCRDTLGIPDERLNVNGGAIAVGHPYGVSGARLTGHALLEGKRRGVKYVVVTMCIGGGQGAAGLFEIV

SEQ ID NO: 31401 - protein, 276 aa, Mesorhizobium sp. ICMP 11722
WGFDGSSTMQAEGHSSDCVLKPVAVYPDPTRTNGVLVMCEVMMPDGVTPHASNKRATILDDEGAWFGFEQEYFFYKDGRPLGFPESGYPAPQGPYYTGVGYKNVGDVARQIVEDHLDLCLAAGINHEGINAEVAKGQWEFQIFGKGSKKAADQMWIARYLLLRLTEKYRIDIEFHCKPLGDTDWNGSGMHANFSTAYMREVGGKAYFESLMAQFDKNLMDHIAVYGPDNDKRLTGKHETAPWNKFSYGIADRGASIRVPHSFIENDYKGYLEDRRP

SEQ ID NO: 31402 - protein, 230 aa, Burkholderia sp. 383
MIDVYSWATPNGHKVHIMLEETGLAYRVHPVDIGAGDQFKPEFLTISPNNKIPAIVDPDGPGGQPISLFESGAILIYLAEKTGKFLPTDPAARYATLEWLMFQMGGVGPMLGQAHHFRLYAPEKIEYAVNRYTNEARRLYNVMDKRLGESEYLAGDAYTIADIATFPWTRSWQNQGIVLDELPNVKRWYDAIAARPAVQRGVEVLASMRKALQDDKAREVLFGATQYAKH

SEQ ID NO: 31403 - protein, 143 aa, Burkholderia vietnamiensis G4
MSHDSDDKTYPYQKDDAELRRRLTPMQYEVTQHAATERAFTGEYTDTEDAGIYKCVVCSTPLFESGAKFHSGCGWPSYFKPLNGEVIDEKIDRSHGMVRVEVRCNHCGAHLGHVFEDGPRDQTGLRYCINSAALNFESRPENE

SEQ ID NO: 31404 - protein, 396 aa, Streptomyces coelicolor A3(2)
MRGGQRRASRLRPPTYRRRPPPAASILEVAPVQTQTLTQTDTAAGGAEPDAERGVLLAMPAQPGAGAALPHPGAPVDVPEHPEPPPPTRTESGGPSSDLFRQYLREIGRIPLLSAAEEVDLARRVEAGLFAEEKLRCSPGLDDRLALDLDRLVVLGRLAKRRLIEANLRLVVSVAKRYVGRGLTMLDLVQEGNLGLIRAVEKFDYARGYKFSTYATWWIRQAMSRALADQARTIRVPVHVVELINRVVRVQRRMLQERGCEPTPQEVAAHLDLAPERVGEVLRLAQEPVSLHAPVGEEDDVALGDLIEDGDAASPVESAAFLLLRQHLEAVLSTLGERERKVVQLRYGLADGRPRTLEEIGRLGGVTRERIRQIESKTLSKLRDHAYADQLRGYLD

SEQ ID NO: 31405 - protein, 504 aa, Mesorhizobium loti MAFF303099
MTSTPLLRAARRTLIAGTAALLVGTVAAPSFVTPVFAADGPASVADLAQGVLGAVVNISTSQTVKGTEGPGAVPMPQLPEGSPFQDFFDDFFKNRGGDKDNSGQKVQSLGSGFVIDAEQGIVVTNNHVIADADDIEVNFSDGVTLKATLVGTDTKTDVAVLKVDPKGHKLTAVKFGDSTKMRVGDWVMAVGNPFGLGGTVTVGIVSARNRDINSGPYDDFIQTDAAINRGNSGGPLFNSAGEVIGINTAIISPSGGSIGIGFSIPSQLASGVVDQLRQFGETRRGWLGVRIQPVTDDIAESLGMATAKGALVAGVIKGGPVDNGTIQAGDVIIKFDGKDIHEMRDLPRVVAESPVGKAVDVLIVRKGVEQTVKVTLGRLEDGEKLASGGNGNTDQDKGNKAPAVSTASVLGMTVGELNDETRKKFSIAADVSGVVITDVAKDSAAAERGIQPGEVITEIAQESVATPKDVMDRIGALKEQGRKNALLMLASKTGELRFVTIRMD

SEQ ID NO: 31406 - protein, 255 aa, Pseudomonas putida KT2440
MSKTHLFDLDGKIAFVSGASRGIGEAIAHLLAQQGAHVIVSSRKLDGCQQVADAIIAAGGKATAVACHIGELEQIQQVFAGIREQFGRLDVLVNNAATNPQFCNVLDTDPGAFQKTVDVNIRGYFFMSVEAGKLMRENGGGSIINVASINGVSPGLFQGIYSVTKAAVINMTKVFAKECAPFGIRCNALLPGLTDTKFASALVKNEAILNAALQQIPLKRVADPKEMAGAVLYLASDASSYTTGTTLNVDGGFLS

SEQ ID NO: 31407 - protein, 367 aa, Bacillus halodurans C-125
MAIENKGIQRELKHEENLFQVLTPKGECQYEGSEFLDKTFVLSMYKQMINCREFDEKALKLQRQGRIGTYASFKGQEACQIGGALALRPTDWLFPTYRDHAAISTHGQPWHRIFLYWMGHMDGSLSPDDRNILPPAVPIATQMLHAVGTAWADKLKGNPHVSLVFFGDGATSEGDFHEALNFAGVYQTPTIFFCQNNGYAISVPFEKQSASKTIKQRSVAYDMRGERVDGNDIFAVYLTVKRAIEQARKGRGPTLIEAVTTRFGSHTTADDAKKYRDQEEIERTWKEMQDPLTRLKAYIQAKGWLSEEEEAQMKAKIRETIDEELSMAEQYPKPSISQMFEHVYENQPWYVKEQEQELAELLGKEKR

SEQ ID NO: 31408 - protein, 304 aa, Oryza sativa
MAVAARLRSAGARLVVGPAAMAVGRGGGGEGRWMGTATAEAAAGIARWEPMGAREYYDYRRAIYGDITHKAILVDAAGTLLAPTEPMAQVYRTIGEKYGVNYSEDEILMRYRRAYAQPWGRSRLRYVDDGRPFWQHIVSSSTGCSDLQYFEELYQYYTTAKAWQLCDPDAKYVFEALRKAGVKTAVVSNFDTRLRPLLQALNCDHWFDAVAVSAEVAAEKPNPTIFLKACEFLGVKPEEAVHIGDDRRNDLWGARDAGCDAWLWGSDVYSFKENQAHIIKSGLLCRSQKGSELRCKESFVRWVT

SEQ ID NO: 31409 - protein, 228 aa, Zea mays
MAGADVDVGTELRLGLPGGGAAAAKKDTIDLKLKLPTAGMEEAAAAAARPEPAAEKAKRPAEAPAADAEKPPAPKAQAVGWPPVRSYRRNAMTVVQAVRSKKEEEPEKQQQPAAANAFVKVSMDGAPYLRKVDLKTYGSYKDLSAALKNMFGTFTASGNSMNEGRLVDPAGDADDVVTTYEDKDGDWMLVGDVPWEMFVDSCKRLRIMKSSEAIGLAPRTKDKCKNKS

SEQ ID NO: 31410 - protein, 682 aa, Glycine max
MSGGGCSSIVWFRRDLRIEDNPALTAGVRAGAVVAVFIWAPEEEGQYYPGRVSRWWLKNSLAHLDSSLRNLGTPLITKRSTDTLSSLFEVVKSTGATQLFFNHLYDPLSLVRDHRAKEVLTAQGITVRSFNADLLYEPWDVNDAHGRPFTTFAAFWERCLSMPYDPESPLLPPKRIIPGDASRCPSDTLLFEDELEKASNALLARAWSPGWSNADKALTAFVNGALIEYSKNRRKADSATTSFLSPHLHFGEVSVKKVFHLVRIKQVFWANEGNKAGEESVNLFLKSIGLREYSRYISFNHPYSHERPLLGHLKFFPWVVNEGYFKAWRQGRTGYPLVDAGMRELWATGWLHDRIRVVVSSFFVKVLQLPWRWGMKYFWDTLLDADLESDALGWQYISGSLPDGREIDRIDNPQFEGYKFDPNGEYVRRWLPELARLPTEWIHHPWNAPESVLQAAGIELGSNYPLPIVGIDAAKVRLLEALSQMWQQEAASRAAMENGTEEGLGDSSESAPIAFPQDIQMEERPEPVRNNPPHGTRRYQDQMVPSITSSHVRVEEEETSSDLRNSAADSRAEVPINVTTQQNARETVNQGVLLNTNRNTRVQNNPTTWLRNAAEDSTAESSSSTRRERDGGVVPVWSPPASNFSEQFVDDENGIGTGSSYLQRQHPQSHQLMNWTRLPQTG

SEQ ID NO: 31411 - protein, 78 aa, Brassica napus
  misc_feature (22)..(22): Xaa can be any naturally occurring amino acid
  unsure (1)..(78): unsure at all Xaa locations
MEEEQIRVVKIIVIGVILWGVXFILTRRIFSSYSFDFSNRLLSTVHATVAVTLATLSVQDWSCPVCPRASKPSPQQVS

SEQ ID NO: 31412 - protein, 473 aa, Bacillus halodurans C-125
MVVGEVAVEVDTVVVGGGPGGYTAAIRLGQLGKSVVLIEKNQLGGVCLNRGCIPSKALIQMAEKFDELTHLKEMGVELPGKPASIDLHKWQKWKQEITTKLNTGIHQLCQQNGVTVVTGEAHFLSSHRVGVETGNAFDVYKFEHAIVATGSSPRSLPFAEVDHTYILDSTSALELTEVPRSLSIVGGGYIGMELGLAFAKLGSAVTIVEMSPHILPATAPHISREVLNKAEKLGVTIKSSTSVEHLTVNDGYVELIVQSNGEQETLQSEKALMTVGRSPNTKGLGLEQVGVFFNEDGTLPINEECRTNIDHIFAIGDVTEGPALAHKASKQGIVAAEVIGGLPSAIDSSYIPYVVFTDPQIAGVGLTAKQAQEQGHRVKTARFPFQANGLALVASKPDGFAEVIVDEESHLLLGFHIVGADASNLIGEGVLALELGARVEDVALTVHPHPTFSEGWLGAAEAALGHAIHVVNK

SEQ ID NO: 31413 - protein, 760 aa, Bordetella pertussis Tohama I
MTKSTGKSPSAIDAATAQSTTAKRAASMAAEKAPAKTAVKVAKPAAKTAAKKTATKTVAAKTAAADKPAKTTKARAKKAEDKLADLVGAARPAPSGRRPGRPAKNANNDSDAFDDSMDGEGEVLPDLKPPKRGGKRGKADPKDLIARGPVSPEEYEARRNRLKQLIKLGKDRGYLTYGEINDHLPDDLVDAEAIDGIISTFSDMGIAVYDQAPDAETLLMSENAPVASNDDDVEDEAEAALTTVDSDFGRTTDPVRMYMREMGSVELLTREGEIEIAKRIEDGLKHMVMAISACPTTINEILAHITRVREGQAQIDEVVDGLVDPEDGEEYAGAGVTADEDEGDDGPAGGMSSKQLEDLRVKALAKFDEVSKQFEKMRQSYEKEGYKSDAYLKAQDIIQTELMGIRFTAKMVEKLADTLRAQVEEVRQLERAVLHTCVDRAGMPRSHFLKAFPGNETNLQWVLDEVAAAHAYSETLERQIPAVQELQQKLIDLQTRVVLPLKDLKDVNKRMATGEAKARKAKREMTEANLRLVISIAKKYTNRGLQFLDLIQEGNIGLMKAVDKFEYRRGYKFSTYATWWIRQAITRSIADQARTIRIPVHMIETINKMNRISRQILQETGAEPDPATLAQKMDMPEDKIRKILKIAKEPISMETPIGDDDDSHLGDFIEDTATLAPSDAALHGSMRDVVKEVLDSLTPREAKVLRMRFGIEMSTDQTLEEVGKQFDVTRERIRQIEAKALRKLRHPSRADKLKSFLEGQ

SEQ ID NO: 31414 - protein, 336 aa, Mycobacterium leprae TN
MHAIVAESANQMVWREVPDVTAGPGEVLIEVAASGVNRADVLQVAGKYPHPPGASAIIGMEVAGVVAAVSSGVTEWSVGQEVCALLAGGGYAEYVAVPASQVMPIPKGVNVVDSAGIPEVACTVWSNLVMAAHLSAGQLLLLHGGTSGIGSHGIQVARALGAKVAVTAGSEEKLEFCRALGAQITINYRDEDFVARLQQQNGGADVILDIMGAAYLDRNIDALAIDGQLIVIGLQGGVKGELNLGKVLSKRARIIGSTLRARPVNGPNSKSEIVAAVTASIWPMIADGSVRPIIGARMAVQQAADAHQLLLSGKVSGKIVLTVAGSGTETLLSRHH

SEQ ID NO: 31415 - protein, 681 aa, Oryza sativa (japonica cultivar-group)
MITFADLAEPAPGAERCVDRQLWLACAGGMCTVPPVGAAVYYFPQGHAEHALGLAAPELSAARVPALVPCRVASVRYMADPDTDEVFARIRLVPLRAAEDGDVEEDGAAAGEEHEKPASFAKTLTQSDANNGGGFSVPRYCAETIFPRLDYAADPPVQTVVAKDVHGVAWNFRHIYRGTPRRHLLTTGWSTFVNQKKLVAGDSIVFLRGDGGDLHVGIRRAKRGFCGGGGGAEEASLPGWDQYGGLMRGNASPCAAAKGRGKVRAEDLVEAARLANGGQPFEVVYYPRASTPEFCVRAAAVRAAMRVQWCPGMRFKMAFETEDSSRISWFMGTVASVQVADPIRWPQSPWRLLQVTWDEPDLLQNVKRVSPWLVELVSSMPAINLSSFSPPRKKPRILAYPEFPFEGQLLNPAFPPNPLAHGHHHYHHNHPSFFPFPDVSAPAGIQGARHAQFGPSLSDLHLTHLQSSLMYPGLRRPDHVGPTSIPPPRISTDLTMGSSPPARALSMGAKKPDDAKPPGLMLFGQRILTERQMSLSGTTSPAATGNSSLNWNTEKGASEGSGSGVIQNSPTDNTSSERLQWFRENSTVSELGLEPGQCKVFIESDTVGRNLDLSSLASFEQLYGRLSEMFCIDSAELRSRVLYRGATGEVRHAGDEPFSEFIKLARRLTILTDAGSDNLGS

SEQ ID NO: 31416 - protein, 338 aa, Nocardioides sp. JS614
MPVAARLHSVGDLRVEQVAEPPAPTVGWSTVAVTSVGLCGSDLHWFTDGGTGEVTLDRPVVPGHELAGRALDGPYAGRRVAIDPAIPCGVCEQCRAGHGNLCPDVRFAGHAGLDGGLQERLVWPDHLLFPLPDDLSDDAGALLEPLGVAIHAVGVAHVRPGHDVLVVGGGPIGVLTAAVARRTGAAQVVVSEPLAHRRETARRFGADVAVAPEEASSAVDELTGGRGVDVVIEMAGADDAIGTAVACARPGARIALGGIPSVPLSSFPAAPARRKGLTFAMVRRMHETYPRAIELATSGIDLDALVSDRFPLADAPLAFTHAVARTGDKTVIAVSGTR

SEQ ID NO: 31417 - protein, 509 aa, Solanum tuberosum
MTLRISELFAAAIIYIIVHIIISKLIATVRERGRRLPPGPTGWPVIGALSLLGSMPHVALAKMAKNYGPIMYLKVGTCGMVVASTPNAAKAFLKTLDINFSNRPPNAGATHLAYNAQDMVFAPYGPRWKLLRKLSNLQMLGGKALENWANVRANELGHMIKSMFDASHVGECVVIADMLTFAMANMIGQVMLSKRVFVEKGAEVNEFKNMVVELMTVAGYFNIGDFIPKLAWMDLQGIEKGMKSLHKKFDDLLTKMFDEHEATTYERKENPDFLDVVMANKDNSEGERLSTTNIKALLLNLFTAGTDTSSSVIEWALAEMMKNPKIFKKAQEEMDQVIGKNRRLIESDIPNLPYLRAICKETFRKHPSTPLNLPRVSTEPCTVDGYYIPKNTRLSVNIWAIGRDPDVWENPLEFNPERFLSGKNAKIEPRGNDFELIPFGAGRRICAGTRMGIVMVEYILGTLVHSFDWKLPNDVIDINMEESFGLALQKAVPLEAMVTPRLSLDVYCC

SEQ ID NO: 31418 - protein, 500 aa, Streptococcus agalactiae A909
MNKRVKIVATLGPAVEFRGGKKFGESGYWGESLDVEASAEKIAQLIKEGANVFRFNFSHGDHAEQGARMATVRKAEEIAGQKVGFLLDTKGPEIRTELFEDGADFHSYTTGTKLRVATKQGIKSTPEVIALNVAGGLDIFDDVEVGKQILVDDGKLGLTVFAKDKDTREFEVVVENDGLIGKQKGVNIPYTKIPFPALAERDNADIRFGLEQGLNFIAISFVRTAKDVNEVRAICEETGNGHVKLFAKIENQQGIDNIDEIIEAADGIMIARGDMGIEVPFEMVPVYQKMIITKVNAAGKAVITATNMLETMTDKPRATRSEVSDVFNAVIDGTDATMLSGESANGKYPVESVRTMATIDKNAQTLLNEYGRLDSSAFPRNNKTDVIASAVKDATHSMDIKLVVTITETGNTARAISKFRPDADILAVTFDEKVQRSLMINWGVIPVLADKPASTDDMFEVAERVALEAGFVESGDNIVIVAGVPVGTGGTNTMRVRTVK

SEQ ID NO: 31419 - protein, 337 aa, Phaeosphaeria avenaria f. sp. triticae
MVVKVGINGFGRIGRIVFRNAIEHNDVEIVAVNDPFIEPHYAAYMLKYDSQHGQFKGDIKVDGNDLTINGKTIRFYTEKDPANIPWSETGAYYVVESTGVFTTTDKAKAHLKGGAKKVVISAPSADAPMFVMGVNNETYTKDIEVLSNASCTTNCLAPLAKVIHDKFTIIEGLMTTVHSYTATQKVVDGPSAKDWRGGRTAAQNIIPSSTGAAKAVGKVIPDLNGKLTGMSMRVPTSNVSVVDLTVRLEKGATYDEIKEAIKAAADGPLNGILGYTEDEIVSTDLNGDTRSSIFDAKAGISLNKNFVKLVSWYDNEWGYSRRVLDLLVYIAKVDGNA

SEQ ID NO: 31420 - protein, 276 aa, Mesorhizobium sp. ICMP 12635
WGFDGSSTMQAEGHSSDCILKPVAVYPDPTRTNGVLVMCEVMMPDGVTPHASNKRATILDDEGAWFGFEQEYFFYKDGRPLGFPETGYPAPQGPYYTGVGYKNVGDVARQIVEEHLDLCLAAGINHEGINAEVAKGQWEFQIFGKGSKKAADQMWIARYLLLRLTEKYRIDIEFHCKPLGDTDWNGSGMHANFSTAYMREVGGKAYFESLMAQFDKNLMDHIAVYGPDNDKRLTGKHETAPWNKFSYGIADRGASIRVPHSFIKNDYKGYLEDRRP

SEQ ID NO: 31421 - protein, 275 aa, Streptococcus agalactiae A909
MKYITEFIATAFLIILGNGAVANVDLKGTKGNNSGWIIIAIGYGLGVMMPALMFGNVSGNHINPAFTLGLAFSGLFPWAHVGQYILAQILGAMFGQLVVVMVYQPYFVKTENPNHVLGSFSTISALDDGQKSSRKAAYINGFLNEFVGSFVLFFGALALTKNYFGVELVGKLVQAGYDQTTAATRISPYVTGSLAVAHLGIGFLVMTLVASLGGPTGPALNPARDLGPRIVHRLLPKQILGQAKEDSKWWYAWVPVLAPIVASILAVALFKLLYL

SEQ ID NO: 31422 - protein, 276 aa, Mesorhizobium sp. ICMP 14319
WGFDGSSTMQAEGHSSDCVLKPVAVYPDPTRTNGVLVMCEVMMPDGVTPHASNKRATILDDEGAWFGFEQEYFFYKDGRPLGFPESGYPAPQGPYYTGVGYKNVGDVARQIVEDHLDLCLAAGINHEGINAEVAKGQWEFQIFGKGSKKAADQMWIARYLLLRLTEKYRIDIEFHCKPLGDTDWNGSGMHANFSTAYMREVGGKAYFESLMAQFDKNLMDHIAVYGPDNDKRLTGKHETAPWNKFSYGIADRGASIRVPHSFIKNDYKGYLEDRRP

SEQ ID NO: 31423 - protein, 127 aa, Chromobacterium violaceum ATCC 12472
MAYSEKVLDHYENPRNVGSFDKGDDSIGTGMVGAPACGDVMKLQIKVGADGVIEDAKFKTYGCGSAIASSSLVTEWVKGKSLDEALAIKNTAIAEELALPPVKIHCSILAEDAIKAAVEDYKQKHGK

SEQ ID NO: 31424 - protein, 1065 aa, Bacillus cereus ATCC 14579
MEKKVSAIPQPKTYGPLGNLPLIDKDKPTLSFIKIAEEYGPIFQIQTLSDTIIVVSGHELVAEVCDETRFDKSIEGALAKVRAFAGDGLFTSETHEPNWKKAHNILMPTFSQRAMKDYHAMMVDIAVQLVQKWARLNPNENVDVPEDMTRLTLDTIGLCGFNYRFNSFYRETPHPFITSMTRALDEAMHQLQRLDIEDKLMWRTKRQFQHDIQSMFSLVDNIIAERKSSGDQEENDLLSRMLNVPDPETGEKLDDENIRFQIITFLIAGHETTSGLLSFAIYFLLKNPDKLKKAYEEVDRVLTDPTPTYQQVMKLKYMRMILNESLRLWPTAPAFSLYAKEDTVIGGKYPIKKGEDRISVLIPQLHRDKDAWGDNVEEFQPERFEELDKVPHHAYKPFGNGQRACIGMQFALHEATLVMGMLLQHFELIDYQNYQLDVKQTLTLKPGDFKIRILPRKQTISHPTVLAPTEDKLKNDEIKQHVQKTPSIIGADNLSLLVLYGSDTGVAEGIARELADTASLEGVQTEVVALNDRIGSLPKEGAVLIVTSSYNGKPPSNAGQFVQWLEELKPDELKGVQYAVFGCGDHNWASTYQRIPRYIDEQMAQKGATRFSKRGEADASGDFEEQLEQWKQNMWSDAMKAFGLELNKNMEKERSTLSLQFVSRLGGSPLARTYEAVYASILENRELQSSSSDRSTRHIEVSLPEGATYKEGDHLGVLPVNSEKNINRILKRFGLNGKDQVILSASGRSINHIPLDSPVSLLALLSYSVEVQEAATRAQIREMVTFTACPPHKKELEALLEEGVYHEQILKKRISMLDLLEKYEACEIRFERFLELLPALKPRYYSISSSPLVAHNRLSITVGVVNAPAWSGEGTYEGVASNYLAQRHNKDEIICFIRTPQSNFELPKDPETPIIMVGPGTGIAPFRGFLQARRVQKQKGMNLGQAHLYFGCRHPEKDYLYRTELENDERDGLISLHTAFSRLEGHPKTYVQHLIKQDRINLISLLDNGAHLYICGDGSKMAPDVEDTLCQAYQEIHEVSEQEARNWLDRVQDEGRYGKDVWAGI

SEQ ID NO: 31425 - protein, 226 aa, Brassica napus
MSWWWAGAIGAAKKKFDEDEPTQTYESVALIIGVTGIVGNSLAEILPLSDTPGGPWKVYGVARRPRPTWNADHPIDYIQCDVSDEEDARSKLSPLKDVTHVFYVTWTNRSSEGENCKVNGSMLRNVLRAVVPNAPNLRHVCLQTGTKHYLGPFDSVGKDVDRHEAPFTEEMPAPPGAQITHRLEAGRAAEPEGDESGTRPCGRTKGYHGQGADRPAEGRGGGSATQ

SEQ ID NO: 31426 - protein, 511 aa, Cryptococcus neoformans var. neoformans JEC21
MALVDVEEQSTAGPSHSRSSSVLAATAAESVSSSRRESRRGSKDREVGDGGRGGDDHVSFKTAEEDIELQDSATAPLLAGAAASPRLLDSEERHLLEAEGHNSVSRGSILDAVTNMANSIIGAGIVGLPYAVSEAGFVMGVFLLIALAAISDWTIRLVILTSKLSGRESYTETMYHCFGPLGAMAVSFFQFSFAFGGTAAFHVIVGDTIPRVVSYIFPSFAENVFLRLFVNRQAVIIMCTLFISFPLSLHRDIVKLSKSSSFALVSMVIIIVSVLFRSVAVDPSLRGSSTDVFSIVKPGVFQAIGVISFAYACHHNSNYIYKSINVPTLDRFDMVTHISTGISLIACLLVAVCGYVVFTDKTEGNILNNFSSEDWLINIARFCFGANMSTTIPLEVFVCREVIEETFYKSKPFSKLRHVIITSSVIFIAMGLALTTCDLGVVLELAGGLSASALAFILPASAYFVMLSGPWSSRRKLPALLVASFGVIVLVLSCGLSLKKAWSGEGGKSVC

SEQ ID NO: 31427 - protein, 214 aa, Brassica napus
MTGFSVSLIVSNFSNVASYLSPIFETIPSKVVPAQIEKVVSLVSRTGRDLQRYDNSGYRQVVGCVPYRYKTQQVNGTESKEIEVLLISAQKGKGMLFPKGGWEIDESMEEAALRETIEEAGVTGELEEKLGKWQYKSKRHNIIHHGYMFALLVDQEFERWPEAEMRQRKWVGLDEAGEVCQNWWMREALEAFVNVKCNTEEVEIEASNESGNDV

SEQ ID NO: 31428 - protein, 252 aa, Cryptococcus neoformans var. neoformans JEC21
MSVYVGESRGELLAWLNDLLAPTVVTKLEQCGTGSVYCQIIDSIYGDLPMSRVKFNARMEYEYLDNFKILQKAFTRHKIEKPIPVDRLIKCKMQDNLEFLQWIKKYWDMHSRGEGYDAQARAGGHIAGVRASTSRPTAARTRPAPAVTGSRTVSSASQQANSAQVAAMQARVAEIEAHSEGLLKERDFYFDKLRNIELIVQERLAVEGITPEESDVMTKIQDILYATIEGFEVPQEEDFIEEQPVEGEEETF

SEQ ID NO: 31429 - protein, 162 aa, Burkholderia sp. 383
MSAIQHFFKTFFLTELLQGLALTGRYTFKRKVTVQFPEEKTPISPRFRGLHALRRYENGEERCIACKLCEAVCPAMAITIESETRADNTRRTTRYDIDLTKCIFCGFCEESCPVDSIVETQILEYHGEKRGDLYFTKEMLLAVGDRYEKDIAAAKAADAPYR

SEQ ID NO: 31430 - protein, 97 aa, Bifidobacterium longum NCC2705
MSIKLTPLEDKIIVKQAEAQTQTASGLYIPDNAKEKPQQGEVLAVGPGRRDDKGERIPMDVKVGDKVLYSKYGGTEVHYEGEDYLIVGARDILAILG

SEQ ID NO: 31431 - protein, 456 aa, GIBBERELLA ZEAE PH-1
MSSKHANHTAADETSPLINGGASSAHDTTSRRNGNGNGHATLSRDSSTMTFLFDSKHTPGIHNQNIAIRSLAYSWHIAKVTLLSNYVNFLLVMVPLGIIAGKMGWSSTAVFTINFFAIIPLAAVLSFATEEFSLKLGDTLGGLLNATFGNAVELIVSIVALQRNEIELVQASMLGSILSNLLLVMGMCFLFGGIVHRGESGNGREQVFSSATAQTTCSLMTLSSASLVIPAALYAVLDQSGSKEKAQSILTLSRGTAIILLLLYVLYLVFQLRTHSNLFDAENPQEDEDGEPEEPTIGPVAAIAVLVVTTVLVTVCADYLVDSIDDLVTTSGISRGFIGLILIPIVGNAAEHVTAVVVAVRDKMDLAMGVAIGSSIQIALLVTPFLVIVGWIIGAEMTLHFETFQTVAFAVSVLVVTYTVQDGKSNYLEGAMLMGLYIIIALAFYATPTDVMDPSN

SEQ ID NO: 31432 - protein, 374 aa, Zea mays
MQPQHNRLAFPSPPARLSLLSDSLSRSRVHLAAASKRDQMAPLGDGGAAAAAASNNLVVSFGEMLIDFVPDVAGLSLAESGGFVKAPGGAPANVACAIAKLGGSSAFVGKFGDDEFGHMLVNILKQNNVNSEGCLFDKHARTALAFVTLKHDGEREFMFYRNPSADMLLTEAELDLGLVRRARVFHYGSISLISEPCRSAHMAAMRAAKAAGVLCSYDPNVRLPLWPSPDAAREGILSIWKEADFIKVSDDEVAFLTRGDANDEKNVLSLWFDGLKLLVVTDGDKGCRYFTKDFKGSVPGFKVDTVDTTGAGDAFVGSLLVNVAKDDSIFHNEEKLREALKFSNACGAICTTKKGAIPALPTVATAQDLIAKAN

SEQ ID NO: 31433 - protein, 422 aa, Streptomyces curacoi
MTRRVAVTGIGVVAPGGIGVPAFWDLLSSGRTATRGITLFDPEGLRSRIAAECDFDPLAHGLDPELVERADRYIQFALVAADEAVTDSGIDFGTENPWRVAVSLGSAVGGTTRLEHDYVLVSERGQRWDVDHRAAEPELHRAFSPSTLAADVAERFGAQGPVQTVSTGCTSGLDAVGYAFHTIEEGRADVCIAGASDSPISPITMACFDAIKATSPNNDDPEHASRPFDAHRDGFVMGEGAAVLVLEELEHARARGAHVYCEIGGYATFGNAYHMTGLTSEGLEMARAIDVALDHARVDPTDIDYVNAHGSGTRQNDRHETAAVKKSLGAHAYDTPMSSIKSMVGHSLGAIGAIEVVACVLALARQVVPPTANYETPDPECDLDYVPRTARPRRLDHVLSVGSGFGGFQSAVLLTGPAGRKR

SEQ ID NO: 31434 - protein, 358 aa, Arabidopsis thaliana
MSSFTSKFADELIANAAYIGTPGKGILAADESTGTIGKRLASINVENVESNRRALRELLFTTPGALPCLSGVILFEETLYQKSSDGTPFVDMLKSAGVLPGIKVDKGTVELAGTNGETTTQGLDGLGDRCKKYYEAGARFAKWRAVLKIGVNEPSQLAIHENAYGLARYAVICQENGLVPIVEPEILVDGSHDIQKCAAVTERVLAACYKALSDHHVLLEGTLLKPNMVTPGSESAKVAPEVIAEHTVRALQRTVPAAVPAIVFLSGGQSEEEATRNLNAMNQLKTKKPWSLSFSFGRALQQSTLKTWGGKEENVKKAQEAFLVRCKANSEATLGAYKGDAKLGEGAAESLHVKDYKY

SEQ ID NO: 31435 - protein, 112 aa, Listeria monocytogenes
MTDRKNLTTNQGVPVGDNQNSMTAGRKGPTLIEDYVLIEKLAHFDRERVPERVVHARGAGAHGKFVTKKSMKKYTMAKFLQEEGTETEVFARFSTVIHGQHSPETLRDPRGF

SEQ ID NO: 31436 - protein, 153 aa, Glycine max
QNLKKLTEVFGVEWANDAIVPKVMAMAQHPNYLYRMTTCFAVSTLAPALSLDVIEQSIIPMMDKLVNDDIPNIRFNVAKSYGQLINTLKQLLEQGTVIALEKAGTPGQGCQKATDVITKSILPTLEKLQQVDDVDVRYFATTAAQSFTDAMQT

SEQ ID NO: 31437 - protein, 651 aa, Magnetococcus sp. MC-1
MYEQVSHSLLNEIMLELDPEILKQNQMRYFYTRLGANFYAIHSIAKVLYGNRNDFNEQMKRLVETMARQYIARPAQYRESDLEREKDHTWFLHQQWVGMALYSDGFANDLQGLNTKLSYLQELGINMIHIMPLLDCPPNKSDGGYAIRDFRKIDSRAGTLEDITTLADSMHTRGMLLTLDVVLNHTSDEHEWARRAREGDSDYQNYFYVFKDRSMPDLFEESMVEIFPQTAPGNFTWSEEMGRWVMTSFNSYQWDLNYSNPSVLIEILDIILYWANLGADIMRLDAVAFLWKKIGSTCQNQREAHLILQLLKDCCQVTAPGVLFIAEAIVSPLEITKYFGEDAINAKECEIAYNATLMALLWDAIATKKAELLYRGIKSLPDKLERATWLNYIRCHDDIGLGFDDTDIRQAGYEPFAHRRFLVDYFTGGYTDSPARGRPFGQNDKTGDARISGTLASLAGLESALYEGNEEAVHTSIQMILLLHSVILSFGGIPLLYYGDELGTLNDYSYEQQESKREDSRWIHRPTIDWDKAELRNQPGSVEYRLFNALKKMIAVRKEIPAFADFNNREMLDLGNPHLLAYARFDFMHASAKVLVICNFDLKPQYVELEQLRQLGFLKSHNLRDASTGESPQRFNDQLAIPAYGFYWLME

SEQ ID NO: 31438 - protein, 159 aa, Holcus lanatus
ERARHLLTSGSSEIPADSTFSNVEEFLEPLELCYRSLCDSGDKTVADGSLLDFLRQVSTFGLSLVKLDIRQESERHTDALDAITAYLGIGSYRSWPEEKRQEWLLSELKGKRPLFGDDLPMNEEVADVIGTFRVLAELPPDCFGAYVISMATAPSDVLA

SEQ ID NO: 31439 - protein, 708 aa, Aspergillus fumigatus
MALDKELLHLHLGDGQQRPYKLSTVATPPDEEQLNLQRSDKDTAEPSQTPRCDTPREAHTEIVQNDTSSLNRIFRFTPVPTLILDSSLRVIEVSESHLAFCGKSRDFVLGASIYELPLATIPAPDIATLNGALHVAITTRAVQVVETIHLPRISSYFSLKITPIFQGSTLLNLVLEAHNVTRTHTESLHNAYINETYKILVDTIRDYAIFMLDARGNIVTWNSGAAIIKGYKADEIIGRHFSVFYGPEDRLADKPGKELELCLRDGKVEDEGWRYRQDGLRFWANVMITPIFSFGRHVGFVKITRDLTERKAAEARMVAAFEESSKMKSDFLANMSHEIRTPMNGMHLALTMLGSTELDTQQREYTSIIEDSMSILLQVINDVLDYSKLSSGTFSLNTDVLSVENIVGAVVRNCKALNPAVEISCSMPPGFPKLLRGDPLRYRQVIQNLVGNAMKFTEKGHVKVTHRFAVEEHDANRYIITTEVTDTGIGVPEDAINTLFTPFTRFADSATKRYQGTGLGLSICKSLAELMDGSVGYKPNPEGKGSCFWLNVRMQAVDIPAPSKDTPAATAENTYEPIEEVKEIAPHMHILLVEDNMVNQIVMLKLLKSLGFERVDTAWDGADAVRQVKQTPLSYNVILMDINMPVMNGLEATTKIREVNSEVPIIALTGNALKGDAETYLARGMNDYVAKPVHRKRLVQLLWKWLGS

SEQ ID NO: 31440 - protein, 266 aa, Triticum aestivum
  misc_feature (91)..(91): Xaa can be any naturally occurring amino acid
  misc_feature (242)..(242): Xaa can be any naturally occurring amino acid
  misc_feature (250)..(250): Xaa can be any naturally occurring amino acid
  unsure (1)..(266): unsure at all Xaa locations
NKFVQKSRLVPVRNSRDIVDPRVRPRVRYSNMVTLQIMDTIFYEAQRQGRISFYLTSNGEEAINIASAAALSAQDIVLPQVHIICSKKECXVLNSIDFTCFSFLGRKFWSQMKYREPGVLLWRGFTLQEFANQLFGNKLDYGKGRQMPIHYGSNRLNYFTVSSPIATQLPQAVGAAYSLKMDKKKACAITYFGDGGTSEGDFHAALNFAAVTEAPVIFFCRNMAGQSAPHRKTVRSDGVVTXGQAYGIRXFRVDGNDSPGVYRAVH

SEQ ID NO: 31441 - protein, 370 aa, Saccharomyces cerevisiae
MAEASIEKTQILQKYLELDQRGRIIAEYVWIDGTGNLRSKGRTLKKRITSIDQLPEWNFDGSSTNQAPGHDSDIYLKPVAYYPDPFRRGDNIVVLAACYNNDGTPNKFNHRHEAAKLFAAHKDEEIWFGLEQEYTLFDMYDDVYGWPKGGYPAPQGPYYCGVGAGKVYARDMIEAHYRACLYAGLEISGINAEVMPSQWEFQVGPCTGIDMGDQLWMARYFLHRVAEEFGIKISFHPKPLKGDWNGAGCHANVSTKEMRQPGGTKYIEQAIEKLSKRHAEHIKLYGSDNDMRLTGRHETASMTAFSSGVANRGSSIRIPRSVAKEGYGYFEDRRPASNIDPYLVTGIMCETVCGAIDNADMTKEFERESS

SEQ ID NO: 31442 - protein, 377 aa, Triticum aestivum
MDHRLVAALLVLLGLLLSPAPAAAAAGDEEPLIRQVVGGADPLDNDLELDSQFLGFVQRFGKTYRDAEEHAHRLSVFKANLRRARRHQMLDPSAEHGVTKFSDLTPAEFRRTFLGLKTTRRSFLREMAGSAHDAPVLPTDGLPEDFDWRDHGAVGPVKNQGSCGSCWSFSASGALEGANYLATGKMEVLSEQQLVDCDHECDPAEPDSCDAGCNGGLMTSAFSYLLKSGGLEREKDYPYTGKDGTCKFEKSKIAASVQNFSVVAVDEEQIAANLVKYGPLAIGINAAYMQTYIGGVSCPYICGRHLDHGVLLVGYGASGFAPSRFKEKPYWIIKNSWGENWGDKGYYKICRGSNVRNKCGVDSMVSTVSATHASKDE

SEQ ID NO: 31443 - protein, 394 aa, Triticum aestivum
GDPRPSKVRSRYWCHSCAEVIVPVEPEKKCPDCDGGFVEEMESEGFEPSTNVRSERNLSLWAPLLLGMMGGSSRRSRPQRDMMDSSSDEDSRQARIRSALRDTDDEDEEDDDDDSDRELEDMIRRRRRRGSSLVRLLQTLRDDLRGLDGIGSDTERDMDSARRERIEKRMARERIQERMERQRERARQIERVSARGRERTESLILINSNNEAIILQGTFGSDDNQEDSSNTSSGVSLGDYFLGPALDTLLQRLAESDLNRSGTPPAKKEAVAALPTVNIEEVLGCSVCLEDFEMGAEAKQMPCQHKFHSHCILPWLELHSSCPICRFQLPTEETKNPCESASTAGAMNRDGDNAAASSSDTESSNRNGDNHSDSPIFSALSTLFSDPFSSDDDE

SEQ ID NO: 31444 - protein, 212 aa, Glycine max
MAPVKLYGATLSWNVTRCVAALEEAGVEYELVPINFGTGEHKSPDHLARNPFGQVPALQDGDLYVFESRAICKYACRKNKPELLKEGDIKESAMVDVWLEVEAHQYTAALSPILFECLIHPMLGGATDQTVIDANLVKIKNVLAVYEAHLSKSKYLAGDFLSLADLNHVSVTLCLAATPYASLFDAYPHVKAWWTDLLARPSVQKVAALMKP

SEQ ID NO: 31445 - protein, 520 aa, Rhodopseudomonas palustris CGA009
MEGDHFDHVSAQTEAHIRKVLRPRRLSLLASAAGLSMVVALGGAGFLTREMPSLTSSAYAAENGKPAPAGFGDLVDKVKPAVISVRVKIDDDRQTTPLVRDDGDGDQMQMPRGLAPFQQFERQFGFRGPEGMPKRHQMITGEGSGFFITADGYAVTNNHVVDHAKSVQVTTDDGTIYTAKVVGTDDKTDLALIKVDGKTDFPHVNFADSPARVGDWVIAVGNPFGLGGTVTAGIVSARGRDIGSGPYDDYVQIDAPINKGNSGGPAFDTNGNVIGVNTAIYSPSGGSVGIGFDIPAATAKLVVSQLKDKGYVTRGWLGVQVQPVTAEIADSLGMKQARGALVDGPQDGSPAAKAGIKAGDVITAVDGKEVKDSRALARTISTLAPGSSVKLDVLHNGQSKTMDLTLAEMPGDHQKVADSSGDRDATRPYLGLRVAPASEVDGAGKNGVVVTGVDPDGPAADKGLRTGDVILDVGGKSVTNTGDVRNALTEASKDGKKTVLMRVKTADSAARFVAVPIAKG

SEQ ID NO: 31446 - protein, 230 aa, Glycine max
MQDFLGSLRRSLVFRPGGDDSPFAGIANKLGSAIRKSRIALEPPPPIRWRKGELIGSGGFGHVYMGMNLDSGELIAIKQVLIAPGSVFKENTQANIRELEEEIKLLKNLKHPNIVRYLGTAREEDSLNILLEFVPGGSISSLLGKFGSFPESVIKMYTKQLLLGLEYLHSNGIIHRDIKGANILVDNKGCIKLADFGASKKVVELATINGAKSMKGTPHWMPPEVFYRQE

SEQ ID NO: 31447 - protein, 203 aa, Isochrysis galbana
GEGTYGVVYKAQDTEDPQGATVALKKIWLDDRDEGVPVTTLREVALLRNLDHVNIVRMREFVTIPPRIYLVFEYLDHDLKACLDTKFRSGMPAPLVKSCALQILRGLAFCHSHRILHRDLKPQNVLIDNAGIVKLADFGLARASLLLNSQLYTNEVVTLWYRAPELLLGTQNYINSVDVWAAGCIFTELSCRMPLFPGDSEIE

SEQ ID NO: 31448 - protein, 548 aa, Cryptococcus neoformans var. neoformans JEC21
MGRKKIEIRPLTDERNRNVTFLKRKAGLMKKAWELSVLCAADVSIIIFSAAGKAFEFSSKELDSEIDRYHDYEGMIERRRAAEFAAMALAGEDDDDDEDDDTSRRGSASKSKAAAAANGNPPPTRSLKGKETFKHRTVRPGEDRKRKRQDKKQRRKSEPSEKRSFIDEIMSGGESDSEEEEKPRRRSNAEHGNGKRMSSLREEDELADDVPHASRQSLDGLQYALSMHASQPSFERFASRHRSPHAEFLAPAASSSQTPLTTPTIHRHPSDTIPYPMTNSLAAAPMQASLGVPQLGVHPSYPHNPNGHPGYLGYPKSLLGMQASYLPRQPFADAPQPSPYYGAQGPGSHPGGPPQPGLPTQMPGGQPIQWDQNLLARYAEFQLQQNHQRQQRILLERQRQQLAELGVPLDEKNLLDEIFGGVGASRSVSGGADPSGAGPGSALLTGLGNTASEGREEGNSLEFIWPLGNNAAAAAPISDEDRNDVSSRSVISAGHHQAAYGYGKPHVQQQKTGWGFDGAGFESMEEVASGSGVGLPSPVSAGAGGGRK

SEQ ID NO: 31449 - protein, 481 aa, Triticum aestivum
MAEQVVADLREKCATPPSLLCDVAAAMADEMCAGLGKEGGSRVQMLLSYVDKLPTGREEGLFYGLDLGGTNFRVLKVQLGGNDKHVISCESREVAIPPHLMSGSSSELFGFIASELAKFVADEEKGTSLSNEKTRKLGFTFSFPVRQRSVASGTLVKWTKAFSIEDAVGKDVVAELQTAMQKQGLDMHVAALINDAVGTLAGARYYDEDVVAGVIFGTGTNAAYVEKANAIPKWEGELPNSGEMVINMEWGNFYSCHLPVTEYDQALDSESLNPGEQIYEKLTSGMYLGEIVRRVLLKLSLQSAIFGEIDRTKLKTHFHLRTPHISAMHHDNTPDLKIVEEKLKEILEIAGTSLETRKMLVEICDIVTRRAARLAAAGLAGILKKLGRDGSVDKRRSVIAIDGGLFEHYAKFSKCLEATLIELLGEESSKFVVVKHADDGSGIGAALMLLQSQYRMITATRFQHLCPQGEVTGLIPYLYQL

SEQ ID NO: 31450 - protein, 971 aa, Ashbya gossypii ATCC 10895
MSKVSGANETLQGALAPLSHMGGGGDATLLKDEGQVELPRGPGVLNVQVLPEEGHAHLQDLEGYKSMDPRQSESASTDVSEMLQHTASLDDPIQFTRVSTSSVTSNSSSDPRESGDTQETGSRRGCSTEEQAPAGAERVSGQDQDSWDVEEVVAEPRSGIDVTPVGDVTNSTIRASGRSAESTSHYLDEYSDTRYSSSSTSSGSRKLSTTIVTPEKNVVAQALHCYADNFESPLNDLMSSGDERSSSVRETSFENASSDTNANLNGGRASTGESMRSPPPAAGLPNGFVHTQASAPALPVLPAKSPFRAVQSPFSGTRKSRNSANLAELSLPRTSTSSASSMEQRKSRGGRMKVVLSSFVQNIRRNSQGEKRRSGTAMKISTPYNATHVHHVGVDSRTGEYTGLPEEWERLLASSGISKKEQQQHPQAVMDIVKFYQDVTGTSGEDKVFKTFNVSSTNACELSSSPSFKTPSLSSITRFEGSHEAYNSAYHSPMLQSPMGFHDPQHDEKFIPSRPAPRPPGGAAPKTDFTSPLAYDSQSATATPKNQRFSNQSSGFFSLARKATLNKNKQQLPPIPSAAAASAPITQPGSTANIPYIKPAENPVSAPSKSIPPSLPAVPTPPPPIEKDPPLRDLEREREREHSSAKQGQLALERKREEKRRRNQKLQAKLAEICSPGDPSKIYRNLVKIGQGASGGVYTAYEIGTNASVAIKQMNLEKQPKKELIINEILVMKGSRHNNIVNFIDSYLLKGDLWVIMEYMEGGSLTDVVTHCILTEGQIAAVSRETLRGLHFLHSKGVIHRDIKSDNILLSMDGNIKLTDFGFCAQINETNLKRTTMVGTPYWMAPEVVSRKEYGPKVDIWSLGIMIIEMIEGEPPYLNETPLRALYLIATNGTPKLKDADSLSPVFKRFLSWGLQSQPETIEQPQWNYYTIKFIVEVAEANASLAPLVKLARMKKLAEKMDADSDDNRTD

SEQ ID NO: 31451 - protein, 572 aa, Oryza sativa (japonica cultivar-group)
MEATTTDGTTDHAGKPAVRSKSGTWRACPFILGNECCERLAYYGMSANLVNYMVDRLRQGNAGAAASVNNWSGTCYVMPLVGAFLADAYLGRYRTIAAFMALYIVGLALLTMSASVPGMKPPNCATISASSCGPSPGQSAAFFVALYLIALGTGGIKPCVSSFGADQFDDADPREHRSKASFFNWFYMSINVGALVASSVLVWVQMNVGWGWGFGIPAVAMAVAVASFLMGSSLYRHQKPGGSPLTRMLQVVVAAARKSRVALPADAAALLYEGDKLACGTRRLAHTEQFRWLDRAAVVTPTTDKDDDTGSRWRLCPVTQVEELKAVVRLLPVWASGIVMSAVYGQMSTMFVLQGNTLDPRMGATFKIPSASLSIFDTLAVLAWVPVYDRLIVPAARRFTGHPRGFTQLQRMGIGLLISVFSMVAAGVLEVVRLRVAAAHGMLDSTSYLPISIFWQVQYFIIGAAEVFAFIGQIDFFYDQAPDDMRSTCTALSLTSSALGNYLSTLLVVIVTAASTRGGGLGWIPDNLNRGHLDYFFWLLAALSAVNFLVYLWIANWYRCKTITTTEAAAQT

SEQ ID NO: 31452 - protein, 429 aa, Bacillus thuringiensis serovar konkukian str. 97-27
MRKFDKSIAAFEEAQDLMPGGVNSPVRAFKSVGMNPLFMERGKGSKVYDIDGNEYIDYVLSWGPLIHGHANDRVVEALKAVAERGTSFGAPTEIENKLAKLVIERVPSIEIVRMVNSGTEATMSALRLARGYTGRNKILKFIGCYHGHGDSLLIKAGSGVATLGLPDSPGVPEGVAKNTITVAYNDLESVKYAFEQFGDDIACVIVEPVAGNMGVVPPQPGFLEGLREVTEQNGALLIFDEVMTGFRVAYNCGQGYYGVTPDLTCLGKVIGGGLPVGAYGGKAEIMRQVAPSGPIYQAGTLSGNPLAMAAGYETLVQLTPESYVEFERKAEMLEAGLRKAAEKHGIPHHINRAGSMIGIFFTDEPVINYDAAKSSNLQFFAAYYREMVEQGVFLPPSQFEGLFLSTAHSDADIEATIAAAEIAMSKLKA

SEQ ID NO: 31453 - protein, 543 aa, Mycoplasma pneumoniae M129
MAKELVFGKNARNKLLAGINKLADAVKVTVGPKGQNVILGRKFSNPLITNDGVTIAKEIELTDPLENIGAKVISVAAVSTNDIAGDGTTTATILAQEMTNRGVEAVNNGANPVNVRRGIEDASQLIITELDKRSKKINTNEEIEQVAAISSGSKEIGKLIAQAMALVGKNGVITTDDAKTINTTLETTEGIEFKGTYASPYMVSDQEKMEVVLDQPKILVSAMKINTIKEILPLLEGSMENGNPLLIVAPDFAEEVVTTLAVNKLRGTINVVAVKCNEYGERQKAALEDLAISTGTLAYNNELGGGFKDVTVNHLGEARRVQVAKEKTTVIGGKGSKETIQKHLDLLNGRLKQTTEKYDTDLLKERIAHLSQGVAVVRVGGATELAQKELKLRIEDALNSTKAAVEEGIISGGGIALLNVSTILNDSKLADKYKAETSAENLKEILVGYEIVRKSLEAPVRQIIENSGVNPVKVFAELRSEADGVGFDAETKKKVDMIRSGIIDPTKVTKTALEKAASVASSLITTSVAVYDIKENKEGSFQE

SEQ ID NO: 31454 - protein, 282 aa, Glycine max
MTGKEIFHKMKEKVLGSSDPDSGKGKSKMKKHITHGFHLVKGRSGHAMEDYLVAQFKQVDNKELGLFAIFDGHSGHSVPDYLKSHLFDNILKEPNFWTEPAEAVKRAYSITDSTILDKSGELGRGGSTAVTAILINCYKLLVANIGDSRAVLCKNGVAKQLSVDHEPSIESEDIKNRGGFVSNFPGDVPRVDGQLAVSRAFGDKSLKIHLSSEPYVTVEMIEDDAEFLILASDGLWKVMSNQEAVSAIRDVKDARSAAKVLTEEAKNRKSSDDISCVVVKFQ

SEQ ID NO: 31455 - protein, 250 aa, Bacillus thuringiensis serovar konkukian str. 97-27
MNALAGKTVLITRAQHQAKQMSVAVKEKSGIPLEIPLLRMEGMSHRQIQHIAGQLHSYDWVIFTSKNGVAFFLDYLRKKLPVTTKIAAVGVKTKLELEKRGYEVDFVPTSFVAEVFAEEFVKRLSGNECILFPKGNLARDVIPVALREIGVSLDELIVYGTKENVEKKRELIEALEVGKVDIITFTSPSTVTSFVRLLEGTNWREWTKKCTIACIGPITEKEASLYFPHVIMPKEYTVEALLQCVCESIK

SEQ ID NO: 31456 - protein, 406 aa, Haemophilus influenzae R2846
MRRAVITGFGIISSIGNNKEEVLASLKAGKSGIEVVPEFVEMNMRSHVAGTIKLNPSEHIDRKVFRFMGDAAAYAYLSMREAIEDAGLTEDQVSNDRTGLVIGAGTGSAHNQLVACDAVRGPRGVKAIGPYAVTKTMASSVSACLATPYKIRGVNYSMSSACATSAHCIGHAVELIQLGKQDVVFAGGAEELSWECATEFDAMGAVSTKYNETPEKASRAYDANRDGFVIAGGGAVVVVEELEHALARGAKIYAEIVGYGATSDGYDMVAPSGEGAERCMKQAMATVDTPIDYINVHGTSTPVGDVKELGAIKNVFGDKIPAISSTKSMTGHSLGAAGAHEAIYTLLMLDNDFIAPSINIETLDEAAEGCNIVTETKENAGLQTVMSNSFGFGGTNATLIFKRYNG

SEQ ID NO: 31457 - protein, 463 aa, Mycobacterium avium subsp. paratuberculosis K-10
MPQHPSLPAHAIAPAYTGRLFTAPVPALRMPDESMDPDAAYRFIHDELMLDGSSRLNLATFVTTWMDPEAGRLMAETFDKNMIDKDEYPATAAIEQRCVCMVADLFHAEGLNDADPYSACGVSTIGSSEAVMLGGLAMKWRWRAKTKDWKKRTPNLVMGSNVQVVWEKFCRYFDVEPRYLPMEEGRYVITPEQVVDAVDEDTIGVVAILGTTYTGELEPVADICGALDKLALKPASAGGVDVPVHVDAASGGFVVPFLHPELKWDFRLPRVVSINVSGHKYGLTYPGVGFVVWRSKEYLPDELVFRVNYLGGDMPTFTLNFSRPGNQVVGQYYNFLRLGREGYTKVMQTLSGTARWLGEQLRVSEHCELISDGSAIPVVAFRLAKNRGYTEFDVSHELRTYGWQVPAYTMPDNATDVSVLRIVVREGLSADLARALHDDAVSALTSLDKVKPGGHYDAQHFAH

SEQ ID NO: 31458 - protein, 78 aa, Nicotiana glutinosa
MSCCGGNCGCGSGCNGCGGCKMYPDLSYNESTTTETLVLGVGHEKTSFGTMEMGESPAAENGCKCGSECKCNPCACSK

SEQ ID NO: 31459 - protein, 136 aa, Arabidopsis thaliana
  misc_feature (98)..(98): Xaa can be any naturally occurring amino acid
  unsure (1)..(136): unsure at all Xaa locations
ARNSGFAPPVRALQGSNLFRLQSRGLFNGSTKDVEKPDHLFREISKAWNPVFDRSLNTLFLTKMVRGWSLPLKSFFDPKVPINFPFGKGPLSPGFRGXEHAFRRFPTGEERCIACKLWEACCPVQAFPLKAEKRED

SEQ ID NO: 31460 - protein, 177 aa, Arabidopsis thaliana
MTGTGQKLNIRRRVGENRCVNMIANLFHAPVGQDEAVISCGIVASSESAGLAFKMKWQHRRKAQGLPIDKPNIVTGVNVQVCWEKFARYFEVELKEVKLSEDYYVMDPAKAVEMVDENSICVAAILGSTFTGEFEYVKLLNDLLAEKNAKTAWETPIHVDAASGGFIASMGEEYQCQ

SEQ ID NO: 31461 - protein, 442 aa, Arabidopsis thaliana
MDFSGRFFVIFVTFFFLPPLSSAGSYDSGSGLESLARGMLHSAKDPEFFEWMRGIRRKIHENPETGFQEFKTSQLVRDELDSLGVKYKYPVAKTGVVAWIGSCSKPVFGLRADMDALPLQELVEWESKSKVDGKMHACGHDTHVAMLLGAAKLLQTTKHLIKGTVKLVFQPGEEGYAGAYEMLKDEILDDLDGILSVHVFPSIPSGGIGSRPGTVLAGAGLFTVTVHGQGSHAATPHFSKDPVLAASSAVVALQQIVSRELDPLEAGVVTVGYIEGGHAQNVIPQSAKFGGTFRSLSNDGLLFIQRRIKEISEAQASVYRCKAEVNFEEKKPSLHPVMNNDEGLYEHGKKVAEAMIGKNNFHDFPVTMGGEDFSFFTQKTKAAIFVLGIKNETLGAGKPLHSPYFFVDEEALPVGAALHAAMAVSYLDEHGHSHEEEVKSEL

SEQ ID NO: 31462 - protein, 494 aa, Sinorhizobium meliloti
MTDRPTITTTAGAPVPDNQNSLTAGPRGGIMLQDYQLIEKLAHQNRERIPERVVHAKGWGAFGSLKITGDISQYTRAKCLQPGAETPMLARFSTVAGEQGAADHERDVRGFALKFYTDEGNWDLVGNNTPVFFIRDPYKFPDFIHTQKRHPKTNLRSATAMWDYWSLSPESLHQVTILMSDRGLPQTPMHMNGYGSHTYSFWNDAGERYWVKFHFKTQQGHKFFTNEEGEAVIGKTREGYQESLFYAIENGEFPRWTVQVQIMPELDVEKTPYNPFDLTKVWPHADYPPVEIGVLELNRNPENYFAEIENAAFSPSNIVPGIGFSPDKVLQARIFSYADAHRYRLGTHYEHIPVNQPRCPVHHYHRDGQMNTYGGIRTGNPDAYYEPNSFNGPAEQPLAKEPPLRIDGDMSRYDHRVGNDDYVQVRALFGLFDEGQKSRLFSNIAAAMGGVPGEIIERQLIHFARVHPEYEAGVRQALKTAHGYEADTISTAAE

SEQ ID NO: 31463 - protein, 573 aa, Aeropyrum pernix K1
MVVVGTGIAGLRAAVEIKRRYGDKLDVGLVSKIHLMRSHSISAEGGTAAVIYKEEGDSYALHAWDTIKGSDFLADQDAVWIFVKLMPEEVRLLEHWGMPWSRRPDGRLAVRAFGGHSVKRTLFAGDKTGFYEMHTLYNKLLQYDGWERYDEWYATNIVVEDGEFRGVFAINPRDGDIYLFKAKAGIIATGGAGRLYNFATYAHTVTGDGWGMALRAGLPLKDPEFFQFHPTGLIPSGILITEGARGEGGYLLNNRGERFMLRKECAPKMAEIAPRDIVSRCIIREILEGRGFKDDVSGLEYVLLDLRHLGEEKINERLPAVREIAIRYAGIDPVEEPLPVRPVAHYTMGGIRTDSYYRVLDAEGRWVRGLFAAGEVAAASIHGANRLGSNSTAECLTSGRIAGMLAAEYALKAEARGVEPERFEKEEAWVYGLVKRESGTPSYAIKRELRDTMGKYFYVIRDEEGMRRGLLTILKLRKMFREDVYVEDKGRIYNTDLIAALETANMLDAALAVAKAALNRAESRGAHYRVDYPKRDDENWLKHTLVTASGEDDVRIDYEPVRITTWKPVERKY

SEQ ID NO: 31464 - protein, 2116 aa, Mycobacterium leprae TN
METSVTPIAVIGMGCRLPGGINSPDKLWESLLRGDNLVTEVPPDRWDVDDFYDPEPGVPGRSVSRWGGFLDDVAGFDAEFFGISEREATSIDPQQRLLLETSWEAIEQGGLDPASLAGSSTAVFTGLTHEDYLVLTTAAGGLASPYVVTGLNNSVASGRISHTLGLHGPAMTFDTACSSGLMAVHLACRSLHDGESDLALAGGCAVLLEPHASVAASAQGMLSSTGRCKSFAADADGFVRSEGCAMVLLKRLPDALRDGNRIFAMILGTATNQDGGTETLMMPSEDAQVAVYQAALAVAGVEPETIGVVEAHGTGTPIGDPIEYRSLARVYGAGTPCALGSAKSNMGHSTASAGTVGLIKAILSLRNGLVPPLLHFDRLSDDLTEIETGLFVPQEVTPWPVGGYNTPKRVAVSSFGMSGTNVHVIVEEAPSEACAPDVPETSPGTGDATVGRQLFMLSSTSIAALRETARQLATWVEEHQDSVVLSDLAYTLARGRAHRPVRTAVVAADLPELVEGLCEIADGDALYDAVVGHGDRGPVWVFSGQGSQWASMGVQLLANEPVFAATITKLEPVIAAESSFSVTEAITAPETVTGIDKVQPSVFAVQVALATTMEQTYGVRPGAVIGHSMGESAAAVVAGALSLEDAARVICRRSKLMNRVAGSGAMGSVELPAKQVNSELMARGIDDVVISVVASPQSTVIGGATETVRDLIAQWEQRDVMAREVAVDVASHSSQVDPILDDLAAALADIAPMTPKVPYYSATLFDPRELPVCNGAYWVDNLRNTVQFAAAVQAAMEDGYRVFAELSPHPLLTHAVEQTARNLDMSVAALAGMRREQSMPYGLRGLLADLHSAGAALDFAALYPAGRLLDAPLPVWTHPRLFIDTDGQEQRAQGACTVTVHPLLGSHVRLLEEPERHIWQGDVGTAALSWLADHQVHNVAALPGAAYCEMALAAAVEVFGEAAEVRAIAFEQMLLLAAETPIDAIASVDAPGVINFVVQANQDGEKMRNATATLHAAEDDCPPPAYDIAALLEAHPNSVNGTDLRESFAERGVQLGAAFAGLATAHTAEAESGTVLAEVALPASIRFQQSSYQIHPALLDACFQSVGAGVDATKVGSRAGLLLPLGVRSLRVYRPTRNARYCYTRLTKIEPRGGEADLDVLDEHGAVLLAVRGLHMGTGTTERGELDRQLSERLLTIGWQQRTLPESVHVEPGSWLLIDTFNASAIPDMWASTLTDALKSYGTQGTECTNLSWLIQDDPVVSRERLGRQLRGRDGVVILCGPRAGAPDEQSLLAAREQVRHLVRIIRELAELEGELPRLFVVTRQAQIVQSGDAANLEQAGLRGLLRVISSEHPMLRTTLVDVDEHTDVERVAQQLLSGSEEDETAWRNGDWYVARLNPSPLSHEDRRTVVLNPEHDGLRVHVRKPGDLQSLELVASDRVPPGPGQLEVAVSMSSINFADVLIAFGRFPIIDDRDPQLGMDFVGVVTAVGEGVTGHQIGDRVGGFSEGGCWRTFLTCDANLAVTLPSGLTDEQAITAATAHATAWYGLNDLAGIKVGDKVLIHSATGGVGQAAISIARAKGAEIFATAGNPTKRAMLHDLGIEHVYDSRSVEFAEQIRRDTDGYGVDIVLNSLTGAAQRAGLELLTFGGRFVEIGKADVYGNTRLGLFPFRRGLTFYYLDLALMSVTQPDRVRELLATVFNLTADGVLTAPECTHYPLTDAANAIRAMSNAEHTGKLVLDIPRTGSRSVAVPPEQAPVYRRDGSYIITGGLGGLGLFFASKLAEAGCGRIVLTARSQPNPKARQTIERLCAAGADIVVECGNIAEPYTADRLVNAATATGLPLRGVLHSAAVVEDATLTNITDELIDRDWSPKVYGSWNLHCATIGQPLDWFCLFSSGAALLGSPGQGAYAAANSWVDLFAHWRRAQGLPVSAIAWGAWGEVGRATFLAEGGEIMITPDEGAYAFEMLVRYDRPYSGYIPILGAPWLPDLVRRSPWAEMFSSAGQGSRGPSKFRMELLALPQDEWSGRLRRLLVEQASVILRRTIDADRSFIEYGLDSLGMLEMRTHIESETGIRLTPKVIATNNTARALAQYLADTLAEEEGVAAPAAMVSPETP

SEQ ID NO: 31465 - protein, 387 aa, Dechloromonas aromatica RCB
MELNSMTVTLRTLTANDSEALEQVRQYFRNYAAWLGVDLSYQNFDQEMASLPGTYVAPQGRLFFAEVDGRPAGCVGVRPLPDSDGVCEMKRLYVDPAERGHGIGAALALAAIKAAKEIGFRKLMIDTLPNMRMAVKLYRELGFTEAPNYYQTPVEGTMFLALDLENWSEEEIRSENLSHLFDFNRAWARQMQEVDPTYFDRLSHLQTPEFLWIGCSDSRVPANQIVGLLPGEVFVHRNVANVVVHTDLNCLSVIQYAVDVLKVKHIMVVGHYGCGGVGAALQRDRVGIVDLWLRHVHDVHNKHLANVNSLPEAQRHDRLCELNVLEQVVNVCHNPVVQDAWSRGQQLTVHGWVYGLKDGLIHDLGITIDCPQDLPSRYDAALKALDA

SEQ ID NO: 31466 - protein, 591 aa, Oryza sativa
MDDHNLDYKGSGALEELEMLTVNAKEAQELILTKILERNQATEYLSKFMNGSTNISAFKRHVPVVTYDKVHPYILRIATGEESSILCGEYILELLRSSGTSRGEPRLMPSILKDLDRRTYLYSLIMPIMNKYISGLGEGKAMYLLFVKAETLTDSGIPVRSVLTSYYKSPHFLHRKHDLYNNYTSPDEVILCPDSQQSMYCQLLCGLVERQHVLRIGAVFASAFLRSISFLEQHWRDLVNDIRIGQLNSSITSPACRLAMLNFLALPNPELADQVEAICSCGSWKGILGRLWPNVKYIEAVLTGTMAQYIPMLEFYGGGAIPFVCTMYASSESYFGVNLSPLCSPADVSYTILPNMAYFEFIPLEDGLRVTDHEEVIENDKLVSLVDVKVGCYYELVVTTFSGLYRYRVGDVLQVTGFYNRAPQFKFICRRNVILSIDSDKTNEEDLHNSVTTAKKILENQNYLLLEYTSYTDISTVPGHYVLFWEIKSTHDERPAPLDAQLLESCCAAVEESLDYVYRRCRAHDRSIGPLEIRLVEAGAFDALMDLLVSHGSSINQYKTPRCIESSLALKLLNSKVIACFFSPQDPECGM

SEQ ID NO: 31467 - protein, 454 aa, Haemophilus influenzae R2846
MTMITPVQAILASNQHFLDRQDVMESNVRSYPRKLPFAYAKAQGCWVTDVEGNEYLDFLAGAGTLALGHNHPILMQAIKDVLDSGLPLHTLDLTTPLKDAFSEELLSFFPKDKYILQFTGPSGADANEAAIKLAKTYTGRGNIIAFSGGFHGMTQGALALTGNLGAKNAVENLMPGVQFMPYPHEYRCPFGIGGEAGAKAVEQYFENFIEDVESGVVKPAAVILEAIQGEGGVVSAPISFLQKVREVTQKHGILMIVDEVQAGFCRSGKMFAFEHAGIEPDIIVMSKAVGGSLPLAVLAIRKEFDAWQPAGHTGTFRGNQLAMATGYASLKIMRDENLAQNAQERGEYLTNALRELSKEYPCIGNVRGRGLMMGIDIVDERQSKDATGAYPRDCELAAAIQKACFKNKLLLERGGRGGNVVRVLCAVNINQNECEEFIKRFKQSVVDALKVVRS

SEQ ID NO: 31468 - protein, 192 aa, Chromobacterium violaceum ATCC 12472
MGWLGRENAMKRWGAMLMLWGQAALAACPALLNHSVPGLMGGQINLCQYADRPLLVVNTASHCGFTPQFTQLESLYKQYGPRGLMVIGFPSNDFFQELDKPSEIGAFCQANYGVTFPMAGKGHVRGADAQPLFKDLIAATDDAPSWNFHKYLILPGASKVISIGTRTKPDAPEVVNAFLPYLQPETQAAAKP

SEQ ID NO: 31469 - protein, 552 aa, Nostoc punctiforme PCC 73102
MAKPIEFNLFAPYNKGAALIGSFSDWQEIPMEKGNDGYFRTSVELKDGVYKYKFRVQSNSWFFEPEQWVDVTDPYATDIDELSGKDDSVIHVKDCERITDTYVWQNDDKPLPADHELVIYELHVGDFSGGEDDPYARGKYKHVIEKLDYLSELGINAIELMPLKEYPGDYSWGYNPRHFFATESSYGSTAELKKLIDECHGRGIRVIIDGIYNHSEASAPLTQIDHDYWYHHEPRDPDNNWGPEFNYEHYDEKLEIHPARKFIGETIRFWIQEYHLDGIRYDAARQIANYDFMHWIVQEAKNTAGAKPFYNVAEHIPETTSITNVDGPMDGCWHDSFYHCILEHICGDTFDLERLKDVIDCKRQGFLGATNVVNYLTNHDHNHIMVELGNREIFDEEAFRRAKLGVAILMTAVGVPLIWMGEEFGEYKPKQPESSKIDWTLLGNDLNRSLFESYKGLTNLRKSNHALYTENIDFIHENPEAKVLAYTRWNDEGSRVVVIANFSENFLAGYHVPNFPSAGTWHEWTGNYDVESGDDGIITDLGPYEAKVFVWQ

SEQ ID NO: 31470 - protein, 422 aa, Clostridium tetani E88
MNNLEIFKESEKYMPGGVNSPVRAFSNASINPPIIKKGLGSRIVDEEGKEYIDFVASWGPMILGHNDPEVVEAIQNTVEDAISFGAPTELELKLAKHMVETLDNIDMVRMVNSGTEATMSAIKLARGYTRRDRIIKFAGCYHGHFDGFLVEAGSGVLTERIPGSPGVPKGSIENTLIAEYNHIDTVEALFEKYPEEIAAIIIEPIAGNMGTIPAKTEFLQRLREICTKYGALLIFDEVMTGFRVAYKGAQSRYGVKPDLTTYAKIMGGGLPSGAYGGRRDIMEKLSPIGPVYQAGTMSGNPVVMAAGYTTLRKLYNNPSYYEHMEKIGAELQKGIEIVAKEKGLPVVVNRCGAMLTPFFSKRDKVADYEDAKSSDTELYGRFFEHMIKSGIYIAPSQFEAMFIGVKHDIYEVERFLEAMRKF

SEQ ID NO: 31471 - protein, 561 aa, Bacillus subtilis subsp. subtilis str. 168
MSEWWKEAVVYQIYPRSFYDANGDGFGDLQGVIQKLDYIKNLGADVIWLSPVFDSPQDDNGYDISDYKNMYEKFGTNEDMFQLIDEVHKRGMKIVMDLVVNHTSDEHAWFAESRKSKDNPYRDYYLWKDPKPDGSEPNNWGSIFSGSAWTYDEGTGQYYLHYFSKKQPDLNWENEAVRREVYDVMRFWMDRGVDGWRMDVIGSISKYTDFPDYETDHSRSYIVGRYHSNGPRLHEFIQEMNREVLSHYDCMTVGEANGSDIEEAKKYTDASRQELNMIFTFEHMDIDKEQNSPNGKWQIKPFDLIALKKTMTRWQTGLMNVGWNTLYFENHDQPRVISRWGNDRKLRKECAKAFATVLHGMKGTPFIYQGEEIGMVNSDMPLEMYDDLEIKNAYRELVVENKTMSEKEFVKAVMIKGRDHARTPMQWDAGKHAGFTAGDPWIPVNSRYQDINVKESLEDQDSIFFYYQKLIQLRKQYKIMIYGDYQLLQENDPQVFSYLREYRGEKLLVVVNLSEEKALFEAPPELIHERWKVLISNYPQERADLKSISLKPYEAVMGISI

SEQ ID NO: 31472 - protein, 434 aa, Oryza sativa (japonica cultivar-group)
MNIDMANSDDKALISEDTAHQISADPWYQVGFVLTTGVNSAYVLGYSGSVMVPLGWIGGTCGLILAAAISLYANALLARLHEIGGKRHIRYRDLAGHIYGRKMYSLTWALQYVNLFMINTGFIILAGQALKATYVLFRDDGVLKLPYCIALSGFVCALFAFGIPYLSALRIWLGFSTFFSLIYITIAFVLSLRDGITTPAKDYTIPGSHSARIFTTIGAVANLVFAYNTGMLPEIQATIRPPVVKNMEKALWFQFTVGSLPLYAVTFMGYWAYGSSTSSYLLNSVKGPVWVKAMANLSAFLQTVIALHIFASPMYEFLDTKYGSGHGGPFAIHNVMFRVGVRGGYLTVNTLVAAMLPFLGDFMSLTGALSTFPLTFVLANHMYLMVKRHKLSTLQISWHWLNVAGFSLLSIAAAVAALRLIMVDSRTYHLFADL

SEQ ID NO: 31473 - protein, 327 aa, Rhodopseudomonas palustris CGA009
MTRRHILVTGGAGYIGSHMTLALLGAGERPLVIDNLSTGSRAIVPTDVPFFEGNVGDADFVGRIMDEHPIEAIIHFAASIVVPESVTQPLAYYGNNTANARTLLECAVNHGVPHVVFSSTAAVYGEPDRTPVEEDDPTRPINPYGRSKLMVEWMLADIAQAYPFSYAALRYFNVAGADPQGRAGQSTPNATHLIKIAVQAALGKRSGLDVYGTDYSTPDGSCIRDYVHVSDLAQAHLDALDYLRAGKPSITCNIGYANGYSVLDVINVVKRVSGVDFEVRIKGRRAGDPAALIAANQRARTALSWTPRYDDLEQIVRDALAWERRLG

SEQ ID NO: 31474 - protein, 411 aa, Streptococcus pneumoniae TIGR4
MKLNRVVVTGYGVTSPIGNTPEEFWNSLATGKIGIGGITKFDHSDFDVHNAAEIQDFPFDKYFVKKDTNRFDNYSLYALYAAQEAVNHANLDVEALNRDRFGVIVASGIGGIKEIEDQVLRLHEKGPKRVKPMTLPKALPNMASGNVAMRFGANGVCKSINTACSSSNDAIGDAFRSIKFGFQDVMLVGGTEASITPFAIAGFQALTALSTTEDPTRASIPFDKDRNGFVMGEGSGMLVLESLEHAEKRGATILAEVVGYGNTCDAYHMTSPHPEGQGAIKAIKLALEEAEISPEQVAYVNAHGTSTPANEKGESGAIVAVLGKEVPVSSTKSFTGHLLGAAGAVEAIVTIEAMRHNFVPMTAGTSEVSDYIEANVVYGQGLEKEIPYAISNTFGFGGHNAVLAFKRWENR

SEQ ID NO: 31475 - protein, 182 aa, Triticum aestivum
  misc_feature (137)..(137): Xaa can be any naturally occurring amino acid
  misc_feature (140)..(140): Xaa can be any naturally occurring amino acid
  unsure (1)..(182): unsure at all Xaa locations
SVLETSVHEFTVKDCNGKEVCLDTYKGKVLLIVNVASKCGFTETNHTQLTELYQKYREKDFEILAFPCNQFLRQEPGSDQQILDFACTRFKAEYPVFQKVRVNGPDAAPLHEFLIASKPGLFGSRIKWNFTKFLADXNGXVIHRYATATTPFSFEKDIQKALEEEPSDSQTKKEEESSDSQK

SEQ ID NO: 31476 - protein, 322 aa, Triticum aestivum
  misc_feature (224)..(224): Xaa can be any naturally occurring amino acid
  misc_feature (232)..(232): Xaa can be any naturally occurring amino acid
  misc_feature (240)..(240): Xaa can be any naturally occurring amino acid
  misc_feature (246)..(246): Xaa can be any naturally occurring amino acid
  unsure (1)..(322): unsure at all Xaa locations
MDTKHADSFEERDVVVDAGCVRAVLGELVLTFLFVFTGVAAAMAAGVPELPGAAMPMATLAGVALAQALAAGVLVTAGFHVSGGHLNPAVTVALLARGHITAFRAVLYVAAQLLASSLACILLRYLSGGQATPVPVHTLGAGIGPMQGLVMEVILTFSLLFVVYATIIDPRTTVPGYGPMLTGLIVGANTIAGGNFSGASMNPARSFGPALAMGVWTNHWVYWXGPLVGGPXLAGFVYEXVFMVKXTHEPLLGWDLLGNRVARILAFTFCDVYPVCIRPSMLLVDFSGPEKGGRVSKWFVGRYYGGCFFSWGRGGDRFCSKL

SEQ ID NO: 31477 - protein, 544 aa, Prochlorococcus marinus str. MIT 9313
MAKRIIYNEQARRALERGIDILAESVAVTLGPKGRNVVLEKKFGAPQIINDGVTIAKEIELEDHIENTGVALIRQAASKTNDAAGDGTTTATVLAHAMVKAGLRNVAAGANAISLKKGIDKASDFLVSKIEELAKPISDSNAIAQCGTIAAGNDEEVGQMIADAMDKVGKEGVISLEEGKSMTTELEVTEGMRFDKGYISPYFATDTERMEAVLDEPYILLTDKKIGLVQDLVPVLEQIARTGKPLLIIAEDIEKEALATLVVNRLRGVLNVAAVKAPGFGDRRKAMLEDMAVLTNGQLITEDAGLKLDNAKLEMLGTARRVTINKDTTTIVAEGNETAVKGRCEQIKKQMDETDSTYDKEKLQERLAKLAGGVAVVKVGAATETEMKDKKLRLEDAINATKAAVEEGIVPGGGTTLTHLASDLQKWANSNLSGEELIGSNIVEASLAAPLMRIAENAGANGAVVAENVKSRPISDGYNAATGDYIDMLAAGIVDPAKVTRSGLQNAASIAGMVLTTECIVADLPEKKEAAPAGGGGMGGDFDY

SEQ ID NO: 31478 - protein, 210 aa, Phalaenopsis hybrid cultivar
MGRGKIEIKRIENSTNRQVTFSKRRNGIMKKAKEISVLCDAQVSLVIFSSLGKMFEYCSPSTTLSKMLEKYQQNSGKKLWDAKHENLSAEIDRIKKENDNMQIELRHYEGEDLNSLNPKELIPIEEALQNGLTSVRDKQMDYLKMLKKNERMLEDENKRLTYLLHQQQMAMEGSMRELDIGYHHKDREYAAQMPMTFRVQPIQPNLQGNK

SEQ ID NO: 31479 - protein, 213 aa, Burkholderia sp. 383
MNRPKSMLVANIAWARETREYTPGFFDALARGQNPRVLWIGCADSRVPAETITHCAPGELFVHRNIANLFHPDDDNSASVLEYAVRVLQVDHVIVCGHYGCGGVRASLLPPPSDLPHVARRIAPLCALARRHRDALDGLDDTAAADRLAELNVLEQVRLLRASPIVQGRERPPLVHGWIFSLADGRLQELDSGYTNPPVDVETMQAATAGALG

SEQ ID NO: 31480 - protein, 694 aa, Oryza sativa
  misc_feature (228)..(228): Xaa can be any naturally occurring amino acid
  misc_feature (338)..(338): Xaa can be any naturally occurring amino acid
  misc_feature (387)..(387): Xaa can be any naturally occurring amino acid
  misc_feature (421)..(421): Xaa can be any naturally occurring amino acid
  misc_feature (560)..(560): Xaa can be any naturally occurring amino acid
  unsure (1)..(694): unsure at all Xaa locations
MAGPTSRRLLLLVARRAGHLCRHHHHHHHRDGLVLARSLQAAAAAAASSPPPLPASPPARSFSSAFSSVHGERPWIPGLQESARGLESQFGRILGSSSRTLFADRGFGPFLAMYRAAIISFHVMKLTIWHLLLSDVHKRAEKFQETLIRLGPFYIKLGQALSTRPDILPNAYCQELSKLQDQIPPFPTRIAIRTIESQLGSRISDLFADISPEPVAAASLGQVYKVMXAHLHSGELVAVKVQRPGMTPLLTLDALLFHMIGGQLKRFAKARKDLLVAVNEIVRHMFDEIDYVLEGRNAERFARLYSHDLGGNSSGDGTSIKVPKVYWNFTRKSILTLXEWIDGIKLTDAERIGKADLNRTRMIDEGLYCSLRQLLEEGFFHADPHPXVHYVNRDSLGLANDFHSLGFVPEGTDLHGVADAXRVSFGDGRRQSNDFQGVMSHLYDVMYEFNFSLPPDYALVIRALGSLEGTAKALDPDFKVIESAYPFVIGRLLEDPSPDMRKILRQLLICDDGSIRWNRLERLIAAISEQSESSNKSARGIGENAANKPGWRSFDMHSVXVAATEDLFHFILSRKGWRVRVFLVQDIVKASDAFLQEATFPGIFDEEGTTGELHPERSKMIRRVVHGVQSFRQAISLAPDAWTAMLFRTLLKPESQKFILDVFLALAMHSCYKIPETSWICMSRFLNYLDRQGR

SEQ ID NO: 31481 - protein, 549 aa, Arabidopsis thaliana
MGVVAEVWRSSVRLLTNSPQLNGGSHKSALWKWRFFSAQPKRTVMWTWVCGFMLFSLGVISLFTGHVVSHLEWYSQQLSKRSLLDMSRREPIDVWKSKYSKFFYGCSERGRNFLPAVQEQSSNGYLLIAASGGLNQQRTGITDAVVVARILNATLVVPELDHHSYWKDDSDFSDIFDVNWFISSLAKDVTIVKRVPDRVMRAMEKPPYTTRVPRKSTLEYYLDQVLPILTRRHVLQLTKFDYRLANDLDEDMQKLRCRVNYHALRFTKRIQSVGMKVVKRMRKMAKRFIAVHLRFEPDMLAFSGCDFGGGEKERAELAEIRKRWDTLPDLDPLEERKRGKCPLTPHEVGLMLRALGFTNDTYIYVASGEIYGGEKTLKPLRELFPNFYTKEMLANDELKPLLPYSSRLAAIDYIVSDESDVFITNNNGNMAKILAGRRRYMGHKRTIRPNAKKLSALFMDREKMEWQTFAKKVKSCQRGFMGDPDEFKPGRGEFHEYPQSCICQRPFSYDKTSTDDEEEDMSEENHNSTSPGHVHLSSADNERDEVFPD

SEQ ID NO: 31482 - protein, 371 aa, Helianthus annuus
MAGVVKEFDSSHDMFKVREEPKVVFNNKDLSEEMMKIKEEPMLVFDEHEDFVGGEEAPKPIEGLRDGGPPPFLKKTFEMVDDPTTDSIISWSSSKNSFILWDPHKFSTDLLPQRFKHNNFSSFVRQLNTYRFKKIDPDRWEFANEFFQKGKKHLLRDIKRRTNQPQNTQKQEEIRKQEQQQCCGHQTNSTMETELKNLRKERITLKQEILKMKQQQENTEKHLEMVEERMLRMEFKQQQLLVFMSKAFRNPIFVKLLQHLVQKQKTGSVEMCKKRKLEQMLNTDDLDRFQEMWNMIEPDAYTVLSSDGSVSPPEDQNTSDKSGSNGSDYNSESFILWEKLMEDELIFGGEQSGKDQTETYLQEWEELIPKA

SEQ ID NO: 31483 - protein, 100 aa, Mycobacterium avium subsp. paratuberculosis K-10
MAKVNIKPLEDKILVQANEAETTTASGLVIPDTAKEKPQEGTVVAVGPGRWDDDGAKRIPLDVSEGDTVIYSKYGGTEIKYNGEEYLILSARDVLAVVSK

SEQ ID NO: 31484 - protein, 590 aa, GIBBERELLA ZEAE PH-1
MTTIRLCTTSFVLSLLLLGDFVSGLRRYNFTITSQWSAADGHGRPVFAINGQTPGPLITATEGEEVEVFLNNQLATETTMHWHGIYQVDRPWNDGVPGVTQYSIQPRDNYTYRFTVQQQYGSYFYHGHFGPAFADGQRGPIWIEPAAWRPRPYKAISSSPQDLKAMQRAEVNPRHIVISDWNAEPMDILLIMYRDTGIVPWCSNSIVMNGKGRTYCHSKELIEETGGSGRNSLGCKVQPKQGLYANAQVCEPTNGELEVVAAADGEEWIWINFIHSGAHHELQISVDEHEFYVVAADGEFVHPQKVHAANCNLGERLSILVHLNKSPGDYAIRLTSLRTEQVIQGLGILRYPSKTNNKITKVPTSKPWVHLNGTLISTSSTSMDEMKLAPFPARPPPWTSDQTVKLFINMTGPSAWSLGLGSHQAFRQQLPPVLWEENSRGGTTLGVQNVLRNGSVVDIIFENGANVTSQHPFHKHNHKAWIIGTGHGGFPWETVQEAIDAGAADYFNFNDPPIRDGCRLGNATGDWTVIRYEITFPAASMLHCHMIHHFGAGQQIVLLEGVEAMAQVPNEVKQKVHADFVPNLRYGPLD

SEQ ID NO: 31485 - protein, 338 aa, Burkholderia sp. 383
MNVFYDKDADLSLIKGKQVTIIGYGSQGHAHALNLKDSGVNVTVGLRKGGASWSKAENAGLSVKEVAEAVKSADVVMMLLPDEQIADVYAKEVHANIKQGAALAFAHGFNVHYGAVIPRADLDVIMIAPKAPGHTVRGTYSQGGGVPHLIAVAQNKSGAARDIALSYAAANGGGRAGIIETNFREETETDLFGEQAVLCGGTVELIKAGFETLVEAGYAPEMAYFECLHELKLIVDLIYEGGIANMNYSISNNAEYGEYVTGPRIVTEETKKAMKQCLTDIQTGEYAKSFILENKAGAPTLQSRRRLTAEHQIEQVGAKLRAMMPWIAKNKLVDQSKN

SEQ ID NO: 31486 - protein, 484 aa, Sinorhizobium meliloti 1021
MRLKDRELFRQLGLIGGEWIAGASGVVVDVIDPANQAVLGTVPDMGTAETRAAIEAANAAFGPWKKKTHAERAAVLERWHALMIENLEDLAVLVTMEQGKPLEEARGEIRYGAAFVKWFAEESRRIGGHTIPSPTSDRRIVVLKEAVGVCAIVTPWNFPNAMITRKVAPALAAGCTVVIKPSEFTPFSALALGVLAERAGIPAGVVNIVTGMPTAIGNEFMTNETVRKISFTGSTRVGSLLMRGAADSVKRLSLELGGNAPFIVFDDANLDLAVEGAIASKFRNGGQTCVCANRILVQAGVYDAFAEKLGARVNAMKVGPGTEPGIAIGPMINEAAIDKIDRHVEDAIAKGAKLAARGRSVPEGRQYTAPIVLTGATTDMLLASEETFGPVAPLFRFETEDEAIAIANGTPFGLAAYFYTEGLKRSWRVAEALEFGMIGLNTGAISTEVAPFGGVKQSGLGREGAQVGIEEYLEMKSFHIGGLD

SEQ ID NO: 31487 - protein, 216 aa, Aquifex aeolicus VF5
MKLFNFKGERVFTPGPVEIPDRIREVLGRQIIHHRTKEFTEAFLETRELFKRLVDCTSENFVFFASSGTGAMEASVQNFFNPGEKVLAVVGGKFGERWAELGRTWGLEVVELQVEWGKSVDPDQVEDILNKNPEIKGVLVQMSESSTGAYHDVKTLAKITKDRDTLLVVDAITALGVYNMKPHEWGLDVVVGGSQKAFMLPPGLSMLCSPKRRKKG

SEQ ID NO: 31488 - protein, 430 aa, Haemophilus influenzae R2846
MMDEQSLLAFDTQHIWHPYSSVSSDMPLYAVERADGVMITLKDGRRLIDGMSSWWAALHGYNHPRLNAAAQNQLAKMSHIMFGGFTHDPAVELAQLLVQILPNGLDKIFFADSGSVAVEVAMKMAIQYQHAKGEVQRQKFATIRSGYHGDTWNAMSVCDPTTGMHHLFHHSLPVQYFLPQPNIPFNESWNDCAIEPLADLLKKKGSEIAALILEPVVQGAGGMYFYSPTYLVKAQALCKQYGVLLIFDEIATGFGRTGKLFAAEHAGISPDIMCIGKALTGGYLTLSATITTTEIAQIICRGEAKCFMHGPTFMANPLACAIAAESIRLLLESPWQQNIQRIEHSLTQQLSPLAEKDYVKEVRALGAIGVVEMKSAVNMKTLVPRFVEQGVWIRPFGKLVYVMPPFVIKNDELQKLTEGMILALTQEYEH

SEQ ID NO: 31489 - protein, 270 aa, Arabidopsis thaliana
MTSLKAVRCQTVRIQPRNSFHRLDRYALGYDKNRNHKILRFVDDHLAVGEHVFGYEIYDFSSSSWRVLDVTPDWDIQFYQRGVSLNGNTYFFAQEKITEDGEYEEFEDFLLYFDFSTERFEPRLPLPFHFYVLETVSLSSVRDEQLAVLYQRLDSYEILDIWLTTKIEPSAVSWSMFLKLDMRPLTGFQFMVDGGSFFIDEEKKVAVVFDLTKHKQTVTRRYQTAYIIGQDGYFKPVSLGEAPYLGDPHELYCLPLVCPSYAPSLVQLYN

SEQ ID NO: 31490 - protein, 445 aa, Borrelia burgdorferi B31
MVRMEDIISLAKRKGFVFQSSEVYGGLSGAWDYGPLGVELKKNIKKEWWKSMVYLHENIVGLDSAIFMRPEIWRASGHVDGFSDSMVDCKDCKSRFRADFIDLSKNCPNCKVGNNFTSPRSFNLMFKTHIGVVEDSSSEVYLRPETAQGIFVNFRNVLDSSRLKIPFGIAQVGKAFRNEIVTKNFIFRTCEFEQMEMQFFVHPKQIDEWFCYWQQNRMNFFIETLKISPDRLRFKAHDSTQLAHYAKAAFDIEYEFPFGFQEVEGIHNRGNYDLTQHAKFSNKPKVFEYHDLLTKEKYVPYVIETSAGLTRSVLMTLCDAYSEEELSDGDKRIVLRLHPKLAPYKIAIFPLVKKVELTEIARRIYMELCDDFHIFYDDSGTIGKRYRRQDEIGTPYCVTIDYNTIEDETVTVRERNSMTQKRIFINDLYSYIKTEILNYKEDFNK

SEQ ID NO: 31491 - protein, 277 aa, Desulfotalea psychrophila LSv54
MWEYTNKVQQHFLQPQNVGEIENASGTGDVGSLACGDALKLTIAIDANDIITDAKFKTFGCASAIASSSVLTEMIVGMSVEEAVKVTNEDIAERLGGLPKEKMHCSVMGREALEAAIADYRGTILPMAEGEVICDCFGVTDVEVIRAITESNLHSVEEITNFTKAGGGCGKCEDKLRELLVKTMKEQAGTAVVAKEPKRMTALQKIKKIEEVLDKVIRPVLKKDDGDIELVDVDGDFVTVSLRGACKSCSNSQTTIKEYVEKKLRELVLESLIVEED

SEQ ID NO: 31492 - protein, 621 aa, Listeria monocytogenes EGD-e
MCGFVGCVHDRITEITGADKETFRQMNSMITHRGPDDEGYFTDDHVQFGFRRLSIIDVENGHQPLTYENERYWIIFNGEVYNYVELREQLVAEGMTFETESDTEVIIATYAKYKEKTAERLRGMFGFVIWDKQEELVYGARDPFGIKPFFYAEEDDKLFMGSEKKSILHALKEKELDEVSLQNYMTYQFVPEPDSLTKNVKRLEPGHQFTKKIGQPMEITTYWKASFAPVTKSEDAWIKEVRDVMYDSVKMHMRSDVPVGSFLSGGIDSSIIAAIAKEYHPAIKTFSVGFERDGFSEIDVAKETADKLGVENISYVISPEEYMKELPKIVWHMDDPLADPAAIPLYFLSREARKQVTVALSGEGADELFGGYNIYNEPNSLAMFNKMPGVFKSMLNNLARIMPEGMRGKSFLERGTTPMEERYIGNAKMFTEKEKQILLPKYQAGHDYTNITDPFYAETTNYHPVERMQYIDIHTWLRGDILLKADRMTMANSLEVRVPFLDKEVYNVARNIPDTMKTTNGTTKYILRKAAATFVPEHVLNRRKLGFPVPIRHWLKDEMNAWVKNIIKESPTDHLINKQYVLDLLDDHCAGKFDYSRKIWTVVIFMIWYDVYVADKYDFGK

SEQ ID NO: 31493 - protein, 458 aa, Sinorhizobium meliloti 1021
MYSNSLIELDRAHLIHPVASYRGHEKLGVRVLASAKGATVTDASGRQLIDGFAGLWCVNAGYGQETIVEAAAKQMRELSYATAYFGLGSEPAIRLASELAERAPGNLNHVYFTLGGSDAVDSTIRFIRYYWTARGEPQRDQFISVEQGYHGSSTVGAGLTALPAFHTGFGIPFDWQHKIPSHYAYRNPVGDDPQAIIAASLTALRRKVEEIGPERVAAFYAEPIQGSGGVLVPPRGWMKAMRELCRDLGILFVADEVITGFGRTGPLFASTENEIVPDFITTAKGLTSGYVPMGAVFMADHIYQTIADGAGASAVGHGYTYSAHPVSAAVGLEVLRLYENGLLENGVKAGARLMEGLGSLRDHPLVGDVRGRGMLAAIELVVDKAQKTPLPAAAEPARRIFDRAWENGLVIRAFANGVLGYAPPLCCSETEIDAIIERTRQSLDETLEDPDVRRALKT

SEQ ID NO: 31494 - protein, 264 aa, Leptospira interrogans serovar lai str. 56601
MELVSKRLRKLVVEALEGGGRGHLGSSMSMIEILHALYDGYLNISKDNFTSLDRDRFILSKGHGCLALYAVLADKGFIPAEELKTFCKLDSRLGGHPERGKIPGVEASTGALGHGLPIGVGMAIAGKIRKKNYKVVVLTGDGEINEGSVWEAAMSAAKHKLSNLTVIVDYNKLQSYGLTKEVLDLEPLVDKWKSFGFETVEIDGHNIAEIKSTLNRLPFNPDKPSAIICHTVKGKGFPFAEGNANWHHKSKLSKEEIEAMYACL

SEQ ID NO: 31495 - protein, 80 aa, Oryza sativa (japonica cultivar-group)
MAPSRRMVASAFLLLAILVATEMGTTKVAEARHCLSQSHRFKGMCVSSNNCANVCRTESFPDGECKSHGLERKCFCKKVC

SEQ ID NO: 31496 - protein, 530 aa, Magnetococcus sp. MC-1
MILAQHNVMEPFARRYVPMRLLSWLVQLNPVIWRHCRRTPLHIRLRLALEELGPTFIKFGQTLSTRLDILPDEIGQELKRLQDDVPPFDLATVRQSIEEDLKRPLHELFRSFDEKPVASASIAQVHHAFTHDGDEVAVKVLRPDVAARVETDIAMLMTMASLVEELMPEWRRLKPRGVVKEFAQTIRNEMDFLVEASRAQKLGENFKDDVGMMIPQVYWPLTSSRVFTMAWIEGVSIDELPRERVAGRPDPRVVAERLLSSFFKQVFHDGYFHADQHPGNILVREDGVVALIDFGIVSHVSEQTRQFLAEMVQGFITRDYKKVAQVHLDAGYIPHDTDMDAFEEACRQIGEPVFGQPLKDISVARLLAKLFKTTEQYNMEVQPQLLLLQKTLFTLEGVGRELHPDLNAWEIAEPLVMAWMKARIGPKGQLLKLRRQLEEMGYAMGAAPEMAFQVLERVANDRFHIRLHASSMERVEHEIVLGFKRVWSAVMAGFLFLGGAVMAAAGMSPWWFVPPLILAFFSFFRVIALL

SEQ ID NO: 31497 - protein, 267 aa, Carboxydothermus hydrogenoformans Z-2901
MSRIGQVFAEKRSRGEKALIAYTMGGDPNLTFSLEIIKTLAAAGADLIEVGLPFSDPLADGPVIQRAGQRALAAGSGPEEVLALIAAARQELSLPLVIMSYLNPILQIGVDEFLRRAAGAGADGLIIPDLPVEEGEEIRVSAAGYGLDLIPLVAPTTGQKRLEKIVGQASGFIYCVSVTGVTGARDSLPAEVISLLQNVKKLTELPVCLGFGIGKPEQIAYIKDYCDGVIVGSALVEIIENYVQNRMEKDKVLELIATKVQTLKSVS

SEQ ID NO: 31498 - protein, 589 aa, Bacillus subtilis subsp. subtilis str. 168
MMEYAAIHHQPFSTDAYSYDGRTVHIKIRTKKGDADHIRFIWGDPYEYNDGKWSANEQPMRKIAATEMHDYWFAEVVPPFRRLQYAFVVTDDHEDIFFGSSGVCPYNEKTLETIHYYFKFPFVHEADTFQAPEWVKSTVWYQIFPERFANGREDLSPKNALPWGSKDPDVNDFFGGDLQGIVDKLDYLEDLGVNGIYLTPIFSAPSNHKYDTLDYFSIDPHFGDPELFRTLVSQLHQRGMRIMLDAVFNHIGSASPQWQDVVKNGDQSRYKDWFHIHSFPVTDDNYDRFAFTADMPKLNTANPEVQKYLLDIALYWIREFDIDGWRLDVANEVDHVFWKTFRQAVSTEKPDVYILGEIWHSAEPWLRGDEFHAAMNYPFTEPMIEYFADQTISASRMAHRVNAHLMNGMKQANEVMFNLLDSHDTKRLLTRCRNDEKKARALLAFMFAQTGSPCIYYGTEIGLNGENDPLCRKCMVWEKEKQNQDMLQFMKRLIALRKQENTLLTEGHLEWNLLDDKNDFISFSRTLDEKILIYFFNQGNVVQHVSLRELNIDRNKKICDAWTEQPLQHHDVIAVQPGEFLILSAAAPV

SEQ ID NO: 31499 - protein, 185 aa, Nostoc punctiforme PCC 73102
MLKLYGGARSRASIVQWYLEEIQVPYEFVKLDMQAGEHLKPEYLAINPVGKVPAIIDGDFQLWESGAILLYLAEKYGKTPPSLEERAVFSQWVLFANATLGPGIFVEASREREMPRLLTPLNEIFSKQPFLLGDEFTVADVAVGSILSYIPVMLKLDLSSYPSVLNYIKQLSERPAFQKSIGGRA

SEQ ID NO: 31500 - protein, 466 aa, Arabidopsis thaliana
MARKMLVDGEIDKVAADEANATHYDFDLFVIGAGSGGVRAARFSANHGAKVGICELPFHPISSEEIGGVGGTCVIRGCVPKKILVYGATYGGELEDAKNYGWEINEKVDFTWKKLLQKKTDEILRLNNIYKRLLANAAVKLYEGEGRVVGPNEVEVRQIDGTKISYTAKHILIATGSRAQKPNIPGHELAITSDEALSLEEFPKRAIVLGGGYIAVEFASIWRGMGATVDLFFRKELPLRGFDDEMRALVARNLEGRGVNLHPQTSLTQLTKTDQGIKVISSHGEEFVADVVLFATGRSPNTKRLNLEAVGVELDQAGAVKVDEYSRTNIPSIWAVGDATNRINLTPVALMEATCFANTAFGGKPTKAEYSNVACAVFCIPPLAVVGLSEEEAVEQATGDILVFTSGFNPMKNTISGRQEKTLMKLIVDEKSDKVIGASMCGPDAAEIMQARDCNCAQVWSNQSTI

SEQ ID NO: 31501 - protein, 382 aa, Mycobacterium leprae TN
MIPPGRVADRRPRAGMLAVSALAIAVVSAGIGGVAATVVALGTRVAGGNGAGPVTGPAASVPAANMPSGSVEQVAVKVVPSVVMLETDLGRQSEEGSGVILSADGLILTNNHVVAVAAKPGGGPGGGLSPKTTVTFFDGRTASFTVVGADPTSDIAVVRVQSISGLTPITMGSSADLRVGQPVVAVGSPLGLAGTVTSGIVSALNRPVSTTGESGNQNTVLDAIQTDAAINPGNSGGALVNMGGQLVGVNSAIATLGADSGDAQSGSIGLGFAIPVDQAKRIADELISTGKATHASLGVQVATDKGTPGAKVMDVVAGGAAANAAVPKGVVLTKVDDRLISSADALVAAVRSKAPGDKVSLTYQDQSGSSRTVQVTLGKAEQ

SEQ ID NO: 31502 - protein, 323 aa, Enterococcus faecium
MEKIIDITVFGCEPDEMEVFQKISYELGVTATLIKDSISESNAGLANGCRCVSVSHKAELSEPILLALKNAGVKYISTRSIGFNHIDIQAAGLLGMVVGTVEYSPGSVADYTVMLMLMLMRGTKSILRETQRQNYCLNDLRGKELRDMTVGVLGTGRIGQAVMERLEGFGCKVLAYDRNQKAGADYVSFHELLKKSDIVTLHIPLAEDTRHMIGYEELEMMKQEALLINTGRGALVDTAALVEALKGQKIGGAALDVLEGEEGIFYHDCTQRRIEHPFLSVLQGMPNVIVTPHTAYHTERVLVDTVRNTIRNCLNFERSLGNV

SEQ ID NO: 31503 - protein, 717 aa, Burkholderia cepacia
MEARFSAHRPVWRMLRHVLATMLLTGSVGTGAATACWKPIFTDEERRWIGDHPVVHIAVEANWHPIEYMRNGRHAGLVAGYLSAISRMTGLSFQTVPGTERGHAYDALAAGKVDLLPGVWRELVPDRIGAGALVSAPYLVGRLTVVTRNNSAMIFGLQRLKGRRIAIKGRGAVEYFVRHSGVPLHVLTFDSEELALAAVANGEADAALGVDVTILPIMRRQFTGQLYMSGMLADRPVSLAMLTRADLPILASIIDKSLAAIPVSETAEITRDSIELGDYGKPTIRSIVHYRAPVVLGVALALLTFAALAYLMWKSRAAAIRSKRDKAMFLAFVSHEIRTPMQTVLSSLEFLQRSRLSVQQGGRVDAAASAAETLLTLLDDILDYSRLESRKVTLSPQTVELDVWARQTVDLVRWRADRKTLALTLDVAGPPSVHVSIDPVRVRQIVLNLLVNAINFTAAGAVTLRVRYVAARHGRNGTLCLEVRDTGIGIAPDRLGHVFETYWQADRAPQPGSGGSGLGLAICRELVELMHGSITVDSTPYVETVFTVQLPVPAADGAPLAKSAAAAQALADATAAPVYRGAPRVLIVDDHETVRAALQDQCDALGCVGIVAGSGEDALRHLAQGRIDMVLLDCNLPDIDGYALARMIRQEEAARKARRVSIIAISAESGDMHRMLCLESGMDGVLGKPLRLDTLRQAIARWYPTDADNTLEVSTVP

SEQ ID NO: 31504 - protein, 104 aa, Bradyrhizobium japonicum
MHFRPLHDRVLVRRIDAEEKTAGGIIIPDTAKEKPQEGEIIAAGSGGRNEQGQLIPIDVKPGDRVLFGKWSGTEVKIDGQDYLIMKESDLLGVVDKTGSVKKAA

SEQ ID NO: 31505 - protein, 455 aa, Malus x domestica
MMSFSVLQVKRLQPELITPAKSTPQETKFLSDIDDQESLRVQIPIIMCYKDNPSLNKNRNPVKAIREALSRALVYYYPLAGRLREGPNRKLVVDCNGEGILFVEASADVTLEQLGDKILPPCPLLEEFLYNFPGSDGIIDCPLLLIQVTCLTCGGFILALRLNHTMCDAAGLLLFLTAIAEMARGAHAPSILPVWERELLFARDPPRITCAHHEYEDVIGHSDGSYASSNQSNMVQRSFYFGAKEMRVLRKQIPPHLISTCSTFDLITACLWKCRTLALNINPKEAVRVSCIVNARGKHNNVRLPLGYYGNAFAFPAAISKAEPLCKNPLGYALELVKKAKATMNEEYLRSVADLLVLRGRPQYSSTGSYLIVSDNTRVGFGDVNFGWGQPVFAGPVKALDLISFYVQHKNNTEDGILVPMCLPSSAMERFQQELERITQEPKEDICNNLRSTSQ

SEQ ID NO: 31506 - protein, 235 aa, Photobacterium leiognathi
ASDGIMVARGDLGVEIPVEEVIFAQKMMIEKCNRARKVVITATQMLDSMIKNPRPTRAEAGDVANAIMDGTDAVMLSGESAKGKYPIEAVTIMAQICARTDDVVKPELGSRLDSPRLRITEAVCKGAVDTAEKLNAPLIIVATEAGKSARSVRKYFPTARILAVTTNTKTAAQLCLSKGVTPVVVDSIESTDAFYLRGKELALETGLGAKGDIVVMVSGALVASGTTNTASVHVL

SEQ ID NO: 31507 - protein, 431 aa, Bacillus thuringiensis serovar konkukian str. 97-27
MKNLDNQHNQNHIMGTLQWFIFLLANSIALPIVVGGLFHLTTEEIFYLMQRTFFVVGISSFLQGWLGHRLPIADGPAGSWVGVFTVLAYATAGQDQLHSTLQILELGMIISGVILIGLGVTGFIGRILFLFTPLVTGTFLLLLCLQLSGVFLKGMLGITATASQIDGFTAIIAFSIFLFVIILSNFGKGFVKSYAVLIGLISGWILFLIAGKVTIPSQVNHFVQLPQIFAWGLPKWNTGMAVSSFVMVCILVSNTVAAIIAINQATIQKATIEQKQLKDGTWVGGISHIISSVFSTVGVVPLPATARFIRLTKQKYIRSFLLACMLLVVMSMFPSIIRYLASLPSAVASAVLMASFVQLIGIGLNNIKQVELNERNVTILGIAVLFGSGVMFLPSGALQSLPSVMQYIFGNGLFVGTVVSILLEQIWRTEK

SEQ ID NO: 31508 - protein, 381 aa, Oryza sativa
TRAKATTMEGRPAKMGFRMPAEGEPHEQCWMGWPERRDNWRELAGPARKVFARTAMAISKFESVTICASAKQDPYVHELMLHQPNIRVVEMSMNDCWFRDIGPTFIVRKGAPGLGITEKNIAGIDWEFNAWGGATDGCYVDWSLDSYVAKKIVEIERIPRFPHTMVLEGGSIHVDGEGTCITTEECLLNPNRNPNMTKLEIENELKDFLGVAKVIWIPHGLYGDDDTNGHVDNLCCFIKPGVVLLSWTDDPRDPPRDRSVDALSTLSKSVDAKGRQIEVVKIHVPGPLYMTKEESEGVVKTEHAIPREPGTRLAASYVNFYIANGGIVAPAFGDKWDEEACAVLQKAFPDHEVVMVEGAREIVLAGGNIHCITQQQPVRPS

SEQ ID NO: 31509 - protein, 244 aa, Gossypium hirsutum
MVYPNESLEDSPQKKMGRGKIEIKRIENTTNRQVTFCKRRNGLLKKAYELSVLCDAEVALVAFSSRGRLYEYANNSVKATIERYKKASDSSNTGSVAEVNAQFYQQEADKLRNQIRNLQNANRHMLGESIGGLPMKELKSLESRLEKGISRIRSKKNELLFAEIEYMQKREIDLHNNNQLLRAKIAENERKQQSMNLMPGGSSANFEALHSQPYDSRNYFQVDALQPATNYYNPQLQQDQIALH

SEQ ID NO: 31510 - protein, 142 aa, Streptococcus thermophilus
MLNKIQQRNSDIYSMTPFNFFEDFRRNLFNDLKSNLIKTDIHETDNEYVVEAELPGIPKEDIQVNYENGVLTISGQRQIDAAIEDEKGKLIHSERSLTSVRRQYLLENVKEDEIKASYSDGILKVTLPKDSNKEIKTSIPIE

SEQ ID NO: 31511 - protein, 3567 aa, Saccharopolyspora erythraea
MTDSEKVAEYLRRATLDLRAARQRIRELESDPIAIVSMACRLPGGVNTPQRLWELLREGGETLSGFPTDRGWDLARLHHPDPDNPGTSYVDKGGFLDDAAGFDAEFFGVSPREAAAMDPQQRLLLETSWELVENAGIDPHSLRGTATGVFLGVAKFGYGEDTAAAEDVEGYSVTGVAPAVASGRISYTMGLEGPSISVDTACSSSLVALHLAVESLRKGESSMAVVGGAAVMATPGVFVDFSRQRALAADGRSKAFGAGADGFGFSEGVTLVLLERLSEARRNGHEVLAVVRGSALNQDGASNGLSAPSGPAQRRVIRQALESCGLEPGDVDAVEAHGTGTALGDPIEANALLDTYGRDRDADRPLWLGSVKSNIGHTQAAAGVTGLLKVVLALRNGELPATLHVEEPTPHVDWSSGGVALLAGNQPWRRGERTRRAAVSAFGISGTNAHVIVEEAPEREHRETTAHDGRPVPLVVSARSTAALRAQAAQIAELLERPDADLAGVGLGLATTRARHEHRAAVVASTREEAVRGLREIAAGAATADAVVEGVTEVDGRNVVFLFPGQGSQWAGMGAELLSSSPVFAGKIRACDESMAPMQDWKVSDVLRQAPGAPGLDRVDVVQPVLFAVMVSLAELWRSYGVEPAAVVGHSQGEIAAAHVAGALTLEDAAKLVVGRSRLMRSLSGEGGMAAVALGEAAVRERLRPWQDRLSVAAVNGPRSVVVSGEPGALRAFSEDCAAEGIRVRDIDVDYASHSPQIERVREELLETTGDIAPRPARVTFHSTVESRSMDGTELDARYWYRNLRETVRFADAVTRLAESGYDAFIEVSPHPVVVQAVEEAVEEADGAEDAVVVGSLHRDGGDLSAFLRSMATAHVSGVDIRWDVALPGAAPFALPTYPFQRKRYWLQPAAPAAASDELAYRVSWTPIEKPESGNLDGDWLVVTPLISPEWTEMLCEAINANGGRALRCEVDTSASRTEMAQAVAQAGTGFRGVLSLLSSDESACRPGVPAGAVGLLTLVQALGDAGVDAPVWCLTQGAVRTPADDDLARPAQTTAHGFAQVAGLELPGRWGGVVDLPESVDDAALRLLVAVLRGGGRAEDHLAVRDGRLHGRRVVRASLPQSGSRSWTPHGTVLVTGAASPVGDQLVRWLADRGAERLVLAGACPGDDLLAAVEEAGASAVVCAQDAAALREALGDEPVTALVHAGTLTNFGSISEVAPEEFAETIAAKTALLAVLDEVFGDRAVEREVYCSSVAGIWGGAGMAAYAAGSAYLDALAEHHRARGRSCTSVAWTPWALPGGAVDDGYLRERGLRSLSADRAMRTWERVLAAGPVSVAVADVDWPVLSEGFAATRPTALFAELAGRGGQAEAEPDSGPTGEPAQRLAGLSPDEQQENLLELVANAVAEVLGHESAAEINVRRAFSELGLDSLNAMALRKRLSASTGLRLPASLVFDHPTVTALAQHLRARLVGDADQAAVRVVGAADESEPIAIVGIGCRFPGGIGSPEQLWRVLAEGANLTTGFPADRGWDIGRLYHPDPDNPGTSYVDKGGFLTDAADFDPGFFGITPREALAMDPQQRLMLETAWEAVERAGIDPDALRGTDTGVFVGMNGQSYMQLLAGEAERVDGYQGLGNSASVLSGRIAYTFGWEGPALTVDTACSSSLVGIHLAMQALRRGECSLALAGGVTVMSDPYTFVDFSTQRGLASDGRCKAFSARADGFALSEGVAALVLEPLSRARANGHQVLAVLRGSAVNQDGASNGLAAPNGPSQERVIRQALAASGVPAADVDVVEAHGTGTELGDPIEAGALIATYGQDRDRPLRLGSVKTNIGHTQAAAGAAGVIKVVLAMRHGMLPRSLHADELSPHIDWESGAVEVLREEVPWPAGERPRRAGVSSFGVSGTNAHVIVEEAPAEQEAARTERGPLPFVLSGRSEAVVAAQARALAEHLRDTPELGLTDAAWTLATGRARFDVRAAVLGDDRAGVCAELDALAEGRPSADAVAPVTSAPRKPVLVFPGQGAQWVGMARDLLESSEVFAESMSRCAEALSPHTDWKLLDVVRGDGGPDPHERVDVLQPVLFSIMVSLAELWRAHGVTPAAVVGHSQGEIAAAHVAGALSLEAAAKVVALRSQVLRELDDQGGMVSVGASRDELETVLARWDGRVAVAAVNGPGTSVVAGPTAELDEFFAEAEAREMKPRRIAVRYASHSPEVARIEDRLAAELGTITAVRGSVPLHSTVTGEVIDTSAMDASYWYRNLRRPVLFEQAVRGLVEQGFDTFVEVSPHPVLLMAVEETAEHAGAEVTCVPTLRREQSGPHEFLRNLLRAHVHGVGADLRPAVAGGRPAELPTYPFEHQRFWPRPHRPADVSALGVRGAEHPLLLAAVDVPGHGGAVFTGRLSTDEQPWLAEHVVGGRTLVPGSVLVDLALAAGEDVGLPVLEELVLQRPLVLAGAGALLRMSVGAPDESGRRTIDVHAAEDVADLADAQWSQHATGTLAQGVAAGPRDTEQWPPEDAVRIPLDDHYDGLAEQGYEYGPSFQALRAAWRKDDSVYAEVSIAADEEGYAFHPVLLDAVAQTLSLGALGEPGGGKLPFAWNTVTLHASGATSVRVVATPAGADAMALRVTDPAGHLVATVDSLVVRSTGEKWEQPEPRGGEGELHALDWVRLAEPGSTGRVVAADASDLDAVLRSGEPEPDAVLVRYEPEGDDPRAAARHGVLWAAALVRRWLEQEELPGATLVIATSGAVTVSDDDSVPEPGAAAMWGVIRCAQAESPDRFVLLDTDAEPGMLPAVPDNPQLALRGDDVFVPRLSPLAPSALTLPAGTQRLVPGDGAIDSVAFEPAPDVEQPLRAGEVRVDVRATGVNFRDVLLALGMYPQKADMGTEAAGVVTAVGPDVDAFAPGDRVLGLFQGAFAPIAVTDHRLLARVPDGWSDADAAAVPIAYTTAHYALHDLAGLRAGQSVLIHAAAGGVGMAAVALARRAGAEVLATAGPAKHGTLRALGLDDEHIASSRETGFARKFRERTGGRGVDVVLNSLTGELLDESADLLAEDGVFVEMGKTDLRDAGDFRGRYAPFDLGEAGDDRLGEILREVVGLLGAGELDRLPVSAWELGSAPAALQHMSRGRHVGKLVLTQPAPVDPDGTVLITGGTGTLGRLLARHLVTEHGVRHLLLVSRRGADAPGSDELRAEIEDLGASAEIAACDTADRDALSALLDGLPRPLTGVVHAAGVLADGLVTSIDEPAVEQVLRAKVDAAWNLHELTANTGLSFFVLFSSAASVLAGPGQGVYAAANESLNALAALRRTRGLPAKALGWGLWAQASEMTSGLGDRIARTGVAALPTERALALFDSALRRGGEVVFPLSINRSALRRAEFVPEVLRGMVRAKLRAAGQAEAAGPNVVDRLAGRSESDQVAGLAELVRSHAAAVSGYGSADQLPERKAFKDLGFDSLAAVELRNRLGTATGVRLPSTLVFDHPTPLAVAEHLRDRLFAASPAVDIGDRLDELEKALEALSAEDGHDDVGQRLESLLRRWNSRRADAPSTSAISEDASDDELFSMLDQRFGGGEDL

SEQ ID NO: 31512 - protein, 364 aa, GIBBERELLA ZEAE PH-1
MGFAKTLIFLSQQQPTMSFVRAFSFLTAVSLVTYTILSIATSFGPAEMPEFNKNETVRDIPAFGLGTWLAGKGVVVPAVEYALKGGYRHIDTALIWRNEDEVGKGIKASGVSRDEIWVTGKLWNTDHRPELVRKAIETSIANLGVEYLDLYLIHYPVAWVPETRDVDNNTSLIDTWKAMEELVRAGLTRNIGFSNFAPKDINKILKIASIQPYAHEFETHPYLQQQSFVDFHKKENIKVIAASPLANTNPTYGDKYPSILHDEFWVKLAEDKNATVAQTILAWGQQRGTIVISKSTHSNHIAENLCSQGIEFTKSELEEVAKQDKKLRLLNPIHWGMDLFEGLDAGAAEKEEPKKEEDERNLDL

SEQ ID NO: 31513 - protein, 356 aa, Cryptococcus neoformans var. neoformans JEC21
MKAQENSQRANRWDKGIKIGEGTFANVYKGTEKATGRKVAIKKIKVGEMKHGLDMTALREVKFLQELKHPNIISLLDVFSVKQNINLVLEFLDTDLEAVIRDKALIFQNADIKSWMAMSLRGLEYIHRNGVLHRDLKPNNLLIAANGELKIADFGLAREFGDAGNKMTCQVITRWYRPPELLFGSRYYSPTVDIWSMGTIFVELILRVPFLAGETDIDQLKKTFHAMGTPTEQDWPGYTKLPDYHEVGSFPKNPWWNMISSIGREGQDLARELLRFDPAQRPSAKKALLHSFFTSYPPPTPPIALPKPLAELRPRELAPDETQGKPLLTSGAGQSLKRKAESPRTSQSVPRKLIFT

SEQ ID NO: 31514 - protein, 533 aa, Pleurotus ostreatus
MFPGARILATLTLALHLLHGTHAAIGPTGNMYIVNEDVSPDGFARSAVVARSVPATDPTPATVSIPGVLVQGNKGDNFQLNVVNQLSDTTMLKTTSIHWHGFFQAGSSWADGPAFVTQCPVASGDSFLYNFNVPDQAGTFWYHSHLSTQYCDGLRGPFVVYDPSDPHLSLYDIDNADTVITLEDWYHIVAPQNAAIPTPDSTLINGKGRYAGGPTSPLSIINVESNKRYRFRLVSMSCDPNFTFSIDGHSLLVIEADAVNIVPITVDSIQIFAGQRYSFVLTADQTVGNYWIRANPNLGSTGFDGGINSAILRYAGATEDDPTTTSSTSTPLLETNLVPLENPGAPGPAVPGGADININLAMAFDFTNFELTINGVPFIPPTAPVLLQILSGASSAASLLPSGSIYALEPNKVVEISMPALAVGGPHPFHLHGHTFDVIRSAGSTTYNFDTPARRDVVNTGTGANDNVTIRFVTDNPGPWFLHCHIDWHLEIGLAVVFAEDVTSISAPPAAWDDLCPIYDALSDNDKGGIVPS

SEQ ID NO: 31515 - protein, 358 aa, Cryptococcus neoformans var. neoformans JEC21
MDLASQENSQRANRWDKGIKIGEGTFANVYKGTEKATGRKVAIKKIKVGEMKHGLDMTALREVKFLQELKHPNIISLLDVFSVKQNINLVLEFLDTDLEAVIRDKALIFQNADIKSWMAMSLRGLEYIHRNGVLHRDLKPNNLLIAANGELKIADFGLAREFGDAGNKMTCQVITRWYRPPELLFGSRYYSPTVDIWSMGTIFVELILRVPFLAGETDIDQLKKTFHAMGTPTEQDWPGYTKLPDYHEVGSFPKNPWWNMISSIGREGQDLARELLRFDPAQRPSAKKALLHSFFTSYPPPTPPIALPKPLAELRPRELAPDETQGKPLLTSGAGQSLKRKAESPRTSQSVPRKLIFT

SEQ ID NO: 31516 - protein, 478 aa, Desulfotalea psychrophila LSv54
MRTKYNNIQSKQGIIMCSYSILVVDDEPNYLIVLSELLRDEDLEVFTAGSGKAGLDICREVDLDLVITDMQMDGMDGMALLEQIKELNPDLPVLIMTAHAEVEKAVKAMQAGAFGYLAKPFANDELLVNIYRAARHYSLIRENKRLRHQLQSEDCFSGIVGKSPSMQRVYKLIRKVAPTPASVLITGESGTGKELVAQAVHSTSPRRDEAFIAVNCAALSANLLESELFGHEKGAFTGAASMRKGRFELAAGGTIFLDEISEIPLELQSKLLRILQEKSFERVGGAKTLHVDVRVISASNKDLKEEVAAGHFREDLFYRLNVIHLNLPPLRERLDDLPLLVAFFIEKYRKILQLENLVVGEEAMKLLLRLPWDGNVRELENTIERAAILCDAGNIMVEDVQPETVYNKEDHWQPGGDLSNFIPESVGLNEVLYAVEERMLIKALDESNQVQARAASQLGITKSLLQYKLKKYGLKKKK

SEQ ID NO: 31517 - protein, 102 aa, Triticum aestivum
IFRTGPELKNVWLGEVKGMADRIIGMRKALRENLEKLGSPLSWEHVTNQIGMFCYSGMTPEQVDRLTSEYHIYMTRNGRISMAGVTTGNVAYLANAIHDVTK

SEQ ID NO: 31518 - protein, 169 aa, Yersinia enterocolitica
MFDVDINDVHGRYRESDTYQPGEHLTVVDTPVGRLGMTVCYDLRFPGLFQALRAQGAEIISVPAAFTKVTGEAHWEILLRARAIENQCVILAAAQVGRHGATRRTWGHTMAVDAWGKIIGQNPDAVSALKVKIETTGLKTIRNQMPVLQHNRFASSLVPRLSDSKQSSK

SEQ ID NO: 31519 - protein, 350 aa, Triticum aestivum
  misc_feature (86)..(86): Xaa can be any naturally occurring amino acid
  misc_feature (172)..(172): Xaa can be any naturally occurring amino acid
  misc_feature (198)..(198): Xaa can be any naturally occurring amino acid
  misc_feature (256)..(256): Xaa can be any naturally occurring amino acid
  unsure (1)..(350): unsure at all Xaa locations
PFQNKGVQKSRLPPVRNSRDIVDPRVRCVREAERRIAGSTNMEYLPMGGSVKMIEESLKLAYGEDSEFIKDKRIAAVQALSGTGAXDRLFADFQKRFLPDSQIYIPTPTWSNHHNIWRDAQVPQRTFAYYHPESRGLDFAGLMDDIKNAPEGSFFLLHACAHNPTGVDPSEXQWREISHQFKVKNHFPFFDMAYQGFXASGDPERDAKAIRIFLEDGHQIGCAQSYAKNMGLYGQRAGCLSILCDDEIQAVAVEKXQLQQIARPMYSNPPPPGALVVSIILSDPELKNVWLGEVKGMADRIIGMRKALRENLEKLGSPLSWEHVTNQGLHLIQLKEIMAPTLSCKLRWGK

SEQ ID NO: 31520 - protein, 249 aa, Xanthomonas campestris pv. campestris str. ATCC 33913
MTRKLVLLRHGQSQWNLDNRFTGWVDVDLTEQGRQEAAAAGKLMKDEGLQFDVAYTSVLKRAIHTLQGALKELDQDWLPVHKSWRLNERHYGGLQGLDKAETAAKHGEEQVKIWRRSYDIPPPAMDVTDPGHPGHDRRYATLDRNALPGTESLATTLVRVLPYWHDAIAPQLKAGQTVLVTAHGNSLRALYKYLNDISNAQILELNIPTGIPLLFELDDNLQVQSYRYLGDPEAAKRAAEAVANQGKAK

SEQ ID NO: 31521 - protein, 966 aa, Oryza sativa
MVSAADAVIPACAAVGIAFAVWQWLLVSRVKVSPYSAAAAAARNGGAGRAVFRPEGEVDDDDGGCGDDEEADGDGGVAAMASGIGGGDAAEVVAKALSHPAATPSLPRRTRKATTAALGGQIEDDGVDGQIKEEEPLRGKGGEGRAVAVVSTAVGGCAGLGAPHQLRGGGGGRTTTAWTAAEVVWRSGRRQRSSGDGVDNGGGRGWRRRGRQRPSRLTTAPAALGAIKSLGEVVGDALRREMRRASGAETGKTSSGNTTSSFVHTTMAVPCGDQDSIRKVMTILGGANSFLFTQYKYLAAFTAVFAVVIFLFLGSVHRFSTESQPCQYTRGKACKPALANAVFSTIAFLLGAATSVASGFLGMRIATAANARTTVEARRGIGPAFAAAFRSGAVMGFLLASLGLLVLYVAIKVFGLYYGDDWEGLYESITGYGLGGSSMALFGRVGGGIYTKAADVGADLVGKVERNIPEDDPRNPAVIADNVGDNVGDIAGMGSDLFGSYAESTCAALFVGSISSFGADHNFAAVSYPLLISSAGLIVCLITTLFATDLYRVKTVDGVAPALKLQLLISTVLMTVGVLVVTFTALPHEFTMFDFGEVKRVKNWHLFFCVTIGLWAGLAIGFTTEYFTSNAYSPVRDVADSCRTGAATNVIFGLALGYKSVIVPVFAIAVSIYVSFTLASIYGIAVAALGMLSTVATGLAIDAYGPISDNAGGIAEMAGMSHRIRQRTDALDAAGNTTAAIGKGFAIGSAALVSLALFGAFVSRAGMAVINVLSPKVFVGLVVGAMLPYWFSAMTMKSVGSAALKMVEEVRRQFAAIPGLMEGRATPDYASCVRISTDASLREMMPPGALVLLAPLVAGTFFGVQTLAGLLAGALVSGVQVAISASNSGGAWDNAKKYIEAGASDHAKALGPKGSDAHKAAVIGDTIGDPLKDTSGPSLNILIKLMAVESLVFAPFFAAHGGLIFK

SEQ ID NO: 31522 - protein, 325 aa, Bacillus subtilis subsp. subtilis str. 168
MLKPFVFITKPIPEEIEAFIGEHCRYEVWQEDTLPSDVLFEKLKEAEGLLTSGTSGPSINRELLEHAPKLKVVSNQSVGYDNFDIEAMKERGVVGTHTPYTLDDTVADLAFSLILSSARRVAELDRFVRAGKWGTVEEEALFGIDVHHQTLGIIGMGRIGEQAARRAKFGFDMEVLYHNRHRKQETEDSIGVKYAELDTLLEQSDFILLITPLTDETYHMIGEREFKLMKNSAIFVNISRGKTVDEKALIRALQEGWIRGAGLDVYEKEPVTQDNPLLQLDNVTLLPHIGSATAKVRFNMCKQAAENMLAAIQGQTPKNLTREFQ

SEQ ID NO: 31523 - protein, 491 aa, Rhizobium sp. NGR234
MTLTSALTRHLKCPELFRNLANEPHPSVAGQRQRFSVFNPSTGELLAEVPDMGAADAHAAIERADAAQEPWSGLTARARSDILWKWHRFILEHSDDLAAILTAEMGKPLGEAKSEVQHAAAYLQWYAEEANRIYGETISAPSTDRRMLVIKQPIGVVGAITPWNFPASMVARKISPALAAGCTVVLKPAEQTPLVAGAMFALAKLAGFPDGVLNLVYASEGDAIGRELCTNPKVRKISFTGSTEVGRLLMRQCSDQIKRISFELGGNAPFIVFDDADIDAAVDGAIQAKFRNAGQTCVSANRIYVQSGVYAEFAEKFTERVRTLKVGDGFDPNVAIGPLINQEALKKIELHISDAVQKGARVRSGGRRTGSSGTFFEPTVVTDVSKTMRLAEEETFGPLAPLLRFDDADHVVREANDTIYGLAAYFYASNLKRVWRVAEALEYGMVGINTGRMSSEAAPFGGVKQSGIGREGSRHGLEDYLDMKYLCVGGL

SEQ ID NO: 31524 - protein, 431 aa, Triticum aestivum
MAGTVPKLAAPRPAAAGPLPSQPLRSAALASAPSARRFRVSLAARARSPVIAMASAKEGNGAVTKRTTLHDLYEQQGQSPWYDNLCRPVTDLLPYIANGVRGVTSNPTIFQKAISSSNAYDGQFKELISAGKDAESAYWELVIKDIQDACKLFEPIYDETDGADGYVSVEVSPRLANDTQGTVEAAKWLHKVVNRPNVYIKIPATAECVPSIKEVIANGISVNVTLIFSVARYEAVIDAYLDGLEASGLSDLSRVTSVASFFVSRVDSLIDKMLEKIGTPEALALRGKAAVAQAKIANQLYLKKFSGPRWEALVKKGAKKQRLLWASTSVKNPAYLDTLYVDPLIGPDTVSTMPDQALDAFIDHGTVARTIDANVSEAEGIYSALEKLGIDWEEVGKQLEHEGVSSFKGSFDSLLTSLEEKGNALKTAANL

SEQ ID NO: 31525 - protein, 418 aa, Triticum aestivum
DKFVQKSRLVPVRNSPGYRRPTRPGNNYEIGNMIAEAMSKVGRKGVVTLEEGRSSENNLYVVEGMQFERGYISPYFVTDSEKMTTEYENCKLLLVDKKITNARDLINVLEEAIRGQYPILIIAEDIEQEALATLVVNKLRGSLKICAIKAPGFGERKTQYLDDIAILTGGTVIRDEVGLTLDKADNTVLGTAAKVVLTKESTTIVGDGSTQEEVTKRVAQIKNLIEAAEQDYEKEKLNERIAKLAGGVAVIQVGAQTETELKEKKLRVEDALNATKAAVEEGIVVGGGCTLLRLAAKVDAIKDTLDNDEQKVGAEIVRRALCYPLKLIAKNAGVNGSVVTEKVLSNDNFKFGYNAATGQYEDLMAAGIIDPTKVVRCCLEHAASVAKTFLTSDVVVVEIKEPEAAPLANPMDNSGFGY

SEQ ID NO: 31526 - protein, 615 aa, Azoarcus sp. EbN1
MSQIVEVKVPDIGDFSDVPVIELFVKPGDSIKVDESICTLESDKATMDVPSSAEGVIREVLVKVGDRVGEGAVLLKVEPQGAGAAPAGAGEAKPVPAAAAPAASPSPSAAAPAQTAAKSGAYAGSVDLECDMLVLGAGPGGYSAAFRAADLGLKTVIVERYATLGGVCLNVGCIPSKALLHVAQVMDEAEHMAVAGIKFAKPEVDLDALRAHKDKVVGKLTAGLAGMAKGRKVEVVRGLGTFLDANHLEVELSSGSGQDKTGEKKVVRFKQCIIAAGSAAVHLPFIPKDPRIVDSTGALELRTSDGKAPAKMLVIGGGIIGLEMATVYSTLGTRVDVVEMLDALMQGPDRDAVKVWEKQNAQRFDNIMLKTKTVAVEAKDDGLWVTFEGEKAPQGPQRYDMILQAAGRSPNGKKIGADRAGVVVTDRGFIEVDAQMRTNVPHIFAIGDVNGNPMLAHKAVHEGHVAAEVAAGETQGKSELARSAFDATVIPSVAYTHPEVAWVGFTEEQAKKEGRKVETAKFPWAASGRAIANGADYGFTKLIFDAETHRIIGGAIVGPSAGDMIGEVCLAIEMGADAVDIGRTIHPHPTLGETIGLAGEVAHGSCTDIPPMRKK

SEQ ID NO: 31527 - protein, 410 aa, Pyrococcus abyssi GE5
MEEEIKSMLGNVERFFSKKAMEMKASEVRELLKLVETSDIISLAGGLPNPKTFPKEIIKEILIEIMEEHADKALQYGTTKGFTPLRETLLDWLEKRYGISKENDIMITSGSQQALDLIGRVFIDPGDIVIVEAPTYLAALQAFNFYEPKYIQVPLDDNGMNVEALEDELRKLKAEGKKVKIVYTVPTFQNPAGVTMSEERRKHLIELASEYDLIVIEDDPYGELRYSGKPKKKIKALDKEGRVIYLGTFSKILAPGFRIGWIVGDPGIIRKLEIAKQSTDLCTNVFGQVVAWKYVSEGHLDRHIPKIREFYKPRRDAMLEALEEFMPENVKWTKPEGGMFVWVTLPDGIDSKKMLEKAVKKGVAYVPGEAFYAYRDVKNTMRLNFTYVDEDKIREGVKRLAETIKEETGV

SEQ ID NO: 31528 - protein, 1430 aa, Cryptococcus neoformans var. neoformans JEC21
MVPPARAHTHNTTNTKQAQLSSAYHELANELGTDNISVVGNYTLGRVIGQGTYGSVHLATHRLTGTRAAVKKVPKSFTPHLTRELHHHRRLHHPHIVHLHEIIATESHIWLVTELCSGGELFDYLVERGRILEGEARRLFGELTLAVGWLHMHGVVHRDLKLENVLLDGELRIKLGDLGFAREWQKGRLMDTYCGTTGYASPEMLACQKYLGVETDIWSLGIILYTLLCGGLPFDDDDERVMKELIQKGEYEEPDWLSQEARDLIRGMLQHDPSKRLSIREILTHPWFKMTIVDKVYPNGDVPSIPPSPNPTSPTAAGDDFFAESALRQQQQQQSRLTPHVAGRSPLSTHLPTTPRQNSGSSEAENGDSRTERKASNMQRLNSAEFSTTEKELEQLHLCTSRPAATATGSGAISPRSISSPSMRGKTLRTLPEGQVDVDETPAGLPPPLSLIDEHPHLPVALHSRTPSRTKRRSVSSTLSLERRLSHHSSHNSYITFPPEDYLSKLDPSLLPNPDSSSSSTTTPPARSFTTPSETRLLRQLDDLGLDVGQLKHSVETDACDASAGLWWLLRQKQEERGETDEVVRRREKEVVRREEKVAEYAKEERRKAREAERERERIPTSPMGILGTRPGKRDSIEKSSEGLRFKEEQPPSIPTTPSYTSVIDLGPPVLPVDVDVDVERTAVGRDAPREAAGEEMKSWKRVESPQSVAISSQSSLDPAPTLPPPAAAGGGGAAGAKTQKEDGRDQAGLDPVAVATPMSNANSSTGASTVAKPEPNVNASANANTSANPRLKAKSPSMNMLQRATSVLGGVGKKGDDKDKDKNGMNEKREESTNDSLHPKRGGSSSPNKLKKPMPAGMKGLTSTLSRSESESEGLLAGGGGGGGGGDSPAVSASGSKTVTPGSSPRRKGLTPQGTPRGGLRDAGAKDSSGERASGNGNGNAGGGNEKGKGGKKDSLWTTFRHLFYEDRRRRKRESVTPSASSPLLLPPSDIKLPAGAVVLSRGANSRTSQFKRSNVGYAPSTGSRRTSLDGNRPVYSRRSSSVHTTSRRSSVGSLHFQDHQAMISDLSRRASQRSHGSQTPTSDREYLDYPSAAAPISRPGSSHSIRGGVGGGSRRSSFSVRSPSLHPETFSASAGGPTSTRFKSSVPPPASPLLGYRRRPAGGNDSSRVRHIKVIPESQIMRSSSVASSIRSNASSRASSMDRDRDRDRESEYESGRDDVSLRSGKRQKRRSGSQRSLAQQIHRTRSPLALSLENTYGSNSVANVGLGIGGASRIPKKPLRDVFQKKGKRKDGGDDDWVSEDEDGFACGLGQGRGIAKSFSNANANGTVWMNVNAKTNPARSAAAFPTSKMVAQPTAQGGTSRRRERGRRSSLEEERGRPQEGKGKAKGETAAQGLMGIESLSGRSRRNLPDRSTAPGIIEEEEEDEE

SEQ ID NO: 31529 - protein, 336 aa, Streptococcus pneumoniae TIGR4
MEYEKDVKVAALDGKKIAVIGYGSQGHAHAQNLRDSGRDVIIGVRPGKSFDKAKEDGFDTYTVAEATKLADVIMILAPDEIQQELYEAEIAPNLEAGNAVGFAHGFNIHFEFIKVPADVDVFMCAPKGPGHLVRRTYEEGFGVPALYAVYQDATGNAKNIAMDWCKGVGAARVGLLETTYKEETEEDLFGEQAVLCGGLTALIEAGFEVLTEAGYAPELAYFEVLHEMKLIVDLIYEGGFKKMRQSISNTAEYGDYVSGPRVITEQVKENMKAVLADIQNGKFANDFVNDYKAGRPKLTAYREQAANLEIEKVGAELRKAMPFVGKNDDDAFKIYN

SEQ ID NO: 31530 - protein, 134 aa, Brassica napus
  misc_feature (122)..(122): Xaa can be any naturally occurring amino acid
  misc_feature (130)..(130): Xaa can be any naturally occurring amino acid
  unsure (1)..(134): unsure at all Xaa locations
MVLSHAASDSDVSVHSTFASRYVRTSLPRFKMPENSIPKEAAYQIINDELMLDGNPRLNLASFVTTWMEPECDKLIMSSINKNYVDMDEYPVTTELQNRCVNMIAHLFNAPLGETETAVGVXGTVGSSEXIMLA

SEQ ID NO: 31531 - protein, 513 aa, Oryza sativa (japonica cultivar-group)
MLEVSTLRSPKADQRAGVGGHHVVGFVPAPPSPADVADEVDAFIVDDSCLLEYIDFSCCDVPFFHADDGDILPDLEVDPTELLAEFASSPDDEPPPTTSAPGPGEPAAAAGAKEDVKEDGAAAAAAAAAADYDGSPPPPRGKKKKDDEERSSSLPEEKDAKNGGGDEVLSAVTTEDSSAGAAKSCSPSAEGHSKRKPSSSSSSAAAGKNSHGKRKVKVDWTPELHRRFVQAVEQLGIDKAVPSRILELMGIECLTRHNIASHLQKYRSHRKHLMAREAEAASWTQKRQMYTAAAAAAAVAAGGGPRKDAAAATAAVAPWVMPTIGFPPPHAAAMVPPPPHPPPFCRPPLHVWGHPTAGVEPTTAAAPPPPSPHAQPPLLPVWPRHLAPPPPPLPAAWAHGHQPAPVDPAAYWQQQYNLQRFPVPPVPGMVPHPMYRPIPPPSPPQGNKLAALQLQLDAHPSKESIDAAIGDVLVKPWLPLPLGLKPPSLDSVMSELHKQGIPKVPPAASGAAG

SEQ ID NO: 31532 - protein, 328 aa, Rhodopseudomonas palustris CGA009
MLGLGKFDHHFSTSANAGPLPQANAVGRFGSIGWGDAVKLMLKVEPDDGRIAQARFQAFGCSSAIAASAALTDMITGKTIDEASGISAAAIADYLGDLPRERMYCAVMTFEALQQAIGSFRGKAAVAEADAPPVCKCLGVGQMMIERTIRFNRLTSLDDVTAYTKAAGSCSTCFKQIESLLARVNAEMVEDGLIPAEDAYRIGSAMPRATELKPHGAPAPAANIFAAKATPAHLRPIAKAAPRPATPPAGLVDAPPQEALIAEAVEELRPHLQRDGGDCEFVSLDGNIVYVRLSGNCVGCQLSSVTLSGVQAKLVEKFGRPLRVVPVS

SEQ ID NO: 31533 - protein, 499 aa, Neisseria gonorrhoeae FA 1090
MFKKYQYFALAALCAALLAGCEKAGSFFGADKKEASFVERIEHTKDDGSVSMLLPDFAQLVQSEGPAVVNIQAAPAPRTQNGSGNAETDSDPLADSDPFYEFFKRLVPNMPEIPQEEADDGGLNFGSGFIISKNGYILTNTHVVAGMGSIKVLLNDKREYTAKLIGSDVQSDVALLKIDATEELPVVKIGNPKNLKPGEWVAAIGAPFGFDNSVTAGIVSAKGRSLPNESYTPFIQTDVAINPGNSGGPLFNLKGQVVGINSQIYSRSGGFMGISFAIPIDVAMNVAEQLKNTGKVQRGQLGVIIQEVSYGLAQSFGLDKASGALIAKILPGSPAERAGLQAGDIVLSLDGGEIRSSGDLPVMVGAITPGKEVSLGVWRKGEEITIKAKLGNAAEHTGASSKTDEAPYTEQQSGTFSVESAGITLQTHTDSSGKHLVVVRVSDAAERAGLRRGDEILAVGQVPVNDEAGFRKAMDKAGKNVPLLVMRRGNTLFIALNLQ

SEQ ID NO: 31534 - protein, 221 aa, Pseudomonas syringae pv. tomato str. DC3000
MKHIVDGFVHFRKEVFPQQEELFKKLATAQSPRAMFITCADSRIVPELITQSSPGDLFVTRNVGNVVPPYGQMNGGVSTALEYAVVALGVQHIIVCGHSDCGAMRAVLNPSSLDKMPTVKAWLRHAEVARTVVEQNCNCSGELETMQVLTQENVISQLHHLRTHPSVAAKMASGQLFIHGWVYSIETSEILAYDAERDTFVPLDGTGPTPMASPKARFSAD

SEQ ID NO: 31535 - protein, 472 aa, Blumeria graminis f. sp. hordei
MPTFGFLKKRKKVSLGHRDLDSPASTLSQPASPITPSTSRGLGEPIDTTSSKITSPGQKLGSNITKDHRGTRTTVEDLPSMTDVSHLQQAYRNLSQGSTASKSNLLTIHNLINPPQHDGAGQSKVMPEKHMNNKTERPVQGKAAVAQVRQTKGKYSLSDFEILRTLGTGSFGRVHLVQSKHNQRFYAVKVLKKQQVVKMKQVEHTNDERSMLQEVKHPFLITLWGTFQDSKNLYMVMDFVEGGELFSLLRKSQRFPNPVAKFYAAEVTLALEYLHKKDIIYRDLKPENLLLDRHGHLKITDFGFAKKVTDITWTLCGTPDYLAPEVVSSKGYNKSVDWRWSLGILIFEMLCGYTPFWDNGSPMKIYENILKGRVKYPPYIHPDAQDLIQRLITADLTKRLGNLHGGAEGIKSHQWFAEVTWERLAKKDIDAPYVPPVKAGSGDASQFDKYPEETERYGQTGPDEHGSLFENF

SEQ ID NO: 31536 - protein, 400 aa, Pseudomonas putida KT2440
MRAVSYHGANDVRVDSVPDPILQDADDIILRVTATAICGSDLHLYRGKIPETEQGDIFGHEFMGIVEEVGRDVTTLQVGDRVVIPFVIACGSCFFCQQDLFAACETTNTGRGSIINKKGIPPGAALFGYSHLYGGIPGGQADYVRVPKGNVGPFKVPTTLADDKVLFLSDILPTAWQAVINAEIGEGSSVAIYGAGPVGLLSAACARMLGAHTVFMVDDNDYRLAYAQEAYGVIPINFEKDDDPADSIIRQTPGMRGVDAVIDAVGFEAKGSTTETVMTALKLEGSSGKALRQSIAAVRRGGVVSVPGVYAGFIHGFMFGDAFDKGLTFKMGQTHVQKYLPELLEHIEAGRLQPELIVTHRLALEEAAMGYKMFDQKQDNCRKVILVPGAAPGTLGPDHL

SEQ ID NO: 31537 - protein, 510 aa, Streptomyces griseus
MSASTSRTLPPEIAESQSVMALIERGKADGQIAGDDVRRAFEADQIPATQWKNVLRSLNQILEEEGVTLMVSAAEPKRTRKSVAAKSPAKRTATTRTVAAKAAPVKKSAPAAAPTDEESEAPVKKAAAKKTTAKKTAKKATAKKTAAKKTAAKNVVDELLDDEAEEKPTTGKPGEEGAPEGTGGESQGFVLSDDDEDDAPAQQVAAAGATADPVKDYLKQIGKVPLLNAEQEVELAKRIEAGLFAEDKLANADKIAPKLKRELEIIAEDGRRAKNHLLEANLRLVVSLAKRYTGRGMLFLDLIQEGNLGLIRAVEKFDYTKGYKFSTYATWWIRQAITRAMADQARTIRIPVHMVEVINKLARVQRQMLQDLGREPTPEELAKELDMTPEKVIEVQKYGREPISLHTPLGEDGDSEFGDLIEDSEAVVPADAVSFTLLQEQLHSVLDTLSEREAGVVSMRFGLTDGQPKTLDEIGKVYGVTRERIRQIESKTMSKLRHPSRSQVLRDYLD

SEQ ID NO: 31538 - protein, 511 aa, Glycine max
MANIDIEGILKQQQPYDGRVPKTKIVCTLGPASRSVEMTEKLLRAGMNVARFNFSHGTHDYHQETLNNLKTAMHNTGILCAVMLDTKGPEIRTGFLKDGKPIQLKEGQEVTITTDYDIKGDPEMISMSYKKLPVHLKPGNTILCSDGTITLTVLSCDPDAGTVRCRCENTATLGERKNVNLPGVVVDLPTLTEKDKEDILGWGVPNKIDMIALSFVRKGSDLVNVRKVLGPHAKNIQLMSKVENQEGVLNFDEILRETDAFMVARGDLGMEIPVEKIFLAQKMMIYKCNLVGKPVVTATQMLESMIKSPRPTRAEATDVANAVLDGTDCVMLSGESAAGAYPELAVKIMARICIEAESSLDYGAIFKEMIRSTPLPMSPLESLASSAVRTANKAKAKLIVVLTRGGSTAKLVAKYRPAVPILSVVVPVLSTDSFDWTCSDETPARHSLIYRGLIPILGEGSAKATDAESTEVILEAALKSATERALCKPGDAVVALHRIGAASVIKICIVK

SEQ ID NO: 31539 - protein, 422 aa, Streptomyces griseus
MERRAVITGIGVCAPGGTGVDSFWELMCDGRTATRGITLFDPSPYRSRVAAEIDFDPRAHGLTPQEIRRMDRAAQFGVVTAREAFADSGLDGAALDPFRTGVSLGTAIGAAGGLDAEYRVVSDDGRLELVDHRYATPHLYDLFVPSSFATEVAWAVGAEGPATVVSTGCTAGIDAVGHAVEAIRDGSADVMVTGAVDAPITPLTMAAFDAIRATTSLNDEADTASRPFDASRKGFVLGEGAAVFVLEEAEHARRRGAYVYAEIAGYASRGNAFHMTGLRSDGAELAAAIRAALDEARLDASAVDYVNAHGSGTRQNDRHETVALKSALGQHAHRVPVSAIKSMVGHSLGAIGSIEIAACALAMRHHVIPPTANLHTPDPECDLDYVPLTARAQRTDAVLTIGSGFGGFQSAMVLARPDRSAA

SEQ ID NO: 31540 - protein, 412 aa, Streptomyces griseus
MSAPGGGDRGRTLITGMGLATPHGVDVEDFWAATRVGKNAIGPVTRFDASGYPARLAGEIRGFSAADHLPGRLVAQTDRVTQLALVAADRAFRDAGVAPGDLPANGMGVVTAAGSGGFEFGERELRKLWSLGANHVSAYQSFAWFPTANTGQIAIRSDSRGPNGVVVGDQAGGLDALGQARRLIRRGTGLVAAGGFEASLTPLGWTARLSTGLMSTSDDPDRAYLPFHPAARGYVPGEGGALLILEDERSALARGAATAHAELAGYSATLDPRPGSGREPGLRRAIELALADAGVAPAEVDVVFADAAGSPEPDAVEVAAVAGVFGPRAVPVTAPKTMIGRLQAGGAPVDVVTAVLAIREGLIPPTADAESATARELDLVVGRPRTASVGTALVLARGHGGFNSAVVLRAVD

SEQ ID NO: 31541 - protein, 443 aa, Physcomitrella patens
MREILHIQGGQCGNQIGAKFWEVVCEEHGIDPTGTYQGLSDLQLERINVYYNEASGGRYVPRAVLMDLEPGTMDSVRSGPYGQIFRPDNFVFGQTGAGNNWAKGHYTEGAELIDSVLDVVRKEAESCDCLQGFQVCHSLGGGTGSGMGTLLISKIREEYPDRMMLTFSVFPSPKVSDTVVEPYNATLSVHQLVENADECMVLDNEALYDICFRTLKLITPSFGDLNHLISATMSGITCCLRFPGQLNSDLRKLAVNLIPFPRLHFFMVGFAPLTSRGSQQYRSLTVPELTQQMWDAKNMMCAADPRHGRYLTASAMFRGKMSTKEVDEQMINVQNKNSSYFVEWIPNNVKSSVCDIPPTGLKMSSTFIGNSTSIQEMFRRVSEQFTAMFRRKAFLHWYTGEGMDEMEFTEAESNMNDLVSEYQQYQDASAEEEGEYEEDLEEA

SEQ ID NO: 31542 - protein, 959 aa, ASPERGILLUS NIDULANS FGSC A4
MRSRIPNILKPWGRQETQGDTPVVRRNRNQLPMLHLADTTRNNLIAMTGEFVGTFLFLFFSFAGTQVANTPKPVEGAPPNTDALLYSALAFGFSLMVNIWAFYRVTGLLFNPAVTLALCLVGGMPAYRGLFVFAAQIVGGIAAAGVVSALFPGDLNVSTRLGGGASISQGLFIEMFLTAQLVFVIIMLAVVKHKGTFLAPVAIGIAFFVTEMIGDYYTGGSLNPARSLGPDVINRSFPGYHWIYWVGPLLGSLLACGFYYFLTFFSYESVNPGQDFNEWEAKWGPGPTSWDSSMRQHSHSDTTTLNRGMSPRDSRAARNGNGDWNGAHGAHVPPPPGEEQSHSPPISFAHETPGYKPWLDQRRSLELLAWHLLNRGVGVPTHRETRRASLISFPPLLPFTIFISIHAAHLSIVATMGKQTDVRPPSPGLGDTYDQQLLAKLGYKQELRRSYSTLQIFAIAFSIMGLVPSIASTIPFSLPAGPAGMVWGWLTASILIFTVGLAMSDMASSMPTAGGFYWWTHYFAGKKFKRPLSFLVGYSNTLGLIGGICSVDYTLSLLILACISIARDGNWSASNGIIYGLYAGLILVHSVATIVTSNIMPRIQTACIFINVGLIIATVVALPVGKVTRGGTLNSGSFVFGHIDNLSNWPTGWNFVLAFMSPIWAIGFFDSCVHMSEEARDAPKAVPRGILFSAGSACLLGFLVLSVLAAVMDPDVAKTAGTVYGQPMAQIYYDSLGKRGALGFMAVLILIQFLIGLSLIVAASRQVFAFSRDYALPFSPILRKITSLNGQPQPINAIVFLGGICVIFGLLALINSVAANALFSLFVASNYVAWGTPILCRLIWSKRFVPGAFYTGPKVSSIIAGIAVAWLGFGLLLSMFPTVKNPGPAEMNYTVVINGFVWIASMLYYAVYARKVFTGPRVTLAEGEGVSSSFIGTQAEAAREVNNEKEVGTDTSPAG

SEQ ID NO: 31543 - protein, 166 aa, Glycine max
  misc_feature (162)..(162): Xaa can be any naturally occurring amino acid
  unsure (1)..(166): unsure at all Xaa locations
MNALAATNRNFKLASRLLGLDSKLEKSLLIPFREIKVECTIPKDDGTLQSYVGFRVQHDNARGPMKGGIRYHPEVDPDEVNALAQLMTWKTAVANIPYGGAKGGIGCDPAELSISELERLTRVFTQKIHDLIGTHTDVPAPDMGTGPQTMAWILDEYSKFHXYSPA

SEQ ID NO: 31544 - protein, 339 aa, Arabidopsis thaliana
MEQAALKSSVRKEMALKTTSPVYEEFLAVTTAQNGFSVDDFSVDDLLDLSNDDVFADEETDLKAQHEMVRVSSEEPNDDGDALRRSSDFSGCDDFGSLPTSELSLPADDLANLEWLSHFVEDSFTEYSGPNLTGTPTEKPAWLTGDRKHPVTAVTEETCFKSPVPAKARSKRNRNGLKVWSLGSSSSSGPSSSGSTSSSSSGPSSPWFSGAELLEPVVTSERPPFPKKHKKRSAESVFSGELQQLQPQRKCSHCGVQKTPQWRAGPMGAKTLCNACGVRYKSGRLLPEYRPACSPTFSSELHSNHHRKVIEMRRKKEPTSDNETGLNQLVQSLQAVPSF

SEQ ID NO: 31545 - protein, 250 aa, Sphingomonas paucimobilis
MSDLSGKTIIVTGGGSGIGRATVELLVASGANVPVADINDEAGEAVVATSGGKAAYFRCDIAQEEDVKALVAQTLAAFGGLDGSFNNAAIPQAGLPLAEVSLERFRQSMDINVTGTFLCMKYQILAMIERGTKGSIVNTASAAGVVGVPMHGEYVGAKHAVVGLTRVAAADYGKHGIRVNALVPGAVRTPMLQRAMDNDAGLEPYLNSIHPIGRFSEPHEQAQAAVWLLSDAASFVTGSCLAADGGFTAI

SEQ ID NO: 31546 - protein, 250 aa, Sphingomonas paucimobilis
MANRLAGKVALITGGASGLGAAQAKRFAEEGAKVVIGDLNEEMAKGVVAEIRAAGGDALFIRLDVTDAASWNNAIAAAVDGFGGLTTLSNTAGIIHPGGFEEESIEGWNKMVAVNQTAIFLGIKAAIPELVKSGNGSIINISSLIGMFPTAGNASYCATKAAVRIMSKAAALEFVDRGVRVNTIVPGGMNTPITANVPPDVLKQQTSQIPMGKLGDPIDIANGALFLASDEAKYITGVDLPIDGGWSVGV

SEQ ID NO: 31547 - protein, 412 aa, Streptococcus pyogenes SSI-1
MEYEVYETMKIIEKSSKLEHVAYDIRGPVLDEANRMIASGEKILRLNTGNPAAFGFEAPDEVIRDLIVNARLSEGYSDSKGIFSARKAIMQYCQLKGFPDVDIEDIYLGNGVSELISISLQALLDNGDEVLVPMPDYPLWTACVSLGGGKAVHYLCDEEAGWYPDIADIKSKITSRTKAIVVINPNNPTGALYPKEILEDIVALAREHQLIIFADEIYDRLVMDGKEHIAIASLAPDVFCVSMNGLSKSHRIAGFRVGWMVLSGPKDHVKGYIEGLNMLANMRLCSNVLAQQVVQTSLGGHQSVDALLLPGGRIFEQRNFIYEAINAIPGLSAVKPEAGLYLFPKIDRQMYRIDDDEEFVLQLLKQEKVMLVHGRGFNWKDPDHFRIVYLPSVEELEDVQEKITRVLYQYRR

SEQ ID NO: 31548 - protein, 765 aa, Listeria monocytogenes EGD-e
MVKAISSNLGYPRLGEKREWKRALEKFWNGAISEEELLAETKALRLHALKKQQEKGIDLIPVGDFSFYDQVLDTSVTFGIIPKRFQHDGGKVSLNTYFDIARGKSDAVASEMTKWFNTNYHYIVPELADADPKVLDNRALYYYEEAKKELGIEGKPVLVGPVTYLKLGKGNDAENFEALLDKFIPAYVEILKELERAGAKWVQIDEPYLATSFDKSEIKLFEKVYQAFQTAVPNLKIELQTYFESLDYYEEVVNLPVAAIGIDFVHDHGDSLEALKAHGFPEDKYLAAGVIDGRNVWRSDLDAKLSLLTEIADYVTDGKLIVQPSNSLLHVPVTKLSEPDLDEVILGGLSFADQKLDEIAILTKALTDGAESVTAELEDARAAVTALNESSHRNNLEVQEAIANLGNVRVDRELPFAERIKLQHAWLNLPLFPTTTIGSFPQSPEVRKTRADWLKGNITDAEYNAFIEKETARWIKIQEELDIDVLVHGEFERTDMVEYFGQKLAGFQATKFGWVQSYGSRAVRPPLIYGDVAFTEEITVKESVYAQSLTKRPVKGMLTAPVTIINWSFVRDDVPESVVANQVGLALRKEVEALERNGIKVIQVDEPALREGLPLKQARWEKYLNDAVYSFKLTTASVQNDTQIHTHMCYSDFDDIIDTISALDADVISIETSRSHGEIISTFEEVTYDKEIGLGVYDIHSPRVPTVTEIQDNIRRALRAIDAKQFWINPDCGLKTRKEPETIAALQDMIKATKEVRAEYQVLEK

SEQ ID NO: 31549 - protein, 230 aa, Pseudomonas putida KT2440
MSLGKRMGAELIGTFWLVLGGCGSAVLAASSPLGIGVLGVAFAFGLTVLTMAFAIGHISGCHLNPAVSFGLVVGGRFPAKELLPYVIAQVIGAILAAGVIYLIASGKAGFELSAGLASNGYADHSPGGYTLGAGFVSEVVMTAMFLVVIMGATDARAPAGFAPIAIGLALTLIHLISIPVTNTSVNPARSTGPALFVGGWALQQLWLFWVAPLIGAAIGGALYRGLAKEP

SEQ ID NO: 31550 - protein, 121 aa, Arabidopsis thaliana
  misc_feature (20)..(20): Xaa can be any naturally occurring amino acid
  misc_feature (92)..(92): Xaa can be any naturally occurring amino acid
  misc_feature (101)..(101): Xaa can be any naturally occurring amino acid
  misc_feature (115)..(115): Xaa can be any naturally occurring amino acid
  unsure (1)..(121): unsure at all Xaa locations
MAAARRLRTLQSQPENKVCXDCSQKNPQWASISYGIFMCLECSGKHRGLGVHISFVRSVTMDSWSEIQIKKMDAGGNERLNNFFAQYGISKXLDIISKYNXSNGGSVYRDRFQVXLREAMR

SEQ ID NO: 31551 - protein, 655 aa, Magnetococcus sp. MC-1
MSTSDLDRLCINTLRMLSVDAIEAANSGHPGLPLGAAPMAYVLWSRIMRHNPKNPLWPDRDRFILSAGHGSALLYALLHTSGYDVSLDELKNFRQYGSKTPGHPEYGHTPGVECTTGPLGQGFAMGVGMALAERHLAQQVNRAEFHPIVDHFTYGIVGDGDLMEGITYEAAAMAGNLCLGKLIYLYDDNGISIEGSTEIAFTEDVTTRFEAAEWQVLTVEDGEDLDAIEAAILQAQQEEERPSLIRVKTVIGRGSPKQGTAATHGSPIKGADMVATRQVYAWPETRFYLPDEAQSHFAQMVKRGAEAEAEWNATREIYMSRFPTETELLLERLAGELTDGWDRSLDELTFAPSAATRSTSGQCLNAIAQDLPGLIGGSADLGPSNNTTLKHFPERTLHFGVREHAMGAVLNGLALHGGFHPYGGTFLVFSDYLRGAIRLSALMHLPVTYVLTHDSIGVGEDGPTHQPVEHVASLRAIPGLNVFRPCDGEETRAAWHWTLCHKAPAAMILTRQELPELGGGEGVMEGVARGGYIKVDCQGTPDLILLASGSEVSLAVAAAAQLSAKGHQVRVVSMPCMERFDVQDAAYKESVLPAAVATRLAVEAGSTMSWYKYVGLEGEVIGLDNFGASGPGDTLMEVYGFTTENVVAQAQELLG

SEQ ID NO: 31552 - protein, 147 aa, Sinorhizobium meliloti 1021
MTYRKTDEEVSKLTPEQYRVTQQNGTERPFTGEYTDNKRPGIYVDIVSGEPLFASADKFDSGCGWPSFTKPIVPANVNELRDNSHGMIRTEVRSAHGDSHLGHVFPDGPQDRGGLRYCINSAALRFIPREEMEAEGYGGYFNQVEDI

SEQ ID NO: 31553 - protein, 432 aa, Listeria monocytogenes EGD-e
MDHSMSKKLHDEALLHIVGGVNSPSRSNKGVGGGIPVTMERASGAYFYDVDGNKYIDYLAAFGPIITGHAHPHITEAITKAAQNGVLYGTPTKHEITFAKMLKEAIPSLEKVRFTNSGTEAVMTTIRVARAYTGRDKIIKFAGCYHGHFDLVLVEAGSGPSTLGIPDSAGVTKSTAEEVITVPFNDLDSFKEALAIWGDQVAAVLVEPIVGNFGMVAPEDGFLEAVNELAHVNGSLVIYDEVITAFRFMYGGAQNYLGVIPDLTAMGKIIGGGLPIGAYGGRIDIMEKVAPLGPAYQAGTHAGNPASILSGIACLEVLQEEGLYERFEKYGSMLKDGIEKAAAKHNIAVTVNQIVGALTVYFTEDPVTNYAEAGATNGELFGRFFKGMLEEGINLAPSKYEAWFITSAHSEADILETIQAVDTVFGKMVQDN

SEQ ID NO: 31554 - protein, 168 aa, Sinorhizobium meliloti 1021
MTKRAVLAGGCFWGMQDLIRKLPGVIETRVGYTGGDVPNATYRNHGTHAEGIEIIFDPERISYRRILELFFQIHDPTTKDRQGNDIGTSYRSAIYYVDDEQKRIAQETIADVEASGLWPGKVVTEVEPVRDFWEAEPEHQNYLERYPNGYTCHFPRPNWVLPRRSAAE

SEQ ID NO: 31555 - protein, 680 aa, Saccharomyces cerevisiae; identical to SEQ ID NO: 760

SEQ ID NO: 31556 - protein, 275 aa, Lycopersicon esculentum
MIKTSSCIFTFFLLICFFVVVAFGGTFDQEFDVTWGYGRVKILENGQLLTLSLDRSSGSGFKSKQQYMFAKIDMKIKLVPGNSAGTATTYYLSSVGSAHDEIDFEFLGNVSGEPYTLHTNVYAQGKGDREQQFHLWFDPTKDFHTYSILWNPRNIIFLVDGTPIRQYKNLEATNGIPYPKNQPMWLYSSLWNAEEWATRGGLVRTDWSKAPFIASYRNFNAQTSKNPTANSWLTQSLDNVGLTRMKWVQKNYMIYNYCTDTKRFPQGFPHECTLN

SEQ ID NO: 31557 - protein, 400 aa, Wolbachia endosymbiont strain TRS of Brugia malayi
MVDYEEIFLNKIKDIKEEGRYREFTHFASLPGRLPYIMDCERNREVIVWCSNNYLGMSQNESVVAAIQNSSVGAGGTRNISGTTKEVVELEQSLACLHNKEAALTFACGYLANQTTLSTLSSVIPDVVIFSDEKNHSSMIEGIKSGKRPKHIFKHNNVDHLEQLLKSVDRKTPKIIAFESIYSMDGDIAPLREICNLADQYNAITYLDEVHAIGMYGLRGGGIAEREGLMDRVTVIQGTLSKAFGVMGGYIASSKSLVDVIRSSAPGFIFTTAMSPVLAAAAKASVEHLKSSNVEREKQRQVVEKVKNSLSSVGINFIPTETHIIPIIIGDPELSKRASKLLFDEYGVYVQHINYPTVPRGTERFRITPTPYHTDEMIEHLTESLIKVFVKLSVSVACLC

SEQ ID NO: 31558 - protein, 589 aa, Bacillus subtilis subsp. subtilis str. 168
MPTKKQKSKSKLKPFFALVRRTNPSYGKLAFALALSVVTTLVSLLIPLLTKQLVDGFSMSNLSGTQIGLIALVFFVQAGLSAYATYALNYNGQKIISGLRELLWKKLIKLPVSYFDTNASGETVSRVTNDTMVVKELITTHISGFITGIISVIGSLTILFIMNWKLTLLVLVVVPLAALILVPIGRKMFSISRETQDETARFTGLLNQILPEIRLVKASNAEDVEYGRGKMGISSLFKLGVREAKVQSLVGPLISLVLMAALVAVIGYGGMQVSSGELTAGALVAFILYLFQIIMPMGQITTFFTQLQKSIGATERMIEILAEEEEDTVTGKQIENAHLPIQLDRVSFGYKPDQLILKEVSAVIEAGKVTAIVGPSGGGKTTLFKLLERFYSPTAGTIRLGDEPVDTYSLESWREHIGYVSQESPLMSGTIRENICYGLERDVTDAEIEKAAEMAYALNFIKELPNQFDTEVGERGIMLSGGQRQRIAIARALLRNPSILMLDEATSSLDSQSEKSVQQALEVLMEGRTTIVIAHRLSTVVDADQLLFVEKGEITGRGTHHELMASHGLYRDFAEQQLKMNADLENKAG

SEQ ID NO: 31559 - protein, 463 aa, Chromobacterium violaceum ATCC 12472
MPGEQQTLHRGLEERHINLMALGATIGVGLFLGSATAIKMAGPAIMLAYGLGGLAIFMIMRALGEMAIHNPVAGSFSRYAQDYLGPLAGYLTGWNYWFLWLVTCMAEITAVGVYMGIWFPDVPSWYWALAAMLAMGGVNFIAVKAYGEFEFWFALIKIVTIVLMIAGGFAMIAFGFGNHGVATGISNLWAHGGFMPNGFSGVLMSLQMVMFAYLGVEMLGLTAGEAKNPKKALARAVDSVFWRILIFYVGALFVILSIYPWNELGTRGSPFVLTFESMGIPAAAGIINFVVLTAALSSCNSGIFSTGRMLFNLAEQKQALPIFAHVSKRGVPVPALLMSVAALLLGVLLNYLAPKEVFTWLTAISTFGAVWTWLIILLAQLRFRRSLSADELASISHRMPLWPYGSYLTLGFLALVIGLMAYFPDTRVALIVGPGWLVFLVAAYYLLGYHKQDAAWRLAQQSR

SEQ ID NO: 31560 - protein, 207 aa, Hypocrea jecorina
MPLCGGSKTVQRKLVLLGDGASGKTSLLNVFTRGYFPTVYEPTVFENYVHDIFVDNVHIELSLWDTAGQEEFDRLRSLSYDDTDLIVLCYSVDSKDSLENVESKWVGEIADNCPGVKLVLVALKCDLRQQEDDEPEDQAAADGNAQREKPPTISYDEGLEVAKRIGASRYLECSAMKNRGVNEAFTEAARVALSVKKEREDNKCTIM

SEQ ID NO: 31561 - protein, 121 aa, Arabidopsis thaliana
MAQTVVLKVGMSCQGCVGAVNRVLGKMEGVESFDIDIKEQKVTVKGNVEPEAVFQTVSKTGKKTSYWPVEAEAEPKAEADPKVETVTETKTEAETKTEAKVDAKADVEPKAAEAETKPSQV

SEQ ID NO: 31562 - protein, 402 aa, Rhizobium sp. NGR234
MRAAMNFRINNSLLIEAERDAVLELRHAMHREPELSNNEWKTQQRIRGMLERFGLKGATVFHNTGLYIDIEGSASGPKRAVAVRGDIDALPIQETRDDLPYQSHVEGVMHACGHDLHASIAMGVALAFHRMRNNFAGKLRVFFQPAEEAEPLGGRTVLEERLLEGFDNAVGFHVTPSIQVGKFGAREGAVSKSSDQFKVTVSGSAAHGSTPHNGIDAITIAAAFVNEVQKVISREVPVDDRSVITIGTIHGGEATNIICPKVVMEGTIRTTNPELRPLLSQRVREIAEGVAALHRGKAEVVVTSGEPAVINDPEMVRLFRDAVSDMAGSDALTQGKAISGSDDFGFYSQCIPSIYFWFGSGEPGNESGVHTPTFAVSDDVLIPTTELAVKYCFDLLHGQSAR

SEQ ID NO: 31563 - protein, 303 aa, Zea mays
  misc_feature (299)..(299): Xaa can be any naturally occurring amino acid
  unsure (1)..(303): unsure at all Xaa locations
MASEAETAGERKRKKTLGRRKIEIKPIKCVEAKHVCFSKRREGLYKKANELCALTGAKVAVIVSSPAGKPYSFGHPSVRAVLDRYLLDPGTAAHDAFDAPPPPILREFDGQRERLCEAIAAEARRRDALDAAARAAGVWTDDVVRRAELPDLLAMLAALERVRADADRAMRQHQCAAAAAAAAAADACYYDLANIASFTADEYGGAGSSSLHHQAAAVDVAHMAFLMGGDGVSHAPQPFGPMLLPAPDDLPPPAPLAFHYGSDHNHIAGYQGHAYDPGCGSGGGHGAAYEMEGWTTATXNFFG

SEQ ID NO: 31564 - protein, 311 aa, Vitis aestivalis
MAMDSSNWMAASLDLNANPLRLFDDTPKKEVQDDFTGLGLKVVSLKEEETGVLVEKLNQVNAENRKLTEMLTVMCENYNALRSHVMEYISKNPERESPSSRKRKAESSNNNSNNNGVVGNSESSSSDEDSFKKPREETIKAKISRVYTRTDASDTSLVVKDGYQWRKYGQKVTRDNPSPRAYFKCSFAPSCPVKKKVQRSVEDQSILVATYEGEHNHPHHGRIEPTSGANRSVNLGSVPCASSLSSSGPAITLDLTKPKSNSDAKASKSPELHHFLVEQMASSLTKDPSFKAALAAAISGRILHHNQTEKW

SEQ ID NO: 31565 - protein, 124 aa, Debaryomyces hansenii CBS767
KRKAEATRITQRFNDRLPVICEKAENSDIQEIDKRKYLVPGDLSVGQFVYVIRKRIKLPSEKAIFIFINDILPPTAALMSTIYEEHKDEDGFLYVLYSGENTFGETEMKRLNVADLELDFDSVN

SEQ ID NO: 31566 - protein, 339 aa, Pycnoporus coccineus
MPGQVPVGINGFGRIGRIVLRNALLHGDINVVAVNDPFIDLEYMVYMFKYDSVHGRFKGSVEAKDGKLWVEGKPISVFQEKDPANIPWGSVGAQYIVESTGVFTTTEKASAHLKGGAKKVVISAPSADAPMFVCGVNLDAYDPKYTVISNASCTTNCLAPLAKIINDKFGIVEGLMTTVHATTATQRTVDGPSHKDWRGGRAVGNNIIPSSTGAAKAVGKVIPSLNGKLTGLAFRVPTIDVSVVDLVVRLEKPAKYEDIKNAVKEAANGNMQGIMAYTEDKVVSTDFTGSDASSIFDAEAGIALNDHFVKLISWYDNEWGYSKRVCDLLAYAAKRDGAI

SEQ ID NO: 31567 - protein, 358 aa, Bordetella pertussis Tohama I
MGSSLVTNEGRGLDRAAVGHWAAQIAALHQQGKQVVLVSSGAIAEGMARLGWRKRPSAMHELQAAAAVGQMGLCQAYEAAFAEFGLRTAQILLTHEDLADRHRYLNARSTLFALLRLGVVPIVNENDTVVTDEIRFGDNDTLGALVTNLIEADALIILTDQRGLYEADPRRDPAARFVAHAQAGDAALEAMAGGAGSGVGTGGMLTKILAAKRAAHSGAHTVIASGRERNVLTRLAQGECIGTELRAVLPVWSARKQWLADHLRLRGRVVLDDGAVHALLHEGKSLLPIGVAEVQGEFERGDVVACVDMHGRECARGLINYSSADTRRILRQPSSQIARILGSMTDPELMHRDNLVVT

SEQ ID NO: 31568 - protein, 716 aa, Pseudomonas syringae pv. tomato str. DC3000
MASKKAPPATDTSKSQMAGTDTPDRGNTNAKLESLEQFRSDATGQALRTNHGVKISDNQNTLKVGSRGPSLLEDFIMREKITHFDHERIPERIVHARGTAAHGYFQTYENHGALSKAGFLRDPAEKTPVFVRFSTVQGPRGSGDTVRDVRGFAVKFYTGEGNFDLVGNNMPIFFIQDAIKFPDFVHAVKPEPHNEIPTGGSAHDTFWDFVSLVPESAHMVLWTMSDRAIPKSLRTMQGFGIHTFRLINTEGKSSFVKFHWKPKFGVCSLVWDEAQKLAGKDTDFHRRDLWESIEMGDYPEWELGVQIVAEEDEHKFDFDLLDPTKIIPEELVPVTPLGKMVLNRNPDNYFAETEQVAFCPGHIVPGIDFSNDPLLQGRLFSYTDTQISRLGGPNFHEIPINRPIAPNNNGQRDAQHRTTIDKGRASYEPNSIDGGWPKETPAAAVDGGFETYPERVEAHKVRERSESFGDHFSQATLFFQSMSHHEKEHIIAAYSFELGKVEREYIRARQVNEILANIDLELASRVAANLGLPAPTAGTVPVRNTSVKESPALSQVNLLSGDIVSRKVAILVANGVDGKAVEAMKKELTAKGAHAKVLGPTSAPVKTADGASLPVDASAEGLPSVAFDAVFVPGGKDSVKALSTDGVALHFILEAYKHLKAISVAGEAKELLTLLRLEEDAGLLVVSDSKSFETFFNAIAQHRVWDREVKAKAVPA

SEQ ID NO: 31569 - protein, 146 aa, Brassica napus
MNNLTKEEEAGLAVLENLTSNVKQIHDEVLKEILTCDVNTEYLRSFLHGSSDKDLFKKNVPIGTYEDFKPYIERVANGESSEIISGRPITGFAQTSGTSGGKQRLIPLNNKYVENARFLSDLRYLVLSKHIEGHNEGKGLRLLFRK

SEQ ID NO: 31570 - protein, 324 aa, Burkholderia sp. 383
MPKAIRYDQPGGPDVMKWVDVEVGEPKAGEVRIRQHAVGLNYIDVYFRTGLYPQALPGGLGMEAAGEVTAVGEGVTTLKAGDRVAYVGQPPGAYAQERVMPADRLVKLPDGISYDDAASVMLQGLTAHYLLRRTYPVKAGDTILIHAAAGGVGLLVCQWAKALGATVIGTVGSDEKAALAKAHGCDHPIVYTRENFTQRVKEITNGAGVPVVYDSIGKDTYIGSLDSLAPLGLFVSFGNASGPLPLIDSKEFSSRGSLFFTRPTLFSYIAKRADLESAAAELFDVLLSGKVKTSINQRYPLAEVARAHEDLEARKTTGSTILVP

SEQ ID NO: 31571 - protein, 429 aa, Cryptococcus neoformans var. neoformans JEC21
MDLPLTLDDHTPFPHQVAGHPGVMSDSSGSLVIKPALPREIAFYQLLSNSDPEDIVWPLRKFVPKNYGTLRLEGRVGAGGGVETDLDVKDEMPESVVLENLAYAYTHPNIMDVKLGTVLYAPDATDEKRRRMERQARETTTYETGIRLTGCQTWHAPTQSYISTPKSFGKSITPPQLSLGMVRFFPLPTDCIPSLVTLPSPPPTAEAVSASHFPIPAENSCASVIQSSTSISIPPSTPIAPAAPAAPAAPTSTNPEKSPTYENHSIPAPTLARLLTLLLQKLDHLTAVLSTLEMRFVGASLLVVYEGDPARLEAALDREEANAQGESGEREKRNGERSMFSDDGSIDFSDSDEDSDEDGEGYDSEDELDGKKKDERRARKCPALTLKMIDFAHTWLAQGEGPDEGVLKGLKTFRSLVEERLEEVERGCV

SEQ ID NO: 31572 - protein, 313 aa, Photinia villosa
GGLGDVLGGLPPAMAANGHRVMTVSPRYDQYKDAWDTNVLVEIEVGGRVETVRFFHCYKRGVDRVFVDHPLFLEKVWGKTESKIYGPRTGVDYMDNQFRFSLLCKAALEAPRVLNLSGNEYFSGPYGDDVVFIANDWHTALLPCYLKTIYKPKGIYKNAKVVFCIHNIAYQGRFPFSDFSLLDLPDNLKGSFDFIDGYDKPVKGRKINWMKAGILESDRVVTVSPYYAQELVSGEDKGVELDNTIRKTGITGIVNGMDVQEWNPATDKYLDIKYDNTTVLDAKPLLKEALQAEVGLPVDRNIPVFGFIGRLEE

SEQ ID NO: 31573 - protein, 313 aa, Photinia villosa
GGLGDVLGGLPPAMAANGHRVMTISPRYDQYKDAWDTEVTVELKVGDKTETVRFFHCYKRGVDRVFVDHPLFLEKVWGKTASKIYGPTAGVDFKDNQLRFSLLCQAALVAPRVLNLNSSKYFSGPYGEEVVFIANDWHTALLPCYLKAIYKPKGIYKTAKVAFCIHNIAYQGRFAFADFALLNLPNEFKSSFVFIDGNDKPVKGRKINWMKAGILESDKVLTVSPYYAEELVSSVEKGVELDNIIRKTGIQGIVNGMDVQEWNPLTDKYTTVKYDASTVADAKPLLKEALQAEVGLPVDRDIPVIGFIGRLEE

SEQ ID NO: 31574 - protein, 443 aa, Physcomitrella patens
MREILHIQGGQCGNQIGAKFWEVVCEEHGIDPTGTYQGTSDLQLERINVYYNEASGGRYVPRAVLMDLEPGTMDSVRSGPYGQIFRPDNFVFGQTGAGNNWAKGHYTEGAELIDSVLDVVRKEAESCDCLQGFQVCHSLGGGTGSGMGTLLISKIREEYPDRMMLTFSVFPSPKVSDTVVEPYNATLSVHQLVENADECMVLDNEALYDICFRTLKLITPSFGDLNHLISATMSGITCCLRFPGQLNSDLRKLAVNLIPFPRLHFFMVGFAPLTSRGSQQYRSLTVPELTQQMWDAKNMMCAADPRHGRYLTASAMFRGKMSTKEVDEQMINVQNKNSSYFVEWIPNNVKSSVCDIPPTGLKMSSTFIGNSTSIQEMFRRVSEQFTAMFRRKAFLHWYTGEGMDEMEFTEAESNMNDLVSEYQQYQDASAEEEGEYEDDPEEA

SEQ ID NO: 31575 - protein, 347 aa, Lycopersicon esculentum
MGRVPCCDKMGVKKGPWTPEEDIMLVSYVQQHGPGNWRALPTKTGLRRCSKSCRLRWTNYLRPGIKRGNFTDQEEKMIIQLQALLGNKWAAIASYLPERTDNDIKNYWNTHLKKKMKRLDQCHGSNDLFSLENGLTHLSSSNSSTSRGQWERTLQADINMAKKALHNALSLENPTSSHNNNIKQENTQVSSTSTIYASSTENIARLLQGWIGSSTSSTNNSESSKTSSNNIATTDSSSCDGTPNAETKGGMGLMEAFESLFGLESFESSSSDELSQTTTPEAIKIEIKKEENEHDVEVPLSIILENWLLDENTLNIQPKNDLTTLISFDETPQLFYKFFFLLILLME

SEQ ID NO: 31576 - protein, 451 aa, Pseudomonas putida KT2440
MSESRKAYIPIAPPREPLPLFQLILVGLQHVLLMYGGAIAVPLIIGQAAGLSREEVAFLINADLLVAGVATIIQSFGIGPVGIRMPVMMGASFAAVGSMVAMAGMPGVGLQGIFGATIAAGFFGMLIAPFMSKVVRFFPPLVTGTVITSIGLSLFPVAVNWAGGGHEAETFGSPIYLLVAGLVLAVILLINRFMRGFWVNVSVLVGMGLGYILAGSIGMVDLSGLNEAPWLQVVTPLHFGMPTFSLAPILSMCLVVVIIFVESTGMFLALGKVTDREVTPGMLRRGLLCDAGASFIAGFFNTFTHSSFAQNIGLVQMTGVRCRYVTIVAGALLILLSLLPKAAFLIASIPPAVLGGASIAMFGMVTATGIKILQEADIGDRRNQLLVAVSVGFGLIPVVRPEFFAQMPQWMEPITHSGIAMATVCALVLNVLFNILGGADRAMHNDVCHQH

SEQ ID NO: 31577 - protein, 313 aa, Prunus virginiana
GGLGDVLGGLPPAMAANGHRVMTVSPRYDQYKDAWDTEVTVEVKVGEKTEKVRFFHCYKRGVDRVFVDHPLFLERVWGKTASKIYGPKAGEDFKDNQLRFSLLCQAALEAPRVLNLNSSKYFSGPYGEEVVFIANDWHTALLPCYLKAIYQPKGLYKSAKVVFCIHNIAYQGRFAFADFALLNLPDEFKSSFDFIDGYDKPVKGRKINWMKAGILESDKVLTVSPYYAEELVSTVEKGIELDNIIRKTGILGIVNGMDVQEWNPLTDKYTTAKYDASTVTDAKPLLKEALQAEVGLPVDRDIPVIGFIGRLEE

SEQ ID NO: 31578 - protein, 900 aa, Neisseria meningitidis serogroup A
MQLHILNNPKDAALAADAEFLKQSLFNLLHEEASPLVVETVKLLSTSDDSAALIEKVLPQLDEQQTHDLTLACGLFAQILNIAEDVHHERRRQIHEEAGRGGAEGSLTETVRRLKAGKADGKSVQRQLDNTSVTAVLTAHPTEVQRQTVLNFNRRIRALLPQRERCTNADALARLRREIDTILLGLWQTSETRRHKLSVNDEINNGVSIFPMSFFEALPKLYRKMEHDFQTAYPDVRVPDILKIGGWIGGDRDGNPFVSAETLRFAFRRHADAVFRFYRGELDKLYRELPLSIRRVKVNGDVMALSDKSPDEETARAEEPYRRAIAYIMARAMGKARALGLGMGCKFGFLEPYASAQEFLDDLKKLQHSLIDNGSRLLAEGRLADLIRSVSVFGFHMMPLDLRQHAGKHADVVAELFQHAGLEDYNSLNEEQKQAALLRELSHQRPLYSPFITYSDHTRHELAIFNEARKIKDEFGEDAVTQSIISNCEQPSDLLALALLLKETGLLAVENGKPKSRINIVPLFETIEALENACPVMETMFRLDWYGALLESRGNIQEIMLGYSDSNKDGGYVTSSWCLYQAELGLVELFKKYDVRMRLFHGRGGSVGRGGGPSYQAILAQPAGSVAGQIRITEQGEVITAKYADPGNAQRNLETLVAATLEASILPDKKDPDAKLMQDLSDVSFKYYRELITHPDFIDYFLQTSPIQEIATLNLGSRPASRKTLARIQDLRAIPWVFSWMQNRLMLPAWYGFGSAVETLCEGNPDTLAALREHAQSNPFFQAMLSNMEQVMAKTDITLAENYAGLSESPDKAKVIFGMIKEEYRRSRKALLDLLQTEELLRDNRSLARSLALRIPYLNALNGLQVAMLKRLRKEPDNPHALLMVHLTINGVAQGLRNTG

SEQ ID NO: 31579 - protein, 313 aa, Pseudocydonia sinensis
GGLGDVLGGLPPAMAANGHRVMTVSPRYDQYKDAWDTSVLVEIEVSGRVETVRFFHCYKRGVDRVFVDHPLFLEKVWGKTESKIYGPRTGVDYMDNQFRFSLLCKAALEAPRVLNLNSNEYFSGPYGDDVVFIANDWHTALLPCYLKTIYKPKGIYKNAKVVFCIHNIAYQGRFPFSDFSLLDLPDNLKGSFDFIDGYDKPVKGRKINWMKAGILESDRVVTVSPYYAQELVSGEDKGVELDNTIRKTGITGIVNGMDVQEWNPATDKYLDIKYDNTTVLDAKPLLKEALQAEVGLPVDRNIPVFGFIGRLEE

SEQ ID NO: 31580 - protein, 704 aa, Leptospira interrogans serovar Copenhageni str. Fiocruz L1-130
MNSVTIIIAMSILAIVTAVVYTLKVTSIKVGTLGGNEKETKKLLEISSAISEGAMAFLVREYKVISLFIAFMAVLIVLLLDNPGSEGFNDGIYTAIAFVSGALISCISGFIGMKIATAGNVRTAEAAKSSMAKAFRVAFDSGAVMGFGLVGLAILGMIVLFLVFTGMYPGVEKHFLMESLAGFGLGGSAVALFGRVGGGIYTKAADVGADLVGKVEKGIPEDDPRNPATIADNVGDNVGDVAGMGADLFGSCAEATCAALVIGATASALSGSVDALLYPLLISAFGIPASILTSFLARVKEDGNVESALKVQLWVSTLLVAGIMYFVTKTFMVDSFEIAGKTITKWDVYISMVVGLFSGMFIGIVTEYYTSHSYKPVREVAEASNTGAATNIIYGLSLGYHSSVIPVILLVITIVTANLLAGMYGIAIAALGMISTIAIGLTIDAYGPVSDNAGGIAEMAELGKEVRDRTDTLDAAGNTTAAIGKGFAIGSAALTSLALFAAFITRTHTTSLEVLNAEVFGGLMFGAMLPFLFTAMTMKSVGKAAVDMVEEVRKQFKEIPGIMEGKNKPDYKRCVDISTSAALREMILPGLLVLLTPILVGYLFGVKTLAGVLAGALVAGVVLAISAANSGGGWDNAKKYIEKKAGGKGSDQHKAAVVGDTVGDPFKDTSGPSINILIKLMAITSLVFAEFFVQQGGLIFKIFH

SEQ ID NO: 31581 - protein, 313 aa, Pyracantha coccinea
GGLGDVLGGLPPAMAANGHRVMTISPRYDQYKDAWDTEVTVELKVGDKTETVRFFHCYKRGVDRVFVDHPLFLEKVWGKTASKIYGPTAGVDFMDNQLRFSLLCQAALVAPRVLNLNSSKYFSGPYGEEVVFIANDWHTALLPCYLKAIYKPKGIYKTAKVAFCIHNIAYQGRFAFADFALLNLPNEFKSSFDFIDGYDKPVKGRKINWMKAGILESDKVLTVSPYYAEELVSSVEKGVELDNIIRKTGIQGIVNGMDVQEWNPLTDKYTTVKYDASTVADAKPLLKEALQAEVGLPVDRDIPVIGFIGRLEE

SEQ ID NO: 31582 - protein, 618 aa, Hordeum vulgare subsp. vulgare
MKREYQDGGGSGGGGDEMGSSRDKMMVSSSEAGEGEEVDELLAALGYKVRASDMADVAQKLEQLEMAMGMGGPAPDDGFATHLATDTVHYNPTDLSSWVESMLSELNAPPPPLPPAPPQLNASTSSTVTGGGGYFDLPPSVDSSSSTYALRPIISPPVAPADLSADSVRDPKRMRTGGSSTSSSSSSSSSLGGGAARSSVVEAAPPVAAAAAAPALPVVVVDTQEAGIRLVHALLACAEAVQQENLSAAEALVKQIPLLAASQGGAMRKVAAYFGEALARRVFRFRPQPDSSLLDAAFADLLHAHFYESCPYLKFAHFTANQAILEAFAGCRRVHVVDFGIKQGMQWPALLQALALRPGGPPSFRLTGVGPPQPDETDALQQVGWKLAQFAHTIRVDFQYRGLVAATLADLEPFMLQPEGEEDPNEEPEVIAVNSVFEMHRLLAQPGALEKVLGTVRAVRPRIVTVVEQEANHNSGSFLDRFTESLHYYSTMFDSLEGGSSGGPSEVSSGGAAPAAAAGTDQVMSEVYLGRQICNVVACEGTERTERHETLGQWRNRLGNAGFETVHLGSNAYKQASTLLALFAGGDGYKVEEKEGCLTLGWHTRPLIATSAWRLAAP

SEQ ID NO: 31583 - protein, 544 aa, Leptospira interrogans serovar Copenhageni str. Fiocruz L1-130
MDKWWQKTTIYQIYPRSFADSNRDGVGDIPGIISKLDYLQDLGFETIWISPLYKSPQMDHGYDVSDYYSIAPEYGTIKDAEKLIKEVHKRGMKIVFDMVMNHTSIEHDWFIQSRSSRDNPKRDWYIWKDGRGKNKPPNNWSSFVTPKAWHYDSNTDQWYLASFLDFQPDLNYYNPEVKKAMFDVLRFWLKKGVDGFRLDIFHAIYKDKYFRDNPFRFKYIVSENDHDGYFQSRVHTVNHPNNFAFAKELRSVLDEFDGDRFAVGEVAGDDHIIKRYLGEKKDGLNLIFLFETLLLKFKTSFFKGIVKKMEQVYPYPNVPTYVFGNHDQRRYMMKINNNLEKGKLIALFQFTARGVPVTYYGEEIGMTNETIKLTEAQDPLARIYRWLGDSLSELLGLADVIIRDRARSPMQWDDSPNAGFTVQEAKPWIRVHGNYRERNVLIESEDSDSLLNTYKSVLRIRNGSFALKEGSLRLIEENVPKDMLVYLREFGKERKLIVFNFGKKTKFFSNPTDCRKYFFSTVSFDHNEFDQFKIPPCSGVILGN

SEQ ID NO: 31584 - protein, 239 aa, Synechococcus elongatus PCC 7942
MSVHQSVLADFAAVVSAAQTLVLETASRAIAERGTFRLALSGGSTPKALYEQLATSEADWANWQIFWGDERYVPNDHPDSNERMARQAWLDQVPIPAEQIHPLPTQSADPWQDAAIAETDLRRAFQVQEPAWPVFDLVLLGLGDDGHTASLFPGTAALEEQSRLVTVGDRGGQPRLTFTAPLINQARTVVFLVSGAAKQEALKRALAATGDSQQTPVRLIQPVTGQLYWLLDRDAAVLL

SEQ ID NO: 31585 - protein, 278 aa, Vitis aestivalis
MGEEASSLQLIHHLLLSDFDSMETFVSHVSHSLRSSASDSSVSTDDIIQVSEYPKLHEDESNAFLFDYSTSSPSAVFQFQTESPKPSRLSHRRPPVSISLPPPPISHTSSSLDSGERRHYRGVRRRPWGKFAAEIRDPNRRGSRVWLGTFETAIEAARAYDRAAFKMRGSKAVLNFPLEAGNWSDSDPPATSIRKRERESESEEREQPEIKVLKQEEASPDSDSPVVAEAANVLEASPLTPSSWRTVWEERDMDGAFHMPPLTPLSPHPWIGYSRLIS

SEQ ID NO: 31586 - protein, 396 aa, Hevea brasiliensis
MASASLLKSSPVLDRSEFVKGQSLRQPSASIIRCHPASSSALTILAGSYADELVKTAKTVASPGRGILAMDESNATCGKRLASIGLENTEANRQAYRTLLVTAPGLGQYISGAILFEETLYQSTTDGKKMVDVLIEQNIVPGIKVDKGLVPLPGSNNESWCQGLDGLASRTAAYYQQGARFAKWRTVVSIPNGPSALAVKEAAWGLARYAAISQDNGLVPIVEPEILLDGEHGIDRTFEVALKVWAEVFYYLAENNVLFEGILLKPSMVTPGAECKDKATPQQVSDYTLKLLKRRIPPAIPGIMFLSGGQSEVEATLNLNAMNQGPNPWHVSFSYARALQNTCLKTWAGRPENVKAAQEVLLVRAKANSLAQLGKYTGEGESEEAKKGMFVKGYVY

SEQ ID NO: 31587 - protein, 228 aa, Brassica napus
MDQQEHAQSGAMNYGSNPYQTNPMTTTSAGPAAPPGQLGFHQIHQQQQQQQLAQQLQVFWENQFKEIEKTTDFKNHSLPLARIKKIMKADEDVRMISAEAPVVFARACEMFILELTLRSWNHTEENKRRTLQKNDIAAAVTRTDIFDFLVDIVPREDLRDEVLGSIPRGTVPEAAAAGYPYGYLPAGTAPIGNPGMVMGNPGGAYPPNPYMGQPMWQQQGPDQPDQEN

SEQ ID NO: 31588 - protein, 341 aa, Vitis aestivalis
MATAVEVSALQLIRQHLLGELSPKNIVVTDLTVGEEWSNGLNSEVSTSQSDSSFCFQAASCDSPVTISELFGSTDLSADFFGFVPSSTSEQSQSNFFEFETKPQIIDLTSPKGLNSSHFFEFETKPQIKDTTKTKSLDSSSQSTGKDRKPSLKISVPRPTKEIEWLEFAEPKQAATVEPAQNISHPEEKKHYRGVRQRPWGKFAAEIRDPKRRGSRVWLGTYETAIEAAKAYDRAAFQMRGSKAILNFPLEAGKSAETSTDYGRKRCREAEPEVTEMEANPPAKKEKLPEANTITRVQNDTPLTPSFWDFDLDSVGCLINVPPISPLSPHPKFGFPQLMVI

SEQ ID NO: 31589 - protein, 532 aa, Sorghum bicolor
MSIKSETNERSSTIQSAGHRICSIVKLCYQHLMLAVSYALYLFLAPIILATLVLHLSRHTSADDDLIVSARSTLTANLPFTVVVVAAAATAVYLMRRPRAVYLLDLACYKPGAEHAVTRETFMRLVVGYGTFSDDSLAFQRKILERSGLGQGTYLPKALTSSPPNPCMAEARREAEAVMFGAVDQLLAKTGVRAGDIGIVVVNSGLFSPTPSLSAMIVHHYKLRRDVSSYNLAGMGCSASLISVDLAKQLLQVQRNTYALVVSLEIMAASAYVGNTRSMLVPNCIFRMGGAAVLLTNHGTERRRAKYQLLHTVRTHQGADDRAYRCVYQEEDESGHVGVALSKDLMSVAAEALKTNITTLGPRVLPMSEKMKMMLVGGKAAVVQVLGVQQQGQGGSRSRPYIPDLTTAFEHFCIHAGGRAVLDTVERSLDLSAWHMEPSRMTLYRWGNTSSSSLWYELAYTEAKGRVRRGHRVCQIAFGSGFKCNSAVWRALRTIDPAKESAAAGNPWVEEIHRFPVEVPQVERVDVAAMAS

SEQ ID NO: 31590 - protein, 176 aa, Medicago truncatula
MAYSKSYLFLSINLFVFLSSQVLADIHVPPTLTVEPNLPSMADQLNDKQISKIKAYFSLIDKDGDVSIDNEELDTLIRSTGLNPTDFGLMVARNKSATDGNGTIDFTKEELLIAFSKPNTDHNGFVTASELHYYLTNQGIKATNEEVSDFVREADSDSDGHLSFKEFVRLGRFTVE

SEQ ID NO: 31591 - protein, 918 aa, Azoarcus sp. EbN1
MLTGTTVVVVSFAYLLLLFAVAYLADRRAEQGRSVISNPWTYALSLGVYCTAWTYFGSVGRAASGGVWFLPIYLGPTLAMTMSWIVMLKMIRIAKTYRITSIADFIASRYGKSHLLGGLVTIIAVVGMIPYIALQLKAVSSGYAVLTGERDEQFLPLAPGSWVGDSTLYVALTLAVFTVLFGTRHLDATERHEGMVAAIAFESVVKLFAFLVLGVFVTYGMYDGFGDLFTRALAHPELAGLLTVESASGAGYGGWFTLTLLAMLSVIFLPRQFQVMVVENVNEQHLRRATWLFPTYLFLINIFVLPIALGGLLFFGRGTVDPDTFVLSLPLAHGHGALALLAFVGGLSAATGMVIVETIAVSTMVCNDLVMPLVLRSRSFHRAPHGDLTGLLLGIRRGAILVVLLLGYLYFHLAGEAYALVSIGLISFAAVAQFAPVMLGGMYWRGGTREGALAGLLAGFVVWAYTLMLPSVAKSGWLDPAFLEHGLFGIALLRPEQLFGLRGLDNISHALFWSLTVNIACYLFVSLLRTPTGQEASQATLFVDVFRRGRTSPAMFWRGSAQVRDLLPLVARFLGTARAERAFTDYARQRGLAGIDQIQPDAGLVQFAETQLAGAIGSASARVMVASVVQEEPLGLDEVMDILDEASQVRAYSHELEEKSRALESATAELRAANERLKELDRLKDDFMSSVSHELRTPLTSIRAFSEMLLDDPDIALPDRMRFLGIIVSETERLTRLVNQVLDLAKIESGHAEWHNSDIDMRALVEQAVDTTAQLFRDRGATVELVLPDEAPHLKADHDRLVQVMLNLLSNAAKFVPQGAGRIRVALKSEAGQVRVEVSDNGPGIPPELHGVIFEKFRQGGDERSRPQGTGLGLPISRQIVEHFGGRLWVESPPGHGTVFTFVLPLHAPHPDTVAVVQ

SEQ ID NO: 31592 - protein, 378 aa, Triticum aestivum
  misc_feature (316)..(316): Xaa can be any naturally occurring amino acid
  misc_feature (336)..(336): Xaa can be any naturally occurring amino acid
  misc_feature (344)..(344): Xaa can be any naturally occurring amino acid
  misc_feature (353)..(353): Xaa can be any naturally occurring amino acid
  unsure (1)..(378): unsure at all Xaa locations
RSDTCELVARFCYGLTIELSPANIVHLRCAAEYLEMTEETAQDNLIHQAEMFFNQVVLRSWKDSLEALKTCDVLPHAEDLHIAKRCVESLAAKASIDPDLFGWPVSEHGAMHSPGGSVLWNGISTGAKLGNFSSDWWYDDASSLSFPTYKRLISTMESRGAKEEIVAGSLTYYAKKCLPGLNRRQSMGPVPLTSAAATLSEEEQRHLLEDIDRMLPLQRGLISTNVLLWLLRTAMILKVNRACISNLEKRVGMQLDEATLEDLLLPNFSYTMDTLYNVECVRRILDHFLAMGQTMGGGSPCLNDVMGSPSLARITXVAKLIDGYLAEIGPNITLSXPKFESLAXCLAEIARPXNYGLYRAISFLGRAIWLRESRGGFW

SEQ ID NO: 31593 - protein, 492 aa, Debaryomyces hansenii CBS767
RLLDFVEFFLPILPEIELPVENISIDEKIIYTVAGGIIFLLSQLPIYGLVSDAYLKINDPFYFQRTIFAMEKGTLLELGLLPVLTSAFIWQLSAGFRFINVNLNLRSDRELYQSGQKLTSFIFAIVYGAGYIFSGYYNNVIKGYNPFNGDSVPVTTLVLIFLQIVTMSFVTTLMVEIFDKGYCFGSGVLCFVALQVATNLIRDVVGLELVSLPNSNKFESYGAAMNFIKNFRINFKSLNYNVLNSFTRSQLPNLSQFYIVLVTVLVLIGVQNYRIELPIRSTKVRGMNNVYPIRLFYTGALPILFAFTVLTNLQVFGYFTSTLLNNYSQLAASIIGTWSLDTKSFNLNLTSGILYFLTPSKSLAQSLLSPIRSVTYGLAIITLSTWFAYRWSRISGSSPKDISKQFKEQGISISGKRDISITKELSRVIPVASVSGAFVLAALAIAGELLGGLGKGVAAIIGVCGAFGILEEFMMEYQQAGGNSQLTNVFRK

SEQ ID NO: 31594 - protein, 493 aa, Bordetella pertussis Tohama I
MSLSVGNAALLPGRNLIGSEWREAALGARFAVADPATGKVIAHVPDSGARDAGAAVTAAHQAFADWRRTPAKVRAQIIKRWNALLHENAEDLARLISSEQGKPLAEARGEVSYAASYVEWFAEEATRADGDLIPSPAQGRRMFALREPVGVVAAITPWNFPAAMIARKIAPALAAGCTVVCKPAEDTPLTSLALTALAQQAGVPPGVLNIVTASRGRAAEVADAWLDDPRVRKITFTGSTPVGKHLARRSADTLKRVSLELGGNAPFIVFDDADLDAAVEGLMVSKFRNGGQTCVCPNRIFVQAGVHDAFVRKLAARVEGLVVGPASDPASQIGPMINARAVEKIEHHVADALERGARLAVGGKRIHSARCAGDHYYAPTVLTGVDETMACFREETFGPVAPITVFASEAEVVAAANATAFGLAAYFYSTDVRRIWRLADALETGIVGVNEGALAAEAAPFGGVKDSGYGREGSRHGLAEYMQIKYVCQGQLD

SEQ ID NO: 31595 - protein, 447 aa, Oryza sativa
MGKEKTHINIVVIGHVDSGKSTTTGHLIYKLGGIDKRVIERFEKEAAEMNKRSFKYAWVLDKLKAERERGITIDIALWKFETTKYYCTVIDAPGHRDFIKNMITGTSQADCAVLIIDSTTGGFEAGISKDGQTREHALLAFTLGVKQMICCCNKMDATTPKYSKARYDEIVKEVSSYLKKVGYNPDKIPFVPISGFEGDNMIERSTNLDWYKGPTLLEALDQINEPNRPSDKPLRLPLQDVYKIGGIGTVPVGRVETGVLKPGMVVTFGPSGLTTEVKSVEMHHEALQEALPGDNVGFNVKNVAVKDLKRGYVASNSKDDPAKEAASFTSQVIIMNHPGQIGNGYAPVLDCHTSHIAVKFAELVTKIDRRSGKELEKEPKFLKNGDAGMVKMIPTKPMVVETFSEYPPLGRFAVRDMRQTVAVGVIKNVEKKDPTGAKVTKAAAKKK

SEQ ID NO: 31596 - protein, 318 aa, Oryza sativa
MTARSMLRNHPEASVLDTIRQHLLEEPRGGGGGEAAEASFGSLVADMWSDSLPFRDDDADDMVVFGAMRDAFSCGWLPDGVFAEVKPEPLLSPDSSSYDGSSCCFGFADVSEPVTPSDAASGAAEAAAAAAAATAEHGKEEEAAAAVARGKHYRGVRQRPWGKFAAEIRDPAKNGARVWLGTFDTAEDAALAYDRAAYRMRGSRALLNFPLRIGSEIAAAAAAAAAAAAGDKRPSPEPATSESSFSSSSSCTTTTTSSSTSSSGSPKRRKRGEAAAASMSMPLVPPPSQLNWPVQAWYPAAAPVEQVAITPRVEQLVI

SEQ ID NO: 31597 - protein, 208 aa, Gossypium hirsutum
MSSENGKRLLETDAGGLNFEATELTLGLPGEPRVTSDGGAKLGSKRGFSETVDLKLGDNNQEVKLGHSLQEAAKSPVSKTQVVGWPPVRGFAKRGKKSCKYVKVAVDGAPYLRKVDLEIYNSYQQLLTSLEDMFSCFTIRNYLNEKKIDQVNGIEYMPTYEDKDGDWMLVGDVPWQMFVESCKRLRLMKSSEAVGLGLKTAPKYSSTN

SEQ ID NO: 31598 - protein, 458 aa, Pseudomonas syringae pv. tomato str. DC3000
MTSQDGLKRGLSARHIRFMALGSAIGTGLFYGSASAIQQAGPAVLLAYLIGGAAVYMVMRALGEMAVHDPVSGSFSHYATRYMGPLAGFVLGWTYAFEMIIVCLADVTAFGIYMGFWFPEVPRWIWVLGIVFLIGALNLCNVKVFGETEFWLSILKVSAIVAMIVAGFGIMIFGIGSSTSGTEIGISNLWAHGGFMPNGVTGLIASFAVVMFAFGGIEIIGITAGEAKDPQRSLPQAINAVPLRILLFYVLTLFVLMCIYPWPQIGTQGSPFVQIFDNLGIASAATILNIVVISAAVSAINSDIFGAGRMMYGLARDGQAPASFARLSRQGVPWMTVLVMGVTLLGGVLLNYLIPKDVFLLIASLATFATVWVWLMILLTQVAMRRSMSREEVTQLKFAVPFWPYGPAAAIAFMLFIFGVLGYFPDNRAALIVGAIWIALLLIAYGLWVKPKALNKTH

SEQ ID NO: 31599 - protein, 371 aa, Bacillus thuringiensis serovar konkukian str. 97-27
MTVIRGLEGVVATTSSVSSIIDDTLTYVGYNIDDLAENATFEEVVYLLWHRKLPNEQELAKFNEIVSEYYKVPGEILAYLKQVDLKIAHPMSVLRTAISMLSLYDESAEIMDEKSNYLKAVKLQAQVGTLVAAYARIRKGLDVVEPRNDLSLAANFLYMLNDREPNEVEIEAFDKALVLHADHELNASTFTARVCVATLSDVYSGITAAIGALKGPLHGGANENVMKMLTEIGEEENVESYIHNALQNKVKIMGFGHRVYEQGDPRAKHLREMSKRLCVLLGEEKWYNMSIKIEDIVTKEKGLPPNVDFYSASVYHCLGIDHDLFTPIFAISRMSGWLAHILEQYENNRLIRPRADYNGPTHQVYVPIAQR

SEQ ID NO: 31600 - protein, 919 aa, Streptomyces lividans
MPATRRTARVRRVAAVTVTALAAALLPPLAARADTPPAPPSDAKLAKTAARHDLTREQFYFSCRTLRQRGRRERPRRLTGTRLTTGYDPTDKGFYQGGDLKGLTEKLDYIKGLGTTSIWMAPIFKNQPVQGTGKDASAGYHGYWITDFTQVDPHFGTNKDLKNLISKAHAKGMKVFFDVITNHTADVVDYEEKSYDYLSKGAFPYLTKDGQPFDDADYADGERRFPRVDSGSFPRTPTVPTAKKNLKVPSWLNDPAMYHNRGDSTWAGESATYGDFNGLDDLWTERPEVVGGMEKIYQRWVEDFAIDGFRIDTVKHVDMEFWTQWATALDAYAAKKGRDDFFMFGEVYSADTSVTAPYVTQGRLDSTLDFPFQDAARAYASQGGSARKLAAVFGDDYKYTTDKANAYEQVTFLGNHDMGRIGTFLKQDAPEAGDAELLKKDRLANELMFLSRGNPVIYYGDEQGFTGAGGDKDARQPMFASRTADYLDDDQLGTDRTHAEAAYDTSAPLYRQISALAELRKANPALADGVQTERYAADGAGIYAFSRTDAKTGTEYVVAFNNAGTEPSAAFATGSAGMTFRGLYGTDATVKSGADSKVTVTVPARSAVVLKAAGRLAAPAAEPTISLHAPDPGATGTVELSADVAGGQLNRVVFAAQTGDGKWRTLGTADHAPYKVTHTVDADTPAGTALRYKAVVVDSAGRTASGRLHHRHPARRGGAHRRLPGPRGRPLQARRRELRRLGPVRLGRPRRREAHHLARHPPLHRPGRLRAFAYVKLKPGASTVGFLVIDKDGNKDVAADRTIDVTETGEVWIEQGEEQLVTERPEYPAQDTTKAVLHYKRADGNYDGWGLHVWGDAANPTDWAKPLQPVRTDPYGAVFEVPLTDGASSLSYMVHKGDEKDLPTDQAWTSRPTATRCGC

SEQ ID NO: 31601 - protein, 424 aa, Arabidopsis thaliana
MATVPEIKIMRSESLGHRSDVSSPEAKLGMRVEDLWDEQKPQLSPNEKLNACFESIPVSAFPLSSDSQDIEIRSDTSLAEAVQTLSKFKVLSAPVVDVDAPEDASWIDRYIGIVEFPGIVVWLLHQLEPPSPRSPAVAASNGFSHDFTTDVLDNGDSAVTSGNFFEVLTSSELYKNTKVRDISGTFRWAPFLALQKENSFLTMLLLLSKYKMKSIPVVDLGVAKIENIITQSGVIHMLAECAGLLWFEDWGIKTLSEVGLPIMSKDHIIKIYEDEPVLQAFKLMRRKRIGGIPVIERNSEKPVGNISLRDVQFLLTAPEIYHDYRSITTKNFLVSVREHLEKCGDTSAPIMSGVIACTKNHTLKELILMLDAEKIHRIYVVDDFGNLEGLITLRDIIARLVHEPSGYFGDFFDGVMPLPENYRV

SEQ ID NO: 31602 - protein, 259 aa, Bordetella bronchiseptica RB50
MISLPYLQRFALSGQVALVTGSARGLGLRIAQALAGSGAHVLLNGRDAHAVEAAVSDLRQQGLRASALPFDVSDEQATEQAFARIDAEHGRLDILVNNVGARNRKPLAETSPAEIRAMMDTNLVAGILLARLAAQRMVRQRYGRLIAITSVAGELARANDAVYPAAKQGLTGMMRALAVEFGRHGITSNAIAPGAFATETNAAMANDPQAGAAMAARNPTGRWGDPEEIAGAAVFLASPAASYVNGHVLVVDGGLSVQF

SEQ ID NO: 31603 - protein, 313 aa, Pyracantha coccinea
GGLGDVLGGLPPAMAANGHRVMTVSPRYDQYKDAWDTGVPVEIQVGGRVETVRFFHCYKRGVDRVFVDHPSFLERVWGKTGSKIYGPSAGEDYKDNQFRFSLLCQAALEAPRVLNLNSNKYFSGPYGDDVLFIANDWHTALLPCYLKAIYKPKGIYENAKVVFCIHNIAYQGRFPISDFSVLDLPENLKGSFDFIDGYSKPVKGRKINWMKAGILESDRVVTVSPYYAQELVSGEDKGVELDNIIRKTGITGIVNGMDVQEWNPATDKYLDTKYDNKTVLDAKPLVKEAPQAEVGLPVDRNIPVIGFIGRLEE

SEQ ID NO: 31604 - protein, 241 aa, Glycine max
MVALFSPPVFSTKGWLLEEDPLSYDVSSEYSFPYQFYSPQTQIELEIERSTSPSPEDPAMVKKLSHNASERDRRKKVNHLVSSLRSLLPGPDQTKKMSIPATVSRVLKYIPELQHQVQALTKKKEELLCRISKNLKGDSVNKESQRRISHHNSDFAVSTSRLNDCEAVVHISSYEAHKAPLSDILQCLENNGLYLLNASSSETFGGARGYNLHFQVEKTHRLESEILTEKLLSIYEKQRIF

SEQ ID NO: 31605 - protein, 464 aa, Haemophilus influenzae R2846
MNFRLLSQYHTDIKKLIKISLPILLAQIAQNSMGLADTIMAGRVSSTDMAAISIGASIWMPLMFFGQGLLLALPPTISYLNGSGQHHRIAHQVRQGIWLVLGVSIPLGLLIYFCEIPLQYMQMESKMSDLARNYLHAMLWGLPAYLMLINFRCLNDGIEKTKPAMVITFLGLLINIPLNYIFIYGKFGMPAFGAVGCGIATAIVNWAMCLMMIFYSYTNTQERSLKVFSQLIEMPNPKTLKKLLRLGLPIAIAICCEVALYALTSLMLSPLGATIVASHQITLNTSSFIFMFPMSIGMATTILVGQALGAGSPQNAKKIGYAALLLGLTVTIVTALITIFFRYEIASIFVTDEIVIAMAANLLLFAALYQFSDTIQMVVGGILRGYKDTKVILYITLFSYWVIGVPLGYTLGRTDWLVPHIDAKGFWIAFVVSLTFAAFLLSLRMKKMQAMNDNAILQRLEKLK

SEQ ID NO: 31606 - protein, 459 aa, Pseudomonas putida KT2440
MSSHEHSPGAGAPANELVLGLEDKPRLLIGLLAALQHLLAIIVPIVTPGLLICQALGVSARDTNLIVSMSLVISGIATFVQCKRFGPFGAGLLIVQGTSFNFVGPLIAGGALMVKQGTPVEGVMAAIFGVVIAGSFVEMGVSRILPFVKRLITPLVTGIVVLMIGLTLIKVGLISMGGGFGAMANGTFANGENLLMSGVVLAIIVVLNRIPVVWMRSCAIVIALAVGYALAGYLGRLDFTGMHEAALFQVPTPLHFGLGFSWALFIPMLVIYLVTSLEAIGDVTATSKVSRQPVEGPMWMQRIKGGVLVNGANSLLAGLFNTFPSSIFAQNNGVIQLTGIASRHIGMWIAVMLVLLGLFPSVAGVIQAVPEPVLGGAAMVMFGAVAASGINILASTRLDRRALLIIAVSLALGLGVAQVPEFLAHMPAAIRNVLESGVATGGICALVLNWFLPEGKEQA

SEQ ID NO: 31607 - protein, 313 aa, Pyrus calleryana
GGLGDVLGGLPPAMAANGHRVMTVSPRYDQYKDAWDTGVPVEIKVGGRVETVRFFHCYKRGVDRVFVDHPSFLERVWGKTGSKIYGPSAGEDYKDNQFRFSLLCQAALEAPRVLNLNSNKYFSGTYGDEVVFIANDWHTALLPCYLKAIYKPKGIYENAKVVFCIHNIAYQGRFPISDFSVLNLPENLKGSFDFIDGYNKPVKGRKINWMKAGLLESDRVVTVSPFYAQELVSGEDKGVELDNIIRKTGITGIVNGMDVQEWNPATDKYLDTKYDSTTVLDAKPLVKEALQAEVGLPVDRNIPVIGFIGRLEE

SEQ ID NO: 31608 - protein, 313 aa, Pyrus calleryana
GGLGDVLGGLPPAMAANGHRVMTISPRYDQYKDAWDTEVTVELKVGDKTETVRFFHCYKRGVDRVFVDHSLFLERVWGKTASKVYGPVAGVDFEDNQLRFSLLCQAALEAPRVLNLNSSKHFSGPYGEEVVFIANDWHTALLPCYLKAVYKPRGIYSTAKVAFCIHNIAYQGRFAFADFALLNLPDEFKSSFDFSDSSEKPVKGRKINWMKAGILESDKLLTVSPYYAEELVSAVEKGVELDDIIRKTGIFGIVNGMDVQEWNPLTDKYTTIKYDASTVADAKPLLKETLQAEVGLPVDRDIPVIGFIGRLEE

SEQ ID NO: 31609 - protein, 471 aa, Pseudomonas putida KT2440
MTPDKKVKILATLGPAINGIDDIRQLVEAGVNIFRLNFSHGEHADHALRYQWIREVEQQLNYPLGILMDLQGPKLRVGRFAEGKVQLQRGQALRLDLDKTPGDSRRVNLPHPEIIAALEPGMDLLLDDGKLRLRVTAKHSDAIDTEVLNGGELSDRKGVNVPQAVLDLSPLTEKDRRDLAFGLELGVDWVALSFVQRPEDIVEARQLIGDRAYLMAKIEKPSAVEQLQAIAELADAIMVARGDLGVEVPAESVPQIQKRIIGTCRQLGKPVVVATQMLESMRFSPAPTRAEVTDVANAVAEGADAVMLSAETASGDYPLEAVQMMSKIIRQVENGPDYQAQLDVGRPKAEATVSDAISCAIRRISGILPVAVLVNYSESGASTLRAARERPRAPILNLTPNLNTARRLSVAWGVHSVVNDRLRQVDEVVSTALEIAQAQGMASRGDTLLITAGVPFGKPGTTNTLRIETLI

SEQ ID NO: 31610 - protein, 313 aa, Pyrus calleryana
GGLGDVLGGLPPAMAANGHRVMTISPRYDQYKDAWDTEVTVELKVGDKTETVRFFHCYKRGVDRVFVDHPLFLEKVWGKTASKIYGPTAGVDFKDNQLRFSLLCQAALVAPRVLNLNSSKYFSGPYGEEVVFVANDWHTALLPCYLKAIYKPKGIYKTAKVAFCIHNIAYQGRFAFADFALLNLPNEFKSSFDFIDGYDKPVKGRKINWMKAGILESDKVLTVSPYYAEELVSSVEKGVELDNIIRKTGIQGIVNGMDVQEWNPITDKYTTVKYDASTVADAKPLLKEALQAEVGLPVDRDIPVIGFIGRLEE

SEQ ID NO: 31611 - protein, 257 aa, Zea mays
MASLTLPPAPPNPRQDAIDLHKAFKGFGCDSTTVSNILSHRDSMQRGYIQQEYKTMYSEELSHRISSELSGNHKKALSLWILDPAGRDATVLKEALSAESLDLKAATDIICSRTPSQLQIMKQTYYAKFGTYLEHDISQQASGDHLKILLAYVGIPRYEGPEVDPTIVTHDAKDLYKAGEKRLGTDEKTFIRVFTERSWAHLASVSSAYHHMYDRKLEKVIKSETSGNFEFALLAILRCAENPAKYFAKVLRPCCFQ

SEQ ID NO: 31612 - protein, 410 aa, Streptococcus pyogenes SSI-1
MTFKRVVVTGYGLTSPIGHDPETFWDNLKAGQIGIGPITKFDTTDYAVKNAAEIQDFPFDKYFVKKDLNRFDRYSLYALYAAKEAINHADLNIEMIDSDRFGVIVASGIGGIAEIEEQVIRLHEKGPKRVKPMTLPKALPNMAAGNVAMSLKAQGVCKSVNTACASSNDAIGDAFRAIKFGTQDVMIVGGSEAAITKFAIAGFQSLTALSTTEDPSRSSIPFDKDRNGFIMGEGSGMLVLESLEHAQERGATILAEIVGYGNTCDAYHMTSPNPEGLGARKAIHLALQEAGIEASAINYVNAHGTSTPANEKGESQAIVAVLGKDVPVSSTKSFTGHLLGAAGAIEAIATIEAMRHNYVPMTAGTQALSEDIEANVIFGEGKETAINYAISNTFGFGGHNAVLAFKCWEE

SEQ ID NO: 31613 - protein, 312 aa, Rhaphiolepis indica
GGLGDVLGGLPPAMAANGHRVMTVSPRYDQYKDAWDTSVLVEIEVGGRVETVRFFHCYKRGVDRVFVDHPLFLEKVWGKTESKIYGPRTGVDYMDNQFRFSLLCQAALEAPRVLSLNSNKYFSGPYGDDVVFIANDWHTALLPCYLKTIYKPKGIYKNAKVVFCIHNIAYQGRLPFSDFSLLDLPDLKGSFDYIDGHDKPVKGRKINWMKAGILESDRVVTVSPYYAQELVSGEDKGVELDNTIRKTGITGIVNGMDVQEWNPAADKYLDIKYDNTTVLDAKPLLKEALQAEVGLPVDRNIPVFGFIGRLEN

SEQ ID NO: 31614 - protein, 486 aa, Ricinus communis
MVENTAAKNHPHQVFDVSINMQTQVVGSKWLDDDGRTKRTGTVWTASAHIITAVIGSGVLSLAWAIAQLGWIAGPAVMFLFSLVTYYTSTLLSACYRSGDPVNGKRNYTYMDAVRTNLGGAKVKLCGFVQYLNLFGVAIGYTIASSISMMAIKRSNCFHKSGGKNPCHINANPYMIAFGIAEIIFSQIPDFDQLWWLSILAAVMSFTYSTIGLGLGIAQVVENGKAMGSVTGISIGANVTPTQKIWRSFQALGDIAFAYSYSIILIEIQDTVRSPPSESKTMKKATLISVAVTTLFYMLCGCFGYAAFGDMSPGNLLTGFGFYNPYWLLDIANVAIVVHLVGAYQVYCQPLFAFVEKAAAQRYPDSGFITKDIKIPVPGFRPFNLNLFRSVWRTLFVVFTTVISMLLPFFNDIVGLLGALGFWPLTVYFPVEMYIAQKKIPKWSTRWLCLQILSAACLVITIAAAAGSIAGVVGDLKSVKPFQTSY

SEQ ID NO: 31615 - protein, 274 aa, Plantago major
MSCSLKAGFAVSGSSSTNLLIKNRGTKECFRVCSGSLQLKKSTTNPTLFITNQHTVDFSDRKPAVQSPKLDPVQGKYIPGVGKSMRWWEKSLQPNMVEIQSAQQLVDCLVNAGDRLVILDFYSPGCGGCKALHPKICQLAELNPDATFLKVNYEEHKPMCYALRVHVLPFFRFYRGADGRVCSFSCTNATIKKFKDALAKHGTEQCSLGPAKGLDESELMALASIGLISREMVPSSTNDDKDLVLNGATAMSHTLKNKDDKKIEVMESNAMAMA

SEQ ID NO: 31616 - protein, 348 aa, Pseudomonas sp. TW3
MLAIRKTKAGPGGLSVDDVAAPKEAHSTDVLVKVEAAGICGTDLLIYKWGEFAKRMKLPTILGHEVSGVIEQVGSDVKGLRPGMRVSLESHLPCGTCYTCRRGWAHVCPKTRYPGVDFDGGFASFVVVPESVCWPVPCGIPPLQAAMMEPFGLAVHASLEGSGVSGLNVLVSGCGPIGLMNIAAAKALGASKVIATDIHPLRLTAAAKMGADECINAAEESVYKTVRSLLGERGVDVAIDYSGQAAALKELIQSITHGGELRLMGVPSHDILLNLEEWLFKGLIVRGLHGRRLYETWERSTSLLVTGRVDLSSLVSHRLPLSAAEDAFEMALNGQSLKILFEPNGSCI

SEQ ID NO: 31617 - protein, 175 aa, Triticum aestivum
MAPTVMASSATSVAPFQGLKSTAGLPVSRRSSSAGLGSVSNGGRIRCMQVWPIEGIKKFETLSYLPPLSTEALLKQVDYLIRSKWVPCLEFSKVGFVFREHNSSPGYYDGRYWTMWKLPMFGCTDATQVLNEVEEVKKEYPDAYVRVIGFDNLRQVQCVSFIAFRPPGCEESGKA

SEQ ID NO: 31618 - protein, 246 aa, Zea mays
IRLEAAYVEHANAIPKWTGLLPKSGNMVINTEWGSFKSGKLPLSEYDKAMDFESLNPGEQIYEKMISGMYLGEIVRRILLKLAHDASLFGDVVPTKLEQPFILRTPDMSAMHHDSSHDLKTLGSKLKDIVGVADTSLEVRYITRHICDLVAERGARLAAAGIYSILKKIGRDKVPSSGSKMPRTVIALDGGLYEHYKKFSSCVEATLTDLLGEEASSSVVAKLANDGSGIGAALLAASHSQYGESD

SEQ ID NO: 31619 - protein, 472 aa, Bacillus anthracis str. Sterne
MNHLRGGSEVANKELKRGLEARHIQMIALGGTIGVGLFMGSASTIKWTGPSVMLAYAIAGIFIFFIMRAMGEMLYMEPSTGSFATFGHKYIHPLAGYMTAWSNWFQWVIVGMSEIIAVGAYMQYWFPDLPAWIPGVIAMVILGAANLISVKSFGEFEFWFAMIKIVTILLMIIAGFGLIFFGIGNGGEAIGISNLWSNGGFFTGGFSGFFFALSLVVGAYQGVELIGITAGEAKDPKKTLTRAIQSTIWRILIFYIGAIFVIVTVYPWDQLSTIGSPFVATFAKVGITAAAGLINFVVITAAMSGCNSGIYSAGRMLYTLGVNGQAPKYFTKLSGNGVPLFGTVGVIIGLAVGVVLSYIAPKNLFVYVYSASVLPGMVPWFVILISQINFRKEKGAEMKDHPFKMPFAPVTNYLTIAFLIMVLVGMWFNDDTRISLVVGIVFLAIVTISFYAFGIGKRPPLDVPNDQEISSK

SEQ ID NO: 31620 - protein, 325 aa, Vibrio vulnificus YJ016
MKHIAIIGECMIELNGKPFGSMHQTFGGDTLNAAVYLSRGCEANNKPDEVKVSYVTALGNDPISTGMLTRWEDEGVSTDLVLRDETRTPGLYLIQLDDQGERTFLYWRNQSAARYLLQHPNFGMVKQALTQVDAVFLSGISLAILPEEDRISLLNLLVELKAQGVEIAFDSNFRPALWPQDDNQTVKNVYQAMYQLTDVAMVTFDDEQLIWGDATPEQTIERLTSLGVDKCIVKLGADGCLVQDSTNQGSSAALAPQAVPTQPVAQVVDTTSAGDSFNGGFLSAYLAGADLATSCQRGNALAGAVIQHRGAIIPKAFTQPALGVV

SEQ ID NO: 31621 - protein, 325 aa, Cryptococcus neoformans var. neoformans JEC21
MSLGRTLKLNNGVVAPQIGFGTWQAAPGEVEKAVEEAIKVGYRHIDCALIYRVFDATGVYGTVAQGIKASGVPRKDLFLVSKLWNNSHRPEKVEADLDTSLKQLGTDYLDVYLIHWPVPFAPGDNLFPKTEDGKVAIDWDGPSVVDTWKELIRISKETKKVKAIGVSNFNVELLEKLIKETGVVPTMNQIECHPSLIQPELFKYCKEKNIVITAYSPLGNNTTGKPRIIDQPQIIDIAKKLNKEPAQVLINWAAHQGFAVIPKSVTPSRIKSNFEDFKLNDDVFEEINKVGKANAARANIPAEYNPSWPINVFGEKSEEQYKKVW

SEQ ID NO: 31622 - protein, 447 aa, Triticum aestivum
MASSSLDTEAGAGVQHKAGGDGSGYTTAATAHAVDTDSWQQVGLLLVTGFNCAYVLSFSNLMMVPLGWGWGAACLLLLAAAAWYANWLLAGLHVVDGQRFIRYRDLMGFVFGRKMYYLTWFLQFTTLLLGSMGFILLGGRALKAISAEFTQTPPRLQWFIAATGFVYFAFAYFVPTISAMRNWLATSAALTVTFDVALLAVLVRDGRSNDRSGRDYSIHGTGAEKAFNALGAVAAILVCNTSGLLPEIQSTLRKPAVGNMRRALALQYTVGAAGYYGISVAGYWAYGAAASEYLPNQLSGPRWASVLINATAFLQSIVSQHLFTVPIHEGMDTGLQRLEEGMFSRYNMTRRLFARGLLFGVNVFVTALFPFMGDFVNLFGSFALFPLTFMFPSMIVLKIKGECDGRWGRLWHWGIIVVSSAVGLATSAAAVRLILHNASVYRFFADT

SEQ ID NO: 31623 - protein, 355 aa, Angraecum eburneum
SDSGKDAGRLSAAWQLYKTQEELVEVAKEYGVKLTMFHGRGGTVGRGGGPTHLAILSQPPDTILGSLRVTVQGEVIEQSFGEENLCFRTLQRFTAATLEHGMQLPISPKPEWRALMDEMAIVATKEYRSIVFQEPRFVEYFRLATPELEYGRMNIGSRPSKRKPSGGIESLRAIPWIFAWTQTRFHLPVWLGFGAAFKQSSKRTKIIFKYYKRCTIEWPFFRVTIDLIEMVFTKGSTGIAALYNKLLVSADLWPFGEQLRANYETQRLLLEVAGHKVLLEGDPYLKQRLRLRYPYITTLNVCQAYTLKRIRDPNYAKPHLSNSNKPAAELVKLNPTSEYAPGLETLILTMKGIAA

SEQ ID NO: 31624 - protein, 356 aa, Angraecum eburneum
SDSGKDAGRLSAAWQLYKTQEELVEVAKEYGVKLTMFHGRGGTVGRGGGPTHLAILSQASDTILGSLRVTVQGEVIEQSFGEENLCFRTLQRFTAATLEHGMQLPISPKPEWRALMDEMAIVATKEYRSIVFQEPRFVEYFRLATPELECGRMNIGSRPSKRKPSGGIESLRAIPWIFAWTQTRFHLPVWLGFGAAFKHVIEKTKNNLQILQEMYNEWPFFRVTIDLIEMVFTKGSTGIAALYNKLLVSEELQPFGEQLIANYENKRLLLEVAGHKVLLEGDPYLKQRLRLRYPYITTLNVCQAYTLKRIRDPNYAKPHLSNSNKPAAELVKLNPTSEYAPGLEDTLILTMKGIAA

SEQ ID NO: 31625 - protein, 325 aa, Pseudomonas putida KT2440
MFQELTMGLLIDGRWHDQWYENGKDGTFKRENAQRRNQLPAPEAGRYHLYVSLACPWAHRTLIFRALKGLEPLIDVSVVSWLMQDHGWTFDQQQGSSGDHLDALQYLHQRYTQDDPHYTGRVTVPVLWDKKEKRIVNNESAEIIRIFNSAFNELTGNTLDLYPASLRPTIEALNERIYPAVNNGVYRAGFATTQDAYEAAFEDVFNELDYLEALLGRNRYLAGEYLTEADVRLFTTLVRFDAVYHGHFKCNLRRLSDYHNLSNWLRELYQWPGVAGTVNMEHIQKHYYMSHKTINPNGIVPKGPLQDFGLPHDRERLAGKGIWQA

SEQ ID NO: 31626 - protein, 313 aa, Rhaphiolepis indica
GGLGDVLGGLPPAMAANGHRVMTVSPRYDQYKDAWDTGVPVEIEVGGRVETVRFFHCYKRGVDRVFVDHPSFLERVWGKTGSKIYGPSAGEDYKDNQFRFSLLCQAALEAPRVLNLNSNKYFSGPYGDEVVFIANDWHTALLPCYLKTIYKPMGIYENAKVLFCIHNIAYQGRFPISDFSVLNLPENLKGSFDFIDGYNKPVKGRKINWMKAGILESDRVVTVSPFHAQELVSGEDKGVELDNIIRKTGITGIVNGMDVQEWNPATDKYLDTKYDNTTVLDAKPLVKEALQAEVGLLVDRNIPAIGFIGRLEE

SEQ ID NO: 31627 - protein, 456 aa, Corynebacterium glutamicum ATCC 13032
MALKGYTNFDGEFIEFGSVQAKEEEKRAFDNDRAHVFHSWSAQDKISPKVWAAAEGSTLYDFDGNAFIDMGSQLVSANLGHNNPRLVEAIQRQAARLTNINPAFGNDVRSDVAAKIVSMARGEFSHVFFTNGGADAIEHSIRMARLHTGRNKILSAYRSYHGATGSAMMLTGEHRRLGNPTTDPDIYHFWAPFLHHSSFFATTQEEECERALKHLEDVIAFEGAGMIAAIVLEPVVGSSGIILPPAGYLNGVRELCNKHGILFIADEVMVGFGRTGKLFAYEHAGDDFQPDMITFAKGVNAGYAPLGGIVMTQSIRDTFGSEAYSGGLTYSGHPLAVAPAKAALEIYAEGEIIPRVARLGAELIEPRLRELAEENVAIADVRGIGFFWAVEFNADATAMAAGAAEFKERGVWPMISGNRFHIAPPLTTTDDELVALLDAVEAAAQAVELTFAGALF

SEQ ID NO: 31628 - protein, 443 aa, Physcomitrella patens
MREILHIQGGQCGNQIGSKFWEVVCEEHGIDPTGSYKGVTDLQLERINVYFDEASGGRYVPRAVLMDLEPGTMDSVRTGPYGQIFRPDNFVFGQTGAGNNWAKGHYTEGAELIDSVLDVVRKEVESCDCLQGFQFCHSLGGGTGSGMGTLLISKIREEYPDRMMLTFSVFPSPKVSDTVVEPYNATLSVHQLVENADECMVLDNEALYDICFRTLKLITPSFGDLNHLISATMSGITCCLRFPGQLNSDLRKLAVNLIPFPRLHFFMIGFAPLTSRGSQQYRSLTVPELTQQMWDSKNMMCAADPRHGRYLTASAVFRGKVSTKEVDEQMINVQNKNSSYFVEWIPNNVKSSVCDIPPTGLKMSSTFIGNSTSIQEMFRRVSEQFTAMFRRKAFLHWYTGEGMDEMEFTEAESNMNDLVSEYQQYQDASAEEEGEYEEDLEEA

SEQ ID NO: 31629 - protein, 313 aa, Rhaphiolepis indica
GGLGDVLGGLPPAMAANGHRVMTISPRYDQYKDAWDTEVTVELKVGDKTETVRFFHCYKRGVDRVFVDHPLFLEKVWGKTASKIYGPTAGVDFQDNQLRFSLLCQAALVAPRVLNLNSSKYFSGPYGEEVVFIANDWHTALLPCYLKAIYKPKGIYKAAKVAFCIHNIAYQGRFAFEDFALLNLPNEFKSSFDFIDGYDKPVKGRKINWMKAGILESDKVLTVSPYYAEELVSSVEKGVELDNIIRKTGIQGIVNGMDVQEWNPLTDKYTTVKYDASTVADAKPLLKEALQAEVGLPVDRDIPVIGFIGRLEE

SEQ ID NO: 31630 - protein, 866 aa, Haemophilus influenzae R2846
MLGRFLGETINDAQGEDILELIENIRKLSRNSRAGDDKARQALLDTLGSISNENIIPVARAFSQFLNLTNIAEQYQTISREHSLAQSSSQSLSELFKRLKEQNASVEEVHKTVEKLLIELVLTAHPTETTRRSLIHKHIEINKCLSKLEHHDLTEKERNIIERLLLRLIAEAWHTNEIRTVRPTPFDEAKWGFAMLENSLWQAVPEFLRQLNETAREFLGYDLPVGLKPVRISSWMGGDRDGNPFVTAQITKKVLYFARWKAADLFLQDISKLADELSMMKCSDEFRDKYGEHLEPYRFVVKNLRNQLTATLAYFDDHLSNRTPRVSESEIILEDNQLWEPLYDCYQSLIQCGMRIIANGSLLNILHRISCFGVTLSQMDIRQESTRHTDAIAEITRYIGLGDYSQWMEDDKQAFLIRELSSRRPLIPQNWTPSPETKEILDTCKVIAQQKQGVIACYVISMARSASDVLAVHLLLKESGVPYHIPVVPLFETLEDLDAAEKVMTQLFNVGWYRGVINNRQMVMIGYSDSAKDAGMMAASWAQYRAQEALVNLTEKLGIELTLFHGRGGTIGRGGAPAHAALLSQPPRSLKNGLRVTEQGEMIRFKLGLPAVAVETFDLYASAILEANLLPPPEPKPEWRTIMDELSTISCDIYRGVVRGDKDFVPYFRSATPEQELSKLPLGSRPAKRNPNGGVESLRAIPWIFAWMQNRLMLPAWLGAGAAIRQVIEQGKGDIIHKMCENWPFFSTRIGMLEMVFSKSDTWLSQQYDQRLVKKELWYLGENLRKQLEDDIQTVLSLSHQSELMSDLPWIADSIALRNIYTDPLNLLQVELLHRFRKNPEQVNPDVEQALMITITGIAAGMRNTG

SEQ ID NO: 31631 - protein, 313 aa, Sorbaria sorbifolia
GGLGDVLGGLPPAMAANGHRVMTISPRYDQYKDAWDTEVTIEVKVGDRTETVRFFHCYKRGVDRVFVDHPLFLEKVWGKTASKIYGPITGEDYKDNQLRFSLLCQAALEAPRVLNLNSSKYFSGPYGEEVVFIANDWHTALLPCYLKAIYKPKGIYNTAKVAFCIHNIAYQGRFAFAYFSLLNLPDEFKSSFDFIDGYDKPVKGRKINWMKAGILESDKVLTVSPYYAKELVSSADKGVELDNFIRKVGIFGIVNGMDVQEWNPLTDKYTTVKYDASTVTDAKPLLKEALQAEVGLPVDRDIPVIGFIGRLEE

SEQ ID NO: 31632 - protein, 313 aa, Sorbaria sorbifolia
GGLGDVLGGLPPAMAANGHRVMTVSPRYDQYKDAWDTSVLVELEVNGRTESVRFFHCHKRGVDRVFVDHPVFLERVWGKTGSKIYGPRAGEDYKDNQLRFILLCQAAPEAPRVLNLNSNEYFSGPYGEDVVFIANDWHSALLPCYLKTIYKPKGIYKSAKVAFCIHNIAYQGRFPFSDFSLLDLPDQLKGSFDFLDGYNKPVKGRKINWMKAGILESDKVVTVSPYYAQELVSGEDKGVELDNIIRTTGISGIVNGMDVQEWNPATDKYLDIKYDNTTVLDAKPLLKEALQAEVGLPVDRNIPVIGFIGRLEE

SEQ ID NO: 31633 - protein, 313 aa, Sorbus americana
GGLGDVLGGLPPAMAANGHRVMTVSPRYDQYKDAWDTGVPVEIEVGGRVETVRFFHCYKRGVDRVFVDHPSFLERVWGKTGSKIYGPSAGEDYKDNQFRFSLLCQAALEAPRVLNLNSNKYFSGPYGDEVVFIANDWHTALLPCYLKAIYKPKGIYENAKVVFCIHNIAYQGRFPISDFSVLNLPENLKGSFDFIDGYNKPVKGRKINWMKAGILESDRVVTVSPFYAQELVSGEVKGVELDNIIRKTGITGIVNGMDVQEWNPATDKYLDTKYDNTTVLDAKSLVKEALQAEVGLPVDRNISVIGFIGRLEE

SEQ ID NO: 31634 - protein, 452 aa, Vitis vinifera
TTNPHVAVLAFPFSTHAAPLLAVVRRLAAAAPHAVFSFFSTSQSNASIFHDSMHTMQCNIKSYDISDGVPEGYVFAGRPQEDIELFTRAAPESFRQGMVMAVAETGRPVSCLVADAFIWFAADMAAEMGVAWLPFWTAGPNSLSTHVYIDEIREKIGVSGIQGREDELLNFIPGMSKVRFRDLQEGIVFGNLNSLFSRMLHRMGQVLPKATAVFINSFEELDDSLTNDLKSKLKTYLNIGPFNLITPPPVVPNTTGCLQWLKERKPTSVVYISFGTVTTPPPAEVVALSEALEASRVPFIWSLRDKARVHLPEGFLEKTRGYGMVVPWAPQAEVLAHEAVGAFVTHCGWNSLWESVAGGVPLICRPFFGDQRLNGRMVEDVLEIGVRIEGGVFTKSGLMSCFDQILSQEKGKKLRENLRALRETADRAVGPKGSSTENFITLVDLVSKPKDV

SEQ ID NO: 31635 - protein, 126 aa, Arabidopsis thaliana
MFYGVMEHGFCHVRGRPGNALTDMKACEWTTCHKPVGGSFCVKPLNFLTSPTAKAFVCYTSTNRRFRRNSLKMSTATFVEIILAIILPPLGVFLKFGCKVEFWICLILTLFGYLPGILYALYIITK

SEQ ID NO: 31636 - protein, 409 aa, Schizosaccharomyces pombe
MFRTCTKIGTVPKVLVNQKGLIDGLRRVTTDATTSRANPAHVPEEHDKPFPVKLDDSVFEGYKIDVPSTEIEVTKGELLGLYEKMVTIRRLELACDALYKAKKIRGFCHLSIGQEAVAAGIEGAITLDDSIITSYRCHGFAYTRGLSIRSIIGELMGRQCGASKGKGGSMHIFAKNFYGGNGIVGAQIPLGAGIGFAQKYLEKPTTTFALYGDGASNQGQAFEAFNMAKLWGLPVIFACENNKYGMGTSAERSSAMTEFYKRGQYIPGLLVNGMDVLAVLQASKFAKKYTVENSQPLLMEFVTYRYGGHSMSDPGTTYRSREEVQKVRAARDPIEGLKKHIMEWGVANANELKNIEKRIRGMVDEEVRIAEESPFPDPIEESLFSDVYVAGTEPAYARGRNSLEYHQYK

SEQ ID NO: 31637 - protein, 456 aa, Vitis vinifera
MSQTTTNPHVAVLAFPFSTHAAPLLAVVRRLAAAAPHAVFSFFSTSQSNASIFHDSMHTMQCNIKSYDISDGVPEGYVFAGRPQEDIELFTRAAPESFRQGMVMAVAETGRPVSCLVADAFIWFAADMAAEMGLAWLPFWTAGPNSLSTHVYIDEIREKIGVSGIQGREDELLNFIPGMSKVRFRDLQEGIVFGNLNSLFSRMLHRMGQVLPKATAVFINSFEELDDSLTNDLKSKLKTYLNIGPFNLITPPPVVPNTTGCLQWLKERKPTSVVYISFGTVTTPPPAEVVALSEALEASRVPFIWSLRDKARVHLPEGFLEKTRGYGMVVPWAPQAEVLAHEAVGAFVTHCGWNSLWESVAGGVPLICRPFFGDQRLNGRMVEDVLEIGVRIEGGVFTKSGLMSCFDQILSQEKGKKLRENLRALRETADRAVGPKGSSTENFITLVDLVSKPKDV

SEQ ID NO: 31638 - protein, 211 aa, Schizosaccharomyces pombe
MTTEAAPNLLVLTRHGESEWNKLNLFTGWKDPALSETGIKEAKLGGERLKSRGYKFDIAFTSALQRAQKTCQIILEEVGEPNLETIKSEKLNERYYGDLQGLNKDDARKKWGAEQVQIWRRSYDIAPPNGESLKDTAERVLPYYKSTIVPHILKGEKVLIAAHGNSLRALIMDLEGLTGDQIVKRELATGVPIVYHLDKDGKYVSKELIDN

SEQ ID NO: 31639 - protein, 662 aa, Triticum aestivum
  misc_feature (45)..(45): Xaa can be any naturally occurring amino acid
  misc_feature (488)..(488): Xaa can be any naturally occurring amino acid
  unsure (1)..(662): unsure at all Xaa locations
LAWSRPRWARGRQRLKYRKLINSSFADLQNPQLDLDGKACAAVGXQSGLMAIYDTLFSQLDVTSSQLLVTDRDFRDPSFGHQLRETVVSLLDLKVIPVFNENDAISTRRAPYEDSSGIFWDNDSLATLLAKELDADLLIMLSDVEGLYSGPPSDPQSKIIHTYINEKHGKLINFGEKSRVGRGGMQAKVAAAVTAASKGVPAVIASGFVTDSIIKIMRGEKIGTLFHNEANVWDCSKEVTTREMAVAAKDCSRHLQNLSSEERKKILLDIAGALDANVDLIISENEADLAAAQDSGYEKSLVARMTLKAGKITSLAESIRAIADMEDPISHTLKKTEVAKDLVFEKMYCPLGVLLIIFESRPDALVQIAALAIRSGNGLLLKGGKEAMRSNTILHKVITSVIPDAVGKKLIGLVKSKDEIADLLKLDDVIDLVIPRGSNRLVSQIKAQTKIPVLGHADGICHVYIDKSADMDMAKRIVLDAKVDYPAXCNAMETLLVHKDLNKTEGLDDLLMELAKEGVVIYGGPVAHDTLKVPKVDSFHHEYSSMACTLEFVDDVQSAIDHINRYGSAHTDCIITTDKKSADTFLQQVDSAAVFHNASTRFCDGTRFGLGAEVGISTGRIHARGPVGVDGLLTTRCILRGSGQVVNGDKGVVYTHKDLPLQ

SEQ ID NO: 31640 - protein, 321 aa, Schizosaccharomyces pombe
MSAEQKYFENAQNVHFTLADGSKIPGLGLGTWRSEPNQTKNAVKTALQYGYRHIDAAAIYGNEDEVGDGIKESGVPRKDIWVTSKLWCNAHAPEAVPKALEKTLKDLKLDYLDEYLIHWPVSFKTGEDKFPKDKDGNLIYEKNPIEETWKAMEKLLETGKVRHIGLSNFNDTNLERILKVAKVKPAVHQMELHPFLPQTEFVEKHKKLGIHVTAYSPFGNQNTIYESKIPKLIEHETIQKIAKSKGEGVTGATIAVSWAITRGTSVIPKSVNEQRIKSNFKYIPLTKEDMDEINSIGIRARFNQATFSNEPVFAGLEDGRT

SEQ ID NO: 31641 - protein, 147 aa, Brassica napus
  misc_feature (104)..(104): Xaa can be any naturally occurring amino acid
  misc_feature (116)..(116): Xaa can be any naturally occurring amino acid
  misc_feature (130)..(130): Xaa can be any naturally occurring amino acid
  unsure (1)..(147): unsure at all Xaa locations
QKETAMDLADKLQYSESALEINESLVEAGAKHGRFIGREDEARALKRAVSDIKHEVQSQLLQNEKTNRRVSGIAKELRKLHREAVQNTTNSITVVAVLFASIAXFLAIFNLPGQYXSPTGSRAGKAEISXSTGFRVFCLLNATSLVI

SEQ ID NO: 31642 - protein, 319 aa, Metasequoia glyptostroboides
MAAAAALKTPISLGRSEWFGQTLRPTSSSSLSLQTHSLSTSPALNVRASAYSDELVKTAKTVASPGRGILAMDESNATCGKRLASIGLENTEANRQAYRQLLVSAPGLRQYISGAILFEETLYQSTTDGKKIVDVLVSQNIVPGIKVDKGLVPLAGSNDESWCQGLDGLASRCAAYYQQGARFAKWRTVVSIPNGPSALAVKEAAWGLARYAAISQDNGLVPIVEPEILLDGDHGIDRTFEVAKKVWAEVFFYLAENNVMFEGILLKPSMVTPGAEHKERASPTTVSEYTIKLLRSRVPPAVPGIMFPLWRAIRGGRRR

SEQ ID NO: 31643 - protein, 150 aa, Salmonella enterica
CIIWGLGISLAVYLTAGISGGHLNPAVTIALWLFACFPKQKVLPYIIAQFAGAFGGALLAYVLYSSLFTEFETAHHMVRGSVESLQLASIFSTYPAAALNVWQAALVEVVITSILMGMIMALTDDGNGIPKGPLAPLLIGILVAVIGAST

SEQ ID NO: 31644 - protein, 371 aa, Synechococcus elongatus PCC 7942
MPTVSRIWQPLLGLALVSLLVQSCGRSRQALNPSGNLCGSRQLEASDIFKRSKGSVVKIETATGLGSGFVVKNDNGSIILTNAHVVKGNGGTLTVKDVRGNVVDAQLLAVGEGEADSSDLALIKTETEIGTPLKLSDDIETASTVYAIGSPLGQEWSISQGIISRFVTDQGLIQTDIAINPGNSGGPVLDKRGCVVGVVVSKLDPAQSEGIGFAIEPRIAERYVKENAGNQAIAIDQFSEPEETQVEQVENPDRNEAGYEVCNQSGENLSVAIAYFDTSIDSYRSEGWWNLDQSKCQFFPNLLDSVDEVYVFAESDQTLWSGDFPFCMQEDAFDYPDANRDRCPSPAYSKGFLKVEVGDAKTWTTNLTPSQ

SEQ ID NO: 31645 - protein, 178 aa, Oryza sativa (japonica cultivar-group)
MMMMDLGFLEGGAGMADAGHDESGSPPRSGGVREQDRFLPIANISRIMKKAVPANGKIAKDAKETLQECVSEFISFVTSEASDKCQKEKRKTINGEDLLFAMGTLGFEEYVDPLKIYLHKYREVIGDSKLSSKAGDGSVKKDTIGPHSGASSSSAQGMVGAYTQGMGYMQPQYHNGDT

SEQ ID NO: 31646 - protein, 287 aa, Metasequoia glyptostroboides
MSCFKGKYHDELIANANYIATPGKGILAADESTGTIGKRLASINVENVESNRRALRELLFTAPGALPLISGVILFEETLYQKASDGTTFVDILTSAGVLPGIKVDKGTVDLAGTAGETTTQGLDGLGQRCATYYKAGARFAKWRAVLKIGPTEPSQLAIQENANGLARYAIICQENGLVPIVEPEILVDGSHSIDVCADVTERVVAACYKALNDHKVLLEGTLLKPNMVTPGIRRPQSQPGRYCSVHCPGSAADRATRRARDYVLVRWAERGGGHLELECHEQAAGR

SEQ ID NO: 31647 - protein, 577 aa, Synechococcus elongatus PCC 7942
MSGSASRSTAANPLELAWITPSAAQLASTADLYYVQDLLGRYLSFAWRSGQWLGLNSEQVVGSYLSEQFTPVDLNLYLARMRRAMHRGRAEQFRTGFRFQGQVYVFDLTLSPILQPQQASTLLLVIGRQQEPLPEALPEPPIAIAPPHHAKLFAQIAWDIRRTLDPETIWRHTVQGLGQALGLQRCLLCPYELGSTAIAIVAEYRQAHLPVVLGEQLAIARNPSLADALLSLRPTQAVVDFERSPAEPIWMVPTGYQDHPNGVLLLRSAEELTAGDRDLVWELADQVGTALAHARLYAQSQALALELQRANQTLLEQQQALIEAHRQSEALSQLKTDFLANTSHELRTPLTGMIGYLQLLQDDLAETPEERQEFIAGAYHSALHLLGIINDILDIARIEAGRLQLQAETVPLRNLLAEVETCLRSQAQAKGLVYRCRIAAETESVALWGDRQRLLQVLFNLVGNAIKFTLTGYVEVRATAVWQPLCANGQNLPGYLRLEIEDSGIGVAPERQGSLFQPFSQADSSLTRQFGGSGLGLVICRRLLESMGGIVELFSPGEGLGTTVTCLIPLAPAIIPS

SEQ ID NO: 31648 - protein, 358 aa, Burkholderia fungorum LB400
MGSSLVTNDGRGLDHAAIGRWAGQIAALRAQGKEVVLVSSGAIAEGMQRLGWTRRPREIDELQAAAAVGQMGLAQVYESRFAEHSIQTAQILLTHADLADRERYLNARSTLLTLLRLGVVPIINENDTVVTDEIKFGDNDTLGALVANLIEGDALVILTDQQGLFTADPRKDPAATLVQQADAGAPELEAMAGGAGSSLGRGGMLTKILAAKRAAHSGANTVIASGREVDVLSRLASGEAIGTQLIARTARMAARKQWMADHLQVRGHVVIDDGAVEKLTEGGKSLLPIGIVGVQGAFARGEVIACLSAAGREVARGLTNYSSAETKLIQRRPSGEIESVLGYMLEPELIHRDNLVLV

SEQ ID NO: 31649 - protein, 313 aa, Triticum aestivum
SAQLQPTEYRPNPTPGDNRASTARMLLNPASEALVLDSIRQHLMEDTAAPAPEARRQRPAYCRSASFGSLVADQWSESLPFRADDSDDMVVYGALRDAFSCGWLPDGSFAAVKPEPLLPSPDSCYVGFLEPETPPATSPGESEEEAAAAFMGEAAAAAARGKHYRGVRQRPWGKFAAEIRDPAKNGARVWLGTYDTAEDAAVAYDRAAYRMRGSRALLNFPLRIGSEIAAAHAAAAAAGDKRPSPEPATSDSSSSSSSSGSPKRRKRGEAAAASMAMALVPPPSQLSRPAQAWYPAAPVEQVAMAPRAQQLVS

SEQ ID NO: 31650 - protein, 590 aa, Zea mays
MAMPVKLTPASLSLKAVCCRFSSGGHALRFGSSLPCWRRTPTQRSTSSSTTRPAAEVSSGKSKQHDQEASEATIRQQLQLVDVLENMGISRHFAAEIKCILDRTYRSWLQRHEEIMLDTMTCAMAFRILRLNGYNVSSDELYHVVEASGLHNSLGGYLNDTRTLLELHKASTVSISEDESILDSIGSRSRTLLREQLESGGALRKPSLFKEVEHALDGPFYTTLDRLHHRWNIENFNIIEQHMLETPYLSNQHTSRDILALSIRDFSSSQFTYQQELQHLESWVKECRLDQLQFARQKLAYFYLSAAGTMFSPELSDARTLWAKNGVLTTIVDDFFDVAGSKEELENLVMLVEMWDEHHKVEFYSEQVEIIFSSIYDSVNQLGEKASLVQDRSITKHLVEIWLDLLKSMMTEVEWRLSKYVPTEKEYMINASLIFGLGPIVLPALYFVGPKISESIVKDPEYDELFKLMSTCGRLLNDVQTFEREYNEGKLNSVSLLVLHGGPMSISDAKRKLQKPIDTCRRDLLSLVLREESVVPRPCKELFWKMCKVCYFFYSTTDGFSSQVERAKEVDAVINEPLKLQGSHTLVSDV

SEQ ID NO: 31651 - protein, 690 aa, Burkholderia mallei ATCC 23344
MPPVPRFLDSFSGLDMTTSSPASTTLMANAIRALAMDAVQQANSGHPGMPMGMAEIGVALWSRHLKHNPTTPHWADRDRFVLSNGHGSMLLYSLLHLTGYDLPIEELKNFRQLHSKTPGHPEYGITPGVETTTGPLGQGLANAVGMALGEALLAAEFNRDDAKIVDHHTYVFVGDGCLMEGISHEACSLAGTLKLNKLIAFYDDNGISIDGDVVNWFHDDTPKRFEAYGWNVIPNVNGHDVDAVDAAIAKAKSADKPTLICCKTVIGKGAATKAGGHDVHGAALGAEEIAKTRDALGWKWAPFVIPQEVYAAWDAKEAGKRREGDWNAAFAQYRAKYPAEAAEFERRMAGKLPADWAEKAAAIVAGANERGETVATRKASQQTIEGLAAVLPELLGGSADLTGSNLTNWKASKAVRANAHGAGIQWGNHINYGVREFGMSAAINGLVLHGGYKPFGGTFLTFSDYSRNALRVAALMKVPSIFVFTHDSIGLGEDGPTHQSVEHVASLRLIPNLDVWRPADTVETAVAWTHAVSHQHPSCLVFSRQNLAFNARTDAQLANIEKGGYVLRDWDEEIVARKIILIATGSEVELAMKAVEPLAQQGIAARVVSMPSTDVFDRQDAEYRERVLPHGVRRVAIEAGVTDFWRKYVGLEGGVVGIDTFGESAPAGVLFKHFGFTIEHVVETAKAVLA

SEQ ID NO: 31652 - protein, 149 aa, Physcomitrella patens
MADDLTEEQIAEFKEAFSLFDKDGDGSITTKELGTVMRSLGQNPTEAELQDMINEVDADGNGTIDFPEFLNLMARKMKDTDSEEELKEAFKVFDKDQNGFISAAELRHVMTNLGEKLTDEEVDEMIRDADVDGDGQVDYDEFVKMMKAK

SEQ ID NO: 31653 - protein, 219 aa, Burkholderia mallei ATCC 23344
MQDIIEGFLKFRRDAFAPRTALFKRLATSQQPRALFISCSDSRLVPELVTQREPGELFVIRNAGNIVPSFGPEPGGVSASVEYAVAVLEVADVVVCGHSDCGAMRAIASCACLDHLPAVRSWLRYADAAKRVNEAREHAGEQARVDSMVRENVVAQLANLNTHPSVRLALEQGRLTLRGWVYDIETGSIDALDGATGRFVALAEHPRVHATPPRVQRAA

SEQ ID NO: 31654 - protein, 340 aa, Bifidobacterium longum NCC2705
MTTVLVTGGAGFIATHTDIELLDKGYDVISVDNYGNSSPVALERVEQITGKPVKRYDGDVRDEALMERVFTENDIDWVIHFAGLKAVGESVAKPIEYYDNNLYSTLVLLKTMRKHGVKKIIFSSSATVYGSPKELPITEETPTGGTTNPYGTSKLFQEQILRDVHVADPSWTIVLLRYFNPVGAHESGLLGEDPKGIPANLTPYVAKVAVGELKEVQVYGDDYDTPDGTGVRDYIHVVDLAKGHVAVIDHIDKEGVFVYNLGTGHGYSVLEVIKAYEKAAGHPIPYTIKPRRPGDIAACYADASKAEKELGWKAELTIDDMAASSLNWQTKNPNGFRDAE

SEQ ID NO: 31655 - protein, 313 aa, Sorbus americana
GGLGDVLGGLPPAMAANGHRVMTISPRYDQYKDAWDTEVTVELKVGDKTETVRFFHCYKRGVDRVFVDHPLFLEKVWGKTASKIYGPTAGVDFKDNQLRFSLLCQAALVAPRVLNLNSSKYFSGPYGEEVVFIANDWHTALLPCYLKGIYKPKGIYKTAKVAFCIHNIAYKGRFAFADFALLNLPNEFKSSFDFIDGYDKPVKGRKINWMKAGILEADKVLTVSPYYAEELVSSVEKGVELDNIIRKTRIQGIVNGMDVQEWNPLTDKYTTVKYDASTVADAKPLLKEALQAEVGLPVDRDIPVIGFIGRLEE

SEQ ID NO: 31656 - protein, 184 aa, Carica papaya
VAPKPIVDIDGKPVLYGVDYFVVSAIWGAGGGGLTVYGPGNKKKCPLSVVQDPFDNGEPIIFSAIKNVKDNIVFESVDLNVKFNITINCNETTAWKVDRFPGVIGWTVTLGGEKGYHGFESTHSMFKIKKAGLPFSYKFHFCPSYPRTRLIPCNNVDIFFDKYRIRRLILTNDAKEFVFIKTNR

SEQ ID NO: 31657 - protein, 294 aa, Oryza sativa
MEQYEKEEKIGEGTYGVVYRARDKVTNETIALKKIRLEQEDEGVPSTAIREISLLKEMHHGNIVRLHDVIHSEKRIYLVFEYLDLDLKKFMDSCPEFAKNPTLIKSYLYQILRGVAYCHSHRVLHRDLKPQNLLIDRRTNALKLADFGLARAFGIPVRTFTHEVVTLWYRAPEILLGSRQYSTPVDMWSVGCIFAEMVNQKPLFPGDSEIDELFKIFRVLGTPNEQSWPGVSSLPDYKSAFPKWQAQDLATIVPTLDPAGLDLLSKMLRYEPNKRITARQALEHEYFKDLEMVQ

SEQ ID NO: 31658 - protein, 204 aa, Burkholderia mallei ATCC 23344
MKGGFPPEAVAPVIWMTGLPGAGKTTTANALAERLLEDGAKAIVLDGDALRSGLCADLGFSDADRMENIRRFAHVAKLFQREGYVVIVATISPLQAHRDLARSIVGEGFFETYVATPFDVCRSRDPKGMYARAEQGRLMQFTGVSGVYEPPVAPDISIDTTERSVAFSLAEVMAQLARVSALPAPLDAAASAPVAASAPAAAGG

SEQ ID NO: 31659 - protein, 443 aa, Physcomitrella patens
MREILHIQGGQCGNQIGAKFWEVVCEEHGIDPTGTYKGLSDLQLERINVYYNEASGGRYVPRAVLMDLEPGTMDSVRSGPYGQIFRPDNFVFGQTGAGNNWAKGHYTEGAELIDSVLDVVRKEAESCDCLQGFQVCHSLGGGTGSGMGTLLISKIREEYPDRMMLTFSVFPSPKVSDTVVEPYNATLSVHQLVENADECMVLDNEALYDICFRTLKLITPSFGDLNHLISATMSGITCCLRFPGQLNSDLRKLAVNLIPFPRLHFFMVGFAPLTSRGSQQYRSLTVPELTQQMWDAKNMMCAADPRHGRYLTASAMFRGKMSTKEVDEQMINVQNKNSSYFVEWIPNNVKSSVCDIPPTGLKMSSTFIGNSTSIQEMFRRVSEQFTAMFRRKAFLHWYTGEGMDEMEFTEAESNMNDLVSEYQQYQDASAEEEGEYEDDLEEA

SEQ ID NO: 31660 - protein, 313 aa, Sorbus americana
GGLGDVLGGLPPAMAANGHRVMTVSPRYDQYKDAWDTSVLVEIEVGGRVETVRFFHCYKRGVDRVFVDHPLFLEKVWGKTGSKIYGPRTGVDYMDNQFRFSLLCQAALEAPRVLNLNSNEYFSGPYGDDVVFIANDWHSALLPCYLKTIYKPKGIYKNAKVAFCIHNIAYQGRFPLSDFSLLDLPNNLKGSFDFLDGYEKPVKGRKINWMKAGILESDRVVTVSPYYAQELVSGEDKGVELDNIIRKTGITGIVNGMDVQEWNPATDKYLDIKYDNTTVLDAKPLLKEALQAEVGLPVDRNIPVFGFIGRLEE

SEQ ID NO: 31661 - protein, 313 aa, Sorbus americana
GGLGDVLGGLPPAMAANGHRVMTISPRYDQYKDAWDTEVTVELKVGDKTETVRFFHCYKRGVDRVFVDHPLFLERVWGETASKVYGPVTGVDFKDNQLRFSLLCQAALEAPRVLNLNSSKYFSGPYGEEVVFIANDWHTALLPCYLKAVYKPRGIYSTAKVAFCIHNIAYQGRFASADFALLNLPDEFKSSFDFIDGYEKPAKGRKINWMKAGILESDKLLTVSPYYAEELVSAAEKGVELDNIIRKTGIFGIVNGMDVQEWNPLTDKYTTIKYDASTVADAKPLLKETLQAEVGLPVDRDIPVIGFIGRLEE

SEQ ID NO: 31662 - protein, 767 aa, Saccharomyces cerevisiae
MVQSAVLGFPRIGPNRELKKATEGYWNGKITVDELFKVGKDLRTQNWKLQKEAGVDIIPSNDFSFYDQVLDLSLLFNVIPDRYTKYDLSPIDTLFAMGRGLQRKATETEKAVDVTALEMVKWFDSNYHYVRPTFSKTTQFKLNGQKPVDEFLEAKELGIHTRPVLLGPVSYLFLGKADKDSLDLEPLSLLEQLLPLYTEILSKLASAGATEVQIDEPVLVLDLPANAQAAIKKAYTYFGEQSNLPKITLATYFGTVVPNLDAIKGLPVAALHVDFVRAPEQFDEVVAAIGNKQTLSVGIVDGRNIWKNDFKKSSAIVNKAIEKLGADRVVVATSSSLLHTPVDLNNETKLDAEIKGFFSFATQKLDEVVVITKNVSGQDVAAALEANAKSVESRGKSKFIHDAAVKRRVASIDEKMSTRAAPFEQRLPEQQKVFNLPLFPTTTIGSFPQTKDIRINRNKFNKGTISAEEYEKFINSEIEKVIRFQEEIGLDVLVHGEPERNDMVQYFGEQINGYAFTVNGWVQSYGSRYVRPPIIVGDLSRPKAMSVKESVYAQSITSKPVKGMLTGPITCLRWSFPRDDVDQKTQAMQLALALRDEVNDLEAAGIKVIQVDEPALREGLPLREGTERSAYYTWAAEAFRVATSGVANKTQIHSHFCYSDLDPNHIKALDADVVSIEFSKKDDANYIAEFKNYPNHIGLGLFDIHSPRIPSKDEFIAKISTILKSYPAEKFWVNPDCGLKTRGWEETRLSLTHMVEAAKYFREQYKN

SEQ ID NO: 31663 - protein, 313 aa, Stephanandra incisa
GGLGDVLGGLPPAMAANGHRVMTVSPRYDQYKDAWDTEVTVELKAGEKTETVRFFHCYKRGVDRVFVDHPLFLEKVWGKTASKIYGPIAGEDYKDNQLRFSLLCQAALEAPRVLNLNSNKYFSGPYGEEVVFIANDWHTALVPCYLKAIYKPKGLYKSAKVAFCNHNIAYQGRFAFADFALLNLPDEFKSSFDFIDGYDKPVKGRKINWMKAGILESDKVLTVSPYYAEELVSTVEKGVELDNFIRKAGICEIVNGMGVQEWNPLTDKYTTVKYDASTVTDAKPLLKEALQAEVGLPVDRDIPVIGFIGRLEE

SEQ ID NO: 31664 - protein, 228 aa, ASPERGILLUS NIDULANS FGSC A4
MGFTDFVSDAGLTIANTFFGSRSYVVGTSPSQADVVTFKAFSSAPDAEKYPNVARWYKHIASYEPEFGSLPGDASKEFTAYGPEGAELPTNPKDKPAAEDDDDMDLFGSDEEEDEEVAKKHAANLAAYKAKKEAKGPKPAAKSIVTLEVKPWDDETNLQEMEANVRAIEKDGLVWGASKFVAVGFGIKKLQINMVVEDEKISIDELQAQIEEDEDHVQSTDVAAMQKL

SEQ ID NO: 31665 - protein, 514 aa, Ralstonia metallidurans CH34
MVESPVAPLFRPREPARQEEDQHAKHYSVQNTPGKEPSIPGRQSDIPARLDRLPWSAWHWRVAIALGIAWVLDGLEVTLVGSVGAVLERPDTLALNATQVGWSGSLYVLGAVIGALAFGRMADRLGRKKLFLATLFVYMAATLATAFSPNFAFFAACRFVTGLGIGGEYAAINSAIDELIPARVRGRVNLAINGSFWLGAALGAGLSLLLLDPRVLGPVWGWRACFALGALLAVAIVLIRRHVPESPRWLATHGRHAEAEQVIAGIEAAITRRHGPLPPVHDAVLVYYGGKPVPPLRDVVRLLVRRYRTRSAVTFALMVAQAFFYNAIFFTYALVLTRFLGVPEERVALYIFPFAIGNALGPLLLGPLFDRIGRRKMIALTYVLSGIGLAATGWAFMSGWLDARSQALCWSAVFFLASAAASSAYLTASEVFPLEMRALAISVFYAVGTGVGGFIAPVLFGALIETGSRGAVAVGYAIGATLVIVAGAMALKYGVDAERKPLEEVAPPLGTDDE

SEQ ID NO: 31666 - protein, 333 aa, Nitrosospira multiformis
MTIKVGINGFGRIGRMVFRAAVQNFPDIEVVAINDLLEPDYLAYMLQHDSVHGRFKGDVSIEDSTLIVNGKRIRLTAIKDPAVLKWGEVGAEVVVESTGLFLTKESCQKHIAAGAKKVIMSAPSKDDTPMFVYGVNNDSYDGQAIISNASCTTNCLAPVAKVLNDTFGVKRGLMTTVHAATATQKTVDGPSNKDWRGGRGILENIIPSSTGAAKAVGKVIPELNTKLTGMAFRVPTSDVSVVDLTVELEKEASYEEICNAMKKASEGSMKGVLAYTDQKVVSTDFRGESATSIFDAEAGMALDGNFVKVVSWYDNEWGYSSKILEMVRVVAGK

SEQ ID NO: 31667 - protein, 313 aa, Stranvaesia davidiana
GGLGDVLGGLPPAMAANGHRVMTVSPRHDQYKDAWDTGVLAEIEVGGRVETVRFFHCYKRGVDRVFVDHPLFLEKVWGKTGSKIYGPRTGVDYMDNQFRFSLLCQAALEAPRVLNLNSNKYFSGPYGDDVVFIANDWHTALLPCYLKTIYKPKGSYKNAKVVFCIHNMAYQGRFPSSDFALLDLPDNLKGSFDFIDGYNKPVKGRKINWMKAGILESDRVVTVSPYYAQELVSGEDKGVELDNIIRKTGITGIVNGMDVQEWNPATDKYLDVKYDNTTVLDAKPLLKEALQAEVGLPVDRNIPVFGFIGRLEE

SEQ ID NO: 31668 - protein, 501 aa, Glycine max
  misc_feature (106)..(106): Xaa can be any naturally occurring amino acid
  unsure (1)..(501): unsure at all Xaa locations
MARKMLIDGEAEIAQGGGEEVSNFDFDLFIIGAGSGGVRAARFSSNFGAKVGICELPFHPISSETIGGVGGTCVIRGCVPKKILVYGASFGGDLQDARNYGWELSXKVDFNWKRLLQKKTDEINRLNGLYKRMLSNWGVKLFEGEGKIVGPNEVEVTQLDGTKLSYSAKHILIATGGRAQRPNIPGQELGITSDEALSLEDLPKHAVVLGGGYIAVEFASIWRGMGSTVDLVFRKELPLRGFDDEMRAAVARNLEGRGINLHPRTNLTQLIKTEDGIKVITDHGEELIADAVLFATGRAPNSKRLNLETVGVELDNTGAIKVDEYSRTSIPSIWAVGDVTNRMNLTPVALMEASYFAKTVFGGQTIKPDYSNIPYAVFSIPPLSVVGLSEEQAIEQTNGDLLVFTSTFNPMKNTISGRQEKTVMKLVVDAETDKVLGASMCGPDAPEIMQGIAVALKCGATKAQFDSTVGIHPSAAEEFVTMRSVTRRVAGTGSVKPKTNL

SEQ ID NO: 31669 - protein, 431 aa, Leptospira interrogans serovar Copenhageni str. Fiocruz L1-130
MSMDKPKTNHNSRVAITGIGVILPNTYSVDTFWKNLSEGNSQIDTITRFPTDDMPVKVAAEMNDFDWKKFLPDLDEKHSKHYNRETFAIMSAMEEARRDAKLEKDSVDPSKVGFIDSSSRASLAWWEHAWKLYHEEKDPNVFDRYSVLTSMASNPTNLTAIYANVQGFVTTITAACVGGHHAISLCYQAIRKGRAEVMYAGGHEFPLIKPLMMMYSDPVSSVMSSEKDNPKSAIKPYDRNRDGFILGEGAAVLCMERMDHAIARGARIYAEVLGTFSYNEADHAMRMDLTGKKAANGLNRLLKISGLNLGDIDYFCGHGTATINNDMAESRALKILYNGLARNKWAPLGSIKPIFGHTFGAAGIINVAATALMLEKQILCPTINLKDVDPECDHDHITDGARKVRLRNAISMAFAIGSQSSFVSLTAPDLL

SEQ ID NO: 31670 - protein, 333 aa, Nitrosospira sp. HBN8222A
MTIKVGINGFGRIGRMVFRAAVQNFPDIEVVAINDLLEPDYLAYMLQHDSVHGRFKGDVSIEDSTLIVNGKKIRLTAIKDPAELKWGEVGAEVVVESTGLFLTKESCQKHIAAGAKKVIMSAPSKDDTPMFVYGVNNDTYDGQAIISNASCTTNCLAPVAKVLNDTFGVKRGLMTTVHAATATQKTVDGPSNKDWRGGRGILENIIPSSTGAAKAVGKVIPELNTKLTGMAFRVPTSDVSVVDLTVELEKEASYDEICDAMKKASEGSMKGVLAYTDQKVVSTDFRGESATSIFDAEAGKALDGNFVKVVSWYDNEWGYSSKILEMVRVVAGK

SEQ ID NO: 31671 - protein, 380 aa, Triticum aestivum
MVKAMAGCPAKMGFRMPAEWEPHEQCWMGWPERPDNWREHAEPARKTFERTAIAISKFEPVTICASAKQYPRVHELMEHQPNIRVVEMSMNDSWFRDTGPTFITREGGSDIGLAEQTIAGIDWEFNAWGGILGGGCFDDWSLDRSIAKKIVEIERIPRFAHTMVLEGGSIHVDGEGTCITTEECLLNPNRNPHMTKLEIENELKDFLGVTKIIWIPLGLHGDEDTNGHVDNLCCFIKPGVILLSWTDDENDPQYEISVKALSALTQAVDAKGRQIEVVKIHVPGPLYITKEEGEGVLATGHAVPRVPGKRLAASYVNFYPANGGIIAPAFGDKKRDEEAREVLQKAFPDHEVVMVEGAREIVLGGGNIHCITQQQPVRPS

SEQ ID NO: 31672 - protein, 160 aa, Salmonella enterica
AGASLGLWEICIIWGLGISLAVYLTAGISGGHLNPAVTIALWLFACFPKQKVLPYIIAQFAGAFGGALLAYVLYSSLFTEFETAHHMVRGSVESLQLASIFSTYPAAALNVWQAALVEVVITSILMGMIMALTDDGNGIPKGPLAPLLIGILVAVIGAST

SEQ ID NO: 31673 - protein, 333 aa, Nitrosospira sp. PM2
MTIKVGINGFGRIGRMVFRAAVQNFPDIEVVAINDLLEPDYLAYMLQHDSVHGRFKGDVSIEDSTPIVNGKKVRLTAIKDPAELKWGEVGAEVVVESTGLFLTKESCQKHIAAGAKKVIMSAPSKDDTPMFVYGVNNDSYDGQAIISNASCTTNCLAPVAKVLNDTFGVKRGLMTTVHAATATQKTVDGPSNKDWRGGRGILENIIPSSTGAAKAVGKVIPELNTKLTGMAFRVPTSDVSVVDLTVELEKEASYEEICNAMKKASEGAMKGVLAYTDQKVVSTDFRGESATSIFDAEAGMALDGNFVKVVSWYDNEWGYSSKILEMVRVVAGK

SEQ ID NO: 31674 - protein, 216 aa, Symbiobacterium thermophilum IAM 14863
MKLFIDTANVDDIREVASWGVLSGVTTNPSLVAKEGRDFMQVLREILEIVDGPISAEVISLQADDMVEEARQYYELHKNIVIKLPMTAEGLKACARLSAKGVRCNMTLIFSPNQALLCARAGAAFVSPFVGRLDDISTDGIQLIRDTAEIFDLHGIDTEIIAASIRTPGQVVEAAKAGAHIATIPPKVFHQMLKHPLTDSGIERFLKDWEAAKGRV

SEQ ID NO: 31675 - protein, 131 aa, Salmonella enterica
LWEICIIWGLGISLAVYLTAGISGGHLNPAVTIALWLFACFPKQKVLPYIIAQFAGAFGGALLAYVLYSSLFTEFETAHHMVRGSVESLQLASIFSTYPAAALNVWQAALVKVVITSILMPMIMALTDDGN

SEQ ID NO: 31676 - protein, 153 aa, Bromus inermis
MAFGQQERSELDRMAREGETVVPGGTGGKTLEKQENLAEGRSRGGQTRKEQLGEEGYKEMGRKGGETRKEQLGEEGYKEMGRKGGETRKEQLGEEGYKEMGRKGGETRKEQLGEEGYSEMGRKGGLSTKDESGGERAAREGIDIDESKFKTKS

SEQ ID NO: 31677 - protein, 450 aa, Agrobacterium tumefaciens str. C58
MTILPNSVEARDIAYQMHPNVNLRKFEKTGGLVIESGEGIYVTDSSGKRYIEAMAGLWSVALGFGEQRLVDAATKQMQKLPYYHTFSYKTHGPSVDLAELLIELSPVPMSKVHFTSSGSEANDLVAKMVWYRSNALGKKDKKKIIGRIKGYHGVTIASASITGLPRNHESFDLPLDRMLHTACPSYVHFGKDGESEAEFTARILGELEELILREGPETVAAFWGEPVMGAGGVLLPPEGYWEGVQAILKKYDILLVVDEVICGFGRTGKMFACETYDIKPDVLVVSKQISSSYMPLSAIIMNDSFYQPIADESDRIGSFGHGYTASGHPVATAVGLENLKIIQERDLVGNVARLEGKFLDHLKALADHPLIHSSRGIGLLGALEVKPWDGTKPGDTTLALAAAIESEGVITRPIGESICFCPPLIITAEQLDELFAGVKRGLDNALAARG

SEQ ID NO: 31678 - protein, 410 aa, Pseudomonas aeruginosa UCBPP-PA14
MSDYEPLRLHVPEPTGRPGCKTDFSYLHLSPAGEVRKPPVDVEPAETSDLAYSLVRVLDDDGHAVGPWNPQLSNEQLLRGMRAMLKTRLFDARMLTAQRQKKLSFYMQCLGEEAIATAHTLALRDGDMCFPTYRQQGILITREYPLVDMICQLLSNEADPLKGRQLPIMYSSKEAGFFSISGNLATQFIQAVGWGMASAIKGDTRIASAWIGDGATAESDFHTALTFAHVYRAPVILNVVNNQWAISTFQAIAGGEGTTFANRGVGCGIASLRVDGNDFLAVYAASEWAAERARRNLGPSLIEWVTYRAGPHSTSDDPSKYRPADDWTNFPLGDPIARLKRHMIGLGIWSEEQHEATHKALEAEVLAAQKQAESHGTLIDGRVPSAASMFEDVYAELPEHLRRQRQELGV

SEQ ID NO: 31679 - protein, 154 aa, Zea mays
  misc_feature (144)..(144): Xaa can be any naturally occurring amino acid
  unsure (1)..(154): unsure at all Xaa locations
MNALAATTRNFRRASKLLGLDSKLEQSLLIPFREIKVECTIPKDDGSLATFVGFRVQHDNARGPMKGGIRYHNEVDPDEVNALAQLMTWKTAVAAVPYGGAKGGIGCSPGELSRSELERLTRVFTQKIHDLIGTHTDVPAPDTXTNAQTMAWML

SEQ ID NO: 31680 - protein, 139 aa, Arabidopsis lyrata subsp. petraea
STGKRSEREEDTDPQGSRGISDDEDGDNSRKKLRLSKDQSVILEETFKDHSTLNPKQKQALAKQLGLRARQVEVWFQNRRARTKLKQTEVDCEFLRRCCENLTEENRRLQKEVTELRALKLSPQFYMHMSPPTTLTMCP

SEQ ID NO: 31681 - protein, 312 aa, Burkholderia fungorum LB400
MATLICGSLAYDNIMTFEGRFREHILPEQVHILNVSFLVPTMRREFGGCAGNIAYSLHLLGGDARIMGALGSVDAQLYMDRFRQLGLSTESVLVVPDAYSAQAMITTDLENNQITAFHPGAMMQSHLNRADQARGITLGIVAPDGYDGMIQHSEHLAAAGVPFIFDPGQGLPLFDGASLRRMIELATYVAVNDYEAKLVSNKTGWSIEEIAGKVEALIVTLGEQGAQIHHAGGVEDIPAVKAQQVLDPTGCGDAFRGGLLYGIGNKLGWATTGRLASLMGALKIEHQGPQNYAPSRAEINERFKQAFGYDLP

SEQ ID NO: 31682 - protein, 338 aa, Bordetella pertussis Tohama I
MKVFYDKDCDLSLVKGKTVAIIGYGSQGHAHALNLHDSGVKVVVGLRKGGASWNKAANAGLEVAEVAEAVKRADIVMMLLPDENIAAVYRDEVHANIKAGAALAFAHGFNVHYGQVVPREDIDVIMAAPKAPGHTVRSTYSQGGGVPHLIAVYQDKSGSARDVALSYASANGGGRAGIIETNFREETETDLFGEQAVLCGGTVELIKAGFDTLVEAGYAPEMAYFECLHELKLIVDLIYEGGIANMNYSISNNAEFGEYETGPKVVTDATRQAMRECLTAIQTGEYAKKFILENAAGAPTLTSRRRINAESQIEQVGGKLRAMMPWIAANKLVDKAKN

SEQ ID NO: 31683 - protein, 497 aa, Burkholderia mallei ATCC 23344
MFRQLFIGALPLSSSISIAPAVVWFCDDLRVSDHPALMRAAESGRPVIGVYVFDERAGGRPLGGAARWWLHGSLRALGAALAALGGTLALLRGDEHDTIVSFAAALGAGAVYWSRRYALAARAVDNAVQTALDAQGIAVETFNASLLFEPGDLVNADGRPYQVFSAYWRAAMRRGVPAPPLGAPRRLNGGALPAALARQCVALDALGLEPTGPDWAGGLRDAWRFGEDAAHRRLRAFVDSRLGGYAAERDRPGIASTSRLSPYVRFGNLSARQLWHAAADAYAHGAATQADLDKFLSELGWREFGWTQLHHFPDLPRRNLRHTLDGMPWRDDPAALAAWRRGATGYPFVDAGMRELWATGWMHNRVRMVCASFLVKHLLIDWRAGEAWFWDTLVDADAASNAANWQWVAGCGADAAPYFRIFNPVAQGRKFDPDGAYVRRWVPELAGLPPATIHEPWAAPGAQLAAAGVRLGETYPLPIVAYDAARRRALDAFGAIR

SEQ ID NO: 31684 - protein, 338 aa, Vibrio vulnificus YJ016
MKVLVTGGCGYIGSHACVALVRAGHQPIVLDNFSNSHPNVVARIETLIGQSLVVYQGDIRDRLVLDAIFDQHEIGAVMHFAGLKAVGESVEKPLEYYDNNLTGTLNLLAAMRVAHVYRLIFSSSATVYGDPKTVPITEAAPTGATTNPYGTSKHMVERCLSDFSAANPDWSITLLRYFNPIGAHPSGLIGEDPSGIPNNLMPFITQVAIGRRERLSIFGDDYPTEDGTGVRDYIHVQDLVEGHVAALEKRGNVRGLHTYNLGTGNGVSVLQMVAAMNRVLGRELPVRIEPRRAGDIAQCFAQADKAAQELGWKAQHDLTDMVEHSWHWQQRNPNGYQS

SEQ ID NO: 31685 - protein, 151 aa, Ashbya gossypii ATCC 10895
MSDERTFIAIKPDGVQRGLISKILSRFESRGYKLVGIKLVTPTENLLKQHYAEHVEKPFFPKMLAYMTSGPILATVWEGKDVVKQGRVILGATNPLNSAPGTIRGDFALDMGRNVCHGSDSVESAQREIDLWFKKEELVDWKLNQLSWIYE

SEQ ID NO: 31686 - protein, 238 aa, Triticum aestivum
  misc_feature (36)..(36): Xaa can be any naturally occurring amino acid
  misc_feature (52)..(52): Xaa can be any naturally occurring amino acid
  misc_feature (78)..(78): Xaa can be any naturally occurring amino acid
  unsure (1)..(238): unsure at all Xaa locations
TGFSPHPKGPPNPGPLFPGFQGTRLFPTASSPGSPXPHLILDDLLRGFPRPXVHGHQIGACTWPPRAAEPYVTKCLAXDRGSTSVLLGFRVSGSMVSDASGPVWRPDRSELKGTDIPGVRRMLRRYVSSAGGDGGGEDCALAAAVYGGEGGVLAQLRELKAWFEVQTLFHFYSASVLLSYDANAVTAPGGAPRVKLVDFAHVVESEGVIDHNFLGGLCSLIKFIDDIVSSDKAPPVQV

SEQ ID NO: 31687 - protein, 283 aa, Arabidopsis thaliana
MGNANGKDEDAAAGSGGADVTSSSARSNGGDPSARSRHRRPSSDSMSSSPPGSPARSPSPFLFAPQVPVAPLQRANAPPPNNIQWNQSQRVFDNPPEQGIPTIITWNQGGNDVAVEGSWDNWRSRKKLQKSGKDHSILFVLPSGIYHYKVIVDGESKYIPDLPFVADEVGNVCNILDVHNFVPENPESIVEFEAPPSPDHSYGQTLPAAEDYAKEPLAVPPQLHLTLLGTTEETAIATKPQHVVLNHVFIEQGWTPQSIVALGLTHRFESKYITVVLYKPLTR

SEQ ID NO: 31688 - protein, 362 aa, Arabidopsis thaliana
MDPATNSPIMPIDLPIMHDSDRYDFVKDIGSGNFGVTRLMTDRVTKELVAVKYIERGEKIDENVQREIINHRSLRHPNIVRFKEVILTPSHLAIVMECAAGGELYERICNAGRFSEDEARFFFQQLISGVSYCHAMQICHRDLKLENTLLDGSPAPRLKICDFGYSKSSVLHSQPKSTVGTPAYIAPEILLQQEYDGKLADVWSCGVTLYVMLVGAYPFEDPQEPRDYRKTIQRILSVTYSIPEDLHLSPECRHLISRIFVADPATRITIPEITSDKWFLKNLPGDLMDENRMGSQFQEPEQPMQSLDTIMQIISEATIPTVRNRCLDDFMADNLDLDDDMDDFDSESEIDVDSSGEIVYAL

SEQ ID NO: 31689 - protein, 654 aa, Arabidopsis thaliana
MKYVLVTGGVVSGLGKGVTASSIGVLLKACGLRVTSIKIDPYLNTDAGTMSPFEHGEVFVLDDGGEVDLDLGNYERFLDIKLTRDNNITTGKIYQHVIAKERKGDYLGKTVQVVPHVTDAIQDWIERVAVIPVDGEEDPADVCVIELGGTIGIQKKTGFFFFGLLFLLLLCKQRLFVFAGDIESAPFIEALGQFSYRVGPGNFCLVHVSLVPVLNVVGEQKTKPTQHSVKGLRGLGLTPDILACRSTKPLEDNVKEKLAQFCHVPLEYIFTLYDVPNIWRIPLLLKDQKAHLAISKVLNLASILNEPSLGEWTSRAELCDNLHVPVGLSSQLLFRNRNLYIYFLTHQIILQVRIAVVGKYTGLSDAYLSVLKALLHASVACRKKLVVDWVPACDLEKETEKENPDAYKAAWKLLKGVDGILVPGGFGDRGVEGKILAAKYARENKIPFLGICLGMQIAVIEFARSVLSLQDANSTEFNPETKHPCIIFMPEGSKTHMGGTMRLGSRKSIFNVKDSKSAKLYENKSFVDERHRHRYEVNPDMVERLEKAGLSFAAKDETGKRMEIIELPNHPFFIGAQFHPEFKSRPGKASPLFLGLIAASCGELDTVLNPASAHQHSISNGPTNIFINGTSKKSPNGLADVRYNNGYCNGLYTR

SEQ ID NO: 31690 - protein, 1102 aa, Desulfotalea psychrophila LSv54
MKEFRNGWNRASVWLTIILGLLLSGIMAYINYQQVSENTIAQFQREADRQAAAIRRDIEVDLSILTPAVAFFDASHLVERYEFRLWFQSVKVVDNSLDVLGWIPRVANSQRAKFVDEARAVGLSGFRFSELQNGKLVRAGVREKYFPVFYIEPTGVNGAAFGFDLSSEPKRRTMLMQARDSGKVTASQVIHLVQHKKKRFSFLVVAPVYQGLASTIAERRETLRGFVVAAFAVDTIGERALAQIDPGQFHIMMHIHDGAELIYPAGGKCPGEQYFKEGIRTSGLHVIREIAVAGRQWRVCLSPSEAGQIQGFPPSAMAVFIVGIVLTVLLALQFRNNALRTSEIEWQVAEKTAQLRKSELRAEAIIDKAVIPIITIDETGIVQSFNRSAEKMFGYGPEEIIGRNVRMLMPEPHRSSHNKYVDHYLKTGRMKAIGVGNKLTGVRKDGVEFPMHLSVSEVRLEKRIFVGMVVDLSEINRAEEALRKHRDNLARLVEERTYELKIAKEAAETANIAKSAFLANMSHEIRTPMNSVLGFIQITLESRLLCAELRRHLETAYSSAKGLLIIINDILDVSKLESGEFALEATCLDMPRIVQEALKTVESQAEEKGIGLDFHFDADLPHCYLGDPTRLGQVIINLVGNAIKFTKTGKITIGVRASDQGDASLHFSVADRGIGMTAEQAANIFNPFTQADISTARCYGGTGLGLTISKQLVELMGGRIWVESELGRGVTFHFTAQLPVISPCRATGVDHALTGEASSPESPRRFQILLAEDVPGNATLAQLRLEQQGHRVRHVWNGSQAVEMYKGGTFDLILMDVMMPEMDGIEATRKIRALERESKGHITIIALTASIMKEDRQRYMRAGMDAVVGKPIILEGLFATMERVVPKGIGSLNEETFPGDQARQDIDLTPLADVVDIDRGLASWRDPLVFAKSLASFADRHSADAEKIQQLLDENSKEARMISHTLKGLAGNLSLPEVARLATEINAALKAGSHEPAATLLPSLQAALKNAAVVIRKLKMPVARIATPEFDSKAVSSLLQELLIMLDQDDPVVAEPGLSKLGEYLTQDDMINIRRAIDAFDFARAKSQTRILAERLGIQLEG

SEQ ID NO: 31691 - protein, 300 aa, Vibrio fischeri
GFGRIGRFVFRASVERNDIEVVGINDLIDVEYMAYMLKYDSTHGRFNGTVEVVDGNLVVNGKTVRVTAERNPEDLKWDAINVDVVAEATGIFLDDATARKHITAGAKKVVLTGPSKDATPMFVMGVNHTSYAGQDIVSNASCTTNCLAPVAKVLNDKFGIESGLMTTVHATTATQKTVDGPSAKDWRGGRGASQNIIPSSTGAAKAVGVVLPELNGLLTGMAFRVPTANVSVVDLTVNLKTAASYEAICAAMKEASEGELKGVLGYTEDAVVSQDFIGEVQTSVFDAAAGVALTDKFVKV

SEQ ID NO: 31692 - protein, 479 aa, Bordetella bronchiseptica RB50
MTNKTLTTAAGAPVADNNNTMTAGPRGPALLQDVWFLEKLAHFDRERIPERVVHAKGSGAYGTFTVTHDISRYTRARIFAEVGKQTPLFLRFSTVAGERGAADAERDVRGFAIKFYTDEGNWDLVGNNTPVFFIRDPLKFPDFIHTQKRDPKTNLRNATAAWDFWSLNPESLHQVTILMSDRGLPQNYRQQHGFGSHTYSFVNDAGERFYVKFHFKSQQGIACYTDGEAAELVGRDRESAQRDLFQNIEQGQFPRWTLKVQVMPEAEAATYHINPFDLTKVWPHADYPLIEVGVLELNKNPENYFAEVEQAAFTPANVVPGIGFSPDKMLQGRLFSYGDTHRYRLGINHHQIPVNAPRCPFHSFHRDGMGRVDGNGGATLNYEPNSFGEWREAKHAAEPPLALDGQAADRWNHRVDEDYYSQPGALFRLMNDDQKQQLFGNIGRHMAGVPEEIQRRQLEHFRRADPAYAAGVAKALGLK

SEQ ID NO: 31693 - protein, 313 aa, Stranvaesia davidiana
GGLGDVLGGLPPAMAANGHRVMTISPRYDQYKDAWDTEVTVELKVGDKSETVRFFHCYKRGVDRVFVDHPLFLEKVWGKTASKIYGPTAGVDFKDNQLRFSLLCQAALVAPRVLNLNSSKYFSGPYGEEVVFVANDWHTALLPCYLKAIYKPKGIYKTAKVAFCIHNIAYQGRFAFADFALLNLPNGFKSSFDFIDGYDKPVKGRKINWMKAGILESDKVLTVSPYYAEELVSSVENGVELDNIIRKTGIQGIVNGMDVQEWNPLTDKYTTVKYDASTVADAKPLLKEALQAEVGLPVDRDIPVIGFIGRLEE

SEQ ID NO: 31694 - protein, 313 aa, Stranvaesia davidiana
GGLGDVLGGLPPAMAANGHRVMTVSPRYDQYKDAWDTGVPVEIEVGGRVETVRFFHCYKRGVDRVFVDHPSFLERVWGKTGSKIYGPSAGEDYKDNQFRFSLLCQAALEAPRVLNLNSNKYFSGPYGDEVVFIANDWHTALLPCYLKAIYKPEGIYENAKVVFGIHNIAYQGRFPISDFSVLNLPENLKGSFDFIDGYNKPVKGRKINWMKAGVLESDRVVTVSPFYAQELVSGEDKGVELDNIIRKTGITGIVNGMDVQEWNPATDKYLGTKYDNTTVLDAKPLVKEALQAEVGLPVDRNIPVIGFIGRLEE

SEQ ID NO: 31695 - protein, 469 aa, Citrus unshiu
MSSLSLTFFATTAPRVLAPSSSSNPKLSPSSYSFSAITARRHSTAVSFRSGARRTSATCPCASFSSFNVRAMAKMVQDRESAVSSSSASDEQNKKMLNIEVNHSRTFLDVRSEQDLLSGIGREVEAGRLPSNLANGMEELYHNYKNAVFQSGNSRADEIVLSNMAVAFDRVLLDIEEPFTFSSYHKSMREPFDYYMFGQNYIRPLVDFRSSYVGNVSLFFEMEEKLNQGHNIVLISNHQTEADPAIIALLLESTNPHVAENLTYIAGDRVITDPLCKPFSMGRNLICVYSKKHMLDVPELIEMKRKSNTRSLKEMALLLRGGSQIIWIAPSGGRDRPDPVTGEWYPAPFDTSSIDNMRRLAEHSGIPGHIYPLALLCHDIMPPPPQVEREVGEKRVISFHGAGLSVAPEISFADIITASKNPEEAKEVYTQAFYNSVTEQYNVLKSAIHGKQGLKASIPSVSLSQPWGD

SEQ ID NO: 31696 - protein, 693 aa, Candida albicans SC5314
MTSLQQQRVKYGPPHHIKRRPYHPILESLEFQTNQHLIQEYSLDIVNTLSQLESLTLVNPAMIDLQPEIQWFMRPFLLDFLIELHSSFKLQPTTLFLCLNIIDRYCAKRIVFKRHYQLVGCTALWIASKYEDKKSRVPTLKELTIMCRNAYDEEMFVQMEMHILSTLDWSIGHPTLEDCLQLAIDSNNLSNNTTNDIENKSVRPNRKSSISSAVTAVARFLCELSLYDKYFLSVPPSLIAITANLLSCSMLQIPHASITLKNLIEQEIINPQQKKQKKAFSSNSSRTTTASYTHQNQSDVRHSSFDEDIDLDSGDEGDDDEDYIDEFYETNNYDDTNATTFDESISKSTTVNDENQPPQIHTPFLSGLDEDSILSIKKICLMLIIQLSKVTEVLSKKYENLGVIQVINNFHSNYKFIIQSIYENQELLLNTINDSTNNNEIDYKLIQSSEILLQFPKFDEYLTEDEDENVSTDDEANSQPQGYDGSGSDGNNQLFTPKSPNAFSSNSSLTLNNHPQSMVPVTPPSATSQYSLFSNKNNRTHESTSGLNSTCNTPTHISISSFAPPQPPPGSILKPKLTSINSTNSLKIKKLTSNSNSSNINIHHGHHNTKQEKRYSHISIGSNSSSKYDGFSPIKSISTNGSLITNNGSLITNNGSFTNIVNNTNSSSPLMNQQQQQQVTQSSLYQHHHQYHQ

SEQ ID NO: 31697 - protein, 422 aa, uncultured proteobacterium QS1
MEKLVNSGSRRVAVTGYGAICSLGHGVDAIWDGIMNYRIGYRKHCFDDPNIHARYFGFIDDFGRESMRPFSKNISKMLPLFAKYSLVATHEAIQMAFGDVSLDECVSPFDRGVILGTGWGGLDTANSNNNEYREHGISTSFATVMSMCNAATASITMNWNFRGIQNSPVAACATGTIAIGEAYEAIKSGRAKVMIAGGSESLKEQFNVWSVDVIQALSKEQEDPRRACCPFSKGRCGFVLSEGAAVLCLEDYDFALARGANILGEVTGYANYSDAYDMTAPAEDMQARVRVIREVCSQAALKPEQIDYVNLHGTSTPLNDVNETNSIKMALGDAAYGIPMSSTKSYTGHLIGAAGSLEAVFCLKAMAEGIVPATLHLDAADPACDLNYVPHEHLRGQTLNNVLNLSFGFGGANAGIMIRKVN

SEQ ID NO: 31698 - protein, 324 aa, Ehrlichia ruminantium str. Welgevonden
MVKAVVIDKTGGVEVLKYVDCNVNEPKDDEVLIKHTAIGLNRYDLECCNGTRKIKKFPAVLGSEAVGIIEKLGKNVEVFNIGDRVGYCTVSGGAYSEKRIINQKYLVKIPDDITDQIAAAVLFKGMTAHYLTHVVYSTRPKSFALVHGATGGVGQILCQWASYKGSKVIGVTSSDDRANIALRSGCSYIVNSNSESFVKQVMEITNGAGVNVVYDPIGALVGKVSFESLGLFGIYISYGQISGPLVNISASMMSSRSLFFTAPLIFHYKRSSFDLSMTAMELFEVMRKGHIKVNINKIYRFDDIITAHQDLEKRNLTGSNVILL

SEQ ID NO: 31699 - protein, 333 aa, Nitrosospira sp. PJA1
MTIKVGINGFGRIGRMVFRAAVQNFPDIEVVTINDLLEPDYLAYMLQHDSVHGRFKGDVSIEDSTLIVNGKKIRLTAIKDPAELKWGEVGAEVVVESTGLFLTKESCQKHIAAGAKKVIMSAPSKDDTPMFVYGVNNDTYDGQAIISNASCTTNCLAPVAKVLNDTFGVKRGLMTTVHAATATQKTVDGPSNKDWRAGRGILENIIPSSTGAAKAVGKVIPELNTKLTGMAFRVPTSDVSVVDLTVELEKEASYEEICDAMKKASEGSMKGVLAYTDQKVVSTDFRGESATSIFDAEAGMALDGNFVKVVSWYDNEWGYSSKILEMVRVVASK

SEQ ID NO: 31700 - protein, 313 aa, Stranvaesia davidiana
GGLGDVLGGLPPAMAANGHRVMTISPRYDQYKDAWDTEVTVELKVGGKTETVRFFHCYKRGVDRVFLDHPLFLEKVWGKTASRVYGPVAGVDFKDNQLRFSLLCQAALEAPRVLNLNSSKYFSGPYGEEVVFIANDWHTALLPCYLKAVYKPIGIYSTAKVAFCIHNIAYQGRFAFADFALLNLPDEFKSSFDFIDGCEKPVKGRKINWMKAGILESDKVLTVSPYYAEELVSAVEKGVELDNIIRKTGIFGTVNSMDVQEWNPLTDKYTTIKYDASTVADAKPLLKETLQAEVGLPVDRDVPVIGFIGRLEE

SEQ ID NO: 31701 - protein, 333 aa, Nitrosospira sp. TCH711
MTIKVGINGFGRIGRMVFRAAVQNFPDIEVVAINDLLEPDYLAYMLQHDSVHGRFRGDVSIEDSTLIVNGKKIRLTAIKDPAELKWGEVGAEVVVESTGLFLTKESCQKHIAAGAKKVIMSAPSKDDTPMFVYGVNNDTYDGQAIISNASCTTNCLAPVAKVLNDTFGVKRGLMTTVHAATATQKTVDGPSNKDWRGGRGILENIIPSSTGAAKAVGKVIPELNTKLTGMAFRVPTSDVSVVDLTVELEKEASYEEICDAMKKASEGSMKGVLAYTDQKVVSTDFRGESATSIFDAEAGMALDGNFVKVVSWYDNEWGYSSKILEMVRVVASK

SEQ ID NO: 31702 - protein, 313 aa, Torminalis clusii
GGLGDVLGGLPPAMAANGHRVMTISPRYDQYKDAWDTGVTVELKVGDKTETVRFFHCYKRGVDRVFVDHPLFLEKVWGKTASKIYGPTAGVDFKDNQLRFSLLCQAALVAPRVLNLNSSKYFSGPYGEEVVFIANDWHTALLPCYLKAIYKPKGIYKTAKVAFCIHNIAYQGRFSFADFALLNLPNEFKSSFDFIDGYDKPVKGRKINWMKAGILESDKVLTVSPYYAEELVSSVEKGVELDNIIRKTRIQGIVNGMDVQEWNPLTDKYTTVKYDASTVADAKPLLKEALQAEVGLPVDRDIPVIGFIGRLEE

SEQ ID NO: 31703 - protein, 333 aa, Nitrosospira sp. TCH716
MTIKVGINGFGRIGRMVFRAAVQNFPDIEVVAINDLLEPDYLAYMLQHDSVHGRFKGDVSIEDSTLIVNGKKIRLTAIKDPAELKWGEVGAEVVVESTGLFLTKESCQKHIAAGAKKVIMSAPSKDDTPMFVYGVNNDTYDGQTIISNASCTTNCLAPVAKVLNDTFGVKRGLMTTVHAATATQKTVDGPSNKDWRGGRGILENIIPSSTGAAKAVGKVIPELNTKLTGMAFRVPTSDVSVVDLTVELEKEASYEEICDAMKKASEGSMNGVLAYTDQKVVSTDFRGESATSIFDAEAGMALDGNFVKVVSWYDNEWGYSSKILEMVRVVASK

SEQ ID NO: 31704 - protein, 313 aa, Torminalis clusii
GGLGDVLGGLPPAMAANGHRVMTVSPRYDQYKDAWDTGVPVEIEVGGRVETVRFFHCYKRGVDRVFVDHPSFLERVWGKTGSKIYGPSAGEDYKDNQFRFSLLCQAALEAPRVLNLNSNKYFSGPYGDEVVFIANDWHTALLPCYLKAIYKPKGIYENAKVVFCIHNIAYQGRFPISDFSVLNLPENLKGSFDFIDGYNRPVKGRKINWMKAGILESDRVVTVSPFYAQELVSGEDKGVELDNIIRKTGITGIVNGMDVQEWNPATDKYLDTKYDNTTVLDAKPLVKEALQAEVGLPVDRNIPVIGFIGRLEE

SEQ ID NO: 31705 - protein, 256 aa, Triticum aestivum
  misc_feature (69)..(69): Xaa can be any naturally occurring amino acid
  misc_feature (80)..(80): Xaa can be any naturally occurring amino acid
  misc_feature (115)..(115): Xaa can be any naturally occurring amino acid
  misc_feature (138)..(138): Xaa can be any naturally occurring amino acid
  unsure (1)..(256): unsure at all Xaa locations
KKSQPILSPINPRLLDPCFPPPQDQDLGKTLTGKAITLELESSTHMDNVKAKIQDKEAIPPDQRRLIFXAGKQLEDGRTXLADYNIQKESTLHLVLRLRGGMQIFVKTLTGKTIXTLEVDSSDTIDNVKAKIQDKEGXIPPDQQRLIFAGKQLEDGRTLADYNIQKESTLHLVLRLRGGMQIFVKTLTGKTITLEVESSDTIDNVKAKIQDKEGIPPDQQRLIFAGKQLEDGRTLADYNIQKESTLHLVLRLRGGQ

SEQ ID NO: 31706 - protein, 213 aa, Zea mays
  misc_feature (80)..(80): Xaa can be any naturally occurring amino acid
  unsure (1)..(213): unsure at all Xaa locations
GLSLAESGGFVKAPGGAPANVACAIAKLGGSSAFVGKFGDDEFGHMLVNILKQNNVNSEGCLFDKHARTALAFVTLKHDXGLVRRARVFHYGSISLISEPCRSAHMAAMRAAKAAGVLCSYDPNVRLPLWPSPDAAREGILSIWKEADFIKVSDDEVAFLTRGDANDEKNVLSLWFDGLKLLVVTDGDKGCRYFTKDFKGSVPGFKVDTVDTT

SEQ ID NO: 31707 - protein, 355 aa, Arabidopsis thaliana
MSMQQETSHMTAAPQTNGHQIFPEIDMSAGDSSSIVRATVVQASTVFYDTPATLDKAERLLSEAAENGSQLVVFPEAFIGGYPRGSTFELAIGSRTAKGRDDFRKYHASAIDVPGPEVERLALMAKKYKVYLVMGVIEREGYTLYCTVLFFDSQGLFLGKHRKLMPTALERCIWGFGDGSTIPVFDTPIGKIGAAICWENRMPSLRTAMYAKGIEIYCAPTADSRETWLASMTHIALEGGCFVLSANQFCRRKDYPSPPEYMFSGSEESLTPDSVVCAGGSSIISPLGIVLAGPNYRGEALITADLDLGDIARAKFDFDVVGHYSRPEVFSLNIREHPRKAVSFKTSKVMEDESV

SEQ ID NO: 31708 - protein, 143 aa, Salmonella enterica
IIWGLGISLAVYLTAGIFGGHLNPAVTIALWLFACFPKQKVLPYIIAQFAGAFGGALLAYVLYSSLFTEFETAHHMVRGSVESLQLASIFSTYPAAALNVWQAALVEVVITSILMGMIMALTDDGNGIPKGPLAPLLIGILVA

SEQ ID NO: 31709 - protein, 464 aa, Pseudomonas aeruginosa UCBPP-PA14
MSQILKTSLLIVGGGPGGYVAAIRAGQLGIPTVLVEGAALGGTCLNVGCIPSKALIHAAEEYLKARHYAGRSALGIQVQAPSIDIARTVEWKDAIVDRLTSGVAALLKKHGVDVVQGWARILDGKSVAVELAGGGSQRIECEHLLLAAGSQSVELPILPLGGKVISSTEALAPGSLPKRLVVVGGGYIGLELGTAYRKLGVEVAVVEAQPRILPGYDEELTKPVAQALRKLGVELYLGHSLLGPSENGVRVRDGAGEEREIAADQVLVAVGRKPRSEGWNLESLGLDMNGRAVKVDDQCRTSMRNVWAIGDLAGEPMLAHRAMAQGEMVAELIAGKRRQFAPVAIPAVCFTDPEVVVAGLSPEQAKDAGLDCLVASFPFAANGRAMTLEANEGFVRVVARRDNHLVVGWQAVGKAVSELSTAFAQSLEMGARLEDIAGTIHAHPTLGEAVQEAALRALGHALHI

SEQ ID NO: 31710 - protein, 124 aa, Salmonella enterica
SGGHLNPAVTIALWLFACFPKQKVLPYIIAQFAGAFGGALLAYVLYSSLFTEFETAHHMVRGSVESLQLASIFSTYPAAALNVWQAALVEVVITSILMGMIMALTDDGNGIPKGPLAPLLIGIL

SEQ ID NO: 31711 - protein, 476 aa, Glycine max
MGGGFRVLHLVRPFLSFLPEVQTADRKVPFREKVIYTVISLFIFLVCSQLPLYGIHSTTGADPFYWMRVILASNRGTVMELGITPIVTSGLVMQLLAGSKIIEVDNNVREDRALLNGAQKLLGILIAVGEAVAYVLSGMYGSVGQLGVGNAILIIIQLCFAGIIVICLDELLQKGYGLGSGISLFIATNICENIIWKAFSPTTINSGRGAEFEGAVIALFHLLITRTDKVRALREAFYRQNLPNVTNLLATVLIFLIVIYFQGFRVVLPVRSKNARGQQGSYPIKLFYTSNMPIILQSALVSNLYFISQLLHRKYSGNFFVDLLGKWKESEYGGGQSVPVGGIAYYITAPSSLADMAANPFHALFYLVFMLSACALFSKTWIEVSGSSARDVAKQLKEQQMVMPGHRESNLQKELNRYIPTAAAFGGICIGALTVLADFMGAIGSGTGILLAVTIIYQYFETFEKERASELGFFGF

SEQ ID NO: 31712 - protein, 414 aa, Arabidopsis thaliana
  misc_feature (47)..(47): Xaa can be any naturally occurring amino acid
  misc_feature (99)..(99): Xaa can be any naturally occurring amino acid
  misc_feature (125)..(125): Xaa can be any naturally occurring amino acid
  misc_feature (238)..(238): Xaa can be any naturally occurring amino acid
  unsure (1)..(414): unsure at all Xaa locations
MATLKCIDWQFSGSEAAKDAAAASLGSYTSALYALCDPHGKPILPPXNEILETSNTAEKAVVKAVLYGSGNAYAPSLGLAAAKSAVAEYLNQGLPKKLXTADDVFMTLGCKQAIELAVDILAKPXKANVLLPSPGFPWDLVRSIYKNLEVRHYNFLPEKNFEIDFDSVRALVDENTFAIFIINPHNPNGNTYSEAHLKQLAELAKELKIMVVSDEVFRWTLFGSNPFVPMGKFSSIKXWKVPGWQPGWLTLHDLDGVFRNTKVLQAAQDFLQINNNPPTVTRAAIPDILEKTSSKFFQKLGNFMKDKVEFGSCKLKYIPSLTCCMKPEACTFLGTELDLSSFVDIEDDQDFCNKLAKEENLVVLPGIAFSQKNWLRHSIDMETPVLEDALERLKSFCDRHSNKKAPLKDVNGVK

SEQ ID NO: 31713 - protein, 227 aa, Mannheimia succiniciproducens MBEL55E
MELVFIRHGLSEWNALNLFTGWRDVNLSEKGVEEAKEAGRKLKAAGFEFDIAFTSVLTRAIKTCNLVLEESNQLWVPQIKTWRLNERHYGGLQGLNKAEAAAEHGDEQVRIWRRSYDVLPPVLDPKDPNSAHNDRRYAHLPADVVPDCENLKVTLERVLPFWEDQIAPAIKAGKRVLVAAHGNSLRALAKHIEGISDADIMDLEIPTGQPLVYTLDDNLKVVSKRYL

SEQ ID NO: 31714 - protein, 497 aa, Synechococcus elongatus PCC 7942
MPRGVAPAFAGRKPKGWAWASTAVPDFQGGFKRLINRFQGSKLWLACVPLAATIAVFWGVAANAQGSADPVPSAQFLVNNLWLMVATVLVIFMNAGFAMVETGLCRQKNAVNVLAKNLIVFTLAATAYWFIGYSLMYGSPVVDGFLYFGKGGPLGFFFDPTVSAETIKNDGLISSLDFLFQAAFAGTAATIVSGSVAERIKFVDFIIFSLILTAVIYPIAGSWQWNVGSGWLNKAGFIDFAGSTVVHSVGGWAALIGAITLGPRMGKFQDGRPGALPGHNLAIATLGALILWIGWYGFNGGSVLAFNTAVPYVAVTTTLGGAAGGISATITSWSTSGKPDLSMVINGILAGLVGVTAGCDGFGMGGSFIVGLIAGVLVVFSVYTFENLKIDDPVGACSVHLVCGIWGTLAVGLFNLEKGLFYGGGFGQLGSQILGIISYGVWTVVASVIIWNILKALLGLRVSPEEELQGLDIGEHGMEAYSGFAKDASNALSSISE

SEQ ID NO: 31715 - protein, 327 aa, Agrobacterium tumefaciens str. C58
MARTILVTGGAGFIGSHICKALAQSGFKPIAYDNLSTGHADSVRWGPLIEGDILDGVLLKATLREFSPAFVIHCAANAYVGESVEDPRKYYRNNVGGSLSLLDACLDQNIGGLVFSSSCATYGVPQQLPIREETAQMPVNPYGRTKLIFEMALEDYAAAYGLRFVALRYFNAAGADPDGELYERHEPETHLIPRALMAAAARLPQLDVFGADYDTSDGTCIRDYIHVSDLADAHLAAVNYLSDGGETLRVNLGSGHGTSVGDIIRAIHRVTGQEVPVHFGARRAGDPPALFADIRRAEETLGFTPKRSDIDTIIRTAGPGFGLEARS

SEQ ID NO: 31716 - protein, 330 aa, Oryza sativa (japonica cultivar-group)
MACHISARSRYENYHEIYGGEVESRTSNYADLANKYYDLVTSFYEYGWGESFHFGSRWQGETLRESLKRHEHFLALQLGLKKGMKVLDVGCGIGGPLREIARFSSASVTGLNNNAYQISRGKELNFSVGLSETCNFVKADFMNMPIPDATFDAAYAIEATCHAPDAVGVYREICRVLKPGQLFALDEWCMTDKYDPGNSRHRSIKAEIELGNGLPDIRTTKQCIQALKDAGFEVVSVKDLAEDSPLPWYLPLDSSQFSLNGFRLTRVGRFITHMLVKTLECLHVAPQGSLRVSSFLETAAEGLVKGAKEGIFTPIFFVLARKPLDKQPEI

SEQ ID NO: 31717 - protein, 396 aa, Escherichia coli
MFENITAAPADPILGLADLFRADERPGKINLGIGFYKDETGKTPVLTSVKKAEQYLLENETTKNYLGIDGIPEFGRCTQELLFGKGSALINDKRARTAQTPGGTGALRVAADFLAKNTSVKRVWVSNPSWPNHKSVFNSAGLEVREYAYYDAENHTLDFDALINSLNEAQAGDVVLFHGCCHNPTGIDPTLEQWQTLAQLSVEKGWLPLFDFAYQGFARGLEEDAEGLRAFAAMHKELIVASSYSKNFGLYNERVGACTLVAADSETVDRAFSQMKAAIRANYSNPPAHGASVVATILSNDALRAIWEQELTDMRQRIQRMRQLFVNTLQEKGANRDFSFIIKQNGMFSFSGLTKEQVLRLREEFGVYAVASGRVNVAGMTPDNMAPLCEAIVAVL

SEQ ID NO: 31718 - protein, 332 aa, Psychrobacter arcticus 273-4
MAEKNYYDILGVKKDASDADIKKRYRKLVRQYHPDVSDAPDADNKIAEINNAYETIRDKDKRAEYDAMLNNPFAGQGGGGFGGQAGGAGQGGQRWEDIKDQFGDGEAYGDGGFRFDDIFSAFGRGARGQTNGQAGGQSQYGGFGSQDSKGQDQHAEITVDLASVYNGDDYSIKLNVPIRQPNGSVDYDNKTLKIKIPKGITDGKQIRLAGQGAAGSGSGKNGDLFLKVKLSHAANIRIEGADVYQTVNIAPWEAALGEKINVSTPAGTLGVTIPKNSKSGSNLRLKGKGIPAKQAGDLYLTLNIVNPHINSEAATNAYEALKQAFADTTIER

SEQ ID NO: 31719 - protein, 613 aa, Moorella thermoacetica ATCC 39073
MCGITGWVDWELDLTGQKNILEAMTATLACRGPDAAGTWVAPRVALGHRRLVVVDPAGGGQPMVRRRGNQTFVLTYNGELYNTGEIREELLSRGYTFRGHSDTEVLLTAYMEWGVECVRRFNGIFAFAIWDEARERLFLARDRLGVKPLFYATLPHSFLFGSELKALLAHPAIKPEVDAEGLAEVFVLGPARTPGHGVFHNLAELKPGYYMTYDRQGLRLHQYWALQSHPHTDNLETTIAKVRQLLQDTVERQLVADVPVCTLLSGGLDSSAVTVFAARAFQGRGQGHIHTWSVDYIDNDRYFQPSHFQPNPDAPWVKLVSEHLETIHHYVYIDTPELVDSLKAAMRARDLPGMADVDSSLLLFCREVKREATVALSGEAADEVFGGYPWFRSEKALAANTFPWNRAGQERIRLLSPELKAMVRPEEYVARRYREALAEVPALPGEEARAARLREISYLSLTRFMPVLLDRKDRMSMAVGLEVRVPYCDHRLVEYVWNIPWEMKFVGQMEKGILRRALAGILPAEVINRRKSPYPKTYNPAYLEAVRNWMLDILADPASPLLPFIDVAAVKALTQSREVFNLPWFGQLMSGPQLFAYLAQIDTWMREYGVSVR

SEQ ID NO: 31720 - protein, 396 aa, Escherichia coli
MFENITAAPADPILGLADLFRADERPGKINLGIGFYKDETGKTPVLTSVKKAEQYLLENETTKNYLGIDGIPEFGRCTQELLFGKGSALINDKRARTAQTPGGTGALRVAADFLAKNTSVKRVWVSNPSWPNHKSVFNSAGLEVREYAYYDAENHTLDFDALINSLNEAQAGDVVLFHGCCHAPTGIDPTLEQWQTLAQLSVEKGWLPLFDFAYQGFARGLEEDAEGLRAFAAMHKELIVASSYSKNFGLYNERVGACTLVAADSETVDRAFSQMKAAIRANYSNPPAHGASVVATILSNDALRAIWEQELTDMRQRIQRMRQLFVNTLQEKGANRDFSFIIKQNGMFSFSGLTKEQVLRLREEFGVYAVASGRVNVAGMTPDNMAPLCEAIVAVL

SEQ ID NO: 31721 - protein, 591 aa, Bacillus subtilis
MTDTLSKRGPDDSNVWGEHHVLFGHKRLAVVDIEGGRQPMACTYKGDTYTIIYNGELYNTEDLRKELRARGHQFERTSDTEVLLHSYIEWQEDCVDHLNGIFAFAVWDEKRNLLFAARDRLGVKPFFYTKEGSSFLFGSEIKAILAHPDIKARVDRTGLSEIFGLGPSRTPGTGIFKGIKEIRPAHALTFSKDGLNIWRYWNVESEKHTDSFDDTVANVRSLFQDAVTRQLVSDVPVCTFLSGGLDSSAITAIAAGHFEKEGKAPLHTYSIDYEENDKYFQASAFQPNDDGPWIEKMTEAFGTTHHKCVISQKDLVDHLEEAVLVKDLPGMADVDSSLLWFCREIKKDFVVSLSGECADEIFGGYPWFHTADVESGFPWMRSTEERIKLLSDSWQKKLNLKEYVNAKYEETLAETPLLDGETGVDKARRQLFYLNMLWFMTNLLDRKDRMSMGASLEVRVPFADHRLVEYVWNIPWEMKMHDNREKGILRKALEGILPDDILYRKKSPYPKTHHPEYTKGVSEWLKTIRSQKDSVLHTLLDRKQLDQLLETEGSSFKVPWFGQLMKGPQLIAHLAQIHTWFEAYRIDIDER

SEQ ID NO: 31722 - protein, 303 aa, Vibrio halioticoli
GRIGRFVFRAAQERNDIEVVGINDLIDVDYMAYMLKYDSTHGRFNGTVEVKDGNLIVNGNTVRVTAERNPEDLKWNEIGVDVVAEATGLFLTDETARKHITAGAKKVVLTGPSKDATPMFVNGVNFDTYAGQDIVSNASCTTNCLAPIAKVLNDTFGIESGLMTTVHATTATQKTVDGPSAKDWRGGRGASQNIIPSSTGAAKAVGVVLPEVNGKLTGMAFRVPTANVSVVDLTVNLKTGASYETICAAMKEASEGALKGVLGYTEDAVVSQDFIGETCTSVFDAKAGIALTDNFVKVVSWYD

SEQ ID NO: 31723 - protein, 505 aa, Arabidopsis lyrata subsp. lyrata
GLELQLSYTLRHQHPVEYTVPIQLPVINQVFGTSRAVKISPNSPVARLRPVSGKYMLGEVVAVRVPLLHLSNFQINDWPELSTKRYALMVLMLPSDSARQWHVHELELVEVVADQVAVALSHAAILEESMRARNLLMEQNVALDLARREAETAIRARNDFLAVMNHEMRTPMHAIIALSSLLQETELTPEQRLMVETILKSSNLLATLMNDVLDLSRLEDGSLQLELGTFNLHTLFREVLNLIKPIAVVKKLPITLNLAPDLPEFVVGDEKRLMQIILNIVGNAVKFSKQGSISVTALVTKSDTRDADFFVVPTGSHFYLRVKVKDSGAGINPQDIPKLFTKFAQTQSLATRSSGGSGLGLAISKRFVNLMEGNIWIESDGLGKGCTAIFDVKLGISERSNESKQSGIPKVPAIPRHSSFTGLKVLVMDENGVSRMVTKGLLVHLGCEVTTVSSNEECLRVVSHEHKVVFMDVCLPGVENYQIALRIHEKFTKQRHQRPLLVALT

SEQ ID NO: 31724 - protein, 332 aa, Brassica napus
MERTLLVTFSVILFASVAADDYVRPKPRQALQFPWQQKSTSQPEQVHISLAGDKHMRVSWVTNDKSSPSFVEYGTSPGKYSFLGQGESTSYSYIFYRSGKIHHAVIGPLEPDTVYYYRCGGGGPEFHLKTPPSRFPITFAVAGDLGQTGWTKSTLDHIDQCKYEVHLLPGDLSYADYMQHKWDTFGELVQPLASVRPWMVTQGNHEKENIPFVVDEFVSYNSRWKMPYAESGSNSNLYYSFEVAGVHVIMLGSYTDYDRYSDQYNWLKGDLAKVDRERTPWLIALFHVPWYNSNDAHQNEGDGMMAEMEPLLYASGVDIVFTGHVHAYERTK

SEQ ID NO: 31725 - protein, 40 aa, Cylicomorpha parviflora
  misc_feature (33)..(33): Xaa can be any naturally occurring amino acid
  unsure (1)..(40): unsure at all Xaa locations
VPKFLRRIDIALKNIGIDERVPYNAPLIQFSSXMGGDRDG

SEQ ID NO: 31726 - protein, 354 aa, Zea mays
MAGGFRVLHLVRPFLGFLPEVQSADRRIPFREKLIYTVISLFIFLVCSQLPLYGIHSTTGADPFYWLRAILASNRGTVMELGITPIVTSGMVMQLLVGSKIIEVDNSVREDRALLNGAQKLLGILIAIGEAVAYVLSGMYGSVSQLGTGNAILIILQLFFAGIIVICLDELLQKGYGLGSGISLFIATNICENIIWKAFSPTTINSGRGAEFEGAVIGLFHLLITRTDKVRALREAFYRQNLPNVTNLLATVLVFLIVIYFQGFRVVLPVRSRNARGQQGSYPIKLFYTSNMPIILHSALITNLYFISQLLYKKFSGNFLVNLLGIWKESEYSGHSIPVGGLAYYVTAPSSLAD

SEQ ID NO: 31727 - protein, 132 aa, Arabidopsis lyrata subsp. lyrata
AVSRLGGRSAFVGKLGDDEFGHMLAGILRKNGVDDQGINFDTGARTALAFVTLRADGDREFMFYRNPSADMLLRPDELNLDLIRSAKVFHYGSISLIVEPCRSAHLKAMEVAKEAGALLSYDPNLREPLWPS

SEQ ID NO: 31728 - protein, 295 aa, Vibrio halioticoli
RIGRFVFRAAQERNDIEVVGINDLIDVDYMAYMLKYDSTHGRFNGTVEVKDGNLIVNGNTVRVTAERNPEDLKWNEIGVDVVAEATGLFLTDETARKHITAGAKKVVLTGPSKDATPMFVNGVNFDTYAGQDIVSNASCTTNCLAPIAKVLNDTFGIESGLMTTVHATTATQKTVDGPSAKDWRGGRGASQNIIPSSTGAAKAVGVVLPEVNGKLTGMAFRVPTANVSVVDLTVNLKTGASYETICAAMKEASEGALKGVLGYTEDAVVSQDFIGETCTSVFDAKAGIALTDNFV

SEQ ID NO: 31729 - protein, 313 aa, Waldsteinia geoides
GGLGDVLGGLPPAMAANGHRVMTVSPRYDQYKDAWDTSVLVEIEVNGRVETVRFFHCYKRGVDRVFVDHPSFLEKVWGKTESKIYGPKAGVDYNDNQMRFSLLCQAALEAPRVLNLNSNEYFSGPYGEDVVFICNDWHTALVPCFLKTLYKPMGIYKSAKVAFCIHNIAYQGRFAIEDFELLDLPNQLKSSFDFTDGYNKPVKGRKINWMKAGILESDRVVTVSPYYAQELISGEDKGVELDNIIRKTGITGIVNGMDVQEWNPATDKHLHVNYDETTVLDAKPLLKEALQAEVGLPVDRNIPLIGFIGRLEE

SEQ ID NO: 31730 - protein, 300 aa, Vibrio neonatus
GFGRIGRFVFRAAQERNDIEVVGINDLIDVDYMAYMLKYDSTHGRFKGTVEVKDGNLIVNGNTVRVTAERNPEDLKWNEIGVDVVAEATGLFLTDETARKHITAGAKKVVLTGPSKDATPMFVNGVNFDTYAGQDIVSNASCTTNCLAPIAKVLNDTFGIESGLMTTVHATTATQKTVDGPSAKDWRGGRGASQNIIPSSTGAAKAVGVVLPEVNGKLTGMAFRVPTANVSVVDLTVNLKTGASYETICAAMKEASEGALKGVLGYTEDAVVSQDFIGETCTSVFDAKAGIALTDNFVKV

SEQ ID NO: 31731 - protein, 761 aa, Aquifex aeolicus VF5
MVKTYAFGFPKLGEKREFKRLLENYWKGKISQEELIKGMEELNLWRANLYRENVEIIPSNELSYYDFMLDTTVMVGAIPSRFGEYRGLDTYFEMARGKNALELTKWFNTNYHYLVPELEGENFKLLINRPLEDYKFFKEKGINTVPHVIGLFTFLKLSKAPKRVEEEGLPVIILEKLDTKERLEKFTKALLPVYKELLESLKNEGVNRVHFEEPALVTDLEDYDWEILNEIYSELSKVGVDLGILTYYDSVSDYDKFVNLPVKALHFDLVSNEENLKNIKEKGFPEDKELIAGIINGRQPWRANLREKVKLLEELLKVSANLVVSNSCPLYHLPVTVEPEDELPEGLKERLSFAKEKLREIRLIKEALEGKEEALREVESSEKVMTAVFAQNPEVRRRLASLSEKDFQRELPYKERDKIQRDILKLPLFPTTTIGSFPQTEDVRKMRTAYRTGKISEEEYKNFIKQKIKYAIEVQEDIGLDVLVHGEFERSDMVEYFAIKLDGIATTKHGWVLSYGSRVYRPPIIYGDVSRPAPMTLEEITYAQSLTNKPVKGMLTGPVTILNWSYYREDVPKREIAYQIALALLDEVKDLENAGIKVIQIDEPAFREGAPLKKRDWPEYFDWAVKAFRLASRAKPETQIHTHMCYSEFNEIIEYIYQMDFDVISIEASRSKGEIIEVFEKFKGWDRQIGIGVYDIHSPAIPTKEEMKAIMLRAMKVLPKELLWVNPDCGLKTRRWEEVIPALRNMVDMAKELREEVGVKV

SEQ ID NO: 31732 - protein, 276 aa, Magnetospirillum magnetotacticum MS-1
MIDRSDPQWYRDAIIYQIHVKSFFDSSNDGIGDFEGLTQKLDYVRDLGVTAIWLMPFYPSPLRDDGYDIADYRDINPSYGTMDDFRRFVDAAHERGLRVITELVINHTSDQHPWFQRAREAPAGSPERDFYVWSDTDDKYSDTRIIFLDTEVSNWTWDPVAKQYFWHRFYSHQPDLNFDNPAVLEAVIEVMRYWLDMGVDGLRLDAIPYLIERDGTNCENLAETHTVIKAIRAALDAEYPDRMLLAEANQWPEETAQYFGDGDECHMAFHFPLSSV

SEQ ID NO: 31733 - protein, 503 aa, Glycine max
MDTLFRLVSFHQQQQPQQQPDPSLNSTTSRTSSSSRSSRQNYYPYSHQEEEECFNFYMDEEDLSSSSSKHYYHPYQPHHHQQHNVSNISTNTFSTTPNTDYSYSYSFSPTQPVQDFNFEFSSPNWSHNLLLESARAVADNNSTRLHHLLWMLNELSSPYGDTEQKLAAYFLRALFSRVTEAGDRTYRSLASASEKTCSFESTRKTVLKFQEVSPWTTFGHVASNGAILEALEGNSKLHILDISNTYCTQWPMLLEALATRSEETPHLCLTTIVTGSRIGNNVQRVMKEIGTRMEKFARLMGVPFKFNVVHHYGDLSEFNFSELDIKDDEALAVNCVNSLHSVSALGNNRDALISALQALQPRIVTVVEEEADLDVGIDGYEFVKGFEESLRWFRVYFEALDESFVKTSNERLMLERAAGRAVVDLVACSPADSVERRETAARWAARLHNGGLNAAPFSDEVCDDVRALLRRYKEGWSMAACSDAGIFLSWKDTPVVWASAWRP

SEQ ID NO: 31734 - protein, 411 aa, Rickettsia sp. DnS28
DSEFAELKIRGKIFKLPILKASIGEDVIDISRVSAEADCFTYDPGFMSTASCQSTITYIDGDKGILRHRGYDIKDLAEKSDFLEVAYLLIYGKLPSGEQYNNFTKQVAHHSLVNERLHYLFQTFCSSSHPMAIMLAAVGSLSAFYPDLLNFKEADYELIAIRMIAKIPTIAAMSYKYSIGQPFIYPDNSLDFTENFLHMMFATPCTKYKVNPIIKNALNKIFILHADHEQNASTSTVRIAGSSGANPFACISTGIASLWGPAHGGANEAVINMLKEIGSSKYIPKYIAKAKDKNDPFRLMGFGHRVYKNYDPRAAVLKETCKEVLKELGQLDNNPLLQIAIELEAIALKDEYFIERKLYPNVDFYSGIIYKAMGIPSQMFTVLFAIARTIGWMAQWKEMHEDPEQKISRPR

SEQ ID NO: 31735 - protein, 464 aa, Mycobacterium tuberculosis
  misc_feature (1)..(1): Xaa can be any naturally occurring amino acid
  misc_feature (101)..(101): Xaa can be any naturally occurring amino acid
  misc_feature (184)..(184): Xaa can be any naturally occurring amino acid
  misc_feature (297)..(297): Xaa can be any naturally occurring amino acid
  misc_feature (344)..(344): Xaa can be any naturally occurring amino acid
  misc_feature (446)..(446): Xaa can be any naturally occurring amino acid
  misc_feature (461)..(461): Xaa can be any naturally occurring amino acid
  unsure (1)..(464): unsure at all Xaa locations
XTHYDVVVLGAGPGGYVAAIRAAQLGLSTAIVEPKYWGGVCLNVGCIPSKALLRNAELVHIFTKDAKAFGISGEVTFDYGIAYDRSRKVAEGRVAGVHFLXKKNKITEIHGYGTFADANTLLVDLNDGGTESVTFDNAIIATGSSTRLVPGTSLSANVVTYEEQILSRELPKSIIIAGAGAIGXEFGYVLKNYGVDVTIVEFLPRALPNEDADVSKEIEKQFKKLGVTILTATKVESIADGGSQVTVTVTKDGVAQELKAEKVLQAIGFAPNVEGYGLDKAGVALTDRKAIGVDDYXRTNVGHIYAIGDVNGLLQLAHVAEAQGVVAAETIAGAETLTLGDHRXLPRATFCQPNVASFGLTEQQARNEGYDVVVAKFPFTANAKAHGVGDPSGFVKLVADAKHGELLGGHLVGHDVAELLPELTLAQRWDLTASELARNVHTHPTXSEALQECFHGLVGHXINF

SEQ ID NO: 31736 - protein, 475 aa, Salmonella enterica subsp. enterica serovar Typhimurium
MMSTEIKTQVVVLGAGPAGYSAAFRCADLGLETVIVERYNTLGGVCLNVGCIPSKALLHVAKVIEEAKALAEHGIVFGEPKTDIDKIRTWKEKVITQLTGGLAGMAKGRKVKVVNGLGKFTGANTLEVEGENGKTVINFDNAIIAAGSRPIQLPFIPHEDPRVWDSTDALELKEVPKRMLVMGGGIIGLEMGTVYHALGSEIDVVEMFDQVIPAADKDIVKVFTKRISKKFNLMLETKVTAVEAKEDGIYVSMEGKKAPAEAQRYDAVLVAIGRVPNGKNLDAGKAGVEVDDRGFIRVDKQLRTNVPHIFAIGDIVGQPMLAHKGVHEGHVAAEVIAGKKHYFDPKVIPSIAYTEPEVAWVGLTEKEAKEKGISYETATFPWAASGRAIASDCADGMTKLIFDKESHRVIGGAIVGTNGGELLGEIGLAIEMGCDAEDIALTIHAHPTLHESVGLAAEVFEGSITDLPNPKAKKK

SEQ ID NO: 31737 - protein, 415 aa, Aquifex aeolicus VF5
MKRRVVITGIGAVTPLGTGVKKFWENLVKGVSGVDYIKSFNPDEYGIPVKIAAEVKDFNPEDFMDKKEARKASRFVQFAIAAVKEALEDSGLLESEYDPYRVGVIIGTGIGGLKDIEDQTLILKEKGARRVSPFFIPYGISNMASGLVAIKWGFKGPNYCVTSACATGNHAIGDAFRLIQKGDIDIAIAGGTEAAITPLGVAGFASMKALSTRNDEPQKASRPFDRDRDGFVMGEGAGILILEEYERAKARGAKIYAELVGYGATDDAYHITSPHECGEGAYECMRLALEDAGIKPEEVDYINAHGTSTPLNDKTETMAIKQLFGEHAYKLKISSNKSMIGHLLGAAAAVEAVATIKTIETGVIPPTINLENPDPECDLDYVPNKAVEYPVRVALSNAFGFGGTNATLVFRKIEE

SEQ ID NO: 31738 - protein, 362 aa, Sulfolobus solfataricus P2
MMKAARLVEFQKPLKIEDLDVPKVGKGDVLLKVISCGICRSDWHLWRGDPALVAYMQWSGGKLPITQGHEVYGEIVEVGESVTRLNKGDKVVMPASSTGDNRTCKYCMEGDSNVCEHLVIAGYGINGCFAEYMLIPERSVIDLVKVPDGIKSEWAALSSCGFGTSWNAFTMKTNLKPSDIVVIIGAGGMGLSGIAIANALGAKVIAIDVNERSLEKAKMLGSVETYRHSGKSEELNKIVEDIMKKYGSVDVIYDTTGIPEAVIPFLPLLKVHGTLLLAGLMMKGKEIFPLPADLVVAREIRIQGVLMLPAQKFDTIFKLMKEGKINLDPVIYKTISIYDVNDAYKEMSEYKNAGRIIINKFS

SEQ ID NO: 31739 - protein, 411 aa, Rickettsia sp. RpA4
DSEFAELKIRGKIFKLPILKASIGEDVIDISRVSAEADCFTYDPGFMSTASCQSTITYIDGDKGILRHRGYDIKDLAEKSDFLEVAYLLIYGELPSGEQYNNFTKQVAHHSLVNERLHYLFQTFCSSSHPMAIMLAAVGSLSAFYPDLLNFKEADYELIAIRMIAKIPTIAAMSYKYSIGQPFIYPDNSLDFTENFLHMMFATPCTKYKVNPIIKNALNKIFILHADHEQNASTSTVRIAGSSGANPFACISTGIASLWGPAHGGANEAVINMLKEIGSSEYIPKYIAKAKDKNDPFRLMGFGHRVYKNYDPRAAVLKETCKEVLKELGQLDNNPLLQIAIELEAIALKDEYFIERKLYPNVDFYSGIIYKAMGIPSQMFTVLFAIARTIGWMAQWKEMHEDPEQKISRPR

SEQ ID NO: 31740 - protein, 339 aa, Haemophilus influenzae 86-028NP
MAIKIGINGFGRIGRIVFRAAQHRDDIEVVGINDLIDVEYMAYMLKYDSTHGRFDGTVEVKDGNLVVNGKTIRVTAERDPANLNWGAIGVDIAVEATGLFLTDETARKHITAGAKKVVLTGPSKDATPMFVRGVNFNAYAGQDIVSNASCTTNCLAPLARVVHETFGIKDGLMTTVHATTATQKTVDGPSAKDWRGGRGASQNIIPSSTGAAKAVGKVLPALNGKLTGMAFRVPTPNVSVVDLTVNLEKPASYDAIKQAIKDAAEGKTFNGELKGVLGYTEDAVVSTDFNGCALTSVFDAEAGIALTDSFVKLVSWYDNETGYSNKVLDLVAHIYNYKG

SEQ ID NO: 31741 - protein, 607 aa, Haemophilus influenzae 86-028NP
MKSKNRVNMNLDLHFVHRIQQQAKTRANMTALRYKEHGLWRDISWKNFQEQLNQLSRALLTHNIDVQDKIAIFAHNMERWTIADIATLQIRAITVPIYSTNTAQQAEFILNHADVKILFVGDQEQYDQALEIAHHCPKLQKIVAMKSTIQLQQDPLSCTWESFIETGSNAQQDELTQRLNQKQLSDLFTIIYTSGTTGEPKGVMLDYANLAHQLETHDLSLNVTDQDISLSFLPFSHIFERAWAAYILHRGAILCYLEDTNQVRSALTEIRPTLMCAVPRFYEKIYAAVLDKVQKAPKLRQIMFHWTISVGQKHFDLRANNKAIPFLLKKQFALADKLVLSKLRQLLGGRIKMMPCGGAKLEPAIGLFFHAIGINIKLGYGMTETTATVSCWHDFQFNPNSIGTLMPKAEVKIGENNEILVRGKMVMKGYYKKPEETAQAFTKDGFLKTGDAGEFDEQGNLFITDRIKELMKTSNGKYIAPQYIESKIGKDKFIEQIAIIADAKKYVSALIVPCFDSLEEYAKQINIKYHDRLELLKNSDILKMFEQRINAVQKELAHFEQVKKFTLLSQAFSIKLGEITPTLKLRRKVILERYRKQIEAMYHSQEA

SEQ ID NO: 31742 - protein, 112 aa, Salmonella enterica
GISGGHLNPAVTIALWLFACFPKHKVLPYIIAQFAGAFGGALLAYVLYSSLFTEFETAHHMVRGSVESLQLASIFSTYPAAALNVWQAALVEVVITSILMGMITALTDDGNG

SEQ ID NO: 31743 - protein, 167 aa, Arabidopsis thaliana
  misc_feature (108)..(108): Xaa can be any naturally occurring amino acid
  unsure (1)..(167): unsure at all Xaa locations
MMLKQAAKKALGLTSRQSTPWSVGILRTYHKNVIDHYDNPRNVGSFDKNDPNVGTGLVGAPAYGDVMKLQIKVDEKTGQIVDARFKTFSCGSAIASSSVATEWGKGKXKKDFFFFFYTEIAKHLSLPPVKLHCSMLAEDAIKAAVKDYKEKRVTTNGAAAAGETTQA

SEQ ID NO: 31744 - protein, 709 aa, Arabidopsis thaliana
MACLNDDKKKKFHLVLDLDHTLVHSVLVSDLSEEQKYLIEGADSSGLIRKKIYFGDRVLAREQSPYEKTLDLLAVDERRVVIVDDAIDIWPHHNRNLLQISKYIYFSVGIELLINIAEDKIDESRSNGSLAHKRFKKLLFSFIFVLPLRISEMNPQANDRKEFQGDCSATGDLTAKHDSAGGNGGGGARYKLMSPAKLPISRSTDITIPPGLSPTSFLESPVFISNIKPEPSPTTGSLFKPRPVHISASSSSYTGRGFHQNTFTEQKSSEFEFRPPASNMVYAELGKIRSEPPVHFQGQGHGSSHSPSSISDAAGSSSELSRPTPPCQMTPTSSDIPAGSDQEESIQTSQNDSRGSTPSILADDGYNWRKYGQKHVKGSEFPRSYYKCTHPNCEVKKLFERSHDGQITDIIYKGTHDHPKPQPGRRNSGGMAAQEERLDKYPSSTGRDEKGSGVYNLSNPNEQTGNPEVPPISASDDGGEAAASNRNKDEPDDDDPFSKRRRMEGAMEITPLVKPIREPRVVVQTLSEVDILDDGYRWRKYGQKVVRGNPNPRSYYKCTAHGCPVRKHVERASHDPKAVITTYEGKHDHDVPTSKSSSNHEIQPRFRPDETDTISLNLGVGISSDGPNHASNEHQHQNQQLVNQTHPNGVNFRFVHASPMSSYYASLNSGMNQYGQRETKNETQNGDISSLNNSSYPYPPNMGRVQSGP

SEQ ID NO: 31745 - protein, 132 aa, Salmonella enterica
GISGGHLNPAVTIALWLFACFPKQKVLPYIIAQFAGAFGGALLAYVLYSSLFTEFETAHHMVRGSVESLQLASIFSTYPAAALNVWQAALVEVVITSILMGMIMALTDDGNGIPKGPLAPLLIGILVAVIGA

SEQ ID NO: 31746 - protein, 251 aa, Arabidopsis lyrata
MGRGRVQLKRIENKINRQVTFSKRRAGLLKKAHEISVLCDAEVALVVFSHKGKLFEYSTDSCMEKILERYERYSYAERQLIAPESDVNTNWSMEYNRLKAKIELLERNQRHYLGEDLNAMSPKELQNLEQQLDTALKNIRTRKNQLMYESINELQRKEKAIQEQNSMLSKQIKEREKILRAQQEQWDQQNHGHNMPPPPPPQQHQIQHPYMLSHQPSPFLNMGGLYQEEDPMAMRRNELELTLEPVYNCNL

SEQ ID NO: 31747 - protein, 175 aa, Triticum aestivum
MAPTVMASSATSVAPFQGLKSTGGLPVSRRSNGASLGSVSNGGRIRCMQVWPIEGIKKFETLSYLPPLSTEALLKQVDYLIRSKWVPCLEFSKVGFIFREHNTSPGYYDGRYWTMWKLPMFGCTDATQVINEVEEVKKEYPDAYVRIIGFDNMRQVQCVSFIDFKPPGCEESGKA

SEQ ID NO: 31748 - protein, 316 aa, Pseudomonas aeruginosa UCBPP-PA14
MADFEILCFGETMAMFVAEQPGELDRVEQFGKRIAGADSNVAIGLARLGFAVAWLSRVGDDSLGRFVLDSLTREGLDCRFVEVDAQAPTGFQMKSREVDGADPRVEYFRRGSAASRLGLAHIREEMLGARHLHATGIPPALSASACELSHELMRRMRGKGASLSFDPNLRPSLWPSERRMIAEINALAAHAHWVLPGLEEGRLLSGWQEPADIAAFYLDMGVDAVAIKLGPSGAYYRDAHGEGLVPGVPVATVVDTVGAGDGFAVGVVSALLEGLPLPDAVARGNWIGSRAVQVRGDMEGLPKRSQLLDREHRKSA

SEQ ID NO: 31749 - protein, 444 aa, Agrobacterium tumefaciens str. C58
MDNPSRSNSTSLDSYWMPFTANRQFKANPRLLTSAEGMYYTSNDGRQVLDGTAGLWCVNAGHGRQQIASAVKHQLSTLDYAPSFQMGHPVAFEFAERLAEIAPGPEGGKLDRVFYTGSGSESVDTALKIAIAYQRAIGQGTRSRLIGRERGYHGVGFGGISVGGLVNNRRVFPQIPADHLRHTHDLARNSFVKGQPEHGAELADDLERLVALHGAETIAACIVEPVAGSTGVLVPPKGYLERLRAICDKHGILLIFDEVITGFGRMGSSFASNYFGVTPDIVTTAKGLTNGAIPMGAVFTSRKVHDALMHGPENQIELFHGYTYSGHPVACAAGIATLDIYRDEGLFTRAAELQDAWHDAIHSLKSAANVIDIRTIGFIAGIELQSREGAVGARAYDVFVDCFERGLLIRVTGDIIALSPPLIAEKSHFDDIVSILGDALNRAV

SEQ ID NO: 31750 - protein, 255 aa, Zea mays
MADPAEENVVSPPPTPAAPAVGASDSPLQPAADGASTEVSAPAPEVRSRGFRLFGEDTSVHKALGGGKTADVLLWKDKKTSAVVIGGATVIWVLFEVLDYHLLTLISHVLIGVLATLFLWSKATTFIKKSPPDIPLVQVSEDLVVNVSRALRNDINRALHLFREIAMGHDLKKFLGVIVGLWVLSGVGSSCDFLTLTYIAVLMLHTVPILYDKYQDKVDHFAGRAHTEALKQYKVLDAKVLSKIPRGAVKSKKQN

SEQ ID NO: 31751 - protein, 201 aa, Nanoarchaeum equitans Kin4-M
MDTLVPINVYVKAGIHIGTRHLTKDMKPYVSKIREDGLAIFDIRKIDERLRLASKMLSYYEPNEILVVGRRETAITPIKKFSEITKVKAFPGRYPPGTLTNPQLKYYMEPEVILITDPIMDKNALHDAYESGITILALCDTNHTKNYIDFCIPANNRGSKSLALIYWILAREYLRNRGVIGKDEQLKVPVEEFETKITVEE

SEQ ID NO: 31752 - protein, 301 aa, Vibrio neonatus
RFVFRAAQERNDIEVVGINDLIDVDYMAYMLKYDSTHGRFNGTVEVKDGNLIVNGNTVRVTAERNPEDLKWNEIGVDVVAEATGLFLTDETARKHITAGAKKVVLTGPSKDATPMFVNGVNFDTYAGQDIVSNASCTTNCLAPIAKVLNDTFGIESGLMTTVHATTATQKTVDGPSAKDWRGGRGASQNIIPSSTGAAKAVGVVLPEVNGKLTGMAFRVPTANVSVVDLTVNLKTGASYETICAAMKEASEGALKGVLGYTEDAVVSQDFIGETCTSVFDAKAGIALTDNFVKVVSWDDNE

SEQ ID NO: 31753 - protein, 452 aa, Pyrococcus abyssi GE5
MEFKYWRIFLLGFGFFGISIIWSLYNAYIPIFLQDTFRMSRTVTGFIMTIDNLFAVLLLPFLGALSDMTRTRIGRRKPYILLGAPSAAIMFALIPIARAHKNLALFMGVIVLMNFFMALFRSPVIAFMPDITPSEKRSQANGIINFMGGLGALLAYLGGKILYDINYAYPFYAGAAIMLIANMIVVLFVPEPEQYRVPGEGIDIKKIFTETAKKSFGELKENLKDVFASHERSLLAILLAIFFWFIAFNSLETFFTSYVKYHLYGIPIGAEETAVTRQIESTGAFIMGIVSLSFMIFAIPAGFLGAKLGRRKTITLGLIIIVIVLGLSYYIGQVQRPSSVSLTDPVIVKFMLLFFIAGIGWAMVNVNSLPMVVDMTTEEKVGGYTGLYYFFSQAANLVAPPLAGAFLDLIGYETLIPFAIVFFVLATITVQFVKRGDVKVGRKAIEYISDLD

SEQ ID NO: 31754 - protein, 197 aa, Bacillus subtilis
HNPNIIWHPAAISKSDRQSLNGHKSCVLWFTGLSGSGKSVLANAVDEKLYRKGIQSYVLDGDNIRHGLNKDLGFQTGDRIENIRRIGEVAKLFVDSGQMILTAFISPFREDRDMVRALFPKGEFFEIYVKCPLHVCEQRDPKGLYKKARNGEIKHFTGIDSPYEAPLSPDFIIESDQTSISDGADLIINALQNRGII

SEQ ID NO: 31755 - protein, 298 aa, Vibrio ezurae
GFGRIGRFVFRAAQERNDIEVVGINDLIDVDYMAYMLKYDSTHGRFNGTVEVKDGNLIVNGNTVRVTAERNPEDLKWNEIGVDVVAEATGLFLTDETARKHITAGAKKVVLTGPSKDATPMFVNGVNFDTYAGQDIVSNASCTTNCLAPIAKVLNDTFGIESGLMTTVHATTATQKTVDGPSAKDWRGGRGASQNIIPSSTGAAKAVGVVLPEVNGKLTGMAFRVPTANVSVVDLTVNLKTGASYETICAAMKEASEGALKGVLGYTEDAVVSQDFIGETCTSVFDAKAGIALTDNFV

SEQ ID NO: 31756 - protein, 297 aa, Vibrio ezurae
VFRAAQERNDIEVVGINDLIDVDYMAYMLKYDSTHGRFNGTVEVKDGNLIVNGNTVRVTAERNPEDLKWNEIGVDVVAEATGLFLTDETARKHITAGAKKVVLTGPSKDATPMFVNGVNFDTYAGQDIVSNASCTTNCLAPIAKVLNDTFGIESGLMTTVHATTATQKTVDGPSAKDWRGGRGASQNIIPSSTGAAKAVGVVLPEVNGKLTGMAFRVPTANVSVVDLTVNLKTGASYETICAAMKEASEGALKGVLGYTEDAVVSQDFIGETCTSVFDAKAGIALTDNFVKLYLGTT

SEQ ID NO: 31757 - protein, 481 aa, Ralstonia metallidurans CH34
MLNLNLVRSRRGGETLTEQIVAGIAALVDSRALRAGALLPSVRRFAQQHDVSTFTVAEAYGRLTALGYLAARPGSGYTVAHRHAPAGHARVPHWEAPGLNAAWLLSDVFADHSVPIKAGAGWLPGDWLNEEGLHQAMRSAARVPAAQVSGYGHPYGFGALREHIAAHLSQYGIPAQSQQVVLTQGATQALDLVVRTLLRPGDTVLVESPCYCNLLQILRLAGLRAIGVPRTAAGLDTDALEDAIRQHSPRALFINTVLQNPTGASLTSMNAFRVLQIAEQHRLLVVEDDIYRELAPAGSPMLAAMDGLSQVVYVNGFSKTIAPSLRVGYLAASPDLAKAFARTKMAVGLTSSEVTERLVYSVLTSGHYGRHVAALAERLRAQQDLVTEKMDAHGLEVLLRPEGGMFAWARMRETDGPAPSGNRLATLALEHGIWLAPGAYFEPGEADSPWIRFNVATSDAPQLWDFFDAVRTDQGALARAA

SEQ ID NO: 31758 - protein, 541 aa, Rhodococcus equi
MAKIIAFDEEARRGLERGLNSLADAVKVTLGPKGRNVVLEKKWGAPTITNDGVSIAKEIELEDPYEKIGAELVKEVAKKTDDVAGDGTTTATVLAQALVREGLRNVAAGANPLGLKRGIEKAVEAVTAKLLDTAKEVETKEQIAATAGISAGDSTIGELIAEAMDKVGKEGVITVEESNSFGLQLELTEGMRFDKGYISLYFATDAERQEAVLEDPYILLVSSKISTVKDLLPLLEKVIQAGKPLLIIAEDVEGEALSTLVVNKIRGTFKSVAVKAPGFGDRRKAQLADIAILTGGEVVSEEVGLSLETAGIELLGRARKVVVTKDETTIVEGAGDADAIAGRVNQIRAEIEASDSDYDREKLQERLAKLAGGVAVIKAGAATEVELKERKHRIEDAVRNAKAAVEEGIVAGGGVALLQSSPVLDDLKLEGDEATGANIVKVALEAPLKQIAFNAGLEPGVVAEKVRNLPAGSGLNAATGEYEDLLAAGINDPVKVTRSALQNAASIAALFLTTEAVVADKPEKAAAPMGDPTGGMGGMDF

SEQ ID NO: 31759 - protein, 551 aa, Ehrlichia ruminantium str. Welgevonden
MANMVVTGEQLDKSIREVVRILEDAVGCTAGPKGLTVAISKPYGAPEVTKDGYKVMKSIKPEDPLALAIANIIAQSASQCNDKVGDGTTTCSILTAKVIEEVSKVKAAGADIICVREGVLKAKEAVLEALKCMKREVLSEEEIAQVATISANGDKNIGTKIAQCVKEVGKDGVITVEESKGFKELDVEKTDGMQFDRGYLSPYFVTNSEKMLVEFENPYILLTEKKLNIIQPLLPILENIARSGRPLLIIAEDVEGEALSTLVLNKLRGGLHVAAVKAPGFGDRRKDMLGDIAILTGAKHVINDELAIKMEDLTLCDLGTAKNIRITKDTTTIIGSVDNSCAHVQSRICQIRMQIDNSTSDYDKEKLQERLAKLSGGVAVLKVGGSSEVEVKERKDRVEDALHATRAAVEEGVVPGGGAALLYTLSALDNLKSKNDDEQLGINIVKRALQAPIKRIIKNAGSENAPCVIAHLLKQNDKELIFNVDVMNFANAFTSGVIDPLKVVRIAFDFAVSLAAVFMTLNAIVVDIPSKDDNSAAGGAGMGGMGGMGGF

SEQ ID NO: 31760 - protein, 443 aa, Ralstonia metallidurans CH34
MDAAKTVIPDLESLWMPFTANRQYKSAPRLLVSASGMYYTTHDGRQILDGCAGLWCVAAGHARKEIVEAIAQQAATLDYAPPFQMGHPLEFEAATKVASLMPQGLDRIFFTNSGSESVDTALKIALAYHRARGEGQRTRIIGRERGYHGVGFGGMGVGGIGPNRKMWSANVMPGTDHLPATLNIAEAAYSKGQPQWGAHLADELERLVALHDASNIAAVIVEPMAGSAGVLIPPVGYLEKLREITSKHGILLIFDEVITAFGRLGAATGAERLKVTPDLITMAKAINNAAVPMGAVAVRREVHDAVINATPQGGIELPHGYTYSGHPLAMAACIATLDIYKRDKLFERAAEMSPKFESAVHGLRGAPYVKDIRNLGLVAGVELESRPGAPGARAYEAFLKCLELGLLVRYTGDILAFSPPLIISEAEIDQMFDTVRQALHSIK

SEQ ID NO: 31761 - protein, 94 aa, Ehrlichia ruminantium str. Welgevonden
MNLNMLHDNVLIEALEESLNNSPIQLPESAKKKPTKGKVVAVGPGSYNNNGNLIPMTLKVGDVVFYRQWAGNEVEFSDKKYIVMKESDIIAKEV

SEQ ID NO: 31762 - protein, 543 aa, Mycoplasma genitalium G37
MAKELIFGKDARTRLLQGINKIANAVKVTVGPKGQNVILERKFANPLITNDGVTIAKEIELSDPVENIGAKVISVAAVSTNDIAGDGTTTATILAQEMTNRGIEIINKGANPVNIRRGIEDASLLIIKELEKYSKKINTNEEIEQVAAISSGSKEIGKLIAQAMALVGKNGVITTDDAKTINTTLETTEGIEFKGTYASPYMVSDQEKMEVVLEQPKILVSSLKINTIKEILPLLEGSVENGNPLLIVAPDFAEEVVTTLAVNKLRGTINVVAVKCNEYGERQKAALEDLAISSGTLAYNNEINSGFKDVTVDNLGDARKVQIAKEKTTVIGGKGNKDKIKKHVELLNGRLKQTTDKYDSDLIKERIAYLSQGVAVIRVGGATELAQKELKLRIEDALNSTKAAVEEGIIAGGGVGLLNASCVLTNSKLKERYENETSVENIKEILLGFEIVQKSLEAPARQIIQNSGVDPVKILSELKNEKTGVGFDAETKKKVDMIANGIIDPTKVTKTALEKAASVASSLITTNVAVYDVKERKDNSFSE

SEQ ID NO: 31763 - protein, 51 aa, Moringa oleifera
GMSYFHETIWKGVPKFLRRIDTALKNIGINERLPYNAPLIQFSSWMGGDRD

SEQ ID NO: 31764 - protein, 300 aa, Vibrio ezurae
GFGRIGRFVFRAAQERNDIEVVGINDLIDVDYMAYMLKYDSTHGRFNGTVEVKDGNLIVNGNTVRVTAERNPEDLKWNEIGVDVVAEATGLFLTDETARKHITAGAKKVVLTGPSKDATPMFVNGVNFDTYAGQDIVSNASCTTNCLAPIAKVLNDTFGIESGLMTTVHATTATQKTVDGPSAKDWRGGRGASQNIIPSSTGAAKAVGVVLPEVNGKLTGMAFRVPTANVSVVDLTVNLKTGASYETICAAMKEASEGALKGVLGYTEDAVVSQDFIGETCTSVFDAKAGIALTDNFVKV

SEQ ID NO: 31765 - protein, 203 aa, Glycine max
MTSSNKRLEVQTEDQTPHKWCVSLGEEAFKRFFSQINPTVHKVFGDGSLFSPLLFGKFFDPSDAFPLWEFESDVLLSHLRSSSQNTVDWCQTGEGYVLKAEIPGTGKNNIQVHVDKGKVVEISGQWKQQRDSKAHDWRCGHWWEYGYVRRLEMPEDANWKNIEAYLHNDIYLEIRIPKSQQGRDLPQGKDVDCVTWLRSNFVL

SEQ ID NO: 31766 - protein, 328 aa, Leptospira interrogans serovar Copenhageni str. Fiocruz L1-130
MKHYDVFGVGNALVDILVPTENVFIKRLGFEKGIMTLVDSEKQAEVLTALEGSKKELRSGGSAANTMIALANSGGTGTYTGKVSKDTYGEFYKKDMENAGILFEVAPEDKGHTGTCVVLTTPDAERTMLTHLGISITLQKSDVDLEKLKSSSISYIEGYLWDGQGTKEASLLTMEESKKNGVKVAYTYSDPFCVNRSREDFIRLTKEYFDIVFCNTEEAKALSQREDKLEALKFISGLSALVFMTDSANGAYFAENGKISHVDGFPVKPIDTTGAGDCFAAGVLYGITHGFSLEKSTRWGNYVASRIVQEVGPRLGIKLMGRQDEILK

SEQ ID NO: 31767 - protein, 376 aa, Kluyveromyces lactis
TTTGHLIYKCGGIDKRTIEKFEKEAAELGKGSFKYAWVLDKLKAERERGITIDIALWKFETPKYQVTVIDAPGHRDFIKNMITGTSQADCAILIIAGGVGEFEAGISKDGQTREHALLAFTLGVRQLIVAVNKMDSVKWDESRFQEIVKETSNFIKKVGYNPKTVPFVPISGWNGDNMIEATTNASWYKGWEKETKSGVVKGKTLLEAIDAIEPPSRPTDKPLRLPLQDVYKIGGIGTVPVGRVETGVIKPGMIVTFAPAGVTTEVKSVEMHHEQLEEGLPGDNVGFNVKNVSVKEIRRGNVCGDSKNDPPKAAASFNATVIVLNHPGQISAGYSPVLDCHTAHIACKFDELLEKNDRRSGKKLEDSPKFLKSGDA

SEQ ID NO: 31768 - protein, 464 aa, Leptospira interrogans serovar Copenhageni str. Fiocruz L1-130
MEKKESLDSSLKEIVSVCKRRGFVYPGSEIYGGLSNTFDYGPYGVELLQNLKQLWWKYFVHLREDIVGLDSSILLNPKVWEASGHVSNFNDPLIDCKNCKTRIRADKFLEDQKGEGFATGLTLEKMNQVIKESNFACPNCGQRGTFTEARDFNLMFKTSHGASAEDSLDIYLRPETAQGIFLNFKNVVSTTRRKIPFGIAQIGKSFRNEIMARQFVFRTREFEQMEMEFFCEPGTQKEWFSHWVNYCMNWLTEQVGIKKENLRVREHEKEELSFYSEGTSDIEFKYNFGWGELWGIASRTDYDLNQHQKFSGEDLKYQDQVQNKKYVPFVVEPALGVNRLFLAVVTDAYEEEKLPDGETRTVLRFSPKIAPVKAAVFPLMKKDGLPEKSREIFADLSKLGNIEYDDGGAIGKRYRRQDEIGTPFCITVDYDTLKDNTVTVRERDSMSQERIAVNQLKNWLFERL

SEQ ID NO: 31769 - protein, 345 aa, Bradyrhizobium sp. BTAi1
MSDASKIPVTVLTGYLGAGKTTLLNRILSEDHGKKYAVIVNEFGEIGIDNDLIVGADEEVFEMNNGCICCTVRGDLVRIISGLMRRKGKFDAIIVETTGLADPAPVAQTFFVDEDVQKNARLDAVVTVADAKWLSDRLKDAPEAKNQIAFADVIVLNKTDLVTKPELAEVEARIRAINPYARLHRTERCQIAISDVLERGAFDLDRILEIEPEFLNAGDDHDHHHDHDHGHDHHHHHDHGLKHYHDEEMQSLSLRSDKPLDPSKFMPWLQNLVQIEGGKILRSKGILAFQDDDDRYVFQGVHMMLEGDHQRKWKPDEVRQSRVVFIGRELPEDAIREGFERCIVS

SEQ ID NO: 31770 - protein, 376 aa, Kluyveromyces marxianus
TTTGHLIYKCGGIDKRTIEKFEKEAAELGKGSFKYAWVLDKLKAERERGITIDIALWKFETPKYQVTVIDAPGHRDFIKNMITGTSQADCAILIIAGGVGEFEAGISKDGQTREHALLAYTLGVRQLIVAINKMDSVKWDESRYQEIVKETSNFIKKVGYNPKNVPFVPISGWNGDNMIEATTNAPWYKGWEKETKAGTVKGKTLLEAIDAIEPPSRPTDKPLRLPLQDVYKIGGIGTVPVGRVETGVIKPGMVVTFAPAGVTTEVKSVEMHHEQLEEGLPGDNVGFNVKNVSVKEIRRGNVCGDSKNDPPKASASFNATVIVLNHPGQISAGYSPVLDCHTAHIACKFDELLEKNDRRSGKKLEDSPKFLKSGDA

SEQ ID NO: 31771 - protein, 431 aa, Vibrio fischeri ES114
MTKSAELFAKAQDKIPGGVNSPVRAFAGVGGSPIFVERADGPLIFDADGKAYIDYVGSWGPMILGHNHAAIREAVISAAQRGLSFGAPTETEITMAELVSELVPSMEQVRMVSSGTEATMSAIRLARGYTGRDKIMKFEGCYHGHADSLLVKAGSGALTLGQPSSPGVPADFAKYTLTATFNDLDSVRELFAVNKGEIACIIVEPVAGNMNCIPPVEGFHEGLRQICDEEGALLIFDEVMTGFRVAENCAQGYYNIKPDLTTLGKVIGGGMPVGAFGGRKEVMQYIAPTGPVYQAGTLSGNPVAMAAGFACLKVLTEEGNEKRLADTTRHLANGFKELANKHGIPMVVNQVGGMFGFFFTDQETVTSYADVAKCDIERFKRFFHLMLKKGVYLAPSAFEASFTSLAHGPKEIEATLEAADQCFAIIASEAK

SEQ ID NO: 31772 - protein, 453 aa, Candida albicans
MDLVIMNFVFLLYLTSVVKCSIKLDFNKVSTPSKYTKRDALPMPLINDKILYTTELEIGSNKDKVSVSIDTGSYDLWVMSNDAVCYKVSEFQTEGAPQLPDIFNDIDQDYSCTFNGTYNSKSSKTFKNTSEDFSIGYVDGSAAQGVWGYDSVQFGQYGVTGLKIGIANRSSVSDGILGIGIANGYDNFPVLLQKQGLINKIAYSVYLNSSNSTTGTILFGAIDHAKYKGALSTVPVDSKSQLSVNVTNLKTKNGNVASGGHSILLDTGSTFSIFPDEWIDALGHSLNATYDEDESVYEIECDGYDEHFFGFSIGDSDFSVPIQDLKTEKDGQCYLAIMSNSVIGGGGILFGDDILRQIYLVYDLQDMTISVAPVVYTEDEDIEEILNPNEDQNEVPTNTSFTQSASSSGSQPSSTISGENMDKNTTSSSSGNCQTRSWIAILSALFLVYIHII

SEQ ID NO: 31773 - protein, 125 aa, Salmonella enterica
NPAVTIALWLFACFPKQKVLPYIIAQFAGAFGGALLAYVLYSSLFTEFETAHHMVRGSVESLQLASIFSTYPAAALNVWQAALVKVVITSILMGMIMALTDDGNGIPKGPLAPLLIGILVAVIGA

SEQ ID NO: 31774 - protein, 328 aa, Pseudomonas aeruginosa UCBPP-PA14
MKKVVLYKRLSAPLMERLRERVEVLLIEEPGRDGLARLRDALPEAHGLLGASLRLEAGLLDLAPRLEAIASVSVGVDNYDIDYLDRRGILLSNTPDVLTETTADTGFALILATARRVVELAGWVRAGEWKKSVGAAQFGTDVHGKTLGIVGMGRIGEALARRGHHGFGMRVLYHSHSPKPHVEERYAASYRSLDALLEESDFVCLTLPLTAATEGLIGAAQFARMRPQAIFINISRGRVIDEAALIEALAQRRIRAAGLDVFEREPLSPDSPLLRLPNVVATPHIGSATEETREAMARCAVDNLLAALAGERPLNLVNPSAWARRRGA

SEQ ID NO: 31775 - protein, 410 aa, Burkholderia sp. 383
MSLSEPLRLHVPEPTGRPGCKTDFSYLHLSPAGAVRRPPIDVAAADTADLARSLVRVLDDSGKAVGPWAPDLDDARLIAGLRAMLKTRIFDARMMIAQRQKKISFYMLSLGEEAIGTAHAMALRDGDMCFPTYRQQSILIARDVSLERMICQLMSNEGDPLKGRQLPVMYSDREAGFFSISGNLATQFIQAVGWAMASAIKGDTKIASAWIGDGATAESDFHTALTFAHVYRAPVVLNVVNNQWAISTFQAIAGGEGTTFAGRGVGCGIASLRVDGNDFLAIYAASSWAAERARRNLGPTLIEWVTYRAGAHSTSDDPTKYRPSDDWSHFPLGDPIERFKRHLIVKGIWSDGAHEALTAELEAEVIAAQKEAEKYGTLADDRIPSPASMFDDVYKELPAHLRRQRQELGA

SEQ ID NO: 31776 - protein, 130 aa, Salmonella enterica
SGGHLNPAVTIALWLFACFPKQKVLPYIIAQFAGAFGGALLAYVLYSSLFTEFETAHHMVRGSVESLQLASIFSTYPAAALNVWQAALVEVVITSILMGMIMALTDDGNGIPKGPLAPLLIGILVAVIGA

SEQ ID NO: 31777 - protein, 144 aa, Nitrosomonas europaea ATCC 19718
MAITRYEPWGLLTQLQRELERARDDMATEGASAIAEWAPAVDIKEESDKFIVHADLPGVKPEAIDVTTENGVLTIKGEKQTEARTEKEGYKRVERTHGSFYRRFSLPDTADLGAISAVTKDGVLVVTIPKREAVQPKKVSVTAQ

SEQ ID NO: 31778 - protein, 123 aa, Glycine max
  misc_feature (43)..(43): Xaa can be any naturally occurring amino acid
  misc_feature (114)..(114): Xaa can be any naturally occurring amino acid
  unsure (1)..(123): unsure at all Xaa locations
MAHPTSSGQSRDLKKEDRQETRSLVDCFVERLIDFAPTGGGVXLAEAPAFKKAPGGAPADEADGISGLGGPSCFIGQVGADEYGNMLGNILKQNNAETSGMRLDSNAGTALAFXTLRTDGDVS

SEQ ID NO: 31779 - protein, 463 aa, Burkholderia sp. 383
MKNEHTTLLVIGGGPGGYVAAIRAGQLGIPTVLVERDRLGGTCLNIGCIPSKALIHVADAFEQARGHAGEGALGIRVRTPEIDIGKSVAWKDGIVDRLTRGVGALLKKNGVRVLHGDAQVVDGKTVDVVAGGHTTRISCEHLLLATGSEPVALPSMPFGGHVVSSTEALSPETLPKRLVVVGAGYIGLELGIVYRKLGVDVSVVEAAERVLPAYDAELVRPVADSLARLGVRLLLGHKVLGPAEHGAVRVQAADGAEQTLQADRVLVAVGRRPRVDGFGLESLPLDRNGRALWIDDECRTSMRNVWAIGDVAGEPMLAHRAMAQGEMVAELIAGKRRKFMPASIPAVCFTDPEIVTAGWSPDDARAADVDCVSASFPFAANGRAMTLQATDGFVRVVARRDNHLIVGWQAVGRGVSELAAAFSQSLEMGARLEDIGGTIHAHPTLGEALQEAALRALGHALHV

SEQ ID NO: 31780 - protein, 894 aa, Oryza sativa
  misc_feature (289)..(289): Xaa can be any naturally occurring amino acid
  unsure (1)..(894): unsure at all Xaa locations
MPPWWGKSFSKDAKKTTKENLIDTFHRLISPNDQKGSTKSKRSCRRGNDSSVEKSCRSTTVSRPTSPSKEVSRCQSFSADRPHAHPLPIPGVRPPVTRTVSDITESKPILEKRGKPPLLLPLPKPNRPPRRHGNSEVFSEIVVASPSSNCSDSDDHGDSQLQSPVGNDAENATLVTLKNKSSNARKECPGPITAKNMKEIHRPANQVHGSHILSTSPRGVAADSYQSNLQNPRPLVLDSAPNSLMSSPSRSPRRICPDHIPTSAFWAVKPHTDVTFVTRGQCSSPGSGXTSGHNSVGGDMLAQLFWQPSRSSPECSPIPSPRMTSPGPSSRVHSGSVSPLHPRSGGMAPESPTNRHDDGKKKQTHKLPLPPLSISHSSFHPNNSTPTSPISVPRSPGRTENPPSPGSRWKKGKLIGRGTFGHVYVGFNSDSGEMCAMKEVTLFLDDPKSKESAKQLGQEISLLSRLQHPNIVQYYGSETVDDKLYIYLEYVSGGSIHKLLQEYGQLGEQAIRSYTQQILSGLAYLHAKNTVHRDIKGANILVDPSGRVKLADFGMAKHINGQQCPFSFKGSPYWMAPEVIKNSNGCNLAVDIWSLGCTVLEMATSKPPWSQYEGIAAMFKIGNSKELPPIPDHLSEPGKDFIRKCLQRDPSQRPTAMELLQHPFVQKAVSLEKSVLSEPLEHLAVISCRSSAKMAAHTRNISSLGLEGQTIYQRRGAKFSSKHSDIRIRSNISCPVSPCGSPLLKSRSPQHSNGRMSPSPISSPRTTSGTSTPLSGGNGAIPFNHLKQSTYSNEGFAIPSRSPDDLFASRPTDPDLGQFIRVHQVSQGLQERVVSEADILSPQFGKRLGNVFDLRDKLSPSERFTHHAFVDHVKLNPSLDLTSGSPHLGLKHGN

SEQ ID NO: 31781 - protein, 606 aa, Arabidopsis thaliana [sequence omitted]

SEQ ID NO: 31782 - protein, 538 aa, Oryza sativa (japonica cultivar-group)
MGNCCGTPATAEEGGKRRRRGKQKKANPFTVAYNRAPSSAGAAAGRPGLMVLRDPTGRDLGARYELGGELGRGEFGITYLCTEAETGDRYACKSISKRKLRTPVDVEDVRREVEIMRHMPSHPNIVSLRAAYEDEDNVHLVMELCEGGELFDRIVARGHYTERAAAAVTRTIVEVVQMCHRHGVMHRDLKPENFLYANKKDSSPLKAIDFGLSVFFRPGERFTEIVGSPYYMAPEVLKRHYGPEVDVWSAGVILYILLCGVPPFWAETEQGVAQAIIRSVVDFKREPWPRVSEPAKDLVKRMLDPNPMTRLTAEQVLEHPWLHDSKKMPDIPLGDAVRARLQQFAAMNKLKKKALKVIAEHLSAEEAADIKDMFDKMDVSKNGQLTFEDFKAGIRKLGNQMPDSDLKILMDAADIDKNGILDYQEFVAVSIHVRKIGNDEHIQKAFSYFDQNKSGYIEIEELREALVDEIDGNDEDIINSIIRDVDTDKDGKISYDEFAVMMKAGTDWRKASRQYSRQRFSNLSLKLQKDGSISDDTQ

SEQ ID NO: 31783 - protein, 176 aa, Debaryomyces hansenii CBS767
MASQSMKKLAAANTEILKQIHLLAVIINLIVIMVLLVFNRPKSLIPYLLFSCPAFFCQFIIEQSARPVYDVDRMSGQRKLLKAGEDVKHEGLYEYMFDTMYITWIIDILMIVLGTNKVWWLYSIIPGFAIFKVVGLVKGLKGNKPETKPEEPEAPQKSKRQAKREANKNKVVRNVR

SEQ ID NO: 31784 - protein, 390 aa, Brassica napus
  misc_feature (244)..(244): Xaa can be any naturally occurring amino acid
  unsure (1)..(390): unsure at all Xaa locations
MADNTDNRRAIWGVPEKLQLHIAMLTLQFGYAGFHVVSRAALNMGISKLVFPVYRNIIALLLLLPFAYFLEKKERPAITLNFLIQFFFLALIGITANQGFYLLGLDYTSPTFASSMQNSVPAITFLMAALLRIEKVRINRRDGISKVLGTALCVAGASVITLYKGPTIYTPTSHLHAHLLTTNSAILAPLGDAAPKNWTLGCLYLIGHCLSWSGWLVFQAPVLKSYPARLSVTSYTLLFGIIQXFVIIAAFCERDSQAWAFHSGWELFTILYAGIVASGIAFAVQIWCIDRGGPVFVAVYQPVQTLVVAIMASIALGEEFYLGGIIGAVLIIAGLYFVLYGKSEERKFAALEKAMIQSSAEHVIERAPVSRGSVKSSITAPLLHQSTDNV

SEQ ID NO: 31785 - protein, 308 aa, Vibrio superstes
GFGRIGRFVFRAAQERNDIEVVGINDLIDVEYMAYMLKYDSTHGRFNGTVEVKDGNLIVNGKTVRVTAERNPEDLKWDAIDVDVVAEATGLFLTDETARKHITAGAKKVVLTGPSKDATPMFVSGVNFNTYAGQDIVSNASCTTNCLAPIAKVLNDKFGIESGLMTTVHATTATQKTVDGPSAKDWRGGRGASQNIIPSSTGAAKAVGVVLPEVNGKLTGMAFRVPTANVSVVDLTVNLKEGASYEAICAAMKEASEGEMAGVLGYTEDQVVSQDFIGEVCTSVFDAKAGIALNDKFVKVVSWYDNQV

SEQ ID NO: 31786 - protein, 304 aa, Vibrio superstes
GFGRIGRFVFRAAQERNDIEVVGINDLIDVEYMAYMLKYDSTHGRFNGTVEVKDGNLIVNGKTVRVTAERNPEDLKWDAIDVDVVAEATGLFLTDETARKHITAGAKKVVLTGPSKDATPMFVSGVNFNTYAGQDIVSNASCTTNCLAPIAKVLNDKFGIESGLMTTVHATTATQKTVDGPSAKDWRGGRGASQNIIPSSTGAAKAVGVVLPEVNGKLTGMAFRVPTANVSVVDLTVNLKEGASYEAICAAMKEASEGEMAGVLGYTEDQVVSQDFIGEVCTSVFDAKAGIALNDKFVKVVSWY

SEQ ID NO: 31787 - protein, 654 aa, Ralstonia metallidurans CH34
MQESSATTFPRCLLAHATQRPDHPAYREKDLGIWQTYGWSQTANEVRALACGLAALGFRRGMNLAVVGDNRPRLYWAMTAAQALGGIPVPLYQDAIANEMIYVLDDAEIEFAIVEDQEQVDKLLEVESQLAARGRAVRHLIYEDPRGLRDYDHPSLLSYERVQEIGREFDRANPGFFDAAVQAGAPEDTAIILYTSGTTGKPKGVCHSHAGLIGSARNGCKFDGLGADDDVLSYLPMAWVGDNLFSYAQALVAGFTVNCPESRETVMTDLREIGPTYYFAPPRIYEGLLTQVMIRMEDAGWIKRRLFQWAMNVARRCGADILDKRPVATLDRLRYALGEALIYGPLRNVLGMSRIRVGYTAGEAIGPDLFRFYRSIGINLKQFYGQTETCAYVCLQPDGQVKFDTVGPAAPGMEIRIAENGEVLVRGVGLLKNYYKRDDATREAINDEGYFLTGDAGVIDADGHLKIIDRAKDVGKLADGSMFAPKYIENKLKFFPYIKEAVAFGTDRDRVCAFINIDFDAVGNWAERRHLPYAGYVDLAAQPDVIAMIAECVEQVNADLAADAMLAGSQIARFLILHKELDPDDDELTRTRKVRRGFIAEKYGVLVEALYAGKPEQFIETRVKFEDGREGSVSATLKLVDVKRFPPVGGARAA

SEQ ID NO: 31788 - protein, 217 aa, Candida albicans SC5314
MNIINIGKTWEKIVLAARIIAAVPNASDVAVCSSRTFGQRAVLKFAAHTGATAIAGRFTPGNFTNYITRSFKEPRLVVVTDPRTDAQAIKESSYVNIPVIALTDMDSPSEYVDVAIPCNNKGKHSIGLIWWLLAREVLRLRGIIPDRTTEWSVMPDLYFYRDPEEIEQNAVEEAKTEEVEEAPVAEAETEWTGETEDVDWADSGATPAAEDAAASNW

SEQ ID NO: 31789 - protein, 376 aa, Festuca pratensis
MNSNSSSTIYDEAVGQEGSWRRLCDGCCMVPSVVYCHADSAYLCASCDVRIHSANRVASRHERVCLSVAHEHAPALLQCRTDAVASCAAYEAQAHYANLLAGMHQCVPVVSHPATAILADSLLAEAAVATTIRSCKEEEASWLLLSKNSANHNCSGDNRSSSTYFGEVDEYFDLVGYNSYYDSRMNNNRAQYVMQEQQHLQPMQKEYAEKEGSECVVPSQFATVSKPQQSGYALVGAEQAASMTAGVSVYTDSVNNSISFSSMEGGIVPDNTVVDLPHSIIPTPAGASSLHSGPPLQMPLHFSSMDREAKVLRYKEKKKTRTFEKTTRYATRKAYAEARPRIKGRFAKISEAEMEVDQMFSAAALSDSSYSTVPWF

SEQ ID NO: 31790 - protein, 376 aa, Triticum aestivum
ALIKKHVVRLTKFDYRLANRLDSDLQKLRCRVNYHALRFTDPIQEMGEKIIQRMRERSTYFIALHLRFEPDMLAFSGCYYGGGEKEKRELGVIRKRWKTLHASNPEKERRHGRCPLTPEEVGLMLRALGYRKNVHIYVASGVIYGGAKTLAPLKALFPNLHTKETVTSKDELAPFSKYSSRMAALDFIVCDGSDAFVTNNNGNMAKILAGRRRYLGHKRTIRPNARRLYSLFLSRGNMSWDAFSSKVHMAQKGFMGEPKELRPGRGEFHENPSTCICENTDPKTPTKPNPRSEQGLINGTEGRKAITEPTVANHTNEELVGSSAEEDDASVEKEDDTSAEKEDDTSEEKEEIADPEAEDDALVRPDDPELEEVLSD

SEQ ID NO: 31791 - protein, 300 aa, Vibrio gallicus
GFGRIGRFVFRAAQERNDIEVVGINDLIDVEYMAYMLKYDSTHGRFNGTVEVKDGNLIVNGKTVRVTAERNPEDLKWDAIDVDVVAEATGLFLTDETARKHITAGAKKVVLTGPSKDATPMFVSGVNFNTYAGQDIVSNASCTTNCLAPIAKVLNDKFGIESGLMTTVHATTATQKTVDGPSAKDWRGGRGASQNIIPSSTGAAKAVGVVLPEVNGKLTGMAFRVPTANVSVVDLTVNLKEGASYEAICAAMKEASEGEMAGVLGYTEDQVVSQDFIGEVCTSVFDAKAGIALNDKFVKV

SEQ ID NO: 31792 - protein, 339 aa, Brucella suis 1330
MRVYYDRDADVNLIKSKKVVIVGYGSQGRAHALNLKDSGAANVRVALREGSATVQKAQADGFEVMNVADAAKWADLMMMATPDELQADIYRDHIHNNLRDGAAIAFAHGLNVHFGLIEPKKTVDVVMIAPKGPGHTVRGEYQKGGGVPCLIAIHQDASGNAHDLALSYASGVGGGRSGVIETTFKEECETDLFGEQAVLCGGVVELIRTGFEVLVEAGYAPEMAYFECLNEMKLIVDLIYEGGIANMNYSISNTAEWGEYVTGPRIITAETKAEMKRVLKDIQTGKFTSDWMQEWKAGAARFKGIRRLNDAHQIEEVGGKLRAMMPWIEKNKLVDKARN

SEQ ID NO: 31793 - protein, 55 aa, Passiflora jorullensis
WEYQVGPSVGIDAGDHIWCSRYILERITEQVGVVLTLDPKPIEGDWNGAGCHTNY

SEQ ID NO: 31794 - protein, 225 aa, Triticum aestivum
LSQNKFVQKSRLVPVRNSRDIVDPRVRQQGSYPIKLFYTSNMPIILHSALITNLYFISQLLYKKFSGNFLVNLLGIWKESEYSGHSIPVGGLAYYVTAPSSLADVVANPFHALFYVVFMLSACALFSKTWIEVSGSSARDVARQLKEQQMVMPGHRESNLERELNRYIPTAAAFGGVCIGALTVLADFMGAIGSGTGILLAVTIIYQYFETFEKERATELGFFGF

SEQ ID NO: 31795 - protein, 60 aa, Passiflora kalbreyeri
WEYQVGPSVGIDAGDHIWCSRYILERITEQAGVVLTLDPKPIEGDWNGAGCHTHYSTKSR

SEQ ID NO: 31796 - protein, 240 aa, Glycine max
MALEALNSPTTTAPSFPFDDPTIPWAKRKRSKRSRDHPSEEEYLALCLIMLARGGTTTVNNRHVSPPPLQPQPQPTPDPSTKLSYKCSVCDKSFPSYQALGGHKASHRKLAGAAEDQPPSTTTSSAAATSSASGGKAHECSICHKSFPTGQALGGHKRCHYEGNGNGNNNNSNSVVTVASEGVGSTHTVSHGHHRDFDLNIPAFPDFSTKVGEDEVESPHPVMKKPRLFVIPKIEIPQFQ

SEQ ID NO: 31797 - protein, 114 aa, Salmonella enterica
SGGHLNPAVTIALWLFACFPKQKVLPYIIAQFAGAFGGALLAYVLYSSLFTEFETAHHMVRGSVESLQLASIFSTYPAAALNVWQAALVEVVITSILMGMIMALTDDGNGIPKG

SEQ ID NO: 31798 - protein, 95 aa, Francisella tularensis
MNIRPLQDRVLVRRAEEEKKSAGGIILTGNAQEKPSQGEVVAVGNGKKLDNGTTLPMDVKVGDKVLFGKYSGSEVKVGDETLLMMREEDIMGIIA

SEQ ID NO: 31799 - protein, 544 aa, Francisella tularensis
MAAKQVLFSDEARAKMLDGVNTLANAVKVTLGPKGRNVVLDKSFGAPTITKDGVSVAKEIELEDKFENMGAQIVKEVASKTADVAGDGTTTATVLAQALLTEGLKAVTAGMNPMDLKRGIDKATARLVEELKALSKPCSDPKSIEQVGTISANSDATVGKLIADAMAKVGKEGVITVEEGKGFEDELDVVEGMQFDRGYLSPYFATNQENMTTDLENPYILIVDKKISNIRDLLPILEGVSKSGRALLIIAEDVESEALATLVVNNMRGVVKVCTVKAPGFGDRRKAMLEDIATLTGATFVSEDLSMKLEETNMEHLGTASRVQVTKDNTTIIDGAGEKEAIAKRINVIKANIAEANSDYDREKLQERLAKLSGGVAVIKVGAVTEAEMKEKKDRVDDALHATRAAVEEGIVAGGGVALIRAQKALDGLTGENDDQNHGIALLRKAIEAPLRQIVSNAGGESSVVVNQVKANQGNYGYNAANDTYGDMVEMGILDPTKVTRSALQHAASIAGLMITTEAMIGEIKEAAPAMPMGGGMGGMPGMM

SEQ ID NO: 31800 - protein, 279 aa, Glycine max
  misc_feature (63)..(63): Xaa can be any naturally occurring amino acid
  unsure (1)..(279): unsure at all Xaa locations
MFSPSMDSARDASGVAGTVLIPMRFVWPYGGRSVYLSGSFTRWSELLQMSPVEGCPTVFQVFXSLVPGHHQYKFFVDGEWRHDDLQPTKSGEYWIVNTVSLATDPNILPVLTPDIVSGSNMDVDNEAFRRMVRLTDGTLSNVLLPRISDVDIQTSRQRISAFLSMSTAYELLPESGKVVTLDVDLPVKQAFHILHEQGIPIAPLWDICKGQFVGVLSALDFILILRELGNHGSNLTEEELETHTISAWKGGKWTGFTQCFIRAGPYDNLKEIAVKILQH

SEQ ID NO: 31801 - protein, 628 aa, Legionella pneumophila str. Lens
MKQFPGFYFDRNRAIDLICMGRVAVDLYAEQIGLDLKDVASFKKYLGGCAGNIAVGAARLGLKSQMFSCVGSDELGKFLKEELEREGVNIELLSETDNHLTGLVLLGIKPPSNFPLLFYRNDCADMQIKSDQISFTHLKNAKALLITGTGLSTESMKNTTLEVVHLARKAETTIVFDLDYRPVLWRLTVIGNGESRYCQNEYVTQVYQQVLPLCDLIVGTEEEICIAGGSNDIEVSLINIRQRTDVPIVVKLGEKGAHVHFGADKGLLQAKSFPVEVLNVLGAGDGFMSGLLAGLLQGKSWERAVTYANACGALVVTRHGCAPAIPYKEELNYFIQEYDHDPEIWSSSQLTQLHEELSKNQKTQLLIKNPCGFADGLNSIVTMQDSPTAMSFSSLKLNKGQSHQFNSSYEFAALLMTGKVAFQYGSYSQEVERTDYFSQSPYVLHCSKNEVSSVIALTDCEILLMETENENLFSPILFDASNMLELDNRGEGVLENTSYRLVRTVFDKRNRPESNLVVGEIITFQGRWSSYPSHYHQQPEIYHYRFSEPQGYAFGENGKEVMRIEHYDTYQIANNQEHAHCTAPGYALYTLWFIRHLNNNAYTLPTFTKDHEWTRTSRANLRAWQQKQ

SEQ ID NO: 31802 - protein, 228 aa, Vibrio fischeri ES114
MELSTTVSELRYALDTFFFLMSGALVMWMAAGFAMLEAGLVRSKNTTEILTKNICLYAIACTTYLVVGYNIMYVDNGSGGFLPSIGTLIGTQAEGADHSLESDFFFQVVFVATAMSVVSGAVAERMKLWSFLIFSAILTAFIYPMEGYWTWGGGFLSEAGFSDFAGSGIVHMAGASAALAGVLLLGARKVSTVRKVKYIQFQVQTCLWLHWVLLFYGLVGLVLMVVLS

SEQ ID NO: 31803 - protein, 267 aa, Azoarcus sp. EbN1
MKQNLSGKVAYVSGAASGIGAAIARVFAAEGASVLLGDVQVERGETVAAHIREQGGRALFIHHDVSDERQWESALACAVEEFGGMDLLVNNAGIEQTGLLADVELADINKLLAVNVAGVILGHKHAIRTMRPGGSAGKGGSIINLSSVAGLIGTPALGVYSATKGAVRLLSKAAAVECGRLGYGIRVNSIHPGLVDTDMGVKLVDDFVGLGVFADRETALRQMLETYPIGRTGVPGDIAGTALFLASEQSSWITGTEIVVDGGMTIS

SEQ ID NO: 31804 - protein, 264 aa, Salmonella enterica subsp. enterica serovar Typhimurium
MNDSLKAQCGAEFLGTGLFLFFGIGCLSALKVAGASLGLWEICIIWGLGISLAVYLTAGISGGHLNPAVTIALWLFACFPKQKVLPYIIAQFAGAFGGALLAYVLYSSLFTEFETAHHMVAGSVESLQLASIFSTYPAAALNVWQAALVEVVITSILMGMIMALTDDGNGIPKGPLRLCLLGILVAVIGASTGPLTGFAMNPARDFGPKLFTWLAGWGNMAMSGGREIPYFIVPIVAPVIGACAGAAIYRYFIGKNLPCNRCEL

SEQ ID NO: 31805 - protein, 302 aa, Vibrio gallicus
GFGRIGRFVFRAAQERNDIEVVGINDLIDVDYMAYMLKYDSTHGRFNGTVEVKDGNLIVNGNTVRVTAERNPEDLKWDAIGVDVVAEATGLFLTDETARKHITAGAKKVVLTGPSKDATPMFVNGVNFDTYAGQDIVSNASCTTNCLAPIAKVLNDKFGIETGLMTTVHATTATQKTVDGPSAKDWRGGRGASQNIIPSSTGAAKAVGVVLPEVNGKLTGMAFRVPTANVSVVDLTVNLVNGASYEAICAAMKEASEGEMAGVLGYTEDAVVSQDFIGETCTSVFDAKAGIALNDKFVKVVS

SEQ ID NO: 31806 - protein, 301 aa, Vibrio gallicus
GFGRIGRFVFRAAQERNDIEVVGINDLIDVDYMAYMLKYDSTHGRFNGTVEVKDGNLIVNGNTVRVTAERNPEDLKWDAIGVDVVAEATGLFLTDETARKHITAGAKKVVLTGPSKDATPMFVNGVNFDTYAGQDIVSNASCTTNCLAPIAKVLNDKFGIETGLMTTVHATTATQKTVDGPSAKDWRGGRGASQNIIPSSTGAAKAVGVVLPEVNGKLTGMAFRVPTANVSVVDLTVNLVNGASYEAICAAMKEASEGEMAGVLGYTEDAVVSQDFIGETCTSVFDAKAGIALNDKFVKVV

SEQ ID NO: 31807 - protein, 242 aa, Glycine max
MEFPNEAIPEGCSQKKTGRGKIEIKRIENTTNRQVTFCKRRNGLLKKAYELSVLCDAEVALVVFSSRGRLYEYANNSDLGTIDRYKKACAASTNPESVSEANTQFYQQEASKLKRQIRDIQNLNRHILGEALSSLSLKELKNLESRLKKGLSRVRSRKHETLFADIEFMQKREIELQNHNNFLRAKIAEHEKAQQRQQDMIPGNVCESTIPPQSYDRNFFPVNLIDSNNQYSNQDQTALQLV

SEQ ID NO: 31808 - protein, 404 aa, Mycobacterium bovis AF2122/97
MREVPHVLGIVLAGGEGKRLYPLTADRAKPAVPFGGAYRLIDFVLSNLVNARYLRICVLTQYKSHSLDRHISQNWRLSGLAGEYITPVPAQQRLGPRWYTGSADAIYQSLNLIYDEDPDYIVVFGADHVYRMDPEQMVRFHIDSGAGATVAGIRVPRENATAFGCIDADDSGRIRSFVEKPLEPPGTPDDPDTTFVSMGNYIFTTKVLIDAIRADADDDHSDHDMGGDIVPRLVADGMAAVYDFSDNEVPGATDRDRAYWRDVGTLDAFYDAHMDLVSVHPVFNLYNKRWPIRGESENLAPAKFVNGGSAQESVVGAGSIISAASVRNSVLSSNVVVDDGAIVEGSVIMPGTRVGRGAVVRHAILDKNVVVGPGEMVGVDLEKDRERFAISAGGVVAVGKGVWI

SEQ ID NO: 31809 - protein, 125 aa, Brassica napus
VRSRWGLQGMTALVTGGASGIGYAIGEELASFGARIHVCDISKTLLNQSLSEWEKKGFQVSGSVCDVTSRPEGETLIQKVSSLFDGKLNIFVNNVGVLRGKPTTGFGAGRFAFHISTNLEFADHF

SEQ ID NO: 31810 - protein, 303 aa, Vibrio gallicus
GFGRIGRFVFRAAQERNDIEVVGINDLIDVDYMAYMLKYDSTHGRFNGTVEVKDGNLIVNGNTVRVTAERNPEDLKWDAIGVDVVAEATGLFLTDETARKHITAGAKKVVLTGPSKDATPMFVNGVNFDTYAGQDIVSNASCTTNCLAPIAKVLNDKFGIETGLMTTVHATTATQKTVDGPSAKDWRGGRGASQNIIPSSTGAAKAVGVVLPEVNGKLTGMAFRVPTANVSVVDLTVNLVNGASYEAICAAMKEASEGEMAGVLGYTEDAVVSQDFIGETCTSVFDAKAGIALNDKFVKVVSW

SEQ ID NO: 31811 - protein, 59 aa, Passiflora karwinskii
WEYQVGPSVGIDAGDHIWCSRYILERITEQAGVVLTLDPKPIEGDWNGAGCHTNYSTKS

SEQ ID NO: 31812 - protein, 303 aa, Vibrio gallicus
VGINGFGRIGRFVFRAAQERNDIEVVGINDLIDVDYMAYMLKYDSTHGRFNGTVEVKDGNLIVNGNTVRVTAERNPEDLKWDAIGVDVVAEATGLFLTDETARKHITAGAKKVVLTGPSKDATPMFVNGVNFDTYAGQDIVSNASCTTNCLAPIAKVLNDKFGIETGLMTTVHATTATQKTVDGPSAKDWRGGRGASQNIIPSSTGAAKAVGVVLPEVNGKLTGMAFRVPTANVSVVDLTVNLVNGASYEAICAAMKEASEGEMAGVLGYTEDAVVSQDFIGETCTSVFDAKAGIALNDKFVK

SEQ ID NO: 31813 - protein, 418 aa, Frankia sp. EAN1pec
MNTSAEDVRASAVRARQAAGQLAPLSRAAKDAALLGMAAALLDRSAEILAANALDTAAARAAGTSAALVDRLTLTPERIEAMADGLRQVAALEDPVGEVVRGRVLPNGLELRQVRVPLGVIGIIYEARPNVTVDAAGLCIKSGNAVLLRGSASALNSNRVLVDVLREAAVAAGLPADGVQLVPGADHDSVKHLMRLRGLVDVLIPRGGAGLIRAVVEESTVPVIETGVGNCHVYVDVDADVDTALAITLNAKTQKVSVCNSAETLLVHAGIAAEFLPRVLTALRDAGVTVHGDETVRAVDPSAVPVTDEDWATEYLSLDMAVGVVDSLDQALDHIRRWSSGHTEAIVTRSLAASRRFVASCDSAAVMVNASTRFTDGERFGMGAEIGISTQKLHARGPMGLPELTSTTWVGIGDGHLV

SEQ ID NO: 31814 - protein, 498 aa, Arabidopsis thaliana
MGKVAVAFAAVAVVAACSVAAVMVGRRMKSRRKWRTVVEILKELEDDCDTPVGRLRQVVDAMAVEMHAGLASEGGSKLKMLLTFVDDLPTGREKGTYYALHLGGTYFRILRVLLGDQRSYLDVQDVERHPIPSHLMNSTSEVLFNFLAFSLERFIEKEENGSDSQGVRRELAFTFSFPVKHTSISSGVLIKWTKGFEISEMVGQDIAECLQGALNRRGLDMHVAALVNDTVGALSLGYYHDPDTVVAVVFGTGSNACYLERTDAIIKCQGLLTTSGSMVVNMEWGNFWSSHLPRTSYDIDLDAESSNANDMGFEKMISGMYLGDIVRRVILRMSEDSDIFGPISPVLSEPYVLRTNSVSAIHEDDTPELQEVARILKDIGVSDVPLKVRKLVVKICDVVTRRAGRLAAAGIAGILKKIGRDGSGGITSGRSRSEIQMQKRTVVAVEGGLYMNYTMFREYMEEALVEILGEEVSQYVVVKAMEDGSSIGSALLVASLQS

SEQ ID NO: 31815 - protein, 58 aa, Passiflora kawensis
WEYQVGPSVGIEAGDHIWCSRYILERITEQAGVVLTLDPKPIDGDWNGAGCHTNYSTK

SEQ ID NO: 31816 - protein, 92 aa, Thermotoga maritima MSB8
MMKVIPLGERLLIKPIKEEKKTEGGIVLPDSAKEKPMKAEVVAVGKIDDDEKFDIKVGDKVIYSKYAGTEIKIDDEDYIIIDVNDILAKIEE

SEQ ID NO: 31817 - protein, 538 aa, Thermotoga maritima MSB8
MPKILKFNEEARRALERGVDKVANAVKVTLGPKGRNVVIEKSWGSPTITNDGVSIAKEIELEDKFENLGAQLVKEVASKTNDVAGDGTTTATVLAQAMIKEGLKNVAAGANPILLKRGIDKAVEKAVEEIKKVSKKLSGREDIAHVAAISANSAEIGELIAEAMDKVGEDGVITVEDSKTLETYVEFTEGMQFDRGYISPYFVTDAEKMEVVLKEPFILITDRKLSAVKPLIPILEKVAQTGKPLLVIAEDVEGEVLTTLVLNKLKGTLQSCAVKAPGFGERRKAMLQDIAILTGGQVASEELGINLEDLTLEDLGRADLVRVKKDETIIIGGKGDPEAIKKRIAQIKAQIEETTSEYEKETLQERMAKLAGGVAVIKVGAATETELKEKKHRIEDALSATRAAVEEGIVPGGGVTLLRARKAVEKVIEELEGDEKIGAQIVYKALSAPIKQIAENAGYDGAVIIEKILSNDDPAYGFDALRGEYCNMFERGIIDPAKVTRSALQNAASIAGMLLTTEVLIVEKPEEKKETPSMPEEF

SEQ ID NO: 31818 - protein, 1074 aa, Physcomitrella patens subsp. patens
MAVGNEWINGYLEAILDTGEKITDHKHIGEGVNDFKAAKYFVETVTGFDESSLYRTWIKSQASATRSSQERTLRMEHLCWRIWHIARKKRLIEWEDAHRLARRHMEREQGRKDATADMSSDLSEGEKETTPADTMPRVESSLALASSNVGEITTPEKEKPDKRLYIVLVSLHGLVRGDNMELGRDSDTGGQIKYVVELARALALMPEVYRVDLLTRQICSPDVDWSYGEPTEMLSMGSYDDVEDVGESSGAYIVRIPCGPRDQYLRKELLWPYVQEFVDGALAHILNLSKVLGEQIGSGGLIWPHVIHGHYADAGDIASLLSGALNVPMVLTGHSLGRNKLEQLLKQGRQTKHDINATYKIMRRIEAEELSLDAAELVITSTKQEIEEQWGLYDGFDVKLERVLRARARRGVNCHGRYMPRMVVIPPGMDFSNVIVQDTGDVVEDGDAVQITNSDASNAVPVSPRAKPPIWDEIMRFFTNPHKPMILALARPDPKKNLTTLLRAFGERRTLRELANLTLIMGNRDDIDEMSGGNAAVMTTVLKLIDKYNLYGQVAYPKHHKQADVPEIYRLAAKTKGVFINPALVEPFGLTLIEAAAHGLPMVATKNGGPVDIHKALSNGLLVDPHNEKEIADALLKLVADRSLWNLCRKNGLRNIHLFSWPEHCRTYLSRIALCRMRHPQWKAETSTEDEDLDSQGDSLRDVQDFSLRLSVDGNMSISNPADLERLLKGQSSLGKKNGLEDFKPLAGKQRTVSGRMESMQEEGPETSRFNSTGTHKAQPLKKRRRLVVIAVDGYDPTTNKPSSRLENLIQGIVKSIRSDSNIRVQPGLIISSALTKSETVAMLNSAGLSHMEFDALICSSGSEVYYPASIQDDSVTTDNSDLHADEDYKSHIDYRWGYEGLRKTMARLNTPDTESGSNDKIWTEDTANCNSHCLAYTVTNSDIAPTVDQLRQRLRMRGLRCHVMFCRNASRLHVLPLLASRSQALRYFFARWNVDVANMFVVVGETGDTDYEGLLSGTHKTIIIKDVVAESSERKLRATGNYGREDVAPIESSNMVVTEPNSVCDVLLDALKY

SEQ ID NO: 31819 - protein, 442 aa, Carboxydothermus hydrogenoformans Z-2901
MSYTKNDIMDMVREQNVKFIRLQFTDIFGVLKNVAIPVEQLEKALNNELMFDGSSIEGFVRIEESDMYLRPDPNTFAVFPWRPRNGAVARLICDVYNPDGTPFEGDPRYVLKRALAEAKELGYTMYVGPELEFFLFQVDAEGKPTLVTHDNAGYFDLSPVDLGENARRDMVLALEQMGYEVEASHHEVAPGQHEIDFKYSDALDVADKIVTFKVVVRSIAQRHGLHATFMPKPLFGVNGSGMHTNQSLFKDGQNAFYDPNGELQLSETAYYYIGGIMKHIKAITAIANPVVNSYKRLVPGYEAPVYIAWSARNRSPLIRIPAKRGSSTRIELRSPDPSANPYLALAVMLKAGLDGIKNKIKPPAPVNQNLYEMTAEERKALGVDTLPGSLKEAIDCLLEDKVIQEALGKHVFERFVEAKLKEWDEYRVQVHEWEVKKYLTMY

SEQ ID NO: 31820 - protein, 1075 aa, Physcomitrella patens subsp. patens
MAAGNEWINGYLEAILDTGEKITDHKHIGDEGVNDFKAAKYFVETVTGFDESSLYRTWIKSQASATRSSQERTLRMEHLCWRIWHIARKKRLIEWEDAHRLARRHMEREQGRKDATADMSSDLSEGEKESIPQDCIPRVESALTLASSNFGESISPEKEKPEKRLYIVLISLHGLVRGDNMELGRDSDTGGQIKYVVELARALALMPEVYRVDLLTRQICSPDVDWSYGEPTEMLSLGSYDDFEDVGESSGAYIVRIPCGPRDQYLRKELLWPYIQEFVDGALTHILNMTKVLGEQIGSGGLIWPHVIHGHYADAGDIASLLSGALDVPMVLTGHSLGRNKLEQLLKQGRQSKHDINATYKIMRRIEAEELSLDAAELVITSTKQEIEEQWGLYDGFDVKLERVLRARARRGVSCHGRYMPRMVVIPPGMDFSNVIVQDTGDVVDDGEAVQITSSDSSSVVPVSPRANPPIWDEIMRFLTNPHKPMILALARPDPKKNLTTLLRAFGERRALRELANLTLIMGNRDDIDEMSNGNAAVMTTVLKLIDKYDLYGQIAYPKHHKQSDVPEIYRFAAKTKGVFINPALVEPFGLTLIEAAAHGLPMVATKNGGPVDIHKALSNGLLVDPHNEKEIADALLRLVADRSLWNECRKNGLKNIHLFSWPEHCRTYLSRIALSRMRHPQWKTETSTEDEDLESQSDSLRDVQDFSLRLSVDGNMSISNPADLERMLKSQNSLGKNNGAEDLKPLTGKQRTMSGRMESMQVEGPETKRFGSLTGAHKAQPLKKRRRLVVIAVDGYDPATNNPSSRFVSLLQDLVKNIRSDSSIRVQPGLIISSALTKSEIVAMLNSAGLSPIEFDALICSSGSEVYYPASHQDDNGATDNIDLHADKDYSTHIDYRWGYEGLRKTMARLNKSDAENANNDKILIEDTKNCNSHCLAYSVTNSDIAPTVDQLRQRLRMRGLRCHVMFCRNSSRLHVLPLLASRSQSLRYFFARWNVDVANMFVVLGETGDTDYEELLSGTHKTIIVKDIVEGGSEKKLRATGNYGREDVAPAENSNMIVVEANATCDLLLDALK

SEQ ID NO: 31821 - protein, 524 aa, Brucella suis 1330
MAIAPKAGFARTLFATVALGAMSVAGTVSMGTPPALAAQGPASVADLAEGLLDAVVNISTSQTVKDDGEGDGPVPMPQVPEGSPFQEFFKDFFNDKDGAQGDDSRKVQSLGSGFIIDAEKGYIVTNNHVIADADEIEVNFNDGSKLKAELVGKDTKTDLAILKVDPSKHKLKAVHFGNSEKARIGDWVLAIGNPFGLGGTVTAGIISARKRDINSGPYDDFIQTDAAINRGNSGGPLFDMDGKVIGINTAIISPSGGSIGIGFAIPAEMAAGVIDQLKEFGEVRRGWLGVRLQPVTEDIAQSLGLKETKGALIAGLIENSGVDNKAIEAGDVVIRFDGKPVDTARDLPRLVAESPVGKEVEIVVIRQGAEKTLKVKLGRLVEDDKSTEPAVEDQVPAPDDGEQPGARQETPDKSDKPKKEHKSDAAPSVLGMKLSKLDDDIRGEFGIAEDVEGVAILYVAPGTAAGEKRIETGDVIVDIGQVTVKTPEDVKKRIDALRREGRKNALLMLASRSGELRFVTIRID

SEQ ID NO: 31822 - protein, 364 aa, Moraxella catarrhalis
MTNTGTTDMKNIDTSPSNSEHYLPKKILVTGGAGYIGSHTLIELIQAGFVPVVYDNLSNSSFVAVQRVEQIVGKHIEFIQGDVLDKTHLDAVFKAHQFFAVVHFAGLKAVGESTKNPLKYYQNNVVGTLSLLELMAKYGVKNCIFSSSATVYGSSNRLPITEDMPRFCTSPYGQSKLMVEHILEDLVNADDTWNVVCLRYFNPIGAHESGRIGEDPTDIPNNLMPYISQVAVGNLKQLSVFGNDYETPDGTGVRDYIHVVDLAKGHVAALHYLVGQSVGIGFCPINLGTGQGTSVLQLIKAFESNTGQSVPYVITSRRTGDIAAYYASADKAKAILNWTAELDIERMCVDTWRWQSNNPKGYLS

SEQ ID NO: 31823 - protein, 505 aa, Brassica napus
MTSINVKLLYHYVITNLFNLCFFPLTAIVAGKAYLTIDDLHHLYYSYLQHNLITIAPLLAFTVFGSVLYIATRPKPVYLVEYSCYLPPTHCRSSISKVMDIFFQVRKADPSRNGTCDDSSWLDFLRKIQERSGLGDETHGPEGLLQVPPRKTFARAREETEQVIIGALENLFKNTNVNPKDIGILVVNSSMFNPTPSLSAMVVNTFKLRSNVRSFNLGGMGCSAGVIAIDLAKDLLHVHKNTYALVVSTENITYNIYAGDNRSMMVSNCLFRVGGAAILLSNKPRDRRRSKYELVHTVRTHTGADDKSFRCVQQGDDENGQTGVSLSKDITDVAGRTVKKNIATLGPLILPLSEKLLFFVTFMGKKLFKDEIKHYYVPDFKLAIDHFCIHAGGKAVIDVLEKNLGLAPIDVEASRSTLHRFGNTSSSSIWYELAYIEPKGRMKKGNKVWQIALGSGFKCNSAVWVALNNVKASTNSPWEHCIDRYPVKIDSDSGKSETRVPNGRS

SEQ ID NO: 31824 - protein, 323 aa, Glycine max
MGTQTMGTHGGGGDSNGKQSPLQPLVRQNSMYSLTLDEVQNQLGDLGKPLTSMNIDELLKNVWTAEASQTIGMDNEGTAQASQASLQRQASLSLTGALSKKTVDEVWRDIQQNKIVGEKKFQDRHPTLGEMTLEDFLVKAGVVAGASSNRTNTSTIAGVDSNVAVPQFPSQAQWIQYPQAQYQHPPQSLMGMYMPSQGMVQPLHMGAGASLDVSFADNQMAMPSSLMGTMSDTQTPGRKKSTSEDMIEKTVERRQKRMIKNRESAARSRARKQAYTNELENKVSRLEEENERLRKRKELEQMLSCAPPPEPKYQLRRIASAPF

SEQ ID NO: 31825 - protein, 513 aa, Arabidopsis thaliana
MFETEHHTLLPLLLLPSLLSLLLFLILLKRRNRKTRFNLPPGKSGWPFLGETIGYLKPYTATTLGDFMQQHVSKYGKIYRSNLFGEPTIVSADAGLNRFILQNEGRLFECSYPRSIGGILGKWSMLVLVGDMHRDMRSISLNFLSHARLRTILLKDVERHTLFVLDSWQQNSIFSAQDEAKKFTFNLMAKHIMSMDPGEEETEQLKKEYVTFMKGVVSAPLNLPGTAYHKALQSRATILKFIERKMEERKLDIKEEDQEEEEVKTEDEAEMSKSDHVRKQRTDDDLLGWVLKHSNLSTEQILDLILSLLFAGHETSSVAIALAIFFLQACPKAVEELREEHLEIARAKKELGESELNWDDYKKMDFTQCVINETLRLGNVVRFLHRKALKDVRYKGYDIPSGWKVLPVISAVHLDNSRYDQPNLFNPWRWQQQNNGASSSGSGSFSTWGNNYMPFGGGPRLCAGSELAKLEMAVFIHHLVLKFNWELAEDDKPFAFPFVDFPNGLPIRVSRIL

SEQ ID NO: 31826 - protein, 125 aa, Salmonella enterica
ASLGLWEICIIWGLGISLAVYLTAGISGGHLNPAVTIALWLFACFPKQKVLPYIIAQFAGAFGGALLAYVLYSNLFTEFETAHHMVRGSVESLQLASIFSTYPAAALNVWQAALVEVVITSILMG

SEQ ID NO: 31827 - protein, 150 aa, Brassica napus
MAPMKLYGAVMSWNVTRCATALEEAGSDYEIVPINFATAEHKSPEHLVRNPFGQVPALQDGDLYLFESRAICKYAARKNKPELLREGNLEEAAMVDVWIEVEANQYTAALNPILFQVLISPMLGGTTDQKVVDENLEKLKKVLEVYEARL

SEQ ID NO: 31828 - protein, 317 aa, Mannheimia succiniciproducens MBEL55E
MTTQLDALRNMTVVVADTGDIEAIKKYQPQDATTNPSLILSASALPQYASLIDDAINYAKAKSTDKAQQLIDAEDKLAVNIGLEILKIVPGRISTEVDARLSYDTAATVEKARKLIKLYNEAGINNDRILIKVASTWQGIRAAEILEKEGINCNLTLLFSQAQARACAEAGVYLISPFVGRILDWYKANTDKKEYVPNEDPGVISVTSIYNYYKQYGYQTVVMGASFRNIGEITELAGCDRLTIAPALLKELQESNADLPRKLDYKGEVKPKPAPLTESQFYWEHNNDPMAVDKLAEGIRKFAADIEKLEAMLSTKL

SEQ ID NO: 31829 - protein, 400 aa, Corynebacterium striatum
MAQENLQKIVDSLESSRAEREELYKWFHQHPEMSMQEHETSKRIAEELEKLGLEPQNIGVTGQVAVIKNGEGPSVAFRADFDALPITENTGLDYSADPELGMMHACGHDLHTTALLGAVRALVENKDLWSGTFIAVHQPGEEGGGGARHMVDDGLAEKIAAPDVCFAQHVFNEDPAFGYVFTPGRFLTAASNWRIHIHGEGGHGSRPHLTKDPIVVAASIITKLQTIVSREVDPNEVAVVTVGSIEGGKSTNSIPYTVTLGVNTRASNDELSEYVQNAIKRIVIAECQAAGIEQEPEFEYLDSVPAVINDEDLTEQLMAQFREFFGEDQAVEIPPLSGSEDYPFIPNAWGVPSVMWGWSGFAAGSDAPGNHTDKFAPELPDALERGTQAILVAAAPWLMK

SEQ ID NO: 31830 - protein, 152 aa, Brassica napus
MFKKIMKGGHKKPSKSESNEPSSYNLGGSNVVVSHASRGALAPPSQVTTATPPPPITSVTPLPLFRDVPVSERQSLFLRKLQNCCFHFDFTDTTKIVREKEIKRQTLLELVDFIQSGASKIISESCQEEMIKMVSLNLFRCLPPASHENTGQ

SEQ ID NO: 31831 - protein, 308 aa, Silicibacter sp. TM1040
MATALLTHADCLTHETPPGHPEQVARLEHVLHALAGLDLVRVTAPLAAEDDILRAHPATYLADLRRALPTEGRRALDADTWMSAGSLDAAFRAVGAAVRAVDMVLAGDVQNAFCATRPPGHHAETDTPMGFCLFGTAALAAKHALDHHGLKRVAVVDFDVHHGNGTQDLLWDERRALVISSHQMPLWPGSGNSDDDGAYDNVMNLPLRPETGGDEMRQIYQTQAFARLRAFKPELIILSAGFDAHREDPLAQLNWKTDDFRWLTSELCLLAQELCQGRIVSTLEGGYDLNALADAAKAHVEELIKAAT

SEQ ID NO: 31832 - protein, 113 aa, Pyrus communis
MKLYSSLWNADDWATRGGLEKTDWSKAPFIASYRGFHIDGCEASVEAKFCATQGKRWWDQKEFQDLDAQQWRRLRWVRRKFTIYNYCMTESDTLLCHRSARGTETYKPRVNYD

SEQ ID NO: 31833 - protein, 172 aa, Antirrhinum majus
KATELRLGLPGTDESEPQTSSSIKNNNNKRSSSEMQGSCQKSTQQEESIAPAPKAQVVGWPPVRSFRKNVMKASESDGSGMFVKVSMDGAPYLRKIDLKFYNNYFDLLKALENMFKCTIGVYSEREGYNGSEFAPTYEDKDGDWMLVGDVPWDMFITSCKRLRIMQSKLCCL

SEQ ID NO: 31834 - protein, 162 aa, Salmonella enterica
ASLGLWEICIIWGLGISLAVYLTAGISGGHLNPAVTIALWLFACFPKQKVLPYIIAQFAGAFGGALLAYVLYSSLFTEFETAHHMVRGSVESLQLASIFSTYPAAALNVWQAALVEVVITSILMGMIMALTDDGNGIPKGPLAPLLIGILVAVIGASTGPLT

SEQ ID NO: 31835 - protein, 582 aa, Saccharomyces cerevisiae
MEETKYSSQQEIEGACGSDASLNARGSNDSPMGLSLYLCLASLTLVLFITALDILIVGTIIDVVAEQFGNYSKTGWLVTGYSLPNAILSLIWGRFASIIGFQHSLILAILIFEAGSLIAALASSMNMLIFGRVVAGVGGSGLQTLCFVIGCTMVGERSRPLVISILSCAFAVAAIVGPIIGGAFTTHVTWRWCFYINLPIGGLAIIMFLLTYKAENKGILQQIKDAIGTISSFTFSKFRHQVNFKRLMNGIIFKFDFFGFALCSAGLVLFLLGLTFGGNKYSWNSGQVITYLVLGVLLFIFSLVYDFFLFDKFNPEPDNISYRPLLLRRLVAKPAIIIVNMVTFLLCTGYNGQMIYSVQFFQLIFASSAWKAGLHLIPIVITNVIAAIASGVITKKLGLVKPLLIFGGVLGVIGAGLMTLMTNTSTKSTQIGVLLLPGFSLGFALQASLMSAQLQITKDRPEAAMDFIEVTAFNTFMKSLGTTLGGVLSTTVFSASFHNKVSRAHLEPYEGKTVDDMILYRLQNYDGSHSTIGNILSDSIKNVFWMDLGFYALGFLFCSFSSNKKLIIPKKDDTPEDNLEDK

SEQ ID NO: 31836 - protein, 134 aa, Glycine max
MEVAVELEDDLFFADLSKQISLLIMDEDEDPLPTCPPDSLQTFPGSIYPPPQSAFLYEQALIRPSKGTGVFIPQSTQPRRKPRKGRSSSNAKYPKQSQDTRTVSQVPITQFFQTPKWLRIYIFSPQLNCISSID

SEQ ID NO: 31837 - protein, 285 aa, Arabidopsis thaliana
  misc_feature (121)..(121): Xaa can be any naturally occurring amino acid
  unsure (1)..(285): unsure at all Xaa locations
MAKDVEGPEGFQTRDYEDPPPTPFFDADELTKWSLYRAVIAEFVATLLFLYITVLTVIGYKIQSDTKVGGVDCGGVGILGIAWAFGGMIFILVYCTAGISGGHINPAVTFGLFLARKVSLXGAVLYMVAQCLGAICGVGFVKAFQSSYYDRYGGGANSLADGYNTGTGLAAEIIGTFVLVYTVFSATDPKRNARDSHVPVLAPLPIGFAVFMVHLATIPITGTGINPARSFGAAVIYNKSKPWDDHWIFWVGPFIGAAIAAFYHQFVLRASGSKSLGSFRSAANV

SEQ ID NO: 31838 - protein, 615 aa, Saccharomyces cerevisiae
MSSSVVGASSNKKSGIRQSCEIIERERHSNDDTYSMTSTFFKLKENEIMSAQFDSLKYKILLISTAFVCGFGISLDYTLRSTYTGYATNSYSEHSLLSTVQVINAVVSVGSQVVYSRLSDHFGRLRLFLVATIFYIMGTIIQSQATRLTMYAAGSVFYNCGYVGTNLLLTLILSDFSSLKWRMFYQYASYWPYIIIPWISGNIITAANPQKNWSWNIAMWAFIYPLSTLPIIFLILYMKYKSSKTAEWRSLKEQARKERTGGLFENLVFLFWKLDIVGILLITVSLGCILVPLTLANETSQKWHNSKIIATLVSGGCLFFIFLYWEAKFAKSPLLPFKLLSDRGIWAPLGVTFFNFFTFFISCDYLYPVLLVSMKESSTSAARIVNLPDFVAATASPFYSLLVAKTRKLKLSVIGGCAAWMVCMGLFYKYRGGSGSHEGVIAASVIMGLSGLLCSNSVIVILQAMTTHSRMAVITGIQYTFSKLGAAIGASVSGAIWTQTMPNQLYKNLGNDTLAEIAYASPYTFISDYPWGSPERDAVVESYRYVQRIIMTVGLACTVPFFTFTMFMRNPELIDKATHEEFTEDGLVVLPDEENIFSQIKALFRHNRSNKKSGC

SEQ ID NO: 31839 - protein, 570 aa, Arabidopsis thaliana
MEDDKDIYTKDGTLDIHKKPANKNKTGTWKACRFILGTECCERLAYYGMSTNLINYLEKQMNMENVSASKSVSNWSGTCYATPLIGAFIADAYLGRYWTIASFVVIYIAGMTLLTISASVPGLTPTCSGETCHATAGQTAITFIALYLIALGTGGIKPCVSSFGADQFDDTDEKEKESKSSFFNWFYFVINVGAMIASSVLVWIQMNVGWGWGLGVPTVAMAIAVVFFFAGSNFYRLQKPGGSPLTRMLQVIVASCRKSKVKIPEDESLLYENQDAESSIIGSRKLEHTKILTFFDKAAVETESDNKGAAKSSSWKLCTVTQVEELKALIRLLPIWATGIVFASVYSQMGTVFVLQGNTLDQHMGPNFKIPSASLSLFDTLSVLFWAPVYDKLIVPFARKYTGHERGFTQLQRIGIGLVISIFSMVSAGILEVARLNYVQTHNLYNEETIPMTIFWQVPQYFLVGCAEVFTFIGQLEFFYDQAPDAMRSLCSALSLTAIAFGNYLSTFLVTLVTKVTRSGGRPGWIAKNLNNGHLDYFFWLLAGLSFLNFLVYLWIAKWYTYKKTTGHAL

SEQ ID NO: 31840 - protein, 175 aa, Triticum aestivum
MAPTVMASSATSVAPFQGLKSTAGLPISRRSSSAGLSSVSNGGRIRCMQVWPIEGIKKFETLSYLPPLSTEALLKQVDYLIRSKWVPCLEFSKVGFVFREHNSSPGYYDGRYWTMWKLPMFGCTDATQVLNEVEEVKKEYPDAYVRVIGFDNLRQVQCVSFIAFRPPGCEESGKA

SEQ ID NO: 31841 - protein, 287 aa, Oryza sativa
MERYELLKDIGAGNFGVARLMRNKETKELVAMKYIPRGLKIDENVAREIINHRSLRHPNIIRFKEVVVTPTHQAIVMEYAAGGELVDRICDAGKFTEDQARDFLQEVILGVNQWHFLAIWPPRSEAENTLLDGRPAPRLKIWDFGYSQSVAAASEDPSRPVGKPAGPSRPQNGDTPPRGVQSGLRQTREQRVGQASEREEAPAHCHARVTRPAPCGNPTPPWEQRHDERTRGNKNTVENNQRGPHAGEAATRPEPVFYPPHEATTQTPTHNLPPTLFFAQPHTHLHH

SEQ ID NO: 31842 - protein, 528 aa, Mycobacterium bovis AF2122/97
MDTRVDTDNAMPARFSAQIQNEDEVTSDQGNNGGPNGGGRLAPRPVFRPPVDPASRQAFGRPSGVQGSFVAERVRPQKYQDQSDFTPNDQLADPVLQEAFGRPFAGAESLQRHPIDAGALAAEKDGAGPDEPDDPWRDPAAAAALGTPALAAPAPHGALAGSGKLGVRDVLFGGKVSYLALGILVAIALVIGGIGGVIGRKTAEVVDAFTTSKVTLSTTGNAQEPAGRFTKVAAAVADSVVTIESVSDQEGMQGSGVIVDGRGYIVTNNHVISEAANNPSQFKTTVVLNDGKEVPANLVGRDPKTDLAVLKVDNVDNLTVARLGDSSKVRVGDEVLAVGAPLGLRSTVTQGIVSALHRPVPLSGEGSDTDTVIDAIQTDASINHGNSGGPLIDMDAQVIGINTAGKSLSDSASGLGFAIPVNEMKLVANSLIKDGKIVHPTLGINTRSVSNAIASGAQVANVKAGSPAQKGGILENDVIVKVGNRAVADSDEFVVAVRQLAIGQDAPIEVVREGRHVTLTVKPDPDST

SEQ ID NO: 31843 - protein, 762 aa, Candida albicans SC5314
MASHSNSNSNSLFQNDKNNNSNRDIAIPTPSNSSSFRNTNTNPTPSIRSPSPSINSYNNNNNNNSAIPTTTTSRSITGMSNASINDSGDSNPQSYDEQISQLNNLNNKKSFDLKTISKHLINQEDSLKTQGGDITRRLYHQMENITGNNNHNNNNNNTDTTGNDLDDNVSIGGNSTFRDGPPPRLRTRSASFSSYLEETRRGSMASDINIPGGFRREFLINKAIQKNQQPPNFLTQNFMEFLSIYGHFAGEDFSDEEEEGDEGDEEYDNGHDGDEVFDEESSLLGNERRGGGSGGGQPFRQLPKKPHSHPQKQPPKGTASVFKTFLLLFKALVGSGVLFLPRAFYNGGMLFSMITLSLFGLLTFFCYIGLIESKTILRLSSFGELGYKTYGKPLKYCILVSILLSQIGFVTTYILFTAENMIAFLSQYVSTKNNLLSQEVLPNWLNRGNLILIQCILLIPLVLIRNLAKLSMVSLISSVFIVIGLLIIFWYSGVNLINNGVGPNITNFNSNSWTMLIGVAVTSFEGIGLILPIQSSMSQPEKFPLVLSISMAIITSIFVGIGTIGYFSFGDKIKSIIILNLPQDQFAVQSILVLYSIAVFLSGPLQLFPAIKIGESLIFRHSKKKSKRQQHQHGSTDESNTNNTDDNDGKLYHQSGKYNPQVKWLKNGFRAISVIFICSLAYLNADNIDKFVSFNGCFACIPLVYIYPPLIHLKSIQSKQQQQQQQTGRSKSDQLFIWLDYLLIVVGIATVIYSSYQIIFLN

SEQ ID NO: 31844 - protein, 357 aa, Saccharum officinarum
MASLTDLVNLDLSDCTDKIIAEYIWIGGSGIDLRSKARTVKGPITDPSQLPKWNYDGSSTGQAPGEDSEVILYPQAIFKDPFRKGDNILVMCDCYTPQGEPIPTNKRYNAAKVFSHPDVAAEVPWYGIEQEYTLLQKDVSWPLGWPVGGYPGPQGPYYCAAGADKAFGRDVVDAHYKACLYAGINISGINGEVMPGQWEFQVGPSVGISAGDEIWVARYILERITEIAGIVLSLDPKPIQGDWNGAGAHTNYSTKSMREPGGYEVIKKAIEKLGKRHKEHIAAYGEGNERRLTGRHETADINTFKWGVANRGASIRVGRDTEREGKGYLEDRRPAFNMDPYVVTGMIAETTILWKGN

SEQ ID NO: 31845 - protein, 227 aa, Thiomicrospira crunogena XCL-2
MSQEKIKPGFILIDLDGTLIDSVPDLAYCVDEMMKQLGMPVRGEAAVRNWVGNGVQRLVERALINSVDGMPDQDLMDKAYPIYLELYKENTSKRSCVYEGVVEGIEWMKAQGYRVACVTNKAAAFTIPLLKDKGLYDSFEVIVSGDTCEEKKPHPMPLLYAAEQLGVTPENALMIGDSKSDVKAARAAGFHIFCMTYGYNHGEDIRNYEPDAVMGSFMELPNYLAAK

SEQ ID NO: 31846 - protein, 291 aa, Festuca pratensis
MARMAVSVLAILLASCAVAAAASFDKEFDITWGDGRGKILNNGQLLTLGLDKTSGSGFQSKREYLFGKIDMQLKLVAGQLPPAPSPPTTCRSMGATHDKIDFEFLGNVTGEPYTLHTNVFAKGQGKREQQFRLWFDPTKAFHTYSIVWNPQHVIFAVDGTPIRDFKNHEARGVSFPKNQPMRLYASLWNADDWATQGGRVKTDWSHAPFVASFRGFSADACVMSGGAQRCPAGTMDASGTGSSWWNQELGDMSYRRMRWVQRKFMIYNYCTDPKRVAEGLPAECKIRLRSK

SEQ ID NO: 31847 - protein, 182 aa, Oryza sativa
MCDLVARTGRHQQRYEHGRRLVAGCIPFRYKDNNDETSDDGHKKLVEVLMINSQSGSGLLFPKGGWENDETVEEAAAREAIEEAGVRGDLVQLLGFYDFKSKTHQDKFCPEGMCRAAVFALRVKEELASWPEQSTRKRTWLTLSEAVERSRYPWVREALTTGFTTWHENWSNGDDHVDPSSR

SEQ ID NO: 31848 - protein, 588 aa, Xanthomonas campestris pv. campestris str. ATCC 33913
MSQPPAKPAPLRKLGNLRTLWPFVQRQRGLFAAWLVALAVSSAATLSLPAAVKRMIDHGFSGGTQINQAFALLFAVAVVLALATAARFYFVALLGEKVVADLRGRLYAHLIGLDAGFHDRSRSGELVSRLSADSELLRGVVGTTMSVALRSSVTVIGSLVMLFVTSPRLAGFTLIGIPLAVLPIVLGARRLQKISRASQDRVADANTLAAETLGAVRTVQAHAREGYESNRFSQALQAAIGTARVRIRTQATVTAVAIMLIFGAIVAVLWLGAHDVIAGQMTPGTLGQFVLYALIGGGSVGALAEVWNELQRAAGGMGRIGELLDEQSAIVAPATPQPLPVPVRGAIHFDQVVFHYPQRPDMPALDGFDLHVQPGETVALVGPSGAGKSTVLAMLLRFHDPLSGSVRIDDVDLRQTDPVLLREQIALVPQQPTLFAASAADNIRYGRLDASDAQVEAAATAAEADIFLRALPQGYASELGERGTRLSGGQQQRVAIARALLKDAPILLLDEATSALDAQSERAVQQALDRLMQGRTTLVIAHRLATVLKADRIVVMDAGRIVAQGTHAQLVAEGGLYAELAKLQFIDQ

SEQ ID NO: 31849 - protein, 561 aa, Nitrosomonas europaea ATCC 19718
MTTLKITGMTCDSCATHVKQALEKVPGVQSAVVSYAKGAAQLDLDPGTAPDALTAAVAGLGYKATLADAPPTDNRTGLLDKVRDWMGAADKGSDGEHPLQVAVIGSGGAAMAAALKAVEQGAKVTLIERGTIGGTCVNVGCVPSKIMIRAAHIAHLRRESPFDGGIPATAPAIDRSKLLAQQQARVDELRHAKYEGILDGNPAITVLHGEARFKDDQSLVVRLNAGGERVVVFDRCLVATGASPAVPPIPGLKESPYWTSTEALVSDIIPERLAVIGSSVVALELAQAFARLGSQVTILARSTLFFREDPAIGEAITAAFRAEGIKVLEHTQASQVAHVDGEFVLTTARGEIHADKLLVATGRTPNTRSLALEAAGVAVNAQGAIVIDKGMRTSAPHIYAAGDCTDQPQFVYVAAAAGTRAAINMTGGDATLDLTAMPAVVFTDPQVATVGYSEAEAHHDGIETDSRTLTLDNVPRALANFDTRGFIKLVIEEGSGRLIGVQAVAPEAGELIQTAALAIRNRMTAQELADQLFPYLTMVEGLKLAAQTFNKDVKQLSCCAG

SEQ ID NO: 31850 - protein, 55 aa, Passiflora ligularis
  misc_feature (54)..(54): Xaa can be any naturally occurring amino acid
  unsure (1)..(55): unsure at all Xaa locations
WEYQVGPSVGIDAGDHIWCSRYILEKITEQAGVVLSLDPKPIEGDWNGPGGHTXY

SEQ ID NO: 31851 - protein, 336 aa, Schizosaccharomyces pombe
MAIPKVGINGFGRIGRIVLRNALVAKTIQVVAINDPFIDLEYMAYMFKYDSTHGRFDGSVEIKDGKLVIDGNAIDVHNERDPADIKWSTSGADYVIESTGVFTTQETASAHLKGGAKRVIISAPSKDAPMYVVGVNEEKFNPSEKVISNASCTTNCLAPLAKVINDTFGIEEGLMTTVHATTATQKTVDGPSKKDWRGGRGASANIIPSSTGAAKAVGKVIPALNGKLTGMAFRVPTPDVSVVDLTVKLAKPTNYEDIKAAIKAASEGPMKGVLGYTEDAVVSTDFCGDNHSSIFDASAGIQLSPQFVKLVSWYDNEWGYSRRVVDLVAYTAAKDN

SEQ ID NO: 31852 - protein, 245 aa, Hordeum vulgare subsp. spontaneum
GFGRIGRLVARVALQSDDVELVAVNDPFITTEYMTYMFKYDTVHGHWKHSDIKLKDDKTLLFGEKPVTVFGVRNPEEIPWGEAGADYVVESTGVFTDKDKAAAHLKGGAKKVIISAPSKDAPMFVVGVNEDKYTSDVNIVSNASCTTNCLAPLAKVINDNFGIIEGLMTTVHAITATQKTVDGPSSKDWRGGRAASFNIIPSSTGAAKAVGKVLPELNGKLTGMSFRVPTVDVSVVDLTVRTEKA

SEQ ID NO: 31853 - protein, 245 aa, Hordeum vulgare subsp. spontaneum
GFGRIGRLVARVALQSDDVELVAVNDPFITTEYMTYMFKYDTVHGHWKHSDIKLKDDKTLLFGEKPVTVFGVRNPEEIPWGEAGADYVVESTGVFTDKDKAAAHLKGGAKKVVISAPSKDAPMFVVGVNEDKYTSDVNIVSNASCTTNCLAPLAKVINDNFGIIEGLMTTVHAITATQKTVDGPSSKDWRGGRAASFNIIPSSTGAAKAVGKVLPELNGKLTGMSFRVPTVDVSVVDLTVRTEKA

SEQ ID NO: 31854 - protein, 155 aa, Salmonella enterica
LGLWEICIIWGLGISLAVYLTAGISGGHLNPAVTIALWLFACFPKQKVLPYIIAQFAGAFGGALLAYVLYSSLFTEFETAHHMVRGSVESLQLASIFSTYPAAALNVWQAALVEVVITSILMGMIMALTDDGNGIPKGPLAPLLIGILVAVIGAS

SEQ ID NO: 31855 - protein, 294 aa, Sesbania rostrata
MEQYEKVEKIGEGTYGVVYKARDRVTNETIALKKIRLEQEDEGVPSTAIREISLLKEMQHRNIIRLQDVVHSEKRLYLVFEYLDLDLKKHMDSSPEFVKDPRQVKMFLYQILCGIAYCHSHRVLHRDLKPQNLLIDRRTNSLKLADFGLARAFGIPVRTFTHEVVTLWYRAPGILLGSRHYSTPVDIWSVGCIFAEMVNRRPLFPGDSEIDELFKIFRILGTPNEDTWPGVTSLPDFKSTFPKWPPKDLATVVPNLEQAGLNLLSSMLCLDPSKRITARSAVEHEYFKDIKFVP

SEQ ID NO: 31856 - protein, 570 aa, Klebsiella sp. LX3
APSLNQDIHVQKESEYPAWWKEAVFYQIYPRSFKDTNDDGIGDIRGIIEKLDYLKSLGIDAIWINPHYDSPNTDNGYDISNYRQIMKEYGTMEDFDSLVAEMKKRNMRLMIDVVINHTSDQHPWFIQSKSDKNNPYRDYYFWRDGKDNQPPNNYPSFFGGSAWQKDAKSGQYYLHYFARQQPDLNWDNPKVREDLYAMLRFWLDKGVSGMRFDTVATYSKIPGFPNLTPEQQKNFAEQYTMGPNIHRYIQEMNRKVLSRYDVATAGEIFGVPLDRSSQFFDRRRHELNMAFMFDLIRLDRDSNERWRHKSWSLSQFRQIISKMDVTVGKYGWNTFFLDNHDNPRAVSHFGDDRPQWREASAKALATITLTQRATPFIYQGSELGMTNYPFRQLNEFDDIEVKGFWQDYVQSGKVTATEFLDNVRLTSRDNSRTPFQWNDTLNAGFTRGKPWFHINPNYVEINAEREETREDSVLNYYKKMIQLRHHIPALVYGAYQDLNPQDNTVYAYTRTLGNERYLVVVNFKEYPVRYTLPANDAIEEVVIDTQQQAAAPHSTSLSLSPWQAGVYKLR

SEQ ID NO: 31857 - protein, 519 aa, Zea mays
MDTSNAFAVVTLLLLPLLLALAQLVRRGSPQYPPGPMALPVIGHLHLHLFERPLHRTLACLAARHGTVFQLWFGSRRVIVVSSADAAKECLATLDVAFANRPRLPSGRILSYDWTTMGTSNYGPYWRRVRRITVTHILSVHWVQQFADVHERETRAMVRGLYRPTARNGVRRARVELKSRLFELLMNAMMGMVCAKRYYGCDGKENETEAEVSEEARWFREMVEETMELSGASTVWDFLPAWARWLDVGGVGRRLWRLRESRTKFLQGLIEEQRKEMENGPQPQARKTMIGVLLTLQNEDPDACPDNLIRTMCISSLEAGTSTSADAVEWAMSLLLNNPGALAKAQEEIDACVGQPARLIEAADLPKLQYLWCIIMETLRLYPPTPLLLPHESANDCTVSGFHVPMGTMLLVNTFAIHRDPEIWDRPGSFMPERFLGENSEGKMFNPFGMGRRRCPGENLGTQMVGLALGTMIQCFNWERVGDDLVDMTEGAGLTIPKKVPLEAFYEPRASMANLLSKI

SEQ ID NO: 31858 - protein, 163 aa, Salmonella enterica
VAGASLGLWEICIIWGLGISLAVYLTAGISGGHLNPAVTIALWLFACFPKQKVLPYIIAQFAGAFGGALLAYVLYSSLFTEFETAHHMVRGSVESLQLASIFSTYPAAALNVWQAALVEVVITSILMGMIMALTDDGNGIPKGPLAPLLIGILVAVIGASTGP

SEQ ID NO: 31859 - protein, 785 aa, Xanthomonas campestris pv. campestris str. ATCC 33913
MTDQTRLPNTSSLTHPRPDPAVILATDLDGTFLAGSAEHRHQLYRLVDQHPEIRLIFITGRGLEAVMPLLTDPTIPRPDYVVCDVGATVVDGHTLQPLQPLQSMIDAHWPGEQVVAQAMRAFPQLQRQDMPQERRCSYFCDPHTLAPLRAQIEQTARALGCDVLYSADRYLDILPPDTDKGRTLGALARQLELPRERILVAGDTLNDLSMYLAGFRGVCVGDSEAALTQATAQLDATYHASAPGCGGILEAIAHFGLLADDDPHVPAVQAPRKGGAELVMVYHRLPYDEVVEHGELVRRAPRSPNGIIPSLLSFFEGGQRGSWVAWSVDDPKRGPFQTHTEVDAQRYPTLTAARVPLSKSEVDIFYKRFSKEAFWPMLHVFWERARFREDDWQVFLAVNRKFAQATSAEAAHGATVWIHDYNLWMVPAYLRELRPDLKIAFFHHTYFPSADVFNVVPWRREIIGSLMCCDYVGFHIPRQVENFVDVVRGVMPVERLAQESCAPRFLTYGCAVGLDTMTTCLRVADRDVALGAHPVGTDLRRIRAALSKPDVRNDIFKLRREIGARKLVLSVERLDYTKGTLAKLEAFERLLDSQRQLLGKVTLLMVCVPAAREMTIYRTLQTQIEQAVGRINGRFSRLDWTPVRFFAQALPFEQVVAHYAAAQVMWITPLRDGLNLVAKEFVAVQGIEGGSGVLVLSEFAGAAAELKGAVLTNPHDPADLAAGLLQALAMPDDEAAGRLRQLYDSVEYYNIDHWGRDFLDAVARSRGAHARVPLAAASTVAEPVA

SEQ ID NO: 31860 - protein, 427 aa, Mannheimia succiniciproducens MBEL55E
MADKKATLTVDGKNYEFDIVKGSLGYESIDIHGLSQNKLFMYDPGLVSTAVCESAITYVDGDEGMLLYRGYPIDQLASNADYLEVSYLLLFGERPTKQQYQDFSKLVKRHTLVHEQLTKFFQGFRRDSHPMAVMCGVSGALAAFYHDSIDVKKEEHRELTAIRLLAKIPTLAAMCYKYSIGQPFMFPQNNLSYAGNFLYMMFATPCEPYVVNPVLERALDKIFILHADHEQNASTSTVRIAASSGANPFACIAAGIASLWGPSHGGANEACINMLEEIGTVDRIPEFIARAKDKNDPFRLMGFGHRVYKNYDPRAKVMRETCHEVLKELNIKNPLFDVASELERIALSDPYFIDHKLYPNVDFYSGIVLKAIGIPTSMFTVMFALARTVGWIAHWKEMYKQGNFKIARPRQIYTGYTERDFPAIDKD

SEQ ID NO: 31861 - protein, 139 aa, Salmonella enterica
VAGASLGLWEICIIWGLGISLAVYLTAGISGGHLNPAVTIALWLFACFPKQKVLPYIIAQFAGAFGGALLAYVLYSSLFTEFETAHHMVRGSVESLQLASIFSTYPAAALNVWQAALVEVVITSILMGMIMALTDDGNG

SEQ ID NO: 31862 - protein, 227 aa, Ipomoea batatas
MAREKIKIKKIDNITARQVTFSKRRRGLFKKAEELSVLCDADVALIIFSSTGKLFDYASSSMKGILERRNLHSKNLEKMDQPSLELQLVENANHSRLSKEIADMTHRLRQMRGEDLQGMSIEELQQLERSLETGLSRVIEKKGEKIMKEINELQQKGMNLMEEKERLTQQVMAISNGQRVTAVINSDNMLNEEGLSSESITNVCNSTSPPQDYDDSSDTSLKLGLPY

SEQ ID NO: 31863 - protein, 213 aa, Nanoarchaeum equitans Kin4-M
MVSVDQVKKAREGKKRRFTQTFELIFNLKNVDLRKYRLSTYIVLPRGRGKKMPILAIVGPENKELAEKYFDIVLTREDLKQLDKRTAKKLAKRHYHVVAQADLMPELGKSLLGRFLGIRGKMPNPKAGQILPPNLNEKMLEALREKLNNTVRVNVKKHVTFGVPIGTEDMEDEAIAENADTVINEIISQLPQGKQNIDSVYLKLTMGPAVRVL

SEQ ID NO: 31864 - protein, 137 aa, Saccharomyces cerevisiae
MSNVVQARDNSQVFGVARIYASFNDTFVHVTDLSGKETIARVTGGMKVKADRDESSPYAAMLAAQDVAAKCREVGITAVHVKIRATGGTRTKTPGPGGQAALRALARSGLRIGRIEDVTPVPCDSTRKKGGRRGRRL

SEQ ID NO: 31865 - protein, 510 aa, Ralstonia metallidurans CH34
MKTWFKRILTAGAMTLALGTAGLGLSTHAVAQDKPAAEASAATASATPAAAVAAPAAATPAAAPAEAAAAPAAPVPNKGDTAWLLVSTTFVILMTLPGLALFYGGLVRSKNMLSVLMQCLMIFSVISILWAIYGYSFAFTEGNAFFGGTDRLFMKGLTVDAVAATFSKGVVVPELGYFAFQCAFAAITCSLIIGAFAERAKFSAVLVFVVLWFTFAYIPMAHMVWFWPGPDAYTDAAAGTAATAKAGWLFQKGALDFAGGTVVHINAAVAGLVGAFMFGKRIGFGREAIRPHSLTFTMVGASLLWFGWFGFNAGSALEANGSAALAFVNTLLATAAAVVSWTFGEWIGKGKPSMLGGASGAVAGLVAITPAAGFVGPMGSIAMGLIAGLLCLWGVTGLKRLLGMDDSLDVFGVHGVGGILGALLTGVFAAPSLGGTGIYDYVANKVADDYSIAGQVWIQFEGVLTTIVWSGVVALVAYKLIDMLIGLRVPEEEEREGLDITSHGETAYEV

SEQ ID NO: 31866 - protein, 426 aa, Psychrobacter arcticus 273-4
MADNQATLTVDGKDYQLPITEGTLGPSVIDVAAFQKAGYWTYDPGFMATAPVESKITFIDGGKGELLHRGYPIDQLANNAEYLEVAYALIHGDLPNAEQKADFYEKIRKHMGVHDQLRKFFEGFRRDAHPMAIMVGVVGALSAFYHENLDISNEEHREITAIRLIAKMPTLAAMSYKYSKGEPFMYPRNDFNYAENFLYMMFATPADVNYKTNDVITRAMDKIFTLHADHEQNASTSTVRLAGSTGANPYACIAAGIAALWGPSHGGANEAVLEMLDEIGSVENVPEFMEKVKSREVKLMGFGHRVYKNFDPRAQVMKETCDEVLGALGINDPKLELAMALEKIALEDPFFVERNLYPNVDFYSGIILKAIGIPTSMFTVIFSLARTSGWISHWLEMHSTPFKIGRPRQLYTGETHRDFVKVEDRK

SEQ ID NO: 31867 - protein, 478 aa, Xanthomonas campestris pv. campestris str. ATCC 33913
MSEQFDVVVIGAGPAGYHAAIRAAQLGMKVACIDAAIGKDGKPALGGTCLRVGCIPSKALLDSSRQFWNMGHLFGDHGISFNDAKMDVPTMIGRKDKIVKQFTGGIAMLFKANKITPYYGFGQLQPGNIVKVTQHEGGEIELKGTNVILAAGSESIELPFAKFDGDTIVDNVGGLDFTAVPKRMAVIGAGVIGLELGSVWKRLGAEVTILEALPDFLALADAEVAKTALKEFKKQGLDIKLGAKVSKTEITGSGDAKQVVLSYTDAAGEQTLTVDKLLVAVGRKAATKNLLADGTGVKLTERGQIEVDGHCHTGVDGVWAIGDCVRGPMLAHKGFEEGIAVAELIAGLPGHVNFDTIPWVIYTEPEIAWVGKTEQQLKAEGVAYKAGSFPFAAIGRAVAMGEPAGFVKVIADAETDRVLGMHLVGVGVSELVHEGVLTMEFSGSADDLARICHAHPTLSEAIHDAAMAVSKRAIHKAN

SEQ ID NO: 31868 - protein, 60 aa, Desulfotalea psychrophila LSv54
MRHRDTSMELIKIICAIILPPLGAFLQVGIGKHFWINIILTLCGYIPGIVHAVWVVAKNK

SEQ ID NO: 31869 - protein, 383 aa, Anabaena cylindrica
MDDKLMLMIPGPTPVPEAALLALAKHPIGHRTSEFSNMMGEVTQNLKWLHQTESDVLMLNVSGTGAVEAGMINFLSPGDRILVGSNGKFGERWVEVGQAFGLNVEAITAEWGQPLDPDKFAQKLQADTNKEIKAVIITHSETSTGVINDLVAINSHVKEHGQALIIVDAVTSLGAYNVPVDALGLDVVASGSQKGYMIPPGLGFVSVSPKAWEAYKTAKLPKYYLDLGKYRKATAKNTTPFTPPVNLMVALHTTLGMMKKEGLESIFTRHERQKNATRAAMKALNLPLFAADECASPAITAVATPGMEADKIRSLMKKRFDIALAGGQDHLSNKIFRVGHLGFVSDRDILSCIASLEVVLLELGHENFNSGAGVAAAARVFSN

SEQ ID NO: 31870 - protein, 58 aa, Passiflora macrophylla
WEYQVGPSVGIEAGDHIWCSRYILERITEQAGVVLTLDPKPIEGDWNGAGCHTNYSTK

SEQ ID NO: 31871 - protein, 430 aa, Thiomicrospira crunogena XCL-2
MTHWQALLQFDQEHIWHPYAKMPSDTPAIGVAKTQGSIITLSDGNELVDGMSSWWAALHGYNHPVIQKAMIDQIETMPHIMFGGLTHEPAIELAKRLIKLTPPPLQKVFFTDSGSVAMEVAIKMAMQYWISLEQPQKNKLLALKNGYHGDTFATMSICDPDNGMHRLFNSTLPQHFFAPAPQKGFDIDSDNQDIAEFETLLEKHHAEIAAVTLEPIVQGAGGMRFYRPDYLRQVRELCDEFNVLLIADEIATGFGRTGKLFACEWANISPDIMALGKTLTGGNITLAATLATEKISDTISQGNPGLLMHGPTFMANPLACRAASANIDVLLNSPWQDNIQRIESHFLNELMPLNALPGVDDTRVLGAIGVIELERNDLGETIQNLAVQNGVWIRPFGKLIYTMPAYNIPTNQLTQLTEGLKTAIVQALQH

SEQ ID NO: 31872 - protein, 629 aa, Yarrowia lipolytica CLIB122
MLRLRTMRPTQTSVRAALGPTAAARNMSSSSPSSFEYSSYVKGTREIGHRKAPTTRLSVEGPIYVGFDGIRLLNLPHLNKGSGFPLNERREFRLSGLLPSAEATLEEQVDRAYQQFKKCGTPLAKNGFCTSLKFQNEVLYYALLLKHVKEVFPIIYTPTQGEAIEQYSRLFRRPEGCFLDITSPYDVEERLGAFGDHDDIDYIVVTDSEGILGIGDQGVGGIGISIAKLALMTLCAGVNPSRVIPVVLDTGTNNQELLHDPLYLGRRMPRVRGKQYDDFIDNFVQSARRLYPKAVIHFEDFGLANAHKILDKYRPEIPCFNDDIQGTGAVTLASITAALKVLGKNITDTRILVYGAGSAGMGIAEQVYDNLVAQGLDDKTARQNIFLMDRPGLLTTALTDEQMSDVQKPFAKDKANYEGVDTKTLEHVVAAVKPHILIGCSTQPGAFNEKVVKEMLKHTPRPIILPLSNPTRLHEAVPADLYKWTDGKALVATGSPFDPVNGKETSENNNCFVFPGIGLGAILSRSKLITNTMIAAAIECLAEQAPILKNHDEGVLPDVALIQIISARVATAVVLQAKAEGLATVEEELKPGTKEHVQIPDNFDECLAWVETQMWRPVYRPLIHVRDYD

SEQ ID NO: 31873 - protein, 55 aa, Passiflora maliformis
WEYQVGPSVGIDAGDHIWCSRYILERITEQAGVVLSLDPKPIEGDWNGAGCHTNY

SEQ ID NO: 31874 - protein, 276 aa, Triticum aestivum
MMSMMADLSCGASGVTANDHQLAAPAPEDSAVAGSEKMGRGRIEIKRIENTTNRQVTFCKRRNGLLKKAYELSVLCDAEVALIVFSSRGRLYEYSNNSVKATIERYKKANSDTSNSGTVAEVNAQYYQQESSKLRQQISSLQNSNSRSLVRDSVSTMTLRDLKQLEGRLEKGIAKIRARKNELMYAEVEYMQKREMELHNDNIYLRSKVSENERGQQPMNMMASGSTSSEYDHMVPPYDSRNFLQANILQQQQQQQQHYSQQLQPTALQLGQQYFN

SEQ ID NO: 31875 - protein, 230 aa, Nitrosomonas europaea ATCC 19718
MTHDNTHYSHRTGWLRAAVLGANDGIVSTASLIIGVASAHAAADDILLAGVAGVVAGAMSMAAGEYVSVSSQSDTEKADVALEQYHLDRDIDFELQELTDIYMKRGLQPELAAQVARELMAHDALDAHLRDELGLHERVNAKPVQAAFTSAGMFILGASMPLAATIAAPATTHIIPVVAISSLLSLTALGTFAAYLGKANMLTGAARVAFWGALAMAFTALTGTLFGIIA

SEQ ID NO: 31876 - protein, 314 aa, Capsicum chinense
MGSKYSKATNSISDASNSFESYRFPLEDLEEATNNFDDKFFIGEGAFGKVYKGVLRDGTKVALKRQNRDSRQGIEEFGTEIGILSRRSHPHLVSLIGYCDERNEMVLIYDYMENGNLKSHLTGSDLPSMSWEQRLEICIGAARGLHYLHTNGVMHRDVKSSNILLDENFVPKITDFGISKKGTELDQTHLGTVVKGTLGYIDPEYFIKGRLTEKSDVYSFGVVLFEVLCARSAIVQSLPREMVNLAEWAVESHNNGQLEQIVDPNLADKIRPESLRKFGDTAVKCLALSSEDRPSMGDVLWKLEYALRLQESVI

SEQ ID NO: 31877 - protein, 55 aa, Passiflora mathewsii
WEYQVGPSVGIDAGDDIWCSRYILERITEQAGVILSLDPKPIEGDWNGAGCHTNY

SEQ ID NO: 31878 - protein, 428 aa, Medicago sativa subsp. X varia
MKFSEENNVSNNPTNFEGGLDSRKVGQNRRALGVINQNLVVEGRPYPCVVNKRALSERNDVCEKKQADPVHRPITRRFAAKIANTKTTNAEGTTKRSNLAKSSSNGFGDFIFVDDEHKPVEDQPVPMALEQTEPMHSESDRMEEVEMEDIMEEPVMDIDTPDANDPLAVAEYIEDLYSYYRKVESTSCVSPNYMAQQFDINERMRAILVDWLIEVHDKFDLMHETLFLTVNLIDRFLEKQSVVRKKLQLVGLVAMLLACKYEEVSVPVVGDLILISDRAYTRKEVLEMEKVMVNALKFNISVPTAYVFMRRFLKAAQADRKLELLAFFLIELSLVEYAMLKFSPSQLAAAAVYTAQCTMYGVKQWSKTCEWHTNYSEDQLLECSSLMVDFHKKAGTGKLTGAHRKYCTSKFSYTAKCEPASFLLENEL

SEQ ID NO: 31879 - protein, 359 aa, Capsicum chinense
  misc_feature (288)..(288): Xaa can be any naturally occurring amino acid
  unsure (1)..(359): unsure at all Xaa locations
NMSYRVPFAALLEATSNFDESLVIGIGGFGKVYKGVLYDGTKLAVKRGNPKSQQGLAEFRTEIEMLSQFRHRHLVSLMGYCDEKNEMILVYEYMENGTLKSHLYGSDLPSMSWKQRLEICIGSARGLHYLHTGYAKAVIHRDVKSANILLDESFMAKVADFGLSKTGPELDQTHVSTAVKGSFGYLDPEYFRRQQLTEKSDVYSFGVVLFEVLCARPVIDPSLPREMVNLAEWAMKWQKKGQLEQIIDPTLVGKIRPDSLRKFGETAEKCLADFGVDRPSMGDVLWNXEYALQLQEAVIQDDPEENSTLLIGELSPQVNDFSQVDAGASAALIGTPNLDDLSGVSMSRVFSQLVKSEGR

SEQ ID NO: 31880 - protein, 149 aa, Oryza sativa
  misc_feature (42)..(42): Xaa can be any naturally occurring amino acid
  misc_feature (105)..(105): Xaa can be any naturally occurring amino acid
  unsure (1)..(149): unsure at all Xaa locations
GTTVAPSQGLKSTVGMPVDRRSRNSSLLNVSKGVRIRCMQVXEAIDDIKILETLSYLTPITVEDLLKQIEYLLHSKRVPCLECNKAGFVYRENHRSPGYYDGRYXTMWKLPMFGCTDATPALKELEEAKNAYPDAFSAIIGYYNVRHVH

SEQ ID NO: 31881 - protein, 459 aa, Arabidopsis thaliana
MGSIVEPWAAIAENGNANVTAKGSSRELRHGRTAHNMSSSSLRKKSDLRLVQKVPCKTLKNILSNLQEVILGTKLTLLFLAIPLAILANSYNYGRPLIFGLSLIGLTPLAERVSFLTEQLAFYTGRTVGGLLNATCGNATELIIAILALANNKVAVVKYSLLGSILSNLLLVLGTSLFFGGIANIRREQRFDRKQADVNFFLLLMGLLCHLLPLLLKYAATGEVSTSMINKMSLTLSRTSSIVMLIAYIAYLIFQLWTHRQLFEAQQDDDDAYDDEVSVEETPVIGFWSGFAWLVGMTIVIALLSEYVVDTIEDASDSWGLSVSFISIILLPIVGNAAEHAGAIIFAFKNKLDISLGVALGSATQISLFVVPLSVIVAWILGIKMDLNFNILETSSLALAIIITAFTLQDGTSHYMKGLVLLLCYVIIAACFFVDQIPQPNDLDVGLQPMNNLGEVFSA

SEQ ID NO: 31882 - protein, 227 aa, Vibrio fischeri ES114
MYLRDEKFKMPEIKELFENNSKWAKSIKAERPEYFAKLEEGQHPGFLWIGCSDSRVPAERLTGLYSGELFVHRNVANQVIHTDLNCLSVLQYAVDVLKIRHIIVCGHYGCGGVNAAIDNPPLGLINNWLLHIRDLFLKHRTVFGKLPREEWGDKLCEINVAEQVYNVGNSTIMQNAWERGQDVQIHGVVYGMGDGVLNDLGVKGHSRESLEISYQAAMSNITNVGDE

SEQ ID NO: 31883 - protein, 453 aa, Arabidopsis thaliana
MEEKPARRSVVLVPFPAQGHISPMMQLAKTLHLKGFSITVVQTKFNYFSPSDDFTHDFQFVTIPESLPESDFKNLGPIQFLFKLNKECKVSFKDCLGQLVLQQSNEISCVIYDEFMYFAEAAAKECKLPNIIFSTTSATAFACRSVFDKLYANNVQAPLKETKGQQEELVPEFYPLRYKDFPVSRFASLESIMEVYRNTVDKRTASSVIINTASCLESSSLSFLQQQQLQIPVYPIGPLHMVASAPTSLLEENKSCIEWLNKQKVNSVIYISMGSIALMEINEIMEVASGLAASNQHFLWVIRPGSIPGSEWIESMPEEFSKMVLDRGYIVKWAPQKEVLSHPAVGGFWSHCGWNSTLESIGQGVPMICRPFSGDQKVNARYLECVWKIGIQVEGELDRGVVERAVKRLMVDEEGEEMRKRAFSLKEQLRASVKSGGSSHNSLEEFVHFIRTL

SEQ ID NO: 31884 - protein, 481 aa, Mannheimia succiniciproducens MBEL55E
MSGEKTSRYVLGVTLVATLGGLLFGYDTAVISGTVSSLDTVFIQPKGLPEISANSLLGFCVASALIGCIIGGACGGYLSSKYGRKKALLIAALLFLISAFGSAYPEFGLKTINETNNIPYYLSNFLIQFVIYRIIGGIGVGIASMVSPMYIAEITPARIRGKMVSFNQFAIIAGQLIVYFVNYFIALNGDNTWLNMLGWRYMFLSEMVPAALFLILLFFVPESPRWLVLQNKFSQAEITLLKLLGERSGKTELQNIVSSLEHRVVKGAPLFSFGLGVIVIGIALSVFQQFVGINVALYYAPEIFKSLGASTNNALLQTIIMGTINLSCTTIAIFTVDKYGRKPLQIIGALGMAMGMFVLGMAFYANLSGTIALTGMLFYVAAFAISWGPVCWVLLAEIFPNAIRSQALAIAVAAQWIANYIVSWTFPMMDKSSYLVERFNHGFAYWVYGLMAILAALFMWKFVPETKGKTLEELELLWNKK

SEQ ID NO: 31885 - protein, 229 aa, Ipomoea batatas
MAREKIKIKKIDNITARQVTFSKRRRGLFKKAEELAVLCDADVALIVFSATGKLFEFASSNMKDILGKYELHSSNLDQATQPSRELQLENSLHVRLSKEVADKTRELRQMKGEELQGLSLEELQKLEKRLENGLTRVLETKGERVVTEIATLQRKGAELMKENKQLKEKMARVNGEKFPVIADVEAAGLIPEEGQSSESITTNVCSCNSGPPPEDDCSDTSLKLGLPIN

SEQ ID NO: 31886 - protein, 260 aa, Streptococcus thermophilus CNRZ1066
MTKTLTKHLQAIKDSKRGIFVPYIMAGDHAKGLDGLFETITLLENSGVSAIEVGIPWSDPVADGPIIELAGQRSLAKDVTLTAIIKKLQEKKTQVPLVIMTYINPVYEYGIEAFVKDLAETSVKGLIIPDLPNEHADFITPYLRDSDIALVPLVSLTTGIDRQKQLINGAEGFIYAVAINGVTGKTGNYRDDLDKHLSNLTAYADIPVLTGFGVSTEEDIKRFNAVSDGVIVGSKIVRDLHDGKEEEVAEFVTFGSHFEK

SEQ ID NO: 31887 - protein, 475 aa, Vibrio fischeri ES114
MSKQVKAQVVVLGSGPAGYSAAFRCADLGLETVLIERYSTLGGVCLNVGCIPSKALLHVSKVIEEAKAMAEHGVVFGEPQTDINKIRIWKDKVVTQLTGGLGGMAKMRNVTVVNGYGKFTGPNTIEVEGEENTTVTFDNAIIAAGSRPIKLPFIPHEDPRIWDSTDALELKEVPEKLLIMGGGIIGLEMGTVYHSLGSKVEVVEMFDQVIPAADKDIVKVYTKRIKDKFKLMLETKVTAVEAKEDGIYVSMEGKKAPAEAERYDAVLVAIGRVPNGKLIDAEKAGIEVDERGFINVDKQMRTNVAHIHAIGDVVGQPMLAHKGVHEGHVAAEVISGKKHYFDPKVIPSIAYTEPEVAWVGKTEKEAKEEGLNFEVATFPWAASGRAIASDCADGMTKLIFDKETHRVIGGAIVGTNGGELLGEIGLAIEMGCDAEDIALTIHAHPTLHESVGLAAEVFEGSITDLPNKKAVKKKK

SEQ ID NO: 31888 - protein, 339 aa, Escherichia coli
MVIFVTGGAGYIGSHTILELLNNGHDVVSIDNFVNSSIESLKRVEQITNKKIISYQGDIRDKNLLDEIFSRHHIDAVIHFASLKSVGESKLKPLEYYSNNVGGTLVLLECMKRYNINKMIFSSSATVYGNNSIPPHTEDRRIGETTNPYGTSKFIIEIILSDYCDSDNNKSVIALRYFNPIGAHKSGMIGENPNGIPNNLVPYISKVAQNQLPVLNIYGNDYPTKDGTGVRDYIHVCDLAKGHVKALEYMFLNDVNYEAFNLGTGQGYSVLEIVKMFEIVTKKSIPVAICNRREGDVAESWASADLAHKKLSWKAEKKLKEMIEDVWRWQTNNPNGYKK

SEQ ID NO: 31889 - protein, 508 aa, ASPERGILLUS NIDULANS FGSC A4
MGNNPSKGPVGDGPSPVVSGNTGLTASTSDKRAARGPSAHGPSNAAKAPVADVASSRETATGQSSSQHQTSVQQRLQTRNVKGSPTRTVDRPGFSKTDSPRSKAISAPDPSDPVQVPSSRTAAARRDPYESVALSAPPPKMYYSASHHLQRPPRMPLPIGDATAIPGSPISGPDDTSPLATEERLGDKTTAAKPDLATIEDDDTVDELQPYATSGVGRAVPTTIEWTAGGNKVYVTGTFVNWEKKFRLHRSENNPDVLSTKLNLRPGTHHLKFIVDGEMRASDNLPTAVDFTNHLVNYIELSADDVNRSRRESDKSAPSGVHPPQVLPEEVADGKVETAVDDEKPEKEEEPEEIPIGDFRGVVPQFLLDLDKDEESPCYQQAVNIIGDAPTPPSLPLFLGKSILNGTTPMKDDSSLLNNPNHTVLNHLATSSIKNGVLATSVTTRYKRKAALGILVKANERLSVSNFKKGKPCVVSKEAGNWFATACLLRLMSPDISLLDYRAVSYVR

SEQ ID NO: 31890 - protein, 148 aa, Salmonella enterica
ASLGLWEICIIWGLGISLAVYLTAGISGGHLNPAVTIALWLFACFPKQKVLPYIIAQFAGAFGGALLAYVLYSSLFTEFETAHHMVRGSVESLQLASIFSTYPAAALNVWQAALVEVVITSILMGMIMALTDDGNGIPKGPLAPLLIG

SEQ ID NO: 31891 - protein, 445 aa, Arabidopsis thaliana
MEEERRVLFGKYEMGRLLGKGTFAKVYYGKEIIGGECVAIKVINKDQVMKRPGMMEQIKREISIMKLVRHPNIVELKEVMATKTKIFFVMEFVKGGELFCKISKGKLHEDAARRYFQQLISAVDYCHSRGVSHRDLKPENLLLDENGDLKISDFGLSALPEQILQDGLLHTQCGTPAYVAPEVLKKKGYDGAKADIWSCGVVLYVLLAGCLPFQDENLMNMYRKIFRADFEFPPWFSPEARRLISKLLVVDPDRRISIPAIMRTPWLRKNFTPPLAFKIDEPICSQSSKNNEEEEEDGDCENQTEPISPKFFNAFEFISSMSSGFDLSSLFESKRKVQSVFTSRSSATEVMEKIETVTKEMNMKVKRTKDFKVKMEGKTEGRKGRLSMTAEVFEVAPEISVVEFCKSAGDTLEYDRLYEEEVRPALNDIVWSWHGDNNNTSSEDC

SEQ ID NO: 31892 - protein, 767 aa, ASPERGILLUS NIDULANS FGSC A4
MSGKRLLDAIQFLNVAKSVATKHLAVRQQQLDIFTRTSSLTKGIKSQTDGLILTAKAAAALAKRFNDGSPSQSSTTSARPSESSPSTQKDQDIEPKIPSSVTGASTNNGGGQLKASPQQEEFYQPSREPAAEPAGTPRVEVPKATSDTQVGLDEDINADVYQLFAKASPERNTSGHTGADRLNVSAQQEETYRPAPDPAAGRARAPDIVLPQATSTTQTMTNQGVNADVYHSPVDPKAELQQQDLPDEMIRELFHSPKVARSLSQKAAADWRFRSIYAKEKGVKQAEEQIVENVEPRLVEDILPSTSKVDAEIVAELKKDEDTYKMVESRVPSSRLGRLWQYGGLATSMAFGAVGESFRRVTGSAEAAAGSLMFSAGNMERLVAKLSKMRGAALKLGQMISFQDSKMLPDSIQQVLQRVQDRADYMPAYQRDKVLTDNLGPNWRDLFSSFDEVPMAAASIGQVHGATLKSTGQAVAVKIQYPGVADSIDSDLNNLSILLTASRILPRGLYLDKTIANARTELAWECDYTREAECGNRFRELLKDDPVFYVPQIIPEASGRNVLTMERLNGIAVTKIQTFTQAQRDWIGTQILRLCLREITEFKYMQTDPNWTNFLYNASTNRLELLDFGASRAYPDSFIDKYVQVLCAASRADRETCHALSIDLGYLTGHESSAMIDAHVSSILTLAEPFMDSSPDVYDFRDQTITERVRDLIPVMIRERLAPPPEETYSLHRKLSGAFLLCARLGSRVRCKELFRDAMENLNNAQG

SEQ ID NO: 31893 - protein, 371 aa, Oryza sativa (japonica cultivar-group)
MAAASRPPHGRLSRGHLAPPPDRLPHGRRHPSTARAPAVRPATSVAAARPAAERRRIGGGGEGNRRRGEGGGRGDEGEEAVPVFIASGTIVEFGRPTKDGFSTSVKMKQANVKYLKIHICMYFLRFIRWHGETLRESLKRREHFLALQLGLKKGMKVLDVGCGIGGPLREIARFSSASVTGLNNNDYQISRGQELNFSVGLSETCNYVKGDFMNMPIPDCTFDAAYALDATCHAPDAVILAKDMAEESPLPWYQPLDPSQLSLTHFQFTRIGRFLGQTLVSKQFITQTEATEFLACSWERLYSTIDFFLPAKNPQLKSLEFLHLAPEGSLRICRFLATSVDSLVKGGKEGIFTPLFFVLARKPLQKQEEQI

SEQ ID NO: 31894 - protein, 498 aa, Mycobacterium leprae TN
MTSRGNHGSKTSSDKHLGDSDFVVVANRLPVDQVRLPDGTAIWKRSPGGLVTALEPLLRQRRGAWVGWPGVINDNVDLDLTIKSIVQDGLTLYPVRLNTHDVAEYYEGFSNATLWPLYHDVIVKPIYHCEWWERYVDVNRRFAETTSRTAAYGGTVWVQDYQLQLVPKMLRIMRPDLTIGFFLHIPFPPVELFMQIPWRTEIIEGLLGADLVGFHLTSGAQNFLFLSRHLLGANTSRGLVGVRSRFGEVQLKSHTVQVGAFPISIDSKEIDQATRDRNVRRRAREIRAELGNPRKILLGVDRLDYTKGIDVRLRAFAELLAEGRAKRDDTVLVQLATPSRERVESYKILRNDIERQVGHINGEYGEVGHPVVHYLHRPIPRDELIAFYVASDVMLVTPLRDGMNLVAKEYVACRNDLGGALVLSEFTGAAAELRQAYLVNPHDLEGVKDTIEAALNQLAEEARRRMRSLRRQVLAHDVDRWARSFLDALAEAPARDAT

SEQ ID NO: 31895 - protein, 616 aa, Psychrobacter arcticus 273-4
MATRQDNTISNIKTLNYDAVIVGGGGSGMRASLHLAEAGMKVAVLTKVFPTRSHTVAAQGGIGASLGNMSNDNWHFHFYDTVKGSDWLGDQDAIEYMCREAPKVVYELEHMGMPFDRNEDGTIYQRPFGGHTSNYGEKAVQRACAAADRTGHALLHTLYQKNLQQGTEFFIEWIALDLIKDDAGNINGVIAIEQETGTVAVFQSPITVLATGGAGRIFAASTNAYINTGDGIGMAVRAGIPLQDMEFWQFHPTGVHGAGVLLTEGCRGEGAILRNKDGEAFMERYAPTVKDLAPRDLVSRSMDQEIKEGRGCGPNADHIVMDMTHLGVETIMKRLPSVFEIGKNFANVDITKEPIPVIPTIHYMMGGIPTTIHGQVIVPDLEAGTDEDGLYAKGNVIKGLYAIGECACVSVHGANRLGTNSLLDLLVFGRAAGKHIVDEFHHADHNYKPLDPRVLDYTVSRLDKLQQSTSGYNAQDVADEIRATMQTHASVFRTQAMMDEGVAKILALGDKIDQIHLADKSQVFNTARIEAFEVANLYEVAKATMISAAQRHESRGAHSVSDYDRPEDDAYAPNGRNDNDWMKHTLWYSEGNKIIHKPVRKVPLTVDYIEPKVRVY

SEQ ID NO: 31896 - protein, 1050 aa, Legionella pneumophila str. Lens
MLEKQSIHLPEGLRAAINKAYRMDELSLITELSEQAALDPQQMMAIKTSATKLVQSVRSERKKSTGIDSFLTEYALSSDEGIALMCLAEALLRVPDNATIDNLIKDKLAGGDWGAHRGQSESFFVNATTWALMLTGKVLTPEKAENTLTKALLKLVNRSSEAVVRKAVDKAMRIMSKQFVMGRTINEALARAKKKEDRGYRYSYDMLGEAALTSADAARYFEAYKEAIISIGEKADKHSDVYRRPGISIKLSALHPRYSEFQYERVIEELPPKLLALSRLAKDYDIALTIDAEESERLDLSLDVIEKVFTDESLQGWNGFGLAVQSYQKRAFYVLDWVAALARSKQRRIMVRLIKGAYWDSEIKKTQMQGFSEYPVFTRKVFTDVSFQACAKKILTMTDAIYPQFATHNAYSVAMILNLVGGYRDFEFQCLHGMGNELYEQIVPANCYGIPCRIYAPVGSHEDLLPYLVRRLLENGANSSFVNRIVDDKAPISELVEDPVTKSKSLLDKINKNIPLPEDIFLPVRKNSKGFDFTNRLERALLQQELEKIESKEWQASPMIAGRKLSRDLLQTVMSPQQPAYAIGSVQQATLDDVEVALNQAKLAFELWSKKPVEERASCLNRFADLLQANMAELMVLTCREAGKTWSDGIAEVREAIDFCRYYAKKAQELMSSPQHFNGYTGELNELSLHPRGTILCISPWNFPLAIFTGQVVAGLVTGNCVIAKPAEQTPLIAAYAVKLMHQAGIPEGVIQLIPGAGETIGAALVADKRIKAVLFTGSTDTANLINRTLATRGGEIIPLIAETGGQNAMIVDSSALLEQVVVDAVTSAFGSAGQRCSALRVLYVQEEVYPRTVELLKGAMAELVVGDPQWLSTDVGPVIDKEALSILKNHVENMRKHHEILYQCTVDDEALSGYFMPPTAIAIDSISALEKEVFGPILHVIQFKRKDLDKVINQINQTGYGLTLGIHSRINETVDYIRQRVHAGNCYVNRNMIGAVVGLQPFGGEGLSGTGPKAGGPNYLIRLCHERTYTVDTTAAGGNASLMSIPEEG

SEQ ID NO: 31897 - protein, 329 aa, Mycobacterium bovis AF2122/97
MSASPLKVAVTGAAGQIGYSLLFRLASGSLLGPDRPIELRLLEIEPALQALEGVVMELDDCAFPLLSGVEIGSDPQKIFDGVSLALLVGARPRGAGMERSDLLEANGAIFTAQGKALNAVAADDVRVGVTGNPANTNALIAMTNAPDIPRERFSALTRLDHNRAISQLAAKTGAAVTDIKKMTIWGNHSATQYPDLFHAEVAGKNAAEVVNDQAWIEDEFIPTVAKRGAAIIDARGASSAASAASATIDAARDWLLGTPADDWVSMAVVSDGSYGVPEGLISSFPVTTKGGNWTIVSGLEIDEFSRGRIDKSTAELADERSAVTELGLI

SEQ ID NO: 31898 - protein, 436 aa, Ralstonia metallidurans CH34
MGLLDDRKSGLLPGGHAAFERIDLTVPGFLQGCLSLARALAVLAYHDDGDGLILCKTARPVGQVVEWRALRLRHVALGELGSVADIHHHRIALVDQLRGGGRIDAFSARAALDRRPGQQAARDHGDGDQGQVIVIGEEIHVGIPLGWVGGIIKYAVSCPRRYLSVASRPPPALRRIVRTAGHLLPGSSMYKLVLIRHGESTWNLENRFTGWVDVDLTDTGAAQAKQAGTLLKEAGFAFDVAYTSVLKRAIRTLWHVQDEMDLMWIPVRNEWRLNERHYGALAGLNKAETAKKYGDEQVLVWRRSYDTPPPALEPTDERASFGDPRYANVPRAEIPLTECLKDTVARVMPLWNESIAPDIKSGKRVVIAAHGNSIRALVKYLDQISDDDIVGLNIPNGTPLVYELDADLRPLRHYYLGDQEAIAASLAAVASQGKAR

SEQ ID NO: 31899 - protein, 483 aa, Psychrobacter arcticus 273-4
MKDSYDLVVIGGGPGGYEAAIRAGQLGMSVACIEKRVYKGEPALGGTCLNVGCIPSKALLDSSHRYEATKHDLAEHGISTGDVAIDIEQMIARKEGIVKQLTGGIAALLKGNGVDWLQGWGTLVDGKGNDKKVKFTALADDSETTITAKNVILAAGSVPIDIPVAKTDGDRIVDSTGALDFTAVPKRLGVIGAGVIGLELGSVWRRLGAEVVVYEALPSFLAAADKDIAKEAGKMLKKQGLDIRVDTKVTNAEVKGDQVIVTSEAKGESSEESFDKLIVCVGRRAYSEKLLGEDSGIQLTERGLIDVNDQCKTNLDGVYAIGDLVRGPMLAHKAMEEGMMAVERIHGDKAQVNYDTIINVIYTHPEIAWVGLTEQEAEAAGYEVKTGSFNLAANGRALAQSEAQGSIKVVADAKTDRLLGMHAISAGAGDIVHQGMIAMEFVSSIEDLQLMTFAHPTISEAVHEAALSADGRAIHAIQRKKRK

SEQ ID NO: 31900 - protein, 343 aa, Psychrobacter arcticus 273-4
MKHKILVTGGAGYIGSHTCIALHEAGYDVVIYDNLSNSSREAVNRVSSLIGQPIEFIEGDVRNTESLRQVFAAQPFFGVIHFAGLKAVGESVAKPLMYYDNNVSGTINLLEIMKEHDVKNFVFSSSATVYGDPETLPIDERSKRSCTNPYGQSKLTVEHILEDLAASDKSWSLIPLRYFNPVGAHSSGSIGEDPNDIPNNLMPYISQVAVGKLDKLSIFGNDYATVDGTGVRDFIHVTDLAEGHVAALNYLKQQPQSLGFLPINLGTGKGTSVLELLRAFSVVSGQNIPFQFVDRRAGDIASCYASADKARELLGWQATLSITDMCQDTWRWQSMNPNGYNLV

SEQ ID NO: 31901 - protein, 365 aa, Leptospira interrogans serovar Copenhageni str. Fiocruz L1-130
MEWIRSLPVFNGILLAVLILILIFPKDCSLSSIFYGKKPISPREQKNAIEIQNSFRNVYRLAKDSVVSIRTKKSESITSPYHYFDFRNERLASFGSGFFVHEKGYIVTNYHVIEDAESIEVITSNGSIHPAKYIGSHERADIALLKIREGSGLRAVVFGDSDRIEVGDWAIAIGSPFGLERSFSVGVVSAKYREDLDETGQAHIQTDSMINPGSSGGPLLNIYGEVIGINRLIRSETGRNSGISFAIPSNYALKIIRMIESNQGRHIRSAILGVMATVPLPDHRIALGIPESWNGVLVYDMDPQSSAELGGIRRYDFILEANGTPIKNINDLREQVGIVGLGGKIKLRIYREKSMQELSIKLIQK

SEQ ID NO: 31902 - protein, 434 aa, Leptospira interrogans serovar Copenhageni str. Fiocruz L1-130
MRRNIVHSGADALIYEIRQIVAVAKKLEALGLQITYENIGDPILKGESIPDWMKEIVSNLILKDKSWAYTATQGYEPTRKFLAEKVNERGGAQISADDLLFFNGLGDAVAKIFGFMRREARVLGPSPAYSTISSAEAAHSGYEHLTYNLLPEHNWMPDLEDMENKVKYNDSIAGILLINPDNPTGAVYDKNLMKKIVAICEKYDLMLICDETYAHVNYSDHGPLHLSEVIGDKVPGMALRSISKEFPWPGGRCGWLEIFNKEKDPVFSRYVKSLLDAKMLEVCSTTLPQMAIPEVYSHPDFIPHLKRRNEKFKKRAHVATEYFAELRGVKVVEPKGAFYLTVAFDDDVLNSSMKLEIENKKADEFIQPLLASAANDRRFVYYLLASTGICVVPLSAFCTLKDGFRVTLLEEDEEKFNWIYKTLRDKIGEYIASA

SEQ ID NO: 31903 - protein, 65 aa, Passiflora menispermifolia
GTNGEVMPGQWEYQVGPSVGIDAGDHIWCSRYILERITEQAGVVLTLDPKPIEGDWNGAGCHTNY

SEQ ID NO: 31904 - protein, 309 aa, Vibrio vulnificus CMCP6
MNHINRVAIIGECMVELKKVNGELQQGFGGDTLNTAVYLSRLTQQSGVSTSYVTGLGQDPFSREMLAAWQDEGINTDMVYLSQDKLPGIYAIETADNGERSFFYWRNDSAAKYWLRDRAILTLAKELCQHQMIYLSGISLAILSQDCREALIKLLALCRSDGVKIAFDNNFRPALWSNVADAQAFYQQILQVTDMAFLTFDDEMLLWGDTHEDQAIERTKGFGVSEIVIKRGGDECFVVTEAGRHAVAPLKIDHVVDTTAAGDSFSAGYLAKRILGGDCQQAAFAGHTVAGHVIQHRGAIIPREAMPTI

SEQ ID NO: 31905 - protein, 185 aa, Xanthomonas campestris pv. campestris str. ATCC 33913
MSLNRLLVLVFAGLFSTAAVAAGTSVLDLDYRPLAGKAPINLNRSYGGKVVMVVNTASKCGFTPQYEGLEALNQRFGSRGFTVLGFPSNDFQGQEPGSEKQIQEFCTLTYGVKFPMFEKVHVLGAQATPLYQRLTRETGVAPGWNFHKYLIGRNGHVVAQFPSKVKPDDPQVLAAIERELKAPAR

SEQ ID NO: 31906 - protein, 43 aa, Passiflora mixta
WEYQVGPSVGIDAGDDIWCSRYILERITEQAGVILSLDPKPIE

SEQ ID NO: 31907 - protein, 782 aa, Oryza sativa
MNPSARISQVAMAAILPDLATQVLVPAAAVVGIAFAVVQWVLVSKVKMTAERRGGEGSPGAAAGKDGGAASEYLIEEEEGLNEHNVVEKCSEIQHAISEGATSFLFTEYKYVGLFMGIFAVLIFLFLGSVEGFSTKSQPCHYSKDRMCKPALANAIFSTVAFVLGAVTSLVSGFLGMKIATYANARTTLEARKGVGKAFITAFRSGAVMGFLLAASGLVVLYIAINLFGIYYGDDWEGLFEAITGYGLGGSSMALFGRVGGGIYTKAADVGADLVGKVERNIPEDDPRNPAVIADNVGDNVGDIAGMGSDLFGSYAESSCAALVVASISSFGINHEFTPMLYPLLISSVGIIACLITTLFATDFFEIKAVDEIEPALKKQLIISTVVMTVGIALVSWLGLPYSFTIFNFGAQKTVYNWQLFLCVAVGLWAGLIIGFVTEYYTSNAYSPVQDVADSCRTGAATNVIFGLALGYKSVIIPIFAIAFSIFLSFSLAAMYGVAVAALGMLSTIATGLAIDAYGPISDNAGGIAEMAGMSHRIRERTDALDAAGNTTAAIGKGFAIGSAALVSLALFGAFVSRAAISTVDVLTPKVFIGLIVGAMLPYWFSAMTMKSVGSAALKMVEEVRRQFNSIPGLMEGTTKPDYATCVKISTDASIKEMIPPGALVMLSPLIVGIFFGVETLSGLLAGALVSGVQIAISASNTGGAWDNAKKYIEAGASEHARTLGPKGSDCHKAAVIGDTIGDPLKDTSGPSLNILIKLMAVESLVFAPFFATHGGILFKWF

SEQ ID NO: 31908 - protein, 472 aa, Haemophilus ducreyi 35000HP
MKKSILSSLVLGLSVLSVPAMSQAVLPTILGGQALPSLASMIEKVRPAVVSIAIEGKTKVENAQYKRELPEELQFFFGPDIFGERFAERFGFGFGEQRNVPRNFRGQGSGAIINAEKGYVITNNHVIKDAEKITIKLEDGREFKAKLIGSDALSDVALVQIENPKNLTELKFADSDKLRVGDYSVAIGNPFGLGQTVTSGIISALGRSTGNSDESYENFIQTDAAVNQGNSGGPLLDLNGELIGINTAIISPSGGNAGIAFAIPSNMANSLVQQIIEHGEVQRGMLGIKGGELNSDLAKEFKIDAQQGAFVSEVLTDSAAAKAGLKAGDVIIGLNGKRINGFGELRAKVATSGVGKEIELTYLRDGKEQKAKVMLEADNSGKNGKNKDLIAGLKGAEFANINKNGVKGVEIVKIQKGSMAEYRGLAEGDVIVGVNRVLIENIKQLREVLDKKPAVIALNIMRGGSNFYLIIQ

SEQ ID NO: 31909 - protein, 138 aa, Rubrivivax gelatinosus PM1
MSSTDDKPRKVQKTEAEWRAQLDPMQFEVTRHGATERAFTGKYADHWQEGVYHCVGCNAPLFDSGTKFDAGCGWPSYFQPLRGEIIDRVVDRSHGMVRVEVRCQDCGAHLGHVFPDGPEPTGERYCINSASLGFEPRK

SEQ ID NO: 31910 - protein, 53 aa, Passiflora mixta
WEYQVGPSVGIDAGDDIWCSRYILERITEQAGVILSLDPKPIEGDWNGAGCHT

SEQ ID NO: 31911 - protein, 574 aa, Aspergillus fumigatus
MANPPHGGVLRTLLARDAPRHDELEMEAEKLPAIVLTERQLCDLELIMNGGFSPLEGFMNQKDYDSVCENVRLADGNLFSMPITLDVSQAVIDEGKLKPGSRVTLRDFRDDRNLAILTIDDIYRPDKAKEAKLVFGGDEEHPAIKYLYNKVQEFYVGGKIEAINKLNHYDYVALRYTPAELRVHFDKLAWNRVVAFQTRNPMHKAHRELTVRAARARQANVLIHPVVGLNKPGDIDHFTRVRAYQALLPRYPNGMAVLGLLGLAMRMGGPREAIWHAIIRKNHGATHFIVGRDHAGPGKNSKGQEFYGPYDAQHAVEKYREELGIEVVEFQQVTYLPDTDEYKPKDEVPPGVKTLDISGTELRNRLRTGAPIPEWFSYPEVVKILRESSPPRHTQGFNIFLTGYMNSGKDAIARALQVTLNQQGGRSVSLLLGDTVRHELSSELGFSREDRHTNIQRIAFVAGELTRAGAAVIASPIAPYEESRNAARDAVTQAGGNFFLVHVATPLEYCEKTDKRGIYAKARRGEIKGFTGVDDPYETPSKADLTVDVSKQTVRSIVHEIVLMLETEGFFDRS

SEQ ID NO: 31912 - protein, 967 aa, Zea mays; identical to SEQ ID NO: 1008

SEQ ID NO: 31913 - protein, 75 aa, Passiflora mooreana
GTNGEVMPGQWEYQVGPSVGIDAGDHIWCSRYILERITEQAGVVLTLDPKPIEGDWNGAGCHTNYSTKSMREDGG

SEQ ID NO: 31914 - protein, 555 aa, Arabidopsis thaliana
  misc_feature (8)..(8): Xaa can be any naturally occurring amino acid
  unsure (1)..(555): unsure at all Xaa locations
MLTKPGKXLDSSESTHHTTSANYPPLDIVHQTPQPRKEMQQKPLFDPKKMDNLIKPEPAGFTNHHRPNPSPKIPSSPGSNMTESQSNLNTKPNNNNSNNNSNMSSRSNSIESTSSNPSKPHTGGDIRWDAVNTLTSKGVQLGISDFRLLKRLGYGDIGSVYLVELRGTITYFAMKVMDKASLASRNKLLRAQTEREILSQLDHPFLPTLYSHFETDKFYCLVMEFCGGGNLYSLRQKQPNKCFTEDAARFFASEVLLALEYLHMLGIVYRDLKPENVLVRDDGHIMLSDFDLSLRCSVSPTLVKSSSVHAAGGGSGSSRPVGLIDEDAAVQGCIQPSTFFPRILQSSKKNRKAKSDFGLFVNGSMPELMAEPTNVKSMSFVGTHEYLAPEIIRGEGHGSAVDWWTFGIFIYELLYGATPFKGQGNRATLHNVIGQALRFPEVPHVSSAARDLIKGLLVKEPQKRIAYKRGATEIKQHPFFEGVNWALIRSATPPHVPEPVDFSCYASKDKESMAAVDGGGKKNNNGAGGGCSTGGGDNKPNGDCNDPDYIDFEYF

SEQ ID NO: 31915 - protein, 165 aa, Salmonella enterica
GASLGLWEICIIWGLGISLAVYLTAGISGGHLNPAVTIALWLFACFPKQKVLPYIIAQFAGAFGGALLAYVLYSSLFTEFETAHHMVRGSVESLQLASIFSTYPAAALNVWQAALVEVVITSILMGMIMALTDDGNGIPKGPLAPLLIGILVAVIGASTGPLTGF

SEQ ID NO: 31916 - protein, 564 aa, Brassica juncea
MASTPKLTTTISSSPSLQILCRKLPTAINLPSSPTSRSLPKTLSHLSSLRLRAASVSNHRYYSSSSSSRRFSVRAQNDNGADSDRHYDFDLFTIGAGSGGVRASRFATSYGASAAVCELPFSTISSETAGGVGGTCVLRGCVPKKLLVYASKYTHEFEDSQGFGWKYDTEPSHDWSTLIANKNAELQRLTGIYKNILNNANVKLIEGRGKVIDPHTVDVDGKIYTSRNILIAVGGRPFIPDIPGREFAIDSDAALDLPSKPEKIAIVGGGYIALEFAGIFNGLGSEVHVFIRQKKVLRGFDEDVRDFVGEQMSLRGIEFHTEESPEAIIKAGDGSFSLKTSKGTADGFSHVMFATGRKPNTKNLGLENVGVKLAKNGAIEVDEYSRTSVPSIFAVGDVTDRINLTPVALMEGMALAKTLFQNDPTKPDYRAVPCAVFSQPPIGTVGLTEEQAIEQYGDIDVFTSNFKPLKATLSGLPDRVFMKLIVCANTNKVLGVHMCGEDSPEIIQGFGVAVKAGLTKADFDATVGVHPTAAEEFVTMRTPTRKIRKESSEGKASVEAKTAV

SEQ ID NO: 31917 - protein, 153 aa, Salmonella enterica
IWGLGISLAVYLTAGISGEHLNPAVTIALWLFACFPKQKVLPYIIAQFAGAFGGALLAYVLYSSLFTEFETAHHMVRGSVESLQLASIFSTYPAAALNVWQAALVEVVITSILMGMIMALTDDGNGIPKGPLAPLLIGILVAVIGASTGPLTG

SEQ ID NO: 31918 - protein, 573 aa, ASPERGILLUS NIDULANS FGSC A4
MKSFSSSVINKSGKKFAPKAPARRAPPAPPRAPSRRPSVASQGSALHAPVTTSVTATPEPPLPATSIEPSAQSETTIAGSGGVPTVAPTVEHAPKEQTATAIPIPAPKHKASVPVPIPAPRSTTNISPAPSASTTTTVEPVAQAPSRPDENREVTRPGPDNVQNEQRHAPSDVAADSDNEVVPEGRPSKRLRTSIESVLTTTSPQPEEELAQLATPPSTQIPALEERTESRDESEVPGLARRSESAPKKKGRRASRSTSNDAGKIKKERKRRTRNREPTPDGAELIEIAPAVVKMSDLCKDTRTGKRSKRETELRAHELAEAERKKSQQEGGQKDETAAKQTLNESVLKEDQTGSTPNKSSQAGPVMRIVNGEIVLDTASLQVDRHADAERNGDDLEDVVENSLTRKVNQATYGKRSKTESWDEDMTELFYRGLRMFGTDFMVISKMFPGRSRRQIKLKFNNEERRDPQRIRETLLGPRESIDINTYSEMTNTVYDDPRLIQQELDEEKKRIEEQYEKDKKAQEDLLRNPDGVAGNNALGVDKVAIKGKRNNKKQSARDFGGGTEEILGSIDD

SEQ ID NO: 31919 - protein, 575 aa, Glycine max
MAASLFMPSSIVDEEARFEAEVAEVQAWWNSERFRLTKRPYTARDVVSLRGNLRQTYASNEMAKKLWCLLKNHQANGTASRTFGALDPVQVTQMAKHLDTIYVSGWQCSATHTTSNEPGPDLADYPYDTVPNKVEHLFFAQQYHDRKQREERMRMSREERARTPYVDYLRPIIADGDTGFGGTTATVKLCKLFVERGAAGIHIEDQSSVTKKCGHMAGKVLVAISEHINRLVAARLQFDVMGVETVLVARTDAEAANLIQSNIDTRDHQFILGVTNPNLKGKSLATLMQQGMAAGKSGAELQALEDEWLSKAQLKTLSEAVVEAIERQNIGEEEKRRKLNEWMHHSSYERCLSNEEGREIAEKLGVRNLFWDWDLPRTREGFYRFKGSVIASVVRGWAFSPHADVIWMETASPNVIECTQFSEGVRSKHPQMMLGYNLSPSFNWDASGMSDEQMRDFIPKIAKLGYVWQFITVGGLHSNALITSTFARDFANRGMLAYVERIQREERNNGVDTLAHQKWAGANYYDRYLKTVQGGVASTAAMGKGVTEEQFKESWTRPGAVEIDRGSIVVAKARM

SEQ ID NO: 31920 - protein, 845 aa, Arabidopsis thaliana
MRDIRGFAVKFYTREGNFDLVGNNTPVFFIRDGIQFPDVVHALKPNPKTNIQEYWRILDYMSHLPESLLTWCWMFDDVGIPQDYRHMEGFGVHTYTLIAKSGKVLFVKFHWKPTCGIKNLTDEEAKVVGGANHSHATKDLHDAIASGNYPEWKLFIQTMDPADEDKFDFDPLDVTKIWPEDILPLQPVGRLVLNRTIDNFFNETEQLAFNPGLVVPGIYYSDDKLLQCRIFAYGDTQRHRLGPNYLQLPVNAPKCAHHNNHHEGFMNFMHRDEEINYYPSKFDPVRCAEKVPTPTNSYTGIRTKCVIKKENNFKQAGDRYRSWAPDRQDRFVKRWVEILSEPRLTHEIRGIWISYWSQVRPSSAHDSPFFTTNSGAPVWNNNSSLTVGTRGPILLEDYHLLEKLANFDRERIPERVVHARGASAKGFFEVTHDITQLTSADFLRGPGVQTPVIVRFSTVIHERGSPETLRDPRGFAVKFYTREGNFDLVGNNFPVFFVRDGMKFPDMVHALKPNPKSHIQENWRILDFFSHHPESLHMFSFLFDDLGIPQDYRHMEGAGVNTYMLINKAGKAHYVKFHWKPTCGIKCLSDEEAIRVGGANHSHATKDLYDSIAAGNYPQWNLFVQVMDPAHEDKFDFDPLDVTKIWPEDILPLQPVGRLVLNKNIDNFFNENEQIAFCPALVVPGIHYSDDKLLQTRIFSYADSQRHRLGPNYLQLPVNAPKCAHHNNHHDGFMNFMHRDEEVNYFPSRLDPVRHAEKYPTTPIVCSGNREKCFIGKENNFKQPGERYRSWDSDRQERFVKRFVEALSEPRVTHEIRSIWISYWSQADKSLGQKLATRLNVRPNF

SEQ ID NO: 31921 - protein, 429 aa, Phragmites australis
MAQPVVPAMQCQVGARGKAAVRARPAGAGGRVWGVKRSGRGTSGFKVMAVSTESTGVVPRLEQLLNMDTKPFTDKIIAEYIWVGGSGIDLRSKSRTLSKPVEDPSELPKWNYDGSSTGQAPGEDSEVILYPQAIFKDPFRGGNNILVICDTYTPAGEPIPTNKRHRAAQIFSDPKVVDQVPWFGIEQEYTLLQTDVNWPLGWPVGGYPGPQGPYYCAVGADKSFGRDISDAHYKACLYAGINISGTNGEVMPGQWEYQVGPSVGIEAGDHIWISRYILERITEQAGIVLTLDPKPIQGDWNGAGCHTNYSTKSMREDGGFEVIKKAILNLSLRHDLHISAYGEGNERRLTGLHETASIDNFSWGVANRGCSIRVGRDTEAKGKGYLEDRRPASNMDPYVVTSLLAETTILWEPTLEAEALATKKLALKV

SEQ ID NO: 31922 - protein, 308 aa, Clostridium perfringens str. 13
MKVDIISGFLGAGKTTLIKKLLDTLVKDEKVAIVENEYGEVGIDGDLLKDRRIEVKEINSGCICCTIKGDFKQNILDIISNYRPDRVIIEPSGVANFSQVLESIKEAHIEGLRINMKITMVDAQNVHMYMKNFGDFYRSQLVNANTIILTRVEKLSDKEITHVCNEIKTINNKANIITTELSKLSPERIIQVSEKKVESLIENINIKKPKRIGLRRVSAPEFFENWGVETPKTFEYSELVKILNEFQNNKHGEVLRAKGIIKSKDNKWFKFDFVPNDISIVNYKSDYTGRVCVIGRNLNKDSIDKLFS

SEQ ID NO: 31923 - protein, 77 aa, Fragaria x ananassa
PTDWRSPYAHVLVSDLPGMKKEEVKVEVDDGRVLQISGERKVKDGNGGSDKNDPECKWHRVERCRGKFLRRFTQDSS

SEQ ID NO: 31924 - protein, 630 aa, Fusarium oxysporum
MSLLRLCMHASPLRALRYSFIPNRVQLARSTTILHPARFTTMPPKRTKRESSSPPAKKAKTSKTNGSSTSDALRQPHHKAGEAEENGIAIRKFYPPEMSNARARAYNNNELPRPIEVLISALENTAQERKSIDVKKAVVHWFKMDLRLSDNRALALASDKAKEAGVPLIAMYIISPQDYEAHLRSPVRVDFMLRTLEVIKHDLAKLDIPLYVETVEKRKRVPDRILELMDQWGAGHLYANMEYEVDELRREASMIRDFAENGKAFEVVHDTCVVPPGELHTGAGKQYAVYTPWYRSWVAHIHENLDLLELYEPPEKNPSSARKVFAKLFDVEIPDAPKSKRLDGEEKERLRSLWPCGEHEAKKRLDKFCEEMIGNYQKKRNIPAEAGTSSISVHLASGTISARTCVRTARDRNKTKKLNGGNEGIQTWISEVAWRDFYKHVLVHWPYVCMNKPFKPEYSNISWSYDNEHFAAWCEGRTGFPIVDAAMRQLNHLGYMHNRCRMIVACFLAKDLLLDWRKGERYFMEHLVDGDFASNNGGWGFSASVGVDPQPYFRIFNPLLQSEKFDPDGDYIRKWVPELKDLDRKAIHDPYNRGAGSKAKKNGYPAPIVTHKDCRDRALAAYKEGLASGE

SEQ ID NO: 31925 - protein, 483 aa, Solanum tuberosum
MGKKLKYTKFQLRSNVVKPNICMSLTTDIAGEAKLKDLERQKKGDARTVVAIILGGGAGTRLFPLTKRRAKPAVPMGGAYRLIDVPMSNCINSGINKVYILTQFNSASLNRHIARAYNFGNGVTFESGYVEVLAATQTPGELGKRWFQGTAHAVRQFHWLFEDARSKDIEDVLILSGDHLYRMDYLHFVQSHRQSGADITISSLPIDDSRASDFGLMKIDDTGRVMSFSEKPKGDDLKAMAVDTTVLGLSPEEAKEKPYIASIGKVYVFKKDILLNLLRWRFPTANDFGSEIIPASTKEFCVKAYLFNDYWEDIGTIRSFFRANLALTEHPPRFSFYDATKPIYTSRRNLPPSAIDNSKIVDSIVSHGIFLTNCFVEHSVVGIRSRIGTNVHLKDTVMLGADYYETDAEIRSQLAEGKVPLGIGENTRIKDCIIDKNARIGKNVVIANSEGVQEADRSSEGFYMASGITVISKNSTIPDGTVI

SEQ ID NO: 31926 - protein, 268 aa, Oryza sativa (japonica cultivar-group)
GADGKLSRRYAAAPVCKWLTPNEDGVSMAALALMNQDKVLMESWYYLKDAVLDGGIPFNKAYGMTAFEYHGTDARFNRVFNEGMKNHSVIITKKLLDLYTGFDAASTVVDVGGGVGATVAAVVSRHPHIRGINYDLPHVISEAPPFPGVEHVGGDMFASVPRGGDAILMKWILHDWSDEHCARLLKNCYDALPEHGKVVVVECVLPESSDATAREQGVFHVDMIMLAHNPGGKERYEREFRELARAAGFTGFKATYIYANAWAIEFTK

SEQ ID NO: 31927 - protein, 112 aa, Fragaria x ananassa
EITGHPAGITQLQRVGIGLVLSAVSMAVAGIVEVKRRNYALAHSPLAPGGISLFWLSFQYAIFGIADMFTLVGLLEFFYREAPAGMKSLSTSFTWLSLSFGYFLSSTLLRTH

SEQ ID NO: 31928 - protein, 435 aa, Schizosaccharomyces pombe
MTDLRRNRYSISAGVGKSVLDSLGKFYGSPKRQLPNKFEAGKEYTGYNAPWIPFALDWLKQGKYSSEWIAMGSLNEEPNNMIQLLKLITGDDGNSHLEKAQAATDLEYPVTKLLWNPSSVGSNTDSQLLASTDQQLRLWKTDFEAGIDSPLLCQASLSTHVKTHNNAPLTSFDWCKTDPSYIVVSSLDTTCTVWDIVAQQSKTQLIAHDKEVYDVAFLKDSINVFVSVGADGSVRMFDLRSLDHSTIIYEGDSTFWKRNGDYTNASPPVSAPLLRLSACDSDVNLMATFHHNSSDVQMIDIRVPGTAYATLRGHKGDVNAVKWMPGSKSKLATCGDDCVVSLWDLDQPVNPSPAPTLSVSGTTPGMTGSTSEYVTPVSSVNSMRETASPLNADNQYSPLLSWKLEHEVNNLSWSVKNDGLAVVYGKSLEILKVPQ

SEQ ID NO: 31929 - protein, 299 aa, Candidatus Carsonella ruddii
MNLFNFVKKKIKISIDSADLNLIKKYNFDSLTSNPSLILLSFLNNSYNKILKFFFKNNNKKILLDPDTEISFYDYLLIFVVCNLIKFIKDKISIEIPARISYNYNKIIIYSQKILFLCDQFGINKNRILIKIPATDSGIKAASKLKLSGIECNLTLIFDLNQVKKCFDNEIYIISPFVGRISDIINCNFDSGVNFVKNIYNYKKNYNYKTKIMAASFRNLNQILNLLFCDYITISPIYFEKLLNKKINFNINDFQIFKINFNLNFLNLISSKLLINGIIQFEKDHNSLIKLIYFLINNF

SEQ ID NO: 31930 - protein, 676 aa, Treponema denticola ATCC 35405
MHLFNKSILNFKLGKYLTESNIAYIIFSPDYVPLFWSPEAERLLPDYLIKNTKIRLQDYLKTVLLEEDYIRLSAFIKSNPKTAAFEAKFDKPSSLSDKTALKFSFTQQDDNNFFVTIDDITKQKLKERFLIIARQDAEKANSMRSLFLANVSHEIRTPIQTIIGMMELINETNLDEEQSEYTRQVNFSAEVLLTLVNDVLDFSKLESGNMTMERTVFNLTDSVEQTVDLISMEAHKKGLEIVVDISDKIPDFIYGDPARLQQVLLNFVKNAVKFTETGYVSVSVKLVFENNSDDPYAAKHFFILFEVADTGIGVNNEQKSKIFNSFYQGNAAINRKYGGTGLGLAISKNIITMMKGQIGIKDNIPRGSVFWFKIPLVPSKKKAPHESILLDKSTRFLIVDDNMQTRTILKRMLLKFGFEDIALVSSGEQAIGVMKTAAEHKNPFNVVFIDMVMPKMDGWRLGAEIHNDDSLSASKLFLMIPEGSLGRDAKMKLLEWFDGYLYKPLKSRIVFHLLNELYRKLAIALEKDDIPELEPVEAGGQGQQNGNVHNFNEDNFFGCKVLVVDDHPVNQKLLKIILEKAHCIVSTANDGEEAIDTASSEHFDIIFMDIQMPGINGYEATQILRGKGYSRPIIACTAGSQDNERNLCKSMGLNDIIKKPFNKKQLFEMVKKHYKK

SEQ ID NO: 31931 - protein, 154 aa, Zea mays
MGRSPCCEKAHTNKGAWTKEEDQRLVAYIKAHGEGCWRSLPKAAGLLRCGKSCRLRWINYLRPDLKRGNFTQEEDDVIIKLHQVLGNKWSLIAAQLPGRTDNEIKNYWNTHIKRKLIARGIDPRTHQPASAAAVAPAAAAAAAAQSSFRHHGDD

SEQ ID NO: 31932 - protein, 642 aa, Zea mays
MDFSRRRGRRTAPVAAIRTLHPIDTRSRDPSRPDPTLPRPPALSSPPPPPAVPSDPSQARVEDMASTFGATSTVGLMAAPTGKNVRLQRRVNFRVRAAKELYFNKDGSAIKKLQTGVNKLADLVGVTLGPKGRNVVLESKYGSPKIVNDGVTVAREVELEDPVENIGAKLVRQAAAKTNDLAGDGTTTSVVLAQGLIAEGVKVVAAGANPVQITRGIEKTAKALVEELRKLSKEVEDSELADVAAVSAGNNYEIGNMIAEAMSKVGRKGVVTLEEGRSSENFLYVVEGMQFDRGYISPYFVTDSEKMSAEYENCKLLLVDKKITNARDLINVLEEAIRGGYPILIIAEDIEQEALATLVVNKLRGSLKIAAIKAPGFGERKTQYLDDIAILTGATVIRDEVGLSLDKADKSVLGTAAKVVLTKESTTIVGDGSTQDEVTKRVAQIKNLIEAAEQEYEKEKLNERIAKLAGGVAVIQVGAQTETELKEKKLRVEDALNATKAAVEEGIVVGGGCTLLRLAAKVDAIKDTLENDEQKVGAEIVRRALSYPLKLIAKNAGVNGSVVTEKVLSNDNFKYGYNAATGQYEDLMAAGIIDPTKVVRCCLEHAASVAKTFLTSDVVVVDIKEPEAAPLANPMDNSGYGY

SEQ ID NO: 31933 - protein, 352 aa, Xanthomonas campestris pv. campestris str. ATCC 33913
MLPVHRVLRHLGLASARRTGGGARMSAAKNQVVCFGEALIDMLALPPAGPDEARTFAQYAGGAPANVAVAVARLGGAAHFVGMLGRDMFGDFLLESLQQAGVVTDGIVRTDEAKTALAFVALDAAGERSFSFYRPPAADLLFRAEHFAADGFAQAAVLHVCSNSMTEPAIARCTLDGMRRARADGAIVSLDLNLRPMLWPQDVDPAPLLWEALALADVVKLSREELDYLAGTLDSDASAVTQKLWQGHARWLLVTDGGGPVHWQTRVDSGQVPAFHVQVRDSTAAGDAFVGGLLFQLAARASTLEQLCADPAAIAEVIRFAAAVGALAVTRKGAFAAMPSVDEVHSLIQEQS

SEQ ID NO: 31934 - protein, 58 aa, Passiflora multiflora
WEYQVGPSVGIDAGDHIWCSRYILERITEQAGVVLTLDPKPIEGDWNGAGCHTNYSTK

SEQ ID NO: 31935 - protein, 312 aa, Arabidopsis thaliana
MLEVRSMDMTPKSPEPESETPTRIQPAKPISFSNGIIKRHHHHHHNNNKVTYKECLKNHAAAIGGHALDGCGEFMPSPSSTPSDPTSLKCAACGCHRNFHRRETDDSSAVPPPSLLPSSTTTAAIEYQPHHRHHPPPPLAPPLPRSPNSSSPPPISSSYMLLALSGNNKTAPFSDLNFAAAANHLSATPGSRKRFRTKFSSNQKEKMHEFADRIGWKIQKRDEDEVRDFCREIGVDKGVLKVWMHNNKNSFKFSGGGATTVQRNDNGIGGENSNDDGVRGLANDGDGGGGRFESDSGGADGGGNVNASSSSS

SEQ ID NO: 31936 - protein, 462 aa, Mycobacterium tuberculosis CDC1551
MIGIGGAIGTGLFLGAGGRLAKAGPGLFLVYGVCGVFVFLILRALGELVLHRPSSGSFVSYAREFFGEKAAYAVGWMYFLHWAMTSIVDTTAIATYLQRWTIFTVVPQWILALIALTVVLSMNLISVEWFGELEFWAALIKVLALMAFLVVGTVFLAGRYPVDGHSTGLSLWNNHGGLFPTSWLPLLIVTSGVVFAYSAVELVGTAAGETAEPEKIMPRAINSVVARIAIFYVGSVALLALLLPYTAYKAGESPFVTFFSKIGFHGAGDLMNIVVLTAALSSLNAGLYSTGRVMHSIAMSGSAPRFTARMSKSGVPYGGIVLTAVITLFGVALNAFKPGEAFEIVLNMSALGIIAGWATIVLCQLRLHKLANAGIMQRPRFRMPFSPYSGYLTLLFLLVVLVTMASDKPIGTWTVATLIIVIPALTAGWYLVRKRVMAVARERLGHTGPFPAVANPPVRSRD

SEQ ID NO: 31937 - protein, 59 aa, Passiflora murucuja
WEYQVGPSVGIEAGDHIWCSRYILERITEQVGVVLTLDPKPIEGDWNGAGCHTNYSTKS

SEQ ID NO: 31938 - protein, 346 aa, Yarrowia lipolytica CLIB122
MSTILVTGATGFIAGQVIADLLNHGHKVLGTVRQLSKASKLQEAFPEAHKSGKLTFATLSDVRSQDELKAIFASHPEIAVVMHTASPFFYNSEDVVKDLLEPALEGTRSVLQVTQDAGHNVHKVVLTSSVASMLDPFRNKDPSYVATEATWNPVTWDQAAESNNAELAYVASKTFAEQEAWKFVESTKPRFSLTTVNPAAVFGPHATKIDPKALNTSSDVINSLALDTKPGDTPGDFAFLWVDVRNVARAHTLAIDSKLDDKRLLLCNGKFAAQDLVDILNKNFSDIRGTIAEGTPGNGPRVAAQYFNYDNSNTRQLLDLQWIGLEQSIVDFTKQYEAAKSESRAD

SEQ ID NO: 31939 - protein, 85 aa, Pseudomonas aeruginosa
MRSRIASLRIGLVEALAPHGLAERFAHVGAQRGMFSYTGLSPQQVARLRDEHAVYLVSSGRANVAGLHARRLGRLAQAIAQVCAD

SEQ ID NO: 31940 - protein, 57 aa, Passiflora nephrodes
WEYQVGPSVGIDAGDHIWCSRYILERITEQAGVVLTLDPKPIEGDWNGAGCHTNYST

SEQ ID NO: 31941 - protein, 528 aa, Zea mays
MATLPLLLHLLWEASPWARAGAATAAVVLVWLAAWTLEWAWWTPRRLDRALRAQGLKGTRYRLLTGDVRENARLNREARTKPLPLGSHDIIPRVLPMFHNAVKENGTNSFTWFGPIPRVIIPDPELMREVLSNKFGHFGKPLFSRVGKLLANGLANHEGEKWAKHRRILNPAFHHEKIKRMLPVFATCCADMINRWENSMSSKEPSEMDVWPEFQNLTGDVISRTAFGSNYQEGRNIFQLQGEQAERLIQSFQTIFIPGYWLLPTKNNRRMKEIDREIRKILHGIIGKRERAFIDSEGTNDDLLGLLVESNMRESNGNAKLGMTTEDIIEECKLFYFAGMETTSVLLTWTLILLSMHPEWQEQAREEVLNHFGMGTPDFDNLNRLKIVTMILYEVLRLYPPVVFLSRRTYKEMELGGIKYPSGVSLLLPIIFIHHDPNIWGKDASEFNPQRFEDGISNATKHQAAFFPFGWGPRICIGQNFALLEAKMALSTILQRFSFELSPSYTHAPYTVITLHPQHGAQIRLKKL

SEQ ID NO: 31942 - protein, 617 aa, Magnaporthe grisea 70-15
MNQAAPTTAIDIAQIEEGIKMANLDTLRGYSNTTPAPVQQAIKTEYTPMSQAAGYQVIREPMWNKGLMFTPEERVSKNLTGLLPHTMETEDIACARAMKMIRSRSTNVDRYLYLSSLKSSNTDLFYRLLMDNVRELMPLVYTPTIGDVCLQYSSLFTRPEALYISIKQRKSIKTMLANWPYPNPEICVITDGSRILGLGDLGINGVGISIGKLALYTAAAGIHPSKQLPIVIDCGTNNEENLRDPLYLGLRSKRPSVQEQQDFCDEVMHSIKEVYPNMVVQFEDFETEKAFNYLDRYRFDPKLNCMFNDDIQGTGAVVLAGYINAVKLSNVPVEEQRLVFMGAGSAGAGVARQLVDYYRNAHGMSEQEAKDKFYLVDTKGLITSDRFDGAKLPSHKRYFARDDNNGHQFQTLEDVIEFARPSALVGLTATFGVFTESIVRGLKASVDAAGHRNRRPILFPLSNPLTKAECTFSQAIDWTDGTVIFASGSPFAPHTVKNGDSATTYYPNQGNNVYVFPGIGLGAILAKASRVTDEMVYTSAEALANCLNADEIATGLIYPRIDRVQDASLVVAREVMKCCRRQGFSKLDDELWKSWEEWGDNALMAWIKTKLYKPLKE

SEQ ID NO: 31943 - protein, 306 aa, Oryza sativa (japonica cultivar-group)
MAEKLLYPPPLLSHEEVANDRAAFMDTLRRFHSLMGTKFMIPVIGGKEMDLHALYVEVTSRGGLAKVMEERKWREVMARFSFPATTTSASYVLRRYYLSLLHHYEQVYFFRAHGALLRPAASALTKTPRRKMRGTSDQSPAAAEAGKRMALPERLGGEPCSFSVTGSIDGKFEHGYLVTVKIAAETLRGVLYRVAPPPPPPAAPPPPPPPARGRRRRGRRQRDPAQPRPNRSAYNFFFKEKHPELKATHPHREREYSRMIGDAWNRLAADDKMVYYRHSAEDKERYKREMQEYNERLKLAPSTMAG

SEQ ID NO: 31944 - protein, 517 aa, Sorghum bicolor
MDVPLPLLLGSLAVSVVVWCLLLRRGGDGKGKGKRPMPPGPRGWPVLGNLPQLGSHPHHTMCALAKKYGPLFRLRFGSAEVVVAASARVAAQFLRTHDANFSNRPPNSGAEHVAYNYQDMAFAPYGSRWRALRKLCALHLFSAKALDDLRSIREGEVALLVRELSRFQHQHAGVPLFQVANVCATNTLARATVGRRVFAVDGGEEAREFKDMVVELMQLAGVFNVGDFVPALARLDLQGVVGKMKRLHRRYDDMMNGIIRERKAAEEGKDLLSVLLARTREQQSIADGEDSRITETEIKALLLNLFTAGTDTTSSTVEWALAELIRHPDVLKKAQEELDAVVGRNRLVSELDLPRLTYLTAVIKETFRMHPSTPLSLPRIAAEECEVDGFRIPAGTTLLVNVWAIARDPEAWPEPLQFRPDRFLPGGSHAGVDVKGSDFELIPFGAGRRICAGLSWGLRMVTLMTATLVHALDWDLADGMTADKLDMEEAYGLTLQRAVPLKVRPAPRLLPSAYAAE
